(19) United States
(12) Patent Application Publication
(10) Pub. No.: US 2009/0081658 A1
(43) Pub. Date: Mar. 26, 2009

(54) GENEMAP OF THE HUMAN GENES ASSOCIATED WITH CROHN'S DISEASE

(76) Inventors: Abdelmajid Belouchi, Ville St-Laurent (CA); John Verner Raelson, Hudson (CA); Walter Edward Bradley, Montreal (CA); Bruno Paquin, Chateaugay (CA); Helene Fournier, Montreal (CA); Quynh Nguyen-Huu, Lorguevil (CA); Pascal Croteau, Laval (CA); Rene Allard, Montreal (CA); Sophie Debrus, Montreal (CA); Valerie Serre, Kirkland (CA); Paul Van Eerdewegh, Carlisle, MA (US); Randall David Little, Laval (CA); Tim Keith, Bedford, MA (US); Jonathan Segal, Efrat (IL); Tim Keith, Ville St-Laurent (CA)

Correspondence Address: Ralph A. Dowell of DOWELL & DOWELL P.C., 2111 Eisenhower Ave, Suite 406, Alexandria, VA, 22314, US

(21) Appl. No.: 12/064,797

(22) PCT Filed: Aug. 24, 2006
(86) PCT No.: PCT/US2006/033148

§ 371 Date: Oct. 1, 2008

Related U.S. Application Data
(60) Provisional application No. 60/710,726, filed on Aug. 24, 2005.

(51) Int. Cl. C12Q 1/68; C12Q 1/02

(52) U.S. Cl. 435/6; 435/29

(57) ABSTRACT

The present invention relates to the selection of a set of polymorphism markers for use in genome wide association studies based on linkage disequilibrium mapping. In particular, the invention relates to the fields of pharmacogenomics, diagnostics, patient therapy and the use of genetic haplotype information to predict an individual's susceptibility to Crohn's disease and/or their response to a particular drug or drugs.

### CROSS REFERENCE TO RELATED APPLICATIONS

[0001] This application is entitled to priority pursuant to 35 U.S.C. §119(e) to U.S. provisional patent application No. 60/710,726, which was filed on Aug. 24, 2005, which is incorporated herein in its entirety.

### FIELD OF THE INVENTION

[0002] The invention relates to the field of genomics and genetics, including genome analysis and the study of DNA variations. In particular, the invention relates to the fields of pharmacogenomics, diagnostics, patient therapy and the use of genetic haplotype information to predict an individual's susceptibility to Crohn's disease and/or their response to a particular drug or drugs, so that drugs tailored to genetic differences of population groups may be developed and/or administered to the appropriate population.

[0003] The invention also relates to a GeneMap for Crohn's disease, which links variations in DNA (including both genic and non-genic regions) to an individual's susceptibility to Crohn's disease and/or response to a particular drug or drugs. The invention further relates to the genes disclosed in the GeneMap (see Tables 8-10), which is related to methods and reagents for detection of an individual's increased or decreased risk for Crohn's disease by identifying at least one polymorphism in one or a combination of the genes from the GeneMap. Also related are the candidate regions identified in Table 1, which are associated with Crohn's disease. In addition, the invention further relates to nucleotide sequences of those genes including genomic DNA sequences, cDNA sequences, single nucleotide polymorphisms (SNPs), other types of polymorphisms (insertions, deletions, microsatellites), alleles and haplotypes (see Sequence Listing and Tables 2-7).

[0004] The invention further relates to isolated nucleic acids comprising these nucleotide sequences and isolated polypeptides or peptides encoded thereby. Also related are expression vectors and host cells comprising the disclosed nucleic acids or fragments thereof, as well as antibodies that bind to the encoded polypeptides or peptides.

[0005] The present invention further relates to ligands that modulate the activity of the disclosed genes or gene products. In addition, the invention relates to diagnostics and therapeutics for Crohn's disease, utilizing the disclosed nucleic acids, polymorphisms, chromosomal regions, gene maps, polypeptides or peptides, antibodies and/or ligands and small molecules that activate or repress relevant signaling events.

### BACKGROUND OF THE INVENTION

[0006] Crohn's disease is an Inflammatory Bowel Disease (IBD) in which inflammation extends beyond the inner gut lining and penetrates deeper layers of the intestinal wall of any part of the digestive system (esophagus, stomach, small intestine, large intestine, and/or anus). Crohn's disease is a chronic, lifelong disease which can cause painful, often life altering symptoms including diarrhea, cramping and rectal bleeding. Crohn's disease occurs most frequently in the industrialized world and the typical age of onset falls into two distinct ranges, 15 to 30 years of age and 60 to 80 years of age. The highest mortality is during the first years of disease, and in cases where the disease symptoms are long lasting, an increased risk of colon cancer is observed. Crohn's disease presently accounts for approximately two thirds of IBD-related physician visits and hospitalizations, and 50 to 80% of Crohn's disease patients eventually require surgical treatment. Development of Crohn's disease is influenced by environmental and host specific factors, together with “exogenous biological factors” such as constituents of the intestinal flora (the naturally occurring bacteria found in the intestine). It is believed that in genetically predisposed individuals, exogenous factors such as infectious agents, and host-specific characteristics such as intestinal barrier function and/or blood supply, combine with specific environmental factors to cause a chronic state of improperly regulated immune system function. In this hypothetical model, microorganisms trigger an immune response in the intestine, and in susceptible individuals, this immune response is not turned off when the microorganism is cleared from the body. The chronically “turned on” immune response causes damage to the intestine resulting in the symptoms of Crohn's disease.

[0007] Current treatments for Crohn's disease are primarily aimed at reducing symptoms by suppressing inflammation and do not address the root cause of the disease. Despite a preponderance of evidence showing inheritance of a risk for Crohn's disease through epidemiological studies and genome wide linkage analyses, the genes affecting Crohn's disease have yet to be discovered (Hugot J P, and Thomas G., 1998). There is a need in the art for identifying specific genes related to Crohn's disease to enable the development of therapeutics that address the causes of the disease rather than relieving its symptoms. The failure in past studies to identify causative genes in complex diseases, such as Crohn's disease, has been due to the lack of appropriate methods to detect a sufficient number of variations in genomic DNA samples (markers), the insufficient quantity of necessary markers available, and the number of needed individuals to enable such a study. The present invention addresses these issues.

[0008] The DNA sequences between two human genomes are 99.9% identical. The variations in DNA sequence between individuals can be, as an example, deletions of small or large stretches of DNA, insertions of stretches of DNA, variations in the number of repetitive DNA elements, and changes in single base positions in the genome called “single nucleotide polymorphisms” (SNPs). Human DNA sequence variation accounts for a large fraction of observed differences between individuals, including susceptibility to disease.

[0009] Many common diseases, like Crohn's disease, are complex genetic traits and are believed to involve several disease-genes rather than single genes, as is observed for rare diseases. This makes detection of any particular gene substantially more difficult than in a rare disease, where a single gene mutation that segregates according to a Mendelian inheritance pattern is the causative mutation. Any one of the multiple interacting gene mutations involved in the etiology of a complex disease will impart a lower relative risk for the disease than will the single gene mutation involved in a simple genetic disease. Low relative risk alleles are more difficult to detect and, as a result, the success of positional cloning using linkage mapping that was achieved for simple genetic disease genes has not been repeated for complex diseases.

[0010] Several approaches have been proposed to discover and characterize multiple genes in complex genetic traits. These gene discovery methods can be subdivided into hypothesis-free disorder association studies and hypothesis-driven candidate gene or region studies. The candidate gene approach relies on the analysis of a gene in patients who have a disorder in which the gene is thought to play a role. This approach is limited in utility because it only provides for the investigation of genes with known functions. Although variant sequences of candidate genes may be identified using this approach, it is inherently limited by the fact that variant sequences in other genes that contribute to the phenotype will be necessarily missed when the technique is employed. Genome-wide scans (GWS) have been shown to be efficient in identifying Crohn's disease susceptibility genes (NOD2/CARD15 and OCTN). In contrast to the candidate gene approach, a GWS searches throughout the genome without any a priori hypothesis and consequently can identify genes that are not obvious candidates for the disease as well as genes that are relevant candidates for the disease it can also identify chromosomal regions that are structurally important where mutations can influence gene function of specific genes.

[0011] Family-based linkage mapping methods were initially used for disorder locus identification. This technique locates genes based on the relatively limited number of genetic recombination events within the families used in the study, and results in large chromosomal regions containing hundreds of genes, any one of which could be the disorder-causing gene. Population-based, or linkage disequilibrium (LD) mapping is based on the premise that regions adjacent to a gene of interest are co-transmitted through the generations along with the gene. As a result, LD extends over shorter genetic regions than does linkage (Hewett et al., 2002), and can facilitate detection of genes with lower relative risk than family linkage mapping approaches. LD-based mapping also defines much smaller candidate regions which may contain only a few genes, making the identification of the actual disorder gene much easier.

[0012] It has been estimated that a GWS that uses a general population and case/control association (LD) analysis would require approximately 700,000 SNP markers (Carlson et al., 2003). The cost of a GWS at this marker density for a sufficient sample size for statistical power is economically prohibitive. The use of a special founder population (genetic isolate), such as the French Canadian population of Quebec, is one solution to the problem with LD analysis. The French Canadian population in Quebec (Quebec Founder Population—QFP) provides one of the best resources in the world for gene discovery based on its high levels of genetic sharing and genetic homogeneity. By combining DNA collected from the QFP, high throughput genotyping capabilities and proprietary algorithms for genetic analysis, a comprehensive genome-wide association study was facilitated. The present invention relates specifically to a set of Crohn's disease-causing genes (GeneMap) and targets which present attractive points of therapeutic intervention.

[0013] In view of the foregoing, identifying susceptibility genes associated with Crohn's disease and their respective biochemical pathways will facilitate the identification of diagnostic markers as well as novel targets for improved therapeutics. It will also improve the quality of life for those afflicted by this disease and will reduce the economic costs of these afflictions at the individual and societal level. The identification of those genetic markers would provide the basis for novel genetic tests and eliminate or reduce the therapeutic methods currently used. The identification of those genetic markers will also provide the development of effective therapeutic intervention for the battery of laboratory, radiological, and endoscopic evaluations typically required to diagnose Crohn's disease. The present invention satisfies this need and provides related advantages as well.

### DESCRIPTION OF THE FILES CONTAINED ON THE CD-R

[0014] The contents of the submission on compact discs submitted herewith are incorporated herein by reference in their entirety: A compact disc copy of the Sequence Listing (COPY 1) (filename: GENI 009 00WO SeqList.ST25.txt, date recorded: Aug. 23, 2006, file size 25,715 kilobytes); a duplicate compact disc copy of the Sequence Listing (COPY 2) (filename: GENI 009 00WO SeqList.ST25.txt, date recorded: Aug. 23, 2006, file size 25,715 kilobytes); a duplicate compact disc copy of the Sequence Listing (COPY 3) (filename: GENI 009 00WO SeqList.ST25.txt, date recorded: Aug. 23, 2006, file size 25,715 kilobytes); a computer readable format copy of the Sequence Listing (CRF COPY) (filename: GENI 009 00WO SeqList.ST25.txt, date recorded: Aug. 23, 2006, file size 25,715 kilobytes).

### DEFINITIONS

[0015] Throughout the description of the present invention, several terms are used that are specific to the science of this field. For the sake of clarity and to avoid any misunderstanding, these definitions are provided to aid in the understanding of the specification and claims:

[0016] Allele: One of a pair, or series, of forms of a gene or non-genic region that occur at a given locus in a chromosome. Alleles are symbolized with the same basic symbol (e.g., B for dominant and b for recessive; B1, B2, Bn for n additive alleles at a locus). In a normal diploid cell there are two alleles of any one gene (one from each parent), which occupy the same relative position (locus) on homologous chromosomes. Within a population there may be more than two alleles of a gene. See multiple alleles. SNPs also have alleles, i.e., the two (or more) nucleotides that characterize the SNP.

[0017] Amplification of nucleic acids: refers to methods such as polymerase chain reaction (PCR), ligation amplification (or ligase chain reaction, LCR) and amplification methods based on the use of Q-beta replicase. These methods are well known in the art and are described, for example, in U.S. Pat. Nos. 4,683,195 and 4,683,202. Reagents and hardware for conducting PCR are commercially available. Primers useful for amplifying sequences from the disorder region are preferably complementary to, and preferably hybridize specifically to, sequences in the disorder region or in regions that flank a target region therein. Genes from Tables 8-10 generated by amplification may be sequenced directly. Alternatively, the amplified sequence(s) may be cloned prior to sequence analysis.

[0018] Antigenic component: is a moiety that binds to its specific antibody with sufficiently high affinity to form a detectable antigen-antibody complex.

[0019] Antibodies: refer to polyclonal and/or monoclonal antibodies and fragments thereof, and immunologic binding equivalents thereof, that can bind to proteins and fragments thereof or to nucleic acid sequences from the disorder region, particularly from the disorder gene products or a portion thereof. The term antibody is used both to refer to a homogeneous molecular entity, or a mixture such as a serum product made up of a plurality of different molecular entities. Proteins may be prepared synthetically in a protein synthesizer and coupled to a carrier molecule and injected over several months into rabbits. Rabbit sera are tested for immunoreactivity to the protein or fragment. Monoclonal antibodies may be made by injecting mice with the proteins, or fragments thereof. Monoclonal antibodies can be screened by ELISA and tested for specific immunoreactivity with protein or fragments thereof (Harlow et al. 1988, Antibodies: A Laboratory Manual, Cold Spring Harbor Laboratory, Cold Spring Harbor, N.Y.). These antibodies will be useful in developing assays as well as therapeutics.

[0020] Associated allele: refers to an allele at a polymorphic locus that is associated with a particular phenotype of interest, e.g., a predisposition to a disorder or a particular drug response.

[0021] cDNA: refers to complementary or copy DNA produced from an RNA template by the action of RNA-dependent DNA polymerase (reverse transcriptase). Thus, a cDNA clone means a duplex DNA sequence complementary to an RNA molecule of interest, included in a cloning vector or PCR amplified. This term includes genes from which the intervening sequences have been removed.

[0022] cDNA library: refers to a collection of recombinant DNA molecules containing cDNA inserts that together comprise essentially all of the expressed genes of an organism or tissue. A cDNA library can be prepared by methods known to one skilled in the art (see, e.g., Cowell and Austin, 1997, “DNA Library Protocols,” Methods in Molecular Biology). Generally, RNA is first isolated from the cells of the desired organism, and the RNA is used to prepare cDNA molecules.

[0023] Cloning: refers to the use of recombinant DNA techniques to insert a particular gene or other DNA sequence into a vector molecule. In order to successfully clone a desired gene, it is necessary to use methods for generating DNA fragments, for joining the fragments to vector molecules, for introducing the composite DNA molecule into a host cell in which it can replicate, and for selecting the clone having the target gene from amongst the recipient host cells.

[0024] Cloning vector: refers to a plasmid or phage DNA or other DNA molecule that is able to replicate in a host cell. The cloning vector is typically characterized by one or more endonuclease recognition sites at which such DNA sequences may be cleaved in a determinable fashion without loss of an essential biological function of the DNA, and which may contain a selectable marker suitable for use in the identification of cells containing the vector.

[0025] Coding sequence or a protein-coding sequence: is a polynucleotide sequence capable of being transcribed into mRNA and/or capable of being translated into a polypeptide or peptide. The boundaries of the coding sequence are typically determined by a translation start codon at the 5′-terminus and a translation stop codon at the 3′-terminus.

[0026] Complement of a nucleic acid sequence: refers to the antisense sequence that participates in Watson-Crick base-pairing with the original sequence.

[0027] Disorder region: refers to the portions of the human chromosomes displayed in Table 1 bounded by the markers from Tables 2-10.

[0028] Disorder-associated nucleic acid or polypeptide sequence: refers to a nucleic acid sequence that maps to region of Table 1 or the polypeptides encoded therein (Tables 8-10, nucleic acids, and polypeptides). For nucleic acids, this encompasses sequences that are identical or complementary to the gene sequences from Tables 8-10, as well as sequence-conservative, function-conservative, and non-conservative variants thereof. For polypeptides, this encompasses sequences that are identical to the polypeptide, as well as function-conservative and non-conservative variants thereof. Included are the alleles of naturally-occurring polymorphisms causative of Crohn's disease such as, but not limited to, alleles that cause altered expression of genes of Tables 8-10 and alleles that cause altered protein levels or stability (e.g., decreased levels, increased levels, expression in an inappropriate tissue type, increased stability, and decreased stability).

[0029] Expression vector: refers to a vehicle or plasmid that is capable of expressing a gene that has been cloned into it, after transformation or integration in a host cell. The cloned gene is usually placed under the control of (i.e., operably linked to) a regulatory sequence.

[0030] Function-conservative variants: are those in which a change in one or more nucleotides in a given codon position results in a polypeptide sequence in which a given amino acid residue in the polypeptide has been replaced by a conservative amino acid substitution. Function-conservative variants also include analogs of a given polypeptide and any polypeptides that have the ability to elicit antibodies specific to a designated polypeptide.

[0031] Founder population: Also called a population isolate, this is a large number of people who have mostly descended, in genetic isolation from other populations, from a much smaller number of people who lived many generations ago.

[0032] Gene: Refers to a DNA sequence that encodes through its template or messenger RNA a sequence of amino acids characteristic of a specific peptide, polypeptide, or protein. The term “gene” also refers to a DNA sequence that encodes an RNA product. The term gene as used herein with reference to genomic DNA includes intervening, non-coding regions, as well as regulatory regions, and can include 5′ and 3′ ends. A gene sequence is wild-type if such sequence is usually found in individuals unaffected by the disorder or condition of interest. However, environmental factors and other genes can also play an important role in the ultimate determination of the disorder. In the context of complex disorders involving multiple genes (oligogenic disorder), the wild type, or normal sequence can also be associated with a measurable risk or susceptibility, receiving its reference status based on its frequency in the general population.

[0033] GeneMaps: are defined as groups of gene(s) that are directly or indirectly involved in at least one phenotype of a disorder (some non-limiting example of GeneMaps comprises varius combinations of genes from tables 8-10). As such, GeneMaps enable the development of synergistic diagnostic products, creating “theranostics”.

[0034] Genotype: Set of alleles at a specified locus or loci.

[0035] Haplotype: The allelic pattern of a group of (usually contiguous) DNA markers or other polymorphic loci along an individual chromosome or double helical DNA segment. Haplotypes identify individual chromosomes or chromosome segments. The presence of shared haplotype patterns among a group of individuals implies that the locus defined by the haplotype has been inherited, identical by descent (IBD), from a common ancestor. Detection of identical by descent haplotypes is the basis of linkage disequilibrium (LD) mapping. Haplotypes are broken down through the generations by recombination and mutation. In some instances, a specific allele or haplotype may be associated with susceptibility to a disorder or condition of interest, e.g., Crohn's disease. In other instances, an allele or haplotype may be associated with a decrease in susceptibility to a disorder or condition of interest, i.e., a protective sequence.

[0036] Host: includes prokaryotes and eukaryotes. The term includes an organism or cell that is the recipient of an expression vector (e.g., autonomously replicating or integrating vector).

[0037] Hybridizable: nucleic acids are hybridizable to each other when at least one strand of the nucleic acid can anneal to another nucleic acid strand under defined stringency conditions. In some embodiments, hybridization requires that the two nucleic acids contain at least 10 substantially complementary nucleotides; depending on the stringency of hybridization, however, mismatches may be tolerated. The appropriate stringency for hybridizing nucleic acids depends on the length of the nucleic acids and the degree of complementarity, and can be determined in accordance with the methods described herein.

[0038] Identity by descent (IBD): Identity among DNA sequences for different individuals that is due to the fact that they have all been inherited from a common ancestor. LD mapping identifies IBD haplotypes as the likely location of disorder genes shared by a group of patients.

[0039] Identity: as known in the art, is a relationship between two or more polypeptide sequences or two or more polynucleotide sequences, as determined by comparing the sequences. In the art, identity also means the degree of sequence relatedness between polypeptide or polynucleotide sequences, as the case may be, as determined by the match between strings of such sequences. Identity and similarity can be readily calculated by known methods, including but not limited to those described in A. M. Lesk (ed), 1988, Computational Molecular Biology, Oxford University Press, NY; D. W. Smith (ed), 1993, Biocomputing. Informatics and Genome Projects, Academic Press, NY; A.M. Griffin and H. G. Griffin, H. G (eds), 1994, ComputerAnalysis of Sequence Data, Part 1, Humana Press, NJ; G. von Heinje, 1987, Sequence Analysis in Molecular Biology, Academic Press; and M. Gribskov and J. Devereux (eds), 1991, Sequence Analysis Primer, M Stockton Press, NY; H. Carillo and D. Lipman, 1988, SIAM J. Applied Math., 48:1073.

[0040] Immunogenic component: is a moiety that is capable of eliciting a humoral and/or cellular immune response in a host animal.

[0041] Isolated nucleic acids: are nucleic acids separated away from other components (e.g., DNA, RNA, and protein) with which they are associated (e.g., as obtained from cells, chemical synthesis systems, or phage or nucleic acid libraries). Isolated nucleic acids are at least 60% free, preferably 75% free, and most preferably 90% free from other associated components. In accordance with the present invention, isolated nucleic acids can be obtained by methods described herein, or other established methods, including isolation from natural sources (e.g., cells, tissues, or organs), chemical synthesis, recombinant methods, combinations of recombinant and chemical methods, and library screening methods.

[0042] Isolated polypeptides or peptides: are those that are separated from other components (e.g., DNA, RNA, and other polypeptides or peptides) with which they are associated (e.g., as obtained from cells, translation systems, or chemical synthesis systems). In a preferred embodiment, isolated polypeptides or peptides are at least 10% pure; more preferably, 80% or 90% pure. Isolated polypeptides and peptides include those obtained by methods described herein, or other established methods, including isolation from natural sources (e.g., cells, tissues, or organs), chemical synthesis, recombinant methods, or combinations of recombinant and chemical methods. Proteins or polypeptides referred to herein as recombinant are proteins or polypeptides produced by the expression of recombinant nucleic acids. A portion as used herein with regard to a protein or polypeptide, refers to fragments of that protein or polypeptide. The fragments can range in size from 5 amino acid residues to all but one residue of the entire protein sequence. Thus, a portion or fragment can be at least 5, 5-50, 50-100, 100-200, 200-400, 400-800, or more consecutive amino acid residues of a protein or polypeptide.

[0043] Linkage disequilibrium (LD): the situation in which the alleles for two or more loci do not occur together in individuals sampled from a population at frequencies predicted by the product of their individual allele frequencies. In other words, markers that are in LD do not follow Mendel's second law of independent random segregation. LD can be caused by any of several demographic or population artifacts as well as by the presence of genetic linkage between markers. However, when these artifacts are controlled and eliminated as sources of LD, then LD results directly from the fact that the loci involved are located close to each other on the same chromosome so that specific combinations of alleles for different markers (haplotypes) are inherited together. Markers that are in high LD can be assumed to be located near each other and a marker or haplotype that is in high LD with a genetic trait can be assumed to be located near the gene that affects that trait. The physical proximity of markers can be measured in family studies where it is called linkage or in population studies where it is called linkage disequilibrium.

[0044] LD mapping: population based gene mapping, which locates disorder genes by identifying regions of the genome where haplotypes or marker variation patterns are shared statistically more frequently among disorder patients compared to healthy controls. This method is based upon the assumption that many of the patients will have inherited an allele associated with the disorder from a common ancestor (IBD), and that this allele will be in LD with the disorder gene.

[0045] Locus: a specific position along a chromosome or DNA sequence. Depending upon context, a locus could be a gene, a marker, a chromosomal band or a specific sequence of one or more nucleotides.

[0046] Minor allele frequency (MAF): the population frequency of one of the alleles for a given polymorphism, which is equal or less than 50%. The sum of the MAF and the Major allele frequency equals one.

[0047] Markers: an identifiable DNA sequence that is variable (polymorphic) for different individuals within a population. These sequences facilitate the study of inheritance of a trait or a gene. Such markers are used in mapping the order of genes along chromosomes and in following the inheritance of particular genes; genes closely linked to the marker or in LD with the marker will generally be inherited with it. Two types of markers are commonly used in genetic analysis, microsatellites and SNPs.

[0048] Microsatellite: DNA of eukaryotic cells comprising a repetitive, short sequence of DNA that is present as tandem repeats and in highly variable copy number, flanked by sequences unique to that locus.

[0049] Mutant sequence: if it differs from one or more wild-type sequences. For example, a nucleic acid from a gene listed in Tables 8-10 containing a particular allele of a single nucleotide polymorphism may be a mutant sequence. In some cases, the individual carrying this allele has increased susceptibility toward the disorder or condition of interest. In other cases, the mutant sequence might also refer to an allele that decreases the susceptibility toward a disorder or condition of interest and thus acts in a protective manner. The term mutation may also be used to describe a specific allele of a polymorphic locus.

[0050] Non-conservative variants: are those in which a change in one or more nucleotides in a given codon position results in a polypeptide sequence in which a given amino acid residue in a polypeptide has been replaced by a non-conservative amino acid substitution. Non-conservative variants also include polypeptides comprising non-conservative amino acid substitutions.

[0051] Nucleic acid or polynucleotide: purine- and pyrimidine-containing polymers of any length, either polyribonucleotides or polydeoxyribonucleotide or mixed polyribo polydeoxyribonucleotides. This includes single- and double-stranded molecules, i.e., DNA-DNA, DNA-RNA and RNA-RNA hybrids, as well as protein nucleic acids (PNA) formed by conjugating bases to an amino acid backbone. This also includes nucleic acids containing modified bases.

[0052] Nucleotide: a nucleotide, the unit of a DNA molecule, is composed of a base, a 2′-deoxyribose and phosphate ester(s) attached at the 5′ carbon of the deoxyribose. For its incorporation in DNA, the nucleotide needs to possess three phosphate esters but it is converted into a monoester in the process.

[0053] Operably linked: means that the promoter controls the initiation of expression of the gene. A promoter is operably linked to a sequence of proximal DNA if upon introduction into a host cell the promoter determines the transcription of the proximal DNA sequence(s) into one or more species of RNA. A promoter is operably linked to a DNA sequence if the promoter is capable of initiating transcription of that DNA sequence.

[0054] Ortholog: denotes a gene or polypeptide obtained from one species that has homology to an analogous gene or polypeptide from a different species.

[0055] Paralog: denotes a gene or polypeptide obtained from a given species that has homology to a distinct gene or polypeptide from that same species.

[0056] Phenotype: any visible, detectable or otherwise measurable property of an organism such as symptoms of, or susceptibility to, a disorder.

[0057] Polymorphism: occurrence of two or more alternative genomic sequences or alleles between or among different genomes or individuals at a single locus. A polymorphic site thus refers specifically to the locus at which the variation occurs. In some cases, an individual carrying a particular allele of a polymorphism has an increased or decreased susceptibility toward a disorder or condition of interest.

[0058] Portion and fragment: are synonymous. A portion as used with regard to a nucleic acid or polynucleotide refers to fragments of that nucleic acid or polynucleotide. The fragments can range in size from 8 nucleotides to all but one nucleotide of the entire gene sequence. Preferably, the fragments are at least about 8 to about 10 nucleotides in length; at least about 12 nucleotides in length; at least about 15 to about 20 nucleotides in length; at least about 25 nucleotides in length; or at least about 35 to about 55 nucleotides in length.

[0059] Probe or primer: refers to a nucleic acid or oligonucleotide that forms a hybrid structure with a sequence in a target region of a nucleic acid due to complementarity of the probe or primer sequence to at least one portion of the target region sequence.

[0060] Protein and polypeptide: are synonymous. Peptides are defined as fragments or portions of polypeptides, preferably fragments or portions having at least one functional activity (e.g., proteolysis, adhesion, fusion, antigenic, or intracellular activity) as the complete polypeptide sequence.

[0061] Recombinant nucleic acids: nucleic acids which have been produced by recombinant DNA methodology, including those nucleic acids that are generated by procedures which rely upon a method of artificial replication, such as the polymerase chain reaction (PCR) and/or cloning into a vector using restriction enzymes. Portions of recombinant nucleic acids which code for polypeptides can be identified and isolated by, for example, the method of M. Jasin et al., U.S. Pat. No. 4,952,501.

[0062] Regulatory sequence: refers to a nucleic acid sequence that controls or regulates expression of structural genes when operably linked to those genes. These include, for example, the lac systems, the trp system, major operator and promoter regions of the phage lambda, the control region of fd coat protein and other sequences known to control the expression of genes in prokaryotic or eukaryotic cells. Regulatory sequences will vary depending on whether the vector is designed to express the operably linked gene in a prokaryotic or eukaryotic host, and may contain transcriptional elements such as enhancer elements, termination sequences, tissue-specificity elements and/or translational initiation and termination sites.

[0063] Sample: as used herein refers to a biological sample, such as, for example, tissue or fluid isolated from an individual or animal (including, without limitation, plasma, serum, cerebrospinal fluid, lymph, tears, nails, hair, saliva, milk, pus, and tissue exudates and secretions) or from in vitro cell culture-constituents, as well as samples obtained from, for example, a laboratory procedure.

[0064] Single nucleotide polymorphism (SNP): variation of a single nucleotide. This includes the replacement of one nucleotide by another and deletion or insertion of a single nucleotide. Typically, SNPs are biallelic markers although tri- and tetra-allelic markers also exist. For example, SNP AC may comprise allele C or allele A (Tables 2-7). Thus, a nucleic acid molecule comprising SNP AC may include a C or A at the polymorphic position. For clarity purposes, an ambiguity code is used in Tables 2-7 and the sequence listing, to represent the variations. For a combination of SNPs, the term “haplotype” is used, e.g. the genotype of the SNPs in a single DNA strand that are linked to one another. In certain embodiments, the term “haplotype” is used to describe a combination of SNP alleles, e.g., the alleles of the SNPs found together on a single DNA molecule. In specific embodiments, the SNPs in a haplotype are in linkage disequilibrium with one another.

[0065] Sequence-conservative: variants are those in which a change of one or more nucleotides in a given codon position results in no alteration in the amino acid encoded at that position (i.e., silent mutation).

[0066] Substantially homologous: a nucleic acid or fragment thereof is substantially homologous to another if, when optimally aligned (with appropriate nucleotide insertions and/or deletions) with the other nucleic acid (or its complementary strand), there is nucleotide sequence identity in at least 60% of the nucleotide bases, usually at least 70%, more usually at least 80%, preferably at least 90%, and more preferably at least 95-98% of the nucleotide bases. Alternatively, substantial homology exists when a nucleic acid or fragment thereof will hybridize, under selective hybridization conditions, to another nucleic acid (or a complementary strand thereof). Selectivity of hybridization exists when hybridization which is substantially more selective than total lack of specificity occurs. Typically, selective hybridization will occur when there is at least about 55% sequence identity over a stretch of at least about nine or more nucleotides, preferably at least about 65%, more preferably at least about 75%, and most preferably at least about 90% (M. Kanehisa, 1984, NucL Acids Res. 11:203-213). The length of homology comparison, as described, may be over longer stretches, and in certain embodiments will often be over a stretch of at least 14 nucleotides, usually at least 20 nucleotides, more usually at least 24 nucleotides, typically at least 28 nucleotides, more typically at least 32 nucleotides, and preferably at least 36 or more nucleotides.

[0067] Wild-type gene from Tables 2-7: refers to the reference sequence. The wild-type gene sequences from Tables 8-10 used to identify the variants (polymorphisms, alleles, and haplotypes) described in detail herein.

[0068] Technical and scientific terms used herein have the meanings commonly understood by one of ordinary skill in the art to which the present invention pertains, unless otherwise defined. Reference is made herein to various methodologies known to those of skill in the art. Publications and other materials setting forth such known methodologies to which reference is made are incorporated herein by reference in their entireties as though set forth in full. Standard reference works setting forth the general principles of recombinant DNA technology include J. Sambrook et al., 1989, Molecular Cloning: A Laboratory Manual, 2d Ed., Cold Spring Harbor Laboratory Press, Cold Spring Harbor, N.Y.; P. B. Kaufman et al., (eds), 1995, Handbook of Molecular and Cellular Methods in Biology and Medicine, CRC Press, Boca Raton; M. J. McPherson (ed), 1991, Directed Mutagenesis: A Practical Approach, IRL Press, Oxford; J. Jones, 1992, Amino Acid and Peptide Synthesis, Oxford Science Publications, Oxford; B. M. Austen and O. M. R. Westwood, 1991, Protein Targeting and Secretion, IRL Press, Oxford; D. N Glover (ed), 1985, DNA Cloning, Volumes I and 11; M. J. Gait (ed), 1984, Oligonucleotide Synthesis; B. D. Hames and S. J. Higgins (eds), 1984, Nucleic Acid Hybridization; Quirke and Taylor (eds), 1991, PCR-A Practical Approach; Harries and Higgins (eds), 1984, Transcription and Translation; R. I. Freshney (ed), 1986, Animal Cell Culture; Immobilized Cells and Enzymes, 1986, IRL Press; Perbal, 1984, A Practical Guide to Molecular Cloning, J. H. Miller and M. P. Calos (eds), 1987, Gene Transfer Vectors for Mammalian Cells, Cold Spring Harbor Laboratory Press; M. J. Bishop (ed), 1998, Guide to Human Genome Computing, 2d Ed., Academic Press, San Diego, Calif.; L. F. Peruski and A. H. Peruski, 1997, The Internet and the New Biology. Tools for Genomic and Molecular Research, American Society for Microbiology, Washington, D.C. Standard reference works setting forth the general principles of immunology include S. Sell, 1996, Immunology, Immunopathology & Immunity, 5th Ed., Appleton & Lange, Publ., Stamford, Conn.; D. Male et al., 1996, Advanced Immunology, 3d Ed., Times Mirror Int'l Publishers Ltd., Publ., London; D. P. Stites and A. L Terr, 1991, Basic and Clinical Immunology, 7th Ed., Appleton & Lange, Publ., Norwalk, Conn.; and A. K. Abbas et al., 1991, Cellular and Molecular Immunology, W.B. Saunders Co., Publ., Philadelphia, Pa. Any suitable materials and/or methods known to those of skill can be utilized in carrying out the present invention; however, preferred materials and/or methods are described. Materials, reagents, and the like to which reference is made in the following description and examples are generally obtainable from commercial sources, and specific vendors are cited herein.

### DETAILED DESCRIPTION OF THE INVENTION

### General Description of Crohn's Disease

[0069] Inflammatory Bowel Disease (IBD) is characterized by excessive and chronic inflammation at various sites in the gastro-intestinal tract. IBD describes two clinical conditions called Crohn's disease (CD) and ulcerative colitis (UC). CD and UC share many clinical and pathological characteristics but they also have some markedly different features. There is strong scientific support suggesting that the main pathological processes in these two diseases are distinct. This patent application will focus primarily on Crohn's disease.

[0070] The United Kingdom, northern Europe, and North America have been reported to have the highest incidence rates and prevalence for CD. In North America, prevalence for CD ranges between 0.03% and 0.2%. However, reports of increasing incidence and prevalence from other areas of the world have been published over the past 30 years (reviewed in Loftus 2004). CD may occur in people of all ages, but it is most commonly diagnosed in late adolescence and early adulthood (reviewed in Andres and Friedman 1999). Any part of the gastrointestinal tract can be affected in CD, from the mouth to the anus, and patches of inflammation occur, interspersed with healthy tissue.

[0071] Most CD patients experience characteristic periods of remission and flare-ups of the disease, often-requiring long-term medication, and/or hospitalization and surgery. The symptoms and complications of Crohn's disease differ, depending on what part of the intestinal tract is inflamed. The severity of the disease does not correlate directly with the extent of bowel involvement. It is the disease pattern that is most important in determining the disease course and the nature of the associated complications. Thus, CD can be subdivided into 3 types: predominantly inflammatory CD, non-perforating CD (presence of strictures), or perforating CD (presence of fistulas and/or abscesses) (reviewed in Andres and Friedman 1999).

[0072] CD symptoms include chronic diarrhea, abdominal pain, cramping, anorexia, and weight loss. Systemic features include fatigue, tachycardia and pyrexia. Chronic or acute blood loss in the bowel may result in anemia and even shock. The most common complication of CD is the presence of strictures (obstruction) of the intestine due to swelling and the formation of scar tissue. Another complication involves sores or ulcers within the intestinal tract. Sometimes these deep ulcers turn into tracts called fistulas that connect different parts of the intestine. These fistulas often become infected and occasionally form an abscess. Extra-intestinal inflammatory manifestations can occur in joints, eyes, skin, mouth, and liver in patients with either forms of IBD (reviewed in Andres and Friedman 1999). CD patients also carry several risk factors for the development of osteoporosis such as calcium and vitamin D deficiency, and corticosteroid use (Tremaine 2003). Patients with CD are also at increased risk of cancer of both the small and the large intestine (reviewed in Andres and Friedman 1999). CD is associated with an increased mortality rate relative to the general population and independent of whether the small intestine, large intestine, or both are affected. The excess of mortality is most notable in the first few years after diagnosis and is most often attributable to complications of CD, including colorectal cancer as well as other gastrointestinal complications (reviewed in Andres and Friedman 1999). CD is a lifelong disease that causes symptoms that may interfere with social activities, interpersonal relationships, and employment. Impairment relates to disease severity, pattern and side-effects of medication, the possibility of surgery, but also to age, other demographic factors and co-morbid medical conditions, including depression and anxiety (Irvine 2004).

[0073] There is no single definitive test for the diagnosis of CD. To determine the diagnosis, physicians evaluate a combination of information from the history and physical examination of a patient and from results of endoscopic, radiologic and histologic (blood and tissue) tests. Endoscopy with biopsy is the cornerstone for diagnosing and evaluating disease activity in CD. Radiology tests are used together with endoscopy to help evaluate the small bowel and look at the entire abdomen for infections, strictures, obstructions, and fistulas. Because CD often mimics other conditions and symptoms may vary widely, it may take some time to confirm the diagnosis.

[0074] Because there is no cure for CD, the goal of medical treatment is to suppress the inflammatory response and alleviate the symptoms by decreasing the frequency of disease flare-ups and maintaining remissions. Non-surgical treatment for active disease involves the use of anti-inflammatory (aminosalicylates and corticosteroids), antimicrobial (antibiotics), and immunomodulatory agents to control symptoms and reduce disease activity. The biologic therapies are targeted towards specific disease mechanisms and have the potential to provide more effective and safe treatments for human diseases. Infliximab (Remicade®) is a chimeric monoclonal antibody against TNFalpha, and the first biologic therapy that was approved for CD. Several novel genetically engineered drugs targeting specific sites in the inflammatory cascade are likely to have an impact in the near future. Among them, anti-inflammatory cytokines (recombinant IL-10 and IL-11), antibodies (humanized IgG4, anti-TNFalpha, anti-alpha4-integrin) and antisense therapies (ICAM-1) are currently being evaluated in CD treatment (Sandborn and Faubion 2004).

[0075] The frequency of indications for surgery parallels the frequency of local intestinal complications of the disease. Surgery is never curative for CD because the disease frequently recurs at or near the site of surgery; its overall goal is to conserve bowel and return the individual to the best possible quality of life. Up to 74% of all patients eventually require surgical intervention for their disease (Farmer 1985), and nearly 30% of patients require surgery within the first year of diagnosis (Podolsky 1991).

[0076] Although the etiology of CD is poorly understood, studies indicate that CD pathogenesis is the result of the complex interaction between environmental factors (i.e. gut micro-flora), genetic susceptibility, and the immune system. It has been proposed that IBD results from a dys-regulated mucosal immune response to the intestinal micro-flora in genetically susceptible individuals. The inappropriate activation of the mucosal immune system observed in CD has been linked to a loss of tolerance to gut commensals. It also appears that the loss of mucosal integrity leading to translocation of bacteria in the bowel wall is a crucial step for the propagation of the inflammatory process. However, it is not known whether barrier function is first compromised by intrinsic defects in epithelial integrity, by infection with enteric pathogens, or by loss of commensal-dependent signals necessary to maintain the physical integrity of the epithelium and hypo-responsiveness of the mucosal immune system (reviewed in Bouma and Strober 2003).

[0077] Familial aggregation, twin studies and consistent ethnic differences in disease frequency have strongly supported the important role of genetic factors in the cause of CD (reviewed in Andres and Friedman 1999). However, the incomplete concordance for CD within monozygotic twins, the phenotypic variations and the observed familial pattern of non-Mendelian inheritance suggest that CD has a complex genetic basis with many contributing genes. These facts also underline the presence and importance of environmental factors in the pathogenesis of this disease, such as gut micro-flora as mentioned above, and cigarette smoking which is the best known environmental factor for CD (reviewed in Andres and Friedman 1999). In addition, disease heterogeneity in the phenotype (location, age of onset, number and types of surgery, behavior, extra-intestinal manifestations, response to class of medications) can reflect extensive genetic heterogeneity.

### Previously Identified Genes and Loci

[0078] Genetic studies have previously indicated the presence of several loci predisposing to Inflammatory Bowel Diseases. Nine IBD loci have been identified: IBD1 (CARD15/NOD2, Caspase recruitment domain family, member 15 (NOD2 protein)), IBD2 (Inflammatory bowel disease-2), IBD3 (Inflammatory bowel disease-3), IBD4 (Inflammatory bowel disease-4), IBD5 (Inflammatory bowel disease-5), IBD6 (Inflammatory bowel disease-6), IBD7 (Inflammatory bowel disease-7), IBD8 (Inflammatory bowel disease-8), and IBD9 (Inflammatory bowel disease 9).

[0079] Several loci have been identified and replicated to date; they are located on chromosomes 16q12, 12q13.2-q24.1, 6p21, 14q11-q12, 5q31-q33, 19p13, 1p36, 16p, and 3p26 respectively (Wild and Rioux 2004; Duerr et al., 2002). Results from linkage studies have suggested that CD and UC share some loci but do not share others, such as locus 16q12 which is unique to CD (The IBD International Genetics Consortium 2001). Most of the genes determining susceptibility in each of these chromosomal regions remain to be identified. The most widely replicated loci are on chromosomes 16 (caused by mutations in the NOD2/CARD15 gene), 12, 6, 14 and 5 (OCTN2 genes at IBD5 locus), which predispose to early-onset Crohn's disease. Thus, there is a continuing need in the medical arts for genetic markers of Crohn's disease and guidance for the use of such markers.

[0080] Several years ago, two different groups reported the association of CARD15 (NOD2) variants with CD (Hugot 2001; Ogura 2001). CARD15 is located at the IBD1 locus. The gene codes for an intracellular receptor involved in the innate immune detection of bacterial products. This detection induces the activation of the NF-kB pathway which is of particular importance in immune and inflammatory responses (Philpott and Viala 2004). Three major mutations represent 82% of the total CARD15 mutations: R702W, G908R, and 1007fsinsC. However they do not explain over 20% of the genetic predisposition to the disease, and altogether, they are carried by 30-50% of CD patients and 15-20% of healthy controls in Caucasian populations. These values are much lower in Japanese or Africans (reviewed in Girardin 2003).

[0081] Recently, the OCTN1 and OCTN2 genes at IBD5 locus have been associated with CD (Peltekova 2004). Variants in these genes are in strong linkage disequilibrium and create a two-allele risk haplotype enriched in patients with CD. Both proteins are trans-membrane sodium-dependent carnitine transporters and sodium-independent organic cation transporters. The variants may cause disease by impairing OCTN activity or expression, reducing carnitine transport in a cell-type and disease-specific manner (Peltekova 2004). The IBD5 locus contains multiple candidate genes including the genes for organic cation transporters (OCTN2/SLC22A4 and SLC22A5), the gene for a LIN4-domain-containing protein (RILIPDLIM3), the gene for the oc2 subunit of proline hydroxylase (P4HA2) and a gene of unknown function (NCBI UniGene identifier Hs.70932). Because of extensive linkage disequilibrium (LD) in this region, it has not been possible to further refine the SNP map and unambiguously identify a single susceptibility gene. With respect to OCTN2, the basal transcription is downregulated by the C allele of G-207C, and this allele disrupts the ability of SLC22A5 to be upregulated in response to heat shock or arachidonic acid as a result of impaired HSF I binding and subsequent transcriptional activation.

[0082] The mechanism by which these organic cation transporters contribute to the pathology of Crohn's disease may relate to the in vivo metabolic importance of carnitine. Carnitine facilitates transport of long chain fatty acids across the mitochondrial inner membrane for subsequent P-oxidation, and is also important in the maintenance of cellular CoenzymeA levels. Carnitine uptake into lymphocytes, along with a corresponding decrease in plasma levels, is a physiological response to inflammation. Symptoms of the related condition Ulcerative Colitis may be due to an energy deficiency in colonic epithelium secondary to poor mitochondrial function due to decreased long-chain fatty acid transport to the mitochondria (Roediger W E 1980). The haplotype of mutations in Crohn's disease patients provided previously might affect cellular metabolic energy levels in inflamed tissue by combining impaired OCTN1 transporter function with downregulation and inability to respond to heat or inflammatory stress by the OCTN2 gene. Heat shock proteins and arachidonic acids are involved in response to a variety of cellular stresses, including sepsis, metabolic stress and ischaemia. The heat shock response modulates inflammation through modulation of NF-kB activation. OCTN2 is a heat stress inducible protein. Thus, the OCTN2 gene is normally upregulated in response to inflammation through binding of HSF I protein to its promoter. This in turn mobilizes carnitine and bolsters metabolism in the inflamed tissue. Impaired OCTN1 carnitine transporter activity and lowered OCTN2 expression level results in reduced metabolism and either triggers or worsens cellular stress in areas of inflammation. The two OCTN transporters may therefore function in the inflammatory pathology of Crohn's disease. Additionally, OCTN1 is a polyspecific cation transporter, and might have a role in the uptake of drugs used to treat CD from the gut. As described above, OCTN2 is a transporter protein with the ability to transport carnitine in a sodium dependent manner. Missense mutations and nonsense mutations in the organic cation transporter OCTN2 had previously been identified in patients with primary Systemic Carnitine Deficiency (SCD), an autosomal recessive disorder characterized by progressive cardiomyopathy, skeletal myopathy, hypoglycemia and hyperammonemia.

[0083] Genes encoding proteins involved in the immune system, epithelial functions, and host response to micro-organisms represent good potential candidates for CD and have been examined in numerous case-control studies. However, many of the published associations of genetic variants with CD have not been replicated in follow-up studies.

[0084] The genetic variants that have been identified so far in CD explain only a fraction of the genetic predisposition to this disorder. It is clear that multiple components contribute to disease risk, each component having a modest effect on disease susceptibility. Thus the development of GeneMaps for CD may lead to a better understanding of pathogenesis and to the identification of new pathways involved in the disease, ultimately leading to better treatments for the patients. GeneMaps may also lead to molecular diagnostic tools that will identify subjects at risk for CD or for serious complications of the disease.

### Genome Wide Association Study to Construct a GeneMap for Crohn's Disease

[0085] The present invention is based on the discovery of genes associated with Crohn's disease. In the preferred embodiment, disease-associated loci (candidate regions; Table 1) are identified by the statistically significant differences in allele or haplotype frequencies between the cases and the controls. For the purpose of the present invention, 208 candidate regions (Table 1) are identified.

[0086] The invention provides a method for the discovery of genes associated with Crohn's disease and the construction of a GeneMap for Crohn's disease in a human population, comprising the following steps (see Example section herein):

### Step 1: Recruit Patients (Cases) and Controls

[0087] In the preferred embodiment, 500 patients diagnosed for Crohn's disease along with two family members are recruited from the Quebec Founder Population (QFP). The preferred trios recruited are parent-parent-child (PPC) trios. Trios can also be recruited as parent-child-child (PCC) trios. In another preferred embodiment, more or less than 500 trios are recruited. In another embodiment, independent case and control samples are recruited.

[0088] In another embodiment, the present invention is performed as a whole or partially with DNA samples from individuals of another founder population than the Quebec population or from the general population.

### Step 2: DNA Extraction and Quantitation

[0089] Any sample comprising cells or nucleic acids from patients or controls may be used. Preferred samples are those easily obtained from the patient or control. Such samples include, but are not limited to blood, peripheral lymphocytes, buccal swabs, epithelial cell swabs, nails, hair, bronchoalveolar lavage fluid, sputum, or other body fluid or tissue obtained from an individual.

[0090] In one embodiment, DNA is extracted from such samples in the quantity and quality necessary to perform the invention using conventional DNA extraction and quantitation techniques. The present invention is not linked to any DNA extraction or quantitation platform in particular.

### Step 3: Genotype the Recruited Individuals

[0091] In one embodiment, assay-specific and/or locus-specific and/or allele-specific oligonucleotides for every SNP marker of the present invention (Tables 2-7) are organized onto one or more arrays. The genotype at each SNP locus is revealed by hybridizing short PCR fragments comprising each SNP locus onto these arrays. The arrays permit a high-throughput genome wide association study using DNA samples from individuals of the Quebec founder population. Such assay-specific and/or locus-specific and/or allele-specific oligonucleotides necessary for scoring each SNP of the present invention are preferably organized onto a solid support. Such supports can be arrayed on wafers, glass slides, beads or any other type of solid support.

[0092] In another embodiment, the assay-specific and/or locus-specific and/or allele-specific oligonucleotides are not organized onto a solid support but are still used as a whole, in panels or one by one. The present invention is therefore not linked to any genotyping platform in particular.

[0093] In another embodiment, one or more portions of the SNP maps (publicly available maps, proprietary maps from Perlegen Sciences, Inc. (Mountain View, Calif., USA), and our own proprietary QLDM map) are used to screen the whole genome, a subset of chromosomes, a chromosome, a subset of genomic regions or a single genomic region.

[0094] The 1,500 individuals composing the 500 trios are preferably individually genotyped with at least 80,000 markers, generating at least a few million genotypes; more preferably, at least a hundred million.

Step 4: Exclude the Markers that Did not Pass the Quality Control of the Assay.

[0095] Preferably, the quality controls consist of, but are not limited to, the following criteria: eliminate SNPs that had a high rate of Mendelian errors (cut-off at 1% Mendelian error rate), that deviate from the Hardy-Weinberg equilibrium, that are non-polymorphic in the Quebec founder population or have too many missing data (cut-off at 1% missing values or higher), or simply because they are non-polymorphic in the Quebec founder population (cut-off at 1%<10% minor allele frequency (MAF)).

### Step 5: Perform the Genetic Analysis on the Results Obtained Using Haplotype Information as Well as Single-Marker Association.

[0096] In the preferred embodiment, genetic analysis is performed on all the genotypes from step 3.

[0097] In another embodiment, genetic analysis is performed on a total of 248,535 SNPs.

[0098] In one embodiment, the genetic analysis consists of, but is not limited to features corresponding to Phase information and haplotype structures. Phase information and haplotype structures are preferably deduced from trio genotypes using Phasefinder. Since chromosomal assignment (phase) cannot be estimated when all trio members are heterozygous, an Expectation-Maximization (EM) algorithm may be used to resolve chromosomal assignment ambiguities after Phasefinder.

[0099] In yet another embodiment, the PL-EM algorithm (Partition-Ligation E M; Niu et al., Am. J. Hum. Genet. 70:157 (2002)) can be used to estimate haplotypes from the “genotype” data as a measured estimate of the reference allele frequency of a SNP in 15-marker windows that advance in increments of one marker across the data set. The results from such algorithms are converted into 15-marker haplotype files. Subsequently, the individual 15-marker block files are assembled into one continuous block of haplotypes for the entire chromosome. These extended haplotypes can then be used for further analysis. Such haplotype assembly algorithms take the consensus estimate of the allele call at each marker over all separate estimations (most markers are estimated 15 different times as the 15 marker blocks pass over their position).

[0100] In the preferred embodiment, the haplotypes for both the controls and the patients are derived in this manner. The preferred control of a trio structure is the spouse if the patient is one of the parents or the non-transmitted chromosomes (chromosomes found in parents but not in affected child) if the patient is the child.

[0101] In another embodiment, the haplotype frequencies among patients are compared to those among the controls using LDSTATS, a program that assesses the association of haplotypes with the disease. Such program defines haplotypes using multi-marker windows that advance across the marker map in one-marker increments. Such windows can be 1, 3, 5, 7 or 9 markers wide, and all these window sizes are tested concurrently. Larger multi-marker haplotype windows can also be used. At each position the frequency of haplotypes in cases is compared to the frequency of haplotypes in controls. Such allele frequency differences for single marker windows can be tested using Pearson's Chi-square with any degree of freedom. Multi-allelic haplotype association can be tested using Smith's normalization of the square root of Pearson's Chi-square. Such significance of association can be reported in two ways:

[0102] The significance of association within any one haplotype window is plotted against the marker that is central to that window.

[0103] P-values of association for each specific marker are calculated as a pooled P-value across all haplotype windows in which they occur. The pooled P-value is calculated using an expected value and variance calculated using a permutation test that considers covariance between individual windows. Such pooled P-values can yield narrower regions of gene location than the window data (see example 3 for details on analysis methods, such as LDSTATS v2.0 and v4.0).

[0104] In another embodiment, conditional haplotype analyses can be performed on subsets of the original set of cases and controls using the program LDSTATS. The selection of a subset of cases and their matched controls can be based on the carrier status of cases at a gene or locus of interest (see conditional analysis section in example 3 herein). Various conditional haplotypes can be derived, such as protective haplotypes and risk haplotypes.

### Step 6: Fine Mapping

[0105] In this step, the candidate regions that were identified by step 4 are further mapped for the purpose of refinement and validation.

[0106] In the preferred embodiment, this fine mapping is performed with a density of genetic markers higher than in the genome wide scan (step 3) using any genotyping platform available in the art. Such fine mapping can be, but is not limited to, typing the allele via an allele-specific elongation assay that is then ligated to a locus-specific oligonucleotide. Such assays can be performed directly on the genomic DNA at a highly multiplex level and the products can be amplified using universal oligonucleotides. For each candidate region, the density of genetic markers can be, but is not limited to, a set of SNP markers with an average inter-marker distance of 1-4 Kb distributed over about 400 Kb to 1 Mb, roughly centered at the highest point of the GWS association. The preferred samples are those obtained from Crohn's disease PPC trios including the ones used for the GWS. Other preferred samples are trios or case control samples from another population, such as a General population.

[0107] In the preferred embodiment, the genetic analysis of the results obtained using haplotype information as well as single-marker association (as performed as in step 5, described herein) is performed as described herein (step 5 and Example section). The candidate regions that are validated and confirmed after this analysis proceed to a gene mining step described in Example 5, herein, to characterize their marker and genetic content.

[0108] Step 7: SNP and DNA Polymorphism Discovery

[0109] In the preferred embodiment, all the candidate genes and regions identified in step 6 are sequenced for polymorphism identification.

[0110] In another embodiment, the entire region, including all introns, is sequenced to identify all polymorphisms.

[0111] In yet another embodiment, the candidate genes are prioritized for sequencing, and only functional gene elements (promoters, conserved noncoding sequences, exons and splice sites) are sequenced.

[0112] In yet another embodiment, previously identified polymorphisms in the candidate regions can also be used. For example, SNPs from dbSNP, Perlegen Sciences, Inc., or others can also be used rather than resequencing the candidate regions to identify polymorphisms.

[0113] The discovery of SNPs and DNA polymorphisms generally comprises a step consisting of determining the major haplotypes in the region to be sequenced. The preferred samples are selected according to which haplotypes contribute to the association signal observed in the region to be sequenced. The purpose is to select a set of samples that covers all the major haplotypes in the given region. Each major haplotype is preferably analyzed in at least a few individuals.

[0114] Any analytical procedure may be used to detect the presence or absence of variant nucleotides at one or more polymorphic positions of the invention. In general, the detection of allelic variation requires a mutation discrimination technique, optionally an amplification reaction and optionally a signal generation system. Any means of mutation detection or discrimination may be used. For instance, DNA sequencing, scanning methods, hybridization, extension based methods, incorporation based methods, restriction enzyme-based methods and ligation-based methods may be used in the methods of the invention.

[0115] Sequencing methods include, but are not limited to, direct sequencing, and sequencing by hybridization. Scanning methods include, but are not limited to, protein truncation test (PTT), single-strand conformation polymorphism analysis (SSCP), denaturing gradient gel electrophoresis (DGGE), temperature gradient gel electrophoresis (TGGE), cleavage, heteroduplex analysis, chemical mismatch cleavage (CMC), and enzymatic mismatch cleavage. Hybridization-based methods of detection include, but are not limited to, solid phase hybridization such as dot blots, multiple allele specific diagnostic assay (MASDA), reverse dot blots, and oligonucleotide arrays (DNA Chips). Solution phase hybridization amplification methods may also be used, such as Taqman. Extension based methods include, but are not limited to, amplification refraction mutation systems (ARMS), amplification refractory mutation systems (ALEX), and competitive oligonucleotide priming systems (COPS). Incorporation based methods include, but are not limited to, mini-sequencing and arrayed primer extension (APEX). Restriction enzyme-based detection systems include, but are not limited to, restriction site generating PCR. Lastly, ligation based detection methods include, but are not limited to, oligonucleotide ligation assays (OLA). Signal generation or detection systems that may be used in the methods of the invention include, but are not limited to, fluorescence methods such as fluorescence resonance energy transfer (FRET), fluorescence quenching, fluorescence polarization as well as other chemiluminescence, electrochemiluminescence, Raman, radioactivity, colometric methods, hybridization protection assays and mass spectrometry methods. Further amplification methods include, but are not limited to self sustained replication (SSR), nucleic acid sequence based amplification (NASBA), ligase chain reaction (LCR), strand displacement amplification (SDA) and branched DNA (B-DNA).

### Step 8: Ultrafine Mapping

[0116] This step further maps the candidate regions and genes confirmed in the previous step to identify and validate the responsible polymorphisms associated with Crohn's disease in the human population.

[0117] In a preferred embodiment, the discovered SNPs and polymorphisms of step 7 are ultrafine mapped at a higher density of markers than the fine mapping described herein using the same technology described in step 6.

### Step 9: GeneMap Construction

[0118] The confirmed variations in DNA (including both genic and non-genic regions) are used to build a GeneMap for Crohn's disease. The gene content of this GeneMap is described in more detail below. Such GeneMap can be used for other methods of the invention comprising the diagnostic methods described herein, the susceptibility to Crohn's disease, the response to a particular drug, the efficacy of a particular drug, the screening methods described herein and the treatment methods described herein.

[0119] As is evident to one of ordinary skill in the art, all of the above steps or the steps do not need to be performed, or performed in a given order to practice or use the SNPs, genomic regions, genes, proteins, etc. in the methods of the invention.

Genes from the GeneMap

[0120] In one embodiment the GeneMap consists of genes and targets, in a variety of combinations, identified from the candidate regions listed in Table 1. In another embodiment, all genes from Tables 8-10 are present in the GeneMap. In another preferred embodiment, the GeneMap consists of a selection of genes from Tables 8-10. The genes of the invention (Tables 8-10) are arranged by candidate regions and by their chromosomal location. Such order is for the purpose of clarity and does not reflect any other criteria of selection in the association of the genes with Crohn's disease.

[0121] In the preferred embodiment, genes identified in the WGAS and subsequent fine mapping studies for Crohn's disease (CD) are evaluated using the Ingenuity Pathway Analysis application (IPA, Ingenuity systems) in order to identify direct biological interactions between these genes, and also to identify molecular regulators acting on those genes (indirect interactions) that could be also involved in CD. The purpose of this effort is to decipher the molecules involved in contributing to CD. These gene interaction networks are very valuable tools in the sense that they facilitate extension of the map of gene products that could represent potential drug targets for CD.

### Nucleic Acid Sequences

[0122] The nucleic acid sequences of the present invention may be derived from a variety of sources including DNA, cDNA, synthetic DNA, synthetic RNA, derivatives, mimetics or combinations thereof. Such sequences may comprise genomic DNA, which may or may not include naturally occurring introns, genic regions, nongenic regions, and regulatory regions. Moreover, such genomic DNA may be obtained in association with promoter regions or poly (A) sequences. The sequences, genomic DNA, or cDNA may be obtained in any of several ways. Genomic DNA can be extracted and purified from suitable cells by means well known in the art. Alternatively, mRNA can be isolated from a cell and used to produce cDNA by reverse transcription or other means. The nucleic acids described herein are used in certain embodiments of the methods of the present invention for production of RNA, proteins or polypeptides, through incorporation into cells, tissues, or organisms. In one embodiment, DNA containing all or part of the coding sequence for the genes described in Tables 8-10, or the SNP markers described in Tables 2-7, is incorporated into a vector for expression of the encoded polypeptide in suitable host cells. The invention also comprises the use of the nucleotide sequence of the nucleic acids of this invention to identify DNA probes for the genes described in Tables 8-10 or the SNP markers described in Tables 2-7, PCR primers to amplify the genes described in Tables 8-10 or the SNP markers described in Tables 2-7, nucleotide polymorphisms in the genes described in Tables 8-10, and regulatory elements of the genes described in Tables 8-10. The nucleic acids of the present invention find use as primers and templates for the recombinant production of Crohn's disease-associated peptides or polypeptides, for chromosome and gene mapping, to provide antisense sequences, for tissue distribution studies, to locate and obtain full length genes, to identify and obtain homologous sequences (wild-type and mutants), and in diagnostic applications.

### Antisense Oligonucleotides

[0123] In a particular embodiment of the invention, an antisense nucleic acid or oligonucleotide is wholly or partially complementary to, and can hybridize with, a target nucleic acid (either DNA or RNA) having the sequence of SEQ ID NO:1, NO:3 or any SEQ ID from any Tables of the invention. For example, an antisense nucleic acid or oligonucleotide comprising 16 nucleotides can be sufficient to inhibit expression of at least one gene from Tables 8-10. Alternatively, an antisense nucleic acid or oligonucleotide can be complementary to 5′ or 3′ untranslated regions, or can overlap the translation initiation codon (5′ untranslated and translated regions) of at least one gene from Tables 8-10, or its functional equivalent. In another embodiment, the antisense nucleic acid is wholly or partially complementary to, and can hybridize with, a target nucleic acid that encodes a polypeptide from a gene described in Tables 8-10.

[0124] In addition, oligonucleotides can be constructed which will bind to duplex nucleic acid (i.e., DNA:DNA or DNA:RNA), to form a stable triple helix containing or triplex nucleic acid. Such triplex oligonucleotides can inhibit transcription and/or expression of a gene from Tables 8-10, or its functional equivalent (M.D. Frank-Kamenetskii et al., 1995). Triplex oligonucleotides are constructed using the basepairing rules of triple helix formation and the nucleotide sequence of the genes described in Tables 8-10.

[0125] The present invention encompasses methods of using oligonucleotides in antisense inhibition of the function of the genes from Tables 8-10. In the context of this invention, the term “oligonucleotide” refers to naturally-occurring species or synthetic species formed from naturally-occurring subunits or their close homologs. The term may also refer to moieties that function similarly to oligonucleotides, but have non-naturally-occurring portions. Thus, oligonucleotides may have altered sugar moieties or inter-sugar linkages. Exemplary among these are phosphorothioate and other sulfur containing species which are known in the art. In preferred embodiments, at least one of the phosphodiester bonds of the oligonucleotide has been substituted with a structure that functions to enhance the ability of the compositions to penetrate into the region of cells where the RNA whose activity is to be modulated is located. It is preferred that such substitutions comprise phosphorothioate bonds, methyl phosphonate bonds, or short chain alkyl or cycloalkyl structures. In accordance with other preferred embodiments, the phosphodiester bonds are substituted with structures which are, at once, substantially non-ionic and non-chiral, or with structures which are chiral and enantiomerically specific. Persons of ordinary skill in the art will be able to select other linkages for use in the practice of the invention. Oligonucleotides may also include species that include at least some modified base forms. Thus, purines and pyrimidines other than those normally found in nature may be so employed. Similarly, modifications on the furanosyl portions of the nucleotide subunits may also be effected, as long as the essential tenets of this invention are adhered to. Examples of such modifications are 2′-O-alkyl- and 2′-halogen-substituted nucleotides. Some non-limiting examples of modifications at the 2′ position of sugar moieties which are useful in the present invention include OH, SH, SCH3, F, OCH3, OCN, O(CH2), NH2 and O(CH2)n CH3, where n is from 1 to about 10. Such oligonucleotides are functionally interchangeable with natural oligonucleotides or synthesized oligonucleotides, which have one or more differences from the natural structure. All such analogs are comprehended by this invention so long as they function effectively to hybridize with at least one gene from Tables 8-10 DNA or RNA to inhibit the function thereof.

[0126] The oligonucleotides in accordance with this invention preferably comprise from about 3 to about 50 subunits. It is more preferred that such oligonucleotides and analogs comprise from about 8 to about 25 subunits and still more preferred to have from about 12 to about 20 subunits. As defined herein, a “subunit” is a base and sugar combination suitably bound to adjacent subunits through phosphodiester or other bonds. Antisense nucleic acids or oligonucleotides can be produced by standard techniques (see, e.g., Shewmaker et al., U.S. Pat. No. 6,107,065). The oligonucleotides used in accordance with this invention may be conveniently and routinely made through the well-known technique of solid phase synthesis. Any other means for such synthesis may also be employed; however, the actual synthesis of the oligonucleotides is well within the abilities of the practitioner. It is also well known to prepare other oligonucleotides such as phosphorothioates and alkylated derivatives.

[0127] The oligonucleotides of this invention are designed to be hybridizable with RNA (e.g., mRNA) or DNA from genes described in Tables 8-10. For example, an oligonucleotide (e.g., DNA oligonucleotide) that hybridizes to mRNA from a gene described in Tables 8-10 can be used to target the mRNA for RnaseH digestion. Alternatively an oligonucleotide that can hybridize to the translation initiation site of the mRNA of a gene described in Tables 8-10 can be used to prevent translation of the mRNA. In another approach, oligonucleotides that bind to the double-stranded DNA of a gene from Tables 8-10 can be administered. Such oligonucleotides can form a triplex construct and inhibit the transcription of the DNA encoding polypeptides of the genes described in Tables 8-10. Triple helix pairing prevents the double helix from opening sufficiently to allow the binding of polymerases, transcription factors, or regulatory molecules. Recent therapeutic advances using triplex DNA have been described (see, e.g., J. E. Gee et al., 1994, Molecular and Immunologic Approaches, Futura Publishing Co., Mt. Kisco, N.Y.).

[0128] As non-limiting examples, antisense oligonucleotides may be targeted to hybridize to the following regions: mRNA cap region; translation initiation site; translational termination site; transcription initiation site; transcription termination site; polyadenylation signal; 3′ untranslated region; 5′ untranslated region; 5′ coding region; mid coding region; and 3′ coding region. Preferably, the complementary oligonucleotide is designed to hybridize to the most unique 5′ sequence of a gene described in Tables 8-10, including any of about 15-35 nucleotides spanning the 5′ coding sequence. In accordance with the present invention, the antisense oligonucleotide can be synthesized, formulated as a pharmaceutical composition, and administered to a subject. The synthesis and utilization of antisense and triplex oligonucleotides have been previously described (e.g., Simon et al., 1999; Barre et al., 2000; Elez et al., 2000; Sauter et al., 2000).

[0129] Alternatively, expression vectors derived from retroviruses, adenovirus, herpes or vaccinia viruses or from various bacterial plasmids may be used for delivery of nucleotide sequences to the targeted organ, tissue or cell population. Methods which are well known to those skilled in the art can be used to construct recombinant vectors which will express nucleic acid sequence that is complementary to the nucleic acid sequence encoding a polypeptide from the genes described in Tables 8-10. These techniques are described both in Sambrook et al., 1989 and in Ausubel et al., 1992. For example, expression of at least one gene from Tables 8-10 can be inhibited by transforming a cell or tissue with an expression vector that expresses high levels of untranslatable sense or antisense sequences. Even in the absence of integration into the DNA, such vectors may continue to transcribe RNA molecules until they are disabled by endogenous nucleases. Transient expression may last for a month or more with a nonreplicating vector, and even longer if appropriate replication elements are included in the vector system. Various assays may be used to test the ability of gene-specific antisense oligonucleotides to inhibit the expression of at least one gene from Tables 8-10. For example, mRNA levels of the genes described in Tables 8-10 can be assessed by Northern blot analysis (Sambrook et al., 1989; Ausubel et al., 1992; J. C. Alwine et al. 1977; I. M. Bird, 1998), quantitative or semi-quantitative RT-PCR analysis (see, e.g., W. M. Freeman et al., 1999; Ren et al., 1998; J. M. Cale et al., 1998), or in situ hybridization (reviewed by A. K. Raap, 1998). Alternatively, antisense oligonucleotides may be assessed by measuring levels of the polypeptide from the genes described in Tables 8-10, e.g., by western blot analysis, indirect immunofluorescence and immunoprecipitation techniques (see, e.g., J. M. Walker, 1998, Protein Protocols on CD-ROM, Humana Press, Totowa, N.J.). Any other means for such detection may also be employed, and is well within the abilities of the practitioner.

### Mapping Technologies

[0130] The present invention includes various methods which employ mapping technologies to map SNPs and polymorphisms. For purpose of clarity, this section comprises, but is not limited to, the description of mapping technologies that can be utilized to achieve the embodiments described herein. Mapping technologies may be based on amplification methods, restriction enzyme cleavage methods, hybridization methods, sequencing methods, and cleavage methods using agents.

[0131] Amplification methods include: self sustained sequence replication (Guatelli et al., 1990), transcriptional amplification system (Kwoh et al., 1989), Q-Beta Replicase (Lizardi et al., 1988), isothermal amplification (e.g. Dean et al., 2002; and Hafner et al., 2001), or any other nucleic acid amplification method, followed by the detection of the amplified molecules using techniques well known to those of ordinary skill in the art. These detection schemes are especially useful for the detection of nucleic acid molecules if such molecules are present in very low number.

[0132] Restriction enzyme cleavage methods include: isolating sample and control DNA, amplification (optional), digestion with one or more restriction endonucleases, determination of fragment length sizes by gel electrophoresis and comparing samples and controls. Differences in fragment length sizes between sample and control DNA indicates mutations in the sample DNA. Moreover, sequence specific ribozymes (see, e.g., U.S. Pat. No. 5,498,531) or DNAzyme (e.g. U.S. Pat. No. 5,807,718) can be used to score for the presence of specific mutations by development or loss of a ribozyme or DNAzyme cleavage site.

[0133] Hybridization methods include any measurement of the hybridization or gene expression levels, of sample nucleic acids to probes corresponding to about 2, 3, 4, 5, 6, 7, 8, 9, 10, 15, 20, 25, 30, 50, 75, 100, 200, 500, 1000 or more genes, or ranges of these numbers, such as about 2-10, about 10-20, about 20-50, about 50-100, about 100-200, about 200-500 or about 500-1000 genes of Tables 8-10.

[0134] SNPs and SNP maps of the invention can be identified or generated by hybridizing sample nucleic acids, e.g., DNA or RNA, to high density arrays or bead arrays containing oligonucleotide probes corresponding to the polymorphisms of Tables 2-7 (see the Affymetrix arrays and Illumina bead sets at www.affymetrix.com and www.illumina.com and see Cronin et al., 1996; or Kozal et al., 1996).

[0135] Methods of forming high density arrays of oligonucleotides with a minimal number of synthetic steps are known. The oligonucleotide analogue array can be synthesized on a single or on multiple solid substrates by a variety of methods, including, but not limited to, light-directed chemical coupling, and mechanically directed coupling (see Pirrung, U.S. Pat. No. 5,143,854).

[0136] In brief, the light-directed combinatorial synthesis of oligonucleotide arrays on a glass surface proceeds using automated phosphoramidite chemistry and chip masking techniques. In one specific implementation, a glass surface is derivatized with a silane reagent containing a functional group, e.g., a hydroxyl or amine group blocked by a photolabile protecting group. Photolysis through a photolithographic mask is used selectively to expose functional groups which are then ready to react with incoming 5′ photoprotected nucleoside phosphoramidites. The phosphoramidites react only with those sites which are illuminated (and thus exposed by removal of the photolabile blocking group). Thus, the phosphoramidites only add to those areas selectively exposed from the preceding step. These steps are repeated until the desired array of sequences have been synthesized on the solid surface. Combinatorial synthesis of different oligonucleotide analogues at different locations on the array is determined by the pattern of illumination during synthesis and the order of addition of coupling reagents.

[0137] In addition to the foregoing, additional methods which can be used to generate an array of oligonucleotides on a single substrate are described in PCT Publication Nos. WO 93/09668 and WO 01/23614. High density nucleic acid arrays can also be fabricated by depositing pre-made or natural nucleic acids in predetermined positions. Synthesized or natural nucleic acids are deposited on specific locations of a substrate by light directed targeting and oligonucleotide directed targeting. Another embodiment uses a dispenser that moves from region to region to deposit nucleic acids in specific spots.

[0138] Nucleic acid hybridization simply involves contacting a probe and target nucleic acid under conditions where the probe and its complementary target can form stable hybrid duplexes through complementary base pairing. See WO 99/32660. The nucleic acids that do not form hybrid duplexes are then washed away leaving the hybridized nucleic acids to be detected, typically through detection of an attached detectable label. It is generally recognized that nucleic acids are denatured by increasing the temperature or decreasing the salt concentration of the buffer containing the nucleic acids. Under low stringency conditions (e.g., low temperature and/or high salt) hybrid duplexes (e.g., DNA:DNA, RNA:RNA, or RNA:DNA) will form even where the annealed sequences are not perfectly complementary. Thus, specificity of hybridization is reduced at lower stringency. Conversely, at higher stringency (e.g., higher temperature or lower salt) successful hybridization tolerates fewer mismatches. One of skill in the art will appreciate that hybridization conditions may be selected to provide any degree of stringency.

[0139] In a preferred embodiment, hybridization is performed at low stringency, in this case in 6×SSPET at 37° C. (0.005% Triton X-100), to ensure hybridization and then subsequent washes are performed at higher stringency (e.g., 1×SSPET at 37° C.) to eliminate mismatched hybrid duplexes. Successive washes may be performed at increasingly higher stringency (e.g., down to as low as 0.25×SSPET at 37° C. to 50° C.) until a desired level of hybridization specificity is obtained. Stringency can also be increased by addition of agents such as formamide. Hybridization specificity may be evaluated by comparison of hybridization to the test probes with hybridization to the various controls that can be present (e.g., expression level control, normalization control, mismatch controls, etc.).

[0140] In general, there is a tradeoff between hybridization specificity (stringency) and signal intensity. Thus, in a preferred embodiment, the wash is performed at the highest stringency that produces consistent results and that provides a signal intensity greater than approximately 10% of the background intensity. Thus, in a preferred embodiment, the hybridized array may be washed at successively higher stringency solutions and read between each wash. Analysis of the data sets thus produced will reveal a wash stringency above which the hybridization pattern is not appreciably altered and which provides adequate signal for the particular oligonucleotide probes of interest.

[0141] Probes based on the sequences of the genes described above may be prepared by any commonly available method. Oligonucleotide probes for screening or assaying a tissue or cell sample are preferably of sufficient length to specifically hybridize only to appropriate, complementary genes or transcripts. Typically the oligonucleotide probes will be at least about 10, 12, 14, 16, 18, 20 or 25 nucleotides in length. In some cases, longer probes of at least 30, 40, or 50 nucleotides will be desirable.

[0142] As used herein, oligonucleotide sequences that are complementary to one or more of the genes or gene fragments described in Tables 8-10 refer to oligonucleotides that are capable of hybridizing under stringent conditions to at least part of the nucleotide sequences of said genes. Such hybridizable oligonucleotides will typically exhibit at least about 75% sequence identity at the nucleotide level to said genes, preferably about 80% or 85% sequence identity or more preferably about 90% or 95% or more sequence identity to said genes (see GeneChip® Expression Analysis Manual, Affymetrix, Rev. 3, which is herein incorporated by reference in its entirety).

[0143] The phrase “hybridizing specifically to” or “specifically hybridizes” refers to the binding, duplexing, or hybridizing of a molecule substantially to or only to a particular nucleotide sequence or sequences under stringent conditions when that sequence is present in a complex mixture (e.g., total cellular) DNA or RNA.

[0144] As used herein a “probe” is defined as a nucleic acid, capable of binding to a target nucleic acid of complementary sequence through one or more types of chemical bonds, usually through complementary base pairing, usually through hydrogen bond formation. As used herein, a probe may include natural (i.e., A, G, U, C, or T) or modified bases (7-deazaguanosine, inosine, etc.). In addition, the bases in probes may be joined by a linkage other than a phosphodiester bond, so long as it does not interfere with hybridization. Thus, probes may be peptide nucleic acids in which the constituent bases are joined by peptide bonds rather than phosphodiester linkages.

[0145] A variety of sequencing reactions known in the art can be used to directly sequence nucleic acids for the presence or the absence of one or more polymorphisms of Tables 2-7. Examples of sequencing reactions include those based on techniques developed by Maxam and Gilbert (1977) or Sanger (1977). It is also contemplated that any of a variety of automated sequencing procedures can be utilized, including sequencing by mass spectrometry (see, e.g. PCT International Publication No. WO 94/16101; Cohen et al., 1996; and Griffin et al., 1993), real-time pyrophosphate sequencing method (Ronaghi et al., 1998; and Permuft et al., 2001) and sequencing by hybridization (see e.g. Drmanac et al., 2002).

[0146] Other methods of detecting polymorphisms include methods in which protection from cleavage agents is used to detect mismatched bases in RNA/RNA, DNA/DNA or RNA/DNA heteroduplexes (Myers et al., 1985). In general, the technique of “mismatch cleavage” starts by providing heteroduplexes formed by hybridizing (labeled) RNA or DNA containing a wild-type sequence with potentially mutant RNA or DNA obtained from a sample. The double-stranded duplexes are treated with an agent who cleaves single-stranded regions of the duplex such as which will exist due to basepair mismatches between the control and sample strands. For instance, RNA/DNA duplexes can be treated with RNase and DNA/DNA hybrids treated with S1 nuclease to enzymatically digest the mismatched regions. In other embodiments, either DNA/DNA or RNA/DNA duplexes can be treated with hydroxylamine or osmium tetroxide and with piperidine in order to digest mismatched regions. After digestion of the mismatched regions, the resulting material is then separated by size on denaturing polyacrylamide gels to determine the site of a mutation or SNP (see, for example, Cotton et al., 1988; and Saleeba et al., 1992). In a preferred embodiment, the control DNA or RNA can be labeled for detection.

[0147] In still another embodiment, the mismatch cleavage reaction employs one or more proteins that recognize mismatched base pairs in double-stranded DNA (so called “DNA mismatch repair” enzymes) in defined systems for detecting and mapping polymorphisms. For example, the mutY enzyme of E. coli cleaves A at G/A mismatches (Hsu et al., 1994). Other examples include, but are not limited to, the MutHLS enzyme complex of E. coli (Smith and Modrich Proc. 1996) and Cel 1 from the celery (Kulinski et al., 2000) both cleave the DNA at various mismatches. According to an exemplary embodiment, a probe based on a polymorphic site corresponding to a polymorphism of Tables 2-7 is hybridized to a cDNA or other DNA product from a test cell or cells. The duplex is treated with a DNA mismatch repair enzyme, and the cleavage products, if any, can be detected from electrophoresis protocols or the like. See, for example, U.S. Pat. No. 5,459,039. Alternatively, the screen can be performed in vivo following the insertion of the heteroduplexes in an appropriate vector. The whole procedure is known to those ordinary skilled in the art and is referred to as mismatch repair detection (see e.g. Fakhrai-Rad et al., 2004).

[0148] In other embodiments, alterations in electrophoretic mobility can be used to identify polymorphisms in a sample. For example, single strand conformation polymorphism (SSCP) analysis can be used to detect differences in electrophoretic mobility between mutant and wild type nucleic acids (Orita et al., 1989; Cotton et al., 1993; and Hayashi 1992). Single-stranded DNA fragments of case and control nucleic acids will be denatured and allowed to renature. The secondary structure of single-stranded nucleic acids varies according to sequence. The resulting alteration in electrophoretic mobility enables the detection of even a single base change. The DNA fragments may be labeled or detected with labeled probes. The sensitivity of the assay may be enhanced by using RNA (rather than DNA), in which the secondary structure is more sensitive to a change in sequence. In a preferred embodiment, the method utilizes heteroduplex analysis to separate double stranded heteroduplex molecules on the basis of changes in electrophoretic mobility (Kee et al., 1991).

[0149] In yet another embodiment, the movement of mutant or wild-type fragments in a polyacrylamide gel containing a gradient of denaturant is assayed using denaturing gradient gel electrophoresis (DGGE) (Myers et al., 1985). When DGGE is used as the method of analysis, DNA will be modified to insure that it does not completely denature, for example by adding a GC clamp of approximately 40 bp of high-melting GC-rich DNA by PCR. In a further embodiment, a temperature gradient is used in place of a denaturing gradient to identify differences in the mobility of control and sample DNA (Rosenbaum et al., 1987). In another embodiment, the mutant fragment is detected using denaturing HPLC (see e.g. Hoogendoorn et al., 2000).

[0150] Examples of other techniques for detecting polymorphisms include, but are not limited to, selective oligonucleotide hybridization, selective amplification, selective primer extension, selective ligation, single-base extension, selective termination of extension or invasive cleavage assay. For example, oligonucleotide primers may be prepared in which the polymorphism is placed centrally and then hybridized to target DNA under conditions which permit hybridization only if a perfect match is found (Saiki et al., 1986; Saiki et al., 1989). Such oligonucleotides are hybridized to PCR amplified target DNA or a number of different mutations when the oligonucleotides are attached to the hybridizing membrane and hybridized with labeled target DNA. Alternatively, the amplification, the allele-specific hybridization and the detection can be done in a single assay following the principle of the 5′ nuclease assay (e.g. see Livak et al., 1995). For example, the associated allele, a particular allele of a polymorphic locus, or the like is amplified by PCR in the presence of both allele-specific oligonucleotides, each specific for one or the other allele. Each probe has a different fluorescent dye at the 5′ end and a quencher at the 3′ end. During PCR, if one or the other or both allele-specific oligonucleotides are hybridized to the template, the Taq polymerase via its 5′ exonuclease activity will release the corresponding dyes. The latter will thus reveal the genotype of the amplified product.

[0151] Hybridization assays may also be carried out with a temperature gradient following the principle of dynamic allele-specific hybridization or like e.g. Jobs et al., (2003); and Bourgeois and Labuda, (2004). For example, the hybridization is done using one of the two allele-specific oligonucleotides labeled with a fluorescent dye, and an intercalating quencher under a gradually increasing temperature. At low temperature, the probe is hybridized to both the mismatched and full-matched template. The probe melts at a lower temperature when hybridized to the template with a mismatch. The release of the probe is captured by an emission of the fluorescent dye, away from the quencher. The probe melts at a higher temperature when hybridized to the template with no mismatch. The temperature-dependent fluorescence signals therefore indicate the absence or presence of an associated allele, a particular allele of a polymorphic locus, or the like (e.g. Jobs et al., 2003). Alternatively, the hybridization is done under a gradually decreasing temperature. In this case, both allele-specific oligonucleotides are hybridized to the template competitively. At high temperature none of the two probes are hybridized. Once the optimal temperature of the full-matched probe is reached, it hybridizes and leaves no target for the mismatched probe (e.g. Bourgeois and Labuda, 2004). In the latter case, if the allele-specific probes are differently labeled, then they are hybridized to a single PCR-amplified target. If the probes are labeled with the same dye, then the probe cocktail is hybridized twice to identical templates with only one labeled probe, different in the two cocktails, in the presence of the unlabeled competitive probe.

[0152] Alternatively, allele specific amplification technology that depends on selective PCR amplification may be used in conjunction with the present invention. Oligonucleotides used as primers for specific amplification may carry the associated allele, a particular allele of a polymorphic locus, or the like, also referred to as “mutation” of interest in the center of the molecule, so that amplification depends on differential hybridization (Gibbs et al., 1989) or at the extreme 3′ end of one primer where, under appropriate conditions, mismatch can prevent, or reduce polymerase extension (Prossner, 1993). In addition it may be desirable to introduce a novel restriction site in the region of the mutation to create cleavage-based detection (Gasparini et al., 1992). It is anticipated that in certain embodiments, amplification may also be performed using Taq ligase for amplification (Barany, 1991). In such cases, ligation will occur only if there is a perfect match at the 3′ end of the 5′ sequence making it possible to detect the presence of a known associated allele, a particular allele of a polymorphic locus, or the like at a specific site by looking for the presence or absence of amplification. The products of such an oligonucleotide ligation assay can also be detected by means of gel electrophoresis. Furthermore, the oligonucleotides may contain universal tags used in PCR amplification and zip code tags that are different for each allele. The zip code tags are used to isolate a specific, labeled oligonucleotide that may contain a mobility modifier (e.g. Grossman et al., 1994).

[0153] In yet another alternative, allele-specific elongation followed by ligation will form a template for PCR amplification. In such cases, elongation will occur only if there is a perfect match at the 3′ end of the allele-specific oligonucleotide using a DNA polymerase. This reaction is performed directly on the genomic DNA and the extension/ligation products are amplified by PCR. To this end, the oligonucleotides contain universal tags allowing amplification at a high multiplex level and a zip code for SNP identification. The PCR tags are designed in such a way that the two alleles of a SNP are amplified by different forward primers, each having a different dye. The zip code tags are the same for both alleles of a given SNPs and they are used for hybridization of the PCR-amplified products to oligonucleotides bound to a solid support, chip, bead array or like. For an example of the procedure, see Fan et al. (Cold Spring Harbor Symposia on Quantitative Biology, Vol. LXVIII, pp. 69-78 2003).

[0154] Another alternative includes the single-base extension/ligation assay using a molecular inversion probe, consisting of a single, long oligonucleotide (see e.g. Hardenbol et al., 2003). In such an embodiment, the oligonucleotide hybridizes on both side of the SNP locus directly on the genomic DNA, leaving a one-base gap at the SNP locus. The gap-filling, one-base extension/ligation is performed in four tubes, each having a different dNTP. Following this reaction, the oligonucleotide is circularized whereas unreactive, linear oligonucleotides are degraded using an exonuclease such as exonuclease I of E. coli. The circular oligonucleotides are then linearized and the products are amplified and labeled using universal tags on the oligonucleotides. The original oligonucleotide also contains a SNP-specific zip code allowing hybridization to oligonucleotides bound to a solid support, chip, and bead array or like. This reaction can be performed at a high multiplexed level.

[0155] In another alternative, the associated allele, a particular allele of a polymorphic locus, or the like is scored by single-base extension (see e.g. U.S. Pat. No. 5,888,819). The template is first amplified by PCR. The extension oligonucleotide is then hybridized next to the SNP locus and the extension reaction is performed using a thermostable polymerase such as ThermoSequenase (GE Healthcare) in the presence of labeled ddNTPs. This reaction can therefore be cycled several times. The identity of the labeled ddNTP incorporated will reveal the genotype at the SNP locus. The labeled products can be detected by means of gel electrophoresis, fluorescence polarization (e.g. Chen et al., 1999) or by hybridization to oligonucleotides bound to a solid support, chip, and bead array or like. In the latter case, the extension oligonucleotide will contain a SNP-specific zip code tag.

[0156] In yet another alternative, a SNP is scored by selective termination of extension. The template is first amplified by PCR and the extension oligonucleotide hybridizes in the vicinity of the SNP locus, close to but not necessarily adjacent to it. The extension reaction is carried out using a thermostable polymerase such as ThermoSequenase (GE Healthcare) in the presence of a mix of dNTPs and at least one ddNTP. The latter has to terminate the extension at one of the allele of the interrogated SNP, but not both such that the two alleles will generate extension products of different sizes. The extension product can then be detected by means of gel electrophoresis, in which case the extension products need to be labeled, or by mass spectrometry (see e.g. Storm et al., 2003).

[0157] In another alternative, SNPs are detected using an invasive cleavage assay (see U.S. Pat. No. 6,090,543). There are five oligonucleotides per SNP to interrogate but these are used in a two step-reaction. During the primary reaction, three of the designed oligonucleotides are first hybridized directly to the genomic DNA. One of them is locus-specific and hybridizes up to the SNP locus (the pairing of the 3′ base at the SNP locus is not necessary). There are two allele-specific oligonucleotides that hybridize in tandem to the locus-specific probe but also contain a 5′ flap that is specific for each allele of the SNP. Depending upon hybridization of the allele-specific oligonucleotides at the base of the SNP locus, this creates a structure that is recognized by a cleavase enzyme (U.S. Pat. No. 6,090,606) and the allele-specific flap is released. During the secondary reaction, the flap fragments hybridize to a specific cassette to recreate the same structure as above except that the cleavage will release a small DNA fragment labeled with a fluorescent dye that can be detected using regular fluorescence detector. In the cassette, the emission of the dye is inhibited by a quencher.

Methods to Identify Agents that Modulate the Expression of a Nucleic Acid Encoding a Gene Involved in Crohn's Disease.

[0158] The present invention provides methods for identifying agents that modulate the expression of a nucleic acid encoding a gene from Tables 8-10. Such methods may utilize any available means of monitoring for changes in the expression level of the nucleic acids of the invention. As used herein, an agent is said to modulate the expression of a nucleic acid of the invention if it is capable of up- or down-regulating expression of the nucleic acid in a cell. Such cells can be obtained from any parts of the body such as the GI track, colon, esophagus, stomach, rectum, jujenum, ileum, mucosa, submucosa, cecum, rectum, scalp, blood, dermis, epidermis, skin cells, cutaneous surfaces, intertrigious areas, genitalia, vessels and endothelium. Some non-limiting examples of cells that can be used are: muscle cells, nervous cells, blood and vessels cells, dermis, epidermis and other skin cells, T cell, mast cell, CD4+ lymphocyte, monocyte, macrophage, synovial cell, glial cell, villous intestinal cell, neutrophilic granulocyte, eosinophilic granulocyte, keratinocyte, lamina propria lymphocyte, intraepithelial lymphocyte, epithelial cells and lymphocytes.

[0159] In one assay format, the expression of a nucleic acid encoding a gene of the invention (see Tables 8-10) in a cell or tissue sample is monitored directly by hybridization to the nucleic acids of the invention. Cell lines or tissues are exposed to the agent to be tested under appropriate conditions and time and total RNA or mRNA is isolated by standard procedures such as those disclosed in Sambrook et al., (1989) Molecular Cloning: A Laboratory Manual, Cold Spring Harbor Laboratory Press).

[0160] Probes to detect differences in RNA expression levels between cells exposed to the agent and control cells may be prepared as described above. Hybridization conditions are modified using known methods, such as those described by Sambrook et al., and Ausubel et al., as required for each probe. Hybridization of total cellular RNA or RNA enriched for polyA RNA can be accomplished in any available format. For instance, total cellular RNA or RNA enriched for polyA RNA can be affixed to a solid support and the solid support exposed to at least one probe comprising at least one, or part of one of the sequences of the invention under conditions in which the probe will specifically hybridize. Alternatively, nucleic acid fragments comprising at least one, or part of one of the sequences of the invention can be affixed to a solid support, such as a silicon chip or a porous glass wafer. The chip or wafer can then be exposed to total cellular RNA or polyA RNA from a sample under conditions in which the affixed sequences will specifically hybridize to the RNA. By examining for the ability of a given probe to specifically hybridize to an RNA sample from an untreated cell population and from a cell population exposed to the agent, agents which up or down regulate expression are identified.

Methods to Identify Agents that Modulate the Activity of a Protein Encoded by a Gene Involved in Crohn's Disease.

[0161] The present invention provides methods for identifying agents that modulate at least one activity of the proteins described in Tables 8-10. Such methods may utilize any means of monitoring or detecting the desired activity. As used herein, an agent is said to modulate the expression of a protein of the invention if it is capable of up- or down-regulating expression of the protein in a cell. Such cells can be obtained from any parts of the body such as the GI track, colon, esophagus, stomach, rectum, jujenum, ileum, mucosa, submucosa, cecum, rectum, scalp, blood, dermis, epidermis, skin cells, cutaneous surfaces, intertrigious areas, genitalia, vessels and endothelium. Some non-limiting examples of cells that can be used are: muscle cells, nervous cells, blood and vessels cells, dermis, epidermis and other skin cells, T cell, mast cell, CD4+ lymphocyte, monocyte, macrophage, synovial cell, glial cell, villous intestinal cell, neutrophilic granulocyte, eosinophilic granulocyte, keratinocyte, lamina propria lymphocyte, intraepithelial lymphocyte, epithelial cells and lymphocytes.

[0162] In one format, the specific activity of a protein of the invention, normalized to a standard unit, may be assayed in a cell population that has been exposed to the agent to be tested and compared to an unexposed control cell population may be assayed. Cell lines or populations are exposed to the agent to be tested under appropriate conditions and times. Cellular lysates may be prepared from the exposed cell line or population and a control, unexposed cell line or population. The cellular lysates are then analyzed with the probe.

[0163] Antibody probes can be prepared by immunizing suitable mammalian hosts utilizing appropriate immunization protocols using the proteins of the invention or antigen-containing fragments thereof. To enhance immunogenicity, these proteins or fragments can be conjugated to suitable carriers. Methods for preparing immunogenic conjugates with carriers such as BSA, KLH or other carrier proteins are well known in the art. In some circumstances, direct conjugation using, for example, carbodiimide reagents may be effective; in other instances linking reagents such as those supplied by Pierce Chemical Co. (Rockford, Ill.) may be desirable to provide accessibility to the hapten. The hapten peptides can be extended at either the amino or carboxy terminus with a cysteine residue or interspersed with cysteine residues, for example, to facilitate linking to a carrier. Administration of the immunogens is conducted generally by injection over a suitable time period and with use of suitable adjuvants, as is generally understood in the art. During the immunization schedule, titers of antibodies are taken to determine adequacy of antibody formation. While the polyclonal antisera produced in this way may be satisfactory for some applications, for pharmaceutical compositions, use of monoclonal preparations is preferred. Immortalized cell lines which secrete the desired monoclonal antibodies may be prepared using standard methods, see e.g., Kohler & Milstein (1992) or modifications which affect immortalization of lymphocytes or spleen cells, as is generally known. The immortalized cell lines secreting the desired antibodies can be screened by immunoassay in which the antigen is the peptide hapten, polypeptide or protein. When the appropriate immortalized cell culture secreting the desired antibody is identified, the cells can be cultured either in vitro or by production in ascites fluid. The desired monoclonal antibodies may be recovered from the culture supernatant or from the ascites supernatant. Fragments of the monoclonal antibodies or the polyclonal antisera which contain the immunologically significant portion(s) can be used as antagonists, as well as the intact antibodies. Use of immunologically reactive fragments, such as Fab or Fab′ fragments, is often preferable, especially in a therapeutic context, as these fragments are generally less immunogenic than the whole immunoglobulin. The antibodies or fragments may also be produced, using current technology, by recombinant means. Antibody regions that bind specifically to the desired regions of the protein can also be produced in the context of chimeras derived from multiple species. Antibody regions that bind specifically to the desired regions of the protein can also be produced in the context of chimeras from multiple species, for instance, humanized antibodies. The antibody can therefore be a humanized antibody or a human antibody, as described in U.S. Pat. No. 5,585,089 or Riechmann et al. (1988).

[0164] Agents that are assayed in the above method can be randomly selected or rationally selected or designed. As used herein, an agent is said to be randomly selected when the agent is chosen randomly without considering the specific sequences involved in the association of the protein of the invention alone or with its associated substrates, binding partners, etc. An example of randomly selected agents is the use of a chemical library or a peptide combinatorial library, or a growth broth of an organism. As used herein, an agent is said to be rationally selected or designed when the agent is chosen on a non-random basis which takes into account the sequence of the target site or its conformation in connection with the agent's action. Agents can be rationally selected or rationally designed by utilizing the peptide sequences that make up these sites. For example, a rationally selected peptide agent can be a peptide whose amino acid sequence is identical to or a derivative of any functional consensus site. The agents of the present invention can be, as examples, oligonucleotides, antisense polynucleotides, interfering RNA, peptides, peptide mimetics, antibodies, antibody fragments, small molecules, vitamin derivatives, as well as carbohydrates. Peptide agents of the invention can be prepared using standard solid phase (or solution phase) peptide synthesis methods, as is known in the art. In addition, the DNA encoding these peptides may be synthesized using commercially available oligonucleotide synthesis instrumentation and produced recombinantly using standard recombinant production systems. The production using solid phase peptide synthesis is necessitated if non-gene-encoded amino acids are to be included.

[0165] Another class of agents of the present invention includes antibodies or fragments thereof that bind to a protein encoded by a gene in Tables 8-10. Antibody agents can be obtained by immunization of suitable mammalian subjects with peptides, containing as antigenic regions, those portions of the protein intended to be targeted by the antibodies (see section above of antibodies as probes for standard antibody preparation methodologies).

[0166] In yet another class of agents, the present invention includes peptide mimetics that mimic the three-dimensional structure of the protein encoded by a gene from Tables 8-10. Such peptide mimetics may have significant advantages over naturally occurring peptides, including, for example: more economical production, greater chemical stability, enhanced pharmacological properties (half-life, absorption, potency, efficacy, etc.), altered specificity (e.g., a broad-spectrum of biological activities), reduced antigenicity and others. In one form, mimetics are peptide-containing molecules that mimic elements of protein secondary structure. The underlying rationale behind the use of peptide mimetics is that the peptide backbone of proteins exists chiefly to orient amino acid side chains in such a way as to facilitate molecular interactions, such as those of antibody and antigen. A peptide mimetic is expected to permit molecular interactions similar to the natural molecule. In another form, peptide analogs are commonly used in the pharmaceutical industry as non-peptide drugs with properties analogous to those of the template peptide. These types of non-peptide compounds are also referred to as peptide mimetics or peptidomimetics (Fauchere, 1986; Veber & Freidinger, 1985; Evans et al., 1987) which are usually developed with the aid of computerized molecular modeling. Peptide mimetics that are structurally similar to therapeutically useful peptides may be used to produce an equivalent therapeutic or prophylactic effect. Generally, peptide mimetics are structurally similar to a paradigm polypeptide (i.e., a polypeptide that has a biochemical property or pharmacological activity), but have one or more peptide linkages optionally replaced by a linkage using methods known in the art. Labeling of peptide mimetics usually involves covalent attachment of one or more labels, directly or through a spacer (e.g., an amide group), to non-interfering position(s) on the peptide mimetic that are predicted by quantitative structure-activity data and molecular modeling. Such non-interfering positions generally are positions that do not form direct contacts with the macromolecule(s) to which the peptide mimetic binds to produce the therapeutic effect. Derivitization (e.g., labeling) of peptide mimetics should not substantially interfere with the desired biological or pharmacological activity of the peptide mimetic. The use of peptide mimetics can be enhanced through the use of combinatorial chemistry to create drug libraries. The design of peptide mimetics can be aided by identifying amino acid mutations that increase or decrease binding of the protein to its binding partners. Approaches that can be used include the yeast two hybrid method (see Chien et al., 1991) and the phage display method. The two hybrid method detects protein-protein interactions in yeast (Fields et al., 1989). The phage display method detects the interaction between an immobilized protein and a protein that is expressed on the surface of phages such as lambda and M13 (Amberg et al., 1993; Hogrefe et al., 1993). These methods allow positive and negative selection for protein-protein interactions and the identification of the sequences that determine these interactions.

### Method to Diagnose Crohn's Disease

[0167] The present invention also relates to methods for diagnosing inflammatory bowel disease or a related disease, preferably Crohn's disease (CD), a disposition to such disease, predisposition to such a disease and/or disease progression. In some methods, the steps comprise contacting a target sample with (a) nucleic acid molecule(s) or fragments thereof and comparing the concentration of individual mRNA(s) with the concentration of the corresponding mRNA(s) from at least one healthy donor. An aberrant (increased or decreased) mRNA level of at least one gene from Tables 8-10, at least 5 or 10 genes from Tables 8-10, at least 50 genes from Tables 8-10, at least 100 genes from Tables 8-10 or at least 200 genes from Tables 8-10 determined in the sample in comparison to the control sample is an indication of Crohn's disease or a related disease or a disposition to such kinds of diseases. For diagnosis, samples are, preferably, obtained from inflamed colon tissue. Samples can also be obtained from any parts of the body such as the GI track, colon, esophagus, stomach, rectum, jujenum, ileum, mucosa, submucosa, cecum, rectum, scalp, blood, dermis, epidermis, skin cells, cutaneous surfaces, intertrigious areas, genitalia, vessels and endothelium. Some non-limiting examples of cells that can be used are: muscle cells, nervous cells, blood and vessels cells, dermis, epidermis and other skin cells, T cell, mast cell, CD4+ lymphocyte, monocyte, macrophage, synovial cell, glial cell, villous intestinal cell, neutrophilic granulocyte, eosinophilic granulocyte, keratinocyte, lamina propria lymphocyte, intraepithelial lymphocyte, epithelial cells and lymphocytes.

[0168] For analysis of gene expression, total RNA is obtained from cells according to standard procedures and, preferably, reverse-transcribed. Preferably, a DNAse treatment (in order to get rid of contaminating genomic DNA) is performed. Some non-limiting examples of cells that can be used are: muscle cells, nervous cells, blood and vessels cells, dermis, epidermis and other skin cells, T cell, mast cell, CD4+ lymphocyte, monocyte, macrophage, synovial cell, glial cell, villous intestinal cell, neutrophilic granulocyte, eosinophilic granulocyte, keratinocyte, lamina propria lymphocyte, intraepithelial lymphocyte, epithelial cells and lymphocytes.

[0169] The nucleic acid molecule or fragment is typically a nucleic acid probe for hybridization or a primer for PCR. The person skilled in the art is in a position to design suitable nucleic acids probes based on the information provided in the Tables of the present invention. The target cellular component, i.e. mRNA, e.g., in colon tissue, may be detected directly in situ, e.g. by in situ hybridization or it may be isolated from other cell components by common methods known to those skilled in the art before contacting with a probe. Detection methods include Northern blot analysis, RNase protection, in situ methods, e.g. in situ hybridization, in vitro amplification methods (PCR, LCR, QRNA replicase or RNA-transcription/amplification (TAS, 3SR), reverse dot blot disclosed in EP-B10237362) and other detection assays that are known to those skilled in the art. Products obtained by in vitro amplification can be detected according to established methods, e.g. by separating the products on agarose or polyacrylamide gels and by subsequent staining with ethidium bromide. Alternatively, the amplified products can be detected by using labeled primers for amplification or labeled dNTPs. Preferably, detection is based on a microarray.

[0170] The probes (or primers) (or, alternatively, the reverse-transcribed sample mRNAs) can be detectably labeled, for example, with a radioisotope, a bioluminescent compound, a chemiluminescent compound, a fluorescent compound, a metal chelate, or an enzyme.

[0171] The present invention also relates to the use of the nucleic acid molecules or fragments described above for the preparation of a diagnostic composition for the diagnosis of Crohn's disease or a disposition to such a disease.

[0172] The present invention also relates to the use of the nucleic acid molecules of the present invention for the isolation or development of a compound which is useful for therapy of Crohn's disease. For example, the nucleic acid molecules of the invention and the data obtained using said nucleic acid molecules for diagnosis of Crohn's disease might allow for the identification of further genes which are specifically dysregulated, and thus may be considered as potential targets for therapeutic interventions.

[0173] The invention further provides prognostic assays that can be used to identify subjects having or at risk of developing Crohn's disease. In such method, a test sample is obtained from a subject and the amount and/or concentration of the nucleic acid described in Tables 8-10 is determined; wherein the presence of an associated allele, a particular allele of a polymorphic locus, or the likes in the nucleic acids sequences of this invention (see SEQ ID from Tables 2-10) can be diagnostic for a subject having or at risk of developing Crohn's. As used herein, a “test sample” refers to a biological sample obtained from a subject of interest. For example, a test sample can be a biological fluid, a cell sample, or tissue. A biological fluid can be, but is not limited to saliva, serum, mucus, urine, stools, spermatozoids, vaginal secretions, lymph, amiotic liquid, pleural liquid and tears. Cells can be, but are not limited to: muscle cells, nervous cells, blood and vessels cells, dermis, epidermis and other skin cells, T cell, mast cell, CD4+ lymphocyte, monocyte, macrophage, synovial cell, glial cell, villous intestinal cell, neutrophilic granulocyte, eosinophilic granulocyte, keranocyte, lamina propria lymphocyte, intraephitelial lymphocyte, epithelial cells and lymphocytes.

[0174] Furthermore, the prognostic assays described herein can be used to determine whether a subject can be administered an agent (e.g., an agonist, antagonist, peptidomimetic, polypeptide, nucleic acid such as antisense DNA or interfering RNA (RNAi), small molecule or other drug candidate) to treat Crohn's disease. Specifically, these assays can be used to predict whether an individual will have an efficacious response or will experience adverse events in response to such an agent. For example, such methods can be used to determine whether a subject can be effectively treated with an agent that modulates the expression and/or activity of a gene from Tables 8-10 or the nucleic acids described herein. In another example, an association study may be performed to identify polymorphisms from Tables 2-7 that are associated with a given response to the agent, e.g., an efficacious response or the likelihood of one or more adverse events. Thus, one embodiment of the present invention provides methods for determining whether a subject can be effectively treated with an agent for a disease associated with aberrant expression or activity of a gene from Tables 8-10 in which a test sample is obtained and nucleic acids or polypeptides from Tables 8-10 are detected (e.g., wherein the presence of a particular level of expression of a gene from Tables 8-10 or a particular allelic variant of such gene, such as polymorphisms from Tables 2-7 is diagnostic for a subject that can be administered an agent to treat a disorder such as Crohn's disease). In one embodiment, the method includes obtaining a sample from a subject suspected of having Crohn's disease or an affected individual and exposing such sample to an agent. The expression and/or activity of the nucleic acids and/or genes of the invention are monitored before and after treatment with such agent to assess the effect of such agent. After analysis of the expression values, one skilled in the art can determine whether such agent can effectively treat such subject. In another embodiment, the method includes obtaining a sample from a subject having or susceptible to developing Crohn's disease and determining the allelic constitution of polymorphisms from Tables 2-7 that are associated with a particular response to an agent. After analysis of the allelic constitution of the individual at the associated polymorphisms, one skilled in the art can determine whether such agent can effectively treat such subject.

[0175] The methods of the invention can also be used to detect genetic alterations in a gene from Tables 8-10, thereby determining if a subject with the lesioned gene is at risk for a disease associated with Crohn's disease. In preferred embodiments, the methods include detecting, in a sample of cells from the subject, the presence or absence of a genetic alteration characterized by at least one alteration linked to or affecting the integrity of a gene from Tables 8-10 encoding a polypeptide or the misexpression of such gene. For example, such genetic alterations can be detected by ascertaining the existence of at least one of: (1) a deletion of one or more nucleotides from a gene from Tables 8-10; (2) an addition of one or more nucleotides to a gene from Tables 8-10; (3) a substitution of one or more nucleotides of a gene from Tables 8-10; (4) a chromosomal rearrangement of a gene from Tables 8-10; (5) an alteration in the level of a messenger RNA transcript of a gene from Tables 8-10; (6) aberrant modification of a gene from Tables 8-10, such as of the methylation pattern of the genomic DNA, (7) the presence of a non-wild type splicing pattern of a messenger RNA transcript of a gene from Tables 8-10; (8) inappropriate post-translational modification of a polypeptide encoded by a gene from Tables 8-10; and (9) alternative promoter use. As described herein, there are a large number of assay techniques known in the art which can be used for detecting alterations in a gene from Tables 8-10. A preferred biological sample is a peripheral blood sample obtained by conventional means from a subject. Another preferred biological sample is a buccal swab. Other biological samples can be, but are not limited to, urine, stools, spermatozoids, vaginal secretions, lymph, amiotic liquid, pleural liquid and tears.

[0176] In certain embodiments, detection of the alteration involves the use of a probe/primer in a polymerase chain reaction (PCR) (see, e.g., U.S. Pat. Nos. 4,683,195 and 4,683,202), such as anchor PCR or RACE PCR, or alternatively, in a ligation chain reaction (LCR) (see, e.g., Landegran et al., 1988; and Nakazawa et al., 1994), the latter of which can be particularly useful for detecting point mutations in a gene from Tables 8-10 (see Abavaya et al., 1995). This method can include the steps of collecting a sample of cells from a patient, isolating nucleic acid (e.g., genomic DNA, mRNA, or both) from the cells of the sample, contacting the nucleic acid sample with one or more primers which specifically hybridize to a gene from Tables 8-10 under conditions such that hybridization and amplification of the nucleic acid from Tables 8-10 (if present) occurs, and detecting the presence or absence of an amplification product, or detecting the size of the amplification product and comparing the length to a control sample. PCR and/or LCR may be desirable to use as a preliminary amplification step in conjunction with some of the techniques used for detecting a mutation, an associated allele, a particular allele of a polymorphic locus, or the like described herein.

[0177] Alternative amplification methods include: self sustained sequence replication (Guatelli et al., 1990), transcriptional amplification system (Kwoh et al., 1989), Q-Beta Replicase (Lizardi et al., 1988), isothermal amplification (e.g. Dean et al., 2002); and Hafner et al., 2001), or any other nucleic acid amplification method, followed by the detection of the amplified molecules using techniques well known to those of ordinary skill in the art. These detection schemes are especially useful for the detection of nucleic acid molecules if such molecules are present in very low number.

[0178] In an alternative embodiment, alterations in a gene from Tables 8-10, from a sample cell can be identified by identifying changes in a restriction enzyme cleavage pattern. For example, sample and control DNA is isolated, amplified (optionally), digested with one or more restriction endonucleases, and fragment length sizes are determined by gel electrophoresis and compared. Differences in fragment length sizes between sample and control DNA indicate a mutation(s), an associated allele, a particular allele of a polymorphic locus, or the like in the sample DNA. Moreover, sequence specific ribozymes (see, e.g., U.S. Pat. No. 5,498,531 or DNAzyme e.g. U.S. Pat. No. 5,807,718) can be used to score for the presence of specific associated allele, a particular allele of a polymorphic locus, or the likes by development or loss of a ribozyme or DNAzyme cleavage site.

[0179] The present invention also relates to further methods for diagnosing Crohn's disease or a related disorder, preferably IBD, a disposition to such disorder, predisposition to such a disorder and/or disorder progression. In some methods, the steps comprise contacting a target sample with (a) nucleic molecule(s) or fragments thereof and determining the presence or absence of a particular allele of a polymorphism that confers a disorder-related phenotype (e.g., predisposition to such a disorder and/or disorder progression). The presence of at least one allele from Tables 2-7 that is associated with Crohn's disease (“associated allele”), at least 5 or 10 associated alleles from Table Tables 2-7, at least 50 associated alleles from Table Tables 2-7 at least 100 associated alleles from Table Tables 2-7, or at least 200 associated alleles from Table Tables 2-7 determined in the sample is an indication of Crohn's disease or a related disorder, a disposition or predisposition to such kinds of disorders, or a prognosis for such disorder progression. Samples may be obtained from any parts of the body such as the GI track, colon, esophagus, stomach, rectum, jujenum, ileum, mucosa, submucosa, cecum, rectum, scalp, blood, dermis, epidermis, skin cells, cutaneous surfaces, intertrigious areas, genitalia, vessels and endothelium. Some non-limiting examples of cells that can be used are: muscle cells, nervous cells, blood and vessels cells, dermis, epidermis and other skin cells, T cell, mast cell, CD4+ lymphocyte, monocyte, macrophage, synovial cell, glial cell, villous intestinal cell, neutrophilic granulocyte, eosinophilic granulocyte, keratinocyte, lamina propria lymphocyte, intraepithelial lymphocyte, epithelial cells and lymphocytes.

[0180] In other embodiments, alterations in a gene from Tables 8-10 can be identified by hybridizing sample and control nucleic acids, e.g., DNA or RNA, to high density arrays or bead arrays containing tens to thousands of oligonucleotide probes (Cronin et al., 1996; Kozal et al., 1996). For example, alterations in a gene from Tables 8-10 can be identified in two dimensional arrays containing light-generated DNA probes as described in Cronin et al., (1996). Briefly, a first hybridization array of probes can be used to scan through long stretches of DNA in a sample and control to identify base changes between the sequences by making linear arrays of sequential overlapping probes. This step allows the identification of point mutations, associated alleles, particular alleles of a polymorphic locus, or the like. This step is followed by a second hybridization array that allows the characterization of specific mutations by using smaller, specialized probe arrays complementary to all variants, mutations, alleles detected. Each mutation array is composed of parallel probe sets, one complementary to the wild-type gene and the other complementary to the mutant gene.

[0181] In yet another embodiment, any of a variety of sequencing reactions known in the art can be used to directly sequence a gene from Tables 8-10 and detect an associated allele, a particular allele of a polymorphic locus, or the like by comparing the sequence of the sample gene from Tables 8-10 with the corresponding wild-type (control) sequence. Examples of sequencing reactions include those based on techniques developed by Maxam and Gilbert (1977) or Sanger (1977). It is also contemplated that any of a variety of automated sequencing procedures can be utilized when performing the diagnostic assays (Bio/Techniques 19:448, 1995) including sequencing by mass spectrometry (see, e.g. PCT International Publication No. WO 94/16101; Cohen et al., 1996; and Griffin et al. 1993), real-time pyrophosphate sequencing method (Ronaghi et al., 1998; and Permutt et al., 2001) and sequencing by hybridization (see e.g. Drmanac et al., 2002).

[0182] Other methods of detecting an associated allele, a particular allele of a polymorphic locus, or the likes in a gene from Tables 8-10 include methods in which protection from cleavage agents is used to detect mismatched bases in RNA/RNA, DNA/DNA or RNA/DNA heteroduplexes (Myers et al., 1985). In general, the technique of “mismatch cleavage” starts by providing heteroduplexes formed by hybridizing (labeled) RNA or DNA containing the wild-type gene sequence from Tables 8-10 with potentially mutant RNA or DNA obtained from a tissue sample. The double-stranded duplexes are treated with an agent that cleaves single-stranded regions of the duplex such as which will exist due to basepair mismatches between the control and sample strands. For instance, RNA/DNA duplexes can be treated with RNase and DNA/DNA hybrids treated with S1 nuclease to enzymatically digest the mismatched regions. In other embodiments, either DNA/DNA or RNA/DNA duplexes can be treated with hydroxylamine or osmium tetroxide and with piperidine in order to digest mismatched regions. After digestion of the mismatched regions, the resulting material is then separated by size on denaturing polyacrylamide gels to determine the site of an associated allele, a particular allele of a polymorphic locus, or the like (see, for example, Cotton et al., 1988; Saleeba et al., 1992). In a preferred embodiment, the control DNA or RNA can be labeled for detection, as described herein.

[0183] In still another embodiment, the mismatch cleavage reaction employs one or more proteins that recognize mismatched base pairs in double-stranded DNA (so called “DNA mismatch repair” enzymes) in defined systems for detecting and mapping point an associated allele, a particular allele of a polymorphic locus, or the likes in a gene from Tables 8-10 cDNAs obtained from samples of cells. For example, the mutY enzyme of E. coli cleaves A at G/A mismatches (Hsu et al., 1994). Other examples include, but are not limited to, the MutHLS enzyme complex of E. coli (Smith and Modrich., 1996) and Cel 1 from the celery (Kulinski et al., 2000) both cleave the DNA at various mismatches. According to an exemplary embodiment, a probe based on a gene sequence from Tables 8-10 is hybridized to a cDNA or other DNA product from a test cell or cells. The duplex is treated with a DNA mismatch repair enzyme, and the cleavage products, if any, can be detected using electrophoresis protocols or the like. See, for example, U.S. Pat. No. 5,459,039. Alternatively, the screen can be performed in vivo following the insertion of the heteroduplexes in an appropriate vector. The whole procedure is known to those ordinary skilled in the art and is referred to as mismatch repair detection (see e.g. Fakhrai-Rad et al., 2004).

[0184] In other embodiments, alterations in electrophoretic mobility can be used to identify an associated allele, a particular allele of a polymorphic locus, or the likes in genes from Tables 8-10. For example, single strand conformation polymorphism (SSCP) analysis can be used to detect differences in electrophoretic mobility between mutant and wild type nucleic acids (Orita et al., 1993; see also Cotton, 1993; and Hayashi et al., 1992). Single-stranded DNA fragments of sample and control nucleic acids from Tables 8-10 will be denatured and allowed to renature. The secondary structure of single-stranded nucleic acids varies according to sequence; the resulting alteration in electrophoretic mobility enables the detection of even a single base change. The DNA fragments may be labeled or detected with labeled probes. The sensitivity of the assay may be enhanced by using RNA (rather than DNA), in which the secondary structure is more sensitive to a change in sequence. In a preferred embodiment, the method utilizes heteroduplex analysis to separate double stranded heteroduplex molecules on the basis of changes in electrophoretic mobility (Kee et al., 1991).

[0185] In yet another embodiment, the movement of mutant or wild-type fragments in a polyacrylamide gel containing a gradient of denaturant is assayed using denaturing gradient gel electrophoresis (DGGE) (Myers et al., 1985). When DGGE is used as the method of analysis, DNA will be modified to insure that it does not completely denature, for example by adding a GC clamp of approximately 40 bp of high-melting GC-rich DNA by PCR. In a further embodiment, a temperature gradient is used in place of a denaturing gradient to identify differences in the mobility of control and sample DNA (Rosenbaum et al., 1987). In another embodiment, the mutant fragment is detected using denaturing HPLC (see e.g. Hoogendoorn et al., 2000).

[0186] Examples of other techniques for detecting point mutations, an associated allele, a particular allele of a polymorphic locus, or the like include, but are not limited to, selective oligonucleotide hybridization, selective amplification, selective primer extension, selective ligation, single-base extension, selective termination of extension or invasive cleavage assay. For example, oligonucleotide primers may be prepared in which the known associated allele, particular allele of a polymorphic locus, or the like is placed centrally and then hybridized to target DNA under conditions which permit hybridization only if a perfect match is found (Saiki et al., 1986; Saiki et al., 1989). Such allele specific oligonucleotides are hybridized to PCR amplified target DNA of a number of different associated alleles, a particular allele of a polymorphic locus, or the likes where the oligonucleotides are attached to the hybridizing membrane and hybridized with labeled target DNA. Alternatively, the amplification, the allele-specific hybridization and the detection can be done in a single assay following the principle of the 5′ nuclease assay (e.g. see Livak et al., 1995). For example, the associated allele, a particular allele of a polymorphic locus, or the like locus is amplified by PCR in the presence of both allele-specific oligonucleotides, each specific for one or the other allele. Each probe has a different fluorescent dye at the 5′ end and a quencher at the 3′ end. During PCR, if one or the other or both allele-specific oligonucleotides are hybridized to the template, the Taq polymerase via its 5′ exonuclease activity will release the corresponding dyes. The latter will thus reveal the genotype of the amplified product.

[0187] The hybridization may also be carried out with a temperature gradient following the principle of dynamic allele-specific hybridization or like (e.g. Jobs et al., 2003; and Bourgeois and Labuda, 2004). For example, the hybridization is done using one of the two allele-specific oligonucleotides labeled with a fluorescent dye, an intercalating quencher under a gradually increasing temperature. At low temperature, the probe is hybridized to both the mismatched and full-matched template. The probe melts at a lower temperature when hybridized to the template with a mismatch. The release of the probe is captured by an emission of the fluorescent dye, away from the quencher. The probe melts at a higher temperature when hybridized to the template with no mismatch. The temperature-dependent fluorescence signals therefore indicate the absence or presence of the associated allele, particular allele of a polymorphic locus, or the like (e.g. Jobs et al., supra). Alternatively, the hybridization is done under a gradually decreasing temperature. In this case, both allele-specific oligonucleotides are hybridized to the template competitively. At high temperature none of the two probes is hybridized. Once the optimal temperature of the full-matched probe is reached, it hybridizes and leaves no target for the mismatched probe. In the latter case, if the allele-specific probes are differently labeled, then they are hybridized to a single PCR-amplified target. If the probes are labeled with the same dye, then the probe cocktail is hybridized twice to identical templates with only one labeled probe, different in the two cocktails, in the presence of the unlabeled competitive probe.

[0188] Alternatively, allele specific amplification technology that depends on selective PCR amplification may be used in conjunction with the present invention. Oligonucleotides used as primers for specific amplification may carry the associated allele, particular allele of a polymorphic locus, or the like of interest in the center of the molecule, so that amplification depends on differential hybridization (Gibbs et al., 1989) or at the extreme 3′ end of one primer where, under appropriate conditions, mismatch can prevent, or reduce polymerase extension (Prossner, 1993). In addition it may be desirable to introduce a novel restriction site in the region of the associated allele, particular allele of a polymorphic locus, or the like to create cleavage-based detection (Gasparini et al., 1992). It is anticipated that in certain embodiments amplification may also be performed using Taq ligase for amplification (Barany, 1991). In such cases, ligation will occur only if there is a perfect match at the 3′ end of the 5′ sequence making it possible to detect the presence of a known associated allele, a particular allele of a polymorphic locus, or the like at a specific site by looking for the presence or absence of amplification. The products of such an oligonucleotide ligation assay can also be detected by means of gel electrophoresis. Furthermore, the oligonucleotides may contain universal tags used in PCR amplification and zip code tags that are different for each allele. The zip code tags are used to isolate a specific, labeled oligonucleotide that may contain a mobility modifier (e.g. Grossman et al., 1994).

[0189] In yet another alternative, allele-specific elongation followed by ligation will form a template for PCR amplification. In such cases, elongation will occur only if there is a perfect match at the 3′ end of the allele-specific oligonucleotide using a DNA polymerase. This reaction is performed directly on the genomic DNA and the extension/ligation products are amplified by PCR. To this end, the oligonucleotides contain universal tags allowing amplification at a high multiplex level and a zip code for SNP identification. The PCR tags are designed in such a way that the two alleles of a SNP are amplified by different forward primers, each having a different dye. The zip code tags are the same for both alleles of a given SNP and they are used for hybridization of the PCR-amplified products to oligonucleotides bound to a solid support, chip, bead array or like. For an example of the procedure, see Fan et al. (Cold Spring Harbor Symposia on Quantitative Biology, Vol. LXVIII, pp. 69-78, 2003).

[0190] Another alternative includes the single-base extension/ligation assay using a molecular inversion probe, consisting of a single, long oligonucleotide (see e.g. Hardenbol et al., 2003). In such an embodiment, the oligonucleotide hybridizes on both sides of the SNP locus directly on the genomic DNA, leaving a one-base gap at the SNP locus. The gap-filling, one-base extension/ligation is performed in four tubes, each having a different dNTP. Following this reaction, the oligonucleotide is circularized whereas unreactive, linear oligonucleotides are degraded using an exonulease such as exonuclease I of E. coli. The circular oligonucleotides are then linearized and the products are amplified and labeled using universal tags on the oligonucleotides. The original oligonucleotide also contains a SNP-specific zip code allowing hybridization to oligonucleotides bound to a solid support, chip, bead array or the like. This reaction can be performed at a highly multiplexed level.

[0191] In another alternative, the associated allele, particular allele of a polymorphic locus, or the like is scored by single-base extension (see e.g. U.S. Pat. No. 5,888,819). The template is first amplified by PCR. The extension oligonucleotide is then hybridized next to the SNP locus and the extension reaction is performed using a thermostable polymerase such as ThermoSequenase (GE Healthcare) in the presence of labeled ddNTPs. This reaction can therefore be cycled several times. The identity of the labeled ddNTP incorporated will reveal the genotype at the SNP locus. The labeled products can be detected by means of gel electrophoresis, fluorescence polarization (e.g. Chen et al., 1999) or by hybridization to oligonucleotides bound to a solid support, chip, bead array or the like. In the latter case, the extension oligonucleotide will contain a SNP-specific zip code tag.

[0192] In yet another alternative, the variant is scored by selective termination of extension. The template is first amplified by PCR and the extension oligonucleotide hybridizes in vicinity to the SNP locus, close to but not necessarily adjacent to it. The extension reaction is carried out using a thermostable polymerase such as ThermoSequenase (GE Healthcare) in the presence of a mix of dNTPs and at least one ddNTP. The latter has to terminate the extension at one of the alleles of the interrogated SNP, but not both such that the two alleles will generate extension products of different sizes. The extension product can then be detected by means of gel electrophoresis, in which case the extension products need to be labeled, or by mass spectrometry (see e.g. Storm et al., 2003).

[0193] In another alternative, the associated allele, particular allele of a polymorphic locus, or the like is detected using an invasive cleavage assay (see U.S. Pat. No. 6,090,543). There are five oligonucleotides per SNP to interrogate but these are used in a two step-reaction. During the primary reaction, three of the designed oligonucleotides are first hybridized directly to the genomic DNA. One of them is locus-specific and hybridizes up to the SNP locus (the pairing of the 3′ base at the SNP locus is not necessary). There are two allele-specific oligonucleotides that hybridize in tandem to the locus-specific probe but also contain a 5′ flap that is specific for each allele of the SNP. Depending upon hybridization of the allele-specific oligonucleotides at the base of the SNP locus, this creates a structure that is recognized by a cleavase enzyme (U.S. Pat. No. 6,090,606) and the allele-specific flap is released. During the secondary reaction, the flap fragments hybridize to a specific cassette to recreate the same structure as above except that the cleavage will release a small DNA fragment labeled with a fluorescent dye that can be detected using regular fluorescence detector. In the cassette, the emission of the dye is inhibited by a quencher.

[0194] Other types of markers can also be used for diagnostic purposes. For example, microsatellites can also be useful to detect the genetic predisposition of an individual to a given disorder. Microsatellites consist of short sequence motifs of one or a few nucleotides repeated in tandem. The most common motifs are polynucleotide runs, dinucleotide repeats (particularly the CA repeats) and trinucleotide repeats. However, other types of repeats can also be used. The microsatellites are very useful for genetic mapping because they are highly polymorphic in their length. Microsatellite markers can be typed by various means, including but not limited to DNA fragment sizing, oligonucleotide ligation assay and mass spectrometry. For example, the locus of the microsatellite is amplified by PCR and the size of the PCR fragment will be directly correlated to the length of the microsatellite repeat. The size of the PCR fragment can be detected by regular means of gel electrophoresis. The fragment can be labeled internally during PCR or by using end-labeled oligonucleotides in the PCR reaction (e.g. Mansfield et al., 1996). Alternatively, the size of the PCR fragment is determined by mass spectrometry. In such a case, however, the flanking sequences need to be eliminated. This can be achieved by ribozyme cleavage of an RNA transcript of the microsatellite repeat (Krebs et al., 2001). For example, the microsatellite locus is amplified using oligonucleotides that include a T7 promoter on one end and a ribozyme motif on the other end. Transcription of the amplified fragments will yield an RNA substrate for the ribozyme, releasing small RNA fragments that contain the repeated region. The size of the latter is determined by mass spectrometry. Alternatively, the flanking sequences are specifically degraded. This is achieved by replacing the dTTP in the PCR reaction by dUTP. The dUTP nucleosides are then removed by uracyl DNA glycosylases and the resulting abasic sites are cleaved by either abasic endonucleases such as human AP endonuclease or chemical agents such as piperidine. Bases can also be modified post-PCR by chemical agents such as dimethyl sulfate and then cleaved by other chemical agents such as piperidine (see e.g. Maxam and Gilbert, 1977; U.S. Pat. No. 5,869,242; and U.S. Patent pending Ser. No. 60/335,068).

[0195] In another alternative, an oligonucleotide ligation assay can be performed. The microsatellite locus is first amplified by PCR. Then, different oligonucleotides can be submitted to ligation at the center of the repeat with a set of oligonucleotides covering all the possible lengths of the marker at a given locus (Zirvi et al., 1999). Another example of design of an oligonucleotide assay comprises the ligation of three oligonucleotides; a 5′ oligonucleotide hybridizing to the 5′ flanking sequence, a repeat oligonucleotide of the length of the shortest allele of the marker hybridizing to the repeated region and a set of 3′ oligonucleotides covering all the existing alleles hybridizing to the 3′ flanking sequence and a portion of the repeated region for all the alleles longer than the shortest one. For the shortest allele, the 3′ oligonucleotide exclusively hybridizes to the 3′ flanking sequence (U.S. Pat. No. 6,479,244).

[0196] The methods described herein may be performed, for example, by utilizing pre-packaged diagnostic kits comprising at least one probe nucleic acid selected from the SEQ ID of Tables 2-7, or antibody reagent described herein, which may be conveniently used, for example, in a clinical setting to diagnose patient exhibiting symptoms or a family history of a disorder or disorder involving abnormal activity of genes from Tables 8-10.

### Method to Treat an Animal Suspected of Having Crohn's Disease

[0197] The present invention provides methods of treating a disease associated with Crohn's disease by expressing in vivo the nucleic acids of at least one gene from Tables 8-10. These nucleic acids can be inserted into any of a number of well-known vectors for the transfection of target cells and organisms as described below. The nucleic acids are transfected into cells, ex vivo or in vivo, through the interaction of the vector and the target cell. The nucleic acids encoding a gene from Tables 8-10, under the control of a promoter, then express the encoded protein, thereby mitigating the effects of absent, partial inactivation, or abnormal expression of a gene from Tables 8-10.

[0198] Such gene therapy procedures have been used to correct acquired and inherited genetic defects, cancer, and viral infection in a number of contexts. The ability to express artificial genes in humans facilitates the prevention and/or cure of many important human disorders, including many disorders which are not amenable to treatment by other therapies (for a review of gene therapy procedures, see Anderson, 1992; Nabel & Felgner, 1993; Mitani & Caskey, 1993; Mulligan, 1993; Dillon, 1993; Miller, 1992; Van Brunt, 1998; Vigne, 1995; Kremer & Perricaudet 1995; Doerfler & Bohm 1995; and Yu et al., 1994).

[0199] Delivery of the gene or genetic material into the cell is the first critical step in gene therapy treatment of a disorder. A large number of delivery methods are well known to those of skill in the art. Preferably, the nucleic acids are administered for in vivo or ex vivo gene therapy uses. Non-viral vector delivery systems include DNA plasmids, naked nucleic acid, and nucleic acid complexed with a delivery vehicle such as a liposome. Viral vector delivery systems include DNA and RNA viruses, which have either episomal or integrated genomes after delivery to the cell. For a review of gene therapy procedures, see the references included in the above section.

[0200] The use of RNA or DNA based viral systems for the delivery of nucleic acids take advantage of highly evolved processes for targeting a virus to specific cells in the body and trafficking the viral payload to the nucleus. Viral vectors can be administered directly to patients (in vivo) or they can be used to treat cells in vitro and the modified cells are administered to patients (ex vivo). Conventional viral based systems for the delivery of nucleic acids could include retroviral, lentivirus, adenoviral, adeno-associated and herpes simplex virus vectors for gene transfer. Viral vectors are currently the most efficient and versatile method of gene transfer in target cells and tissues. Integration in the host genome is possible with the retrovirus, lentivirus, and adeno-associated virus gene transfer methods, often resulting in long term expression of the inserted transgene. Additionally, high transduction efficiencies have been observed in many different cell types and target tissues.

[0201] The tropism of a retrovirus can be altered by incorporating foreign envelope proteins, expanding the potential target population of target cells. Lentiviral vectors are retroviral vectors that are able to transduce or infect non-dividing cells and typically produce high viral titers. Selection of a retroviral gene transfer system would therefore depend on the target tissue. Retroviral vectors are comprised of cis-acting long terminal repeats with packaging capacity for up to 6-10 kb of foreign sequence. The minimum cis-acting LTRs are sufficient for replication and packaging of the vectors, which are then used to integrate the therapeutic gene into the target cell to provide permanent transgene expression. Widely used retroviral vectors include those based upon murine leukemia virus (MuLV), gibbon ape leukemia virus (GaLV), Simian Immuno deficiency virus (SIV), human immuno deficiency virus (HIV), and combinations thereof (see, e.g., Buchscher et al., 1992; Johann et al., 1992; Sommerfelt et al., 1990; Wilson et al., 1989; Miller et al., 1999; and PCT/US94/05700).

[0202] In applications where transient expression of the nucleic acid is preferred, adenoviral based systems are typically used. Adenoviral based vectors are capable of very high transduction efficiency in many cell types and do not require cell division. With such vectors, high titer and levels of expression have been obtained. This vector can be produced in large quantities in a relatively simple system. Adeno-associated virus (“AAV”) vectors are also used to transduce cells with target nucleic acids, e.g., in the in vitro production of nucleic acids and peptides, and for in vivo and ex vivo gene therapy procedures (see, e.g., West et al., 1987; U.S. Pat. No. 4,797,368; WO 93/24641; Kotin, 1994; Muzyczka, 1994). Construction of recombinant AAV vectors is described in a number of publications, including U.S. Pat. No. 5,173,414; Tratschin et al., 1985; Tratschin, et al., 1984; Hermonat & Muzyczka, 1984; and Samulski et al., 1989.

[0203] In particular, numerous viral vector approaches are currently available for gene transfer in clinical trials, with retroviral vectors by far the most frequently used system. All of these viral vectors utilize approaches that involve complementation of defective vectors by genes inserted into helper cell lines to generate the transducing agent. pLASN and MFG-S are examples are retroviral vectors that have been used in clinical trials (Dunbar et al., 1995; Kohn et al., 1995; Malech et al., 1997). PA317/pLASN was the first therapeutic vector used in a gene therapy trial (Blaese et al., 1995). Transduction efficiencies of 50% or greater have been observed for MFG-S packaged vectors (Ellem et al., 1997; and Dranoff et al., 1997).

[0204] Recombinant adeno-associated virus vectors (rAAV) are a promising alternative gene delivery systems based on the defective and nonpathogenic parvovirus adeno-associated type 2 virus. All vectors are derived from a plasmid that retains only the AAV 145 bp inverted terminal repeats flanking the transgene expression cassette. Efficient gene transfer and stable transgene delivery due to integration into the genomes of the transduced cell are key features for this vector system (Wagner et al., 1998, Kearns et al., 1996).

[0205] Replication-deficient recombinant adenoviral vectors (Ad) are predominantly used in transient expression gene therapy; because they can be produced at high titer and they readily infect a number of different cell types. Most adenovirus vectors are engineered such that a transgene replaces the Ad E1a, E1b, and E3 genes; subsequently the replication defector vector is propagated in human 293 cells that supply the deleted gene function in trans. Ad vectors can transduce multiple types of tissues in vivo, including nondividing, differentiated cells such as those found in the liver, kidney and muscle tissues. Conventional Ad vectors have a large carrying capacity. An example of the use of an Ad vector in a clinical trial involved polynucleotide therapy for antitumor immunization with intramuscular injection (Sterman et al., 1998). Additional examples of the use of adenovirus vectors for gene transfer in clinical trials include Rosenecker et al., 1996; Sterman et al., 1998; Welsh et al., 1995; Alvarez et al., 1997; Topf et al., 1998.

[0206] Packaging cells are used to form virus particles that are capable of infecting a host cell. Such cells include 293 cells, which package adenovirus, and ψ2 cells or PA317 cells, which package retrovirus. Viral vectors used in gene therapy are usually generated by a producer cell line that packages a nucleic acid vector into a viral particle. The vectors typically contain the minimal viral sequences required for packaging and subsequent integration into a host, other viral sequences being replaced by an expression cassette for the protein to be expressed. The missing viral functions are supplied in trans by the packaging cell line. For example, MV vectors used in gene therapy typically only possess ITR sequences from the MV genome which are required for packaging and integration into the host genome. Viral DNA is packaged in a cell line, which contains a helper plasmid encoding the other MV genes, namely rep and cap, but lacking ITR sequences. The cell line is also infected with adenovirus as a helper. The helper virus promotes replication of the AAV vector and expression of AAV genes from the helper plasmid. The helper plasmid is not packaged in significant amounts due to a lack of ITR sequences. Contamination with adenovirus can be reduced by, e.g., heat treatment to which adenovirus is more sensitive than AAV.

[0207] In many gene therapy applications, it is desirable that the gene therapy vector be delivered with a high degree of specificity to a particular tissue type. A viral vector is typically modified to have specificity for a given cell type by expressing a ligand as a fusion protein with a viral coat protein on the viruses outer surface. The ligand is chosen to have affinity for a receptor known to be present on the cell type of interest. For example, Han et al., 1995, reported that Moloney murine leukemia virus can be modified to express human heregulin fused to gp70, and the recombinant virus infects certain human breast cancer cells expressing human epidermal growth factor receptor. This principle can be extended to other pairs of viruses expressing a ligand fusion protein and target cells expressing a receptor. For example, filamentous phage can be engineered to display antibody fragments (e.g., Fab or Fv) having specific binding affinity for virtually any chosen cellular receptor. Although the above description applies primarily to viral vectors, the same principles can be applied to nonviral vectors. Such vectors can be engineered to contain specific uptake sequences thought to favor uptake by specific target cells.

[0208] Gene therapy vectors can be delivered in vivo by administration to an individual patient, typically by systemic administration (e.g., intravenous, intraperitoneal, intramuscular, subdermal, or intracranial infusion) or topical application. Alternatively, vectors can be delivered to cells ex vivo, such as cells explanted from an individual patient (e.g., lymphocytes, bone marrow aspirates, and tissue biopsy) or universal donor hematopoietic stem cells, followed by reimplantation of the cells into a patient, usually after selection for cells which have incorporated the vector.

[0209] Ex vivo cell transfection for diagnostics, research, or for gene therapy (e.g., via re-infusion of the transfected cells into the host organism) is well known to those of skill in the art. In a preferred embodiment, cells are isolated from the subject organism, transfected with a nucleic acid (gene or cDNA), and re-infused back into the subject organism (e.g., patient). Various cell types suitable for ex vivo transfection are well known to those of skill in the art (see, e.g., Freshney et al., 1994; and the references cited therein for a discussion of how to isolate and culture cells from patients).

[0210] In one embodiment, stem cells are used in ex vivo procedures for cell transfection and gene therapy. The advantage to using stem cells is that they can be differentiated into other cell types in vitro, or can be introduced into a mammal (such as the donor of the cells) where they will engraft in the bone marrow. Methods for differentiating CD34+ cells in vitro into clinically important immune cell types using cytokines such a GM-CSF, IFN-γ and TNF-α are known (see Inaba et al., 1992).

[0211] Stem cells are isolated for transduction and differentiation using known methods. For example, stem cells are isolated from bone marrow cells by panning the bone marrow cells with antibodies which bind unwanted cells, such as CD4+ and CD8+ (T cells), CD45+(panB cells), GR-1 (granulocytes), and lad (differentiated antigen presenting cells).

[0212] Vectors (e.g., retroviruses, adenoviruses, liposomes, etc.) containing therapeutic nucleic acids can be also administered directly to the organism for transduction of cells in vivo. Alternatively, naked DNA can be administered.

[0213] Administration is by any of the routes normally used for introducing a molecule into ultimate contact with blood or tissue cells, as described above. The nucleic acids from Tables 8-10 are administered in any suitable manner, preferably with the pharmaceutically acceptable carriers described above. Suitable methods of administering such nucleic acids are available and well known to those of skill in the art, and, although more than one route can be used to administer a particular composition, a particular route can often provide a more immediate and more effective reaction than another route (see Samulski et al., 1989). The present invention is not limited to any method of administering such nucleic acids, but preferentially uses the methods described herein.

[0214] The present invention further provides other methods of treating Crohn's disease such as administering to an individual having Crohn's disease an effective amount of an agent that regulates the expression, activity or physical state of at least one gene from Tables 8-10. An “effective amount” of an agent is an amount that modulates a level of expression or activity of a gene from Tables 8-10, in a cell in the individual at least about 10%, at least about 20%, at least about 30%, at least about 40%, at least about 50%, at least about 60%, at least about 70%, at least about 80% or more, compared to a level of the respective gene from Tables 8-10 in a cell in the individual in the absence of the compound. The preventive or therapeutic agents of the present invention may be administered, either orally or parenterally, systemically or locally. For example, intravenous injection such as drip infusion, intramuscular injection, intraperitoneal injection, subcutaneous injection, suppositories, intestinal lavage, oral enteric coated tablets, and the like can be selected, and the method of administration may be chosen, as appropriate, depending on the age and the conditions of the patient. The effective dosage is chosen from the range of 0.01 mg to 100 mg per kg of body weight per administration. Alternatively, the dosage in the range of 1 to 1000 mg, preferably 5 to 50 mg per patient may be chosen. The therapeutic efficacy of the treatment may be monitored by observing various parts of the GI tract, by endoscopy, barium, colonoscopy, or any other monitoring methods known in the art. Other ways of monitoring efficacy can be, but are not limited to monitoring inflammatory conditions involving the upper gastrointestinal tract such as monitoring the amelioration on the esophageal discomfort, decrease in pain, improved swallowing, reduced chest pain, decreased heartburn, decreased regurgitation of solids or liquids after swallowing or eating, decrease in vomiting, or improvement in weight gain or improvement in vitality.

[0215] The present invention further provides a method of treating an individual clinically diagnosed with Crohns' disease. The methods generally comprises analyzing a biological sample that includes a cell, in some cases, a GI track cell, from an individual clinically diagnosed with Crohn's disease for the presence of modified levels of expression of at least 1 gene, at least 10 genes, at least 50 genes, at least 100 genes, or at least 200 genes from Tables 8-10. A treatment plan that is most effective for individuals clinically diagnosed as having a condition associated with Crohn's disease is then selected on the basis of the detected expression of such genes in a cell. Treatment may include administering a composition that includes an agent that modulates the expression or activity of a protein from Tables 8-10 in the cell. Information obtained as described in the methods above can also be used to predict the response of the individual to a particular agent. Thus, the invention further provides a method for predicting a patient's likelihood to respond to a drug treatment for a condition associated with Crohn's disease, comprising determining whether modified levels of a gene from Tables 8-10 is present in a cell, wherein the presence of protein is predictive of the patient's likelihood to respond to a drug treatment for the condition. Examples of the prevention or improvement of symptoms accompanied by Crohn's disease that can monitored for effectiveness include prevention or improvement of diarrhea, prevention or improvement of weight loss, inhibition of bowel tissue edema, inhibition of cell infiltration, inhibition of surviving period shortening, and the like, and as a result, a preventing or improving agent for diarrhea, a preventing or improving agent for weight loss, an inhibitor for bowel tissues edema, an inhibitor for cell infiltration, an inhibitor for surviving period shortening, and the like can be identified.

[0216] The invention also provides a method of predicting a response to therapy in a subject having Crohn's disease by determining the presence or absence in the subject of one or more markers associated with Crohn's disease described in Tables 2-7, diagnosing the subject in which the one or more markers are present as having Crohn's disease, and predicting a response to a therapy based on the diagnosis e.g., response to therapy may include an efficacious response and/or one or more adverse events. The invention also provides a method of optimizing therapy in a subject having Crohn's disease by determining the presence or absence in the subject of one or more markers associated with a clinical subtype of Crohn's disease, diagnosing the subject in which the one or more markers are present as having a particular clinical subtype of Crohn's disease, and treating the subject having a particular clinical subtype of Crohn's disease based on the diagnosis. As an example, treatment for the fibrostenotic subtype of Crohn's disease currently includes surgical removal of the affected, strictured part of the bowel.

[0217] Thus, while there are a number of treatments for Crohn's disease currently available, they all are accompanied by various side effects, high costs, and long complicated treatment protocols, which are often not available and effective in a large number of individuals. Accordingly, there remains a need in the art for more effective and otherwise improved methods for treating and preventing Crohn's disease. Thus, there is a continuing need in the medical arts for genetic markers of Crohn's disease and guidance for the use of such markers. The present invention fulfills this need and provides further related advantages.

### EXAMPLES

### Example 1

### Identification of Cases and Controls

[0218] All individuals were sampled from the Quebec founder population (QFP). Membership in the founder population was defined as having four grandparents with French Canadian family names who were born in the Province of Quebec, Canada or in adjacent areas of the Provinces of New Brunswick and Ontario or in New England or New York State. The Quebec founder population has two distinct advantages over general populations for LD mapping. Because it is relatively young (about 12 to 15 generations from the mid 17th century to the present) and because it has a limited but sufficient number of founders (approximately 2600 effective founders, Charbonneau et al. 1987), the Quebec population is characterized both by extended LD and by decreased genetic heterogeneity. The increased extent of LD allows the detection of disease associated genes using a reasonable marker density, while still allowing the increased meiotic resolution of population-based mapping. The number of founders is small enough to result in increased LD and reduced allelic heterogeneity, yet large enough to insure that all of the major disease genes involved in general populations are present in Quebec. Reduced allelic heterogeneity will act to increase relative risk imparted by the remaining alleles and so increase the power of case/control studies to detect genes and gene alleles involved in complex disorders within the Quebec population. The specific combination of age in generations, optimal number of founders and large present population size makes the QFP optimal for LD-based gene mapping.

[0219] Patient inclusion criteria for the study include diagnosis for Crohn's disease by any one of the following: a colonoscopy, a radiological examination with barium, an abdominal surgical operation or a biopsy or a surgical specimen. The colonoscopy diagnosis consists of observing linear, deep or serpentigenous ulcers, pseudopolyps, or skip areas. The barium radiological examination consists of the detection of strictures, ulcerations and string signs by observing the barium enema and the small bowel followed through an NMRI series.

[0220] Patients that were diagnosed with ulcerative colitis, infectious colitis or other intestinal diseases were excluded from the study. All human sampling was subject to ethical review procedures.

[0221] All enrolled QFP subjects (patients and controls) provided a 30 ml blood sample (3 barcoded tubes of 10 ml). Samples were processed immediately upon arrival at Genizon's laboratory. All samples were scanned and logged into a LabVantage Laboratory Information Management System (LIMS), which served as a hub between the clinical data management system and the genetic analysis system. Following centrifugation, the buffy coat containing the white blood cells was isolated from each tube. Genomic DNA was extracted from the buffy coat from one of the tubes, and stored at 4° C. until required for genotyping. DNA extraction was performed with a commercial kit using a guanidine hydrochloride based method (FlexiGene, Qiagen) according to the manufacturer's instructions. The extraction method yielded high molecular weight DNA, and the quality of every DNA sample was verified by agarose gel electrophoresis. Genomic DNA appeared on the gel as a large band of very high molecular weight. The remaining two buffy coats were stored at −80° C. as backups.

[0222] The QFP samples were collected as family trios consisting of Crohn's disease subjects and two first degree relatives. Of the 500 trios, 477 were Parent, Parent, Child (PPC) trios; the remainders were Parent, Child, Child (PCC) trios. Only the PPC trios were used for the analysis reported here because they produced equal numbers of more accurately estimated case and control haplotypes than the PCC trios. 382 trios were used in the genome wide scan and 477 trios were used in the fine mapping component of the study. One member of each trio was affected with Crohn's disease. For the 382 trios used in the genome wide scan, these included 189 daughters, 90 sons, 54 mothers and 49 fathers. When a child was the affected member of the trio, the two non-transmitted parental chromosomes (one from each parent) were used as controls, when one of the parents was affected, that person's spouse provided the control chromosomes. The recruitment of trios allowed a more precise determination of long extended haplotypes.

### Example 2

### Genome Wide Association

[0223] Genotyping was performed using Perlegen's ultra-high-throughput platform. Marker loci were amplified by PCR and hybridized to wafers containing arrays of oligonucleotides. Allele discrimination was performed through allele-specific hybridization. In total, 248,535 SNPs, distributed as evenly as possible throughout the genome, were genotyped on the 382 QFP trios for a total of 372,802,500 genotypes. These markers were mostly selected from various databases including the ˜1.6 million SNP database of Perlegen Life Sciences (Patil, 2001); several thousand were obtained from the HapMap consortium database and/or dbSNP at NCBI. The SNPs were chosen to maximize uniformity of genetic coverage and to cover a distribution of allele frequencies. All SNPs that did not pass the quality controls for the assay, that is, that had a minor allele frequency of less than 1%, a Mendelian error rate within trios greater than 1%, that deviated significantly from the Hardy-Weinberg equilibrium, or that had excessive missing data (cut-off at 5% missing values or higher) were removed from the analysis. Genetic analysis was performed on a total of 165,785 SNPs (158,775 autosomal, 6869 X chromosome and 141 Y chromosome). The average gap size was approximately 17 kb. Of the 165,785 markers, ˜140,000 had a minor allele frequency (MAF) greater than 10% for the QFP.

[0224] The genotyping information was entered into a Unified Genotype Database (a proprietary database under development) from which it was accessed using custom-built programs for export to the genetic analysis pipeline. Analyses of these genotypes were performed with the statistical tools described in Example 3. The GWS permitted the identification of 208 candidate chromosomal regions linked to Crohn's disease (Table 1). Some of these regions were further analyzed by the Fine Mapping approach described in Example 4.

### Example 3

### Genetic Analysis

[0225] 1. Dataset Quality Assessment

[0226] Prior to performing any analysis, the dataset from the GWS was verified for completeness of the trios. The program GGFileMod removed any trios with abnormal family structure or missing individuals (e.g. trios without a proband, duos, singletons, etc.), and calculated the total number of complete trios in the dataset. The trios were also tested to make sure that no subjects within the cohort were related more closely than second cousins (6 meiotic steps).

[0227] Subsequently, the program DataCheck2.1 was used to calculate the following statistics per marker and per family:
[0228] Minor allele frequency (MAF) for each marker; Missing values for each marker and family; Hardy Weinberg Equilibrium for each marker; and Mendelian segregation error rate.

[0229] The following acceptance criteria were applied for internal analysis purposes:
[0230] MAF>1%;
[0231] Missing values<1%;
[0232] Observed non-Mendelian segregation<0.33%;
[0233] Non significant deviation in allele frequencies from Hardy Weinberg equilibrium.

[0234] Markers or families not meeting these criteria were removed from the dataset in the following step. Analyses of variance were performed using the algorithm GenAnova, to assess whether families or markers have a greater effect on missing values and/or non-Mendelian segregation. This was used to determine the smallest number of data points to remove from the dataset in order to meet the requirements for missing values and non-Mendelian segregation. The families and/or markers were removed from the dataset using the program DataPull, which generates an output file that is used for subsequent analysis of the genotype data.

[0235] 2. Phase Determination

[0236] The program PhaseFinderSNP2.0 was used to determine phase from trio data on a marker-by-marker, trio-by-trio basis. The output file contains haplotype data for all trio members, with ambiguities present when all trio members are heterozygous or where data is missing. The program FileWriterTemp was then used to determine case and control haplotypes and to prepare the data in the proper input format for the next stage of analysis, using the expectation maximization algorithm, PL-EM, to call phase on the remaining ambiguities. This stage consists of several modules for resolution of the remaining phase ambiguities. PLEMInOut1 was first used to recode the haplotypes for input into the PL-EM algorithm in 15-marker blocks for the genome wide scan data and for 11 marker blocks for fine and ultra-fine mapping data sets. The haplotype information was encoded as genotypes, allowing for the entry of known phase into the algorithm; this method limits the possible number of estimated haplotypes conditioned on already known phase assignments. The PL-EM algorithm was used to estimate haplotypes from the “pseudo-genotype” data in 11 or 15-marker windows, advancing in increments of one marker across the chromosome. The results were then converted into multiple haplotype files using the program PLEMInOut2. Subsequently PLEMBlockGroup was used to convert the individual 11 or 15-marker block files into one continuous block of haplotypes for the entire chromosome, and to generate files for further analysis by LDSTATS and SINGLETYPE. PLEMBlockGroup takes the consensus estimation of the allele call at each marker over all separate estimations (most markers are estimated 11-15 different times as the 11 or 15 marker blocks pass over their position).

[0237] 3. Haplotype association analysis

[0238] Haplotype association analysis was performed using the program LDSTATS. LDSTATS tests for association of haplotypes with the disease phenotype. The algorithms LDSTATS (v2.0) and LDSTATS (v4.0) define haplotypes using multi-marker windows that advance across the marker map in one-marker increments. Windows can contain any odd number of markers specified as a parameter of the algorithm. Other marker windows can also be used. At each position the frequency of haplotypes in cases and controls was calculated and a chi-square statistic was calculated from case control frequency tables. For LDSTATS v2.0, the significance of the chi-square for single marker and 3-marker windows was calculated as Pearson's chi-square with degrees of freedom. Larger windows of multi-allelic haplotype association were tested using Smith's normalization of the square root of Pearson's Chi-square. In addition, LDSTATS v2.0 calculates Chi-square values for the transmission disequilibrium test (TDT) for single markers in situations where the trios consisted of parents and an affected child.

[0239] LDSTATS v4.0 calculates significance of chi-square values using a permutation test in which case-control status is randomly permuted until 350 permuted chi-square values are observed that are greater than or equal to chi-square value of the actual data. The P value is then calculated as 350/the number of permutations required.

[0240] Table 2 lists the results for association analysis using LDSTATs (v2.0 and v4.0) for the 208 regions described above based on the genome wide scan genotype data for 382 QFP trios. For each region that was associated with Crohn disease in the genome wide scan, we report in Table 3 the allele frequencies and the relative risk (RR) for the haplotypes contributing to the best signal at each SNP in the region. The best signal at a given location was determined by comparing the significance (p-value) of the association with Crohn disease for window sizes of 1, 3, 5, 7, and 9 SNPs, and selecting the most significant window. For a given window size at a given location, the association with Crohn disease was evaluated by comparing the overall distribution of haplotypes in the cases with the overall distribution of haplotypes in the controls. Haplotypes with a relative risk greater than one increase the risk of developing Crohn disease while haplotypes with a relative risk less than one are protective and decrease the risk.

[0241] 4. Conditional Haplotype Analyses

[0242] Conditional haplotype analyses were performed on subsets of the original set of 382 cases and 382 controls using the program LDSTATS (v2.0). The selection of a subset of cases and their matched controls was based on the carrier status of cases at a gene or locus of interest. We selected the gene NOD2 (alias CARD15) on chromosome 16 and the gene IL23R on chromosome 1 based on our association findings using LDSTAT (v2.0) in our fine mapping of these two loci with 477 trios (see below). The most significant association signal in NOD2 was obtained with a haplotype window of size 7 containing SNPs corresponding to SEQ IDs 16969,16970, 16971, 16972, 16973, 16974, 16975 (see Table below for conversion to the specific DNA alleles used). A reduced haplotype diversity was observed and we selected two sets of risk haplotypes for conditional analyses. The first set consisted of haplotypes 2121222 and 1121211 and the second set contained the above two haplotypes and haplotype 2121211. Using the first set, we partitioned the cases into two groups; the first group consisting of those cases that were carrier of a risk haplotype and the second group consisting of the remaining cases, the non carriers. The resulting sample sizes were respectively 125 and 227. LDSTAT (v2.0) was run in each group and regions showing association with Crohn disease are reported in Table 6. Three regions (119, 139 and 163) were associated with Crohn disease in the group of carriers (has_NOD2_caserisk_{—}2hap), indicating the presence of an epistatic interaction between risk factors in those regions and risk factors in NOD2 (Table 6). Seven regions (31, 100, 125, 135, 168, 187 and 196) were associated with Crohn disease in the group of non carriers (not_NOD2_caserisk_{—}2hap), indicating the existence of risk factors acting independently of NOD2. We repeated the process of partitioning the cases into two groups using the second set containing three risk haplotypes. The resulting sample sizes were 200 and 152 for the two groups of cases. Fourteen regions (4, 10, 41, 47, 50, 78, 96, 119, 128, 139, 142, 143, 163 and 171) were associated with Crohn disease in the group of carriers (has_NOD2_caserisk_{—}3hap) indicating the presence of an epistatic interaction between risk factors in those regions and risk factors in NOD2 (Table 6).

[0243] A second conditional analysis was performed using the gene IL23R on chromosome 1. The most significant association in IL23R was obtained with a haplotype window of size 9 containing SNPs corresponding to SEQ IDs 16976, 16977, 16978, 16979, 16980, 16981, 16982, 16983, 16984 (see Table below for conversion to the specific DNA alleles used). A reduced haplotype diversity was observed and we selected one set of protective haplotypes and a risk haplotype for conditional analyses. The protective set consisted of haplotypes 212111122 and 212111121 and the risk haplotype was 221211121. However, due to dominance effects involving the risk haplotype, we considered the risk haplotype 221211121 while excluding heterozygotes involving haplotypes 122122212, 222122211 and 212111122 (the “exclusion” set) and the risk haplotype. Using the first set of protective haplotypes, we partitioned the cases into two groups; the first group consisting of those cases that were carrier of a protective haplotype and the second group consisting of the remaining cases, the non carriers. The resulting sample sizes were respectively 204 and 162. LDSTATS (v2.0) was run in each group and regions showing association with Crohn disease are reported in Table 6. Seven regions (31, 38, 52, 73, 143, 161 and 162) were associated with Crohn disease in the group of carriers (has_IL23R_caseprotective_{—}2hap), indicating the existence of risk factors acting independently of IL23R. Eighteen regions (12, 17, 35, 46, 68, 70, 71, 79, 81, 94, 96, 114, 125, 130, 135, 149, 174 and 206) were associated with Crohn disease in the group of non carriers (not_IL23R_caseprotective_{—}2hap), indicating the presence of an epistatic interaction between risk factors in those regions and risk factors in IL23R (Table 6). We repeated the process of partitioning the cases into two groups using the risk haplotype in IL23R and the exclusion set. The carriers were cases with the risk haplotype but without one of the haplotypes in the exclusion set. The non carriers were the remaining set of cases. The sample sizes for the two groups were 184 and 182 respectively. Two regions (5 and 141) were associated with Crohn disease in the group of carriers (has_IL23R_caserisk_not3) indicating the presence of an epistatic interaction between risk factors in those regions and risk factors in IL23R (Table 6). Twenty five regions (18, 19, 29, 32, 35, 44, 51, 69, 81, 86, 88, 96, 102, 112, 113, 121, 122, 129, 130, 146, 167, 175, 184, 186 and 205) were associated with Crohn disease in the group of non carriers (not_IL23R_caserisk_not3) indicating the presence of risk factors acting independently of IL23R (Table 6).

[0244] For each region that was associated with Crohn disease in the conditional analyses, we report in Table 7 the allele frequencies and the relative risk (RR) for the haplotypes contributing to the best signal at each SNP in the region. The best signal at a given location was determined by comparing the significance (p-value) of the association with Crohn disease for window sizes of 1, 3, 5, 7, and 9 SNPs, and selecting the most significant window. For a given window size at a given location, the association with Crohn disease was evaluated by comparing the overall distribution of haplotypes in the cases with the overall distribution of haplotypes in the controls. Haplotypes with a relative risk greater than one increase the risk of developing Crohn disease while haplotypes with a relative risk less than one are protective and decrease the risk.

DNA alleles used in haplotypes (NOD2/CARD15)

| | | | | | | | |
|---|---|---|---|---|---|---|---|
| SeqID | 16969 | 16970 | 16971 | 16972 | 16973 | 16974 | 16975 |
| Position | 49303427 | 49305205 | 49308676 | 49308899 | 49310925 | 49314041 | 49314275 |
| Allele | T/C | T/C | T/G | A/G | A/G | G/C | T/C |
| RISK | | | | | | | |
| 2121222 | C | T | G | A | G | C | C |
| 1121211 | T | T | G | A | G | G | T |
| 2121211 | C | T | G | A | G | G | T |

DNA alleles used in haplotypes (IL23R)

| | | | | | | | | | |
|---|---|---|---|---|---|---|---|---|---|
| SeqID | 16976 | 16977 | 16978 | 16979 | 16980 | 16981 | 16982 | 16983 | 16984 |
| Position | 67381537 | 67382937 | 67384786 | 67387749 | 67388943 | 67390943 | 67392949 | 67395507 | 67397137 |
| Alleles | T\|G | A\|G | A\|G | T\|G | T\|C | A\|C | T\|C | T\|C | T\|C |
| RISK | | | | | | | | | |
| 221211121 | G | G | A | G | T | A | T | C | T |
| Heterozygotes | | | | | | | | | |
| (risk carrier) | | | | | | | | | |
| 122122212 | T | G | G | T | C | C | C | T | C |
| 222122211 | G | G | G | T | C | C | C | T | T |
| 212111122 | G | A | G | T | T | A | T | C | C |
| PROTECTIVE | | | | | | | | | |
| 212111122 | G | A | G | T | T | A | T | C | C |
| 212111121 | G | A | G | T | T | A | T | C | T |

[0245] 5. Singletype Analysis

[0246] The SINGLETYPE algorithm assesses the significance of case-control association for single markers using the genotype data from the laboratory as input in contrast to LDSTATS single marker window analyses, in which case-control alleles for single markers from estimated haplotypes in file, hapatctr.txt, as input. SINGLETYPE calculates P values for association for both alleles, 1 and 2, as well as for genotypes, 11, 12, and 22, and plots these as −log₁₀ P values for significance of association against marker position.

### Example 4

### Fine Mapping

[0247] Seven of the top regions identified as being associated with Crohn's disease by the GWS were further analyzed by fine mapping using a denser set of markers, in order to validate and/or refine the signal. The fine mapping was carried out using the Illumina BeadStation 500GX SNP genotyping platform. Alleles were genotyped using an allele-specific elongation assay that was ligated to a locus-specific oligonucleotide. The assay was performed directly on genomic DNA at a highly multiplex level and the products were amplified using universal oligonucleotides. For each candidate region, a set of SNP markers was selected with an average inter-marker distance of 1-4 Kb distributed over about 400 Kb to 1 Mb and was roughly centered at the highest point of the GWS curves. The cohort used for the fine mapping consisted of 477 Crohn's disease trios (including the 382 used for the GWS). The algorithms used for genetic analyses were the same as used in the GWS and are described in Example 3. Table 4 lists the fine mapping SNPs for the 7 regions and their respective p values using 477 trios and two analysis methods: LDSTATS(v2.0) and LDSTATS(v4.0). For each region that was associated with Crohn disease in the fine mapping analyses, we report in Table 5a and 5b the allele frequencies and the relative risk (RR) for the haplotypes contributing to the best signal at each SNP in the region. The best signal at a given location was determined by comparing the significance (p-value) of the association with Crohn disease for multiple window sizes, and selecting the most significant window. For a given window size at a given location, the association with Crohn disease was evaluated by comparing the overall distribution of haplotypes in the cases with the overall distribution of haplotypes in the controls. Haplotypes with a relative risk greater than one increase the risk of developing Crohn disease while haplotypes with a relative risk less than one are protective and decrease the risk.

### Example 5

### Gene Identification and Characterization

[0248] A series of gene characterization was performed for each candidate region described in Table 1. Any gene or EST mapping to the interval based on public map data or proprietary map data was considered as a candidate Crohn's disease gene. The approach used to identify all genes located in the critical regions is described below.

[0249] Public Gene Mining

[0250] Once regions were identified using the analyses described above, a series of public data mining efforts were undertaken, with the aim of identifying all genes located within the critical intervals as well as their respective structural elements (i.e., promoters and other regulatory elements, UTRs, exons and splice sites). The initial analysis relied on annotation information stored in public databases (e.g. NCBI, UCSC Genome Bioinformatics, Entrez Human Genome Browser, OMIM—see below for database URL information). Table 8 lists the genes that have been mapped to the 208 candidate regions.

Database URLs

| Name | URL |
|---|---|
| Biocarta | http://www.biocarta.com/ |
| BioCyc | http://www.biocyc.org/ |
| Biomolecular Interaction | http://bind.ca/ |
| Network Database (BIND) | |
| Database of Interacting Proteins | http://dip.doe-mbi.ucla.edu/ |
| Gene Expression Omnibus | http://www.ncbi.nlm.nih.gov/geo/ |
| Human Genome Browser | http://www.ensembl.org/Homo_sapiens/ |
| Interdom | http://interdom.lit.org.sg/help/term.php |
| Kyoto Encyclopedia of Genes | http://www.genome.jp/kegg/ |
| and Genomes (KEGG) | |
| Molecular Interactions Database | http://mint.bio.uniroma2.it/mint/ |
| (MINT) | |
| National Center for | http://www.ncbi.nlm.nih.gov/ |
| Biotechnology Information | |
| (NCBI) | |
| Online Mendelian Inheritance in | http://www.ncbi.nlm.nih.gov/entrez/query.fcgi?db=OMIM |
| Man (OMIM) | |
| OmniViz | http://www.omniviz.com/applications/omni_viz.htm |
| Pathway Enterprise | http://www.omniviz.com/applications/pathways.htm |
| Reactome | http://www.reactome.org/ |
| Transpath | http://www.biobase.de/pages/products/transpath.html |
| UCSC Genome Bioinformatics | http://genome.ucsc.edu/index.html?org=Human |
| UniGene | http://www.ncbi.nlm.nih.gov/entrez/query.fcgi?db=unigene |

[0251] For some genes the available public annotation was extensive, whereas for others very little was known about a gene's function. Customized analysis was therefore performed to characterize genes that corresponded to this latter class. Importantly, the presence of rare splice variants and artifactual ESTs was carefully evaluated. Subsequent cluster analysis of novel ESTs provided an indication of additional gene content in some cases. The resulting clusters were graphically displayed against the genomic sequence, providing indications of separate clusters that may contribute to the same gene, thereby facilitating development of confirmatory experiments in the laboratory. While much of this information was available in the public domain, the customized analysis performed revealed additional information not immediately apparent from the public genome browsers.

[0252] A unique consensus sequence was constructed for each splice variant and a trained reviewer assessed each alignment. This assessment included examination of all putative splice junctions for consensus splice donor/acceptor sequences, putative start codons, consensus Kozak sequences and upstream in-frame stops, and the location of polyadenylation signals. In addition, conserved noncoding sequences (CNSs) that could potentially be involved in regulatory functions were included as important information for each gene. The genomic reference and exon sequences were then archived for future reference. A master assembly that included all splice variants, exons and the genomic structure was used in subsequent analyses (i.e., analysis of polymorphisms). Table 10 lists gene clusters based on the publicly available EST and cDNA clustering algorithm, ECGene.

[0253] An important component of these efforts was the ability to visualize and store the results of the data mining efforts. A customized version of the highly versatile genome browser GBrowse (http://www.gmod.org/) was implemented in order to permit the visualization of several types of information against the corresponding genomic sequence. In addition, the results of the statistical analyses were plotted against the genomic interval, thereby greatly facilitating focused analysis of gene content.

[0254] Computational Analysis of Genes and GeneMaps

[0255] In order to assist in the prioritization of candidate genes for which minimal annotation existed, a series of computational analyses were performed that included basic BLAST searches and alignments to identify related genes. In some cases this provided an indication of potential function. In addition, protein domains and motifs were identified that further assisted in the understanding of potential function, as well as predicted cellular localization.

[0256] A comprehensive review of the public literature was also performed in order to facilitate identification of information regarding the potential role of candidate genes in the pathophysiology of Crohn's disease. In addition to the standard review of the literature, public resources (Medline and other online databases) were also mined for information regarding the involvement of candidate genes in specific signaling pathways. A variety of pathway and yeast two hybrid databases were mined for information regarding protein-protein interactions. These included BIND, MINT, DIP, Interdom, and Reactome, among others. By identifying homologues of genes in the Crohn's candidate regions and exploring whether interacting proteins had been identified already, knowledge regarding the GeneMaps for Crohn's disease was advanced. The pathway information gained from the use of these resources was also integrated with the literature review efforts, as described above.

[0257] Genes identified in the WGAS and subsequent fine-mapping studies for Crohn's disease (CD) were evaluated using the Ingenuity Pathway Analysis application (IPA, Ingenuity systems) in order to identify direct biological interactions between these genes, and also to identify molecular regulators acting on those genes (indirect interactions) that could be also involved in CD. The purpose of this effort was to decipher the molecules involved in contributing to CD. These gene interaction networks are very valuable tools in the sense that they facilitate extension of the map of gene products that could represent potential drug targets for CD.

[0258] Expression Studies

[0259] In order to determine the expression patterns for genes, relevant information was first extracted from public databases. The UniGene database, for example, contains information regarding the tissue source for ESTs and cDNAs contributing to individual clusters. This information was extracted and summarized to provide an indication in which tissues the gene was expressed. Particular emphasis was placed on annotating the tissue source for bona fide ESTs, since many ESTs mapped to Unigene clusters are artifactual. In addition, SAGE and microarray data, also curated at NCBI (Gene Expression Omnibus), provided information on expression profiles for individual genes. Particular emphasis was placed on identifying genes that were expressed in tissues known to be involved in the pathophysiology of Crohn's disease, e.g. intestinal and immune system tissues.

[0260] Polymorphism Analysis

[0261] Polymorphisms identified in candidate genes, including those from the public domain as well as those identified by sequencing candidate genes and regions, are evaluated for potential function. Initially, polymorphisms are examined for potential impact upon encoded proteins. If the protein is a member of a gene family with reported 3-dimensional structural information, this information is used to predict the location of the polymorphism with respect to protein structure. This information provided insight into the potential role of polymorphisms in altering protein or ligand interactions, as well as suitability as a drug target. In a second phase of analysis we evaluate the potential role of polymorphisms in other biological phenomena, including regulation of transcription, splicing and mRNA stability, etc. There are many examples of the functional involvement of naturally occurring polymorphisms in these processes. As part of this analysis, polymorphisms located in promoter or other regulatory elements, canonical splice sites, exonic and intronic splice enhancers and repressors, conserved noncoding sequences and UTRs are localized.

### Example 6

### SNP and Polymorphism Discovery (SNPD)

[0262] Candidate regions are selected for sequencing in order to identify all polymorphisms. In cases where the critical interval, identified by fine mapping, is relatively small (˜50 kb), the entire region, including all introns, is sequenced to identify polymorphisms. In situations where the region is large (>50 kb), candidate genes are prioritized for sequencing, and/or only functional gene elements (promoters, exons and splice sites) are sequenced.

[0263] The samples sequenced are selected according to which haplotypes contribute to the association signal observed in the region. The purpose is to select a set of samples that covered all the major haplotypes in the given region. Each major haplotype must be present in a few copies. The first step therefore consisted of determining the major haplotypes in the region to be sequenced.

[0264] Once a region is defined with the two boundary markers, all the markers used in fine mapping that are located within the region are used to determine the major haplotypes. Long haplotypes covering the whole region are thus inferred using the middle marker as an anchor. The results included two series of haplotype themes that define the major haplotypes, comparing the cases and the controls. This exercise is repeated using an anchor in the peripheral regions to ensure that major haplotype subsets that are not anchored at the original middle marker are not missed.

[0265] Once the major haplotypes are determined as described above, appropriate genomic DNA samples are selected such that each major haplotype and haplotype subset were represented in at least two to four copies.

[0266] The sequencing protocol included the following steps, once a region was delimited:

[0267] 1. Primer Design

[0268] The design of the primers is performed using a proprietary primer design tool. A primer quality control step was included in the primer design process. Primers that successfully passed the control quality process are synthesized by Integrated DNA Technologies (IDT). The sense and anti-sense oligos are separated such that the sense oligos were placed on one plate in the same position as their anti-sense counterparts on another plate. Two additional plates are created from each storage plate, one for use in PCR and the other for sequencing. For PCR, the sense and anti-sense oligos of the same pair are combined in the same well to achieve a final concentration of 1.5 μM for each oligonucleotide.

[0269] 2. PCR Optimization

[0270] PCR conditions are optimized by testing a variety of conditions that included varying salt concentrations and temperatures, as well as including various additives. PCR products are checked for robust amplification and minimal background by agarose gel electrophoresis.

[0271] 3. PCR on Selected Samples

[0272] PCR products used for sequencing are amplified using the conditions chosen during optimization. The PCR products are purified free of salts, dNTPs and unincorporated primers by use of a MultiScreen PCR384 filter plate manufactured by Millipore. Following PCR, the amplicons are quantified by use of a lambda/Hind III standard curve. This is done to ensure that the quantity of PCR product required for sequencing had been generated. The raw data is measured against the standard curve data in Excel by use of a macro.

[0273] 4. Sequencing

[0274] Sequencing of PCR products is performed by DNA Landmarks using ABI 3730 capillary sequencing instruments.

[0275] 5. Sequence analysis

[0276] The ABI Prism SeqScape software (Applied Biosystems) is used for SNP identification. The chromatogram trace files are imported into a SeqScape sequencing project and the base calling is automatically performed. Sequences are then aligned and compared to each other using the SeqScape program. The base calling is checked manually, base by base; editing was performed if needed.

### Example 7

### Ultra Fine Mapping (UFM)

[0277] Once polymorphisms are identified by sequencing efforts as described in Example 6, additional genotyping of all newly found polymorphisms is performed on the samples used in the fine mapping study. Various types of genotyping assays may need to be utilized based on the type of polymorphism identified (i.e., SNP, indel, microsatellite). The assay type can be, but is not restricted to, Sentrix Assay Matrix on Illumina BeadStations, microsatellite on MegaBACE, SNP on ABI or Orchid. The frequencies of genotypes and haplotypes in cases and controls are analyzed in a similar manner as the GWS and fine mapping data. By examining all SNPs in a region, polymorphisms are identified that increase an individual's susceptibility to Crohn's disease. The goal of ultra-fine mapping is to identify the polymorphism that is most associated with disease phenotype as part of the search for the actual DNA polymorphism that confers susceptibility to disease. This statistical identification may need to be corroborated by functional studies.

[0278] All publications, patents and patent applications mentioned in the specification and reference list are herein incorporated by reference in their entirety for all purposes. Various modifications and variations of the described method and system of the invention will be apparent to those skilled in the art without departing from the scope and spirit of the invention. Although the invention has been described in connection with specific preferred embodiments, it should be understood that the invention as claimed should not be unduly limited to such specific embodiments. Indeed, various modifications of the described modes for carrying out the invention that are obvious to those skilled in molecular biology, genetics, or related fields are intended to be within the scope of the following claims.

[0279] The practice of the present invention will employ, unless otherwise indicated, conventional techniques of cell biology, cell culture, molecular biology, transgenic biology, microbiology, recombinant DNA, and immunology, which are within the skill of the art. Such techniques are explained fully in the literature. See, for example, Molecular Cloning A Laboratory Manual, 2nd Ed., ed. by Sambrook, Fritsch and Maniatis (Cold Spring Harbor Laboratory Press: 1989); DNA Cloning, Volumes I and H (D. N. Glover ed., 4); Oligonucleotide Synthesis (M. J. Gait ed., 1984); Mullis et al. U.S. Pat. No. 4,683,195; Nucleic Acid Hybridization (B. D. Hames & S. J. Higgins eds. 1984); Transcription And Translation (B. D. Haines & S. J. Higgins eds. 1984); Culture Of Animal Cells (R. 1. Freshney, Alan R. Liss, Inc., 1987); Immobilized Cells And Enzymes (IRL Press, 1986); B. Perbal, A Practical Guide To Molecular Cloning (1984); the treatise, Methods In Enzymology (Academic Press, Inc., N.Y.); Gene Transfer Vectors For Mammalian Cells (J. H. Miller and M. P. Calos eds., 1987, Cold Spring Harbor Laboratory); Methods In Enzymology, Vols. 154 and 155 (Wu et al. eds.), Immunochemical Methods In Cell And Molecular Biology (Mayer and Walker, eds., Academic Press, London, 1987); Handbook Of Experimental Immunology, Volumes I-IV (D. M. Weir and C. C. Blackwell, eds., 1986); Manipulating the Mouse Embryo, (Cold Spring Harbor Laboratory Press, Cold Spring Harbor, N.Y., 1986).

### REFERENCES

[0280] Aaltonen, J., M. P. Laitinen, et al. (1999). “Human growth differentiation factor 9 (GDF-9) and its novel homolog GDF-9B are expressed in oocytes during early folliculogenesis.” J Clin Endocrinol Metab. 84(8): 2744-50.
[0281] Abbott, D. W., A. Wilkins, et al. (2004). “The Crohn's Disease Protein, NOD2, Requires RIP2 in Order to Induce Ubiquitinylation of a Novel Site on NEMO.” Curr Biol 14(24): 2217-27.
[0282] Adcock, I. M., M. J. Peters, et al. (1993). “Transcription factor interactions in human lung.” Biochem Soc Trans 21 (Pt 3)(3): 277S.
[0283] Agnholt et al (2004). Increased production of granulocyte-macrophage colony-stimulating factor in Crohn's disease—a possible target for infliximab treatment. Eur J Gastroenterol Hepatol. 16(7):649-55.
[0284] Aithal, G. P., C. P. Day, et al. (2001). “Association of single nucleotide polymorphisms in the interleukin-4 gene and interleukin-4 receptor gene with Crohn's disease in a British population.” Genes Immun 2(1): 44-7.
[0285] Alvarado-Kristensson, M. and T. Andersson (2005). “Protein phosphatase 2A regulates apoptosis in neutrophils by dephosphorylating both p38 MAPK and its substrate caspase 3.” J Biol. Chem. 280(7): 6238-44.
[0286] Alwine, J. C., D. J. Kemp, et al. (1977). “Method for detection of specific RNAs in agarose gels by transfer to diazobenzyloxymethyl-paper and hybridization with DNA probes.” Proc Natl Acad Sci USA 74(12): 5350-4.
[0287] Anderson, W. F. (1992). “Human gene therapy.” Science 256(5058): 808-13.
[0288] Andres, P. G. and L. S. Friedman (1999). “Epidemiology and the natural course of inflammatory bowel disease.” Gastroenterol Clin North Am 28(2): 255-81, vii.
[0289] Angeloni, D., F. M. Duh, et al. (2003). “C to A single nucleotide polymorphism in intron 18 of the human MST1R (RON) gene that maps at 3p21.3.” Mol Cell Probes. 17(2-3): 55-7.
[0290] Aoki et al (1995). A novel gene, Translin, encodes a recombination hotspot binding protein associated with chromosomal translocations. Nat. Genet. 10(2):167-74.
[0291] Bai, R. Y., C. Koester, et al. (2002). “SMIF, a Smad4-interacting protein that functions as a co-activator in TGFbeta signalling.” Nat Cell Biol. 4(3): 181-90.
[0292] Barany, F. (1991). “Genetic disease detection and DNA amplification using cloned thermostable ligase.” Proc Natl Acad Sci USA 88(1): 189-93.
[0293] Barre, F. X., S. Ait-Si-Ali, et al. (2000). “Unambiguous demonstration of triple-helix-directed gene modification.” Proc Natl Acad Sci USA 97(7): 3084-8.
[0294] Becker, C., S. Wirtz, et al. (2003). “Constitutive p40 promoter activation and IL-23 production in the terminal ileum mediated by dendritic cells.” J Clin Invest 112(5): 693-706.
[0295] Bednarek, A. K., C. L. Keck-Waggoner, et al. (2001). “WWOX, the FRA16D gene, behaves as a suppressor of tumor growth.” Cancer Res 61(22): 8068-73.
[0296] Behl, C. (1997). “Amyloid beta-protein toxicity and oxidative stress in Alzheimer's disease.” Cell Tissue Res 290(3): 471-80.
[0297] Belkhiri, A., A. Zaika, et al. (2005). “Darpp-32: a novel antiapoptotic gene in upper gastrointestinal carcinomas.” Cancer Res. 65(15): 6583-92.
[0298] Bender, C. F., M. L. Sikes, et al. (2002). “Cancer predisposition and hematopoietic failure in Rad50(S/S) mice.” Genes Dev. 16(17): 2237-51.
[0299] Bespalova, I. N., G. Van Camp, et al. (2001). “Mutations in the Wolfram syndrome 1 gene (WFS1) are a common cause of low frequency sensorineural hearing loss.” Hum Mol Genet. 10(22): 2501-8.
[0300] Bielenberg, D. R., Y. Hida, et al. (2004). “Semaphorin 3F, a chemorepulsant for endothelial cells, induces a poorly vascularized, encapsulated, nonmetastatic tumor phenotype.” J Clin Invest. 114(9): 1260-71.
[0301] Bjursten, M., P. W. Bland, et al. (2005). “Long-term treatment with anti-alpha 4 integrin antibodies aggravates colitis in G alpha i2-deficient mice.” Eur J. Immunol. 35(8): 2274-83.
[0302] Blanchard, C., S. Durual, et al. (2004). “IL-4 and IL-13 up-regulate intestinal trefoil factor expression: requirement for STAT6 and de novo protein synthesis.” J Immunol 172(6): 3775-83.
[0303] Blaser, S., J. Horn, et al. (2004). “The novel human platelet septin SEPT8 is an interaction partner of SEPT4.” Thromb Haemost. 91(5): 959-66.
[0304] Bloch, K. D., J. R. Wolfram, et al. (1995). “Three members of the nitric oxide synthase II gene family (NOS2A, NOS2B, and NOS2C) colocalize to human chromosome 17.” Genomics 27(3): 526-30.
[0305] Boengler, K., F. Pipp, et al. (2003). “The ankyrin repeat containing SOCS box protein 5: a novel protein associated with arteriogenesis.” Biochem Biophys Res Commun 302(1): 17-22.
[0306] Boren, J., A. Ramos-Montoya, et al. (2006). “In situ localization of transketolase activity in epithelial cells of different rat tissues and subcellularly in liver parenchymal cells.” J Histochem Cytochem. 54(2): 191-9.
[0307] Bouma, G. and W. Strober (2003). “The immunological and genetic basis of inflammatory bowel disease.” Nat Rev Immunol 3(7): 521-33.
[0308] Bourgeois, S. and D. Labuda (2004). “Dynamic allele-specific oligonucleotide hybridization on solid support.” Anal Biochem 324(2): 309-11.
[0309] Brightbill, H. D., D. H. Libraty, et al. (1999). “Host defense mechanisms triggered by microbial lipoproteins through toll-like receptors.” Science 285(5428): 732-6.
[0310] Brodbeck, J., A. Davies, et al. (2002). “The ducky mutation in Cacna2d2 results in altered Purkinje cell morphology and is associated with the expression of a truncated alpha 2 delta-2 protein with abnormal function.” J Biol Chem. 277(10): 7684-93.
[0311] Brown, J. L., L. Stowers, et al. (1996). “Human Step 20 homologue hPAK1 links GTPases to the JNK MAP kinase pathway.” Curr Biol 6(5): 598-605.
[0312] Browning, C. M., M. J. Smith, et al. (2001). “Human GLI-2 is a tat activation response element-independent Tat cofactor.” J Virol 75(5): 2314-23.
[0313] Bulavin, D. V., C. Phillips, et al. (2004). “Inactivation of the Wip1 phosphatase inhibits mammary tumorigenesis through p38 MAPK-mediated activation of the p16(Ink4a)-p19(Arf) pathway.” Nat Genet 36(4): 343-50.
[0314] Cai, D., L. K. Clayton, et al. (1999). “AND-34, a novel p130Cas-binding thymic stromal cell protein regulated by adhesion and inflammatory cytokines.” J Immunol. 163(4): 2104-12.
[0315] Cai, D., K. N. Felekkis, et al. (2003). “The GDP exchange factor AND-34 is expressed in B cells, associates with HEF1, and activates Cdc42.” J Immunol. 170(2): 969-78.
[0316] Cale, J. M., C. E. Shaw, et al. (1998). “Optimization of a reverse transcription-polymerase chain reaction (RT-PCR) mass assay for low-abundance mRNA.” Methods Mol Biol 105: 351-71.
[0317] Chamouard, P., L. Grunebaum, et al. (1995). “Prothrombin fragment 1+2 and thrombin-antithrombin III complex as markers of activation of blood coagulation in inflammatory bowel diseases.” Eur J Gastroenterol Hepatol. 7(12): 1183-8.
[0318] Chang, N. S., N. Pratt, et al. (2001). “Hyaluronidase induction of a WW domain-containing oxidoreductase that enhances tumor necrosis factor cytotoxicity.” J Biol Chem 276(5): 3361-70.
[0319] Chavany, C., C. Vicario-Abejon, et al. (1998). “Transgenic mice for interleukin 3 develop motor neuron degeneration associated with autoimmune reaction against spinal cord motor neurons.” Proc Natl Acad Sci USA 95(19): 11354-9.
[0320] Chen, X., L. Levine, et al. (1999). “Fluorescence polarization in homogeneous nucleic acid analysis.” Genome Res 9(5): 492-8.
[0321] Chen, S., X. Yin, et al. (2003). “The C-terminal kinase domain of the p34cdc2-related PITSLRE protein kinase (p110C) associates with p21-activated kinase 1 and inhibits its activity during anoikis.” J Biol Chem 278(22): 20029-36. Epub 2003 Mar. 6.
[0322] Chen, Q., L. Rabach, et al. (2005). “IL-11 receptor alpha in the pathogenesis of IL-13-induced inflammation and remodeling.” J Immunol 174(4): 2305-13.
[0323] Chien, C. T., P. L. Bartel, et al. (1991). “The two-hybrid system: a method to identify and clone genes for proteins that interact with a protein of interest.” Proc Natl Acad Sci USA 88(21): 9578-82.
[0324] Choi, J., B. Nannenga, et al. (2002). “Mice deficient for the wild-type p53-induced phosphatase gene (Wip1) exhibit defects in reproductive organs, immune function, and cell cycle control.” Mol Cell Biol 22(4): 1094-105.
[0325] Clavell, M., H. Correa-Gracian, et al. (2000). “Detection of interferon regulatory factor-1 in lamina propria mononuclear cells in Crohn's disease.” J Pediatr Gastroenterol Nutr. 30(1): 43-7.
[0326] Cobrin, G. M. and M. T. Abreu (2005). “Defects in mucosal immunity leading to Crohn's disease.” Immunol Rev. 206: 277-95.
[0327] Cohen, A. S., D. L. Smisek, et al. (1996). “Emerging technologies for sequencing antisense oligonucleotides: capillary electrophoresis and mass spectrometry.” Adv Chromatogr 36: 127-62.
[0328] Cohn, R. D., M. D. Henry, et al. (2002). “Disruption of DAG1 in differentiated skeletal muscle reveals a role for dystroglycan in muscle regeneration.” Cell 110(5): 639-48.
[0329] Combaret, L., O. A. Adegoke, et al. (2005). “USP19 is a ubiquitin-specific protease regulated in rat skeletal muscle during catabolic states.” Am J Physiol Endocrinol Metab. 288(4): E693-700.
[0330] Costello et al (2005). Dissection of the inflammatory bowel disease transcriptome using genome-wide cDNA microarrays. PLoS Med. August; 2(8):e199.
[0331] Cotton, R. G., N. R. Rodrigues, et al. (1988). “Reactivity of cytosine and thymine in single-base-pair mismatches with hydroxylamine and osmium tetroxide and its application to the study of mutations.” Proc Natl Acad Sci USA 85(12): 4397-401.
[0332] Couve, A., S. Restituito, et al., (2004). “Marlin-1, a novel RNA-binding protein associates with GABA receptors.” J Biol Chem 279(14): 13934-43. Epub 2004 Jan. 12.
[0333] Couzens, M., M. Liu, et al. (2000). “Peptide YY-2 (PYY2) and pancreatic polypeptide-2 (PPY2): species-specific evolution of novel members of the neuropeptide Y gene family.” Genomics 64(3): 318-23.
[0334] Cronin, M. T., R. V. Fucini, et al. (1996). “Cystic fibrosis mutation detection by hybridization to light-generated DNA probe arrays.” Hum Mutat 7(3): 244-55.
[0335] Croucher, P. J., S. Mascheretti, et al. (2003). “Lack of association between the C3435T MDR1 gene polymorphism and inflammatory bowel disease in two independent Northern European populations.” Gastroenterology 125(6): 1919-20; author reply 1920-1.
[0336] Cuppen, E., M. van Ham, et al. (2000). “The zyxin-related protein TRIP6 interacts with PDZ motifs in the adaptor protein RIL and the protein tyrosine phosphatase PTP-BL.” Eur J Cell Biol. 79(4): 283-93.
[0337] Dalwadi, H., B. Wei, et al. (2003). “B cell developmental requirement for the G alpha i2 gene.” J Immunol. 170(4): 1707-15.
[0338] Dean, F. B., S. Hosono, et al. (2002). “Comprehensive human genome amplification using multiple displacement amplification.” Proc Natl Acad Sci USA 99(8): 5261-6.
[0339] del Peso, L., R. Hernandez-Alcoceba, et al. (1997). “Rho proteins induce metastatic properties in vivo.” Oncogene 15(25): 3047-57.
[0340] Dentelli, P., A. Rosso, et al. (2004). “IL-3 affects endothelial cell-mediated smooth muscle cell recruitment by increasing TGF beta activity: potential role in tumor vessel stabilization.” Oncogene 23(9): 1681-92.
[0341] DeSalle, L. M., E. Latres, et al. (2001). “The de-ubiquitinating enzyme Unp interacts with the retinoblastoma protein.” Oncogene. 20(39): 5538-42.
[0342] Deschenes, C., L. Alvarez, et al. (2004). “The nucleocytoplasmic shuttling of E2F4 is involved in the regulation of human intestinal epithelial cell proliferation and differentiation.” J Cell Physiol. 199(2): 262-73.
[0343] Diefenbach, A., H. Schindler, et al. (1999). “Requirement for type 2 NO synthase for IL-12 signaling in innate immunity.” Science 284(5416): 951-5.
[0344] Dijkstra, G., A. J. Zandvoort, et al. (2002). “Increased expression of inducible nitric oxide synthase in circulating monocytes from patients with active inflammatory bowel disease.” Scand J. Gastroenterol. 37(5): 546-54.
[0345] Dillon, N. (1993). “Regulating gene expression in gene therapy.” Trends Biotechnol 11(5): 167-73.
[0346] Ding, Z., L. L. Gillespie, et al. (2003). “Human MI-ER1 alpha and beta function as transcriptional repressors by recruitment of histone deacetylase 1 to their conserved ELM2 domain.” Mol Cell Biol. 23(1): 250-8.
[0347] Donato, J. L., J. Ko, et al. (2002). “Human HTm4 is a hematopoietic cell cycle regulator.” Clin Invest. 109(1): 51-8.
[0348] Donovan, F. M., C. J. Pike, et al. (1997). “Thrombin induces apoptosis in cultured neurons and astrocytes via a pathway requiring tyrosine kinase and RhoA activities.” J Neurosci 17(14): 5316-26.
[0349] Dranoff, G., R. Soiffer, et al. (1997). “A phase I study of vaccination with autologous, irradiated melanoma cells engineered to secrete human granulocyte-macrophage colony stimulating factor.” Hum Gene Ther 8(1): 111-23.
[0350] Drmanac, R., S. Drmanac, et al. (2002). “Sequencing by hybridization (SBH): advantages, achievements, and opportunities.” Adv Biochem Eng Biotechnol 77: 75-101.
[0351] Dryja, T. P., L. B. Hahn, et al. (1996). “Missense mutation in the gene encoding the alpha subunit of rod transducin in the Nougaret form of congenital stationary night blindness.” Nat Genet. 13(3): 358-60.
[0352] Ducale, A. E., S. I. Ward, et al. (2005). “Regulation of hyaluronan synthase-2 expression in human intestinal mesenchymal cells: mechanisms of interleukin-1beta-mediated induction.” Am J Physiol Gastrointest Liver Physiol. 289(3): G462-70.
[0353] Duerr, R. H. (2002). “The genetics of inflammatory bowel disease.” Gastroenterol Clin North Am 31(1): 63-76.
[0354] Dunbar, C. E., M. Cottler-Fox, et al. (1995). “Retrovirally marked CD34-enriched peripheral blood and bone marrow cells contribute to long-term engraftment after autologous transplantation.” Blood 85(11): 3048-57.
[0355] Dusetti, N. J., Y. Jiang, et al. (2002). “Cloning and expression of the rat vacuole membrane protein 1 (VMP1), a new gene activated in pancreas with acute pancreatitis, which promotes vacuole formation.” Biochem Biophys Res Commun 290(2): 641-9.
[0356] Elez, R., A. Piiper, et al. (2000). “Polo-like kinase1, a new target for antisense tumor therapy.” Biochem Biophys Res Commun 269(2): 352-6.
[0357] Ellem, K. A., M. G. O'Rourke, et al. (1997). “A case report: immune responses and clinical course of the first human use of granulocyte/macrophage-colony-stimulating-factor-transduced autologous melanoma cells for immunotherapy.” Cancer Immunol Immunother 44(1): 10-20.
[0358] Esaki, M., M. Furuse, et al. (1999). “Polymorphism of heat-shock protein gene HSP70-2 in Crohn disease: possible genetic marker for two forms of Crohn disease.” Scand J Gastroenterol 34(7): 703-7.
[0359] Esworthy R. S., R. Aranda, et. (2001). “Mice with combined disruption of Gpx1 and Gpx2 genes have colitis.” Am J Physiol Gastrointest Liver Physiol. 281(3):G848-55. PMID: 11518697.
[0360] Evans, B. E., K. E. Rittle, et al. (1987). “Design of nonpeptidal ligands for a peptide receptor: cholecystokinin antagonists.” J Med Chem 30(7): 1229-39.
[0361] Fackler, O. T. and B. M. Peterlin (2000). “Endocytic entry of HIV-1.” Curr Biol 10(16): 1005-8.
[0362] Fakhrai-Rad, H., J. Zheng, et al. (2004). “SNP discovery in pooled samples with mismatch repair detection.” Genome Res 14(7): 1404-12.
[0363] Fan, J. and A. B. Malik (2003). “Toll-like receptor-4 (TLR4) signaling augments chemokine-induced neutrophil migration by modulating cell surface expression of chemokine receptors.” Nat Med 9(3): 315-21.
[0364] Farmer, R. G., G. Whelan, et al. (1985). “Long-term follow-up of patients with Crohn's disease. Relationship between the clinical pattern and prognosis.” Gastroenterology 88(6): 1818-25.
[0365] Fechir, M., K. Linker, et al. (2005). “The RNA binding protein TIAR is involved in the regulation of human iNOS expression.” Cell Mol Biol (Noisy-le-grand). 51(3): 299-305.
[0366] Fidder, H. H., S. Olschwang, et al. (2003). “Association between mutations in the CARD15 (NOD2) gene and Crohn's disease in Israeli Jewish patients.” Am J Med Genet 121A(3): 240-4.
[0367] Fields, S. and O. Song (1989). “A novel genetic system to detect protein-protein interactions.” Nature 340(6230): 245-6.
[0368] Frank-Kamenetskii, M. D. and S. M. Mirkin (1995). “Triplex DNA structures.” Annu Rev Biochem 64: 65-95.
[0369] Freeman, W. M., S. J. Walker, et al. (1999). “Quantitative RT-PCR: pitfalls and potential.” Biotechniques 26(1): 112-22, 124-5.
[0370] Frolova, E. I., G. M. Dolganov, et al. (1991). “Linkage mapping of the human CSF2 and IL3 genes.” Proc Natl Acad Sci USA 88(11): 4821-4.
[0371] Fujita, Y., Y. Ezura, et al. (2004). “Hypercholesterolemia associated with splice-junction variation of inter-alpha-trypsin inhibitor heavy chain 4 (ITIH4) gene.” J Hum Genet. 49(1): 24-8.
[0372] Fukushige, S., K. Matsubara, et al. (1986). “Localization of a novel v-erbB-related gene, c-erbB-2, on human chromosome 17 and its amplification in a gastric cancer cell line.” Mol Cell Biol 6(3): 955-8.
[0373] Fukushima, T., J. M. Zapata, et al. (2006). “Critical function for SIP, a ubiquitin E3 ligase component of the beta-catenin degradation pathway, for thymocyte development and G1 checkpoint.” Immunity. 24(1): 29-39.
[0374] Gainetdinov, R. R., L. M. Bohn, et al. (1999). “Muscarinic supersensitivity and impaired receptor desensitization in G protein-coupled receptor kinase 5-deficient mice.” Neuron. 24(4): 1029-36.
[0375] Gan, B., Z. K. Melkoumian, et al. (2005). “Identification of FIP200 interaction with the TSC1-TSC2 complex and its role in regulation of cell size control.” J Cell Biol. 170(3): 379-89.
[0376] Gary-Gouy, H., J. Harriague, et al. (2002). “CD5-negative regulation of B cell receptor signaling pathways originates from tyrosine residue Y429 outside an immunoreceptor tyrosine-based inhibitory motif.” J. Immunol. 168(1): 232-9.
[0377] Gasparini, P., A. Bonizzato, et al. (1992). “Restriction site generating-polymerase chain reaction (RG-PCR) for the probeless detection of hidden genetic variation: application to the study of some common cystic fibrosis mutations.” Mol Cell Probes 6(1): 1-7.
[0378] Geyer, M., H. Yu, et al. (2002). “Subunit H of the V-ATPase binds to the medium chain of adaptor protein complex 2 and connects Nef to the endocytic machinery.” J Biol Chem 277(32): 28521-9. Epub 2002 May 24.
[0379] Giachino, D., M. M. van Duist, et al. (2004). “Analysis of the CARD15 variants R702W, G908R and L1007fs in Italian IBD patients.” Eur J Hum Genet 12(3): 206-12.
[0380] Gibbs, R. A., P. N. Nguyen, et al. (1989). “Detection of single DNA base differences by competitive oligonucleotide priming.” Nucleic Acids Res 17(7): 2437-48.
[0381] Girardin, S. E., I. G. Boneca, et al. (2003). “Nod2 is a general sensor of peptidoglycan through muramyl dipeptide (MDP) detection.” J Biol Chem 278(11): 8869-72.
[0382] Girardin, S. E., J. P. Hugot, et al. (2003). “Lessons from Nod2 studies: towards a link between Crohn's disease and bacterial sensing.” Trends Immunol 24(12): 652-8.
[0383] Griffin, H. G. and A. M. Griffin (1993). “DNA sequencing. Recent innovations and future trends.” Appl Biochem Biotechnol 38(1-2): 147-59.
[0384] Grossman, P. D., W. Bloch, et al. (1994). “High-density multiplex detection of nucleic acid sequences: oligonucleotide ligation assay and sequence-coded separation.” Nucleic Acids Res 22(21): 4527-34.
[0385] Guatelli, J. C., K. M. Whitfield, et al. (1990). “Isothermal, in vitro amplification of nucleic acids by a multienzyme reaction modeled after retroviral replication.” Proc Natl Acad Sci USA 87(5): 1874-8.
[0386] Guatelli, J. C., K. M. Whitfield, et al. (1990). “Isothermal, in vitro amplification of nucleic acids by a multienzyme reaction modeled after retroviral replication.” Proc Natl Acad Sci USA 87(19): 7797.
[0387] Hafner, G. J., I. C. Yang, et al. (2001). “Isothermal amplification and multimerization of DNA by Bst DNA polymerase.” Biotechniques 30(4): 852-6, 858, 860 passim.
[0388] Hampe, J., J. Grebe, et al. (2002). “Association of NOD2 (CARD 15) genotype with clinical course of Crohn's disease: a cohort study.” Lancet 359(9318): 1661-5.
[0389] Harada, M., Y. Qin, et al. (2005). “G-CSF prevents cardiac remodeling after myocardial infarction by activating the Jak-Stat pathway in cardiomyocytes.” Nat. Med. 11 (3): 305-11.
[0390] Hardenbol, P., J. Baner, et al. (2003). “Multiplexed genotyping with sequence-tagged molecular inversion probes.” Nat Biotechnol 21(6): 673-8. Epub 2003 May 5.
[0391] Hardwick, J. C., G. R. Van Den Brink, et al. (2004). “Bone morphogenetic protein 2 is expressed by, and acts upon, mature epithelial cells in the colon.” Gastroenterology. 126(1): 111-21.
[0392] Hartman, M. E., J. C. O'Connor, et al. (2004). “Insulin receptor substrate-2-dependent interleukin-4 signaling in macrophages is impaired in two models of type 2 diabetes mellitus.” J Biol Chem 279(27): 28045-50.
[0393] Hasegawa, T., A. Yagi, et al. (2000). “Interaction between GADD34 and kinesin superfamily, KIF3A.” Biochem Biophys Res Commun. 267(2): 593-6.
[0394] Hayashi, K. (1992). “PCR-SSCP: a method for detection of mutations.” Genet Anal Tech Appl 9(3): 73-9.
[0395] Heintz, K., K. Palme, et al. (1992). “The Ncypt1 gene from Neurospora crassa is located on chromosome 2: molecular cloning and structural analysis.” Mol Gen Genet. 235(2-3): 413-21.
[0396] Hellevuo, K., M. Yoshimura, et al. (1993). “A novel adenylyl cyclase sequence cloned from the human erythroleukemia cell line.” Biochem Biophys Res Commun. 192(1): 311-8.
[0397] Helms, C., L. Cao, et al. (2003). “A putative RUNX1 binding site variant between SLC9A3R1 and NAT9 is associated with susceptibility to psoriasis.” Nat Genet 35(4): 349-56.
[0398] Henry, M. D. and K. P. Campbell (1998). “A role for dystroglycan in basement membrane assembly.” Cell. 95(6): 859-70.
[0399] Hermonat, P. L. and N. Muzyczka (1984). “Use of adeno-associated virus as a mammalian DNA cloning vector: transduction of neomycin resistance into mammalian tissue culture cells.” Proc Natl Acad Sci USA 81(20): 6466-70.
[0400] Hirai, H., K. Tanaka, et al. (2002). “Cutting edge: agonistic effect of indomethacin on a prostaglandin D2 receptor, CRTH2.” J Immunol. 168(3): 981-5.
[0401] Hisamatsu, T., M. Suzuki, et al. (2003). “Interferon-gamma augments CARD4/NOD1 gene and protein expression through interferon regulatory factor-1 in intestinal epithelial cells.” J Biol Chem. 278(35): 32962-8.
[0402] Hobbs, M. R., V. Udhayakumar, et al. (2002). “A new NOS2 promoter polymorphism associated with increased nitric oxide production and protection from severe malaria in Tanzanian and Kenyan children.” Lancet 360(9344): 1468-75.
[0403] Hoffman, J., F. Kuhnert, et al. (2004). “Wnts as essential growth factors for the adult small intestine and colon.” Cell Cycle. 3(5): 554-7.
[0404] Hogrefe, H. H., R. L. Mullinax, et al. (1993). “A bacteriophage lambda vector for the cloning and expression of immunoglobulin Fab fragments on the surface of filamentous phage.” Gene 128(1): 119-26.
[0405] Hoogendoorn, B., N. Norton, et al. (2000). “Cheap, accurate and rapid allele frequency estimation of single nucleotide polymorphisms by primer extension and DHPLC in DNA pools.” Hum Genet 107(5): 488-93.
[0406] Hsu, I. C., Q. Yang, et al. (1994). “Detection of DNA point mutations with DNA mismatch repair enzymes.” Carcinogenesis 15(8): 1657-62.
[0407] Hu, W., F. Yin, et al. (2002). “[Effect of human calcyclin binding protein encoding gene on development of multiple drug resistance in gastric cancer].” Zhonghua Zhong Liu Za Zhi. 24(5): 426-9.
[0408] Hugot, J. P., M. Chamaillard, et al. (2001). “Association of NOD2 leucine-rich repeat variants with susceptibility to Crohn's disease.” Nature 411(6837): 599-603.
[0409] Hugot, J. P. and G. Thomas (1998). “Genome-wide scanning in inflammatory bowel diseases.” Dig Dis 16(6): 364-9.
[0410] Hunt, T. W., T. A. Fields, et al. (1996). “RGS10 is a selective activator of G alpha i GTPase activity.” Nature. 383(6596): 175-7.
[0411] Hutchings, N. J., N. Clarkson, et al. (2003). “Linking the T cell surface protein CD2 to the actin-capping protein CAPZ via CMS and CIN85.” J Biol Chem. 278(25): 22396-403.
[0412] Ince-Dunn, G., B. J. Hall, et al. (2006). “Regulation of thalamocortical patterning and synaptic maturation by NeuroD2.” Neuron. 49(5): 683-95.
[0413] Inostroza, J. A., F. H. Mermelstein, et al. (1992). “Dr1, a TATA-binding protein-associated phosphoprotein and inhibitor of class II gene transcription.” Cell. 70(3): 477-89.
[0414] Irvine, E. J. (2004). “Patients' fears and unmet needs in inflammatory bowel disease.” Aliment Pharmacol Ther 20 Suppl 4: 54-9.
[0415] Ishibashi, K., M. Suzuki, et al. (2001). “Identification of a new multigene four-transmembrane family (MS4A) related to CD20, HTm4 and beta subunit of the high-affinity IgE receptor.” Gene 264(1): 87-93.
[0416] Ishigaki, S., J. Niwa, et al. (2000). “Two novel genes, human neugrin and mouse m-neugrin, are upregulated with neuronal differentiation in neuroblastoma cells.” Biochem Biophys Res Commun 279(2): 526-33.
[0417] Ishii, M., H. Fei, et al. (2003). “Targeted disruption of GPR7, the endogenous receptor for neuropeptides B and W, leads to metabolic defects and adult-onset obesity.” Proc Natl Acad Sci USA 100(18): 10540-5. Epub 2003 Aug. 18.
[0418] Ishitani, T., S. Kishida, et al. (2003). “The TAK1-NLK mitogen-activated protein kinase cascade functions in the Wnt-5a/Ca(2+) pathway to antagonize Wnt/beta-catenin signaling.” Mol Cell Biol 23(1): 131-9.
[0419] Itoh et al (2001). “Decreased Bax expression by mucosal T cells favours resistance to apoptosis in Crohn's disease.” Gut. 49(1):35-41.
[0420] Ivanov, A. I., A. Nusrat, et al. (2004). “The epithelium in inflammatory bowel disease: potential role of endocytosis of junctional proteins in barrier disruption.” Novartis Found Symp 263: 115-24.
[0421] Jan, Y., M. Matter, et al. (2004). “A mitochondrial protein, Bit1, mediates apoptosis regulated by integrins and Groucho/TLE corepressors.” Cell 116(5): 751-62.
[0422] Jandrig et al (2004). ST18 is a breast cancer tumor suppressor gene at human chromosome 8q11.2. Oncogene. 23(57):9295-302.
[0423] Jiang, P. H., Y. Motoo, et al. (2004). “Expression of vacuole membrane protein 1 (VMP1) in spontaneous chronic pancreatitis in the WBN/Kob rat.” Pancreas 29(3): 225-30.
[0424] Jobs, M., W. M. Howell, et al. (2003). “DASH-2: flexible, low-cost, and high-throughput SNP genotyping by dynamic allele-specific hybridization on membrane arrays.” Genome Res 13(5): 916-24.
[0425] Johann, S. V., J. J. Gibbons, et al. (1992). “GLVR1, a receptor for gibbon ape leukemia virus, is homologous to a phosphate permease of Neurospora crassa and is expressed at high levels in the brain and thymus.” J Virol 66(3): 1635-40.
[0426] Johannesen, J., A. Pie, et al. (2001). “Linkage of the human inducible nitric oxide synthase gene to type 1 diabetes.” J Clin Endocrinol Metab 86(6): 2792-6.
[0427] Johnson, E. N. and K. M. Druey (2002). “Heterotrimeric G protein signaling: role in asthma and allergic inflammation.” J Allergy Clin Immunol. 109(4): 592-602.
[0428] Kaarniranta, K., T. Ryhanen, et al. (2005). “Geldanamycin activates Hsp70 response and attenuates okadaic acid-induced cytotoxicity in human retinal pigment epithelial cells.” Brain Res Mol Brain Res. 137(1-2): 126-31.
[0429] Kajita, M., Y. Ezura, et al. (2003). “Association of the −381T/C promoter variation of the brain natriuretic peptide gene with low bone-mineral density and rapid postmenopausal bone loss.” J Hum Genet 48(2): 77-81.
[0430] Kaltschmidt, C., B. Kaltschmidt, et al. (1994). “Constitutive NF-kappa B activity in neurons.” Mol Cell Biol 14(6): 3981-92.
[0431] Kanazawa, N., M. Kurosaki, et al. (2004). “Regulation of hepatitis C virus replication by interferon regulatory factor 1.” J Virol 78(18): 9713-20.
[0432] Kanehisa, M. (1984). “Use of statistical criteria for screening potential homologies in nucleic acid sequences.” Nucleic Acids Res 12(1 Pt 1): 203-13.
[0433] Kanei-Ishii, C., J. Ninomiya-Tsuji, et al. (2004). “Wnt-1 signal induces phosphorylation and degradation of c-Myb protein via TAK1, HIPK2, and NLK.” Genes Dev 18(7): 816-29.
[0434] Karason, A., J. E. Gudjonsson, et al. (2003). “A susceptibility gene for psoriatic arthritis maps to chromosome 16q: evidence for imprinting.” Am J Hum Genet. 72(1): 125-31.
[0435] Kato, A., Y. Nagata, et al. (2004). “Delta-tubulin is a component of intercellular bridges and both the early and mature perinuclear rings during spermatogenesis.” Dev Biol 269(1): 196-205.
[0436] Kashio, N., W. Matsumoto, et al. (1998). “The second domain of the CD45 protein tyrosine phosphatase is critical for interleukin-2 secretion and substrate recruitment of TCR-zeta in vivo.” J Biol Chem. 273(50): 33856-63.
[0437] Kashio et al (2003). Galectin-9 induces apoptosis through the calcium-calpain-caspase-1 pathway. J. Immunol.; 170(7):3631-6.
[0438] Kayed et al (2004). Expression analysis of MAC30 in human pancreatic cancer and tumors of the gastrointestinal tract. Histol Histopathol. 19(4):1021-31.
[0439] Kim, S., J. Lee, et al. (2003). “BP75, bromodomain-containing M(r) 75,000 protein, binds dishevelled-1 and enhances Wnt signaling by inactivating glycogen synthase kinase-3 beta.” Cancer Res. 63(16): 4792-5.
[0440] Kimmel, S. G., R. Mo, et al. (2000). “New mouse models of congenital anorectal malformations.” J Pediatr Surg. 35(2): 227-30; discussion 230-1.
[0441] Klausz, G., T. Molnar, et al. (2005). “Polymorphism of the heat-shock protein gene Hsp70-2, but not polymorphisms of the IL-10 and CD14 genes, is associated with the outcome of Crohn's disease.” Scand J Gastroenterol. 40(10): 1197-204.
[0442] Klein, B. K., J. J. Shieh, et al. (2001). “Receptor binding kinetics of human IL-3 variants with altered proliferative activity.” Biochem Biophys Res Commun 288(5): 1244-9.
[0443] Klein, W., A. Tromm, et al. (2001). “Interleukin-4 and interleukin-4 receptor gene polymorphisms in inflammatory bowel diseases.” Genes Immun 2(5): 287-9.
[0444] Kobayashi, K. S., M. Chamaillard, et al. (2005). “Nod2-dependent regulation of innate and adaptive immunity in the intestinal tract.” Science 307(5710): 731-4.
[0445] Koh, K. P., Y. Wang, et al. (2004). “T cell-mediated vascular dysfunction of human allografts results from IFN-gamma dysregulation of NO synthase.” J Clin Invest 114(6): 846-56.
[0446] Kohler, G. and C. Milstein (1992). “Continuous cultures of fused cells secreting antibody of predefined specificity. 1975.” Biotechnology 24: 524-6.
[0447] Kohn, D. B., K. I. Weinberg, et al. (1995). “Engraftment of gene-modified umbilical cord blood cells in neonates with adenosine deaminase deficiency.” Nat Med 1(10): 1017-23.
[0448] Kojima et al (2005). STAT3 regulates Nemo-like kinase by mediating its interaction with IL-6-stimulated TGFbeta-activated kinase I for STAT3 Ser-727 phosphorylation. Proc Natl Acad Sci USA. 102(12):4524-9.
[0449] Kolesnick, R. and H. R. Xing (2004). “Inflammatory bowel disease reveals the kinase activity of KSR1.” J Clin Invest 114(9): 1233-7.
[0450] Kolodziejski, P. J., A. Musial, et al. (2002). “Ubiquitination of inducible nitric oxide synthase is required for its degradation.” Proc Natl Acad Sci USA 99(19): 12315-20.
[0451] Kong et al (2005). ELL-associated factors 1 and 2 are positive regulators of RNA polymerase II elongation factor ELL. Proc Natl Acad Sci USA. 102(29):10094-8.
[0452] Kontani, K., T. Chano, et al. (2003). “RB1CC1 suppresses cell cycle progression through RB1 expression in human neoplastic cells.” Int J Mol Med. 12(5): 767-9.
[0453] Kopp, E. and S. Ghosh (1994). “Inhibition of NF-kappa B by sodium salicylate and aspirin.” Science 265(5174): 956-9.
[0454] Kotin, R. M. (1994). “Prospects for the use of adeno-associated virus as a vector for human gene therapy.” Hum Gene Ther 5(7): 793-801.
[0455] Kovalenko et al (2003). “The tumour suppressor CYLD negatively regulates NF-kappaB signalling by deubiquitination.” Nature. 424(6950):801-5.
[0456] Kozal, M. J., N. Shah, et al. (1996). “Extensive polymorphisms observed in HIV-1 clade B protease gene using high-density oligonucleotide arrays.” Nat Med 2(7): 753-9.
[0457] Kray, A. E., R. S. Carter, et al. (2005). “Positive regulation of IkappaB kinase signaling by protein serine/threonine phosphatase 2A.” J Biol Chem. 280(43): 35974-82.
[0458] Krebs, S., D. Seichter, et al. (2001). “Genotyping of dinucleotide tandem repeats by MALDI mass spectrometry of ribozyme-cleaved RNA transcripts.” Nat Biotechnol 19(9): 877-80.
[0459] Kremer, E. J. and M. Perricaudet (1995). “Adenovirus and adeno-associated virus mediated gene transfer.” Br Med Bull 51(1): 31-44.
[0460] Kulinski, J., D. Besack, et al. (2000). “CEL I enzymatic mutation detection assay.” Biotechniques 29(1): 44-6, 48.
[0461] Kunapuli, P. and J. L. Benovic (1993). “Cloning and expression of GRK5: a member of the G protein-coupled receptor kinase family.” Proc Natl Acad Sci USA 90(12): 5588-92.
[0462] Kure et al (1998). “A missense mutation (His42Arg) in the T-protein gene from a large Israeli-Arab kindred with nonketotic hyperglycinemia.” Hum Genet. 102(4):430-4.
[0463] Kure, S., T. Shinka, et al. (1998). “A one-base deletion (183delC) and a missense mutation (D276H) in the T-protein gene from a Japanese family with nonketotic hyperglycinemia.” J Hum Genet 43(2): 135-7.
[0464] Kuroki, T., F. Trapasso, et al. (2002). “Genetic alterations of the tumor suppressor gene WWOX in esophageal squamous cell carcinoma.” Cancer Res 62(8): 2258-60.
[0465] Kusugami, K., A. Fukatsu, et al. (1995). “Elevation of interleukin-6 in inflammatory bowel disease is macrophage- and epithelial cell-dependent.” Dig Dis Sci. 40(5): 949-59.
[0466] Kwoh, D. Y., G. R. Davis, et al. (1989). “Transcription-based amplification system and detection of amplified human immunodeficiency virus type 1 with a bead-based sandwich hybridization format.” Proc Natl Acad Sci USA 86(4): 1173-7.
[0467] Langmann et al. (2004). “Loss of detoxification in inflammatory bowel disease: dysregulation of pregnane X receptor target genes.” Gastroenterology. 127(1):26-40.
[0468] Larkin, D., D. Murphy, et al. (2004). “ICIn, a novel integrin alphallbbeta3-associated protein, functionally regulates platelet activation.” J Biol Chem 279(26): 27286-93.
[0469] Lesage, S., H. Zouali, et al. (2002). “CARD15/NOD2 mutational analysis and genotype-phenotype correlation in 612 patients with inflammatory bowel disease.” Am J Hum Genet. 70(4): 845-57.
[0470] Leveille, C., A. L.-D. R, et al. (1999). “CD20 is physically and functionally coupled to MHC class II and CD40 on human B cell lines.” Eur J. Immunol. 29(1): 65-74.
[0471] Li, J., Y. Yang, et al. (2002). “Oncogenic properties of PPMID located within a breast cancer amplification epicenter at 17q23.” Nat Genet 31(2): 133-4.
[0472] Li, Z., X. Dong, et al. (2005). “Regulation of PTEN by Rho small GTPases.” Nat Cell Biol 7(4): 399-404. Epub 2005 Mar. 27.
[0473] Ligumsky et al (1997). Analysis of cytokine profile in human colonic mucosal Fc epsilonRI-positive cells by single cell PCR: inhibition of IL-3 expression in steroid-treated IBD patients. FEBS Lett. 413(3):436-40.
[0474] Lin, Y., A. Khokhlatchev, et al. (2002). “Death-associated protein 4 binds MST1 and augments MST1-induced apoptosis.” J Biol Chem 277(50): 47991-8001.
[0475] Lin, C. H., S. Hansen, et al. (2005). “The dosage of the neuroD2 transcription factor regulates amygdala development and emotional learning.” Proc Natl Acad Sci USA. 102(41): 14877-82.
[0476] Linden, D. R., K. F. Foley, et al. (2005). “Serotonin transporter function and expression are reduced in mice with TNBS-induced colitis.” Neurogastroenterol Motil. 17(4): 565-74.
[0477] Linstedt et al (1993). Giantin, a novel conserved Golgi membrane protein containing a cytoplasmic domain of at least 350 kDa. Mol Biol Cell. 4(7):679-93.
[0478] Liu, J., X. Guan, et al. (2004). “Synergistic activation of interleukin-12 p35 gene transcription by interferon regulatory factor-1 and interferon consensus sequence-binding protein.” J Biol Chem 279(53): 55609-17.
[0479] Liu, C., C. Kuei, et al. (2005). “INSL5 is a high affinity specific agonist for GPCR142 (GPR100).” J Biol. Chem. 280(1): 292-300.
[0480] Livak, K. J., J. Marmaro, et al. (1995). “Towards fully automated genome-wide polymorphism screening.” Nat Genet 9(4): 341-2.
[0481] Lizardi, P. M., X. Huang, et al. (1998). “Mutation detection and single-molecule counting using isothermal rolling-circle amplification.” Nat Genet 19(3): 225-32.
[0482] Loftus, E. V., Jr. (2004). “Clinical epidemiology of inflammatory bowel disease: Incidence, prevalence, and environmental influences.” Gastroenterology 126(6): 1504-17.
[0483] Lohi, H., S. Makela, et al. (2002). “Upregulation of CFTR expression but not SLC26A3 and SLC9A3 in ulcerative colitis.” Am J Physiol Gastrointest Liver Physiol. 283(3): G567-75.
[0484] Lombardi, M. S., A. Kavelaars, et al. (1999). “Decreased expression and activity of G-protein-coupled receptor kinases in peripheral blood mononuclear cells of patients with rheumatoid arthritis.” Faseb J. 13(6): 715-25.
[0485] Lowenstein, C. J., C. S. Glatt, et al. (1992). “Cloned and expressed macrophage nitric oxide synthase contrasts with the brain enzyme.” Proc Natl Acad Sci USA 89(15): 6711-5.
[0486] Machida et al (2005). Association of polymorphic alleles of CTLA4 with inflammatory bowel disease in the Japanese. World J Gastroenterol. 11 (27):4188-93.
[0487] Mady et al (2002). Expression of E2F-4 gene in colorectal adenocarcinoma and corresponding covering mucosa: an immunohistochemistry, image analysis, and immunoblot study. Appl Immunohistochem Mol Morphol. 10(3):225-30.
[0488] Magro, F., M. A. Vieira-Coelho, et al. (2002). “Impaired synthesis or cellular storage of norepinephrine, dopamine, and 5-hydroxytryptamine in human inflammatory bowel disease.” Dig Dis Sci. 47(1): 216-24.
[0489] Malech, H. L., P. B. Maples, et al. (1997). “Prolonged production of NADPH oxidase-corrected granulocytes after gene therapy of chronic granulomatous disease.” Proc Natl Acad Sci USA 94(22): 12133-8.
[0490] Malo, M. S., W. Zhang, et al. (2004). “Thyroid hormone positively regulates the enterocyte differentiation marker intestinal alkaline phosphatase gene via an atypical response element.” Mol Endocrinol. 18(8): 1941-62.
[0491] Mannon, P. J., I. J. Fuss, et al. (2004). “Anti-interleukin-12 antibody for active Crohn's disease.” N Engl J Med 351(20): 2069-79.
[0492] Mansfield, E. S., M. Vainer, et al. (1996). “Sensitivity, reproducibility, and accuracy in short tandem repeat genotyping using capillary array electrophoresis.” Genome Res 6(9): 893-903.
[0493] Matsumoto et al (1998). Human ecalectin, a variant of human galectin-9, is a novel eosinophil chemoattractant produced by T lymphocytes. J Biol Chem. 273(27):16976-84.
[0494] Maxam, A. M. and W. Gilbert (1977). “A new method for sequencing DNA.” Proc Natl Acad Sci USA 74(2): 560-4.
[0495] Mazzocchi, G., P. Rebuffat, et al. (2005). “G Protein Receptors (GPR) 7 and 8 are Expressed in Human Adrenocortical Cells, and their Endogenous Ligands Neuropeptides B and W Enhance Cortisol Secretion by Activating Adenylate Cyclase- and Phospholipase C-dependent Signaling Cascades.” J Clin Endocrinol Metab 29: 29.
[0496] Mazzocco, M., M. Maffei, et al. (2002). “The identification of a novel human homologue of the SH3 binding glutamic acid-rich (SH3BGR) gene establishes a new family of highly conserved small proteins related to Thioredoxin Superfamily.” Gene 291(1-2): 233-9.
[0497] Mecklenbrauker, I., S. L. Kalled, et al. (2004). “Regulation of B-cell survival by BAFF-dependent PKCdelta-mediated nuclear signalling.” Nature 431(7007): 456-61.
[0498] Meili, R., A. T. Sasaki, et al. (2005). “Rho Rocks PTEN.” Nat Cell Biol 7(4): 334-335.
[0499] Melkoumian, Z. K., X. Peng, et al. (2005). “Mechanism of cell cycle regulation by FIP200 in human breast cancer cells.” Cancer Res. 65(15): 6676-84.
[0500] Metcalf, D. (1985). “The granulocyte-macrophage colony stimulating factors.” Cell 43(1): 5-6.
[0501] Miller, A. D. (1992). “Human gene therapy comes of age.” Nature 357(6378): 455-60.
[0502] Miller, A. D., J. V. Garcia, et al. (1991). “Construction and properties of retrovirus packaging cells based on gibbon ape leukemia virus.” J Virol 65(5): 2220-4.
[0503] Milojevic, T., V. Reiterer, et al. (2006). “The ubiquitin-specific protease Usp4 regulates the cell surface level of the A2A receptor.” Mol Pharmacol. 69(4): 1083-94.
[0504] Mischak, H., A. Bodenteich, et al. (1991). “Mouse protein kinase C-delta, the major isoform expressed in mouse hemopoietic cells: sequence of the cDNA, expression patterns, and characterization of the protein.” Biochemistry 30(32): 7925-31.
[0505] Mitani, K. and C. T. Caskey (1993). “Delivering therapeutic genes—matching approach and application.” Trends Biotechnol 11 (5): 162-6.
[0506] Miyamoto, A., K. Nakayama, et al. (2002). “Increased proliferation of B cells and auto-immunity in mice lacking protein kinase Cdelta.” Nature 416(6883): 865-9.
[0507] Monteleone, G., A. Kumberova, et al. (2001). “Blocking Smad7 restores TGF-beta1 signaling in chronic inflammatory bowel disease.” J Clin Invest. 108(4): 601-9.
[0508] Monticelli, S., D. C. Solymar, et al. (2004). “Role of NFAT proteins in IL13 gene transcription in mast cells.” J Biol Chem 279(35): 36210-8.
[0509] Moreira, E. S., T. J. Wiltshire, et al. (2000). “Limb-girdle muscular dystrophy type 2G is caused by mutations in the gene encoding the sarcomeric protein telethonin.” Nat Genet. 24(2): 163-6.
[0510] Mosialos, G. (1997). “The role of Rel/NF-kappa B proteins in viral oncogenesis and the regulation of viral transcription.” Semin Cancer Biol 8(2): 121-9.
[0511] Muzyczka, N. (1994). “Adeno-associated virus (AAV) vectors: will they work?” J Clin Invest 94(4): 1351.
[0512] Myers, R. M., Z. Larin, et al. (1985). “Detection of single base substitutions by ribonuclease cleavage at mismatches in RNA:DNA duplexes.” Science 230(4731): 1242-6.
[0513] Myers, R. M., N. Lumelsky, et al. (1985). “Detection of single base substitutions in total genomic DNA.” Nature 313(6002): 495-8.
[0514] Mykkanen, O. M., M. Gronholm, et al. (2001). “Characterization of human palladin, a microfilament-associated protein.” Mol Biol Cell 12(10): 3060-73.
[0515] Nagashima et al (2003). “A novel PHD-finger motif protein, p47ING3, modulates p53-mediated transcription, cell cycle control, and apoptosis.” Oncogene. 22(3):343-50.
[0516] Nabel, G. J. and P. L. Felgner (1993). “Direct gene transfer for immunotherapy and immunization.” Trends Biotechnol 11 (5): 211-5.
[0517] Nagata, K., A. Puls, et al. (1998). “The MAP kinase kinase kinase MLK2 co-localizes with activated JNK along microtubules and associates with kinesin superfamily motor KIF3.” Embo J. 17(1): 149-58.
[0518] Nagley, P. and Y. H. Wei (1998). “Ageing and mammalian mitochondrial genetics.” Trends Genet 14(12): 513-7.
[0519] Nanao et al (1994). “Identification of the mutations in the T-protein gene causing typical and atypical nonketotic hyperglycinemia.” Hum Genet. 93(6):655-8.
[0520] Nanao, K., G. Takada, et al. (1994). “Structure and chromosomal localization of the aminomethyltransferase gene (AMT).” Genomics. 19(1): 27-30.
[0521] Napolitano, M., F. Miceli, et al. (2000). “Expression and relationship between endothelin-1 messenger ribonucleic acid (mRNA) and inducible/endothelial nitric oxide synthase mRNA isoforms from normal and preeclamptic placentas.” J Clin Endocrinol Metab 85(6): 2318-23.
[0522] Nathan, C. and M. U. Shiloh (2000). “Reactive oxygen and nitrogen intermediates in the relationship between mammalian hosts and microbial pathogens.” Proc Natl Acad Sci U S A 97(16): 8841-8.
[0523] Neil, G. A., R. W. Summers, et al. (1992). “CD5+ B cells are decreased in peripheral blood of patients with Crohn's disease.” Dig Dis Sci. 37(9): 1390-5.
[0524] Netzer, C., L. Rieger, et al. (2001). “SALL1, the gene mutated in Townes-Brocks syndrome, encodes a transcriptional repressor which interacts with TRF1/PIN2 and localizes to pericentromeric heterochromatin.” Hum Mol Genet. 10(26): 3017-24.
[0525] Neurath, M. F., B. Weigmann, et al. (2002). “The transcription factor T-bet regulates mucosal T cell activation in experimental colitis and Crohn's disease.” J Exp Med. 195(9): 1129-43.
[0526] Newman, B., X. Gu, et al. (2005). “A risk haplotype in the Solute Carrier Family 22A4/22A5 gene cluster influences phenotypic expression of Crohn's disease.” Gastroenterology 128(2): 260-9.
[0527] Ngsee, J. K., L. A. Elferink, et al. (1991). “A family of ras-like GTP-binding proteins expressed in electromotor neurons.” J Biol Chem 266(4): 2675-80.
[0528] Niu, T., Z. S. Qin, et al. (2002). “Bayesian haplotype inference for multiple linked single-nucleotide polymorphisms.” Am J Hum Genet 70(1): 157-69.
[0529] Odashima, M., G. Bamias, et al. (2005). “Activation of A2A adenosine receptor attenuates intestinal inflammation in animal models of inflammatory bowel disease.” Gastroenterology. 129(1): 26-33.
[0530] Ogura, Y., D. K. Bonen, et al. (2001). “A frameshift mutation in NOD2 associated with susceptibility to Crohn's disease.” Nature 411(6837): 603-6.
[0531] Ogura, Y., N. Inohara, et al. (2001). “Nod2, a Nod1/Apaf-1 family member that is restricted to monocytes and activates NF-kappaB.” J Biol Chem 276(7): 4812-8. Epub 2000 Nov. 21.
[0532] Oppmann, B., R. Lesley, et al. (2000). “Novel p19 protein engages IL-12p40 to form a cytokine, IL-23, with biological activities similar as well as distinct from IL-12.” Immunity 13(5): 715-25.
[0533] Orita, M., H. Iwahana, et al. (1989). “Detection of polymorphisms of human DNA by gel electrophoresis as single-strand conformation polymorphisms.” Proc Natl Acad Sci USA 86(8): 2766-70.
[0534] Ouburg, S., R. Mallant-Hent, et al. (2005). “The toll-like receptor 4 (TLR4) Asp299Gly polymorphism is associated with colonic localisation of Crohn's disease without a major role for the Saccharomyces cerevisiae mannan-LBP-CD14-TLR4 pathway.” Gut 54(3): 439-40.
[0535] Pahl, H. L., B. Krauss, et al. (1996). “The immunosuppressive fungal metabolite gliotoxin specifically inhibits transcription factor NF-kappaB.” J Exp Med 183(4): 1829-40.
[0536] Parham, C., M. Chirica, et al. (2002). “A receptor for the heterodimeric cytokine IL-23 is composed of IL-12Rbeta1 and a novel cytokine receptor subunit, IL-23R.” J Immunol 168(11): 5699-708.
[0537] Paris, S., R. Sesboue, et al. (2002). “Inhibition of tumor growth and metastatic spreading by overexpression of inter-alpha-trypsin inhibitor family chains.” Int J Cancer. 97(5): 615-20.
[0538] Peltekova, V. D., R. F. Wintle, et al. (2004). “Functional variants of OCTN cation transporter genes are associated with Crohn disease.” Nat Genet 36(5): 471-5. Epub 2004 Apr. 11.
[0539] Pfeffer, S. R. (2005). “Structural clues to Rab GTPase functional diversity.” J Biol Chem 3: 3.
[0540] Pirone, D. M., S. Fukuhara, et al. (2000). “SPECs, small binding proteins for Cdc42.” J Biol Chem 275(30): 22650-6.
[0541] Podolsky, D. K. (1991). “Inflammatory bowel disease (1).” N Engl J Med 325(13): 928-37.
[0542] Podolsky, D. K. (1991). “Inflammatory bowel disease (2).” N Engl J Med 325(14): 1008-16.
[0543] Pol, O., J. R. Palacio, et al. (2003). “The expression of delta- and kappa-opioid receptor is enhanced during intestinal inflammation in mice.” J Pharmacol Exp Ther. 306(2): 455-62.
[0544] Praskova, M., A. Khoklatchev, et al. (2004). “Regulation of the MST1 kinase by autophosphorylation, by the growth inhibitory proteins, RASSF1 and NORE1, and by Ras.” Biochem J 381 (Pt 2): 453-62.
[0545] Qiu, Y., L. Ravi, et al. (1998). “Requirement of ErbB2 for signalling by interleukin-6 in prostate carcinoma cells.” Nature 393(6680): 83-5.
[0546] Raap, A. K. (1998). “Advances in fluorescence in situ hybridization.” Mutat Res 400(1-2): 287-98.
[0547] Rebollo et al (2001). “The association of Aiolos transcription factor and Bcl-xL is involved in the control of apoptosis.” J Immunol. 167(11):6366-73.
[0548] Reiley et al (2004). “Negative regulation of JNK signaling by the tumor suppressor CYLD.” J Biol Chem. 279(53):55161-7.
[0549] Remick, D. G. (1995). “Applied molecular biology of sepsis.” J Crit Care 10(4): 198-212.
[0550] Ren et al (2002). “E2F integrates cell cycle progression with DNA repair, replication, and G(2)/M checkpoints.” Genes Dev. 16(2):245-56.
[0551] Ren, L. Q., N. Gourmala, et al. (1998). “Lipopolysaccharide-induced expression of IP-10 mRNA in rat brain and in cultured rat astrocytes and microglia.” Brain Res Mol Brain Res 59(2): 256-63.
[0552] Reuter, U., A. Chiarugi, et al. (2002). “Nuclear factor-kappaB as a molecular target for migraine therapy.” Ann Neurol 51(4): 507-16.
[0553] Ridley, A. J. (1997). “The GTP-binding protein Rho.” Int J Biochem Cell Biol 29(11): 1225-9.
[0554] Roediger, W. E. (1980). “The colonic epithelium in ulcerative colitis: an energy-deficiency disease?” Lancet 2(8197): 712-5.
[0555] Roessler, E., Y. Z. Du, et al. (2003). “Loss-of-function mutations in the human GLI2 gene are associated with pituitary anomalies and holoprosencephaly-like features.” Proc Natl Acad Sci USA 100(23): 13424-9.
[0556] Romero et al (1999). “Aiolos transcription factor controls cell death in T cells by regulating Bcl-2 expression and its cellular localization.” EMBO J. 18(12):3419-30.
[0557] Ronaghi, M., M. Uhlen, et al. (1998). “A sequencing method based on real-time pyrophosphate.” Science 281(5375): 363, 365.
[0558] Rosenecker, J., K. H. Harms, et al. (1996). “Adenovirus infection in cystic fibrosis patients: implications for the use of adenoviral vectors for gene transfer.” Infection 24(1): 5-8.
[0559] Sahl et al (1998). “Granulocyte-macrophage colony-stimulating factor and interleukin-3 potentiate interferon-gamma-mediated endothelin production by human monocytes: role of protein kinase C. Immunology.” 95(3):473-9.
[0560] Saiki, R. K., T. L. Bugawan, et al. (1986). “Analysis of enzymatically amplified beta-globin and HLA-DQ alpha DNA with allele-specific oligonucleotide probes.” Nature 324(6093): 163-6.
[0561] Saiki, R. K., P. S. Walsh, et al. (1989). “Genetic analysis of amplified DNA with immobilized sequence-specific oligonucleotide probes.” Proc Natl Acad Sci USA 86(16): 6230-4.
[0562] Saleeba, J. A. and R. G. Cotton (1993). “Chemical cleavage of mismatch to detect mutations.” Methods Enzymol 217: 286-95.
[0563] Samulski, R. J., L. S. Chang, et al. (1989). “Helper-free stocks of recombinant adeno-associated viruses: normal integration does not require viral gene expression.” J Virol 63(9): 3822-8.
[0564] Sandborn, W. J. and W. A. Faubion (2004). “Biologics in inflammatory bowel disease: how much progress have we made?” Gut 53(9): 1366-73.
[0565] Sanders, L. C., F. Matsumura, et al. (1999). “Inhibition of myosin light chain kinase by p21-activated kinase.” Science 283(5410): 2083-5.
[0566] Sandford, A. J., T. Shirakawa, et al. (1993). “Localisation of atopy and beta subunit of high-affinity IgE receptor (Fc epsilon RI) on chromosome 11q.” Lancet 341(8841): 332-4.
[0567] Sanger, F., S. Nicklen, et al. (1977). “DNA sequencing with chain-terminating inhibitors.” Proc Natl Acad Sci USA 74(12): 5463-7.
[0568] Sans, M., D. Tassies, et al. (2003). “The 4G/4G genotype of the 4G/5G polymorphism of the type-1 plasminogen activator inhibitor (PAI-1) gene is a determinant of penetrating behaviour in patients with Crohn's disease.” Aliment Pharmacol Ther 17(8): 1039-47.
[0569] Santelli, E., M. Leone, et al. (2005). “Structural analysis of Siah1-Siah-interacting protein interactions and insights into the assembly of an E3 ligase multiprotein complex.” J Biol Chem. 280(40): 34278-87.
[0570] Sarraf et al (1998). “Differentiation and reversal of malignant changes in colon cancer through PPARgamma.” Nat Med 4(9):1046-52.
[0571] Sato, A., S. Kishida, et al. (2004). “Sall1, a causative gene for Townes-Brocks syndrome, enhances the canonical Wnt signaling by localizing to heterochromatin.” Biochem Biophys Res Commun. 319(1): 103-13.
[0572] Satoh, A. K., F. Tokunaga, et al. (1997). “Rab proteins of Drosophila melanogaster: novel members of the Rab-protein family.” FEBS Lett 404(1): 65-9.
[0573] Sauter, E. R., M. Herlyn, et al. (2000). “Prolonged response to antisense cyclin D1 in a human squamous cancer xenograft model.” Clin Cancer Res 6(2): 654-60.
[0574] Schaffer, C. J. and L. B. Nanney (1996). “Cell biology of wound healing.” Int Rev Cytol 169: 151-81.
[0575] Schreck, R., P. Rieber, et al. (1991). “Reactive oxygen intermediates as apparently widely used messengers in the activation of the NF-kappa B transcription factor and HIV-1.” Embo J 10(8): 2247-58.
[0576] Segain, J. P., D. Raingeard de la Bletiere, et al. (2003). “Rho kinase blockade prevents inflammation via nuclear factor kappa B inhibition: evidence in Crohn's disease and experimental colitis.” Gastroenterology 124(5): 1180-7.
[0577] Sells, M. A., U. G. Knaus, et al. (1997). “Human p21-activated kinase (Pak1) regulates actin organization in mammalian cells.” Curr Biol 7(3): 202-10.
[0578] Shekarabi, M., S. W. Moore, et al. (2005). “Deleted in colorectal cancer binding netrin-1 mediates cell substrate adhesion and recruits Cdc42, Rac1, Pak1, and N-WASP into an intracellular signaling complex that promotes growth cone expansion.” J Neurosci 25(12): 3132-41.
[0579] Shi, G. X., K. Harrison, et al. (2004). “Toll-like receptor signaling alters the expression of regulator of G protein signaling proteins in dendritic cells: implications for G protein-coupled receptor signaling.” J Immunol. 172(9): 5175-84.
[0580] Shi, Y., W. Hu, et al. (2004). “Regulation of drug sensitivity of gastric cancer cells by human calcyclin-binding protein (CacyBP).” Gastric Cancer 7(3): 160-6.
[0581] Silkov et al (2002). “Enhanced apoptosis of B and T lymphocytes in TAFII105 dominant-negative transgenic mice is linked to nuclear factor-kappa B.” J Biol Chem. 277(20): 17821-9.
[0582] Shivakumar, L., J. Minna, et al. (2002). “The RASSF1A tumor suppressor blocks cell cycle progression and inhibits cyclin D1 accumulation.” Mol Cell Biol. 22(12): 4309-18.
[0583] Simon, H., I. Fortsch, et al. (1999). “Triple helix formation inhibits DNA gyrase activity.” Antisense Nucleic Acid Drug Dev 9(6): 527-31.
[0584] Smith, C. A., T. Farrah, et al. (1994). “The TNF receptor superfamily of cellular and viral proteins: activation, costimulation, and death.” Cell 76(6): 959-62.
[0585] Smith, J. and P. Modrich (1996). “Mutation detection with MutH, MutL, and MutS mismatch repair proteins.” Proc Natl Acad Sci USA 93(9): 4374-9.
[0586] Smith, M. J., S. D. Gitlin, et al. (2001). “GLI-2 modulates retroviral gene expression.” J Virol 75(5): 2301-13.
[0587] Sommerfelt, M. A. and R. A. Weiss (1990). “Receptor interference groups of 20 retroviruses plating on human cells.” Virology 176(1): 58-69.
[0588] Steindler, C., Z. Li, et al. (2004). “Jamip1 (marlin-1) defines a family of proteins interacting with janus kinases and microtubules.” J Biol Chem 279(41): 43168-77.
[0589] Steinhauer, D. A., S. A. Wharton, et al. (1991). “Amantadine selection of a mutant influenza virus containing an acid-stable hemagglutinin glycoprotein: evidence for virus-specific regulation of the pH of glycoprotein transport vesicles.” Proc Natl Acad Sci USA 88(24): 11525-9.
[0590] Sterman, D. H., J. Treat, et al. (1998). “Adenovirus-mediated herpes simplex virus thymidine kinase/ganciclovir gene therapy in patients with localized malignancy: results of a phase I clinical trial in malignant mesothelioma.” Hum Gene Ther 9(7): 1083-92.
[0591] Stevens, T. H. and M. Forgac (1997). “Structure, function and regulation of the vacuolar (H+)-ATPase.” Annu Rev Cell Dev Biol 13: 779-808.
[0592] Stohr, H., N. Mohr, et al. (2002). “Cloning and characterization of WDR17, a novel WD repeat-containing gene on chromosome 4q34.” Biochim Biophys Acta 1579(1): 18-25.
[0593] Storm, N., B. Darnhofer-Patel, et al. (2003). “MALDI-TOF mass spectrometry-based SNP genotyping.” Methods Mol Biol 212: 241-62.
[0594] Straub, R. H., K. Stebner, et al. (2005). “Key role of the sympathetic microenvironment for the interplay of tumour necrosis factor and interleukin 6 in normal but not in inflamed mouse colon mucosa.” Gut. 54(8): 1098-106.
[0595] Strom, T. M., K. Hortnagel, et al. (1998). “Diabetes insipidus, diabetes mellitus, optic atrophy and deafness (DIDMOAD) caused by mutations in a novel gene (wolframin) coding for a predicted transmembrane protein.” Hum Mol Genet. 7(13): 2021-8.
[0596] Sugawara et al (2005). “Linkage to peroxisome proliferator-activated receptor-gamma in SAMP1/YitFc mice and in human Crohn's disease.” Gastroenterology. 128(2):351-60.
[0597] Sugimura, K., K. D. Taylor, et al. (2003). “A novel NOD2/CARD15 haplotype conferring risk for Crohn disease in Ashkenazi Jews.” Am J Hum Genet 72(3): 509-18.
[0598] Suzuki, S., L. F. Chuang, et al. (2002). “Interactions of opioid and chemokine receptors: oligomerization of mu, kappa, and delta with CCR5 on immune cells.” Exp Cell Res. 280(2): 192-200.
[0599] Tanaka, S., M. Mori, et al. (1997). “Coexpression of Grb7 with epidermal growth factor receptor or Her2/erbB2 in human advanced esophageal carcinoma.” Cancer Res. 57(1): 28-31.
[0600] Tanaka, S., M. Mori, et al. (1998). “A novel variant of human Grb7 is associated with invasive esophageal carcinoma.” J Clin Invest 102(4): 821-7.
[0601] Teller, I. C. and J. F. Beaulieu (2001). “Interactions between laminin and epithelial cells in intestinal health and disease.” Expert Rev Mol Med. 2001: 1-18.
[0602] Tratschin, J. D., M. H. West, et al. (1984). “A human parvovirus, adeno-associated virus, as a eucaryotic vector: transient expression and encapsidation of the procaryotic gene for chloramphenicol acetyltransferase.” Mol Cell Biol 4(10): 2072-81.
[0603] Tremaine, W. J. (2003). Clinical features and complications of Crohn's disease. Inflammatory bowel disease, from bench to bedside. S. R. Targan, F. Shanahan and L. C. Karp. Dordrecht, Kluwer Acad. Pub.: 291-304.
[0604] Trinchieri, G., S. Pflanz, et al. (2003). “The IL-12 family of heterodimeric cytokines: new players in the regulation of T cell responses.” Immunity 19(5): 641-4.
[0605] Ustun, S., N. Turgay, et al. (2004). “Interleukin (IL) 5 levels and eosinophilia in patients with intestinal parasitic diseases.” World J Gastroenterol 10(24): 3643-6.
[0606] Van Molle, W., B. Wielockx, et al. (2002). “HSP70 protects against TNF-induced lethal inflammatory shock.” Immunity. 16(5): 685-95.
[0607] Vermeire, S., G. Wild, et al. (2002). “CARD15 Genetic Variation in a Quebec Population: Prevalence, Genotype-Phenotype Relationship, and Haplotype Structure.” Am J Hum Genet 71(1): 74-83.
[0608] Vitt, U. A., S. Mazerbourg, et al. (2002). “Bone morphogenetic protein receptor type II is a receptor for growth differentiation factor-9.” Biol Reprod. 67(2): 473-80.
[0609] Vojtek, A. B. and C. J. Der (1998). “Increasing complexity of the Ras signaling pathway.” J Biol Chem 273(32): 19925-8.
[0610] Wang, P., P. Wu, et al. (1995). “Interleukin (IL)-10 inhibits nuclear factor kappa B (NF kappa B) activation in human monocytes. IL-10 and IL-4 suppress cytokine synthesis by different mechanisms.” J Biol Chem 270(16): 9558-63.
[0611] Warabi, K., M. D. Richardson, et al. (2002). “Human substance P receptor undergoes agonist-dependent phosphorylation by G protein-coupled receptor kinase 5 in vitro.” FEBS Lett 521(1-3): 140-4.
[0612] Weichart, D., J. Gobom, et al. (2006). “Analysis of NOD2-mediated proteome response to muramyl dipeptide in HEK293 cells.” J Biol Chem. 281(4): 2380-9.
[0613] West, M. H., J. P. Trempe, et al. (1987). “Gene expression in adeno-associated virus vectors: the effects of chimeric mRNA structure, helper virus, and adenovirus VA1 RNA.” Virology 160(1): 38-47.
[0614] Wild, G. E. and J. D. Rioux (2004). “Genome scan analyses and positional cloning strategy in IBD: successes and limitations.” Best Pract Res Clin Gastroenterol 18(3): 541-553.
[0615] Wilson, C., M. S. Reitz, et al. (1989). “Formation of infectious hybrid virions with gibbon ape leukemia virus and human T-cell leukemia virus retroviral envelope glycoproteins and the gag and pol proteins of Moloney murine leukemia virus.” J Virol 63(5): 2374-8.
[0616] Wolf, F. W., R. M. Marks, et al. (1992). “Characterization of a novel tumor necrosis factor-alpha-induced endothelial primary response gene.” J Biol Chem 267(2): 1317-26.
[0617] Wonsey, D. R., K. I. Zeller, et al. (2002). “The c-Myc target gene PRDX3 is required for mitochondrial homeostasis and neoplastic transformation.” Proc Natl Acad Sci USA. 99(10): 6649-54.
[0618] Wu, J. Y., Y. Jin, et al. (2005). “Impaired TGF-beta responses in peripheral T cells of G alpha i2−/− mice.” J. Immunol. 174(10): 6122-8.
[0619] Yamada, R., T. Tanaka, et al. (2001). “Association between a single-nucleotide polymorphism in the promoter of the human interleukin-3 gene and rheumatoid arthritis in Japanese patients, and maximum-likelihood estimation of combinatorial effect that two genetic loci have on susceptibility to the disease.” Am J Hum Genet 68(3): 674-85.
[0620] Yamamoto, S., G. Yang, et al. (2003). “Activation of Mst1 causes dilated cardiomyopathy by stimulating apoptosis without compensatory ventricular myocyte hypertrophy.” J Clin Invest 111(10): 1463-74.
[0621] Yamazaki, K., M. Takazoe, et al. (2002). “Absence of mutation in the NOD2/CARD15 gene among 483 Japanese patients with Crohn's disease.” J Hum Genet 47(9): 469-72.
[0622] Yamit-Hezi, A. and R. Dikstein (1998). “TAFII105 mediates activation of anti-apoptotic genes by NF-kappaB.” Embo J. 17(17): 5161-9.
[0623] Yan, F., S. K. John, et al. (2004). “Kinase suppressor of Ras-1 protects intestinal epithelium from cytokine-mediated apoptosis during inflammation.” J Clin Invest 114(9): 1272-80.
[0624] Yin et al (2003). “Cloning and characterization of the human IFT20 gene.” Mol Biol Rep. 30(4):255-60.
[0625] Yu, M., E. Poeschla, et al. (1994). “Progress towards gene therapy for HIV infection.” Gene Ther 1(1): 13-26.
[0626] Yu, Q., S. J. Cok, et al. (2003). “Translational repression of human matrix metalloproteinases-13 by an alternatively spliced form of T-cell-restricted intracellular antigen-related protein (TIAR).” J Biol Chem. 278(3): 1579-84.
[0627] Zaratin, P. F., A. Quattrini, et al. (2005). “Schwann cell overexpression of the GPR7 receptor in inflammatory and painful neuropathies.” Mol Cell Neurosci 28(1): 55-63.
[0628] Zhang, W. J., W. A. Koltun, et al. (2000). “Absence of GNAI2 codon 179 oncogene mutations in inflammatory bowel disease.” Inflamm Bowel Dis. 6(2): 103-6.
[0629] Zhang, M., P. Liu, et al. (2002). “MLN64 mediates mobilization of lysosomal cholesterol to steroidogenic mitochondria.” J Biol Chem. 277(36): 33300-10.
[0630] Zhang, S. X., E. G. Gras, et al. (2005). “Identification of direct serum response factor gene targets during DMSO induced P19 cardiac cell differentiation.” J Biol Chem 28: 28.
[0631] Zhang, Z., A. Andoh, et al. (2005). “Interleukin-1beta and tumor necrosis factor-alpha upregulate interleukin-23 subunit p19 gene expression in human colonic subepithelial myofibroblasts.” Int J Mol Med 15(1): 79-83.
[0632] Zhou, J., J. Ma, et al. (2004). “BRD7, a novel bromodomain gene, inhibits G1-S progression by transcriptionally regulating some important molecules involved in ras/MEK/ERK and Rb/E2F pathways.” J Cell Physiol. 200(1): 89-98.

### BOOKS

[0633] Abbas A K, Litchman A H. Cellular and Molecular Immunology. Philadelphia: Saunders; 1994. 417 p.
[0634] Austen B M and. Westwood O M R. Protein Targeting and Secretion. Oxford: IRL Press; 1991. 85 p.
[0635] Bishop M J, editor. Guide to Human Genome Computing, 2d ed. San Diego: Academic Press; 1998. 306 p.
[0636] Cowell I G, Austin C A, editors. DNA Library Protocols. Methods in Molecular Biology. Vol. 69 Totowa, N.J.: Humana Press; 1997. 321 p.
[0637] Freshney R I, editor. Animal Cell Culture: A Practical Approach. Oxford: IRL Press; 1986.
[0638] Freshney R I. Culture Of Animal Cells: A Manual of Basic Technique. New York: AR Liss; 1987. 397 p.
[0639] Glover D M, editor. DNA Cloning: A Pratical Approach. Vols 1 & 2. Oxford; Wash.: IRL Press; 1985.
[0640] Gribskov M, Devereux J, editors. Sequence Analysis Primer. Oxford University Press; 1994. 296 p.
[0641] Griffin A M, Griffin H G, editors. ComputerAnalysis of Sequence Data, Part 1. Totowa, N.J. Humana Press; 1994. 392 p.
[0642] Hames B D, Higgins S J, editors. Nucleic Acid Hybridization: A Practical Approach. Oxford: IRL Press; 1985. 245 p.
[0643] Hames B D, Higgins S J, editors. Transcription and Translation: A Practical Approach. Oxford: IRL Press; 1984. 328 p.
[0644] Harlow Ed, Lane D. Antibodies: A Laboratory Manual. New York: Cold Spring Harbor Laboratory; 1988. 726 p.
[0645] Heinje G. von. Sequence Analysis in Molecular Biology. San Diego: Academic Press; 1987. 188 p.
[0646] Hogan B, Costantini F, Lacy E, editors. Manipulating the Mouse Embryo: A Laboratory Manual. New York: Cold Spring Harbor Laboratory Press; 1986. 332 p.
[0647] Huber B E, Carr B I. Molecular and Immunologic Approaches. Mt. Kisco, N.Y.: Futura Publishing Co; 1994.
[0648] Jones J. Amino Acid and Peptide Synthesis. Oxford; N.Y.: Oxford Science Publications; 1992. 86 p.
[0649] Kaufman P B, William W, Donghern K, editors. Handbook of Molecular and Cellular Methods in Biology and Medicine. Boca Raton: CRC Press; 1995.484 p.
[0650] Lesk A M, editor. Computational Molecular Biology: sources and methods for sequence analysis. New York: Oxford University Press; 1988. 254p.
[0651] Male D, Cooke A, Owen M, Trowsdale J, Champion B, editors. Advanced Immunology. 3rd ed. London; Baltimore: Mosby; 1996.273 p.
[0652] McPherson M J, editor. Directed Mutagenesis: A Practical Approach. New York: IRL Press; 1991. 257 p.
[0653] McPherson M J, Quirke P, Taylor J R, editors. PCR: A Practical Approach. Oxford; N.Y.: IRL Press; 1991. 253 p.
[0654] Miller J H, Calos M P, editors. Gene Transfer Vectors for Mammalian Cells. New York: Cold Spring Harbor Laboratory Press; 1987. 169 p.
[0655] Miller J H, Calos M P, editors. Gene Transfer Vectors For Mammalian Cells. New York: Cold Spring Harbor Laboratory; 1987. 169p.
[0656] Pawlowitzki I H, Edwards J H, Thompson E A, editors. Genetic Mapping of Disease Genes. Academic Press London; 1997. 288 p.
[0657] Perbal B V. A Practical Guide to Molecular Cloning. 1st ed. New York: Wiley Interscience Publication; 1984. 554 p.
[0658] Perbal B V. A Practical Guide To Molecular Cloning. New York: Wiley; 1984. 554 p.
[0659] Peruski L F, Peruski A H. The Internet and the New Biology. Tools for Genomic and Molecular Research. Washington, D.C.: American Society for Microbiology Press; 1997.
[0660] Sambrook J. Molecular Cloning: A Laboratory Manual. 2nd ed. 3 vols. New York: Cold Spring Harbor Laboratory Press; 1989.
[0661] Sell S. Immunology, Immunopathology & Immunity. 5th ed. Stamford, Conn.: Appleton & Lange; 1996. 1014 p.
[0662] Smith D W, editor. Biocomputing. Informatics and Genome Projects, New York: Academic Press; 1993. 336p.
[0663] Stites D P, Terr A T, editors. Basic and Clinical Immunology. 7th ed. Norwalk, Conn.: Appleton & Lange; 1991. 870 p.
[0664] Walker J M. Protein Protocols on CD-ROM, Humana Press, Totowa, N.J.
[0665] Weir D M, Herzenberg L A, Blackwell C, editors. Handbook Of Experimental Immunology. 4 vols. Oxford: Blackwell; 1986.
[0666] Woodward J. Immobilized Cells And Enzymes: A Practical Approach. Oxford: IRL Press; 1986.
[0667] Wu R, Grossman L, editors. Methods in Enzymology: Rexcombinant DNA Part E. Vol. 154. Amsterdam: Elsevier Science; 1987. 576 p.
[0668] Wu R, Grossman L, editors. Methods in Enzymology: Rexcombinant DNA Part F. Vol. 155. Amsterdam: Elsevier Science; 1987. 628 p.

### PATENTS

[0669] U.S. Pat. No. 4,683,202.
[0670] U.S. Pat. No. 4,952,501.
[0671] WO03042661A2
[0672] US 20040009479A1
[0673] U.S. Pat. No. 5,315,000
[0674] WO1997US0005216
[0675] U.S. Pat. No. 5,498,531
[0676] U.S. Pat. No. 5,807,718
[0677] U.S. Pat. No. 5,888,819
[0678] U.S. Pat. No. 6,090,543
[0679] U.S. Pat. No. 6,090,606
[0680] U.S. Pat. No. 5,585,089
[0681] U.S. Pat. No. 4,683,195
[0682] U.S. Pat. No. 4,683,202
[0683] U.S. Pat. No. 5,459,039.
[0684] U.S. Pat. No. 6,090,543).
[0685] U.S. Pat. No. 6,090,606
[0686] U.S. Pat. No. 5,869,242
[0687] U.S. 60/335,068
[0688] U.S. Pat. No. 6,479,244
[0689] U.S. Pat. No. 4,797,368
[0690] WO 93/24641
[0691] U.S. Pat. No. 5,173,414

Lengthy table referenced here
US20090081658A1-20090326-T00001
Please refer to the end of the specification for access instructions.

Lengthy table referenced here
US20090081658A1-20090326-T00002
Please refer to the end of the specification for access instructions.

Lengthy table referenced here
US20090081658A1-20090326-T00003
Please refer to the end of the specification for access instructions.

Lengthy table referenced here
US20090081658A1-20090326-T00004
Please refer to the end of the specification for access instructions.

Lengthy table referenced here
US20090081658A1-20090326-T00005
Please refer to the end of the specification for access instructions.

Lengthy table referenced here
US20090081658A1-20090326-T00006
Please refer to the end of the specification for access instructions.

Lengthy table referenced here
US20090081658A1-20090326-T00007
Please refer to the end of the specification for access instructions.

Lengthy table referenced here
US20090081658A1-20090326-T00008
Please refer to the end of the specification for access instructions.

Lengthy table referenced here
US20090081658A1-20090326-T00009
Please refer to the end of the specification for access instructions.

Lengthy table referenced here
US20090081658A1-20090326-T00010
Please refer to the end of the specification for access instructions.

Lengthy table referenced here
US20090081658A1-20090326-T00011
Please refer to the end of the specification for access instructions.

LENGTHY TABLES
The patent application contains a lengthy table section. A copy of the table is available in electronic form from the USPTO web site (http://seqdata.uspto.gov/?pageRequest=docDetail&DocID=US20090081658A1). An electronic copy of the table will also be available from the USPTO upon request and payment of the fee set forth in 37 CFR 1.19(b)(3).

1. A method of constructing a GeneMap for Crohn's disease comprising identifying at least two chromosomal loci associated with Crohn's disease in a population, wherein said at least two chromosomal loci are selected from the genomic regions listed in Table 1.

2.-20. (canceled)

21. A method of diagnosing Crohn's disease, the predisposition to Crohn's disease, or the progression of Crohn's disease in an individual, comprising comparing (i) the amount and/or concentration of at least one polypeptide encoded in Candidate Region 161 and/or at least one nucleic acid encoding the polypeptide in a biological sample from the individual with (ii) a control amount and/or concentration of the at least one polypeptide and/or the at least one nucleic acid; wherein a significant difference between the amount and/or concentration of the at least one polypeptide and/or the at least one nucleic acid of (i) and the control amount and/or concentration of the at least one polypeptide and/or the at least one nucleic acid of (ii) is indicative of a Crohn's disease, the predisposition to Cronh's disease or the progression of Crohn's disease in the individual.

22. (canceled)

23. The method of claim 21, wherein the amount and/or concentration of the at least one nucleic acid is determined with a nucleic acid probe.

24. The method of claim 23, wherein said nucleic acid probe is selected from group consisting of SEQ ID NOs: 987, 989, 991, 993, 995, 997, 999, 1001, 1003, 7187, 7189, 7191, 7193, 7195, 7197, 7199, 7201, 7203, 7205, 7207, 7209, 7211, 7213, 7215, 7217, 7219, 7221, 7223, 7225, 7227, 7239, 7237, 7235, 7241, 7243, 7247, 7231, 7229, 7245, 7249, 7233, 7251, 7257, 7255, 7253, 7259, 7261, 7263, 7265, 7269, 7267, 7271, 7273, 7275, 7277, 7279, 7281, 7283, 7285, 7289, 7287, 7291, 7293, 7295, 7297, 7299, 7301, 7303, 7305, 7307, 7309, 7311, 7313 and 7315 or a fragment thereof.

25. The method of claim 23, wherein said nucleic acid probe is capable of hybridizing to a sequence selected from group consisting of SEQ ID NOs: 987, 989, 991, 993, 995, 997, 999, 1001, 1003, 7187, 7189, 7191, 7193, 7195, 7197, 7199, 7201, 7203, 7205, 7207, 7209, 7211, 7213, 7215, 7217, 7219, 7221, 7223, 7225, 7227, 7239, 7237, 7235, 7241, 7243, 7247, 7231, 7229, 7245, 7249, 7233, 7251, 7257, 7255, 7253, 7259, 7261, 7263, 7265, 7269, 7267, 7271, 7273, 7275, 7277, 7279, 7281, 7283, 7285, 7289, 7287, 7291, 7293, 7295, 7297, 7299, 7301, 7303, 7305, 7307, 7309, 7311, 7313 and 7315 or a fragment thereof.

26.-38. (canceled)

39. A method of evaluating Crohn's disease or detecting the susceptibility to Crohn's disease comprising detecting at least one mutation or polymorphism in Candidate Region 161 (Table 1) in a patient.

40.-48. (canceled)

49. The method of claim 39, wherein the mutation is at least one of SNP from Candidate Region 161.

50-51. (canceled)

52. A method of evaluating Crohn's disease or diagnosing the susceptibility to Crohn's disease in an individual, comprising screening for an at-risk haplotype in Candidate Region 161, that is more frequently present in an individual susceptible to Crohn's disease compared to a control individual, wherein the presence of the at-risk haplotype is indicative of an increased risk for the onset or the development of Crohn's disease in the individual.

53. (canceled)

54. The method of claim 52, wherein the risk for the onset or the development of Crohn's disease is increased at least about 20%.

55. The method of claim 52, wherein the at-risk haplotype is characterized by the presence of at least one single nucleotide polymorphism in Candidate Region 161.

56.-63. (canceled)

64. A method of determining a susceptibility to Crohn's disease in an individual, comprising (a) determining the expression level or the composition of a polypeptide encoded by at least one gene of Candidate Region 161 in a test sample, (b) comparing the result obtained in step (a) with the expression level or the composition of the polypeptide encoded by the at least one gene in a control sample to determine the presence of an alteration in the expression level or the composition of the polypeptide in the test sample, wherein the presence of the alteration in the expression level or the composition of the polypeptide in the test sample is indicative of an increased susceptibility to Crohn's Disease.

65. The method of claim 64, wherein the alteration in the expression level or composition of the polypeptide is caused by the expression of a splicing variant of a mRNA encoding the polypeptide in the test sample that differs from a splicing variant expressed in a control sample.

66. A drug screening assay comprising: (a) contacting a test compound with a cell from an individual having Crohn's disease and (b) determining the level of gene expression of at least one gene in Candidate Region 161 in the cell of step (a) and (c) comparing the level of gene expression obtained in step (b) with the level of gene expression of the at least one gene in a normal cell; wherein a similarity between the level of gene expression in the cell of step (a) and the level of gene expression in the normal cell is indicative that the test compounds is a candidates drugs to treat Crohn's disease.

67.-68. (canceled)

69. A method for predicting the efficacy of a drug for treating Crohn's disease in a human patient, comprising: (a) obtaining a a gene expression profile from at least one of a gene in Candidate Region 161 from a sample from the human patient to which the drug has been administered and (b) comparing the gene expression profile obtained in step (a) with a reference gene expression profile from the at least one gene in Candidate Region 161, wherein a similarity between the expression profile obtained in step (a) and the reference expression profile is indicative of the efficacy of the drug for treating Crohn's disease in the human patient.

70.-77. (canceled)

78. The method of claim 69, wherein the reference expression profile is that of a cells derived from a patients that does not have Crohn's disease.

79.-80. (canceled)

81. A method for predicting the efficacy of a drug for treating Crohn's disease in a human patient, comprising: (a) obtaining a set of genotypes from Candidate Region 161 from a sample of the human patient to which the drug has been administered, and (b) comparing the set of genotypes obtained in step (a) with a set of genotypes from Candidate Region 161 associated with the efficacy of the drug, wherein a similarity between the set of genotypes obtained in step (a) and the set of genotypes associated with the efficacy of the drug is indicative of the efficacy of the drug for treating Crohn's disease in the human patient.

82.-85. (canceled)

86. The method of claim 81 wherein the set of genotypes of step (a) is obtained by hybridization of allele-specific oligonucleotides complementary to a polymorphic loci from any one of Tables 2, 3, 4, 5, 6, 7, 8, 9 and 10.

87. The method of claim 86, wherein the allele-specific oligonucleotides comprise nucleic acid molecules at least 95% identical to SEQ ID of any one of Tables 2, 3, 4, 5, 6, 7, 8, 9 and 10.

88.-117. (canceled)

118. A method for identifying a gene that regulates drug response in Crohn's disease, comprising: (a) obtaining a gene expression profile from at least one gene of Candidate Region 161 in a cell induced to a pro-inflammatory like state in the presence of a candidate drug; (b) obtaining a reference gene expression profile for the at least one gene of Candidate region 161 in a cell induced to a pro-inflammatory like state in the absence of the candidate drug; and (b) comparing the gene expression profile obtained in step (a) with the reference expression profile, wherein a difference in the gene expression profiles is indicative that the at least one gene regulates the candidate drug response in Crohn's disease.

119.-136. (canceled)

137. A method of assessing a patient's risk of having or developing Crohn's disease, comprising: (a) in the patient's sample, determining a level of expression of at least one gene or product thereof of Candidate Region 161, (b) comparing the level of expression obtained in step (a) to the level of expression of the at least one gene or product thereof of a cell of an individual suffering from Crohn's disease; and wherein a similarity between the level of expression of step (a) and (b) is indicative of an increased risk for the patient to have or develop Crohn's disease.

138. A method of assessing a patient's risk of having or developing Crohn's disease, comprising: (a) in the patient's sample, determining a genotype for at least one polymorphic locus of Candidate Region 161, (b) comparing the genotype obtained in step (a) to a genotype for the at least one polymorphic locus of Candidate Region 161 associated with Crohn's disease; and wherein a similarity between the genotype of step (a) and (b) is indicative of an increased risk for the patient to have or develop Crohn's disease.

139.-140. (canceled)

141. A method of detecting the onset or the progression of Crohn's disease in an individual, said method comprising comparing a parameter from a sample from the individual to a control parameter, wherein a difference between the parameter from the sample from the individual and the control parameter is indicative of the onset or progression of Crohn's disease in the individual and wherein the parameter from the sample from the individual is selected from the group consisting of:
a level of expression of a gene in Candidate Region 161;
a mutation in a gene in Candidate Region 161;
a single nucleotide polymorphism in Candidate Region 161;
a haplotype in Candidate Region 161;
a level of expression of a polypeptide encoded by a gene in Candidate Region 161; and
a mutation in a polypeptide encoded by a gene in Candidate Region 161; and
wherein the control parameter is from a healthy individual and is selected from the group consisting of:
a level of expression of a gene in Candidate Region 161;
a mutation in a gene in Candidate Region 161;
a single nucleotide polymorphism in Candidate Region 161;
a haplotype in Candidate Region 161;
a level of expression of a polypeptide encoded by a gene in Candidate Region 161; and
a mutation in a polypeptide encoded by a gene in Candidate Region 161.

The application's sequence listing, which the Patent Office published only in electronic form, follows.

SEQUENCE LISTING (16984 sequences)

SEQ ID NO: 1 - DNA, 8192 bp, Homo sapiens
acacctgcgcgccggaataattcatgaagaaggggctggatccgtgggtcagagaacacaggaccagtttgccatcccaaggccgaaggcctccctccaacacagttctccaagctctagaaatctctgacacatcttgaccatgagaccacggctggtttttggcaggattcgaggcacaaacccagcagcctcaacctagttcatggaggagcctcgcggggtcctggccaagcaagcccgcccctctggtgggaagagcggcgcctaggtggagggtggctgccgtaggagtggacatgaatgctggctttcagagagaacagcgtttcagttttggtcatcggaagtggtgccttcagcacagaagaagagcgtgatttctcctccaaggccgttgatctccaacccagaactaaaggggagaagagccacccccagcatccagcgtggcatctcttgtgccaggaccagggatgactgggccatggacacagatgtctccaaccttcaaccgtttgcatagcacacgggggactcgtgggggccacctgccactgccagctgaaataatacaatggcaatactgacatccttcatgacgttttcccgacagacattcaggcagaaagtgctggtgcgttttctgtctgcaaagtagagggccatcgctcaccaatagaatagcgtgggccctgatgacctgctccgagtccactcacagccagtgacacttgcaaaaaactcccaaagccgtcttgggtttggctcccacagctcttgaccaatgtggccaaagctggacacctccttgggacactgggattattcataaatgcagcccgccctgactctccctgaatagcatctgaagtctttgtgaaggtcatggatcctgaacaaagtgtcaagggcaccaagaaggctgagggaagtccccggaagcggctgaccaaaggagaggccattcagaccagtgtttcttccagcgtcccatacccaggcagcggcacagctccgacccaagagagccccgcccaagagctcttagccccgcagcccttcccgggcccctcatcagttcttagggaaggctctcaggagaaaacgggccagcagcagaagccccccaaaaggccccccatcgaagcatccgtccacatctcacacgttccgcagcaccctctgacaccagcattcatgtcgcctggcaaacctgagcatctcctggaggggtccacatggcaactggttagccccatgagactcggaccctctggctccttgctggcccctgggctccatcctcagagccagctccttccttcccacgcttccatcattccccccgaggaccttcctggagtccccaaagtcttcgtgcctcgtccttcccaggtctccttgaagcccacagaagaggcacacaagaaggagaggaagccccagaagccaggcaagtacatctgccagtactgcagccggccctgtgccaagcccagcgtgctccagaagcacattcgctcacacacaggtgagaggccctacccctgcggcccctgtggcttctccttcaagaccaagagtaatctctacaagcacaggaagtcccatgcccaccgcatcaaagcaggcctggcctcaggcatgggtggcgagatgtacccacatgggctggagatggagcggatccctggggaagagtttgaggagcccactgagggagaaagcacagattctgaagaggagactagtgccacctctggtcaccctgcagagctctccccaagacccaagcagccccttctctccagcgggctatacagctctgggagccacagttccagccacgaacgctgttccctgtcccagtccagcacagcccagtcactcgaagacccccctccatttgtggaaccctcatctgagcaccccctgagccataaacctgaagacacccacacgattaagcagaagctggccctccgcttaagcgagaggaagaaggtgatcgatgagcaggcgtttctgagcccaggcagcaaagggagtactgagtctgggtatttctctcgctccgagagtgcagagcagcaggtcagccccccaaacaccaacgccaagtcctacgctgagatcatctttggcaagtgtgggcgaataggacagcggaccgccatgctgacagccacctccacccagcccctcctgcccctctccaccgaagacaagcccagcctggtgcctttgtctgtaccccggacgcaggtgatcgagcacatcacgaagctcatcaccatcaacgaggccgtggtggacaccagtgagatcgacagcgtgaagccaaggcggagctcactgtccaggcgcagcagcatggagtccccaaaatccagcctctaccgggagcccctgtcatcccacagtgagaaaaccaagcctgaacaatcactgctgagcctccagcacccgcccagtaccgccccccctgtgcctctcctgagaagccactcaatgccttctgccgcctgcactatcagcaccccccaccaccccttccgaggtagctactccttcgatgaccatatcaccgactccgaagccctgagccgcagcagtcacgtgtttacctcccacccccggatgctgaagccgcagccggcaatcgaattacctttgggaggggaatacagttctgaggagcctggcccaagcagcaaagacacagcctccaagccctcggacgaagtggaacccaaggaaagcgagcttaccaaaaagaccaagaagggtttgaaaacaaaaggggtgatctacgaatgtaacatatgtggtgctcggtacaagaaaagggataactacgaagcccacaaaaaatactactgctcagagcttcagatcgcaaagcccatctctgcaggcacccacacatctccagaagctgaaaagagtcagattgagcatgagccgtggtcccaaatgatgcattacaaactgggaaccaccctggaactcactccactgaggaagaggaggaaagagaagagccttggggacgaggaagagccacctgcctttgagtccacaaaaagtcagtttggcagccccgggccatctgatgctgctcggaaccttcccctggagtccaccaagtcaccagcagaaccaagtaaatcagtgccctccttggagggacccacgggcttccagccaaggactcccaagccagggtccggttcagaatcagggaaggagaggagaacaacgtccaaagaaatttctgtcatccagcacaccagctcctttgagaaatctgattctctcgagcagccgagtggcttggaaggggaagacaaacctctggcccagttcccatcacccccacctgccccacacggacgctctgctcactccctgcagcctaagttggtccgccagcccaacattcaggttcctgagatcctagtaactgaggagcctgaccggccggacacagagccagagccgccccctaaggaacctgagaagactgaggagttccaatggccccagcgcagccagacacttgcccagctcccagctgagaaggctccacccaaaaagaagaggttgcgcctggcagagatggcccaatcatcaggggagtccagcttcgagtcctctgtgcctctgtctcgcagcccgagccaggaaagcaatgtctctttgagtgggtccagccgctcagcctcgtttgagagggatgaccatgggaaagccgaggcccccgatccctcatctgacatgcgccccaaacccctgggcacccacatgttgactgtccccagccaccacccacatgcccgagagatgcggaggtcagcctcagagcagagccccaacgtttcccattctgcccacatgaccgagacacgcagcaaatcctttgactatggcagcttgtccttgacaggcccttctgctccagccccagtggctccaccagccggggaggccccgccagagagaagaaaatgcttcttggtgagaagcccctctctgagcaggcctccagaatctgagttggaggttgcccccaagggaagacaggagagcgaagaaccacagccctcatccagtaaaccctctgccaaaagctcattgtcccagatttcctctgcggccacctcacatggtggacccccgggaggcaagggcccagggcaggacaggcccgcattggggcccactgtgccctacacagaagcactgcaagtgttccaccaccccgttgcccagacacccctgcatgagaagccatacctgcccccaccagtctcccttttctccttccagcatctcgtgcagcatgagccaggacagtctccagaattcttctccacccaggccatgtccagcctcctgtcctcaccatactccatgcccccacttcctccctccttatttcaagccccaccgcttcctctccagcctactgttctgcacccaggccaactccatctcccccagctcatgcctcacccagccaacatccccttcaggcaacccccttccttcctccccatgccatacccgacctcctcagcactgtcttctgggtttttcctgcctctgcaatcccagtttgcacttcagctccctggtgatgtggaaagccatctgccccagatcaaaaccagcctggccccactggcaacaggaagtgctggcctctcccccagccaagagtacagcagtgacatccggctaccccctgtggctcccccagccagctcctcagcacctacatcagctcctccactggccctgcctgcctgtccagacaccatggtgtccctggttgtgcctgtccgtgttcagaccaatatgccgtcctatgggagcgcaatgtacaccaccctttcccagatcttggtcacccagtcccaaggcagctcagcaactgtggcacttcccaagtttgaggaacccccatcaaaggggacgactgtatgtggtgcagatgtgcatgaggttgggcccggcccttctgggttaagtgaagagcaaagcagagctttcccaactccatacctgagagtgcctgtgacattacctgaaagaaaaggcacttccctgtcatcagagagtatcttgagcctggaggggagttcatcaacagcagggggaagcaaacgtgtcctttcaccagctggcagccttgaacttaccatggaaacccagcagcaaaaaagagtgaaggaggaggaggcttccaaggcagatgaaaaacttgagctggtaaaaccatgcagtgtggtccttaccagcaccgaggatgggaagaggccagagaaatcccacttaggcaaccagggccaaggcaggagggagctagaaatgctgtccagcctgtcctcagatccatctgacacaaaggaaattcctcccctccctcaccctgcattgtcccatgggcaagccccaggctcagaagctttgaaggaatatccccagccatctggcaaacctcaccgaagagggttgaccccactgagcgtgaagaaagaagattccaaggaacaacctgatctcccctccttggcacctccgagctctctgcctctgtcagaaacgtcctccagaccagccaagtcacaagaaggtacggactcaaagaaggtactgcagttccccagcctccacacaaccactaatgtcagttggtgctatttaaactacattaagccaaatcacatccagcatgcagataggaggtcctctgtttacgctggttggtgcataagtttgtacaaccccaaccttccgggggtttccactaaagctgctttgtccctcctgaggtctaagcagaaagtgagcaaagagacatacaccatggccacagctccgcatcctgaggcaggaaggcttgtgccatccagctcccgcaagccccgcatgacagaggttcacctcccttcactggtttccccggaaggccagaaagatctagctagagtggagaaggaagaagagaggagaggggagccggaggaggatgctcctgcctcccagagaggggagccggcgaggatcaaaatcttcgaaggagggtacaaatcaaacgaagagtatgtatatgtgcgaggccgcggccgagggaaatatgtttgtgaggagtgtggaattcgctgcaagaagcccagcatgctgaagaaacacatccgcacccacactgacgtccggccctatgtgtgcaagcactgtcactttgcttttaaaaccaaagggaatctgactaagcacatgaagtcgaaggcccacagcaaaaagtgccaagagacaggggtgctggaggagctggaagccgaagaaggaaccagtgacgacctgttccaggactcggaaggacgagagggttcagaggctgtggaggagcaccagttttcggacctggaggactcggactcagactcagacctggacgaagacgaggatgaggatgaggaggagagccaggatgagctgtccagaccatcctcagaggcgcccccgcctggcccaccacatgcactgcgggcagactcctcacccatcctgggccctcagcccccagatgcccccgcctctggcacggaggccacacgaggcagctcggtctcggaagctgagcgcctgacagccagcagctgctccatgtccagccagagcatgccgggcctcccctggctgggaccggcccctctgggctctgtggagaaagacacaggctcagccttgagctacaagcctgtgtccccaagaagaccgtggtccccaagcaaagaagcaggcagccgtccaccactagcccgcaaacactcgctaaccaaaaacgactcatctccccagcgatgctccccggcccgagaaccacaggcctcagccccaagcccacctggcctgcacgtggacccaggaaggggcatgggccctctcccttgtgggtctccaagacttcagctgtctcctctcaccctctgccccctgggaagagaactggcccctcgagcacatgtgctctccaaactcgagggtaccaccgacccaggcctccccagatactcgcccaccaggagatggtctccaggtcaggccgagtcaccaccacggtcagcgccgccagggaagtgggccttggctgggccgggcagcccctcagcgggggagcatggcccaggcttggggctggccccacgggttctcttcccgcccgcgcctctacctcacaagctcctcagcagaagcccagagacctgcgcctccccgtggcagaaggccgagtcccgaagtccctcctgctcacccggccctgctcatcctctctcctcccgacccttctccgccctccatgacttccacggccacatcctggcccggacagaggagaacatcttcagccacctgcctctgcactcccagcacttgacccgtgccccatgtcccttgattcccatcggtgggatccagatggtgcaggcccggccaggagcccaccccaccctgctgccagggcccaccgcagcctgggtcagtggcttctccgggggtggcagcgacctgacaggggcccgggaggcccaggagcgaggccgctggagtcccactgagagctcgtcagcctccgtgtcgcctgtggctaaggtctccaaattcacactctcctcagagctggagggcagggactaccccaaggagagggagaggaccggcggaggcccgggcaggcctcctgactggacaccccatgggaccggggcacctgcagagcccacacccacgcacagcccctgcaccccacccgacaccttgccccggccgccccagggacgccgggcagcgcagtcctggagcccccgcttggagtccccgcgtgcaccggccaaccccgagccttctgccaccccgccgctggaccgcagcagctctgtgggctgcctggcagaggcctctgcccgcttcccagcccggacgaggaacctctccggggaatccaggaccaggcaggactcccccaagccctcaggaagtggggagcccagggcacatccacatcagcctgaggacagggttccccccaacgcttagcctctctccaactgcttcagcatctggcttccagtgtccagcaacagacgtttccagccactttcctcgaatcatcccacttc

SEQ ID NO: 2 - protein, 2406 aa, Homo sapiens
MDPEQSVKGTKKAEGSPRKRLTKGEAIQTSVSSSVPYPGSGTAPTQESPAQELLAPQPFPGPSSVLREGSQEKTGQQQKPPKRPPIEASVHISHVPQHPLTPAFMSPGKPEHLLEGSTWQLVSPMRLGPSGSLLAPGLHPQSQLLPSHASIIPPEDLPGVPKVFVPRPSQVSLKPTEEAHKKERKPQKPGKYICQYCSRPCAKPSVLQKHIRSHTGERPYPCGPCGFSFKTKSNLYKHRKSHAHRIKAGLASGMGGEMYPHGLEMERIPGEEFEEPTEGESTDSEEETSATSGHPAELSPRPKQPLLSSGLYSSGSHSSSHERCSLSQSSTAQSLEDPPPFVEPSSEHPLSHKPEDTHTIKQKLALRLSERKKVIDEQAFLSPGSKGSTESGYFSRSESAEQQVSPPNTNAKSYAEIIFGKCGRIGQRTAMLTATSTQPLLPLSTEDKPSLVPLSVPRTQVIEHITKLITINEAVVDTSEIDSVKPRRSSLSRRSSMESPKSSLYREPLSSHSEKTKPEQSLLSLQHPPSTAPPVPLLRSHSMPSAACTISTPHHPFRGSYSFDDHITDSEALSRSSHVFTSHPRMLKPQPAIELPLGGEYSSEEPGPSSKDTASKPSDEVEPKESELTKKTKKGLKTKGVIYECNICGARYKKRDNYEAHKKYYCSELQIAKPISAGTHTSPEAEKSQIEHEPWSQMMHYKLGTTLELTPLRKRRKEKSLGDEEEPPAFESTKSQFGSPGPSDAARNLPLESTKSPAEPSKSVPSLEGPTGFQPRTPKPGSGSESGKERRTTSKEISVIQHTSSFEKSDSLEQPSGLEGEDKPLAQFPSPPPAPHGRSAHSLQPKLVRQPNIQVPEILVTEEPDRPDTEPEPPPKEPEKTEEFQWPQRSQTLAQLPAEKAPPKKKRLRLAEMAQSSGESSFESSVPLSRSPSQESNVSLSGSSRSASFERDDHGKAEAPDPSSDMRPKPLGTHMLTVPSHHPHAREMRRSASEQSPNVSHSAHMTETRSKSFDYGSLSLTGPSAPAPVAPPAGEAPPERRKCFLVRSPSLSRPPESELEVAPKGRQESEEPQPSSSKPSAKSSLSQISSAATSHGGPPGGKGPGQDRPALGPTVPYTEALQVFHHPVAQTPLHEKPYLPPPVSLFSFQHLVQHEPGQSPEFFSTQAMSSLLSSPYSMPPLPPSLFQAPPLPLQPTVLHPGQLHLPQLMPHPANIPFRQPPSFLPMPYPTSSALSSGFFLPLQSQFALQLPGDVESHLPQIKTSLAPLATGSAGLSPSQEYSSDIRLPPVAPPASSSAPTSAPPLALPACPDTMVSLVVPVRVQTNMPSYGSAMYTTLSQILVTQSQGSSATVALPKFEEPPSKGTTVCGADVHEVGPGPSGLSEEQSRAFPTPYLRVPVTLPERKGTSLSSESILSLEGSSSTAGGSKRVLSPAGSLELTMETQQQKRVKEEEASKADEKLELVKPCSVVLTSTEDGKRPEKSHLGNQGQGRRELEMLSSLSSDPSDTKEIPPLPHPALSHGQAPGSEALKEYPQPSGKPHRRGLTPLSVKKEDSKEQPDLPSLAPPSSLPLSETSSRPAKSQEGTDSKKVLQFPSLHTTTNVSWCYLNYIKPNHIQHADRRSSVYAGWCISLYNPNLPGVSTKAALSLLRSKQKVSKETYTMATAPHPEAGRLVPSSSRKPRMTEVHLPSLVSPEGQKDLARVEKEEERRGEPEEDAPASQRGEPARIKIFEGGYKSNEEYVYVRGRGRGKYVCEECGIRCKKPSMLKKHIRTHTDVRPYVCKHCHFAFKTKGNLTKHMKSKAHSKKCQETGVLEELEAEEGTSDDLFQDSEGREGSEAVEEHQFSDLEDSDSDSDLDEDEDEDEEESQDELSRPSSEAPPPGPPHALRADSSPILGPQPPDAPASGTEATRGSSVSEAERLTASSCSMSSQSMPGLPWLGPAPLGSVEKDTGSALSYKPVSPRRPWSPSKEAGSRPPLARKHSLTKNDSSPQRCSPAREPQASAPSPPGLHVDPGRGMGPLPCGSPRLQLSPLTLCPLGRELAPRAHVLSKLEGTTDPGLPRYSPTRRWSPGQAESPPRSAPPGKWALAGPGSPSAGEHGPGLGLAPRVLFPPAPLPHKLLSRSPETCASPWQKAESRSPSCSPGPAHPLSSRPFSALHDFHGHILARTEENIFSHLPLHSQHLTRAPCPLIPIGGIQMVQARPGAHPTLLPGPTAAWVSGFSGGGSDLTGAREAQERGRWSPTESSSASVSPVAKVSKFTLSSELEGRDYPKERERTGGGPGRPPDWTPHGTGAPAEPTPTHSPCTPPDTLPRPPQGRRAAQSWSPRLESPRAPANPEPSATPPLDRSSSVGCLAEASARFPARTRNLSGESRTRQDSPKPSGSGEPRAHPHQPEDRVPPNA

SEQ ID NO: 3 - DNA, 2684 bp, Homo sapiens
gtcttggaaatgtgaacgcaagaagcaggcttgatttttttttctccccccttctctctctctctctctctctctcttcctctctccctctttctcctctctcacccacactcacgcacacctccaaaccgcacacccagacgcacacgcataccccagcgcccggcagttatgtattctccgctctgtctcacccaggatgaatttcatcctttcatcgaagcacttctgccccacgtccgagcctttgcctacacatggttcaacctgcaggcccgaaaacgaaaatacttcaaaaaacatgaaaagcgtatgtcaaaagaagaagagagagccgtgaaggatgaattgctaagtgaaaaaccagaggtcaagcagaagtgggcatctcgacttctggcaaagttgcggaaagatatccgacccgaatatcgagaggattttgttcttacagttacagggaaaaaacctccatgttgtgttctttccaacccagaccagaaaggcaagatgcgaagaattgactgcctccgccaggcagataaagtctggaggttggaccttgttatggtgattttgtttaaaggtattccgctggaaagtactgatggcgagcgccttgtaaagtccccacaatgctctaatccagggctctgtgtccaaccccatcacataggggtttctgttaaggaactcgatttatatttggcatactttgtgcatgcagcagattcaagtcaatctgaaagtcccagccagccaagtgacgctgacattaaggaccagccagaaaatggacatttgggcttccaggacagttttgtcacatcaggtgtttttagtgtcactgagctagtaagagtgtcacagacaccaatagctgcaggaactggcccaaatttttctctctcagatttggaaagttcttcatactacagcatgagtccaggagcaatgaggaggtctttacccagcacatcctctacgagctccacaaagcgcctcaagtctgtggaggatgaaatggacagtcctggtgaggagccattttatacaggccaagggcgctccccaggaagtggcagtcagtcaagtggatggcatgaagtggagccaggaatgccatctccaaccacactgaagaagtcggagaagtctggtttcagcagcccctccccttcacagacctcctccctgggaacggcgttcacacagcatcaccgacctgtcattacaggacccagagcaagtccgcatgcaacaccatcgactcttcatttcccgacatcacccattatccagcagcctgggccttacttctcacacccagccatccgctatcaccctcaggagacgctgaaagaatttgtccaacttgtctgccctgatgctggtcagcaggctggacaggtggggttcctcaatcccaatgggagcagccaaggcaaggtgcacaacccattccttcccaccccaatgttgccaccgccaccgccaccaccgatggccaggcctgtgcctctgccggtgccagacacaaagcctccaaccacgtcaacagaaggaggtgcagcctcccccacgtcaccaatcctggtacctgggataaaagttgcagcgtcccaccatccaccagacagaccacctgaccccttctcaactctgtaacatggacgcaacctcaacccagcgcagttacaacttcactatcagcggaaggggagaaaaaccgattcaaatcaacttgtacatggaaacagcaagcattatggtcaaacagcaaaggccataaccttttgggatttttttttttttttaaatactttagggactgttgtaatttctcatatggtgctggaaatggttgggctttgtaacatttgaagtgtttccatggtagcgtgagcattaggtgacgtggctagcggaggactacccttgctcactgacttcctgttgtaacacactttccttacggagcctggctgtttcacagtatttcatgaatttacccacacaggtgtgatcctccttgagcattgaggaggcacatggagaactaaatcttttgtagtagctgagatctgcaatatataacgggacagtcaaagggcaatgtttttctgtaacatattggaaaaagaaaatgcagttatattccttttttatttgttcctttagtttgttttggttcagcagtcagcagttaagtatataacatggcccgcaaggacaatgaatccactcacattgcagaacaattccgaaaatggcaaactactactactactgttcagttttttaaaagttttgaaatgctgcacttacatttaaaaaaacaacaacaacattttttcaacaatttcaacaatgacacaaaaattcacatggaaatggggaagatggtctgttttgacagaaactgacaggaatcaatcaaaacaatcgaattttgaattgagtaaagtgcaatttcattggatagctaaatatctttgtaagatagagattgttgaaaattctatttttgtttttctagtcctttcaccccaggactctaaattattggggtaaaaaacagccttgcaagaaaaaggggagctatttttgctttttatgttttttattgttaaacttgtatccctttaaaaactaaaaaaaaaaaaaaaaaaaaaaaaaaaaaa

SEQ ID NO: 4 - protein, 498 aa, Homo sapiens
MYSPLCLTQDEFHPFIEALLPHVRAFAYTWFNLQARKRKYFKKHEKRMSKEEERAVKDELLSEKPEVKQKWASRLLAKLRKDIRPEYREDFVLTVTGKKPPCCVLSNPDQKGKMRRIDCLRQADKVWRLDLVMVILFKGIPLESTDGERLVKSPQCSNPGLCVQPHHIGVSVKELDLYLAYFVHAADSSQSESPSQPSDADIKDQPENGHLGFQDSFVTSGVFSVTELVRVSQTPIAAGTGPNFSLSDLESSSYYSMSPGAMRRSLPSTSSTSSTKRLKSVEDEMDSPGEEPFYTGQGRSPGSGSQSSGWHEVEPGMPSPTTLKKSEKSGFSSPSPSQTSSLGTAFTQHHRPVITGPRASPHATPSTLHFPTSPIIQQPGPYFSHPAIRYHPQETLKEFVQLVCPDAGQQAGQVGFLNPNGSSQGKVHNPFLPTPMLPPPPPPPMARPVPLPVPDTKPPTTSTEGGAASPTSPILVPGIKVAASHHPPDRPPDPFSTL

SEQ ID NO: 5 - DNA, 3519 bp, Homo sapiens
ggggcttaccgcgagggcctcgctccggaagccgcaccctccgcggcgtcccaccgtcgaggattaacaaaacgccaaacaagattttaacagtcggcagcgaaagcgcgcactcgagcgccaatgagagcggaaggaggggcaccgcgcctgaggaacactccgtatgtcgaacaatgattggctggagcccacctttcttcttttttgctattagatgggcttgctgctcccgcccatctaattggctttggtctagatataattggtgattacaactttcctctataaattaactcttgacactccttgggatttgaagaaaaaaatgcctggtgtcatacctagtgaaagtaatggactttcaagaggtagcccttcaaagaaaaacagactttccttaaagttttttcagaaaaaggaaactaagagagctttggatttcacagattctcaagaaaatgaagaaaaagcttctgaatatagagcatctgaaattgatcaagttgttcctgcagcacagtcttcacctataaactgtgagaagagagaaaacttgttaccatttgtgggactgaataatctcggcaatacttgctatcttaatagtatacttcaggtattatatttttgtcccggttttaaatctggagtaaagcacttatttaatattatttcaaggaagaaagaagctctaaaggatgaagccaatcaaaaagacaagggaaattgcaaagaagattctttggcaagttatgaattgatatgcagtttacagtccttaatcatttcggttgaacagctccaggctagttttctcttaaatccagagaaatatactgatgaacttgccactcagccaaggcgactgcttaacacactgagggaactcaaccctatgtatgaaggatatctacagcatgatgcacaggaagtattacaatgtattttgggaaacattcaagaaacatgccaactcctaaaaaaagaagaagtaaaaaatgtggcagaattacctactaaggtagaagaaatacctcatccgaaagaggaaatgaatggtattaacagcatagagatggacagtatgaggcattctgaagactttaaagagaaactcccaaaaggaaatgggaaaagaaaaagtgacactgaatttggtaacatgaagaaaaaagttaaattatccaaggaacaccagtcattggaagagaaccagagacaaactagatcaaaaagaaaagctacaagtgatacattagagagtcctcctaaaataattcccaagtatatttctgaaaatgagagtccaagaccctcacaaaagaaatcaagagttaaaataaattggttaaagtctgcaactaagcaacccagcattctttctaaattttgtagtctgggaaaaataacaacaaaccaaggagtcaaaggacaatctaaagaaaatgaatgtgatcctgaagaggacttggggaagtgtgaaagtgataacacaactaatggttgtggacttgaatctccaggaaatactgttacacctgtaaatgttaatgaagttaaacccataaacaaaggtgaagaacaaattggttttgagctagtggagaaattatttcaaggtcagctggtattaaggacgcgttgcttggaatgtgaaagtttaacagaaagaagagaagattttcaagacatcagtgtgccagtacaagaagatgagctttccaaagtagaggagagttctgaaatttctccagagccaaaaacagaaatgaagaccctgagatgggcaatttcacaatttgcttcagtagaaaggattgtaggagaagataaatatttctgtgaaaactgccatcattatactgaagctgaacgaagtcttttgtttgacaaaatgcctgaagttataactattcatttgaagtgctttgctgctagtggtttggagtttgattgttatggtggtggactttccaagatcaacactcctttattgacacctcttaaattgtcactagaagaatggagcacaaagccaactaacgacagctatggattatttgcggttgtgatgcatagtggcattacaattagtagtgggcattacactgcttctgttaaagtcactgaccttaacagtttagaactagataaaggaaattttgtggttgaccaaatgtgtgaaataggtaagccagaaccattgaatgaggaggaagcaaggggtgtggttgagaattataatgatgaagaagtgtcaattagagttggtggaaatacacagccaagtaaagttttgaacaaaaaaaatgtagaagctattggacttcttggaggacaaaagagcaaagcagattatgagctatacaacaaagcctctaatcctgataaggttgctagtacagcgtttgctgaaaatagaaattctgagactagtgatactactgggacccatgaatctgatagaaacaaggaatccagtgaccaaacaggcattaatattagtggatttgagaacaaaatttcatacgtagtgcaaagcttaaaggagtatgaggggaagtggttgctttttgatgattctgaagtcaaagttactgaagagaaggactttctgaattctctttccccttctacatctcctacttctactccttacttgctattttataagaaattatagagtgagtgtattttccttgtgtatatattaaacacacccatacaaacattggtaaagttgattacatcaaagaatctttagcttatcttttgaagctactggatattattggtctctctaggtttttatataaatagtgaaatttgaattactgaaaaccatgttaatttttagaactcattttcctcagtagagactagtgatgcattagcttctgggaacaaacttgtatcggttcttaattaaattatccaaaacggaggcatttaaacacttggatttacaccagtcttttgtgtttgctttttaaaataaagtgctcgtatttgtattctccatattttggagtaattatctacatgatgtttatagttcctgtggtttttcacccaagaagcagaatctcattcagtacatttagttttataagagtcatgaagctaaatccttgggctatgtcagaggcacaaagtctagaatgtgtgtattcacaatggtgtatgtacattttgtgccttgattcacttagaagtgtctcagaaaacctggacagttcgcttctacacaagaattttatatgtatttatgaagatgattctgtaccctagtatatctttttgggcatggactaatttgtatctgtttaactcatattctgcacgatctgtatatagtacatcaaacttagaggtgtgaccttaaatttaactttttttaaaaactgggaggtcaataaaatttaaactgcttaactatgtatatgaatatttgaattttttacttgtatatttttataaatacagctgagttttcttaaagcgaaaaaaaaaaaa

SEQ ID NO: 6 - protein, 785 aa, Homo sapiens
MPGVIPSESNGLSRGSPSKKNRLSLKFFQKKETKRALDFTDSQENEEKASEYRASEIDQVVPAAQSSPINCEKRENLLPFVGLNNLGNTCYLNSILQVLYFCPGFKSGVKHLFNIISRKKEALKDEANQKDKGNCKEDSLASYELICSLQSLIISVEQLQASFLLNPEKYTDELATQPRRLLNTLRELNPMYEGYLQHDAQEVLQCILGNIQETCQLLKKEEVKNVAELPTKVEEIPHPKEEMNGINSIEMDSMRHSEDFKEKLPKGNGKRKSDTEFGNMKKKVKLSKEHQSLEENQRQTRSKRKATSDTLESPPKIIPKYISENESPRPSQKKSRVKINWLKSATKQPSILSKFCSLGKITTNQGVKGQSKENECDPEEDLGKCESDNTTNGCGLESPGNTVTPVNVNEVKPINKGEEQIGFELVEKLFQGQLVLRTRCLECESLTERREDFQDISVPVQEDELSKVEESSEISPEPKTEMKTLRWAISQFASVERIVGEDKYFCENCHHYTEAERSLLFDKMPEVITIHLKCFAASGLEFDCYGGGLSKINTPLLTPLKLSLEEWSTKPTNDSYGLFAVVMHSGITISSGHYTASVKVTDLNSLELDKGNFVVDQMCEIGKPEPLNEEEARGVVENYNDEEVSIRVGGNTQPSKVLNKKNVEAIGLLGGQKSKADYELYNKASNPDKVASTAFAENRNSETSDTTGTHESDRNKESSDQTGINISGFENKISYVVQSLKEYEGKWLLFDDSEVKVTEEKDFLNSLSPSTSPTSTPYLLFYKKL

SEQ ID NO: 7 - DNA, 3424 bp, Homo sapiens
ggggcttaccgcgagggcctcgctccggaagccgcaccctccgcggcgtcccaccgtcgaggattaacaaaacgccaaacaagattttaacagtcggcagcgaaagcgcgcactcgagcgccaatgagagcggaaggaggggcaccgcgcctgaggaacactccatataattggtgattacaactttcctctataaattaactcttgacactccttgggatttgaagaaaaaaatgcctggtgtcatacctagtgaaagtaatggactttcaagaggtagcccttcaaagaaaaacagactttccttaaagttttttcagaaaaaggaaactaagagagctttggatttcacagattctcaagaaaatgaagaaaaagcttctgaatatagagcatctgaaattgatcaagttgttcctgcagcacagtcttcacctataaactgtgagaagagagaaaacttgttaccatttgtgggactgaataatctcggcaatacttgctatcttaatagtatacttcaggtattatatttttgtcccggttttaaatctggagtaaagcacttatttaatattatttcaaggaagaaagaagctctaaaggatgaagccaatcaaaaagacaagggaaattgcaaagaagattctttggcaagttatgaattgatatgcagtttacagtccttaatcatttcggttgaacagctccaggctagttttctcttaaatccagagaaatatactgatgaacttgccactcagccaaggcgactgcttaacacactgagggaactcaaccctatgtatgaaggatatctacagcatgatgcacaggaagtattacaatgtattttgggaaacattcaagaaacatgccaactcctaaaaaaagaagaagtaaaaaatgtggcagaattacctactaaggtagaagaaatacctcatccgaaagaggaaatgaatggtattaacagcatagagatggacagtatgaggcattctgaagactttaaagagaaactcccaaaaggaaatgggaaaagaaaaagtgacactgaatttggtaacatgaagaaaaaagttaaattatccaaggaacaccagtcattggaagagaaccagagacaaactagatcaaaaagaaaagctacaagtgatacattagagagtcctcctaaaataattcccaagtatatttctgaaaatgagagtccaagaccctcacaaaagaaatcaagagttaaaataaattggttaaagtctgcaactaagcaacccagcattctttctaaattttgtagtctgggaaaaataacaacaaaccaaggagtcaaaggacaatctaaagaaaatgaatgtgatcctgaagaggacttggggaagtgtgaaagtgataacacaactaatggttgtggacttgaatctccaggaaatactgttacacctgtaaatgttaatgaagttaaacccataaacaaaggtgaagaacaaattggttttgagctagtggagaaattatttcaaggtcagctggtattaaggacgcgttgcttggaatgtgaaagtttaacagaaagaagagaagattttcaagacatcagtgtgccagtacaagaagatgagctttccaaagtagaggagagttctgaaatttctccagagccaaaaacagaaatgaagaccctgagatgggcaatttcacaatttgcttcagtagaaaggattgtaggagaagataaatatttctgtgaaaactgccatcattatactgaagctgaacgaagtcttttgtttgacaaaatgcctgaagttataactattcatttgaagtgctttgctgctagtggtttggagtttgattgttatggtggtggactttccaagatcaacactcctttattgacacctcttaaattgtcactagaagaatggagcacaaagccaactaacgacagctatggattatttgcggttgtgatgcatagtggcattacaattagtagtgggcattacactgcttctgttaaagtcactgaccttaacagtttagaactagataaaggaaattttgtggttgaccaaatgtgtgaaataggtaagccagaaccattgaatgaggaggaagcaaggggtgtggttgagaattataatgatgaagaagtgtcaattagagttggtggaaatacacagccaagtaaagttttgaacaaaaaaaatgtagaagctattggacttcttggaggacaaaagagcaaagcagattatgagctatacaacaaagcctctaatcctgataaggttgctagtacagcgtttgctgaaaatagaaattctgagactagtgatactactgggacccatgaatctgatagaaacaaggaatccagtgaccaaacaggcattaatattagtggatttgagaacaaaatttcatacgtagtgcaaagcttaaaggagtatgaggggaagtggttgctttttgatgattctgaagtcaaagttactgaagagaaggactttctgaattctctttccccttctacatctcctacttctactccttacttgctattttataagaaattatagagtgagtgtattttccttgtgtatatattaaacacacccatacaaacattggtaaagttgattacatcaaagaatctttagcttatcttttgaagctactggatattattggtctctctaggtttttatataaatagtgaaatttgaattactgaaaaccatgttaatttttagaactcattttcctcagtagagactagtgatgcattagcttctgggaacaaacttgtatcggttcttaattaaattatccaaaacggaggcatttaaacacttggatttacaccagtcttttgtgtttgctttttaaaataaagtgctcgtatttgtattctccatattttggagtaattatctacatgatgtttatagttcctgtggtttttcacccaagaagcagaatctcattcagtacatttagttttataagagtcatgaagctaaatccttgggctatgtcagaggcacaaagtctagaatgtgtgtattcacaatggtgtatgtacattttgtgccttgattcacttagaagtgtctcagaaaacctggacagttcgcttctacacaagaattttatatgtatttatgaagatgattctgtaccctagtatatctttttgggcatggactaatttgtatctgtttaactcatattctgcacgatctgtatatagtacatcaaacttagaggtgtgaccttaaatttaactttttttaaaaactgggaggtcaataaaatttaaactgcttaactatgtatatgaatatttgaattttttacttgtatatttttataaatacagctgagttttcttaaagcgaaaaaaaaaaaa

SEQ ID NO: 8 - protein, 785 aa, Homo sapiens; identical to SEQ ID NO: 6

SEQ ID NO: 9 - DNA, 3949 bp, Homo sapiens
ctcgcgcgcacgaatggttaaaaaaagggtgtgaggctcgagcccgccagccaggccgctagcacctcgcgcgcgccctcagcgaggacccgcacgagctgcccggctctgtgcctgcgttgtttgaaactgtggaacccgttaggcttttggggaactacagtcccagctggctccggagcccgtgcgtgccaggggcgagtggccgtcgcgagacggctcctgcctttcgtgtctctgcagcgtggagactggaaccggcaatttcaaaggacgccacgttcaatcgcagcgctggcgcgggcggaggctaaaacacgggggtcctgagactgaggaaaacgcgccaagttcccctcggtggcggagtgctaaagaccctagcggttcaggcgttcggcgagcggggccgctgcttgttgcgctcctggctctcccggggcgggcgcagatgggcgccgctcccgggatgtagttggtgttggtgcaagacgggagcgagcggcggtcggggttcccgctcttgggagcggatggtcactcccccgcggggagggcgagccgaccagattttcctggggccggggacccggcgggctcggggcagggactcacctgtcgcacccacactcattcgggttggacttgccggcgtcaccgccgcggacttcgctttgggccatgaccagatataattggtgattacaactttcctctataaattaactcttgacactccttgggatttgaagaaaaaaatgcctggtgtcatacctagtgaaagtaatggactttcaagaggtagcccttcaaagaaaaacagactttccttaaagttttttcagaaaaaggaaactaagagagctttggatttcacagattctcaagaaaatgaagaaaaagcttctgaatatagagcatctgaaattgatcaagttgttcctgcagcacagtcttcacctataaactgtgagaagagagaaaacttgttaccatttgtgggactgaataatctcggcaatacttgctatcttaatagtatacttcaggtattatatttttgtcccggttttaaatctggagtaaagcacttatttaatattatttcaaggaagaaagaagctctaaaggatgaagccaatcaaaaagacaagggaaattgcaaagaagattctttggcaagttatgaattgatatgcagtttacagtccttaatcatttcggttgaacagctccaggctagttttctcttaaatccagagaaatatactgatgaacttgccactcagccaaggcgactgcttaacacactgagggaactcaaccctatgtatgaaggatatctacagcatgatgcacaggaagtattacaatgtattttgggaaacattcaagaaacatgccaactcctaaaaaaagaagaagtaaaaaatgtggcagaattacctactaaggtagaagaaatacctcatccgaaagaggaaatgaatggtattaacagcatagagatggacagtatgaggcattctgaagactttaaagagaaactcccaaaaggaaatgggaaaagaaaaagtgacactgaatttggtaacatgaagaaaaaagttaaattatccaaggaacaccagtcattggaagagaaccagagacaaactagatcaaaaagaaaagctacaagtgatacattagagagtcctcctaaaataattcccaagtatatttctgaaaatgagagtccaagaccctcacaaaagaaatcaagagttaaaataaattggttaaagtctgcaactaagcaacccagcattctttctaaattttgtagtctgggaaaaataacaacaaaccaaggagtcaaaggacaatctaaagaaaatgaatgtgatcctgaagaggacttggggaagtgtgaaagtgataacacaactaatggttgtggacttgaatctccaggaaatactgttacacctgtaaatgttaatgaagttaaacccataaacaaaggtgaagaacaaattggttttgagctagtggagaaattatttcaaggtcagctggtattaaggacgcgttgcttggaatgtgaaagtttaacagaaagaagagaagattttcaagacatcagtgtgccagtacaagaagatgagctttccaaagtagaggagagttctgaaatttctccagagccaaaaacagaaatgaagaccctgagatgggcaatttcacaatttgcttcagtagaaaggattgtaggagaagataaatatttctgtgaaaactgccatcattatactgaagctgaacgaagtcttttgtttgacaaaatgcctgaagttataactattcatttgaagtgctttgctgctagtggtttggagtttgattgttatggtggtggactttccaagatcaacactcctttattgacacctcttaaattgtcactagaagaatggagcacaaagccaactaacgacagctatggattatttgcggttgtgatgcatagtggcattacaattagtagtgggcattacactgcttctgttaaagtcactgaccttaacagtttagaactagataaaggaaattttgtggttgaccaaatgtgtgaaataggtaagccagaaccattgaatgaggaggaagcaaggggtgtggttgagaattataatgatgaagaagtgtcaattagagttggtggaaatacacagccaagtaaagttttgaacaaaaaaaatgtagaagctattggacttcttggaggacaaaagagcaaagcagattatgagctatacaacaaagcctctaatcctgataaggttgctagtacagcgtttgctgaaaatagaaattctgagactagtgatactactgggacccatgaatctgatagaaacaaggaatccagtgaccaaacaggcattaatattagtggatttgagaacaaaatttcatacgtagtgcaaagcttaaaggagtatgaggggaagtggttgctttttgatgattctgaagtcaaagttactgaagagaaggactttctgaattctctttccccttctacatctcctacttctactccttacttgctattttataagaaattatagagtgagtgtattttccttgtgtatatattaaacacacccatacaaacattggtaaagttgattacatcaaagaatctttagcttatcttttgaagctactggatattattggtctctctaggtttttatataaatagtgaaatttgaattactgaaaaccatgttaatttttagaactcattttcctcagtagagactagtgatgcattagcttctgggaacaaacttgtatcggttcttaattaaattatccaaaacggaggcatttaaacacttggatttacaccagtcttttgtgtttgctttttaaaataaagtgctcgtatttgtattctccatattttggagtaattatctacatgatgtttatagttcctgtggtttttcacccaagaagcagaatctcattcagtacatttagttttataagagtcatgaagctaaatccttgggctatgtcagaggcacaaagtctagaatgtgtgtattcacaatggtgtatgtacattttgtgccttgattcacttagaagtgtctcagaaaacctggacagttcgcttctacacaagaattttatatgtatttatgaagatgattctgtaccctagtatatctttttgggcatggactaatttgtatctgtttaactcatattctgcacgatctgtatatagtacatcaaacttagaggtgtgaccttaaatttaactttttttaaaaactgggaggtcaataaaatttaaactgcttaactatgtatatgaatatttgaattttttacttgtatatttttataaatacagctgagttttcttaaagcgaaaaaaaaaaaa

SEQ ID NO: 10 - protein, 785 aa, Homo sapiens; identical to SEQ ID NO: 6

SEQ ID NO: 11 - DNA, 7063 bp, Homo sapiens
agccgccgccgccgtcgccgtcgccgcagcagccatggccgagcgccgcgccttcgcccagaagatcagcagaacggtggcagccgaagttaggaagcagatctccggacaatatagtggttctccccaactgctcaaaaaccttaatattgttggcaatatatcccatcacaccacagtgccccttaccgaagcagtagatccagtggatttggaagattacctcattactcatcctttggctgtggattctgggcctttacgggatttgattgaatttcctccagatgatattgaagttgtttatagtcctcgggactgcagaactcttgtttcagctgtacctgaagaaagtgaaatggatccacatgttagagactgtataagaagttatacagaagactgggcaattgtcatcagaaaatatcataaattgggaacaggatttaatcccaatacattagataaacagaaagaaaggcaaaaaggtttgccaaaacaagtttttgaatctgatgaagctccagatggcaacagctaccaggatgatcaagatgaccttaaaagacgttcaatgtcaatagatgataccccaaggggtagctgggcctgtagtatctttgacttgaaaaattcacttcctgatgctttgcttcccaatttacttgatcgaactccaaatgaagaaatagaccgtcagaatgatgaccaaaggaaatcaaaccgtcacaaagaactttttgctttgcatccatcaccagatgaggaagaaccaatagaacggcttagtgttcctgatatacccaaagaacattttggtcaaagacttcttgtaaaatgcttatcactcaagtttgaaattgaaattgaacccatttttgcaagtttggctttatatgatgtcaaggaaaagaaaaagatttcagaaaacttttattttgaccttaattctgagcagatgaaagggttgttacgtccacatgtaccacctgctgccattactaccctggcaagatcagcaattttttctatcacttatccttcccaagatgtttttcttgtaataaagctagaaaaagtcctacagcaaggagacattggagagtgtgcagaaccatatatgattttcaaagaagcagatgccaccaagaataaagaaaaactggagaaactgaagagtcaagcagatcagttttgccaaagacttgggaaatatcgcatgccttttgcttggactgcaatccatttaatgaatattgttagcagtgctgggagtttggaaagagattctacagaagtagaaatcagtactggagaacgaaaagggtcttggtcagagaggaggaattctagtattgttggcagacgatcacttgaaaggacaacaagtggagatgatgcttgtaacttgacgagctttcgaccagctactctcacagtgacaaatttttttaagcaggaaggagaccgcttaagtgatgaagatctctacaaattccttgctgatatgagaaggccatcttctgtcttacggcgactaagacctattacagctcagctcaagatagacatttctcccgcacctgaaaatccccattattgcctaactccggagctgcttcaagtgaagctttaccctgacagtagagttagacctaccagagaaatcttagagtttcccgcaagggatgtttatgttccaaacactacttacagaaatcttctctacatataccctcagagtcttaattttgccaatcgtcaaggttctgctagaaatataacagtgaaagtccagtttatgtatggagaggatccaagcaatgccatgccggtaatctttggtaaatctagctgttcagaattttcaaaggaagcctatacagccgtagtatatcataacaggtctcctgattttcatgaagaaatcaaggttaagcttcctgctactttaactgaccatcatcacttgctttttactttttatcatgttagttgtcaacaaaaacaaaatactcctcttgaaacaccagttggatatacatggataccaatgcttcagaatggacggttgaagactggccagttttgcttgccagtctcattggaaaaaccaccacaggcttattctgtactgtctcctgaggttcctctacctggcatgaaatgggtagataatcacaaaggtgtttttaatgttgaagttgttgctgtttcgtctatccatacacaagatccttatcttgacaaattttttgctctggtcaatgctctggatgaacacctgttcccagtccgaattggggacatgcgaatcatggaaaataacttagaaaatgaattgaagagcagtatttcagcactgaattcatcccagctggaaccagtggtccgatttcttcatcttctgctagataaactgatacttttagttattagacctcctgtcattgctggccaaatagttaacctaggtcaagcatcttttgaagccatggcatcaattataaatcgacttcacaaaaacttggaaggaaatcatgaccagcatggcagaaacagccttcttgcatcatatattcattatgttttccgcctaccaaatacttaccctaattcatcatcaccaggtcctgggggtttgggaggatcagtgcattatgccacaatggctagatctgcggtgagacctgcaagccttaatttaaatcgttctcgaagccttagtaatagcaatccagatatatctgggactcccacgtcaccagatgatgaagttcgatcaatcatcgggagtaaggctatggatcgaagttgtaatcgtatgtcttcgcacacagagacgtcaagtttcttacaaacattaacgggacgcttaccaactaaaaagctttttcacgaggagctggctttgcagtgggttgtttgcagtggcagcgttcgggaatcagctttgcaacaagcctggttcttttttgaattaatggtaaagagcatggtgcaccatttatactttaatgataaacttgaggctccaaggaaaagtcgttttccagaacgtttcatggatgacattgcagctcttgtcagcacgattgctagtgatatagtttcacgatttcagaaggacacagaaatggttgagagactcaatacaagccttgcattctttctcaatgatctgttgtctgttatggacagaggatttgtttttagccttataaagtcctgctataaacaggtgtcttcaaagctttactcattaccgaatcccagtgttctggtgtccttgaggctggattttctacgaatcatctgcagtcatgagcactatgttacattaaacttaccctgcagcttacttactccacctgcatctccatcaccttctgtttcttctgcaacatctcagagttctggattttctacgaatgtacaagaccaaaagattgcaaatatgtttgaattatccgtgcctttccgccaacagcattatttggcaggacttgtgttaacagagctggctgtcattttagaccctgatgctgaaggactgtttggattgcataagaaagtcatcaatatggtacacaatttactctccagtcacgactcagacccgcggtactctgaccctcagataaaggctcgagtggccatgttgtatctacctctgattggtattatcatggaaactgtacctcagctgtatgattttacagaaactcacaatcaacgaggaagaccaatttgtatagccactgatgattatgaaagtgagagcggaagtatgataagccagaccgttgccatggcaatcgcagggacatcggtccctcaactaacaaggcctggcagtttcctcctcacgtcaacgagtggcaggcaacacactaccttttcagcagaatcaagtcgaagccttttgatctgtctactttgggttctcaaaaatgcagatgaaacagttctacagaagtggtttacagatctctcagtcttgcagctaaaccggctattagatctgctttatctctgtgtgtcttgctttgagtataaagggaaaaaagtgtttgaacgaatgaatagcttgacctttaagaaatcaaaagacatgagagcaaagcttgaagaagctattcttgggagcataggtgccaggcaagaaatggtacggcgaagccgaggacagctcggtacgtacacaatagcttctcctcctgagagaagcccatctggaagtgcctttggaagtcaagaaaatttgaggtggaggaaagatatgactcactggcgtcaaaacacagagaagcttgacaaatcaagagcagagattgaacacgaagcactgattgatggaaacctggctacagaagcaaacctaatcattttagatacattagagattgttgttcagaccgtttctgtaacggaatccaaagagagcattcttggtggagtgctaaaagtgctactacacagcatggcctgtaaccaaagtgcagtttatctacaacactgttttgctacacagagagccttggtttcaaagtttcctgaactcttatttgaagaagagacagagcagtgtgctgatttatgcctcaggcttctccgacactgtagcagtagcatcggtacaatacggtcacacgccagtgcctccctttacctactaatgaggcaaaactttgagattgggaataactttgccagggttaaaatgcaggtaacaatgtcactatcctccttggtgggcacatctcagaattttaatgaagaattcttaagacgttctctaaagactatattgacatatgctgaagaagatctggaattgagggaaacaacatttcctgatcaggtccaggatctggttttcaatctccatatgattctttctgatactgtgaaaatgaaggaacaccaggaggatcctgaaatgttgattgatctaatgtacagaattgccaagggttaccagacctctccagatctgcgattgacctggttgcagaacatggcaggcaagcactcagaacgaagcaatcatgctgaagctgcacagtgtctagtccactcagcagcacttgttgctgaatatttgagcatgctggaggaccggaaatatcttcctgtgggatgtgtaacatttcagaatatttcatctaatgttttagaagaatctgcggtctcagatgatgtggtatctccagatgaagaaggtatctgctctggaaaatactttactgagtcaggacttgtgggattactggaacaagcagctgcttccttctctatggctggcatgtatgaagcagttaatgaagtttacaaagtacttattcctattcatgaagctaatcgggatgcaaagaaactatccacaattcatggtaaacttcaagaagcattcagcaaaattgttcatcagagtactggctgggagcggatgtttggcacctattttcgtgttggtttttatggaaccaagttcggggatttggatgaacaagaatttgtttacaaggagcctgcaataaccaaacttgcagagatatctcacagattggagggattttacggagaaagatttggagaggatgtggttgaagtaatcaaagactctaatcctgtagacaagtgtaaattagatcctaacaaggcatatattcagattacctatgtggagccatactttgacacatatgagatgaaggacagaatcacctatttcgacaaaaattacaatcttcgtcgattcatgtactgtacaccctttactttagatggccgtgcccatggggaacttcatgaacaattcaaaaggaagaccattctgactacgtctcatgcctttccttatattaaaacaagggtcaatgtcactcataaagaagagatcatcttaacaccaattgaagttgctattgaggacatgcagaaaaagacacaggagttggcatttgcaacacatcaggatcccgcagaccccaaaatgcttcagatggtactccagggatctgtaggcaccacagtgaatcaggggcctttggaagttgcccaggtttttctgtctgaaatacctagtgacccaaagctcttcagacatcataataaactgcgactctgctttaaagattttactaaaaggtgtgaagatgccttaagaaaaaataagagcttaattgggccggatcaaaaggagtatcaaagggaactggagagaaactatcatcgccttaaagaggccctacagccactgatcaacagaaagatccctcagttatacaaggcagtattgcctgtcacctgccacagagattccttcagtcgaatgagccttcgcaaaatggatctctaaactgaatgcacttgttttattcatctgcaaagagccatgtattcaacatcgagtgtgaaaagatctattggaaaacaacatggaatggaattctggaaattattattcattgaagaatgcagtggccaagaaaatatcaaatgtagattgttaacgcttgagaatcatggctatggtttctaatgttctggtaacaagctgttatcttttaagacattttaatgactcaaaggtacactatacatttaccattatttataccatagctaaggttaaaaatttattcactttaagttcgtattttttaatttatattaccatttatagattcattttggaaccattttaaatgtagtaatgcttattttaaaggtactattaaatatgtgaatgtttacactaattttaccgagtgggacttcaaaatttttattattgacaatggcagagaacaattaaagggttgactcaagaactagttccaaacctagcagaataaaaatcatagatagccccaaattaatgagtttggtaactgtttcaaagttattttccatttacatacccaaaacaggaatttagaattgcagaactttacttagtaaaacctttgtgtaaaataatttaaatacggggataactaataccagtgacaacaccttaacttgattaaatcttattacaccaaaaaaaaaaaaa

SEQ ID NO: 12 - protein, 2109 aa, Homo sapiens
MAERRAFAQKISRTVAAEVRKQISGQYSGSPQLLKNLNIVGNISHHTTVPLTEAVDPVDLEDYLITHPLAVDSGPLRDLIEFPPDDIEVVYSPRDCRTLVSAVPEESEMDPHVRDCIRSYTEDWAIVIRKYHKLGTGFNPNTLDKQKERQKGLPKQVFESDEAPDGNSYQDDQDDLKRRSMSIDDTPRGSWACSIFDLKNSLPDALLPNLLDRTPNEEIDRQNDDQRKSNRHKELFALHPSPDEEEPIERLSVPDIPKEHFGQRLLVKCLSLKFEIEIEPIFASLALYDVKEKKKISENFYFDLNSEQMKGLLRPHVPPAAITTLARSAIFSITYPSQDVFLVIKLEKVLQQGDIGECAEPYMIFKEADATKNKEKLEKLKSQADQFCQRLGKYRMPFAWTAIHLMNIVSSAGSLERDSTEVEISTGERKGSWSERRNSSIVGRRSLERTTSGDDACNLTSFRPATLTVTNFFKQEGDRLSDEDLYKFLADMRRPSSVLRRLRPITAQLKIDISPAPENPHYCLTPELLQVKLYPDSRVRPTREILEFPARDVYVPNTTYRNLLYIYPQSLNFANRQGSARNITVKVQFMYGEDPSNAMPVIFGKSSCSEFSKEAYTAVVYHNRSPDFHEEIKVKLPATLTDHHHLLFTFYHVSCQQKQNTPLETPVGYTWIPMLQNGRLKTGQFCLPVSLEKPPQAYSVLSPEVPLPGMKWVDNHKGVFNVEVVAVSSIHTQDPYLDKFFALVNALDEHLFPVRIGDMRIMENNLENELKSSISALNSSQLEPVVRFLHLLLDKLILLVIRPPVIAGQIVNLGQASFEAMASIINRLHKNLEGNHDQHGRNSLLASYIHYVFRLPNTYPNSSSPGPGGLGGSVHYATMARSAVRPASLNLNRSRSLSNSNPDISGTPTSPDDEVRSIIGSKAMDRSCNRMSSHTETSSFLQTLTGRLPTKKLFHEELALQWVVCSGSVRESALQQAWFFFELMVKSMVHHLYFNDKLEAPRKSRFPERFMDDIAALVSTIASDIVSRFQKDTEMVERLNTSLAFFLNDLLSVMDRGFVFSLIKSCYKQVSSKLYSLPNPSVLVSLRLDFLRIICSHEHYVTLNLPCSLLTPPASPSPSVSSATSQSSGFSTNVQDQKIANMFELSVPFRQQHYLAGLVLTELAVILDPDAEGLFGLHKKVINMVHNLLSSHDSDPRYSDPQIKARVAMLYLPLIGIIMETVPQLYDFTETHNQRGRPICIATDDYESESGSMISQTVAMAIAGTSVPQLTRPGSFLLTSTSGRQHTTFSAESSRSLLICLLWVLKNADETVLQKWFTDLSVLQLNRLLDLLYLCVSCFEYKGKKVFERMNSLTFKKSKDMRAKLEEAILGSIGARQEMVRRSRGQLGTYTIASPPERSPSGSAFGSQENLRWRKDMTHWRQNTEKLDKSRAEIEHEALIDGNLATEANLIILDTLEIVVQTVSVTESKESILGGVLKVLLHSMACNQSAVYLQHCFATQRALVSKFPELLFEEETEQCADLCLRLLRHCSSSIGTIRSHASASLYLLMRQNFEIGNNFARVKMQVTMSLSSLVGTSQNFNEEFLRRSLKTILTYAEEDLELRETTFPDQVQDLVFNLHMILSDTVKMKEHQEDPEMLIDLMYRIAKGYQTSPDLRLTWLQNMAGKHSERSNHAEAAQCLVHSAALVAEYLSMLEDRKYLPVGCVTFQNISSNVLEESAVSDDVVSPDEEGICSGKYFTESGLVGLLEQAAASFSMAGMYEAVNEVYKVLIPIHEANRDAKKLSTIHGKLQEAFSKIVHQSTGWERMFGTYFRVGFYGTKFGDLDEQEFVYKEPAITKLAEISHRLEGFYGERFGEDVVEVIKDSNPVDKCKLDPNKAYIQITYVEPYFDTYEMKDRITYFDKNYNLRRFMYCTPFTLDGRAHGELHEQFKRKTILTTSHAFPYIKTRVNVTHKEEIILTPIEVAIEDMQKKTQELAFATHQDPADPKMLQMVLQGSVGTTVNQGPLEVAQVFLSEIPSDPKLFRHHNKLRLCFKDFTKRCEDALRKNKSLIGPDQKEYQRELERNYHRLKEALQPLINRKIPQLYKAVLPVTCHRDSFSRMSLRKMDL

SEQ ID NO: 13 - DNA, 3207 bp, Homo sapiens
gcagcttacaccgcggtccccttatttggatctgcgggaatgtgggctggagaggtcctgccgtggtaccagcctccagcctgcccccaggactgcccctgacccaggcgcgcccgctgctcggtggcaggagggccggcggagcgccatggcctgcatcctgaagagaaagtctgtgattgctgtgagcttcatagcagcgttccttttcctgctggttgtgcgtcttgtaaatgaagtgaatttcccattgctactaaactgctttggacaacctggtacaaagtggataccattctcctacacatacaggcggccccttcgaactcactatggatacataaatgtgaagacacaagagcctttgcaactggactgtgacctttgtgccatagtgtcaaactcaggtcagatggttggccagaaggtgggaaatgagatagatcgatcctcctgcatttggagaatgaacaatgcccccaccaaaggttatgaagaagatgtcggccgcatgaccatgattcgagttgtgtcccataccagcgttcctcttttgctaaaaaaccctgattattttttcaaggaagcgaatactactatttatgttatttggggacctttccgcaatatgaggaaagatggcaatggcatcatttacaacatgttgaaaaagacagttggtatctatccgaatgcccaaatatacgtgaccacagagaagcgcatgagttactgtgatggagtttttaagaaggaaactgggaaggacagagtccagtctggctcatatctcagcacagggtggtttaccttccttctggccatggacgcctgttatggcattcacgtctacgggatgataaatgacacctactgcaagacagaagggtatagaaaagtcccctaccattattatgaacaaggaagagatgagtgtgatgaatattttcttcatgaacatgccccatatgggggtcataggtttatcactgaaaagaaagtgtttgctaaatgggccaagaagcacaggataatatttacacatccaaactggacattgtcttgataatggttttcctgatcttgccgcatcacttaatgtgatccccatactgcaactgtgatgctgatgatgctaatggagatgatggtaatgataaagacaacaacaatgattatcaagttcctgtacactctcagatgtggatggtgactctgctagtaatttaaacttggcatttcatggaggatggttgtgctcatgatgttctttctggaggttcaacactacgtaccgcactttataatttaactggaattgagatgaaggccagtgacatgacaactgtgacctaagaaatgggaagattatctttcaagatagctgcctagaattgttcaacagtgagtaacttccagaagccaaaagagtttggcttcatgaggcaaggtgattgactcaatggcttgttgaatctcagcagttccgccatcttgaagaatgattgattgtcaaacactgacccaagaactgctatcagggtgcaagtatcttactacttagcctaaggatgggaaaatatctcttcctaatataccatctttctacagtatttcctacagctaaagcctcaggccattgcctaattaacaatgaagatttcatggacatcctacacttcaggattacttgactatctcaaacacataaatcaaaatgggccaagtagcaaatcttgatgaatttccactcttaccatccattcttactaccaacagtataactgaacatgtgattagaatgatctatattaatgtttagttatttttggttgagtgctaaatatttcagaaggctacttaacatgtaagataccaacttcaacactgtaataacatatactgtgaaaacattcctaaaaagtaaccaaagggtttgctaactctgcttcaacatccaacaacacaaaactatatgatttttaaaatcatgaaatagagacagcaaagcatatttttacatcaatttgtatcctatcatacttcataatatatatttgtatattcaaatttctattttataggcccaaggtgtgtttctccaaacattacattctcattgccaagtgccagctgttacacatggagaggaaatgattccttatattaaacctgaccagagctttttgccttctagggatttatttttcccatagtgtatcagttgttatgccacaataacaacaataataatgttcttaatgtccaaagtgctttgtcatttagagtcctttaacatctgttataccatgtgatgcccttgaacaccccattgggctattgtctgtgtattctgccctctttagcagatgatctgtaatttggtcattgttctgttatattccagattgctctacttgctaatatttgtatagaatagaatttatgtaaactagtaaccagttgatctctgtgccaaatacattatatcaggattacacaaaaagcatcacaaaggatggtcttggccatatgctagggcccctgtgaaaataagtagttttgagaagtttttctatatacgtatatatacacgtgtggttctatttaggtggggaaaaaatgaaaaagcagggacaacaggaggaaatgaaggcagagaaatatagtttcctttcctaggattgagacaattctatttttcatatactcgttgctcattaaatagtaaagggttgatttgctgcaagagtagctgagaattcaaaaacatccttgcagaatgattcaaaagacaaaagccaggctcaacttatagaatgttttggaaactggaagtaatgatacatttcacttcagaagcacttgtaggtctttactagtgctaagtattatggtgagctatcattaaagtgtgccatcttggataaaggccttttgcctactctcttctgcaattttgacacctcaatattcacacccataaacattactaagccccagttctatcgttggaaggagttgttattcttttgttgttcccttatgcaatttttaattctatgaatgttaagtttttttgagctaatgatagatagaaatgcccactcaaagaaaaataaacagagacaaatgttaaaattgccatacagactgtttttccccctgttgtttcactttaaaataaaaagaaatccttgattaatc

SEQ ID NO: 14 - protein, 305 aa, Homo sapiens
MACILKRKSVIAVSFIAAFLFLLVVRLVNEVNFPLLLNCFGQPGTKWIPFSYTYRRPLRTHYGYINVKTQEPLQLDCDLCAIVSNSGQMVGQKVGNEIDRSSCIWRMNNAPTKGYEEDVGRMTMIRVVSHTSVPLLLKNPDYFFKEANTTIYVIWGPFRNMRKDGNGIIYNMLKKTVGIYPNAQIYVTTEKRMSYCDGVFKKETGKDRVQSGSYLSTGWFTFLLAMDACYGIHVYGMINDTYCKTEGYRKVPYHYYEQGRDECDEYFLHEHAPYGGHRFITEKKVFAKWAKKHRIIFTHPNWTLS

SEQ ID NO: 15 - DNA, 5723 bp, Homo sapiens
cggcgaacagacgttctttctcctccatgcagttacacaaaaggagggctacggaaactaaaagtttcggggcctctggctcggtgtgtggagaaaagagaaaacctggagacgggatatgaagatcaatgatgcagactgatggttttgatgaagctgggcatttataactagattcattaaggaatacaaagaaaatacttaaagggatcaataatggtgtcttctggttgcagaatgcgaagtctgtggtttatcattgtaatcagcttcttaccaaatacagaaggtttcagcagagcagctttaccatttgggctggtgaggcgagaattatcctgtgaaggttattctatagatctgcgatgcccgggcagtgatgtcatcatgattgagagcgctaactatggtcggacggatgacaagatttgtgatgctgacccatttcagatggagaatacagactgctacctccccgatgccttcaaaattatgactcaaaggtgcaacaatcgaacacagtgtatagtagttactgggtcagatgtgtttcctgatccatgtcctggaacatacaaataccttgaagtccaatatgaatgtgtcccttacatttttgtgtgtcctgggaccttgaaagcaattgtggactcaccatgtatatatgaagctgaacaaaaggcgggtgcttggtgcaaggaccctcttcaggctgcagataaaatttatttcatgccctggactccctatcgtaccgatactttaatagaatatgcttctttagaagatttccaaaatagtcgccaaacaacaacatataaacttccaaatcgagtagatggtactggatttgtggtgtatgatggtgctgtcttctttaacaaagaaagaacgaggaatattgtgaaatttgacttgaggactagaattaagagtggcgaggccataattaactatgccaactaccatgatacctcaccatacagatggggaggaaagactgatatcgacctagcagttgatgaaaatggtttatgggtcatttacgccactgaacagaacaatggaatgatagttattagccagctgaatccatacactcttcgatttgaagcaacgtgggagactgtatacgacaaacgtgccgcatcaaatgcttttatgatatgcggagtcctctatgtggttaggtcagtttatcaagacaatgaaagtgaaacaggcaagaactcaattgattacatttataatacccgattaaaccgaggagaatatgtagatgttcccttccccaaccagtatcagtatattgctgcagtggattacaatccaagagataaccaactttacgtgtggaacaataacttcattttacgatattctctggagtttggtccacctgatcctgcccaagtgcctaccacagctgtgacaataacttcttcagctgagctgttcaaaaccataatatcaaccacaagcactacttcacagaaaggccccatgagcacaactgtagctggatcacaggaaggaagcaaagggacaaaaccacctccagcagtttctacaaccaaaattccacctataacaaatatttttcccctgccagagagattctgtgaagcattagactccaaggggataaagtggcctcagacacaaaggggaatgatggttgaacgaccatgccctaagggaacaagaggaactgcctcatatctctgcatgatttccactggaacatggaaccctaagggccccgatcttagcaactgtacctcacactgggtgaatcagctggctcagaagatcagaagcggagaaaatgctgctagtcttgccaatgaactggctaaacataccaaagggccagtgtttgctggggatgtaagttcttcagtgagattgatggagcagttggtggacatccttgatgcacagctgcaggaactgaaacctagtgaaaaagattcagctggacggagttataacaaggcaattgttgacacagtggacaaccttctgagacctgaagctttggaatcatggaaacatatgaattcttctgaacaagcacatactgcaacaatgttactcgatacattggaagaaggagcttttgtcctagctgacaatcttttagaaccaacaagggtctcaatgcccacagaaaatattgtcctggaagttgccgtactcagtacagaaggacagatccaagactttaaatttcctctgggcatcaaaggagcaggcagctcaatccaactgtccgcaaataccgtcaaacagaacagcaggaatgggcttgcaaagttggtgttcatcatttaccggagcctgggacagttccttagtacagaaaatgcaaccattaaactgggtgctgattttattggtcgtaatagcaccattgcagtgaactctcacgtcatttcagtttcaatcaataaagagtccagccgagtatacctgactgatcctgtgctttttaccctgccacacattgatcctgacaattatttcaatgcaaactgctccttctggaactactcagagagaactatgatgggatattggtctacccagggctgcaagctggttgacactaataaaactcgaacaacgtgtgcatgcagccacctaaccaattttgcaattctcatggcccacagggaaattgcatataaagatggcgttcatgaattacttcttacagtcatcacctgggtgggaattgtcatttcccttgtttgcctggctatctgcatcttcaccttctgctttttccgtggcctacagagtgaccgaaatactattcacaagaacctttgtatcaaccttttcattgctgaatttattttcctaataggcattgataagacaaaatatgcgattgcatgcccaatatttgcaggacttctacactttttctttttggcagcttttgcttggatgtgcctagaaggtgtgcagctctacctaatgttagttgaagtttttgaaagtgaatattcaaggaaaaaatattactatgttgctggttacttgtttcctgccacagtggttggagtttcagctgctattgactataagagctatggaacagaaaaagcttgctggcttcatgttgataactactttatatggagcttcattggacctgttaccttcattattctgctaaatattatcttcttggtgatcacattgtgcaaaatggtgaagcattcaaacactttgaaaccagattctagcaggttggaaaacattaagtcttgggtgcttggcgctttcgctcttctgtgtcttcttggcctcacctggtcctttgggttgctttttattaatgaggagactattgtgatggcatatctcttcactatatttaatgctttccagggagtgttcattttcatctttcactgtgctctccaaaagaaagtacgaaaagaatatggcaagtgcttcagacactcatactgctgtggaggcctcccaactgagagtccccacagttcagtgaaggcatcaaccaccagaaccagtgctcgctattcctctggcacacagagtcgtataagaagaatgtggaatgatactgtgagaaaacaatcagaatcttcttttatctcaggtgacatcaatagcacttcaacacttaatcaaggacattcactgaacaatgccagggatacaagtgccatggatactctaccgctaaatggtaattttaacaacagctactcgctgcacaagggtgactataatgacagcgtgcaagttgtggactgtggactaagtctgaatgatactgcttttgagaaaatgatcatttcagaattagtgcacaacaacttacggggcagcagcaagactcacaacctcgagctcacgctaccagtcaaacctgtgattggaggtagcagcagtgaagatgatgctattgtggcagatgcttcatctttaatgcacagcgacaacccagggctggagctccatcacaaagaactcgaggcaccacttattcctcagcggactcactcccttctgtaccaaccccagaagaaagtgaagtccgagggaactgacagctatgtctcccaactgacagcagaggctgaagatcacctacagtcccccaacagagactctctttatacaagcatgcccaatcttagagactctccctatccggagagcagccctgacatggaagaagacctctctccctccaggaggagtgagaatgaggacatttactataaaagcatgccaaatcttggagctggccatcagcttcagatgtgctaccagatcagcaggggcaatagtgatggttatataatccccattaacaaagaagggtgtattccagaaggagatgttagagaaggacaaatgcagctggttacaagtctttaatcatacagctaaggaattccaagggccacatgcgagtattaataaataaagacaccattggcctgacgcagctccctcaaactctgcttgaagagatgactcttgacctgtggttctctggtgtaaaaaagatgactgaaccttgcagttctgtgaatttttataaaacatacaaaaactttgtatatacacagagtatactaaagtgaattatttgttacaaagaaaagagatgccagccaggtattttaagattctgctgctgtttagagaaattgtgaaacaagcaaaacaaaactttccagccattttactgcagcagtctgtgaactaaatttgtaaatatggctgcaccatttttgtaggcctgcattgtattatatacaagacgtaggctttaaaatcctgtgggacaaatttactgtaccttactattcctgacaagacttggaaaagcaggagagatattctgcatcagtttgcagttcactgcaaatcttttacattaaggcaaagattgaaaacatgcttaaccactagcaatcaagccacaggccttatttcatatgtttcctcaactgtacaatgaactattctcatgaaaaatggctaaagaaattatattttgttctattgctagggtaaaataaatacatttgtgtccaactgaaatataattgtcattaaaataattttaaagagtgaagaaaatattgtgaaaagctcttggttgcacatgttatgaaatgttttttcttacactttgtcatggtaagttctactcattttcacttcttttccactgtatacagtgttctgctttgacaaagttagtctttattacttacatttaaatttcttattgccaaaagaacgtgttttatggggagaaacaaactctttgaagccagttatgtcatgccttgcacaaaagtgatgaaatctagaaaagattgtgtgtcacccctgtttattcttgaacagagggcaaagagggcactgggcacttctcacaaactttctagtgaacaaaaggtgcctattcttttttaaaaaaataaaataaaacataaatattactcttccatattccttctgcctatatttagtaattaatttattttatgataaagttctaatgaaatgtaaattgtttcagcaaaattctgcttttttttcatccctttgtgtaaacctgttaataatgagcccatcactaatatccagtgtaaagtttaacacggtttgacagtaaataaatgtgaattttttcaagtaaaaaaaaaaaaaaaaaa

SEQ ID NO: 16 - protein, 1403 aa, Homo sapiens
MVSSGCRMRSLWFIIVISFLPNTEGFSRAALPFGLVRRELSCEGYSIDLRCPGSDVIMIESANYGRTDDKICDADPFQMENTDCYLPDAFKIMTQRCNNRTQCIVVTGSDVFPDPCPGTYKYLEVQYECVPYIFVCPGTLKAIVDSPCIYEAEQKAGAWCKDPLQAADKIYFMPWTPYRTDTLIEYASLEDFQNSRQTTTYKLPNRVDGTGFVVYDGAVFFNKERTRNIVKFDLRTRIKSGEAIINYANYHDTSPYRWGGKTDIDLAVDENGLWVIYATEQNNGMIVISQLNPYTLRFEATWETVYDKRAASNAFMICGVLYVVRSVYQDNESETGKNSIDYIYNTRLNRGEYVDVPFPNQYQYIAAVDYNPRDNQLYVWNNNFILRYSLEFGPPDPAQVPTTAVTITSSAELFKTIISTTSTTSQKGPMSTTVAGSQEGSKGTKPPPAVSTTKIPPITNIFPLPERFCEALDSKGIKWPQTQRGMMVERPCPKGTRGTASYLCMISTGTWNPKGPDLSNCTSHWVNQLAQKIRSGENAASLANELAKHTKGPVFAGDVSSSVRLMEQLVDILDAQLQELKPSEKDSAGRSYNKAIVDTVDNLLRPEALESWKHMNSSEQAHTATMLLDTLEEGAFVLADNLLEPTRVSMPTENIVLEVAVLSTEGQIQDFKFPLGIKGAGSSIQLSANTVKQNSRNGLAKLVFIIYRSLGQFLSTENATIKLGADFIGRNSTIAVNSHVISVSINKESSRVYLTDPVLFTLPHIDPDNYFNANCSFWNYSERTMMGYWSTQGCKLVDTNKTRTTCACSHLTNFAILMAHREIAYKDGVHELLLTVITWVGIVISLVCLAICIFTFCFFRGLQSDRNTIHKNLCINLFIAEFIFLIGIDKTKYAIACPIFAGLLHFFFLAAFAWMCLEGVQLYLMLVEVFESEYSRKKYYYVAGYLFPATVVGVSAAIDYKSYGTEKACWLHVDNYFIWSFIGPVTFIILLNIIFLVITLCKMVKHSNTLKPDSSRLENIKSWVLGAFALLCLLGLTWSFGLLFINEETIVMAYLFTIFNAFQGVFIFIFHCALQKKVRKEYGKCFRHSYCCGGLPTESPHSSVKASTTRTSARYSSGTQSRIRRMWNDTVRKQSESSFISGDINSTSTLNQGHSLNNARDTSAMDTLPLNGNFNNSYSLHKGDYNDSVQVVDCGLSLNDTAFEKMIISELVHNNLRGSSKTHNLELTLPVKPVIGGSSSEDDAIVADASSLMHSDNPGLELHHKELEAPLIPQRTHSLLYQPQKKVKSEGTDSYVSQLTAEAEDHLQSPNRDSLYTSMPNLRDSPYPESSPDMEEDLSPSRRSENEDIYYKSMPNLGAGHQLQMCYQISRGNSDGYIIPINKEGCIPEGDVREGQMQLVTSL

SEQ ID NO: 17 - DNA, 2179 bp, Homo sapiens
gaagccactagccggttactagctgcgcttttgttccacttgagcgggcactcttctgcggcaagcaggtctaggaattcgcctggttcccacctcgcgtcccttgccttccttcctagtctacccactgtagtgccccctgcgtcccgctccctcctagccgactcagagcacaagaaggattgccacggtttccattgcagcagccgtggcgcctctgaccctttttttatatcgcggcgacggcgggctgtcgtcacgacgacgtgcggacgcagcggcgggggcctttcagcttatgtggagaagtcgctgtgaagccacctataaatccatttactgaatttatggagaaggctgtaaatgatggaagtcattcagaagaactcttttgccatcttaaaactatatcagagaaagaagatttaccacggtgtaccagtgaaagtcatctcagctggcgaatctttctgcattgaatttgaagatttctgaacagaaggaaatattaataaaagaattagacaccttcaaaagtgtaaaactagctttagaacatcttcttagaaagagagactacaaacaaacaggagacaatttatccagcatgttgctagaaaatctaactgataatgaaagtgaaaatactaatcttaagaagaaggtatttgaaaaggaggcccatatccaagaactttcttgtttgtttcagagtgaaaaggcaaatactttgaaagcaaaccgtttttcccaatcagtaaaagtagtacatgaacgactacagatccaaattcataaaagggaagccgagaacgataagttgaaagaatatgtaaagagcttagaaaccaagatagccaagtggaacctgcaatcaagaatgaataagaatgaggctatagtgatgaaagaagcaagtaggcaaaaaactgtagctttaaaaaaggcatctaaagtttacaaacaaaggcttgaccattttacaggagctattgaaaagcttacttcccaaattagagatcaggaagccaagttgtctgaaacaatttcagcttccaatgcctggaaaagtcattatgagaaaattgtgatagaaaaaaccgaattggaagtacagattgaaacaatgaaaaagcaaatcattaatcttttggaagatctgaagaaaatggaagaccatggaaaaaattcatgtgaagaaattcttagaaaagttcactcaattgaatatgaaaatgaaactctgaatcttgagaatacaaaattaaagactacacttgctgctttgaaggatgaagttgtatctgttgaaaatgaactctcagaattgcaagaagtagaaaaaaaacagaaaacccttattgaaatgtataaaactcaggtacaaaagttgcaagaagcagctgaaatagtaaaaagcagatgtgaaaatttgctacataaaaataaccaaataacaaaaaccaaaaataaaaatgtagagaagatgagaggccagatggagtctcatctgaaggagttagagcgtgtctgcgattccttgacggcggcggaacggaggcttcacgagtgtcaggagagtctgcagtgctgcaaggggaagtgtgcagaccaggaacacaccattagggagcttcagggccaggttgatggaaatcacaatcttctgacaaagctttctctggaagaggaaaactgtcttattcagctgaagtgtgaaaaccttcaacaaaaattagaacagatggacgcagaaaataaagagcttgagaagaagctggcaaaccaagaagaatgtcttaagcacagcaatcttaagtttaaagagaaatctgcagagtatacagcattggccagacaactggaagctgctttagaagaaggaagacaaaaggttgctgaagaaatagagaaaatgtcatctagagagagtgctttacaaattaaaatattagatctggaaactgagcttagaaagaaaaatgaagaacaaaatcaacttgtttgcaaaatgaacagtaaagcacaacatcaggaagtgtgtttgaaagaagtacaaaatagtcttgagaagtcggaaaatcaaaatgagagtattaagaattatttacagtttcttaaaacttcttatgtaacaatgtttgaataaattgtcaaatttaaaaaaaaaaaaaaaaaa

SEQ ID NO: 18 - protein, 513 aa, Homo sapiens
MLLENLTDNESENTNLKKKVFEKEAHIQELSCLFQSEKANTLKANRFSQSVKVVHERLQIQIHKREAENDKLKEYVKSLETKIAKWNLQSRMNKNEAIVMKEASRQKTVALKKASKVYKQRLDHFTGAIEKLTSQIRDQEAKLSETISASNAWKSHYEKIVIEKTELEVQIETMKKQIINLLEDLKKMEDHGKNSCEEILRKVHSIEYENETLNLENTKLKTTLAALKDEVVSVENELSELQEVEKKQKTLIEMYKTQVQKLQEAAEIVKSRCENLLHKNNQITKTKNKNVEKMRGQMESHLKELERVCDSLTAAERRLHECQESLQCCKGKCADQEHTIRELQGQVDGNHNLLTKLSLEEENCLIQLKCENLQQKLEQMDAENKELEKKLANQEECLKHSNLKFKEKSAEYTALARQLEAALEEGRQKVAEEIEKMSSRESALQIKILDLETELRKKNEEQNQLVCKMNSKAQHQEVCLKEVQNSLEKSENQNESIKNYLQFLKTSYVTMFE

SEQ ID NO: 19 - DNA, 2312 bp, Homo sapiens
gaagccactagccggttactagctgcgcttttgttccacttgagcgggcactcttctgcggcaagcaggtctaggaattcgcctggttcccacctcgcgtcccttgccttccttcctagtctacccactgtagtgccccctgcgtcccgctccctcctagccgactcagagcacaagaaggattgccacggtttccattgcagcagccgtggcgcctctgaccctttttttatatcgcggcgacggcgggctgtcgtcacgacgacgtgcggacgcagcggcgggggcctttcagcttatgtggagaagtcgctgtgaagccacctataaatccatttactgaatttatggagaaggctgtaaatgatggaagtcattcagaagaactcttttgccatcttaaaactatatcagagaaagaagatttaccacggtgtaccagtgaaagtcatctcagctgcctgaagcaggacattctaaatgaaaagactgaattggaagcaacacttaaggaagcggagttggtaactcattctgtagaattgcttttgccactatttaaggacaccattgaaaagattaattttgaaaatgcgaatctttctgcattgaatttgaagatttctgaacagaaggaaatattaataaaagaattagacaccttcaaaagtgtaaaactagctttagaacatcttcttagaaagagagactacaaacaaacaggagacaatttatccagcatgttgctagaaaatctaactgataatgaaagtgaaaatactaatcttaagaagaaggtatttgaaaaggaggcccatatccaagaactttcttgtttgtttcagagtgaaaaggcaaatactttgaaagcaaaccgtttttcccaatcagtaaaagtagtacatgaacgactacagatccaaattcataaaagggaagccgagaacgataagttgaaagaatatgtaaagagcttagaaaccaagatagccaagtggaacctgcaatcaagaatgaataagaatgaggctatagtgatgaaagaagcaagtaggcaaaaaactgtagctttaaaaaaggcatctaaagtttacaaacaaaggcttgaccattttacaggagctattgaaaagcttacttcccaaattagagatcaggaagccaagttgtctgaaacaatttcagcttccaatgcctggaaaagtcattatgagaaaattgtgatagaaaaaaccgaattggaagtacagattgaaacaatgaaaaagcaaatcattaatcttttggaagatctgaagaaaatggaagaccatggaaaaaattcatgtgaagaaattcttagaaaagttcactcaattgaatatgaaaatgaaactctgaatcttgagaatacaaaattaaagactacacttgctgctttgaaggatgaagttgtatctgttgaaaatgaactctcagaattgcaagaagtagaaaaaaaacagaaaacccttattgaaatgtataaaactcaggtacaaaagttgcaagaagcagctgaaatagtaaaaagcagatgtgaaaatttgctacataaaaataaccaaataacaaaaaccaaaaataaaaatgtagagaagatgagaggccagatggagtctcatctgaaggagttagagcgtgtctgcgattccttgacggcggcggaacggaggcttcacgagtgtcaggagagtctgcagtgctgcaaggggaagtgtgcagaccaggaacacaccattagggagcttcagggccaggttgatggaaatcacaatcttctgacaaagctttctctggaagaggaaaactgtcttattcagctgaagtgtgaaaaccttcaacaaaaattagaacagatggacgcagaaaataaagagcttgagaagaagctggcaaaccaagaagaatgtcttaagcacagcaatcttaagtttaaagagaaatctgcagagtatacagcattggccagacaactggaagctgctttagaagaaggaagacaaaaggttgctgaagaaatagagaaaatgtcatctagagagagtgctttacaaattaaaatattagatctggaaactgagcttagaaagaaaaatgaagaacaaaatcaacttgtttgcaaaatgaacagtaaagcacaacatcaggaagtgtgtttgaaagaagtacaaaatagtcttgagaagtcggaaaatcaaaatgagagtattaagaattatttacagtttcttaaaacttcttatgtaacaatgtttgaataaattgtcaaatttaaaaaaaaaaaaaaaaaa

SEQ ID NO: 20 - protein, 644 aa, Homo sapiens
MEKAVNDGSHSEELFCHLKTISEKEDLPRCTSESHLSCLKQDILNEKTELEATLKEAELVTHSVELLLPLFKDTIEKINFENANLSALNLKISEQKEILIKELDTFKSVKLALEHLLRKRDYKQTGDNLSSMLLENLTDNESENTNLKKKVFEKEAHIQELSCLFQSEKANTLKANRFSQSVKVVHERLQIQIHKREAENDKLKEYVKSLETKIAKWNLQSRMNKNEAIVMKEASRQKTVALKKASKVYKQRLDHFTGAIEKLTSQIRDQEAKLSETISASNAWKSHYEKIVIEKTELEVQIETMKKQIINLLEDLKKMEDHGKNSCEEILRKVHSIEYENETLNLENTKLKTTLAALKDEVVSVENELSELQEVEKKQKTLIEMYKTQVQKLQEAAEIVKSRCENLLHKNNQITKTKNKNVEKMRGQMESHLKELERVCDSLTAAERRLHECQESLQCCKGKCADQEHTIRELQGQVDGNHNLLTKLSLEEENCLIQLKCENLQQKLEQMDAENKELEKKLANQEECLKHSNLKFKEKSAEYTALARQLEAALEEGRQKVAEEIEKMSSRESALQIKILDLETELRKKNEEQNQLVCKMNSKAQHQEVCLKEVQNSLEKSENQNESIKNYLQFLKTSYVTMFE

SEQ ID NO: 21 - DNA, 4007 bp, Homo sapiens
ctaaaaccttgcaagttcaggaagaaaccatctgcatccatattgaaaacctgacacaatgtatgcagcaggctcagtgtgagtgaactggaggcttctctacaacatgacccaaaggagcattgcaggtcctatttgcaacctgaagtttgtgactctcctggttgccttaagttcagaactcccattcctgggagctggagtacagcttcaagacaatgggtataatggattgctcattgcaattaatcctcaggtacctgagaatcagaacctcatctcaaacattaaggaaatgataactgaagcttcattttacctatttaatgctaccaagagaagagtatttttcagaaatataaagattttaatacctgccacatggaaagctaataataacagcaaaataaaacaagaatcatatgaaaaggcaaatgtcatagtgactgactggtatggggcacatggagatgatccatacaccctacaatacagagggtgtggaaaagagggaaaatacattcatttcacacctaatttcctactgaatgataacttaacagctggctacggatcacgaggccgagtgtttgtccatgaatgggcccacctccgttggggtgtgttcgatgagtataacaatgacaaacctttctacataaatgggcaaaatcaaattaaagtgacaaggtgttcatctgacatcacaggcatttttgtgtgtgaaaaaggtccttgcccccaagaaaactgtattattagtaagctttttaaagaaggatgcacctttatctacaatagcacccaaaatgcaactgcatcaataatgttcatgcaaagtttatcttctgtggttgaattttgtaatgcaagtacccacaaccaagaagcaccaaacctacagaaccagatgtgcagcctcagaagtgcatgggatgtaatcacagactctgctgactttcaccacagctttcccatgaatgggactgagcttccacctcctcccacattctcgcttgtacaggctggtgacaaagtggtctgtttagtgctggatgtgtccagcaagatggcagaggctgacagactccttcaactacaacaagccgcagaattttatttgatgcagattgttgaaattcataccttcgtgggcattgccagtttcgacagcaaaggagagatcagagcccagctacaccaaattaacagcaatgatgatcgaaagttgctggtttcatatctgcccaccactgtatcagctaaaacagacatcagcatttgttcagggcttaagaaaggatttgaggtggttgaaaaactgaatggaaaagcttatggctctgtgatgatattagtgaccagcggagatgataagcttcttggcaattgcttacccactgtgctcagcagtggttcaacaattcactccattgccctgggttcatctgcagccccaaatctggaggaattatcacgtcttacaggaggtttaaagttctttgttccagatatatcaaactccaatagcatgattgatgctttcagtagaatttcctctggaactggagacattttccagcaacatattcagcttgaaagtacaggtgaaaatgtcaaacctcaccatcaattgaaaaacacagtgactgtggataatactgtgggcaacgacactatgtttctagttacgtggcaggccagtggtcctcctgagattatattatttgatcctgatggacgaaaatactacacaaataattttatcaccaatctaacttttcggacagctagtctttggattccaggaacagctaagcctgggcactggacttacaccctgaacaatacccatcattctctgcaagccctgaaagtgacagtgacctctcgcgcctccaactcagctgtgcccccagccactgtggaagcctttgtggaaagagacagcctccattttcctcatcctgtgatgatttatgccaatgtgaaacagggattttatcccattcttaatgccactgtcactgccacagttgagccagagactggagatcctgttacgctgagactccttgatgatggagcaggtgctgatgttataaaaaatgatggaatttactcgaggtattttttctcctttgctgcaaatggtagatatagcttgaaagtgcatgtcaatcactctcccagcataagcaccccagcccactctattccagggagtcatgctatgtatgtaccaggttacacagcaaacggtaatattcagatgaatgctccaaggaaatcagtaggcagaaatgaggaggagcgaaagtggggctttagccgagtcagctcaggaggctccttttcagtgctgggagttccagctggcccccaccctgatgtgtttccaccatgcaaaattattgacctggaagctgtaaaagtagaagaggaattgaccctatcttggacagcacctggagaagactttgatcagggccaggctacaagctatgaaataagaatgagtaaaagtctacagaatatccaagatgactttaacaatgctattttagtaaatacatcaaagcgaaatcctcagcaagctggcatcagggagatatttacgttctcaccccaaatttccacgaatggacctgaacatcagccaaatggagaaacacatgaaagccacagaatttatgttgcaatacgagcaatggataggaactccttacagtctgctgtatctaacattgcccaggcgcctctgtttattccccccaattctgatcctgtacctgccagagattatcttatattgaaaggagttttaacagcaatgggtttgataggaatcatttgccttattatagttgtgacacatcatactttaagcaggaaaaagagagcagacaagaaagagaatggaacaaaattattataaataaatatccaaagtgtcttccttcttagatataagacccatggccttcgactacaaaaacatactaacaaagtcaaattaacatcaaaactgtattaaaatgcattgagtttttgtacaatacagataagatttttacatggtagatcaacaaattctttttgggggtagattagaaaacccttacactttggctatgaacaaataataaaaattattctttaaagtaatgtctttaaaggcaaagggaagggtaaagtcggaccagtgtcaaggaaagtttgttttattgaggtggaaaaatagccccaagcagagaaaaggagggtaggtctgcattataactgtctgtgtgaagcaatcatttagttactttgattaatttttcttttctccttatctgtgcagaacaggttgcttgtttacaactgaagatcatgctatattttatatatgaagcccctaatgcaaagctctttacctcttgctattttgttatatatattacagatgaaatctcactgctaatgctcagagatcttttttcactgtaagaggtaacctttaacaatatgggtattacctttgtctcttcataccggttttatgacaaaggtctattgaatttatttgtttgtaagtttctactcccatcaaagcagctttctaagttattgccttggttattatggatgatagttatagcccttataatgccttaactaaggaagaaaagatgttattctgagtttgttttaatacatatatgaacatatagttttattcaattaaaccaaagaagaggtcagcagggagatactaacctttggaaatgattagctggctctgttttttggttaaataagagtctttaatcctttctccatcaagagttacttaccaagggcaggggaagggggatatagaggtcacaaggaaataaaaatcatctttcatctttaattttactccttcctcttatttttttaaaagattatcgaacaataaaatcatttgcctttttaattaaaaaaaaaaaaaaaaaaaaaaaaaaaaaaaaaaaaaaaaa

SEQ ID NO: 22 - protein, 943 aa, Homo sapiens
MTQRSIAGPICNLKFVTLLVALSSELPFLGAGVQLQDNGYNGLLIAINPQVPENQNLISNIKEMITEASFYLFNATKRRVFFRNIKILIPATWKANNNSKIKQESYEKANVIVTDWYGAHGDDPYTLQYRGCGKEGKYIHFTPNFLLNDNLTAGYGSRGRVFVHEWAHLRWGVFDEYNNDKPFYINGQNQIKVTRCSSDITGIFVCEKGPCPQENCIISKLFKEGCTFIYNSTQNATASIMFMQSLSSVVEFCNASTHNQEAPNLQNQMCSLRSAWDVITDSADFHHSFPMNGTELPPPPTFSLVQAGDKVVCLVLDVSSKMAEADRLLQLQQAAEFYLMQIVEIHTFVGIASFDSKGEIRAQLHQINSNDDRKLLVSYLPTTVSAKTDISICSGLKKGFEVVEKLNGKAYGSVMILVTSGDDKLLGNCLPTVLSSGSTIHSIALGSSAAPNLEELSRLTGGLKFFVPDISNSNSMIDAFSRISSGTGDIFQQHIQLESTGENVKPHHQLKNTVTVDNTVGNDTMFLVTWQASGPPEIILFDPDGRKYYTNNFITNLTFRTASLWIPGTAKPGHWTYTLNNTHHSLQALKVTVTSRASNSAVPPATVEAFVERDSLHFPHPVMIYANVKQGFYPILNATVTATVEPETGDPVTLRLLDDGAGADVIKNDGIYSRYFFSFAANGRYSLKVHVNHSPSISTPAHSIPGSHAMYVPGYTANGNIQMNAPRKSVGRNEEERKWGFSRVSSGGSFSVLGVPAGPHPDVFPPCKIIDLEAVKVEEELTLSWTAPGEDFDQGQATSYEIRMSKSLQNIQDDFNNAILVNTSKRNPQQAGIREIFTFSPQISTNGPEHQPNGETHESHRIYVAIRAMDRNSLQSAVSNIAQAPLFIPPNSDPVPARDYLILKGVLTAMGLIGIICLIIVVTHHTLSRKKRADKKENGTKLL

SEQ ID NO: 23 - DNA, 3311 bp, Homo sapiens
tgctaatgcttttggtacaaatggatgtggaatataattgaatattttcttgtttaaggggagcatgaagaggtgttgaggttatgtcaagcatctggcacagctgaaggcagatggaaatatttacaagtacgcaatttgagactaagatattgttatcattctcctattgaagacaagagcaatagtaaaacacatcaggtcagggggttaaagacctgtgataaaccacttccgataagttggaaacgtgtgtctatattttcatatctgtatatatataatggtaaagaaagacaccttcgtaacccgcattttccaaagagaggaatcacagggagatgtacagcaatggggccatttaagagttctgtgttcatcttgattcttcaccttctagaaggggccctgagtaattcactcattcagctgaacaacaatggctatgaaggcattgtcgttgcaatcgaccccaatgtgccagaagatgaaacactcattcaacaaataaaggacatggtgacccaggcatctctgtatctgtttgaagctacaggaaagcgattttatttcaaaaatgttgccattttgattcctgaaacatggaagacaaaggctgactatgtgagaccaaaacttgagacctacaaaaatgctgatgttctggttgctgagtctactcctccaggtaatgatgaaccctacactgagcagatgggcaactgtggagagaagggtgaaaggatccacctcactcctgatttcattgcaggaaaaaagttagctgaatatggaccacaaggtaaggcatttgtccatgagtgggctcatctacgatggggagtatttgacgagtacaataatgatgagaaattctacttatccaatggaagaatacaagcagtaagatgttcagcaggtattactggtacaaatgtagtaaagaagtgtcagggaggcagctgttacaccaaaagatgcacattcaataaagttacaggactctatgaaaaaggatgtgagtttgttctccaatcccgccagacggagaaggcttctataatgtttgcacaacatgttgattctatagttgaattctgtacagaacaaaaccacaacaaagaagctccaaacaagcaaaatcaaaaatgcaatctccgaagcacatgggaagtgatccgtgattctgaggactttaagaaaaccactcctatgacaacacagccaccaaatcccaccttctcattgctgcagattggacaaagaattgtgtgtttagtccttgacaaatctggaagcatggcgactggtaaccgcctcaatcgactgaatcaagcaggccagcttttcctgctgcagacagttgagctggggtcctgggttgggatggtgacatttgacagtgctgcccatgtacaaagtgaactcatacagataaacagtggcagtgacagggacacactcgccaaaagattacctgcagcagcttcaggagggacgtccatctgcagcgggcttcgatcggcatttactgtgattaggaagaaatatccaactgatggatctgaaattgtgctgctgacggatggggaagacaacactataagtgggtgctttaacgaggtcaaacaaagtggtgccatcatccacacagtcgctttggggccctctgcagctcaagaactagaggagctgtccaaaatgacaggaggtttacagacatatgcttcagatcaagttcagaacaatggcctcattgatgcttttggggccctttcatcaggaaatggagctgtctctcagcgctccatccagcttgagagtaagggattaaccctccagaacagccagtggatgaatggcacagtgatcgtggacagcaccgtgggaaaggacactttgtttcttatcacctggacaacgcagcctccccaaatccttctctgggatcccagtggacagaagcaaggtggctttgtagtggacaaaaacaccaaaatggcctacctccaaatcccaggcattgctaaggttggcacttggaaatacagtctgcaagcaagctcacaaaccttgaccctgactgtcacgtcccgtgcgtccaatgctaccctgcctccaattacagtgacttccaaaacgaacaaggacaccagcaaattccccagccctctggtagtttatgcaaatattcgccaaggagcctccccaattctcagggccagtgtcacagccctgattgaatcagtgaatggaaaaacagttaccttggaactactggataatggagcaggtgctgatgctactaaggatgacggtgtctactcaaggtatttcacaacttatgacacgaatggtagatacagtgtaaaagtgcgggctctgggaggagttaacgcagccagacggagagtgataccccagcagagtggagcactgtacatacctggctggattgagaatgatgaaatacaatggaatccaccaagacctgaaattaataaggatgatgttcaacacaagcaagtgtgtttcagcagaacatcctcgggaggctcatttgtggcttctgatgtcccaaatgctcccatacctgatctcttcccacctggccaaatcaccgacctgaaggcggaaattcacgggggcagtctcattaatctgacttggacagctcctggggatgattatgaccatggaacagctcacaagtatatcattcgaataagtacaagtattcttgatctcagagacaagttcaatgaatctcttcaagtgaatactactgctctcatcccaaaggaagccaactctgaggaagtctttttgtttaaaccagaaaacattacttttgaaaatggcacagatcttttcattgctattcaggctgttgataaggtcgatctgaaatcagaaatatccaacattgcacgagtatctttgtttattcctccacagactccgccagagacacctagtcctgatgaaacgtctgctccttgtcctaatattcatatcaacagcaccattcctggcattcacattttaaaaattatgtggaagtggataggagaactgcagctgtcaatagcctagggctgaatttttgtcagataaataaaataaatcattcatcctttttttgattataaaattttctaaaatgtattttagacttcctgtagggggcgatatactaaatgtatatagtacatttatactaaatgtattcctgtagggggcgatatactaaatgtattttagacttcctgtagggggcgataaaataaaatgctaaacaactgggtaaa

SEQ ID NO: 24 - protein, 914 aa, Homo sapiens
MGPFKSSVFILILHLLEGALSNSLIQLNNNGYEGIVVAIDPNVPEDETLIQQIKDMVTQASLYLFEATGKRFYFKNVAILIPETWKTKADYVRPKLETYKNADVLVAESTPPGNDEPYTEQMGNCGEKGERIHLTPDFIAGKKLAEYGPQGKAFVHEWAHLRWGVFDEYNNDEKFYLSNGRIQAVRCSAGITGTNVVKKCQGGSCYTKRCTFNKVTGLYEKGCEFVLQSRQTEKASIMFAQHVDSIVEFCTEQNHNKEAPNKQNQKCNLRSTWEVIRDSEDFKKTTPMTTQPPNPTFSLLQIGQRIVCLVLDKSGSMATGNRLNRLNQAGQLFLLQTVELGSWVGMVTFDSAAHVQSELIQINSGSDRDTLAKRLPAAASGGTSICSGLRSAFTVIRKKYPTDGSEIVLLTDGEDNTISGCFNEVKQSGAIIHTVALGPSAAQELEELSKMTGGLQTYASDQVQNNGLIDAFGALSSGNGAVSQRSIQLESKGLTLQNSQWMNGTVIVDSTVGKDTLFLITWTTQPPQILLWDPSGQKQGGFVVDKNTKMAYLQIPGIAKVGTWKYSLQASSQTLTLTVTSRASNATLPPITVTSKTNKDTSKFPSPLVVYANIRQGASPILRASVTALIESVNGKTVTLELLDNGAGADATKDDGVYSRYFTTYDTNGRYSVKVRALGGVNAARRRVIPQQSGALYIPGWIENDEIQWNPPRPEINKDDVQHKQVCFSRTSSGGSFVASDVPNAPIPDLFPPGQITDLKAEIHGGSLINLTWTAPGDDYDHGTAHKYIIRISTSILDLRDKFNESLQVNTTALIPKEANSEEVFLFKPENITFENGTDLFIAIQAVDKVDLKSEISNIARVSLFIPPQTPPETPSPDETSAPCPNIHINSTIPGIHILKIMWKWIGELQLSIA

SEQ ID NO: 25 - DNA, 2038 bp, Homo sapiens
cgcccccttgttcccgcaagcccggaactgcccaaatcccgcccctcccctcccaaaaaaacacccctcatccagtctcttccagcctagagatcctggcctacccctccgccaaagcgcgcactgagtgcaaaccccagagtcaatccctgtcccggctccgccccccgcgtccgaatcccgcccagccgggccctcaagcccagtcgggactcgagcctagggaggcgaggttcccgcaccggatagcatgtttttggcccagaggagcctctgctctcttagcggtagagcaaaattcctgaagacaatttcttcttccaaaatcctcggattctctacttctgctaaaatgtcactgaaattcacaaatgcaaaacggattgaaggacttgatagtaatgtgtggattgaatttaccaaattggctgcagacccttctgttgtgaatcttggccaaggctttccagatatatcccctcctacatatgtaaaagaagaattatcaaagattgcagcaatcgatagcctgaatcagtatacacgaggctttggccatccatcacttgtgaaagctctgtcctatctgtatgaaaagctttatcaaaagcaaattgattcaaataaagaaatccttgtgacagtaggagcatatggatctctttttaacaccattcaagcattaattgatgagggagatgaagtcatactaatagtgcctttctatgactgctatgagcccatggtgagaatggctggagcaacacctgtttttattcccctgagatctaaacctgtttatggaaaaagatggtctagttctgactggacattagatcctcaagaactggaaagtaaatttaattccaaaaccaaagctattatactaaatactccacataacccacttggcaaggtgtataacagagaggaactgcaagtaattgctgacctttgcatcaaatatgacacactctgcatcagcgatgaggtttatgaatggcttgtatattctggaaataagcacttaaaaatagctacttttccaggtatgtgggagagaacaataacaataggaagtgctggaaagactttcagtgtaactggctggaagcttggctggtccattggtccaaatcatttgataaaacatttacagacagttcaacaaaacacgatttatacttgtgcaactcctttacaggaagccttggctcaagctttctggattgacatcaagcgcatggatgacccagaatgttactttaattctttgccaaaagagttagaagtaaaaagagatcggatggtacgtttacttgaaagtgttggcctaaaacccatagttcctgatggaggatacttcatcatcgctgatgtgtctttgctagatccagacctctctgatatgaagaataatgagccttatgactataagtttgtgaaatggatgactaaacataagaaactatcagccatccccgtttcagcattctgtaactcagagactaaatcacagtttgagaagtttgtgcgtttttgcttcattaaaaaagacagcacactggatgctgctgaagaaatcatcaaggcatggagtgtacagaagtcttgatttgtgcagaatggattaatgtttctgttagatgacctagtatggaattgttacttagtgctgccacctgctggatgttaaaaggtatttcagtacaactggaatttaaatatttccattgtttttccaaagcagttaacccaactcctaacaacattttcgggggatctgaccttttttttccagttgaaatgtattaacacaccttccacaatcattttataagagtcagcataacatagtggataagaaatgtgagatgtttaacctctcagtaactcggttctctcattataaaataggaataaaatcagtacctgtttcatatgaaggtcgtttctgagaattaaatggactaatgtatgcaaaaagcctggcaaacaataaacactcatctgactttagccggtaaaaaaaaaaaaa

SEQ ID NO: 26 - protein, 454 aa, Homo sapiens
MFLAQRSLCSLSGRAKFLKTISSSKILGFSTSAKMSLKFTNAKRIEGLDSNVWIEFTKLAADPSVVNLGQGFPDISPPTYVKEELSKIAAIDSLNQYTRGFGHPSLVKALSYLYEKLYQKQIDSNKEILVTVGAYGSLFNTIQALIDEGDEVILIVPFYDCYEPMVRMAGATPVFIPLRSKPVYGKRWSSSDWTLDPQELESKFNSKTKAIILNTPHNPLGKVYNREELQVIADLCIKYDTLCISDEVYEWLVYSGNKHLKIATFPGMWERTITIGSAGKTFSVTGWKLGWSIGPNHLIKHLQTVQQNTIYTCATPLQEALAQAFWIDIKRMDDPECYFNSLPKELEVKRDRMVRLLESVGLKPIVPDGGYFIIADVSLLDPDLSDMKNNEPYDYKFVKWMTKHKKLSAIPVSAFCNSETKSQFEKFVRFCFIKKDSTLDAAEEIIKAWSVQKS

SEQ ID NO: 27 - DNA, 1938 bp, Homo sapiens
cgcccccttgttcccgcaagcccggaactgcccaaatcccgcccctcccctcccaaaaaaacacccctcatccagtctcttccagcctagagatcctggcctacccctccgccaaagcgcgcactgagtgcaaaccccagagtcaatccctgtcccggctccgccccccgcgtccgaatcccgcccagccgggccctcaagcccagtcgggactcgagcctagggaggcgaggttcccgcaccggatagaaaatgtcactgaaattcacaaatgcaaaacggattgaaggacttgatagtaatgtgtggattgaatttaccaaattggctgcagacccttctgttgtgaatcttggccaaggctttccagatatatcccctcctacatatgtaaaagaagaattatcaaagattgcagcaatcgatagcctgaatcagtatacacgaggctttggccatccatcacttgtgaaagctctgtcctatctgtatgaaaagctttatcaaaagcaaattgattcaaataaagaaatccttgtgacagtaggagcatatggatctctttttaacaccattcaagcattaattgatgagggagatgaagtcatactaatagtgcctttctatgactgctatgagcccatggtgagaatggctggagcaacacctgtttttattcccctgagatctaaacctgtttatggaaaaagatggtctagttctgactggacattagatcctcaagaactggaaagtaaatttaattccaaaaccaaagctattatactaaatactccacataacccacttggcaaggtgtataacagagaggaactgcaagtaattgctgacctttgcatcaaatatgacacactctgcatcagcgatgaggtttatgaatggcttgtatattctggaaataagcacttaaaaatagctacttttccaggtatgtgggagagaacaataacaataggaagtgctggaaagactttcagtgtaactggctggaagcttggctggtccattggtccaaatcatttgataaaacatttacagacagttcaacaaaacacgatttatacttgtgcaactcctttacaggaagccttggctcaagctttctggattgacatcaagcgcatggatgacccagaatgttactttaattctttgccaaaagagttagaagtaaaaagagatcggatggtacgtttacttgaaagtgttggcctaaaacccatagttcctgatggaggatacttcatcatcgctgatgtgtctttgctagatccagacctctctgatatgaagaataatgagccttatgactataagtttgtgaaatggatgactaaacataagaaactatcagccatccccgtttcagcattctgtaactcagagactaaatcacagtttgagaagtttgtgcgtttttgcttcattaaaaaagacagcacactggatgctgctgaagaaatcatcaaggcatggagtgtacagaagtcttgatttgtgcagaatggattaatgtttctgttagatgacctagtatggaattgttacttagtgctgccacctgctggatgttaaaaggtatttcagtacaactggaatttaaatatttccattgtttttccaaagcagttaacccaactcctaacaacattttcgggggatctgaccttttttttccagttgaaatgtattaacacaccttccacaatcattttataagagtcagcataacatagtggataagaaatgtgagatgtttaacctctcagtaactcggttctctcattataaaataggaataaaatcagtacctgtttcatatgaaggtcgtttctgagaattaaatggactaatgtatgcaaaaagcctggcaaacaataaacactcatctgactttagccggtaaaaaaaaaaaaa

SEQ ID NO: 28 - protein, 420 aa, Homo sapiens
MSLKFTNAKRIEGLDSNVWIEFTKLAADPSVVNLGQGFPDISPPTYVKEELSKIAAIDSLNQYTRGFGHPSLVKALSYLYEKLYQKQIDSNKEILVTVGAYGSLFNTIQALIDEGDEVILIVPFYDCYEPMVRMAGATPVFIPLRSKPVYGKRWSSSDWTLDPQELESKFNSKTKAIILNTPHNPLGKVYNREELQVIADLCIKYDTLCISDEVYEWLVYSGNKHLKIATFPGMWERTITIGSAGKTFSVTGWKLGWSIGPNHLIKHLQTVQQNTIYTCATPLQEALAQAFWIDIKRMDDPECYFNSLPKELEVKRDRMVRLLESVGLKPIVPDGGYFIIADVSLLDPDLSDMKNNEPYDYKFVKWMTKHKKLSAIPVSAFCNSETKSQFEKFVRFCFIKKDSTLDAAEEIIKAWSVQKS

SEQ ID NO: 29 - DNA, 2952 bp, Homo sapiens
cagtttcattaggctctgaagccattacaaaggttgcttaacttctaattatttgatcactgaggaaaatccagaaagctacacaacactgaaggggtgaaataaaagtccagcgatccagcgaaagaaaagagaagtgacagaaacaactttacctggactgaagataaaagcacagacaagagaacaatgccctggacatggctccagagatccacatgacaggcccaatgtgcctcattgagaacactaatggggaactggtggcgaatccagaagctctgaaaatcctgtctgccattacacagcctgtggtggtggtggcaattgtgggcctctaccgcacaggaaaatcctacctgatgaacaagctagctgggaagaataagggcttctctctgggctccacagtgaaatctcacaccaaaggaatctggatgtggtgtgtgcctcaccccaaaaagccagaacacaccttagtcctgcttgacactgagggcctgggagatgtaaagaagggtgacaaccagaatgactcctggatcttcaccctggccgtcctcctgagcagcactctcgtgtacaatagcatgggaaccatcaaccagcaggctatggaccaactgtactatgtgacagagctgacacatcgaatccgatcaaaatcctcacctgatgagaatgagaatgaggattcagctgactttgtgagcttcttcccagattttgtgtggacactgagagatttctccctggacttggaagcagatggacaacccctcacaccagatgagtacctggagtattccctgaagctaacgcaaggtaacaggaagcttgcccagcttgagaaactacaagatgaagagctggaccctgaatttgtgcaacaagtagcagacttctgttcctacatctttagcaattccaaaactaaaactctttcaggaggcatcaaggtcaatgggccttgtctagagagcctagtgctgacctatatcaatgctatcagcagaggggatctgccctgcatggagaacgcagtcctggccttggcccagatagagaactcagccgcagtgcaaaaggctattgcccactatgaccagcagatgggccagaaggtgcagctgcccgcagaaaccctccaggagctgctggacctgcacagggttagtgagagggaggccactgaagtctatatgaagaactctttcaaggatgtggaccatctgtttcaaaagaaattagcggcccagctagacaaaaagcgggatgacttttgtaaacagaatcaagaagcatcatcagatcgttgctcagctttacttcaggtcattttcagtcctctagaagaagaagtgaaggcgggaatttattcgaaaccagggggctattgtctctttattcagaagctacaagacctggagaaaaagtactatgaggaaccaaggaaggggatacaggctgaagagattctgcagacatacttgaaatccaaggagtctgtgaccgatgcaattctacagacagaccagattctcacagaaaaggaaaaggagattgaagtggaatgtgtaaaagctgaatctgcacaggcttcagcaaaaatggtggaggaaatgcaaataaagtatcagcagatgatggaagagaaagagaagagttatcaagaacatgtgaaacaattgactgagaagatggagagggagagggcccagttgctggaagagcaagagaagaccctcactagtaaacttcaggaacaggcccgagtactaaaggagagatgccaaggtgaaagtacccaacttcaaaatgagatacaaaagctacagaagaccctgaaaaaaaaaaccaagagatatatgtcgcataagctaaagatctaaacaacagagcttttctgtcatcctaacccaaggcataactgaaacaattttagaatttggaacaagtgtcactatatttgataataattagatcttgcatcataacactaaaagtttacaagaacatgcagttcaatgatcaaaatcatgttttttccttaaaaagattgtaaattgtgcaacaaagatgcatttacctctgtaccaacagaggagggatcatgagttgccaccactcagaagtttattcttccagacgaccagtggatactgaggaaagtcttaggtaaaaatcttgggacatatttgggcactggtttggccaagtgtacaataggtcccaatatcagaaacaaccatcctagcttcctagggaagacagtgtacagttctccattatatcaaggctacaaggtctatgagcaataatgtgatttctggacattgcccatggataattctcactgatggatctcaagctaaagcaaaccatcttatacagagatctagaatcttatattttccataggaaggtaaagaaatcattagcaagagtaggaattgaatcataaacaaattggctaatgaagaaatcttttctttcttgttcaattcatctagattataaccttaatgtgacacctgagacctttagacagttgaccctgaattaaatagtcacatggtaacaattatgcactgtgtaattttagtaatgtataacatgcaatgatgcactttaactgaagatagagactatgttagaaaattgaactaatttaattatttgattgttttaatcctaaagcataagttagtcttttcctgattcttaaaggtcatacttgaaatcctgccaattttccccaaagggaatatggaattttttttgactttcttttgagcaataaaataattgtcttgccattacttagtatatgtagacttcatcccaattgtcaaacatcctaggtaagtggttgacatttcttacagcaattacagattatttttgaactagaaataaactaaactagaaacaaaaaaaaaaaaaaaaaaa

SEQ ID NO: 30 - protein, 563 aa, Homo sapiens
MAPEIHMTGPMCLIENTNGELVANPEALKILSAITQPVVVVAIVGLYRTGKSYLMNKLAGKNKGFSLGSTVKSHTKGIWMWCVPHPKKPEHTLVLLDTEGLGDVKKGDNQNDSWIFTLAVLLSSTLVYNSMGTINQQAMDQLYYVTELTHRIRSKSSPDENENEDSADFVSFFPDFVWTLRDFSLDLEADGQPLTPDEYLEYSLKLTQGNRKLAQLEKLQDEELDPEFVQQVADFCSYIFSNSKTKTLSGGIKVNGPCLESLVLTYINAISRGDLPCMENAVLALAQIENSAAVQKAIAHYDQQMGQKVQLPAETLQELLDLHRVSEREATEVYMKNSFKDVDHLFQKKLAAQLDKKRDDFCKQNQEASSDRCSALLQVIFSPLEEEVKAGIYSKPGGYCLFIQKLQDLEKKYYEEPRKGIQAEEILQTYLKSKESVTDAILQTDQILTEKEKEIEVECVKAESAQASAKMVEEMQIKYQQMMEEKEKSYQEHVKQLTEKMERERAQLLEEQEKTLTSKLQEQARVLKERCQGESTQLQNEIQKLQKTLKKKTKRYMSHKLKI

SEQ ID NO: 31 - DNA, 2881 bp, Homo sapiens
acagaagtgctagaagccagtgctcgtgaactaaggagaaaaagaacagacaagggaacagcctggacatggcatcagagatccacatgacaggcccaatgtgcctcattgagaacactaatgggcgactgatggcgaatccagaagctctgaagatcctttctgccattacacagcctatggtggtggtggcaattgtgggcctctaccgcacaggcaaatcctacctgatgaacaagctggctggaaagaaaaagggcttctctctgggctccacggtgcagtctcacactaaaggaatctggatgtggtgtgtgccccaccccaagaagccaggccacatcctagttctgctggacaccgagggtctgggagatgtagagaagggtgacaaccagaatgactcctggatcttcgccctggccgtcctcctgagcagcaccttcgtgtacaatagcataggaaccatcaaccagcaggctatggaccaactgtactatgtgacagagctgacacatagaatccgatcaaaatcctcacctgatgagaatgagaatgaggttgaggattcagctgactttgtgagcttcttcccagactttgtgtggacactgagagatttctccctggacttggaagcagatggacaacccctcacaccagatgagtacctgacatactccctgaagctgaagaaaggtaccagtcaaaaagatgaaacttttaacctgcccagactctgtatccggaaattcttcccaaagaaaaaatgctttgtctttgatcggcccgttcaccgcaggaagcttgcccagctcgagaaactacaagatgaagagctggaccccgaatttgtgcaacaagtagcagacttctgttcctacatctttagtaattccaaaactaaaactctttcaggaggcatccaggtcaacgggcctcgtctagagagcctggtgctgacctacgtcaatgccatcagcagtggggatctgccgtgcatggagaacgcagtcctggccttggcccagatagagaactcagctgcagtgcaaaaggctattgcccactatgaacagcagatgggccagaaggtgcagctgcccacagaaagcctccaggagctgctggacctgcacagggacagtgagagagaggccattgaagtcttcatcaggagttccttcaaagatgtggaccatctatttcaaaaggagttagcggcccagctagaaaaaaagcgggatgacttttgtaaacagaatcaggaagcatcatcagatcgttgctcaggtttacttcaggtcattttcagtcctctagaagaagaagtgaaggcgggaatttattcgaaaccagggggctatcgtctctttgttcagaagctacaagacctgaagaaaaagtactatgaggaaccgaggaaggggatacaggctgaagagattctgcagacatacttgaaatccaaggagtctatgactgatgcaattctccagacagaccagactctcacagaaaaagaaaaggagattgaagtggaacgtgtgaaagctgagtctgcacaggcttcagcaaaaatgttgcaggaaatgcaaagaaagaatgagcagatgatggaacagaaggagaggagttatcaggaacacttgaaacaactgactgagaagatggagaacgacagggtccagttgctgaaagagcaagagaggaccctcgctcttaaacttcaggaacaggagcaactactaaaagagggatttcaaaaagaaagcagaataatgaaaaatgagatacaggatctccagacgaaaatgagacgacgaaaggcatgtaccataagctaaagaccagagccttcctgtcacccctaaccaaggcataattgaaacaattttagaatttggaacaagcgtcactacatttgataataattagatcttgcatcataacaccaaaagtttataaaggcatgtggtacaatgatcaaaatcatgttttttcttaaaaaaaaaaaaaagactgtaaattgtgcaacaaagatgcatttacctctgtatcaactcaggaaatctcataagctggtaccactcaggagaagtttattcttccagatgaccagcagtagacaaatggatactgagcagagtcttaggtaaaagtcttgggaaatatttgggcattggtctggccaagtctacaatgtcccaatatcaaggacaaccaccctagcttcttagtgaagacaatgtacagttatccattagatcaagactacacggtctatgagcaataatgtgatttctggacattgcccatgtataatcctcactgatgatttcaagctaaagcaaaccaccttatacagagatctagaatctctttatgttctccagaggaaggtggaagaaaccatgggcaggagtaggaattgagtgataaacaattgggctaatgaagaaaacttctcttattgttcagttcatccagattataacttcaatgggacactttagaccattagacaattgacactggattaaacaaattcacataatgccaaatacacaatgtatttatagcaacgtataatttgcaaagatggactttaaaagatgctgtgtaactaaactgaaataattcaattacttattatttagaatgttaaagcttatgatagtcttttctaattcttaacactcatacttgaaatctttccgagtttccccagaagagaatatgggattttttttgacatttttgacccatttaataatgctcttgtgtttacctagtatatgtagactttgtcttatgtgtcaaaagtcctaggaaagtggttgatgtttcttatagcaattaaaaattatttttgaactga

SEQ ID NO: 32 - protein, 592 aa, Homo sapiens
MASEIHMTGPMCLIENTNGRLMANPEALKILSAITQPMVVVAIVGLYRTGKSYLMNKLAGKKKGFSLGSTVQSHTKGIWMWCVPHPKKPGHILVLLDTEGLGDVEKGDNQNDSWIFALAVLLSSTFVYNSIGTINQQAMDQLYYVTELTHRIRSKSSPDENENEVEDSADFVSFFPDFVWTLRDFSLDLEADGQPLTPDEYLTYSLKLKKGTSQKDETFNLPRLCIRKFFPKKKCFVFDRPVHRRKLAQLEKLQDEELDPEFVQQVADFCSYIFSNSKTKTLSGGIQVNGPRLESLVLTYVNAISSGDLPCMENAVLALAQIENSAAVQKAIAHYEQQMGQKVQLPTESLQELLDLHRDSEREAIEVFIRSSFKDVDHLFQKELAAQLEKKRDDFCKQNQEASSDRCSGLLQVIFSPLEEEVKAGIYSKPGGYRLFVQKLQDLKKKYYEEPRKGIQAEEILQTYLKSKESMTDAILQTDQTLTEKEKEIEVERVKAESAQASAKMLQEMQRKNEQMMEQKERSYQEHLKQLTEKMENDRVQLLKEQERTLALKLQEQEQLLKEGFQKESRIMKNEIQDLQTKMRRRKACTIS

SEQ ID NO: 33 - DNA, 1629 bp, Homo sapiens
tcaacaaagtgagttatcatttgaaccaagtgccagaaccttgtggcattatgaactgtcataaaatgtggttaaaagtcttagtagtctgcgcagtgcattctggggaccgaggtcgagccagccactgctgccgtcgcctgagggaagcgagaagaggccgcgaccgggaagaaaacgctgagtcgccactggagagaagtggactccatagcagcagaccccgccagagaggcccgcccacccgttcgcccctccccctgccccgttcacaatgcagcctgcttctgcaaagtggtacgatcaaaggcactatgtcttcattgaattttgtgttgaagacagtaaggatgttaatgtaaattttgaaaaatccaaacttacattcagttgtctcggaggaagtgataattttaagcatttaaatgaaattgatctttttcactgtattgatacaaacgattccaagcataaaagaacggacagatcaattttatgttgtttacgaaaaggagaatctggacagtcatggccaaggttaacaaaagaaagggcaaagcttaattggcttagtgttgacttcaataattggaaagactgggaagatgattcagatgaagacatgtctaattttgatcgtttctctgagatgatgaataacatgggtggtgatgaggatgtagatttaccagaagtagatggagcagatgatgattcacaagacagtgatgatgaaaaaatgccagatctgcagtaaggaatattgtcatcacctgggttttgagaaagaaaaataacttctctgcaagatttcatgattgagagaattcctgagttgatctaaaagcagatgctgtagctgcctactttaacccatttttcaacctgtttgttttttaaagggcttcactaagggttgatatgtaccattgtagggggcaattttaagtcagctaaggcaataaccttatgcatgaacatttcccagactttcatgaagctgttgaggtcctaggcaattaatgcggcagttgtgataaataaaaacatctcacctaagtctccttttcttcataatatagatactgacatgatgataggaagctctcagcttagggaaagagagctaaattttagattatagaacatggattcaaaagtggctgaacaaattggctgacaccttactggtaacctgctattcctctggtgttatccttcaggattgttccactaaaatttatttttcaaaaaatttacttcacattattctatgtaagtgatcacttgtcagtgttccaggtgtatattagctaaaattagagaatgccctaacttagatggtttttgaagcctgtacatttggtattgtttgacccttaagcttttacatctcttagcatggaagacgaagaaagctgtacattgttgcttgagagtctgtacatttagtccagatttgtatttgcattgtcagtatggcaaatgagtgaaaaatgtttaatacactattgtatttttttttttctttttttgattcagcttataccagggctgaaaacctcaatttatgttcatgacagtggggatttttttaaatgcctacattctttctaataaactgttgga

SEQ ID NO: 34 - protein, 160 aa, Homo sapiens [sequence omitted]

SEQ ID NO: 35 - DNA, 2595 bp, Homo sapiens
tcatattagtgcatttctttgcagaggttacctctttttcttgtctctcgtcaggtctctgacattgacagagcctggacgttggaggaagccccaggacgttggaggggtaaagtaaaagtccacagttaccgtgagagaaaaaagagggagaaagcagtgcagccaaactcggaagaaaagagaggaggaaaaggactcgactttcacattggaacaaccttctttccagtgctaaaggatctctgatctggggaacaacaccctggacatggctccagagatcaacttgccgggcccaatgagcctcattgataacactaaagggcagctggtggtgaatccagaagctctgaagatcctatctgcaattacgcagcctgtggtggtggtggcgattgtgggcctctatcgcacaggcaaatcctacctgatgaacaagctggctgggaagaaaaacggcttctctctaggctccacagtgaagtctcacaccaagggaatctggatgtggtgtgtgcctcatcccaagaagccagaacacaccctagttctgctcgacactgagggcctgggagatatagagaagggtgacaatgagaatgactcctggatctttgccttggccatcctcctgagcagcaccttcgtgtacaatagcatgggaaccatcaaccagcaggccatggaccaacttcactatgtgacagagctgacagatcgaatcaaggcaaactcctcacctggtaacaattctgtagacgactcagctgactttgtgagcttttttccagcatttgtgtggactctcagagatttcaccctggaactggaagtagatggagaacccatcactgctgatgactacttggagctttcgctaaagctaagaaaaggtactgataagaaaagtaaaagctttaatgatcctcggttgtgcatccgaaagttcttccccaagaggaagtgcttcgtcttcgattggcccgctcctaagaagtaccttgctcacctagagcagctaaaggaggaagagctgaaccctgatttcatagaacaagttgcagaattttgttcctacatcctcagccattccaatgtcaagactctttcaggtggcattccagtcaatgggcctcgtctagagagcctggtgctgacctacgtcaatgccatcagcagtggggatctaccctgcatggagaacgcagtcctggccttggcccagatagagaactcagccgcagtggaaaaggctattgcccactatgaacagcagatgggccagaaggtgcagctgcccacggaaaccctccaggagctgctggacctgcacagggacagtgagagagaggccattgaagtcttcatgaagaactctttcaaggatgtggaccaaatgttccagaggaaattaggggcccagttggaagcaaggcgagatgacttttgtaagcagaattccaaagcatcatcagattgttgcatggctttacttcaggatatatttggccctttagaagaagatgtcaagcagggaacattttctaaaccaggaggttaccgtctctttactcagaagctgcaggagctgaagaataagtactaccaggtgccaaggaaggggatacaggccaaagaggtgctgaaaaaatatttggagtccaaggaggatgtggctgatgcacttctacagactgatcagtcactctcagaaaaggaaaaagcgattgaagtggaacgtataaaggctgaatctgcagaagctgcaaagaaaatgttggaggaaatacaaaagaagaatgaggagatgatggaacagaaagagaagagttatcaggaacatgtgaaacaattgactgagaagatggagagggacagggcccagttaatggcagagcaagagaagaccctcgctcttaaacttcaggaacaggaacgccttctcaaggagggattcgagaatgagagcaagagacttcaaaaagacatatgggatatccagatgagaagcaaatcattggagccaatatgtaacatactctaaaagtccaaggagcaaaatttgcctgtccagctccctctccccaagaaacaacatgaatgagcaacttcagagtgtcaaacaactgccattaaacttaactcaaaatcatgatgcatgcatttttgttgaaccataaagtttgcaaagtaaaggttaagtatgaggtcaatgttttacctacagagcaattcaactcatgcttatttatagtactaacttttaatatgatctttaactaaatcctatatttgaaatcatacacaaggactcaagagagatattgtgtaactaggatgcattttccaatgagatatcttgcagtttctgttctgggtagatttttttctctcatatgcaccacccttactgtatattcagtcctatactcttattcagggatttaactatggtcgtagcatagggctgaagtgttgtgaatatgatgaaaatgtgatgagaccaaacaaaccatggggcacagtagagcatcactcctgccaagtggtctttgtatggcatgctggctgcaaataaaggagatctgggac

SEQ ID NO: 36 - protein, 591 aa, Homo sapiens
MAPEINLPGPMSLIDNTKGQLVVNPEALKILSAITQPVVVVAIVGLYRTGKSYLMNKLAGKKNGFSLGSTVKSHTKGIWMWCVPHPKKPEHTLVLLDTEGLGDIEKGDNENDSWIFALAILLSSTFVYNSMGTINQQAMDQLHYVTELTDRIKANSSPGNNSVDDSADFVSFFPAFVWTLRDFTLELEVDGEPITADDYLELSLKLRKGTDKKSKSFNDPRLCIRKFFPKRKCFVFDWPAPKKYLAHLEQLKEEELNPDFIEQVAEFCSYILSHSNVKTLSGGIPVNGPRLESLVLTYVNAISSGDLPCMENAVLALAQIENSAAVEKAIAHYEQQMGQKVQLPTETLQELLDLHRDSEREAIEVFMKNSFKDVDQMFQRKLGAQLEARRDDFCKQNSKASSDCCMALLQDIFGPLEEDVKQGTFSKPGGYRLFTQKLQELKNKYYQVPRKGIQAKEVLKKYLESKEDVADALLQTDQSLSEKEKAIEVERIKAESAEAAKKMLEEIQKKNEEMMEQKEKSYQEHVKQLTEKMERDRAQLMAEQEKTLALKLQEQERLLKEGFENESKRLQKDIWDIQMRSKSLEPICNIL

SEQ ID NO: 37 - DNA, 2418 bp, Homo sapiens
aagaaaaaaagtgggagaaatcagtgcagccaaattcagaactaaagagaagagaataaagactcataactttctcattgaagctgccttcttaccaagtccagaggatctctactctggacagaggaacgccctgaacatggcatcagagatccacatgccaggcccagtgtgcctcattgagaacactaaagggcatctggtggtgaattcagaagctctggaaatcctgtctgccattacacagcctgtagtagtggtggcaattgtgggcctctaccgcacaggcaaatcctacctaatgaacaagctggctgggaagaacaaaggcttccctctgggctgcacagtgaagtctgaaaccaaaggcatctggatgtggtgtgtgccccacccctccaagccaaaccacaccctgatccttctggacacggagggcctgggtgatatggaaaagagtgaccctaagagtgactcgtggatctttgccctggctgtgcttctaagcagcagctttgtctacaacagcatgggcaccatcaaccaccaggccctggagcagctgcactacgtgactgagctaacagagctaatcagggcaaaatcgtgccccagacctgatgaagttgaggactccagcgagtttgtgagtttctttccagactttatttggactgttcgagattttaccctggagctgaagttagatggacaccccatcacagaagatgagtacctggagaatgccttgaagctgatttcaggcaagaatccccaaatccaaaattctaacaagcccagggagtggatcaggcatttctttccaaaacagaagtgctttgtctttgaccggccaataaatgacaaaaaactcttactccatgttgaagaagtacgagaagaccaactggatagtaatttccagatgcaatcagaaaatttctgttcttatatcttcacccatgcaaagaccaagaccctgagagagggaatccttgtcactggaaaccggctggggatgctggtggagacctacctggatgccatcaacagtggagcgactccttgtctggagaatgcaatggcagttctggcccagtgtgagaactcagcagccgtgcagagggcagccaaccactacagccagcagatggcccagcaagtgagattccccacagacacactccaggagctgctggacgtgcatgcagtttgtgagagggaagccattgcagtcttcatggagtactccttcaaagataaaagccaggaatttcagaagaagcttgtggacaccatggagaaaaagaaggaagactttgtgctgcagaatgaagaggcatctgccaaatattgtcaggctgagcttaagcggctttcagagctcttgacagaaagtatttcaagaggaactttctttgttccgggggggcacaatatctacttagaagcaaaaaagaagattgaacaggactatacactagtgcccagaaaaggagttaaggcagacgaggtcctccagagcttcctgcagtcacaggtggttatagaggaatccatcctgcagtcagacaaagccctcactgctggagagaaggccatagcagctaagcaggctaagaaggaggcagctgaaaaggaacaggagctgctaagacaaaaacagaaggaacagcagcaaatgatggaggctcaagagagaagtttccaggaaaacatagctcaactcaagaagaagatggagagggaaagggaaaactatatgagagaactgagaaagatgttgagtcacaagatgaaggtcctagaagaactgcttactgaaggatttaaagagatatttgagtcgttaaatgaagagattaatcgactgaaagaacaaattgaagcagctgaaaatgaagagccctcagtgttttcacagattcttgatgtggctggcagtatatttattgcagcactacctggggctgctaagctagttgatttaggaatgaaaattcttagctcattatgtaataggctgagaaatcctggtaagaaaattataagctgaggtttcttttgttaaaatggtataacgctgttgctcattttaaaagtatatgtgttattgcagtttcatttaagaagagtttaaaattaaaaagcaaatttcaaagaatattatggcctgaagttcataaaaacaaacttaattttgactaaagtaataattaatagaaatggggaacaagttagaagataaaattattcctagaaaagatttaagtaaagcaaaaggacaaatggtaatataaagaaattattttcaattaatgttatagtcacagagataatttaagttataattagctcttgcaaatcagtgagaagagagtaacgccacatattttaaacaggcaaaaatatgataat

SEQ ID NO: 38 - protein, 638 aa, Homo sapiens
MASEIHMPGPVCLIENTKGHLVVNSEALEILSAITQPVVVVAIVGLYRTGKSYLMNKLAGKNKGFPLGCTVKSETKGIWMWCVPHPSKPNHTLILLDTEGLGDMEKSDPKSDSWIFALAVLLSSSFVYNSMGTINHQALEQLHYVTELTELIRAKSCPRPDEVEDSSEFVSFFPDFIWTVRDFTLELKLDGHPITEDEYLENALKLISGKNPQIQNSNKPREWIRHFFPKQKCFVFDRPINDKKLLLHVEEVREDQLDSNFQMQSENFCSYIFTHAKTKTLREGILVTGNRLGMLVETYLDAINSGATPCLENAMAVLAQCENSAAVQRAANHYSQQMAQQVRFPTDTLQELLDVHAVCEREAIAVFMEYSFKDKSQEFQKKLVDTMEKKKEDFVLQNEEASAKYCQAELKRLSELLTESISRGTFFVPGGHNIYLEAKKKIEQDYTLVPRKGVKADEVLQSFLQSQVVIEESILQSDKALTAGEKAIAAKQAKKEAAEKEQELLRQKQKEQQQMMEAQERSFQENIAQLKKKMERERENYMRELRKMLSHKMKVLEELLTEGFKEIFESLNEEINRLKEQIEAAENEEPSVFSQILDVAGSIFIAALPGAAKLVDLGMKILSSLCNRLRNPGKKIIS

SEQ ID NO: 39 - DNA, 5460 bp, Homo sapiens
gagaacagtccgtttctcgaggatccaggcgcaggaggacagagcaatgggtgagagaactcttcacgctgcagtgcccacaccaggttatccagaatctgaatccatcatgatggcccccatttgtctagtggaaaaccaggaagagcagctgacagtgaattcaaaggcattagagattcttgacaagatttctcagcccgtggtggtggtggccattgtagggctataccgcacaggaaaatcctatctcatgaatcgtcttgcaggaaagcgcaatggcttccctctgggctccacggtgcagtctgaaactaagggcatctggatgtggtgtgtgccccacctctctaagccaaaccacaccctggtccttctggacaccgagggcctgggcgatgtagaaaagagtaaccctaagaatgactcgtggatctttgccctggctgtgcttctaagcagcagctttgtctataacagcgtgagcaccatcaaccaccaggccctggagcagctgcactatgtgactgagctagcagagctaatcagggcaaaatcctgccccagacctgatgaagctgaggactccagcgagtttgcgagtttctttccagactttatttggactgttcgggattttaccctggagctaaagttagatggaaaccccatcacagaagatgagtacctggagaatgccttgaagctgattccaggcaagaatcccaaaattcaaaattcaaacatgcctagagagtgtatcaggcatttcttccgaaaacggaagtgctttgtctttgaccggcctacaaatgacaagcaatatttaaatcatatggacgaagtgccagaagaaaatctggaaaggcatttccttatgcaatcagacaacttctgttcttatatcttcacccatgcaaagaccaagaccctgagagagggaatcattgtcactggaaagcggctggggactctggtggtgacttatgtagatgccatcaacagtggagcagtaccttgtctggagaatgcagtgacagcactggcccagcttgagaacccagcggctgtgcagagggcagccgaccactatagccagcagatggcccagcaactgaggctccccacagacacgctccaggagctgctggacgtgcatgcagcctgtgagagggaagccattgcagtcttcatggagcactccttcaaggatgaaaaccatgaattccagaagaagcttgtggacaccatagagaaaaagaagggagactttgtgctgcagaatgaagaggcatctgccaaatattgccaggctgagcttaagcggctttcagagcacctgacagaaagcattttgagaggaattttctctgttcctggaggacacaatctctacttagaagaaaagaaacaggttgagtgggactataagctagtgcccagaaaaggagttaaggcaaacgaggtcctccagaacttcctgcagtcacaggtggttgtagaggaatccatcctgcagtcagacaaagccctcactgctggagagaaggccatagcagcggagcgggccatgaaggaagcagctgagaaggaacaggagctgctaagagaaaaacagaaggagcagcagcaaatgatggaggctcaagagagaagcttccaggaatacatggcccaaatggagaagaagttggaggaggaaagggaaaaccttctcagagagcatgaaaggctgctaaaacacaagctgaaggtacaagaagaaatgcttaaggaagaatttcaaaagaaatctgagcagttaaataaagagattaatcaactgaaagaaaaaattgaaagcactaaaaatgaacagttaaggctcttaaagatccttgacatggctagcaacataatgattgtcactctacctggggcttccaagctacttggagtagggacaaaatatcttggctcacgtatttaagagcctgaatattccaggtaagaaaatataaaatgaggtttattttattttaataacttaccactgttgctcattttgtaagtatatgtgttatagcagtttcattcaagaaaagtttaaaattaaaaagtgattatcaaagaatatcagggcctgacatccacaaaaaacaaacttaattttgattgaactaataattttataaacatgggaaacaagtcagaagtagtgacattattcctagaaaagatttaaggaaagcaaaaagacaactggtaagattaagaagccattaaccatttgcaatttatattatagtcacagaaataatttcagttatgactagctcttgccgattaatgagaagagagcagctccacaatttttaatttttttaacttttattttagattcaggggtatatgtgcaggtttgttacataggtaaactgcatgtcatgggggtttggtgtgcagataattttatcacacaattattaatcataatacccaataggtttttttctgatcttctccctcctcccaacctacaccctcaagtagaccccagtgtctcttgttctcctctgagtatccatgtgttctctttgtttggcccccatttataagtgagaacatgtggtatttgggtttctgttcctgtgttagtttgcttatgataatggcttccagctccatccatattgctacagaggacatgatcttgttgttttttatggctgcatagtattccatggtgtttgtatataccacattttcattatccagcctattattaatgcacatttaggttgattccttatctttgctattgtgaacagtgctgcaatggacatacacgtgcatgtgcctttatggtacaatgatttatatttccttgggatatgcattcctttgggaataatgggactgctgagttgaatggtaattctgagttctttgaggaatcaccaacctgctttccacagtggctaaactaatttacactcccaccaacagtgtatgtgttccattttctccacaaccttgccagcatctgttatttattgactttctagtaacagccattctgactggtgtgagatggtatgcatttctgtagtgattagtgatgatgagtgatttttatatgctttttaaatgcatatatgtcttcttttgaaatgtgttcatgttctttgcccactttctttttaatggggttgcttgtttttcgcttgtaaattttttgaagcttcttatagattctggatattagatcgttgttggatgcatagttggcaaatattttctaccattctgtaggttgtctgttactttgttaattgtttcattttgttttgtttttgttttttgagacagggtctcgctttgacacccaggctggagtgcagtagcacaaacatgggtcattgtagcctcaacctcccaggctccaagcagtcctttcacctcagccccccacatagctgggactacaggtgcttacacccaagaccagttaattttttgtatttgtttgtagagatgtgtttttccatgttgcccaagctggtcttgaactactgagctcaagcaatctgcctgcttcagcctcccaaagtactgggatttaggcatgagccaccacatctggccaatagtttcttttgatgtgcagaagctctttaatttaattagatctcctttgtcagtttttgtttttgctgcaattgcttatgttatcttcatcatgaaattttagccaagtcttatgtccagaatggtatttcttaggttatttttcagagtttttatagtttaatgttttatatttaagtctttaatccttcttaagttgatttttgtatgcagagtaagctgggggcccagtttcaatcttctgcatatggctagccagtaatcccagcaccatttattaaatggggacttctttccccattgcttgtttttgtcagctttgtccaagatcagatgattgtaggtgtacagcattatttctggactctctgttatgttccatttatctgtgtgtctgtttttctactaataccatgctgttttggttactgtagctctgtagtatggtttgaggtttggtaacttgatgcctccccttttgttctttatgtttaggattgccttggctaggctcttttttggttccatatgaattttaaagtagtttctaattctgtgaagaatgtcattggtagtttgatagggatagcattgaactatttgctcaactcaacattttaggaatttatttctgctgtctagtgctcaaaacttgcagctagaattgagggaagagagagaccttcttatattgttttatattgtttgatactcagtacctgttttaagaaaaaacaacaaggaagtaaaaccaaagacaggcagcccagcgccaggcccaaaaccaggcctgggcctgcctggcctaaacccagtagttatatatcaactcattgcctgtaatcccagcactttgggaggccgagacgggtggatcacgaggtcaggagatcgagaccatcctggctaacacggtgaaaccccgtctctactaaaaatacaaaaattagccgggcatggtggcacgcgcctgtagtcccagctacacgggaggctgaggcaggagaatggcgtgagcccaggaggcggagcttgcagtgagtcgagatcgcgccactgcactccagcctgggcgacggagcgaaactccgtctcaaaaaaaaaaaaaaaaatcaactcataacttagaaaccggatgttattcatagattccagacattgtatagaagaacatttggaaactcactgccttgttctgtttctctctgaccaccagtgcatgcagcccctgtcatgtaccgcctgtttgctcaaatcaatcatgaccctttcatgtgaaatctttagtgttgtgagcccttaaaagggacagaaattgtgcattcaaggagcttggattttaaggcagcagcttgctgatgccaccagctgaaaaaagcccttccttctccgactcggtgtctgagaagttttgtctgcagctcatcctgctacagaatgaactccttgtaattctacaagatatgccatgggccttttcacaggggacacaggcttcttaaaacaacccggcttcctcaccctatgtcctttatttacaaagctgtgctcctattcatgagcatggaatgtttttccatttgtttgtgacatctcttatttctttcaggggtatcttgtaattctcattatatatatcttttgcttccttggttagctgtatttttaggtattttagtcttcttgtggcaattgtgaatgggattgcattcctgatttggctcttggcttaatgttattaacgccacattttttaaatagacaaaaatatgagattaaaaatgtttgaatttttacttaacaataaaagttgttcaaaggaaaaaaaaa

SEQ ID NO: 40 - protein, 640 aa, Homo sapiens
MGERTLHAAVPTPGYPESESIMMAPICLVENQEEQLTVNSKALEILDKISQPVVVVAIVGLYRTGKSYLMNRLAGKRNGFPLGSTVQSETKGIWMWCVPHLSKPNHTLVLLDTEGLGDVEKSNPKNDSWIFALAVLLSSSFVYNSVSTINHQALEQLHYVTELAELIRAKSCPRPDEAEDSSEFASFFPDFIWTVRDFTLELKLDGNPITEDEYLENALKLIPGKNPKIQNSNMPRECIRHFFRKRKCFVFDRPTNDKQYLNHMDEVPEENLERHFLMQSDNFCSYIFTHAKTKTLREGIIVTGKRLGTLVVTYVDAINSGAVPCLENAVTALAQLENPAAVQRAADHYSQQMAQQLRLPTDTLQELLDVHAACEREAIAVFMEHSFKDENHEFQKKLVDTIEKKKGDFVLQNEEASAKYCQAELKRLSEHLTESILRGIFSVPGGHNLYLEEKKQVEWDYKLVPRKGVKANEVLQNFLQSQVVVEESILQSDKALTAGEKAIAAERAMKEAAEKEQELLREKQKEQQQMMEAQERSFQEYMAQMEKKLEEERENLLREHERLLKHKLKVQEEMLKEEFQKKSEQLNKEINQLKEKIESTKNEQLRLLKILDMASNIMIVTLPGASKLLGVGTKYLGSRI

SEQ ID NO: 41 - DNA, 2431 bp, Homo sapiens
ctccaggctgtggaacctttgttctttcactctttgcaataaatcttgctgctgctcactctttgggtccacactgcctttatgagctgtaacactcactgggaatgtctgcagcttcactcctgaagccagcgagaccacgaacccaccaggaggaacaaacaactccagacgcgcagccttaagagctgtaacactcaccgcgaaggtctgcagcttcactcctgagccagccagaccacgaacccaccagaaggaagaaactccaaacacatccgaacatcagaaggagcaaactcctgacacgccacctttaagaaccgtgacactcaacgctagggtccgcggcttcattcttgaagtcagtgagaccaagaacccaccaattccggacacgctaattgttgtagatcatcacttcaaggtgcccatatctttctagtggaaaaattattctggcctccgctgcatacaaatcaggcaaccagaattctacatatataaggcaaagtaacatcctagacatggctttagagatccacatgtcagaccccatgtgcctcatcgagaactttaatgagcagctgaaggttaatcaggaagctttggagatcctgtctgccattacgcaacctgtagttgtggtagcgattgtgggcctctatcgcactggcaaatcctacctgatgaacaagctggctgggaagaacaagggcttctctgttgcatctacggtgcagtctcacaccaagggaatttggatatggtgtgtgcctcatcccaactggccaaatcacacattagttctgcttgacaccgagggcctgggagatgtagagaaggctgacaacaagaatgatatccagatctttgcactggcactcttactgagcagcacctttgtgtacaatactgtgaacaaaattgatcagggtgctatcgacctactgcacaatgtgacagaactgacagatctgctcaaggcaagaaactcacccgaccttgacagggttgaagatcctgctgactctgcgagcttcttcccagacttagtgtggactctgagagatttctgcttaggcctggaaatagatgggcaacttgtcacaccagatgaatacctggagaattccctaaggccaaagcaaggtagtgatcaaagagttcaaaatttcaatttgccccgtctgtgtatacagaagttctttccaaaaaagaaatgctttatctttgacttacctgctcaccaaaaaaagcttgcccaacttgaaacactgcctgatgatgagctagagcctgaatttgtgcaacaagtgacagaattctgttcctacatctttagccattctatgaccaagactcttccaggtggcatcatggtcaatggatctcgtctaaagaacctggtgctgacctatgtcaatgccatcagcagtggggatctgccttgcatagagaatgcagtcctggccttggctcagagagagaactcagctgcagtgcaaaaggccattgcccactatgaccagcaaatgggccagaaagtgcagctgcccatggaaaccctccaggagctgctggacctgcacaggaccagtgagagggaggccattgaagtcttcatgaaaaactctttcaaggatgtagaccaaagtttccagaaagaattggagactctactagatgcaaaacagaatgacatttgtaaacggaacctggaagcatcctcggattattgctcggctttacttaaggatatttttggtcctctagaagaagcagtgaagcagggaatttattctaagccaggaggccataatctcttcattcagaaaacagaagaactgaaggcaaagtactatcgggagcctcggaaaggaatacaggctgaagaagttctgcagaaatatttaaagtccaaggagtctgtgagtcatgcaatattacagactgaccaggctctcacagagacggaaaaaaagaagaaagaggcacaagtgaaagcagaagctgaaaaggctgaagcgcaaaggttggcggcgattcaaaggcagaacgagcaaatgatgcaggagagggagagactccatcaggaacaagtgagacaaatggagatagccaaacaaaattggctggcagagcaacagaaaatgcaggaacaacagatgcaggaacaggctgcacagctcagcacaacattccaagctcaaaatagaagccttctcagtgagctccagcacgcccagaggactgttaataacgatgatccatgtgttttactctaaagtgctaaatatgggagtttcctttttttactctttgtcactgatgacacaacagaaaagaaactgtagaccttgggacaatcaacatttaaataaactttataattattttttcaaactttaaaaaaaaaaaaaaaaaaaaaaaa

SEQ ID NO: 42 - protein, 586 aa, Homo sapiens
MALEIHMSDPMCLIENFNEQLKVNQEALEILSAITQPVVVVAIVGLYRTGKSYLMNKLAGKNKGFSVASTVQSHTKGIWIWCVPHPNWPNHTLVLLDTEGLGDVEKADNKNDIQIFALALLLSSTFVYNTVNKIDQGAIDLLHNVTELTDLLKARNSPDLDRVEDPADSASFFPDLVWTLRDFCLGLEIDGQLVTPDEYLENSLRPKQGSDQRVQNFNLPRLCIQKFFPKKKCFIFDLPAHQKKLAQLETLPDDELEPEFVQQVTEFCSYIFSHSMTKTLPGGIMVNGSRLKNLVLTYVNAISSGDLPCIENAVLALAQRENSAAVQKAIAHYDQQMGQKVQLPMETLQELLDLHRTSEREAIEVFMKNSFKDVDQSFQKELETLLDAKQNDICKRNLEASSDYCSALLKDIFGPLEEAVKQGIYSKPGGHNLFIQKTEELKAKYYREPRKGIQAEEVLQKYLKSKESVSHAILQTDQALTETEKKKKEAQVKAEAEKAEAQRLAAIQRQNEQMMQERERLHQEQVRQMEIAKQNWLAEQQKMQEQQMQEQAAQLSTTFQAQNRSLLSELQHAQRTVNNDDPCVLL

SEQ ID NO: 43 - DNA, 1819 bp, Homo sapiens
cttccctgtttatcctgaaaaggatttgaagacaagcttgaaggataaaaagccttggtgcttcccaggagccgagccgaggagcagaagaggaagagccgggggctgccgtagcctttggagatggacgagcagcccaggctgatgcattcccatgctggggtcgggatggccggacaccccggcctgtcccagcacttgcaggatggggccggagggaccgagggggagggcgggaggaagcaggacattggagacattttacagcaaattatgaccatcacagaccagagtttggatgaggcgcaggccagaaaacatgctttaaactgccacagaatgaagcctgccttgtttaatgtgttgtgtgaaatcaaagaaaaaacagttttgagtatccgaggagcccaggaggaggaacccacagacccccagctgatgcggctggacaacatgctgttagcggaaggcgtggcggggcctgagaagggcggagggtcggcggcagcggcggcagcggcggcggcttctggaggggcaggttcagacaactcagtggagcattcagattacagagccaaactctcacagatcagacaaatctaccatacggagctggagaaatacgagcaggcctgcaacgagttcaccacccacgtgatgaatctcctgcgagagcaaagccggaccaggcccatctccccaaaggagattgagcggatggtcagcatcatccaccgcaagttcagctccatccagatgcagctcaagcagagcacgtgcgaggcggtgatgatcctgcgttcccgatttctggatgcgcggcggaagagacggaatttcaacaagcaagcgacagaaatcctgaatgaatatttctattcccatctcagcaacccttaccccagtgaggaagccaaagaggagttagccaagaagtgtggcatcacagtctcccaggtatcaaactggtttggaaataagcgaatccggtacaagaagaacataggtaaatttcaagaggaagccaatatttatgctgccaaaacagctgtcactgctaccaatgtgtcagcccatggaagccaagctaactcgccctcaactcccaactcggctggttcttccagttcttttaacatgtcaaactctggagatttgttcatgagcgtgcagtcactcaatggggattcttaccaaggggcccaggttggagccaacgtgcaatcacaggtggatacccttcgccatgttatcagccagacaggaggatacagtgatggactcgcagccagtcagatgtacagtccgcagggcatcagtgctaatggaggttggcaggatgctactaccccttcatcagtgacctcccctacagaaggccctggcagtgttcactctgatacctccaactgatctcccagcaatcgcatcccggctgaccctctgccccagttggggcaggggcaggagggagggtttctctcccaagctgaagcggtcagactggaggtcgaagcaatcagcaaacacaataagagtctccttctcttctcttctttgggatgctatttcagccaatctggacacttctttatactctcttcccttttttttctgggtagaagccacccttccctgcctccagctgtcagcctggttttcgtcatcttccctgcccctgtgcctctgtcctagacttcccggggtccccgccctctctcatatcactgaaggatattttcaacaattagaggaatttaaagaggaaaaaaattacaaagaaaataataaaagtgtttgtacgttttcaaaaaaa

SEQ ID NO: 44 - protein, 430 aa, Homo sapiens
MDEQPRLMHSHAGVGMAGHPGLSQHLQDGAGGTEGEGGRKQDIGDILQQIMTITDQSLDEAQARKHALNCHRMKPALFNVLCEIKEKTVLSIRGAQEEEPTDPQLMRLDNMLLAEGVAGPEKGGGSAAAAAAAAASGGAGSDNSVEHSDYRAKLSQIRQIYHTELEKYEQACNEFTTHVMNLLREQSRTRPISPKEIERMVSIIHRKFSSIQMQLKQSTCEAVMILRSRFLDARRKRRNFNKQATEILNEYFYSHLSNPYPSEEAKEELAKKCGITVSQVSNWFGNKRIRYKKNIGKFQEEANIYAAKTAVTATNVSAHGSQANSPSTPNSAGSSSSFNMSNSGDLFMSVQSLNGDSYQGAQVGANVQSQVDTLRHVISQTGGYSDGLAASQMYSPQGISANGGWQDATTPSSVTSPTEGPGSVHSDTSN

SEQ ID NO: 45 - DNA, 2790 bp, Homo sapiens
tggctttttccacttggtgtggtggtttggggattcattcattcctatttcagcattccactgtatagtccagaggtgagcaaggcaaggctggtgggtggctctgttatccatctcctgtgtccaagcgactgctccagttgtcaccatgtttccagtcaccaggtgagagagactctggctgcagagacagggctgagtgtccgtgtcgtccaggtgtggttccaaaaccagagagcgaagatgaagaagctggccaggcgacagcagcagcagcagcaagatcagcagaacacccagaggctgagctctgattggtgttctcatacatgctgacttgacttttacaacacccattcctggaggcgagtggagaagttgttattatccctatgtcacagatgagcaaacaaaggctctgcaagattgaatgtggccctagatcgctcagacaaacggtggtgggagtgctgggatggaaggaatcatgaacccctacacggctctgcccaccccacagcagctcctggccatcgagcagagtgtctacagctcagatcccttccgacagggtctcaccccaccccagatgcctggagaccacatgcacccttatggtgccgagccccttttccatgacctggatagcgacgacacctccctcagtaacctgggtgactgtttcctagcaacctcagaagctgggcctctgcagtccagagtgggaaaccccattgaccatctgtactccatgcagaattcttacttcacatcttgagtcttcccctagagttctgtgactaggctcccatatggaacaaccatattctttgaggggtcactggctttaggacagggaggccagggaagaggtgggttggggagggagttttgttggggatgctgttgtataatgatatggtgtagctcagcatttccaaagactgaatacattatggattgcatagtttaatgtttctaataagagtcttagcattagatatgaagacgtgtttatcattaaggacagagacttttaatatagacattctcatgcaaactagatacttagggactcctaacaacttcccaccatgtcggggaagctcttgtcaagaggtgcatatgtctatccatctacacaccaatagacagaaggacagatagatagatgtgtgtgtgtgagtgtgtaacctttcgtattttaccctcaaagtttattcctaattataacagacaccaactgtacagcaaaagtaactttattttcagtgtgaactatatttaaggaaatgcttgatgcacttaagttataaaatgagataatttacttttataaactttatttttagcttgacaagacttgtcagcagggcagagagggctgctccacctagccccatagctttgagtgctggggttcattctgttttcagagtgtctttcagatctggaaagaaattctgtgtggctgatggtgttctctcttgcattcttgctctctttggggttgaatcactgggcaggggtgggacagaataatctctgatcatgttctgagaaaatgtaaagcccagactcctgggctttcttttaaattctgacaagtggttgttgggcagtgctaggatgattggttcagctcttgagcttcagcatctgcaaatgtggatgaggctaatagtatgtacctacctcactgggaaacaccaaggcttaattcattcccaggacacatgagcagggctgagactaatatctgatatttgtttaagatacaaccaggccactcacttggcaaaggagggtacatagggttgcagagcaggagggctcctgaactccagagggcagttctgcctgctgaagtccctctgcaaagcctgtgctgaaggagacaccagctcagagcagttcagagggatcccagagtcccagagtggggaggaggtgaaggctgaggggatagaggagggcctggtggtgttctagagcagggttgggcaaactcctgcttgcgggcctgctttctatggcttgccagcaaagaatggtttttactttttttttgaggtcattaaaaaaaaggagaagaagaatatataacaggctgtctgtggcctggaaagcctgaaatatttgctatctgtattgtctggcccttacagaaaaagtttggggccccttgttttagagggtctgtttctaaagaacctcatggcgctcatagaggcagaaggttccagtggaaacccttggctcttccttccaactcactcctctgatcctcggcacagaagacccagcagccattgtacatggggacagttccacaccctggtctccagttgcggtgctaggatggtattgttctgtgctaggaagtctcctgggaacccagaatgagttggtggggaagacagcgggtcactgtggacccatccaggaggggccaggataggcttggcctcatttctggggacatcattggagacttgaacacagagacacgtccctatcactctggcaaggccagagggaacatgtccccttatggtagagtctatgttgtgtgatttttgtgctcttgtttataatttatgcaaaccaccaagaaacccaaaccagtctgatgagtgaaaattatgcagatgctgtatggccccacaggtttctgtggtaaagaccagttggagaatgtaggagatactatgtgagtgaaaatgaatagagatccttattccactccttaatggcataccaagatgaaattaaaatctcttacaaatg

SEQ ID NO: 46 - protein, 100 aa, Homo sapiens
MEGIMNPYTALPTPQQLLAIEQSVYSSDPFRQGLTPPQMPGDHMHPYGAEPLFHDLDSDDTSLSNLGDCFLATSEAGPLQSRVGNPIDHLYSMQNSYFTS

SEQ ID NO: 47 - DNA, 3382 bp, Homo sapiens
gtgaaatcagatcagccagagcagttcgctgtgactgatctctcctcccaccctacattctcttggctggaccctatcctcctggctgattctggtcgccctggacactccctcagttctttcccaggagtgcggtggctgctggcgccgagtcccagcgggcacggacgtcagacgcatcgtttcttctcctctacaggtcctcccggcccggcccgaacatgctggacggcctaaagatggaggagaacttccaaagcgcgatcgacacctcggcctccttctcctcgctgctgggcagagcggtgagccccaagtctgtctgcgagggctgtcagcgggtcatcttggacaggtttctgctgcggctcaacgacagcttctggcatgagcagtgcgtgcagtgcgcctcctgcaaagagcccctggagaccacctgcttctaccgggacaagaagctgtactgcaagtatgactacgagaagctgtttgctgttaaatgtgggggctgcttcgaggccatcgctcccaatgagtttgttatgcgggcccagaagagtgtataccacctgagctgcttctgctgctgtgtctgcgagcgacagcttcagaagggtgatgagtttgtcctgaaggaggggcagctgctctgcaaaggggactatgagaaggagcgggagctgctcagcctggtgagcccagcagcctcagactcaggtaaaagtgatgatgaagaaagtctctgcaagtcagcccatggggcagggaaaggaactgctgaggaaggcaaggaccataagcgccccaaacgtccgagaaccatcttgacaactcaacagaggcgagcattcaaggcctcatttgaagtatcctccaagccctgcaggaaggtgagagagactctggctgcagagacagggctgagtgtccgtgtcgtccaggtgtggttccaaaaccagagagcgaagatgaagaagctggccaggcgacagcagcagcagcagcaagatcagcagaacacccagaggctgagctctgctcagacaaacggtggtgggagtgctgggatggaaggaatcatgaacccctacacggctctgcccaccccacagcagctcctggccatcgagcagagtgtctacagctcagatcccttccgacagggtctcaccccaccccagatgcctggagaccacatgcacccttatggtgccgagccccttttccatgacctggatagcgacgacacctccctcagtaacctgggtgactgtttcctagcaacctcagaagctgggcctctgcagtccagagtgggaaaccccattgaccatctgtactccatgcagaattcttacttcacatcttgagtcttcccctagagttctgtgactaggctcccatatggaacaaccatattctttgaggggtcactggctttaggacagggaggccagggaagaggtgggttggggagggagttttgttggggatgctgttgtataatgatatggtgtagctcagcatttccaaagactgaatacattatggattgcatagtttaatgtttctaataagagtcttagcattagatatgaagacgtgtttatcattaaggacagagacttttaatatagacattctcatgcaaactagatacttagggactcctaacaacttcccaccatgtcggggaagctcttgtcaagaggtgcatatgtctatccatctacacaccaatagacagaaggacagatagatagatgtgtgtgtgtgagtgtgtaacctttcgtattttaccctcaaagtttattcctaattataacagacaccaactgtacagcaaaagtaactttattttcagtgtgaactatatttaaggaaatgcttgatgcacttaagttataaaatgagataatttacttttataaactttatttttagcttgacaagacttgtcagcagggcagagagggctgctccacctagccccatagctttgagtgctggggttcattctgttttcagagtgtctttcagatctggaaagaaattctgtgtggctgatggtgttctctcttgcattcttgctctctttggggttgaatcactgggcaggggtgggacagaataatctctgatcatgttctgagaaaatgtaaagcccagactcctgggctttcttttaaattctgacaagtggttgttgggcagtgctaggatgattggttcagctcttgagcttcagcatctgcaaatgtggatgaggctaatagtatgtacctacctcactgggaaacaccaaggcttaattcattcccaggacacatgagcagggctgagactaatatctgatatttgtttaagatacaaccaggccactcacttggcaaaggagggtacatagggttgcagagcaggagggctcctgaactccagagggcagttctgcctgctgaagtccctctgcaaagcctgtgctgaaggagacaccagctcagagcagttcagagggatcccagagtcccagagtggggaggaggtgaaggctgaggggatagaggagggcctggtggtgttctagagcagggttgggcaaactcctgcttgcgggcctgctttctatggcttgccagcaaagaatggtttttactttttttttgaggtcattaaaaaaaaggagaagaagaatatataacaggctgtctgtggcctggaaagcctgaaatatttgctatctgtattgtctggcccttacagaaaaagtttggggccccttgttttagagggtctgtttctaaagaacctcatggcgctcatagaggcagaaggttccagtggaaacccttggctcttccttccaactcactcctctgatcctcggcacagaagacccagcagccattgtacatggggacagttccacaccctggtctccagttgcggtgctaggatggtattgttctgtgctaggaagtctcctgggaacccagaatgagttggtggggaagacagcgggtcactgtggacccatccaggaggggccaggataggcttggcctcatttctggggacatcattggagacttgaacacagagacacgtccctatcactctggcaaggccagagggaacatgtccccttatggtagagtctatgttgtgtgatttttgtgctcttgtttataatttatgcaaaccaccaagaaacccaaaccagtctgatgagtgaaaattatgcagatgctgtatggccccacaggtttctgtggtaaagaccagttggagaatgtaggagatactatgtgagtgaaaatgaatagagatccttattccactccttaatggcataccaagatgaaattaaaatctcttacaaatg

SEQ ID NO: 48 - protein, 382 aa, Homo sapiens
MLDGLKMEENFQSAIDTSASFSSLLGRAVSPKSVCEGCQRVILDRFLLRLNDSFWHEQCVQCASCKEPLETTCFYRDKKLYCKYDYEKLFAVKCGGCFEAIAPNEFVMRAQKSVYHLSCFCCCVCERQLQKGDEFVLKEGQLLCKGDYEKERELLSLVSPAASDSGKSDDEESLCKSAHGAGKGTAEEGKDHKRPKRPRTILTTQQRRAFKASFEVSSKPCRKVRETLAAETGLSVRVVQVWFQNQRAKMKKLARRQQQQQQDQQNTQRLSSAQTNGGGSAGMEGIMNPYTALPTPQQLLAIEQSVYSSDPFRQGLTPPQMPGDHMHPYGAEPLFHDLDSDDTSLSNLGDCFLATSEAGPLQSRVGNPIDHLYSMQNSYFTS

SEQ ID NO: 49 - DNA, 2657 bp, Homo sapiens
tggctttttccacttggtgtggtggtttggggattcattcattcctatttcagcattccactgtatagtccagaggtgagcaaggcaaggctggtgggtggctctgttatccatctcctgtgtccaagcgactgctccagttgtcaccatgtttccagtcaccaggtgagagagactctggctgcagagacagggctgagtgtccgtgtcgtccaggtgtggttccaaaaccagagagcgaagatgaagaagctggccaggcgacagcagcagcagcagcaagatcagcagaacacccagaggctgagctctgctcagacaaacggtggtgggagtgctgggatggaaggaatcatgaacccctacacggctctgcccaccccacagcagctcctggccatcgagcagagtgtctacagctcagatcccttccgacagggtctcaccccaccccagatgcctggagaccacatgcacccttatggtgccgagccccttttccatgacctggatagcgacgacacctccctcagtaacctgggtgactgtttcctagcaacctcagaagctgggcctctgcagtccagagtgggaaaccccattgaccatctgtactccatgcagaattcttacttcacatcttgagtcttcccctagagttctgtgactaggctcccatatggaacaaccatattctttgaggggtcactggctttaggacagggaggccagggaagaggtgggttggggagggagttttgttggggatgctgttgtataatgatatggtgtagctcagcatttccaaagactgaatacattatggattgcatagtttaatgtttctaataagagtcttagcattagatatgaagacgtgtttatcattaaggacagagacttttaatatagacattctcatgcaaactagatacttagggactcctaacaacttcccaccatgtcggggaagctcttgtcaagaggtgcatatgtctatccatctacacaccaatagacagaaggacagatagatagatgtgtgtgtgtgagtgtgtaacctttcgtattttaccctcaaagtttattcctaattataacagacaccaactgtacagcaaaagtaactttattttcagtgtgaactatatttaaggaaatgcttgatgcacttaagttataaaatgagataatttacttttataaactttatttttagcttgacaagacttgtcagcagggcagagagggctgctccacctagccccatagctttgagtgctggggttcattctgttttcagagtgtctttcagatctggaaagaaattctgtgtggctgatggtgttctctcttgcattcttgctctctttggggttgaatcactgggcaggggtgggacagaataatctctgatcatgttctgagaaaatgtaaagcccagactcctgggctttcttttaaattctgacaagtggttgttgggcagtgctaggatgattggttcagctcttgagcttcagcatctgcaaatgtggatgaggctaatagtatgtacctacctcactgggaaacaccaaggcttaattcattcccaggacacatgagcagggctgagactaatatctgatatttgtttaagatacaaccaggccactcacttggcaaaggagggtacatagggttgcagagcaggagggctcctgaactccagagggcagttctgcctgctgaagtccctctgcaaagcctgtgctgaaggagacaccagctcagagcagttcagagggatcccagagtcccagagtggggaggaggtgaaggctgaggggatagaggagggcctggtggtgttctagagcagggttgggcaaactcctgcttgcgggcctgctttctatggcttgccagcaaagaatggtttttactttttttttgaggtcattaaaaaaaaggagaagaagaatatataacaggctgtctgtggcctggaaagcctgaaatatttgctatctgtattgtctggcccttacagaaaaagtttggggccccttgttttagagggtctgtttctaaagaacctcatggcgctcatagaggcagaaggttccagtggaaacccttggctcttccttccaactcactcctctgatcctcggcacagaagacccagcagccattgtacatggggacagttccacaccctggtctccagttgcggtgctaggatggtattgttctgtgctaggaagtctcctgggaacccagaatgagttggtggggaagacagcgggtcactgtggacccatccaggaggggccaggataggcttggcctcatttctggggacatcattggagacttgaacacagagacacgtccctatcactctggcaaggccagagggaacatgtccccttatggtagagtctatgttgtgtgatttttgtgctcttgtttataatttatgcaaaccaccaagaaacccaaaccagtctgatgagtgaaaattatgcagatgctgtatggccccacaggtttctgtggtaaagaccagttggagaatgtaggagatactatgtgagtgaaaatgaatagagatccttattccactccttaatggcataccaagatgaaattaaaatctcttacaaatg

SEQ ID NO: 50 - protein, 133 aa, Homo sapiens
MKKLARRQQQQQQDQQNTQRLSSAQTNGGGSAGMEGIMNPYTALPTPQQLLAIEQSVYSSDPFRQGLTPPQMPGDHMHPYGAEPLFHDLDSDDTSLSNLGDCFLATSEAGPLQSRVGNPIDHLYSMQNSYFTS

SEQ ID NO: 51 - DNA, 633 bp, Homo sapiens
gtggcaagagtagcggtgacggcggcggcggcggcggcggcagcattatgcgtgattactgacaggcaccagctgctgccgccacagccgtctcaaacgcactatgtggactctccgatctagaggcagattcctgactaatcccagagggctggcccagcctgtgctccccgggctgctaggaagcgatgaccactcttgttagcccaagttgaagaaagccgggctgtgcctgggagccgagagaggcggtaatatttagaagctgcacaggagaggaacatgaactgacgagtaaacatgtatggaaattattctcacttcatgaagtttcccgcaggctatggagggtgttcttcccctgctctccaacttctgctctccacatcgctagggctgtgaaaacagatactgtgagccctgaaccctccaggaggctgcttccccatgacactagtgaccagtaaaatgaaaaggaggagcaaaggagattttgagtcacagaaatgaaacccaggcaaccagcctagaagaaacactccaagatattcattaagtgctttgtttcccgttcctctgacatcttgtaaatgctttttgaattaaagatgataacaggctttaaaaaaaaaa

SEQ ID NO: 52 - protein, 33 aa, Homo sapiens
MYGNYSHFMKFPAGYGGCSSPALQLLLSTSLGL

SEQ ID NO: 53 - DNA, 1856 bp, Homo sapiens
gtggcaagagtagcggtgacggcggcggcggcggcggcggcagcattatgcgtgattactgacaggcaccagctgctgccgccacagccgtctcaaacgcactatgtggactctccgatctagaggcagattcctgactaatcccagagggctggcccagcctgtgctccccgggctgctaggaagcgatgaccactcttgttagcccaagttgaagaaagccgggctgtgcctgggagccgagagaggcggtaatatttagaagctgcacaggagaggaacatgaactgacgagtaaacatgtatggaaattattctcacttcatgaagtttcccgcaggctatggaggctcccctggccacactggctctacatccatgagcccatcagcagccttgtccacagggaagccaatggacagccaccccagctacacagataccccagtgagtgccccacggactctgagtgcagtggggacccccctcaatgccctgggctctccatatcgagtcatcacctctgccatgggcccaccctcaggagcacttgcagcgcctccaggaatcaacttggttgccccacccagctctcagctaaatgtggtcaacagtgtcagcagttcagaggacatcaagcccttaccagggcttcccgggattggaaacatgaactacccatccaccagccccggatctctggttaaacacatctgtgccatctgtggagacagatcctcaggaaagcactacggggtatacagttgtgaaggctgcaaagggttcttcaagaggacgataaggaaggacctcatctacacgtgtcgggataataaagactgcctcattgacaagcgtcagcgcaaccgctgccagtactgtcgctatcagaagtgccttgtcatgggcatgaagagggaagctgtgcaagaagaaagacagaggagccgagagcgagctgagagtgaggcagaatgtgctaccagtggtcatgaagacatgcctgtggagaggattctagaagctgaacttgctgttgaaccaaagacagaatcctatggtgacatgaatatggagaactcgacaaatgaccctgttaccaacatatgtcatgctgctgacaagcagcttttcaccctcgttgaatgggccaagcgtattccccacttctctgacctcaccttggaggaccaggtcattttgcttcgggcagggtggaatgaattgctgattgcctctttctcccaccgctcagtttccgtgcaggatggcatccttctggccacgggtttacatgtccaccggagcagtgcccacagtgctggggtcggctccatctttgacagagtcctaactgagctggtttccaaaatgaaagacatgcagatggacaagtcggaactgggatgcctgcgagccattgtactctttaacccagatgccaagggcctgtccaacccctctgaggtggagactctgcgagagaaggtttatgccacccttgaggcctacaccaagcagaagtatccggaacagccaggcaggtttgccaagctgctgctgcgcctcccagctctgcgttccattggcttgaaatgcctggagcacctcttcttcttcaagctcatcggggacacccccattgacaccttcctcatggagatgttggagaccccgctgcagatcacctgagccccaccagccacagcctccccacccaggatgacccctgggcaggtgtgtgtggacccccaccctgcactttcctccacctcccaccctgacccccttcctgtccccaaaatgtgatgcttataataaagaaaacctttctacacatgaaaaaaaaaaaaaaa

SEQ ID NO: 54 - protein, 463 aa, Homo sapiens
MYGNYSHFMKFPAGYGGSPGHTGSTSMSPSAALSTGKPMDSHPSYTDTPVSAPRTLSAVGTPLNALGSPYRVITSAMGPPSGALAAPPGINLVAPPSSQLNVVNSVSSSEDIKPLPGLPGIGNMNYPSTSPGSLVKHICAICGDRSSGKHYGVYSCEGCKGFFKRTIRKDLIYTCRDNKDCLIDKRQRNRCQYCRYQKCLVMGMKREAVQEERQRSRERAESEAECATSGHEDMPVERILEAELAVEPKTESYGDMNMENSTNDPVTNICHAADKQLFTLVEWAKRIPHFSDLTLEDQVILLRAGWNELLIASFSHRSVSVQDGILLATGLHVHRSSAHSAGVGSIFDRVLTELVSKMKDMQMDKSELGCLRAIVLFNPDAKGLSNPSEVETLREKVYATLEAYTKQKYPEQPGRFAKLLLRLPALRSIGLKCLEHLFFFKLIGDTPIDTFLMEMLETPLQIT

SEQ ID NO: 55 - DNA, 1371 bp, Homo sapiens
ggacttgcaaacgcagggaaagggtgagacctttcaaagctgccaagtgggcaagcttccagcagcagtctgggagcgagcgacagagccaccaagctgggcggcagggcattgagcctcgcgtttcaatttctgttcagttctcctgtaatggaaaattgctttgcacaaagctgaagtgttacagttctttccagcgcccctcccccgcccctccccccgaccggcagccttcggatcagaggacagagcccgcaggaaggtgaaaggagggtggttgtggcttcttactatgtcccttgcttcaggccctggccctgggtggttactcttttcctttggaatggggctggtatcagggtcaaagtgtccaaataattgtctgtgtcaagcccaagaagtaatctgcacagggaagcagttaaccgaatacccccttgacatacccctgaacacccggaggctgttcctgaacgagaacagaatcactagtttgccagcaatgcatctaggactcctcagtgaccttgtttatttggactgtcagaacaaccggattcgagaggtgatggattataccttcatcggggtcttcaaactcatctaccttgacctcagctccaacaacctaacctcgatctccccattcactttctcggtgctcagcaacctggtgcagctgaacattgccaacaaccctcacctgttatcgcttcacaagttcacctttgccaacaccacctctttgaggtacctggacctcagaaataccggcttgcagaccctggacagtgctgccttataccacctcactactctggagaccctgtttctgagtggaaacccctggaagtgcaactgctctttcctggacttcgccatcttcttaatagtgttccatatggacccctcagatgatctaaatgccacatgtgtggagcccacagagctgacagggtggcccatcacccgggtggggaacccactccgatacatgtgcatcacgcacctagaccacaaagactacatcttcctgctgctcatcggcttctgcatcttcgccgcgggaactgtggctgcctggctcacaggtgtgtgtgctgtgctctaccagaacacccgccacaagtcgagtgaagaagatgaggacgaggccgggactagggtggaagtcagcaggcggatttttcaaacccagacgagctcggtccaggagtcccctcagcttatttagttgccagagaccactatcttatgtgcctcccccaggctccctgctttctctcttgccctccccatcccaccaccttggagctgtcatagagattgaaaccttctagtaaaataaataaaatctctgctggccatttc

SEQ ID NO: 56 - protein, 313 aa, Homo sapiens
MSLASGPGPGWLLFSFGMGLVSGSKCPNNCLCQAQEVICTGKQLTEYPLDIPLNTRRLFLNENRITSLPAMHLGLLSDLVYLDCQNNRIREVMDYTFIGVFKLIYLDLSSNNLTSISPFTFSVLSNLVQLNIANNPHLLSLHKFTFANTTSLRYLDLRNTGLQTLDSAALYHLTTLETLFLSGNPWKCNCSFLDFAIFLIVFHMDPSDDLNATCVEPTELTGWPITRVGNPLRYMCITHLDHKDYIFLLLIGFCIFAAGTVAAWLTGVCAVLYQNTRHKSSEEDEDEAGTRVEVSRRIFQTQTSSVQESPQLI

SEQ ID NO: 57 - DNA, 688 bp, Homo sapiens
agccccgccccaggcgagggcgccgcacccacaccgcgctgcgcagttttgttctgctccagctgttcgaaggtgatccagacgcaagatggctgtcctctctaaggaatatggttttgtgcttctaactggtgctgccagctttataatggtggcccacctagccatcaatgtttccaaggcccgcaagaagtacaaagtggagtatcctatcatgtacagcacggaccctgaaaatgggcacatcttcaactgcattcagcgagcccaccagaacacgttggaagtgtatcctcccttcttattttttctagctgttggaggtgtttaccacccgcgtatagcttctggcctgggcttggcctggattgttggacgagttctttatgcttatggctattacacgggagaacccagcaagcgtagtcgaggagccctggggtccatcgccctcctgggcttggtgggcacaactgtgtgctctgctttccagcatcttggttgggttaaaagtggcttgggcagtggacccaaatgctgccattaaagaattataggggtttaaaaactctcattcattttaaatgacttacctttatttccagttacattttttttctaaatataataaaaacttacctggcatcagcctcatacctaaaaaaaaaaaaaaaaaaaaaaaaaaaaa

SEQ ID NO: 58 - protein, 152 aa, Homo sapiens
MAVLSKEYGFVLLTGAASFIMVAHLAINVSKARKKYKVEYPIMYSTDPENGHIFNCIQRAHQNTLEVYPPFLFFLAVGGVYHPRIASGLGLAWIVGRVLYAYGYYTGEPSKRSRGALGSIALLGLVGTTVCSAFQHLGWVKSGLGSGPKCCH

SEQ ID NO: 59 - DNA, 2713 bp, Homo sapiens
ggatcctaggatgcttacatgcaatgatgaacccgaaaacacttgcaaagtgctacgcaaatattgatcacgaagaaggaagtcctcttcccgcctggagactgtgtggggtatggcggggtggtggggagaatgtggtgtcttgctccaccctcctggcgaggggagggcctggcctggaccgcagaggaatcgagtgactgcccctaaaatctcctagaaccgatcccgcggccccgcccctcccgcggccccgcccctcccgcggcccgtcagcctctgccgcggagctgcgtccgccactcatgtttctccgagcaggcctggccgcgctctccccgcttcttcgcagtcttcggccctctcctgtcgccgccatgagcactggcaccttcgtcgtgtcgcagccgctcaattaccgcggcggggcccgcgtggagccggcggacgcctccggtaccgagaaagctttcgagccagcaaccggccgagtgatagctactttcacatgttcaggagaaaaggaagtaaatttggctgttcaaaatgcaaaggctgcttttaaaatatggagtcaaaaatctggcatggagcgttgccgaatccttttggaggctgccaggataataagggaacgggaggatgaaattgctactatggagtgcatcaacaatggcaagtccatctttgaggcccgcttggacattgacatttcctggcagtgcctggagtattatgcgggcttggctgcatccatggctggtgaacacatccagctcccaggtggatcgtttggttataccagaagagaaccacttggggtatgtgtgggaataggagcatggaactacccctttcagattgcctcttggaagtcggctccagcattagcctgtggtaatgccatggtctttaaaccttctccctttacacctgtttctgcattgctactggctgaaatctacagtgaggctggtgtacctcctgggctcttcaatgtggtgcagggaggggctgccacaggccagtttctgtgtcagcatcccgatgtggccaaagtctccttcactggaagtgtgcccactggcatgaagatcatggagatgtcagctaaaggaatcaaacctgttaccttggaacttggaggcaaatctccactcatcatcttctcagactgtgatatgaacaatgctgtaaagggggcgctgatggccaacttcctcacacaaggccaggtttgctgtaatggcacaagagtatttgtgcagaaagaaattcttgataaatttacagaggaagtggtgaaacagacccaaaggattaaaattggagatccccttctggaagatacaaggatgggtccactcatcaaccgaccacacctggagcgagtccttgggtttgtcaaagtggcaaaggagcagggtgctaaagtgttatgtggtggagatatatatgtacctgaagatcccaaattaaaggatggatattacatgagaccttgtgtattaactaattgcagagacgacatgacctgtgtgaaggaagagatctttgggcctgttatgtccattttatcatttgacactgaagctgaggttctagaaagagccaatgataccacttttggactagcagctggcgtctttaccagggacatccaacgggctcatagagtggtagctgagcttcaggctgggacgtgcttcattaacaactataacgtcagcccagtggagttgccctttggtggatataagaagtcaggatttggcagagagaacggccgtgtgacaatcgaatattattcacagctgaagactgtgtgtgtggagatgggtgatgtggaatctgctttttgaaaacctgcagtgaaacctattgacatggccacgctgtggaatgatgtgaattggccctgtttacagaggcagtacaactgaatgttattttacatccagaattttggcgttcagtataagagaatggttcatgttactctttctctctccatcagcttcctcactgaaaatgtgcattaagtgccttgtagatactaatcaagaaagctgtgattctcctcaaagcgtatttttgtgaaatcttttaagagccagtaacatacttctagagaacaggaaaagagactaggataatacatcttccacacatttggcccactgataatgttaattctctggcgtatttcaaagaacttgttcctggctgatccaagtgcagtggtatttacaactaattgatcacaaccagtttgtagatttctttgttccttctccattcccactgcttcacttgcctagtcttgaagaaaaaaaacaaaaaacaaaaaaaaaccttgttcctttataggttcctggtagaatcagtagagatgatttcagctcattgacatttttttaagctatatccccttgtcattccattgagaaagctgacaactgggatagggaggggattagataatagatggggtcaaattctgtgtgaatgtgaacttgcctagtaagcactttgtctctgttcactactgcgatagaggaaatctatctccctatcttgggtccttgaactacagcctgctgtcttacaccagtggagctaccctttaaatgtacaaattatttgtatgctaatgtaatatggtgaaattaaaataaatcacactgttaattgttaaaaaaaaaaaaaaaaa

SEQ ID NO: 60 - protein, 494 aa, Homo sapiens
MSTGTFVVSQPLNYRGGARVEPADASGTEKAFEPATGRVIATFTCSGEKEVNLAVQNAKAAFKIWSQKSGMERCRILLEAARIIREREDEIATMECINNGKSIFEARLDIDISWQCLEYYAGLAASMAGEHIQLPGGSFGYTRREPLGVCVGIGAWNYPFQIASWKSAPALACGNAMVFKPSPFTPVSALLLAEIYSEAGVPPGLFNVVQGGAATGQFLCQHPDVAKVSFTGSVPTGMKIMEMSAKGIKPVTLELGGKSPLIIFSDCDMNNAVKGALMANFLTQGQVCCNGTRVFVQKEILDKFTEEVVKQTQRIKIGDPLLEDTRMGPLINRPHLERVLGFVKVAKEQGAKVLCGGDIYVPEDPKLKDGYYMRPCVLTNCRDDMTCVKEEIFGPVMSILSFDTEAEVLERANDTTFGLAAGVFTRDIQRAHRVVAELQAGTCFINNYNVSPVELPFGGYKKSGFGRENGRVTIEYYSQLKTVCVEMGDVESAF

SEQ ID NO: 61 - DNA, 1421 bp, Homo sapiens
cggtggtggcggagtctacggaagccgttttcgcttcacttttcctggctgtagagcgctttccccctggcgggtgagagtgcagagacgaaggtgcgagatgagcactatgttcgcggacactctcctcatcgtttttatctctgtgtgcacggctctgctcgcagagggcataacctgggtcctggtttacaggacagacaagtacaagagactgaaggcagaagtggaaaaacagagtaaaaaattggaaaagaagaaggaaacaataacagagtcagctggtcgacaacagaaaaagaaaatagagagacaagaagagaaactgaagaataacaacagagatctatcaatggttcgaatgaaatccatgtttgctattggcttttgttttactgccctaatgggaatgttcaattccatatttgatggtagagtggtggcaaagcttccttttacccctctttcttacatccaaggactgtctcatcgaaatctgctgggagatgacaccacagactgttccttcattttcctgtatattctctgtactatgtcgattcgacagaacattcagaagattctcggccttgccccttcacgagccgccaccaagcaggcaggtggatttcttggcccaccacctccttctgggaagttctcttgaactcaagaactctttattttctatcattctttctagacacacacacatcagactggcaactgttttgtagcaagagccataggtagccttactacttgggcctctttctagttttgaattatttctaagccttttgggtatgattagagtgaaaatggcagccagcaaacttgatagtgcttttggtcctagatgatttttatcaaataaagtggattgattagttaagttcaggtaatgtttatgtaatgaaaaacaaatagcatccttcttgtttcatttacataagtattttctgtgggaccgactctcaaggcactgtgtatgccctgcaagttggctgtctatgagcatttagagatttagaagaaaaatttagtttgtttaacccttgtaactgtttgttttgttgttgtttttttttcaagccaaatacatgacataagatcaataaagaggccaaatttttagctgttttatgtacaaggagagatctgtttcattttgttttgccgtatttctagatataagttttagcatgggccaggaaggactaaaataaaagtttttaaggtactgtactttttgccatacttgactcatatactcaaaatacagagttgtcttggtgtaggaattggaaagcaagagtggaaaggaacgtaataactcgttggagtttaaaaatgagggtcttggcaagtaacactgatgtctgaaaaaaaattaaatataaataaataaataaaaatga

SEQ ID NO: 62 - protein, 188 aa, Homo sapiens
MSTMFADTLLIVFISVCTALLAEGITWVLVYRTDKYKRLKAEVEKQSKKLEKKKETITESAGRQQKKKIERQEEKLKNNNRDLSMVRMKSMFAIGFCFTALMGMFNSIFDGRVVAKLPFTPLSYIQGLSHRNLLGDDTTDCSFIFLYILCTMSIRQNIQKILGLAPSRAATKQAGGFLGPPPPSGKFS

SEQ ID NO: 63 - DNA, 1284 bp, Homo sapiens
ggctccttcgggaaacccagccccgtcaccgggctccgagcggctcgcaggcgagcgacagcggcctcagccccggcagcgcccagcggcggctgcggaaagcggagggagtccgacgcgggcgcgggcggggagcgtgcgtccgttcgcacaggcagcgggaggaggggcggcgcgaaccatggccggggacagcgagcagaccctgcagaaccaccagcagcccaacggcggcgagcccttccttataggcgtcagcgggggaacagctagcggcaagtcttccgtgtgtgctaagatcgtgcagctcctggggcagaatgaggtggactatcgccagaagcaggtggtcatcctgagccaggatagcttctaccgtgtccttacctcggagcagaaggccaaagccctgaagggccagttcaactttgaccacccggatgcctttgacaatgaactcattctcaaaacactcaaagaaatcactgaagggaaaacagtccagatccccgtgtatgactttgtctcccattcccggaaggaggagacagttactgtctatcccgcagacgtggtgctctttgaagggatcctggccttctactcccaggaggtacgagacctgttccagatgaagctttttgtggatacagatgcggacacccggctctcacgcagagtattaagggacatcagcgagagaggcagggatcttgagcagattttatctcagtacattacgttcgtcaagcctgcctttgaggaattctgcttgccaacaaagaagtatgctgatgtgatcatccctagaggtgcagataatctggtggccatcaacctcatcgtgcagcacatccaggacatcctgaatggagggccctccaaacggcagaccaatggctgtctcaacggctacaccccttcacgcaagaggcaggcatcggagtccagcagcaggccgcattgacccgtctccatcggaccccagcccctatctccaagagacagaggaggggtcaggaggcactgctcatctgtacatactgtttcctatgacattactgtatttaagaaaacaccatggagatgaaatgcctttgattttttttttctttttgtactttggaacgacaaaatgaaacagaacttgaccctgagcttaaataacaaaactgtgccaactactactggtgatgcctaattatgaatccaacgtgtaaccagttataaatacatatatatataaaaaaaaaaaaaaaaaaaaaaaaaaaaaaaaaaaaaaaa

SEQ ID NO: 64 - protein, 261 aa, Homo sapiens
MAGDSEQTLQNHQQPNGGEPFLIGVSGGTASGKSSVCAKIVQLLGQNEVDYRQKQVVILSQDSFYRVLTSEQKAKALKGQFNFDHPDAFDNELILKTLKEITEGKTVQIPVYDFVSHSRKEETVTVYPADVVLFEGILAFYSQEVRDLFQMKLFVDTDADTRLSRRVLRDISERGRDLEQILSQYITFVKPAFEEFCLPTKKYADVIIPRGADNLVAINLIVQHIQDILNGGPSKRQTNGCLNGYTPSRKRQASESSSRPH

SEQ ID NO: 65 - DNA, 2060 bp, Homo sapiens
agatgctcagtccctggtatgatgagtttctagatgaagaggactactggtttctcctttttacgtaactaaaatgtcctttgaggagctttgctacaagaacccaaagatggccatacagaagatcagtgatgactacaaaatatactgtgagaaagcacctaaaatagattttaaaatggaaattatcaaggaaacaaagacagtttcacgctcaaataggaaaatgtccttgctcaaaagaactcttgtaaggaagccatcaatgagacccagaaacttgacagaagtcctcttaaatacacagcacttggagttcttcagggagttcctcaaggaacggaaggctaaaatcccattgcaatttctcacagctgtacagaagatcagtatagagaccaatgaaaagatttgcaagtctctcatagaaaatgtaatcaagactttcttccaaggccaactctctcctgaagaaatgctgcagtgtgatgcccctattatcaaagaaatcgcttccatgcgtcatgtcaccacaagcacactgttaacgctccagggacatgttatgaaatctatagaagaaaagtggtttaaagattatcaagacctgttcccacctcaccatcaggaggtggaagtgcaaagtgaagtacaaatttcgtctaggaagccctcaaagatagtgtcaacttacctacaggaatcccagaagaaaggctggatgagaatgatcagctttatcaggagtttttgcaagtaccgcagatttatgttgaatcctagtaagcgccaggaatttgaagactatcttcaccaggaaatgcaaaatagcaaggaaaatttcaccacagcacacaacacatcgggacgttcagctccaccctccacaaatgtccggagtgcagaccaagagaatggagaaataacccttgtaaagcgtcgtatatttggccacaggattatcactgtcaactttgcgatcaatgatctatatttcttttctgaaatggagaaatttaatgatctggtcagttcagcccacatgctgcaggtcaaccgggcatataatgagaatgatgtgatcctaatgcggtccaaaatgaacattatccaaaaactcttcctgaattctgacatccctccaaagctgagggtgaatgtccctgagttccagaaggatgccatccttgctgccatcacagagggctacctagatcggagcgtcttccatggggctatcatgtctgtcttccccgttgttatgtacttctggaaaaggttttgtttctggaaggcaacccgctcttacttacagtatagggggaagaagttcaaggacagaaaaagccctcctaaatctacggacaagtatcctttctcgagtggaggagacaatgccatcttaaggttcaccttgctcagaggtattgagtggttgcagcctcaacgggaagcaataagttcagttcaaaattcttcatcaagcaaacttactcagccaagactcgtggtatctgccatgcagctgcatcccgtccagggacaaaaattatcctacatcaaaaaagagaagtaatcaagcgagacccccagcagagataaatcatctcttagaggcctcctaacactgacagaaacttttctggtcaaaaatgaaaggtcctggtaccatcttccccagaaacgatcaagaagggcaatgggttgacagcccagatatggcaggaccagactgcaatgggaatctcatacagcccattcagactaaagggtgatggaaagaagcagaggaaagcagaaacagcaagagtgactgagacctgctgtcatctatatagaagcctttctgatacatgtcagagagtgacatgaagtctcccctctttatacacacgtatgaaaatacatctatccctcattttgagagcctccaactgatccaagtgtcatccggaggaggaggtggcccgtatgtgcaggacctcagggtgccagccctcacccatacacctccagggctgcaggtcattagccagaataaaggatgtccacattcacaa

SEQ ID NO: 66 - protein, 500 aa, Homo sapiens
MSFEELCYKNPKMAIQKISDDYKIYCEKAPKIDFKMEIIKETKTVSRSNRKMSLLKRTLVRKPSMRPRNLTEVLLNTQHLEFFREFLKERKAKIPLQFLTAVQKISIETNEKICKSLIENVIKTFFQGQLSPEEMLQCDAPIIKEIASMRHVTTSTLLTLQGHVMKSIEEKWFKDYQDLFPPHHQEVEVQSEVQISSRKPSKIVSTYLQESQKKGWMRMISFIRSFCKYRRFMLNPSKRQEFEDYLHQEMQNSKENFTTAHNTSGRSAPPSTNVRSADQENGEITLVKRRIFGHRIITVNFAINDLYFFSEMEKFNDLVSSAHMLQVNRAYNENDVILMRSKMNIIQKLFLNSDIPPKLRVNVPEFQKDAILAAITEGYLDRSVFHGAIMSVFPVVMYFWKRFCFWKATRSYLQYRGKKFKDRKSPPKSTDKYPFSSGGDNAILRFTLLRGIEWLQPQREAISSVQNSSSSKLTQPRLVVSAMQLHPVQGQKLSYIKKEK

SEQ ID NO: 67 - DNA, 4166 bp, Homo sapiens
caggtggaatgtcagaagactgagaacattgttccttcttcatactgctgctctgttgccagagaatcccaatttacactcaaagcttctttgattaagtgctaggagataaatttgcattttctcaaggaaaaggctaaaagtggtagcaggtggcatttaccgtcatggagagcagggatcataacaacccccaggagggacccacgtcctccagcggtagaagggctgcagtggaagacaatcacttgctgattaaagctgttcaaaacgaagatgttgacctggtccagcaattgctggaaggtggagccaatgttaatttccaggaagaggaagggggctggacacctctgcataacgcagtacaaatgagcagggaggacattgtggaacttctgcttcgtcatggtgctgaccctgttctgaggaagaagaatggggccacgccttttatcctcgcagcgattgcggggagcgtgaagctgctgaaacttttcctttctaaaggagcagatgtcaatgagtgtgatttttatggcttcacagccttcatggaagccgctgtgtatggtaaggtcaaagccctaaaattcctttataagagaggagcaaatgtgaatttgaggcgaaagacaaaggaggatcaagagcggctgaggaaaggaggggccacagctctcatggacgctgctgaaaaaggacacgtagaggtcttgaagattctccttgatgagatgggggcagatgtaaacgcctgtgacaatatgggcagaaatgccttgatccatgctctcctgagctctgacgatagtgatgtggaggctattacgcatctgctgctggaccatggggctgatgtcaatgtgaggggagaaagagggaagactcccctgatcctggcagtggagaagaagcacttgggtttggtgcagaggcttctggagcaagagcacatagagattaatgacacagacagtgatggcaaaacagcactgctgcttgctgttgaactcaaactgaagaaaatcgccgagttgctgtgcaaacgtggagccagtacagattgtggggatcttgttatgacagcgaggcggaattatgaccattcccttgtgaaggttcttctctctcatggagccaaagaagattttcaccctcctgctgaagactggaagcctcagagctcacactggggggcagccctgaaggatctccacagaatataccgccctatgattggcaaactcaagttctttattgatgaaaaatacaaaattgctgatacttcagaaggaggcatctacctggggttctatgagaagcaagaagtagctgtgaagacgttctgtgagggcagcccacgtgcacagcgggaagtctcttgtctgcaaagcagccgagagaacagtcacttggtgacattctatgggagtgagagccacaggggccacttgtttgtgtgtgtcaccctctgtgagcagactctggaagcgtgtttggatgtgcacagaggggaagatgtggaaaatgaggaagatgaatttgcccgaaatgtcctgtcatctatatttaaggctgttcaagaactacacttgtcctgtggatacacccaccaggatctgcaaccacaaaacatcttaatagattctaagaaagctgctcacctggcagattttgataagagcatcaagtgggctggagatccacaggaagtcaagagagatctagaggaccttggacggctggtcctctatgtggtaaagaagggaagcatctcatttgaggatctgaaagctcaaagtaatgaagaggtggttcaactttctccagatgaggaaactaaggacctcattcatcgtctcttccatcctggggaacatgtgagggactgtctgagtgacctgctgggtcatcccttcttttggacttgggagagccgctataggacgcttcggaatgtgggaaatgaatccgacatcaaaacacgaaaatctgaaagtgagatcctcagactactgcaacctgggccttctgaacattccaaaagttttgacaagtggacgactaagattaatgaatgtgttatgaaaaaaatgaataagttttatgaaaaaagaggcaatttctaccagaacactgtgggtgatctgctaaagttcatccggaatttgggagaacacattgatgaagaaaagcataaaaagatgaaattaaaaattggagacccttccctgtattttcagaagacatttccagatctggtgatctatgtctacacaaaactacagaacacagaatatagaaagcatttcccccaaacccacagtccaaacaagcctcagtgtgatggagctggtggggccagtgggttggccagccctgggtgctgatggactgatttgctggagttcagggaactacttattagctgtagagtccttggcaaatcacaacattctgggccttttaactcaccaggttgcttgtgagggatgagttgcatagctgatatgtcagtccctggcatcgtgtattccatatgtctataacaaaagcaatatatacccagactacactagtccataagctttacccactaactgggaggacattctgctaagattccttttgtcaattgcaccaaaagaatgagtgccttgacccctaatgctgcatatgttacaattctctcacttaattttcccaatgatcttgcaaaacagggattatcatccccatttaagaactgaggaacctgagactcagagagtgtgagctactggcccaagattattcaatttatacctagcactttataaatttatgtggtgttattggtacctctcatttgggcaccttaaaacttaactatccttccagggctcttccagatgaggcccaaaacatatataggggttccaggaatctcattcattcattcagtatttattgagcatctagtataagtctgggcactggatgcatgaattccactccttccagaaccaactgcattggttttccatgaccttaaggcagtagttctcaactggggggcaattttgcactgaagagagcatttggcagagtctgaagaagtttttggtgtcacagctttgtggggagcatgctatggcatttagtgggtaaagaccagggatgctgccaaacctgccttgcacaggacagcccctgcaacaaagaattatccagacaaaaatatcaatggtgctgaggttgagaaaacctgacttaaggggctgggatgcttttgaactagcttaaggcccaggactgtggagtgtgtggaccaccccacagaggagggactcagatttatttactcttgctggatctgtagtgatggagttccttctggtgtcagccccacaggaggctcccaggcctccctcacttcccatacccagtctaggagctccttctggctcccaagcacccagagctttcctccgccttttagttttggttcctccactggaatgtaggctcctcacgggcgatggctgtcttttcttgactttgtatcttcactgccaagcaaaaagtctgccaagtgggaatgtttaataaatattcattgaataatgaatgaaccatcttcgtacatgaataataatactgtcttacgtttttctggtgctttataatgtatacattacatctgagtattttattttatttaattttcaaaacaatcctttaaggtcaacattgttatccctattttgctgatgaggaaactaaggttagaaacattttgatttcctctaggacgtatagctaggaagtgttactatcttgatttgaacaaattttctggtgctaagtctgatgttctttccatgaatcattgtggtggttgagatggagctttgtaatgggaataaaacagtaccttaggttctttctgaaaaggaggtatctagcaatggataaatagataccactgaatgaaattaaatgttgattaggaacaaatttaaggcttaaaaaatactttatgagcagcaagattgctttaacttttaaaatgaagctttggttctctgatttgtaatgagcacctggacatgtcaattaaaatgcccatttgtgaagcttactcaataaaactttaaattgtcaaaaaaaaaaaaaaaaaa

SEQ ID NO: 68 - protein, 741 aa, Homo sapiens
MESRDHNNPQEGPTSSSGRRAAVEDNHLLIKAVQNEDVDLVQQLLEGGANVNFQEEEGGWTPLHNAVQMSREDIVELLLRHGADPVLRKKNGATPFILAAIAGSVKLLKLFLSKGADVNECDFYGFTAFMEAAVYGKVKALKFLYKRGANVNLRRKTKEDQERLRKGGATALMDAAEKGHVEVLKILLDEMGADVNACDNMGRNALIHALLSSDDSDVEAITHLLLDHGADVNVRGERGKTPLILAVEKKHLGLVQRLLEQEHIEINDTDSDGKTALLLAVELKLKKIAELLCKRGASTDCGDLVMTARRNYDHSLVKVLLSHGAKEDFHPPAEDWKPQSSHWGAALKDLHRIYRPMIGKLKFFIDEKYKIADTSEGGIYLGFYEKQEVAVKTFCEGSPRAQREVSCLQSSRENSHLVTFYGSESHRGHLFVCVTLCEQTLEACLDVHRGEDVENEEDEFARNVLSSIFKAVQELHLSCGYTHQDLQPQNILIDSKKAAHLADFDKSIKWAGDPQEVKRDLEDLGRLVLYVVKKGSISFEDLKAQSNEEVVQLSPDEETKDLIHRLFHPGEHVRDCLSDLLGHPFFWTWESRYRTLRNVGNESDIKTRKSESEILRLLQPGPSEHSKSFDKWTTKINECVMKKMNKFYEKRGNFYQNTVGDLLKFIRNLGEHIDEEKHKKMKLKIGDPSLYFQKTFPDLVIYVYTKLQNTEYRKHFPQTHSPNKPQCDGAGGASGLASPGC

SEQ ID NO: 69 - DNA, 8192 bp, Homo sapiens
ccctccctcgctcgctcctcgcaagctcccgctcgctccctgcccactcccggggggacgttccgtgccgcggccgccgcggccgctgcttctttcacactttagttgggagctgcgcgccgcgctcagttactggagagctggccgcgcgccgccgcctcccgcacgcttgcacgcgggcccggcttcggggttttgggttcttactccaagcggcggggaggagggggagccccggacacactgtggggaggaggaggaagaagaggaggagggaggaagaaaaaagacgaggaggacaggggcggggggcgggaggcttgccaccttcagcccccccgcgaacgcccaaggtgcacacatcttgaccaactcagcagcaaggtggattttctttgtgtttaaagaaaaaaaatgtccctgtgtctgtagagatgatttgcagttcagcccggctgaagctgaccgaatgagactatgggctgtgcctccgccaagcatgttgccactgttcaaaatgaagaggaagcccagaaagggaaaaactaccagaacggagatgtgtttggcgatgagtataggatcaaaccagtggaagaggtcaaatacatgaaaaatggggcagaagaagagcagaaaatagcagccaggaaccaagaaaacttggaaaaaagtgccagctcaaatgtaagacttaaaactaataaagaggttccgggattagttcatcaacccagagcaaacatgcacatctctgaaagccaacaagaattcttcagaatgctggatgaaaaaattgaaaagggtcgggattactgttcggaagaagaggatatcacatagcaccaattttaccactcaaaccaggagctactactgtgtaaataggttacaccccagttgaaatctttgcaaaggtcggttctattcagcgaacagcactatagcaaaagaagatcgttccatattgtacgccccattaaattacagtgtttcttaatgaacttgcaaaggaatattgctaaaaacaaacaaaaaaaactgttatcgaactttctttgttgctgctagttaaaacttgttgcaacttttcacttctcttgtgtccaggtatgcagcaaaattctgcaatttcaccttaaagatactgttggttttacagatgctctccaacctattttctataagatgaggtagtggtgaactcagataacaaacttctcttctaaactggttctgcttctaagacaagcatctcctgccctctctccttcctccccatctctcgcacgcagtctagagatggactgagccttgcttctcactggcagtgttgagctttggagatgggatggttgctatgccaagccttgtttctctgctcagaagaagtagagaagctattatcaattaaaagcatgctgtgatgtgactcctggaagtgacgtaggagtgagtggcaggttgtttgatttaataggtatcttaatcaagaattaagcttgcaacattggctttgctcagatgcagatggaagtgtgatcacaatcattttgaatccctcttcctcacttttttttctaagaaaataaacattttactgtttttatggatccttgtcttctcccattcatccagctcagtgttttaagatgatcctgggtgcagaagttgagccctcctttgcattgacactgataattagcctatagggctccctacccttccattaagaatctaccaagcattagcaaggctgaaagtggtctaagaggtgaggggacatcctatgactttttaggaaggcctgaaaccaccttgttacctttcattttgttagcaaataaaccatcctattttgtaactctcccccttcaaaatgctacatgagccttgccacttcctttttctcttacttccagcacactagacatagcaaaagtgtttgcctactcaaaaacataatacttttatgctgatgatggtatttggagatgtgaaagccaaaagcccctggcagtggtggggaatgttgactgagtgttcagcagagtttatttttccatactatatgaagagaatgatctcttctcaaagacagaagtgatatttttaacaaatattgtcacaagtaaatagcaatcaaaaggagaaaataacttttgtatttttttaatgtgtttgatagctttgacgagggttctctttgttactttcaggggagggcatcctattaaatgccacgccagcagtccgggtctgggtttgtcccacaaaatcacaggagcactgtatgttcctctcttttggagttgtgactttgaagggcctcaatattagccacactgccgcctgcagaaggtggagagttaagatgttctatgtcaatttgctcttgccgaaaagatgagcctcgattttaaaatctatccacatccaactgatggcaccattgatgtgcaaataatgagattccctatctccttttagacctgggacggcaaaagggaagggaaggaaacttagcagagtgctattgactatagattcacatattagcaacaaaatcccgtaattcttttggccaacagcagctattttggggagcagctgtggctgttacataaatagagatgcagccaaaattttaggccttttatcctgcttctagcagaaaaatgcagggagagtcaagtagtctagggtttcaggttgcctcccctcatatggtttttggccaagtgactaaaacagttttccacaactgtaaacaaactgctaagccccacctcaaacttgttcactggggactttgcttaccgttctgtgggtgaccttttccgggatttcttgttcttatcaagcaagaattaagcacatgctaaacgtcttccatttgacttctctactcggtgtctcagacagtgtcttcccagaaaaccaccaccctctacccaaagatgaaacatgctcatgtcatttttctcatggtcacatttaacagttttgacatgttatacttgcgcatagatccaagcgtttcttgggaacctgacttttgagtgtttaataaagccggaagtggtgttgccctgaaccagcagattttcacctgggttctggctccggtgtttaacactggatacatctttgatgtgcgaaagtgagttcatcttcagacacatttggtacatccagaaatagatccaagaaatggggtggttgagtgggtccgcacgaaatgcttgattatgtcagcaacacccaacactgtctgttttccatttgttggttttaatcataaaattgtcaagtgattcgtgtttgtactttatttttttgtgccttctgaaaggatctaaaacaaaaatattttgcctttttttccccacgtgtatctgaacattaagcagattggctcagacacaatgaaaaggataatccaatgtacgtgctggtgcactctgctagttgttatctctgtagggctcaggaagctggaaggaggaagggagggtaagtggcctggtgagtggaggtagaaaaatgatgagaaatgaactgagagcattaagcagagagggttgataggctggccgtgtccggggtgaaattggaaatccagctgcctagtggccagtgggtggggcaagactgtcaacgagatttacagctggcttacacatgccttatgtcctctgagttgtagagttgtaaaagttcagcagtgtgtgcacagctttcttttggttggcagagattcaggatcatggagtactgctctcataattgaagacgtgtttgttattggcagagaaccttaaaaaaggcctttacctcagcgatgcttcctagccccaggcttgcagagaacacagagtggtgttgtggtctatttagggacaaagaaggtataaagtccagagatgagaaaactgggtcagccctcagaaactgcagcagccacgcacacagaagcctgctggaagacaggtctctctccgtccacagtgcccatcatctgagcctgggctgggatgactcaacttagcaaagacggacccaggaggagtgctggttcttcagtctttgtactggccccatcctctcctcactgtaatgtgaggaagcacctctgtgtcagggctcacctgggcatccaaagcggccacgcccacaatccgacagcccccaggagcaggtccagggatgatgcagcccccttcttggtcccatgtgatgtcatcctgctttgttatcttcttataactttatcctgctataactttatcctcttcccagcctcatccctgtttttctgttagggcaagactcttccataagcctgctaaaaaacagagatgatacctcttacaaactttacctcatagcctgtgaagcaggttggcatgtggattacaagtcctgctttgacactgggcaagaatttaagattgttctatctctactagtcatagaaaagaaacattgttaaacatgttgagttttaaaggaagaaatattttcaaattcttaatccaagaaaatactgagttggaatcttagacttcgggactctgacacgttctttatgaaaggcaaaataattggtatctaaagttctctccttcctgcctcccctaaagaaaaaggatattagattgcacactataattttacataagatctgccttccacacttccctgctggaaggcattctcagagctttatgtcttcgtacctctcagagattggactttttcttgtttaaaaccccaaccaaaaaaaataataaggcatgattggtggggagggaatgtgtatttaggggcataataaaaaggtggctcgaagcaggaactttggcctcatggtgtcatgggtggatgcctggactccagtgtgcctgtgaggggctgggttaggcagtcggctgtcacactcacatgtgcctgcaataaaccttttggaatttcatgaacgaggtctatgaattgccttttgccaatgaatggatgtatttttccaaggggggaatagtatccttgactttggcagtcacctttttgtatgtctctagaaaggggtcaaaaaactatggtaaagatgaggcttatgagtgaatacctctgggacaaaccttaggactcacaagctatgccatgtttttcaggagactcttgtaccttatctggaatctaatcttgggagaagaggaaaaaggagctaatatttgtcatttatactcactctgtgccagatactgtgctaggcattttataattgttttgtgtcatcctcatgataatcctgtgaagtagatctattacccccgtgttctaaataatagatcttaagtgtggaatgcatctatccaacataaatgcccatgttgaaagaaggaaagatgtcattcaagtatttttcaaattctttttattatgactatgcccttcgcaacactgtgaaaacaacccctgggggcatctgccttccagaatctctctctggcttctcaccagcttggtttcctcatggggagtgttttatttggcctcccctatctgagctgcacacacaccaggggaggccactggctaacagtaggacttcagtgccctgaggaaaaggctttgggaatttaggcacacgtttctctccttggaatccttctagcatctggaaaaggaacctggtatttctgcagttagataccagatgcaaccagaacaggctttcgagtgctgtgatttctttcctgggttcccaagtcttgttgtttcatcacaaactgtatctttttaaggttaaaagtcttgaccttcatgggggtctgggacaatccgatctccaagcatggaggaaaggcaatgcctggaccactgacttgcattgaaatcctttcttgtgggctagggtttgatgtctctttttcatctttggactggggatctgcatcttccaggtccatttaagcactgaaactagatgcaaatctctttcgagaccttacatgttttagatagtcatgtaatgacttggatagacatttaaataacttgttccaaggtcggaagagcccaagaactcctcagagttcctcttcttgcttcttgaatcacatcctctaaagatgactcatgtctccatagcaactgttaaaggtgctgcctagacgggacccgctcccacctttacttactttgctcgaaggaaccaaaacaatgtccttgtgtaaaggggctgtcatatccagttttcctttgaaatctggcccccaagatcctgcttctttctaacctggcagctgtcatgtcccttcaagatgatgtgggaaatggcccttacaacttgggaaccacagaaattgctgtatttcgggaagattcacctctaaactgaaggcttcattctgatagtgtctgccctctctaccctgatttcgcccttctttgcttccatttttagcccaaggctttgaatttgattgagtaagacttagaggcagtataaagaacaccataaacttaggcagaggtcccttagggtctctagagttgaaaataattctacagccttagggggacctcttggcattgactctaaagggagagaatagcccctgtgtcctggcatttcagtctagaccttcaaggactgttctctcttgacaggcaagcaagcaaagaaagttttgcaatagatttcaagccagtttttccattcaaaccaagatgcaaattcataaaattactcttttcctggaatagatccaggcagctgccttattagaactttagattcggatctattttcttaacacacatacacatacacgcgcatacatacatatacagagagatacgtggagaaaggaaatttactctatcattgcaatacttcaagaaagagctgtattttgcctttctgtaatctccaagatagtgtctaggaaagtaatagtataactatagggataccgaaacaggaaaaaccagccatcactcttgagaaagtttgagttcgactcacatgggagaatcgaggtctgctactcgtcttgctttgtgccccatctgtgcctggatgccctactacatctgcttgactcgtctgggctgctagccggggtgttgtggctgacatcctttcctggccttacacacataatagacacatccctaacggcgtgtgcctggtccagccacatacagccaccacatgtgtcacacactgtccccctcatccatgtggacttgactggcatttcagcagctccactgggatgctctaaccccagtgtgtggagttggggtcccttcatctaggttgacccaggtatagcatttttagcattgcctttccagtcttgatgattcattcattgaactcatttatttctggagcccctggtacactccaggcactgcgctaattgccagcaaagcacaactgaactaaatccaccttcaaggaacctagccataacgagggaggcagcatggaagtaccctacaggggaaagtcctgagtgctgtgggagcatctcaccgtggcagccagcccagttttggcaatcaggggcttcctgaaagaggtgacatcaaagcccggatgtgtcagaggactgagggagagtgttactaaaggactttcaggctgagaggatagcacaggactcagcccaaaggagggccagtgtggactgtccagggccagcctgcagtacagaggctggagcttggacttgtagagggagagagaagagcaagggacgtggacggggcagtgagccaggctagccacagagggttcccggggctttgctggggattcagggagcataaataagagctttaggtggtgctgtgtcctctgcagcccactgctgaggtcctccagacaggtaaggtgtggtcacaatcagggccggggtttccctgctcactgcggcagtgcaggggtgcttgctgagatgattcatcccagggtgtcctctgtcccttacccagccccaactcctcttcctctgccaaaagctatttgaattcaaggactttaacctgggccggatctggtttggagacaaaggggacagctctgggtcagcatgaccttctttagagccactaaggcgaaaaataccgtttgggaccaggctggcctagacccagggatgagaatgcaccct

SEQ ID NO: 70 - protein, 121 aa, Homo sapiens
MGCASAKHVATVQNEEEAQKGKNYQNGDVFGDEYRIKPVEEVKYMKNGAEEEQKIAARNQENLEKSASSNVRLKTNKEVPGLVHQPRANMHISESQQEFFRMLDEKIEKGRDYCSEEEDIT

SEQ ID NO: 71 - DNA, 6298 bp, Homo sapiens
ccgcgttctgcctggtgtcggccacctccgtgtggacggcgggggccgagcccatgagtagggaggagaaacagaagcttgggaatcaagtactggaaatgtttgatcatgcttatggtaactatatggaacatgcttaccctgctgatgaactcatgcctttaacctgtagaggtcgagttagaggccaagagccaagtcgcggtgacgttgatgatgccttgggaaaattttctctgacactgattgattctttggacactcttgtggttttaaataaaactaaagaatttgaagatgcagtgagaaaagttttaagagatgttaatttagataacgatgtagtcgtatcagtctttgaaacaaacatcagagttcttgggggtcttttgggtgggcactccctggcaatcatgctgaaagaaaaaggtgaatatatgcagtggtacaatgatgaacttctccaaatggcaaagcagttaggttacaaacttttaccggctttcaacactaccagtggccttccttatccaagaattaatttaaagtttggcatcagaaaaccagaagctcggacaggaactgagacagatacctgtacagcttgtgcaggtaccttgatccttgaatttgctgctttaagtcgattcacaggagcaacaatatttgaggaatatgccagaaaagctcttgattttctctgggaaaaaagacagcgaagtagtaatttagtgggcgtgactataaatattcatactggagattgggtacgaaaagatagtggagttggagcagggattgattcatattatgaatatctgttgaaagcctatgtcttgcttggagatgacagttttctggaaagatttaacacacactatgatgccataatgaggtatattagccagccacctcttctacttgatgtgcatatccacaaaccaatgctgaatgctcggacttggatggatgctttgcttgccttcttcccaggcttgcaggtgttaaagggggatattagacctgctattgaaactcatgaaatgttatatcaggtgattaaaaaacacaattttctaccagaggcatttaccacagatttcagagtacactgggctcaacatcctttaaggccagaatttgcagaaagtacctacttcttatataaagctacaggagatccttactaccttgaagtagggaagacacttattgaaaatttaaataaatatgctagagtgccttgcggatttgctgccatgaaggatgttcgtactggaagtcatgaggacagaatggattctttcttcttggctgaaatgtttaaatatctttacctgttatttgctgataaagaagacattatttttgacatagaagattacatctttacaacagaagctcatctgttacctctttggctctctactacaaatcaaagcatctctaaaaagaacacaacctcggaatatacagaactggatgacagtaacttcgattggacttgtccaaatactcagatcctctttcctaatgacccattgtatgctcaaagtattcgtgagcccttgaaaaatgtggtggataagagctgtcctagaggcatcatcagagtagaggagagtttcaggagtggagctaaaccccctctgagagccagagatttcatggccactaaccctgagcatttagaaatcctgaagaagatgggggtgagtttgattcacctcaaagatgggagagtccagttggtccaacatgcaatccaagctgctagttcaatcgacgctgaagatgggttgaggttcatgcaggagatgattgaattgtcaagtcagcaacaaaaagaacagcagctgcctccacgagctgtacaaattgtttcccacccattttttggcagggtagtattgactgctggaccagctcagtttgggctggatctgtctaaacataaagagacaagaggatttgttgcaagcagtaaaccatccaatggttgttcagagcttactaacccagaggcagtgatgggaaaaatcgcactgatacaaagaggacagtgcatgtttgcagaaaaggcacgcaacatccagaatgctggagccattggtggcattgttattgatgacaatgaggggagcagcagtgatactgcccctctgttccagatggcaggtgatggaaaggatacagatgacatcaagatccccatgctgttcttattcagcaaagaaggaagtatcatactggatgccatccgggaatatgaggaggtagaagtgctcctctctgataaagcaaaagatcgagatcctgaaatggaaaatgaagaacaaccatcctctgaaaatgattctcagaatcagagtggtgaacagatttcatcaagttctcaggaggttgatttggttgatcaagagtcttctgaggaaaattctctaaattctcacccagaatcattatctctagcagatatggacaatgctgcaagcatttccccttctgaacagacttctaatcccacagaaaaccatgagactacaaatcttaatggtgaatgtacagatttagataaccagcttcaagaacaatcagaaactgaggaagattccaatcctaatgttagctggggtaaaaaggtccagcctatagactccatattagcagactggaatgaagatatagaagcatttgaaatgatggagaaggatgagctatgacttgctaaacaatctgttggtaggtatttaaaaagaaaaggtaaactgtgtgtggttaatagacatcctaatactaagcaggctttctaatgggaggctttaagtatggtgatgaacaaccacgttctgactggcgtagttatcgtaggaatctggagcatgctgtgttagaattgaccttgtttaaaactgtcccatcaaaaatggaaatccacagttcccccttcaaatgcagcactgcaccaccctgcaacacctcaggccagggaaagattactgagcattcctgcgaaccagatttctgttgtctctggatagacaagaaacaaaattcatttagtagtggagtggggaataggagtttggatagccttctaattaaaggaagctcgcctttcttggttttgggggttagaggctcttttgggaagatgcatccgagtattgtggcattctgattatgctgccttcacaaaacactctaagtgacctaagtggttatgaagcaaatgcatttatggtgaaaacagtctttgctcattgctttctcttgtttcatttagtgacaaatgatcaagatgacttgattttttttccttcttaacaatgtcttttttatttaaaccaaaggtgaagccagtgtactttctcagtgagttctctgcataaagactaatcagtgggaccaggtaaaaaggtcatataatacattgtggagattgcttacttaatacttctgaaaaatggagtaagggagaaactgtaatgttgcaatatgaacctcccattgggccttccatagggaaagctgtgactactctgaaatggaacctagcattatatccttgtagggtagattataaatcatttccagttcatttctcttagaggtgattacctctagccatcagccttactccatcccatgtttggtatgcaatttgagccacaaggctcgtatcgccaacagctatatacattttgttccatttttctgtcttacagagccatgataaaactgtggttagtgagttaaaattcctggagtaactactgtttttctcctttgaaacttaggtttctaaagttgcacctaaggaatctgtcacattttctgttgaatcatggtttttgtttttgtttttaacagatattccttctgatacggacttgaaaattagtgtatggtgacctgtgtttaaaaaaaaaagtacaatacaactacatatagctatatagcttaatgagacttccacccccccccccttttttttttggtttgttgttgttgtagtagtctggtgctggccacatttaagtcttaaaaatttttaaattttgttgttgatgtttgtacacagccctgttgttgaaatcatggctttattcattttatttattttttaaacttgcctgaatttgttctaaaggaatatttaagagacataattttcttctctttaccataacattacacaaaactttttcctaaaacacggttgtgaggtactgatgaggtgtaagtggagctgttaaaaacagcagtgctgtattgcagttatgtatattcgtgtacagtatgtttagatcccaggtaaacatattcttttctgagaggataaatacctgcattcagatattccaggtaaatataattgagtcagggagtagtaaatctgatggagaattcactttggggaggggaaaaagaatagtatgcaagacccttattggcttttaattatacctgaaaccaaaatggatatttttagtctctctgcatgtgagatttggtgtaacaagatagaactataatatatacagtatatggaaggatagatatagtgctttgttcattttaattgcaaagctgccaaaatagttgaagcttaattacttgacttgccttgatttataggactggggcttggagaaaatgagcagatgttcctctaagacatcgattacagaagccttatatacatggatttgattttgtatttgtagctgaaagtcactgttgtctaaaactaacttttctaagttatcaaaacaacctaatttcttttccaacaaggagaacttaatggcatgaaggattgtgtgacacattggaaaagccagcttactgccactctcttcctttggccattagagggaggtgttgcctttcattgacgcttagaagcaaattgttcacttgttaagaaaagtaaatccttaaaaaaagaaaaggaaaaaatttaaccaatttttcttaatacccagaaggaattatactcaatatttccctagttaagaaaagaggagataatgttcgtctaaaaaactccaacgttgtaattacaactctacattcatttacttacttgacatactgccacaaagtagtttttgagttcattaaaaattccaaaggcattagttgtttttttttttttttagtgttttgttttttagttaacttttatagacattttagtaacttgctaaagattcaggggattctatgaaccccgaatttagaaacatctggtctacctcagttaaatgttgactgcttagaaatatagctgaagtgatcaccacagccataaaattgtttaagaaagatttatataatgtttacaaatctggaatcaaggattttagctgaaatcctttaagagatattagagcaagtatttaattcaggtattttcaagttttaaaacttaacctgtttacctacttaaaaataaaatagctagtttttttctgcatataaaagttcattgaaatgatatgcccttatttgcaatacttttcccataaagttttaagtgtgaaagaattgtaatttactagatatgtttggtatgggatattttgttaggcaagttttcttttttcttcttaaattgcaataggcttccaaaaagagtataattgtttcagaacaaattaactcttggcattatacgtctccctttttctttacagtattagtaaaaagaaaaattgtacactttctgattttaacttcactaatgtaattactctctcaagaagcttttaaaatttaaattaccatcacacaaccttttttatagtaaagccaacatttgttctctcaccaaaccccatgccaaattcatcatgaagaaagctcagcataagtaattcaaatactgcttataattttagaggggggtagaatttagtaaatattccagccggtcgttttatgcacaaggcttcagtcagaacatagaaaaaaaaaacattctgtgaatgaaatattgtatgttcagattttataaaagacatttttaaaagcccaatttacagccgtatattttcttatgatgtaatttatgaaaaagatgtctgtactaacaggtgctgtaacactactgttgttggattttattgtttggtgataaatgtatacaatatttctaagggaaactatgtactgtgatgtaaaagtctgggcaaaatgtatataatcctgtatataattatgtatttgattataattactgattgtaaagatttaataaaatatgtaaatattccaaaaaaaaaaaaaa

SEQ ID NO: 72 - protein, 889 aa, Homo sapiens
MSREEKQKLGNQVLEMFDHAYGNYMEHAYPADELMPLTCRGRVRGQEPSRGDVDDALGKFSLTLIDSLDTLVVLNKTKEFEDAVRKVLRDVNLDNDVVVSVFETNIRVLGGLLGGHSLAIMLKEKGEYMQWYNDELLQMAKQLGYKLLPAFNTTSGLPYPRINLKFGIRKPEARTGTETDTCTACAGTLILEFAALSRFTGATIFEEYARKALDFLWEKRQRSSNLVGVTINIHTGDWVRKDSGVGAGIDSYYEYLLKAYVLLGDDSFLERFNTHYDAIMRYISQPPLLLDVHIHKPMLNARTWMDALLAFFPGLQVLKGDIRPAIETHEMLYQVIKKHNFLPEAFTTDFRVHWAQHPLRPEFAESTYFLYKATGDPYYLEVGKTLIENLNKYARVPCGFAAMKDVRTGSHEDRMDSFFLAEMFKYLYLLFADKEDIIFDIEDYIFTTEAHLLPLWLSTTNQSISKKNTTSEYTELDDSNFDWTCPNTQILFPNDPLYAQSIREPLKNVVDKSCPRGIIRVEESFRSGAKPPLRARDFMATNPEHLEILKKMGVSLIHLKDGRVQLVQHAIQAASSIDAEDGLRFMQEMIELSSQQQKEQQLPPRAVQIVSHPFFGRVVLTAGPAQFGLDLSKHKETRGFVASSKPSNGCSELTNPEAVMGKIALIQRGQCMFAEKARNIQNAGAIGGIVIDDNEGSSSDTAPLFQMAGDGKDTDDIKIPMLFLFSKEGSIILDAIREYEEVEVLLSDKAKDRDPEMENEEQPSSENDSQNQSGEQISSSSQEVDLVDQESSEENSLNSHPESLSLADMDNAASISPSEQTSNPTENHETTNLNGECTDLDNQLQEQSETEEDSNPNVSWGKKVQPIDSILADWNEDIEAFEMMEKDEL

SEQ ID NO: 73 - DNA, 7618 bp, Homo sapiens
aagaatcagaagacatttgtgctttggggagcagaggccctcagggtatagagaaggaagaagagagaggttcactgtagtcctgaagcagaaataagacctgtggctgaaggaagccttagcaattcactccttcctcttcctgagaactctctgtaggaagtctcacctagcagaggcttcacagtatttcagagaagccaaagattgtttgcctctttggaaactgttatccttccatcatgactgtgtcactcctgccactgttccaccatagagatggcgtcctttgcagcaaaccgtaagttataaggatgagggaagaagagtagagggccaaaaggattccattttgaggaaaaactacagtttgccttgccaggtagaagaatcaggcgcccagacaccatgtcacaaccctccagaactgacgttggcaggaagtagagactttgttgcctgtgtcccccatcctcaccatgtcttcgactcaggacaatggggaacactggaagtccctggagtctgtgggcatcagccgcaaagaactagcgatggccgaagccctgcagatggagtatgatgccctgtcccggctccggcatgacaaggaggagaacagagccaagcagaacgcagacccctctctcatcagctgggatgagcctggggtagacttttacagcaagccagcaggaaggcggaccgacctcaagctgttacgcggtctctctggctctgatcctacccttaactacaactcactatccccacaggaagggccgcccaaccactctacctcccaagggccacagcctggctcagatccctggcccaaaggctccctgtctggagactatctctacatttttgatggttcagatgggggagtctcttcgtccccaggaccaggggacatagagggctcttgcaagaaactatccccacctcctctgcctccccgagcttctatctgggatacccctcccctgcctcccagaaaggggtccccctcatcctccaagatctcccagcccagtgacatcaacactttctctttggtcgaacaattgccaggcaaactgctagagcatcggatcctagaagaggaagaggtgctgggaggtgggggtcaggggcgcctactggggtctgtggactatgatggtatcaatgatgcaattactaggctcaacttgaaatcgacctatgatgcggagatgttgcgggatgccaccaggggctggaaggagggccgagggccgctggacttcagcaaagacacctctggaaaacccgtggccaggagcaagactatgccccctcaggtgcccccccgcacctatgcctcccgctatggcaaccgaaagaatgcgacgcctggcaagaaccgccggatttctgcagccccggtgggctcccggccccacactgttgccaatggccatgagttgtttgaggtctcagaagagagagatgaggaggttgctgcattttgccacatgctggatatccttcgatctggctctgacatccaagactacttcctcactggctatgtctggagtgctgtcacccctagcccagagcacctcggggatgaggtcaacctgaaggtgactgtgttgtgtgacaggcttcaagaggcactcactttcacctgcaactgttcctccactgtagacttgcttatctaccagaccctgtgctacacccatgatgacctgaggaatgtggacgtgggtgactttgtgctaaagccctgcgggctggaggagttcctgcagaacaagcatgccttgggcagtcatgagtacatccaatactgccgcaagtttgacattgacattcggctacagctgatggagcagaaggttgtgcgcagtgacctggcccggacggtgaatgatgaccagagcccctccaccttgaactacctcgtccatctccaagagaggcctgtcaagcagaccatcagcaggcaggccctgagtcttctgttcgacacttaccacaatgaggtggatgccttcctgctggctgatggagacttcccactgaaggctgacagggtggtccagtccgtcaaggccatctgcaacgccctggccgccgtggaaacccctgagatcaccagtgctctcaaccagctgcccccctgcccctcccgcatgcagcctaaaattcagaaggatcccagtgtcttggctgtgagggaaaaccgagagaaggtcgtggaagccctgaccgctgccatcttggacctggtggagctgtactgcaacacattcaacgcagacttccagacggcagtgcccgggagccgcaagcatgacctggtccaggaggcctgccatttcgccaggtccctggccttcactgtctatgccacccaccgcatccccatcatctgggctaccagctatgaagatttctacctctcctgctccctcagccatggcggcaaggagctgtgcagccccctgcagacccgaagagctcacttctccaagtacctcttccacctcatcgtctgggaccagcagatctgcttcccagtgcaggtgaaccggctgcctcgggagacactgctgtgtgccactctctatgctctgcccatccccccaccggggagctcctcagaggccaataagcagcggcgggtgcctgaagccctgggctgggtcactaccccactcttcaacttcaggcaggtcctgacctgtggccggaagcttctgggtttgtggccagcaacacaggaaaatcccagcgcccgttggagtgcacctaatttccaccagccagacagtgtcatcctgcagattgacttccccacctcggcctttgacatcaagttcaccagcccccctggagacaagttcagcccccgctatgagtttggcagcctccgggaagaagaccagcgcaagcttaaagacatcatgcagaaagagtccttgtactggctcactgatgctgacaagaagcgcctgtgggagaagcgatattactgccactcggaggtgagctcgctccccctggtgctcgccagcgcccccagctgggagtgggcttgcctgcctgacatctatgttctcctgaagcagtggacccacatgaaccaccaggatgccctggggctcctgcatgccaccttcccggaccaggaggtgcgtcgtatggctgtgcagtggattggctcactctcagatgctgagctgctagactacctgccccagctggtacaggccctgaagtatgaatgctacctggacagcccgttggtgcgcttcctcctgaaacgagctgtgtctgacttgagagtgactcactacttcttctggttactgaaggacggcctcaaggactctcagttcagcatccgctaccagtatctgctggcagccttactgtgctgctgtggcaaggggctgagagaagagtttaaccgccagtgctggcttgtcaatgccctggccaaactggcccagcaggtccgggaggcagccccatctgcaaggcagggaatcctccgcacgggcctggaggaggtgaagcagttctttgccctcaatggctcgtgccgcttgccactcagccccagtctgctggttaagggaattgtgcccagggactgttcctacttcaactccaatgctgtccccctcaaactctccttccaaaatgtggatcccctgggtgagaacatccgtgtcatcttcaagtgtggggacgaccttcgccaggacatgctaacgctgcagatgattcgcatcatgagcaagatctgggtccaggaggggctggacatgcgcatggtcatcttccgctgcttctccaccggccggggcagagggatggtggagatgatccctaatgctgagaccctgcgtaagatccaggtggagcatggggtgaccggctcgttcaaggaccggcccctggcagactggctgcagaaacacaaccctggggaggacgagtatgagaaggctgtggagaactttatctactcctgcgctggctgctgcgtggccacgtacgtcttgggcatctgtgaccgacataatgacaacatcatgctgaagaccactggtcacatgttccacattgattttggccgcttcctgggccatgcccagatgtttggcaacatcaagcgggaccgtgccccctttgtcttcacctcggacatggcgtatgtcatcaacgggggtgacaagccttccagccgcttccatgattttgttgacctttgctgccaagcctacaacctcattcgcaagcacacccacctcttcctcaaccttctgggcctgatgttgtcctgtgggatccctgaactctcagacctggaggacctcaagtatgtgtacgatgccctgaggcctcaggatacagaggccaatgccactacctacttcactaggttgattgagtccagcctgggcagtgtagccacaaagctcaattttttcatccataatctggctcagatgaagttcacgggctcagatgaccggctgaccctctcctttgcctcccgaacacacactctcaagagctctggccgaatcagtgatgttttcctctgccgccatgagaagatcttccaccccaacaaaggctatatatatgtggtaaaggtgatgcgagagaacactcacgaggccacctacatccagcggacctttgaggagttccaggaattacacaataagttgcggctgctcttcccttcttcccacttgcccagcttccctagtcgcttcgtgatcggccgctcccggggagaggcggtggccgagcggcggagggaggagctaaacggttacatctggcacttgatccacgcaccccctgaggtggccgagtgtgatttggtgtacaccttcttccacccactgccccgggatgagaaggctatgggcaccagcccagctcctaagtcctcagatggcacatgggcccggcccgtcggaaaggtgggaggggaggtgaagctgtccatctcctacaaaaacaataaactcttcatcatggtgatgcatattcggggcttgcaactgctccaggatggaaatgaccctgacccctatgtgaaaatttacctccttcctgaccctcagaaaaccactaagaggaaaaccaaagtggcccggaaaacctgcaatcctacctacaatgagatgttggtatatgatgggatccccaagggtgacctgcagcagcgggagctccagctgagcgtgctgagtgagcagggattctgggagaacgtcctcctcggtgaggtgaacatccgcctgcgagagctggacctggctcaggagaagaccggctggttcgccctgggatctcgaagtcatggcaccttgtgagcccagcagagccaccacccagcatcccaggctggtggcaggagctgggggagaggactctcccctgtgagactcctccttgtgaagggccagggccctgggcaggcctccagctcggtccaggtgattctggcctctgtggtaggaggcagggagagtaagacatgctctgctgtctcttcctctggagactgaacttgggttggttgtgatgagcagccccttggaggctgtgaggttgcagcaaagttttaagtttaccttgtgtcaagggagcaatgcttggtttggggagtgtgtggggtgggctgtatgaagtagcattttgggggtgggtgggtggatatcttaatttttatttttaaaaaatgaaatagtgatgttgtcctaactgggacaggaagccttgcgagaagggacgtacctatgccccagaaggcaagagaggaagactatttggactttttgtatgattaaggttcttattggacttttccctaggttttttttttttgttattgttgttgttgtttcgttttctagctataggaactatctggggaggggcccagtgggtcctcggccagagccctctctaaggacaggttggggagggttggggagggctgcctgtgctggactgaggcttgtgccactgggcctttctgattttgcctccaaaggagagcgctgtgatacctacatgtgtaaggaagggccttccgtattggggttctgccaaggacccgtattcagggacccatgctcttttggggggacttttcctcttgtcttccctactttattaggacttgccctgaataccattttctaccccttgcccctccattctcctggcccttctgggggtcagctggtctctatgaatatgctgggggtgcttccccataggtctctcccttcatttgtctctggtgggacaaaatactgactcagtccttagatgtagtttcacccaagagcatcttggccctgggaagaggtccctaggctgcagatgctactgactgcttgctaggtagcctctggaaagcattccccatccatcactccccacttctttctgctgtgctgcttccctcccaaactccatttctgtcaccctttttataagacttttcctcattctgtggggccataaacctatttagtctggagccaaagggatgccctatctgaaggaaaggggcatggggtgggggattccatcaaaactgttgttttttgccccatgatttttctttggtcagtaggaggctggattggagtggtgattattcccctggagctaagctcaggagcccgaagggagagactgagactgactcccttatctcttcatattctttattccctaccagatggatttttttttttttttttggagacggagtctcgccctgtcgccaggctggagtgtagtggcatgatctcgactcactgcaaaatctgcctcccgggttcaagcgattctcctacctcagcctcccgagtagctgggattacaggcatgtgccaccacgccaagctaatttttgtatttttagtagagacggggtttcaccatgttggccaggatggtctcgatctcttgacctcgtgatctgcctgccttggcctcccaaagtgctgggattacaggcgtgagccaccatgccccgccccagatggattttacatttgctcttttgtgtttcgctccaaagggttgtcttcctcgccaaaaggagggagggactttgaatttgatatgaatctttaaaaccagaattggctggatatttcccatgattgggaaaagagtgaaatgaggacattctgtaaactgtccctccctaattccaaggatcagaaactccccgttttgctgactcattccataactggagaaagaagctccattgaccgaagccacagggcagcatggaagtttaaattttctctaaaattaaaatgccaaggataaagctggctgcttccaggagggggaagaggagtggggagtgggcggtgaaacttttccagatgaacggaccataaatgtgttactggctttgtgcctgtagctcattttattatgacctatatgctcctgatttaaagagatctgtgtactgtttacttcccacttcccagaatcccttgtatctcctttctcgggaattgtattttctaataaatgacatttgagaaaaaaaaaaaaaaaaaaaaaa

SEQ ID NO: 74 - protein, 1634 aa, Homo sapiens
MSSTQDNGEHWKSLESVGISRKELAMAEALQMEYDALSRLRHDKEENRAKQNADPSLISWDEPGVDFYSKPAGRRTDLKLLRGLSGSDPTLNYNSLSPQEGPPNHSTSQGPQPGSDPWPKGSLSGDYLYIFDGSDGGVSSSPGPGDIEGSCKKLSPPPLPPRASIWDTPPLPPRKGSPSSSKISQPSDINTFSLVEQLPGKLLEHRILEEEEVLGGGGQGRLLGSVDYDGINDAITRLNLKSTYDAEMLRDATRGWKEGRGPLDFSKDTSGKPVARSKTMPPQVPPRTYASRYGNRKNATPGKNRRISAAPVGSRPHTVANGHELFEVSEERDEEVAAFCHMLDILRSGSDIQDYFLTGYVWSAVTPSPEHLGDEVNLKVTVLCDRLQEALTFTCNCSSTVDLLIYQTLCYTHDDLRNVDVGDFVLKPCGLEEFLQNKHALGSHEYIQYCRKFDIDIRLQLMEQKVVRSDLARTVNDDQSPSTLNYLVHLQERPVKQTISRQALSLLFDTYHNEVDAFLLADGDFPLKADRVVQSVKAICNALAAVETPEITSALNQLPPCPSRMQPKIQKDPSVLAVRENREKVVEALTAAILDLVELYCNTFNADFQTAVPGSRKHDLVQEACHFARSLAFTVYATHRIPIIWATSYEDFYLSCSLSHGGKELCSPLQTRRAHFSKYLFHLIVWDQQICFPVQVNRLPRETLLCATLYALPIPPPGSSSEANKQRRVPEALGWVTTPLFNFRQVLTCGRKLLGLWPATQENPSARWSAPNFHQPDSVILQIDFPTSAFDIKFTSPPGDKFSPRYEFGSLREEDQRKLKDIMQKESLYWLTDADKKRLWEKRYYCHSEVSSLPLVLASAPSWEWACLPDIYVLLKQWTHMNHQDALGLLHATFPDQEVRRMAVQWIGSLSDAELLDYLPQLVQALKYECYLDSPLVRFLLKRAVSDLRVTHYFFWLLKDGLKDSQFSIRYQYLLAALLCCCGKGLREEFNRQCWLVNALAKLAQQVREAAPSARQGILRTGLEEVKQFFALNGSCRLPLSPSLLVKGIVPRDCSYFNSNAVPLKLSFQNVDPLGENIRVIFKCGDDLRQDMLTLQMIRIMSKIWVQEGLDMRMVIFRCFSTGRGRGMVEMIPNAETLRKIQVEHGVTGSFKDRPLADWLQKHNPGEDEYEKAVENFIYSCAGCCVATYVLGICDRHNDNIMLKTTGHMFHIDFGRFLGHAQMFGNIKRDRAPFVFTSDMAYVINGGDKPSSRFHDFVDLCCQAYNLIRKHTHLFLNLLGLMLSCGIPELSDLEDLKYVYDALRPQDTEANATTYFTRLIESSLGSVATKLNFFIHNLAQMKFTGSDDRLTLSFASRTHTLKSSGRISDVFLCRHEKIFHPNKGYIYVVKVMRENTHEATYIQRTFEEFQELHNKLRLLFPSSHLPSFPSRFVIGRSRGEAVAERRREELNGYIWHLIHAPPEVAECDLVYTFFHPLPRDEKAMGTSPAPKSSDGTWARPVGKVGGEVKLSISYKNNKLFIMVMHIRGLQLLQDGNDPDPYVKIYLLPDPQKTTKRKTKVARKTCNPTYNEMLVYDGIPKGDLQQRELQLSVLSEQGFWENVLLGEVNIRLRELDLAQEKTGWFALGSRSHGTL

SEQ ID NO: 75 - DNA, 2554 bp, Homo sapiens
gggaggccggaagttgcggcttcattactcgccatttcaaaatgctgccgaggccctaggatctgtgactgccacccctccccccacccgggctcggcgggggagcgactcatggagctgccgtaagttttaccaacagactgcagtttcttcactaccaaaatgacatcattttccacctctgctcagtgttcaacatctgacagtgcttgcaggatctctcctggacaaatcaatcaggtacgaccaaaactgccgcttttgaagattttgcatgcagcaggtgcgcaaggtgaaatgttcactgttaaagaggtcatgcactatttaggtcagtacataatggtgaagcaactttatgatcagcaggagcagcatatggtatattgtggtggagatcttttgggagaactactgggacgtcagagcttctccgtgaaagacccaagccctctctatgatatgctaagaaagaatcttgtcactttagccactgctactacagatgctgctcagactctcgctctcgcacaggatcacagtatggatattccaagtcaagaccaactgaagcaaagtgcagaggaaagttccacttccagaaaaagaactacagaagacgatatccccacactgcctacctcagagcataaatgcatacattctagagaagatgaagacttaattgaaaatttagcccaagatgaaacatctaggctggaccttggatttgaggagtgggatgtagctggcctgccttggtggtttttaggaaacttgagaagcaactatacacctagaagtaatggctcaactgatttacagacaaatcaggatgtgggtactgccattgtttcagatactacagatgacttgtggtttttgaatgagtcagtatcagagcagttaggtgttggaataaaagttgaagctgctgatactgaacaaacaagtgaagaagtagggaaagtaagtgacaaaaaggtgattgaagtgggaaaaaatgatgacctggaggactctaagtccttaagtgatgataccgatgtagaggttacctctgaggatgagtggcagtgtactgaatgcaagaaatttaactctccaagcaagaggtactgttttcgttgttgggccttgaggaaggattggtattcagattgttcaaagttaacccattctctctccacgtctgatatcactgccatacctgaaaaggaaaatgaaggaaatgatgtccctgattgtcgaagaaccatttcggctcctgtcgttagacctaaagatgcgtatataaagaaagaaaactccaaactttttgatccctgcaactcagtggaattcttggatttggctcacagttctgaaagccaagagaccatctcaagcatgggagaacagttagataacctttctgaacagagaacagatacagaaaacatggaggattgccagaatctcttgaagccatgtagcttatgtgagaaaagaccacgagacgggaacattattcatggaaggacgggccatcttgtcacttgttttcactgtgccagaagactaaagaaggctggggcttcatgccctatttgcaagaaagagattcagctggttattaaggtttttatagcataatggtagtacgaacataaaaatgcatttattccgttcacttaccacattatttgaaaatcaatcctttatttaattttatttccaacctgtcagagaatgttcttaggcatcaaaatccaaggtagctgtaagaaaaatactggagctaacaatgaagaacagaagtaatctgattagtcaaattattaagtgccatggattactttatgcagcagtcaggtacatagttaggtgaacccaaaagaaaaactcttgaaaacaagagatttcttccatgcacatttacaatattgaggtataattaacatgataaagtgtttccttctaacgagttgtagaaatctgagtaaccacccaaaaaagcaatagaatgtttctgtcaccccaaaacactcccttctgcccctcttcagacagtccttcagctatttcatggctctcaccctagttttttttttttttgcactttttttttttccgggggtataggggaggtgtggggcgacagggtctgtcttgttctgtctcccaggctgaagtgcagtgcagtggtatgatcatggctcactgcagccttggtttcctgggcataagtggtcttcccacttcagcctcctgagtagctgagactatagactagcataaccacactggctaattttttgtggagatgaagtctcactatgttgcccaggctggtctcgaactcctgggctcaaacaatcctcccgcctcagccttccaaattgctgggattatagtcatgaggcacctagtctggcccttttgcaagactttaatctgaaatctaaatttttaaaatttaagtacttacaaaggatatactatccaacatattgcatattatatatgtgcttttaaagttttttttttttttttgagagacggtctcactttg

SEQ ID NO: 76 - protein, 490 aa, Homo sapiens
MTSFSTSAQCSTSDSACRISPGQINQVRPKLPLLKILHAAGAQGEMFTVKEVMHYLGQYIMVKQLYDQQEQHMVYCGGDLLGELLGRQSFSVKDPSPLYDMLRKNLVTLATATTDAAQTLALAQDHSMDIPSQDQLKQSAEESSTSRKRTTEDDIPTLPTSEHKCIHSREDEDLIENLAQDETSRLDLGFEEWDVAGLPWWFLGNLRSNYTPRSNGSTDLQTNQDVGTAIVSDTTDDLWFLNESVSEQLGVGIKVEAADTEQTSEEVGKVSDKKVIEVGKNDDLEDSKSLSDDTDVEVTSEDEWQCTECKKFNSPSKRYCFRCWALRKDWYSDCSKLTHSLSTSDITAIPEKENEGNDVPDCRRTISAPVVRPKDAYIKKENSKLFDPCNSVEFLDLAHSSESQETISSMGEQLDNLSEQRTDTENMEDCQNLLKPCSLCEKRPRDGNIIHGRTGHLVTCFHCARRLKKAGASCPICKKEIQLVIKVFIA

SEQ ID NO: 77 - DNA, 3227 bp, Homo sapiens
cagcagacggcagacggtgcccggcgcccacgggaagctgaagatacagcggtaaacaaacctccatgtctcaagctgaccacacttgtatctggacttgccagctgattagctctgttcccaccaggctcgttcaaagacccacagcttgagggggcagagggctgcccctgatggggcctggcaatgactgagcaggcccagccccagaggacaaggaagagaaggcatattgaggagggcaagaagtgacgcccggtgtagaatgactgccctgggagggtggttccttgggccctggcagggttgctgacccttaccctgcaaaacacaaagagcaggactccagactcttcttgtgaatggtcccctgccctgcagctccaccatgaggcttctcgtggccccactcttgctagcttgggtggctggtgccactgccgctgtgcccgtggtaccctggcatgttccctgcccccctcagtgtgcctgccagatccggccctggtatacgccccgctcgtcctaccgcgaggctaccactgtggactgcaatgacctattcctgacggcagtccccccggcactccccgcaggcacacagaccctgctcctgcagagcaacagcattgtccgtgtggaccagagtgagctgggctacctggccaatctcacagagctggacctgtcccagaacagcttttcggatgcccgagactgtgatttccatgccctgccccagctgctgagcctgcacctagaggagaaccagctgacccggctggaggaccacagctttgcagggctggccagcctacaggaactctatctcaaccacaaccagctctaccgcatcgcccccagggccttttctggcctcagcaacttgctgcggctgcacctcaactccaacctcctgagggccattgacagccgctggtttgaaatgctgcccaacttggagatactcatgattggcggcaacaaggtagatgccatcctggacatgaacttccggcccctggccaacctgcgtagcctggtgctagcaggcatgaacctgcgggagatctccgactatgccctggaggggctgcaaagcctggagagcctctccttctatgacaaccagctggcccgggtgcccaggcgggcactggaacaggtgcccgggctcaagttcctagacctcaacaagaacccgctccagcgggtagggccgggggactttgccaacatgctgcaccttaaggagctgggactgaacaacatggaggagctggtctccatcgacaagtttgccctggtgaacctccccgagctgaccaagctggacatcaccaataacccacggctgtccttcatccacccccgcgccttccaccacctgccccagatggagaccctcatgctcaacaacaacgctctcagtgccttgcaccagcagacggtggagtccctgcccaacctgcaggaggtaggtctccacggcaaccccatccgctgtgactgtgtcatccgctgggccaatgccacgggcacccgtgtccgcttcatcgagccgcaatccaccctgtgtgcggagcctccggacctccagcgcctcccggtccgtgaggtgcccttccgggagatgacggaccactgtttgcccctcatctccccacgaagcttccccccaagcctccaggtagccagtggagagagcatggtgctgcattgccgggcactggccgaacccgaacccgagatctactgggtcactccagctgggcttcgactgacacctgcccatgcaggcaggaggtaccgggtgtaccccgaggggaccctggagctgcggagggtgacagcagaagaggcagggctatacacctgtgtggcccagaacctggtgggggctgacactaagacggttagtgtggttgtgggccgtgctctcctccagccaggcagggacgaaggacaggggctggagctccgggtgcaggagacccacccctatcacatcctgctatcttgggtcaccccacccaacacagtgtccaccaacctcacctggtccagtgcctcctccctccggggccagggggccacagctctggcccgcctgcctcggggaacccacagctacaacattacccgcctccttcaggccacggagtactgggcctgcctgcaagtggcctttgctgatgcccacacccagttggcttgtgtatgggccaggaccaaagaggccacttcttgccacagagccttaggggaccgtcctgggctcattgccatcctggctctcgctgtccttctcctggcagctgggctagcggcccaccttggcacaggccaacccaggaagggtgtgggtgggaggcggcctctccctccagcctgggctttctggggctggagtgccccttctgtccgggttgtgtctgctcccctcgtcctgccctggaatccagggaggaagctgcccagatcctcagaaggggagacactgttgccaccattgtctcaaaattcttgaagctcagcctgttctcagcagtagagaaatcactaggactactttttaccaaaagagaagcagtctgggccagatgccctgccaggaaagggacatggacccacgtgcttgaggcctggcagctgggccaagacagatggggctttgtggccctgggggtgcttctgcagcctcgaaaaagttgcccttacctcctagggtcacctctgctgccattctgaggaacatctccaaggaacaggagggactttggctagagcctcctgcctccccatcttctctctgcccagaggctcctgggcctggcttggctgtcccctacctgtgtccccgggctgcaccccttcctcttctctttctctgtacagtctcagttgcttgctcttgtgcctcctgggcaagggctgaaggaggccactccatctcacctcggggggctgccctcaatgtgggagtgaccccagccagatctgaaggacatttgggagagggatgcccaggaacgcctcatctcagcagcctgggctcggcattccgaagctgactttctataggcaattttgtacctttgtggagaaatgtgtcacctcccccaacccgattcactcttttctcctgttttgtaaaaaataaaaataaataataacaataatacgggggaaaggaacgaaaggaaaaaaaaaaaaaaaaaaaaaaa

SEQ ID NO: 78 - protein, 713 aa, Homo sapiens
MRLLVAPLLLAWVAGATAAVPVVPWHVPCPPQCACQIRPWYTPRSSYREATTVDCNDLFLTAVPPALPAGTQTLLLQSNSIVRVDQSELGYLANLTELDLSQNSFSDARDCDFHALPQLLSLHLEENQLTRLEDHSFAGLASLQELYLNHNQLYRIAPRAFSGLSNLLRLHLNSNLLRAIDSRWFEMLPNLEILMIGGNKVDAILDMNFRPLANLRSLVLAGMNLREISDYALEGLQSLESLSFYDNQLARVPRRALEQVPGLKFLDLNKNPLQRVGPGDFANMLHLKELGLNNMEELVSIDKFALVNLPELTKLDITNNPRLSFIHPRAFHHLPQMETLMLNNNALSALHQQTVESLPNLQEVGLHGNPIRCDCVIRWANATGTRVRFIEPQSTLCAEPPDLQRLPVREVPFREMTDHCLPLISPRSFPPSLQVASGESMVLHCRALAEPEPEIYWVTPAGLRLTPAHAGRRYRVYPEGTLELRRVTAEEAGLYTCVAQNLVGADTKTVSVVVGRALLQPGRDEGQGLELRVQETHPYHILLSWVTPPNTVSTNLTWSSASSLRGQGATALARLPRGTHSYNITRLLQATEYWACLQVAFADAHTQLACVWARTKEATSCHRALGDRPGLIAILALAVLLLAAGLAAHLGTGQPRKGVGGRRPLPPAWAFWGWSAPSVRVVSAPLVLPWNPGRKLPRSSEGETLLPPLSQNS

SEQ ID NO: 79 - DNA, 3207 bp, Homo sapiens
gagggcgcccgccgagcctccccggcctgtgcagacggcgcgcgcggcgggagggcgcggaccagcgtccccagcccggccccgggcggaaggcgagcggagcgcggccgcgcgggcagcagacggcagacggtgcccggcgcccacgggggctgcccctgatggggcctggcaatgactgagcaggcccagccccagaggacaaggaagagaaggcatattgaggagggcaagaagtgacgcccggtgtagaatgactgccctgggagggtggttccttgggccctggcagggttgctgacccttaccctgcaaaacacaaagagcaggactccagactcttcttgtgaatggtcccctgccctgcagctccaccatgaggcttctcgtggccccactcttgctagcttgggtggctggtgccactgccgctgtgcccgtggtaccctggcatgttccctgcccccctcagtgtgcctgccagatccggccctggtatacgccccgctcgtcctaccgcgaggctaccactgtggactgcaatgacctattcctgacggcagtccccccggcactccccgcaggcacacagaccctgctcctgcagagcaacagcattgtccgtgtggaccagagtgagctgggctacctggccaatctcacagagctggacctgtcccagaacagcttttcggatgcccgagactgtgatttccatgccctgccccagctgctgagcctgcacctagaggagaaccagctgacccggctggaggaccacagctttgcagggctggccagcctacaggaactctatctcaaccacaaccagctctaccgcatcgcccccagggccttttctggcctcagcaacttgctgcggctgcacctcaactccaacctcctgagggccattgacagccgctggtttgaaatgctgcccaacttggagatactcatgattggcggcaacaaggtagatgccatcctggacatgaacttccggcccctggccaacctgcgtagcctggtgctagcaggcatgaacctgcgggagatctccgactatgccctggaggggctgcaaagcctggagagcctctccttctatgacaaccagctggcccgggtgcccaggcgggcactggaacaggtgcccgggctcaagttcctagacctcaacaagaacccgctccagcgggtagggccgggggactttgccaacatgctgcaccttaaggagctgggactgaacaacatggaggagctggtctccatcgacaagtttgccctggtgaacctccccgagctgaccaagctggacatcaccaataacccacggctgtccttcatccacccccgcgccttccaccacctgccccagatggagaccctcatgctcaacaacaacgctctcagtgccttgcaccagcagacggtggagtccctgcccaacctgcaggaggtaggtctccacggcaaccccatccgctgtgactgtgtcatccgctgggccaatgccacgggcacccgtgtccgcttcatcgagccgcaatccaccctgtgtgcggagcctccggacctccagcgcctcccggtccgtgaggtgcccttccgggagatgacggaccactgtttgcccctcatctccccacgaagcttccccccaagcctccaggtagccagtggagagagcatggtgctgcattgccgggcactggccgaacccgaacccgagatctactgggtcactccagctgggcttcgactgacacctgcccatgcaggcaggaggtaccgggtgtaccccgaggggaccctggagctgcggagggtgacagcagaagaggcagggctatacacctgtgtggcccagaacctggtgggggctgacactaagacggttagtgtggttgtgggccgtgctctcctccagccaggcagggacgaaggacaggggctggagctccgggtgcaggagacccacccctatcacatcctgctatcttgggtcaccccacccaacacagtgtccaccaacctcacctggtccagtgcctcctccctccggggccagggggccacagctctggcccgcctgcctcggggaacccacagctacaacattacccgcctccttcaggccacggagtactgggcctgcctgcaagtggcctttgctgatgcccacacccagttggcttgtgtatgggccaggaccaaagaggccacttcttgccacagagccttaggggaccgtcctgggctcattgccatcctggctctcgctgtccttctcctggcagctgggctagcggcccaccttggcacaggccaacccaggaagggtgtgggtgggaggcggcctctccctccagcctgggctttctggggctggagtgccccttctgtccgggttgtgtctgctcccctcgtcctgccctggaatccagggaggaagctgcccagatcctcagaaggggagacactgttgccaccattgtctcaaaattcttgaagctcagcctgttctcagcagtagagaaatcactaggactactttttaccaaaagagaagcagtctgggccagatgccctgccaggaaagggacatggacccacgtgcttgaggcctggcagctgggccaagacagatggggctttgtggccctgggggtgcttctgcagcctcgaaaaagttgcccttacctcctagggtcacctctgctgccattctgaggaacatctccaaggaacaggagggactttggctagagcctcctgcctccccatcttctctctgcccagaggctcctgggcctggcttggctgtcccctacctgtgtccccgggctgcaccccttcctcttctctttctctgtacagtctcagttgcttgctcttgtgcctcctgggcaagggctgaaggaggccactccatctcacctcggggggctgccctcaatgtgggagtgaccccagccagatctgaaggacatttgggagagggatgcccaggaacgcctcatctcagcagcctgggctcggcattccgaagctgactttctataggcaattttgtacctttgtggagaaatgtgtcacctcccccaacccgattcactcttttctcctgttttgtaaaaaataaaaataaataataacaataatacgggggaaaggaacgaaaggaaaaaaaaaaaaaaa

SEQ ID NO: 80 - protein, 713 aa, Homo sapiens; identical to SEQ ID NO: 78

SEQ ID NO: 81 - DNA, 4492 bp, Homo sapiens
atttagaaaagttttggattcatctgtttatgaggaggaaaagaggccaagaaaaggcagcaatttgtccatgtgcttaattagtgagtggcagtggcagtaacctggtctgctgagctccctggactccctgatcccagctcaaaatagtttccagttttcatctgccagttgcttcggaggcttttctaaggaagacagttcataaaatgacccagaattcatcctccttaggtgataggatcattactccttatacaccccctaggtctcagcctatgaacaaacacttgtttgtttctctgtttaccctgttccaaaccaccgaactggattttgccaacaagaagagctgtttcctgtgcctgcccctgagagctgatggcttcccagagatgcctcacagtcctgcgcagacagagagaatgcagaagctggcaaaggatcctccacacgcaagatcagaggacgtcccagatcatcttttctttgtggatactgcaggtctacgtgaaatagtgtgtttttgcggggtgctgtcccttaggacaagtgaagggctgatgagaaaggaaactgcgtgaggtatcacaaagccatccatggggcagcctatgaaaatatgttcacacggagggaaaatatcagtgttcatatattccttttagtgctgccttcccttttccactcccacaccacccccaaaacattttaaaaagttagttttggaagactgactttgtcttattctaaaatgtgtgcacagtaacagaagtgagaaagtcattccagtcttcatctagtcacctgagtcacaactttaatgcagcttctttttgttcctcaatctttgattacataatcatttgcaaaaatacactcctgaaatgaaatcacagttagccttgcattttggagtagtattagaattaagacttgccatcaaagaggttgccatctagaatgtttattctctttactgtgccccaggggttttacatgcatttgcaactttatttttattttatcctacaggaaaaaaggctcagagtgaatggctattagcctaaggttactcagctagtgatataggagttaagaagaaattatttaggcagatagtgagggtactggagtcctcagaaaggttttccttttaatgaaaagcagccccaaaatctttttcttttctaacaaagagcagcctgtaaaatcgagctgcagacatagacaagcaagctagaagcttgcacaggcgaatgcctgcagttgtgccaacaggaaaaggctacctggaactaggcatgttcaaaatggcagctctgtcttctcttctctttgccagccaggtgtacagtaaggagcagacaacatggcactggccaagtggaaaggctgtttgcataataagattacgatggggtggcctgccttccctgtgtgctacgtaaacatcacacctgatccaaccaatctgcgggccctacataaatcagacaccacctcctccagcctgcctataaaatctggtacactccacgtgggccagaagtcccatttggatgcccctctctttcgcaagagagagagctgttctcctttctctttcttttgcctattacattccgctcctaaagtcacttctcatgtatgtccacgtccttaatcttcttgatgcaagacaatgaacccgggtatttaccccagacaacaacaccacttcactaggagttaaaagaacttgaaatgcaaattcatggtcatctggttccaaagcccatattaacaaaatttttttaattgtgataaaatacacataacataaagttgaccgtgttaactgtttttaaatgtacagtccagtagtgttaagtacattcacattgttgggcaatccttcttcagaactttttaagtttcccaaactgaagctctgcgtctattaagaacaactctttcttccaatccccagctgttggcaactatcattctactttctgtctttatgcatttaataattctacgtacctcatataaatgaaatcaaatggtatttgtaactggcttatttcacttagcataatatcctcaagattcagtcatattgttatatgtgtcataaattgcatttgtaatatcacaaactacaccttgatatattgtctactgattagcatggatttataattatttttatgctttgccttctacattctataaaagaataaaaagttgagttaaaaaccaaaattataataatgaaagtttttacatttgcccatatttttaccttcgctagaaaattttatatggcctagcatccattcattttaacttaagggattctctttcacattccttacagaacaggtctagtagtaatgaatttcctcagcatttttttaaatctgggaagttttaattctttgcttttgaaggacagtattgctggatatagaattcttagtcacaactttttttttctttcagcattttaaatatattatctcactacttttttatttgcaaggtttttgctgagaaatctgctgatagtgttattgaggacacattgtatagctatttttccatttctgttttcaagatttcctttgtctttgatttctcacagttgactatattttagttggatctctttggattatcatacttggagtttgttgagcttcttgtatttgtagattcatgtcttttctcaaatttgggcagtttggggtcattatttctccaaacacagtagtttaccatcacccacagtttcactttccacagtttccattgccaatggtcaacagcagtttgaaaatattaaatgaaaattccagaaataagcaatttataagtttaaatcacatgccatactgagcagtatgatgaaatcttgtgctatcctgctctgttctacctaggacatgaatcatccctctgtctaggatatctacactgtatatactacctgcctgttagtcatttagtagccatctcagttatcagattgactgtcatggtatcacagtgcttttgttcaagcaactcttagtttacttaacaaagtccccaaagtgtaatataggtaatgctggaaatttgggtatgccaaaaaaaaaatgttcatggagtgcttcctttaagtaaaaagttgaaaattcttgacacaaggaagaaaaaaaattatgcgaggtttctaagatctacagtaaaagtaaatctatccatgaaattgtgatggaagaaaaagaaatttgtaagtagtacatatagggtttgatactatatttgggatgttggaacatacccaattgataaaagaggactactgtaagttctctgttctttgtttctctcttctcctaaaacttcataatgagtatattggttcatttggtagtatcccatagtctttcagtctctgtttacttttcttcattcatttttctattggcaccttagcctcaataattttaaatgatctctctttaacgttaaggattttttttctgcctattcaagtctgccattaaaacattaggctggatgcggtggctcacgcctgcagtcccagatttttgggaggctgaggtgggtggataacttgaggtcaggagttcaagaccagcctgactagcgtggtgaagccccgtctccactaaaaatacagaggttggccaggtgtggtggcgtgcacctgtagtcccagctactcgggaggctggggcgggagaatcgcttgaacccagcaggtggaggttgcagtgagccgatatcacaccactgcactcctgcctgggcaaccaagggagactctgtctaaaaaaaaaatacaccgtagtaaatgtttgaattcagttatcgtgtttttcagctccagaattaatttctgttaggttcttttttataacttttatctctgttttgctttgttttgagtcagggtctcactctgtagcataggctggagtgcagtggcacaatcttagcttactgcagcctcaacttccctggcatcaggtggccttcccgcctcggccctactagtggctgggactggaggtgcacgccatcatgcccagctagtttttgatttttagtggaggcggggttttgctgtgttacccaggctggtctctagctcttgggctcggatagtcctcccacctcagcttcctgaagtactgggattgtaggcgtgagctacccggtctgactaatttccatttccttgtgaatatgtgcattttgttcatgtatcttttttatgattttctttacttatctgcctgtgttcttctttggctcatatttaagaatataagcatatttaagacagttgttttaaagtctttgccaagaaagtctgaaaactgtgtttcattagggttagtttctggagatttatttggctctttgaatgtgccgtgcttacctatttctttatatgctttgtggtcttttttattgaaacttgggcatg

SEQ ID NO: 82 - protein, 124 aa, Homo sapiens
MTQNSSSLGDRIITPYTPPRSQPMNKHLFVSLFTLFQTTELDFANKKSCFLCLPLRADGFPEMPHSPAQTERMQKLAKDPPHARSEDVPDHLFFVDTAGLREIVCFCGVLSLRTSEGLMRKETA

SEQ ID NO: 83 - DNA, 2619 bp, Homo sapiens
ttacatttacagtgtagcaaaagagaaagtaactatgttgctgctggagatcaatgaagccgagtgaatgggggctgaatgtgcgagtccatagctgaagaggagcgccagatggtggaggaatacacttatttatgaaactgtcttgagttcttcttgaattgccagttttcagcctcctcatgcctccgtctcctttagacgacagggtagtagtggcactatctaggcccgtccgacctcaggatctcaacctttgtttagactctagttaccttggctctgccaacccaggcagtaacagccaccctcctgtcatcgccaccaccgttgtgtccctcaaggctgcgaatctgacgtatatgccctcatccagcggctctgcccgctcgctgaattgtggatgcagcagtgccagctgctgcactgtggcaacctacgacaaggacaatcaggcccaaacccaagccattgccgctggcaccaccaccactgccatcggaacctctaccacctgccctgctaaccagatggtcaacaataatgagaatacaggctctctaagtccatcaagtggggtgggcagccctgtgtcagggacccccaagcagctagccagcatcaaaataatctaccccaatgacttggcaaagaagatgaccaaatgcagcaagagtcacctgccgagtcagggccctgtcatcattgactgcaggcccttcatggagtacaacaagagtcacatccaaggagctgtccacattaactgtgccgataagatcagccggcggagactgcagcagggcaagatcactgtcctagacttgatttcctgtagggaaggcaaggactctttcaagaggatcttttccaaagaaattatagtttatgatgagaataccaatgaaccaagccgagtgatgccctcccagccacttcacatagtcctcgagtccctgaagagagaaggcaaagaacctctggtgttgaaaggtggacttagtagttttaagcagaaccatgaaaacctctgtgacaactccctccagctccaagagtgccgggaggtggggggcggcgcatccgcggcctcgagcttgctacctcagcccatccccaccacccctgacatcgagaacgctgagctcacccccatcttgcccttcctgttccttggcaatgagcaggatgctcaggacctggacaccatgcagcggctgaacatcggctacgtcatcaacgtcaccactcatcttcccctctaccactatgagaaaggcctgttcaactacaagcggctgccagccactgacagcaacaagcagaacctgcggcagtactttgaagaggcttttgagttcattgaggaagctcaccagtgtgggaaggggcttctcatccactgccaggctggggtgtcccgctccgccaccatcgtcatcgcttacttgatgaagcacactcggatgaccatgactgatgcttataaatttgtcaaaggcaaacgaccaattatctccccaaaccttaacttcatggggcagttgctagagttcgaggaagacctaaacaacggtgtgacaccgagaatccttacaccaaagctgatgggcgtggagacggttgtgtgacaatggtctggatggaaaggattgctgctctccattaggagacaatgaggaaggaggatggattctggttttttttctttctttttttttttgtagttgggagtaagtttgtgaatggaaacaaacttgtttaaacactttatttttaacaagtgtaagaagactataacttttgatgccattgagattcacctcccacaaactgacaaattaaggaggttaaagaagtaatttttttaagccaacaataaaaatataatacaacttgtttctcccccttttccttttaagctatttgtagagtttatgactaaatagtctgtgcaggttcatagaccgaagatactacacactttaaaccaattaaaaagaaccaaaagtaaatagaaaagacattgaatcaccaaggcctgggatcaacctgggctgtccacacagaaaacaaaaacccaaccaaaccaagccctgttgtgctcactggtgcaaagagaagatcagggcagcttaagtggtctaagaatccttcaggcattctttaaggagaaaaaggatacctttgattttgtgtgtttcatgctctggattttttttttttttccttctctgggtttaagagattttttttgaaatagtgaggaactgaccattatatgccttcactggcttcttgtgcaataatatgatgttttaagtgtgcaaacaagttagagctggcagctgaatgatagacaaatagtgcaaatttgccagcttggagatagaaaggaattcaacaatatatcaaatactttccttcccacctttttccttttttttttttttttctgatttgattctggttacagtgccataaaccttgttacatatgtatatcagaatgtaagaaaaaaaaatttatttaaaaatatttttcgcaaaaaaaaaaaaaatcttggtgtgtttctgttgattgtgtaaaaatttattttcattatataaatgaaactgg

SEQ ID NO: 84 - protein, 482 aa, Homo sapiens
MPPSPLDDRVVVALSRPVRPQDLNLCLDSSYLGSANPGSNSHPPVIATTVVSLKAANLTYMPSSSGSARSLNCGCSSASCCTVATYDKDNQAQTQAIAAGTTTTAIGTSTTCPANQMVNNNENTGSLSPSSGVGSPVSGTPKQLASIKIIYPNDLAKKMTKCSKSHLPSQGPVIIDCRPFMEYNKSHIQGAVHINCADKISRRRLQQGKITVLDLISCREGKDSFKRIFSKEIIVYDENTNEPSRVMPSQPLHIVLESLKREGKEPLVLKGGLSSFKQNHENLCDNSLQLQECREVGGGASAASSLLPQPIPTTPDIENAELTPILPFLFLGNEQDAQDLDTMQRLNIGYVINVTTHLPLYHYEKGLFNYKRLPATDSNKQNLRQYFEEAFEFIEEAHQCGKGLLIHCQAGVSRSATIVIAYLMKHTRMTMTDAYKFVKGKRPIISPNLNFMGQLLEFEEDLNNGVTPRILTPKLMGVETVV

SEQ ID NO: 85 - DNA, 2244 bp, Homo sapiens
cttgtatggttgactttgagtgattcccaggatatttaccctgctattgtcttaccataatcttgatgtgtctagcctcttacaaatgagaaaatcctaccgaggaatttcccatttgtaatagtttgtcttggggagcaaagaggaggatagccaatgatcatgatgatctcctcttttctcacgcagagcaggtgttcatgataaaaagcaagtcttttgtgtcttcatgatctgaagagaggaaacaacacggatcaagatgatcctagacctcctaatcatggggatgattacaaggagttgcagaccctactctctattttgcagtgggtggagttgtggataggggtgacccatcagtcattgagaaatgaatctcctgggtgctacttgtgaaagtgaggatcctctctccctttcctgtggatgcagctgagattctggacagcctagacttcttcctcagtgtcagagtaagattgcctcaatggggcggggcaggacacactgctgacctcaccactgggcgccctgggcagccactgcgaggcctcgtcattttcgagttggtgagacaccgcggcagtcgacttggaagatgctctggtggtagaggtggacttagtagttttaagcagaaccatgaaaacctctgtgacaactccctccagctccaagagtgccgggaggtggggggcggcgcatccgcggcctcgagcttgctacctcagcccatccccaccacccctgacatcgagaacgctgagctcacccccatcttgcccttcctgttccttggcaatgagcaggatgctcaggacctggacaccatgcagcggctgaacatcggctacgtcatcaacgtcaccactcatcttcccctctaccactatgagaaaggcctgttcaactacaagcggctgccagccactgacagcaacaagcagaacctgcggcagtactttgaagaggcttttgagttcattgaggaagctcaccagtgtgggaaggggcttctcatccactgccaggctggggtgtcccgctccgccaccatcgtcatcgcttacttgatgaagcacactcggatgaccatgactgatgcttataaatttgtcaaaggcaaacgaccaattatctccccaaaccttaacttcatggggcagttgctagagttcgaggaagacctaaacaacggtgtgacaccgagaatccttacaccaaagctgatgggcgtggagacggttgtgtgacaatggtctggatggaaaggattgctgctctccattaggagacaatgaggaaggaggatggattctggttttttttctttctttttttttttgtagttgggagtaagtttgtgaatggaaacaaacttgtttaaacactttatttttaacaagtgtaagaagactataacttttgatgccattgagattcacctcccacaaactgacaaattaaggaggttaaagaagtaatttttttaagccaacaataaaaatataatacaacttgtttctcccccttttccttttaagctatttgtagagtttatgactaaatagtctgtgcaggttcatagaccgaagatactacacactttaaaccaattaaaaagaaccaaaagtaaatagaaaagacattgaatcaccaaggcctgggatcaacctgggctgtccacacagaaaacaaaaacccaaccaaaccaagccctgttgtgctcactggtgcaaagagaagatcagggcagcttaagtggtctaagaatccttcaggcattctttaaggagaaaaaggatacctttgattttgtgtgtttcatgctctggattttttttttttttccttctctgggtttaagagattttttttgaaatagtgaggaactgaccattatatgccttcactggcttcttgtgcaataatatgatgttttaagtgtgcaaacaagttagagctggcagctgaatgatagacaaatagtgcaaatttgccagcttggagatagaaaggaattcaacaatatatcaaatactttccttcccacctttttccttttttttttttttttctgatttgattctggttacagtgccataaaccttgttacatatgtatatcagaatgtaagaaaaaaaaatttatttaaaaatatttttcgcaaaaaaaaaaaaaatcttggtgtgtttctgttgattgtgtaaaaatttattttcattatataaatgaaactgg

SEQ ID NO: 86 - protein, 140 aa, Homo sapiens
MQRLNIGYVINVTTHLPLYHYEKGLFNYKRLPATDSNKQNLRQYFEEAFEFIEEAHQCGKGLLIHCQAGVSRSATIVIAYLMKHTRMTMTDAYKFVKGKRPIISPNLNFMGQLLEFEEDLNNGVTPRILTPKLMGVETVV

SEQ ID NO: 87 - DNA, 1765 bp, Homo sapiens
ttacatttacagtgtagcaaaagagaaagtaactatgttgctgctggagatcaatgaagccgagtgaatgggggctgaatgtgcgagtccatagctgaagaggagcgccagatggtggaggaatacacttatttatgaagtggacttagtagttttaagcagaaccatgaaaacctctgtgacaactccctccagctccaagagtgccgggaggtggggggcggcgcatccgcggcctcgagcttgctacctcagcccatccccaccacccctgacatcgagaacgctgagctcacccccatcttgcccttcctgttccttggcaatgagcaggatgctcaggacctggacaccatgcagcggctgaacatcggctacgtcatcaacgtcaccactcatcttcccctctaccactatgagaaaggcctgttcaactacaagcggctgccagccactgacagcaacaagcagaacctgcggcagtactttgaagaggcttttgagttcattgaggaagctcaccagtgtgggaaggggcttctcatccactgccaggctggggtgtcccgctccgccaccatcgtcatcgcttacttgatgaagcacactcggatgaccatgactgatgcttataaatttgtcaaaggcaaacgaccaattatctccccaaaccttaacttcatggggcagttgctagagttcgaggaagacctaaacaacggtgtgacaccgagaatccttacaccaaagctgatgggcgtggagacggttgtgtgacaatggtctggatggaaaggattgctgctctccattaggagacaatgaggaaggaggatggattctggttttttttctttctttttttttttgtagttgggagtaagtttgtgaatggaaacaaacttgtttaaacactttatttttaacaagtgtaagaagactataacttttgatgccattgagattcacctcccacaaactgacaaattaaggaggttaaagaagtaatttttttaagccaacaataaaaatataatacaacttgtttctcccccttttccttttaagctatttgtagagtttatgactaaatagtctgtgcaggttcatagaccgaagatactacacactttaaaccaattaaaaagaaccaaaagtaaatagaaaagacattgaatcaccaaggcctgggatcaacctgggctgtccacacagaaaacaaaaacccaaccaaaccaagccctgttgtgctcactggtgcaaagagaagatcagggcagcttaagtggtctaagaatccttcaggcattctttaaggagaaaaaggatacctttgattttgtgtgtttcatgctctggattttttttttttttccttctctgggtttaagagattttttttgaaatagtgaggaactgaccattatatgccttcactggcttcttgtgcaataatatgatgttttaagtgtgcaaacaagttagagctggcagctgaatgatagacaaatagtgcaaatttgccagcttggagatagaaaggaattcaacaatatatcaaatactttccttcccacctttttccttttttttttttttttctgatttgattctggttacagtgccataaaccttgttacatatgtatatcagaatgtaagaaaaaaaaatttatttaaaaatatttttcgcaaaaaaaaaaaaaatcttggtgtgtttctgttgattgtgtaaaaatttattttcattatataaatgaaactgg

SEQ ID NO: 88 - protein, 140 aa, Homo sapiens; identical to SEQ ID NO: 86

SEQ ID NO: 89 - DNA, 8192 bp, Homo sapiens
atgaatactgtaatgtcttttaggtttgtactggaaggaaaagaaattcgtatcaatatgtcttgtgcggtatttatcaccatgaatcccagatacggaggtggagtagagctcccagataacttaaaatctctgtttcgcccagtggcaatgatggtgccccattatcaaatgattgctgaaataatattgttttcatttggtttcaaatctgcaaattcactctctggaaagctaactaacctttatgaattagcgcgcaaacagctctcacaacaggatcattataattttggcttgagatctctgaagatagttttaataatggctggaacgaagaaacgggagtttaaatgtgataccagtgacagtctttctgaagcagatgaaaccttgattgttatcgaggctataagagaagctagtttgccaaaatgtcctcctgaagatgtcccactttttgaaaatattataggagatatttttccagaagtgacagttttgaaagtaaatcaacttgccttggagaaagtaatatatactgcaactcagcaattgggtttacaaaactggtcatctcagaaagagaagattatacagttttataatcaacttcaggtttgtgttggtgtgatgttagtgggcccaacaggtggaggaaagacaacagtcagaagaattttggaaaaagcattaacgctattaccaattgcagacttcttatcagttgcagaaagaaaatctgcttcaaagatttcagaaagaaaaggaaaagtagatatttgtgttttaaatccaaagtgtgtcactctcagtgaactatatggacaactggatcctaatactatggaatggactgatggattattatcagcaacaattcgaagttatgtatattttaacacaccaaagaacacaaagaaagacattgatctcagactaaagtcaagaatctcagatttatccaatgtaaatcagggatttcgtcttggtttagattcattgctggttttcaaacttgattcctctgatacaacagagactgatgataatatttttgaggagatagagaaagttgttaaaattccagaaaatcacaattttgattggcagtggattatcctagatggcccagtggacaccttttgggtagaaaatctgaactctgtgctagatgatactagaacattgtgcctagcaaacagtgagagaatagctttaactaataaaataagagtgatttttgaagtggacaatctctctcaggccagtcctgctactgtcagccgatgtgccatggtctatatggatcctgttgatctgggatgggaaccttatgttaagtcatggcttctgaaaacttctaaaattataagtcaatcaggagtggattgtcttgaattcatgattaaaaatagtgtcacagacggactacaatttataaggaatcgtcagaaatttcagccatatcctatggaggacataacagtcgtcataaccctctgcagaattcttgatgctttctttgacttcatgggtaaaaatggaggatttgaacaaaagtcagaccacttttccatagggcagctgcagtttattggaggtccacttcagaccctacttgcctcagttttttccttacctggaggtattaccagtgaaggatttgaaacagcaaagatggtagcctactccttcctgtggaagctctgtcccaaggggatactgacctgtttccggcctgaacgctcctataggagggatgaaaatacatggtatccagagaaaaatcctgataaattaacaaaaattattcaaaagctttttgtgtttgcctttacttgggcatttggaggagctttaaaccgtgaagatgaacacagagaaaatataccattttgtcccagtcttgaacctgattctcttgcaaaagtaacatacgattttgacaaacttgttcatgaattatttggaaacagttcacaagtaggcatcaacctaccaactggtgaatgttccatctttggatattttgtggatatagagcaatgtgaattcataccttggtcagatttagttcctaatgatcagacactaattcaaagaggaacttcattactaactaatcttcaaagatctggcggaaacttcttgaagataacagaatgtggagaatgcattaattataccgctaccagagacacaacatgcctttcttttctcatgagccttcttttaaagaattcctgccctgtacttctcacaggagaatctggtgttgggaaaactgctgccattaatcaaatgcttgaaaagctagagggtccaggagcatttgacataaaacatggttcaattttaggagacaccctattatatagtgaaataaaaaaatcaagtagcctaaaacagaatatcaccatcttgattcctgaaactcataagacagcaactggaagttcagataatcccactaaaaagccagaagttagaactaataaaaagttacttaaaaataatgatcataaaggagttgtagtctctacaataaattttagcaccaatgtaacagctgccaaaaccaaggagatgattcttaagaagttaataagaagaactaaagatactcttggagcaccaaaaaacaaccggattctaatatttattgatgatatgaatatgccagtatcagatatgtatggagcacagccacccctggaattgataagacaattgttagatttgggaggagtttatgatactgaaaaaaatacatggaagaatattcaagatctgtctatagttgcagcttgtgttccagttgtgaatgatatcagcccacgtcttctcaaacacttttccatgctggtattacctcatccttcacaagacatcttatgtactattttccagcttctcctaggattgctgcaagctgacaggactgttgttaactccaaagagatggctgctctgctctttgttcatgaagccacccgagtatttcacgatcgcttaattgatttcactgataaaagccttttctatcggttgctttcaagggaacttgagaactgttttcagattcagtggacccaagaaaacctgatgaatcactcaactgtatttttggacttcttggatataaacaagactcatagaaaaaagatttatcagaataccagtgactataataaacttgccagtgtacttgatgaattccaaatgaagttgggttcaatttctttggagctttctcattccatggtgttcttcaaggaagccatagaacacatcataagagcaacaagggttcttcgacaaccagggagtcacatgttactgattggaatagatggatgtgggaaaaaaacatgtgcaaccttggcctgttatttgacagataataaactataccgagtgcctatatctcacaaatgtgcctacatcgaattcaaagaagtctttaaaaaggtgtttattcacgcaggattaaaagggaaacccactgttctgatggttcccaatttaaacatagaacaagactcatttttagaagatttgaactacatcatcagttcaggaagaatacctgacctgtttgaaaatgttgagctggattctattgcaatgaaaatcagatatcttactgaacaatctggtcatatggataataggcaatctttactttcattctttcaaaagagaatatataaaaatcttcatatttttgtgatcatgagtcctgaaggacctagcttccgccaaaattgtagagtgtatccttctatgattagctcctgcacgatcgattggtatgagaggtggccagaagaagctctccttattgtagctaactcattcttaaaagaaaaggtcaattttgagaacagagagaacttgaaagaaaaacttgccccaacatgtgtccaaatccacaaaagcatgaaagacttgaacagaaaatactttgaagaaactggaagattttattataccactcccaatagctacttgcaatttatggaaacatttgcacacattttgagggcacgagaggaagagatgcaaacaaagagggatcgcttccatatgggtctatccacaatcctggaagcaaccactctagttacagaaatgcaagaagagctcttgattcttggccctcaagtagaacaaaaaacaaaggaaacagaaactctaatggaaaaactacggaaagattcacaagtagttgagaaagttcagatgcttgttaaacaggatgaagaaattgtggcagaagaagtaagaattgtggaagattatgctcagaaaactgccaatgaactaaaaagtgtgctgccagcctttgacaaggcaattgtggctctgaatgccctggataaagctgatgtcgctgaattaagagtatacacacggcctcccttccttgtactgactgtcatgaatgcagtgtgtattcttctgcaaaagaaacctaactgggcaacggcaaagttacttctttcagaaactggtttcctgaaaaaattgattaaccttgacaaggacagcatacctgataaggttttcgtgaagctaaaaaaaattgtaaccttacctgatttcaacccacacaagatttcgctggtttctgttgcttgttgctccctgtgccagtgggttatagctttgaataactaccatgaagtacagaaggttgtgggccctaaacaaatccaagtagctgaagctcaaaacgtccttaaaattgcgcgacaaagacttgctgagaaacaaagaggtttacagctggttgaagaacatttgctgtttttacaggcagcttacaaagataccgttgctgaaaaacaactattagcaaatcggaaaacaatggccagcaggcgctttcagtgtgcgtcagtcttactaactgtcctggaagatgagaagatcagccgatggcataatcagggactgcctcatggtcagtattcagtagagaatgccatcttgatcaagaatggccagcagtggccactgctgattgacccacataggcaagctcacaaatggatccgtcagatggaaggatccaggctgcagaagctctccattgaagacagcaattataccaaaaaaattgaaaatgctatgaagacaggagggagtgtcctcctgcagaatctccttgagacattagctccaggcttaaaggcaattctgaaaaaggatatctatcagaaaaaaggacactatttcataagggttggtgatgctgagttcgaatacaattcaaattttaggttatacttatctacagaaatagacaacccccattttcttccatcagtttataactttgttactatgatcaacttcactgtaacattccaaggtttgcaagatcaactcttgtctactgtggtaactcatgaagttcctcatttagaagatcaacgttccaagttactggagagtatttcccttgatgccataactcttgaagaactagaggaaaaaacattaaatttactgcagaaagcactaggatccatattagatgatgacaaaattgtagataccttaagaaaatccaaaatgacatcaaacgaaatttcaaagcgcatcgaagcaacaaaaaaagctgaaagtgaaatccaagcaatacgtaaaaactatctccccattgcgacccgaggcgccctgctctacttcctagtagctgatctcacacaaatcaactacatgtaccagttctccctagactggtttcatcaggtttttgtttcatcagtagtttccaaaagcaaagaacaagaacatagttttaaaagggagaaagtgtctccaaaagaagttcatgagtttataagtatttcaaaagaacccaacctggaaaatgagaaaaatctcttagataagcatattaaaagtgcaatagacatgttgacaaaaagtatttttaaggtggtttcttcagctctatttaatgaagataaactttgcttctcttttcggctttgcactgtaatcatgcaaaacaatgctaatggaaatctaatacaggatgacattggattcctaccagaagaagaatggaacatctttttatattctggcatattgataaatattaaaagtgcattatcccagtctagacttactagcacatttgaaataggtgaaagtcaacatcttcagtggctgtcagattccaggtggaggcagtgccaatatgtcagcactcacctggaaccattttcacttctgtgcaaatcccttttatcaaacgtatcacaatgggatacttttaagaacagtaaagcagtttattctctgatcagcacacctttctcttcagaaaatgcttcattggaggaaaatacaaaaccaccagaggaaagtaaaagttcttagaccagaaagtttaaacaattcagtgagaaagtttataactgaaaaaatgggaaataagtatcttcaaagaactggagttaatttgaaagatgcatataaaggatccaatgccagaactccgctgatacttattcaaactcatgggatcgaccttaccaatatcctcctgagatttgcacaagagttaaaaggaacaacacatcatgtgaccataatttctctgggccgtgaccaagcagctaaagctgaagacctcattttaaaggcactaacaaaaacacaacaatgggtcttcctccagaactgccatcttgcaacatcatttatgccaaggctttgcacaattgtagaatcttttaatagtccaaacgtgacaatagaccctgagtttcggctatggttaagctcaaaatcatacagttcttttccaattcctgttcttaaaaagggtttaaagattgccgtggaatctccccagggattgaaaagtaacttacttcagacatttggatgtactgggagtggagaggttgccattaaggtgttggaaaattccctgagaggacagcccagcatttcgtggcaagcactgcgctacctgattggagaagtgatttacggtggccgggtgattgataattgggacaagcgatgcttgaagaccctactctacaaattttgtaatcctgaagtgctgaaagatgacttcagtttctccagtgatgggatatgtctgccagttccaggatctgcaagcataaaggactacatacacattatccagtccttacctgatgatgaccttcccgaggtcttaggaatacacccagaggccatcaggagctgctgggagacccagggcgaaaagtttattgaaaatctgattgccatgcaaccaaaaactaccactgccaacctcatgatcagacctgagcagagtaaggatgaactggtgatggaaattctatccgacttgctaaagcggctgccactgacagtggagaaagaagaaattgctgttggaactccaagcacattgaagagcatgatgtcaagctccatttgggagtctctttctaaaaatctcaaagatcacgacccccttatccattgtgtcttgctaacctttttgaagcaagaaattaaacgatttgataagttattatttgtcatacataaatccttaaaagatcttcagcttgctataaaaggagagatcatcctcacccaagaattggaggaaatatttaactcttttcttaatatgagagtgcctacattgtggcagaaacacgcctacagatcttgtaagccactgagttcctggattgatgatctcatccagcgactgaatttcttcaatacttgggccaaagtggcttatactgcaatacagcgtcggtatatgagatttgtcacagtttggaagcagtctattccatcaactagccaaaaatgcaaacaccctgaggattcagagaacaatttctttgaagggtttccttcaagatactggctcccagctttcttctttccacaagcctttcttgctgctgtgcttcaagactatgggaggtcccgaggaatcgctgtggatgccctcaccttcacccaccatgtgatttccaacaccactgacaaggatgagaagttctccgtatttatgccaaagaaactcaacatagtcaggagagcgtttaagggttctcacagtttctggtccactggggatacttcttgttttccggtgctttcatagttgcattctgggatttggagtgggagga

SEQ ID NO: 90 - protein, 2134 aa, Homo sapiens
MNTVMSFRFVLEGKEIRINMSCAVFITMNPRYGGGVELPDNLKSLFRPVAMMVPHYQMIAEIILFSFGFKSANSLSGKLTNLYELARKQLSQQDHYNFGLRSLKIVLIMAGTKKREFKCDTSDSLSEADETLIVIEAIREASLPKCPPEDVPLFENIIGDIFPEVTVLKVNQLALEKVIYTATQQLGLQNWSSQKEKIIQFYNQLQVCVGVMLVGPTGGGKTTVRRILEKALTLLPIADFLSVAERKSASKISERKGKVDICVLNPKCVTLSELYGQLDPNTMEWTDGLLSATIRSYVYFNTPKNTKKDIDLRLKSRISDLSNVNQGFRLGLDSLLVFKLDSSDTTETDDNIFEEIEKVVKIPENHNFDWQWIILDGPVDTFWVENLNSVLDDTRTLCLANSERIALTNKIRVIFEVDNLSQASPATVSRCAMVYMDPVDLGWEPYVKSWLLKTSKIISQSGVDCLEFMIKNSVTDGLQFIRNRQKFQPYPMEDITVVITLCRILDAFFDFMGKNGGFEQKSDHFSIGQLQFIGGPLQTLLASVFSLPGGITSEGFETAKMVAYSFLWKLCPKGILTCFRPERSYRRDENTWYPEKNPDKLTKIIQKLFVFAFTWAFGGALNREDEHRENIPFCPSLEPDSLAKVTYDFDKLVHELFGNSSQVGINLPTGECSIFGYFVDIEQCEFIPWSDLVPNDQTLIQRGTSLLTNLQRSGGNFLKITECGECINYTATRDTTCLSFLMSLLLKNSCPVLLTGESGVGKTAAINQMLEKLEGPGAFDIKHGSILGDTLLYSEIKKSSSLKQNITILIPETHKTATGSSDNPTKKPEVRTNKKLLKNNDHKGVVVSTINFSTNVTAAKTKEMILKKLIRRTKDTLGAPKNNRILIFIDDMNMPVSDMYGAQPPLELIRQLLDLGGVYDTEKNTWKNIQDLSIVAACVPVVNDISPRLLKHFSMLVLPHPSQDILCTIFQLLLGLLQADRTVVNSKEMAALLFVHEATRVFHDRLIDFTDKSLFYRLLSRELENCFQIQWTQENLMNHSTVFLDFLDINKTHRKKIYQNTSDYNKLASVLDEFQMKLGSISLELSHSMVFFKEAIEHIIRATRVLRQPGSHMLLIGIDGCGKKTCATLACYLTDNKLYRVPISHKCAYIEFKEVFKKVFIHAGLKGKPTVLMVPNLNIEQDSFLEDLNYIISSGRIPDLFENVELDSIAMKIRYLTEQSGHMDNRQSLLSFFQKRIYKNLHIFVIMSPEGPSFRQNCRVYPSMISSCTIDWYERWPEEALLIVANSFLKEKVNFENRENLKEKLAPTCVQIHKSMKDLNRKYFEETGRFYYTTPNSYLQFMETFAHILRAREEEMQTKRDRFHMGLSTILEATTLVTEMQEELLILGPQVEQKTKETETLMEKLRKDSQVVEKVQMLVKQDEEIVAEEVRIVEDYAQKTANELKSVLPAFDKAIVALNALDKADVAELRVYTRPPFLVLTVMNAVCILLQKKPNWATAKLLLSETGFLKKLINLDKDSIPDKVFVKLKKIVTLPDFNPHKISLVSVACCSLCQWVIALNNYHEVQKVVGPKQIQVAEAQNVLKIARQRLAEKQRGLQLVEEHLLFLQAAYKDTVAEKQLLANRKTMASRRFQCASVLLTVLEDEKISRWHNQGLPHGQYSVENAILIKNGQQWPLLIDPHRQAHKWIRQMEGSRLQKLSIEDSNYTKKIENAMKTGGSVLLQNLLETLAPGLKAILKKDIYQKKGHYFIRVGDAEFEYNSNFRLYLSTEIDNPHFLPSVYNFVTMINFTVTFQGLQDQLLSTVVTHEVPHLEDQRSKLLESISLDAITLEELEEKTLNLLQKALGSILDDDKIVDTLRKSKMTSNEISKRIEATKKAESEIQAIRKNYLPIATRGALLYFLVADLTQINYMYQFSLDWFHQVFVSSVVSKSKEQEHSFKREKVSPKEVHEFISISKEPNLENEKNLLDKHIKSAIDMLTKSIFKVVSSALFNEDKLCFSFRLCTVIMQNNANGNLIQDDIGFLPEEEWNIFLYSGILINIKSALSQSRLTSTFEIGESQHLQWLSDSRWRQCQYVSTHLEPFSLLCKSLLSNVSQWDTFKNSKAVYSLISTPFSSENASLEENTKPPEESKSS

SEQ ID NO: 91 - DNA, 2194 bp, Homo sapiens
atgggaaataagtatcttcaaagaactggagttaatttgaaagatgcatataaaggatccaatgccagaactccgctgatacttattcaaactcatgggatcgaccttaccaatatcctcctgagatttgcacaagagttaaaaggaacaacacatcatgtgaccataatttctctgggccgtgaccaagcagctaaagctgaagacctcattttaaaggcactaacaaaaacacaacaatgggtcttcctccagaactgccatcttgcaacatcatttatgccaaggctttgcacaattgtagaatcttttaatagtccaaacgtgacaatagaccctgagtttcggctatggttaagctcaaaatcatacagttcttttccaattcctgttcttaaaaagggtttaaagattgccgtggaatctccccagggattgaaaagtaacttacttcagacatttggatgtactgggagtggagaggtaacagaagagatatttgaaaatcctgactgtggacaatggtggaaaaaacttttatttagcctatgttttttcaatgctgtaatcaatgaaagaaaaaattacggaatattgggctggaatattgcttataaatttaattcttcagacttgggggttgccattaaggtgttggaaaattccctgagaggacagcccagcatttcgtggcaagcactgcgctacctgattggagaagtgatttacggtggccgggtgattgataattgggacaagcgatgcttgaagaccctactctacaaattttgtaatcctgaagtgctgaaagatgacttcagtttctccagtgatgggatatgtctgccagttccaggatctgcaagcataaaggactacatacacattatccagtccttacctgatgatgaccttcccgaggtcttaggaatacacccagaggccatcaggagctgctgggagacccagggcgaaaagtttattgaaaatctgattgccatgcaaccaaaaactaccactgccaacctcatgatcagacctgagcagagtaaggatgaactggtgatggaaattctatccgacttgctaaagcggctgccactgacagtggagaaagaagaaattgctgttggaactccaagcacattgaagagcatgatgtcaagctccatttgggagtctctttctaaaaatctcaaagatcacgacccccttatccattgtgtcttgctaacctttttgaagcaagaaattaaacgatttgataagttattatttgtcatacataaatccttaaaagatcttcagcttgctataaaaggagagatcatcctcacccaagaattggaggaaatatttaactcttttcttaatatgagagtgcctacattgtggcagaaacacgcctacagatcttgtaagccactgagttcctggattgatgatctcatccagcgactgaatttcttcaatacttgggccaaagtggcttatactgcaatacagcgtcggtatatgagatttgtcacagtttggaagcagtctattccatcaactagccaaaaatgcaaacaccctgaggattcagagaacaatttctttgaagggtttccttcaagatactggctcccagctttcttctttccacaagcctttcttgctgctgtgcttcaagactatgggaggtcccgaggaatcgctgtggatgccctcaccttcacccaccatgtgatttccaacaccactgacaaggatgagaagttctccgtatttatgccaaagaaactcaacatagtcaggagagcgtttaagggctcagcttcctctcacactggagtttacatttttggtttattcatcgagggggcaagatggaatcgtgaacagaaaatactggaagactcgctgcctctggagatgtgctgtgattttcccgacatatactttttgccaacaaagatttctaccaaaacaccaaatgcttccaaccagacagattcagaactctatgcttttgaatgcccagtttaccagacacctgagaggtcaagaattttggcaactaccggtttaccaacaaactttttaacatcagtgtatttatcaacgaagaaacctcctagtcactggatcacaatgcgggttgcattgctttgtgagaagaatgaaaaataaatgtccatatcaaaccatt

SEQ ID NO: 92 - protein, 724 aa, Homo sapiens
MGNKYLQRTGVNLKDAYKGSNARTPLILIQTHGIDLTNILLRFAQELKGTTHHVTIISLGRDQAAKAEDLILKALTKTQQWVFLQNCHLATSFMPRLCTIVESFNSPNVTIDPEFRLWLSSKSYSSFPIPVLKKGLKIAVESPQGLKSNLLQTFGCTGSGEVTEEIFENPDCGQWWKKLLFSLCFFNAVINERKNYGILGWNIAYKFNSSDLGVAIKVLENSLRGQPSISWQALRYLIGEVIYGGRVIDNWDKRCLKTLLYKFCNPEVLKDDFSFSSDGICLPVPGSASIKDYIHIIQSLPDDDLPEVLGIHPEAIRSCWETQGEKFIENLIAMQPKTTTANLMIRPEQSKDELVMEILSDLLKRLPLTVEKEEIAVGTPSTLKSMMSSSIWESLSKNLKDHDPLIHCVLLTFLKQEIKRFDKLLFVIHKSLKDLQLAIKGEIILTQELEEIFNSFLNMRVPTLWQKHAYRSCKPLSSWIDDLIQRLNFFNTWAKVAYTAIQRRYMRFVTVWKQSIPSTSQKCKHPEDSENNFFEGFPSRYWLPAFFFPQAFLAAVLQDYGRSRGIAVDALTFTHHVISNTTDKDEKFSVFMPKKLNIVRRAFKGSASSHTGVYIFGLFIEGARWNREQKILEDSLPLEMCCDFPDIYFLPTKISTKTPNASNQTDSELYAFECPVYQTPERSRILATTGLPTNFLTSVYLSTKKPPSHWITMRVALLCEKNEK

SEQ ID NO: 93 - DNA, 3806 bp, Homo sapiens
gcgcccggcttgcgggactgcggggcgcgagagcgcggccgggtagcgtcgcgcgcgtggatctgccgccgggttgctgtgcgactattctccgggagccgtccgtgtcaccgccggaacctggcgcaggttaattatagaaaatgccaagtaggaaatttgccgatggtgaagtggtaagaggtcgatggcctgggagttcactttattatgaagtagaaattctgagccacgacagcacctcccagctttacactgtgaagtataaagatggaacagagcttgaattgaaagagaatgatattaagcctttaacttcctttaggcaaaggaaaggtggctcaacttccagttccccttccagacgccgagggagtcgatcaaggtcacgctcccgatcccctggtcgaccacctaaaagtgcccgccgatctgcttctgcttcccaccaggccgacattaaggaagcaaggagggaagtggaagttaaattgactccgctgattctgaagccatttggaaatagcatcagcagatataatggggagcctgagcatattgagagaaatgacgcacctcataaaaatacacaggaaaaattcagtttgtcacaagaaagcagttacatagcaacacagtatagccttcgtccaagaagagaagaagtcaaattaaaagaaatagattctaaggaagaaaaatacgttgcaaaagaactggcagtgagaacctttgaagtgacccccatccgggcaaaggacttggagtttggaggagtacctggtgtgtttctcatcatgtttggcctgcctgtgttcctcttcctgttgctgttgatgtgtaaacagaaagatcccagtcttctgaatttccctcctcctttgccagctttgtatgagttatgggaaaccagagtatttggggtctacctcctgtggtttttgattcaagtcctgttctacctactgccaattggaaaggttgtagaaggaacgcctcttattgatggaagaagactcaagtatagattaaatggattctatgcttttatcctgacatctgcagtcatcggaacatctctcttccagggcgtagagtttcattacgtgtacagtcattttcttcagtttgcacttgcggccactgttttttgtgtggtcttgagtgtgtatctctacatgcgctctttgaaagcgccccggaatgacctgtcgcctgccagctctggaaatgctgtctatgatttcttcattggccgtgaattaaaccctcgaattggtacttttgatctcaaatacttttgtgaattgcgccccggattgattggatgggtggttattaacttggtgatgcttttggctgaaatgaaaatacaggaccgcgctgttccatccttggccatgattttagttaatagtttccagcttctctatgtggtggatgctctctggaatgaggaagcgttgttgacgaccatggacatcatccacgatggatttggattcatgctggcttttggagacttggtgtgggttccctttatttacagcttccaagccttttatttagtcagtcatccaaatgaagtgtcttggccaatggcttctctaattattgttctgaaactttgtggttatgtaatcttccgaggtgcaaattctcagaaaaatgcattccggaaaaatcccagtgatccaaagcttgcacatttaaaaaccattcatacttcaacgggaaaaaatcttctagtttctggatggtggggctttgttcgccaccccaattacttgggtgatctcatcatggccttggcgtggtccctcccatgtggttttaaccacattctgccttatttctacataatttatttcaccatgttgcttgtccaccgagaagctcgtgacgagtaccactgtaagaagaaatacggcgtggcttgggaaaagtactgtcagcgtgtgccctaccgtatatttccatacatctactaatgctcttctggcttttctacaaaatactcctgcaattccagctgccatttgcaaaaacaaggaaaaaaatccgaaactttcttttgttgcactgacagggtctgtacttttttttttctttttgagtcaggactatggagccgagtagttgatcttttaatatagccgtgtttacttgtattaacttacagttaacataggaaaaatacaagtaaggatgtgagaatttgcattttaatgggaaattttcaacccttaatctgaaaacagaagacagtcttaatataaatgtactgtgaagaatgctattgatgtttatggtttctgattacttttcaaattttgatgtttttttgccagttggcttttcttaaatgaaaacactgttccatttaaagtacatttatgttttattcagtaagagaatagaattttcatttgtttttctttaaatcctttactaattatataatttgaaagcaaaaagaagggcctatattaaatgctgaaagtgaaaagtgatgacattattagcagacactgcttaaaggagaccatttgtagcagttggcttaacctcaacttctaaaactacattgaaaatgtaaatacatagcttagttttttgtaatatatggtgacttcagatttttttgtacagtattttgaatgtgagatgattgtcaggactaactgtctttttaacaaaacattttcagtattttaaataaaattttgtaaagtaatgtgaattaaaaattttggaacaattagaattcattcactattgtatagaagatgctgttaaaacataggaagggtatttttcttgatccaaagtttgtgaatttggctttgctacctcaattgcaggtgtttgtttgcctttataaactgttgcaaatagaaaaaaaatagaataagtatatatttttggagtaacatcaatatttaaacatttttacacagatcggtgtttgaaaatttgccatttcaggctaatatttttatatatttttgactttttaaaagttcatcagtgtttttgctactgttaagcttatgcagtttatactgtattttttatgtatcctttatatttaccaaacctgactccctgtaaaggagtgctgtcttaaaaacaactgaaggggttaaagtcgtttcttttagtttaatagatgtgcataaggtagctttagcaattaaattctagtgaagttgatatagtctcatttttaattgtcctgtaatggaacagtagcaaattcactaaacttttgtgttcagagttaaattgttctcagtactttcaatgtaggggaatgtaataaacatagtgtgtatgtttgggttttaattacacattttatatatgagccatttagatatgcagtgttaattctatactgcatttgaagtgtatgtaacttagcttatgttaatgcagtcatgaagttggtttgctccagcatccggtagtctttaaacattcttttagtgaaattgtcattgttttatcagtgctaatgtgtgcaagcagtttttttattttgcttttctcctggcatcagaaagtggtggcgttttctgtactggattgcaccaaggaagcttttggggaggaaggaaggacattaaattctttccctggtaatgaaaagagccctttatcaatacagtgctgcaatttctggatatcagctacactttgtttttaagtttgtttttgacatgtttatttggcaaattttataatgaagttttaagttgaaaataaaatgtagcaacattttgatcaaaaaaaaaaaaaaa

SEQ ID NO: 94 - protein, 615 aa, Homo sapiens
MPSRKFADGEVVRGRWPGSSLYYEVEILSHDSTSQLYTVKYKDGTELELKENDIKPLTSFRQRKGGSTSSSPSRRRGSRSRSRSRSPGRPPKSARRSASASHQADIKEARREVEVKLTPLILKPFGNSISRYNGEPEHIERNDAPHKNTQEKFSLSQESSYIATQYSLRPRREEVKLKEIDSKEEKYVAKELAVRTFEVTPIRAKDLEFGGVPGVFLIMFGLPVFLFLLLLMCKQKDPSLLNFPPPLPALYELWETRVFGVYLLWFLIQVLFYLLPIGKVVEGTPLIDGRRLKYRLNGFYAFILTSAVIGTSLFQGVEFHYVYSHFLQFALAATVFCVVLSVYLYMRSLKAPRNDLSPASSGNAVYDFFIGRELNPRIGTFDLKYFCELRPGLIGWVVINLVMLLAEMKIQDRAVPSLAMILVNSFQLLYVVDALWNEEALLTTMDIIHDGFGFMLAFGDLVWVPFIYSFQAFYLVSHPNEVSWPMASLIIVLKLCGYVIFRGANSQKNAFRKNPSDPKLAHLKTIHTSTGKNLLVSGWWGFVRHPNYLGDLIMALAWSLPCGFNHILPYFYIIYFTMLLVHREARDEYHCKKKYGVAWEKYCQRVPYRIFPYIY

SEQ ID NO: 95 - DNA, 3789 bp, Homo sapiens
tgtgtttcggtgtgtaacgcataaaacttcttgttccacgctccgcggtgttggggattttctactgcatctcgacagcatctcgggtaacaaccgagcccctcctcgcagcgttaattatagaaaatgccaagtaggaaatttgccgatggtgaagtggtaagaggtcgatggcctgggagttcactttattatgaagtagaaattctgagccacgacagcacctcccagctttacactgtgaagtataaagatggaacagagcttgaattgaaagagaatgatattaagcctttaacttcctttaggcaaaggaaaggtggctcaacttccagttccccttccagacgccgagggagtcgatcaaggtcacgctcccgatcccctggtcgaccacctaaaagtgcccgccgatctgcttctgcttcccaccaggccgacattaaggaagcaaggagggaagtggaagttaaattgactccgctgattctgaagccatttggaaatagcatcagcagatataatggggagcctgagcatattgagagaaatgacgcacctcataaaaatacacaggaaaaattcagtttgtcacaagaaagcagttacatagcaacacagtatagccttcgtccaagaagagaagaagtcaaattaaaagaaatagattctaaggaagaaaaatacgttgcaaaagaactggcagtgagaacctttgaagtgacccccatccgggcaaaggacttggagtttggaggagtacctggtgtgtttctcatcatgtttggcctgcctgtgttcctcttcctgttgctgttgatgtgtaaacagaaagatcccagtcttctgaatttccctcctcctttgccagctttgtatgagttatgggaaaccagagtatttggggtctacctcctgtggtttttgattcaagtcctgttctacctactgccaattggaaaggttgtagaaggaacgcctcttattgatggaagaagactcaagtatagattaaatggattctatgcttttatcctgacatctgcagtcatcggaacatctctcttccagggcgtagagtttcattacgtgtacagtcattttcttcagtttgcacttgcggccactgttttttgtgtggtcttgagtgtgtatctctacatgcgctctttgaaagcgccccggaatgacctgtcgcctgccagctctggaaatgctgtctatgatttcttcattggccgtgaattaaaccctcgaattggtacttttgatctcaaatacttttgtgaattgcgccccggattgattggatgggtggttattaacttggtgatgcttttggctgaaatgaaaatacaggaccgcgctgttccatccttggccatgattttagttaatagtttccagcttctctatgtggtggatgctctctggaatgaggaagcgttgttgacgaccatggacatcatccacgatggatttggattcatgctggcttttggagacttggtgtgggttccctttatttacagcttccaagccttttatttagtcagtcatccaaatgaagtgtcttggccaatggcttctctaattattgttctgaaactttgtggttatgtaatcttccgaggtgcaaattctcagaaaaatgcattccggaaaaatcccagtgatccaaagcttgcacatttaaaaaccattcatacttcaacgggaaaaaatcttctagtttctggatggtggggctttgttcgccaccccaattacttgggtgatctcatcatggccttggcgtggtccctcccatgtggttttaaccacattctgccttatttctacataatttatttcaccatgttgcttgtccaccgagaagctcgtgacgagtaccactgtaagaagaaatacggcgtggcttgggaaaagtactgtcagcgtgtgccctaccgtatatttccatacatctactaatgctcttctggcttttctacaaaatactcctgcaattccagctgccatttgcaaaaacaaggaaaaaaatccgaaactttcttttgttgcactgacagggtctgtacttttttttttctttttgagtcaggactatggagccgagtagttgatcttttaatatagccgtgtttacttgtattaacttacagttaacataggaaaaatacaagtaaggatgtgagaatttgcattttaatgggaaattttcaacccttaatctgaaaacagaagacagtcttaatataaatgtactgtgaagaatgctattgatgtttatggtttctgattacttttcaaattttgatgtttttttgccagttggcttttcttaaatgaaaacactgttccatttaaagtacatttatgttttattcagtaagagaatagaattttcatttgtttttctttaaatcctttactaattatataatttgaaagcaaaaagaagggcctatattaaatgctgaaagtgaaaagtgatgacattattagcagacactgcttaaaggagaccatttgtagcagttggcttaacctcaacttctaaaactacattgaaaatgtaaatacatagcttagttttttgtaatatatggtgacttcagatttttttgtacagtattttgaatgtgagatgattgtcaggactaactgtctttttaacaaaacattttcagtattttaaataaaattttgtaaagtaatgtgaattaaaaattttggaacaattagaattcattcactattgtatagaagatgctgttaaaacataggaagggtatttttcttgatccaaagtttgtgaatttggctttgctacctcaattgcaggtgtttgtttgcctttataaactgttgcaaatagaaaaaaaatagaataagtatatatttttggagtaacatcaatatttaaacatttttacacagatcggtgtttgaaaatttgccatttcaggctaatatttttatatatttttgactttttaaaagttcatcagtgtttttgctactgttaagcttatgcagtttatactgtattttttatgtatcctttatatttaccaaacctgactccctgtaaaggagtgctgtcttaaaaacaactgaaggggttaaagtcgtttcttttagtttaatagatgtgcataaggtagctttagcaattaaattctagtgaagttgatatagtctcatttttaattgtcctgtaatggaacagtagcaaattcactaaacttttgtgttcagagttaaattgttctcagtactttcaatgtaggggaatgtaataaacatagtgtgtatgtttgggttttaattacacattttatatatgagccatttagatatgcagtgttaattctatactgcatttgaagtgtatgtaacttagcttatgttaatgcagtcatgaagttggtttgctccagcatccggtagtctttaaacattcttttagtgaaattgtcattgttttatcagtgctaatgtgtgcaagcagtttttttattttgcttttctcctggcatcagaaagtggtggcgttttctgtactggattgcaccaaggaagcttttggggaggaaggaaggacattaaattctttccctggtaatgaaaagagccctttatcaatacagtgctgcaatttctggatatcagctacactttgtttttaagtttgtttttgacatgtttatttggcaaattttataatgaagttttaagttgaaaataaaatgtagcaacattttgatcaaaaaaaaaaaaaaa

SEQ ID NO: 96 - protein, 615 aa, Homo sapiens; identical to SEQ ID NO: 94

SEQ ID NO: 97 - DNA, 8192 bp, Homo sapiens
gggttcctcgcggcgatcccgactctcctcccgcggctgcagcagctgccggttgcacacggcctcggcggcggcgcggcgagcgcgggcctgtggagcggcggccgggcgcgcggccccggcgggcacccctcagagggcggccgaggaagctccgggaggaggagcaggaccacgaggaggtgggaggcggcggccgcctggggaccagctccgcgcctcggcctctccgccccctccccagcctttctctcgccctcttctcccacactcccggccggcgcctcggctttgtgcgaggagatggtgtagccccctggccgccgaaggaggagccggacacttgtctcccgtctccgagctgctccccacccctggaggagagacccccccctcggctcggcgccttctgcgtctcccggctggtggggaagcctctgcgccgccggcaccatgagtgaacagagtatctgtcaggcaagagctgctgtgatggtttatgatgatgccaataagaagtgggtgccagctggtggctcaactggattcagcagagttcatatctatcaccatacaggcaacaacacattcagagtggtgggcaggaagattcaggaccatcaggtcgtgataaactgtgccattcctaaagggttgaagtacaatcaagctacacagaccttccaccagtggcgagatgctagacaggtgtatggtctcaactttggcagcaaagaggatgccaatgtcttcgcaagtgccatgatgcatgccttagaagtgttaaattcacaggaaacagggccaacattgcctagacaaaactcacaactacctgctcaagttcaaaatggcccatcccaagaagaattggaaattcaaagaagacaactacaagaacagcaacggcaaaaggagctggagcgggaaaggctggagcgagaaagaatggaaagagaaaggttggagagagagaggttagaaagggaaaggctggagagggagcgactggaacaagaacagctggagagagagagacaagaacgggaacggcaggaacgcctggagcggcaggaacgcctggagcggcaggaacgcctggagcggcaggaacgcctggatcgggagaggcaagaaagacaagaacgagagaggctggagagactggaacgggagaggcaagaaagggagcgacaagagcagttagaaagggaacagctggaatgggagagagagcgcagaatatcaagtgctgctgcccctgcctctgttgagactcctctaaactctgtgctgggagactcttctgcttctgagccaggcttgcaggcagcctctcagccggccgagactccatcccaacagggcattgtcttgggaccacttgcacctccacctcctccaccactcccaccagggcctgcacaggcttcagtagccctccctcctcccccagggccccctccacctcctccactcccatccaccgggcctccaccgccccctcctccccctcctctccctaatcaagtaccccctcctcctccaccacctcctgccccacccctccctgcatctggattctttttggcatccatgtcagaagacaatcgccctttaactggacttgcagctgcaattgccggagcaaaacttaggaaagtgtcacggatggaggatacctctttcccaagtggagggaatgctattggtgtgaactccgcctcatctaaaacagatacaggccgtggaaatggaccccttcctttagggggtagtggtttaatggaagaaatgagtgccctgctggccaggaggagaagaattgctgaaaagggatcaacaatagaaacagaacaaaaagaggacaaaggtgaagattcagagcctgtaacttctaaggcctcttcaacaagtacacctgaaccaacaagaaaaccttgggaaagaacaaatacaatgaatggcagcaagtcacctgttatctccagacgggattctccaaggaaaaatcagattgtttttgacaacaggtcctatgattcattacacagaccaaaatccacacccttatcacagcccagtgccaatggagtccagacggaaggacttgactatgacaggctgaagcaggacattttagatgaaatgagaaaagaattaacaaagctaaaagaagagctcattgatgcaatcaggcaggaactgagcaagtcaaatactgcatagaggaacagactaaggagagataggactttaatctggaggaaaaatatcctacaaacaacaactgttcacaacagcaaacccctacatttatgagctgtaagaagaaaatggagacaaacagaaggagggaaaaaccaacctactctgaaagccttcagacattatgactctggtgataagctctttccctctccgtttgctgcttttttctggcctttacaacagaatggaagagaatcatttaagagttcctgtaacagttatgcagaaaatactaaaacccatcaggcaagatcaccacgcattgaaatattttcatatcaagataaagtcgcacattttccacaatacattgctaaaataaagaggagaaaggcttaggaagtttttttgcagagagtgctggtaaagaattgagcaagtttgctattgtattgtaatgtttctctcaggtttgttcttcctatcatgtttgatattccatgaataattgagatcagccctatgtaagttaagatcataatatgtggaacaaatggaattgtaagtgctttcaaagggtaatatttataagaaagtgtccgaaaaatgtttcttcagcttgagaaattttagaatgataggaagtttctcgagttagccttcatgcaattttgtagattaaaacataaaatttgtccagaacttaaagatttagatgccttcctaaattgttacaatgctttaccaaatctatgacttctacataacacaaaccagtggtcaaatgtaaacactatattgtagatttactgtaggttttcaaccttttttagatttatgcatgtggacatttttataatgtaattacaatcaccacaaggttagcttttttaattgcagacagtaatgcatgtcacactaatatgtagtggccttttcaaggcctagtcccagggaaaacattttgtagagtataggggagtgggaggaaggggaggaataattttttatttaaagttgatttctgcactatctttttctcagttacctgcatgaataaataatgagaaatattttgtgactttaattggtaaatatgttacaaaaccaagtacttaatcttttacatcatgtcttcagctatttgtattttaaccagtaatttcaatggtctgaaacatgattctgagcttcacataatatcttaactgtggaactcaaaagtttgatcactgaatttggcagttattattacctaggtacccccgctgttacacaggtgtttagatacgtgttcctgaatgaagctgcttttgaattttgttatgttgaaatgcaagaaataacaatgatggcagcaattaaggtcacagaaatcattaggtaaaggaaaaccaatgaggagttctgcagttttcttttaataagtaaagtgagacttgggtggtgggaagaaggaaggtgggaagaaggaattagacactctgcctgccactctgcgtgtgtgtgctctcgcgcacgtgctgtctatatggaagccactcccttttctttcctttgaaactggtaaggttaaaataggggagaaatcctacatgttggaatgatagctttttggaaaatttaagaaactctccaggctctccatcttgatttatgcttgagttgttatgtgccatatttgctttgaactctgattatcagaagttttactaaaactttgaaataattcactttcatctgctttctagattttgtacatctcagtccataaagcaaagcttgttgatagtgtagttttctaaacgctgcaaatttgcagcctttaccactacaaagaagtttggatgagggattttttttttctttgtcaaaatagttcctgtttctgtagaaatttcatttttagattaaactgtgatggatgagctatcataattcaagtatacatttcttttttctatcagatattcattgtcatgcagtagtagtaaaaacatcaaagatgcagcaagcttattaagtattattttctaaaagaaataggaggcattttcatctttattattgtacttttggttatgcaaacactttgataatataaacagttatgtcccctataaatctggtcagcaacctcttttgattttgttgggtaagttaaatagtctgtagtaggtagagtactgggtacaagtggtccaaactaagataagagactaaaataaaatgctaaatcttaaaagaaactgggtttatgcactaaacgttttgtgccttggtctaatattaacatgatgtatgtgtaaactgacaaaaaaaaaaaaaaaaaaaaaccagtgttgaatcatgctatatttcccatcatcccagattgctaaatgttctttccaagaagtctgaatgaattattatatacatttgctatcatacatgacagttgtgtcattattagagatttcagtaattaaaatgggaaacagaagcctaagttatttaccttatcaaaaccacgttccttggaaccacattattatgatggtttttgtgctcttgtacgttggatgtcttaagctgagtacagtttaggggatcctttctaatgacaggaaggcactgctttcctcaacactgtgatctgacctgtgacaagtctgtactatccactatgtaaatggctcacaagtcaattgcaaacaaactgaatgtacaaatcttagtgctggtgctgaaatctcttcagaatagtcatcatgatttaaaagtttgtttaaaaatttgcaagcatcaagtgtcaatcaaaactgaagatgaaacactaatgaatgttgaattctcatgcttttaggtgtacttcctttttagaattttcagttttctgctatttttaccgtaactatttcgtttaaatttgtttcatttaagtttcctacacgctaacttcgtttgtgcgattgaaataaaattgcagtatatatatgttgcttgtttgtgacacttagataatcttctgaaataatttgttttaaagtaagttatattggatgtgaaaaacaccttttaaagtccaagactttactacttaaaagtttacatgtcacgtcactattctttacagatttcatagaagtcgtgaatactaagtaatgtatacaaaagaaatatgtgatgatgtgtctactttttgtttgaaataactgttgggtgttccctcttcttattttctctctgcccaccttgacacagtaacttcctcttatagtcaagatgatgattaagtgtttaatttttattccattttgttctgcaacacgttcaggtacttaaaactcattcatgcagttagaattatcctttatgtagtttgcatggtaaaggacattgtgtggtaaagggcattattgagtaatgaattttaagtatagcaaaatatgtatagtgtttatacatgatgctgatttcttaaaacctacatataagcagtagtactttttctctattataaagtattaattttgagttccattttataattctgatgtcttcattagaaatacaaaaatacaatccttgtattttttctttgaccagacccaaattttccccttcccccctccattctcctctccacttctcgtggaccgcgtgttcccaatattcattaacatttgcagccattacagagttacagttgtaaaattttcagctgtttttttttttttttttttgctctagcctgtctcatgttcttgcttctcttcatatgtaagtcagtatttttgtctacaaattaaaagtcacttgtcattcaaaaatgagttaagtaacatgataatcttttaaatttacctagctacaacttttatgtctcttgtaaatttatatatactttcagtgccattgtgaagaattggccttttaattctaagtagtattaccctatgaagcacagtgtgcaaaggtatgctacaaggtctctttaattcctgtgtggccattataattttataacaccattaccctttaaattctaccgattataagcagcgtaaaagtaactatataaagcaaacatcgcaaaggaactctgcaggagctcttaattcctttatgtagctatcataaaattcactttcctgaagacatttactctcattcacttccaaactccaaacctttttctggtagcaccacttttgtttttaatagaaagatgagttcatatctgtacatctctccaaagctctaaggaatgagaaaaggatcctagtatattgaaattactgatgtttaatacctctgccttttcactaaaagccatttaatatttttaaagtcaaaacttgacatacaggtatttataaggaatctccatgactctgaaggaatgaaattgatgtaggtagctttggctatgtaaagacatagtagaggacaattacttaaagaagagttttcttttgaggatttgtagatttgactaagcagctgaagtcagtaacccctcaagaaagtccgtttatagaagccaagaactgttggaggtctgtgatgcaggtttttctgttcccaacatcaaaagctgtggattatttggtgtgttcccctttatgttatctctcgataatttttgagacatcaagattttttaaaatatcaatactggaaagatgaaaccttcaaattaaaacctaaaattgattagaaagaaaagtaaaatattaatgcagtaaatttaggatggttacagatactcaccatcaacataaataaatggagttctaggataaattatttgtggaatactaatggtcaagtcacataagagtaaaatcttttggtgaggagacacatttgacaactgctaaagaattaactaaatttgtctttctaaatagttttctttataaagtaacagaaacattgtaaaaggataaatgactgtcataatgacttaggatgttgtaagaatgtctgccacatttattggttatttctgttgaaatctgaaggaatcgatacatctgaaaattgagaaagggaaataggactgtccccgttacagatactctgtgatgcacacaaccttctaaacggaagtgttagtatcatttaaagcacatagtaggccttgagtatttgcagattaacatgcagaaaaaatcaaagatgaagccccaattaagtgtttgaaccaaagaatcacagtcactgagctgcacccccgttctgtgaagcatgttaaatactcataaagagcagagagcagggcccgtagacgcttctggtgtaggacacaggaattctaggcagagggagaaaattaggggccccagttggtggctgagagtaaaaagaatataccatttgagtagtgctgttctttttcctcagtttttaaagacatataattcctagtagttaggacatctaaatagctcggtaaactggtcagaggcgggaggattgcttgaggccagaagttttgagatcagcctgggtaacagggagactcatttctacaaaaaaatttaaaaatttaggccaggcatggtggtgcacacctgtaatcccagctactcaggagactgaagcgggaggatcacctgagcccagggaggacgcggctgcagtgagccgttatcatgccactgtactccagcctgggtgacagagcgagaacctgtctctaaaaaaaaaaaaaaaaaattctaagagaatatagcttttcatagaaattattagaaaagcttacatatttcattagagagcccagtttgttagactacatttattccgtaaaagttctatatacaaatgacaacccatagtttatcatgtaaatctgatttaactgttcccttcaattccaagaaagatttcttcagcagtagatgacaattctaaaagcataaagaaataactaataaaggagatggatgatgttataggttggtttggttgggttttagtaaatagtt

SEQ ID NO: 98 - protein, 591 aa, Homo sapiens
MSEQSICQARAAVMVYDDANKKWVPAGGSTGFSRVHIYHHTGNNTFRVVGRKIQDHQVVINCAIPKGLKYNQATQTFHQWRDARQVYGLNFGSKEDANVFASAMMHALEVLNSQETGPTLPRQNSQLPAQVQNGPSQEELEIQRRQLQEQQRQKELERERLERERMERERLERERLERERLERERLEQEQLERERQERERQERLERQERLERQERLERQERLDRERQERQERERLERLERERQERERQEQLEREQLEWERERRISSAAAPASVETPLNSVLGDSSASEPGLQAASQPAETPSQQGIVLGPLAPPPPPPLPPGPAQASVALPPPPGPPPPPPLPSTGPPPPPPPPPLPNQVPPPPPPPPAPPLPASGFFLASMSEDNRPLTGLAAAIAGAKLRKVSRMEDTSFPSGGNAIGVNSASSKTDTGRGNGPLPLGGSGLMEEMSALLARRRRIAEKGSTIETEQKEDKGEDSEPVTSKASSTSTPEPTRKPWERTNTMNGSKSPVISRRDSPRKNQIVFDNRSYDSLHRPKSTPLSQPSANGVQTEGLDYDRLKQDILDEMRKELTKLKEELIDAIRQELSKSNTA

SEQ ID NO: 99 - DNA, 8192 bp, Homo sapiens
gggttcctcgcggcgatcccgactctcctcccgcggctgcagcagctgccggttgcacacggcctcggcggcggcgcggcgagcgcgggcctgtggagcggcggccgggcgcgcggccccggcgggcacccctcagagggcggccgaggaagctccgggaggaggagcaggaccacgaggaggtgggaggcggcggccgcctggggaccagctccgcgcctcggcctctccgccccctccccagcctttctctcgccctcttctcccacactcccggccggcgcctcggctttgtgcgaggagatggtgtagccccctggccgccgaaggaggagccggacacttgtctcccgtctccgagctgctccccacccctggaggagagacccccccctcggctcggcgccttctgcgtctcccggctggtggggaagcctctgcgccgccggcaccatgagtgaacagagtatctgtcaggcaagagctgctgtgatggtttatgatgatgccaataagaagtgggtgccagctggtggctcaactggattcagcagagttcatatctatcaccatacaggcaacaacacattcagagtggtgggcaggaagattcaggaccatcaggtcgtgataaactgtgccattcctaaagggttgaagtacaatcaagctacacagaccttccaccagtggcgagatgctagacaggtgtatggtctcaactttggcagcaaagaggatgccaatgtcttcgcaagtgccatgatgcatgccttagaagtgttaaattcacaggaaacagggccaacattgcctagacaaaactcacaactacctgctcaagttcaaaatggcccatcccaagaagaattggaaattcaaagaagacaactacaagaacagcaacggcaaaaggagctggagcgggaaaggctggagcgagaaagaatggaaagagaaaggttggagagagagaggttagaaagggaaaggctggagagggagcgactggaacaagaacagctggagagagagagacaagaacgggaacggcaggaacgcctggagcggcaggaacgcctggagcggcaggaacgcctggagcggcaggaacgcctggatcgggagaggcaagaaagacaagaacgagagaggctggagagactggaacgggagaggcaagaaagggagcgacaagagcagttagaaagggaacagctggaatgggagagagagcgcagaatatcaagtgctgctgcccctgcctctgttgagactcctctaaactctgtgctgggagactcttctgcttctgagccaggcttgcaggcagcctctcagccggccgagactccatcccaacagggcattgtcttgggaccacttgcacctccacctcctccaccactcccaccagggcctgcacaggcttcagtagccctccctcctcccccagggccccctccacctcctccactcccatccaccgggcctccaccgccccctcctccccctcctctccctaatcaagtaccccctcctcctccaccacctcctgccccacccctccctgcatctggattctttttggcatccatgtcagaagacaatcgccctttaactggacttgcagctgcaattgccggagcaaaacttaggaaagtgtcacggatggaggatacctctttcccaagtggagggaatgctattggtgtgaactccgcctcatctaaaacagatacaggccgtggaaatggaccccttcctttagggggtagtggtttaatggaagaaatgagtgccctgctggccaggaggagaagaattgctgaaaagggatcaacaatagaaacagaacaaaaagaggacaaaggtgaagattcagagcctgtaacttctaaggcctcttcaacaagtacacctgaaccaacaagaaaaccttgggaaagaacaaatacaatgaatggcagcaagtcacctgttatctccagaccaaaatccacacccttatcacagcccagtgccaatggagtccagacggaaggacttgactatgacaggctgaagcaggacattttagatgaaatgagaaaagaattaacaaagctaaaagaagagctcattgatgcaatcaggcaggaactgagcaagtcaaatactgcatagaggaacagactaaggagagataggactttaatctggaggaaaaatatcctacaaacaacaactgttcacaacagcaaacccctacatttatgagctgtaagaagaaaatggagacaaacagaaggagggaaaaaccaacctactctgaaagccttcagacattatgactctggtgataagctctttccctctccgtttgctgcttttttctggcctttacaacagaatggaagagaatcatttaagagttcctgtaacagttatgcagaaaatactaaaacccatcaggcaagatcaccacgcattgaaatattttcatatcaagataaagtcgcacattttccacaatacattgctaaaataaagaggagaaaggcttaggaagtttttttgcagagagtgctggtaaagaattgagcaagtttgctattgtattgtaatgtttctctcaggtttgttcttcctatcatgtttgatattccatgaataattgagatcagccctatgtaagttaagatcataatatgtggaacaaatggaattgtaagtgctttcaaagggtaatatttataagaaagtgtccgaaaaatgtttcttcagcttgagaaattttagaatgataggaagtttctcgagttagccttcatgcaattttgtagattaaaacataaaatttgtccagaacttaaagatttagatgccttcctaaattgttacaatgctttaccaaatctatgacttctacataacacaaaccagtggtcaaatgtaaacactatattgtagatttactgtaggttttcaaccttttttagatttatgcatgtggacatttttataatgtaattacaatcaccacaaggttagcttttttaattgcagacagtaatgcatgtcacactaatatgtagtggccttttcaaggcctagtcccagggaaaacattttgtagagtataggggagtgggaggaaggggaggaataattttttatttaaagttgatttctgcactatctttttctcagttacctgcatgaataaataatgagaaatattttgtgactttaattggtaaatatgttacaaaaccaagtacttaatcttttacatcatgtcttcagctatttgtattttaaccagtaatttcaatggtctgaaacatgattctgagcttcacataatatcttaactgtggaactcaaaagtttgatcactgaatttggcagttattattacctaggtacccccgctgttacacaggtgtttagatacgtgttcctgaatgaagctgcttttgaattttgttatgttgaaatgcaagaaataacaatgatggcagcaattaaggtcacagaaatcattaggtaaaggaaaaccaatgaggagttctgcagttttcttttaataagtaaagtgagacttgggtggtgggaagaaggaaggtgggaagaaggaattagacactctgcctgccactctgcgtgtgtgtgctctcgcgcacgtgctgtctatatggaagccactcccttttctttcctttgaaactggtaaggttaaaataggggagaaatcctacatgttggaatgatagctttttggaaaatttaagaaactctccaggctctccatcttgatttatgcttgagttgttatgtgccatatttgctttgaactctgattatcagaagttttactaaaactttgaaataattcactttcatctgctttctagattttgtacatctcagtccataaagcaaagcttgttgatagtgtagttttctaaacgctgcaaatttgcagcctttaccactacaaagaagtttggatgagggattttttttttctttgtcaaaatagttcctgtttctgtagaaatttcatttttagattaaactgtgatggatgagctatcataattcaagtatacatttcttttttctatcagatattcattgtcatgcagtagtagtaaaaacatcaaagatgcagcaagcttattaagtattattttctaaaagaaataggaggcattttcatctttattattgtacttttggttatgcaaacactttgataatataaacagttatgtcccctataaatctggtcagcaacctcttttgattttgttgggtaagttaaatagtctgtagtaggtagagtactgggtacaagtggtccaaactaagataagagactaaaataaaatgctaaatcttaaaagaaactgggtttatgcactaaacgttttgtgccttggtctaatattaacatgatgtatgtgtaaactgacaaaaaaaaaaaaaaaaaaaaaccagtgttgaatcatgctatatttcccatcatcccagattgctaaatgttctttccaagaagtctgaatgaattattatatacatttgctatcatacatgacagttgtgtcattattagagatttcagtaattaaaatgggaaacagaagcctaagttatttaccttatcaaaaccacgttccttggaaccacattattatgatggtttttgtgctcttgtacgttggatgtcttaagctgagtacagtttaggggatcctttctaatgacaggaaggcactgctttcctcaacactgtgatctgacctgtgacaagtctgtactatccactatgtaaatggctcacaagtcaattgcaaacaaactgaatgtacaaatcttagtgctggtgctgaaatctcttcagaatagtcatcatgatttaaaagtttgtttaaaaatttgcaagcatcaagtgtcaatcaaaactgaagatgaaacactaatgaatgttgaattctcatgcttttaggtgtacttcctttttagaattttcagttttctgctatttttaccgtaactatttcgtttaaatttgtttcatttaagtttcctacacgctaacttcgtttgtgcgattgaaataaaattgcagtatatatatgttgcttgtttgtgacacttagataatcttctgaaataatttgttttaaagtaagttatattggatgtgaaaaacaccttttaaagtccaagactttactacttaaaagtttacatgtcacgtcactattctttacagatttcatagaagtcgtgaatactaagtaatgtatacaaaagaaatatgtgatgatgtgtctactttttgtttgaaataactgttgggtgttccctcttcttattttctctctgcccaccttgacacagtaacttcctcttatagtcaagatgatgattaagtgtttaatttttattccattttgttctgcaacacgttcaggtacttaaaactcattcatgcagttagaattatcctttatgtagtttgcatggtaaaggacattgtgtggtaaagggcattattgagtaatgaattttaagtatagcaaaatatgtatagtgtttatacatgatgctgatttcttaaaacctacatataagcagtagtactttttctctattataaagtattaattttgagttccattttataattctgatgtcttcattagaaatacaaaaatacaatccttgtattttttctttgaccagacccaaattttccccttcccccctccattctcctctccacttctcgtggaccgcgtgttcccaatattcattaacatttgcagccattacagagttacagttgtaaaattttcagctgtttttttttttttttttttgctctagcctgtctcatgttcttgcttctcttcatatgtaagtcagtatttttgtctacaaattaaaagtcacttgtcattcaaaaatgagttaagtaacatgataatcttttaaatttacctagctacaacttttatgtctcttgtaaatttatatatactttcagtgccattgtgaagaattggccttttaattctaagtagtattaccctatgaagcacagtgtgcaaaggtatgctacaaggtctctttaattcctgtgtggccattataattttataacaccattaccctttaaattctaccgattataagcagcgtaaaagtaactatataaagcaaacatcgcaaaggaactctgcaggagctcttaattcctttatgtagctatcataaaattcactttcctgaagacatttactctcattcacttccaaactccaaacctttttctggtagcaccacttttgtttttaatagaaagatgagttcatatctgtacatctctccaaagctctaaggaatgagaaaaggatcctagtatattgaaattactgatgtttaatacctctgccttttcactaaaagccatttaatatttttaaagtcaaaacttgacatacaggtatttataaggaatctccatgactctgaaggaatgaaattgatgtaggtagctttggctatgtaaagacatagtagaggacaattacttaaagaagagttttcttttgaggatttgtagatttgactaagcagctgaagtcagtaacccctcaagaaagtccgtttatagaagccaagaactgttggaggtctgtgatgcaggtttttctgttcccaacatcaaaagctgtggattatttggtgtgttcccctttatgttatctctcgataatttttgagacatcaagattttttaaaatatcaatactggaaagatgaaaccttcaaattaaaacctaaaattgattagaaagaaaagtaaaatattaatgcagtaaatttaggatggttacagatactcaccatcaacataaataaatggagttctaggataaattatttgtggaatactaatggtcaagtcacataagagtaaaatcttttggtgaggagacacatttgacaactgctaaagaattaactaaatttgtctttctaaatagttttctttataaagtaacagaaacattgtaaaaggataaatgactgtcataatgacttaggatgttgtaagaatgtctgccacatttattggttatttctgttgaaatctgaaggaatcgatacatctgaaaattgagaaagggaaataggactgtccccgttacagatactctgtgatgcacacaaccttctaaacggaagtgttagtatcatttaaagcacatagtaggccttgagtatttgcagattaacatgcagaaaaaatcaaagatgaagccccaattaagtgtttgaaccaaagaatcacagtcactgagctgcacccccgttctgtgaagcatgttaaatactcataaagagcagagagcagggcccgtagacgcttctggtgtaggacacaggaattctaggcagagggagaaaattaggggccccagttggtggctgagagtaaaaagaatataccatttgagtagtgctgttctttttcctcagtttttaaagacatataattcctagtagttaggacatctaaatagctcggtaaactggtcagaggcgggaggattgcttgaggccagaagttttgagatcagcctgggtaacagggagactcatttctacaaaaaaatttaaaaatttaggccaggcatggtggtgcacacctgtaatcccagctactcaggagactgaagcgggaggatcacctgagcccagggaggacgcggctgcagtgagccgttatcatgccactgtactccagcctgggtgacagagcgagaacctgtctctaaaaaaaaaaaaaaaaaattctaagagaatatagcttttcatagaaattattagaaaagcttacatatttcattagagagcccagtttgttagactacatttattccgtaaaagttctatatacaaatgacaacccatagtttatcatgtaaatctgatttaactgttcccttcaattccaagaaagatttcttcagcagtagatgacaattctaaaagcataaagaaataactaataaaggagatggatgatgttataggttggtttggttgggttttagtaaatagttattcttctaagaaggcttagaaaatcgagaattgaatagttggtactttgaattccataggaa

SEQ ID NO: 100 - protein, 570 aa, Homo sapiens
MSEQSICQARAAVMVYDDANKKWVPAGGSTGFSRVHIYHHTGNNTFRVVGRKIQDHQVVINCAIPKGLKYNQATQTFHQWRDARQVYGLNFGSKEDANVFASAMMHALEVLNSQETGPTLPRQNSQLPAQVQNGPSQEELEIQRRQLQEQQRQKELERERLERERMERERLERERLERERLERERLEQEQLERERQERERQERLERQERLERQERLERQERLDRERQERQERERLERLERERQERERQEQLEREQLEWERERRISSAAAPASVETPLNSVLGDSSASEPGLQAASQPAETPSQQGIVLGPLAPPPPPPLPPGPAQASVALPPPPGPPPPPPLPSTGPPPPPPPPPLPNQVPPPPPPPPAPPLPASGFFLASMSEDNRPLTGLAAAIAGAKLRKVSRMEDTSFPSGGNAIGVNSASSKTDTGRGNGPLPLGGSGLMEEMSALLARRRRIAEKGSTIETEQKEDKGEDSEPVTSKASSTSTPEPTRKPWERTNTMNGSKSPVISRPKSTPLSQPSANGVQTEGLDYDRLKQDILDEMRKELTKLKEELIDAIRQELSKSNTA

SEQ ID NO: 101 - DNA, 1705 bp, Homo sapiens
aattcggcacgagaagacttccagtttggagtcgtttgctgcggggagggaatgaatgggcgctgggaacacgcccgcgaggtggggacgcgccggccgtagcgaggtccttagcgtgtgagtggccggggtcgggtcgcttccccgcagcatggaggacgatgcaccagtgatctacgggctggagttccaggcacgtgccttaacacctcaaactgcagaaacagatgccattcggtttttggttgggacgcagtctcttaaatatgataatcagatccatatcatagattttgacgatgaaaacaacattataaataaaaatgtcctcctccatcaagcgggtgaaatctggcatattagcgctagccctgcagacagaggtgtgctgacgacctgctacaacagaacttcagacagcaaagtcctgacatgtgcagccgtgtggaggatgccgaaggaattggaatcaggcagccacgagtcccctgatgattcatccagcactgcacagaccctggagctgctctgtcaccttgacaacacagcccatggcaacatggcctgtgtcgtgtgggagccaatgggagatgggaagaaaatcatttccttggctgataaccatatcctgctgtgggatttacaggaaagctcgagccaggctgtgctggccagctcagcgtccctggaagggaagggacaactgaagttcacctcaggacggtggagcccacatcataactgcacccaggtggccacagcgaacgacaccaccctccgtggctgggacacccggagcatgagccagatctactgcatagagaatgcccacggacagctggtgcgggaccttgactttaatcccaataagcagtactacttggccagctgcggagacgactgtaaggtgaagttctgggacacccgaaatgtcaccgaacccgtgaagaccctggaggagcactcccactgggtgtggaacgtccgctacaaccactctcatgaccagctggtcctcacgggcagcagtgacagcagagtcatcctttccaacatggtgtccatctcgtcggagcccttcggccacttggtagacgacgatgacatcagtgaccaggaggaccaccgttctgaagagaagagcaaggagcccctgcaggacaacgtgatcgccacctacgaggagcacgaggacagcgtctatgccgtggactggtcctcggctgacccgtggctgtttgcctccctgagctatgacgggaggctcgtgatcaacagggtgcccagggccctgaagtaccacatcctgctatgactcccgggcctgggttatccaggtcccattgagtggttttcctcttggcagattctcaaacagtcgcagctctttggaggtgactcgtgttccaggtggatccctctctgggagagccgctgttcccttcctgtagcagcagcatttatgaatggggtgaatggggctattgtcgacggcacagctaatgcccgaacccagcccctgtcggcagagacagagccccacattattatgtgaataacaatgttttctgttttaagggtgtcaggagtttcgctttttaaaaaaatgtctgttcctgcagtagtaactcttctttctcttgagagtaaaaaatgaaataaaataaatccacgctgacaaaaaaaaaaaaaaaaaaaaaaaaaa

SEQ ID NO: 102 - protein, 387 aa, Homo sapiens
MEDDAPVIYGLEFQARALTPQTAETDAIRFLVGTQSLKYDNQIHIIDFDDENNIINKNVLLHQAGEIWHISASPADRGVLTTCYNRTSDSKVLTCAAVWRMPKELESGSHESPDDSSSTAQTLELLCHLDNTAHGNMACVVWEPMGDGKKIISLADNHILLWDLQESSSQAVLASSASLEGKGQLKFTSGRWSPHHNCTQVATANDTTLRGWDTRSMSQIYCIENAHGQLVRDLDFNPNKQYYLASCGDDCKVKFWDTRNVTEPVKTLEEHSHWVWNVRYNHSHDQLVLTGSSDSRVILSNMVSISSEPFGHLVDDDDISDQEDHRSEEKSKEPLQDNVIATYEEHEDSVYAVDWSSADPWLFASLSYDGRLVINRVPRALKYHILL

SEQ ID NO: 103 - DNA, 2546 bp, Homo sapiens
tttccggcctgggggcagggcctcgggttcctgcatcgggcctgagcagaactaggcgcgccgcggcccggcacgcgcaggcgtacagagctccccgggggtgccagttcctctccgattcccggcttctgtcaccttcctcacggaccttggtcacggccgcaggtgaccccttagcccagctccagtgggcgggtggcagggtcatggaggacgctggcggcggcgaggagaccccggccccggaggccccgcacccccctcagctcgcgcctccggaggagcaggggttgctcttccaggaggaaaccatcgatcttggcggagatgagtttggatccgaagagaacgagaccgcatcggaaggctcgagtcctctcgcggacaagctgaacgaacacatgatggagagcgtcctcatctctgactcccccaacagcgagggcgacgcgggcgacctgggccgagtgcgggacgaagctgagcccggaggggaaggcgacccaggcccggagcccgcgggcaccccgagtcccagcggcgaggccgacggcgactgtgcccccgaggacgcggcacccagtagcggaggggccccgaggcaggacgcggcccgcgaggtcccaggcagcgaagccgcgcgcccggagcaggagcctcccgttgcggagccggtcccggtgtgcaccatcttcagccagcgcgcgcccccagcctccggggacggcttcgagccgcagatggtgaagtcgcccagcttcggtggcgccagcgaggcctcggccaggacaccgccccaggtcgtgcagcccagccccagcctcagcacgttcttcggagacacggccgccagccactccttggcctcggacttcttcgactcctttactacctccgccttcatttccgtcagcaatcccggcgcgggctccccggcccccgccagcccgcctcccctcgctgtgcccgggaccgaggggcgccccgaacccgtggccatgcgagggccccaggcagctgcgcccccggcgtcgccagagcctttcgcgcacatccaggcagtgtttgcagggagtgacgacccctttgccaccgccctgagcatgagcgagatggaccggaggaacgacgcctggcttcccggcgaggctacgcgtggagtcctgcgggccgtggccacccagcagcgcggcgccgtgttcgtggacaaggagaacctcaccatgccgggcctcaggttcgacaacatccagggagatgcagttaaagacttgatgcttcgctttctgggtgaaaaagctgcagcaaagagacaagtcctaaatgccgactcagtggaacaatcttttgttggattgaaacagctaatcagctgcagaaactggagggcagcagtggacctgtgcggacgtctcctcacagcccacggccagggctacggcaagagcgggctgctcaccagccacacgacagattcactgcagctctggtttgtcaggctggcactactagtgaagttgggccttttccagaatgctgagatggaatttgaacccttcggaaatcttgatcagccagatctttattacgagtactacccgcacgtgtaccctgggcgcaggggctccatggtccccttctcgatgcgcatcttgcacgcggagcttcagcagtacctggggaacccacaggagtcgctggatagactgcacaaggtgaagactgtctgcagcaagatcctggccaatttggagcaaggcttagcagaagacggcggcatgagcagcgtgactcaggagggcagacaagcctctatccggctgtggaggtcacgtctgggccgggtgatgtactccatggcaaactgtctgctcctgatgaaggattatgtgctggccgtggaggcgtatcattcggttatcaagtattacccagagcaagagccccagctgctcagcggcatcggccggatttccctgcagattggagacataaaaacagctgaaaagtattttcaagacgttgagaaagtaacacagaaattagatggactacagggtaaaatcatggttttgatgaacagcgcgttccttcacctcgggcagaataactttgcagaagcccacaggttcttcacagagatcttaaggatggatccaagaaacgcagtggccaacaacaacgctgccgtgtgtctgctctacctgggcaagctcaaggactccctgcggcagctggaggccatggtccagcaggaccccaggcactacctgcacgagagcgtgctcttcaacctgaccaccatgtacgagctggagtcctcacggagcatgcagaagaaacaggccctgctggaggctgtcgccggcaaggagggggacagcttcaacacacagtgcctcaagctggcctagctgcctccaacacactacgtcagaaggacccgggtctttgaaactgtgtcttgaagctaatgtattaatgtgacatggaggaactcaataaaactcctgcttcactggtgaaaaaaaaaaaaaaaaaaaaaa

SEQ ID NO: 104 - protein, 735 aa, Homo sapiens
MEDAGGGEETPAPEAPHPPQLAPPEEQGLLFQEETIDLGGDEFGSEENETASEGSSPLADKLNEHMMESVLISDSPNSEGDAGDLGRVRDEAEPGGEGDPGPEPAGTPSPSGEADGDCAPEDAAPSSGGAPRQDAAREVPGSEAARPEQEPPVAEPVPVCTIFSQRAPPASGDGFEPQMVKSPSFGGASEASARTPPQVVQPSPSLSTFFGDTAASHSLASDFFDSFTTSAFISVSNPGAGSPAPASPPPLAVPGTEGRPEPVAMRGPQAAAPPASPEPFAHIQAVFAGSDDPFATALSMSEMDRRNDAWLPGEATRGVLRAVATQQRGAVFVDKENLTMPGLRFDNIQGDAVKDLMLRFLGEKAAAKRQVLNADSVEQSFVGLKQLISCRNWRAAVDLCGRLLTAHGQGYGKSGLLTSHTTDSLQLWFVRLALLVKLGLFQNAEMEFEPFGNLDQPDLYYEYYPHVYPGRRGSMVPFSMRILHAELQQYLGNPQESLDRLHKVKTVCSKILANLEQGLAEDGGMSSVTQEGRQASIRLWRSRLGRVMYSMANCLLLMKDYVLAVEAYHSVIKYYPEQEPQLLSGIGRISLQIGDIKTAEKYFQDVEKVTQKLDGLQGKIMVLMNSAFLHLGQNNFAEAHRFFTEILRMDPRNAVANNNAAVCLLYLGKLKDSLRQLEAMVQQDPRHYLHESVLFNLTTMYELESSRSMQKKQALLEAVAGKEGDSFNTQCLKLA

SEQ ID NO: 105 - DNA, 3333 bp, Homo sapiens
cggcgccagcggccgcacgccgcggagcaggggctcggaggtcccgggattacggtgctcgagcacgctggtgggaaaggacccgggacttgaacagtgttgtgcggcgccatgcaggtctccagcctcaatgaggtgaagatttacagcctcagctgcggcaagtcccttcctgagtggctttctgataggaagaagagagcgctacagaagaaagatgtagatgtccgtaggagaattgaacttattcaggactttgaaatgcctactgtgtgtaccactattaaggtgtcaaaagatggacagtacattttagcaactggaacatataaacctcgggttcgatgttatgacacctatcaattatccttgaagtttgaaaggtgtttagattcagaagttgtcacctttgaaattttgtctgatgactactcaaagattgtcttcttacataatgatagatacattgaatttcattcgcaatcaggtttttactacaaaaccagaataccaaagtttgggagagatttctcttaccactatccatcctgtgacttgtactttgttggtgcaagttctgaagtttataggttaaacttagaacaaggacgatacctgaatcctctacaaactgatgctgcggagaataatgtttgtgacataaattcagtgcatggcttgtttgccacaggaaccatagagggtagagtggagtgctgggacccaagaactcgaaacagagttggcctgttagactgcgccttaaacagtgtcacagcagattcagagataaacagtttaccaacaatctctgctttgaaatttaatggtgccttgaccatggcagttggaacaaccacagggcagggaaaaatatttacttccttggagccagagcatgaccttaatgatgtttgtctctaccccaactcaggcatgctcctgacggccaatgaaacccccaagatgggcatctattacattccagttttgggtcctgctcctcggtggtgttccttcttagacaacttgaccgaagaattagaagagaatccagaaagcacagtctatgatgattataaatttgtcaccaagaaagaccttgaaaatttagggctcacccacctcattggatctcctttcctccgggcatatatgcatgggtttttcatggatataagactctatcacaaggtgaaactgatggtaaatccatttgcttatgaagaatataggaaagataaaatacgacagaaaatagaagaaacacgtgcacagagagtccagttaaagaaattgccaaaagttaacaaagagctggcacttaaattaattgaggaagaagaggagaagcagaaatctacatggaaaaagaaagttaagagtcttcctaatattctcaccgatgatcgatttaaagttatgtttgagaaccctgacctccaagtagatgaagagagtgaagaatttaggcttctgaatccacttgtttcaaaaattagtgaaaaaaggaagaagaaactaagactcttagagcaacaagaacttcgtgaaaaagaagaggaggaagagccggaaggaaaaccaagtgatgcagaaagttcggagagttcagatgatgaaaaagcctgggttgaagaggtcaggaagcaacgcagactcctccagcgggaggaaaaagtgaagcggcaggaacgactcaaggaggaccagcagacagtcctaaagccccagttttatgagatcaaagcaggagaagaatttagaagcttcaaagattctgccacaaagcagaaactgatgaacaaaacccttgaagatcgtttgaaaattgaagcaaaaaatgggacattgagtgtatccgacaccaccgttggcagcaaacaattgacattcacgttaaagaggtctgaacagcagaagaagcaacaggaggctgagaaactacatcgacaagaaaggaaaagactccgtcgttcggccggacacctgaagtcaagacacaaaagaggacggtcgtttcattgatttgggaagtggtcctacctgtgattagggaggggtacgtctcccccaaactgatcatcgttagggtgttaaacacagacgaggaaacacacgtttttaaagttcatgtacgttcttgtacacagaggtaaagatttgaaaacctgtgccttgtgggttggactttgaagctggccccgccgacggccaccgcacagccccaggggtgtacttgcaagtcgttgctccctgggaacattgtcctttccccacggctttaatcatgaaaaccaggttggggttttttttttaatattgtgaaatgtacaccatgaaatgaaaggtttatcctgtgccagaaaccaaggtttatcatgctctaggaacttttttcttacactgcctaccgccattcatgattaaaccatccagaaataccatccctgttttacctggtgtctgtgtattgcctgtgtttgtgtttataagtttatgctgataggtttgttcggcttgtttatgtattagtttgggatttgtttttaaataatttataccaagagagtataatctaatggtgcaggttgagagcatcccaaatccgaaaatctaaaactgtttgagcactgtatttatctgttcttgcactgctataaagaactacctgaaactgggtaatttataagtaaagaaaagaggtttaattgactcacagttctacaggtgatacaggaagcatggctgtggaggccctgggaagcttacaatcgtggcggaaggtgaagcggaagcaggtatgtcctgcgtggctagagccagaggaggagggcaaaggggcagatgctgcacactttcaaacaccagatctccaagaactcactaacacagaatagcaagggggaagtctgcccccatgtttcagtcacctccctccaggcccctcctccaacaccgaagattacaatttgacatgagatttgtgtggggacacagagcaaaaccatatcaagcactgacatgacactggaggaaaatgctcattagagcttttcaggttttggattttcggatttgggatacttgactagtaaatataatacagatattccaaaacacacaaaaaaaccaaagtctaaaagacttctggtcccaagcatttcagataagggatacccaacctgtaataatgggaaacaagcagtagaggctgttggttaatcttggcacaagtttaattacaggtttttttttttcctgtttcttaagtacagtcaaacataaacttactggaggaaacatttataaaaataaatatactttcatttg

SEQ ID NO: 106 - protein, 638 aa, Homo sapiens
MQVSSLNEVKIYSLSCGKSLPEWLSDRKKRALQKKDVDVRRRIELIQDFEMPTVCTTIKVSKDGQYILATGTYKPRVRCYDTYQLSLKFERCLDSEVVTFEILSDDYSKIVFLHNDRYIEFHSQSGFYYKTRIPKFGRDFSYHYPSCDLYFVGASSEVYRLNLEQGRYLNPLQTDAAENNVCDINSVHGLFATGTIEGRVECWDPRTRNRVGLLDCALNSVTADSEINSLPTISALKFNGALTMAVGTTTGQGKIFTSLEPEHDLNDVCLYPNSGMLLTANETPKMGIYYIPVLGPAPRWCSFLDNLTEELEENPESTVYDDYKFVTKKDLENLGLTHLIGSPFLRAYMHGFFMDIRLYHKVKLMVNPFAYEEYRKDKIRQKIEETRAQRVQLKKLPKVNKELALKLIEEEEEKQKSTWKKKVKSLPNILTDDRFKVMFENPDLQVDEESEEFRLLNPLVSKISEKRKKKLRLLEQQELREKEEEEEPEGKPSDAESSESSDDEKAWVEEVRKQRRLLQREEKVKRQERLKEDQQTVLKPQFYEIKAGEEFRSFKDSATKQKLMNKTLEDRLKIEAKNGTLSVSDTTVGSKQLTFTLKRSEQQKKQQEAEKLHRQERKRLRRSAGHLKSRHKRGRSFH

SEQ ID NO: 107 - DNA, 3112 bp, Homo sapiens
agccggcagagcgctccggccccgcacccgccgcccgtcgcccgcagccccctaccgcgcggcccgcgccccgccggctcccgtcactgggtaagagaagactggaagcatgtcggagttttggttaatttctgcccctggcgataaggaaaatttgcaagctctggagaggatgaatactgtaacctccaagtccaacctgtcttataataccaaattcgctattcctgacttcaaggtggggaccttggattccctggttggcctctctgatgagttggggaaactcgacacctttgctgaaagcctcataaggagaatggctcagagcgtggtggaagtcatggaggactcaaaggggaaggtccaggagcacctcctggcaaacggagttgacttaacatcctttgtgacccactttgaatgggacatggccaaatatcctgtcaagcagccgctcgtgagtgtggtggacacaatagccaagcaactggcgcagatcgagatggacctgaagtcccgaacggccgcctacaacactctgaagacaaacctggagaacctggaaaagaaatccatggggaacctcttcacccggacactgagtgatattgtgagcaaagaggacttcgtgctggattctgaatatctcgtcacacttctggtcatcgtccccaaaccaaactactcacaatggcaaaaaacctacgaatctctctcagacatggtggtccctcgatcaaccaaactcattactgaggacaaggaagggggccttttcactgtgactctgtttcgaaaagtgattgaagatttcaaaaccaaggccaaagaaaacaagttcactgttcgtgaattttactatgatgagaaggaaattgaaagggaaagggaggagatggccagattgctgtctgataagaagcaacagtatggccccctgctgcgctggctcaaggtgaacttcagtgaagccttcattgcctggatccacatcaaggccctgagagtgtttgtggagtccgtgctcaggtatggactaccagtgaacttccaggcagtgctcctgcagccgcataagaagtcatccaccaagcgtttaagagaggttctaaactctgtcttccgacatctggatgaagtagccgctacaagtatactggatgcatctgtggagatcccgggactgcaactcaataaccaagactattttccttatgtctacttccatattgaccttagtcttcttgactagaaaggccagctggcacctctgtctcatgttcgtgcagattattacagacacctctttcctttagccagagaatggttcaaatgtcttacagaactaagatctttttcagagaaattgctcacaaaagttagtgacagttgtatttatttttttaagttacaataaaatgctctcaagtcctttgaatgttccaacaaattcaaaacttcattttctgaatgttttacataaatgcgaactacctgttcgcattggtaacctgctgctgtatttcatgtcttaacggctattttgaggttcattaacaacatagaaagccttgaactgtataaccagctagattccttaataattagtcactagagacagcccaaagacaaatattgggcaggaaatcagttctcactgagcccggtttccatgtaaaatctctgttgtggtgggcataggtggcaccatctaaagaaaagaggtcttgttttttgtttaaaaaagtttgtggggaggaaagacatctgtgtatcacttcaaaatattgatttactgctaaacatcactctgaatttatgatgtggatactaacttcatacatttatcggcattgtccaaaatattttattctttaatggaaaaagccattaatattcaaatgaagggatcacattaaaaaaaacccatacataagaaacagcctccaagaacattcaagcagcagtcagagagaaaaatgtttcgacagccaagttttcttcaaaatattatgtgacagaatacgactcaattcaccggctacaacaattcatagaatttttcaatgttttcttgagatgcaaaagttcactgttgcagtgttttcaaatgaccaatcaagtactacttcttggttaaaaggccactggtagagtcatctgagtgtagagaatgtcccttcactgctggaaaaatccactggctcccaagaaaagaaaatggtctgaagcctctgttgtggctctcacaactcatctttccctaagtcatcaagctccacatcactgaggtcaatgtcatcctccacgggaagctgggagacgacagaaagccactgttagatctgcagaaggggacaccctggaaggtcaacatctcattttatggaagagcgactctctggagctactcctgctacaatccaggttctcctcagtctgactcctaccctgaccttcgtacctatgattatacggatggaaaagctcagaactcaggtgaaacatttcaacatcacatcactcaccattttaacactggaagccacttgaacgtgtccttttgaggagggtgggacacaacagtacagaaataagtgctaatttcaaagctatcattttctatttttctaagataaagtaaatgaattccaggttaaatgttcactttaaggtaataatcaggaaagcaaccttactactgaaatgtatcttggctgtcaagagtatcaaatgccatgcagcacttaaacttgtgataaggaagatgaagggtcttcagagaagaacctcttaaaaggcccacgggtgcaccagggctgaggtctgatgggaaggacttgactccaggtgcagagatgcacaggctcaagagagtaaaccaggactgctgcccgcacagcttccctcccgggcactcacctcgccatccctgccgtcccaaggctctctctcaacgatggtagggaaagccccgcctcctacaggtgccgtggagccacgcccaaaagagagctcccttagggaaaaatgaccaaaacacacacacacatttacaatggactgctggtgcagaagaataaacaactttaaaaataaaaaaaaaaaa

SEQ ID NO: 108 - protein, 381 aa, Homo sapiens
MSEFWLISAPGDKENLQALERMNTVTSKSNLSYNTKFAIPDFKVGTLDSLVGLSDELGKLDTFAESLIRRMAQSVVEVMEDSKGKVQEHLLANGVDLTSFVTHFEWDMAKYPVKQPLVSVVDTIAKQLAQIEMDLKSRTAAYNTLKTNLENLEKKSMGNLFTRTLSDIVSKEDFVLDSEYLVTLLVIVPKPNYSQWQKTYESLSDMVVPRSTKLITEDKEGGLFTVTLFRKVIEDFKTKAKENKFTVREFYYDEKEIEREREEMARLLSDKKQQYGPLLRWLKVNFSEAFIAWIHIKALRVFVESVLRYGLPVNFQAVLLQPHKKSSTKRLREVLNSVFRHLDEVAATSILDASVEIPGLQLNNQDYFPYVYFHIDLSLLD

SEQ ID NO: 109 - DNA, 2344 bp, Homo sapiens
ggcccgcccccgcgcggccgcccctcggaccaccggactggcctggggcgggacgtgggcgcgggggcgcggcgtgcggcacgctgcagggctgaagcggcggcggcggtggggactgcacgtagcccggcgctcggcatggctctcctggtgctcggtctggtgagctgtaccttctttctggcagtgaatggtctgtattcctctagtgatgatgtgatcgaattaactccatcgaatttcaaccgagaagttattcagagtgatagtttgtggcttgtagaattctatgctccatggtgtggtcactgtcaaagattaacaccagaatggaagaaagcagcaactgcattaaaagatgttgtcaaagttggtgcagttgatgcagataagcatcattccctaggaggtcagtatggtgttcagggatttcctaccattaagatttttggatccaacaaaaacagaccagaagattaccaaggtggcagaactggtgaagccattgtagatgctgcgctgagtgctctgcgccagctcgtgaaggatcgcctcgggggacggagcggaggatacagttctggaaaacaaggcagaagtgatagttcaagtaagaaggatgtgattgagctgacagacgacagctttgataagaatgttctggacagtgaagatgtttggatggttgagttctatgctccttggtgtggacactgcaaaaacctagagccagagtgggctgccgcagcttcagaagtaaaagagcagacgaaaggaaaagtgaaactggcagctgtggatgctacagtcaatcaggttctggcctcccgatacgggattagaggatttcctacaatcaagatatttcagaaaggcgagtctcctgtggattatgacggtgggcggacaagatccgacatcgtgtcccgggcccttgatttgttttctgataacgccccacctcctgagctgcttgagattatcaacgaggacattgccaagaggacgtgtgaggagcaccagctctgtgttgtggctgtgctgccccatatccttgatactggagctgcaggcagaaattcttatctggaagttcttctgaagttggcagacaaatacaaaaagaaaatgtgggggtggctgtggacagaagctggagcccagtctgaacttgagaccgcgttggggattggagggtttgggtaccccgccatggccgccatcaatgcacgcaagatgaaatttgctctgctaaaaggctccttcagtgagcaaggcatcaacgagtttctcagggagctctcttttgggcgtggctccacggcacctgtaggaggcggggctttccctaccatcgttgagagagagccttgggacggcagggatggcgagcttcccgtggaggatgacattgacctcagtgatgtggagcttgatgacttagggaaagatgagttgtgagagccacaacagaggcttcagaccattttcttttcttgggagccagtggatttttccagcagtgaagggacattctctacactcagatgactctaccagtggccttttaaccaagaagtagtacttgattggtcatttgaaaacactgcaacagtgaacttttgcatctcaagaaaacattgaaaaattctatgaattgttgtagccggtgaattgagtcgtattctgtcacataatattttgaagaaaacttggctgtcgaaacatttttctctctgactgctgcttgaatgttcttggaggctgtttcttatgtatgggttttttttaatgtgatcccttcatttgaatattaatggctttttccattaaagaataaaatattttggacaatgccgataaatgtatgaagttagtatccacatcataaattcagagtgatgtttagcagtaaatcaatattttgaagtgatacacagatgtctttcctccccacaaacttttttaaacaaaaaacaagacctcttttctttagatggtgccacctatgcccaccacaacagagattttacatggaaaccgggctcagtgagaactgatttcctgcccaatatttgtctttgggctgtctctagtgactaattattaaggaatctagctggttatacagttcaaggctttctatgttgttaatgaacctcaaaatagccgttaagacatgaaatacagcagcaggttaccaatgcgaacaggtagttcgcatttatgtaaaacattcagaaaatgaagttttgaatttgttggaacattcaaaggacttgagagcattttattgtaacttaaaaaaataaatacaactgtcactaaaaaaaaaaaaaaaaaa

SEQ ID NO: 110 - protein, 440 aa, Homo sapiens
MALLVLGLVSCTFFLAVNGLYSSSDDVIELTPSNFNREVIQSDSLWLVEFYAPWCGHCQRLTPEWKKAATALKDVVKVGAVDADKHHSLGGQYGVQGFPTIKIFGSNKNRPEDYQGGRTGEAIVDAALSALRQLVKDRLGGRSGGYSSGKQGRSDSSSKKDVIELTDDSFDKNVLDSEDVWMVEFYAPWCGHCKNLEPEWAAAASEVKEQTKGKVKLAAVDATVNQVLASRYGIRGFPTIKIFQKGESPVDYDGGRTRSDIVSRALDLFSDNAPPPELLEIINEDIAKRTCEEHQLCVVAVLPHILDTGAAGRNSYLEVLLKLADKYKKKMWGWLWTEAGAQSELETALGIGGFGYPAMAAINARKMKFALLKGSFSEQGINEFLRELSFGRGSTAPVGGGAFPTIVEREPWDGRDGELPVEDDIDLSDVELDDLGKDEL

SEQ ID NO: 111 - DNA, 2304 bp, Homo sapiens
ttgtgtttagaaaaggctcgggcaaagccagcccaagttcgctctctgcacacctcgagcacctcgcggacggcgtgggtccgccagctccgggacctgccgccgctgcctgcgcgccccggggcggaggacggtgccagccgcccacgaggagaccccgctcccgcaggaggccgagctgaagcggcggagcgcgccgccagccagccggggtgagtgccccgggcgaggccggcggccgccaaagcccccgcgggctcgcccgggcgcccggatgccagccccgagccccgccgccgggtgcatgcctcccccgcggcgcgcccccgcaggctgctgcccgctgtgaccgcccttccccgcaggcgggcgccggccaggctctccccgagatcagcgcacgggtggcacccgccggacccccagcggcagcggcggcggcggctgcagggggcgcggggcggaggctgcgagggcgcgcgcggggaggatggacgggtccggggagcgcagcctcccggagccgggcagccagagctccgctgccagcgacgacatagagatagtcgtcaacgtggggggcgtgcggcaggtgctgtacggggacctcctcagtcagtaccctgagacccggctggcggagctcatcaactgcttggctgggggctacgacaccatcttctccctgtgcgacgactacgaccccggcaagcgcgagttctactttgacagggacccggacgccttcaagtgtgtcatcgaggtgtactatttcggggaggtccacatgaagaagggcatctgccccatctgcttcaagaacgagatggacttctggaaggtggacctcaagttcctggacgactgttgcaagagccacctgagcgagaagcgcgaggagctggaggagatcgcgcgccgcgtgcagctcatcctggacgacctgggcgtggacgcagccgagggccgctggcgccgctgccagaagtgcgtctggaagttcctggagaagcccgagtcgtcgtgcccggcgcgggtggtggccgtgctctccttcctgctcatcctcgtctcgtccgtggtcatgtgcatgggcaccatccccgagctgcaggtgctggacgccgagggcaaccgcgtggagcacccgacgctggagaacgtggagacggcgtgcattggctggttcaccctggagtacctgctgcgcctcttctcgtcacccaacaagctgcacttcgcgctgtccttcatgaacattgtggacgtgctggccatcctccccttctacgtgagcctcacgctcacgcacctgggtgcccgcatgatggagctgaccaacgtgcagcaggccgtgcaggcgctgcggatcatgcgcatcgcgcgcatcttcaagctggcccgccactcctcgggcctgcagaccctcacctatgccctcaagcgcagcttcaaggaactggggctgctgctcatgtacctggcagtgggtatcttcgtcttctctgccctgggctacaccatggagcagagccatccagagaccctgtttaagagcatcccccagtccttctggtgggccatcatcaccatgaccaccgtcggctacggcgacatctaccccaagaccacgctgggcaagctcaacgcggccatcagcttcttgtgtggtgtcatcgccatcgccctgcccatccaccccatcatcaacaactttgtcaggtactacaacaagcagcgcgtcctggagaccgcggccaagcacgagctggagctgatggaactcaactccagcagcgggggcgagggcaagaccgggggctcccgcagtgacctggacaacctccctccagagcctgcggggaaggaggcgccgagctgcagcagccggctgaagctctcccacagcgacaccttcatccccctcctgaccgaggagaagcaccacaggacccggctccagagttgcaagtgacaggagggcccctcaggcagagatggaccaggcggtggacagatgggtagatgtggcaggcatgtcatcgacagcacagaagggctgtcctgtgtccccccaaccctcccctggacagactctgaaggccctcccggcacctctgccaaggctgggtaagactcctctatgttgcctgctgtccaggagcccgggagggaggggtgtgcaggagccgcagggccgtgtgggacgagtggaggccgcggcctggctggcacgagagcccacgcccgcttctgtatctccctcaataaagcctcctgctctgtgcaaaaaaaaaaaaaaaa

SEQ ID NO: 112 - protein, 494 aa, Homo sapiens
MDGSGERSLPEPGSQSSAASDDIEIVVNVGGVRQVLYGDLLSQYPETRLAELINCLAGGYDTIFSLCDDYDPGKREFYFDRDPDAFKCVIEVYYFGEVHMKKGICPICFKNEMDFWKVDLKFLDDCCKSHLSEKREELEEIARRVQLILDDLGVDAAEGRWRRCQKCVWKFLEKPESSCPARVVAVLSFLLILVSSVVMCMGTIPELQVLDAEGNRVEHPTLENVETACIGWFTLEYLLRLFSSPNKLHFALSFMNIVDVLAILPFYVSLTLTHLGARMMELTNVQQAVQALRIMRIARIFKLARHSSGLQTLTYALKRSFKELGLLLMYLAVGIFVFSALGYTMEQSHPETLFKSIPQSFWWAIITMTTVGYGDIYPKTTLGKLNAAISFLCGVIAIALPIHPIINNFVRYYNKQRVLETAAKHELELMELNSSSGGEGKTGGSRSDLDNLPPEPAGKEAPSCSSRLKLSHSDTFIPLLTEEKHHRTRLQSCK

SEQ ID NO: 113 - DNA, 4119 bp, Homo sapiens
cacgaggtgcaccccttcccccaaaccctatcccgcgccctgcttccccttctgctgcggcgccctcttcatctctagccgccccccctccccaaatcaggcgatctccggagatgtgaagaaggggggcgagcggacaggaagatgaagggagcaaagctgcccgccgcgggacaggcgtctaggtaacaagaaaatgaccgaagaaacacacccagacgatgacagctatattgtgcgtgtcaaggctgtggttatgaccagagatgactccagcgggggatggttcccacaggaaggaggcgggatcagtcgcgtcggggtctgtaaggtcatgcaccccgaaggcaatggacgaagcggctttctcatccatggtgaacgacagaaagacaaactggtggtattggaatgctatgtaagaaaggacttggtctacaccaaagccaatccaacgtttcatcactggaaggtcgataataggaagtttggacttactttccaaagccctgctgatgcccgagcctttgacaggggagtaaggaaagcaatcgaagaccttatagaaggttcaacaacgtcatcttccaccatccataatgaagctgagcttggcgatgatgacgtttttacaacagctacagacagttcttctaattcctctcagaagagagagcaacctactcggacaatctcctctcccacatcctgtgagcaccggaggatttataccctgggccacctccacgactcataccccacagaccactatcacctcgatcagccgatgccaaggccctgccgccaggtgagcttcccggacgacgacgaggagatcgtgcgcatcaacccccgggagaagatctggatgacggggtacgaggattaccggcacgcacccgtcaggggcaagtacccggacccctcggaggacgcggactcctcctacgtgcgcttcgccaagggcgaggtccccaagcatgactacaactacccctacgtggactcctcagactttggcctaggcgaggaccccaaaggccgcgggggcagcgtgatcaagacgcagccctcccggggcaagtcgcggcggcggaaggaggacggagagcgctcgcggtgcgtgtactgcagggacatgttcaaccacgaggagaaccgccggggccactgccaggacgcccccgactccgtgagaacttgcatccgccgggtgagctgcatgtggtgcgcggacagcatgctctatcactgtatgtcggaccccgagggagactatacagacccttgctcgtgcgatactagcgacgagaagttttgcctccggtggatggctcttattgccttgtctttcctggccccctgtatgtgctgttacctgccccttcgggcctgctaccactgcggagtgatgtgcaggtgctgtggcgggaagcacaaagcggccgcgtgactcagtttccctcccttctccctccatccgcagccacaggggaactcgtctcttacatactctcatcttctcccccgctcccttccactccaaggagcgaggagggcaagcggcctcccagctccctggtacctcgaggcaccattccagccagggacgctgccgggtagactctccactccccctgccgcccacactgcagcagccacatccatacacacacgctcgcacagtgttctgaggaaggaaccttcgccacagactcctgtactattaacaatctgtaaccaagctaactgtctcatccatgtgttgatttcctgtttcctcctcccccgcctcttccagttcaaaggagtctgcaattggaactgctgattttcggtgggttttgtagttgatttttccaagagcgtcgaagactctctttctcttggttcaccttgcctgtcgctagcaagcatctggttcagcggaaatgggatgtgagaatgatgaaacccgacagaagtatctcagcctgcagtcagttattatgtataggaggtgagctagttaacaaacttgtaccacaaaacaatatcgctttaacttttctaaagccaaatttcccatgtaagctgcagtttctatctttagcccatcatcattttctgcccccccaaaatctgttgaaatgattcactgatgcaaaacattcacccgtaatagactgagaattgagccttaacttcagattaacttgtgagaatcaggaaaattccttcaactgcattgcatcctcttggaccagggctagaatggggatttcaggtttctatgagcctccccattacccctaaagtagaacattttttaaattgtgttgccaccacttctaaaaatttagcaatattagaataggatactagtgaagtaagaaattttgcttgttgttttgcaaaccaaatagtttcctcaaacacaaatcagtgttcccacgaacaagttccagttgagaaacactaaggttatggtgaataaaaccatagggagcttcttccccccaacccctggctattttatattaatggggagaggggatttttaaatgtcataaatttgaagagtggtgggttgcattttcttcatgggtttatgttttcgtttcattttggactcaatttcacatcaccaaattcctcatttatacttggggaaaaaacaaggccatatgtaaaaacccttccaatgcctaagtgtctttctcctgcaactccaaacccagactcgccactttgggtgcacaggtggttaggtcagccaactggttctgcctgtcgccttgccacggaggaggcttctaattagctggaaaagagtatttttctaatacgttgcaaggattagccaaatcttcttattgaagaaagaagaaaagtgaagagtggttacctatacctagcatagtacaatcagaacctcgtggagaccaccggggacaggcttgcggacgccggctgttcttcccgccacgatctttctgtggtagcggccagcagaagacatggcctgctccccactccctttccccactccttctttattgcacacaggacaccagtcttcaaggaaagggacttttttccagtctgccaatcatattgggaaagtgctagctgtgctcaccttcatggggctgtttccagctcgtccacaagctcatcgattttctttagtagattaccggtgtaaatacccagtgtgcttatgagtcagttagtagacgtcttcattcattggagtaactggtttaggctttccagtttggaaaaggagcagagagctgtccatctggattgatggaagaaaagagaacctcatccatgcctggagaacatctagaaaaccttcagccagcctccagtgctgtcgagagaccaccttcccccgacccggaggcacttccttggggtctttctctagggtctcctctctacaaagcacaacactaatgttcgtttccttagacctcagttcaagtgcccctatttatttcaataagaacgcacatatcccagctgttttttgtttgtcacctctatttagttgttacctgtttctctcttctttcaccccctgtccttttccacccttttaagagttacgctagcagatcttactccacgtatactttttggtttgtgaaggcatcggttaagggcacaaagacagccatggggacatttatgtaaatacgtctctaattgccacactgcagctgaacagtgtgtagtattttcccagtcagctttgccatactgacgtcaatcatttgagagaaattattcagattttatttttgtatctgtggtaacaaaacattaaccaaaagattttctgtccagaagcctccccgaccccccaagctatttgctcacattaacaaattaaagtgcctgaagcataattcattctttacctgtatactaaaaaccctgttgtattgatttttttataataagcctttttacctctgtgtaaaaaatatatatacaagtgtatgatgtacattttagttcttaactttttttttatggtttctaatatgtatgaccaatgtagccattgctttaaaatgtaccgtgtaaatataaacacatcctatcagaaaaaaaaaaaaaaaa

SEQ ID NO: 114 - protein, 418 aa, Homo sapiens
MTEETHPDDDSYIVRVKAVVMTRDDSSGGWFPQEGGGISRVGVCKVMHPEGNGRSGFLIHGERQKDKLVVLECYVRKDLVYTKANPTFHHWKVDNRKFGLTFQSPADARAFDRGVRKAIEDLIEGSTTSSSTIHNEAELGDDDVFTTATDSSSNSSQKREQPTRTISSPTSCEHRRIYTLGHLHDSYPTDHYHLDQPMPRPCRQVSFPDDDEEIVRINPREKIWMTGYEDYRHAPVRGKYPDPSEDADSSYVRFAKGEVPKHDYNYPYVDSSDFGLGEDPKGRGGSVIKTQPSRGKSRRRKEDGERSRCVYCRDMFNHEENRRGHCQDAPDSVRTCIRRVSCMWCADSMLYHCMSDPEGDYTDPCSCDTSDEKFCLRWMALIALSFLAPCMCCYLPLRACYHCGVMCRCCGGKHKAAA

SEQ ID NO: 115 - DNA, 1825 bp, Homo sapiens
tatgcttcatccccggtgccgttcaatcccaggtcgttttccctttcagctgcaatgccgggattttaaatagcagagatgaaaggcccctgcccccacctccctcctcccctgagttcatgtattatgaatgaaacggcagcctcgctgcttcctgaggtgctccacttcaggctggggtgcaatggctcgatctcggctcagtgcaacctctgcttcccgggttcaagtgattctcctgcgtcagcctcccaagcagctgtgaatacaggttggagtgcagtggtgctgtgtctggagtttgttcctgccgttgggtttgtggtcttgctgacttcaagaatgaagccacggaccttcacgagaaatattacgttgtatggatgtaccactgtttgtttatccattcttcaggtgaaggacatgtgggttgtgcccagcgcgggctgaataaagatacacacacaggcacattggaaacgcagtagaaaatggctgccaatttaaaaccagaagttaagaagagcaaactcgaatgtacagcaagagagcttcaggctggactggcttccagcagaagtgggactggaaacctcggattctattgtctcttctctgtgaagtgggaaaacatattgctgagttgagtaaatatttccttccataaaggtgaagccttgatgactgtggtttgaattcactgggaaaagtggaatcgtcaagagacccgggctaactaaatccctctgggagcctcagcagctgaggccatcactcaaaattaagctcaactcagctgtacttctcaccacgtggcaaaggatggaccaaaggctgggagcaactgggagtgtctgggaacactttctggttgtcacagtgatcagcagccaggagcagcctgcaatgtgaagacagtcctgtgggacagtcctaggctacagggaactgtcctgcatcctgcatgtcttataaacatcctactggacgtcgatgtttgactgtgccccaaggaagccacacaaactgtgtagccagacagtctgtctgggaggagaaggaaggaatttatctaccagctcccatctctcatggaccaaattcttccccactgtactccagcctgggtgaaagagcaagatgtcgtctcaaaaaaaaaaaaattgtttactttccagtgtcattttaacttgttactagtgagcatctggcctgggtgttttccattagcatgaaaattcagaaggctacagaaggaaatacctataattgagcagcgagagagccacttcattctgtggccaggcaatatgtcttgcatttctctagtgtaaataaaatgatgattcaaagaatggtccccattaatgagtatctgatttagaataaaacaaaatccatgctgggaagttgatgagcttgattttgctgaattgctttgagcttgcagcttatatttattggttctttcctttcgacaattgtcaccagttgtctgctgttctttcgggagagggcttgaaggttgattttagttccctgtaactggaggtgacatgtgaaagctcaaagctattgaaaagttgcaaaggcttccacacacaactgcagtagggagggcgcaggaagtgggtcaacgcttttggaggactgggtgaagttcaggatcctgaggccctactttttggtcgcccagggtgagagctgaatgtaggctccaacaggaagacggcattgaagcctggttgcttgttactactcagaatgccatctacaaaaggaaattatgtaaaaagcaataaagaaccccttttgttcttgcagg

SEQ ID NO: 116 - protein, 123 aa, Homo sapiens [sequence omitted]

SEQ ID NO: 117 - DNA, 3298 bp, Homo sapiens
cggccgcctcttgcgcgcgccccaccgaccaaaatggcggctgccgttggtgcggggtgcggtttgtagtgctgttgccctactcatccctttgcaaaatgtgaaagaagaagcggctggtggaggcgggccataggcaatgagtcggcgaaggaaacatgatgacagccctagcccgaagaaaacgccgcacaaaacagtggcggcggaggaatgcggctcggtggtcgagccagggaggaggcggctgagatcggcccgcggttcgtggccctgcggggctagagaggggcctcccgggccagtgcggcagcgagagcagcctccgaccgccgccctgtgcagtaaaagtaaccccgaggaaaggtatgaaacaccaaagagagcgctgaaaatggactcactgtcatcttccttcagttctcctaatgatccagatggacagaatgatatcttttgggatcagaattctccattgacaaagcagttaggtaaaggaagaaaaaaacagatttacaccacagatagtgatgagatttcacatattgttaatcgtattgctcctcaggatgaaaaaccaacaacaaattctatgctggacatgtggattggtgaaactgctattccttgtactcccagtgtagcaaaaggaaaatcaagagcaaaaatcagctgcacaaagttaaaaacacaaagtcaagaagaagaacttatgaaactggctaaacaatttgataaaaatatggaagagctagatgtgattcaagagcaaaacaagaggaattatgattttacccagatgatttcagaaacagagattttaagtaattataaagataatatacagatgtggtcattacataatatagttcccgaaatagataatgctacaaaaaagccaatcaaaggaaacaccaagatatctgtggcaaataatcaaaatagcagtcagaagccatttgaccaaattgctgaagcagcctttaatgctatttttgatggttctactcagaaatgtagcggacagttaagccaagaactgccagaggctttttggagcaccagtaatactacctttgtaaagacaaatgctttgaaagaggagaaaatcattactaatgaaactctggtcattgaaaaactgtcaaataaaaccccacgatcactttcttctcaagtagatacacccataatgacaaaatcatgtgtgacttcctgtactaaggagccagaaacttctaataagtacattgatgcatttactacaagtgattttgaggatgattgggaaaacttactaggtagtgaaccttttgctatgcaaaatatcgacatgcctgaactctttccttctaaaacagcccatgttactgatcaaaaggaaatttgtacctttaatagtaaaactgttaaaaatacgtcaagagcaaatacaagtccagatgccaggttaggagattcaaaagtattacaagatctttcttcaaagacatatgacagagaattaatagatgcagaatatagattttcaccaaattcaaataaatcaaacaaattatccactggaaataaaatgaaatttgagaactcttccaataaaattgttattcaagacgaaattcaaaattgtatagttacatctaatctgacaaaaataaaggaagatattcttactaactctactgaagcttctgaaaggaagtcagctttgaacacaaggtattctaatgaacagaaaaataagtgcattttaaatcagtctattaaagcccctgttaatactgatctttttggctctgcaaatctaggcagtaaaaccagtgttagtaacccaaatcagactagtgcatcaaaagtaggttctttctttgatgattggaatgatccctcatttgccaatgaaattattaaagcatgtcatcaattagataatacctgggaagcagatgatgtagatgatgatttgttgtaccaagcatgtgatgatattgaaagactaactcagcaacaagacattagaaaggacagtaagacatcagaaagtatatgtgagatcaataataattccgaacatggagccaaactaactcagcaacaagacattagaaaggacagtaagacatcagaaagtatatgtgagatcaataataattccgaacatggagccaaaaacatgtttgctatatctaaacaaggaagtaatttggtacaatcaaagcatttgaatccaggcagcatttcagtgcagacatctttgacaaatagctcacaaatagataagccaatgaagatggagaaaggggaaatgtatggaaattctccaagatttttaggtgccacaaatttgactatgtattctaagatctcaaactgtcagataaataatctgcatgtgtcttatactaacactgatgttccaatacaagtgaatagttccaaattggttcttccaggaagttcaagtttgaatgtaacttcagatcatatgaatacagaaattactacttataagaagaaattgagtactaatcagccatgccataagactgtaacagatgaagctcagagcaaccttaacacaacagttggattttcaaagtttacatttacaaggatgaaaaattctcagattctttctcagtttaatcaaaattgtataactggaagtatgtctgataccaaaattacacagggtgtggagaaaaagaaaggtgtcaacccattactggaggaagctgttggacagcaatctttggtgaaactttctgaatctttgaaacaatcttcaaaagaggaagaagagaaaaatagaaagtgttctcctgaagaaattcagagaaaaagacaagaagcactggttcggagaatggctaaagcacgagcctcatctgtaaatgcagctcccacttcatttctttaatgaaatattagttggaagacttcacgaagactgctgataactatctgtgattgataggaaattttttttcttgatttctctgtgagaaatgtaatgctgacttttataaagcctggacttctactttatttaataaatcaatgtttgcaatggtaaatgaaacatttccttggacatgtatttgaaagtcattaaatacaaaagttttggaaattcaggaaagttagcaattatgtacggatattatacagaggaaagtagttatatttttaaatgctattattgcagaggatcatcaaaaaagaggtaatctacgttatttcctattctaatgtcttttcctaataaaaaacttcaactttcaaaaaaaaaaaaaaa

SEQ ID NO: 118 - protein, 926 aa, Homo sapiens
MSRRRKHDDSPSPKKTPHKTVAAEECGSVVEPGRRRLRSARGSWPCGAREGPPGPVRQREQPPTAALCSKSNPEERYETPKRALKMDSLSSSFSSPNDPDGQNDIFWDQNSPLTKQLGKGRKKQIYTTDSDEISHIVNRIAPQDEKPTTNSMLDMWIGETAIPCTPSVAKGKSRAKISCTKLKTQSQEEELMKLAKQFDKNMEELDVIQEQNKRNYDFTQMISETEILSNYKDNIQMWSLHNIVPEIDNATKKPIKGNTKISVANNQNSSQKPFDQIAEAAFNAIFDGSTQKCSGQLSQELPEAFWSTSNTTFVKTNALKEEKIITNETLVIEKLSNKTPRSLSSQVDTPIMTKSCVTSCTKEPETSNKYIDAFTTSDFEDDWENLLGSEPFAMQNIDMPELFPSKTAHVTDQKEICTFNSKTVKNTSRANTSPDARLGDSKVLQDLSSKTYDRELIDAEYRFSPNSNKSNKLSTGNKMKFENSSNKIVIQDEIQNCIVTSNLTKIKEDILTNSTEASERKSALNTRYSNEQKNKCILNQSIKAPVNTDLFGSANLGSKTSVSNPNQTSASKVGSFFDDWNDPSFANEIIKACHQLDNTWEADDVDDDLLYQACDDIERLTQQQDIRKDSKTSESICEINNNSEHGAKLTQQQDIRKDSKTSESICEINNNSEHGAKNMFAISKQGSNLVQSKHLNPGSISVQTSLTNSSQIDKPMKMEKGEMYGNSPRFLGATNLTMYSKISNCQINNLHVSYTNTDVPIQVNSSKLVLPGSSSLNVTSDHMNTEITTYKKKLSTNQPCHKTVTDEAQSNLNTTVGFSKFTFTRMKNSQILSQFNQNCITGSMSDTKITQGVEKKKGVNPLLEEAVGQQSLVKLSESLKQSSKEEEEKNRKCSPEEIQRKRQEALVRRMAKARASSVNAAPTSFL

SEQ ID NO: 119 - DNA, 3082 bp, Homo sapiens
agggagtcgtgtcggcgccaccccggcccccgagcccgcagattgcccaccgaagctcgtgtgtgcacccccgatcccgccagccactcgcccctggcctcgcgggccgtgtctccggcatcatgtgtggtatatttgcttacttaaactaccatgttcctcgaacgagacgagaaatcctggagaccctaatcaaaggccttcagagactggagtacagaggatatgattctgctggtgtgggatttgatggaggcaatgataaagattgggaagccaatgcctgcaaaacccagcttattaagaagaaaggaaaagttaaggcactggatgaagaagttcacaagcaacaagatatggatttggatatagaatttgatgtacaccttggaatagctcatacccgttgggcaacacatggagaacccagtcctgtcaatagccacccccagcgctctgataaaaataatgaatttatcgttattcacaatggaatcatcaccaactacaaagacttgaaaaagtttttggaaagcaaaggctatgacttcgaatctgaaacagacacagagacaattgccaagctcgttaagtatatgtatgacaatcgggaaagtcaagataccagctttactaccttggtggagagagttatccaacaattggaaggtgcttttgcacttgtgtttaaaagtgttcattttcccgggcaagcagttggcacaaggcgaggtagccctctgttgattggtgtacggagtgaacataaactttctactgatcacattcctatactctacagaacaggcaaagacaagaaaggaagctgcaatctctctcgtgtggacagcacaacctgccttttcccggtggaagaaaaagcagtggagtattactttgcttctgatgcaagtgctgtcatagaacacaccaatcgcgtcatctttctggaagatgatgatgttgcagcagtagtggatggacgtctttctatccatcgaattaaacgaactgcaggagatcaccccggacgagctgtgcaaacactccagatggaactccagcagatcatgaagggcaacttcagttcatttatgcagaaggaaatatttgagcagccagagtctgtcgtgaacacaatgagaggaagagtcaactttgatgactatactgtgaatttgggtggtttgaaggatcacataaaggagatccagagatgccggcgtttgattcttattgcttgtggaacaagttaccatgctggtgtagcaacacgtcaagttcttgaggagctgactgagttgcctgtgatggtggaactagcaagtgacttcctggacagaaacacaccagtctttcgagatgatgtttgctttttccttagtcaatcaggtgagacagcagatactttgatgggtcttcgttactgtaaggagagaggagctttaactgtggggatcacaaacacagttggcagttccatatcacgggagacagattgtggagttcatattaatgctggtcctgagattggtgtggccagtacaaaggcttataccagccagtttgtatcccttgtgatgtttgcccttatgatgtgtgatgatcggatctccatgcaagaaagacgcaaagagatcatgcttggattgaaacggctgcctgatttgattaaggaagtactgagcatggatgacgaaattcagaaactagcaacagaactttatcatcagaagtcagttctgataatgggacgaggctatcattatgctacttgtcttgaaggggcactgaaaatcaaagaaattacttatatgcactctgaaggcatccttgctggtgaattgaaacatggccctctggctttggtggataaattgatgcctgtgatcatgatcatcatgagagatcacacttatgccaagtgtcagaatgctcttcagcaagtggttgctcggcaggggcggcctgtggtaatttgtgataaggaggatactgagaccattaagaacacaaaaagaacgatcaaggtgccccactcagtggactgcttgcagggcattctcagcgtgatccctttacagttgctggctttccaccttgctgtgctgagaggctatgatgttgatttcccacggaatcttgccaaatctgtgactgtagagtgaggaatatctatacaaaatgtacgaaactgtatgattaagcaacacaagacaccttttgtatttaaaaccttgatttaaaatatcaccccttgaagcctttttttagtaaatccttatttatatatcagttataattattccactcaatatgtgatttttgtgaagttacctcttacattttcccagtaatttgtggaggactttgaataatggaatctatattggaatctgtatcagaaagattctagctattattttctttaaagaatgctgggtgttgcatttctggaccctccacttcaatctgagaagacaatatgtttctaaaaattggtacttgtttcaccatacttcattcagaccagtgaaagagtagtgcatttaattggagtatctaaagccagtggcagtgtatgctcatacttggacagttagggaagggtttgccaagttttaagagaagatgtgatttattttgaaatttgtttctgttttgtttttaaatcaaactgtaaaacttaaaactgaaaaattttattggtaggatttatatctaagtttggttagccttagtttctcagacttgttgtctattatctgtaggtggaagaaatttaggaagcgaaatattacagtagtgcattggtgggtctcaatccttaacatatttgcacaattttatagcacaaactttaaattcaagctgctttggacaactgacaatatgattttaaatttgaagatgggatgtgtacatgttgggtatcctactactttgtgttttcatctcctaaaagtgttttttatttccttgtatctgtagtcttttattttttaaatgactgctgaatgacatattttatcttgttctttaaaatcacaacacagagctgctattaaattaatattgatat

SEQ ID NO: 120 - protein, 681 aa, Homo sapiens
MCGIFAYLNYHVPRTRREILETLIKGLQRLEYRGYDSAGVGFDGGNDKDWEANACKTQLIKKKGKVKALDEEVHKQQDMDLDIEFDVHLGIAHTRWATHGEPSPVNSHPQRSDKNNEFIVIHNGIITNYKDLKKFLESKGYDFESETDTETIAKLVKYMYDNRESQDTSFTTLVERVIQQLEGAFALVFKSVHFPGQAVGTRRGSPLLIGVRSEHKLSTDHIPILYRTGKDKKGSCNLSRVDSTTCLFPVEEKAVEYYFASDASAVIEHTNRVIFLEDDDVAAVVDGRLSIHRIKRTAGDHPGRAVQTLQMELQQIMKGNFSSFMQKEIFEQPESVVNTMRGRVNFDDYTVNLGGLKDHIKEIQRCRRLILIACGTSYHAGVATRQVLEELTELPVMVELASDFLDRNTPVFRDDVCFFLSQSGETADTLMGLRYCKERGALTVGITNTVGSSISRETDCGVHINAGPEIGVASTKAYTSQFVSLVMFALMMCDDRISMQERRKEIMLGLKRLPDLIKEVLSMDDEIQKLATELYHQKSVLIMGRGYHYATCLEGALKIKEITYMHSEGILAGELKHGPLALVDKLMPVIMIIMRDHTYAKCQNALQQVVARQGRPVVICDKEDTETIKNTKRTIKVPHSVDCLQGILSVIPLQLLAFHLAVLRGYDVDFPRNLAKSVTVE

SEQ ID NO: 121 - DNA, 1091 bp, Homo sapiens
gttccccggcctctcttggtcagggtgacgcagtagcctgcaaacctcggcgcgtaggccaccgcacttatccgcagcaggaccgcccgcagccggtagggtgggctcttcccagtgcccgcccagctaccggccagcctgcggctgcgcagatctttcgtggttctgtcagggagacccttaggcactccggactaagatggcggcgacggccaggcggggctggggagctgcggctgttgccgccgggctgcgcaggcggttctgtcatatgttgaagaatccatacaccattaagaaacagcctctgcatcagtttgtacaaagaccacttttcccactacctgcagccttttatcacccagtgagatacatgtttattcaaacacaagataccccaaatccaaacagcttaaagtttataccaggaaaaccagttcttgagacaaggaccatggattttcccaccccagctgcagcatttcgctcccctctggctaggcagttatttaggattgaaggagtaaaaagtgtcttctttggaccagatttcatcactgtcacaaaggaaaatgaagaattagactggaatttactgaaaccagatatttatgcaacaatcatggacttctttgcatctggcttacccctggttactgaggaaacaccttcaggagaagcaggatctgaagaagatgatgaagttgtggcaatgattaaggaattgttagatactagaatacggccaactgtgcaggaagatggaggggatgtaatctacaaaggctttgaagatggcattgtacagctgaaactccagggttcttgtaccagctgccctagttcaatcattactctgaaaaatggaattcagaacatgctgcagttttatattccggaggtagaaggcgtagaacaggttatggatgatgaatcagatgaaaaagaagcaaactcaccttaaaataatctggattttctttgggcataacagtcagacttgttgataatatatatcaagtttttattattaatatgctgaggaacttgaagattaataaaatatgctcttcagagaatgatatataaaa

SEQ ID NO: 122 - protein, 254 aa, Homo sapiens
MAATARRGWGAAAVAAGLRRRFCHMLKNPYTIKKQPLHQFVQRPLFPLPAAFYHPVRYMFIQTQDTPNPNSLKFIPGKPVLETRTMDFPTPAAAFRSPLARQLFRIEGVKSVFFGPDFITVTKENEELDWNLLKPDIYATIMDFFASGLPLVTEETPSGEAGSEEDDEVVAMIKELLDTRIRPTVQEDGGDVIYKGFEDGIVQLKLQGSCTSCPSSIITLKNGIQNMLQFYIPEVEGVEQVMDDESDEKEANSP

SEQ ID NO: 123 - DNA, 1045 bp, Homo sapiens
gttccccggcctctcttggtcagggtgacgcagtagcctgcaaacctcggcgcgtaggccaccgcacttatccgcagcaggaccgcccgcagccggtagggtgggctcttcccagtgcccgcccagctaccggccagcctgcggctgcgcagatctttcgtggttctgtcagggagacccttaggcactccggactaagatggcggcgacggccaggcggggctggggagctgcggctgttgccgccgggctgcgcaggcggtaggtgacgagcctggagctccgaataggtgtgccgctgggcttagccagcggagcggtcgccgccttgcagaccctctctcgaggcgggttctgtcatatgttgaagaatccatacaccattaagaaacagcctctgcatcagtttgtacaaagaccacttttcccactacctgcagccttttatcacccaggcagttatttaggattgaaggagtaaaaagtgtcttctttggaccagatttcatcactgtcacaaaggaaaatgaagaattagactggaatttactgaaaccagatatttatgcaacaatcatggacttctttgcatctggcttacccctggttactgaggaaacaccttcaggagaagcaggatctgaagaagatgatgaagttgtggcaatgattaaggaattgttagatactagaatacggccaactgtgcaggaagatggaggggatgtaatctacaaaggctttgaagatggcattgtacagctgaaactccagggttcttgtaccagctgccctagttcaatcattactctgaaaaatggaattcagaacatgctgcagttttatattccggaggtagaaggcgtagaacaggttatggatgatgaatcagatgaaaaagaagcaaactcaccttaaaataatctggattttctttgggcataacagtcagacttgttgataatatatatcaagtttttattattaatatgctgaggaacttgaagattaataaaatatgctcttcagagaatgatatataaaa

SEQ ID NO: 124 - protein, 113 aa, Homo sapiens
MDFFASGLPLVTEETPSGEAGSEEDDEVVAMIKELLDTRIRPTVQEDGGDVIYKGFEDGIVQLKLQGSCTSCPSSIITLKNGIQNMLQFYIPEVEGVEQVMDDESDEKEANSP

SEQ ID NO: 125 - DNA, 955 bp, Homo sapiens
gttccccggcctctcttggtcagggtgacgcagtagcctgcaaacctcggcgcgtaggccaccgcacttatccgcagcaggaccgcccgcagccggtagggtgggctcttcccagtgcccgcccagctaccggccagcctgcggctgcgcagatctttcgtggttctgtcagggagacccttaggcactccggactaagatggcggcgacggccaggcggggctggggagctgcggctgttgccgccgggctgcgcaggcggttctgtcatatgttgaagaatccatacaccattaagaaacagcctctgcatcagtttgtacaaagaccacttttcccactacctgcagccttttatcacccaggcagttatttaggattgaaggagtaaaaagtgtcttctttggaccagatttcatcactgtcacaaaggaaaatgaagaattagactggaatttactgaaaccagatatttatgcaacaatcatggacttctttgcatctggcttacccctggttactgaggaaacaccttcaggagaagcaggatctgaagaagatgatgaagttgtggcaatgattaaggaattgttagatactagaatacggccaactgtgcaggaagatggaggggatgtaatctacaaaggctttgaagatggcattgtacagctgaaactccagggttcttgtaccagctgccctagttcaatcattactctgaaaaatggaattcagaacatgctgcagttttatattccggaggtagaaggcgtagaacaggttatggatgatgaatcagatgaaaaagaagcaaactcaccttaaaataatctggattttctttgggcataacagtcagacttgttgataatatatatcaagtttttattattaatatgctgaggaacttgaagattaataaaatatgctcttcagagaatgatatataaaa

SEQ ID NO: 126 - protein, 113 aa, Homo sapiens; identical to SEQ ID NO: 124

SEQ ID NO: 127 - DNA, 1181 bp, Homo sapiens
gttccccggcctctcttggtcagggtgacgcagtagcctgcaaacctcggcgcgtaggccaccgcacttatccgcagcaggaccgcccgcagccggtagggtgggctcttcccagtgcccgcccagctaccggccagcctgcggctgcgcagatctttcgtggttctgtcagggagacccttaggcactccggactaagatggcggcgacggccaggcggggctggggagctgcggctgttgccgccgggctgcgcaggcggtaggtgacgagcctggagctccgaataggtgtgccgctgggcttagccagcggagcggtcgccgccttgcagaccctctctcgaggcgggttctgtcatatgttgaagaatccatacaccattaagaaacagcctctgcatcagtttgtacaaagaccacttttcccactacctgcagccttttatcacccagtgagatacatgtttattcaaacacaagataccccaaatccaaacagcttaaagtttataccaggaaaaccagttcttgagacaaggaccatggattttcccaccccagctgcagcatttcgctcccctctggctaggcagttatttaggattgaaggagtaaaaagtgtcttctttggaccagatttcatcactgtcacaaaggaaaatgaagaattagactggaatttactgaaaccagatatttatgcaacaatcatggacttctttgcatctggcttacccctggttactgaggaaacaccttcaggagaagcaggatctgaagaagatgatgaagttgtggcaatgattaaggaattgttagatactagaatacggccaactgtgcaggaagatggaggggatgtaatctacaaaggctttgaagatggcattgtacagctgaaactccagggttcttgtaccagctgccctagttcaatcattactctgaaaaatggaattcagaacatgctgcagttttatattccggaggtagaaggcgtagaacaggttatggatgatgaatcagatgaaaaagaagcaaactcaccttaaaataatctggattttctttgggcataacagtcagacttgttgataatatatatcaagtttttattattaatatgctgaggaacttgaagattaataaaatatgctcttcagagaatgatatataaaa

SEQ ID NO: 128 - protein, 230 aa, Homo sapiens
MLKNPYTIKKQPLHQFVQRPLFPLPAAFYHPVRYMFIQTQDTPNPNSLKFIPGKPVLETRTMDFPTPAAAFRSPLARQLFRIEGVKSVFFGPDFITVTKENEELDWNLLKPDIYATIMDFFASGLPLVTEETPSGEAGSEEDDEVVAMIKELLDTRIRPTVQEDGGDVIYKGFEDGIVQLKLQGSCTSCPSSIITLKNGIQNMLQFYIPEVEGVEQVMDDESDEKEANSP

SEQ ID NO: 129 - DNA, 2288 bp, Homo sapiens
tgccatagctcccttcaggagctcaagggttccaaatgatgacatggacattttctccaaagccccatttgtctccaagagcagtatggctccttcccagccagaggagtcagacgtgtttttgagagctcctttcactaagaagaaaagcatggaggagttaacagttatccaatgcacctcccaggagctgcctgcacagaccggtctcctcagtcagacaggtgatgtccccctgcccgcgggccgtgagagagctgtgtacacctctgtccaagctcagtattccacagctggttttgtgcaacagtctaacctcctgtcccattctgtacaagcagcagaccatctggacagcatctctcccaggggatcctgcctggaatctgggggtcattctaatgacagaaacaaaggacctcagctccagaaagaagctgtctcaggccccatggctggcaaaccattccgcccccagtccttatccaagtattcccgtcactatagcccagaagacgagccaagtccagaagcccagcccattgctgcctacaaaattgtttcacaaaccaacaagcagtcgatagctgggtctgtttctatcacatccctttcctccaggactacggagctgccagctgctgatccatttgctctagcacccttcccttcaaaatcaggcaagaaaccctaggagcaaaacctgagcctcaagcctcttgtctctatcccaccctcaatacccgccatggcactcccagcttagccttctgaagaagaaatattatcagttcttatatttcaattccctgcgtcagagcagaatttcttgagtcaacaaactcagttgcagtgatatttagttgaagcccctttaagttatgttcatttttgtttgtttgtttgtttgtttatattgatttctggacttggaggcattttcatctccttcacagaggtcatccacttccaccaagaactctgctttccccccgccccacccacagaaactgtttaaatcctgaaatacttcttcaccccaatcccaaaggggccctattgttgctagttttaattcctgtagctcctgttctaagtcatgcccatcgaagaatcaagattagtccctccactaaatcaagatttagtactcttgaaaaggggagatgtctggaaagaagagcaagataaaaaccctgcacatcaacaggaagtataatcctgcagttactaataattcctgtagaagcagcagctctaggagtctccagatctgattctcagtctgtgtgcaagccaggctggctctcgtgcatgactgtctatgggtgtggaatgtacgtcagagcctgtgtagagatacaggcagatgggctaactcctcatgtctagtcatgctggcagggctttccccacatccatgcttttgaaattagtgtgagtgtacaggtttgtgtgtgcatgtatacgtgtgtgtgcacaggaagcatttccacttgagggaaatcctgccccatcatgcctacctccacaatgaaatcactcgttttttggtgtttgctcgcctaactgacttgaaccccattttatttatttagtttttttctcatggcaaagtagaatacgttggaaggtgtagggaaatcctgctggaactggtgtttcagagtaaatcttttttctctccggaatttcttgttttgctattaacaaattatatttacctgattatgaaaaattaattttccttatacattttccccttacaacactagaaaagagcaccttgttacagttccggcctctcagtatgtgggctaaatgccagcattagggaattcattaatcatgagactaggctacaaactaggcttgcttgttttggggtggttttgttgttgttgttgttgttgttgttgttgtttccaaatctctactgccttttgaggaaatgtaaatctgagacatggaaataagtgtttgggagaatggaaaagagctgaatcaggtaggcatgaaaacttttacattctctatcctctttagatgttgaaataggccagacaggttaactgatgttttttaaaattgtcttttatttctggaaagatctgacttattcctagcttttttcataccctttattattagtgccttaaaataaagctggccaggtgcagtgccacacacctgtaataccagcattttggaaggctgaggcaggaggatcagttgagcccaggaagttcaagaccaactctggcaacacagcgagaccctgtcccttc

SEQ ID NO: 130 - protein, 216 aa, Homo sapiens
MDIFSKAPFVSKSSMAPSQPEESDVFLRAPFTKKKSMEELTVIQCTSQELPAQTGLLSQTGDVPLPAGRERAVYTSVQAQYSTAGFVQQSNLLSHSVQAADHLDSISPRGSCLESGGHSNDRNKGPQLQKEAVSGPMAGKPFRPQSLSKYSRHYSPEDEPSPEAQPIAAYKIVSQTNKQSIAGSVSITSLSSRTTELPAADPFALAPFPSKSGKKP

SEQ ID NO: 131 - DNA, 3229 bp, Homo sapiens
gatcagctggcgggcgggcgggagccgagcgcggccccggctctcgctgcagcgccgcctcttctctgcgtcgcaggccggcccggcggccgtgacaatgtcgcggggctggtagcagggcgccggccgccgagccgtctcaagtttaaacttacacgaatcgctttctggaggaggaggggacccgctgcgcgattgacacgcatattcctataggcatcctccctcagcccccacccccacggccggattcgggtggctcctctccgaggtgaaatctgagaagaaatccttggatctcttttcttaaaaaaaaaaaaaaaaaaaaaaaatctagaaaccatcggtattttgctttgctgctccctattcgcaagatgaagaagtttttcgactcccggcgagagcagggcggctctggcctgggctccggctccagcggaggagggggcagcacctcgggcctgggcagtggctacatcggaagagtcttcggcatcgggcgacagcaggtcacagtggacgaggtgttggcggaaggtggatttgctattgtatttctggtgaggacaagcaatgggatgaaatgtgccttgaaacgcatgtttgtcaacaatgagcatgatctccaggtgtgcaagagagaaatccagataatgagggatctttcagggcacaagaatattgtgggttacattgattctagtatcaacaacgtgagtagcggtgatgtatgggaagtgctcattctgatggacttttgtagaggtggccaggtggtaaacctgatgaaccagcgcctgcaaacaggctttacagagaatgaagtgctccagatattttgtgatacctgtgaagctgttgcccgcctgcatcagtgcaaaactcctattatccaccgggacctgaaggttgaaaacatcctcttgcatgaccgaggccactatgtcctgtgtgactttggaagcgccaccaacaaattccagaatccacaaactgagggagtcaatgcagtagaagatgagattaagaaatacacaacgctgtcctatcgagcaccagaaatggtcaacctgtacagtggcaaaatcatcactacgaaggcagacatttgggctcttggatgtttgttgtataaattatgctacttcactttgccatttggggaaagtcaggtggcaatttgtgatggaaacttcacaattcctgataattctcgatattctcaagacatgcactgcctaattaggtatatgttggaaccagaccctgacaaaaggccggatatttaccaggtgtcctacttctcatttaagctactcaagaaagagtgcccaattccaaatgtacagaactctcccattcctgcaaagcttcctgaaccagtgaaagccagtgaggcagctgcaaaaaagacccagccaaaggccagactgacagatcccattcccaccacagagacttcaattgcaccccgccagaggcctaaagctgggcagactcagccgaacccaggaatccttcccatccagccagcgctgacaccccggaagagggccactgttcagcccccacctcaggctgcaggatccagcaatcagcctggccttttagccagtgttccccaaccaaaaccccaagccccacccagccagcctctgccgcaaactcaggccaagcagccacaggctcctcccactccacagcagacgccttctactcaggcccagggtctgcccgctcaggcccaggccacaccccagcaccagcagcaactcttcctcaagcagcaacagcagcagcaacagccaccgccagcacagcagcagccggcaggcacgttttaccagcagcagcaggcccagactcagcagtttcaggcagtacatccagcaacccagaaaccagcaattgctcagttccctgtggtgtcccaaggaggctctcaacagcagctaatgcagaatttctaccagcagcagcagcagcagcaacaacaacagcaacagcaacagctggccacagccctgcatcaacaacagctgatgactcagcaggctgccttgcagcaaaagcccactatggcagcaggacagcagccccagccacagccagctgcagccccacagccagcccctgcccaggagccagcgattcaagccccagtaagacaacagccaaaggttcagacaaccccacctcctgccgtccaggggcagaaagttggatctctcactccaccctcatcccccaaaacccaacgtgctgggcacaggcgtattctcagtgacgtaacccacagtgcagtctttggggtccctgccagcaaatcaacccagctgctccaggcagctgcagctgaggccagtctcaataagtccaagtctgcaaccaccactccatcaggctctcctcggacctctcaacaaaacgtttataatccttcagaagggtctacgtggaatccctttgatgacgataatttctccaaactcacagctgaagaactgctaaacaaggactttgccaagcttggggaaggcaaacatcccgagaagcttggaggctcagctgagagtttgatcccaggctttcaatcaacccaaggtgatgcttttgctacgacctcattttctgctggaactgctgaaaaaaggaagggtgggcagactgtggactctggcctcccgcttctaagcgtgtctgatcctttcattcctcttcaagtacctgatgcaccagaaaaactaattgagggactcaaatctcctgacacttctcttctgctccctgacctcttgcctatgacagatccttttggtagcacttctgatgctgtaattggtaaagtcatcatctctgtttcttcagtcatgcatgatatgtgtgcctgtttcaagaatgacaagtacctagttaaccaatccctggggaatagccctgccaccccagaagccaaggctatttaatctcacttgtatcactccaaatgaagtgttttccttgcttttcgggggtacaacgtctattttttgcctttcttgatatctggagatttctagagtggatctcttatgaatgaggaggaatgtggaaagtttcacatttagttagaagaactttaaaaaattggtttctaactagactacctttactgaacttaatgaaatttagcagattcttcttttttttttttttgtttgagacagagtttcactcttgttgcctg

SEQ ID NO: 132 - protein, 863 aa, Homo sapiens
MKKFFDSRREQGGSGLGSGSSGGGGSTSGLGSGYIGRVFGIGRQQVTVDEVLAEGGFAIVFLVRTSNGMKCALKRMFVNNEHDLQVCKREIQIMRDLSGHKNIVGYIDSSINNVSSGDVWEVLILMDFCRGGQVVNLMNQRLQTGFTENEVLQIFCDTCEAVARLHQCKTPIIHRDLKVENILLHDRGHYVLCDFGSATNKFQNPQTEGVNAVEDEIKKYTTLSYRAPEMVNLYSGKIITTKADIWALGCLLYKLCYFTLPFGESQVAICDGNFTIPDNSRYSQDMHCLIRYMLEPDPDKRPDIYQVSYFSFKLLKKECPIPNVQNSPIPAKLPEPVKASEAAAKKTQPKARLTDPIPTTETSIAPRQRPKAGQTQPNPGILPIQPALTPRKRATVQPPPQAAGSSNQPGLLASVPQPKPQAPPSQPLPQTQAKQPQAPPTPQQTPSTQAQGLPAQAQATPQHQQQLFLKQQQQQQQPPPAQQQPAGTFYQQQQAQTQQFQAVHPATQKPAIAQFPVVSQGGSQQQLMQNFYQQQQQQQQQQQQQQLATALHQQQLMTQQAALQQKPTMAAGQQPQPQPAAAPQPAPAQEPAIQAPVRQQPKVQTTPPPAVQGQKVGSLTPPSSPKTQRAGHRRILSDVTHSAVFGVPASKSTQLLQAAAAEASLNKSKSATTTPSGSPRTSQQNVYNPSEGSTWNPFDDDNFSKLTAEELLNKDFAKLGEGKHPEKLGGSAESLIPGFQSTQGDAFATTSFSAGTAEKRKGGQTVDSGLPLLSVSDPFIPLQVPDAPEKLIEGLKSPDTSLLLPDLLPMTDPFGSTSDAVIGKVIISVSSVMHDMCACFKNDKYLVNQSLGNSPATPEAKAI

SEQ ID NO: 133 - DNA, 1982 bp, Homo sapiens
gcagaggaggagcgcacgccggcctcgaagaacttctgcttgggtggctgaactctgatcttgacctagagtcatggccatggcaaccaaaggaggtactgtcaaagctgcttcaggattcaatgccatggaagatgcccagaccctgaggaaggccatgaaagggctcggcaccgatgaagacgccattattagcgtccttgcctaccgcaacaccgcccagcgccaggagatcaggacagcctacaagagcaccatcggcagggacttgatagacgacctgaagtcagaactgagtggcaacttcgagcaggtgattgtggggatgatgacgcccacggtgctgtatgacgtgcaagagctgcgaagggccatgaagggagccggcactgatgagggctgcctaattgagatcctggcctcccggacccctgaggagatccggcgcataagccaaacctaccagcagcaatatggacggagccttgaagatgacattcgctctgacacatcgttcatgttccagcgagtgctggtgtctctgtcagctggtgggagggatgaaggaaattatctggacgatgctctcgtgagacaggatgcccaggacctgtatgaggctggagagaagaaatgggggacagatgaggtgaaatttctaactgttctctgttcccggaaccgaaatcacctgttgcatgtgtttgatgaatacaaaaggatatcacagaaggatattgaacagagtattaaatctgaaacatctggtagctttgaagatgctctgctggctatagtaaagtgcatgaggaacaaatctgcatattttgctgaaaagctctataaatcgatgaagggcttgggcaccgatgataacaccctcatcagagtgatggtttctcgagcagaaattgacatgttggatatccgggcacacttcaagagactctatggaaagtctctgtactcgttcatcaagggtgacacatctggagactacaggaaagtactgcttgttctctgtggaggagatgattaaaataaaaatcccagaaggacaggaggattctcaacactttgaatttttttaacttcatttttctacactgctattatcattatctcagaatgcttatttccaattaaaacgcctacagctgcctcctagaatatagactgtctgtattattattcacctataattagtcattatgatgctttaaagctgtacttgcatttcaaagcttataagatataaatggagattttaaagtagaaataaatatgtattccatgtttttaaaagattactttctactttgtgtttcacagacattgaatatattaaattattccatattttcttttcagtgaaaaattttttaaatggaagactgttctaaaatcacttttttccctaatccaatttttagagtggctagtagtttcttcatttgaaattgtaagcatccggtcagtaagaatgcccatccagttttctatatttcatagtcaaagccttgaaagcatctacaaatctctttttttaggttttgtccatagcatcagttgatccttactaagtttttcatgggagacttccttcatcacatcttatgttgaaatcactttctgtagtcaaagtataccaaaaccaatttatctgaactaaattctaaagtatggttatacaaaccatatacatctggttaccaaacataaatgctgaacattccatattattatagttaatgtcttaatccagcttgcaagtgaatggaaaaaaaaataagcttcaaactaggtattctgggaatgatgtaatgctctgaatttagtatgatataaagaaaacttttttgtgctaaaaatactttttaaaatcaattttgttgattgtagtaatttctatttgcactgtgcctttcaactccagaaacattctaagatgtacttggatttaattaaaaagttcactttgt

SEQ ID NO: 134 - protein, 321 aa, Homo sapiens
MAMATKGGTVKAASGFNAMEDAQTLRKAMKGLGTDEDAIISVLAYRNTAQRQEIRTAYKSTIGRDLIDDLKSELSGNFEQVIVGMMTPTVLYDVQELRRAMKGAGTDEGCLIEILASRTPEEIRRISQTYQQQYGRSLEDDIRSDTSFMFQRVLVSLSAGGRDEGNYLDDALVRQDAQDLYEAGEKKWGTDEVKFLTVLCSRNRNHLLHVFDEYKRISQKDIEQSIKSETSGSFEDALLAIVKCMRNKSAYFAEKLYKSMKGLGTDDNTLIRVMVSRAEIDMLDIRAHFKRLYGKSLYSFIKGDTSGDYRKVLLVLCGGDD

SEQ ID NO: 135 - DNA, 2402 bp, Homo sapiens
ggtgctgcggtgctagagcgcggcgcgaccggacgctgcgggcggggaagaggatggagactgtggcgtccgctgcaacggttggggctgcgcgtgagaaggtggcggtgtaggcacctgcgctcggggaaggctggcggcggcggccgagccatggcgggagacccccttctctgggctccctgaagtctcggggagccgtgacccatgggatcgttgagcagccgggtgctgcgccagccaagaccagcccttgcccagcaggcgcagggtgccagggcggggggctcggcccggaggccggacactggagacgatgcggcgggccacggattctgttactgtgcgggcagccacaagcgcaagcggagcagcgggtccttctgctactgtcaccctgactcggagacggacgaggatgaggaggagggggacgagcagcagcggctcctcaacacccctcgaaggaaaaaattaaagagtacatctaaatatatttatcaaacattatttttgaatggtgaaaacagtgacattaagatttgtgctctaggagaagaatggagcttacacaaaatatatttatgtcaatctggctacttttctagtatgttcagtggttcttggaaagaatccagcatgaatattattgaactggagattcctgaccagaacattgatgtagaagcactgcaggttgcatttggttcactgtatcgagatgatgtcttgataaagcccagtcgagttgttgccattttggcagcagcttgtttgctgcagttggacggtttaatacagcagtgtggtgagacaatgaaggaaacagttaatgtgaaaactgtatgtggctattacacatcagcagggacctatggattagattctgtaaagaaaaagtgccttgaatggcttctaaacaatttgatgactcaccagaatgttgaactttttaaagaactcagtataaatgtcatgaaacagctcattggttcatctaacttatttgtgatgcaagtggagatggatatatacactgctctaaaaaagtggatgttccttcaacttgtgccttcttggaatggatctttaaaacagcttttgacagaaacagatgtctggttttctaaacagaggaaagattttgaaggtatggcctttcttgaaactgaacaaggaaaaccatttgtgtcagtattcagacatttaaggttacaatatattatcagtgatctggcttctgcaagaattattgaacaagatgctgtagtaccttcagaatggctctcttctgtgtataaacagcagtggtttgctatgctgcgggcagaacaggacagtgaggtggggcctcaagaaatcaataaagaagaactagagggaaacagcatgaggtgtggtagaaagcttgccaaagatggtgaatactgctggcgttggacaggttttaacttcggcttcgacctacttgtaacttacaccaatcgatacatcattttcaaacgcaatacactgaatcagccatgtagcggatctgtcagtttacagcctcgaaggagcatagcatttagattacgtttggcttcttttgatagtagtggaaaactaatatgtagtagaacaactggctatcaaatacttacacttgaaaaggatcaggaacaagtggtgatgaacttggacagcaggcttctgatcttccctttatatatctgctgtaacttcttgtatatatcaccagaaaaaaagaattgaaaataatcgtcacccagaaaatccagaaaactgaagatttcatcagttggaaacagtagcactttgaaaactttttaggccagctttaatttaatggccctactgatattcacatcgaaggtgactaacaatgacaaaggccttatgaactgtacagacaatacagaagattattcttatcctcattgcatttctatgcatatgcgtaagaacattttaaagccaagaaaatatctgtcaaaccatttctgttagaacgatgtcaattcatgcttttaatttagcatcaatagaaaattgctgtaggtaaatctcacatttatctgcaacaaaatatagatttaatttttagcttaaactttgtttctaccttatgttagtggacctcagttatccatctgtaaatttctttttatttggctaaaataatctaaaagaataatttggttggccaattagaaatgcctttttcagttggtgtattgaaagctttcctttaacattttcacctgctcattgtgattcctccttttagtctaatatctttccaggtcatacttgtttttaatcattaaatattttcttcctggtaaaaaaaaaaaaaaaaaaaaaaaaaaaaaaaaaaaaaaaaaaaaaaaaaaaaaaaa

SEQ ID NO: 136 - protein, 515 aa, Homo sapiens
MGSLSSRVLRQPRPALAQQAQGARAGGSARRPDTGDDAAGHGFCYCAGSHKRKRSSGSFCYCHPDSETDEDEEEGDEQQRLLNTPRRKKLKSTSKYIYQTLFLNGENSDIKICALGEEWSLHKIYLCQSGYFSSMFSGSWKESSMNIIELEIPDQNIDVEALQVAFGSLYRDDVLIKPSRVVAILAAACLLQLDGLIQQCGETMKETVNVKTVCGYYTSAGTYGLDSVKKKCLEWLLNNLMTHQNVELFKELSINVMKQLIGSSNLFVMQVEMDIYTALKKWMFLQLVPSWNGSLKQLLTETDVWFSKQRKDFEGMAFLETEQGKPFVSVFRHLRLQYIISDLASARIIEQDAVVPSEWLSSVYKQQWFAMLRAEQDSEVGPQEINKEELEGNSMRCGRKLAKDGEYCWRWTGFNFGFDLLVTYTNRYIIFKRNTLNQPCSGSVSLQPRRSIAFRLRLASFDSSGKLICSRTTGYQILTLEKDQEQVVMNLDSRLLIFPLYICCNFLYISPEKKN

SEQ ID NO: 137 - DNA, 1433 bp, Homo sapiens
agttgtttccgggaagcgggactccaaatgggtcgcagtcgcagccgctctccacggagggaacgtaggcgttcccggtccacatcccgggagagagaacgcaggcgccgagaaaggtccaggtctcgggagagagatcggagaaggagccgctcgcgatccccgcaccgaagacgctcccgatctccaagacgacatagatccacatctccttccccttctcgactgaaagaaagaagagatgaggaaaagaaagaaacaaaagaaacaaagagcaaagaacggcagattactgaggaagacttagagggcaaaacagaggaagaaatagaaatgatgaagttaatgggatttgcctcctttgactccacaaaaggtaagaaggtggatggctctgtaaatgcctatgccataaatgtctctcagaagaggaagtacaggcagtacatgaatcgaaaaggtggattcaacagacctttggatttcattgcatgagaattgaagtgttgaaggatgattttttttcccctcatcttggtcagagagtggattttgtattttgtatttaacttgcattcaaaaaacaggatctcagttctcctttcttgtaaagtaagaaaatcttatttatgatatatgcagttaacttaccttgcctcaacagaagaaaggttaaatattacatttttttcttttaggaaatatcatttgtggcaggcgtcaaccccattttatttgtccttattcctgtggaagcagtatatgttttcttcctgaatgctcattaggacttcttaaaaaacatgaaagtaatttggaagtaagtttatccaataaagcagtatttctacccttttagatttgataaatatttttattactaaagaatctccccagacattttcttttttttttcacacatagatttaagtatcttgattgttagtagtctaaaaatgggaagaatgaaaaagcataactagatttttctatcttctgtggtcgcccgccccccccaaaaaaaataccatttatggttctctccgcaagtataaaagcgttacatgcaaaaaaaagatctcagagaaaacaaaagtaaaagaaaagcagaaaatcacctgttatctactcccagaaataatcaatttcaacattttggtatatgtttttccaggcttctttgggttgatcccacctatgagatcagaatatgtatgcagttctttctttaacccttttttctcctatgtactgtgaacatttaaaaagtacttttaaatattctttggaaacttagcttttagtaactacttggttgtatcataatttattaactaatgttttattggtaaacattggcttgcctcccatgacttgccattataattaaaactgtgactactaaaaaaaaaaaaaaaaaaaaaaaaaaaaaa

SEQ ID NO: 138 - protein, 155 aa, Homo sapiens
MGRSRSRSPRRERRRSRSTSRERERRRRERSRSRERDRRRSRSRSPHRRRSRSPRRHRSTSPSPSRLKERRDEEKKETKETKSKERQITEEDLEGKTEEEIEMMKLMGFASFDSTKGKKVDGSVNAYAINVSQKRKYRQYMNRKGGFNRPLDFIA

SEQ ID NO: 139 - DNA, 5587 bp, Homo sapiens
gagtcggggataaacactccgcggcggtggcggctgctgctctgctccgggttctgtcactgtgtcggcggtgcccagctcactggccccctccctctcttgtcgagcgtggttgccagagaggctccctcagccctgctccgcggggtccacagcgggctccacagcgggctccatagcgggctccacagcggtccggcggcggcagcgagcccgtgggcagtgggggttggtcccgtggctccggcccccggtgcagaatggcggcggcggttcggatgaacatccagatgctgctggaggcggccgactatctggagcggcgggagagagaagctgaacatggttatgcctccatgttaccatacaataacaaggacagagatgccttaaaacggaggaacaaatccaaaaagaataacagcagtagcagatcaactcacaatgaaatggagaagaatagacgggctcatcttcgcttgtgcctggagaagttgaaggggctggtgccacttggacccgaatcaagtcgacacactacgttgagtttattaacaaaagccaaattgcacataaagaaacttgaagattgtgacagaaaagccgttcaccaaatcgaccagcttcagcgagagcagcgacacctgaagaggcagctggagaagctgggcattgagaggatccggatggacagcatcggctccaccgtctcctcggagcgctccgactccgacagggaagaaatcgacgttgacgtggagagcacggactatctcacaggtgatctggactggagcagcagcagtgtgagcgactctgacgagcggggcagcatgcagagcctcggcagtgatgagggctattccagcaccagcatcaagagaataaagctgcaggacagtcacaaggcgtgtcttggtctctaagagagtgggcactgcggctgtctccttgaaggttctccctgttggttctgattaggtaacgtattggacctgcccacaactcccttgcacgtaaacttcagtgtcccaccttgaccaaaatcagctttgtaactgttttcaaggaggtgcttaggattgtgggtttctgattgcatccactagcttctctttttctcgccataaaaatttgtctctgagagactatacattccaatcaatttgaagcatccaagaattcttagaccgaataagcaatgtccacatctcagcaatccccctctttgctctcctcgtgtcctctcccagacctttcttccagttttctggcttactgtgttacttgcctaggaggaatgtccaagtgtgtcttgtacttaggaaactgaaggaaacaaacttttgaaattgagatcctgatctcagaactccaaagtaagctttgaaagcagcatttaagagcacttaaccatggacctcaccaccagtgaggaagtcaggaatacctctagaaaacacgcccttcacaccgcgcatgctcattcccccgacgcgccgcgtgtggatgggagcagtatttctcactttaaaatggacaccttgatagtgtgtctctggggttgcacagctcatcaaagttccaaattgtttgttctcacaaacaaaacggtacaatctatttttgtgcgatgttcttgggacctcgctgtgttctgctatctcgaggcacattctcccctccaactttgttaatgctacttgtctctggaacatttttttttcctacctcagagataaatgagatctccatttcccacttaacacagtgattatccttttttccccccccaaaatagtgacatttggtccaattataatctattttcctattgaactttcagcaataactgagctgtggcactagcagagctagtagccattatcagtgaaagaaaaagtccacatttctactctctgttgcaggtgaacaggagaggatggtacactgttactagaactcctctccttattgattatttttggacacacccagaaacttctttatggaggcttttgggttgatagtttaaaaggctgatttttctttttggttatgatttctcccttaagtggtctccgactttgtagcatttttatttaagctaaaacagagcacatgtatatgtacataagacacattaaatctataaatactatttattcattttatataaactaatgtaatggaaaacaaattcttatgactttgtggttttatagatgttctagaaactttgtatgtaggtatctacaaaattagttcattcccctgaatatttttgcattcatatttttgaggtcttgatgttttcagcctctggcgaatctttttcattgaatttgaaccatttgtaaaatctgtgatgctgaagcagagtgtgtcacaaagtgatgagaacattactaaaatccacggacgcactgcgacctaagggctcaacggctgactcggcagcgggcagccaccccacgctcccctgcggtcactcgcacaccacagcctgaagctcccccagcgcctgcacctcgcacacagctaaggtcaaagttcaaacgcactccacacggaagctcattctatacccgaagagcagtctcagaaagcaagattacttttgtgttttttaaaaaatgattctttaatgtatttttctaaacattctgattggaagtagtggattcctaaatgattccaaagtcacctgtaattcttctgtttttgttttgttctgtcttttcttcattttggctttgggtggggggaggggcaggtgacacaaaggattttttttttttttttttaatttttggaatcttttccaataaccagctaaagatttgcactgaaatacaacttgtatgccttttgcatttttaaagcctgcttcctggatttaagcagagtgatagtgttcaaagagccagttcagcctgtaacatatttgaaaaagatatgtctgcactttgaggtcccttttgaatgccattcactagacctctcaagcattttgtttcattgctacatccaagcgcctcacaagtccacaatgcgggacagcatcaaaagctcaagactttggaaaaagcttgtgggcttgcactgggggagggaagggaacaaaatttgtgtacttctttgtttaatttagaaataaggcatccaagagatgccattattttctgtgtttcaattgttgtgcctttgagttaaactgcatttttgtcttttggttgaaatctgaaatgtactgtcccaatataaaacagtaattatttgacctttgcactgtttgtctggtccttttcagtttgattgcatataaatgtggaacttgatagatctctatatttttaatgcacttgtgataaactggcagcagggttagacattactttcaaagcttgaggtagaccgagtcagcatgctagacaggcttctctctctaaccaaaactgtaatcttcaggaccagcaaactcagcccaaggcagctaatccccccaaccccatcctccgcgccccgtgcggctgatcggcagccctgattcgccaatttgtcctctctcattcactgatccaccagcctgactgctaagagctatagtctttttagttgttttgtctttttaagcaagatgaaaacctttctattagggattttggggttgggaggggatgggcagagatataaaccccagcctttaagactttgacaattgtacgtaaatacagatgtgtataaatataggcacatgcatatttttatgtgaaagttgattttaaaaaactaaaaaaatctaaactgcactcttattgataccatcataacgcaagtgggaaaaataagagtacgcagtctaatttaatttcatgcagtgggaaaatatatatgtgtgcttctgtaacatcctgaaaacatagctttccatcccctgttggctttgaatggtgggccgagcacccaggtcgtctgtattttggttttcttttgctaagcagagatcttgaattcttcaaggtgctgatagcaactgctggctcctttctgtagtcacacacctaatgctagtttagtgattcaaaatgcatcacatttttaggcaggacctagattttccctgtcaacctaagatgaaaataatttcagtgttgattcagaactgaacattaagtaggccctcgtcctgcagttggccacttgagtgttttgttttgtttttattttttaaggtgggcattttcctttaacctctactttttcaaaagcaacaaaggggcctcaacctgagtttcctatgggcctctcttctgcatccccaaagcggccaagagcaaatcctgggggataagaaaaaagtgtaaactaggtaggattgtgatgctcaaaataaccatctagcaatatcttggagcttgagaatagattttgtgggcttatttcttcttgcctcttccccatcctttcaagagagaacttatttttgaaaagtatctatatatacacacacacacacacacacacatattattatttaggtttttataccatactgtattggcgagaataccactatcattgtcctttacagtctatttcttcccccaagtcttggtctttttttattttctattttttcatgaaccacacaggagactttaacatcctggtcttttctgtttcttctttgtttccccaagtttgtctgtccccctttgccttccctgagtgttgaacatcaggtagtaaaaggctaaacgcaatttcttgcatgtcaatctattctttttctatgtttgactctgatgcagtgtgtttagcgtgtctagtagctggctactcctatttaaaaactcttcctggtagaagacaacccaaagacccttttcgatgaggtggtttctcattctacatcctctgatctctatagactgtaggatgctttgctttcaaagataactgggttagagggtggggtgtgcaataggtgatttatcatggtttttttcattatcaatattacatggatgattttctcagattcttctgaaagaagaaattgacaggcactgctagattcagctattgaatggctgaagagattgagtatttgaccttctctcaaaatcataaagtgagaattcataaggcacccaatgttaagatttatccagatttttacattttgatttcttctctctgtggggtggcaagttgagggagcattcttcattttagcttttacctgacaaccaaacttgcctttaccccatccctagaattggtgctcttggaatattgctgttaccatcatttttggggggccatcttcctaatgctacacacagcctgacaggggagcagcagatgaaagggtatgctattctgtttccagatgtttctttatgtaaatatgacgccaatgtaaatcctgtgtcaagatcatagagaatggtgctttttactacagttagcacatgcatttttagaaactactacatgttttagagaatctttgctgtgtatatgtaaactgtattgttcaactgttaacaaataataaattatttcattattaaagaaa

SEQ ID NO: 140 - protein, 221 aa, Homo sapiens
MAAAVRMNIQMLLEAADYLERREREAEHGYASMLPYNNKDRDALKRRNKSKKNNSSSRSTHNEMEKNRRAHLRLCLEKLKGLVPLGPESSRHTTLSLLTKAKLHIKKLEDCDRKAVHQIDQLQREQRHLKRQLEKLGIERIRMDSIGSTVSSERSDSDREEIDVDVESTDYLTGDLDWSSSSVSDSDERGSMQSLGSDEGYSSTSIKRIKLQDSHKACLGL

SEQ ID NO: 141 - DNA, 2168 bp, Homo sapiens
gcagcagttgagtccatgtaagatgattgtgcacgtgtgtgtgtgtgtgtgtgtgtgtgtgtcctcactcacttaaaaaagaccatttctgtgcattctttatgctggaaccctcctctgcctccctctccaggaaatcccataggatcccatacctgctttagaatgtgtgtgagacacttcccagtgcctggcatgtggtaggagctcagtacatgtaaactgttttcctttgaccactcaaagtagtcacttgttggggaggccaatggcggcttccccggtctctgagctgatgggcgtctggtccctgcctccccttccttcactggctgatgacaaatacctgaatgtcatcacatcctccgtgtcctcatctgttattctggaacacaggccagggagggtacagggtagtcccccttcaacagaggctggcctttcttgggatgtgggctggctggtgttggtccaaggatggatgcagagggtgaggcacccatcctgctagtccggccggatgctggcaggagggcggggtgaggaggggcggagcttccagaacaaaggagaatggggagcccaggggccagcctaggcatcaaaaaggctctgcagagtgaacaggccacagcactgcctgcctctgccccagcagtcagccagccgaccgcgcctgctccctcctgcttgcccaaggccgggcaagtcatccccgctctgcttcgagaggccccgttttccagcgtgattgcgccgacactgctctgtgggtttctcttcttggcgtgggttgctgctgaggttccagaggagagcagcaggatggccgggagcggagccaggagtgaggaaggccgccggcagcatgccttcgtcccggaaccttttgatggggccaatgtcgtcccaaacctctggctgcacagctttgaagtcatcaatgacctcaaccattgggaccatatcaccaagctaaggttcctgaaagagtccctcagaggagaggccctgggtgtctacaataggctcagtccccaggaccagggagactatgggactgtgaaagaggccctcctgaaggcctttggggtccctggggctgcccccagccacctgcccaaagagatcgtctttgccaacagcatgggtaagggctactatctcaaggggaagattggcaaagtgcccgtgaggttcctggtggactctggggcccaggtctctgtggtccacccaaacttgtgggaggaggtcactgatggcgatctggacaccctgcagccctttgagaatgtggtaaaggtggccaatggtgctgaaatgaagatcctgggtgtctgggatacagcggtgtccctaggcaagctgaagctgaaggcacagttcctagtggccaatgcgagtgccgaggaagccatcattggcactgatgtgctccaggaccacaatgctatcctggactttgagcaccgcacatgcaccctgaaagggaagaagtttcgccttctgcctgtgggagggtccctggaagatgagtttgacctggagctcatagaggaggacccctcctcagaagaagggcggcaggagctatcccactgagaagccaccttttctttaacctcctaaatattggtgggaagacccaccgctgtggggggggttgcatatcctcatgggggtcactgggcttggccagtctgcttatcaactcttgctcttctctcccctttgcctccctctgcaggggccttaatctgcccctggtaggggaggcttccactgaacaggcacaggtgagggagagcaggctggcttagagggacagggtccccatggtcatcaagctgctgttgatgacaaagactcaaaggctggaagagctcccaaggaagctagaaatgcttgtctttgaaagaactgtgggaccccttcagattccctgaggtatggcttggtcactctcaggtcctcaaagcctgtcttagttgggctgggtcctagctgcagggtctttgtgagggtcacagttgctctgggacacctccctgaagagcctttccacctgtacaatcgtattttctttctgtcatttgctttgaagcccattgtgccttatgccaataattcaattgctgcaaacaccaataaagattgattcatgg

SEQ ID NO: 142 - protein, 343 aa, Homo sapiens
MGSPGASLGIKKALQSEQATALPASAPAVSQPTAPAPSCLPKAGQVIPALLREAPFSSVIAPTLLCGFLFLAWVAAEVPEESSRMAGSGARSEEGRRQHAFVPEPFDGANVVPNLWLHSFEVINDLNHWDHITKLRFLKESLRGEALGVYNRLSPQDQGDYGTVKEALLKAFGVPGAAPSHLPKEIVFANSMGKGYYLKGKIGKVPVRFLVDSGAQVSVVHPNLWEEVTDGDLDTLQPFENVVKVANGAEMKILGVWDTAVSLGKLKLKAQFLVANASAEEAIIGTDVLQDHNAILDFEHRTCTLKGKKFRLLPVGGSLEDEFDLELIEEDPSSEEGRQELSH

SEQ ID NO: 143 - DNA, 1137 bp, Homo sapiens
gggcggcgaggcgaggcctgcggagcggaggaagacaaacataaagatgaagtgcttaattcaaggtcacacaatgtcggggatggacctccagatttccttactggaaaacaagctcagggctcccactgattgtacattatggtgagacgtggtcttgtaacacagtggttaagaatgtgactttggagccagcctgctaggggctgaattctgactcagccatttactaactgtgtgaccttaggtaagtcatttaccttctttgtccctcagtttcatctcggttaagtagggataatgatagcacctattttatagggttattgtgaggaataaatccaagtaaaatgcttagaatagtaactgaaacatagcactcattaggaatgctttaattttcatttatttgagtattaaaggttgaattttcagaggtattttggacctttgtattttttctttaaatcacttattcatgacttttgaacttttttttttcttttagagacagggtcttggtttgttgtctaggctggaatgcagtggtgcaatcatagctcactgtagccttgaactcttgggctcaagagatcctcctgcctcagcctcgtgagtagctgggcctacaggcgcctgctaccacacctggctaattttttattttttgtagagatgggttcttgcagcccagactggtcttgagctttggcctgaagtgctcctcctgccttggcctctcaaagcattggggttacaggtgtgaagcactgcaccttgcctacacattttttccaataattttttttattaatttgtaagagttaacatgtcgactatcatatataacatagaattgttcccattttgtcatttcctttcaactttgtctatgtagctttttttctgtgtgcaaattttacatttttaggtagtcagaaaatctcttcccttgtaattttttctgctactagaccaatgtttagaaaaaagcgtgcttccccacctcaaaattataaaaatagttacttgttctttttgagtactgtgtgtgtttaaatctttaatctttaaatttaaatctttgatccatctggtatttattttgatatgaagagagtggttgggatctggctg

SEQ ID NO: 144 - protein, 33 aa, Homo sapiens
MKCLIQGHTMSGMDLQISLLENKLRAPTDCTLW

SEQ ID NO: 145 - DNA, 2943 bp, Homo sapiens
accaggcaacaccattgaaggctcatatgtaaaaatccatgccttcctttctcccaatctccattcccaaacttagccactggcttctggctgaggccttacgcatacctcccggggcttgcacacaccttcttctacagaagacacaccttgggcatatcctacagaagaccaggcttctctctggtccttggtagagggctactttactgtaacagggccagggtggagagttctctcctgaagctccatcccctctataggaaatgtgttgacaatattcagaagagtaagaggatcaagacttctttgtgctcaaataccactgttctcttctctaccctgccctaaccaggagcttgtcaccccaaactctgaggtgatttatgccttaatcaagcaaacttccctcttcagaaaagatggctcattttccctcaaaagttgccaggagctgccaagtattctgccaattcaccctggagcacaatcaacaaattcagccagaacacaactacagctactattagaactattattattaataaattcctctccaaatctagccccttgacttcggatttcacgatttctcccttcctcctagaaacttgataagtttcccgcgcttccctttttctaagactacatgtttgtcatcttataaagcaaaggggtgaataaatgaaccaaatcaataacttctggaatatctgcaaacaacaataatatcagctatgccatctttcactattttagccagtatcgagttgaatgaacatagaaaaatacaaaactgaattcttccctgtaaattccccgttttgacgacgcacttgtagccacgtagccacgcctacttaagacaattacaaaaggcgaagaagactgactcaggcttaagctgccagccagagagggagtcatttcattggcgtttgagtcagcaaagaagtcaagatggccaaagttccagacatgtttgaagacctgaagaactgttacagtgaaaatgaagaagacagttcctccattgatcatctgtctctgaatcagaaatccttctatcatgtaagctatggcccactccatgaaggctgcatggatcaatctgtgtctctgagtatctctgaaacctctaaaacatccaagcttaccttcaaggagagcatggtggtagtagcaaccaacgggaaggttctgaagaagagacggttgagtttaagccaatccatcactgatgatgacctggaggccatcgccaatgactcagaggaagaaatcatcaagcctaggtcagcaccttttagcttcctgagcaatgtgaaatacaactttatgaggatcatcaaatacgaattcatcctgaatgacgccctcaatcaaagtataattcgagccaatgatcagtacctcacggctgctgcattacataatctggatgaagcagtgaaatttgacatgggtgcttataagtcatcaaaggatgatgctaaaattaccgtgattctaagaatctcaaaaactcaattgtatgtgactgcccaagatgaagaccaaccagtgctgctgaaggagatgcctgagatacccaaaaccatcacaggtagtgagaccaacctcctcttcttctgggaaactcacggcactaagaactatttcacatcagttgcccatccaaacttgtttattgccacaaagcaagactactgggtgtgcttggcaggggggccaccctctatcactgactttcagatactggaaaaccaggcgtaggtctggagtctcacttgtctcacttgtgcagtgttgacagttcatatgtaccatgtacatgaagaagctaaatcctttactgttagtcatttgctgagcatgtactgagccttgtaattctaaatgaatgtttacactctttgtaagagtggaaccaacactaacatataatgttgttatttaaagaacaccctatattttgcatagtaccaatcattttaattattattcttcataacaattttaggaggaccagagctactgactatggctaccaaaaagactctacccatattacagatgggcaaattaaggcataagaaaactaagaaatatgcacaatagcagttgaaacaagaagccacagacctaggatttcatgatttcatttcaactgtttgccttctacttttaagttgctgatgaactcttaatcaaatagcataagtttctgggacctcagttttatcattttcaaaatggagggaataatacctaagccttcctgccgcaacagttttttatgctaatcagggaggtcattttggtaaaatacttcttgaagccgagcctcaagatgaaggcaaagcacgaaatgttattttttaattattatttatatatgtatttataaatatatttaagataattataatatactatatttatgggaaccccttcatcctctgagtgtgaccaggcatcctccacaatagcagacagtgttttctgggataagtaagtttgatttcattaatacagggcattttggtccaagttgtgcttatcccatagccaggaaactctgcattctagtacttgggagacctgtaatcatataataaatgtacattaattaccttgagccagtaattggtccgatctttgactcttttgccattaaacttacctgggcattcttgtttcaattccacctgcaatcaagtcctacaagctaaaattagatgaactcaactttgacaaccatgagaccactgttatcaaaactttcttttctggaatgtaatcaatgtttcttctaggttctaaaaattgtgatcagaccataatgttacattattatcaacaatagtgattgatagagtgttatcagtcataactaaataaagcttgcaacaaaattctctgacaaaaaaaaaaaaaaaa

SEQ ID NO: 146 - protein, 271 aa, Homo sapiens
MAKVPDMFEDLKNCYSENEEDSSSIDHLSLNQKSFYHVSYGPLHEGCMDQSVSLSISETSKTSKLTFKESMVVVATNGKVLKKRRLSLSQSITDDDLEAIANDSEEEIIKPRSAPFSFLSNVKYNFMRIIKYEFILNDALNQSIIRANDQYLTAAALHNLDEAVKFDMGAYKSSKDDAKITVILRISKTQLYVTAQDEDQPVLLKEMPEIPKTITGSETNLLFFWETHGTKNYFTSVAHPNLFIATKQDYWVCLAGGPPSITDFQILENQA

SEQ ID NO: 147 - DNA, 1498 bp, Homo sapiens
accaaacctcttcgaggcacaaggcacaacaggctgctctgggattctcttcagccaatcttcattgctcaagtgtctgaagcagccatggcagaagtacctgagctcgccagtgaaatgatggcttattacagtggcaatgaggatgacttgttctttgaagctgatggccctaaacagatgaagtgctccttccaggacctggacctctgccctctggatggcggcatccagctacgaatctccgaccaccactacagcaagggcttcaggcaggccgcgtcagttgttgtggccatggacaagctgaggaagatgctggttccctgcccacagaccttccaggagaatgacctgagcaccttctttcccttcatctttgaagaagaacctatcttcttcgacacatgggataacgaggcttatgtgcacgatgcacctgtacgatcactgaactgcacgctccgggactcacagcaaaaaagcttggtgatgtctggtccatatgaactgaaagctctccacctccagggacaggatatggagcaacaagtggtgttctccatgtcctttgtacaaggagaagaaagtaatgacaaaatacctgtggccttgggcctcaaggaaaagaatctgtacctgtcctgcgtgttgaaagatgataagcccactctacagctggagagtgtagatcccaaaaattacccaaagaagaagatggaaaagcgatttgtcttcaacaagatagaaatcaataacaagctggaatttgagtctgcccagttccccaactggtacatcagcacctctcaagcagaaaacatgcccgtcttcctgggagggaccaaaggcggccaggatataactgacttcaccatgcaatttgtgtcttcctaaagagagctgtacccagagagtcctgtgctgaatgtggactcaatccctagggctggcagaaagggaacagaaaggtttttgagtacggctatagcctggactttcctgttgtctacaccaatgcccaactgcctgccttagggtagtgctaagaggatctcctgtccatcagccaggacagtcagctctctcctttcagggccaatccccagcccttttgttgagccaggcctctctcacctctcctactcacttaaagcccgcctgacagaaaccacggccacatttggttctaagaaaccctctgtcattcgctcccacattctgatgagcaaccgcttccctatttatttatttatttgtttgtttgttttattcattggtctaatttattcaaagggggcaagaagtagcagtgtctgtaaaagagcctagtttttaatagctatggaatcaattcaatttggactggtgtgctctctttaaatcaagtcctttaattaagactgaaaatatataagctcagattatttaaatgggaatatttataaatgagcaaatatcatactgttcaatggttctgaaataaacttcactgaag

SEQ ID NO: 148 - protein, 269 aa, Homo sapiens
MAEVPELASEMMAYYSGNEDDLFFEADGPKQMKCSFQDLDLCPLDGGIQLRISDHHYSKGFRQAASVVVAMDKLRKMLVPCPQTFQENDLSTFFPFIFEEEPIFFDTWDNEAYVHDAPVRSLNCTLRDSQQKSLVMSGPYELKALHLQGQDMEQQVVFSMSFVQGEESNDKIPVALGLKEKNLYLSCVLKDDKPTLQLESVDPKNYPKKKMEKRFVFNKIEINNKLEFESAQFPNWYISTSQAENMPVFLGGTKGGQDITDFTMQFVSS

SEQ ID NO: 149 - DNA, 787 bp, Homo sapiens
cttcattccattttctgttgagtaataaactcaacgttgaaaatgtcctttgtgggggagaactcaggagtgaaaatgggctctgaggactgggaaaaagatgaaccccagtgctgcttagaagacccggctggaagccccctggaaccaggcccaagcctccccaccatgaattttgttcacacaagtccaaaggtgaagaacttaaacccgaagaaattcagcattcatgaccaggatcacaaagtactggtcctggactctgggaatctcatagcagttccagataaaaactacatacgcccagagatcttctttgcattagcctcatccttgagctcagcctctgcggagaaaggaagtccgattctcctgggggtctctaaaggggagttttgtctctactgtgacaaggataaaggacaaagtcatccatcccttcagctgaagaaggagaaactgatgaagctggctgcccaaaaggaatcagcacgccggcccttcatcttttatagggctcaggtgggctcctggaacatgctggagtcggcggctcaccccggatggttcatctgcacctcctgcaattgtaatgagcctgttggggtgacagataaatttgagaacaggaaacacattgaattttcatttcaaccagtttgcaaagctgaaatgagccccagtgaggtcagcgattaggaaactgccccattgaacgccttcctcgctaatttgaactaattgtataaaaacaccaaacctgctcactaaaaaaaaaaaaaaaaaa

SEQ ID NO: 150 - protein, 218 aa, Homo sapiens
MSFVGENSGVKMGSEDWEKDEPQCCLEDPAGSPLEPGPSLPTMNFVHTSPKVKNLNPKKFSIHDQDHKVLVLDSGNLIAVPDKNYIRPEIFFALASSLSSASAEKGSPILLGVSKGEFCLYCDKDKGQSHPSLQLKKEKLMKLAAQKESARRPFIFYRAQVGSWNMLESAAHPGWFICTSCNCNEPVGVTDKFENRKHIEFSFQPVCKAEMSPSEVSD

SEQ ID NO: 151 - DNA, 724 bp, Homo sapiens
cttcattccattttctgttgagtaataaactcaacgttgaaaatgtcctttgtgggggagaactcaggagtgaaaatgggctctgaggactgggaaaaagatgaaccccagtgctgcttagaaggtccaaaggtgaagaacttaaacccgaagaaattcagcattcatgaccaggatcacaaagtactggtcctggactctgggaatctcatagcagttccagataaaaactacatacgcccagagatcttctttgcattagcctcatccttgagctcagcctctgcggagaaaggaagtccgattctcctgggggtctctaaaggggagttttgtctctactgtgacaaggataaaggacaaagtcatccatcccttcagctgaagaaggagaaactgatgaagctggctgcccaaaaggaatcagcacgccggcccttcatcttttatagggctcaggtgggctcctggaacatgctggagtcggcggctcaccccggatggttcatctgcacctcctgcaattgtaatgagcctgttggggtgacagataaatttgagaacaggaaacacattgaattttcatttcaaccagtttgcaaagctgaaatgagccccagtgaggtcagcgattaggaaactgccccattgaacgccttcctcgctaatttgaactaattgtataaaaacaccaaacctgctcactaaaaaaaaaaaaaaaaaa

SEQ ID NO: 152 - protein, 197 aa, Homo sapiens
MSFVGENSGVKMGSEDWEKDEPQCCLEGPKVKNLNPKKFSIHDQDHKVLVLDSGNLIAVPDKNYIRPEIFFALASSLSSASAEKGSPILLGVSKGEFCLYCDKDKGQSHPSLQLKKEKLMKLAAQKESARRPFIFYRAQVGSWNMLESAAHPGWFICTSCNCNEPVGVTDKFENRKHIEFSFQPVCKAEMSPSEVSD

SEQ ID NO: 153 - DNA, 604 bp, Homo sapiens
cttcattccattttctgttgagtaataaactcaacgttgaaaatgtcctttgtgggggagaactcaggagtgaaaatgggctctgaggactgggaaaaagatgaaccccagtgctgcttagaagagatcttctttgcattagcctcatccttgagctcagcctctgcggagaaaggaagtccgattctcctgggggtctctaaaggggagttttgtctctactgtgacaaggataaaggacaaagtcatccatcccttcagctgaagaaggagaaactgatgaagctggctgcccaaaaggaatcagcacgccggcccttcatcttttatagggctcaggtgggctcctggaacatgctggagtcggcggctcaccccggatggttcatctgcacctcctgcaattgtaatgagcctgttggggtgacagataaatttgagaacaggaaacacattgaattttcatttcaaccagtttgcaaagctgaaatgagccccagtgaggtcagcgattaggaaactgccccattgaacgccttcctcgctaatttgaactaattgtataaaaacaccaaacctgctcactaaaaaaaaaaaaaaaaaa

SEQ ID NO: 154 - protein, 157 aa, Homo sapiens
MSFVGENSGVKMGSEDWEKDEPQCCLEEIFFALASSLSSASAEKGSPILLGVSKGEFCLYCDKDKGQSHPSLQLKKEKLMKLAAQKESARRPFIFYRAQVGSWNMLESAAHPGWFICTSCNCNEPVGVTDKFENRKHIEFSFQPVCKAEMSPSEVSD

SEQ ID NO: 155 - DNA, 667 bp, Homo sapiens
cttcattccattttctgttgagtaataaactcaacgttgaaaatgtcctttgtgggggagaactcaggagtgaaaatgggctctgaggactgggaaaaagatgaaccccagtgctgcttagaagacccggctggaagccccctggaaccaggcccaagcctccccaccatgaattttgttcacacaaagatcttctttgcattagcctcatccttgagctcagcctctgcggagaaaggaagtccgattctcctgggggtctctaaaggggagttttgtctctactgtgacaaggataaaggacaaagtcatccatcccttcagctgaagaaggagaaactgatgaagctggctgcccaaaaggaatcagcacgccggcccttcatcttttatagggctcaggtgggctcctggaacatgctggagtcggcggctcaccccggatggttcatctgcacctcctgcaattgtaatgagcctgttggggtgacagataaatttgagaacaggaaacacattgaattttcatttcaaccagtttgcaaagctgaaatgagccccagtgaggtcagcgattaggaaactgccccattgaacgccttcctcgctaatttgaactaattgtataaaaacaccaaacctgctcactaaaaaaaaaaaaaaaaaa

SEQ ID NO: 156 - protein, 178 aa, Homo sapiens
MSFVGENSGVKMGSEDWEKDEPQCCLEDPAGSPLEPGPSLPTMNFVHTKIFFALASSLSSASAEKGSPILLGVSKGEFCLYCDKDKGQSHPSLQLKKEKLMKLAAQKESARRPFIFYRAQVGSWNMLESAAHPGWFICTSCNCNEPVGVTDKFENRKHIEFSFQPVCKAEMSPSEVSD

SEQ ID NO: 157 - DNA, 667 bp, Homo sapiens
atgtcaggctgtgataggagggaaacagaaaccaaaggaaagaacagctttaagaagcgcttaagaggtccaaaggtgaagaacttaaacccgaagaaattcagcattcatgaccaggatcacaaagtactggtcctggactctgggaatctcatagcagttccagataaaaactacatacgcccagagatcttctttgcattagcctcatccttgagctcagcctctgcggagaaaggaagtccgattctcctgggggtctctaaaggggagttttgtctctactgtgacaaggataaaggacaaagtcatccatcccttcagctgaagaaggagaaactgatgaagctggctgcccaaaaggaatcagcacgccggcccttcatcttttatagggctcaggtgggctcctggaacatgctggagtcggcggctcaccccggatggttcatctgcacctcctgcaattgtaatgagcctgttggggtgacagataaatttgagaacaggaaacacattgaattttcatttcaaccagtttgcaaagctgaaatgagccccagtgaggtcagcgattaggaaactgccccattgaacgccttcctcgctaatttgaactaattgtataaaaacaccaaacctgctcactaaaaaaaaaaaaaaaaaa

SEQ ID NO: 158 - protein, 192 aa, Homo sapiens
MSGCDRRETETKGKNSFKKRLRGPKVKNLNPKKFSIHDQDHKVLVLDSGNLIAVPDKNYIRPEIFFALASSLSSASAEKGSPILLGVSKGEFCLYCDKDKGQSHPSLQLKKEKLMKLAAQKESARRPFIFYRAQVGSWNMLESAAHPGWFICTSCNCNEPVGVTDKFENRKHIEFSFQPVCKAEMSPSEVSD

SEQ ID NO: 159 - DNA, 1180 bp, Homo sapiens
gagccacgattcagtcccctggactgtagataaagaccctttcttgccaggtgctgagacaaccacactatgagaggcactccaggagacgctgatggtggaggaagggccgtctatcaatcaatgtgtaaacctattactgggactattaatgatttgaatcagcaagtgtggacccttcagggtcagaaccttgtggcagttccacgaagtgacagtgtgaccccagtcactgttgctgttatcacatgcaagtatccagaggctcttgagcaaggcagaggggatcccatttatttgggaatccagaatccagaaatgtgtttgtattgtgagaaggttggagaacagcccacattgcagctaaaagagcagaagatcatggatctgtatggccaacccgagcccgtgaaacccttccttttctaccgtgccaagactggtaggacctccacccttgagtctgtggccttcccggactggttcattgcctcctccaagagagaccagcccatcattctgacttcagaacttgggaagtcatacaacactgcctttgaattaaatataaatgactgaactcagcctagaggtggcagcttggtctttgtcttaaagtttctggttcccaatgtgttttcgtctacattttcttagtgtcattttcacgctggtgctgagacaggggcaaggctgctgttatcatctcattttataatgaagaagaagcaattacttcatagcaactgaagaacaggatgtggcctcagaagcaggagagctgggtggtataaggctgtcctctcaagctggtgctgtgtaggccacaaggcatctgcatgagtgactttaagactcaaagaccaaacactgagctttcttctaggggtgggtatgaagatgcttcagagctcatgcgcgttacccacgatggcatgactagcacagagctgatctctgtttctgttttgctttattccctcttgggatgatatcatccagtctttatatgttgccaatatacctcattgtgtgtaatagaaccttcttagcattaagaccttgtaaacaaaaataattcttgtgttaagttaaatcatttttgtcctaattgtaatgtgtaatcttaaagttaaataaactttgtgtatttatataataataaagctaaaactgatat

SEQ ID NO: 160 - protein, 169 aa, Homo sapiens
MRGTPGDADGGGRAVYQSMCKPITGTINDLNQQVWTLQGQNLVAVPRSDSVTPVTVAVITCKYPEALEQGRGDPIYLGIQNPEMCLYCEKVGEQPTLQLKEQKIMDLYGQPEPVKPFLFYRAKTGRTSTLESVAFPDWFIASSKRDQPIILTSELGKSYNTAFELNIND

SEQ ID NO: 161 - DNA, 477 bp, Homo sapiens
atggaaaaagcattgaaaattgacacacctcagcaggggagcattcaggatatcaatcatcgggtgtgggttcttcaggaccagacgctcatagcagtcccgaggaaggaccgtatgtctccagtcactattgccttaatctcatgccgacatgtggagacccttgagaaagacagagggaaccccatctacctgggcctgaatggactcaatctctgcctgatgtgtgctaaagtcggggaccagcccacactgcagctgaaggaaaaggatataatggatttgtacaaccaacccgagcctgtgaagtcctttctcttctaccacagccagagtggcaggaactccaccttcgagtctgtggctttccctggctggttcatcgctgtcagctctgaaggaggctgtcctctcatccttacccaagaactggggaaagccaacactactgactttgggttaactatgctgttttaa

SEQ ID NO: 162 - protein, 158 aa, Homo sapiens
MEKALKIDTPQQGSIQDINHRVWVLQDQTLIAVPRKDRMSPVTIALISCRHVETLEKDRGNPIYLGLNGLNLCLMCAKVGDQPTLQLKEKDIMDLYNQPEPVKSFLFYHSQSGRNSTFESVAFPGWFIAVSSEGGCPLILTQELGKANTTDFGLTMLF

SEQ ID NO: 163 - DNA, 1182 bp, Homo sapiens
ggttcctccccactctgtctttctcacctctccttcacttttcctagcctcctcaccaccatctgatctatcttgttctcttcacaaaaggctctgaagacatcatgaacccacaacgggaggcagcacccaaatcctatgctattcgtgattctcgacagatggtgtgggtcctgagtggaaattctttaatagcagctcctcttagccgcagcattaagcctgtcactcttcatttaatagcctgtagagacacagaattcagtgacaaggaaaagggtaatatggtttacctgggaatcaagggaaaagatctctgtctcttctgtgcagaaattcagggcaagcctactttgcagcttaagcttcagggctcccaagataacatagggaaggacacttgctggaaactagttggaattcacacatgcataaacctggatgtgagagagagctgcttcatgggaacccttgaccaatggggaataggagtgggtagaaagaagtggaagagttcctttcaacatcaccatctcaggaagaaggacaaagatttctcatccatgcggaccaacataggaatgccaggaaggatgtagaaataaggggaggaagattcccatctctacaatctttgagtgggtttgctatcaatgaaatgctacaaatggaataagttgcagaaatttttctcttttcttgggttctggagagtttgtaaaacaaggacactatgtatttttaaagagttggtaaatcttacctgtaaagctagagaaggtcggagtctttttaggagtagatttggactacataacctgtaaatgtgttttgtccagtccttagagtgttttttaaaaaattgtaaagtcaaggttttcatgaaaaatgggaagatcagacaacattgctcctgaattcccacagagcagcaagctactagagctcaatctgttatttcttttcctgatgtacaggggttaagtcctatggaagaaacagcagaattattcaaaattatttacataatgtgcaattattcactagagcatgaggagtgaaacgctctgtttagtatgtataacttaaaaggaacacatacaattaaaagtaattgaaagacatttcttcttaaaaattctataatcttacactggtaaaataaactagtttttcccatgt

SEQ ID NO: 164 - protein, 164 aa, Homo sapiens
MNPQREAAPKSYAIRDSRQMVWVLSGNSLIAAPLSRSIKPVTLHLIACRDTEFSDKEKGNMVYLGIKGKDLCLFCAEIQGKPTLQLKLQGSQDNIGKDTCWKLVGIHTCINLDVRESCFMGTLDQWGIGVGRKKWKSSFQHHHLRKKDKDFSSMRTNIGMPGRM

SEQ ID NO: 165 - DNA, 922 bp, Homo sapiens
ggttcctccccactctgtctttctcacctctccttcacttttcctagcctcctcaccaccatctgatctatcttgttctcttcacaaaaggctctgaagacatcatgaacccacaacgggaggcagcacccaaatcctatgctattcgtgattctcgacagatggtgtgggtcctgagtggaaattctttaatagcagctcctcttagccgcagcattaagcctgtcactcttcatttaatagcctgtagagacacagaattcagtgacaaggaaaagggtaatatggtttacctgggaatcaagggaaaagatctctgtctcttctgtgcagaaattcagggcaagcctactttgcagcttaaggaaaaaaatatcatggacctgtatgtggagaagaaagcacagaagccctttctctttttccacaataaagaaggctccacttctgtctttcagtcagtctcttaccctggctggttcatagccacctccaccacatcaggacagcccatctttctcaccaaggagagaggcataactaataacactaacttctacttagattctgtggaataaatccagcctaggctgtgggtggctggttccaggatagagaatcaagctgtcagagtcatcttaacagatcattatgcgactgagttcactagcagttcagcccatccatagcttacctcattcttactatccaaaagccacctcctcctccaaacatccatttctgtaccaagaccctcactcgaatgtcactatcccaagatgaaacctaaaaatcactttccattctttcttgatcttaccccaccatccactcagctgccatgcccagtttagtcaaccccccaaatgctgcttcatgcaaccttccattcctattccttttgccaacccatgatgtagag

SEQ ID NO: 166 - protein, 157 aa, Homo sapiens
MNPQREAAPKSYAIRDSRQMVWVLSGNSLIAAPLSRSIKPVTLHLIACRDTEFSDKEKGNMVYLGIKGKDLCLFCAEIQGKPTLQLKEKNIMDLYVEKKAQKPFLFFHNKEGSTSVFQSVSYPGWFIATSTTSGQPIFLTKERGITNNTNFYLDSVE

SEQ ID NO: 167 - DNA, 2717 bp, Homo sapiens
cgctgggaatcctgctcctcctcaggtcctggcagtttcagggcccctccctaggccttacttaaaaggctgaggcatccttggaggaacaggcagactccacagctcccgccaggagaaaggaacattctgaggggagtctacaccctgtggagctcaagatggtcctgagtggggcgctgtgcttccgaatgaaggactcggcattgaaggtgctttatctgcataataaccagcttctagctggagggctgcatgcagggaaggtcattaaaggtgaagagatcagcgtggtccccaatcggtggctggatgccagcctgtcccccgtcatcctgggtgtccagggtggaagccagtgcctgtcatgtggggtggggcaggagccgactctaacactagagccagtgaacatcatggagctctatcttggtgccaaggaatccaagagcttcaccttctaccggcgggacatggggctcacctccagcttcgagtcggctgcctacccgggctggttcctgtgcacggtgcctgaagccgatcagcctgtcagactcacccagcttcccgagaatggtggctggaatgcccccatcacagacttctacttccagcagtgtgactagggcaacgtgccccccagaactccctgggcagagccagctcgggtgaggggtgagtggaggagacccatggcggacaatcactctctctgctctcaggacccccacgtctgacttagtgggcacctgaccactttgtcttctggttcccagtttggataaattctgagatttggagctcagtccacggtcctcccccactggatggtgctactgctgtggaatcttgtaaaaaccatgtggggtaaactgggaataacatgaaaagatttctgtggaggtggggtgggggagtggtgggaatcattcctgcttaatggtaactgaccagtgttaccctgagccccgcaggccaacccatccccagttgagccttatagggtcagtagctctccacatgaagacctgtcactcaccactatgcaggagagggaggtggtcatagagtcagggatctatggcccttggcccagccccacctccttccctttaatcctgccactgtcatatgctacctttcctatctcttccctcatcatcttgttgtgggcatgaggaggtgctgatgtcagaagaaatggctcgagctcagaagataaaagataagtagggtatgctgatcctcttttaaaaacccaagatacaatcaaaatcccagatgctggtctctattcccatgaaaaagtgctcatgacatattgagaagacctacttacaaagtggcatatattgcaatttattttaattaaaagatacctatttatatatttctttatagaaaaaagtctggaagagtttacttcaattgtagcaatgtcagggtggtggcagtataggtgatttttcttttaattctgttaatttacctgtatttcctaatttttctacaatgaagatgaattccttgtataaaaataagaaaagaaattaatcttgaggtaagcagagtagacatcatctctgattgtcctcagcctccacttccccagagtaaattcaaattgaatcgagctctgctgctctggttggttgtagtagtgatcaggaaacagatctcagcaaagccactgaggaggaggctgtgctgagtttgtgtggctggaatctctgggtaaggaacttaaagaacaaaaatcatctggtaattctttcctagaaggatcacagcccctgggattccaaggcattggatccagtctctaagaaggctgctgtactggttgaattgtgtccccctcaaattcacatccttcttggaatctcagtctgtgagtttatttggagataaggtctctgcagatgtagttagttaagacaaggtcatgctggatgaaggtagacctaaattcaatatgactggtttccttgtatgaaaaggagaggacacagagacagaggagatgcggggaagactatgtaaagatgaaggcagagatcggagttttgcagccacaagctaagaaacaccaaggattgtggcaaccatcagaagcttggaagaggcaaagaagaattcttccctagaggctttagagggataacggctctgctgaaaccttaatctcagacttccagcctcctgaacgaagaaagaataaatttcggctgttttaagccaccaaggataattggttacagcagctctaggaaactaatacagctgctaaaatgatccctgtctcctcgtgtttacattctgtgtgtgtcccctcccacaatgtaccaaagttgtctttgtgaccaatagaatatggcagaagtgatggcatgccacttccaagattaggttataaaagacactgcagcttctacttgagccctctctctctgccacccaccgcccccaatctatcttggctcactcgctctgggggaagctagctgccatgctatgagcaggcctataaagagacttacgtggtaaaaaatgaagtctcctgcccacagccacattagtgaacctagaagcagagactctgtgagataatcgatgtttgttgttttaagttgctcagttttggtctaacttgttatgcagcaatagataaataatatgcagagaaagagaaaaaaaaaaaaaaaaaaaaaaaa

SEQ ID NO: 168 - protein, 155 aa, Homo sapiens
MVLSGALCFRMKDSALKVLYLHNNQLLAGGLHAGKVIKGEEISVVPNRWLDASLSPVILGVQGGSQCLSCGVGQEPTLTLEPVNIMELYLGAKESKSFTFYRRDMGLTSSFESAAYPGWFLCTVPEADQPVRLTQLPENGGWNAPITDFYFQQCD

SEQ ID NO: 169 - DNA, 2689 bp, Homo sapiens
ggagagtcccacctctaacatctcctgtaggcctggcaatggcaggcaggaaagacagaggaaggaaggagggagaagggaaggagtgaaggaaggagtgaaaaaggggagtctacaccctgtggagctcaagatggtcctgagtggggcgctgtgcttccgaatgaaggactcggcattgaaggtgctttatctgcataataaccagcttctagctggagggctgcatgcagggaaggtcattaaaggtgaagagatcagcgtggtccccaatcggtggctggatgccagcctgtcccccgtcatcctgggtgtccagggtggaagccagtgcctgtcatgtggggtggggcaggagccgactctaacactagagccagtgaacatcatggagctctatcttggtgccaaggaatccaagagcttcaccttctaccggcgggacatggggctcacctccagcttcgagtcggctgcctacccgggctggttcctgtgcacggtgcctgaagccgatcagcctgtcagactcacccagcttcccgagaatggtggctggaatgcccccatcacagacttctacttccagcagtgtgactagggcaacgtgccccccagaactccctgggcagagccagctcgggtgaggggtgagtggaggagacccatggcggacaatcactctctctgctctcaggacccccacgtctgacttagtgggcacctgaccactttgtcttctggttcccagtttggataaattctgagatttggagctcagtccacggtcctcccccactggatggtgctactgctgtggaatcttgtaaaaaccatgtggggtaaactgggaataacatgaaaagatttctgtggaggtggggtgggggagtggtgggaatcattcctgcttaatggtaactgaccagtgttaccctgagccccgcaggccaacccatccccagttgagccttatagggtcagtagctctccacatgaagacctgtcactcaccactatgcaggagagggaggtggtcatagagtcagggatctatggcccttggcccagccccacctccttccctttaatcctgccactgtcatatgctacctttcctatctcttccctcatcatcttgttgtgggcatgaggaggtgctgatgtcagaagaaatggctcgagctcagaagataaaagataagtagggtatgctgatcctcttttaaaaacccaagatacaatcaaaatcccagatgctggtctctattcccatgaaaaagtgctcatgacatattgagaagacctacttacaaagtggcatatattgcaatttattttaattaaaagatacctatttatatatttctttatagaaaaaagtctggaagagtttacttcaattgtagcaatgtcagggtggtggcagtataggtgatttttcttttaattctgttaatttacctgtatttcctaatttttctacaatgaagatgaattccttgtataaaaataagaaaagaaattaatcttgaggtaagcagagtagacatcatctctgattgtcctcagcctccacttccccagagtaaattcaaattgaatcgagctctgctgctctggttggttgtagtagtgatcaggaaacagatctcagcaaagccactgaggaggaggctgtgctgagtttgtgtggctggaatctctgggtaaggaacttaaagaacaaaaatcatctggtaattctttcctagaaggatcacagcccctgggattccaaggcattggatccagtctctaagaaggctgctgtactggttgaattgtgtccccctcaaattcacatccttcttggaatctcagtctgtgagtttatttggagataaggtctctgcagatgtagttagttaagacaaggtcatgctggatgaaggtagacctaaattcaatatgactggtttccttgtatgaaaaggagaggacacagagacagaggagatgcggggaagactatgtaaagatgaaggcagagatcggagttttgcagccacaagctaagaaacaccaaggattgtggcaaccatcagaagcttggaagaggcaaagaagaattcttccctagaggctttagagggataacggctctgctgaaaccttaatctcagacttccagcctcctgaacgaagaaagaataaatttcggctgttttaagccaccaaggataattggttacagcagctctaggaaactaatacagctgctaaaatgatccctgtctcctcgtgtttacattctgtgtgtgtcccctcccacaatgtaccaaagttgtctttgtgaccaatagaatatggcagaagtgatggcatgccacttccaagattaggttataaaagacactgcagcttctacttgagccctctctctctgccacccaccgcccccaatctatcttggctcactcgctctgggggaagctagctgccatgctatgagcaggcctataaagagacttacgtggtaaaaaatgaagtctcctgcccacagccacattagtgaacctagaagcagagactctgtgagataatcgatgtttgttgttttaagttgctcagttttggtctaacttgttatgcagcaatagataaataatatgcagagaaagagaaaaaaaaaaaaaaaaaaaaaaaa

SEQ ID NO: 170 - protein, 155 aa, Homo sapiens; identical to SEQ ID NO: 168

SEQ ID NO: 171 - DNA, 1376 bp, Homo sapiens
ggcagtgggactgggtttgagctgggcttatcctccaactgtgagggaggctacagcacactccaccccactctcagggctgggaattgttgtggctcagctatttgggggaatctgttttccagtttctcagaaccagcgcaagcacacacatcccaggctcacacccctggtggctggacttgctcccggatagcctcagtcagggagaggcagagctgcctggagcctgctgggctggtggaagccttggtggattctggcaggccaattatagacgaatggcctggggaacccgtgcagcccttggctgagtggttctaagccccagcacgtctgcctctggcttcacccagcctccttttctaactgcccttctctcctccccatcagtgaggaccagacaccactgattgcaggaatgtgttccctccccatggcaagatactacataattaaatatgcagaccagaaggctctatacacaagagatggccagctgctggtgggagatcctgttgcagacaactgctgtgcagagaagatctgcatacttcctaacagaggcttggcccgcaccaaggtccccattttcctggggatccagggagggagccgctgcctggcatgtgtggagacagaagaggggccttccctacagctggaggatgtgaacattgaggaactgtacaaaggtggtgaagaggccacacgcttcaccttcttccagagcagctcaggctccgccttcaggcttgaggctgctgcctggcctggctggttcctgtgtggcccggcagagccccagcagccagtacagctcaccaaggagagtgagccctcagcccgtaccaagttttactttgaacagagctggtagggagacaggaaactgcgttttagccttgtgcccccaaaccaagctcatcctgctcagggtctatggtaggcagaataatgtcccccgaaatatgtccacatcctaatcccaagatctgtgcatatgttaccatacatgtccaaagaggttttgcaaatgtgattatgttaaggatcttgaaatgaggagacaatcctgggttatccttgtgggctcagtttaatcacaagaaggaggcaggaagggagagtcagagagagaatggaagataccatgcttctaattttgaagatggagtgaggggccttgagccaacaaatgcaggtgtttttagaaggtggaaaagccaagggaacggattctcctctagagtctccggaaggaacacagctcttgacacatggatttcagctcagtgacacccatttcagacttctgacctccacaactataaaataataaacttgtgttattgtaaacctctaaaaaaaaaaaa

SEQ ID NO: 172 - protein, 152 aa, Homo sapiens
MCSLPMARYYIIKYADQKALYTRDGQLLVGDPVADNCCAEKICILPNRGLARTKVPIFLGIQGGSRCLACVETEEGPSLQLEDVNIEELYKGGEEATRFTFFQSSSGSAFRLEAAAWPGWFLCGPAEPQQPVQLTKESEPSARTKFYFEQSW

SEQ ID NO: 173 - DNA, 1030 bp, Homo sapiens
agttggagtctccagggatcagggttccaggaactcaggatctgcagtgaggaccagacaccactgattgcaggaatgtgttccctccccatggcaagatactacataattaaatatgcagaccagaaggctctatacacaagagatggccagctgctggtgggagatcctgttgcagacaactgctgtgcagagaagatctgcatacttcctaacagaggcttggcccgcaccaaggtccccattttcctggggatccagggagggagccgctgcctggcatgtgtggagacagaagaggggccttccctacagctggaggatgtgaacattgaggaactgtacaaaggtggtgaagaggccacacgcttcaccttcttccagagcagctcaggctccgccttcaggcttgaggctgctgcctggcctggctggttcctgtgtggcccggcagagccccagcagccagtacagctcaccaaggagagtgagccctcagcccgtaccaagttttactttgaacagagctggtagggagacaggaaactgcgttttagccttgtgcccccaaaccaagctcatcctgctcagggtctatggtaggcagaataatgtcccccgaaatatgtccacatcctaatcccaagatctgtgcatatgttaccatacatgtccaaagaggttttgcaaatgtgattatgttaaggatcttgaaatgaggagacaatcctgggttatccttgtgggctcagtttaatcacaagaaggaggcaggaagggagagtcagagagagaatggaagataccatgcttctaattttgaagatggagtgaggggccttgagccaacaaatgcaggtgtttttagaaggtggaaaagccaagggaacggattctcctctagagtctccggaaggaacacagctcttgacacatggatttcagctcagtgacacccatttcagacttctgacctccacaactataaaataataaacttgtgttattgtaaacctctaaaaaaaaaaaa

SEQ ID NO: 174 - protein, 152 aa, Homo sapiens; identical to SEQ ID NO: 172

SEQ ID NO: 175 - DNA, 1440 bp, Homo sapiens
cagtcacatttcagccactgctctgagaatttgtgagcagcccctaacaggctgttacttcactacaactgacgatatgatcatcttaatttacttatttctcttgctatgggaagacactcaaggatggggattcaaggatggaatttttcataactccatatggcttgaacgagcagccggtgtgtaccacagagaagcacggtctggcaaatacaagctcacctacgcagaagctaaggcggtgtgtgaatttgaaggcggccatctcgcaacttacaagcagctagaggcagccagaaaaattggatttcatgtctgtgctgctggatggatggctaagggcagagttggataccccattgtgaagccagggcccaactgtggatttggaaaaactggcattattgattatggaatccgtctcaataggagtgaaagatgggatgcctattgctacaacccacacgcaaaggagtgtggtggcgtctttacagatccaaagcaaatttttaaatctccaggcttcccaaatgagtacgaagataaccaaatctgctactggcacattagactcaagtatggtcagcgtattcacctgagttttttagattttgaccttgaagatgacccaggttgcttggctgattatgttgaaatatatgacagttacgatgatgtccatggctttgtgggaagatactgtggagatgagcttccagatgacatcatcagtacaggaaatgtcatgaccttgaagtttctaagtgatgcttcagtgacagctggaggtttccaaatcaaatatgttgcaatggatcctgtatccaaatccagtcaaggaaaaaatacaagtactacttctactggaaataaaaactttttagctggaagatttagccacttataaaaaaaaaaaaaaggatgatcaaaacacacagtgtttatgttggaatcttttggaactcctttgatctcactgttattattaacatttatttattatttttctaaatgtgaaagcaatacataatttagggaaaattggaaaatataggaaactttaaacgagaaaatgaaacctctcataatcccactgcatagaaataacaagcgttaacattttcatatttttttctttcagtcatttttctatttgtggtatatgtatatatgtacctatatgtatttgcatttgaaattttggaatcctgctctatgtacagttttgtattatactttttaaatcttgaactttataaacattttctgaaatcattgattattctacaaaaacatgattttaaacagctgtaaaatattctatgatatgaatgttttatgcattatttaagcctgtctctattgttggaatttcaggtcattttcataaatattgttgcaataaatatccttgaacacaaaaaaaaaaaaaaaaaa

SEQ ID NO: 176 - protein, 277 aa, Homo sapiens
MIILIYLFLLLWEDTQGWGFKDGIFHNSIWLERAAGVYHREARSGKYKLTYAEAKAVCEFEGGHLATYKQLEAARKIGFHVCAAGWMAKGRVGYPIVKPGPNCGFGKTGIIDYGIRLNRSERWDAYCYNPHAKECGGVFTDPKQIFKSPGFPNEYEDNQICYWHIRLKYGQRIHLSFLDFDLEDDPGCLADYVEIYDSYDDVHGFVGRYCGDELPDDIISTGNVMTLKFLSDASVTAGGFQIKYVAMDPVSKSSQGKNTSTTSTGNKNFLAGRFSHL

SEQ ID NO: 177 - DNA, 8192 bp, Homo sapiens
ggtctaggagggagcgcgccgcacgcgtgagtaaacagccggagctgggaaagtcgagctctggcagcgtctgggtgctgaggggcagaggcggagagaaccctgtcctgatcttcctagggtggccgacatgacggccaggggtcagagccccctcgcgccgctgttggagactttggaagacccttctgcctcccatggagggcagactgacgcttacctgactctgaccagtcgtatgactggagaagaaggaaaagaagtaattacagaaattgagaaaaaacttcctcggctgtacaaagttttaaagactcacatttccagtcaaaactcggagctgagtagtgctgctctacaagccctggggttttgcttatataatcccaaaattacctcagaattatcagaggcaaatgctctagaattgctttcaaaattgaatgataccattaagaattcagacaaaaatgtacgtactagagcactttgggtgatatctaagcagacatttccctctgaagtggttggcaaaatggtatccagtataattgattcattagaaatactgtttaacaaaggagagacgcattctgctgttgttgattttgaagcattaaatgttatcgtaaggctaattgaacaagccccaattcaaatgggagaagaggcagtgaggtgggcaaaactggtcatacctttagtggttcattcagcacaaaaggtacatttgcggggagcaactgctctggagatgggaatgccattattgcttcagaaacagcaagaaatagcatctattacggagcagcttatgactactaaattaatctcagaacttcagaagctatttatgagtaaaaatgagacttacgtgttaaaattatggcctttgtttgtcaaactacttggaaggaccttgcatcgaagtgggagtttcatcaattctctcttgcaactagaagaacttggatttcgtagtggagcacccatgattaaaaagatagcttttattgcttggaagagtttaatagataattttgctttaaatccagatatactatgtagtgcaaaaagactcaagttgttaatgcagcctttgagttccatccatgtgagaacagaaactctagcattaacaaaactagaagtctggtggtatttactgatgagacttggacctcatcttcctgctaattttgaacaggtttgtgtgcctctgattcaaagtacaataagcattgattctaatgcctcacctcagggcaattcgtgtcatgtagctacatctccaggtttaaatcctatgactcctgtacacaaaggtgcttcctccccgtacggagccccgggaactccccgaatgaacctgagttcgaatttaggtggaatggccacaatcccatccattcaacttttgggacttgaaatgttgcttcatttcttgttgggtccagaagccttgagttttgctaagcaaaataaacttgtgctgagcttagagccattggaacatccgttaatcagcagcccttcctttttttccaaacatgcaaatacacttatcactgctgttcatgatagctttgttgcagttggaaaagatgcccccgatgtggttgtcagtgctatctggaaggagctaattagcttggtgaagtcagttactgaatcaggtaacaaaaaagagaaaccaggttctgaagttttgactctcttattaaagtctttggaaagcatagtaaagtctgaagtatttcctgtatcaaaaacgctggtcctcatggaaattacaattaaaggacttcctcagaaagtattaggttcaccagcatatcaggttgctaatatggatattcttaatggaactccagctttgttcttaattcaattaattttcaacaatttcttggaatgtggtgtatcagatgaaaggttctttctcagtttggaatcacttgtaggctgtgttctttctggtccaacttcaccactagctttcagtgactcagttttaaatgttattaatcaaaatgcaaagcagttggaaaataaggagcatctctggaaaatgtggagtgttatagtcaccccattaactgaattgattaatcagaccaatgaagtaaatcaaggtgatgccttagaacataattttagtgccatctatggtgcattgactttaccagtaaaccacattttttcagaacagagatttccagtggccaccatgaagactttgcttagaacttggtcagaattatatagagcatttgctcgttgtgctgctttggtggcaacagcagaagagaacttgtgctgtgaggaactttcttccaagataatgtccagtttggaagatgaaggcttttctaatttgttgttcgtggatagaattatttatattattactgtaatggttgattgcattgacttctcaccatataatattaaatatcagcccaaagttaaatcaccacagagaccttcagattggtccaaaaagaagaatgagcccctagggaaattgacttctttatttaaacttattgtgaaagtgatctattctttccacacactgagcttcaaggaagcacattctgataccctcttcactattggcaactcaatcaccggcattatttccagtgtacttgggcatatttctttgccttctatgatccgaaaaatatttgcaactttaacaagacctctggcattattttatgaaaactcaaagcttgatgaagttcctaaagtatatagttgtctgaacaacaagttagaaaagctactgggagaaattattgcttgtctgcaattcagctacaccggaacttatgatagtgaacttcttgaacaactctccccactattatgcataatatttctgcacaagaataaacagattcgaaaacagagtgctcagttctggaatgccacttttgccaaagtgatgatgttggtttatcctgaagagttaaaaccagtactaacacaagccaaacaaaaatttctgctcctgttgcctggtttggaaactgttgaaatgatggaggaatccagtggaccatattctgatggaacagaaaattcacaactaaatgtgaagataagtggcatggagagaaaatcaaatggaaaaagagattcatttttggcacaaacaaagaataaaaaagaaaatatgaaaccagcagccaaactgaaacttgaatcttcgtctttaaaagtaaagggtgaaattcttttggaagaggaaaagtctactgactttgtgtttatacctccagaaggaaaagatgcaaaggaaagaatattaactgatcatcaaaaagaagttctcaaaacaaagcggtgtgatattcctgccatgtataataatctggatgtttcccaagataccttatttactcagtatagtcaggaagagcctatggaaattcctactttaaccagaaaaccaaaggaggattctaagatgatgattacggaggagcaaatggacagtgacattgtcattcctcaagatgtcacggaagactgtggtatggctgaacatcttgaaaagtcctccctttcgaataatgagtgtggttctcttgacaaaaccagtccagaaatgtcaaacagtaataatgatgaaagaaaaaaagctttaatttcatcaaggaaaacatcaactgaatgtgcatctagtacagaaaattctttcgttgtcagcagtagttcagtttctaataccactgttgctggaactcccccataccctacaagtcggaggcaaacctttattactttggagaagtttgatggttcagaaaatagaccttttagtccatcccccttgaataatatttcatcaactgttacagtgaaaaataaccaggaaaccatgattaaaacagattttctaccaaaagcaaagcaaagagaagggactttttcaaaatctgattctgaaaaaatagtgaatggaactaagagatcaagccggagagctggtaaagctgaacaaacagggaataaaaggtctaagcccttaatgagatctgagccggagaaaaatactgaggaatctgttgaaggcattgtagtcttagaaaataacccacctggtttgcttaatcaaacagaatgtgtgtcagataatcaggttcatctttctgaatctacaatggagcatgacaatacaaagcttaaagcagcaacagtggaaaatgctgtattattggaaactaatactgtagaggagaaaaatgtagaaattaatttggaatccaaagagaatacacccccagtagtaatatcagcagatcaaatggtaaatgaggatagtcaggttcagataactccaaatcagaaaacccttagacggtcttcaaggcgacgttcagaagtagtagagtctaccactgaaagccaagataaggaaaatagtcatcaaaaaaaggaacgacgtaaggaagaagaaaaacctcttcagaagagtccattgcatataaaagatgatgtgttacctaaacaaaaactgattgctgaacaaactctacaggagaatttaattgagaaaggaagtaatttacatgagaagactcttggggaaactagtgctaatgcagaaactgaacaaaataaaaaaaaggcagaccctgagaacattaagtctgagggggatggtacccaggacattgtagataagtcctctgagaaactagtcagaggccgaacacggtatcaaactagaagagcatctcagggtttgctttccagcattgaaaactcagaatctgatagttcggaggcaaaagaagaaggttctaggaagaagagatctggaaaatggaaaaacaaaagcaatgaaagtgttgacattcaagatcaagaagagaaagtggtgaaacaggaatgtataaaagctgaaaatcagtcacatgattataaagcaacttctgaagaagatgtaagcataaaatctccgatttgcgaaaaacaagatgaaagtaatactgtaatatgtcaggattctacagtaacttcagatttgttgcaagttcctgatgatttaccaaatgtgtgtgaggaaaaaaatgaaactagcaaatatgcagaatattcctttacaagtctacctgtgccagaatcaaatctaaggactagaaatgccattaagagattacataagcgagactcttttgataattgtagtttgggagaatcctcaaaaatagggatatcagatatttcttcgctttcagaaaaaacttttcaaacacttgaatgccaacacaagagaagtaggagggtgaggagatctaaaggttgtgattgctgtggggaaaaatcacaacctcaggaaaagtcactcattgggttaaagaatacagaaaataatgacgtagagattagtgaaacaaaaaaggcagatgtgcaagcacctgtaagcccatcagaaacttctcaagctaatccatattctgaaggacaatttttagatgaacatcatagtgtgaattttcatttgggtctcaaagaggataatgatactattaatgattcattaattgtttctgaaaccaaatcaaaagaaaacactatgcaagaatctcttccttctggaatagtaaactttagagaggaaatttgtgatatggattctagtgaagcaatgtctcttgaaagccaggagtcacctaatgaaaattttaaaactgttggcccgtgtttaggagactcgaaaaatgtttcacaggaatctttggagacaaaagaagaaaaaccagaagaaaccccaaaaatggaactgagtctagagaatgttactgttgaaggaaatgcatgtaaagtaacagaatccaatctagagaaagcaaaaactatggaattgaatgtaggaaatgaagctagctttcatggacaagagagaaccaaaactggtatttctgaagaagcagcaatagaagaaaataaaagaaatgatgactctgaagcagacacagctaaactgaatgccaaagaagtagcaactgaggaatttaattcagatattagtctttctgataatactacacctgtaaaattgaatgctcaaactgagatttctgaacaaacagcagctggggaactagatggaggaaatgatgtatctgatctacactcatctgaagaaacgaataccaaaatgaaaaataatgaagaaatgatgatcggcgaggcaatggctgaaactggccatgatggtgaaacagagaatgagggcataactaccaaaacctcaaagcctgatgaagctgaaacaaacatgttgactgcagaaatggacaactttgtttgtgacacagttgaaatgagcactgaagaaggaatcattgacgctaataaaactgaaacaaatactgagtatagtaaatctgaagaaaaattagataacaatcaaatggtaatggaaagtgatattttacaggaagatcaccatacttcacagaaagtggaggaaccatcacagtgtctggcatctggaacagctatctctgagctaataatagaagacaataatgcatctcctcaaaaactaagggaacttgatccttcacttgtgtcagcaaatgacagtcctagtggcatgcagacacgctgtgtctggtctcctttggcttctccgtctacgagcattttaaagagaggactaaaaagatcccaagaagatgaaatctcatcacctgttaataaggttcgccgtgtctcctttgcagatccaatataccaagcaggattggcagatgacattgatagacggtgctctattgttaggtcccattcttccaatagttctcccataggaaaaagtgttaaaacttctcctactacacaatctaagcataataccacttcagccaaaggatttctgtccccaggatcacgtagccctaaatttaagagctcaaagaagtgtttaatttcagaaatggccaaagaatccataccatgcccaacagaaagtgtttacccaccattggtgaactgtgtggcaccagttgacatcattttacctcagattacatcaaacatgtgggcaagaggcctgggacaactcattagagctaagaatataaaaactattggtgatttgagtactcttacagcatctgaaataaaaactcttcctatccgttctccaaaagtgtccaatgtaaaaaaggctctcagaatatatcatgagcagcaggtgaagactcgtggactagaagagattccagtttttgatatttctgaaaaaacagtaaatggaatagaaaataaatctttgtcacctgatgaagaaagacttgtctcagatataattgatcctgttgctttagaaattccattatccaaaaaccttctggcacagattagtgctcttgctcttcagctggattcagaagatcttcataattattcaggaagccaactatttgaaatgcacgagaaactaagttgtatggcaaactctgtaataaaaaatctacagtcacgttggagatcaccatcccatgaaaattctatttagtattttcagagaaaattgaaggtttttttaaacatcactggatttcttgattgaggaaacaagttctgaaataatagcacaatttcaaagaagagactctttgcaaagttgataacatttcaaaccctgaaggacagtgacttattatgtaagttcaattttgtaagttcattatgtaagatccttttttttttcataatatgtattcttggctgctatgcgtggtttttcaggaaatttaattatcttactgagatgtgaaagcaaaactagtaacagaacttacattttatttcatgctttcttaaacccgtgcatattctggtgaaacatgtaaaatactttaagtaaaattgaacatttttatttgaatttttgctgaactgataaaggtgtttatatttttgtttgtttgtttgtttaattcatgtttgttgggactgaggtttaggaagtttgttactggttaaaaacctcaaatgaaatgcgaaagaatttgaatttttcctgcatatgtcaactttggacagctttcaagaaaaatgagaaaagtttcaacttctggcggttaaaatattaatgcagaatttactaagattttattcatttgcattagcaaatattcatgcagcagcagttgact

SEQ ID NO: 178 - protein, 2472 aa, Homo sapiens
MTARGQSPLAPLLETLEDPSASHGGQTDAYLTLTSRMTGEEGKEVITEIEKKLPRLYKVLKTHISSQNSELSSAALQALGFCLYNPKITSELSEANALELLSKLNDTIKNSDKNVRTRALWVISKQTFPSEVVGKMVSSIIDSLEILFNKGETHSAVVDFEALNVIVRLIEQAPIQMGEEAVRWAKLVIPLVVHSAQKVHLRGATALEMGMPLLLQKQQEIASITEQLMTTKLISELQKLFMSKNETYVLKLWPLFVKLLGRTLHRSGSFINSLLQLEELGFRSGAPMIKKIAFIAWKSLIDNFALNPDILCSAKRLKLLMQPLSSIHVRTETLALTKLEVWWYLLMRLGPHLPANFEQVCVPLIQSTISIDSNASPQGNSCHVATSPGLNPMTPVHKGASSPYGAPGTPRMNLSSNLGGMATIPSIQLLGLEMLLHFLLGPEALSFAKQNKLVLSLEPLEHPLISSPSFFSKHANTLITAVHDSFVAVGKDAPDVVVSAIWKELISLVKSVTESGNKKEKPGSEVLTLLLKSLESIVKSEVFPVSKTLVLMEITIKGLPQKVLGSPAYQVANMDILNGTPALFLIQLIFNNFLECGVSDERFFLSLESLVGCVLSGPTSPLAFSDSVLNVINQNAKQLENKEHLWKMWSVIVTPLTELINQTNEVNQGDALEHNFSAIYGALTLPVNHIFSEQRFPVATMKTLLRTWSELYRAFARCAALVATAEENLCCEELSSKIMSSLEDEGFSNLLFVDRIIYIITVMVDCIDFSPYNIKYQPKVKSPQRPSDWSKKKNEPLGKLTSLFKLIVKVIYSFHTLSFKEAHSDTLFTIGNSITGIISSVLGHISLPSMIRKIFATLTRPLALFYENSKLDEVPKVYSCLNNKLEKLLGEIIACLQFSYTGTYDSELLEQLSPLLCIIFLHKNKQIRKQSAQFWNATFAKVMMLVYPEELKPVLTQAKQKFLLLLPGLETVEMMEESSGPYSDGTENSQLNVKISGMERKSNGKRDSFLAQTKNKKENMKPAAKLKLESSSLKVKGEILLEEEKSTDFVFIPPEGKDAKERILTDHQKEVLKTKRCDIPAMYNNLDVSQDTLFTQYSQEEPMEIPTLTRKPKEDSKMMITEEQMDSDIVIPQDVTEDCGMAEHLEKSSLSNNECGSLDKTSPEMSNSNNDERKKALISSRKTSTECASSTENSFVVSSSSVSNTTVAGTPPYPTSRRQTFITLEKFDGSENRPFSPSPLNNISSTVTVKNNQETMIKTDFLPKAKQREGTFSKSDSEKIVNGTKRSSRRAGKAEQTGNKRSKPLMRSEPEKNTEESVEGIVVLENNPPGLLNQTECVSDNQVHLSESTMEHDNTKLKAATVENAVLLETNTVEEKNVEINLESKENTPPVVISADQMVNEDSQVQITPNQKTLRRSSRRRSEVVESTTESQDKENSHQKKERRKEEEKPLQKSPLHIKDDVLPKQKLIAEQTLQENLIEKGSNLHEKTLGETSANAETEQNKKKADPENIKSEGDGTQDIVDKSSEKLVRGRTRYQTRRASQGLLSSIENSESDSSEAKEEGSRKKRSGKWKNKSNESVDIQDQEEKVVKQECIKAENQSHDYKATSEEDVSIKSPICEKQDESNTVICQDSTVTSDLLQVPDDLPNVCEEKNETSKYAEYSFTSLPVPESNLRTRNAIKRLHKRDSFDNCSLGESSKIGISDISSLSEKTFQTLECQHKRSRRVRRSKGCDCCGEKSQPQEKSLIGLKNTENNDVEISETKKADVQAPVSPSETSQANPYSEGQFLDEHHSVNFHLGLKEDNDTINDSLIVSETKSKENTMQESLPSGIVNFREEICDMDSSEAMSLESQESPNENFKTVGPCLGDSKNVSQESLETKEEKPEETPKMELSLENVTVEGNACKVTESNLEKAKTMELNVGNEASFHGQERTKTGISEEAAIEENKRNDDSEADTAKLNAKEVATEEFNSDISLSDNTTPVKLNAQTEISEQTAAGELDGGNDVSDLHSSEETNTKMKNNEEMMIGEAMAETGHDGETENEGITTKTSKPDEAETNMLTAEMDNFVCDTVEMSTEEGIIDANKTETNTEYSKSEEKLDNNQMVMESDILQEDHHTSQKVEEPSQCLASGTAISELIIEDNNASPQKLRELDPSLVSANDSPSGMQTRCVWSPLASPSTSILKRGLKRSQEDEISSPVNKVRRVSFADPIYQAGLADDIDRRCSIVRSHSSNSSPIGKSVKTSPTTQSKHNTTSAKGFLSPGSRSPKFKSSKKCLISEMAKESIPCPTESVYPPLVNCVAPVDIILPQITSNMWARGLGQLIRAKNIKTIGDLSTLTASEIKTLPIRSPKVSNVKKALRIYHEQQVKTRGLEEIPVFDISEKTVNGIENKSLSPDEERLVSDIIDPVALEIPLSKNLLAQISALALQLDSEDLHNYSGSQLFEMHEKLSCMANSVIKNLQSRWRSPSHENSI

SEQ ID NO: 179 - DNA, 8192 bp, Homo sapiens
gtgataaaactacaaagcagaatacgaagaagacagaggcaaaggcttcttccctcagaccataactcaagaatatgggggtctcgcagtaatttatgctctttgcttttgtcttttcatagttttccttgtatagtttgtcacttagggcatctcctgctgccttcagctgcctaagctgtgggttctctgaagcaggaagcacattataatctgcttttcctttattcttttcatagtcttctttgtattttgctgctgaggaaatttatttggtagattgaaggtttgaacgagagctacagaaacgaaagaaaaagtctgtataagccaatggtgttcgggaagaaaataaccccattgccttgagtttgtaggtgccactactactctgaaaaatggcagatgacgaagactatgaggaggtggtggagtactacacagaagaagtggtttacgaagaggtgccgggagagacaataacaaaaatttatgagactacgacaacaaggacatctgactatgagcaatcagaaacttccaaaccagctctggcacagccagcactggcacagccagcatcagcaaagccggtggagaggaggaaggtcatccggaagaaagtggatccttcaaagttcatgaccccctacattgcacacagtcagaaaatgcaggatctttttagcccaaataaatacaaggagaagtttgagaaaacaaaaggacagccatacgccagcacaacagatactccagaacttcgcagaatcaaaaaagtacaagatcaactcagtgaggttaagtatcgaatggatggtgatgttgctaagactatatgtcacgtagatgaaaaagcaaaggatattgaacatgcaaagaaagtgtcgcagcaagtcagtaaggttttatacaagcagaactgggaagacaccaaggataagtacctgcttcctcctgatgcccctgaacttgtccaggccgttaagaacaccgccatgttcagcaagaaactgtacactgaagactgggaagcagacaaaagtttgttttacccctataatgatagcccggaactgaggagagttgcccaggcccagaaagctctcagtgatgttgcctacaaaaaaggtctcgctgaacagcaagctcaattcacgcctctggccgatcctccagatatagaatttgccaagaaagtaaccaatcaagtgagcaagcaaaaatacaaagaagactatgaaaataaaatcaaaggcaaatggagtgagacaccttgctttgaagttgcaaatgccagaatgaatgctgataacattagcacaaggaaataccaggaagattttgaaaacatgaaagaccagatctacttcatgcagaccgaaacaccagagtataaaatgaataaaaaagctggtgtggcagctagcaaggtaaaatacaaagaagactatgaaaagaataaaggaaaagcagattataatgtgcttcctgcttcagagaacccacagcttaggcagctgaaggcagcaggagatgccctaagtgacaaactatacaaggaaaactatgaaaagacaaaagcaaagagcataaattactgcgagacccccaaattcaagctcgatactgttctgcagaacttcagtagtgataaaaaatataaagattcctacttaaaagatattttgggacattatgtaggcagcttcgaggatccataccattcacactgcatgaaagtcacagctcaaaacagtgataaaaactacaaagcagaatacgaagaagacagaggcaaaggcttcttccctcagaccataactcaagaatatgaagcaattaagaaactagatcagtgtaaagaccacacctacaaagtccatccagataagacaaaattcacccaagttacagactctcctgttctgctacaagcccaagtcaattccaaacaactgagtgacttaaattacaaagcaaaacatgaaagtgaaaagttcaagtgccatatcccccctgatactcctgcttttatccagcacaaagtcaatgcctataacttgagtgataatctttataagcaagactgggagaagagcaaagccaaaaagtttgacattaaagtggatgccattcccctgctggcagccaaagccaacaccaagaacaccagcgatgtgatgtacaagaaagactatgaaaaaaacaaagggaaaatgattggagtcctcagcattaatgacgatcccaagatgctgcactccttgaaggtggccaaaaaccagagtgatagattatacaaggaaaactatgagaagacaaaggcaaagagtatgaattactgtgagaccccaaaatatcaacttgatactcagctgaagaacttcagtgaggctagatataaagacttatatgtaaaggatgttttgggacattatgtaggcagcatggaggacccatatcacacacactgcatgaaagttgcagctcaaaacagtgataaaagttacaaagcagaatatgaagaagataaaggaaaatgctatttccctcagacaataacacaagaatatgacgcaatcaagaagctggaccagtgtaaagatcatacctacaaagttcatccagataagaccaaattcacggcagtcactgattctcctgtactgttgcaagcccagctcaacacgaaacagcttagtgatctgaattacaaagcaaaacatgaaggtgagaggttcaagtgccatataccagcagatgctccacagtttatccaacacagagtcaatgcctataatctgagtgataatgtttataagcaagactgggagaagagcaaagccaagaagtttgacattaaagtggacgccattcccctgttggcagccaaagccaacaccaagaacaccagcgatgtgatgtacaagaaagactatgaaaagagcaaagggaaaatgattggagccctcagcattaatgacgatccaaagatgctgcactccttgaagacagccaaaaaccagagtgatcgcgaatatcgaaaagattatgaaaagtcaaaaactatctacacggcacctcttgatatgctccaagtcactcaagctaagaaatctcaggcaattgccagcgacgttgattataagcacatcttacacagttacagctacccccctgatagcatcaatgtggaccttgccaagaaggcatatgcgctgcagagcgatgttgaatacaaagctgactacaatagctggatgaaaggttgtggctgggtgccttttgggtccttagaaatggaaaaggcaaagcgagcttcagacatcctcaatgagaaaaaatatcgccaacatccagacaccctcaagtttacctcgattgaagatgctccaattacagtacagtctaaaattaaccaggcccagaggagtgatatcgcttacaaagccaaaggagaggaaattattcacaattacaacctgccaccagacctgccccagttcatccaggctaaagttaatgcctacaatatcagtgagaatatgtacaaagcagacttgaaagacttgagcaagaagggatatgacctgagaactgatgcgattcccatcagagctgccaaagctgccaggcaggcggcgagtgacgttcagtacaaaaaagactatgaaaaggctaaagggaaaatggttggcttccaaagtcttcaagatgaccctaaactggttcattatatgaacgtggccaagatacaatcagatcgggagtataaaaaagactatgagaagacaaagtccaaatacaacacgccccatgatatgttcaatgtcgtggcggctaagaaagcccaggatgtggtcagcaatgtcaactataagcattctctccatcattacacctacttgcctgacgccatggacctggagctgtctaagaacatgatgcagatacagagtgataacgtctacaaggaagactacaacaactggatgaaaggcattggctggattcctattggcagtctcgacgtcgaaaaagttaaaaaggccggtgatgctctgaatgaaaagaagtacaggcaacatccagacaccctcaaatttaccagcattgtggactccccagttatggtccaggcaaaacagaacacgaagcaagtcagtgatatcttatacaaggctaaaggagaagatgtgaaacataaatacaccatgagtcctgatcttcctcagtttctccaggccaagtgcaatgcttacagtataagtgacgtctgttataaacgggattggcatgacttaatacgcaagggcaacaatgtgctgggcgatgctattcccatcactgcagccaaggcatcgagaaacattgccagtgattataaatacaaggaagcttatgagaagtcaaagggaaagcatgtgggtttcagaagcctccaggatgatcccaagctggtccactatatgaatgtggcaaagctgcagtctgatcgtgaatacaagaagaactatgagaacaccaaaaccagctaccatacccctggggacatggttacgatcacagctgcaaagatggcccaggatgtcgctaccaatgtcaactacaaacagccattgcatcattacacatacctacctgacgccatgagtcttgagcatacgaggaatgtcaatcaaattcagagtgataatgtgtataaagacgagtataacagcttcttgaagggcatcggatggatccctattggttccctggaggtggagaaggtcaagaaagcaggcgatgcattaaatgagaggaagtatcgacagcacccagataccgtcaagttcacaagtgtgcctgattccatgggcatgatgttggctcagcataacacaaagcagctaagtgatttgaactacaaggtagagggagagaaactgaagcacaagtatactattgaccctgaattgcctcagtttattcaagccaaagtcaacgccctcaacatgagtgatgctcattataaagcagattggaagaaaaccattcgcaagggctatgatttgagaccagatgccatcccaattgttgctgcaaaaagttcaaggaatattgctagtgattgcaaatataaggaggcctacgagaaagccaaaggcaagcaagttggatttctcagtcttcaggatgatcctaaactggttcactacatgaatgtggccaaaatccagtctgatcgtgagtacaaaaagggctatgaagccagcaagaccaagtaccacacacctctggatatggtcagtgtgacagctgcaaagaaatctcaggaggttgccaccaacgccaactacagacagtcataccaccactacactctcctgcccgatgccttgaatgtggagcactccaggaatgccatgcagattcagagtgataatctgtacaaatctgacttcaccaattggatgaaagggatcggctgggtgcccatagagtccctggaggtggagaaggcaaagaaagcaggagagattcttagtgagaagaagtatcgccagcaccccgagaagctgaagttcacttacgccatggacacaatggaacaggcacttaacaagagtaacaaactgaacatggacaagaggctctacactgaaaaatggaacaaggacaagaccaccattcatgtcatgcctgacacaccggatattttactctccagagtaaaccaaatcaccatgagtgataaactgtacaaagctggctgggaagaggaaaagaagaaaggatatgacctgaggcctgatgccattgcaataaaggctgcaagagcctctagagacattgccagtgattacaaatacaagaaagcctatgaacaagccaaagggaaacacattggcttccggagcctggaagatgaccccaagctggtgcacttcatgcaagtggccaagatgcagtcagaccgggaatacaagaagggatatgagaaatccaagacctccttccacaccccggtggacatgctcagtgtggtggcagccaagaagtctcaggaagtggccaccaatgccaactacaggaacgtgatccatacctacaacatgcttcctgatgccatgagctttgaattggccaaaaatatgatgcagattcaaagtgataatcagtacaaggctgactatgctgacttcatgaagggcattggatggctccctctgggctccctggaagcagagaaaaacaagaaagccatggagattattagtgaaaagaagtaccgccagcacccagacactttgaagtattccacactcatggactcgatgaacatggttttggcccagaataatgcaaaaattatgaacgaacatctctacaaacaagcatgggaggctgacaaaaccaaagtccacatcatgcctgatatcccccagattattttggcaaaggcaaatgcaattaatataagtgataaactctacaaactttccttggaagagtctaaaaagaaaggctatgatctcagacctgatgcaattcctatcaaagctgccaaggcttccagagatattgcaagtgattataaatacaagtacaattatgaaaaagggaaggggaaaatggttggtttccgcagtctcgaggatgatcccaaattagtccattccatgcaagtggctaagatgcaatctgatcgggagtacaagaaaaactatgagaacacaaagaccagctaccacacccctgccgacatgctcagtgtcacggctgcaaaggatgcccaagccaacatcaccaacactaactacaagcacctgattcacaagtacatcctccttccagatgcaatgaacattgagctgaccaggaatatgaatcgcatacagagtgataatgaatataagcaagattacaatgaatggtacaaagggcttggctggagtccagcaggttctctggaagtggagaaggccaagaaagcaactgaatatgccagtgatcagaaataccgccagcacccgagcaacttccagtttaagaagctgactgattccatggacatggtgcttgccaagcagaatgcacataccatgaacaagcatttatacaccattgattggaataaagataagaccaagattcatgtgatgcctgatacaccagatattttacaagccaagcagaatcaaacactgtatagtcagaaactctataaacttggatgggaagaagctttgaagaaaggctatgatctcccagttgatgcaatttctgtacagctagctaaagcttcaagagacattgctagtgattataaatacaaacaaggctaccgaaagcaacttggccaccatgttggattccggagtctgcaagatgacccaaaacttgtgttgtccatgaatgtagccaaaatgcagagtgaaagagaatacaagaaggactttgagaagtggaaaactaagttctccagcccagtggacatgttgggagtggtactggccaagaagtgtcaggagttggttagtgacgtggactacaagaactacctgcatcagtggacatgtctgcctgatcagaacgatgttgtgcaagctaagaaagtttatgaactgcaaagtgagaatctatataaatctgaccttgagtggctgagaggcataggatggagtcccttgggttctttagaggcagaaaagaacaagcgggcttcggaaatcatcagtgagaagaaatatcgtcagcctccagacagaaacaagttcaccagcattcctgatgccatggatatagttctggcaaagacaaatgccaaaaataggagtgatagactttatagagaagcttgggacaaagacaagactcagatccacatcatgcctgatacacctgacattgttctggctaaagcaaacttaatcaacacaagtgataaactctaccgaatgggttatgaggagctgaagagaaaaggttacgatcttcctgttgatgccataccaatcaaagcagcaaaagcctcccgggaaattgccagtgaatacaagtacaaggaaggctttcgcaagcagctcggccaccacattggtgcccggaacattgaagatgaccccaagatgatgtggtccatgcatgtggccaagatccagagtgacagggagtacaagaaggactttgagaagtggaagacc

SEQ ID NO: 180 - protein, 6669 aa, Homo sapiens
MADDEDYEEVVEYYTEEVVYEEVPGETITKIYETTTTRTSDYEQSETSKPALAQPALAQPASAKPVERRKVIRKKVDPSKFMTPYIAHSQKMQDLFSPNKYKEKFEKTKGQPYASTTDTPELRRIKKVQDQLSEVKYRMDGDVAKTICHVDEKAKDIEHAKKVSQQVSKVLYKQNWEDTKDKYLLPPDAPELVQAVKNTAMFSKKLYTEDWEADKSLFYPYNDSPELRRVAQAQKALSDVAYKKGLAEQQAQFTPLADPPDIEFAKKVTNQVSKQKYKEDYENKIKGKWSETPCFEVANARMNADNISTRKYQEDFENMKDQIYFMQTETPEYKMNKKAGVAASKVKYKEDYEKNKGKADYNVLPASENPQLRQLKAAGDALSDKLYKENYEKTKAKSINYCETPKFKLDTVLQNFSSDKKYKDSYLKDILGHYVGSFEDPYHSHCMKVTAQNSDKNYKAEYEEDRGKGFFPQTITQEYEAIKKLDQCKDHTYKVHPDKTKFTQVTDSPVLLQAQVNSKQLSDLNYKAKHESEKFKCHIPPDTPAFIQHKVNAYNLSDNLYKQDWEKSKAKKFDIKVDAIPLLAAKANTKNTSDVMYKKDYEKNKGKMIGVLSINDDPKMLHSLKVAKNQSDRLYKENYEKTKAKSMNYCETPKYQLDTQLKNFSEARYKDLYVKDVLGHYVGSMEDPYHTHCMKVAAQNSDKSYKAEYEEDKGKCYFPQTITQEYDAIKKLDQCKDHTYKVHPDKTKFTAVTDSPVLLQAQLNTKQLSDLNYKAKHEGERFKCHIPADAPQFIQHRVNAYNLSDNVYKQDWEKSKAKKFDIKVDAIPLLAAKANTKNTSDVMYKKDYEKSKGKMIGALSINDDPKMLHSLKTAKNQSDREYRKDYEKSKTIYTAPLDMLQVTQAKKSQAIASDVDYKHILHSYSYPPDSINVDLAKKAYALQSDVEYKADYNSWMKGCGWVPFGSLEMEKAKRASDILNEKKYRQHPDTLKFTSIEDAPITVQSKINQAQRSDIAYKAKGEEIIHNYNLPPDLPQFIQAKVNAYNISENMYKADLKDLSKKGYDLRTDAIPIRAAKAARQAASDVQYKKDYEKAKGKMVGFQSLQDDPKLVHYMNVAKIQSDREYKKDYEKTKSKYNTPHDMFNVVAAKKAQDVVSNVNYKHSLHHYTYLPDAMDLELSKNMMQIQSDNVYKEDYNNWMKGIGWIPIGSLDVEKVKKAGDALNEKKYRQHPDTLKFTSIVDSPVMVQAKQNTKQVSDILYKAKGEDVKHKYTMSPDLPQFLQAKCNAYSISDVCYKRDWHDLIRKGNNVLGDAIPITAAKASRNIASDYKYKEAYEKSKGKHVGFRSLQDDPKLVHYMNVAKLQSDREYKKNYENTKTSYHTPGDMVTITAAKMAQDVATNVNYKQPLHHYTYLPDAMSLEHTRNVNQIQSDNVYKDEYNSFLKGIGWIPIGSLEVEKVKKAGDALNERKYRQHPDTVKFTSVPDSMGMMLAQHNTKQLSDLNYKVEGEKLKHKYTIDPELPQFIQAKVNALNMSDAHYKADWKKTIRKGYDLRPDAIPIVAAKSSRNIASDCKYKEAYEKAKGKQVGFLSLQDDPKLVHYMNVAKIQSDREYKKGYEASKTKYHTPLDMVSVTAAKKSQEVATNANYRQSYHHYTLLPDALNVEHSRNAMQIQSDNLYKSDFTNWMKGIGWVPIESLEVEKAKKAGEILSEKKYRQHPEKLKFTYAMDTMEQALNKSNKLNMDKRLYTEKWNKDKTTIHVMPDTPDILLSRVNQITMSDKLYKAGWEEEKKKGYDLRPDAIAIKAARASRDIASDYKYKKAYEQAKGKHIGFRSLEDDPKLVHFMQVAKMQSDREYKKGYEKSKTSFHTPVDMLSVVAAKKSQEVATNANYRNVIHTYNMLPDAMSFELAKNMMQIQSDNQYKADYADFMKGIGWLPLGSLEAEKNKKAMEIISEKKYRQHPDTLKYSTLMDSMNMVLAQNNAKIMNEHLYKQAWEADKTKVHIMPDIPQIILAKANAINISDKLYKLSLEESKKKGYDLRPDAIPIKAAKASRDIASDYKYKYNYEKGKGKMVGFRSLEDDPKLVHSMQVAKMQSDREYKKNYENTKTSYHTPADMLSVTAAKDAQANITNTNYKHLIHKYILLPDAMNIELTRNMNRIQSDNEYKQDYNEWYKGLGWSPAGSLEVEKAKKATEYASDQKYRQHPSNFQFKKLTDSMDMVLAKQNAHTMNKHLYTIDWNKDKTKIHVMPDTPDILQAKQNQTLYSQKLYKLGWEEALKKGYDLPVDAISVQLAKASRDIASDYKYKQGYRKQLGHHVGFRSLQDDPKLVLSMNVAKMQSEREYKKDFEKWKTKFSSPVDMLGVVLAKKCQELVSDVDYKNYLHQWTCLPDQNDVVQAKKVYELQSENLYKSDLEWLRGIGWSPLGSLEAEKNKRASEIISEKKYRQPPDRNKFTSIPDAMDIVLAKTNAKNRSDRLYREAWDKDKTQIHIMPDTPDIVLAKANLINTSDKLYRMGYEELKRKGYDLPVDAIPIKAAKASREIASEYKYKEGFRKQLGHHIGARNIEDDPKMMWSMHVAKIQSDREYKKDFEKWKTKFSSPVDMLGVVLAYKCQTLVSDVDYKNYLHQWTCLPDQSDVIHARQAYDLQSDNLYKSDLQWLKGIGWMTSGSLEDEKNKRATQILSDHVYRQHPDQFKFSSLMDSIPMVLAKNNAITMNHRLYTEAWDKDKTTVHIMPDTPEVLLAKQNKVNYSEKLYKLGLEEAKRKGYDMRVDAIPIKAAKASRDIASEFKYKEGYRKQLGHHIGARAIRDDPKMMWSMHVAKIQSDREYKKDFEKWKTKFSSPVDMLGVVLAKKCQTLVSDVDYKNYLHQWTCLPDQSDVIHARQAYDLQSDNMYKSDLQWMRGIGWVSIGSLDVEKCKRATEILSDKIYRQPPDRFKFTSVTDSLEQVLAKNNALNMNKRLYTEAWDKDKTQIHIMPDTPEIMLARQNKINYSETLYKLANEEAKKKGYDLRSDAIPIVAAKASRDVISDYKYKDGYRKQLGHHIGARNIEDDPKMMWSMHVAKIQSDREYKKDFEKWKTKFSSPVDMLGVVLAKKCQTLVSDVDYKNYLHEWTCLPDQNDVIHARQAYDLQSDNIYKSDLQWLRGIGWVPIGSMDVVKCKRAAEILSDNIYRQPPDKLKFTSVTDSLEQVLAKNNALNMNKRLYTEAWDKDKTQVHIMPDTPEIMLARQNKINYSESLYRQAMEEAKKEGYDLRSDAIPIVAAKASRDIASDYKYKEAYRKQLGHHIGARAVHDDPKIMWSLHIAKVQSDREYKKDFEKYKTRYSSPVDMLGIVLAKKCQTLVSDVDYKHPLHECICLPDQNDIIHARKAYDLQSDNLYKSDLEWMKGIGWVPIDSLEVVRAKRAGELLSDTIYRQRPETLKFTSITDTPEQVLAKNNALNMNKRLYTEAWDNDKKTIHVMPDTPEIMLAKLNRINYSDKLYKLALEESKKEGYDLRLDAIPIQAAKASRDIASDYKYKEGYRKQLGHHIGARNIKDDPKMMWSIHVAKIQSDREYKKEFEKWKTKFSSPVDMLGVVLAKKCQILVSDIDYKHPLHEWTCLPDQNDVIQARKAYDLQSDAIYKSDLEWLRGIGWVPIGSVEVEKVKRAGEILSDRKYRQPADQLKFTCITDTPEIVLAKNNALTMSKHLYTEAWDADKTSIHVMPDTPDILLAKSNSANISQKLYTKGWDESKMKDYDLRADAISIKSAKASRDIASDYKYKEAYEKQKGHHIGAQSIEDDPKIMCAIHAEKIQSEREYKKEFQKWKTKFSSPVDMLSILLAKKCQTLVTDIYYRNYLHEWTCMPDQNDIIQAKKAYDLQSDALYKADLEWLRGIGWMPQGSPEVLRVKNAQNIFCDSVYRTPVVNLKYTSIVDTPEVVLAKSNAENISIPKYREVWDKDKTSIHIMPDTPEINLARANALNVSNKLYREGWDEMKAGCDVRLDAIPIQAAKASREIASDYKYKLDHEKQKGHYVGTLTARDDNKIRWALIADKLQNEREYRLDWAKWKAKIQSPVDMLSILHSKNSQALVSDMDYRNYLHQWTCMPDQNDVIQAKKAYELQSDNVYKADLEWLRGIGWMPNDSVSVNHAKHAADIFSEKKYRTKIETLNFTPVDDRVDYVTAKQSGEILDDIKYRKDWNATKSKYTLTETPLLHTAQEAARILDQYLYKEGWERQKATGYILPPDAVPFVHAHHCNDVQSELKYKAEHVKQKGHYVGVPTMRDDPKLVWFEHAGQIQNERLYKEDYHKTKAKINIPADMVSVLAAKQGQTLVSDIDYRNYLHQWMCHPDQNDVIQARKAYDLQSDNVYRADLEWLRGIGWIPLDSVDHVRVTKNQEMMSQIKYKKNALENYPNFTSVVDPPEIVLAKINSVNQSDVKYKETFNKAKGKYTFSPDTPHISHSKDMGKLYSTILYKGAWEGTKAYGYTLDERYIPIVGAKHADLVNSELKYKETYEKQKGHYLAGKVIGEFPGVVHCLDFQKMRSALNYRKHYEDTKANVHIPNDMMNHVLAKRCQYILSDLEYRHYFHQWTSLLEEPNVIRVRNAQEILSDNVYKDDLNWLKGIGCYVWDTPQILHAKKSYDLQSQLQYTAAGKENLQNYNLVTDTPLYVTAVQSGINASEVKYKENYHQIKDKYTTVLETVDYDRTRNLKNLYSSNLYKEAWDRVKATSYILPSSTLSLTHAKNQKHLASHIKYREEYEKFKALYTLPRSVDDDPNTARCLRVGKLNIDRLYRSVYEKNKMKIHIVPDMVEMVTAKDSQKKVSEIDYRLRLHEWICHPDLQVNDHVRKVTDQISDIVYKDDLNWLKGIGCYVWDTPEILHAKHAYDLRDDIKYKAHMLKTRNDYKLVTDTPVYVQAVKSGKQLSDAVYHYDYVHSVRGKVAPTTKTVDLDRALHAYKLQSSNLYKTSLRTLPTGYRLPGDTPHFKHIKDTRYMSSYFKYKEAYEHTKAYGYTLGPKDVPFVHVRRVNNVTSERLYRELYHKLKDKIHTTPDPPEIRQVKKTQEAVSELIYKSDFFKMQGHMISLPYTPQVIHCRYVGDITSDIKYKEDLQVLKGFGCFLYDTPDMVRSRHLRKLWSNYLYTDKAREMRDKYKVVLDTPEYRKVQELKTHLSELVYRAAGKKQKSIFTSVPDTPDLLRAKRGQKLQSQYLYVELATKERPHHHAGNQTTALKHAKDVKDMVSEKKYKIQYEKMKDKYTPVPDTPILIRAKRAYWNASDLRYKETFQKTKGKYHTVKDALDIVYHRKVTDDISKIKYKENYMSQLGIWRSIPDRPEHFHHRAVTDTVSDVKYKEDLTWLKGIGCYAYDTPDFTLAEKNKTLYSKYKYKEVFERTKSDFKYVADSPINRHFKYATQLMNEKKYRADYEQRKDKYHLVVDEPRHLLAKTRSDQISQIKYRKNYEKSKDKFTSIVDTPEHLRTTKVNKQISDILYKLEYNKAKPRGYTTIHDTPMLLHVRKVKDEVSDLKYKEVYQRNKSNCTIEPDAVHIKAAKDAYKVNTNLDYKKQYEANKAHWKWTPDRPDFLQAAKSSLQQSDFEYKLDREFLKGCKLSVTDDKNTVLALRNTLIESDLKYKEKHVKERGTCHAVPDTPQILLAKTVSNLVSENKYKDHVKKHLAQGSYTTLPETRDTVHVKEVTKHVSDTNYKKKFVKEKGKSNYSIMLEPPEVKHAMEVAKKQSDVAYRKDAKENLHYTTVADRPDIKKATQAAKQASEVEYRAKHRKEGSHGLSMLGRPDIEMAKKAAKLSSQVKYRENFDKEKGKTPKYNPKDSQLYKVMKDANNLASEVKYKADLKKLHKPVTDMKESLIMNHVLNTSQLASSYQYKKKYEKSKGHYHTIPDNLEQLHLKEATELQSIVKYKEKYEKERGKPMLDFETPTYITAKESQQMQSGKEYRKDYEESIKGRNLTGLEVTPALLHVKYATKIASEKEYRKDLEESIRGKGLTEMEDTPDMLRAKNATQILNEKEYKRDLELEVKGRGLNAMANETPDFMRARNATDIASQIKYKQSAEMEKANFTSVVDTPEIIHAQQVKNLSSQKKYKEDAEKSMSYYETVLDTPEIQRVRENQKNFSLLQYQCDLKNSKGKITVVQDTPEILRVKENQKNFSSVLYKEDVSPGTAIGKTPEMMRVKQTQDHISSVKYKEAIGQGTPIPDLPEVKRVKETQKHISSVMYKENLGTGIPTTVTPEIERVKRNQENFSSVLYKENLGKGIPTPITPEMERVKRNQENFSSVLYKENMGKGTPLPVTPEMERVKHNQENISSVLYKENVGKATATPVTPEMQRVKRNQENISSVLYKENLGKATPTPFTPEMERVKRNQENFSSVLYKENMRKATPTPVTPEMERAKRNQENISSVLYSDSFRKQIQGKAAYVLDTPEMRRVRETQRHISTVKYHEDFEKHKGCFTPVVTDPITERVKKNMQDFSDINYRGIQRKVVEMEQKRNDQDQETITGLRVWRTNPGSVFDYDPAEDNIQSRSLHMINVQAQRRSREQSRSASALSVSGGEEKSEHSEAPDHHLSTYSDGGVFAVSTAYKHAKTTELPQQRSSSVATQQTTVSSIPSHPSTAGKIFRAMYDYMAADADEVSFKDGDAIINVQAIDEGWMYGTVQRTGRTGMLPANYVEAI

SEQ ID NO: 181 - DNA, 3169 bp, Homo sapiens
cccgcccgcgtggtcgtcgccaccgcagccgcccgagaggagctgggggaggacggtggcccgcgaggctcgtcgcagacaacgcggcggcgatgtccgcgagccaggcgagtgccgcggcggcagcggcggggccttgcgcgcggcagggcggcctgggcttcggcctccctccggttccctggaagcgggcccgcgaccagcgcgggagcagcagcagaggcggaggctccagcgcgtctctctcctccccctcagcctgagccgggggaagccaggcggcccgggtgtctggagggggggggtccgctgcccgagaatgggaattctcttcactagaatatggagactgttcaatcaccaggagcacaaagttatcattgttgggctggataatgcagggaaaactaccattctttaccaattttctatgaatgaagttgtacatacatctcctacaataggaagtaatgtagaagagatagtgattaataatacacgtttcctaatgtgggatattggtggccaagaatctcttcgttcttcctggaacacttactatactaacacagagtttgtaatagttgttgtggacagtacagacagagagaggatttctgtaactagagaagaactctataaaatgttagcgcatgaggacctaagaaaagctggattgctgatttttgctaataaacaagatgttaaagaatgcatgactgtagcagaaatctcccagtttttgaagctaacttctattaaagatcaccagtggcatatccaggcatgctgtgctctaactggcgagggattgtgccaaggacttgaatggatgatgtcacgacttaagattagatgatctctactgacctcttctcatagattttgtataaatgaagtgctggactttacctgaaagctgcaaaaattaatggtttagatatatttataataaactgatttaaactttttctataagaagaaaaattaagaccacttatttgaaaacaaagatgaagtctcaccttccagtttgctttctcattagttttttccaaagtaagttattgaagctgtgattgacatttttctcataatgaatcctctcaggacattgtgtagcctatggtaagtacaaagggagaggaagacattttgaattttaagagctttattatcagtttaaccctccctagttgaatgttattttcttcttgttccattaagtcagaatacaaatcagcacagatattcgaatgtttccaatattttaaaatgtaatgttacttatgaaaagtattttgcttaaggttgtgtgtgtattgtgtatatacctcaagttcaagttaatggcattgatttatgttccagacaaaaataacacaaataataatatccttcgttataaccacaatgagataagtattggcattagtgttcagtgccattttatactttctctctgtgttctctgtattgtactaaccaacctcccaaatcgctgagctgcttgtttaaaaaaaaaaaaaaggaaaaggaaaaagcatgacattgtgtatcgattttttgttgttgaccaaaatcacacacatggaaacatgtaattcaacagagtgggaaagctagcagattcttggcttagtattactaataggcaggattgtacaatgagcaactatcagattattcctttcagtggttcttatggcatctaaattactgaataaattattaatccattaatcagtgaatcaaattatgattacaattatcaaatgaatgctcagcattaattgaaaactgttttgtgaaacatgtctacccagaaaagtagcattctataaatactattaaacaacttagctatattatttttaagtattaaattatatgtcaagcagttaaagtgaatttcagagtaaaagtaaggcatgtttctgagcaacattgataatttcttaatttgcaaatttcttcttattttggtacttggaatatagtgtgagattttttatttctaaattttgttgtatcttctattacataaatgcattgacaattataaaatgcaagtgttttttgaatgattttaagaatttggcttaaaaattgattgatacaacgtattatttgtactaagaagtaacttgacccaaaacaccttttatgtttgcttagggtatattttttcagtgtctgaaagtcaaaggtattcctgtcacaactgtaaacaaacttatcctaaatgtgttaaaacatattcttgggtactctatttatgtatctttcatgccttgaaaatctgaaggttaatccaaactcacatgttttagcatatttgagaaaaaaaaactaccttcaatatcagccttttaaatttcatgaagattttggtgaggaataatagtatatagtttaagtattgacaaaactttgaaagtttctttctttaaaatgggaaatactcaatatctaaatccaggtcaggcatgggatatcagtatttaacattggatgttttatgttttatatttataatgttcaaaatgcaagcataacatttaatatttgtccacatggttttacaaaagtaaatcttaaattactaagcttttcccatatgttctcgtactttctcaaatccctataaagaattacttgttatctattaaaaatctcctttacccaaatctgtattatggtttcgccagacaaatattatgtgatgtagcccagaaaatccacaccttttgtcctttttatgttttaatttgaataatcatgtgcttagtcccttggattactgccacatcagtttaacacgatatcagcacattcccttgtcatcatcaaggtgttggctcagatttattcttaattggatgtttaaagcatgtactaccttgttacagttggtttagtgtagtggattattgacatgacatcatgagaagatgtgtaattttataccacatttataaaacatgattttgttttctacccttcaaggtaaacattaaaaataaggtggtacttgtgtacttgtacataaaaccaaaattatagttgggaaaaaaataaatttatatatgaaaatgtcaaaatcattttaaaagtattattttcaaataaaatggagaagctggtgaaaagtcatattggcaatttt

SEQ ID NO: 182 - protein, 179 aa, Homo sapiens
MGILFTRIWRLFNHQEHKVIIVGLDNAGKTTILYQFSMNEVVHTSPTIGSNVEEIVINNTRFLMWDIGGQESLRSSWNTYYTNTEFVIVVVDSTDRERISVTREELYKMLAHEDLRKAGLLIFANKQDVKECMTVAEISQFLKLTSIKDHQWHIQACCALTGEGLCQGLEWMMSRLKIR

SEQ ID NO: 183 - DNA, 2911 bp, Homo sapiens
cccgcccgcgtggtcgtcgccaccgcagccgcccgagaggagctgggggaggacggtggcccgcgaggctcgtcgcagacaacgcggcggcgatgtccgcgagccagagcacaaagttatcattgttgggctggataatgcagggaaaactaccattctttaccaattttctatgaatgaagttgtacatacatctcctacaataggaagtaatgtagaagagatagtgattaataatacacgtttcctaatgtgggatattggtggccaagaatctcttcgttcttcctggaacacttactatactaacacagagtttgtaatagttgttgtggacagtacagacagagagaggatttctgtaactagagaagaactctataaaatgttagcgcatgaggacctaagaaaagctggattgctgatttttgctaataaacaagatgttaaagaatgcatgactgtagcagaaatctcccagtttttgaagctaacttctattaaagatcaccagtggcatatccaggcatgctgtgctctaactggcgagggattgtgccaaggacttgaatggatgatgtcacgacttaagattagatgatctctactgacctcttctcatagattttgtataaatgaagtgctggactttacctgaaagctgcaaaaattaatggtttagatatatttataataaactgatttaaactttttctataagaagaaaaattaagaccacttatttgaaaacaaagatgaagtctcaccttccagtttgctttctcattagttttttccaaagtaagttattgaagctgtgattgacatttttctcataatgaatcctctcaggacattgtgtagcctatggtaagtacaaagggagaggaagacattttgaattttaagagctttattatcagtttaaccctccctagttgaatgttattttcttcttgttccattaagtcagaatacaaatcagcacagatattcgaatgtttccaatattttaaaatgtaatgttacttatgaaaagtattttgcttaaggttgtgtgtgtattgtgtatatacctcaagttcaagttaatggcattgatttatgttccagacaaaaataacacaaataataatatccttcgttataaccacaatgagataagtattggcattagtgttcagtgccattttatactttctctctgtgttctctgtattgtactaaccaacctcccaaatcgctgagctgcttgtttaaaaaaaaaaaaaaggaaaaggaaaaagcatgacattgtgtatcgattttttgttgttgaccaaaatcacacacatggaaacatgtaattcaacagagtgggaaagctagcagattcttggcttagtattactaataggcaggattgtacaatgagcaactatcagattattcctttcagtggttcttatggcatctaaattactgaataaattattaatccattaatcagtgaatcaaattatgattacaattatcaaatgaatgctcagcattaattgaaaactgttttgtgaaacatgtctacccagaaaagtagcattctataaatactattaaacaacttagctatattatttttaagtattaaattatatgtcaagcagttaaagtgaatttcagagtaaaagtaaggcatgtttctgagcaacattgataatttcttaatttgcaaatttcttcttattttggtacttggaatatagtgtgagattttttatttctaaattttgttgtatcttctattacataaatgcattgacaattataaaatgcaagtgttttttgaatgattttaagaatttggcttaaaaattgattgatacaacgtattatttgtactaagaagtaacttgacccaaaacaccttttatgtttgcttagggtatattttttcagtgtctgaaagtcaaaggtattcctgtcacaactgtaaacaaacttatcctaaatgtgttaaaacatattcttgggtactctatttatgtatctttcatgccttgaaaatctgaaggttaatccaaactcacatgttttagcatatttgagaaaaaaaaactaccttcaatatcagccttttaaatttcatgaagattttggtgaggaataatagtatatagtttaagtattgacaaaactttgaaagtttctttctttaaaatgggaaatactcaatatctaaatccaggtcaggcatgggatatcagtatttaacattggatgttttatgttttatatttataatgttcaaaatgcaagcataacatttaatatttgtccacatggttttacaaaagtaaatcttaaattactaagcttttcccatatgttctcgtactttctcaaatccctataaagaattacttgttatctattaaaaatctcctttacccaaatctgtattatggtttcgccagacaaatattatgtgatgtagcccagaaaatccacaccttttgtcctttttatgttttaatttgaataatcatgtgcttagtcccttggattactgccacatcagtttaacacgatatcagcacattcccttgtcatcatcaaggtgttggctcagatttattcttaattggatgtttaaagcatgtactaccttgttacagttggtttagtgtagtggattattgacatgacatcatgagaagatgtgtaattttataccacatttataaaacatgattttgttttctacccttcaaggtaaacattaaaaataaggtggtacttgtgtacttgtacataaaaccaaaattatagttgggaaaaaaataaatttatatatgaaaatgtcaaaatcattttaaaagtattattttcaaataaaatggagaagctggtgaaaagtcatattggcaatttt

SEQ ID NO: 184 - protein, 142 aa, Homo sapiens
MNEVVHTSPTIGSNVEEIVINNTRFLMWDIGGQESLRSSWNTYYTNTEFVIVVVDSTDRERISVTREELYKMLAHEDLRKAGLLIFANKQDVKECMTVAEISQFLKLTSIKDHQWHIQACCALTGEGLCQGLEWMMSRLKIR

SEQ ID NO: 185 - DNA, 3079 bp, Homo sapiens
catgcggcggctctgaacgatgtcctcctcctcctacgccaagaacgggaccgcggacgggccgcactcccccacctcgcaggtggcccgaggcaccacaacccggaggagcaggttgaaaagatccgatggcagcaccacttcgaccagcttcatcctcagacagggttcagcggattcctacacaagcaggccgtctgactccgatgtctctttggaagaggaccgggaagcaattcgacaggagagagaacagcaagcagctatccagcttgagagagcaaagtccaaacctgtagcatttgccgtgaagacaaatgtgagctactgcggcgccctggacgaggatgtgcctgttccaagcacagctatctcctttgatgctaaagactttctacatattaaagagaaatataacaatgattggtggataggaaggctggtgaaagagggctgtgaaattggcttcattccaagtccactcagattggagaacatacggatccagcaagaacaaaaaagaggacgttttcacggagggaaatcaagtggaaattcttcttcaagtcttggagaaatggtatctgggacattccgagcaactcccacatcaacagcaaaacagaagcaaaaagtgacggagcacattcctccttacgatgttgtaccgtcaatgcgtccggtggtgttagtggggccgtcactgaaaggttacgaggtaacagacatgatgcagaaagccctctttgatttcctgaagcacaggtttgatgggaggatttcaataacgagagtgacagctgacatttctcttgctaagaggtctgtcctaaataatcccagcaagagagcaataattgaacgttcgaacacccggtccagcttagcggaagtacaaagtgaaattgaaagaatctttgagttggcaagatctttgcaactggttgttcttgatgcagacaccatcaatcacccagcacaacttataaagacttccttagcaccaattattgttcatgtaaaagtctcatctccaaaggttttacagcggttgattaaatctagaggaaagtcacaaagtaaacacttgaatgttcaactggtggcagctgataaacttgcacaatgccccccagaaatgtttgatgttatattggatgaaaatcagcttgaggatgcatgtgaacatctaggggagtacctggaggcgtactggcgtgccacccacacaaccagtagcacacccatgaccccgctgctgggaaggaatttgggctccacggcactctcaccatatcccacagcaatttctgggttacagagtcagcgaatgaggcacagcaaccactccacagagaactctccaattgaaagacgaagtctaatgacctctgatgaaaattatcacaatgaaagggctcggaagagtaggaaccgcttgtcttccagttctcagcatagccgagatcattaccctcttgtggaagaagattaccctgactcataccaggacacttacaaaccccataggaaccgaggatcacctgggggatatagccatgactcccgacataggctttgagtctaatgaaacaaaaaatattcatctgttgacaatttgccatagcagtgctaggataaaccaatcatcttaacttggctaacatagcacagtatttactgtgctaatgggctgctgtcattttatgctaagtaaggggcaaaaaaaaaaattacattatgcccttgagtctagatggatattagatgcccgatcatatagatatttttaagtgcaacatttacatgataacagtacattttgttttcttcatagatttagacacatcaatttgtaatttagggtacttacaaggcacatataaaataatttcccatgctggaaattccaaatgaccagttccagttggaaccaatttataaaccaattcctgttggaatttgggtgaattgactagaaagtctacttgagcatgttgtaatcaactgaaaaatctggggggaaaaaaaaaaaactaataagaaaatcgaaataccaatagaagccaaatccagctttggtatttatttgctggaagctaaatttacacttaaagttggagtgtataaacattttaatatatgttaatgttgccagaatgacttttcagacttaccaaatgtattgatagtgccaaaaaaaaaatctcagaaatcttaatgcagaaattatatagtctcctcagattttaatatttttatttctttcctggcacagctgttgtattcaaagtgttttgctttttgtttggtcagtactgttagctcatttgaagttggcaaaaacaaatacaaacaagcaaaaaacctcaaatttttttcagcagtgagagagaatagtaaagagaggcccaagcatagctggttatgtgaaatataaaatggggtgttgttctccctttaatcaatctgagcacaactacatacatccaggaatctgaagtcagatagtaaggatgtggtaccaatcctcccgagtgcaatgctaaacacttccaggtgggaattcatctatttcacttaacacaaacgcagggtctgtatttcctgccaacaagattgagtatctttccattgcttctctcagtctctgtctttgaatatctgaatgttctggcccttcaacaaattctttaaatcatgctaaggaatttcgttttatgtggacacactcaactttgatattcaggagatgtttttacaaaatgactaattgaaaaaagttgaaacaaatgattttaaaagcttgcagtaaaaaataaactcatagattcagcaaatatttgttgactaaaattatagcatttttaatgcagaaaattataaagaatttggagattgagctgccttatttctaatgaacactcctcttcatcttattaagtcttcacagtttttccagtggctataattatggaattggtgacctatgttttatattatcaaggaagccttagattcactctgatctaagaaattattgaaattgaccctttttacacaaatgtctttaaaaaaa

SEQ ID NO: 186 - protein, 520 aa, Homo sapiens
MSSSSYAKNGTADGPHSPTSQVARGTTTRRSRLKRSDGSTTSTSFILRQGSADSYTSRPSDSDVSLEEDREAIRQEREQQAAIQLERAKSKPVAFAVKTNVSYCGALDEDVPVPSTAISFDAKDFLHIKEKYNNDWWIGRLVKEGCEIGFIPSPLRLENIRIQQEQKRGRFHGGKSSGNSSSSLGEMVSGTFRATPTSTAKQKQKVTEHIPPYDVVPSMRPVVLVGPSLKGYEVTDMMQKALFDFLKHRFDGRISITRVTADISLAKRSVLNNPSKRAIIERSNTRSSLAEVQSEIERIFELARSLQLVVLDADTINHPAQLIKTSLAPIIVHVKVSSPKVLQRLIKSRGKSQSKHLNVQLVAADKLAQCPPEMFDVILDENQLEDACEHLGEYLEAYWRATHTTSSTPMTPLLGRNLGSTALSPYPTAISGLQSQRMRHSNHSTENSPIERRSLMTSDENYHNERARKSRNRLSSSSQHSRDHYPLVEEDYPDSYQDTYKPHRNRGSPGGYSHDSRHRL

SEQ ID NO: 187 - DNA, 3062 bp, Homo sapiens
agcctcccccagcggatgccggggactcggaccccgcaccctgagagtctttgttaatggatgtggtggcccgaggcaccacaacccggaggagcaggttgaaaagatccgatggcagcaccacttcgaccagcttcatcctcagacagggttcagcggattcctacacaagcaggccgtctgactccgatgtctctttggaagaggaccgggaagcaattcgacaggagagagaacagcaagcagctatccagcttgagagagcaaagtccaaacctgtagcatttgccgtgaagacaaatgtgagctactgcggcgccctggacgaggatgtgcctgttccaagcacagctatctcctttgatgctaaagactttctacatattaaagagaaatataacaatgattggtggataggaaggctggtgaaagagggctgtgaaattggcttcattccaagtccactcagattggagaacatacggatccagcaagaacaaaaaagaggacgttttcacggagggaaatcaagtggaaattcttcttcaagtcttggagaaatggtatctgggacattccgagcaactcccacatcaacagcaaaacagaagcaaaaagtgacggagcacattcctccttacgatgttgtaccgtcaatgcgtccggtggtgttagtggggccgtcactgaaaggttacgaggtaacagacatgatgcagaaagccctctttgatttcctgaagcacaggtttgatgggaggatttcaataacgagagtgacagctgacatttctcttgctaagaggtctgtcctaaataatcccagcaagagagcaataattgaacgttcgaacacccggtccagcttagcggaagtacaaagtgaaattgaaagaatctttgagttggcaagatctttgcaactggttgttcttgatgcagacaccatcaatcacccagcacaacttataaagacttccttagcaccaattattgttcatgtaaaagtctcatctccaaaggttttacagcggttgattaaatctagaggaaagtcacaaagtaaacacttgaatgttcaactggtggcagctgataaacttgcacaatgccccccagaaatgtttgatgttatattggatgaaaatcagcttgaggatgcatgtgaacatctaggggagtacctggaggcgtactggcgtgccacccacacaaccagtagcacacccatgaccccgctgctgggaaggaatttgggctccacggcactctcaccatatcccacagcaatttctgggttacagagtcagcgaatgaggcacagcaaccactccacagagaactctccaattgaaagacgaagtctaatgacctctgatgaaaattatcacaatgaaagggctcggaagagtaggaaccgcttgtcttccagttctcagcatagccgagatcattaccctcttgtggaagaagattaccctgactcataccaggacacttacaaaccccataggaaccgaggatcacctgggggatatagccatgactcccgacataggctttgagtctaatgaaacaaaaaatattcatctgttgacaatttgccatagcagtgctaggataaaccaatcatcttaacttggctaacatagcacagtatttactgtgctaatgggctgctgtcattttatgctaagtaaggggcaaaaaaaaaaattacattatgcccttgagtctagatggatattagatgcccgatcatatagatatttttaagtgcaacatttacatgataacagtacattttgttttcttcatagatttagacacatcaatttgtaatttagggtacttacaaggcacatataaaataatttcccatgctggaaattccaaatgaccagttccagttggaaccaatttataaaccaattcctgttggaatttgggtgaattgactagaaagtctacttgagcatgttgtaatcaactgaaaaatctggggggaaaaaaaaaaaactaataagaaaatcgaaataccaatagaagccaaatccagctttggtatttatttgctggaagctaaatttacacttaaagttggagtgtataaacattttaatatatgttaatgttgccagaatgacttttcagacttaccaaatgtattgatagtgccaaaaaaaaaatctcagaaatcttaatgcagaaattatatagtctcctcagattttaatatttttatttctttcctggcacagctgttgtattcaaagtgttttgctttttgtttggtcagtactgttagctcatttgaagttggcaaaaacaaatacaaacaagcaaaaaacctcaaatttttttcagcagtgagagagaatagtaaagagaggcccaagcatagctggttatgtgaaatataaaatggggtgttgttctccctttaatcaatctgagcacaactacatacatccaggaatctgaagtcagatagtaaggatgtggtaccaatcctcccgagtgcaatgctaaacacttccaggtgggaattcatctatttcacttaacacaaacgcagggtctgtatttcctgccaacaagattgagtatctttccattgcttctctcagtctctgtctttgaatatctgaatgttctggcccttcaacaaattctttaaatcatgctaaggaatttcgttttatgtggacacactcaactttgatattcaggagatgtttttacaaaatgactaattgaaaaaagttgaaacaaatgattttaaaagcttgcagtaaaaaataaactcatagattcagcaaatatttgttgactaaaattatagcatttttaatgcagaaaattataaagaatttggagattgagctgccttatttctaatgaacactcctcttcatcttattaagtcttcacagtttttccagtggctataattatggaattggtgacctatgttttatattatcaaggaagccttagattcactctgatctaagaaattattgaaattgaccctttttacacaaatgtctttaaaaaaa

SEQ ID NO: 188 - protein, 502 aa, Homo sapiens
MDVVARGTTTRRSRLKRSDGSTTSTSFILRQGSADSYTSRPSDSDVSLEEDREAIRQEREQQAAIQLERAKSKPVAFAVKTNVSYCGALDEDVPVPSTAISFDAKDFLHIKEKYNNDWWIGRLVKEGCEIGFIPSPLRLENIRIQQEQKRGRFHGGKSSGNSSSSLGEMVSGTFRATPTSTAKQKQKVTEHIPPYDVVPSMRPVVLVGPSLKGYEVTDMMQKALFDFLKHRFDGRISITRVTADISLAKRSVLNNPSKRAIIERSNTRSSLAEVQSEIERIFELARSLQLVVLDADTINHPAQLIKTSLAPIIVHVKVSSPKVLQRLIKSRGKSQSKHLNVQLVAADKLAQCPPEMFDVILDENQLEDACEHLGEYLEAYWRATHTTSSTPMTPLLGRNLGSTALSPYPTAISGLQSQRMRHSNHSTENSPIERRSLMTSDENYHNERARKSRNRLSSSSQHSRDHYPLVEEDYPDSYQDTYKPHRNRGSPGGYSHDSRHRL

SEQ ID NO: 189 - DNA, 3185 bp, Homo sapiens
gtgctctgtattgggaaggcagataaaatgccaggtctggactgcctctggggataacctcaccctgtgggatgtgaatgaatagcatcttgcctggtaaatccacaggaattgataaggcaggcgcagttctcccaaacaggccttttctctttaagctgtagctgtggtttctgcagcaattttgtttttgccttgaaagaggtgctctggattatcacacctccatgtatgacaatttgtacctgcatggaattgaagactcggaggctggttcagcggattcctacacaagcaggccgtctgactccgatgtctctttggaagaggaccgggaagcaattcgacaggagagagaacagcaagcagctatccagcttgagagagcaaagtccaaacctgtagcatttgccgtgaagacaaatgtgagctactgcggcgccctggacgaggatgtgcctgttccaagcacagctatctcctttgatgctaaagactttctacatattaaagagaaatataacaatgattggtggataggaaggctggtgaaagagggctgtgaaattggcttcattccaagtccactcagattggagaacatacggatccagcaagaacaaaaaagaggacgttttcacggagggaaatcaagtggaaattcttcttcaagtcttggagaaatggtatctgggacattccgagcaactcccacatcaacagcaaaacagaagcaaaaagtgacggagcacattcctccttacgatgttgtaccgtcaatgcgtccggtggtgttagtggggccgtcactgaaaggttacgaggtaacagacatgatgcagaaagccctctttgatttcctgaagcacaggtttgatgggaggatttcaataacgagagtgacagctgacatttctcttgctaagaggtctgtcctaaataatcccagcaagagagcaataattgaacgttcgaacacccggtccagcttagcggaagtacaaagtgaaattgaaagaatctttgagttggcaagatctttgcaactggttgttcttgatgcagacaccatcaatcacccagcacaacttataaagacttccttagcaccaattattgttcatgtaaaagtctcatctccaaaggttttacagcggttgattaaatctagaggaaagtcacaaagtaaacacttgaatgttcaactggtggcagctgataaacttgcacaatgccccccagaaatgtttgatgttatattggatgaaaatcagcttgaggatgcatgtgaacatctaggggagtacctggaggcgtactggcgtgccacccacacaaccagtagcacacccatgaccccgctgctgggaaggaatttgggctccacggcactctcaccatatcccacagcaatttctgggttacagagtcagcgaatgaggcacagcaaccactccacagagaactctccaattgaaagacgaagtctaatgacctctgatgaaaattatcacaatgaaagggctcggaagagtaggaaccgcttgtcttccagttctcagcatagccgagatcattaccctcttgtggaagaagattaccctgactcataccaggacacttacaaaccccataggaaccgaggatcacctgggggatatagccatgactcccgacataggctttgagtctaatgaaacaaaaaatattcatctgttgacaatttgccatagcagtgctaggataaaccaatcatcttaacttggctaacatagcacagtatttactgtgctaatgggctgctgtcattttatgctaagtaaggggcaaaaaaaaaaattacattatgcccttgagtctagatggatattagatgcccgatcatatagatatttttaagtgcaacatttacatgataacagtacattttgttttcttcatagatttagacacatcaatttgtaatttagggtacttacaaggcacatataaaataatttcccatgctggaaattccaaatgaccagttccagttggaaccaatttataaaccaattcctgttggaatttgggtgaattgactagaaagtctacttgagcatgttgtaatcaactgaaaaatctggggggaaaaaaaaaaaactaataagaaaatcgaaataccaatagaagccaaatccagctttggtatttatttgctggaagctaaatttacacttaaagttggagtgtataaacattttaatatatgttaatgttgccagaatgacttttcagacttaccaaatgtattgatagtgccaaaaaaaaaatctcagaaatcttaatgcagaaattatatagtctcctcagattttaatatttttatttctttcctggcacagctgttgtattcaaagtgttttgctttttgtttggtcagtactgttagctcatttgaagttggcaaaaacaaatacaaacaagcaaaaaacctcaaatttttttcagcagtgagagagaatagtaaagagaggcccaagcatagctggttatgtgaaatataaaatggggtgttgttctccctttaatcaatctgagcacaactacatacatccaggaatctgaagtcagatagtaaggatgtggtaccaatcctcccgagtgcaatgctaaacacttccaggtgggaattcatctatttcacttaacacaaacgcagggtctgtatttcctgccaacaagattgagtatctttccattgcttctctcagtctctgtctttgaatatctgaatgttctggcccttcaacaaattctttaaatcatgctaaggaatttcgttttatgtggacacactcaactttgatattcaggagatgtttttacaaaatgactaattgaaaaaagttgaaacaaatgattttaaaagcttgcagtaaaaaataaactcatagattcagcaaatatttgttgactaaaattatagcatttttaatgcagaaaattataaagaatttggagattgagctgccttatttctaatgaacactcctcttcatcttattaagtcttcacagtttttccagtggctataattatggaattggtgacctatgttttatattatcaaggaagccttagattcactctgatctaagaaattattgaaattgaccctttttacacaaatgtctttaaaaaaa

SEQ ID NO: 190 - protein, 486 aa, Homo sapiens
MYDNLYLHGIEDSEAGSADSYTSRPSDSDVSLEEDREAIRQEREQQAAIQLERAKSKPVAFAVKTNVSYCGALDEDVPVPSTAISFDAKDFLHIKEKYNNDWWIGRLVKEGCEIGFIPSPLRLENIRIQQEQKRGRFHGGKSSGNSSSSLGEMVSGTFRATPTSTAKQKQKVTEHIPPYDVVPSMRPVVLVGPSLKGYEVTDMMQKALFDFLKHRFDGRISITRVTADISLAKRSVLNNPSKRAIIERSNTRSSLAEVQSEIERIFELARSLQLVVLDADTINHPAQLIKTSLAPIIVHVKVSSPKVLQRLIKSRGKSQSKHLNVQLVAADKLAQCPPEMFDVILDENQLEDACEHLGEYLEAYWRATHTTSSTPMTPLLGRNLGSTALSPYPTAISGLQSQRMRHSNHSTENSPIERRSLMTSDENYHNERARKSRNRLSSSSQHSRDHYPLVEEDYPDSYQDTYKPHRNRGSPGGYSHDSRHRL

SEQ ID NO: 191 - DNA, 8192 bp, Homo sapiens
tttaagagtcaccctgggagccagctggaggattctgtgaaagattcagacaagaaaggcaaggaaacatcttttgacaagatgtcacctgaaagtggtcacagccgcatctttgaagcgactgctggccctaataagcctgagagtggatttgcagaagacagtgctgctcggggcgagggtgtgtcagacctccacgaagtggtctccctgaaggagcggatggcgaggtaccaggcagctgtttccaggggtgactgccgcagcttctctgctaatatgatggaagaatcagaaatgtgcgcagtgcctggtggtttggccaaggtgaagaaacaatttgaggacgaaattacttcttcccgtaatacctttgctcaataccaatatcaacatcagaacagatctgagcaggaggcaattcatagcagccaggttggcacttcaagaagcagccaggaaatggcaagaaatgaacaagaagggtccaaagtacagaaaattgatgttcatggaacagaaatggtctctcatcttgaaaagcacaccgaggaagtaaaccaagcatctcagtttcatcaatatgttcaagaaactgtcattgatacacctgaggatgaagagattccaaaggtttcgactaagttgttaaaagagcagtttgaaaagtctgcccaggaaaagatcctttattctgacaaagagatgacaaccccagccaagcagattaagactgaaagtgaatatgaagagactttcaagccatcatcagttgtgagtacctcttccacttcttgcgtttcaaccagccagaggaaggaaacatcaactacaagatatagtgatcacagtgtcacttcctcaactctggcacaaattaatgctacttcttcaggaatgacagaagaatttcctcctcccccacctgacgtacttcaaacttcagtagatgtgacagcattttcccagtcccctgaactgcccagtcctcctagaagactaccagtccccaaagatgtatattccaagcaaagaaatttgtatgaattaaaccgtttatataaacacatccatcctgagttaagaaaaaacttagaaaaagattatatcagtgaagtttctgagattgtttctagtcaaatgaactcagggagttcagtctcagcagatgtgcaacaagcccggtatgtttttgaaaacacaaatgacagttctcaaaaagatctgaactcagaaagagaatacttggaatgggatgaaattctgaagggagaggtgcagtccattagatggatctttgagaatcaaccattggattccatcaacaatggctctcctgatgaaggtgatatttccaggggcattgctgatcaagaaatcattgctggtggtgatgtgaaatataccacatggatgtttgaaacccaacccatcgacacacttggggcttattcttctgacactgtagaaaatgcagagaaaattcctgagctagccagaggagatgtctgcacagctcggtggatgtttgaaacaaggccattggactcaatgaataaaatgcatcaaagtcaagaagaatcagcggtaactatcagtaaggacataactgggggggatgtcaagactgtgagatacatgtttgaaactcaacatctagatcaacttggacagcttcattcagtggatgaggttcatttactgcagcttaggtctgagctcaaagaaattaagggaaatgttaaaagaagtataaaatgtttcgaaactcaaccattatatgttattagagatggttcgggccaaatgctggaaattaaaactgttcacagagaagacgttgaaaagggagatgtaagaacagcacggtggatgtttgaaacacagccgttggacacaattaacaaagatatcacagaaattaaagttgtccgaggaatatccatggaagaaaatgtcaaaggtggggtgagtaaggcaaagtggttatttgaaacccaacctttggagaaaatcaaagagtcagaagaggtcatcattgaaaaggaaaaaataataggtacagatgtctccagaaagtgttggatgtttgaaacccagccattagacattctaaaagaagttcctgatgcagattctctacaacgtgaggagataataggtggtgatgtacaaactactaagcatctatttgaaacacttccaattgaagcattaaaagacagtcctgatataggaaagcttcaaaaaatcactgcctctgaagaagaaaaaggggatgttaggcatcaaaaatggatttttgaaacccaacctctggaagacattagaaaagataaaaaggagtacacacgaacagtgaaacttgaagaagttgacagaggagatgtgaagaattacacacatatctttgaatcaaacaatttaattaaatttgatgcatcacataaaatagaggtggaaggagttacaagaggtgctgtagagttaaataaatctctcttcgagacaacaccactgtatgccattcaagatccccttggaaaatatcatcaagtaaagacagtccagcaagaagaaatcgtaagaggtgatgtaagaagctgtaggtggctttttgaaacaaggcccattgaccagtttgatgaaagcattcataaatttcaaataattagaggaatatctgctcaagaaatacagactggaaatgtgaaatctgccaaatggttgtttgaaacccaacctcttgattcaattaaatattttagtgatgtggaagaaacagaaagtaaaactgaacaaactagagatattgttaaaggggatgtcaaaacctgtaaatggctttttgagacccagccaatggagtctctttatgaaaaagtttcgttaatgaccagcagtgaagaaattcataagggagatgtcaaaacttgtacttggctctttgaaactcagccacttgataccataaaagatgactctgaaacagcagtcaaattgcaaactgtaaaacaggaggagatccaaggtggggatgttcgtacagcatgttttctttttgagacagaaaatttggacagcatacaaggagaagaagtgaaggaaatcaagcctgttgaaatggatatacaagctggagatgtttccagcatgaggtataaatttgaaaatcagtccttagattctataagttctagttcagaggaagttttgaaaaagatcaaaaccttaaaaactgaagatattcagaaaggcaatgttttaaattgtaggtggctttttgaaaaccaaccaattgataagataaaagaaagccaagaaggtgatgaatgtgttaagacggtgacagacatacaaggtggggatgtaagaaaggggtgctttatttttgagactttttctttagatgagattaaagaagaatctgactatatcagcaccaagaaaacaattactgaagaagtaatacagggtgatgtaaaaagctacagaatgctctttgaaacccagccactctatgcaattcaagaccgagaagggtcctatcatgaagtgaccacagttaaaaaagaagaggtaattcatggagatgtgcgaggaacaaggtggctttttgaaacaaagccattagactctattaataaatcagaaactgtgtatgttattaaatctgtcacacaagaagacattcagaagggagatgttagttctgtcagatacagatttgaaactcagccactggatcagatttctgaagaatcacataatattatgcccagtattgaccatatacaaggtggcaatgtaaagacaagtagacaattctttgagtctgaaaattttgataagaataactatatacgaacagtaagtgtcaatgaaatacaaaagggcaatgttaaaacatctacttggctatttgaaacccacactatggatgaactgagaggagaagggttagaatatgaaaatatcaagacagtcactcaggaagatgtgcagaaaggtgatgttaagcaggctgtgtggctttttgaaaatcgaactttcgattctattatggaagcacataaaggtatcacaaaaatgaccaaggaagaaatccctccttctgatgtcaaaacaaccacatggctctttgaaacaacaccacttcatgaatttaatgaaactagagtagaaaagatagaaattattggcaagagcattaaagaaaccttagaagatctctactctcaaaaagttatccaggctcctggaatcatcattgaagctgatgaaataggggatgttcgaatggcaaaatacaagctaatgaaccaagcatctcctgagatacagaaagaagaaattatcagggctgatctcagaaatataatggtgaacctactttccaaaagggactgtactgaaagagagattttgattagtgaagaagagaagggaaatgttaatttgactaaaactcaattattaaacagatcaactgaatttcatgctgaaaaagaagagatagtgaaaggtgatgtacaacaagcaataaaaaacctgttctctgaggaaagatctgtaaagaaaggcatcttaattcaggaagatgaaaaaggagatattaacatgactatctattgtcttcttcatgaaaatgatggtgacacaattgagcgtgaagaagtaataggtggtgatgtcaaacgtaccattcataatttattgtcttccacatcaaacaataaaatatctgaaagggctaaaattgatgcctctgagagaggaaatgttcagtttttcacaacctgcatagaagctggagctttggattatctgaaacaactccacacagagtcaaatgaaacactgacagctaagaaacaagaaggagagaaagaaatcattggtggtgatgttgaaggtacaaaactgttactgaagaaaaggcagtctctggttgaacgtactgttagtgaaactgacatcatccctggagatgtgcataacacagttaaggtttttatgaccgagcctcagagtacatttggtaagatacccaaagaagagattataaaaggtgatttgacatcaaccctaaattccctcagccaggctgtaaatcagaaaacagtgacgaaaacagaagaaattataaaaggtaacatgctagccacactcaagtcacttaaagaatcaagccatcgatggaaagaatctaaacagcctgatgccatccctggtgatattgaaaaagctattgaatgccttgaaaaagctacaaatacaaagacagaaattctgaaaaaggagcttctcaaagatgacctggaaacatcactaaggtctttgaaagaagcacaaagaagtttcaaagaggtacataaagaaggtgtaataaaaaaagatgctaaagctgtgatggcaggatcctcgggagagcagaaaacagatattcatcaggttgctgtccagaggaacaaaaatagtcttcttcagccaaagccaggtccatttgagccagcggccaagtggcaagggggagcagatactctcagtcaaactatggggaaatcttgccatggcaatttagtagaagaaagaactgaggttaatcttccaaaagcccccaaaggcactgtaaagattgtcatagatcgtgaacaaaacaatgatgctctggagaaaagccttagaagactatctaattcacaccataaatctaatgttttggaatcaggagacaaaacgggtgtctggactgatactacaggagaacagcatcttagagatgaatatatgagcagacaattaacttcaactgtgtcagttaagaataatctaacaactaaagaatcagacagggcagtgagagagctgaagaaggatgatgtctttaattccatccaatctgctggtaaaaccgttggaaagcaacagacatatgaactgagaaatgaccaccagaaaatggagggttttcatataaagagtcctaaaaagaccaaaaatattaaaatattaactgatacacaaagctccaagcccagtcccacccagcatccagtcagcatgccagttggaggaacttacgacctttcaggggactttcagaagcaaactttgttaaagcaagaaacaaaatattctaataaggatataaagaaaaagaatataaaccttcaaccaatgtggcagcttttgcctgtagagcaagacacatccaatgtaacagaaatgaaagtctctgaaaaaagtcacaatacatttaaggcaaccaacaaaaagcgggagactgatgttcacttgaaaagccaggactttctaatgaaaacaaatacttccacaggcttaaaaatggcaatggaaaggtccttgaatccaatcaactttaaccctgagaataatgtaaaagaaagtgagtgcccccttccacctccatctccacctcctccaccaccttctaatgcatcatctgaaattgaatttcctcttcctcctccacctcctttgatgatgtttcctgaaaaaaatgggtttcttccctcactgtccacagagaagataaaggctgaatttgaaagttttccaggcctccctcttcctccacctccagtagatgagaaatctgaaagagaaagttcatcgatgtttctgccgcctcctcctcctccaactccatctcaaaagccagcacatctcctttcctcctctgctccggaaaagcacagtggagacttcatgcaacaatattcccaaaaagaagcctcgaactctcagaattctcaggctaaaatcataacaggaaaaaccggtgtgttgccacctcccacattgcccaaacccaaacttcccaagcatataaaagataataagaacgatttttcccccaaagttgaactggcaacctccctgtcagatatggaatgtaaaattactacctcaaaggatcagaaaaaagtaatggtgatgaccagcagtgaacacacggagacaaagcagaacgttattagtaagagtcttgatgaaagaaaacaattatctattgactctgcaaactgtctctcacacacagttccaggaacttcagcacccaggaaaaaacagattgcgcctcttataaaatctcattcatttccagagagttcaggacaacaaaatccaaaaccttatatgagaaaatttaagacacctttaatgattgctgaagaaaaatatagacaacaaaaagaagaaattgaaaaacagaaacaggagagttcttactacaacattgttaaaactcaaagccaaaatcaacacataacagaggtggaaaaggaaatgccattacaaaaaaccaatgaggaggtttccctatctggaattgattcagaatgcactgtggttcaacccagcccaggctctcaaagtaatgctcggatactaggagtgtgttctgataaccaactctccacaacatcgccagaaacagtcgctgccaagaggctccaccatgttttagcagcttcagaagacaaagataagatgaaaaaggaagttttacaaagctcaagggacattatgcaatccaaatcagcttgcgaaattaaacaaagtcaccaagaatgtagtacccaacaaacacaacagaagaagtatttggagcagttgcacttgccccaaagcaaaccaatttccccaaatttcaaagttaaaaccatcaaacttccaactctagatcatacattaaatgaaacagaccacagctatgaaagtcataaacagcaatctgagattgatgttcaaacctttaccaaaaaacaatatctgaaaaccaagaaaactgaagcaagcactgaatgtagtcataagcaatctctggctgaaagacattatcagttacctaagaaggagaaaagagtgacagtacaattgcctacagaatccatacagaagaaccaggaagataagctcaagatggttcccaggaagcaaagagaatttagcggatctgacagagggaaacttccaggaagtgaagaaaaaaatcagggaccatcaatgattggtcgaaaagaagagagattaataactgaaagaaaacacgaacatctgaagaataaatcagcaccaaaggtcgtcaagcaaaaggttatcgatgcacatcttgattcacagactcagaattttcagcaaacacaaatacagaccgctgaaag

SEQ ID NO: 192 - protein, 3345 aa, Homo sapiens
MSPESGHSRIFEATAGPNKPESGFAEDSAARGEGVSDLHEVVSLKERMARYQAAVSRGDCRSFSANMMEESEMCAVPGGLAKVKKQFEDEITSSRNTFAQYQYQHQNRSEQEAIHSSQVGTSRSSQEMARNEQEGSKVQKIDVHGTEMVSHLEKHTEEVNQASQFHQYVQETVIDTPEDEEIPKVSTKLLKEQFEKSAQEKILYSDKEMTTPAKQIKTESEYEETFKPSSVVSTSSTSCVSTSQRKETSTTRYSDHSVTSSTLAQINATSSGMTEEFPPPPPDVLQTSVDVTAFSQSPELPSPPRRLPVPKDVYSKQRNLYELNRLYKHIHPELRKNLEKDYISEVSEIVSSQMNSGSSVSADVQQARYVFENTNDSSQKDLNSEREYLEWDEILKGEVQSIRWIFENQPLDSINNGSPDEGDISRGIADQEIIAGGDVKYTTWMFETQPIDTLGAYSSDTVENAEKIPELARGDVCTARWMFETRPLDSMNKMHQSQEESAVTISKDITGGDVKTVRYMFETQHLDQLGQLHSVDEVHLLQLRSELKEIKGNVKRSIKCFETQPLYVIRDGSGQMLEIKTVHREDVEKGDVRTARWMFETQPLDTINKDITEIKVVRGISMEENVKGGVSKAKWLFETQPLEKIKESEEVIIEKEKIIGTDVSRKCWMFETQPLDILKEVPDADSLQREEIIGGDVQTTKHLFETLPIEALKDSPDIGKLQKITASEEEKGDVRHQKWIFETQPLEDIRKDKKEYTRTVKLEEVDRGDVKNYTHIFESNNLIKFDASHKIEVEGVTRGAVELNKSLFETTPLYAIQDPLGKYHQVKTVQQEEIVRGDVRSCRWLFETRPIDQFDESIHKFQIIRGISAQEIQTGNVKSAKWLFETQPLDSIKYFSDVEETESKTEQTRDIVKGDVKTCKWLFETQPMESLYEKVSLMTSSEEIHKGDVKTCTWLFETQPLDTIKDDSETAVKLQTVKQEEIQGGDVRTACFLFETENLDSIQGEEVKEIKPVEMDIQAGDVSSMRYKFENQSLDSISSSSEEVLKKIKTLKTEDIQKGNVLNCRWLFENQPIDKIKESQEGDECVKTVTDIQGGDVRKGCFIFETFSLDEIKEESDYISTKKTITEEVIQGDVKSYRMLFETQPLYAIQDREGSYHEVTTVKKEEVIHGDVRGTRWLFETKPLDSINKSETVYVIKSVTQEDIQKGDVSSVRYRFETQPLDQISEESHNIMPSIDHIQGGNVKTSRQFFESENFDKNNYIRTVSVNEIQKGNVKTSTWLFETHTMDELRGEGLEYENIKTVTQEDVQKGDVKQAVWLFENRTFDSIMEAHKGITKMTKEEIPPSDVKTTTWLFETTPLHEFNETRVEKIEIIGKSIKETLEDLYSQKVIQAPGIIIEADEIGDVRMAKYKLMNQASPEIQKEEIIRADLRNIMVNLLSKRDCTEREILISEEEKGNVNLTKTQLLNRSTEFHAEKEEIVKGDVQQAIKNLFSEERSVKKGILIQEDEKGDINMTIYCLLHENDGDTIEREEVIGGDVKRTIHNLLSSTSNNKISERAKIDASERGNVQFFTTCIEAGALDYLKQLHTESNETLTAKKQEGEKEIIGGDVEGTKLLLKKRQSLVERTVSETDIIPGDVHNTVKVFMTEPQSTFGKIPKEEIIKGDLTSTLNSLSQAVNQKTVTKTEEIIKGNMLATLKSLKESSHRWKESKQPDAIPGDIEKAIECLEKATNTKTEILKKELLKDDLETSLRSLKEAQRSFKEVHKEGVIKKDAKAVMAGSSGEQKTDIHQVAVQRNKNSLLQPKPGPFEPAAKWQGGADTLSQTMGKSCHGNLVEERTEVNLPKAPKGTVKIVIDREQNNDALEKSLRRLSNSHHKSNVLESGDKTGVWTDTTGEQHLRDEYMSRQLTSTVSVKNNLTTKESDRAVRELKKDDVFNSIQSAGKTVGKQQTYELRNDHQKMEGFHIKSPKKTKNIKILTDTQSSKPSPTQHPVSMPVGGTYDLSGDFQKQTLLKQETKYSNKDIKKKNINLQPMWQLLPVEQDTSNVTEMKVSEKSHNTFKATNKKRETDVHLKSQDFLMKTNTSTGLKMAMERSLNPINFNPENNVKESECPLPPPSPPPPPPSNASSEIEFPLPPPPPLMMFPEKNGFLPSLSTEKIKAEFESFPGLPLPPPPVDEKSERESSSMFLPPPPPPTPSQKPAHLLSSSAPEKHSGDFMQQYSQKEASNSQNSQAKIITGKTGVLPPPTLPKPKLPKHIKDNKNDFSPKVELATSLSDMECKITTSKDQKKVMVMTSSEHTETKQNVISKSLDERKQLSIDSANCLSHTVPGTSAPRKKQIAPLIKSHSFPESSGQQNPKPYMRKFKTPLMIAEEKYRQQKEEIEKQKQESSYYNIVKTQSQNQHITEVEKEMPLQKTNEEVSLSGIDSECTVVQPSPGSQSNARILGVCSDNQLSTTSPETVAAKRLHHVLAASEDKDKMKKEVLQSSRDIMQSKSACEIKQSHQECSTQQTQQKKYLEQLHLPQSKPISPNFKVKTIKLPTLDHTLNETDHSYESHKQQSEIDVQTFTKKQYLKTKKTEASTECSHKQSLAERHYQLPKKEKRVTVQLPTESIQKNQEDKLKMVPRKQREFSGSDRGKLPGSEEKNQGPSMIGRKEERLITERKHEHLKNKSAPKVVKQKVIDAHLDSQTQNFQQTQIQTAESKAEHKKLPQPYNSLQEEKCLEVKGIQEKQVFSNTKDSKQEITQNKSFFSSVKESQRDDGKGALNIVEFLRKREELQQILSRVKQFEAEPNKSGLKTFQTLLNTIPGWLISEDKREYAVHIAMENNLEKVKEEITHIKTQAEDMLVSYENIIQTAMMSSKTGKPGNKPTSLDETSSKVSNVHVSNNKNSEQKENKIAKEKTVQHQVAAHHEATVRSHVKTHQEIKLDDSNIPPPSLKTRPPSPTFITIESTARRTENPTKNELSQSPKKDSYVEPPPRRPMSQKSEIHRANTSPSPPRSRSEQLVRLKDTTAKLSKGAIPCPAATPVPIVEKRSEIIMSPATLRRQIKIETRGRDSPPTITIPVNINHAASGSFRESVDAQEEIRKVEKRATYVHKDGLNSTDHMVPDTESYDAVEIIRKVAVPPRLSEHTQRYEAANRTVQMAENFVNDPENEINRWFREFEHGPVSEAKSNRRVYAKGETNHNIQQESRTFCKEEFGLTSLGNTSFTDFSCKHPRELREKIPVKQPRICSETRSLSEHFSGMDAFESQIVESKMKTSSSHSSEAGKSGCDFKHAPPTYEDVIAGHILDISDSPKEVRKNFQKTWQESGRVFKGLGYATADASATEMRTTFQEESAFISGK

SEQ ID NO: 193 - DNA, 2482 bp, Homo sapiens
gagctcgtgggagacgctatcgcaagatggcgtctgcgaggccgcgggatgcggagtgagcgcgccccgccgggggctgtgcgaggctgctgctgctctccccgtcgccgccgccgccgccgccagtgcggcgccgcctctccgccagccactgcgccgcggccaagcctcctgcctcgcagcggtcccccgcgtcccggcctgcagcctccccgggcgccggcgcccccagcacgccccatcgggcaccccactctctccgaggtgtgggtgcggcgggctgatgaggtgatccctagcccgcctgggaggagcgcctggactcgcgggcggcggcgagcgcctttacaatggccctgaccctgtttgatacagatgaatatagacctcctgtttggaaatcttacttatatcagctacaacaggaagcccctcatcctcgaagaattacctgtacttgcgaggtggaaaacagaccaaagtattatggaagagagtttcatggcatgatctccagagaagcagccgaccagctcttgattgtggctgaggggagctacctcatccgggagagccagcggcagccagggacctacactttggctttaagatttggaagtcaaaccagaaacttcaggctctactacgatggcaagcactttgttggggagaaacgctttgagtccatccacgatctggtgactgatggcttgattactctctatattgaaaccaaggcagcagaatacattgccaagatgacgataaacccaatttatgagcacgtaggatacacaaccttaaacagagagccagcatacaaaaaacatatgccagtcctgaaagagacacatgatgagagagattctacaggccaggatggggtgtcagagaaaaggttgacatcacttgttagaagagcaactctgaaagaaaacgagcaaattccaaaatatgaaaagattcacaatttcaaggtgcatacattcagagggccacactggtgtgaatactgtgccaactttatgtggggtctcattgctcagggagtgaaatgtgcagattgtggtttgaatgttcataagcagtgttccaagatggtcccaaatgactgtaagccagacttgaagcatgtcaaaaaggtgtacagctgtgaccttacgacgctcgtgaaagcacataccactaagcggccaatggtggtagacatgtgcatcagggagattgagtctagaggtcttaattctgaaggactataccgagtatcaggatttagtgacctaattgaagatgtcaagatggctttcgacagagatggtgagaaggcagatatttctgtgaacatgtatgaagatatcaacattatcactggtgcacttaaactgtacttcagggatttgccaattccactcattacatatgatgcctaccctaagtttatagaatctgccaaaattatggatccggatgagcaattggaaacccttcatgaagcactgaaactactgccacctgctcactgcgaaaccctccggtacctcatggcacatctaaagagagtgaccctccacgaaaaggagaatcttatgaatgcagagaaccttggaatcgtctttggacccacccttatgagatctccagaactagacgccatggctgcattgaatgatatacggtatcagagactggtggtggagctgcttatcaaaaacgaagacattttattttaaatttttaatttgaggggaaaagaaatgttttacagatgaaggaatgttttatagtaatttaatttgctcctgtagctgcattatttcttgattagaggtttgggcatataaccagattaaagtgaaggaactttctgttgtttttgtagcaccgctcagctgtcttgtaaaacagtgaacacacgctttctggttctagtaatcctgggtgtttatcacgttcagagaaactcaagctattgcatgattagccccctatctggcaaggaaaccccatacagaagaaacaacaaacctgcgcctgcaccgcctctgcgtcctgggtagtctgtgcttgtaatccagcatgtttcacagagtaagcctgttgtgactttgcttttggggtctatgtcattggtttctgatgcttgtacaaacacgcacacacaaatggataaaacagcacctctggctgttacattaccataaaccatatcacatgcctacattttacaaatgatttctggtttctcttagttcttctctaacatagtactttctttccagcaaaagcaaaatgtgttttcagatttgttactttaataaaggttatccataccaataaaaagtgtacaacacagcattttctgttaaattattattggttttcagttgtaatttggtattttttctggcatgcgtttattaatttattaaattggcttttagaaataaaaaatattgatagcttacttttttctcataagaat

SEQ ID NO: 194 - protein, 459 aa, Homo sapiens
MALTLFDTDEYRPPVWKSYLYQLQQEAPHPRRITCTCEVENRPKYYGREFHGMISREAADQLLIVAEGSYLIRESQRQPGTYTLALRFGSQTRNFRLYYDGKHFVGEKRFESIHDLVTDGLITLYIETKAAEYIAKMTINPIYEHVGYTTLNREPAYKKHMPVLKETHDERDSTGQDGVSEKRLTSLVRRATLKENEQIPKYEKIHNFKVHTFRGPHWCEYCANFMWGLIAQGVKCADCGLNVHKQCSKMVPNDCKPDLKHVKKVYSCDLTTLVKAHTTKRPMVVDMCIREIESRGLNSEGLYRVSGFSDLIEDVKMAFDRDGEKADISVNMYEDINIITGALKLYFRDLPIPLITYDAYPKFIESAKIMDPDEQLETLHEALKLLPPAHCETLRYLMAHLKRVTLHEKENLMNAENLGIVFGPTLMRSPELDAMAALNDIRYQRLVVELLIKNEDILF

SEQ ID NO: 195 - DNA, 2607 bp, Homo sapiens
gagctcgtgggagacgctatcgcaagatggcgtctgcgaggccgcgggatgcggagtgagcgcgccccgccgggggctgtgcgaggctgctgctgctctccccgtcgccgccgccgccgccgccagtgcggcgccgcctctccgccagccactgcgccgcggccaagcctcctgcctcgcaggtacctcctcccgcgcgcacgctccgcgcctgatggcagcgacaagtgccggctcgcggagagctagcggggctccctgggcccggtgcgcccgacaataacgcgtgaataactttttcttgcagcggtcccccgcgtcccggcctgcagcctccccgggcgccggcgcccccagcacgccccatcgggcaccccactctctccgaggtgtgggtgcggcgggctgatgaggtgatccctagcccgcctgggaggagcgcctggactcgcgggcggcggcgagcgcctttacaatggccctgaccctgtttgatacagatgaatatagacctcctgtttggaaatcttacttatatcagctacaacaggaagcccctcatcctcgaagaattacctgtacttgcgaggtggaaaacagaccaaagtattatggaagagagtttcatggcatgatctccagagaagcagccgaccagctcttgattgtggctgaggggagctacctcatccgggagagccagcggcagccagggacctacactttggctttaagatttggaagtcaaaccagaaacttcaggctctactacgatggcaagcactttgttggggagaaacgctttgagtccatccacgatctggtgactgatggcttgattactctctatattgaaaccaaggcagcagaatacattgccaagatgacgataaacccaatttatgagcacgtaggatacacaaccttaaacagagagccagcatacaaaaaacatatgccagtcctgaaagagacacatgatgagagagattctacaggccaggatggggtgtcagagaaaaggttgacatcacttgttagaagagcaactctgaaagaaaacgagcaaattccaaaatatgaaaagattcacaatttcaaggtgcatacattcagagggccacactggtgtgaatactgtgccaactttatgtggggtctcattgctcagggagtgaaatgtgcagattgtggtttgaatgttcataagcagtgttccaagatggtcccaaatgactgtaagccagacttgaagcatgtcaaaaaggtgtacagctgtgaccttacgacgctcgtgaaagcacataccactaagcggccaatggtggtagacatgtgcatcagggagattgagtctagaggtcttaattctgaaggactataccgagtatcaggatttagtgacctaattgaagatgtcaagatggctttcgacagagatggtgagaaggcagatatttctgtgaacatgtatgaagatatcaacattatcactggtgcacttaaactgtacttcagggatttgccaattccactcattacatatgatgcctaccctaagtttatagaatctgccaaaattatggatccggatgagcaattggaaacccttcatgaagcactgaaactactgccacctgctcactgcgaaaccctccggtacctcatggcacatctaaagagagtgaccctccacgaaaaggagaatcttatgaatgcagagaaccttggaatcgtctttggacccacccttatgagatctccagaactagacgccatggctgcattgaatgatatacggtatcagagactggtggtggagctgcttatcaaaaacgaagacattttattttaaatttttaatttgaggggaaaagaaatgttttacagatgaaggaatgttttatagtaatttaatttgctcctgtagctgcattatttcttgattagaggtttgggcatataaccagattaaagtgaaggaactttctgttgtttttgtagcaccgctcagctgtcttgtaaaacagtgaacacacgctttctggttctagtaatcctgggtgtttatcacgttcagagaaactcaagctattgcatgattagccccctatctggcaaggaaaccccatacagaagaaacaacaaacctgcgcctgcaccgcctctgcgtcctgggtagtctgtgcttgtaatccagcatgtttcacagagtaagcctgttgtgactttgcttttggggtctatgtcattggtttctgatgcttgtacaaacacgcacacacaaatggataaaacagcacctctggctgttacattaccataaaccatatcacatgcctacattttacaaatgatttctggtttctcttagttcttctctaacatagtactttctttccagcaaaagcaaaatgtgttttcagatttgttactttaataaaggttatccataccaataaaaagtgtacaacacagcattttctgttaaattattattggttttcagttgtaatttggtattttttctggcatgcgtttattaatttattaaattggcttttagaaataaaaaatattgatagcttacttttttctcataagaat

SEQ ID NO: 196 - protein, 459 aa, Homo sapiens; identical to SEQ ID NO: 194

SEQ ID NO: 197 - DNA, 2726 bp, Homo sapiens
aaggaccaggagcggctgatgaggcatagatatttggatatgataagtagaaaactagaacaacttgaacgcacagcagaagaacaacgcctattcctaatggatagagaagaaagacgacagcgggaacacacaagaagaaaacttactcttcgtagaaaaatagaagaggaatggaagacaaaagagatgttacttctgacaaggatggcagaagatgttaaaagagaagagaggatagaagaacaacagcatagaaacagagaagagagtgacaggaagaaacaagatcttctagagaaaaaaatggcttatcatttacaaaaaatgcaagatactggctttaacggagaagatataggaaaaaatacatttaaatacagaggtcaagatggaacacatggtgaatgacatacagcaaatgctgctcatcagcgtcaaaatagttcaaataattttacgaagaaaaactcagcttctgttgtttatcaggcagatgtacaggataatggtataaatcaaaagagagatgggatggtatctaaaaactcaagtattttcgatgatagaggaggtataaatatttcaggccaaggttcaattacttcagcgcaggtatcacccacgagaaatttttccagagtttcacaggcatttttggatccttcaaaagaagagaaggagacaaatgctgattgggatggaagaccaaccaagagatcaagctatctctgcgaatcaggtaaatatcagcagtaattattgagtaaatcttgcattctatttattctttcaactaacatttactgagtttttgcttcatgttagatatggtgctaagttttaatcattcaaggaaaaatggcacaatttttgctcagggttcttacagtatacttggaaagatagtcatggcccaatatgataagagcaataaaggaagtgggtatgtgtaaaagctgggaaagttatgggaaagagaatgcatagacctatctagggtcatcatagaagcctttataatttagaaagagactgcgttgagacatgaaggatcagaaggaatttcctattttctttttgttatttttattgtttgtactaatgttgacaaccaaaatttgaaaaaaaattaaagtttttgtactcatatccttatacttactgttttctgcttttacagcagcttctctcccacaccacaactttattaaggtatagtggataatttaaaactgtatatattgacggtacagatggtccccaacttgtaatgattcaatttagggtttttcaactttactgtcggtttattggggtattaaatgcattctcagcttacaatatttttgacttacaattggctaatcaagatgtaacaccatcataagacaaggagaatcatatacaacttgatatgtgtatatacagtaaagtgttcaccacaagcaagccaattaacatatcctcacttcatgtagttactatttgtgtgtggtggcagaagaacacttaagagctactctctttctacatatggctagccagttttcccagcaccatttattaaatagggaatcctttccccattgcttgtttttctcaggtttgtcaaagatcagatagttgtagatatgcggcgttatttctgagggctctgttctgttccattgatctatatctttgttttggtaccagtaccatgctgttttggttactgtagccttgtagtatagtttgaagtcaggtagtgtgatgcctccagctttgttcttttggcttaggattgaattggtgatgcgggctcttttttggttccatatgaactttaaagtagttttttccaattctgtgaagaaagtcatcggtagcttgatggggatggcattgaatctataaattaccttgggcagtatggccattttcacgatattgattcttcctacccatgagcatggaatgttcttctatttgtttgtatcctcttttatttccttgagcagcggtttgtagttctccttgaagaggtccttcacatcccttgtaagttggattcctaggtattttattctctttgaagcaattgtgaatgggagttcactcatgatttggctctctgtttgtctgttgttggtgtataagaatgcttgtgatttttgtacattgattttgtatcctgagactttgctgaagttgcttatcagcttaaggagattttgggctgagacaatggggttttctagatatacagtcatgtcgtctgcaaacagggacaatttgacttcctcttttcctaattgaataacctggatcccttccttacaccttatacaaaaatcaattcaagatggattaaagacttaaacgttagacctaaaaccataaaaaccctagaagaaaacctaggcattaccattcgggacataggcatgggcaaggacttcatgtctaaaacaccaaaagcaatggcaacaaaagccaaaattgacaaatgggatctaattaaactaaagagcttctgcacagcaaaagaaactaccatcagagtgaacaggcaacctacaaaatgggagaaaattttcgcaacctactcatctgacaaagggctaataaccagaatctacaatgaactcaaacaaatttacaagaaaaaaacaaacaaccccatcaaaaagtgggtgaaggacatgaacagacacttctcaaaagaagacatttatgcagcc

SEQ ID NO: 198 - protein, 130 aa, Homo sapiens
MRHRYLDMISRKLEQLERTAEEQRLFLMDREERRQREHTRRKLTLRRKIEEEWKTKEMLLLTRMAEDVKREERIEEQQHRNREESDRKKQDLLEKKMAYHLQKMQDTGFNGEDIGKNTFKYRGQDGTHGE

SEQ ID NO: 199 - DNA, 4291 bp, Homo sapiens
atgaaaagcggcatgattaacctaacatcagggttggctacaggtgtgacaaataaaaaggaagtggatgaagataaagtgggaatttgtactcaaaaacatagtgagaatgtatcaaaagttacttcaactaccactgtgaaaagtaaagatactcaggagccaaatttgagtgaaacatttaataataatgaaattgagaagaaaagaaatttaattccaacagataaaaaagggaaagatgatgagataaacacacatttttcattaataattgatgatacagaatatgagaaggaagtacttggatcagattctgaaataggctataaaaagaagattgacaatgcaagggaaagctcatttaaaaaagatgacaagctctttcagttatcctccttgaagtccaagagaaatctagggactacaacagatactttggaaataagaactcgaacatcaagcaatgaggggagaagagactctccaacacaaacgtgtagggatgaggaacaccactcagattatgaacatgttcaaaatgtcattgaaaatatttttgaagatgttttagaactatcttcttctccagaaccagcatattattcgaaactcagttatgaccaaagccccccaggtgataatgtattaaatgtaattcaagagattagcagggattcggcacagtctgttacaacaaaaaaagtatcctcctcaactaacaaaaatatctctgccaaagaaaaagaagaggaagagagagaaaaagagaaagtaagagaggagattaaaagtgaacccagtaaaccagatgatcctcaaaaccaacaagaaagtaaacctggaatttttcccgctaagtttttagaagatgttattactgagatggttaaacaattgatcttttcttctataccagaaacacaaatacaagatagatgtcaaaatgttagtgataagcaaaatcaagccaaactctatgacactgctatgaaactcatcaattcactgttaaaggagttctcagatgctcaaattaaggttttcaggccagataagggaaatcagttccctgggggtaaagtgtcttcagttcctaaagtacctccaaggtataaagagccaactacagatgaagcaccatccagcattaagataaaatctgcagataaaatgccacctatgcataaaatgatgagaaaaccttcttcagataagataccatcaattgacaaaacattggtcaataaagttgttcactcctctgtttgtaatattttaaatgactatggatctcaagactctatttggaagaatataaacagtaatggagaaaatttagcaagaagactaactagtgcagtgataaatgaaattttccaacatcaggttaacttgatattttgtgatgaggtttcagtttcagcatgtttgcctctggaatctaaggatgttgttaaaaaggtccaaaagttggcccaaacagccagcaaagaatgtcaaacttcatcaccatatacaataatattacctcataaatttttggagaatgtgatttctgctcttttctccaaaattttctcaacaatatccagcacaaaaacaaaagaacctgaggacaatttgtccacagaactgaatttccttcaaatgaagttagtaagtgcagttgcaacagagatctcccaagataaatatatgactatacagtatgtagaaaccttacaatctgatgatgatgaaattattcaattagtggttcagtctgtttataataatctcttgccacagtttggatcacaagagattatacaaaattgtgtaaccagtggatgcaaaatcctttcagaaaacatagttgacttggttctacgagaagtggctagcaatcagctgcagagctatttttgtggagagctaactccacatcagtgtgtggaagttgaaaacatcgttgaaaagatccttaaagatgttttccaaactactgatgtgccccaacctaaaccttcacatgctgataagctgtcttataacataatagaagaaattgctgtgaaatttttatcaaagcttttatctatatttccaaaagtacataaagaaagaacaaaatctctagagactgatatgcaaaaaataacttcaaaagtactaaattcagtccaagaatttatctccaaaagtaagattaaacttgtaccacccaccaaggaatcacctactgtgcctgtagctgataatgcaactattgaaaacatagttaattctatttataccagtgttttaaagcactctggctcttatacttctgtatttaaagatttaatgggtaaaagcaatgtcctctctgatacaataggctttttaatggtgaatgcaatttcgaattctgaatttcaacctcaagtagaggaagaagtatcaaattcagaattagttctggaagctgtcaaaattatggaaaaagtgatcaaaattattgatgaacttaagtctaaggaaaagtcttcatccagaaaaggtttgacattagatgccaaacttttagaagaggtgttggccttgttcttggctaaactaataaggttgccaagttcctcaagcaaagatgaaaaaaacttatcaaagactgagttaaataaaattgcatctcaactgtcaaaattggtaacagctgaaatttccagaagtagcattagtctaatagcttctgatcctgaagagcactgtttaaatccagaaaatacagaaaggatttatcaggttgtcgattccgtttatagtaacatactgcaacaatcaggaaccaacaaagaattttattatgatataaaagatacaaatacagcctttcctaaaaaagtggctagtttaattattgatggagtttcaagttttccattagatacaattaactcaactttcaaatgctgatctctctggagagctagacgttaatagaattgttcaaaaggcccaagaacatgcttttaatgtgattcctgaattagagcaagaaaagttagatcaaaatttatctgaagaggaatctccaattaaaatagttccacatgttggaaaaaaaccagtcaaaatagatccaaaaattatttcagaacacttagcagttatttctataaaaactcaacctcttgagaaacttaagcaggagtgtttgaaaagaactggacatagcatagcagaactgagaagagcatcaataagtgggagaaattactccttaggatcacctgatttagaaaagagaaagacagaaagacgtacctcattggataagactggaagactggatgtaaaacccctagaggccgttgctagaaattcatttcagaatataagaaagcctgatattacaaaggtggagctcttaaaagatgttcaaagtaaaaatgatcttattgttcgattagtagctcatgatattgatcaagtgtatttggaaaattacataaaagaggaacgagattctgatgaagatgaagttgttttaacacagacttttgcaaaagaagaaggcatcaaagtatttgaagatcaagtgaaagaagtcaagaagccaatacaaagcaaactttctcctaagtcaacactaagcacgagcagcctgaaaaaatttttgtcactaagtaaatgttgtcagaccacagccagtgcaaatattgaaagtactgaagcaatctcaaatcaggtaatagaatccaaggagacacatgttaaaagagctgttgctgagcttgacatggccacaccaaagacgatgcctgaaacagcctcttcatcttgggaggaaaagccccagtgtaagaaagaagaaaagaatcttgttactgaaccaacacattacttcatacacagaattatgagttcatcttcatacaaccaagaagatctcatttcatctactggtgaggctgaagattgtcactcagacccaagtgctaaaatattagaagaaagttctcaggaacaaaagccagagcatggaaacagtgttaagtttatcaccatctttgaaagatccaaggatgttcttggcagtgcaaatccctcaaaggaagtcatttcagaaactcccaagcccgatgtctccaaacaaggatctaaaatgctgacaaaaatgtcttcagctttgtcaaaggtgttttctcaatgtaacaccaatatttccagatcttcctcaccagctcaccaggatgaacactgaagcttttgtacctgatataagtatgcttacttcttttagaaaataaaatggtttttaaagcat

SEQ ID NO: 200 - protein, 978 aa, Homo sapiens
MKSGMINLTSGLATGVTNKKEVDEDKVGICTQKHSENVSKVTSTTTVKSKDTQEPNLSETFNNNEIEKKRNLIPTDKKGKDDEINTHFSLIIDDTEYEKEVLGSDSEIGYKKKIDNARESSFKKDDKLFQLSSLKSKRNLGTTTDTLEIRTRTSSNEGRRDSPTQTCRDEEHHSDYEHVQNVIENIFEDVLELSSSPEPAYYSKLSYDQSPPGDNVLNVIQEISRDSAQSVTTKKVSSSTNKNISAKEKEEEEREKEKVREEIKSEPSKPDDPQNQQESKPGIFPAKFLEDVITEMVKQLIFSSIPETQIQDRCQNVSDKQNQAKLYDTAMKLINSLLKEFSDAQIKVFRPDKGNQFPGGKVSSVPKVPPRYKEPTTDEAPSSIKIKSADKMPPMHKMMRKPSSDKIPSIDKTLVNKVVHSSVCNILNDYGSQDSIWKNINSNGENLARRLTSAVINEIFQHQVNLIFCDEVSVSACLPLESKDVVKKVQKLAQTASKECQTSSPYTIILPHKFLENVISALFSKIFSTISSTKTKEPEDNLSTELNFLQMKLVSAVATEISQDKYMTIQYVETLQSDDDEIIQLVVQSVYNNLLPQFGSQEIIQNCVTSGCKILSENIVDLVLREVASNQLQSYFCGELTPHQCVEVENIVEKILKDVFQTTDVPQPKPSHADKLSYNIIEEIAVKFLSKLLSIFPKVHKERTKSLETDMQKITSKVLNSVQEFISKSKIKLVPPTKESPTVPVADNATIENIVNSIYTSVLKHSGSYTSVFKDLMGKSNVLSDTIGFLMVNAISNSEFQPQVEEEVSNSELVLEAVKIMEKVIKIIDELKSKEKSSSRKGLTLDAKLLEEVLALFLAKLIRLPSSSSKDEKNLSKTELNKIASQLSKLVTAEISRSSISLIASDPEEHCLNPENTERIYQVVDSVYSNILQQSGTNKEFYYDIKDTNTAFPKKVASLIIDGVSSFPLDTINSTFKC

SEQ ID NO: 201 - DNA, 2867 bp, Homo sapiens
aatcagggagcgccgcgcgagggtggggaccagctgcgcacgaggccagcggcggggtcgctgccgttgaggcttcccgccactgctgctggcggatttgtggggcaaaatttctcgctggctagccttcttttccctcccgcactttggtggggagggggtggatcctcgtttcggtgcccaagttcacgatgacccgagagaactcgaggaagttgtcgccgcggccatttcccccagtgccgcaacttgctggccttggagggggaggagcgccgaggcagtgactgcgacgcaaacatcaaaccagatgcaaacagattcattatctccatcccctaatcctgtgtcacctgtgcctttgaataacccaacaagtgccccaagatatggaacagtgatccctaatcgcatctttgtaggaggaattgattttaagacaaacgaaagtgatttaagaaaatttttttcccagtatgggtctgtgaaagaagtgaagattgtaaatgacagagctggagtatccaaagggtatggtttcgtcacttttgaaacacaagaagatgcacaaaaaattttacaagaggctgaaaaacttaattataaggataagaagctgaacattggtccagcaataagaaaacaacaagtagggatccctcgttctagtataatgccagcagctggaacaatgtatctaacaacttcaactggatatccttatacttaccataatggtgttgcttattttcatactccagaggtaacttcggtcccaccgccttggccttcacgttctgtatgtagctcccctgtgatggtagctcagcccatttatcagcaacctgcatatcactaccaggccaccacacagtatttaccaggacagtggcagtggagtgttcctcagccttctgcctcttctgctccattcttatacctgcaaccttctgaggttatttatcaaccagtggaaattgcacaggatggtggatgtgttcctcctccactgtctctgatggaaacttcagttccagagccttattctgatcatggagttcaagcaacatatcaccaggtttatgctccaagtgccatcactatgcctgcgcctgtgatgcagcctgagccaattaaaacagtgtggagcattcattattaagacaattgggcagctctattccagctcaactgatttcttgtccaatgatccttgcgtggccgagatccagcttcaacgaaccagctagaagctgcccgttgtgaaacttagtgttagttaatacctcaccatactcagttattccactataagctgtctaaatttgatgaaatttgctttttcagctgttctacaaaattatttaggtagatgtggcatgttggttttttatgtgctaacctaactgtaatgaccttttctacaacatgttttatccattccataaataataaccacattgggaatagtgaggtgtcttttattttctctgctttgtgttattttttcttatcaaacaattagatgttatgtttcatattatttgatatttattttcatatttaggataagaatcatttttaattataatacttttaatactttcatatattttacaacagtatactatttaatattaatgacaattctatttttgctttgctgttttgtcatttaatatgcttttgtctaatttttaattcatttattactgttactccttatttaattttgcgtctgccatggttttcagaatctgaatagtatttatacttcttttttataacattttccaaatattagaaataccatcaacatgatcagtattcttgccttttcatgtaatttgactatattaaattttttctccagtgtttgagacaatattgaaatcttcctataacataatttatttggtatcaaattttataaaatatggatccacctttggaattttgataaaagggttcatctctgacatgatcccataacactgactgaaattccaccaaattactgttctttgaatgctttaatccttaaaccttttcttctgatatgcaaccaatatattcaattatatatgtgattaatttttaaaaggacaattgttttcataaaatgcaaaactattttttacaccaaaggaaaattttagattctgattctaaatccgatttttactataaaattggaaaatagatgggaggggtgtcattcattgttcaaaaggtacagaacaaatcataggggtttttaatctctaaaatttctacagtagtacaggaaatattcctctttacattcatttgcagttctttcactgacctcctaattttaggtggagggggcagggggagccataaaagttggtattaccctaataaatctatctctttcctcccctgtttcaaccccacatgtattccatgctcagcagcagcagcagaaatagtaggatatagatcacaaaggtttttctggtgagtcaaatagggtgttttcttttgaaactgtaatgaatatgtttgccagtcaaatggcttcatgagaacagtagaaccttatgaatgtatactagcatacaaggatctcaaatacattaattattctcagttttaggaatgtaaatagattaagtcccacaatgaaatttcagaagtttttgttctgtaagtaaaaaattactaaccactgatgttcaagattttcttttaatagcactatccttgagaaccaaaaagtttatgttttgattttcaaatgttaaacaagatgctaaacaaatcctggactgttaataaaaattaattatgtattattggataaaaaaaaaaaaaaaaaaaaaaaaaaaaaaaaaaaaaaa

SEQ ID NO: 202 - protein, 283 aa, Homo sapiens
MQTDSLSPSPNPVSPVPLNNPTSAPRYGTVIPNRIFVGGIDFKTNESDLRKFFSQYGSVKEVKIVNDRAGVSKGYGFVTFETQEDAQKILQEAEKLNYKDKKLNIGPAIRKQQVGIPRSSIMPAAGTMYLTTSTGYPYTYHNGVAYFHTPEVTSVPPPWPSRSVCSSPVMVAQPIYQQPAYHYQATTQYLPGQWQWSVPQPSASSAPFLYLQPSEVIYQPVEIAQDGGCVPPPLSLMETSVPEPYSDHGVQATYHQVYAPSAITMPAPVMQPEPIKTVWSIHY

SEQ ID NO: 203 - DNA, 2804 bp, Homo sapiens
gaggcgacgcagtccgcttctccccacccgccaggtggcaggttcagggccggggtccgagcctgcttccctgcagctgccacagccaccctcgccgccagggggcgagagtcccaggcaggacaagcagcgctgctgccttggcgtgaaggtggtttcaaactttaggcttcttttccctaccccgcgtctctgaagagcagagaggaagatggaaaccgagtccgggccgcaaacatcaaaccagatgcaaacagattcattatctccatcccctaatcctgtgtcacctgtgcctttgaataacccaacaagtgccccaagatatggaacagtgatccctaatcgcatctttgtaggaggaattgattttaagacaaacgaaagtgatttaagaaaatttttttcccagtatgggtctgtgaaagaagtgaagattgtaaatgacagagctggagtatccaaagggtatggtttcgtcacttttgaaacacaagaagatgcacaaaaaattttacaagaggctgaaaaacttaattataaggataagaagctgaacattggtccagcaataagaaaacaacaagtagggatccctcgttctagtataatgccagcagctggaacaatgtatctaacaacttcaactggatatccttatacttaccataatggtgttgcttattttcatactccagaggtaacttcggtcccaccgccttggccttcacgttctgtatgtagctcccctgtgatggtagctcagcccatttatcagcaacctgcatatcactaccaggccaccacacagtatttaccaggacagtggcagtggagtgttcctcagccttctgcctcttctgctccattcttatacctgcaaccttctgaggttatttatcaaccagtggaaattgcacaggatggtggatgtgttcctcctccactgtctctgatggaaacttcagttccagagccttattctgatcatggagttcaagcaacatatcaccaggtttatgctccaagtgccatcactatgcctgcgcctgtgatgcagcctgagccaattaaaacagtgtggagcattcattattaagacaattgggcagctctattccagctcaactgatttcttgtccaatgatccttgcgtggccgagatccagcttcaacgaaccagctagaagctgcccgttgtgaaacttagtgttagttaatacctcaccatactcagttattccactataagctgtctaaatttgatgaaatttgctttttcagctgttctacaaaattatttaggtagatgtggcatgttggttttttatgtgctaacctaactgtaatgaccttttctacaacatgttttatccattccataaataataaccacattgggaatagtgaggtgtcttttattttctctgctttgtgttattttttcttatcaaacaattagatgttatgtttcatattatttgatatttattttcatatttaggataagaatcatttttaattataatacttttaatactttcatatattttacaacagtatactatttaatattaatgacaattctatttttgctttgctgttttgtcatttaatatgcttttgtctaatttttaattcatttattactgttactccttatttaattttgcgtctgccatggttttcagaatctgaatagtatttatacttcttttttataacattttccaaatattagaaataccatcaacatgatcagtattcttgccttttcatgtaatttgactatattaaattttttctccagtgtttgagacaatattgaaatcttcctataacataatttatttggtatcaaattttataaaatatggatccacctttggaattttgataaaagggttcatctctgacatgatcccataacactgactgaaattccaccaaattactgttctttgaatgctttaatccttaaaccttttcttctgatatgcaaccaatatattcaattatatatgtgattaatttttaaaaggacaattgttttcataaaatgcaaaactattttttacaccaaaggaaaattttagattctgattctaaatccgatttttactataaaattggaaaatagatgggaggggtgtcattcattgttcaaaaggtacagaacaaatcataggggtttttaatctctaaaatttctacagtagtacaggaaatattcctctttacattcatttgcagttctttcactgacctcctaattttaggtggagggggcagggggagccataaaagttggtattaccctaataaatctatctctttcctcccctgtttcaaccccacatgtattccatgctcagcagcagcagcagaaatagtaggatatagatcacaaaggtttttctggtgagtcaaatagggtgttttcttttgaaactgtaatgaatatgtttgccagtcaaatggcttcatgagaacagtagaaccttatgaatgtatactagcatacaaggatctcaaatacattaattattctcagttttaggaatgtaaatagattaagtcccacaatgaaatttcagaagtttttgttctgtaagtaaaaaattactaaccactgatgttcaagattttcttttaatagcactatccttgagaaccaaaaagtttatgttttgattttcaaatgttaaacaagatgctaaacaaatcctggactgttaataaaaattaattatgtattattggataaaaaaaaaaaaaaaaaaaaaaaaaaaaaaaaaaaaaaa

SEQ ID NO: 204 - protein, 295 aa, Homo sapiens
METESGPQTSNQMQTDSLSPSPNPVSPVPLNNPTSAPRYGTVIPNRIFVGGIDFKTNESDLRKFFSQYGSVKEVKIVNDRAGVSKGYGFVTFETQEDAQKILQEAEKLNYKDKKLNIGPAIRKQQVGIPRSSIMPAAGTMYLTTSTGYPYTYHNGVAYFHTPEVTSVPPPWPSRSVCSSPVMVAQPIYQQPAYHYQATTQYLPGQWQWSVPQPSASSAPFLYLQPSEVIYQPVEIAQDGGCVPPPLSLMETSVPEPYSDHGVQATYHQVYAPSAITMPAPVMQPEPIKTVWSIHY

SEQ ID NO: 205 - DNA, 4565 bp, Homo sapiens
gaattccgggcagcatcatcaaggcacatagattctctctttgaacaatgcagctgctgcaggggatggggaagggatggcactggcaattcaagactgcctttcctacttcttcagtgcctctttcaccaatatgaagttaaaaccaggatccttcaaaccaaaaatgtggtggaagaaagaaaaccgtgtctttcagcagcatgccatcggaaaagaaaattagcagtgcaaatgactgcatcagcttcatgcaagctggctgtgagttgaagaaagtccggccaaattctcgcatttacaaccgttttttcactctggacacagaccttcaagctcttcgctgggaaccttcaaagaaagacctcgagaaagccaagcttgatatttctgccataaaagagatcagactggggaaaaacacggaaacatttacaaacaatggccttgctgaccagatctgtgaggactgtgccttttccatactccacggggaaaactatgagtctctggacctagttgccaattcagcagatgtggcaaacatctgggtgtctgggttacggtacctggtttctcgaagtaagcagcctcttgattttatggagggcaaccagaacacaccacggttcatgtggttgaaaacagtgtttgaagcagcagatgttgatgggaatgggattatgttggaagacacctctgtagagttaataaaacaactcaaccctactctgaaggaagccaagatcaggttaaagtttaaagaaatccagaagagcaaggaaaaactaaccacccgcgtgaccgaagaggaattttgtgaagctttttgtgaactttgcaccaggccagaagtgtatttcttacttgtacagatatctaaaaacaaagaatatttggatgccaatgatctcatgctctttttagaagctgagcaaggagtcacccatatcaccgaggatatatgcttagacatcataaggagatacgaactttctgaagagggacgtcaaaaagggtttcttgcaattgatggctttacccagtatttattgtcatcagaatgtgacatttttgatcctgagcaaaagaaggttgcccaagatatgacccagccattatctcactactatatcaatgcctctcataacacctatctaatagaagaccagttcagggggccagctgacatcaatgggtacattagagctttgaaaatgggctgtcgaagcgttgaactcgatgtaagtgatggttcagataatgaaccaatcctttgtaatcgaaataacatgacaacccatgtttcctttcgaagtgtcatagaggtaataaataaatttgcctttgttgcttctgaatacccactcattctttgcttgggaaatcactgctccttgccgcagcagaaggtaatggctcaacagatgaaaaaggtctttggcaataaactctatactgaagcacctttgccctcagaatcctacctcccatcaccagaaaaattaaaaagaatgatcattgtgaaaggaaagaagttgccttctgatccagatgtgttagaaggagaagtaacagatgaagatgaagaagctcaaatgtctcgaaggatgtcggtagattacaatggtgagcagaagcaaatccgactctgtagggagctctctgatttggtgtctatttgtaaatctgttcaatacagggattttgaactatctatgaaaagccaaaactattgggaaatgtgttcatttagtgaaacagaggccagccgcattgcaaatgagtacccagaggattttgttaattataataagaagttcttatcaagaatctatccaagtgccatgaggatcgattccagtaacttgaatccacaggacttttggaattgtggctgtcagattgtagcaatgaattttcagactccgggtccaatgatggaccttcacacgggctggtttcttcaaaacgggggatgtggttatgttctaaggccgtctataatgcgagatgaagtttcttacttcagcgcaaatacaaagggcattctacctggggtgtctcctctagctcttcatatcaagatcatcagtggtcagaatttcccaaagcccaagggagcttgtgccaaaggggatgtcatagatccctatgtttgtatagagatacacggaattccagcggattgttcggaacaaagaactaaaactgtacagcaaaacagtgataatcctatttttgatgaaacttttgagttccaagtaaacctacctgagctggccatgatccgttttgttgttctggatgatgactacattggggatgagtttatagggcaatatacgataccatttgaatgtttgcagcctggatatcggcatgttcccctgcgttcttttgtgggtgacatcatggagcacgtaaccctttttgtccacatagcaataactaatcgaagtggaggaggaaaggcacagaagcgcagtctttcagtgagaatggggaagaaagttcgggaatataccatgctcaggaatatcggtcttaaaaccattgatgacatctttaaaatagcggttcatccattacgagaagccatagatatgagagaaaatatgcagaatgcaatcgtgtctattaaggaactatgtggactccctccaattgccagtctgaagcagtgcctgttaactctgtcatctcggctcatcaccagtgacaatactccttcagtctcacttgtgatgaaagacagctttccttacctggagcctctgggtgcaattccagatgtgcagaaaaagatgctgactgcttatgatctgatgattcaagagagccggtttctcatagaaatggcggacacagtccaggaaaagattgtacagtgtcagaaagcagggatggagttccatgaagaacttcataatttgggggcaaaagaaggcttgaagggaagaaaactcaacaaagcaactgagagctttgcttggaacattacagtattgaagggccaaggagatctgttgaagaatgccaagaatgaagctatagaaaacatgaagcagatccagctggcatgcctgtcctgtggactgagtaaagcccccagcagcagtgctgaggccaagagcaagcgcagcctggaagccatagaggagaaggaaagtagtgaggagaatgggaagctgtgactctgggcattatcgacacgttcacccatcttatcaaggactctggtttctcattcttgttttctttctttaaatgttttataagttcacaaaatggtgccctatatggggtattggacatagatattttcacaatgtcagtatttcagtgtagttaatttatctaaattaaagcctttagtatcagtgttttaaattctgagacatgtgtcaacacccctgtgtggatgcctgtggaagagtgtgtgtgtgtgtgtgtgtgtgtgtgtgtgtgtgtgtggcagagagagagaaagagagagagagaaattctgttaaaatctattctgtgttgcattattcatttagtgagttattccttgatcattttgggacaattgttttaatctgaaattctaaagagcacttactgtaacctgttgctgtgtttaatttgacttctctgcctttgacatttaatttagtgatcttagcatagcttattattgaaggaagccaaatttatcaaagcatacatgttttggtagattaaatatagattagaaaaattcctaagaatcagagtagaaataaaagtgaatgaaagattaaacagatgatgagaatttctaaaaagattagcaaggtcatttcttcagtcagaaaactttaaaaaatatttattaaataaaatcaatttttaggaagttttctgtagtcatttactaaacatatgatttcactagaaaagctgatcataagtgaatttatacctacctgtgtggctactctgaaacacactgaaagctctgttgcaattaggatttgatgtgacataatattgttgtataatttcgagatttgtaggaaggtctcattcttccaagctgagagtctagcactcattttctataacagatatggcagcttagaggtgttggctttgtttggatgtaattttaggggtactaaaatttaaaatttaaagataattgttcaacaatatcatatcatcacattgagctgatataaattctgtgggtccgataatatctttgtgataatttaagagctaaccagttaccacacatctatgatataaccctaacacacacagaaagcatacatgcaaaaagaaatgactaattagggtacatttataattgcatctaggtaatttttaccctaatgtcttcataaagtacttgagtgtaatgtttgttacctccaacagaactaaatgttctatggttatgaaagaatatatttatttaaagcattgcttttattttgaaaagcttcttaattaatttgattaacaaatatgctaatttggggaaacctagagaagataattgttgaaattttgcaaatataaacatctcctat

SEQ ID NO: 206 - protein, 997 aa, Homo sapiens
MPSEKKISSANDCISFMQAGCELKKVRPNSRIYNRFFTLDTDLQALRWEPSKKDLEKAKLDISAIKEIRLGKNTETFTNNGLADQICEDCAFSILHGENYESLDLVANSADVANIWVSGLRYLVSRSKQPLDFMEGNQNTPRFMWLKTVFEAADVDGNGIMLEDTSVELIKQLNPTLKEAKIRLKFKEIQKSKEKLTTRVTEEEFCEAFCELCTRPEVYFLLVQISKNKEYLDANDLMLFLEAEQGVTHITEDICLDIIRRYELSEEGRQKGFLAIDGFTQYLLSSECDIFDPEQKKVAQDMTQPLSHYYINASHNTYLIEDQFRGPADINGYIRALKMGCRSVELDVSDGSDNEPILCNRNNMTTHVSFRSVIEVINKFAFVASEYPLILCLGNHCSLPQQKVMAQQMKKVFGNKLYTEAPLPSESYLPSPEKLKRMIIVKGKKLPSDPDVLEGEVTDEDEEAQMSRRMSVDYNGEQKQIRLCRELSDLVSICKSVQYRDFELSMKSQNYWEMCSFSETEASRIANEYPEDFVNYNKKFLSRIYPSAMRIDSSNLNPQDFWNCGCQIVAMNFQTPGPMMDLHTGWFLQNGGCGYVLRPSIMRDEVSYFSANTKGILPGVSPLALHIKIISGQNFPKPKGACAKGDVIDPYVCIEIHGIPADCSEQRTKTVQQNSDNPIFDETFEFQVNLPELAMIRFVVLDDDYIGDEFIGQYTIPFECLQPGYRHVPLRSFVGDIMEHVTLFVHIAITNRSGGGKAQKRSLSVRMGKKVREYTMLRNIGLKTIDDIFKIAVHPLREAIDMRENMQNAIVSIKELCGLPPIASLKQCLLTLSSRLITSDNTPSVSLVMKDSFPYLEPLGAIPDVQKKMLTAYDLMIQESRFLIEMADTVQEKIVQCQKAGMEFHEELHNLGAKEGLKGRKLNKATESFAWNITVLKGQGDLLKNAKNEAIENMKQIQLACLSCGLSKAPSSSAEAKSKRSLEAIEEKESSEENGKL

SEQ ID NO: 207 - DNA, 8192 bp, Homo sapiens
gcgaaacttaaggaatcctgccttcccggagccgcgggcgatgcgactagggctgccgggcgccgccgccgcccgtccggcttcgtccttcccggcagtcgggaactagttctgaccctcgccccccgaccccggatcgaatccccgccctccgcaccctggatatgttttctcccagacctggatatttttttgatatcgtgaaactacgagggaaataatttgggggatttcttcttggctccctgctttccccacagacatgccttccgtttggagggccgcggcaccccgtccgaggcgaaggaacccccccagccgcgagggagagaaatgaagggaatttctgcagcggcatgaaagctctgcagctaggtcctctcatcagccatttgtcctttcaaactgtattgtgatacgggcaggatcagtccacgggagagaagacgagcctcccggctgtttctccgccggtctacttcccatatttcttttctttgccctcctgattcttggctggcccagggatgacttcctcgctgcagcggccctggcgggtgccctggctaccatggaccatcctgctggtcagcactgcggctgcttcgcagaatcaagaacggctatgtgcgtttaaagatccgtatcagcaagaccttgggataggtgagagtagaatctctcatgaaaatgggacaatattatgctcgaaaggtagcacctgctatggcctttgggagaaatcaaaaggggacataaatcttgtaaaacaaggatgttggtctcacattggagatccccaagagtgtcactatgaagaatgtgtagtaactaccactcctccctcaattcagaatggaacataccgtttctgctgttgtagcacagatttatgtaatgtcaactttactgagaattttccacctcctgacacaacaccactcagtccacctcattcatttaaccgagatgagacaataatcattgctttggcatcagtctctgtattagctgttttgatagttgccttatgctttggatacagaatgttgacaggagaccgtaaacaaggtcttcacagtatgaacatgatggaggcagcagcatccgaaccctctcttgatctagataatctgaaactgttggagctgattggccgaggtcgatatggagcagtatataaaggctccttggatgagcgtccagttgctgtaaaagtgttttcctttgcaaaccgtcagaattttatcaacgaaaagaacatttacagagtgcctttgatggaacatgacaacattgcccgctttatagttggagatgagagagtcactgcagatggacgcatggaatatttgcttgtgatggagtactatcccaatggatctttatgcaagtatttaagtctccacacaagtgactgggtaagctcttgccgtcttgctcattctgttactagaggactggcttatcttcacacagaattaccacgaggagatcattataaacctgcaatttcccatcgagatttaaacagcagaaatgtcctagtgaaaaatgatggaacctgtgttattagtgactttggactgtccatgaggctgactggaaatagactggtgcgcccaggggaggaagataatgcagccataagcgaggttggcactatcagatatatggcaccagaagtgctagaaggagctgtgaacttgagggactgtgaatcagctttgaaacaagtagacatgtatgctcttggactaatctattgggagatatttatgagatgtacagacctcttcccaggggaatccgtaccagagtaccagatggcttttcagacagaggttggaaaccatcccacttttgaggatatgcaggttctcgtgtctagggaaaaacagagacccaagttcccagaagcctggaaagaaaatagcctggcagtgaggtcactcaaggagacaatcgaagactgttgggaccaggatgcagaggctcggcttactgcacagtgtgctgaggaaaggatggctgaacttatgatgatttgggaaagaaacaaatctgtgagcccaacagtcaatccaatgtctactgctatgcagaatgaacgcaacctgtcacataataggcgtgtgccaaaaattggtccttatccagattattcttcctcctcatacattgaagactctatccatcatactgacagcatcgtgaagaatatttcctctgagcattctatgtccagcacacctttgactataggggaaaaaaaccgaaattcaattaactatgaacgacagcaagcacaagctcgaatccccagccctgaaacaagtgtcaccagcctctccaccaacacaacaaccacaaacaccacaggactcacgccaagtactggcatgactactatatctgagatgccatacccagatgaaacaaatctgcataccacaaatgttgcacagtcaattgggccaacccctgtctgcttacagctgacagaagaagacttggaaaccaacaagctagacccaaaagaagttgataagaacctcaaggaaagctctgatgagaatctcatggagcactctcttaaacagttcagtggcccagacccactgagcagtactagttctagcttgctttacccactcataaaacttgcagtagaagcaactggacagcaggacttcacacagactgcaaatggccaagcatgtttgattcctgatgttctgcctactcagatctatcctctccccaagcagcagaaccttcccaagagacctactagtttgcctttgaacaccaaaaattcaacaaaagagccccggctaaaatttggcagcaagcacaaatcaaacttgaaacaagtcgaaactggagttgccaagatgaatacaatcaatgcagcagaacctcatgtggtgacagtcaccatgaatggtgtggcaggtagaaaccacagtgttaactcccatgctgccacaacccaatatgccaatgggacagtactatctggccaaacaaccaacatagtgacacatagggcccaagaaatgttgcagaatcagtttattggtgaggacacccggctgaatattaattccagtcctgatgagcatgagcctttactgagacgagagcaacaagctggccatgatgaaggtgttctggatcgtcttgtggacaggagggaacggccactagaaggtggccgaactaattccaataacaacaacagcaatccatgttcagaacaagatgttcttgcacagggtgttccaagcacagcagcagatcctgggccatcaaagcccagaagagcacagaggcctaattctctggatctttcagccacaaatgtcctggatggcagcagtatacagataggtgagtcaacacaagatggcaaatcaggatcaggtgaaaagatcaagaaacgtgtgaaaactccctattctcttaagcggtggcgcccctccacctgggtcatctccactgaatcgctggactgtgaagtcaacaataatggcagtaacagggcagttcattccaaatccagcactgctgtttaccttgcagaaggaggcactgctacaaccatggtgtctaaagatataggaatgaactgtctgtgaaatgttttcaagcctatggagtgaaattattttttgcatcatttaaacatgcagaagatgtttaaaaataaaaaaaaaactgctttatcctcctgtcagcaccccctcccacccctgcaacaaagacttgctttaaatagatttcagctatgcagaaaaatttagcttatgcttccatatttttaaattttgttttttaagttttgcacttttgtttagtctcgctaaagttatatttgtctgttatgaccacagagttatatgtgtgtgtatcaaaagtggtctcaaaatatttttttaagaaaaaaagcaaaaacaatgtattgctgataatcagtttggaccagtttcttaaggtcattaaaacagaagcaaattaagacaggtttgactgcagtggtgtctggtatccatgttttatttctgggcacaagctagtttttatgttgatacgttcctgaacatattatcttgttggacatcttttctcttgtgttttgtttgaatgtgcaatagtttataggccacaaataagctttcttgtaagctctcttcctaacagggcacatattcttccataatataaacacttttctgccccatctcccatacttttgaaggtcagttctatgacagtgaattttgcacaggagaagcagctacctgatttcttactttctctctccttatcatggagaatacagaaacattgtctgaaagggctctaaagaaggaactaccaaaacctgacttgaaatgccatttcttttaaccttccaaatcctaaatgtttccttcaaggcatcttaataaacttatttgcttctggttttgggagttcataagagagaatagaacaaaatacaggacatcaaatattagccatttcccattttattttatttttctatgtaggttcatgttccatgttcatttatttaagaaatacatttttattggtaagcttatagagctacacttatggaatttttaagtaggtaaataaatggttaagacaaaatagtgttatagccttcattctctgaataggccatctttgactcataaaattacccttactgtttattataacttcagaagtaatttatagttctgaacctatagtatcttttaccctgttcccaagcaaagactggtgactttatctgaaaatgattcctcttcccatgacctaaaacactgtgaggaaaaatcattcaagtggcatgccaagtccctatgaaggaagggctgctatcaaacctaccttttttgagcaaactgagactaaacttctctcttttcaaaattgtgttatcttccttaatcctattttcataatttttccttttgccagtttttcacattatctttgatatgtgagcaacatttattatttacattagagtataccttttagtaataaaatgacttgaaatcatattatttttaaaagccctttgcttctttcattacttataatctcctctaaaacaacctctgcatgttttttttaaataaagcactttctgtcaaataatggacttttttctaaacagaaattattttctattaatttgcaaactgatgatttcacttttttttacttttttttcgattatcagagtacttagtaaatgttatatagtttagttctaagatagttccagggattaaaaggttaagaggaaaacacaaatcaccaaatttctgatttatgtttttatctcctgaacaatattttctcactcatattcctctatcttatcacttagctaaagacagcctaaatttcccaattttctgtccaaaatatttgtgatttacttgtatataagccttctcatttgccatgtgctgtgatcttacaagttagatgttactatacctaccatttattcagctggattgctgaacacagttctggattcatagaattaagaatatcttgttagtgcccaggatttccacgttttgtgttttattggcccttttctttattcagccccttaatctattttcagtcttctggcacgtaatttttttcacagttattattcttctattaacaaattatttttatctttcctagtacattttcacttagttctcttgcccttaaatatctttcacatgcattttaggatattcttttcaaatatttgtaggacaactttgaatcaaaataaattatgttccttctccaatttgaagcattgaggataaatgaccatttgaggtctaactgatcttttcctgccagaagagttatcttacgttctgctatatttgtatttgggccagttgattgtaggttgtccaacattttttaatattgggaaaattatgataaaatgctttaaaaattaatatgccagattaaaataactgaatagtttactatttcattcaagcatgtttaaaacaaataatttcctttcaccagtttttcttagtaaactcctgaaaaagtaggaaaggtggaaagtatatatcatttttataaattttaaattgtacatcagacttttaaaatctgtaatatacaagcaagcaaaattattttaaatgacttaattgtatgctaatactcatctgataataaatgcttcttaaagttgacatttaactgctatcacaaagttttatatgtagaaaagtggggtccttttgaataaaagatcattcaactaaaaatattaaaatttatttcactggatggtaatgtaaccttaaaagcatcataataggtaaagtctaatattagttcccttaacaaaatcctaactgtataccagaattaggtcactgaaagaacttgatttgaattacgtttagacaaaaatgatttaattgtaaattcttaaaactttctaaatgcataattggcaaaaaaaaaaacccactgttaccagtgtaggaagttacaagaaggcacatactgaatgctgaagtatacatatgctatttctcttaaacctcagagcaaccatatgagcattgtaattaatattcccattttacagatgaggaaactgaagctaagagaagctaagtaatatgcccaaggtccacatctagtaacagacaaagctgggatttcagtctatgtctgcctctctccacatctctttcatccataccacactgcctacatgccatatgacaggatgtgtaatgggctaacgtttatttaaaaagttcaggccaggtgcagtggcttatgcctataatccccgcactttgggaggccgagccgggtggatcatgaggtcagacgttcaacaccagcctggccaagatggtgaaaccccgtctctattaaaaatattttttaaaaattaactgagcgtggtggtgggcgcctgtagtcccagctactcaggaggctaaggcaggagaatctcttgaacccgagaggtggaggttgcagtgagctgagatcgcgccactgcactgcagcctaggcgacagagcaagactgcctcaaaaaaaaaacataaaaattcagtcactatactctggcacaattttcatttgtatatgagccaaaccacataccttaatgatttgggaagttaggcaaatatgagatatgtagacatatctatgctgattgttgcttgagaaataattactaattctagacaaaactcaatcctgtatcttccatcatgaatcttaaaatcatttcacttcactcctaacatttcttacattgcagaactaatggtaaagtaaattttacggaaaaagttaagatagctttgggaacagagacctttccctaaattgattccatagcagatttgggggaattaacaaagaatttcagtctcatcaatcctttgaatccatcttcaaaacttctgcttttaataactttagaaaatttactaatctatagaactaattgagtaggatataggaaggatacaaggatataatgtcctttttataaaagtttagtatagcttctttacatgtatccacttgttccagaaaatgtgcattggttctgaatgtgaaaatatttaaagagagaaaggaacactcaagtaagtgtgggcttcagtgggaattatcacaaaacattggcaagtatttttatttaaattattttcaaatttgacttctacagccaagtggaattggtaggctgtagctgttacactgaaatttctagtctttgtaagtgcctcctgaaagtcatttaaaatggaaaaatatttcaatgagcttttccttttttcatatttatggacatgaatattttattggagatcattaactcctagaatttgagattatatttccatacaacattttataaagttatgttgaacttactacctgttatgtgcaggttattatgtaactattcacagattgcttcatatattgctttatcttcccatctaacttcttaaagttaaaatccggacacacatgttgattatctagaccagtcattctggaaattgtaacactcccacataaaccccaggagactttttcagaatgcaatgtttctaaatgtactgttac

SEQ ID NO: 208 - protein, 1038 aa, Homo sapiens
MTSSLQRPWRVPWLPWTILLVSTAAASQNQERLCAFKDPYQQDLGIGESRISHENGTILCSKGSTCYGLWEKSKGDINLVKQGCWSHIGDPQECHYEECVVTTTPPSIQNGTYRFCCCSTDLCNVNFTENFPPPDTTPLSPPHSFNRDETIIIALASVSVLAVLIVALCFGYRMLTGDRKQGLHSMNMMEAAASEPSLDLDNLKLLELIGRGRYGAVYKGSLDERPVAVKVFSFANRQNFINEKNIYRVPLMEHDNIARFIVGDERVTADGRMEYLLVMEYYPNGSLCKYLSLHTSDWVSSCRLAHSVTRGLAYLHTELPRGDHYKPAISHRDLNSRNVLVKNDGTCVISDFGLSMRLTGNRLVRPGEEDNAAISEVGTIRYMAPEVLEGAVNLRDCESALKQVDMYALGLIYWEIFMRCTDLFPGESVPEYQMAFQTEVGNHPTFEDMQVLVSREKQRPKFPEAWKENSLAVRSLKETIEDCWDQDAEARLTAQCAEERMAELMMIWERNKSVSPTVNPMSTAMQNERNLSHNRRVPKIGPYPDYSSSSYIEDSIHHTDSIVKNISSEHSMSSTPLTIGEKNRNSINYERQQAQARIPSPETSVTSLSTNTTTTNTTGLTPSTGMTTISEMPYPDETNLHTTNVAQSIGPTPVCLQLTEEDLETNKLDPKEVDKNLKESSDENLMEHSLKQFSGPDPLSSTSSSLLYPLIKLAVEATGQQDFTQTANGQACLIPDVLPTQIYPLPKQQNLPKRPTSLPLNTKNSTKEPRLKFGSKHKSNLKQVETGVAKMNTINAAEPHVVTVTMNGVAGRNHSVNSHAATTQYANGTVLSGQTTNIVTHRAQEMLQNQFIGEDTRLNINSSPDEHEPLLRREQQAGHDEGVLDRLVDRRERPLEGGRTNSNNNNSNPCSEQDVLAQGVPSTAADPGPSKPRRAQRPNSLDLSATNVLDGSSIQIGESTQDGKSGSGEKIKKRVKTPYSLKRWRPSTWVISTESLDCEVNNNGSNRAVHSKSSTAVYLAEGGTATTMVSKDIGMNCL

SEQ ID NO: 209 - DNA, 5463 bp, Homo sapiens
gcggccgcgcgcaccagccccacggtggccacgcagacgggcgcgtccgcgacgtccacgcgaggcaccagccccacgcgcagcgccgcgcctggagctcgcgggagccccccacggccgccgccgccgccgccgctgctgggcaccgtgtcgtcgcccagctcgtcgcccacccacctgtggaccggcgaggtgagcgcggccccacccccagcccgcgtccggcatcggaggaggtctccggagcagagccgaagctcgccggagaagaggagccccagcgccccggtttgcaaagcaggtgacaaaacacgacagccttcttcaagcccctccagtattatccgacgcacttcctccctggatactcttgctgcaccgtatcttgctggacactggcctcgggatagccatgggcaagctgcaccttgcatgagggacaaagctacacagacagagagtgcatgggctgaagaatactctgaaaagaagaaagggtctcacaagcgctcagcatcttggggcagtacagatcaacttaaggagattgcaaaattacgccagcagttgcagagaagtaaacacagcagtcggcatcatcgagataaagaaagacagtctccatttcatggcaaccatgcagctattaaccagtgtcaggctcctgttccaaagagtgcacttattcctgtaattcccatcaccaaatcaacaggctcccggttccggaatagcgtggaaggattgaatcaggagattgaaataataattaaagagactggggaaaaggaagagcaacttataccgcaagatattccagatggccatcgtgctccacccccccttgtacagagaagtagcagcacgcgcagcattgacacacagacgcctggtggggcagacaggggaagcaacaacagcagccgttcccagtccgtgtccccaacatcgttcctcaccatttccaatgaaggtagcgaggagagtccttgctcagcggatgacctgcttgttgatcccagagataaagagaatgggaacaattctcctttgcccaaatatgcaacctcaccaaaacctaacaacagttatatgttcaaaagggaacctcctgagggctgtgaaagggtcaaagtctttgaggaatgctcgccaaaacagcttcatgaaatcccagccttttattgtcctgacaaaaacaaggtgaatttcattcctaaaagtggatctgctttctgcctcgtcagcatcctcaagccactccttcctaccccggatcttacactcaagggctctggccacagcctgacagtcaccactggcatgacaaccactctgctgcagcctattgctgtggcctccctgtctacaaacacagagcaagaccgagtctctcgaggaacaagtacagtcatgccatcagcttctctactcccaccaccagaaccaattgaggaagctgaaggataggtcacagtgcaacgtggctgttgttctgggaaattgggaacctcctcagatcactggattctgatggcatcgtgcgcttctggtcggctgtgatgtgctccagctttccagtgacatgtgacggcgaggcttctggaagaaaggatcccccgtgacggctctgccccacttgtgaacgccaaccctcagtgcttagcctgctttttatcaaagcactgattgaaacaagaaaggtctcattctttacctttggagagacaatatcacgtttttgttttcgaattagacttctttaaaacacacacacacacacacacacacacacacacacacacacacacacccctgatccttgccaacatgattcctaaagggagatgtgactgatgctgcaagaaccatcttttctatgaaaatgactattttataatataccaatgttacattttctgaaacgtagcaaacaggatattcaaaagattctttggtggcctctgtttcttgttccctttctagatgtgtgcttttctcagctgttttcagctttgggaccaaagggattgttgacgttttcccagcaatcttaatctcatgactatgttcttctcccaaacaaggattgataggtaaatgcattgaacaagtatatataaaaagagattaaaaagcaatattcgtacattatgtgatttatgtttttgatgtcaaaagtttgtgctttgggtgaaatatttgtataactgctgttttcttcactactcctgtacacatttcaccatgtggtcagaaaagttgtagtctgaagacaagtgctttaatatgttctcacccatattggaacttgatttaaaagtcagtgagccaaaaggaagctatccagcgttgattgctagctaagagtaaggagcccctttggttttctgtgatatatatatatatcacacgctctccctcctttaccacaggtgtcattctacctttaatcatcactgtatcatagccccaaagagatcctgaaatggctgtgcatggatttcctcctttgcccttgtgatgttgttgtcttgtggatttggttgggctagtagtttgccaggagtgtaatccagtggatagtgatccaaactgtagccgcagaatcctgtgactgacatttttctttgtggtggtggttggccctgagatttgttgcctacagattttgctaatttacccccctaacgcttcacatagtggggaaaatacacaagaagaacttgagtatgaacgataagcacctttgaaaactccatacagttttggattagggctcatcctaatataaatcactgccagtatcacatgacatcagtatgtgatttctgggtatgtggtagtgagattaaggagcagcttttttttttttttttttttgagacggagtttcactcttgttgcccaggctggagtgcaatggcgcaatctcggctcactgcgacctctgtctcccaggttcaagcagttctcctgcctcagcctcccaagtagctgggattacaggcatgcaccaccacacccagctaattttgtatttttagtatatatggggtttcaccatgttggtcaggctgttcttgaactcctggcctcaggtgatctgctcgtcttggcctcccaaagtgctgggattacaggtgtgagccaccacgcccatccaggagcagctctttttttaaaagtgagtttcagcaaacagtattgaataaaagcatccttttcatatcttcatatactactttatgatgcaataatttactgttcctatacatattataaggtagaaaaaagtttttaaatccttataaagaggatgcagtttagaaggttaatatgtcagcttacccagacatattctatcaaggaaaacctagtggtagcaataaatctttggaaaggacttcttatactcatgtacctttaaaacatctaagcaatttaaaataatccctgttgagtttaaattcgagatgcatttaggtaaattggataaattcaacatttgaataaatccgtcaggttttagatggtgggattgatgaactttggtactttctcaatccaaaactaatttatttggaactagtacgttatggcttctcagtcatgaaaagctcagttatttggggtctacattttctcactgagagccttgatattttgccttctttgttatgcattataacttgactgtatcaccactgagtatctgctgtatcagaagttcagaagaaaaggtaaaactgaaatcagaatgggggtagaggaagttaaaaacaagttatttaaaaagaactcttggtttttggatgacttgaattctgttaaatctgtgttcttggccttgcacttccgttcctcttccatctctatccctgctagtcacaatggcattttagaactagaatgccactctgtagaggttttcccttttgctctgttgtgcctatttgtctaattcatatctttctgtggagtttcatatgtccttaatctaaagtaacttaaaattggaatggaagaacaagtttcagaattatttacagtcttatacatagaacttctagtgtaatgtttggttgtaaggagaatgtgaatttgcaggtaaatgaattgtatggcaaccagacagatccctggggtttgggagaaatagagcttgagatttgaaaaaaaggtacaaggtacaaaacaactctaactgccagtgccaaagggctaatttttaagcatgtaagctttaccacagtcttgaaaaaaatattaaccataggttcattcagctgttttatttaacccttagttccctggtggttgattttttttttaaatgggtctccagctttccagtgaaatgtgacactctcaatagaatgcataatgttggtttctaaagttacactccataattattgttattctgtagaaaactgtacagaaggtaaatagaatagcttcaatgggaatataatttaaatttttttaattttataaaaatttatttccattgcattaaaagaaatgggtagcatgtgtctttcagagaaaggagctatttggttattcactttgtcaatcttaggtttttttaaatctttaaacaatttcttctttgtgatgataaaaataatataaatttactgtttctgatcatgactgagtctattacttgtcatggcttttgtacgcaactgtgttttaaaaataccggttttgcctctttggttacatgtggtgagcatggatgtcaagattatttttcaactagattattcaatttgttttatatttcttatacttaatacttatgactacagtccaaatcagtcttttagaaggtgctcttgctaactgtggaatatttgacgacatgaaagtcctttttctttgctttcagtggttggctttcactgaaagaaagtgtaaaaaaagtcagaatttatagctttcactatgtccaagactaggactgggttataaagattttcttttgtgaaggaaaataaaagaaaatttgccactactgcatttactttactattgtaaacttaagattcattccttagtctttggaattttgatgtctcaaaaccagatgagtggaagtgctgaatttgcaaaataaagctaagaatgcttaactctgcactttaagttctactctgaccaaattgaagatgagcagagcagccctgaacagcattttgtttatacagtcttgtttaagaatagaatttttttaactcttcattttttgtctctgtggaagctgtgtaactctttttaaaatgcaatttaaaacattttgttattctaacaattctctcaaaaaacagcatttccaatggtaatcggtattgttacgctgtacttatgtattccctgtacctgaacacttgttgctgcctcacaagaaaatagaacttttatgttaaaaataaagtctgttcttcttga

SEQ ID NO: 210 - protein, 345 aa, Homo sapiens
MRDKATQTESAWAEEYSEKKKGSHKRSASWGSTDQLKEIAKLRQQLQRSKHSSRHHRDKERQSPFHGNHAAINQCQAPVPKSALIPVIPITKSTGSRFRNSVEGLNQEIEIIIKETGEKEEQLIPQDIPDGHRAPPPLVQRSSSTRSIDTQTPGGADRGSNNSSRSQSVSPTSFLTISNEGSEESPCSADDLLVDPRDKENGNNSPLPKYATSPKPNNSYMFKREPPEGCERVKVFEECSPKQLHEIPAFYCPDKNKVNFIPKSGSAFCLVSILKPLLPTPDLTLKGSGHSLTVTTGMTTTLLQPIAVASLSTNTEQDRVSRGTSTVMPSASLLPPPEPIEEAEG

SEQ ID NO: 211 - DNA, 1936 bp, Homo sapiens
ccgctcgccctgaacccagtgcctgcagccatggctcccggccagctcgccttatttagtgtctctgacaaaaccggccttgtggaatttgcaagaaacctgaccgctcttggtttgaatctggtcgcttccggagggactgcaaaagctctcagggatgctggtctggcagtcagagatgtctctgagttgacgggatttcctgaaatgttggggggacgtgtgaaaactttgcatcctgcagtccatgctggaatcctagctcgtaatattccagaagataatgctgacatggccagacttgatttcaatcttataagagttgttgcctgcaatctctatccctttgtaaagacagtggcttctccaggtgtaactgttgaggaggctgtggagcaaattgacattggtggagtaaccttactgagagctgcagccaaaaaccacgctcgagtgacagtggtgtgtgaaccagaggactatgtggtggtgtccacggagatgcagagctccgagagtaaggacacctccttggagactagacgccagttagccttgaaggcattcactcatacggcacaatatgatgaagcaatttcagattatttcaggaaacagtacagcaaaggcgtatctcagatgcccttgagatatggaatgaacccacatcagacccctgcccagctgtacacactgcagcccaagcttcccatcacagttctaaatggagcccctggatttataaacttgtgcgatgctttgaacgcctggcagctggtgaaggaactcaaggaggctttaggtattccagccgctgcctctttcaaacatgtcagcccagcaggtgctgctgttggaattccactcagtgaagatgaggccaaagtctgcatggtttatgatctctataaaaccctcacacccatctcagcggcatatgcaagagcaagaggggctgataggatgtcttcatttggtgattttgttgcattgtccgatgtttgtgatgtaccaactgcaaaaattatttccagagaagtatctgatggtataattgccccaggatatgaagaagaagccttgacaatactttccaaaaagaaaaatggaaactattgtgtccttcagatggaccaatcttacaaaccagatgaaaatgaagttcgaactctctttggtcttcatttaagccagaagagaaataatggtgtcgtcgacaagtcattatttagcaatgttgttaccaaaaataaagatttgccagagtctgccctccgagacctcatcgtagccaccattgctgtcaagtacactcagtctaactctgtgtgctacgccaagaacgggcaggttatcggcattggagcaggacagcagtctcgtatacactgcactcgccttgcaggagataaggcaaactattggtggcttagacaccatccacaagtgctttcgatgaagtttaaaacaggagtgaagagagcagaaatctccaatgccatcgatcaatatgtgactggaaccattggcgaggatgaagatttgataaagtggaaggcactgtttgaggaagtccctgagttactcactgaggcagagaagaaggaatgggttgagaaactgactgaagtttctatcagctctgatgccttcttccctttccgagataacgtagacagagctaaaaggagtggtgtggcgtacattgcggctccctccggttctgctgctgacaaagttgtgattgaggcctgcgacgaactgggaatcatcctcgctcatacgaaccttcggctcttccaccactgattttaccacacactgttttttggcttgcttatgtgtaggtgaacagtcacgcctgaaactttgaggataactttttaaaaaaataaaacagtatctcttaaaaaaaaaaaaaaaaaaaaaaaaaaaa

SEQ ID NO: 212 - protein, 592 aa, Homo sapiens
MAPGQLALFSVSDKTGLVEFARNLTALGLNLVASGGTAKALRDAGLAVRDVSELTGFPEMLGGRVKTLHPAVHAGILARNIPEDNADMARLDFNLIRVVACNLYPFVKTVASPGVTVEEAVEQIDIGGVTLLRAAAKNHARVTVVCEPEDYVVVSTEMQSSESKDTSLETRRQLALKAFTHTAQYDEAISDYFRKQYSKGVSQMPLRYGMNPHQTPAQLYTLQPKLPITVLNGAPGFINLCDALNAWQLVKELKEALGIPAAASFKHVSPAGAAVGIPLSEDEAKVCMVYDLYKTLTPISAAYARARGADRMSSFGDFVALSDVCDVPTAKIISREVSDGIIAPGYEEEALTILSKKKNGNYCVLQMDQSYKPDENEVRTLFGLHLSQKRNNGVVDKSLFSNVVTKNKDLPESALRDLIVATIAVKYTQSNSVCYAKNGQVIGIGAGQQSRIHCTRLAGDKANYWWLRHHPQVLSMKFKTGVKRAEISNAIDQYVTGTIGEDEDLIKWKALFEEVPELLTEAEKKEWVEKLTEVSISSDAFFPFRDNVDRAKRSGVAYIAAPSGSAADKVVIEACDELGIILAHTNLRLFHH

SEQ ID NO: 213 - DNA, 3530 bp, Homo sapiens
gcaatactcagtggataaaaggcttgcagtcccagctgggaaaaagagtcccattatctcccagctgcatagacattccatacggcttggttctgcctggacgcacagcatgcctggctgagagcttgaaacagagttctgcagaaaaactgtaaagatcccgagacatttccctggtaagatctactcttgagatactgactggaagatagactgttttgttccacctgattgtatgggagaaatttttgaccttagaaagtggaaatgaggttgctatggaaactggtaattctgctgccactcataaactcttctgcaggtgatggtcttttaagccgtcctatttttactcaggagccacatgatgtcatttttcctttggatttatcaaaatctgaggtcatcctgaattgtgctgctaatggttacccttcgcctcattataggtggaagcaaaatggcacagacattgattttactatgagttatcactacaggttggatggaggcagtcttgcaatcaatagcccccacacagatcaagatattggcatgtaccagtgcctggccaccaatcttctggggacaattctgagtcggaaggcaaagctccaatttgcatatattgaagactttgaaactaaaacaagaagcacagtatctgtccgagaaggtcaaggtgtggtgcttctctgtggcccaccgccacattttggagatttatcttatgcatggaccttcaatgataaccccttatacgtccaagaggacaataggcgatttgtatctcaagagacgggaaacttgtacattgccaaagtggaaccatcagatgtgggcaactacacttgctttataactaacaaagaggcccagagaagtgttcaaggtccacccactccattagtgcagcgcactgatggtgtgatgggggaatatgaaccaaagattgaagtgcgttttcctgaaactatacaagctgcaaaggattcatctgtaaaactggaatgttttgcccttggaaatccagtccccgatattagttggagaaggttggacgggagcccgttgccagggaaagtcaagtacagcaaatcccaagctatccttgaaatcccgaacttccaacaagaagatgaaggcttttatgagtgcattgcaagcaaccttcgaggaagaaaccttgcaaagggtcaactcattttttatgctcctccagaatgggaacagaaaatccaaaatacacacctctctatctatgacaacttgctctgggaatgtaaagctagtggaaagccaaacccttggtatacatggttaaaaaatggtgaacgactcaacccagaggagagaattcaaatagaaaatgggacactcatcataacgatgctgaatgtgtcagattctggtgtgtaccaatgtgctgcagaaaacaaatatcagataatttatgcaaatgctgaattgagagttttagcctcagctccagatttctccaaaagtccagttaaaaaaaagtcttttgttcaagttggtggggatattgttatcggatgcaaaccaaatgcttttcccagggcagctatctcttggaaaagaggaacggagacccttagacaaagcaaaagaatatttctcttggaggatggcagcctcaagatatataatattaccaggtcagatgctggatcatatacatgcatagccacaaatcagtttggcactgcaaagaacactggcagcctcattgtaaaagagagaactgtcattaccgtcccaccttccaaaatggatgttacagttggcgagagtatagtgctaccatgccaggtgtcccatgacccctccattgaagtggtatttgtatggtttttcaatggagatgtcatagacttaaaaaaaggagtggctcattttgaaaggattggaggagaatctgttggggatttgatgataaggaatattcagttacatcattcaggaaaatatctctgcacagtacaaacaaccctagaaagtttatctgcagtagccgatatcattgttagaggtccaccaggtcctcctgaggatgtgcaagtggaagacatttccagtactacttctcaactaagttggagagcaggcccagataataacagtcccattcaaatatttactattcagactcggacaccattttctgtgggttggcaggctgttgctacagttccagaaattctcaatggtaagacatacaatgcaacagtggttggtttgagtccttgggtggaatatgaatttcgtgttgttgccggcaacagcattgggattggagaaccaagtgaaccatcagaattgttaagaactaaagcatcagtccctgttgtggcaccagtaaacatccatggaggtggaggaagtcggtctgaactcgtcattacgtgggagtcaattccagaagaactgcagaatggggagggatttggatatatcatcatgttccggccagtgggctcgacaacctggtccaaggagaaagtgtcatctgtggaatcatcaaggtttgtctacagaaatgaaagcatcatcccactgtctccctttgaagtcaaagtgggtgtgtataataatgaaggagaaggatccctgagtactgtgaccattgtctactctggggaagatgaacctcaactggccccaaggggaacttctctccagagtttttctgcttctgaaatggaggtttcatggaatgctattgcctggaatagaaacactggaagagtgctgggctatgaggtcttatactggacagatgactccaaagaatccatgataggtaaaattagagtcagtggaaatgtcacaaccaaaaacatcacggggctgaaagctaataccatctactttgcttccgtaagagcttacaacactgctgggacagggccctcaagccccccagtcaatgttaccaccaaaaagtctcctccaagccaaccaccagcaaacattgcctggaagctgacaaactctaaattatgcttgaactgggagcatgtaaaaaccatggaaaatgagtctgaagttttggggtacaagattctgtaccggcaaaacagacagagtaaaactcatattttggaaacaaacaatacatcagctgagcttctggttccatttgaagaagactacttaattgaaataagaacagtcagtgatggtggagatggaagcagcagtgaggaaattaggattccaaaaatgtcaagtttgagttccagaggaattcaattcttagaacctagcacccattttctttccattgtcattgtgatttttcactgttttgctattcagccacttatctgatgaataaaaccataaatctttgagagttttttgaaagcaaatcattctgtatatatgctctccagcctctgacacaagatgcgttcttaatacagacttgtttgcaaagaaaaaaaaaagtatattattaaaatcctgtaaatatctatggtatattaataaaacaattttaaaca

SEQ ID NO: 214 - protein, 1028 aa, Homo sapiens
MRLLWKLVILLPLINSSAGDGLLSRPIFTQEPHDVIFPLDLSKSEVILNCAANGYPSPHYRWKQNGTDIDFTMSYHYRLDGGSLAINSPHTDQDIGMYQCLATNLLGTILSRKAKLQFAYIEDFETKTRSTVSVREGQGVVLLCGPPPHFGDLSYAWTFNDNPLYVQEDNRRFVSQETGNLYIAKVEPSDVGNYTCFITNKEAQRSVQGPPTPLVQRTDGVMGEYEPKIEVRFPETIQAAKDSSVKLECFALGNPVPDISWRRLDGSPLPGKVKYSKSQAILEIPNFQQEDEGFYECIASNLRGRNLAKGQLIFYAPPEWEQKIQNTHLSIYDNLLWECKASGKPNPWYTWLKNGERLNPEERIQIENGTLIITMLNVSDSGVYQCAAENKYQIIYANAELRVLASAPDFSKSPVKKKSFVQVGGDIVIGCKPNAFPRAAISWKRGTETLRQSKRIFLLEDGSLKIYNITRSDAGSYTCIATNQFGTAKNTGSLIVKERTVITVPPSKMDVTVGESIVLPCQVSHDPSIEVVFVWFFNGDVIDLKKGVAHFERIGGESVGDLMIRNIQLHHSGKYLCTVQTTLESLSAVADIIVRGPPGPPEDVQVEDISSTTSQLSWRAGPDNNSPIQIFTIQTRTPFSVGWQAVATVPEILNGKTYNATVVGLSPWVEYEFRVVAGNSIGIGEPSEPSELLRTKASVPVVAPVNIHGGGGSRSELVITWESIPEELQNGEGFGYIIMFRPVGSTTWSKEKVSSVESSRFVYRNESIIPLSPFEVKVGVYNNEGEGSLSTVTIVYSGEDEPQLAPRGTSLQSFSASEMEVSWNAIAWNRNTGRVLGYEVLYWTDDSKESMIGKIRVSGNVTTKNITGLKANTIYFASVRAYNTAGTGPSSPPVNVTTKKSPPSQPPANIAWKLTNSKLCLNWEHVKTMENESEVLGYKILYRQNRQSKTHILETNNTSAELLVPFEEDYLIEIRTVSDGGDGSSSEEIRIPKMSSLSSRGIQFLEPSTHFLSIVIVIFHCFAIQPLI

SEQ ID NO: 215 - DNA, 5134 bp, Homo sapiens
ggcctggcgggaaagtcgaaaactacgggcggcgacggcttctcggaagtaatttaagtgcacaagacattggtcaaaatggtttccaaaagaagactgtcaaaatctgaggataaagagagcctgacagaagatgcctccaaaaccaggaagcaaccactttccaaaaagacaaagaaatctcatattgctaatgaagttgaagaaaatgacagcatctttgtaaagcttcttaagatatcaggaattattcttaaaacgggagagagtcagaatcaactagctgtggatcaaatagctttccaaaagaagctctttcagaccctgaggagacacccttcctatcccaaaataatagaagaatttgttagtggcctggagtcttacattgaggatgaagacagtttcaggaactgccttttgtcttgtgagcgtctgcaggatgaggaagccagtatgggtgcatcttattctaagagtctcatcaaactgcttctggggattgacatactgcagcctgccattatcaaaaccttatttgagaagttgccagaatatttttttgaaaacaagaacagtgatgaaatcaacatacctcgactcattgtcagtcaactaaaatggcttgacagagttgtggatggcaaggacctcaccaccaagatcatgcagctgatcagtattgctccagagaacctgcagcatgacatcatcaccagcctacctgagatcctaggggattcccagcacgctgatgtggggaaagaactcagtgacctactgatagagaatacttcactcactgtcccaatcctggatgtcctttcaagcctccgacttgacccaaacttcctattgaaggttcgccagttggtgatggataagttgtcgtctattagattggaggatttacctgtgataataaagttcattcttcattccgtaacagccatggatacacttgaggtaatttctgagcttcgggagaagttggatctgcagcattgtgttttgccatcacggttacaggcttcccaagtaaagttgaaaagtaaaggacgagcaagttcctcaggaaatcaagaaagcagcggtcagagctgtattattctcctctttgatgtaataaagtcagctattagatatgagaaaaccatttcagaagcctggattaaggcaattgaaaacactgcctcagtatctgaacacaaggtgtttgacctggtgatgcttttcatcatctatagcaccaatactcagacaaagaagtacattgacagggtgctaagaaataagattcgatcaggctgcattcaagaacagctgctccagagtacattctctgttcattacttagttcttaaggatatgtgttcatccattctgtcgctggctcagagtttgcttcactctctagaccagagtataatttcatttggcagtctcctatacaaatatgcatttaagttttttgacacgtactgccagcaggaagtggttggtgccttagtgacccatatctgcagtgggaatgaagctgaagttgatactgccttagatgtccttctagagttggtagtgttaaacccatctgctatgatgatgaatgctgtctttgtaaagggcattttagattatctggataacatatcccctcagcaaatacgaaaactcttctatgttctcagcacactggcatttagcaaacagaatgaagccagcagccacatccaggatgacatgcacttggtgataagaaagcagctctctagcaccgtattcaagtacaagctcattgggattattggtgctgtgaccatggctggcatcatggcggcagacagaagtgaatcacctagtttgacccaagagagagccaacctgagcgatgagcagtgcacacaggtgacctccttgttgcagttggttcattcctgcagtgagcagtctcctcaggcctctgcactttactatgatgaatttgccaacctgatccaacatgaaaagctggatccaaaagccctggaatgggttgggcataccatctgtaatgatttccaggatgccttcgtagtggactcctgtgttgttccggaaggtgactttccatttcctgtgaaagcactgtacggactggaagaatacgacactcaggatgggattgccataaacctcctgccgctgctgttttctcaggactttgcaaaagatgggggtccggtgacctcacaggaatcaggccaaaaattggtgtctccgctgtgcctggctccgtatttccggttactgagactttgtgtggagagacagcataacggaaacttggaggagattgatggtctactagattgtcctatattcctaactgacctggagcctggagagaagttggagtccatgtctgctaaagagcgttcattcatgtgttctctcatatttcttactctcaactggttccgagagattgtaaatgccttctgccaggaaacatcacctgagatgaaggggaaggtgctcactcggttaaagcacattgtagaattgcaaataatcctggaaaagtacttggcagtcaccccagactatgtccctcctcttggaaactttgatgtggaaactttagatataacacctcatactgttactgctatttcagcaaaaatcagaaagaaaggaaaaatagaaaggaaacaaaaaacagatggcagcaagacatcctcctctgacacactttcagaagagaaaaattcagaatgtgaccctacgccatctcatagaggccagctaaacaaggagttcacagggaaggaagaaaagacatcattgttactacataattcccatgcttttttccgagagctggacattgaggtcttctctattctacattgtggacttgtgacgaagttcatcttagatactgaaatgcacactgaagctacagaagttgtgcaacttgggccccctgagctgcttttcttgctggaagatctctcccagaagctggagagtatgctgacacctcctattgccaggagagtcccctttctcaagaacaaaggaagccggaatattggattctcacatctccaacagagatctgcccaagaaattgttcattgtgtttttcaactgctgaccccaatgtgtaaccacctggagaacattcacaactattttcagtgtttagctgctgagaatcacggtgtagttgatggaccaggagtgaaagttcaggagtaccacataatgtcttcctgctatcagaggctgctgcagatttttcatgggctttttgcttggagtggattttctcaacctgaaaatcagaatttactgtattcagccctccatgtccttagtagccgactgaaacagggagaacacagccagcctttggaggaactactcagccagagcgtccattacttgcagaatttccatcaaagcattcccagtttccagtgtgctctttatctcatcagacttttgatggttattttggagaaatcaacagcttctgctcagaacaaagaaaaaattgcttcccttgccagacaattcctctgtcgggtgtggccaagtggggataaagagaagagcaacatctctaatgaccagctccatgctctgctctgtatctacctggagcacacagagagcattctgaaggccatagaggagattgctggtgttggtgtcccagaactgatcaactctcctaaagatgcatcttcctccacattccctacactgaccaggcatacttttgttgttttcttccgtgtgatgatggctgaactagagaagacggtgaaaaaaattgagcctggcacagcagcagactcgcagcagattcatgaagagaaactcctctactggaacatggctgttcgagacttcagtatcctcatcaacttgataaaggtatttgatagtcatcctgttctgcatgtatgtttgaagtatgggcgtctctttgtggaagcatttctgaagcaatgtatgccgctcctagacttcagttttagaaaacaccgggaagatgttctgagcttactggaaaccttccagttggacacaaggctgcttcatcacctgtgtgggcattccaagattcaccaggacacgagactcacccaacatgtgcctctgctcaaaaagaccctggaacttttagtttgcagagtcaaagctatgctcactctcaacaattgtagagaggctttctggctgggcaatctaaaaaaccgggacttgcagggtgaagagattaagtcccaaaattcccaggagagcacagcagatgagagtgaggatgacatgtcatcccaggcctccaagagcaaagccactgaggatggtgaagaagacgaagtaagtgctggagaaaaggagcaagatagtgatgagagttatgatgactctgattagaccccagataaattgttgcctgcttctgtgtctctgccagcctgtgatcattttgtgttagagtttgaaatccgctgtttgcctttcttactggtaggatccttttttgttcctctttttttttttttttttttttttttaaagacggggactcgctgtgtttcccaggctggagtgcagtgctgcaatcttggctcactgcaacctccatctcctaggttcaagcgattctcctgcctcagcctcctgagtagctgggacgacaggcacatgccaccatgcccagctaatttttgtatttttagtagatacggggttttaccatgtcggccagatggtctcaatctcctgaactcatgatccacctgcctcagcctcccaaagtgctgggattacaggcatgagccaccgctcccagccatattttgttcttaaagtggggtctttattaacttgtggacatcatggattgtctaacaccatcacagtccctggctcaggattctaatgtagcattatttattggtttggataaacccagctgtgctacactgcagagtaaaatctctgagtcatgattctggactttgggagctagttttgaaactctgatttattgtagaacttaggcttgtaccaattttacaaataaattctgttctaagttcaaaaaaaaaaaaaaaaaaaaaaaaaaaaaaaa

SEQ ID NO: 216 - protein, 1451 aa, Homo sapiens
MVSKRRLSKSEDKESLTEDASKTRKQPLSKKTKKSHIANEVEENDSIFVKLLKISGIILKTGESQNQLAVDQIAFQKKLFQTLRRHPSYPKIIEEFVSGLESYIEDEDSFRNCLLSCERLQDEEASMGASYSKSLIKLLLGIDILQPAIIKTLFEKLPEYFFENKNSDEINIPRLIVSQLKWLDRVVDGKDLTTKIMQLISIAPENLQHDIITSLPEILGDSQHADVGKELSDLLIENTSLTVPILDVLSSLRLDPNFLLKVRQLVMDKLSSIRLEDLPVIIKFILHSVTAMDTLEVISELREKLDLQHCVLPSRLQASQVKLKSKGRASSSGNQESSGQSCIILLFDVIKSAIRYEKTISEAWIKAIENTASVSEHKVFDLVMLFIIYSTNTQTKKYIDRVLRNKIRSGCIQEQLLQSTFSVHYLVLKDMCSSILSLAQSLLHSLDQSIISFGSLLYKYAFKFFDTYCQQEVVGALVTHICSGNEAEVDTALDVLLELVVLNPSAMMMNAVFVKGILDYLDNISPQQIRKLFYVLSTLAFSKQNEASSHIQDDMHLVIRKQLSSTVFKYKLIGIIGAVTMAGIMAADRSESPSLTQERANLSDEQCTQVTSLLQLVHSCSEQSPQASALYYDEFANLIQHEKLDPKALEWVGHTICNDFQDAFVVDSCVVPEGDFPFPVKALYGLEEYDTQDGIAINLLPLLFSQDFAKDGGPVTSQESGQKLVSPLCLAPYFRLLRLCVERQHNGNLEEIDGLLDCPIFLTDLEPGEKLESMSAKERSFMCSLIFLTLNWFREIVNAFCQETSPEMKGKVLTRLKHIVELQIILEKYLAVTPDYVPPLGNFDVETLDITPHTVTAISAKIRKKGKIERKQKTDGSKTSSSDTLSEEKNSECDPTPSHRGQLNKEFTGKEEKTSLLLHNSHAFFRELDIEVFSILHCGLVTKFILDTEMHTEATEVVQLGPPELLFLLEDLSQKLESMLTPPIARRVPFLKNKGSRNIGFSHLQQRSAQEIVHCVFQLLTPMCNHLENIHNYFQCLAAENHGVVDGPGVKVQEYHIMSSCYQRLLQIFHGLFAWSGFSQPENQNLLYSALHVLSSRLKQGEHSQPLEELLSQSVHYLQNFHQSIPSFQCALYLIRLLMVILEKSTASAQNKEKIASLARQFLCRVWPSGDKEKSNISNDQLHALLCIYLEHTESILKAIEEIAGVGVPELINSPKDASSSTFPTLTRHTFVVFFRVMMAELEKTVKKIEPGTAADSQQIHEEKLLYWNMAVRDFSILINLIKVFDSHPVLHVCLKYGRLFVEAFLKQCMPLLDFSFRKHREDVLSLLETFQLDTRLLHHLCGHSKIHQDTRLTQHVPLLKKTLELLVCRVKAMLTLNNCREAFWLGNLKNRDLQGEEIKSQNSQESTADESEDDMSSQASKSKATEDGEEDEVSAGEKEQDSDESYDDSD

SEQ ID NO: 217 - DNA, 5204 bp, Homo sapiens
ggcctggcgggaaagtcgaaaactacgggcggcgacggcttctcggaagtaatttaagtgcacaagacattggtcaaaatggtttccaaaagaagactgtcaaaatctgaggataaagagagcctgacagaagatgcctccaaaaccaggaagcaaccactttccaaaaagacaaagaaatctcatattgctaatgaagttgaagaaaatgacagcatctttgtaaagcttcttaagatatcaggaattattcttaaaacgggagagagtcagaatcaactagctgtggatcaaatagctttccaaaagaagctctttcagaccctgaggagacacccttcctatcccaaaataatagaagaatttgttagtggcctggagtcttacattgaggatgaagacagtttcaggaactgccttttgtcttgtgagcgtctgcaggatgaggaagccagtatgggtgcatcttattctaagagtctcatcaaactgcttctggggattgacatactgcagcctgccattatcaaaaccttatttgagaagttgccagaatatttttttgaaaacaagaacagtgatgaaatcaacatacctcgactcattgtcagtcaactaaaatggcttgacagagttgtggatggcaaggacctcaccaccaagatcatgcagctgatcagtattgctccagagaacctgcagcatgacatcatcaccagcctacctgagatcctaggggattcccagcacgctgatgtggggaaagaactcagtgacctactgatagagaatacttcactcactgtcccaatcctggatgtcctttcaagcctccgacttgacccaaacttcctattgaaggttcgccagttggtgatggataagttgtcgtctattagattggaggatttacctgtgataataaagttcattcttcattccgtaacagccatggatacacttgaggtaatttctgagcttcgggagaagttggatctgcagcattgtgttttgccatcacggttacaggcttcccaagtaaagttgaaaagtaaaggacgagcaagttcctcaggaaatcaagaaagcagcggtcagagctgtattattctcctctttgatgtaataaagtcagctattagatatgagaaaaccatttcagaagcctggattaaggcaattgaaaacactgcctcagtatctgaacacaaggtgtttgacctggtgatgcttttcatcatctatagcaccaatactcagacaaagaagtacattgacagggtgctaagaaataagattcgatcaggctgcattcaagaacagctgctccagagtacattctctgttcattacttagttcttaaggatatgtgttcatccattctgtcgctggctcagagtttgcttcactctctagaccagagtataatttcatttggcagtctcctatacaaatatgcatttaagttttttgacacgtactgccagcaggaagtggttggtgccttagtgacccatatctgcagtgggaatgaagctgaagttgatactgccttagatgtccttctagagttggtagtgttaaacccatctgctatgatgatgaatgctgtctttgtaaagggcattttagattatctggataacatatcccctcagcaaatacgaaaactcttctatgttctcagcacactggcatttagcaaacagaatgaagccagcagccacatccaggatgacatgcacttggtgataagaaagcagctctctagcaccgtattcaagtacaagctcattgggattattggtgctgtgaccatggctggcatcatggcggcagacagaagtgaatcacctagtttgacccaagagagagccaacctgagcgatgagcagtgcacacaggtgacctccttgttgcagttggttcattcctgcagtgagcagtctcctcaggcctctgcactttactatgatgaatttgccaacctgatccaacatgaaaagctggatccaaaagccctggaatgggttgggcataccatctgtaatgatttccaggatgccttcgtagtggactcctgtgttgttccggaaggtgactttccatttcctgtgaaagcactgtacggactggaagaatacgacactcaggatgggattgccataaacctcctgccgctgctgttttctcaggactttgcaaaagatgggggtccggtgacctcacaggaatcaggccaaaaattggtgtctccgctgtgcctggctccgtatttccggttactgagactttgtgtggagagacagcataacggaaacttggaggagattgatggtctactagattgtcctatattcctaactgacctggagcctggagagaagttggagtccatgtctgctaaagagcgttcattcatgtgttctctcatatttcttactctcaactggttccgagagattgtaaatgccttctgccaggaaacatcacctgagatgaaggggaaggtgctcactcggttaaagcacattgtagaattgcaaataatcctggaaaagtacttggcagtcaccccagactatgtccctcctcttggaaactttgatgtggaaactttagatataacacctcatactgttactgctatttcagcaaaaatcagaaagaaaggaaaaatagaaaggaaacaaaaaacagatggcagcaagacatcctcctctgacacactttcagaagagaaaaattcagaatgtgaccctacgccatctcatagaggccagctaaacaaggagttcacagggaaggaagaaaagacatcattgttactacataattcccatgcttttttccgagagctggacattgaggtcttctctattctacattgtggacttgtgacgaagttcatcttagatactgaaatgcacactgaagctacagaagttgtgcaacttgggccccctgagctgcttttcttgctggaagatctctcccagaagctggagagtatgctgacacctcctattgccaggagagtcccctttctcaagaacaaaggaagccggaatattggattctcacatctccaacagagatctgcccaagaaattgttcattgtgtttttcaactgctgaccccaatgtgtaaccacctggagaacattcacaactattttcagtgtttagctgctgagaatcacggtgtagttgatggaccaggagtgaaagttcaggagtaccacataatgtcttcctgctatcagaggctgctgcagatttttcatgggctttttgcttggagtggattttctcaacctgaaaatcagaatttactgtattcagccctccatgtccttagtagccgactgaaacagggagaacacagccagcctttggaggaactactcagccagagcgtccattacttgcagaatttccatcaaagcattcccagtttccagtgtgctctttatctcatcagacttttgatggttattttggagaaatcaacagcttctgctcagaacaaagaaaaaattgcttcccttgccagacaattcctctgtcgggtgtggccaagtggggataaagagaagagcaacatctctaatgaccagctccatgctctgctctgtatctacctggagcacacagagagcattctgaaggccatagaggagattgctggtgttggtgtcccagaactgatcaactctcctaaagatgcatcttcctccacattccctacactgaccaggcatacttttgttgttttcttccgtgtgatgatggctgaactagagaagacggtgaaaaaaattgagcctggcacagcagcagactcgcagcagattcatgaagagaaactcctctactggaacatggctgttcgagacttcagtatcctcatcaacttgataaaggtatttgatagtcatcctgttctgcatgtatgtttgaagtatgggcgtctctttgtggaagcatttctgaagcaatgtatgccgctcctagacttcagttttagaaaacaccgggaagatgttctgagcttactggaaaccttccagttggacacaaggctgcttcatcacctgtgtgggcattccaagattcaccaggacacgagactcacccaacatgtgcctctgctcaaaaagaccctggaacttttagtttgcagagtcaaagctatgctcactctcaacaattgtagagaggctttctggctgggcaatctaaaaaaccgggacttgcagggtgaagagattaagtcccaaaattcccaggagagcacagcagatgagagtgaggatgacatgtcatcccaggcctccaagagcaaagccactgaggtatctctacaaaacccaccagagtctggcactgatggttgcattttgttaattgttctaagttggtggagcagaactttgcctacttatgtttattgtcaaatgcttctatgcccatttccattccctccataacagcttctgtgcttatataatttttgggacccagaagaaacaacgacacaatcttagaatcactcctgagtatctcgagttgtggcatttgttatagagttgacaattttctgcattatagcctctcattttccatgaattcatatctgaaaccattttagaagggagaagtcatcgaagtattttctgagtgttgagaagaatgagttaaaccatttaaacacatttgaaacatacaaaaatagaaatgtgaaagcatttggtgaaagccaaagcacagagtcagaagctgccaccttagagaactgaaataaaaatagaagttcttacgcttttttgtggtacagatgctttcgacaatttaaagaaagctaaataaaaatgtagacatggctggcgcagtggctcatgcttgtaatcctagcactttttgaggccaaggtaggaggattgcttgagtccgggagctcaaggcaaagctgcacaacataacaagaccctatctccacaaaaaaaatgaaaaataaacctgggtgcggtggctcacacctgtaatcccagcactttgggaggccgatgtgggcagatcacaaggtcaggagttcaagaccagcctggccaacatagtgaaaccccatctctactgaaaatacaaaaattagctgggtgtggtggcacgtgcctgttatctcagctacttgggaggctga

SEQ ID NO: 218 - protein, 1471 aa, Homo sapiens
MVSKRRLSKSEDKESLTEDASKTRKQPLSKKTKKSHIANEVEENDSIFVKLLKISGIILKTGESQNQLAVDQIAFQKKLFQTLRRHPSYPKIIEEFVSGLESYIEDEDSFRNCLLSCERLQDEEASMGASYSKSLIKLLLGIDILQPAIIKTLFEKLPEYFFENKNSDEINIPRLIVSQLKWLDRVVDGKDLTTKIMQLISIAPENLQHDIITSLPEILGDSQHADVGKELSDLLIENTSLTVPILDVLSSLRLDPNFLLKVRQLVMDKLSSIRLEDLPVIIKFILHSVTAMDTLEVISELREKLDLQHCVLPSRLQASQVKLKSKGRASSSGNQESSGQSCIILLFDVIKSAIRYEKTISEAWIKAIENTASVSEHKVFDLVMLFIIYSTNTQTKKYIDRVLRNKIRSGCIQEQLLQSTFSVHYLVLKDMCSSILSLAQSLLHSLDQSIISFGSLLYKYAFKFFDTYCQQEVVGALVTHICSGNEAEVDTALDVLLELVVLNPSAMMMNAVFVKGILDYLDNISPQQIRKLFYVLSTLAFSKQNEASSHIQDDMHLVIRKQLSSTVFKYKLIGIIGAVTMAGIMAADRSESPSLTQERANLSDEQCTQVTSLLQLVHSCSEQSPQASALYYDEFANLIQHEKLDPKALEWVGHTICNDFQDAFVVDSCVVPEGDFPFPVKALYGLEEYDTQDGIAINLLPLLFSQDFAKDGGPVTSQESGQKLVSPLCLAPYFRLLRLCVERQHNGNLEEIDGLLDCPIFLTDLEPGEKLESMSAKERSFMCSLIFLTLNWFREIVNAFCQETSPEMKGKVLTRLKHIVELQIILEKYLAVTPDYVPPLGNFDVETLDITPHTVTAISAKIRKKGKIERKQKTDGSKTSSSDTLSEEKNSECDPTPSHRGQLNKEFTGKEEKTSLLLHNSHAFFRELDIEVFSILHCGLVTKFILDTEMHTEATEVVQLGPPELLFLLEDLSQKLESMLTPPIARRVPFLKNKGSRNIGFSHLQQRSAQEIVHCVFQLLTPMCNHLENIHNYFQCLAAENHGVVDGPGVKVQEYHIMSSCYQRLLQIFHGLFAWSGFSQPENQNLLYSALHVLSSRLKQGEHSQPLEELLSQSVHYLQNFHQSIPSFQCALYLIRLLMVILEKSTASAQNKEKIASLARQFLCRVWPSGDKEKSNISNDQLHALLCIYLEHTESILKAIEEIAGVGVPELINSPKDASSSTFPTLTRHTFVVFFRVMMAELEKTVKKIEPGTAADSQQIHEEKLLYWNMAVRDFSILINLIKVFDSHPVLHVCLKYGRLFVEAFLKQCMPLLDFSFRKHREDVLSLLETFQLDTRLLHHLCGHSKIHQDTRLTQHVPLLKKTLELLVCRVKAMLTLNNCREAFWLGNLKNRDLQGEEIKSQNSQESTADESEDDMSSQASKSKATEVSLQNPPESGTDGCILLIVLSWWSRTLPTYVYCQMLLCPFPFPP

SEQ ID NO: 219 - DNA, 1105 bp, Homo sapiens
cccggatggtgggactgggcccaggttcccaccgcatcgtccgcctcagccagaaccttctggtccccgcccccggatagggacccaggaggcccaagccccttcttccggcggggagtgggagcctctcgcactctcggcagctccagaccctcgggatctccgtttacagttcaggacctcagctgcactttggcgctaacgccctgtttcccaggactgtcaatggcaggataccagctctggtcaccatggaccccactggatgagagtttccaatggctgcggcacacgacacctacaccttcctccaagcacccattcaaggcctccccctgcttcccacacacaccgtccgaccttgaagtgcagctgtgctttcaagaggtcactctagtcctagacagcccattcctggaatctggagtgagtcccaagttaccctgccacacatcagagttgcgcacgatgaacaacaaaggactggtcaggaagccccagcccatccgcctcagtggagtagattctgtctttggcagggttatcacagctcagccaccaaagtggaccgggactttcagagtttcagacaagtcagccttttgcaaaatcattagcagggagcaccagtggcccattggactgaaggagcctcagattcagatgacagtcactatgtgcaaacagatgctgcgctctatcctcttgctgtatgcaacttacaaaaagtgcacctttgccttgcagcactccaagtaaagggtcctcatttgatccccatttactcacaccatgccctttgtgccttggtgactgtcaaataaaagcaagtatatactcagttctctccacacttcccacatacttaccaagcaaaaagcccatgaaaaatctgcagcagcctctgatagcaggaagacattatgtggtactcctgaactttcactcctggtccatcaactacaccgtgattctcagcagctaaacactaaaaataaaaatgattttaggacaaaaaaaaaaaaaaaaaaaaaaaaaaaaaaaaaaaaaaaaaaaaaaaaaaaaaaaaaaaaaaaaaaaaaaaaaaaaaaaaaaaaaaaaaaaa

SEQ ID NO: 220 - protein, 177 aa, Homo sapiens
MAGYQLWSPWTPLDESFQWLRHTTPTPSSKHPFKASPCFPHTPSDLEVQLCFQEVTLVLDSPFLESGVSPKLPCHTSELRTMNNKGLVRKPQPIRLSGVDSVFGRVITAQPPKWTGTFRVSDKSAFCKIISREHQWPIGLKEPQIQMTVTMCKQMLRSILLLYATYKKCTFALQHSK

SEQ ID NO: 221 - DNA, 1197 bp, Homo sapiens
gaggcctgtagggtcggggcgcctgcgcagtcgctcttcctcaggcggcggccatggcgggacaggaggatccggtgcagcgggagattcaccaggactgggctaaccgggagtacattgagataatcaccagcagcatcaagaaaatcgcagactttctcaactcgttcgatatgtcttgtcgttcaagacttgcaacactaaacgagaaattgacagcccttgaacggagaatagagtacattgaagctcgggtgacaaaaggtgagacactcacctagaacagtgccgtgctgctgctgggaagttgctttacacaacacaggccacatgggaaaggccccagcagccttcagctccttcctttctccttaaagagcaacagggcttattcttgtttttcttttttcaaaagtgtggcctttgggctctgccatctggggtgtggtgtggtatgtgggaagaagttcagaggaaccgttggaaacgacgttaggcattttaccttttcagtaacattttatacatctacttgtcaatgtatttgagacattcacagccaaaagcctgggactctttgtgaaggtcctcctcacctctatctttctttctctctctctcaaactttccttaaagttctcattgcctttgcactgcttctgtgaacagtctttgtctcctccccacctttggtgggaagtgcggggcagtcctggtcaagacactcatgccctggcaatgtggctgccagagaatgttgttgctaacccaccagtttcttgttgatttggagaggtcaaggccaggcccccacttggcttgaagggacattttcagacttttctttctgtcacttggagtgtctatgcctctcatatttccctaataaactcctcaactttttatctgactgctgtgattatggtggggagaggagctagagatgggttcacttattgcacagaaatgtaatacatggcgttattattctaacataaaactttcagatgtagctgtttgattcaaagcctaggtggcttaccagcccaagtccccatgtttggactttcagctgactagctcatcttgggaatcatttggtcattcagcacatttaccaagtatttactatgtaggcatgttaaactccaataaaacatacagcattgaatcagaaaaaaaaaaaaaaaaaaaaaa

SEQ ID NO: 222 - protein, 75 aa, Homo sapiens
MAGQEDPVQREIHQDWANREYIEIITSSIKKIADFLNSFDMSCRSRLATLNEKLTALERRIEYIEARVTKGETLT

SEQ ID NO: 223 - DNA, 2968 bp, Homo sapiens
cctcgcctccgttacaacggcctacggtgctggaggatccttctgcgcacgcgcacagcctccggccggctatttccgcgagcgcgttccatcctctaccgagcgcgcgcgaagactacggaggtcgactcgggagcgcgcacgcagctccgccccgcgtccgacccgcggatcccgcggcgtccggcccgggtggtctggatcgcggagggaatgccccggagggcggagaactgggacgaggccgaggtaggcgcggaggaggcaggcgtcgaagagtacggccctgaagaagacggcggggaggagtcgggcgccgaggagtccggcccggaagagtccggcccggaggaactgggcgccgaggaggagatggaggccgggcggccgcggcccgtgctgcgctcggtgaactcgcgcgagccctcccaggtcatcttctgcaatcgcagtccgcgcgtcgtgctgcccgtatggctcaacttcgacggcgagccgcagccctacccaacgctgccgcctggcacgggccgccgcatccacagctaccgaggtcacctttggctcttcagagatgcagggacacacgatgggcttctggttaaccaaactgaattatttgtgccatctctcaatgttgacggacagcctatttttgccaatatcacactgccagtgtatactctgaaagagcgatgcctccaggttgtccggagcctagtcaagcctgagaattacaggagactggacatcgtcaggtcgctctacgaagatctggaagaccacccaaatgtgcagaaagacctggagcggctgacacaggagcgcattgcacatcaacggatgggagattgaagatttctgttgaaacttacactgtttcatctcagcttttgatggtactgatgagtcttgatctagatacaggactggttccttccttagtttcaaagtgtctcattctcagagtaaaataggcaccattgcttaaaagaaagttaactgacttcactaggcattgtgatgtttaggggcaaacatcacaaaatgtaatttaatgcctgcccattagagaagtatttatcaggagaaggtggtggcatttttgcttcctagtaagtcaggacagcttgtatgtaaggaggtttgtataagtaattcagtgggaattgcagcatatcgtttaattttaagaaggcattggcatctgcttttaatggatgtataatacatccattctacatccgtagcggttggtgacttgtctgcctcctgctttgggaagactgaggcatccgtgaggcagggacaagtctttctcctctttgagaccccagtgcctgcacatcatgagccttcagtcagggtttgtcagaggaacaaaccaggggacactttgttagaaagtgcttagaggttctgcctctatttttgttggggggtgggagaggggaccttaaaatgtgtacagtgaacaaatgtcttaaagggaatcatttttgtaggaagcattttttataattttctaagtcgtgcactttctcggtccactcttgttgaagtgctgttttattactgtttctaaactaggattgacattctacagttgtgataatagcatttttgtaacttgccatccgcacagaaaatacgagaaaatctgcatgtttgattatagtattaatggacaaataagtttttgctaaatgtgagtatttctgttcctttttgtaaatatgtgacattcctgattgatttgggtttttttgttgttgttgttttgttttgttttgtttttttgagatggagtctcactcttgtcacccaggctggagtgcagtggcgccatctcggctcactgcaacctctgcctcctgggttcacgtaatcctcctgagtagctgggattacaggcgcctgccaccacgctggccaatttttgtacttttagtagagacagtgtttcgccatgttggccaggctggtttcaaactcctgacctcaggtgatccgcccacctcagcctcccaaaatggtgggattacaggtgtgtgggccaccgtgcctggctgattcagcattttttatcaggcaggaccaggtggcacttccacctccagcctctggtcctaccaatggattcatggagtagcctggactgtttcatagttttctaaatgtacaaattcttataggctagacttagattcattaactcaaattcaatgcttctatcagactcagttttttgtaactaatagatttttttttccacttttgttctactccttccctaatagctttttaaaaaaatctccccagtagagaaacatttggaaaagacagaaaactaaaaaggaagaaaaaagatccctattagatacacttcttaaatacaatcacattaacattttgagctatttccttccagcctttttagggcagattttggttggtttttacatagttgagattgtactgttcatacagttttataccctttttcatttaactttataacttaaatattgctctatgttagtataagcttttcacaaacattagtatagtctcccttttataattaatgtttgtgggtatttcttggcatgcatctttaattccttatcctagcctttgggcacaattcctgtgctcaaaaatgagagtgacggctggcatggtggctcccgcctgtaatcccagtactttgggaagccaaggtaagaggattgcttgagcccagaacttcaagatgagcctgggctcatagtgagaacccatctatacaaaaaatttttaaaaattagcatggcggcacacatctgtaatcctagctacttggcaggctgaggtgagaagatcattggagtttaggaattggaggctgcagtgagccatgagtatgccactgcactccagcctgggggacagagcaagaccctgcctcaaaaaaaaaaaaaaaaaa

SEQ ID NO: 224 - protein, 213 aa, Homo sapiens
MPRRAENWDEAEVGAEEAGVEEYGPEEDGGEESGAEESGPEESGPEELGAEEEMEAGRPRPVLRSVNSREPSQVIFCNRSPRVVLPVWLNFDGEPQPYPTLPPGTGRRIHSYRGHLWLFRDAGTHDGLLVNQTELFVPSLNVDGQPIFANITLPVYTLKERCLQVVRSLVKPENYRRLDIVRSLYEDLEDHPNVQKDLERLTQERIAHQRMGD

SEQ ID NO: 225 - DNA, 2845 bp, Homo sapiens
cctcgcctccgttacaacggcctacggtgctggaggatccttctgcgcacgcgcacagcctccggccggctatttccgcgagcgcgttccatcctctaccgagcgcgcgcgaagactacggaggtcgactcgggagcgcgcacgcagctccgccccgcgtccgacccgcggatcccgcggcgtccggcccgggtggtctggatcgcggagggaatgccccggagggcggagaactgggacgaggccgaggtaggcgcggaggaggcaggcgtcgaagagtacggccctgaagaagacggcggggaggagtcgggcgccgaggagtccggcccggaagagtccggcccggaggaactgggcgccgaggaggagatggaggccgggcggccgcggcccgtgctgcgctcggtgaactcgcgcgagccctcccaggtcatcttctgcaatcgcagtccgcgcgtcgtgctgcccgtatggctcaacttcgacggcgagccgcagccctacccaacgctgccgcctggcacgggccgccgcatccacagctaccgagtgtatactctgaaagagcgatgcctccaggttgtccggagcctagtcaagcctgagaattacaggagactggacatcgtcaggtcgctctacgaagatctggaagaccacccaaatgtgcagaaagacctggagcggctgacacaggagcgcattgcacatcaacggatgggagattgaagatttctgttgaaacttacactgtttcatctcagcttttgatggtactgatgagtcttgatctagatacaggactggttccttccttagtttcaaagtgtctcattctcagagtaaaataggcaccattgcttaaaagaaagttaactgacttcactaggcattgtgatgtttaggggcaaacatcacaaaatgtaatttaatgcctgcccattagagaagtatttatcaggagaaggtggtggcatttttgcttcctagtaagtcaggacagcttgtatgtaaggaggtttgtataagtaattcagtgggaattgcagcatatcgtttaattttaagaaggcattggcatctgcttttaatggatgtataatacatccattctacatccgtagcggttggtgacttgtctgcctcctgctttgggaagactgaggcatccgtgaggcagggacaagtctttctcctctttgagaccccagtgcctgcacatcatgagccttcagtcagggtttgtcagaggaacaaaccaggggacactttgttagaaagtgcttagaggttctgcctctatttttgttggggggtgggagaggggaccttaaaatgtgtacagtgaacaaatgtcttaaagggaatcatttttgtaggaagcattttttataattttctaagtcgtgcactttctcggtccactcttgttgaagtgctgttttattactgtttctaaactaggattgacattctacagttgtgataatagcatttttgtaacttgccatccgcacagaaaatacgagaaaatctgcatgtttgattatagtattaatggacaaataagtttttgctaaatgtgagtatttctgttcctttttgtaaatatgtgacattcctgattgatttgggtttttttgttgttgttgttttgttttgttttgtttttttgagatggagtctcactcttgtcacccaggctggagtgcagtggcgccatctcggctcactgcaacctctgcctcctgggttcacgtaatcctcctgagtagctgggattacaggcgcctgccaccacgctggccaatttttgtacttttagtagagacagtgtttcgccatgttggccaggctggtttcaaactcctgacctcaggtgatccgcccacctcagcctcccaaaatggtgggattacaggtgtgtgggccaccgtgcctggctgattcagcattttttatcaggcaggaccaggtggcacttccacctccagcctctggtcctaccaatggattcatggagtagcctggactgtttcatagttttctaaatgtacaaattcttataggctagacttagattcattaactcaaattcaatgcttctatcagactcagttttttgtaactaatagatttttttttccacttttgttctactccttccctaatagctttttaaaaaaatctccccagtagagaaacatttggaaaagacagaaaactaaaaaggaagaaaaaagatccctattagatacacttcttaaatacaatcacattaacattttgagctatttccttccagcctttttagggcagattttggttggtttttacatagttgagattgtactgttcatacagttttataccctttttcatttaactttataacttaaatattgctctatgttagtataagcttttcacaaacattagtatagtctcccttttataattaatgtttgtgggtatttcttggcatgcatctttaattccttatcctagcctttgggcacaattcctgtgctcaaaaatgagagtgacggctggcatggtggctcccgcctgtaatcccagtactttgggaagccaaggtaagaggattgcttgagcccagaacttcaagatgagcctgggctcatagtgagaacccatctatacaaaaaatttttaaaaattagcatggcggcacacatctgtaatcctagctacttggcaggctgaggtgagaagatcattggagtttaggaattggaggctgcagtgagccatgagtatgccactgcactccagcctgggggacagagcaagaccctgcctcaaaaaaaaaaaaaaaaaa

SEQ ID NO: 226 - protein, 172 aa, Homo sapiens
MPRRAENWDEAEVGAEEAGVEEYGPEEDGGEESGAEESGPEESGPEELGAEEEMEAGRPRPVLRSVNSREPSQVIFCNRSPRVVLPVWLNFDGEPQPYPTLPPGTGRRIHSYRVYTLKERCLQVVRSLVKPENYRRLDIVRSLYEDLEDHPNVQKDLERLTQERIAHQRMGD

SEQ ID NO: 227 - DNA, 3469 bp, Homo sapiens
gcccctggctagagaagccgcagcccgcagtgtccgacccagtcgtcccgcgccggagccggccccgtagcgtgccatggcctgctacatctaccagctgccctcctgggtgctggacgacctgtgccgcaacatggacgcgctcagcgagtgggactggatggagttcgcctcctacgtgatcacagacctgacccagctgcggaagatcaagtccatggagcgggtgcagggtgtgagcatcacgcgggagctgctgtggtggtggggcatgcggcaggccaccgtccagcaacttgtggacctcctgtgccgcctggagctctaccgggctgcccagatcatcctgaactggaaaccggctcctgaaatcaggtgtcccattccagccttccctgactctgtgaagccagaaaagcctttggcagcttctgtaagaaaggctgaggatgaacaggaagaggggcagcctgtgaggatggccacctttccaggcccagggtcctctccagccagagcccaccagccggcctttctccagcctcctgaagaagatgcccctcattccttgagaagcgacctccccacttcgtctgattcaaaggacttcagcacctccattcctaagcaggaaaaacttttgagcttggctggagacagccttttctggagtgaggcagacgtggtccaggcaaccgatgacttcaatcaaaaccgcaaaatcagccaggggacctttgctgacgtctacagagggcacaggcacgggaagccattcgtcttcaagaagctcagagagacagcctgttcaagtccaggatcaatcgaaagattcttccaggcagagttgcagatttgtcttagatgctgccaccccaatgtcttacctgtgctgggcttctgtgctgcaagacagtttcacagcttcatctacccctacatggcaaatggttccctacaggacagactgcagggtcagggtggctcggaccccctcccctggccccagcgtgtcagcatctgctcagggctgctctgtgccgtcgagtacctgcatggtctggagatcatccacagcaacgtcaagagctctaatgtcttgctggaccaaaatctcacccccaaacttgctcacccaatggctcatctgtgtcctgtcaacaaaaggtcaaaatacaccatgatgaagactcacctgctccggacgtcagccgcgtatctgccagaggatttcatccgggtggggcagctgacaaagcgagtggacatcttcagctgtggaatagtgttggccgaggtcctcacgggcatccctgcaatggataacaaccgaagcccggtttacctgaaggacttactcctcagtgatattccaagcagcaccgcctcgctctgctccaggaagacgggcgtggagaacgtgatggcaaaggagatctgccagaagtacctggagaagggcgcagggaggcttccggaggactgcgccgaggccctggccacggctgcctgcctgtgcctgcggaggcgtaacaccagcctgcaggaggtgtgtggctctgtggctgctgtggaagagcggctccgaggtcgggagacgttgctcccttggagtgggctttctgagggtacaggctcttcttccaacaccccagaggaaacagacgacgttgacaattccagccttgatgcctcctcctccatgagtgtggcaccctgggcaggggctgccaccccacttctccccacagagaatggggaaggaaggctgcgggtcatcgtgggaagggaggctgactcctcctctgaggcctgtgttggcctggagcctccccaggatgttacagaaacttcgtggcaaattgagatcaatgaggccaaaaggaaactgatggagaatattctgctctacaaagaggaaaaagtggacagcattgagctctttggcccctgatgaccggaacacagctgaggacccttgtcctcagttggaaagatgagcatcagatcaagaaaaaggtctgaggcagaatccaagatctgccaggaaacacacaacaaaacatctgctgtcctgggtgggagggaaacttcatttcactggaatgagttgggagagaaaggccctcagcttttagagacacaaaaatccatgaagtctcttcctttctgggctttgttagtcagagcaggggatcagaggagactgaagcagaaaccctgcacacgggcccaggatgtggctgattttgtggttccggggagtatgtgatgataatcacccccagcagattccattacctcagcagctcttgttcccccgccactggcagttctgcaatgccatagcattttccagagctaagatctctgggttgtatttgctgacagcctgcaagcttgcatgctctgaaagattttttttagtttttaatttttttgtagagatggggtctcgctttgttggcgcaatcctcccacctcagactcccaaagtgctggaattacagttgggagccactgtgcctggcctggaagactttcaacttgtgtctcagtgcagttcttgactcacctctctgggcctcaggttctacaaatgccagacacctagcgaagagctctgcaggctttccactgcctgtattggaaatcttgcaattcacataattattcagtcactgcctggtacctttatcttcccatcccactaatgttagtgttttttaatggagcttttattctgagaatatgtgtttgtctgtttgtttgttttttgagacagagtctcactttgtcacccaggctggagtgcagtggcacgatctcagctcactgcaagctctgcctctcaggttcaagtgattctcctgcctcagcctcctgagtagatgggactgtaggcacctgccactatgcctggctaatttttgtgtttttagtagagacagggtttcaccatattggccaggctggtctcgaactactgacctcgtgatctgcccgccttggcctatcaaagtgttgggattacaggcttgagccaccgcacccggccgagaatatgtgttgttatttatgactggattatgaagaatcaggagaatgcatttcatgtctgattctgctgctaattaagtcaatcatttaatttttgggacctcagtttctttgtaagtaaaataacacctgcttgttcttcatccctgggctgttgggaggaacagatgagacagtggctatagaagcacttggaaaatgcacttgtcctgttttgtaaaataaaaaggtattaaatgtgtatttctgccatgtacctaatgattattcagtgcgtatatatctgaaaagtcatgttgcaaatctttctgtgaaacagatgctattttaaattcactgggagaaatatcctatttaaagtaatctatagtaatttctttttatataataaaaatatatttgtaaagtc

SEQ ID NO: 228 - protein, 625 aa, Homo sapiens
MACYIYQLPSWVLDDLCRNMDALSEWDWMEFASYVITDLTQLRKIKSMERVQGVSITRELLWWWGMRQATVQQLVDLLCRLELYRAAQIILNWKPAPEIRCPIPAFPDSVKPEKPLAASVRKAEDEQEEGQPVRMATFPGPGSSPARAHQPAFLQPPEEDAPHSLRSDLPTSSDSKDFSTSIPKQEKLLSLAGDSLFWSEADVVQATDDFNQNRKISQGTFADVYRGHRHGKPFVFKKLRETACSSPGSIERFFQAELQICLRCCHPNVLPVLGFCAARQFHSFIYPYMANGSLQDRLQGQGGSDPLPWPQRVSICSGLLCAVEYLHGLEIIHSNVKSSNVLLDQNLTPKLAHPMAHLCPVNKRSKYTMMKTHLLRTSAAYLPEDFIRVGQLTKRVDIFSCGIVLAEVLTGIPAMDNNRSPVYLKDLLLSDIPSSTASLCSRKTGVENVMAKEICQKYLEKGAGRLPEDCAEALATAACLCLRRRNTSLQEVCGSVAAVEERLRGRETLLPWSGLSEGTGSSSNTPEETDDVDNSSLDASSSMSVAPWAGAATPLLPTENGEGRLRVIVGREADSSSEACVGLEPPQDVTETSWQIEINEAKRKLMENILLYKEEKVDSIELFGP

SEQ ID NO: 229 - DNA, 4505 bp, Homo sapiens
ggcaaagtgaaggcttcctgatctcagaagcacgttgtgggcttggaaaccgacggcagcctttagtcaattttggatcgctttgacttctccaacacggtttggcatctctgaaaccttgagaactgtgatgggcagtggaaagaagagggaaaggtgcccatggcgtccgagcggggcaaggtcaagcacaactggagcagcacgtcggaagggtgtccccgcaagcgcagctgcctccgggagccctgtgatgtggccccctccagccggccagctcagaggtctgcgtcgcgttctggagggcccagcagccccaagcgcctgaaagcccagaaggaggacgatgtggcttgctcgcggaggttatcctggggctcatcccgccgcagaaataactcctcctcctccttctccccacatttcttgggccctggtgtgggcggggccgcctccaaaggctgcctgattcggaacactcgggggttcctgtcttcagggggatcccctctgcgtcctgccaacgcctctttggaagaaatggcttctctagaggaggaagcctgcagccttaaggttgattccaaagatagttctcataactccacaaactctgaatttgcagctgaagctgagggtcagaatgatacaattgaggaacccaacaaggtccagaaaaggaagagggatagacttcgagaccagggctccacaatgatctacctgaaggctatccagggcatcctggggaaatcgatgccaaaaaggaagggagaggctgccactcgggcaaaaccaagcgcagcagagcatcccagccatggagaaggaccagccaggagtgaaggaccagccaagactgcagaaggagcagccaggagtgtcacagtcactgctgctcagaaggagaaagacgcaaccccagagatcagcatggaggaggataagacagtgccagagaggagcagcttctatgacaggagagtagttatagaccctcaagagaaacccagtgaggagccccttggggaccgaaggactgtcattgacaaatgctctccacccctagagttcttggatgactctgactctcatttagaaatccaaaagcataaagatagggaggtggtgatggagcacccctcttctggaagtgactggtctgatgttgaggagatctccacagtcagattctctcaggaggaacctgtctccctgaaaccttcagccgttccggagccttcttccttcaccaccgactatgtcatgtaccctcctcatttgtacagtagtccttggtgtgactacgccagctattggaccagcagccccaagccttctagctacccctccacaggcagcagcagcaacgatgcagcccaggttgggaagagcagccggagccgcatgagtgattattcccccaactctacagggagtgtccaaaacacctccagagacatggaggcctcagaggaaggctggtcccagaattctcgttcatttcgcttctccagaagctcagaagaaagagaggtgaaggagaaaagaacattccaagaggagatgcctccgcgtccttgtggaggacacgcatccagctccctgccaaagagccacctggagccaagcctagaggagggcttcattgacactcattgtcacctggacatgctctattccaagctatctttccaagggacctttacaaagttcagaaaaatttacagcagctccttccctaaggaatttcagggctgcatctctgacttctgtgatccccgcaccctgacagattgcctatgggaggagctgttgaaagaggatctggtctggggggcctttggctgtcaccctcattttgcacgttactacagtgagagtcaagaaagaaatcttttgcaagccttaaggcaccctaaggctgtggcatttggagaaatgggcttggattactcttacaagtgcaccacgcctgtcccagaacagcacaaggtatttgagagacagctgcagctggctgtgtctctaaagaagcccttggtgatccactgccgagaagctgatgaagatctgctagaaatcatgaaaaagtttgtgccccctgactacaagatccataggcattgcttcaccggcagctacccggtcattgagcccctgctgaagtactttcccaacatgtctgtgggcttcacggcagtgctgacatactcctctgcctgggaggcccgggaagccttgaggcagatcccactggagagaatcatcgtggaaacggatgctccctatttcctccctcgccaggttcccaaaagcctttgccagtatgcccacccgggcctggccttgcatacggtccgagagattgccagagtcaaagatcagccactctccctcaccttggctgccttgcgtgagaacaccagtcgcctctacagtctttaagcagagaaggtacagtcctcgggagtctcctagaaaagggcgaccagcagcctgacagaacacaggctggcttgaagtctgtgtctcaggtcgaggatgtgtttagagagctgattggaacacagaaaaccaggacaggatgttttcctccaagcgggtcataaggcttcagcttctgggtggtgggtggggtggggtgggcatggaatgaggggtatggggactgcctgtaatagcactgggattttgcctcccagccaaaatgctccagggtaggcagcaaagaagaaagagtgcgatatgagggtacagtgagtttggcagtccaaattctgttctctgcagcctgtttttgagtagttggtgaataaagtcacccgcctacttgtctaagcacatgtgggtgtgtaactcagttcctggttctcggttctaaaaacagacttccaactgggaaactttttgggggaaattaactggacacctatctcggaggtttattttcttgcaaccagtgaagtcgtcctcctcccttccctggataactcttcagtttgactgtcactgttctggtgtcaactccagcgtcggcacaggcagaaggacttcagctgctggtctcattggttccactgccattgatatgggggggtgcagaggagcactcattgtccatgatggagatccaggacagactgggggactccgggaagaggctttcttggggaagaggaccccaaaggaggtacttcctcctcactgatgccctcagggctgctgtgtgggtgtgttaagctgataaggttcagtttgcggcggaaactacctgctagtcttgtgtcaggggctgccagcctccttttgttttacttttgcccccttcttgggaacatttgaccaaaaataatcctcatttcatcttgtgtacagtcctttgtgtaccccgcccaggttgagaggtgaatcagcgtaattctccgaagctctgctgggcagctcagccatgttacattgtctatgcagaataagcaggcctggtgtctgcaaatgtaccagtccttctcccgcatctcctgggtgcccccttggctttgcctctcctgtgtcctgtctttctgcgttttagaagtgagagcctctccttcaccttttgagcaactgagtcatctcaagtcctgagctctgctctgccgcctgctggtgccttgtaaaggtatactcgttacaggccctagaggttctaatggtccagggttaagtgagaggagactgtactttgtttcaaaggatccttcaccctgatctgcagtgaggtggatagatcacctggagtccctcgtctgtggtcttggaggcttaaattgtaaaatacatcccttatggaatcctaaattcctctaggtgtttttggaaggcgcatttgagccttgtgagctaaaatggaatggatttaatatttcctatctggcatttccatcttgcccctggtacacaagtcactggcctggaactcagccttgattcactgtccgtcttcacggattagctgtgctgttatgttgtctgtgctgcagattggcccatgtgggaagtcgggggggacctgatttcctgcttggaagacttgggggactgccgagcatatcaaagtgtttatagtcaccaagtgaactgcagcacaaccatctcctctccagcaagccctgaagtcagtagtgcctgcaggtgaaaccaaccagccctgtgttagaggaggaaaagcggagatgacatggaagtctccaagcctgtgccatccacctgccaaggaaaagcacaaggtgctatctacttttctctctaggatttagattatcatttatgtgctgttgcacagtgaaacctcacctgtgtgggcgtgaaagctgattggcattgtttttgattcagctttttggatggctaattgttttcactgtgctgtgggaatgcctctgtattttttcccctctttggccatctttttctgaaaataaagtgatggatcctctagccaaaaaaaaaaaaaaaaaaaaaaa

SEQ ID NO: 230 - protein, 761 aa, Homo sapiens
MASERGKVKHNWSSTSEGCPRKRSCLREPCDVAPSSRPAQRSASRSGGPSSPKRLKAQKEDDVACSRRLSWGSSRRRNNSSSSFSPHFLGPGVGGAASKGCLIRNTRGFLSSGGSPLRPANASLEEMASLEEEACSLKVDSKDSSHNSTNSEFAAEAEGQNDTIEEPNKVQKRKRDRLRDQGSTMIYLKAIQGILGKSMPKRKGEAATRAKPSAAEHPSHGEGPARSEGPAKTAEGAARSVTVTAAQKEKDATPEISMEEDKTVPERSSFYDRRVVIDPQEKPSEEPLGDRRTVIDKCSPPLEFLDDSDSHLEIQKHKDREVVMEHPSSGSDWSDVEEISTVRFSQEEPVSLKPSAVPEPSSFTTDYVMYPPHLYSSPWCDYASYWTSSPKPSSYPSTGSSSNDAAQVGKSSRSRMSDYSPNSTGSVQNTSRDMEASEEGWSQNSRSFRFSRSSEEREVKEKRTFQEEMPPRPCGGHASSSLPKSHLEPSLEEGFIDTHCHLDMLYSKLSFQGTFTKFRKIYSSSFPKEFQGCISDFCDPRTLTDCLWEELLKEDLVWGAFGCHPHFARYYSESQERNLLQALRHPKAVAFGEMGLDYSYKCTTPVPEQHKVFERQLQLAVSLKKPLVIHCREADEDLLEIMKKFVPPDYKIHRHCFTGSYPVIEPLLKYFPNMSVGFTAVLTYSSAWEAREALRQIPLERIIVETDAPYFLPRQVPKSLCQYAHPGLALHTVREIARVKDQPLSLTLAALRENTSRLYSL

SEQ ID NO: 231 - DNA, 518 bp, Homo sapiens
ggaactgcaggcccacctgtctgcaacccagctgaggccatgccctccccagggaccgtctgcagcctcctgctcctcggcatgctctggctggacttggccatggcaggctccagcttcctgagccctgaacaccagagagtccagcagagaaaggagtcgaagaagccaccagccaagctgcagccccgagctctagcaggctggctccgcccggaagatggaggtcaagcagaaggggcagaggatgaactggaagtccggttcaacgccccctttgatgttggaatcaagctgtcaggggttcagtaccagcagcacagccaggccctggggaagtttcttcaggacatcctctgggaagaggccaaagaggccccagccgacaagtgatcgcccacaagccttactcacctctctctaagtttagaagcgctcatctggcttttcgcttgcttctgcagcaactcccacgactgttgtacaagctcaggaggcgaataaatgttcaaactgta

SEQ ID NO: 232 - protein, 117 aa, Homo sapiens
MPSPGTVCSLLLLGMLWLDLAMAGSSFLSPEHQRVQQRKESKKPPAKLQPRALAGWLRPEDGGQAEGAEDELEVRFNAPFDVGIKLSGVQYQQHSQALGKFLQDILWEEAKEAPADK

SEQ ID NO: 233 - DNA, 2743 bp, Homo sapiens
gaccgcatctaggccccgccgcgtccgccacgcccagcgctcggcggcgcccgccccactggcctggcccgccccccgcaccgagcactctttcgcccggcctccggttctcgccggctctcggacccgcctccgaagacgtggagcgctgcggcggctgatttgtcaaagatgaaagtgaccttatcagctttggatacttctgagagttctttcacacctttggtggtcatagaacttgctcaggatgtcaaagaagaaaccaaagaatggctgaaaaacagaattatagctaaaaaaaaagatggaggtgcccagttgttgtttagaccattgttaaataaatatgaacaagaaacactagaaaatcagaacttatatcttgttggtgcctccaagattagaatgttactaggggcagaagcagtgggattggtaaaagagtgcaatgataacaccatgagagccttcacatacagaaccagacagaacttcaaaggttttgatgataacaatgatgatttcctgacaatggcagaatgtcaattcattatcaaacatgaacttgaaaatcttagagctaaagatgaaaaaatgatccctggttaccctcaggcaaagttgtatccaggaaaatcattgttgagaagattgctcacgtctggcatcgtgattcaggtgtttccactgcatgacagtgaagccctgaagaagcttgaggacacctggtacactcggtttgctttgaagtatcagcccatagacagtattcgtggctactttggggaaacaattgctctgtactttggatttttggagtatttcacttttgcattaatccccatggctgtcattgggttaccttactacttgtttgtgtgggaagactatgacaagtacgtgatctttgcctcgttcaacctcatctggtccacggtgattctggaactgtggaagcgtggctgtgccaacatgacctacaggtgggggacactgctcatgaagagaaagtttgaggagccccggccaggatttcatggtgtcttgggtatcaattccatcactgggaaggaggagcctctgtaccccagctacaagagacagttgcgcatttacctggtctccctgccattcgtgtgcctctgcctctatttctcactgtatgtcatgatgatttacttcgacatggaggtttgggccttgggtctacatgagaacagcgggtctgagtggaccagtgtcctgttgtatgtgcccagcatcatctatgccattgtgattgagatcatgaatcgtctctatcgatatgctgccgagtttttaacttcatgggagaatcacagattggaatctgcctatcagaaccatctaattctgaaagttttagtgttcaacttcctcaattgctttgcctcactcttctatattgcctttgtcttgaaagatatgaagcttttgcgccagagcttggccactctcctaattacctcccagatcctcaaccaaattatggaatcttttcttccttattggctccaaaggaagcatggtgtgcgggtgaagaggaaggtgcaggctttaaaggcagacattgatgctacattatatgaacaagtcatcctggaaaaagaaatgggaacttatttgggcacctttgatgattacttggagttattcctgcagtttggttatgtgagccttttctcctgtgtttacccattagcagctgcctttgctgtgttaaataacttcactgaagtaaattcagatgccttaaaaatgtgcagggtcttcaaacgtccattctcagaaccttcagccaatattggtgtgtggcagttggcttttgaaacgatgagtgttatatctgtggtcactaactgtgcgctgattggaatgtcaccacaagtgaatgcagtctttccagaatcaaaagcagacctcattttgattgtagtagcagtggagcacgcactcctggctttaaagtttatacttgcatttgccatacctgataagccacggcatatccagatgaaactagccagactggaatttgagtctttggaggcactcaagcagcagcaaatgaagctcgtgaccgagaacctgaaggaggaaccaatggaaagcgggaaggagaaggcaacctgagtgcccagcgtgcccagctgccctgttggcagaggcctgtgtctgtgccacacctgccacggtggcagggggggtacccggggcagcatcgtggctcctgaacccagacccaatgcttagccaaacgaagtggctcccatgtggcaagcacccttctcagtttcgcagtggcttggctcgggatccttggcagttcccccagccccaccctgtctgctccttcccagttccttcccgggccccacacgctgctccagctgccaactttgctgcagagccactgccgcccttgagcctctcaccatgagtgagccaccagctctccacgttcccctcatagcagtgtcactcccaaccccaccatggcccagggacccgtggacaggttggggatggggtgtgtgcccactgtgctcatcacaggagcctcagttgagagtgagcggggtacagtaaggcagtgcttcccacactggacctctttcctggttctcttttgcaatacattaacagaccctttatcaacataaacaatagtaactgagctattaaaggcaacctctctgactccttctgcctaaaaaaaaaa

SEQ ID NO: 234 - protein, 660 aa, Homo sapiens
MKVTLSALDTSESSFTPLVVIELAQDVKEETKEWLKNRIIAKKKDGGAQLLFRPLLNKYEQETLENQNLYLVGASKIRMLLGAEAVGLVKECNDNTMRAFTYRTRQNFKGFDDNNDDFLTMAECQFIIKHELENLRAKDEKMIPGYPQAKLYPGKSLLRRLLTSGIVIQVFPLHDSEALKKLEDTWYTRFALKYQPIDSIRGYFGETIALYFGFLEYFTFALIPMAVIGLPYYLFVWEDYDKYVIFASFNLIWSTVILELWKRGCANMTYRWGTLLMKRKFEEPRPGFHGVLGINSITGKEEPLYPSYKRQLRIYLVSLPFVCLCLYFSLYVMMIYFDMEVWALGLHENSGSEWTSVLLYVPSIIYAIVIEIMNRLYRYAAEFLTSWENHRLESAYQNHLILKVLVFNFLNCFASLFYIAFVLKDMKLLRQSLATLLITSQILNQIMESFLPYWLQRKHGVRVKRKVQALKADIDATLYEQVILEKEMGTYLGTFDDYLELFLQFGYVSLFSCVYPLAAAFAVLNNFTEVNSDALKMCRVFKRPFSEPSANIGVWQLAFETMSVISVVTNCALIGMSPQVNAVFPESKADLILIVVAVEHALLALKFILAFAIPDKPRHIQMKLARLEFESLEALKQQQMKLVTENLKEEPMESGKEKAT

SEQ ID NO: 235 - DNA, 1536 bp, Homo sapiens
cgcatgcgctggcggcctgcgccgccttaagtgccgcgccagcccggggcggcccagtcggcctgtcagccggcttcgagataagtcccggcgcttgcgcggcggcggctatggcggcggaggaggaggaggtggactctgccgacaccggagagaggtcaggatggctaactggttggctccccacatggtgccctacgtctatatcacaccttaaagaagctgaagagaagatgttaaaatgtgtgccttgcacatacaaaaaagaacctgttcgtatatctaatggaaataaaatatggacactgaagttctctcataatatttcaaataagactccacttgtccttctccatggttttggaggaggtcttgggctctgggcactgaattttggagatctttgcaccaacagacctgtctatgcttttgacctattgggttttggacgaagtagtagacccaggtttgacagtgatgcagaagaagtggagaatcagtttgtggaatccattgaagagtggagatgtgccctaggattggacaaaatgatcttgcttgggcacaacctaggtggattcttggctgctgcttactcgctgaagtacccatcaagggttaatcatctcattttagtggagccttggggtttccctgaacgaccagaccttgctgatcaagacagaccaattccagtttggatcagagccttgggagcagcattgactccctttaaccctttagctggcctaaggattgcaggaccctttggtttaagtctagtgcagcgtttaaggcctgatttcaaacgaaagtattcttcaatgttcgaagacgatactgtgacagaatacatctaccactgtaatgtgcagactccaagtggtgagacagctttcaagaatatgactattccttatggatgggcaaaaaggccaatgctccagcgaattggtaaaatgcaccctgacattccagtttcagtgatctttggcgcccgatcctgcatagatggcaattctggcaccagcatccagtccttacgaccacattcatatgtgaagacaatagctattcttggggcaggacattatgtatatgcagatcaaccagaagaattcaaccagaaagtaaaggagatctgcgacactgtggactgaacacactgaagctctgatgggaaaacctggtgactgatatagttgttcagcaataattcatagtctgtgatgaagagtagtgaatacaacacacaaccaggcagccttcttgactatactttgcacatgttttctttaggaattcactcacacatttaaaccagttagtgccttctagaagaatggctttcctttctcctacacaaaattgaaatatacaagtctctaaatataatacctttaaataaaaggttatttgtccctctgaaaaaaaaaaaaaaaaaaaaaaaaaaaaaaaaaaaaaaaaaaaaaaaaaaaaaaaaaaaaaaaaaaaaaaaaaaaaaaaaaaaaaaaaaaaaaaaaaaaaaaaaaaaaa

SEQ ID NO: 236 - protein, 349 aa, Homo sapiens
MAAEEEEVDSADTGERSGWLTGWLPTWCPTSISHLKEAEEKMLKCVPCTYKKEPVRISNGNKIWTLKFSHNISNKTPLVLLHGFGGGLGLWALNFGDLCTNRPVYAFDLLGFGRSSRPRFDSDAEEVENQFVESIEEWRCALGLDKMILLGHNLGGFLAAAYSLKYPSRVNHLILVEPWGFPERPDLADQDRPIPVWIRALGAALTPFNPLAGLRIAGPFGLSLVQRLRPDFKRKYSSMFEDDTVTEYIYHCNVQTPSGETAFKNMTIPYGWAKRPMLQRIGKMHPDIPVSVIFGARSCIDGNSGTSIQSLRPHSYVKTIAILGAGHYVYADQPEEFNQKVKEICDTVD

SEQ ID NO: 237 - DNA, 6110 bp, Homo sapiens
cacacacaccgcacaagtgcttaatacgtgtgtcttttgtcttaagcactctcttcagttcctttaaatgagccgaggtcatggtggttcggagatgacagaaggcaggcactgccaggtgcacctcctggatgataggagactggagctgctggttcagcccaaacttctagcaagagagttgctggacctagtggcttcacatttcaacctgaaagaaaaggagtattttggaataacattcatagatgacacaggtcagcagaactggctgcagttagatcaccgagttcttgaccacgatttgcccaagaaaccaggcccaaccattttgcactttgctgtgaggttttacattgagagcatatcgtttttaaaggataaaaccaccgtggagctgtttttcctgaatgcaaaggcctgtgtgcacaaggggcaaatcgaagtagagagcgaaaccatcttcaagttagcagcgtttattttacaggaagccaagggagattataccagtgatgaaaatgccaggaaagatttaaagacattaccagcctttccaaccaaaactcttcaggagcatccatcccttgcctactgtgaggacagggtaattgagcattatttgaaaatcaaaggtctcactcgaggtcaagctgtggttcagtatatgaaaatagtagaagctctaccgacttacggtgtccattattatgcagtaaaggataagcaaggacttccttggtggcttggaataagctataagggaattggccaatatgatatacaagacaaggtgaagcctcggaagttattccaatggaaacagctggagaacttatatttccgtgagaaaaaatttgctgttgaagttcatgatccacgaaggatttcagtttcaagaagaacctttgggcaaagtggcttgtttgtgcaaacatggtatgctaactcttctctcatcaagtccatttgggtaatggcaattagtcagcatcagttttacttggaccggaagcaaagcaaagcaaaaattccttcagccaggagtttagatgagattgcaatggatttgacagagacaggaacacaaagggcctccaagctggtgacactggagacgaaaagtcagttcatcatggcaagtaatggcagtttaatctcctcaggttctcaagactcagaagttagtgaagagcaaaagagagaaaaaatccttgaactaaagaagaaggagaaactattacaagaaaaacttctgaaaaaagttgaggagcttaagaagatctgtctgcgggaggctgagctcacaggcaaaatgccaaaggagtatcccctgaacataggcgagaagcctcctcaggtcagaagacgtgtgggtactgcgttcaaattagatgacaacttgctgccgagtgaagaagatcctgctttgcaagaactggagagtaattttctaatacaacaaaagctggtggaagctgcaaagaaacttgccaatgagccagacctttgtaaaactgtgaagaaaaagcgaaagcaagattacacagatgcgatgaaaaagcttcaggagattgaaaatgcaataaacgaataccgaattaggtgtggaaagaaacccagccagaaagcaacagtgttaccagaagacataatcccctcagagagtagctctttgtctgacaccaccacctatgatgatcccagtgatgccttcacttttcctgggcagcgatcaagttcagtacctcattctccaagaattcttccccccaagtctcttggtattgagcgaatccatttcagaaagtcgtccatcaatgaacagtttgtggataccaggcagtccagagaaatgctgtccacacacagcagcccttacaaaactctggagaggcggccccagggaggacgaagcatgcccaccacgccagttcttacccgaaacgcctacagcagcagccacttggaacccgaatcttcatctcagcactgccgccagcggagtggaagcctggagtcccagtcccacctgctctccgagatggacagcgataagccatttttctccctctccaaatcccaaagaagcagcagcacagaaatcctcgatgacgggtcttcttatacaagccaatcaagcacagagtattactgtgtgacaccagttaccggcccctattacaccacccagaccctggacactcgcaccaggggtcggaggaggtcaaagaaacagaatgtttctacttcaaattcaggaagcatgcccaacctagcacaaaaggatagtttgaggaatggtgtttactcaaagagtcaggagccaccgtcttccagttactacattgccgggtacacaccctatgcagagtgtgacttttattacagtggtggttatgtctatgagaatgacaccgagggacagtatagtgtcaacccttcctaccggtcctcagcccactatggatatgagcgccagagggactacagcagatcctttcacgaagatgaggtcgaccgggtaccccataacccatatgcaactctccggctgccaaggaaggctgctgcaaaatcggagcacatcaccaaaaacatccacaaggccttagttgccgagcacttgcgtggctggtaccagcgggcctctgggcagaaggatcagggacacagcccgcagaccagctttgactcagacaggggatcacagagatgcctggggtttgcggggctgcaagtaccttgttctccaagcagtcgtgcatcctcgtactcttcagtgtcttctacaaatgcttctgggaactggaggacccagttaaccatagggctgtcggattacgagactccagcacattcttcttacaccagctgctatggcaatgtctataatcctttaccctctccaagcagacaatacacagaaatcagtcaactggatggtacagatggaaaccagctggaagacaacctggagagtagtgagcagagactcttttggcatgaagattcaaagcctggaacattagtctgaactgcagttggacctcctgaccaagcactgcgttctcacactagtgtgccttgcaaattgtatttgtcttccgagaggatgttcgttttagaaacctaaagacatcaaaggttgaagagaagacttagttgccctggaagtgaatcagtgaatcacacaccaagccccacaaagcccctaaaggaggatttggcctttcaaactctaggcactaacgtaactgtagggtctgcccacatgttgaagtattgccaagagaggactcagtgtgaagccttcatcaatagcaagcactttttaagggagtaaaagttgttaaaggcaaacctcaaaaacatgaaagggcattcaggatgtcccatggcaataagaacaggggaaatctcagagcacaattcagcaggatgagagaaggggaaccagaagctccggagtcattgctcacttcagagtttgaattcgtgagctgacaaagagtaacatgctctttctacacagacatggacaatttagacagtattggaaaattacttgaagctggattttcatgaagttctgaatgagtgtaaatgttttttaggatactataaagagtgatgtttttcataagcaccataaaatgggttctggaaaaactgattaccttagcatcctgtaatataacttatggtagcagattggggaaaatgaagcagcccactgaataattgacaaagtctgcttggagaacattctaaggtacaatatcatggagctcctttttcctttctccactaattgcgtgatgagctattgttctggctgttaattctccaactcggctgtcatttgaagtggcagacttaatatggaaagtttttataattatgagtttgaaaaagcattttaagatgatacagaaagtatccaaaacaacagaaaaaaaaagccacgtcattttagatgaattgcgtgccttaaaatggtgaacgttagaaaattaaacaagtctggattccacaagtagttccaagtcaccaagtgacaaaaacaaggttaacattaaaaaagaaaaacaacaacaacgacaaaaagctccaagctgcagtggatttaattatgaggctaaaactacctcatactttccttggaagaactaattagctatggtttattgtagggttttgtttgtttgttttttaaagcaaatgatttccatattccagattgatcttttttgtcatctttgcttcaaaattacataaaaggtgctcctttcccccttcttttatacaagtttcttgttcatattgtgaatagaaaagtttctgaacaacttttttggaacattttctatctatattccaaagcatgtaatatatacataaaaacgatttgttaaactggtccttagtcatttgtataattagaaatgaagtttgggaaaaaattttggaaaaaagacaagcaaaaaaaaataacttattccttttttgcatatttgtatagccttctagaatcagaaataacctttttgcatattcttttattgttctgacttttcaagacctattatttttttacataggtcaataaacaaaaggtgtgctactgaaaatgtttacgttttcttccatttatgtcaggggttcatgtgaagcaggtcgcagtgctctacttcaagtaatcatattgggcaaggcttcggatttttatttatagtattaccgtattttattaattccgggatgtacatttttaaatatttacattaaaaacatggttcatctttttattgatggcatattctacttgaattggcagttttttcttaatagtacattaaaaataatgctgtgtcttacaataaagttgccttagaattgatgaaatgcggtagtttgtctcactgaggatgactggtgagaacttttaggttttttaatcttgggaatgttgtttatttgtagcaagtaatttatactaatttcacagactggcaaacaggtcttctaaattcaagaaattagttctctgacatcctttaatcctacataatgtggagaagggagtggaaatgaaatatatttccatacatgtatcttgcataaaataacatttttctgttcctgaaatagtatggttacacttgcaagcatgccttgaaagggcaaatataacttggctcccacagaggaaaagaaggtatagaaatggaagctcagggccaggcatagcggctcacacctgtaatcccagcactttgggaggccgaagtgggaggattgcttgagctcaggagttcaagaccagcctggacaacatggtgaaaccccatctctatgaaaatacaaaaattagccagtcatggtgatgtgtgcctgtaatctcagctacttgggaggctgagttgggaggatatcttgagcccaggaggcggaggttgcagtgagccaggatcgtgccactgcattccagcctaggcaataacagaccttgtctcaagaaaaaaaaaaaaaaaaaaaaaagaaagaaatggaagttcagcaatcctactgcacggttttcttcgtctcttttgaaaaacatttctcaaccgcattggtattaaaccaattaaactacgttatttattaaaagccaaaagtgacaaaagtacattattcaacatgtacgtttcctcttttttattacaaaataccatggttaaatgcaaaaccaaaatagtacataacaaaaacataatcgtgcccattagccgaacactctcagatataatagttaatttattgtatatttgtttggatttttttctatgcatatagtaatttttttaaagtccagcatattacaagtacagttttacaacatttttttttgtttgttttgttttctgcctaatatatcttgggcctctgtatcaagacatactgatctacctcataaagatatatgtttaacaaggtggatttttaaaattgcctcaccctactagatgtttatctatttttctatatttgacaaaaattttcaaaattcttccttgtactcacaaaagcttaaatattacaagaaataaagattccggaattgt

SEQ ID NO: 238 - protein, 989 aa, Homo sapiens
MSRGHGGSEMTEGRHCQVHLLDDRRLELLVQPKLLARELLDLVASHFNLKEKEYFGITFIDDTGQQNWLQLDHRVLDHDLPKKPGPTILHFAVRFYIESISFLKDKTTVELFFLNAKACVHKGQIEVESETIFKLAAFILQEAKGDYTSDENARKDLKTLPAFPTKTLQEHPSLAYCEDRVIEHYLKIKGLTRGQAVVQYMKIVEALPTYGVHYYAVKDKQGLPWWLGISYKGIGQYDIQDKVKPRKLFQWKQLENLYFREKKFAVEVHDPRRISVSRRTFGQSGLFVQTWYANSSLIKSIWVMAISQHQFYLDRKQSKAKIPSARSLDEIAMDLTETGTQRASKLVTLETKSQFIMASNGSLISSGSQDSEVSEEQKREKILELKKKEKLLQEKLLKKVEELKKICLREAELTGKMPKEYPLNIGEKPPQVRRRVGTAFKLDDNLLPSEEDPALQELESNFLIQQKLVEAAKKLANEPDLCKTVKKKRKQDYTDAMKKLQEIENAINEYRIRCGKKPSQKATVLPEDIIPSESSSLSDTTTYDDPSDAFTFPGQRSSSVPHSPRILPPKSLGIERIHFRKSSINEQFVDTRQSREMLSTHSSPYKTLERRPQGGRSMPTTPVLTRNAYSSSHLEPESSSQHCRQRSGSLESQSHLLSEMDSDKPFFSLSKSQRSSSTEILDDGSSYTSQSSTEYYCVTPVTGPYYTTQTLDTRTRGRRRSKKQNVSTSNSGSMPNLAQKDSLRNGVYSKSQEPPSSSYYIAGYTPYAECDFYYSGGYVYENDTEGQYSVNPSYRSSAHYGYERQRDYSRSFHEDEVDRVPHNPYATLRLPRKAAAKSEHITKNIHKALVAEHLRGWYQRASGQKDQGHSPQTSFDSDRGSQRCLGFAGLQVPCSPSSRASSYSSVSSTNASGNWRTQLTIGLSDYETPAHSSYTSCYGNVYNPLPSPSRQYTEISQLDGTDGNQLEDNLESSEQRLFWHEDSKPGTLV

SEQ ID NO: 239 - DNA, 2176 bp, Homo sapiens
aggactgactcttaccagctggggagcaaacaggccagctggagaccgagatgacagaaggcaggcactgccaggtgcacctcctggatgataggagactggagctgctggttcagcccaaacttctagcaagagagttgctggacctagtggcttcacatttcaacctgaaagaaaaggagtattttggaataacattcatagatgacacaggtcagcagaactggctgcagttagatcaccgagttcttgaccacgatttgcccaagaaaccaggcccaaccattttgcactttgctgtgaggttttacattgagagcatatcgtttttaaaggataaaaccaccgtggagctgtttttcctgaatgcaaaggcctgtgtgcacaaggggcaaatcgaagtagagagcgaaaccatcttcaagttagcagcgtttattttacaggaagccaagggagattataccagtgatgaaaatgccaggaaagatttaaagacattaccagcctttccaaccaaaactcttcaggagcatccatcccttgcctactgtgaggacagggtaattgagcattatttgaaaatcaaaggtctcactcgaggtcaagctgtggttcagtatatgaaaatagtagaagctctaccgacttacggtgtccattattatgcagtaaaggataagcaaggacttccttggtggcttggaataagctataagggaattggccaatatgatatacaagacaaggtgaagcctcggaagttattccaatggaaacagctggagaacttatatttccgtgagaaaaaatttgctgttgaagttcatgatccacgaaggtgaggatcaaagacgtttctctgtatgacacagttactatacaaataacgctgctatcaacatttgtgtacaagtttttatatgaacatatgttttcatttctcttgggtgtatacctaggaatggaattgctgggtcaaatggtaactatctttaaccctctgaggaatggcaaggctgcttttcaaagtgctgcaccattttacatcccaagcagcagtatatgtggttccaatgccgacacatcctcaccgacacttgttatttttagttttgtgtgcatgtatagtttatgccatcctagtgggttgaagtggtaccttcttgtggttttgatttgcacttccctcatgactaatgatggctgagcatcttttcatgtgctgcttagctattcctatatctttagtagagaaatgtctattcagatcttttgctcatttaaaatgttggtgttcttggtcatttaaaaaaaaaaaaaaaagccaaattaccaacatgaactgaagtcaggatgtgggttctcaaatatcttaggagaaatcccgcccccctccgcccgcccccaactgccagacagagtcttactctgtcacccagactgcagtgcagtggcgcaatctttgctcactgcaacctacacctcccaggttcaggtgatgctcatgcctcaacctcccaagtagctgggagtacaggcatgcaccaccacgccaagctaattttgtatttttagtagagacgggctttcaccatgttggccaggctggtctcaaactcctgacctcaggtgatccgcccgtctccgcctcccaaagtgctgagccatggcacccggccttaagagaaattcttaatcagtccttagtgggtacttttcagtcccgagatggttatggatgtttagaggccagagggatgggaggaaatacctgtgataaaaaggtgacctgaagagataagccaaattcctacaaagaactacttgcacagacaccaaagccaaaaatatctggcctttaagaaaaagtttgctgccgggcacggtggctcatgcctataatgccagcactttgggaggccgaggcgggcggatcatgaggtcaggagatcgagaccatcctggctaacacggtgaaaccccatctctactaaaaatacaaaaaattagttgggcatggtggcgggcgcttgtagtcccagctactcgggaggctgaagcaggagaatggcgtgaaccccagaggcagagcttgcagtgagcccagatcgcgccactgcactccagcctgggcgacagagcgagactccatctccgtctcaaaaaaaaaaaa

SEQ ID NO: 240 - protein, 264 aa, Homo sapiens
MTEGRHCQVHLLDDRRLELLVQPKLLARELLDLVASHFNLKEKEYFGITFIDDTGQQNWLQLDHRVLDHDLPKKPGPTILHFAVRFYIESISFLKDKTTVELFFLNAKACVHKGQIEVESETIFKLAAFILQEAKGDYTSDENARKDLKTLPAFPTKTLQEHPSLAYCEDRVIEHYLKIKGLTRGQAVVQYMKIVEALPTYGVHYYAVKDKQGLPWWLGISYKGIGQYDIQDKVKPRKLFQWKQLENLYFREKKFAVEVHDPRR

SEQ ID NO: 241 - DNA, 5484 bp, Homo sapiens
tgtgaaattgagttacacctaagtgtcttatgaaactcagttcagaactcaccggagctgccgtctgggaggggggagggcggaagaaccctgaggtttttcctcacatttctgtcccatttttggaacctctggatttaaagaaatgaaaacctcaagtttgtggagattttaagaaatggttattccaatggaaacagctggagaacttatatttccgtgagaaaaaatttgctgttgaagttcatgatccacgaaggatttcagtttcaagaagaacctttgggcaaagtggcttgtttgtgcaaacatggtatgctaactcttctctcatcaagtccatttgggtaatggcaattagtcagcatcagttttacttggaccggaagcaaagcaaagcaaaaattccttcagccaggagtttagatgagattgcaatggatttgacagagacaggaacacaaagggcctccaagctggtgacactggagacgaaaagtcagttcatcatggcaagtaatggcagtttaatctcctcaggttctcaagactcagaagttagtgaagagcaaaagagagaaaaaatccttgaactaaagaagaaggagaaactattacaagaaaaacttctgaaaaaagttgaggagcttaagaagatctgtctgcgggaggctgagctcacaggcaaaatgccaaaggagtatcccctgaacataggcgagaagcctcctcaggtcagaagacgtgtgggtactgcgttcaaattagatgacaacttgctgccgagtgaagaagatcctgctttgcaagaactggagagtaattttctaatacaacaaaagctggtggaagctgcaaagaaacttgccaatgagccagacctttgtaaaactgtgaagaaaaagcgaaagcaagattacacagatgcgatgaaaaagcttcaggagattgaaaatgcaataaacgaataccgaattaggtgtggaaagaaacccagccagaaagcaacagtgttaccagaagacataatcccctcagagagtagctctttgtctgacaccaccacctatgatgatcccagtgatgccttcacttttcctgggcagcgatcaagttcagtacctcattctccaagaattcttccccccaagtctcttggtattgagcgaatccatttcagaaagtcgtccatcaatgaacagtttgtggataccaggcagtccagagaaatgctgtccacacacagcagcccttacaaaactctggagaggcggccccagggaggacgaagcatgcccaccacgccagttcttacccgaaacgcctacagcagcagccacttggaacccgaatcttcatctcagcactgccgccagcggagtggaagcctggagtcccagtcccacctgctctccgagatggacagcgataagccatttttctccctctccaaatcccaaagaagcagcagcacagaaatcctcgatgacgggtcttcttatacaagccaatcaagcacagagtattactgtgtgacaccagttaccggcccctattacaccacccagaccctggacactcgcaccaggggtcggaggaggtcaaagaaacagaatgtttctacttcaaattcaggaagcatgcccaacctagcacaaaaggatagtttgaggaatggtgtttactcaaagagtcaggagccaccgtcttccagttactacattgccgggtacacaccctatgcagagtgtgacttttattacagtggtggttatgtctatgagaatgacaccgagggacagtatagtgtcaacccttcctaccggtcctcagcccactatggatatgagcgccagagggactacagcagatcctttcacgaagatgaggtcgaccgggtaccccataacccatatgcaactctccggctgccaaggaaggctgctgcaaaatcggagcacatcaccaaaaacatccacaaggccttagttgccgagcacttgcgtggctggtaccagcgggcctctgggcagaaggatcagggacacagcccgcagaccagctttgactcagacaggggatcacagagatgcctggggtttgcggggctgcaagtaccttgttctccaagcagtcgtgcatcctcgtactcttcagtgtcttctacaaatgcttctgggaactggaggacccagttaaccatagggctgtcggattacgagactccagcacattcttcttacaccagctgctatggcaatgtctataatcctttaccctctccaagcagacaatacacagaaatcagtcaactggatggtacagatggaaaccagctggaagacaacctggagagtagtgagcagagactcttttggcatgaagattcaaagcctggaacattagtctgaactgcagttggacctcctgaccaagcactgcgttctcacactagtgtgccttgcaaattgtatttgtcttccgagaggatgttcgttttagaaacctaaagacatcaaaggttgaagagaagacttagttgccctggaagtgaatcagtgaatcacacaccaagccccacaaagcccctaaaggaggatttggcctttcaaactctaggcactaacgtaactgtagggtctgcccacatgttgaagtattgccaagagaggactcagtgtgaagccttcatcaatagcaagcactttttaagggagtaaaagttgttaaaggcaaacctcaaaaacatgaaagggcattcaggatgtcccatggcaataagaacaggggaaatctcagagcacaattcagcaggatgagagaaggggaaccagaagctccggagtcattgctcacttcagagtttgaattcgtgagctgacaaagagtaacatgctctttctacacagacatggacaatttagacagtattggaaaattacttgaagctggattttcatgaagttctgaatgagtgtaaatgttttttaggatactataaagagtgatgtttttcataagcaccataaaatgggttctggaaaaactgattaccttagcatcctgtaatataacttatggtagcagattggggaaaatgaagcagcccactgaataattgacaaagtctgcttggagaacattctaaggtacaatatcatggagctcctttttcctttctccactaattgcgtgatgagctattgttctggctgttaattctccaactcggctgtcatttgaagtggcagacttaatatggaaagtttttataattatgagtttgaaaaagcattttaagatgatacagaaagtatccaaaacaacagaaaaaaaaagccacgtcattttagatgaattgcgtgccttaaaatggtgaacgttagaaaattaaacaagtctggattccacaagtagttccaagtcaccaagtgacaaaaacaaggttaacattaaaaaagaaaaacaacaacaacgacaaaaagctccaagctgcagtggatttaattatgaggctaaaactacctcatactttccttggaagaactaattagctatggtttattgtagggttttgtttgtttgttttttaaagcaaatgatttccatattccagattgatcttttttgtcatctttgcttcaaaattacataaaaggtgctcctttcccccttcttttatacaagtttcttgttcatattgtgaatagaaaagtttctgaacaacttttttggaacattttctatctatattccaaagcatgtaatatatacataaaaacgatttgttaaactggtccttagtcatttgtataattagaaatgaagtttgggaaaaaattttggaaaaaagacaagcaaaaaaaaataacttattccttttttgcatatttgtatagccttctagaatcagaaataacctttttgcatattcttttattgttctgacttttcaagacctattatttttttacataggtcaataaacaaaaggtgtgctactgaaaatgtttacgttttcttccatttatgtcaggggttcatgtgaagcaggtcgcagtgctctacttcaagtaatcatattgggcaaggcttcggatttttatttatagtattaccgtattttattaattccgggatgtacatttttaaatatttacattaaaaacatggttcatctttttattgatggcatattctacttgaattggcagttttttcttaatagtacattaaaaataatgctgtgtcttacaataaagttgccttagaattgatgaaatgcggtagtttgtctcactgaggatgactggtgagaacttttaggttttttaatcttgggaatgttgtttatttgtagcaagtaatttatactaatttcacagactggcaaacaggtcttctaaattcaagaaattagttctctgacatcctttaatcctacataatgtggagaagggagtggaaatgaaatatatttccatacatgtatcttgcataaaataacatttttctgttcctgaaatagtatggttacacttgcaagcatgccttgaaagggcaaatataacttggctcccacagaggaaaagaaggtatagaaatggaagctcagggccaggcatagcggctcacacctgtaatcccagcactttgggaggccgaagtgggaggattgcttgagctcaggagttcaagaccagcctggacaacatggtgaaaccccatctctatgaaaatacaaaaattagccagtcatggtgatgtgtgcctgtaatctcagctacttgggaggctgagttgggaggatatcttgagcccaggaggcggaggttgcagtgagccaggatcgtgccactgcattccagcctaggcaataacagaccttgtctcaagaaaaaaaaaaaaaaaaaaaaaagaaagaaatggaagttcagcaatcctactgcacggttttcttcgtctcttttgaaaaacatttctcaaccgcattggtattaaaccaattaaactacgttatttattaaaagccaaaagtgacaaaagtacattattcaacatgtacgtttcctcttttttattacaaaataccatggttaaatgcaaaaccaaaatagtacataacaaaaacataatcgtgcccattagccgaacactctcagatataatagttaatttattgtatatttgtttggatttttttctatgcatatagtaatttttttaaagtccagcatattacaagtacagttttacaacatttttttttgtttgttttgttttctgcctaatatatcttgggcctctgtatcaagacatactgatctacctcataaagatatatgtttaacaaggtggatttttaaaattgcctcaccctactagatgtttatctatttttctatatttgacaaaaattttcaaaattcttccttgtactcacaaaagcttaaatattacaagaaataaagattccggaattgt

SEQ ID NO: 242 - protein, 686 aa, Homo sapiens
MAISQHQFYLDRKQSKAKIPSARSLDEIAMDLTETGTQRASKLVTLETKSQFIMASNGSLISSGSQDSEVSEEQKREKILELKKKEKLLQEKLLKKVEELKKICLREAELTGKMPKEYPLNIGEKPPQVRRRVGTAFKLDDNLLPSEEDPALQELESNFLIQQKLVEAAKKLANEPDLCKTVKKKRKQDYTDAMKKLQEIENAINEYRIRCGKKPSQKATVLPEDIIPSESSSLSDTTTYDDPSDAFTFPGQRSSSVPHSPRILPPKSLGIERIHFRKSSINEQFVDTRQSREMLSTHSSPYKTLERRPQGGRSMPTTPVLTRNAYSSSHLEPESSSQHCRQRSGSLESQSHLLSEMDSDKPFFSLSKSQRSSSTEILDDGSSYTSQSSTEYYCVTPVTGPYYTTQTLDTRTRGRRRSKKQNVSTSNSGSMPNLAQKDSLRNGVYSKSQEPPSSSYYIAGYTPYAECDFYYSGGYVYENDTEGQYSVNPSYRSSAHYGYERQRDYSRSFHEDEVDRVPHNPYATLRLPRKAAAKSEHITKNIHKALVAEHLRGWYQRASGQKDQGHSPQTSFDSDRGSQRCLGFAGLQVPCSPSSRASSYSSVSSTNASGNWRTQLTIGLSDYETPAHSSYTSCYGNVYNPLPSPSRQYTEISQLDGTDGNQLEDNLESSEQRLFWHEDSKPGTLV

SEQ ID NO: 243 - DNA, 4490 bp, Homo sapiens
cgggataccttgtttatagtaccttctctttgccagtccatcttcaaattggaattatagaaagtagagggagggatagtctaccgtctctcactggattggtgccacctaaaacattgttatgctggaaatgctagaatataatcactatcaggtgcagacccacctcgaaaaccccaccaagtaccacatacagcaagcccaacggcagcaggtaaagcagtacctttctaccactttagcaaataaacatgccaaccaagtcctgagcttgccatgtccaaaccagcctggcgatcatgtcatgccaccggtgccggggagcagcgcacccaacagccccatggctatgcttacgcttaactccaactgtgaaaaagagggattttataagtttgaagagcaaaacagggcagagagcgagtgcccaggcatgaacacacattcacgagcgtcctgtatgcagatggatgatgtaatcgatgacatcattagcctagaatcaagttataatgaggaaatcttgggcttgatggatcctgctttgcaaatggcaaatacgttgcctgtctcgggaaacttgattgatctttatggaaaccaaggtctgcccccaccaggcctcaccatcagcaactcctgtccagccaaccttcccaacataaaaagggagctcacagcgtgtatttttcccacagagtctgaagcaagagcactggccaaagagaggcagaaaaaggacaatcacaacctgattgaacgaagaagaagatttaacataaatgaccgcattaaagaactaggtactttgattcccaagtcaaatgatccagacatgcgctggaacaagggaaccatcttaaaagcatccgtggactatatccgaaagttgcaacgagaacagcaacgcgcaaaagaacttgaaaaccgacagaagaaactggagcacgccaaccggcatttgttgctcagaatacaggaacttgaaatgcaggctcgagctcatggactttcccttattccatccacgggtctctgctctccagatttggtgaatcggatcatcaagcaagaacccgttcttgagaactgcagccaagacctccttcagcatcatgcagacctaacctgtacaacaactctcgatctcacggatggcaccatcaccttcaacaacaacctcggaactgggactgaggccaaccaagcctatagtgtccccacaaaaatgggatccaaactggaagacatcctgatggacgacaccctttctcccgtcggtgtcactgatccactcctttcctcagtgtcccccggagcttccaaaacaagcagccggaggagcagtatgagcatggaagagacggagcacacttgttagcgaatcctccctgcactgcattcgcacaaactgcttcctttcttgattcgtagatttaataacttacctgaaggggttttcttgataattttcctttaatatgaaattttttttcatgctttatcaatagcccaggatatattttatttttagaattttgtgaaacagacttgtatattctattttacaactacaaatgcctccaaagtattgtacaaataagtgtgcagtatctgtgaactgaattcaccacagactttagctttctgagcaagaggattttgcgtcagagaaatgtctgtccatttttattcaggggaaacttgatttgagatttttatgcctgtgacttccttggaaatcaaatgtaaagtttaattgaaagaatgtaaagcaaccaaaaagaaaaaaaaaaagaaagaaagaggaaaagaaatccatactaacccttttccattttataaatgtattgattcattggtactgccttaaagatacagtacccctctagctttgtttagtctttatactgcaaactatttaaagaaatatgtattctgtaaaagaaaaaaaaaatgcggccttttcatgaggatcgtctggttagaaaacataactgataccaaccgaaactgaagggagttagaccaaggctctgaaatataaagtctaatcttgctctcttttattctgtgctgttacagttttcttcatcaatgagtgtgatccagtttttcataagatattttattttgaaatggaaattaatgtcctctcaaagtaaaatattgaggagcactgaaagtatgttttactttttttttattttatttttgcttttgataagaaaaccgaactgggcatatttctaattggctttactatttttatttttaaattatgttttactgttcatttgatttgtacagattctttattatcattgttcttttcaatatatttgtattaatttgtaagaatatgcatcttaaaatggcaagttttccatatttttacaactcactggtggttttccgcattctttgtacacccatgaaagaaaacttttatgcaaggtcttgcatttaaaagacagctttgcgaatattttgtaaattacagtctcactcagaactgtttttggacacatttaaggtgtagtattaataggttaaaaccaggctttctagaaagaataaacttacatatttatttttaggacatgaaaatagcaatattcttggagattgataaccatagcattaatacgcccattatggtcatttaaattggggtttatttcagcaaacttgttgaatttatttttaagaaagaaatactgtattgggaagttactgttacttgataacaatgttttaacaagaagcaatgttataaagttagtttcagtgcattatctacttgtgtagtcctatgcaataacagtagtgttacatgtatcaagcctagatgttttatacagatgccatatagtgttatgagccaggctgttgaatggaatttctcagtagcagcctacaactgaatagcaagtggcataaagcatatccattcagaatgaagtgccttaaatatagcagtagtcttttttggactagcactgactgaactgtaatgtaggggaaagtttcatgatggtatctatagtcaagacgaacatgtagcatggtgcctatgtagacaatataagagcttccaattttccttcagatatttttaatattaaatatattttagtgacagagtgccaacttctttcatcaggaaaccttattcaggagggtttttaaaaagtgtttaaatgtcaaatgtgaattggtgatgggtgatggagggttcagagaggagtgatcgtcagatgtgtgaatggacggtttaggtgaaaataatcaactgcatagttcccatgcacgctgggcaatgagaatccttggaaacattggtgatgctatcagttttatagctttatttcttaagggggtagggaaaattagttcccattctttcaacccccttaactgtatagctcttttcctagaatagtgacgcaaatctgcatgaacagctaattgtaccatagtgttcattgatacaatcatagcattgtctatttttctcttcatatttatatgggggggagggcgctggatgcaaaagttgaagatcgtgatgctatgatgttagttttccttagctgattttgagggtttttaaaaataaagcaaggttgactaacctacggccacgggaacaggaccatggttaagcaaccatatagaaagctttgttgaaagaaagtatggcatcttgtaccactgccctgactgtcacaactcctaaccttgccattgcctgcctccccctccccttctccttaagagacaatttctgcaggtggcaggtgagcaagcccaggagaatgctgcaatcttgggggtggttttatttatttcttttttgccaaatagagtgtggattcatttcaggggctagctaagccaagaggcagtggtttgggcttgttgtttgtaacaagaaaatgatccacaccactcccccgattcccgggtgcagaattgtaactcggggttgggcctctatatggagtgaccaaaatgccaaaattgtccatctgcctctgagtagggcaatggaaataccaaaccttctgactttgccaaaaagcatacaagcaacctggtcatacataggatgacaaaattctttctggttgtttttaaacaataaagcaataagaacaaatacaatacataggaagttaaaagcacaaaggaatgaacttattaatatttttgaaaaatgcactgggaaaaagttgatgtcaataacagtataaaacagccctatttcttgataaaaaatgacaaatgactgtctcttgcggatgcttggtactgtaatgttaataatagtcacctgctgttggatgcagcaataatttctgtatggtccatagcactgtatattatggatcgatattaatgtatccaatgaaataatcgacttgttcttgatagcctcattaaagcatttggtttttcacataaaaaaaaaaaaaaaaaaaaaa

SEQ ID NO: 244 - protein, 419 aa, Homo sapiens
MLEMLEYNHYQVQTHLENPTKYHIQQAQRQQVKQYLSTTLANKHANQVLSLPCPNQPGDHVMPPVPGSSAPNSPMAMLTLNSNCEKEGFYKFEEQNRAESECPGMNTHSRASCMQMDDVIDDIISLESSYNEEILGLMDPALQMANTLPVSGNLIDLYGNQGLPPPGLTISNSCPANLPNIKRELTACIFPTESEARALAKERQKKDNHNLIERRRRFNINDRIKELGTLIPKSNDPDMRWNKGTILKASVDYIRKLQREQQRAKELENRQKKLEHANRHLLLRIQELEMQARAHGLSLIPSTGLCSPDLVNRIIKQEPVLENCSQDLLQHHADLTCTTTLDLTDGTITFNNNLGTGTEANQAYSVPTKMGSKLEDILMDDTLSPVGVTDPLLSSVSPGASKTSSRRSSMSMEETEHTC

SEQ ID NO: 245 - DNA, 4700 bp, Homo sapiens
cagacctattccgctccatctctgaagtcaaatgggacaccttgaaaatacttcagtggttttcccacgagctattttctctctctgtgaaaaggaaaccaggaaattgactctgtgcctgttttcaagaagcagttccgccgagcatcctggggcctccaagcctccgataagctcctccagtatgacatcacgcatcttgctacgccagcaactcatgcgtgagcagatgcaggagcaggagcgcagggagcagcagcagaagctgcaggcggcccagttcatgcaacagagagtgcccgtgagtcagacaccagccataaacgtcagtgtgcccaccacccttccctctgccacgcaggtgccgatggaagtccttaaggtgcagacccacctcgaaaaccccaccaagtaccacatacagcaagcccaacggcagcaggtaaagcagtacctttctaccactttagcaaataaacatgccaaccaagtcctgagcttgccatgtccaaaccagcctggcgatcatgtcatgccaccggtgccggggagcagcgcacccaacagccccatggctatgcttacgcttaactccaactgtgaaaaagagggattttataagtttgaagagcaaaacagggcagagagcgagtgcccaggcatgaacacacattcacgagcgtcctgtatgcagatggatgatgtaatcgatgacatcattagcctagaatcaagttataatgaggaaatcttgggcttgatggatcctgctttgcaaatggcaaatacgttgcctgtctcgggaaacttgattgatctttatggaaaccaaggtctgcccccaccaggcctcaccatcagcaactcctgtccagccaaccttcccaacataaaaagggagctcacagagtctgaagcaagagcactggccaaagagaggcagaaaaaggacaatcacaacctgattgaacgaagaagaagatttaacataaatgaccgcattaaagaactaggtactttgattcccaagtcaaatgatccagacatgcgctggaacaagggaaccatcttaaaagcatccgtggactatatccgaaagttgcaacgagaacagcaacgcgcaaaagaacttgaaaaccgacagaagaaactggagcacgccaaccggcatttgttgctcagaatacaggaacttgaaatgcaggctcgagctcatggactttcccttattccatccacgggtctctgctctccagatttggtgaatcggatcatcaagcaagaacccgttcttgagaactgcagccaagacctccttcagcatcatgcagacctaacctgtacaacaactctcgatctcacggatggcaccatcaccttcaacaacaacctcggaactgggactgaggccaaccaagcctatagtgtccccacaaaaatgggatccaaactggaagacatcctgatggacgacaccctttctcccgtcggtgtcactgatccactcctttcctcagtgtcccccggagcttccaaaacaagcagccggaggagcagtatgagcatggaagagacggagcacacttgttagcgaatcctccctgcactgcattcgcacaaactgcttcctttcttgattcgtagatttaataacttacctgaaggggttttcttgataattttcctttaatatgaaattttttttcatgctttatcaatagcccaggatatattttatttttagaattttgtgaaacagacttgtatattctattttacaactacaaatgcctccaaagtattgtacaaataagtgtgcagtatctgtgaactgaattcaccacagactttagctttctgagcaagaggattttgcgtcagagaaatgtctgtccatttttattcaggggaaacttgatttgagatttttatgcctgtgacttccttggaaatcaaatgtaaagtttaattgaaagaatgtaaagcaaccaaaaagaaaaaaaaaaagaaagaaagaggaaaagaaatccatactaacccttttccattttataaatgtattgattcattggtactgccttaaagatacagtacccctctagctttgtttagtctttatactgcaaactatttaaagaaatatgtattctgtaaaagaaaaaaaaaatgcggccttttcatgaggatcgtctggttagaaaacataactgataccaaccgaaactgaagggagttagaccaaggctctgaaatataaagtctaatcttgctctcttttattctgtgctgttacagttttcttcatcaatgagtgtgatccagtttttcataagatattttattttgaaatggaaattaatgtcctctcaaagtaaaatattgaggagcactgaaagtatgttttactttttttttattttatttttgcttttgataagaaaaccgaactgggcatatttctaattggctttactatttttatttttaaattatgttttactgttcatttgatttgtacagattctttattatcattgttcttttcaatatatttgtattaatttgtaagaatatgcatcttaaaatggcaagttttccatatttttacaactcactggtggttttccgcattctttgtacacccatgaaagaaaacttttatgcaaggtcttgcatttaaaagacagctttgcgaatattttgtaaattacagtctcactcagaactgtttttggacacatttaaggtgtagtattaataggttaaaaccaggctttctagaaagaataaacttacatatttatttttaggacatgaaaatagcaatattcttggagattgataaccatagcattaatacgcccattatggtcatttaaattggggtttatttcagcaaacttgttgaatttatttttaagaaagaaatactgtattgggaagttactgttacttgataacaatgttttaacaagaagcaatgttataaagttagtttcagtgcattatctacttgtgtagtcctatgcaataacagtagtgttacatgtatcaagcctagatgttttatacagatgccatatagtgttatgagccaggctgttgaatggaatttctcagtagcagcctacaactgaatagcaagtggcataaagcatatccattcagaatgaagtgccttaaatatagcagtagtcttttttggactagcactgactgaactgtaatgtaggggaaagtttcatgatggtatctatagtcaagacgaacatgtagcatggtgcctatgtagacaatataagagcttccaattttccttcagatatttttaatattaaatatattttagtgacagagtgccaacttctttcatcaggaaaccttattcaggagggtttttaaaaagtgtttaaatgtcaaatgtgaattggtgatgggtgatggagggttcagagaggagtgatcgtcagatgtgtgaatggacggtttaggtgaaaataatcaactgcatagttcccatgcacgctgggcaatgagaatccttggaaacattggtgatgctatcagttttatagctttatttcttaagggggtagggaaaattagttcccattctttcaacccccttaactgtatagctcttttcctagaatagtgacgcaaatctgcatgaacagctaattgtaccatagtgttcattgatacaatcatagcattgtctatttttctcttcatatttatatgggggggagggcgctggatgcaaaagttgaagatcgtgatgctatgatgttagttttccttagctgattttgagggtttttaaaaataaagcaaggttgactaacctacggccacgggaacaggaccatggttaagcaaccatatagaaagctttgttgaaagaaagtatggcatcttgtaccactgccctgactgtcacaactcctaaccttgccattgcctgcctccccctccccttctccttaagagacaatttctgcaggtggcaggtgagcaagcccaggagaatgctgcaatcttgggggtggttttatttatttcttttttgccaaatagagtgtggattcatttcaggggctagctaagccaagaggcagtggtttgggcttgttgtttgtaacaagaaaatgatccacaccactcccccgattcccgggtgcagaattgtaactcggggttgggcctctatatggagtgaccaaaatgccaaaattgtccatctgcctctgagtagggcaatggaaataccaaaccttctgactttgccaaaaagcatacaagcaacctggtcatacataggatgacaaaattctttctggttgtttttaaacaataaagcaataagaacaaatacaatacataggaagttaaaagcacaaaggaatgaacttattaatatttttgaaaaatgcactgggaaaaagttgatgtcaataacagtataaaacagccctatttcttgataaaaaatgacaaatgactgtctcttgcggatgcttggtactgtaatgttaataatagtcacctgctgttggatgcagcaataatttctgtatggtccatagcactgtatattatggatcgatattaatgtatccaatgaaataatcgacttgttcttgatagcctcattaaagcatttggtttttcacataaaaaaaaaaaaaaaaaaaaaa

SEQ ID NO: 246 - protein, 519 aa, Homo sapiens
MGHLENTSVVFPRAIFSLCEKETRKLTLCLFSRSSSAEHPGASKPPISSSSMTSRILLRQQLMREQMQEQERREQQQKLQAAQFMQQRVPVSQTPAINVSVPTTLPSATQVPMEVLKVQTHLENPTKYHIQQAQRQQVKQYLSTTLANKHANQVLSLPCPNQPGDHVMPPVPGSSAPNSPMAMLTLNSNCEKEGFYKFEEQNRAESECPGMNTHSRASCMQMDDVIDDIISLESSYNEEILGLMDPALQMANTLPVSGNLIDLYGNQGLPPPGLTISNSCPANLPNIKRELTESEARALAKERQKKDNHNLIERRRRFNINDRIKELGTLIPKSNDPDMRWNKGTILKASVDYIRKLQREQQRAKELENRQKKLEHANRHLLLRIQELEMQARAHGLSLIPSTGLCSPDLVNRIIKQEPVLENCSQDLLQHHADLTCTTTLDLTDGTITFNNNLGTGTEANQAYSVPTKMGSKLEDILMDDTLSPVGVTDPLLSSVSPGASKTSSRRSSMSMEETEHTC

SEQ ID NO: 247 - DNA, 4472 bp, Homo sapiens
cgggataccttgtttatagtaccttctctttgccagtccatcttcaaattggaattatagaaagtagagggagggatagtctaccgtctctcactggattggtgccacctaaaacattgttatgctggaaatgctagaatataatcactatcaggtgcagacccacctcgaaaaccccaccaagtaccacatacagcaagcccaacggcagcaggtaaagcagtacctttctaccactttagcaaataaacatgccaaccaagtcctgagcttgccatgtccaaaccagcctggcgatcatgtcatgccaccggtgccggggagcagcgcacccaacagccccatggctatgcttacgcttaactccaactgtgaaaaagagggattttataagtttgaagagcaaaacagggcagagagcgagtgcccaggcatgaacacacattcacgagcgtcctgtatgcagatggatgatgtaatcgatgacatcattagcctagaatcaagttataatgaggaaatcttgggcttgatggatcctgctttgcaaatggcaaatacgttgcctgtctcgggaaacttgattgatctttatggaaaccaaggtctgcccccaccaggcctcaccatcagcaactcctgtccagccaaccttcccaacataaaaagggagctcacagagtctgaagcaagagcactggccaaagagaggcagaaaaaggacaatcacaacctgattgaacgaagaagaagatttaacataaatgaccgcattaaagaactaggtactttgattcccaagtcaaatgatccagacatgcgctggaacaagggaaccatcttaaaagcatccgtggactatatccgaaagttgcaacgagaacagcaacgcgcaaaagaacttgaaaaccgacagaagaaactggagcacgccaaccggcatttgttgctcagaatacaggaacttgaaatgcaggctcgagctcatggactttcccttattccatccacgggtctctgctctccagatttggtgaatcggatcatcaagcaagaacccgttcttgagaactgcagccaagacctccttcagcatcatgcagacctaacctgtacaacaactctcgatctcacggatggcaccatcaccttcaacaacaacctcggaactgggactgaggccaaccaagcctatagtgtccccacaaaaatgggatccaaactggaagacatcctgatggacgacaccctttctcccgtcggtgtcactgatccactcctttcctcagtgtcccccggagcttccaaaacaagcagccggaggagcagtatgagcatggaagagacggagcacacttgttagcgaatcctccctgcactgcattcgcacaaactgcttcctttcttgattcgtagatttaataacttacctgaaggggttttcttgataattttcctttaatatgaaattttttttcatgctttatcaatagcccaggatatattttatttttagaattttgtgaaacagacttgtatattctattttacaactacaaatgcctccaaagtattgtacaaataagtgtgcagtatctgtgaactgaattcaccacagactttagctttctgagcaagaggattttgcgtcagagaaatgtctgtccatttttattcaggggaaacttgatttgagatttttatgcctgtgacttccttggaaatcaaatgtaaagtttaattgaaagaatgtaaagcaaccaaaaagaaaaaaaaaaagaaagaaagaggaaaagaaatccatactaacccttttccattttataaatgtattgattcattggtactgccttaaagatacagtacccctctagctttgtttagtctttatactgcaaactatttaaagaaatatgtattctgtaaaagaaaaaaaaaatgcggccttttcatgaggatcgtctggttagaaaacataactgataccaaccgaaactgaagggagttagaccaaggctctgaaatataaagtctaatcttgctctcttttattctgtgctgttacagttttcttcatcaatgagtgtgatccagtttttcataagatattttattttgaaatggaaattaatgtcctctcaaagtaaaatattgaggagcactgaaagtatgttttactttttttttattttatttttgcttttgataagaaaaccgaactgggcatatttctaattggctttactatttttatttttaaattatgttttactgttcatttgatttgtacagattctttattatcattgttcttttcaatatatttgtattaatttgtaagaatatgcatcttaaaatggcaagttttccatatttttacaactcactggtggttttccgcattctttgtacacccatgaaagaaaacttttatgcaaggtcttgcatttaaaagacagctttgcgaatattttgtaaattacagtctcactcagaactgtttttggacacatttaaggtgtagtattaataggttaaaaccaggctttctagaaagaataaacttacatatttatttttaggacatgaaaatagcaatattcttggagattgataaccatagcattaatacgcccattatggtcatttaaattggggtttatttcagcaaacttgttgaatttatttttaagaaagaaatactgtattgggaagttactgttacttgataacaatgttttaacaagaagcaatgttataaagttagtttcagtgcattatctacttgtgtagtcctatgcaataacagtagtgttacatgtatcaagcctagatgttttatacagatgccatatagtgttatgagccaggctgttgaatggaatttctcagtagcagcctacaactgaatagcaagtggcataaagcatatccattcagaatgaagtgccttaaatatagcagtagtcttttttggactagcactgactgaactgtaatgtaggggaaagtttcatgatggtatctatagtcaagacgaacatgtagcatggtgcctatgtagacaatataagagcttccaattttccttcagatatttttaatattaaatatattttagtgacagagtgccaacttctttcatcaggaaaccttattcaggagggtttttaaaaagtgtttaaatgtcaaatgtgaattggtgatgggtgatggagggttcagagaggagtgatcgtcagatgtgtgaatggacggtttaggtgaaaataatcaactgcatagttcccatgcacgctgggcaatgagaatccttggaaacattggtgatgctatcagttttatagctttatttcttaagggggtagggaaaattagttcccattctttcaacccccttaactgtatagctcttttcctagaatagtgacgcaaatctgcatgaacagctaattgtaccatagtgttcattgatacaatcatagcattgtctatttttctcttcatatttatatgggggggagggcgctggatgcaaaagttgaagatcgtgatgctatgatgttagttttccttagctgattttgagggtttttaaaaataaagcaaggttgactaacctacggccacgggaacaggaccatggttaagcaaccatatagaaagctttgttgaaagaaagtatggcatcttgtaccactgccctgactgtcacaactcctaaccttgccattgcctgcctccccctccccttctccttaagagacaatttctgcaggtggcaggtgagcaagcccaggagaatgctgcaatcttgggggtggttttatttatttcttttttgccaaatagagtgtggattcatttcaggggctagctaagccaagaggcagtggtttgggcttgttgtttgtaacaagaaaatgatccacaccactcccccgattcccgggtgcagaattgtaactcggggttgggcctctatatggagtgaccaaaatgccaaaattgtccatctgcctctgagtagggcaatggaaataccaaaccttctgactttgccaaaaagcatacaagcaacctggtcatacataggatgacaaaattctttctggttgtttttaaacaataaagcaataagaacaaatacaatacataggaagttaaaagcacaaaggaatgaacttattaatatttttgaaaaatgcactgggaaaaagttgatgtcaataacagtataaaacagccctatttcttgataaaaaatgacaaatgactgtctcttgcggatgcttggtactgtaatgttaataatagtcacctgctgttggatgcagcaataatttctgtatggtccatagcactgtatattatggatcgatattaatgtatccaatgaaataatcgacttgttcttgatagcctcattaaagcatttggtttttcacataaaaaaaaaaaaaaaaaaaaaa

SEQ ID NO: 248 - protein, 413 aa, Homo sapiens
MLEMLEYNHYQVQTHLENPTKYHIQQAQRQQVKQYLSTTLANKHANQVLSLPCPNQPGDHVMPPVPGSSAPNSPMAMLTLNSNCEKEGFYKFEEQNRAESECPGMNTHSRASCMQMDDVIDDIISLESSYNEEILGLMDPALQMANTLPVSGNLIDLYGNQGLPPPGLTISNSCPANLPNIKRELTESEARALAKERQKKDNHNLIERRRRFNINDRIKELGTLIPKSNDPDMRWNKGTILKASVDYIRKLQREQQRAKELENRQKKLEHANRHLLLRIQELEMQARAHGLSLIPSTGLCSPDLVNRIIKQEPVLENCSQDLLQHHADLTCTTTLDLTDGTITFNNNLGTGTEANQAYSVPTKMGSKLEDILMDDTLSPVGVTDPLLSSVSPGASKTSSRRSSMSMEETEHTC

SEQ ID NO: 249 - DNA, 4788 bp, Homo sapiens
agagctcggcactgcgccggggcgcacggctcgggggacccaggcccagctaccttccctccgcccccgggctctgttctcactttccagcagtggaaggacgggaagcgggagccatgcagtccgaatcggggatcgtgccggatttcgaagtcggggaggagtttcatgaagagcccaaaacctattacgaactcaaaagtcaaccgctgaagagcagcagttccgccgagcatcctggggcctccaagcctccgataagctcctccagtatgacatcacgcatcttgctacgccagcaactcatgcgtgagcagatgcaggagcaggagcgcagggagcagcagcagaagctgcaggcggcccagttcatgcaacagagagtgcccgtgagtcagacaccagccataaacgtcagtgtgcccaccacccttccctctgccacgcaggtgccgatggaagtccttaaggtgcagacccacctcgaaaaccccaccaagtaccacatacagcaagcccaacggcagcaggtaaagcagtacctttctaccactttagcaaataaacatgccaaccaagtcctgagcttgccatgtccaaaccagcctggcgatcatgtcatgccaccggtgccggggagcagcgcacccaacagccccatggctatgcttacgcttaactccaactgtgaaaaagagggattttataagtttgaagagcaaaacagggcagagagcgagtgcccaggcatgaacacacattcacgagcgtcctgtatgcagatggatgatgtaatcgatgacatcattagcctagaatcaagttataatgaggaaatcttgggcttgatggatcctgctttgcaaatggcaaatacgttgcctgtctcgggaaacttgattgatctttatggaaaccaaggtctgcccccaccaggcctcaccatcagcaactcctgtccagccaaccttcccaacataaaaagggagctcacagagtctgaagcaagagcactggccaaagagaggcagaaaaaggacaatcacaacctgattgaacgaagaagaagatttaacataaatgaccgcattaaagaactaggtactttgattcccaagtcaaatgatccagacatgcgctggaacaagggaaccatcttaaaagcatccgtggactatatccgaaagttgcaacgagaacagcaacgcgcaaaagaacttgaaaaccgacagaagaaactggagcacgccaaccggcatttgttgctcagaatacaggaacttgaaatgcaggctcgagctcatggactttcccttattccatccacgggtctctgctctccagatttggtgaatcggatcatcaagcaagaacccgttcttgagaactgcagccaagacctccttcagcatcatgcagacctaacctgtacaacaactctcgatctcacggatggcaccatcaccttcaacaacaacctcggaactgggactgaggccaaccaagcctatagtgtccccacaaaaatgggatccaaactggaagacatcctgatggacgacaccctttctcccgtcggtgtcactgatccactcctttcctcagtgtcccccggagcttccaaaacaagcagccggaggagcagtatgagcatggaagagacggagcacacttgttagcgaatcctccctgcactgcattcgcacaaactgcttcctttcttgattcgtagatttaataacttacctgaaggggttttcttgataattttcctttaatatgaaattttttttcatgctttatcaatagcccaggatatattttatttttagaattttgtgaaacagacttgtatattctattttacaactacaaatgcctccaaagtattgtacaaataagtgtgcagtatctgtgaactgaattcaccacagactttagctttctgagcaagaggattttgcgtcagagaaatgtctgtccatttttattcaggggaaacttgatttgagatttttatgcctgtgacttccttggaaatcaaatgtaaagtttaattgaaagaatgtaaagcaaccaaaaagaaaaaaaaaaagaaagaaagaggaaaagaaatccatactaacccttttccattttataaatgtattgattcattggtactgccttaaagatacagtacccctctagctttgtttagtctttatactgcaaactatttaaagaaatatgtattctgtaaaagaaaaaaaaaatgcggccttttcatgaggatcgtctggttagaaaacataactgataccaaccgaaactgaagggagttagaccaaggctctgaaatataaagtctaatcttgctctcttttattctgtgctgttacagttttcttcatcaatgagtgtgatccagtttttcataagatattttattttgaaatggaaattaatgtcctctcaaagtaaaatattgaggagcactgaaagtatgttttactttttttttattttatttttgcttttgataagaaaaccgaactgggcatatttctaattggctttactatttttatttttaaattatgttttactgttcatttgatttgtacagattctttattatcattgttcttttcaatatatttgtattaatttgtaagaatatgcatcttaaaatggcaagttttccatatttttacaactcactggtggttttccgcattctttgtacacccatgaaagaaaacttttatgcaaggtcttgcatttaaaagacagctttgcgaatattttgtaaattacagtctcactcagaactgtttttggacacatttaaggtgtagtattaataggttaaaaccaggctttctagaaagaataaacttacatatttatttttaggacatgaaaatagcaatattcttggagattgataaccatagcattaatacgcccattatggtcatttaaattggggtttatttcagcaaacttgttgaatttatttttaagaaagaaatactgtattgggaagttactgttacttgataacaatgttttaacaagaagcaatgttataaagttagtttcagtgcattatctacttgtgtagtcctatgcaataacagtagtgttacatgtatcaagcctagatgttttatacagatgccatatagtgttatgagccaggctgttgaatggaatttctcagtagcagcctacaactgaatagcaagtggcataaagcatatccattcagaatgaagtgccttaaatatagcagtagtcttttttggactagcactgactgaactgtaatgtaggggaaagtttcatgatggtatctatagtcaagacgaacatgtagcatggtgcctatgtagacaatataagagcttccaattttccttcagatatttttaatattaaatatattttagtgacagagtgccaacttctttcatcaggaaaccttattcaggagggtttttaaaaagtgtttaaatgtcaaatgtgaattggtgatgggtgatggagggttcagagaggagtgatcgtcagatgtgtgaatggacggtttaggtgaaaataatcaactgcatagttcccatgcacgctgggcaatgagaatccttggaaacattggtgatgctatcagttttatagctttatttcttaagggggtagggaaaattagttcccattctttcaacccccttaactgtatagctcttttcctagaatagtgacgcaaatctgcatgaacagctaattgtaccatagtgttcattgatacaatcatagcattgtctatttttctcttcatatttatatgggggggagggcgctggatgcaaaagttgaagatcgtgatgctatgatgttagttttccttagctgattttgagggtttttaaaaataaagcaaggttgactaacctacggccacgggaacaggaccatggttaagcaaccatatagaaagctttgttgaaagaaagtatggcatcttgtaccactgccctgactgtcacaactcctaaccttgccattgcctgcctccccctccccttctccttaagagacaatttctgcaggtggcaggtgagcaagcccaggagaatgctgcaatcttgggggtggttttatttatttcttttttgccaaatagagtgtggattcatttcaggggctagctaagccaagaggcagtggtttgggcttgttgtttgtaacaagaaaatgatccacaccactcccccgattcccgggtgcagaattgtaactcggggttgggcctctatatggagtgaccaaaatgccaaaattgtccatctgcctctgagtagggcaatggaaataccaaaccttctgactttgccaaaaagcatacaagcaacctggtcatacataggatgacaaaattctttctggttgtttttaaacaataaagcaataagaacaaatacaatacataggaagttaaaagcacaaaggaatgaacttattaatatttttgaaaaatgcactgggaaaaagttgatgtcaataacagtataaaacagccctatttcttgataaaaaatgacaaatgactgtctcttgcggatgcttggtactgtaatgttaataatagtcacctgctgttggatgcagcaataatttctgtatggtccatagcactgtatattatggatcgatattaatgtatccaatgaaataatcgacttgttcttgatagcctcattaaagcatttggtttttcacataaaaaaaaaaaaaaaaaaaaaa

SEQ ID NO: 250 - protein, 520 aa, Homo sapiens
MQSESGIVPDFEVGEEFHEEPKTYYELKSQPLKSSSSAEHPGASKPPISSSSMTSRILLRQQLMREQMQEQERREQQQKLQAAQFMQQRVPVSQTPAINVSVPTTLPSATQVPMEVLKVQTHLENPTKYHIQQAQRQQVKQYLSTTLANKHANQVLSLPCPNQPGDHVMPPVPGSSAPNSPMAMLTLNSNCEKEGFYKFEEQNRAESECPGMNTHSRASCMQMDDVIDDIISLESSYNEEILGLMDPALQMANTLPVSGNLIDLYGNQGLPPPGLTISNSCPANLPNIKRELTESEARALAKERQKKDNHNLIERRRRFNINDRIKELGTLIPKSNDPDMRWNKGTILKASVDYIRKLQREQQRAKELENRQKKLEHANRHLLLRIQELEMQARAHGLSLIPSTGLCSPDLVNRIIKQEPVLENCSQDLLQHHADLTCTTTLDLTDGTITFNNNLGTGTEANQAYSVPTKMGSKLEDILMDDTLSPVGVTDPLLSSVSPGASKTSSRRSSMSMEETEHTC

SEQ ID NO: 251 - DNA, 4624 bp, Homo sapiens
atggaggcgcttagagttcagatgttcatgccatgctcctttgaaagcttgtatctcagttccgccgagcatcctggggcctccaagcctccgataagctcctccagtatgacatcacgcatcttgctacgccagcaactcatgcgtgagcagatgcaggagcaggagcgcagggagcagcagcagaagctgcaggcggcccagttcatgcaacagagagtgcccgtgagtcagacaccagccataaacgtcagtgtgcccaccacccttccctctgccacgcaggtgccgatggaagtccttaaggtgcagacccacctcgaaaaccccaccaagtaccacatacagcaagcccaacggcagcaggtaaagcagtacctttctaccactttagcaaataaacatgccaaccaagtcctgagcttgccatgtccaaaccagcctggcgatcatgtcatgccaccggtgccggggagcagcgcacccaacagccccatggctatgcttacgcttaactccaactgtgaaaaagagggattttataagtttgaagagcaaaacagggcagagagcgagtgcccaggcatgaacacacattcacgagcgtcctgtatgcagatggatgatgtaatcgatgacatcattagcctagaatcaagttataatgaggaaatcttgggcttgatggatcctgctttgcaaatggcaaatacgttgcctgtctcgggaaacttgattgatctttatggaaaccaaggtctgcccccaccaggcctcaccatcagcaactcctgtccagccaaccttcccaacataaaaagggagctcacagagtctgaagcaagagcactggccaaagagaggcagaaaaaggacaatcacaacctgattgaacgaagaagaagatttaacataaatgaccgcattaaagaactaggtactttgattcccaagtcaaatgatccagacatgcgctggaacaagggaaccatcttaaaagcatccgtggactatatccgaaagttgcaacgagaacagcaacgcgcaaaagaacttgaaaaccgacagaagaaactggagcacgccaaccggcatttgttgctcagaatacaggaacttgaaatgcaggctcgagctcatggactttcccttattccatccacgggtctctgctctccagatttggtgaatcggatcatcaagcaagaacccgttcttgagaactgcagccaagacctccttcagcatcatgcagacctaacctgtacaacaactctcgatctcacggatggcaccatcaccttcaacaacaacctcggaactgggactgaggccaaccaagcctatagtgtccccacaaaaatgggatccaaactggaagacatcctgatggacgacaccctttctcccgtcggtgtcactgatccactcctttcctcagtgtcccccggagcttccaaaacaagcagccggaggagcagtatgagcatggaagagacggagcacacttgttagcgaatcctccctgcactgcattcgcacaaactgcttcctttcttgattcgtagatttaataacttacctgaaggggttttcttgataattttcctttaatatgaaattttttttcatgctttatcaatagcccaggatatattttatttttagaattttgtgaaacagacttgtatattctattttacaactacaaatgcctccaaagtattgtacaaataagtgtgcagtatctgtgaactgaattcaccacagactttagctttctgagcaagaggattttgcgtcagagaaatgtctgtccatttttattcaggggaaacttgatttgagatttttatgcctgtgacttccttggaaatcaaatgtaaagtttaattgaaagaatgtaaagcaaccaaaaagaaaaaaaaaaagaaagaaagaggaaaagaaatccatactaacccttttccattttataaatgtattgattcattggtactgccttaaagatacagtacccctctagctttgtttagtctttatactgcaaactatttaaagaaatatgtattctgtaaaagaaaaaaaaaatgcggccttttcatgaggatcgtctggttagaaaacataactgataccaaccgaaactgaagggagttagaccaaggctctgaaatataaagtctaatcttgctctcttttattctgtgctgttacagttttcttcatcaatgagtgtgatccagtttttcataagatattttattttgaaatggaaattaatgtcctctcaaagtaaaatattgaggagcactgaaagtatgttttactttttttttattttatttttgcttttgataagaaaaccgaactgggcatatttctaattggctttactatttttatttttaaattatgttttactgttcatttgatttgtacagattctttattatcattgttcttttcaatatatttgtattaatttgtaagaatatgcatcttaaaatggcaagttttccatatttttacaactcactggtggttttccgcattctttgtacacccatgaaagaaaacttttatgcaaggtcttgcatttaaaagacagctttgcgaatattttgtaaattacagtctcactcagaactgtttttggacacatttaaggtgtagtattaataggttaaaaccaggctttctagaaagaataaacttacatatttatttttaggacatgaaaatagcaatattcttggagattgataaccatagcattaatacgcccattatggtcatttaaattggggtttatttcagcaaacttgttgaatttatttttaagaaagaaatactgtattgggaagttactgttacttgataacaatgttttaacaagaagcaatgttataaagttagtttcagtgcattatctacttgtgtagtcctatgcaataacagtagtgttacatgtatcaagcctagatgttttatacagatgccatatagtgttatgagccaggctgttgaatggaatttctcagtagcagcctacaactgaatagcaagtggcataaagcatatccattcagaatgaagtgccttaaatatagcagtagtcttttttggactagcactgactgaactgtaatgtaggggaaagtttcatgatggtatctatagtcaagacgaacatgtagcatggtgcctatgtagacaatataagagcttccaattttccttcagatatttttaatattaaatatattttagtgacagagtgccaacttctttcatcaggaaaccttattcaggagggtttttaaaaagtgtttaaatgtcaaatgtgaattggtgatgggtgatggagggttcagagaggagtgatcgtcagatgtgtgaatggacggtttaggtgaaaataatcaactgcatagttcccatgcacgctgggcaatgagaatccttggaaacattggtgatgctatcagttttatagctttatttcttaagggggtagggaaaattagttcccattctttcaacccccttaactgtatagctcttttcctagaatagtgacgcaaatctgcatgaacagctaattgtaccatagtgttcattgatacaatcatagcattgtctatttttctcttcatatttatatgggggggagggcgctggatgcaaaagttgaagatcgtgatgctatgatgttagttttccttagctgattttgagggtttttaaaaataaagcaaggttgactaacctacggccacgggaacaggaccatggttaagcaaccatatagaaagctttgttgaaagaaagtatggcatcttgtaccactgccctgactgtcacaactcctaaccttgccattgcctgcctccccctccccttctccttaagagacaatttctgcaggtggcaggtgagcaagcccaggagaatgctgcaatcttgggggtggttttatttatttcttttttgccaaatagagtgtggattcatttcaggggctagctaagccaagaggcagtggtttgggcttgttgtttgtaacaagaaaatgatccacaccactcccccgattcccgggtgcagaattgtaactcggggttgggcctctatatggagtgaccaaaatgccaaaattgtccatctgcctctgagtagggcaatggaaataccaaaccttctgactttgccaaaaagcatacaagcaacctggtcatacataggatgacaaaattctttctggttgtttttaaacaataaagcaataagaacaaatacaatacataggaagttaaaagcacaaaggaatgaacttattaatatttttgaaaaatgcactgggaaaaagttgatgtcaataacagtataaaacagccctatttcttgataaaaaatgacaaatgactgtctcttgcggatgcttggtactgtaatgttaataatagtcacctgctgttggatgcagcaataatttctgtatggtccatagcactgtatattatggatcgatattaatgtatccaatgaaataatcgacttgttcttgatagcctcattaaagcatttggtttttcacataaaaaaaaaaaaaaaaaaaaaa

SEQ ID NO: 252 - protein, 504 aa, Homo sapiens
MEALRVQMFMPCSFESLYLSSAEHPGASKPPISSSSMTSRILLRQQLMREQMQEQERREQQQKLQAAQFMQQRVPVSQTPAINVSVPTTLPSATQVPMEVLKVQTHLENPTKYHIQQAQRQQVKQYLSTTLANKHANQVLSLPCPNQPGDHVMPPVPGSSAPNSPMAMLTLNSNCEKEGFYKFEEQNRAESECPGMNTHSRASCMQMDDVIDDIISLESSYNEEILGLMDPALQMANTLPVSGNLIDLYGNQGLPPPGLTISNSCPANLPNIKRELTESEARALAKERQKKDNHNLIERRRRFNINDRIKELGTLIPKSNDPDMRWNKGTILKASVDYIRKLQREQQRAKELENRQKKLEHANRHLLLRIQELEMQARAHGLSLIPSTGLCSPDLVNRIIKQEPVLENCSQDLLQHHADLTCTTTLDLTDGTITFNNNLGTGTEANQAYSVPTKMGSKLEDILMDDTLSPVGVTDPLLSSVSPGASKTSSRRSSMSMEETEHTC

SEQ ID NO: 253 - DNA, 4597 bp, Homo sapiens
atgttgtatgcattttggttttcccacagcagttccgccgagcatcctggggcctccaagcctccgataagctcctccagtatgacatcacgcatcttgctacgccagcaactcatgcgtgagcagatgcaggagcaggagcgcagggagcagcagcagaagctgcaggcggcccagttcatgcaacagagagtgcccgtgagtcagacaccagccataaacgtcagtgtgcccaccacccttccctctgccacgcaggtgccgatggaagtccttaaggtgcagacccacctcgaaaaccccaccaagtaccacatacagcaagcccaacggcagcaggtaaagcagtacctttctaccactttagcaaataaacatgccaaccaagtcctgagcttgccatgtccaaaccagcctggcgatcatgtcatgccaccggtgccggggagcagcgcacccaacagccccatggctatgcttacgcttaactccaactgtgaaaaagagggattttataagtttgaagagcaaaacagggcagagagcgagtgcccaggcatgaacacacattcacgagcgtcctgtatgcagatggatgatgtaatcgatgacatcattagcctagaatcaagttataatgaggaaatcttgggcttgatggatcctgctttgcaaatggcaaatacgttgcctgtctcgggaaacttgattgatctttatggaaaccaaggtctgcccccaccaggcctcaccatcagcaactcctgtccagccaaccttcccaacataaaaagggagctcacagagtctgaagcaagagcactggccaaagagaggcagaaaaaggacaatcacaacctgattgaacgaagaagaagatttaacataaatgaccgcattaaagaactaggtactttgattcccaagtcaaatgatccagacatgcgctggaacaagggaaccatcttaaaagcatccgtggactatatccgaaagttgcaacgagaacagcaacgcgcaaaagaacttgaaaaccgacagaagaaactggagcacgccaaccggcatttgttgctcagaatacaggaacttgaaatgcaggctcgagctcatggactttcccttattccatccacgggtctctgctctccagatttggtgaatcggatcatcaagcaagaacccgttcttgagaactgcagccaagacctccttcagcatcatgcagacctaacctgtacaacaactctcgatctcacggatggcaccatcaccttcaacaacaacctcggaactgggactgaggccaaccaagcctatagtgtccccacaaaaatgggatccaaactggaagacatcctgatggacgacaccctttctcccgtcggtgtcactgatccactcctttcctcagtgtcccccggagcttccaaaacaagcagccggaggagcagtatgagcatggaagagacggagcacacttgttagcgaatcctccctgcactgcattcgcacaaactgcttcctttcttgattcgtagatttaataacttacctgaaggggttttcttgataattttcctttaatatgaaattttttttcatgctttatcaatagcccaggatatattttatttttagaattttgtgaaacagacttgtatattctattttacaactacaaatgcctccaaagtattgtacaaataagtgtgcagtatctgtgaactgaattcaccacagactttagctttctgagcaagaggattttgcgtcagagaaatgtctgtccatttttattcaggggaaacttgatttgagatttttatgcctgtgacttccttggaaatcaaatgtaaagtttaattgaaagaatgtaaagcaaccaaaaagaaaaaaaaaaagaaagaaagaggaaaagaaatccatactaacccttttccattttataaatgtattgattcattggtactgccttaaagatacagtacccctctagctttgtttagtctttatactgcaaactatttaaagaaatatgtattctgtaaaagaaaaaaaaaatgcggccttttcatgaggatcgtctggttagaaaacataactgataccaaccgaaactgaagggagttagaccaaggctctgaaatataaagtctaatcttgctctcttttattctgtgctgttacagttttcttcatcaatgagtgtgatccagtttttcataagatattttattttgaaatggaaattaatgtcctctcaaagtaaaatattgaggagcactgaaagtatgttttactttttttttattttatttttgcttttgataagaaaaccgaactgggcatatttctaattggctttactatttttatttttaaattatgttttactgttcatttgatttgtacagattctttattatcattgttcttttcaatatatttgtattaatttgtaagaatatgcatcttaaaatggcaagttttccatatttttacaactcactggtggttttccgcattctttgtacacccatgaaagaaaacttttatgcaaggtcttgcatttaaaagacagctttgcgaatattttgtaaattacagtctcactcagaactgtttttggacacatttaaggtgtagtattaataggttaaaaccaggctttctagaaagaataaacttacatatttatttttaggacatgaaaatagcaatattcttggagattgataaccatagcattaatacgcccattatggtcatttaaattggggtttatttcagcaaacttgttgaatttatttttaagaaagaaatactgtattgggaagttactgttacttgataacaatgttttaacaagaagcaatgttataaagttagtttcagtgcattatctacttgtgtagtcctatgcaataacagtagtgttacatgtatcaagcctagatgttttatacagatgccatatagtgttatgagccaggctgttgaatggaatttctcagtagcagcctacaactgaatagcaagtggcataaagcatatccattcagaatgaagtgccttaaatatagcagtagtcttttttggactagcactgactgaactgtaatgtaggggaaagtttcatgatggtatctatagtcaagacgaacatgtagcatggtgcctatgtagacaatataagagcttccaattttccttcagatatttttaatattaaatatattttagtgacagagtgccaacttctttcatcaggaaaccttattcaggagggtttttaaaaagtgtttaaatgtcaaatgtgaattggtgatgggtgatggagggttcagagaggagtgatcgtcagatgtgtgaatggacggtttaggtgaaaataatcaactgcatagttcccatgcacgctgggcaatgagaatccttggaaacattggtgatgctatcagttttatagctttatttcttaagggggtagggaaaattagttcccattctttcaacccccttaactgtatagctcttttcctagaatagtgacgcaaatctgcatgaacagctaattgtaccatagtgttcattgatacaatcatagcattgtctatttttctcttcatatttatatgggggggagggcgctggatgcaaaagttgaagatcgtgatgctatgatgttagttttccttagctgattttgagggtttttaaaaataaagcaaggttgactaacctacggccacgggaacaggaccatggttaagcaaccatatagaaagctttgttgaaagaaagtatggcatcttgtaccactgccctgactgtcacaactcctaaccttgccattgcctgcctccccctccccttctccttaagagacaatttctgcaggtggcaggtgagcaagcccaggagaatgctgcaatcttgggggtggttttatttatttcttttttgccaaatagagtgtggattcatttcaggggctagctaagccaagaggcagtggtttgggcttgttgtttgtaacaagaaaatgatccacaccactcccccgattcccgggtgcagaattgtaactcggggttgggcctctatatggagtgaccaaaatgccaaaattgtccatctgcctctgagtagggcaatggaaataccaaaccttctgactttgccaaaaagcatacaagcaacctggtcatacataggatgacaaaattctttctggttgtttttaaacaataaagcaataagaacaaatacaatacataggaagttaaaagcacaaaggaatgaacttattaatatttttgaaaaatgcactgggaaaaagttgatgtcaataacagtataaaacagccctatttcttgataaaaaatgacaaatgactgtctcttgcggatgcttggtactgtaatgttaataatagtcacctgctgttggatgcagcaataatttctgtatggtccatagcactgtatattatggatcgatattaatgtatccaatgaaataatcgacttgttcttgatagcctcattaaagcatttggtttttcacataaaaaaaaaaaaaaaaaaaaaa

SEQ ID NO: 254 - protein, 495 aa, Homo sapiens
MLYAFWFSHSSSAEHPGASKPPISSSSMTSRILLRQQLMREQMQEQERREQQQKLQAAQFMQQRVPVSQTPAINVSVPTTLPSATQVPMEVLKVQTHLENPTKYHIQQAQRQQVKQYLSTTLANKHANQVLSLPCPNQPGDHVMPPVPGSSAPNSPMAMLTLNSNCEKEGFYKFEEQNRAESECPGMNTHSRASCMQMDDVIDDIISLESSYNEEILGLMDPALQMANTLPVSGNLIDLYGNQGLPPPGLTISNSCPANLPNIKRELTESEARALAKERQKKDNHNLIERRRRFNINDRIKELGTLIPKSNDPDMRWNKGTILKASVDYIRKLQREQQRAKELENRQKKLEHANRHLLLRIQELEMQARAHGLSLIPSTGLCSPDLVNRIIKQEPVLENCSQDLLQHHADLTCTTTLDLTDGTITFNNNLGTGTEANQAYSVPTKMGSKLEDILMDDTLSPVGVTDPLLSSVSPGASKTSSRRSSMSMEETEHTC

SEQ ID NO: 255 - DNA, 4760 bp, Homo sapiens
gaaagaggcagcttacacacgccttccagtccctctactcagagcagcccggagaccgctgccgccgctgccgctgctaccaccgctgccacctgaggagacccgccgcccccccgtcgccgcctcctgcgagtccttcttagcacctggcgtttcatgcacattgccactgccattattattatcattccaatacaaggaaaataaaagaagataccagcgaaaagaaccgcttacacctttccgaattactcaagtgtctcctggaaacagagggtcgttgtccccggaggagcagccgaagggcccgtgggctggtgttgaccgggagggaggaggagttgggggcattgcgtggtggaaagttgcgtgcggcagagaaccgaaggtgcagcgccacagcccaggggacggtgtgtctgggagaagacgctgcccctgcgtcgggacccgccagcgcgcgggcaccgcggggcccgggacgacgccccctcctgcggcgtggactccgtcagtggcccaccaagaaggaggaggaatatggaatccaagggggccagttcctgccgtctgctcttctgcctcttgatctccgccaccgtcttcaggccaggccttggatggtatactgtaaattcagcatatggagataccattatcataccttgccgacttgacgtacctcagaatctcatgtttggcaaatggaaatatgaaaagcccgatggctccccagtatttattgccttcagatcctctacaaagaaaagtgtgcagtacgacgatgtaccagaatacaaagacagattgaacctctcagaaaactacactttgtctatcagtaatgcaaggatcagtgatgaaaagagatttgtgtgcatgctagtaactgaggacaacgtgtttgaggcacctacaatagtcaaggtgttcaagcaaccatctaaacctgaaattgtaagcaaagcactgtttctcgaaacagagcagctaaaaaagttgggtgactgcatttcagaagacagttatccagatggcaatatcacatggtacaggaatggaaaagtgctacatccccttgaaggagcggtggtcataatttttaaaaaggaaatggacccagtgactcagctctataccatgacttccaccctggagtacaagacaaccaaggctgacatacaaatgccattcacctgctcggtgacatattatggaccatctggccagaaaacaattcattctgaacaggcagtatttgatatttactatcctacagagcaggtgacaatacaagtgctgccaccaaaaaatgccatcaaagaaggggataacatcactcttaaatgcttagggaatggcaaccctcccccagaggaatttttgttttacttaccaggacagcccgaaggaataagaagctcaaatacttacacactgacggatgtgaggcgcaatgcaacaggagactacaagtgttccctgatagacaaaaaaagcatgattgcttcaacagccatcacagttcactatttggatttgtccttaaacccaagtggagaagtgactagacagattggtgatgccctacccgtgtcatgcacaatatctgctagcaggaatgcaactgtggtatggatgaaagataacatcaggcttcgatctagcccgtcattttctagtcttcattatcaggatgctggaaactatgtctgcgaaactgctctgcaggaggttgaaggactaaagaaaagagagtcattgactctcattgtagaaggcaaacctcaaataaaaatgacaaagaaaactgatcccagtggactatctaaaacaataatctgccatgtggaaggttttccaaagccagccattcaatggacaattactggcagtggaagcgtcataaaccaaacagaggaatctccttatattaatggcaggtattatagtaaaattatcatttcccctgaagagaatgttacattaacttgcacagcagaaaaccaactggagagaacagtaaactccttgaatgtctctgctataagtattccagaacacgatgaggcagacgagataagtgatgaaaacagagaaaaggtgaatgaccaggcaaaactaattgtgggaatcgttgttggtctcctccttgctgcccttgttgctggtgtcgtctactggctgtacatgaagaagtcaaagactgcatcaaaacatgtaaacaaggacctcggtaatatggaagaaaacaaaaagttagaagaaaacaatcacaaaactgaagcctaagagagaaactgtcctagttgtccagagataaaaatcatatagaccaattgaagcatgaacgtggattgtatttaagacataaacaaagacattgacagcaattcatggttcaagtattaagcagttcattctaccaagctgtcacaggttttcagagaattatctcaagtaaaacaaatgaaatttaattacaaacaataagaacaagttttggcagccatgataataggtcatatgttgtgtttggttcaattttttttccgtaaatgtctgcactgaggatttctttttggtttgccttttatgtaaattttttacgtagctatttttatacactgtaagctttgttctgggagttgctgttaatctgatgtataatgtaatgtttttatttcaattgtttatatggataatctgagcaggtacatttctgattctgattgctatcagcaatgccccaaactttctcataagcacctaaaacccaaaggtggcagcttgtgaagattggggacactcatattgccctaattaaaaactgtgatttttatcacaagggaggggaggccgagagtcagactgatagacaccataggagccgactctttgatatgccaccagcgaactctcagaaataaatcacagatgcatatagacacacatacataatggtactcccaaactgacaattttacctattctgaaaaagacataaaacagaatttggtagcacttacctctacagacacctgctaataaattattttctgtcaaaagaaaaaacacaagcatgtgtgagagacagtttggaaaaatcatggtcaacattcccattttcatagatcacaatgtaaatcactataattacaaattggtgttaaatcctttgggttatccactgccttaaaattatacctatttcatgtttaaaaagatatcaatcagaattggagtttttaacagtggtcattatcaaagctgtgttattttccacagaatatagaatatatatttttttcgtgtgtgtttttgttaactaccctacagatattgaatgcaccttgagataatttagtgtttttaactgatacataatttatcaagcagtacatgaaagtgtaataataaaatgtctatgtatctttagttacattcaaatttgtaactttataaacatgttttatgcttgaggaaatttttaaggtggtagtataaatggaaactttttgaagtagaccagatatgggctacttgtgactagacttttaaactttgctctttcaagcagaagcctggtttctgggagaacactgcacagcgatttctttcccaggatttacacaactttaaagggaagataaatgaacatcagatttctaggtatagaactatgttattgaaaggaaaaggaaaactggtgtttgtttcttagactcatgaaataaaaaattatgaaggcaatgaaaaataaattgaaaattaaagtcagatgagaataggaataatactttgccacttctgcattatttagaaacatacgttattgtacatttgtaaaccatttactgtctgggcaatagtgactccgtttaataaaagcttccgtagtgcattggtatggattaaatgcataaaatattcttagactcgatgctgtataaaatattatgggaaaaaaagaaaatatgttattttgcctctaaacttttattgaagttttatttggcaggaaaaaaaattgaatcttggtcaacatttaaaccaaagtaaaaggggaaaaaccaaagttatttgttttgcatggctaagccattctgttatctctgtaaatactgtgatttcttttttattttctctttagaattttgttaaagaaattctaaaatttttaaacacctgctctccacaataaatcacaaacactaaaataaaattacttccatataaatattattttctcttttggtgtgggagatcaaaggtttaaagtctaacttctaagatatatttgcagaaagaagcaacatgacaatagagagagttatgctacaattatttcttggtttccacttgcaatggttaattaagtccaaaaacagctgtcagaacctcgagagcagaacatgagaaactcagagctctggaccgaaagcagaaagtttgccgggaaaaaaaaagacaacattattaccatcgattcagtgcctggataaagaggaaagcttacttgtttaatggcagccacatgcacgaagatgctaagaagaaaaagaattccaaatcctcaacttttgaggtttcggctctccaatttaactctttggcaacaggaaacaggttttgcaagttcaaggttcactccctatatgtgattataggaattgtttgtggaaatggattaacatacccgtctatgcctaaaagataataaaactgaaatatgtcttcaaaaaaaaaaaaaaaaaaaa

SEQ ID NO: 256 - protein, 583 aa, Homo sapiens
MESKGASSCRLLFCLLISATVFRPGLGWYTVNSAYGDTIIIPCRLDVPQNLMFGKWKYEKPDGSPVFIAFRSSTKKSVQYDDVPEYKDRLNLSENYTLSISNARISDEKRFVCMLVTEDNVFEAPTIVKVFKQPSKPEIVSKALFLETEQLKKLGDCISEDSYPDGNITWYRNGKVLHPLEGAVVIIFKKEMDPVTQLYTMTSTLEYKTTKADIQMPFTCSVTYYGPSGQKTIHSEQAVFDIYYPTEQVTIQVLPPKNAIKEGDNITLKCLGNGNPPPEEFLFYLPGQPEGIRSSNTYTLTDVRRNATGDYKCSLIDKKSMIASTAITVHYLDLSLNPSGEVTRQIGDALPVSCTISASRNATVVWMKDNIRLRSSPSFSSLHYQDAGNYVCETALQEVEGLKKRESLTLIVEGKPQIKMTKKTDPSGLSKTIICHVEGFPKPAIQWTITGSGSVINQTEESPYINGRYYSKIIISPEENVTLTCTAENQLERTVNSLNVSAISIPEHDEADEISDENREKVNDQAKLIVGIVVGLLLAALVAGVVYWLYMKKSKTASKHVNKDLGNMEENKKLEENNHKTEA

SEQ ID NO: 257 - DNA, 8192 bp, Homo sapiens
aactgctagtggctgagtccctggcggggcgcggcggtggaaggtgtcgcgtacgggcttcccgagctgacgtggcttgaattgggaggggggcagctggagcctcaggcggcagcgcttctagaaatgctgagccgattatcaggattagcaaatgttgttttgcatgaattatcaggagatgatgacactgatcagaatatgagggctcccctagaccctgaattacaccaagaatctgacatggaatttaataatactacacaagaagatgttcaggagcgcctggcttatgcagagcaattggtggtggagctaaaagatattattagacagaaggatgttcaactgcagcagaaagatgaagctctacaggaagagagaaaagctgctgataacaaaattaaaaaactaaaacttcatgcgaaggccaaattaacttctttgaataaatacatagaagaaatgaaagcacaaggagggactgttctgcctacagaacctcagtcagaggagcaactttccaagcatgacaagagttctacagaggaagagatggaaatagaaaagataaaacataagctccaggagaaggaggaactaatcagcactttgcaagcccagcttactcaggcacaggcagaacaacctgcacagagttctacagagatggaagaatttgtaatgatgaagcaacagctccaggagaaggaagaattcattagcactttacaagcccagctcagccagacacaggcagagcaagctgcacagcaggtggtccgagagaaagatgcccgctttgaaacacaagttcgtcttcatgaagatgagcttcttcagttagtaacccaggcagatgtggaaacagagatgcaacagaaattgagggtgctgcaaaggaagcttgaggaacacgaagaatccttggtgggccgtgctcaggtcgttgacttgctgcaacaggagctgactgctgctgagcagagaaaccagattctctctcagcagttacagcagatggaagctgagcataatactttgaggaacactgtggaaacagaaagagaggagtccaagattctactggaaaagatggaacttgaagtggcagagagaaaattatccttccataatctgcaggaagaaatgcatcatcttttagaacagtttgagcaagcaggccaagcccaggctgaactagagtctcggtatagtgctttggagcagaagcacaaagcagaaatggaagagaagacctctcatattttgagtcttcaaaagactggacaagagctgcagtctgcctgtgatgctctaaaggatcaaaattcaaagcttctccaagataagaatgaacaggcagttcagtcagcccagaccattcagcaactggaagatcagctccagcaaaaatccaaagaaattagccaatttctaaatagactgcccttgcaacaacatgaaacagcatctcagacttctttcccagatgtttataatgagggcacacaggcagtcactgaggagaatattgcttctttgcagaagagagtggtagaactagagaatgaaaagggagccttgctccttagttctatagagctggaggagctgaaagctgagaatgaaaaactgtcttctcagattactctcctagaggctcagaatagaactggggaggcagacagagaagtcagtgagatcagcattgttgatattgccaacaagaggagctcttctgctgaggaaagtggacaagatgttctagaaaacacattttctcagaaacataaagaattatcagttttattgttggaaatgaaagaagctcaagaggaaattgcatttcttaaattacagctccagggaaaaagggctgaggaagcagatcatgaggtccttgaccagaaagaaatgaaacagatggagggtgagggaatagctccaattaaaatgaaagtatttcttgaagatacagggcaagattttcccttaatgccaaatgaagagagcagtcttccagcagttgaaaaagaacaggcgagcactgaacatcaaagtagaacatctgaggaaatatctttaaatgatgctggagtagaattgaaatcaacaaagcaggatggtgataaatccctttctgctgtaccagatattggtcagtgtcatcaggatgagttggaaaggttaaaaagtcaaattttggagctcgagctaaactttcataaagcacaagaaatctatgagaaaaatttagatgagaaagctaaggaaattagcaacctaaaccagttgattgaggagtttaagaaaaatgctgacaacaacagcagtgcattcactgctttgtctgaagaaagagaccagcttctctctcaggtgaaggaacttagcatggtaacagaattgagggctcaggtaaagcaactggaaatgaaccttgcagaagcagaaaggcaaagaagacttgattatgaaagccaaactgcccatgacaacctgctcactgaacagatccatagtctcagcatagaagccaaatctaaagatgtgaaaattgaagttttacagaatgaactggatgatgtgcagcttcagttttctgagcagagtaccctgataagaagcctgcaaagccagctgcaaaataaggaaagtgaagtgcttgagggggcagaacgtgtaaggcatatctcaagtaaagtggaagaactgtcccaggctctttcacagaaggaacttgaaataacaaaaatggatcagctcttactagagaaaaagagagatgtggaaaccctccaacaaaccatcgaggagaaggatcaacaagtgacagaaatcagctttagtatgactgagaaaatggttcagcttaatgaagagaagttttctcttggggttgaaattaagactcttaaagaacagctaaatttattatccagagctgaggaagcaaaaaaagagcaggtggaagaagataatgaagtttcttctggccttaaacaaaattatgatgagatgagcccagcaggacaaataagtaaggaagaacttcagcatgaatttgaccttctgaagaaagaaaatgagcagagaaagagaaagctccaggcagctcttattaacagaaaggagcttctgcaaagagtcagtagattggaagaagaattagccaacttgaaagatgaatctaagaaagaaatcccactcagtgagactgagaggggagaagtggaagaagataaagaaaacaaagaatactcagaaaaatgtgtgacttctaagtgccaagaaatagaaatttatttaaaacagacaatatctgagaaagaagtggaactacagcatataaggaaggatttggaagaaaagctggcagctgaagagcaattccaggctctggtcaaacagatgaatcagaccttgcaagataaaacaaaccaaatagatttgctccaagcagaaatcagtgaaaaccaagcaattatccagaagttaatcacaagtaacacggatgcaagtgatggggactccgtagcacttgtaaaggaaacagtggtgataagtccaccttgtacaggtagtagtgaacactggaaaccagaactagaagaaaagatactggcccttgaaaaagaaaaggagcaacttcaaaagaagctacaggaagccttaacctcccgcaaggcaattcttaaaaaggcacaggagaaagaaagacatctcagggaggagctaaagcaacagaaagatgactataatcgcttgcaagaacagtttgatgagcaaagcaaggaaaatgagaatattggagaccagctaaggcaactccagattcaagtaagggaatccatagacggaaaactcccaagcacagaccagcaggaatcgtgttcttccactccaggtttagaagaacctttattcaaagccacagaacagcatcacactcaacctgttttagagtccaacttgtgcccagactggccttctcattctgaagatgcgagtgctctgcagggcggaacttctgttgcccagattaaggcccagctgaaggaaatagaggctgagaaagtagagttagaattgaaagttagttctacaacaagtgagcttactaaaaaatcagaagaggtatttcagttacaagagcagataaataaacagggtttagaaatcgagagtctaaagacagtatcccatgaagctgaagtccatgccgaaagcctgcagcagaaattggaaagcagccaactacaaattgctggcctagaacatctaagagaattgcaacctaaactggatgaactgcaaaaactcataagcaaaaaggaagaagacgttagctacctttctggacaacttagtgagaaagaagcagctctcactaaaatacagacagagataatagaacaagaagatttaattaaggctctgcatacacagctagaaatgcaagccaaagagcatgatgagaggataaagcagctacaggtggaactttgtgaaatgaagcaaaaaccagaagagattggagaagaaagtagagcaaagcaacaaatacaaaggaaactgcaagctgcccttatttcccgaaaagaagcactaaaagaaaacaaaagtctccaagaggaattgtctttggccagaggtaccattgaacgtctcaccaagtctctggcagatgtggaaagccaagtttctgctcaaaataaagaaaaagatacggtcttaggaaggttagctcttcttcaagaagaaagagacaaactcattacagaaatggacaggtctttattggaaaatcagagtctcagcagctcctgtgaaagtctaaaactagctctagagggtcttactgaagacaaggaaaagttagtgaaggaaattgaatctttgaaatcttctaagattgcagaaagtactgagtggcaagagaaacacaaggagctacaaaaagagtatgaaattcttctgcagtcctatgagaatgttagtaatgaagcagaaaggattcagcatgtggtggaagctgtgaggcaagagaaacaagaactgtatggcaagttaagaagcacagaggcaaacaagaaggagacagaaaagcagttgcaggaagctgagcaagaaatggaggaaatgaaagaaaagatgagaaagtttgctaaatctaaacagcagaaaatcctagagctggaagaagagaatgaccggcttagggcagaggtgcaccctgcaggagatacagctaaagagtgtatggaaacacttctttcttccaatgccagcatgaaggaagaacttgaaagggtcaaaatggagtatgaaaccctttctaagaagtttcagtctttaatgtctgagaaagactctctaagtgaagaggttcaagatttaaagcatcagatagaagataatgtatctaaacaagctaacctagaggccaccgagaaacatgataaccaaacgaatgtcactgaagagggaacacagtctataccaggtgagactgaagagcaagactctctgagtatgagcacaagacctacatgttcagaatcggttccatcagcgaagagtgccaaccctgctgtaagtaaggatttcagctcacatgatgaaattaataactacctacagcagattgatcagctcaaagaaagaattgctggattagaggaggagaagcagaaaaacaaggaatttagccagactttagaaaatgagaaaaataccttactgagtcagatatcaacaaaggatggtgaactaaaaatgcttcaggaggaagtaaccaaaatgaacctgttaaatcagcaaatccaagaagaactctccagagttaccaaactaaaggagacagcagaagaagagaaagatgatttggaagagaggcttatgaatcaattagcagaacttaatggaagcattgggaattactgtcaggatgttacagatgcccaaataaaaaatgagctattggaatctgaaatgaagaaccttaaaaagtgtgtgagtgaattggaagaagaaaagcagcagttagtcaaggaaaaaactaaggtggaatcagaaatacgaaaggaatatttggagaaaatacaaggtgctcagaaagaacccggaaataaaagccatgcaaaggaacttcaggaactgttaaaagaaaaacaacaagaagtaaagcagctacagaaggactgcatcaggtatcaagagaaaattagtgctctggagagaactgttaaagctctagaatttgttcaaactgaatctcaaaaagatttggaaataaccaaagaaaatctggctcaagcagttgaacaccgcaaaaaggcacaagcagaattagctagcttcaaagtcctgctagatgacactcaaagtgaagcagcaagggtcctagcagacaatctcaagttgaaaaaggaacttcagtcaaataaagaatcagttaaaagccagatgaaacaaaaggatgaagatcttgagcgaagactggaacaggcagaagagaagcacctgaaagagaagaagaatatgcaagagaaactggatgctttgcgcagagaaaaagtccacttggaagagacaattggagagattcaggttactttgaacaagaaagacaaggaagttcagcaacttcaggaaaacttggacagtactgtgacccagcttgcagcctttactaagagcatgtcttccctccaggatgatcgtgacagggtgatagatgaagctaagaaatgggagaggaagtttagtgatgcgattcaaagcaaagaagaagaaattagactcaaagaagataattgcagtgttctaaaggatcaacttagacagatgtccatccatatggaagaattaaagattaacatttccaggcttgaacatgacaagcagatttgggagtccaaggcccagacagaggtccagcttcagcagaaggtctgtgatactctacagggggaaaacaaagaacttttgtcccagctagaagagacacgccacctataccacagttctcagaatgaattagctaagttggaatcagaacttaagagtctcaaagaccagttgactgatttaagtaactctttagaaaaatgtaaggaacaaaaaggaaacttggaagggatcataaggcagcaagaggctgatattcaaaattctaagttcagttatgaacaactggagactgatcttcaggcctccagagaactgaccagtaggctgcatgaagaaataaatatgaaagagcaaaagattataagcctgctttctggcaaggaagaggcaatccaagtagctattgctgaactgcgtcagcaacatgataaagaaattaaagagctggaaaacctgctgtcccaggaggaagaggagaatattgttttagaagaggagaacaaaaaggctgttgataaaaccaatcagcttatggaaacactgaaaaccatcaaaaaggaaaacattcagcaaaaggcacagttggattcctttgttaaatccatgtcttctctccaaaatgatcgagaccgcatagtgggtgactatcaacagctggaagagcgacatctctctataatcttggaaaaagaccaactcatccaagaggctgctgcagagaataataagcttaaagaagaaatacgaggcttgagaagtcatatggatgatctcaattctgagaatgccaagctagatgcagaactgatccaatatagagaagacctgaaccaagtgataacaataaaggacagccaacaaaagcagcttcttgaagttcaacttcagcaaaataaggagctggaaaataaatatgctaaattagaagaaaagctgaaggaatctgaggaagcaaatgaggatctgcggaggtcctttaatgccctacaagaagagaaacaagatttatctaaagagattgagagtttgaaagtatctatatcccagctaacaagacaagtaacagccttgcaagaagaaggtactttaggactctatcatgcccagttaaaagtaaaagaagaagaggtacacaggttaagtgctttgttttcctcctctcaaaagagaattgcagaactggaagaagaattggtttgtgttcaaaaggaagctgccaagaaggtaggtgaaattgaagataaactgaagaaagaattaaagcatcttcatca

SEQ ID NO: 258 - protein, 3259 aa, Homo sapiens
MLSRLSGLANVVLHELSGDDDTDQNMRAPLDPELHQESDMEFNNTTQEDVQERLAYAEQLVVELKDIIRQKDVQLQQKDEALQEERKAADNKIKKLKLHAKAKLTSLNKYIEEMKAQGGTVLPTEPQSEEQLSKHDKSSTEEEMEIEKIKHKLQEKEELISTLQAQLTQAQAEQPAQSSTEMEEFVMMKQQLQEKEEFISTLQAQLSQTQAEQAAQQVVREKDARFETQVRLHEDELLQLVTQADVETEMQQKLRVLQRKLEEHEESLVGRAQVVDLLQQELTAAEQRNQILSQQLQQMEAEHNTLRNTVETEREESKILLEKMELEVAERKLSFHNLQEEMHHLLEQFEQAGQAQAELESRYSALEQKHKAEMEEKTSHILSLQKTGQELQSACDALKDQNSKLLQDKNEQAVQSAQTIQQLEDQLQQKSKEISQFLNRLPLQQHETASQTSFPDVYNEGTQAVTEENIASLQKRVVELENEKGALLLSSIELEELKAENEKLSSQITLLEAQNRTGEADREVSEISIVDIANKRSSSAEESGQDVLENTFSQKHKELSVLLLEMKEAQEEIAFLKLQLQGKRAEEADHEVLDQKEMKQMEGEGIAPIKMKVFLEDTGQDFPLMPNEESSLPAVEKEQASTEHQSRTSEEISLNDAGVELKSTKQDGDKSLSAVPDIGQCHQDELERLKSQILELELNFHKAQEIYEKNLDEKAKEISNLNQLIEEFKKNADNNSSAFTALSEERDQLLSQVKELSMVTELRAQVKQLEMNLAEAERQRRLDYESQTAHDNLLTEQIHSLSIEAKSKDVKIEVLQNELDDVQLQFSEQSTLIRSLQSQLQNKESEVLEGAERVRHISSKVEELSQALSQKELEITKMDQLLLEKKRDVETLQQTIEEKDQQVTEISFSMTEKMVQLNEEKFSLGVEIKTLKEQLNLLSRAEEAKKEQVEEDNEVSSGLKQNYDEMSPAGQISKEELQHEFDLLKKENEQRKRKLQAALINRKELLQRVSRLEEELANLKDESKKEIPLSETERGEVEEDKENKEYSEKCVTSKCQEIEIYLKQTISEKEVELQHIRKDLEEKLAAEEQFQALVKQMNQTLQDKTNQIDLLQAEISENQAIIQKLITSNTDASDGDSVALVKETVVISPPCTGSSEHWKPELEEKILALEKEKEQLQKKLQEALTSRKAILKKAQEKERHLREELKQQKDDYNRLQEQFDEQSKENENIGDQLRQLQIQVRESIDGKLPSTDQQESCSSTPGLEEPLFKATEQHHTQPVLESNLCPDWPSHSEDASALQGGTSVAQIKAQLKEIEAEKVELELKVSSTTSELTKKSEEVFQLQEQINKQGLEIESLKTVSHEAEVHAESLQQKLESSQLQIAGLEHLRELQPKLDELQKLISKKEEDVSYLSGQLSEKEAALTKIQTEIIEQEDLIKALHTQLEMQAKEHDERIKQLQVELCEMKQKPEEIGEESRAKQQIQRKLQAALISRKEALKENKSLQEELSLARGTIERLTKSLADVESQVSAQNKEKDTVLGRLALLQEERDKLITEMDRSLLENQSLSSSCESLKLALEGLTEDKEKLVKEIESLKSSKIAESTEWQEKHKELQKEYEILLQSYENVSNEAERIQHVVEAVRQEKQELYGKLRSTEANKKETEKQLQEAEQEMEEMKEKMRKFAKSKQQKILELEEENDRLRAEVHPAGDTAKECMETLLSSNASMKEELERVKMEYETLSKKFQSLMSEKDSLSEEVQDLKHQIEDNVSKQANLEATEKHDNQTNVTEEGTQSIPGETEEQDSLSMSTRPTCSESVPSAKSANPAVSKDFSSHDEINNYLQQIDQLKERIAGLEEEKQKNKEFSQTLENEKNTLLSQISTKDGELKMLQEEVTKMNLLNQQIQEELSRVTKLKETAEEEKDDLEERLMNQLAELNGSIGNYCQDVTDAQIKNELLESEMKNLKKCVSELEEEKQQLVKEKTKVESEIRKEYLEKIQGAQKEPGNKSHAKELQELLKEKQQEVKQLQKDCIRYQEKISALERTVKALEFVQTESQKDLEITKENLAQAVEHRKKAQAELASFKVLLDDTQSEAARVLADNLKLKKELQSNKESVKSQMKQKDEDLERRLEQAEEKHLKEKKNMQEKLDALRREKVHLEETIGEIQVTLNKKDKEVQQLQENLDSTVTQLAAFTKSMSSLQDDRDRVIDEAKKWERKFSDAIQSKEEEIRLKEDNCSVLKDQLRQMSIHMEELKINISRLEHDKQIWESKAQTEVQLQQKVCDTLQGENKELLSQLEETRHLYHSSQNELAKLESELKSLKDQLTDLSNSLEKCKEQKGNLEGIIRQQEADIQNSKFSYEQLETDLQASRELTSRLHEEINMKEQKIISLLSGKEEAIQVAIAELRQQHDKEIKELENLLSQEEEENIVLEEENKKAVDKTNQLMETLKTIKKENIQQKAQLDSFVKSMSSLQNDRDRIVGDYQQLEERHLSIILEKDQLIQEAAAENNKLKEEIRGLRSHMDDLNSENAKLDAELIQYREDLNQVITIKDSQQKQLLEVQLQQNKELENKYAKLEEKLKESEEANEDLRRSFNALQEEKQDLSKEIESLKVSISQLTRQVTALQEEGTLGLYHAQLKVKEEEVHRLSALFSSSQKRIAELEEELVCVQKEAAKKVGEIEDKLKKELKHLHHDAGIMRNETETAEERVAELARDLVEMEQKLLMVTKENKGLTAQIQSFGRSMSSLQNSRDHANEELDELKRKYDASLKELAQLKEQGLLNRERDALLSETAFSMNSTEENSLSHLEKLNQQLLSKDEQLLHLSSQLEDSYNQVQSFSKAMASLQNERDHLWNELEKFRKSEEGKQRSAAQPSTSPAEVQSLKKAMSSLQNDRDRLLKELKNLQQQYLQINQEITELHPLKAQLQEYQDKTKAFQIMQEELRQENLSWQHELHQLRMEKSSWEIHERRMKEQYLMAISDKDQQLSHLQNLIRELRSSSSQTQPLKVQYQRQASPETSASPDGSQNLVYETELLRTQLNDSLKEIHQKELRIQQLNSNFSQLLEEKNTLSIQLCDTSQSLRENQQHYGDLLNHCAVLEKQVQELQAGPLNIDVAPGAPQEKNGVHRKSDPEELREPQQSFSEAQQQLCNTRQEVNELRKLLEEERDQRVAAENALSVAEEQIRRLEHSEWDSSRTPIIGSCGTQEQALLIDLTSNSCRRTRSGVGWKRVLRSLCHSRTRVPLLAAIYFLMIHVLLILCFTGHL

SEQ ID NO: 259 - DNA, 2392 bp, Homo sapiens
cgcctccaggccccttcccgcgtcgcgacgcacgctgccccggaaggccgcggcgctgtagtgcggcgccccaggttctttagtggaagaacgcgaagcgaggatgagtgatccgtggaggcagtaacaggcgcggcgagggagaagtgattcccgaagaatcaaggctgggccggacccggtggcctggcaacagggtaataagagaaatgaagccaacaggtacagacccaaggatcttatctatagctgctgaagttgcaaaaagccctgagcagaatgtccctgttatactgttgaagttaaaagaaataataaacatcacacctttaggaagctcagagttgaagaaaatcaaacaagatatatattgttatgatctcattcaatattgcctcttggtcctcagtcaagattattctcgaatccagggtggttggactacaatttcccagcttacacagatattaagccattgctgtgtgggcttggagccaggagaagatgcagaggaattttacaatgaattacttccatcagctgcagaaaattttctagttttggggagacaattacaaacatgttttatcaatgcagctaaggctgaagaaaaagatgaattactacactttttccaaattgtgactgattctctcttctggcttttgggaggccatgttgaacttattcagaatgtactacaaagtgatcatttcttacatttactgcaagctgacaatgtccaaataggatctgcagtcatgatgatgctacagaatatattacagatcaacagtggtgatttactcagaataggaagaaaagccctgtattcaattttagatgaagttattttcaagcttttttcaactcctagtccagttataagaagtactgctacaaaactcctactgttgatggctgaatcccatcaggaaattttgattttactgagacaaagtacctgctacaaaggactcagacgtctactaagtaaacaggaaactgggactgaattcagtcaagaacttagacagcttgttggccttttaagcccaatggtctatcaggaagtagaagagcagaaactacatcaagcagcatgcttgattcaagcctattggaagggttttcagacaagaaagagattaaagaagcttccatctgctgtgattgctttgcagaggagtttcagatccaaacgatcaaagatgttgctggagataaataggcagaaggaagaagaggacctcaaattacaattgcaacttcaaagacagagagccatgagactttcccgagaattgcagctgagtatgctcgaaatagttcatccaggtcaggtggagaaacactatcgggaaatggaagagaaatcagcactgaatatccagaaacattggagagggtacagggaaaggaaaaattttcaccaacagaggcagtctctcatagagtataaagcagctgtcacacttcaaagagcagcgcttaaattcctagcgaagtgccgtaagaaaaagaaactatttgctccttggcgaggactccaagaactcactgatgcacgccgagttgaactgaagaaacgagtggatgactatgtcagaagacatttgggctctccaatgtcagatgtggtcagtagggagctccatgcccaagctcaagaacgactgcaacactactttatgggcagggccctagaagagcgagcccagcagcacagagaagctctgatagcacagatcagcaccaacgttgaacagctaatgaaggcaccaagtctgaaggaggcagaagggaaagaacctgagctcttcctaagtagatccaggcctgtggcagccaaggccaagcaggcccatctcacaaccctgaagcacatacaagcaccctggtggaagaagcttggagaagaatctggagatgagattgatgttccaaaggatgagcttagtatagaattagaaaatttattcattggtggaaccaaaccaccttagtgagtaaccctaagaattgacacaaatctcatattttaggagattatattggttctgcctctggcatgctggtagactagggccatcctaacttattattttccagaggttctcctccagacaagacctgcagtaagcaaagagttatattctacctctctctcaattttctttttcttttctctgtatcctcatccttagccacacacagatttgtgtggcttttattgtagaactaaacttagcatagtgttctgttgtttacatgaagtgtgtttttctttggtttcttctgttttccaactaaatatttttttctaaataaatattttcaacaattgatttgaaaaaaaaaaaaaaaaaaaaaaaaaaaaaaaaaaaaaaaa

SEQ ID NO: 260 - protein, 598 aa, Homo sapiens
MKPTGTDPRILSIAAEVAKSPEQNVPVILLKLKEIINITPLGSSELKKIKQDIYCYDLIQYCLLVLSQDYSRIQGGWTTISQLTQILSHCCVGLEPGEDAEEFYNELLPSAAENFLVLGRQLQTCFINAAKAEEKDELLHFFQIVTDSLFWLLGGHVELIQNVLQSDHFLHLLQADNVQIGSAVMMMLQNILQINSGDLLRIGRKALYSILDEVIFKLFSTPSPVIRSTATKLLLLMAESHQEILILLRQSTCYKGLRRLLSKQETGTEFSQELRQLVGLLSPMVYQEVEEQKLHQAACLIQAYWKGFQTRKRLKKLPSAVIALQRSFRSKRSKMLLEINRQKEEEDLKLQLQLQRQRAMRLSRELQLSMLEIVHPGQVEKHYREMEEKSALNIQKHWRGYRERKNFHQQRQSLIEYKAAVTLQRAALKFLAKCRKKKKLFAPWRGLQELTDARRVELKKRVDDYVRRHLGSPMSDVVSRELHAQAQERLQHYFMGRALEERAQQHREALIAQISTNVEQLMKAPSLKEAEGKEPELFLSRSRPVAAKAKQAHLTTLKHIQAPWWKKLGEESGDEIDVPKDELSIELENLFIGGTKPP

SEQ ID NO: 261 - DNA, 1915 bp, Homo sapiens
cgctgtagtgcggcgccccaggttctttagtggaagaacgcgaagcgaggatgagtgatccgtggaggcagtaacaggcgcggcgagggagaagtgattcccgaagaatcaaggctgggccggacccggtggcctggcaacagggtaataagagaaatgaagccaacaggtacagacccaaggatcttatctatagctgctgaagttgcaaaaagccctgagcagaatgtccctgttatactgttgaagttaaaagaaataataaacatcacacctttaggaagctcagagttgaagaaaatcaaacaagatatatattgttatgatctcattcaatattgcctcttggtcctcagtcaagattattctcgaatccagggtggttggactacaatttcccagcttacacagatattaagccattgctgtgtgggcttggagccaggagaagatgcagaggaattttacaatgaattacttccatcagctgcagaaaattttctagttttggggagacaattacaaacatgttttatcaatgcagctaaggctgaagaaaaagatgaattactacactttttccaaattgtgactgattctctcttctggcttttgggaggccatgttgaacttattcagaatgtactacaaagtgatcatttcttacatttactgcaagctgacaatgtccaaataggatctgcagtcatgatgatgctacagaatatattacagatcaacagatccaaacgatcaaagatgttgctggagataaataggcagaaggaagaagaggacctcaaattacaattgcaacttcaaagacagagagccatgagactttcccgagaattgcagctgagtatgctcgaaatagttcatccaggtcaggtggagaaacactatcgggaaatggaagagaaatcagcactgattatccagaaacattggagagggtacagggaaaggaaaaattttcaccaacagaggcagtctctcatagagtataaagcagctgtcacacttcaaagagcagcgcttaaattcctagcgaagtaccgtaagaaaaagaaactatttgctccttggcgaggactccaagaactcactgatgcacgccgagttgaactgaagaaacgagtggatgactatgtcagaagacatttgggctctccaatgtcagatgtggtcagtagggagctccatgcccaagctcaagaacgactgcaacactactttatgggcagggccctagaagagcgagcccagcagcacagagaagctctgatagcacagatcagcaccaacgttgaacagctaatgaaggcaccaagtctgaaggaggcagaagggaaagaacctgagctcttcctaagtagatccaggcctgtggcagccaaggccaagcaggcccatctcacaaccctgaagcacatacaagcaccctggtggaagaagcttggagaagaatctggagatgagattgatgttccaaaggatgagcttagtatagaattagaaaatttattcattggtggaaccaaaccaccttagtgagtaaccctaagaattgacacaaatctcatattttaggagattatattggttctgcctctggcatgctggtagactagggccatcctaacttattattttccagaggttctcctccagacaagacctgcagtaagcaaagagttatattctacctctctctcaattttctttttcttttctctgtatcctcatccttagccacacacagatttgtgtggcttttattgtagaactaaacttagcatagtgttctgttgtttacatgaagtgtgtttttctttggtttcttctgttttccaactaaatatttttttctaaataaatattttcaacaattgaaaaaaaaaaaaaaaaaaaa

SEQ ID NO: 262 - protein, 465 aa, Homo sapiens
MKPTGTDPRILSIAAEVAKSPEQNVPVILLKLKEIINITPLGSSELKKIKQDIYCYDLIQYCLLVLSQDYSRIQGGWTTISQLTQILSHCCVGLEPGEDAEEFYNELLPSAAENFLVLGRQLQTCFINAAKAEEKDELLHFFQIVTDSLFWLLGGHVELIQNVLQSDHFLHLLQADNVQIGSAVMMMLQNILQINRSKRSKMLLEINRQKEEEDLKLQLQLQRQRAMRLSRELQLSMLEIVHPGQVEKHYREMEEKSALIIQKHWRGYRERKNFHQQRQSLIEYKAAVTLQRAALKFLAKYRKKKKLFAPWRGLQELTDARRVELKKRVDDYVRRHLGSPMSDVVSRELHAQAQERLQHYFMGRALEERAQQHREALIAQISTNVEQLMKAPSLKEAEGKEPELFLSRSRPVAAKAKQAHLTTLKHIQAPWWKKLGEESGDEIDVPKDELSIELENLFIGGTKPP

SEQ ID NO: 263 - DNA, 1024 bp, Homo sapiens
gggtgacttggctggcgggatcaagtgcagctgcttcaggctgaggtggcagatagtgagcgctggtggcggagttaaagtcaaagcaggagagtaattatgaatagcgcagcgggattctcacacctagaccgtcgcgagcgggttctcaagttaggggagagtttcgagaagcagccgcgctgcgccttccacactgtgcgctatgacttcaaacctgcttctattgacacttcttctgaaggataccttgaggttggtgaaggtgaacaggtgaccataactctgccaaatatagaaggttcaactccaccagtaactgttttcaaaggttcaaaaaaaccttacttaaaagaatgcattttgattattaaccatgatactggagaatgtcggctagaaaaactcagcagcaacatcactgtaaaaaaaacaagagttgaaggaagcagtaaaattcagtatcgtaaagaacaacagcaacaacaaatgtggaattcagccaggactcccaatcttgtaaaacattctccatctgaagataagatgtccccagcatctccaatagatgatatcgaaagagaactgaaggcagaagctagtctaatggaccagatgagtagttgtgatagttcatcagattccaaaagttcatcatcttcaagtagtgaggatagttctagtgactcagaagatgaagattgcaaatcctctacttctgatacagggaattgtgtctcaggacatcctaccatgacacagtacaggattcctgatatagatgccagtcataatagatttcgagacaacagtggccttctgatgaatactttaagaaatgatttgcagctgagtgaatcaggaagtgacagtgatgactgaagaaatatttagctataaataaaaatttatacagcatgtataatttattttgtattaacaataaaaattcctaagactgagggaaatatgtcttaacttttgatgataaaagaaattaaatttgattcagaaatttcaaaaa

SEQ ID NO: 264 - protein, 260 aa, Homo sapiens
MNSAAGFSHLDRRERVLKLGESFEKQPRCAFHTVRYDFKPASIDTSSEGYLEVGEGEQVTITLPNIEGSTPPVTVFKGSKKPYLKECILIINHDTGECRLEKLSSNITVKKTRVEGSSKIQYRKEQQQQQMWNSARTPNLVKHSPSEDKMSPASPIDDIERELKAEASLMDQMSSCDSSSDSKSSSSSSSEDSSSDSEDEDCKSSTSDTGNCVSGHPTMTQYRIPDIDASHNRFRDNSGLLMNTLRNDLQLSESGSDSDD

SEQ ID NO: 265 - DNA, 2846 bp, Homo sapiens
aaatgcttgaggagagagagagagtaaggagccagccatgaatcctttccagaaaaatgagtccaaggaaactcttttttcacctgtctccattgaagaggtaccacctcgaccacctagccctccaaagaagccatctccgacaatctgtggctccaactatccactgagcattgccttcattgtggtgaatgaattctgcgagcgcttttcctattatggaatgaaagctgtgctgatcctgtatttcctgtatttcctgcactggaatgaagatacctccacatctatataccatgccttcagcagcctctgttattttactcccatcctgggagcagccattgctgactcgtggttgggaaaattcaagacaatcatctatctctccttggtgtatgtgcttggccatgtgatcaagtccttgggtgccttaccaatactgggaggacaagtggtacacacagtcctatcattgatcggcctgagtctaatagctttggggacaggaggcatcaaaccctgtgtggcagcttttggtggagaccagtttgaagaaaaacatgcagaggaacggactagatacttctcagtcttctacctgtccatcaatgcagggagcttgatttctacatttatcacacccatgctgagaggagatgtgcaatgttttggagaagactgctatgcattggcttttggagttccaggactgctcatggtaattgcacttgttgtgtttgcaatgggaagcaaaatatacaataaaccaccccctgaaggaaacatagtggctcaagttttcaaatgtatctggtttgctatttccaatcgtttcaagaaccgttctggagacattccaaagcgacagcactggctagactgggcggctgagaaatatccaaagcagctcattatggatgtaaaggcactgaccagggtactattcctttatatcccattgcccatgttctgggctcttttggatcagcagggttcacgatggactttgcaagccatcaggatgaataggaatttggggttttttgtgcttcagccggaccagatgcaggttctaaatccccttctggttcttatcttcatcccgttgtttgactttgtcatttatcgtctggtctccaagtgtggaattaacttctcatcacttaggaaaatggctgttggtatgatcctagcatgcctggcatttgcagttgcggcagctgtagagataaaaataaatgaaatggccccagcccagccaggtccccaggaggttttcctacaagtcttgaatctggcagatgatgaggtgaaggtgacagtggtgggaaatgaaaacaattctctgttgatagagtccatcaaatcctttcagaaaacaccacactattccaaactgcacctgaaaacaaaaagccaggattttcacttccacctgaaatatcacaatttgtctctctacactgagcattctgtgcaggagaagaactggtacagtcttgtcattcgtgaagatgggaacagtatctccagcatgatggtaaaggatacagaaagcagaacaaccaatgggatgacaaccgtgaggtttgttaacactttgcataaagatgtcaacatctccctgagtacagatacctctctcaatgttggtgaagactatggtgtgtctgcttatagaactgtgcaaagaggagaataccctgcagtgcactgtagaacagaagataagaacttttctctgaatttgggtcttctagactttggtgcagcatatctgtttgttattactaataacaccaatcagggtcttcaggcctggaagattgaagacattccagccaacaaaatgtccattgcgtggcagctaccacaatatgccctggttacagctggggaggtcatgttctctgtcacaggtcttgagttttcttattctcaggctccctctggcatgaaatctgtgctccaggcagcttggctattgacaattgcagttgggaatatcatcgtgcttgttgtggcacagttcagtggcctggtacagtgggccgaattcattttgttttcctgcctcctgctggtgatctgcctgatcttctccatcatgggctactactatgttcctgtaaagacagaggatatgcggggtccagcagataagcacattcctcacatccaggggaacatgatcaaactagagaccaagaagacaaaactctgatgactccctagattctgtcctgaccccaattcctggccctgtcttgaagcattttttttcttctactggattagacaagagagatagcagcatatcagagctgatctcctccacctttctccaatgacagaagttccaggactggttttccagtacatctttaaacaaggccccagagactctatgtctgcccgtccatcagtgaactcattaaaacttgtgcagtgttgctggagctggcctggtgtctccaaatgaccatgaaaatacacacgtataatggagatcattctctgtgggtatgcaaagttatgggaattcctttataggtaactgccatttaggactgatggccctaatttttgaggtgctgatttagaggcaaaattgcagaataacaaagaaatggtatttcaagtttttttttttataagcaatgtaattatgctattcacaggggcctcaagaattggtatgtatgatgtgatctggtccagccagggcctggcttgtcagctctctaggtttgatatgactttagtaaatttgtcaatatagatggtaggaagcagaatgccattttattaaaacacaggagaagttaaaaaaaaaaaaaaaa

SEQ ID NO: 266 - protein, 729 aa, Homo sapiens
MNPFQKNESKETLFSPVSIEEVPPRPPSPPKKPSPTICGSNYPLSIAFIVVNEFCERFSYYGMKAVLILYFLYFLHWNEDTSTSIYHAFSSLCYFTPILGAAIADSWLGKFKTIIYLSLVYVLGHVIKSLGALPILGGQVVHTVLSLIGLSLIALGTGGIKPCVAAFGGDQFEEKHAEERTRYFSVFYLSINAGSLISTFITPMLRGDVQCFGEDCYALAFGVPGLLMVIALVVFAMGSKIYNKPPPEGNIVAQVFKCIWFAISNRFKNRSGDIPKRQHWLDWAAEKYPKQLIMDVKALTRVLFLYIPLPMFWALLDQQGSRWTLQAIRMNRNLGFFVLQPDQMQVLNPLLVLIFIPLFDFVIYRLVSKCGINFSSLRKMAVGMILACLAFAVAAAVEIKINEMAPAQPGPQEVFLQVLNLADDEVKVTVVGNENNSLLIESIKSFQKTPHYSKLHLKTKSQDFHFHLKYHNLSLYTEHSVQEKNWYSLVIREDGNSISSMMVKDTESRTTNGMTTVRFVNTLHKDVNISLSTDTSLNVGEDYGVSAYRTVQRGEYPAVHCRTEDKNFSLNLGLLDFGAAYLFVITNNTNQGLQAWKIEDIPANKMSIAWQLPQYALVTAGEVMFSVTGLEFSYSQAPSGMKSVLQAAWLLTIAVGNIIVLVVAQFSGLVQWAEFILFSCLLLVICLIFSIMGYYYVPVKTEDMRGPADKHIPHIQGNMIKLETKKTKL

SEQ ID NO: 267 - DNA, 2765 bp, Homo sapiens
ccgaggggttccttggagaaggtggtgcgtcctggggcggcagctgaggaagaaagacgcagtgccccgaagcccctgagctgaaaagggccagaaagggggcggcatggcatggcccaaactgcccgcaccttggctgctgctctgcacctggctcccagcagggtgcctgtccttgcttgtgacggtccagcacacagaacgctatgtcaccctgtttgcctctatcatcctcaaatgtgactacaccacctctgcccagctccaggacgtggtggtgacatggcgcttcaagtccttctgcaaggaccctatctttgactactactcagcgtcataccaggcagctttatccctgggccaggacccatccaatgactgcaacgacaaccagcgggaagttcgcatagtggcccagcggcgggggcagaatgagcccgtgctgggggtagattaccggcagcgcaagatcaccatccagaaccgagcagatctcgtgataaatgaagtgatgtggtgggaccatggagtgtattactgcaccattgaggctccaggggacacatcaggagaccccgataaggaagtaaagctcatcgtcctacactggctgacagtgatcttcatcatcctgggagccctcctcctcctgctgctgattggagtgtgctggtgccagtgctgtcctcagtattgctgctgctatatccgctgtccctgctgtcctgcccactgctgctgtcctgaggaagatttgtccctgccgtccagcctcccgcagatgccaatgacccagaccaccaatcagcctcccatcgccaatggtgtcctggagtatttggagaaagaactgcggaacctcaacctggcccagcctctgccccctgacctcaaaggcagatttggccatccctgcagcatgctgtcctccctgggctctgaggtcgtggaacgcagaatcatccacctgcccccactgatcagagacctgtcatcctcaaggaggaccagtgactccctgcaccagcagtggctcaccccaattccctccaggccctgggatctgagggaggggagaagccaccaccattaccctgatttccaccaggagctccaggaccgggggccaaagtcttgggcattggaaagaagggagttggacccatcgtggagtggaaggcaccgtagctctaggctgaatgggtcacccatacactggtcagacagggacagcctaagcgatgtcccctcatccagtgaggcacgctggcggccgagccaccctcctttcaggagccgctgtcaggagaggccccgcaggcccagcccccgggagagcactcagaggcacgggagacgacgcaggcaccgcagctactctcctcccttgccctccggcctcagttcctggagctctgaagaggacaaggagaggcagccccagagctggcgggcccaccgccgcggctcgcactccccacactggcccgaggagaagccgcctagctaccgctcactggatatcactccaggcaagaatagcaggaaaaaagggagtgtggagaggcgctcggagaaagacagctctcatagtggaaggagtgtggtcatttagtcaccaagcacagcacaacttctgtggctacttctcggctcctgtgtgtcatcagcatcacctaggtttccagctgacttgggaactgcaagtctgagtctaacagtttttggcttagattctgagaatcaaatagaagaattttaaatacaagagtttgagattgggtatagtggctcacacctgtaatcacagcactttgggaggctaagaatcacttgagactaggagttcaagatcagcctgggaaacatagtgagaccccgtctctacaaaaaatataaaaattagttaggtgtggtggcatgcacttgtagtcccagctactcaagaggctgaggcagaaggatcccttgagcccaggagtgcaaggctgcaatgagccaggatcccatgatcacacatctgtattccagcctgggcaatagagcaagtccccattactaaaaaacccaaaaggccaaaaaacaaaaaagttagagttcgaggaattaccaactgtagttttagccttggttcatgctctcttgcatatttatataatctctgacttgtaatggaccctgactggaatgtgatccctcaggaacttagtagcctgagtctttcagtagactacactgcccagaaccctggccattctcaaaatgagaacttgggaatgtttaagaagaaatcaaacatgtttcaggaaaaggaaatctatggagtattatagggacattcccatgggaatgtatcttcctccatggcatgtcttgagggtcctttcttgttaggagtttatcctgccagcccataaatggactatttattgtaagtgtagaaaatcacagagaagcagttttgcaccagccttattcctgtgccttgttttcctcttgctctttttttacctgtatatctaatttatattttcatatatattgtgtattgattgaagtcactttaaatccttcttgggaatgacacagtatataaataaggaagaaagaaaacatgccaagctgagcatgctgctccaaataaatatctgctttcctaaaaaaaaaaaaaaaaaaaaaaaaaaaaaaaaaaaaaaaaaaaaaaaaaaaaaaaaaaaaaaaaaaaaaaaaaaaaaaaaaaaaaaaaaaaaaaaaaaaaaaaaaaa

SEQ ID NO: 268 - protein, 502 aa, Homo sapiens
MAWPKLPAPWLLLCTWLPAGCLSLLVTVQHTERYVTLFASIILKCDYTTSAQLQDVVVTWRFKSFCKDPIFDYYSASYQAALSLGQDPSNDCNDNQREVRIVAQRRGQNEPVLGVDYRQRKITIQNRADLVINEVMWWDHGVYYCTIEAPGDTSGDPDKEVKLIVLHWLTVIFIILGALLLLLLIGVCWCQCCPQYCCCYIRCPCCPAHCCCPEEDLSLPSSLPQMPMTQTTNQPPIANGVLEYLEKELRNLNLAQPLPPDLKGRFGHPCSMLSSLGSEVVERRIIHLPPLIRDLSSSRRTSDSLHQQWLTPIPSRPWDLREGRSHHHYPDFHQELQDRGPKSWALERRELDPSWSGRHRSSRLNGSPIHWSDRDSLSDVPSSSEARWRPSHPPFRSRCQERPRRPSPRESTQRHGRRRRHRSYSPPLPSGLSSWSSEEDKERQPQSWRAHRRGSHSPHWPEEKPPSYRSLDITPGKNSRKKGSVERRSEKDSSHSGRSVVI

SEQ ID NO: 269 - DNA, 2797 bp, Homo sapiens
aggagccttaggaggtacggggagctcgcaaatactccttttggtttattcttaccaccttgcttctgtgttccttgggaatgctgctgtgcttatgcatctggtctctttttggagctacagtggacaggcatttgtgacagcactatgggactgagtaacattctctttgtgatggccttcctgctctctggtgctgctcctctgaagattcaagcttatttcaatgagactgcagacctgccatgccaatttgcaaactctcaaaaccaaagcctgagtgagctagtagtattttggcaggaccaggaaaacttggttctgaatgaggtatacttaggcaaagagaaatttgacagtgttcattccaagtatatgggccgcacaagttttgattcggacagttggaccctgagacttcacaatcttcagatcaaggacaagggcttgtatcaatgtatcatccatcacaaaaagcccacaggaatgattcgcatccaccagatgaattctgaactgtcagtgcttgctaacttcagtcaacctgaaatagtaccaatttctaatataacagaaaatgtgtacataaatttgacctgctcatctatacacggttacccagaacctaagaagatgagtgttttgctaagaaccaagaattcaactatcgagtatgatggtgttatgcagaaatctcaagataatgtcacagaactgtacgacgtttccatcagcttgtctgtttcattccctgatgttacgagcaatatgaccatcttctgtattctggaaactgacaagacgcggcttttatcttcacctttctctatagagcttgaggaccctcagcctcccccagaccacattccttggattacagctgtacttccaacagttattatatgtgtgatggttttctgtctaattctatggaaatggaagaagaagaagcggcctcgcaactcttataaatgtggaaccaacacaatggagagggaagagagtgaacagaccaagaaaagagaaaaaatccatatacctgaaagatctgatgaagcccagcgtgtttttaaaagttcgaagacatcttcatgcgacaaaagtgatacatgtttttaattaaagagtaaagcccatacaagtattcattttttctaccctttcctttgtaagttcctgggcaacctttttgatttcttccagaaggcaaaaagacattaccatgagtaataagggggctccaggactccctctaagtggaatagcctccctgtaactccagctctgctccgtatgccaagaggagactttaattctcttactgcttcttttcacttcagagcacacttatgggccaagcccagcttaatggctcatgacctggaaataaaatttaggaccaatacctcctccagatcagattcttctcttaatttcatagattgtgttttttttttaaatagacctctcaatttctggaaaactgccttttatctgcccagaattctaagctggtgccccactgaattttgtgtgtacctgtgactaaacaactacctcctcagtctgggtgggacttatgtatttatgaccttatagtgttaatatcttgaaacatagagatctatgtactgtaatagtgtgattactatgctctagagaaaagtctacccctgctaaggagttctcatccctctgtcagggtcagtaaggaaaacggtggcctagggtacaggcaacaatgagcagaccaacctaaatttggggaaattaggagaggcagagatagaacctggagccacttctatctgggctgttgctaatattgaggaggcttgccccacccaacaagccatagtggagagaactgaataaacaggaaaatgccagagcttgtgaaccctgtttctcttgaagaactgactagtgagatggcctggggaagctgtgaaagaaccaaaagagatcacaatactcaaaagagagagagagagaaaaaagagagatcttgatccacagaaatacatgaaatgtctggtctgtccaccccatcaacaagtcttgaaacaagcaacagatggatagtctgtccaaatggacataagacagacagcagtttccctggtggtcagggaggggttttggtgatacccaagttattgggatgtcatcttcctggaagcagagctggggagggagagccatcaccttgataatgggatgaatggaaggaggcttaggactttccactcctggctgagagaggaagagctgcaacggaattaggaagaccaagacacagatcacccggggcttacttagcctacagatgtcctacgggaacgtgggctggcccagcatagggctagcaaatttgagttggatgattgtttttgctcaaggcaaccagaggaaacttgcatacagagacagatatactgggagaaatgactttgaaaacctggctctaaggtgggatcactaagggatggggcagtctctgcccaaacataaagagaactctggggagcctgagccacaaaaatgttcctttattttatgtaaaccctcaagggttatagactgccatgctagacaagcttgtccatgtaatattcccatgtttttaccctgcccctgccttgattagactcctagcacctggctagtttctaacatgttttgtgcagcacagtttttaataaatgcttgttacattcaaaaaaaaaaaaaaaaaaaaaaaaaaaaaaaaaaaaaaaaaaaaaaaaaaaaaaaaaaaaaaaaaaaaaaaaaaaaa

SEQ ID NO: 270 - protein, 323 aa, Homo sapiens
MGLSNILFVMAFLLSGAAPLKIQAYFNETADLPCQFANSQNQSLSELVVFWQDQENLVLNEVYLGKEKFDSVHSKYMGRTSFDSDSWTLRLHNLQIKDKGLYQCIIHHKKPTGMIRIHQMNSELSVLANFSQPEIVPISNITENVYINLTCSSIHGYPEPKKMSVLLRTKNSTIEYDGVMQKSQDNVTELYDVSISLSVSFPDVTSNMTIFCILETDKTRLLSSPFSIELEDPQPPPDHIPWITAVLPTVIICVMVFCLILWKWKKKKRPRNSYKCGTNTMEREESEQTKKREKIHIPERSDEAQRVFKSSKTSSCDKSDTCF

SEQ ID NO: 271 - DNA, 2784 bp, Homo sapiens
ggaaggcttgcacagggtgaaagctttgcttctctgctgctgtaacagggactagcacagacacacggatgagtggggtcatttccagatattaggtcacagcagaagcagccaaaatggatccccagtgcactatgggactgagtaacattctctttgtgatggccttcctgctctctggtgctgctcctctgaagattcaagcttatttcaatgagactgcagacctgccatgccaatttgcaaactctcaaaaccaaagcctgagtgagctagtagtattttggcaggaccaggaaaacttggttctgaatgaggtatacttaggcaaagagaaatttgacagtgttcattccaagtatatgggccgcacaagttttgattcggacagttggaccctgagacttcacaatcttcagatcaaggacaagggcttgtatcaatgtatcatccatcacaaaaagcccacaggaatgattcgcatccaccagatgaattctgaactgtcagtgcttgctaacttcagtcaacctgaaatagtaccaatttctaatataacagaaaatgtgtacataaatttgacctgctcatctatacacggttacccagaacctaagaagatgagtgttttgctaagaaccaagaattcaactatcgagtatgatggtgttatgcagaaatctcaagataatgtcacagaactgtacgacgtttccatcagcttgtctgtttcattccctgatgttacgagcaatatgaccatcttctgtattctggaaactgacaagacgcggcttttatcttcacctttctctatagagcttgaggaccctcagcctcccccagaccacattccttggattacagctgtacttccaacagttattatatgtgtgatggttttctgtctaattctatggaaatggaagaagaagaagcggcctcgcaactcttataaatgtggaaccaacacaatggagagggaagagagtgaacagaccaagaaaagagaaaaaatccatatacctgaaagatctgatgaagcccagcgtgtttttaaaagttcgaagacatcttcatgcgacaaaagtgatacatgtttttaattaaagagtaaagcccatacaagtattcattttttctaccctttcctttgtaagttcctgggcaacctttttgatttcttccagaaggcaaaaagacattaccatgagtaataagggggctccaggactccctctaagtggaatagcctccctgtaactccagctctgctccgtatgccaagaggagactttaattctcttactgcttcttttcacttcagagcacacttatgggccaagcccagcttaatggctcatgacctggaaataaaatttaggaccaatacctcctccagatcagattcttctcttaatttcatagattgtgttttttttttaaatagacctctcaatttctggaaaactgccttttatctgcccagaattctaagctggtgccccactgaattttgtgtgtacctgtgactaaacaactacctcctcagtctgggtgggacttatgtatttatgaccttatagtgttaatatcttgaaacatagagatctatgtactgtaatagtgtgattactatgctctagagaaaagtctacccctgctaaggagttctcatccctctgtcagggtcagtaaggaaaacggtggcctagggtacaggcaacaatgagcagaccaacctaaatttggggaaattaggagaggcagagatagaacctggagccacttctatctgggctgttgctaatattgaggaggcttgccccacccaacaagccatagtggagagaactgaataaacaggaaaatgccagagcttgtgaaccctgtttctcttgaagaactgactagtgagatggcctggggaagctgtgaaagaaccaaaagagatcacaatactcaaaagagagagagagagaaaaaagagagatcttgatccacagaaatacatgaaatgtctggtctgtccaccccatcaacaagtcttgaaacaagcaacagatggatagtctgtccaaatggacataagacagacagcagtttccctggtggtcagggaggggttttggtgatacccaagttattgggatgtcatcttcctggaagcagagctggggagggagagccatcaccttgataatgggatgaatggaaggaggcttaggactttccactcctggctgagagaggaagagctgcaacggaattaggaagaccaagacacagatcacccggggcttacttagcctacagatgtcctacgggaacgtgggctggcccagcatagggctagcaaatttgagttggatgattgtttttgctcaaggcaaccagaggaaacttgcatacagagacagatatactgggagaaatgactttgaaaacctggctctaaggtgggatcactaagggatggggcagtctctgcccaaacataaagagaactctggggagcctgagccacaaaaatgttcctttattttatgtaaaccctcaagggttatagactgccatgctagacaagcttgtccatgtaatattcccatgtttttaccctgcccctgccttgattagactcctagcacctggctagtttctaacatgttttgtgcagcacagtttttaataaatgcttgttacattcaaaaaaaaaaaaaaaaaaaaaaaaaaaaaaaaaaaaaaaaaaaaaaaaaaaaaaaaaaaaaaaaaaaaaaaaaaaaa

SEQ ID NO: 272 - protein, 329 aa, Homo sapiens
MDPQCTMGLSNILFVMAFLLSGAAPLKIQAYFNETADLPCQFANSQNQSLSELVVFWQDQENLVLNEVYLGKEKFDSVHSKYMGRTSFDSDSWTLRLHNLQIKDKGLYQCIIHHKKPTGMIRIHQMNSELSVLANFSQPEIVPISNITENVYINLTCSSIHGYPEPKKMSVLLRTKNSTIEYDGVMQKSQDNVTELYDVSISLSVSFPDVTSNMTIFCILETDKTRLLSSPFSIELEDPQPPPDHIPWITAVLPTVIICVMVFCLILWKWKKKKRPRNSYKCGTNTMEREESEQTKKREKIHIPERSDEAQRVFKSSKTSSCDKSDTCF

SEQ ID NO: 273 - DNA, 3482 bp, Homo sapiens
gggcgggccgggcgctgggagctggctgtcccaggagcagagcagtctccctgtccagatcaccaggatccctgcttgctggagaatgacccagatgtcccaggtgcaggagctcttccatgaggcagcccagcaggatgccctggcccagccccagccctggtggaagacccagctgttcatgtgggagcctgtgctgtttgggacctgggatggtgtgttcacatcctgcatgatcaacatctttggggttgtgctcttcctgaggactggctggctggtgggaaacacaggagtgctcctgggcatgttcctggtgtccttcgtcatcctggtggccctcgtcacggtgctgtctggcattggcgtcggggagcgcagcagcatcggcagcggtggcgtctactccatgatctcctcggtcctgggtgggcagacgggaggcaccatcgggctgctctatgtgtttggacagtgtgttgcaggtgccatgtatatcaccggctttgctgaatccatctcggatttgctgggcctcgggaatatctgggctgtgcgaggaatttcagttgcggtgcttctggccttgctgggcattaacctcgcaggtgtcaaatggataatccgcctccagctgctgttgctgttcctgctggccgtgtccacactggactttgtggtgggttctttcacccacctggacccagaacatggtttcattggatattcacccgaactgctacagaacaacacgctgcccgattacagcccgggggaatcttttttcactgtctttggggttttcttcccagcggctacaggagtcatggccggcttcaacatggggggcgacctcagggagcctgccgccagcattcccctgggctccctggcagctgttggcatctcgtggtttctgtacatcgtcttcgtcttcctcctgggcgccatctgcactcgagaggcccttcgctatgacttcctgatagcggaaaaggtatccctcatgggcttcctgttccttttgggcttatacatctcgtccctggcttcctgcatgggaggactttatggagctccccgcatcctgcagtgcattgcccaggagaaagtgatccctgcacttgcctgtctgggacaagggaaggggccaaacaaaacacccgtggctgccatctgcctgaccagcttggtgaccatggcctttgtttttgtgggtcaagtgaacgttctggcccccatcgtcaccatcaacttcatgctgacatacgttgcagtggactactcttacttctccctgtccatgtgttcctgcagcctgaccccggtgcctgagccggtgctcagggagggcgcagaaggcctccactgctctgagcacctgctcttagagaaagctcccagttacggctctgagggacctgcccaaagagtcttggagggcacgctactggaattcaccaaggacatggatcagctcctccagctaaccaggaagcttgagagtagccagcccaggcaaggagagggtaacaggaccccagaaagtcagaagaggaaaagcaagaaggccaccaagcagaccctacaagatagcttcctcttggacctcaaatcccctccttctttccctgtcgagatctctgacaggttgcccgctgcctcctgggaggggcaggagtcctgctggaacaagcagacttccaagagcgaagggactcagcctgagggaacatatggagagcaacttgttcctgagctgtgcaaccaatcagagtccagtggagaagatttcttcctgaagtccaggctccaagaacaagatgtctggagaagatccacttctttctatacccacatgtgcaacccctgggtctccctgttgggggctgttgggtcccttctcatcatgtttgtgatacagtgggtgtataccctggttaacatgggtgttgctgccatcgtgtatttctacattggccgggccagtccagggcttcaccttggatcagcctccaacttcagctttttccggtggatgaggtctctcttgctcccctcctgcaggagcttgcggtcccctcaggagcagatcatcttggcgccgtccctggctaaggttgacatggagatgactcagctcacccaggagaatgcagacttcgccactcgggatcgctaccaccactcctccctcgtgaaccgggagcagctgatgcctcactactagatgcagtgctgggaccttcctcttttggagctgtcccatgtacagtggacccaagctcaggaccttcgtggagctgcttctccaacctgagaaactcaagacccatcctcccgctgtcactttggacaatggaaatctacattttcttttccctttttttttttttttgagacagagtctcgccctgtcacccaggctggagtccagtggcacaatcttggctcactgcaacctctgcttcccgagttcaagcaattctcctgcctcagcctcctgagtagctgggattataggcatgcaccaccacacccagctattttttgtatttttactggagacagggtttcaccatgttggccaggctggtctcgaactcctgacctcgtgatccacccgtctcagcctcccaaagtactgggattacaggcgtgagccaccatgcctggccagaaatctatgttttcttagaacatgtggaagaaggaaaaagacaaaaaaggaaatctggattctgaggaccacgtctcacccagggtgacatcaggaatggtgctagcctctgcaacacgacacccagtctgaagagctctatacaggtactaagactagcaggggacaccaagactctgcacaaccagattgcttgtgcagagggccacaataagtgtatgttttatattttattgtattatttattcaaaaataaataatacactcacatgtttccacacccaaaagatatatagagtgaaaagtctccctccaatccttattctccacctgctcagttcctgtctaccctggcctagaggtaaccactattctcatccgtacatccagcatttctttatggatatacaagcaaatgggaatgtagagtctcacattctctctttatacacaaaagttagcacgttatacacatgttctgcaccttgcttttttcccttaacaatctatcttggagacatttcatatcaattcatatgccatttgttcatttttttcattgtataaatgtgttataatttatttcgccagttccacaatgatgagcatttggattctttccaatcttttgcaatgacaatcagctctgcagtgaataatcttgtacaaatgtgcaagcataaagtgtatctctaggataaattcccaaaagtggaattgcaggatcaaaaggtacatgcatttgtaaactattattgtttagtgagggtctttttaattaaagaattaacatgaattgcct

SEQ ID NO: 274 - protein, 714 aa, Homo sapiens
MTQMSQVQELFHEAAQQDALAQPQPWWKTQLFMWEPVLFGTWDGVFTSCMINIFGVVLFLRTGWLVGNTGVLLGMFLVSFVILVALVTVLSGIGVGERSSIGSGGVYSMISSVLGGQTGGTIGLLYVFGQCVAGAMYITGFAESISDLLGLGNIWAVRGISVAVLLALLGINLAGVKWIIRLQLLLLFLLAVSTLDFVVGSFTHLDPEHGFIGYSPELLQNNTLPDYSPGESFFTVFGVFFPAATGVMAGFNMGGDLREPAASIPLGSLAAVGISWFLYIVFVFLLGAICTREALRYDFLIAEKVSLMGFLFLLGLYISSLASCMGGLYGAPRILQCIAQEKVIPALACLGQGKGPNKTPVAAICLTSLVTMAFVFVGQVNVLAPIVTINFMLTYVAVDYSYFSLSMCSCSLTPVPEPVLREGAEGLHCSEHLLLEKAPSYGSEGPAQRVLEGTLLEFTKDMDQLLQLTRKLESSQPRQGEGNRTPESQKRKSKKATKQTLQDSFLLDLKSPPSFPVEISDRLPAASWEGQESCWNKQTSKSEGTQPEGTYGEQLVPELCNQSESSGEDFFLKSRLQEQDVWRRSTSFYTHMCNPWVSLLGAVGSLLIMFVIQWVYTLVNMGVAAIVYFYIGRASPGLHLGSASNFSFFRWMRSLLLPSCRSLRSPQEQIILAPSLAKVDMEMTQLTQENADFATRDRYHHSSLVNREQLMPHY

SEQ ID NO: 275 - DNA, 3032 bp, Homo sapiens
gaattccggagaaaggcgcaggggtgggagctgttgccgaagctgccacagcaaaagttctcccccctccccccttcccctcctctcaaggcccctagaaaggttggagctgccggccctgcagtcggtgaccgctgacgacttcggccgcgcccgcggatagcgggaggaatcagcagcttggaaattcaagcacgtgatctggcgggatgggcgtttgcctaacgtatttaatggaggaatcggatggcataagtgattaaggtggtattgaggatttctgaagcctatgaaaggtagaaactcaaccatgatttctttttcaactctacagcattcctttccttgaagtcttcgtttttaccttagtctcgggcagttatacttaagcatgaacattgacgacaaactggaaggattgtttcttaaatgtggcggcatagacgaaatgcagtcttccaggacaatggttgtaatgggtggagtgtctggccagtctactgtgtctggagagctacaggattcagtacttcaagatcgaagtatgcctcaccaggagatccttgctgcagatgaagtgttacaagaaagtgaaatgagacaacaggatatgatatcacatgatgaactcatggtccatgaggagacagtgaaaaatgatgaagagcagatggaaacacatgaaagacttcctcaaggactacagtatgcacttaatgtccctataagcgtaaagcaggaaattacttttactgatgtatctgagcaactgatgagagacaaaaaacaaatcagagagccagtagacttacagaaaaagaagaagcggaaacaacgttctcccgcaaaaatccttacaataaatgaggatggatcacttggtttgaaaacccctaaatctcacgtttgtgagcactgcaatgctgcctttagaacgaactatcacttacagagacatgtcttcattcatacaggtgaaaaaccatttcaatgtagtcaatgtgacatgcgtttcatacagaagtacctgcttcagagacatgagaagattcatactggtgaaaaaccatttcgctgtgatgaatgtggtatgagattcatacaaaaatatcatatggaaaggcataagagaactcatagtggagaaaaaccttaccagtgtgaatactgtttacagtatttttccagaacagatcgtgtattgaaacataaacgtatgtgccatgaaaatcatgacaaaaaactaaatacatgtgccatcaaaggtggccttctgacatctgaggaagattctggcttttctacatcaccaaaagacaactcactgccaaaaaagaaaaggcagaaaacggagaaaaaatcatctggaatggacaaagagagtgctttggacaaatctgacctgaaaaaagacaaaaatgattacttgcctgtttattcttcaagtactaaagtaaaagatgagtatatggttgcagaatatgctgttgaaatgccacattcgtcagttgggggctcgcatttagaagatgcgtcaggagaaatacacccacctaagttagttctcaaaaaaattaatagtaagagaagtctgaaacagccactggagcaaaatcaaacaatttcacctttatccacatatgaagagagcaaagtttcaaagtatgcttttgaacttgtggataaacaggctttactggactcagaaggcaatgctgacattgatcaggttgataatttgcaggaggggcccagtaaacctgtgcatagtagtactaattatgatgatgccatgcagtttttgaagaagaagcggtatcttcaagcagcaagtaacaacagcagggaatatgcgctgaatgtgggtaccatacgttctcagccttctgtaacacaagcagctgtggcaagtgtcattgatgaaagtaccacggcatccatattagagtcacaggcactgaatgtggagattaagagtaatcatgacaaaaatgttattccagatgaggtactgcagactctgttggatcattattcccacaaagctaatggacagcatgagatatccttcagtgttgcagatactgaagtgacttctagcatatcaataaattcttcagaagtaccagaggtcaccccatcagagaatgttggatcaagctcccaagcatcctcatcagataaagccaacatgttgcaggaatactccaagtttctgcagcaggctttggacagaactagccaaaatgatgcctatttgaatagcccgagccttaactttgtgactgataaccagaccctcccaaatcagccagcattctcttccatagacaagcaggtctatgccaccatgcccatcaatagctttcgatcaggaatgaattctccactaagaacaactccagataagtcccactttggactaatagttggtgattcacagcactcatttcccttttcaggtgatgagacaaaccatgcttctgccacatcaacacaggactttctggatcaagtcacttctcagaagaaagctgaggcccagcctgtccaccaagcttaccaaatgagctcctttgaacagcccttccgtgctccctatcatggatcaagagctggaatagctactcaatttagcactgccaatggacaggtgaaccttcggggaccagggacaagtgctgaattttcagaatttcccttggtgaatgtaaatgataatagagctgggatgacatcttcacctgatgccacaactggccagacttttggctaaaaaaaaaaaaaaagtgaaataatactggcactttagaacagattaatcaagagtggggttactatgtgtaaatggagtgctgtacagatttaagagcaatgcgtaataacaagttaagctgatatacgatgataataactgcatttcgtttggttagtcagcattctttgaactgccttacatgttgtcacctttatagaagcaatgcattacttgttttagatcagaaacttgctattccacccacaccaagtaa

SEQ ID NO: 276 - protein, 794 aa, Homo sapiens
MNIDDKLEGLFLKCGGIDEMQSSRTMVVMGGVSGQSTVSGELQDSVLQDRSMPHQEILAADEVLQESEMRQQDMISHDELMVHEETVKNDEEQMETHERLPQGLQYALNVPISVKQEITFTDVSEQLMRDKKQIREPVDLQKKKKRKQRSPAKILTINEDGSLGLKTPKSHVCEHCNAAFRTNYHLQRHVFIHTGEKPFQCSQCDMRFIQKYLLQRHEKIHTGEKPFRCDECGMRFIQKYHMERHKRTHSGEKPYQCEYCLQYFSRTDRVLKHKRMCHENHDKKLNTCAIKGGLLTSEEDSGFSTSPKDNSLPKKKRQKTEKKSSGMDKESALDKSDLKKDKNDYLPVYSSSTKVKDEYMVAEYAVEMPHSSVGGSHLEDASGEIHPPKLVLKKINSKRSLKQPLEQNQTISPLSTYEESKVSKYAFELVDKQALLDSEGNADIDQVDNLQEGPSKPVHSSTNYDDAMQFLKKKRYLQAASNNSREYALNVGTIRSQPSVTQAAVASVIDESTTASILESQALNVEIKSNHDKNVIPDEVLQTLLDHYSHKANGQHEISFSVADTEVTSSISINSSEVPEVTPSENVGSSSQASSSDKANMLQEYSKFLQQALDRTSQNDAYLNSPSLNFVTDNQTLPNQPAFSSIDKQVYATMPINSFRSGMNSPLRTTPDKSHFGLIVGDSQHSFPFSGDETNHASATSTQDFLDQVTSQKKAEAQPVHQAYQMSSFEQPFRAPYHGSRAGIATQFSTANGQVNLRGPGTSAEFSEFPLVNVNDNRAGMTSSPDATTGQTFG

SEQ ID NO: 277 - DNA, 4009 bp, Homo sapiens
acaccgccctcccgccagactcccggcggctcctcctccctctcccaaacccactcccaaagctaagtgcaggcttccccgttccagccagaagcgctgcgtgagcctccacacgtagccgcaggcagctccttaaatagcgtccgcgctgagcaaacagtccagacgtggggcccaggagggcgagctgaggcgaccgcaccgggcgcgcagcggcggcgggtcagccggcggccaatagccagggcgcggcccgccccgtcgcctcccctcggggagcctataaggcctccgcagcgccccgggcgcctgctgctccgtgcctccaccgacgacctcactcagctgcgttacgcgccgctccggctgccggccgcgcgccttgcccgccggctcccgcccgcaatcggcggctcagggcggacccgggtctctgcgttctcgcgagaagcgcggcgctgcggggccgtgggcgcctgagcccgcgcggccctcgagggccgaatatggggggatgcacggtgaagcctcagctgctgctcctggcgctcgtcctccacccctggaatccctgtctgggtgcggactcggagaagccctcgagcatccccacagataaattattagtcataactgtagcaacaaaagaaagtgatggattccatcgatttatgcagtcagccaaatatttcaattatactgtgaaggtccttggtcaaggagaagaatggagaggtggtgatggaattaatagtattggagggggccagaaagtgagattaatgaaagaagtcatggaacactatgctgatcaagatgatctggttgtcatgtttactgaatgctttgatgtcatatttgctggtggtccagaagaagttctaaaaaaattccaaaaggcaaaccacaaagtggtctttgcagcagatggaattttgtggccagataaaagactagcagacaagtatcctgttgtgcacattgggaaacgctatctgaattcaggaggatttattggctatgctccatatgtcaaccgtatagttcaacaatggaatctccaggataatgatgatgatcagctcttttacactaaagtttacattgatccactgaaaagggaagctattaacatcacattggatcacaaatgcaaaattttccagaccttaaatggagctgtagatgaagttgttttaaaatttgaaaatggcaaagccagagctaagaatacattttatgaaacattaccagtggcaattaatggaaatggacccaccaagattctcctgaattattttggaaactatgtacccaattcatggacacaggataatggctgcactctttgtgaattcgatacagtcgacttgtctgcagtagatgtccatccaaacgtatcaataggtgtttttattgagcaaccaaccccttttctacctcggtttctggacatattgttgacactggattacccaaaagaagcacttaaactttttattcataacaaagaagtttatcatgaaaaggacatcaaggtattttttgataaagctaagcatgaaatcaaaactataaaaatagtaggaccagaagaaaatctaagtcaagcggaagccagaaacatgggaatggacttttgccgtcaggatgaaaagtgtgattattactttagtgtggatgcagatgttgttttgacaaatccaaggactttaaaaattttgattgaacaaaacagaaagatcattgctcctcttgtaactcgtcatggaaagctgtggtccaatttctggggagcattgagtcctgatggatactatgcacgatctgaagattatgtggatattgttcaagggaatagagtaggagtatggaatgtcccatatatggctaatgtgtacttaattaaaggaaagacactccgatcagagatgaatgaaaggaactattttgttcgtgataaactggatcctgatatggctctttgccgaaatgctagagaaatgggtgtatttatgtacatttctaatagacatgaatttggaaggctattatccactgctaattacaatacttcccattataacaatgacctctggcagatttttgaaaatcctgtggactggaaggaaaagtatataaaccgtgattattcaaagattttcactgaaaatatagttgaacagccctgtccagatgtcttttggttccccatattttctgaaaaagcctgtgatgaattggtagaagaaatggaacattacggcaaatggtctgggggaaaacatcatgatagccgtatatctggtggttatgaaaatgtcccaactgatgatatccacatgaagcaagttgatctggagaatgtatggcttcattttatccgggagttcattgcaccagttacactgaaggtctttgcaggctattatacgaagggatttgcactactgaattttgtagtaaaatactcccctgaacgacagcgttctcttcgtcctcatcatgatgcttctacatttaccataaacattgcacttaataacgtgggagaagactttcagggaggtggttgcaaatttctaaggtacaattgctctattgagtcaccacgaaaaggctggagcttcatgcatcctgggagactcacacatttgcatgaaggacttcctgttaaaaatggaacaagatacattgcagtgtcatttatagatccctaagttatttacttttcattgaattgaaatttattttggatgaatgactggcatgaacacgtctttgaagttgtggctgagaagatgagaggaatatttaaataacatcaacagaacaacttcactttgggccaaacatttgaaaaactttttataaaaaattgtttgatatttcttaatgtctgctctgagccttaaaacacagattgaagaagaaaagaaagaaaaaacttaaatatttatttctatgctttgttgcctctgagaataatgacaatttatgaatttgtgtttcaaattgataaaatatttaggtacaaataacaagactaataatattttcttatttaaaaaaagcatgggaagatttttatttatcaaaatatagaggaaatgtagacaaaatggatataaatgaaaattaccatgttgtaaaaccttgaaaatcagattctaactggatttgtatgcaactaagtatttttctgaacacctatgcaggtcttatttacagtagttactaagggaacacacaaagaattacacaacgttttcctcaagaaaatggtacaaaacacaaccgaggagcgtatacagttgaaaacatttttgttttgattggaaggcagattattttatattagtattaaaaatcaaaccctatgtttctttcagatgaatcttccaaagtggattatattaagcaggtattagatttaggaaaacctttccatttcttaaagtattatcaagtgtcaagatcagcaagtgtccttaagtcaaacaggttttttttgttgttgtttttgctttgtttccttttttagaaagttctagaaaataggaaaacgaaaaatttcattgagatgagtagtgcatttaattattttttaaaaaactttttaagtacttgaattttatatcaggaaaacaaagttgttgagccttgcttcttccgttttgccctttgtctcgctccttattctttttttggggggagggttatttgcttttttatcttcctggcataatttccattttattcttctgagtgtctatgttaacttccctctatcccgcttataaaaaaattctccaacaaaaatacttgttgacttgatgttttatcacttctctaagtaaggttgaaatatccttattgtagctactgtttttaatgtaaaggttaaacttgaaaagaaattcttaatcacggtgccaaaattcattttctaacaccatgtgttagaaaattataaaaaataaaataattttagaaaaaaaaaaaaaaa

SEQ ID NO: 278 - protein, 737 aa, Homo sapiens
MGGCTVKPQLLLLALVLHPWNPCLGADSEKPSSIPTDKLLVITVATKESDGFHRFMQSAKYFNYTVKVLGQGEEWRGGDGINSIGGGQKVRLMKEVMEHYADQDDLVVMFTECFDVIFAGGPEEVLKKFQKANHKVVFAADGILWPDKRLADKYPVVHIGKRYLNSGGFIGYAPYVNRIVQQWNLQDNDDDQLFYTKVYIDPLKREAINITLDHKCKIFQTLNGAVDEVVLKFENGKARAKNTFYETLPVAINGNGPTKILLNYFGNYVPNSWTQDNGCTLCEFDTVDLSAVDVHPNVSIGVFIEQPTPFLPRFLDILLTLDYPKEALKLFIHNKEVYHEKDIKVFFDKAKHEIKTIKIVGPEENLSQAEARNMGMDFCRQDEKCDYYFSVDADVVLTNPRTLKILIEQNRKIIAPLVTRHGKLWSNFWGALSPDGYYARSEDYVDIVQGNRVGVWNVPYMANVYLIKGKTLRSEMNERNYFVRDKLDPDMALCRNAREMGVFMYISNRHEFGRLLSTANYNTSHYNNDLWQIFENPVDWKEKYINRDYSKIFTENIVEQPCPDVFWFPIFSEKACDELVEEMEHYGKWSGGKHHDSRISGGYENVPTDDIHMKQVDLENVWLHFIREFIAPVTLKVFAGYYTKGFALLNFVVKYSPERQRSLRPHHDASTFTINIALNNVGEDFQGGGCKFLRYNCSIESPRKGWSFMHPGRLTHLHEGLPVKNGTRYIAVSFIDP

SEQ ID NO: 279 - DNA, 4072 bp, Homo sapiens
acaccgccctcccgccagactcccggcggctcctcctccctctcccaaacccactcccaaagctaagtgcaggcttccccgttccagccagaagcgctgcgtgagcctccacacgtagccgcaggcagctccttaaatagcgtccgcgctgagcaaacagtccagacgtggggcccaggagggcgagctgaggcgaccgcaccgggcgcgcagcggcggcgggtcagccggcggccaatagccagggcgcggcccgccccgtcgcctcccctcggggagcctataaggcctccgcagcgccccgggcgcctgctgctccgtgcctccaccgacgacctcactcagctgcgttacgcgccgctccggctgccggccgcgcgccttgcccgccggctcccgcccgcaatcggcggctcagggcggacccgggtctctgcgttctcgcgagaagcgcggcgctgcggggccgtgggcgcctgagcccgcgcggccctcgagggccgaatatggggggatgcacggtgaagcctcagctgctgctcctggcgctcgtcctccacccctggaatccctgtctgggtgcggactcggagaagccctcgagcatccccacagataaattattagtcataactgtagcaacaaaagaaagtgatggattccatcgatttatgcagtcagccaaatatttcaattatactgtgaaggtccttggtcaaggagaagaatggagaggtggtgatggaattaatagtattggagggggccagaaagtgagattaatgaaagaagtcatggaacactatgctgatcaagatgatctggttgtcatgtttactgaatgctttgatgtcatatttgctggtggtccagaagaagttctaaaaaaattccaaaaggcaaaccacaaagtggtctttgcagcagatggaattttgtggccagataaaagactagcagacaagtatcctgttgtgcacattgggaaacgctatctgaattcaggaggatttattggctatgctccatatgtcaaccgtatagttcaacaatggaatctccaggataatgatgatgatcagctcttttacactaaagtttacattgatccactgaaaagggaagctattaacatcacattggatcacaaatgcaaaattttccagaccttaaatggagctgtagatgaagttgttttaaaatttgaaaatggcaaagccagagctaagaatacattttatgaaacattaccagtggcaattaatggaaatggacccaccaagattctcctgaattattttggaaactatgtacccaattcatggacacaggataatggctgcactctttgtgaattcgatacagtcgacttgtctgcagtagatgtccatccaaacgtatcaataggtgtttttattgagcaaccaaccccttttctacctcggtttctggacatattgttgacactggattacccaaaagaagcacttaaactttttattcataacaaagaagtttatcatgaaaaggacatcaaggtattttttgataaagctaagcatgaaatcaaaactataaaaatagtaggaccagaagaaaatctaagtcaagcggaagccagaaacatgggaatggacttttgccgtcaggatgaaaagtgtgattattactttagtgtggatgcagatgttgttttgacaaatccaaggactttaaaaattttgattgaacaaaacagaaagatcattgctcctcttgtaactcgtcatggaaagctgtggtccaatttctggggagcattgagtcctgatggatactatgcacgatctgaagattatgtggatattgttcaagggaatagagtaggagtatggaatgtcccatatatggctaatgtgtacttaattaaaggaaagacactccgatcagagatgaatgaaaggaactattttgttcgtgataaactggatcctgatatggctctttgccgaaatgctagagaaatgactttacaaagggaaaaagactcccctactccggaaacattccaaatgctcagccccccaaagggtgtatttatgtacatttctaatagacatgaatttggaaggctattatccactgctaattacaatacttcccattataacaatgacctctggcagatttttgaaaatcctgtggactggaaggaaaagtatataaaccgtgattattcaaagattttcactgaaaatatagttgaacagccctgtccagatgtcttttggttccccatattttctgaaaaagcctgtgatgaattggtagaagaaatggaacattacggcaaatggtctgggggaaaacatcatgatagccgtatatctggtggttatgaaaatgtcccaactgatgatatccacatgaagcaagttgatctggagaatgtatggcttcattttatccgggagttcattgcaccagttacactgaaggtctttgcaggctattatacgaagggatttgcactactgaattttgtagtaaaatactcccctgaacgacagcgttctcttcgtcctcatcatgatgcttctacatttaccataaacattgcacttaataacgtgggagaagactttcagggaggtggttgcaaatttctaaggtacaattgctctattgagtcaccacgaaaaggctggagcttcatgcatcctgggagactcacacatttgcatgaaggacttcctgttaaaaatggaacaagatacattgcagtgtcatttatagatccctaagttatttacttttcattgaattgaaatttattttggatgaatgactggcatgaacacgtctttgaagttgtggctgagaagatgagaggaatatttaaataacatcaacagaacaacttcactttgggccaaacatttgaaaaactttttataaaaaattgtttgatatttcttaatgtctgctctgagccttaaaacacagattgaagaagaaaagaaagaaaaaacttaaatatttatttctatgctttgttgcctctgagaataatgacaatttatgaatttgtgtttcaaattgataaaatatttaggtacaaataacaagactaataatattttcttatttaaaaaaagcatgggaagatttttatttatcaaaatatagaggaaatgtagacaaaatggatataaatgaaaattaccatgttgtaaaaccttgaaaatcagattctaactggatttgtatgcaactaagtatttttctgaacacctatgcaggtcttatttacagtagttactaagggaacacacaaagaattacacaacgttttcctcaagaaaatggtacaaaacacaaccgaggagcgtatacagttgaaaacatttttgttttgattggaaggcagattattttatattagtattaaaaatcaaaccctatgtttctttcagatgaatcttccaaagtggattatattaagcaggtattagatttaggaaaacctttccatttcttaaagtattatcaagtgtcaagatcagcaagtgtccttaagtcaaacaggttttttttgttgttgtttttgctttgtttccttttttagaaagttctagaaaataggaaaacgaaaaatttcattgagatgagtagtgcatttaattattttttaaaaaactttttaagtacttgaattttatatcaggaaaacaaagttgttgagccttgcttcttccgttttgccctttgtctcgctccttattctttttttggggggagggttatttgcttttttatcttcctggcataatttccattttattcttctgagtgtctatgttaacttccctctatcccgcttataaaaaaattctccaacaaaaatacttgttgacttgatgttttatcacttctctaagtaaggttgaaatatccttattgtagctactgtttttaatgtaaaggttaaacttgaaaagaaattcttaatcacggtgccaaaattcattttctaacaccatgtgttagaaaattataaaaaataaaataattttagaaaaaaaaaaaaaaa

SEQ ID NO: 280 - protein, 758 aa, Homo sapiens
MGGCTVKPQLLLLALVLHPWNPCLGADSEKPSSIPTDKLLVITVATKESDGFHRFMQSAKYFNYTVKVLGQGEEWRGGDGINSIGGGQKVRLMKEVMEHYADQDDLVVMFTECFDVIFAGGPEEVLKKFQKANHKVVFAADGILWPDKRLADKYPVVHIGKRYLNSGGFIGYAPYVNRIVQQWNLQDNDDDQLFYTKVYIDPLKREAINITLDHKCKIFQTLNGAVDEVVLKFENGKARAKNTFYETLPVAINGNGPTKILLNYFGNYVPNSWTQDNGCTLCEFDTVDLSAVDVHPNVSIGVFIEQPTPFLPRFLDILLTLDYPKEALKLFIHNKEVYHEKDIKVFFDKAKHEIKTIKIVGPEENLSQAEARNMGMDFCRQDEKCDYYFSVDADVVLTNPRTLKILIEQNRKIIAPLVTRHGKLWSNFWGALSPDGYYARSEDYVDIVQGNRVGVWNVPYMANVYLIKGKTLRSEMNERNYFVRDKLDPDMALCRNAREMTLQREKDSPTPETFQMLSPPKGVFMYISNRHEFGRLLSTANYNTSHYNNDLWQIFENPVDWKEKYINRDYSKIFTENIVEQPCPDVFWFPIFSEKACDELVEEMEHYGKWSGGKHHDSRISGGYENVPTDDIHMKQVDLENVWLHFIREFIAPVTLKVFAGYYTKGFALLNFVVKYSPERQRSLRPHHDASTFTINIALNNVGEDFQGGGCKFLRYNCSIESPRKGWSFMHPGRLTHLHEGLPVKNGTRYIAVSFIDP

SEQ ID NO: 281 - DNA, 5911 bp, Homo sapiens
aattgcctctcaccccccggaggggttattttgggggtggttggaggcggtggcggcggcggcgaggaggggaatttccttgtgcctccattcccgggaggggggagcggcgttggaggccaccgtttccagcatcaacaacagcaacttgtgattggcggtgaccggatattcagttgcacatccccacatcaatgcactgccaatgggttatatcctgtgttgtgacctcatggtttaagtgggaataaagatgagtataagcagtgatgaggtcaacttcttggtatatagatacttgcaagagtcaggattttctcattcagcatttacctttggtatagaaagccatatcagtcagtccaatataaatggtgccctcgtcccacccgctgcattgatttctatcatccagaaaggtctacagtatgtagaagcagaagttagtattaatgaggatggtaccttgtttgatggtcgaccaatagagtctctgtccctgatagatgccgtaatgcctgatgtagtacaaacaagacaacaagcttatagagataagcttgcacagcaacaggcagcagctgctgcagctgccgcagctgcagccagccaacaaggatctgcaaaaaatggagaaaacacagcaaatggggaggagaatggagcacatactatagcaaataatcatactgatatgatggaagtggatggggatgttgaaatccctcctaataaagctgttgtgttgcggggccatgaatctgaagtttttatctgtgcctggaaccctgttagtgatctcctagcatcagggtctggagactcaacagcaagaatatggaatcttagtgagaacagcaccagtggctctacacagttagtacttagacattgtatacgagaaggagggcaagatgttccaagcaacaaggatgtcacatctctagattggaatagtgaaggtacacttctagcaactggttcctatgatgggtttgccagaatatggactaaagatggtaaccttgctagcaccttagggcagcataaaggccctatatttgcattaaaatggaataagaaaggaaatttcatcctaagtgctggagtagacaagactacaattatttgggacgcacatactggtgaagccaagcaacagtttccttttcattcagcaccagcattggatgttgattggcagagcaacaacacctttgcttcttgtagtacagatatgtgcattcatgtctgtaaattaggacaagacagacctattaaaacattccaaggacatacgaatgaagtaaatgctatcaaatgggacccaactggcaatctcttggcctcctgttctgacgacatgactttaaagatatggagtatgaaacaagacaattgtgtccatgatttgcaagcacataataaagaaatttatactatcaaatggagtccaacaggaccagggactaataatccaaatgccaaccttatgttagcaagtgcatcctttgattctactgttaggttatgggatgtagaccgagggatatgcatccataccttgacaaaacaccaagagcctgtgtacagtgtagctttcagtcctgatggcaggtatctggcaagtggttcttttgacaaatgtgtacacatctggaacacgcagacaggtgctctagttcacagctataggggaacaggtggaatatttgaagtttgctggaatgcagcaggagacaaagttggagccagtgcatcagatggttcagtttgtgtattagaccttcggaaatagcgctactagttggaagccatggaccgactatgaatgtgtacatagccaaaatgactgtccctgacccatgtactgctatagtcccacttgaaccatggccagtccactacagccaaatctaaaagaaatatatacatacagtgtatataaacaaaattgcaccctgaagatgacagagttttgtcacagcttgtgaattctgttcaccaagtgctggaatctaatctgctgtgcccctaaaatagcatttagaagttttggatatgaaaaacagaagagagaaaaatatacattataaaagcagaacatacatgtaccagtttttggatactaaatgacagccttgtttctcccctttgaatcagcagacaccatggattatattctttttttcccttcagtagtgagcagtttgtatgtacagagaaaatggacttacaaaaacttgcagcagtagtttgttcttgctttaaaatttcgtttttggtttagattatggatgcatgaagtaagggagtgaatcagtttcttgtttatatttttttcaccttttaaacaaaaaattctttaaaatattttaatgcattcttttgaagaggtagatgtttggtacattttatggctcccagagcatatattcagttggtgcatgttgtggaagggggaattggaaattaaatgaaaacctatgactttggtcatgtcaatctgtaagacacatcagtaaaagggtattatgctctgttggttttgtttttttgttttgctttttttttttttttttcttttttgttttttggtgatgtggcttaaatgcaatagtttcttttttgggacatatttctgccaattaaagactagaagggcacaactttttttttaattaccatagagaagatacattaaaaaaaatcttctgatgttttgtagccataactaaattatggtaaaaatgtgcactattgtgaaaaggagcaacgtagttttgggttttttgttgtttgtttgttttgctttgttttttaagagattaaaatgtttctggataaggattagcttctcgaagtgtccatcattctgtgtagaagcttaaatatgtaatgtaaccaaactccagtattaaaaatctctcatgttgttttctttatacaaagcaagataacggcatataacactgccattacatggcaaaatgtttgctaccttagtttaaaaaacaatctcaaacaaaagacttgcttcaaggtgtttttaaatagcagtgattcagaattttttttaatgaaagtataattgcactaaccttcttcctgctgctctgattctgcatttgtggtacttgtgactacgttttttcaaatatagatagatttaagctgctaatttttttttttttagtaatcactactatatcatgtcttttactctgtttataatatcaagtattttcttaaagatatagatattaaaccttgtgctcatgcaacttagagtaacatatacagacaaatgattgcatgaggccatgtttatatgtgtgactaataaggcttgtcatgattaacataatccaggtatgtcatttctgaagagaatagtcatcaaatttatatctcgaagattttaattaaggaattgcttattgttgagcttagcaaattaataacactatttctgtcactaattattttgaggccttttagtactaaaattttaacctgtgttctaagtagaaactgatttaacccaagtaatgcagctttgattgatttcagcattcgttgctttgctatttttacaaaacagcattgattgaagcaagtcttggttttactaaggtagggtagcatttgctattggtaaagagaataaatacacttaatttcacaatacattgttatatgtaccccagttgttgttagtggggactatgatactgtaataatatttttaaaaatttacatcaagagaggcagtcattcacgatggttttgtgccagctctttttagggttttggatcacattagagatatttagaacatattaccctgtgacttacgtaggaaacctaatatgctgagtatctggcacttgaattcctgcttttattgctggaggtccacatctgtggttgacctctgttattgtttaaaaaaaataaataaaaattaaaaaaatctgtgcaataattttaaaatgtgctcccaggaatagacacaaatgttttgagtatcttttaagctgcattttcctttagtgatgcatttgtcaattgcactgaatttaaatctgaaagtcagaggtgattattgatagtacttttgtattttgatatggacagtttattcatttgcatacagttattgactttttcccagctgattaaaagatagtcaagaaattctgcaatatagctgccaaaatagacagctacatttttatgatattgtcatcttttctgttttttttttcttttttttctttagctattttacttaagcataatagccacaataggacatataaaagattataaatacagagctttattatcctgacgtcttgggtcttttaagtatatacttttctgaaaggtatccattttgtaggcttgggttcttcatgagcatacgattgtttatttttgctgctgttctcaacatcatcattgcctgctgatgtgccacgatgctgctccaatagacagcaataagattgtctctaatttgagcagtaacatgattgcaagagaccaagtttcacagcttgtaaagttctgtatttgggattcttgcttatttttccgcctgtgtttttctgagaacttattcctgatgatcaattgaatccagtagtttttctatgctatttgttgttgtataagctactgtaagaaacttatcataaggaaaaatagaaaggaaaacttgaatcaatactcattgattaaaatggaataaagaaagagcagctgccacttttaaacaacataaaggaatatctttttttgtctccgtgtaggaaatcccataagttcttatatttgttccagttcccatttcctgccattgaccagataacatcattgactttcaaatgacttttagaagtgataactcttaatttcctaatagatactagattgtattgaattctgttttaattattctctaggtaagtatgttttaggattaaataccttttacagatactgaaagtgcctccttttgtggtgtaaaaaacaaattatggtgcaaaaagtaatcactagattgaaatacatgaaggttttttgctttttgacatacgaaaatgtcaagagaaaggccaaagatttgtactttttcacttacaaagcactcctttttcccttaaacttctttctgtcaaattagatttaatgagagagtactatttttaaggagctatctgtttatgtagaatgattttgttaagagtaatgtaaactattattgagtagaggcctaaagaggactgtgcatttttgctatttaaaggaatcacaaatgatcatacttaagtgagcaaaaatgacaagttttactagctaagtagagaaataaatctcaaatgcagcgctacaattttcattatcttaagcacattgtacatttctacagaacctgtgattattctcgcatgataaggatggtacttgcatatggtgaattactactgttgacagtttccgcagaaatcctatttcagtggaccaacattgtggcatggcagcaaatgccaacattttgtggaatagcagcaaatctacaagagaccctggttggtttttcgttttgttttctttgttttttcccccttctcctgaatcagcagggatggaaggagggtagggaagttatgaattactccttccagtagtagctctgaagtgtcacatttaatatcagttttttttaaacatgattctagttaaatgtagaagagagaagaaagaggaagtgttcacttttttaatacactgatttagaaatttgatgtcttatatcagtagttctgaggtattgatagcttgctttatttctgcctttacgttgacagtgttgaagcagggtgaataactagggcatata

SEQ ID NO: 282 - protein, 514 aa, Homo sapiens
MSISSDEVNFLVYRYLQESGFSHSAFTFGIESHISQSNINGALVPPAALISIIQKGLQYVEAEVSINEDGTLFDGRPIESLSLIDAVMPDVVQTRQQAYRDKLAQQQAAAAAAAAAAASQQGSAKNGENTANGEENGAHTIANNHTDMMEVDGDVEIPPNKAVVLRGHESEVFICAWNPVSDLLASGSGDSTARIWNLSENSTSGSTQLVLRHCIREGGQDVPSNKDVTSLDWNSEGTLLATGSYDGFARIWTKDGNLASTLGQHKGPIFALKWNKKGNFILSAGVDKTTIIWDAHTGEAKQQFPFHSAPALDVDWQSNNTFASCSTDMCIHVCKLGQDRPIKTFQGHTNEVNAIKWDPTGNLLASCSDDMTLKIWSMKQDNCVHDLQAHNKEIYTIKWSPTGPGTNNPNANLMLASASFDSTVRLWDVDRGICIHTLTKHQEPVYSVAFSPDGRYLASGSFDKCVHIWNTQTGALVHSYRGTGGIFEVCWNAAGDKVGASASDGSVCVLDLRK

SEQ ID NO: 283 - DNA, 1471 bp, Homo sapiens
atcacacaggatccggagctggtgctgataacagcggaatcccccgtctacctctctccttggtcctggaacagcgctactgatcaccaagtagccacaaaatataataaaccctcagcacttgctcagtagttttgtgaaagtctcaagtaaaagagacacaaacaaaaaattctttttcgtgaagaactccaaaaataaaattctctagagataaaaaaaaaaaaaaaaggaaaatgccagctgatataatggagaaaaattcctcgtccccggtggctgctaccccagccagtgtcaacacgacaccggataaaccaaagacagcatctgagcacagaaagtcatcaaagcctattatggagaaaagacgaagagcaagaataaatgaaagtctgagccagctgaaaacactgattttggatgctctgaagaaagatagctcgcggcattccaagctggagaaggcggacattctggaaatgacagtgaagcacctccggaacctgcagcgggcgcagatgacggctgcgctgagcacagacccaagtgtgctggggaagtaccgagccggcttcagcgagtgcatgaacgaggtgacccgcttcctgtccacgtgcgagggcgttaataccgaggtgcgcactcggctgctcggccacctggccaactgcatgacccagatcaatgccatgacctaccccgggcagccgcaccccgccttgcaggcgccgccaccgcccccaccgggacccggcggcccccagcacgcgccgttcgcgccgccgccgccactcgtgcccatccccgggggcgcggcgccccctcccggcggcgccccctgcaagctgggcagccaggctggagaggcggctaaggtgtttggaggcttccaggtggtaccggctcccgatggccagtttgctttcctcattcccaacggggccttcgcgcacagcggccctgtcatccccgtctacaccagcaacagcggcacctccgtgggccccaacgcagtgtcaccttccagcggcccctcgcttacggcggactccatgtggaggccgtggcggaactgagggggctcaggccacccctcctcctaaactccccaacccacctctcttccctccggactctaaacaggaacttgaatactgggagagaagaggacttttttgattaagtggttactttgtgtttttttaatttctaagaagttactttttgtagagagagctgtattaagtgactgaccatgcactatatttgtatatattttatatgttcatattggattgcgcctttgtattataaaagctcagatgacatttcgttttttacacgagatttcttttttatgtgatgccaaagatgtttgaaaatgctcttaaaatatcttcctttggggaagtttatttgagaaaatataataaaagaaaaaagtaaaggcaaaaaaaaaaaaaaaaaa

SEQ ID NO: 284 - protein, 280 aa, Homo sapiens
MPADIMEKNSSSPVAATPASVNTTPDKPKTASEHRKSSKPIMEKRRRARINESLSQLKTLILDALKKDSSRHSKLEKADILEMTVKHLRNLQRAQMTAALSTDPSVLGKYRAGFSECMNEVTRFLSTCEGVNTEVRTRLLGHLANCMTQINAMTYPGQPHPALQAPPPPPPGPGGPQHAPFAPPPPLVPIPGGAAPPPGGAPCKLGSQAGEAAKVFGGFQVVPAPDGQFAFLIPNGAFAHSGPVIPVYTSNSGTSVGPNAVSPSSGPSLTADSMWRPWRN

SEQ ID NO: 285 - DNA, 3794 bp, Homo sapiens
ccaagttctacctcatgtttggaggatcttgctagctatggccctcgtactcggctccctgttgctgctggggctgtgcgggaactccttttcaggagggcagccttcatccacagatgctcctaaggcttggaattatgaattgcctgcaacaaattatgagacccaagactcccataaagctggacccattggcattctctttgaactagtgcatatctttctctatgtggtacagccgcgtgatttcccagaagatactttgagaaaattcttacagaaggcatatgaatccaaaattgattatgacaagccagaaactgtaatcttaggtctaaagattgtctactatgaagcagggattattctatgctgtgtcctggggctgctgtttattattctgatgcctctggtggggtatttcttttgtatgtgtcgttgctgtaacaaatgtggtggagaaatgcaccagcgacagaaggaaaatgggcccttcctgaggaaatgctttgcaatctccctgttggtgatttgtataataataagcattggcatcttctatggttttgtggcaaatcaccaggtaagaacccggatcaaaaggagtcggaaactggcagatagcaatttcaaggacttgcgaactctcttgaatgaaactccagagcaaatcaaatatatattggcccagtacaacactaccaaggacaaggcgttcacagatctgaacagtatcaattcagtgctaggaggcggaattcttgaccgactgagacccaacatcatccctgttcttgatgagattaagtccatggcaacagcgatcaaggagaccaaagaggcgttggagaacatgaacagcaccttgaagagcttgcaccaacaaagtacacagcttagcagcagtctgaccagcgtgaaaactagcctgcggtcatctctcaatgaccctctgtgcttggtgcatccatcaagtgaaacctgcaacagcatcagattgtctctaagccagctgaatagcaaccctgaactgaggcagcttccacccgtggatgcagaacttgacaacgttaataacgttcttaggacagatttggatggcctggtccaacagggctatcaatcccttaatgatatacctgacagagtacaacgccaaaccacgactgtcgtagcaggtatcaaaagggtcttgaattccattggttcagatatcgacaatgtaactcagcgtcttcctattcaggatatactctcagcattctctgtttatgttaataacactgaaagttacatccacagaaatttacctacattggaagagtatgattcatactggtggctgggtggcctggtcatctgctctctgctgaccctcatcgtgattttttactacctgggcttactgtgtggcgtgtgcggctatgacaggcatgccaccccgaccacccgaggctgtgtctccaacaccggaggcgtcttcctcatggttggagttggattaagtttcctcttttgctggatattgatgatcattgtggttcttacctttgtctttggtgcaaatgtggaaaaactgatctgtgaaccttacacgagcaaggaattattccgggttttggatacaccctacttactaaatgaagactgggaatactatctctctgggaagctatttaataaatcaaaaatgaagctcacttttgaacaagtttacagtgactgcaaaaaaaatagaggcacttacggcactcttcacctgcagaacagcttcaatatcagtgaacatctcaacattaatgagcatactggaagcataagcagtgaattggaaagtctgaaggtaaatcttaatatctttctgttgggtgcagcaggaagaaaaaaccttcaggattttgctgcttgtggaatagacagaatgaattatgacagctacttggctcagactggtaaatcccccgcaggagtgaatcttttatcatttgcatatgatctagaagcaaaagcaaacagtttgcccccaggaaatttgaggaactccctgaaaagagatgcacaaactattaaaacaattcaccagcaacgagtccttcctatagaacaatcactgagcactctataccaaagcgtcaagatacttcaacgcacagggaatggattgttggagagagtaactaggattctagcttctctggattttgctcagaacttcatcacaaacaatacttcctctgttattattgaggaaactaagaagtatgggagaacaataataggatattttgaacattatctgcagtggatcgagttctctatcagtgagaaagtggcatcgtgcaaacctgtggccaccgctctagatactgctgttgatgtctttctgtgtagctacattatcgaccccttgaatttgttttggtttggcataggaaaagctactgtatttttacttccggctctaatttttgcggtaaaactggctaagtactatcgtcgaatggattcggaggacgtgtacgatgatgttgaaactatacccatgaaaaatatggaaaatggtaataatggttatcataaagatcatgtatatggtattcacaatcctgttatgacaagcccatcacaacattgatagctgatgttgaaactgcttgagcatcaggatactcaaagtggaaaggatcacagatttttggtagtttctgggtctacaaggactttccaaatccaggagcaacgccagtggcaacgtagtgactcaggcgggcaccaaggcaacggcaccattggtctctgggtagtgctttaagaatgaacacaatcacgttatagtccatggtccatcactattcaaggatgactccctcccttcctgtctatttttgttttttacttttttacactgagtttctatttagacactacaacatatggggtgtttgttcccattggatgcatttctatcaaaactctatcaaatgtgatggctagattctaacatattgccatgtgtggagtgtgctgaacacacaccagtttacaggaaagatgcattttgtgtacagtaaacggtgtatataccttttgttaccacagagttttttaaacaaatgagtattataggactttcttctaaatgagctaaataagtcaccattgacttcttggtgctgttgaaaataatccattttcactaaaagtgtgtgaaacctacagcatattcttcacgcagagattttcatctattatactttatcaaagattggccatgttccacttggaaatggcatgcaaaagccatcatagagaaacctgcgtaactccatctgacaaattcaaaagagagagagagatcttgagagagaaatgctgttcgttcaaaagtggagttgttttaacagatgccaattacggtgtacagtttaacagagttttctgttgcattaggataaacattaattggagtgcagctaacatgagtatcatcagactagtatcaagtgttctaaaatgaaatatgagaagatcctgtcacaattcttagatctggtgtccagcatggatgaaacctttgagtttggtccctaaatttgcatgaaagcacaaggtaaatattcatttgcttcaggagtttcatgttggatctgtcattatcaaaagtgatcagcaatgaagaactggtcggacaaaatttaacgttgatgtaatggaattccagatgtaggcattccccccaggtcttttcatgtgcagattgcagttctgattcatttgaataaaaaggaacttgg

SEQ ID NO: 286 - protein, 865 aa, Homo sapiens
MALVLGSLLLLGLCGNSFSGGQPSSTDAPKAWNYELPATNYETQDSHKAGPIGILFELVHIFLYVVQPRDFPEDTLRKFLQKAYESKIDYDKPETVILGLKIVYYEAGIILCCVLGLLFIILMPLVGYFFCMCRCCNKCGGEMHQRQKENGPFLRKCFAISLLVICIIISIGIFYGFVANHQVRTRIKRSRKLADSNFKDLRTLLNETPEQIKYILAQYNTTKDKAFTDLNSINSVLGGGILDRLRPNIIPVLDEIKSMATAIKETKEALENMNSTLKSLHQQSTQLSSSLTSVKTSLRSSLNDPLCLVHPSSETCNSIRLSLSQLNSNPELRQLPPVDAELDNVNNVLRTDLDGLVQQGYQSLNDIPDRVQRQTTTVVAGIKRVLNSIGSDIDNVTQRLPIQDILSAFSVYVNNTESYIHRNLPTLEEYDSYWWLGGLVICSLLTLIVIFYYLGLLCGVCGYDRHATPTTRGCVSNTGGVFLMVGVGLSFLFCWILMIIVVLTFVFGANVEKLICEPYTSKELFRVLDTPYLLNEDWEYYLSGKLFNKSKMKLTFEQVYSDCKKNRGTYGTLHLQNSFNISEHLNINEHTGSISSELESLKVNLNIFLLGAAGRKNLQDFAACGIDRMNYDSYLAQTGKSPAGVNLLSFAYDLEAKANSLPPGNLRNSLKRDAQTIKTIHQQRVLPIEQSLSTLYQSVKILQRTGNGLLERVTRILASLDFAQNFITNNTSSVIIEETKKYGRTIIGYFEHYLQWIEFSISEKVASCKPVATALDTAVDVFLCSYIIDPLNLFWFGIGKATVFLLPALIFAVKLAKYYRRMDSEDVYDDVETIPMKNMENGNNGYHKDHVYGIHNPVMTSPSQH

SEQ ID NO: 287 - DNA, 3382 bp, Homo sapiens
gttgtgctcggaacatggcgggcgtcggcgacgcggccgctccgggagaaggcggcggtggcggcgtggacggcccgcagcgggacggccgcggcgaggcggatcagccgggcggcagcggcggacaggggcccccgccggcgcctcagctcacagagacgctgggcttctacgagagcgaccggcggcgggagaggcgccggggccgcacagagctttcattgttgaggttcctcagtgctgaactaacaagagggtacttccttgaacataatgaggccaagtatacagaaagaagagaaagagtatacacttgtttgcgaataccaagagaattggaaaagctgatggtttttggaatctttctgtgcctggatgcgtttttgtatgtgttcaccctgcttcctttaagagttttcctggcactattcaggctcctcactttgccttgctatggcttaagggacagacgtttgcttcagcctgcccaggtgtgtgacattttgaagggtgtcattttggtaatctgctattttatgatgcactatgttgactactccatgatgtaccacctgataagggggcagtccgtcatcaagctctacatcatctacaacatgctggaggtagctgatcgtctgttttcatcttttggacaagacatattagatgctctctattggacagcaacagagcctaaagaaagaaaaagagcccacattggggtgattcctcactttttcatggctgttctctatgtctttttgcatgcaattcttataatggttcaagcaacaactctcaatgtagcttttaactcacacaacaagtctttgcttactatcatgatgtctaataattttgttgaaattaaaggaagtgttttcaagaagtttgaaaagaacaatctctttcaaatgtcaaatagcgatattaaggaacgattcacaaattatgtgcttttactgatagtgtgtctaagaaacatggaacagttttcttggaatccagatcatctctgggtgttgtttccagatgtctgtatggtaattgcatcagaaattgccgtggatattgtaaaacatgcctttattactaaattcaatgacattactgcagatgtctacagtgaatatagagccagtcttgcttttgaccttgttagcagccgacagaaaaatgcatacactgattacagtgactctgtagcacggaggatgggctttattcctctcccactagctgttttactcatcagagttgtaacaagctcaattaaagtgcaaggaatcctgtcttatgcctgtgtcatactcttctattttgggttgatatccctgaaagtacttaatagcatcgtgctgttggggaaatcgtgccagtatgtgaaggaagccaaaatggaagagaagctgtcgaatcctcccgcaacctgcactccaggcaagccgtccagtaaatcacagaacaaatgtaaaccctctcaaggcctttccacagaagaaaacctgtctgcctccatcaccaaacaacctattcatcaaaaggaaaatatcataccattacttgtgacaagcaattctgatcagtttttgacaactccagatggtgacgagaaggacataacgcaggacaattctgaattaaaacacagatcctcaaaatctgttttgctttgtcagtctgggcttccagaatgttgaatttgcctcaaggcctcttcagtataaggaaatacctggaaaactgtgaaacttttaccacgacgtaatctttccagtctcatactattttcacaaacagttttcaaacgttacttcatctgccaaagcattaaaaaaattaaacataagtcaagataaatgttcttaccaccagaataacccttaaagatgtatcttaattaatcagaataaaaggctaccttaaataagacatgatgaatagtagcattttgtagggttaaaaaaaaatgctaaactagtttatttattaaaaaaataattaatgaaggctatgcattactgggaaaaatccttcataatttttcagtttactctttaaagcaaaatgtgagctgtatgccatttaattggtggataaaacaaatttccttacaaaagggcactttttacaccaaggaagcagagcagtgttaactttaaggtatacttaactgattttgctttaaaactaattacttcataaattattacagctaaaaggattcgatgttgaacaggctgaaaaattgtcaatgtacaaaattcaaaactgtcaactttaactgtaaagtaaatgctccaagtgtgttagacagcatcatcttgcttgggcttaccaaatgcattagtctttgtgtttgggtcgacagcgagtgtgcctgtgctggggcagggtgtgtgttctgtgggagggtgtctgtggggatgtgactatcagggtgggcctgtgctggggatggggcaggcctgggtctggagaggattttgtgtgaaagtaaatggggtgtttgaggcgtatgggtggctgttggtgtggggaggcatctgtgtatggctgttgggaacagcaaccaaaaggtgctttttggttttatttgagatgaagattgtgtttccgcttaattactagtttgtggtctatatcatagaagttatttcccaccccattttatcttgacaaccgtgtttgcatttctgtaaaacttctacaacttctggtgtcagaactgtccagaagatggtactgttaactgttatttcctttgatgttttgattttgaagtttagctctcatgcaaatgtttcaggcgtacatacataggcagaaagcaatttttaggtgatttgtctgtttcttggatgaaatataaagcaagctttaatgttctgacttgttcatttgaaatacaaaaaagtaagtgaattttaatgttttgcattaactaaagaaatctgaagattaatgttgaggaaattgtatggacatgcctttgtgaaaccaggaagtattttaagttaaaaatgaaaaaggttttaattgctttgtgtgtgttttaatggagccccattttagaattattttttccatctccctttaccaacaaaaggaacaatgccaccgtgaatggaatagtttggggaaagctttgccaaacacaaccctgatttcagagcaggaacatggtttggatagatcttcagttccgcttgaattattctgttactgcgctgtcattttcagaagatttccattcctttgcagatgctgttgggagttcgggattatgttcatttcttctgttttaatggcattcagtactaattttataagtgcatcttgtgtgaatctcaataaattcagttttgtaatctttttt

SEQ ID NO: 288 - protein, 562 aa, Homo sapiens
MAGVGDAAAPGEGGGGGVDGPQRDGRGEADQPGGSGGQGPPPAPQLTETLGFYESDRRRERRRGRTELSLLRFLSAELTRGYFLEHNEAKYTERRERVYTCLRIPRELEKLMVFGIFLCLDAFLYVFTLLPLRVFLALFRLLTLPCYGLRDRRLLQPAQVCDILKGVILVICYFMMHYVDYSMMYHLIRGQSVIKLYIIYNMLEVADRLFSSFGQDILDALYWTATEPKERKRAHIGVIPHFFMAVLYVFLHAILIMVQATTLNVAFNSHNKSLLTIMMSNNFVEIKGSVFKKFEKNNLFQMSNSDIKERFTNYVLLLIVCLRNMEQFSWNPDHLWVLFPDVCMVIASEIAVDIVKHAFITKFNDITADVYSEYRASLAFDLVSSRQKNAYTDYSDSVARRMGFIPLPLAVLLIRVVTSSIKVQGILSYACVILFYFGLISLKVLNSIVLLGKSCQYVKEAKMEEKLSNPPATCTPGKPSSKSQNKCKPSQGLSTEENLSASITKQPIHQKENIIPLLVTSNSDQFLTTPDGDEKDITQDNSELKHRSSKSVLLCQSGLPEC

SEQ ID NO: 289 - DNA, 7396 bp, Homo sapiens
atggccctgaacaagatagacatggttcctgccctcaagagcttcagtgtagaggtgagggcaatccttactgattatacgggagcagaaagacaggcgctaagagaaaatgtatatcctaaactgagagaattctgcagagaaaactatggattggaatttcaggtcatagatctgtactggggagtggaagaagatgagtgggacagcccagagctccagaagacccgcatgaagctgctggagaattgcttgaaaacttctgcaggtccatgttttgttggactattaggtgaaaaatatgggaatatccgaatccctggagaagttgaagcctcagagtttgaaatgattttggatgccgccatagaggcaaagctggagaccaagttgctggaggagtggtactgtcgagatgagaactcggtgccagcagcctattacctcagacccaagtcagaaatgctgagaagcaatagaaatgcaatgcagccttctaccaatgctgaaaacgagaagacatggcaagagatatcagatgagatcaagaagatatttaaggctgctgtaaagctgttacacgaaaagggtaaaatgaaacacagccaggctaagaggtacctgttctcagctatagaggatgagtttgactttgctctgggaaaacaaactccagcatttctaaagaagtgtgtttgctacattaggaaaattgctaacattgagcgctttgtgaaaatcccagagatgggaaaatacatggatataactggaacagaaccgaggattattcgggacccagaagcccaagagaagctgataaaactcagggatgaatttattcctactattgttgcatcatctaatctgagagtgtacacatctgttactcattgtgacatgaaactaggctactcccaagaaatagaaaatcattacatcgaaggacttggtaaacaattttatgaggacatgattgatataattcaggcaacgatacaacagaattttgacactgaaactgatacactctatgatgaaatccttcaacattcatcattatgtaaaacatacgcctccttctatgagtacaaatgtgaatctctaaacatagtgcataactacattcttccaagcaaagctggacacatcaaccctcttattatatatggtgggccatgcactgggaagacccttctgctagctgaagtagcaaagaaggcttatggctggctacatgaggacacaggaccagaatctgacccagtagtcatcgtgagatttctaggaacgacagacatgagctctgaccttaggactctccttctaagtgtttgtgaacaattggcagttaactaccggtgtctggttcaaagctaccctaagaagatccatgacctctgtgacttatttataaatcttttgaatgagtcttcactgcagagacctctagtcataatattcgatgcactagagcagctctcagagaatgatgatgccaggaagctttggtggctcccagctcacctgccccgctttgtccggatagtcctttccacgctgcccaacaaacatgggatcttgcagaaactaaggtgccttatccatgaagaagacaactacatcgagctgattccccgagacaggaagatgtgcagccaggtcctcaaacaccagctgctgcgcgtcaaaaggaaggtcacatcaggccagcagatttatgtgaacaatgcattatccaagtgcacactgccaatgtttgtgaacctgaccttcagggaggtgaggcactggagatctcacaaagacgtcgatgaatcctccctctctgtcaccgttcatgaaagtatagagcagttattctggtccttggagaagaagtgtggtcagaaactggtctctagggctcttggttacatcaccatggccaaaatgggtctgagtgaaatggaactggaggatgtgttagccctagacaacagtgtaatgagtgagctcaaagaaaacaccagacccagcaatcccctgagagtaccttacttgtacattgcaaggctcaaggagggtctcagtggatacctaatagaaagacatgtgaaaaatgtcacactcctagtctgggccaacagacacctgcagctcatagcccagaagctatatctgcaggatgacaatgacctgcgtgaaatgcacaccatcttagcagattattttctgggggtttggtcagggggcaggaggaaagccttctgccttgaggacccctacttgaatggctgccttgacttggagaacagaagtttgctggaggaagaaaagcacttcatggaacaggcttcctttgacaggcaggctccagaccagccctgggttttccagtgtaatcccctggaacctgacatctttttcgttaatcatcggaaaatgtctgagctgttgtaccacttgacgaggtgtggaaaaaccgatgacctgctttacggcatcatcatgaacttcagctggctttataccatgatcaaaattggccagtttgacaaagtgctttcagacattgagctggcttacaactactcgcaagagaaggagctgaagttcctggccaacaccctccgcagcatcaaaaacaaggtcactgcatttcccggctccctttcagcagagcttcagcaaagactgctgcctgttgtaagctccctgcccaaacttagacatcttcttttagagtgtgataaagatgggcccaaatattgctccattgtaccactgcattcatccatggatgtgacatacagcccagagcgtcttcccttatcatccagtcacctgcatgtcacagagatcctgcctacctgtaaccccagcactgtcctcacagctttagaaaatggttccatcagcacctgggatgtagagactcgacagctactcaggcaaatcaccacagcccagtctgtcatcctgggcatgaaactcaccagtgatgaaaagtaccttgtggtggctacaacaaataacaccttgttgatttatgacaatgtcaattcttgcctcctgtctgaagtagaaatcaaggggaccaagcatggaagcagcgccacctacatcaatggatttacactgtccgccaaccacgcccttgcatggctcgaagccagcaaagatgtcactgtcatcgatctgctgtacggatggccgctttaccagttccactgctggtatgaagtgacgtgcgtccagtgctccctggatggtctgtatgctttctgtggccaatacctgaacacaaccaccatatttcatttagggagtggagaaaagttatgtacagtgacatcagaattttcaggtggatttgtgaagtttcttcttatcttggacacagctcaggaaatggtcatggtagacagtgaaggaagtctttctgtttggaatactgaggacatttccagcccccagctgactgatgactttgattgccgaagagaagacagtgaggtggtcagcattgagctttcagaagaccaaagtgcagttctgatctgtaaagccctcagcattgagctcttagatactggtctgtggaaggtggctgaaaagttcagagccaagcacaacgaacgctttatatctgccgtgctgtctaaaaatggagattgtatcatcgccaccatggaaaatacctcagctgtgtttttttggaggcgggacacaggacagtgtatggcaagcttgcaggaaatctcaggttccattgttaagttagtgaaatccagtcaccacaatatgctactgtctttatcaaccagtggtgttctttccatttgggacatagatataatcacagctatgtccaacatagataagactggaaaacccatccaaagtctgttgttgcctgctagaggggaaatcatttactccctggatggatccgattgtgttcataagtggaacttcagcagtggcttcatcgaagcagtattcaagcatgaaggaatagttgaacactgtgtgttaacatccaccggagatataatggtgacatcagatgacaaaagcagccagtatgtctggcacaccagcagtggtgaaaacctttttcgaattaacgggcagagaatatctcagctgctgattacacacaatgaccagtttgtggtctcgctctgtgaggaaaatgcctccagggtttggaggctcgccacaggccacagggtctgcaacattctgaccactttgcagaatgcctttattacctccgcaaataccttcgtggtgggaatgactaaaagcaaagtgttggcagtcagtctttggacaggaagtatcaccaagaaattttgctgtgaagatgggaccaccatcgtgaattttaaattaatccctgactgtcctgatatcatcgtgtttatcacatcggccgagactgtgaacatctggagtctgacagatgaagtgatctgtcggcgcgtgcaacttccaaacaacttcttgaaaaatctggaggactttgaaatttctcccaatggaaagctaggcattatagccaggggagatgaaaacatcaatgtgctagatttatacagtggtaaattgcgggtggttcacgcctctgggatcatctggcggcagaggttgtctcgggatggtcgctacctggtatacatttgtttccgaaatggggaggaggaggatgaaaatggtgcaatattcagtttaattgtaatgagactggcagatggcaaaaatatcggtgcttgttccctttacaaaacaccaactttccttgcactctcccagaggcacctgaacatcattgtgggctttgatgatgggagtatagggatctacacggtagtagaccgtgtagatgctgcactgaaaatcaaaattgccacttcaaatagcagacaaattttcaacaatgcaacacacacctccaggccaaagtgtaacagttattgttttaaaatatctgtggattgcttatggagagagtccactgaggtctttgcaagagacagccccatcacagttagtgactctactgagtccaatgaagcaacaccctccaagaaacacaactcttgttatgagcgggtatgctcggccctagaagccaggggccacagctatgcccctgataactgacaaaatgttttccagctaagcagaaatatgtgatccacgtacagaagggaaaaaaatgtgccccaaatgataaactattcatttattaaaaggcaggagcgatgctggaattccagtgttttattaagatgttcatgaaatggacaaataggttagtcttgggtgtggtctttttgtcaaagtgtatccagaatgtcagaatttctagtagtaatatttaaatggttacttcatctgaaaggcagaggctaaaagtttttaaattagctgtgtggtgaggcagcataatacatcccactggttaagatgagagaggctagagttatatacagatcatttggatgggaattagttctacaaaaatcagctgaaatcatgaagacaaagagctgcttgacttcaaatgattgtgtgataagtaaacacagccttaatctctctttacattttacagtcctgacaactgtgtacacctagtctgcagtgaacggtctaaaggtgcaaaatatgtaacaaaaatacccaagtgtattcccagtttcccgagagatatgacctgaaacatgagactgtggactggactgggacaagaactaactaccactatcatagggctactgaacatggagagtcagtctttattaaaagacagttgcaacaattgcatgcgagggtttctgtataacagaatatatgatttttaaactatttcctgggttgcaaaagaacacatttagtaagaaacaacaatcttttcgcatctttttgaaatgcatatttgtgctgggtgtaaagaagattacaggaagggcattacaaatctggtcaaaacacctgtccatttccatcattgtactaacagaagtctgtactatttggtcagtttgtatggaagcataaatattccctaaattcctgcagttagtcttcatagaaagcaagctttctcaacatgccatctctgagatactgatgacgtttgccttactcacattccttctctttcctgtgtaaaatgcagatagatgaccaaatactctgggataaactgaatatgcctgtctttgtgctaaaatattccataaatcttaagggtgtccaaaagttctttattgtccttgtttgtaatcactttcttacttctacacaccatctgtatgcttctttatctgttactcttcctgattgaggactcttctgagccttttatagtcctatccatttcaaagcagaagctgtggaatggtattaaatattttttaaaattaattcacctgtttaaaagaaaacattgcatctcaaaaggtgaagatgattgttctttcttccatatcctccttacggcatgtccttggataacttttcaaaaggtatccacacttttggttgagtttagttttcttagaaagtagagaagtaacactttactagaataatgaacaaggaattgatttgctctaggcccagctctgccataaactcattgtgtattcctagacaggtctttaacttcatcagtgtgttgtttttgtgaagtgcaaaataaagatagtgatagtttctgctgtagccctcatagggacattgggaagcagtataagaaaaacttcagcaacatcatgattattgatgctaataggaaaaataaattcatgtaacccatagagaatccaggtcaattgtatttcctcttggaaagcagtttaacatgtaagcgttcaaagatgtgattcagataaaaatacccaggtccatagtgaaagatgtttttcagtatgttacttatggtttagctactagccagggaggtggtagcccagagaaggcaaaccacatacagatcacctggagttgattatatgagtctatgcttttgagctctttaggcaacacattctcattcctgtcattatcagttgaacctccatgccacacatttctaagaattaaatgcctagatggattaaatgtagtatgtgaatgttctatgtaaaagccaatagagtatacaagtgacttgaatgatttttcctaacttgtttgcaactgatagctcatattgaatgtttttatgtaaactttgtatcgttgggaagaattacccaatcagagatttatattttcataaatgttacatttagttaaattttgttacagagttgttacactagaaaattatttcagtcttcaaacaatatacagtcttgtgtatgtattatttgtatgaataaaagataaacta

SEQ ID NO: 290 - protein, 1717 aa, Homo sapiens
MALNKIDMVPALKSFSVEVRAILTDYTGAERQALRENVYPKLREFCRENYGLEFQVIDLYWGVEEDEWDSPELQKTRMKLLENCLKTSAGPCFVGLLGEKYGNIRIPGEVEASEFEMILDAAIEAKLETKLLEEWYCRDENSVPAAYYLRPKSEMLRSNRNAMQPSTNAENEKTWQEISDEIKKIFKAAVKLLHEKGKMKHSQAKRYLFSAIEDEFDFALGKQTPAFLKKCVCYIRKIANIERFVKIPEMGKYMDITGTEPRIIRDPEAQEKLIKLRDEFIPTIVASSNLRVYTSVTHCDMKLGYSQEIENHYIEGLGKQFYEDMIDIIQATIQQNFDTETDTLYDEILQHSSLCKTYASFYEYKCESLNIVHNYILPSKAGHINPLIIYGGPCTGKTLLLAEVAKKAYGWLHEDTGPESDPVVIVRFLGTTDMSSDLRTLLLSVCEQLAVNYRCLVQSYPKKIHDLCDLFINLLNESSLQRPLVIIFDALEQLSENDDARKLWWLPAHLPRFVRIVLSTLPNKHGILQKLRCLIHEEDNYIELIPRDRKMCSQVLKHQLLRVKRKVTSGQQIYVNNALSKCTLPMFVNLTFREVRHWRSHKDVDESSLSVTVHESIEQLFWSLEKKCGQKLVSRALGYITMAKMGLSEMELEDVLALDNSVMSELKENTRPSNPLRVPYLYIARLKEGLSGYLIERHVKNVTLLVWANRHLQLIAQKLYLQDDNDLREMHTILADYFLGVWSGGRRKAFCLEDPYLNGCLDLENRSLLEEEKHFMEQASFDRQAPDQPWVFQCNPLEPDIFFVNHRKMSELLYHLTRCGKTDDLLYGIIMNFSWLYTMIKIGQFDKVLSDIELAYNYSQEKELKFLANTLRSIKNKVTAFPGSLSAELQQRLLPVVSSLPKLRHLLLECDKDGPKYCSIVPLHSSMDVTYSPERLPLSSSHLHVTEILPTCNPSTVLTALENGSISTWDVETRQLLRQITTAQSVILGMKLTSDEKYLVVATTNNTLLIYDNVNSCLLSEVEIKGTKHGSSATYINGFTLSANHALAWLEASKDVTVIDLLYGWPLYQFHCWYEVTCVQCSLDGLYAFCGQYLNTTTIFHLGSGEKLCTVTSEFSGGFVKFLLILDTAQEMVMVDSEGSLSVWNTEDISSPQLTDDFDCRREDSEVVSIELSEDQSAVLICKALSIELLDTGLWKVAEKFRAKHNERFISAVLSKNGDCIIATMENTSAVFFWRRDTGQCMASLQEISGSIVKLVKSSHHNMLLSLSTSGVLSIWDIDIITAMSNIDKTGKPIQSLLLPARGEIIYSLDGSDCVHKWNFSSGFIEAVFKHEGIVEHCVLTSTGDIMVTSDDKSSQYVWHTSSGENLFRINGQRISQLLITHNDQFVVSLCEENASRVWRLATGHRVCNILTTLQNAFITSANTFVVGMTKSKVLAVSLWTGSITKKFCCEDGTTIVNFKLIPDCPDIIVFITSAETVNIWSLTDEVICRRVQLPNNFLKNLEDFEISPNGKLGIIARGDENINVLDLYSGKLRVVHASGIIWRQRLSRDGRYLVYICFRNGEEEDENGAIFSLIVMRLADGKNIGACSLYKTPTFLALSQRHLNIIVGFDDGSIGIYTVVDRVDAALKIKIATSNSRQIFNNATHTSRPKCNSYCFKISVDCLWRESTEVFARDSPITVSDSTESNEATPSKKHNSCYERVCSALEARGHSYAPDN

SEQ ID NO: 291 - DNA, 3464 bp, Homo sapiens
aaaaaaaaaaagaaatcgttttaataggagatttttaaaaaagtttctccggaatcgactcggttcatcaggaagctgcgaacgtgataaatgcgtttgaccgcgcaccttgtgtcgctggagctgagaacactttgttccttttgtttcactcaacttgccgacatctaactcagggacacgggtatgcagcttgtttgacaaataagccgagatacaccgaacatattcacacataccaatagacgatgattggaagttcaggatgcagtcaaaataaatgcttgcgtttggcccaggtttcacataacaccagtttcataaggcacttaggccgctaacggagcagtgcccctgaaaatagcccacaggggacacatcatttaaataaatgtgtttctttccctgaacagaagttcagttctgctcaattatcattaattttgctcctttatttcctttgcgggcgtgaacggagaagtcgtgctctttgaggttttgcgagctggccttggctggcagaggtgaccggcaatccttcagccggcggaaaaagtgcgagtgtgtgtgtgtgtgtgcttgtgaaaatgtgccgttcctcccagaaaaagtggaaacgtaggtggaaagctcagcacatgttggcgacacctaaaaaccatgttctcggtcctgaacctttagaagcggtatcccaggaacgagtctgagtctgtgcaacagggcacagatgattcgacaaacttcaatgactgcaccgcattcatgcattatatccattgaaaagtaaatccagcgtctccactcgcgcgcccacgtgcgtggataaacgcgggaattcggcagccctcaacgtcactctgcagagatttccgggctgtgagagagttggggtgtgcggcgggggaggggagggtctgatatcttcaggttgagagtcaagtcctgggggagcggcatgggcgggggtggccggggggaggcggaggatggagcgcgaaccagaaagcgcagaggaccctcggcccgcgccgcacccgctgtgattagctccagaggcgcgatccgggagggcggactctttcttaaccctcattgtctcctcctccctcttcctttttaaaagacgccttgcgggcagagctgtcagcaaccccgcggccgtttgtacttggccgcggcggagctgactcctgctcctgtgacagataggggctggggctgagcggccgcctgtctggggtactcgcacgtggggaacaaattcttttcctccggctcctctcgggacccggcgatcgccacaggttgggactctgtgcggcgctggagttggcagccccgggcgctatggctcccttgaggagtggggagggaggtggccggggggttggcgcgcccctcgcgcggggagcgctatgagccgggcgaagggcggcagcgacagccccagcaactgcctctgccggcgcctcccgcaggccctcgccaactcgccccgcgcaccatgctgactcccggcctgcggaactcgtagtgcagcccctgtcgcctccccggcccctgctatcccacgcaggactggcttcggccgccggggccagcagcttgcgacgtgtccctggggaggcggaatcgctgtgcgccctgagcccgggctcagcccttcgctttccagctgcgtcctgctcccggccgcccagggagcccagtggcgatgagggcactgctggcgctttgccttctccttggctggctgcgctggggcccggcgggcgcccagcagtccggagagtactgccacggctgggtggacgtgcagggcaactaccacgagggcttccagtgcccagaggacttcgacacgctggacgctaccatctgctgcggctcctgcgcgctccgctactgttgcgccgcggccgacgccaggctggagcagggcggctgcaccaacgaccgccgcgaactggagcacccaggcatcactgcgcagcctgtctacgtcccctttctcatcgtcggctccatcttcattgcgttcatcatcctgggctctgtagtggctatttattgttgcacctgtttgagacccaaggagccctcgcagcagccaatccgcttctcactccgcagctatcagacagagaccctgcccatgatcctgacctccaccagccccagggcaccctcccggcagtccagcacagccacgagctccagctccacaggcggctccatccgcaggttctcctttgccagggctgagccgggctgcctggtgccctcaccgcccccgccatacaccaccagccactcaatccacctggctcagccatctggtttcctggtgtcaccccagtatttcgcttaccccctccagcaggagcccccactgcctgggaagagctgtccagacttcagttccagttgacacgcccaggccatgaatccacaactcagtcagatggcagacaggtggagccctgctcccattgccacatgcaattctgagaaaatttcccttgtaactgatcagtgtcatggaggagcatgctaggaaaacacagcaccttctaatttgaaagttcctgtctccaatcacagaaaggctaaaccagagaactgttttctggttttgcaaacatgtgatcattacatttcaatctatgctacttttattcaaaatatgcagcagtttgactttaaagttgcaaactggctaaaaacgttttactggacattcagctatattgcttagaaaagggctacatgtttctttttcatataagttgttcattgagttatgataggaatatattcataaataagcaaagaaaaatacctaattgtaattatcaaaggttcacttaaaaaattaactattaggtaaacttaagggggcagtgaaaaatctatttatgatttcgggagtaacctaaccatgaataatattagcataatgagaacatttactttttaaataaataactaaattttgtttacaatatgagtttttccagaatacaaggtttcaataatcacatgaggagtttaaagttttaaatatatactcagacattcattgtaacacagagtgtatgtaaaatcatttcccccactcactggagggagtatttattgcagactttttgttcagcaacatttagtgtttcagtgaaagttggacagttggggcttaaaacatttatttgtaaaatgagctatgttcaaatgtaaatatttgtaatttaatgtatttaccacattgactgtactaattatttagtagtcatactgtaatttttatgttaataataactggagttcaaagtctagctattggtataatcatctaatattatatatatctccagtgcccctgaattttatgtttgatgactatatatttgggcatatatcttgttggattagaataaataaaacactttatattttcatga

SEQ ID NO: 292 - protein, 238 aa, Homo sapiens
MRALLALCLLLGWLRWGPAGAQQSGEYCHGWVDVQGNYHEGFQCPEDFDTLDATICCGSCALRYCCAAADARLEQGGCTNDRRELEHPGITAQPVYVPFLIVGSIFIAFIILGSVVAIYCCTCLRPKEPSQQPIRFSLRSYQTETLPMILTSTSPRAPSRQSSTATSSSSTGGSIRRFSFARAEPGCLVPSPPPPYTTSHSIHLAQPSGFLVSPQYFAYPLQQEPPLPGKSCPDFSSS

SEQ ID NO: 293 - DNA, 3794 bp, Homo sapiens
atgcccaccatgcggaggaccgtgtcggagatccgctcgcgcgccgaaggttatgagaagacagatgatgtttcagagaagacctcactggctgaccaggaggaagtaaggactattttcatcaaccagccccagctgacaaaattctgcaataaccatgtcagcactgcaaaatacaacataatcacattccttccaagatttctctactctcagttcagaagagctgctaattcattttttctctttattgcactgctgcagcaaatacctgatgtgtcaccaacaggtcgttatacaacactggttcctctcttatttattttagctgtggcagctatcaaagagataatagaagatattaaacgacataaagctgataatgcagtgaacaagaaacaaacgcaagttttgagaaatggtgcttgggaaattgtccactgggaaaaggtggcagtaggggagatagtgaaagtgaccaatggggaacatctcccagcagatctcatcagtctgtcctcaagtgagccccaagccatgtgctacattgaaacatccaacttagatggtgaaacaaacttgaaaattagacagggcttaccagcaacatcagatatcaaagacgttgacagtttgatgaggatttctggcagaattgagtgtgaaagtccaaacagacatctctacgattttgttggaaacataaggcttgatggacatggcaccgttccactgggagcagatcagattcttcttcgaggagctcagttgagaaatacacagtgggttcatggaatagttgtctacactggacatgacaccaagctgatgcagaattcaacaagtccaccacttaagctctcaaatgtggaacggattacaaatgtacaaattttgattttattttgtatcttaattgccatgtctcttgtctgttctgtgggctcagccatttggaatcgaaggcattctggaaaagactggtatctcaatctaaactatggtggcgctagtaattttggactgaatttcttgaccttcatcatccttttcaacaatctcattcctatcagcttattggttacattagaagttgtgaaatttacccaggcatacttcataaattgggatcttgacatgcactatgaacccacagacactgctgctatggctcgaacatctaatctgaatgaggaacttggccaggttaaatacatattttctgacaaaactggtactctgacatgcaatgtaatgcagtttaagaagtgcaccatagcgggagttgcttatggccatgtccctgaacctgaggattatggctgctctcctgatgaatggcagaactcacagtttggagatgaaaaaacatttagtgattcatcattgctggaaaatctccaaaataatcatccaactgcacctataatatgtgaatttcttacaatgatggcagtctgtcacacagcagtgccagagcgagaaggtgacaagattatttatcaagcagcatctccagatgagggagcattggtcagagcagccaagcaattgaattttgttttcactggaagaacacccgactcggtgattatagattcactggggcaggaagaaagatatgaattgctcaatgtcttggagtttaccagtgctaggaaaagaatgtcagtgattgttcgcactccatctggaaagttacgactctactgcaaaggagctgacactgtaatttatgatcgactggcagagacgtcaaaatacaaagaaattaccctaaaacatttagagcagtttgctacagaagggttaagaactttatgttttgctgtggctgagatttcagagagcgactttcaggagtggcgagcagtctatcagcgagcatctacatctgtgcagaacaggctactcaaactcgaagagagttatgagttgattgaaaagaatcttcagctacttggagcaacagccattgaggataaattacaagatcaagtgcctgaaaccatagaaacgctaatgaaagcagacatcaaaatctggatccttacaggggacaagcaagaaactgccattaacatcggacactcctgcaaactgttgaagaagaacatgggaatgattgttataaatgaaggctctcttgatggaacaagggaaactctcagtcgtcactgtactacccttggtgatgctctccggaaagagaatgattttgctcttataattgatgggaaaaccctcaaatatgccttaacctttggagtacgacagtatttcctggacttagctttgtcatgcaaagctgtcatttgctgtcgggtttctcctcttcaaaaatctgaagttgttgagatggttaagaaacaagtcaaagtcgtaacgcttgcaatcggtgatggagcaaatgatgtcagcatgatacagacagcgcacgttggtgttggtatcagtggcaatgaaggcctgcaggcagctaattcctctgactactccatagctcagttcaaatatttgaagaatttactgatgattcatggtgcctggaactataacagagtctccaagtgcatcttatactgcttctacaagaatatagtgctctatattatcgagatctggtttgcctttgttaatggcttttctggacagatcctctttgaaagatggtgtataggtctctataacgtgatgtttacagcaatgcctcctttaactcttggaatatttgagagatcatgcagaaaagagaacatgttgaagtaccctgaattatacaaaacatctcagaatgccctggacttcaacaccaaggttttctgggttcattgtttaaatggcctcttccactcagttattctgttttggtttccactaaaagcccttcagtatggtactgcatttggaaatgggaaaacctcggattatctgctactgggaaactttgtgtacacttttgtggtgataactgtgtgtttgaaagctggattggagacatcatattggacatggttcagccacatagcgatatgggggagcatcgcactctgggtggtgttttttggaatctactcatctctgtggcctgccattccgatggcccctgatatgtcaggagaggcagccatgttgttcagttctggagtcttttggatgggcttgttattcatccctgtggcatctctgctccttgatgtggtgtacaaggttatcaagaggactgcttttaaaacattggtcgatgaagttcaggagctggaggcaaaatctcaagacccaggagcagttgtacttggaaaaagcctgaccgagagggcgcaactgctcaagaacgtctttaagaagaaccacgtgaacttgtaccgctctgaatccttgcaacaaaatctgctccatgggtatgcgttctctcaagatgaaaatggaatcgtttcacagtctgaagtgataagagcatatgataccacgaaacagaggcccgacgaatggtgatggggagagcctgaaaggcaggctctgttacctctctaaggagagctaccaggttgtcaccgcagtctgctaaccaattccagtctggtccatgaagaggaaaggtagatctgagctcatctcgctgatggacattcagattcatgtatattatagacataagcactgtgcaactgtactgtaacaccatctcttttggatttttttaaggtatttgctaagtctttgtaaacggaaattgaaaatgacctggtatcttgccagagggctttcttaaacggagaataagtcagtattcg

SEQ ID NO: 294 - protein, 1164 aa, Homo sapiens
MPTMRRTVSEIRSRAEGYEKTDDVSEKTSLADQEEVRTIFINQPQLTKFCNNHVSTAKYNIITFLPRFLYSQFRRAANSFFLFIALLQQIPDVSPTGRYTTLVPLLFILAVAAIKEIIEDIKRHKADNAVNKKQTQVLRNGAWEIVHWEKVAVGEIVKVTNGEHLPADLISLSSSEPQAMCYIETSNLDGETNLKIRQGLPATSDIKDVDSLMRISGRIECESPNRHLYDFVGNIRLDGHGTVPLGADQILLRGAQLRNTQWVHGIVVYTGHDTKLMQNSTSPPLKLSNVERITNVQILILFCILIAMSLVCSVGSAIWNRRHSGKDWYLNLNYGGASNFGLNFLTFIILFNNLIPISLLVTLEVVKFTQAYFINWDLDMHYEPTDTAAMARTSNLNEELGQVKYIFSDKTGTLTCNVMQFKKCTIAGVAYGHVPEPEDYGCSPDEWQNSQFGDEKTFSDSSLLENLQNNHPTAPIICEFLTMMAVCHTAVPEREGDKIIYQAASPDEGALVRAAKQLNFVFTGRTPDSVIIDSLGQEERYELLNVLEFTSARKRMSVIVRTPSGKLRLYCKGADTVIYDRLAETSKYKEITLKHLEQFATEGLRTLCFAVAEISESDFQEWRAVYQRASTSVQNRLLKLEESYELIEKNLQLLGATAIEDKLQDQVPETIETLMKADIKIWILTGDKQETAINIGHSCKLLKKNMGMIVINEGSLDGTRETLSRHCTTLGDALRKENDFALIIDGKTLKYALTFGVRQYFLDLALSCKAVICCRVSPLQKSEVVEMVKKQVKVVTLAIGDGANDVSMIQTAHVGVGISGNEGLQAANSSDYSIAQFKYLKNLLMIHGAWNYNRVSKCILYCFYKNIVLYIIEIWFAFVNGFSGQILFERWCIGLYNVMFTAMPPLTLGIFERSCRKENMLKYPELYKTSQNALDFNTKVFWVHCLNGLFHSVILFWFPLKALQYGTAFGNGKTSDYLLLGNFVYTFVVITVCLKAGLETSYWTWFSHIAIWGSIALWVVFFGIYSSLWPAIPMAPDMSGEAAMLFSSGVFWMGLLFIPVASLLLDVVYKVIKRTAFKTLVDEVQELEAKSQDPGAVVLGKSLTERAQLLKNVFKKNHVNLYRSESLQQNLLHGYAFSQDENGIVSQSEVIRAYDTTKQRPDEW

SEQ ID NO: 295 - DNA, 819 bp, Homo sapiens
atgccagtgggaataatgttcacctttcacatcctcacattggtgtggcccgcttttggctgcattggctggggatcactggcaccaggtatctgcatctgggacccaccccctgggctggctaatcaaggaggaagcagcagcagtgtctgctgtgggggccacagctctgtattgcatcatcctggtggtagtcacagtggccgagtgagtttcttgggggcccagcttcctccagaggtggcagcaatggaccagctactaggggacctaaacaggagcatgtttagaaagttgctgaagtttgtggtcagcagcctgcaaggggaggactgccgagaggctgtgcagtgtcttggggtcagcaccaacctgccgcaggagtggctgggtgccctactggcaggcatgcacacgctgctccagcaggccctccatcttccccccaccagcctgaagcccaacaccttcagggaccagctccaggaactctgcatcccccaagacctggtcggggacttggccagcgtggtatttgggagccagcggcccctccttgattctgtggcccagcagcagggggcctggctgccccatgttgctgactttcagtggtgggtggatgtgacaatctccaccagtgccctggctcgcttcctgcagccgagggtcctgatgcagctgaagctttcagatgggttagcataccgcttcgaggtccccatagccaagttccaggagctgcggtacagcgtggccctggtcctaaaggagatggcagatctggagaagaggtgtgagggcagcctgcaggactga

SEQ ID NO: 296 - protein, 272 aa, Homo sapiens
MPVGIMFTFHILTLVWPAFGCIGWGSLAPGICIWDPPPGLANQGGSSSSVCCGGHSSVLHHPGGSHSGRVSFLGAQLPPEVAAMDQLLGDLNRSMFRKLLKFVVSSLQGEDCREAVQCLGVSTNLPQEWLGALLAGMHTLLQQALHLPPTSLKPNTFRDQLQELCIPQDLVGDLASVVFGSQRPLLDSVAQQQGAWLPHVADFQWWVDVTISTSALARFLQPRVLMQLKLSDGLAYRFEVPIAKFQELRYSVALVLKEMADLEKRCEGSLQD

SEQ ID NO: 297 - DNA, 1715 bp, Homo sapiens
atggcggccgcggctccggggaacggccgcgcatcggcgccccggctgcttctgctctttctggttccgctgctgtgggccccggctgcggtccgggccggcccagatgaagaccttagccaccggaacaaagaaccgccggcgccggcccagcagctgcagccgcagcctgtggctgtgcagggccccgagccggcccgggtcgagaaaatatttacaccagcagctccagttcataccaataaagaagatcctgctacccaaactaatttgggatttatccatgcatttgtcgctgccatatcagttattattgtatctgaattgggtgataagacattttttatagcagccatcatggcaatgcgctataaccgcctgaccgtgctggctggtgcaatgcttgccttgggactaatgacatgcttgtcagttttgtttggctatgccaccacagtcatccccagggtctatacatactatgtttcaactgtattatttgccatttttggcattagaatgcttcgggaaggcttaaagatgagccctgatgagggtcaagaggaactggaagaagttcaagctgaattaaagaagaaagatgaagaatttcaacgaaccaaacttttaaatggaccgggagatgttgaaacgggtacaagcataacagtacctcagaaaaagtggttgcattttatttcacccatttttgttcaagctcttacattaacattcttagcagaatggggtgatcgctctcaactaactacaattgtattggcagctagagaggacccctatggtgtagccgtgggtggaactgtggggcactgcctgtgcacgggattggcagtaattggaggaagaatgatagcacagaaaatctctgtcagaactgtgacaatcataggaggcatcgtttttttggcgtttgcattttctgcactatttataagccctgattctggtttttaacaagctgtttgttcatctatatttagtttaaaataggtagtattatctttctgtacatagtgtacattacaactaaaagtgatggaaaaatactgtattttgtagcactgattttgtgagtttgacccattattatgtctgagatataatcattgattctatttgtaacaaggagttttaaaagaaacctgacttctaagtgtgggtttttcttctctccaacataattatgttaatatggtcctcatttttcttttggtgcagaaccgttgtgcagtggggtctaccatgcaattttctttcagcactgacccctttttaaggaatacaaattttctccttcatcacttaggtgttttaagatgtttaccttaaagtttttcttggggaaagaatgaattaatttctatttcttaaaacatttccctgagccagtaaacagtagtttaatcattggtcttttcaaaactaggtgtttaaaaaagagacatatatgatattgctgttatatcaataacatggcacaacaagaactgtctgccaggtcattcttcctcttttttttttaattgggtaggacacccaatataaaaacagtcaatatttgacaatgtggaattaccaaattaaaagagaatactatgaatgtattcatattttttctatattgaataaacaatgtaacatagataacaatataaataaaagtggtatgaccagtgaaaaaaaaaaaaaaaaaa

SEQ ID NO: 298 - protein, 324 aa, Homo sapiens
MAAAAPGNGRASAPRLLLLFLVPLLWAPAAVRAGPDEDLSHRNKEPPAPAQQLQPQPVAVQGPEPARVEKIFTPAAPVHTNKEDPATQTNLGFIHAFVAAISVIIVSELGDKTFFIAAIMAMRYNRLTVLAGAMLALGLMTCLSVLFGYATTVIPRVYTYYVSTVLFAIFGIRMLREGLKMSPDEGQEELEEVQAELKKKDEEFQRTKLLNGPGDVETGTSITVPQKKWLHFISPIFVQALTLTFLAEWGDRSQLTTIVLAAREDPYGVAVGGTVGHCLCTGLAVIGGRMIAQKISVRTVTIIGGIVFLAFAFSALFISPDSGF

SEQ ID NO: 299 - DNA, 5801 bp, Homo sapiens
gagcgagagcgcgaaggaaatctggccgccgccgccgcgagcgctcccgaatttttacttgttcctgcaaagctgctggagctcagaagctgattctatcacattgtaagatgcctttggataattctacagtcctcttaaatgaatctttagaacttggcaagtctcactagataccttcaatcatcattttgagctcaaagaattctgagacttatggttggtcatatagaagagtaccttgaacctatagtttcctgaagaatcagtttaaaagatccaaggagtacaaaaggagaagtacaaatgtctactacaagacgaaaacgtagtatgttatgttgtttaccgtaagctgtagtaaaatgagctcgattgttgacagagatgacagtagtatttttgatgggttggtggaagaagatgacaaggacaaagcgaaaagagtatctagaaacaaatctgaaaagaaacgtagagatcaatttaatgttctcattaaagaactgggatccatgcttcctggtaatgctagaaagatggacaaatctactgttctgcagaaaagcattgattttttacgaaaacataaagaaatcactgcacagtcagatgctagtgaaattcgacaggactggaaacctacattccttagtaatgaagagtttacacaattaatgttagaggctcttgatggtttttttttagcaatcatgacagatggaagcataatatatgtgtctgagagtgtaacttcattacttgaacatttaccatctgatcttgtggatcaaagtatatttaattttatcccagaaggggaacattcagaggtttataaaatactctctactcatctgctggaaagtgattcattaaccccagaatatttaaaatcaaaaaatcagttagaattctgttgtcacatgctgcgaggaacaatagacccaaaggagccatctacctatgaatatgtaaaatttataggaaatttcaaatctttaaacagtgtatcctcttcagcacacaatggttttgaaggaactatacaacgcacacataggccatcttatgaagatagagtttgttttgtagctactgtcaggttagctacacctcagttcatcaaggaaatgtgcactgttgaagaacccaatgaagagtttacatctagacatagtttagaatggaagtttctgtttctagatcacagggcaccacccataatagggtatttgccatttgaagttctgggaacatcaggctatgattactatcatgtggatgacctagaaaatttggcaaaatgtcatgagcacttaatgcaatatgggaaaggcaaatcatgttattataggttcctgactaaggggcaacagtggatttggcttcagactcattattatatcacttaccatcagtggaattcaaggccagagtttattgtttgtactcacactgtagtaagttatgcagaagttagggctgaaagacgacgagaacttggcattgaagagtctcttcctgagacagctgctgacaaaagccaagattctgggtcagataatcgtataaacacagtcagtctcaaggaagcattggaaaggtttgatcacagcccaaccccttctgcctcttctcggagttcaagaaaatcatctcacacggccgtctcagacccttcctcaacaccaaccaagatcccgacggatacgagcactccacccaggcagcatttaccagctcatgagaagatggtgcaaagaaggtcatcatttagtagtcagtccataaattcccagtctgttggttcatcattaacacagccagtgatgtctcaagctacaaatttaccaattccacaaggcatgtcccagtttcagttttcagctcaattaggagccatgcaacatctgaaagaccaattggaacaacggacacgcatgatagaagcaaatattcatcggcaacaagaagaactaagaaaaattcaagaacaacttcagatggtccatggtcaggggctgcagatgtttttgcaacaatcaaatcctgggttgaattttggttccgttcaactttcttctggaaattcatctaacatccagcaacttgcacctataaatatgcaaggccaagttgttcctactaaccagattcaaagtggaatgaatactggacacattggcacaactcagcacatgatacaacaacagactttacagagtacatcaactcagagtcaacaaaatgtactgagtgggcacagtcagcaaacatctctacccagtcagacacagagcactcttacagccccactgtataacactatggtgatttctcagcctgcagccggaagcatggtccagattccatctagtatgccacaaaacagcacccagagtgctgcagtaactacattcactcaggacaggcagataagattttctcaaggtcaacaacttgtgaccaaattagtgactgctcctgtagcttgtggggcagtcatggtacctagtactatgcttatgggccaggtggtgactgcatatcctacttttgctacacaacagcaacagtcacagacattgtcagtaacgcagcagcagcagcagcagagctcccaggagcagcagctcacttcagttcagcaaccatctcaggctcagctgacccagccaccgcaacaatttttacagacttctaggttgctccatgggaatccctcaactcaactcattctctctgctgcatttcctctacaacagagcaccttccctcagtcacatcaccagcaacatcagtctcagcaacagcagcaactcagccggcacaggactgacagcttgcccgacccttccaaggttcaaccacagtagcacacgtgcttcctctcttgacatcaagggaggaaggggatggcccattaagagttactcagatgacctgaggaaaggagggaaagttccagcagtttcatgagatgcagtattgagtgttctagttcctggaattagttggcagagaaaatgctgcctagtgctacagatgtacattaaataccagccagcaggaggtgatcataggggcatagccagttctgacagtgttttaggtgcctggatattttttgatggaaaaagaatatattgccaaatattaagaagctcagctatgaaatgacctccagggaatcagaaaggcactaatgatgttagtaacttttagtggttctgtgcctcttatcaagtgttacagaggacataccactgccatgtcaggggtttgcttacagtgatgccatgaagacagtccagtagacttggtagcgaccccctcccccaacccctctcccttttcagataatgatggaacagtaattactttcagaatgttgtgtgggttcaaattctctatgtacagatgatgtaaaaatatgtatatgtctagataaaaggagagaaagcaaaacattttgtatgctgcatgaaagcgttatctcttccttacaggtgtgagcacctttcctgaaattctgacaccatgtgcaaactgatccatcctgtttttccttttgtttacaacacagtagtgttctgttcacttttccggggcacaagtttttttgttcatactttggctgtgatgtcacagtttgttcagtgaggtatgatgtgctgctgggaatggattttttttttcaggttaaattattgatacaacaggattttcaagttattcagaaatatccctcatttcattatttttcaattatgtttgaaaataggatttgcactgctttattttaggtggctgggagttttgattgcatattttgttatagttcatagttggaaatatttgcgtaaatggttttcaacaagcctgaaagtaatttcaagaatgtttcagttatagaggtaaaatttgcacacaaaacatcttaggcactttttaacattctcaatcatgggaattttaacttttgggatttgttgaaatcttttttattatccttcacaatttcaatgcttcttttagtcagaaatgattcagggttatttgaggggaaaaaaccccatagtgccttgattttaattcaggtgataactcaccatcttgaagtcattgtccggtttccgtagcagttttgaaaccttagtacctttttaacagcatgtgggtgtcagtgtcattattagtctcctaataagttcctctgaagactgctatcagtctcttggactggaggtacaaataatttagaaataaaagatgataacctaacactatcatagttattaatgtgatcctaaaattgtttcctaaatcagcatttttctttagtcatttaagaatttaccagaaatatttgctcaatatgatcttgatattcctacaaagaaaaaagaaggggtagggatttggctatgccttcactacaacattagaatattgtaactcacatgccttctaaacgtgaactaagatttcctttggcaatatcatattctaaaagtaataaattccaatacaagttacatacatttaaaaaacattttacagattttatggtactaatgaaatttacagtgatagaacaaaagaggattagtagaaaatacattattagaatataaaaaatgttattactgaggaaagggaggagaggacaagtgtaataaatcaaaattgacctcaaaagaaaatgtgtaacagagttgaggttgttaaaacagaaaaggttctgaataatgaagattaacctaatgcagaattgctaggtaaagaggtcaggggaatgctaagccagttcttaagacttctctgtcctctgctttgctgttatccttaaggcatatactttgtctttctgcagaaaattctacctggctacaattactttgaacattaatgttgaaaaagaaaacaaccaaagaaaattggtacttacccttctacaaaagaagtgtgactagatatcaatcagtaattaacatatcaaggagctcttctagctaaatgaccatccagtagagatttcccacattcccatgaatatcaagaatagttgtcagaatatgtatgtacctgagcatatgtacacagacaagggggatgttgtggaatatggcaatagcattgttcttctcccctttcaaattgcctttcttgaccttatgccattccatatatatctgagttgtgcctcatttatttattggcaatacctagtgatacggatttagctaacaaaagatatgaagaactattatattgaggcctgtcctctacataccacacttaaaagatggtgaactgtgagtactacttaggttgacagcaacaaagcataagacaagccccaggtaaacgtctaaactgtttactcacattgtcctactccagccccttcaattatttcccatctccacaaatagtcgggggaaaaaattaaaattttcctttatgattcttactgttcttcgcagctcatcttttcctgcttagaattaaccattgctaatttaaaggagcagctagctgcttttctgtcagtctgaagcgtagtagtggaagaggtagtaagcaccagctgcctctttgctgctttgttttcctcctgattctcttaaatttgggttgcaaagctatcccgccccccaccctgccccatgaaacttgagcattcaaatgaagattcagcagtgtctgttcttcatttctatagccaaagctgttagttaaaatcccaaatctatagcatttaaagataccaaatagaaacaccttccagcttt

SEQ ID NO: 300 - protein, 846 aa, Homo sapiens
MLFTVSCSKMSSIVDRDDSSIFDGLVEEDDKDKAKRVSRNKSEKKRRDQFNVLIKELGSMLPGNARKMDKSTVLQKSIDFLRKHKEITAQSDASEIRQDWKPTFLSNEEFTQLMLEALDGFFLAIMTDGSIIYVSESVTSLLEHLPSDLVDQSIFNFIPEGEHSEVYKILSTHLLESDSLTPEYLKSKNQLEFCCHMLRGTIDPKEPSTYEYVKFIGNFKSLNSVSSSAHNGFEGTIQRTHRPSYEDRVCFVATVRLATPQFIKEMCTVEEPNEEFTSRHSLEWKFLFLDHRAPPIIGYLPFEVLGTSGYDYYHVDDLENLAKCHEHLMQYGKGKSCYYRFLTKGQQWIWLQTHYYITYHQWNSRPEFIVCTHTVVSYAEVRAERRRELGIEESLPETAADKSQDSGSDNRINTVSLKEALERFDHSPTPSASSRSSRKSSHTAVSDPSSTPTKIPTDTSTPPRQHLPAHEKMVQRRSSFSSQSINSQSVGSSLTQPVMSQATNLPIPQGMSQFQFSAQLGAMQHLKDQLEQRTRMIEANIHRQQEELRKIQEQLQMVHGQGLQMFLQQSNPGLNFGSVQLSSGNSSNIQQLAPINMQGQVVPTNQIQSGMNTGHIGTTQHMIQQQTLQSTSTQSQQNVLSGHSQQTSLPSQTQSTLTAPLYNTMVISQPAAGSMVQIPSSMPQNSTQSAAVTTFTQDRQIRFSQGQQLVTKLVTAPVACGAVMVPSTMLMGQVVTAYPTFATQQQQSQTLSVTQQQQQQSSQEQQLTSVQQPSQAQLTQPPQQFLQTSRLLHGNPSTQLILSAAFPLQQSTFPQSHHQQHQSQQQQQLSRHRTDSLPDPSKVQPQ

SEQ ID NO: 301 - DNA, 873 bp, Homo sapiens
gaagcgggcgctcttccagcctggagaaggctgcgggtctccatccgtggcgcctcgccagctgcaggacgacgcgggctcttgaggggcagagcagcgcatcatgcaggatcccaatgaagatacagaatggaatgacattttaagagatttcggcattcttcctcctaaagaagagtcaaaagatgaaattgaagaaatggttttacgtttacagaaagaagcaatggtgaaaccatttgaaaagatgactcttgcacagctaaaggaagctgaagatgaatttgatgaagaagatatgcaggctgttgaaacatatagaaagaagcggttacaggaatggaaagctcttaagaaaaaacaaaaatttggagaattaagagaaatttctggaaatcagtatgtgaatgaagtcacaaatgcagaagaagatgtgtgggttataattcatctatacagatcaagcatcccaatgtgtttgttggttaaccagcatcttagtcttctagcaagaaagtttccagaaactaaatttgttaaagccatcgtgaatagctgtattcaacactaccatgacaattgtttaccaacaatttttgtgtataaaaatggtcagatagaagccaaattcattggaattatagaatgtggagggataaatctcaagctggaagaacttgaatggaagctagcagaagttggagcaatacagactgatttggaagaaaaccccagaaaagacatggtagatatgatggtatcttcaattagaaacacttctattcatgatgacagtgatagctccaacagtgataatgataccaaatagagagaaatattcaataaatagcttttagtataaaaaaaaaaaaa

SEQ ID NO: 302 - protein, 241 aa, Homo sapiens
MQDPNEDTEWNDILRDFGILPPKEESKDEIEEMVLRLQKEAMVKPFEKMTLAQLKEAEDEFDEEDMQAVETYRKKRLQEWKALKKKQKFGELREISGNQYVNEVTNAEEDVWVIIHLYRSSIPMCLLVNQHLSLLARKFPETKFVKAIVNSCIQHYHDNCLPTIFVYKNGQIEAKFIGIIECGGINLKLEELEWKLAEVGAIQTDLEENPRKDMVDMMVSSIRNTSIHDDSDSSNSDNDTK

SEQ ID NO: 303 - DNA, 817 bp, Homo sapiens
agtcctgcgtccgggccccgaggcgcagcagggcaccaggtggagcaccagctacgcgtggcgcagcgcagcgtccctagcaccgagcctcccgcagccgccgagatgctgcgaacagagagctgccgccccaggtcgcccgccggacaggtggccgcggcgtccccgctcctgctgctgctgctgctgctcgcctggtgcgcgggcgcctgccgaggtgctccaatattacctcaaggattacagcctgaacaacagctacagttgtggaatgagatagatgatacttgttcgtcttttctgtccattgattctcagcctcaggcatccaacgcactggaggagctttgctttatgattatgggaatgctaccaaagcctcaggaacaagatgaaaaagataatactaaaaggttcttatttcattattcgaagacacagaagttgggcaagtcaaatgttgtgtcgtcagttgtgcatccgttgctgcagctcgttcctcacctgcatgagagaagaatgaagagattcagagtggacgaagaattccaaagtccctttgcaagtcaaagtcgaggatattttttattcaggccacggaatggaagaaggtcagcagggttcatttaaaatggatgccagctaattttccacagagcaatgctatggaatacaaaatgtactgacattttgttttcttctgaaaaaaatccttgctaaatgtactctgttgaaaatccctgtgttgtcaatgttctcagttgtaacaatgttgtaaatgttcaatttgttgaaaattaaaaaatctaaaaataaa

SEQ ID NO: 304 - protein, 174 aa, Homo sapiens
MLRTESCRPRSPAGQVAAASPLLLLLLLLAWCAGACRGAPILPQGLQPEQQLQLWNEIDDTCSSFLSIDSQPQASNALEELCFMIMGMLPKPQEQDEKDNTKRFLFHYSKTQKLGKSNVVSSVVHPLLQLVPHLHERRMKRFRVDEEFQSPFASQSRGYFLFRPRNGRRSAGFI

SEQ ID NO: 305 - DNA, 2800 bp, Homo sapiens
atttgagtgggaatctcaaagcagttgagtaggcagaaaaaagaacctcttcattaaggattaaaatgtataggccagcacgtgtaacttcgacttcaagatttctgaatccatatgtagtatgtttcattgtcgtcgcaggggtagtgatcctggcagtcaccatagctctacttgtttactttttagcttttgatcaaaaatcttacttttataggagcagttttcaactcctaaatgttgaatataatagtcagttaaattcaccagctacacaggaatacaggactttgagtggaagaattgaatctctgattactaaaacattcaaagaatcaaatttaagaaatcagttcatcagagctcatgttgccaaactgaggcaagatggtagtggtgtgagagcggatgttgtcatgaaatttcaattcactagaaataacaatggagcatcaatgaaaagcagaattgagtctgttttacgacaaatgctgaataactctggaaacctggaaataaacccttcaactgagataacatcacttactgaccaggctgcagcaaattggcttattaatgaatgtggggccggtccagacctaataacattgtctgagcagagaatccttggaggcactgaggctgaggagggaagctggccgtggcaagtcagtctgcggctcaataatgcccaccactgtggaggcagcctgatcaataacatgtggatcctgacagcagctcactgcttcagaagcaactctaatcctcgtgactggattgccacgtctggtatttccacaacatttcctaaactaagaatgagagtaagaaatattttaattcataacaattataaatctgcaactcatgaaaatgacattgcacttgtgagacttgagaacagtgtcacctttaccaaagatatccatagtgtgtgtctcccagctgctacccagaatattccacctggctctactgcttatgtaacaggatggggcgctcaagaatatgctggccacacagttccagagctaaggcaaggacaggtcagaataataagtaatgatgtatgtaatgcaccacatagttataatggagccatcttgtctggaatgctgtgtgctggagtacctcaaggtggagtggacgcatgtcagggtgactctggtggcccactagtacaagaagactcacggcggctttggtttattgtggggatagtaagctggggagatcagtgtggcctgccggataagccaggagtgtatactcgagtgacagcctaccttgactggattaggcaacaaactgggatctagtgcaacaagtgcatccctgttgcaaagtctgtatgcaggtgtgcctgtcttaaattccaaagctttacatttcaactgaaaaagaaactagaaatgtcctaatttaacatcttgttacataaatatggtttaacaaacactgtttaacctttctttattattaaaggttttctattttctccagagaactatatgaatgttgcatagtactgtggctgtgtaacagaagaaacacactaaactaattacaaagttaacaatttcattacagttgtgctaaatgcccgtagtgagaagaacaggaaccttgagcatgtatagtagaggaacctgcacaggtctgatgggtcagaggggtcttctctgggtttcactgaggatgagaagtaagcaaactgtggaaacatgcaaaggaaaaagtgatagaataatattcaagacaaaaagaacagtatgaggcaagagaaataatatgtatttaaaatttttggttactcaatatcttatacttagtatgagtcctaaaattaaaaatgtgaaactgttgtactatacgtataacctaaccttaattattctgtaagaacatgcttccataggaaatagtggataattttcagctatttaaggcaaaagctaaaatagttcactcctcaactgagacccaaagaattatagatatttttcatgatgacccatgaaaaatatcactcatctacataaaggagagactatatctattttatagagaagctaagaaatatacctacacaaacttgtcaggtgctttacaactacatagtactttttaacaacaaaataataattttaagaatgaaaaatttaatcatcgggaagaacgtcccactacagacttcctatcactggcagttatatttttgagcgtaaaagggtcgtcaaacgctaaatctaagtaacgaattgaaagtttaaagagggggaagagttggtttgcaaaggaaaagtttaaatagcttaatatcaatagaatgatcctgaagacagaaaaaactttgtcactcttcctctctcattttctttctctctctctccccttctcatacacatgcctcccccaccaaagaatataatgtaaattaaatccactaaaatgtaatggcatgaaaatctctgtagtctgaatcactaatattcctgagtttttatgagctcctagtacagctaaagtttgcctatgcatgatcatctatgcgtcagagcttcctccttctacaagctaactccctgcatctgggcatcaggactgctccatacatttgctgaaaacttcttgtatttcctgatgtaaaattgtgcaaacacctacaataaagccatctacttttagggaaagggagttgaaaatgcaaccaactcttggcgaactgtacaaacaaatctttgctatactttatttcaaataaattctttttaaaataaaaaaaaaaaaaaaaaaa

SEQ ID NO: 306 - protein, 418 aa, Homo sapiens
MYRPARVTSTSRFLNPYVVCFIVVAGVVILAVTIALLVYFLAFDQKSYFYRSSFQLLNVEYNSQLNSPATQEYRTLSGRIESLITKTFKESNLRNQFIRAHVAKLRQDGSGVRADVVMKFQFTRNNNGASMKSRIESVLRQMLNNSGNLEINPSTEITSLTDQAAANWLINECGAGPDLITLSEQRILGGTEAEEGSWPWQVSLRLNNAHHCGGSLINNMWILTAAHCFRSNSNPRDWIATSGISTTFPKLRMRVRNILIHNNYKSATHENDIALVRLENSVTFTKDIHSVCLPAATQNIPPGSTAYVTGWGAQEYAGHTVPELRQGQVRIISNDVCNAPHSYNGAILSGMLCAGVPQGGVDACQGDSGGPLVQEDSRRLWFIVGIVSWGDQCGLPDKPGVYTRVTAYLDWIRQQTGI

SEQ ID NO: 307 - DNA, 2429 bp, Homo sapiens
aatttgtttcctcatttctttgaactgtagacttctaatacatctagagatgtcatatagttgattagaaagttgagttcagtgggtgcagacctgcaagatcatattcttcctcctgtacatgatgtatcggacagtaggatttggcacccgaagcagaaatctgaagccatggatgattgccgttctcattgtgttgtccctgacagtggtggcagtgaccataggtctcctggttcacttcctagtatttgaccaaaaaaaggagtactatcatggctcctttaaaattttagatccacaaatcaataacaatttcggacaaagcaacacatatcaacttaaggacttacgagagacgaccgaaaatttggtgagtcaggtggatgagatatttatagattcagcctggaagaaaaattatatcaagaaccaagtagtcagactgactccagaggaagatggtgtgaaagtagatgtcattatggtgttccagttcccctctactgaacaaagggcagtaagagagaagaaaatccaaagcatcttaaatcagaagataaggaatttaagagccttgccaataaatgcctcatcagttcaagttaatgcaatgagctcatcaacaggggagttaactgtccaagcaagttgtggtaaacgagttgttccattaaacgtcaacagaatagcatctggagtcattgcacccaaggcggcctggccttggcaagcttcccttcagtatgataacatccatcagtgtggggccaccttgattagtaacacatggcttgtcactgcagcacactgcttccagaagtataaaaatccacatcaatggactgttagttttggaacaaaaatcaaccctcccttaatgaaaagaaatgtcagaagatttattatccatgagaagtaccgctctgcagcaagagagtacgacattgctgttgtgcaggtctcttccagagtcaccttttcggatgacatacgccggatttgtttgccagaagcctctgcatccttccaaccaaatttgactgtccacatcacaggatttggagcactttactatggtggggaatcccaaaatgatctccgagaagccagagtgaaaatcataagtgacgatgtctgcaagcaaccacaggtgtatggcaatgatataaaacctggaatgttctgtgccggatatatggaaggaatttatgatgcctgcaggggtgattctgggggacctttagtcacaagggatctgaaagatacgtggtatctcattggaattgtaagctggggagataactgtggtcaaaaggacaagcctggagtctacacacaagtgacttattaccgaaactggattgcttcaaaaacaggcatctaattcacaataaaagttaaacaaagaaagctgtatgcaggtcatatatgcatgagaattcaactatttagtgggtgtagtacaacaaagtgatattaaattactggatctagtaacatgaaacacacaacgtaagttatttagaatcactttaatcaaccaataatccttagccaatttataagggacttttatttgtaaagtaatggatctggcttgaaaaatacggtagagatacttagctctttaaatcacgaatgttgaagtaccagtgagactcaatacatatttttgaagatagtccatgggatttttagaatgtcgttgtcaagggtctccttttaactgagaaactttttgaactcacaaagtgttcaagaaacccttgtataattccctacatttctctcgagctcacaaatacttttttttctttttccttattcaatcagattttccaaagtacctttccaccataagaaatgaattttctacttctacacccatttgagagacaccaataaaagaaagtcatatgtaggaaacaaagtctgatagtaaaacaagccagagatcttctaactttttttagttataaaacctctaattttttggtgacttttctacacacacacacacatacagtcacatagatattcttatcctacagatataatcagaaaaatcccgattaatgaattatatatagatagatagagtgattagttaatcaaaactatatatttgttaaaaatttgggagaaggtgatggtaatttcattagtcccaaaacaccggcataagaaatttgacatttcacagatgcacttacatattttgaccacaagggggaaattttgtgcattattattgtagggttaaatgcctgaaaaaaataagcatttactaataccttgaaaaaccaaagaacattatgttcctctgtagcaagaaaaattttatgccctcgcattgctacagccaaatagcttataaggcttatggcaatgtcccaactattgcaatcataaaaccctagttttag

SEQ ID NO: 308 - protein, 421 aa, Homo sapiens
MMYRTVGFGTRSRNLKPWMIAVLIVLSLTVVAVTIGLLVHFLVFDQKKEYYHGSFKILDPQINNNFGQSNTYQLKDLRETTENLVSQVDEIFIDSAWKKNYIKNQVVRLTPEEDGVKVDVIMVFQFPSTEQRAVREKKIQSILNQKIRNLRALPINASSVQVNAMSSSTGELTVQASCGKRVVPLNVNRIASGVIAPKAAWPWQASLQYDNIHQCGATLISNTWLVTAAHCFQKYKNPHQWTVSFGTKINPPLMKRNVRRFIIHEKYRSAAREYDIAVVQVSSRVTFSDDIRRICLPEASASFQPNLTVHITGFGALYYGGESQNDLREARVKIISDDVCKQPQVYGNDIKPGMFCAGYMEGIYDACRGDSGGPLVTRDLKDTWYLIGIVSWGDNCGQKDKPGVYTQVTYYRNWIASKTGI

SEQ ID NO: 309 - DNA, 8062 bp, Homo sapiens
cgtccctgcagccctcgcccggcgctccagtagcaggacccggtctcgggaccagccggtaatatgcacgtgtcactagctgaggccctggaggttcggggtggaccacttcaggaggaagaaatatgggctgtattaaatcaaagtgctgaaagtctccaagaattattcagaaaagtaagcctagctgatcctgctgcccttggcttcatcatttctccatggtctctgctgttgctgccatctggtagtgtgtcatttacagatgaaaatatttccaatcaggatcttcgagcattcactgcaccagaggttcttcaaaatcagtcactaacttctctctcagatgttgaaaagatccacatttattctcttggaatgacactgtattggggggctgattatgaagtgcctcagagccaacctattaagcttggagatcatctcaacagcatactgcttggaatgtgtgaggatgttatttacgctcgagtttctgttcggactgtgctggatgcttgcagtgcccacattaggaatagcaattgtgcaccctcattttcctacgtgaaacacttggtaaaactggttctgggaaatctttctgggacagatcagctttcctgtaacagtgaacaaaagcctgatcgaagccaggctattcgagatcgattgcgaggaaaaggattaccaacaggaagaagctctacttctgatgtactagacatacaaaagcctccactctctcatcagacctttcttaacaaagggcttagtaaatctatgggatttctgtccatcaaagatacacaagatgagaattatttcaaggacattttatcagataattctggacgtgaagattctgaaaatacattctccccttaccagttcaaaactagtggcccagaaaaaaaacccatccctggcattgatgtgctttctaagaagaagatctgggcttcatccatggacttgctttgtacagctgacagagacttctcttcaggagagactgccacatatcgtcgttgtcaccctgaggcagtaacagtgcggacttcaactactcctagaaaaaaggaggcaagatactcagatggaagtatagccttggatatctttggccctcagaaaatggatccaatatatcacactcgagaattgcccacctcctcagcaatatcaagtgctttggaccgaatccgagagagacaaaagaaacttcaggttctgagggaagccatgaatgtagaagaaccagttcgaagatacaaaacttatcatggtgatgtctttagtacctccagtgaaagtccatctattatttcctctgaatcagatttcagacaagtgagaagaagtgaagcctcaaagaggtttgaatccagcagtggtctcccaggggtagatgaaaccttaagtcaaggccagtcacagagaccgagcagacaatatgaaacaccctttgaaggcaacttaattaatcaagagatcatgctaaaacggcaagaggaagaactgatgcagctacaagccaaaatggcccttagacagtctcggttgagcctatatccaggagacacaatcaaagcgtccatgcttgacatcaccagggatccgttaagagaaattgccctagaaacagccatgactcaaagaaaactgaggaatttctttggccctgagtttgtgaaaatgacaattgaaccatttatatctttggatttgccacggtctattcttactaagaaagggaagaatgaggataaccgaaggaaagtaaacataatgcttctgaacgggcaaagactggaactgacctgtgataccaaaactatatgtaaagatgtgtttgatatggttgtggcacatattggcttagtagagcatcatttgtttgctttagctaccctcaaagataatgaatatttctttgttgatcctgacttaaaattaaccaaagtggccccagagggatggaaagaagaaccaaagaaaaagaccaaagccactgttaattttactttgtttttcagaattaaattttttatggatgatgttagtctaatacaacatactctgacgtgtcatcagtattaccttcagcttcgaaaagatattttggaggaaaggatgcactgtgatgatgagacttccttattgctggcatccttggctctccaggctgagtatggagattatcaaccagaggttcatggtgtgtcttactttagaatggagcactatttgcccgccagagtgatggagaaacttgatttatcctatatcaaagaagagttacccaaattgcataatacctatgtgggagcttctgaaaaagagacagagttagaatttttaaaggtctgccaaagactgacagaatatggagttcattttcaccgagtgcaccctgagaagaagtcacaaacaggaatattgcttggagtctgttctaaaggtgtccttgtgtttgaagttcacaatggagtgcgcacattggtccttcgctttccatggagggaaaccaagaaaatatctttttctaaaaagaaaatcacattgcaaaatacatcagatggaataaaacatggcttccagacagacaacagtaagatatgccagtacctgctgcacctctgctcttaccagcataagttccagctacagatgagagcaagacagagcaaccaagatgcccaagatattgagagagcttcgtttaggagcctgaatctccaagcagagtctgttagaggatttaatatgggacgagcaatcagcactggcagtctggccagcagcaccctcaacaaacttgctgttcgacctttatcagttcaagctgagattctgaagaggctatcctgctcagagctgtcgctttaccagccattgcaaaacagttcaaaagagaagaatgacaaagcttcatgggaggaaaagcctagagagatgagtaaatcataccatgatctcagtcaggcctctctctatccacatcggaaaaatgtcattgttaacatggaacccccaccacaaaccgttgcagagttggtgggaaaaccttctcaccagatgtcaagatctgatgcagaatctttggcaggagtgacaaaacttaataattcaaagtctgttgcgagtttaaatagaagtcctgaaaggaggaaacatgaatcagactcctcatccattgaagaccctgggcaagcatatgttctagatgtgctacacaaaagatggagcatagtatcttcaccagaaagggagatcaccttagtgaacctgaaaaaagatgcaaagtatggcttgggatttcaaattattggtggggagaagatgggaagactggacctaggcatatttatcagttcagttgcccctggaggaccagctgacttggatggatgcttgaagccaggagaccgtttgatatctgtgaatagtgtgagtctggagggagtcagccaccatgctgcaattgaaattttgcaaaatgcacctgaagatgtgacacttgttatctctcagccaaaagaaaagatatccaaagtgccttctactcctgtgcatctcaccaatgagatgaaaaactacatgaagaaatcttcctacatgcaagacagtgctatagattcttcttccaaggatcaccactggtcacgtggtaccctgaggcacatctcggagaactcctttgggccatctgggggcctgcgggaaggaagcctgagttctcaagattccaggactgagagtgccagcttgtctcaaagccaggtcaatggtttctttgccagccatttaggtgaccaaacctggcaggaatcacagcatggcagcccttccccatctgtaatatccaaagccaccgagaaagagactttcactgatagtaaccaaagcaaaactaaaaagccaggcatttctgatgtaactgattactcagaccgtggagattcagacatggatgaagccacttactccagcagtcaggatcatcaaacaccaaaacaggaatcttcctcttcagtgaatacatccaacaagatgaattttaaaactttttcttcatcacctcctaagcctggagatatctttgaggttgaactggctaaaaatgataacagcttggggataagtgtcacgggaggtgtgaatacgagtgtcagacatggtggcatttatgtgaaagctgttattccccagggagcagcagagtctgatggtagaattcacaaaggtgatcgcgtcctagctgtcaatggagttagtctagaaggagccacccataagcaagctgtggaaacactgagaaatacaggacaggtggttcatctgttattagaaaagggacaatctccaacatctaaagaacatgtcccggtaaccccacagtgtaccctttcagatcagaatgcccaaggtcaaggcccagaaaaagtgaagaaaacaactcaggtcaaagactacagctttgtcactgaagaaaatacatttgaggtaaaattatttaaaaatagctcaggtctaggattcagtttttctcgagaagataatcttataccggagcaaattaatgccagcatagtaagggttaaaaagctctttcctggacagccagcagcagaaagtggaaaaattgatgtaggagatgttatcttgaaagtgaatggagcctctttgaaaggactatctcagcaggaagtcatatctgctctcaggggaactgctccagaagtattcttgcttctctgcagacctccacctggtgtgctaccggaaattgatactgcgcttttgaccccacttcagtctccagcacaagtacttccaaacagcagtaaagactcttctcagccatcatgtgtggagcaaagcaccagctcagatgaaaatgaaatgtcagacaaaagcaaaaaacagtgcaagtccccatccagaagagacagttacagtgacagcagtgggagtggagaagatgacttagtgacagctccagcaaacatatcaaattcgacctggagttcagctttgcatcagactctaagcaacatggtatcacaggcacagagtcatcatgaagcacccaagagtcaagaagataccatttgtaccatgttttactatcctcagaaaattcccaataaaccagagtttgaggacagtaatccttcccctctaccaccggatatggctcctgggcagagttatcaaccccaatcagaatctgcttcctctagttcgatggataagtatcatatacatcacatttctgaaccaactagacaagaaaactggacacctttgaaaaatgacttggaaaatcaccttgaagactttgaactggaagtagaactcctcattaccctaattaaatcagaaaaaggaagcctgggttttacagtaaccaaaggcaatcagagaattggttgttatgttcatgatgtcatacaggatccagccaaaagtgatggaaggctaaaacctggggaccggctcataaaggttaatgatacagatgttactaatatgactcatacagatgcagttaatctgctccgggctgcatccaaaacagtcagattagttattggacgagttctagaattacccagaataccaatgttgcctcatttgctaccggacataacactaacgtgcaacaaagaggagttgggtttttccttatgtggaggtcatgacagcctttatcaagtggtatatattagtgatattaatccaaggtccgtcgcagccattgagggtaatctccagctattagatgtcatccattatgtgaacggagtcagcacacaaggaatgaccttggaggaagttaacagagcattagacatgtcacttccttcattggtattgaaagcaacaagaaatgatcttccagtggtccccagctcaaagaggtctgctgtttcagctccaaagtcaaccaaaggcaatggttcctacagtgtggggtcttgcagccagcctgccctcactcctaatgattcattctccacggttgctggggaagaaataaatgaaatatcgtaccccaaaggaaaatgttctacttatcagataaagggatcaccaaacttgactctgcccaaagaatcttatatacaagaagatgacatttatgatgattcccaagaagctgaagttatccagtctctgctggatgttgtggatgaggaagcccagaatcttttaaacgaaaataatgcagcaggatactcctgtggtccaggtacattaaagatgaatgggaagttatcagaagagagaacagaagatacagactgcgatggttcacctttacctgagtattttactgaggccaccaaaatgaatggctgtgaagaatattgtgaagaaaaagtaaaaagtgaaagcttaattcagaagccacaagaaaagaagactgatgatgatgaaataacatggggaaatgatgagttgccaatagagagaacaaaccatgaagattctgataaagatcattcctttctgacaaacgatgagctcgctgtactccctgtcgtcaaagtgcttccctctggtaaatacacgggtgccaacttaaaatcagtcattcgagtcctgcggggtttgctagatcaaggaattccttctaaggagctggagaatcttcaagaattaaaacctttggatcagtgtctaattgggcaaactaaggaaaacagaaggaagaacagatataaaaatatacttccctatgatgctacaagagtgcctcttggagatgaaggtggctatatcaatgccagcttcattaagataccagttgggaaagaagagttcgtttacattgcctgccaaggaccactgcctacaactgttggagacttctggcagatgatttgggagcaaaaatccacagtgatagccatgatgactcaagaagtagaaggagaaaaaatcaaatgccagcgctattggcccaacatcctaggcaaaacaacaatggtcagcaacagacttcgactggctcttgtgagaatgcagcagctgaagggctttgtggtgagggcaatgacccttgaagatattcagaccagagaggtgcgccatatttctcatctgaatttcactgcctggccagaccatgatacaccttctcaaccagatgatctgcttacttttatctcctacatgagacacatccacagatcaggcccaatcattacgcactgcagtgctggcattggacgttcagggaccctgatttgcatagatgtggttctgggattaatcagtcaggatcttgattttgacatctctgatttggtgcgctgcatgagactacaaagacacggaatggttcagacagaggatcaatatattttctgctatcaagtcatcctttatgtcctgacacgtcttcaagcagaagaagagcaaaaacagcagcctcagcttctgaagtgacatgaaaagagcctctggatgcatttccatttctctccttaacctccagcagactcctgctctctatccaaaataaagatcacagagcagcaagttcatacaacatgcatgttctcctctatcttagaggggtattcttcttgaaaataaaaaatattgaaatgctgtatttttacagctactttaacctatgataattatttacaaaattttaacactaaccaaacaatgcagatcttagggatgattaaaggcagcatttgatgatagcagacattgttacaaggacatggtgagtctatttttaatgcaccaatcttgtttatagcaaaaatgttttccaatattttaataaagtagttattttataggggatacttgaaaccagtatttaagctttaaatgacagtaatattggcatagaaaaaagtagcaaatgtttactgtatcaatttctaatgtttactatatagaatttcctgtaatatatttatatactttttcatgaaaatggagttatcagttatctgtttgttactgcatcatctgtttgtaatcattatctcactttgtaaataaaaacacaccttaaaacatg

SEQ ID NO: 310 - protein, 2466 aa, Homo sapiens
MHVSLAEALEVRGGPLQEEEIWAVLNQSAESLQELFRKVSLADPAALGFIISPWSLLLLPSGSVSFTDENISNQDLRAFTAPEVLQNQSLTSLSDVEKIHIYSLGMTLYWGADYEVPQSQPIKLGDHLNSILLGMCEDVIYARVSVRTVLDACSAHIRNSNCAPSFSYVKHLVKLVLGNLSGTDQLSCNSEQKPDRSQAIRDRLRGKGLPTGRSSTSDVLDIQKPPLSHQTFLNKGLSKSMGFLSIKDTQDENYFKDILSDNSGREDSENTFSPYQFKTSGPEKKPIPGIDVLSKKKIWASSMDLLCTADRDFSSGETATYRRCHPEAVTVRTSTTPRKKEARYSDGSIALDIFGPQKMDPIYHTRELPTSSAISSALDRIRERQKKLQVLREAMNVEEPVRRYKTYHGDVFSTSSESPSIISSESDFRQVRRSEASKRFESSSGLPGVDETLSQGQSQRPSRQYETPFEGNLINQEIMLKRQEEELMQLQAKMALRQSRLSLYPGDTIKASMLDITRDPLREIALETAMTQRKLRNFFGPEFVKMTIEPFISLDLPRSILTKKGKNEDNRRKVNIMLLNGQRLELTCDTKTICKDVFDMVVAHIGLVEHHLFALATLKDNEYFFVDPDLKLTKVAPEGWKEEPKKKTKATVNFTLFFRIKFFMDDVSLIQHTLTCHQYYLQLRKDILEERMHCDDETSLLLASLALQAEYGDYQPEVHGVSYFRMEHYLPARVMEKLDLSYIKEELPKLHNTYVGASEKETELEFLKVCQRLTEYGVHFHRVHPEKKSQTGILLGVCSKGVLVFEVHNGVRTLVLRFPWRETKKISFSKKKITLQNTSDGIKHGFQTDNSKICQYLLHLCSYQHKFQLQMRARQSNQDAQDIERASFRSLNLQAESVRGFNMGRAISTGSLASSTLNKLAVRPLSVQAEILKRLSCSELSLYQPLQNSSKEKNDKASWEEKPREMSKSYHDLSQASLYPHRKNVIVNMEPPPQTVAELVGKPSHQMSRSDAESLAGVTKLNNSKSVASLNRSPERRKHESDSSSIEDPGQAYVLDVLHKRWSIVSSPEREITLVNLKKDAKYGLGFQIIGGEKMGRLDLGIFISSVAPGGPADLDGCLKPGDRLISVNSVSLEGVSHHAAIEILQNAPEDVTLVISQPKEKISKVPSTPVHLTNEMKNYMKKSSYMQDSAIDSSSKDHHWSRGTLRHISENSFGPSGGLREGSLSSQDSRTESASLSQSQVNGFFASHLGDQTWQESQHGSPSPSVISKATEKETFTDSNQSKTKKPGISDVTDYSDRGDSDMDEATYSSSQDHQTPKQESSSSVNTSNKMNFKTFSSSPPKPGDIFEVELAKNDNSLGISVTGGVNTSVRHGGIYVKAVIPQGAAESDGRIHKGDRVLAVNGVSLEGATHKQAVETLRNTGQVVHLLLEKGQSPTSKEHVPVTPQCTLSDQNAQGQGPEKVKKTTQVKDYSFVTEENTFEVKLFKNSSGLGFSFSREDNLIPEQINASIVRVKKLFPGQPAAESGKIDVGDVILKVNGASLKGLSQQEVISALRGTAPEVFLLLCRPPPGVLPEIDTALLTPLQSPAQVLPNSSKDSSQPSCVEQSTSSDENEMSDKSKKQCKSPSRRDSYSDSSGSGEDDLVTAPANISNSTWSSALHQTLSNMVSQAQSHHEAPKSQEDTICTMFYYPQKIPNKPEFEDSNPSPLPPDMAPGQSYQPQSESASSSSMDKYHIHHISEPTRQENWTPLKNDLENHLEDFELEVELLITLIKSEKGSLGFTVTKGNQRIGCYVHDVIQDPAKSDGRLKPGDRLIKVNDTDVTNMTHTDAVNLLRAASKTVRLVIGRVLELPRIPMLPHLLPDITLTCNKEELGFSLCGGHDSLYQVVYISDINPRSVAAIEGNLQLLDVIHYVNGVSTQGMTLEEVNRALDMSLPSLVLKATRNDLPVVPSSKRSAVSAPKSTKGNGSYSVGSCSQPALTPNDSFSTVAGEEINEISYPKGKCSTYQIKGSPNLTLPKESYIQEDDIYDDSQEAEVIQSLLDVVDEEAQNLLNENNAAGYSCGPGTLKMNGKLSEERTEDTDCDGSPLPEYFTEATKMNGCEEYCEEKVKSESLIQKPQEKKTDDDEITWGNDELPIERTNHEDSDKDHSFLTNDELAVLPVVKVLPSGKYTGANLKSVIRVLRGLLDQGIPSKELENLQELKPLDQCLIGQTKENRRKNRYKNILPYDATRVPLGDEGGYINASFIKIPVGKEEFVYIACQGPLPTTVGDFWQMIWEQKSTVIAMMTQEVEGEKIKCQRYWPNILGKTTMVSNRLRLALVRMQQLKGFVVRAMTLEDIQTREVRHISHLNFTAWPDHDTPSQPDDLLTFISYMRHIHRSGPIITHCSAGIGRSGTLICIDVVLGLISQDLDFDISDLVRCMRLQRHGMVQTEDQYIFCYQVILYVLTRLQAEEEQKQQPQLLK

SEQ ID NO: 311 - DNA, 8119 bp, Homo sapiens
cgtccctgcagccctcgcccggcgctccagtagcaggacccggtctcgggaccagccggtaatatgcacgtgtcactagctgaggccctggaggttcggggtggaccacttcaggaggaagaaatatgggctgtattaaatcaaagtgctgaaagtctccaagaattattcagaaaagtaagcctagctgatcctgctgcccttggcttcatcatttctccatggtctctgctgttgctgccatctggtagtgtgtcatttacagatgaaaatatttccaatcaggatcttcgagcattcactgcaccagaggttcttcaaaatcagtcactaacttctctctcagatgttgaaaagatccacatttattctcttggaatgacactgtattggggggctgattatgaagtgcctcagagccaacctattaagcttggagatcatctcaacagcatactgcttggaatgtgtgaggatgttatttacgctcgagtttctgttcggactgtgctggatgcttgcagtgcccacattaggaatagcaattgtgcaccctcattttcctacgtgaaacacttggtaaaactggttctgggaaatctttctgggacagatcagctttcctgtaacagtgaacaaaagcctgatcgaagccaggctattcgagatcgattgcgaggaaaaggattaccaacaggaagaagctctacttctgatgtactagacatacaaaagcctccactctctcatcagacctttcttaacaaagggcttagtaaatctatgggatttctgtccatcaaagatacacaagatgagaattatttcaaggacattttatcagataattctggacgtgaagattctgaaaatacattctccccttaccagttcaaaactagtggcccagaaaaaaaacccatccctggcattgatgtgctttctaagaagaagatctgggcttcatccatggacttgctttgtacagctgacagagacttctcttcaggagagactgccacatatcgtcgttgtcaccctgaggcagtaacagtgcggacttcaactactcctagaaaaaaggaggcaagatactcagatggaagtatagccttggatatctttggccctcagaaaatggatccaatatatcacactcgagaattgcccacctcctcagcaatatcaagtgctttggaccgaatccgagagagacaaaagaaacttcaggttctgagggaagccatgaatgtagaagaaccagttcgaagatacaaaacttatcatggtgatgtctttagtacctccagtgaaagtccatctattatttcctctgaatcagatttcagacaagtgagaagaagtgaagcctcaaagaggtttgaatccagcagtggtctcccaggggtagatgaaaccttaagtcaaggccagtcacagagaccgagcagacaatatgaaacaccctttgaaggcaacttaattaatcaagagatcatgctaaaacggcaagaggaagaactgatgcagctacaagccaaaatggcccttagacagtctcggttgagcctatatccaggagacacaatcaaagcgtccatgcttgacatcaccagggatccgttaagagaaattgccctagaaacagccatgactcaaagaaaactgaggaatttctttggccctgagtttgtgaaaatgacaattgaaccatttatatctttggatttgccacggtctattcttactaagaaagggaagaatgaggataaccgaaggaaagtaaacataatgcttctgaacgggcaaagactggaactgacctgtgataccaaaactatatgtaaagatgtgtttgatatggttgtggcacatattggcttagtagagcatcatttgtttgctttagctaccctcaaagataatgaatatttctttgttgatcctgacttaaaattaaccaaagtggccccagagggatggaaagaagaaccaaagaaaaagaccaaagccactgttaattttactttgtttttcagaattaaattttttatggatgatgttagtctaatacaacatactctgacgtgtcatcagtattaccttcagcttcgaaaagatattttggaggaaaggatgcactgtgatgatgagacttccttattgctggcatccttggctctccaggctgagtatggagattatcaaccagaggttcatggtgtgtcttactttagaatggagcactatttgcccgccagagtgatggagaaacttgatttatcctatatcaaagaagagttacccaaattgcataatacctatgtgggagcttctgaaaaagagacagagttagaatttttaaaggtctgccaaagactgacagaatatggagttcattttcaccgagtgcaccctgagaagaagtcacaaacaggaatattgcttggagtctgttctaaaggtgtccttgtgtttgaagttcacaatggagtgcgcacattggtccttcgctttccatggagggaaaccaagaaaatatctttttctaaaaagaaaatcacattgcaaaatacatcagatggaataaaacatggcttccagacagacaacagtaagatatgccagtacctgctgcacctctgctcttaccagcataagttccagctacagatgagagcaagacagagcaaccaagatgcccaagatattgagagagcttcgtttaggagcctgaatctccaagcagagtctgttagaggatttaatatgggacgagcaatcagcactggcagtctggccagcagcaccctcaacaaacttgctgttcgacctttatcagttcaagctgagattctgaagaggctatcctgctcagagctgtcgctttaccagccattgcaaaacagttcaaaagagaagaatgacaaagcttcatgggaggaaaagcctagagagatgagtaaatcataccatgatctcagtcaggcctctctctatccacatcggaaaaatgtcattgttaacatggaacccccaccacaaaccgttgcagagttggtgggaaaaccttctcaccagatgtcaagatctgatgcagaatctttggcaggagtgacaaaacttaataattcaaagtctgttgcgagtttaaatagaagtcctgaaaggaggaaacatgaatcagactcctcatccattgaagaccctgggcaagcatatgttctaggaatgactatgcatagttctggaaactcttcatcccaagtacccttaaaagaaaatgatgtgctacacaaaagatggagcatagtatcttcaccagaaagggagatcaccttagtgaacctgaaaaaagatgcaaagtatggcttgggatttcaaattattggtggggagaagatgggaagactggacctaggcatatttatcagttcagttgcccctggaggaccagctgacttggatggatgcttgaagccaggagaccgtttgatatctgtgaatagtgtgagtctggagggagtcagccaccatgctgcaattgaaattttgcaaaatgcacctgaagatgtgacacttgttatctctcagccaaaagaaaagatatccaaagtgccttctactcctgtgcatctcaccaatgagatgaaaaactacatgaagaaatcttcctacatgcaagacagtgctatagattcttcttccaaggatcaccactggtcacgtggtaccctgaggcacatctcggagaactcctttgggccatctgggggcctgcgggaaggaagcctgagttctcaagattccaggactgagagtgccagcttgtctcaaagccaggtcaatggtttctttgccagccatttaggtgaccaaacctggcaggaatcacagcatggcagcccttccccatctgtaatatccaaagccaccgagaaagagactttcactgatagtaaccaaagcaaaactaaaaagccaggcatttctgatgtaactgattactcagaccgtggagattcagacatggatgaagccacttactccagcagtcaggatcatcaaacaccaaaacaggaatcttcctcttcagtgaatacatccaacaagatgaattttaaaactttttcttcatcacctcctaagcctggagatatctttgaggttgaactggctaaaaatgataacagcttggggataagtgtcacgggaggtgtgaatacgagtgtcagacatggtggcatttatgtgaaagctgttattccccagggagcagcagagtctgatggtagaattcacaaaggtgatcgcgtcctagctgtcaatggagttagtctagaaggagccacccataagcaagctgtggaaacactgagaaatacaggacaggtggttcatctgttattagaaaagggacaatctccaacatctaaagaacatgtcccggtaaccccacagtgtaccctttcagatcagaatgcccaaggtcaaggcccagaaaaagtgaagaaaacaactcaggtcaaagactacagctttgtcactgaagaaaatacatttgaggtaaaattatttaaaaatagctcaggtctaggattcagtttttctcgagaagataatcttataccggagcaaattaatgccagcatagtaagggttaaaaagctctttcctggacagccagcagcagaaagtggaaaaattgatgtaggagatgttatcttgaaagtgaatggagcctctttgaaaggactatctcagcaggaagtcatatctgctctcaggggaactgctccagaagtattcttgcttctctgcagacctccacctggtgtgctaccggaaattgatactgcgcttttgaccccacttcagtctccagcacaagtacttccaaacagcagtaaagactcttctcagccatcatgtgtggagcaaagcaccagctcagatgaaaatgaaatgtcagacaaaagcaaaaaacagtgcaagtccccatccagaagagacagttacagtgacagcagtgggagtggagaagatgacttagtgacagctccagcaaacatatcaaattcgacctggagttcagctttgcatcagactctaagcaacatggtatcacaggcacagagtcatcatgaagcacccaagagtcaagaagataccatttgtaccatgttttactatcctcagaaaattcccaataaaccagagtttgaggacagtaatccttcccctctaccaccggatatggctcctgggcagagttatcaaccccaatcagaatctgcttcctctagttcgatggataagtatcatatacatcacatttctgaaccaactagacaagaaaactggacacctttgaaaaatgacttggaaaatcaccttgaagactttgaactggaagtagaactcctcattaccctaattaaatcagaaaaaggaagcctgggttttacagtaaccaaaggcaatcagagaattggttgttatgttcatgatgtcatacaggatccagccaaaagtgatggaaggctaaaacctggggaccggctcataaaggttaatgatacagatgttactaatatgactcatacagatgcagttaatctgctccgggctgcatccaaaacagtcagattagttattggacgagttctagaattacccagaataccaatgttgcctcatttgctaccggacataacactaacgtgcaacaaagaggagttgggtttttccttatgtggaggtcatgacagcctttatcaagtggtatatattagtgatattaatccaaggtccgtcgcagccattgagggtaatctccagctattagatgtcatccattatgtgaacggagtcagcacacaaggaatgaccttggaggaagttaacagagcattagacatgtcacttccttcattggtattgaaagcaacaagaaatgatcttccagtggtccccagctcaaagaggtctgctgtttcagctccaaagtcaaccaaaggcaatggttcctacagtgtggggtcttgcagccagcctgccctcactcctaatgattcattctccacggttgctggggaagaaataaatgaaatatcgtaccccaaaggaaaatgttctacttatcagataaagggatcaccaaacttgactctgcccaaagaatcttatatacaagaagatgacatttatgatgattcccaagaagctgaagttatccagtctctgctggatgttgtggatgaggaagcccagaatcttttaaacgaaaataatgcagcaggatactcctgtggtccaggtacattaaagatgaatgggaagttatcagaagagagaacagaagatacagactgcgatggttcacctttacctgagtattttactgaggccaccaaaatgaatggctgtgaagaatattgtgaagaaaaagtaaaaagtgaaagcttaattcagaagccacaagaaaagaagactgatgatgatgaaataacatggggaaatgatgagttgccaatagagagaacaaaccatgaagattctgataaagatcattcctttctgacaaacgatgagctcgctgtactccctgtcgtcaaagtgcttccctctggtaaatacacgggtgccaacttaaaatcagtcattcgagtcctgcggggtttgctagatcaaggaattccttctaaggagctggagaatcttcaagaattaaaacctttggatcagtgtctaattgggcaaactaaggaaaacagaaggaagaacagatataaaaatatacttccctatgatgctacaagagtgcctcttggagatgaaggtggctatatcaatgccagcttcattaagataccagttgggaaagaagagttcgtttacattgcctgccaaggaccactgcctacaactgttggagacttctggcagatgatttgggagcaaaaatccacagtgatagccatgatgactcaagaagtagaaggagaaaaaatcaaatgccagcgctattggcccaacatcctaggcaaaacaacaatggtcagcaacagacttcgactggctcttgtgagaatgcagcagctgaagggctttgtggtgagggcaatgacccttgaagatattcagaccagagaggtgcgccatatttctcatctgaatttcactgcctggccagaccatgatacaccttctcaaccagatgatctgcttacttttatctcctacatgagacacatccacagatcaggcccaatcattacgcactgcagtgctggcattggacgttcagggaccctgatttgcatagatgtggttctgggattaatcagtcaggatcttgattttgacatctctgatttggtgcgctgcatgagactacaaagacacggaatggttcagacagaggatcaatatattttctgctatcaagtcatcctttatgtcctgacacgtcttcaagcagaagaagagcaaaaacagcagcctcagcttctgaagtgacatgaaaagagcctctggatgcatttccatttctctccttaacctccagcagactcctgctctctatccaaaataaagatcacagagcagcaagttcatacaacatgcatgttctcctctatcttagaggggtattcttcttgaaaataaaaaatattgaaatgctgtatttttacagctactttaacctatgataattatttacaaaattttaacactaaccaaacaatgcagatcttagggatgattaaaggcagcatttgatgatagcagacattgttacaaggacatggtgagtctatttttaatgcaccaatcttgtttatagcaaaaatgttttccaatattttaataaagtagttattttataggggatacttgaaaccagtatttaagctttaaatgacagtaatattggcatagaaaaaagtagcaaatgtttactgtatcaatttctaatgtttactatatagaatttcctgtaatatatttatatactttttcatgaaaatggagttatcagttatctgtttgttactgcatcatctgtttgtaatcattatctcactttgtaaataaaaacacaccttaaaacatg

SEQ ID NO: 312 - protein, 2485 aa, Homo sapiens
MHVSLAEALEVRGGPLQEEEIWAVLNQSAESLQELFRKVSLADPAALGFIISPWSLLLLPSGSVSFTDENISNQDLRAFTAPEVLQNQSLTSLSDVEKIHIYSLGMTLYWGADYEVPQSQPIKLGDHLNSILLGMCEDVIYARVSVRTVLDACSAHIRNSNCAPSFSYVKHLVKLVLGNLSGTDQLSCNSEQKPDRSQAIRDRLRGKGLPTGRSSTSDVLDIQKPPLSHQTFLNKGLSKSMGFLSIKDTQDENYFKDILSDNSGREDSENTFSPYQFKTSGPEKKPIPGIDVLSKKKIWASSMDLLCTADRDFSSGETATYRRCHPEAVTVRTSTTPRKKEARYSDGSIALDIFGPQKMDPIYHTRELPTSSAISSALDRIRERQKKLQVLREAMNVEEPVRRYKTYHGDVFSTSSESPSIISSESDFRQVRRSEASKRFESSSGLPGVDETLSQGQSQRPSRQYETPFEGNLINQEIMLKRQEEELMQLQAKMALRQSRLSLYPGDTIKASMLDITRDPLREIALETAMTQRKLRNFFGPEFVKMTIEPFISLDLPRSILTKKGKNEDNRRKVNIMLLNGQRLELTCDTKTICKDVFDMVVAHIGLVEHHLFALATLKDNEYFFVDPDLKLTKVAPEGWKEEPKKKTKATVNFTLFFRIKFFMDDVSLIQHTLTCHQYYLQLRKDILEERMHCDDETSLLLASLALQAEYGDYQPEVHGVSYFRMEHYLPARVMEKLDLSYIKEELPKLHNTYVGASEKETELEFLKVCQRLTEYGVHFHRVHPEKKSQTGILLGVCSKGVLVFEVHNGVRTLVLRFPWRETKKISFSKKKITLQNTSDGIKHGFQTDNSKICQYLLHLCSYQHKFQLQMRARQSNQDAQDIERASFRSLNLQAESVRGFNMGRAISTGSLASSTLNKLAVRPLSVQAEILKRLSCSELSLYQPLQNSSKEKNDKASWEEKPREMSKSYHDLSQASLYPHRKNVIVNMEPPPQTVAELVGKPSHQMSRSDAESLAGVTKLNNSKSVASLNRSPERRKHESDSSSIEDPGQAYVLGMTMHSSGNSSSQVPLKENDVLHKRWSIVSSPEREITLVNLKKDAKYGLGFQIIGGEKMGRLDLGIFISSVAPGGPADLDGCLKPGDRLISVNSVSLEGVSHHAAIEILQNAPEDVTLVISQPKEKISKVPSTPVHLTNEMKNYMKKSSYMQDSAIDSSSKDHHWSRGTLRHISENSFGPSGGLREGSLSSQDSRTESASLSQSQVNGFFASHLGDQTWQESQHGSPSPSVISKATEKETFTDSNQSKTKKPGISDVTDYSDRGDSDMDEATYSSSQDHQTPKQESSSSVNTSNKMNFKTFSSSPPKPGDIFEVELAKNDNSLGISVTGGVNTSVRHGGIYVKAVIPQGAAESDGRIHKGDRVLAVNGVSLEGATHKQAVETLRNTGQVVHLLLEKGQSPTSKEHVPVTPQCTLSDQNAQGQGPEKVKKTTQVKDYSFVTEENTFEVKLFKNSSGLGFSFSREDNLIPEQINASIVRVKKLFPGQPAAESGKIDVGDVILKVNGASLKGLSQQEVISALRGTAPEVFLLLCRPPPGVLPEIDTALLTPLQSPAQVLPNSSKDSSQPSCVEQSTSSDENEMSDKSKKQCKSPSRRDSYSDSSGSGEDDLVTAPANISNSTWSSALHQTLSNMVSQAQSHHEAPKSQEDTICTMFYYPQKIPNKPEFEDSNPSPLPPDMAPGQSYQPQSESASSSSMDKYHIHHISEPTRQENWTPLKNDLENHLEDFELEVELLITLIKSEKGSLGFTVTKGNQRIGCYVHDVIQDPAKSDGRLKPGDRLIKVNDTDVTNMTHTDAVNLLRAASKTVRLVIGRVLELPRIPMLPHLLPDITLTCNKEELGFSLCGGHDSLYQVVYISDINPRSVAAIEGNLQLLDVIHYVNGVSTQGMTLEEVNRALDMSLPSLVLKATRNDLPVVPSSKRSAVSAPKSTKGNGSYSVGSCSQPALTPNDSFSTVAGEEINEISYPKGKCSTYQIKGSPNLTLPKESYIQEDDIYDDSQEAEVIQSLLDVVDEEAQNLLNENNAAGYSCGPGTLKMNGKLSEERTEDTDCDGSPLPEYFTEATKMNGCEEYCEEKVKSESLIQKPQEKKTDDDEITWGNDELPIERTNHEDSDKDHSFLTNDELAVLPVVKVLPSGKYTGANLKSVIRVLRGLLDQGIPSKELENLQELKPLDQCLIGQTKENRRKNRYKNILPYDATRVPLGDEGGYINASFIKIPVGKEEFVYIACQGPLPTTVGDFWQMIWEQKSTVIAMMTQEVEGEKIKCQRYWPNILGKTTMVSNRLRLALVRMQQLKGFVVRAMTLEDIQTREVRHISHLNFTAWPDHDTPSQPDDLLTFISYMRHIHRSGPIITHCSAGIGRSGTLICIDVVLGLISQDLDFDISDLVRCMRLQRHGMVQTEDQYIFCYQVILYVLTRLQAEEEQKQQPQLLK

SEQ ID NO: 313 - DNA, 7546 bp, Homo sapiens
cgtccctgcagccctcgcccggcgctccagtagcaggacccggtctcgggaccagccggtaatatgcacgtgtcactagctgaggccctggaggttcggggtggaccacttcaggaggaagaaatatgggctgtattaaatcaaagtgctgaaagtctccaagaattattcagaaaagtaagcctagctgatcctgctgcccttggcttcatcatttctccatggtctctgctgttgctgccatctggtagtgtgtcatttacagatgaaaatatttccaatcaggatcttcgagcattcactgcaccagaggttcttcaaaatcagtcactaacttctctctcagatgttgaaaagatccacatttattctcttggaatgacactgtattggggggctgattatgaagtgcctcagagccaacctattaagcttggagatcatctcaacagcatactgcttggaatgtgtgaggatgttatttacgctcgagtttctgttcggactgtgctggatgcttgcagtgcccacattaggaatagcaattgtgcaccctcattttcctacgtgaaacacttggtaaaactggttctgggaaatctttctgggacagatcagctttcctgtaacagtgaacaaaagcctgatcgaagccaggctattcgagatcgattgcgaggaaaaggattaccaacaggaagaagctctacttctgatgtactagacatacaaaagcctccactctctcatcagacctttcttaacaaagggcttagtaaatctatgggatttctgtccatcaaagatacacaagatgagaattatttcaaggacattttatcagataattctggacgtgaagattctgaaaatacattctccccttaccagttcaaaactagtggcccagaaaaaaaacccatccctggcattgatgtgctttctaagaagaagatctgggcttcatccatggacttgctttgtacagctgacagagacttctcttcaggagagactgccacatatcgtcgttgtcaccctgaggcagtaacagtgcggacttcaactactcctagaaaaaaggaggcaagatactcagatggaagtatagccttggatatctttggccctcagaaaatggatccaatatatcacactcgagaattgcccacctcctcagcaatatcaagtgctttggaccgaatccgagagagacaaaagaaacttcaggttctgagggaagccatgaatgtagaagaaccagttcgaagatacaaaacttatcatggtgatgtctttagtacctccagtgaaagtccatctattatttcctctgaatcagatttcagacaagtgagaagaagtgaagcctcaaagaggtttgaatccagcagtggtctcccaggggtagatgaaaccttaagtcaaggccagtcacagagaccgagcagacaatatgaaacaccctttgaaggcaacttaattaatcaagagatcatgctaaaacggcaagaggaagaactgatgcagctacaagccaaaatggcccttagacagtctcggttgagcctatatccaggagacacaatcaaagcgtccatgcttgacatcaccagggatccgttaagagaaattgccctagaaacagccatgactcaaagaaaactgaggaatttctttggccctgagtttgtgaaaatgacaattgaaccatttatatctttggatttgccacggtctattcttactaagaaagggaagaatgaggataaccgaaggaaagtaaacataatgcttctgaacgggcaaagactggaactgacctgtgataccaaaactatatgtaaagatgtgtttgatatggttgtggcacatattggcttagtagagcatcatttgtttgctttagctaccctcaaagataatgaatatttctttgttgatcctgacttaaaattaaccaaagtggccccagagggatggaaagaagaaccaaagaaaaagaccaaagccactgttaattttactttgtttttcagaattaaattttttatggatgatgttagtctaatacaacatactctgacgtgtcatcagtattaccttcagcttcgaaaagatattttggaggaaaggatgcactgtgatgatgagacttccttattgctggcatccttggctctccaggctgagtatggagattatcaaccagaggttcatggtgtgtcttactttagaatggagcactatttgcccgccagagtgatggagaaacttgatttatcctatatcaaagaagagttacccaaattgcataatacctatgtgggagcttctgaaaaagagacagagttagaatttttaaaggtctgccaaagactgacagaatatggagttcattttcaccgagtgcaccctgagaagaagtcacaaacaggaatattgcttggagtctgttctaaaggtgtccttgtgtttgaagttcacaatggagtgcgcacattggtccttcgctttccatggagggaaaccaagaaaatatctttttctaaaaagaaaatcacattgcaaaatacatcagatggaataaaacatggcttccagacagacaacagtaagatatgccagtacctgctgcacctctgctcttaccagcataagttccagctacagatgagagcaagacagagcaaccaagatgcccaagatattgatgtgctacacaaaagatggagcatagtatcttcaccagaaagggagatcaccttagtgaacctgaaaaaagatgcaaagtatggcttgggatttcaaattattggtggggagaagatgggaagactggacctaggcatatttatcagttcagttgcccctggaggaccagctgacttggatggatgcttgaagccaggagaccgtttgatatctgtgaatagtgtgagtctggagggagtcagccaccatgctgcaattgaaattttgcaaaatgcacctgaagatgtgacacttgttatctctcagccaaaagaaaagatatccaaagtgccttctactcctgtgcatctcaccaatgagatgaaaaactacatgaagaaatcttcctacatgcaagacagtgctatagattcttcttccaaggatcaccactggtcacgtggtaccctgaggcacatctcggagaactcctttgggccatctgggggcctgcgggaaggaagcctgagttctcaagattccaggactgagagtgccagcttgtctcaaagccaggtcaatggtttctttgccagccatttaggtgaccaaacctggcaggaatcacagcatggcagcccttccccatctgtaatatccaaagccaccgagaaagagactttcactgatagtaaccaaagcaaaactaaaaagccaggcatttctgatgtaactgattactcagaccgtggagattcagacatggatgaagccacttactccagcagtcaggatcatcaaacaccaaaacaggaatcttcctcttcagtgaatacatccaacaagatgaattttaaaactttttcttcatcacctcctaagcctggagatatctttgaggttgaactggctaaaaatgataacagcttggggataagtgtcacgggaggtgtgaatacgagtgtcagacatggtggcatttatgtgaaagctgttattccccagggagcagcagagtctgatggtagaattcacaaaggtgatcgcgtcctagctgtcaatggagttagtctagaaggagccacccataagcaagctgtggaaacactgagaaatacaggacaggtggttcatctgttattagaaaagggacaatctccaacatctaaagaacatgtcccggtaaccccacagtgtaccctttcagatcagaatgcccaaggtcaaggcccagaaaaagtgaagaaaacaactcaggtcaaagactacagctttgtcactgaagaaaatacatttgaggtaaaattatttaaaaatagctcaggtctaggattcagtttttctcgagaagataatcttataccggagcaaattaatgccagcatagtaagggttaaaaagctctttcctggacagccagcagcagaaagtggaaaaattgatgtaggagatgttatcttgaaagtgaatggagcctctttgaaaggactatctcagcaggaagtcatatctgctctcaggggaactgctccagaagtattcttgcttctctgcagacctccacctggtgtgctaccggaaattgatactgcgcttttgaccccacttcagtctccagcacaagtacttccaaacagcagtaaagactcttctcagccatcatgtgtggagcaaagcaccagctcagatgaaaatgaaatgtcagacaaaagcaaaaaacagtgcaagtccccatccagaagagacagttacagtgacagcagtgggagtggagaagatgacttagtgacagctccagcaaacatatcaaattcgacctggagttcagctttgcatcagactctaagcaacatggtatcacaggcacagagtcatcatgaagcacccaagagtcaagaagataccatttgtaccatgttttactatcctcagaaaattcccaataaaccagagtttgaggacagtaatccttcccctctaccaccggatatggctcctgggcagagttatcaaccccaatcagaatctgcttcctctagttcgatggataagtatcatatacatcacatttctgaaccaactagacaagaaaactggacacctttgaaaaatgacttggaaaatcaccttgaagactttgaactggaagtagaactcctcattaccctaattaaatcagaaaaaggaagcctgggttttacagtaaccaaaggcaatcagagaattggttgttatgttcatgatgtcatacaggatccagccaaaagtgatggaaggctaaaacctggggaccggctcataaaggttaatgatacagatgttactaatatgactcatacagatgcagttaatctgctccgggctgcatccaaaacagtcagattagttattggacgagttctagaattacccagaataccaatgttgcctcatttgctaccggacataacactaacgtgcaacaaagaggagttgggtttttccttatgtggaggtcatgacagcctttatcaagtggtatatattagtgatattaatccaaggtccgtcgcagccattgagggtaatctccagctattagatgtcatccattatgtgaacggagtcagcacacaaggaatgaccttggaggaagttaacagagcattagacatgtcacttccttcattggtattgaaagcaacaagaaatgatcttccagtggtccccagctcaaagaggtctgctgtttcagctccaaagtcaaccaaaggcaatggttcctacagtgtggggtcttgcagccagcctgccctcactcctaatgattcattctccacggttgctggggaagaaataaatgaaatatcgtaccccaaaggaaaatgttctacttatcagataaagggatcaccaaacttgactctgcccaaagaatcttatatacaagaagatgacatttatgatgattcccaagaagctgaagttatccagtctctgctggatgttgtggatgaggaagcccagaatcttttaaacgaaaataatgcagcaggatactcctgtggtccaggtacattaaagatgaatgggaagttatcagaagagagaacagaagatacagactgcgatggttcacctttacctgagtattttactgaggccaccaaaatgaatggctgtgaagaatattgtgaagaaaaagtaaaaagtgaaagcttaattcagaagccacaagaaaagaagactgatgatgatgaaataacatggggaaatgatgagttgccaatagagagaacaaaccatgaagattctgataaagatcattcctttctgacaaacgatgagctcgctgtactccctgtcgtcaaagtgcttccctctggtaaatacacgggtgccaacttaaaatcagtcattcgagtcctgcggggtttgctagatcaaggaattccttctaaggagctggagaatcttcaagaattaaaacctttggatcagtgtctaattgggcaaactaaggaaaacagaaggaagaacagatataaaaatatacttccctatgatgctacaagagtgcctcttggagatgaaggtggctatatcaatgccagcttcattaagataccagttgggaaagaagagttcgtttacattgcctgccaaggaccactgcctacaactgttggagacttctggcagatgatttgggagcaaaaatccacagtgatagccatgatgactcaagaagtagaaggagaaaaaatcaaatgccagcgctattggcccaacatcctaggcaaaacaacaatggtcagcaacagacttcgactggctcttgtgagaatgcagcagctgaagggctttgtggtgagggcaatgacccttgaagatattcagaccagagaggtgcgccatatttctcatctgaatttcactgcctggccagaccatgatacaccttctcaaccagatgatctgcttacttttatctcctacatgagacacatccacagatcaggcccaatcattacgcactgcagtgctggcattggacgttcagggaccctgatttgcatagatgtggttctgggattaatcagtcaggatcttgattttgacatctctgatttggtgcgctgcatgagactacaaagacacggaatggttcagacagaggatcaatatattttctgctatcaagtcatcctttatgtcctgacacgtcttcaagcagaagaagagcaaaaacagcagcctcagcttctgaagtgacatgaaaagagcctctggatgcatttccatttctctccttaacctccagcagactcctgctctctatccaaaataaagatcacagagcagcaagttcatacaacatgcatgttctcctctatcttagaggggtattcttcttgaaaataaaaaatattgaaatgctgtatttttacagctactttaacctatgataattatttacaaaattttaacactaaccaaacaatgcagatcttagggatgattaaaggcagcatttgatgatagcagacattgttacaaggacatggtgagtctatttttaatgcaccaatcttgtttatagcaaaaatgttttccaatattttaataaagtagttattttataggggatacttgaaaccagtatttaagctttaaatgacagtaatattggcatagaaaaaagtagcaaatgtttactgtatcaatttctaatgtttactatatagaatttcctgtaatatatttatatactttttcatgaaaatggagttatcagttatctgtttgttactgcatcatctgtttgtaatcattatctcactttgtaaataaaaacacaccttaaaacatg

SEQ ID NO: 314 - protein, 2294 aa, Homo sapiens
MHVSLAEALEVRGGPLQEEEIWAVLNQSAESLQELFRKVSLADPAALGFIISPWSLLLLPSGSVSFTDENISNQDLRAFTAPEVLQNQSLTSLSDVEKIHIYSLGMTLYWGADYEVPQSQPIKLGDHLNSILLGMCEDVIYARVSVRTVLDACSAHIRNSNCAPSFSYVKHLVKLVLGNLSGTDQLSCNSEQKPDRSQAIRDRLRGKGLPTGRSSTSDVLDIQKPPLSHQTFLNKGLSKSMGFLSIKDTQDENYFKDILSDNSGREDSENTFSPYQFKTSGPEKKPIPGIDVLSKKKIWASSMDLLCTADRDFSSGETATYRRCHPEAVTVRTSTTPRKKEARYSDGSIALDIFGPQKMDPIYHTRELPTSSAISSALDRIRERQKKLQVLREAMNVEEPVRRYKTYHGDVFSTSSESPSIISSESDFRQVRRSEASKRFESSSGLPGVDETLSQGQSQRPSRQYETPFEGNLINQEIMLKRQEEELMQLQAKMALRQSRLSLYPGDTIKASMLDITRDPLREIALETAMTQRKLRNFFGPEFVKMTIEPFISLDLPRSILTKKGKNEDNRRKVNIMLLNGQRLELTCDTKTICKDVFDMVVAHIGLVEHHLFALATLKDNEYFFVDPDLKLTKVAPEGWKEEPKKKTKATVNFTLFFRIKFFMDDVSLIQHTLTCHQYYLQLRKDILEERMHCDDETSLLLASLALQAEYGDYQPEVHGVSYFRMEHYLPARVMEKLDLSYIKEELPKLHNTYVGASEKETELEFLKVCQRLTEYGVHFHRVHPEKKSQTGILLGVCSKGVLVFEVHNGVRTLVLRFPWRETKKISFSKKKITLQNTSDGIKHGFQTDNSKICQYLLHLCSYQHKFQLQMRARQSNQDAQDIDVLHKRWSIVSSPEREITLVNLKKDAKYGLGFQIIGGEKMGRLDLGIFISSVAPGGPADLDGCLKPGDRLISVNSVSLEGVSHHAAIEILQNAPEDVTLVISQPKEKISKVPSTPVHLTNEMKNYMKKSSYMQDSAIDSSSKDHHWSRGTLRHISENSFGPSGGLREGSLSSQDSRTESASLSQSQVNGFFASHLGDQTWQESQHGSPSPSVISKATEKETFTDSNQSKTKKPGISDVTDYSDRGDSDMDEATYSSSQDHQTPKQESSSSVNTSNKMNFKTFSSSPPKPGDIFEVELAKNDNSLGISVTGGVNTSVRHGGIYVKAVIPQGAAESDGRIHKGDRVLAVNGVSLEGATHKQAVETLRNTGQVVHLLLEKGQSPTSKEHVPVTPQCTLSDQNAQGQGPEKVKKTTQVKDYSFVTEENTFEVKLFKNSSGLGFSFSREDNLIPEQINASIVRVKKLFPGQPAAESGKIDVGDVILKVNGASLKGLSQQEVISALRGTAPEVFLLLCRPPPGVLPEIDTALLTPLQSPAQVLPNSSKDSSQPSCVEQSTSSDENEMSDKSKKQCKSPSRRDSYSDSSGSGEDDLVTAPANISNSTWSSALHQTLSNMVSQAQSHHEAPKSQEDTICTMFYYPQKIPNKPEFEDSNPSPLPPDMAPGQSYQPQSESASSSSMDKYHIHHISEPTRQENWTPLKNDLENHLEDFELEVELLITLIKSEKGSLGFTVTKGNQRIGCYVHDVIQDPAKSDGRLKPGDRLIKVNDTDVTNMTHTDAVNLLRAASKTVRLVIGRVLELPRIPMLPHLLPDITLTCNKEELGFSLCGGHDSLYQVVYISDINPRSVAAIEGNLQLLDVIHYVNGVSTQGMTLEEVNRALDMSLPSLVLKATRNDLPVVPSSKRSAVSAPKSTKGNGSYSVGSCSQPALTPNDSFSTVAGEEINEISYPKGKCSTYQIKGSPNLTLPKESYIQEDDIYDDSQEAEVIQSLLDVVDEEAQNLLNENNAAGYSCGPGTLKMNGKLSEERTEDTDCDGSPLPEYFTEATKMNGCEEYCEEKVKSESLIQKPQEKKTDDDEITWGNDELPIERTNHEDSDKDHSFLTNDELAVLPVVKVLPSGKYTGANLKSVIRVLRGLLDQGIPSKELENLQELKPLDQCLIGQTKENRRKNRYKNILPYDATRVPLGDEGGYINASFIKIPVGKEEFVYIACQGPLPTTVGDFWQMIWEQKSTVIAMMTQEVEGEKIKCQRYWPNILGKTTMVSNRLRLALVRMQQLKGFVVRAMTLEDIQTREVRHISHLNFTAWPDHDTPSQPDDLLTFISYMRHIHRSGPIITHCSAGIGRSGTLICIDVVLGLISQDLDFDISDLVRCMRLQRHGMVQTEDQYIFCYQVILYVLTRLQAEEEQKQQPQLLK

SEQ ID NO: 315 - DNA, 8133 bp, Homo sapiens
cgtccctgcagccctcgcccggcgctccagtagcaggacccggtctcgggaccagccggtaatatgcacgtgtcactagctgaggccctggaggttcggggtggaccacttcaggaggaagaaatatgggctgtattaaatcaaagtgctgaaagtctccaagaattattcagaaaagtaagcctagctgatcctgctgcccttggcttcatcatttctccatggtctctgctgttgctgccatctggtagtgtgtcatttacagatgaaaatatttccaatcaggatcttcgagcattcactgcaccagaggttcttcaaaatcagtcactaacttctctctcagatgttgaaaagatccacatttattctcttggaatgacactgtattggggggctgattatgaagtgcctcagagccaacctattaagcttggagatcatctcaacagcatactgcttggaatgtgtgaggatgttatttacgctcgagtttctgttcggactgtgctggatgcttgcagtgcccacattaggaatagcaattgtgcaccctcattttcctacgtgaaacacttggtaaaactggttctgggaaatctttctgggacagatcagctttcctgtaacagtgaacaaaagcctgatcgaagccaggctattcgagatcgattgcgaggaaaaggattaccaacaggaagaagctctacttctgatgtactagacatacaaaagcctccactctctcatcagacctttcttaacaaagggcttagtaaatctatgggatttctgtccatcaaagatacacaagatgagaattatttcaaggacattttatcagataattctggacgtgaagattctgaaaatacattctccccttaccagttcaaaactagtggcccagaaaaaaaacccatccctggcattgatgtgctttctaagaagaagatctgggcttcatccatggacttgctttgtacagctgacagagacttctcttcaggagagactgccacatatcgtcgttgtcaccctgaggcagtaacagtgcggacttcaactactcctagaaaaaaggaggcaagatactcagatggaagtatagccttggatatctttggccctcagaaaatggatccaatatatcacactcgagaattgcccacctcctcagcaatatcaagtgctttggaccgaatccgagagagacaaaagaaacttcaggttctgagggaagccatgaatgtagaagaaccagttcgaagatacaaaacttatcatggtgatgtctttagtacctccagtgaaagtccatctattatttcctctgaatcagatttcagacaagtgagaagaagtgaagcctcaaagaggtttgaatccagcagtggtctcccaggggtagatgaaaccttaagtcaaggccagtcacagagaccgagcagacaatatgaaacaccctttgaaggcaacttaattaatcaagagatcatgctaaaacggcaagaggaagaactgatgcagctacaagccaaaatggcccttagacagtctcggttgagcctatatccaggagacacaatcaaagcgtccatgcttgacatcaccagggatccgttaagagaaattgccctagaaacagccatgactcaaagaaaactgaggaatttctttggccctgagtttgtgaaaatgacaattgaaccatttatatctttggatttgccacggtctattcttactaagaaagggaagaatgaggataaccgaaggaaagtaaacataatgcttctgaacgggcaaagactggaactgacctgtgataccaaaactatatgtaaagatgtgtttgatatggttgtggcacatattggcttagtagagcatcatttgtttgctttagctaccctcaaagataatgaatatttctttgttgatcctgacttaaaattaaccaaagtggccccagagggatggaaagaagaaccaaagaaaaagaccaaagccactgttaattttactttgtttttcagaattaaattttttatggatgatgttagtctaatacaacatactctgacgtgtcatcagtattaccttcagcttcgaaaagatattttggaggaaaggatgcactgtgatgatgagacttccttattgctggcatccttggctctccaggctgagtatggagattatcaaccagaggttcatggtgtgtcttactttagaatggagcactatttgcccgccagagtgatggagaaacttgatttatcctatatcaaagaagagttacccaaattgcataatacctatgtgggagcttctgaaaaagagacagagttagaatttttaaaggtctgccaaagactgacagaatatggagttcattttcaccgagtgcaccctgagaagaagtcacaaacaggaatattgcttggagtctgttctaaaggtgtccttgtgtttgaagttcacaatggagtgcgcacattggtccttcgctttccatggagggaaaccaagaaaatatctttttctaaaaagaaaatcacattgcaaaatacatcagatggaataaaacatggcttccagacagacaacagtaagatatgccagtacctgctgcacctctgctcttaccagcataagttccagctacagatgagagcaagacagagcaaccaagatgcccaagatattgagagagcttcgtttaggagcctgaatctccaagcagagtctgttagaggatttaatatgggacgagcaatcagcactggcagtctggccagcagcaccctcaacaaacttgctgttcgacctttatcagttcaagctgagattctgaagaggctatcctgctcagagctgtcgctttaccagccattgcaaaacagttcaaaagagaagaatgacaaagcttcatgggaggaaaagcctagagagatgagtaaatcataccatgatctcagtcaggcctctctctatccacatcggaaaaatgtcattgttaacatggaacccccaccacaaaccgttgcagagttggtgggaaaaccttctcaccagatgtcaagatctgatgcagaatctttggcaggagtgacaaaacttaataattcaaagtctgttgcgagtttaaatagaagtcctgaaaggaggaaacatgaatcagactcctcatccattgaagaccctgggcaagcatatgttctaggaatgactatgcatagttctggaaactcttcatcccaagtacccttaaaagaaaatgatgtgctacacaaaagatggagcatagtatcttcaccagaaagggagatcaccttagtgaacctgaaaaaagatgcaaagtatggcttgggatttcaaattattggtggggagaagatgggaagactggacctaggcatatttatcagttcagttgcccctggaggaccagctgacttggatggatgcttgaagccaggagaccgtttgatatctgtgaatagtgtgagtctggagggagtcagccaccatgctgcaattgaaattttgcaaaatgcacctgaagatgtgacacttgttatctctcagccaaaagaaaagatatccaaagtgccttctactcctgtgcatctcaccaatgagatgaaaaactacatgaagaaatcttcctacatgcaagacagtgctatagattcttcttccaaggatcaccactggtcacgtggtaccctgaggcacatctcggagaactcctttgggccgtctgggggcctgcgggaaggaagcctgagttctcaagattccaggactgagagtgccagcttgtctcaaagccaggtcaatggtttctttgccagccatttaggtgaccaaacctggcaggaatcacagcatggcagcccttccccatctgtaatatccaaagccaccgagaaagagactttcactgatagtaaccaaagcaaaactaaaaagccaggcatttctgatgtaactgattactcagaccgtggagattcagacatggatgaagccacttactccagcagtcaggatcatcaaacaccaaaacaggaatcttcctcttcagtgaatacatccaacaagatgaattttaaaactttttcttcatcacctcctaagcctggagatatctttgaggttgaactggctaaaaatgataacagcttggggataagtgtcacggtactgtttgacaagggaggtgtgaatacgagtgtcagacatggtggcatttatgtgaaagctgttattccccagggagcagcagagtctgatggtagaattcacaaaggtgatcgcgtcctagctgtcaatggagttagtctagaaggagccacccataagcaagctgtggaaacactgagaaatacaggacaggtggttcatctgttattagaaaagggacaatctccaacatctaaagaacatgtcccggtaaccccacagtgtaccctttcagatcagaatgcccaaggtcaaggcccagaaaaagtgaagaaaacaactcaggtcaaagactacagctttgtcactgaagaaaatacatttgaggtaaaattatttaaaaatagctcaggtctaggattcagtttttctcgagaagataatcttataccggagcaaattaatgccagcatagtaagggttaaaaagctctttcctggacagccagcagcagaaagtggaaaaattgatgtaggagatgttatcttgaaagtgaatggagcctctttgaaaggactatctcagcaggaagtcatatctgctctcaggggaactgctccagaagtattcttgcttctctgcagacctccacctggtgtgctaccggaaattgatactgcgcttttgaccccacttcagtctccagcacaagtacttccaaacagcagtaaagactcttctcagccatcatgtgtggagcaaagcaccagctcagatgaaaatgaaatgtcagacaaaagcaaaaaacagtgcaagtccccatccagaagagacagttacagtgacagcagtgggagtggagaagatgacttagtgacagctccagcaaacatatcaaattcgacctggagttcagctttgcatcagactctaagcaacatggtatcacaggcacagagtcatcatgaagcacccaagagtcaagaagataccatttgtaccatgttttactatcctcagaaaattcccaataaaccagagtttgaggacagtaatccttcccctctaccaccggatatggctcctgggcagagttatcaaccccaatcagaatctgcttcctctagttcgatggataagtatcatatacatcacatttctgaaccaactagacaagaaaactggacacctttgaaaaatgacttggaaaatcaccttgaagactttgaactggaagtagaactcctcattaccctaattaaatcagaaaaaggaagcctgggttttacagtaaccaaaggcaatcagagaattggttgttatgttcatgatgtcatacaggatccagccaaaagtgatggaaggctaaaacctggggaccggctcataaaggttaatgatacagatgttactaatatgactcatacagatgcagttaatctgctccgggctgcatccaaaacagtcagattagttattggacgagttctagaattacccagaataccaatgttgcctcatttgctaccggacataacactaacgtgcaacaaagaggagttgggtttttccttatgtggaggtcatgacagcctttatcaagtggtatatattagtgatattaatccaaggtccgtcgcagccattgagggtaatctccagctattagatgtcatccattatgtgaacggagtcagcacacaaggaatgaccttggaggaagttaacagagcattagacatgtcacttccttcattggtattgaaagcaacaagaaatgatcttccagtggtccccagctcaaagaggtctgctgtttcagctccaaagtcaaccaaaggcaatggttcctacagtgtggggtcttgcagccagcctgccctcactcctaatgattcattctccacggttgctggggaagaaataaatgaaatatcgtaccccaaaggaaaatgttctacttatcagataaagggatcaccaaacttgactctgcccaaagaatcttatatacaagaagatgacatttatgatgattcccaagaagctgaagttatccagtctctgctggatgttgtggatgaggaagcccagaatcttttaaacgaaaataatgcagcaggatactcctgtggtccaggtacattaaagatgaatgggaagttatcagaagagagaacagaagatacagactgcgatggttcacctttacctgagtattttactgaggccaccaaaatgaatggctgtgaagaatattgtgaagaaaaagtaaaaagtgaaagcttaattcagaagccacaagaaaagaagactgatgatgatgaaataacatggggaaatgatgagttgccaatagagagaacaaaccatgaagattctgataaagatcattcctttctgacaaacgatgagctcgctgtactccctgtcgtcaaagtgcttccctctggtaaatacacgggtgccaacttaaaatcagtcattcgagtcctgcggggtttgctagatcaaggaattccttctaaggagctggagaatcttcaagaattaaaacctttggatcagtgtctaattgggcaaactaaggaaaacagaaggaagaacagatataaaaatatacttccctatgatgctacaagagtgcctcttggagatgaaggtggctatatcaatgccagcttcattaagataccagttgggaaagaagagttcgtttacattgcctgccaaggaccactgcctacaactgttggagacttctggcagatgatttgggagcaaaaatccacagtgatagccatgatgactcaagaagtagaaggagaaaaaatcaaatgccagcgctattggcccaacatcctaggcaaaacaacaatggtcagcaacagacttcgactggctcttgtgagaatgcagcagctgaagggctttgtggtgagggcaatgacccttgaagatattcagaccagagaggtgcgccatatttctcatctgaatttcactgcctggccagaccatgatacaccttctcaaccagatgatctgcttacttttatctcctacatgagacacatccacagatcaggcccaatcattacgcactgcagtgctggcattggacgttcagggaccctgatttgcatagatgtggttctgggattaatcagtcaggatcttgattttgacatctctgatttggtgcgctgcatgagactacaaagacacggaatggttcagacagaggatcaatatattttctgctatcaagtcatcctttatgtcctgacacgtcttcaagcagaagaagagcaaaaacagcagcctcagcttctgaagtgacatgaaaagagcctctggatgcatttccatttctctccttaacctccagcagactcctgctctctatccaaaataagatcacagagcagcaagttcatacaacatgcatgttctcctctatcttagaggggtattcttcttgaaaataaaaaatattgaaatgctgtatttttacagctactttaacctatgataattatttacaaaattttaacactaaccaaacaatgcagatcttagggatgattaaaggcagcatttgatgatagcagacattgttacaaggacatggtgagtctatttttaatgcaccaatcttgtttatagcaaaaatgttttccaatattttaataaagtagttattttataggggatacttgaaaccagtatttaagctttaaatgacagtaatattggcatagaaaaaagtagcaaatgtttactgtatcaatttctaatgtttactatatagaatttcctgtaatatatttatatactttttcatgaaaatggagttatcagttatctgtttgttactgcatcatctgtttgtaatcattatctcactttgtaaataaaaacacaccttaaaacatg

SEQ ID NO: 316 - protein, 2490 aa, Homo sapiens
MHVSLAEALEVRGGPLQEEEIWAVLNQSAESLQELFRKVSLADPAALGFIISPWSLLLLPSGSVSFTDENISNQDLRAFTAPEVLQNQSLTSLSDVEKIHIYSLGMTLYWGADYEVPQSQPIKLGDHLNSILLGMCEDVIYARVSVRTVLDACSAHIRNSNCAPSFSYVKHLVKLVLGNLSGTDQLSCNSEQKPDRSQAIRDRLRGKGLPTGRSSTSDVLDIQKPPLSHQTFLNKGLSKSMGFLSIKDTQDENYFKDILSDNSGREDSENTFSPYQFKTSGPEKKPIPGIDVLSKKKIWASSMDLLCTADRDFSSGETATYRRCHPEAVTVRTSTTPRKKEARYSDGSIALDIFGPQKMDPIYHTRELPTSSAISSALDRIRERQKKLQVLREAMNVEEPVRRYKTYHGDVFSTSSESPSIISSESDFRQVRRSEASKRFESSSGLPGVDETLSQGQSQRPSRQYETPFEGNLINQEIMLKRQEEELMQLQAKMALRQSRLSLYPGDTIKASMLDITRDPLREIALETAMTQRKLRNFFGPEFVKMTIEPFISLDLPRSILTKKGKNEDNRRKVNIMLLNGQRLELTCDTKTICKDVFDMVVAHIGLVEHHLFALATLKDNEYFFVDPDLKLTKVAPEGWKEEPKKKTKATVNFTLFFRIKFFMDDVSLIQHTLTCHQYYLQLRKDILEERMHCDDETSLLLASLALQAEYGDYQPEVHGVSYFRMEHYLPARVMEKLDLSYIKEELPKLHNTYVGASEKETELEFLKVCQRLTEYGVHFHRVHPEKKSQTGILLGVCSKGVLVFEVHNGVRTLVLRFPWRETKKISFSKKKITLQNTSDGIKHGFQTDNSKICQYLLHLCSYQHKFQLQMRARQSNQDAQDIERASFRSLNLQAESVRGFNMGRAISTGSLASSTLNKLAVRPLSVQAEILKRLSCSELSLYQPLQNSSKEKNDKASWEEKPREMSKSYHDLSQASLYPHRKNVIVNMEPPPQTVAELVGKPSHQMSRSDAESLAGVTKLNNSKSVASLNRSPERRKHESDSSSIEDPGQAYVLGMTMHSSGNSSSQVPLKENDVLHKRWSIVSSPEREITLVNLKKDAKYGLGFQIIGGEKMGRLDLGIFISSVAPGGPADLDGCLKPGDRLISVNSVSLEGVSHHAAIEILQNAPEDVTLVISQPKEKISKVPSTPVHLTNEMKNYMKKSSYMQDSAIDSSSKDHHWSRGTLRHISENSFGPSGGLREGSLSSQDSRTESASLSQSQVNGFFASHLGDQTWQESQHGSPSPSVISKATEKETFTDSNQSKTKKPGISDVTDYSDRGDSDMDEATYSSSQDHQTPKQESSSSVNTSNKMNFKTFSSSPPKPGDIFEVELAKNDNSLGISVTVLFDKGGVNTSVRHGGIYVKAVIPQGAAESDGRIHKGDRVLAVNGVSLEGATHKQAVETLRNTGQVVHLLLEKGQSPTSKEHVPVTPQCTLSDQNAQGQGPEKVKKTTQVKDYSFVTEENTFEVKLFKNSSGLGFSFSREDNLIPEQINASIVRVKKLFPGQPAAESGKIDVGDVILKVNGASLKGLSQQEVISALRGTAPEVFLLLCRPPPGVLPEIDTALLTPLQSPAQVLPNSSKDSSQPSCVEQSTSSDENEMSDKSKKQCKSPSRRDSYSDSSGSGEDDLVTAPANISNSTWSSALHQTLSNMVSQAQSHHEAPKSQEDTICTMFYYPQKIPNKPEFEDSNPSPLPPDMAPGQSYQPQSESASSSSMDKYHIHHISEPTRQENWTPLKNDLENHLEDFELEVELLITLIKSEKGSLGFTVTKGNQRIGCYVHDVIQDPAKSDGRLKPGDRLIKVNDTDVTNMTHTDAVNLLRAASKTVRLVIGRVLELPRIPMLPHLLPDITLTCNKEELGFSLCGGHDSLYQVVYISDINPRSVAAIEGNLQLLDVIHYVNGVSTQGMTLEEVNRALDMSLPSLVLKATRNDLPVVPSSKRSAVSAPKSTKGNGSYSVGSCSQPALTPNDSFSTVAGEEINEISYPKGKCSTYQIKGSPNLTLPKESYIQEDDIYDDSQEAEVIQSLLDVVDEEAQNLLNENNAAGYSCGPGTLKMNGKLSEERTEDTDCDGSPLPEYFTEATKMNGCEEYCEEKVKSESLIQKPQEKKTDDDEITWGNDELPIERTNHEDSDKDHSFLTNDELAVLPVVKVLPSGKYTGANLKSVIRVLRGLLDQGIPSKELENLQELKPLDQCLIGQTKENRRKNRYKNILPYDATRVPLGDEGGYINASFIKIPVGKEEFVYIACQGPLPTTVGDFWQMIWEQKSTVIAMMTQEVEGEKIKCQRYWPNILGKTTMVSNRLRLALVRMQQLKGFVVRAMTLEDIQTREVRHISHLNFTAWPDHDTPSQPDDLLTFISYMRHIHRSGPIITHCSAGIGRSGTLICIDVVLGLISQDLDFDISDLVRCMRLQRHGMVQTEDQYIFCYQVILYVLTRLQAEEEQKQQPQLLK

SEQ ID NO: 317 - DNA, 1134 bp, Homo sapiens
atgagagccaattgttccagcagctcagcctgccctgccaacagttcagaggaggagctgccagtgggactggaggtgcatggaaacctggagctcgttttcacagtggtgtccactgtgatgatggggctgctcatgttctctttgggatgttccgtggagatccggaagctgtggtcgcacatcaggagaccctggggcattgctgtgggactgctctgccagtttgggctcatgccttttacagcttatctcctggccattagcttttctctgaagccagtccaagctattgctgttctcatcatgggctgctgcccggggggcaccatctctaacattttcaccttctgggttgatggagatatggatctcagcatcagtatgacaacctgttccaccgtggccgccctgggaatgatgccactctgcatttatctctacacctggtcctggagtcttcagcagaatctcaccattccttatcagaacataggaattacccttgtgtgcctgaccattcctgtggcctttggtgtctatgtgaattacagatggccaaaacaatccaaaatcattctcaagattggggccgttgttggtggggtcctccttctggtggtcgcagttgctggtgtggtcctggcgaaaggatcttggaattcagacatcacccttctgaccatcagtttcatctttcctttgattggccatgtcacgggttttctgctggcactttttacccaccagtcttggcaaaggtgcaggacaatttccttagaaactggagctcagaatattcagatgtgcatcaccatgctccagttatctttcactgctgagcacttggtccagatgttgagtttcccactggcctatggactcttccagctgatagatggatttcttattgttgcagcatatcagacgtacaagaggagattgaagaacaaacatggaaaaaagaactcaggttgcacagaagtctgccatacgaggaaatcgacttcttccagagagaccaatgccttcttggaggtgaatgaagaaggtgccatcactcctgggccaccagggccaatggattgccacagggctctcgagccagttggccacatcacttcatgtgaatag

SEQ ID NO: 318 - protein, 377 aa, Homo sapiens
MRANCSSSSACPANSSEEELPVGLEVHGNLELVFTVVSTVMMGLLMFSLGCSVEIRKLWSHIRRPWGIAVGLLCQFGLMPFTAYLLAISFSLKPVQAIAVLIMGCCPGGTISNIFTFWVDGDMDLSISMTTCSTVAALGMMPLCIYLYTWSWSLQQNLTIPYQNIGITLVCLTIPVAFGVYVNYRWPKQSKIILKIGAVVGGVLLLVVAVAGVVLAKGSWNSDITLLTISFIFPLIGHVTGFLLALFTHQSWQRCRTISLETGAQNIQMCITMLQLSFTAEHLVQMLSFPLAYGLFQLIDGFLIVAAYQTYKRRLKNKHGKKNSGCTEVCHTRKSTSSRETNAFLEVNEEGAITPGPPGPMDCHRALEPVGHITSCE

SEQ ID NO: 319 - DNA, 845 bp, Homo sapiens
agcggaggcgtgtgcctgcggcgcggccccgaggcgtgtgcgcggccatgtgcgcttagcgcagcgcgctcttacctcagtaccccggccgcgaccctccgagcccctggagcccgggtaaccaggccgccggcgccggctcgcggggacccgccaccctggaagccccgcgcacacagcgcattcctggcgagtcggaggcagggtggggcccaggtaaagtgaacagagttatctgtgacattccatcaggcacctatgtaacgaaatcataccgtaataactcaccatggcgtatggagtgccaagaaagaacacagtgaaaaccattttgcggggcagttgttataatgtacaggaaccttgggatattgcattgcttgcaaagacctggtacacaaacctagccaatatcaagttgcctttcttggaagaaatttcatttggtggttctgtgcagctcacaaaatgtaccaccattaaagatggactgctcccttctgcagaatctatcaaactcgaaagggagtatgaagtgaagcgtctttgtaaactgaagtgtcaagaaaatacatctaaggaaattcagcttctcctgagggaaaggccagccggtttgagaagacctcttccatctaaatgacacctgaagcgcggattgtagatgaagaaactcagcagcgccggcgggaactgcttctcctgggccgcccaggacccgctcccggccccggccgtcgctgcgctgcagccatcctggcccggcccccacctcaggaagcctcccacggcccgcccagagaccgagaaaatctcttaatttcagtggaaaaaaaaaaaaaaaa

SEQ ID NO: 320 - protein, 117 aa, Homo sapiens
MAYGVPRKNTVKTILRGSCYNVQEPWDIALLAKTWYTNLANIKLPFLEEISFGGSVQLTKCTTIKDGLLPSAESIKLEREYEVKRLCKLKCQENTSKEIQLLLRERPAGLRRPLPSK

SEQ ID NO: 321 - DNA, 8192 bp, Homo sapiens
ggcaatttcttttcctttctaactgtggcccgcgttgtgctgttgctgggcaggcgttgggcgccggcggtcttcgagcgtgggggcccgctggctttcccttctcagaaactgcgccgggggcgctcgcttgccccggattcggacgcggcgctccccgggctcgtctgaagtgcagatcgccgcagaggccccagtgcccggatgtccatcaggattagcgcgagccaatacgggccgagcccggggctgcgccgaggacgcccggggctcgagagcaggtagtcccgtaacatcggggcgccgcgccgggacgcgtccccgcccggctccgccaaatggtgagcgcggcgctggcagcagggcccgcggggtgaaggcgctcatggacggaagacccctggctctataagctgaattatggcagcccagtcaagtttgtacaatgacgacagaaacctgcttcgaattagagagaaggaaagacgcaaccaggaagcccaccaagagaaagaggcatttcctgaaaagattcccctttttggagagccctacaagacagcaaaaggtgatgagctgtctagtcgaatacagaacatgttgggaaactacgaagaagtgaaggagttccttagtactaagtctcacactcatcgcctggatgcttctgaaaataggttgggaaagccgaaatatcctttaattcctgacaaagggagcagcattccatccagctccttccacactagtgtccaccaccagtccattcacactcctgcgtctggaccactttctgttggcaacattagccacaatccaaagatggcgcagccaagaactgaaccaatgccaagtctccatgccaaaagctgcggcccaccggacagccagcacctgacccaggatcgccttggtcaggaggggttcggctctagtcatcacaagaaaggtgaccgaagagctgacggagaccactgtgcttcggtgacagattcggctccagagagggagctttctcccttaatctctttgccttccccagttccccctttgtcacctatacattccaaccagcaaactcttccccggacgcaaggaagcagcaaggttcatggcagcagcaataacagtaaaggctattgcccagccaaatctcccaaggacctagcagtgaaagtccatgataaagagacccctcaagacagtttggtggcccctgcccagccgccttctcagacatttccacctccctccctcccctcaaaaagtgttgcaatgcagcagaagcccacggcttatgtccggcccatggatggtcaagatcaggcccctagtgaatcccctgaactgaaaccactgccggaggactatcgacagcagacctttgaaaaaacagacttgaaagtgcctgccaaagccaagctcaccaaactgaagatgccttctcagtcagttgagcagacctactccaatgaagtccattgtgttgaagagattctgaaggaaatgacccattcatggccgcctcctttgacagcaatacatacgcctagtacagctgagccatccaagtttcctttccctacaaaggactctcagcatgtcagttctgtaacccaaaaccaaaaacaatatgatacatcttcaaaaactcactcaaattctcagcaaggaacgtcatccatgctcgaagacgaccttcagctcagtgacagtgaggacagtgacagtgaacaaaccccagagaagcctccctcctcatctgcacctccaagtgctccacagtcccttccagaaccagtggcatcagcacattccagcagtgcagagtcagaaagcaccagtgactcagacagttcctcagactcagagagcgagagcagttcaagtgacagcgaagaaaatgagcccctagaaaccccagctccggagcctgagcctccaacaacaaacaaatggcagctggacaactggctgaccaaagtcagccagccagctgcgccaccagagggccccaggagcacagagcccccacggcggcacccagagagtaagggcagcagcgacagtgccacgagtcaggagcattctgaatccaaagatcctccccctaaaagctccagcaaagccccccgggccccacccgaagccccccaccccggaaagaggagctgtcagaagtctccggcacagcaggagcccccacaaaggcaaaccgttggaaccaaacaacccaaaaaacctgtcaaggcctctgcccgggcaggttcacggaccagcctgcagggggaaagggagccagggcttcttccctatggctcccgagaccagacttccaaagacaagcccaaggtgaagacgaaaggacggccccgggccgcagcaagcaacgaacccaagccagcagtgcccccctccagtgagaagaagaagcacaagagctccctccctgccccctctaaggctctctcaggcccagaacccgcgaaggacaatgtggaggacaggacccctgagcactttgctcttgttcccctgactgagagccagggcccaccccacagtggcagcggcagcaggactagtggctgccgccaagccgtggtggtccaggaggacagccgcaaagacagactcccattgcctttgagagacaccaagctgctctcaccgctcagggacactcctcccccacaaagcttgatggtgaagatcaccctagacctgctctctcggataccccagcctcccgggaaggggagccgccagaggaaagcagaagataaacagccgcccgcagggaagaagcacagctctgagaagaggagctcagacagctcaagcaagttggccaaaaagagaaagggtgaagcagaaagagactgtgataacaagaaaatcagactggagaaggaaatcaaatcacagtcatcttcatcttcatcctcccacaaagaatcttctaaaacaaagccctccaggccctcctcacagtcctcaaagaaggaaatgctccccccgccacccgtgtcctcgtcctcccagaagccagccaagcctgcacttaagaggtcaaggcgggaagcagacacctgtggccaggaccctcccaaaagtgccagcagtaccaagagcaaccacaaagactcttccattcccaagcagagaagagtagaggggaagggctccagaagctcctcggagcacaagggttcttccggagatactgcaaatccttttccagtgccttctttgccaaatggtaactctaaaccagggaagcctcaagtgaagtttgacaaacaacaagcagaccttcacatgagggaggcaaaaaagatgaagcagaaagcagagttaatgacggacagggttggaaaggcttttaagtacctggaagccgtcttgtccttcattgagtgcggaattgccacagagtctgaaagccagtcatccaagtcagcttactctgtctactcagaaactgtagatctcattaaattcataatgtcattaaaatccttctcagatgccacagcgccaacacaagagaaaatatttgctgttttatgcatgcgttgccagtccattttgaacatggcgatgtttcgttgtaaaaaagacatagcaataaagtattctcgtactcttaataaacacttcgagagttcttccaaagtcgcccaggcaccttctccatgcattgcaagcacaggcacaccatcccctctttccccaatgccttctcctgccagctccgtagggtcccagtcaagtgctggcagtgtggggagcagtggggtggctgccactatcagcaccccagtcaccatccagaatatgacatcttcctatgtcaccatcacatcccatgttcttaccgcctttgacctttgggaacaggccgaggccctcacgaggaagaataaagaattctttgctcggctcagcacaaatgtgtgcaccttggccctcaacagcagtttggtggacctggtgcactatacacgacagggttttcagcagctacaagaattaaccaaaacaccttaatggagccccaggttgattcaatgccttgggaactatttttgcacattggaagcctcaaaaacagtccagacgtttgtttcatcaggacaccaaactctaaaaaagaagcaccacgagatggccaggacatttgtccacttaaactctcaacaacagtgtgatcattggttggacactgtggttatgcagaagcagagatgaggaggctggccccagagatgatcttgcccttcctaactaaaggacagaagtgcaatttagcttaaatgggtgtatgaatggtctagaaacatttctattttttttttaaaccagcaggatacaagttgcaaatgaaatgaggagaaacagtttcaactctgaaagtgaatttcacgtcatctcagtagccacgctagtccattcccagaaggaaatttttttttttaacaatgacttttggtaaagggttttgtggatgattttttttcttttgagttttgggagaaatatttgtttaataacttctaatggccatctgtaaaccataagtaatgaaggactccactgtgccccactttctgccaatgaacagtggcttgataataccaagtattgttgtaatttataaaattgaaggcaacccccgctcctgccgcccccaatctccccattgcctagagcgctgcacattgaccccagctctgacttctcattactgtgctgaaagtcagcccacgtcggagcggtgaggaggagccacagcacatggggtgccacctcgaggtctgcacaggaggacttggcgctgccatttcctacccctgccatttcccacccctgcttcagcgaaagggactctctaacagggcagtcactgttgactctattctgaatttcctcccttggggaagaagggaaccaacatttatacctgaccagatggctaaagtgcttttaaagttttgtttaagtagagctggaatttgaggtgctgatctgtggtctacagttatgtggtaactcatgttgtccagccaactcagagtttcgtcagtgaacaagaaacatgaaatctgcttcttagagaggctatatttttctgctacaaatattttatatttatagcaaaactagactttcagagtccttgattgtctaggggaagttaactccctgagaggatgtagagatttggggtggttgattagacttttgaaaaactcatcaccacatgccttcactccagagtgttctcagctagatttgatttggttgaggaggaactgtggccctccgtaagttattgccatagtgtatgcattaaaccaagtccattttgaatgacctaaaatgaagtaacacaatcagaaatcccatgtgcccataagcacagatttttctttttcattgaaactttaaaggttattattggaaacattactttgagtgcagtgtttttaaaagccaattcttttttatcccttttagaagtagaatttgcacacttactacaattgaggagtgtcatctctataactttttctccgcctttgtcccattctgcccctggacatgtttcctaccaagcatgtttcacattttcctattagtggaggagggagaaccatatttatttataatgaagacatctaagatccctatgatgaatgcaggaactctcttggtagtttgtaaatacacaaagggatgtgtcgagggatgggagcgatgcttatctctcacagtgtgagtggtctgtgtgaggctgttccttcagttcttctccagactgttctttggttgtcacttaagtcagaggtctggtccctcatgtttaggtgaaagccagagaatgacagctgtagtcatatctgagcataagaccttgatgtgtgattcctgatgaccggtttcatttattcatgtaataaagcaaaggccctggtcctttttaaactactagttttaaaaacctgtgttaaatgaacagtaattgcctggtaggtttggtgtgtgtgtagcattgtgtgtccatctgttatatgtaaaggacaaggcaccagaatcaggctttatttcgatattgaagatgttatttaacatctttcttttttccttactcccttagccatcccctccccttttgtcctatcattccctagaacaagccacctgtcaattgtgaagggttgtgttctttatggcaggttctatgcagattgtgccagagcatgtgcgtgttctgttggcaagccacagtgctcccttgactgaagacatttccaggtagatttctcagccagctctaaaacagattgctttttcagtggccttactctttgtgggtttttttttttctctgaacttgatataaagattttatttgtcccttgaaaaagtaacaaatgtgcatagatcaatttgtactactttggtcattggatatttctgatccttattgcattgtacctaaaggagagtaactaatggtaacctttttaatagagtatgtgaaaggtagtggctgatgaatccttaacgttcatagggtctttttgctgttacggttgtatatagaggtctgaaggatttttaaaatgatttgcactttttcactgcatgcttacaattcccaaaggcaaaatctgtactgaggtagatcatttgaaagggctagattataaaattaagccttagagtatggaaagttcttataacaataatagtacacacttcagagtaagacaaatgcaaagcatcttaaggagtgaaaatagagtctaaatcttgcctttggcactacaaggtgtgtgtgtgtgtgtgtgttgtgtgtctttagtaggaaatggaagaacactgttttattttttaaagtgtttaatgtttctgtcctttctgtgaattattgaatttaagagccctgctaaataatgaaaaaacactttactaaaatttatcaaattatactgggttcggattgtgaaaacattggccacctagtagcagtggtgaggagtgggagggcccagcaagcatttatcagaaatagaatcacaataggaggagaatttggctgtctgatattatgatttgattacaatactgaatgggaaaagtatctaatattttgtaacaaaaagaccttcatattatctgttttgaccaaaatatgtagctatttcccttacacagattggaccgcacttatctcccttgtcctgtatcctttaatttcaggtctcaggatgtttagaaagctaaaaccccctacccctttctggctgaaaacttgccttatttggtatcttacacattaatgttactagcatcaggagcttactgttttattatgattcatcttcagtaatttttagaagcaagaagaaagccattgtgtcctctacaattaacaaaacttatctctgatatacaaagggatataaatatatacacttaaatagagaaaaagaggttgattgaattgtgcctttgagtgaacccagtttttaaataccgctgtgtttgtttcgccatggcttcagggatgctacatggctcttgcaccttttactcctctgctttatgaagtttgagttgtatttgtgcatcttaaagtaggttgaggcttgaggctgggctttcgggtttttttgttttttgttttgttttgttttgttttgttttcttgtacttaaacctgcttgcttcctaccacagattctttattttcccaaacactacaaaaaaacttttaaaactttgccatttcatctgtttacactctttgccactgattagcagtatttaaatcttgcaagaatattttgtgctttctttagaaacacaagagtatagatttttctcactgaaaagtgagagttacgcattgcagccatgaagggatgctaggatcaattatggcagtaccttttttcccctcctgttcttgagccagttgtctcttttgttttgggtcccacttaggattaacggatgtaaggtattttcctgtgcctttattttgtgtcattctattggaaggaggtgtaacggcagaatagcatcgtgttgggggttttccttcaaacactgcaagtgatattgccaccatgtgaacctcaaatatgcaatccagttgtgttggtttctcggtgact

SEQ ID NO: 322 - protein, 1210 aa, Homo sapiens
MAAQSSLYNDDRNLLRIREKERRNQEAHQEKEAFPEKIPLFGEPYKTAKGDELSSRIQNMLGNYEEVKEFLSTKSHTHRLDASENRLGKPKYPLIPDKGSSIPSSSFHTSVHHQSIHTPASGPLSVGNISHNPKMAQPRTEPMPSLHAKSCGPPDSQHLTQDRLGQEGFGSSHHKKGDRRADGDHCASVTDSAPERELSPLISLPSPVPPLSPIHSNQQTLPRTQGSSKVHGSSNNSKGYCPAKSPKDLAVKVHDKETPQDSLVAPAQPPSQTFPPPSLPSKSVAMQQKPTAYVRPMDGQDQAPSESPELKPLPEDYRQQTFEKTDLKVPAKAKLTKLKMPSQSVEQTYSNEVHCVEEILKEMTHSWPPPLTAIHTPSTAEPSKFPFPTKDSQHVSSVTQNQKQYDTSSKTHSNSQQGTSSMLEDDLQLSDSEDSDSEQTPEKPPSSSAPPSAPQSLPEPVASAHSSSAESESTSDSDSSSDSESESSSSDSEENEPLETPAPEPEPPTTNKWQLDNWLTKVSQPAAPPEGPRSTEPPRRHPESKGSSDSATSQEHSESKDPPPKSSSKAPRAPPEAPHPGKRSCQKSPAQQEPPQRQTVGTKQPKKPVKASARAGSRTSLQGEREPGLLPYGSRDQTSKDKPKVKTKGRPRAAASNEPKPAVPPSSEKKKHKSSLPAPSKALSGPEPAKDNVEDRTPEHFALVPLTESQGPPHSGSGSRTSGCRQAVVVQEDSRKDRLPLPLRDTKLLSPLRDTPPPQSLMVKITLDLLSRIPQPPGKGSRQRKAEDKQPPAGKKHSSEKRSSDSSSKLAKKRKGEAERDCDNKKIRLEKEIKSQSSSSSSSHKESSKTKPSRPSSQSSKKEMLPPPPVSSSSQKPAKPALKRSRREADTCGQDPPKSASSTKSNHKDSSIPKQRRVEGKGSRSSSEHKGSSGDTANPFPVPSLPNGNSKPGKPQVKFDKQQADLHMREAKKMKQKAELMTDRVGKAFKYLEAVLSFIECGIATESESQSSKSAYSVYSETVDLIKFIMSLKSFSDATAPTQEKIFAVLCMRCQSILNMAMFRCKKDIAIKYSRTLNKHFESSSKVAQAPSPCIASTGTPSPLSPMPSPASSVGSQSSAGSVGSSGVAATISTPVTIQNMTSSYVTITSHVLTAFDLWEQAEALTRKNKEFFARLSTNVCTLALNSSLVDLVHYTRQGFQQLQELTKTP

SEQ ID NO: 323 - DNA, 4576 bp, Homo sapiens
cgcgcggggttggtgaggttccgctgagggcggccggggctctgggagcgtggtaacgtggctgcaaccttagcgacatcaggaagaacagggtcgaggatcgagtcacagcaaactgtacaatggcagttgagtgggttttgaaaaacgtctgaattgtagtgtctacatctaccttctgccttctctctaccctttgaaaaaaaataaatggcatgtttgagaagagagctctattaaaagaggaatattgcaaatggcttcagattctatgagtagtaaacaagctaggaatcacattacaaaggggaaaaggcaacaacagcaccagcaaataaagaacagatcctcaattagtgatggtgatggagaagattcctttatttttgaagcaaatgaagcttggaaagattttcatggttctcttcttcgattttatgaaaatggagaactctgtgatgtcacactcaaggttggctcaaagctaatctcttgtcacaagctggtattggcttgtgttattccctactttagagccatgtttctttctgaaatggctgaagccaagcaaacgctgattgagattagagattttgatggtgatgcaatagaagacttggtaaagtttgtctattcttcacggctcactttgactgttgacaatgtccagcctctcttatatgcagcctgtattctgcaggttgaactggtggctagagcttgttgtgaatacatgaagttacattttcatccctccaattgcctggcagtaagagcctttgcagaaagtcacaatcgaatagacttaatggacatggcggatcagtatgcctgtgaccattttactgaagtagtggagtgtgaagactttgtaagtgtatcaccgcagcacctccataagcttttgtcctccagtgatctaaatattgaaaatgaaaagcaggtctataatgctgccatcaagtggcttcttgccaatcctcagcatcattccaaatggttggatgaaacacttgcacaggttcgcctgccattgttgccggttgattttcttatgggtgttgtggcaaaagaacagattgtcaagcaaaatctaaaatgtagagatttactggatgaagcaagaaattaccaccttcacttgagtagcagagcagtacctgactttgaatactccattcggactaccccaaggaagcatactgctggtgtgctgttttgtgtaggtggtcgaggtggatctggtgacccctttcgcagtattgaatgctattctatcaacaaaaacagttggttctttggaccagaaatgaatagtcgaaggcgacatgtgggtgtaatctctgtggaaggtaaagtgtatgcagtaggtggacatgatggaaatgaacatttagggagtatggagatgtttgatcctctcactaataaatggatgatgaaggcatcaatgaacacaaagaggcgaggaattgccttggcttccttaggaggcccaatttatgcaattggagggttagatgacaatacttgcttcaatgatgtggagagatatgacatagaatctgatcagtggagtacagtggcaccaatgaatactccccgtggaggagttggctctgttgctctagtaaaccatgtttatgcagtaggtggcaatgatggaatggcttctttatctagcgtggagagatatgatccacatctggataagtggatagaagttaaagaaatgggtcagcgaagagcaggcaatggagttagcaagcttcatggttgcttatacgtagttggtggttttgatgataattctcctctgagttcagttgagcggtatgacccccgaagcaacaagtgggattatgtggcagcacttactactcccagaggtggagtgggaatcgcaacagtgatgggcaaaatctttgcagttggtggtcataatggcaatgcatacttaaatacagtagaagcgtttgatccagtgctgaataggtgggagcttgttggatctgtgtctcactgcagagctggagcaggagtagctgtgtgttcctgtttaactagccaaattcgagatgtaggtcatggatccaataatgtggttgactgtatgtgatttgagttctggccaccaacaatttagtcatatctgataggtacaaaagaaaaccaagattttgatatgaccacctttcaacactttttactgcaactagagtcttatttaaatgttaactgttgtattgtgactaagtacaacttttggaatgatacctgaagaattattagtaatagagttaaatttgatacttcctgcttttgcaaataatggagtagggaagaagatagtcgaacttaaaatcatacctaccctgaaaaatgcttaaagtagtgccaaaaatcttgaaatctctctctctctctctatttggatgaatcaaaatgtaatttgttgagttttgccttttcttttgcctaaagatgttaacgtcaggcagtgggtttttcctagaggagagattagtacctattcattaacacaaggatacataagagacttgccccttttgaagatcatttctacttggtgctgatgaatttatgcctagctttttttttctaggtggtgatttttcaatttcttttatatttacggaagtagaaaaaatgttctgtctttttgaatgccacttagctgcattttcagaagcttataggctataagaagcctttaatttcagtttgaattgctaggacaccaaaagacctagctgggctaactccatccaaatgattttacagttttattttttcatcttttgcaaaaagtatttgttacataatcaaaaggtgaaccagaggaaatattgaacaaggttttagatctgatgttattctggtgcccaattgagagaccttgagaaagaatgatgcagattacatgactctaatgtgggcagtctgaaaatatctttaactgtcttctttgatcatttgattttggatccaagatttatcatctctctattttgctatttgccaccatcctggtttttctgactgtacagaatcaatctgcatttatttattatcagaaatgaatgcatttttacaaaaacctttttgtagactgtagtttattgattagttcaagcccatcacgaactaattaaacatattgttggtaaaaacagagattgaaattactgtttttatcatatttaaatccctctggtgtatttattgaaatttaattaaaaatatttctacatattgatttgaagccaggatattgatggacctacagatttaacagctcttcaaagttttaactagcattataaaatggcctattcattatatgtatatttttttataaatatttatcaagaacatgaaaatattttattttgtatttgcagtgcagtttggcacctctcttccaggccttcctaagtttttgttagttgtgtcttcgaatttattgtagttcaccgctggtcagtaatctggttcataaggaagctggggcagtgaaaaacacttcgttgatccatccagccctaaagttcattgactaatagctcatgcatcttattaaatgggattctggacttctacaatagtgtggaaagccacatcacaaaaaaagccacatcacaaaaaaaagccagtgcctattgagtatatcaaaccaaaaaagaaaaaaaaaagttttaagaggggtcaggctggcagataaaagtctcttatgaagcagatataaatccagtaagctatttttttctacctatgggcaagttcataagtcattgctggatctgaaccagtgttcttttgtgtaagtacaaccatatttcagtcagtccagaggcagttaaccctgtagcacttactagactggtgacaactggctggatgtggagaataagtgtcaaaacctggcttcaatgtctatttcttatgtctaatggagttcttatattacagtgtttgtttagctatggttactaatatgtttgttatatttattttcggggagaggatcttgttattgtttcctgagattatttaaaatgttttttctttgatgtatttctgtctttcttatatgtaaggagttataagggttattatattttcatttctggtttttactatacaatggttatctaacatactaagttggtaccctacctacccgtaaaatatgaaatactcagaagtaaagtgtgtgggcaatcagaagcatagccttgaaggacctgacagcagtatgaaaagataaataggccaggcatggtggctcacgcctgtgatcccagcactttgggaggccgaggtgggtggaccacctgagatcaggtgttcaagaccagcctgaccaacatggtgaaaccctgtctctactaaaagtacaaaaattagccaggcgtggtggcgcatacctgtaattccagctactcaggaggctgaggcaggagaattgcttgaacccaggaggtggaggttgcaatgagccgaggttgagccatcgcactccagcggtgaaacaagagtgaaactccatctc

SEQ ID NO: 324 - protein, 620 aa, Homo sapiens
MASDSMSSKQARNHITKGKRQQQHQQIKNRSSISDGDGEDSFIFEANEAWKDFHGSLLRFYENGELCDVTLKVGSKLISCHKLVLACVIPYFRAMFLSEMAEAKQTLIEIRDFDGDAIEDLVKFVYSSRLTLTVDNVQPLLYAACILQVELVARACCEYMKLHFHPSNCLAVRAFAESHNRIDLMDMADQYACDHFTEVVECEDFVSVSPQHLHKLLSSSDLNIENEKQVYNAAIKWLLANPQHHSKWLDETLAQVRLPLLPVDFLMGVVAKEQIVKQNLKCRDLLDEARNYHLHLSSRAVPDFEYSIRTTPRKHTAGVLFCVGGRGGSGDPFRSIECYSINKNSWFFGPEMNSRRRHVGVISVEGKVYAVGGHDGNEHLGSMEMFDPLTNKWMMKASMNTKRRGIALASLGGPIYAIGGLDDNTCFNDVERYDIESDQWSTVAPMNTPRGGVGSVALVNHVYAVGGNDGMASLSSVERYDPHLDKWIEVKEMGQRRAGNGVSKLHGCLYVVGGFDDNSPLSSVERYDPRSNKWDYVAALTTPRGGVGIATVMGKIFAVGGHNGNAYLNTVEAFDPVLNRWELVGSVSHCRAGAGVAVCSCLTSQIRDVGHGSNNVVDCM

SEQ ID NO: 325 - DNA, 2377 bp, Homo sapiens
gactacacaaggactgaaccagaaggaagaggacagagcaaagccatgaacatcatcctagaaatccttctgcttctgatcaccatcatctactcctacttggagtcgttggtgaagtttttcattcctcagaggagaaaatctgtggctggggagattgttctcattactggagctgggcatggaataggcaggcagactacttatgaatttgcaaaacgacagagcatattggttctgtgggatattaataagcgcggtgtggaggaaactgcagctgagtgccgaaaactaggcgtcactgcgcatgcgtatgtggtagactgcagcaacagagaagagatctatcgctctctaaatcaggtgaagaaagaagtgggtgatgtaacaatcgtggtgaataatgctgggacagtatatccagccgatcttctcagcaccaaggatgaagagattaccaagacatttgaggtcaacatcctaggacatttttggatcacaaaagcacttcttccatcgatgatggagagaaatcatggccacatcgtcacagtggcttcagtgtgcggccacgaagggattccttacctcatcccatattgttccagcaaatttgccgctgttggctttcacagaggtctgacatcagaacttcaggccttgggaaaaactggtatcaaaacctcatgtctctgcccagtttttgtgaatactgggttcaccaaaaatccaagcacaagattatggcctgtattggagacagatgaagtcgtaagaagtctgatagatggaatacttaccaataagaaaatgatttttgtttcatcgtatatcaatatctttctgagactacagaagtttcttcctgaacgcgcctcagcgattttaaatcgtatgcaaaatattcaatttgaagcagtggttggccacaaaatcaaaatgaaatgaataaataagctccagccagagatgtatgcatgataatgatatgaatagtttcgaatcaatgctgcaaagctttatttcacattttttcagtcctgataatattaaaaacattggtttggcactagcagcagtcaaacgaacaagattaattacctgtcttcctgtttctcaagaatatttacgtagtttttcataggtctgtttttcctttcatgcctcttaaaaacttctgtgcttacataaacatacttaaaaggttttctttaagatattttatttttccatttaaaggtggacaaaagctacctccctaaaagtaaatacaaagagaacttatttacacagggaaggtttaagactgttcaagtagcattccaatctgtagccatgccacagaatatcaacaagaacacagaatgagtgcacagctaagagatcaagtttcagcaggcagctttatctcaacctggacatattttaagattcagcatttgaaagatttccctagcctcttcctttttcattagcccaaaacggtgcaactctattctggactttattacttgattctgtcttctgtataactctgaagtccaccaaaagtggaccctctatatttcctccctttttatagtcttataagatacattatgaaaggtgaccgactctattttaaatctcagaattttaagttctagccccatgataacctttttctttgtaatttatgctttcatatatccttggtcccagagatgtttagacaattttaggctcaaaaattaaagctaacacaggaaaaggaactgtactggctattacataagaaacaatggacccaagagaagaaaaggaagaaagaaaggttttttggtttttgttttgttttgttttgttttttgtttttttgagatggagtctcactctttcgcccaggctggagtgcagtggtatgatctcagctcactgcaagctccacctcccgggttcacgccattctcctgcctcagcctcctgagtagctgggactacaggcgcccgccaccacacccggctaattttttgtattttttgtagagacggggtttcaccatgttagccaagatggtctcgatctcctgacctcgtgatccacctgcctcggcctcccaaagtgctgggattacgggtgtgagccaccgtgcccagcctttttttttttaatagaaaaaataatccgactcccactacatcaagactaatcttgttttgtgtgtttttcacatgtattatagaatgcttttgcatggactatcctcttgtttttattaaaaacaaatgatttttttaaaagtcacaaaaacaattcactaaaaataaatatgtcattgtgctttaaaaaaataacctcttgtagttataaaataaaacgtttgacttctaaactctg

SEQ ID NO: 326 - protein, 300 aa, Homo sapiens
MNIILEILLLLITIIYSYLESLVKFFIPQRRKSVAGEIVLITGAGHGIGRQTTYEFAKRQSILVLWDINKRGVEETAAECRKLGVTAHAYVVDCSNREEIYRSLNQVKKEVGDVTIVVNNAGTVYPADLLSTKDEEITKTFEVNILGHFWITKALLPSMMERNHGHIVTVASVCGHEGIPYLIPYCSSKFAAVGFHRGLTSELQALGKTGIKTSCLCPVFVNTGFTKNPSTRLWPVLETDEVVRSLIDGILTNKKMIFVSSYINIFLRLQKFLPERASAILNRMQNIQFEAVVGHKIKMK

SEQ ID NO: 327 - DNA, 1701 bp, Homo sapiens
ctctcgcccctactctttctggtgttagatcgagctaccctctaaaagcagtttagagtggtaaaaaaaaaaaaaaacacaccaaacgctcgcagccacaaaagggatgaaatttcttctggacatcctcctgcttctcccgttactgatcgtctgctccctagagtccttcgtgaagctttttattcctaagaggagaaaatcagtcaccggcgaaatcgtgctgattacaggagctgggcatggaattgggagactgactgcctatgaatttgctaaacttaaaagcaagctggttctctgggatataaataagcatggactggaggaaacagctgccaaatgcaagggactgggtgccaaggttcatacctttgtggtagactgcagcaaccgagaagatatttacagctctgcaaagaaggtgaaggcagaaattggagatgttagtattttagtaaataatgctggtgtagtctatacatcagatttgtttgctacacaagatcctcagattgaaaagacttttgaagttaatgtacttgcacatttctggactacaaaggcatttcttcctgcaatgacgaagaataaccatggccatattgtcactgtggcttcggcagctggacatgtctcggtccccttcttactggcttactgttcaagcaagtttgctgctgttggatttcataaaactttgacagatgaactggctgccttacaaataactggagtcaaaacaacatgtctgtgtcctaatttcgtaaacactggcttcatcaaaaatccaagtacaagtttgggacccactctggaacctgaggaagtggtaaacaggctgatgcatgggattctgactgagcagaagatgatttttattccatcttctatagcttttttaacaacattggaaaggatccttcctgagcgtttcctggcagttttaaaacgaaaaatcagtgttaagtttgatgcagttattggatataaaatgaaagcgcaataagcacctagttttctgaaaactgatttaccaggtttaggttgatgtcatctaatagtgccagaattttaatgtttgaacttctgttttttctaattatccccatttcttcaatatcatttttgaggctttggcagtcttcatttactaccacttgttctttagccaaaagctgattacatatgatataaacagagaaatacctttagaggtgactttaaggaaaatgaagaaaaagaaccaaaatgactttattaaaataatttccaagattatttgtggctcacctgaaggctttgcaaaatttgtaccataaccgtttatttaacatatatttttatttttgattgcacttaaattttgtataatttgtgtttctttttctgttctacataaaatcagaaacttcaagctctctaaataaaatgaaggactatatctagtggtatttcacaatgaatatcatgaactctcaatgggtaggtttcatcctacccattgccactctgtttcctgagagatacctcacattccaatgccaaacatttctgcacagggaagctagaggtggatacacgtgttgcaagtataaaagcatcactgggatttaaggagaattgagagaatgtacccacaaatggcagcaataataaatggatcacacttaaaaaaaaaaaaaaaaaaaaaaaaaaaaa

SEQ ID NO: 328 - protein, 300 aa, Homo sapiens
MKFLLDILLLLPLLIVCSLESFVKLFIPKRRKSVTGEIVLITGAGHGIGRLTAYEFAKLKSKLVLWDINKHGLEETAAKCKGLGAKVHTFVVDCSNREDIYSSAKKVKAEIGDVSILVNNAGVVYTSDLFATQDPQIEKTFEVNVLAHFWTTKAFLPAMTKNNHGHIVTVASAAGHVSVPFLLAYCSSKFAAVGFHKTLTDELAALQITGVKTTCLCPNFVNTGFIKNPSTSLGPTLEPEEVVNRLMHGILTEQKMIFIPSSIAFLTTLERILPERFLAVLKRKISVKFDAVIGYKMKAQ

SEQ ID NO: 329 - DNA, 1716 bp, Homo sapiens
cgtaaagcgccattacgcagagagaaagttacgaggttcgtggccgcggtttccccaggcagctggcgctggaggcttcggcgtcacgtgctggtctggatttttctcgatgcactggggaaagcggtggactcttatcgtgggagggctcttgatctgtgatttatagataggcacagctactcccgttcgggaacccaacggcagacaggtcctagtgcccatcagatacccgcggccgggactcggagctgtggggtgtggggaggcggaggcaccaactaagagcgacctagcatcgcaaagccgccctcggggcgctcatggcgggacgcctcctgggaaaggctttagccgcggtgtctctctctctggccttggcctctgtgactatcaggtcctcgcgctgccgcggcatccaggcgttcagaaactcgttttcatcttcttggtttcatcttaataccaacgtcatgtctggttctaatggttccaaagaaaattctcacaataaggctcggacgtctccttacccaggttcaaaagttgaacgaagccaggttcctaatgagaaagtgggctggcttgttgagtggcaagactataagcctgtggaatacactgcagtctctgtcttggctggacccaggtgggcagatcctcagatcagtgaaagtaatttttctcccaagtttaacgaaaaggatgggcatgttgagagaaagagcaagaatggcctgtatgagattgaaaatggaagaccgagaaatcctgcaggacggactggactggtgggccgggggcttttggggcgatggggcccaaatcacgctgcagatcccattataaccagatggaaaagggatagcagtggaaataaaatcatgcatcctgtttctgggaagcatatcttacaatttgttgcaataaaaaggaaagactgtggagaatgggcaatcccaggggggatggtggatccaggagagaagattagtgccacactgaaaagagaatttggtgaggaagctctcaactccttacagaaaaccagtgctgagaagagagaaatagaggaaaagttgcacaaactcttcagccaagaccacctagtgatatataagggatatgttgatgatcctcgaaacactgataatgcatggatggagacagaagctgtgaactaccatgacgaaacaggtgagataatggataatcttatgctagaagctggagatgatgctggaaaagtgaaatgggtggacatcaatgataaactgaagctttatgccagtcactctcaattcatcaaacttgtggctgagaaacgagatgcacactggagcgaggactctgaagctgactgccatgcgttgtagctgatggtctccgtgtaagccaaaggcccacagaggagcatatactgaaaagaaggcagtatcacagaatttatactataaaaagggcagggtaggccacttggcctatttactttcaaaacaatttgcatttagagtgtttcgcatcagaataacatgagtaagatgaactggaacacaaaattttcagctctttggtcaaaaggaatataagtaatcatattttgtatgtattcgatttaagcatggcttaaattaaatttaaacaactaatgctctttgaagaatcataatcagaataaagataaattcttgatcagctataaaaaaaaaaaaaaaa

SEQ ID NO: 330 - protein, 350 aa, Homo sapiens
MAGRLLGKALAAVSLSLALASVTIRSSRCRGIQAFRNSFSSSWFHLNTNVMSGSNGSKENSHNKARTSPYPGSKVERSQVPNEKVGWLVEWQDYKPVEYTAVSVLAGPRWADPQISESNFSPKFNEKDGHVERKSKNGLYEIENGRPRNPAGRTGLVGRGLLGRWGPNHAADPIITRWKRDSSGNKIMHPVSGKHILQFVAIKRKDCGEWAIPGGMVDPGEKISATLKREFGEEALNSLQKTSAEKREIEEKLHKLFSQDHLVIYKGYVDDPRNTDNAWMETEAVNYHDETGEIMDNLMLEAGDDAGKVKWVDINDKLKLYASHSQFIKLVAEKRDAHWSEDSEADCHAL

SEQ ID NO: 331 - DNA, 1379 bp, Homo sapiens
cgtaaagcgccattacgcagagagaaagttacgaggttcgtggccgcggtttccccaggcagctggcgctggaggcttcggcgtcacgtgctgaaactcgttttcatcttcttggtttcatcttaataccaacgtcatgtctggttctaatggttccaaagaaaattctcacaataaggctcggacgtctccttacccaggttcaaaagttgaacgaagccaggttcctaatgagaaagtgggctggcttgttgagtggcaagactataagcctgtggaatacactgcagtctctgtcttggctggacccaggtgggcagatcctcagatcagtgaaagtaatttttctcccaagtttaacgaaaaggatgggcatgttgagagaaagagcaagaatggcctgtatgagattgaaaatggaagaccgagaaatcctgcaggacggactggactggtgggccgggggcttttggggcgatggggcccaaatcacgctgcagatcccattataaccagatggaaaagggatagcagtggaaataaaatcatgcatcctgtttctgggaagcatatcttacaatttgttgcaataaaaaggaaagactgtggagaatgggcaatcccaggggggatggtggatccaggagagaagattagtgccacactgaaaagagaatttggtgaggaagctctcaactccttacagaaaaccagtgctgagaagagagaaatagaggaaaagttgcacaaactcttcagccaagaccacctagtgatatataagggatatgttgatgatcctcgaaacactgataatgcatggatggagacagaagctgtgaactaccatgacgaaacaggtgagataatggataatcttatgctagaagctggagatgatgctggaaaagtgaaatgggtggacatcaatgataaactgaagctttatgccagtcactctcaattcatcaaacttgtggctgagaaacgagatgcacactggagcgaggactctgaagctgactgccatgcgttgtagctgatggtctccgtgtaagccaaaggcccacagaggagcatatactgaaaagaaggcagtatcacagaatttatactataaaaagggcagggtaggccacttggcctatttactttcaaaacaatttgcatttagagtgtttcgcatcagaataacatgagtaagatgaactggaacacaaaattttcagctctttggtcaaaaggaatataagtaatcatattttgtatgtattcgatttaagcatggcttaaattaaatttaaacaactaatgctctttgaagaatcataatcagaataaagataaattcttgatcagctataaaaaaaaaaaaaaaa

SEQ ID NO: 332 - protein, 300 aa, Homo sapiens
MSGSNGSKENSHNKARTSPYPGSKVERSQVPNEKVGWLVEWQDYKPVEYTAVSVLAGPRWADPQISESNFSPKFNEKDGHVERKSKNGLYEIENGRPRNPAGRTGLVGRGLLGRWGPNHAADPIITRWKRDSSGNKIMHPVSGKHILQFVAIKRKDCGEWAIPGGMVDPGEKISATLKREFGEEALNSLQKTSAEKREIEEKLHKLFSQDHLVIYKGYVDDPRNTDNAWMETEAVNYHDETGEIMDNLMLEAGDDAGKVKWVDINDKLKLYASHSQFIKLVAEKRDAHWSEDSEADCHAL

SEQ ID NO: 333 - DNA, 2808 bp, Homo sapiens
cggcatgagaggccagcctgccagggaaatccaggaatctgcaacaaaaacgatgacagtctgaaatactctctggtgccaacctccaaattctcgtctgtcacttcagacccccactagttgacagagcagcagaatatcaactccagtagacttgaatgtgcctctgggcaaagaagcagagctaacgaggaaagggatttaaagagtttttcttgggtgtttgtcaaacttttattccctgtctgtgtgcagaggggattcaacttcaattttctgcagtggctctgggtccagccccttacttaaagatctggaaagcatgaagactgggccttttttcctatgtctcttgggaactgcagctgcaatcccgacaaatgcaagattattatctgatcattccaaaccaactgctgaaacggtagcacctgacaacactgcaatccccagtttatgggctgaagctgaagaaaatgaaaaagaaacagcagtatccacagaagacgattcccaccataaggctgaaaaatcatcagtactaaagtcaaaagaggaaagccatgaacagtcagcagaacagggcaagagttctagccaagagctgggattgaaggatcaagaggacagtgatggtcacttaagtgtgaatttggagtatgcaccaactgaaggtacattggacataaaagaagatatgattgagcctcaggagaaaaaactctcagagaacactgattttttggctcctggtgttagttccttcacagattctaaccaacaagaaagtatcacaaagagagaggaaaaccaagaacaacctagaaattattcacatcatcagttgaacaggagcagtaaacatagccaaggcctaagggatcaaggaaaccaagagcaggatccaaatatttccaatggagaagaggaagaagaaaaagagccaggtgaagttggtacccacaatgataaccaagaaagaaagacagaattgcccagggagcatgctaacagcaagcaggaggaagacaatacccaatctgatgatattttggaagagtctgatcaaccaactcaagtaagcaagatgcaggaggatgaatttgatcagggtaaccaagaacaagaagataactccaatgcagaaatggaagaggaaaatgcatcgaacgtcaataagcacattcaagaaactgaatggcagagtcaagagggtaaaactggcctagaagctatcagcaaccacaaagagacagaagaaaagactgtttctgaggctctgctcatggaacctactgatgatggtaataccacgcccagaaatcatggagttgatgatgatggcgatgatgatggcgatgatggcggcactgatggccccaggcacagtgcaagtgatgactacttcatcccaagccaggcctttctggaggccgagagagctcaatccattgcctatcacctcaaaattgaggagcaaagagaaaaagtacatgaaaatgaaaatataggtaccactgagcctggagagcaccaagaggccaagaaagcagagaactcatcaaatgaggaggaaacgtcaagtgaaggcaacatgagggtgcatgctgtggattcttgcatgagcttccagtgtaaaagaggccacatctgtaaggcagaccaacagggaaaacctcactgtgtctgccaggatccagtgacttgtcctccaacaaaaccccttgatcaagtttgtggcactgacaatcagacctatgctagttcctgtcatctattcgctactaaatgcagactggaggggaccaaaaaggggcatcaactccagctggattattttggagcctgcaaatctattcctacttgtacggactttgaagtgattcagtttcctctacggatgagagactggctcaagaatatcctcatgcagctttatgaagccaactctgaacatgctggttatctaaatgagaagcagagaaataaagtcaagaaaatttacctggatgaaaagaggcttttggctggggaccatcccattgatcttctcttaagggactttaagaaaaactaccacatgtatgtgtatcctgtgcactggcagtttagtgaacttgaccaacaccctatggatagagtcttgacacattctgaacttgctcctctgcgagcatctctggtgcccatggaacactgcataacccgtttctttgaggagtgtgaccccaacaaggataagcacatcaccctgaaggagtggggccactgctttggaattaaagaagaggacatagatgaaaatctcttgttttgaacgaagattttaaagaactcaactttccagcatcctcctctgttctaaccacttcagaaatatatgcagctgtgatacttgtagatttatatttagcaaaatgttagcatgtatgacaagacaatgagagtaattgcttgacaacaacctatgcaccaggtatttaacattaactttggaaacaaaaatgtacaattaagtaaagtcaacatatgcaaaatactgtacattgtgaacagaagtttaattcatagtaatttcactctctgcattgacttatgagataattaatgattaaactattaatgataaaaataatgcatttgtattgttcataatatcatgtgcacttcaagaaaatggaatgctactcttttgtggtttacgtgtattattttcaatatcttaataccctaataaagagtccataaaaatccaaaaaaaaaaaaaaaaaaaaaaaaaaaaaaaaaaaaaaaaaaaaaaaaaaaaaa

SEQ ID NO: 334 - protein, 664 aa, Homo sapiens
MKTGPFFLCLLGTAAAIPTNARLLSDHSKPTAETVAPDNTAIPSLWAEAEENEKETAVSTEDDSHHKAEKSSVLKSKEESHEQSAEQGKSSSQELGLKDQEDSDGHLSVNLEYAPTEGTLDIKEDMIEPQEKKLSENTDFLAPGVSSFTDSNQQESITKREENQEQPRNYSHHQLNRSSKHSQGLRDQGNQEQDPNISNGEEEEEKEPGEVGTHNDNQERKTELPREHANSKQEEDNTQSDDILEESDQPTQVSKMQEDEFDQGNQEQEDNSNAEMEEENASNVNKHIQETEWQSQEGKTGLEAISNHKETEEKTVSEALLMEPTDDGNTTPRNHGVDDDGDDDGDDGGTDGPRHSASDDYFIPSQAFLEAERAQSIAYHLKIEEQREKVHENENIGTTEPGEHQEAKKAENSSNEEETSSEGNMRVHAVDSCMSFQCKRGHICKADQQGKPHCVCQDPVTCPPTKPLDQVCGTDNQTYASSCHLFATKCRLEGTKKGHQLQLDYFGACKSIPTCTDFEVIQFPLRMRDWLKNILMQLYEANSEHAGYLNEKQRNKVKKIYLDEKRLLAGDHPIDLLLRDFKKNYHMYVYPVHWQFSELDQHPMDRVLTHSELAPLRASLVPMEHCITRFFEECDPNKDKHITLKEWGHCFGIKEEDIDENLLF

SEQ ID NO: 335 - DNA, 4331 bp, Homo sapiens
atgcaaaagtccaggacagtgggccactttcagtcttcaaagagaaagataagaaattctggattttcaaaatccttttgaagccttttaagccattgattattattattcctaaagaaaatgaagataattacatatttttgcatttgggcagtagcatgggccattccagttcctcaaagcaaaccactggagagacatgtcgaaaaatccatgaatttgcatctcctagcaagatcaaatgtgtcagtacaggatgagttaaatgccagtggaaccatcaaagaaagtggtgtcctggtgcatgaaggtgatagaggaaggcaagagaatacccaagatggtcacaagggagaagggaatggctctaagtgggcagaagtaggagggaagagtttttctacatattccacattagcaaacgaagaggggaatattgagggctggaatggggacacaggaaaagcagaaacatatggtcatgatggaatacatgggaaagaagaaaacatcacagcaaatggcatccagggacaagtaagcatcattgacaatgctggagccacaaacagaagcaacactaatggaaatactgataagaatacccaaaatggggatgttggcgatgcaggtcacaatgaggatgtcgctgttgtccaagaagatggacctcaagtagctggaagcaataacagtacagacaatgaggatgaaataattgagaattcctgtagaaacgagggtaatacaagtgaaataacacctcagatcaacagcaagagaaatgggactaaggaagctgaggtaacaccaggcactggagaagatgctggcctggataattccgatgggagtcctagtgggaatggagcagatgaggatgaagacgagggttctggtgatgatgaagatgaagaagcagggaatggaaaagacagtagtaataacagcaagggccaggagggccaggaccatgggaaagaagatgatcatgatagtagcataggtcaaaattcggatagtaaagaatattatgaccctgaaggcaaagaagatccccataatgaagttgatggagacaagacctccaagagtgaggagaattctgctggtattccagaagacaatggcagccaaagaatagaggacacccagaagctcaaccatagagaaagcaaacgcgtagaaaatagaatcaccaaagaatcagagacacatgctgttgggaagagccaagataagggaatagaaatcaagggtcccagcagtggcaacagaaatattaccaaagaagttgggaaaggcaacgaaggtaaagaggataaaggacaacatggaatgatcttgggcaaaggcaatgtcaagacacaaggagaggttgtcaacatagaaggacctggccaaaaatcagaaccaggaaataaagttggacacagcaatacaggtagtgacagcaatagtgatggatatgacagttatgattttgatgataagtccatgcaaggagatgatcccaatagcagtgatgaatctaatggcaatgatgatgctaattcagaaagtgacaataacagcagtagccgaggagatgcttcttataactctgatgaatcaaaagataatggcaatggcagtgactcaaaaggagcagaagatgatgacagtgatagcacatcagacactaataatagtgacagtaatggcaatggtaacaatgggaatgatgacaatgacaaatcagacagtggcaaaggtaaatcagatagcagtgacagtgatagtagtgatagcagcaatagcagtgatagtagtgacagcagtgacagtgacagcagtgatagcaacagtagcagtgatagtgacagcagtgacagtgacagcagtgatagcagtgacagtgatagtagtgatagcagcaatagcagtgacagtagtgacagcagtgatagcagtgacagtagtgatagtagtgacagcagtgacagcaagtcagacagcagcaaatcagagagcgacagcagtgatagtgacagtaagtcagacagcagtgacagcaacagcagtgacagtagtgacaacagtgatagcagcgacagcagcaatagcagtaacagcagtgatagtagtgacagcagtgatagcagtgacagcagcagtagcagtgacagcagcaacagcagtgatagtagtgacagtagtgacagcagcaatagcagtgagagcagtgatagtagtgacagcagtgatagtgacagcagtgatagtagtgacagcagtaatagtaacagcagcgatagtgacagcagcaacagcagcgatagcagtgacagcagcaacagcagtgacagcagtgatagcagtgacagcagcaacagcagtgacagtagcgatagcagtgacagcagcaacagcagtgacagcagtgatagcagtgacagcagtgatagtagtgacagcagcaacagcagtgatagcaacgacagcagcaatagcagtgacagcagtgatagcagcaacagcagtgatagcagcaacagcagtgatagcagtgatagcagtgacagcagtgatagcgacagcagcaatagcagtgacagcagtaatagtagtgacagcagcgatagcagcaacagcagtgatagcagcgacagcagcgatagcagtgacggcagtgatagcgacagcagcaatagaagtgacagtagtaatagtagtgacagcagcgatagcagtgacagcagcaacagcagtgacagcagtgatagcagtgacagcaacgaaagcagcaatagcagtgacagcagtgatagcagcaacagcagtgatagtgacagcagtgatagcagcaacagcagtgacagcagtgatagcagcaacagcagtgatagcagtgaaagcagtaatagtagtgacaacagcaatagcagtgacagcagcaacagcagtgacagcagtgatagcagtgacagcagtaatagtagtgacagcagcaatagcagtgacagcagcaacagcagtgacagcagtgatagcaatagcagcgacagcagtgacagcagcaacagcagcgatagcagtgacagcagtgatagcagtgacagcagtgacagcagtgatagcagcaacagcagtgatagcagtgacagcagtgacagcagtgatagcagtaatagtagtgacagcagcaatagcagtgacagcagcaacagcagtgacagcagcgatagcagtgacagcagcgatagcagtgacagcagcgatagcagtgacagcagtgacagcagcaatagcagtgacagcagtgacagcagcgacagcagtgatagcagtgacagcagtgacagcagcgacagcagtgatagcagtgaaagcagtgatagcagtgacagcagcaatagcagtgacagcagcgatagcagcgacagcagcgacagcagcgatagcagtgacagcagcgatagcagtgacagcagtgacagcagcaatagcagtgacagcagtgacagcagcgacagcagtgatagcagtgacagcagcaacagcagtgacagcagtgacagcagtgaaagcagcgacagcagtgacagcagcgacagcagtgacagcagcgatagcagcgacagcagcgacagcagcgatagcagtgacagcagcaatagcagtgatagcagcgacagcagtgatagcagtgacagcagcgacagcagcgatagcagcgacagcagcgatagtagtgatagcagtgacagcagtgacagcagcgacagcagtgacagcagcgacagcagtgacagcagcgacagcagtgacagcaatgaaagcagcgacagcagtgacagcagcgatagcagtgacagcagcaacagcagtgacagcagcgacagcagtgatagcagtgacagcacatctgacagcaatgatgagagtgacagccagagcaagtctggtaacggtaacaacaatggaagtgacagtgacagtgacagtgaaggcagtgacagtaaccactcaaccagtgatgattagaacaaaagaaaaacccgtaagattccttttgtgaaaagtttggtaatgggataggaaaaaaagatttccaagaaagtaaagaaaggggagaaataaacataagacgtatgtaaacaaaaacaactgggggaatcaaatcaaacagttggattcagaaccaagacctaactcctgcagagacagactctgaatgcatgacctttggtacatgcctgttaatattcatgttctgaaaatattttgttaaaagtgtaaatctaaacataaaagaacaattaaaatattctttaatacttcacacagaa

SEQ ID NO: 336 - protein, 1301 aa, Homo sapiens
MKIITYFCIWAVAWAIPVPQSKPLERHVEKSMNLHLLARSNVSVQDELNASGTIKESGVLVHEGDRGRQENTQDGHKGEGNGSKWAEVGGKSFSTYSTLANEEGNIEGWNGDTGKAETYGHDGIHGKEENITANGIQGQVSIIDNAGATNRSNTNGNTDKNTQNGDVGDAGHNEDVAVVQEDGPQVAGSNNSTDNEDEIIENSCRNEGNTSEITPQINSKRNGTKEAEVTPGTGEDAGLDNSDGSPSGNGADEDEDEGSGDDEDEEAGNGKDSSNNSKGQEGQDHGKEDDHDSSIGQNSDSKEYYDPEGKEDPHNEVDGDKTSKSEENSAGIPEDNGSQRIEDTQKLNHRESKRVENRITKESETHAVGKSQDKGIEIKGPSSGNRNITKEVGKGNEGKEDKGQHGMILGKGNVKTQGEVVNIEGPGQKSEPGNKVGHSNTGSDSNSDGYDSYDFDDKSMQGDDPNSSDESNGNDDANSESDNNSSSRGDASYNSDESKDNGNGSDSKGAEDDDSDSTSDTNNSDSNGNGNNGNDDNDKSDSGKGKSDSSDSDSSDSSNSSDSSDSSDSDSSDSNSSSDSDSSDSDSSDSSDSDSSDSSNSSDSSDSSDSSDSSDSSDSSDSKSDSSKSESDSSDSDSKSDSSDSNSSDSSDNSDSSDSSNSSNSSDSSDSSDSSDSSSSSDSSNSSDSSDSSDSSNSSESSDSSDSSDSDSSDSSDSSNSNSSDSDSSNSSDSSDSSNSSDSSDSSDSSNSSDSSDSSDSSNSSDSSDSSDSSDSSDSSNSSDSNDSSNSSDSSDSSNSSDSSNSSDSSDSSDSSDSDSSNSSDSSNSSDSSDSSNSSDSSDSSDSSDGSDSDSSNRSDSSNSSDSSDSSDSSNSSDSSDSSDSNESSNSSDSSDSSNSSDSDSSDSSNSSDSSDSSNSSDSSESSNSSDNSNSSDSSNSSDSSDSSDSSNSSDSSNSSDSSNSSDSSDSNSSDSSDSSNSSDSSDSSDSSDSSDSSDSSNSSDSSDSSDSSDSSNSSDSSNSSDSSNSSDSSDSSDSSDSSDSSDSSDSSDSSNSSDSSDSSDSSDSSDSSDSSDSSDSSESSDSSDSSNSSDSSDSSDSSDSSDSSDSSDSSDSSDSSNSSDSSDSSDSSDSSDSSNSSDSSDSSESSDSSDSSDSSDSSDSSDSSDSSDSSDSSNSSDSSDSSDSSDSSDSSDSSDSSDSSDSSDSSDSSDSSDSSDSSDSSDSSDSNESSDSSDSSDSSDSSNSSDSSDSSDSSDSTSDSNDESDSQSKSGNGNNNGSDSDSDSEGSDSNHSTSDD

SEQ ID NO: 337 - DNA, 2682 bp, Homo sapiens
tgggcatagatttcctctttgagaacatcaacctgatttttgagactttttgaaaaaattctttgtgaactacggagggtagaggtatcacacccaactatgaagatcagcatcctgctcatgttcctttggggattatcctgtgctctcccagtaaccaggtatcaaaataatgaatctgaggattctgaagaatggaagggtcatttggctcaggcaccaacaccacccttggagagcagtgagtcatcagaaggcagtaaagttagctcagaggaacaggcaaatgaagaccccagtgacagcactcagtcagaggagggcctgggctctgatgatcatcaatacatttataggctagctggtggcttctccaggagcacaggaaaaggaggagatgataaagatgacgatgaagatgacagtggagatgacacctttggtgacgatgacagtggcccagggcccaaagacagacaagaaggaggaaactccagactgggaagtgatgaggactctgatgacaccatacaagccagtgaagagagtgccccacaagggcaagacagtgcccaagataccaccagtgagagcagggaacttgacaatgaggaccgggtggacagcaagcctgagggaggtgactccactcaagagagtgagagtgaagagcactgggtgggaggtggcagtgatggggagagcagccatggagacggctccgagttggacgatgagggaatgcagagtgatgacccagagagcatcaggagtgaaaggggaaactccagaatgaacagtgcaggcatgaaatcaaaagaatctggagaaaacagtgagcaagcaaacactcaagattcaggtggcagccaattgctggagcatcccagtaggaaaatttttaggaagtctcgcatctcagaggaagatgacagaagcgagcttgatgacaacaacacaatggaagaagtcaagagtgactctacagaaaacagcaactccagagacactggcctcagccaacccaggagagacagcaagggtgactctcaagaagacagcaaggagaatctgtcccaggaagagagccaaaacgtagatggtcccagcagtgagtccagccaagaggccaacctgtcatctcaagagaacagcagtgagtctcaggaagaggtggtgagtgagtccaggggagataaccccgaccccacaactagttatgtagaagaccaggaagacagtgactccagcgaggaggacagctcgcacacactctcccactcaaaaagtgaatccagagaggagcaagcagacagcgaatccagtgagagcctcaacttctcagaggaaagcccggagtcccctgaggatgagaacagctccagccaggagggcctccagtctcacagcagctcagcagagagtcagagcgaggaaagccattctgaggaagacgacagtgactctcaagacagcagcagatccaaagaagatagcaactccacggagagcaaatcaagcagtgaggaagatggccagttgaaaaacattgagatagagagccggaaattaacagttgatgcctatcacaacaaacccattggggaccaagatgacaatgactgccaagacggctattagcatcagctgtcctaagaagcagttgtcacataaaggagtcttagggacttgaaaatgtatcatgataactataatttattgatgttttgatcaaaagaataaccagatgccatatttttcctgaaaggaattgctggacattacacttgtttttagggtgtcatcatttcacagaggtttaaatactgtggagtgacaccagtaacacagccaaagaggctagtaagcaagaaaggatctgcatgataactttgcagctgagatagttcctaattcatcaacgtaacaaacaaagctattgggtgtccatgtatataccaggcactatgctaggtgttgagaatgtaaagcaggttaagacttgtttcttgctcctgaggagcgtatagaggggacccacgtagctaacagagttaacagaggggtatgtataagagaaacgtgaatagttacaacccagtatgctgagtgccaaggccagtgaggctatgaacacgatatcaatctggggacactgagaaggataaccaatgcgttggagaacgagggaggacttcatagcagaagaattggagttggaaggttgcatagggtttcctcattggagaccggggaattctattcttgggataaataatagtaaattctataggattcaatacttagtttgcaaaagcactttgaaattatggcacagtgagttgttttggataagaaaatctttttctcccaattaatttaccaattcatcattttttttttttgtagaactcccataaacatcaccttactaatcactggtgatgataagaaggattgggtcaggaagagtgggagaaagaaattcctctttacgtagatactttttagctttattttttctaaaatcagtttgcgtgcaatgctagaaaaaaactgttctctgagtcctttacagagcaaaattctgtatgtaagattcaattgatttttgacaaataccatttgaaatattacctcaacataaaatacttgttttgtaataaagattataatacccag

SEQ ID NO: 338 - protein, 513 aa, Homo sapiens
MKISILLMFLWGLSCALPVTRYQNNESEDSEEWKGHLAQAPTPPLESSESSEGSKVSSEEQANEDPSDSTQSEEGLGSDDHQYIYRLAGGFSRSTGKGGDDKDDDEDDSGDDTFGDDDSGPGPKDRQEGGNSRLGSDEDSDDTIQASEESAPQGQDSAQDTTSESRELDNEDRVDSKPEGGDSTQESESEEHWVGGGSDGESSHGDGSELDDEGMQSDDPESIRSERGNSRMNSAGMKSKESGENSEQANTQDSGGSQLLEHPSRKIFRKSRISEEDDRSELDDNNTMEEVKSDSTENSNSRDTGLSQPRRDSKGDSQEDSKENLSQEESQNVDGPSSESSQEANLSSQENSSESQEEVVSESRGDNPDPTTSYVEDQEDSDSSEEDSSHTLSHSKSESREEQADSESSESLNFSEESPESPEDENSSSQEGLQSHSSSAESQSEESHSEEDDSDSQDSSRSKEDSNSTESKSSSEEDGQLKNIEIESRKLTVDAYHNKPIGDQDDNDCQDGY

SEQ ID NO: 339 - DNA, 2032 bp, Homo sapiens
cgcggggcgcggagtcggcggggcctcgcgggacgcgggcagtgcggagaccgcggcgctgaggacgcgggagccgggagcgcacgcgcggggtggagttcagcctactctttcttagatgtgaaaggaaaggaagatcatttcatgccttgttgataaaggttcagacttctgctgattcataaccatttggctctgagctatgacaagagaggaaacaaaaagttaaacttacaagcctgccataagtgagaagcaaacttccttgataacatgcttttgcgaagtgcaggaaaattaaatgtgggcaccaagaaagaggatggtgagagtacagcccccaccccccgtccaaaggtcttgcgttgtaaatgccaccaccattgtccagaagactcagtcaacaatatttgcagcacagacggatattgtttcacgatgatagaagaggatgactctgggttgcctgtggtcacttctggttgcctaggactagaaggctcagattttcagtgtcgggacactcccattcctcatcaaagaagatcaattgaatgctgcacagaaaggaacgaatgtaataaagacctacaccctacactgcctccattgaaaaacagagattttgttgatggacctatacaccacagggctttacttatatctgtgactgtctgtagtttgctcttggtccttatcatattattttgttacttccggtataaaagacaagaaaccagacctcgatacagcattgggttagaacaggatgaaacttacattcctcctggagaatccctgagagacttaattgagcagtctcagagctcaggaagtggatcaggcctccctctgctggtccaaaggactatagctaagcagattcagatggtgaaacagattggaaaaggtcgctatggggaagtttggatgggaaagtggcgtggcgaaaaggtagctgtgaaagtgttcttcaccacagaggaagccagctggttcagagagacagaaatatatcagacagtgttgatgaggcatgaaaacattttgggtttcattgctgcagatatcaaagggacagggtcctggacccagttgtacctaatcacagactatcatgaaaatggttccctttatgattatctgaagtccaccaccctagacgctaaatcaatgctgaagttagcctactcttctgtcagtggcttatgtcatttacacacagaaatctttagtactcaaggcaaaccagcaattgcccatcgagatctgaaaagtaaaaacattctggtgaagaaaaatggaacttgctgtattgctgacctgggcctggctgttaaatttattagtgatacaaatgaagttgacataccacctaacactcgagttggcaccaaacgctatatgcctccagaagtgttggacgagagcttgaacagaaatcacttccagtcttacatcatggctgacatgtatagttttggcctcatcctttgggaggttgctaggagatgtgtatcaggaggtatagtggaagaataccagcttccttatcatgacctagtgcccagtgacccctcttatgaggacatgagggagattgtgtgcatcaagaagttacgcccctcattcccaaaccggtggagcagtgatgagtgtctaaggcagatgggaaaactcatgacagaatgctgggctcacaatcctgcatcaaggctgacagccctgcgggttaagaaaacacttgccaaaatgtcagagtcccaggacattaaactctgataggagaggaaaagtaagcatctctgcagaaagccaacaggtactcttctgtttgtgggcagagcaaaagacatcaaataagcatccacagtacaagccttgaacatcgtcctgcttcccagtgggttcagacctcacctttcagggagcgacctgggcaaagacagagaagctcccagaaggagagattgatccgtgtctgtttgtaggcggagaaaccgttgggtaacttgttcaagatatgatgcat

SEQ ID NO: 340 - protein, 502 aa, Homo sapiens
MLLRSAGKLNVGTKKEDGESTAPTPRPKVLRCKCHHHCPEDSVNNICSTDGYCFTMIEEDDSGLPVVTSGCLGLEGSDFQCRDTPIPHQRRSIECCTERNECNKDLHPTLPPLKNRDFVDGPIHHRALLISVTVCSLLLVLIILFCYFRYKRQETRPRYSIGLEQDETYIPPGESLRDLIEQSQSSGSGSGLPLLVQRTIAKQIQMVKQIGKGRYGEVWMGKWRGEKVAVKVFFTTEEASWFRETEIYQTVLMRHENILGFIAADIKGTGSWTQLYLITDYHENGSLYDYLKSTTLDAKSMLKLAYSSVSGLCHLHTEIFSTQGKPAIAHRDLKSKNILVKKNGTCCIADLGLAVKFISDTNEVDIPPNTRVGTKRYMPPEVLDESLNRNHFQSYIMADMYSFGLILWEVARRCVSGGIVEEYQLPYHDLVPSDPSYEDMREIVCIKKLRPSFPNRWSSDECLRQMGKLMTECWAHNPASRLTALRVKKTLAKMSESQDIKL

SEQ ID NO: 341 - DNA, 3646 bp, Homo sapiens
ctgcctttggagaaagtggagtgtggcgcttggttgtcgttatttcttcggactgcttcgcggtgcacggattcagcttctgcccagtggggctttcagctgtttgcgcgtctctctgtccccctcccctccccccggcacacctctgtctacgatgaggaaaggtctgcgggcgacagcggcccgctgcggactgggactgggatacttgctgcaaatgctcgtgctacctgccctggccctgctcagcgccagcggcactggctccgccgcccaagatgatgacttttttcatgaactcccagaaacttttccttctgatccacctgagcctctgccacatttccttattgagcctgaagaagcttatattgtgaagaataagcctgtgaacctgtactgtaaagcaagccctgccacccagatctatttcaagtgtaatagtgaatgggttcatcagaaggaccacatagtagatgaaagagtagatgaaacttccggtctcattgtccgggaagtgagcattgagatttcgcgccagcaagtggaagaactctttggacctgaagattactggtgccagtgtgtggcctggagctccgcgggtaccacaaagagccggaaggcgtatgtgcgcattgcatatctacggaagacatttgagcaggaacccctaggaaaggaagtgtctttggaacaggaagtcttactccagtgtcgaccacctgaagggatcccagtggctgaggtggaatggttgaaaaatgaagacataattgatcccgttgaagatcggaatttttatattactattgatcacaacctcatcataaagcaggcccgactctctgatactgcaaattacacctgtgttgccaaaaacattgttgccaagaggaaaagtacaactgccactgtcatagtctatgtcaacggtggctggtccacctggacggagtggtctgtgtgtaacagccgctgtggacgagggtatcagaaacgtacaaggacttgtaccaacccggcaccactcaatgggggtgccttctgtgaagggcagagtgtgcagaaaatagcctgtactacgttatgcccagtggatggcaggtggacgccatggagcaagtggtctacttgtggaactgagtgcacccactggcgcaggagggagtgcacggcgccagcccccaagaatggaggcaaggactgcgacggcctcgtcttgcaatccaagaactgcactgatgggctttgcatgcagactgctcctgattcagatgatgttgctctctatgttgggattgtgatagcagtgatcgtttgcctggcgatctctgtagttgtggccttgtttgtgtatcggaagaatcatcgtgactttgagtcagatattattgactcttcggcactcaatgggggctttcagcctgtgaacatcaaggcagcaagacaagatctgctggctgtacccccagacctcacgtcagctgcagccatgtacagaggacctgtctatgccctgcatgacgtctcagacaaaatcccaatgaccaactctccaattctggatccactgcccaacctgaaaatcaaagtgtacaacacctcaggtgctgtcaccccccaagatgacctctctgagtttacgtccaagctgtcccctcagatgacccagtcgttgttggagaatgaagccctcagcctgaagaaccagagtctagcaaggcagactgatccatcctgtaccgcatttggcagcttcaactcgctgggaggtcaccttattgttcccaattcaggagtcagcttgctgattcccgctggggccattccccaagggagagtctacgaaatgtatgtgactgtacacaggaaagaaactatgaggccacccatggatgactctcagacacttttgacccctgtggtgagctgtgggcccccaggagctctgctcacccgccccgtcgtcctcactatgcatcactgcgcagaccccaataccgaggactggaaaatactgctcaagaaccaggcagcacagggacagtgggaggatgtggtggtggtcggggaggaaaacttcaccaccccctgctacattaagctggatgcagaggcctgccacatcctcacagagaacctcagcacctacgccctggtaggacattccaccaccaaagcggctgcaaagcgcctcaagctggccatctttgggcccctgtgctgctcctcgctggagtacagcatccgagtctactgtctggatgacacccaggatgccctgaaggaaattttacatcttgagagacagacgggaggacagctcctagaagaacctaaggctcttcattttaaaggcagcacccacaacctgcgcctgtcaattcacgatatcgcccattccctctggaagagcaaattgctggctaaatatcaggaaattccattttaccatgtttggagtggatctcaaagaaacctgcactgcaccttcactctggaaagatttagcctgaacacagtggagctggtttgcaaactctgtgtgcggcaggtggaaggagaagggcagatcttccagctcaactgcaccgtgtcagaggaacctactggcatcgatttgccgctgctggatcctgcgaacaccatcaccacggtcacggggcccagtgctttcagcatccctctccctatccggcagaagctctgtagcagcctggatgccccccagacgagaggccatgactggaggatgctggcccataagctgaacctggacaggtacttgaattactttgccaccaaatccagcccaactggcgtaatcctggatctttgggaagcacagaacttcccagatggaaacctgagcatgctggcagctgtcttggaagaaatgggaagacatgaaacggtggtgtccttagcagcagaagggcagtattaaccaccatgctggaaggggaaatgaaggacaaaaatgcacagggagtctgtggccgtccaggtgaatcacagctgaggaggaaatccagatgagaccaatgcacttcacaggcaagaatgcagcaggagccagaaggaaaacagatacaactgcccatgtacatgcccactttactcggagatcatcacgggagttaagaaaaattgtgtaaatttgtaccttgaatttagctatcaacctaattttcctcttagttgggctgtatgctgtgtggtacaggatcttacagtttcctaggaaacgctttttattgctatccagatatatggataaactttcttaacaaacccaatttctacaaatgttgtttacatcaaattggacagggatgcagacactgtccatggctcgttctatttttgttcaaatcatttgaagttgaagctgtggacggtttgttgtgtctatttcagattagtaatttacagagaaatcacagacttttgctacaaatcgtgtgcatcaagtgtctcagataatcctcccatcagtgttctgtttctagaacttgtagaaccagtgttactgtttgtatcagggaagtggagaatctaagtgtaaaaaagaaataactaagactcctattccttggagggacccttctggtgccctttgggaataaagctgtagcactgc

SEQ ID NO: 342 - protein, 931 aa, Homo sapiens
MRKGLRATAARCGLGLGYLLQMLVLPALALLSASGTGSAAQDDDFFHELPETFPSDPPEPLPHFLIEPEEAYIVKNKPVNLYCKASPATQIYFKCNSEWVHQKDHIVDERVDETSGLIVREVSIEISRQQVEELFGPEDYWCQCVAWSSAGTTKSRKAYVRIAYLRKTFEQEPLGKEVSLEQEVLLQCRPPEGIPVAEVEWLKNEDIIDPVEDRNFYITIDHNLIIKQARLSDTANYTCVAKNIVAKRKSTTATVIVYVNGGWSTWTEWSVCNSRCGRGYQKRTRTCTNPAPLNGGAFCEGQSVQKIACTTLCPVDGRWTPWSKWSTCGTECTHWRRRECTAPAPKNGGKDCDGLVLQSKNCTDGLCMQTAPDSDDVALYVGIVIAVIVCLAISVVVALFVYRKNHRDFESDIIDSSALNGGFQPVNIKAARQDLLAVPPDLTSAAAMYRGPVYALHDVSDKIPMTNSPILDPLPNLKIKVYNTSGAVTPQDDLSEFTSKLSPQMTQSLLENEALSLKNQSLARQTDPSCTAFGSFNSLGGHLIVPNSGVSLLIPAGAIPQGRVYEMYVTVHRKETMRPPMDDSQTLLTPVVSCGPPGALLTRPVVLTMHHCADPNTEDWKILLKNQAAQGQWEDVVVVGEENFTTPCYIKLDAEACHILTENLSTYALVGHSTTKAAAKRLKLAIFGPLCCSSLEYSIRVYCLDDTQDALKEILHLERQTGGQLLEEPKALHFKGSTHNLRLSIHDIAHSLWKSKLLAKYQEIPFYHVWSGSQRNLHCTFTLERFSLNTVELVCKLCVRQVEGEGQIFQLNCTVSEEPTGIDLPLLDPANTITTVTGPSAFSIPLPIRQKLCSSLDAPQTRGHDWRMLAHKLNLDRYLNYFATKSSPTGVILDLWEAQNFPDGNLSMLAAVLEEMGRHETVVSLAAEGQY

SEQ ID NO: 343 - DNA, 8192 bp, Homo sapiens
atgagactggatgagataacgaaatcagagaatgaagacggagaaaagaagatgtttactcagcagtttgaaagtactgatgcctgtgtatatgaggtgtatgtgaaaataaattccattgtgaaatctcagagtcagtgtggattgaaaagaggtagtcccgagactgagctctggggtgctatagtgttcagaagccaggaagagaacgcaaaaccagtgaaggaaactgaggtgacagcctctgatgcagattcaggactctatggctttattgaatattctctttatgatggattcctgagctatgaagcacctcaggcattccggatcgaccctcatgatgggcaaatctgtgtttctcaagatatcgacagggaaagggatccagctacctatgatctcctggtggaagctaaggatggggatgagcagagaatgacacatttagccctggtgaagggtgggctaagtgcccaagcctttgttcgtgtggacctggaggacgtgaatgataatcatcctgtgtttaacccatcaacctatgtgacgagcatcagtgatgagacccagccaggcaccgagatcatcaatgttcttgccactgaccaggactctgggatatatgggacagtggcttatgagcttattccaggaaacgtgtcgtccctttttaccattgactccaccacaggactctatagtccagaggtagaaattctgagtgctgtcaacttttcagcagacaaggaagtaatgaacagtttagagatgtttttacctctgctaaggcacttcaagaaggttgaaagagatgaggaagctgcagaaaaaaaatttgaagctagcagaggttggttcatgaggtttaagggaagacgccatctccattacctaaaagtgcaagatgaagcagcaagtgctgatggagaagctgcagcaaggtatgtagcaaatctagctaagattcttggtgaaggaattatttacttaacattacctcttagtcatttggaatctaccacactttcgttgatggtctctgctcaagacggtggtgggctcacagctgtcattaatgccgatgtcaccatacacattttccagacaactctggcacctgctgagtttgaaaggcctaagtacactttcttagtttatgaagatgtgcctgaagatagtcccattggaacagtgaaagcaagagagcccttgaactcctcagaaccaatcttttacaggatttcttctggtgatctcggcggaaagttctccattcacccgcggctgggcactattcgcacccggaagcccctggatcacgagacgcagcccgtggttgtgctcacggtgcaggcgcagctcggcagcgccccagcctgcagcagcaccgaggtcaacataacagtcatggatgtcaatgacaaccacccagcgttcctcaggacctcggatgagattagaatatcccagaccacgccccctggcacagccttgtacctcgcacgtgcggaagacagagacagtgggcggaacggactcatccggtactccatcgccagcccgcagccaggcgtctttgccatcgacagagccctgggggtgctgttcctcaacggcagcctgggcgcgggcgagcagcgggagctcacgctgactctcagggccgaggaccaaggcgtgcatcctcaggcagccctgctggtgctgacagtcgttatcgagaaacgcgaacacagcccatcctggactttcgaacatttggtctatcaagtggaagtcagtgagtctctctcaccgatgacacaaatgctgcaaacacaggcgcacccacttggcccccagcgtgcagcctcgcctcttaggtactcgctggaacccagcgtagactctgctatgtttggaatccgcccttacacgggctggatttatttgcggcgacagtttgactatgaatccacccaaacatataattttagagtgtttgcttggatccccgaggacggattcttgcaaaatgtgagcactacagtcattgttcgtgtctgggatgagaatgacaattcccccaccttcttgcatgatgtgttgtttttgaaagtcgaagagagccctgttccccaaggggtaataggcaaaattacagctattgacatggactctggaaagaatggacagctattatatttccttttgtctgatggaaaattcttcaagatgaatcctaatacaggtccagcaggcaccatctatgtcataacctgggcagatggtgctgctgcctttagtgggacagactttgcattcagttctgatgaacttcaagcctttgttctcaagtctctgttctgtgaattaggagaaggagagttaatcaattgggtggcactggatcgtgagcaccgggggcaccatgagatgactgtgctagtgacagaccgcggctccccaccacgaaacgccaccatggcggtttacgtctcagttactgacatcaatgataacaggcccttcttcccccagtgtctccctggaaaggagttacacgtgaaggttctggaaggtcaaccagtaaatatgttggttacaactgtgtttgcaaaggatcctgatgaaggaaataatgcagaagttacatactcagtatcttcagaagatagttctgatcactttaagattgacgccaacaatggtgaaataagaacaaccacaatactttcgtatgattatagaccttcctacagaatgagtgtcattgccactgaccagggagtgcctcctcttcaaggacaggcagttgttaatattcaggtgatcccactatccaaagggagagcaatcatgtctcagaatattagacatttaattataccagaaaatttgaagcccacaaaaataatgagcttgataaagtcatctgatcaccttcaacaacattataatggaaagttacattttagtattgttgcagatgataaggatggacactttgaaatagacagctcaaccggagacttgtttctttctaaggaacttgattatgagacgacatctcattatcttttcagagtgattactacagaccatagcaaaaacctttccctgagtagcacagtcttccttagtatcgatgtggaagatcagaatgaccattccccatctttccaggatgagctcattgtgatcagtgtagaggagaatgttcccataggaaccctggtgtatgtcttcaatgccaaagatgatgacggcagttttttgaacagtagaatacaatactacattgaatcccacaaccctggcacgaatccatttctcatccacccctcatttggcacactagtcactgtgtcccgtcttgacagagaaagcattccaactgtcatcctgacagtaacagcatctgatcaggctgtgaatgtgacagaccggcgactgagatcactgacagcacaaatagtgattttggatgtaaatgaccacaaccccacttttatttctttccccaatgcccatgtcaaagaggatgtcacagtgggctccttggtccaccacataactgctcacgatccagacgaaggaaggaatggaaaagtaacatacagcatcctctcaggaaatgaaaacatgacgtttatgctagatgagtcatcaggcttactaaccacaacctgtcctttggattatgaaatgaaaactcagcatattctgactgttctggcactggatgatggcacaccagcactttcttcatcccagactttgacagttactgttcttgatgtaaatgatgaagctccagtatttaagcagcacctgtatgaagcctcagtgaaagaaaaccaaaatccaggggagtttgttaccagggttgaagctctggacagagattcaggagtcaattccaagcttcagtttgaaatcatgccaggtgcttcatttgaattattcgagataaattctgacactggagaggtagtgacaaccaccatacttgacagagaaattcaagaagtcttcacccttcgagtactagtacgagatgggggattcccttcattgtccagcaccacaacaatcctctgcactgttgaagatgaaaacgatcacgcaccagagtttattgtttccagttatgacattgaggttctggaaaaccaggaaccagaggttgtctatacggttttagcctctgatatggatgctggcaataacagagctgttgaatatcacataattgatggaaatactgatgagtgctttactataaatgagatgtcaggagaactctcaaccactcgtgctttggaccgggagcaaatcagcaattttacccttgtcattctgtgctctgacctgggagatccacctaggagctctgtaatacacctgcaagttagagttttggatgccaatgaccacagtccttcttttcccacactttattaccagtcctctgtgagagaagatgctgaagtgggaacagtggttcttgtgctttcagctgtggacaaggatgaaggcctgaatgggcaaactgagtattttctgactgatgaggcttctggtgcattcaccattgatcctatgtcaggcacattgaaaaccagcaacaccctcgaccgtgaagccagatctcagcatacatttagtgctgtggccagagactgtagcatccagggttcacgaagcaccactgtaattataaaagtatatgtcactgatgttaatgacaatgatccagttttggaacagaacccttttgatgtgtttctttcccccgagtcgcctacaaaccagacaactgtcattgtgagagctgatgacctggacttggggcccaatggaactgtggtttttagttttgcagagacccagtcaatgttttctattgataaatacacaggagaaattcaatttcagcaaaatccatcttcagaatacttccctatctggctgcagttaaaagttacagaccagggcattccagccaggacaaccacgggtctcttggtcattcacatggaaggagaagatgtaaagatttccttcagccaccacctgtataaagggctcgtgactgaaaattgtgaggcaggtacttctattgtgactgttaaagcttttgctcctgactcaattcaggacagcatgaaatattcaatttttagtggaaatgaagatggagttctttccctgtgctctaagtcaggacaactcactgtgaaagaacccaagtttcttgattttgaagtcagaaatgaggttcaactcatcgttttagctgaaagtagtgggcatagagcctattgcaaagtagcagtcttgatacaggatgagaatgataattcaccatgctttgaacaaagcatttaccaggcatcagtgtctgaaagccaactctacaatgctcatgtcatacaggtttttgctaccgacttggacagtggtttgaacggcctgattgagtattctattctgtctggcaaccaagaagaagcattccagattgatgcactgagtggtgtgataacaacaaaagcgattctagattacgagctcaccagctcctacagcttgattgtccaagccacagataaagggatgcccaggctttctaatacgactgtaatcaaggtacaggtgactgatataaatgacaatgccccagcttttctcccctctgaagcagtggaaattacagaagattctttgcctggtgtaattgtgactcatgtgtcagttcatgatgtggatttgaattcagctttcatattcagttttgccaaagagagtaatcctggaaccaagtttgctattgatcagaacactggagtggtggtgttggtgaaaacattggattttgaagaaatgactgaatatgagctgctcatccaaatttctgattcagtgcactacacagagggagcacttgtagtccgtgtgctggatgtcaatgataatccaccagtgttttctcaagatttctatcaggtcacagttcctgaatcaatacctgtggggtattcagtgctgactctgtcagccacagacttagaaagcaatgagaacatttcttacagaattctatcctcttctaaggaattctccattgatcctaagaatggcacaatatttactatcagtcccgtattacttctggatacaatatcaacaactcaatttcttgtggaagccagtgatggtggaaatcctgacctgagagctcttactttagtggagataggaatagaagatatgaacaattatgcccctgaattcacagtcaaatcctataatcttagcctaagtgaggatgctctggttggaagcacgcttgttacattttcaaacatcgaccatgactggacccgtgaaaacacatatgttgaatattccatcatcagtggtaattcacagaacaattttcatgtggaaactaagttctttcattcagaatatccttataagcaagtcggttatcttgtgttgcttcacagtctggacagagaagcaagtgctagccatgagcttgtcattctggcatctgacagtggctgccctccattgagttccacagctgtcatatcaatacaagtacttgatgtcaatgacaatcccccaaacttcagcagcctgagctatcacacccatgtcaaggaaagcacccctctagggagtcacatcactgtggtctcagcaaatgaccgtgacacagggtcacatgcagaaatcatctacaacatcatctctggaaatgagaagggacatttttacttagaagaaaacactggagttctttatttgattaaacctctggattatgaaaaaatgacaaaattcaccttaactgtccaagcttcagatgcagaaaagaaacatttttcttttgcagttgtgtttgtcagtgtcctggatgataacgaccatgcacctcagtttatgttctcaagcttcagctgtattgttccagaaaatctgcctatttcctctaccatatgctctataaatgctctggattttgatgctggtccgtatggagaattgacctattctattgtatcaccctgttttctcactcatggaatgtcttatgatcatgatctcttcctcattgaccctttgacaggggatattcatgctaagcaaatccttgactatgaaaatggcaataaatactgcctcacagtccaagccaaagacaaaggtgatgcaactgcctccttagtggtctgggtggatattgaagggatagatgaatttgagcccattttcactcaagatcagtattttttcaccctcccagaaaagaataaagacagacagttgattggcagagtggaagcctcagatgcagatgctggtattgatggagtcattctttactcccttggaacctcatctcctttcttttcagtaaataaaaccaatggaaatatttatttgattagagcccttcccctaataaaaagtcaactcaacaaagaagacaccttggaaatgaaaataatcgctcatagtcccaaatcagattccaagtttgcatcttgcactgtttttgtgaatgtgtctttctcctctgaaggaacacccttggcagtgttcgccagcagcttttcaatcagcctggtggtctcctttttagtgtttctgatactcatctgcattctaattgtaatgattttaagacataaacaaaaagacacaataaacaattatgaggagaagaaaacctcatctttagatgcggacttgagagtgacccgggatgccagtgtgctcaaagccttccagaaaactgacgactgcagtaacgaggtggtccctgtggatgccactccggaatggttgagtttaataagtatcatggagaaggatattgtcaatctgtacagacactcaaactccagtggccactgttctgtggaaggagaaactgcagaagataaggaaatccagaggataaatgagcatccctacagaaagtgctcagactcagctctgagtgaccacgagtccagggtgccagactcgggtatcccgagggactcagaccagctctcctgcctatctggggaaactgatgtgatggtgactgccgaaacagcagaagccagccaaacatttggggaaggagatcaaggggaaggctgcagcaccacctgtgctcaaaataatgtgttaccccagac

SEQ ID NO: 344 - protein, 2916 aa, Homo sapiens
MRLDEITKSENEDGEKKMFTQQFESTDACVYEVYVKINSIVKSQSQCGLKRGSPETELWGAIVFRSQEENAKPVKETEVTASDADSGLYGFIEYSLYDGFLSYEAPQAFRIDPHDGQICVSQDIDRERDPATYDLLVEAKDGDEQRMTHLALVKGGLSAQAFVRVDLEDVNDNHPVFNPSTYVTSISDETQPGTEIINVLATDQDSGIYGTVAYELIPGNVSSLFTIDSTTGLYSPEVEILSAVNFSADKEVMNSLEMFLPLLRHFKKVERDEEAAEKKFEASRGWFMRFKGRRHLHYLKVQDEAASADGEAAARYVANLAKILGEGIIYLTLPLSHLESTTLSLMVSAQDGGGLTAVINADVTIHIFQTTLAPAEFERPKYTFLVYEDVPEDSPIGTVKAREPLNSSEPIFYRISSGDLGGKFSIHPRLGTIRTRKPLDHETQPVVVLTVQAQLGSAPACSSTEVNITVMDVNDNHPAFLRTSDEIRISQTTPPGTALYLARAEDRDSGRNGLIRYSIASPQPGVFAIDRALGVLFLNGSLGAGEQRELTLTLRAEDQGVHPQAALLVLTVVIEKREHSPSWTFEHLVYQVEVSESLSPMTQMLQTQAHPLGPQRAASPLRYSLEPSVDSAMFGIRPYTGWIYLRRQFDYESTQTYNFRVFAWIPEDGFLQNVSTTVIVRVWDENDNSPTFLHDVLFLKVEESPVPQGVIGKITAIDMDSGKNGQLLYFLLSDGKFFKMNPNTGPAGTIYVITWADGAAAFSGTDFAFSSDELQAFVLKSLFCELGEGELINWVALDREHRGHHEMTVLVTDRGSPPRNATMAVYVSVTDINDNRPFFPQCLPGKELHVKVLEGQPVNMLVTTVFAKDPDEGNNAEVTYSVSSEDSSDHFKIDANNGEIRTTTILSYDYRPSYRMSVIATDQGVPPLQGQAVVNIQVIPLSKGRAIMSQNIRHLIIPENLKPTKIMSLIKSSDHLQQHYNGKLHFSIVADDKDGHFEIDSSTGDLFLSKELDYETTSHYLFRVITTDHSKNLSLSSTVFLSIDVEDQNDHSPSFQDELIVISVEENVPIGTLVYVFNAKDDDGSFLNSRIQYYIESHNPGTNPFLIHPSFGTLVTVSRLDRESIPTVILTVTASDQAVNVTDRRLRSLTAQIVILDVNDHNPTFISFPNAHVKEDVTVGSLVHHITAHDPDEGRNGKVTYSILSGNENMTFMLDESSGLLTTTCPLDYEMKTQHILTVLALDDGTPALSSSQTLTVTVLDVNDEAPVFKQHLYEASVKENQNPGEFVTRVEALDRDSGVNSKLQFEIMPGASFELFEINSDTGEVVTTTILDREIQEVFTLRVLVRDGGFPSLSSTTTILCTVEDENDHAPEFIVSSYDIEVLENQEPEVVYTVLASDMDAGNNRAVEYHIIDGNTDECFTINEMSGELSTTRALDREQISNFTLVILCSDLGDPPRSSVIHLQVRVLDANDHSPSFPTLYYQSSVREDAEVGTVVLVLSAVDKDEGLNGQTEYFLTDEASGAFTIDPMSGTLKTSNTLDREARSQHTFSAVARDCSIQGSRSTTVIIKVYVTDVNDNDPVLEQNPFDVFLSPESPTNQTTVIVRADDLDLGPNGTVVFSFAETQSMFSIDKYTGEIQFQQNPSSEYFPIWLQLKVTDQGIPARTTTGLLVIHMEGEDVKISFSHHLYKGLVTENCEAGTSIVTVKAFAPDSIQDSMKYSIFSGNEDGVLSLCSKSGQLTVKEPKFLDFEVRNEVQLIVLAESSGHRAYCKVAVLIQDENDNSPCFEQSIYQASVSESQLYNAHVIQVFATDLDSGLNGLIEYSILSGNQEEAFQIDALSGVITTKAILDYELTSSYSLIVQATDKGMPRLSNTTVIKVQVTDINDNAPAFLPSEAVEITEDSLPGVIVTHVSVHDVDLNSAFIFSFAKESNPGTKFAIDQNTGVVVLVKTLDFEEMTEYELLIQISDSVHYTEGALVVRVLDVNDNPPVFSQDFYQVTVPESIPVGYSVLTLSATDLESNENISYRILSSSKEFSIDPKNGTIFTISPVLLLDTISTTQFLVEASDGGNPDLRALTLVEIGIEDMNNYAPEFTVKSYNLSLSEDALVGSTLVTFSNIDHDWTRENTYVEYSIISGNSQNNFHVETKFFHSEYPYKQVGYLVLLHSLDREASASHELVILASDSGCPPLSSTAVISIQVLDVNDNPPNFSSLSYHTHVKESTPLGSHITVVSANDRDTGSHAEIIYNIISGNEKGHFYLEENTGVLYLIKPLDYEKMTKFTLTVQASDAEKKHFSFAVVFVSVLDDNDHAPQFMFSSFSCIVPENLPISSTICSINALDFDAGPYGELTYSIVSPCFLTHGMSYDHDLFLIDPLTGDIHAKQILDYENGNKYCLTVQAKDKGDATASLVVWVDIEGIDEFEPIFTQDQYFFTLPEKNKDRQLIGRVEASDADAGIDGVILYSLGTSSPFFSVNKTNGNIYLIRALPLIKSQLNKEDTLEMKIIAHSPKSDSKFASCTVFVNVSFSSEGTPLAVFASSFSISLVVSFLVFLILICILIVMILRHKQKDTINNYEEKKTSSLDADLRVTRDASVLKAFQKTDDCSNEVVPVDATPEWLSLISIMEKDIVNLYRHSNSSGHCSVEGETAEDKEIQRINEHPYRKCSDSALSDHESRVPDSGIPRDSDQLSCLSGETDVMVTAETAEASQTFGEGDQGEGCSTTCAQNNVLPQTVQKREAKESILADVRKESVFISGDQEVRCAALSTQTTSDHDGKDNYHWNYLLSWEPKFQPLASVFNDIAKLKDEHLHMPGIPKEKKSFVFPPPLITAVAQPGIKAVPPRMPAVNLGQVPPKHPRSPIPYHLGSLPEGMTPNFSPSLSLLTMQPPALSPLLREGELLGTHISGTCHELKAEDEVQI

SEQ ID NO: 345 - DNA, 5052 bp, Homo sapiens
gaataatgcacctgactttaccaggggggaacaaccagccgagtagaacaaggaacagatgtaaagggaataaaaggagagagaaaaagagatgagattcgtttaaagaaatccaggggcagaagaggtggctgccgcggcagaggcagctagagcttacttccctgtctgcgtgagctgcaggcagaggacgctttcaccagttgcagatgtaacctcgggaattcctgggccgtcggtttgtttgctaaacaaagtcttttcttctctggctcagacactgaagagcctcctggatttttctgcgatcctgccacaagctggcagttacccgagagccttcccaaggagctggaggagaaatgagcccttgtgggcggaagatgggcgaagggcgtcagcagcagcgggctccggtcgggaagctccttctgctccccgggaggagagatacaccccatgggcggtcaggcagcagcggcgccaggacgcagcgctccctgctctggctcttggtgcacgtgtggctgtgggcggcctcgggctcctctgcccagttgttcaacctcaccctttccgtagatgaggggcttcccccggacacgctggtaggtgacatccgcgccgggctgccggccgcgcagcagcaggaggggagcggcttctttctgtcggaggactccgatgactccccgctgctggacgacttccacgtgcacccggacaccggcatcatccgcactgcgcggcgcctggaccgcgagcggcgggaccactacagcttcgtcgccgccacgctgctgggcgctgtggtgcaggtggagattcgcgtcaacgacgtgaatgaccactcgccccgctttcccctcgactccctgcaactcgacgtctccgagctcagcccgccagggaccgccttccgcctgccaggtgcccacgatccggacgccggactgttcagcactcagggctacaccctggtgcaaccgtccgacctgcccaaggaccccgcaggcccgttcttccagttgcgctaccggactccggggccactaccgtcaccgcttttgccaggctcctcgtcacccctggagcctctagatctggtgctgctgcggcgcttggaccgagaggaggcagcggcgcaccggctgcagatcgaggcatgggacggcggccgaccccggcgcaccggcctcctgagcgtggagctgcgcgtgttggatgagaacgacaacccgccggtctttgagcaggacgagtaccgcgccgcggtgcgcgaggacgcccagccgggcgccgaggtctgtcgcgtgcgcgccaccgaccgcgacctggggcccaatggcttcgtgcgctacagcgtccgcgcccggcaagtgcctggggcgggtagcggcggcggggcactgggcgacgcggcctacttcgcggtggaggagctgagcggcgtggtgcgagtgtggagacctctggaccgcgaggcacaggcctggcaccagttggtggtggaggcccgcgatggaggcgccgagcctgaggttgccacggtgcgcgtgtccatcgccgtgctggacgtgaatgacaaccggccagcaattcacgtgctctttctcacagagggaggcgtcgcccgtgtctctgaaggcgcccgaccgggcgactacgtggctcgcgtctcggtgtctgacgcggacggtgactgggagaaggaagatgaggccacaggggagcttggtgtgggtcttggagacgggagcatctcgctgtccttggaaggcggagagggagacttcgcgttgctgcccggcggccccccaggggtatttttcctttgcgtggaggggcccctggacagagagagccgcgatctgtatgagttactactggtggccacggacgcggggtccccgccgctgagcacggaggagacgctgctactccgggtcgctgacctcaatgaccaaccacctctcttcagccaacagcattacaaggcctcagtgtccgaggccgcggcccctggcactgtagtcatgtgggtcagcgcctccgatgccgacgaggcaggcagtgatcacgcctggctgcgctacactgtagtccaactctcggctccctgcaatctcggctccctggaatcaaagatggtccacaccgcagagtgtggaccatcttttgccattgattccgaaagcggtgtgatcagcactatccgggctctagaccgagaggtccaggaggcggtggagctgaaagtggtggcccaggacctcggagagcccccactctctgccacctgcctggtgagcatcaccgtagatgatgtgaatgacaatgagcccatcttctggaggcaggtgtacaatgccaccattgcagagcatgccccggttggacactgctttctgcaggtgacagcctctgatgcagattcaggactctatggctttattgaatattctctttatgatggattcctgagctatgaagcacctcaggcattccggatcgaccctcatgatgggcaaatctgtgtttctcaagatatcgacagggaaagggatccagctacctatgatctcctggtggaagctaaggatgggggtgggctaagtgcccaagcctttgttcgtgtggacctggaggacgtgaatgataatcatcctgtgtttaacccatcaacctatgtgacgagcatcagtgatgagacccagccaggcaccgagatcatcaatgttcttgccactgaccaggactctgggatatatgggacagtggcttatgagcttattccaggaaacgtgtcgtccctttttaccattgactccaccacaggaattatttacttaacattacctcttagtcatttggaatctaccacacttttgttgatggtctctgctcaagacggtggtgggctcacagctgtcattaatgccgatgtcaccatacacattttccagacaactctggcacctgctgagtttgaaaggcctaagtacactttcttagtttatgaagatgtgcctgaagatagtcccattggaacagtgaaagcaagagagcccttgaactcctcagaaccaatcttttacaggatttcttctggtgatctcggcggaaagttctccattcacccgcggctgggcactattcgcacccggaagcccctggatcacgagacgcagcccgtggttgtgctcacggtgcaggcgcagctcggcagcgccccagcctgcagcagcaccgaggtcaacataacagtcatggatgtcaatgacaaccacccagcgttcctcaggacctcggatgagattagaatatcccagaccacgccccctggcacagccttgtacctcgcacgtgcggaagacagagacagtgggcggaacggactcatccggtactccatcgccagcccgcagccaggcgtctttgccatcgacagagccctgggggtgctgttcctcaacggcagcctgggcgcgggcgagcagcgggagctcacgctgactctcagggccgaggaccaaggcgtgcatcctcaggcagccctgctggtgctgacagtcgttatcgagaaacgcgaacacagcccatcctggactttcgaacatttggtctatcaagtggaagtcagtgagtctctctcaccgatgacacaaatgctgcaaacacaggcgcacccacttggcccccagcgtgcagcctcgcctcttaggtactcgctggaacccagcgtagactctgctatgtttggaatccgcccttacacgggctggatttatttgcggcgacagtttgactatgaatccacccaaacatataattttagagtgtttgcttggatccccgaggacggattcttgcaaaatgtgagcactacagtcattgttcgtgtctgggatgagaatgacaattcccccaccttcttgcatgatgtgttgtttttgaaagtcgaagagagccctgttccccaaggggtaataggcaaaattacagctattgacatggactctggaaagaatggacagctattatatttccttttgtctgatggaaaattcttcaagatgaatcctaatacaggagagttaatcaattgggtggcactggatcgtgagcaccgggggcaccatgagatgactgtgctagtgacagaccgcggctccccaccacgaaacgccaccatggcggtttacgtctcagttactgacatcaatgataacaggcccttcttcccccagtgtctccctggaaaggagttacacgtgaaggttctggaaggtcaaccagtaaatatgttggttacaactgtgtttgcaaaggatcctgatgaaggaaataatgcagaagttacatactcagtatcttcagctagacatatgcctctgaagggaaaaacagcatttgggaagcagtcgtgcaaaaaacaaacaaacaaacaaacaaaatcctgacctgaatctggtcagttctctagatctgcctcccaatttaaggaaaacataagaatagaggaacatattatgctacacgttggagatgcaacagcaaatctagatcatggaaaatgtcaggatacaagttccagtttattcaacaaataaattgcaaggacaaatagagagatgggtggcaggaatccatagattaaagaaatatgcaatatatggactttattttgatcttaatgtaaacaagaaaaataaagagtatttatgggatggttgaaaatttgaaaacttactgaatatttggtgatactgtgaaccattattaatttttaaggtataatatggtactgtgatgattgtgttaaaatatttattttttaaagatgcattttgaaatatatacagaagaaataatatgacttctggaacttacttcaaaaaaaatgggagaagcgaagtatatacatggggaatagatgaaataagattggccatgagctgatcattgttgaagctaggtgatggactcgtgaaagtttattataccattttgtccacttttttgtatgcattttccataataaaacttttt

SEQ ID NO: 346 - protein, 1366 aa, Homo sapiens
MSPCGRKMGEGRQQQRAPVGKLLLLPGRRDTPHGRSGSSGARTQRSLLWLLVHVWLWAASGSSAQLFNLTLSVDEGLPPDTLVGDIRAGLPAAQQQEGSGFFLSEDSDDSPLLDDFHVHPDTGIIRTARRLDRERRDHYSFVAATLLGAVVQVEIRVNDVNDHSPRFPLDSLQLDVSELSPPGTAFRLPGAHDPDAGLFSTQGYTLVQPSDLPKDPAGPFFQLRYRTPGPLPSPLLPGSSSPLEPLDLVLLRRLDREEAAAHRLQIEAWDGGRPRRTGLLSVELRVLDENDNPPVFEQDEYRAAVREDAQPGAEVCRVRATDRDLGPNGFVRYSVRARQVPGAGSGGGALGDAAYFAVEELSGVVRVWRPLDREAQAWHQLVVEARDGGAEPEVATVRVSIAVLDVNDNRPAIHVLFLTEGGVARVSEGARPGDYVARVSVSDADGDWEKEDEATGELGVGLGDGSISLSLEGGEGDFALLPGGPPGVFFLCVEGPLDRESRDLYELLLVATDAGSPPLSTEETLLLRVADLNDQPPLFSQQHYKASVSEAAAPGTVVMWVSASDADEAGSDHAWLRYTVVQLSAPCNLGSLESKMVHTAECGPSFAIDSESGVISTIRALDREVQEAVELKVVAQDLGEPPLSATCLVSITVDDVNDNEPIFWRQVYNATIAEHAPVGHCFLQVTASDADSGLYGFIEYSLYDGFLSYEAPQAFRIDPHDGQICVSQDIDRERDPATYDLLVEAKDGGGLSAQAFVRVDLEDVNDNHPVFNPSTYVTSISDETQPGTEIINVLATDQDSGIYGTVAYELIPGNVSSLFTIDSTTGIIYLTLPLSHLESTTLLLMVSAQDGGGLTAVINADVTIHIFQTTLAPAEFERPKYTFLVYEDVPEDSPIGTVKAREPLNSSEPIFYRISSGDLGGKFSIHPRLGTIRTRKPLDHETQPVVVLTVQAQLGSAPACSSTEVNITVMDVNDNHPAFLRTSDEIRISQTTPPGTALYLARAEDRDSGRNGLIRYSIASPQPGVFAIDRALGVLFLNGSLGAGEQRELTLTLRAEDQGVHPQAALLVLTVVIEKREHSPSWTFEHLVYQVEVSESLSPMTQMLQTQAHPLGPQRAASPLRYSLEPSVDSAMFGIRPYTGWIYLRRQFDYESTQTYNFRVFAWIPEDGFLQNVSTTVIVRVWDENDNSPTFLHDVLFLKVEESPVPQGVIGKITAIDMDSGKNGQLLYFLLSDGKFFKMNPNTGELINWVALDREHRGHHEMTVLVTDRGSPPRNATMAVYVSVTDINDNRPFFPQCLPGKELHVKVLEGQPVNMLVTTVFAKDPDEGNNAEVTYSVSSARHMPLKGKTAFGKQSCKKQTNKQTKS

SEQ ID NO: 347 - DNA, 1797 bp, Homo sapiens
ggcgggtactgcgttagtgattagagtttcttccctgccggaggtgggatacacggtagcatcatggtcgaggaggtacagaaacattctgtacacacccttgtgttcaggtcgttgaagaggacccatgacatgtttgtagctgataatggaaaacctgtgcctttagatgaagagagtcacaaacgaaaaatggcaatcaagcttcgtaatgagtatggtcctgtgttgcatatgcctacttcaaaagaaaatcttaaagagaagggtcctcagaatgcaacggattcatatgttcataaacagtaccctgccaatcaaggacaagaagttgaatactttgtggcaggtacacatccatacccaccaggacctggggttgctttgacagcagatactaagatccagagaatgccaagtgaatcagctgcacagtccttagcggtggcattacctttgcagaccaaggctgatgcaaatcgtactgcccctagtggaagtgaataccgacatcctggggcttctgaccgtccacagcctacagcgatgaattcaattgtcatggagactggcaataccaagaactctgcactgatggctaaaaaagcccctacaatgccaaaaccccagtggcacccaccgtggaaactctacagggttatcagtgggcatcttggctgggttcgatgtattgctgtggaacctggaaatcagtggtttgttactggatctgctgacagaactataaagatctgggacttggctagtggcaaattaaaactgtcattgactgggcatattagtactgtgcggggcgtgatagtaagcacaaggagcccatatctgttctcttgtggagaagacaaacaagtgaaatgctgggatctcgaatacaataaggttatacggcattatcatggacatttaagtgcagtgtatggtttggatttgcacccgacaatcgatgtgttggtaacctgtagtcgagattcaactgcacggatttgggatgtgagaactaaagccagtgtacacacattatctggacatacaaatgcagttgctacagtgagatgtcaggctgcagaaccacaaattattacaggaagccatgatactacaattcgattatgggatctggtggctggaaaaacaagagtgacattaacaaatcacaaaaaatcagttagggctgtggttttacatccaagacattacacatttgcatctggttctccagataacataaagcagtggaaattccctgatggaagtttcattcaaaatctttccggtcataatgctattattaacacattgacggtaaattctgatggagtgcttgtatctggagctgacaatggcaccatgcatctttgggactggagaactggctacaattttcagagagttcacgcagctgtgcaacctgggtctttggacagtgaatcaggaatatttgcttgtgcttttgatcagtctgaaagtcgattactaacagctgaagctgataaaaccattaaagtatacagagaggatgacacagccacagaagaaactcatccagtcagctggaaaccagaaattatcaagagaaagagattttaatgaatgtggaattttttctctctctttttttttctttttaattaaaaaaaaaaaagcttggcgttcatgaggatatccagtcattttgtgctctggctgggaatataaaggagaaattcacttgcttcaatcattgctgcttcatattttacaataaactgtcccctgtcccctaaaaaaaaaaaaaaa

SEQ ID NO: 348 - protein, 514 aa, Homo sapiens
MVEEVQKHSVHTLVFRSLKRTHDMFVADNGKPVPLDEESHKRKMAIKLRNEYGPVLHMPTSKENLKEKGPQNATDSYVHKQYPANQGQEVEYFVAGTHPYPPGPGVALTADTKIQRMPSESAAQSLAVALPLQTKADANRTAPSGSEYRHPGASDRPQPTAMNSIVMETGNTKNSALMAKKAPTMPKPQWHPPWKLYRVISGHLGWVRCIAVEPGNQWFVTGSADRTIKIWDLASGKLKLSLTGHISTVRGVIVSTRSPYLFSCGEDKQVKCWDLEYNKVIRHYHGHLSAVYGLDLHPTIDVLVTCSRDSTARIWDVRTKASVHTLSGHTNAVATVRCQAAEPQIITGSHDTTIRLWDLVAGKTRVTLTNHKKSVRAVVLHPRHYTFASGSPDNIKQWKFPDGSFIQNLSGHNAIINTLTVNSDGVLVSGADNGTMHLWDWRTGYNFQRVHAAVQPGSLDSESGIFACAFDQSESRLLTAEADKTIKVYREDDTATEETHPVSWKPEIIKRKRF

SEQ ID NO: 349 - DNA, 1820 bp, Homo sapiens
gcggcgacgacggcggcggcagcgctccaactggctcctcgctccgggctccgccgtcgagccgggagagagcctccgccagcggccaggcaccagccagacgacgccagcgaccccggcctctcggcggcaccgcgctaactcaggggctgcataggcacccagagccgaactccaagatgggaggcaagctcagcaagaagaagaagggctacaatgtgaacgacgagaaagccaaggagaaagacaagaaggccgagggcgcggcgacggaagaggaggggaccccgaaggagagtgagccccaggcggccgcagagcccgccgaggccaaggagggcaaggagaagcccgaccaggacgccgagggcaaggccgaggagaaggagggcgagaaggacgcggcggctgccaaggaggaggccccgaaggcggagcccgagaagacggagggcgcggcagaggccaaggctgagcccccgaaggcgcccgagcaggagcaggcggcccccggccccgctgcgggcggcgaggcccccaaagctgctgaggccgccgcggccccggccgagagcgcggcccctgccgccggggaggagcccagcaaggaggaaggggaacccaaaaagactgaggcgcccgcagctcctgccgcccaggagaccaaaagtgacggggccccagcttcagactcaaaacccggcagctcggaggctgccccctcttccaaggagacccccgcagccacggaagcgcctagttccacacccaaggcccagggccccgcagcctctgcagaagagcccaagccggtggaggccccggcagctaattccgaccaaaccgtaaccgtgaaagagtgacaaggacagcctataggaaaaacaataccacttaaaacaatctcctctctctctctctctctctctctctatctctctctctatctcctctctctctctcctctcctatctctcctctctctctctcctatactaacttgtttcaaattggaagtaatgatatgtattgcccaaggaaaaatacaggatgttgtcccatcaagggagggagggggtgggagaatccaaatagtatttttgtggggaaatatctaatataccttcagtcaactttaccaagaagtcctggatttccaagatccgcgtctgaaagtgcagtacatcgtttgtacctgaaactgccgccacatgcactcctccaccgctgagagttgaatagcttttcttctgcaatgggagttgggagtgatgcgtttgattctgcccacagggcctgtgccaaggcaatcagatctttatgagagcagtattttctgtgttttctttttaatttacagcctttcttattttgatatttttttaatgttgtggatgaatgccagctttcagacagagcccacttagcttgtccacatggatctcaatgccaatcctccattcttcctctccagatatttttgggagtgacaaacattctctcatcctacttagcctacctagatttctcatgacgagttaatgcatgtccgtggttgggtgcacctgtagttctgtttattggtcagtggaaatgaaaaaaaaaaaaaaaaaaagtctgcgttcattgcagttccagtttctcttccattctgtgtcacagacaccaacacaccactcattggaaaatggaaaaaaaaaacaaaaaaaaaacaaaaaaatgtacaatggatgcattgaaattatatgtaattgtataaatggtgcaacagtaataaagttaaacaattaaaaagaaaaaaaaaaaaaaaaaaaaaaaaa

SEQ ID NO: 350 - protein, 227 aa, Homo sapiens
MGGKLSKKKKGYNVNDEKAKEKDKKAEGAATEEEGTPKESEPQAAAEPAEAKEGKEKPDQDAEGKAEEKEGEKDAAAAKEEAPKAEPEKTEGAAEAKAEPPKAPEQEQAAPGPAAGGEAPKAAEAAAAPAESAAPAAGEEPSKEEGEPKKTEAPAAPAAQETKSDGAPASDSKPGSSEAAPSSKETPAATEAPSSTPKAQGPAASAEEPKPVEAPAANSDQTVTVKE

SEQ ID NO: 351 - DNA, 4955 bp, Homo sapiens
gcttaaaaaagcacagggagatcgcgggcagctttgcagtcgctgccttctcgcgcctgaccatgcacccctgcatcttcctgctgggccacaggcgagcgctttatttctggagctgagggctaaaacttttttgacttttcttctcctcaacatctgaatcatgccatgtgcccagaggagctggcttgcaaacctttccgtggtggctcagctccttaactttggggcgctttgctatgggagacagcctcagccaggcccggttcgcttcccggacaggaggcaagagcattttatcaagggcctgccagaataccacgtggtgggtccagtccgagtagatgccagtgggcattttttgtcatatggcttgcactatcccatcacgagcagcaggaggaagagagatttggatggctcagaggactgggtgtactacagaatttctcacgaggagaaggacctgttttttaacttgacggtcaatcaaggatttctttccaatagctacatcatggagaagagatatgggaacctctcccatgttaagatgatggcttcctctgcccccctctgccatctcagtggcacggttctacagcagggcaccagagttgggacggcagccctcagtgcctgccatggactgactggatttttccaactaccacatggagactttttcattgaacccgtgaagaagcatccactggttgagggagggtaccacccgcacatcgtttacaggaggcagaaagttccagaaaccaaggagccaacctgtggattaaaggacagtgttaacatctcccagaagcaagagctatggcgggagaagtgggagaggcacaacttgccaagcagaagcctctctcggcgttccatcagcaaggagagatgggtggagacactggtggtggccgacacaaagatgattgaataccatgggagtgagaatgtggagtcctacatcctcaccatcatgaacatggtcactgggttgttccataacccaagcattggcaatgcaattcacattgttgtggttcggctcattctactcgaagaagaagagcaaggactgaaaatagttcaccatgcagaaaagacactgtctagcttctgcaagtggcagaagagtatcaatcccaagagtgacctcaatcctgttcatcacgacgtggctgtccttctcaccagaaaggacatctgtgctggtttcaatcgcccctgcgagaccctgggcctgtctcacctttcaggaatgtgtcagcctcaccgcagttgtaacatcaatgaagattcgggactccctctggctttcacaattgcccatgagctaggacacagcttcggcatccagcatgatgggaaagaaaatgactgtgagcctgtgggcagacatccgtacatcatgtcccgccagctccagtacgatcccactccgctgacatggtccaagtgcagcgaggagtacatcacccgcttcttggaccgaggctgggggttctgtcttgatgacatacctaaaaagaaaggcttgaagtccaaggtcattgcccccggagtgatctatgatgttcaccaccagtgccagctacaatatggacccaatgctaccttctgccaggaagtagaaaacgtctgccagacactgtggtgctccgtgaagggcttttgtcgctctaagctggacgctgctgcagatggaactcaatgtggtgagaagaagtggtgtatggcaggcaagtgcatcacagtggggaagaaaccagagagcattcctggaggctggggccgctggtcaccctggtcccactgttccaggacctgtggggctggagtccagagcgcagagaggctctgcaacaaccccgagccaaagtttggagggaaatattgcactggagaaagaaaacgctatcgcttgtgcaacgtccacccctgtcgctcagaggcaccaacatttcggcagatgcagtgcagtgaatttgacactgttccctacaagaatgaactctaccactggtttcccatttttaacccagcacatccttgtgagctctactgccgacccatagatggccagttttctgagaaaatgctggatgctgtcattgatggtaccccttgctttgaaggcggcaacagcagaaatgtctgtattaatggcatatgtaagatggttggctgtgactatgagatcgattccaatgccaccgaggatcgctgcggtgtgtgcctgggagatggctcttcctgccagactgtgagaaagatgtttaagcagaaggaaggatctggttatgttgacattgggctcattccaaaaggagcaagggacataagagtgatggaaattgagggagctggaaacttcctggccatcaggagtgaagatcctgaaaaatattacctgaatggagggtttattatccagtggaacgggaactataagctggcagggactgtctttcagtatgacaggaaaggagacctggaaaagctgatggccacaggtcccaccaatgagtctgtgtggatccagcttctattccaggtgactaaccctggcatcaagtatgagtacacaatccagaaagatggccttgacaatgatgttgagcagcagatgtacttctggcagtacggccactggacagagtgcagtgtgacctgcgggacaggtatccgccgccaaactgcccattgcataaagaagggccgcgggatggtgaaagctacattctgtgacccagaaacacagcccaatgggagacagaagaagtgccatgaaaaggcttgtccacccaggtggtgggcaggggagtgggaagcatgctcggcgacatgcgggccccacggggagaagaagcgaaccgtgctgtgcatccagaccatggtctctgacgagcaggctctcccgcccacagactgccagcacctgctgaagcccaagaccctcctttcctgcaacagagacatcctgtgcccctcggactggacagtgggcaactggagtgagtgttctgtttcctgtggtggtggagtgcggattcgcagtgtcacatgtgccaagaaccatgatgaaccttgcgatgtgacaaggaaacccaacagccgagctctgtgtggcctccagcaatgcccttctagccggagagttctgaaaccaaacaaaggcactatttccaatggaaaaaacccaccaacactaaagcccgtccctccacctacatccaggcccagaatgctgaccacacccacagggcctgagtctatgagcacaagcactccagcaatcagcagccctagtcctaccacagcctccaaagaaggagacctgggtgggaaacagtggcaagatagctcaacccaacctgagctgagctctcgctatctcatttccactggaagcacttcccagcccatcctcacttcccaatccttgagcattcagccaagtgaggaaaatgtttccagttcagatactggtcctacctcggagggaggccttgtagctacaacaacaagtggttctggcttgtcatcttcccgcaaccctatcacttggcctgtgactccattttacaataccttgaccaaaggtccagaaatggagattcacagtggctcaggggaagaaagagaacagcctgaggacaaagatgaaagcaatcctgtaatatggaccaagatcagagtacctggaaatgacgctccagtggaaagtacagaaatgccacttgcacctccactaacaccagatctcagcagggagtcctggtggccacccttcagcacagtaatggaaggactgctccccagccaaaggcccactacttccgaaactgggacacccagagttgaggggatggttactgaaaagccagccaacactctgctccctctgggaggagaccaccagccagaaccctcaggaaagacggcaaaccgtaaccacctgaaacttccaaacaacatgaaccaaacaaaaagttctgaaccagtcctgactgaggaggatgcaacaagtctgattactgagggctttttgctaaatgcctccaattacaagcagctcacaaacggccacggctctgcacactggatcgtcggaaactggagcgagtgctccaccacatgtggcctgggggcctactggagaagggtggagtgcagcacccagatggattctgactgtgcggccatccagagacctgaccctgcaaaaagatgccacctccgtccctgtgctggctggaaagtgggaaactggagcaagtgctccagaaactgcagtgggggcttcaagatacgcgagattcagtgcgtggacagccgggaccaccggaacctgaggccatttcactgccagttcctggccggcattcctcccccattgagcatgagctgtaacccggagccctgtgaggcgtggcaggtggagccttggagccagtgctccaggtcctgtggaggtggagttcaggagagaggagtgttctgtccaggaggcctctgtgattggacaaaaagacccacatccaccatgtcttgcaatgagcacctgtgctgtcactgggccactgggaactgggacctgtgttccacttcctgtggaggtggctttcagaagaggactgtccaatgtgtgccctcagagggcaataaaactgaagaccaagaccaatgtctatgtgatcacaaacccagacctccagaattcaaaaaatgcaaccagcaggcctgcaagaaaagtgccgatttactttgcactaaggacaaactgtcagccagtttctgccagacactgaaagccatgaagaaatgttctgtgcccaccgtgagggctgagtgctgcttctcgtgtccccagacacacatcacacacacccaaaggcaaagaaggcaacggttgctccaaaagtcaaaagaactctaagcccaaa

SEQ ID NO: 352 - protein, 1594 aa, Homo sapiens
MPCAQRSWLANLSVVAQLLNFGALCYGRQPQPGPVRFPDRRQEHFIKGLPEYHVVGPVRVDASGHFLSYGLHYPITSSRRKRDLDGSEDWVYYRISHEEKDLFFNLTVNQGFLSNSYIMEKRYGNLSHVKMMASSAPLCHLSGTVLQQGTRVGTAALSACHGLTGFFQLPHGDFFIEPVKKHPLVEGGYHPHIVYRRQKVPETKEPTCGLKDSVNISQKQELWREKWERHNLPSRSLSRRSISKERWVETLVVADTKMIEYHGSENVESYILTIMNMVTGLFHNPSIGNAIHIVVVRLILLEEEEQGLKIVHHAEKTLSSFCKWQKSINPKSDLNPVHHDVAVLLTRKDICAGFNRPCETLGLSHLSGMCQPHRSCNINEDSGLPLAFTIAHELGHSFGIQHDGKENDCEPVGRHPYIMSRQLQYDPTPLTWSKCSEEYITRFLDRGWGFCLDDIPKKKGLKSKVIAPGVIYDVHHQCQLQYGPNATFCQEVENVCQTLWCSVKGFCRSKLDAAADGTQCGEKKWCMAGKCITVGKKPESIPGGWGRWSPWSHCSRTCGAGVQSAERLCNNPEPKFGGKYCTGERKRYRLCNVHPCRSEAPTFRQMQCSEFDTVPYKNELYHWFPIFNPAHPCELYCRPIDGQFSEKMLDAVIDGTPCFEGGNSRNVCINGICKMVGCDYEIDSNATEDRCGVCLGDGSSCQTVRKMFKQKEGSGYVDIGLIPKGARDIRVMEIEGAGNFLAIRSEDPEKYYLNGGFIIQWNGNYKLAGTVFQYDRKGDLEKLMATGPTNESVWIQLLFQVTNPGIKYEYTIQKDGLDNDVEQQMYFWQYGHWTECSVTCGTGIRRQTAHCIKKGRGMVKATFCDPETQPNGRQKKCHEKACPPRWWAGEWEACSATCGPHGEKKRTVLCIQTMVSDEQALPPTDCQHLLKPKTLLSCNRDILCPSDWTVGNWSECSVSCGGGVRIRSVTCAKNHDEPCDVTRKPNSRALCGLQQCPSSRRVLKPNKGTISNGKNPPTLKPVPPPTSRPRMLTTPTGPESMSTSTPAISSPSPTTASKEGDLGGKQWQDSSTQPELSSRYLISTGSTSQPILTSQSLSIQPSEENVSSSDTGPTSEGGLVATTTSGSGLSSSRNPITWPVTPFYNTLTKGPEMEIHSGSGEEREQPEDKDESNPVIWTKIRVPGNDAPVESTEMPLAPPLTPDLSRESWWPPFSTVMEGLLPSQRPTTSETGTPRVEGMVTEKPANTLLPLGGDHQPEPSGKTANRNHLKLPNNMNQTKSSEPVLTEEDATSLITEGFLLNASNYKQLTNGHGSAHWIVGNWSECSTTCGLGAYWRRVECSTQMDSDCAAIQRPDPAKRCHLRPCAGWKVGNWSKCSRNCSGGFKIREIQCVDSRDHRNLRPFHCQFLAGIPPPLSMSCNPEPCEAWQVEPWSQCSRSCGGGVQERGVFCPGGLCDWTKRPTSTMSCNEHLCCHWATGNWDLCSTSCGGGFQKRTVQCVPSEGNKTEDQDQCLCDHKPRPPEFKKCNQQACKKSADLLCTKDKLSASFCQTLKAMKKCSVPTVRAECCFSCPQTHITHTQRQRRQRLLQKSKEL

SEQ ID NO: 353 - DNA, 7563 bp, Homo sapiens
atgggcagccaggccctgcaggagtggggacagagggaacccggccggtggcccgaccctgcagggaagaaggacgtgcggcgagaagcatcggattcggggagggccgggacctggccgaggacagccaaggaaaaactaaagatcgacggggacacccgcctcccttcctcgccccaacggtttctcagaggctgtggggacttgcaccagaaacccaagttggaactaattctttctttcggaaggtgcaactcccctcccgcgagctccgcggtgccgggccgagattgccgagaggaagcggcgcagcgctgccgccaaggctcctcctgtcgccggtgcggccgggactacctggcggcgcggcgcgtgcagcgcgcagagccggacccagtgcgcccgcccgtcggtcagtccaggccaggcgcccggcgggccgcgctcacgcagttggcgcaggaggccttacgctggcggcgcagtgcccgccccctgcgctctccccgccccctccctccctcgcaggggccgagcgaatgtagcccgcgagagaaaatggcggcggcggcggggaatcgcgcctcgtcgtcgggattcccgggcgccagggctacgagccctgaggcaggcggcggcggaggagccctcaaggcgagcagcgcgcccgcggctgccgcgggactgctgcgggaggcgggcagcgggggccgcgagcgggcggactggcggcggcggcagctgcgcaaagtgcggagtgtggagctggaccagctgcctgagcagccgctcttccttgccgcctcaccgccggcctcctcgacttccccgtcgccggagcccgcggacgcagcggggagtgggaccggcttccagcctgtggcggtgccgccgccccacggagccgcgagccgcggcggcgcccaccttaccgagtcggtggcggcgccggacagcggcgcctcgagtcccgcagcggccgagcccggggagaagcgggcgcccgccgccgagccgtctcctgcagcggcccccgccggtcgtgagatggagaataaagaaactctcaaagggttgcacaagatggatgatcgtccagaggaacgaatgatcagggagaaactgaaggcaacctgtatgccagcctggaagcacgaatggttggaaaggagaaataggcgagggcctgtggtggtaaaaccaatcccagttaaaggagatggatctgaaatgaatcacttagcagctgagtctccaggagaggtccaggcaagtgcggcttcaccagcttccaaaggccgacgcagtccttctcctggcaactccccatcaggtcgcacagtgaaatcagaatctccaggagtaaggagaaaaagagtttccccagtgccttttcagagtggcagaatcacaccaccccgaagagccccttcaccagatggcttctcaccatatagccctgaggaaacaaaccgccgtgttaacaaagtgatgcgggccagactgtacttactgcagcagatagggcctaactctttcctgattggaggagacagcccagacaataaataccgggtgtttattgggcctcagaactgcagctgtgcacgtggaacattctgtattcatctgctatttgtgatgctccgggtgtttcaactagaaccttcagacccaatgttatggagaaaaactttaaagaattttgaggttgagagtttgttccagaaatatcacagtaggcgtagctcaaggatcaaagctccatctcgtaacaccatccagaagtttgtttcacgcatgtcaaattctcatacattgtcatcatctagtacttctacgtctagttcagaaaacagcataaaggatgaagaggaacagatgtgtcctatttgcttgttgggcatgcttgatgaagaaagtcttacagtgtgtgaagacggctgcaggaacaagctgcaccaccactgcatgtcaatttgggcagaagagtgtagaagaaatagagaacctttaatatgtcccctttgtagatctaagtggagatctcatgatttctacagccacgagttgtcaagtcctgtggattccccttcttccctcagagctgcacagcagcaaaccgtacagcagcagcctttggctggatcacgaaggaatcaagagagcaattttaaccttactcattatggaactcagcaaatccctcctgcttacaaagatttagctgagccatggattcaggtgtttggaatggaactcgttggctgcttattttctagaaactggaatgtgagagagatggccctcaggcgtctttcccatgatgtcagtggggccctgctgttggcaaatggggagagcactggaaattctgggggcagcagtggaagcagcccgagtgggggagccaccagtgggtcttcccagaccagtatctcaggagatgtggtggaggcatgctgcagcgttctgtcaatggtctgtgctgaccctgtctacaaagtgtacgttgctgctttaaaaacattgagagccatgctggtatatactccttgccacagtttagcggaaagaatcaaacttcagagacttctccagccagttgtagacaccatcctagtcaaatgtgcagatgccaatagccgcacaagtcagctgtccatatcaacactgttggaactgtgcaaaggccaagcaggagagttggcagttggcagagaaatactaaaagctggatccattggtattggtggtgttgattatgtcttaaattgtattcttggaaaccaaactgaatcaaacaattggcaagaacttcttggccgcctttgtcttatagatagactgttgttggaatttcctgctgaattttatcctcatattgtcagtactgatgtttcacaagctgagcctgttgaaatcaggtataagaagctgctgtccctcttaacctttgctttgcagtccattgataattcccactcaatggttggcaaactttccagaaggatctacttgagttctgcaagaatggttactacagtaccccatgtgttttcaaaactgttagaaatgctgagtgtttccagttccactcacttcaccaggatgcgtcgccgtttgatggctattgcagatgaggtggaaattgccgaagccatccagttgggcgtagaagacactttggatggtcaacaggacagcttcttgcaggcatctgttcccaacaactatctggaaaccacagagaacagttcccctgagtgcacagtccatttagagaaaactggaaaaggattatgtgctacaaaattgagtgccagttcagaggacatttctgagagactggccagcatttcagtaggaccttctagttcaacaacaacaacaacaacaacaacagagcaaccaaagccaatggttcaaacaaaaggcagaccccacagtcagtgtttgaactcctctcctttatctcatcattcccaattaatgtttccagccttgtcaaccccttcttcttctaccccatctgtaccagctggcactgcaacagatgtctctaagcatagacttcagggattcattccctgcagaataccttctgcatctcctcaaacacagcgcaagttttctctacaattccacagaaactgtcctgaaaacaaagactcagataaactttccccagtctttactcagtcaagacccttgccctccagtaacatacacaggccaaagccatctagacctaccccaggtaatacaagtaaacagggagatccctcaaaaaatagcatgacacttgatctgaacagtagttccaaatgtgatgacagctttggctgtagcagcaatagtagtaatgctgttatacccagtgacgagacagtgttcaccccagtagaggagaaatgcagattagatgtcaatacagagctcaactccagtattgaggaccttcttgaagcatctatgccttcaagtgatacaacagtaacttttaagtcagaagttgctgtcctgtctcctgaaaaggctgaaaatgatgatacctacaaagatgatgtgaatcataatcaaaagtgcaaagagaagatggaagctgaagaagaagaagctttagcaattgccatggcaatgtcagcgtctcaggatgccctccccatagttcctcagctgcaggttgaaaatggagaagatatcatcattattcaacaggatacaccagagactctaccaggacataccaaagcaaaacaaccgtatagagaagacactgaatggctgaaaggtcaacagataggccttggagcattttcttcttgttatcaggctcaagatgtgggaactggaactttaatggctgttaaacaggtgacttatgtcagaaacacatcttctgagcaagaagaagtagtagaagcactaagagaagagataagaatgatgagccatctgaatcatccaaacatcattaggatgttgggagccacgtgtgagaagagcaattacaatctcttcattgaatggatggcagggggatcggtggctcatttgctgagtaaatatggagccttcaaagaatcagtagttattaactacactgaacagttactccgtggcctttcgtatctccatgaaaaccaaatcattcacagagatgtcaaaggtgccaatttgctaattgacagcactggtcagagactaagaattgcagattttggagctgcagccaggttggcatcaaaaggaactggtgcaggagagtttcagggacaattactggggacaattgcatttatggcacctgaggtactaagaggtcaacagtatggaaggagctgtgatgtatggagtgttggctgtgctattatagaaatggcttgtgcaaaaccaccatggaatgcagaaaaacactccaatcatcttgctttgatatttaagattgctagtgcaactactgctccatcgatcccttcacatttgtctcctggtttacgagatgtggctcttcgttgtttagaacttcaacctcaggacagacctccatcaagagagctactgaagcatccagtctttcgtactacatggtagccaattatgcagatcaactacagtagaaacaggatgctcaacaagagaaaaaaaacttgtggggaaccacattgatattctactggccatgatgccactgaacagctatgaacgaggccagtggggaacccttacctaagtatgtgattgacaaatcatgatctgtacctaagctcagtatgcaaaagcccaaactagtgcagaaactgtaaactgtgcctttcaaagaactggccctaggtgaacaggaaaacaatgaagtttgcatgactaaattgcagaagcataattttatttttttggagcactttttcagcaatattagcggctgaggggctcaggatctattttaatatttcaattattcttccatttcatatagtgatcacaagcagggggttctgcaattccgttcaaattttttgtcactggctataaaatcagtatctgcctcttttaggtcagagtatgctatgagtagcaatacatacatatatttttaaaagttgatacttctttatgacccacagttgacctttattttcttaaataccagggcagttgtggctcattgtgcattttactgttggcccattcatttcgtttttggaaattatggttttgtattttcatgtttatttacattcatttttgtttattcagggaaagctgatctttttttcaaaccagaaaaaaaaaatgaactagatatgaagtagagttcattaaatatcttgctattgtcagagtttttaaaatatagacttaattttgtttttttaaattggaatacaataaagtactacctacatttgagtcagtcaccactcttattgtgcaggttaagtacaagttaactaaaaataaactgtcctctctggtgcaactcacaaccaagatcaagattaccttaaaatttatttgaattttttagatgttttggttgtcaaactgtaggaaacttcacaacatttaagtcttactctgtatgtaacaatccatcattcaccttcactactggtagtaacatagagctgccattttccttttaccatgcatcatctctttacagtaggcctggcagatcattttttaaaaagattattcaactaccaatcagtaatgtttttaaacagtacatttgctttgaacttggaaaatgtgttcagaaagaaaaatggaattgaatttcatttatacactaattccttggattttgcacagttacctaacggttttagtctggagttaaattcagatgcatggaatcctgaaggaaaatggtagctttttaatctttttgtgtgtgtgtgagtcttttaaatcaagtactgattaactattaagtacaactttgagattttagttttaactcttcagaagccagtgtgaaatagaattggttattctcaaagactcaggataaactaaataagctatatatagagtacatttaaaatgtacaacacaaattggaaataaaataagttacaagataagtttacagggatatattgcttacaatttttaaaaggcagtttgttttttatgtgaatatgtttcttagtgaaattttacattcctttgttttggaagattggcgatatttgaagagttaaaaatagtacagaaatgtgaagtttggtatctctaaatgtgttgtacttgactttcttttttattttgtttttttttttttttgactacttagaattttcacaattctaataagattgtttccaagtctctcatgtgcaagctttaaaggatgcactcttgccattttatgtactggaagatcattggtcagatgaatactgtgtctgacaaaaatgtaaactgtataaactgaggaacctcagctaatcagtattactttgtagatcaccatgcccaccacatttcaaactcaaactatctgtagatttcaaaatccattgtgtttgagtttgtttgcagttccctcagcttgctggtaattgtggtgttttgttttttgttttgttttcaatgcaaatgtgatgtaatattcttattttctttggatcaaagctggactggaaattgtatcgtgtaattatttttgtgttcttaatgttatttggtactcaagttgtaaataacgtctactactgtttattccagtttctactacctcaggtgtcctatagatttttcttctaccaaagttcactttcacaatgaaattatatttgctgtgtgactatgattcctaagatttccagggcttaagggctaacttctattagcaccttactgtgtaagcaaatgttacaaaaaaaaaaaaaaaaaatctctgggttaagaaaatttggcttaaatgtatcctttgttattttaaatatattgagatattttaattaaaatttttaccccattgaaccgattttatagtatttgtacctattttggtgtttttgtctttatagtaaataaaagtttttg

SEQ ID NO: 354 - protein, 1698 aa, Homo sapiens
MGSQALQEWGQREPGRWPDPAGKKDVRREASDSGRAGTWPRTAKEKLKIDGDTRLPSSPQRFLRGCGDLHQKPKLELILSFGRCNSPPASSAVPGRDCREEAAQRCRQGSSCRRCGRDYLAARRVQRAEPDPVRPPVGQSRPGARRAALTQLAQEALRWRRSARPLRSPRPLPPSQGPSECSPREKMAAAAGNRASSSGFPGARATSPEAGGGGGALKASSAPAAAAGLLREAGSGGRERADWRRRQLRKVRSVELDQLPEQPLFLAASPPASSTSPSPEPADAAGSGTGFQPVAVPPPHGAASRGGAHLTESVAAPDSGASSPAAAEPGEKRAPAAEPSPAAAPAGREMENKETLKGLHKMDDRPEERMIREKLKATCMPAWKHEWLERRNRRGPVVVKPIPVKGDGSEMNHLAAESPGEVQASAASPASKGRRSPSPGNSPSGRTVKSESPGVRRKRVSPVPFQSGRITPPRRAPSPDGFSPYSPEETNRRVNKVMRARLYLLQQIGPNSFLIGGDSPDNKYRVFIGPQNCSCARGTFCIHLLFVMLRVFQLEPSDPMLWRKTLKNFEVESLFQKYHSRRSSRIKAPSRNTIQKFVSRMSNSHTLSSSSTSTSSSENSIKDEEEQMCPICLLGMLDEESLTVCEDGCRNKLHHHCMSIWAEECRRNREPLICPLCRSKWRSHDFYSHELSSPVDSPSSLRAAQQQTVQQQPLAGSRRNQESNFNLTHYGTQQIPPAYKDLAEPWIQVFGMELVGCLFSRNWNVREMALRRLSHDVSGALLLANGESTGNSGGSSGSSPSGGATSGSSQTSISGDVVEACCSVLSMVCADPVYKVYVAALKTLRAMLVYTPCHSLAERIKLQRLLQPVVDTILVKCADANSRTSQLSISTLLELCKGQAGELAVGREILKAGSIGIGGVDYVLNCILGNQTESNNWQELLGRLCLIDRLLLEFPAEFYPHIVSTDVSQAEPVEIRYKKLLSLLTFALQSIDNSHSMVGKLSRRIYLSSARMVTTVPHVFSKLLEMLSVSSSTHFTRMRRRLMAIADEVEIAEAIQLGVEDTLDGQQDSFLQASVPNNYLETTENSSPECTVHLEKTGKGLCATKLSASSEDISERLASISVGPSSSTTTTTTTTEQPKPMVQTKGRPHSQCLNSSPLSHHSQLMFPALSTPSSSTPSVPAGTATDVSKHRLQGFIPCRIPSASPQTQRKFSLQFHRNCPENKDSDKLSPVFTQSRPLPSSNIHRPKPSRPTPGNTSKQGDPSKNSMTLDLNSSSKCDDSFGCSSNSSNAVIPSDETVFTPVEEKCRLDVNTELNSSIEDLLEASMPSSDTTVTFKSEVAVLSPEKAENDDTYKDDVNHNQKCKEKMEAEEEEALAIAMAMSASQDALPIVPQLQVENGEDIIIIQQDTPETLPGHTKAKQPYREDTEWLKGQQIGLGAFSSCYQAQDVGTGTLMAVKQVTYVRNTSSEQEEVVEALREEIRMMSHLNHPNIIRMLGATCEKSNYNLFIEWMAGGSVAHLLSKYGAFKESVVINYTEQLLRGLSYLHENQIIHRDVKGANLLIDSTGQRLRIADFGAAARLASKGTGAGEFQGQLLGTIAFMAPEVLRGQQYGRSCDVWSVGCAIIEMACAKPPWNAEKHSNHLALIFKIASATTAPSIPSHLSPGLRDVALRCLELQPQDRPPSRELLKHPVFRTTW

SEQ ID NO: 355 - DNA, 1591 bp, Homo sapiens
agcgaaactaggcggtccgctcctgggacgcggtctcgggggcgggttcgcccctgaggcccggtgacccttcgcccgcaaccagggctagcgcttgtgtgcgcccacggaagcacccgagcgaccggagaaagaaaaagtggtcaaggggacctccttccagctctacgcgcctctcattcagagaggtgaggtcaggaaaggggaaggacgaagccccagagcaacagaagtcaggcggtgccaggaacactgagggcggagccaggggaaggcggccgagcgcggccccctctcctcccgggccggggcgggcccgaggcctcgatccgccttccccgcgccgtcctggtcacggccccgcggggcagccatgcctggccgtctgctgcggggcctgtggcagcgatggcgccgttacaagtaccgcttcgttccctggatcgcactgaacctaagccacaacccgaggaccctccgatatgttccagaggaatccaaagacaaagttatctcagatgaagatgtcctaggaacattactgaaagttttccaggctctattcttaaatgatttcaataaacaatcagaaatcttgactatgcttccagaatctgttaaatcaaaatatcaagacctactggcagttgaacatcaaggggtgaaactgcgtgaaaacagacatcaacagcaaagtacctttaaaccagaagaaattctttacaagactttgggtttcagtgttgcccaagcaactagctcattgatttctgctggaaaaggtgtcttcgttactaaaggattggtaccaaaaggcgcagtcgtatctatgtatcctggtacagtatatcagaagtatgagccgatctttttccagtccattggaaatccgtttatttttagatgcctggatggggtactcattgatgggaatgacaaagggatatcaaaagttgtgtacagatcttgcaatgggagggatcgactcggccctttaaaaatgagtgatagtacatggctaacgtcagaaattcataaccctctggctgtgggacagtatgtcaacaattgttccaatgacagagcagctaatgtctgttatcaggaatttgatgtgcctgcagttttccctatagaactgaagcagtatcttccaaacattgcctacagctatgacaaacaaagcccacttcgatgtgttgttcttgtcgcacttagggacatcaatcaaggagaagagcttttttcaaactactacacaattgtcagctaactctgtgaatcagaaattattaggttttctactcagctattaattctaagtgttttttgttaatcacttctctgagttctacctgtaaaacaaatattttgagacttaattggaataggaatttcttatgtttttgttgatattatatttatgttccaatttcatgataaaagctacttgcttcattacaatttcaaatttgtaatgcaattccaagtttaattggttttcacctaaatacacaatagcttattaaattaaaacctactctttgaacttataaaaaaaaaaaaaaagaaaaaaaaaaaaaaaaaaaaa

SEQ ID NO: 356 - protein, 299 aa, Homo sapiens
MPGRLLRGLWQRWRRYKYRFVPWIALNLSHNPRTLRYVPEESKDKVISDEDVLGTLLKVFQALFLNDFNKQSEILTMLPESVKSKYQDLLAVEHQGVKLRENRHQQQSTFKPEEILYKTLGFSVAQATSSLISAGKGVFVTKGLVPKGAVVSMYPGTVYQKYEPIFFQSIGNPFIFRCLDGVLIDGNDKGISKVVYRSCNGRDRLGPLKMSDSTWLTSEIHNPLAVGQYVNNCSNDRAANVCYQEFDVPAVFPIELKQYLPNIAYSYDKQSPLRCVVLVALRDINQGEELFSNYYTIVS

SEQ ID NO: 357 - DNA, 5220 bp, Homo sapiens
gctcgttcgccctaaaggtaccaatatggcggaggcttcttttggaagttcgagcccagttgggtctttgtcttctgaggatcatgattttgaccccactgctgagatgttggtccatgactatgatgatgaaagaactcttgaagaagaggaaatgatggatgagggtaaaaacttcagttcagaaattgaagacttagaaaaggaaggaaccatgcctctagaagatttactggcattctatggctatgaacctacaattccagcagttgcaaattccagtgcaaatagttccccaagtgaactggcagatgaactaccagacatgacactagacaaagaggaaatagcaaaagacctgttgtcaggtgatgacgaggaaactcagtcttctgcggatgatctgacgccatctgtgacttcccatgaaacttctgatttcttccctaggcctttacgatcaaatactgcatgtgatggtgataaggaatcagaggttgaagatgttgaaacagacagtggtaattcacctgaagatttgaggaaggaaataatgattggtttacaatatcaggcagagattcccccttatcttggagagtacgatggtaatgagaaagtatatgaaaacgaagaccagttactttggtgtcctgatgtggttttggagagcaaagttaaggaataccttgttgagacttcattaaggactggcagtgaaaaaataatggataggatttctgcaggaacacacacaagggacaatgaacaggcattatatgaacttctcaagtgtaaccacaatataaaggaagcaatcgaaagatactgctgcaatggaaaggcctctcaaggaatgactgcatggacggaagaagaatgccgaagctttgaacatgcactcatgctttttggaaaagattttcatcttatacagaagaataaggtgagaactaggacagttgctgagtgtgtagcattctactatatgtggaagaaatctgaacgttatgattactttgctcaacagacaagatttgggaaaaaaagatataaccatcaccctggagttacggactatatggatcgtttagtagatgaaacagaagctttgggtgggacggtaaatgcttcagccttaacttctaaccggcctgagcctattcctgatcaacagctaaacattctcaactccttcactgccagtgacttgacagctttgaccaacagtgtagcaaccgtctgcgaccccacagatgtgaattgtttggatgatagctttcctccactgggcaacacaccccgtggacaagttaatcatgtgcctgttgtaacagaagagttactcaccctgcccagcaatggggaaagtgattgttttaatttatttgagactggattttatcactcggagctaaaccctatgaacatgtgcagtgaagagtcagagagaccagcaaaaagattgaaaatgggcattgccgtccctgaatcctttatgaatgaagtttctgtaaataacctgggtgtggactttgaaaatcacacacatcacatcaccagtgccaaaatggctgtttctgtggctgactttggcagtctctctgccaacgagaccaatggtttcatcagtgcccatgctctgcatcagcacgcggccctacactctgagtgacctgagtgaggatcccggaactgcgtgtgcagcaccagtaaacttgaggggagctatcaggtttgcatagtctttcactggaagtttgaacctttctcactatgacatcagtgatgtcagtatgtatagaactatatcttgatttatcaagagtattttcatttttcaatccataaatgtggaaatgaactatgatcagcagagttgggaactaagattgaactctgtggtgcagctttaagctctgcttctctcttcctcatctcccaatacctcttccccactcccttctttttctattcttttgtgttccccactgccctcactcccaattttaaaacctgtagacagaggccaccagctcaaaaccagcacagatgttctgaactgaatggtgtggcctctttttgtgtaaattccttttgccgtaatggatgcagtggaataacaatgtttacaggtaccgatcccgatccctgctcaatgtagcatttttttggttttattttcttaataaaagcaggggtaggtttctttaaactgcacaaacatgcaaggattttttaaaaatggaaacttctctcatgttattcaactagagcacttcagtttacaaaacagcaagtccatctttatggaagccagcacaaggaactgtgtgcaaataatgaagacgcttgcttggatcctgtttcaaaattctagaccagggctaccttacacagaattggtcatgttactgccaggagatttctgtgtaacttcatttattggctacagttttggcatttgaagatgtggtactcagatggggttttgtccaccattgtcaagattgtaatcttaaaaatcataccagtcattgataatttagtttatcctgaggcagtcgacttgcagaggcacagtctacaaagcctaggatgttgccactcaatggtttacattttgggacatcttttaagttgtttgtagcactgcagttcaaagtgttaatatttagagggacttctagattttatacctaatgcagtagaaccttgaagtatatttaagcttttttgttaagcttgaacagttggcaagaataatgtgagttcctatctgaaatagaatggtacattaccacttttaagttttaaaaattgatagatgttcagatgtatctcaaactcagttttatttttattccaaatattgtgaatgagaagccattgtcctaaactttggccatttttgtgctataaacatgcatttttaagttataaggtgaatcaaacaatatgtaatacagtattaggatgtaatctttgcttttgtagtactgttaaaatagagaattatgttgtttgcaccgtcttaattaaaattcttgatttttactagttgctttgcaaaaaacaaatgtttggctgcattgctaatatttgtaagtataagttgcttcaaggttgtgctgatgagtagataggatgtagtgatcttagtagtgattgaaagggagggtatttattatacaaactgtgaactgcaatgacatccttagttttggatgatgtgtattcttgtttttctttgcagcattttaatgaagattgctttgaagtgtttacgcagtagcacattagtataaaatttagtttagcacagtggacaaaaagtagttaaattaataacttaaaatcagtctctaatttatacatctgaagtatagcattcctgtatgcacacagtaaataatgggtagcctgggctctgtgttactttcttgtatttttatccaagttgtcagcttcttattgctgtgttgttgtgctaaactttgaaccttatttcttttattaaaaatcagtacactttctataatttagtaagatactggccataatcttccattgttataaccttaattttcactctgggtttacagtggctggtctgtataaataatttacacaaagatgactgaatgctaataccagttgcacttaaatgaacatgcccattctcagtagctgatgcagtaatatattcagtttatctatgcattgctggggtcttgatataagatggaaacagtgtttcttatctaaagttttgattatcagcaagttgaatggacactttagttatttaaataaagatttttgaccaaaatccagaaaatggtatgagagaaaaataaattccagctagtttaatagatttttaaatgtcaatctgattttagcctcttagagagtgctaactagctggtaatgtttacttttaattccttgttaaaatgaggcaataatttgcaagatttttgtatataagtgtaaattcttcatatctttttagatctaattcaatattttctgactacttctgccatgtataataccatttttgtgcatgcttgatgtgacattcataaattgtaccactatgactttatccatgtaaaatagctatttattgaattttcttttaaaagctggatttactgggttttttttttctctcagtttaaacatcttaacagagaatttgttactgtttattaaaagaattgcatttggaagcaagaaaacaaccggatttgcaatcatgtgaagaaacaataatgcctttattatcaagtgttaagcacaattcttataacaaactgtgataaattctttttgtttttttttcctttgccccattattttcttatgaacaaaccaaaaattcatggtgagcagttgcagtgttggctgatatatcttttatgtacagggaatttgaaaaggacagtggattcatttagaagtgtaactggtgctgtgattatagcaatacatttgttagttgtacttcatctttttcatgctagctttttaaatgtttagttttcctcttgtcatggtcagctgctgaatttacttgaaggatgtagaatactgtttaaaaaatactaaaatttgtacaattagatcaaagaattgtgcaatcatttcctttttaatttttaaaatgttgaggctcataaatatttgagaacatcagatctaatagagcatagtgatactatttaatttaaccaaagtctctagtgaatatttcaactttgaatgtaaactaacaaataaacctgaccaccaaggagattgtttgcccagagtttcaaagcacattgtctacaaatggaaattgaaataatttataaaatattgacgttactatgttttttaaaaagttcctaattttttcactaaatggaggaaactattagttttattgttaaatatggtagatattaatattcctcttagatgaccagtgattccaattgtcccagtttgaaataagtaccctgtgagtatgagataaattagtgacaatcagaacaagtttcagtatcagatgttcaagaggaagttgctattgcattgattttaatatttgtacataaacactgatttttttgagcattattttgtatttgttgtactttaatacctggtgtacagttccagaaataaaaatctgggaatcttttaaaaaaaaaaaaaaaaaaa

SEQ ID NO: 358 - protein, 549 aa, Homo sapiens
MAEASFGSSSPVGSLSSEDHDFDPTAEMLVHDYDDERTLEEEEMMDEGKNFSSEIEDLEKEGTMPLEDLLAFYGYEPTIPAVANSSANSSPSELADELPDMTLDKEEIAKDLLSGDDEETQSSADDLTPSVTSHETSDFFPRPLRSNTACDGDKESEVEDVETDSGNSPEDLRKEIMIGLQYQAEIPPYLGEYDGNEKVYENEDQLLWCPDVVLESKVKEYLVETSLRTGSEKIMDRISAGTHTRDNEQALYELLKCNHNIKEAIERYCCNGKASQGMTAWTEEECRSFEHALMLFGKDFHLIQKNKVRTRTVAECVAFYYMWKKSERYDYFAQQTRFGKKRYNHHPGVTDYMDRLVDETEALGGTVNASALTSNRPEPIPDQQLNILNSFTASDLTALTNSVATVCDPTDVNCLDDSFPPLGNTPRGQVNHVPVVTEELLTLPSNGESDCFNLFETGFYHSELNPMNMCSEESERPAKRLKMGIAVPESFMNEVSVNNLGVDFENHTHHITSAKMAVSVADFGSLSANETNGFISAHALHQHAALHSE

SEQ ID NO: 359 - DNA, 3279 bp, Homo sapiens
gcggccgcgggcgcgggcgggcgcgcgggggagcccggccgagggatgggctgcgcccccagcatccatgtctcgcagagcggcgtgatctactgccgggactcggacgagtccagctcgccccgccagaccaccagcgtgtcgcagggcccggcggcacccctgcccggcctcttcgtccagaccgacgccgccgacgccatccccccgagccgcgcgtcgggaccccccagcgtagcccgcgtccgcagggcccgcaccgagctgggcagcggtagcagcgcgggttccgcagcccccgccgcgaccaccagcaggggccggaggcgccactgctgcagcagcgccgaggccgagactcagacctgctacaccagcgtgaagcaggtgtcttctgcggaggtgcgcatcgggcccatgagactgacgcaggaccctattcaggttttgctgatctttgcaaaggaagatagtcagagcgatggcttctggtgggcctgcgacagagctggttatagatgcaatattgctcggactccagagtcagcccttgaatgctttcttgataagcatcatgaaattattgtaattgatcatagacaaactcagaacttcgatgcagaagcagtgtgcaggtcgatccgggccacaaatccctccgagcacacggtgatcctcgcagtggtttcgcgagtatcggatgaccatgaagaggcgtcagtccttcctcttctccacgcaggcttcaacaggagatttatggagaatagcagcataattgcttgctataatgaactgattcaaatagaacatggggaagttcgctcccagttcaaattacgggcctgtaattcagtgtttacagcattagatcactgtcatgaagccatagaaataacaagcgatgaccacgtgattcagattcacaagattcatcgtgattcaggagacaattctcagacagagcctcattcattcagatataagaacaggaggaaagagtccattgacgtgaaatcgatatcatctcgaggcagtgatgcaccaagcctgcagaatcgtcgctatccgtccatggcgaggatccactccatgaccatcgaggctcccatcacaaaggttataaatataatcaatgcagcccaagaaaacagcccagtcacagtagcggaagccttggacagagttctagagattttacggaccacagaactgtactcccctcagctgggtaccaaagatgaagatcctcacaccagtgatcttgttggaggcctgatgactgacggcttgagaagactgtcaggaaacgagtatgtgtttactaagaatgtgcaccagagtcacagtcaccttgcaatgccaataaccatcaatgatgttcccccttgtatctctcaattacttgataatgaggagagttgggacttcaacatctttgaattggaagccattacgcataaaaggccattggtttatctgggcttaaaggtcttctctcggtttggagtatgtgagtttttaaactgttctgaaaccactcttcgggcctggttccaagtgatcgaagccaactaccactcttccaatgcctaccacaactccacccatgctgccgacgtcctgcacgccaccgctttctttcttggaaaggaaagagtaaagggaagcctcgatcagttggatgaggtggcagccctcattgctgccacagtccatgacgtggatcacccgggaaggaccaactctttcctctgcaatgcaggcagtgagcttgctgtgctctacaatgacactgctgttctggagagtcaccacaccgccctggccttccagctcacggtcaaggacaccaaatgcaacattttcaagaatattgacaggaaccattatcgaacgctgcgccaggctattattgacatggttttggcaacagagatgacaaaacactttgaacatgtgaataagtttgtgaacagcatcaacaagccaatggcagctgagattgaaggcagcgactgtgaatgcaaccctgctgggaagaacttccctgaaaaccaaatcctgatcaaacgcatgatgattaagtgtgctgacgtggccaacccatgccgccccttggacctgtgcattgaatgggctgggaggatctctgaggagtattttgcacagactgatgaagagaagagacagggactacctgtggtgatgccagtgtttgaccggaatacctgtagcatccccaagtctcagatctctttcattgactacttcataacagacatgtttgatgcttgggatgcctttgcacatctgccagccctgatgcaacatttggctgacaactacaaacactggaagacactagatgacctaaagtgcaaaagtttgaggcttccatctgacagctaaagccaagccacagagggggcctcttgaccgacaaaggacactgtgaatcacagtagcgtaaacgagaggccttcctttctaatgacaatgacaggtattggtgaaggagctaatgtttaatatttgaccttgaatcattcaagtccccaaatttcattcttagaaagttatgttccatgaagaaaaatatatgttcttttgaatacttaatgacagaacaaatacttggcaaactcctttgctctgctgtcatcctgtgtacccttgtcaatccatggagctggttcactgtaactagcaggccacaggaagcaaagccttggtgcctgtgagctcatctcccaggatggtgactaagtagcttagctagtgatcagctcatcctttaccataaaagtcatcattgctgtttagcttgactgttttcctcaagaacatcgatctgaaggattcataaggagcttatctgaacagatttatctaagaaaaaaaaaaaacgacataaaataagtgaaacaactaggaccaaattacagataaactagttagcttcacagcctctatggctacatggttcttctggccgatggtatgacacctaagttagaacacagccttggctggtgggtgccctctctagactggtatcagcagcctgtgtaacccctttcctgtaaaaggggttcatcttaacaaagtcatccatgatgagggaaaaagtggcatttcatttttggggaatccatgagcttcctttatttctggctcacagaggcagccacgaggcactacaccaagtattatataaaagccattaaatttgaatgcccttggacaagcttttcttaaaaaaaaaaaaaaaaaaaa

SEQ ID NO: 360 - protein, 788 aa, Homo sapiens
MGCAPSIHVSQSGVIYCRDSDESSSPRQTTSVSQGPAAPLPGLFVQTDAADAIPPSRASGPPSVARVRRARTELGSGSSAGSAAPAATTSRGRRRHCCSSAEAETQTCYTSVKQVSSAEVRIGPMRLTQDPIQVLLIFAKEDSQSDGFWWACDRAGYRCNIARTPESALECFLDKHHEIIVIDHRQTQNFDAEAVCRSIRATNPSEHTVILAVVSRVSDDHEEASVLPLLHAGFNRRFMENSSIIACYNELIQIEHGEVRSQFKLRACNSVFTALDHCHEAIEITSDDHVIQIHKIHRDSGDNSQTEPHSFRYKNRRKESIDVKSISSRGSDAPSLQNRRYPSMARIHSMTIEAPITKVINIINAAQENSPVTVAEALDRVLEILRTTELYSPQLGTKDEDPHTSDLVGGLMTDGLRRLSGNEYVFTKNVHQSHSHLAMPITINDVPPCISQLLDNEESWDFNIFELEAITHKRPLVYLGLKVFSRFGVCEFLNCSETTLRAWFQVIEANYHSSNAYHNSTHAADVLHATAFFLGKERVKGSLDQLDEVAALIAATVHDVDHPGRTNSFLCNAGSELAVLYNDTAVLESHHTALAFQLTVKDTKCNIFKNIDRNHYRTLRQAIIDMVLATEMTKHFEHVNKFVNSINKPMAAEIEGSDCECNPAGKNFPENQILIKRMMIKCADVANPCRPLDLCIEWAGRISEEYFAQTDEEKRQGLPVVMPVFDRNTCSIPKSQISFIDYFITDMFDAWDAFAHLPALMQHLADNYKHWKTLDDLKCKSLRLPSDS

SEQ ID NO: 361 - DNA, 3405 bp, Homo sapiens
gcggccgcgggcgcgggcgggcgcgcgggggagcccggccgagggatgggctgcgcccccagcatccatgtctcgcagagcggcgtgatctactgccgggactcggacgagtccagctcgccccgccagaccaccagcgtgtcgcagggcccggcggcacccctgcccggcctcttcgtccagaccgacgccgccgacgccatccccccgagccgcgcgtcgggaccccccagcgtagcccgcgtccgcagggcccgcaccgagctgggcagcggtagcagcgcgggttccgcagcccccgccgcgaccaccagcaggggccggaggcgccactgctgcagcagcgccgaggccgagactcagacctgctacaccagcgtgaagcaggtgtcttctgcggaggtgcgcatcgggcccatgagactgacgcaggaccctattcaggttttgctgatctttgcaaaggaagatagtcagagcgatggcttctggtgggcctgcgacagagctggttatagatgcaatattgctcggactccagagtcagcccttgaatgctttcttgataagcatcatgaaattattgtaattgatcatagacaaactcagaacttcgatgcagaagcagtgtgcaggtcgatccgggccacaaatccctccgagcacacggtgatcctcgcagtggtttcgcgagtatcggatgaccatgaagaggcgtcagtccttcctcttctccacgcaggcttcaacaggagatttatggagaatagcagcataattgcttgctataatgaactgattcaaatagaacatggggaagttcgctcccagttcaaattacgggcctgtaattcagtgtttacagcattagatcactgtcatgaagccatagaaataacaagcgatgaccacgtgattcagtatgtcaacccagccttcgaaaggatgatgggctaccacaaaggtgagctcctgggaaaagaactcgctgatctgcccaaaagcgataagaaccgggcagaccttctcgacaccatcaatacatgcatcaagaagggaaaggagtggcagggggtttactatgccagacggaaatccggggacagcatccaacagcacgtgaagatcaccccagtgattggccaaggagggaaaattaggcattttgtctcgctcaagaaactgtgttgtaccactgacaataataagcagattcacaagattcatcgtgattcaggagacaattctcagacagagcctcattcattcagatataagaacaggaggaaagagtccattgacgtgaaatcgatatcatctcgaggcagtgatgcaccaagcctgcagaatcgtcgctatccgtccatggcgaggatccactccatgaccatcgaggctcccatcacaaaggacggcttgagaagactgtcaggaaacgagtatgtgtttactaagaatgtgcaccagagtcacagtcaccttgcaatgccaataaccatcaatgatgttcccccttgtatctctcaattacttgataatgaggagagttgggacttcaacatctttgaattggaagccattacgcataaaaggccattggtttatctgggcttaaaggtcttctctcggtttggagtatgtgagtttttaaactgttctgaaaccactcttcgggcctggttccaagtgatcgaagccaactaccactcttccaatgcctaccacaactccacccatgctgccgacgtcctgcacgccaccgctttctttcttggaaaggaaagagtaaagggaagcctcgatcagttggatgaggtggcagccctcattgctgccacagtccatgacgtggatcacccgggaaggaccaactctttcctctgcaatgcaggcagtgagcttgctgtgctctacaatgacactgctgttctggagagtcaccacaccgccctggccttccagctcacggtcaaggacaccaaatgcaacattttcaagaatattgacaggaaccattatcgaacgctgcgccaggctattattgacatggttttggcaacagagatgacaaaacactttgaacatgtgaataagtttgtgaacagcatcaacaagccaatggcagctgagattgaaggcagcgactgtgaatgcaaccctgctgggaagaacttccctgaaaaccaaatcctgatcaaacgcatgatgattaagtgtgctgacgtggccaacccatgccgccccttggacctgtgcattgaatgggctgggaggatctctgaggagtattttgcacagactgatgaagagaagagacagggactacctgtggtgatgccagtgtttgaccggaatacctgtagcatccccaagtctcagatctctttcattgactacttcataacagacatgtttgatgcttgggatgcctttgcacatctgccagccctgatgcaacatttggctgacaactacaaacactggaagacactagatgacctaaagtgcaaaagtttgaggcttccatctgacagctaaagccaagccacagagggggcctcttgaccgacaaaggacactgtgaatcacagtagcgtaaacgagaggccttcctttctaatgacaatgacaggtattggtgaaggagctaatgtttaatatttgaccttgaatcattcaagtccccaaatttcattcttagaaagttatgttccatgaagaaaaatatatgttcttttgaatacttaatgacagaacaaatacttggcaaactcctttgctctgctgtcatcctgtgtacccttgtcaatccatggagctggttcactgtaactagcaggccacaggaagcaaagccttggtgcctgtgagctcatctcccaggatggtgactaagtagcttagctagtgatcagctcatcctttaccataaaagtcatcattgctgtttagcttgactgttttcctcaagaacatcgatctgaaggattcataaggagcttatctgaacagatttatctaagaaaaaaaaaaaacgacataaaataagtgaaacaactaggaccaaattacagataaactagttagcttcacagcctctatggctacatggttcttctggccgatggtatgacacctaagttagaacacagccttggctggtgggtgccctctctagactggtatcagcagcctgtgtaacccctttcctgtaaaaggggttcatcttaacaaagtcatccatgatgagggaaaaagtggcatttcatttttggggaatccatgagcttcctttatttctggctcacagaggcagccacgaggcactacaccaagtattatataaaagccattaaatttgaatgcccttggacaagcttttcttaaaaaaaaaaaaaaaaaaaa

SEQ ID NO: 362 - protein, 830 aa, Homo sapiens
MGCAPSIHVSQSGVIYCRDSDESSSPRQTTSVSQGPAAPLPGLFVQTDAADAIPPSRASGPPSVARVRRARTELGSGSSAGSAAPAATTSRGRRRHCCSSAEAETQTCYTSVKQVSSAEVRIGPMRLTQDPIQVLLIFAKEDSQSDGFWWACDRAGYRCNIARTPESALECFLDKHHEIIVIDHRQTQNFDAEAVCRSIRATNPSEHTVILAVVSRVSDDHEEASVLPLLHAGFNRRFMENSSIIACYNELIQIEHGEVRSQFKLRACNSVFTALDHCHEAIEITSDDHVIQYVNPAFERMMGYHKGELLGKELADLPKSDKNRADLLDTINTCIKKGKEWQGVYYARRKSGDSIQQHVKITPVIGQGGKIRHFVSLKKLCCTTDNNKQIHKIHRDSGDNSQTEPHSFRYKNRRKESIDVKSISSRGSDAPSLQNRRYPSMARIHSMTIEAPITKDGLRRLSGNEYVFTKNVHQSHSHLAMPITINDVPPCISQLLDNEESWDFNIFELEAITHKRPLVYLGLKVFSRFGVCEFLNCSETTLRAWFQVIEANYHSSNAYHNSTHAADVLHATAFFLGKERVKGSLDQLDEVAALIAATVHDVDHPGRTNSFLCNAGSELAVLYNDTAVLESHHTALAFQLTVKDTKCNIFKNIDRNHYRTLRQAIIDMVLATEMTKHFEHVNKFVNSINKPMAAEIEGSDCECNPAGKNFPENQILIKRMMIKCADVANPCRPLDLCIEWAGRISEEYFAQTDEEKRQGLPVVMPVFDRNTCSIPKSQISFIDYFITDMFDAWDAFAHLPALMQHLADNYKHWKTLDDLKCKSLRLPSDS

SEQ ID NO: 363 - DNA, 3510 bp, Homo sapiens
gcggccgcgggcgcgggcgggcgcgcgggggagcccggccgagggatgggctgcgcccccagcatccatgtctcgcagagcggcgtgatctactgccgggactcggacgagtccagctcgccccgccagaccaccagcgtgtcgcagggcccggcggcacccctgcccggcctcttcgtccagaccgacgccgccgacgccatccccccgagccgcgcgtcgggaccccccagcgtagcccgcgtccgcagggcccgcaccgagctgggcagcggtagcagcgcgggttccgcagcccccgccgcgaccaccagcaggggccggaggcgccactgctgcagcagcgccgaggccgagactcagacctgctacaccagcgtgaaggttttgctgatctttgcaaaggaagatagtcagagcgatggcttctggtgggcctgcgacagagctggttatagatgcaatattgctcggactccagagtcagcccttgaatgctttcttgataagcatcatgaaattattgtaattgatcatagacaaactcagaacttcgatgcagaagcagtgtgcaggtcgatccgggccacaaatccctccgagcacacggtgatcctcgcagtggtttcgcgagtatcggatgaccatgaagaggcgtcagtccttcctcttctccacgcaggcttcaacaggagatttatggagaatagcagcataattgcttgctataatgaactgattcaaatagaacatggggaagttcgctcccagttcaaattacgggcctgtaattcagtgtttacagcattagatcactgtcatgaagccatagaaataacaagcgatgaccacgtgattcagtatgtcaacccagccttcgaaaggatgatgggctaccacaaaggtgagctcctgggaaaagaactcgctgatctgcccaaaagcgataagaaccgggcagaccttctcgacaccatcaatacatgcatcaagaagggaaaggagtggcagggggtttactatgccagacggaaatccggggacagcatccaacagcacgtgaagatcaccccagtgattggccaaggagggaaaattaggcattttgtctcgctcaagaaactgtgttgtaccactgacaataataagcagattcacaagattcatcgtgattcaggagacaattctcagacagagcctcattcattcagatataagaacaggaggaaagagtccattgacgtgaaatcgatatcatctcgaggcagtgatgcaccaagcctgcagaatcgtcgctatccgtccatggcgaggatccactccatgaccatcgaggctcccatcacaaaggttataaatataatcaatgcagcccaagaaaacagcccagtcacagtagcggaagccttggacagagttctagagattttacggaccacagaactgtactcccctcagctgggtaccaaagatgaagatcctcacaccagtgatcttgttggaggcctgatgactgacggcttgagaagactgtcaggaaacgagtatgtgtttactaagaatgtgcaccagagtcacagtcaccttgcaatgccaataaccatcaatgatgttcccccttgtatctctcaattacttgataatgaggagagttgggacttcaacatctttgaattggaagccattacgcataaaaggccattggtttatctgggcttaaaggtcttctctcggtttggagtatgtgagtttttaaactgttctgaaaccactcttcgggcctggttccaagtgatcgaagccaactaccactcttccaatgcctaccacaactccacccatgctgccgacgtcctgcacgccaccgctttctttcttggaaaggaaagagtaaagggaagcctcgatcagttggatgaggtggcagccctcattgctgccacagtccatgacgtggatcacccgggaaggaccaactctttcctctgcaatgcaggcagtgagcttgctgtgctctacaatgacactgctgttctggagagtcaccacaccgccctggccttccagctcacggtcaaggacaccaaatgcaacattttcaagaatattgacaggaaccattatcgaacgctgcgccaggctattattgacatggttttggcaacagagatgacaaaacactttgaacatgtgaataagtttgtgaacagcatcaacaagccaatggcagctgagattgaaggcagcgactgtgaatgcaaccctgctgggaagaacttccctgaaaaccaaatcctgatcaaacgcatgatgattaagtgtgctgacgtggccaacccatgccgccccttggacctgtgcattgaatgggctgggaggatctctgaggagtattttgcacagactgatgaagagaagagacagggactacctgtggtgatgccagtgtttgaccggaatacctgtagcatccccaagtctcagatctctttcattgactacttcataacagacatgtttgatgcttgggatgcctttgcacatctgccagccctgatgcaacatttggctgacaactacaaacactggaagacactagatgacctaaagtgcaaaagtttgaggcttccatctgacagctaaagccaagccacagagggggcctcttgaccgacaaaggacactgtgaatcacagtagcgtaaacgagaggccttcctttctaatgacaatgacaggtattggtgaaggagctaatgtttaatatttgaccttgaatcattcaagtccccaaatttcattcttagaaagttatgttccatgaagaaaaatatatgttcttttgaatacttaatgacagaacaaatacttggcaaactcctttgctctgctgtcatcctgtgtacccttgtcaatccatggagctggttcactgtaactagcaggccacaggaagcaaagccttggtgcctgtgagctcatctcccaggatggtgactaagtagcttagctagtgatcagctcatcctttaccataaaagtcatcattgctgtttagcttgactgttttcctcaagaacatcgatctgaaggattcataaggagcttatctgaacagatttatctaagaaaaaaaaaaaacgacataaaataagtgaaacaactaggaccaaattacagataaactagttagcttcacagcctctatggctacatggttcttctggccgatggtatgacacctaagttagaacacagccttggctggtgggtgccctctctagactggtatcagcagcctgtgtaacccctttcctgtaaaaggggttcatcttaacaaagtcatccatgatgagggaaaaagtggcatttcatttttggggaatccatgagcttcctttatttctggctcacagaggcagccacgaggcactacaccaagtattatataaaagccattaaatttgaatgcccttggacaagcttttcttaaaaaaaaaaaaaaaaaaaa

SEQ ID NO: 364 - protein, 865 aa, Homo sapiens
MGCAPSIHVSQSGVIYCRDSDESSSPRQTTSVSQGPAAPLPGLFVQTDAADAIPPSRASGPPSVARVRRARTELGSGSSAGSAAPAATTSRGRRRHCCSSAEAETQTCYTSVKVLLIFAKEDSQSDGFWWACDRAGYRCNIARTPESALECFLDKHHEIIVIDHRQTQNFDAEAVCRSIRATNPSEHTVILAVVSRVSDDHEEASVLPLLHAGFNRRFMENSSIIACYNELIQIEHGEVRSQFKLRACNSVFTALDHCHEAIEITSDDHVIQYVNPAFERMMGYHKGELLGKELADLPKSDKNRADLLDTINTCIKKGKEWQGVYYARRKSGDSIQQHVKITPVIGQGGKIRHFVSLKKLCCTTDNNKQIHKIHRDSGDNSQTEPHSFRYKNRRKESIDVKSISSRGSDAPSLQNRRYPSMARIHSMTIEAPITKVINIINAAQENSPVTVAEALDRVLEILRTTELYSPQLGTKDEDPHTSDLVGGLMTDGLRRLSGNEYVFTKNVHQSHSHLAMPITINDVPPCISQLLDNEESWDFNIFELEAITHKRPLVYLGLKVFSRFGVCEFLNCSETTLRAWFQVIEANYHSSNAYHNSTHAADVLHATAFFLGKERVKGSLDQLDEVAALIAATVHDVDHPGRTNSFLCNAGSELAVLYNDTAVLESHHTALAFQLTVKDTKCNIFKNIDRNHYRTLRQAIIDMVLATEMTKHFEHVNKFVNSINKPMAAEIEGSDCECNPAGKNFPENQILIKRMMIKCADVANPCRPLDLCIEWAGRISEEYFAQTDEEKRQGLPVVMPVFDRNTCSIPKSQISFIDYFITDMFDAWDAFAHLPALMQHLADNYKHWKTLDDLKCKSLRLPSDS

SEQ ID NO: 365 - DNA, 3429 bp, Homo sapiens
gcggccgcgggcgcgggcgggcgcgcgggggagcccggccgagggatgggctgcgcccccagcatccatgtctcgcagagcggcgtgatctactgccgggactcggacgagtccagctcgccccgccagaccaccagcgtgtcgcagggcccggcggcacccctgcccggcctcttcgtccagaccgacgccgccgacgccatccccccgagccgcgcgtcgggaccccccagcgtagcccgcgtccgcagggcccgcaccgagctgggcagcggtagcagcgcgggttccgcagcccccgccgcgaccaccagcaggggccggaggcgccactgctgcagcagcgccgaggccgagactcagacctgctacaccagcgtgaagcaggtgtcttctgcggaggtgcgcatcgggcccatgagactgacgcaggaccctattcaggttttgctgatctttgcaaaggaagatagtcagagcgatggcttctggtgggcctgcgacagagctggttatagatgcaatattgctcggactccagagtcagcccttgaatgctttcttgataagcatcatgaaattattgtaattgatcatagacaaactcagaacttcgatgcagaagcagtgtgcaggtcgatccgggccacaaatccctccgagcacacggtgatcctcgcagtggtttcgcgagtatcggatgaccatgaagaggcgtcagtccttcctcttctccacgcaggcttcaacaggagatttatggagaatagcagcataattgcttgctataatgaactgattcaaatagaacatggggaagttcgctcccagttcaaattacgggcctgtaattcagtgtttacagcattagatcactgtcatgaagccatagaaataacaagcgatgaccacgtgattcaggagtggcagggggtttactatgccagacggaaatccggggacagcatccaacagcacgtgaagatcaccccagtgattggccaaggagggaaaattaggcattttgtctcgctcaagaaactgtgttgtaccactgacaataataagcagattcacaagattcatcgtgattcaggagacaattctcagacagagcctcattcattcagatataagaacaggaggaaagagtccattgacgtgaaatcgatatcatctcgaggcagtgatgcaccaagcctgcagaatcgtcgctatccgtccatggcgaggatccactccatgaccatcgaggctcccatcacaaaggttataaatataatcaatgcagcccaagaaaacagcccagtcacagtagcggaagccttggacagagttctagagattttacggaccacagaactgtactcccctcagctgggtaccaaagatgaagatcctcacaccagtgatcttgttggaggcctgatgactgacggcttgagaagactgtcaggaaacgagtatgtgtttactaagaatgtgcaccagagtcacagtcaccttgcaatgccaataaccatcaatgatgttcccccttgtatctctcaattacttgataatgaggagagttgggacttcaacatctttgaattggaagccattacgcataaaaggccattggtttatctgggcttaaaggtcttctctcggtttggagtatgtgagtttttaaactgttctgaaaccactcttcgggcctggttccaagtgatcgaagccaactaccactcttccaatgcctaccacaactccacccatgctgccgacgtcctgcacgccaccgctttctttcttggaaaggaaagagtaaagggaagcctcgatcagttggatgaggtggcagccctcattgctgccacagtccatgacgtggatcacccgggaaggaccaactctttcctctgcaatgcaggcagtgagcttgctgtgctctacaatgacactgctgttctggagagtcaccacaccgccctggccttccagctcacggtcaaggacaccaaatgcaacattttcaagaatattgacaggaaccattatcgaacgctgcgccaggctattattgacatggttttggcaacagagatgacaaaacactttgaacatgtgaataagtttgtgaacagcatcaacaagccaatggcagctgagattgaaggcagcgactgtgaatgcaaccctgctgggaagaacttccctgaaaaccaaatcctgatcaaacgcatgatgattaagtgtgctgacgtggccaacccatgccgccccttggacctgtgcattgaatgggctgggaggatctctgaggagtattttgcacagactgatgaagagaagagacagggactacctgtggtgatgccagtgtttgaccggaatacctgtagcatccccaagtctcagatctctttcattgactacttcataacagacatgtttgatgcttgggatgcctttgcacatctgccagccctgatgcaacatttggctgacaactacaaacactggaagacactagatgacctaaagtgcaaaagtttgaggcttccatctgacagctaaagccaagccacagagggggcctcttgaccgacaaaggacactgtgaatcacagtagcgtaaacgagaggccttcctttctaatgacaatgacaggtattggtgaaggagctaatgtttaatatttgaccttgaatcattcaagtccccaaatttcattcttagaaagttatgttccatgaagaaaaatatatgttcttttgaatacttaatgacagaacaaatacttggcaaactcctttgctctgctgtcatcctgtgtacccttgtcaatccatggagctggttcactgtaactagcaggccacaggaagcaaagccttggtgcctgtgagctcatctcccaggatggtgactaagtagcttagctagtgatcagctcatcctttaccataaaagtcatcattgctgtttagcttgactgttttcctcaagaacatcgatctgaaggattcataaggagcttatctgaacagatttatctaagaaaaaaaaaaaacgacataaaataagtgaaacaactaggaccaaattacagataaactagttagcttcacagcctctatggctacatggttcttctggccgatggtatgacacctaagttagaacacagccttggctggtgggtgccctctctagactggtatcagcagcctgtgtaacccctttcctgtaaaaggggttcatcttaacaaagtcatccatgatgagggaaaaagtggcatttcatttttggggaatccatgagcttcctttatttctggctcacagaggcagccacgaggcactacaccaagtattatataaaagccattaaatttgaatgcccttggacaagcttttcttaaaaaaaaaaaaaaaaaaaa

SEQ ID NO: 366 - protein, 838 aa, Homo sapiens
MGCAPSIHVSQSGVIYCRDSDESSSPRQTTSVSQGPAAPLPGLFVQTDAADAIPPSRASGPPSVARVRRARTELGSGSSAGSAAPAATTSRGRRRHCCSSAEAETQTCYTSVKQVSSAEVRIGPMRLTQDPIQVLLIFAKEDSQSDGFWWACDRAGYRCNIARTPESALECFLDKHHEIIVIDHRQTQNFDAEAVCRSIRATNPSEHTVILAVVSRVSDDHEEASVLPLLHAGFNRRFMENSSIIACYNELIQIEHGEVRSQFKLRACNSVFTALDHCHEAIEITSDDHVIQEWQGVYYARRKSGDSIQQHVKITPVIGQGGKIRHFVSLKKLCCTTDNNKQIHKIHRDSGDNSQTEPHSFRYKNRRKESIDVKSISSRGSDAPSLQNRRYPSMARIHSMTIEAPITKVINIINAAQENSPVTVAEALDRVLEILRTTELYSPQLGTKDEDPHTSDLVGGLMTDGLRRLSGNEYVFTKNVHQSHSHLAMPITINDVPPCISQLLDNEESWDFNIFELEAITHKRPLVYLGLKVFSRFGVCEFLNCSETTLRAWFQVIEANYHSSNAYHNSTHAADVLHATAFFLGKERVKGSLDQLDEVAALIAATVHDVDHPGRTNSFLCNAGSELAVLYNDTAVLESHHTALAFQLTVKDTKCNIFKNIDRNHYRTLRQAIIDMVLATEMTKHFEHVNKFVNSINKPMAAEIEGSDCECNPAGKNFPENQILIKRMMIKCADVANPCRPLDLCIEWAGRISEEYFAQTDEEKRQGLPVVMPVFDRNTCSIPKSQISFIDYFITDMFDAWDAFAHLPALMQHLADNYKHWKTLDDLKCKSLRLPSDS

SEQ ID NO: 367 - DNA, 3570 bp, Homo sapiens
gcggccgcgggcgcgggcgggcgcgcgggggagcccggccgagggatgggctgcgcccccagcatccatgtctcgcagagcggcgtgatctactgccgggactcggacgagtccagctcgccccgccagaccaccagcgtgtcgcagggcccggcggcacccctgcccggcctcttcgtccagaccgacgccgccgacgccatccccccgagccgcgcgtcgggaccccccagcgtagcccgcgtccgcagggcccgcaccgagctgggcagcggtagcagcgcgggttccgcagcccccgccgcgaccaccagcaggggccggaggcgccactgctgcagcagcgccgaggccgagactcagacctgctacaccagcgtgaagcaggtgtcttctgcggaggtgcgcatcgggcccatgagactgacgcaggaccctattcaggttttgctgatctttgcaaaggaagatagtcagagcgatggcttctggtgggcctgcgacagagctggttatagatgcaatattgctcggactccagagtcagcccttgaatgctttcttgataagcatcatgaaattattgtaattgatcatagacaaactcagaacttcgatgcagaagcagtgtgcaggtcgatccgggccacaaatccctccgagcacacggtgatcctcgcagtggtttcgcgagtatcggatgaccatgaagaggcgtcagtccttcctcttctccacgcaggcttcaacaggagatttatggagaatagcagcataattgcttgctataatgaactgattcaaatagaacatggggaagttcgctcccagttcaaattacgggcctgtaattcagtgtttacagcattagatcactgtcatgaagccatagaaataacaagcgatgaccacgtgattcagtatgtcaacccagccttcgaaaggatgatgggctaccacaaaggtgagctcctgggaaaagaactcgctgatctgcccaaaagcgataagaaccgggcagaccttctcgacaccatcaatacatgcatcaagaagggaaaggagtggcagggggtttactatgccagacggaaatccggggacagcatccaacagcacgtgaagatcaccccagtgattggccaaggagggaaaattaggcattttgtctcgctcaagaaactgtgttgtaccactgacaataataagcagattcacaagattcatcgtgattcaggagacaattctcagacagagcctcattcattcagatataagaacaggaggaaagagtccattgacgtgaaatcgatatcatctcgaggcagtgatgcaccaagcctgcagaatcgtcgctatccgtccatggcgaggatccactccatgaccatcgaggctcccatcacaaaggttataaatataatcaatgcagcccaagaaaacagcccagtcacagtagcggaagccttggacagagttctagagattttacggaccacagaactgtactcccctcagctgggtaccaaagatgaagatcctcacaccagtgatcttgttggaggcctgatgactgacggcttgagaagactgtcaggaaacgagtatgtgtttactaagaatgtgcaccagagtcacagtcaccttgcaatgccaataaccatcaatgatgttcccccttgtatctctcaattacttgataatgaggagagttgggacttcaacatctttgaattggaagccattacgcataaaaggccattggtttatctgggcttaaaggtcttctctcggtttggagtatgtgagtttttaaactgttctgaaaccactcttcgggcctggttccaagtgatcgaagccaactaccactcttccaatgcctaccacaactccacccatgctgccgacgtcctgcacgccaccgctttctttcttggaaaggaaagagtaaagggaagcctcgatcagttggatgaggtggcagccctcattgctgccacagtccatgacgtggatcacccgggaaggaccaactctttcctctgcaatgcaggcagtgagcttgctgtgctctacaatgacactgctgttctggagagtcaccacaccgccctggccttccagctcacggtcaaggacaccaaatgcaacattttcaagaatattgacaggaaccattatcgaacgctgcgccaggctattattgacatggttttggcaacagagatgacaaaacactttgaacatgtgaataagtttgtgaacagcatcaacaagccaatggcagctgagattgaaggcagcgactgtgaatgcaaccctgctgggaagaacttccctgaaaaccaaatcctgatcaaacgcatgatgattaagtgtgctgacgtggccaacccatgccgccccttggacctgtgcattgaatgggctgggaggatctctgaggagtattttgcacagactgatgaagagaagagacagggactacctgtggtgatgccagtgtttgaccggaatacctgtagcatccccaagtctcagatctctttcattgactacttcataacagacatgtttgatgcttgggatgcctttgcacatctgccagccctgatgcaacatttggctgacaactacaaacactggaagacactagatgacctaaagtgcaaaagtttgaggcttccatctgacagctaaagccaagccacagagggggcctcttgaccgacaaaggacactgtgaatcacagtagcgtaaacgagaggccttcctttctaatgacaatgacaggtattggtgaaggagctaatgtttaatatttgaccttgaatcattcaagtccccaaatttcattcttagaaagttatgttccatgaagaaaaatatatgttcttttgaatacttaatgacagaacaaatacttggcaaactcctttgctctgctgtcatcctgtgtacccttgtcaatccatggagctggttcactgtaactagcaggccacaggaagcaaagccttggtgcctgtgagctcatctcccaggatggtgactaagtagcttagctagtgatcagctcatcctttaccataaaagtcatcattgctgtttagcttgactgttttcctcaagaacatcgatctgaaggattcataaggagcttatctgaacagatttatctaagaaaaaaaaaaaacgacataaaataagtgaaacaactaggaccaaattacagataaactagttagcttcacagcctctatggctacatggttcttctggccgatggtatgacacctaagttagaacacagccttggctggtgggtgccctctctagactggtatcagcagcctgtgtaacccctttcctgtaaaaggggttcatcttaacaaagtcatccatgatgagggaaaaagtggcatttcatttttggggaatccatgagcttcctttatttctggctcacagaggcagccacgaggcactacaccaagtattatataaaagccattaaatttgaatgcccttggacaagcttttcttaaaaaaaaaaaaaaaaaaaa

SEQ ID NO: 368 - protein, 885 aa, Homo sapiens
MGCAPSIHVSQSGVIYCRDSDESSSPRQTTSVSQGPAAPLPGLFVQTDAADAIPPSRASGPPSVARVRRARTELGSGSSAGSAAPAATTSRGRRRHCCSSAEAETQTCYTSVKQVSSAEVRIGPMRLTQDPIQVLLIFAKEDSQSDGFWWACDRAGYRCNIARTPESALECFLDKHHEIIVIDHRQTQNFDAEAVCRSIRATNPSEHTVILAVVSRVSDDHEEASVLPLLHAGFNRRFMENSSIIACYNELIQIEHGEVRSQFKLRACNSVFTALDHCHEAIEITSDDHVIQYVNPAFERMMGYHKGELLGKELADLPKSDKNRADLLDTINTCIKKGKEWQGVYYARRKSGDSIQQHVKITPVIGQGGKIRHFVSLKKLCCTTDNNKQIHKIHRDSGDNSQTEPHSFRYKNRRKESIDVKSISSRGSDAPSLQNRRYPSMARIHSMTIEAPITKVINIINAAQENSPVTVAEALDRVLEILRTTELYSPQLGTKDEDPHTSDLVGGLMTDGLRRLSGNEYVFTKNVHQSHSHLAMPITINDVPPCISQLLDNEESWDFNIFELEAITHKRPLVYLGLKVFSRFGVCEFLNCSETTLRAWFQVIEANYHSSNAYHNSTHAADVLHATAFFLGKERVKGSLDQLDEVAALIAATVHDVDHPGRTNSFLCNAGSELAVLYNDTAVLESHHTALAFQLTVKDTKCNIFKNIDRNHYRTLRQAIIDMVLATEMTKHFEHVNKFVNSINKPMAAEIEGSDCECNPAGKNFPENQILIKRMMIKCADVANPCRPLDLCIEWAGRISEEYFAQTDEEKRQGLPVVMPVFDRNTCSIPKSQISFIDYFITDMFDAWDAFAHLPALMQHLADNYKHWKTLDDLKCKSLRLPSDS

SEQ ID NO: 369 - DNA, 2608 bp, Homo sapiens
actcggagcagcgcgcgccccgcaatcgccgcagccgcccccgccgtcggccgccgcaccccaagcgactgcccaaactaagcctccgtggctgggtacgggagcgctttggggacaaaaattctccctcaactgtggtctgcattccttcggcccgtgggctgatctggggcgggaagtattagcgtctcagttgcgctgcagccggggaggaaggaggaggccgagcctggggcggagtttgggctgactggggctggaccgggcaagacgccgccgctgcccggatgttgcgatggctgatcgggggaggccgagaaccgcagggactggccgagaaatctcctttacagacaataggtgaagaacaaacccagaatccctacactgaactgctagtactgaaggctcatcatgatattgtacgatttctggtacagttagatgactacagatttgcatctgctggtgatgatggaattgtagttgtgtggaatgcccagacaggggaaaaacttttagaactgaatggacacactcaaaagataacagctattattacatttccttccttggaatcttgtgaagagaaaaatcaactcatcttgacagcctctgctgatagaacagttattgtgtgggatggtgatactaccagacaagttcagagaatatcatgcttccagtctactgtaaagtgtttaactgttcttcagagactagatgtttggctttctggtgggaatgacctgtgtgtgtggaaccgaaaattagatctcctgtgtaagactagccacctttctgatacaggtattagtgctttggttgaaatacctaagaactgtgttgtggcagcagttggcaaagaactgataattttcaggttggtagcacccacagaaggatcactagaatgggatattcttgaagttaagcgcctccttgatcaccaggataatattctctcattgattaatgtcaatgatttgagttttgtcaccggctcccacgtcggagagctgatcatctgggatgccctggactggaccatgcaggcctatgaacgcaacttctgggacccatctccacaactggacacccaacaagaaataaaactctgtcaaaaatcaaatgacatttctattcatcatttcacatgtgatgaagagaatgtatttgctgcagttggaaggggtttatacgtgtatagccttcaaatgaagcgtgtgattgcctgccagaaaactgcacatgactccaatgtcctgcacgttgccagacttccaaacaggcagttaatctcatgctcagaagatggcagtgtacgcatttgggagttaagagaaaaacagcagcttgcagctgagcctgtaccaacaggtttttttaacatgtggggatttggaagagtcagcaaacaagccagccaacctgttaaaaagcagcaagaaaatgctacttcatgttcactggagcttattggagatttgattggacactcatcatctgtggagatgtttctatactttgaagatcatggactagtgacgtgctccgctgatcatctcattattttgtggaaaaatggagagcgagaatctggattgcgcagtttaagattatttcaaaaattagaggagaatggtgacttataccttgctgtctagtttaaggaattaaaaatacacatgcatgaaccttgaacatcaaatatcgggtactactctgaaaaccattaatatattgatcacttaaattggtaattttttttgtcagtccataaaattctacatgtttaaattttttgtggacctaccaaccaggaacatgttgcttctcaggtcctagtatatcctccaaagaatataccacaagtttttccatttgactttgagctgctgttgaagtggtgagtgctgtgttttgagcttattttgaacctagatccttgtgaaaggtacaaatagaggtaatagttaagttatggcatttattagaagttttattatttggcttcctttagaattattgtgaagtttaaaaatagcctttctcctgcaaattttcctagtctttagtaactgttagtgttctatatagcacaaacttgaatctctcagccaaaaaagggaacatatatactgtttaagtatggcaagttttctttggtaccaatttgtttagataattttaaaaatgttttttagttctagctactaaaacctgtatgaactcaaatggataggcatcttgtgagggtgtgtttttcccagtgtgaattggcttgaagagccatgggctaaatgggtactagaacaacaactgcccctcatgtacgccaaggatgagctctagatcatttgagaggcacagtgtttccggagtcagggactgcagctgagcgcaactgccccatctgaccactgactcaaatacgaactgcttgagacagacttcttttatgtagttctttgcagtgtccattgagacactataaccagccttgtaacaatatgttttctccttttggtgctaaaaaataaaaatattagaaagtaaaaaaaaaaaaaaaaaaaaaaaaaaaaaaaaaaaaaaaaaaaaaaaaaaa

SEQ ID NO: 370 - protein, 459 aa, Homo sapiens
MLRWLIGGGREPQGLAEKSPLQTIGEEQTQNPYTELLVLKAHHDIVRFLVQLDDYRFASAGDDGIVVVWNAQTGEKLLELNGHTQKITAIITFPSLESCEEKNQLILTASADRTVIVWDGDTTRQVQRISCFQSTVKCLTVLQRLDVWLSGGNDLCVWNRKLDLLCKTSHLSDTGISALVEIPKNCVVAAVGKELIIFRLVAPTEGSLEWDILEVKRLLDHQDNILSLINVNDLSFVTGSHVGELIIWDALDWTMQAYERNFWDPSPQLDTQQEIKLCQKSNDISIHHFTCDEENVFAAVGRGLYVYSLQMKRVIACQKTAHDSNVLHVARLPNRQLISCSEDGSVRIWELREKQQLAAEPVPTGFFNMWGFGRVSKQASQPVKKQQENATSCSLELIGDLIGHSSSVEMFLYFEDHGLVTCSADHLIILWKNGERESGLRSLRLFQKLEENGDLYLAV

SEQ ID NO: 371 - DNA, 886 bp, Homo sapiens
acaagtgcagagtacgcatgcgccaacttcctctttttccggctggaaccatggagggtgtagaagagaagaagaaggaggttcctgctgtgccagaaacccttaagaaaaagcgaaggaatttcgtagagctgaagatcaagcgcctgagaaagaagtttgcccaaaagatgcttcgaaaggcaaggaggaagcttatctatgaaaaagcaaagcactatcacaaggaatataggcaaatgtacagaactgaaattcgagtggcgaggatggcaagaaaagctggcaacttctatgtacctgcagaacccaaattggcgtttgtcatcagaatcagaggtatcagtgctgtgagcccaaaggtccgaaaggtgttgcagcttcttcgccttcgtcaaatcttcaatggaacctttgtgaagctcaacaaggcttcgattaacatgctgaggattgtagagccatatatagcatgggggtaccccaatctgaagtcagtaaatgaactaatctacaagcgtggttatggcaaaatcaataagaagcgaattgctttgacagataacgctttgattgctcgatctcttggtaaatacggcattatctgcatggaggatttgattcatgagatctatactgttggaaaacgcttcaaagaggcaaataacttcctgtggcccttcaaattgtcttctccacgaggtggaatgaagaaaaagaccacccattttgtagaaggtagagatgctggcaacagggaggaccagatcaacaggcttactagaagaatgaactaaggtgtctaccatgattatttttctaagctggttggttaataaacagtacctgctctcaaattgaaataaaaaaaaaaaaaaaaagaaaa

SEQ ID NO: 372 - protein, 259 aa, Homo sapiens
MRQLPLFPAGTMEGVEEKKKEVPAVPETLKKKRRNFVELKIKRLRKKFAQKMLRKARRKLIYEKAKHYHKEYRQMYRTEIRVARMARKAGNFYVPAEPKLAFVIRIRGISAVSPKVRKVLQLLRLRQIFNGTFVKLNKASINMLRIVEPYIAWGYPNLKSVNELIYKRGYGKINKKRIALTDNALIARSLGKYGIICMEDLIHEIYTVGKRFKEANNFLWPFKLSSPRGGMKKKTTHFVEGRDAGNREDQINRLTRRMN

SEQ ID NO: 373 - DNA, 884 bp, Homo sapiens
acaagtgcagagtacgcatgcgccaacttcctctttttccggctggaaccatggagggtgtagaagagaagaagaaggaggttcctgctgtgccagaaacccttaagaaaaagcgaaggaatttcgtagagctgaagatcaagcgcctgagaaagaagtttgcccaaaagatgcttcgaaaggcaaggaggaagcttatctatgaaaaagcaaagcactatcacaaggaatataggcaaatgtacagaactgaaattcgagtggcgaggatggcaagaaaagctggcaacttctatgtacctgcagaacccaaattggcgtttgtcatcagaatcagaggtatcagtgctgtgagcccaaaggtccgaaaggtgttgcagcttcttcgccttcgtcaaatcttcaatggaacctttgtgaagctcaacaaggcttcgattaacatgctgaggattgtagagccatatatagcatgggggtaccccaatctgaagtcagtaaatgaactaatctacaagcgtggttatggcaaaatcaataagaagcgaattgctttgacagataacgctttgattgctcgatctcttggtaaatacggcattatctgcatggaggatttgattcatgagatctatactgttggaaaacgcttcaaagaggcaaataacttcctgtggcccttcaaattgtcttctccacgaggtggaatgaagaaaaagaccacccattttgtagaaggtagagatgctggcaacagggaggaccagatcaacaggcttactagaagaatgaactaaggtgtctaccatgattatttttctaagctggttggttaataaacagtacctgctctcaaattgaaataaaaaaaaaaaaaaccagag

SEQ ID NO: 374 - protein, 259 aa, Homo sapiens; identical to SEQ ID NO: 372

SEQ ID NO: 375 - DNA, 893 bp, Homo sapiens
acaagtgcagagtacgcatgcgccaacttcctctttttccggctggaaccatggagggtgtagaagagaagaagaaggaggttcctgctgtgccagaaacccttaagaaaaagcgaaggaatttcgtagagctgaagatcaagcgcctgagaaagaagtttgcccaaaagatgcttcgaaaggcaaggaggaagcttatctatgaaaaagcaaagcactatcacaaggaatataggcaaatgtacagaactgaaattcgagtggcgaggatggcaagaaaagctggcaacttctatgtacctgcagaacccaaattggcgtttgtcatcagaatcagaggtatcagtgctgtgagcccaaaggtccgaaaggtgttgcagcttcttcgccttcgtcaaatcttcaatggaacctttgtgaagctcaacaaggcttcgattaacatgctgaggattgtagagccatatatagcatgggggtaccccaatctgaagtcagtaaatgaactaatctacaagcgtggttatggcaaaatcaataagaagcgaattgctttgacagataacgctttgattgctcgatctcttggtaaatacggcattatctgcatggaggatttgattcatgagatctatactgttggaaaacgcttcaaagaggcaaataacttcctgtggcccttcaaattgtcttctccacgaggtggaatgaagaaaaagaccacccattttgtagaaggtagagatgctggcaacagggaggaccagatcaacaggcttactagaagaatgaactaaggtgtctaccatgattatttttctaagctggttggttaataaacagtacctgctctcaaattgaaataaaaaaaaaaaaaaaaaaaaaagaaccca

SEQ ID NO: 376 - protein, 259 aa, Homo sapiens; identical to SEQ ID NO: 372

SEQ ID NO: 377 - DNA, 2702 bp, Homo sapiens
ccccctttttaaccacaaaccgaattttctttcatttaggtgatctatatatatctatatcgtatagcttatagcttatatctattttaaataacttaaagccgctaaaatttgggggggaacagctttcgccctggagcggtgcgcgatgctgtctcatgccgacctcctggacgccaggctaggtatgaaagatgccgccgagcttctgggccaccgggaggcggtgaagtgtaggctgggcgtggggggctccgaccccgggggccatccgggggacctggcgcccaactctgacccagtggagggagccactctgctgcccggggaggacatcaccacagtgggctctactccggcctcgctggcggtgagcgccaaagacccggacaagcagcccgggccccagggcggcccgaaccccagccaagccggccagcagcagggccaacagaagcagaagcgccaccggacgcgcttcacccccgcacagctcaacgagttggagaggagcttcgccaagactcactaccccgacatctttatgcgtgaggagctggcactgcgtatcgggctgaccgagtcccgagtgcaggtctggttccagaaccgacgcgccaagtggaagaagcgcaaaaagacgaccaacgtgttccgtgcgcccggcacactgctgcccacgccaggcctgcctcagttcccgtcggctgccgccgccgctgccgccgccatgggcgacagcctgtgctctttccacgccaacgacacccgctgggcggcggccgccatgcctggcgtgtcacagctgcctctgccgccggcgctgggcaggcagcaggccatggcgcagtcgctgtcccagtgcagcctggcggccggtccgccgcccaactccatgggcctgtccaacagcctggcgggttccaacggcgcggggctgcagtcgcacctctaccagcccgccttccccggcatggtgcccgcctccctccccggccccagcaacgtctccggttcgccccagctctgcagctccccggacagcagcgacgtgtggcggggcaccagcatcgcctccctccgccgcaaggcgctagagcacacagtctctatgagcttcacttaatgcagccgcgccccggcccgctccgcccccagcaccgccccgggggccgccccgaggcccttccggcgcgcacccggaccccggcgccctgccccgtcccgccccggccttcgccccgtctcgtttcgtcctcgcctctctcctccactcgctcgggctcaccccaagccccagcccgcgaggcctcccctccgcctgatttcgatcgcccgcggtcccccgtctcccggccgcccctcttcccttcccacccagctgcgccctcggctcggtctccagcgcctcagcccacccttcccgccaccctggcctccctgcttgcgctggccgtgctcgcgccctcctcctggccttctgacgggcggcgttcccacccacaccttcgacgcgacgcctacgacccccctcgcccgccgcctcccctccggtcccctctttccccacacttcgcgaccctcctcccgcgcccggcaaaaagtatccttcccgccattttacgtaccagggagtcgactcaggatctgaaatcagacaccaatggactggtttgtgggcagaaacacacacactcgcactctcgctcacgctcagacgctacacacgcgcgcgcacagacacggtgcacctaggtcacacacggacgtgttcaagggacagcacaatgttagggatttttgtcttaaaggaggacaagcattgctaccaaccgcctcatctgagggcccaactgatatgatttgatttatccttgtactctccaagctcctgtctttctttcctctcccaccacgctacccttgcccagtccacccagtcacatccgtgcagccctctcttggcttgcaagataacgcttttatttttattttatcttattttcattttcttaagcacaactgtgtgagagtgtagaagggaaggcttctcaggaggaacgtgacagtggattgggtggctggagtagactaaagcagtcatgtgacgaggaagaggtgatctgacccattttgataagtctttataaggaagaataaaataaacgtgtaagcaaaattttcttttgtaaaagcaaaagccacatctcttttctggatccttcaggactggggtttgtttgcttccttttctgtttctgtcttctcgctgctctgtgcccttggttgttttgtggtggtcctgtcgtccctcgtgcccctcggccacctgctggcagccgatgggggcactcggacatctacaaccctgcaactttgtacagagaaacacaatcagctctttctgcatgtgctggtcaaatccaaacccagagaacagaagcgctttctaagaatgaacaaatatgtgaaataggatgttttgtgtagataaagcattcttgttacatactggtcaatttgtgatatgttttaacttaatgtctgtgtttatttatggaattcggttttcttaataaatgtttgagctaatataaagcatattatttgacttttccggacaagtttatatcaagttaaatgtaaatggataaaataaaatcattttcagtatgtgaaaaaaaaaaaaaaaaaaaaaaaaa

SEQ ID NO: 378 - protein, 325 aa, Homo sapiens
MLSHADLLDARLGMKDAAELLGHREAVKCRLGVGGSDPGGHPGDLAPNSDPVEGATLLPGEDITTVGSTPASLAVSAKDPDKQPGPQGGPNPSQAGQQQGQQKQKRHRTRFTPAQLNELERSFAKTHYPDIFMREELALRIGLTESRVQVWFQNRRAKWKKRKKTTNVFRAPGTLLPTPGLPQFPSAAAAAAAAMGDSLCSFHANDTRWAAAAMPGVSQLPLPPALGRQQAMAQSLSQCSLAAGPPPNSMGLSNSLAGSNGAGLQSHLYQPAFPGMVPASLPGPSNVSGSPQLCSSPDSSDVWRGTSIASLRRKALEHTVSMSFT

SEQ ID NO: 379 - DNA, 679 bp, Homo sapiens
gcatgcgcgccggcgaccacgcctaaatagccgcagcctctgcgcgtcgccctccacggttaccccggctctccgcccctccttctcgcggcgctcgagggaccatggccgatcctcgcgtgagacagatcaagatcaagaccggcgtggtgaagcggttggtcaaagaaaaagtgatgtatgaaaaagaggcaaaacaacaagaagaaaagattgaaaaaatgagagctgaagacggtgaaaattatgacattaaaaagcaggcagagatcctacaagaatccaggatgatgatcccagattgccagcgcaggttggaagccgcatatttggatcttcaacggatactagaaaatgaaaaagacttggaagaagctgaggaatataaagaagcacgtttagtactggattcagtgaagttagaagcctgaaacttttctcgtatggggtggtttttgcattaaatcctggggtccattttacaatccattatttttgaccactgctatgtgttcaagtagtatgagaatgtgattgtttttatctggttacatatatatttctttgtctaatttaatatgtcaaataaatgagttcatctaataaaattgtttattttatactttacaaaatttttaaattaaccttttatcattaaaccacatagactttatgacag

SEQ ID NO: 380 - protein, 108 aa, Homo sapiens
MADPRVRQIKIKTGVVKRLVKEKVMYEKEAKQQEEKIEKMRAEDGENYDIKKQAEILQESRMMIPDCQRRLEAAYLDLQRILENEKDLEEAEEYKEARLVLDSVKLEA

SEQ ID NO: 381 - DNA, 1948 bp, Homo sapiens
ggcttagccgccaccgcgcgcttcggaaggccagagggagggggaggcctgtcagtctcgcgcgttgcctgggcgaagggggcggagctttggcgtggggcggccaatagtgggggtggctgcgtgggtcgccatggggacggggctgttcccggggaggctgtgatgggttgacaggtgcgtgacagtgggagctgctctcggcacaagcatgtacggcaaaggcaagagtaacagcagcgccgtcccgtccgacagccaggcccgggagaagttagcactctacgtatatgaatatctgctccatgtaggagctcagaaatcagctcaaacatttttatcagagataagatgggaaaaaaacatcacattgggggaaccaccaggattcttacattcttggtggtgtgtattttgggatctctactgtgcagctccagagagacgtgaaacatgtgaacactcaagtgaagcaaaagccttccatgattacagtgctgcagcagctcccagtccagtgctaggaaacattcccccaggagatggcatgccagtaggtcctgtaccaccagggttctttcagccttttatgtcacctcggtaccctggaggtccaaggcccccattgaggatacctaatcaggcacttggaggtgtcccaggaagtcagccattactccccagtggaatggatccaactcgacaacaaggacatccaaatatgggtgggccaatgcagagaatgactcctccaagaggaatggtgcccttaggaccacagaactatggaggtgcaatgagacccccactgaatgctttaggtggccctggaatgcctggaatgaacatgggtccaggtggtggtagaccttggccaaacccaacaaatgccaattcaataccatactcctcagcatctcctgggaattatgtaggtcctccaggaggtggagggccaccaggaacacccatcatgcctagtccagcagattcaaccaactctggtgataacatgtatactttaatgaatgcagtacctcctggacctaacagacctaattttccaatgggtcctgggtcagatggtcccatgggtggattaggaggaatggagtcacatcacatgaatggctctttaggctcaggagatatggacagtatttccaagaattctcccaataatatgagcctgagtaatcaaccgggcactccaagggatgatggcgaaatggggggaaatttcttaaatccttttcagagtgagagttactcccctagcatgacaatgagcgtgtgatccattaccaagtctcctcatgaaaaccacagtgagtcagcccttcacagaactactacggaagaaaattattcatcacagtgtacagttaaacaaaggaatctcagtcacaccaaaccaacctttttatttcctgctctctcccctcttttgtgaagaaagcgggtccaaatgtgattcaaacaactgtacggagtggcatattagaattgccctaaactgaactgcaaataattatgtgtgtatgtatatgtgtgggaaagagaatgtactgtatatgtgtatgttatacagacatatacacatacatacattgacccacaggacattgtaaaatattatcacatgacatcttaagtagaaataagtagggacttttattccatcctttttttcacgtttacattttaattattacaagttgctcctgccccctccctgaactattttgtgctgtgtatatcactgctttatataagttattttttaaggtgaactcagatgttatggttttgtaaatgtctgcaatcatggataggaataaaatcgcttatttgagagctttcattaaattgcgtctgatgcaagttatcctgtgaatcacaaagtgtactgtctcaaaaaatagaagaaaatgtgtcttcgtcttta

SEQ ID NO: 382 - protein, 361 aa, Homo sapiens
MYGKGKSNSSAVPSDSQAREKLALYVYEYLLHVGAQKSAQTFLSEIRWEKNITLGEPPGFLHSWWCVFWDLYCAAPERRETCEHSSEAKAFHDYSAAAAPSPVLGNIPPGDGMPVGPVPPGFFQPFMSPRYPGGPRPPLRIPNQALGGVPGSQPLLPSGMDPTRQQGHPNMGGPMQRMTPPRGMVPLGPQNYGGAMRPPLNALGGPGMPGMNMGPGGGRPWPNPTNANSIPYSSASPGNYVGPPGGGGPPGTPIMPSPADSTNSGDNMYTLMNAVPPGPNRPNFPMGPGSDGPMGGLGGMESHHMNGSLGSGDMDSISKNSPNNMSLSNQPGTPRDDGEMGGNFLNPFQSESYSPSMTMSV

SEQ ID NO: 383 - DNA, 8192 bp, Homo sapiens
tggagacagaatggaggtgctgccggactcggaaatggggtccaagggtagccaaggatggctgcagcttcatatgatcagttgttaaagcaagttgaggcactgaagatggagaactcaaatcttcgacaagagctagaagataattccaatcatcttacaaaactggaaactgaggcatctaatatgaaggaagtacttaaacaactacaaggaagtattgaagatgaagctatggcttcttctggacagattgatttattagagcgtcttaaagagcttaacttagatagcagtaatttccctggagtaaaactgcggtcaaaaatgtccctccgttcttatggaagccgggaaggatctgtatcaagccgttctggagagtgcagtcctgttcctatgggttcatttccaagaagagggtttgtaaatggaagcagagaaagtactggatatttagaagaacttgagaaagagaggtcattgcttcttgctgatcttgacaaagaagaaaaggaaaaagactggtattacgctcaacttcagaatctcactaaaagaatagatagtcttcctttaactgaaaatttttccttacaaacagatatgaccagaaggcaattggaatatgaagcaaggcaaatcagagttgcgatggaagaacaactaggtacctgccaggatatggaaaaacgagcacagcgaagaatagccagaattcagcaaatcgaaaaggacatacttcgtatacgacagcttttacagtcccaagcaacagaagcagagaggtcatctcagaacaagcatgaaaccggctcacatgatgctgagcggcagaatgaaggtcaaggagtgggagaaatcaacatggcaacttctggtaatggtcagggttcaactacacgaatggaccatgaaacagccagtgttttgagttctagtagcacacactctgcacctcgaaggctgacaagtcatctgggaaccaaggtggaaatggtgtattcattgttgtcaatgcttggtactcatgataaggatgatatgtcgcgaactttgctagctatgtctagctcccaagacagctgtatatccatgcgacagtctggatgtcttcctctcctcatccagcttttacatggcaatgacaaagactctgtattgttgggaaattcccggggcagtaaagaggctcgggccagggccagtgcagcactccacaacatcattcactcacagcctgatgacaagagaggcaggcgtgaaatccgagtccttcatcttttggaacagatacgcgcttactgtgaaacctgttgggagtggcaggaagctcatgaaccaggcatggaccaggacaaaaatccaatgccagctcctgttgaacatcagatctgtcctgctgtgtgtgttctaatgaaactttcatttgatgaagagcatagacatgcaatgaatgaactagggggactacaggccattgcagaattattgcaagtggactgtgaaatgtatgggcttactaatgaccactacagtattacactaagacgatatgctggaatggctttgacaaacttgacttttggagatgtagccaacaaggctacgctatgctctatgaaaggctgcatgagagcacttgtggcccaactaaaatctgaaagtgaagacttacagcaggttattgcgagtgttttgaggaatttgtcttggcgagcagatgtaaatagtaaaaagacgttgcgagaagttggaagtgtgaaagcattgatggaatgtgctttagaagttaaaaaggaatcaaccctcaaaagcgtattgagtgccttatggaatttgtcagcacattgcactgagaataaagctgatatatgtgctgtagatggtgcacttgcatttttggttggcactcttacttaccggagccagacaaacactttagccattattgaaagtggaggtgggatattacggaatgtgtccagcttgatagctacaaatgaggaccacaggcaaatcctaagagagaacaactgtctacaaactttattacaacacttaaaatctcatagtttgacaatagtcagtaatgcatgtggaactttgtggaatctctcagcaagaaatcctaaagaccaggaagcattatgggacatgggggcagttagcatgctcaagaacctcattcattcaaagcacaaaatgattgctatgggaagtgctgcagctttaaggaatctcatggcaaataggcctgcgaagtacaaggatgccaatattatgtctcctggctcaagcttgccatctcttcatgttaggaaacaaaaagccctagaagcagaattagatgctcagcacttatcagaaacttttgacaatatagacaatttaagtcccaaggcatctcatcgtagtaagcagagacacaagcaaagtctctatggtgattatgtttttgacaccaatcgacatgatgataataggtcagacaattttaatactggcaacatgactgtcctttcaccatatttgaatactacagtgttacccagctcctcttcatcaagaggaagcttagatagttctcgttctgaaaaagatagaagtttggagagagaacgcggaattggtctaggcaactaccatccagcaacagaaaatccaggaacttcttcaaagcgaggtttgcagatctccaccactgcagcccagattgccaaagtcatggaagaagtgtcagccattcatacctctcaggaagacagaagttctgggtctaccactgaattacattgtgtgacagatgagagaaatgcacttagaagaagctctgctgcccatacacattcaaacacttacaatttcactaagtcggaaaattcaaataggacatgttctatgccttatgccaaattagaatacaagagatcttcaaatgatagtttaaatagtgtcagtagtagtgatggttatggtaaaagaggtcaaatgaaaccctcgattgaatcctattctgaagatgatgaaagtaagttttgcagttatggtcaatacccagccgacctagcccataaaatacatagtgcaaatcatatggatgataatgatggagaactagatacaccaataaattatagtcttaaatattcagatgagcagttgaactctggaaggcaaagtccttcacagaatgaaagatgggcaagacccaaacacataatagaagatgaaataaaacaaagtgagcaaagacaatcaaggaatcaaagtacaacttatcctgtttatactgagagcactgatgataaacacctcaagttccaaccacattttggacagcaggaatgtgtttctccatacaggtcacggggagccaatggttcagaaacaaatcgagtgggttctaatcatggaattaatcaaaatgtaagccagtctttgtgtcaagaagatgactatgaagatgataagcctaccaattatagtgaacgttactctgaagaagaacagcatgaagaagaagagagaccaacaaattatagcataaaatataatgaagagaaacgtcatgtggatcagcctattgattatagtttaaaatatgccacagatattccttcatcacagaaacagtcattttcattctcaaagagttcatctggacaaagcagtaaaaccgaacatatgtcttcaagcagtgagaatacgtccacaccttcatctaatgccaagaggcagaatcagctccatccaagttctgcacagagtagaagtggtcagcctcaaaaggctgccacttgcaaagtttcttctattaaccaagaaacaatacagacttattgtgtagaagatactccaatatgtttttcaagatgtagttcattatcatctttgtcatcagctgaagatgaaataggatgtaatcagacgacacaggaagcagattctgctaataccctgcaaatagcagaaataaaagaaaagattggaactaggtcagctgaagatcctgtgagcgaagttccagcagtgtcacagcaccctagaaccaaatccagcagactgcagggttctagtttatcttcagaatcagccaggcacaaagctgttgaattttcttcaggagcgaaatctccctccaaaagtggtgctcagacacccaaaagtccacctgaacactatgttcaggagaccccactcatgtttagcagatgtacttctgtcagttcacttgatagttttgagagtcgttcgattgccagctccgttcagagtgaaccatgcagtggaatggtaagtggcattataagccccagtgatcttccagatagccctggacaaaccatgccaccaagcagaagtaaaacacctccaccacctcctcaaacagctcaaaccaagcgagaagtacctaaaaataaagcacctactgctgaaaagagagagagtggacctaagcaagctgcagtaaatgctgcagttcagagggtccaggttcttccagatgctgatactttattacattttgccacggaaagtactccagatggattttcttgttcatccagcctgagtgctctgagcctcgatgagccatttatacagaaagatgtggaattaagaataatgcctccagttcaggaaaatgacaatgggaatgaaacagaatcagagcagcctaaagaatcaaatgaaaaccaagagaaagaggcagaaaaaactattgattctgaaaaggacctattagatgattcagatgatgatgatattgaaatactagaagaatgtattatttctgccatgccaacaaagtcatcacgtaaagcaaaaaagccagcccagactgcttcaaaattacctccacctgtggcaaggaaaccaagtcagctgcctgtgtacaaacttctaccatcacaaaacaggttgcaaccccaaaagcatgttagttttacaccgggggatgatatgccacgggtgtattgtgttgaagggacacctataaacttttccacagctacatctctaagtgatctaacaatcgaatcccctccaaatgagttagctgctggagaaggagttagaggaggggcacagtcaggtgaatttgaaaaacgagataccattcctacagaaggcagaagtacagatgaggctcaaggaggaaaaacctcatctgtaaccatacctgaattggatgacaataaagcagaggaaggtgatattcttgcagaatgcattaattctgctatgcccaaagggaaaagtcacaagcctttccgtgtgaaaaagataatggaccaggtccagcaagcatctgcgtcttcttctgcacccaacaaaaatcagttagatggtaagaaaaagaaaccaacttcaccagtaaaacctataccacaaaatactgaatataggacacgtgtaagaaaaaatgcagactcaaaaaataatttaaatgctgagagagttttctcagacaacaaagattcaaagaaacagaatttgaaaaataattccaaggtcttcaatgataagctcccaaataatgaagatagagtcagaggaagttttgcttttgattcacctcatcattacacgcctattgaaggaactccttactgtttttcacgaaatgattctttgagttctctagattttgatgatgatgatgttgacctttccagggaaaaggctgaattaagaaaggcaaaagaaaataaggaatcagaggctaaagttaccagccacacagaactaacctccaaccaacaatcagctaataagacacaagctattgcaaagcagccaataaatcgaggtcagcctaaacccatacttcagaaacaatccacttttccccagtcatccaaagacataccagacagaggggcagcaactgatgaaaagttacagaattttgctattgaaaatactccggtttgcttttctcataattcctctctgagttctctcagtgacattgaccaagaaaacaacaataaagaaaatgaacctatcaaagagactgagccccctgactcacagggagaaccaagtaaacctcaagcatcaggctatgctcctaaatcatttcatgttgaagataccccagtttgtttctcaagaaacagttctctcagttctcttagtattgactctgaagatgacctgttgcaggaatgtataagctccgcaatgccaaaaaagaaaaagccttcaagactcaagggtgataatgaaaaacatagtcccagaaatatgggtggcatattaggtgaagatctgacacttgatttgaaagatatacagagaccagattcagaacatggtctatcccctgattcagaaaattttgattggaaagctattcaggaaggtgcaaattccatagtaagtagtttacatcaagctgctgctgctgcatgtttatctagacaagcttcgtctgattcagattccatcctttccctgaaatcaggaatctctctgggatcaccatttcatcttacacctgatcaagaagaaaaaccctttacaagtaataaaggcccacgaattctaaaaccaggggagaaaagtacattggaaactaaaaagatagaatctgaaagtaaaggaatcaaaggaggaaaaaaagtttataaaagtttgattactggaaaagttcgatctaattcagaaatttcaggccaaatgaaacagccccttcaagcaaacatgccttcaatctctcgaggcaggacaatgattcatattccaggagttcgaaatagctcctcaagtacaagtcctgtttctaaaaaaggcccaccccttaagactccagcctccaaaagccctagtgaaggtcaaacagccaccacttctcctagaggagccaagccatctgtgaaatcagaattaagccctgttgccaggcagacatcccaaataggtgggtcaagtaaagcaccttctagatcaggatctagagattcgaccccttcaagacctgcccagcaaccattaagtagacctatacagtctcctggccgaaactcaatttcccctggtagaaatggaataagtcctcctaacaaattatctcaacttccaaggacatcatcccctagtactgcttcaactaagtcctcaggttctggaaaaatgtcatatacatctccaggtagacagatgagccaacagaaccttaccaaacaaacaggtttatccaagaatgccagtagtattccaagaagtgagtctgcctccaaaggactaaatcagatgaataatggtaatggagccaataaaaaggtagaactttctagaatgtcttcaactaaatcaagtggaagtgaatctgatagatcagaaagacctgtattagtacgccagtcaactttcatcaaagaagctccaagcccaaccttaagaagaaaattggaggaatctgcttcatttgaatctctttctccatcatctagaccagcttctcccactaggtcccaggcacaaactccagttttaagtccttcccttcctgatatgtctctatccacacattcgtctgttcaggctggtggatggcgaaaactcccacctaatctcagtcccactatagagtataatgatggaagaccagcaaagcgccatgatattgcacggtctcattctgaaagtccttctagacttccaatcaataggtcaggaacctggaaacgtgagcacagcaaacattcatcatcccttcctcgagtaagcacttggagaagaactggaagttcatcttcaattctttctgcttcatcagaatccagtgaaaaagcaaaaagtgaggatgaaaaacatgtgaactctatttcaggaaccaaacaaagtaaagaaaaccaagtatccgcaaaaggaacatggagaaaaataaaagaaaatgaattttctcccacaaatagtacttctcagaccgtttcctcaggtgctacaaatggtgctgaatcaaagactctaatttatcaaatggcacctgctgtttctaaaacagaggatgtttgggtgagaattgaggactgtcccattaacaatcctagatctggaagatctcccacaggtaatactcccccggtgattgacagtgtttcagaaaaggcaaatccaaacattaaagattcaaaagataatcaggcaaaacaaaatgtgggtaatggcagtgttcc

SEQ ID NO: 384 - protein, 2843 aa, Homo sapiens
MAAASYDQLLKQVEALKMENSNLRQELEDNSNHLTKLETEASNMKEVLKQLQGSIEDEAMASSGQIDLLERLKELNLDSSNFPGVKLRSKMSLRSYGSREGSVSSRSGECSPVPMGSFPRRGFVNGSRESTGYLEELEKERSLLLADLDKEEKEKDWYYAQLQNLTKRIDSLPLTENFSLQTDMTRRQLEYEARQIRVAMEEQLGTCQDMEKRAQRRIARIQQIEKDILRIRQLLQSQATEAERSSQNKHETGSHDAERQNEGQGVGEINMATSGNGQGSTTRMDHETASVLSSSSTHSAPRRLTSHLGTKVEMVYSLLSMLGTHDKDDMSRTLLAMSSSQDSCISMRQSGCLPLLIQLLHGNDKDSVLLGNSRGSKEARARASAALHNIIHSQPDDKRGRREIRVLHLLEQIRAYCETCWEWQEAHEPGMDQDKNPMPAPVEHQICPAVCVLMKLSFDEEHRHAMNELGGLQAIAELLQVDCEMYGLTNDHYSITLRRYAGMALTNLTFGDVANKATLCSMKGCMRALVAQLKSESEDLQQVIASVLRNLSWRADVNSKKTLREVGSVKALMECALEVKKESTLKSVLSALWNLSAHCTENKADICAVDGALAFLVGTLTYRSQTNTLAIIESGGGILRNVSSLIATNEDHRQILRENNCLQTLLQHLKSHSLTIVSNACGTLWNLSARNPKDQEALWDMGAVSMLKNLIHSKHKMIAMGSAAALRNLMANRPAKYKDANIMSPGSSLPSLHVRKQKALEAELDAQHLSETFDNIDNLSPKASHRSKQRHKQSLYGDYVFDTNRHDDNRSDNFNTGNMTVLSPYLNTTVLPSSSSSRGSLDSSRSEKDRSLERERGIGLGNYHPATENPGTSSKRGLQISTTAAQIAKVMEEVSAIHTSQEDRSSGSTTELHCVTDERNALRRSSAAHTHSNTYNFTKSENSNRTCSMPYAKLEYKRSSNDSLNSVSSSDGYGKRGQMKPSIESYSEDDESKFCSYGQYPADLAHKIHSANHMDDNDGELDTPINYSLKYSDEQLNSGRQSPSQNERWARPKHIIEDEIKQSEQRQSRNQSTTYPVYTESTDDKHLKFQPHFGQQECVSPYRSRGANGSETNRVGSNHGINQNVSQSLCQEDDYEDDKPTNYSERYSEEEQHEEEERPTNYSIKYNEEKRHVDQPIDYSLKYATDIPSSQKQSFSFSKSSSGQSSKTEHMSSSSENTSTPSSNAKRQNQLHPSSAQSRSGQPQKAATCKVSSINQETIQTYCVEDTPICFSRCSSLSSLSSAEDEIGCNQTTQEADSANTLQIAEIKEKIGTRSAEDPVSEVPAVSQHPRTKSSRLQGSSLSSESARHKAVEFSSGAKSPSKSGAQTPKSPPEHYVQETPLMFSRCTSVSSLDSFESRSIASSVQSEPCSGMVSGIISPSDLPDSPGQTMPPSRSKTPPPPPQTAQTKREVPKNKAPTAEKRESGPKQAAVNAAVQRVQVLPDADTLLHFATESTPDGFSCSSSLSALSLDEPFIQKDVELRIMPPVQENDNGNETESEQPKESNENQEKEAEKTIDSEKDLLDDSDDDDIEILEECIISAMPTKSSRKAKKPAQTASKLPPPVARKPSQLPVYKLLPSQNRLQPQKHVSFTPGDDMPRVYCVEGTPINFSTATSLSDLTIESPPNELAAGEGVRGGAQSGEFEKRDTIPTEGRSTDEAQGGKTSSVTIPELDDNKAEEGDILAECINSAMPKGKSHKPFRVKKIMDQVQQASASSSAPNKNQLDGKKKKPTSPVKPIPQNTEYRTRVRKNADSKNNLNAERVFSDNKDSKKQNLKNNSKVFNDKLPNNEDRVRGSFAFDSPHHYTPIEGTPYCFSRNDSLSSLDFDDDDVDLSREKAELRKAKENKESEAKVTSHTELTSNQQSANKTQAIAKQPINRGQPKPILQKQSTFPQSSKDIPDRGAATDEKLQNFAIENTPVCFSHNSSLSSLSDIDQENNNKENEPIKETEPPDSQGEPSKPQASGYAPKSFHVEDTPVCFSRNSSLSSLSIDSEDDLLQECISSAMPKKKKPSRLKGDNEKHSPRNMGGILGEDLTLDLKDIQRPDSEHGLSPDSENFDWKAIQEGANSIVSSLHQAAAAACLSRQASSDSDSILSLKSGISLGSPFHLTPDQEEKPFTSNKGPRILKPGEKSTLETKKIESESKGIKGGKKVYKSLITGKVRSNSEISGQMKQPLQANMPSISRGRTMIHIPGVRNSSSSTSPVSKKGPPLKTPASKSPSEGQTATTSPRGAKPSVKSELSPVARQTSQIGGSSKAPSRSGSRDSTPSRPAQQPLSRPIQSPGRNSISPGRNGISPPNKLSQLPRTSSPSTASTKSSGSGKMSYTSPGRQMSQQNLTKQTGLSKNASSIPRSESASKGLNQMNNGNGANKKVELSRMSSTKSSGSESDRSERPVLVRQSTFIKEAPSPTLRRKLEESASFESLSPSSRPASPTRSQAQTPVLSPSLPDMSLSTHSSVQAGGWRKLPPNLSPTIEYNDGRPAKRHDIARSHSESPSRLPINRSGTWKREHSKHSSSLPRVSTWRRTGSSSSILSASSESSEKAKSEDEKHVNSISGTKQSKENQVSAKGTWRKIKENEFSPTNSTSQTVSSGATNGAESKTLIYQMAPAVSKTEDVWVRIEDCPINNPRSGRSPTGNTPPVIDSVSEKANPNIKDSKDNQAKQNVGNGSVPMRTVGLENRLNSFIQVDAPDQKGTEIKPGQNNPVPVSETNESSIVERTPFSSSSSSKHSSPSGTVAARVTPFNYNPSPRKSSADSTSARPSQIPTPVNNNTKKRDSKTDSTESSGTQSPKRHSGSYLVTSV

SEQ ID NO: 385 - DNA, 894 bp, Homo sapiens
cggaaactcagagccgggttcctcccgggtttctgccgggtttctccctgcggctcctgggttgttgagactcttgtgaagatggcttgcgctgccgcgcggtccccggccgaccaggacaggtttatttgtatctatcctgcttatttaaataataagaagaccatcgcagagggaaggcgaatccccataagtaaggctgttgaaaatcctacagctacagagattcaagatgtatgttcagcagttggacttaacgtatttcttgagaaaaataaaatgtactctagagaatggaatcgtgatgtccaatacagaggcagagtccgggtccagctcaaacaggaagatgggagcctctgccttgtacagttcccatcacgtaagtcagtaatgttgtatgcagcagaaatgatacctaaactaaaaacaaggacacaaaaaacaggaggtgctgaccaaagtcttcaacaaggagagggaagtaaaaaagggaaaggaaagaaaaagaagtaacctagtatcagcatcaagtatgtggtactactgtaagagacatgaatggagacttctaatttgtatcggagggaaacagaagctttttgtttgcatcatttaactgaactgtgaacccttgtgcctctcatctttatcatcggagttgacagtgaaacaaatttacatcagaagtttgcatctcgcgtatatgccgtataaaagaatttttttgtctttcaatgcagttttttggaagaaaatatttttaaatggacaatggactgtacaataagttacttgaaataagttgtttcagataaatttcaattagatttaaaataaacattatgtccaccttttaagttaatgaaataaaatttgaaactgaaaaaaaaa

SEQ ID NO: 386 - protein, 144 aa, Homo sapiens
MACAAARSPADQDRFICIYPAYLNNKKTIAEGRRIPISKAVENPTATEIQDVCSAVGLNVFLEKNKMYSREWNRDVQYRGRVRVQLKQEDGSLCLVQFPSRKSVMLYAAEMIPKLKTRTQKTGGADQSLQQGEGSKKGKGKKKK

SEQ ID NO: 387 - DNA, 3000 bp, Homo sapiens
cccgagcggcgagacggtccccgccatgtctgcggccatgagggagaggttcgaccggttcctgcacgagaagaactgcatgactgaccttctggccaagctcgaggccaaaaccggcgtgaacaggagcttcatcgctcttggtgtcatcggactggtggccttgtacctggtgttcggttatggagcctctctcctctgcaacctgataggatttggctacccagcctacatctcaattaaagctatagagagtcccaacaaagaagatgatacccagtggctgacctactgggtagtgtatggtgtgttcagcattgctgaattcttctctgatatcttcctgtcatggttccccttctactacatgctgaagtgtggcttcctgttgtggtgcatggccccgagcccttctaatggggctgaactgctctacaagcgcatcatccgtcctttcttcctgaagcacgagtcccagatggacagtgtggtcaaggaccttaaagacaaggccaaagagactgcagatgccatcactaaagaagcgaagaaagctaccgtgaatttactgggtgaagaaaagaagagcacctaaaccagactggatggaaacttcctgccctctctgtaccttcctactggagcttgatgttatattagggactgtggtataattattttaataatgttgccttggaaacatttttgagatattaaagattggaatgtgttgtaagtttctttgcttacttttactgtctatatatatagggagcactttaaacttaatgcagtgggcagtgtccacgtttttggaaaatgtattttgcctctgggtaggaaaagatgtatgttgctatcctgcaggaaatataaacttaaaataaaattatataccccacaggctgtgtactttactgggctctccctgcacgcattttctctgtagttacatttaggataatctttatggttctacttcctataatgtacaattttatataattctgaaatgtttttaatgtatttgtgcacatgtacatatggaaatgttactgtctgactacaacatgcatcatgctcatggggagggagcaggggaaggttgtatgtgtcatttataacttctgtacagtaagaccacctgccaaaagctggaggaaccattgtgctggtgtggtctactaaataatactttaggaaatacgtgattaatatgcaagtgaacaaagtgagaaatgaaatcgaatggagattggcctggttgtttccctagtatatggcatatgaataccaggatagctttataaagcagttagttagttactcactctagtgataaatcgggaaatttacacacacacacacacacacacacacacagagtaacctgtaactctcaattccctgaaaaactagtaatactgtcttatctgctataaactttacatatttgtctattgtcaagatgctacaatggaaaccatttctggttttatcttcaaagcggagaaacatgttgatttagtcttctttcccaatcttcttttttaaaccagtttaaggaacttctgaagatttgtccacctctgattacatgtatgttcttgtttgtatcattagcaacaacatgctaatgacgacacctagctctaagagcaattctgggagaatgaaaggaagtataaagtaacccataatctgcttggcaatagttaagtcaatctatcttcagtttttctctggcctttaaggtcaaacacaagaggcttccctagtttacaagtcagagtcacttgtagtccatttaaatgccctcatccgtattctttgtgttgataagctgcacatgactacatagtaagtacagaacagtaaagttaaaacggatgtctccattgatctgccaaatcgttatagagagcaatttgtctggactagaaaatctgagttttacaccatactgttaagagtccttttgaattaaactagactaaaacaagtgtataactaaactaacaagattaaatatccagccagtacagtattttttaaggcaaataaagatgattagctcaccttgagataacaatcaggtaagatcataacaatgtctcatgatgtaaaaaatattaaagatatcaatactaagtgacagtatcactctaatataatatggatcagagcatttattttggggaggaaaacagtggtgattaccggcattttattaaacttaaaactttgtagaaagcaaacaaaattgttcttgggagaaaatcaacttttagattaaaaaaattttaagtatctaggagtatttaaatccttttcccataaataaaagtacagttttcttggtggcagaatgaaaatcagcaacttctagcatatagactatataatcagattgacagcatatagaatatattatcagacaagatgaggaggtataaaagttactattgctcataatgacttacaggctaaaattagttttaaaatactatattaaattctgaatgcaatttttttttgttcccttgagaccaaaatttaagttaactgttgctggcagtctaagtgtaaatgttaacagcaggagaagttaagaattgagcagttctgttgcatgatttcccaaatgaaatactgccttggctagagtttgaaaaactaattgagcctgtgcctggctagaaaacaagcgtttatttgaatgtgaatagtgtttcaaaggtatgtagttacagaattcctaccaaacagcttaaattcttcaagaaagaattcctgcagcagttattcccttacctgaaggcttcaatcatttggatcaacaactgctactctcgggaagactcctctactcacagctgaagaaaatgagcacacccttcacactgttattacctatcctgaagatgtgatacactgaatggaaataaatagatgtaaataaaattgagttctcatttaacaaaaaaaaaaaaaaaaaaa

SEQ ID NO: 388 - protein, 185 aa, Homo sapiens
MRERFDRFLHEKNCMTDLLAKLEAKTGVNRSFIALGVIGLVALYLVFGYGASLLCNLIGFGYPAYISIKAIESPNKEDDTQWLTYWVVYGVFSIAEFFSDIFLSWFPFYYMLKCGFLLWCMAPSPSNGAELLYKRIIRPFFLKHESQMDSVVKDLKDKAKETADAITKEAKKATVNLLGEEKKST

SEQ ID NO: 389 - DNA, 3002 bp, Homo sapiens
gccagtcaccttcagtttctggagctggccgtcaacatgtcctttcctaaggcgcccttgaaacgattcaatgacccttctggttgtgcaccatctccaggtgcttatgatgttaaaactttagaagtattgaaaggaccagtatcctttcagaaatcacaaagatttaaacaacaaaaagaatctaaacaaaatcttaatgttgacaaagatactaccttgcctgcttcagctagaaaagttaagtcttcggaatcaaaggaatctcaaaagaatgataaagatttgaagatattagagaaagagattcgtgttcttctacaggaacgtggtgcccaggacagccggatccaggatctggaaactgagttggaaaagatggaagcaaggctaaatgctgcactaagggaaaaaacatctctctctgcaaataatgctacactggaaaaacaacttattgaattgaccaggactaatgaactactaaaatctaagttttctgaaaatggtaaccagaagaatttgagaattctaagcttggagttgatgaaacttagaaacaaaagagaaacaaagatgaggggtatgatggctaagcaagaaggcatggagatgaagctgcaggtcacccaaaggagtctcgaagagtctcaagggaaaatagcccaactggagggaaaacttgtttcaatagagaaagaaaagattgatgaaaaatctgaaacagaaaaactcttggaatacatcgaagaaattagttgtgcttcagatcaagtggaaaaatacaagctagatattgcccagttagaagaaaatttgaaagagaagaatgatgaaattttaagccttaagcagtctcttgaggagaatattgttatattatctaaacaagtagaagatctaaatgtgaaatgtcagctgcttgaaaaagaaaaagaagaccatgtcaacaggaatagagaacacaacgaaaatctaaatgcagagatgcaaaacttaaaacagaagtttattcttgaacaacaggaacgtgaaaagcttcaacaaaaagaattacaaattgattcacttctgcaacaagagaaagaattatcttcgagtcttcatcagaagctctgttcttttcaagaggaaatggttaaagagaagaatctgtttgaggaagaattaaagcaaacactggatgagcttgataaattacagcaaaaggaggaacaagctgaaaggctggtcaagcaattggaagaggaagcaaaatctagagctgaagaattaaaactcctagaagaaaagctgaaagggaaggaggctgaactggagaaaagtagtgctgctcatacccaggccaccctgcttttgcaggaaaagtatgacagtatggtgcaaagccttgaagatgttactgctcaatttgaaagctataaagcgttaacagccagtgagatagaagatcttaagctggagaactcatcattacaggaaaaagcggccaaggctgggaaaaatgcagaggatgttcagcatcagattttggcaactgagagctcaaatcaagaatatgtaaggatgcttctagatctgcagaccaagtcagcactaaaggaaacagaaattaaagaaatcacagtttcttttcttcaaaaaataactgatttgcagaaccaactcaagcaacaggaggaagactttagaaaacagctggaagatgaagaaggaagaaaagctgaaaaagaaaatacaacagcagaattaactgaagaaattaacaagtggcgtctcctctatgaagaactatataataaaacaaaaccttttcagctacaactagatgcttttgaagtagaaaaacaggcattgttgaatgaacatggtgcagctcaggaacagctaaataaaataagagattcatatgctaaattattgggtcatcagaatttgaaacaaaaaatcaagcatgttgtgaagttgaaagatgaaaatagccaactcaaatcggaagtatcaaaactccgctgtcagcttgctaaaaaaaaacaaagtgagacaaaacttcaagaggaattgaataaagttctaggtatcaaacactttgatccttcaaaggcttttcatcatgaaagtaaagaaaattttgccctgaagaccccattaaaagaaggcaatacaaactgttaccgagctcctatggagtgtcaagaatcatggaagtaaacatctgagaaacctgttgaagattatttcattcgtcttgttgttattgatgttgctgttattatatttgacatgggtattttataatgttgtatttaattttaactgccaatccttaaatatgtgaaaggaacattttttaccaaagtgtcttttgacattttattttttcttgcaaatacctcctccctaatgctcacctttatcacctcattctgaaccctttcgctggctttccagcttagaatgcatctcatcaacttaaaagtcagtatcatattattatcctcctgttctgaaaccttagtttcaagagtctaaaccccagattcttcagcttgatcctggaggtcttttctagtctgagcttctttagctaggctaaaacaccttggcttgttattgcctctactttgattctgataatgctcacttggtcctacctattatccttctacttgtccagttcaaataagaaataaggacaagcctaacttcatagaaacctctctatttttaatcagttgtttaataatttacaggttcttaggctccatcctgtttgtatgaaattataatctgtggattggcctttaagcctgcattcttaacaaactcttcagttaattcttagatacactaaaaatctgagaaactctacatgtaactatttcttcagagtttgtcatatactgcttgtcatctgcatgtctactcagcatttgattaacatttgtgtaatatgaaataaaattacacagtaagtcatttaaccaaaaaaaaaaaaaaaa

SEQ ID NO: 390 - protein, 724 aa, Homo sapiens
MSFPKAPLKRFNDPSGCAPSPGAYDVKTLEVLKGPVSFQKSQRFKQQKESKQNLNVDKDTTLPASARKVKSSESKESQKNDKDLKILEKEIRVLLQERGAQDSRIQDLETELEKMEARLNAALREKTSLSANNATLEKQLIELTRTNELLKSKFSENGNQKNLRILSLELMKLRNKRETKMRGMMAKQEGMEMKLQVTQRSLEESQGKIAQLEGKLVSIEKEKIDEKSETEKLLEYIEEISCASDQVEKYKLDIAQLEENLKEKNDEILSLKQSLEENIVILSKQVEDLNVKCQLLEKEKEDHVNRNREHNENLNAEMQNLKQKFILEQQEREKLQQKELQIDSLLQQEKELSSSLHQKLCSFQEEMVKEKNLFEEELKQTLDELDKLQQKEEQAERLVKQLEEEAKSRAEELKLLEEKLKGKEAELEKSSAAHTQATLLLQEKYDSMVQSLEDVTAQFESYKALTASEIEDLKLENSSLQEKAAKAGKNAEDVQHQILATESSNQEYVRMLLDLQTKSALKETEIKEITVSFLQKITDLQNQLKQQEEDFRKQLEDEEGRKAEKENTTAELTEEINKWRLLYEELYNKTKPFQLQLDAFEVEKQALLNEHGAAQEQLNKIRDSYAKLLGHQNLKQKIKHVVKLKDENSQLKSEVSKLRCQLAKKKQSETKLQEELNKVLGIKHFDPSKAFHHESKENFALKTPLKEGNTNCYRAPMECQESWK

SEQ ID NO: 391 - DNA, 2957 bp, Homo sapiens
gccagtcaccttcagtttctggagctggccgtcaacatgtcctttcctaaggcgcccttgaaacgattcaatgacccttctggttgtgcaccatctccaggtgcttatgatgttaaaactttagaagtattgaaaggaccagtatcctttcagaaatcacaaagatttaaacaacaaaaagaatctaaacaaaatcttaatgttgacaaagatactaccttgcctgcttcagctagaaaagttaagtcttcggaatcaaagattcgtgttcttctacaggaacgtggtgcccaggacagccggatccaggatctggaaactgagttggaaaagatggaagcaaggctaaatgctgcactaagggaaaaaacatctctctctgcaaataatgctacactggaaaaacaacttattgaattgaccaggactaatgaactactaaaatctaagttttctgaaaatggtaaccagaagaatttgagaattctaagcttggagttgatgaaacttagaaacaaaagagaaacaaagatgaggggtatgatggctaagcaagaaggcatggagatgaagctgcaggtcacccaaaggagtctcgaagagtctcaagggaaaatagcccaactggagggaaaacttgtttcaatagagaaagaaaagattgatgaaaaatctgaaacagaaaaactcttggaatacatcgaagaaattagttgtgcttcagatcaagtggaaaaatacaagctagatattgcccagttagaagaaaatttgaaagagaagaatgatgaaattttaagccttaagcagtctcttgaggagaatattgttatattatctaaacaagtagaagatctaaatgtgaaatgtcagctgcttgaaaaagaaaaagaagaccatgtcaacaggaatagagaacacaacgaaaatctaaatgcagagatgcaaaacttaaaacagaagtttattcttgaacaacaggaacgtgaaaagcttcaacaaaaagaattacaaattgattcacttctgcaacaagagaaagaattatcttcgagtcttcatcagaagctctgttcttttcaagaggaaatggttaaagagaagaatctgtttgaggaagaattaaagcaaacactggatgagcttgataaattacagcaaaaggaggaacaagctgaaaggctggtcaagcaattggaagaggaagcaaaatctagagctgaagaattaaaactcctagaagaaaagctgaaagggaaggaggctgaactggagaaaagtagtgctgctcatacccaggccaccctgcttttgcaggaaaagtatgacagtatggtgcaaagccttgaagatgttactgctcaatttgaaagctataaagcgttaacagccagtgagatagaagatcttaagctggagaactcatcattacaggaaaaagcggccaaggctgggaaaaatgcagaggatgttcagcatcagattttggcaactgagagctcaaatcaagaatatgtaaggatgcttctagatctgcagaccaagtcagcactaaaggaaacagaaattaaagaaatcacagtttcttttcttcaaaaaataactgatttgcagaaccaactcaagcaacaggaggaagactttagaaaacagctggaagatgaagaaggaagaaaagctgaaaaagaaaatacaacagcagaattaactgaagaaattaacaagtggcgtctcctctatgaagaactatataataaaacaaaaccttttcagctacaactagatgcttttgaagtagaaaaacaggcattgttgaatgaacatggtgcagctcaggaacagctaaataaaataagagattcatatgctaaattattgggtcatcagaatttgaaacaaaaaatcaagcatgttgtgaagttgaaagatgaaaatagccaactcaaatcggaagtatcaaaactccgctgtcagcttgctaaaaaaaaacaaagtgagacaaaacttcaagaggaattgaataaagttctaggtatcaaacactttgatccttcaaaggcttttcatcatgaaagtaaagaaaattttgccctgaagaccccattaaaagaaggcaatacaaactgttaccgagctcctatggagtgtcaagaatcatggaagtaaacatctgagaaacctgttgaagattatttcattcgtcttgttgttattgatgttgctgttattatatttgacatgggtattttataatgttgtatttaattttaactgccaatccttaaatatgtgaaaggaacattttttaccaaagtgtcttttgacattttattttttcttgcaaatacctcctccctaatgctcacctttatcacctcattctgaaccctttcgctggctttccagcttagaatgcatctcatcaacttaaaagtcagtatcatattattatcctcctgttctgaaaccttagtttcaagagtctaaaccccagattcttcagcttgatcctggaggtcttttctagtctgagcttctttagctaggctaaaacaccttggcttgttattgcctctactttgattctgataatgctcacttggtcctacctattatccttctacttgtccagttcaaataagaaataaggacaagcctaacttcatagaaacctctctatttttaatcagttgtttaataatttacaggttcttaggctccatcctgtttgtatgaaattataatctgtggattggcctttaagcctgcattcttaacaaactcttcagttaattcttagatacactaaaaatctgagaaactctacatgtaactatttcttcagagtttgtcatatactgcttgtcatctgcatgtctactcagcatttgattaacatttgtgtaatatgaaataaaattacacagtaagtcatttaaccaaaaaaaaaaaaaaaa

SEQ ID NO: 392 - protein, 709 aa, Homo sapiens
MSFPKAPLKRFNDPSGCAPSPGAYDVKTLEVLKGPVSFQKSQRFKQQKESKQNLNVDKDTTLPASARKVKSSESKIRVLLQERGAQDSRIQDLETELEKMEARLNAALREKTSLSANNATLEKQLIELTRTNELLKSKFSENGNQKNLRILSLELMKLRNKRETKMRGMMAKQEGMEMKLQVTQRSLEESQGKIAQLEGKLVSIEKEKIDEKSETEKLLEYIEEISCASDQVEKYKLDIAQLEENLKEKNDEILSLKQSLEENIVILSKQVEDLNVKCQLLEKEKEDHVNRNREHNENLNAEMQNLKQKFILEQQEREKLQQKELQIDSLLQQEKELSSSLHQKLCSFQEEMVKEKNLFEEELKQTLDELDKLQQKEEQAERLVKQLEEEAKSRAEELKLLEEKLKGKEAELEKSSAAHTQATLLLQEKYDSMVQSLEDVTAQFESYKALTASEIEDLKLENSSLQEKAAKAGKNAEDVQHQILATESSNQEYVRMLLDLQTKSALKETEIKEITVSFLQKITDLQNQLKQQEEDFRKQLEDEEGRKAEKENTTAELTEEINKWRLLYEELYNKTKPFQLQLDAFEVEKQALLNEHGAAQEQLNKIRDSYAKLLGHQNLKQKIKHVVKLKDENSQLKSEVSKLRCQLAKKKQSETKLQEELNKVLGIKHFDPSKAFHHESKENFALKTPLKEGNTNCYRAPMECQESWK

SEQ ID NO: 393 - DNA, 2090 bp, Homo sapiens
gttctgggcctaggggaggcgggccgagggcgtctgagctgaggcccgcgtcgatcctgggttggaggaggtggcggccgctgaggctgcggcgtgaagacggcgggcatggtggggcgggagaaagagctctctatacactttgttcccgggagctgtcggctggtggaggaggaagttaacatccctaataggagggttctggttactggtgccactgggcttcttggcagagctgtacacaaagaatttcagcagaataattggcatgcagttggctgtggtttcagaagagcaagaccaaaatttgaacaggttaatctgttggattctaatgcagttcatcacatcattcatgattttcagccccatgttatagtacattgtgcagcagagagaagaccagatgttgtagaaaatcagccagatgctgcctctcaacttaatgtggatgcttctgggaatttagcaaaggaagcagctgctgttggagcatttctcatctacattagctcagattatgtatttgatggaacaaatccaccttacagagaggaagacataccagctcccctaaatttgtatggcaaaacaaaattagatggagaaaaggctgtcctggagaacaatctaggagctgctgttttgaggattcctattctgtatggggaagttgaaaagctcgaagaaagtgctgtgactgttatgtttgataaagtgcagttcagcaacaagtcagcaaacatggatcactggcagcagaggttccccacacatgtcaaagatgtggccactgtgtgccggcagctagcagagaagagaatgctggatccatcaattaagggaacctttcactggtctggcaatgaacagatgactaagtatgaaatggcatgtgcaattgcagatgccttcaacctccccagcagtcacttaagacctattactgacagccctgtcctaggagcacaacgtccgagaaatgctcagcttgactgctccaaattggagaccttgggcattggccaacgaacaccatttcgaattggaatcaaagaatcactttggcctttcctcattgacaagagatggagacaaacggtctttcattagtttatttgtgttgggttcttttttttttttaaatgaaaagtatagtatgtggcactttttaaagaacaaaggaaatagttttgtatgagtactttaattgtgactcttaggatctttcaggtaaatgatgctcttgcactagtgaaattgtctaaagaaactaaagggcagtcatgccctgtttgcagtaatttttctttttatcattttgtttgtcctggctaaacttggagtttgagtatagtaaattatgatccttaaatatttgagagtcaggatgaagcagatctgctgtagacttttcagatgaaattgttcattctcgtaacctccatattttcaggatttttgaagctgttgaccttttcatgttgattattttaaattgtgtgaaatagtataaaaatcattggtgttcattatttgctttgcctgagctcagatcaaaatgtttgaagaaaggaactttatttttgcaagttacgtacagtttttatgcttgagatatttcaacatgttatgtatattggaacttctacagcttgatgcctcctgcttttatagcagtttatggggagcacttgaaagagcgtgtgtacatgtattttttttctaggcaaacattgaatgcaaacgtgtatttttttaatataaatatataactgtccttttcatcccatgttgccgctaagtgatatttcatatgtgtggttatactcataataatgggccttgtaagtcttttcaccattcatgaataataataaatatgtactgctggcatgtaatgcttagttttcttgtatttacttctttttttaaatgtaaggaccaaacttctaaactaattgttcttttgttgctttaatttttaaaaattacattcttctgatgtaacatgtgatacatacaaaagaatatagtttaatatgtattgaaataaaacacaataaaattaaaaaaaaaaaaaaaaaaaa

SEQ ID NO: 394 - protein, 334 aa, Homo sapiens
MVGREKELSIHFVPGSCRLVEEEVNIPNRRVLVTGATGLLGRAVHKEFQQNNWHAVGCGFRRARPKFEQVNLLDSNAVHHIIHDFQPHVIVHCAAERRPDVVENQPDAASQLNVDASGNLAKEAAAVGAFLIYISSDYVFDGTNPPYREEDIPAPLNLYGKTKLDGEKAVLENNLGAAVLRIPILYGEVEKLEESAVTVMFDKVQFSNKSANMDHWQQRFPTHVKDVATVCRQLAEKRMLDPSIKGTFHWSGNEQMTKYEMACAIADAFNLPSSHLRPITDSPVLGAQRPRNAQLDCSKLETLGIGQRTPFRIGIKESLWPFLIDKRWRQTVFH

SEQ ID NO: 395 - DNA, 2119 bp, Homo sapiens
gagattccgggattggaatcaaaatgctaatttaaaaggtcaagtgaagctgctcctcacgttttggcgtgcctgcgctctctgcaggcagaagcgaacaaagacccagcaagagaaggcagaggctaagacccatcccgtatctgctctcctgaaataattctggagtcatgcctgaaatgccagaggacatggagcaggaggaagttaacatccctaataggagggttctggttactggtgccactgggcttcttggcagagctgtacacaaagaatttcagcagaataattggcatgcagttggctgtggtttcagaagagcaagaccaaaatttgaacaggttaatctgttggattctaatgcagttcatcacatcattcatgattttcagccccatgttatagtacattgtgcagcagagagaagaccagatgttgtagaaaatcagccagatgctgcctctcaacttaatgtggatgcttctgggaatttagcaaaggaagcagctgctgttggagcatttctcatctacattagctcagattatgtatttgatggaacaaatccaccttacagagaggaagacataccagctcccctaaatttgtatggcaaaacaaaattagatggagaaaaggctgtcctggagaacaatctaggagctgctgttttgaggattcctattctgtatggggaagttgaaaagctcgaagaaagtgctgtgactgttatgtttgataaagtgcagttcagcaacaagtcagcaaacatggatcactggcagcagaggttccccacacatgtcaaagatgtggccactgtgtgccggcagctagcagagaagagaatgctggatccatcaattaagggaacctttcactggtctggcaatgaacagatgactaagtatgaaatggcatgtgcaattgcagatgccttcaacctccccagcagtcacttaagacctattactgacagccctgtcctaggagcacaacgtccgagaaatgctcagcttgactgctccaaattggagaccttgggcattggccaacgaacaccatttcgaattggaatcaaagaatcactttggcctttcctcattgacaagagatggagacaaacggtctttcattagtttatttgtgttgggttcttttttttttttaaatgaaaagtatagtatgtggcactttttaaagaacaaaggaaatagttttgtatgagtactttaattgtgactcttaggatctttcaggtaaatgatgctcttgcactagtgaaattgtctaaagaaactaaagggcagtcatgccctgtttgcagtaatttttctttttatcattttgtttgtcctggctaaacttggagtttgagtatagtaaattatgatccttaaatatttgagagtcaggatgaagcagatctgctgtagacttttcagatgaaattgttcattctcgtaacctccatattttcaggatttttgaagctgttgaccttttcatgttgattattttaaattgtgtgaaatagtataaaaatcattggtgttcattatttgctttgcctgagctcagatcaaaatgtttgaagaaaggaactttatttttgcaagttacgtacagtttttatgcttgagatatttcaacatgttatgtatattggaacttctacagcttgatgcctcctgcttttatagcagtttatggggagcacttgaaagagcgtgtgtacatgtattttttttctaggcaaacattgaatgcaaacgtgtatttttttaatataaatatataactgtccttttcatcccatgttgccgctaagtgatatttcatatgtgtggttatactcataataatgggccttgtaagtcttttcaccattcatgaataataataaatatgtactgctggcatgtaatgcttagttttcttgtatttacttctttttttaaatgtaaggaccaaacttctaaactaattgttcttttgttgctttaatttttaaaaattacattcttctgatgtaacatgtgatacatacaaaagaatatagtttaatatgtattgaaataaaacacaataaaattaaaaaaaaaaaaaaaaaaaa

SEQ ID NO: 396 - protein, 323 aa, Homo sapiens
MPEMPEDMEQEEVNIPNRRVLVTGATGLLGRAVHKEFQQNNWHAVGCGFRRARPKFEQVNLLDSNAVHHIIHDFQPHVIVHCAAERRPDVVENQPDAASQLNVDASGNLAKEAAAVGAFLIYISSDYVFDGTNPPYREEDIPAPLNLYGKTKLDGEKAVLENNLGAAVLRIPILYGEVEKLEESAVTVMFDKVQFSNKSANMDHWQQRFPTHVKDVATVCRQLAEKRMLDPSIKGTFHWSGNEQMTKYEMACAIADAFNLPSSHLRPITDSPVLGAQRPRNAQLDCSKLETLGIGQRTPFRIGIKESLWPFLIDKRWRQTVFH

SEQ ID NO: 397 - DNA, 2986 bp, Homo sapiens
cggcggaggctgcactgagcgggacctgcgagcagcgcgggcggcagcccgggggaagcgtccgggaccatgtctggagaactaccaccaaacattaacatcaaggaacctcgatgggatcaaagcactttcattggacgagccaatcatttcttcactgtaactgaccccaggaacattctgttaaccaacgaacaactcgagagtgcgagaaaaatagtacatgattacaggcaaggaattgttcctcctggtcttacagaaaatgaattgtggagagcaaagtacatctatgattcagcttttcatcctgacactggtgagaagatgattttgataggaagaatgtcagcccaggttcccatgaacatgaccatcacaggttgtatgatgacgttttacaggactacgccggctgtgctgttctggcagtggattaaccagtccttcaatgccgtcgtcaattacaccaacagaagtggagacgcacccctcactgtcaatgagttgggaacagcttacgtttctgcaacaactggtgccgtagcaacagctctaggactcaatgcattgaccaagcatgtctcaccactgataggacgttttgttccctttgctgccgtagctgctgctaattgcattaatattccattaatgaggcaaagggaactcaaagttggcattcccgtcacggatgagaatgggaaccgcttgggggagtcggcgaacgctgcgaaacaagccatcacgcaagttgtcgtgtccaggattctcatggcagcccctggcatggccatccctccattcattatgaacactttggaaaagaaagcctttttgaagaggttcccatggatgagtgcacccattcaagttgggttagttggcttctgtttggtgtttgctacacccctgtgttgtgccctgtttcctcagaaaagttccatgtctgtgacaagcttggaggccgagttgcaagctaagatccaagagagccatcctgaattgcgacgcgtgtacttcaataagggattgtaaagcagggaggaaacctctgcagctcattctgccactgcaaagctggtgtagccatgctggtgagaaaaatcctgttcaacctgggttctcccagttacggaaaccttttaaagatccacattagccttttagaataaagctgctactttaacagagcacctggcgtgggccaagtgcctgatactcccttacactgaatcatgttatgatttatagaaatacctttcctgtagcttttatagtcattgtttttcaaagacgatataccagccctcacccaggttttaaaaaagcactggtaggcatagaataggtgctcagtatatggtcagtaaatgttctattgattatcaatcagtgaaaaaagaaatctgtttaaaatactgaattttcatctcactcccattgcaaatcaaggagatctcagcagtgaactgggaaaatacaaaagctctgggctaatctataaaaacttaccctgaaatattaagggcagtttgcttctagtttggggattgcgctagcccaatgaaggtgatgaagcttttggatttggagggtaaaagctccttcacaccccttccaaaagtcagtcacagaccactgcaacatgccttccctgctggatcattatatacattcagattgtgagtggattgccttggttgacttttaatttattgttttttgttcttataaagatgataatcttaccttgcagttattgactttatattcaattatttacatcaaataatgaaataactgaaatgtacaaatgtcaaattttggaagtatattcaataccaatgctgtatgagtgggctgaatccagttcattgttttttttttggtaagaagtgagactacagttccagctacctacatgtcttttcttgtcatccttatagatctctttggctttcagaaagatacagtgataatgtgtgtatgaatcagtcacaatgaattttacttgaatattgtatgttgcattccacttcatttgaaaataatgaaaccatgtaccactgtttacatcatctgtagtgatttcatagataatatatttaatatgacagattatgtttcaactctgtagatgtttaacgtcatagacagttggccctctgtatccgtgagctctatatctgtgaattcaaccaagtttggatggaaaatttttttttttttttttttttttttgagacggagtctcgctctgtcacccaggctggagtgcagtggcgtagtctcggctcactgcaagctccgcctcctgggttcacgccgttctcctgcctcagcctctctgagaagctgggactacaggcgcccgccaccacgcccggctaatttttttgtatttttagtagagacggggtttcactgtggtctcgatctcctgacctcgtgatccgcccgccttggcctcccaaggtgctgggattacaagcgtgagccaccgcacccggcctgaaaatattttctaaaaagataaaaaatatacataacgatgaaaaataatacaaatttaaaaaccaatacagtataacaactatttacatagtgcttacattgtattaggtgttataagcaatctagagatgatttagcaagtatacaggaggatgtgcctaggttatatgcaaatactgtgccattttatatcaggaacttgagcatctgcagatattggtatcggagggcggtcctggaaccaagcatccacggatactgaggggtgacatttcatgaagtgtagatcattgtattcagagattgtaaatgaaaaaaatatagaaactatttagttttggtagattttttttctgacaatgtgaccagactgaatttcctcataaagaaaaaatggcgaaaaaaaaaaaaaaaaaaaaaaaaaaaaaaaaaaaaaaaaaaaaaaaaaaaaaaaaaaaaaaaaaaaaaa

SEQ ID NO: 398 - protein, 322 aa, Homo sapiens
MSGELPPNINIKEPRWDQSTFIGRANHFFTVTDPRNILLTNEQLESARKIVHDYRQGIVPPGLTENELWRAKYIYDSAFHPDTGEKMILIGRMSAQVPMNMTITGCMMTFYRTTPAVLFWQWINQSFNAVVNYTNRSGDAPLTVNELGTAYVSATTGAVATALGLNALTKHVSPLIGRFVPFAAVAAANCINIPLMRQRELKVGIPVTDENGNRLGESANAAKQAITQVVVSRILMAAPGMAIPPFIMNTLEKKAFLKRFPWMSAPIQVGLVGFCLVFATPLCCALFPQKSSMSVTSLEAELQAKIQESHPELRRVYFNKGL

SEQ ID NO: 399 - DNA, 1847 bp, Homo sapiens
ctcctgccctccactgactccagagagggagatccccagtacttgactccatcacgcagatgggagcaggcaccagctatggagagggatacagctgcgtctccacatgacccatcctgcatgacaccaaagccaccgccagacagtgcctcggattctatgcaaaacctgggaagcggagacctaccccagccccgggaggaagctagctcttcaggggaccgtctgaggactggagtttgatccatgaacctggcttcgaggccttgcttttctctcttcttcattcatattcattcccaacaccttagaaggtgttgcttaatttatttctagaaaagcagcccagagtcagtcattgaagccttccccaccccctggccaaaaaaaaaaaaaaaaaaaaactggacacattttggatctgttgggagcttggagtccagtggttggcatagttgtcacattgggagcagagaagaagcaaccaggggccctgatcaggggactgagccgtagagtcccaggatggcacccaatggcacagcctcttccttttgcctggactctaccgcatgcaagatcaccatcaccgtggtccttgcggtcctcatcctcatcaccgttgctggcaatgtggtcgtctgtctggccgtgggcttgaaccgccggctccgcaacctgaccaattgtttcatcgtgtccttggctatcactgacctgctcctcggcctcctggtgctgcccttctctgccatctaccagctgtcctgcaagtggagctttggcaaggtcttctgcaatatctacaccagcctggatgtgatgctctgcacagcctccattcttaacctcttcatgatcagcctcgaccggtactgcgctgtcatggacccactgcggtaccctgtgctggtcaccccagttcgggtcgccatctctctggtcttaatttgggtcatctccattaccctgtcctttctgtctatccacctggggtggaacagcaggaacgagaccagcaagggcaatcataccacctctaagtgcaaagtccaggtcaatgaagtgtacgggctggtggatgggctggtcaccttctacctcccgctactgatcatgtgcatcacctactaccgcatcttcaaggtcgcccgggatcaggccaagaggatcaatcacattagctcctggaaggcagccaccatcagggagcacaaagccacagtgacactggccgccgtcatgggggccttcatcatctgctggtttccctacttcaccgcgtttgtgtaccgtgggctgagaggggatgatgccatcaatgaggtgttagaagccatcgttctgtggctgggctatgccaactcagccctgaaccccatcctgtatgctgcgctgaacagagacttccgcaccgggtaccaacagctcttctgctgcaggctggccaaccgcaactcccacaaaacttctctgaggtccaacgcctctcagctgtccaggacccaaagccgagaacccaggcaacaggaagagaaacccctgaagctccaggtgtggagtgggacagaagtcacggccccccagggagccacagacaggtaatagccctagccattggtgcacaggatgggggcaatgggaggggatgctactgatgggaatgattaagggagctgctgtttaggtggtgctggtttatgttctaggaactcttcatgagcactttgtaaacaccctcttgcttaatcctcccaacggcccccaaaggtagaacttagctcccttttaaaaggagcacattaaaattctcagaggacttggcaagggccgcacagctggggcat

SEQ ID NO: 400 - protein, 359 aa, Homo sapiens
MAPNGTASSFCLDSTACKITITVVLAVLILITVAGNVVVCLAVGLNRRLRNLTNCFIVSLAITDLLLGLLVLPFSAIYQLSCKWSFGKVFCNIYTSLDVMLCTASILNLFMISLDRYCAVMDPLRYPVLVTPVRVAISLVLIWVISITLSFLSIHLGWNSRNETSKGNHTTSKCKVQVNEVYGLVDGLVTFYLPLLIMCITYYRIFKVARDQAKRINHISSWKAATIREHKATVTLAAVMGAFIICWFPYFTAFVYRGLRGDDAINEVLEAIVLWLGYANSALNPILYAALNRDFRTGYQQLFCCRLANRNSHKTSLRSNASQLSRTQSREPRQQEEKPLKLQVWSGTEVTAPQGATDR

SEQ ID NO: 401 - DNA, 4676 bp, Homo sapiens
catctggaaggggagcggtagaacgtcagggcccggctgaggggcgtgattggagggcgccttcggcagccgcccgcggcagaagccgcggctccagctcgcctggcggaattgcacgcggcggcgggagctggaatagcagaaggaaccacctcgtggagtcgggccggagccctgcagtggctcagacggttgcagggaccgccaggttgtcacatcttcccaagccaggccagccaggagcgctgcatgcaaattctgccgtgggctaaggcacgctaaccagagccggcggcatggacttcgtcatgaagcaggcccttggaggggccacaaaggacatggggaagatgctggggggagaggaggagaaggaccccgacgcgcagaaaaaggaggaggagcggcaggaggcgctgcggcagcaggaggaggagcgtaaggccaagcacgcgcgcatggaggcggagcgggagaaggtccggcagcagatccgagataagtatgggctgaagaagaaggaggagaaggaagcagaggagaaagcagccctggagcagccctgcgaggggagcctgacccggcccaagaaggccatccctgcgggctgcggggacgaggaggaggaggaagaggagagcatcctggacacggtgctcaaatacctgcccgggccgctgcaggacatgttcaagaagtaaccaggcctcctgccccagcctactccacctgttactacttctttttggttctttcttttctttttattaggttaagtctcaattctgaaggggaaaacctcagttggcctctgcccctcttccctggccaggggcttctccccctcagctctccctcacacctcccttcatcccagggtatccacctgcaccccactcccaagtagcttgaaaaagggaggacagtctttccccagcaggggtcaggggggcccctcaggaagcctaaggtcgtgctagtgtggtgacccccatacattcctccctgctccccactgccaggaggaccactgtccccagccagccaaagtaatgacacattccagccctgcccagcatgctgacctttggcctctaaccctcagtgggcccccaggtcagggcaggggcactgagtggcctggctctgaggaagggagtcaggggaagcctgtcccgggaaggcccaggctgagaggccctggctctggccaggctgggatctgggtgggaggctggggctcttcttcttccatctccttggtgacacccagcccaggggcacccccttccccagcccccacctggagagacatggcccctgccaagctggtcccttcaaatggatcctttgtggactttagctcatttgtggaggaaccccaggtagggacgccccttgttcctcacccccaccccacttaggtcctgggcccccactgccaggctgggcccagcttgctcagtcaaggggctgccaggcccccagaaaacacttggagccatcgggtagcgatggtctatgccatggggaacacctccattggtgtggccaagctgcccccattcctatccacccctctccccaccccgtcctgtccatgcgcttccagggccccacggtccccaggaggacgcttcctggccaaagccccaagcctttggtgagaagccaattcccacttgacagaaggcgtccatccattcatctcattggccaaggacaaactctcctctgggacgtctgggactggcatttgtcccccactcaaattatcaaagctttctgctcagtcagttgtgtggggatggtgagggaagaggggtcacatgagggaggaaactgtatccatgcatgcatgataatgcgtggcagagactgcaacagggattgtgtgttcagagatcatatgcatatgtgtagggctggagcgtgtgtgtgtcttgagattgtgtgtgttgcagtcatcatatctatgtgttacagattgtgtatgttagccttgtgtatgtgtgcttgattgaggtggtgtatttgggttgaaattgtgtcatatgtgtgtgctatccatctcgtgtttagaggctgtatatgttagcttgtgtaagaatgtgttttcaaaacagtgtgtgtattgggagtgatgggtatgtgttaggtatgtgatgggttgtagaagcgtgtgtttgagagaattcagagacatttgaaggctgctgtgtgcatgtttgggggtctgaaaagacagttgtgtgcatggatgtgtgcgtggggagaaagaacgtgggtaagatgtcccttcccagccctgagaccactggtcacagttggccacctccaacgggagaccttgtccttggcctagagtcctcccacccttggggggctcctgcctgaggtcctcagaatcccactgcaatggacccaggcagcgccccaggaagccatgctgggcccccgccagggcctatcccaaaagcaggggccagggagggggcgacttgcctgcccctgaagcccttgttcccattggccccagtttgcattctgcaggttttccattttagtgggttctgcttttatttcagagacagacatgtgtcttctctgtccgtttccaataggtaaagccatatcagttagactgcaatactttaaacacgagacaaaacaatccatatgtttagggaaccagaaaagtcccctggtctgtcccttctttggggagcagggcctcgacagctccagctcccttgacctaccttcctccccgcaccccgcccccaccttgtgcccctgtgtccagccccccagggggcctgtgtctgtgtctgtgcctgtgtctgtgatggggagccgcctcgcacccctgttgtctgcttgtctctttgtgtctgttatcctgggcaggatggtcattctcaaaaaccctggggtcctgggccagagacaggcagggcccagtccaggggccccaggcctccccagtcccagtgtgcgagccccacttggacacaagtgttcagagaggtccccctctgccacttgacagggaccttcaaacctcgacagtgatgcaaggacacagagagtaccagataggtagcagagaccaaggcgcagggtgcttcagatgagcaagagaacccagtcgaaccagataccccaggtgggccggagggaccccagaccttcagagggctgccctggtgttctccacagtgcagtccctctgtattcccagagtgggatcggggctttcagccccaccctgatgcctgccctccaggatggctggtttagtctgggtccatgtcccagacccctctattctgctccaggacagcaggacttcaggtcttcctgggggtggatataggagaaaatttctgcctggcacacacctggctccaaccactgccaagtgatcactcttaggcccaggggaacacaatgactatcattactgatgcagacctggctgtggagagcagctaatgtgtggcccagagagcctgtctgtgtggagcacgtagtgcacagaatacgtgagagttgctctggcaggggcagaatcctcacaggatcgcctgggaggtgaggtgtgtgtgacccactggatgggagggcaatgagtgtgcacatacaaatggggcagtgtgcatgcaacacacttaggggaggagtggccccagaattcagcacgcacacaacacacaagggagagaacccccagatgagaaaataggaaggagcaatcatttgtagatgggtgaaaaaagaatgaggttcaagggagcgtgcaccaggtgaggtgagcgtgtgtgctctcagggaagggcccaggatcccatgcctgggaggagctgccagagagaagcaaaaaggcggctgtggatcgccctgggctgggcaccagtgacaggtcaggatctccaaacatggacgtcctcccctccaaatccagaagctcccagaaggtgtccttaactgcaaagctgtgcagggtactcctccagatggaatcaggaagtcgagacaccatcccaggtgtgtgtaagagagagagagagaacagggaggatacagaagtattgcagcccagatcccctatcagggggacagctggtgggcaaagcagccaccccacagccttgtggctagagtacagtggggtagaccctccagccccaatagccctagtacccagctggcagggttgcccacccctgctgtccacctgctccatcctctagggttccacaggcccctgaccgcacagggaggctggggccagcctggtctcccaggcctgaggacatgcctcccaccaaatgtcccctgctccagtcccactcctgtcaccccacgctctgcactggggagaaaacgggaggtgctcgtgctggccctgggtgggagcggggagtcctggtgagaccccggtgagatggaccatcctgcccccgtgggggatcccctttcccacatccgtgctgtgtcattgttgctctgcttcctttcaatgtgtcagtgcctggggggaggggaggagcaccccctcagcccccctgaacctgaccaaaagccatggctgttgctcccccctttgtatgatgcaaatgctgaaatgtacaaaatcaaccatgacaacaaagaaaaagaccttgtacagc

SEQ ID NO: 402 - protein, 134 aa, Homo sapiens
MDFVMKQALGGATKDMGKMLGGEEEKDPDAQKKEEERQEALRQQEEERKAKHARMEAEREKVRQQIRDKYGLKKKEEKEAEEKAALEQPCEGSLTRPKKAIPAGCGDEEEEEEESILDTVLKYLPGPLQDMFKK

SEQ ID NO: 403 - DNA, 4726 bp, Homo sapiens
cggcaggcattcgaggcggacagaaacggggcttggcgccccccgcgtgcacgtgtgctagcccaggcaggagggagcgcctcggcggaggagtcaaggaagagggggagggagaaacgcgccagaacctcggcccgggcgccctcgtcggccgcggaggagctgcagcctccaacaggaaggtgtggtccctgccatgctatctgctctgctcagcgactgaaggtgcccgcatcccagctctgccaggaagcaaaggttgtcacatcttcccaagccaggccagccaggagcgctgcatgcaaattctgccgtgggctaaggcacgctaaccagagccggcggcatggacttcgtcatgaagcaggcccttggaggggccacaaaggacatggggaagatgctggggggagaggaggagaaggaccccgacgcgcagaaaaaggaggaggagcggcaggaggcgctgcggcagcaggaggaggagcgtaaggccaagcacgcgcgcatggaggcggagcgggagaaggtccggcagcagatccgagataagtatgggctgaagaagaaggaggagaaggaagcagaggagaaagcagccctggagcagccctgcgaggggagcctgacccggcccaagaaggccatccctgcgggctgcggggacgaggaggaggaggaagaggagagcatcctggacacggtgctcaaatacctgcccgggccgctgcaggacatgttcaagaagtaaccaggcctcctgccccagcctactccacctgttactacttctttttggttctttcttttctttttattaggttaagtctcaattctgaaggggaaaacctcagttggcctctgcccctcttccctggccaggggcttctccccctcagctctccctcacacctcccttcatcccagggtatccacctgcaccccactcccaagtagcttgaaaaagggaggacagtctttccccagcaggggtcaggggggcccctcaggaagcctaaggtcgtgctagtgtggtgacccccatacattcctccctgctccccactgccaggaggaccactgtccccagccagccaaagtaatgacacattccagccctgcccagcatgctgacctttggcctctaaccctcagtgggcccccaggtcagggcaggggcactgagtggcctggctctgaggaagggagtcaggggaagcctgtcccgggaaggcccaggctgagaggccctggctctggccaggctgggatctgggtgggaggctggggctcttcttcttccatctccttggtgacacccagcccaggggcacccccttccccagcccccacctggagagacatggcccctgccaagctggtcccttcaaatggatcctttgtggactttagctcatttgtggaggaaccccaggtagggacgccccttgttcctcacccccaccccacttaggtcctgggcccccactgccaggctgggcccagcttgctcagtcaaggggctgccaggcccccagaaaacacttggagccatcgggtagcgatggtctatgccatggggaacacctccattggtgtggccaagctgcccccattcctatccacccctctccccaccccgtcctgtccatgcgcttccagggccccacggtccccaggaggacgcttcctggccaaagccccaagcctttggtgagaagccaattcccacttgacagaaggcgtccatccattcatctcattggccaaggacaaactctcctctgggacgtctgggactggcatttgtcccccactcaaattatcaaagctttctgctcagtcagttgtgtggggatggtgagggaagaggggtcacatgagggaggaaactgtatccatgcatgcatgataatgcgtggcagagactgcaacagggattgtgtgttcagagatcatatgcatatgtgtagggctggagcgtgtgtgtgtcttgagattgtgtgtgttgcagtcatcatatctatgtgttacagattgtgtatgttagccttgtgtatgtgtgcttgattgaggtggtgtatttgggttgaaattgtgtcatatgtgtgtgctatccatctcgtgtttagaggctgtatatgttagcttgtgtaagaatgtgttttcaaaacagtgtgtgtattgggagtgatgggtatgtgttaggtatgtgatgggttgtagaagcgtgtgtttgagagaattcagagacatttgaaggctgctgtgtgcatgtttgggggtctgaaaagacagttgtgtgcatggatgtgtgcgtggggagaaagaacgtgggtaagatgtcccttcccagccctgagaccactggtcacagttggccacctccaacgggagaccttgtccttggcctagagtcctcccacccttggggggctcctgcctgaggtcctcagaatcccactgcaatggacccaggcagcgccccaggaagccatgctgggcccccgccagggcctatcccaaaagcaggggccagggagggggcgacttgcctgcccctgaagcccttgttcccattggccccagtttgcattctgcaggttttccattttagtgggttctgcttttatttcagagacagacatgtgtcttctctgtccgtttccaataggtaaagccatatcagttagactgcaatactttaaacacgagacaaaacaatccatatgtttagggaaccagaaaagtcccctggtctgtcccttctttggggagcagggcctcgacagctccagctcccttgacctaccttcctccccgcaccccgcccccaccttgtgcccctgtgtccagccccccagggggcctgtgtctgtgtctgtgcctgtgtctgtgatggggagccgcctcgcacccctgttgtctgcttgtctctttgtgtctgttatcctgggcaggatggtcattctcaaaaaccctggggtcctgggccagagacaggcagggcccagtccaggggccccaggcctccccagtcccagtgtgcgagccccacttggacacaagtgttcagagaggtccccctctgccacttgacagggaccttcaaacctcgacagtgatgcaaggacacagagagtaccagataggtagcagagaccaaggcgcagggtgcttcagatgagcaagagaacccagtcgaaccagataccccaggtgggccggagggaccccagaccttcagagggctgccctggtgttctccacagtgcagtccctctgtattcccagagtgggatcggggctttcagccccaccctgatgcctgccctccaggatggctggtttagtctgggtccatgtcccagacccctctattctgctccaggacagcaggacttcaggtcttcctgggggtggatataggagaaaatttctgcctggcacacacctggctccaaccactgccaagtgatcactcttaggcccaggggaacacaatgactatcattactgatgcagacctggctgtggagagcagctaatgtgtggcccagagagcctgtctgtgtggagcacgtagtgcacagaatacgtgagagttgctctggcaggggcagaatcctcacaggatcgcctgggaggtgaggtgtgtgtgacccactggatgggagggcaatgagtgtgcacatacaaatggggcagtgtgcatgcaacacacttaggggaggagtggccccagaattcagcacgcacacaacacacaagggagagaacccccagatgagaaaataggaaggagcaatcatttgtagatgggtgaaaaaagaatgaggttcaagggagcgtgcaccaggtgaggtgagcgtgtgtgctctcagggaagggcccaggatcccatgcctgggaggagctgccagagagaagcaaaaaggcggctgtggatcgccctgggctgggcaccagtgacaggtcaggatctccaaacatggacgtcctcccctccaaatccagaagctcccagaaggtgtccttaactgcaaagctgtgcagggtactcctccagatggaatcaggaagtcgagacaccatcccaggtgtgtgtaagagagagagagagaacagggaggatacagaagtattgcagcccagatcccctatcagggggacagctggtgggcaaagcagccaccccacagccttgtggctagagtacagtggggtagaccctccagccccaatagccctagtacccagctggcagggttgcccacccctgctgtccacctgctccatcctctagggttccacaggcccctgaccgcacagggaggctggggccagcctggtctcccaggcctgaggacatgcctcccaccaaatgtcccctgctccagtcccactcctgtcaccccacgctctgcactggggagaaaacgggaggtgctcgtgctggccctgggtgggagcggggagtcctggtgagaccccggtgagatggaccatcctgcccccgtgggggatcccctttcccacatccgtgctgtgtcattgttgctctgcttcctttcaatgtgtcagtgcctggggggaggggaggagcaccccctcagcccccctgaacctgaccaaaagccatggctgttgctcccccctttgtatgatgcaaatgctgaaatgtacaaaatcaaccatgacaacaaagaaaaagaccttgtacagc

SEQ ID NO: 404 - protein, 134 aa, Homo sapiens; identical to SEQ ID NO: 402

SEQ ID NO: 405 - DNA, 4532 bp, Homo sapiens
agtgacttgagggaggcgctgcgactgacaagcggctctgcccgggaccttctcgctttcatctagcgctgcactcaatggaggggcgggcaccgcagtgcttaatgctgtcttaactagtgtaggaaaacggctcaacccaccgctgccgaaatgaagtataagaatcttatggcaagggccttatatgacaatgtcccagagtgtgccgaggaactggcctttcgcaagggagacatcctgaccgtcatagagcagaacacagggggactggaaggatggtggctgtgctcgttacacggtcggcaaggcattgtcccaggcaaccgggtgaagcttctgattggtcccatgcaggagactgcctccagtcacgagcagcctgcctctggactgatgcagcagacctttggccaacagaagctctatcaagtgccaaacccacaggctgctccccgagacaccatctaccaagtgccaccttcctaccaaaatcagggaatttaccaagtccccactggccacggcacccaagaacaagaggtatatcaggtgccaccatcagtgcagagaagcattgggggaaccagtgggccccacgtgggtaaaaaggtgataacccccgtgaggacaggccatggctacgtatacgagtacccatccagataccaaaaggacgtctatgatatccctccttctcataccactcaaggggtatacgacatccctccctcatcagcaaaaggccctgtgttttcagttccagtgggagagataaaacctcaaggggtgtatgacatcccgcctacaaaaggggtatatgccattccgccctctgcttgccgggatgaagcagggcttagggaaaaagactatgacttcccccctcccatgagacaagctggaaggccggacctcagaccggagggggtttatgacattcctccaacctgcaccaagccagcagggaaggaccttcatgtaaaatacaactgtgacattccaggagctgcagaaccggtggctcgaaggcaccagagcctgtccccgaatcacccacccccgcaactcggacagtcagtgggctctcagaacgacgcatatgatgtcccccgaggcgttcagtttcttgagccaccagcagaaaccagtgagaaagcaaacccccaggaaagggatggtgtttatgatgtccctctgcataacccgccagatgctaaaggctctcgggacttggtggatgggatcaaccgattgtctttctccagtacaggcagcacccggagtaacatgtccacgtcttccacctcctccaaggagtcctcactgtcagcctccccagctcaggacaaaaggctcttcctggatccagacacagctattgagagacttcagcggctccagcaggcccttgagatgggtgtctccagcctaatggcactggtcactaccgactggcggtgttacggatatatggaaagacacatcaatgaaatacgcacagcagtggacaaggtggagctgttcctgaaggagtacctccactttgtcaagggagctgttgcaaatgctgcctgcctcccggaactcatcctccacaacaagatgaagcgggagctgcaacgagttgaagactcccaccagatcctgagtcaaaccagccatgacttaaatgagtgcagctggtccctgaatatcttggccatcaacaagccccagaacaagtgtgacgatctggaccggtttgtgatggtggcaaagacggtgcccgatgacgccaagcagctcaccacaaccatcaacaccaacgcagaggccctcttcagacccggccctggcagcttgcatctgaagaatgggccggagagcatcatgaactcaacggagtacccacacggtggctcccagggacagctgctgcatcctggtgaccacaaggcccaggcccacaacaaggcactgcccccaggcctgagcaaggagcaggcccctgactgtagcagcagtgatggttctgagaggagctggatggatgactacgattacgtccacctacagggtaaggaggagtttgagaggcaacagaaagagctattggaaaaagagaatatcatgaaacagaacaagatgcagctggaacatcatcagctgagccagttccagctgttggaacaagagattacaaagcccgtggagaatgacatctcgaagtggaagccctctcagagcctacccaccacaaacagtggcgtgagtgctcaggatcggcagttgctgtgcttctactatgaccaatgtgagacccatttcatttcccttctcaacgccattgacgcactcttcagttgtgtcagctcagcccagcccccgcgaatcttcgtggcacacagcaagtttgtcatcctcagtgcacacaaactggtgttcattggagacacgctgacacggcaggtgactgcccaggacattcgcaacaaagtcatgaactccagcaaccagctctgcgagcagctcaagaccatagtcatggcaaccaagatggccgccctccattaccccagcaccacggccctgcaggaaatggtgcaccaagtgacagacctttctagaaatgcccagctgttcaagcgctctttgctggagatggcaacgttctgagaagaaaaaaaagaggaaggggactgcgttaacggttactaaggaaaactggaaatactgtctggtttttgtaaatgttatctatttttgtagatattttatataaaaatgaaatattttaacattttatgggtcagtcaactttcagaaattcagggagctggagagggaaatctttttttttccccctgagtggttcttatgtacatagaggtatctgagacataaactgtacagaaaacttgtccacgtgcttttgtatgcccatgtattcatgtttgtttgtagatgtttgtctgatgcatttcattaaaaaaaaaaccatgaattacgaagcaccttagtaagcacctcctaatgctgcattttttttgttgttgttaaaaacataccagctggttataatattgttctccacgtccttgtgatgattctgagcctggcactcccaaatctgggaagcatagtttatttgcaagtgttcaccttccaaatcatgaggcatagcatgacttattcttgtttggaaaactcttttcaaaactgaccatcttaaacacatgatggccaagtgcccaaaagccctcttgcggagcaaatttcagaatatatatgtggatccaagctctgatagttcaggtgctggagggaagagagacctgtgtgtttagaggccaggaccacagttaggattgggttgtttcaatactgagagacagctacaataaaaggagagcaattgcctccctggggctgttcaatcttctgcatttgtgagtggttcagtcatgaggttttccaaaagatgtttttagagttgtaaaaaccatatttgcagcaaagatttacaaaggcgtatcagactatgattgttcaccaaaataggggaatggtttgatccgccagttgcaagtagaggcctttctgactcttaatattcactttggtgctactacccccattacctgagggaaactggccaggtccttgatcatggaactatagagctaccaggacatatcctgctctctaagggaatttattgctatcttgcaccttctttaaaactcacatatgcagacctgacactcaagagtggctagctacacagagtccatctaatttttgcaacttcctgtggccagtgtgtataaccccttccactatctcacagatagtcacagcgtccattccatagtctgtctcctcacatctgttagtattgacacagcacagacaccacaagccatcaggttcttcatggggcaggtgaaatacttctaccccatgggtaaatgtattcacatattaccaagagaagaagcacattatctatgatcttttggcccagttcttatttagcatttttattccagcctacttggaaacatgtttttatttgcaatatatgcctgactgaattaagcttgcttgttttaaacaaccaaatcattggaacagaaaaggatttaaaaaacaagaatgcatgatctcagagtgattaaaaaaaaatcagtggaaataaatgatcatagaaggtgcttttcaaaacaactgctattataattctcaaagtcctactctgccaaaagaagattaaaagtcatacattacattacaaggaaatgttcatgtgggaagagggttgctgaaaatcaacaacgcttgaagttaaaaagtgtgtctttgtagatttcattgtataatgtgtatttcttaggagatggctgacttgattgatctacgctaagtggagacatttcacatttttaaaaccaaatgttcaatctgtattactctttgccgtcttgtatgtagaggctatttttaaatcattaaatttttagatctctgttttcaaaaaaaaaaaaaaa

SEQ ID NO: 406 - protein, 834 aa, Homo sapiens
MKYKNLMARALYDNVPECAEELAFRKGDILTVIEQNTGGLEGWWLCSLHGRQGIVPGNRVKLLIGPMQETASSHEQPASGLMQQTFGQQKLYQVPNPQAAPRDTIYQVPPSYQNQGIYQVPTGHGTQEQEVYQVPPSVQRSIGGTSGPHVGKKVITPVRTGHGYVYEYPSRYQKDVYDIPPSHTTQGVYDIPPSSAKGPVFSVPVGEIKPQGVYDIPPTKGVYAIPPSACRDEAGLREKDYDFPPPMRQAGRPDLRPEGVYDIPPTCTKPAGKDLHVKYNCDIPGAAEPVARRHQSLSPNHPPPQLGQSVGSQNDAYDVPRGVQFLEPPAETSEKANPQERDGVYDVPLHNPPDAKGSRDLVDGINRLSFSSTGSTRSNMSTSSTSSKESSLSASPAQDKRLFLDPDTAIERLQRLQQALEMGVSSLMALVTTDWRCYGYMERHINEIRTAVDKVELFLKEYLHFVKGAVANAACLPELILHNKMKRELQRVEDSHQILSQTSHDLNECSWSLNILAINKPQNKCDDLDRFVMVAKTVPDDAKQLTTTINTNAEALFRPGPGSLHLKNGPESIMNSTEYPHGGSQGQLLHPGDHKAQAHNKALPPGLSKEQAPDCSSSDGSERSWMDDYDYVHLQGKEEFERQQKELLEKENIMKQNKMQLEHHQLSQFQLLEQEITKPVENDISKWKPSQSLPTTNSGVSAQDRQLLCFYYDQCETHFISLLNAIDALFSCVSSAQPPRIFVAHSKFVILSAHKLVFIGDTLTRQVTAQDIRNKVMNSSNQLCEQLKTIVMATKMAALHYPSTTALQEMVHQVTDLSRNAQLFKRSLLEMATF

SEQ ID NO: 407 - DNA, 1300 bp, Homo sapiens
gcgctgcgactgacaagcggctctgcccgggaccttctcgctttcatctagcgctgcactcaatggaggggcgggcaccgcagtgcttaatgctgtcttaactagtgtaggaaaacggctcaacccaccgctgccgaaatgaagtataagaatcttatggcaagggccttatatgacaatgtcccagagtgtgccgaggaactggcctttcgcaagggagacatcctgaccgtcatagagcagaacacagggggactggaaggatggtggctgtgctcgttacacggtcggcaaggcattgtcccaggcaaccgggtgaagcttctgattggtcccatgcaggagactgcctccagtcacgagcagcctgcctctggactgatgcagcagacctttggccaacagaagctctatcaagtgccaaacccacaggctgctccccgagacaccatctaccaagtgccaccttcctaccaaaatcagggaatttaccaagtccccactggccacggcacccaagaacaagaggtatatcaggtgccaccatcagtgcagagaagcattgggggaaccagtgggccccacgtgggtaaaaaggtgttccagagagatgggcaagtgtcctatttcttagtgagagcctctaaacaaaccagcttgtgaacctccactgaaaagatctcatctgatgagcattttaataaagtgtcctgagtttggaggcttgccgtctttctcttggataaatatcttcatctcctagacttggaaaaacacattttctcctggggtttcccattggcgtgtcttgagctgctctggtgataaccgtaataatgccaatactgatacgaacagcagaaaacagtaaccccaagaactctacagatgatcatcaaggaccactgtctcttaccatttgctgctttggtttgaaattctcactgcctcgtagatctcattttgagcactatacattcctaaagattgatttctttctatctgacttaaatttaggaatgattaaatcttcatttctcccatgatttgatcctaaaacattttgaaaggaaacagccttgagatctgtgattactaagacatacataacattcttatcacattagaaagcaagaattgactgttgcttgtcttgttcctgttgtcttgtcccctgaattcctgtttatctttgattgtatgtgggacattgtattttcagtacatttgtagaaataatgtgaagcctataaagatgttctctgcctccaaaaaaaaaaaaaaaaaaaaaaaaaaaaaa

SEQ ID NO: 408 - protein, 174 aa, Homo sapiens
MKYKNLMARALYDNVPECAEELAFRKGDILTVIEQNTGGLEGWWLCSLHGRQGIVPGNRVKLLIGPMQETASSHEQPASGLMQQTFGQQKLYQVPNPQAAPRDTIYQVPPSYQNQGIYQVPTGHGTQEQEVYQVPPSVQRSIGGTSGPHVGKKVFQRDGQVSYFLVRASKQTSL

SEQ ID NO: 409 - DNA, 3080 bp, Homo sapiens
tcccctttatttccactccccacccgcgtggctttgctctccctctcccccctcagctcgtctgtatttggagctccggaagctgccggcgactctcccctggagcagcgtgactgacaccggctcctattcagctgggaggagggagaggggaggagaaggggagggccgcgggaggagggtacgagtggccgaccacggatttgcattgccgaggacgggaccccagggcagcgaagcagaatggccaacatgcagggactggtggaaagactggaacgagctgtcagccgcctggagtcgctgtctgcagagtcccacaggccccctgggaactgcggggaagtcaatggtgtcattgcaggtgtggcaccctccgtggaagcctttgacaagctgatggacagtatggtggccgagtttttaaagaacagtaggatccttgctggggacgtggagacccatgcagaaatggtgcacagtgctttccaggcccagcgggctttccttctgatggcctctcagtaccaacaaccccacgagaatgacgtggccgcacttctgaaacccatatcggaaaagattcaggaaatccaaactttcagagagagaaaccgggggagtaacatgtttaatcatctttcggccgtcagcgaaagcatccctgcccttggatggatagctgtgtctcccaaacctggtccttatgtcaaggagatgaatgacgctgccaccttttacactaacagggtcttaaaggactacaaacacagtgatttgcgtcatgtggattgggtgaagtcatatttgaacatttggagtgaacttcaagcatacatcaaggaacaccacaccacgggcctcacatggagcaaaacaggtcctgtagcatccacagtatcagcgttttctgtcctctcctctgggcctggccttcctccaccccctcctcctctgcctcctccagggccacctccacttttcgagaatgaaggcaaaaaagaggaatcttctccttcacgctcagctttatttgcccaacttaaccagggagaagcaattacaaaagggctccgccatgtcacagatgaccagaagacatacaaaaatcccagcctgcgggctcaaggagggcaaactcaatctcccaccaaaagtcacactccaagtcccacatctcctaaatcttatccttctcaaaaacatgccccagtgttggagttggaaggaaagaaatggagagtggagtaccaagaggacaggaatgaccttgtgatttcagagactgagctgaaacaagtggcttacattttcaaatgcgaaaaatcaactattcagataaaagggaaagtaaactccattataattgacaactgtaaaaaactcggcctggtgtttgacaatgtggtgggcattgtggaagtgatcaactcccaggacattcaaatccaggtaatggggagagtgccaacaatttccattaataagacagaaggttgccacatatacctcagtgaagatgcattagactgtgagatcgtgagcgccaagtcatctgaaatgaacatacttatccctcaggatggtgattatagagaatttcccattcctgaacagttcaagacagcatgggatggatccaagttaatcactgaacctgcagaaattatggcctaacttcctgagagaccgaaccccctcacctgaatccccctctatcaaacaaacaaaaaagcagcagtaaagagctagaagttgcagtagcccctactgctttagctttggcctccaacgattctgtgctatagatacagcactgtttctggcacgcctcgtgggcattttgaaatatttaacgtttcctcatgatttgcctttgtgtgtgattttagttccacatgatgacttgtgaacattagggatttaaaggaaaaaaaaaaagaattctgttcccctcatatcatgaacacagtaactgataggtaaaaagactgcatgattcacttttacacttatatttcattgctagttaaaaaataaaacctttgagaatctaagatgtacatttttaccttttaggcaatttcaatataatgtagaagtagtagtgtgccctgaaaaatgtacacgttttttcttattgttaccacatgttcacctttatcagcgtggatactgtcagcatgagtacatatttcaacccacgcttgtaaaagacataagagtttataaaggaccaaattcagttccttggtccttggaagacctatattctctgtagttactgaaaaccgaaagtcaattctaattattcatcttacatatttttccaccatgtcatttgaaaacttgcttttcttctgcataagagattcttatgccaaaaacattaaacagaagaaatcattttttttgctatgtaatacctcgcaactttgctctaaaatcaagctcagttattattttccaagtttgaacatgttaaatatcagatgccttgtaaattatgtctttaacgttttcttatagactaatttcctcttttccacctgccagacttgctaaccaagctcgaaaatgaacatgaaaaagccatacatgtattatttctcctaaaacctaaggcattatctgttggtttggcttgctgctcctattttgtagtcttgatagtagatgcttcttcagcgtaagagtagctatgatattcctttttatcttttcagtacatagtgctgaaaaatctgcaacttcttggatcatatttaatgaattatagtataatgcttgcaggcccagtacaagcatatatattgtgcctcttacagcctttggaatacattgtttccattttttaaatatcttctatatccatatagtattcaaattattaatgctcatgtaccaaggttttgctataaaagttttgtctgtatgaataatgtggctttagtaaataatcatttttcaactgtaaacttattctgaaataaagtaaaattctaattgtttaaatactgtgatgaaaaaaaaaaaaaaaaaaaaaaaaaaaaaaaaaaaaaaaaaaaaaaaaaaaaaaa

SEQ ID NO: 410 - protein, 477 aa, Homo sapiens
MANMQGLVERLERAVSRLESLSAESHRPPGNCGEVNGVIAGVAPSVEAFDKLMDSMVAEFLKNSRILAGDVETHAEMVHSAFQAQRAFLLMASQYQQPHENDVAALLKPISEKIQEIQTFRERNRGSNMFNHLSAVSESIPALGWIAVSPKPGPYVKEMNDAATFYTNRVLKDYKHSDLRHVDWVKSYLNIWSELQAYIKEHHTTGLTWSKTGPVASTVSAFSVLSSGPGLPPPPPPLPPPGPPPLFENEGKKEESSPSRSALFAQLNQGEAITKGLRHVTDDQKTYKNPSLRAQGGQTQSPTKSHTPSPTSPKSYPSQKHAPVLELEGKKWRVEYQEDRNDLVISETELKQVAYIFKCEKSTIQIKGKVNSIIIDNCKKLGLVFDNVVGIVEVINSQDIQIQVMGRVPTISINKTEGCHIYLSEDALDCEIVSAKSSEMNILIPQDGDYREFPIPEQFKTAWDGSKLITEPAEIMA

SEQ ID NO: 411 - DNA, 4695 bp, Homo sapiens
gggggagggaaacggagcagtaacaagtatcccagagggtgctgctgaggcgacgatggccgaggggcccgaggaagcccgaggccaccctcccgggcaggacgatggcgggggggaccacgagcccgtcccttccctgagaggccctcctaccaccgccgtcccatgcccccgcgacgacccccaggccgaaccccaggccccgggccggcccacagccccgggcctcgcggctgccgccgcagccgacaaattggagccgccgcgcgagctcaggaagcgcggggaggcggcctccggctccggtgcagagctgcaggagcaggcgggctgcgaggcgcccgaagccgcggcgccacgagagagaccagctcggctgagcgcccgcgagtactcccggcaagtgcacgagtggctgtggcagtcctactgcggctacctcacctggcacagcggcctggccgccttcccagcctactgcagcccccagccctccccgcaaagcttcccttcgggcggcgctgcagtcccccaggccgcggcgccgccgcccccgcagctgggctattacaaccccttctacttcctgagccccggggccgcggggcctgacccgcggacagctgccggcatcagcacccctgctccagtcgcgggcctgggaccccgggctcctcacgtgcaggcgtcggtccgggccactccagtgacgagggtaggatccgcagccccttcgcgaagcccgagcgagaccgggcgacaggcaggcagagaatatgttattccatccttggcccacagatttatggcagagatggtggatttctttattctcttctttataaaagcaaccattgtcttaagcattatgcacctcagtgggataaaggatatctctaagtttgctatgcattatataatagaagaaatagatgaagacacatcaatggaagacttgcagaaaatgatggttgtggcacttatatacagattattagtttgtttctatgagataatttgcatttggggagcaggtggagctaccccagggaagttcctgctggggcttcgagttgtgacatgtgatacatcagtgcttattgcaccaagtcgggttttagtgattccttcctcaaatgttagcattacaacgtccactatccgagctttgatcaagaatttttcaattgcttcttttttccctgctttcatcacactgctgttttttcagcataatcgaacagcttatgacattgtagcaggaaccattgtggtaaaaagaaatggggtcagatgatgccccccaaaaccctgatttccacacactaagactaaattatgtatcaaggccatcagtatccctgggttacactaattgatgatttagaaattaaagcagtcactccagtgtgatgcaggtgactactctgaaagtattgattatacttgaatgccaaagaacttgtccagaagaaaaacctgttaaattcaagtattaaaatttttagatcaaaaaggcaaatgattttataaacaatggacaatatatactttcttaagatctaaggtactttcttaagatctaagaatttgctgaaagcattttcagctttgaaatctccaaatgaaactttaaaatttattttggtttatcccaaaataatggaaaatgtccagttgtgttttgtaaacacctatgtaactcatcttttagtttacacttcctggggaaattgtctttggtgtttagaggagggaatgagaacacaaattggataatccactgtctcccatcccaggaggtggtgagttggctacaagagaaagggacaagtgaggcaggcctagcagttcccttacctgaagttttcaaatccatactgcagttccctctcgtaatgatgtaactttacaactattcttaatgcttgaacatgtatttaggggcaagtttctcatgatgatgaaaaagtatcaagtcatattgctatgttaattggtttttttttttaaaaggtaagttagtgattactgttaatggtgggggagtaagttttcactgtaaattgaacttataatttatgtgcaagtgttttcagtgccctgaatcaaactataaatgtggggagaaatcacctccatcaaacagttgcatatttactgtaaaagtattcccagtatgtgtgcagcatgaagaaagtattagtgcttctcagtgttctcagtgtaaattctatttatatacagcatattcacatactactttccttatattttatatagttctatgactgttgaaacatcaaggagttaaaaaaatcttaatatttcatgattaactctaagtactattaatagcttgcgaaatattagcaattttcccattatggactatctctctaaagcaagagagactagcattcccagacatcattctagggtctttaagctcattttgggtctgctaaagtttggggggaaatgttacgcaaagtgatactgtgtatgttgccattttgctttattcttctgttgaagcaaaattgtggggttttattatgtgtgtgtgcttttcctagatgtcccagttagctgtgctgagatatacctgtactatttatggtttaagttttgattcttaggtattttctccagctctgacattgttttccaaagacacactaaactgcattgcacagttcaaaatttgattacttaagggatcaatctaggtggtgttcttggtcttaaatttaacagcaaacacagcacatatctattatcactatattaattttcaaaggtttttctgtgacgtttaaaactgtgacaacagatattcacatttgattatagaaacttaatgtctattaataattttagtacaaaatttcataaaccgtgtttttcaaaataagtttatgtcaaatccagcttcccagaaacactaataattaagtacatcaatgtactaaataaatcattcagttgcacccatggggaagattgtgttactgcccttcacagtgaaaaaaagaaaaatctttcatttttaaaattaggagatgttacgtaacttggcactttagtagtgtatacactagcattagtttatacaccacttttgccgctggggattcaagttgaaatgtccctcaatcatataggtctggaatacatctttcattcataatttctgctcagataattgaatagtttgccatcgagattattttcatttatactataaaacaaaagcaaactagtccagtttaattttttgtacttagaatattgcacattttctatatatgagttattcagattagtatctatgtaggttcagtcagatccaaccatggattcgaggtattatactgtataaccctacaaaatacatagaagtattatttgccttcataatagaacccaagagtctgtttcaatttatgaattcagtatttgcaccgagattttgattcccaaagtttggaaaaaaatgacaaaacaacgagggaagaaggaaccagaccttagtgccacatatttttctcttggggttgtaaggtagtctcctgctttccagaacactttattatatttcacttatagacctgattttctgtgtcaaagtataattctcatgctgaagctgtagcctaaaaagccaaaagaaagttgtcttcattgtacaaacatattcatcactttaacaataagggaacaaaatttagtattcaagctgagtgagaatactggttcaatggacatgtccctaagataaaccagaattggcagttaatttaggcgtctagaaaatctcagttcccaccagtaaaattatcctgagtagctaatgcaccttgagaaaaatctggcatactgaataagtaacattaacttgggagccaagagctgggtaagccttacctttagactactctgtgactacagaaataaagccagcacttttggaactaataagccttcacttgtcagtatcataaagagtattgcccaactgaactttgctcccactggtttaatagttacttatttctgcctaagcactcaccttccgattttacccaagtatatatataggatagaaaaaaatgcattatatttgagagctcacttcgcccgaattacaaaatgagtgtttttagattcaagtgacggtaaaaggatttgttcccttcagtgacttgagtgttttagttatgcataagtatttctagcaaaggaagggtagaaaggaattgaaaattaatttacactagttgctacttgggaataaagggctttttgaggggggtatggatattaaatgttttcgttatatacttatccctattaaaacaggcagttgtttctttgaatatgcctaaataacagtattcttaaaatctgacagacaagtaacatgtcaattacttgatattccttgtctccagtaccacaggccactcttgacatcccatgtttgcctggataaagttcctcatttcaaacagtatacatacttctttgcagttcattatagtaaggcttaacctgtaaacagtatctgatggcccacctataaataaaattcagcattctatttttaataatttgtatgccaccaatttgtattatttgtctcaataaatacttagtcatcgatgcaaaaaaaaaaaaaaaaaaaaaaaa

SEQ ID NO: 412 - protein, 413 aa, Homo sapiens
MAEGPEEARGHPPGQDDGGGDHEPVPSLRGPPTTAVPCPRDDPQAEPQAPGRPTAPGLAAAAAADKLEPPRELRKRGEAASGSGAELQEQAGCEAPEAAAPRERPARLSAREYSRQVHEWLWQSYCGYLTWHSGLAAFPAYCSPQPSPQSFPSGGAAVPQAAAPPPPQLGYYNPFYFLSPGAAGPDPRTAAGISTPAPVAGLGPRAPHVQASVRATPVTRVGSAAPSRSPSETGRQAGREYVIPSLAHRFMAEMVDFFILFFIKATIVLSIMHLSGIKDISKFAMHYIIEEIDEDTSMEDLQKMMVVALIYRLLVCFYEIICIWGAGGATPGKFLLGLRVVTCDTSVLIAPSRVLVIPSSNVSITTSTIRALIKNFSIASFFPAFITLLFFQHNRTAYDIVAGTIVVKRNGVR

SEQ ID NO: 413 - DNA, 5687 bp, Homo sapiens
ttccccgctgccagcactcaccctctctccgctcctgctcgcaacctcgcggttcctggggtgcttgtgcccactgtgtggacagcgcgggcggacttttgggccggggccgggcggcgggggaggctctctaaggcctccgcctctgcctctcccgcccccttacccgccccggagcgggaagcggcggaggctccgccatggcctcgggagccggaggagtcggagggggcggtggcggcaagatccggacgcggcgttgccaccaggggccaattaagccttaccagcaggggcgacaacagcatcagggcattcttagcagggttacagaatctgttaagaatattgtgccagggtggctacaaagatacttcaacaagaatgaagatgtatgcagctgttcaacagacacaagcgaggttccacgctggccagaaaataaagaggaccatctggtatatgccgatgaggagagctctaatattactgatgggagaatcacacctgagccagcagtcagtaatacagaagaaccttcaacaactagtactgcttcaaattatccagatgtgttaacaaggccttctcttcatcggagccatctgaatttttccatgttggaatcccctgcattacactgtcagccatctacatcctcggcattcccaattggcagttcgggattttcccttgtaaaggaaattaaagattctacctctcagcatgatgatgataacatctcaactaccagtggtttttcttcaagagcttctgataaagatataactgtttcaaagaacacttcattgccacctctgtggtccccagaagctgaacgttctcactcactctcacagcacactgccaccagctcaaaaaaaccagcattcaacttgtctgcctttggaacactttccccttcacttgggaattcttcaatccttaaaaccagtcagcttggagattctcctttttatcctggaaaaacaacatacggtggggcagcagctgctgtaagacagtctaaactacgaaatacaccttatcaggcaccagttagaagacaaatgaaagctaagcaactcagtgcacaatcttacggtgtgaccagttcaacagctcggcgaatattgcagtctttagagaagatgtcaagccctttagcggatgcaaaaagaattccatccattgtttcttctcctctgaattctcctcttgataggagtgggatagatatcacagattttcaggccaaaagagaaaaggtggattctcaatatcctcctgttcagagacttatgaccccaaagccagtttccatagcaacaaatcgaagtgtttattttaaaccatctctgactccttctggtgaattcaggaagactaatcaaagaatagataacaagtgcagtactggatatgaaaaaaatatgacacccggacaaaatagagaacaacgagaaagtggcttttcatatccaaatttcagtttgcctgcagccaatggtttatcttctggagtaggtggtggaggtggcaagatgagacgagaaagaacacgctttgttgcttctaaacctctggaggaggaggaaatggaagttccagtattaccgaaaatctctctaccgatcaccagttcttcactgcctacctttaattttagttcccctgagatcacaacttcctctccatcacccatcaattcgtctcaagcattaacaaacaaggtacaaatgacctctccgagcagcactggcagtcccatgtttaaattttcatctccaatcgtaaaatctactgaggcaaatgtactacctccatcatctattggatttacatttagtgtgcctgttgcaaaaacagcagaactttctggttctagtagtactttagaaccaattataagtagttcagctcatcatgtcactacagtgaacagtacaaattgtaagaagacaccacctgaagattgtgagggtccttttagacctgcagaaatcctgaaagaaggaagtgttctagatattctgaaaagccctggtttcgcatcgccgaagatagattctgttgctgctcagcccaccgcaacaagcccagtagtttatacaagaccagcaataagtagcttttcttctagtggaattgggtttggggagagtttaaaagctgggtcatcatggcagtgtgatacatgtctactccagaacaaagttacagacaacaaatgcatagcctgtcaagcagcaaaattgtcacccagagatactgctaaacagactggaattgaaacaccaaataaaagtggcaaaacaactctttctgcatcagggacaggctttggagacaaatttaaaccagtgataggcacttgggattgtgatacctgtttagtgcaaaataaacctgaagcaataaaatgtgtagcctgtgaaacaccgaaacctggaacttgtgtgaagcgagcccttacattgacagtggtttcggaaagtgctgagactatgactgcttcatcttccagctgcactgtaaccactggtaccttaggatttggagataaattcaaaaggcccattggatcttgggagtgttcagtatgctgtgtttctaataatgcagaagacaataagtgtgtgtcctgtatgtctgagaaaccaggaagttcagtacctgcttcaagtagcagcactgtacctgtctctctgccttctggaggctctctaggattggaaaagttcaagaaacccgagggaagctgggactgtgaattgtgcctagtgcagaataaggcagactctaccaaatgtttggcatgtgaaagtgcaaagccaggcacaaaatctgggtttaaaggctttgacacatcttcctcatcttcgaactcagcagcctcctcatccttcaaatttggtgtctcatcatcctcttctgggccttctcagactttaacaagcactggaaattttaaatttggagatcagggaggattcaaaataggtgtgtcatctgattctgggtctataaaccccatgagtgaaggctttaaattttctaaaccaataggagattttaaatttggagtttcatctgaatctaagcccgaagaagttaaaaaagatagtaagaatgataattttaagtttggactttcttctggtttaagcaacccagtttctttaactccatttcaatttggggtatctaatcttggacaggaagaaaagaaagaggaactgcccaaatcttcctctgcaggttttagctttggtacaggtgttattaactccacccctgctcctgctaacaccatagtgacctctgagaacaagagcagcttcaaccttggaaccatagaaaccaagagtgcttcagtggctcctttcacatgtaagacatcagaagctaaaaaagaagaaatgcctgccaccaaaggaggattctcttttggcaacgtggagcctgcctctctgccatctgcctcagtgtttgttttgggaaggacagaagagaaacagcaagagcctgtcacttctacttccctagtttttgggaagaaagctgacaatgaagagccaaagtgtcaaccagtgttttcctttgggaattcagagcaaaccaaagatgagaattcttcaaagtccacatttagttttagtatgacaaaaccatctgagaaggaatctgaacagccagcaaaagccacttttgcctttggagctcaaactagtactacagctgatcaaggtgcagcaaagccagtttttagtttcttgaacaacagttcctctagttcaagtacaccagccacttctgctggtggtggcatatttggtagttccacctcttcctccaatccacctgtggctacctttgtgtttggacagtccagcaatcctgtgagcagctctgcctttggtaacactgctgaatccagcacctctcagtctttgctattttctcaagatagcaaactagcaaccacatccagcacaggtacagctgtcaccccatttgtctttggtccaggagccagcagtaataatactaccacctctggtttcggctttggagccacaaccacatctagctctgcaggatcctcctttgtatttggaactggaccctcagcaccatctgccagtccagcatttggtgctaaccagaccccaacatttggacaaagtcaaggtgccagccagcccaatcccccaggctttggatctatatcatcttccacagcattatttcccactggttctcagcctgcaccacctacttttgggacagtgtcaagcagtagccagccccctgtgtttggacagcaacctagtcagtctgcatttggctctggaacaactcctaattctagttcggctttccagtttggcagcagcactacaaatttcaacttcacaaacaacagtccatcaggagtgttcacatttggtgcaaattctagcacacctgcagcctcagcccagccttcaggctcggggggctttccatttaaccagtctccagcagcatttacagtggggtcaaatgggaaaaatgtgttctcttcttctggaacttcattctctggtcgcaagataaagactgctgttagacgcaggaaataaaggtcacattggtgttgtactcaattttaacaacagctggtgccctgctttcagatactggattgtactttgtgctggggttatctgaagtcagatctgcctaaggacttctttaattttggaattttcctcctttctctttcgttacagaagccccaccctgcctcacccacccttttttaaataaataaatagctagactggtgactgattcttcagcaaaaatattttatgatccagcagattattcactgatttgacatagtctggctgtacccaggaatggagcctgcacggtgaatggctttgtatagaacctctttgtctacaccattatgtgcgctgataagcgttcatggaacgcgttgaaattgtaattatatctgaggaattctgtatagattagaattctgtatagattagagagtgttgaaacggatgatttctatgctgagtttgtgctggtgtatgtgtgaagtgagtgagttgggtgtattgtgcgctaaacttttctgatagaggaagcctgattaaagaatggtccgtgctaaggacttgttagatctagttcactctccatttaataattatatgctatttctatattttcattctcctatcacctgtcttgcctttttcattattttattatgaaacttgtgtaaatacaattttgtttctgtactttttggcataacataaatctgtgaacttgaaatttgaattttgtgttagagatttttttgttgtttgtttagtcttgtctcagattttattatgtaaatcccattattcaaagttgcctaaatccatttggaaatctttaaaaaaaaaattggggattcttaaagttgaatttattggcttttctgatccagttttgtttggaccaaaaaccagtattgtacaaagtattaagcatatatttttatatttactaaaatggactgtggtgactttggataataaggaaaagtttaatattaaagccatgtttattacagtataattaacatgttaaaccatgggataaatgccatcaataaaaaattatgacat

SEQ ID NO: 414 - protein, 1475 aa, Homo sapiens
MASGAGGVGGGGGGKIRTRRCHQGPIKPYQQGRQQHQGILSRVTESVKNIVPGWLQRYFNKNEDVCSCSTDTSEVPRWPENKEDHLVYADEESSNITDGRITPEPAVSNTEEPSTTSTASNYPDVLTRPSLHRSHLNFSMLESPALHCQPSTSSAFPIGSSGFSLVKEIKDSTSQHDDDNISTTSGFSSRASDKDITVSKNTSLPPLWSPEAERSHSLSQHTATSSKKPAFNLSAFGTLSPSLGNSSILKTSQLGDSPFYPGKTTYGGAAAAVRQSKLRNTPYQAPVRRQMKAKQLSAQSYGVTSSTARRILQSLEKMSSPLADAKRIPSIVSSPLNSPLDRSGIDITDFQAKREKVDSQYPPVQRLMTPKPVSIATNRSVYFKPSLTPSGEFRKTNQRIDNKCSTGYEKNMTPGQNREQRESGFSYPNFSLPAANGLSSGVGGGGGKMRRERTRFVASKPLEEEEMEVPVLPKISLPITSSSLPTFNFSSPEITTSSPSPINSSQALTNKVQMTSPSSTGSPMFKFSSPIVKSTEANVLPPSSIGFTFSVPVAKTAELSGSSSTLEPIISSSAHHVTTVNSTNCKKTPPEDCEGPFRPAEILKEGSVLDILKSPGFASPKIDSVAAQPTATSPVVYTRPAISSFSSSGIGFGESLKAGSSWQCDTCLLQNKVTDNKCIACQAAKLSPRDTAKQTGIETPNKSGKTTLSASGTGFGDKFKPVIGTWDCDTCLVQNKPEAIKCVACETPKPGTCVKRALTLTVVSESAETMTASSSSCTVTTGTLGFGDKFKRPIGSWECSVCCVSNNAEDNKCVSCMSEKPGSSVPASSSSTVPVSLPSGGSLGLEKFKKPEGSWDCELCLVQNKADSTKCLACESAKPGTKSGFKGFDTSSSSSNSAASSSFKFGVSSSSSGPSQTLTSTGNFKFGDQGGFKIGVSSDSGSINPMSEGFKFSKPIGDFKFGVSSESKPEEVKKDSKNDNFKFGLSSGLSNPVSLTPFQFGVSNLGQEEKKEELPKSSSAGFSFGTGVINSTPAPANTIVTSENKSSFNLGTIETKSASVAPFTCKTSEAKKEEMPATKGGFSFGNVEPASLPSASVFVLGRTEEKQQEPVTSTSLVFGKKADNEEPKCQPVFSFGNSEQTKDENSSKSTFSFSMTKPSEKESEQPAKATFAFGAQTSTTADQGAAKPVFSFLNNSSSSSSTPATSAGGGIFGSSTSSSNPPVATFVFGQSSNPVSSSAFGNTAESSTSQSLLFSQDSKLATTSSTGTAVTPFVFGPGASSNNTTTSGFGFGATTTSSSAGSSFVFGTGPSAPSASPAFGANQTPTFGQSQGASQPNPPGFGSISSSTALFPTGSQPAPPTFGTVSSSSQPPVFGQQPSQSAFGSGTTPNSSSAFQFGSSTTNFNFTNNSPSGVFTFGANSSTPAASAQPSGSGGFPFNQSPAAFTVGSNGKNVFSSSGTSFSGRKIKTAVRRRK

SEQ ID NO: 415 - DNA, 5878 bp, Homo sapiens
ccgggcgagcgcagccaacatgtcggataccaaggtaaaagttgccgtccgggtccggcccatgaaccgacgagaactggaactgaacaccaagtgcgtggtggagatggaagggaatcaaacggtcctgcaccctcctccttctaacaccaaacagggagaaaggaaacctcccaaggtatttgcctttgattattgcttttggtccatggatgaatctaacactacaaaatacgctggtcaagaagtggttttcaagtgccttggggaaggaattcttgaaaaagcctttcaggggtataatgcgtgtatttttgcatatggacagacaggttcgggaaaatccttttccatgatgggccatgctgagcagctgggccttattccaaggctctgctgtgctttatttaaaaggatctctttggagcaaaatgagtcacagacctttaaagttgaagtgtcctatatggaaatttataatgagaaagttcgggatcttttagaccccaaagggagtagacagtctcttaaagttcgagaacataaagttttgggaccatatgtagatggtttatctcaactagctgtcactagttttgaggatattgagtcattgatgtctgagggaaataagtctcgaacggtagctgctaccaacatgaacgaagaaagcagccgctcccatgctgtgttcaacatcataatcacacagacactttatgacctgcagtctgggaattccggggagaaagtcagtaaggtcagcttggtagacctggcgggtagcgaaagagtatctaaaacaggagctgcaggagagcgactgaaagaaggcagcaacattaacaaatcgcttacaaccttggggttggttatatcatcactggctgaccaggcagctggcaagggtaaaagcaaatttgtgccttatcgagattcagtcctcacttggctgcttaaggacaacttggggggcaacagccaaacctctatgatagccacaatcagcccagccgcagacaactatgaagagaccctctccacattaagatatgcagaccgagccaaaaggattgtgaaccatgctgttgtgaatgaggaccccaacgcaaaagtgatccgagaactgcgggaggaagtcgagaaactgagagagcagctctctcaggcagaggccatgaaggcccctgaactgaaggagaagctcgaagagtctgaaaagctgataaaagaactaacagtgacttgggaagagaagctgagaaaaacagaagagatagcacaggaaagacaacgacaacttgaaagcatggggatttccctggagatgtccggtatcaaggtgggggatgacaaatgctacttagtcaatctgaatgcagaccctgctcttaacgaacttctggtttattatttaaaggatcacaccagggtgggtgcagatacctctcaagatatccagctttttggcataggaattcagcctcagcactgtgagattgacattgcatctgatggagacgtcactctcactccaaaagaaaatgcaaggtcctgtgtgaacggcacccttgtgtgcagtaccacccagctgtggcatggtgaccgaatcctatggggaaataatcacttttttagaataaacttacctaagaggaaacgtcgagattggttgaaagactttgaaaaagaaacgggcccgccagagcatgacctggatgcagccagtgaggcttcctctgaaccagactataactatgaatttgcacagatggaagttatcatgaaaaccctgaatagtaatgacccagttcaaaatgtggttcaggtcctggagaaacaatacctagaagaaaagagaagtgccctagaggagcagcggctcatgtatgagcgggaactggagcaactccgccagcagctctcccccgacaggcagccacagagtagcggccctgaccgcctggcctacagcagccagacagcgcagcagaaggtgacccagtgggcagaagagagggatgaactcttccgacaaggcctggcaaaactgcgagagcagctggttaaagctaataccttggtgagggaagcaaacttcctggctgaggaaatgagcaaactcaccgattaccaagtgactcttcagatccctgctgcaaacctcagtgccaataggaagagaggtgcaatagtgagtgaaccagctatccaagtgaggaggaaaggaaagagcacccaagtgtggaccattgagaagctggagaataaattaattgacatgagagacctttaccaagaatggaaggaaaaagttcctgaggcaaagagactctacggaaaacgaggtgaccctttctatgaagctcaagaaaatcacaacctcatcggggtggcgaatgtattcttggaatgcctcttctgtgatgtgaaacttcagtatgcagtccctatcatcagccagcagggggaggttgcagggcgtctccacgtggaagtgatgcgtgttacaggagctgttccagagcgtgtggtggaggatgactcttcggagaattccagtgaaagtgggagccttgaagtcgtagacagcagcggggaaatcattcaccgagtcaaaaagctgacatgtcgggtaaaaattaaagaagcaacggggctgcccttaaacctctcaaattttgtcttctgtcaatacacattctgggaccagtgtgagtctacggtggctgccccggtggtggaccccgaggtgccttcaccacagtccaaggatgcccagtacacagtggccttctcccactgtaaggactatgtggtgaatgtaacagaagaatttctggagttcatttcagatggagcactggccattgaagtatggggccaccggtgtgctggaaatggcagctccatctgggaggtcgattctcttcatgctaagacaagaacactgcatgacaggtggaatgaagtaacgcgaagaatagaaatgtggatctccatattagaattgaatgagttaggagagtatgctgcagtggaacttcatcaggcaaaagatgtcaacacaggaggcatctttcaacttagacagggtcattcccgtagagtacaagtcacggtgaaacctgtgcagcattcagggacactgccacttatggttgaagccatcctgtcagtatccatcggctgtgtaactgccaggtccaccaaactccaaagagggctggacagttaccagagagatgatgaggatggtgatgatatggatagttatcaggaagaagacttaaactgcgtaagggagaggtggtcagatgcactcattaaacgacgagaatacctggatgaacagataaaaaaagtcagcaataaaacagagaaaacagaggacgatgtggagcgggaagcccagcttgtggagcagtgggtagggctgactgaggaaaggaatgctgtgctggtgccagccccaggcagtgggattcctggggcacctgccgactggatcccacctcctggaatggaaacccacataccagttctcttcctcgatttgaatgcggatgaccccagtgccaatgagcagcttgttggcccccatgcatccggcgtgaactccatcctgcccaaggagcatggcagtcagtttttctacctgcccatcataaagcacagtgatgatgaggtttcagccacagcctcttgggattcctcggtgcatgattctgttcacttgaatagggtcacaccacagaatgaaaggatttacctaattgtgaaaaccacagttcaactcagccaccctgctgctatggagttagtattacgaaaacgaattgcagccaatatttacaacaaacagagtttcacgcagagtttgaagaggagaatatccctgaaaaatatattttattcctgtggtgtaacctatgaaatagtatccaatataccaaaggcaactgaggagatagaggaccgggaaacgctggctctcctggcagcaaggagtgaaaacgaaggcacatcagatggggagacgtacattgagaagtacactcgaggcgtgctgcaggtggaaaacattctgagtcttgaacggctccggcaggccgtcacagtcaaagaagcactttccaccaaagcccggcacattcggaggagcctcagtacaccaaatgttcataatgtctcttccagccgaccggacctttctggctttgatgaagatgacaagggttggccagagaaccagttggacatgtctgactatagctccagttaccaagatgtagcatgttatggaactttacccagggattctcctcgaaggaataaagaaggttgtacatcagagactcctcatgccttaaccgtcagcccttttaaagcattctctcctcagccaccaaagtttttcaagcccctaatgcctgtaaaagaggagcataagaaaaggatagccctggaagcaaggcctcttctaagccaggagagcatgcctccacctcaggcacataaccctggctgcattgtaccctcaggaagcaatggcagcagcatgccagtagaacacaataacaaacgtgagaagaagattgactctgaggaggaagaaaatgagctggaagctattaacaggaagctaataagttcacagccttatgtacctgtggagtttgctgacttcagtgtttacaatgccagcttggagaacagggaatggttttcctctaaagtagatctgtcaaactcacgggtcttggagaaagaagtgtcccgtagccctaccaccagcagtattaccagtggctacttttcccacagtgcctccaatgccaccctgtctgacatggtggtcccttctagtgacagctcagaccagctggccattcagacgaaggatgcagactccaccgagcactccacaccatcgcttgtgcatgatttcaggccgtcctcaaacaaagagttgacagaagtcgaaaaaggcttggtaaaggacaagataattgtggtgccactcaaggaaaacagtgccttagccaaagggagcccatcatcccagagcatccctgagaaaaactccaaatcactgtgcaggactggctcatgttcagaactagatgcctgccccagcaaaattagccagccagccaggggattctgccccagggaggtgacggtagaacacaccaccaacatccttgaagaccattctttcacagaatttatgggagtgtcagagggaaaagattttgatggtttgacagattcttctgctggagagctttccagtaggaggagtctaccaaataaaacaggcggcaagactgtctccgatgggctccaccaccccagccagctgcattccaagttagagaatgaccaggtaataattccagaggcagccttttgggttctgtgctgtcaatgagtatgtctaactgtatgtcaaccccagaggcccttcaccgcaacaacttggtaggaaagattcatccagttgtttgtgacggcaaagatgagcccacagagaagcaggctcacttcctgcacagctgtctctgtcggagagcaagtctgttttgggaactagaacgcaattgtgaaattataagaccagtggatttttttacctggcacatgggttggtgttgaatgaagtgttcagatggataaggatcaatctcatattcattccctgggatgtttagttaccagttttcccaaagtgttctggtagcatctaccatatttcatcaaatctgtgattcctttgattattatatgaaccattattttatgtatcattaagaaaaaatactgccaattaaactctgtcatatcaaaaaaaaaaaaaaaaaaaaaaaaaaaa

SEQ ID NO: 416 - protein, 1805 aa, Homo sapiens
MSDTKVKVAVRVRPMNRRELELNTKCVVEMEGNQTVLHPPPSNTKQGERKPPKVFAFDYCFWSMDESNTTKYAGQEVVFKCLGEGILEKAFQGYNACIFAYGQTGSGKSFSMMGHAEQLGLIPRLCCALFKRISLEQNESQTFKVEVSYMEIYNEKVRDLLDPKGSRQSLKVREHKVLGPYVDGLSQLAVTSFEDIESLMSEGNKSRTVAATNMNEESSRSHAVFNIIITQTLYDLQSGNSGEKVSKVSLVDLAGSERVSKTGAAGERLKEGSNINKSLTTLGLVISSLADQAAGKGKSKFVPYRDSVLTWLLKDNLGGNSQTSMIATISPAADNYEETLSTLRYADRAKRIVNHAVVNEDPNAKVIRELREEVEKLREQLSQAEAMKAPELKEKLEESEKLIKELTVTWEEKLRKTEEIAQERQRQLESMGISLEMSGIKVGDDKCYLVNLNADPALNELLVYYLKDHTRVGADTSQDIQLFGIGIQPQHCEIDIASDGDVTLTPKENARSCVNGTLVCSTTQLWHGDRILWGNNHFFRINLPKRKRRDWLKDFEKETGPPEHDLDAASEASSEPDYNYEFAQMEVIMKTLNSNDPVQNVVQVLEKQYLEEKRSALEEQRLMYERELEQLRQQLSPDRQPQSSGPDRLAYSSQTAQQKVTQWAEERDELFRQGLAKLREQLVKANTLVREANFLAEEMSKLTDYQVTLQIPAANLSANRKRGAIVSEPAIQVRRKGKSTQVWTIEKLENKLIDMRDLYQEWKEKVPEAKRLYGKRGDPFYEAQENHNLIGVANVFLECLFCDVKLQYAVPIISQQGEVAGRLHVEVMRVTGAVPERVVEDDSSENSSESGSLEVVDSSGEIIHRVKKLTCRVKIKEATGLPLNLSNFVFCQYTFWDQCESTVAAPVVDPEVPSPQSKDAQYTVAFSHCKDYVVNVTEEFLEFISDGALAIEVWGHRCAGNGSSIWEVDSLHAKTRTLHDRWNEVTRRIEMWISILELNELGEYAAVELHQAKDVNTGGIFQLRQGHSRRVQVTVKPVQHSGTLPLMVEAILSVSIGCVTARSTKLQRGLDSYQRDDEDGDDMDSYQEEDLNCVRERWSDALIKRREYLDEQIKKVSNKTEKTEDDVEREAQLVEQWVGLTEERNAVLVPAPGSGIPGAPADWIPPPGMETHIPVLFLDLNADDPSANEQLVGPHASGVNSILPKEHGSQFFYLPIIKHSDDEVSATASWDSSVHDSVHLNRVTPQNERIYLIVKTTVQLSHPAAMELVLRKRIAANIYNKQSFTQSLKRRISLKNIFYSCGVTYEIVSNIPKATEEIEDRETLALLAARSENEGTSDGETYIEKYTRGVLQVENILSLERLRQAVTVKEALSTKARHIRRSLSTPNVHNVSSSRPDLSGFDEDDKGWPENQLDMSDYSSSYQDVACYGTLPRDSPRRNKEGCTSETPHALTVSPFKAFSPQPPKFFKPLMPVKEEHKKRIALEARPLLSQESMPPPQAHNPGCIVPSGSNGSSMPVEHNNKREKKIDSEEEENELEAINRKLISSQPYVPVEFADFSVYNASLENREWFSSKVDLSNSRVLEKEVSRSPTTSSITSGYFSHSASNATLSDMVVPSSDSSDQLAIQTKDADSTEHSTPSLVHDFRPSSNKELTEVEKGLVKDKIIVVPLKENSALAKGSPSSQSIPEKNSKSLCRTGSCSELDACPSKISQPARGFCPREVTVEHTTNILEDHSFTEFMGVSEGKDFDGLTDSSAGELSSRRSLPNKTGGKTVSDGLHHPSQLHSKLENDQVIIPEAAFWVLCCQ

SEQ ID NO: 417 - DNA, 2408 bp, Homo sapiens
aaataaacgtggcgggacgtatgtgtcatggcgctctccatctaaagtctgtgcagcttccggagagtggcgggttgattttctcactttggactggtttttacttcccgacttctggactcatctttcaagaggactttagactaattgcagataattaaggtggtagagaatatgccttctgcatcctgtgatacactactggatgacatcgaagatatcgtgtctcaggaagattcaaaaccacaagataggcattttgtaagaaaggatgttgtcccgaaggtacgaaggcgaaatacccaaaaatatttgcaagaggaagaaaacagtccaccaagtgacagcactattccaggcatacagaaaatttggatacgaacatggggttgttctcataataattcagatggagaatatatggctggacagctagctgcttatggctataaaattacagaaaatgcatccgatgcagatttatggctcctgaacagttgcactgtaaaaaacccagctgaagaccactttagaaactcaattaaaaaagctcaagaggagaacaagaaaatcgtactggctggatgcgttcctcaagcccagcctcgccaggactaccttaagggactgagtatcattggggttcagcagatagatcgtgtggtagaagttgtggaggagacaattaaaggtcactctgtgagactgctgggtcagaaaaaggataatggaaggcggcttgggggagcacgattggatttgccgaagattaggaagaatccactgatagaaatcatttccatcaataccgggtgtctcaatgcttgtacctactgcaaaactaaacacgccagaggaaatttggccagttatccaattgatgaactagtagatagagccaaacaatcttttcaagagggtgtttgtgagatatggttgaccagtgaagacacgggggcttatggcagagatattggcaccaatctccccacactcctgtggaaactggttgaagtgattcctgagggagcaatgctgaggcttggcatgacaaatccgccctatattttagagcatctggaggaaatggcaaaaatccttaatcaccccagagtctacgcttttctgcacataccagtccagtctgcctccgacagcgtactcatggaaatgaaaagagaatactgtgtggctgacttcaaaagagtagtggattttctgaaagagaaagttcctggaataactattgctacagatattatctgtggttttcctggagaaacagatcaggattttcaagaaacagtgaaacttgttgaagagtacaaattcccaagcctgtttattaaccaattttacccaagaccaggaactcctgctgcaaaaatggaacaagttccagcacaagtgaaaaagcaaaggacaaaagatctttctcgggtgtttcattcttacagtccatatgatcacaagattggtgaaagacaacaagtgttagtaacagaagaatcttttgattccaagttttatgttgcacacaatcaattctatgagcaggttttagtgccaaagaaccctgcgttcatggggaagatggttgaagtggacatctatgaatcaggcaaacattttatgaaagggcagccagtatctgatgccaaagtgtacacgccctccatcagcaaaccgctagcaaagggagaagtctcgggtttgacaaaggacttcagaaatgggcttgggaaccagctgagttcaggatcccacacctctgctgcatctcagtgtgactcagcgagttccagaatggtgctgcccatgccaaggctacatcaagactgtgcgctgaggatgtccgtgggcttggctctgctgggtcttctttttgctttttttgtcaaggtctataattagaatacaactaatggaaacatctataaagaagaatacatttctaattaaaatcttcaatgaacaggaaagcgacatctccattctccaagggcaataatttgtactggtcatgctgcctccttctcagccactcttcttaatgaggctccccctgtctcacattgagttgggcccattggttatttgacctaaaacctaatcaccgctaccatagcacatccttcaaattaaactgcttttggtttacttttagcaagaaatgcaagcggttgcatttttttctgtttgtttcaatctctaatctttaagtcagaacctaattgtacagtggctctggccatcttttcctcatgtggaagaattttctatctttaataaactttttctttgttttttttttccagatggagtttcgctcttgtcccccaggctggagtggtgcagtggcacgatctcaggtcactgcaacctctgcctcctgggttcaaacgatt

SEQ ID NO: 418 - protein, 579 aa, Homo sapiens
MPSASCDTLLDDIEDIVSQEDSKPQDRHFVRKDVVPKVRRRNTQKYLQEEENSPPSDSTIPGIQKIWIRTWGCSHNNSDGEYMAGQLAAYGYKITENASDADLWLLNSCTVKNPAEDHFRNSIKKAQEENKKIVLAGCVPQAQPRQDYLKGLSIIGVQQIDRVVEVVEETIKGHSVRLLGQKKDNGRRLGGARLDLPKIRKNPLIEIISINTGCLNACTYCKTKHARGNLASYPIDELVDRAKQSFQEGVCEIWLTSEDTGAYGRDIGTNLPTLLWKLVEVIPEGAMLRLGMTNPPYILEHLEEMAKILNHPRVYAFLHIPVQSASDSVLMEMKREYCVADFKRVVDFLKEKVPGITIATDIICGFPGETDQDFQETVKLVEEYKFPSLFINQFYPRPGTPAAKMEQVPAQVKKQRTKDLSRVFHSYSPYDHKIGERQQVLVTEESFDSKFYVAHNQFYEQVLVPKNPAFMGKMVEVDIYESGKHFMKGQPVSDAKVYTPSISKPLAKGEVSGLTKDFRNGLGNQLSSGSHTSAASQCDSASSRMVLPMPRLHQDCALRMSVGLALLGLLFAFFVKVYN

SEQ ID NO: 419 - DNA, 3348 bp, Homo sapiens
atgcctggtgcacagagtctgcaggtcgggcggtagcgacaggtcagagctgcggcctgagcagccagcgtccggcatgaaggtctggggtctggctgctgcctgcttcttgctccagcaccatggaatgcctgcgcagtttaccctgcctcctgccccgcgcgatgagacttccccggcggacgctgtgtgccctggccttggacgtgacctctgtgggtcctcccgttgctgcctgcggccgccgagccaacctgattggaaggagccgagcggcgcagctttgcgggcccgaccggctccgcgtggcaggtgaagtgcaccggtttagaacctctgacgtctctcaagccactttagccagtgtagccccagtatttactgtgacaaaatttgacaaacagggaaacgttacttcttttgaaaggaagaaaactgaattataccaagagttaggtcttcaagccagagatttgagatttcagcatgtaatgagtatcacagtcagaaacaataggattatcatgagaatggagtatttgaaagctgtgataactccagagtgtcttctgatattagattatcgtaatttaaacttagagcaatggctgttccgggaactcccttcacagttgtctggagagggtcaactcgttacataccctttaccttttgagtttagagctatagaagcactcctgcaatattggatcaacacccttcaggggaaacttagcattttgcagccactgatccttgagaccttggatgctttggtggaccccaaacattcttctgtagacagaagcaaactgcacattttactacagaatggcaaaagtctatcagagttagaaacagatattaaaattttcaaagagtcaattttggagatcttggatgaggaagagttgctagaagagctctgtgtatcaaaatggagtgacccacaagtctttgaaaagagcagtgctgggattgaccatgcagaagagatggagttgctgttggaaaactactaccgattggctgacgatctctccaatgcagctcgtgagcttagggtgctgattgatgattcacaaagtattattttcattaatctggacagccaccgaaacgtgatgatgaggttgaatctacagctgaccatgggaaccttctctctttcgctctttggactaatgggagttgcttttggaatgaatttggaatcttcccttgaagaggaccatagaattttttggctgattacaggaattatgttcatgggaagtggcctcatctggaggcgcctgctttcattccttggacgacagctagaagctccattgcctcctatgatggcttctttacctaaaaagactcttctggcagatagaagcatggaattgaaaaatagcctcagactggatggacttggatcaggaaggagcatcctaacaaaccgttaggaacagccccgtggatactgaagttttttttatggtagttacaggaaacttctgatactctttttattattttcttgtatagagtcagacacttgaaaaaaactaatgtttgaagacaaaaatattttggcagtcacaataccagaactggattgcatttccagaattctgagttaaagaaacaaagtatttgctttgtaaaaggccaaaattctatttcctacaaactttaaatgctgtttttatagatgtgatatgaggcaacacaagcacagacagttgcatagattttaatttatacatatcaagaaaagtgcaatttcatgctgaatgaagcgtaggaacttgacaagcccataggtagctatagttctttgtcagtatagggaattatgttcatgtgaatttcctgattctcaggtgactaaaaagctagcattctatgtattaaccttacaacagactctgtaagtttgagctttaaaaaccaaactttgacataaccttatttcttgtatttgcccccttttttttataaaaggtgaataaaaagaaataatttaatatcaccattgtatggattcctaatcaagatttcacgttctcagcccctgagactagttttctttgctctctgtaattagagcctttggaagcaaagttgaaaggaagtatttccattctgttactgttttgtagcactttgtccatttattgatttttaaagtagatatttagataccacccctgccctgccccaaaaagaaaaatgtttattgtcctgctaatctatatgcctacacctcagaagctgacagatgagcttcctaaaacatgaggatgaataaatgttagaactgtgatatcttctcatttccacagagatttgggtttaaaacaaatggctaatatttgtaagcctgaaagctgccatcctctttaacatcctacctaccttttaaaatattttctggaggttaagtacagttaggcactagaacatttgttaagcctcccaaagtagtgtgcatggaagattctagagtgtccagctcttgcactacaaatgtaataataacagaataaatacacttaccctgatgatattgagggtacatgattagcctaatgtgatgtcatatgaggaagtttaggagtccatttttcaggtggtttggtgataggaataaaaatgttactcccgtcgctgatttggaagaaaaccgatgaagtacaagtaaggtttccccactcctgtgtgtggtcatgggaagccattagagggaagctgcagaacagaatggaacaggacaggctgggctagactcgagcacgcagtggcccctgtgccaccacactgtgggtcaggaacacgcgtcatggtgttcttgtcggaatgtgaacatacagcaccctctagcattacgaatctcttaggatttttaagattgtatttgataatacttatatttcacagggcacacttttggcacacctcagagcacactgctgctattttgggtcgtatcactgtaaaatacataataagtactacttaactgtgacatgaagaattggaatcccagagggcaacatttgatttgactaagatcaggcataagatagaatttttgtcatttttccttgcagttttattgacttagtttatgagcttggataaaataattttttgatgaatcatgtcaataaaaggaaaaataatgtaactacctcataagtctgataaaaggaagttgctagtgttttatagaatttctgaaggtggttaaatcaagtatgatttcaaaatatcaactagttccacttttgtgattgcaggatgcttcttatactaaagttctcataaataataaatcagcttatgccaaaaata

SEQ ID NO: 420 - protein, 443 aa, Homo sapiens
MECLRSLPCLLPRAMRLPRRTLCALALDVTSVGPPVAACGRRANLIGRSRAAQLCGPDRLRVAGEVHRFRTSDVSQATLASVAPVFTVTKFDKQGNVTSFERKKTELYQELGLQARDLRFQHVMSITVRNNRIIMRMEYLKAVITPECLLILDYRNLNLEQWLFRELPSQLSGEGQLVTYPLPFEFRAIEALLQYWINTLQGKLSILQPLILETLDALVDPKHSSVDRSKLHILLQNGKSLSELETDIKIFKESILEILDEEELLEELCVSKWSDPQVFEKSSAGIDHAEEMELLLENYYRLADDLSNAARELRVLIDDSQSIIFINLDSHRNVMMRLNLQLTMGTFSLSLFGLMGVAFGMNLESSLEEDHRIFWLITGIMFMGSGLIWRRLLSFLGRQLEAPLPPMMASLPKKTLLADRSMELKNSLRLDGLGSGRSILTNR

SEQ ID NO: 421 - DNA, 3489 bp, Homo sapiens
gtgacctgcttagagagaagcggtgggtctgcacctggattttggagtcccagtgctgctgcagctctgagcattcccacgtcaccagagaagccggtgggcaatgagatcatgtctgctttcaggttgtggcctggcctgctgatcatgttgggttctctctgccatagaggttcaccgtgtggcctttcaacacacgtagaaataggacacagagctctggagtttcttcagcttcacaatgggcgtgttaactacagagagctgttactagaacaccaggatgcgtatcaggctggaatcgtgtttcctgattgtttttaccctagcatctgcaaaggaggaaaattccatgatgtgtctgagagcactcactggactccgtttcttaatgcaagcgttcattatatccgagagaactatccccttccctgggagaaggacacagagaaactggtagctttcttgtttggaattacttctcacatggcggcagatgtcagctggcatagtctgggccttgaacaaggattccttaggaccatgggagctattgattttcacggctcctattcagaggctcattcggctggtgattttggaggagatgtgttgagccagtttgaatttaattttaattaccttgcacgacgctggtatgtgccagtcaaagatctactgggaatttatgagaaactgtatggtcgaaaagtcatcaccgaaaatgtaatcgttgattgttcacatatccagttcttagaaatgtatggtgagatgctagctgtttccaagttatatcccacttactctacaaagtccccgtttttggtggaacaattccaagagtattttcttggaggactggatgatatggcattttggtccactaatatttaccatctaacaagcttcatgttggagaatgggaccagtgactgcaacctgcctgagaaccctctgttcattgcatgtggcggccagcaaaaccacacccagggctcaaaaatgcagaaaaatgattttcacagaaatttgactacatccctaactgaaagtgttgacaggaatataaactatactgaaagaggagtgttctttagtgtaaattcctggaccccggattccatgtcctttatctacaaggctttggaaaggaacataaggacaatgttcataggtggctctcagttgtcacaaaagcacgtctccagccccttagcatcttacttcttgtcatttccttatgcgaggcttggctgggcaatgacctcagctgacctcaaccaggatgggcacggtgacctcgtggtgggcgcaccaggctacagccgccccggccacatccacatcgggcgcgtgtacctcatctacggcaatgacctgggcctgccacctgttgacctggacctggacaaggaggcccacaggatccttgaaggcttccagccctcaggtcggtttggctcggccttggctgtgttggactttaacgtggacggcgtgcctgacctggccgtgggagctccctcggtgggctccgagcagctcacctacaaaggtgccgtgtatgtctactttggttccaaacaaggaggaatgtcttcttcccctaacatcaccatttcttgccaggacatctactgtaacttgggctggactctcttggctgcagatgtgaatggagacagtgaacccgatctggtcatcggctccccttttgcaccaggtggagggaagcagaagggaattgtggctgcgttttattctggccccagcctgagcgacaaagaaaaactgaacgtggaggcagccaactggacggtgagaggcgaggaagacttctcctggtttggatattcccttcacggtgtcactgtggacaacagaaccttgctgttggttgggagcccgacctggaagaatgccagcaggctgggccatttgttacacatccgagatgagaaaaagagccttgggagggtgtatggctacttcccaccaaacggccaaagctggtttaccatttctggagacaaggcaatggggaaactgggtacttccctttccagtggccacgtactgatgaatgggactctgaaacaagtgctgctggttggagcccctacgtacgatgacgtgtctaaggtggcattcctgaccgtgaccctacaccaaggcggagccactcgcatgtacgcactcacatctgacgcgcagcctctgctgctcagcaccttcagcggagaccgccgcttctcccgatttggtggcgttctgcacttgagtgacctggatgatgatggcttagatgaaatcatcatggcagcccccctgaggatagcagatgtaacctctggactgattgggggagaagacggccgagtatatgtatataatggcaaagagaccacccttggtgacatgactggcaaatgcaaatcatggataactccatgtccagaagaaaaggcccaatatgtattgatttctcctgaagccagctcaaggtttgggagctccctcatcaccgtgaggtccaaggcaaagaaccaagtcgtcattgctgctggaaggagttctttgggagcccgactctccggggcacttcacgtctatagccttggctcagattgaagatttcactgcatttccccactctgcccacctctctcatgctgaatcacatccatggtgagcattttgatggacaaagtggcacatccagtggagcggtggtagatcctgatagacatggggctcctgggagtagagagacacactaacagccacaccctctggaaatctgatacagtaaatatatgactgcaccagaaatatgtgaaatagcagacattctgcttactcatgtctccttccacagtttacttcctcgctccctttgcatctaaacctttcttctttcccaacttattgcctgtagtcagacctgctgtacaacctatttcctcttcctcttgaatgtctttccaatggctggaaaggtccctctgtggttatctgttagaacagtctctgtacacaattcctcctaaaaacatccttttttaaaaaaagaattgttcagccataaagaaagaacaagatcatgccctttgcagggacatggatggagctggaggccattatccttcataaactattgcaggaacagaaaaccaaacactccatattctcacttgtaagtgggagctaaatgagaacacgtggacacatagagggaaacaacacacactggggcctatgagagggcggaaggtgggaggagggagagatcaggaaaaataactaatggatacttagggtgatgaaataatctgtgtaacaaacccccatgacacacctttatgtatgtaacaaaccagcacttcctgcgcatgtacccctgaacttaaaagttaaaaaaaagttgaacttaaaaataacagattggcccatgccaatcaaagtataatagaaagcatagtatac

SEQ ID NO: 422 - protein, 840 aa, Homo sapiens
MSAFRLWPGLLIMLGSLCHRGSPCGLSTHVEIGHRALEFLQLHNGRVNYRELLLEHQDAYQAGIVFPDCFYPSICKGGKFHDVSESTHWTPFLNASVHYIRENYPLPWEKDTEKLVAFLFGITSHMAADVSWHSLGLEQGFLRTMGAIDFHGSYSEAHSAGDFGGDVLSQFEFNFNYLARRWYVPVKDLLGIYEKLYGRKVITENVIVDCSHIQFLEMYGEMLAVSKLYPTYSTKSPFLVEQFQEYFLGGLDDMAFWSTNIYHLTSFMLENGTSDCNLPENPLFIACGGQQNHTQGSKMQKNDFHRNLTTSLTESVDRNINYTERGVFFSVNSWTPDSMSFIYKALERNIRTMFIGGSQLSQKHVSSPLASYFLSFPYARLGWAMTSADLNQDGHGDLVVGAPGYSRPGHIHIGRVYLIYGNDLGLPPVDLDLDKEAHRILEGFQPSGRFGSALAVLDFNVDGVPDLAVGAPSVGSEQLTYKGAVYVYFGSKQGGMSSSPNITISCQDIYCNLGWTLLAADVNGDSEPDLVIGSPFAPGGGKQKGIVAAFYSGPSLSDKEKLNVEAANWTVRGEEDFSWFGYSLHGVTVDNRTLLLVGSPTWKNASRLGHLLHIRDEKKSLGRVYGYFPPNGQSWFTISGDKAMGKLGTSLSSGHVLMNGTLKQVLLVGAPTYDDVSKVAFLTVTLHQGGATRMYALTSDAQPLLLSTFSGDRRFSRFGGVLHLSDLDDDGLDEIIMAAPLRIADVTSGLIGGEDGRVYVYNGKETTLGDMTGKCKSWITPCPEEKAQYVLISPEASSRFGSSLITVRSKAKNQVVIAAGRSSLGARLSGALHVYSLGSD

SEQ ID NO: 423 - DNA, 1096 bp, Homo sapiens
agtgctgctgcagctctgagcattcccacgtcaccagagaagccggtgggcaatgagatcatgtctgctttcaggttgtggcctggcctgctgatcatgttgggttctctctgccatagaggttcaccgtgtggcctttcaacacacgtagaaataggacacagagctctggagtttcttcagcttcacaatgggcgtgttaactacagagagctgttactagaacaccaggatgcgtatcaggctggaatcgtgtttcctgattgtttttaccctagcatctgcaaaggaggaaaattccatgatgtgtctgagagcactcactggactccgtttcttaatgcaagcgttcattatatccgagagaactatccccttccctgggagaaggacacagagaaactggtagctttcttgtttggaattacttctcacatggcggcagatgtcagctggcatagtctgggccttgaacaaggattccttaggaccatgggagctattgattttcacggctcctattcagaggctcattcggctggtgattttggtactgtttatttacatttgctaaattttctcgtggtatagttcacttataatgacatcactactgtgctttaaatatgtgtgtctttaatattttgctggttgcatgtattttctatttaatgttgcagttcatttagagtagagatgtacctcatttaacatagagatgtatttctaaaaacttgtgtctatatgtatttttttgttaaaaaattctacactttgttgttgacatgtcataattttagaaaaactttacttatacattgggttaaaattcattagctagtgtctcctactttcctaatactttagctttaaactagtaaactccaccttttgcctgtagtagtaaattgcttttaaatatttaaactaggtggtgaatggtgtttattaaacccttatggtcgatatttccttaaagtaaaacaaaaaacacctttggttatatggccagttctttcttaatttatatgtttcactaactaagatttttaaaagataattttttcttaaaaaaaaaaaaaaaaaaaaaaaaaaa

SEQ ID NO: 424 - protein, 176 aa, Homo sapiens
MSAFRLWPGLLIMLGSLCHRGSPCGLSTHVEIGHRALEFLQLHNGRVNYRELLLEHQDAYQAGIVFPDCFYPSICKGGKFHDVSESTHWTPFLNASVHYIRENYPLPWEKDTEKLVAFLFGITSHMAADVSWHSLGLEQGFLRTMGAIDFHGSYSEAHSAGDFGTVYLHLLNFLVV

SEQ ID NO: 425 - DNA, 5131 bp, Homo sapiens
gtttcctgtcgccgtcgttgcccgggccatggcgacctgcatttggctgcggagctgtggggcccggcgcctcgggtcgacgtttccaggctgccgcctccgcccccgcgccggcggcctggtccctgcctccgggcctgcgcccggcccggcccagctccgctgctacgctgggcgcctggcgggcctctctgcggcgctgctgcgcaccgacagcttcgtgggcggccgctggctcccggccgccgccaccttccccgtgcaagacccggccagcggcgccgctctgggcatggtagccgactgcggggtgcgagaggcccgcgccgccgtgcgcgctgcctacgaggctttctgccgctggagggaggtctccgccaaggagaggagttcattacttcggaagtggtacaatttaatgatacaaaataaggatgaccttgccagaataatcacagctgaaagtggaaagccactgaaggaggcacatggagaaattctctattccgcctttttcctagagtggttctctgaggaagcccgccgtgtttacggagacattatccacaccccggcaaaggacaggcgggccctggtcctcaagcagcccataggcgtggctgcagtcatcaccccgtggaatttccccagtgccatgatcacccggaaggtgggggccgccctggcagccggctgtactgtcgtggtgaagcctgccgaagacacgcccttctccgccctggccctggctgagcttgcaagccaggctgggattccttcaggtgtatacaatgttattccctgttctcgaaagaatgccaaggaagtaggggaggcaatttgtactgatcctctggtgtccaaaatttcctttactggttcaacaactacaggaaagatcctgttgcaccacgcagcaaactctgtgaaaagggtctctatggagctgggcggccttgctccatttatagtatttgacagtgccaacgtggaccaggctgtagcaggggccatggcatctaaatttaggaacactggacagacttgtgtttgctcaaaccaattcttggtgcaaaggggcatccatgatgcctttgtaaaagcattcgccgaggccatgaagaagaacctgcgcgtaggtaatggatttgaggaaggaactactcagggcccattaattaatgaaaaagcggtagaaaaggtggagaaacaggtgaatgatgccgtttctaaaggtgccaccgttgtgacaggtggaaaacgacaccaacttggaaaaaatttctttgagcctaccctgctgtgcaatgtcacccaggacatgctgtgcactcatgaagagactttcgggcctctggcaccagttatcaagttcgatacagaggaggaggctatagcaatcgctaacgcagctgatgttgggttagcaggttatttttactctcaagacccagcccagatctggagagtggcagagcagctggaagtgggcatggttggcgtcaacgaaggattaatttcctctgtggagtgcccttttggtggagtgaagcagtccggccttgggcgagaggggtccaagtatggcattgatgagtatctggaactcaagtatgtgtgttacgggggcttgtaggattctttggttctttaaaaaaatttaaaaggagacttatctacatatataggtacatgccatccattattttaaataaactaataggttttcagaattatgaatttttcagaactcatccagtccttgtaatcttaaacagatgcaaatcctacccctgcccttaatgtaactagggaccaatatgtgccacgtgcctgtggctgcagactcccagagaaccagcactgggtttacagaatgaggccctggctccccaccacagccccagctgcctcagagcaggcacagcacaaggcaggcccagccccatgggccgtcacaaaggcttgatcactgcctgggcagtggcacaaccatcccccatgtcgctacagaacatgggcccagagcaccttgaaggagacccttgactgtgactggcaggcaggtgaggggcacagcacccctccccggcatctgccagctcagcacagaagacaccgaatgtgcatctggaggtgttgcggcagaggtttgagtgaaccctctttcaaagacaataaatagcacagaattgtccgtgcttctgtgaggcacgaaggagcacctctccctattcctgaaccatattttaattgatgcctttattgtcccaaatttaccacttaaagaattctattttcatttctgtcctgtttgccacttcatttcatttccttgagtaaatgagctgaagtgtaaagcaaagaatagcagaagcagcttggtaggatggaaggcacgcagtggcatggcctggctccttccctgagtggccttgttgccttgggcgtgtgttcagcacctcccatcccatggatacagtggagattccatacaggccttacttagctccttgcgatactgtgagccagagagaaagtaaaagcacttcacaaaaaaatgaaaattctaaggacatacaagagccattgttacgagcagcaccgcccagcccttccttgcctactgtcagtggctttgccaagatgggaggaggccagtgcccacttgcccaccgacctgagcctgagtaagtggctgtcacctgagcctgttctttctgtcctggtgtggtgctgctccctcacctccaaaagagcaaaagtactttcaccacagtcaacccaaaagggaaagaatttctgtaattgccaacccactttgtagaagaggcatgagcccttgaatttcaggcaccttttatctaatgagagtttttacagctcatcattcaaataacgcacaaaaaacaaaagccgctatgaccggcgttgcctctcactttgaaagaaagactccgtaatcttaaacagatgcaaatccaattaggcggccaagtaggtggagacgaagcaccttcctttccccatctctgtctgtgtagactccacttacatcttgtggttattctgggttgtggaaggaaaatgtgaatgaaagtagtgctggatgcaattactcctgaaccccacctaggatttaacatccctcattgagccactgggaagctatggttgagtaactaaaggtctggcaagaccctgggcacacagggagctgcctagcatctggcctggagtgtactagccacattcccaaggtcccaaggagaaggaagagctgaaattcatctcctagtgacagtgccccggccctgtcaagaatcacatactcagcattttgacagttaatgtcttctctttatttgtgtagtttttaggtggttttatataacattttaattacttgtgatttagatgtatccatcctttttctattaagaatacaaatgctgggctgggcacagtggctcacgcctgtaatcccaacaccttgggaggccaaggcaggcagatcacgacatcaggagatcgagaccatcctggctaacacggtgaaaccccgtctctactaaaaatacaaaaaaaattagtcggatgtggtggcaggtgcctgtagtcccagctactctggaggctgaggcaggagaatggcgtgaacccaggaggcggagcttgcagtgagcagagatcacgccactgcactccagcctggatgacagagcgagactccgcctcaaaaaaagaatacaaatgctccaacattattttttataactctggattaccgatgctgagatgtgtgcaggaatacttccaaataaatttttaacattgtaagccagtagattctttggctgggtggcaaattttgagtcttcttgcatatttggctcatgggttcataaattgaggccagagactcattgtatatccttgatcaattttctaattaaaggaaatagcttattgtttagtaaaatggcccttggttgtgggaagaaagagaattatttttaactgaacgtttttgttgttttttaaataaagtagccatatgtaacgggattttaaaaatatatacattttacaacatggactagaaaaggaccattagatcaggggttggcaaactatggcccacgaatcaaacctggcctgccacctgtttttatacaacctgtgagctaagaatggtttatatgttttcaaatgattgggcagaaaatcaaaagaagaacaatatttcatgacacctgaaaattctatgaaattcagatttcagtgtccataaacaaaatgttattagagcatagccacacccattcatttatggtattgtctgggactgctttcttggcagagttgaatagttgggacagggacagtatagcctgcaaagcctaaaagatttactacttgtctccttaaagaaaaagtttgccagctcctgatctagaccaagagggagatattgaccttacttgcatttatccggcattatttcaacacctcctgtgaagaaagtacttttctggcatagctaccgtgagttctcagcaggaacttcccagcgatgataatgtacatgaaattagccacgtaacaagagtctatttgccttgaaaaaacaattatccttgaacttcctccagctatgcagggattctcattaaagagctgatctgcatctgtttatccattttagtagcttttaaatatgattttatgtgaagtgccatttctttattctactaaagagagacagcagaaataaagatcagaagcaaatgtgagcaaatctgttttactgttaacttcaattatgaacttgaaattgtgccacatgactttttcctctaaaaactggatcctagtgttttaattacctgtgtgcagctattttaaatagcattttacttgaataatatgtatgttgtcattgtttcatgctatactttgtgggataaaacttgggaatgagtgtggtaagaaatttataaagttttgcttttaaaacgtggacataactcatttttctagtttttgacaattgtgtgttttagtgtctagtctgcagagagctgtgtgattaataaacgtggaattaacagaatttcctctccctgta

SEQ ID NO: 426 - protein, 535 aa, Homo sapiens
MATCIWLRSCGARRLGSTFPGCRLRPRAGGLVPASGPAPGPAQLRCYAGRLAGLSAALLRTDSFVGGRWLPAAATFPVQDPASGAALGMVADCGVREARAAVRAAYEAFCRWREVSAKERSSLLRKWYNLMIQNKDDLARIITAESGKPLKEAHGEILYSAFFLEWFSEEARRVYGDIIHTPAKDRRALVLKQPIGVAAVITPWNFPSAMITRKVGAALAAGCTVVVKPAEDTPFSALALAELASQAGIPSGVYNVIPCSRKNAKEVGEAICTDPLVSKISFTGSTTTGKILLHHAANSVKRVSMELGGLAPFIVFDSANVDQAVAGAMASKFRNTGQTCVCSNQFLVQRGIHDAFVKAFAEAMKKNLRVGNGFEEGTTQGPLINEKAVEKVEKQVNDAVSKGATVVTGGKRHQLGKNFFEPTLLCNVTQDMLCTHEETFGPLAPVIKFDTEEEAIAIANAADVGLAGYFYSQDPAQIWRVAEQLEVGMVGVNEGLISSVECPFGGVKQSGLGREGSKYGIDEYLELKYVCYGGL

SEQ ID NO: 427 - DNA, 5170 bp, Homo sapiens
gtttcctgtcgccgtcgttgcccgggccatggcgacctgcatttggctgcggagctgtggggcccggcgcctcgggtcgacgtttccaggctgccgcctccgcccccgcgccggcggcctggtccctgcctccgggcctgcgcccggcccggcccagctccgctgctacgctgggcgcctggcgggcctctctgcggcgctgctgcgcaccgacagcttcgtgggcggccgctggctcccggccgccgccaccttccccgtgcaagacccggccagcggcgccgctctgggcatggtagccgactgcggggtgcgagaggcccgcgccgccgtgcgcgctgcctacgaggctttctgccgctggagggaggtctccgccaaggagaggagttcattacttcggaagtggtacaatttaatgatacaaaataaggatgaccttgccagaataatcacagctgaaagtggaaagccactgaaggaggcacatggagaaattctctattccgcctttttcctagagtggttctctgaggaagcccgccgtgtttacggagacattatccacaccccggcaaaggacaggcgggccctggtcctcaagcagcccataggcgtggctgcagtcatcaccccgtggaatttccccagtgccatgatcacccggaaggtgggggccgccctggcagccggctgtactgtcgtggtgaagcctgccgaagacacgcccttctccgccctggccctggctgaggtaaatcagggatttcttcttgatttggatccattgttgcttgcaagccaggctgggattccttcaggtgtatacaatgttattccctgttctcgaaagaatgccaaggaagtaggggaggcaatttgtactgatcctctggtgtccaaaatttcctttactggttcaacaactacaggaaagatcctgttgcaccacgcagcaaactctgtgaaaagggtctctatggagctgggcggccttgctccatttatagtatttgacagtgccaacgtggaccaggctgtagcaggggccatggcatctaaatttaggaacactggacagacttgtgtttgctcaaaccaattcttggtgcaaaggggcatccatgatgcctttgtaaaagcattcgccgaggccatgaagaagaacctgcgcgtaggtaatggatttgaggaaggaactactcagggcccattaattaatgaaaaagcggtagaaaaggtggagaaacaggtgaatgatgccgtttctaaaggtgccaccgttgtgacaggtggaaaacgacaccaacttggaaaaaatttctttgagcctaccctgctgtgcaatgtcacccaggacatgctgtgcactcatgaagagactttcgggcctctggcaccagttatcaagttcgatacagaggaggaggctatagcaatcgctaacgcagctgatgttgggttagcaggttatttttactctcaagacccagcccagatctggagagtggcagagcagctggaagtgggcatggttggcgtcaacgaaggattaatttcctctgtggagtgcccttttggtggagtgaagcagtccggccttgggcgagaggggtccaagtatggcattgatgagtatctggaactcaagtatgtgtgttacgggggcttgtaggattctttggttctttaaaaaaatttaaaaggagacttatctacatatataggtacatgccatccattattttaaataaactaataggttttcagaattatgaatttttcagaactcatccagtccttgtaatcttaaacagatgcaaatcctacccctgcccttaatgtaactagggaccaatatgtgccacgtgcctgtggctgcagactcccagagaaccagcactgggtttacagaatgaggccctggctccccaccacagccccagctgcctcagagcaggcacagcacaaggcaggcccagccccatgggccgtcacaaaggcttgatcactgcctgggcagtggcacaaccatcccccatgtcgctacagaacatgggcccagagcaccttgaaggagacccttgactgtgactggcaggcaggtgaggggcacagcacccctccccggcatctgccagctcagcacagaagacaccgaatgtgcatctggaggtgttgcggcagaggtttgagtgaaccctctttcaaagacaataaatagcacagaattgtccgtgcttctgtgaggcacgaaggagcacctctccctattcctgaaccatattttaattgatgcctttattgtcccaaatttaccacttaaagaattctattttcatttctgtcctgtttgccacttcatttcatttccttgagtaaatgagctgaagtgtaaagcaaagaatagcagaagcagcttggtaggatggaaggcacgcagtggcatggcctggctccttccctgagtggccttgttgccttgggcgtgtgttcagcacctcccatcccatggatacagtggagattccatacaggccttacttagctccttgcgatactgtgagccagagagaaagtaaaagcacttcacaaaaaaatgaaaattctaaggacatacaagagccattgttacgagcagcaccgcccagcccttccttgcctactgtcagtggctttgccaagatgggaggaggccagtgcccacttgcccaccgacctgagcctgagtaagtggctgtcacctgagcctgttctttctgtcctggtgtggtgctgctccctcacctccaaaagagcaaaagtactttcaccacagtcaacccaaaagggaaagaatttctgtaattgccaacccactttgtagaagaggcatgagcccttgaatttcaggcaccttttatctaatgagagtttttacagctcatcattcaaataacgcacaaaaaacaaaagccgctatgaccggcgttgcctctcactttgaaagaaagactccgtaatcttaaacagatgcaaatccaattaggcggccaagtaggtggagacgaagcaccttcctttccccatctctgtctgtgtagactccacttacatcttgtggttattctgggttgtggaaggaaaatgtgaatgaaagtagtgctggatgcaattactcctgaaccccacctaggatttaacatccctcattgagccactgggaagctatggttgagtaactaaaggtctggcaagaccctgggcacacagggagctgcctagcatctggcctggagtgtactagccacattcccaaggtcccaaggagaaggaagagctgaaattcatctcctagtgacagtgccccggccctgtcaagaatcacatactcagcattttgacagttaatgtcttctctttatttgtgtagtttttaggtggttttatataacattttaattacttgtgatttagatgtatccatcctttttctattaagaatacaaatgctgggctgggcacagtggctcacgcctgtaatcccaacaccttgggaggccaaggcaggcagatcacgacatcaggagatcgagaccatcctggctaacacggtgaaaccccgtctctactaaaaatacaaaaaaaattagtcggatgtggtggcaggtgcctgtagtcccagctactctggaggctgaggcaggagaatggcgtgaacccaggaggcggagcttgcagtgagcagagatcacgccactgcactccagcctggatgacagagcgagactccgcctcaaaaaaagaatacaaatgctccaacattattttttataactctggattaccgatgctgagatgtgtgcaggaatacttccaaataaatttttaacattgtaagccagtagattctttggctgggtggcaaattttgagtcttcttgcatatttggctcatgggttcataaattgaggccagagactcattgtatatccttgatcaattttctaattaaaggaaatagcttattgtttagtaaaatggcccttggttgtgggaagaaagagaattatttttaactgaacgtttttgttgttttttaaataaagtagccatatgtaacgggattttaaaaatatatacattttacaacatggactagaaaaggaccattagatcaggggttggcaaactatggcccacgaatcaaacctggcctgccacctgtttttatacaacctgtgagctaagaatggtttatatgttttcaaatgattgggcagaaaatcaaaagaagaacaatatttcatgacacctgaaaattctatgaaattcagatttcagtgtccataaacaaaatgttattagagcatagccacacccattcatttatggtattgtctgggactgctttcttggcagagttgaatagttgggacagggacagtatagcctgcaaagcctaaaagatttactacttgtctccttaaagaaaaagtttgccagctcctgatctagaccaagagggagatattgaccttacttgcatttatccggcattatttcaacacctcctgtgaagaaagtacttttctggcatagctaccgtgagttctcagcaggaacttcccagcgatgataatgtacatgaaattagccacgtaacaagagtctatttgccttgaaaaaacaattatccttgaacttcctccagctatgcagggattctcattaaagagctgatctgcatctgtttatccattttagtagcttttaaatatgattttatgtgaagtgccatttctttattctactaaagagagacagcagaaataaagatcagaagcaaatgtgagcaaatctgttttactgttaacttcaattatgaacttgaaattgtgccacatgactttttcctctaaaaactggatcctagtgttttaattacctgtgtgcagctattttaaatagcattttacttgaataatatgtatgttgtcattgtttcatgctatactttgtgggataaaacttgggaatgagtgtggtaagaaatttataaagttttgcttttaaaacgtggacataactcatttttctagtttttgacaattgtgtgttttagtgtctagtctgcagagagctgtgtgattaataaacgtggaattaacagaatttcctctccctgta

SEQ ID NO: 428 - protein, 548 aa, Homo sapiens
MATCIWLRSCGARRLGSTFPGCRLRPRAGGLVPASGPAPGPAQLRCYAGRLAGLSAALLRTDSFVGGRWLPAAATFPVQDPASGAALGMVADCGVREARAAVRAAYEAFCRWREVSAKERSSLLRKWYNLMIQNKDDLARIITAESGKPLKEAHGEILYSAFFLEWFSEEARRVYGDIIHTPAKDRRALVLKQPIGVAAVITPWNFPSAMITRKVGAALAAGCTVVVKPAEDTPFSALALAEVNQGFLLDLDPLLLASQAGIPSGVYNVIPCSRKNAKEVGEAICTDPLVSKISFTGSTTTGKILLHHAANSVKRVSMELGGLAPFIVFDSANVDQAVAGAMASKFRNTGQTCVCSNQFLVQRGIHDAFVKAFAEAMKKNLRVGNGFEEGTTQGPLINEKAVEKVEKQVNDAVSKGATVVTGGKRHQLGKNFFEPTLLCNVTQDMLCTHEETFGPLAPVIKFDTEEEAIAIANAADVGLAGYFYSQDPAQIWRVAEQLEVGMVGVNEGLISSVECPFGGVKQSGLGREGSKYGIDEYLELKYVCYGGL

SEQ ID NO: 429 - DNA, 6801 bp, Homo sapiens
gctgccgcgggcggtgggcggggatcccccgggggtgcaaccttgctccacctgtgctgccctcggcgggcctggctggccccgcgcagagcggcggcggcgctcgctgtcactgccggaggtgagagcgcagcagtagcttcagcctgtcttgggcttggtccagattcgctcctctggggctacgtcccggggaagaggaagcgaggattttgctggggtggggctgtacctcttaacagcaggtgcgcgcgcgagggtgtgaacgtgtgtgtgtgtgtgtgtgtgtgtgtgtgtgtgtgtgtgtgtgtaagacctgcgatgacgacgaggaggaacaagtgggacggcgagtgatgctcagggccagcagcaacgcatggggcgagcttcagtgtcgccagcagtgaccacagttcttgaggccaaatctggctcctaaaaaacatcaaaggaagcttgcaccaaactctcttcagggccgcctcagaagcctgccatcacccactgtgtggtgcacaatggcgccccccacaggtgtgctctcttcattgctgctgctggtgacaattgcaggttgtgcccgtaagcagtgcagcgaggggaggacatattccaatgcagtcatttcacctaacttggaaaccaccagaatcatgcgggtgtctcacaccttccctgtcgtagactgcacggccgcttgctgtgacctgtccagctgtgacctggcctggtggttcgagggccgctgctacctggtgagctgcccccacaaagagaactgtgagcccaagaagatgggccccatcaggtcttatctcacttttgtgctccggcctgttcagaggcctgcacagctgctggactatggggacatgatgctgaacaggggctccccctcggggatctggggggactcacctgaggatatcagaaaggacttgccctttctaggcaaagattggggcctagaggagatgtctgagtacgcagatgactaccgggagctggagaaggacctcttgcaacccagtggcaagcaggagcccagagggagtgccgagtacacggactggggcctactgccgggcagcgagggggccttcaactcctctgttggagacagtcctgcggtgccagcggagacgcagcaggaccctgagctccattacctgaatgagtcggcttcaacccctgccccaaaactccctgagagaagtgtgttgcttcccttgccgactactccatcttcaggagaggtgttggagaaagaaaaggcttctcagctccaggaacaatccagcaacagctctggaaaagaggttctaatgccttcccatagtcttcctccggcaagcctggagctcagctcagtcaccgtggagaaaagcccagtgctcacagtcaccccggggagtacagagcacagcatcccaacacctcccactagcgcagccccctctgagtccaccccatctgagctacccatatctcctaccactgctcccaggacagtgaaagaacttacggtatcggctggagataacctaattataactttacccgacaatgaagttgaactgaaggcctttgttgcgccagcgccacctgtagaaacaacctacaactatgaatggaatttaataagccaccccacagactaccaaggtgaaataaaacaaggacacaagcaaactcttaacctctctcaattgtccgtcggactttatgtcttcaaagtcactgtttctagtgaaaacgcctttggagaaggatttgtcaatgtcactgttaagcctgccagaagagtcaacctgccacctgtagcagttgtttctccccaactgcaagagctcactttgcctttgacgtcagccctcattgatggcagccaaagtacagatgatactgaaatagtgagttatcattgggaagaaataaacgggcccttcatagaagagaagacttcagttgactctcccgtcttacgcttgtctaaccttgatcctggtaactatagtttcaggttgactgttacagactcggacggagccactaactctacaactgcagccctaatagtgaacaatgctgtggactacccaccagttgctaatgcaggaccaaatcacaccataactttgccccaaaactccatcactttgaatggaaaccagagcagtgacgatcaccagattgtcctctatgagtggtccctgggtcctgggagtgagggcaaacatgtggtcatgcagggagtacagacgccataccttcatttatctgcaatgcaggaaggagattatacatttcagctgaaggtgacagattcttcaaggcaacagtctactgctgtggtgactgtgattgtccagcctgaaaacaatagacctccagtggctgtggccggccctgataaagagctgatcttcccagtggaaagtgctaccctggatgggagcagcagcagcgatgaccacggcattgtcttctaccactgggagcacgtcagaggccccagtgcagtggagatggaaaatattgacaaagcaatagccactgtgactggtctccaggtggggacctaccacttccgtttgacagtgaaagaccagcagggactgagcagcacgtccaccctcactgtggctgtgaagaaggaaaataatagtcctcccagagcccgggctggtggcagacatgttcttgtgcttcccaataattccattactttggatggttcaaggtctactgatgaccaaagaattgtgtcctatctgtggatccgggatggccagagtccagcagctggagatgtcatcgatggctctgaccacagtgtggctctgcagcttacgaatctggtggagggggtgtacactttccacttgcgagtcaccgacagtcagggggcctcggacacagacactgccactgtggaagtgcagccagaccctaggaagagtggcctggtggagctgaccctgcaggttggtgttgggcagctgacagagcagcggaaggacacccttgtgaggcagctggctgtgctgctgaacgtgctggactcggacattaaggtccagaagattcgggcccactcggatctcagcaccgtgattgtgttttatgtacagagcaggccgcctttcaaggttctcaaagctgctgaagtggcccgaaatctgcacatgcggctctcaaaggagaaggctgacttcttgcttttcaaggtcttgagggttgatacagcaggttgccttctgaagtgttctggccatggtcactgcgaccccctcacaaagcgctgcatttgctctcacttatggatggagaaccttatacagcgttatatctgggatggagagagcaactgtgagtggagtatattctatgtgacagtgttggcttttactcttattgtgctaacaggaggtttcacttggctttgcatctgctgctgcaaaagacaaaaaaggactaaaatcaggaaaaaaacaaagtacaccatcctggataacatggatgaacaggaaagaatggaactgaggcccaaatatggtatcaagcaccgaagcacagagcacaactccagcctgatggtatccgagtctgagtttgacagtgaccaggacacaatcttcagccgagaaaagatggagagagggaatccaaaggtttccatgaatggttccatcagaaatggagcttccttcagttattgctcaaaggacagataatggcgcagttcattgtaaagtggaaggaccccttgaatccaagaccagtcagtgggagttacagcacaaaacccactcttttagaatagttcattgaccttcttccccagtgggttagatgtgtatccccacgtactaaaagaccggtttttgaaggcacaaaacaaaaactttgctcttttaactgagatgcttgttaatagaaataaaggctgggtaaaactctaaggtatatacttaaaagagttttgagtttttgtagctggcacaatctcatattaaagatgaacaacgatttctatctgtagaaccttagagaaggtgaatgaaacaaggttttaaaaagggatgatttctgtcttagctgctgtgattgcctctaaggaacagcattctaaacacggtttctcttgtaggacctgcagtcagatggctgtgtatgttaaaatagcttgtctaagaggcacgggccatctgtggaggtacggagtcttgcatgtagcaagctttctgtgctgacggcaacactcgcacagtgccaagccctcctggtttttaattctgtgctatgtcaatggcagttttcatctctctcaagaaagcagctgttggccattcaagagctaaggaagaatcgtattctaaggactgaggcaatagaaaggggaggaggagcttaatgccgtgcaggttgaaggtagcattgtaacattatcttttctttctctaagaaaaactacactgactcctctcggtgttgtttagcagtatagttctctaatgtaaacggatccccagtttacattaaatgcaatagaagtgattaattcattaagcatttattatgttctgtaggctgtgcgtttggactgccatagatagggataacgactcagcaattgtgtatatattccaaaactctgaaatacagtcagtcttaacttggatggcgtggttatgatactctggtccccgacaggtactttccaaaataacttgacatagatgtattcacttcatatgtttaaaaatacatttaagtttttctaccgaataaatcttatttcaaacatgaaagacaattaaaacattcccacccacaaagcagtactcccgagcaattaactggagttaattgtagcctgctacgttgactggttcagggtagttccccatccacccttggtcctgaggctggtggccttggtggtgcccttggcattttttgtgggaagattagaatgagagatagaaccagtgttgtggtaccaagtgtgagcacacctaaacaatatcctgttgcacaatgcttttttaacacatgggaaaactaggaatgcattgctgatgaagaagcaaggtatttaaacaccagggcaggagtgccagagaaaatgtttccccatgggttcttaaaaaaaattcagcttttaggtgcttttgtcatctcccgcagtattcatcctcatgggaccatcttatttttacttattgtaatttactggggaaaggcagaactaaaaagtgtgtcattttatttttaaaataattgctttgcttatgcctacactttctgtataactagccaattcaatactgtctatagtgttagaaggaaaatgtgatttttttttttaaccagtattgagcttcataagcctagaatctgccttatcaggtgaccagggttatggttgtttgcatgcaaatgtgaatttctggcataggggacagcagcccaaatgtaaagtcatcgggcgtaatgaggaagaagggagtgaacatttaccgctttatgtacataacatatgcagtttacatactcatttgatccttataatcaaccttgaagaggagatactatcattcttatgttgcagatagccctctgaaggcccagagaggttaaataacttcccagaggtcatggccaagaagtagtggctccaagaactgaatgcaaattttttaaactgtagagttctgctttccactaaacaaagaactcctgccttgatggatggagggcaaattctggtggaacttttgggccacctgaaagttctattcccaggactaagaggaatttcttttaatggatccagagagccaaggtcagagggagagatggcctgcatagtctcctgtggatcacacccgggccacccctccctctaggtttacagtggacttcttctgcccctcctccttttctgtccttggccatctcagcctggcctctctgatccttccatcacagaaggatcttgaatctctgggaaatcaaacatcacagtagtgatcagaaagtgagtcctgtcttgtcaccccatttctcatcagaacaaagcacgagatggaatgaccaaccagcattcttcatggtggactgcttatcattgaggatctttgggagataaagcacgctaagagctctggacagagaaaaacaggccctagaatatgggagtgggtgtttgtagggctcacaggctaacaagcactttagttgctggtttacattcaatgaaggaggattcatacccatggcattacaaggctaagcatgtgtatgactaaggaactatctgaaaaacatgcagcaaggtaagaaaatgtaccactcaacaagccagtgatgccaccttttgtgcgcggggaggagagtgactaccattgttttttgtgtgacaaagctatcatggactattttaatcttggttttattgcttaaaatatattatttttccctatgtgttgacaaggtatttctaatatcacactattaaatatatgcactaatctaaataaaggtgtctgtattttctgtaatgcttatttttagggggaaatttgttttctttatgcttcagggtagagggatttcccttgagtataggtcagcaaactgtggcctacagcctgtgtgtgcacgccccatgagccgaaaagtgggtcttatgttttcaaatggttaaaaataaataaaaaaatttgaaacatgtgaactatatgacattcagatttgtgttcataaataaagttttattggaacatatcc

SEQ ID NO: 430 - protein, 1072 aa, Homo sapiens
MAPPTGVLSSLLLLVTIAGCARKQCSEGRTYSNAVISPNLETTRIMRVSHTFPVVDCTAACCDLSSCDLAWWFEGRCYLVSCPHKENCEPKKMGPIRSYLTFVLRPVQRPAQLLDYGDMMLNRGSPSGIWGDSPEDIRKDLPFLGKDWGLEEMSEYADDYRELEKDLLQPSGKQEPRGSAEYTDWGLLPGSEGAFNSSVGDSPAVPAETQQDPELHYLNESASTPAPKLPERSVLLPLPTTPSSGEVLEKEKASQLQEQSSNSSGKEVLMPSHSLPPASLELSSVTVEKSPVLTVTPGSTEHSIPTPPTSAAPSESTPSELPISPTTAPRTVKELTVSAGDNLIITLPDNEVELKAFVAPAPPVETTYNYEWNLISHPTDYQGEIKQGHKQTLNLSQLSVGLYVFKVTVSSENAFGEGFVNVTVKPARRVNLPPVAVVSPQLQELTLPLTSALIDGSQSTDDTEIVSYHWEEINGPFIEEKTSVDSPVLRLSNLDPGNYSFRLTVTDSDGATNSTTAALIVNNAVDYPPVANAGPNHTITLPQNSITLNGNQSSDDHQIVLYEWSLGPGSEGKHVVMQGVQTPYLHLSAMQEGDYTFQLKVTDSSRQQSTAVVTVIVQPENNRPPVAVAGPDKELIFPVESATLDGSSSSDDHGIVFYHWEHVRGPSAVEMENIDKAIATVTGLQVGTYHFRLTVKDQQGLSSTSTLTVAVKKENNSPPRARAGGRHVLVLPNNSITLDGSRSTDDQRIVSYLWIRDGQSPAAGDVIDGSDHSVALQLTNLVEGVYTFHLRVTDSQGASDTDTATVEVQPDPRKSGLVELTLQVGVGQLTEQRKDTLVRQLAVLLNVLDSDIKVQKIRAHSDLSTVIVFYVQSRPPFKVLKAAEVARNLHMRLSKEKADFLLFKVLRVDTAGCLLKCSGHGHCDPLTKRCICSHLWMENLIQRYIWDGESNCEWSIFYVTVLAFTLIVLTGGFTWLCICCCKRQKRTKIRKKTKYTILDNMDEQERMELRPKYGIKHRSTEHNSSLMVSESEFDSDQDTIFSREKMERGNPKVSMNGSIRNGASFSYCSKDR

SEQ ID NO: 431 - DNA, 1940 bp, Homo sapiens
ggggcggtgcagaggcggcaggaagatggagttggggagttgcctggagggcgggagggaggcggcggaggaagagggcgagcctgaggtgaaaaagcggcgacttctgtgtgtggagtttgcctcggtcgcaagctgcgatgccgcagtggctcagtgcttcctggccgagaacgactgggagatggaaagggctctgaactcctacttcgagcctccggtggaggagagcgccttggaacgccgacctgaaaccatctctgagcccaagacctatgttgacctaaccaatgaagaaacaactgattccaccacttctaaaatcagcccatctgaagatactcagcaagaaaatggcagcatgttctctctcattacctggaatattgatggattagatctaaacaatctgtcagagagggctcgaggggtgtgttcctacttagctttgtacagcccagatgtgatatttctacaggaagttattcccccatattatagctacctaaagaagagatcaagtaattatgagattattacaggtcatgaagaaggatatttcacagctataatgttgaagaaatcaagagtgaaattaaaaagccaagagattattccttttccaagtaccaaaatgatgagaaaccttttatgtgtgcatgtgaacgtgtcaggaaatgagctttgccttatgacatcccatttggagagcaccagagggcatgctgcggaacgaatgaatcagttaaaaatggttttaaagaaaatgcaagaggctccagagtcagctacagttatatttgcaggagatacaaatctaagggatcgagaggttaccagatgtggtggtttacccaacaacattgtggatgtctgggagtttttgggcaaacctaaacattgccagtatacatgggatacacaaatgaactctaatcttggaataactgctgcttgtaaacttcgttttgatcgaatatttttcagagcagcagcagaagagggacacattattccccgaagtttggaccttcttggattagaaaaactggactgtggtagatttcctagtgatcactggggtcttctgtgcaacttagatataatattgtaaaatgcttttcaagtgtgggttttgccctgattgttgcaaatacaatttccaccttctggaaaggtaggtttgctgtggaggaaataatgtactagatcattgtcacagaaaaaccaactatgatttatggttgtgttttcagaattcaacattaaagattaatgtttatttaaacgaacacattcctgcattcaggatgtgaggccatttaataaaaagggcacaaagcctgtcagagttttcaacggtgcttatagctgccagctggattccaaacaggtaccacattgtctctgagctaatgtttatatttttccattcaggcaccgaaatagttaatatttgaaataagtcttcaaaagaaaacataagagattattgagttcttgggactggatcctttatttcataagttcagatcatcttaaatgaaaatgccatgattatctgcagttaagtagatgacagctattctacatcagacttgatttttgtcagctaattacataattggtaagctataattgaaaccttatggcttaaaattccttaactcctttttgattcatgtttgtagtcatgttgtcaacagaggcaaagttaagcttgatgatggttaaaatcggtttgatagcaccatgggacatttttctaacaaaaataaatgcatgaagagacatagccttttagttttgctaattgtgaaatggaaatgctttacaggaagtaaatgcaaattacttttaagtgtgctttaaagaaaaatattttccccacaagagaaatttaaataaagaattttatttgtttaaaaaaaaaaaaaaaa

SEQ ID NO: 432 - protein, 362 aa, Homo sapiens
MELGSCLEGGREAAEEEGEPEVKKRRLLCVEFASVASCDAAVAQCFLAENDWEMERALNSYFEPPVEESALERRPETISEPKTYVDLTNEETTDSTTSKISPSEDTQQENGSMFSLITWNIDGLDLNNLSERARGVCSYLALYSPDVIFLQEVIPPYYSYLKKRSSNYEIITGHEEGYFTAIMLKKSRVKLKSQEIIPFPSTKMMRNLLCVHVNVSGNELCLMTSHLESTRGHAAERMNQLKMVLKKMQEAPESATVIFAGDTNLRDREVTRCGGLPNNIVDVWEFLGKPKHCQYTWDTQMNSNLGITAACKLRFDRIFFRAAAEEGHIIPRSLDLLGLEKLDCGRFPSDHWGLLCNLDIIL

SEQ ID NO: 433 - DNA, 5362 bp, Homo sapiens
gctttcatcgcctttactccccgaccttccttcgagtctgtttatccgttgcagcctcccttccccacgacggggcgcctctgcaactcacaaagtacccttagaaagaggccctcagaagagtcttctcttaagaagataaagaaggtagtggaaacgaacttcctgagcttttcaggctctaatggctgaagaatcaagaaagccttcagccccatccccaccagaccagactcctgaagaggatcttgtaatcgtcaaggtagaggaggatcatggttgggaccaggaatctagtctgcatgaaagtaaccctcttggccaagaagtgttccgcctgcgcttcaggcagttacgctaccaggagacactaggaccccgagaagctctgatccaactacgggccctttgccatcagtggctgaggccagatttgaacaccaaggaacagatcctggagctgctggtgctggagcagttcttgaccatcctacctgaggagctccagacactggttaaggaacatcagctagagaacggagaggaggtggtgaccctattagaggatttggaaaggcagattgatatactaggacgaccagtctcagctcgcgtacatggacatagggtactctgggaggaggtagtacattcagcatctgcaccagagcctccaaatactcagctccaatctgaggcaacccaacataaatctccagtgccccaagagtcacaagagagagccatgtctacttcccagagtcctactcgttcccagaaaggaagttctggagaccaggaaatgacagctacacttctcacagcagggttccagactttggagaagattgaagacatggctgtgtcccttattcgagaggagtggcttcttgatccatcacagaaggatctgtgtagagataacaggccagaaaatttcagaaacatgttctccctgggtggtgagaccaggagtgagaacagggaattagcttcaaaacaggtaatatctactggaatccagccacatggagagacagctgccaaatgcaacggggatgttatcaggggtcttgagcatgaagaagcccgagaccttctgggcagattagagaggcagcggggaaatcccacacaagagagacgacataaatgtgatgaatgtgggaaaagctttgctcagagctcaggccttgttcgccactggagaatccacactggggagaaaccctatcagtgtaatgtgtgtggtaaagccttcagttacaggtcagcccttctttcacatcaggatatccacaacaaagtaaaacgctatcactgtaaggagtgtggcaaagccttcagtcagaacacaggcctgattctgcaccagagaatccacactggggagaagccatatcagtgcaatcagtgtgggaaggctttcagtcagagtgcgggccttattctgcaccagagaatccacagtggagagagaccctatgaatgtaatgagtgtgggaaagctttcagtcatagctcacacctcattggacatcagagaatccacactggggagaagccctatgagtgtgatgagtgtgggaaaaccttcaggcggagctcacatcttattggtcatcagaggagccacactggggagaaaccctacaaatgcaatgagtgtgggagggccttcagtcagaagtcaggccttattgaacatcagagaatccacactggagaaagaccctataaatgtaaagaatgtgggaaagctttcaatgggaacactggtctcattcaacacctgagaattcacacaggggagaagccctaccaatgtaatgagtgtgggaaagcctttattcagaggtcaagtctcattcgacatcagagaatccacagtggtgaaaaatctgaatccataagcgtttaggaacaacatcagttagagtttgagcattattcagcattagggaaaccacacactggtgagaggtctttcagtgtactaaaaggcagaaaggtcatcacaactttagtgtcagaatctatagtggtggcaaagttaggatagctctttagtaatttgggcccagtgccttggtgaaggttgattagcttgactgtctttgaaagtatctgatggagctcctgatgacctaatgtatcctttagaaatttaaaatagcattagagcaagttgcttgtcatggcttgaagagcttaactttgtcttttgggtgagtagctataggtttgagagaggctggctactcctagttcctgtgcttcttcccatctcctgtgatccccctctcccatttattcccttgaaggtgcccttgtattcctaatctgatctaagaagctgctgtagagtcagaagtagcttctgtgtgaaacttatatttgtatgtagctttctaggaaaattttacagacacttaaagtatttatgcttaagtgtgcatttttttattctaatattccttctagtcagtggaaatttgtattcccatacaaactcagaatgctatatttttaacagcactccagcatttttcttcatgtatcaccttcactgactccattgagtcattgagcatctgtacatatccttcaccacccccagtcccagcacctgtgtcagtaaagaaagtggacacattagtaatggttatgggagtaatacagagaaagaggtgagtggagactcagcccagctgctcttgagcttggatagttatacattttggtgacttctgactctccttccacctccccactgtacactgtggtacagatagttggcactatcctagttatggcatcaggtaggagaaggagacgaagatgctttaggaagataaaaaccttacaaagaatgtatactcatcttttttggcccattacaatactgctttctcaggttcttaacagcctgtgcaaactccctgactagatggtctgtcactcctatcattaccttgcacccatctctttagatggcctcagcacctcactcgttattctccatctgtttcttgccattagtttatatgactttaatatccacagtggtaatctaataccttacctcacaggttttcattcttttgaactctggtgcactccatctgtaatccatgtctataatctaccaacaaagatgtactcttaaactcagtatcaccaggcactatatttcatctttgaggcttttgttataccaaggaatactatataaagtaatgagactggtttaaagtaacatgccagaacttacgcatccaatgtgggttgtcacttgttattcccaagtactattattccatactactatattcttccaaatatttggaacactcttagaattcccatttaataaaccatatgagaaaaccctctattactcttacactttagttttaccatttgagtagccacttattcaccagagttggaattgagaaattttgggctttccaaaattaacctttaaacttaaaattgattacattgagcctattcagaaaaaaaattatataggttctgatgaaagcttcataatttcaccctgtgactatcctgaaaagaaataataatcattttatgattgatgggccaaaaaaagcaatcaaagtcttacgtcatagaggaccaccttttggatcataaattctttccctataacattccttctctgcctctctatggcccactttgaccactaacaacatcagaattatctacatcaatttcattgagccattggtgaatgaagacacccatcacttgtcatgttggtttccaacagtcctttcgattatcctttattttcttatcctcccttctcttgtttcttttatttataagttaccattcctagtttctttgtacttgaaattttaagaaaccagaaacaagtaaatctggttgtatctagatctttgctctgtgtttcagttgtgccttaccctctgtaagatactgattcttcctggggccagtattaccttgtatgcaaatattacatatgatgggtgcattgtcagagggaaaatatatgtgtatgtacacatgtgtatgtacacacacacacacacctgccatacactttagaagaacgcttctcttctattccaataaaaagtccttttagcaatgcaacatattaacaaaattgggtgcattcagggtggtatggccatagaccagagcaacacattgaaatgtatacagatgtactagctaaagtctctttatgtgtcagtattaagagtaatatgtagccagattacttaaatctcagaattactaagcatgtggcataaatttggagaaaataatatgactagaaaaattagtgttatattgggtgtgagaaaagactgtgtcttgaaagaattatcaaagctgatacagcacatatacagaattagccaaatggtataagacaatagaaaaaggctgtggattctttgaggacatcactagaaatcattctttgtctcaagttcacactcttagcatagaatattattgactaggctgtatgacattttgagctcttaactgtgaatggcattcattaagctcctttatcctatagattctatctttatgttcatctgaaatgaactattcatcagtactttctcctcccatcctaagcttctcattttaggaactgacatgataaggtggttctttcataactctaatgccatccaacatagccctgggagaggcatgttaggtttcagagattttctccatggagcaaggtgcagtgctagaatatggtggttgattcccaaacagagcagttaactttactcttggttctgagtctccaaataataatagccgacgtttattgagcacttactatgtgcccaaccctgttatgcctttctcaggctcatgataaatgtattagtctgttctcatgctgctattaaagacatacctgacactgggtaatttataaaggaaagaggtttaatggactcagttccacatggctggggacgcctcacaatcatggtggaaggcaaggaggagcaaatcatgtcttatacatggatggcagcaggcaaagagagaacttgtgcaggggaactctttataaaaccgtccgatcttgtgagacttattcactatcacaagaacagcacaggaaagttctgcccccgtgattcaattacctcccacttggtcccacccacgacacgtgggaattgtgggagctacaattcaagatgagatttggatgggacacagccaaaccatatcaataggtattattttatcccccattttataaatgaggaaacggaggcttagttgagtgagctgaccaatatcaccc

SEQ ID NO: 434 - protein, 578 aa, Homo sapiens
MAEESRKPSAPSPPDQTPEEDLVIVKVEEDHGWDQESSLHESNPLGQEVFRLRFRQLRYQETLGPREALIQLRALCHQWLRPDLNTKEQILELLVLEQFLTILPEELQTLVKEHQLENGEEVVTLLEDLERQIDILGRPVSARVHGHRVLWEEVVHSASAPEPPNTQLQSEATQHKSPVPQESQERAMSTSQSPTRSQKGSSGDQEMTATLLTAGFQTLEKIEDMAVSLIREEWLLDPSQKDLCRDNRPENFRNMFSLGGETRSENRELASKQVISTGIQPHGETAAKCNGDVIRGLEHEEARDLLGRLERQRGNPTQERRHKCDECGKSFAQSSGLVRHWRIHTGEKPYQCNVCGKAFSYRSALLSHQDIHNKVKRYHCKECGKAFSQNTGLILHQRIHTGEKPYQCNQCGKAFSQSAGLILHQRIHSGERPYECNECGKAFSHSSHLIGHQRIHTGEKPYECDECGKTFRRSSHLIGHQRSHTGEKPYKCNECGRAFSQKSGLIEHQRIHTGERPYKCKECGKAFNGNTGLIQHLRIHTGEKPYQCNECGKAFIQRSSLIRHQRIHSGEKSESISV

SEQ ID NO: 435 - DNA, 1669 bp, Homo sapiens
ggggcattgttcgtgccgcgcttctagcaacgccgggccggtaaccccctctccctccttgcgcgttccgggtctcgcaagcgcctccaaggtttgtcttgaagcatagctccagctggagggtaccttttaagctgttcaaggtcaagatgaatacaaactcaaaggaggttttatccctgggtgttcaagttcccgaggcatgggaagaacttctgacaatgaaagtggaagcaaaaagtcaccttcaatggcaggaatccagactgaaacgcagtaatccactggcaagggaaatcttccgaaggcactttcgacagctgtgctaccaagagacccctggaccaagggaggctcttactcgactccaggaactttgctaccagtggttgaggccacatgtgagcacaaaggagcagattttggatctgctggtgctggagcagtttctatccattctgcccaaggagctccagggctgggtgagggaacactgtccagagagtggagaagaggctgtgattttgctggaggatctggagagagagctcgatgaaccacaacatgagatggtggcccacagacacagacaagaagtcctctgtaaagagatggtgcctctagcagagcagacaccactgacccttcagtcccagcctaaggagccacagctcacatgtgactctgctcagaagtgccattctattggagagacagatgaagtaaccaagactgaggacagagagttggtgctaaggaaagactgtcctaagatagtggaaccacatgggaaaatgtttaatgagcagacctgggaggtatcacagcaggatccctcacatggagaagttggtgaacataaggataggatagagaggcagtggggaaacctcttaggagaggggcaacacaaatgtgatgaatgtgggaagagctttactcagagctcaggtctcattcgacatcaaagaattcatactggagaaagaccttatgaatgtaatgaatgtgggaaagccttcagtcgaagttctggtctttttaatcaccgaggaatccacaatatacagaaacggtaccactgcaaggagtgtgggaaggtcttcagtcagagtgcgggtcttatccagcatcagagaatccacaaaggagaaaagccgtatcagtgcagccagtgcagtaagagctacagtcggcgttcatttctcattgaacatcagagaagccacacaggggagcgacctcaccagtgcattgaatgtgggaaaagctttaatcgacactgcaacctcattcgccatcagaagatccacacagtggctgagctggtctagggcttggctatgagcaagttttccagatcaccacccaagttgtgtggggcaggttgagactagaaaatgcctctttcttcctttctccatgaaatgtgtttgaaacaaatcctgacttaaggcccagggacttccttaaaggaaagttgggtgtttgaagctactgttttctcttttgttcattttacctctttcttactcttactagctgtgtccctcttatttataatttatttatttttttgagatggctgctaaacccttctaataatataataaatggcactgccacagccaacatgcccaaaaaaaaaaaaaaaaaaaaaaaaaaaaaa

SEQ ID NO: 436 - protein, 394 aa, Homo sapiens
MNTNSKEVLSLGVQVPEAWEELLTMKVEAKSHLQWQESRLKRSNPLAREIFRRHFRQLCYQETPGPREALTRLQELCYQWLRPHVSTKEQILDLLVLEQFLSILPKELQGWVREHCPESGEEAVILLEDLERELDEPQHEMVAHRHRQEVLCKEMVPLAEQTPLTLQSQPKEPQLTCDSAQKCHSIGETDEVTKTEDRELVLRKDCPKIVEPHGKMFNEQTWEVSQQDPSHGEVGEHKDRIERQWGNLLGEGQHKCDECGKSFTQSSGLIRHQRIHTGERPYECNECGKAFSRSSGLFNHRGIHNIQKRYHCKECGKVFSQSAGLIQHQRIHKGEKPYQCSQCSKSYSRRSFLIEHQRSHTGERPHQCIECGKSFNRHCNLIRHQKIHTVAELV

SEQ ID NO: 437 - DNA, 2307 bp, Homo sapiens
ccaaagacatcctttggtgatacttactgtgggattcagagtggggtgcagaggacgaccctgcaaaggcacggactataagagagatctgtgcagctgcgcctcagggggtgtcctgggcccctgggcatgacaggagggggaccacttgcagttctactggaaaatttaccacccttccagaatcctctgaagatatacaggtcgcaactagagtgagacccgagtactgccttgggtcagaatggctagagaaccgagaaaaaacgcagccctggacgcccagtctgcagaagaccagacggggctcctgaccgtgaaggtggagaaggaggaagcctccgccttgacggcggaggtgagagcaccctgcagccctgctcggggccccgaacgctcccgccagcgcttccgaggcttccgctacccggaggctgcgggcccccgcgaggcgttgagccggctccgagaactctgcggacaatggctgcagcctgagatgcacagcaaggagcagatcctggagctgctggtgctggagcagttcctgaccatcctgccggggaatctgcagagctgggtgcgggagcagcatccagagagcggggaggaggtggtggtgctattggagtatttggagaggcagctggatgagccggcgccgcaggttcccgttggtgaccaggggcaagaactgctctgttgcaagatggcactattgacacaaactcaagggtctcaaagtagccagtgccagccaatgaaggctctgttcaagcatgaatctctgggatcccagcccttacacgatagagttctccaggttcctgggcttgcccagggagggtgctgcagagaagatgcaatggtagcttccaggctcactccagggtcccagggtttgctgaaaatggaagatgtggccctgaccctcactcctgggtggacacagctggattcatctcaggtgaacctctacagagatgaaaagcaggagaaccatagcagcctggtctcccttggtggtgaaatacagactaagagcagggacttgcctccagtcaagaagcttccagaaaaggagcatgggaagatatgccacctgagggaagacattgcccagattcctacacatgcagaagctggtgaacaggagggcaggttacaaagaaagcagaaaaatgccatagggagtaggcgacattattgccatgaatgtggaaagagttttgctcaaagttcaggcctgactaaacacaggagaatccacactggtgagaaaccctatgaatgtgaagactgtggaaagaccttcattgggagctctgcccttgtcattcatcagagagtccacactggtgagaagccatatgagtgtgaagaatgtggtaaggtcttcagtcacagctcaaaccttatcaaacaccagagaacccacactggggagaagccctatgagtgtgatgactgtgggaagaccttcagccagagctgcagcctccttgaacatcacaaaattcatactggggagaagccataccagtgcaatatgtgtggcaaagcctttaggcggaattcacatctcctgagacatcagaggattcatggtgataaaaatgttcagaatcctgagcacggggagtcctgggaaagtcagggtaggacggaaagccagtgggaaaatactgaggctcccgtgtcttataaatgtaatgagtgtgagagaagtttcacacggaatagaagtcttattgaacatcagaaaatccacactggtgagaaaccctatcagtgtgacacatgtggaaaaggtttcactcgaacttcataccttgttcaacatcagagaagccatgtagggaaaaaaactctttcacagtgacccatggtattcatgccaacattggtgctcatttgtcactgaactgaagccaccctggagcccttaatggttacagaaattgtggaccagggctttatttaccactatacatcatcgggtattagaaaatgtagtctggctgagacgatgagttatcttctacattctagaaagtgattggaagaagtcatttgataagaggccatgggagagtggtctggaagttgtaggacctaaaatagtttgttctcacccagtgtatttaaatggccttctggacttgttaattgccctcagccagcactttaggacatctggttggatggctctgatgtggggggctgctgctctgaccattcattttgcctctaatgaatctttcacaaattggtcagatccatgagaaaaaaaaaaaaaaaaaaaaa

SEQ ID NO: 438 - protein, 545 aa, Homo sapiens
MAREPRKNAALDAQSAEDQTGLLTVKVEKEEASALTAEVRAPCSPARGPERSRQRFRGFRYPEAAGPREALSRLRELCGQWLQPEMHSKEQILELLVLEQFLTILPGNLQSWVREQHPESGEEVVVLLEYLERQLDEPAPQVPVGDQGQELLCCKMALLTQTQGSQSSQCQPMKALFKHESLGSQPLHDRVLQVPGLAQGGCCREDAMVASRLTPGSQGLLKMEDVALTLTPGWTQLDSSQVNLYRDEKQENHSSLVSLGGEIQTKSRDLPPVKKLPEKEHGKICHLREDIAQIPTHAEAGEQEGRLQRKQKNAIGSRRHYCHECGKSFAQSSGLTKHRRIHTGEKPYECEDCGKTFIGSSALVIHQRVHTGEKPYECEECGKVFSHSSNLIKHQRTHTGEKPYECDDCGKTFSQSCSLLEHHKIHTGEKPYQCNMCGKAFRRNSHLLRHQRIHGDKNVQNPEHGESWESQGRTESQWENTEAPVSYKCNECERSFTRNRSLIEHQKIHTGEKPYQCDTCGKGFTRTSYLVQHQRSHVGKKTLSQ

SEQ ID NO: 439 - DNA, 1639 bp, Homo sapiens
caccagccagcctctgggtctgtagcaaccgcccagcgttgaggcgcggctcatgcccccagtatcccggtccagctattccgaggacatcgtgggctctcggagaaggcgacgcagctcctcggggagcccaccatccccgcagagcagatgttcctcttgggatggctgttcccgctctcactcccgcggccgtgagggcctcaggcctccttggagtgagttggacgtgggcgctctttacccctttagtcgctctgggtcgcgagggcggctcccaagattccgcaactacgccttcgcgtcctcctggtcgacctcgtatagtggatatcgctaccatcgtcactgctatgcagaagaacggcagtcagcggaagactacgagaaggaagagagccatcggcagaggaggctgaaggagagagagaggattggggaattgggagcgcctgaagtgtgggggccgtctccaaagttccctcagctagattctgacgaacataccccagttgaggatgaagaagaggtaacgcatcagaaaagcagcagttcagattccaactcggaagaacataggaaaaagaagaccagtcgttcaagaaacaagaaaaaaagaaagaataagtcgtctaaaagaaagcataggaaatattctgatagtgacagtaactcagagtctgacacaaattctgactctgatgatgataaaaagagagttaaagccaagaagaaaaagaagaaaaagaaacacaaaacaaagaaaaagaagaataagaaaaccaaaaaagaatccagtgactcaagctgtaaagactcagaagaggacttgtcagaagctacctggatggagcagccaaatgtggcagatactatggatttaatagggccagaagcacctataatacatacctctcaagatgaaaaacctttgaagtatggccatgctttgcttcccggtgaaggtgcagctatggctgagtatgtaaaagctggaaagcgaatcccacgaagaggtgaaattgggttgacaagtgaagagatcggttcttttgaatgctcaggttatgtcatgagtggtagcaggcatcgcagaatggaggctgtacgactgcgtaaggagaaccagatctacagtgctgatgagaagagagctcttgcatcctttaaccaagaagagagacgaaagagagaaagtaagattttagccagtttccgagagatggtgcacaaaaagacaaaagagaaagatgacaagtaaggacttacttgttgcacagcaggaattttaacaacaaaaattttatgtgaccaaaagtgttaaaaggctttacagtgctactgtacttaccatattagtaagtccctcaggaaaaagcttcttttgagatatctttagcagcttattttttgttattttaactttaaaaagtaatatgtgcacatggttttaaaaatattcaaccattataggaggagagttagtaaaaagtgaatctttcactttagcccctgacacctttcccccaaaaatatatattttggtgtcttatatacagaatatacattctgtgcatatacaagagtatatgttgcagcataaagattaaaagctattaaagttttttttcgctcgtta

SEQ ID NO: 440 - protein, 402 aa, Homo sapiens
MPPVSRSSYSEDIVGSRRRRRSSSGSPPSPQSRCSSWDGCSRSHSRGREGLRPPWSELDVGALYPFSRSGSRGRLPRFRNYAFASSWSTSYSGYRYHRHCYAEERQSAEDYEKEESHRQRRLKERERIGELGAPEVWGPSPKFPQLDSDEHTPVEDEEEVTHQKSSSSDSNSEEHRKKKTSRSRNKKKRKNKSSKRKHRKYSDSDSNSESDTNSDSDDDKKRVKAKKKKKKKKHKTKKKKNKKTKKESSDSSCKDSEEDLSEATWMEQPNVADTMDLIGPEAPIIHTSQDEKPLKYGHALLPGEGAAMAEYVKAGKRIPRRGEIGLTSEEIGSFECSGYVMSGSRHRRMEAVRLRKENQIYSADEKRALASFNQEERRKRESKILASFREMVHKKTKEKDDK

SEQ ID NO: 441 - DNA, 2732 bp, Homo sapiens
agcggagaagaaagcgctccgaagagctagagctgacactcggcgatgagctaagacgctgtttcagagcgtttgggtcctctgaggccccttgaccaggagtgtctctgaagatacagtccaaagaaagttctccaaaacaaggagaacagtctgaagctggggatggcaacagcattggtgagtgcccattccctggctcccctgaatctgaagaaggaggggcttcgggtagtgagggaggatcactactctacttgggaacagggattcaagctgcaaggaaacagtaaaggccttggacaggagccattgtgcaaacaattcaggcagttgcgttatgaagagaccacaggacctcgagaagcactaagtcggctccgggagctctgtcaacagtgctacagcccgagacccataccaaggagcagatcctggagctgctggtgctggagcagtttctgatcatcctgcctaaggagctccaggcccgggtgcaggagcatcacccagagagcagggaggacgtggttgttgttctggaggatttgcagctggatcttggagaaacaggacaacaggtggacccagaccagccaaagaaacaaaaaatacttgtggaggagatggcccctctgaaaggagtacaggaacagcaggttcggcatgagtgtgaagttacaaagcctgagaaagagaagggtgaggagacaaggattgagaatgggaagcttattgtagtaacagactcttgtggaagagtagagtcatctgggaaaatatctgaacccatggaggctcataatgagggctctaacttggaaaggcatcaggccaagcccaaagagaagattgagtataaatgctcagaacgtgagcagagattcatccagcacttggacctgattgaacatgcgagtacacacacgggaaagaaactctgcgagtctgatgtgtgtcagagttccagtcttacaggacataagaaagtcctctctagagagaaaggtcatcagtgtcatgagtgtgggaaagcctttcagaggagttcacacctcgtcagacatcagaaaatccatcttggtgagaagccttatcagtgcaatgagtgtggcaaagtctttagccagaatgcaggccttttggaacatctcagaattcatactggagagaaaccttatctatgtatccattgtggaaaaaattttaggcgcagctctcaccttaatcgacatcagagaattcacagtcaggaggagccctgtgagtgcaaggagtgtggaaaaacctttagtcaggccttactcctcacccaccatcagagaatccatagtcactccaaaagccatcaatgtaacgagtgtggaaaagctttcagtttgacctcagaccttattcgacaccacagaattcatactggagaaaaacctttcaagtgtaacatatgccagaaagccttccgactaaactcacaccttgctcagcatgtaagaatccacaatgaagaaaaaccctatcagtgtagtgaatgtggagaagccttcaggcaaaggtcaggtctttttcaacatcagagatatcaccacaaagacaaactggcttgatgaggtgttctctccttgtagaacatcagagaaggcacattgactagcaaacagcactttaggaaaagtcaccgtagcccactgtggcatcagaaaattcttgggggctgagttggaggctccctgcctctattctctctcctttgctttccttgaagtcagctttggaccacaataatttcactgtagatgatatgctaggatcaaagttaaacagcattcttcactgcaggacatctcagagcatgtaacataactgcatgattatatactctaagcaatagagagcttcatgactgagtaagagttttgaagtcagcagtgaatcaagtgcccacagatttgcaggcttaagcagaacaagggaagattgatatttttggatatgctatagcagctttctcctatgaaataaaactgatgatgtttggaagtatactactctcaaaggtgtctttaaagtacaggttaatggtgaacattttcccccagtggcttcacctcattcctcccactggccttaccccttccttccccagtggaagcattttcaaaagcaaagataattttcgctggtgaacttcagaacttgccttcagggttagcttcatgtaattttaccatttcccatccccattccccaccacattatgtcaagattcaagttataaattaacgttttacttagactttgaaagagatttcatgagtaatttgaatgaaccttgctgaattaatctgaatagcaactgtctgacttgataactccagtgccagtatagtggctgctgcatagacactattcagtaaatgtctgatgaaagaaattggactttttccctttaatactgatgatgcaattttgaaatgttgcttgttctggaatacttcggaagttaaacaataaagtcagcttggagaggagatcatgatctttatactgtgaatagcagaatgtcacagatgaagaatattaaaattaggggcgtccactccaaaacatatcaccagagtgacaacttcagccctcagcctctgcaatccatatatatcctggtcttgggagtccatagaatactgtttccttctaataaaggtttcaaacaaaaaaaaaaaaaaaaaaaaaaa

SEQ ID NO: 442 - protein, 325 aa, Homo sapiens [sequence omitted]

SEQ ID NO: 443 - DNA, 3062 bp, Homo sapiens
agcggagaagaaagcgctccgaagagctagagctgacactcggcgatgagctaagacgctgtttcagagcgtttgggtcctctgaggccccttgaccaggagtgtctctgaagatacagtccaaagaaagttctccaaaacaaggagaacagtctgaagctggggatggcaacagcattggtgagtgcccattccctggctcccctgaatctgaagaaggaggggcttcgggtagtgagggaggatcactactctacttgggaacagggattcaagctgcaaggaaacagtaaaggccttggacaggagccattgtgcaaacaattcaggcagttgcgttatgaagagaccacaggacctcgagaagcactaagtcggctccgggagctctgtcaacagtgctacagcccgagacccataccaaggagcagatcctggagctgctggtgctggagcagtttctgatcatcctgcctaaggagctccaggcccgggtgcaggagcatcacccagagagcagggaggacgtggttgttgttctggaggatttgcagctggatcttggagaaacaggacaacaggtggtaagggtcagatgtgctctttttcaggaatgcaggaattgagatctctggccagacaggtggacatgggctcatcagcggaaggagaattactaagctttgattcagtttttttccagtctagctgttaatttccttaggtcttacctcaaccttacctggcccttgcttggagaaaactgaatgtgcaccagattccccatcttcttttctttgcccctctggggtttctctttcttctcttttttaacacctaggtgttttactgaacagcagtttcctaaacccacatatatctaattatgcctccatatacctaattgtccctaggacccagaccagccaaagaaacaaaaaatacttgtggaggagatggcccctctgaaaggagtacaggaacagcaggttcggcatgagtgtgaagttacaaagcctgagaaagagaagggtgaggagacaaggattgagaatgggaagcttattgtagtaacagactcttgtggaagagtagagtcatctgggaaaatatctgaacccatggaggctcataatgagggctctaacttggaaaggcatcaggccaagcccaaagagaagattgagtataaatgctcagaacgtgagcagagattcatccagcacttggacctgattgaacatgcgagtacacacacgggaaagaaactctgcgagtctgatgtgtgtcagagttccagtcttacaggacataagaaagtcctctctagagagaaaggtcatcagtgtcatgagtgtgggaaagcctttcagaggagttcacacctcgtcagacatcagaaaatccatcttggtgagaagccttatcagtgcaatgagtgtggcaaagtctttagccagaatgcaggccttttggaacatctcagaattcatactggagagaaaccttatctatgtatccattgtggaaaaaattttaggcgcagctctcaccttaatcgacatcagagaattcacagtcaggaggagccctgtgagtgcaaggagtgtggaaaaacctttagtcaggccttactcctcacccaccatcagagaatccatagtcactccaaaagccatcaatgtaacgagtgtggaaaagctttcagtttgacctcagaccttattcgacaccacagaattcatactggagaaaaacctttcaagtgtaacatatgccagaaagccttccgactaaactcacaccttgctcagcatgtaagaatccacaatgaagaaaaaccctatcagtgtagtgaatgtggagaagccttcaggcaaaggtcaggtctttttcaacatcagagatatcaccacaaagacaaactggcttgatgaggtgttctctccttgtagaacatcagagaaggcacattgactagcaaacagcactttaggaaaagtcaccgtagcccactgtggcatcagaaaattcttgggggctgagttggaggctccctgcctctattctctctcctttgctttccttgaagtcagctttggaccacaataatttcactgtagatgatatgctaggatcaaagttaaacagcattcttcactgcaggacatctcagagcatgtaacataactgcatgattatatactctaagcaatagagagcttcatgactgagtaagagttttgaagtcagcagtgaatcaagtgcccacagatttgcaggcttaagcagaacaagggaagattgatatttttggatatgctatagcagctttctcctatgaaataaaactgatgatgtttggaagtatactactctcaaaggtgtctttaaagtacaggttaatggtgaacattttcccccagtggcttcacctcattcctcccactggccttaccccttccttccccagtggaagcattttcaaaagcaaagataattttcgctggtgaacttcagaacttgccttcagggttagcttcatgtaattttaccatttcccatccccattccccaccacattatgtcaagattcaagttataaattaacgttttacttagactttgaaagagatttcatgagtaatttgaatgaaccttgctgaattaatctgaatagcaactgtctgacttgataactccagtgccagtatagtggctgctgcatagacactattcagtaaatgtctgatgaaagaaattggactttttccctttaatactgatgatgcaattttgaaatgttgcttgttctggaatacttcggaagttaaacaataaagtcagcttggagaggagatcatgatctttatactgtgaatagcagaatgtcacagatgaagaatattaaaattaggggcgtccactccaaaacatatcaccagagtgacaacttcagccctcagcctctgcaatccatatatatcctggtcttgggagtccatagaatactgtttccttctaataaaggtttcaaacaaaaaaaaaaaaaaaaaaaaaaa

SEQ ID NO: 444 - protein, 325 aa, Homo sapiens [sequence omitted]

SEQ ID NO: 445 - DNA, 2328 bp, Homo sapiens
agcggagaagaaagcgctccgaagagctagagctgacactcggcgatgagctaagacgctgtttcagagcgtttgggtcctctgaggccccttgaccaggagtgtctctgaagatacagtccaaagaaagttctccaaaacaaggagaacagtctgaagctggggatggcaacagcattggacccagaccagccaaagaaacaaaaaatacttgtggaggagatggcccctctgaaaggagtacaggaacagcaggttcggcatgagtgtgaagttacaaagcctgagaaagagaagggtgaggagacaaggattgagaatgggaagcttattgtagtaacagactcttgtggaagagtagagtcatctgggaaaatatctgaacccatggaggctcataatgagggctctaacttggaaaggcatcaggccaagcccaaagagaagattgagtataaatgctcagaacgtgagcagagattcatccagcacttggacctgattgaacatgcgagtacacacacgggaaagaaactctgcgagtctgatgtgtgtcagagttccagtcttacaggacataagaaagtcctctctagagagaaaggtcatcagtgtcatgagtgtgggaaagcctttcagaggagttcacacctcgtcagacatcagaaaatccatcttggtgagaagccttatcagtgcaatgagtgtggcaaagtctttagccagaatgcaggccttttggaacatctcagaattcatactggagagaaaccttatctatgtatccattgtggaaaaaattttaggcgcagctctcaccttaatcgacatcagagaattcacagtcaggaggagccctgtgagtgcaaggagtgtggaaaaacctttagtcaggccttactcctcacccaccatcagagaatccatagtcactccaaaagccatcaatgtaacgagtgtggaaaagctttcagtttgacctcagaccttattcgacaccacagaattcatactggagaaaaacctttcaagtgtaacatatgccagaaagccttccgactaaactcacaccttgctcagcatgtaagaatccacaatgaagaaaaaccctatcagtgtagtgaatgtggagaagccttcaggcaaaggtcaggtctttttcaacatcagagatatcaccacaaagacaaactggcttgatgaggtgttctctccttgtagaacatcagagaaggcacattgactagcaaacagcactttaggaaaagtcaccgtagcccactgtggcatcagaaaattcttgggggctgagttggaggctccctgcctctattctctctcctttgctttccttgaagtcagctttggaccacaataatttcactgtagatgatatgctaggatcaaagttaaacagcattcttcactgcaggacatctcagagcatgtaacataactgcatgattatatactctaagcaatagagagcttcatgactgagtaagagttttgaagtcagcagtgaatcaagtgcccacagatttgcaggcttaagcagaacaagggaagattgatatttttggatatgctatagcagctttctcctatgaaataaaactgatgatgtttggaagtatactactctcaaaggtgtctttaaagtacaggttaatggtgaacattttcccccagtggcttcacctcattcctcccactggccttaccccttccttccccagtggaagcattttcaaaagcaaagataattttcgctggtgaacttcagaacttgccttcagggttagcttcatgtaattttaccatttcccatccccattccccaccacattatgtcaagattcaagttataaattaacgttttacttagactttgaaagagatttcatgagtaatttgaatgaaccttgctgaattaatctgaatagcaactgtctgacttgataactccagtgccagtatagtggctgctgcatagacactattcagtaaatgtctgatgaaagaaattggactttttccctttaatactgatgatgcaattttgaaatgttgcttgttctggaatacttcggaagttaaacaataaagtcagcttggagaggagatcatgatctttatactgtgaatagcagaatgtcacagatgaagaatattaaaattaggggcgtccactccaaaacatatcaccagagtgacaacttcagccctcagcctctgcaatccatatatatcctggtcttgggagtccatagaatactgtttccttctaataaaggtttcaaacaaaaaaaaaaaaaaaaaaaaaaa

SEQ ID NO: 446 - protein, 325 aa, Homo sapiens [sequence omitted]

SEQ ID NO: 447 - DNA, 3082 bp, Homo sapiens
ctggaggcgccggcagcgcccgccagacccgccagcccagcggcccgggctctggggaaaccggcgctcccgacaggggagcaccgggcctctgagctccctcgggagcctttcacgaggtcagctacgtctttgttgtgcgcgttcctgaacttttggtccattaaccaacaattagacacgccggtattcagtgcctggcgcggtgctagatgctgggtgtaatctcagaaaaatacattcaggggcgcgcctgagggtgctggctgctggcatctcaggtgctttacgtgcattcgtgaagaagcccatcagtatttcttgaataccagaccccaagctaagtgaagctttagcctctaagctcaacatgtatgaagctttgccaggccctgctcctgaaaatgaagatggccttgtgaaagtgaaggaggaagatcccacctgggagcaggtgtgcaactcacaggagggcagctcccacactcaggagatttgccgcctgcgctttcggcacttctgctaccaggaggctcacggaccccaggaagctctggcccaactccgagaactttgtcatcaatggctgagaccggagatgcacaccaaggaacagataatggaactgctggtgctggagcagttcctgaccatcctgcccaaggagctccagccctgtgtgaagacatatcctctggagagtggagaggaggcagtgacagtgctggagaatctagagacaggaagtggagacacaggacaacaggcctctgtctatattcagggacaggacatgcacccaatggtggcagaatatcaaggagtctctttggagtgtcagagcctccagctcctgcctgggataaccaccctgaagtgtgaacctccacagcgtcctcaagggaacccccaagaagtgagtgggcctgttccccacggatcagctcatctccaggaaaaaaaccccagagacaaggctgtagtgcctgtgtttaacccagtcaggtcccagacattggtgaagactgaggaagaaacagcccaggccgttgctgcagagaagtggtcacatctgagtctgactcggaggaacctctgtgggaactcagctcaggagacagttatgagcctcagtccgatgactgaagaaattgtaactaaagatagattgtttaaagcaaagcaagaaacttctgaagaaatggaacaaagtggagaagcctcaggaaagcccaacagagagtgtgcaccccagattccttgtagtactcctattgctactgaaaggacagttgcacatttgaacactctgaaggaccgtcacccaggtgatttgtgggcccgcatgcacatctcatccctggaatatgctgcaggagacattacccgaaaagggagaaaaaaagacaaagctcgagtgagtgaactgctccaaggcctctcattctctggtgactcagatgtggaaaaagataatgagcctgagatccagcctgctcaaaagaagttaaaggtatcatgtttcccagaaaagagttggaccaaaagagacattaaacccaattttccaagctggtcagcactggattctggacttttgaatctcaagagcgaaaagttgaacccagtagagctttttgaattattttttgatgatgaaacattcaacttaattgtcaatgaaaccaataattatgcttctcagaaaaatgtcagcttggaagtcacagttcaggaaatgaggtgtgtgtttggtgtcttacttttgagtggatttatgaggcatcctagaagggaaatgtattgggaagtctctgacaccgatcagaacctggttagagatgcaatcagaagggacagatttgaattgattttctcaaacctgcactttgcagataatggccacctagatcaaaaagataagtttacaaagttgagacctctcataaaacaaatgaataaaaatttcctcttgtatgctcccctggaagaatactattgctttgataagtcaatgtgtgaatgctttgatagtgaccaattcctgaatggaaagcctattagaattggctataaaatttggtgtggtacaaccacacagggttatctggtttggtttgaaccctatcaagaagaatcaactatgaaggtagatgaggatcctgatcttgggttaggtggaaatctagtgatgaacttcgctgatgttcttttagagagaggtcagtatccctatcacctgtgttttgatagcttctttacaagtgtcaaattgttgtcagccttgaaaaagaagggggtgagggcaacaggaacaattcgtgagaacaggaccgaaaaatgtccccttatgaatgtagaacatatgaaaaaaatgaagagagggtattttgatttccgaatagaagaaaacaatgagataattttgtgtcgttggtatggggatggcattatcagtctgtgctccaatgctgtgggcatagaaccagtcaatgaggtaagctgttgtgatgctgataacgaagaaatccctcagataagtcaaccatccatagtaaaagtgtatgatgaatgcaaggaaggtgtagctaaaatggatcaaattatttcgaaatacagggtgaggataagaagcaagaaatggtactcaattttggtgagctacatgattgatgtagccatgaacaatgcatggcaactacacagagcctgtaacccaggtgcttctctagaccccttggattttcggagatttgttgcacatttctacttggaacacaatgctcatctgtcagattagggtacataaaatggacatagtgcagacattaataagacatagaaaaataataattatacatgctgttgtaccctcccaaagtaaatctgatatatgtaatgaagttattaaataatacttttaaaaatcagacatttatatagagtttcaaagactattgtaacaagtaatgttaaaaattgtctgtgagaatgttgaactgtagtacctttctctatgtcaagttttgtgtcagacatgggaaatcatgtatttgttcaattgaaaaaaaaaaaaaaaaaa

SEQ ID NO: 448 - protein, 809 aa, Homo sapiens
MYEALPGPAPENEDGLVKVKEEDPTWEQVCNSQEGSSHTQEICRLRFRHFCYQEAHGPQEALAQLRELCHQWLRPEMHTKEQIMELLVLEQFLTILPKELQPCVKTYPLESGEEAVTVLENLETGSGDTGQQASVYIQGQDMHPMVAEYQGVSLECQSLQLLPGITTLKCEPPQRPQGNPQEVSGPVPHGSAHLQEKNPRDKAVVPVFNPVRSQTLVKTEEETAQAVAAEKWSHLSLTRRNLCGNSAQETVMSLSPMTEEIVTKDRLFKAKQETSEEMEQSGEASGKPNRECAPQIPCSTPIATERTVAHLNTLKDRHPGDLWARMHISSLEYAAGDITRKGRKKDKARVSELLQGLSFSGDSDVEKDNEPEIQPAQKKLKVSCFPEKSWTKRDIKPNFPSWSALDSGLLNLKSEKLNPVELFELFFDDETFNLIVNETNNYASQKNVSLEVTVQEMRCVFGVLLLSGFMRHPRREMYWEVSDTDQNLVRDAIRRDRFELIFSNLHFADNGHLDQKDKFTKLRPLIKQMNKNFLLYAPLEEYYCFDKSMCECFDSDQFLNGKPIRIGYKIWCGTTTQGYLVWFEPYQEESTMKVDEDPDLGLGGNLVMNFADVLLERGQYPYHLCFDSFFTSVKLLSALKKKGVRATGTIRENRTEKCPLMNVEHMKKMKRGYFDFRIEENNEIILCRWYGDGIISLCSNAVGIEPVNEVSCCDADNEEIPQISQPSIVKVYDECKEGVAKMDQIISKYRVRIRSKKWYSILVSYMIDVAMNNAWQLHRACNPGASLDPLDFRRFVAHFYLEHNAHLSD

SEQ ID NO: 449 - DNA, 2628 bp, Homo sapiens
ggcggttgatcggtcattggggtgctgcagccccgccacctgttccgtagcttgccggtgccccgaaggtgtcttctcctaaggaagattaaatcagaaaattttaaatcacagttatccctttacttaaagccagagtaagccttccaaattaaccccaggaatggcttcaacagaggaacagtacgatcttaagattgtgaaagtggaggaagaccctatctgggaccaagaaacccaccttcgagggaacaacttttctggccaagaagcctcccgacaactttttaggcagttttgttaccaagagactcctggtccccgagaagctctgagccggctccgagaactctgtcatcagtggctaaggccagaaatccacaccaaagagcaaatcttggagctgctggtgctggagcaattcctgactatcctgcctgaggagctccaggcctgggtgcgggagcaccatccggagagtggggaggaggctgtggctgtagttgaagatctggaacaagagcttagtgagccagggaaccaggctccagaccatgaacatggacattctgaagtgctcttggaggatgtggaacatctgaaggtcaagcaggaaccaacagacatacagcttcagcctatggtgacacagctcagatatgaatctttttgcctccaccaatttcaagaacaagatggtgaaagtatacctgagaaccaggagttggcatcaaagcaagaaatcttaaaagaaatggaacatttgggggatagcaaactccaaagagatgtatctttggattctaagtacagagaaacttgtaaacgagacagcaaggcagaaaagcagcaggcacattccactggagagagacgccacaggtgcaatgaatgtgggaaaagcttcactaagagttcagtactcattgagcaccagagaatccacactggggagaagccatatgaatgtgaagaatgtgggaaggccttcagccggaggtcaagcctgaatgaacatcggcggagccacactggagagaaaccctatcaatgtaaggagtgtgggaaagccttcagtgccagcaatggcctcactcgacacagaagaatccacacaggggaaaaaccatatgaatgcaaagtgtgtgggaaggctttcctcctcagctcatgccttgttcagcatcagaggatacacactggagagaagcgctatcagtgtcgtgagtgtggcaaagccttcattcagaatgcagggcttttccagcatctccgagtccacactggtgagaaaccctatcagtgcagtcagtgcagtaaactctttagtaagcggacacttcttaagaaacatcagaaaatccacactggagagagaccataagggtgatgagtttgggaaagccttcagtcatcattgcaaccttattaggcattttagaatccatactgttccagcagaactggactaattctgtggaccctcagacccctaaatggggccgtcttggaaagtaagattttcaagtggcttattctgttcttataaaatttattttgtattgcattgaaccacttgtctacaaaccaggtgttggtgtctcctgtgtggatgactgtgattgtagggggttgctgggtggccttcttattccctagcctttggtccatttcttatgatttcctttaaaggcaccaaatcttatctggaaataaattgttatggaggggctgtttttgagcaatactgcatattgaacaattctaaaagaccagtatctatgtatacttttaaaaaaaagatttgctaagatcaaaggatattcagaggtgcatctttttctgtaagagtgacattttaaacaaatgtaaggttttggggaataagaatcgtccacattcccacaggaaatcattgctatggtctcccctaggaatgtgatagatagcttctataattatgcagcattatccatagtatgaaacctgtagttttaatggtttagaaatctatgtctcatttcatatctaactcatgtttttgatacgaatcaatatatatgttgatatcatgagttaatatgagtttgacatgaatcatcaacatagtatatacatatcaacataactatgttgatgattcatatcaaattctcaatgcaggtcattactgtaagttttccatttttgttacaaataataagtaagatgatactttaaaatctctgttcttcacaaggtacctctttaattcatagccttttatgtcagcattattcttcttttgggggttggtcagcaactttgagtgccattgcaagcagcatcatttaagtagttttataaagaaaagaagtctgatatcttgggcagcttgctgcttactggggagaccagcatgcttagacacttattgccagggttaaacatatgctctggcaccaagttcaaatctttcctccccatttgtgagctgtgggactttaggcaagttatctaaatgctgctatgctatagtctccccacctgtaaaacagaggatgataccaataccttcctcatagggtacataagattaaataaatacaaacttgtaccaaaaaaaaaaaaaaaaaaaaaaaaaaaaaa

SEQ ID NO: 450 - protein, 209 aa, Homo sapiens
MEHLGDSKLQRDVSLDSKYRETCKRDSKAEKQQAHSTGERRHRCNECGKSFTKSSVLIEHQRIHTGEKPYECEECGKAFSRRSSLNEHRRSHTGEKPYQCKECGKAFSASNGLTRHRRIHTGEKPYECKVCGKAFLLSSCLVQHQRIHTGEKRYQCRECGKAFIQNAGLFQHLRVHTGEKPYQCSQCSKLFSKRTLLKKHQKIHTGERP

SEQ ID NO: 451 - DNA, 3179 bp, Homo sapiens
cagagagagagagaaaaactgctgaccctgtaagagagaactggccatcttgcagacagacagagccccgagtgttctttcaactacctgccacccatccaacaactcccctcggacctcagtatgggctggaacctgacacttggcatgacagtgaccccaggcatccaaaccatgacagttccatcagctctccaaatgagagacagagtctcactatgtcgcccaggcttgtcttgaactcctggactcaagagatcctcccatctcggcctctcaaagtgttgggattacaggcgtgagctattacacctgacttaagtctccattttcatatctatactttgggattccagaagacagaggtttgagtgtaaaacacaaaataacaaaaccacaacaaaaacaactctgtattctcgtccccaccattaccatctctcctttgtgatgtcaaagagaccagaggaagtggacagactcggggaagaatagccagagtaagccttccaaattaaccccaggaatggcttcaacagaggaacagtacgatcttaagattgtgaaagtggaggaagaccctatctgggaccaagaaacccaccttcgagggaacaacttttctggccaagaagcctcccgacaactttttaggcagttttgttaccaagagactcctggtccccgagaagctctgagccggctccgagaactctgtcatcagtggctaaggccagaaatccacaccaaagagcaaatcttggagctgctggtgctggagcaattcctgactatcctgcctgaggagctccaggcctgggtgcgggagcaccatccggagagtggggaggaggctgtggctgtagttgaagatctggaacaagagcttagtgagccagggaaccaggctccagaccatgaacatggacattctgaagtgctcttggaggatgtggaacatctgaaggtcaagcaggaaccaacagacatacagcttcagcctatggtgacacagctcagatatgaatctttttgcctccaccaatttcaagaacaagatggtgaaagtatacctgagaaccaggagttggcatcaaagcaagaaatcttaaaagaaatggaacatttgggggatagcaaactccaaagagatgtatctttggattctaagtacagagaaacttgtaaacgagacagcaaggcagaaaagcagcaggcacattccactggagagagacgccacaggtgcaatgaatgtgggaaaagcttcactaagagttcagtactcattgagcaccagagaatccacactggggagaagccatatgaatgtgaagaatgtgggaaggccttcagccggaggtcaagcctgaatgaacatcggcggagccacactggagagaaaccctatcaatgtaaggagtgtgggaaagccttcagtgccagcaatggcctcactcgacacagaagaatccacacaggggaaaaaccatatgaatgcaaagtgtgtgggaaggctttcctcctcagctcatgccttgttcagcatcagaggatacacactggagagaagcgctatcagtgtcgtgagtgtggcaaagccttcattcagaatgcagggcttttccagcatctccgagtccacactggtgagaaaccctatcagtgcagtcagtgcagtaaactctttagtaagcggacacttcttaagaaacatcagaaaatccacactggagagagaccataagggtgatgagtttgggaaagccttcagtcatcattgcaaccttattaggcattttagaatccatactgttccagcagaactggactaattctgtggaccctcagacccctaaatggggccgtcttggaaagtaagattttcaagtggcttattctgttcttataaaatttattttgtattgcattgaaccacttgtctacaaaccaggtgttggtgtctcctgtgtggatgactgtgattgtagggggttgctgggtggccttcttattccctagcctttggtccatttcttatgatttcctttaaaggcaccaaatcttatctggaaataaattgttatggaggggctgtttttgagcaatactgcatattgaacaattctaaaagaccagtatctatgtatacttttaaaaaaaagatttgctaagatcaaaggatattcagaggtgcatctttttctgtaagagtgacattttaaacaaatgtaaggttttggggaataagaatcgtccacattcccacaggaaatcattgctatggtctcccctaggaatgtgatagatagcttctataattatgcagcattatccatagtatgaaacctgtagttttaatggtttagaaatctatgtctcatttcatatctaactcatgtttttgatacgaatcaatatatatgttgatatcatgagttaatatgagtttgacatgaatcatcaacatagtatatacatatcaacataactatgttgatgattcatatcaaattctcaatgcaggtcattactgtaagttttccatttttgttacaaataataagtaagatgatactttaaaatctctgttcttcacaaggtacctctttaattcatagccttttatgtcagcattattcttcttttgggggttggtcagcaactttgagtgccattgcaagcagcatcatttaagtagttttataaagaaaagaagtctgatatcttgggcagcttgctgcttactggggagaccagcatgcttagacacttattgccagggttaaacatatgctctggcaccaagttcaaatctttcctccccatttgtgagctgtgggactttaggcaagttatctaaatgctgctatgctatagtctccccacctgtaaaacagaggatgataccaataccttcctcatagggtacataagattaaataaatacaaacttgtacttaaaatgtagctctcaataaatatgcattatgatttacatacgaaataatagcatttaacaaatgtaggtagaattttaagtatcatgttaaaattaggatacgaaatgcctctgctgacattcttgttactcttttctccacagtcaaaacctgaatcagaatatttcaaaagagaggaaataaaagttcagcttaaaactgttctgccctaaaaaa

SEQ ID NO: 452 - protein, 406 aa, Homo sapiens
MASTEEQYDLKIVKVEEDPIWDQETHLRGNNFSGQEASRQLFRQFCYQETPGPREALSRLRELCHQWLRPEIHTKEQILELLVLEQFLTILPEELQAWVREHHPESGEEAVAVVEDLEQELSEPGNQAPDHEHGHSEVLLEDVEHLKVKQEPTDIQLQPMVTQLRYESFCLHQFQEQDGESIPENQELASKQEILKEMEHLGDSKLQRDVSLDSKYRETCKRDSKAEKQQAHSTGERRHRCNECGKSFTKSSVLIEHQRIHTGEKPYECEECGKAFSRRSSLNEHRRSHTGEKPYQCKECGKAFSASNGLTRHRRIHTGEKPYECKVCGKAFLLSSCLVQHQRIHTGEKRYQCRECGKAFIQNAGLFQHLRVHTGEKPYQCSQCSKLFSKRTLLKKHQKIHTGERP

SEQ ID NO: 453 - DNA, 2242 bp, Homo sapiens
cggcgtcggccttccactgtggggttaaatctcatcccgcggctctcctcctgtcggtcctgcagttcttttgtccccgggtagagggatcttctgcagaaatagcgctggaagctagagtgaggcctgagtactgccttggcctaggatggctagagaattaagtgaaagcacagccctggatgcccagtctacagaagaccagatggagcttctggtcataaaggtggaggaagaagaagccggttttcccagtagcccagatctgggttctgagggctcccgcgagcgcttccgaggcttccgctacccggaggctgcaggcccccgcgaggcgctgagtcggctccgagagctctgccgacagtggctgcagcctgagatgcacagcaaggagcagatcctggagctgctggtgctggagcagttcctgaccatcctgccggggaatctgcagagctgggtgcgggagcagcatccagagagcggggaggaggtggtggtgctattggagtatttggagaggcagctggatgagccggcgccgcaggtttcaggtgttgaccaggggcaagaactgctctgttgcaagatggcactattgacaccagccccagggtcacaaagtagccaatttcagctaatgaaggctctgctcaagcatgaatctgtgggatcccagcctttacaagatagagttctccaggtccccatgcttgcccatggaggatgctgcagagaagatgcagtggtagcttctaggcttactccagagtcccaggggttgttgaaagtggaagatgtggccctgaccctcacccctgaatggacacagcaggattcatctcaggggaatctctgtagagatgaaaagcaggagaaccatggcagcctggtctccctgggtgatgaaaaacagactaagagcagggacttgcctccagctgaggagcttccagaaaaggagcatgggaagatatcgtgccacctgagagaagacattgcccagattcctacatgtgcagaagctggtgaacaggagggcaggctacaaagaaagcagaaaaatgccacaggagggaggcggcacatctgccatgaatgtggaaagagttttgctcaaagctcaggcctgagtaaacacaggagaatccacactggtgagaaaccctacgaatgtgaagagtgtggcaaagccttcattgggagctctgcccttgtcattcatcagagagtccacactggtgagaagccatatgagtgtgaagaatgtggtaaggccttcagtcatagctcagaccttatcaagcatcagagaacccacactggggagaagccctatgagtgtgatgactgtgggaagaccttcagccagagctgcagcctccttgaacatcacagaatccacactggggagaagccgtatcagtgcagtatgtgtggcaaagcctttaggcgaagttcacatctcctgagacatcagaggatccatactggggataaaaatgttcaggaacctgagcagggagaggcctggaaaagtaggatggaaagccagttggaaaatgttgaaactcccatgtcttataaatgtaatgagtgtgaaagaagtttcactcagaatacaggcctcattgaacatcaaaaaatccacactggtgagaaaccctatcagtgtaatgcgtgtggaaaaggcttcacccgaatttcataccttgttcaacatcagagaagccatgtagggaaaaacatcctatcacagtgacccatgccatacatgccagttggtgctcatttgtcactgatctgaagccactccccctggagtctcaactatagaaattgtgggctgggctttatttaccactacacattatcaggtgttagaaaatgtagactgggttagacaaattatcttctaagttctagaaggggtttgtaatcaaaacatatttgataggaggctacgggagagttgtctagaagaggtaagacctgaaactgtttgttctctcccactagaattaaatggatgtttagactggctacttgccctaaaccagcacttggtgatgtctactgggtggatggttgtgatttgggggctgcttctctgaccattctttttgactgtaatgaatcctccacagttggtcagattcataaagtcttatatccccctctgtgccttttctgcaggtgctaataaatgtttattgaatgtaaaaaaaaaaaaaaaaaa

SEQ ID NO: 454 - protein, 538 aa, Homo sapiens
MARELSESTALDAQSTEDQMELLVIKVEEEEAGFPSSPDLGSEGSRERFRGFRYPEAAGPREALSRLRELCRQWLQPEMHSKEQILELLVLEQFLTILPGNLQSWVREQHPESGEEVVVLLEYLERQLDEPAPQVSGVDQGQELLCCKMALLTPAPGSQSSQFQLMKALLKHESVGSQPLQDRVLQVPMLAHGGCCREDAVVASRLTPESQGLLKVEDVALTLTPEWTQQDSSQGNLCRDEKQENHGSLVSLGDEKQTKSRDLPPAEELPEKEHGKISCHLREDIAQIPTCAEAGEQEGRLQRKQKNATGGRRHICHECGKSFAQSSGLSKHRRIHTGEKPYECEECGKAFIGSSALVIHQRVHTGEKPYECEECGKAFSHSSDLIKHQRTHTGEKPYECDDCGKTFSQSCSLLEHHRIHTGEKPYQCSMCGKAFRRSSHLLRHQRIHTGDKNVQEPEQGEAWKSRMESQLENVETPMSYKCNECERSFTQNTGLIEHQKIHTGEKPYQCNACGKGFTRISYLVQHQRSHVGKNILSQ

SEQ ID NO: 455 - DNA, 835 bp, Homo sapiens
atgggagggctctggcatccgggatggaggcgcgtcgctttctgtggctggcgctggatccaccctgggtctccagccacggctgcagagagggtagcgcggtttcttaggccagagtggagtgggacaggaggtgcccagagacgactgtggtggcttgagacatggaagcgctgcagcctttgagcccagtatccagcattgcagccgccgcggcggtctaagagctcaaaccctttcaggcgcgcgcaggaggaggagcggcgggggcggcggaacaagacgaccctcacttaacgtggccgctgtcgccgtgggcatgctgggggcgtcctacgctgccgttcccctttatcggctctattgccagactactggacttggaggatcagcagtttcaggtcatgcctcagaccagattgaaaacatggtgcctgttaaggatcgaatcattaaaattaactttgatgcagatgtgcatgcaagtcttcagtggaactttagacttcagcaaacagaaatatatgtggtgccaggagacactgcactggggttttacagagctaagaatcctgctgacaaaccactaattggaatttctacatacaatgttgttccatttgaagctggacagtatttcaataaaatacagtgcttctgttttgaagaacaaaggcttaatccccaagaggaagtagatatgccagtgtttttctacattgatcctgaatttgctaaagacccaagaatgattaatgttgatcttatcactctttcttacactttttttgaagcaaaggaagggcacaatttgccagttccaggatataactga

SEQ ID NO: 456 - DNA, 2446 bp, Homo sapiens
cccagtattatcgaagatcaagcaagaaagaaaaagacagaaaacaaatgcgaaaccacagcttccttggctctttttgcccatatgccgaagagccgagcattgccgccaagcattggcaccggccatgcggagactagcgaaagctttgcaattcctctacttctcagtgatgactcgggctttctccttacattcttgatgggcatgaccggtcctgtcagctgggtggccaatttctgttcttcagcagaactgtctcccttcttgggggccgagggctttctggggaagaggatgagtttggagcaatactcattcagacgctgcacattggcctgcagggaatcggtggacttgttctgcctcctcggatccacagagatgccagtggtccgggtcaccttcttgtgaatgcccgccaccctgagctccaggctgaagcctctgccggcgcgcaccttgatgtgataacgcacagcagggcacagcacaatgggccagatgggtcccgactctccgggcgcggggcgatgcagcgccctttggcttgccgggccttgattctgcggatcttctggttgaaccacgtggccacacgctgctgccagtccttgtggaagtggggcttcaacatcatgccattcctgctgggcgccatggctgcctacggccctcctacgaaggaaacactttatagatttctatagcagtgttacatagtaaggttttatggcgagttttgtagcatggatcatactaccttaggactgatggtaaagttttagtctaaggaaagctctgaaaatttgaaaatgtgtaaccacccaatgagttcagcttgcccactgcctagacagaaccatttatcaagacgggcatgcaaagccggctgtgtgggagacccgttttattattattcaaatcagtctccccaagtggattgcagtttttaaggataatttggtgggtaggggaccagtgagttgggaaagttgattagtcgggtcggagatgaaatcagagggagtcgaagctgtcctcttgtgttggcttaatttctggatgggggccacaagaccagatgagccagtttatcgttatgggtggtgctagctgatccatagagtacaggggctgcaaaatatctcaagaactgatcttcggttttacaatagtgatgttatcctgaggagcaattgggggaggtttagaatcttgcagcctccagctgcatgactcctaaaccataatttataatcttgtggctaatttgttagtcctgcgaaagcagtctagtccccaggcaggaagcgggtttgttttggaaagggctgctattgtctttgtttcaaagctaaactataaactaagttcctcccaaagttaggtcagcctacgaccaggaatgaacaaggacagcttggaggttagaagcaagatggaattggttaggttagatctctcactgtctcagttgtaattttgcgatggtgttttcaaatgttgatttaaagaagaccataaatttgtgttgctttctcagattttgagaataaggacaaaaagtgtatgttttaatgggagaatcttaagaatttcactactgaagtggatttctctgtccattaacagtgctaaatgttttgtatttcccagttggaaaaacaaaatctgcaagctttgaatgatacttgttattaggttttggtaacagctgttgtactattcccatttcaatgctcaatagccacacgtggcatgtcatacctaccaggtggacagcacagatatagaacattttcatcattgtaaaaagccctatttgacaacactaacttaaagtattaatcttttagaagagaaagcttcagtccaacccaaattacacaattttacttttgaaaatattgttgaaacaacgttcaattttttaaaattttggaaaactgaatgaaatccatttgtaaatgcgcaaatggtactggaggtggaaaactgaagccttgctatagttttagttttttggagggttatgatcaacacagagaagaaaagattcatctacccatagagcttcttgagaaaaattttctaacaataattttgaaaatttgtagtgaatttgttcttgccattatttatgggtgctttcatgtgcgaggcacatcaaagttctggggaatgacttaggcacaaccaaatggctatcttgggaagaccaaagtcctttgctatatatgagagttttgagatggcgactacctttctgtatggtagattcttgtttttgaatatgccctctgggttttcaaaacaaattgtttttacaatacctatagtagttatctagggcatattctttagcttcaaaaattctatctttagaatgggcttcaatattcataactgagttattttcctctaataaatcattaacattttc

SEQ ID NO: 457 - DNA, 2984 bp, Homo sapiens
gttttacgctgccgccggcatccgctcggacgcggccacgttgtcttgcgcgctttgcccgcctggccctgggactctgaccctcggctaccctttcctgccccactagcgtggccgcgagcctcggtgagccggccgtattcccgctctcgcttagggggcacaggcgcaggcatcggcccggccactccaagccttcggtgcgcgggcgcgtctgggatacgggcccgggaggcgccgccctccgtccgcccggtgcctctcaggaacagcgaaccggagagagcgccggagagttgggctcagtgcggagctcggcgccggggcccatgcccgtgcgcccccgcaggccggcgccatggcctccgggagtgtggccgagtgcctgcagcaggagaccacctgccccgtgtgcctgcagtacttcgcagagcccatgatgctcgactgcggccataacatctgttgcgcgtgcctcgcccgctgctggggcacggcagagactaacgtgtcgtgcccgcagtgccgggagaccttcccgcagaggcacatgcggcccaaccggcacctggccaacgtgacccaactggtaaagcagctgcgcaccgagcggccgtcggggcccggcggcgagatgggcgtgtgcgagaagcaccgcgagcccctgaagctgtactgcgaggaggaccagatgcccatctgcgtggtgtgcgaccgctcccgcgagcaccgcggccacagcgtgctgccgctcgaggaggcggtggagggcttcaaggagcaaatccagaaccagctcgaccatttaaaaagagtgaaagatttaaagaagagacgtcgggcccagggggaacaggcacgagctgaactcttgagcctaacccagatggagagggagaagattgtttgggagtttgagcagctgtatcactccttaaaggagcatgagtatcgcctcctggcccgccttgaggagctagacttggccatctacaatagcatcaatggtgccatcacccagttctcttgcaacatctcccacctcagcagcctgatcgctcagctagaagagaagcagcagcagcccaccagggagctcctgcaggacattggggacacattgagcagggctgaaagaatcaggattcctgaaccttggatcacacctccagatttgcaagagaaaatccacatttttgcccaaaaatgtctattcttgacggagagtctaaagcagttcacagaaaaaatgcagtcagatatggagaaaatccaagaattaagagaggctcagttatactcagtggacgtgactctggacccagacacggcctaccccagcctgatcctctctgataatctgcggcaagtgcggtacagttacctccaacaggacctgcctgacaaccccgagaggttcaatctgtttccctgtgtcttgggctctccatgcttcatcgccgggagacattattgggaggtagaggtgggagataaagccaagtggaccataggtgtctgtgaagactcagtgtgcagaaaaggtggagtaacctcagccccccagaatggattctgggcagtgtctttgtggtatgggaaagaatattgggctcttacctccccaatgactgccctacccctgcggaccccgctccagcgggtggggattttcttggactatgatgctggtgaggtctccttctacaacgtgacagagaggtgtcacaccttcactttctctcatgctaccttttgtgggcctgtccggccctacttcagtctgagttactcgggagggaaaagtgcagctcctctgatcatctgccccatgagtgggatagatgggttttctggccatgttgggaatcatggtcattccatggagacctccccttgaggaggtgaattcaggccaaaagggctgttggctgtaatcctacgccaggcacaaggcatcttgttgccttgccacgtcctgtcacagctgggtatccttaccatgttccacgcccttgcagtgggagacaggatgtccatgttctctaccatccttttccttcccatgcagattgtgaaatgtaatgagatgtatcaagacatcctagaaataaaaaccagatgtccacctccagtgtttcatactttctggttttacacatcgctggagggataaagagtatggataatctttggatttggagagccgttcaagatacttccagcttcttggctcagcctggcttcctctggttcagccccacataatgattatggctatttgctgtcatttctgggctagggctcctttctaacaacctagactggaataaggccctgtcagcatggctccctttatcccagttttccgtctgggaacagtacctctgcccctgattcccaatgtgccatagttttattaactccattaaagaagcctgtatgtgttttggttagttacagttattttacaataatggtgggtaatggccccacctctgttatgagataatgttctaatcaatgtctctgcctttgtatcttttctgagggctttgtctgttctcttcattctaatgaaaggtgtattctagtgctgggtgcatatcatccaggataatattctgcccaactccatcctctgttactagatcccttaccagtcacatttgtggactggtggccagtcgtataccatccctggaaggattctgggacaatattccagggattcattgacttcttggctccttttctccatttcctttgggggaagggggaattgaccatgcttaagtgcatcctatcaaggggcagctccgtccccatggccattggatcatgagacactcgaagtcagaaggctggggcagatcacttcaagcaagcccccatgatggttctcagtcctgcttctctgtgggtacgtgcccctctgtttaaaaataaactgaatatggatgtttaaaaaaaaaaaaaaaaaa

SEQ ID NO: 458 - protein, 513 aa, Homo sapiens
MASGSVAECLQQETTCPVCLQYFAEPMMLDCGHNICCACLARCWGTAETNVSCPQCRETFPQRHMRPNRHLANVTQLVKQLRTERPSGPGGEMGVCEKHREPLKLYCEEDQMPICVVCDRSREHRGHSVLPLEEAVEGFKEQIQNQLDHLKRVKDLKKRRRAQGEQARAELLSLTQMEREKIVWEFEQLYHSLKEHEYRLLARLEELDLAIYNSINGAITQFSCNISHLSSLIAQLEEKQQQPTRELLQDIGDTLSRAERIRIPEPWITPPDLQEKIHIFAQKCLFLTESLKQFTEKMQSDMEKIQELREAQLYSVDVTLDPDTAYPSLILSDNLRQVRYSYLQQDLPDNPERFNLFPCVLGSPCFIAGRHYWEVEVGDKAKWTIGVCEDSVCRKGGVTSAPQNGFWAVSLWYGKEYWALTSPMTALPLRTPLQRVGIFLDYDAGEVSFYNVTERCHTFTFSHATFCGPVRPYFSLSYSGGKSAAPLIICPMSGIDGFSGHVGNHGHSMETSP

SEQ ID NO: 459 - DNA, 2704 bp, Homo sapiens
gttttacgctgccgccggcatccgctcggacgcggccacgttgtcttgcgcgctttgcccgcctggccctgggactctgaccctcggctaccctttcctgccccactagcgtggccgcgagcctcggtgagccggccgtattcccgctctcgcttagggggcacaggcgcaggcatcggcccggccactccaagccttcggtgcgcgggcgcgtctgggatacgggcccgggaggcgccgccctccgtccgcccggtgcctctcaggaacagcgaaccggagagagcgccggagagttgggctcagtgcggagctcggcgccggggcccatgcccgtgcgcccccgcaggccggcgccatggcctccgggagtgtggccgagtgcctgcagcaggagaccacctgccccgtgtgcctgcagtacttcgcagagcccatgatgctcgactgcggccataacatctgttgcgcgtgcctcgcccgctgctggggcacggcagagactaacgtgtcgtgcccgcagtgccgggagaccttcccgcagaggcacatgcggcccaaccggcacctggccaacgtgacccaactggtaaagcagctgcgcaccgagcggccgtcggggcccggcggcgagatgggcgtgtgcgagaagcaccgcgagcccctgaagctgtactgcgaggaggaccagatgcccatctgcgtggtgtgcgaccgctcccgcgagcaccgcggccacagcgtgctgccgctcgaggaggcggtggagggcttcaaggagcaaatccagaaccagctcgaccatttaaaaagagtgaaagatttaaagaagagacgtcgggcccagggggaacaggcacgagctgaactcttgagcctaacccagatggagagggagaagattgtttgggagtttgagcagctgtatcactccttaaaggagcatgagtatcgcctcctggcccgccttgaggagctagacttggccatctacaatagcatcaatggtgccatcacccagttctcttgcaacatctcccacctcagcagcctgatcgctcagctagaagagaagcagcagcagcccaccagggagctcctgcaggacattggggacacattgagcagggctgaaagaatcaggattcctgaaccttggatcacacctccagatttgcaagagaaaatccacatttttgcccaaaaatgtctattcttgacggagagtctaaagcagttcacagaaaaaatgcagtcagatatggagaaaatccaagaattaagagaggctcagttatactcagtggacgtgactctggacccagacacggcctaccccagcctgatcctctctgataatctgcggcaagtgcggtacagttacctccaacaggacctgcctgacaaccccgagaggtctccttctacaacgtgacagagaggtgtcacaccttcactttctctcatgctaccttttgtgggcctgtccggccctacttcagtctgagttactcgggagggaaaagtgcagctcctctgatcatctgccccatgagtgggatagatgggttttctggccatgttgggaatcatggtcattccatggagacctccccttgaggaggtgaattcaggccaaaagggctgttggctgtaatcctacgccaggcacaaggcatcttgttgccttgccacgtcctgtcacagctgggtatccttaccatgttccacgcccttgcagtgggagacaggatgtccatgttctctaccatccttttccttcccatgcagattgtgaaatgtaatgagatgtatcaagacatcctagaaataaaaaccagatgtccacctccagtgtttcatactttctggttttacacatcgctggagggataaagagtatggataatctttggatttggagagccgttcaagatacttccagcttcttggctcagcctggcttcctctggttcagccccacataatgattatggctatttgctgtcatttctgggctagggctcctttctaacaacctagactggaataaggccctgtcagcatggctccctttatcccagttttccgtctgggaacagtacctctgcccctgattcccaatgtgccatagttttattaactccattaaagaagcctgtatgtgttttggttagttacagttattttacaataatggtgggtaatggccccacctctgttatgagataatgttctaatcaatgtctctgcctttgtatcttttctgagggctttgtctgttctcttcattctaatgaaaggtgtattctagtgctgggtgcatatcatccaggataatattctgcccaactccatcctctgttactagatcccttaccagtcacatttgtggactggtggccagtcgtataccatccctggaaggattctgggacaatattccagggattcattgacttcttggctccttttctccatttcctttgggggaagggggaattgaccatgcttaagtgcatcctatcaaggggcagctccgtccccatggccattggatcatgagacactcgaagtcagaaggctggggcagatcacttcaagcaagcccccatgatggttctcagtcctgcttctctgtgggtacgtgcccctctgtttaaaaataaactgaatatggatgtttaaaaaaaaaaaaaaaaaa

SEQ ID NO: 460 - protein, 358 aa, Homo sapiens
MASGSVAECLQQETTCPVCLQYFAEPMMLDCGHNICCACLARCWGTAETNVSCPQCRETFPQRHMRPNRHLANVTQLVKQLRTERPSGPGGEMGVCEKHREPLKLYCEEDQMPICVVCDRSREHRGHSVLPLEEAVEGFKEQIQNQLDHLKRVKDLKKRRRAQGEQARAELLSLTQMEREKIVWEFEQLYHSLKEHEYRLLARLEELDLAIYNSINGAITQFSCNISHLSSLIAQLEEKQQQPTRELLQDIGDTLSRAERIRIPEPWITPPDLQEKIHIFAQKCLFLTESLKQFTEKMQSDMEKIQELREAQLYSVDVTLDPDTAYPSLILSDNLRQVRYSYLQQDLPDNPERSPSTT

SEQ ID NO: 461 - DNA, 2698 bp, Homo sapiens
agcatccattcatatattcattcagtcagctaatttttaatccagcacatactattgcaagcgctgttttaggcgttgagaatacaactgtgaacaagacgacaaaaattcctgccctcatggagcctaagagcctagattttagcgaaggtagaaccaccgtaaacaatgtatatattaataagtaacttatgcaccatactggaaaattataaagtgctatagaggaaaagaagaattcatgtaaagcaagggaaacaagatgtgagatcacagcggtttagtgttgctaatgaaccccaaatccagggcagtgtttgacacattaagccaaacagtagcggcactgtgggtcaagaagggccctttggctggcaccaccaaaacatgtgttctccaaaggaggctggcatcaactggagccacttcacagcttgtttgagaactggatctgaccagtaggaagaaaccaggacagcagtggaagactgttaaagaaacctgagtaaaaagatgcaggaggttgtgctgttggatgagagttcaggaccaccaagccagctgctttggacccgccaggatacccagctccctcaggaaagcgctctattacctgctccatatcctgccttcactaaagatggaagccaaggaaacctgccgcaagcagatatcacactaatgagccaggcccaagagtcagtgacatttgaggatgtagctgtgaacttcactaacagggagtggcagtgtctgacctacgctcaaaggcatctctataaggatgtgatgttggaaaattatgggaacatggtatcacttggatttccatttcctaaacctcctttaatctctcatctggagcgagaagtagacccctgtgtgcaggatccacaggacagggagtccctaagctgctcctacccagtgtcagctgacaagatgtggcctgagaatgaaaaggcaagttcacaacaagagatttttgaaaatggagaagcctactggatgaaatttaacagtctcctaaaagttgattcccgggatcctaaggttagagaagtttgtgttcaggatgtcaaattagagaatcaatgggaaacatctataagggagaaactgagagaagagaaagaaggctctgaggaagtgacctgcaaaaaaggaaagaaccagaaagtgcttagtaaaaacttgaatccaaactcaaaacatagtcaatgtaataaagttcttatagcacagaaactccatgaatgtgccaggtgtggcaaaaacttcagttggcactcagatctaattctccatgagcaaattcattctggtgagaaaccccatgtgtgtaatgagtgtgggaaagcattcaagaccagaaatcagctttctatgcaccggataatccacacaggggagaaaccttttaattgcacccagtgtgggaaggctttcaacagtagatcagctctttgccgacataaaaaaacccacagtggggagaagcctcacgagtgcagggactgtgggaaggccttcaagaccaggaaccgtctctgtatgcatcagcttatccacaccggggagaagccttacaaatgtaactgctgtgggaaggccttccagtttaagcattcccttaccatccatggcagaatccacactggggagaagccatatgaatgtgaggagtgcgggaaggccttcagtgggagttcagacctcaccaaacacataagaatccacactggggaacgaccttatgagtgcagcaagtgtggaagggccttcagtcggagctcagacctaagcaaacacaaacgaatccatactcgggagaaacactatgggtgtccccagtgtggaaaagacttcagcatcaaggcagaactcaccaaacacagaaggatccacactgaagagaaacgttacaggtgtgaggagtgtgggaaagcctttcgtcataactgtaagcgcagggctcatgaacgagagcatacaggggagaagccctatcaatgcagggattgtgggaaaaccttccaagataagcactgccttaccatccatcagagaatccacactggagagaaaccttacaaatgtttagagtgtgggaaagctttcagtgggaagtcaaacttgaccaatcatcgaagaattcacactggagagaagcctcacaaatgtgaggtatgtggaatggccttccatcatagttcagtcctgaggcagcacaaaagaatccacactggtgagaagccatacacctgcagtgagtgtggcacgtccttccgtcagggctcagctctgattggacataagcgagttcatactggggagaaaccttatgaatgtgaggaatgtggaaaagcttttagagtgagctcaaatcttactggacataagaaaagaaaacatcaagtatggagtacccatgaacttgatgggagtaggaaatccctctctccagtgactgtttctcagacctcagtagtcagtattttgaccagtgcctgagtataacgattctggtgttactttctgtttttcctacctcttaggctggtccttctgtctcttatattagttattcctgatttcctgacccttaattgtgagattccccaaagacattgtcctttaccttcttattcactattttttcagtgagcacatttacttccaagagtttatcaatcac

SEQ ID NO: 462 - protein, 666 aa, Homo sapiens
MQEVVLLDESSGPPSQLLWTRQDTQLPQESALLPAPYPAFTKDGSQGNLPQADITLMSQAQESVTFEDVAVNFTNREWQCLTYAQRHLYKDVMLENYGNMVSLGFPFPKPPLISHLEREVDPCVQDPQDRESLSCSYPVSADKMWPENEKASSQQEIFENGEAYWMKFNSLLKVDSRDPKVREVCVQDVKLENQWETSIREKLREEKEGSEEVTCKKGKNQKVLSKNLNPNSKHSQCNKVLIAQKLHECARCGKNFSWHSDLILHEQIHSGEKPHVCNECGKAFKTRNQLSMHRIIHTGEKPFNCTQCGKAFNSRSALCRHKKTHSGEKPHECRDCGKAFKTRNRLCMHQLIHTGEKPYKCNCCGKAFQFKHSLTIHGRIHTGEKPYECEECGKAFSGSSDLTKHIRIHTGERPYECSKCGRAFSRSSDLSKHKRIHTREKHYGCPQCGKDFSIKAELTKHRRIHTEEKRYRCEECGKAFRHNCKRRAHEREHTGEKPYQCRDCGKTFQDKHCLTIHQRIHTGEKPYKCLECGKAFSGKSNLTNHRRIHTGEKPHKCEVCGMAFHHSSVLRQHKRIHTGEKPYTCSECGTSFRQGSALIGHKRVHTGEKPYECEECGKAFRVSSNLTGHKKRKHQVWSTHELDGSRKSLSPVTVSQTSVVSILTSA

SEQ ID NO: 463 - DNA, 983 bp, Homo sapiens
gatttagacattgaaggactatggaccaaagcaattatagttctttacatggttttattctgcttggcttctctaaccatccaaaaatggagatgatcctgtcaggagttgtcgccatcttctacttaattacattggtgggtaacacagccatcattcttgcatctctcctggattcccagcttcatacaccaatgtactttttcctcagaaatttatctttcctagatctatgtttcacaaccagcatcatccctcagatgctggtcaacttgtggggacctgataagaccatcagctatgtgggttgtatcatccaactctatgtttacatgtggttgggctcagttgagtgccttctcctggctgttatgtcctatgatcgttttacagctatatgtaagcccttgcattattttgtagtcatgaacccacatctatgtctaaagatgattatcatgatctggagtattagtttggccaattctgtagtattatgtacactcactctgaatttgcccacatgtggaaacaacattctggatcatttcttgtgtgagttgccagctctggtcaagatagcttgtgtagacaccacaacagttgaaatgtctgttttcgctttaggcattataattgtcctcacacctctcatccttattcttatatcctatggctacattgccaaagctgtgctgagaacgaagtcaaaagcaagccagcgaaaagcaatgaatacctgtggatctcatcttactgtagtgtctatgttctatggaactattatctacatgtacctgcaaccaggtaacagggcttccaaagaccagggcaagttcctcaccctcttttacaccgtcatcactccaagtctcaacccgctcatttacaccttaagaaataaggacatgaaggatgccctgaagaaactgatgagatttcaccacaaatctacaaaaataaagaggaattgcaagtcatag

SEQ ID NO: 464 - protein, 320 aa, Homo sapiens
MDQSNYSSLHGFILLGFSNHPKMEMILSGVVAIFYLITLVGNTAIILASLLDSQLHTPMYFFLRNLSFLDLCFTTSIIPQMLVNLWGPDKTISYVGCIIQLYVYMWLGSVECLLLAVMSYDRFTAICKPLHYFVVMNPHLCLKMIIMIWSISLANSVVLCTLTLNLPTCGNNILDHFLCELPALVKIACVDTTTVEMSVFALGIIIVLTPLILILISYGYIAKAVLRTKSKASQRKAMNTCGSHLTVVSMFYGTIIYMYLQPGNRASKDQGKFLTLFYTVITPSLNPLIYTLRNKDMKDALKKLMRFHHKSTKIKRNCKS

SEQ ID NO: 465 - DNA, 942 bp, Homo sapiens
atgaattgggaaaatgagagctccccaaaagagtttatactacttggcttctcagatagggcttggctacaaatgcccctttttgtggtcctgttaatatcatacacaatcaccatatttggcaatgtgtccatcatgatggtgtgcattctggatcccaaacttcatactcccatgtatttctttctcactaatctctccatcttagatctctgctataccacaactacagtccctcatatgttggtaaatattggttgcaacaaaaagaccatcagctatgctggctgtgtggcccacctcatcatcttcctggccctaggtgctacagagtgtctccttctggctgttatgtcctttgacagatatgtggctgtttgcagacccctccactatgtagtcatcatgaattattggttctgcctaaggatggcagccttctcatggctcattggtttcggcaactcagtgctgcagtcttccttgactcttaacatgccacgctgtggtcaccaggaagtggaccactttttctgtgaggtgcctgcacttctcaagttgtcatgtgctgacacaaagcctattgaggctgagctcttcttctttagtgtactaattcttctaattccagtgacattgatcctcatctcctatggcttcatagctcaagcagtattaaaaatcaggtcagcagaaggacggcaaaaagcatttgggacatgtgggtcccacatgattgtggtgtccctcttttatggaacagccatttatatgtatcttcaaccaccttcatccacctctaaggactggggaaagatggtttccctcttctatggaatcatcacatccatgttgaactccctcatctacagccttagaaataaagatatgaaggaggccttcaagaggctgatgccaagaatctttttctgtaagaaataa

SEQ ID NO: 466 - protein, 313 aa, Homo sapiens
MNWENESSPKEFILLGFSDRAWLQMPLFVVLLISYTITIFGNVSIMMVCILDPKLHTPMYFFLTNLSILDLCYTTTTVPHMLVNIGCNKKTISYAGCVAHLIIFLALGATECLLLAVMSFDRYVAVCRPLHYVVIMNYWFCLRMAAFSWLIGFGNSVLQSSLTLNMPRCGHQEVDHFFCEVPALLKLSCADTKPIEAELFFFSVLILLIPVTLILISYGFIAQAVLKIRSAEGRQKAFGTCGSHMIVVSLFYGTAIYMYLQPPSSTSKDWGKMVSLFYGIITSMLNSLIYSLRNKDMKEAFKRLMPRIFFCKK

SEQ ID NO: 467 - DNA, 936 bp, Homo sapiens
atgaatgatgatggaaaagtcaatgctagctctgaggggtactttattttagttggattttctaattggcctcatctggaagtagttatctttgtggttgtcttgatcttctacttgatgacactgataggaaacctgttcatcatcatcctgtcatacctggactcccatctgcacacaccaatgtacttcttcctttcaaacctctcatttctggatctctgctacaccaccagctctatccctcagttgctggtcaatctctggggcccggaaaagaccatctcttatgctggttgcatgattcaactttactttgttctcgcactgggaaccgcagagtgtgtcctactggtggtgatgtcctatgaccgttatgcagctgtgtgtagacctttgcattacactgtcctcatgcaccctcgtttctgccacctgctggctgtggcttcttgggtaagtggttttaccaactcagcacttcattcctccttcaccttctgggtacctctgtgtggacaccgccaagtagatcactttttctgtgaagttccagcacttctgcgattatcgtgtgttgatacccatgtcaatgagctgaccctcatgatcacaagctccatatttgttctcatacctctcatcctcattctcacttcttatggtgccatcgtccaagctgtactgaggatgcagtcaaccactgggcttcagaaagtgtttggaacatgtggagctcatcttatggctgtatctctctttttcattccggccatgtgcatatatctccagccaccatcaggaaattctcaagatcaaggcaagttcattgccctcttttatactgttgtcacacctagtcttaaccctctaatctacaccctcagaaacaaagttgtaagaggggcagtgaagagactaatggggtgggaatga

SEQ ID NO: 468 - protein, 311 aa, Homo sapiens
MNDDGKVNASSEGYFILVGFSNWPHLEVVIFVVVLIFYLMTLIGNLFIIILSYLDSHLHTPMYFFLSNLSFLDLCYTTSSIPQLLVNLWGPEKTISYAGCMIQLYFVLALGTAECVLLVVMSYDRYAAVCRPLHYTVLMHPRFCHLLAVASWVSGFTNSALHSSFTFWVPLCGHRQVDHFFCEVPALLRLSCVDTHVNELTLMITSSIFVLIPLILILTSYGAIVQAVLRMQSTTGLQKVFGTCGAHLMAVSLFFIPAMCIYLQPPSGNSQDQGKFIALFYTVVTPSLNPLIYTLRNKVVRGAVKRLMGWE

SEQ ID NO: 469 - DNA, 939 bp, Homo sapiens
atgatgattaaaaaaaatgcaagttcggaagacttctttattctacttggattttctaattggcctcagctggaagtagttctctttgtggttatcttgatcttctacctgatgacactgacaggaaacctgttcatcatcatcctgtcatacgtggactcccatctccacacaccaatgtacttcttcctttcaaacctctcatttctggatctctgccacaccaccagctctatccctcagttgctggtgaatctccggggcccggaaaagaccatctcgtatgctggttgcatggttcaactttactttgttcttgcactgggaatcgcagagtgtgtcctactggtggtgatgtcgtatgatcgttatgtagctgtgtgtagacctttgcattacactgtcctcatgcaccctcgtttctgccacttgttggctgcggcttcttgggtaattggttttactatctcagcacttcattcctcctttactttctgggtacccctttgtggacatcgcctagtggatcacttcttctgtgaagttccagcacttctgcgtttatcatgtgttgacacccatgcaaatgagctgaccctcatggtcatgagctccatttttgttctcatacctctcattctgattctcactgcctatggtgccattgcccgggctgtactgagcatgcaatcaaccactgggcttcagaaagtgtttaggacatgtggagcccatcttatggttgtatctctctttttcattccagtcatgtgcatgtatctccagccaccatcagaaaattctcctgatcagggcaagttcattgccctcttttatactgttgtcacaccgagtcttaatcctctaatctacactctcagaaacaagcatgtaaaaggggcagcgaagagactattggggtgggagtgggggaagtga

SEQ ID NO: 470 - protein, 312 aa, Homo sapiens
MMIKKNASSEDFFILLGFSNWPQLEVVLFVVILIFYLMTLTGNLFIIILSYVDSHLHTPMYFFLSNLSFLDLCHTTSSIPQLLVNLRGPEKTISYAGCMVQLYFVLALGIAECVLLVVMSYDRYVAVCRPLHYTVLMHPRFCHLLAAASWVIGFTISALHSSFTFWVPLCGHRLVDHFFCEVPALLRLSCVDTHANELTLMVMSSIFVLIPLILILTAYGAIARAVLSMQSTTGLQKVFRTCGAHLMVVSLFFIPVMCMYLQPPSENSPDQGKFIALFYTVVTPSLNPLIYTLRNKHVKGAAKRLLGWEWGK

SEQ ID NO: 471 - DNA, 966 bp, Homo sapiens
atggtcaatttgacttcaatgagtggattccttcttatggggttttctgatgagcgtaagcttcagattttacatgcattggtatttctggtgacatacctgctggccttgacaggcaacctcctcattatcaccatcattaccgtggaccgtcgtctccattcccccatgtattactttttaaagcacctctctcttctggacctctgcttcatctctgtcacagtcccccagtccattgcaaattcacttatgggcaacggttacatttctcttgttcagtgcattcttcaggttttcttcttcatagctctggcctcatcagaagtggccattctcacagtgatgtcttatgacaggtacgcagcaatctgtcaaccacttcattatgagactattatggatccccgtgcctgtaggcatgcagtgatagctgtgtggattgctgggggcctctctgggctcatgcatgctgccattaacttctccatacctctctgtgggaagagagtcattcaccaattcttctgtgatgttcctcagatgctgaaactagcctgttcttatgaattcattaatgagattgcactggctgcattcacaacgtctgcagcatttatctgtttgatctccattgtgctctcctacattcgcatcttctctacagtgctgagaatcccatcagctgagggccggaccaaggtcttctccacctgcctaccacacctatttgtagccaccttctttctttcagctgcaggctttgagtttctcagactgccttctgattcctcatcgactgtggaccttgtattctccgtattctatactgtgatacctccaacactcaatccagtcatttatagcttacggaatgattccatgaaggcagcactgaggaagatgctgtcaaaggaagagcttcctcagagaaaaatgtgcttaaaagccatgtttaaactctga

SEQ ID NO: 472 - protein, 321 aa, Homo sapiens
MVNLTSMSGFLLMGFSDERKLQILHALVFLVTYLLALTGNLLIITIITVDRRLHSPMYYFLKHLSLLDLCFISVTVPQSIANSLMGNGYISLVQCILQVFFFIALASSEVAILTVMSYDRYAAICQPLHYETIMDPRACRHAVIAVWIAGGLSGLMHAAINFSIPLCGKRVIHQFFCDVPQMLKLACSYEFINEIALAAFTTSAAFICLISIVLSYIRIFSTVLRIPSAEGRTKVFSTCLPHLFVATFFLSAAGFEFLRLPSDSSSTVDLVFSVFYTVIPPTLNPVIYSLRNDSMKAALRKMLSKEELPQRKMCLKAMFKL

SEQ ID NO: 473 - DNA, 1188 bp, Homo sapiens
atggcgccccgaagcctcctcctgctgctctcaggggccctggccctgaccgatacttgggcgggctcccactccttgaggtatttcagcaccgctgtgtcgcggcccggccgcggggagccccgctacatcgccgtggagtacgtagacgacacgcaattcctgcggttcgacagcgacgccgcgattccgaggatggagccgcgggagccgtgggtggagcaagaggggccgcagtattgggagtggaccacagggtacgccaaggccaacgcacagactgaccgagtggccctgaggaacctgctccgccgctacaaccagagcgaggctgggtctcacaccctccagggaatgaatggctgcgacatggggcccgacggacgcctcctccgcgggtatcaccagcacgcgtacgacggcaaggattacatctccctgaacgaggacctgcgctcctggaccgcggcggacaccgtggctcagatcacccagcgcttctatgaggcagaggaatatgcagaggagttcaggacctacctggagggcgagtgcctggagttgctccgcagatacttggagaatgggaaggagacgctacagcgcgcagatcctccaaaggcacacgttgcccaccaccccatctctgaccatgaggccaccctgaggtgctgggccctgggcttctaccctgcggagatcacgctgacctggcagcgggatggggaggaacagacccaggacacagagcttgtggagaccaggcctgcaggggatggaaccttccagaagtgggccgctgtggtggtgccttctggagaggaacagagatacacatgccatgtgcagcacgaggggctgccccagcccctcatcctgagatgggagcagtctccccagcccaccatccccatcgtgggcatcgttgctggccttgttgtccttggagctgtggtcactggagctgtggtcgctgctgtgatgtggaggaagaagagctcagatagaaacagagggagctactctcaggctgcagtcactgacagtgcccagggctctggggtgtctctcacagctaataaagtgtgagacagcttccttgtgtgggactgagaagcaagatatcaatgtagcagaattgcacttgtgcctcacgaacatacataaattttaaaaataaagaataaa

SEQ ID NO: 474 - protein, 362 aa, Homo sapiens
MAPRSLLLLLSGALALTDTWAGSHSLRYFSTAVSRPGRGEPRYIAVEYVDDTQFLRFDSDAAIPRMEPREPWVEQEGPQYWEWTTGYAKANAQTDRVALRNLLRRYNQSEAGSHTLQGMNGCDMGPDGRLLRGYHQHAYDGKDYISLNEDLRSWTAADTVAQITQRFYEAEEYAEEFRTYLEGECLELLRRYLENGKETLQRADPPKAHVAHHPISDHEATLRCWALGFYPAEITLTWQRDGEEQTQDTELVETRPAGDGTFQKWAAVVVPSGEEQRYTCHVQHEGLPQPLILRWEQSPQPTIPIVGIVAGLVVLGAVVTGAVVAAVMWRKKSSDRNRGSYSQAAVTDSAQGSGVSLTANKV

SEQ ID NO: 475 - DNA, 342 bp, Homo sapiens
atgaaccacactgcccaaaccttcttcattcctgccaacagtggctgccctcccccgccccccaaccccagctatgagatgctcaaggaggagcatgaggtggctgtgctgggggcgccccacaaccctgctcccccaatgtccaccatgatccatatctgcagcgagacctccgtgtctgactatgttgtctggtccctgtccaacatcctcttcatgaacccccactgcctgggattcatagcattcacctactccctgaagtctagggacaggaagatggttggagacctgactggggcccaggcctatgcctccactgccaagtacctgaacatctga

SEQ ID NO: 476 - DNA, 2033 bp, Homo sapiens
caaggagcacaggtcctcgttcaggacgatgtaatccttgccatcgtaagcaagctggtgatacccgcggagtaggcgcccgtccgaccccacgtcgcagacagacatcctctagatgggtgtgagaccctggccccgcccccgcggccagccccgcccaccgagccccgccctcgccaggaccaacctgcggggattttggctgaaaatgaaaccgggtaacggctcctgggcctctcccgggtcaagggtctccaggtcccgctgcctcggcgtggatctcggacccagagactcggggagacccgggcggtccgtgggggatgtggaggggtagtgacctgcgcccccggccggtgtcactcacaggcctcactctggttgtagtagccgctcagggtccgcaggttcactcggtaaaactgtgctttggccttggcggtccctgtctcctcttcccaatattccggcccctcctgctccatccacggcgcccgcggctccatcctgggactcgtggcgtcgctgtcgagccgcacgcactgcgtgtcgtccacgtcgcccacggagaggaagcggggatccgcgcggccgggccgggacatggtggtgtggaaatacctcaaggagtaagcctgggagcaaggagggggctgagaccctcccgaccctcctcccggcaccgcaaccgggttcctgcgcccccgccgggcaggcccctagctactccccacagacgccgtttccctcccgaccccgcactcacctgcccaggtctgggtcaggaccagggcccccgagagcagcagaagcagggttcggggcgccatgacaccatcctcggcgactgggaagaatcggagtcccggtgggtgcgtgggaactttagaaccgggaccgcggctacattgattggcttctctagaaacccgacactcaatgggagtgagaactggggcagcccggtgagtacccaggaagaaggacccgacacaggttgggagagggagaagagaaaccctgcaaagatggggaatgcccagcgctgggcctccccaatccatacaccgcctttggggcctgagatcctgagagccacgcctgaggccctgggacttcgccctgaccccgctacttctgtgccaagcgctctgtctcaatgtttccctgagtcttggcccaggagctgtctgagaaaccagggagaaaccctcggaatgggccccgtccctctctcttcactttgcatcacggaatccccgtcccagaactggactccctgcctcctactccttacctgtccccgtggactcttctagaagaaaaatcaccccagggagcttgttgccagagagtgagcttgccctgggaatggaggtgtagagacagggttttttgttgttgttgtttgtttgttttttaaatctggaaaagttgtgcctgagtgcatgagatagaatagagaccagtttgctttttgtttattaactacagtgggtagcagaatcttggtaactcctaatgatcaggaatctaatcggccaaaaatgtgactttggtcccttgacatataaatgtgtctaaaagcattacaacaggaatcacaaagctcctaagtttcactttcccagacaatgtatctgtgactcccgcttgtagtattttaaatttaccttcattccatagccctgagtttctgtgtgagtccaggacatctcctaatacaaggtagccactgtgttactatatgttgtaaccaggagccagtacggactttattcatctcacagtggcaagcactcaatgcagtcacaatgcccctcaccagtgctcatgcactgcctgtttttaggaagtatccacttctaagtgttgtgtatattttatatgaacacttagtattttttaaacctgattaacataaaaaaattagtttttaggcagacccacataaggtattaaaggccaactgcaaagatcaccctgcaaggctctgtagattgatgtattaaaatatataaaacaatgtgttt

SEQ ID NO: 477 - DNA, 1840 bp, Homo sapiens
cccattaggtgacaggtttttagagaagccaatcacgtcgccgcggtcctggttctaaagtcctcgctcacccacccggactcattctccccagacgccaaggatggtggtcatggcgccccgaaccctcttcctgctgctctcgggggccctgaccctgaccgagacctgggcgggctcccactccatgaggtatttcagcgccgccgtgtcccggcccggccgcggggagccccgcttcatcgccatgggctacgtggacgacacgcagttcgtgcggttcgacagcgactcggcgtgtccgaggatggagccgcgggcgccgtgggtggagcaggaggggccggagtattgggaagaggagacacggaacaccaaggcccacgcacagactgacagaatgaacctgcagaccctgcgcggctactacaaccagagcgaggccagttctcacaccctccagtggatgattggctgcgacctggggtccgacggacgcctcctccgcgggtatgaacagtatgcctacgatggcaaggattacctcgccctgaacgaggacctgcgctcctggaccgcagcggacactgcggctcagatctccaagcgcaagtgtgaggcggccaatgtggctgaacaaaggagagcctacctggagggcacgtgcgtggagtggctccacagatacctggagaacgggaaggagatgctgcagcgcgcggacccccccaagacacacgtgacccaccaccctgtctttgactatgaggccaccctgaggtgctgggccctgggcttctaccctgcggagatcatactgacctggcagcgggatggggaggaccagacccaggacgtggagctcgtggagaccaggcctgcaggggatggaaccttccagaagtgggcagctgtggtggtgccttctggagaggagcagagatacacgtgccatgtgcagcatgaggggctgccggagcccctcatgctgagatggaagcagtcttccctgcccaccatccccatcatgggtatcgttgctggcctggttgtccttgcagctgtagtcactggagctgcggtcgctgctgtgctgtggagaaagaagagctcagattgaaaaggagggagctactctcaggctgcaagtaagtatgaaggaggctgatccctgagatccttgggatcttgtgtttgggagccatgggggagctcacccaccccacaattcctcctctggccacatctcctgtggtctctgaccaggtgctgtttttgttctactctaggcagtgacagtgcccagggctctaatgtgtctctcacggcttgtaaatgtgacaccccggggggcctgatgtgtgtgggttgttgaggggaacaggggacatagctgtgctatgaggtttctttgacttcaatgtattgagcatgtgatgggctgtttaaagtgtcacccctcactgtgactgatatgaatttgttcatgaatatttttctgtagtgtgaaacagctgccctgtgtgggactgagtggcaagtccctttgtgacttcaagaaccctgacttctctttgtgcagagaccagcccacccctgtgcccaccatgaccctcttcctcatgctgaactgcattccttccccaatcacctttcctgttccagaaaaggggctgggatgtctccgtctctgtctcaaatttgtggtccactgagctataacttacttctgtattaaaattagaatctgagtataaatttactttttcaaattatttccaagagagattgatgggttaattaaaggagaagattcctgaaatttgagagacaaaataaa

SEQ ID NO: 478 - protein, 338 aa, Homo sapiens
MVVMAPRTLFLLLSGALTLTETWAGSHSMRYFSAAVSRPGRGEPRFIAMGYVDDTQFVRFDSDSACPRMEPRAPWVEQEGPEYWEEETRNTKAHAQTDRMNLQTLRGYYNQSEASSHTLQWMIGCDLGSDGRLLRGYEQYAYDGKDYLALNEDLRSWTAADTAAQISKRKCEAANVAEQRRAYLEGTCVEWLHRYLENGKEMLQRADPPKTHVTHHPVFDYEATLRCWALGFYPAEIILTWQRDGEDQTQDVELVETRPAGDGTFQKWAAVVVPSGEEQRYTCHVQHEGLPEPLMLRWKQSSLPTIPIMGIVAGLVVLAAVVTGAAVAAVLWRKKSSD

SEQ ID NO: 479 - DNA, 1096 bp, Homo sapiens
atggtgctcatggcgccccgaaccctcctcctgctgctctcaggggccctggccctgacccagacctgggcgcgctcccactccatgaggtatttctacaccaccatgtcccggcccggccgcggggagccccgcttcatctccgtcggctacgtggacgatacgcagttcgtgcggttcgacagcgacgccgcgagccagaggatggagccgcgggcgccgtggatggagcgggaggggccggagtattgggaccggaacacacagatctgcaaggcccaggcacagactgaacgagagaacctgcggatcgcgctccgctactacaaccagagcgagggcggttctcacaccatgcaggtgatgtatggctgcgacgtggggcccgacgggcgcttcctccgcgggtatgaacagcacgcctacgacagcaaggattacatcgctctgaacgaggacctgcgctcctggaccgcggcggacatggcagctcagatcaccaagcgcaagtgggaggcggcccgtcaggcggagcagctgagagcctacctggagggcgagttcgtggagtggctccgcagatacctggagaacgggaaggagacgctgcagcgcgcggacccccccaagacacatatgacccaccaccccatctctgaccatgaggccaccctgaggtgctgggccctgggcttctaccctgcggagatcacactgacctggcagcgggatggggaggaccagacccacacacggagctcatggagaccaggcctgcaggggatggaaccttccagaagtgggcggctgtggtggtgccttctggagaggagcagagatacacctgccatgtgcagcatgagggtctgccagagcccctcaccctgagatgggagccatcttcccagcccaccatccccatcgtgggcatcgttgctggcctggttctacttgtagctgtggtcactggagctgtggtcgctgctgtaatgtggaggaagaagagctcagatagaaaaggagggagctactctcaggctgcaagcggcaacagtgcccagggctctgatgtgtctctcacggcgtgaaagtgtga

SEQ ID NO: 480 - DNA, 3642 bp, Homo sapiens
ggcacgagctttggctggctagggaggggatgcaatgatataaacatttatcccctgatacctcatgttaaaatctgatgcccactgtgggacgtggggcctaatggccaccatttgggtcatggtgaccaatcttttatgaatagagagatactgccctctcttgggaatgaatgaattgttgctttattattttccaagagagctagttgttaaaaagaccctggcaacttcctactctctctgttcctctgttaccatgtgttctctgcatataccagctcacctttgtcttctgccatgagtggaagcagcctgaggccctcactaaatgcgcaaacatttccagacatcagaatcttgagccacatgaaccttgtttatataaattagtcagtctcagacatttctttatagcaacacaaaatggaaaaagataacactcgcatcacaggtatgtgtctctggcagctagccaccgttcttaagatatccaggatccactcagccaagagtcttctcatcagtactctaaagacacttatcactcaagagagtctaaggtttttaggagaaaccagggacaaagtctaaatgtttttgtgataactcagattgcccacttttctttgaccacatatcttttacaggaaaaaggattgtaacagtaaagaggtattggcatattatcagagtctcatccattcattcaaaattaggccagtttatcatcctcttgtatgaatatgtctcccagaatgaaatcactcagctttgctgacaacactcaatcttaccaggttccaaaaacaagaatggtctcagggacatacagcttcactcttttaggcatccagtataattgacctaagtgacaatatcttctcttgctcacaccacctttgaggagttaagctaatattgaatttttctcattatataaccctttgatttattcacttgccctcagccactattcctccctctgtccctttatatcagttgtttccaggtttgggagtgacattaggtttgtctgctgggctggcctagactgcaggcagcaatagtattctagcatgtcttccctcagtctagtcttgatcatagagggtaggttatataggtaaggaactagtgggggctatcaagaccaccaggctatataactctacttactgttaatcctaacttttccagatgaaatgaatacttgagaattcttacataaaggtataaaaatatagttatggtttttggcttagggataattcctgtttctggcacttttatttacatccctattcctggtactatggcataacatatgaaaaaataaatttgaggtgaagtgtagtctttattccagcatcctctcctcttcagaagaattgtatgtatcgtcataacagcatcgtcctgatccatcaggtaaaagagaggatgctacctagtggagttattcttgcagccccactcatgttgacagcgagcacattcatgaagatataaaagccagtccttcatgtttatattgcccaacaattagattggcagtttttagacaaacaatgtttcaattgaccatttcaattttctatcaaattttcccctgaggaggacatgtccctctgcattgttggccatttgaggctgtaaagtgtgttttcttgtgtaaagaagtgtgactcggcagtccaaattggtgcaatctcttcttttctggttcttgtatagcccttgaagcattgacatctacccctggttgagcatagcccaatccagagtcagtgattttcctgtcaagatccattggcagctcctttggggttgctggcatcattctggcttgccaggtattatgatcaaagccttcccactagagaatctgtcacatctccatctgctgcctctgtctgttttcttgaccaacagtgaaaaaagagattatgagaaataagataaattaccaaaattgtgaacaaaagagagattatcactaatgacccttaggaagttaaaaaacattataagtgaatactctgaaaaacctgaagccaataagttagaccacttggataaaaaggaccaattcgtgcagagatagaaattgccaaaactgacccaaattaactggaaaacctgaagagaactgtgaactaagtcagaaattgaaaaaccttctcaaaaagaaatgccaaagcccagatatcttcactggtgaattctatcaaatattttgaaagctctttcagacaagaagagaggagggaagactttccagcccatttacagaactggcattaccctcatatcaaagtcacagcaagactcacaggaaaagagtgccatacaccagtgtcaccaataaacataaatgaaaacatccttaacaaacattggcagataatacaaagccacataaaaaaggattacactccatgaccaatgggattcatcccaggaacatatggttggattaacatttgaaaatcagttcatggaatgcactgtattaatggaaaaaaagacataattatctcaaaagatgcaggagaaacagttgacaaaaatgttaacatcactcatgttcataagtttcaacaaaataggaatggaggagaccttcttcactctgataaagggcgtctataaaaaacccacagctaaaatcaaacttaatgaagaaagactgaagactgaatgcttttctcctaagatggggatcaatgcaaggatgtccaatcccaccacttttatttaatattatactggagattgtatccagtgcaataaggcagaaaattaaaaattaaaggcatccagataaaaaggaaaacatacaattctattcacagataacatgaccctgtctgtagaattcacaagcagataaaaactggctagcactaataaatgaatccagaagggcccataggatatcaaatcaatataaaaattaattattaacatatttctctatagaagcaatgaaaatctcaactttcctatcacagtagttaccagaagagcgaaataggaataaatttaggaagacagcagtgtttgttcactgaaaataaaaaaacattcctcagagaaattaaaggtctaaataaatggagagatgcgagttggaaagctcgataatactgttaagatggcagttctcccccagtagatctataggttcaacacaatccctatcaaaatcccagcaggattttatagaaaattgacaaaataggccgggcgcggtggctcatgccggtaatcccagcactttgggaggctgaggcgggcggatcatgagatcaggagatccagaccatcctggctaacacggtgaaaccccgtctctactaaaaatacaaaaaattagccgggcgtggtggcaggctcctcgggaggctgaggcagaaaaatggcatgaacccggtaggcagaagttgcagtgagcggagatcgtgccactgcactccagcctgggtgacagagcgagactccgtctcaaaaaaaaaaaaaaaaaaaaagaaaagaaaaaaagaaaagaaaattgacaaaataatcctaaaaatgtatatgaaaatgcagaggatgcagaagggccaacacaaatttggaaaaaaaaaaaaaaaaaaa

SEQ ID NO: 481 - DNA, 1060 bp, Homo sapiens
cacaaagctactaagtttgactttcgcagacaatgtatctgtgactcccgcttgttttttacatttaccttcattccacagccctgagttactgggtgagtccaagacatctcctcaatataaagtagcacactgcgttactatatgttgcaaccgggagccagtacagactttattcacctcacagttgcaagtgttcaatgcagtcacaatgcccctcagcagtgctcatgtgctgcctgtttttaggaagtattcacgtctaagtggtgtgtatatcttataggaacacttagtatttttaaaacctgattaattaaaaaaaattagtttctaggcagtcccaaatatagtattaaaggccaactgcaaagaaggaacactaagtgttttttaaaccttattaacataaaaaacattagtttttaggcagtcctacattaggtattaaaggccaactgcaaagaacactgagcgaggctctgtagatggatgtaataaaaatctataaaacaatgtgtttaaacctaagaattctactgctttccaattccttccctctgctccttttcctaacctcctgcttctccagcccttccctctgtccctttcatccctcaggccctcctctccccttagtccccaccaccctgtcacttctaaattgtggctctagcattgtcccattacctgctacgtgactgttctctccacagtggtcctgctcctgtgagtcagagtgtgtcatttcctcacctaaaacactccagtggctccacctcggtcttgtgaagcttctagaatgtcaggcacgtgagcatatgagggcatacctggttcatcttaggcactaaatttttgttgactgaatgaatgaaatatgaatgtattaaattgcatcacagaaagttataaaatgtaaaacactgaaaaattaagaaatattttattttatgtaactagtgtgcatatcaattcattccgagtctgttgagcctgtgtatgaattttataagattgcataacaaattatcacaaacattgactttaaacaacaccc

SEQ ID NO: 482 - DNA, 1538 bp, Homo sapiens
atggccgtcatggcgccccgaaccctcctcctgctactctcgggggccctggccctgacccagacctgggcgggctcccactccatgaggtatttcttcacatccgtgtcccggcccggccgcggggagccccgcttcatcgccgtgggctacgtggacgacacgcagttcgtgcggttcgacagcgacgccgcgagccagaggatggagccgcgggcgccgtggatagagcaggaggggccggagtattgggaccaggagacacggaatgtgaaggcccagtcacagactgaccgagtggacctggggaccctgcgcggctactacaaccagagcgaggccggttctcacaccatccagataatgtatggctgcgacgtggggtcggacgggcgcttcctccgcgggtaccggcaggacgcctacgacggcaaggattacatcgccctgaacgaggacctgcgctcttggaccgcggcggacatggcggctcagatcaccaagcgcaagtgggaggcggcccatgaggcggagcagttgagagcctacctggatggcacgtgcgtggagtggctccgcagatacctggagaacgggaaggagacgctgcagcgcacggacccccccaagacacatatgacccaccaccccatctctgaccatgaggccaccctgaggtgctgggccctgggcttctaccctgcggagatcacactgacctggcagcgggatggggaggaccagacccaggacacggagctcgtggagaccaggcctgcaggggatggaaccttccagaagtgggcggctgtggtggtgccttctggagaggagcagagatacacctgccatgtgcagcatgagggtctgcccaagcccctcaccctgagatgggagctgtcttcccagcccaccatccccatcgtgggcatcattgctggcctggttctccttggagctgtgatcactggagctgtggtcgctgccgtgatgtggaggaggaagagctcagatagaaaaggagggagttacactcaggctgcaagcagtgacagtgcccagggctctgatgtgtccctcacagcttgtaaagtgtgagacagctgccttgtgtgggactgagaggcaagagttgttcctgcccttccctttgtgacttgaagaaccctgactttgtttctgcaaaggcacctgcatgtgtctgtgttcgtgtaggcataatgtgaggaggtggggagaccaccccacccccatgtccaccatgaccctcttcccacgctgacctgtgctccctccccaatcatctttcctgttccagagaggtggggctgaggtgtctccatctctgtctcaacttcatggtgcactgagctgtaacttcttccttccctattaaaattagaaccttagtataaatttactttctcaaattcttgccatgagaggttgatgagttaattaaaggagaagattcctaaaatttgagagacaaaataaatggaacacatgagaaccttccaaaaaaaaaaaaaaaaaaa

SEQ ID NO: 483 - protein, 365 aa, Homo sapiens
MAVMAPRTLLLLLSGALALTQTWAGSHSMRYFFTSVSRPGRGEPRFIAVGYVDDTQFVRFDSDAASQRMEPRAPWIEQEGPEYWDQETRNVKAQSQTDRVDLGTLRGYYNQSEAGSHTIQIMYGCDVGSDGRFLRGYRQDAYDGKDYIALNEDLRSWTAADMAAQITKRKWEAAHEAEQLRAYLDGTCVEWLRRYLENGKETLQRTDPPKTHMTHHPISDHEATLRCWALGFYPAEITLTWQRDGEDQTQDTELVETRPAGDGTFQKWAAVVVPSGEEQRYTCHVQHEGLPKPLTLRWELSSQPTIPIVGIIAGLVLLGAVITGAVVAAVMWRRKSSDRKGGSYTQAASSDSAQGSDVSLTACKV

SEQ ID NO: 484 - DNA, 670 bp, Homo sapiens
agaggaaagaaccctgggaacgggaggcgaagggataatgagctggggatgggagcagtcgcaggaagaatcctctgcctggagccggcaggctccaacccctcagcttgagagtcaggagccccatagtccccacagcaataggaagcaccagctcctggtcccgaaaaaaggagggccccaactccagggactgcggcccgccctggagctgagaacacgcggactccagggagaggacagggcttcagggacccgagagccgctctgagcaccgggggatgtgactgcctcagcggcagagctggaagggccctcgaatgccattcacaggaacagcccaggaacccagggacttcagaagggctggtttgtccgaaaagtgagaggaggcggaggagagagcctgcgaggtcaagctgcagagaacatgagcttctacctccagatgtgccagggtgcatctcaataaacttggattttggccaggcgcggtggctcaggcctgtaatcccagctctggaagctgaaggatagcttgagcccaggagttcgaggctgcagtgagctatgatctcaccactacactccagcctgggtgacagcaagagatcttgtctcagaaataaataaataaaatttaaaaataaaaaaaaaaaaaaaaaaaaaa

SEQ ID NO: 485 - protein, 77 aa, Homo sapiens
MSWGWEQSQEESSAWSRQAPTPQLESQEPHSPHSNRKHQLLVPKKGGPQLQGLRPALELRTRGLQGEDRASGTREPL

SEQ ID NO: 486 - DNA, 751 bp, Homo sapiens
gggcgcagagctggcgctctagcccacggagttggttaactcctctcaccggcccctggaaagggttccaagtcctttagtacccgacgctgtctgggaattccgggcgtttcggctccttggtcgcagaggcaggaggcacccgaccgcatgtctgtcatggacctcgccaatacttgctccagctttcagtcggacctggatttctgttcagattgcggctcggtcctgcctctgcccggggctcaggatacggtcacctgtattcgctgtggcttcaacatcaacgttcgggactttgaggggaaggttgtgaagacttcggttgtgttccaccaactggggacagccatgcctatgtcggtggaggaagggcctgagtgccagggacctgtggttgacaggcgctgccctcgatgtggtcatgaaggaatggcataccacaccagacagatgcgttcagccgatgaagggcaaactgtcttctacacctgtaccaactgcaagttccaggagaaggaagactcttgacctttttcctgggcaactctacagtccctccctcctttcggaaggtgaaggatactgggtttttagatgccttgtccatcctgtctggttgcaatgttttgctcccagaagagaatcagatcatcatgtggggattaccattgttcctggagtactcctacccttagttgaatttccttattaaagttatatttttctataagaccctgacaaaaaaaaa

SEQ ID NO: 487 - protein, 126 aa, Homo sapiens
MSVMDLANTCSSFQSDLDFCSDCGSVLPLPGAQDTVTCIRCGFNINVRDFEGKVVKTSVVFHQLGTAMPMSVEEGPECQGPVVDRRCPRCGHEGMAYHTRQMRSADEGQTVFYTCTNCKFQEKEDS

SEQ ID NO: 488 - DNA, 867 bp, Homo sapiens
gggcgcagagctggcgctctagcccacggagttggttaactcctctcaccggcccctggaaagggttccaagtcctttagtacccgacgctgtctgggaattccgggcgtttcggctccttggtcgcagaggcaggaggcgtgcgtggcaggagggttcgggttatatactcctaggtcctgggacagaatagttacgacctctgggacaggaactcttctctcttttgttaataaacttccaactccctcctcagacccgaccgcatgtctgtcatggacctcgccaatacttgctccagctttcagtcggacctggatttctgttcagattgcggctcggtcctgcctctgcccggggctcaggatacggtcacctgtattcgctgtggcttcaacatcaacgttcgggactttgaggggaaggttgtgaagacttcggttgtgttccaccaactggggacagccatgcctatgtcggtggaggaagggcctgagtgccagggacctgtggttgacaggcgctgccctcgatgtggtcatgaaggaatggcataccacaccagacagatgcgttcagccgatgaagggcaaactgtcttctacacctgtaccaactgcaagttccaggagaaggaagactcttgacctttttcctgggcaactctacagtccctccctcctttcggaaggtgaaggatactgggtttttagatgccttgtccatcctgtctggttgcaatgttttgctcccagaagagaatcagatcatcatgtggggattaccattgttcctggagtactcctacccttagttgaatttccttattaaagttatatttttctataagaccctgacaaaaaaaaa

SEQ ID NO: 489 - protein, 126 aa, Homo sapiens; identical to SEQ ID NO: 487

SEQ ID NO: 490 - DNA, 1664 bp, Homo sapiens
gcatttggtgccgtggaagggaaaaagggggactgcagtatgcgtcacacccggaagcggcgagccggaagtggggttagccaggttatccccaggggtggagaagcggaggcccaggaggagggggaataaagaaggtggaggatcctggctaccactctgaatccgataccgcttctcttagacctcagcgacagaaaaagggaagggtgtctcatcccccttcctcctctcctccctgtcctgagccttagccatggccgaggcaggggctgggctgagcgagaccgtcactgagacaacggttaccgtgacaaccgagcccgagaaccggagccttaccatcaaacttcggaaacggaagccagagaaaaaggtagaatggacaagtgacactgtggacaatgaacacatgggccgccgctcatccaaatgctgctgtatttatgagaaacctcgggcctttggcgagagctccacggaaagtgatgaggaggaagaagagggctgtggtcatacacactgtgtacgtggccaccgcaaaggacggcgtcgtgcaaccctaggaccgacccccaccacccctccccagcctcctgacccttcccagccccctccagggccaatgcagcactaaatccctctctcctccagcattcctgtgtctgtctggccctaaatgtatccatgtggctacttctccagccccctccttccctctcttctgcctgatagagggaagaggaagaggaggacgaacagagatcctgaaattctgacttgctgctattccagaacccagcctcctgggtttccccagtcctcatttttcctcccaatacccacccttctctctcgagggatctaggcaccttggtcccagtgtcttccttttgttctcactgccaaactgcctgtcctgggatctagttatcttggccctgcactctcaacatgagtagcgaacacttaaattgggttttcaacagtcccagctttcactgccagggtcccagtcagattccaggaatttgcgccctaactttgcttgctaatcctggtttagagctatcccactaaaatatttaatcctaattcttagtccttgcctgtgagatatgaggtcttacaggagacctcagagctcccagcccttctcctcctgctaacccttctcacaccctcaagaggagttagaaaagaggtccttgtcattctcacctcttatggaaaatggaataagaaataatcatatcctttcttcccacccttctcctgttatttaggatttctgacaaagctggcttgagattggtcacttagagccgactgtctcctctgccttttgtttttcagcttcagagacagatccaatatagtcccagggacctgggtctctgggagaggaaggaagagggagggagcaaagagattggggtatgtcccctgtagtacactcttacctcttacttcctagactttgatttctccggcagcccagatgttcagttctcttggcccctctctaccccttactgggatccggttttcattttccggtccttttgccatacacagttacagagatcagtcaaatccataccaccactgagatctcatttattgccacagatgcacaaaataaataacccaaaatcacaaaa

SEQ ID NO: 491 - protein, 126 aa, Homo sapiens
MAEAGAGLSETVTETTVTVTTEPENRSLTIKLRKRKPEKKVEWTSDTVDNEHMGRRSSKCCCIYEKPRAFGESSTESDEEEEEGCGHTHCVRGHRKGRRRATLGPTPTTPPQPPDPSQPPPGPMQH

SEQ ID NO: 492 - DNA, 2187 bp, Homo sapiens
ggcgttacgcaaggcctggtgtttacctcccgtgggagcctcctccctccctataaagcctgatgtggtggagagatttgacgagactgagactctggttgaagagagaggcaatcccaggagaggggcggaaagcggcaaaagttaatgcgggagtcggagagaagggcatctacacagcaagcagcaggggcggcccgccatctgcgcgctcgaaggcggtcacggtggtcgcggaaggggcggcgtccagatcctggctttccatggatgcgcccgagctgggcccggggctggtggagcgtctggagcagctggcgacgtgtcctctgtgcgggggctccttcgaggacccggtgcttctggcgtgcgagcacagcttctgccgcgcgtgtctggcccgccgctgggggactccgccggcgaccggcaccgaggcttcccccaccgcctgtccctgctgcggcctgccgtgtccccgccgcagcctgaggtctaatgtgcggctggcggtggaggtgcgaatcagccgcgagctgcgagagaagctggctgagcctggggcccgtgcggggagacgccgaggggggcgcatccccaccatgggctgcctggacctgcccggagaggatatgaggaagacatggagacgatttgaagtcccaacatccaagtcatctaattcagaggatgatctccctgaagattatccagtggtcaaaaaaatgcttcatagactgacagccgacctgaccctggaccctgggaccgcacaccgccgcctgctcatctccgccgaccgccgcagcgtacaactggccccaccagggacgcccgcgccccctgacggccccaagcgcttcaatcagctcccagctgtgctgggtgcgcagggcttcggggccggccgccactgctgggaggtggagactgcggacgccgcctcctgcagagactcttctggggaggatgcggacgacgaggagagccactatgcagtgggcgcggccggggaatcagtgcaacgcaagggctgcgtaaggctgtgccctgcgggggccgtgtgggccgtggagggccgcggcggccgcctgtgggccctcacggcacccgaacccaccctgctgggcggtgttgagcccccgccgcggcgcattcgcgtggacctggactgggagcggggccgcgtggccttctacgacggccgctcactcgacctgctttacgccttccaggcgcctggccccctgggggagcgcatcttcccgctgttctgcacctgcgaccctcgtgctccgctccgcattgtaccagcggaaagctgagtctcgtctccaactagaagtttggcccggccactggccctgcagctgctttttgggggtggaattccccactcatttctgggaacacattcacacgcccattgcaggagtattaatagcaacccacattttcgccccaaaataatgagacctcacctggtctccacgtttccacgtccctgctcaaaaccaaatccattcctgccttctggctctcagaatcttctctcccctacagctactacagtacttcctgacttctcccattcaaaccattctaggcctgcaatggggaacaggccctccccatcagtattggtaaagtgaccatgattcctacatagaggctctgctggtcaaatacttgactcccactcttgccactcctagctccagaagggctcagggccttccccacagatctaaggactgggctaccctgcctgtccactgaggtttctcctaaaacaagaggcttgactctggtctgggccctgtggccctctgggaagctttgtacctcttttgcaggatccgggggtggggagggacaagctagttccccaacctcctatgactgctttctatgctcacagccttttttccataagaaccttcttgaaacttctccccgcacatactcacggaaaggaaccaatggtgctatttcccctctctcctcctcaacctgggaatacttcagacatctccaaactcatccttgtgtatagtctcacacccttccccataagtataaatgggcccatatttaacacattttgtgattttgggttatttattttgtgcatctgtggcaataaatgagatctcagtggtggtatggaaaaaaaaaaaaaaaaaa

SEQ ID NO: 493 - protein, 420 aa, Homo sapiens
MWWRDLTRLRLWLKREAIPGEGRKAAKVNAGVGEKGIYTASSRGGPPSARSKAVTVVAEGAASRSWLSMDAPELGPGLVERLEQLATCPLCGGSFEDPVLLACEHSFCRACLARRWGTPPATGTEASPTACPCCGLPCPRRSLRSNVRLAVEVRISRELREKLAEPGARAGRRRGGRIPTMGCLDLPGEDMRKTWRRFEVPTSKSSNSEDDLPEDYPVVKKMLHRLTADLTLDPGTAHRRLLISADRRSVQLAPPGTPAPPDGPKRFNQLPAVLGAQGFGAGRHCWEVETADAASCRDSSGEDADDEESHYAVGAAGESVQRKGCVRLCPAGAVWAVEGRGGRLWALTAPEPTLLGGVEPPPRRIRVDLDWERGRVAFYDGRSLDLLYAFQAPGPLGERIFPLFCTCDPRAPLRIVPAES

SEQ ID NO: 494 - DNA, 1989 bp, Homo sapiens
ggcgttacgcaaggcctggtgtttacctcccgtgggagcctcctccctccctataaagcctgatgtggtggagagatttgacgagactgagactctggttgaagagagaggcaatcccaggagaggggcggaaagcggcaaaagttaatgcgggagtcggagagaagggcatctacacagcaagcagcaggggcggcccgccatctgcgcgctcgaaggcggtcacggtggtcgcggaaggggcggcgtccagatcctggctttccatggatgcgcccgagctgggcccggggctggtggagcgtctggagcagctggcgacgtgtcctctgtgcgggggctccttcgaggacccggtgcttctggcgtgcgagcacagcttctgccgcgcgtgtctggcccgccgctgggggactccgccggcgaccggcaccgaggcttcccccaccgcctgtccctgctgcggcctgccgtgtccccgccgcagcctgaggtctaatgtgcggctggcggtggaggtgcgaatcagccgcgagctgcgagagaagctggctgagcctggggcccgtgcggggagacgccgaggggggcgcatccccaccatgggctgcctggacctgcccggagaggatatgaggaagacatggagacgatttgaagtcccaacatccaagtcatctaattcagaggatgatctccctgaagattatccagtggtcaaaaaaatgcttcatagactgacagccgacctgaccctggaccctgggaccgcacaccgccgcctgctcatctccgccgaccgccgcagcgtacaactggccccaccagggacgcccgcgccccctgacggccccaagcgcttcaatcagctcccagctgtgctgggtgcgcagggcttcggggccggccgccactgctgggaggtggagactgcggacgccgcctcctgcagagactcttctggggaggatgcggacgacgaggagagccactatgcagtgggcgcggccggggaatcagtgcaacgcaagggctgcgcgcctggccccctgggggagcgcatcttcccgctgttctgcacctgcgaccctcgtgctccgctccgcattgtaccagcggaaagctgagtctcgtctccaactagaagtttggcccggccactggccctgcagctgctttttgggggtggaattccccactcatttctgggaacacattcacacgcccattgcaggagtattaatagcaacccacattttcgccccaaaataatgagacctcacctggtctccacgtttccacgtccctgctcaaaaccaaatccattcctgccttctggctctcagaatcttctctcccctacagctactacagtacttcctgacttctcccattcaaaccattctaggcctgcaatggggaacaggccctccccatcagtattggtaaagtgaccatgattcctacatagaggctctgctggtcaaatacttgactcccactcttgccactcctagctccagaagggctcagggccttccccacagatctaaggactgggctaccctgcctgtccactgaggtttctcctaaaacaagaggcttgactctggtctgggccctgtggccctctgggaagctttgtacctcttttgcaggatctgggggtggggagggacaagctagttccccaacctcctatgactgctttctatgctcacagccttttttccataagaaccttcttgaaacttctccccgcacatactcacggaaaggaaccaatggtgctatttcccctctctcctcctcaacctgggaatacttcagacatctccaaactcatccttgtgtatagtctcacacccttccccataagtataaatgggcccatatttaacacattttgtgattttgggttatttattttgtgcatctgtggcaataaatgagatctcagtggtggtatggaaaaaaaaaaaaaaaaaa

SEQ ID NO: 495 - protein, 354 aa, Homo sapiens
MWWRDLTRLRLWLKREAIPGEGRKAAKVNAGVGEKGIYTASSRGGPPSARSKAVTVVAEGAASRSWLSMDAPELGPGLVERLEQLATCPLCGGSFEDPVLLACEHSFCRACLARRWGTPPATGTEASPTACPCCGLPCPRRSLRSNVRLAVEVRISRELREKLAEPGARAGRRRGGRIPTMGCLDLPGEDMRKTWRRFEVPTSKSSNSEDDLPEDYPVVKKMLHRLTADLTLDPGTAHRRLLISADRRSVQLAPPGTPAPPDGPKRFNQLPAVLGAQGFGAGRHCWEVETADAASCRDSSGEDADDEESHYAVGAAGESVQRKGCAPGPLGERIFPLFCTCDPRAPLRIVPAES

SEQ ID NO: 496 - DNA, 1353 bp, Homo sapiens
ggcgttacgcaaggcctggtgtttacctcccgtgggagcctcctccctccctataaagcctgatgtggtggagagatttgacgagactgagactctggttgaagagagaggcaatcccaggagaggggcggaaagcggcaaaagttaatgcgggagtcggagagaagggcatctacacagcaagcagcaggggcggcccgccatctgcgcgctcgaaggcggtcacggtggtcgcggaaggggcggcgtccagatcctggctttccatggatgcgcccgagctgggcccggggctggtggagcgtctggagcagctggcgacgtgtcctctgtgcgggggctccttcgaggacccggtgcttctggcgtgcgagcacagcttctgccgcgcgtgtctggcccgccgctgggggactccgccggcgaccggcaccgaggcttcccccaccgcctgtccctgctgcggcctgccgtgtccccgccgcagcctgaggtctaatgtgcggctggcggtggaggtgcgaatcagccgcgagctgctttttgggggtggaattccccactcatttctgggaacacattcacacgcccattgcaggagtattaatagcaacccacattttcgccccaaaataatgagacctcacctggtctccacgtttccacgtccctgctcaaaaccaaatccattcctgccttctggctctcagaatcttctctcccctacagctactacagtacttcctgacttctcccattcaaaccattctaggcctgcaatggggaacaggccctccccatcagtattggtaaagtgaccatgattcctacatagaggctctgctggtcaaatacttgactcccactcttgccactcctagctccagaagggctcagggccttccccacagatctaaggactgggctaccctgcctgtccactgaggtttctcctaaaacaagaggcttgactctggtctgggccctgtggccctctgggaagctttgtacctcttttgcaggatctgggggtggggagggacaagctagttccccaacctcctatgactgctttctatgctcacagccttttttccataagaaccttcttgaaacttctccccgcacatactcacggaaaggaaccaatggtgctatttcccctctctcctcctcaacctgggaatacttcagacatctccaaactcatccttgtgtatagtctcacacccttccccataagtataaatgggcccatatttaacacattttgtgattttgggttatttattttgtgcatctgtggcaataaatgagatctcagtggtggtatggaaaaaaaaaaaaaaaaaa

SEQ ID NO: 497 - protein, 251 aa, Homo sapiens
MWWRDLTRLRLWLKREAIPGEGRKAAKVNAGVGEKGIYTASSRGGPPSARSKAVTVVAEGAASRSWLSMDAPELGPGLVERLEQLATCPLCGGSFEDPVLLACEHSFCRACLARRWGTPPATGTEASPTACPCCGLPCPRRSLRSNVRLAVEVRISRELLFGGGIPHSFLGTHSHAHCRSINSNPHFRPKIMRPHLVSTFPRPCSKPNPFLPSGSQNLLSPTATTVLPDFSHSNHSRPAMGNRPSPSVLVK

SEQ ID NO: 498 - DNA, 2049 bp, Homo sapiens
atccatttgttctcaagaggtagcaagaaacagtatccacagtggactccggggctcctacagacttggcacagcttcctacagtcttgaaacagccctgttgttctgtcatggccagtgggcagtttgtgaacaaactgcaagaggaagtgatctgccccatctgcctggacattctgcagaaacctgtcaccatcgactgtgggcacaatttctgcctcaaatgcatcactcagattggggaaacatcatgtggatttttcaaatgtcccctctgcaaaacttccgtaaggaagaacgcaatcaggttcaactcgctgttgcggaatctggtggagaaaatccaagctctacaagcctctgaggtgcagtccaaaaggaaagaggctacatgcccgaggcaccaggagatgttccactatttctgcgaggatgatgggaagttcctctgttttgtgtgtcgtgaatccaaggaccacaaatcccataatgtcagcttgatcgaagaagctgcccagaattatcaggggcagattcaagagcagatccaagtcttgcagcaaaaggagaaggagacagtacaagtgaaggcacaaggtgtacacagggtcgatgtcttcacggaccaggtagaacatgagaagcaaaggatcctcacagaatttgaactcctgcatcaagtcctagaggaggagaagaatttcctgctatcacggatttactggctgggtcatgagggaacggaagcggggaaacactatgttgcctccactgagccacagttgaacgatctcaagaagctcgttgattccctgaagaccaagcagaacatgccacccaggcagctgctggaggatatcaaagtcgtcttgtgcagaagtgaagagtttcagtttctcaacccaacccctgttcctctggaactggagaaaaaactcagtgaagcaaaatcaagacatgactccatcacagggagcctaaaaaaattcaaagaccaactccaggctgataggaaaaaagatgaaaacagattcttcaaaagcatgaataaaaatgacatgaagagctggggcttgttacagaaaaataatcataaaatgaacaaaacctcagagcccgggtcatcttctgcaggcggcagaactacatcggggccaccaaatcaccactcttcagccccatcccactccctgtttcgggcctcgtctgctgggaaagtcacttttccagtatgtctcctggcctcttatgatgagatttctggtcaaggagcgagctctcaggatacgaagacatttgacgttgcgctgtccgaggagctccatgcggcactgagtgagtggctgacagcgatccgggcttggttttgtgaggttccttcaagctaagccagctcagagaacacggggagcggtggtgctacacggacttcggagcatagagtggcgctgagtgagtggctgagaccgaccacggttcttgacttagtggaattgggtcgaaggagtggagaatgggagggctcgggctactgagagtggagatgggggcgggggtggtggtgaagagagttggagaaggaatggacgaattcttgagcaaaaggaggggaagagacaatctccagccacccgccccacgcttgacttcttatcactttggctgtggtgccgcctagtggaaaaaggaagtccctgcagcagtccccgcactctttaagcagctgtttaccgaaggcaccagttcagccaggagtgaaatccggagaggagcaacgccagcctgggtcacagtccatcaaaccccatgagcccgaccactctcgctcttccttacattcccacgtcccccttctctcccaacccctcatatcagcaagggaaattaattaatgagatttgataaatcagtagatagaatgaggtccccattctgaaatatttagcagactggaaccaccacgcaagcctctgtagggggtggatggagacacttctaactttaataaactgcgactgaacgtggaaaaaaaaaaaaaaaaaaaaaaaa

SEQ ID NO: 499 - protein, 425 aa, Homo sapiens
MASGQFVNKLQEEVICPICLDILQKPVTIDCGHNFCLKCITQIGETSCGFFKCPLCKTSVRKNAIRFNSLLRNLVEKIQALQASEVQSKRKEATCPRHQEMFHYFCEDDGKFLCFVCRESKDHKSHNVSLIEEAAQNYQGQIQEQIQVLQQKEKETVQVKAQGVHRVDVFTDQVEHEKQRILTEFELLHQVLEEEKNFLLSRIYWLGHEGTEAGKHYVASTEPQLNDLKKLVDSLKTKQNMPPRQLLEDIKVVLCRSEEFQFLNPTPVPLELEKKLSEAKSRHDSITGSLKKFKDQLQADRKKDENRFFKSMNKNDMKSWGLLQKNNHKMNKTSEPGSSSAGGRTTSGPPNHHSSAPSHSLFRASSAGKVTFPVCLLASYDEISGQGASSQDTKTFDVALSEELHAALSEWLTAIRAWFCEVPSS

SEQ ID NO: 500 - DNA, 1982 bp, Homo sapiens
atccatttgttctcaagaggtagcaagaaacagtatccacagtggactccggggctcctacagacttggcacagcttcctacagtcttgaaacagccctgttgttctgtcatggccagtgggcagtttgtgaacaaactgcaagaggaagtgatctgccccatctgcctggacattctgcagaaacctgtcaccatcgactgtgggcacaatttctgcctcaaatgcatcactcagattggggaaacatcatgtggatttttcaaatgtcccctctgcaaaacttccgtaaggaagaacgcaatcaggttcaactcgctgttgcggaatctggtggagaaaatccaagctctacaagcctctgaggtgcagtccaaaaggaaagaggctacatgcccgaggcaccaggagatgttccactatttctgcgaggatgatgggaagttcctctgttttgtgtgtcgtgaatccaaggaccacaaatcccataatgtcagcttgatcgaagaagctgcccagaattatcaggggcagattcaagagcagatccaagtcttgcagcaaaaggagaaggagacagtacaagtgaaggcacaaggtgtacacagggtcgatgtcttcacggaccaggtagaacatgagaagcaaaggatcctcacagaatttgaactcctgcatcaagtcctagaggaggagaagaatttcctgctatcacggatttactggctgggtcatgagggaacggaagcggggaaacactatgttgcctccactgagccacagttgaacgatctcaagaagctcgttgattccctgaagaccaagcagaacatgccacccaggcagctgctggagaactggagaaaaaactcagtgaagcaaaatcaagacatgactccatcacagggagcctaaaaaaattcaaagaccaactccaggctgataggaaaaaagatgaaaacagattcttcaaaagcatgaataaaaatgacatgaagagctggggcttgttacagaaaaataatcataaaatgaacaaaacctcagagcccgggtcatcttctgcaggcggcagaactacatcggggccaccaaatcaccactcttcagccccatcccactccctgtttcgggcctcgtctgctgggaaagtcacttttccagtatgtctcctggcctcttatgatgagatttctggtcaaggagcgagctctcaggatacgaagacatttgacgttgcgctgtccgaggagctccatgcggcactgagtgagtggctgacagcgatccgggcttggttttgtgaggttccttcaagctaagccagctcagagaacacggggagcggtggtgctacacggacttcggagcatagagtggcgctgagtgagtggctgagaccgaccacggttcttgacttagtggaattgggtcgaaggagtggagaatgggagggctcgggctactgagagtggagatgggggcgggggtggtggtgaagagagttggagaaggaatggacgaattcttgagcaaaaggaggggaagagacaatctccagccacccgccccacgcttgacttcttatcactttggctgtggtgccgcctagtggaaaaaggaagtccctgcagcagtccccgcactctttaagcagctgtttaccgaaggcaccagttcagccaggagtgaaatccggagaggagcaacgccagcctgggtcacagtccatcaaaccccatgagcccgaccactctcgctcttccttacattcccacgtcccccttctctcccaacccctcatatcagcaagggaaattaattaatgagatttgataaatcagtagatagaatgaggtccccattctgaaatatttagcagactggaaccaccacgcaagcctctgtagggggtggatggagacacttctaactttaataaactgcgactgaacgtggaaaaaaaaaaaaaaaaaaaaaaaa

SEQ ID NO: 501 - protein, 267 aa, Homo sapiens
MASGQFVNKLQEEVICPICLDILQKPVTIDCGHNFCLKCITQIGETSCGFFKCPLCKTSVRKNAIRFNSLLRNLVEKIQALQASEVQSKRKEATCPRHQEMFHYFCEDDGKFLCFVCRESKDHKSHNVSLIEEAAQNYQGQIQEQIQVLQQKEKETVQVKAQGVHRVDVFTDQVEHEKQRILTEFELLHQVLEEEKNFLLSRIYWLGHEGTEAGKHYVASTEPQLNDLKKLVDSLKTKQNMPPRQLLENWRKNSVKQNQDMTPSQGA

SEQ ID NO: 502 - DNA, 997 bp, Homo sapiens
gtgtatgaaaaataatttcaagtttaacaaacacaaggaaaccgcagggtccatgtcaaagctgatgagctatttctgaaactcgtgcagaattgtggtttgtgtggtctatgtcacggcacccttgagggagagtgggcaattgcctgaacttggaggctgtgtcctgtccccaggctgctccagggctgcctccttccgactgggccttcttatctgggactgttgagggcaacaggccttccgaagaccagtgaagaaggaggccctgcaaacaggaggctgacagggtaggaacgaggccatgatccctttgcagaaggacaaccaggaggagggtgtctgccccatctgccaggagagcctgaaggaggccgtgagcaccaactgcggacatctcttctgtcgagtgtgcctgacacagcatgtggagaaggcctcagcctctggggtcttctgctgccccctctgccggaagccctgttctgaggaggtgctagggacaggctatatctgccccaaccaccagaagagggtgtgcaggttctgtgaggagagcagacttcttctatgtgtggaatgcctggtgtcccctgaacacatgtctcatcatgaactgaccattgaaaatgccctcagccactacaaggaacgactcaatcgccggagcaggaagctcagaaaggacattgcagaacttcagcggctcaaggctcagcaggagaagaaactgcaggctctgcagcagtggctgggccagctggagcacatgccagcagaagcggccagaatccttgacatctccagggcagtaacacagctcagaagcctggtcattgatctggaaaggacggccaaggaattagacaccaacacactgaagaatgctggtgacttactgaacaggagtgctccacagaaattagaggttatttatccccagttggagaaaggagtcagtgaattgcttcttcagccccctcagaagctctgaccc

SEQ ID NO: 503 - protein, 229 aa, Homo sapiens
MIPLQKDNQEEGVCPICQESLKEAVSTNCGHLFCRVCLTQHVEKASASGVFCCPLCRKPCSEEVLGTGYICPNHQKRVCRFCEESRLLLCVECLVSPEHMSHHELTIENALSHYKERLNRRSRKLRKDIAELQRLKAQQEKKLQALQQWLGQLEHMPAEAARILDISRAVTQLRSLVIDLERTAKELDTNTLKNAGDLLNRSAPQKLEVIYPQLEKGVSELLLQPPQKL

SEQ ID NO: 504 - DNA, 2004 bp, Homo sapiens
gagtgtgtgacccagcccttcccccgtggccaagcagagagagtggccttgaggaagccatagcagcaggaccagcatggcctctgctgcctctgtgaccagcctggcagatgaagtcaactgccccatctgtcagggtaccctgagggagccggtcactatcgactgcggccacaacttctgccgggcctgccttacccgctactgtgagataccaggcccagacctggaggagtcccctacttgcccactctgcaaagaacccttccgtcctgggagcttccggcccaactggcagctggctaacgtggtggagaacattgagcgcctccagctggtgtccacactgggtttgggagaggaggatgtctgccaagagcacggagggaagatctacttcttctgtgaggatgatgagatgcagttgtgcgtggtgtgccgggaggctggggagcacgctacccacaccatgcgcttcctggaggatgcagcggctccctatagggaacaaatccataagtgtcttaaatgtctaagaaaagagagagaggagattcaagaaatccagtcaagagaaaataaaaggatgcaagtcctcctgactcaggtgtccaccaagagacaacaggtgatttctgagttcgcacacctgaggaagtttctagaggaacagcagagcatcctcttagcacaattggagagccaggatggggacatcttgaggcaacgggatgaatttgatttgctggttgctggggagatctgccggtttagtgctcttattgaagaactggaggagaagaatgagaggccagcaagggagctcctgacggacatcagaagcactctaataagatgtgaaaccagaaagtgccggaaaccggtggctgtgtcgccagagctgggccagaggattcgggactttccccagcaggccctcccgctgcagagggagatgaagatgtttctggaaaaactatgctttgagttggactatgagccagctcacatttctctagaccctcagacttcccaccccaagctcctcttgtccgaggaccaccagcgagctcagttctcctcaaaatggcagaactcaccagacaacccccagcgttttgaccgggccacctgtgttctggcccacactggcatcacaggggggagacacacgtgggtggtgagtatagacctggcccatggggcgagctgcaccgtgggcgtggtgagcgaggatgtgcagcggaagggggagcttcggctgcggccagaggagggggtgtgggctgtgaggctggcttggggcttcgtctcggctctgggctccttccccacacggctgaccctgaaggagcagccccggcaggtgagggtgtctcttgactatgaggtgggctgggtgaccttcaccaacgctgtcacccgagagcccatctacaccttcactgcctccttcactaggaaggtcattcccttctttgggctctggggccgagggtccagtttctccctgagctcctgagaaggagcagttacctactctcctctaagtacaggactcattcaacccagtaccatgtggcttgatccctggctgaatcacctggatgactcgggatagaaatgactgctttagaagatgggatggggtcgggtggtaagggatagaagagaggactctcaatctactgatcaagtcctttccccaatgcccagtggatggccagggtacctggggactcaggctgctgccagttctgctcaccaccatccgtgcttggcacagaagtagctgcatagaaagagcactggatttgaagtcagaagacctggttcttgaaccagcctgtcaaccagttgtatgactttaaacaaggcatctcacctcttttcatcttgttttcttccaataatgttagagttcatgtaatcacattctctagaaccatttagtttgtgttaactatgaaccaagcagtgtggtgggccactggtggacttgga

SEQ ID NO: 505 - protein, 481 aa, Homo sapiens
MASAASVTSLADEVNCPICQGTLREPVTIDCGHNFCRACLTRYCEIPGPDLEESPTCPLCKEPFRPGSFRPNWQLANVVENIERLQLVSTLGLGEEDVCQEHGGKIYFFCEDDEMQLCVVCREAGEHATHTMRFLEDAAAPYREQIHKCLKCLRKEREEIQEIQSRENKRMQVLLTQVSTKRQQVISEFAHLRKFLEEQQSILLAQLESQDGDILRQRDEFDLLVAGEICRFSALIEELEEKNERPARELLTDIRSTLIRCETRKCRKPVAVSPELGQRIRDFPQQALPLQREMKMFLEKLCFELDYEPAHISLDPQTSHPKLLLSEDHQRAQFSSKWQNSPDNPQRFDRATCVLAHTGITGGRHTWVVSIDLAHGASCTVGVVSEDVQRKGELRLRPEEGVWAVRLAWGFVSALGSFPTRLTLKEQPRQVRVSLDYEVGWVTFTNAVTREPIYTFTASFTRKVIPFFGLWGRGSSFSLSS

SEQ ID NO: 506 - DNA, 3033 bp, Homo sapiens
gagtgtgtgacccagcccttcccccgtggccaagcagagagagtggccttgaggaagccatagcagcaggaccagcatggcctctgctgcctctgtgaccagcctggcagatgaagtcaactgccccatctgtcagggtaccctgagggagccggtcactatcgactgcggccacaacttctgccgggcctgccttacccgctactgtgagataccaggcccagacctggaggagtcccctacttgcccactctgcaaagaacccttccgtcctgggagcttccggcccaactggcagctggctaacgtggtggagaacattgagcgcctccagctggtgtccacactgggtttgggagaggaggatgtctgccaagagcacggagggaagatctacttcttctgtgaggatgatgagatgcagttgtgcgtggtgtgccgggaggctggggagcacgctacccacaccatgcgcttcctggaggatgcagcggctccctatagggaacaaatccataagtgtcttaaatgtctaagaaaagagagagaggagattcaagaaatccagtcaagaaaaaataaaaggatgcaagtcctcctgactcaggtgtccaccaagagacaacaggtgatttctgagttcgcacacctgaggaagtttctagaggaacagcagagcatcctcttagcacaattggagagccaggatggggacatcttgaggcaacgggatgaatttgatttgctggttgctggggagatctgccggtttagtgctcttattgaagaactggaggagaagaatgagaggccagcaagggagctcctgacggacatcagaagcactctaataagatgtgaaaccagaaagtgccggaaaccggtggctgtgtcgccagagctgggccagaggattcgggactttccccagcaggccctcccgctgcagagggagatgaagatgtttctggaaaaactatgctttgagttggactatgagccagctcacatttctctagaccctcagacttcccaccccaagctcctcttgtccgaggaccaccagcgagctcagttctcctacaaatggcagaactcaccagacaacccccagcgttttgaccgggccacctgtgttctggcccacactggcatcacaggggggagacacacgtgggtgtggatggccagggtacctggggactcaggcggctgccagttctgctcaccaccatccgtgcttggcacagaagtagctgcatagaaagagcactggatttgaagtcagaagacctgggttcttgaaccagcctgtcaaccagttgtatgactttaaacaaggcatctcacctcttttcatcttgttttcttccaataatgttagagttcatgtaatcacattctctagaaccatttagtttgtgttaactatgaaccaagcagtgtggtggccactggtgacttgaaaatatagagaaaaaaaaaacctgctctatatctgaaagagctcttgggaagacagagaaacataaagaggaaattacagcacagtgtggtgggtgttacgggaagtccaaccccagcattatgggagttcaggggaaggggcatagcccagcctggaaggagagggtgagtgggggatggctttctgaaaagggtggtctaaaggatgcctatggtcaatagggaaaagaggggaagaagcatcttaagaagaggaaacagcagagaactggctggatgacctgtgactctggagcactgggttgtctccattgtcattatgggcagatgtgtgccatccccagccgacgccactcactgcctccttcctcctggtgttgccacttctgggtgagattaaggtgcagggcctgggggcaggaggacataaggtatagccataaatcataacccagggaccacactcaaccctagggaaattgtcttcctgatcagttgattaccatctgaggtcaagaaatgagatagtgggagcaaatgggtcacaaatagctcagctgtgggctcagaaactgctaggtaaaagaattccagaaggaggccagggcataagttggatgacctatgaactttagtctaaagaattgagactaccgtaattgagactactgtagtgacatctgagaaatgggatggaagagtgaccatgttttattttcttgttcttgtcactattgtattttattttgcataatcatgcccttcactgacagtctccttaacatcatctgtttactctgctcagtgtaaactacaatgctctgtcatctccctactgggtctcctgggaggaggggagccatccagggtgcaaactcaaaggcagagggcacagcgtgcttaggcccaagcttagaattcaattgagaagttctgttgttcatccttacctcagcaggtagaaaagaggtggagatcagaagccagggattagagattgaattgctttccctgggagtgtgcagtatctcattaaaatgttgtatattcaaaaaaatacagacacacacaagtgcctatataatgataaaacatatccaaagcacccaaacctgtgattccagaaaagtagatcctatttttgtttatttttattggctttagctgtgtcttttgaaaggactattatcctctaaaatgtatgtgtatgaagatcctggcttgcagctcgggagctttacacaccttgtgtcactttatcttggtaacgagccaagatcatgcaaccagttcatccatgtctgacccaagagctcttaactgctatgctgcactgcctcattcagagatagatgcctgcatgggtcctggcgattattttaatgctggctacacccccacaggtgacttggattcagaaatacaatttatatttcttctttttaaattgttttattttatttttcttttaatagttatatgtcagtgagaacaatttatatgtcttacactgagaaataaaactgctcataagtgaaaaaaaaaaaaaaaaaaaaaaaaaaaaaa

SEQ ID NO: 507 - protein, 395 aa, Homo sapiens
MASAASVTSLADEVNCPICQGTLREPVTIDCGHNFCRACLTRYCEIPGPDLEESPTCPLCKEPFRPGSFRPNWQLANVVENIERLQLVSTLGLGEEDVCQEHGGKIYFFCEDDEMQLCVVCREAGEHATHTMRFLEDAAAPYREQIHKCLKCLRKEREEIQEIQSRKNKRMQVLLTQVSTKRQQVISEFAHLRKFLEEQQSILLAQLESQDGDILRQRDEFDLLVAGEICRFSALIEELEEKNERPARELLTDIRSTLIRCETRKCRKPVAVSPELGQRIRDFPQQALPLQREMKMFLEKLCFELDYEPAHISLDPQTSHPKLLLSEDHQRAQFSYKWQNSPDNPQRFDRATCVLAHTGITGGRHTWVWMARVPGDSGGCQFCSPPSVLGTEVAA

SEQ ID NO: 508 - DNA, 2255 bp, Homo sapiens
gatgtgggcacgcctcagagccagaagtttatggctcccacctgctcaatctgacaggaagcttctgctccccagttctccccagccactgtggtctacagattccaggaaacccatccccctgtgacctcagggtgtgctctgttctccaccctagggaccagaaggagccaggagtaaagaactggcttacttggccgccactgggaaattctgggtaattcgagacgccctggaatttggacccactccgctgataggtggtgggcagggttctagggaacacaagaggcggagccaggtggcttccctgtgctggcattcttggctctctctctctctctttctctctctctgtctctctctctctctctgtctctcagccttgaagccgtttccctctgcgattcatgtaagtgtgactcgatttcagggaaagggaactcgcgtgggctgaggagaccggagtggacgggctggggaaggcaccgtgatgcccgcaaccccgtccctgaaggtggtccatgagctgcctgcctgtaccctctgtgcggggccgctggaggatgcggtgaccgttccctgtggacacaccttctgccggctctgcctccccgcgctctcccagatgggggcccaatcctcgggcaagatcctgctctgcccgctctgccaagaggaggagcaggcagagactcccatggcccctgtgcccctgggcccgctgggagaaacttactgcgaggagcacggcgagaagatctacttcttctgcgagaacgatgccgagttcctctgtgtgttctgcagggagggtcccacgcaccaggcgcacaccgtggggttcctggacgaggccattcagccctaccgggatcgtctcaggagtcgactggaagctctgagcacggagagagatgagattgaggatgtaaagtgtcaagaagaccagaagcttcaagtgctgctgactcagatcgaaagcaagaagcatcaggtggaaacagcttttgagaggctgcagcaggagctggagcagcagcgatgtctcctgctggccaggctgagggagctggagcagcagatttggaaggagagggatgaatatatcacaaaggtctctgaggaagtcacccggcttggagcccaggtcaaggagctggaggagaagtgtcagcagccagcaagtgagcttctacaagatgtcagagtcaaccagagcaggtgtgagatgaagacttttgtgagtcctgaggccatttctcctgaccttgtcaagaagatccgtgatttccacaggaaaatactcaccctcccagagatgatgaggatgttctcagaaaacttggcgcatcatctggaaatagattcaggggtcatcactctggaccctcagaccgccagccggagcctggttctctcggaagacaggaagtcagtgaggtacacccggcagaagaagagcctgccagacagccccctgcgcttcgacggcctcccggcggttctgggcttcccgggcttctcctccgggcgccaccgctggcaggttgacctgcagctgggcgacggcggcggctgcacggtgggggtggccggggagggggtgaggaggaagggagagatgggactcagcgccgaggacggcgtctgggccgtgatcatctcgcaccagcagtgctgggccagcacctccccgggcaccgacctgccgctgagcgagatcccgcgcggcgtgagagtcgccctggactacgaggcggggcaggtgaccctccacaacgcccagacccaggagcccatcttcaccttcactgcctctttctccggcaaagtcttccctttctttgccgtctggaaaaaaggttcctgccttacgctgaaaggctgaagtggggcgcgcgaagggcggcgaagcggagacggcggctctccgggatccagctccgcccctggccagtgtgcggcccgggggctccctgtgcccgcgtgaggcgagagaacaggggacttgagtctcgaacagcggttgtttttactttatttatcttaggccctcagctccctgacgtcctgagcctccctgtgacgctctggccttctctgcacctcagagtgcagaaccacagacggcttcggctgtgcctagggcaacagccaacctaggagccagcgggctttcggggaaaaaaaagaaaaagacatctaaaataaaatgtttaaactgtttcaaaataaaaaaaaaaaaaaaaaaa

SEQ ID NO: 509 - protein, 465 aa, Homo sapiens
MPATPSLKVVHELPACTLCAGPLEDAVTVPCGHTFCRLCLPALSQMGAQSSGKILLCPLCQEEEQAETPMAPVPLGPLGETYCEEHGEKIYFFCENDAEFLCVFCREGPTHQAHTVGFLDEAIQPYRDRLRSRLEALSTERDEIEDVKCQEDQKLQVLLTQIESKKHQVETAFERLQQELEQQRCLLLARLRELEQQIWKERDEYITKVSEEVTRLGAQVKELEEKCQQPASELLQDVRVNQSRCEMKTFVSPEAISPDLVKKIRDFHRKILTLPEMMRMFSENLAHHLEIDSGVITLDPQTASRSLVLSEDRKSVRYTRQKKSLPDSPLRFDGLPAVLGFPGFSSGRHRWQVDLQLGDGGGCTVGVAGEGVRRKGEMGLSAEDGVWAVIISHQQCWASTSPGTDLPLSEIPRGVRVALDYEAGQVTLHNAQTQEPIFTFTASFSGKVFPFFAVWKKGSCLTLKG

SEQ ID NO: 510 - DNA, 454 bp, Homo sapiens
atgcccgcaaccccgtccctgaaggtggtccatgagctgcctgcctgtaccctctgtgcggggccgctggaggatgcggtgaccgttccctgtggacacaccttctgccggctctgcctccccgcgctctcccagatgggggcccaatcctcgggcaagatcctgctctgcccgctctgccaagaggaggagcaggcagagactcccatggcccctgtgcccctgggcccgctgggagaaacttactgcgaggagcacggcgagaagatctacttcttctgcgagaacgatgccgagttcctctgtacctcagagtgcagaaccacagacggcttcggctgtgcctagggcaacagccaacctaggagccagcgggctttcggggaaaaaaaagaaaaagacatctaaaataaaatgtttaaactgtttcaaaataaaaaaaaaaaaaaaaaaa

SEQ ID NO: 511 - protein, 115 aa, Homo sapiens
MPATPSLKVVHELPACTLCAGPLEDAVTVPCGHTFCRLCLPALSQMGAQSSGKILLCPLCQEEEQAETPMAPVPLGPLGETYCEEHGEKIYFFCENDAEFLCTSECRTTDGFGCA

SEQ ID NO: 512 - DNA, 3499 bp, Homo sapiens
cgggacccggaacagaccgccgtgagagaggaggggtgccggccgggattcgcggcccggagctcgggaccggagtcaggaatggagagaagggtaatggttttacctcttattgtggaaacctgttgagatcacagagaatatactgacggcataaaagggcagaaccatagcagggtgcggttgcttcattccagcctcgcagtcacctctgtgccctgctggttgtcttcccagcgctgctgtagttgccttccatggatctataggagagcaagtcctccaggagctggtggtgtctgtcgattgactgagtgctggagctggcagccctgtgcaggctgccacctttgcccctttactgtgcttgctcctgactctatgtcgcgtctccaaggagaagaagtcctcaccagtgaacggagacctctctgaactaaggataccatggccacgtcagccccactacggagcctggaagaggaggtgacctgctccatctgtcttgattacctgcgggaccctgtgaccattgactgtggccacgtcttctgccgcagctgcaccacagacgtccgccccatctcagggagccgccccgtctgcccactctgcaagaagccttttaagaaggagaacatccgacccgtgtggcaactggccagcctggtggagaacattgagcggctgaaggtggacaagggcaggcagccgggagaggtgacccgggagcagcaggatgcaaagttgtgcgagcgacaccgagagaagctgcactactactgtgaggacgacgggaagctgctgtgcgtgatgtgccgggagtcccgggagcacaggccccacacggccgtcctcatggagaaggccgcccagccccacagggaaaaaatcctgaaccacctgagtaccctaaggagggacagagacaaaattcagggcttccaggcaaagggagaagctgatatcctggccgcgctgaagaagctccaggaccagaggcagtacattgtggctgagtttgagcagggtcatcagttcctgagggagcgggaggaacacctgctggaacagctggcgaagctggagcaggagctcacggagggcagggagaagttcaagagccggggcgtcggggagcttgcccggctggccctggtcatctccgaactggagggcaaggcgcagcagccagctgcagagctcatgcaggacacgagagacttcctaaacaggtatccacggaagaagttctgggttgggaaacccattgctcgagtggttaaaaaaaagaccggagaattctcagataaactcctctctctgcaacgaggcctgagggaattccaggggaagctgctgagagacttggaatataagacagtgagcgtcaccctggacccacagtcggccagtgggtacctgcagctgtcagaggactggaagtgcgtgacctacaccagcctgtacaagagtgcctacctgcacccccagcagtttgactgtgagcctggggtgctaggcagcaagggcttcacctggggcaaggtctactgggaagtggaagtggagagggagggctggtctgaggatgaagaagagggggatgaggaggaagagggagaagaggaggaggaggaagaggaggccggctatggggatggatatgacgactgggaaacggacgaagatgaggaatcgttgggcgatgaagaggaagaagaggaggaggaagaggaggaagttctggaaagctgcatggtgggggtggctagagactctgtgaagaggaagggagacctctccctgcggccagaggatggcgtgtgggcgctgcgcctctcctcctccggcatctgggccaacaccagccccgaggctgagcttttcccagcactgcggccccggagagtgggcatcgccctggattatgaagggggcaccgtgactttcaccaacgcagagtcacaggaactcatctacaccttcactgccaccttcacccggcgcctggtccccttcctgtggctcaagtggccaggaacacgcctcctgctaagaccctgagccctgacatctgcccccagccccaaccctcagatgcttcacttctttggaattccaggactctcaatggggggacgggatgcctggcctaagcacctggagcaggggaccccatatccactggtagccacctccccattgctgtggccccctgaaatctcactcagtgctgttgctccatctactgccctaatggggctcttttcccacctcctgctggtttcccgagggaacttctgaccctggagtccatgagggctcctttcctttttgaccacgaccttggccccagctctgcactctctggaataagggcccgatgcagcattttcttgcccagtgtggcaagacctcagaaaaaccagtcaattacgcctaagatcattttgctgtccttaaaccccccaggttccttcttgcacaaatccactctgctgcccaccttccctggcattttaaacagacctaccccaccccaactcagagttaagcatacatggcaatgctgaaaataaacaaaatccactgaggcttcccaggccatttaaagcctggagtaccagcgcatatcatctcatggggtccagagtggagtccaggcttctctgaaaccagggctgagcatatttccatagccaaggaggtgggactccctggagctatctgtggtcttagggaaggatccagacatacacggctttggggtacaagctgtgatcactgatcaataaattatctctagattggtccttgtgaggggagttttaagaatccagaacatcttgctcttgatcagcacatccaaaaacaccaagacaaacatccagtggagcagaacctctcctgcctcgggagttctgaccgggttccccagcagggtgttaagcctctgtctctggccctaccagcatccaggttccactttcctaggagagagtggagatgggaagacagggaaaggaaggcagcaggaggccacaagcccaccaggtcttcatgtcaagagagggagtaacatgtcttctcattgcccacggacccaacctctgtccaggtgcccctcatcatcacagtttaacacaagctcccctgctccagccaaattgatctcccagtcttgtccttacccattccaagtgctctgccagcccctgttcatccaagttttaagtcctccaccctgttctaagagactgttccaacggctctgggcctcagtggtcacttgaccaccattgtctcagagctgcccactttgtgtgtgtcacatgctgcctgagtcacatgtacatcttatttctgcctctagttttgtaagctcctggagggcggataacatcttatactactcttgtattctcatggcacctagtgcagtgctgggcacagagtaggtgctcaataaagacttgttgaatgaaaaaaaaaaaaa

SEQ ID NO: 513 - protein, 539 aa, Homo sapiens
MATSAPLRSLEEEVTCSICLDYLRDPVTIDCGHVFCRSCTTDVRPISGSRPVCPLCKKPFKKENIRPVWQLASLVENIERLKVDKGRQPGEVTREQQDAKLCERHREKLHYYCEDDGKLLCVMCRESREHRPHTAVLMEKAAQPHREKILNHLSTLRRDRDKIQGFQAKGEADILAALKKLQDQRQYIVAEFEQGHQFLREREEHLLEQLAKLEQELTEGREKFKSRGVGELARLALVISELEGKAQQPAAELMQDTRDFLNRYPRKKFWVGKPIARVVKKKTGEFSDKLLSLQRGLREFQGKLLRDLEYKTVSVTLDPQSASGYLQLSEDWKCVTYTSLYKSAYLHPQQFDCEPGVLGSKGFTWGKVYWEVEVEREGWSEDEEEGDEEEEGEEEEEEEEAGYGDGYDDWETDEDEESLGDEEEEEEEEEEEVLESCMVGVARDSVKRKGDLSLRPEDGVWALRLSSSGIWANTSPEAELFPALRPRRVGIALDYEGGTVTFTNAESQELIYTFTATFTRRLVPFLWLKWPGTRLLLRP

SEQ ID NO: 514 - DNA, 4587 bp, Homo sapiens
gcactcagattctccccaaacgccaaggatgggggtcatggctccccgaaccctcctcctgctgctcttgggggccctggccctgaccgagacctgggccgcgactccgtgagtccgaggatggagcggcgggcgccgtgggtggagcaggaggggctggagtattgggaccaggagacacggaacgccaagggccacgcgcagatttaccgagtgaacctgcggaccctgctccgctattacaaccagagcgaggccggtatgaacagttcgcctacgatggcaaggattacatcgccctgaacgaggacctgcactcctggaccgccgcgaacacagcggctcagatctcccagcacaagtgggaagcggacaaatactcagagcaggtcagggcctacctgagggcaagtgcatggagtggctccgcagacacctggagaacgggaaggagacgctgcagcacgcggatcccccaaaggcacatgtgacccagcaccccatctctgaccatgaggccaccctgaggtgctgggccctgggcctctaccctgcggagatcacactgacctggcagcaggatggggaggaccagacccaggacacggagcttgtggagaccaggcctgcaggggacggaaccttccagaagtgggtggctgtagtggtgccttccggagaggagcagagatacatgtgccatgtgcagcatgaggggctgccagagcccctcaccctgagatgggagccgtcttctcagcccaccatccccatcgtgggcatcgttgctggcctgtttctccttggagctgtggtcactggagctgtggttgctgctgcgatgtggaggaagaaaagctcaggcagcaattgtgctcagtactctgatgcatctcatgatacttgtaaagaggactatgcctgttcctgttctggtgtctgcgttctgatctctttctcccctgggtgtccctcatctctgacagcagcaggagtcatttttcctgtcattaaccccacaaggtggaaggcagcccctgcacacagaagtctgtggtattaagagatgaattttcaagcccgtgcagcttttaccctatttccagggctctttcttgggttgtattttctatcttttccccaacctttttaaaggaactagattctgaaattagcagagaagagggatgccacaagttctcatcttaggtaactttctagtggaactcctcttctgctcagctctcctacccactctcccttccctgagttgtagtaatcctagcactggctctaatgcaaactcatggatctataaagcaaagtctaacttagatttatatttgtttggaaattgggattcatagtcaaagattgttctttcctaagagggaaatataattgcatgctgcagtgtgcagagggttggtgtgaaggagggatgcagggaggaagggagggaggacacacaagcagcactgctgggaaaagcacaggcggcctggatgtcagtgtgaggggaccttatgctgtcgttgctgcaaaaccgcatttggcctgaggctatgttaataaagatactgcctttagaataggaggtgctctacagtgatgattcattcagccgacatttgctgtctgccagacatatgacagaatgtttttgcatctggggaaagtcattgaagtaaaatcagaaaaatctctagccttgtggagcatgtgttccagtgggaagaggcagacggtacatacactctaatatatgcagagtaaatgaggaaagtgttagaaggtgataagtgctgtggaacaggtgatcagagtatgggttgtgggacagagaaggtagctattgtgccggggttgtcagcgtgggccttgttgggaaggtgacctttgatgaaatatttgaaggacataaaggaatttgtcatgagggtatctggaagaagttttttctagggagtaggaaccttcagtgtcagtgtaccagggcaggatcatgtctgtgtgttctgggaagaacacgggatcgggtatggctagagcagagagtcactgagataaggtcaggggtttggtcagatcatgtgggcatagggctcaagtatgtgggaaggattttgattttgaatgagatagttttaagcagaataaagacatgccacaacttctcttttaaaaggatcactgtagctgctctgctgagaacagaatccaaaggccggcgatgagcaaggcaggtgggagaactgtaggaaatgagtgcagtatttcaggctggagatgtcggttacttcaactggggtgtgagcagtggaaatagtgggacgtgattggattcctactatttccaatcactttataccgcattttctaatggactaaatctggggtatgagaaagaagagtaaaggataccaaaaatgtcagactgtgactaaaaagagttgccatcagctgagaatgagaagactagcaggagcatatgagaggaggggacgtcgcaggcagtcactatgggagacgtgggatctgagatgccgctgagaaataccagtgaggtagtcgggttggcagttggacagatgaatctggagacatttaggagaaatagacttgggaggtgatgtcatataacagttatttaaagccttgagtctgaatgacgtctccaagggagtgattggctgtagaagagaacaggaacaaggactgaacactaggcctctgttgctaaaggatctgatcagacaacacacctagatcagactgcacagtcctgaccccacatctagaaggtacatagaccagggagttctagactttcctgtggacaggaatcacctggacatcaccttaagtctaagctgatctggaatcgagaatgagatttcctacttatataatgttgctgttggcgctgatgctgctggtcttcagatcccacttttggtagcaagaacacagaccaggattcctaggctatgcatcagcctcgcctgtgaggcttgttaataagcaattcctgcactccatgcgcaacattctgacacaggggcatctgtggagaggcctgagtattctacaacaagcccacagcaaacctggtgctcagccagatttgatatcactgagatcagtagttggagaatgcccaggatggggaggggtctcagacccacatttaagtgttgctttattctgggttttttatttatttatttatttatttttaaggaggatgtgtttctttaattataagacaggatgctgagagataaatgtcattttctctatcatggggtatagccagatggaagattgagaagtggctcacagctcagcagaatgaaaaaatatctgaatgctgctttctgaaactactctccagaatgatttcacactcactccttggagcaaacaatgacttgcaaatttttctaatttaaacataaaggagtgtacatattggtattagtattcattttattttggggaagggcactgtattagtccatagtccgttttcacactgccgataaagacatacccaacattgggaagaaaaagaggtttaattggacttacagttccatttggctggggaggcctcagaatcatggtgggaggcgaaaggcacttcttacatggtggtggcaagagaaaatgaggaagaagcaaatgccaaaacccctgataaacacattggatctcaggagacttattcattatcatgagaatagcatgggaaagactggcccccatgattcaattacctccccctgggtccctcccacaacatgtgggaattctgggagatacaattcaagttgagatttgggtggggacacagccaaaccacattggacacagaaccaggtttgaagctacacagccaggaacataatccacagccaccctaattcagatctctcataggaaccactgtccctgctcctgagcacagatgctactgcatatacctctgataccctgatggccgacactgggccctgtggcaaagactgctatcactgctgctcctgagaactgctccactactgctcctcagccatctttaccaaaatgcagtatttactgtcccagcctctctgtgtcatctcatcctgattagaagcccacatgtggttatctaaattgtgcagccaaagcctcttgcagtgtttaactgcaataatgttggggaaagtgaatttttctcctttgtagaaggaggtagtccctgccttctaataagactcttcaacataggaagagaattcagttgctggaggtagaggggtgagggatggaaaaagaatgacaaatttcaattcctagaatcatgttctgagactagaactttatctagtacattgcaggcacctgggtttggttgagtgtataataaatgacatagttcaacttattcccttgacagtttgttttggggtccagcttttgtctaccccagttttcacacacagatacgtggagaagcattgtgtgatggtaaaatgtttacttgaaagcctttttccctatctttgtctcttgctaggattaaaaacccgtatctgt

SEQ ID NO: 515 - protein, 215 aa, Homo sapiens
MEWLRRHLENGKETLQHADPPKAHVTQHPISDHEATLRCWALGLYPAEITLTWQQDGEDQTQDTELVETRPAGDGTFQKWVAVVVPSGEEQRYMCHVQHEGLPEPLTLRWEPSSQPTIPIVGIVAGLFLLGAVVTGAVVAAAMWRKKSSGSNCAQYSDASHDTCKEDYACSCSGVCVLISFSPGCPSSLTAAGVIFPVINPTRWKAAPAHRSLWY

SEQ ID NO: 516 - DNA, 3635 bp, Homo sapiens
agcgtcatagcggcgggcatcccatctgcacgtcacacctctttctcacctggacacgcatcccttcctaccctgccagccacgacgtttcctctttcccctctccaatgcccagccccagatctggcggaagaagatggagaacgggggtgggacagagttgtggacaacctctcaggagagggtcgcaaggtgggaccctgaacagtggtagaaacaaaatgagattgtccctgaagtttgcccttcagctgagacacaaggagtagaggaagaggaaggactaacgcagaggcactcaaggtctcactatgactgtagttgagagtcctctcccttcttccctaaccctttccccatttctctcaccacttctttgccagtctagatccgtcctggtgccttactgtgcatacagttctactcgtctcagattcctttcttgtctgttagaaacgtatgtcaaacgaggatacagtgtctggaactattggttctaagatataagtggaatgagcctggatcaggagaagtatgctgagctagagttgaaggaagcttctctttctaacaagagaaagcagagttaaattatggcagagacaagtctgttagaggctggggcctctgcagcctctacagctgcggctttggagaacttacaggtggaggcgagctgctctgtgtgcctggagtatctgaaggaacctgtcatcattgagtgtgggcacaacttctgcaaagcttgcatcacccgctggtgggaggacctagagagggacttcccttgtcctgtctgtcgaaagacatcccgctaccgcagtctccgacctaatcggcaactaggcagtatggtggaaattgccaagcagctccaggccgtcaagcggaagatccgggatgagagcctctgcccccaacaccatgaggccctcagccttttctgttatgaggaccaggaggctgtatgcttgatatgtgcaatttcccacacccaccgggctcacaccgttgtgccactggacgatgctacacaggagtacaaggaaaaactgcagaagtgtctggagcccctggaacagaagctgcaggagatcactcgctgcaagtcctctgaggagaagaagcctggtgagctcaagagactagtggaaagtcgccgacagcagatcttgagggagtttgaagagcttcataggcggctggatgaagagcagcaggtgttgctttcacgactggaagaagaggaacaggacattctgcagcgactccgagaaaatgctgctcaccttggggacaagcgccgggacctggcccacttggctgccgaggtggagggcaagtgcttacagtcaggcttcgagatgcttaaggatgtcaaaagtaccctggaaaagaatattcctagaaagttcggaggctcactctcaacgatctgtccacgggatcataaggctctccttggattagtaaaagaaatcaacagatgtgaaaaggtgaagaccatggaggtgacttcagtatccatagagctggaaaagaacttcagcaattttccccgacagtactttgccctaaggaaaatccttaaacagctaattgcggatgtgaccctggaccctgagacagctcatcctaacctagtcctgtcagaggatcgtaagagcgtcaagttcgtggagacaagactccgggatctccctgacacaccaaggcgtttcaccttctacccttgcgtcctggctactgagggtttcacctcaggtcgacactactgggaggtggaggtgggcgacaagacccactgggcagtgggtgtatgccgggactccgtgagccgaaagggcgagttgactccactccctgagactggctactggcgggtgcggctatggaatggggacaaatatgcagccaccaccacaccttttacccctttgcacatcaaggtgaaacccaagcgggtaggcatattcctagactatgaggccggcacactgtctttctacaatgtcacagaccgctctcatatctacaccttcactgatacttttactgagaaactttggcccctcttctacccaggcatccgggctggacggaagaatgctgcaccacttaccatcaggcccccaacagattgggagtgacaggttgggatgtgggaatgactggggtgaggcagggtcaagtgctacgggcctccttcccgtgtcctgctggaacgtcttcgtgtccacctgggtccagtcctgaatcatcttggagaaacaccttggtttctaggatggttttgtgtggagggggaggtaggactgggctggatgagagagcacagctgtgacttcctcctaactgtcagggtggggagctggttcccagaggattgtctaccctgaagtccatcaggttttctgttgcacaaggacgggtcaggaaggaaggagaggcttttccagaaacaaaaaatctgtgagggtctgacttgctcaaaccagaggaggaaacagaaacccctgcacatctttttagggggttctttgacccaggatagtcttgcttcttgaggtagatcacaggggtctgtgtacctctgaattcatgagagatgaatgacagatgctctcatgggtctagatattgaggagtttttctgagggcagagattggacatcaacaaggctagaagggtcagggaagtgggctaaaggaacagattcctagagattaatgaagaggagggaggtttctttggtcttctattccaagggtaaggttgcgattatgggtaagattggccagaggtaggaatgtggggagaaggagaggctgaaaagaaagcagaggagaacccaggtccctgcctcagccttcagcagagttggcttattgcctgcctctataccaataagtcagtcaccttgctcctctccagaggcaaagtggaagagatcctgcaagacacatctatcctttcacagtgttcccaagggaacttggaaaggagagtcaggtattagaggaaagagaagggtatttgtatacaaagccctggccttaaagaatgttacttagtagctactcccaaattgtcagccttcttacctggccaaggtgtccaagccagaaaggaaaaaaggttatggagtctttctcaccctaaggacagggtggaagagggtggtatatagggaagggccagataggcaacttcatttggcttgtgtgcatctggcctggaactggtgttaagccaggcttttgcttgtttgttgccatccctcaccctttgccatttcccttttcagagaatgtaaatgattttcatgttaggccaaaataaacaacttatagggtacatatgttgtcataaaaggtaaaagtgatgcatgccaaaccaaactaaaccaatttggattatctgctattcgggtaatcttcacagaaatgactgagagaagaatctgcagtttactgagggcatttcagttcctcctaccacctcaacaggactttgtccagactctcctcctcttacctttgtgccttgactgtggttctttgtggcaagatactttggttggttaaaataatatggaacaaaggatccactgaagtgaaaaaaaaaaaaaaaa

SEQ ID NO: 517 - protein, 518 aa, Homo sapiens
MAETSLLEAGASAASTAAALENLQVEASCSVCLEYLKEPVIIECGHNFCKACITRWWEDLERDFPCPVCRKTSRYRSLRPNRQLGSMVEIAKQLQAVKRKIRDESLCPQHHEALSLFCYEDQEAVCLICAISHTHRAHTVVPLDDATQEYKEKLQKCLEPLEQKLQEITRCKSSEEKKPGELKRLVESRRQQILREFEELHRRLDEEQQVLLSRLEEEEQDILQRLRENAAHLGDKRRDLAHLAAEVEGKCLQSGFEMLKDVKSTLEKNIPRKFGGSLSTICPRDHKALLGLVKEINRCEKVKTMEVTSVSIELEKNFSNFPRQYFALRKILKQLIADVTLDPETAHPNLVLSEDRKSVKFVETRLRDLPDTPRRFTFYPCVLATEGFTSGRHYWEVEVGDKTHWAVGVCRDSVSRKGELTPLPETGYWRVRLWNGDKYAATTTPFTPLHIKVKPKRVGIFLDYEAGTLSFYNVTDRSHIYTFTDTFTEKLWPLFYPGIRAGRKNAAPLTIRPPTDWE

SEQ ID NO: 518 - DNA, 3545 bp, Homo sapiens
agcgtcatagcggcgggcatcccatctgcacgtcacacctctttctcacctggacacgcatcccttcctaccctgccagccacgacgtttcctctttcccctctccaatgcccagccccagatctggcggaagaagatggagaacgggggtgggacagagttgtggacaacctctcaggagagggtcgcaaggtgggaccctgaacagtggtagaaacaaaatgagattgtccctgaagtttgcccttcagctgagacacaaggagtagaggaagaggaaggactaacgcagaggcactcaaggtctcactatgactgtagttgagagtcctctcccttcttccctaaccctttccccatttctctcaccacttctttgccagtctagatccgtcctggtgccttactgtgcatacagttctactcgtctcagattcctttcttgtctgttagaaacgtatgtcaaacgaggatacagtgtctggaactattggttctaagatataagtggaatgagcctggatcaggagaagtatgctgagctagagttgaaggaagcttctctttctaacaagagaaagcagagttaaattatggcagagacaagtctgttagaggctggggcctctgcagcctctacagctgcggctttggagaacttacaggtggaggcgagctgctctgtgtgcctggagtatctgaaggaacctgtcatcattgagtgtgggcacaacttctgcaaagcttgcatcacccgctggtgggaggacctagagagggacttcccttgtcctgtctgtcgaaagacatcccgctaccgcagtctccgacctaatcggcaactaggcagtatggtggaaattgccaagcagctccaggccgtcaagcggaagatccgggatgagagcctctgcccccaacaccatgaggccctcagccttttctgttatgaggaccaggaggctgtatgcttgatatgtgcaatttcccacacccaccgggctcacaccgttgtgccactggacgatgctacacaggagtacaaggaaaaactgcagaagtgtctggagcccctggaacagaagctgcaggagatcactcgctgcaagtcctctgaggagaagaagcctggtgagctcaagagactagtggaaagtcgccgacagcagatcttgagggagtttgaagagcttcataggcggctggatgaagagcagcaggtgttgctttcacgactggaagaagaggaacaggacattctgcagcgactccgagaaaatgctgctcaccttggggacaagcgccgggacctggcccacttggctgccgaggtggagggcaagtgcttacagtcaggcttcgagatgcttaaggatgtcaaaagtaccctggaaaaatgtgaaaaggtgaagaccatggaggtgacttcagtatccatagagctggaaaagaacttcagcaattttccccgacagtactttgccctaaggaaaatccttaaacagctaattgcggatgtgaccctggaccctgagacagctcatcctaacctagtcctgtcagaggatcgtaagagcgtcaagttcgtggagacaagactccgggatctccctgacacaccaaggcgtttcaccttctacccttgcgtcctggctactgagggtttcacctcaggtcgacactactgggaggtggaggtgggcgacaagacccactgggcagtgggtgtatgccgggactccgtgagccgaaagggcgagttgactccactccctgagactggctactggcgggtgcggctatggaatggggacaaatatgcagccaccaccacaccttttacccctttgcacatcaaggtgaaacccaagcgggtaggcatattcctagactatgaggccggcacactgtctttctacaatgtcacagaccgctctcatatctacaccttcactgatacttttactgagaaactttggcccctcttctacccaggcatccgggctggacggaagaatgctgcaccacttaccatcaggcccccaacagattgggagtgacaggttgggatgtgggaatgactggggtgaggcagggtcaagtgctacgggcctccttcccgtgtcctgctggaacgtcttcgtgtccacctgggtccagtcctgaatcatcttggagaaacaccttggtttctaggatggttttgtgtggagggggaggtaggactgggctggatgagagagcacagctgtgacttcctcctaactgtcagggtggggagctggttcccagaggattgtctaccctgaagtccatcaggttttctgttgcacaaggacgggtcaggaaggaaggagaggcttttccagaaacaaaaaatctgtgagggtctgacttgctcaaaccagaggaggaaacagaaacccctgcacatctttttagggggttctttgacccaggatagtcttgcttcttgaggtagatcacaggggtctgtgtacctctgaattcatgagagatgaatgacagatgctctcatgggtctagatattgaggagtttttctgagggcagagattggacatcaacaaggctagaagggtcagggaagtgggctaaaggaacagattcctagagattaatgaagaggagggaggtttctttggtcttctattccaagggtaaggttgcgattatgggtaagattggccagaggtaggaatgtggggagaaggagaggctgaaaagaaagcagaggagaacccaggtccctgcctcagccttcagcagagttggcttattgcctgcctctataccaataagtcagtcaccttgctcctctccagaggcaaagtggaagagatcctgcaagacacatctatcctttcacagtgttcccaagggaacttggaaaggagagtcaggtattagaggaaagagaagggtatttgtatacaaagccctggccttaaagaatgttacttagtagctactcccaaattgtcagccttcttacctggccaaggtgtccaagccagaaaggaaaaaaggttatggagtctttctcaccctaaggacagggtggaagagggtggtatatagggaagggccagataggcaacttcatttggcttgtgtgcatctggcctggaactggtgttaagccaggcttttgcttgtttgttgccatccctcaccctttgccatttcccttttcagagaatgtaaatgattttcatgttaggccaaaataaacaacttatagggtacatatgttgtcataaaaggtaaaagtgatgcatgccaaaccaaactaaaccaatttggattatctgctattcgggtaatcttcacagaaatgactgagagaagaatctgcagtttactgagggcatttcagttcctcctaccacctcaacaggactttgtccagactctcctcctcttacctttgtgccttgactgtggttctttgtggcaagatactttggttggttaaaataatatggaacaaaggatccactgaagtgaaaaaaaaaaaaaaaa

SEQ ID NO: 519 - protein, 488 aa, Homo sapiens
MAETSLLEAGASAASTAAALENLQVEASCSVCLEYLKEPVIIECGHNFCKACITRWWEDLERDFPCPVCRKTSRYRSLRPNRQLGSMVEIAKQLQAVKRKIRDESLCPQHHEALSLFCYEDQEAVCLICAISHTHRAHTVVPLDDATQEYKEKLQKCLEPLEQKLQEITRCKSSEEKKPGELKRLVESRRQQILREFEELHRRLDEEQQVLLSRLEEEEQDILQRLRENAAHLGDKRRDLAHLAAEVEGKCLQSGFEMLKDVKSTLEKCEKVKTMEVTSVSIELEKNFSNFPRQYFALRKILKQLIADVTLDPETAHPNLVLSEDRKSVKFVETRLRDLPDTPRRFTFYPCVLATEGFTSGRHYWEVEVGDKTHWAVGVCRDSVSRKGELTPLPETGYWRVRLWNGDKYAATTTPFTPLHIKVKPKRVGIFLDYEAGTLSFYNVTDRSHIYTFTDTFTEKLWPLFYPGIRAGRKNAAPLTIRPPTDWE

SEQ ID NO: 520 - DNA, 541 bp, Homo sapiens
agcgcggcggtgatggcggggccggtgaaggaccgcgaggccttccagaggctcaacttcctgtaccaggccgcccattgtgtccttgcccaggaccccgagaaccaggcgctggcgaggttttactgctacactgagaggaccattgcgaagcggctcgtcttgcggcgggatccctcggtgaagaggactctctgccgaggctgctcttccctcctcgtcccgggcctcacctgcacccagcgccagagacgctgcaggggacagcgctggaccgtacagacctgcctaacatgccagcgcagccaacgcttcctcaatgatcccgggcatttactctggggagacaggcctgaggcccagctcgggagccaagcagattccaaaccactacaacccttgccaaacacagcccactccatttcagaccgccttcctgaggagaaaatgcagactcagggttccagtaaccagtgatggattcaccccatctcccaaataaagtttacttgttttacattcaaaaaaaaaaaaaaaaaaa

SEQ ID NO: 521 - protein, 154 aa, Homo sapiens
MAGPVKDREAFQRLNFLYQAAHCVLAQDPENQALARFYCYTERTIAKRLVLRRDPSVKRTLCRGCSSLLVPGLTCTQRQRRCRGQRWTVQTCLTCQRSQRFLNDPGHLLWGDRPEAQLGSQADSKPLQPLPNTAHSISDRLPEEKMQTQGSSNQ

SEQ ID NO: 522 - DNA, 4361 bp, Homo sapiens
tcgtggggcgggggtggggcgggactgagggcggagtgtgagcgggctcggttttgggccgcggcgggagcgggagtcgccgccactcgagtgcgcaggcgcctggcgattaccggtctcaccatggagcggaaagtgcttgcgctccaggcccgaaagaaaaggaccaaggccaagaaggacaaagcccaaaggaaatctgaaactcagcaccgaggctctgctccccactctgagagtgatctaccagagcaggaagaggagattctgggatctgatgatgatgagcaagaagatcctaatgattattgtaaaggaggttatcatcttgtgaaaattggagatctattcaatgggagataccatgtgatccgaaagttaggctggggacacttttcaacagtatggttatcatgggatattcaggggaagaaatttgtggcaatgaaagtagttaaaagtgctgaacattacactgaaacagcactagatgaaatccggttgctgaagtcagttcgcaattcagaccctaatgatccaaatagagaaatggttgttcaactactagatgactttaaaatatcaggagttaatggaacacatatctgcatggtatttgaagttttggggcatcatctgctcaagtggatcatcaaatccaattatcaggggcttccactgccttgtgtcaaaaaaattattcagcaagtgttacagggtcttgattatttacataccaagtgccgtatcatccacactgacattaaaccagagaacatcttattgtcagtgaatgagcagtacattcggaggctggctgcagaagcaacagaatggcagcgatctggagctcctccgccttccggatctgcagtcagtactgctccccagcctaaaccagctgacaaaatgtcaaagaataagaagaagaaattgaagaagaagcagaagcgccaggcagaattactagagaagcgaatgcaggaaattgaggaaatggagaaagagtcgggccctgggcaaaaaagaccaaacaagcaagaagaatcagagagtcctgttgaaagacccttgaaagagaacccacctaataaaatgacccaagaaaaacttgaagagtcaagtaccattggccaggatcaaacgcttatggaacgtgatacagagggtggtgcagcagaaattaattgcaatggagtgattgaagtcattaattatactcagaacagtaataatgaaacattgagacataaagaggatctacataatgctaatgactgtgatgtccaaaatttgaatcaggaatctagtttcctaagctcccaaaatggagacagcagcacatctcaagaaacagactcttgtacacctataacatctgaggtgtcagacaccatggtgtgccagtcttcctcaactgtaggtcagtcattcagtgaacaacacattagccaacttcaagaaagcattcgggcagagataccctgtgaagatgaacaagagcaagaacataacggaccactggacaacaaaggaaaatccacggctggaaattttcttgttaatccccttgagccaaaaaatgcagaaaagctcaaggtgaagattgctgaccttggaaatgcttgttgggtgcacaaacatttcactgaagatattcaaacaaggcaatatcgttccttggaagttctaatcggatctggctataatacccctgctgacatttggagcacggcatgcatggcctttgaactggccacaggtgactatttgtttgaacctcattcaggggaagagtacactcgagatgaagatcacattgcattgatcatagaacttctggggaaggtgcctcgcaagctcattgtggcaggaaaatattccaaggaatttttcaccaaaaaaggtgacctgaaacatatcacgaagctgaaaccttggggcctttttgaggttctagtggagaagtatgagtggtcgcaggaagaggcagctggcttcacagatttcttactgcccatgttggagctgatccctgagaagagagccactgccgccgagtgtctccggcacccttggcttaactcctaagcccctgcccagcaccacagcagagatcacacactgaccctccgcccttccccttcaagcattttcctcttcccttttcagggtgaagctcttccttcaagagtttctagatcttgttttttttttaatccaacatgttcatttgggtttgcttacttgaccctgtggagatccccacagccattgggcatcctaggtgaatttggccttggttgggctctgccaaagactaatggactaaaatgtgaaacagcctcttgccctgtacctttccttcccattaggacatcctttaaattataagcatcctttttgaaaagagctatgaaggtgtatgagcccatccttttattcattgactctaagagtcaaattttctagtgcatatcctattgccagcataaggatgaggagggggaaagggtcttaattctatgtacagcagagacattaaacttgctgtgtccgggctgcatcatcttcctggactgtttctgttgttctctgtgttcacattttttcctgcaacttttaagctactgtcttttttaaatagctatatgaacaccaaatttgggtaccattttatcactgttcaaagcactgtcaaattcctttcatcctttaatagttaagatctttgaatcttcagtctgatttttaatgtaagcaaaaacagaaccattgaatagtaatttcttgagaacctcaggtgttctataaacagtcctttcctgtatgtcttctattaccctaagaccagagttattttggttggttgttttgttttattttttgtttttgtatccatggctggcactttactcattgcacttgagtttattgccccataactaaaggatcaggatgatggtagaacggagatctgggtttcagagctttcccatttaagaaaaatagatcttgagattctaattcttttccaaacagtcccctgctttcatgtacagctttttctttaccttacccaaaattctggccttgaagcagttttcctctatggctttgcctttctgattttctcagaggctcgagtctttaatataaccccaaatgaaagaaccaaggggaggggtgggatggcacttttttttgttggtcttgttttgttttgttttttggttggttggttcgttattttttaagattagccattctctgctgctatttccctacataatgtcaatttttaaccataattttgacatgattgagatgtacttgaggcttttttgttttaattgagaaaagactttgcaattttttttttaggatgagcctctcctagacttgacctagaatattacatattcctccagtaagtaatactgaagagcaaaagagaggcaggattggggtcacagccgcttcttcagcatggaccaagtgggccttggggattgcagcgttctcgaagtggctgtaggactcgaatttacagaaagccacagaggtgcaacttgaggctctgctagcaagccaccagtgaggctattgggtaaccacctttctatacaggagattggaatctactttgtcatttatccaccacagtgacaaaggaaaagtggtgccgttatgcaatccatttaactcataaacatattactctgagtaactggccagccattcatcggatccttcattgggtactcctgaaatcagacatgttcctgtagaaagaattttaagttaggctttctatgcacctatcaagaatcaagagaatagattgtatcaaacaacggcagggaaatccttcagcaattctaatccactttgggttttcagctgtttttacatctaaagcaatagactagaactgaattatcttctacatagtaaaatcacaattgtggaattacaggaattctggtgatattaaggtgaaataacaaaacacaaaaggccctattttaacagttgatgtgacagtaagttttaatagaacctgtaacttcattttggaaatgcttctccaccaaataagggctttttcccctatttaaggagccagatggattgaaagatgtggaaataggcagctgtagatcttgatcttccaggtaccccatgtacctttattgagcttaattataatactgtcaaattgccacgatctcactaaaggatttctatttgctgtcagttaaaaataaagccctaaatacatttttattctttctactgagggcattgtctgttttctttgtaaatgccgtacaataaacaaattatttaataaccta

SEQ ID NO: 523 - protein, 655 aa, Homo sapiens
MERKVLALQARKKRTKAKKDKAQRKSETQHRGSAPHSESDLPEQEEEILGSDDDEQEDPNDYCKGGYHLVKIGDLFNGRYHVIRKLGWGHFSTVWLSWDIQGKKFVAMKVVKSAEHYTETALDEIRLLKSVRNSDPNDPNREMVVQLLDDFKISGVNGTHICMVFEVLGHHLLKWIIKSNYQGLPLPCVKKIIQQVLQGLDYLHTKCRIIHTDIKPENILLSVNEQYIRRLAAEATEWQRSGAPPPSGSAVSTAPQPKPADKMSKNKKKKLKKKQKRQAELLEKRMQEIEEMEKESGPGQKRPNKQEESESPVERPLKENPPNKMTQEKLEESSTIGQDQTLMERDTEGGAAEINCNGVIEVINYTQNSNNETLRHKEDLHNANDCDVQNLNQESSFLSSQNGDSSTSQETDSCTPITSEVSDTMVCQSSSTVGQSFSEQHISQLQESIRAEIPCEDEQEQEHNGPLDNKGKSTAGNFLVNPLEPKNAEKLKVKIADLGNACWVHKHFTEDIQTRQYRSLEVLIGSGYNTPADIWSTACMAFELATGDYLFEPHSGEEYTRDEDHIALIIELLGKVPRKLIVAGKYSKEFFTKKGDLKHITKLKPWGLFEVLVEKYEWSQEEAAGFTDFLLPMLELIPEKRATAAECLRHPWLNS

SEQ ID NO: 524 - DNA, 3400 bp, Homo sapiens
ggaaccgccgccggtatccgcgtccgcagcgccgccagccaggcgagagccgtgtgggatcccagcgcccgcactcccgcccccgccaaggagccaggaatggcacaactagagaggagcgccatctctggcttcagctctaagtccaggcgaaactcattcgcatatgatgttaagcgtgaagtatacaatgaggagacctttcaacaggaacacaaaaggaaggcctcctcttctgggaacatgaacatcaacatcaccaccttcagacaccacgtccagtgccgctgctcatggcacaggttcctacgatgcgtgcttacaatctttcccttcctagaatggatgtgtatgtatcgattaaaggattggcttctgggagacttacttgctggtataagtgttggccttgtgcaagttccccaaggcctgacacttagtttgctggcaaggcaactgattcctcctctcaacatcgcttatgcagctttctgttcttcggtaatctatgtaatttttggatcgtgtcatcaaatgtccattggttccttcttcctggtgagtgctctgctgatcaacgttctgaaagtgagcccattcaacaacggtcaactggtcatgggatctttcgtcaagaatgagttttcggccccctcctaccttatgggctataataaatccttgagtgtggtggcaaccacaacttttctgactgggattattcagctaataatgggcgtattgggtttgggcttcattgccacttaccttccggagtctgcaatgagtgcttacctggctgctgtggcacttcatatcatgctgtcccagctgactttcatctttgggattatgattagtttccatgccggtcccatctccttcttctatgacataattaattactgtgtagctctcccaaaagcgaattccaccagcattctagtatttctaactgttgttgttgctctgcgaatcaacaaatgtatcagaatttctttcaatcagtatcccattgagtttcccatggaattatttctgattattggcttcactgtgattgcaaacaagataagcatggccacagaaaccagccagacgcttattgacatgattccttatagctttctgcttcctgtaacaccagatttcagccttcttcccaagataattttacaagccttctccttatctttggtgagctcctttctgctcatatttctgggcaagaagattgccagtcttcacaattacagtgtcaattccaaccaggatttaatagccatcggcctttgcaatgtcgtcagttcatttttcagatcttgtgtgtttactggtgctattgctaggactattatccaggataaatctggaggaagacaacagtttgcatctctggtaggcgcaggtgtgatgctgctcctgatggtgaagatgggacactttttctacacactgccaaatgctgtgctggctggtattattctgagcaacgtcattccctaccttgaaaccatttctaacctacccagcctgtggaggcaggaccaatatgactgtgctctttggatgatgacattctcatcttcaattttcctgggactggacattggactaattatctcagtagtttctgctttcttcatcaccactgttcgttcacacagagctaagattcttctcctgggtcaaatccctaacaccaacatttatagaagcatcaatgattatcgggagatcatcaccattcctggggtgaaaatcttccagtgctgcagctcaattacatttgtaaatgtttactacctaaagcataagctgttaaaagaggttgatatggtaaaggtgcctcttaaagaagaagaaattttcagcttgtttaattcaagtgacaccaatctacaaggaggaaagatttgcaggtgtttctgcaactgtgatgatctggagccgctgcccaggattctttacacagagcgatttgaaaataaactggatcccgaagcatcctccattaacctgattcactgctcacattttgagagcatgaacacaagccaaactgcatccgaagaccaagtgccatacacagtatcgtccgtgtctcagaaaaatcaagggcaacagtatgaggaggtggaggaagtttggcttcctaataactcatcaagaaacagctcaccaggactgcctgatgtggcggaaagccaggggaggagatcactcatcccttactcagatgcgtctctactgcccagtgtccacaccatcatcctggatttctccatggtacactacgtggattcacgggggttagtcgtattaagacagatatgcaatgcctttcaaaacgccaacattttgatactcattgcagggtgtcactcttccatagtcagggcatttgagaggaatgatttctttgacgctggcatcaccaagacccagctgttcctcagcgttcacgacgccgtgctgtttgccttgtcaaggaaggtcataggctcctctgagttaagcatcgatgaatccgagacagtgatacgggaaacctactcagaaacagacaagaatgacaattcaagatataaaatgagcagcagttttctaggaagccaaaaaaatgtaagtccaggcttcatcaagatccaacagcctgtagaagaggagtcggagttggatttggagctggaatcagaacaagaggctgggctgggtctggacctagacctggatcgggagctggagcctgaaatggagcccaaggctgagaccgagaccaagacccagaccgagatggagccccagcctgagactgagcctgagatggagcccaaccccaaatctaggccaagagctcacacttttcctcagcagcgttactggcctatgtatcatccgtctatggcttccacccagtctcagactcagactcggacatggtcagtggagaggagacgccatcctatggattcatactcaccagagggcaacagcaatgaagatgtctaggagatgaactagaaataaggggtcagataatgctggcaaatcctcctacccaaaaaggggtcaattgtccagagacctagactggatacgaactagcagtacttccttcctgactgtgactcctactacctgccagccttcttccttgctctgcgctgggatcatactcccaaatcacattactaaatgccaacaattatctctgaattccctatccaggctcccctcatttcaccttcagcatatattctagtcatgaatttccttcttcacacaccccacatctctgggctttgtgccagaccatctctaacttaatcctctcatccctgttcccctttctccaaagagatgaagctcaaataaaatgtataactctagtaaaaaa

SEQ ID NO: 525 - protein, 970 aa, Homo sapiens
MAQLERSAISGFSSKSRRNSFAYDVKREVYNEETFQQEHKRKASSSGNMNINITTFRHHVQCRCSWHRFLRCVLTIFPFLEWMCMYRLKDWLLGDLLAGISVGLVQVPQGLTLSLLARQLIPPLNIAYAAFCSSVIYVIFGSCHQMSIGSFFLVSALLINVLKVSPFNNGQLVMGSFVKNEFSAPSYLMGYNKSLSVVATTTFLTGIIQLIMGVLGLGFIATYLPESAMSAYLAAVALHIMLSQLTFIFGIMISFHAGPISFFYDIINYCVALPKANSTSILVFLTVVVALRINKCIRISFNQYPIEFPMELFLIIGFTVIANKISMATETSQTLIDMIPYSFLLPVTPDFSLLPKIILQAFSLSLVSSFLLIFLGKKIASLHNYSVNSNQDLIAIGLCNVVSSFFRSCVFTGAIARTIIQDKSGGRQQFASLVGAGVMLLLMVKMGHFFYTLPNAVLAGIILSNVIPYLETISNLPSLWRQDQYDCALWMMTFSSSIFLGLDIGLIISVVSAFFITTVRSHRAKILLLGQIPNTNIYRSINDYREIITIPGVKIFQCCSSITFVNVYYLKHKLLKEVDMVKVPLKEEEIFSLFNSSDTNLQGGKICRCFCNCDDLEPLPRILYTERFENKLDPEASSINLIHCSHFESMNTSQTASEDQVPYTVSSVSQKNQGQQYEEVEEVWLPNNSSRNSSPGLPDVAESQGRRSLIPYSDASLLPSVHTIILDFSMVHYVDSRGLVVLRQICNAFQNANILILIAGCHSSIVRAFERNDFFDAGITKTQLFLSVHDAVLFALSRKVIGSSELSIDESETVIRETYSETDKNDNSRYKMSSSFLGSQKNVSPGFIKIQQPVEEESELDLELESEQEAGLGLDLDLDRELEPEMEPKAETETKTQTEMEPQPETEPEMEPNPKSRPRAHTFPQQRYWPMYHPSMASTQSQTQTRTWSVERRRHPMDSYSPEGNSNEDV

SEQ ID NO: 526 - DNA, 3159 bp, Homo sapiens
gctgggagacgcctgggcgccgggggctgcaggtcccagggcgggggctgcgtccgtcaccggcaggtacccaggtatgccgcagagccaggcacgccgtgggcactcagtcagtatctgtggaatgaatgaatgatggtcgtccctgggagcttatctctgaggaatggcacaactagagaggagcgccatctctggcttcagctctaagtccaggcgaaactcattcgcatatgatgttaagcgtgaagtatacaatgaggagacctttcaacaggaacacaaaaggaaggcctcctcttctgggaacatgaacatcaacatcaccaccttcagacaccacgtccagtgccgctgctcatggcacaggttcctacgatgcatgcttacaatctttcccttcctagaatggatgtgtatgtatcgattaaaggattggcttctgggagacttacttgctggtataagtgttggccttgtgcaagttccccaaggcctgacacttagtttgctggcaaggcaactgattcctcctctcaacatcgcttatgcagctttctgttcttcggtaatctatgtaatttttggatcgtgtcatcaaatgtccattggttccttcttcctggtgagtgctctgctgatcaacgttctgaaagtgagcccattcaacaacggtcaactggtcatgggatctttcgtcaagaatgagttttcggccccctcctaccttatgggctataataaatccttgagtgtggtggcaaccacaacttttctgactgggattattcagattattggcttcactgtgattgcaaacaagataagcatggccacagaaaccagccagacgcttattgacatgattccttatagctttctgcttcctgtaacaccagatttcagccttcttcccaagataattttacaagccttctccttatctttggtgagctcctttctgctcatatttctgggcaagaagattgccagtcttcacaattacagtgtcaattccaaccaggatttaatagccatcggcctttgcaatgtcgtcagttcatttttcagatcttgtgtgtttactggtgctattgctaggactattatccaggataaatctggaggaagacaacagtttgcatctctggtaggcgcaggtgtgatgctgctcctgatggtgaagatgggacactttttctacacactgccaaatgctgtgctggctggtattattctgagcaacgtcattccctaccttgaaaccatttctaacctacccagcctgtggaggcaggaccaatatgactgtgctctttggatgatgacattctcatcttcaattttcctgggactggacattggactaattatctcagtagtttctgctttcttcatcaccactgttcgttcacacagagctaagattcttctcctgggtcaaatccctaacaccaacatttatagaagcatcaatgattatcgggagatcatcaccattcctggggtgaaaatcttccagtgctgcagctcaattacatttgtaaatgtttactacctaaagcataagctgttaaaagaggttgatatggtaaaggtgcctcttaaagaagaagaaattttcagcttgtttaattcaagtgacaccaatctacaaggaggaaagatttgcaggtgtttctgcaactgtgatgatctggagccgctgcccaggattctttacacagagcgatttgaaaataaactggatcccgaagcatcctccattaacctgattcactgctcacattttgagagcatgaacacaagccaaactgcatccgaagaccaagtgccatacacagtatcgtccgtgtctcagaaaaatcaagggcaacagtatgaggaggtggaggaagtttggcttcctaataactcatcaagaaacagctcaccaggactgcctgatgtggcggaaagccaggggaggagatcactcatcccttactcagatgcgtctctactgcccagtgtccacaccatcatcctggatttctccatggtacactacgtggattcacgggggttagtcgtattaagacagatatgcaatgcctttcaaaacgccaacattttgatactcattgcagggtgtcactcttccatagtcagggcatttgagaggaatgatttctttgacgctggcatcaccaagacccagctgttcctcagcgttcacgacgccgtgctgtttgccttgtcaaggaaggtcataggctcctctgagttaagcatcgatgaatccgagacagtgatacgggaaacctactcagaaacagacaagaatgacaattcaagatataaaatgagcagcagttttctaggaagccaaaaaaatgtaagtccaggcttcatcaagatccaacagcctgtagaagaggagtcggagttggatttggagctggaatcagaacaagaggctgggctgggtctggacctagacctggatcgggagctggagcctgaaatggagcccaaggctgagaccgagaccaagacccagaccgagatggagccccagcctgagactgagcctgagatggagcccaaccccaaatctaggccaagagctcacacttttcctcagcagcgttactggcctatgtatcatccgtctatggcttccacccagtctcagactcagactcggacatggtcagtggagaggagacgccatcctatggattcatactcaccagagggcaacagcaatgaagatgtctaggagatgaactagaaataaggggtcagataatgctggcaaatcctcctacccaaaaaggggtcaattgtccagagacctagactggatacgaactagcagtacttccttcctgactgtgactcctactacctgccagccttcttccttgctctgcgctgggatcatactcccaaatcacattactaaatgccaacaattatctctgaattccctatccaggctcccctcatttcaccttcagcatatattctagtcatgaatttccttcttcacacaccccacatctctgggctttgtgccagaccatctctaacttaatcctctcatccctgttcccctttctccaaagagatgaagctcaaataaaatgtataactctaaaaaaaaaaaaaaaa

SEQ ID NO: 527 - protein, 865 aa, Homo sapiens
MAQLERSAISGFSSKSRRNSFAYDVKREVYNEETFQQEHKRKASSSGNMNINITTFRHHVQCRCSWHRFLRCMLTIFPFLEWMCMYRLKDWLLGDLLAGISVGLVQVPQGLTLSLLARQLIPPLNIAYAAFCSSVIYVIFGSCHQMSIGSFFLVSALLINVLKVSPFNNGQLVMGSFVKNEFSAPSYLMGYNKSLSVVATTTFLTGIIQIIGFTVIANKISMATETSQTLIDMIPYSFLLPVTPDFSLLPKIILQAFSLSLVSSFLLIFLGKKIASLHNYSVNSNQDLIAIGLCNVVSSFFRSCVFTGAIARTIIQDKSGGRQQFASLVGAGVMLLLMVKMGHFFYTLPNAVLAGIILSNVIPYLETISNLPSLWRQDQYDCALWMMTFSSSIFLGLDIGLIISVVSAFFITTVRSHRAKILLLGQIPNTNIYRSINDYREIITIPGVKIFQCCSSITFVNVYYLKHKLLKEVDMVKVPLKEEEIFSLFNSSDTNLQGGKICRCFCNCDDLEPLPRILYTERFENKLDPEASSINLIHCSHFESMNTSQTASEDQVPYTVSSVSQKNQGQQYEEVEEVWLPNNSSRNSSPGLPDVAESQGRRSLIPYSDASLLPSVHTIILDFSMVHYVDSRGLVVLRQICNAFQNANILILIAGCHSSIVRAFERNDFFDAGITKTQLFLSVHDAVLFALSRKVIGSSELSIDESETVIRETYSETDKNDNSRYKMSSSFLGSQKNVSPGFIKIQQPVEEESELDLELESEQEAGLGLDLDLDRELEPEMEPKAETETKTQTEMEPQPETEPEMEPNPKSRPRAHTFPQQRYWPMYHPSMASTQSQTQTRTWSVERRRHPMDSYSPEGNSNEDV

SEQ ID NO: 528 - DNA, 3757 bp, Homo sapiens
ggaaccgcgaccactggagccttagcgggcgcagcagctggaacgggagtactgcgacgcagcccggagtcggccttgtaggggcgaaggtgcagggagatcgcggcgggcgcagtcttgagcgccggagcgcgtccctgcccttagcggggcttgccccagtcgcaggggcacatccagccgctgcggctgacagcagccgcgcgcgcgggagtctgcggggtcgcggcagccgcacctgcgcgggcgaccagcgcaaggtccccgcccggctgggcgggcagcaagggccggggagagggtgcgggtgcaggcgggggccccacagggccaccttcttgcccggcggctgccgctggaaaatgtctcaggagaggcccacgttctaccggcaggagctgaacaagacaatctgggaggtgcccgagcgttaccagaacctgtctccagtgggctctggcgcctatggctctgtgtgtgctgcttttgacacaaaaacggggttacgtgtggcagtgaagaagctctccagaccatttcagtccatcattcatgcgaaaagaacctacagagaactgcggttacttaaacatatgaaacatgaaaatgtgattggtctgttggacgtttttacacctgcaaggtctctggaggaattcaatgatgtgtatctggtgacccatctcatgggggcagatctgaacaacattgtgaaatgtcagaagcttacagatgaccatgttcagttccttatctaccaaattctccgaggtctaaagtatatacattcagctgacataattcacagggacctaaaacctagtaatctagctgtgaatgaagactgtgagctgaagattctggattttggactggctcggcacacagatgatgaaatgacaggctacgtggccactaggtggtacagggctcctgagatcatgctgaactggatgcattacaaccagacagttgatatttggtcagtgggatgcataatggccgagctgttgactggaagaacattgtttcctggtacagaccatattaaccagcttcagcagattatgcgtctgacaggaacaccccccgcttatctcattaacaggatgccaagccatgaggcaagaaactatattcagtctttgactcagatgccgaagatgaactttgcgaatgtatttattggtgccaatcccctggctgtcgacttgctggagaagatgcttgtattggactcagataagagaattacagcggcccaagcccttgcacatgcctactttgctcagtaccacgatcctgatgatgaaccagtggccgatccttatgatcagtcctttgaaagcagggacctccttatagatgagtggaaaagcctgacctatgatgaagtcatcagctttgtgccaccaccccttgaccaagaagagatggagtcctgagcacctggtttctgttctgttgatcccacttcactgtgaggggaaggccttttcacgggaactctccaaatattattcaagtgcctcttgttgcagagatttcctccatggtggaagggggtgtgcgtgcgtgtgcgtgcgtgttagtgtgtgtgcatgtgtgtgtctgtctttgtgggagggtaagacaatatgaacaaactatgatcacagtgactttacaggaggttgtggatgctccagggcagcctccaccttgctcttctttctgagagttggctcaggcagacaagagctgctgtccttttaggaatatgttcaatgcaaagtaaaaaaatatgaattgtccccaatcccggtcatgcttttgccactttggcttctcctgtgaccccaccttgacggtggggcgtagacttgacaacatcccacagtggcacggagagaaggcccataccttctggttgcttcagacctgacaccgtccctcagtgatacgtacagccaaaaaggaccaactggcttctgtgcactagcctgtgattaacttgcttagtatggttctcagatcttgacagtatatttgaaactgtaaatatgtttgtgccttaaaaggagagaagaaagtgtagatagttaaaagactgcagctgctgaagttctgagccgggcaagtcgagagggctgttggacagctgcttgtgggcccggagtaatcaggcagccttcataggcggtcatgtgtgcatgtgagcacatgcgtatatgtgcgtctctctttctccctcacccccaggtgttgccatttctctgcttacccttcacctttggtgcagaggtttcttgaatatctgccccagtagtcagaagcaggttcttgatgtcatgtacttcctgtgtactctttatttctagcagagtgaggatgtgttttgcacgtcttgctatttgagcatgcacagctgcttgtcctgctctcttcaggaggccctggtgtcaggcaggtttgccagtgaagacttcttgggtagtttagatcccatgtcacctcagctgatattatggcaagtgatatcacctctcttcagcccctagtgctattctgtgttgaacacaattgatacttcaggtgcttttgatgtgaaaatcatgaaaagaggaacaggtggatgtatagcatttttattcatgccatctgttttcaaccaactatttttgaggaattatcatgggaaaagaccagggcttttcccaggaatatcccaaacttcggaaacaagttattctcttcactcccaataactaatgctaagaaatgctgaaaatcaaagtaaaaaattaaagcccataaggccagaaactccttttgctgtctttctctaaatatgattactttaaaataaaaaagtaacaaggtgtcttttccactcctatggaaaagggtcttcttggcagcttaacattgacttcttggtttggggagaaataaattttgtttcagaattttgtatattgtaggaatccctttgagaatgtgattccttttgatggggagaaagggcaaattattttaatattttgtattttcaactttataaagataaaatatcctcaggggtggagaagtgtcgttttcataacttgctgaatttcaggcattttgttctacatgaggactcatatatttaagccttttgtgtaataagaaagtataaagtcacttccagtgttggctgtgtgacagaatcttgtatttgggccaaggtgtttccatttctcaatcagtgcagtgatacatgtactccagagggacagggtggaccccctgagtcaactggagcaagaaggaaggaggcagactgatggcgattccctctcacccgggactctccccctttcaaggaaagtgaacctttaaagtaaaggcctcatctcctttattgcagttcaaatcctcaccatccacagcaagatgaattttatcagccatgtttggttgtaaatgctcgtgtgatttcctacagaaatactgctctgaatattttgtaataaaggtctttgcacatgtgaccacatacgtgttaggaggctgcatgctctggaagcctggactctaagctggagctcttggaagagctcttcggtttctgagcataatgctcccatctcctgatttctctgaacagaaaacaaaagagagaatgagggaaattgctattttatttgtattcatgaacttggctgtaatcagttatgccgtataggatgtcagacaataccactggttaaaataaagcctatttttcaaattt

SEQ ID NO: 529 - protein, 360 aa, Homo sapiens
MSQERPTFYRQELNKTIWEVPERYQNLSPVGSGAYGSVCAAFDTKTGLRVAVKKLSRPFQSIIHAKRTYRELRLLKHMKHENVIGLLDVFTPARSLEEFNDVYLVTHLMGADLNNIVKCQKLTDDHVQFLIYQILRGLKYIHSADIIHRDLKPSNLAVNEDCELKILDFGLARHTDDEMTGYVATRWYRAPEIMLNWMHYNQTVDIWSVGCIMAELLTGRTLFPGTDHINQLQQIMRLTGTPPAYLINRMPSHEARNYIQSLTQMPKMNFANVFIGANPLAVDLLEKMLVLDSDKRITAAQALAHAYFAQYHDPDDEPVADPYDQSFESRDLLIDEWKSLTYDEVISFVPPPLDQEEMES

SEQ ID NO: 530 - DNA, 3757 bp, Homo sapiens
ggaaccgcgaccactggagccttagcgggcgcagcagctggaacgggagtactgcgacgcagcccggagtcggccttgtaggggcgaaggtgcagggagatcgcggcgggcgcagtcttgagcgccggagcgcgtccctgcccttagcggggcttgccccagtcgcaggggcacatccagccgctgcggctgacagcagccgcgcgcgcgggagtctgcggggtcgcggcagccgcacctgcgcgggcgaccagcgcaaggtccccgcccggctgggcgggcagcaagggccggggagagggtgcgggtgcaggcgggggccccacagggccaccttcttgcccggcggctgccgctggaaaatgtctcaggagaggcccacgttctaccggcaggagctgaacaagacaatctgggaggtgcccgagcgttaccagaacctgtctccagtgggctctggcgcctatggctctgtgtgtgctgcttttgacacaaaaacggggttacgtgtggcagtgaagaagctctccagaccatttcagtccatcattcatgcgaaaagaacctacagagaactgcggttacttaaacatatgaaacatgaaaatgtgattggtctgttggacgtttttacacctgcaaggtctctggaggaattcaatgatgtgtatctggtgacccatctcatgggggcagatctgaacaacattgtgaaatgtcagaagcttacagatgaccatgttcagttccttatctaccaaattctccgaggtctaaagtatatacattcagctgacataattcacagggacctaaaacctagtaatctagctgtgaatgaagactgtgagctgaagattctggattttggactggctcggcacacagatgatgaaatgacaggctacgtggccactaggtggtacagggctcctgagatcatgctgaactggatgcattacaaccagacagttgatatttggtcagtgggatgcataatggccgagctgttgactggaagaacattgtttcctggtacagaccatattgatcagttgaagctcattttaagactcgttggaaccccaggggctgagcttttgaagaaaatctcctcagagtctgcaagaaactatattcagtctttgactcagatgccgaagatgaactttgcgaatgtatttattggtgccaatcccctggctgtcgacttgctggagaagatgcttgtattggactcagataagagaattacagcggcccaagcccttgcacatgcctactttgctcagtaccacgatcctgatgatgaaccagtggccgatccttatgatcagtcctttgaaagcagggacctccttatagatgagtggaaaagcctgacctatgatgaagtcatcagctttgtgccaccaccccttgaccaagaagagatggagtcctgagcacctggtttctgttctgttgatcccacttcactgtgaggggaaggccttttcacgggaactctccaaatattattcaagtgcctcttgttgcagagatttcctccatggtggaagggggtgtgcgtgcgtgtgcgtgcgtgttagtgtgtgtgcatgtgtgtgtctgtctttgtgggagggtaagacaatatgaacaaactatgatcacagtgactttacaggaggttgtggatgctccagggcagcctccaccttgctcttctttctgagagttggctcaggcagacaagagctgctgtccttttaggaatatgttcaatgcaaagtaaaaaaatatgaattgtccccaatcccggtcatgcttttgccactttggcttctcctgtgaccccaccttgacggtggggcgtagacttgacaacatcccacagtggcacggagagaaggcccataccttctggttgcttcagacctgacaccgtccctcagtgatacgtacagccaaaaaggaccaactggcttctgtgcactagcctgtgattaacttgcttagtatggttctcagatcttgacagtatatttgaaactgtaaatatgtttgtgccttaaaaggagagaagaaagtgtagatagttaaaagactgcagctgctgaagttctgagccgggcaagtcgagagggctgttggacagctgcttgtgggcccggagtaatcaggcagccttcataggcggtcatgtgtgcatgtgagcacatgcgtatatgtgcgtctctctttctccctcacccccaggtgttgccatttctctgcttacccttcacctttggtgcagaggtttcttgaatatctgccccagtagtcagaagcaggttcttgatgtcatgtacttcctgtgtactctttatttctagcagagtgaggatgtgttttgcacgtcttgctatttgagcatgcacagctgcttgtcctgctctcttcaggaggccctggtgtcaggcaggtttgccagtgaagacttcttgggtagtttagatcccatgtcacctcagctgatattatggcaagtgatatcacctctcttcagcccctagtgctattctgtgttgaacacaattgatacttcaggtgcttttgatgtgaaaatcatgaaaagaggaacaggtggatgtatagcatttttattcatgccatctgttttcaaccaactatttttgaggaattatcatgggaaaagaccagggcttttcccaggaatatcccaaacttcggaaacaagttattctcttcactcccaataactaatgctaagaaatgctgaaaatcaaagtaaaaaattaaagcccataaggccagaaactccttttgctgtctttctctaaatatgattactttaaaataaaaaagtaacaaggtgtcttttccactcctatggaaaagggtcttcttggcagcttaacattgacttcttggtttggggagaaataaattttgtttcagaattttgtatattgtaggaatccctttgagaatgtgattccttttgatggggagaaagggcaaattattttaatattttgtattttcaactttataaagataaaatatcctcaggggtggagaagtgtcgttttcataacttgctgaatttcaggcattttgttctacatgaggactcatatatttaagccttttgtgtaataagaaagtataaagtcacttccagtgttggctgtgtgacagaatcttgtatttgggccaaggtgtttccatttctcaatcagtgcagtgatacatgtactccagagggacagggtggaccccctgagtcaactggagcaagaaggaaggaggcagactgatggcgattccctctcacccgggactctccccctttcaaggaaagtgaacctttaaagtaaaggcctcatctcctttattgcagttcaaatcctcaccatccacagcaagatgaattttatcagccatgtttggttgtaaatgctcgtgtgatttcctacagaaatactgctctgaatattttgtaataaaggtctttgcacatgtgaccacatacgtgttaggaggctgcatgctctggaagcctggactctaagctggagctcttggaagagctcttcggtttctgagcataatgctcccatctcctgatttctctgaacagaaaacaaaagagagaatgagggaaattgctattttatttgtattcatgaacttggctgtaatcagttatgccgtataggatgtcagacaataccactggttaaaataaagcctatttttcaaattt

SEQ ID NO: 531 - protein, 360 aa, Homo sapiens
MSQERPTFYRQELNKTIWEVPERYQNLSPVGSGAYGSVCAAFDTKTGLRVAVKKLSRPFQSIIHAKRTYRELRLLKHMKHENVIGLLDVFTPARSLEEFNDVYLVTHLMGADLNNIVKCQKLTDDHVQFLIYQILRGLKYIHSADIIHRDLKPSNLAVNEDCELKILDFGLARHTDDEMTGYVATRWYRAPEIMLNWMHYNQTVDIWSVGCIMAELLTGRTLFPGTDHIDQLKLILRLVGTPGAELLKKISSESARNYIQSLTQMPKMNFANVFIGANPLAVDLLEKMLVLDSDKRITAAQALAHAYFAQYHDPDDEPVADPYDQSFESRDLLIDEWKSLTYDEVISFVPPPLDQEEMES

SEQ ID NO: 532 - DNA, 1312 bp, Homo sapiens
ggaaccgcgaccactggagccttagcgggcgcagcagctggaacgggagtactgcgacgcagcccggagtcggccttgtaggggcgaaggtgcagggagatcgcggcgggcgcagtcttgagcgccggagcgcgtccctgcccttagcggggcttgccccagtcgcaggggcacatccagccgctgcggctgacagcagccgcgcgcgcgggagtctgcggggtcgcggcagccgcacctgcgcgggcgaccagcgcaaggtccccgcccggctgggcgggcagcaagggccggggagagggtgcgggtgcaggcgggggccccacagggccaccttcttgcccggcggctgccgctggaaaatgtctcaggagaggcccacgttctaccggcaggagctgaacaagacaatctgggaggtgcccgagcgttaccagaacctgtctccagtgggctctggcgcctatggctctgtgtgtgctgcttttgacacaaaaacggggttacgtgtggcagtgaagaagctctccagaccatttcagtccatcattcatgcgaaaagaacctacagagaactgcggttacttaaacatatgaaacatgaaaatgtgattggtctgttggacgtttttacacctgcaaggtctctggaggaattcaatgatgtgtatctggtgacccatctcatgggggcagatctgaacaacattgtgaaatgtcagaagcttacagatgaccatgttcagttccttatctaccaaattctccgaggtctaaagtatatacattcagctgacataattcacagggacctaaaacctagtaatctagctgtgaatgaagactgtgagctgaagattctggattttggactggctcggcacacagatgatgaaatgacaggctacgtggccactaggtggtacagggctcctgagatcatgctgaactggatgcattacaaccagacagttgatatttggtcagtgggatgcataatggccgagctgttgactggaagaacattgtttcctggtacagaccatattgatcagttgaagctcattttaagactcgttggaaccccaggggctgagcttttgaagaaaatctcctcagagtctgcaagaaactatattcagtctttgactcagatgccgaagatgaactttgcgaatgtatttattggtgccaatcccctgggtaagttgaccatatatcctcacctcatggatattgaattggttatgatataaattggggatttgaagaagagtttctccttttgaccaaataaagtaccattagttga

SEQ ID NO: 533 - protein, 297 aa, Homo sapiens
MSQERPTFYRQELNKTIWEVPERYQNLSPVGSGAYGSVCAAFDTKTGLRVAVKKLSRPFQSIIHAKRTYRELRLLKHMKHENVIGLLDVFTPARSLEEFNDVYLVTHLMGADLNNIVKCQKLTDDHVQFLIYQILRGLKYIHSADIIHRDLKPSNLAVNEDCELKILDFGLARHTDDEMTGYVATRWYRAPEIMLNWMHYNQTVDIWSVGCIMAELLTGRTLFPGTDHIDQLKLILRLVGTPGAELLKKISSESARNYIQSLTQMPKMNFANVFIGANPLGKLTIYPHLMDIELVMI

SEQ ID NO: 534 - DNA, 3679 bp, Homo sapiens
ggaaccgcgaccactggagccttagcgggcgcagcagctggaacgggagtactgcgacgcagcccggagtcggccttgtaggggcgaaggtgcagggagatcgcggcgggcgcagtcttgagcgccggagcgcgtccctgcccttagcggggcttgccccagtcgcaggggcacatccagccgctgcggctgacagcagccgcgcgcgcgggagtctgcggggtcgcggcagccgcacctgcgcgggcgaccagcgcaaggtccccgcccggctgggcgggcagcaagggccggggagagggtgcgggtgcaggcgggggccccacagggccaccttcttgcccggcggctgccgctggaaaatgtctcaggagaggcccacgttctaccggcaggagctgaacaagacaatctgggaggtgcccgagcgttaccagaacctgtctccagtgggctctggcgcctatggctctgtgtgtgctgcttttgacacaaaaacggggttacgtgtggcagtgaagaagctctccagaccatttcagtccatcattcatgcgaaaagaacctacagagaactgcggttacttaaacatatgaaacatgaaaatgtgattggtctgttggacgtttttacacctgcaaggtctctggaggaattcaatgatgtgtatctggtgacccatctcatgggggcagatctgaacaacattgtgaaatgtcagaagcttacagatgaccatgttcagttccttatctaccaaattctccgaggtctaaagtatatacattcagctgacataattcacagggacctaaaacctagtaatctagctgtgaatgaagactgtgagctgaagattctggattttggactggctcggcacacagatgatgaaatgacaggctacgtggccactaggtggtacagggctcctgagatcatgctgaactggatgcattacaaccagacagttgatatttggtcagtgggatgcataatggccgagctgttgactggaagaacattgtttcctggtacagaccatattgatcagttgaagctcattttaagactcgttggaaccccaggggctgagcttttgaagaaaatctcctcagagtctctgtcgacttgctggagaagatgcttgtattggactcagataagagaattacagcggcccaagcccttgcacatgcctactttgctcagtaccacgatcctgatgatgaaccagtggccgatccttatgatcagtcctttgaaagcagggacctccttatagatgagtggaaaagcctgacctatgatgaagtcatcagctttgtgccaccaccccttgaccaagaagagatggagtcctgagcacctggtttctgttctgttgatcccacttcactgtgaggggaaggccttttcacgggaacctctccaaatattattcaagtgcctcttgttgcagagatttcctccatggtggaagggggtgtgcgtgcgtgtgcgtgcgtgttagtgtgtgtgcatgtgtgtgtctgtctttgtgggagggtaagacaatatgaacaaactatgatcacagtgactttacaggaggttgtggatgctccagggcagcctccaccttgctcttctttctgagagttggctcaggcagacaagagctgctgtccttttaggaatatgttcaatgcaaagtaaaaaaatatgaattgtccccaatcccggtcatgcttttgccactttggcttctcctgtgaccccaccttgacggtggggcgtagacttgacaacatcccacagtggcacggagagaaggcccataccttctggttgcttcagacctgacaccgtccctcagtgatacgtacagccaaaaaggaccaactggcttctgtgcactagcctgtgattaacttgcttagtatggttctcagatcttgacagtatatttgaaactgtaaatatgtttgtgccttaaaaggagagaagaaagtgtagatagttaaaagactgcagctgctgaagttctgagccgggcaagtcgagagggctgttggacagctgcttgtgggcccggagtaatcaggcagccttcataggcggtcatgtgtgcatgtgagcacatgcgtatatgtgcgtctctctttctccctcacccccaggtgttgccatttctctgcttacccttcacctttggtgcagaggtttcttgaatatctgccccagtagtcagaagcaggttcttgatgtcatgtacttcctgtgtactctttatttctagcagagtgaggatgtgttttgcacgtcttgctatttgagcatgcacagctgcttgtcctgctctcttcaggaggccctggtgtcaggcaggtttgccagtgaagacttcttgggtagtttagatcccatgtcacctcagctgatattatggcaagtgatatcacctctcttcagcccctagtgctattctgtgttgaacacaattgatacttcaggtgcttttgatgtgaaaatcatgaaaagaggaacaggtggatgtatagcatttttattcatgccatctgttttcaaccaactatttttgaggaattatcatgggaaaagaccagggcttttcccaggaatatcccaaacttcggaaacaagttattctcttcactcccaataactaatgctaagaaatgctgaaaatcaaagtaaaaaattaaagcccataaggccagaaactccttttgctgtctttctctaaatatgattactttaaaataaaaaagtaacaaggtgtcttttccactcctatggaaaagggtcttcttggcagcttaacattgacttcttggtttggggagaaataaattttgtttcagaattttgtatattgtaggaatccctttgagaatgtgattccttttgatggggagaaagggcaaattattttaatattttgtattttcaactttataaagataaaatatcctcaggggtggagaagtgtcgttttcataacttgctgaatttcaggcattttgttctacatgaggactcatatatttaagccttttgtgtaataagaaagtataaagtcacttccagtgttggctgtgtgacagaatcttgtatttgggccaaggtgtttccatttctcaatcagtgcagtgatacatgtactccagagggacagggtggaccccctgagtcaactggagcaagaaggaaggaggcagactgatggcgattccctctcacccgggactctccccctttcaaggaaagtgaacctttaaagtaaaggcctcatctcctttattgcagttcaaatcctcaccatccacagcaagatgaattttatcagccatgtttggttgtaaatgctcgtgtgatttcctacagaaatactgctctgaatattttgtaataaaggtctttgcacatgtgaccacatacgtgttaggaggctgcatgctctggaagcctggactctaagctggagctcttggaagagctcttcggtttctgagcataatgctcccatctcctgatttctctgaacagaaaacaaaagagagaatgagggaaattgctattttatttgtattcatgaacttggctgtaatcagttatgccgtataggatgtcagacaataccactggttaaaataaagcctatttttcaaattt

SEQ ID NO: 535 - protein, 307 aa, Homo sapiens
MSQERPTFYRQELNKTIWEVPERYQNLSPVGSGAYGSVCAAFDTKTGLRVAVKKLSRPFQSIIHAKRTYRELRLLKHMKHENVIGLLDVFTPARSLEEFNDVYLVTHLMGADLNNIVKCQKLTDDHVQFLIYQILRGLKYIHSADIIHRDLKPSNLAVNEDCELKILDFGLARHTDDEMTGYVATRWYRAPEIMLNWMHYNQTVDIWSVGCIMAELLTGRTLFPGTDHIDQLKLILRLVGTPGAELLKKISSESLSTCWRRCLYWTQIRELQRPKPLHMPTLLSTTILMMNQWPILMISPLKAGTSL

SEQ ID NO: 536 - DNA, 1888 bp, Homo sapiens
gcggcgcggggcgggcgcagcgggggtcggggcgctgggagcccgttgggccgcgaacgcagccgccacgccggggccgccgagatcgggtgcccgggatgagcctcatccggaaaaagggcttctacaagcaggacgtcaacaagaccgcctgggagctgcccaagacctacgtgtccccgacgcacgtcggcagcggggcctatggctccgtgtgctcggccatcgacaagcggtcaggggagaaggtggccatcaagaagctgagccgaccctttcagtccgagatcttcgccaagcgcgcctaccgggagctgctgctgctgaagcacatgcagcatgagaacgtcattgggctcctggatgtcttcaccccagcctcctccctgcgcaacttctatgacttctacctggtgatgcccttcatgcagacggatctgcagaagatcatggggatggagttcagtgaggagaagatccagtacctggtgtatcagatgctcaaaggccttaagtacatccactctgctggggtcgtgcacagggacctgaagccaggcaacctggctgtgaatgaggactgtgaactgaagattctggattttgggctggcgcgacatgcagacgccgagatgactggctacgtggtgacccgctggtaccgagcccccgaggtgatcctcagctggatgcactacaaccagacagtggacatctggtctgtgggctgtatcatggcagagatgctgacagggaaaactctgttcaaggggaaagattacctggaccagctgacccagatcctgaaagtgaccggggtgcctggcacggagtttgtgcagaagctgaacgacaaagcggccaaatcctacatccagtccctgccacagacccccaggaaggatttcactcagctgttcccacgggccagcccccaggctgcggacctgctggagaagatgctggagctagacgtggacaagcgcctgacggccgcgcaggccctcacccatcccttctttgaacccttccgggaccctgaggaagagacggaggcccagcagccgtttgatgattccttagaacacgagaaactcacagtggatgaatggaagcagcacatctacaaggagattgtgaacttcagccccattgcccggaaggactcacggcgccggagtggcatgaagctgtagggactcatcttgcatggcaccaccggccagacactgcccaaggaccagtatttgtcactaccaaactcagcccttcttggaatacagcctttcaagcagaggacagaagggtccttctccttatgtgggaaatgggcctagtagatgcagaattcaaagatgtcggttgggagaaactagctctgatcctaacaggccacgttaaactgcccatctggagaatcgcctgcaggtggggccctttccttcccgccagagtggggctgagtgggcgctgagccaggccgggggcctatggcagtgatgctgtgttggtttcctagggatgctctaacgaattaccacaaacctggtggattgaaacagcagaacttgattcccttacagttctggaggctggaaatctgggatggaggtgttggcagggctgtggtccctttgaaggctctggggaagaatccttccttggctctttttagcttgtggcggcagtgggcagtccgtggcattccccagcttattgctgcatcactccagtctctgtctcttctgttctctcctcttttaacaacagtcattggatttagggcccaccctaatcctgtgtgatcttatcttgatccttattaattaaacctgcaaatactctagttccaaataaagtcacattctcaggttccaggtggacatga

SEQ ID NO: 537 - protein, 365 aa, Homo sapiens
MSLIRKKGFYKQDVNKTAWELPKTYVSPTHVGSGAYGSVCSAIDKRSGEKVAIKKLSRPFQSEIFAKRAYRELLLLKHMQHENVIGLLDVFTPASSLRNFYDFYLVMPFMQTDLQKIMGMEFSEEKIQYLVYQMLKGLKYIHSAGVVHRDLKPGNLAVNEDCELKILDFGLARHADAEMTGYVVTRWYRAPEVILSWMHYNQTVDIWSVGCIMAEMLTGKTLFKGKDYLDQLTQILKVTGVPGTEFVQKLNDKAAKSYIQSLPQTPRKDFTQLFPRASPQAADLLEKMLELDVDKRLTAAQALTHPFFEPFRDPEEETEAQQPFDDSLEHEKLTVDEWKQHIYKEIVNFSPIARKDSRRRSGMKL

SEQ ID NO: 538 - DNA, 6018 bp, Homo sapiens
attccccctcctcccccgggagcggcggcggcggccgggccggggccccagcgcgggccgggagggggcacggcggaggccacggaggcaggcgcgggagaagaccgcgctccgcttcccgggccgcgccgacctgctcggcggcctgcccgcccgcgcccaggggccccgaacggtggggccgggcaggcggctgaggcctgtcccctcagttcccaggtgccatgaggaagcctcgtcggaagtcccggcagaatgccgagggccggcgttccccgtccccctacagtctcaagtgctcacccacccgggagaccctgacatatgcccaggcccagcggattgtcgaggtagacattgatggacgcctgcatcgtatcagcatctatgacccactcaaaatcattactgaagatgagctaactgcccaggatatcaccgaatgcaatagtaacaaggaaaacagtgaacagcctcagttccctggcaagtccaagaaaccctcatccaagggcaaaaagaaggaatcctgctccaagcatgcatctggtacttccttccacctcccacagcccagcttccgtatggtggactcaggcatccagccagaagcacccccgctgcctgctgcctactaccgctacattgagaagccacctgaagacctggatgcagaggtagagtatgacatggatgaggaggaccttgcctggctggacatggtgaatgaaaaacggcgagtagatgggcacagtttggtgtctgcagatacctttgagctgctggtagaccggcttgagaaagagtcatacttggagagtcgcagcagtggggcccaacagtcactcatcgatgaagacgctttctgctgtgtgtgcctggatgatgaatgtcacaatagcaatgttattctcttctgtgacatctgcaacctggctgtacaccaggagtgctatggcgtcccatacatccctgagggccagtggctatgccgctgctgcctgcagtctccctcccggcctgtggattgcatcctttgccccaataagggtggcgccttcaaacagaccagtgatgggcactgggcccatgtggtgtgtgccatctggatccctgaagtctgctttgctaacaccgtgttcttggaacctattgagggcattgacaatatcccgcctgcccgctggaaactaacctgctatatctgcaagcagaaagggctaggtgcagccatccagtgccataaggtgaactgctacacagcattccatgtgacatgtgcacagcgggctgggctcttcatgaagattgagcccatgcgcgaaaccagcctcaatggcaccatctttacagtgcgcaagactgcctactgtgaggcccactcgccaccaggtgcggccactgctaggaggaagggcgactcccctagaagcatcagtgagactggcgatgaggaagggctgaaggagggtgatggagaggaggaagaagaggaagaggtggaggaagaagagcaggaagctcaaggcggggtgagtggctccctcaagggagtgcccaagaaaagcaagatgagtttgaagcagaagatcaagaaggagccagaggaagcaggccaagacacaccctccactctccccatgcttgctgtcccacagataccctcttacaggttgaacaagatctgtagtggtctctcctttcagaggaaaaaccagtttatgcagcggcttcacaattattggctgttgaagcggcaggcacggaatggtgtccctcttatccggcgcttgcactcccatctgcagtcccaaagaaacgctgagcagcgagagcaggatgagaagacaagtgcagtgaaggaggagctgaagtattggcagaagctccggcatgacttggagcgggcgcggctgctgattgagctgattcggaagagagagaagctcaaacgagagcaggtcaaagtccagcaggctgccatggagctggagctgatgccattcaatgttctgttgaggacaacactggacctgctgcaggagaaggatcctgcacacatcttcgcagaaccagtcaacttgagtgaggttccagattacctggaattcatatccaagccaatggatttttctactatgaggcggaagctggagtcccacctgtaccgcaccttggaggagtttgaggaggactttaaccttatagttaccaactgcatgaagtataatgctaaagacacaattttccaccgagcagctgtccgcctgcgggacctgggaggggccatcctacggcacgcccggcggcaggcagagaacatcggctatgaccccgagaggggcactcacctgcccgagtcacccaaattggaagacttttaccgcttctcctgggaagacgtggacaacatcctcatcccagagaaccgggcccatttgtccccagaggtgcagctgaaggagctgctggagaaactggacctggtgagcgccatgcggtccagtggggcccgcacccgtcgtgtccgcctgctacgccgggagatcaatgcccttcggcagaagctggcacagccaccaccaccacagccaccatcactcaacaagacagtatccaatggggagctgccagcagggccccagggggatgcagctgtgctggagcaggccttgcaggaggagccagaagacgatggggacagagatgactccaaactgcctcctccgccaaccctggagcccactgggcctgcaccttccttgtctgagcaagaatcccccccggagccccctactctgaaacccattaatgatagcaaacctccaagcaggttcctaaagcccagaaaggtggaagaagatgagctcttggaaaaatcaccactgcagctagggaatgagcctttgcaacgcttgctcagtgacaatggcatcaacagactatccctcatggcccctgacaccccggccggtaccccacttagtggtgtgggtcgccgcacatcagtcctcttcaagaaggccaagaatggggttaagctacagagaagcccagacagggtcctggagaatggcgaggaccatggtgtggcaggctctcctgcctctccagccagcatcgaggaagagcgccactcccggaagcggccaaggagcaggagctgtagtgagagcgaaggggagaggtccccccagcaggaggaagagacaggcatgaccaacggctttggaaaacacaccgaaagcgggtctgactctgaatgtagtttgggtctcagtggtggactggcatttgaagcttgcagtggtctgacgccccccaaacgcagccgtgggaagccagccctgtctcgagtgcccttcctggaaggtgtgaacggagactctgactacaatggctcaggcagaagcctcctgctgccctttgaagaccgcggagacctgaagcccttggagctggtgtgggccaagtgccgaggctacccctcctaccctgccttgatcatcgatcccaagatgccccgggagggcctcctgcacaatggcgttcccatccctgtccccccgctggacgtgctgaagctgggagagcagaaacaggcagaggctggagagaagctcttccttgtcctcttctttgacaacaagcgcacctggcagtggcttccaagggacaaagtcctgcccttgggtgtggaagacaccgtggacaagctcaagatgctggaaggccgcaagaccagcatccgcaagtcagtgcaggtggcctatgaccgtgcgatgatccacctgagcagagtccgggggccccactccttcgtcacttccagctacctgtaagggcagggctggcctgcatccgcttgccctgcccccatcccgcagggcacagagaagcctcttctgcccctgccagatgtatggccggcagcttccccctctcatggtaggccagggactgggctttctccccactaagggcaaggccccagttttgaccaatcgcatggttctcctggcaggcctgctgtgtgccaaaaactcccacccaaggtccctcaggggatatttcactgaagaaccagttagaagtagaaacagctgtggggcttgggcccagcttaggagattgcccagatggcaagaggtcctgggctccttcttgaggggctgcctggcccgctccatcctactcccactaactacacctcagggcgggtgaggttccgacactgatcccagagatgccgtggatacgccagggtcccagggggaatctccccaagctcacactctctcccgcttatcgcctattctcacacctcttctcggtcccatcttctgcacccattgcccagtcttgctttctctttcccatattccttttctttttctcttgtgccaaactgacagaaaccgtcaccacactggtctttttctttaatgtctcattccccttgaggccagctgctatgccaggtggtgtctctgccaggctcctcaggcccagacagaggccagcccacaacctatgaccccctcccccaggacaccacctcccacccacagaccttccctttagctgttgacacaacttcccagctctgcaagtgtgccccctggatcaaggcgggtcccctcttgtttttttctttgctgccacgaggtggtccaagccttcagggtgggctcctatcaggctgggtgtgcgagtgtccatctgtccacatggatgtcgagggtggtttgtgtggagctgtgctcgtcagctgggtctgccctcttcccccttttctccttcttctctcctcatggactttttctgcaattgcagtcttaagcttcactctccaccacctggatggcatggcgcctgccaccaaacatcttcctggcctgcgctctgccctgccctgcctagcctctgctactcccacttcccaactccagggaatgcattacttttatttcaaaccctctgcctccttccttctttctcttcaaccccctccccaccttcaccttctcaaaaatggaaggaaaaaaaaactgtgaatggggaatgctgactgacaaaccaacacaactttcagaggcttcagtgtctgttctctggacatttcttttcacctcctgagcaccaaagtcgcagggccagttgcaggccgctgattgccatgttgatttttaacctgatattctttttaattgttttaaatttttcataggggagttttggacaaaacagtcactggggagatcactgccatttttacacacttgactttttaaaaatacaaccaaccaaccaccacaacttcttatacatttgggacatgagccagagtttaaaagggaaccaacaaaacactataacttaaaaggatggggttttggattttgtataataataaaaacaatacagcatatggctagggaaggacatggtgtatataattgtaaaatactgttctaaattattcaggcctatagtttccattactggagtcctccattgtgtggccacacagtgtcgttgatttaaaggagccagtgcttcccctctccccaggtagttggtcagctgtggactctgtgacctttgtctaaacctgtgttgtaagatcttgggacttcctctctttctatgtctatctcttccccccaacactttctcttcttagtctctctctttatttttcaatctctgaatattttagtctctctctgagtctcattttttaaaatgctcttttagaacgggaaacggctcagatcctgctgtggcacggggcctatgtgtctctgtcgcgtctgctgtgaagcacatgatgctctatttattgtagagagtgactttatttgctttctagaattgtttataacagatggtataagagaggtaataaacagagaaaaatctatgcttgtaaagaatacaaaagttaattttacctactataatatgactgtctgaaacttattttctctctgagaaataaatgttctaatgggc

SEQ ID NO: 539 - protein, 1205 aa, Homo sapiens
MRKPRRKSRQNAEGRRSPSPYSLKCSPTRETLTYAQAQRIVEVDIDGRLHRISIYDPLKIITEDELTAQDITECNSNKENSEQPQFPGKSKKPSSKGKKKESCSKHASGTSFHLPQPSFRMVDSGIQPEAPPLPAAYYRYIEKPPEDLDAEVEYDMDEEDLAWLDMVNEKRRVDGHSLVSADTFELLVDRLEKESYLESRSSGAQQSLIDEDAFCCVCLDDECHNSNVILFCDICNLAVHQECYGVPYIPEGQWLCRCCLQSPSRPVDCILCPNKGGAFKQTSDGHWAHVVCAIWIPEVCFANTVFLEPIEGIDNIPPARWKLTCYICKQKGLGAAIQCHKVNCYTAFHVTCAQRAGLFMKIEPMRETSLNGTIFTVRKTAYCEAHSPPGAATARRKGDSPRSISETGDEEGLKEGDGEEEEEEEVEEEEQEAQGGVSGSLKGVPKKSKMSLKQKIKKEPEEAGQDTPSTLPMLAVPQIPSYRLNKICSGLSFQRKNQFMQRLHNYWLLKRQARNGVPLIRRLHSHLQSQRNAEQREQDEKTSAVKEELKYWQKLRHDLERARLLIELIRKREKLKREQVKVQQAAMELELMPFNVLLRTTLDLLQEKDPAHIFAEPVNLSEVPDYLEFISKPMDFSTMRRKLESHLYRTLEEFEEDFNLIVTNCMKYNAKDTIFHRAAVRLRDLGGAILRHARRQAENIGYDPERGTHLPESPKLEDFYRFSWEDVDNILIPENRAHLSPEVQLKELLEKLDLVSAMRSSGARTRRVRLLRREINALRQKLAQPPPPQPPSLNKTVSNGELPAGPQGDAAVLEQALQEEPEDDGDRDDSKLPPPPTLEPTGPAPSLSEQESPPEPPTLKPINDSKPPSRFLKPRKVEEDELLEKSPLQLGNEPLQRLLSDNGINRLSLMAPDTPAGTPLSGVGRRTSVLFKKAKNGVKLQRSPDRVLENGEDHGVAGSPASPASIEEERHSRKRPRSRSCSESEGERSPQQEEETGMTNGFGKHTESGSDSECSLGLSGGLAFEACSGLTPPKRSRGKPALSRVPFLEGVNGDSDYNGSGRSLLLPFEDRGDLKPLELVWAKCRGYPSYPALIIDPKMPREGLLHNGVPIPVPPLDVLKLGEQKQAEAGEKLFLVLFFDNKRTWQWLPRDKVLPLGVEDTVDKLKMLEGRKTSIRKSVQVAYDRAMIHLSRVRGPHSFVTSSYL

SEQ ID NO: 540 - DNA, 2367 bp, Homo sapiens
agacacaaaatcagccagggggagcccacattggagggcagtccacaatggaaggcttcttggaggaggagatgattgagctgcttctactaagatgagtatctcagagtcctcaacgtgggtgtggccgaggtgaagaaatccttcctggggcccttgtccccgtcctgtaagatggtgcagatgatgaggcagtttctgtaccgggtcctgcccgaggactcctacaaggtcaccacggggaagctccatgtgagcctcacccgcttaacggacggggaaaatgtggtggtttcagagttcacgtccaaggaggagctcattgaggccctatactgcagctgcttcgtcccggtgtactgtggcctcatccccccgacttaccgcggtgtgaggtacatcgatgggggcttcacgggcatgcagccctgtgccttctggaccgacgccatcaccatctccaccttcagtgggcagcaggacatctgtccccgggactgcccggccatcttccacgacttccgcatgttcaactgctccttccagttctccctggagaacatcgccaggatgacccacgcattgttccccccggacctggtgatcctgcacgattactactaccgagggtacgaggatgcagttttgtacttgaggcggctgaatgctgtttatcttaattcttcctccaagagagtgattttcccccgggtggaagtgtactgccagatagaactcgcccttggcaatgagtgccctgaacgcagtcaaccaagccttcgagcacggcaggccagtctggaaggagccacacaacctcacaaggagtgggttcccaaaggggatggaaggggcagccatggtccgcctgtgtcccaacctgtgcagacacttgaattcacatgcgagtcacctgtttcagcaccagtctctccacttgagcagccacctgcacagccactggcctcttcaactccactttctctaagtggcatgccacctgtatcattcccagctgtgcacaagccacccagctccacacctggttcatcactgcccaccccaccacctggactgtcacctctgtcacctcagcagcaggtacaaccgtctggatcaccagccagatccctacactctcaggcacccacttcacacaggccatccctggggccttcaactgtgggggcacctcaaacactgccccgaagttctctttcagccttccctgctcagccacctgtggaggaactaggccaagaacagccccaagctgtagctcttcttgtctcttcaaaaccaaaaagcgccgtgcctctggttcatgtgaaggaaaccgtcagcaagccttatgtaacggagagccctgctgaagactcaaactgggtgaataaggtcttcaagaagaacaagcaaaagacaagtggcaccagaaaaggcttcccaagacattcgggatccaaaaaaccaagcagcaaagtgcagtgagcatgtctaatgttccttaaatcccacggagaggagcagctttgggaactgtgttcagagagattccgaggaatagaggagagtgtaagggagtagggggtgcagtgggagattgggctttggaacagacacatccgacataaaattcctgctctgccacagctccactcagggatcatggttgggacacttgctctccctgagcctccatttcctgtaaaatggggatgataccacttcataaagttgtgagagttaaatgtgatcgatgatgtaaattgcttcatagaatgcagaatgtgtaatagctcacaataagtaggtattatgtttacatattatgtttgtatttatgctacttaaatacaaaactggacaggccaggcatggtggctcatgcctgtaatcccagcactttgggaggctgaggtaggtggaaaacctgaggtcaggagttcaagaacagcctgaccaacatggtgaaactccatctctactaaaaatacaaaaattaaccaggcttgatggtgtgcacctgtaatctcagctactcgggaggctgaggcaagagaatcgcttgaacccaggaggcagaggttgcagtgcaccaagactgcgccattgcactccagcccgggcaacaagagcgaaaccccatctcgaaaaaaaacaaaacaaaactagacaagtgagtgcctacgtgacactcaaatgttgccagcatacagttaagggccctagtcaatgtaggcctgcttcttatagctttttgactatattatgctgtctttgacttagtcagtcaacacttattgagcacctactaagtgccaaacactctcctggactctggcaaaataaaaaatgaattaaaactct

SEQ ID NO: 541 - protein, 437 aa, Homo sapiens
MVQMMRQFLYRVLPEDSYKVTTGKLHVSLTRLTDGENVVVSEFTSKEELIEALYCSCFVPVYCGLIPPTYRGVRYIDGGFTGMQPCAFWTDAITISTFSGQQDICPRDCPAIFHDFRMFNCSFQFSLENIARMTHALFPPDLVILHDYYYRGYEDAVLYLRRLNAVYLNSSSKRVIFPRVEVYCQIELALGNECPERSQPSLRARQASLEGATQPHKEWVPKGDGRGSHGPPVSQPVQTLEFTCESPVSAPVSPLEQPPAQPLASSTPLSLSGMPPVSFPAVHKPPSSTPGSSLPTPPPGLSPLSPQQQVQPSGSPARSLHSQAPTSHRPSLGPSTVGAPQTLPRSSLSAFPAQPPVEELGQEQPQAVALLVSSKPKSAVPLVHVKETVSKPYVTESPAEDSNWVNKVFKKNKQKTSGTRKGFPRHSGSKKPSSKVQ

SEQ ID NO: 542 - DNA, 3753 bp, Homo sapiens
gactcagaaaattgccagcaccaaagtagtggcaccttctccctgggagagctgggtctgacttctcactggacacaacttccagctgacagggagcagagcctaacacagagacctcttgtctgaagatcccagcccagggtgttcaggacagaagcgatttctgtggtccaagcccgatggagaatccaaggtgcccaaggaggcccctggcggagaagaaagccaggtctctggacaggccgcaggcccccgggaaaggctcggagtcgtgggactgccattggctctccctgcccactgccccctccaggaaggcgcttcactggacgaccagtgattgggccagacattcagacagcccagctccatctgcagaggctcactgcaccaccgctgcagcccccactcccgaggagaccggagattttctccccagcgagcagaggccttcgcaagacaccaagaaggggtggctgaagaccatgctgaacttcttcgtgaggacgggccctgaggagcccagagaaagggccagcaggaggccaagggggaaggagggtatctcccagcatccggagcccctggaagcagcaggggagccagccctcaggaagaaagcccaccacgacaagaagcccagccgcaagaagcaaggtcacaagaaacacgcggccgaggtgactaaggcagctcaagaccaggaggccagaggccgagaggaagggttgtccaaggcagctgctgccttgcgctccggggaggctgacctgggcccagctcgcaggggtggggaagattctgatcaccagtccttcctcatcaaagtggatggtactggagctttggatgtttctccccatgccacaggtcatcagcaagaagaggagctcaaaaagcctgaccaggatgctatcattcagatgatagtggaattgctcaaaagagtgggagaccagtgggaagaagagcaatctctggcctcacagctgggggtggccctgccaaacccagcaccagctgttaggaagaaatcccaagagaaaaagacaagcctcaagagaacctcaaagacaaaccccaagaaacacggctccgaggaggccaagaggggggctgcagatgtttccagtccagaggcctggccacccaagaagtccagctttctgcccctgtgtgtcagcggccatcggccttccatctccagcagctatggcttggaagaacctaaagtccaggaggccccatctacagaggctggggctccaggtccctccgtgcttcccaccccatcagagagccaggaacctggagaggagcttccgctggacagagcctcggaatacaaagaattcattcagaagatcatttccatgctccaagatgcagaagaacagcaaggagaggagcaacctcaagtccagcaggaagaggtgggtgtagaaaacccggccccacactgcagaaggaaatctcaagaaaaaaggtcgagcttcaggagagcgttttaccataagaaacacacctccaaggaacccagaagagcgggggcagcaggggctgccagcccagaggcccgacgacccaagaggcccagctttctgcccctgtgtgttggtggccatcggccctccacctccagcagccttgatccagaagatctcgagtgccgggagcccctgcccgcagaaggggagccagttgtgatctcagaagcaccctcccaggctagaggccacacgccagaaggggcacctcagctgagtggagcatgtgaatctaaggagatcatcatccagaagcttgtggcacttctccaagaagtggatggccaactggggcagcagatcaggcgccaccccagctttaagaggtttttttacgagttctcggactcccccctcagcaagctggtagccaccctgcgcagccaggtggctcactcctctaagctggacaggaaccgcgccaggagactctaccagtttgacgttagcttagctaacaaatttgctggcagcaacagccatgccatgtgcatcctcatgggcctaagagaccactacaattgcacccagttcccatacagggaggaccagccgaacatcacaagtcctaaggttgaaagtccagattgaaagctgtgtcttgcactcaaattcccttgaactagccaaatggttcgcagctttagccaggagaccctgaagatgctctgtgatgtcccaatccctgcttcacaaacgtgatggaagacaagagcagacaatcattctgtgtccataccctagtatctgagaagcacagagcattcttccacaaggcaagacacagaggccatgtctggggaaatcagcactggactgggaatgaggaagactggggctctacctgctgaacctaccccagacttgctgcatgaccctctacacattccccctcctctccagactttggagtctaggatcccacccagaaggcctaccgatattttctcagatgttcatgttaactgagtctagtttttaaactaaatttttatttaatctctaaacagaacatccacatgcatccaaacagatatgcatcgaagtgtatcccatcatttcttcagttgaccagtagttcttcatgctcatatggatttgtagatgcctcccaggaactctgcaggcccaagatggaaaaacctagagactggggacacttggtctctcagaatccttctaaccctgtgtcctgtcattctatgactagagaaatggagctgataccttgcacctctcccatctcatgggattggctaggagtcagtgagaaaatggatgtgaagagttctgaaaattacctagtgccatgtccatgtaggcactatagcttcttttgggtagttttcaggaagtggaggagggcttcaatgggctggactgccatggattgttgcacaggggtgcactgctcaagagcaccatactccaggaggtactattcatgtcctagacattgtggatttgtagatttatcatgacagttttgcagctggtagcagtaacatgtcttgagaaaagggctattttttgtatttgcacaaaggtgaagtgtgggggtgccagaggctctgccttctgtatagctcaacagtttcaatagcttgactcaggtgtgaaatttgccacatgttcatatctatgtgcaggaaggacaagactgtagacagacagtcggctcccttggacactgcccagaacatgtggtcatgggggaaagggtgttaaacctggatggcaagtgagatcttgtgacccttggggacatggtattgccgtgttgaacctgctgtcgcaccatggggtaggactggggaggaggagcagtctagagcggagaggccctgggtgcttatatgggactggcctccaacctgaggcactggcttcataagctcaactcagcctatccggaaagccatttagtttttattgctgcttctgagaagtgggggagaggtgagctatttgtggatttgttttaggcagtgttcacaatcatagcacctaaatatgaaggatcagaataagttatgaaatgaaggtcaggaaccttttgtacatagtttcttatttggaatgatgttctttaagccctatgagtatttggtatgtgctcctgatgctggcatctgagtctcatttttgtaccgtgttatttgagcaaataaatacattaacttgcacaaaaaaaaaaaaaaaaaca

SEQ ID NO: 543 - protein, 652 aa, Homo sapiens
MENPRCPRRPLAEKKARSLDRPQAPGKGSESWDCHWLSLPTAPSRKALHWTTSDWARHSDSPAPSAEAHCTTAAAPTPEETGDFLPSEQRPSQDTKKGWLKTMLNFFVRTGPEEPRERASRRPRGKEGISQHPEPLEAAGEPALRKKAHHDKKPSRKKQGHKKHAAEVTKAAQDQEARGREEGLSKAAAALRSGEADLGPARRGGEDSDHQSFLIKVDGTGALDVSPHATGHQQEEELKKPDQDAIIQMIVELLKRVGDQWEEEQSLASQLGVALPNPAPAVRKKSQEKKTSLKRTSKTNPKKHGSEEAKRGAADVSSPEAWPPKKSSFLPLCVSGHRPSISSSYGLEEPKVQEAPSTEAGAPGPSVLPTPSESQEPGEELPLDRASEYKEFIQKIISMLQDAEEQQGEEQPQVQQEEVGVENPAPHCRRKSQEKRSSFRRAFYHKKHTSKEPRRAGAAGAASPEARRPKRPSFLPLCVGGHRPSTSSSLDPEDLECREPLPAEGEPVVISEAPSQARGHTPEGAPQLSGACESKEIIIQKLVALLQEVDGQLGQQIRRHPSFKRFFYEFSDSPLSKLVATLRSQVAHSSKLDRNRARRLYQFDVSLANKFAGSNSHAMCILMGLRDHYNCTQFPYREDQPNITSPKVESPD

SEQ ID NO: 544 - DNA, 1670 bp, Homo sapiens
gatttcctcccacgcgaccttccagttctcggagccaggttaggggtttggcggaggaggactgcggggcgcgggcctagggccccagcagccacggccaggggagcgctcaagacagaaagccggtggcttcctcacctccacctgtaatgcaggagggagaattggctatttctcctataagccctgtggcagccatgcctcccctaggcacccacgtgcaagccagatgtgaagctcaaattaacctgctgggtgaaggggggatctgcaagctgccaggaagactccgcatccagcccgcactgtggagcagggaggacgtgctgcactggctgcgctgggcagagcaggagtactctctgccatgcaccgcggagcacgggttcgagatgaacggacgcgccctctgcatcctcaccaaggacgacttccggcaccgtgcgcccagctcaggtgacgtcctgtatgagctgctccagtacatcaagacccagcggcgagccctggtgtgtggacccttttttggagggatcttcaggctgaagacgcccacccagcactctccagtccccccggaagaggtgactggcccctctcagatggacacccgaaggggccacctgctgcagccaccagacccagggcttaccagcaacttcggccacctggatgaccctggcctggcaaggtggacccctggcaaggaggagtccctcaacttatgtcactgtgcagagctcggctgcaggacccagggggtctgttccttccccgcgatgccgcaggcccccattgacggcaggatcgctgactgccgcctgctgtgggattacgtgtatcagctgctccttgatacccgatatgagccctacatcaagtgggaagacaaggacgccaagatcttccgagttgtggatccaaatgggctcgccagactctggggaaatcacaagaaccgggtgaacatgacctacgagaagatgtctcgtgccctgcgccactattataagcttaatatcattaagaaggaaccggggcagaaactcctgttcagatttctaaagactccgggaaagatggtccaggacaagcacagccacctggagccgctggagagccaggagcaggacagaatagagttcaaggacaagaggccagaaatctctccgtgaggggcaggtggactccaggcacccggtaccgatggggcagggaccgagtctcccatgaaggcagactcctcctcccagcagagcagcaggatccccagccagactctgtacccacaggattacagccattgcttgggaaggctgggaggcctcccatccaggacactgggggcaggagtgtcatcttttgggcagggcaatcctggggctaaatgaggtacaggggaatggactctcccctactgcacccctgggagaggaagccaggcaccgatagagcacccagccccacccctgtaaatggaatttaccagatgaagggaatgaagtccctcactgagcctcagatttcctcacctgtgaaatgggctgaggcaggaaatgggaaaaagtgttagtgcttccaggcggcactgacagcctcagtaacaataaaaacaatggtagctgaaaaaaaaaaaaaaaaaaaaaaaaaaaaaaaaaaaaaaaaaaaaa

SEQ ID NO: 545 - protein, 341 aa, Homo sapiens
MQEGELAISPISPVAAMPPLGTHVQARCEAQINLLGEGGICKLPGRLRIQPALWSREDVLHWLRWAEQEYSLPCTAEHGFEMNGRALCILTKDDFRHRAPSSGDVLYELLQYIKTQRRALVCGPFFGGIFRLKTPTQHSPVPPEEVTGPSQMDTRRGHLLQPPDPGLTSNFGHLDDPGLARWTPGKEESLNLCHCAELGCRTQGVCSFPAMPQAPIDGRIADCRLLWDYVYQLLLDTRYEPYIKWEDKDAKIFRVVDPNGLARLWGNHKNRVNMTYEKMSRALRHYYKLNIIKKEPGQKLLFRFLKTPGKMVQDKHSHLEPLESQEQDRIEFKDKRPEISP

SEQ ID NO: 546 - DNA, 1405 bp, Homo sapiens
caccaggaggaaataattcacaagttggccatgcagctgagacacattggggacaacattgatcataggatggttcgagaggatcttcaacaggatggcagagatgcactagatcattttgtcttctttttctttagaagagttcaggtgttgctgcattttttctggaacaaccatttgctgtaaaaggaaagtaaaggtcaagtggtcaagttctgttttctttttaccctctgagaaacatgaatcccactgggacagatgggaagaacacccttctccgtctccctctttttgtacccatcactgttggtctacacccagtttgttgaagaactgcgggttcacgagccatttgtctcttcggaggagctagctatgagatgtctgcgatcacatcacggtaaagcccaaggagtaattaggaccccaggaagccttgctgcccagaaaacaccagcgctgtggatggtcccagggctccttgtgaggaaaccttgaacatttccttccaggaatgaaagagaacctcgtcctcaaactaaaggccacagaaatgggcactacctcctggcccactccctgggcaccatgccctctggtgacctgttggctccactcttgtcactcatgtccagatctgcagtgccagcttctccttctcggtgacatgtcacctccctgccccaatcctggctccaaccctctctggaaaatcgaagtgaaacatttgtctctaatactcaaattcaacatatggctcatctcatctaccttcccatttccatgcctagaggccccactactaccactagcaccgttgggtgtttccttctcaggctctgattctacaacatttacgttcttttctcacctttgatcccctcactcctctgtgacccccttcaagtcttccttcaccactccagtgttttcccataccactcgaccctgctcgaaggtatctttccctgctctgtcatcctcttttaggcatgcctgcttaaaatcgggagtgcttagtccttggccaacagtcctgccttctagaagaatgtaagacctgaaagagttatgaatctatcactaggcaaaaacttctcttttcctattgctggatggttttgctattattggttggtgggccctttgcctgtggaatgtatttcactcattctctcctgcacgctgttaggcagttctttcacctgcatgcttcttcttttacctttttgtctacctcatagtccctctctcccctcctttaaaagaattataaatattaggaaagcttgttgttataaattaaaagtttacatatgtatcttgagttcttcataggggaagtgttattttaaaaaattctaaaaatgaaataaatattgttattttattgagcatgaaa

SEQ ID NO: 547 - protein, 51 aa, Homo sapiens
MQLRHIGDNIDHRMVREDLQQDGRDALDHFVFFFFRRVQVLLHFFWNNHLL

SEQ ID NO: 548 - DNA, 5032 bp, Homo sapiens
taacttttccgtctgcaacctttaataattgagagggtatgcgcaactcagaaaagtgcgcccgctgaggttgggtgcagagtggactggaggaaaggcgacacccatttacggtgcggccccggacggggtccccagacacggccttcccggcgtgccacgcgcggaggggactcttaacgtgaagcgctgggtgactcagccgcgtggccgcgcggtccggggcggggggcgcgcgccgctgcggcacagccggtcccggctgcggcttctggctgcgcggcctgcgcgcgcctcccgggcggattccagccccgagcgggacagcgcggcggggagcgacgagatttctctctgatcaaacggacagttcaggactcagaatctaaggatgaatgttcaccgtggcagtgacagtgacaggttattgcggcaggaggccagctgcttagtggatgatactttagctgtagcccaagaaaaagaagcaaacagcctggcttcatctggtcctcataatcttacttatcctctaggtcccaggaatgaagacctctcacttgactatgcctctcagccagcaaatcttcagttccctcacataatgccccttgctgaagacatcaaaggttcttgcttccaaagtgggaataaacggaaccatgaaccttttattgctccagaaagatttggaaacagtagtgtgggctttggcagtaattcccattcccaagcaccagagaaagtgacgcttcttgtagatggcacacgttttgttgtgaatccacagattttcactgctcatccggataccatgctgggaaggatgtttggaccaggaagagagtacaacttcactcggcccaatgagaagggagagtatgagattgctgaaggcatcagtgcaactgtatttcgcacagtgctggattattacaaaaccggtatcatcaattgtcctgatggcatctctatcccagatcttagagatacttgtgattatctctgcattaattttgacttcaacactatccgatgtcaagatctgagtgctttactccatgaactgtctaatgacggtgctcataagcagtttgatcactacctcgaagagctcatcttgcccatcatggtgggctgtgccaagaaaggagaacgagagtgccacattgttgtgctgacggatgaggattctgtggactgggatgaagaccaccctccaccaatgggggaggaatattcccaaattctttatagctccaagctctacagattcttcaaatatattgagaatagggatgttgcaaaaacagtgttaaaggaacggggcctaaaaaacattcgcattggaattgaaggttaccctacctgtaaagaaaaaattaagagaaggcctggcggccggtctgaagtcatctataattatgtacaacgccccttcatccagatgtcatgggaaaaggaagaagggaagagtcgccatgtggatttccagtgtgttcgaagcaaatccctcacgaatctggtagctgctggagatgatgtcttggaggaccaggagatattaatgcatcacccaccccaagtggatgaacttgaccggctaaatgccccactttctcagatggcttctaacgactttcaggattagggccagctgtgggtctactccttgttggagcccatctcacctgggatgcctgcagccagccctccctcgtgatttgtctcaccttgagtaggagacatgcttctcccctaaccttttcctttctgccataattaacatatgtccttttcagtaagtccatgcctctggcaggggatgaagaagtactcactggtaattagctaccatctttgcagcagccctggtaacttgaaaaatttgggtctggtgctgttcattgagtctttgtgtaactgcaaaagcaggaaaggaagtcaagactcctgttgcctcgtgcttagcaaagcagtccttatcctttatactctgttcttgggttttgtttttgtcttgttttataccaggcaaattgcttagtagcaaagggaccaaactgaaaaggtgacaatctctaacttctaaaagcagacaccaatcggatgctcattagaggttaatgaagatgccattcttggtggcctctgcacccaaattgcatctggaaagaactagggtctcattcagaatgtccaaaaggaaattcttaagagcttaaattcagatttgtgtctcattaatgcagtgaacaattcaaaaccacacagattccttggcaggaaggataatggaataacagtgttgatgagacctttttagcttcaaggtttcggagtctaaacaaatggatgattcatttggaatgaaactcacaatgcaagtagaaggacctctccaaatcaggccagttgggttatcctggcttggaatctggtgtgaaaccataggtcttaacactctggagcagcacattgctgtggatatgtccaggagaccttagatatggcttaaaggctttcaagatgaggacagaaattgcttacaattgctcagtttctcaacagaaagactcataagagtgccagcatggggtacatggagtgaagctgggtgggaagcatcatctgcacagtccctgtcctagtgcaggacttttctctgtatgttttcataccatgggatttttggatatcagtgtattttggttcttgaaatagcctaatagctgctcacacattgggtaggaatattataccaatgtcatccccaaaggaagggtgagctgaatggaaattaagcccagtcattttatttgatctattagctctgttatcagtgcatgatcacccagatcaccctcctcagcccacacagtgctgaaccatcttccctcctgttctccatggctattaatagtatagctaaatttagagtgcagagccagatataagtattttggaattatctcccagcttgtggtagaagctgactggaatacaggttgagtatctcttatccaaaatgctagggaccagaaaggtttcagattttttcagattttggaatacttaacagttgagcaccccaaatctgaaaggcttctgaacgtcatgtcagcactcaaaaaagtggattttggagcacttcaaatttcggatttttggatttgggatgctcatcctgtgtaggagaggctactcgattccatttaatgactgtcctagtcataatcatccaaagataaaagccaggtagatgttgaaagctctttccagggctgaaaaagtgttcttacgttctctgcatgtgactagcatcactgtggaaattaatgctctgttcttcactagaatgtagtaagtggttaaactgagctatcccccacctgatgactattggcatccatttgcaaggccaatggcctggattaagggttaggattatttgtagctagaaggtaattttatttctgtgaaactaattggctcatatttgaggttaggtgtggccttgaccttaccagtacatttatacccactaccagttgactagcccagataattgttaaatggtgcttcttttctgcttctcagtagacttccatgccattacaaaggaaatttgaattacctagtgtttgtatattccatgataactatgtataacttctgttacacagcttatgtattgttaacatttaagtgtaaaccatgccacagctaacacttaaaaatgaaaactaattagttcttgcttagggaaaatgccaggtatgaagtatggcatatacttgacactgtcctgtgtaaccctttactttgctcaggctttcaagattgagtcttttttcccccaaattaggttaacatgcatttgaccccaacctgtggggtttgagtaagctggaaatctgtgacggtaggctttctagtgtcacgaggtggtggtgactgaaggaaaagctgggatcacaggttccttctgatggagaggaaggtttatttctatgcccctcccaccaccctccacctagagctcacccaagcctgctccagtcccaggggcaggccattctgcaaaagcaggacctcacagaaacaagggctgggttgaggtcacccccttcagagttggttcctggccagatgggtaagaggcatttgtaattttaaaaatgtgaaacttgggtttggtgttttcttctaagtgcctaaataagcaagccaggctgttgatattttagccagagaaatcggcaagccaagattaacccgaatctgaagtttagaatcttgagtttgcatctgcatcatatcatgctgttttgatgaggaaacatttgccactgaggagttggagggagggcaagacgacagtgttaagtcagatcatttaatggtttcccctaagccctggaaaaatatttgaaagaatggcagcaaaaaggttaagaaagcaagccagatttactgcacaatatgcagtacccagtactactttaaatcccaagagaacagtgtgatgtctaatatatacaggtctatgaaaatactgtggaataagcccaggaaggttagatgtgtttgcaaataagttgcccaaagggtccccctctaagtaaaacaaatattcagaccacaggctttaatgtaaactgtcaaaaagtgggatgtggaggatttttgttaagtgtcaatcgaagttaaaaagcaagggtttttggccaggcgtggtggctcacgcctgtaatcccagcactttgggaggccgaggccggcaaatcacctaaggtcaggagttcgagaccagcctggccaacatggtgaaaccccgtctctactaaaaatacaaaaaaattagcccggtgtggtggcaagtgcctgtagtcccagctacttgggaggctgaggcaggagaactgcttgaacccgggaggtagaggttgcagtgagccacgatcatgccactgcactccagcctgggcaacagagcaagactccatctcaaaaaaaaaaaaaaaaaaaa

SEQ ID NO: 549 - protein, 419 aa, Homo sapiens
MNVHRGSDSDRLLRQEASCLVDDTLAVAQEKEANSLASSGPHNLTYPLGPRNEDLSLDYASQPANLQFPHIMPLAEDIKGSCFQSGNKRNHEPFIAPERFGNSSVGFGSNSHSQAPEKVTLLVDGTRFVVNPQIFTAHPDTMLGRMFGPGREYNFTRPNEKGEYEIAEGISATVFRTVLDYYKTGIINCPDGISIPDLRDTCDYLCINFDFNTIRCQDLSALLHELSNDGAHKQFDHYLEELILPIMVGCAKKGERECHIVVLTDEDSVDWDEDHPPPMGEEYSQILYSSKLYRFFKYIENRDVAKTVLKERGLKNIRIGIEGYPTCKEKIKRRPGGRSEVIYNYVQRPFIQMSWEKEEGKSRHVDFQCVRSKSLTNLVAAGDDVLEDQEILMHHPPQVDELDRLNAPLSQMASNDFQD

SEQ ID NO: 550 - DNA, 1015 bp, Homo sapiens
gtttccaggagggagcggcctttgctcagcgcgagacggctgggcgccgagtgggacagcgctggtgcggagactgcttccggactccaggtaccgcgcttggcggcagctggccccagacttctgtcttttcagctgcagtgaaggctcggggctgcagaattgcaaccttgccaatggacctgatcggttttggttatgcagccctcgtgacatttggaagcatttttggatataagcggagaggtggtgttccgtctttgattgctggtctttttgttggatgtttggccggctatggagcttaccgtgtctccaatgacaaacgagatgtaaaagtgtcactgtttacagctttcttcctggctaccataatgggtgtgagatttaagaggtccaagaaaataatgcctgctggtttggttgcaggtttaagcctcatgatgatcctgagacttgtcttgttgctgctctgagcatctggaggaacagaaaactaagttcatgtcatcctgctgtaatgggcagagcatattttttttgtatttaaaagataaacttcaatatggaatgctagaaacacaaatagcactgtcacctctaatatgaacattagtttgaggtagtttttttctaaagcaaaaattttaactgttttctaattgtcaagcactattttcattaaaagtgtctaatgaatcatgatatactcttccatttgttgtgtctattttttatatatttggtattttttgaaaattccaaatactcatgtctcaagtaagcttaaactacaacttgtcacataaaggaagtcttaagtggagttcacagaatgataatgtatctatttgtcatttgtgttatatttgaaattattagaaattatgctttttccattttaattgtattgctgccagtgctatttttttctttaaaaaattttattcttagcacactgttatgtcctaactgaatgtattcagtattcaaataaaagacattttggttcaaa

SEQ ID NO: 551 - protein, 99 aa, Homo sapiens
MDLIGFGYAALVTFGSIFGYKRRGGVPSLIAGLFVGCLAGYGAYRVSNDKRDVKVSLFTAFFLATIMGVRFKRSKKIMPAGLVAGLSLMMILRLVLLLL

SEQ ID NO: 552 - DNA, 976 bp, Homo sapiens
tattgagaggaacaaagagcttataaatacattaggacctggaattcggttgtccagccacaaaggtgacagcatttaacaaagcttagagaaacctccaggagactgctaccatggcagagaagcccaagctccactactccaatatacggggcagaatggagtccatccggtggctcctggctgcagctggagtagagtttgaagagaaatttataaaatctgcagaagatttggacaagttaagaaatgatggatatttgatgttccagcaagtgccaatggttgagattgatgggatgaagctggtgcagaccagagccattctcaactacattgccagcaaatacaacctctatgggaaagacataaaggagaaagccctgattgatatgtatatagaaggtatagcagatttgggtgaaatgatccttcttctgccctttactcaacctgaggaacaagatgccaagcttgccttgatccaagagaaaacaaaaaatcgctacttccctgcctttgaaaaagtcttaaagagccacggacaagactaccttgttggcaacaagctgagccgggctgacattcacctggtggaacttctctactacgtggaagagcttgactctagccttatttccagcttccctctgctgaaggccctgaaaaccagaatcagtaacctgcccacagtgaagaagtttctacagcctggcagcccaaggaagcctcccatggatgagaaatctttagaagaatcaaggaagattttcaggttttaataaaccagccatagaggtcaagaacatgcaagaccagtattctaaagttttgcaacaattaagtgctttacctaagtgttgattgtgcctgttgtgaagctaatgaactctttcaaattatatgctaattaaataatacaactcctattcacccacttagttaaaattgatttcttctcattaggatctgatgt

SEQ ID NO: 553 - protein, 222 aa, Homo sapiens
MAEKPKLHYSNIRGRMESIRWLLAAAGVEFEEKFIKSAEDLDKLRNDGYLMFQQVPMVEIDGMKLVQTRAILNYIASKYNLYGKDIKEKALIDMYIEGIADLGEMILLLPFTQPEEQDAKLALIQEKTKNRYFPAFEKVLKSHGQDYLVGNKLSRADIHLVELLYYVEELDSSLISSFPLLKALKTRISNLPTVKKFLQPGSPRKPPMDEKSLEESRKIFRF

SEQ ID NO: 554 - DNA, 1046 bp, Homo sapiens
ggaacaaagagcttataaatacattaggacctggaattcagttgtcgagccaggacggtgacagcgtttaacaaagcttagagaaacctccaggagactgctatcatggcagagaagcccaagctccactacttcaatgcacggggcagaatggagtccacccggtggctcctggctgcagctggagtagagtttgaagagaaatttataaaatctgcagaagatttggacaagttaagaaatgatggatatttgatgttccagcaagtgccaatggttgagattgatgggatgaagctggtgcagaccagagccattctcaactacattgccagcaaatacaacctctatgggaaagacataaaggagagagccctgattgatatgtatatagaaggtatagcagatttgggtgaaatgatcctccttctgcccgtatgtccacctgaggaaaaagatgccaagcttgccttgatcaaagagaaaataaaaaatcgctacttccctgcctttgaaaaagtcttaaagagccatggacaagactaccttgttggcaacaagctgagccgggctgacattcatctggtggaacttctctactacgtcgaggagcttgactccagtcttatctccagcttccctctgctgaaggccctgaaaaccagaatcagcaacctgcccacagtgaagaagtttctacagcctggcagcccaaggaagcctcccatggatgagaaatctttagaagaagcaaggaagattttcaggttttaataacgcagtcatggaggccaagaacttgcaataccaatgttctaaagttttgcaacaataaagtactttacctaagtgttgattgtgcctgttgtgaagctaatgaactctttcaaattatatgctaattaaataatacaactcctattcgctgacttagttaaaattgatttgttttcattaggatctgatgtgaattcagatttccaatcttctcctagccaaccattttcctggaattaaaaattcagtaaaaaaggaaactataaaaa

SEQ ID NO: 555 - protein, 222 aa, Homo sapiens
MAEKPKLHYFNARGRMESTRWLLAAAGVEFEEKFIKSAEDLDKLRNDGYLMFQQVPMVEIDGMKLVQTRAILNYIASKYNLYGKDIKERALIDMYIEGIADLGEMILLLPVCPPEEKDAKLALIKEKIKNRYFPAFEKVLKSHGQDYLVGNKLSRADIHLVELLYYVEELDSSLISSFPLLKALKTRISNLPTVKKFLQPGSPRKPPMDEKSLEEARKIFRF

SEQ ID NO: 556 - DNA, 845 bp, Homo sapiens
agttgcccagccacgacagtgacagagtttaacaaactaagcttagagaaacctccaggagactgctatcatggcagagaagcccaagctccactactccaatgcacggggcagtatggagtccattcggtggctcctggctgcagctggagtagagttggaagagaaatttctagaatctgcagaagatttggacaagttaagaaatgatgggagtttgctgttccagcaagtaccaatggttgagattgacgggatgaagctggtgcagaccagagccattcttaactacattgccagcaaatacaacctttatgggaaagacatgaaggagagagccctgattgatatgtacacagaaggtatagtagatttgactgaaatgatccttcttctgctcatatgtcaaccagaggaaagagatgccaagactgccttggtcaaagagaaaataaaaaatcgctacttccctgcctttgaaaaagtcttaaagagccacagacaagactaccttgttggcaacaagctgagctgggctgacattcacctggtggaacttttctactacgtggaagagcttgactcgagtcttatctccagcttccctctgctgaaggccctgaaaaccagaatcagcaacctgcccacggtgaagaagtttctgcagcctggcagccagagaaagcctcccatggatgagaaatctttagaagaagcaaggaagattttcaggttttaataaagcagctatggaggccaagaacatgccagaccaatattctacagtttgcaacaatgaagtgctttacctaagtgtggattgtgcctcttgtaaagctaataaa

SEQ ID NO: 557 - protein, 222 aa, Homo sapiens
MAEKPKLHYSNARGSMESIRWLLAAAGVELEEKFLESAEDLDKLRNDGSLLFQQVPMVEIDGMKLVQTRAILNYIASKYNLYGKDMKERALIDMYTEGIVDLTEMILLLLICQPEERDAKTALVKEKIKNRYFPAFEKVLKSHRQDYLVGNKLSWADIHLVELFYYVEELDSSLISSFPLLKALKTRISNLPTVKKFLQPGSQRKPPMDEKSLEEARKIFRF

SEQ ID NO: 558 - DNA, 937 bp, Homo sapiens
atacacatcaggaggtggccttgagaagctgagcggagaccggctagactttactcaaagaaaccaagagactgttaccatggcagggaagcccaagcttcactacttcaatggacggggcagaatggagcccatccggtggctcttggctgcagctggagtggagtttgaagagaaatttataggatctgcagaagatttgggaaagttaagaaatgatgggagtttgatgttccagcaagtaccaatggttgagattgatgggatgaagttggtacagaccagagccattctcaactacattgccagcaaatacaacctctacgggaaagacataaaggagagagccctaattgatatgtatacagaaggtatggcagatttgaatgaaatgatccttcttctgcccttatgtcgacctgaggaaaaagatgccaagattgccttgatcaaagagaaaacaaaaagtcgctatttccctgccttcgaaaaagtgttacagagccatggacaagactaccttgttggcaacaagctgagccgggctgacattagcctggtggaacttctctactatgtggaagagcttgactccagccttatctccaacttccctctgctgaaggccctgaaaaccagaatcagcaacctgcccacggtgaagaagtttctacagcctggcagcccaaggaagcctcccgcagatgcaaaagctttagaagaagccagaaagattttcaggttttaataaagcagccatggaggctaagaacatgcaagaccaatattctaaagttttgcaacaatgaagtgctttacttaagtgttgattgtgcctgttgtaaagctaatgaaccctttccaattatatgctaattaaataataaaaactcctatttgctaacttaaaaaaaaaaaaaaaaaaaaaaaaaaaaaa

SEQ ID NO: 559 - protein, 222 aa, Homo sapiens
MAGKPKLHYFNGRGRMEPIRWLLAAAGVEFEEKFIGSAEDLGKLRNDGSLMFQQVPMVEIDGMKLVQTRAILNYIASKYNLYGKDIKERALIDMYTEGMADLNEMILLLPLCRPEEKDAKIALIKEKTKSRYFPAFEKVLQSHGQDYLVGNKLSRADISLVELLYYVEELDSSLISNFPLLKALKTRISNLPTVKKFLQPGSPRKPPADAKALEEARKIFRF

SEQ ID NO: 560 - DNA, 1317 bp, Homo sapiens
agctcccgcgcgctagagccgcctgctggtctcacccagccgggaccgctgacctggcgctttgtgcggctccaggcctccgagtggactccagaaagcctgaaaagctatcatggcagcaaggcccaagctccactatcccaacggaagaggccggatggagtccgtgagatgggttttagctgccgccggagtcgagtttgatgaagaatttctggaaacaaaagaacagttgtacaagttgcaggatggtaaccacctgctgttccaacaagtgcccatggttgaaattgacgggatgaagttggtacagacccgaagcattctccactacatagcagacaagcacaatctctttggcaagaacctcaaggagagaaccctgattgacatgtacgtggaggggacactggatctgctggaactgcttatcatgcatcctttcttaaaaccagatgatcagcaaaaggaagtggttaacatggcccagaaggctataattagatactttcctgtgtttgaaaagattttaaggggtcacggacaaagctttcttgttggtaatcagctgagccttgcagatgtgattttactccaaaccattttagctctagaagagaaaattcctaatatcctgtctgcatttcctttcctccaggaatacacagtgaaactaagtaatatccctacaattaagagattccttgaacctggcagcaagaagaagcctccccctgatgaaatttatgtgagaaccgtctacaacatctttaggccataaaacaacacatccatgtgtgagtgacagtgtgttcctagagatggtattgtctacagtcatgtcttaatggatcccagctctgtcatggtgctatctatgtattaagttgggtcctaagttgggtcttttgtgtcaacgagatcatctcttctagaaatatcaaccttttttgtccagtaaataattgttaggggatctttattggaaaacttttttggagaggctggtatttaagttagatctgattgggctactcatgtcctgtagccagttcatcctcataataagaatgggcaggatctcttgttctctcctgagtgtctttctactctcctgagcgtctttctgctctccttatcctgttctcttatccttatcccctccagtctctgcctaatttttagtgtttaataacaaccgaatgtctagtaaatgactctcctctgagctgtaataaataaaatggtagtaatgaatgcaatcagtattagccaaaataaagaatttatgagtcattaaaaaaaaaaaaaaaaaaa

SEQ ID NO: 561 - protein, 222 aa, Homo sapiens
MAARPKLHYPNGRGRMESVRWVLAAAGVEFDEEFLETKEQLYKLQDGNHLLFQQVPMVEIDGMKLVQTRSILHYIADKHNLFGKNLKERTLIDMYVEGTLDLLELLIMHPFLKPDDQQKEVVNMAQKAIIRYFPVFEKILRGHGQSFLVGNQLSLADVILLQTILALEEKIPNILSAFPFLQEYTVKLSNIPTIKRFLEPGSKKKPPPDEIYVRTVYNIFRP

SEQ ID NO: 562 - DNA, 331 bp, Homo sapiens
ggatgtgaggcgatctggctgcgacatctgtcaccccattgatcgccagggttgattcggctgatctggctggctaggcgggtgtccccttcctccctcaccgctccatgtgcgtccctcccgaagctgcgcgctcggtcgaagaggacgaccatccccgatagaggaggaccggtcttcggtcaagggtatacgagtagctgcgctcccctgctagaacctccaaacaagctctcaaggtccatttgtaggagaacgtagggtagtcaagcttccaagactgcagacacatccaaatgaggcgctgcatgtggcagtctgcctttctttt

SEQ ID NO: 563 - DNA, 6095 bp, Homo sapiens
gcgccgtgcggcccgtgcgactcgccggacctcgcgggcgtccctgtacggagccctcggccggtcctagcagggattgtccccatttccagctccggagcgggcggctgcgccccgctcgtcgaggagctgcgctcacctcaggggcgggcccccgcctgcgttcgcggcgccagcagaagactgatttttggaaatatgtatttgggagacagtcacgtcctattgaataccttgtgctggtgctgccatcgaaaaatctggttacactctggggaggactgctaccactgcagaactgaaccacttcggccgtgagatgagtgtccggcctgagcaggcacaccatgaatagatacacaacaatcaggcagctcggggatggaacctacggttccgtcctgctgggaagaagcattgagtctggggagctgatcgctattaaaaaaatgaaaagaaaattttattcctgggaggaatgcatgaaccttcgggaggttaagtctttaaagaagctcaaccatgccaatgtagtcaaattaaaagaagttatcagggaaaatgatcatctttattttatcttcgagtacatgaaggaaaatctttaccagctcattaaagagagaaataagttgtttcctgagtctgctataaggaatatcatgtatcagatattacaaggactcgcatttattcacaaacacggcttctttcatcgagacttaaagcctgagaacctcctctgcatgggaccagaacttgtgaaaattgcagactttggtttggcccgagaaatacgatcaaaacctccatatacagattatgtatctaccagatggtacagggctccagaagtactcctgaggtctaccaactacagctcccccattgacgtctgggcggtgggctgcatcatggcagaagtttacaccctcaggccactcttccctggagccagtgaaattgacacaatattcaaaatttgccaagtgctggggacaccaaaaaagactgactggcctgaaggctatcaactttcaagtgcaatgaacttccgttggccacagtgtgtacccaataacttaaagaccttgattcccaatgctagcagtgaagcagtccagctcctgagagacatgcttcagtgggatcccaagaaacgaccaacagctagtcaggcacttcgatatccttacttccaagttggacacccactaggcagcaccacacaaaaccttcaggattcagaaaaaccacagaaaggcatcctggaaaaggcaggcccacctccttatattaagccagtcccacctgcccagccaccagccaagccacacacacgaatttcttcacgacagcatcaagccagccagccccctctgcatctcacgtacccctacaaagcagaggtctccaggacagatcacccaagccatctccaggaggacaagccaagcccgttgcttttcccatccctccacaacaagcatccacagtcgaaaatcacagctggcctggagcacaaaaatggtgagataaagccaaagagtaggagaaggtggggtcttatttccaggtcaacaaaggattcagatgattgggctgacttggatgacttggatttcagtccatccctcagcaggattgacctgaaaaacaagaaaagacagagtgatgacactctctgcaggtttgagagtgttttggacctgaagccctctgagcctgtgggcacaggaaacagtgcccccacccagacgtcatatcagcggcgagacacgcccaccctgagatctgcagccaagcagcactatttgaagcactctcgatacttgcctgggatcagtataagaaatggcatactctcgaatccaggcaaggaatttattccacctaatccatggtctagttctggcttgtctggaaaatcttcagggacaatgtcagtaatcagcaaagtaaattcagttggttccagctctacaagttctagtggactgactggaaactatgtcccttcctttctgaaaaaagaaatcggttctgctatgcagagggtacacctagcacctattccagacccttcccctggttattcctccctgaaggccatgagacctcatcctgggcgaccattcttccacacccagcctagaagcactcctgggttgataccacggcctccagccgcccagccagtgcatggccggacagactgggcttccaagtacgcatctcggcgatgactgtctgccttggtgatgaatctcttcctagggagaagcaggatactttccctcagctgactggtgttctacctgcaagatgtgcagagggcataaaagcaaatcaacactttatagttattcttctgaactaagacatgtcaatattcttttttaaagtttttttttaaaatattgatttgaatgcagtaggcttttttgtataaaattattttattctaaaactgggtcccattattttcttaaacaacagcattttgtatatatggattatgttttagcattttatacagtcaactttgtaatgaactttttaaaaattaattgattttcctttggggttccagataatattttctacagattttgaaaaatgtaataatattaatgcagtattgcaacaggggtgcaatttaaggctatgtgatagagggttatttactcagtgtgtgcagatatttatgaagtggtgaaatttcaagtgtggctcactaggtacttcaggccttcttggactgttgttagaaaagtgatcctctgcttttcttagtaggtcattggtttgatttttggataccactctgctgttctaaaaggactattatattatataattcactttgttttacttttgttccccagatgaaagaactctaagtaaatacattttaaaaaatttttctgacaccctttaatgtggttgcagatctcagatgaaaccaagcttaattatactatgccattatattctaatttattccatttttgaaatcaagttgtatgtgtaccaataaaagagatttctgcttcaaaaggctctcaacatgaaggttaacacagtcaatcaaacttacattcctgccaagatgcatggccaaaaaactaagtatcaaagcagcagaaggtttttgattatagtaactgagatggaattttgtgcctagctcagttctccagatctggctaggagcagtcaatgactaatgttctgtcctagccaaattctcaggacaatttggggagcagaaagagttatggcagaggttccactcatctacaaagtcacagtcacatgccacatttgatctcctaaccctggtgtagtttctttcaagagtgagaactttatttgttgggcagaggctgttccattgagaggaatgtttacagcagtttcaaaaatgacaaagtcagtttggagacagaaaaagacaaaaggtccagtctcatccatctctatatggtacatttgcctcacttatggttgccttaaaggcaagagggaaggtcaccatcagtgaacgcaatgcaatctcaacagtgtattgattcatattctcctagggctcaaactactctctattggttccaggataatgacaaattgaaccatatgtaagtaatcttttattttttattttttttttgagacagagtctcactctgtcacccaggctggagtgcagtggcgcgatcttagctctctgcaacctctgcctcccaggttcaagcctcctgagtaactgggactacaggcgcccgccaccacgcccagctaattttttgtatttttagtagagacggggtttcactgtgttagccaggacggcctcgatctcctgacctcgtgatccaccctcctccacctcccaaagtactgggattacaggcatgagccactgcacccagccaagtgatcatttttataggttaaaatgataggtgaaatgaatatagacactttcatatggttcaacctaatgacttggtaaattattgccttggtgtattaataatatgttgcattctgaacaaataaccatggcttccaaagggccctaacctaaaatcggagagtaatttatgctttggagaatttgactcaaatatatacttgaccaagcaccatgatccctaggggcatgagaaaagcacataatggatgtggatgtgataggtggtcttttcctgttaacaagctggcagcaaagcttcagaaaatatatatgcaagcacaacttgaagctgaattcatttctgtattatattctcaactcgttatctaaagcatcagaacatgtgttttcagagatgagtcctttactataaggttaatatttattttcattttctgtattatatatgaaaagtaaattaatgtgaaacctggcccagcttgctggaaagcaggttttaaattgtaaatattccttagaggagcaaatggattgtttaataccatagtctcagtaatctagcttatataaggtcattacattttttaactgaaaaacctagttacctgattattgcacattataaaattgtttttctaatactttatagggcccaacttcagaaaatacttcgcttttttctttttatgctttcgtttgtttaccagcaagcaacttccctggggaagccaaacacatattcataaaaaaaatcaagtagctgatgtgcagttgagaaaactagaggactgaaaaaacaaattttaactagcaaatgctgtgaattactcttcctccccttctctgaaatgggtaaaggacaaattgtgtaaaaaaacctatgcactatagaagggaatagtaaccatttcttttgtctctctgtttctgttctgactgagaacctgcagccatttcttgttacatgaaaacaaaatgctacttgttacctctattttttgttactatacaattatgaaatgtaatgtaagacaccaacagaaatgatatacctgtaactgtacctatcaggactatacctcatttacagtcagaaagcttactgggatgtcaggaaatgatacagggttggttctcatttcgtgccgaaatgagacagaaattcagtgacgaaggtgcgttgtaggggtattgatgtgccccaggtagtgccagcagagtagggaaaactgcatttgcataaaaactactcttgacatgattgttcattttacaaaaaaattccattaattaccaagccctcacccagcccatgtgtgataggatttatgtaggaagaaacttgattttcaaataattttttaaatgtatctcttgcctaaaggactatatacatctaataaagtaacactgtgtcatcttctggagttatcaaaaattgtatacaatcaagacaacacaagaattattttatttttgagtgcaaatacaggtactgttggagttgatgggcaccatgctttctcatgaagtagcatttccctaccatcaagccattgttttgtgccattcaggagaggaaaaaaaggaatttatgctgtacatttcagttcagtgtatgaccaaaagcaatatgtttataagaagatgtttgacatactaattattttatatcatttaaaccatactgtagcaacataatatatggagctaatttgtagaattatttttacgatttccaaacaaatgtactgtactgttatataatttattgtgaggaccttctcatggaagccattaggaaaacaaactagaggtaaatatcacattaatctgtattatcaatttctcatagacactgtgctaatgtgaattttaaatgacctgcatcaagtcttctgatctcagataactcagtacagatagcaattagtcagctgatttgattacaatggagtaaccgacaatatatttatttataaagcacatattcataataacgagaagaattcagaaaaccacttaagcaagacccttctgaaataaaaaatgttgctttttaaatagtttgtcctaaggtgtttaaaacatgtcaaccttatgtaaggaaaaatttcctggtccaaataaagttgaagtttaagaaaaattg

SEQ ID NO: 564 - protein, 632 aa, Homo sapiens
MNRYTTIRQLGDGTYGSVLLGRSIESGELIAIKKMKRKFYSWEECMNLREVKSLKKLNHANVVKLKEVIRENDHLYFIFEYMKENLYQLIKERNKLFPESAIRNIMYQILQGLAFIHKHGFFHRDLKPENLLCMGPELVKIADFGLAREIRSKPPYTDYVSTRWYRAPEVLLRSTNYSSPIDVWAVGCIMAEVYTLRPLFPGASEIDTIFKICQVLGTPKKTDWPEGYQLSSAMNFRWPQCVPNNLKTLIPNASSEAVQLLRDMLQWDPKKRPTASQALRYPYFQVGHPLGSTTQNLQDSEKPQKGILEKAGPPPYIKPVPPAQPPAKPHTRISSRQHQASQPPLHLTYPYKAEVSRTDHPSHLQEDKPSPLLFPSLHNKHPQSKITAGLEHKNGEIKPKSRRRWGLISRSTKDSDDWADLDDLDFSPSLSRIDLKNKKRQSDDTLCRFESVLDLKPSEPVGTGNSAPTQTSYQRRDTPTLRSAAKQHYLKHSRYLPGISIRNGILSNPGKEFIPPNPWSSSGLSGKSSGTMSVISKVNSVGSSSTSSSGLTGNYVPSFLKKEIGSAMQRVHLAPIPDPSPGYSSLKAMRPHPGRPFFHTQPRSTPGLIPRPPAAQPVHGRTDWASKYASRR

SEQ ID NO: 565 - DNA, 6228 bp, Homo sapiens
cgggttcctgctgcactaccatgcgccgtgcggcccgtgcgactcgccggacctcgcgggcgtccctgtacggagccctcggccggtcctagcagggattgtccccatttccagctccggagcgggcggctgcgccccgctcgtcgaggagctgcgctcacctcaggggcgggcccccgcctgcgttcgcggcgccaagaagagtattcctttccacttacaactaaataagacctgcttttgctggagctgtgctaggctgagggaattccacactgaattttacaagcgggatggatttctctaaggcagaagactgatttttggaaatatgtatttgggagacagtcacgtcctattgaataccttgtgctggtgctgccatcgaaaaatctggttacactctggggaggactgctaccactgcagaactgaaccacttcggccgtgagatgagtgtccggcctgagcaggcacaccatgaatagatacacaacaatcaggcagctcggggatggaacctacggttccgtcctgctgggaagaagcattgagtctggggagctgatcgctattaaaaaaatgaaaagaaaattttattcctgggaggaatgcatgaaccttcgggaggttaagtctttaaagaagctcaaccatgccaatgtagtcaaattaaaagaagttatcagggaaaatgatcatctttattttatcttcgagtacatgaaggaaaatctttaccagctcattaaagagagaaataagttgtttcctgagtctgctataaggaatatcatgtatcagatattacaaggactcgcatttattcacaaacacggcttctttcatcgagacttaaagcctgagaacctcctctgcatgggaccagaacttgtgaaaattgcagactttggtttggcccgagaaatacgatcaaaacctccatatacagattatgtatctaccagatggtacagggctccagaagtactcctgaggtctaccaactacagctcccccattgacgtctgggcggtgggctgcatcatggcagaagtttacaccctcaggccactcttccctggagccagtgaaattgacacaatattcaaaatttgccaagtgctggggacaccaaaaaagactgactggcctgaaggctatcaactttcaagtgcaatgaacttccgttggccacagtgtgtacccaataacttaaagaccttgattcccaatgctagcagtgaagcagtccagctcctgagagacatgcttcagtgggatcccaagaaacgaccaacagctagtcaggcacttcgatatccttacttccaagttggacacccactaggcagcaccacacaaaaccttcaggattcagaaaaaccacagaaaggcatcctggaaaaggcaggcccacctccttatattaagccagtcccacctgcccagccaccagccaagccacacacacgaatttcttcacgacagcatcaagccagccagccccctctgcatctcacgtacccctacaaagcagaggtctccaggacagatcacccaagccatctccaggaggacaagccaagcccgttgcttttcccatccctccacaacaagcatccacagtcgaaaatcacagctggcctggagcacaaaaatggtgagataaagccaaagagtaggagaaggtggggtcttatttccaggtcaacaaaggattcagatgattgggctgacttggatgacttggatttcagtccatccctcagcaggattgacctgaaaaacaagaaaagacagagtgatgacactctctgcaggtttgagagtgttttggacctgaagccctctgagcctgtgggcacaggaaacagtgcccccacccagacgtcatatcagcggcgagacacgcccaccctgagatctgcagccaagcagcactatttgaagcactctcgatacttgcctgggatcagtataagaaatggcatactctcgaatccaggcaaggaatttattccacctaatccatggtctagttctggcttgtctggaaaatcttcagggacaatgtcagtaatcagcaaagtaaattcagttggttccagctctacaagttctagtggactgactggaaactatgtcccttcctttctgaaaaaagaaatcggttctgctatgcagagggtacacctagcacctattccagacccttcccctggttattcctccctgaaggccatgagacctcatcctgggcgaccattcttccacacccagcctagaagcactcctgggttgataccacggcctccagccgcccagccagtgcatggccggacagactgggcttccaagtacgcatctcggcgatgactgtctgccttggtgatgaatctcttcctagggagaagcaggatactttccctcagctgactggtgttctacctgcaagatgtgcagagggcataaaagcaaatcaacactttatagttattcttctgaactaagacatgtcaatattcttttttaaagtttttttttaaaatattgatttgaatgcagtaggcttttttgtataaaattattttattctaaaactgggtcccattattttcttaaacaacagcattttgtatatatggattatgttttagcattttatacagtcaactttgtaatgaactttttaaaaattaattgattttcctttggggttccagataatattttctacagattttgaaaaatgtaataatattaatgcagtattgcaacaggggtgcaatttaaggctatgtgatagagggttatttactcagtgtgtgcagatatttatgaagtggtgaaatttcaagtgtggctcactaggtacttcaggccttcttggactgttgttagaaaagtgatcctctgcttttcttagtaggtcattggtttgatttttggataccactctgctgttctaaaaggactattatattatataattcactttgttttacttttgttccccagatgaaagaactctaagtaaatacattttaaaaaatttttctgacaccctttaatgtggttgcagatctcagatgaaaccaagcttaattatactatgccattatattctaatttattccatttttgaaatcaagttgtatgtgtaccaataaaagagatttctgcttcaaaaggctctcaacatgaaggttaacacagtcaatcaaacttacattcctgccaagatgcatggccaaaaaactaagtatcaaagcagcagaaggtttttgattatagtaactgagatggaattttgtgcctagctcagttctccagatctggctaggagcagtcaatgactaatgttctgtcctagccaaattctcaggacaatttggggagcagaaagagttatggcagaggttccactcatctacaaagtcacagtcacatgccacatttgatctcctaaccctggtgtagtttctttcaagagtgagaactttatttgttgggcagaggctgttccattgagaggaatgtttacagcagtttcaaaaatgacaaagtcagtttggagacagaaaaagacaaaaggtccagtctcatccatctctatatggtacatttgcctcacttatggttgccttaaaggcaagagggaaggtcaccatcagtgaacgcaatgcaatctcaacagtgtattgattcatattctcctagggctcaaactactctctattggttccaggataatgacaaattgaaccatatgtaagtaatcttttattttttattttttttttgagacagagtctcactctgtcacccaggctggagtgcagtggcgcgatcttagctctctgcaacctctgcctcccaggttcaagcctcctgagtaactgggactacaggcgcccgccaccacgcccagctaattttttgtatttttagtagagacggggtttcactgtgttagccaggacggcctcgatctcctgacctcgtgatccaccctcctccacctcccaaagtactgggattacaggcatgagccactgcacccagccaagtgatcatttttataggttaaaatgataggtgaaatgaatatagacactttcatatggttcaacctaatgacttggtaaattattgccttggtgtattaataatatgttgcattctgaacaaataaccatggcttccaaagggccctaacctaaaatcggagagtaatttatgctttggagaatttgactcaaatatatacttgaccaagcaccatgatccctaggggcatgagaaaagcacataatggatgtggatgtgataggtggtcttttcctgttaacaagctggcagcaaagcttcagaaaatatatatgcaagcacaacttgaagctgaattcatttctgtattatattctcaactcgttatctaaagcatcagaacatgtgttttcagagatgagtcctttactataaggttaatatttattttcattttctgtattatatatgaaaagtaaattaatgtgaaacctggcccagcttgctggaaagcaggttttaaattgtaaatattccttagaggagcaaatggattgtttaataccatagtctcagtaatctagcttatataaggtcattacattttttaactgaaaaacctagttacctgattattgcacattataaaattgtttttctaatactttatagggcccaacttcagaaaatacttcgcttttttctttttatgctttcgtttgtttaccagcaagcaacttccctggggaagccaaacacatattcataaaaaaaatcaagtagctgatgtgcagttgagaaaactagaggactgaaaaaacaaattttaactagcaaatgctgtgaattactcttcctccccttctctgaaatgggtaaaggacaaattgtgtaaaaaaacctatgcactatagaagggaatagtaaccatttcttttgtctctctgtttctgttctgactgagaacctgcagccatttcttgttacatgaaaacaaaatgctacttgttacctctattttttgttactatacaattatgaaatgtaatgtaagacaccaacagaaatgatatacctgtaactgtacctatcaggactatacctcatttacagtcagaaagcttactgggatgtcaggaaatgatacagggttggttctcatttcgtgccgaaatgagacagaaattcagtgacgaaggtgcgttgtaggggtattgatgtgccccaggtagtgccagcagagtagggaaaactgcatttgcataaaaactactcttgacatgattgttcattttacaaaaaaattccattaattaccaagccctcacccagcccatgtgtgataggatttatgtaggaagaaacttgattttcaaataattttttaaatgtatctcttgcctaaaggactatatacatctaataaagtaacactgtgtcatcttctggagttatcaaaaattgtatacaatcaagacaacacaagaattattttatttttgagtgcaaatacaggtactgttggagttgatgggcaccatgctttctcatgaagtagcatttccctaccatcaagccattgttttgtgccattcaggagaggaaaaaaaggaatttatgctgtacatttcagttcagtgtatgaccaaaagcaatatgtttataagaagatgtttgacatactaattattttatatcatttaaaccatactgtagcaacataatatatggagctaatttgtagaattatttttacgatttccaaacaaatgtactgtactgttatataatttattgtgaggaccttctcatggaagccattaggaaaacaaactagaggtaaatatcacattaatctgtattatcaatttctcatagacactgtgctaatgtgaattttaaatgacctgcatcaagtcttctgatctcagataactcagtacagatagcaattagtcagctgatttgattacaatggagtaaccgacaatatatttatttataaagcacatattcataataacgagaagaattcagaaaaccacttaagcaagacccttctgaaataaaaaatgttgctttttaaatagtttgtcctaaggtgtttaaaacatgtcaaccttatgtaaggaaaaatttcctggtccaaataaagttgaagtttaagaaaaattg

SEQ ID NO: 566 - protein, 632 aa, Homo sapiens; identical to SEQ ID NO: 564

SEQ ID NO: 567 - DNA, 886 bp, Homo sapiens
gcgagttattggcaagttcccctgcagttgtttgggctgtcgctgtggctggttctgcggtgtgcggccagccatggagcgctctgggcccagcgaagtgacaggctcagacgcatcgggaccggacccgcagcttgtggtcaccatgggcttcacggggttcggggttcggtaaaaaagctcacacatttgacttggaagcaatgtttgaacaaactcaaagaacagctgtggaaagaagtcacaaaacactggggctggtgaattaccagatctccatcaagtgcagtaaccagttcaagttggaagtgtgtcttttgaatgcagaaaacaaagtcgtggacaaccaggctgggacccagggccagctgaaggtgctgggtgccaacctctggtggccgtacctgatgcacgaacaccccgcctacctgtactcgtgggaggatggtgattgctcacaccaaagccttggacccctcccagcctgtgacctttgtgaccaacgtcacctatgcagcagacaagggggctctgtatgtggatgtgatccgtgtgaacagctactactcttggtatcgcaactacgggcacctggagttgattcagctgcagctggccacccagtttgagaattggtgtaagacatcacaatcccattattcagagcgcgtatggagtggaaacgcttgtagggtttcaccaggatccacctctgatgttcagtgaagagtaccagaaaagtctgctagagcagtaccatctgggtctggatcaaaaacgcagaaaatacgtggttggagagctcatctggaattttgccgatttcatgactaaccagtttctgcaggctggaaatccaagatgaagtcacctgtagttcagtgtc

SEQ ID NO: 568 - protein, 141 aa, Homo sapiens
MFEQTQRTAVERSHKTLGLVNYQISIKCSNQFKLEVCLLNAENKVVDNQAGTQGQLKVLGANLWWPYLMHEHPAYLYSWEDGDCSHQSLGPLPACDLCDQRHLCSRQGGSVCGCDPCEQLLLLVSQLRAPGVDSAAAGHPV

SEQ ID NO: 569 - DNA, 1679 bp, Homo sapiens
gcgagttattggcaagttcccctgcagttgtttgggctgtcgctgtggctggttctgcggtgtgcggccagccatggagcgctctgggcccagcgaagtgacaggctcagacgcatcgggaccggacccgcagcttgtggtcaccatgggcttcacggggttcggggttcggtaaaaaagctcacacatttgacttggaagcaatgtttgaacaaactcaaagaacagctgtggaaagaagtcacaaaacactgggccaccaggaacacacctgtagcccagcaaagttgaggccatcgactggctcatcacaacaaggaaggctgtgcaccactgggacccagcagcagctcagcagcagcagtgagagggccttgggaaagacttggagggtttggcttatacaagaccagattacagaggggtattgatttgccttgcccccgcccccaccatcacagtgtgtccctgtccagtgttggtgctgtgtggcattgcttgtgtccataggagtccatcaaggcagagcggcagagcggcaagcagagcggcaaggcagttcaacccaatggaaatggattgaaagagtgaaagtcactggtctcaaagaatctacggaatttagcattttgaaaatcacagagcaattttgggtaggtattcacatgcactaaaaaaccaggcaaacatctgactcccaggataaagtgactgagagcagtagaagacttgttgagccttaaggaataagaggaaaattatgttatgaagtgcaggaacagcacagacccagacgaggggatgcagcccggagccagtaacccggcgcctcctcctccccagggcgcagcgctggctgctccccggataccgtgatcacacgtcccaggtcctgagagcgcctcataggtagacagttctttgggacttttgggacgcagcacttgaagagaggtttacctaaactttcctcctgggagcctgtcatcatttgaaagtaacagaagaaagctgtcaggctgaggaaagtttcaacaggcacttggtgagaatgggaagcatccattcattgggaaatcacggggacagaggaggaattcacgggatcagagcactgagaaactccagaggcttctggttcaccgccctgattccacagatgtgggtcagaggcagagatggaagttggaatggacaagcctgccctctcctcagctctccatggctctgtcctcaggctgtttctgcaatttgacatgaggcctggccccagggaaaccagtggggcctcatctcctccctgtgctgctctgaggtggagccttctcagggtcagtccagctctggagcccctctccagctcggtcaccaaagctgtctggtcccagggcagtgtggagtgacaggcacgccagccaatccaatcggccatttcatacccaatgcatgtgactgataaagagataacaccctgtctccaagacacaggctttacataaacagctttaatgacttcttcacttagggacaagactccttagtggtggaacctcaggcatccatgcaggatgtaagaaagctcccgtatatacatgaactgagaagtgtgtagaagagtaaatactgtaataggtaataaaatgtatgtatttttatttaaaaaaaaaaaaaaaaaaaaa

SEQ ID NO: 570 - protein, 33 aa, Homo sapiens
MERSGPSEVTGSDASGPDPQLVVTMGFTGFGVR

SEQ ID NO: 571 - DNA, 1526 bp, Homo sapiens
gcgagttattggcaagttcccctgcagttgtttgggctgtcgctgtggctggttctgcggtgtgcggccagccatggagcgctctgggcccagcgaagtgacaggctcagacgcatcgggaccggacccgcagcttgtggtcaccatgggcttcacggggttcggggttcggtaaaaaagctcacacatttgacttggaagcaatgtttgaacaaactcaaagaacagctgtggaaagaagtcacaaaacactggaccagattacagaggggtattgatttgccttgcccccgcccccaccatcacagtgtgtccctgtccagtgttggtgctgtgtggcattgcttgtgtccataggagtccatcaaggcagagcggcagagcggcaagcagagcggcaaggcagttcaacccaatggaaatggattgaaagagtgaaagtcactggtctcaaagaatctacggaatttagcattttgaaaatcacagagcaattttgggtaggtattcacatgcactaaaaaaccaggcaaacatctgactcccaggataaagtgactgagagcagtagaagacttgttgagccttaaggaataagaggaaaattatgttatgaagtgcaggaacagcacagacccagacgaggggatgcagcccggagccagtaacccggcgcctcctcctccccagggcgcagcgctggctgctccccggataccgtgatcacacgtcccaggtcctgagagcgcctcataggtagacagttctttgggacttttgggacgcagcacttgaagagaggtttacctaaactttcctcctgggagcctgtcatcatttgaaagtaacagaagaaagctgtcaggctgaggaaagtttcaacaggcacttggtgagaatgggaagcatccattcattgggaaatcacggggacagaggaggaattcacgggatcagagcactgagaaactccagaggcttctggttcaccgccctgattccacagatgtgggtcagaggcagagatggaagttggaatggacaagcctgccctctcctcagctctccatggctctgtcctcaggctgtttctgcaatttgacatgaggcctggccccagggaaaccagtggggcctcatctcctccctgtgctgctctgaggtggagccttctcagggtcagtccagctctggagcccctctccagctcggtcaccaaagctgtctggtcccagggcagtgtggagtgacaggcacgccagccaatccaatcggccatttcatacccaatgcatgtgactgataaagagataacaccctgtctccaagacacaggctttacataaacagctttaatgacttcttcacttagggacaagactccttagtggtggaacctcaggcatccatgcaggatgtaagaaagctcccgtatatacatgaactgagaagtgtgtagaagagtaaatactgtaataggtaataaaatgtatgtatttttatttaaaaaaaaaaaaaaaaaaaaa

SEQ ID NO: 572 - protein, 33 aa, Homo sapiens; identical to SEQ ID NO: 570

SEQ ID NO: 573 - DNA, 879 bp, Homo sapiens
gcgagttattggcaagttcccctgcagttgtttgggctgtcgctgtggctggttctgcggtgtgcggccagccatggagcgctctgggcccagcgaagtgacaggctcagacgcatcgggaccggacccgcagcttgtggtcaccatgggcttcacggggttcggtaaaaaagctcacacatttgacttggaagcaatgtttgaacaaactcaaagaacagctgtggaaagaagtcacaaaacactggggctggtgaattaccagatctccatcaagtgcagtaaccagttcaagttggaagtgtgtcttttgaatgcagaaaacaaagtcgtggacaaccaggctgggacccagggccagctgaaggtgctgggtgccaacctctggtggccgtacctgatgcacgaacaccccgcctacctgtactcgtgggaggatggtgattgctcacaccaaagccttggacccctcccagcctgtgacctttgtgaccaacgtcacctatgcagcagacaagggggctctgtatgtggatgtgatccgtgtgaacagctactactcttggtatcgcaactacgggcacctggagttgattcagctgcagctggccacccagtttgagaattggtgtaagacatcacaatcccattattcagagcgcgtatggagtggaaacgcttgtagggtttcaccaggatccacctctgatgttcagtgaagagtaccagaaaagtctgctagagcagtaccatctgggtctggatcaaaaacgcagaaaatacgtggttggagagctcatctggaattttgccgatttcatgactaaccagtttctgcaggctggaaatccaagatgaagtcacctgtagttcagtgtc

SEQ ID NO: 574 - protein, 182 aa, Homo sapiens
MERSGPSEVTGSDASGPDPQLVVTMGFTGFGKKAHTFDLEAMFEQTQRTAVERSHKTLGLVNYQISIKCSNQFKLEVCLLNAENKVVDNQAGTQGQLKVLGANLWWPYLMHEHPAYLYSWEDGDCSHQSLGPLPACDLCDQRHLCSRQGGSVCGCDPCEQLLLLVSQLRAPGVDSAAAGHPV

SEQ ID NO: 575 - DNA, 1142 bp, Homo sapiens
atgtctcctacaaagaatgcaaaagcgagtcttattcaccacttggcacatggatccatccatgatgtaggtgcacaacaaactttggatggcagcaattgccaaaataaatatggtcctctggtgtatagtgataatgaaaatctgttttgtgagtgtccaaggctgtattcaggcaagctgtgccagtttgcaagttgtgaaaacaacccatgtggaaatggtgccacctgtgttccaaaatccggaacagatattgtctgcctctgcccatatgggaggtctggacccctctgcactgatgctattaatattactcagccaaggttcagtggcacagatgcctttggatacacctcattcctggcttattcacggatctcagacatcagcttccattatgaattccacctgaagtttcagctggcaaacaaccactcagcactgcaaaataacttgatattttttactggacagaaaggccatgggttgaatggcgatgacttcctggctgtgggcctgctcaatggcagtgtggtttatagttataacctggggtctggcatagcaagcatcaggagcgagcccctcaatctgagccttggagtccacactgttcatctgggcaagttcttccaagagggctggctgaaggtagatgatcataaaaataaatccattatcgccccaggaagactggttggtctcaatgtcttcagtcagttttatgtaggtggctacagtgaatacactccagatctcttaccaaatggagcagattttaaaaatggttttcaagttcaaaaggcaagagacagactgcagtcaacccatccataccaccaaggggtagcccacagaggccagagcaagccaagaggattaaggacaacattgtgcttggaaacattaagattgcacactcctggaagtatgtcaactgccacagtctttatctcgctgtgtcatcaaggctggagtacagtggtgccatctcagctcactgcaaccttcatctccagggctcaatcaatcctcccaccttagcctctcatgtagctgagccactaaacccagctaacatatccttacaaagctgatttatattgtagtagagttataaaataaagacatgctttaaa

SEQ ID NO: 576 - protein, 348 aa, Homo sapiens
MSPTKNAKASLIHHLAHGSIHDVGAQQTLDGSNCQNKYGPLVYSDNENLFCECPRLYSGKLCQFASCENNPCGNGATCVPKSGTDIVCLCPYGRSGPLCTDAINITQPRFSGTDAFGYTSFLAYSRISDISFHYEFHLKFQLANNHSALQNNLIFFTGQKGHGLNGDDFLAVGLLNGSVVYSYNLGSGIASIRSEPLNLSLGVHTVHLGKFFQEGWLKVDDHKNKSIIAPGRLVGLNVFSQFYVGGYSEYTPDLLPNGADFKNGFQVQKARDRLQSTHPYHQGVAHRGQSKPRGLRTTLCLETLRLHTPGSMSTATVFISLCHQGWSTVVPSQLTATFISRAQSILPP

SEQ ID NO: 577 - DNA, 4460 bp, Homo sapiens
agttgcggtgcattgtgggttctcctggagctgtggagttgatcctgaatgaaagtggcgcgccgcccctgacgttacccggatcggagaggttggaattcagattacggctgcgattcgggtgtctcggaccccggtgtgcaccggaccacggggaggcggctccaaaggcgcggtgaacgttggtgagggagggcagctctgcgcagccccaagacatggctcacaacaagatcccgccgcggtggctgaactgtccccggcgcggccagccggtggcaggaagattcttacctctgaagacaatgttaggaccaagatatgatagtcaagttgctgaagaaaatcggttccatcccagcatgctctcaaattacctaaagagcctaaaggttaaaatgggcttgttggtggacctgacaaatacttcaaggttctatgaccgaaatgacatagaaaaagaaggaatcaaatatataaaacttcagtgtaaaggacatggtgagtgccctaccactgagaatactgagacctttattcgtctgtgtgagcggtttaatgaaagaaatccacctgaacttataggtgttcattgtactcatggcttcaatcgcactggtttcctcatatgtgcctttttggtggagaaaatggattggagtatcgaagcagcagttgctacttttgcccaagccagaccaccaggaatctacaagggtgattatttgaaggaactttttcgtcggtatggtgacatagaggaagcaccacccccacctctattgccagattggtgttttgaggatgatgaagacgaagatgaggatgaggatggaaagaaggaatcagaaaccgggtcaagtgcttcttttggcaaaaggagaaaagaacggttaaaactgggcgctattttcttggaaggtgttactgttaaaggtgtaactcaagtaacaacacaaccaaagttaggagaggtacagcagaagtgtcatcaattctgtggctgggaagggtctggattccctggagcacagcctgtttccatggacaagcaaaatattaaacttttagacctgaagccatacaaagtaagctggaaagcagatggtactcggtacatgatgttgattgatggcacaaatgaagtttttatgattgatagagacaattcagtatttcatgtttcaaatctggaatttccatttcgtaaagatcttcgtatgcatttatcaaatactctcttggatggcgagatgattattgacagagtaaatggacaggctgttcctagatatttgatatatgacataattaaattcaattcacagcccgttggagattgtgattttaatgttcgtctgcagtgtatagaacgagaaattataagtcctcgacacgaaaaaatgaagactgggctcattgacaaaacacaggaaccatttagcgtcagaaataagccgttttttgacatctgtacttcaagaaagctacttgaaggaaattttgccaaagaagtgagccatgaaatggatggacttatttttcagcctactggaaaatacaaacctggtcgatgtgatgatattttgaaatggaagcctcccagtctgaattctgtggattttcgtctaaaaataacaagaatgggaggagaagggttacttcctcagaatgttggcctcctgtatgttggaggttatgaaagaccctttgcacaaatcaaggtgacaaaagagctgaaacagtatgacaacaaaattatagaatgcaaatttgagaacaacagctgggtcttcatgagacagagaacagacaaaagttttcctaatgcctacaacactgccatggctgtgtgtaacagcatctcaaaccctgtcaccaaggagatgctgtttgagttcatcgacagatgtactgcagcttctcaaggacagaagcgaaaacatcatctggaccctgacacggagctcatgccaccaccacctcccaaaagaccacgccctttaacctaagacctgcctgtgacttgagggttaagaagaaagaggaatgaggaaaaaacgctgttgcccatttttgtagccagagaaattgaaaaacgactgtggcttgatgttgatacacatttgaattttttttaaaaaaagaaagttatcgtagccagcctgtaaatacttgatgcattcgtttcctcagtgctgcaatacatcgtggacttaaacatcttatttatctgataaactcagccttaccttgtggaatctgaagattgaaatatccaaaggtttaaacaagatggaaatcaatgaaaaagaggccttgtttatatatgggtagcttcacatttaatttataaagttaacaatctggaaactgtgagcccataaaacagtattttttagaagttgtgttacaactgtagcaaattttccttttaaaaaatccaggcaatggcattaaacattcttgctatcatttaccatggatttcctacatttctgagatccctgtattcaaaaacaaatgacagggttgttaagttgtactatattaaacaacttggtctggtttatatcattttaacaagttttttggaaatgtaaaagaaaaaagtaaagctccatttttgtgaattgcattgtttctaaaggaagtattttgagtattttcatctgtttgtattgtttcgactatgatatcagatatccagtgtgtccattctggcagtggttttgagttacttcatggaacttggacatacaccaccaggtcctttatgtgttgttctcctgggagacttctttttttaaatgccagggctacttctgctttacctcagtggtatcagcacattgtaaattacgttaaaacacacaactcactgtgatctatgggagtgatatcaaatacaaacgatgttgtgttccttctctcgaacaaaacagcaaagggaatgccagctaacttctttgattagaaggtaatgtcatggaatagaatgctgtcaccagaaaatgctctcccactgctagataaatgcagaggcaaagtgtagacatctgtaggaactaaatatcaaggaaatcaagacatttattttcaaagcgagaattctatctacattctattctgcggatgttatttctgttatacatctgaattttaaaatgtttactgatagataatggatttaaagggcggctaattgattgtctgccattgttgataaactgttctaattggtttgtgaaagaactctgagaattagctaaatggaggctagtgtatttatttttagaggtacatgttttaagtaaatgtatttaaaacaaattttcatggtctgaattgtatatgtaaatgcatatctgtgtaagtatatgcaagtgtatattcttctactgattcagtcagacacgaaatccaactgaattacccggtagactgaatatctgacgggatttctatatggacatagcacagatgaaccaaaaatgtatttatattcacctgagttttaatgtttttaaacaaagttttctcctgcagtgcttttctatatgaaatagttgagtcaagcttgggcttttttcttcgttgttcccaagtcatgtaatgtatagtgaatttatccaaaacgccattgtaacgttttttactagagtgtttttgcacatttgggcgctaaagggattaaaacaactgatgccacaatgactattgaaggagggaaaattctcaaggttccatagtatcttttacaaaatggattaaaaaaaaaatgcctatgcaacttcaaatagtctgatgcctgcttccccaggacgagtgactcttccacggtgtgctgctttccctccgagcctgtggaaaggcagagcccttttgcagatacgaaagcaagcttttgccaatgatctttaatggagttaaaatgtttatggtaattgtaacctttcaaatgagttacgtgaaaagagcatctcacttttaatacacccagatattttcttcaagtctttgtgcattttagcaggacttaattttcttaatttattctttcctttcaattatagtgacatagagtagttggccttataagtagatcccatttagcccctgaacataataccatctgcagtattataaaagtcatttagaaggtcagggggataatctagaggcaggattttggacattgtgaaggaaatgtgctccttctcagctcacttcaataactattttctgagactgaagttttttagacaagaataagaaaactttgctttcttcagttatcacatgtgaaagcttttgctttttgttaggaaaaggtgtggatgactctactgcgtggatggttacatttgctttccgtgaaatgctcagaaaatgtcaggacattccttttccaattgtgtgtcagtgcgtattgtaataaaactactgatttaaattag

SEQ ID NO: 578 - protein, 597 aa, Homo sapiens
MAHNKIPPRWLNCPRRGQPVAGRFLPLKTMLGPRYDSQVAEENRFHPSMLSNYLKSLKVKMGLLVDLTNTSRFYDRNDIEKEGIKYIKLQCKGHGECPTTENTETFIRLCERFNERNPPELIGVHCTHGFNRTGFLICAFLVEKMDWSIEAAVATFAQARPPGIYKGDYLKELFRRYGDIEEAPPPPLLPDWCFEDDEDEDEDEDGKKESETGSSASFGKRRKERLKLGAIFLEGVTVKGVTQVTTQPKLGEVQQKCHQFCGWEGSGFPGAQPVSMDKQNIKLLDLKPYKVSWKADGTRYMMLIDGTNEVFMIDRDNSVFHVSNLEFPFRKDLRMHLSNTLLDGEMIIDRVNGQAVPRYLIYDIIKFNSQPVGDCDFNVRLQCIEREIISPRHEKMKTGLIDKTQEPFSVRNKPFFDICTSRKLLEGNFAKEVSHEMDGLIFQPTGKYKPGRCDDILKWKPPSLNSVDFRLKITRMGGEGLLPQNVGLLYVGGYERPFAQIKVTKELKQYDNKIIECKFENNSWVFMRQRTDKSFPNAYNTAMAVCNSISNPVTKEMLFEFIDRCTAASQGQKRKHHLDPDTELMPPPPPKRPRPLT

SEQ ID NO: 579 - DNA, 3995 bp, Homo sapiens
cgaattttcaaagaacatattttccgttcacccccgctggtcttttactgccatcaatacactgttcttggtgcaaatacttcagcctctttattcaaagtatgttttatgtttttgccaaatatgatctctaattgaaagtttatttttggttttggatgaatctgcggagcttaagttgtgagaagaaagggggaacaagacacaatgaaagaaaagtccaaaaatgctgcgcggactaggagggagaaggaaaacagtgaattttatgaactggctaaattactgcctttgccctcggctatcacctcgcagctggacaaagcatccataatcagactcacgaccagctatctcaaaatgagagtggtgttcccagaagggctcggcgaggcgtggggccactcaagtcggaccagccccctggacaacgttggccgagaactgggctcccatctgctccagaccctggatggcttcatcttcgtggtagccccagatgggaagatcatgtacatctcagagacagcctcagtccacttgggtctttctcaggtagagctgaccggaaacagcatttatgaatacattcacccggcagaccacgacgagatgacggcggtgctcaccgcccatcaaccctaccactctcacttcgtgcaggagtatgagatcgagcgctccttcttcctgaggatgaagtgcgtcttggccaagcgtaacgccggcctcacctgtggcggctacaaggtcatccactgcagcggctacttgaagatccgccagtacagcctggacatgtcccccttcgacggctgctaccaaaacgtgggcctggtggccgtgggccactcgctgcctcccagcgccgtcacggagatcaagctacacagcaatatgtttatgttccgcgccagcctggacatgaagctcatctttctggactccagggtggcggagctgacggggtacgaacctcaggacctgattgagaagactctgtaccaccatgtgcacggctgcgacaccttccacctgcgctgcgcgcaccatttgctgctggtgaagggacaggtgaccaccaagtactacaggttcctggcgaaacacggcggctgggtatgggtgcagagctacgcgaccatcgtgcacaacagtcgctcctccaggccacactgtatcgtcagcgtcaactatgtcctcacagacacagaatacaaagggctgcagctctccctggatcagatctcagcctccaaaccagccttctcctataccagcagctccacccccaccatgactgacaacagaaagggggccaaatcccggctctccagctcaaagtcaaaatccaggacttccccataccctcagtattcgggatttcacacagaaagatcggaatctgatcatgacagccagtggggcggaagtcccttgaccgacacggcctctccgcagcttctggaccccgccgataggcctggctcccagcacgacgcatcgtgcgcctacagacagttttcggaccgcagctctctctgctatggctttgcgcttgaccactcgaggctggtggaagagaggcatttccatacccaggcctgtgaaggaggccgatgtgaggcaggcaggtacttcctgggaacgccgcaggccgggagggagccctggtggggctctcgcgcagccttgcccctgacaaaggcctccccagaaagcagagaagcctatgaaaacagcatgcctcacatcgcttcagtccacaggatccatgggcgaggtcattgggatgaagatagtgtggtcagttctccagaccctgggtcggccagtgaatcaggtgaccgatatcgtactgagcagtatcaaagtagcccacatgaacccagcaaaattgaaactcttataagagccactcagcaaatgattaaagaagaagagaacagattacagctaaggaaagccccctcagaccaactggcttccattaatggggctgggaaaaaacactccctgtgttttgcaaactaccaacagcccccaccaacaggtgaagtctgccatggctctgctcttgccaacacttcaccatgtgaccatatccagcagagagagggaaaaatgttgagcccccatgaaaatgactatgacaacagtcccaccgcactatctcggataagtagtcccaattcggatcgcatttcaaaatccagtttgatcctagctaaagactatctgcattcggatatatctcctcatcagacagcaggagaccaccctactgtctctccaaactgctttggctctcaccggcagtattttgacaagcatgcttacacattaactggatatgccctggagcacttatatgacagcgaaaccattagaaactattccttgggctgtaatggctcacactttgatgtaacttcccatctgaggatgcaaccagacccagcacaaggacacaagggaacatctgttataataaccaacggaagctgatgttttgctgaaatattttgttctttaaggatctctgaaacatatttatagtttaataccccattaccagcatttactatgccacagattgttagagagtataacttaagttactgggtatttgatacgtgttcctataaaatcaaagaaaacatagcactagcattcagggttatacacagaaaagggagctaaattgaatacacaaatttcccctctaattatatgggaaccagaatagataaattttgacttgaaaaatattcatgtagatcaagtgtgcatatatactacatgagaggactgatgaatgacaacattgcattgtgactatccagtgatcctcaaacacacaaactattacttacaaactgcggtatacattttacatatggaaatataggctatgtaatgtaaatacatcaaaaatgggtaattttctttgactctgtcacactaaacttcttaacgaaatttccattcccaaaataactgagaaagagagagatacatcttataaactgacttctttgtggtttcaaatcagccagctcatttggttcaggcataaattagagaaatggttctggatatggtgcaaaaatgagttttcacctggtatccattataaacaatcaggaagaggtaatttttcaccttgcttttcagttagacaaggaccaggattgcactgacatggcgctgagggtttttctaagtaagaacactgagatattgggacacacatcaaaaacctggagtgctcaattggaagtagttctatgaatatggaaaggccagaggcagagtgaaataaaatgctatctcaaagtttaacacaatttaagggctcagcataagtaaacaacatatttggggtttgcttgtaaaaccaactaaataaaaaattcaaaccaattcacccagaaaaaagaccaataggtgcaaaaataaaaggaaaaccagtgaagtgccacatgacagcagtgttaagtgtttgaaaacgtttcaaagcacatatgtgccaatgtgacaacatgtggaaagcctcaggagagagtctaagataaaagcttaggctgatagacaagtagttaagagctaagagcagtactctgaaggaataggcaaaatgtttattttccttattgtttgtaaacaacaaacttggtcttacatctgtgtggtatagtagaaaggccagctgactagatctctggattctaattttggccctacctgtaacttaattttgtgaccacagttgtaccattcaccgtgcctgggctctagtttcctggtttgtaaggcagccccagcgttcatgttctgtgatagagcagaactgaacttattacctaattaactctctgctatgagttgtcaagactgatcattctgttttttctgtacacagaagtttagatgctttgtgacttaagcaggtgtgtgggctcctttaggcaggttacagttaactttctaga

SEQ ID NO: 580 - protein, 766 aa, Homo sapiens
MKEKSKNAARTRREKENSEFYELAKLLPLPSAITSQLDKASIIRLTTSYLKMRVVFPEGLGEAWGHSSRTSPLDNVGRELGSHLLQTLDGFIFVVAPDGKIMYISETASVHLGLSQVELTGNSIYEYIHPADHDEMTAVLTAHQPYHSHFVQEYEIERSFFLRMKCVLAKRNAGLTCGGYKVIHCSGYLKIRQYSLDMSPFDGCYQNVGLVAVGHSLPPSAVTEIKLHSNMFMFRASLDMKLIFLDSRVAELTGYEPQDLIEKTLYHHVHGCDTFHLRCAHHLLLVKGQVTTKYYRFLAKHGGWVWVQSYATIVHNSRSSRPHCIVSVNYVLTDTEYKGLQLSLDQISASKPAFSYTSSSTPTMTDNRKGAKSRLSSSKSKSRTSPYPQYSGFHTERSESDHDSQWGGSPLTDTASPQLLDPADRPGSQHDASCAYRQFSDRSSLCYGFALDHSRLVEERHFHTQACEGGRCEAGRYFLGTPQAGREPWWGSRAALPLTKASPESREAYENSMPHIASVHRIHGRGHWDEDSVVSSPDPGSASESGDRYRTEQYQSSPHEPSKIETLIRATQQMIKEEENRLQLRKAPSDQLASINGAGKKHSLCFANYQQPPPTGEVCHGSALANTSPCDHIQQREGKMLSPHENDYDNSPTALSRISSPNSDRISKSSLILAKDYLHSDISPHQTAGDHPTVSPNCFGSHRQYFDKHAYTLTGYALEHLYDSETIRNYSLGCNGSHFDVTSHLRMQPDPAQGHKGTSVIITNGS

SEQ ID NO: 581 - DNA, 7598 bp, Homo sapiens
gtaggccggcgccagctccactctgtccctcctcgccgggtctgtgcgtctttgcgtctgtctgtctgactgatggtcctcacacgcggttccctgtgactgggcgcgaccccggcaagcgcggcttggagggcggacggggcgcggcgatacagctgcccgctcgcatctttggccctgcgctcagctcctcacccggcgtgggaagttaaagtaaaaccgaaagggaagaaggcgcggtggcaggagctgacagagtgatgggaaacgcgtgagccaggccgagagtttcaggtttcttgctgtatggatcactgattgaataatagatggctttacctcgtctcacaggagccttgcgttccttttcaaatgtcaccaagcaagataattataatgaagaagtggctgacttaaagataaagcgatctaaacttcatgaacaagttttagatttgggcctgacatggaagaagataataaaatttttgaatgaaaaactggagaagagtaaaatgcaaagtataaatgaagacttaaaagatatattacatgctgcaaagcagatagttggaactgataatgggagagaagcaattgaaagtggggctgcatttctcttcatgacatttcacttgaaggactctgttggtcacaaggaaacaaaggctatcaaacagatgtttggcccctttccttcatcatctgccactgcagcttgtaatgctactaatcgaattatttctcattttagtcaagatgatcttactgctcttgtgcagatgacagaaaaagaacatggcgatagggttttttttggtaaaaatttagcattttcatttgacatgcatgatttggaccactttgacgaactgccaataaatggtgaaactcagaaaactataagcctagattataagaagtttctgaatgaacatctccaggaggcttgcaccccagaactcaagcctgtggaaaaaacaaatggctcctttttgtggtgtgaagttgaaaagtacctaaattcaactttgaaggaaatgactgaagtgccaagagtagaagatctttgctgtactttatatgatatgcttgcttctattaaaagtggtgatgaacttcaggatgagctatttgaactgctgggacctgaaggacttgaacttattgagaaactcctccagaacagaattacaattgtggatagatttcttaattcttcaaatgatcataggtttcaggctcttcaagacaattgtaaaaaaattttaggagaaaatgctaaacccaattatggttgtcaagtcactattcagtctgaacaagaaaagcagttaatgaaacaatatcgacgtgaagaaaaaagaattgccagacgagaaaaaaaggctggagaagatttagaagtttcagaaggacttatgtgctttgatcctaaggaattgcggatacaaagagaacaggcacttctgaatgctagaagtgttccaattctgagcaggcagagagatgcagacgttgaaaaaatacattatccccatgtgtatgattcccaggctgaagccatgaaaacatcagcatttattgctggtgcaaagatgattttgccagaaggaatccaaagagagaataacaagctttatgaagaagtaaggattccctacagcgaaccaatgccactcagctttgaggaaaagccagtttatatccaagacttagatgagatcggacagctggcttttaaaggaatgaagagactcaatagaatccagtcaatagtgtttgagactgcctacaacaccaatgagaacatgctgatttgtgcccctacaggagctggaaaaaccaacattgcaatgctgacagtcttgcatgaaattcgccaacattttcaacaaggtgttatcaaaaagaatgaatttaagattgtatatgttgctccaatgaaagccttggcagctgaaatgacagattacttcagcagacgtctagagccactaggcatcattgtgaaagaattgactggtgacatgcagttgtccaaaagtgaaattttacgaactcagatgcttgtgaccacaccagaaaaatgggatgtagtgacaagaaagagtgttggggatgtagctctttcccagattgtaaggctccttattcttgatgaagttcatttgctgcatgaagatagaggaccagtattagaaagcatagttgcccgtactttacggcaggtggaatccacacagagtatgataaggattctcggactgtctgcaactttacctaactacctcgatgttgccacatttttacatgttaatccatacattggacttttcttctttgatggccgttttcgaccagtacctcttggacagacatttttggggattaaatgtgcaaataagatgcagcagttgaataacatggatgaagtatgttatgaaaatgttttgaagcaagtaaaggctggacaccaggtgatggtgtttgtacatgctcgaaatgccactgtaagaacagctatgtctctaatagaaagagcaaaaaattgtggccatattcccttcttttttcctacccaaggacatgactatgtacttgcagaaaaacaggtacaaaggtcgagaaataagcaagtacgagaattattcccagatggttttagtattcatcatgcaggaatgcttcggcaggacagaaatttagttgaaaacttgttttctaatgggcatatcaaagtcctagtgtgtacagctacgttagcctggggtgtcaatcttcccgcccatgctgttattattaagggaacacaaatatatgctgcaaaaagaggctcctttgttgaccttggaattttagatgtcatgcagatatttggtcgagctggacgaccacaatttgacaaatttggggaaggaataattataacaacgcatgataaactcagccattacctcactttgctcactcaacgaaacccaattgagagtcagtttctggaaagccttgcagataacctaaatgcagagattgctctgggaacagttactaatgtggaagaagcagtgaagtggataagttacacttatctttatgtacggatgagagcaaatccattagcatatggcatcagtcacaaggcttatcagattgacccaacattaagaaagcatcgagaacagttggtcattgaagttggacgaaaactagacaaagctcagatgattcgttttgaggagcgaactggatatttttcctcaactgatttgggtagaactgccagccattactatattaaatacaacaccattgagacctttaatgaactctttgatgctcacaaaacagaaggtgatatctttgccatagtctccaaagctgaagaatttgatcaaattaaggtcagagaagaggaaatagaggagttagataccttattaagcaatttttgtgaactctccactcctggaggtgtagagaatagttatgggaaaataaacatcttacttcaaacttatatcagccgaggagaaatggacagtttctcccttatatcagattctgcatatgttgcacagaatgcagctagaattgtccgtgctctttttgaaattgctctgaggaaacgttggcctaccatgacctacaggctcctgaatcttagtaaagtcattgacaagaggctttggggttgggctagccctttgagacaattttcaatcctaccaccacacatcctaacaagattagaagaaaaaaagcttactgtggataagctgaaagacatgaggaaagatgaaataggtcacattttacatcatgtgaatattggactgaaggtcaaacaatgtgttcatcagattccttctgttatgatggaagcatccattcagcctatcacaaggactgtcctccgagtgacactcagcatctatgctgatttcacttggaatgatcaggtacatgggacagtaggagaaccttggtggatttgggtagaagatcctacaaatgatcatatttatcattcagagtattttctagctctaaaaaaacaagtcattagtaaagaagcccaactactggtatttacaatccctatttttgagcctttgccttcccaatactacatccgagcagtgtctgatagatggttgggtgctgaggcagtatgtattatcaactttcaacatctaattctaccagagagacatcctcctcatacagaattactggatcttcagcctttaccaatcacagctttgggatgtaaagcatatgaagccctgtacaacttcagccactttaaccctgtacagacacaaatatttcatacattgtatcacacggattgtaatgtcctacttggagcacctactggatcgggaaagactgttgcagctgaattagccattttcagagtcttcaacaaataccctacttcaaaggcggtatatattgcacccctaaaagccctagtacgtgaaagaatggatgattggaaagttagaatagaagaaaaacttggtaaaaaagttattgaactaacaggggatgtgactcctgatatgaaatccattgccaaggctgaccttatcgtcactacgccagagaagtgggatggagtcagcagaagctggcaaaataggaactatgttcagcaagtcactattctcatcatagatgagatccatctgcttggggaggaaagaggccctgttctagaggtcattgtatctcgaacaaattttatctcatcacacacagaaaagcctgttagaatagttggactatctactgcattagctaatgccagagaccttgctgattggctcaatattaagcagatgggcttgtttaacttccgaccatcagtacgcccagttccactggaagttcacattcaaggctttccaggtcaacattactgtcctcgtatggctagtatgaacaagcctgcatttcaggcaattagaagccattctccagccaaacctgttttgatatttgtctcatcaagacgtcaaactcgtcttactgctttggaattgatcgccttcctggctactgaagaagatccaaagcagtggttaaacatggatgaaagagagatggagaacatcattgcaacagtaagagattccaacctcaagctgacccttgctttcgggataggaatgcatcatgctggactacatgagagggaccgaaaaacagtagaggaactatttgtaaactgtaaagttcaggttcttattgctacaagcacattagcctggggtgtaaactttccagctcatttagtaattattaagggaacagaatactatgatggaaaaacaagacgttatgtggattttcccattacagatgtcctccagatgatggggcgtgctgggaggccgcagttcgatgaccaaggcaaagctgtaattctagttcatgacataaagaaagacttttataaaaaatttctttatgaacctttcccagtagaatcaagtttattaggagtgctctctgaccacttaaatgcagagattgctggtggtacaattacatctaagcaagatgcattggattatatcacctggacttactttttccgacgtcttatcatgaatcccagctattacaatttgggtgatgtgagccatgattctgtgaacaagtttctgtcccatctgattgagaagtccctgattgaattggaactttcctactgtattgaaattggagaggataatcgcagcattgaacctctaacttatggccgaattgcctcctattactatttgaagcatcaaacagttaaaatgttcaaggaccgcttgaagcctgaatgcagtactgaagaactgctttcaattctaagtgatgcagaagaatatacagatttgccagtgagacacaatgaagatcatatgaatagtgaactggcaaaatgtcttcccattgaatcaaatcctcattcatttgacagccctcacaccaaagcacatctcctgctacaggcacatctcagccgagccatgctaccctgcccagattatgacactgataccaaaacagtcttggaccaagctctcagagtatgtcaggcaatgctggacgtggctgcaaaccagggctggctggtgactgtcctgaatatcaccaacctgattcagatggtgatccagggtcggtggttaaaggactcttctcttcttacactaccaaacatagaaaaccatcatcttcaccttttcaagaaatggaagccgattatgaagggcccacatgctaggggtcggacctccatcgagtcccttcctgaactgatccatgcctgtggagggaaagaccatgtatttagctccatggtagaaagtgagctacatgctgcaaaaacgaaacaggcatggaatttcttatctcacttgccagtgataaatgttggcataagtgttaaaggctcgtgggatgacttagttgaaggacataatgaactctctgtctcaactctgactgcagacaaacgagatgacaacaaatggatcaaattgcatgctgaccaagagtatgtgcttcaagtgagcttgcagagagtccactttgggttccacaagggaaagccagagagctgtgcagttactcctcgatttcccaaatcaaaagacgaaggatggtttttgatattaggagaagtggataagagagaacttattgctttgaaaagagtaggatatattcgaaatcatcatgttgcttccctttctttttatacccctgaaatacctggaaggtatatctacacattatatttcatgagtgactgctaccttggcctggaccagcagtatgacatctatctcaacgttacacaagcgagtctttctgcacaggtcaacaccaaggtctctgattccctgactgacctggcattaaagtaacttgacctgaacaatccatttgaaaggagtggctaagaattctctctgttcagtcatctagacaaatcgaattacttgatgtttgccttgaaagaatcaacttctaacctcaaccatccaggaaattgacagtggctgcagtattgactccagtgacataaagttaaccacagtggccttttaacaaatgttgccttttataatgttatctttatgagtttcttgatatgtaagatgaaaaagcatttagaataatcttttaatttgtgtatatttgggatgatatttaggagctatcaatcaaattttacatctcacaatgtactgtttacatggatattggctgctttttttaaggaaaaccacattgagatgtgacaagtgttaggacttgtcacagatttctaactctgccgcataaactataaatctgtaaggtggtacacagcgtgtcttgttagcaaaatttatactttgatatgatcacatgtagaagtagcttcaagaatttcttgtagtcataaatgtttaataatatatgatgtaaaattatattatggagcctaatgatgataacaaagaaaacaatatactgatcttagaaaatgtagacatggttaactgggaaataaaatatagagtggcacttcaagaaaaaaa

SEQ ID NO: 582 - protein, 2202 aa, Homo sapiens
MALPRLTGALRSFSNVTKQDNYNEEVADLKIKRSKLHEQVLDLGLTWKKIIKFLNEKLEKSKMQSINEDLKDILHAAKQIVGTDNGREAIESGAAFLFMTFHLKDSVGHKETKAIKQMFGPFPSSSATAACNATNRIISHFSQDDLTALVQMTEKEHGDRVFFGKNLAFSFDMHDLDHFDELPINGETQKTISLDYKKFLNEHLQEACTPELKPVEKTNGSFLWCEVEKYLNSTLKEMTEVPRVEDLCCTLYDMLASIKSGDELQDELFELLGPEGLELIEKLLQNRITIVDRFLNSSNDHRFQALQDNCKKILGENAKPNYGCQVTIQSEQEKQLMKQYRREEKRIARREKKAGEDLEVSEGLMCFDPKELRIQREQALLNARSVPILSRQRDADVEKIHYPHVYDSQAEAMKTSAFIAGAKMILPEGIQRENNKLYEEVRIPYSEPMPLSFEEKPVYIQDLDEIGQLAFKGMKRLNRIQSIVFETAYNTNENMLICAPTGAGKTNIAMLTVLHEIRQHFQQGVIKKNEFKIVYVAPMKALAAEMTDYFSRRLEPLGIIVKELTGDMQLSKSEILRTQMLVTTPEKWDVVTRKSVGDVALSQIVRLLILDEVHLLHEDRGPVLESIVARTLRQVESTQSMIRILGLSATLPNYLDVATFLHVNPYIGLFFFDGRFRPVPLGQTFLGIKCANKMQQLNNMDEVCYENVLKQVKAGHQVMVFVHARNATVRTAMSLIERAKNCGHIPFFFPTQGHDYVLAEKQVQRSRNKQVRELFPDGFSIHHAGMLRQDRNLVENLFSNGHIKVLVCTATLAWGVNLPAHAVIIKGTQIYAAKRGSFVDLGILDVMQIFGRAGRPQFDKFGEGIIITTHDKLSHYLTLLTQRNPIESQFLESLADNLNAEIALGTVTNVEEAVKWISYTYLYVRMRANPLAYGISHKAYQIDPTLRKHREQLVIEVGRKLDKAQMIRFEERTGYFSSTDLGRTASHYYIKYNTIETFNELFDAHKTEGDIFAIVSKAEEFDQIKVREEEIEELDTLLSNFCELSTPGGVENSYGKINILLQTYISRGEMDSFSLISDSAYVAQNAARIVRALFEIALRKRWPTMTYRLLNLSKVIDKRLWGWASPLRQFSILPPHILTRLEEKKLTVDKLKDMRKDEIGHILHHVNIGLKVKQCVHQIPSVMMEASIQPITRTVLRVTLSIYADFTWNDQVHGTVGEPWWIWVEDPTNDHIYHSEYFLALKKQVISKEAQLLVFTIPIFEPLPSQYYIRAVSDRWLGAEAVCIINFQHLILPERHPPHTELLDLQPLPITALGCKAYEALYNFSHFNPVQTQIFHTLYHTDCNVLLGAPTGSGKTVAAELAIFRVFNKYPTSKAVYIAPLKALVRERMDDWKVRIEEKLGKKVIELTGDVTPDMKSIAKADLIVTTPEKWDGVSRSWQNRNYVQQVTILIIDEIHLLGEERGPVLEVIVSRTNFISSHTEKPVRIVGLSTALANARDLADWLNIKQMGLFNFRPSVRPVPLEVHIQGFPGQHYCPRMASMNKPAFQAIRSHSPAKPVLIFVSSRRQTRLTALELIAFLATEEDPKQWLNMDEREMENIIATVRDSNLKLTLAFGIGMHHAGLHERDRKTVEELFVNCKVQVLIATSTLAWGVNFPAHLVIIKGTEYYDGKTRRYVDFPITDVLQMMGRAGRPQFDDQGKAVILVHDIKKDFYKKFLYEPFPVESSLLGVLSDHLNAEIAGGTITSKQDALDYITWTYFFRRLIMNPSYYNLGDVSHDSVNKFLSHLIEKSLIELELSYCIEIGEDNRSIEPLTYGRIASYYYLKHQTVKMFKDRLKPECSTEELLSILSDAEEYTDLPVRHNEDHMNSELAKCLPIESNPHSFDSPHTKAHLLLQAHLSRAMLPCPDYDTDTKTVLDQALRVCQAMLDVAANQGWLVTVLNITNLIQMVIQGRWLKDSSLLTLPNIENHHLHLFKKWKPIMKGPHARGRTSIESLPELIHACGGKDHVFSSMVESELHAAKTKQAWNFLSHLPVINVGISVKGSWDDLVEGHNELSVSTLTADKRDDNKWIKLHADQEYVLQVSLQRVHFGFHKGKPESCAVTPRFPKSKDEGWFLILGEVDKRELIALKRVGYIRNHHVASLSFYTPEIPGRYIYTLYFMSDCYLGLDQQYDIYLNVTQASLSAQVNTKVSDSLTDLALK

SEQ ID NO: 583 - DNA, 3470 bp, Homo sapiens
gtaggccggcgccagctccactctgtccctcctcgccgggtctgtgcgtctttgcgtctgtctgtctgactgatggtcctcacacgcggttccctgtgactgggcgcgaccccggcaagcgcggcttggagggcggacggggcgcggcgatacagctgcccgctcgcatctttggccctgcgctcagctcctcacccggcgtgggaagttaaagtaaaaccgaaagggaagaaggcgcggtggcaggagctgacagagtgatgggaaacgcgtgagccaggccgagagtttcaggtttcttgctgtatggatcactgattgaataatagatggctttacctcgtctcacaggagccttgcgttccttttcaaatgtcaccaagcaagataattataatgaagaagtggctgacttaaagataaagcgatctaaacttcatgaacaagttttagatttgggcctgacatggaagaagataataaaatttttgaatgaaaaactggagaagagtaaaatgcaaagtataaatgaagacttaaaagatatattacatgctgcaaagcagatagaagtgaattgtccattccagaagaggaggctggatggaaaagaggaggatgagaagatgagcagagcttctgacagattcagaggactaagatgacaaaaatgactaaaatggacaaaagaagaaatagaaaatctgaatatttgactattaaaggaatttaatctgtaattaaaaaccttaagtacaaagaaatctatatgctatgatggctttaatggagaatgtcataatgtcatttaaaaaggtatgagagtactattgtagattaaaagaggttaaaggcatataataatcaaaatgtaatgtatgatccttgattgactcttgaatcagaaaaaaattacgtatttttggggccgttggagaaatctgaatatgggctggacatcattaggtaatattagatctcaggtgtgataatgttgtggctatgtaagaggatatcctaaatctcaggagaagcatactgcagtatatatagtggtatctcatgaagattaaaatgtactgtcaaatgtgtcagcaaaagaaatacacatgatgtgtgtgtgtgatcaagtgtttataatgagtggattaataaatatgagaagatagggtgatttgttgtaaagtaataaaggtttaaaaattacatgattcagtagagaaaaagcattttatgaatatctaacattacttatgataaaaaatctcagcaaactaggaatagaaggggattttgttaatctgataagctgtagctataaaaaacttggagaaaacatacttaatgctacaaagttagaagcttccctgaggtacggaattagacacaaatgcctgttaccacttctgtttctcactgtattaaaaatccttgctaacataatatggcaagaaaaagtaagggcataaagactggaaaaaaaaacttttccatttttcacatgactgtacctgtagaaaatgaatttaacaaggttaatataaaaatcaattttatttctacttactagaagcacattaaaaattacacttatctttatgtaacgtaatacattttaccttaaattttaaaattttaatttattttacgtttacaaaagcatcataaacatcaaatacgtaggagtaaatttaacaaaaaataagcaagacttcatggaaaactaaaatattgagagaatttaaagaagatctaaataaacagagggatataccaagaattggaagactcactattataatgatatattttttacccaaattgatctgtagattcagtgctatcccaggcacagtcttatgtttgagggtgtgtgtgtgtgtgtgtgtgtatgtgtgcatgtgtgtgtgtggaaattgacaagggtaatatgaaagttatatggaaattcaaaggcaaagagcagcctggttaactttgaaaaataaaaagggagaacttactctagtagatcttaaaacttattataaagataagtatacagtgtggtgttggtccaagaataggcaaatggactagtatgacagaatatagcccagaaacaaacctacggatagaaatatacttgatttataatgaaggccaaacaatagtgagacaaggctattttttcagtatatggtgctgggtcaactgcatatacagatgaaaaaaagtacctattttacaaataattttaaacagcctacagaattaagcatgatacacaaaacaatacatcttctaaaagatgtaaaagagtgtcttcaggatctttgtatgtgcgaaaatttatcaaacagagaacaaaaagtacaaagggaatgattaagttggactgtagtaaaattaataccttctatttattaagagtaaaaaggcaaaacatggagtgggagaatatagcttcaagatatataaccaaaaagagagcttttatccaggttaaatacgagctcctacaaatcaataaggaaaggacagataatcctatatgaacatgagtaagagctttgaacaaggacttcacaagagatagttgaccagtaaacatgaaaagggcttcagcttcattggtagtcaaggatatgccactgcatgcccattagaatggttaaaatgtaaaagactgacatacctattgttaggatcaagaatgtgaactagaatttttgtctactgctgctagagtttacaattggtacaaccactttgagtaactgtttgacagtgtctactattacctactgtggttggacaagtgaaattttaaatcttaggacataaatatccaataaaaatgcttgtacatacatgtatatcaaaaataggtgcattcattgcaacattatttgtgatagccttaatgtagaaacaacccagttcattgttaaaaagcttaagttgtagtatgtagactgccttatagcagtaacggattacagctatgtataacattgtaagtgaatcttataatgttgacaaaagaagccatacaacacatattatgattccattaatatgaaactgaaaactaggcatgaccagtctctggttttagaagtcaggatagtggctgcttttgaggaaggaggtagtgactaggagtgaatatgagggaggtttctggggagctgataatgttctgattcttgaagtagttaaccagattacacaggtgtgttcgttttttgataattctttgaactgtatgtgtactgtatattttcttgttatattcaataaaaagaattactatgatttttatattacatagattaaataagaagtatttcagattgataagtaacacatgcttgtgtatttatttagcttaaggtttggctatcatggtgagaactcctatgtaccctgctcaggtcctggtaaacagtatcataagtataataaattggtgtttttcattctca

SEQ ID NO: 584 - protein, 111 aa, Homo sapiens
MALPRLTGALRSFSNVTKQDNYNEEVADLKIKRSKLHEQVLDLGLTWKKIIKFLNEKLEKSKMQSINEDLKDILHAAKQIEVNCPFQKRRLDGKEEDEKMSRASDRFRGLR

SEQ ID NO: 585 - DNA, 3322 bp, Homo sapiens
ggttgttccttggcgcagtgagtgaagaacatgcagcgattgctaatgggtttgggaagcggagactccttcctctctctatgaccatgccgtgatcgtgtctgcggtcaccactcgacgcatcctcatttctacccgaacccaggagccgaacgctagatcggggaagtgggtgccgtgcgtgtgggcacagaaacaccatgaagattattttcccgattctaagtaatccagtcttcaggcgcaccgttaaactcctgctctgtttactgtggattggatattctcaaggaaccacacatgtattaagatttggtggtatttttgaatatgtggaatctggcccaatgggagctgaggaacttgcattcagatttgctgtgaacacaattaacagaaacagaacattgctacccaatactacccttacctatgatacccagaagataaacctttatgatagttttgaagcatccaagaaagcctgtgatcagctgtctcttggggtggctgccatcttcgggccttcacacagctcatcagcaaacgcagtgcagtccatctgcaatgctctgggagttccccacatacagacccgctggaagcaccaggtgtcagacaacaaagattccttctatgtcagtctctacccagacttctcttcactcagccgtgccattttagacctggtgcagtttttcaagtggaaaaccgtcacggttgtgtatgatgacagcactggtctcattcgtttgcaagagctcatcaaagctccatcaaggtataatcttcgactcaaaattcgtcagttacctgctgatacaaaggatgcaaaacccttactaaaagaaatgaaaagaggcaaggagtttcatgtaatctttgattgtagccatgaaatggcagcaggcattttaaaacaggcattagctatgggaatgatgacagaatactatcattatatctttaccactctggacctctttgctcttgatgttgagccctaccgatacagtggtgttaacatgacagggttcagaatattaaatacagaaaatacccaagtctcctccatcattgaaaagtggtcgatggaacgattgcaggcacctccgaaacccgattcaggtttgctggatggatttatgacgactgatgctgctctaatgtatgatgctgtgcatgtggtgtctgtggccgttcaacagtttccccagatgacagtcagttccttgcagtgtaatcgacataaaccctggcgcttcgggacccgctttatgagtctaattaaagaggcacattgggaaggcctcacaggcagaataactttcaacaaaaccaatggcttgagaacagattttgatttggatgtgatcagtctgaaggaagaaggtctagaaaagattggaacgtgggatccagccagtggcctgaatatgacagaaagtcaaaagggaaagccagcgaacatcacagattccttatccaatcgttctttgattgttaccaccattttggaagagccttatgtcctttttaagaagtctgacaaacctctctatggtaatgatcgatttgaaggctattgcattgatctcctcagagagttatctacaatccttggctttacatatgaaattagacttgtggaagatgggaaatatggagcccaggatgatgccaatggacaatggaatggaatggttcgtgaactaattgatcataaagctgaccttgcagttgctccactggctattacctatgttcgagagaaggtcatcgacttttccaagccctttatgacacttggaataagtattttgtaccgcaagcccaatggtacaaacccaggcgtcttctccttcctgaatcctctctcccctgatatctggatgtatattctgctggcttacttgggtgtcagttgtgtgctctttgtcatagccaggtttagtccttatgagtggtataatccacacccttgcaaccctgactcagacgtggtggaaaacaattttaccttgctaaatagtttctggtttggagttggagctctcatgcagcaaggttctgagctcatgcccaaagcactgtccaccaggatagtgggaggcatttggtggtttttcacacttatcatcatttcttcgtatactgctaacttagccgcctttctgacagtggaacgcatggaatcccctattgactctgctgatgatttagctaaacaaaccaagatagaatatggagcagtagaggatggtgcaaccatgacttttttcaagaaatcaaaaatctccacgtatgacaaaatgtgggcctttatgagtagcagaaggcagtcagtgctggtcaaaagtaatgaagaaggaatccagcgagtcctcacctctgattatgctttcctaatggagtcaacaaccatcgagtttgttacccagcggaactgtaacctgacacagattggcggccttatagactctaaaggttatggcgttggcactcccatgggttctccatatcgagacaaaattaccatagcaattcttcagctgcaagaggaaggcaaactgcatatgatgaaggagaaatggtggaggggcaatggttgcccagaagaggagagcaaagaggccagtgccctgggggttcagaatattggtggcatcttcattgttctggcagccggcttggtgctttcagtttttgtggcagtgggagaatttttatacaaatccaaaaaaaacgctcaattggaaaagaggtccttctgtagtgccatggtagaagaattgaggatgtccctgaagtgccagcgtcggttaaaacataagccacaggccccagttattgtgaaaacagaagaagttatcaacatgcacacatttaacgacagaaggttgccaggtaaagaaaccatggcataaagctgggaggccaaacacccaagcacaaactgtcgtctttttccaaacaatttagccagaatgtttcctgtggaaatatgcaacctgtgcaaaataaaatgagttacctcatgccgctgtgtctatgaactagagactctgtgatctaagcagttgcaatgatcagacttgatttacaagcatcatggatcaaccaagttacacggggttacactgttaatcatgggttcctcccttcttctgagtgaatgttaacatgcgcattttgtggctgatttcaaatgcagtccagtgagaaattacaggttccttttgaagctcaactgttgccaggagatggaatatcaatgcccaacagggcaaccaataaaagtgtcactaagaatataaatatt

SEQ ID NO: 586 - protein, 908 aa, Homo sapiens
MKIIFPILSNPVFRRTVKLLLCLLWIGYSQGTTHVLRFGGIFEYVESGPMGAEELAFRFAVNTINRNRTLLPNTTLTYDTQKINLYDSFEASKKACDQLSLGVAAIFGPSHSSSANAVQSICNALGVPHIQTRWKHQVSDNKDSFYVSLYPDFSSLSRAILDLVQFFKWKTVTVVYDDSTGLIRLQELIKAPSRYNLRLKIRQLPADTKDAKPLLKEMKRGKEFHVIFDCSHEMAAGILKQALAMGMMTEYYHYIFTTLDLFALDVEPYRYSGVNMTGFRILNTENTQVSSIIEKWSMERLQAPPKPDSGLLDGFMTTDAALMYDAVHVVSVAVQQFPQMTVSSLQCNRHKPWRFGTRFMSLIKEAHWEGLTGRITFNKTNGLRTDFDLDVISLKEEGLEKIGTWDPASGLNMTESQKGKPANITDSLSNRSLIVTTILEEPYVLFKKSDKPLYGNDRFEGYCIDLLRELSTILGFTYEIRLVEDGKYGAQDDANGQWNGMVRELIDHKADLAVAPLAITYVREKVIDFSKPFMTLGISILYRKPNGTNPGVFSFLNPLSPDIWMYILLAYLGVSCVLFVIARFSPYEWYNPHPCNPDSDVVENNFTLLNSFWFGVGALMQQGSELMPKALSTRIVGGIWWFFTLIIISSYTANLAAFLTVERMESPIDSADDLAKQTKIEYGAVEDGATMTFFKKSKISTYDKMWAFMSSRRQSVLVKSNEEGIQRVLTSDYAFLMESTTIEFVTQRNCNLTQIGGLIDSKGYGVGTPMGSPYRDKITIAILQLQEEGKLHMMKEKWWRGNGCPEEESKEASALGVQNIGGIFIVLAAGLVLSVFVAVGEFLYKSKKNAQLEKRSFCSAMVEELRMSLKCQRRLKHKPQAPVIVKTEEVINMHTFNDRRLPGKETMA

SEQ ID NO: 587 - DNA, 3409 bp, Homo sapiens
ggttgttccttggcgcagtgagtgaagaacatgcagcgattgctaatgggtttgggaagcggagactccttcctctctctatgaccatgccgtgatcgtgtctgcggtcaccactcgacgcatcctcatttctacccgaacccaggagccgaacgctagatcggggaagtgggtgccgtgcgtgtgggcacagaaacaccatgaagattattttcccgattctaagtaatccagtcttcaggcgcaccgttaaactcctgctctgtttactgtggattggatattctcaaggaaccacacatgtattaagatttggtggtatttttgaatatgtggaatctggcccaatgggagctgaggaacttgcattcagatttgctgtgaacacaattaacagaaacagaacattgctacccaatactacccttacctatgatacccagaagataaacctttatgatagttttgaagcatccaagaaagcctgtgatcagctgtctcttggggtggctgccatcttcgggccttcacacagctcatcagcaaacgcagtgcagtccatctgcaatgctctgggagttccccacatacagacccgctggaagcaccaggtgtcagacaacaaagattccttctatgtcagtctctacccagacttctcttcactcagccgtgccattttagacctggtgcagtttttcaagtggaaaaccgtcacggttgtgtatgatgacagcactggtctcattcgtttgcaagagctcatcaaagctccatcaaggtataatcttcgactcaaaattcgtcagttacctgctgatacaaaggatgcaaaacccttactaaaagaaatgaaaagaggcaaggagtttcatgtaatctttgattgtagccatgaaatggcagcaggcattttaaaacaggcattagctatgggaatgatgacagaatactatcattatatctttaccactctggacctctttgctcttgatgttgagccctaccgatacagtggtgttaacatgacagggttcagaatattaaatacagaaaatacccaagtctcctccatcattgaaaagtggtcgatggaacgattgcaggcacctccgaaacccgattcaggtttgctggatggatttatgacgactgatgctgctctaatgtatgatgctgtgcatgtggtgtctgtggccgttcaacagtttccccagatgacagtcagttccttgcagtgtaatcgacataaaccctggcgcttcgggacccgctttatgagtctaattaaagaggcacattgggaaggcctcacaggcagaataactttcaacaaaaccaatggcttgagaacagattttgatttggatgtgatcagtctgaaggaagaaggtctagaaaagattggaacgtgggatccagccagtggcctgaatatgacagaaagtcaaaagggaaagccagcgaacatcacagattccttatccaatcgttctttgattgttaccaccattttggaagagccttatgtcctttttaagaagtctgacaaacctctctatggtaatgatcgatttgaaggctattgcattgatctcctcagagagttatctacaatccttggctttacatatgaaattagacttgtggaagatgggaaatatggagcccaggatgatgccaatggacaatggaatggaatggttcgtgaactaattgatcataaagctgaccttgcagttgctccactggctattacctatgttcgagagaaggtcatcgacttttccaagccctttatgacacttggaataagtattttgtaccgcaagcccaatggtacaaacccaggcgtcttctccttcctgaatcctctctcccctgatatctggatgtatattctgctggcttacttgggtgtcagttgtgtgctctttgtcatagccaggtttagtccttatgagtggtataatccacacccttgcaaccctgactcagacgtggtggaaaacaattttaccttgctaaatagtttctggtttggagttggagctctcatgcagcaaggttctgagctcatgcccaaagcactgtccaccaggatagtgggaggcatttggtggtttttcacacttatcatcatttcttcgtatactgctaacttagccgcctttctgacagtggaacgcatggaatcccctattgactctgctgatgatttagctaaacaaaccaagatagaatatggagcagtagaggatggtgcaaccatgacttttttcaagaaatcaaaaatctccacgtatgacaaaatgtgggcctttatgagtagcagaaggcagtcagtgctggtcaaaagtaatgaagaaggaatccagcgagtcctcacctctgattatgctttcctaatggagtcaacaaccatcgagtttgttacccagcggaactgtaacctgacacagattggcggccttatagactctaaaggttatggcgttggcactcccatgggttctccatatcgagacaaaattaccatagcaattcttcagctgcaagaggaaggcaaactgcatatgatgaaggagaaatggtggaggggcaatggttgcccagaagaggagagcaaagaggccagtgccctgggggttcagaatattggtggcatcttcattgttctggcagccggcttggtgctttcagtttttgtggcagtgggagaatttttatacaaatccaaaaaaaacgctcaattggaaaaggaatcttctatttggttagtgccaccataccatccagacactgtttagtaatcttttgaaacttactaaaagaggtttttaataatgaggtccttctgtagtgccatggtagaagaattgaggatgtccctgaagtgccagcgtcggttaaaacataagccacaggccccagttattgtgaaaacagaagaagttatcaacatgcacacatttaacgacagaaggttgccaggtaaagaaaccatggcataaagctgggaggccaaacacccaagcacaaactgtcgtctttttccaaacaatttagccagaatgtttcctgtggaaatatgcaacctgtgcaaaataaaatgagttacctcatgccgctgtgtctatgaactagagactctgtgatctaagcagttgcaatgatcagacttgatttacaagcatcatggatcaaccaagttacacggggttacactgttaatcatgggttcctcccttcttctgagtgaatgttaacatgcgcattttgtggctgatttcaaatgcagtccagtgagaaattacaggttccttttgaagctcaactgttgccaggagatggaatatcaatgcccaacagggcaaccaataaaagtgtcactaagaatataaatatt

SEQ ID NO: 588 - protein, 869 aa, Homo sapiens
MKIIFPILSNPVFRRTVKLLLCLLWIGYSQGTTHVLRFGGIFEYVESGPMGAEELAFRFAVNTINRNRTLLPNTTLTYDTQKINLYDSFEASKKACDQLSLGVAAIFGPSHSSSANAVQSICNALGVPHIQTRWKHQVSDNKDSFYVSLYPDFSSLSRAILDLVQFFKWKTVTVVYDDSTGLIRLQELIKAPSRYNLRLKIRQLPADTKDAKPLLKEMKRGKEFHVIFDCSHEMAAGILKQALAMGMMTEYYHYIFTTLDLFALDVEPYRYSGVNMTGFRILNTENTQVSSIIEKWSMERLQAPPKPDSGLLDGFMTTDAALMYDAVHVVSVAVQQFPQMTVSSLQCNRHKPWRFGTRFMSLIKEAHWEGLTGRITFNKTNGLRTDFDLDVISLKEEGLEKIGTWDPASGLNMTESQKGKPANITDSLSNRSLIVTTILEEPYVLFKKSDKPLYGNDRFEGYCIDLLRELSTILGFTYEIRLVEDGKYGAQDDANGQWNGMVRELIDHKADLAVAPLAITYVREKVIDFSKPFMTLGISILYRKPNGTNPGVFSFLNPLSPDIWMYILLAYLGVSCVLFVIARFSPYEWYNPHPCNPDSDVVENNFTLLNSFWFGVGALMQQGSELMPKALSTRIVGGIWWFFTLIIISSYTANLAAFLTVERMESPIDSADDLAKQTKIEYGAVEDGATMTFFKKSKISTYDKMWAFMSSRRQSVLVKSNEEGIQRVLTSDYAFLMESTTIEFVTQRNCNLTQIGGLIDSKGYGVGTPMGSPYRDKITIAILQLQEEGKLHMMKEKWWRGNGCPEEESKEASALGVQNIGGIFIVLAAGLVLSVFVAVGEFLYKSKKNAQLEKESSIWLVPPYHPDTV

SEQ ID NO: 589 - DNA, 216 bp, Homo sapiens
atgacccagctggaggcatgtgtgcgctctatccagctggatgggctagtgagcggggcctccaagctggcgtccgtgggctatggtatccggaagatgcagattcagtgtgtggtggaggacgacaaagtggggacagacttgctggaggaggagatcaccaagtttgaggagcatgtgcagagtgtcgacatcgcagctttgaacaagatctga

SEQ ID NO: 590 - protein, 71 aa, Homo sapiens [sequence omitted]

SEQ ID NO: 591 - DNA, 8192 bp, Homo sapiens
cagcgactcctctggctcccgagaagtggatccggtcgcggccactacgatgccgggagccgccggggtcctcctccttctgctgctctccggaggcctcgggggcgtacaggcgcagcggccgcagcagcagcggcagtcacaggcacatcagcaaagaggtttattccctgctgtcctgaatcttgcttctaatgctcttatcacgaccaatgcaacatgtggagaaaaaggacctgaaatgtactgcaaattggtagaacatgtccctgggcagcctgtgaggaacccgcagtgtcgaatctgcaatcaaaacagcagcaatccaaaccagagacacccgattacaaatgctattgatggaaagaacacttggtggcagagtcccagtattaagaatggaatcgaataccattatgtgacaattacactggatttacagcaggtgttccagatcgcgtatgtgattgtgaaggcagctaactccccccggcctggaaactggattttggaacgctctcttgatgatgttgaatacaagccctggcagtatcatgctgtgacagacacggagtgcctaacgctttacaatatttatccccgcactgggccaccgtcatatgccaaagatgatgaggtcatctgcacttcattttactccaagatacaccccttagaaaatggagagattcacatctctttaatcaatgggagaccaagtgccgatgatccttctccagaactgctagaatttacctccgctcgctatattcgcctgagatttcagaggatccgcacactgaatgctgacttgatgatgtttgctcacaaagacccaagagaaattgaccccattgtcaccagaagatattactactcggtcaaggatatttcagttggagggatgtgcatctgctatggtcatgccagggcttgtccacttgatccagcgacaaataaatctcgctgtgagtgtgagcataacacatgtggcgatagctgtgatcagtgctgtccaggattccatcagaaaccctggagagctggaacttttctaactaaaactgaatgtgaagcatgcaattgtcatggaaaagctgaagaatgctattatgatgaaaatgttgccagaagaaatctgagtttgaatatacgtggaaagtacattggagggggtgtctgcattaattgtacccaaaacactgctggtataaactgcgagacatgtacagatggcttcttcagacccaaaggggtatctccaaattatccaaggccatgccagccatgtcattgcgatccaattggttccttaaatgaagtctgtgtcaaggatgagaaacatgctcgacgaggtttggcacctggatcctgtcattgcaaaactggttttggaggtgtgagctgtgatcggtgtgccaggggctacactggctacccggactgcaaagcctgtaactgcagtgggttagggagcaaaaatgaggatccttgttttggcccctgtatctgcaaggaaaatgttgaaggaggagactgtagtcgttgcaaatccggcttcttcaatttgcaagaggataattggaaaggctgcgatgagtgtttctgttcaggggtttcaaacagatgtcagagttcctactggacctatggcaaaatacaagatatgagtggctggtatctgactgaccttcctggccgcattcgagtggctccccagcaggacgacttggactcacctcagcagatcagcatcagtaacgcggaggcccggcaagccctgccgcacagctactactggagcgcgccggctccctatctgggaaacaaactcccagcagtaggaggacagttgacatttaccatatcatatgaccttgaagaagaggaagaagatacagaacgtgttctccagcttatgattatcttagagggtaatgacttgagcatcagcacagcccaagatgaggtgtacctgcacccatctgaagaacatactaatgtattgttacttaaagaagaatcatttaccatacatggcacacattttccagtccgtagaaaggaatttatgacagtgcttgcgaatttgaagagagtcctcctacaaatcacatacagctttgggatggatgccatcttcaggttgagctctgttaaccttgaatccgctgtctcctatcctactgatggaagcattgcagcagctgtagaagtgtgtcagtgcccaccagggtatactggctcctcttgtgaatcttgttggcctaggcacaggcgagttaacggcactatttttggtggcatctgtgagccatgtcagtgctttggtcatgcggagtcctgtgatgacgtcactggagaatgcctgaactgtaaggatcacacaggtggcccatattgtgataaatgtcttcctggtttctatggcgagcctactaaaggaacctctgaagactgtcaaccctgtgcctgtccactcaatatcccatccaataactttagcccaacgtgccatttagaccggagtcttggattgatctgtgatggatgccctgtcgggtacacaggaccacgctgtgagaggtgtgcagaaggctattttggacaaccctctgtacctggaggatcatgtcagccatgccaatgcaatgacaaccttgacttctccatccctggcagctgtgacagcttgtctggctcctgtctgatatgtaaaccaggtacaacaggccggtactgtgagctctgtgctgatggatattttggagatgcagttgatgcgaagaactgtcagccctgtcgctgtaatgccggtggctctttctctgaggtttgccacagtcaaactggacagtgtgagtgcagagccaacgttcagggtcagagatgtgacaaatgcaaggctgggacctttggcctacaatcagcaaggggctgtgttccctgcaactgcaattcttttgggtctaagtcattcgactgtgaagagagtggacaatgttggtgccaacctggagtcacagggaagaaatgtgaccgctgtgcccacggctatttcaacttccaagaaggaggctgcacagcttgtgaatgttctcatctgggtaataattgtgacccaaagactgggcgatgcatttgcccacccaataccattggagagaaatgttctaaatgtgcacccaatacctggggccacagcattaccactggttgtaaggcttgtaactgcagcacagtgggatccttggatttccaatgcaatgtaaatacaggccaatgcaactgtcatccaaaattctctggtgcaaaatgtacagagtgcagtcgaggtcactggaactaccctcgctgcaatctctgtgactgcttcctccctgggacagatgccacaacctgtgattcagagactaaaaaatgctcctgtagtgatcaaactgggcagtgcacttgtaaggtgaatgtggaaggcatccactgtgacagatgccggcctggcaaattcggactcgatgccaagaatccacttggctgcagcagctgctattgcttcggcactactacccagtgctctgaagcaaaaggactgatccggacgtgggtgactctgaaggctgagcagaccattctacccctggtagatgaggctctgcagcacacgaccaccaagggcattgtttttcaacatccagagattgttgcccacatggacctgatgagagaagatctccatttggaacctttttattggaaacttccagaacaatttgaaggaaagaagttgatggcctatgggggcaaactcaagtatgcaatctatttcgaggctcgggaagaaacaggtttctctacatataatcctcaagtgatcattcgaggtgggacacctactcatgctagaattatcgtcaggcatatggctgctcctctgattggccaattgacaaggcatgaaattgaaatgacagagaaagaatggaaatattatggggatgatcctcgagtccatagaactgtgacccgagaagacttcttggatatactatatgatattcattacattcttatcaaagctacttatggaaatttcatgcgacaaagcaggatttctgaaatctcaatggaggtagctgaacaaggacgtggaacaacaatgactcctccagctgacttgattgaaaaatgtgattgtcccctgggctattctggcctgtcctgtgaggcatgcttgccgggattttatcgactgcgttctcaaccaggtggccgcacccctggaccaaccctgggcacctgtgttccatgtcaatgtaatggacacagcagcctgtgtgaccctgaaacatcgatatgccagaattgtcaacatcacactgctggtgacttctgtgaacgatgtgctcttggatactatggaattgtcaagggattgccaaatgactgtcagcaatgtgcctgccctctgatttcttccagtaacaatttcagcccctcttgtgtcgcagaaggacttgacgactaccgctgcacggcttgtccacggggatatgaaggccagtactgtgaaaggtgtgcccctggctatactggcagtccaggcaaccctggaggctcctgccaagaatgtgagtgtgatccctatggctcactgcctgtgccctgtgaccctgtcacaggattctgcacgtgccgacctggagccacgggaaggaagtgtgacggctgcaagcactggcatgcacgcgagggctgggagtgtgttttttgtggagatgagtgcactggccttcttctcggtgacttggctcgcctggagcagatggtcatgagcatcaacctcactggtccgctgcctgcgccatataaaatgctgtatggtcttgaaaatatgactcaggagctaaagcacttgctgtcacctcagcgggccccagagaggcttattcagctggcagagggcaatctgaatacactcgtgaccgaaatgaacgagctgctgaccagggctaccaaagtgacagcagatggcgagcagaccggacaggatgctgagaggaccaacacaagagcaaagtccctgggagaattcattaaggagcttgcccgggatgcagaagctgtaaatgaaaaagctataaaactaaatgaaactctaggaactcgagacgaggcctttgagagaaatttggaagggcttcagaaagagattgaccagatgattaaagaactgaggaggaaaaatctagagacacaaaaggaaattgctgaagatgagttggtagctgcagaagcccttctgaaaaaagtgaagaagctgtttggagagtcccggggggaaaatgaagaaatggagaaggatctccgggaaaaactggctgactacaaaaacaaagttgatgatgcttgggaccttttgagagaagccacagataaaatcagagaagctaatcgcctatttgcagtaaatcagaaaaacatgactgcattggagaaaaagaaggaggctgttgagagcggcaaacgacaaattgagaacactttaaaagaaggcaatgacatactcgatgaagccaaccgtcttgcagatgaaatcaactccatcatagactatgttgaagacatccaaactaaattgccacctatgtctgaggagcttaatgataaaatagatgacctctcccaagaaataaaggacaggaagcttgctgagaaggtgtcccaggctgagagccacgcagctcagttgaatgactcatctgctgtccttgatggaatccttgatgaggctaaaaacatctccttcaatgccactgcagccttcaaagcttacagcaatattaaggactatattgatgaagctgagaaagttgccaaagaagccaaagatcttgcacatgaagctacaaaactggcaacaggtcctcggggtttattaaaggaagatgccaaaggctgtcttcagaaaagcttcaggattcttaacgaagccaagaagttagcaaatgatgtaaaagaaaatgaagaccatctaaatggcttaaaaaccaggatagaaaatgctgatgctagaaatggggatctcttgagaactttgaatgacactttgggaaagttatcagctattccaaatgatacagctgctaaactgcaagctgttaaggacaaagccagacaagccaacgacacagctaaagatgtactggcacagattacagagctccaccagaacctcgatggcctgaagaagaattacaataaactagcagacagcgtcgccaaaacgaatgctgtggttaaagatccttccaagaacaaaatcattgccgatgcagatgccactgtcaaaaatttagaacaggaagctgaccggctaatagataaactcaaacccatcaaggaacttgaggataacctaaagaaaaacatctctgagataaaggaattgataaaccaagctcggaaacaagccaattctatcaaagtatctgtgtcttcaggaggtgactgcattcgaacatacaaaccagaaatcaagaaaggaagttacaataatattgttgtcaacgtaaagacagctgttgctgataacctcctcttttatcttggaagtgccaaatttattgactttctggctatagaaatgcgtaaaggcaaagtcagcttcctctgggatgttggatctggagttggacgtgtagagtacccagatttgactattgatgactcatattggtaccgtatcgtagcatcaagaactgggagaaatggaactatttctgtgagagccctggatggacccaaagccagcattgtgcccagcacacaccattcgacgtctcctccagggtacacgattctagatgtggatgcaaatgcaatgctgtttgttggtggcctgactgggaaattaaagaaggctgatgctgtacgtgtgattacattcactggctgcatgggagaaacatactttgacaacaaacctataggtttgtggaatttccgagaaaaagaaggtgactgcaaaggatgcactgtcagtcctcaggtggaagatagtgaggggactattcaatttgatggagaaggttatgcattggtcagccgtcccattcgctggtaccccaacatctccactgtcatgttcaagttcagaacattttcttcgagtgctcttctgatgtatcttgccacacgagacctgagagatttcatgagtgtggagctcactgatgggcacataaaagtcagttacgatctgggctcaggaatggcttccgttgtcagcaatcaaaaccataatgatgggaaatggaaatcattcactctgtcaagaattcaaaaacaagccaatatatcaattgtagatatagatactaatcaggaggagaatatagcaacttcgtcttctggaaacaactttggtcttgacttgaaagcagatgacaaaatatattttggtggcctgccaacgctgagaaacttgagtatgaaagcaaggccagaagtaaatctgaagaaatattccggctgcctcaaagatattgaaatttcaagaactccgtacaatatactcagtagtcccgattatgttggtgttaccaaaggatgttccctggagaatgtttacacagttagctttcctaagcctggttttgtggagctctcccctgtgccaattgatgtaggaacagaaatcaacctgtcattcagcaccaagaatgagtccggcatcattcttttgggaagtggagggacaccagcaccacctaggagaaaacgaaggcagactggacaggcctattatgtaatactcctcaacaggggccgtctggaagtgcatctctccacaggggcacgaacaatgaggaaaattgtcatcagaccagagccgaatctgtttcatgatggaagagaacattccgttcatgtagagcgaactagaggcatctttacagttcaagtggatgaaaacagaagatacatgcaaaacctgacagttgaacagcctatcgaagttaaaaagcttttcgttgggggtgctccacctgaatttcaaccttccccactcagaaatattcctccttttgaaggctgcatatggaatcttgttattaactctgtccccatggactttgcaaggcctgtgtccttcaaaaatgctgacattggtcgctgtgcccatcagaaac

SEQ ID NO: 592 - protein, 3122 aa, Homo sapiens
MPGAAGVLLLLLLSGGLGGVQAQRPQQQRQSQAHQQRGLFPAVLNLASNALITTNATCGEKGPEMYCKLVEHVPGQPVRNPQCRICNQNSSNPNQRHPITNAIDGKNTWWQSPSIKNGIEYHYVTITLDLQQVFQIAYVIVKAANSPRPGNWILERSLDDVEYKPWQYHAVTDTECLTLYNIYPRTGPPSYAKDDEVICTSFYSKIHPLENGEIHISLINGRPSADDPSPELLEFTSARYIRLRFQRIRTLNADLMMFAHKDPREIDPIVTRRYYYSVKDISVGGMCICYGHARACPLDPATNKSRCECEHNTCGDSCDQCCPGFHQKPWRAGTFLTKTECEACNCHGKAEECYYDENVARRNLSLNIRGKYIGGGVCINCTQNTAGINCETCTDGFFRPKGVSPNYPRPCQPCHCDPIGSLNEVCVKDEKHARRGLAPGSCHCKTGFGGVSCDRCARGYTGYPDCKACNCSGLGSKNEDPCFGPCICKENVEGGDCSRCKSGFFNLQEDNWKGCDECFCSGVSNRCQSSYWTYGKIQDMSGWYLTDLPGRIRVAPQQDDLDSPQQISISNAEARQALPHSYYWSAPAPYLGNKLPAVGGQLTFTISYDLEEEEEDTERVLQLMIILEGNDLSISTAQDEVYLHPSEEHTNVLLLKEESFTIHGTHFPVRRKEFMTVLANLKRVLLQITYSFGMDAIFRLSSVNLESAVSYPTDGSIAAAVEVCQCPPGYTGSSCESCWPRHRRVNGTIFGGICEPCQCFGHAESCDDVTGECLNCKDHTGGPYCDKCLPGFYGEPTKGTSEDCQPCACPLNIPSNNFSPTCHLDRSLGLICDGCPVGYTGPRCERCAEGYFGQPSVPGGSCQPCQCNDNLDFSIPGSCDSLSGSCLICKPGTTGRYCELCADGYFGDAVDAKNCQPCRCNAGGSFSEVCHSQTGQCECRANVQGQRCDKCKAGTFGLQSARGCVPCNCNSFGSKSFDCEESGQCWCQPGVTGKKCDRCAHGYFNFQEGGCTACECSHLGNNCDPKTGRCICPPNTIGEKCSKCAPNTWGHSITTGCKACNCSTVGSLDFQCNVNTGQCNCHPKFSGAKCTECSRGHWNYPRCNLCDCFLPGTDATTCDSETKKCSCSDQTGQCTCKVNVEGIHCDRCRPGKFGLDAKNPLGCSSCYCFGTTTQCSEAKGLIRTWVTLKAEQTILPLVDEALQHTTTKGIVFQHPEIVAHMDLMREDLHLEPFYWKLPEQFEGKKLMAYGGKLKYAIYFEAREETGFSTYNPQVIIRGGTPTHARIIVRHMAAPLIGQLTRHEIEMTEKEWKYYGDDPRVHRTVTREDFLDILYDIHYILIKATYGNFMRQSRISEISMEVAEQGRGTTMTPPADLIEKCDCPLGYSGLSCEACLPGFYRLRSQPGGRTPGPTLGTCVPCQCNGHSSLCDPETSICQNCQHHTAGDFCERCALGYYGIVKGLPNDCQQCACPLISSSNNFSPSCVAEGLDDYRCTACPRGYEGQYCERCAPGYTGSPGNPGGSCQECECDPYGSLPVPCDPVTGFCTCRPGATGRKCDGCKHWHAREGWECVFCGDECTGLLLGDLARLEQMVMSINLTGPLPAPYKMLYGLENMTQELKHLLSPQRAPERLIQLAEGNLNTLVTEMNELLTRATKVTADGEQTGQDAERTNTRAKSLGEFIKELARDAEAVNEKAIKLNETLGTRDEAFERNLEGLQKEIDQMIKELRRKNLETQKEIAEDELVAAEALLKKVKKLFGESRGENEEMEKDLREKLADYKNKVDDAWDLLREATDKIREANRLFAVNQKNMTALEKKKEAVESGKRQIENTLKEGNDILDEANRLADEINSIIDYVEDIQTKLPPMSEELNDKIDDLSQEIKDRKLAEKVSQAESHAAQLNDSSAVLDGILDEAKNISFNATAAFKAYSNIKDYIDEAEKVAKEAKDLAHEATKLATGPRGLLKEDAKGCLQKSFRILNEAKKLANDVKENEDHLNGLKTRIENADARNGDLLRTLNDTLGKLSAIPNDTAAKLQAVKDKARQANDTAKDVLAQITELHQNLDGLKKNYNKLADSVAKTNAVVKDPSKNKIIADADATVKNLEQEADRLIDKLKPIKELEDNLKKNISEIKELINQARKQANSIKVSVSSGGDCIRTYKPEIKKGSYNNIVVNVKTAVADNLLFYLGSAKFIDFLAIEMRKGKVSFLWDVGSGVGRVEYPDLTIDDSYWYRIVASRTGRNGTISVRALDGPKASIVPSTHHSTSPPGYTILDVDANAMLFVGGLTGKLKKADAVRVITFTGCMGETYFDNKPIGLWNFREKEGDCKGCTVSPQVEDSEGTIQFDGEGYALVSRPIRWYPNISTVMFKFRTFSSSALLMYLATRDLRDFMSVELTDGHIKVSYDLGSGMASVVSNQNHNDGKWKSFTLSRIQKQANISIVDIDTNQEENIATSSSGNNFGLDLKADDKIYFGGLPTLRNLSMKARPEVNLKKYSGCLKDIEISRTPYNILSSPDYVGVTKGCSLENVYTVSFPKPGFVELSPVPIDVGTEINLSFSTKNESGIILLGSGGTPAPPRRKRRQTGQAYYVILLNRGRLEVHLSTGARTMRKIVIRPEPNLFHDGREHSVHVERTRGIFTVQVDENRRYMQNLTVEQPIEVKKLFVGGAPPEFQPSPLRNIPPFEGCIWNLVINSVPMDFARPVSFKNADIGRCAHQKLREDEDGAAPAEIVIQPEPVPTPAFPTPTPVLTHGPCAAESEPALLIGSKQFGLSRNSHIAIAFDDTKVKNRLTIELEVRTEAESGLLFYMARINHADFATVQLRNGLPYFSYDLGSGDTHTMIPTKINDGQWHKIKIMRSKQEGILYVDGASNRTISPKKADILDVVGMLYVGGLPINYTTRRIGPVTYSIDGCVRNLHMAEAPADLEQPTSSFHVGTCFANAQRGTYFDGTGFAKAVGGFKVGLDLLVEFEFRTTTTTGVLLGISSQKMDGMGIEMIDEKLMFHVDNGAGRFTAVYDAGVPGHLCDGQWHKVTANKIKHRIELTVDGNQVEAQSPNPASTSADTNDPVFVGGFPDDLKQFGLTTSIPFRGCIRSLKLTKGTGKPLEVNFAKALELRGVQPVSCPAN

SEQ ID NO: 593 - DNA, 1056 bp, Homo sapiens
atggctgtctcatcagagcaacatgaactttcacatttcaaaagaacacagacaaaaaaggaaaaattcaattgctctgaatatggaaatagatcttgcccagaaaatgaaagatctctgggtgtccgagtggctatgtattcatttatggcaggatccatattcatcacaatatttggcaatcttgccatgataatttccatttcctacttcaagcagcttcacacaccaaccaacttcctcatcctctccatggccatcactgatttcctcctgggattcaccatcatgccatatagtatgatcagatcggtggagaactgctggtattttgggcttacattttgcaagatttattatagttttgacctgatgcttagcataacatccatttttcatctttgctcagtggccattgatagattttatgctatatgttacccattactttattccaccaaaataactattccagtcattaaaagattgctacttctatgttggtcggtccctggagcatttgccttcggggtggtcttctcagaggcctatgcagatggaatagagggctatgacatcttggttgcttgttccagttcctgcccagtgatgttcaacaagctatgggggaccaccttgtttatggcaggtttcttcactcctgggtctatgatggtggggatttatggcaaaatttttgcagtatccagaaaacatgctcatgccatcaataacttgcgagaaaatcaaaataatcaagtgaagaaagacaaaaaagctgccaaaactttaggaatagtgataggagttttcttattatgttggtttccttgtttcttcacaattttattggatccctttttgaacttctctactcctgtagttttgtttgatgccttgacatggtttggctattttaactccacatgtaatccgttaatatatggtttcttctatccctggtttcgcagagcactgaagtacattttgctaggtaaaattttcagctcatgtttccataatactattttgtgtatgcaaaaagaaagtgagtag

SEQ ID NO: 594 - protein, 351 aa, Homo sapiens
MAVSSEQHELSHFKRTQTKKEKFNCSEYGNRSCPENERSLGVRVAMYSFMAGSIFITIFGNLAMIISISYFKQLHTPTNFLILSMAITDFLLGFTIMPYSMIRSVENCWYFGLTFCKIYYSFDLMLSITSIFHLCSVAIDRFYAICYPLLYSTKITIPVIKRLLLLCWSVPGAFAFGVVFSEAYADGIEGYDILVACSSSCPVMFNKLWGTTLFMAGFFTPGSMMVGIYGKIFAVSRKHAHAINNLRENQNNQVKKDKKAAKTLGIVIGVFLLCWFPCFFTILLDPFLNFSTPVVLFDALTWFGYFNSTCNPLIYGFFYPWFRRALKYILLGKIFSSCFHNTILCMQKESE

SEQ ID NO: 595 - DNA, 1020 bp, Homo sapiens
atgatgcccttttgccacaatataattaatatttcctgtgtgaaaaacaactggtcaaatgatgtccgtgcttccctgtacagtttaatggtgctcataattctgaccacactcgttggcaatctgatagttattgtttctatatcacacttcaaacaacttcataccccaacaaattggctcattcattccatggccactgtggactttcttctggggtgtctggtcatgccttacagtatggtgagatctgctgagcactgttggtattttggagaagtcttctgtaaaattcacacaagcaccgacattatgctgagctcagcctccattttccatttgtctttcatctccattgaccgctactatgctgtgtgtgatccactgagatataaagccaagatgaatatcttggttatttgtgtgatgatcttcattagttggagtgtccctgctgtttttgcatttggaatgatctttctggagctaaacttcaaaggcgctgaagagatatattacaaacatgttcactgcagaggaggttgctctgtcttctttagcaaaatatctggggtactgacctttatgacttctttttatatacctggatctattatgttatgtgtctattacagaatatatcttatcgctaaagaacaggcaagattaattagtgatgccaatcagaagctccaaattggattggaaatgaaaaatggaatttcacaaagcaaagaaaggaaagctgtgaagacattggggattgtgatgggagttttcctaatatgctggtgccctttctttatctgtacagtcatggacccttttcttcactacattattccacctactttgaatgatgtattgatttggtttggctacttgaactctacatttaatccaatggtttatgcatttttctatccttggtttagaaaagcactgaagatgatgctgtttggtaaaattttccaaaaagattcatccaggtgtaaattatttttggaattgagttcatag

SEQ ID NO: 596 - protein, 339 aa, Homo sapiens
MMPFCHNIINISCVKNNWSNDVRASLYSLMVLIILTTLVGNLIVIVSISHFKQLHTPTNWLIHSMATVDFLLGCLVMPYSMVRSAEHCWYFGEVFCKIHTSTDIMLSSASIFHLSFISIDRYYAVCDPLRYKAKMNILVICVMIFISWSVPAVFAFGMIFLELNFKGAEEIYYKHVHCRGGCSVFFSKISGVLTFMTSFYIPGSIMLCVYYRIYLIAKEQARLISDANQKLQIGLEMKNGISQSKERKAVKTLGIVMGVFLICWCPFFICTVMDPFLHYIIPPTLNDVLIWFGYLNSTFNPMVYAFFYPWFRKALKMMLFGKIFQKDSSRCKLFLELSS

SEQ ID NO: 597 - DNA, 3109 bp, Homo sapiens
cattggacttcagcatgactactcagttgccagcttacgtggcaattttgcttttctatgtctcaagagccagctgccaggacactttcattgcagctgtttatgagcatgcagcgatattgcccaatgccaccctaacaccagtgtctcgtgaggaggctttggcattaatgaatcggaatctggacattttggaaggagcgatcacatcagcagcagatcagggtgcgcatattattgtgactccagaagatgctatttatggctggaacttcaacagggactctctctacccatatttggaggacatcccagaccctgaagtaaactggatcccctgtaataatcgtaacagatttggccagaccccagtacaagaaagactcagctgcctggccaagaacaactctatctatgttgtggcaaatattggggacaagaagccatgcgataccagtgatcctcagtgtccccctgatggccgttaccaatacaacactgatgtggtatttgattctcaaggaaaactggtggcacgctaccataagcaaaaccttttcatgggtgaaaatcaattcaatgtacccaaggagcctgagattgtgactttcaataccacctttggaagttttggcattttcacatgctttgatatactcttccatgatcctgctgttaccttggtgaaagatttccacgtggacaccatagtattcccaacagcttggatgaatgttttgccacatttgtcagctgttgaattccactcagcttgggctatgggcatgagggtcaatttccttgcatccaacatacattacccctcaaagaaaatgacaggaagtggcatctatgcacccaattcttcaagagcatttcattatgatatgaagacagaagagggaaaactcctcctctcgcaactggattcccacccatcccattctgcagtggtgaactggacttcctatgccagcagtatagaagcgctctcatcaggaaacaaggaatttaaaggcactgtctttttcgatgaattcacttttgtgaagctcacaggagttgcaggaaattatacagtttgtcagaaagatctctgctgtcatttaagctacaaaatgtctgagaacataccaaatgaagtgtacgctctaggggcatttgacggactgcacactgtggaagggcgctattatctacagatttgtaccctgttgaaatgtaaaacgactaatttaaacacttgcggtgactcagctgaaacagcttctaccaggtttgaaatgttctccctcagtggcactttcggaacccagtatgtctttcctgaggtgttgctgagtgaaaatcagcttgcacctggagaatttcaggtgtcaactgacggacgcttgtttagtctgaagccaacatccggacctgtcttaacagtaactctgtttgggaggttgtatgagaaggactgggcatcaaatgcttcatcaggcctcacagcacaagcaagaataataatgctaatagttatagcacctattgtatgctcattaagttggtagaatattgactttttctcttttttatttgggataatttaaaaaatgatggatgagaaaagaaagattggtccgggttaatattatcctctagtataagtgaattactagtttctctttatttagacaaacacacacacaccagataatataaacttaataaattatctgttaatgtagattttatttaaaaaactatatttgaacattggtctttcttggacgtgagctaattatatcaaataagtatcacaaatcttttacgcagaagaaataaaaactacgggtagaaaacataagaactatcataaaatttacttacaaggaggctgctcttgttaccacttttattatattacgtatcacttattcagctctgctgaaaatttccaatgactttgtttgtttgctcttttagttttttacctaaacaatacattttgattctcttgtgggttgataatgtctccccaaaatttacatgttgaagcacctcagaatgtgactgtatttggagacagggtctttaaagaggtaaaataaggtcattaggatagaccctaattcaatatgactgatgatcataaaagaagaggcgagtagggcacaacaggcacaaagggagaccataaggagacacagaggaaggacaactctttacaagctaagaagagagggcctcagaagaaaccaaccctgccaacaccttgatcttggacttccagcctccaaaactatgagaaataaatttctattgtttaagtcacccagtccatggtactttgttaggcagccctggcaaatgaatcaaagacccattcctgttcctctccccaccactactgttttctactgtaatctgaagcttcaacaaaaggcttacctggtaagaatattcagctggtctgggtcctcaagactccaatagacactcttaaagaaggattgctgatggattgatagtgaaaccattagatcattgaattcctctggaattagaaaaccagagagtcccattttaagaaattagatatttaatatagcattgtgtgttctattttagtaacagcagaatctcttgacattacacaactcagtgaaacaacatcatttaagccaaaatatctcccaactgactgatagactctgagcactaatatcatagtgctgtgatgatggacaattacatagtaccgataacagccatgcactgtgcaaagcatgcccttctgcacaggagagcaaggcacttgcagtagtgatctatgccagcaaaacatcattttgagacaaacatttttgtggcagatgtttttcctaaaaagtactatatcatccaagaaatatttgagtaaaatcccttgttcttttgggtgacattaactgacatttgctttttttcaagacctaatagaaaataagaaagcccataatgtatttagaaacaggaatcctcagagcaattctctgtattctcatataatttcaatgtaaaacagaaaacatattgatgtgttggtgataggcttgaattattaaaaacttcaaaaacaaaa

SEQ ID NO: 598 - protein, 513 aa, Homo sapiens
MTTQLPAYVAILLFYVSRASCQDTFIAAVYEHAAILPNATLTPVSREEALALMNRNLDILEGAITSAADQGAHIIVTPEDAIYGWNFNRDSLYPYLEDIPDPEVNWIPCNNRNRFGQTPVQERLSCLAKNNSIYVVANIGDKKPCDTSDPQCPPDGRYQYNTDVVFDSQGKLVARYHKQNLFMGENQFNVPKEPEIVTFNTTFGSFGIFTCFDILFHDPAVTLVKDFHVDTIVFPTAWMNVLPHLSAVEFHSAWAMGMRVNFLASNIHYPSKKMTGSGIYAPNSSRAFHYDMKTEEGKLLLSQLDSHPSHSAVVNWTSYASSIEALSSGNKEFKGTVFFDEFTFVKLTGVAGNYTVCQKDLCCHLSYKMSENIPNEVYALGAFDGLHTVEGRYYLQICTLLKCKTTNLNTCGDSAETASTRFEMFSLSGTFGTQYVFPEVLLSENQLAPGEFQVSTDGRLFSLKPTSGPVLTVTLFGRLYEKDWASNASSGLTAQARIIMLIVIAPIVCSLSW

SEQ ID NO: 599 - DNA, 1779 bp, Homo sapiens
atgtaaagtttttccagtgaaacaaaacgtaagaatctgagtttgtttttcaaagatcactaaattttagttatgattatatcacattttccaaaatgtgtggcagtttttgccctccttgctctgagtgttggtgcactggacacttttattgctgcagtatatgagcatgcggtgatattaccaaacagaacagaaacacctgtttcaaaagaagaagctttgctcctgatgaacaagaacatagatgttttggagaaagcagttaagctggcagcgaagcagggtgcacatatcattgtgaccccagaagatggaatctatggttggatcttcaccagggagagcatttacccctatctagaggatataccagaccctggagtgaactggattccatgtagagacccctggagaaatcactaaaatatagtaagtttgaggaaatgtctattgaattagattcggcaacacaccagtgcaacaaagactcagctgcctggccaaggacaactctatctatgtcgtggctaatattggggacaagaagccatgcaatgccagtgactctcagtgtccccctgatggccgttaccaatacaacactgatgtggtgtttgattctcagggaaaactgttggcacgctaccataagtacaatctttttgcacctgaaattcagtttgatttccccaaggattcagaacttgtgacttttgacactccctttgggaagtttggcatttttacttgctttgacattttttctcatgacccagctgtggtggtggtggatgagtttcaattgacagcattctctaccccacagcatggtacaacacgctgcccctcctctcggctgttcccttccattcagcatgggccaaggccatgggagtcaatctacttgctgcaaatacccacaacaccagcatgcacatgacagggagtggaatctacgccccagaagcagtcaaggtgtaccactatgacatggaaacagagagtggtcagctgttgctatcagaactgaagtctcggccccgccgtgagcccacctaccctgcagctgttgactggcatgcgtatgccagcagtgtcaagccattttcctctgaacagtcagattttctggggatgatttattttgatgagtttaccttcaccaagcttaagagaaatacaggaaattacacagcttgccagaaagatctgtgttgtcacttaacttacaagatgtctgagaagcgaacagacgagatctatgccctaggtgcttttgatggactgcacacagtagaaggccaatattacttacagatatgtgcattactgaagtgtcaaaccactgacctggaaacgtgtggagaacctgtggggtcagcttttaccaagtttgaagacttctccctcagtggcacatttggaacgcgttatgttttcccacagatcattctaagtgggagtcagcttgcccctgaaagacattatgagatttcaagagatggacgcttgaggagccgaagtggagcccctttgcctgtcttagttatggccctgtatggaagagtgtttgagaaggaccctccacgcttagggcagggatctgggaaattccagtgatctcctttagcagagcccttttaggattagcctggctaagaaaggaagaaaaaaaagagatccgttagtgtctgtttagaaaagatgttataaacttacagaaacaaatataataaactgaagcagatttgaaaagcaaaaaaaaaaaaaaaaaaa

SEQ ID NO: 600 - protein, 117 aa, Homo sapiens
MIISHFPKCVAVFALLALSVGALDTFIAAVYEHAVILPNRTETPVSKEEALLLMNKNIDVLEKAVKLAAKQGAHIIVTPEDGIYGWIFTRESIYPYLEDIPDPGVNWIPCRDPWRNH

SEQ ID NO: 601 - DNA, 1733 bp, Homo sapiens
atgtaaagtttttccagtgaaacaaaacgtaagaatctgagtttgtttttcaaagatcactaaattttagttatgattatatcacattttccaaaatgtgtggcagtttttgccctccttgctctgagtgttggtgcactggacacttttattgctgcagtatatgagcatgcggtgatattaccaaacagaacagaaacacctgtttcaaaagaagaagctttgctcctgatgaacaagaacatagatgttttggagaaagcagttaagctggcagcgaagcagggtgcacatatcattgtgaccccagaagatggaatctatggttggatcttcaccagggagagcatttacccctatctagaggatataccagaccctggagtgaactggattccatgtagagacccctggagattcggcaacacaccagtgcaacaaagactcagctgcctggccaaggacaactctatctatgtcgtggctaatattggggacaagaagccatgcaatgccagtgactctcagtgtccccctgatggccgttaccaatacaacactgatgtggtgtttgattctcagggaaaactgttggcacgctaccataagtacaatctttttgcacctgaaattcagtttgatttccccaaggattcagaacttgtgacttttgacactccctttgggaagtttggcatttttacttgctttgacattttttctcatgacccagctgtggtggtggtggatgagtttcaattgacagcattctctaccccacagcatggtacaacacgctgcccctcctctcggctgttcccttccattcagcatgggccaaggccatgggagtcaatctacttgctgcaaatacccacaacaccagcatgcacatgacagggagtggaatctacgccccagaagcagtcaaggtgtaccactatgacatggaaacagagagtggtcagctgttgctatcagaactgaagtctcggccccgccgtgagcccacctaccctgcagctgttgactggcatgcgtatgccagcagtgtcaagccattttcctctgaacagtcagattttctggggatgatttattttgatgagtttaccttcaccaagcttaagagaaatacaggaaattacacagcttgccagaaagatctgtgttgtcacttaacttacaagatgtctgagaagcgaacagacgagatctatgccctaggtgcttttgatggactgcacacagtagaaggccaatattacttacagatatgtgcattactgaagtgtcaaaccactgacctggaaacgtgtggagaacctgtggggtcagcttttaccaagtttgaagacttctccctcagtggcacatttggaacgcgttatgttttcccacagatcattctaagtgggagtcagcttgcccctgaaagacattatgagatttcaagagatggacgcttgaggagccgaagtggagcccctttgcctgtcttagttatggccctgtatggaagagtgtttgagaaggaccctccacgcttagggcagggatctgggaaattccagtgatctcctttagcagagcccttttaggattagcctggctaagaaaggaagaaaaaaaagagatccgttagtgtctgtttagaaaagatgttataaacttacagaaacaaatataataaactgaagcagatttgaaaagcaaaaaaaaaaaaaaaaaaa

SEQ ID NO: 602 - protein, 274 aa, Homo sapiens
MIISHFPKCVAVFALLALSVGALDTFIAAVYEHAVILPNRTETPVSKEEALLLMNKNIDVLEKAVKLAAKQGAHIIVTPEDGIYGWIFTRESIYPYLEDIPDPGVNWIPCRDPWRFGNTPVQQRLSCLAKDNSIYVVANIGDKKPCNASDSQCPPDGRYQYNTDVVFDSQGKLLARYHKYNLFAPEIQFDFPKDSELVTFDTPFGKFGIFTCFDIFSHDPAVVVVDEFQLTAFSTPQHGTTRCPSSRLFPSIQHGPRPWESIYLLQIPTTPACT

SEQ ID NO: 603 - DNA, 1932 bp, Homo sapiens
atgtaaagtttttccagtgaaacaaaacgtaagaatctgagtttgtttttcaaagatcactaaattttagttatgattatatcacattttccaaaatgtgtggcagtttttgccctccttgctctgagtgttggtgcactggacacttttattgctgcagtatatgagcatgcggtgatattaccaaacagaacagaaacacctgtttcaaaagaagaagctttgctcctgatgaacaagaacatagatgttttggagaaagcagttaagctggcagcgaagcagggtgcacatatcattgtgaccccagaagatggaatctatggttggatcttcaccagggagagcatttacccctatctagaggatataccagaccctggagtgaactggattccatgtagagacccctggaggaagagtaaaaagatgaatgagcctgtttccaaagagctttgctatcactgtcattcagaatgcaatcaatatggccaatggaaattgtataggacttgaaaaaggaagccctacttctgggaccacattttacgaccacctagctgagtgataaatcactaaaatatagtaagtttgaggaaatgtctattgaattagattcggcaacacaccagtgcaacaaagactcagctgcctggccaaggacaactctatctatgtcgtggctaatattggggacaagaagccatgcaatgccagtgactctcagtgtccccctgatggccgttaccaatacaacactgatgtggtgtttgattctcagggaaaactgttggcacgctaccataagtacaatctttttgcacctgaaattcagtttgatttccccaaggattcagaacttgtgacttttgacactccctttgggaagtttggcatttttacttgctttgacattttttctcatgacccagctgtggtggtggtggatgagtttcaattgacagcattctctaccccacagcatggtacaacacgctgcccctcctctcggctgttcccttccattcagcatgggccaaggccatgggagtcaatctacttgctgcaaatacccacaacaccagcatgcacatgacagggagtggaatctacgccccagaagcagtcaaggtgtaccactatgacatggaaacagagagtggtcagctgttgctatcagaactgaagtctcggccccgccgtgagcccacctaccctgcagctgttgactggcatgcgtatgccagcagtgtcaagccattttcctctgaacagtcagattttctggggatgatttattttgatgagtttaccttcaccaagcttaagagaaatacaggaaattacacagcttgccagaaagatctgtgttgtcacttaacttacaagatgtctgagaagcgaacagacgagatctatgccctaggtgcttttgatggactgcacacagtagaaggccaatattacttacagatatgtgcattactgaagtgtcaaaccactgacctggaaacgtgtggagaacctgtggggtcagcttttaccaagtttgaagacttctccctcagtggcacatttggaacgcgttatgttttcccacagatcattctaagtgggagtcagcttgcccctgaaagacattatgagatttcaagagatggacgcttgaggagccgaagtggagcccctttgcctgtcttagttatggccctgtatggaagagtgtttgagaaggaccctccacgcttagggcagggatctgggaaattccagtgatctcctttagcagagcccttttaggattagcctggctaagaaaggaagaaaaaaaagagatccgttagtgtctgtttagaaaagatgttataaacttacagaaacaaatataataaactgaagcagatttgaaaagcaaaaaaaaaaaaaaaaaaa

SEQ ID NO: 604 - protein, 147 aa, Homo sapiens
MIISHFPKCVAVFALLALSVGALDTFIAAVYEHAVILPNRTETPVSKEEALLLMNKNIDVLEKAVKLAAKQGAHIIVTPEDGIYGWIFTRESIYPYLEDIPDPGVNWIPCRDPWRKSKKMNEPVSKELCYHCHSECNQYGQWKLYRT

SEQ ID NO: 605 - DNA, 2034 bp, Homo sapiens
aaaccttggccatggtcacttcctcttttccaatctctgtggcagtttttgccctaataaccctgcaggttggtactcaggacagttttatagctgcagtgtatgaacatgctgtcattttgccaaataaaacagaaacaccagtttctcaggaggatgccttgaatctcatgaacgagaatatagacattctggagacagcgatcaagcaggcagctgagcagggtgctcgaatcattgtgactccagaagatgcactttatggatggaaatttaccagggaaactgttttcccttatctggaggatatcccagaccctcaggtgaactggattccgtgtcaagacccccacagatttggtcacacaccagtacaagcaagactcagctgcctggccaaggacaactctatctatgtcttggcaaatttgggggacaaaaagccatgtaattcccgtgactccacatgtcctcctaatggctactttcaatacaataccaatgtggtgtataatacagaaggaaaactcgtggcacgttaccataagtaccacctgtactctgagcctcagtttaatgtccctgaaaagccggagttggtgactttcaacaccgcatttggaaggtttggcattttcacgtgctttgatatattcttctatgatcctggtgttaccctggtgaaagatttccatgtggacaccatactgtttcccacagcttggatgaacgttttgccccttttgacagctattgaattccattcagcttgggcaatgggaatgggagttaatcttcttgtggccaacacacatcatgtcagcctaaatatgacaggaagtggtatttatgcaccaaatggtcccaaagtgtatcattatgacatgaagacagagttgggaaaacttctcctttcagaggtggattcacatcccctatcctcgcttgcctacccaacagctgttaattggaatgcctacgccaccaccatcaaaccatttccagtacagaaaaacactttcaggggatttatttccagggatgggttcaacttcacagaactttttgaaaatgcaggaaaccttacagtctgtcaaaaggagctttgctgtcatttaagctacagaatgttacaaaaagaagagaatgaagtatacgttctaggagcttttacaggattacatggccgaaggagaagagagtactggcaggtctgcacaatgctgaagtgcaaaactactaatttgacaacttgtggacggccagtagaaactgcttctacaagatttgaaatgttctccctcagtggcacatttggaacagagtatgtttttcctgaagtgctacttaccgaaattcatctgtcacctggaaaatttgaggtgctgaaagatgggcgtttggtaaacaagaatggatcatctgggcctatactaacagtgtcactctttgggaggtggtacacaaaggactcactttacagctcatgtgggaccagcaattcagcaataacttacctgctaatattcatattattaatgatcatagctttgcaaaatattgtaatgttatagggcgtctctttatcactcagcttctgcatcatatgcttggctgaatgtgtttatcggcttcccaagtttactaagaaactttgaagggctatttcagtagtatagaccagtgagtcctaaatattttttctcatcaataattattttttaagtattatgataatgttgtccatttttttggctactctgaaatgttgcagtgtggaacaatggaaagagcctgggtgtttgggtcagataaatgaagatcaaactccagctccagcctcatttgcttgagactttgtgtgtatgggggacttgtatgtatgggagtgaggagtttcagggccattgcaaacatagctgtgcccttgaagagaatagtaatgatgggaatttagaggtttatgactgaattccctttgacattaaagactatttgaattcaaaaaaaaaaaaaaaaaaaaaaaaaaaaaaa

SEQ ID NO: 606 - protein, 520 aa, Homo sapiens
MVTSSFPISVAVFALITLQVGTQDSFIAAVYEHAVILPNKTETPVSQEDALNLMNENIDILETAIKQAAEQGARIIVTPEDALYGWKFTRETVFPYLEDIPDPQVNWIPCQDPHRFGHTPVQARLSCLAKDNSIYVLANLGDKKPCNSRDSTCPPNGYFQYNTNVVYNTEGKLVARYHKYHLYSEPQFNVPEKPELVTFNTAFGRFGIFTCFDIFFYDPGVTLVKDFHVDTILFPTAWMNVLPLLTAIEFHSAWAMGMGVNLLVANTHHVSLNMTGSGIYAPNGPKVYHYDMKTELGKLLLSEVDSHPLSSLAYPTAVNWNAYATTIKPFPVQKNTFRGFISRDGFNFTELFENAGNLTVCQKELCCHLSYRMLQKEENEVYVLGAFTGLHGRRRREYWQVCTMLKCKTTNLTTCGRPVETASTRFEMFSLSGTFGTEYVFPEVLLTEIHLSPGKFEVLKDGRLVNKNGSSGPILTVSLFGRWYTKDSLYSSCGTSNSAITYLLIFILLMIIALQNIVML

SEQ ID NO: 607 - DNA, 1976 bp, Homo sapiens
gactggaggagcacaggccttggaaaggaaagcagctgagatccagaggagtggaaggctcccccttgactaaagctaaacaccagtttctcaggaggatgccttgaatctcatgaacgagaatatagacattctggagacagcgatcaagcaggcagctgagcagggtgctcgaatcattgtgactccagaagatgcactttatggatggaaatttaccagggaaactgttttcccttatctggaggatatcccagaccctcaggtgaactggattccgtgtcaagacccccacagatttggtcacacaccagtacaagcaagactcagctgcctggccaaggacaactctatctatgtcttggcaaatttgggggacaaaaagccatgtaattcccgtgactccacatgtcctcctaatggctactttcaatacaataccaatgtggtgtataatacagaaggaaaactcgtggcacgttaccataagtaccacctgtactctgagcctcagtttaatgtccctgaaaagccggagttggtgactttcaacaccgcatttggaaggtttggcattttcacgtgctttgatatattcttctatgatcctggtgttaccctggtgaaagatttccatgtggacaccatactgtttcccacagcttggatgaacgttttgccccttttgacagctattgaattccattcagcttgggcaatgggaatgggagttaatcttcttgtggccaacacacatcatgtcagcctaaatatgacaggaagtggtatttatgcaccaaatggtcccaaagtgtatcattatgacatgaagacagagttgggaaaacttctcctttcagaggtggattcacatcccctatcctcgcttgcctacccaacagctgttaattggaatgcctacgccaccaccatcaaaccatttccagtacagaaaaacactttcaggggatttatttccagggatgggttcaacttcacagaactttttgaaaatgcaggaaaccttacagtctgtcaaaaggagctttgctgtcatttaagctacagaatgttacaaaaagaagagaatgaagtatacgttctaggagcttttacaggattacatggccgaaggagaagagagtactggcaggtctgcacaatgctgaagtgcaaaactactaatttgacaacttgtggacggccagtagaaactgcttctacaagatttgaaatgttctccctcagtggcacatttggaacagagtatgtttttcctgaagtgctacttaccgaaattcatctgtcacctggaaaatttgaggtgctgaaagatgggcgtttggtaaacaagaatggatcatctgggcctatactaacagtgtcactctttgggaggtggtacacaaaggactcactttacagctcatgtgggaccagcaattcagcaataacttacctgctaatattcatattattaatgatcatagctttgcaaaatattgtaatgttatagggcgtctctttatcactcagcttctgcatcatatgcttggctgaatgtgtttatcggcttcccaagtttactaagaaactttgaagggctatttcagtagtatagaccagtgagtcctaaatattttttctcatcaataattattttttaagtattatgataatgttgtccatttttttggctactctgaaatgttgcagtgtggaacaatggaaagagcctgggtgtttgggtcagataaatgaagatcaaactccagctccagcctcatttgcttgagactttgtgtgtatgggggacttgtatgtatgggagtgaggagtttcagggccattgcaaacatagctgtgcccttgaagagaatagtaatgatgggaatttagaggtttatgactgaattccctttgacattaaagactatttgaattcaaaaaaaaaaaaaaaaaaaaaaaaaaaaaaa

SEQ ID NO: 608 - protein, 467 aa, Homo sapiens
MNENIDILETAIKQAAEQGARIIVTPEDALYGWKFTRETVFPYLEDIPDPQVNWIPCQDPHRFGHTPVQARLSCLAKDNSIYVLANLGDKKPCNSRDSTCPPNGYFQYNTNVVYNTEGKLVARYHKYHLYSEPQFNVPEKPELVTFNTAFGRFGIFTCFDIFFYDPGVTLVKDFHVDTILFPTAWMNVLPLLTAIEFHSAWAMGMGVNLLVANTHHVSLNMTGSGIYAPNGPKVYHYDMKTELGKLLLSEVDSHPLSSLAYPTAVNWNAYATTIKPFPVQKNTFRGFISRDGFNFTELFENAGNLTVCQKELCCHLSYRMLQKEENEVYVLGAFTGLHGRRRREYWQVCTMLKCKTTNLTTCGRPVETASTRFEMFSLSGTFGTEYVFPEVLLTEIHLSPGKFEVLKDGRLVNKNGSSGPILTVSLFGRWYTKDSLYSSCGTSNSAITYLLIFILLMIIALQNIVML

SEQ ID NO: 609 - DNA, 2440 bp, Homo sapiens
ggccgggcggatcgctgcctgcagggagtcggggatgccaggttccagctgagcagcggccgcccgccagagtgccagtggctccttggaggtcgagtccaaggacgtggcttgaagccgggagctggggcgccggagtccacgcaccggggatggaggcgctgggtgacctggagggaccacgcgcaccaggaggtgatgatcctgcaggaagtgcaggagagacccccgggtggctttcgagagaacaggtttttgtactgatatcggcagcttcggtgaacttaggttccatgatgtgctattctatacttggaccgtttttccccaaagaggctgaaaagaagggagccagcaatacaattatcggtatgatctttggatgttttgctttgttcgagttgctggcatccttggtatttggaaactatcttgtacatattggagcaaaatttatgtttgtagcaggaatgtttgtctcaggaggagttacaattctctttggtgtattggaccgagttccagatgggccagtatttattgctatgtgttttctagtgagagtaatggatgcagttagctttgctgcagcaatgactgcatcttcttctatcctggcaaaggcttttccaaataacgtggctacggtattgggaagtcttgagactttttctggactggggctaatactaggtcctcctgtaggtggctttttgtatcaatcctttggctatgaagtgccttttattgttctgggatgcgtcgttttgctgatggtaccactcaatatgtatattttacccaattacgagtctgatccaggtgaacactcattctggaaactgatcgctttacccaaagttggccttatagccttcgtcatcaactcactcagctcgtgttttggcttcctcgatcctactctgtctctctttgttttggagaagttcaatttaccagctggatatgtgggactagtattcctgggtatggcactgtcctatgccatctcttcaccactatttggtctcctaagtgataaaaggccacctctaaggaaatggcttctggtgtttggcaacttaatcacagccgggtgctacatgctcttagggcctgtcccaatcttgcatattaaaagtcagctctggctgctggtgctgatattagttgtaagtggcctctctgctggaatgagtataattccaactttcccggaaattctcagttgtgcacatgaaaatgggtttgaagagggattaagtacattgggacttgtatcaggtctttttagtgcaatgtggtcaattggtgcttttatgggaccaacgctgggtggatttctgtatgagaaaattggttttgaatgggcagcagctatacaaggtctatgggctctgataagtggattagccatgggcttgttttatctactggagtattcaaggagaaaaaggtctaaatctcaaaacatcctcagcacagaggaggaacgaactactctcttgcctaatgaaacctagtccgatggatcctggattgatacaaggttgagaaatgaatgctcctggccttaaacatcaccgtaggaagggtttttaaaattttacgcgcaaaactccgtggaccccgtgccagtgtcttggaagtgtcaacgtgtttttggatgatcctgtattgggctgtacttactgtgatactgaaaagctgtcctgctgaagcagctatatttgaaatattaagtatgaaaggagtaattaaaaacaagcaaaacaaaacaagacttagtttttaaatgaccaaacttgtccttaaagatgttgttattaactcgagttagttcttatttcctctgtttattttttattctaagtacactgattctgtgaatgtaccttttttattaacagggaaagaaatgaattaatttgatatgctctaaatacataaaggtgcttcaaaatatgtagaaacattactatgaaatcagtttttaaaagatatactttctctttgtcctgaggtttttcggtcttgttcaaaaggaagaattcttgcctgccatacagaaactctctagcactccctgaccttaagcttttctaaaaattctgtttgtgtgaaaagtacaagaataacaatacttacaacttccatttttgtaacctacgttcacttatgatctggatttataaacattacttggtataacgtttttcatttcctttaatgtctctgttttttggctctaccatctgttttgtttttgtttttatctatatcttggtagatgtatttcatccctagagcaggtcagcctccttcccctaatgcgaatgcttgttttgttagggaagggcttcctccaacttcgtgtgaaattgtgatgttgaagtgaataaatgtctattgtgtaactctcatgaaaaaaaaaaaaaaa

SEQ ID NO: 610 - protein, 456 aa, Homo sapiens
MEALGDLEGPRAPGGDDPAGSAGETPGWLSREQVFVLISAASVNLGSMMCYSILGPFFPKEAEKKGASNTIIGMIFGCFALFELLASLVFGNYLVHIGAKFMFVAGMFVSGGVTILFGVLDRVPDGPVFIAMCFLVRVMDAVSFAAAMTASSSILAKAFPNNVATVLGSLETFSGLGLILGPPVGGFLYQSFGYEVPFIVLGCVVLLMVPLNMYILPNYESDPGEHSFWKLIALPKVGLIAFVINSLSSCFGFLDPTLSLFVLEKFNLPAGYVGLVFLGMALSYAISSPLFGLLSDKRPPLRKWLLVFGNLITAGCYMLLGPVPILHIKSQLWLLVLILVVSGLSAGMSIIPTFPEILSCAHENGFEEGLSTLGLVSGLFSAMWSIGAFMGPTLGGFLYEKIGFEWAAAIQGLWALISGLAMGLFYLLEYSRRKRSKSQNILSTEEERTTLLPNET

SEQ ID NO: 611 - DNA, 532 bp, Homo sapiens
ctctttccctgccgccgccgagtcgcgcggaggcggaggcttgggtgcgttcaagattcaacttcacccgtaacccaccgccatggccgaggaaggcattgctgctggaggtgtaatggacgttaatactgctttacaagaggttctgaagactgccctcatccacgatggcctagcacgtggaattcgcgaagctgccaaagccttagacaagcgccaagcccatctttgtgtgcttgcatccaactgtgatgagcctatgtatgtcaagttggtggaggccctttgtgctgaacaccaaatcaacctaattaaggttgatgacaacaagaaactaggagaatgggtaggcctttgtaaaattgacagagaggggaaaccccgtaaagtggttggttgcagttgtgtagtagttaaggactatggcaaggagtctcaggccaaggatgtcattgaagagtatttcaaatgcaagaaatgaagaaataaatctttggctcacaaaaaaaaaaaaaaaaaaaaaaaaaaaaaa

SEQ ID NO: 612 - protein, 132 aa, Homo sapiens [sequence omitted]

SEQ ID NO: 613 - DNA, 2287 bp, Homo sapiens
aagaagaattgacttccttctctgcagagccggctctggtctcttctcttgaagcagatgcgaaggctccccgaatgagaaagaatactcggaatcagcggtgaattgcagtgatctttcagagaaagcgcctgttcaactttgtcctctctcagagactcagagccttggggcactgagggatgccagttctgcctgttcatctggaacctggatctaaggagggaagaggcgttgcccctgctggcatagtcaggtattgaacgggctgagcttttcatgatggttcctgctgacctggaaacatcttaaatggaagggcgtgagcgcttggtccatgcagtgaagctcttccaacctgggtcaacgaaaacggagaagaaatggcccaagaaatagatctgagtgctctcaaggagttagaacgcgaggccattctccaggtcctgtaccgagaccaggcggttcaaaacacagaggaggagaggacacggaaactgaaaacacacctgcagcatctccggtggaaaggagcgaagaacacggactgggagcacaaagagaagtgctgtgcgcgctgccagcaggtgctggggttcctgctgcaccggggcgccgtgtgccggggctgcagccaccgcgtgtgtgcccagtgccgagtgttcctgagggggacccatgcctggaagtgcacggtgtgcttcgaggacaggaatgtcaaaataaaaactggagaatggttctatgaggaacgagccaagaaatttccaactggaggcaaacatgagacagttggagggcagctcttgcaatcttatcagaagctgagcaaaatttctgtggttcctcctactccacctcctgtcagcgagagccagtgcagccgcagtcctggcaggaaggtcagtgcaccagatattctgaaacctctcaatcaagaggatcccaaatgctctactaaccctattttgaagcaacagaatctcccatccagtccggcacccagtaccatattctctggaggttttagacacggaagtttaattagcattgacagcacctgtacagagatgggcaattttgacaatgctaatgtcactggagaaatagaatttgccattcattattgcttcaaaacccattctttagaaatatgcatcaaggcctgtaagaaccttgcctatggagaagaaaagaagaaaaagtgcaatccgtatgtgaagacctacctgttgcccgacagatcctcccagggaaagcgcaagactggagtccaaaggaacaccgtggacccgacctttcaggagaccttgaagtatcaggtggcccctgcccagctggtgacccggcagctgcaggtctcggtgtggcatctgggcacgctggcccggagagtgtttcttggagaagtgatcattcctctggccacgtgggactttgaagacagcacaacacagtccttccgctggcatccgctccgggccaaggcggagaaatacgaagacagcgttcctcagagtaatggagagctcacagtccgggctaagctggttctcccttcacggcccagaaaactccaagaggctcaagaagggacagatcagccatcacttcatggtcaactttgtttggtagtgctaggagccaagaatttacctgtgcggccagatggcaccttgaactcatttgttaagggctgtctcactctgccagaccaacaaaaactgagactgaagtcgccagtcctgaggaagcaggcttgcccccagtggaaacactcatttgtcttcagtggcgtaaccccagctcagctgaggcagtcaagcttggagttaactgtctgggatcaggccctctttggaatgaacgaccgcttgcttggaggaaccagacttggttcaaagggagacacagctgttggcggggatgcatgctcactatcgaagctccagtggcagaaagtcctttccagccccaatctatggacagacatgactcttgtcctgcactgacatgaaggcctcaaggttccaggttgcagcaggcgtgaggcactgtgcgtctgcagaggggctacgaaccaggtgcagggtcccagctggagacccctttgaccttgagcagtctccatctgcggccctgtcccatggcttaaccgcctattggtatctgtgtatatttacgttaaacacaattatgttacctaagcctctggtgggttatctcctctttgagatgtagaaaatggccagattttaataaacgttgttacccatgaaaaaaaaaa

SEQ ID NO: 614 - protein, 542 aa, Homo sapiens
MAQEIDLSALKELEREAILQVLYRDQAVQNTEEERTRKLKTHLQHLRWKGAKNTDWEHKEKCCARCQQVLGFLLHRGAVCRGCSHRVCAQCRVFLRGTHAWKCTVCFEDRNVKIKTGEWFYEERAKKFPTGGKHETVGGQLLQSYQKLSKISVVPPTPPPVSESQCSRSPGRKVSAPDILKPLNQEDPKCSTNPILKQQNLPSSPAPSTIFSGGFRHGSLISIDSTCTEMGNFDNANVTGEIEFAIHYCFKTHSLEICIKACKNLAYGEEKKKKCNPYVKTYLLPDRSSQGKRKTGVQRNTVDPTFQETLKYQVAPAQLVTRQLQVSVWHLGTLARRVFLGEVIIPLATWDFEDSTTQSFRWHPLRAKAEKYEDSVPQSNGELTVRAKLVLPSRPRKLQEAQEGTDQPSLHGQLCLVVLGAKNLPVRPDGTLNSFVKGCLTLPDQQKLRLKSPVLRKQACPQWKHSFVFSGVTPAQLRQSSLELTVWDQALFGMNDRLLGGTRLGSKGDTAVGGDACSLSKLQWQKVLSSPNLWTDMTLVLH

SEQ ID NO: 615 - DNA, 3166 bp, Homo sapiens
ggcgcggcaggaggacgaggcagggcgggcgggcgctctaagggttctgctctgactccaggttgggacagcgtcttcgctgctgctggatagtcgtgttttcggggatcgaggatactcaccagaaaccgaaaatgccgaaaccaatcaatgtccgagttaccaccatggatgcagagctggagtttgcaatccagccaaatacaactggaaaacagctttttgatcaggtggtaaagactatcggcctccgggaagtgtggtactttggcctccactatgtggataataaaggatttcctacctggctgaagctggataagaaggtgtctgcccaggaggtcaggaaggagaatcccctccagttcaagttccgggccaagttctaccctgaagatgtggctgaggagctcatccaggacatcacccagaaacttttcttcctccaagtgaaggaaggaatccttagcgatgagatctactgcccccctgagactgccgtgctcttggggtcctacgctgtgcaggccaagtttggggactacaacaaagaagtgcacaagtctgggtacctcagctctgagcggctgatccctcaaagagtgatggaccagcacaaacttaccagggaccagtgggaggaccggatccaggtgtggcatgcggaacaccgtgggatgctcaaagataatgctatgttggaatacctgaagattgctcaggacctggaaatgtatggaatcaactatttcgagataaaaaacaagaaaggaacagacctttggcttggagttgatgcccttggactgaatatttatgagaaagatgataagttaaccccaaagattggctttccttggagtgaaatcaggaacatctctttcaatgacaaaaagtttgtcattaaacccatcgacaagaaggcacctgactttgtgttttatgccccacgtctgagaatcaacaagcggatcctgcagctctgcatgggcaaccatgagttgtatatgcgccgcaggaagcctgacaccatcgaggtgcagcagatgaaggcccaggcccgggaggagaagcatcagaagcagctggagcggcaacagctggaaacagagaagaaaaggagagaaaccgtggagagagagaaagagcagatgatgcgcgagaaggaggagttgatgctgcggctgcaggactatgaggagaagacaaagaaggcagagagagagctctcggagcagattcagagggccctgcagctggaggaggagaggaagcgggcacaggaggaggccgagcgcctagaggctgaccgtatggctgcactgcgggctaaggaggagctggagagacaggcggtggatcagataaagagccaggagcagctggctgcggagcttgcagaatacactgccaagattgccctcctggaagaggcgcggaggcgcaaggaggatgaagttgaagagtggcagcacagggccaaagaagcccaggatgacctggtgaagaccaaggaggagctgcacctggtgatgacagcacccccgcccccaccaccccccgtgtacgagccggtgagctaccatgtccaggagagcttgcaggatgagggcgcagagcccacgggctacagcgcggagctgtctagtgagggcatccgggatgaccgcaatgaggagaagcgcatcactgaggcagagaagaacgagcgtgtgcagcggcagctgctgacgctgagcagcgagctgtcccaggcccgagatgagaataagaggacccacaatgacatcatccacaacgagaacatgaggcaaggccgggacaagtacaagacgctgcggcagatccggcagggcaacaccaagcagcgcatcgacgagttcgaggccctgtaacagccaggccaggaccaagggcagaggggtgctcatagcgggcgctgccagccccgccacgcttgtgtctttagtgctccaagtctaggaactccctcagatcccagttcctttagaaagcagttacccaacagaaacattctgggctgggaaccagggaggcgccctggtttgttttccccagttgtaatagtgccaagcaggcctgattctcgcgattattctcgaatcacctcctgtgttgtgctgggagcaggactgattgaattacggaaaatgcctgtaaagtctgagtaagaaacttcatgctggcctgtgtgatacaagagtcagcatcattaaaggaaacgtggcaggacttccatctgtgccatacttgttctgtattcgaaatgagctcaaattgattttttaatttctatgaaggatccatctttgtatatttacatgcttagaggggtgaaaattattttggaaattgagtctgaagcactctcgcacacacagtgattccctcctcccgtcactccacgcagctggcagagagcacagtgatcaccagcgtgagtggtggaggaggacacttggatttttttttttgttttttttttttttgcttaacagttttagaatacattgtacttatacaccttattaatgatcagctatatactatttatatacaagtgataatacagatttgtaacattagttttaaaaagggaaagttttgttctgtatattttgttaccttttacagaataaaagaattacatatgaaaaaccctctaaaccatggcacttgatgtgatgtggcaggagggcagtggtggagctggacctgcctgctgcagtcacgtgtaaacaggattattattagtgttttatgcatgtaatggactatgcacacttttaattttgtcagattcacacatgccactatgagctttcagactccagctgtgaagagactctgtttgcttgtgtttgtttgtttgcagtctctctctgccatggccttggcaggctgctggaaggcagcttgtggaggccgttggttccgcccactcattccttctcgtgcactgctttctccttcacagctaagatgccatgtgcaggtggattccatgccgcagacatgaaataaaagctttgcaaaggcacgaaaaaaaaaaaaaaaaaaaaaaaaaaaaaaaaaaaaaaaaaaaaaaaaaaaaaaaaaaaaaaaaaaaaaaaaaaaaaaaaaaaaaaaaaaaaaaaaaaaaaaa

SEQ ID NO: 616 - protein, 586 aa, Homo sapiens
MPKPINVRVTTMDAELEFAIQPNTTGKQLFDQVVKTIGLREVWYFGLHYVDNKGFPTWLKLDKKVSAQEVRKENPLQFKFRAKFYPEDVAEELIQDITQKLFFLQVKEGILSDEIYCPPETAVLLGSYAVQAKFGDYNKEVHKSGYLSSERLIPQRVMDQHKLTRDQWEDRIQVWHAEHRGMLKDNAMLEYLKIAQDLEMYGINYFEIKNKKGTDLWLGVDALGLNIYEKDDKLTPKIGFPWSEIRNISFNDKKFVIKPIDKKAPDFVFYAPRLRINKRILQLCMGNHELYMRRRKPDTIEVQQMKAQAREEKHQKQLERQQLETEKKRRETVEREKEQMMREKEELMLRLQDYEEKTKKAERELSEQIQRALQLEEERKRAQEEAERLEADRMAALRAKEELERQAVDQIKSQEQLAAELAEYTAKIALLEEARRRKEDEVEEWQHRAKEAQDDLVKTKEELHLVMTAPPPPPPPVYEPVSYHVQESLQDEGAEPTGYSAELSSEGIRDDRNEEKRITEAEKNERVQRQLLTLSSELSQARDENKRTHNDIIHNENMRQGRDKYKTLRQIRQGNTKQRIDEFEAL

SEQ ID NO: 617 - DNA, 960 bp, Homo sapiens
atgccattcccaaactgctcagcccccagcactgtggtggccacagctgtgggtgtcttgctggggctggagtgtgggctgggtctgctgggcaacgcggtggcgctgtggaccttcctgttccgggtcagggtgtggaagccgtacgctgtctacctgctcaacctggccctggctgacctgctgttggctgcgtgcctgcctttcctggccgccttctacctgagcctccaggcttggcatctgggccgtgtgggctgctgggccctgcgcttcctgctggacctcagccgcagcgtggggatggccttcctggccgccgtggctttggaccggtacctccgtgtggtccaccctcggcttaaggtcaacctgctgtctcctcaggcggccctgggggtctcgggcctcgtctggctcctgatggtcgccctcacctgcccgggcttgctcatctctgaggccgcccagaactccaccaggtgccacagtttctactccagggcagacggctccttcagcatcatctggcaggaagcactctcctgccttcagtttgtcctcccctttggcctcatcgtgttctgcaatgcaggcatcatcagggctctccagaaaagactccgggagcctgagaaacagcccaagcttcagcgggcccaggcactggtcaccttggtggtggtgctgtttgctctgtgctttctgccctgcttcctggccagagtcctgatgcacatcttccagaatctggggagctgcagggccctttgtgcagtggctcatacctcggatgtcacgggcagcctcacctacctgcacagtgtcgtcaaccccgtggtatactgcttctccagccccaccttcaggagctcctatcggagggtcttccacaccctccgaggcaaagggcaggcagcagagcccccagatttcaaccccagagactcctattcctga

SEQ ID NO: 618 - protein, 319 aa, Homo sapiens
MPFPNCSAPSTVVATAVGVLLGLECGLGLLGNAVALWTFLFRVRVWKPYAVYLLNLALADLLLAACLPFLAAFYLSLQAWHLGRVGCWALRFLLDLSRSVGMAFLAAVALDRYLRVVHPRLKVNLLSPQAALGVSGLVWLLMVALTCPGLLISEAAQNSTRCHSFYSRADGSFSIIWQEALSCLQFVLPFGLIVFCNAGIIRALQKRLREPEKQPKLQRAQALVTLVVVLFALCFLPCFLARVLMHIFQNLGSCRALCAVAHTSDVTGSLTYLHSVVNPVVYCFSSPTFRSSYRRVFHTLRGKGQAAEPPDFNPRDSYS

SEQ ID NO: 619 - DNA, 1543 bp, Homo sapiens
aagacagaaagtccgttggaaccgtcggctgctctctggtctctggagatgaggcgggaggacttggggacagctgtggggacacggcccagatgttctggtcccagcagaagtgactggcggggaccaggatgctggagggtcagctcgaggccagggagcccaaggagggcacccacccagaggacccgtgcccgggagctggggctgccatggagaagacacctgcagcagccgaggtccccagggaggacagcaatgccggggagatgccgtcattacagcagcagatcaccagcctccaccaagagctcgggagacagcagtcgctgtgggctgatattcacagaaaactccagagtcatatggatgccttgaggaagcagaaccgggagctccgagaagagctgagaggcctgcagcggcagcagtgggaagccgggaagaaacccgcagcgtccccacacgcggggcgagaatcacacactctggcattggaacctgcttttggaaaaatttcacctctgtcagctgatgaagagacaacgcccaaatacgctggccgcaagagtcagagtgcgactctcctgggacaaagatggtcatctaaccacttagctcctccaaagccaatgagtttaaagacagaaagaattaactcggggaaaacaccaccacaggaagatagagagaaaagtcctcccgggagacgtcaagacagaagtccagcacccactggaaggccgactcccggtgcagaaagacgggaggtgtctgaagacggaaagattatgcatccatcttcccgaagtctgcaaaactccggtggcagaaaatcaccagtgcaggcttcccaggccgccacgctgcaggagcagacggcagcagccggagttgctgacagaagctcatcagtcttagggagttctgaaggcggatttctcagccgcgttcaagctgaagagttcgccagttcttccccagacagtgcagagcggcagaaaaattctaccccaatggctccaaagaaatcgtgtttcccaatgggacagtgaaacatttcaaggatggacaggaagagaccttatttcctgatgggacaatcgtaagggtggaaaggaacggcgacaaaaccattgtgctcagcaacgggcagaaagaaatccacacagcccggttcaagaggagggagtacccggatggcaccgtcaagactgtgtattgcagcggctgtcaggaaaccaagtatgcctccgggagggttaagatcaaagatgaagctggaaatgtcgtcctggacgagaagcagatgagccctcaacacgcagcatcacatgggaaatgccaattgcagatttttgctaaaacagacaaaaactaataacatattagctgccctaaatgatcttggagagccaccaaaactttaggactacccaagtcatctagaaattgcaaaggaaaagacattctctcccctatttaggaaacttggttagagcagcacacgtcagagaacagaaggctcacaaaagaacgattt

SEQ ID NO: 620 - protein, 307 aa, Homo sapiens
MLEGQLEAREPKEGTHPEDPCPGAGAAMEKTPAAAEVPREDSNAGEMPSLQQQITSLHQELGRQQSLWADIHRKLQSHMDALRKQNRELREELRGLQRQQWEAGKKPAASPHAGRESHTLALEPAFGKISPLSADEETTPKYAGRKSQSATLLGQRWSSNHLAPPKPMSLKTERINSGKTPPQEDREKSPPGRRQDRSPAPTGRPTPGAERREVSEDGKIMHPSSRSLQNSGGRKSPVQASQAATLQEQTAAAGVADRSSSVLGSSEGGFLSRVQAEEFASSSPDSAERQKNSTPMAPKKSCFPMGQ

SEQ ID NO: 621 - DNA, 2011 bp, Homo sapiens
cccatgcctcaattggtttcttttagggagctacaaatttacgtgttcactggtgattgatcttttcatccagcacaatggacagaagtctaaggaacgtccttgtggtttcctttgggttcctgcttctctttacagcctatggaggtctgcagagcctgcagagcagcctgtacagcgaggagggcctgggtgtcacagcgctcagcaccctctatggaggcatgctcctgtcctccatgttcctcccaccgctcctcatcgagaggctgggctgcaaggggaccatcatcctctccatgtgtggctacgtggccttctccgtgggcaacttcttcgccagctggtacactttgatccccacctccatactgctgggactcggggccgccccgctgtggtctgcacagtgcacatacctcacgatcacgggaaacacacatgcagagaaggcgggaaagcgtggcaaagacatggtgaaccagtattttggcatcttcttcctcatattccagtcatccggtgtgtggggcaacttgatctcatcgctggtatttggccagactcccagccaagagacccttccagaagagcagctcacgtcctgtggggccagtgactgcctgatggccaccacaaccaccaacagcacccagaggccctcccagcagctggtctacaccctcctgggcatctacactgggagtggtgtcctggctgtcctgatgatagctgcgttcctccaacccatacgagatgttcagcgggaaagtgaaggagagaagaaatcagtacctttctggtccactttactgtcgactttcaagctatatagagataaacgtctgtgcctcttaattctgctgccgctgtacagtggattgcagcaaggattcctctccagcgaatacacaaggtcctatgtcacctgcaccctgggcatccagttcgtcggctacgtgatgatctgcttctcggccactgacgcgctgtgctccgtgttgtatggaaaggtctcgcagtacacgggcagggctgtgctgtacgtgctgggcgcggtgacccacgtgtcctgcatgattgccctactgctgtggagacctcgtgctgaccatctggcagtgttcttcgtattctctggcctgtggggcgtggcagatgccgtctggcagacacaaaacaatgctctctacggcgttctgtttgagaagagcaaggaagctgccttcgccaattaccgcctgtgggaggccctgggcttcgtcattgccttcgggtacagcatgtttttgtgcgtgcacgtcaagctctacattctgctgggggtcctgagcctgaccatggtggcgtatgggcttgtggagtgcgtggagtccaagaacccgatcagaccccacgctccaggacaggtcaaccaggcagaggatgaagaaatacaaacaaaaatgtgagagcagtgaggtccgaggaggatgaactcagaaagcaccagccagagaattttcttagaagatgcctcaggacatagagcggctcctcatcaccatctcagcacaatttggccattctgaagagatcatgttatttcactcttcatgtatttttttctattctaacaaatttttcgtccaccatcttaacagagatcaagtgtatacatgaaggtatcagttcatttaattttagatgcaaaagaaaaaggtctaacgtacaatcagccaattagaatttgcctgaaatcatagactcaccctagttttattgctgtagttgtttttaagaattggaagcctgcttaaaaaatgtagttgagccccataattttacaaatgggcgaacttttaaacttctaactctacttggatcaaaacctcatacattttacaaaggggtcctgacaagtcagctgactcaacctcacagagtcagggggtgacaaagccagactggggctcaggattcctgaaacgtgtggggtctgcgtttctaaataaagacggttatttaatgg

SEQ ID NO: 622 - protein, 457 aa, Homo sapiens
MDRSLRNVLVVSFGFLLLFTAYGGLQSLQSSLYSEEGLGVTALSTLYGGMLLSSMFLPPLLIERLGCKGTIILSMCGYVAFSVGNFFASWYTLIPTSILLGLGAAPLWSAQCTYLTITGNTHAEKAGKRGKDMVNQYFGIFFLIFQSSGVWGNLISSLVFGQTPSQETLPEEQLTSCGASDCLMATTTTNSTQRPSQQLVYTLLGIYTGSGVLAVLMIAAFLQPIRDVQRESEGEKKSVPFWSTLLSTFKLYRDKRLCLLILLPLYSGLQQGFLSSEYTRSYVTCTLGIQFVGYVMICFSATDALCSVLYGKVSQYTGRAVLYVLGAVTHVSCMIALLLWRPRADHLAVFFVFSGLWGVADAVWQTQNNALYGVLFEKSKEAAFANYRLWEALGFVIAFGYSMFLCVHVKLYILLGVLSLTMVAYGLVECVESKNPIRPHAPGQVNQAEDEEIQTKM

SEQ ID NO: 623 - DNA, 2877 bp, Homo sapiens
agtgctccctccagcctccgcgcatttcagctggcgctgcagctgctgcacagagacccacagaggccaccctcggaaccagcgcccaatgagagggcgggacctgtgttcctccacacaaagccaggcgctgggatctttgagaaccaccaccccagcctttacccttaacattccatccgaggcaaaccacactgagcagccgcctgcaggcctgggagcaaggctacaggaagcaggtgtttccatccctcccaggcgaggccgcccaacaccaacactggagaagaagaaaaaacctcatttgatggcggaagatgaaccttcaggggccctcttgaagccgctggtttttcgcgttgacgagaccaccccggctgtggtgcaaagcgtcctcctggagagggggtggaataagtttgataagcaggagcagaacgcggaggactggaacctgtactggaggacatcctctttccgaatgaccgaacacaacagtgttaaaccgtggcagcagctaaaccaccaccctggaaccaccaagcttaccaggaaagactgtttggccaaacacctgaagcacatgaggaggatgtatggcacttccctgtaccagttcatccccctgacgttcgtcatgcccaatgactataccaagttcgtggctgaatactttcaggagaggcagatgctgggcaccaagcatagctattggatttgcaagcctgctgagttatctcgtgggagggggatactaattttcagtgactttaaagacttcatctttgatgatatgtacatagtgcagaaatatatctccaatcctttacttattggcagatataaatgtgatctccgcatctatgtttgtgttactggctttaagcctttgaccatttatgtttatcaggaagggttggttcggtttgccacggaaaagtttgacctcagtaatttgcaaaacaattatgcccatttgaccaacagcagcatcaataaatccggggcctcttatgagaagatcaaagaagtgattggtcatggttgtaaatggacgctcagcagatttttttcctaccttcgtagctgggatgtggacgatctgcttttgtggaagaaaatccaccgcatggttattctcaccattctcgccattgcaccatctgtcccctttgctgccaattgctttgagctctttgggtttgatattttgattgatgacaacttgaaaccatggcttttagaggtcaactacagcccagccttgaccttggattgttcaacagatgtgttggtgaagagaaaacttgtccatgatattattgacctgatttacttaaatggtctaagaaatgaggggagagaagccagtaatgccacacatggaaattccaacatcgacgctgcaaaaagtgacagaggtgggcttgatgctcctgactgtcttccttatgattctctttcgttcacaagcagaatgtacaacgaggatgactctgtggtggagaaagctgtgagtgtgcgtcctgaagctgcacctgcctcccagctggaaggagagatgagtgggcaggattttcatctgtcaacaagggagatgccacaaagcaagcccaagttacggagcaggcacacgcctcacaagacactcatgccctacgcgtccctcttccagtcgcactcctgcaagaccaagacctccccgtgtgtcctgtcagaccgtggcaaagctccagatccccaagcaggcaactttgttcttgtttttcctttcaatgaagcaactctcggagcttccaggaatggattaaatgtcaaaagaataatccaagagctccagaaactaatgaataagcaacattcctaagtggtaaaaaatcaaatcaagaaaaagtgacatggatttttaaaaaccaaggatcctgtcctagagaaagcaatagttcaagtccctacctgtgccaccagcatgttaactatgacattgggactgaagatgtggccatatgtataaatataacagctctgacaaagcacaatatgttcaagtggtgattaaactacattacatcccatgtttatttgctcaggtgtcttgaaagaattctacaaataccacacagcctcccaccagtaattgaatgtgctacactacgattatgctatgtatgtatttaaagaggagaaaaagattattctaatatttttaaaggattattaggtgaaaacagtacaaaagaagccaggagttaactttctgtgtgtttttttttaaatcaaccagttatttgttaaaattattttgttaacttaagatcagacaatcattcagagtgagataaatcactgaaagccctaatgactctgttgtttacaaatcctgggcttgaaatcagactttgcaccaaagagctccctgtgggggcatctttgggctgtatttaaatagtggccccttggccttgtcaccatttgtttaccatcacagcatgtgaggtcatggcctcccagatcaaagtatgctgtcattcctgccacataaaaagcatctgcagtcctaagacataaaaattccagtaggttacttgaaaacattattctagtgaaagtagtcagatacaaaaggccacatgttgtatgactccgttgatatggaatgtcagaattggcaaatccatcaaaagcagattggtggcttaggggaggggtaatgaggagtgcctactgatgggtagggggcttccctttggggtgacagaaatgttctggaactatatagaggtgatggttgcacaacacggggaattcactaagtatcactcatggtacattttgtgttatgtgtgttttaccacaataaaaaagttaaaagctggc

SEQ ID NO: 624 - protein, 592 aa, Homo sapiens
MRGRDLCSSTQSQALGSLRTTTPAFTLNIPSEANHTEQPPAGLGARLQEAGVSIPPRRGRPTPTLEKKKKPHLMAEDEPSGALLKPLVFRVDETTPAVVQSVLLERGWNKFDKQEQNAEDWNLYWRTSSFRMTEHNSVKPWQQLNHHPGTTKLTRKDCLAKHLKHMRRMYGTSLYQFIPLTFVMPNDYTKFVAEYFQERQMLGTKHSYWICKPAELSRGRGILIFSDFKDFIFDDMYIVQKYISNPLLIGRYKCDLRIYVCVTGFKPLTIYVYQEGLVRFATEKFDLSNLQNNYAHLTNSSINKSGASYEKIKEVIGHGCKWTLSRFFSYLRSWDVDDLLLWKKIHRMVILTILAIAPSVPFAANCFELFGFDILIDDNLKPWLLEVNYSPALTLDCSTDVLVKRKLVHDIIDLIYLNGLRNEGREASNATHGNSNIDAAKSDRGGLDAPDCLPYDSLSFTSRMYNEDDSVVEKAVSVRPEAAPASQLEGEMSGQDFHLSTREMPQSKPKLRSRHTPHKTLMPYASLFQSHSCKTKTSPCVLSDRGKAPDPQAGNFVLVFPFNEATLGASRNGLNVKRIIQELQKLMNKQHS

SEQ ID NO: 625 - DNA, 1273 bp, Homo sapiens
aagacagaaagtccgttggaaccgtcggctgctctctggtctctggagatgaggcgggaggacttggggacagctgtggggacacggcccagatgctctggtcccagcagaagtgactggcggggaccaggatgctggagggtcagctcgaggccgggtagcccaaggagggcacccacccagaagacccgtgcccgggagctggggctgccatggagaagacacctgcagcagccgaggtccccagggaggacagcaatgccggggagatgccgtcattacagcagcagatcaccagcctccaccaagagctcgggagacagcagtcgctgtgggctgatattcacagaaaactccagagtcatatggatgccttgaggaagcagaaccgggagctccgagaagagctgagaggcctgcagcggcagcagtgggaagccgggaagaaacccgcagcgtccccacacgcggggcgagaatcacacactctggcattggaacctgcttttggaaaaatttcacatctgtcagctgatgaagacacaacgcccaaatacgctggccgcaagagtcagagtgccactctcctgggacaaagatggtcatctaaccacttagctcctccaaagccaatgagtttaaagacagaaagaattaactcggggaaaacaccaccacaggaagatagagagaaaagtcctcccgggagacgtcaagacagaagtccagcacccactggaaggccgactcccggtgcagaaagacggggggtgtctgaagacggaaagattatgcatccatcttcccgaagtccgcaaaactccggtggcagaaaatcaccagtgcaggcttcccaggccaccacgctgcaggagcagacggcagcagccagaggagctgacagaagctcatcagtcttagggagttctgaaggcggatttctcagccgcgttcaagctgacgagttcgccagttctgccccagacagtgcagagcggcagaatcttcctgtaaacccaccatcttccctggaaatagcacaggccatggacactaagatgaaaaaggaggaagtacaggaagaaaaacgacatccaaagggcaaggcagatgactgccggcggtccggtttcccgagtgaatttccaggagctctgcacgccgctccctccagacaggacatggggccctgacctggaggccaggcgtttctagcattgttgactgccagtttattcccagtaaataaagcaatacgcttttcaggaggaag

SEQ ID NO: 626 - protein, 326 aa, Homo sapiens
MEKTPAAAEVPREDSNAGEMPSLQQQITSLHQELGRQQSLWADIHRKLQSHMDALRKQNRELREELRGLQRQQWEAGKKPAASPHAGRESHTLALEPAFGKISHLSADEDTTPKYAGRKSQSATLLGQRWSSNHLAPPKPMSLKTERINSGKTPPQEDREKSPPGRRQDRSPAPTGRPTPGAERRGVSEDGKIMHPSSRSPQNSGGRKSPVQASQATTLQEQTAAARGADRSSSVLGSSEGGFLSRVQADEFASSAPDSAERQNLPVNPPSSLEIAQAMDTKMKKEEVQEEKRHPKGKADDCRRSGFPSEFPGALHAAPSRQDMGP

SEQ ID NO: 627 - DNA, 4981 bp, Homo sapiens
gcggccgcggaggcggaggcagccgcggaggcggaggcggccggcggggggtggcgaggggcgccgggcccccgcggacctgtcgtcctcggcccgtcctccggccccggccccgcgcggctgaggaggcgcggccaggaccatgtcggcgggcggccgtgacgaggagcggcggaagctggccgacatcatccaccactggaacgccaaccggctggacctgttcgagatcagccagccgaccgaggatttggagttccatggagtgatgagattttattttcaagataaagctgctggaaactttgcaacaaaatgtattcgggtctctagtactgccaccactcaagatgtaatcgaaacgctcgcggagaaatttcgacctgatatgcgaatgctgtcctctcccaagtattcactctatgaagtgcatgtcagcggagaaagaagattggatatagatgagaaacctctagttgtacaactgaattggaacaaagatgatcgggaaggcagatttgttcttaagaatgagaatgacgccattcctcctaaggctcaaagtaatggacctgaaaagcaggaaaaagaaggggttatccagaacttcaagagaactctctcaaagaaagaaaagaaggaaaaaaagaagagagaaaaagaggcattgcgacaggcatctgataaagatgatagacctttccaaggggaggatgttgaaaattctcgactggctgctgaggtttacaaagacatgccggaaaccagctttactcgaaccatttctaatcctgaggtggttatgaaacgacggaggcagcaaaaattggaaaagagaatgcaggaatttcggagctcagatgggcggcctgattcaggtggaacattgagaatttatgcagatagtttaaaaccaaatattccctacaagacaatcctgctgtctactacagatcctgcagactttgctgtggctgaagctttagagaagtatggtctggaaaaagaaaaccctaaggattactgcatcgcccgggttatgcttcctcctggagcccagcattctgatgaaaagggtgctaaagaaattattcttgatgatgatgagtgtcctttacaaatcttcagggaatggccaagtgacaaagggattttagtctttcagttgaagaggaggccaccagaccacatcccaaagaaaaccaagaaacacttggaaggcaagacacccaagggaaaggagagagctgacgggtctggctatggctccacccttcctccggagaagctgccctatttagtagagttaagcccagatggttctgactctagagataagccaaagctttaccgccttcagttaagtgttactgaagttgggacagaaaagttggatgacaactctatccagttgtttggcccaggaattcagccccatcactgtgaccttaccaacatggatggagtggtcactgtgacgcccagaagtatggacgcagaaacctacgtggaaggccagcgcatctcagaaaccaccatgctgcagagtggcatgaaagtgcagtttggggcgtcccatgtatttaagtttgtggaccccagtcaggatcatgctcttgcaaaaagatctgtggatggaggcctgatggttaagggcccaagacataaacctggaattgttcaggagacaacttttgatttgggaggagatattcatagtgggacagcattaccgacaagcaagagcaccactaggctggacagcgacagagtgtcgtctgcctctagcacagccgagcggggaatggtgaagccgatgatcagagtagaacagcagccagattatcgcaggcaagaaagcagaacacaggatgcttctgggcctgagctgatactacctgcaagcattgaattcagggaaagttctgaagattcatttttgtctgccattataaattatactaatagctctacagtccactttaagttgtcccctacatatgtattatatatggcatgccggtatgtattgtccaaccagtacagacctgacatcagccctacagagcgcacacataaagtcattgcagtcgtcaacaagatggtgagcatgatggagggtgtcatccagaaacagaagaatattgcaggggcacttgccttctggatggcaaatgcatctgaacttctcaacttcattaagcaagaccgagaccttagtcggatcacactggatgctcaagatgttttagcacatttggttcaaatggcatttaaatacttggttcactgtcttcaatcagaacttaataattacatgccagcctttctagatgaccctgaagagaacagtctgcaacgaccaaaaatagatgatgtgctgcacacgctcacaggagccatgtccttgctacgacgctgcagagtcaatgccgccctgaccatccagctcttctctcagctcttccacttcatcaatatgtggctgttcaatagattggtgaccgacccagattcggggctgtgctcccattactggggtgcgattatccgtcagcagttgggccatattgaagcctgggctgagaagcaggggctggaactggctgcggactgtcatctgagcaggatcgtgcaggcaacgactttgcttaccatggataagtatgcacctgatgacattccaaatataaacagcacctgctttaagttaaattcattacaacttcaagccttattacagaactatcactgtgcacctgatgagccttttatcccaacggatcttatagaaaatgtagtgactgtggctgaaaacactgccgatgagctggcccgcagtgatggaagggaagtgcagttggaggaggatcctgatctgcagctgccgtttcttttgccagaagatggttattcttgtgatgttgtcagaaacattccaaatggtttacaagaatttttagaccctctgtgccagagaggattttgcaggttaattcctcacacacgttcaccaggtacttggacaatatattttgaaggtgcagattatgaaagtcaccttctgcgtgagaacacagagctggctcagcctctgaggaaagaacctgaaataatcactgtgaccctaaaaaagcagaatggaatgggccttagcattgttgcagcaaagggtgctggtcaagataaactaggaatctatgtgaagtcggttgtgaaaggaggtgctgcagatgtggatggacgtctagctgcaggtgatcagctcctcagtgtggatggacgaagtctggttggactctctcaggaaagggcggcagaactcatgacaagaacaagctctgtggtgacactggaagtagcaaagcagggtgccatctaccacggtctggccacccttctcaatcagccatcccccatgatgcagagaatttcagatcgtcgtggctcaggtaaaccccgaccaaagagtgaaggctttgagctctataataattcaactcaaaatgggtctcctgagagtcctcagctgccttgggcagaatatagtgaaccaaagaaattgcctggtgatgacagactgatgaaaaatagagctgatcaccgttccagccccaacgtagcaaatcagcctcctagtcctggagggaaaagtgcatatgcctctggaacaacagcgaagataacatctgtctctactggaaacctctgcactgaggagcagacgcctccgcctagacctgaagcctaccccatccccactcagacgtacaccagagagtattttaccttcccagcttccaaatcccaggatcggatggctcctcctcagaaccagtggccaaattatgaggaaaagccacatatgcacacagatagtaatcattccagtattgcaattcagcgtgttacacgttcccaagaagaacttcgagaagataaagcttaccaacttgagcggcatcgaatagaggcagctatggaccgaaagtctgatagtgatatgtggataaatcagagctcctcactggactccagtacctctagccaggagcatctgaaccattcctctaagtcggtcacccctgcttccacactgaccaaaagtggccctggccgttggaaaacaccagcagccataccggccacccctgtggccgtctcccagccaatccgaacagacctgcctccgccacccccgccacctccagtccactatgccggtgatttcgatggaatgtccatggatttgcctctcccaccacccccttccgccaaccagatagggctgccgtctgcgcaggtggctgctgctgaacggagaaagagagaagaacatcagcgttggtatgagaaggagaaggcccgcctggaggaggagcgggagaggaagcggagagagcaggagaggaagttgggccagatgcgcactcagtccttaaaccctgctccgttttctcccctgactgcacagcagatgaagcccgaaaagccttccacactccagcggccacaggaaacagtcattcgggagctgcagcctcagcagcagccccgcacgatcgagcgcagagacttgcagtacattacagtcagcaaagaggagctttcctcgggggacagtctgtcccccgacccgtggaagcgggacgccaaggagaagctggagaagcagcagcagatgcacatcgtggacatgctgagcaaggagatccaggagctccagagcaaaccggaccgcagcgccgaggagagcgaccggctgcgcaagctcatgctggagtggcagttccagaagagactccaggagtcgaagcagaaggacgaagatgacgaggaggaggaggacgatgatgtggacaccatgctgatcatgcagcgcctggaggctgaacgaagagcgagggtaaaggggggagtgctttggctgtgcccatctgtggtccctattttagcttctgcgtgtttcccatggggatag

SEQ ID NO: 628 - protein, 1612 aa, Homo sapiens
MSAGGRDEERRKLADIIHHWNANRLDLFEISQPTEDLEFHGVMRFYFQDKAAGNFATKCIRVSSTATTQDVIETLAEKFRPDMRMLSSPKYSLYEVHVSGERRLDIDEKPLVVQLNWNKDDREGRFVLKNENDAIPPKAQSNGPEKQEKEGVIQNFKRTLSKKEKKEKKKREKEALRQASDKDDRPFQGEDVENSRLAAEVYKDMPETSFTRTISNPEVVMKRRRQQKLEKRMQEFRSSDGRPDSGGTLRIYADSLKPNIPYKTILLSTTDPADFAVAEALEKYGLEKENPKDYCIARVMLPPGAQHSDEKGAKEIILDDDECPLQIFREWPSDKGILVFQLKRRPPDHIPKKTKKHLEGKTPKGKERADGSGYGSTLPPEKLPYLVELSPDGSDSRDKPKLYRLQLSVTEVGTEKLDDNSIQLFGPGIQPHHCDLTNMDGVVTVTPRSMDAETYVEGQRISETTMLQSGMKVQFGASHVFKFVDPSQDHALAKRSVDGGLMVKGPRHKPGIVQETTFDLGGDIHSGTALPTSKSTTRLDSDRVSSASSTAERGMVKPMIRVEQQPDYRRQESRTQDASGPELILPASIEFRESSEDSFLSAIINYTNSSTVHFKLSPTYVLYMACRYVLSNQYRPDISPTERTHKVIAVVNKMVSMMEGVIQKQKNIAGALAFWMANASELLNFIKQDRDLSRITLDAQDVLAHLVQMAFKYLVHCLQSELNNYMPAFLDDPEENSLQRPKIDDVLHTLTGAMSLLRRCRVNAALTIQLFSQLFHFINMWLFNRLVTDPDSGLCSHYWGAIIRQQLGHIEAWAEKQGLELAADCHLSRIVQATTLLTMDKYAPDDIPNINSTCFKLNSLQLQALLQNYHCAPDEPFIPTDLIENVVTVAENTADELARSDGREVQLEEDPDLQLPFLLPEDGYSCDVVRNIPNGLQEFLDPLCQRGFCRLIPHTRSPGTWTIYFEGADYESHLLRENTELAQPLRKEPEIITVTLKKQNGMGLSIVAAKGAGQDKLGIYVKSVVKGGAADVDGRLAAGDQLLSVDGRSLVGLSQERAAELMTRTSSVVTLEVAKQGAIYHGLATLLNQPSPMMQRISDRRGSGKPRPKSEGFELYNNSTQNGSPESPQLPWAEYSEPKKLPGDDRLMKNRADHRSSPNVANQPPSPGGKSAYASGTTAKITSVSTGNLCTEEQTPPPRPEAYPIPTQTYTREYFTFPASKSQDRMAPPQNQWPNYEEKPHMHTDSNHSSIAIQRVTRSQEELREDKAYQLERHRIEAAMDRKSDSDMWINQSSSLDSSTSSQEHLNHSSKSVTPASTLTKSGPGRWKTPAAIPATPVAVSQPIRTDLPPPPPPPPVHYAGDFDGMSMDLPLPPPPSANQIGLPSAQVAAAERRKREEHQRWYEKEKARLEEERERKRREQERKLGQMRTQSLNPAPFSPLTAQQMKPEKPSTLQRPQETVIRELQPQQQPRTIERRDLQYITVSKEELSSGDSLSPDPWKRDAKEKLEKQQQMHIVDMLSKEIQELQSKPDRSAEESDRLRKLMLEWQFQKRLQESKQKDEDDEEEEDDDVDTMLIMQRLEAERRARVKGGVLWLCPSVVPILASACFPWG

SEQ ID NO: 629 - DNA, 6158 bp, Homo sapiens
gttgatagaagtccagatcctgaggaaatctccagctaaatgctcaaaatataaaatactgagctgagatttgcgaagagcagcagcatggatggattttatgaccagcaagtgccttacatggtcaccaatagtcagcgtgggagaaattgtaacgagaaaccaacaaatgtcaggaaaagaaaattcattaacagagatctggctcatgattcagaagaactctttcaagatctaagtcaattacaggaaacatggcttgcagaagctcaggtacctgacaatgatgagcagtttgtaccagactatcaggctgaaagtttggcttttcatggcctgccactgaaaatcaagaaagaaccccacagtccatgttcagaaatcagctctgcctgcagtcaagaacagccctttaaattcagctatggagaaaagtgcctgtacaatgtcagtgcctatgatcagaagccacaagtgggaatgaggccctccaacccccccacaccatccagcacgccagtgtccccactgcatcatgcatctccaaactcaactcatacaccgaaacctgaccgggccttcccagctcacctccctccatcgcagtccataccagatagcagctaccccatggaccacagatttcgccgccagctttctgaaccctgtaactcctttcctcctttgccgacgatgccaagggaaggacgtcctatgtaccaacgccagatgtctgagccaaacatccccttcccaccacaaggctttaagcaggagtaccacgacccagtgtatgaacacaacaccatggttggcagtgcggccagccaaagctttccccctcctctgatgattaaacaggaacccagagattttgcatatgactcagaagtgcctagctgccactccatttatatgaggcaagaaggcttcctggctcatcccagcagaacagaaggctgtatgtttgaaaagggccccaggcagttttatgatgacacctgtgttgtcccagaaaaattcgatggagacatcaaacaagagccaggaatgtatcgggaaggacccacataccaacggcgaggatcacttcagctctggcagtttttggtagctcttctggatgacccttcaaattctcattttattgcctggactggtcgaggcatggaatttaaactgattgagcctgaagaggtggcccgacgttggggcattcagaaaaacaggccagctatgaactatgataaacttagccgttcactccgctattactatgagaaaggaattatgcaaaaggtggctggagagagatatgtctacaagtttgtgtgtgatccagaagcccttttctccatggcctttccagataatcagcgtccactgctgaagacagacatggaacgtcacatcaacgaggaggacacagtgcctctttctcactttgatgagagcatggcctacatgccggaagggggctgctgcaacccccacccctacaacgaaggctacgtgtattaacacaagtgacagtcaagcagggcgtttttgcgcttttccttttttctgcaagatacagagaattgctgaatctttgttttatttctgttgtttgtattttatttttaaataataatacacaaaaaggggcttttcctgttgcattattctatggtctgccatggactgtgcactttatttgagggtgggtgggagtaatctaaacatttattctgtgtaacaggaagctaatgggtgaatgggcagagggatttggggattactttttacttaggcttgggatggggtcctacaagttttgagtatgatgaaactatatcatgtctgtttgatttcataacaacataagataatgtttattttatcggggtatctatggtacagttaatttcacgttgtgtaaatatccacttggagactatttgccttgggcattttcccctgtcatttatgagtctctgcaggtgtacaaaaaaaccccaatctactgtaaatggcagtttaattgttagaaatgactgtttttgcaccacttgtaaaaaggtatttagcgattgcatttgctgtttgttgttttattttgctttatatatgacttgcagaggataaccataaaatgggtaattctctctgaagttgaataatcaccatgactgtaaatgaggggcacaattttggactctggcgccaaactgagtcataggccagtagcattacgtgtatctggtgccaccttgctgtttagatacaaatcataccgtcttttaaatattttgaagcccatttcagttaaataatgacatgtcatggtcctttggaatcttcatttaaatgttaaatctggaatcaaaatgaagcaaaaaatatctgtctccttttcactttcttcagtacataaatacattatttaatcaataagaattaactgtactaaatcatgtattatgctgttctagttacagcaaacactctttaagaaaaatatccaatacactaaataggtactatagtaatttttagacatggtacccattgatatgcatttaaaccttttactgctgtgttatgttgataacatatataaatattagataatgctaatgcttctgctgctgtcttttctgtaatattctctttcatgctgaatttactatgaccatttataagcagtgcagttaactacagatagcatttcaggacaaaatagatgactcaaaccatttattgcttaaaaaatagcttacgccatgctatgctataagcagcttttatgcacattgacaaatgaagagtaagcttcagcttgctaaaggaaactgtggaaccttttgtaacttttggtgatatggaaaattatttacaaaccgtcaaagaatatgaggaagttgctgtatgacatagtgctggcactgatattatccatcatctctttttggacacttctgtaaatgtgattggattgtttgaaagaagatttaaagtttcaaagttttttgttctgtttttgctttgcatttggagaaaatattgaaagcagggtatgttgtttcattcaccttgaaaaaaccatgagtaaatggggatatagaatctctgaatagctcgctaaaagattcaagcaagggacatgaattttgttccatctatcaataatatccagaagaacaacttttttaaagagtctatagcaaaaagcaaaaaaaaaaaaaaattctaaacacaaagtcaaaataaacctattgtaaaagcatttcgtgatgagcatgaaaaagattgtttaaagatgatccccccagctacccattttccaaaactacacagatcacagctcatttctctaagtggagcagttatcaagaaacccaaacaccaaaattgctactcttcacatttaatcctacaaaaagtactccaatttcaaaatatgtatgtaacctgcgatttcaatgattgttgttcatatacatcatgtattattttggcccattttgggcctaaaaaagaaaactatgccttaaaaatcagaaccttttctccccactatgcttatgtggccatctacagcacttagaataaaaacagatgttaaaatattcagtgaaagttttattggaaaaaggaattgagatatataattgagatttggtgaaattgaaggagaaaatttaagtgagtctttaaaatatattctgaatgaaaactgtattgaggattcatttttgttccttttttttctttttctcttttctcctttttcttctttttaatagtctagttttagtcagtcagtgaggaagaattgggccatgctaacgttatcacaagagaacaatggcagaaatggtattagttatataatatttaaggacaaactatatgttttgctgttttaacgtagtgactcactgaactaaatacataattgaccaacattaagtgtatttccaatacagaagggttgaaaatattacattataaactcttttgaaaaatgtatctaaaattttttaagttctgttttgattccactttttggttgagtttttatgtttttgttttcaggtagattaataaatctggcagctgatttctgcaagattcttgtgttttgaatttctcattgaattggctactcaaacatagaaatcatttgttaatgatgtaatgtcttctctcagcttttatcttcactgctgtttgctgtctcttgatgatgacatgttaatacccaatagattaattgcaacaaacacttatactcaaataactaagtaaaaataatttttcttgttatgtccatgaaaagtgcttcagaataaaaatccacaagactgacagtgcagaacatttttctcaaatcatgggcggatcttggaggtctagtttcccgtagatgctgtaaccaattaccacaacttcagtaatttacacaaatttatcttatagttctggaggcagaagttcaaaagaagccttaagagactaaaaccaagatgtccttaggtctggttccttctggaggctccaggggagattcttccagctttcacttctagagtctgctgacattccttggctcctggctacatcacttcaatctctgcttccatggtcacatactcttctactatagtcaaatttccttcctgcctcttataaggatgcttgtgattacatttaggggatgctcagataatccaggacaatctctccatctcaagatccttaacttaatgacgtgtgccaagtccctttggctagataattattcataggtcccagggattaggacatggatgtaaggggtgagggcagggctgttattcagaacaccgcacggaggaggaagactgtgtagcaaagactctaattgatttactcaggaacagtggagttctgctgagggatctaggatttgaaagtactagagtttgcttttatttaccactgagatattttccccttattctgcataaataattttgaaaactttctatattaaatttcaactattccactaaaatgtctggtaatcacatcaagcctttagattattcaaatccttccccagcccccaggaaaacactaagtcatgaaacagaaaaacagaaggtatgataataatagtaataacagttaaatcagtggtctaatccagattttattttttaatacatttcttttggtgttaatatgggttactatgtgatcttatcatttgctagtgattattacttattaggtaagaacaatgtgtaaaatatgtctattactcaaaagaacaattgcaaaatgagtcaacttatctttatataaccaggaaagaaatatattgccagaagctacagaattttgccagatgatagggatttctaaaatgagccactttgtctatcatgcagccttttcagagcttgtaatgagaaaacattacagaggagaaggtcatttggatgtttgttacttggaatcctagaaaacaaaaactaaaatttaaaaataagaagtgagtaagctattttccatttgcgatttggtatggagaagagaggaaatagaattattaaaaaaatacaaattgggtaaaagtgatggtggaaaaaatataaagaaggcaaatgtacatattaagcaattctactaagaattggaaaaatcaagtttcaaaaagatggtaatagttgggcatgatactagaaaatttcacccagtttattcagagctcaactagtacttttaggacttctttttttatatacatgagactcactttgacatacttaaaaaaaaaacagtttatggaaagtacagtttaagaggagaatttgattagactaagtggatatctttatagaaatattaatgatttcagaattttcagttacaagtgtatataccgtggctattgtttatggattcatatgtaaggtagggtcttttttgcatatagactccagtattagttactttcattctaaaattatatttatgcttctatggggaagaaaatttttaattcacttggttgtattaaaattatacttacggtttgagaaaacatgctatgaaaatcatgattatagcaaattaaatatgctcaaaatttaaatctaaaataaaagcccagaaactgaaaa

SEQ ID NO: 630 - protein, 477 aa, Homo sapiens
MDGFYDQQVPYMVTNSQRGRNCNEKPTNVRKRKFINRDLAHDSEELFQDLSQLQETWLAEAQVPDNDEQFVPDYQAESLAFHGLPLKIKKEPHSPCSEISSACSQEQPFKFSYGEKCLYNVSAYDQKPQVGMRPSNPPTPSSTPVSPLHHASPNSTHTPKPDRAFPAHLPPSQSIPDSSYPMDHRFRRQLSEPCNSFPPLPTMPREGRPMYQRQMSEPNIPFPPQGFKQEYHDPVYEHNTMVGSAASQSFPPPLMIKQEPRDFAYDSEVPSCHSIYMRQEGFLAHPSRTEGCMFEKGPRQFYDDTCVVPEKFDGDIKQEPGMYREGPTYQRRGSLQLWQFLVALLDDPSNSHFIAWTGRGMEFKLIEPEEVARRWGIQKNRPAMNYDKLSRSLRYYYEKGIMQKVAGERYVYKFVCDPEALFSMAFPDNQRPLLKTDMERHINEEDTVPLSHFDESMAYMPEGGCCNPHPYNEGYVY

SEQ ID NO: 631 - DNA, 5333 bp, Homo sapiens
cggctgctcgcgagctgctttctctcctcttccctttccgggtgcacggcgaggagaaagtctctatgcaactaagccccggcgcgcacttggccaggtatgtaccgcgggagcggcgcgttctgcgcggaagcagatgctgctgccgccacggcggcggcggctgccagctcctgagctctgtaactgtcacactgcacctgagctgaacttgaaaagagagtgaaggggcgattgggcgaacgcttttggcagacacagagggtgtttgtagacgtgggggaggagaatctctattaacgccccccaccgtaaccactgcacatcacctccatctctgcaaatacagcccgaggagtagaggcagcagcagctggacccccaaagagagacgtggggcagcggctgtgaccgcatctcctgagctacaacaacaggtcgcctttttgagactcctttggcgggaagggctacttggaaaggaaggtttgaaagagtgagaagggtaggtgtaagggttccctaattcgtcgaaagaattctattgggtgactctcgttcgtcttctctatcctacactccacatactgaccctatattatccagactgtgccggggagaaatcaaaaacacctgtttgaagaaacggctgcacctgtgtgcttatttgtgccagagggtggcctagcccacctgcaggaagagatttggctgggttctgttgagggtgattgttaggacgttgtattttgttgccattattccaaatacctgtcttggagggaaagttgcccttctgagaactgtgactttaccaggagccctatcttggaataagagttacacctctggaccacgtttctcactagtactttgcttgactggaggaagtgggtgacttttggctgcttcggtgacccattgtagacgcctcgttacccttcttccttccgcttcaagtaatcatggcggcgggggtggcagcgtggctgccttttgcaagggcagcggctatcgggtggatgcctgtggcctcggggcctatgccggctcccccgaggcaggagaggaaaaggacccaagatgctctcattgtgctgaatgtgagtggcacccgcttccagacgtggcaggacaccctggaacgttacccagacactctactgggcagttctgagagggactttttctaccacccagaaactcagcagtatttctttgaccgtgacccagacatcttccgccacatcctgaatttctaccgcactgggaagctccactatcctcgccacgagtgcatctctgcttacgatgaagaactggccttctttggcctcatcccggaaatcatcggcgactgctgttatgaggagtacaaggatcgcaggcgagagaacgccgagcgcctgcaggacgacgcggataccgacaccgctggggagagcgccttgcccaccatgactgcaaggcagagggtctggagggccttcgagaacccccacaccagcacgatggccctggtgttctactatgtcacggggtttttcattgccgtctctgtcatcgcgaatgtggtggaaacagtgccgtgcggatcaagcccaggtcacattaaagaactgccctgtggagagcggtatgctgtggccttcttctgcttggacacggcctgcgtcatgatcttcacagttgagtatttgcttcgcctggctgcagcgcctagtcgttaccgttttgtgcgtagtgtcatgagtatcatcgacgtggtggccatcctgccttattacattgggctggtgatgacagacaatgaggacgtcagcggagcctttgtcacactccgagtcttccgggtcttcaggatctttaagttttcccgccactctcaaggcctgcgcatcctggggtacacactgaagagttgtgcctcagaattgggcttcttgcttttctcgctcaccatggctatcatcatcttcgctacagttatgttctacgcagagaaggggtcttcggctagcaagttcaccagcatccctgcagccttctggtataccatcgtcaccatgacaacactagggtatggtgacatggtgccaaaaaccatagcagggaagatttttggttctatctgttcgctgagtggggtcttggtcattgctctacctgttccggtgattgtatccaacttcagtcgcatctaccaccagaatcaacgagcagacaaacgaagggcacaaaagaaagctagactggccaggatccgggcagccaaaagcggaagcgcaaatgcttacatgcagagcaaacggaatggtttactcagtaatcagctgcagtcctcagaggatgagcaggcttttgttagcaaatccggctccagctttgaaacccagcaccaccacctgcttcactgcctggaaaaaaccacgaatcacgagtttgtggacgaacaagtctttgaagaaagctgcatggaagttgcaactgttaatcgtccttcaagtcacagtccttcactgtcttcacaacaaggagtcaccagcacctgctgttcacgacgacacaaaaaaacttttcgcatcccaaatgccaatgtatcaggaagccatcaaggtagtatacaagaactcagcacgattcagatcagatgtgtggagagaacacctctgtctaacagccgatccagtttaaatgccaaaatggaagagtgtgttaaactaaactgtgaacaaccttatgtgactacagcaataataagcatcccaacacctccagtaaccacaccagaaggagacgataggccagaatcccctgagtactcaggaggaaatattgtcagagtttctgctttgtaagacaattggaataaggtctaagagaattcgagccctggctgtgaaaagaatctcaacatagaagaaagaagaaacaataaatattctgcagattaatgcagcaaagaaagaaggttggtagtgaaacacaaagcttccaatcttaaggatgtgaataaaaccaccaaatggcatttctagacagtttgacctgttatacagagtaatattctgtggccctttgactttgtgaatgagcacaatgaaatgccgcctactgatgcttcttatgatcagaactcttttttaataaaataaataacataaatcgttgaacataatgttccagttgaatgcaaaacaaaaaaaatatggaaaacattttgataaaattttttcctgttaaaaccatgaacattggctatgatgaagattattacatatgaaaaaaaaactcacacaacatatttgtattgactgaaggaaaccatcataatgcatgctagaattctttgaagcagtgatctcagtttccttatgttgtcttcagaataggcatgataaactataattgtagaaaggggtaatttctgtgcacttacaacaagctgagtgttcatgttccatggtgggctgtgcaaataaactccttttagacctgcagtatttctcatggggatgctcattagtaaatctaaagtgttcagatagttcagtattcattatcgtttaactttgcacctagatactgttacaactgcaataatttgttgtacaactgttgtatcaggaatcaggatttttttgttgttgtactttccagatccttatagatacggtaagagccacattcgtagaaaaacttctggtgtggccaggttttaggtaactttttaatccaaaactattgtgccataaatgtttttcagtaatattttttggtccactgtattcctgtgacacagtgcattatctgttcttgtatttctatagcacctctctattgggtttatcatcatcaacaagactactgtttactgtagttcaagtgactttcctacttttgtatttccaaaaaaaattatcttgtaagtagcttgtcatcaatccccttgtcgaaaactagaaaaaaaggagttgacccatataaattatctctaacgtctttgttgtttatggaaaagcccagatactggatatatcactatgtattttatgaacagaattgactgggactaatatcacaggatcaatcatctcagaatcttacttgatgcattatttattttgctttagatcttgaatacattttgagaataactaatgtggattgaaatgtagagatacactggagtgctttatttagcaatatttgatgaaagcatgctttctacgccattcaggaaggcagcacaaatttatctcagaaaggttcctgtgtattgcaaggtacaattttctccaataaatcaggagaacaggagtttgatgatgcaaagttgatctctgtacatttaagtgaaaagtctttataacttttcacccttaaaatatttcagcagacatgtctgcacatgacagtgtaaaaaagtttaatgtcaaatgcaaagtttttattcattccaagccaccactgtaaggaataaagcttagcttctgtacatggaaagagctaataattatccctctgtcagagatgagatttttaaatgcttatgatatttaatcataaaaagggattaatccaaccattttctagtaaagccagaaattcttgcttcccatttctagaatagtttctagaacagtgctatgcacatattagatcttaataaacatttgctgagtgaaagtaagataaactcaactatctcttgggaagaactggcttcattcctagtacatcttttaaaaagttactaattttccagcagtacaaatattaacaattatattaacacctgcctcatgtcagtttatgcttctagagcaatgtctagtgaaacttatctgatggcatttattgaaaaccttctaaaaagtagactaaggaaaccataatcagaattactatgtcttttgattcccaatgagaagttctattttcatgttcttaatattacatacaagaaaatgcagttaggttatttcaattgacaattctgcctcctcttttgatttatcacttacccaaaattattaattttattaggcttttggaaaagaaaaaaaactttttgatgttttaggtgatttaaaaatataccgtgttggtggtgaatgactattgatgactgtgttaagtgcatctgtattgtaagtgaaatgtaattatttctgtgtaccatatggagtaactaaggtcattgtttttgacaattttgtttgaaattcatatatcttatttcaaaggatagcataatatctgcattatgctggaaaaaaatagacctttggagaatacttaaataaaacatgtgcatgcttgaacaggac

SEQ ID NO: 632 - protein, 630 aa, Homo sapiens
MAAGVAAWLPFARAAAIGWMPVASGPMPAPPRQERKRTQDALIVLNVSGTRFQTWQDTLERYPDTLLGSSERDFFYHPETQQYFFDRDPDIFRHILNFYRTGKLHYPRHECISAYDEELAFFGLIPEIIGDCCYEEYKDRRRENAERLQDDADTDTAGESALPTMTARQRVWRAFENPHTSTMALVFYYVTGFFIAVSVIANVVETVPCGSSPGHIKELPCGERYAVAFFCLDTACVMIFTVEYLLRLAAAPSRYRFVRSVMSIIDVVAILPYYIGLVMTDNEDVSGAFVTLRVFRVFRIFKFSRHSQGLRILGYTLKSCASELGFLLFSLTMAIIIFATVMFYAEKGSSASKFTSIPAAFWYTIVTMTTLGYGDMVPKTIAGKIFGSICSLSGVLVIALPVPVIVSNFSRIYHQNQRADKRRAQKKARLARIRAAKSGSANAYMQSKRNGLLSNQLQSSEDEQAFVSKSGSSFETQHHHLLHCLEKTTNHEFVDEQVFEESCMEVATVNRPSSHSPSLSSQQGVTSTCCSRRHKKTFRIPNANVSGSHQGSIQELSTIQIRCVERTPLSNSRSSLNAKMEECVKLNCEQPYVTTAIISIPTPPVTTPEGDDRPESPEYSGGNIVRVSAL

SEQ ID NO: 633 - DNA, 2579 bp, Homo sapiens
ggccctggctgccgccgctgcctcgtccggactcggagaggacttgggagggacagcggcgctgggaggtggcttagcagagactttccagcaactgctgcccaggacttttttttttttttttctttttcccaggaggcggcgacggcggcggcggggggagaggaagagaaagaagcgtctccagctgaagccaatgcagccctccggctctccgcgaagaagttccctgccccgatgagcccccgccgtgcgtccccgactatccccaggcgggcgtggggcaccgggcccagcgccgacgatcgctgccgttttgcccttgggagtaggatgtggtgaaaggatggggcttctcccttacggggctcacaatggccagagaagattccgtgaagtgtctgcgctgcctgctctacgccctcaatctgctcttttggttaatgtccatcagtgtgttggcagtttctgcttggatgagggactacctaaataatgttctcactttaactgcagaaacgagggtagaggaagcagtcattttgacttactttcctgtggttcatccggtcatgattgctgtttgctgtttccttatcattgtggggatgttaggatattgtggaacggtgaaaagaaatctgttgcttcttgcatggtactttggaagtttgcttgtcattttctgtgtagaactggcttgtggcgtttggacatatgaacaggaacttatggttccagtacaatggtcagatatggtcactttgaaagccaggatgacaaattatggattacctagatatcggtggcttactcatgcttggaatttttttcagagagagtttaagtgctgtggagtagtatatttcactgactggttggaaatgacagagatggactggcccccagattcctgctgtgttagagaattcccaggatgttccaaacaggcccaccaggaagatctcagtgacctttatcaagagggttgtgggaagaaaatgtattcctttttgagaggaaccaaacaactgcaggtgctgaggtttctgggaatctccattggggtgacacaaatcctggccatgattctcaccattactctgctctgggctctgtattatgatagaagggagccggggacagaccaaatgatgtccttgaagaatgacaactctcagcacctgtcatgtccctcagtagaactgttgaaaccaagcctgtcaagaatctttgaacacacatccatggcaaacagctttaatacacactttgagatggaggagttataaaaagaaatgtcacagaagaaaaccacaaacttgttttactggacttgtgaatttttgagtacatactatgtgtttcagaaatatgtagaaataaaaatgttgccataaaataacacctaagcatatactattctatgctttaaaatgaggatggaaaagtttcatgtcataagtcaccacctggacaataattgatgcccttaaaatgctgaagacagatgtcatacccactgtgtagcctgtgtatgacttttactgaacacagttatgttttgaggcagcatggtttgattagcatttccgcatccatgcaaacgagtcacatatggtgggactggagccatagtaaaggttgatttacttctaccaactagtatataaagtactaattaaatgctaacataggaagttagaaaatactaataacttttattactcagcgatctattcttctgatgctaaataaattatatatcagaaaactttcaatattggtgactacctaaatgtgatttttgctggttactaaaatattcttaccacttaaaagagcaagctaacacattgtcttaagctgatcagggattttttgtatataagtctgtgttaaatctgtataattcagtcgatttcagttctgataatgttaagaataaccattatgaaaaggaaaatttgtcctgtatagcatcattatttttagcctttcctgttaataaagctttactattctgtcctgggcttatattacacatataactgttatttaaatacttaaccactaattttgaaaattaccagtgtgatacataggaatcattattcagaatgtagtctggtctttaggaagtattaataagaaaatttgcacataacttagttgattcagaaaggacttgtatgctgtttttctcccaaatgaagactctttttgacactaaacactttttaaaaagcttatctttgccttctccaaacaagaagcaatagtctccaagtcaatataaattctacagaaaatagtgttctttttctccagaaaaatgcttgtgagaatcattaaaacatgtgacaatttagagattctttgttttatttcactgattaatatactgtggcaaattacacagattattaaatttttttacaagagtatagtatatttatttgaaatgggaaaagtgcattttactgtattttgtgtattttgtttatttctcagaatatggaaagaaaattaaaatgtgtcaataaatattttctagagagtaaaaaaaaaaaaaaaaa

SEQ ID NO: 634 - protein, 305 aa, Homo sapiens
MAREDSVKCLRCLLYALNLLFWLMSISVLAVSAWMRDYLNNVLTLTAETRVEEAVILTYFPVVHPVMIAVCCFLIIVGMLGYCGTVKRNLLLLAWYFGSLLVIFCVELACGVWTYEQELMVPVQWSDMVTLKARMTNYGLPRYRWLTHAWNFFQREFKCCGVVYFTDWLEMTEMDWPPDSCCVREFPGCSKQAHQEDLSDLYQEGCGKKMYSFLRGTKQLQVLRFLGISIGVTQILAMILTITLLWALYYDRREPGTDQMMSLKNDNSQHLSCPSVELLKPSLSRIFEHTSMANSFNTHFEMEEL

SEQ ID NO: 635 - DNA, 2221 bp, Homo sapiens
tttttttttttttgccggagtcgagcgggtgctgctagcggaggcgccatattggaggggacaaaactccggcgacagcgagtgacacaaataaacccctggacccccttgttccctcagctctaagggccgcgatgttgtacctagaagactatctggaaatgattgagcagcttcctatggatctgcgggaccgcttcacggaaatgcgcgagatggacctgcaggtgcagaatgcaatggatcaactagaacaaagagtcagtgaattctttatgaatgcaaagaaaaataaacctgagtggagggaagagcaaatggcatccatcaaaaaagactactataaagctttggaagatgcagatgagaaggttcagttggcaaaccagatatatgacttggtagatcgacacttgagaaagctggatcaggaactggctaagtttaaaatggagctggaagctgataatgctggaattacagaaatattagagaggcgatctttggaattagacactccttcacagccagtgaacaatcaccatgctcattcacatactccagtggaaaaaaggaaatataatccaacttctcaccatacgacaacagatcatattcctgaaaagaaatttaaatctgaagctcttctatccacccttacgtcagatgcctctaaggaaaatacactaggttgtcgaaataataattccacagcctcttctaacaatgcctacaatgtgaattcctcccaacctctgggatcctataacattggctcgttatcttcaggaactggtgcaggggcaattaccatggcagctgctcaagcagttcaggctacagctcagatgaaggagggacgaagaacatcaagtttaaaagccagttatgaagcatttaagaataatgactttcagttgggaaaagaattttcaatggccagggaaacagttggctattcatcatcttcggcacttatgacaacattaacacagaatgccagttcatcagcagccgactcacggagtggtcgaaagagcaaaaacaacaacaagtcttcaagccagcagtcatcatcttcctcctcctcttcttccttatcatcgtgttcttcatcatcaactgttgtacaagaaatctctcaacaaacaactgtagtgccagaatctgattcaaatagtcaggttgattggacttacgacccaaatgaacctcgatactgcatttgtaatcaggtatcttatggtgagatggtgggatgtgataaccaagattgccctatagaatggttccattatggctgcgttggattgacagaggcaccaaaaggcaaatggtactgtccacagtgcactgctgcaatgaagagaagaggcagcagacacaaataaaggtggtccttttgtttgatgaagaaataaacttcagctgaagattttatataggactttaaaaagaagagaagagaaagaagaaacaatgcatttccaggcaaccacttaaaggatttacatagacaatcctataagatcttgaacttgaattttatgggttgtattttaataatgtaagtaaattatttatgcactcctggtgtgctatgaatattattccagttagccttggattatttcagtggccaacatatgcagacatttgtactcctcaaccattttctcaaagtaatgggcattctatgatttagacttcaaggaattccaatgatgaagattttaaggaaagtattttatattcaacaggtatattctgctgcatgtactgtactccagagctgttatgtaacactgtatataaatggttgcaaaaaaaaaaaaaagtcagtgcttctaaaaagaatttaagataatggtttttaaaatgcctttataataagctttgtttctttgtgaaactaattcagcaggctgaaggaaatggttcatgtgataatgtgggctggtatcctctagagtacctgggtacataaacagaaactcctgtaggtaaaaagtaatttgtgccattagtctttctatgtttctgcatccagatagagtgcagttcatgagggagggggcgggggactgaaggggaaagggcgttaaagtgatacatttttataccaaatgtgtttatttttttgtgcaagtaatccttaaaattgcaattgtattaggtgttaaaataaagtttttaaaaaattaaaaaaaaaaaaaaaaaa

SEQ ID NO: 636 - protein, 418 aa, Homo sapiens
MLYLEDYLEMIEQLPMDLRDRFTEMREMDLQVQNAMDQLEQRVSEFFMNAKKNKPEWREEQMASIKKDYYKALEDADEKVQLANQIYDLVDRHLRKLDQELAKFKMELEADNAGITEILERRSLELDTPSQPVNNHHAHSHTPVEKRKYNPTSHHTTTDHIPEKKFKSEALLSTLTSDASKENTLGCRNNNSTASSNNAYNVNSSQPLGSYNIGSLSSGTGAGAITMAAAQAVQATAQMKEGRRTSSLKASYEAFKNNDFQLGKEFSMARETVGYSSSSALMTTLTQNASSSAADSRSGRKSKNNNKSSSQQSSSSSSSSSLSSCSSSSTVVQEISQQTTVVPESDSNSQVDWTYDPNEPRYCICNQVSYGEMVGCDNQDCPIEWFHYGCVGLTEAPKGKWYCPQCTAAMKRRGSRHK

SEQ ID NO: 637 - DNA, 1240 bp, Homo sapiens
tttttttttttttgccggagtcgagcgggtgctgctagcggaggcgccatattggaggggacaaaactccggcgacagcgagtgacacaaataaacccctggacccccttgttccctcagctctaagggccgcgatgttgtacctagaagactatctggaaatgattgagcagcttcctatggatctgcgggaccgcttcacggaaatgcgcgagatggacctgcaggtgcagaatgcaatggatcaactagaacaaagagtcagtgaattctttatgaatgcaaagaaaaataaacctgagtggagggaagagcaaatggcatccatcaaaaaagactactataaagctttggaagatgcagatgagaaggttcagttggcaaaccagatatatgacttgcagcacttctaaaagattgaaaacaccaagaagatagatagaatattcactatttctcatattgatgcaattgtggtgctctttttcatttgaaacatcttctcctaaaatatacactttaagaaatagtcatttctgtttttgcattaaagtaaattaaagcagaaaacacatgctcacttttggctaacttcagtgtatagatttcatacttatgttgtctttcctgggtacagatttattactgaacaagtacgtgtaagtaaaatgtcattggtgagcaggacacaagataaaaggtgaacaccacatatggtgtgaattgtaaatgcttataccacaaacttgaaaatgtgtcatgtagagccatggaaaatgtctagttgtttttatgtagtacacacattttaatggtgctaacaacctgggctcttttgttcatagagttattctgaaaaaaatttcataaaagacactgcctaaagataggtagaataggctgtagcttgatttactgtggaataaaaaccaaaaaaaaaaaggtcttaattgtttcagtctttaattatgtctataaacttagaaaaaggcatttacatttgaatctagactaatttgtttagtaacattcttcctcatattcaatgactgtatgtatcagtccttatttagagactgcctgctttttaattcatatagctctttggttctattctttgttttgtttattattttgttgttttattgcttgttagacctttactaaagatattttgtgtatttagaaaaaatataacataaatatatgctttttaaatatgaaaaaaaaaaaaaaaaaa

SEQ ID NO: 638 - protein, 92 aa, Homo sapiens
MLYLEDYLEMIEQLPMDLRDRFTEMREMDLQVQNAMDQLEQRVSEFFMNAKKNKPEWREEQMASIKKDYYKALEDADEKVQLANQIYDLQHF

SEQ ID NO: 639 - DNA, 5293 bp, Homo sapiens
cgcgcgtgtgtttatgtgtctgtgtgcgtgtgtgtgtgtgtctctctctgtgtgtgtgtgagatgaattggagtcatacgactgggtgtttccttccgagtggttttcatcagcaatccattaggaaatcatggaaactttttttttcctggctaaaaggatgaaaactgagtcatccacttttgactgtcatccatggaagagctcctattaaaagcctcagactttcgggacctatgattctttggcacaaccttttggaaaattcttaagcagggatgaagcaaacttgattggagttggggagaaagaagacagattagtacttttcatgctgacaaaaaatagctgctatgacttttcccgcaacgtggacaggggccaagtgaagctgaactggtcatggtctgtcgcccagtgttcccttgtcgtcggcgattttgcccccgacccttcttggtgggcttagtggtggcaatctgtctcttctaccagactctgaccctccgagggtcgaggaagctcacagccgctgcccctggggctgtcccacacacatccactgaaacccaggcaagcagatgcaagaaaggattctctcaggacaaacagtgcttccttctctctggtaatgcccaggaaaccagaaaggtcaaagaatcaatggagacacactttggcagccatggccgaagggccatactctacaggcctcctttctacagcaaaacagagcttcagctacaccagcacattctgactcaacatggctatacggttgtcatcgctgaagaaaggctcaatgctggcctagggccggggctactagaacaaggtgatctgggctcttgggatctgctcatttgcctgtcttctaagaaagcagaaggaacaccctgtatatccaaggaagtcatgcgccagttaggtttacatcaaaaggcaaacagattaccagaaatacagcagccactttgcagaaaggaaggattatgtcaaatagttagaagattcccagaactgcaacttccagtgagtccctctgtgtgtctggatcagggaatgcaattaaagccgagtacttcgagtcaccttttaaaaacagtgaagccacgtgtgtggaaaccaggggactggagtcgtgaacagctgaatgaaacgacagtccttgctccacatgaaacaacctttcgagccgaagatctatctgtgattcttaaagcgtatgtgttggtgacgtccttaacccctttgcgtgcattcattcattcgactggcacagtttggaatccaccaaagaaaaaacgcttcactgtcaagctgcaaacattttttgagacattcctgagagccagttcacctcaacaggcttttgacattatgaaggaagcaattggcaaactactgctagcggctgaagtattcagtgaaacatctactctgggaccaaagaccttccatagatgcagattctgctttcaacttctaacttttgatattggttatggcagtttcatgtaccctgtagtgctccaggtacacgagcatttaaattttcaagattatgataatatggattttgaggaccaaaatacagaagaattccttttaaatgacactttcaattttctcttccctaatgaatcatcactttccatattttctgagatatttcagagactttatagatcagatgttttcaagggtgaaaactatcaaaaggaactaaatcagtgtctgtccttagaagaaattaactcaattatgactttcataaaggaacttggaagtctgggacaattccaactgctcttcccatctactactcctgggattcagtcactgatgcatgaattttatgatgtggcaaatcctgtgggaaatcctggctcagtcctgacccaatactggtctcttttaaatgtatttgaacaatttcagttcatgaataaaaagacacagccacatccactggaatggaattctttcacagaagataagaacattgaaaaaccacaagtgccatttgatgcaatagaaaataaaaaagctgcagttccacaaattaaaaatgaaaataaagaaatacattgcagtgatgatgaaaacacaccatgtcatatcaagcagatcttcacacatccacatttggaactaaatcctgactttcatccaaagatcaaagattattactgtgaagtcccatttgatgtggtaacagtgacaattggagtggaaactcctaagtgtctgtgcaaggtgcacctgtacgagcaggcagggccaagctttgccagctaccctctgggcttaggaatgaacagaatctcaatatttgttgtggatgaatctccagcacacggtgagactctgatcacgtacaaactcaccatctatagagaagaccgcccaagtctgcccttgtttgaggccttcacagcatgtggttttgtgcaggattgtggtttgctgattcatccagaggaaacctgtgggttacagcctatttcttctgactacattgaagccattttacagtctgaactaaaaagatgtccatctggggacatgaaaggccagtggattgtgccttgccttagttgttcggacaacaggacgtgtgactggagagaaataacctggcagccccacaactgccaatatggtgtcctaactaagcctcaactccagcagtgcctgggaggaaggaagattctgttcattggagattcaaccaacagagggatcatgtactatcttattgaaaggctgaatgaaacgttgcgggaatggcagaaagtacatggcactaaattctatcacaacgtcaatggtgggaagactttgatcagttattcctactatccccagttctggataagcccttcattgagaccaacatttgaaaatgcacttgaacacctcttgcaaagatcacgtcccctagagaatactggccagactgtattggttgttggtggtgttcagtggcttaattccaatcacctgcaaattattcacaaagttttgaagagggaaaatttactcaatatcctagtgatcatcaaaactttgggaattggatttcatctgccagtggatggagtacatttcttaacacagagtgaagtacagaacttatggaaagaaaatttgattattctggatactgcaaaaaaacatggctatgaagtagttgacacattcactataacaatggggcgttacaaagagtttctacaggggaagtgtggatgtcatttccatgaggtagtgaaatcaaagttatccaaagaatataactttattaaaatgaaaagatcaagaaatcatatcatgggaagatatttcagcaatcaaagcaagctacaacaaggcactgtaacaaattttcgatcgccatatcatgtcagaggtccaataaatcaggtttgttctgaaatccttctcagcaggatgtgtgcaaataaaaggactatgtaggctccctgcaggagagctgaatctggagctggagacgagctagtcacccggacaatggtctaggagccaagcgctgcacatcgcacacacttgggatcgaccacacacacttgtgcacaccagcacatgcatgcacaccagtacacacacagttaaataatgataacacttcttacagctttatgaattcaagatgtgaccttgaacaccagtccatttcacagtgaaagatatacctagagaaacgttacttgaagcataattattaaccagaaccactgtgggccaggtatggcattatgataataaagagaaatatagacacttaaaattatgtgaaaaaaaggataatgctctttcatgttgtcttaccatatctataggtacatcaatattgaaaaggagaaaaaccaatgacattccactggcaagtagaagttgtcctttcattctttaccaggagaaaatgtgatgtttatgatggcttaggctttgtgaatctaatgcttatgaaaaacatttcttcctatactttttaaattttattactgaaaggaaaagaacaggaatgttccacaagggaatttgaagagattctgtgagagagatatgaaatattttatagttaaaacaccaatatattcaactttacacttcttgtgtttttcataaacattccctcttgtcttatctgtgtacttcgatgggtaactgcagtctgaattaatgaaatatgtaattttaaagtaagtaacaaaatgtagttcctcatgtattactgtactatgtttcattgatgatattacttaaatcttgtgtttgccattacagccctatgtaacttaaaattacaattatattttatgtaaatattttgcaaaggactatgcattctgaaatgcataggtgctttttcccaccaagcatttgcatatgtccacaaatagtattatgttactagtatctatattttgattttcctgagcaactgtatcaaatccaaatttagattagacaaaaaattattattttaattaaactgtggcatacatataatacatacctaattatagtagtgagaactatttcttttatctctttaggttcaaaatggtgaatttctttattatatgaatgctttgttgtgagataacatcacactgttacaatggattttagaggtttgtcttttttgggtggggtgggaagctgagagggttaattcaatacatggctgaaattaccaaatgtataaatacctcattttcactaccatacaagaaaaaaacacctattttgattgatcagttcttttgtatgaatatccacctcctttaaatactctatttttatatatatttttatatgaagataaacatgaatttatatttaactgtcttaaattatatttacataaatgcaaatatcacttgatataaacaatacaaatctgcatcttacagatgataatttttttagaagaatgatacagaattaactttaaaaataaaacttttctaatatacacttaaatgcaaacatcatttttaaattttcagtgatttttttaatgacataaaacgttaccaatgtgtgcagcctctccatcatgttttaacatactgtatactctatagcagtattacagtcagtatttcatataattttctttagacctaactgttaccatctgactgaggttactctggtatttatctcttcgctgctgaaataataatggattttagaaacaattgtaataatatcattaataaatgtcttactagtaataaaaaaaaaaaaaaaaaaa

SEQ ID NO: 640 - protein, 1026 aa, Homo sapiens
MVCRPVFPCRRRFCPRPFLVGLVVAICLFYQTLTLRGSRKLTAAAPGAVPHTSTETQASRCKKGFSQDKQCFLLSGNAQETRKVKESMETHFGSHGRRAILYRPPFYSKTELQLHQHILTQHGYTVVIAEERLNAGLGPGLLEQGDLGSWDLLICLSSKKAEGTPCISKEVMRQLGLHQKANRLPEIQQPLCRKEGLCQIVRRFPELQLPVSPSVCLDQGMQLKPSTSSHLLKTVKPRVWKPGDWSREQLNETTVLAPHETTFRAEDLSVILKAYVLVTSLTPLRAFIHSTGTVWNPPKKKRFTVKLQTFFETFLRASSPQQAFDIMKEAIGKLLLAAEVFSETSTLGPKTFHRCRFCFQLLTFDIGYGSFMYPVVLQVHEHLNFQDYDNMDFEDQNTEEFLLNDTFNFLFPNESSLSIFSEIFQRLYRSDVFKGENYQKELNQCLSLEEINSIMTFIKELGSLGQFQLLFPSTTPGIQSLMHEFYDVANPVGNPGSVLTQYWSLLNVFEQFQFMNKKTQPHPLEWNSFTEDKNIEKPQVPFDAIENKKAAVPQIKNENKEIHCSDDENTPCHIKQIFTHPHLELNPDFHPKIKDYYCEVPFDVVTVTIGVETPKCLCKVHLYEQAGPSFASYPLGLGMNRISIFVVDESPAHGETLITYKLTIYREDRPSLPLFEAFTACGFVQDCGLLIHPEETCGLQPISSDYIEAILQSELKRCPSGDMKGQWIVPCLSCSDNRTCDWREITWQPHNCQYGVLTKPQLQQCLGGRKILFIGDSTNRGIMYYLIERLNETLREWQKVHGTKFYHNVNGGKTLISYSYYPQFWISPSLRPTFENALEHLLQRSRPLENTGQTVLVVGGVQWLNSNHLQIIHKVLKRENLLNILVIIKTLGIGFHLPVDGVHFLTQSEVQNLWKENLIILDTAKKHGYEVVDTFTITMGRYKEFLQGKCGCHFHEVVKSKLSKEYNFIKMKRSRNHIMGRYFSNQSKLQQGTVTNFRSPYHVRGPINQVCSEILLSRMCANKRTM

SEQ ID NO: 641 - DNA, 1904 bp, Homo sapiens
atgtgtctatcagcctgaggagtaatttgattcaggtgttctagaagtcatgatgtgggctgtgtctgttgaattcccagcgatgcaaggggacacaccctgtgactcattccttaattgagtgctgatatttgattggtttatcgcacacctgatgggtgggtggggtgttcgcggttggagggggtgagttatataagggctgatgcggccagagagctggtcatttgaagactctctcggaagagatagcgtcttgctgcaacctgcggtcccagcagaaaaaccttgtgatccttgttgcgggcgacatggaagacgactcactctatttgggaggtgactggcagttcaatcacttttcaaaactcacatcttctcggctagatgcagcttttgctgaaatccagcggacttctctctctgaaaagtcaccactctcatctgagacccgtttcgacctctgtgatgatttggctcctgtggcaagacagcttgctcccagggagaagcttcctctgagtagcaggagacctgctgcggtgggggctgggctccagaagataggaaataccttctatgtgaacgtttccctgcagtgcctgacatacacactgccgctttccaactacatgctgtcccgggaggactctcaaacgtgtcatcttcacaagtgctgcatgttctgtactatgcaagctcacatcacatgggccctccacagtcctggccatgtcatccagccctcacaggtattggctgctggcttccatagaggtgagcaggaggatgcccatgaatttctcatgtttactgtggatgccatgaaaaaggcatgccttcccgggcacaagcagctagatcatcactccaaggacaccaccctcatccaccaaatatttggagcgtattggagatctcaaatcaagtatctccactgccacggcgtttcagacacctttgacccttacctggacatcgccctggatatccaggcagctcagagtgtcaagcaagctttggaacagttggtgaagcccaaagaactcaatggagagaatgcctatcattgtggtctttgtctccagaaggcgcctgcctccaagacgttaactttacccacttctgccaaggtcctcattcttgtattgaagagattctccgatgtcacaggcaacaaacttgccaagaatgtgcaatatcctaagtgccgtgacatgcagccatacatgtctcagcagaacacaggacctcttgtctatgtcctctatgctgtgctggtccacgctgggtggagttgtcacaacggacattacttctcttatgtcaaagctcaagaaggccagtggtataaaatggatgatgccgaggtcactgcctctggcatcacctctgtcctgagtcaacaggcctatgtcctcttttacatccagaagagtgaatgggaaagacacagtgagagtgtgtcaagaggcagggaaccaagagcccttggtgctgaagacacagacaggccagcaacgcaaggagagctcaagagagaccacccttgcctccaggtacccgagttggacgagcacttggtggaaagagccactcaggaaagcaccttagaccactggaaattcccccaagagcaaaacaaaacgaagcctgagttcaacgtcagaaaagttgaaggtaccctgcctcccaacgtacttgtgattcatcaatcaaaatacaagtgtggtatgaaaaaccatcatcctgaacagcaaagctccctgctaaacctctcttcgacgaaaccgacagatcaggagtccatgaacactggcacactcgcttctctgcaagggagcaccaggagatccaaagggaataacaaacacagcaagagatctctgcttgtgtgccagtga

SEQ ID NO: 642 - protein, 530 aa, Homo sapiens
MEDDSLYLGGDWQFNHFSKLTSSRLDAAFAEIQRTSLSEKSPLSSETRFDLCDDLAPVARQLAPREKLPLSSRRPAAVGAGLQKIGNTFYVNVSLQCLTYTLPLSNYMLSREDSQTCHLHKCCMFCTMQAHITWALHSPGHVIQPSQVLAAGFHRGEQEDAHEFLMFTVDAMKKACLPGHKQLDHHSKDTTLIHQIFGAYWRSQIKYLHCHGVSDTFDPYLDIALDIQAAQSVKQALEQLVKPKELNGENAYHCGLCLQKAPASKTLTLPTSAKVLILVLKRFSDVTGNKLAKNVQYPKCRDMQPYMSQQNTGPLVYVLYAVLVHAGWSCHNGHYFSYVKAQEGQWYKMDDAEVTASGITSVLSQQAYVLFYIQKSEWERHSESVSRGREPRALGAEDTDRPATQGELKRDHPCLQVPELDEHLVERATQESTLDHWKFPQEQNKTKPEFNVRKVEGTLPPNVLVIHQSKYKCGMKNHHPEQQSSLLNLSSTKPTDQESMNTGTLASLQGSTRRSKGNNKHSKRSLLVCQ

SEQ ID NO: 643 - DNA, 1593 bp, Homo sapiens
atggaggacgactcactctacttgggaggtgagtggcagttcaaccacttttcaaaactcacatcttctcggccagatgcagcttttgctgaaatccagcggacttctctccctgagaagtcaccactctcatctgaggcccgtgtcgacctctgtgatgatttggctcctgtggcaagacagcttgctcccagggagaagcttcctctgagtagcaggagacctgctgcggtgggggctgggctccagaatatgggaaatacctgctacgagaacgcttccctgcagtgcctgacatacacaccgccccttgccaactacatgctgtcccgggagcactctcaaacatgtcagcgtcccaagtgctgcatgctctgtactatgcaagctcacatcacatgggccctccacagtcctggtcatgtcatccagccctcacaggcattggctgctggcttccatagaggcaagcaggaagatgcccatgaatttctcatgttcactgtggatgccatgaaaaaggcatgccttcccggccacaagcaggtagatcatcactctaaggacaccaccctcatccaccaaatatttggaggctgctggagatctcaaatcaagtgtctccactgccacgggattccagacacttttgacccttacctggacatcgccctggatatccaggcagctcagagtgtcaagcaagctttggaacagttggtgaagcccgaagaactcaatggagagaatgcctatcattgtggtctttgtctccagagggcgccggcctccaagacgttaactttacacacttctgccaaggtcctcatccttgtmttgaagagattctccgatgtcacaggcaacaaacttgccaagaatgtgcaatatcctgagtgccttgacatgcagccatacatgtctcagcagaacacaggacctcttgtctatgtcctctatgctgtgctggtccacgctgggtggagttgtcacaacggacattacttctcttatgtcaaagctcaagaaggccagtggtataaaatggatgatgccgaggtcaccgcctctagcatcacttctgtcctgagtcaacaggcctacgtcctcttttacatccagaagagtgaatgggaaagacacagtgagagtgtgtcaagaggcagggaaccaagagcccttggcgcagaagacacagacaggcgagcaacgcaaggagagctcaagagagaccacccctgcctccaggcccccgagttggacgagcacttggtggaaagagccactcaggaaagcaccttagaccactggaaattccttcaagagcaaaacaaaacgaagcctgagttcaacgtcagaaaagtcgaaggtaccctgcctcccgacgtacttgtgattcatcaatcaaaatacaagtgtgggatgaagaaccatcatcctgaacagcaaagctccctgctaaacctctcttcgacgaccccgacacatcaggagtccatgaacactggcacactcgcttccctgcgagggagggccaggagatccaaagggaagaacaaacacagcaagagggctctgcttgtgtgccagtga

SEQ ID NO: 644 - protein, 530 aa, Homo sapiens
MEDDSLYLGGEWQFNHFSKLTSSRPDAAFAEIQRTSLPEKSPLSSEARVDLCDDLAPVARQLAPREKLPLSSRRPAAVGAGLQNMGNTCYENASLQCLTYTPPLANYMLSREHSQTCQRPKCCMLCTMQAHITWALHSPGHVIQPSQALAAGFHRGKQEDAHEFLMFTVDAMKKACLPGHKQVDHHSKDTTLIHQIFGGCWRSQIKCLHCHGIPDTFDPYLDIALDIQAAQSVKQALEQLVKPEELNGENAYHCGLCLQRAPASKTLTLHTSAKVLILVLKRFSDVTGNKLAKNVQYPECLDMQPYMSQQNTGPLVYVLYAVLVHAGWSCHNGHYFSYVKAQEGQWYKMDDAEVTASSITSVLSQQAYVLFYIQKSEWERHSESVSRGREPRALGAEDTDRRATQGELKRDHPCLQAPELDEHLVERATQESTLDHWKFLQEQNKTKPEFNVRKVEGTLPPDVLVIHQSKYKCGMKNHHPEQQSSLLNLSSTTPTHQESMNTGTLASLRGRARRSKGKNKHSKRALLVCQ

SEQ ID NO: 645 - DNA, 425 bp, Homo sapiens
gagtgcatgtgaccttgtgccacagcgggaatcttgactaccacacaaatgaatccactcaaatgttggcaagtggagcagagtcccaggacaggtacagaaacacccccagttcaaggatcttcacacctggatttaggcctactcctgcaactaccccaggccagttatccaggcagtgactttcagtgcagctacagtcacctctggaaacctgcggagactttaaaaatttccagaaggcaccaatttgatcttctactatgttgcagacatctgttctgcaaacaccaaacaaattgagacaatgaccttccgcaggacccaaaccacctcttactgaaggaaagaagatccagtgagatagtccacaaatggaatgtaaatccataaacactcttaagtaacagaataaatttagtatg

SEQ ID NO: 646 - protein, 39 aa, Homo sapiens
MLASGAESQDRYRNTPSSRIFTPGFRPTPATTPGQLSRQ

SEQ ID NO: 647 - DNA, 2482 bp, Homo sapiens
ttccagaagcaacccaggagccccgagacctgcagggatgtgtgcaccctgacccctgacgcctagtcctgcacctgcagccagctggcctcgggctgcaaacatggcgggtgcggtccaattgacggtggtttccaagcgcctcctggaggagaaaacacatgagggtgtggtcagggttctctgctgacagacctaccgtggggaagaaagagaaactctgaagatggatcatggccatgactgcatgtcaaggagaatctccttgaagacactgaggcctacgtcgaggtagagtaaatatggtccaattaaaaggtgaccagaggcagtataaaaggcagcctggaaagcagaggtccttctccgccccttcctccgtcttcctggatgctgcatcacttccaggggggctgctccagcacctgcccatctcagcgccagccggtgaaagaaagtagacgtgtaatttcaggtgacccaacagtcaacccctgaaaaaggcggtcacaaaacccccaggagacgaagatgacggcacgtcgtgaccccaaacctggggcaaagagactggtgagagcccagaccctccagaagcagcggagggccccagttgggccaagggctcccccgcccgatgaagaagatcccaggctcaagtgcaaaaactgcagggcccttggccacacggtcagaagtaccaggtgccccatgaagtgctggaaggcagccctggttccaccgaccttggggaaaaaggaagggaaggaaaacctgaaaccatggaagccccaggttgaagccaacccggggcccttgaacaaggataagggagagaaggaagagagaccaaggcaacaagacccgcagagaaaggctctcctccacatattttccgggaaacctccagagaagctgctgccaaatcgaaaaggatccacggaatcttctgtttttctgagggttgcaagccggccaatgccggtccacacaacaagtaagaggccgtgcgtggaccctgaactcgctgatcgctcagctaccgaaatgtctggcagaggctccgtcttggcttcactgtctcccctcagaaaagccagtctgagatcctcctcaagtcttggaccaaaggaaagacagacaggtgctgcggccgacatccctcagcctgcagtcaggcaccagggccccgagcctctcctcgtggtgaagccgacacacagcagccgtgagggtggctgccgagaagttccccaggctgcctccaaaacccacggcctgctccaggctgtcagaccccaggcacaagacaaacgtcctgcggtgacctgacagcccggcccaccagccgccacacacagcttgggcctaggctccaatctcagcttcagaccaggagccaagagacctgcccaggctccgattcagggttgcctgaacttccccaagaaaccgagactgggtcccttccagatccccgaaagcgccatccagggaggtgagctgggggccccggagaatctccaacctccgccagccgcaaccgaacttggaccaagtacgtcgccccagatgggcaggaggacacccgcccaggtgcccggcgtcgaccggcagcctccgcacagcagaccttgcctgcctactgcccaggcctgcaccatgtcccatcacccagcggccagccatgatggggcccagcctctcagagtgctcttccggagactagaaaacagacgctggagctccagcctcctggcggccccctcatttcactctcctgagaagccgggagccttcctcgctcagagccctcatgtgtcagagaagtctgagggtccctgtgttcgtgtcccaccgaacgtcctctatgaagaccttcaggtttcctcctcctcagaggacagcgattctgacctgcagtgagactgcaggtggcaggggctccttggcctccagctcccgtgacttggaggggactgtgggactgaggagagcagagcagagagcacactctgtgcggtgactccgaagctccccggctgtggcgcttctgtggatgtgggagcccaggccaggcagggagcagatgcagggactctgcctcattgaattctggtgagggacgttgtagttggcgtggttctccggaaacgcgccaggaaaagcttccgtgccagagattcgttgcctcagaaactgcgtgacgcgcaggagtcagacttccgctgggacgtcaataggaaactggggaattactgtgtatttgctctctagatgactgaataagggaaaagttagggaaccctgagaggtgcagcccttccgctgtgccccgccctgagagcagtgtttcggacgctgggaagcgtgctgtgcgaagcgctctcggggtctttcctcagcctcgaaaactgggctctggaatgcctttgtaaacaggtgtgttgaatttgttttgaagtgaataaaattctcaaaa

SEQ ID NO: 648 - protein, 266 aa, Homo sapiens
MTARRDPKPGAKRLVRAQTLQKQRRAPVGPRAPPPDEEDPRLKCKNCRALGHTVRSTRCPMKCWKAALVPPTLGKKEGKENLKPWKPQVEANPGPLNKDKGEKEERPRQQDPQRKALLHIFSGKPPEKLLPNRKGSTESSVFLRVASRPMPVHTTSKRPCVDPELADRSATEMSGRGSVLASLSPLRKASLRSSSSLGPKERQTGAAADIPQPAVRHQGPEPLLVVKPTHSSREGGCREVPQAASKTHGLLQAVRPQAQDKRPAVT

SEQ ID NO: 649 - DNA, 2330 bp, Homo sapiens
gcccttccagaagcaacccaggagccccgagacctgcagggatgtgtgcaccctgacccctgacgcctagtcctgcacctgcagccagctggcctcgggctgcaaacatggcgggtgcggtccaattgacggtggtttccaagcgcctcctggaggagaaaacacatgagggtgtggtcagggttctctgctgacagacctaccgtggggaagaaagagaaactctgaagatggatcatggccatgactgcatgtcaaggagaatctccttgaagacactgaggcctacgtcgaggtagagtaaatatggtccaattaaaaggtgacccaacagtcaacccctgaaaaaggcggtcacaaaacccccaggagacgaagatgacggcacgtcgtgaccccaaacctggggcaaagagactggtgagagcccagaccctccagaagcagcggagggccccagttgggccaagggctcccccgcccgatgaagaagatcccaggctcaagtgcaaaaactgcagggcccttggccacacggtcagaagtaccaggtgccccatgaagtgctggaaggcagccctggttccaccgaccttggggaaaaaggaagggaaggaaaacctgaaaccatggaagccccaggttgaagccaacccggggcccttgaacaaggataagggagagaaggaagagagaccaaggcaacaagacccgcagagaaaggctctcctccacatattttccgggaaacctccagagaagctgctgccaaatcgaaaaggatccacggaatcttctgtttttctgagggttgcaagccggccaatgccggtccacacaacaagtaagaggccgtgcgtggaccctgaactcgctgatcgctcagctaccgaaatgtctggcagaggctccgtcttggcttcactgtctcccctcagaaaagccagtctgagatcctcctcaagtcttggaccaaaggaaagacagacaggtgctgcggccgacatccctcagcctgcagtcaggcaccagggccccgagcctctcctcgtggtgaagccgacacacagcagccgtgagggtggctgccgagaagttccccaggctgcctccaaaacccacggcctgctccaggctgtcagaccccaggcacaagacaaacgtcctgcggtgacctgacagcccggcccaccagccgccacacacagcttgggcctaggctccaatctcagcttcagaccaggagccaagagacctgcccaggctccgattcagggttgcctgaacttccccaagaaaccgagactgggtcccttccagatccccgaaagcgccatccagggaggtgagctgggggccccggagaatctccaacctccgccagccgcaaccgaacttggaccaagtacgtcgccccagatgggcaggaggacacccgcccaggtgcccggcgtcgaccggcagcctccgcacagcagaccttgcctgcctactgcccaggcctgcaccatgtcccatcacccagcggccagccatgatggggcccagcctctcagagtgctcttccggagactagaaaacagacgctggagctccagcctcctggcggccccctcatttcactctcctgagaagccgggagccttcctcgctcagagccctcatgtgtcagagaagtctgagggtccctgtgttcgtgtcccaccgaacgtcctctatgaagaccttcaggtttcctcctcctcagaggacagcgattctgacctgcagtgagactgcaggtggcaggggctccttggcctccagctcccgtgacttggaggggactgtgggactgaggagagcagagcagagagcacactctgtgcggtgactccgaagctccccggctgtggcgcttctgtggatgtgggagcccaggccaggcagggagcagatgcagggactctgcctcattgaattctggtgagggacgttgtagttggcgtggttctccggaaacgcgccaggaaaagcttccgtgccagagattcgttgcctcagaaactgcgtgacgcgcaggagtcagacttccgctgggacgtcaataggaaactggggaattactgtgtatttgctctctagatgactgaataagggaaaagttagggaaccctgagaggtgcagcccttccgctgtgccccgccctgagagcagtgtttcggacgctgggaagcgtgctgtgcgaagcgctctcggggtctttcctcagcctcgaaaactgggctctggaatgcctttgtaaacaggtgtgttgaatttgttttgaagtgaataaaattctcaaaaa

SEQ ID NO: 650 - protein, 266 aa, Homo sapiens; identical to SEQ ID NO: 648

SEQ ID NO: 651 - DNA, 2041 bp, Homo sapiens
ctcgcccacgttatggcgcccgaggagaacgcggggaccgaactcttgctgcagggttttgagcgccgcttcctggcggtgcgcacactgcgctccttcccctggcagagcttagaggcaaagttaagagactcatcatattctgagctgctgcgggatattttgcagaagactgtgaggcatcctgtgtgtgtgaagcacccgccgtcagtcaagtatgcctggtgctttctctcagaactcatcaaaaagtcctcaggaggctcggtcacactctccaagagcacagccatcatctcccacggtaccacaggcctggtcacatgggatgccgccctctaccttgcagaatgggccatcgagaacccggcagccttcattaacagacgtgctgtattgcccagaagccatcgtgtcgctggtcggggtcctgcagaggctggctgcctgccgggagcacaagcgggctcctgaggtctacgtggcctttaccgtccgcaacccagagacatgccagctgttcaccaccgagctaggccgggatgggatcagatgggaagcagaagctcatcatgaccagaaactgtttccctatggagagcacttggagatggcaatgctgaacctcacactgtaggactcacacatgactccaaagggattgtgagaatcaagtcactctcgtgggaagaatttttatatgggaaagtggataaaactttcattggactggaatgtttggagattattaaattccaaatcaggaatcaaaactgccctctaataagacattagctgtctaggcgtgtgggtgccccctttctgccagcagttctggttctcaagaaaatcatcataaatcagacatgaaaattctggctccaaaaatagcattttctttctgcaaataaaaacgtgtgtatcaaggatgacgttcccccaacgtggacacactcggttcctcagaaagccaagcccgctgcagctgccacatccctggacacactcggttcctcacaaagccaagcccgctgcagctgccacatcccagggcttatggtgcagcaggcgcttttttcaagacaggaatgaaagtgttaggaacatggcagaaaggtgacacctggagaccaaatgcaggatgaggagtactgcagaggtcacagggaagtcacagaacagtaatacgctagcaggggcatggggcatgaagaacagaagacaggaagcatttcagagactccaaagaagaaatcagggccaaccacagcttcccgggtcattcaccaggtgacaccactgccgtcatttcagcttctggccactgggaggcgctgctcgaaaggctttgccctgagactccaagaagctgcgggaaggacagcaggggccctggggttttagcctctggcccaggagttatgtgtccataaccaaagggagcacagtctgcacccagctctcatcccatcagagctgctgagactcttgcaggtacttccagaactggtttagcttgcctgcaggatcagaaaagtttgagaaaagcatctgcaaaatgctaaagagcagagcttaactcattgcctgtccccaccccatcccaggtcaccacttggatgaccccaggtccccgacccaacaacaacccctcccaagtccctaactccctcacttggacttgagacccttcacaacccccctcacttggacttgagacccttcacaacccagcagcgctccacctccaacttgacatcatgctttctggaaacttccccgtatgtcccactttcccacacttggtgccctggagcaccttccggcctctacatgctgtacgttcccctgtgagcaccctcctctcggcctctggccaacacagtcccacccatctgtgggtaacaagggggtgtgggtgttcttttcagccttgctaaactgtctgaatcaaggatcacaaactacagcctgcaggccaaatccagcccacagcctgtgtttgtgaataaagctttgttggaacaaagccacacccctt

SEQ ID NO: 652 - protein, 153 aa, Homo sapiens
MAPEENAGTELLLQGFERRFLAVRTLRSFPWQSLEAKLRDSSYSELLRDILQKTVRHPVCVKHPPSVKYAWCFLSELIKKSSGGSVTLSKSTAIISHGTTGLVTWDAALYLAEWAIENPAAFINRRAVLPRSHRVAGRGPAEAGCLPGAQAGS

SEQ ID NO: 653 - DNA, 1534 bp, Homo sapiens
gagtgcatgtgaccttgtgccacagcgggaatcttgactaccacacaaatgaatccactcaaatgttggcaagtggagcagagtcccaggacaggtacagaaacacccccagttcaaggatcttcacacctggatttaggcctactcctgcaactaccccaggccagttatccaggcagtgactttcagtgcagctacagtcacctctggaaacctgcggagactttaaaaatttccagaaggcaccaatttgatcttctactatgttgcagacatctgttctgcaaacaccaaacaaattgagacaatgaccttccgcaggacccaaaccacctcttactgaaggaaagaagatccagtgagatagttagtccacaaatggaatgtaaatccataaacactcttaagtaacagaataaatttagtatgaacgtttttatgtgggagctcttgacatggttgctgctcatatgtcagagacacatgcagtttaagaaaggtagcagttccaatcctggtttggcccaacagtcactgcatttttggtggggaaaagggatgtgggaggagatggtacctcttcatctttttctctgggttttctgtcagaaagggatgttgcttactccagtggcaaaaaatgccagtgtcttctgccagagtgggttactgagggccctggtgcttccaccttgtggctgatacagatagtccctttctgcttttgtttctagccaaaaaagatgtttctggcatctcaggtatgctgatttcagcagctgttttttctatatggctattttttttttctttcactctctctctctctctctctttttttttttttttgttggcttcactgtgttgccatagtttcttaaatggtcccttgaaccctcccagtgctattttggtttgtacataactatctatatattttttttctttgggggagtgtgtagagctaaaggctggtatatgctgctcctgctccccgaaagtgacattattcccctaagctaatatttcaggctttcaatttattcgtggtttcacctgtttaaacataagtagaaattactttttctctccatatttagatttgatctatctactttaattgctaatagtgtcttagtcatagaatagattagttagaaaaaagtgtttttgacattataaatgattctttcaatttgtgtctaaaagtggaaaatactagaaagcttaacatttattattgtattcagaccagtatttcctccagatgacctttattacaacaaagataatttaatgaagatctctctaatggtaaagctgatggctttgtgctattacaatatccttcgaataaagtgacagtctggtggaaagaacaactaaagcaaggattaggaagaaaatagttaataccttcattttggtctcactctgcattaagagttgtcatcgtgttaagggtttattatacattaagtaatttaatgtttatttaataataaatggatcctattaaatatgatttttaaaa

SEQ ID NO: 654 - protein, 39 aa, Homo sapiens; identical to SEQ ID NO: 646

SEQ ID NO: 655 - DNA, 2482 bp, Homo sapiens
ttccagaagcaacccaggagccccgagacctgcagggatgtgtgcaccctgacccctgacgcctagtcctgcacctgcagccagctggcctcgggctgcaaacatggcgggtgcggtccaattgacggtggtttccaagcgcctcctggaggagaaaacacatgagggtgtggtcagggttctctgctgacagacctaccgtggggaagaaagagaaactctgaagatggatcatggccatgactgcatgtcaaggagaatctccttgaagacactgaggcctacgtcgaggtagagtaaatatggtccaattaaaaggtgaccagaggcagtataaaaggcagcctggaaagcagaggtccctctctgccccttcctccgtcgtcctggatgctgcatcgcttccagccgggctgctgcagcacctgcccatctcagcgccagccggggaaagaaagtagacgtgtaatttcaggtggcccaacagtcaacccctgaaaaaggcggtcacaaaacccccaggagacgaagatgacggcacgtcgtgaccccaaacctggggcaaagagactggtgagagcccagaccctccagaagcagcggagggccccagttgggccaagggctcccccgcccgatgaagaaaatcccaggctcaagtacaaaaactgcagggcccttggccacacggtcagaagtaccaggtgccccatgaagtgctggaaggcagccctggttccaccgaccttggggaaaaaggaagggaaggaaaacctgaaaccatggaagccccaggttgaagccaacccggggcccttgaacaaggataagggagagaaggaagagagaccaaggcaacaagacccgcagagaaaggctctcctccacatattttccgggaaacctccagagaagctgctgccaaatcgaaaaggatccacggaatcttctgtttttctgagggttgcaagccggccaatgccggtccacacaacaagtaagaggccgtgcgtggaccctgaactcgctgatcgctcagctaccgaaatgtctggcagaggctccgtcttggcttcactgtctcccctcagaaaagccagtctgagatcctcctcaagtcttggaccaaaggaaagacagacaggtgctgcggccgacatccctcagcctgcagtcaggcaccagggccccgagcctctcctcgtggtgaagccgacacacagcagccgtgagggtggctgccgagaagttccccaggctgcctccaaaacccacggcctgctccaggccgtcagaccccaggcacaagacaaacgtcctgcggtgacctgacagcccggcccaccagccgccacacacagcttgggcctaggctccaatctcagcttcagaccaggagccaagagacctgcccaggctccgattcagggttgcctgaacttccccaagaaaccgagactgggtcccttccagatccccgaaagcgccatccagggaggtgagctgggggccctggagaatctccaacctccgccagcagcaaccgaacttggaccaagtacgtcgccccagatgggcaggaggacacccgcccaggtgcccggcgtcgaccggcagcctccgcacagcagaccttgcctgcccactgcccaggcctgcaccatgtcccatcacccagcggccagccatgatggggcccagcctctcagagtgctcttccggagactagaaaacagacgctggagctccagcctcctggcggccccctcatttcactctcctgagaagctgggagtcttcctcgctcagagccctcatgtgtcagagaagtctgaggctccctgtgttcgtgtcccaccgaacgtcctctatgaagaccttcaggtttcctcctcctcagaggacagcgattctgacctgcagtgagactgcaggtggcaggggctccttggcctccagctcccgtgacttggaggggactgtgggactgaggagcgcagagcagagagcagactctgtgcggtgactccgaagctccccggctgtggcgcttctgtggatgtgggagcccaggccaggcagggagcagatgcagggactctgcctcattgaattctggtgagggacgttgtagttcgcgtggttctccggaaacgcgccaggaaaagcttccgtgccagagattcgttgcctcagaaactgcgtgacgcgcaggagtcagacttccgctgggacgtcaataggaaactggggaattactgtgtatttgctctctagatgactgaataagggaaaagttagggaaccctgagaggtgcagcccttccgctgtgccccgccctgagagcagtgtttcggacgctgggaagcgtgctgtgcgaagcgctctcggggtctttcctcagcctcgaaaactgggctctggaatgcctttgtaaacaggtgtgttgaatttgttttgaagtgaataaaattctcaaaa

SEQ ID NO: 656 - protein, 266 aa, Homo sapiens
MTARRDPKPGAKRLVRAQTLQKQRRAPVGPRAPPPDEENPRLKYKNCRALGHTVRSTRCPMKCWKAALVPPTLGKKEGKENLKPWKPQVEANPGPLNKDKGEKEERPRQQDPQRKALLHIFSGKPPEKLLPNRKGSTESSVFLRVASRPMPVHTTSKRPCVDPELADRSATEMSGRGSVLASLSPLRKASLRSSSSLGPKERQTGAAADIPQPAVRHQGPEPLLVVKPTHSSREGGCREVPQAASKTHGLLQAVRPQAQDKRPAVT

SEQ ID NO: 657 - DNA, 2330 bp, Homo sapiens
gcccttccagaagcaacccaggagccccgagacctgcagggatgtgtgcaccctgacccctgacgcctagtcctgcacctgcagccagctggcctcgggctgcaaacatggcgggtgcggtccaattgacggtggtttccaagcgcctcctggaggagaaaacacatgagggtgtggtcagggttctctgctgacagacctaccgtggggaagaaagagaaactctgaagatggatcatggccatgactgcatgtcaaggagaatctccttgaagacactgaggcctacgtcgaggtagagtaaatatggtccaattaaaaggtggcccaacagtcaacccctgaaaaaggcggtcacaaaacccccaggagacgaagatgacggcacgtcgtgaccccaaacctggggcaaagagactggtgagagcccagaccctccagaagcagcggagggccccagttgggccaagggctcccccgcccgatgaagaaaatcccaggctcaagtacaaaaactgcagggcccttggccacacggtcagaagtaccaggtgccccatgaagtgctggaaggcagccctggttccaccgaccttggggaaaaaggaagggaaggaaaacctgaaaccatggaagccccaggttgaagccaacccggggcccttgaacaaggataagggagagaaggaagagagaccaaggcaacaagacccgcagagaaaggctctcctccacatattttccgggaaacctccagagaagctgctgccaaatcgaaaaggatccacggaatcttctgtttttctgagggttgcaagccggccaatgccggtccacacaacaagtaagaggccgtgcgtggaccctgaactcgctgatcgctcagctaccgaaatgtctggcagaggctccgtcttggcttcactgtctcccctcagaaaagccagtctgagatcctcctcaagtcttggaccaaaggaaagacagacaggtgctgcggccgacatccctcagcctgcagtcaggcaccagggccccgagcctctcctcgtggtgaagccgacacacagcagccgtgagggtggctgccgagaagttccccaggctgcctccaaaacccacggcctgctccaggccgtcagaccccaggcacaagacaaacgtcctgcggtgacctgacagcccggcccaccagccgccacacacagcttgggcctaggctccaatctcagcttcagaccaggagccaagagacctgcccaggctccgattcagggttgcctgaacttccccaagaaaccgagactgggtcccttccagatccccgaaagcgccatccagggaggtgagctgggggccctggagaatctccaacctccgccagcagcaaccgaacttggaccaagtacgtcgccccagatgggcaggaggacacccgcccaggtgcccggcgtcgaccggcagcctccgcacagcagaccttgcctgcccactgcccaggcctgcaccatgtcccatcacccagcggccagccatgatggggcccagcctctcagagtgctcttccggagactagaaaacagacgctggagctccagcctcctggcggccccctcatttcactctcctgagaagctgggagtcttcctcgctcagagccctcatgtgtcagagaagtctgaggctccctgtgttcgtgtcccaccgaacgtcctctatgaagaccttcaggtttcctcctcctcagaggacagcgattctgacctgcagtgagactgcaggtggcaggggctccttggcctccagctcccgtgacttggaggggactgtgggactgaggagcgcagagcagagagcagactctgtgcggtgactccgaagctccccggctgtggcgcttctgtggatgtgggagcccaggccaggcagggagcagatgcagggactctgcctcattgaattctggtgagggacgttgtagttcgcgtggttctccggaaacgcgccaggaaaagcttccgtgccagagattcgttgcctcagaaactgcgtgacgcgcaggagtcagacttccgctgggacgtcaataggaaactggggaattactgtgtatttgctctctagatgactgaataagggaaaagttagggaaccctgagaggtgcagcccttccgctgtgccccgccctgagagcagtgtttcggacgctgggaagcgtgctgtgcgaagcgctctcggggtctttcctcagcctcgaaaactgggctctggaatgcctttgtaaacaggtgtgttgaatttgttttgaagtgaataaaattctcaaaaa

SEQ ID NO: 658 - protein, 266 aa, Homo sapiens; identical to SEQ ID NO: 656

SEQ ID NO: 659 - DNA, 3037 bp, Homo sapiens
agaggaccacgagcggcccgcggaggagcccgcgccggccccgatgcccagctccgcgccgcgcggacccaccgagcccgcgctcagacgccccagctccgccgagaggccgcttgcgcaggctccttcttcttccgcaagtgtaggcagagcccccggagccatggccagcccttcccgcagctccgaagccactggcaagccccgaggcagggatggccggcccaggagggaggaggacgacgtccctcccgaagagaagaggctgcggctcttgctggaggggggaagcgcacagccccaggacggcgaggacggggaggacgcgccgcggccgggcagggtggagaccggcacccagacaggtggcgacggcagaggagcggaattctccacgagttttgagcagcctcggttttcccaccacctccaaatcatggaagacacagggtaagagcaaagacaaggtggctgtggccgatgtccaccctctcggggcgtcccttctcttctctcctccttgggcagggagtccatcggggtgcaacctggttggggcggggaggaggtgcagggcctggccagagcgggcatggccacaggcaggagacagcgactgcttgggccggggcaggtgagcgcagcgcaggccagggccctacgtgtccgcggtgcgcgcgagcggccagcagagggcgccagagagccacgagcggcccgcggaggagcccgcgccggccccgatgcccggctccgcgccgcgcggacccaccgagcccgcgctcagacacccccatctccgccgtgaggccgctcgctccgggtccttcctcttccccaggtgcaggcagagcccccggagccatggccagcccttccggcagctccgaagcccctggcaagccccgaggcagggatggccggcccaggagggaggaggacgacgtccctcccgaagagaagaggctgcggctcttgctggaggggggaagcgcacagccccaggacggcgaggacgggcaggacgcgccgtggccggccaggaaggagaccggcacccagacaggtggcgacggcagaggaatccttcttagaaattcctaaggcccaatgctgtgtggaagattctgagaaagaaaatagtttccgatctttgggattcccgagatggtccaatctgcaaaaagttcattgccatttccatcaaggacactgagaacaagagtcttatctggattggatcctgggaattgagaagcttcagcagggcttccgctgggactaggatcaggatgtggacacccccaacctggaccgtctggccagggagggcatcaaggccaattacctcatgcagccccctgtcacaatgacctccccatcccacttcactgccatcccagaactctgtacttactgctccgtcactggtaatgacaatgaacatcttcacaatctcaggttttattgcaaagtgattgaggaccagttagaataagttatgctgcagaaactaaagaaatcccgtcaaacaaatggtatgtaatagaaagtcttagggcagccgtgtatattttctcccccaatgactcaattgaaaatgagaagctgttaccgccatgttctgggcagaagctatcaaaagtataagccatgatattataatttgatgatttttcatccttcaaatggatatggcccaggggtgaaaagtagatgctccataactagatgacggtcaagagttataaaaatgaggtcgtctctgttcaacatttctcctttcttgaaaggatactcaaaatcatgctcagggcctctaatggccagaaataaagttcctcccagttccagagcaccccaggacaaccccaaaaccagagcaactgcttattgccatgtagactatgtactgtgcaattcctggggtggcattttcataaatatgtgggtggcgccccctggaggtatgcaatgcacaacttgcacaaatggtaagtcatcgtatcccaaagtccacaaagaagaggtaaacaaaattcccatcgatgttgccatcagtcatgagtctgccttttcttcgtgggacagtagcaaaaccaatttggccaagtgtgcttggatgatctctaagatggaatcagggtctctcactttcagcactattgacatttggggctggatcattattctgtcttagtgggagttgtccggggcattgtaggatgcttagcagcatcgctggcctctacccattagctgccagtagcaccacctcctccagccgcaaccaccaaaattgtctccagacatggccacatgttctctggggggcaaaatcacccccggttgagaagccctgaagtaaagacataatacgcagatcacatgtaagtaagagagcctaagggccacacaggggatgctgtacccatgacaaagacagagtcttaaagaggttaaagaggtggagaaagagaaaagaaatgaagtcccagctgccgagagcaacagatgctgactagatgttgttgacagtcatctttaaactgagttaaaagatgctgagaagccatcagctcccatcctgctctccagggacaacgctgctgaaaaaggcctggagatcaacaaagccccaaacacaggtgcactgagcaaagaaaccagagattgagacaaaaaagacattccctcaaagactactcatttccaagaggggagaaaaagtggagtcatgaaaaacagttgaggctgggtagagtgactcgcacctgtaatcccagcactttgggattactcccaggctgaggtgggaagattgcttgaactcaggagttcaagaccagcctgggcaaaatagcaagaccttgcctctagaaaaagggaaaaaattagccaggtgtggtgatacatgcctgtggtctcagctactcgggaggctgaggtgggaggatcgcttgaacccaggaggtagaggctgcagtgagccgggatcgcaccactgcactccagcctgggttacagatcctgtctc

SEQ ID NO: 660 - protein, 207 aa, Homo sapiens
MSTLSGRPFSSLLLGQGVHRGATWLGRGGGAGPGQSGHGHRQETATAWAGAGERSAGQGPTCPRCARAASRGRQRATSGPRRSPRRPRCPAPRRADPPSPRSDTPISAVRPLAPGPSSSPGAGRAPGAMASPSGSSEAPGKPRGRDGRPRREEDDVPPEEKRLRLLLEGGSAQPQDGEDGQDAPWPARKETGTQTGGDGRGILLRNS

SEQ ID NO: 661 - DNA, 3584 bp, Homo sapiens
cgcgcgcccgggaggctccgggaccgtggcggcgggcggcggcggcgcagccctccgcgggccatgtcctctccggcggtggcgaggacctccccaggagggagtcgggagatggccccagcgccgcagggccgaggccggttctgggaagtgggcggcggcagcggccatcggctggagcgcgcggccgcggagtcggagcgctgggagctgctgctccgccgcggggagctgctggcgctgggcggccacctgaagggcgcgctggaggcgttcgcggcggcgctgcgccgcggggccccggccaggcccgagtgcctgggcgccctggtggactgcctggtgttcaactaccggctccgccacgggctgggctggagcgcggccccggttgcaggcgctgacggcggcgccggcgggctcctcagatgcctgggctgccggggcttcctgagcgagccggtgaccgtgccctgtggccacagctactgccgccgctgcctgcggagggaactccgcgcccgctgccgcctctgccgggaccggctgccgcccgccaccgccagtgccactgatgctgaagggaccgccccgcggccgccgcctctggccgccgccatcgccgcttcagacttcagaaccagcgtcgtcctcaaccacctggccgagaagtggtttccgggccagcgcgagcgggcccgggcggccggcaggctcggggagctactgcaccaggggcgctaccgggaggccctggccgccgcctgcgaggcgctgcgagcagaacccagtgacttgattgtaaaaatttacagagcggaatcatatgctggtctccaagagtttaaagcagccatagaagatttaaatgcagttctttttcaacttccagattggcctgaggtctacttcaggaaaggaaaagtactctgcgatgctggttttttaggtgatgccttacaactctttcttcagtgcttagcccttgatgaagattttgcacctgcaaagctgcaagtacaaaagattttatgtgatttattattacctgaaaacttaaaagaaggcctgaaggaatcttcctggagttcattaccatgtactaaaaacagaccttttgattttcattcagtgatggaagagtctcagtctctcaatgaacctagcccaaagcagagtgaagaaataccagaggtcacttcagagcctgtcaaaggaagcttaaaccgtgctcagtcagcacagtctataaattcaacagaaatgcctgccagagaggactgtttaaaaagagtgtcctcagaacctgttctgtcagttcaagaaaaaggtgttctgctgaaaagaaagttgtctcttttagaacaggatgtgattgtaaatgaagatggaagaaataagctgaaaaaacaaggagaaactcccaatgaagtctgtatgttttccttagcttatggtgatattccagaagaattaatcgatgtctcagatttcgagtgttctctctgcatgaggttgttttttgagccagtaacaaccccttgcggacattcgttctgtaagaattgtcttgagcgttgtttagatcatgcaccatattgtcctctttgcaaagaaagcttaaaagagtatctagcagataggaggtactgtgtcacacagctgttggaagaattaatagtgaagtatctgcctgatgaactgtctgagagaaaaaaaatatatgatgaagaaactgctgaactctcacacttgaccaagaatgttccaatatttgtttgcactatggcctaccccactgtgccttgccctctccatgtatttgagccaagatacagattgatgattcgaagaagtatacagactggaaccaaacagtttggcatgtgtgtcagtgatacacaaaatagttttgcagattatggttgtatgttacaaattagaaacgtgcatttcttaccggacggaaggtctgtggttgatacagttggaggaaagcggtttagggttttaaaaagaggaatgaaagatggatattgcactgccgacattgaatatctggaagatgttaaggttgagaatgaagatgagattaagaatctcagagagcttcatgatttggtttactctcaagcctgcagctggtttcagaatttaagagacagatttcgaagccaaattcttcagcatttcggatcaatgcccgagagggaggaaaaccttcaggcagcccctaatggacctgcatggtgttggtggcttcttgcagttctccctgtagacccacgataccagctgtcggttttgtcaatgaagtctttgaaagaacggttgaccaagatacagcatatactgacctatttttctagagaccaatctaagtaactaactctttggatctccctttaaagtgaccctaatctggctgcattgatggccagattgtctgctgcctttgcacatctagtgctggtttcagaaatttaatgaaacttttctttttccttcgacctcctgaatcatgtggttctgcaaatgaataccttcaactaggatttagaccactaagaacttgcacagaaaaacacgcattgaatgtgtgtcgaacctctacattgtgaagttgcactatgtaccatactctaaaatgaaataagaactctttatgtctgtgagagagtgtgtgtgtgtgtgtgcgtgcgtgtgtgcttgtgggggttgggtagtgtgtgtgtattttctctggctttaaaattttaaaacaaacaaacaaaaaagccatagagagcagaacttgccgagggtcatttattgcccaagtttacaagagtagcgatacaagtttttgcaaattgaatttgcctcagatatatctgtcctaatgcttatatttgcacaagtatgtaaaatatcgtgttgaggatcattctttgttggaaacactgctcttgctgaactgtcttgaccattgactatgacacagtttcttatttatgtaaatacttgcatcacagtggccgacaggcattggatgcagaacctagagccagttttcaggaacaattgtaaacctgacatggtactgtgcatctattcataaaacactcaaaactgtgaaaatatggtttacatttaattgtacataaaggtaaagggagaactcaattcagtaccagttagtttgtacattttagggggcttttcacattaactgcccatttgtgtaatttatagtttgacatgatgtgtttgttttaaaaaaaaatgcatagtataaacccattaaggatctgggaaaagagaagaagtttaatatagaactaagcttttaaagtttgtttttgtttttaattctggtctcggtgcaaatgttagttatgccttattcatatcacagttagatcaccatgctgcaacatggtttatattcatgctgccctagaaacttttgtaattatttgttgcaaatttgtgactgtccttattaactttcttttatgtaagtaatttgtaaaagtttcttaaaatttttgcttttgcttatttaattttgaataaaagctaaattcctaatactttttctt

SEQ ID NO: 662 - protein, 773 aa, Homo sapiens
MSSPAVARTSPGGSREMAPAPQGRGRFWEVGGGSGHRLERAAAESERWELLLRRGELLALGGHLKGALEAFAAALRRGAPARPECLGALVDCLVFNYRLRHGLGWSAAPVAGADGGAGGLLRCLGCRGFLSEPVTVPCGHSYCRRCLRRELRARCRLCRDRLPPATASATDAEGTAPRPPPLAAAIAASDFRTSVVLNHLAEKWFPGQRERARAAGRLGELLHQGRYREALAAACEALRAEPSDLIVKIYRAESYAGLQEFKAAIEDLNAVLFQLPDWPEVYFRKGKVLCDAGFLGDALQLFLQCLALDEDFAPAKLQVQKILCDLLLPENLKEGLKESSWSSLPCTKNRPFDFHSVMEESQSLNEPSPKQSEEIPEVTSEPVKGSLNRAQSAQSINSTEMPAREDCLKRVSSEPVLSVQEKGVLLKRKLSLLEQDVIVNEDGRNKLKKQGETPNEVCMFSLAYGDIPEELIDVSDFECSLCMRLFFEPVTTPCGHSFCKNCLERCLDHAPYCPLCKESLKEYLADRRYCVTQLLEELIVKYLPDELSERKKIYDEETAELSHLTKNVPIFVCTMAYPTVPCPLHVFEPRYRLMIRRSIQTGTKQFGMCVSDTQNSFADYGCMLQIRNVHFLPDGRSVVDTVGGKRFRVLKRGMKDGYCTADIEYLEDVKVENEDEIKNLRELHDLVYSQACSWFQNLRDRFRSQILQHFGSMPEREENLQAAPNGPAWCWWLLAVLPVDPRYQLSVLSMKSLKERLTKIQHILTYFSRDQSK

SEQ ID NO: 663 - DNA, 4000 bp, Homo sapiens
ttctctgccccctcccagctctggtgtgggcggcctccgctatggctgcgctgcgaaggctcttgtggccgccaccccgggtgtctcctccactctgcgctcaccagcccctccttgggccgtgggggcggcctgcggtgaccaccctgggccttcctggccggcccttctcctcccgagaggatgaggagagggctgtggcggaggcggcatggaggcggcggcggcgctggggggagctgagcgtggcggcggcggccggcggggggctggtcggcctggtatgctaccagctgtacggggaccccagggccggctcgccggcgaccgggcgaccctcaaagagcgcggccacggagcccgaggacccgccccgcggccgggggatgctgcccatcccagtggcggctgccaaggagacggttgctattggcagaacagacattgaagacttagacctttatgccacatctcgggagaggcgatttcgtttatttgcttctatagaatgtgaagggcagttattcatgactccgtatgattttattttggctgttacaacagatgagcccaaagttgccaaaacttggaagtcactttccaaacaggaattaaatcaaatgctcgcagaaacaccaccagtttggaaaggctcatcgaagctatttcgaaatcttaaagaaaaaggtgtgatttcttacacagaatatctttttcttttatgtattttaacaaagccacatgcagggttcagaatagctttcaacatgtttgacactgatggcaatgagatggtggataaaaaagagtttttggtgcttcaagagatattcaggaaaaaaaatgaaaagagagaaattaaaggagatgaagaaaagcgtgcaatgctgcgtcttcaactttatggataccattctcctactaatagtgtacttaaaacagatgctgaggaacttgtctccagaagctattgggatacactgagacgtaacacaagccaagcactgttttcagacctcgcagagcgtgctgatgacatcacaagtttagtaacagatactacacttcttgtacacttttttggaaagaaaggaaaagctgagctcaactttgaagatttttatagattcatggataatctccaaacagaagttctagaaatagaattcctttcctactcaaatggaatgaataccatcagtgaagaagattttgctcatattcttttacgatatacaaatgtggaaaatacatcagtatttttagaaaatgtgcgttacagtatacctgaagaaaagggcatcacatttgatgaattcaggtcatttttccagtttttaaacaacctagaagactttgcaatagccctgaatatgtataactttgcaagtcgttctatagggcaagatgaatttaaacgtgccgtctatgtagctactggactcaaattttcaccacatttagtgaacactgtcttcaagatttttgatgttgacaaagatgatcaattaagttataaagaatttattggaattatgaaagacagactccatagaggattccggggttataaaacagtccagaagtaccccactttcaaatcctgcctgaagaaagaacttcacagcagataaatactcctaaaacaaagtttaaaggattactatctgtgtgacaaataacaagaagcaacattttgagaatggaagcaggtctgaggtcagaagaagtagagaatgaaggaaaaggtgaatgctatgaaattgatattttttctggaactgaattcttaaacataaaacagataaaatgcatcttgttactacaaatgttatatgtataaaatcaagttgagctttgccttgatttgctgaactctctgcactttttcattcccttcagaagtatatagatacttccggtgactacatatgaatgtactttcaatattatttttttatttattcattagaaattttcctcatttcaaaataatttatgactcatggaatgttgatcgcctaaaaatgaacatcgcattttctttgattttggactgtgaacttattttcagagatgaatattgcttgagatttataatacccttagaattaaattcctgttatttgcccagtttttaattacactgagataattttgaaaagaaatagaaattaagctactatataaaacaattgtttacgtgtacttttaacttttaaaagtacttaattaacatatgttgtttgacttgtataaagtttttaaaaattgttgtttatttgccaaagtcaacagaatgtctgttattgttttatgtatacggtaaagaaatttaaagtgtagaattttcctcccccaaaaagtcatgtgttgatagtagaagcagtggtagttgttgtaacagtaatcattgtcattgtcattatcttcttaaacatgaagctgctcctgatcataggtggtacacgttaataacactagtaaaaataacgtcttacactctgtaacttactgcatattgttaatgtatgtctagcatcaaatgagtattgtaaaagactaatataaaatggtttataagactgatgtatatattaagtagaagctaatatttttgtttcttgcaaaaggaccacttgaaaagtgatgctaaacagccagtaataataatttaaatataatttattatttcaaaagaatatgtcttaaaagggaaaataaaaactttctgttgaatcacaacaaaattagatttgtacatagagaaacaatttgataatacttaatagaaatctgttcaattaaaaatgcttagtttatacaaagatactacacaaaaatagaacaattagtctgaattaacgtatttacatattgcatatggaagataagttcatttatcttcctttctaagacatatttaatgtaggttacatacactccaactattactttgcttttgcatatgaaactagaaaacactgactttgtttttataagttattaaatgtgaaattgatctgcatcagcttatttataaaagtaatgttatttccaagaaaatgttactcttagcattgattttgtatgttagactttttacattgtttatctaatattatttatgacagtaattttaaaatatattattcataagttcaaggatcccatatagtataagaatataatttcacttgctttgaaagttgatttaattgactgactaaatgaaaatgcctacccactcatataacatacctcaggtctattttaccttacactgaatgttcttaatatgatttggtacctaaagtaattgaaaaaaatgcagtttcctttaatccttgactataagttatactatgttgcgtacatggcaaatcctgcaaatatagattaaaaattaaattagcccattgaaatcctttataattctgtcattttcccaaggaagaatagcattgtacatatgcaatctttattttattctttattgcttatcagagtgagtggatgaaaacatttgtaaggctgcaacataatattaaaatgtgaataaataaatgttctgataaaatagaaaagaaagtaaattacagtgatttccatcatattatcactcttgaattttatcatctataaaatgagagataaaaatatctcactgaattgttacttatatcaatttaaaatttgctagtggtttgaaaataataatgtactgactacatgtatgctgttattgtcagtgtttccttctataaactgttctttggaaaaattaagttatacataaaattcatattaaactttttacagaaagcatacatgataaacagtttatggtacttctcagaatcatttcataataagcaatttatttagcttaagttccaacttactgttcttattataaattgcaaagcaacctgtcttacattcttacattatcttaaaataaatatttctgcccttgaaccaaaaaaaaaaaaaaaaa

SEQ ID NO: 664 - protein, 530 aa, Homo sapiens
MAALRRLLWPPPRVSPPLCAHQPLLGPWGRPAVTTLGLPGRPFSSREDEERAVAEAAWRRRRRWGELSVAAAAGGGLVGLVCYQLYGDPRAGSPATGRPSKSAATEPEDPPRGRGMLPIPVAAAKETVAIGRTDIEDLDLYATSRERRFRLFASIECEGQLFMTPYDFILAVTTDEPKVAKTWKSLSKQELNQMLAETPPVWKGSSKLFRNLKEKGVISYTEYLFLLCILTKPHAGFRIAFNMFDTDGNEMVDKKEFLVLQEIFRKKNEKREIKGDEEKRAMLRLQLYGYHSPTNSVLKTDAEELVSRSYWDTLRRNTSQALFSDLAERADDITSLVTDTTLLVHFFGKKGKAELNFEDFYRFMDNLQTEVLEIEFLSYSNGMNTISEEDFAHILLRYTNVENTSVFLENVRYSIPEEKGITFDEFRSFFQFLNNLEDFAIALNMYNFASRSIGQDEFKRAVYVATGLKFSPHLVNTVFKIFDVDKDDQLSYKEFIGIMKDRLHRGFRGYKTVQKYPTFKSCLKKELHSR

SEQ ID NO: 665 - DNA, 3837 bp, Homo sapiens
gccgggctgaggagccgggagtccgccgcgccggctcggggctgcgggatggggagttagcgccacggcggcggcagtggccgcagcgcaccccgccgccgcccaggagcccgtccagccaggggtgccgggcccgcccagcccgccccggagccaggcccgcgggcggcggcggagctgggcaggtggatgcggctggaagatggcgccctcgggcccgggcagcagcgccaggcggcggtgccggcgggtgctgtactggatcccggtggtgttcatcaccctcctgctcggctggtcctactacgcctacgccatccagctgtgcatagtgtccatggaaaacactggcgaacaagttgtgtgcctgatggcctatcatctactttttgcaatgtttgtctggtcatactggaaaactatctttacattaccaatgaatccttcaaaagaattccatctctcttatgcagagaaagatttgttggagagagagccaagaggagaagcccatcaggaagttcttaggcgagcagccaaggatcttcccatctataccaggaccatgtctggagccatccgatactgtgacagatgccaacttataaaaccagatcgctgccatcactgctccgtctgtgataaatgtattttgaagatggatcatcattgtccatgggtgaacaattgtgttggattttcaaattataagttctttctccttttcttggcttattctctgctctactgcctttttattgcggcaacagatttacagtattttatcaaattttggacaaatggcctacctgatactcaagccaagttccatattatgtttttattctttgctgcagctatgttttctgtcagcttgtcttctctgtttggctatcattgttggctagtcagcaaaaataaatctacattagaggcattcagaagtccagtatttcgacatggaacagataagaatggattcagcttgggtttcagtaaaaacatgcgacaagtttttggtgatgagaagaagtactggttgctacccattttttcaagtctaggtgatggctgctcctttccaacttgccttgttaaccaggatcctgaacaagcatctactcctgcagggctgaattccacagctaaaaatctcgaaaaccatcagtttcctgcaaagccattgagagagtcccagagccaccttcttactgattctcagtcttggacggagagcagcataaacccaggaaaatgcaaagctggtatgagcaatcctgcattaaccatggaaaatgagacttaactcttcaagcaagataaattcatactttataaaagtatcaatgctgtagatggatggaagaggcttcccacaggaaggtgccaccagtcagttgtgcctatgtccctttggctggaaatgcagaatatgaattgattagttctctccaagccattgcttaaaatataacatgttttggatccaatacacacattgttacaactaacacaaattcctattaaatattaaaagtagttctggtttattaatcaacggggaaaacatcttctccaaaaaacttggaataaatccaaggaccagtttttacccaaatatatgggtagcacagtttatcacatagaaactccattaatcatctgattttccgaatctgaaaattgagactattaagatattaagatttcagagatttcaagtcacattataatgataagcattattcataaaacttgttacctttaagaaggtggaagtggcaaaccatacttctttttttttcctctgatgtgaatccagcctcagactgagtgaactgtaataattatgaattcattacagagtccaggtggcctgcagttgaagatcatcaaccatttttgcctcacttaattccagccttttgttttctgctggaaaataagtgtggacattgaagcttgagctctcaaagcagttggctggaatacttttgtcagaatacggtacatttctattacatcagaaatatattttcatctcttcttgttaaattgggaggaaatttatgatagcaattatgaagattgttttatgacattcttttgtcagtttggctttctaaaaatctctttttagattatttctcctgttgaacatagtaaaactattgaatttctcttaagaattcctaataggtcaatagatttaccctccagtgatatctatattatttctttctcgtctcatcaaaatgatgacaggtaaactatatttttccttaaacacctattacagttaaattatgcaaatcattaaataaaaatcatacaacttttggaaagttagttcaacatgaactaaaatggcatgctatttggaaatttagtttgagataaactaaagtgtgttgatgccagaatgttcagcttcagtaaatataataagctcttgtgccttgtatgcactatttaaaaaaagttttttttatttgagtccagtataattcatgtaaatgttaacaattagaataatactctgtatgcttttttgatactgattttgagaatttaaagcagattaccttttaaaactggaccaactaagtaattggtatttaatcaaagagaaaatggtaataaacttttcaaaatctttgttaaaccaaacattcaacacaaaataaactagaaggccagaggataatggaataaaagatcattgcaattacttatccttcctaaaaatatagttttatattaattgtgcttatggaagaaacaatgtcagccaagtccattttatagtttgagtgcaattctttgaacaatagaaatatctgcagtctttcacagatttgtattatgctgaagagtttcatctgacaatctgcttcaagaaatctcagaaaatatgataacattttaactttcgttttagagcacgttttggtcatttttaaaaatacctaaagtgccagaccggaacctatagctactgctagaagtcttaaaaaaaccaacagcagcacaggatgtattaagaattatatgaagtcaggtttgtttttttttttttttttttcaaagcacagtactgttagctgtttttgtggacaggattcgattaagtattccctcttgtcaaactggaagctaggggaaaaagagggatttttatcctttactcttctagagtactgttaatgcccctttcccacagtcttttatataattaaatatatgtcaatacacattagaatcagatttgaaaaagttaaaacaatttcattgttgtaattgttccctttctgttttcatatagtgaataacctttaaagggttgttttgttttgttttgaattataggagttataatctttggagatgattgcatatctcattagatatgcaatataaatttatctgagtgaacaaagtgctaaataaatagatctacattttgtacatatttatataaaatttacctttaagtatttactttaaaaaatttaatggcttaactcgaacttgaagacacatacttcaactgtccttattgtccattaaactgataattttgatttttcttgcttttatagattttactatataggaatcaagatttaagaaattttgcattaaaaatagtgtaccaatgcttcatatacgttagttatttgctattatgtagggaagaggattgttatttcaaagatatattaaagaacagttgcatctgaatataatcatgatgcattcaatgaagttcatatccatgaattcactcctaatataccctaataaagtggttgaaaccgaaaaaaaaaaaaaaaa

SEQ ID NO: 666 - protein, 367 aa, Homo sapiens
MAPSGPGSSARRRCRRVLYWIPVVFITLLLGWSYYAYAIQLCIVSMENTGEQVVCLMAYHLLFAMFVWSYWKTIFTLPMNPSKEFHLSYAEKDLLEREPRGEAHQEVLRRAAKDLPIYTRTMSGAIRYCDRCQLIKPDRCHHCSVCDKCILKMDHHCPWVNNCVGFSNYKFFLLFLAYSLLYCLFIAATDLQYFIKFWTNGLPDTQAKFHIMFLFFAAAMFSVSLSSLFGYHCWLVSKNKSTLEAFRSPVFRHGTDKNGFSLGFSKNMRQVFGDEKKYWLLPIFSSLGDGCSFPTCLVNQDPEQASTPAGLNSTAKNLENHQFPAKPLRESQSHLLTDSQSWTESSINPGKCKAGMSNPALTMENET

SEQ ID NO: 667 - DNA, 6671 bp, Homo sapiens
aatgagatcctaagatggcggtggctgcggcggttggcgctgcgtagctgaggtcgaaaaggcggccactggggccgaggcagccaggaaacgtgtgggcctctctgctgcggtctccgagggccgaccgctgccggcggcgggtcgtgggggctgactgtcgctctgcctttgacaggagaggctgcttcttgtagaggaaacagctttgaagtgtggagcgggaaaggagcagtttctgagctgcaaaaactagtttctaaacagagagttaattgttaaatccagtatggccacaggaggaggtccctttgaagatggcatgaatgatcaggatttaccaaactggagtaatgagaatgttgatgacaggctcaacaatatggattggggtgcccaacagaagaaagcaaatagatcatcagaaaagaataagaaaaagtttggtgtagaaagtgataaaagagtaaccaatgatatttctccggagtcgtcaccaggagttggaaggcgaagaacaaagactccacatacgttcccacacagtagatacatgagtcagatgtctgtcccagagcaggcagaattagagaaactgaaacagcggataaacttcagtgatttagatcagagaagcattggaagtgattcccaaggtagagcaacagctgctaacaacaaacgtcagcttagtgaaaaccgaaagcccttcaactttttgcctatgcagattaatactaacaagagcaaagatgcatctacaagtcccccaaacagagaaacgattggatcagcacagtgtaaagagttgtttgcttctgctttaagtaatgacctcttgcaaaactgtcaggtgtctgaagaagatgggaggggagaacctgcaatggagagcagccagattgtaagcaggcttgttcaaattcgcgattatattactaaagctagttccatgcgggaagatcttgtagagaaaaatgagagatctgctaatgttgagcgccttactcatctaatagatcaccttaaagaacaagagaagtcatatatgaaatttcttaaaaaaatccttgccagagatcctcagcaggagcctatggaagagatagaaaatttgaagaaacaacatgatttattaaaaagaatgttacaacagcaggagcaactaagagctctacagggacggcaggctgcacttctagctctgcaacataaagcagagcaagctattgcagtgatggatgattctgttgttgcagaaactgcaggtagcttatctggcgtcagtatcacatctgaactaaatgaagaattgaatgacttaattcagcgttttcataatcagcttcgtgattctcagcctccagctgttccagacaatagaagacaggcagaaagtctttcattaactagggaggtttcccagagcaggaaaccatcagcttcagaacgtttacctgatgagaaagtcgaactttttagcaaaatgagagtgctacaggaaaagaaacaaaaaatggacaaattgcttggagaacttcatacacttcgagatcagcatcttaacaattcatcatcctctccacaaaggagtgtcgatcagagaagtacttcagctccctctgcttctgtaggcttggcaccggttgtcaatggagaatccaatagcctcacatcatctgttccttatcctactgcttctctagtatctcagaatgagagtgaaaacgaaggccacctcaatccatctgaaaaactccagaagttaaatgaagttcgaaagagattgaatgagctaagagaattagttcattattatgaacaaacgtcagacatgatgacagatgctgtgaatgaaaacaggaaagatgaagaaactgaagagtcagaatatgattctgagcatgaaaattccgagcctgttactaacattcgaaatccacaagtagcttccacttggaatgaagtaaatagtcatagtaatgcacagtgtgtttctaataatagagatgggcgaacagttaattctaattgtgaaattaacaacagatctgctgccaacataagggctctaaacatgcctccttctttagattgtcgatataatagagaaggggaacaggagattcatgttgcacaaggtgaagatgatgaggaggaggaggaagaagcagaagaggagggagtcagtggagcttcattatctagtcacaggagcagtctggttgatgagcatccagaagatgctgaatttgaacagaagatcaaccgacttatggctgcaaaacagaaacttagacagttacaagatcttgttgctatggtacaggatgatgatgcagctcaaggagttatctctgccagtgcatcaaatttggatgatttctacccagcagaagaagacaccaagcaaaattcaaataacactagaggaaatgccaataaaacacagaaagatactggagtaaatgaaaaggcaagagagaaattttatgaggctaaactacagcagcaacagagagagctaaaacaattgcaggaagaaagaaagaaactgattgacattcaggagaaaattcaagcattgcaaacggcatgccctgacttacagctgtcagctgctagtgtgggtaactgtcccaccaaaaaatatatgccagctgttacttcaaccccaactgttaatcaacacgagaccagtacaagcaaatctgtttttgagcctgaagattcttcaatagtagataatgagttgtggtcagaaatgagaagacatgaaatgttgagggaggagctgcgacagagaagaaagcagcttgaagctctgatggctgaacatcagaggaggcaaggtctagctgaaactgcatctccagtggctgtgtcattgagaagtgatggatctgagaacctatgtactcctcagcaaagtagaacagaaaaaacgatggcaacttggggagggtctacccagtgtgcactagatgaagaaggagatgaagacggttacctttctgaaggaattgttcggacagatgaagaggaggaagaagagcaagatgccagttccaatgataacttttctgtgtgtccttctaacagtgtgaatcataactcctacaatggaaaggaaactaaaaataggtggaagaacaattgccctttttcggcagatgaaaattatcgtcctttagccaagacaaggcaacagaatatcagcatgcaacggcaagaaaaccttcgttgggtgtcagagctctcttacgtagaagagaaagaacaatggcaagaacaaatcaatcagctaaagaaacagcttgattttagtgtcagtatttgtcagactttgatgcaagaccagcagactctatcttgtctgctacaaactcttctcacgggtccttacagtgttatgcccagcaatgttgcatctcctcaagtacacttcataatgcaccagttgaaccagtgctatactcagctaacatggcaacagaataatgttcagaggttgaaacaaatgctaaatgaacttatgcgccagcaaaatcagcatccagaaaaacctggaggcaaggaaagaggcagtagtgcatcgcaccctccttctcccagtttattttgtcctttcagctttccaacacagcctgtaaatctcttcaatatacctggatttactaacttttcatcatttgcaccaggtatgaatttcagccctttatttccttctaattttggagatttttctcagaatatctctacacccagtgaacagcagcaacccttagcccagaattcttcaggaaaaacagaatatatggcttttccaaaaccttttgaaagcagttcctctattggagcagagaaaccaaggaataaaaaactgcctgaagaggaggtggaaagcagtaggacaccatggttatatgaacaagaaggtgaagtagagaaaccatttatcaagactggattttcagtgtctgtagaaaaatctacaagtagtaaccgcaaaaatcaattagatacaaacggaagaagacgccagtttgatgaagaatcactggaaagctttagcagtatgcctgatccagtagatccaacaacagtgactaaaacattcaagacaagaaaagcgtctgcacaggccagcctggcatctaaagataaaactcccaagtcaaaaagtaagaagaggaattctactcagctgaaaagcagagttaaaaacatcaggtatgaaagtgccagtatgtctagcacatgtgaaccttgcaaaagtaggaacagacattcagcccagactgaagagcctgttcaagcaaaagtattcagcagaaagaatcatgagcaactggaaaaaataataaaatgtaataggtctacagaaatatcttcagaaactgggagtgatttttccatgtttgaagctttgcgagatactatttattctgaagtagctacattaatttctcaaaatgaatctcgtccacattttcttattgaactcttccatgagctgcagctactaaacacagactacttgagacagagggctttatatgcattgcaggacatagtatccagacatatttctgagagccatgaaaaaggagaaaatgtaaagtcagtaaactctggtacttggatagcatcaaactcagaacttactcctagtgagagccttgctactactgatgatgaaacttttgagaagaactttgaaagagaaacccataaaataagtgagcaaaatgatgctgataatgctagtgtcctgtctgtatcatcaaattttgagccttttgcaacagatgatctaggtaacaccgtgattcacttagatcaagcattagccagaatgagagaatatgagcgtatgaagactgaggctgaaagtaactcaaatatgagatgcacctgcaggattattgaggatggagatggtgctggtgcaggtactacagttaataatttagaagaaactcccgttattgaaaatcgtagttcacaacaacctgtaagtgaagtttctaccatcccatgtcctagaattgatactcagcagctggaccggcaaattaaagcaattatgaaagaagtcattccttttttgaaggagcacatggatgaagtatgctcctcgcagcttctaacttcagtaaggcgcatggttttgacccttacccagcaaaatgatgagagcaaagagtttgtaaagttctttcataaacaacttggaagtatattacaggattcactggcaaaatttgctggcagaaaactgaaagactgtggagaagatcttcttgtagagatatctgaagtgttgttcaatgaattggctttctttaagcttatgcaagatttggataataatagtataactgttaaacagagatgcaaaaggaaaatagaagcaactggagtgatacaatcttgtgccaaagaggctaaaaggattcttgaagatcatggctcacctgctggagagattgatgatgaagacaaagacaaggatgaaactgaaacagttaagcagactcaaacatctgaggtgtatgatggtcccaaaaatgtaagatctgatatttctgatcaagaggaagatgaagaaagtgaaggatgtccagtgtctattaatttgtctaaagctgaaactcaggctttaactaattatggaagtggagaagatgaaaatgaggatgaagaaatggaagaatttgaagaaggccctgtggatgtccagacttccctccaggctaacactgaagctactgaagaaaatgaacatgatgaacaggtcctacaacgtgactttaaaaagacagcagaaagcaaaaatgtcccattggaacgagaagccactagtaaaaaaaataactgtcctgtgaaaccctgttacctcaatatcttggaagatgagcaacctttaaatagtgctgcccataaggagtcacctcctactgttgattcaactcaacagcctaaccctttgccgttacgtttacctgaaatggaacccttagtgcctagagtcaaagaagttaaatctgctcaggaaactcctgaaagctctctggctggaagtcctgatactgaatctccagtgttagtgaatgactatgaagcagaatctggtaatataagtcaaaagtctgatgaagaagattttgtaaaagttgaagatttaccactgaaactgacaatatattcagaggcagatctaagaaagaaaatggtagaagaagaacagaaaaaccatttatctggtgaaatatgtgaaatgcagaccgaagaattagctggaaattctgagacactaaaagaacctgaaacggtgggagcccagagtatatgagatgtcttcagaggctcatctaactctgtccttacatactcaatgcatatatgaaaacaatactaaataaacatctgatctgtataaaaatgtaaattagtttgacactgcttttttgataggtgtggtcatttctccccatggtagtttaaaacatcagaaactgaattctggacagatttaagccttgacacactgtgtttttttttttttcccccttcttttttgggtcttcatttttttccccattgtgatgtttggtaacgaatttaaaatgtagttttaaataaagtttggacttatctataaagta

SEQ ID NO: 668 - protein, 2022 aa, Homo sapiens
MATGGGPFEDGMNDQDLPNWSNENVDDRLNNMDWGAQQKKANRSSEKNKKKFGVESDKRVTNDISPESSPGVGRRRTKTPHTFPHSRYMSQMSVPEQAELEKLKQRINFSDLDQRSIGSDSQGRATAANNKRQLSENRKPFNFLPMQINTNKSKDASTSPPNRETIGSAQCKELFASALSNDLLQNCQVSEEDGRGEPAMESSQIVSRLVQIRDYITKASSMREDLVEKNERSANVERLTHLIDHLKEQEKSYMKFLKKILARDPQQEPMEEIENLKKQHDLLKRMLQQQEQLRALQGRQAALLALQHKAEQAIAVMDDSVVAETAGSLSGVSITSELNEELNDLIQRFHNQLRDSQPPAVPDNRRQAESLSLTREVSQSRKPSASERLPDEKVELFSKMRVLQEKKQKMDKLLGELHTLRDQHLNNSSSSPQRSVDQRSTSAPSASVGLAPVVNGESNSLTSSVPYPTASLVSQNESENEGHLNPSEKLQKLNEVRKRLNELRELVHYYEQTSDMMTDAVNENRKDEETEESEYDSEHENSEPVTNIRNPQVASTWNEVNSHSNAQCVSNNRDGRTVNSNCEINNRSAANIRALNMPPSLDCRYNREGEQEIHVAQGEDDEEEEEEAEEEGVSGASLSSHRSSLVDEHPEDAEFEQKINRLMAAKQKLRQLQDLVAMVQDDDAAQGVISASASNLDDFYPAEEDTKQNSNNTRGNANKTQKDTGVNEKAREKFYEAKLQQQQRELKQLQEERKKLIDIQEKIQALQTACPDLQLSAASVGNCPTKKYMPAVTSTPTVNQHETSTSKSVFEPEDSSIVDNELWSEMRRHEMLREELRQRRKQLEALMAEHQRRQGLAETASPVAVSLRSDGSENLCTPQQSRTEKTMATWGGSTQCALDEEGDEDGYLSEGIVRTDEEEEEEQDASSNDNFSVCPSNSVNHNSYNGKETKNRWKNNCPFSADENYRPLAKTRQQNISMQRQENLRWVSELSYVEEKEQWQEQINQLKKQLDFSVSICQTLMQDQQTLSCLLQTLLTGPYSVMPSNVASPQVHFIMHQLNQCYTQLTWQQNNVQRLKQMLNELMRQQNQHPEKPGGKERGSSASHPPSPSLFCPFSFPTQPVNLFNIPGFTNFSSFAPGMNFSPLFPSNFGDFSQNISTPSEQQQPLAQNSSGKTEYMAFPKPFESSSSIGAEKPRNKKLPEEEVESSRTPWLYEQEGEVEKPFIKTGFSVSVEKSTSSNRKNQLDTNGRRRQFDEESLESFSSMPDPVDPTTVTKTFKTRKASAQASLASKDKTPKSKSKKRNSTQLKSRVKNIRYESASMSSTCEPCKSRNRHSAQTEEPVQAKVFSRKNHEQLEKIIKCNRSTEISSETGSDFSMFEALRDTIYSEVATLISQNESRPHFLIELFHELQLLNTDYLRQRALYALQDIVSRHISESHEKGENVKSVNSGTWIASNSELTPSESLATTDDETFEKNFERETHKISEQNDADNASVLSVSSNFEPFATDDLGNTVIHLDQALARMREYERMKTEAESNSNMRCTCRIIEDGDGAGAGTTVNNLEETPVIENRSSQQPVSEVSTIPCPRIDTQQLDRQIKAIMKEVIPFLKEHMDEVCSSQLLTSVRRMVLTLTQQNDESKEFVKFFHKQLGSILQDSLAKFAGRKLKDCGEDLLVEISEVLFNELAFFKLMQDLDNNSITVKQRCKRKIEATGVIQSCAKEAKRILEDHGSPAGEIDDEDKDKDETETVKQTQTSEVYDGPKNVRSDISDQEEDEESEGCPVSINLSKAETQALTNYGSGEDENEDEEMEEFEEGPVDVQTSLQANTEATEENEHDEQVLQRDFKKTAESKNVPLEREATSKKNNCPVKPCYLNILEDEQPLNSAAHKESPPTVDSTQQPNPLPLRLPEMEPLVPRVKEVKSAQETPESSLAGSPDTESPVLVNDYEAESGNISQKSDEEDFVKVEDLPLKLTIYSEADLRKKMVEEEQKNHLSGEICEMQTEELAGNSETLKEPETVGAQSI

SEQ ID NO: 669 - DNA, 2101 bp, Homo sapiens
agttcgtaaaggagccgggtgacttcagaggcgccggcccgtccgtctgccgcacctgagcacggcccctgcccgagcctggcccgccgcgatgctgtagggaccgccgtgtcctcccgccggaccgttatccgcgccgggcgcccgccagacccgctggcaagatgccgcgctccttcctggtcaagaagcatttcaacgcctccaaaaagccaaactacagcgaactggacacacatacagtgattatttccccgtatctctatgagagttactccatgcctgtcataccacaaccagagatcctcagctcaggagcatacagccccatcactgtgtggactaccgctgctccattccacgcccagctacccaatggcctctctcctctttccggatactcctcatctttggggcgagtgagtccccctcctccatctgacacctcctccaaggaccacagtggctcagaaagccccattagtgatgaagaggaaagactacagtccaagctttcagacccccatgccattgaagctgaaaagtttcagtgcaatttatgcaataagacctattcaactttttctgggctggccaaacataagcagctgcactgcgatgcccagtctagaaaatctttcagctgtaaatactgtgacaaggaatatgtgagcctgggcgccctgaagatgcatattcggacccacacattaccttgtgtttgcaagatctgcggcaaggcgttttccagaccctggttgcttcaaggacacattagaactcacacgggggagaagcctttttcttgccctcactgcaacagagcatttgcagacaggtcaaatctgagggctcatctgcagacccattctgatgtaaagaaataccagtgcaaaaactgctccaaaaccttctccagaatgtctctcctgcacaaacatgaggaatctggctgctgtgtagcacactgagtgacgcaatcaatgtttactcgaacagaatgcatttcttcactccgaagccaaatgacaaataaagtccaaaggcattttctcctgtgctgaccaaccaaataatatgtatagacacacacacatatgcacacacacacacacacacccacagagagagagctgcaagagcatggaattcatgtgtttaaagataatcctttccatgtgaagtttaaaattactatatatttgctgatggctagattgagagaataaaagacagtaacctttctcttcaaagataaaatgaaaagcacattgcatcttttcttcctaaaaaaatgcaaagatttacattgctgccaaatcatttcaactgaaaagaacagtattgctttgtaatagagtctgtaataggatttcccataggaagagatctgccagacgcgaactcaggtgccttaaaaagtattccaagtttactccattacatgtcggttgtctggttgccattgttgaactaaagcctttttttgattacctgtagtgctttaaagtatatttttaaaagggaggaaaaaaataacaagaacaaaacacaggagaatgtattaaaagtatttttgttttgttttgtttttgccaattaacagtatgtgccttgggggaggagggaaagattagctttgaacattcctggcgcatgctccattgtcttactattttaaaacattttaataatttttgaaaattaattaaagatgggaataagtgcaaaagaggattcttacaaattcattaatgtacttaaactatttcaaatgcataccacaaatgcaataatacaataccccttccaagtgcctttttaaattgtatagttgatgagtcaatgtaaatttgtgtttatttttatatgattgaatgagttctgtatgaaactgagatgttgtctatagctatgtctataaacaacctgaagacttgtgaaatcaatgtttcttttttaaaaaacaattttcaagttttttttacaataaacagttttgatttaaaatctcgtttgtatactattttcagagactttacttgcttcatgattagtaccaaaccactgtacaaagaattgtttgttaacaagaaaaaaa

SEQ ID NO: 670 - protein, 268 aa, Homo sapiens
MPRSFLVKKHFNASKKPNYSELDTHTVIISPYLYESYSMPVIPQPEILSSGAYSPITVWTTAAPFHAQLPNGLSPLSGYSSSLGRVSPPPPSDTSSKDHSGSESPISDEEERLQSKLSDPHAIEAEKFQCNLCNKTYSTFSGLAKHKQLHCDAQSRKSFSCKYCDKEYVSLGALKMHIRTHTLPCVCKICGKAFSRPWLLQGHIRTHTGEKPFSCPHCNRAFADRSNLRAHLQTHSDVKKYQCKNCSKTFSRMSLLHKHEESGCCVAH

SEQ ID NO: 671 - DNA, 3413 bp, Homo sapiens
atttccctgctgctatgtgaaatgtgcgtcttctccttccgccatgattaagtaagcaaacattttcctctaattcagattctttaaacaaaagttgcaaatgaatgtagccttcatctattgtaaaattaaagatggagatggtcaaggggttaccgccagtctgtttcttgcgctgataatttttctagacattaaatctcaccatttgttcccaacaaagaaagaaagacaggaccaccagactctacagggaagccaagaggaagaagggaaggagcccagaaatggagagaagctggactctagggatggatctggggatgctccacaaagtgcagctgtggagaatgcagaagaagagttggctagtgggacattcccactgaggagcatggcagggggaatgtctaatattcactaagagaattcttgaaatgtaacatttagatgaaactcttcaagtttccttaaaatacaaattcatgactctctttctttctctctctctctttctctctctctttggtatgttaaagtaatcaaggaaagggattttgttttataactgggttacacaggggagagaccagaatagctgaaagctgtgagacatgaagaaaattcaagatttaggagacatgcagaacatcagtgtctaggcaaaatggcagactgaccaacccccacacactgaatccctagagatattaggacagggatattgagaaaaatttacctttaagttgtaaaggacaaggcaactcaacatattgaatgccttgttgacaaccaggggctaatatttgggatgcatattgggcatagatgcacagaaaataatttatcagtgacattaataatatgacatctctttgttgagaatttactgctgtcttaatatcacaactctaaggggtcaacatccagaataaacttcttatcttacatatttaaaattatttgctaggctacatttttcttagaaaaatgcatatctgaaacagaatattgatttttttcctgggtcatacataaagaccatcagaaattaattattgaaaaaacactgctatactcattagagatatattttaattagattaattttgcattaacagtccatgagaagttacaactaacttgcaacgagacattaacatgcatcatgtttgatataagtaaaaatggaaatgattagaagtatacaaatataaagtatgttgctagtatatgcaagcttaaaaaacttttacctgatagaattagcaagagcagctatgttgagcttctttcagttaaaagtcattttcggctatgtctccctaaggatagaaatatcactgcttttgatctcatttagaattctgctcacttttaggaaagtagggctgtttggaaatggtcagccatatccttactgaatttcctagggcttgactgcacctactctagttaacaagtaagatatagttatatattgtattataacttctcaaagcacttatattttgattttccttcttttatgttcattatcttcatttggactactccatgtgacaaaagcagttatttttcttctaccccctaaactggaccacatcgatgctcttaggtccaaatcatattctttaagaaacaagtgttcactgaatgatttactgcattatataataggtactatacaagacacctgaggccccccacaccgtgaaaacagatgtttcttcctggagcttgcccaataggagagaaatttttaatttaccctttctcagtaaaccattatacaaaacagaagtgaaattatggacccagtgaactcaatctggctgacttgcaacccctatgtgttcataaacccactgaaatatataatttgttgtttatattaaatatgcactgaagcatgattagataaacattgaaagtaaattttaattttaaccatcagtggaagtatatggggtgatttaagtcattcatattagtttatttttatcaggtgttcctccttgtccatagtgaaatacaatacagagattatagcctgtggcttgacaggacatcttatagttggtaacaggactacattaaaaggaaaaaacaataaataaggatgtctaattatacagataaagaaagcaagttcactcactcctccaggacagcaccagagacaacgttagaaccaagagtttcaaaacctcgccttgtatggtttgcctgatgccatgattaaagaaaagggggtggggaactaagagaggaagccaaagagaaagaattcagtaccaaacagcaatattcagatgttttattaaataataggaggtgttttgaccttgctggtgaacagaggtgatctcaaaacatttgacagatataattaaggccataaggcaataattgcaaaagtcaaggagcccttgccacctccaaagcatcacgtgtggatgcaggaaccatattaacaacatgggtagtcaaggagaaagcagatagaataaagctgtacccagcaatataaagggacatgcaagtgtgtgttgtgcttaagagtaaacttagggaaaaaagctccccataacctcgagaaacgtttctggatctgagatatccattagcacatttagaaggtacctatttccattattgtgaaggagttgtaaatgaaataaacaactttaaataatacctcccttggtcaaactgcattaagtattccctgatggaattcattcatcatcattcaaacagaatggtttgcaactcaacctgcctagtgtggggtctggaattcccaccacagtcactgtgccttaagcactgttgcagcagaaggacttgaagtaacacatgaatatataatgccaatttgcatgtcagcatggattgttgaaattgaagttagttaattgtcacattgtaacaggaaaagaatccaagttttggagctggttggaactgagttttcatcttctttctctgctacttaactgtgttatcctgaacaagatactcaacctccatgagacacagtgaccatgtgaaatatatatgtaaaatgtctggcaaacatctgattcatgtaggtacccaaaattagatcattttcattttcttttgcttccttggaagttcaaaacaaaattctgaggtaagtttcaattaaaatgggtcaggcagacagattccagcaaggtcaaagcatccttttttctttaataaaatatctgaatatctgaacaagaaacaacttctgtttctcaaggttgaaatgatgaattattgaacttctgttgctgtttgttttctctcttatctccttactactacatataaatgagatatcttgctatcccactgatatctcaaattcagtatttcccaaataaaacgtaatcttt

SEQ ID NO: 672 - protein, 107 aa, Homo sapiens
MNVAFIYCKIKDGDGQGVTASLFLALIIFLDIKSHHLFPTKKERQDHQTLQGSQEEEGKEPRNGEKLDSRDGSGDAPQSAAVENAEEELASGTFPLRSMAGGMSNIH

SEQ ID NO: 673 - DNA, 2834 bp, Homo sapiens
gcccactcccaccgccagctggaaccctggggactacgacgtccctcaaaccttgcttctaggagataaaaagaacatccagtcatggataaaaatgagctggttcagaaggccaaactggccgagcaggctgagcgatatgatgacatggcagcctgcatgaagtctgtaactgagcaaggagctgaattatccaatgaggagaggaatcttctctcagttgcttataaaaatgttgtaggagcccgtaggtcatcttggagggtcgtctcaagtattgaacaaaagacggaaggtgctgagaaaaaacagcagatggctcgagaatacagagagaaaattgagacggagctaagagatatctgcaatgatgtactgtctcttttggaaaagttcttgatccccaatgcttcacaagcagagagcaaagtcttctatttgaaaatgaaaggagattactaccgttacttggctgaggttgccgctggtgatgacaagaaagggattgtcgatcagtcacaacaagcataccaagaagcttttgaaatcagcaaaaaggaaatgcaaccaacacatcctatcagactgggtctggcccttaacttctctgtgttctattatgagattctgaactccccagagaaagcctgctctcttgcaaagacagcttttgatgaagccattgctgaacttgatacattaagtgaagagtcatacaaagacagcacgctaataatgcaattactgagagacaacttgacattgtggacatcggatacccaaggagacgaagctgaagcaggagaaggaggggaaaattaaccggccttccaacttttgtctgcctcattctaaaatttacacagtagaccatttgtcatccatgctgtcccacaaatagttttttgtttacgatttatgacaggtttatgttacttctatttgaatttctatatttcccatgtggtttttatgtttaatattaggggagtagagccagttaacatttagggagttatctgttttcatcttgaggtggccaatatggggatgtggaatttttatacaagttataagtgtttggcatagtacttttggtacattgtggcttcaaaagggccagtgtaaaactgcttccatgtctaagcaaagaaaactgcctacatactggtttgtcctggcggggaataaaagggatcattggttccagtcacaggtgtagtaattgtgggtactttaaggtttggagcacttacaaggctgtggtagaatcataccccatggataccacatattaaaccatgtatatctgtggaatactcaatgtgtacacctttgactacagctgcagaagtgttcctttagacaaagttgtgacccattttactctggataagggcagaaacggttcacattccattatttgtaaagttacctgctgttagctttcattatttttgctacactcattttatttgtatttaaatgttttaggcaacctaagaacaaatgtaaaagtaaagatgcaggaaaaatgaattgcttggtattcattacttcatgtatatcaagcacagcagtaaaacaaaaacccatgtatttaacttttttttaggatttttgcttttgtgattttttttttttttttttgatacttgcctaacatgcatgtgctgtaaaaatagttaacagggaaataacttgagatgatggctagctttgtttaatgtcttatgaaattttcatgaacaatccaagcataattgttaagaacacgtgtattaaattcatgtaagtggaataaaagttttatgaatggacttttcaactactttctctacagcttttcatgtaaattagtcttggttctgaaacttctctaaaggaaattgtacattttttgaaatttattccttattccctcttggcagctaatgggctcttaccaagtttaaacacaaaatttatcataacaaaaatactactaatataactactgtttccatgtcccatgatcccctctcttcctccccaccctgaaaaaaatgagttcctattttttctgggagagggggggattgattagaaaaaaatgtagtgtgttccatttaaaattttggcatatggcattttctaacttaggaagccacaatgttcttggcccatcatgacattgggtagcattaactgtaagttttgtgcttccaaatcactttttggtttttaagaatttcttgatactcttatagcctgccttcaattttgatcctttattctttctatttgtcaggtgcacaagattaccttcctgttttagccttctgtcttgtcaccaaccattcttacttggtggccatgtacttggaaaaaggccgcatgatctttctggctccactcagtgtctaaggcaccctgcttcctttgcttgcatcccacagactatttccctcatcctatttactgcagcaaatctctccttagttgatgagactgtgtttatctccctttaaaaccctacctatcctgaatggtctgtcattgtctgcctttaaaatccttcctctttcttcctcctctattctctaaataatgatggggctaagttatacccaaagctcactttacaaaatatttcctcagtactttgcagaaaacaccaaacaaaaatgccattttaaaaaaggtgtattttttcttttagaatgtaagctcctcaagagcagggacaatgttttctgtatgttctattgtgcctagtacactgtaaatgctcaataaatattgatgatgggaggcagtgagtcttgatgataagggtgagaaactgaaatccc

SEQ ID NO: 674 - protein, 245 aa, Homo sapiens
MDKNELVQKAKLAEQAERYDDMAACMKSVTEQGAELSNEERNLLSVAYKNVVGARRSSWRVVSSIEQKTEGAEKKQQMAREYREKIETELRDICNDVLSLLEKFLIPNASQAESKVFYLKMKGDYYRYLAEVAAGDDKKGIVDQSQQAYQEAFEISKKEMQPTHPIRLGLALNFSVFYYEILNSPEKACSLAKTAFDEAIAELDTLSEESYKDSTLIMQLLRDNLTLWTSDTQGDEAEAGEGGEN

SEQ ID NO: 675 - DNA, 2876 bp, Homo sapiens
gcctgtgagcagcgagatccagggacagagtctcagcctcgccgctgctgccgccgccgccgcccagagactgctgagcccgtccgtccgccgccaccacccactccggacacagaacatccagtcatggataaaaatgagctggttcagaaggccaaactggccgagcaggctgagcgatatgatgacatggcagcctgcatgaagtctgtaactgagcaaggagctgaattatccaatgaggagaggaatcttctctcagttgcttataaaaatgttgtaggagcccgtaggtcatcttggagggtcgtctcaagtattgaacaaaagacggaaggtgctgagaaaaaacagcagatggctcgagaatacagagagaaaattgagacggagctaagagatatctgcaatgatgtactgtctcttttggaaaagttcttgatccccaatgcttcacaagcagagagcaaagtcttctatttgaaaatgaaaggagattactaccgttacttggctgaggttgccgctggtgatgacaagaaagggattgtcgatcagtcacaacaagcataccaagaagcttttgaaatcagcaaaaaggaaatgcaaccaacacatcctatcagactgggtctggcccttaacttctctgtgttctattatgagattctgaactccccagagaaagcctgctctcttgcaaagacagcttttgatgaagccattgctgaacttgatacattaagtgaagagtcatacaaagacagcacgctaataatgcaattactgagagacaacttgacattgtggacatcggatacccaaggagacgaagctgaagcaggagaaggaggggaaaattaaccggccttccaacttttgtctgcctcattctaaaatttacacagtagaccatttgtcatccatgctgtcccacaaatagttttttgtttacgatttatgacaggtttatgttacttctatttgaatttctatatttcccatgtggtttttatgtttaatattaggggagtagagccagttaacatttagggagttatctgttttcatcttgaggtggccaatatggggatgtggaatttttatacaagttataagtgtttggcatagtacttttggtacattgtggcttcaaaagggccagtgtaaaactgcttccatgtctaagcaaagaaaactgcctacatactggtttgtcctggcggggaataaaagggatcattggttccagtcacaggtgtagtaattgtgggtactttaaggtttggagcacttacaaggctgtggtagaatcataccccatggataccacatattaaaccatgtatatctgtggaatactcaatgtgtacacctttgactacagctgcagaagtgttcctttagacaaagttgtgacccattttactctggataagggcagaaacggttcacattccattatttgtaaagttacctgctgttagctttcattatttttgctacactcattttatttgtatttaaatgttttaggcaacctaagaacaaatgtaaaagtaaagatgcaggaaaaatgaattgcttggtattcattacttcatgtatatcaagcacagcagtaaaacaaaaacccatgtatttaacttttttttaggatttttgcttttgtgattttttttttttttttttgatacttgcctaacatgcatgtgctgtaaaaatagttaacagggaaataacttgagatgatggctagctttgtttaatgtcttatgaaattttcatgaacaatccaagcataattgttaagaacacgtgtattaaattcatgtaagtggaataaaagttttatgaatggacttttcaactactttctctacagcttttcatgtaaattagtcttggttctgaaacttctctaaaggaaattgtacattttttgaaatttattccttattccctcttggcagctaatgggctcttaccaagtttaaacacaaaatttatcataacaaaaatactactaatataactactgtttccatgtcccatgatcccctctcttcctccccaccctgaaaaaaatgagttcctattttttctgggagagggggggattgattagaaaaaaatgtagtgtgttccatttaaaattttggcatatggcattttctaacttaggaagccacaatgttcttggcccatcatgacattgggtagcattaactgtaagttttgtgcttccaaatcactttttggtttttaagaatttcttgatactcttatagcctgccttcaattttgatcctttattctttctatttgtcaggtgcacaagattaccttcctgttttagccttctgtcttgtcaccaaccattcttacttggtggccatgtacttggaaaaaggccgcatgatctttctggctccactcagtgtctaaggcaccctgcttcctttgcttgcatcccacagactatttccctcatcctatttactgcagcaaatctctccttagttgatgagactgtgtttatctccctttaaaaccctacctatcctgaatggtctgtcattgtctgcctttaaaatccttcctctttcttcctcctctattctctaaataatgatggggctaagttatacccaaagctcactttacaaaatatttcctcagtactttgcagaaaacaccaaacaaaaatgccattttaaaaaaggtgtattttttcttttagaatgtaagctcctcaagagcagggacaatgttttctgtatgttctattgtgcctagtacactgtaaatgctcaataaatattgatgatgggaggcagtgagtcttgatgataagggtgagaaactgaaatccc

SEQ ID NO: 676 - protein, 245 aa, Homo sapiens; identical to SEQ ID NO: 674

SEQ ID NO: 677 - DNA, 4793 bp, Homo sapiens
attggatcaaacatgtcacaagagtcggacaataataaaagactagtggccttagtgcccatgcccagtgaccctccattcaatacccgaagagcctacaccagtgaggatgaagcctggaagtcatacttggagaatcccctgacagcagccaccaaggccatgatgatcattaatggtgatgaggacagtgctgctgccctcggcctgctctatgactactacaaggttcctcgagacaagaggctgctgtctgtaagcaaagcaagtgacagccaagaagaccaggagaaaagaaactgccttggcaccagtgaagcccagagtaatttgagtggaggagaaaaccgagtgcaagtcctaaagactgttccagtgaacctttccctaaatcaagatcacctggagaattccaagcgggaacagtacagcatcagcttccccgagagctctgccatcatcccggtgtcgggaatcacggtggtgaaagctgaagatttcacaccagttttcatggccccacctgtgcactatccccggggagatggggaagagcaacgagtggttatctttgaacagactcagtatgacgtgccctcgctggccacccacagcgcctatctcaaagacgaccagcgcagcactccggacagcacatacagcgagagcttcaaggacgcagccacagagaaatttcggagtgcttcagttggggctgaggagtacatgtatgatcagacatcaagtggcacatttcagtacaccctggaagccaccaaatctctccgtcagaagcagggggagggccccatgacctacctcaacaaaggacagttctatgccataacactcagcgagaccggagacaacaaatgcttccgacaccccatcagcaaagtcaggagtgtggtgatggtggtcttcagtgaagacaaaaacagagatgaacagctcaaatactggaaatactggcactctcggcagcatacggcgaagcagagggtccttgacattgccgattacaaggagagctttaatacgattggaaacattgaagagattgcatataatgctgtttcctttacctgggacgtgaatgaagaggcgaagattttcatcaccgtgaattgcttgagcacagatttctcctcccaaaaaggggtgaaaggacttcctttgatgattcagattgacacatacagttataacaatcgtagcaataaacccattcatagagcttattgccagatcaaggtcttctgtgacaaaggagcagaaagaaaaatccgagatgaagagcagaagcagaacaggaagaacgggaaaggccaggcctcccaaactcaatgcaacagctcctctgatgggaagttggctgccatacctttacagaagaagagtgacatcacctacttcaaaaccatgcctgatctccactcacagccagttctcttcatacctgatgttcactttgcaaacctgcagaggaccggacaggtgtattacaacacggatgatgaacgagaaggtggcagtgtccttgttaaacggatgttccggcccatggaagaggagtttggtccggtgccttcaaagcagatgaaagaagaagggacaaagcgagtgctcttgtacgtgaggaaggagactgacgatgtgttcgatgcattgatgttgaagtctcccacagtgatgggcctgatggaagcgatatctgagaaatatgggctgcccgtggagaagatagcaaagctttacaagaaaagcaaaaaaggcatcttggtgaacatggatgacaacatcatcgagcactactcgaacgaggacaccttcatcctcaacatggagagcatggtggagggcttcaaggtcacgctcatggaaatctagccctgggtttggcatccgctttggctggagctctcagtgcgttcctccctgagagagacagaagccccagccccagaacctggagacccatctcccccatctcacaactgctgttacaagaccgtgctggggagtggggcaagggacaggccccacagtcggtgtgcttggcccatccactggcacctaccacggagccgaagcctgagcccctcaggaaggtgccttaggcctgttggattcctatttattgcccaccttttcctggagcccaggtccaggcccgccaggactctgcaggtcactgctagctccagatgagaccgtccagcgttcccccttcaagagaaacactcatcccgaacagcctaaaaaattcccatcccttctttctcacccctccatatctatatctcccgagtggctggacaaaatgagctacgtctgggtgcagtagttataggtggggcaagaggtggatgcccactttctggtcagacacctttaggttgctctggggaaggctgtcttgctaaatacctccagggttcccagcaagtggccaccaggccttgtacaggaagacattcagtcaccgtgtaattagtaacacagaaagtctgcctgtctgcattgtacatagtgtttataatattgtaataatatattttacctgtggtatgtgggcatgtttactgccactggcctagaggagacacagacctggagaccgttttaatgggggtttttgcctctgtgcctgttcaagagacttgcagggctaggtagagggcctttgggatgttaaggtgactgcagctgatgccaagatggactctgcaatgggcatacctgggggctcgttccctgtccccagaggaagccccctctccttctccatgggcatgactctccttcgaggccaccacgtttatctcacaatgatgtgttttgcctgactttccctttgcgctgtctcgtgggaaaggtcattctgtctgagaccccagctccttctccagctttggctgcgggcatggcctgagctttctggagagcctctgcagggggtttgccatcagggccctgtggctgggtctgctgcagagctccttggctatcaggagaatcctggacactgtactgtgcctcccagtttacaaacacgcccttcatctcaagtggccctttaaaaggcctgctgccatgtgagagctgtgaacagctcagctctgagtcggcagactggggcttcctcctgggccaccagatggaaagggggtattgtttgcctcactcctggatgctgcgttttaaggaagtgagtgagaaagaatgtgccaagatacctggctcctgtgaaaccagcctcaggagggaaactgggagagagaagctgtggtctcctgctacatgccctgggagctggaagagaaaaacactcccctaaacaatcgcaaaatgatgaaccatcatgggccactgttctctttgaggggacaggtttaggggtttgcgttcgcccttgtgggctgaagcactagctttttggtagctagacacatcctgcacccaaaggttctctacaaaggcccagatttgtttgtaaagcactttgactcttacctggaggcccgctctctaagggcttcctgcgctcccacctcatctgtccctgagatgcagagcaggatggagggtctgcttctagctcagctgtttctccttgaggttgcggaggaattgaattgaatgggacagagggcaggtgctgtggccaagaagatctccgagcagcagtgacggggcaccttgctgtgtgtcctctgggcatgttaacccttctgtggggccaaaggtttgcatcgtggatccagctgtgctccagtctgtcccctcctcctccactctgactgccacgccccggaccagcagcttggggaccctccagggtactaatggggctctgttctgagatggacaaattcagtgttggaaatacatgttgtactatgcacttcccatgctcctagggttaggaatagtttcaaacatgattggcagacataacaacggcaaatactcggactggggcataggactccagagtaggaaaaagacaaaagatttggcagcctgacacaggcaacctacccctctctctccagcctctttatgaaactgtttgtttgccagtcctgccctaaggcagaagatgaattgaagatgctgtgcatgtttcctaagtccttgagcaatcatggtggtgacaattgccacaagggatatgaggccagtgccaccagagggtggtgccaagtgccacatcccttccgatccattcccctctgtatcctcggagcaccccagtttgcctttgatgtgtccgctgtgtatgttagctgaactttgatgagcaaaatttcctgagcgaaacactccaaagagataggaaaacttgccgcctcttcttttttgtcccttaatcaaactcaaataagcttaaaaaaaatccatggaagatcatggacatgtgaaatgagcatttttttcttttctttttttttttttttttttaacaaagtctgaactgaacagaacaagactttttcctcatacatctccaaattgtttaaacttactttatgagtgtttgtttagaagttcggaccaacagaaaaatgcagtcagatgtcatcttggaattggtttctaaaagagtaaggcatgtccctgcccagaaacttaggaagcatgaaataaatcaaatgtttattttccttcttatttaaaatcatgctaatgcaacagaaatagagggtttgtgccaaatgctatgaacggccctttcttaaagacaagcaagggagattgatatatgtacaatttgctctcatgttttt

SEQ ID NO: 678 - protein, 625 aa, Homo sapiens
MSQESDNNKRLVALVPMPSDPPFNTRRAYTSEDEAWKSYLENPLTAATKAMMIINGDEDSAAALGLLYDYYKVPRDKRLLSVSKASDSQEDQEKRNCLGTSEAQSNLSGGENRVQVLKTVPVNLSLNQDHLENSKREQYSISFPESSAIIPVSGITVVKAEDFTPVFMAPPVHYPRGDGEEQRVVIFEQTQYDVPSLATHSAYLKDDQRSTPDSTYSESFKDAATEKFRSASVGAEEYMYDQTSSGTFQYTLEATKSLRQKQGEGPMTYLNKGQFYAITLSETGDNKCFRHPISKVRSVVMVVFSEDKNRDEQLKYWKYWHSRQHTAKQRVLDIADYKESFNTIGNIEEIAYNAVSFTWDVNEEAKIFITVNCLSTDFSSQKGVKGLPLMIQIDTYSYNNRSNKPIHRAYCQIKVFCDKGAERKIRDEEQKQNRKNGKGQASQTQCNSSSDGKLAAIPLQKKSDITYFKTMPDLHSQPVLFIPDVHFANLQRTGQVYYNTDDEREGGSVLVKRMFRPMEEEFGPVPSKQMKEEGTKRVLLYVRKETDDVFDALMLKSPTVMGLMEAISEKYGLPVEKIAKLYKKSKKGILVNMDDNIIEHYSNEDTFILNMESMVEGFKVTLMEI

SEQ ID NO: 679 - DNA, 3735 bp, Homo sapiens
agtcacaacttcgggggttgaggttgtcaaggagctgtccgtgatggttctatggtgtgtgcgtacacacatactctctctctcacacacacacaccacagtgacagatgacctattgaaataatttcagagccggtctgtggttgctacgacaaccaatgatctcttggctttcatctggccatgtgacagggactttgacgtcagctagaggcagagtctgtggctgagtccacacagtcaaaggcttgtgagaatctggtggatgctggaccttgctgctgctgctactgctgtttccaggggctgcagagcatggactgttaaatcttgcacttcttctgagtgagctgaattcttgccgccaggatggggaaacagaacagcaagctgcgcccggaggtcatgcaggacttgctggaaagcacagactttacagagcatgagatccaggaatggtataaaggcttcttgagagactgccccagtggacatttgtcaatggaagagtttaagaaaatatatgggaactttttcccttatggggatgcttccaaatttgcagagcatgtcttccgcaccttcgatgcaaatggagatgggacaatagactttagagaattcatcatcgccttgagtgtaacttcgagggggaagctggagcagaagctgaaatgggccttcagcatgtacgacctggacggaaatggctatatcagcaaggcagagatgctagagatcgtgcaggcaatctataagatggtttcctctgtaatgaaaatgcctgaagatgagtcaaccccagagaaaagaacagaaaagatcttccgccagatggacaccaatagagacggaaaactctccctggaagagttcatccgaggagccaaaagcgacccgtccattgtgcgcctcctgcagtgcgacccgagcagtgccggccagttctgagccctgcgcccaccaatcgaattgtagagctgcttgtgttcccttttgattcttctttttaacaatttttttttttttttgccaaacaatatcaatggtgatgccgtcccctgtgcggtctgatgcgccttcctccgtgacgccttcagcttcttttgtcgtggatgcttcgtgggaatgcccagagccccagtgtgcttgtggagagcatggacagacttcgtggtgttcattgtttgatgatttttaatcgttactattatttttttttattctaatgtctctgttctaaaacgtaagactcgggggttggggcaaaagaagggaaacccatccagtcctgtgattctattgcaagcttcaaggggcttttgtttgaaagacaaaactccccacctgaatctgttgtcacacgtgccgtaggggtgatggatggcaccggatgctggattccccaagaacaagttaccctctggggtgaggctattccagcgagctgggacatttccccatgggggcccactcccctctcttccccagcaggctgtagtttctaagctgtgaacatttcaagataaattaacagaggagaggaaaaagatggctcagctattttttcacaggtttacactagttgagctaatatgcgtgtctttggaaattaaacacaaatggtaacatattccaaaaccagacccatcttgttgcctattgtgataaaataaaaagacggctgtatataacatattgggtaatgcagaccaaattaagtgttttgccttgtttaaatgaaatgcatgtttagtgagcactaatacaatcttattccagaagactgtttttagtagcttattgtgaagtaagacaactataatgaatgtctgtcttgtttggaagtcatatctgtctttgcacaaatgtaccaatcgacaagtatattttatatattccataaaaatacaaagtaaccctgactagggcccaactttaattttgaatgcatttccagagtggccatgcctagagggcagatgcagagcaggtggtagtgggacaggacaattggagcacaggaatgttaacatgtatgacaggggaccagtagggtggtttccctctcaggcccagcagcccattgacagcattagactggcggcatggtgcttttctgagcagatcaatactctgcagactcgaaaaaacatcacatacattcttggaacttcccagtggtttaatctatgtgcatggttagggagccaggtctggaatattcagtttccctgcccctgttaaagaatcagaggttgggcagtcatcaaattcatcataaagacatgggcaagtgtgtctgtggtttccaaggcccccctatggagaatccaaaagtattttccattgccgtgctctttgaatgcagacttctatttccagaagtgacagcacaagtctgagttgctgtttggtctggtgacctcagacacactaatttgaattgaaagctaagagtaaaaatttgctggttacaggcgagtcatactcttgcaagtagttagcaaagggaggcccaaattctcaaggttgttgatggggaacttgccactaagagaaggcagagaggtccctagtgggtatatttgctgccaagccacttgccaaagaagaggaaccacagaaagagagacatcatgaccaggagaaaaatgtgactagacatgctaacctccaggtttttatatatgacttgagtctgctgtaattggcagcagaaatccaaatttgtatggtagaccaaaaagaaccaaatccatagggtgaaattttgagacctagactctgtaaaaataatcctagtcttcctccaggggtcagttcctcacagtggttctgtaccaaaacttgccaaattcctccatggccaagtgttaaaatctgtgtttggaaaatagcgaattaacctaagacacagaaggcagactgggtgaggagacctagcatgccctattggcagtgctcaggagctgcatcccacttttccctgctctgaatcgaagtcctagttccttcctttgattctcctttggtaggtggaatcagttaatgttttgagaaacctgcctgggctctgcccttagtcatgacatctcgctgagccagacccactctgttccttggaacctagagctggagtgaggagtagaggtctccggctattccagaaagaaaagtgagccacatgcaggctgatgaatgccgacacttccagaatgtatagaaatagtccctgtcctggcctgccactgaccctgtctgtattttctcggaggttgtttttctccttctccttcccaggaaggtctttgtatgtcgaatccagtgcactcaagtttggccaagggactccacagcacccagaagactgcatgcctcaaggtttatgtcactcctctgctgggctgttcattgtcattgctgtgttcagggacctttggaaataaaacctgttctgtcccaaataaaaccagcctgtgatgttcaagggactggaataaagtggcttacgacctgaaggattctacagagtgctcaactgttcatacatcattcagagtgggagggagctgggggtgctgtcccatcccatctgtatgcccacggtggatttaataatatataatttataaatcatagcctatggagtggcccgtaaatcagttgactgtgtagctcttgcctggcattaaagcatgtttttggtttaacatgaaaaaaaaaaaaaaaaaa

SEQ ID NO: 680 - protein, 193 aa, Homo sapiens [sequence omitted]

SEQ ID NO: 681 - DNA, 2100 bp, Homo sapiens
agcgcggggcaggaggagtacctcggccaagaaaattatgcatgcgttagggaagctctgagagaatggctgtggaagctctccactgtggtttgaatccacggggtattgatcaccctgcccatgctgaaggtattaaactgcaaattgaaggtgaaggtgtggaatctcaatccattaaaaataaaaatttccagaaggtgcctgaccagaaaggaactcccaagcgactgcaggcagaagctgagacggctaagtcagctacggtgaagctatctaaaccggtggctctatggacccagcaggatgtctgcaagtggttgaagaaacattgtccgaatcagtatcagatctacagtgagtcattcaaacagcatgacataactgggcgagccctgctgagacttactgacaaaaagctcgagcgaatggggattgcccaggagaacctccggcagcacatcttacaacaggtgctccagctgaaggtgcgagaagaagtcagaaatctacagttactcacacaaggtaccctattgcttcctgatgggtggatggatggggagattagaagaaaggccaccttactattaggacagacaggagtcagggagaatttgttattgtttcttcacagaatttccatcatagaaaatagtatacagatttaagattacttccctttgaaaacttttctcatagctcactagggagaaggatgcacaaataagtaatggatgagcaaacagaattacctgagctaacttcaaggtggtcacgtacagttgtatggattgtgtactgcacaaccccagagaataccagtcacatcaatcagggtacgattgcactcactagagttgtataatgtgcagcctgcacaactgtacagtccagctgtagctatcttcacctgcgccaattgtgagggcgctttagcatttgagtgattcaatagttacgatgaccagtgatataagtggagtttttgttgtatttttgttttgcttttcaccggttagtgggagaaaaacattttagatatgtattactatacatgaatgtattatacacacacactttagagattgtaagaaccccatttagcttcttgaaagtggaataatttttataatagactatagtgaatctaaaactacactgttaagagtatataattcttaacaggaattataaataacttcaatatgatgagagcacttaagatctcaataactgtggaagtgacaaaataaagctagaattcgaagaaagccttaagttacactatatgtaactgatatgtctacatgagatttggatgctatcaaccttcattggctataaactttgtttgttttattttagcgtccattgtacatcgttttaaatgaaaggatgataaaatatgtgtttttgagagccttgagtatttgtcattctgcagaatattgtaattgcatgcataccgatattggagaaatctgggtcagccaagtttcatgttattgcatttagattaacctagtaatagtccatttgcctagaggaaataatgtgctccctgaaagatgactattctagaaggataaatatagatttcaagtgatcgtaaaatagtattgtttgtctcatatgcattatttgcattttgtcctcagagatttccaatggtgaatttactggtatactaagtgatttaaatttgaatgtgaaatactgataggcttttaagcttcttttaagaagtagatagaaatacgaagattatgataagaaagtctgtcacagtgctatttggaaaacggaaaatttacaagcaacctagaggtccagcaatgtgaaaagaatcaagtaattctgcttaaattcataagattcagtataatgcccagttattaaaattacatctttaaagaatacatgacaacatgggaaattacgtaagtcatacaaggtgggaggaaaggtcatgtgtaaaattgtatgcataatataagcccaattttgtaaaaaccatatattcttatatgtacagaaaaaaaggactgcaagtaaatatgccaaccattttaataaaggatctctctggattgtggg

SEQ ID NO: 682 - protein, 201 aa, Homo sapiens
MAVEALHCGLNPRGIDHPAHAEGIKLQIEGEGVESQSIKNKNFQKVPDQKGTPKRLQAEAETAKSATVKLSKPVALWTQQDVCKWLKKHCPNQYQIYSESFKQHDITGRALLRLTDKKLERMGIAQENLRQHILQQVLQLKVREEVRNLQLLTQGTLLLPDGWMDGEIRRKATLLLGQTGVRENLLLFLHRISIIENSIQI

SEQ ID NO: 683 - DNA, 4373 bp, Homo sapiens
ttttggcgtagattccccactgatcgaggcattttttttccctttttttttcctttttttttttcttttaaaaattttggccatcgttctccgtacgggggctttttctgtctgtctgtctggctggcaggctggctttccccctctttcccacggagcccgagccgggcgcccggtggggagtggggagtgggtggggggagccagcagagttccattttggaacgcccgtgccgcgtctccgcgttcccagcccgggtccccgcgttcacagccccagcgcaggtctggatgtaccgactgcttttggaataaaaagattcccaggatgtgagcaacacgggaccgatatgatgcttcctggtgtgtttagtggttggtgccattccaattttctgtgctgaaatcattctgaaaactcaaacagtagacttcagcacacaaggaaagccaaagccatttgagggggaataaagccaaaagcctttcaccttattcgttccaagaatctcaccgccccctccttatccccctccaaaaataagccattgcacacagacaggcagcatggctagcaaacgaaaatctacaactccatgcatggttcggacatcacaagtagtagaacaagatgtgcccgaggaagtagacagggccaaagagaaaggaatcggcacaccacagcctgacgtggccaaggacagttgggcagcagaacttgaaaactcttccaaagaaaacgaagtgatagaggtgaaatctatgggggaaagccagtccaaaaaactccaaggtggttatgagtgcaaatactgcccctactccacgcaaaacctgaacgagttcacggagcatgtcgacatgcagcatcccaacgtgattctcaaccccctctacgtgtgtgcagaatgtaacttcacaaccaaaaagtacgactccctatccgaccacaactccaagttccatcccggggaggccaacttcaagctgaagttaattaaacgcaataatcaaactgtcttggaacagtccatcgaaaccaccaaccatgtcgtgtccatcaccaccagtggccctggaactggtgacagtgattctgggatctcggtgagtaaaacccccatcatgaagcctggaaaaccaaaagcggatgccaagaaggtgcccaagaagcccgaggagatcacccccgagaaccacgtggaagggaccgcccgcctggtgacagacacagctgagatcctctcgagactcggcggggtggagctcctccaagacacattaggacacgtcatgccttctgtacagctgccaccaaatatcaaccttgtgcccaaggtccctgtcccactaaatactaccaaatacaactctgccctggatacaaatgccacgatgatcaactctttcaacaagtttccttacccgacccaggctgagttgtcctggctgacagctgcctccaaacacccagaggagcacatcagaatctggtttgccacccagcgcttaaagcatggcatcagctggtccccagaagaggtggaggaggcccggaagaagatgttcaacggcaccatccagtcagtacccccgaccatcactgtgctgcccgcccagttggcccccacaaaggtgacgcagcccatcctccagacggctctaccgtgccagatcctcggccagactagcctggtgctgactcaggtgaccagcgggtcaacaaccgtctcttgctcccccatcacacttgccgtggcaggagtcaccaaccatggccagaagagacccttggtgactccccaagctgcccccgaacccaagcgtccacacatcgctcaggtgccagagcccccacccaaggtggccaaccccccgctcacaccagccagtgaccgcaagaagacaaaggagcagatagcacatctcaaggccagctttctccagagccagttccctgacgatgccgaggtttaccggctcatcgaggtgactggccttgccaggagcgagatcaagaagtggttcagtgaccaccgatatcggtgtcaaaggggcatcgtccacatcaccagcgaatcccttgccaaagaccagttggccatcgcggcctcccgacacggtcgcacgtatcatgcgtacccagactttgccccccagaagttcaaagagaaaacacagggtcaggttaaaatcttggaagacagctttttgaaaagttcttttcctacccaagcagaactggatcggctaagggtggagaccaagctgagcaggagagagatcgactcctggttctcggagaggcggaagcttcgagacagcatggaacaagctgtcttggattccatggggtctggcaaaaaaggccaagatgtgggagcccccaatggtgctctgtctcgactcgaccagctctccggtgcccagttaacaagttctctgcccagcccttcgccagcaattgcaaaaagtcaagaacaggttcatctcctgaggagcacgtttgcaagaacccagtggcctactccccaggagtacgaccagttagcggccaagactggcctggtccgaactgagattgtgcgttggttcaaggagaacagatgcttgctgaaaacgggaaccgtgaagtggatggagcagtaccagcaccagcccatggcagatgatcacggctacgatgccgtagcaaggaaagcaacaaaacccatggccgagagcccaaagaacgggggtgatgtggttccacaatattacaaggaccccaaaaagctctgcgaagaggacttggagaagttggtgaccagggtaaaagtaggcagcgagccagcaaaagactgtttgccagcaaagccctcagaggccacctcagaccggtcagagggcagcagccgggacggccagggtagcgacgagaacgaggagtcgagcgttgtggattacgtggaggtgacggtcggggaggaggatgcgatctcagatagatcagatagctggagtcaggctgcggcagaaggtgtgtcggaactggctgaatcagactccgactgcgtccctgcagaggctggccaggcctagacagggaagtctgttagaactgctgtgctgatcaacgggacgctccgtctttgaagaaagaagagatggtctctccccagccatgggccacccttgccagtgactccaagtggaactacttagctcgcgtgtgcctggagggtgcgggaagtccagcgactctcagacgcacctcccagaggaccggtgggaattgttcatagtgccaaagtcctactactgcgttttcaatgggtccttgtacatagtttgctcctctgccctagccctcacctcttgctatactggaaccgatttgtacaatgtgggaattttgttacctttttaatcaagggcaacttccttttccagcactaccattgtaaggtttttttcaggagggagggctaaccaccttgcttttctcttttctctttttcttttttttatttttgttttattaatttggggaaaggggtgttagcattagtgccatgatatctactggattttaagtagggagactttatttttaaaggtaggttgaaatttgggagatttctcggcaggaagggctgaaatccaggcccctgtctcaacttggagagaggtgacagacggcagatcttccaaatcaaattcctttccagttcttcccctggctgcctttttgggggtccctgccttagccccacacaaggctttctgaactgccaagaggggatctggcttctcaactgctcggcctcttgggccaggctgtgcccagccagccctgggagaactgggtagcaggtggctgacttctttaagcacctttctaaataccagcagaagaggctcccgcctctgttagcatgatcagtactattgtgacattaaaacaacaacaataagatcttcctatctggagggtacagaggtgaatggctttggttttcatttctcttcttcactgccttttctcggtgtggtatttgacaagattttagctcaaagcctcaccatgaattgattttttttgtttgtgtgtgtgtttgttttgggacaattttagatacctgagtgcactttttcagttagtcctaacttttaaaagaaggaaaaccaagagacatatctggtgtacgtgttgcagtatgaactctggttgcaatccctccccgtcccacactgccccccatttgagtacaccgcacaagtcaaacgctaggaagtttgaataaaaccaatttttctaacttgttgctcatttgttgtaactcaataaagcaaagactaaacatttttataacctttaaaaaaaaaaaaaa

SEQ ID NO: 684 - protein, 837 aa, Homo sapiens
MASKRKSTTPCMVRTSQVVEQDVPEEVDRAKEKGIGTPQPDVAKDSWAAELENSSKENEVIEVKSMGESQSKKLQGGYECKYCPYSTQNLNEFTEHVDMQHPNVILNPLYVCAECNFTTKKYDSLSDHNSKFHPGEANFKLKLIKRNNQTVLEQSIETTNHVVSITTSGPGTGDSDSGISVSKTPIMKPGKPKADAKKVPKKPEEITPENHVEGTARLVTDTAEILSRLGGVELLQDTLGHVMPSVQLPPNINLVPKVPVPLNTTKYNSALDTNATMINSFNKFPYPTQAELSWLTAASKHPEEHIRIWFATQRLKHGISWSPEEVEEARKKMFNGTIQSVPPTITVLPAQLAPTKVTQPILQTALPCQILGQTSLVLTQVTSGSTTVSCSPITLAVAGVTNHGQKRPLVTPQAAPEPKRPHIAQVPEPPPKVANPPLTPASDRKKTKEQIAHLKASFLQSQFPDDAEVYRLIEVTGLARSEIKKWFSDHRYRCQRGIVHITSESLAKDQLAIAASRHGRTYHAYPDFAPQKFKEKTQGQVKILEDSFLKSSFPTQAELDRLRVETKLSRREIDSWFSERRKLRDSMEQAVLDSMGSGKKGQDVGAPNGALSRLDQLSGAQLTSSLPSPSPAIAKSQEQVHLLRSTFARTQWPTPQEYDQLAAKTGLVRTEIVRWFKENRCLLKTGTVKWMEQYQHQPMADDHGYDAVARKATKPMAESPKNGGDVVPQYYKDPKKLCEEDLEKLVTRVKVGSEPAKDCLPAKPSEATSDRSEGSSRDGQGSDENEESSVVDYVEVTVGEEDAISDRSDSWSQAAAEGVSELAESDSDCVPAEAGQA

SEQ ID NO: 685 - DNA, 6147 bp, Homo sapiens
gcgggcgccggcaatcgagtggcttcctggccatggagaggagatctggacccgaggacgccagggactcctctccgtctccctggaccgctgtgtaggcacctgagttaacggacgctaagcggggtaggggaagtaacagtgtatcatgtatgccactgattccaggggacactcccctgctttcctccaacctcagaatggaaatagtcgtcacccatctggctatgttccagggaaggttgtcccattgcgtccccctcctcctccaaagagtcaagcttcagccaaatttacctccatcagacgagaagaccgggcaaccttcgcattctcacctgaagaacagcaagcccagagagaaagtcaaaagcaaaagagacacaaaaatactttcatttgttttgctattactagtttctcattttttattgcacttgcaatcattttaggaatatcctcaaaatatgctccagatgaaaattgcccagatcaaaatcctcgtctcaggaattgggatccaggacaagattctgcaaagcaagttgttatcaaggagggagatatgctccgtctgacctcagacgccaccgtgcattctatagtcattcaggatggaggactgcttgtatttggggacaataaagatggatccagaaatattactttgaggactcattacatcctgatccaggatggtggggcgcttcatattggagcagaaaaatgccgctataaatccaaagcgacaattaccttgtatggcaagtcagatgaaggtgaaagtatgccaacatttggcaaaaagtttattggtgtggaagctggcgggacactggagttacatggggcacggaaggcatcgtggacgttgttggcaaggaccctgaattcctcaggcttgccctttgggtcctatacctttgaaaaggacttttcccggggcctcaatgtgagggtcattgaccaagacacggccaaaattttggaaagtgagagatttgatacccatgaataccgcaatgagagcaggcggcttcaggagtttctgagattccaggatccaggtcggattgttgccatagctgtcggggattcagccgctaaaagtctcttacaaggaaccatccagatgatccaggaacggttgggaagtgaactgatccaaggactgggctacaggcaagcttgggctttagttggtgtcattgatggtggaagcacttcttgcaatgaatccgtgagaaactatgaaaatcatagcagtggcgggaaggctcttgcccaaagagaattttatactgtggatggccagaagttctctgtgacagcttatagtgaatggattgaaggcgtttctctttcaggattccgggtagaggttgtagatggagtgaagctaaatttgctagatgatgttagtagttggaaacctggagaccagattgtggtcgcaagcacagactattccatgtaccaagcagaggagttcactcttcttccctgttctgaatgcagccattttcaggtcaaagtcaaagaaacccctcagttcctgcacatgggtgagatcatagacggtgtagacatgagagctgaggttggaattcttacccggaatattgtgatccaaggagaagtggaggactcatgctacgcagaaaatcagtgccaattttttgattatgatacctttgggggacacattatgataatgaaaaattttacttcagtccatctttcttatgtggaattgaaacacatgggtcagcagcagatggggcgataccctgttcattttcacctgtgtggtgacgtggattataaaggaggatacagacatgcaacatttgtggacggcctgtctattcatcacagcttctcaaggtgcatcactgtgcatgggacaaatggcttgctaataaaagacaccattgggtttgacacactaggtcattgtttctttttggaagatggtattgaacagaggaatactttgttccacaatctgggactcctcaccaagccgggtactctcctgcccaccgataggaacaactccatgtgtaccaccatgcgagataaagtgtttggaaattacattcctgtgcctgctactgactgtatggctgtttcaactttctggattgctcatcccaacaataatctgattaataatgcagctgcaggctcacaggatgctggaatatggtatttattccacaaggaaccaactggggaatccagtggattgcagctcttggcaaaaccagaactcactccattgggtatattttataacaacagggtccattcaaattttaaggctggcttatttattgacaaaggtgtcaaaacaaccaactctagtgctgctgacccaagggaatacctctgtttggacaatagtgcaagatttcgacctcatcaggatgcaaaccccgaaaaaccacgtgttgctgctctaattgacaggctcattgcttttaaaaataatgataatggagcttgggtcagaggaggagatattatcgttcaaaattcagcatttgcagataatggaataggactgacctttgccagtgatggaagcttcccaagtgatgaaggttccagccaagaggtatctgaatctctctttgttggggagagcaggaattacggctttcagggtggtcagaacaagtatgtaggcactggaggaatagaccagaagcctcgaacattacccaggaacaggacgttcccaattagaggctttcagatttatgatgggcccattcatctcacaaggagcactttcaaaaaatatgtgccaactccagataggtacagcagtgcaattggcttcctcatgaagaattcctggcagataacccccaggaataatatctccctcgtgaagtttggtccacatgtctctctgaatgtcttttttggaaagcctggtccctggtttgaagattgtgagatggatggtgataagaactccatattccatgacattgatggctctgtgacaggatacaaggatgcttatgtgggaagaatggacaactacctgatccgccatccaagctgtgtaaatgtgtctaagtggaatgcagtgatctgcagtgggacctatgcacaggtctatgtacagacatggagcactcagaatctttctatgaccattacacgagatgagtatccgtccaaccctatggtgctccgaggtattaatcagaaggctgcctttccacagtaccagcctgtcgtcatgctggagaagggttataccatccactggaatgggccggcaccacggactacatttctatacctcgtcaacttcaacaagaatgactggattcgagttggcctttgctatccatcaaacacaagttttcaagttacctttggctatttgcagcggcagaatggctcattatccaaaatcgaagaatatgagcctgtgcattcactggaagaactgcaaagaaagcaatccgagaggaaattctattttgactccagcacggggttactgtttttgtatctcaaagccaaaagccacaggcatggccacagttactgttcatctcagggatgtgaaagagtcaagatccaagcagccacagactcaaaggacatcagtaactgcatggccaaagcatacccacagtactacagaaagccgtcagtggtcaagcggatgccggccatgctcactggactctgtcaaggctgtggcactcggcaggtggtgtttactagtgatcctcataaaagttacctccctgtgcaattccagtcacctgataaagcagaaacccagcgtggagacccgtctgttatttctgtcaatggcactgactttaccttccgaagtgcaggcgtcctcctccttgttgtggatccgtgcagcgttccattccgcttgacggaaaaaacggtttttcctcttgctgatgtcagtcgcattgaagagtatttaaaaacaggcatccctccaaggtccattgttctgttgagcacaagaggagaaataaagcagttaaacatttcacacttactagtacctctgggattagccaaaccagctcatctttatgacaaagggagtaccatatttttgggattcagtggaaactttaaaccatcatggactaagctatttaccagtcctgctggacagggccttggggtgcttgaacaattcatacctttgcagctggacgaatatggttgtcccagagccaccactgtccgcagaagagacctggaactgctaaagcaagcttcaaaagcacattagagactaactgtaacttaagtgctgggggaaaaaaaatgtgaactaacttatttaatttatggcattttaaaatgacactgttaacccaacggaaccattttccagtttgatacagaatggggagaaaagaaagcgtttgaaattattgcttggataccagcttcatgcaccttctagttgtacaaaatgttaaagacgttgtttgtatttgtaaggctggtgtattcagagagcagatctcttattcctcactttccacccccgtattttgtaatgaccatgagcaatgtttttactttttgtataatggggtggggtggagtgggggcttctgagagtcagcctgaggtctttagaggaccagctattgtagcaccttggatacttgaagtttaatgctcagttgggtcgggtggcagttgacttggtggctggcatgttcagcagtgcctggggccctgtttctgggcagcctttgaggattttctatgatattgaatgacagttttaagtggcaactcaggcccagctcatgcccttttttgcctggacatgtgctatttttattcacttatatatcaattacttgtaagggttaaactttcaaacaggaagtatattgggacaaaagggctcttggggattagatatccctttaatctgtgaccatggggcaaaaaattttcctgcagcaaaagtctgaggctgttgggaccatttttgcagctttaatccttagcctcttttgactgtatatttgtgtttaaaatgcagagctcaactgaatatttccttttttgttttgttttgttttgttttaagaagtaggttgttttcctgaaccgtaaacttgtatcattttaacttgcacaaaggaagtctgttcttggtattgctcttgcacttgggttttttgttattgttttgtgtggattttttaaagcttttctgttcaccctcctgccaggaaaatcccagaaagcttaatgataccccaaaatgattacacccagggaggaaaaaaaggagcgctttctagggtcagaatcgtggagagaatactcagaacatgaacctctttaaagccttgcaggaatgagtcactcttacttaatgaaatgttaaagccaattaaaaagcatgctgtgatgcccagcttccctttccacagggtgcatgcgtctcctgctggtgaatcacatgcggcaagaggcaactggctccacagcctgggatgctgccgtaccaagaggaaagaagcagcaaaatgcctttacgttgttctaaacccccgacgcataaagtgtagaggagggatggccaagggtgggtggtagaaagtgtgttcaggctgacactggcaatgagtacagataatttcactttcctcttccaggggcaaaggctgatggcctctacctttgtatccaggagaaactgcagagcagccctgtgactttacaaaatatgctacctcaaagtgctaccgataaacctttctaattgtaagtgcccttactaagggcacatgtcttaatcaaagttagttttttgttttctggtttgttttttttttttttgtatattgatgaatgagatcttacctattaaatatattattggaaaaaaaaaaaaaaaaaaaattaaagtttgagtgtgtgtgtgtgtgtgtgtgtgtgtgtgtgtgtgtgtgttttatgacttaaatatctttacgtgtgttttttagagcttggttctttaaagatttggagaagatatgtaaattaccaaggcacttggtttttctgttttatatactaataatcagggcctaagttaaataaaaatatgtgtgcatgtatttt

SEQ ID NO: 686 - protein, 1383 aa, Homo sapiens
MYATDSRGHSPAFLQPQNGNSRHPSGYVPGKVVPLRPPPPPKSQASAKFTSIRREDRATFAFSPEEQQAQRESQKQKRHKNTFICFAITSFSFFIALAIILGISSKYAPDENCPDQNPRLRNWDPGQDSAKQVVIKEGDMLRLTSDATVHSIVIQDGGLLVFGDNKDGSRNITLRTHYILIQDGGALHIGAEKCRYKSKATITLYGKSDEGESMPTFGKKFIGVEAGGTLELHGARKASWTLLARTLNSSGLPFGSYTFEKDFSRGLNVRVIDQDTAKILESERFDTHEYRNESRRLQEFLRFQDPGRIVAIAVGDSAAKSLLQGTIQMIQERLGSELIQGLGYRQAWALVGVIDGGSTSCNESVRNYENHSSGGKALAQREFYTVDGQKFSVTAYSEWIEGVSLSGFRVEVVDGVKLNLLDDVSSWKPGDQIVVASTDYSMYQAEEFTLLPCSECSHFQVKVKETPQFLHMGEIIDGVDMRAEVGILTRNIVIQGEVEDSCYAENQCQFFDYDTFGGHIMIMKNFTSVHLSYVELKHMGQQQMGRYPVHFHLCGDVDYKGGYRHATFVDGLSIHHSFSRCITVHGTNGLLIKDTIGFDTLGHCFFLEDGIEQRNTLFHNLGLLTKPGTLLPTDRNNSMCTTMRDKVFGNYIPVPATDCMAVSTFWIAHPNNNLINNAAAGSQDAGIWYLFHKEPTGESSGLQLLAKPELTPLGIFYNNRVHSNFKAGLFIDKGVKTTNSSAADPREYLCLDNSARFRPHQDANPEKPRVAALIDRLIAFKNNDNGAWVRGGDIIVQNSAFADNGIGLTFASDGSFPSDEGSSQEVSESLFVGESRNYGFQGGQNKYVGTGGIDQKPRTLPRNRTFPIRGFQIYDGPIHLTRSTFKKYVPTPDRYSSAIGFLMKNSWQITPRNNISLVKFGPHVSLNVFFGKPGPWFEDCEMDGDKNSIFHDIDGSVTGYKDAYVGRMDNYLIRHPSCVNVSKWNAVICSGTYAQVYVQTWSTQNLSMTITRDEYPSNPMVLRGINQKAAFPQYQPVVMLEKGYTIHWNGPAPRTTFLYLVNFNKNDWIRVGLCYPSNTSFQVTFGYLQRQNGSLSKIEEYEPVHSLEELQRKQSERKFYFDSSTGLLFLYLKAKSHRHGHSYCSSQGCERVKIQAATDSKDISNCMAKAYPQYYRKPSVVKRMPAMLTGLCQGCGTRQVVFTSDPHKSYLPVQFQSPDKAETQRGDPSVISVNGTDFTFRSAGVLLLVVDPCSVPFRLTEKTVFPLADVSRIEEYLKTGIPPRSIVLLSTRGEIKQLNISHLLVPLGLAKPAHLYDKGSTIFLGFSGNFKPSWTKLFTSPAGQGLGVLEQFIPLQLDEYGCPRATTVRRRDLELLKQASKAH

SEQ ID NO: 687 - DNA, 3153 bp, Homo sapiens
agtaggctggagccggggtcagctttggcaccttcctccagtcagtggccaactcctggctcagtggggattgtgctcgtcccctccgttcccctccagtcttcctcccgctaccggaacgagcctcgcgcttggcaggctgaggaggagcaaagaaagcaggattaaagagaaggaagacctggctaggtctgggtggcgtctgcagtgccagaaagggaggcggtggcggcggcggctgcgaccacggccgcgcgggacgtgaggcccgagagcaaccgacgggcagcggcggccgctccagcgccccgcaccggggccgttagtcagcagaacgcgagctcttgtggaggagcagggccggcgcgaggcgagactcgggagcgtgagcggggcccctggggcgccgccgtccttcttcgccccggcgccgggggctgtagccctggtccccgctcctctgtcgggccagtctgcaggcggagagagtcggacggcgcccggagcgcggatctcgccttgtggaggacagcgcgtcggctgcggttctctctcgaccccttctgcccggcgcttcggcccgggccgctcaggtgcagagcatgaataatctttcatttagtgagctatgttgcctcttctgctgtccaccttgtccagggaagattgcttcaaaattagcgtttttgccacctgatccaacttacacactgatgtgtgatgaaagcggaagccgttggactttacatctgtctgaacgagcagactggcagtattcttctagagaaaaagatgctattgagtgtttcatgactagaaccagtaaaggcaacagaattgcttgtatgtttgtacgttgttcacccaatgcgaaatacactttactcttctcacatggaaatgctgttgatcttggtcaaatgagcagcttttacataggactaggatcacggattaattgtaatatattctcatatgattattctggatatggtgccagttccgggaaacccacagagaagaacctctatgcagacattgaagctgcttggcttgctcttaggacaagatatggcattcgccctgaaaatgtgattatatatggccaaagtatagggacagtaccgtctgtggatcttgctgctcgatatgagagtgctgctgttattcttcattctcctctgacttcgggaatgcgagttgcctttcctgataccaagaagacctactgttttgatgcattcccaaacattgacaaaatctctaagataacctctccagtattaataattcatgggactgaagatgaagtcattgacttttcacatggcctcgcattgtttgaacgttgccaaagacctgtggagcctctctgggttgaaggagcaggtcacaatgatgtggaactttatggacagtatcttgaaaggttgaaacagtttgtgtcacaggaactggtaaatttgtaaaatattctgtaaatttgctactgggttttcctttcttgctgaactgcactctttggtaaataacataaaacctgaaggttttgtttgcaaatcatgtcagttgccttcataaatgtacaggtaatgatttgttaacagacttaatgaaggttttaattaccagaactaaaaactggaaataacagtaccgtgcagtcaggctgtgtaatttatattttttctgtgaatttttttttaacatcaagatgagtactgtatgagattttaattctataaaatcaaatgctgtaaaagtattgccaaatgcttttgcatactagaaacaaatttataaatatttttaaaacatctcaatatattaaatcttatcctggaatacaactgtaatattttgaaaaaagctatgtatctaaagcaatttaagtactcataatggaatgaactgtaaaagagatttaaaaccatgcaagttcactagaattaacctaaaccctgttgtacagggatagaggtttaaagttattttattgtaaaatacattgaattttctgtatactctgattacatacatttatcctttaaaaaagatgtaaatcttaatttttatgccatctattaatttaccaatgagttaccttgtaaatgagaagtcatgatagcactgaattttaactagttttgacttctaagtttggtactgtgaggcaagtacttaaaattttcatgctggttacttaaaaggcatttagagatttcaagaatgattttgtatacgatgttttaaattttgactgatctcatagtcttcatagaattgcagtagtcttcattgtatgaaatcccgaaagtccatgagttgatcttaaagaccactaacagactggctatcagatcccttttcactttggctatttttttcattttttgagatggagtcttgctgtgtcactgaggctggagtgcagtggcgcgatcttgactcactgcaacctctgcctcccaggatcaagtgattctcctgcctcagcctcctgagtagctggtattacagatgcttgccaccacgcctggctaatttttgtatttttagtagagacagggttttgccatgttgatcaggctggtcttgaactcctgacctcatgatctgcccttggcctcccaaagtgtcggaattacaggcatgagccactgcgcctggcccactttagctatttttaaaaataggacctattgttttggattactatctgagaatttcatggattcactcctgggtataggagataagaatacgtttaattcataacttttatattaaccaatatagtaaaaaaataaagctcacacatacaaaaactaagttgcctttccttgaatgaaccctgtctgaataaaacaatgaaaaataaaaataaaattaatggtatgtagtctaatttgtaaatgaatgaatatggaaataatacacactgtggatatattttaaggccttatgtagttttaattgttctgctcgttccgtggttatgtttaagactatagtatatgactctcttcaaagtatatcaagtattgtgaatgctttggttcagatgtgtcaaattaacagtaaaacaacaaatataccactgaaaaaaaaaaaaaaaaaaaaaaaaaaaaaaaaaaaaaaaaaaaaaaaaaa

SEQ ID NO: 688 - protein, 288 aa, Homo sapiens
MNNLSFSELCCLFCCPPCPGKIASKLAFLPPDPTYTLMCDESGSRWTLHLSERADWQYSSREKDAIECFMTRTSKGNRIACMFVRCSPNAKYTLLFSHGNAVDLGQMSSFYIGLGSRINCNIFSYDYSGYGASSGKPTEKNLYADIEAAWLALRTRYGIRPENVIIYGQSIGTVPSVDLAARYESAAVILHSPLTSGMRVAFPDTKKTYCFDAFPNIDKISKITSPVLIIHGTEDEVIDFSHGLALFERCQRPVEPLWVEGAGHNDVELYGQYLERLKQFVSQELVNL

SEQ ID NO: 689 - DNA, 1614 bp, Homo sapiens
agtaggctggagccggggtcagctttggcaccttcctccagtcagtggccaactcctggctcagtggggattgtgctcgtcccctccgttcccctccagtcttcctcccgctaccggaacgagcctcgcgcttggcaggctgaggaggagcaaagaaagcaggattaaagagaaggaagacctggctaggtctgggtggcgtctgcagtgccagaaagggaggcggtggcggcggcggctgcgaccacggccgcgcgggacgtgaggcccgagagcaaccgacgggcagcggcggccgctccagcgccccgcaccggggccgttagtcagcagaacgcgagctcttgtggaggagcagggccggcgcgaggcgagactcgggagcgtgagcggggcccctggggcgccgccgtccttcttcgccccggcgccgggggctgtagccctggtccccgctcctctgtcgggccagtctgcaggcggagagagtcggacggcgcccggagcgcggatctcgccttgtggaggacagcgcgtcggctgcggttctctctcgaccccttctgcccggcgcttcggcccgggccgctcaggtgcagagcatgaataatctttcatttagtgagctatgttgcctcttctgctgtccaccttgtccagggaagattgcttcaaaattagcgtttttgccacctgatccaacttacacactgatgtgtgatgaaagcggaagccgttggactttacatctgtctgaacgagcagactggcagtattcttctagagaaaaagatgctattgagtgtttcatgactagaaccagtaaaggcaacagaattgcttgtatgtttgtacgttgttcacccaatgcgaaatacactttactcttctcacatggaaatgctgttgatcttggtcaaatgagcagcttttacataggactaggatcacggattaattgtaatatattctcatatgattattctggatatggtgccagttccgggaaacccacagagaagaacctctatgcagacattgaagctgcttggcttgctcttaggacaagatatggcattcgccctgaaaatgtgattatatatggccaaagtatagggacagtaccgtctgtggatcttgctgctcgatatgagagtgctgctgttattcttcattctcctctgacttcgggaatgcgagttgcctttcctgataccaagaagacctactgttttgatgcattcccaaacattgacaaaatctctaagataacctctccagtattaataattcatgggactgaagatgaagtcattgacttttcacatggcctcgcattgtttgaacgttgccaaagacctgtggagcctctctgggttgaaggagcaggtcacaatgatgtggaactttatggacagtatcttgaaaggttgaaacagtttgtgtcacaggaactggtgcagaaacataaagaagggaagtgattttctcaaggtctacagttttcaatgacggtactatgtattccattatcttctctttaccaaacttaactggattaatataccaatgatcctttcaaattatatgacataaacttatttgctctccaaa

SEQ ID NO: 690 - protein, 293 aa, Homo sapiens
MNNLSFSELCCLFCCPPCPGKIASKLAFLPPDPTYTLMCDESGSRWTLHLSERADWQYSSREKDAIECFMTRTSKGNRIACMFVRCSPNAKYTLLFSHGNAVDLGQMSSFYIGLGSRINCNIFSYDYSGYGASSGKPTEKNLYADIEAAWLALRTRYGIRPENVIIYGQSIGTVPSVDLAARYESAAVILHSPLTSGMRVAFPDTKKTYCFDAFPNIDKISKITSPVLIIHGTEDEVIDFSHGLALFERCQRPVEPLWVEGAGHNDVELYGQYLERLKQFVSQELVQKHKEGK

SEQ ID NO: 691 - DNA, 1328 bp, Homo sapiens
cgaggctgcgccgcgtggagtggcttggcttaacagcagggagggcagagcgatgctctttgacctcccagaagagtcacgtgggctgacccagagccggggcggaaaggctgcgttagtttcttccgggtcattgacagaagcgtcaattcctgggagtagttcgttggttttctttcccctcatccttttgcctgctcccggcgaggggtggctttgatttcggcgatgagctcccagaaaggcaacgtggctcgttccagacctcagaagcaccagaatacgtttagcttcaaaaatgacaagttcgataaaagtgtgcagaccaagaaaattaatgcaaaacttcatgatggagtatgtcagcgctgtaaagaagttcttgagtggcgtgtaaaatacagcaaatacaaaccattatcaaaacctaaaaagtgtgttaaatgtttacaaaagacagtgaaggattcttatcacataatgtgcaggccatgtgcctgtgaacttgaagtttgcgcaaaatgtggaaagaaagaagacattgttattccgttgaataaagaaacagaaaaaatagaacatactgaaaataatctaagttccaaccatagaagaagctgcagaagaaatgaagaaagtgatgatgatttagattttgatattgatttagaagacacaggaggagaccatcaaatgaattaatatcactgtattaaaagtctgccgggcacagtggctcacgcctgtaatcccaacactttgggaggccaaggagggtggatcacctgaggtcaggagttcgagaccagcctggccaacatggcggaaccccatctccactaaaagtacaaaaaattagctgggcgtggtggctcatgcctgtaatcccagctactcaggaggctgaggcaggaggattgcttgaaccctggaggcggagattgaagtgagctgagttcgtgccattacactccagcctgggtgacagagtgagactctgtctcaaaaaaaataaaataaaaagtcaatttagaatgtgaaattctgaccaccttttggctttgagtattttccaaaagatatttgaaatcctaatgaggaaatcagaaaaagctatggaaaaatagacaaatttcatacatgaacaatataaattgtgtatattacttaacatcaaactaaacaagattcagaattgatggttgtataagaactagctcatgtaaaaataaaataacattattacattgcctcaaaaattggtcctcggtaagtgccttttgataaatgatctcaaataaatgactcatagcaaaaaaaaaaaaaaa

SEQ ID NO: 692 - protein, 157 aa, Homo sapiens
MSSQKGNVARSRPQKHQNTFSFKNDKFDKSVQTKKINAKLHDGVCQRCKEVLEWRVKYSKYKPLSKPKKCVKCLQKTVKDSYHIMCRPCACELEVCAKCGKKEDIVIPLNKETEKIEHTENNLSSNHRRSCRRNEESDDDLDFDIDLEDTGGDHQMN

SEQ ID NO: 693 - DNA, 1570 bp, Homo sapiens
atgggggtgggattcactgagctagaatacttggctccctggcttcggccccccttttcagtggatcagagtgtcgctttcagttgtaacggacttcatcacatcacaaattgtactcgttctcatccttttaagaaagttcagacccaggaaaatttccatagtaccttaatgaaaaagatagaaatcagtgggacgtgtctttcctttcatctccttttcggcttggaaatcagaatgagaaggattgtttttgctggtgttatcttattccgcctcttaggtgttatcttattccgcctcttaggtgttatcttattcggccgcttaggtgacctgggaacctgccagacaaaacctggtcagtactggaaagaagaggtccacattcaagatgttggaggtttgatttgcagagcatgcaatctttcactgcccttccatggatgtcttttagacctgggaacctgccaggcagaacctggtcagtactgtaaagaagaggtccacattcaaggtggcattcaatggtattcagtcaaaggctgcacaaagaacacatcagagtgcttcaagagtactctcgtcaagagaattctgcaactgcatgaacttgtaactactcactgctgcaatcattctttgtgcaatttctgagtcagtggcccatatctaaaatgcttggcagatcaatcagtctcgaagcctgacctggctatcacaaaatgatggctattgtcaattagcccacttcagaaacctcagacccttgtaggtagaaggaattttgatctgaaattgactttggttttcaatattcccaatatctcccccaccacctccaactcatctgagaaatagccctttcaacaccatttctctcctctcctccttctgcttaatttaccttcctaccacaaggctacaaagaaggaaaaatgttagtgattctccaagtcaaactaggcatgtcacctctaactactttcatttccctcaataattccatactccaaaatatggttacaaatgtttcacaagacagcaagtgacctgagaatattcatttggtttccaaagcaaactgccttgctcctttggggtgatttatggtatagaagaaactgacttaacatatactatagggaaaaaataagccatgaatcagcaagccaggcctgcgggaaaagtatgaacccaaacaggaaagggctgaggcaggtggtagggctggcacttatttcttccatctgcctcagagtttatccaaattttgaattttccgtaccttaaccatgcctaaatgctttggcttgttcaattttggcagattaagcagttcaaggtaagcagagaagtaagttcccaaccacaaggaatttaaaaggagtaggaacgtactttgaactacatttcccattttgcgatcattacgtcttctattacaatgccctactttggcagcatgaagagtactgcattaatttaatttaatttaaaatttaatttaaaactgtctttctctgtattttcaggagtttgaaaattcaaaaaataaataataaatgtc

SEQ ID NO: 694 - protein, 218 aa, Homo sapiens [sequence omitted]

SEQ ID NO: 695 - DNA, 5451 bp, Homo sapiens
gtagggagccagcccctgggcgcggcctgcagggtaccggcaaccgcccgggtaagcgggggcaggacaaggccggagcctgtgtccgcccggcagccgcccgcagctgcagagagtcccgctgcgtctccgccgcgtgcgccctcctcgaccagcagacccgcgctgcgctccgccgctgacatgtgtgccgctcagatgccgcccctggcgcacatcttccgagggacgttcgtccactccacctggacctgccccatggaggtgctgcgggatcacctcctcggcgtgagcgacagcggcaaaatagtgtttttagaagaagcatctcaacaggaaaaactggccaaagaatggtgcttcaagccgtgtgaaataagagaactgagccaccatgagttcttcatgcctgggctggttgatacacacatccatgcctctcagtattcctttgctggaagtagcatagacctgccactcttggagtggctgaccaagtacacatttcctgcagaacacagattccagaacatcgactttgcagaagaagtatataccagagttgtcaggagaacactaaagaatggaacaaccacagcttgttactttgcaacaattcacactgactcatctctgctccttgccgacattacagataaatttggacagcgggcatttgtgggcaaagtttgcatggatttgaatgacacttttccagaatacaaggagaccactgaggaatcgatcaaggaaactgagagatttgtgtcagaaatgctccaaaagaactattctagagtgaagcccatagtgacaccacgtttttccctctcctgctctgagactttgatgggtgaactgggcaacattgctaaaacccgtgatttgcacattcagagccatataagtgaaaatcgtgatgaagttgaagctgtgaaaaacttataccccagttataaaaactacacatctgtgtatgataaaaacaatcttttgacaaataagacagtgatggcacacggctgctacctctctgcagaagaactgaacgtattccatgaacgaggagcatccatcgcacactgtcccaattctaatttatcgctcagcagtggatttctaaatgtgctagaagtcctgaaacatgaagtcaagatagggctgggtacagacgtggctggtggctattcatattccatgcttgatgcaatcagaagagcagtgatggtttccaatatccttttaattaataaggtaaatgagaaaagcctcaccctcaaagaagtcttcagactagctactcttggaggaagccaagccctggggctggatggtgagattggaaactttgaagtgggcaaggaatttgatgccatcctgatcaaccccaaagcatccgactctcccattgacctgttttatggggacttttttggtgatatttctgaggctgttatccagaagttcctctatctaggagatgatcgaaatattgaagaggtttatgtgggcggaaagcaggtggttccgttttccagctcagtgtaagaccctcgggcgtctacaaagttctcctgggattagcgtggttctgcatctcccttgtgcccaggtggagttagaaagtcaaaaaatagtaccttgttcttgggatgactatccctttctgtgtctagttacagtattcacttgacaaatagttcgaaggaagttgcactaattctcaactctggttgagagggttcataaatttcatgaaaatatctccctttggagctgctcagacttactttaagctcaaacagaagggaatgctattactggtggtgttcctacggtaagacttaagcaaagcctttttcatatttgaaaatgtggaaagaaaagatgttcctaaaaggttagatattttgagctaataattgcaaaaattagaagactgaaaatggacccatgagagtatatttttatgagggagcaaaagttagactgagaacaaacgttagaaaatcacttcagattgtgtttgaaaattatatactgagcatactaatttaaaaagagaacttgttgaaatttaaaacgtgtttctaggttgaccttgtgttttagaaatttgcacttaatggaatttgcatttcagagatgtgttagtgttgtgctttgccttctttggcgatgaatgtcagaaattgaatgccacatgctttcataatatagttttgtgcttcaaagtgtttgacagaagttgggtattaaagatttaaagtctcttaggaatattattcatgtaactccatggcataaatagttgtatttttgtgtactttaaaatcaacttataactgtgagatgttattgcttccattttattagaagagaaacaaattccatgctttatggaatttatgtagactggagtcttcgtgaactggggcaaatgctggcatccaggagccgccaatactaacaggacaggttccattgccatggcctattccacccaaacaatatgttgtagtttctggaaattccatactcagatatcagtctgctagaactttaaaatgaaggacaaatcctgttaaagaaatattgttaaaaatctttaaaccctgtgtattgaaagcactctattttctaattttatccagttttctgtttaactccttataatgtttaggatattaaaattttaggataatgaagagtacataatgtcctacttaatatttatgttaataggacttaattcttactagacatctaggaacattacaaagcaaagactatttttatgcttccataacctagaattaaaaccaaattatgaccttatgataaatctttaagtattggtgtgaatgttatttaaattctatatttttcttatttaattacaaatactataaatgagcaaggaaaaggaatagactttcttaatatattataacactcattcctagagcttaggggtgactctttaatattaccttatagtagaaactttatgtaatatagctaactccgtatttacagaacaaaaaaacacagttccccctcctgtagtataaattttattttcacatacttagctaatttagcagtaattggcccagttttttccctaatagaaatacttttagatttgattatgtatacatgacacctaaagagggaacaaaagttagttttatttttttaataaacaacagagtttgttttgtgagataagtatcttagtaaacccaatttccagtcttagtctgtatttccaatatttctaattcctgagccacgtcaaagatgccttgccaaatttctccccatttctctacggggctagcaaaaatcttcagctttatccctcaacccctgccaaaggaacttgattacatggtgtctaaccaaatgagcaggcttaggaatttagatgagatgtgtaagattcacttacaggcagtagctgcttctagcatttgcaagatcctacacttttaccttctttaagggtgtacattttgatgttgaacatcagttttcatgtagacttaggactcatgtgcagtaaatataaataagtgtagcatcagaagcagtaggaatggccgtatacaaccatcctgttaaacatttaaatttagctctgatagtgtgttaagacctgaatatctttcctagtaaaaataggatgtgttgaaatatttatatgtactttgatctctccacatcacttataacttatgtgttttatttctccaagtgcggtgttcctgaatgttatgtatgcttttttttctgtaccacaggcattatctatacctggggccagattttctgcactttgaaatgttgcctttgcctaatgtaggttgactttctgaattgtggagaggcacttttccaagccaatcttatttgtcactttttgttttaatatcttgctctctgacaggaaagaaacaattcacttaccagcctcctcaccccatcctccaccatttccttaatgttccatggtattttcaacggaatacactttgaaaggtaaaaacaattcaaaagtatcgattatcataaattcacaaaatatttttgcaaccagaacacaaaagcaggctagtcagctaaggtaaatttcattttcaaacgagagggaaacatgggaagtaaaagattaggatgtgaaaggttgtcctaaacagaccaaggagactgttccctaatttattctcttggctggttctctcattgaattatcagaccccaagaggagatattggaacaggctcccttcatgccaagggtctttctaagttaatactgtgagcattgagcccccattaaaactcttttttacttcagaaagaattttacaggttaaagggaaagaaatggtgggaaactctccccgtaatgcttagccaactttaaagtgtacccttcaatatccccattggcaactgcagctgagatcttagagaggaaatataaccggtgtgagatctagcaatgcattttgaatcttcactccctaccaggctcttcctatttttaatctcttcacctcagaactagacatatggagagctttaaaggcaagctggaaggcacattgtatcaattctaccttgtgctatacgtaggagagatccaaaatttggatgcttctggagactcttagacatcttttcattgttgtccatttttaaagttgatgattgctggaaacattcacacgcttaaaagcaatggtgtgagttattaatgggtaaactaagaagtgttataggcaatgacttgaaatggtttttaaattgtatggattgttaagaattgttgaaaaaaaattttttttttttggacagcttcaaggagatgttagcaatttcagatatactagccagtttaggtatgactttggaagtgcagaaacagaaggatactgttagaaaatcctaacattggtctccgtgcatgtgttcacacctggtctcactgcctttccttcccacagacctgagtgtgaaagactgagagttgaggagttactttgtggatcttgtccaaatttagtgaaatgtggaagtcaaccagaccaatgatggaattaaatgtaaattccaagagggctttcacagtccacagggttcaaatgacttgggtaacagaagttattcttagcttacctgttatgtgacagtgatttacctgtccatttccaacccaaaagcctgtcagaaagcattctttagagaaaaccactttacatttgttgttaaactcctgatcgctactcttaagaatatacatgtatgtattcataggaacattttttctcaatatttgtatgattcgcttactgttattgtgctgagtgagctcctgtgtgcttcagacaaaaataaatgagactttgtgtttacgttaaaaaaaaaaaaaaaaaaaaaa

SEQ ID NO: 696 - protein, 454 aa, Homo sapiens
MCAAQMPPLAHIFRGTFVHSTWTCPMEVLRDHLLGVSDSGKIVFLEEASQQEKLAKEWCFKPCEIRELSHHEFFMPGLVDTHIHASQYSFAGSSIDLPLLEWLTKYTFPAEHRFQNIDFAEEVYTRVVRRTLKNGTTTACYFATIHTDSSLLLADITDKFGQRAFVGKVCMDLNDTFPEYKETTEESIKETERFVSEMLQKNYSRVKPIVTPRFSLSCSETLMGELGNIAKTRDLHIQSHISENRDEVEAVKNLYPSYKNYTSVYDKNNLLTNKTVMAHGCYLSAEELNVFHERGASIAHCPNSNLSLSSGFLNVLEVLKHEVKIGLGTDVAGGYSYSMLDAIRRAVMVSNILLINKVNEKSLTLKEVFRLATLGGSQALGLDGEIGNFEVGKEFDAILINPKASDSPIDLFYGDFFGDISEAVIQKFLYLGDDRNIEEVYVGGKQVVPFSSSV

SEQ ID NO: 697 - DNA, 3080 bp, Homo sapiens
gggggcggggccttgccgctgcggaggccggagacgcggcggcgctggacgcggaggcgctgggcgcacggcgcggagccggccggagctcgaggccggcggcggcgggagagcgacccgggcggcctcgtagcggggccccggatccccgagtggcggccggagcctcgaaaagagattctcagcgctgattttgagatgatgggcttgggaaacgggcgtcgcagcatgaagtcgccgcccctcgtgctggccgccctggtggcctgcatcatcgtcttgggcttcaactactggattgcgagctcccggagcgtggacctccagacacggatcatggagctggaaggcagggtccgcagggcggctgcagagagaggcgccgtggagctgaagaagaacgagttccagggagagctggagaagcagcgggagcagcttgacaaaatccagtccagccacaacttccagctggagagcgtcaacaagctgtaccaggacgaaaaggcggttttggtgaataacatcaccacaggtgagaggctcatccgagtgctgcaagaccagttaaagaccctgcagaggaattacggcaggctgcagcaggatgtcctccagtttcagaagaaccagaccaacctggagaggaagttctcctacgacctgagccagtgcatcaatcagatgaaggaggtgaaggaacagtgtgaggagcgaatagaagaggtcaccaaaaaggggaatgaagctgtagcttccagagacctgagtgaaaacaacgaccagagacagcagctccaagccctcagtgagcctcagcccaggctgcaggcagcaggcctgccacacacagaggtgccacaagggaagggaaacgtgcttggtaacagcaagtcccagacaccagcccccagttccgaagtggttttggattcaaagagacaagttgagaaagaggaaaccaatgagatccaggtggtgaatgaggagcctcagagggacaggctgccgcaggagccaggccgggagcaggtggtggaagacagacctgtaggtggaagaggcttcgggggagccggagaactgggccagaccccacaggtgcaggctgccctgtcagtgagccaggaaaatccagagatggagggccctgagcgagaccagcttgtcatccccgacggacaggaggaggagcaggaagctgccggggaagggagaaaccagcagaaactgagaggagaagatgactacaacatggatgaaaatgaagcagaatctgagacagacaagcaagcagccctggcagggaatgacagaaacatagatgtttttaatgttgaagatcagaaaagagacaccataaatttacttgatcagcgtgaaaagcggaatcatacactctgaattgaactggaatcacatatttcacaacagggccgaagagatgactataaaatgttcatgagggactgaatactgaaaactgtgaaatgtactaaataaaatgtacatctgaagatgattattgtgaaattttagtatgcactttgtgtaggaaaaaatggaatggtcttttaaacagcttttggggggtactttggaagtgtctaataaggtgtcacaatttttggtagtaggtatttcgtgagaagttcaacaccaaaactggaacatagttctccttcaagtgttggcgacagcggggcttcctgattctggaatataactttgtgtaaattaacagccacctatagaagagtccatctgctgtgaaggagagacagagaactctgggttccgtcgtcctgtccacgtgctgtaccaagtgctggtgccagcctgttacctgttctcactgaaaagtctggctaatgctcttgtgtagtcacttctgattctgacaatcaatcaatcaatggcctagagcactgactgttaacacaaacgtcactagcaaagtagcaacagctttaagtctaaatacaaagctgttctgtgtgagaattttttaaaaggctacttgtataataacccttgtcatttttaatgtacaaaacgctattaagtggcttagaatttgaacatttgtggtctttatttactttgcttcgtgtgtgggcaaagcaacatcttccctaaatatatattaccaagaaaagcaagaagcagattaggtttttgacaaaacaaacaggccaaaagggggctgacctggagcagagcatggtgagaggcaaggcatgagagggcaagtttgttgtggacagatctgtgcctactttattactggagtaaaagaaaacaaagttcattgatgtcgaaggatatatacagtgttagaaattaggactgtttagaaaaacaggaatacaatggttgtttttatcatagtgtacacatttagcttgtggtaaatgactcacaaaactgattttaaaatcaagttaatgtgaattttgaaaattactacttaatcctaattcacaataacaatggcattaaggtttgacttgagttggttcttagtattatttatggtaaataggctcttaccacttgcaaataactggccacatcattaatgactgacttcccagtaaggctctctaaggggtaagtaggaggatccacaggatttgagatgctaaggccccagagatcgtttgatccaaccctcttattttcagaggggaaaatggggcctagaagttacagagcatctagctggtgcgctggcacccctggcctcacacagactcccgagtagctgggactacaggcacacagtcactgaagcaggccctgtttgcaattcacgttgccacctccaacttaaacattcttcatatgtgatgtccttagtcactaaggttaaactttcccacccagaaaaggcaacttagataaaatcttagagtactttcatactcttctaagtcctcttccagcctcactttgagtcctccttggggttgataggaattttctcttgctttctcaataaagtctctattcatctcatgtttaatttgtacgcatagaattgctgagaaataaaatgttctgttcaacttataaaa

SEQ ID NO: 698 - protein, 401 aa, Homo sapiens
MMGLGNGRRSMKSPPLVLAALVACIIVLGFNYWIASSRSVDLQTRIMELEGRVRRAAAERGAVELKKNEFQGELEKQREQLDKIQSSHNFQLESVNKLYQDEKAVLVNNITTGERLIRVLQDQLKTLQRNYGRLQQDVLQFQKNQTNLERKFSYDLSQCINQMKEVKEQCEERIEEVTKKGNEAVASRDLSENNDQRQQLQALSEPQPRLQAAGLPHTEVPQGKGNVLGNSKSQTPAPSSEVVLDSKRQVEKEETNEIQVVNEEPQRDRLPQEPGREQVVEDRPVGGRGFGGAGELGQTPQVQAALSVSQENPEMEGPERDQLVIPDGQEEEQEAAGEGRNQQKLRGEDDYNMDENEAESETDKQAALAGNDRNIDVFNVEDQKRDTINLLDQREKRNHTL

SEQ ID NO: 699 - DNA, 3047 bp, Homo sapiens
cacccgaaggcgtccgggaatcttcactttttccgttgctagcagtggaagggtcacagaccaaacactaaggcctgagcggtgacaaccgaggcgagatgatggtcaacagggaatgcctcgtgggagaaaaaagacaattttattctcagcgctgattttgagatgatgggcttgggaaacgggcgtcgcagcatgaagtcgccgcccctcgtgctggccgccctggtggcctgcatcatcgtcttgggcttcaactactggattgcgagctcccggagcgtggacctccagacacggatcatggagctggaaggcagggtccgcagggcggctgcagagagaggcgccgtggagctgaagaagaacgagttccagggagagctggagaagcagcgggagcagcttgacaaaatccagtccagccacaacttccagctggagagcgtcaacaagctgtaccaggacgaaaaggcggttttggtgaataacatcaccacaggtgagaggctcatccgagtgctgcaagaccagttaaagaccctgcagaggaattacggcaggctgcagcaggatgtcctccagtttcagaagaaccagaccaacctggagaggaagttctcctacgacctgagccagtgcatcaatcagatgaaggaggtgaaggaacagtgtgaggagcgaatagaagaggtcaccaaaaaggggaatgaagctgtagcttccagagacctgagtgaaaacaacgaccagagacagcagctccaagccctcagtgagcctcagcccaggctgcaggcagcaggcctgccacacacagaggtgccacaagggaagggaaacgtgcttggtaacagcaagtcccagacaccagcccccagttccgaagtggttttggattcaaagagacaagttgagaaagaggaaaccaatgagatccaggtggtgaatgaggagcctcagagggacaggctgccgcaggagccaggccgggagcaggtggtggaagacagacctgtaggtggaagaggcttcgggggagccggagaactgggccagaccccacaggtgcaggctgccctgtcagtgagccaggaaaatccagagatggagggccctgagcgagaccagcttgtcatccccgacggacaggaggaggagcaggaagctgccggggaagggagaaaccagcagaaactgagaggagaagatgactacaacatggatgaaaatgaagcagaatctgagacagacaagcaagcagccctggcagggaatgacagaaacatagatgtttttaatgttgaagatcagaaaagagacaccataaatttacttgatcagcgtgaaaagcggaatcatacactctgaattgaactggaatcacatatttcacaacagggccgaagagatgactataaaatgttcatgagggactgaatactgaaaactgtgaaatgtactaaataaaatgtacatctgaagatgattattgtgaaattttagtatgcactttgtgtaggaaaaaatggaatggtcttttaaacagcttttggggggtactttggaagtgtctaataaggtgtcacaatttttggtagtaggtatttcgtgagaagttcaacaccaaaactggaacatagttctccttcaagtgttggcgacagcggggcttcctgattctggaatataactttgtgtaaattaacagccacctatagaagagtccatctgctgtgaaggagagacagagaactctgggttccgtcgtcctgtccacgtgctgtaccaagtgctggtgccagcctgttacctgttctcactgaaaagtctggctaatgctcttgtgtagtcacttctgattctgacaatcaatcaatcaatggcctagagcactgactgttaacacaaacgtcactagcaaagtagcaacagctttaagtctaaatacaaagctgttctgtgtgagaattttttaaaaggctacttgtataataacccttgtcatttttaatgtacaaaacgctattaagtggcttagaatttgaacatttgtggtctttatttactttgcttcgtgtgtgggcaaagcaacatcttccctaaatatatattaccaagaaaagcaagaagcagattaggtttttgacaaaacaaacaggccaaaagggggctgacctggagcagagcatggtgagaggcaaggcatgagagggcaagtttgttgtggacagatctgtgcctactttattactggagtaaaagaaaacaaagttcattgatgtcgaaggatatatacagtgttagaaattaggactgtttagaaaaacaggaatacaatggttgtttttatcatagtgtacacatttagcttgtggtaaatgactcacaaaactgattttaaaatcaagttaatgtgaattttgaaaattactacttaatcctaattcacaataacaatggcattaaggtttgacttgagttggttcttagtattatttatggtaaataggctcttaccacttgcaaataactggccacatcattaatgactgacttcccagtaaggctctctaaggggtaagtaggaggatccacaggatttgagatgctaaggccccagagatcgtttgatccaaccctcttattttcagaggggaaaatggggcctagaagttacagagcatctagctggtgcgctggcacccctggcctcacacagactcccgagtagctgggactacaggcacacagtcactgaagcaggccctgtttgcaattcacgttgccacctccaacttaaacattcttcatatgtgatgtccttagtcactaaggttaaactttcccacccagaaaaggcaacttagataaaatcttagagtactttcatactcttctaagtcctcttccagcctcactttgagtcctccttggggttgataggaattttctcttgctttctcaataaagtctctattcatctcatgtttaatttgtacgcatagaattgctgagaaataaaatgttctgttcaacttataaaa

SEQ ID NO: 700 - protein, 401 aa, Homo sapiens; identical to SEQ ID NO: 698

SEQ ID NO: 701 - DNA, 3043 bp, Homo sapiens
ttttgaaaacacgctccgggagctagagcctgaggtcggcggcgcacgctgttgccccgtgggcttctgctccctcgcttgtcttctcgggcttctcgccccggccgcggccgggtcctcagtagtcgagaatgactaaaaaaagaaaacgccaacatgattttcaaaaagtgaaattgaaagttggtaaaaagaagcccaagttacaaaatgctactcctacaaactttaaaacaaagactatacatctgcctgagcaactcaaagaggatggaacacttccaacaaacaatagaaaacttaacataaaggatttgctgtcacagatgcatcactacaatgctggggttaaacaaagtgctcttcttggacttaaagaccttttgtctcaatacccatttataattgatgcacacctttcaaacatattaagtgaagtgactgctgtgtttacagataaagatgctaatgtacgattagcagcagttcaacttcttcaattcctggcccccaaaatacgagctgaacaaatttctccattttttcctttggtaagtgcccatctctctagtgccatgactcacattactgaaggaattcaggaggactctttaaaagttttggacattctgctggaacagtacccagctctaattactggccgtagcagcatattgcttaagaattttgtagaacttatttctcatcagcagctgtccaaaggactgataaatagagacagatcccagtcctggatactttctgtaaatcctaatcggagactcacttctcagcaatggaggctgaaagtcttagtgagactcagtaaattccttcaggccttggcagatggatccagtaggttgagagaaagtgaaggacttcaggaacagaaagaaaatccccatgccactagcaactccatttttatcaactggaaggaacatgccaacgaccagcaacacatccaggtttatgaaaatgggggttcacagccaaatgtcagttcacagttcaggctacggtatctggttggaggactgagtggtgtggatgaaggcctgtcatctactgaaaacctgaaaggatttattgagataataattccattgctaattgaatgctgggttgaagctgtacctccacaactagctactcctgttgggaatggtatagaacgagaacctctacaggttatgcagcaagttcttaatattatttcccttctgtggaaactctctaaacaacaggatgaaacccataaattggagtcatggcttcgaaagaactaccttattgattttaaacaccattttatgagtcgttttccatatgtcttaaaagaaataaccaagcacaaaaggaaagagccaaataaaagcatcaagcattgcacagttctctccaataacatagatcgtctcttactgaatttaacactgtctgatatcatggtctccctggcaaatgcgtcaaccttgcagaaggattgcagttggatagaaatgataaggaaatttgtaacagagacccttgaagatggctctaggctaaatagtaagcaactgaacagattgctgggagtatcctggaggttaatgcaaatacagccaaacagagaggacacagagactcttattaaggcagtttatacattatatcagcagaggggccttatccttccagttcggactttgttattgaagtttttcagtaaaatctatcagacagaagaactgagatcttgtagattcagatatcgtagtaaagtgttatcccgttggctggctggcttaccattgcaacttgctcatcttggctcccgaaatcctgagctctctacacagcttatcgatatcattcataccgctgcagcacgagcaaataaagaattactaaaaagtttacaagctactgccctccgaatttatgatccacaagaaggtgctgtggtggttctccctgcagactctcagcagcgtttggttcagcttgtatatttcctacccagtctgccggctgatttgctttctcggttaagtcgttgctgtattatgggaagactcagttcaagtttggctgccatgcttatcgggatactgcacatgagatcatcattttctgggtggaagtattcagctaaagactggttgatgagtgatgtagactatttcagcttcttattttccacacttacagggttttcgaaagaggagttgacttggcttcagagccttcgaggagttcctcatgtcatccagacacagctttcccctgtgcttctctaccttacagatttggatcaatttttacaccactgggatgtaacagaggcagtttttcacagtttattggttattcctgcccgaagtcagaactttgacatcttgcaaagtgccatcagtaagcatttggttgggttgactgtaattcctgacagcacggctggctgtgtttttggtgttatctgtaagctcctggatcatacttgtgtagttagtgagactctactgccatttctggcttcttgttgctacagtcttctttattttctgctcactatagagaaaggggaagcagaacatctaagaaagagggacaagctgtggggggtctgtgtctccatcctggctctcttgcctcgagtcctcaggttgatgctgcagagcctgcgggtgaacagagttgggcctgaggagctgcctgttgtgggccagctgcttcgactgctgcttcagcatgcacccctcaggactcatatgttgaccaatgcgatcttggtgcagcagatcatcaagaatatcacgacattgaagagtggaagtgttcaggaacagtggctcacagacttacattactgctttaacgtgtatatcactgggcatccccaagggcccagtgcactggctacagtgtattgaagaggccatagtacctcctgtttgaagttgtttattcacatctatcttatttgaagaaaaagactgatgtaatagatctttgtcattaaagctgaacttttaaaaaaaaaaaaaaaaaaaaa

SEQ ID NO: 702 - protein, 929 aa, Homo sapiens
MTKKRKRQHDFQKVKLKVGKKKPKLQNATPTNFKTKTIHLPEQLKEDGTLPTNNRKLNIKDLLSQMHHYNAGVKQSALLGLKDLLSQYPFIIDAHLSNILSEVTAVFTDKDANVRLAAVQLLQFLAPKIRAEQISPFFPLVSAHLSSAMTHITEGIQEDSLKVLDILLEQYPALITGRSSILLKNFVELISHQQLSKGLINRDRSQSWILSVNPNRRLTSQQWRLKVLVRLSKFLQALADGSSRLRESEGLQEQKENPHATSNSIFINWKEHANDQQHIQVYENGGSQPNVSSQFRLRYLVGGLSGVDEGLSSTENLKGFIEIIIPLLIECWVEAVPPQLATPVGNGIEREPLQVMQQVLNIISLLWKLSKQQDETHKLESWLRKNYLIDFKHHFMSRFPYVLKEITKHKRKEPNKSIKHCTVLSNNIDRLLLNLTLSDIMVSLANASTLQKDCSWIEMIRKFVTETLEDGSRLNSKQLNRLLGVSWRLMQIQPNREDTETLIKAVYTLYQQRGLILPVRTLLLKFFSKIYQTEELRSCRFRYRSKVLSRWLAGLPLQLAHLGSRNPELSTQLIDIIHTAAARANKELLKSLQATALRIYDPQEGAVVVLPADSQQRLVQLVYFLPSLPADLLSRLSRCCIMGRLSSSLAAMLIGILHMRSSFSGWKYSAKDWLMSDVDYFSFLFSTLTGFSKEELTWLQSLRGVPHVIQTQLSPVLLYLTDLDQFLHHWDVTEAVFHSLLVIPARSQNFDILQSAISKHLVGLTVIPDSTAGCVFGVICKLLDHTCVVSETLLPFLASCCYSLLYFLLTIEKGEAEHLRKRDKLWGVCVSILALLPRVLRLMLQSLRVNRVGPEELPVVGQLLRLLLQHAPLRTHMLTNAILVQQIIKNITTLKSGSVQEQWLTDLHYCFNVYITGHPQGPSALATVY

SEQ ID NO: 703 - DNA, 1175 bp, Homo sapiens
cccggtcgccgcggctgccgcgccgccgctgcaggatagctagcggccaggagaaatacagtggaaaatgcaaaacaacgaaattataaagcctgccaaatacttctcagaattggaaaagagcatcctgctggctttagtagaaaagtataaatatgtgctggaatgtaagaaaagtgatgcgcgaactattgcccttaagcagcgtacctggcaggcgctggcccacgaatacaactctcagcccagcgtgtccctgcgggatttcaaacagctgaagaagtgctgggagaacatcaaggctcggaccaaaaaaattatggcccatgaaaggagagagaaagtgaaacggagcgtcagccctctcctgagtacccacgtcctagggaaggagaagatcgccagcatgctgccggagcagctctacttcctgcagagccccccggaggaggagcccgaataccaccccgacgcctcagcccaagaatcatttgctgtttcaaatagagaactgtgcgatgatgagaaagagttcatacattttccagtatgtgaggggacctctcaacctgaaccctcgtgttcagctgtcagaataacagccaataaaaactacaggagcaaaacctctcaggaaggtgctttaaaaaagatgcatgaggaagaacaccatcaacaaatgtccatcttacaactgcaactgatacaaatgaatgaggtgcatgtggccaaaatccagcagatagagcgagagtgtgagatggcagaggaggaacacaggataaaaatggaagttctcaataaaaagaagatgtattgggaaagaaaactacaaacttttaccaaggaatggcctgtttcctcatttaaccggccctttcccaattcgccctaagactttgggggtggctctcttgtaattaatctgtgttggcaaagaatgtctggaacatggacttggcggtcagtaacctgtaacagagctacaactaggaaaattagagtggtagtagtcacttatttaagaattcattcaggtaaacagctgcaccctctgtaccccttaagtggcaaagaagctgttatagtcttctgaaaattatcactatgagtgctataattctgaatataatgtctcttaattagaattcatacaagaaaaaaaaaaaaaaaaa

SEQ ID NO: 704 - protein, 275 aa, Homo sapiens
MQNNEIIKPAKYFSELEKSILLALVEKYKYVLECKKSDARTIALKQRTWQALAHEYNSQPSVSLRDFKQLKKCWENIKARTKKIMAHERREKVKRSVSPLLSTHVLGKEKIASMLPEQLYFLQSPPEEEPEYHPDASAQESFAVSNRELCDDEKEFIHFPVCEGTSQPEPSCSAVRITANKNYRSKTSQEGALKKMHEEEHHQQMSILQLQLIQMNEVHVAKIQQIERECEMAEEEHRIKMEVLNKKKMYWERKLQTFTKEWPVSSFNRPFPNSP

SEQ ID NO: 705 - DNA, 2299 bp, Homo sapiens
agcgggcggctgctaggaggcaccgaggcagcggcggggctctgggcgcgcggctggatgcccccggcctgcggctccctgcgcttcccgccgtccaggggcaccagtcatgggcgccgcagccgctgaggcgccgctccggctgcctgccgcgcctccgctcgccttctgctgctacacgtcggtgcttctgctcttcgccttctctctgccagggagccgcgcgtccaaccagcccccgggtggtggcggcggcagcggcggggactgtcccggcggcaaaggcaagagcatcaactgctcagaattaaatgtgagggagtctgacgtaagagtttgtgatgagtcatcatgtaaatatggaggagtctgtaaagaagatggagatggtttgaaatgtgcatgccaatttcagtgccatacaaattatattcctgtctgtggatcaaatggggacacttatcaaaatgaatgctttctcagaagggctgcttgtaagcaccagaaagagataacagtaatagcaagaggaccatgctactctgataatggatctggatctggagaaggagaagaggaagggtcaggggcagaagttcacagaaaacactccaagtgtggaccctgcaaatataaagctgagtgtgatgaagatgcagaaaatgttgggtgtgtatgtaatatagattgcagtggatacagttttaatcctgtgtgtgcttctgatgggagttcctataacaatccctgttttgttcgagaagcatcttgtataaagcaagaacaaattgatataaggcatcttggtcattgcacagatacagatgacactagtttgttgggaaagaaagatgatggactacaatatcgaccagatgtgaaagatgctagtgatcaaagagaagatgtttatattggaaaccacatgccttgccctgaaaacctcaatggttactgcatccatggaaaatgtgaattcatctattctactcagaaggcttcttgtagatgtgaatctggctacactggacagcactgtgaaaagacagactttagtattctctatgtagtgccaagtaggcaaaagctcactcatgttcttattgcagcaattattggagctgtacagattgccatcatagtagcaattgtaatgtgcataacaagaaaatgccccaaaaacaatagaggacgtcgacagaagcaaaacctaggtcattttacttcagatacgtcatccagaatggtttaaactgatgacttttatatgtacactgaccatgtgatgtacatttattatgtctttttttaaagaatggaaatatttatttcagaggccttatttttggacatttttagtgtagtactgttggctcgtatttagaatattcagctacgacagttttggactgtttagtagtctttgttttatgtttttaaatacagaaattgctttcacaaatttgtaccacatggtaattctaagacttgttctttacccatggaatgtaatatttttgcaaagatggactacttcacaaatggttataaagtcatatccacttcttccacaatgaccacagcaaatgaccaagcatgaactaaaggtaaagatgtttacagattacttttcttacaaaaaaatctagaagacactgtgtttaaatagatatttaaatgtttttgagatttagtaactgattttttagacactgcctatcgcatgaactgtaaagctgtgtgtattaggtgtaaaatatttataagatatatggactggggaatttgattattcctccctttgaaaaaatagtcctaataatttgaacaaatatgttagtaatgatggaacagatcaatgaaaagtagatatagatattgtgaaaataggctgtttaacaaacagattggaataaagcctattctaccagttaaactactttaatacacattcatttttaaagaaaatgtttgttttaacataaataaacaaatcgtatcagtgtttgtgaataaaatacaaaaatgattgttaatgattggtgctcttaaagtgagcttaaaatttatccaagacgtatatccaaatttgtcctgtagtaatagattaatattcatagattgttggtgtttaaagatctgaagtgtgagtagaatgtattcagctgtttaacatgtagtttagatattcaaaagtatgcatgtagaatttaaagaatatgttaaaaattattaatcttaatattttgtttggaaaagcatgttataatataatgttttcacaaaaaaaaaaaaaaaa

SEQ ID NO: 706 - protein, 380 aa, Homo sapiens
MGAAAAEAPLRLPAAPPLAFCCYTSVLLLFAFSLPGSRASNQPPGGGGGSGGDCPGGKGKSINCSELNVRESDVRVCDESSCKYGGVCKEDGDGLKCACQFQCHTNYIPVCGSNGDTYQNECFLRRAACKHQKEITVIARGPCYSDNGSGSGEGEEEGSGAEVHRKHSKCGPCKYKAECDEDAENVGCVCNIDCSGYSFNPVCASDGSSYNNPCFVREASCIKQEQIDIRHLGHCTDTDDTSLLGKKDDGLQYRPDVKDASDQREDVYIGNHMPCPENLNGYCIHGKCEFIYSTQKASCRCESGYTGQHCEKTDFSILYVVPSRQKLTHVLIAAIIGAVQIAIIVAIVMCITRKCPKNNRGRRQKQNLGHFTSDTSSRMV

SEQ ID NO: 707 - DNA, 2640 bp, Homo sapiens
caaccctgttgcctgttatcaagctgactttttgctccaagtgccagaattgattgtggttaggacatcttacgctgagaaataaataaaatggaacataatgggtctgcttcaaatgctgataaaatccaccagaatcgcctgtcgagtgttacagaagatgaagaccaagacgctgctcttaccattgtgactgtgctggacaaagtagcctccatcgtggacagtgtgcaggcaagccagaagagaatagaagagagacacagggaaatggaaaatgccataaaatccgtccagattgacctgttgaagctttcacagtcgcatagcaatacagggcatatcattaacaaattgtttgagaaaacccgaaaagttagtgctcacattaaagatgtgaaagcccgggtggagaagcaacaaattcatgttaaaaaagttgaagtcaagcaagaggaaataatgaagaaaaacaaattccgcgtggtaatattccaggagaagtttcggtgtccgacatccctgtctgttgttaaagacagaaacctaactgagaaccaagaagaggatgatgatgatatctttgatcccccagtagatctgtcttcggatgaagaatattatgttgaagaaagcagatctgccaggcttaggaagtcaggcaaggagcacattgataatatcaagaaggcattttccaaagaaaacatgcagaagacacggcagaatcttgacaagaaagtgaacagaattagaactagaatagtgaccccggagaggagagagaggctaaggcagtcaggagagaggctgagacagtcaggggagaggctgagacagtcaggggagaggtttaagaaatctatttctaatgcagctccctcaaaggaagcttttaagatgcgcagcctcaggaaaggtaaggaccgaacagtggctgaaggtgaggaatgtgccagggagatgggtgtggacatcattgccaggagcgagtctctgggccccatcagtgagctctactctgatgagctcagtgaaccagaacacgaggcagccaggccggtgtatcctccccatgaaggaagggaaatccccacccccgagcctttaaaagttacttttaaatctcaggtgaaagtagaggatgatgaatctcttttgttagatttaaagcactcatcgtaaagaggaattaagtatatcctaaatatgaatctcctaatcatgcagttttagtttgaatagtgtagtcgtctacatttctgtgccatgtaggaaaacataaatgtattttttttcttatatttaaaatcttgaagataatataaatattattatcactctttctcatggcagctgtggattttttagttcctttctcttgtccaccagaaaaatagtttcctaggttgggccagttacgtgtttggtaagggcaactttgcggccgtcatttgcaggagaactctaaatattggttaggattaatattgtggccagcctcaaaggggaataactcatgtgtgggttatatcgtccagatgttcagatcaacagatttgttagtaaattagcagtcacaccccttttttgatgctttcacattaaaaaattgaagttttggacttgagcatttggctctagtatcatagctttacttataagaaaaccctgggcaagtcatctgcttattctcatcagtaaaaatggagagggttggcctctgctgcctgcctcagaggactgttgtgatgatcaaaggaaatggtacacattctgggggaacaagaagcacacccagagaaaacaagcctcatcagttcctccaaaacagaatggaaagagttacaccttctgaaaaagccctcagcaccaatcaataaggtcctaggttggagagaaactaaagctggtcttcagaagccttttcacagaatcaagagtgaaaaataagtaaatgtttgggtgaccactttttcatcagactaactatatcttgggttttagttgggtctcaaaatgttccccagccagaccctttctaatttccttttgattaagatctttggtggactatagcactaaatttgtttaagcagtatgaggcataaaattgtgactatgtttctaaagtcggccctgatgcattgggtttggaaatgaccacaaatattcctgttttcctgagtgtacccttcagggtccagctgtccaaaacagtgttgataggagttcatcatagctgctttgggaggaagccagattctccttatcttttagctttagatcgtggaatccaggaagtagaacaatgtctattgttgctaaagaaagaaagaaatgggccgggtgtggtggctcacggggagtaatcccagcactttgcgaggccgaggtgggtgaatcacctgaggtcagaagttcacgaccagcctgaccaacatggcgaaaccctgactctactgaaaatacaaaaattagctgggcatggtggcatgcgcctgtcccagctactcaggaggctgagacaggagaattgcctgaacccaggaggcggaggttgcagtgagccgagattgtgccactgcactcaagcctgggcaaaagagccagactctgtttcaaaaaaaaaaaaaaaaa

SEQ ID NO: 708 - protein, 364 aa, Homo sapiens
MEHNGSASNADKIHQNRLSSVTEDEDQDAALTIVTVLDKVASIVDSVQASQKRIEERHREMENAIKSVQIDLLKLSQSHSNTGHIINKLFEKTRKVSAHIKDVKARVEKQQIHVKKVEVKQEEIMKKNKFRVVIFQEKFRCPTSLSVVKDRNLTENQEEDDDDIFDPPVDLSSDEEYYVEESRSARLRKSGKEHIDNIKKAFSKENMQKTRQNLDKKVNRIRTRIVTPERRERLRQSGERLRQSGERLRQSGERFKKSISNAAPSKEAFKMRSLRKGKDRTVAEGEECAREMGVDIIARSESLGPISELYSDELSEPEHEAARPVYPPHEGREIPTPEPLKVTFKSQVKVEDDESLLLDLKHSS

SEQ ID NO: 709 - DNA, 5917 bp, Homo sapiens
agtgctgcggctgcctagttgacgcacccattgagtcgctggcttctttgcagcgcttcagcgttttcccctggagggcgcctccatccttggaggcctagtgccgtcggagagagagcgggagccgcggacagagacgcgtgcgcaattcggagccgactctgggtgcggactgtgggagctgactctgggtagccggctgcgcgtggctggggaggcgaggccggacgcacctctgtttgggggtcctcagagattaatgattcatcaagggatagttgtacttgtctcgtgggaatcacttcatcatgcgaaatctgaaattatttcggaccctggagttcagggatattcaaggtccagggaatcctcagtgcttctctctccgaactgaacaggggacggtgctcattggttcagaacatggcctgatagaagtagaccctgtctcaagagaagtgaaaaatgaagtttctttggtggcagaaggctttctcccagaggatggaagtggccgcattgttggtgttcaggacttgctggatcaggagtctgtgtgtgtggccacagcctctggagacgtcatactctgcagtctcagcacacaacagctggagtgtgttgggagtgtagccagtggtatctctgttatgagttggagtcctgaccaagagctggtgcttcttgccacaggtcaacagaccctgattatgatgacaaaagattttgagccaatcctggagcagcagatccatcaggatgattttggtgaaagcaagtttatcactgttggatggggtaggaaggagacacagttccatggatcagaaggcagacaagcagcttttcagatgcaaatgcatgagtctgctttgccctgggatgaccatagaccacaagttacctggcggggggatggacagttttttgctgtgagtgttgtttgcccagaaacaggggctcggaaggtcagagtgtggaaccgagagtttgctttgcagtcaaccagtgagcctgtggcaggactgggaccagccctggcttggaaaccctcaggcagtttgattgcatctacacaagataaacccaaccagcaggatattgtgttttttgagaaaaatggactccttcatggacactttacacttcccttccttaaagatgaggttaaggtaaatgacttgctctggaatgcagattcctctgtgcttgcagtctggctggaagaccttcagagagaagaaagctccattccgaaaacctgtgttcagctctggactgttggaaactatcactggtatctcaagcaaagtttatccttcagcacctgtgggaagagcaagattgtgtctctgatgtgggaccctgtgaccccataccggctgcatgttctctgtcagggctggcattacctcgcctatgattggcactggacgactgaccggagcgtgggagataattcaagtgacttgtccaatgtggctgtcattgatggaaacagggtgttggtgacagtcttccggcagactgtggttccgcctcccatgtgcacctaccaactgctgttcccacaccctgtgaatcaagtcacattcttagcacaccctcaaaagagtaatgaccttgctgttctagatgccagtaaccagatttctgtttataaatgtggtgattgtccaagtgctgaccctacagtgaaactgggagctgtgggtggaagtggatttaaagtttgccttagaactcctcatttggaaaagagatacaaaatccagtttgagaataatgaagatcaagatgtaaacccgctgaaactaggccttctcacttggattgaagaagacgtcttcctggctgtaagccacagtgagttcagcccccggtctgtcattcaccatttgactgcagcttcttctgagatggatgaagagcatggacagctcaatgtcagttcatctgcagcggtggatggggtcataatcagtctatgttgcaattccaagaccaagtcagtagtattacagctggctgatggccagatatttaagtacctttgggagtcaccttctctggctattaaaccatggaagaactctggtggatttcctgttcggtttccttatccatgcacccagaccgaattggccatgattggagaagaggaatgtgtccttggtctgactgacaggtgtcgctttttcatcaatgacattgaggttgcgtcaaatatcacgtcatttgcagtatatgatgagtttttattgttgacaacccattcccatacctgccagtgtttttgcctgagggatgcttcatttaaaacattacaggccggcctgagcagcaatcatgtgtcccatggggaagttctgcggaaagtggagaggggttcacggattgtcactgttgtgccccaggacacaaagcttgtattacagatgccaaggggaaacttagaagttgttcatcatcgagccctggttttagctcagattcggaagtggttggacaaacttatgtttaaagaggcatttgaatgcatgagaaagctgagaatcaatctcaatctgatttatgatcataaccctaaggtgtttcttggaaatgtggaaaccttcattaaacagatagattctgtgaatcatattaacttgttttttacagaattgaaagaagaagatgtcacgaagaccatgtaccctgcaccagttaccagcagtgtctacctgtccagggatcctgacgggaataaaatagaccttgtctgcgatgctatgagagcagtcatggagagcataaatcctcataaatactgcctatccatacttacatctcatgtaaagaagacaaccccagaactggaaattgtactgcaaaaagtacacgagcttcaaggaaatgctccctctgatcctgatgctgtgagtgctgaagaggccttgaaatatttgctgcatctggtagatgttaatgaattatatgatcattctcttggcacctatgactttgatttggtcctcatggtagctgagaagtcacagaaggatcccaaagaatatcttccatttcttaatacacttaagaaaatggaaactaattatcagcggtttactatagacaaatacttgaaacgatatgaaaaagccattggccacctcagcaaatgtggacctgagtacttcccagaatgcttaaacttgataaaagataaaaacttgtataacgaagctctgaagttatattcaccaagctcacaacagtaccaggatatcagcattgcttatggggagcacctgatgcaggagcacatgtatgagccagcggggctcatgtttgcccgttgcggtgcccacgagaaagctctctcagcctttctgacatgtggcaactggaagcaagccctctgtgtggcagcccagcttaactttaccaaagaccagctggtgggcctcggcagaactctggcaggaaagctggttgagcagaggaagcacattgatgcggccatggttttggaagagtgtgcccaggattatgaagaagctgtgctcttgctgttagaaggagctgcctgggaagaagctttgaggctggtatacaaatataacagactggatattatagaaaccaacgtaaagccttccattttagaagcccagaaaaattatatggcatttctggactctcagacagccacattcagtcgccacaagaaacgtttattggtagttcgagagctcaaggagcaagcccagcaggcaggtctggatgatgaggtaccccacgggcaagagtcagacctcttctctgaaactagcagtgtcgtgagtggcagtgagatgagtggcaaatactcccatagtaactccaggatatcagcgagatcatccaagaatcgccgaaaagcggagcggaagaagcacagcctcaaagaaggcagtccgctggaggacctggccctcctggaggcactgagtgaagtggtgcagaacactgaaaacctgaaagatgaagtataccatattttaaaggtactctttctctttgagtttgatgaacaaggaagggaattacagaaggcctttgaagatacgctgcagttgatggaaaggtcacttccagaaatttggactcttacttaccagcagaattcagctaccccggttctaggtcccaattctactgcaaatagtatcatggcatcttatcagcaacagaagacttcggttcctgttcttgatgctgagctttttataccaccaaagatcaacagaagaacccagtggaagctgagcctgctagactgagtgactgcagttaggagggatccgacagagaagaccatttccactcattcctgttgtcctaccaccccttgctctttgagggctggctattgagaactggaaagagtaaaatgataacttaccttagcattgccaagaacttcagcagacaacaagcaattctatttattttatgttgtgtatacatcttgatcattagcaagacattaagctttaaccattatggcaccattttgtgagaatgattgttctttcacttgggctgtttgagagcataattatggtaatcatgagattaatgtttcatgatttctacctccaaagtgtgaagacaagtaaaacaatgtttctaaattgtcttattttgttggcggagaagattacaatggctattagtgctacatttggtcaaatgtaatcacttaaatagcttcttgtcaccttaaactaaagcagaataaaaagtatcctttgaaattataagccctcctttgctgacagctattattttgtaacatcttaccaggtcatgtgctttcagttataactgggctgagcctcctataattacaatgtctatagggactgttttactgcctgtgtattttctgctagagagttagcaatgttagagctagaacagattagaatttctaaacagtatcatgcacagttggtgtgagtgatcagtgtgcattgtatggcatgcatggttgtgaattattctctgttctccaaatactgtttctttaactcagatatttttgttagtgtctaggccacttcatttatttttcgtcatggtactttactgacttctctttattcaattctccacgccctcaccaaaaaaaactgtctcaaaatgagaatattttattttcatggtgagtctagaaaacgcccacttcattctgattaaaaattcttccatgttttaaatatcagaaccagacctttcttactgtgtatcttagcccatttgtgtctctataacaacaaccagctttcaaaggaactaatagagtgaaaactcactcattaccacgaggatggcacaagcgattcacgtaggatctgcccctgtgaccaaaacacctcccattgggccccacttccaacactggtgatcacatttcaacatgaggtttagggaaacaaatgcctaaactacagcactgtacataaactaacaggaaatgctgcttttgatcctcaaagaagtgatatagccaaaattgtaatttaagaagcctttgtcagtatagcaagatgttaactatagaatcaatctaggagtattcactgtaaaattcaacttttctgtatgtttgaacattttcacaatctcataggagtttttaaaaagaagagaaagaagatatactttgctttggagaaatctactttttgacttacatgggtttgctgtaattaagtgcccaatattgaaaggctgcaagtactttgtaatcactctttggcatgggtaaataagcatggtaacttatattgaaatatagtgctcttgctttggataactgtaaagggacccatgctgatagactggaaatagaagtaaatgtgtttattgaaaaaaaaaaaaaaaa

SEQ ID NO: 710 - protein, 1332 aa, Homo sapiens
MRNLKLFRTLEFRDIQGPGNPQCFSLRTEQGTVLIGSEHGLIEVDPVSREVKNEVSLVAEGFLPEDGSGRIVGVQDLLDQESVCVATASGDVILCSLSTQQLECVGSVASGISVMSWSPDQELVLLATGQQTLIMMTKDFEPILEQQIHQDDFGESKFITVGWGRKETQFHGSEGRQAAFQMQMHESALPWDDHRPQVTWRGDGQFFAVSVVCPETGARKVRVWNREFALQSTSEPVAGLGPALAWKPSGSLIASTQDKPNQQDIVFFEKNGLLHGHFTLPFLKDEVKVNDLLWNADSSVLAVWLEDLQREESSIPKTCVQLWTVGNYHWYLKQSLSFSTCGKSKIVSLMWDPVTPYRLHVLCQGWHYLAYDWHWTTDRSVGDNSSDLSNVAVIDGNRVLVTVFRQTVVPPPMCTYQLLFPHPVNQVTFLAHPQKSNDLAVLDASNQISVYKCGDCPSADPTVKLGAVGGSGFKVCLRTPHLEKRYKIQFENNEDQDVNPLKLGLLTWIEEDVFLAVSHSEFSPRSVIHHLTAASSEMDEEHGQLNVSSSAAVDGVIISLCCNSKTKSVVLQLADGQIFKYLWESPSLAIKPWKNSGGFPVRFPYPCTQTELAMIGEEECVLGLTDRCRFFINDIEVASNITSFAVYDEFLLLTTHSHTCQCFCLRDASFKTLQAGLSSNHVSHGEVLRKVERGSRIVTVVPQDTKLVLQMPRGNLEVVHHRALVLAQIRKWLDKLMFKEAFECMRKLRINLNLIYDHNPKVFLGNVETFIKQIDSVNHINLFFTELKEEDVTKTMYPAPVTSSVYLSRDPDGNKIDLVCDAMRAVMESINPHKYCLSILTSHVKKTTPELEIVLQKVHELQGNAPSDPDAVSAEEALKYLLHLVDVNELYDHSLGTYDFDLVLMVAEKSQKDPKEYLPFLNTLKKMETNYQRFTIDKYLKRYEKAIGHLSKCGPEYFPECLNLIKDKNLYNEALKLYSPSSQQYQDISIAYGEHLMQEHMYEPAGLMFARCGAHEKALSAFLTCGNWKQALCVAAQLNFTKDQLVGLGRTLAGKLVEQRKHIDAAMVLEECAQDYEEAVLLLLEGAAWEEALRLVYKYNRLDIIETNVKPSILEAQKNYMAFLDSQTATFSRHKKRLLVVRELKEQAQQAGLDDEVPHGQESDLFSETSSVVSGSEMSGKYSHSNSRISARSSKNRRKAERKKHSLKEGSPLEDLALLEALSEVVQNTENLKDEVYHILKVLFLFEFDEQGRELQKAFEDTLQLMERSLPEIWTLTYQQNSATPVLGPNSTANSIMASYQQQKTSVPVLDAELFIPPKINRRTQWKLSLLD

SEQ ID NO: 711 - DNA, 2142 bp, Homo sapiens
cttacggcggccggccttctttgtaggcctggcaccgtagaggtagaggagctacattggccgcgtcccctgtccctctgccctcttgcccatctgcccaaacttttgtatttgatctctgttttgatgtcgaaccccaaagcactgtaattggggggggcggggggggtggtggaacctgcggacctgagagcagcgcgcgtgcgcacgacacgcgctgtgcgccggaagagcacgcccagtccgggctgcgcggaggaagcgctggggtcccggagggcgggggtggcggcgccggaggtcgccatggctaccgagcccgaagccgcggagccggtggtgccttcgctcgtggatcgatacttcactcgctggtacaaaccggatgtcaaaggaaaattttgtgaggaccactgtatactacagcactctaaccgaatatgtgtcatcacattggcagaatctcatccagttcttcaaagtggaaaaacaattaaaagcatttcctatcagatcagtaccaactgtagcagacttcagaacaaggtctctgggaaatttaagcggggggcacagtttctaacagagcttgcacctctctgtaagatttactgctcagatggtgaagaatatactgtgtctagttgtgttagaggacgtttgatggaagtgaatgaaaacatcctccataagccatctattcttcaagaaaagccatctactgaaggctacattgcagttgtgttacccaaatttgaagaaagtaaaagcataacagaagggttactgacacaaaaacaatatgaagaagtcatggtgaaacgcattaatgccacaacagctacgtcatgaggattgacatggaacaaaaagcaaagtgggattcttgttacctggcctaaaccatcagggtactaaaggagaagaaccagtatatgtaaagcatacctaacagccagccatatgcaggggaggcctagtgcttcacttagttttccctctctgtcttcataatgagccttggttcccatttgtctacagcctgccagatctggcctgcccatgtactcacactgttctcttgcatctctctaacaactggcatgcaaggcatgtttttctgattaaaaacaaacaaagctctttgaagaagatttagaaaatacagaagagttttaagtagccaagtaaaaataatttacccatcatcccataatccagaagtaaatacatttgacccttgagcaacataggtttgaactgcaagggtccacttatgcatggactattttcaactataaacgagtcaaaaatatatcaatcattaaccaaacacgaaacccacttatagagcaggttcatatactcaggttccaaagggccaactgcaggacttgagttctcacgtatggatttgggtatatgtggaagttcctggaaccaatcccctatgtaaaccaagggataactactacattttaacctacttctgtttgaacatatggtatggttattgcttttgcctcgttttcctaacagtttgaagtttaaaaaaacctaacccacctttcttacccagtcttctataatgtgcctaccaaaaagcctagtcctagcccatctgcctcaactcctctcccttttaggttgtagggaagaggccggagtgtagagtatattatatcttctgtcccccttatgccaacaagatggccttcccctctgaaacaaagtaaaactgcaacactgtgacttcttaaatgagggatatgtgaaaaggctatgaaaaatacaaaggctttcctaggaaatgtgttataatgcagcgggaagctaattcttgaaatatgcacattatagttactcagtctcacatactctagttactggcaaagaagttactgagaatatgtcattcaaaggcataggggcctttgaatggaacaaatgctttcacatcatttaaagtaaaaaaaaaacctccaacaactgtgaatttatagtttaagagtgatttacactgaatttcaaataaaaggactataaaacgtgttatttttctgtaagggctataacatacatgtcaatatcactgtttttaaataaaatatacttttatacagaagaaaaaaaaaaaaaaaa

SEQ ID NO: 712 - protein, 181 aa, Homo sapiens
MATEPEAAEPVVPSLVDRYFTRWYKPDVKGKFCEDHCILQHSNRICVITLAESHPVLQSGKTIKSISYQISTNCSRLQNKVSGKFKRGAQFLTELAPLCKIYCSDGEEYTVSSCVRGRLMEVNENILHKPSILQEKPSTEGYIAVVLPKFEESKSITEGLLTQKQYEEVMVKRINATTATS

SEQ ID NO: 713 - DNA, 2446 bp, Homo sapiens
gcgccgcggcgcggagtcccggctgcgggatagaccgagggccatggccgcctctcccggacccgccggcgttggcggcgccggagcagtctacggctccggctcttcgggcttcgccctcgactcgggactggagatcaaaactcgctcggtggagcagacgctactcccgctggtttctcagatcaccacgcttattaatcataaagataataccaaaaagtctgataaaactctgcaagcaattcagcgtgtaggacaagctgtcaacttggcagttggaagatttgttaaagtaggagaagctatagccaatgaaaactgggatttgaaagaagaaataaatattgcttgtattgaagctaaacaagcaggagaaacaattgcagcacttacagacataaccaacttgaaccatctggaatctgatgggcagatcacaatttttacagacaaaacaggagtgataaaggctgcaagattacttctttcttcagtgacaaaagtgttgttgctggcagaccgagtagtcattaaacagataataacatcaagaaataaggttctcgcaactatggaaagactagagaaagtgaatagctttcaagagtttgtccaaatattcagtcaatttggaaatgaaatggtggagtttgcacatctgagtggagatagacaaaatgatttgaaagatgaaaagaaaaaggcaaaaatggcagcagctagggcagttcttgaaaagtgtacaatgatgcttctcacagcttcaaagacatgtctgaggcatcctaactgcgaatcagcccataaaaacaaagaaggagtatttgaccgtatgaaagtggcattggataaggtcattgaaattgtgactgactgtaaaccgaatggagagactgacatttcatctatcagtatttttactggaattaaggaattcaagatgaatattgaagctcttcgggagaatctttattttcagtccaaagagaacctttctgtgacattggaagtcatcttggagcgtatggaggactttactgattctgcctacaccagccatgagcacagagaacgcatcttggaactgtcaactcaggcgagaatggaactgcagcagttaatttctgtgtggattcaagctcaaagcaagaaaacaaaaagcatcgctgaagaactggaactcagtattttgaaaatcagtcacagtcttaatgaacttaagaaagaacttcatagtacagcgacacagctggcagcagatctattaaaataccatgctgatcatgtggttctaaaagcattaaaacttactggagtagaaggaaatttagaagctttggctgaatatgcctgtaaactctctgaacagaaagagcagcttgttgagacctgtcgattgttacgacacatatctgggacagaacctctggaaataacctgtatacatgcagaggagacatttcaggtgactggccaacagataatttctgctgctgaaacattgacattgcatccatctagtaaaattgctaaagaaaacctagatgtattttgtgaagcttgggaatcccaaattagtgacatgtcaacactgctgagagaaatcaatgacgtgtttgaaggaagacgaggagagaagtatggctacctttcacttccaaagccaatgaagaataatgcaaacctgaaatcattaaagccagacaagcctgactctgaggagcaagccaagatagcaaagcttggacttaagctgggtttgctcacctctgacgctgactgcgaaattgagaagtgggaagatcaggagaatgagattgttcaatatggacggaacatgtccagtatggcctattctctgtatttatttactagaggagaggggccactgaaaacttcccaggatttaattcatcaactagaggtttttgctgcagagggtttaaagcttacttccagtgttcaagctttttcaaaacagctgaaagacgatgacaagcttatgcttctcctggaaataaacaagctaattcctctatgccaccagctccagacagtaactaagacttctttgcagaataaagtatttctaaaggttgacaagtgtattacgaagacaagatccatgatggctctcttagtccaacttctttcactttgttataaactgctgaagaagcttcagatggaaaataacggatgggtctcagttacaaataaggacactatggatagtaaaacttgagaagcttttggggtcagatctctggaacatcatgtgatgaagctgacatttttaaaaatcaaatgatcctttatcttttcagaaattcatcaattttataaagaaaacaatattgaaattttgctctattttctgatcatgaaactgattgtaaagctttttgacaactaataaatgtcttggtaattgctagattct

SEQ ID NO: 714 - protein, 734 aa, Homo sapiens
MAASPGPAGVGGAGAVYGSGSSGFALDSGLEIKTRSVEQTLLPLVSQITTLINHKDNTKKSDKTLQAIQRVGQAVNLAVGRFVKVGEAIANENWDLKEEINIACIEAKQAGETIAALTDITNLNHLESDGQITIFTDKTGVIKAARLLLSSVTKVLLLADRVVIKQIITSRNKVLATMERLEKVNSFQEFVQIFSQFGNEMVEFAHLSGDRQNDLKDEKKKAKMAAARAVLEKCTMMLLTASKTCLRHPNCESAHKNKEGVFDRMKVALDKVIEIVTDCKPNGETDISSISIFTGIKEFKMNIEALRENLYFQSKENLSVTLEVILERMEDFTDSAYTSHEHRERILELSTQARMELQQLISVWIQAQSKKTKSIAEELELSILKISHSLNELKKELHSTATQLAADLLKYHADHVVLKALKLTGVEGNLEALAEYACKLSEQKEQLVETCRLLRHISGTEPLEITCIHAEETFQVTGQQIISAAETLTLHPSSKIAKENLDVFCEAWESQISDMSTLLREINDVFEGRRGEKYGYLSLPKPMKNNANLKSLKPDKPDSEEQAKIAKLGLKLGLLTSDADCEIEKWEDQENEIVQYGRNMSSMAYSLYLFTRGEGPLKTSQDLIHQLEVFAAEGLKLTSSVQAFSKQLKDDDKLMLLLEINKLIPLCHQLQTVTKTSLQNKVFLKVDKCITKTRSMMALLVQLLSLCYKLLKKLQMENNGWVSVTNKDTMDSKT

SEQ ID NO: 715 - DNA, 8011 bp, Homo sapiens
cgcccctcgggggcggctgtggcggaggaacgatggccgacggcggcggccctaaggaggcgccaagcctgcggagctctcccgggccggcgccgcgggtcccgcgcgcggtcgggccgagtggcggtggcggggagaccccgcggaccgcggcgctggcgctgcgcttcgacaagcccattaagcaggccttctacaacaccggggccgtgctgttcgtgtgcctgtgctgcggcgccgcggtgctggtctacttcatcctggaggccttcctgcggccgctgctctgggccgtgctgtgcggcacttttctgcaccccttcaagagctcgctgacgcgcctgggccgccactggctgcagcgcctgcaccgcgcgcacacgcccatcgtcctggccgcgctgctcctgccgctctgcttcgtcgactacggcgtcgaggccctgggcgagcaggcgctgcgccgccgccgcctgctcctgctgctcggcgccggcggcccgctcctgtacggcctctactgcctcggcagctacttgggcgtgcaggtgctgctggtgcacgctgccacgctcatctgccgcgggctggactacttcagcagcctgtggatctggacgttggtggttggctatgtgttgactgtttcattcaagtggaatgcaagcactgaacgctacttgagagcagtttcaattcctgtctggattatattgctttttcatttagcatccctggctggctcatggagaattccagtattcctggttattgttttcctgatgtctgtgggtaccctctatgaaaaacagaatggaaaagagtcttctggggcagagttaccagggcaggttatctccatggcagcttctactctggcaaacttggccatctctatcacagggtatgaatcaagcagtgaagaccagccctccactcagcctgcagaagcagtggacaggggagaatccgctccaacgttgtccacctccccttcaccctcctccccttcacccacttccccttcacctactctgggcagacgaaggcctgaaataggaacgtttcttagaaagaagaaaactagtgacatctactttgtgtctctagtttgggccattgtcgtcatgcagatctggttgaacctgtggattgtgcagttgctgccagtgccgattgcagtctggatactcaaaaagcttgtcattcactttggagttgtggatttcctagagaaacgctaccatgtgtggtggggcattatagaaagcttcctgaaggagcggcagggagctctcgcgccttggcccattgtcgggcttggaaaattcttgttaaaagttgatagcaagctctggcactggctaaataagaagatgatcatctggttggagaagatgttagataaaataattagcattttcatcatatttttgttagtgataggaactcttcttttagccctactcctgactgcaaaggtacatcaagagagtgtacacatgattgaagtcacaagtaatttgattaatgaaactctagcaaatcaccctgagtgggcaaattggcttcctgaggctcaggtagtccaaagagccctgaattctgcggctaacaacgtgtatcagtatggacgagaatggataactcacaagctccataaaattctaggagataaggtgaacaatactgctgtaattgaaaagcaagtactagaactttgggacagactgtatcactcttggtttgtaaagaatgtaacacactctggaaggcacaaaggacagaagttgcatgtcagtcgtcagaatagctggctgggagacattctggactggcaggatattgtttcctttgttcacgagaacattgagacatttctttcgatcttggagtctctgtggatcgttatgagccggaatgtgagcctgctgttcaccactgtcactacactcttgaccatcctcttctacagcgggacagcccttctcaattttgtactctctctgataattttcctgaccacactattttatctattaagttccagtgatgagtactacaagccagtgaagtgggtgataagcctgactccactatctcagccaggtccttcttctaatattattggccagtctgtggaagaagctatcagaggggtgtttgatgcttccctcaaaatggctggcttctatggattgtatacctggctgactcatactatgtttggcatcaatattgtcttcataccatcagcattagcagcaatccttggagcagtgccattcctggggacatactgggcagcagtacctgcagttcttgacctgtggctgacacaagggttaggatgcaaggccattttactgttgatttttcatctcttgccaacatactttgtagatactgcaatctactctgacatatcaggaggtggccatccttacctgacaggcttggcagtggccggtggagcatactacctaggcctggaaggagcaatcatcggtcctattcttctctgcatacttgtggttgcttccaatatctatagtgccatgctagtgagtcccacgaattcagttcccacgccaaaccagaccccatggcctgctcagcctcagcggactttccgtgacatttctgaaagatctgaaatcttcagtaaggttgatgtggtttcctctgcagtgatttttctaaggaagttcaaatttgacagcgagttcagctcagctgtggccttctgcccttccagctgtgcctagcaagcaaaacccaggaaagaagcagaagcctcctggccttacatacagaatgcctggacaagagagaacttgctgcgggctgctttgtattttaaaacacagcttgagagttcagcgttggtggtttgctcacttaactgttgttaagatggcttgaaaagtttcattttatacactggtaccctggcttgaaatttttccactttggttatctatgttactatattatatatttataaagttattttaagaactctaaactacctgctgttaaaagaatagatggtgtaattttttcctggtttaagaaatgtattgttaaacttttctaagacagtcacttttcaaggaagagggctttcacttttgagtgtgtagttgagtgagcaggaaaaatgaatcttctacccttctcccacaatgtattatacgctctttaagaaataataaatcataagtataagggtggggtggcttatttgatgttcagttttatattataaccctgggagatacaaagactgaagctcttcctcctcttccttttctcttcacgcttctttacactattgccaaattattaaaacttgggctgaccacgttggaagtgaaatacttattaagctgctatgaatggtaacagtatgataaaattcatgctgttattaggttttctccttccaggtggttgaagtgaaaaatctcaggtgtagcaatactctgatttgttaaatgtatccgtttcattatttggaactctgccaataagttagttttcagcagaattttgtatttatgtagtattttcccatctcttagcacagtgccttgcacatgactctaaatgaatcttgttgaattgaattgcaactttaaaaatatctcagatatcacaataaccagcatagtgctttacattttacaaagtccttttgcacatactatttcacaagtacatcacatcagctttcatatagctttatattattttacatcagttttacactgatggagaagctaaggttcagaaaagtgaccaactcaaagtcgtaaagtgtagtaggatttggcctcagatctttgactccgttgtgtgcagattctgctgtattagtgttccttctaaatattgtatgcagttttcccagtgttacgagattggtgttgctatccatttgttgtgaatgaagacttgtcctatagtacatacagggctgagagtggactgtagttcttagctgaaccctttctactgtttaaaacaatcatcaggcctatcctctgctcccaggggaatgtgggagagaaaagggttcttggccaggctgtaggtggtggctcacatctgtaatcccagcactttggaaggctgaggtgggtggattgcttgagcccagggatttgagatcagcctaggcaacatggcaaaaccccatctcgacaaaaaaaaaaaaaaaaaaaaaaaaattagctgggcacggtggtgtggctatagtctgagctactcaggaggctgatgtatgaggatcacctgagtccaggaggtcgaggctgcagtgagccaagatggcgccactgcactccagcctgggtgagagagtgagacactgtcccaaggaaaaaaaaaaagtgttggggggtagttcttaagcgttgaagatttcctttttggaaagtatttaaaggtagaaatattaataatttttcctaaaacatctccctaagaagtcactgataattataattagtttaaatttattcttacactacttaagaaaaatttcatttagaaaaggctaccatgagatcttttgactatatggagtagactgcatacagatctctttatttctattatgaatattttagcgattataatcagctattccactgagtattagatttggtcactaagtaactcatgtttttctttagtcaatcattcattcattcactaaaacatttgttgagagttggctaaactctagattctgtgccaggcactgtacagggtgatggagatcactcataagaaggcctcttgctcttagccagatcatatgtaatactaaatttaaattttttgcattaaaaggctaaaaaatcatttgtttttgttaattatatactggttgatttatagatgtaattagcacatattcataagagacaaatatatacaatgagttactatacatatacaaagtgattttagctgtataaagtgatattgcaaaaaactacagctaatgtttcttgctgggtaattattagcataaatatcaggttcttagaggtctttaagagaatactttagagctaccaaaattagcagcagtgatgtaatatcaccctgaaataccaggagcagaggtgccccagagtgcttcacagctatgatcaggaaacttgacctgccccattgctacagcaacggcataaggactaggaaggtccactagctggggaggtcttggaaccctccgagccagaaagaagcattccagcatgattcctcagatgcaatgaggaaggtttacagaattttcacagggcaacagagatcaagtggtatgaaaaggtaggagttttaagctcaagtctcaaagataacctacctttacattctcagtcagaatttgacccagaaagaggaagtttcttcaggaacagaccgtacgttgatgaagtagaagtcatttcagtaaaaacggagtacagaacttggtcataatatcttgcattttatagatttattaaagattagtttcaagttcacattcgctattcagttgtaaaccgaatggatgggaggggagaaaatacaagctctccacacaggtatgctcctctcttttctgagagagaaggcatgggattttcagcataaattccatgttatgtgagtgctgtttgagttctgaagttcctatcaatatctgttcctgcaagtgatctctgtaagaccaccttacatgctggtcttagttattgttaaaattgcaaggtttcttcacaccctctttgataagaagtgtttagctggcagagctttcccttgacttctgagtctagtgtgggttggcccatgacagtgggaagaaatccaacatgttacatggagaccttgtatgtaaacaaactctgtagcctttgaaagtggaactgctttttacagttaaagggctgctaaatcgcttgcagatgagatcttctggctcaccttgatcttcacatgaacccattgtgacctatctggatttcctaggacctgtagtttccatttgggttatattagtgcctcaggaatgtgtcactactggtcaagcaatactcagaaattcaggctgtgaggggttagattagaggaaagtaatttaggtgagctatccagagctttcaacctcagggtttataggaaaaaaaaaacaaaatacaaaaacccttaggacttctcatactctagccctgaccttgcagtctcctctgaggggcctcctaagacccttaaaataatattacaataggactttgagtgtgcatttcacagtggaaatagcctctggctagcattacttccaaatgctagttccagctaaaaacaagtactttttattagtttcttgtctttcaacattctgccatcaaaatatattcattttattaacttaccgattattgggaactgcaaaaaaaaaaaaaaaaaaacacacatgctgtctgcagccactgtttggttatttttgatagtttaagagaattataaatcaagttgttctgtctactagagtcagaaattctgtgctagaatgggacttctaaaattaggtggtcctgtcactttctagagaaagacccaaattcataggtttaagtggcttgtctgacatacacatacagccagttagtaacagaattcagaatagaatagagttcttttttttctgcagtccgttgttctacttctctttccttttcttcatggttgagcagcttttggcaaaatgtgttccatatagcagtagttccaagagatgttaatagatgtaagaaaaaaagtgtgtgtgtgttgggggtgggggattgcatggtcaattaaaatgaaggaatgctgagtttgtttccttactgtaggacttctaagagttttgaacatgctattacacattgtgaatttataaaaggggacaaacactgtttgaccttagactgcactccccttctttattcctcagagcatctcaaaggactacagggtcctttgagaaacatggcccttgatcaagtttacaactctttgagaagacatccctaatggaaatactgaatggcagatctattactgtggtaccatgtagtgtgtaataaatcttgaagtccagaaagcaagtatatttgctgtttagagctatacttaaggtatagagattcttttccacctgtggtgtgtaaaatcagtattgtgtttaattttgcaggtttttcaaggatcaactaatgtgcaaatacagtggtgatatattgatattacattttaataatgcttttgtatggcactttatagttttcagacaccttttgtaacagccctgtgagacagacaatattatccttattgtacagatgggggggctctggaggctctgaaaagtttttggtgatattcccctaagtttataccacaaaatgatggagccagaatttagttgcagaacttctgactccaagtccagagttctttactagacatctggtttcttactagctttttgctagctttttattttacagtgaaaagtatggaagcaaatcctgataattttggcttattatcaaatatcatttattttttattgcagagacccagcagatgtaactctcattgtagccatcccaaagaaaacccttctttgccctttgcagtgccacttatttaggtaactgaagtgtatttccagtacaatttgattttgaactaagatttgatatagagttgtaattgcttacataactctttgaaaatgtatcatccctgggttctcaggtgaaagaggcaattcaaaagtaaaaaagaatattcgaatacaataaataccctctgttctcacacaaatgctgtttcttagctaacttgctttgacaacctactgatgtaacttctttattaatgtgaaatatttatattttgaaataaaattactagtgttgaatgaatcatgtggtaaaaaaaaaaaaaaaaaaaa

SEQ ID NO: 716 - protein, 911 aa, Homo sapiens
MADGGGPKEAPSLRSSPGPAPRVPRAVGPSGGGGETPRTAALALRFDKPIKQAFYNTGAVLFVCLCCGAAVLVYFILEAFLRPLLWAVLCGTFLHPFKSSLTRLGRHWLQRLHRAHTPIVLAALLLPLCFVDYGVEALGEQALRRRRLLLLLGAGGPLLYGLYCLGSYLGVQVLLVHAATLICRGLDYFSSLWIWTLVVGYVLTVSFKWNASTERYLRAVSIPVWIILLFHLASLAGSWRIPVFLVIVFLMSVGTLYEKQNGKESSGAELPGQVISMAASTLANLAISITGYESSSEDQPSTQPAEAVDRGESAPTLSTSPSPSSPSPTSPSPTLGRRRPEIGTFLRKKKTSDIYFVSLVWAIVVMQIWLNLWIVQLLPVPIAVWILKKLVIHFGVVDFLEKRYHVWWGIIESFLKERQGALAPWPIVGLGKFLLKVDSKLWHWLNKKMIIWLEKMLDKIISIFIIFLLVIGTLLLALLLTAKVHQESVHMIEVTSNLINETLANHPEWANWLPEAQVVQRALNSAANNVYQYGREWITHKLHKILGDKVNNTAVIEKQVLELWDRLYHSWFVKNVTHSGRHKGQKLHVSRQNSWLGDILDWQDIVSFVHENIETFLSILESLWIVMSRNVSLLFTTVTTLLTILFYSGTALLNFVLSLIIFLTTLFYLLSSSDEYYKPVKWVISLTPLSQPGPSSNIIGQSVEEAIRGVFDASLKMAGFYGLYTWLTHTMFGINIVFIPSALAAILGAVPFLGTYWAAVPAVLDLWLTQGLGCKAILLLIFHLLPTYFVDTAIYSDISGGGHPYLTGLAVAGGAYYLGLEGAIIGPILLCILVVASNIYSAMLVSPTNSVPTPNQTPWPAQPQRTFRDISERSEIFSKVDVVSSAVIFLRKFKFDSEFSSAVAFCPSSCA

SEQ ID NO: 717 - DNA, 1133 bp, Homo sapiens
atgcgcagaccgaggcagggaggcgggggtgcgggaggctccgcggctgcgcgggcgcgtgctggtggcctcggcggaggctcagtcccggcccgcgcccgcggcgcccccgctgcggcccgagcggcctggctgcgggatctgtgcgcagcgatggcgcggccgccccggcagcacccgggggtctgggcgtcgctgctcctgctgctactgacggggcccgccgcctgcgcagccagccccgcggacgacggtgcgggcccggggggccggggaccccggggacgcgcgcggggggacacgggcgccgacgaggcggtgccgcgccacgactcctcctacggcaccttcgcgggggagttctacgacctgcgctacctgtcggaggagggttaccccttccctactgctcctcctgtggatccatttgccaaaatcaaagtggacgactgtggaaaaactaagggatgctttagatatggcaaaccaggctgtaatgcagagacctgtgactatttcctcagctaccggatgataggggctgatgtagaatttgagctgagtgcagacacagatggttgggtagcagttggattctcttcagacaagaaaatgggtggtgatgatgtcatggcctgcgtccatgatgacaatggcagggtccgcatacagcacttctataatgtaggccagtgggcaaaggagattcagagaaaccctgccagagatgaagaaggagtttttgagaacaatcgcgtcacctgcagatttaaacgccctgtgaatgttcccagagatgaaacaattgttgatctgcatttgagttggtattatctgtttgcttggggtccagccattcagggctctatcactcgacatgatatagactcaccgccggcttcagagcgtgttgtcagtatttacaagtatgaagacatttttatgccatcagctgcctatcaaaccttctcatctccattttgtttgcttctgattgttgctctgaccttctacctattgatgggaaccccctaaccacagctgcagggccaacagattacatggattgggaagtctttagtataaatatattttttaaagaatatccagtataattttagcttcaattattt

SEQ ID NO: 718 - protein, 344 aa, Homo sapiens
MRRPRQGGGGAGGSAAARARAGGLGGGSVPARARGAPAAARAAWLRDLCAAMARPPRQHPGVWASLLLLLLTGPAACAASPADDGAGPGGRGPRGRARGDTGADEAVPRHDSSYGTFAGEFYDLRYLSEEGYPFPTAPPVDPFAKIKVDDCGKTKGCFRYGKPGCNAETCDYFLSYRMIGADVEFELSADTDGWVAVGFSSDKKMGGDDVMACVHDDNGRVRIQHFYNVGQWAKEIQRNPARDEEGVFENNRVTCRFKRPVNVPRDETIVDLHLSWYYLFAWGPAIQGSITRHDIDSPPASERVVSIYKYEDIFMPSAAYQTFSSPFCLLLIVALTFYLLMGTP

SEQ ID NO: 719 - DNA, 3770 bp, Homo sapiens
caagccgccggcccggagagcgcgcggcggcggcggcggcgggacggccccgagcgcgccctccccgtgcggccactcgcagcggcgctggccgggccggcgcgcccgcaggcggctagagcagcggcctcggcctcggcgcgggcttgccccgggccgtagcccgcgagaggcggcgcgggcggccgagggcactgaacggcgtcgcggtacgctcccgggcggcggcgcagcggcagcggcagcggcagcggcagcgcagggggcggaggcagggggcgcccccagccaggatgctgcggttcctgcgccggacctttggccgccgctccatgcagcgctacgcggggcgcggcggggcgcggggccgccgggctgggggacgagcgcgatgggggccacgggggggcccggccgccgccgcctcctcctcggcgctgcccgccgcgcccgggggcagcgtgttcccggcgggcggcgggcccctgctcaccggcggcgcggccgtgcacatctccgccgccggcgccgccaaggccaccctctactgccgcgtcttcctgctcgacgggaccgaagtgagcgtggacctgccgaaacatgccaaaggccaggatttgtttgatcagattgtgtaccacttggaccttgtggaaacagattactttggcctccagttcctcgactctgcccaggttgcgcactggctggatcatgccaaacccataaaaaagcagatgaaaattggacctgcttatgctttacactttcgagttaaatactattcttcagaaccaaacaaccttcgtgaggagtttacaaggtacctgtttgttttacaactcaggcatgacattctttctggaaaattgaaatgcccttatgaaacagctgtggaattagctgctctctgtctacaagcggagcttggggagtgcgagcttccagaacacacaccagagcttgtgtctgagtttcggttcattccaaatcagacagaagcaatggaatttgatatcttccagagatggaaagagtgcaggggaaagagccctgcccaggcggaactctcctatctgaataaagcgaagtggctggaaatgtatggggtagacatgcacgttgtcaggggaagagatggctgtgaatattctcttggactgaccccgacaggcatattaatctttgaaggagctaacaaaataggcttattcttttggcctaaaattaccaaaatggattttaaaaagagcaaattgacactcgtggtggtcgaggatgatgatcagggacgtgagcaagagcacacgtttgtgttccggttagacagtgccaggacctgcaaacacctttggaagtgtgcagttgagcaccacgcattcttccgactgcggacgccaggaaacagcaaatccaatagatccgactttatcaggctgggctctcgcttcagattcagtgggcggacagaatatcaagctacacatggctccaggttacgaagaaccagcacctttgagaggaagcctagtaaacgttatccatcccggagacattcaacgttcaaagcaagcaacccagtgatagcagcccagctctgctctaaaacaaatccggaagtccataattaccagcctcaatatcatcctaatatccatcccagccagccccggtggcatcctcactctccaaatgtcaggccatcctttcaggatgacaggtcgcattggaaagcatcggccagtggagatgacagccattttgattatgtccacgaccagaaccagaagaacttaggagggatgcaaagtatgatgtatcgagataaactcatgactgcactttgagagactgaagcatctctcttccattcaccttcatagtttcattgcattccatgaaaagtgtcttggcctcagatggatggatgtgtttggacgagtgtctttaaggagtagtcctgaaaggtgtttttggtgtccatgtaaatatttgaagataaaaccactatagcttgtcataatttactgttgactgcattctcattaaaatgaaggtaaaggctcaggaatcatattgatgttctgattttaaaattggagtcaaagtctatgtttatcattttactatgttcctgatgttctttgttatttaattaatgggagcaaataaaaccagaagagcttgggaagattgctcagcatatattcctgtcgtagaagttgagattgctagggtccagtttccctagtgtggcctggacgagtcatttccccttcattgacctcattttccccatctgaaaagagagggcttggactaagtgatctccaaggtcctttccaactctaaaattctgcaatttgttaacatttcattttgtttaggttgaggacatacattcaaactaattttatcacaaggaaaacgtcaatacccacttccttgacagagttactctttcagaagctaaataaagtatataacttattagatgttatatagatacagggggactttgaatttcacatcttaaagcagttgagctactttgaatttaagcagtcgtactaatcttaaattgcatagcatttgttttgatcgaatttactgctcaagtatggaataatttttaatgtcttaatgattggtgctgctaacttgcgtgatttcagaagactgtacgaattgggggattggtttttaccctagacttcactcttaaaaagcaagctgcaatcaagatcatttatggctcaaatgaaagcatataaggttttcttgaagttgtgccaaagcattctgtagagtaggatgagatggttgttgccctagtctgttggtagaaccagaaatcaatatgttgtcttttaggttaaagcttgtaccaaaatatttatttcccccatttcaagccctgagtcaaacatttttttctcttaataatagacctgaaatgttttattagtatttctgtgaaatcagttgattcttgtgccatttttgtatatgtaattgtaattttgcccatgttaggccctctaaaaaatgtttgacatcctttgagatattttattactaaaatctgatcttttttggctactgcaaaaatctattcagcaagaaggtatcagctgcataccttgcacagtggagctgactacctataaactctccctaaggcatttgtttacaggtgtattccattttagcagacgttctgatgctcagtgtatgtgctgcatacaaataaatgtgttctgaatcttttcatcttattgatagcatttttacaaatgtgtttccaaggaataaagattattcttgctttttttttgactccatcttcattttttttaaattgattcttgttgctatgcagaagtctcatttgtgaatgaccttggtaacagaacagttggcttttggaagtctgaaggtgagcattcagttaggtgggtggagcaagatcatcctagaatgaggctgctcttggcaagagtggatcttataggcacagcagctgatgcctttcttcatctggggcaactctggtgaaggttgtcctgcctgtcacaggtgctgagtagagagaagtggtggcagtgggatttcctcagtaatagtcctgtaaaggtacgtgtttgtcctggctacttgtgctcttcctggcaggaaggcatccaaacccttatctgtgggctcctggaaattgtgtatgccatataataccctctaataaatacctctctgcttaaaaaaaaaaaaaa

SEQ ID NO: 720 - protein, 504 aa, Homo sapiens
MQRYAGRGGARGRRAGGRARWGPRGGPAAAASSSALPAAPGGSVFPAGGGPLLTGGAAVHISAAGAAKATLYCRVFLLDGTEVSVDLPKHAKGQDLFDQIVYHLDLVETDYFGLQFLDSAQVAHWLDHAKPIKKQMKIGPAYALHFRVKYYSSEPNNLREEFTRYLFVLQLRHDILSGKLKCPYETAVELAALCLQAELGECELPEHTPELVSEFRFIPNQTEAMEFDIFQRWKECRGKSPAQAELSYLNKAKWLEMYGVDMHVVRGRDGCEYSLGLTPTGILIFEGANKIGLFFWPKITKMDFKKSKLTLVVVEDDDQGREQEHTFVFRLDSARTCKHLWKCAVEHHAFFRLRTPGNSKSNRSDFIRLGSRFRFSGRTEYQATHGSRLRRTSTFERKPSKRYPSRRHSTFKASNPVIAAQLCSKTNPEVHNYQPQYHPNIHPSQPRWHPHSPNVRPSFQDDRSHWKASASGDDSHFDYVHDQNQKNLGGMQSMMYRDKLMTAL

SEQ ID NO: 721 - DNA, 5582 bp, Homo sapiens
caagccgccggcccggagagcgcgcggcggcggcggcggcgggacggccccgagcgcgccctccccgtgcggccactcgcagcggcgctggccgggccggcgcgcccgcaggcggctagagcagcggcctcggcctcggcgcgggcttgccccgggccgtagcccgcgagaggcggcgcgggcggccgagggcactgaacggcgtcgcggtacgctcccgggcggcggcgcagcggcagcggcagcggcagcggcagcgcagggggcggaggcagggggcgcccccagccaggatgctgcggttcctgcgccggacctttggccgccgctccatgcagcgctacgcggggcgcggcggggcgcggggccgccgggctgggggacgagcgcgatgggggccacgggggggcccggccgccgccgcctcctcctcggcgctgcccgccgcgcccgggggcagcgtgttcccggcgggcggcgggcccctgctcaccggcggcgcggccgtgcacatctccgccgccggcgccgccaaggccaccctctactgccgcgtcttcctgctcgacgggaccgaagtgagcgtggacctgccgaaacatgccaaaggccaggatttgtttgatcagattgtgtaccacttggaccttgtggaaacagattactttggcctccagttcctcgactctgcccaggttgcgcactggctggatcatgccaaacccataaaaaagcagatgaaaattggacctgcttatgctttacactttcgagttaaatactattcttcagaaccaaacaaccttcgtgaggagtttacaaggtacctgtttgttttacaactcaggcatgacattctttctggaaaattgaaatgcccttatgaaacagctgtggaattagctgctctctgtctacaagcggagcttggggagtgcgagcttccagaacacacaccagagcttgtgtctgagtttcggttcattccaaatcagacagaagcaatggaatttgatatcttccagagatggaaagagtgcaggggaaagagccctgcccaggcggaactctcctatctgaataaagcgaagtggctggaaatgtatggggtagacatgcacgttgtcaggggaagagatggctgtgaatattctcttggactgaccccgacaggcatattaatctttgaaggagctaacaaaataggcttattcttttggcctaaaattaccaaaatggattttaaaaagagcaaattgacactcgtggtggtcgaggatgatgatcagggacgtgagcaagagcacacgtttgtgttccggttagacagtgccaggacctgcaaacacctttggaagtgtgcagttgagcaccacgcattcttccgactgcggacgccaggaaacagcaaatccaatagatccgactttatcaggctgggctctcgcttcagattcagtgggcggacagaatatcaagctacacatggctccaggttacgaagaaccagcacctttgagaggaagcctagtaaacgttatccatcccggagacattcaacgttcaaagcaagcaacccagtgatagcagcccagctctgctctaaaacaaatccggaagtccataattaccagcctcaatatcatcctaatatccatcccagccagccccggtggcatcctcactctccaaatgtcagctacccgctcccttccccagtgcttagcagctcggaccggttgccttttggcattgaggagaatgggggcacaccgttcctcaccgcagcttcaggaaggcatcaccaccagcaccagcatcagcatcagcaccagcaccactcaaactacagcctctcactgaccctggagaacaaagaggggcctctgaggtccccaaactccagcagcaagtcccttacaaaactgagtccaggaacacctgccttgttcagtgaagccgctgcccatctaaagaagctggaactggaaactgtgaaggctgctggaccctggcctcctctgcacatcaacataaacaaggctgaagaaaagaaagtctcggagaaaactcttcagactccacttttgccttcccctgttgcggatcatgtgaagtgtaacattctgaaagcccagttggaaaatgcttcccgagtgaacatccagggtggaaaggaggaatcaccgtttgtaaatatcaataagaaatccagtcttcaggacgctagtgtaagaagtcctattcctattcgtgtggaaactgcccagccagctgtggaaaagccggaaatcaagcctccccgagtgaggaagttaacaagacagtatagttttgatgaagacgacctccctccagacctggccgaggcagtgggagtgaccacatctacaaccacaaacaccacaacggctgccacacaagtctccgtgccgctgccgtcccccaaggtccagaatgtcagctcgcctcacaagtcagaaggcaaaggcctgctgtcccctggggccaagagcccctctgaccgaggaggtgcctttaccctggagccgggtgatcttctgatggatttcacagaagccactcctctggcagagcccgccagcaacccccactgtgcccactctcgctgttctcctccactctctctccccatgaaggaagagaccactggagtttgcatgtaccctccaatcaaaacgaggctgataaaaacattcccggttgatacaatgaccccgtttcctgatactttcaccacagggccacagtttactgcagacttcagagacagtaaattacagtgctgtcctggcccgacttccccgctgatcccagcagcgaccctgaggcctttgacagagaccgtctccacagtgcagaccatttacaccaccccggaaacctgtttctctggcagccagtgcagagacactccggcaggaactggagagagagaagatgatgaaaagactgttgatgaccagactgtgaaattctccccttgtcacctggaagatggcatggtgccttctgtccatcttctttcttcgggctttgtgtgctcactctagcacagcatacaagtgtgtgctttgttcgcccaggtctccatggttagttgaagccaatttctggcttgacttttatgggaaaagttattttatgtctcctaagcattagagtttttctattactctatgtagttgagacaggatttgataagtctaggaaaagaaagatgggaaaacgggattccttttcagaagtacctgtgtgtatctgttaataaccacaggggttaatatgatgtaggatctttactatcaatttcaaccatttgattttgtatgattgaaacttgcaccgagctttgactgtttgttaaagagtcatttttaatgaaagaataattctttattgctggtttttcatttacactgataaatacacagatcttataaagtctttaacattcatttgtattcagatgtgagtagaagaactaaaaaaagaaagttacatatcactatgactgaaggtacttcagcttaatctgaaatataatttaacttgtgaactccttggatatgatattatttggaataaacagaatttatcattgaacccaaagtaggaaatgatagcttacattgtctaaaaatccttacaaggttaagatgattcaatatcaagaatattcagaaaattatttctaaagttgatcgattcatgtcgtattgatagaatcttgaccagaagaaattttgctctttttatatagtttcaagaaatgtgtttttaaatttttattaatgcacttgaacaactttgcaggaataaagcaaccccctaaccacaaaatatccctctaaattagttccctagctttctcaatgaatacacacatatttttacatagctatgatcgttgtgtacattctcctttgttttacttctcggcctaacacttgtctcctcttgtcaacacagattctgctctcaccaatttaaatgtctttatatccatgtaacatgggtaacctcacttcaccccattattagatatttgagttatatctaatttttcactcttataaatagtgctgctatgaatgtctgtaaaaaaaaaaaactgctccttcttttggattattcccttaggaatatctccaaagagggattacaaggtcaaagagcatgaagtattttatagctcttgttttatattgccagattgctttctagaaagatccaatctttgggttggaaggaccttaaaggtcatctagtttagcctccccaccccctctgaatgcttgaatcccctcgacaatttatgatgccaccagcaatgtataagcatttctgtttaccaatagctctgccagtattgggttttgccatttttatttatttttgctagtttaataggtatgtatagttgttcttgaagagttgttttatttcattaattgctagcaaggctgagcacttttccatgtgatgatttactagttgtatttccttgtgtgtaaaatgttcattcatttcttatgaccacttgttaagaggaactgatctcatatatttgtatcagaactgtatttttatgttatattgtatagtttgctctcctgcccctctccttaaaactgaatggtgccaataatttgatactaatgactacaaaaaaaggtaatgcctcatttactagtattgttgtaaaatgaggaatgtatgtgaatattcagataaccgaggattaaccctttaagtgctgaatctttaaaattttaatatatttttttttgagggaaatctttctaaaatgtattacgcacttccctgccttagtaaacagagtatactggagagtatttaaccttttcttgatgagtcatggtcatgattataaacatcagccccttttataccttggtacggtgcagtgatatcattaagagctatcaatatgtgtagggcttggcttggccttttataggatattatgctgttctcactgatggttttttactgctctctgctctgtcagtggagctatccggggcaattgtagcgtttgggtccttttacccctatgtcccccggctatacttttaaaacagctttagctgttctttatcttgtgcacatgatacaaaatatgttcccgtacaatatggggctgtcacttcttgccaacccagcaccctcttcctcttctaacctgctttctgaggcttctgctcttcacctcctgctcgctgatggaaacctccagggcaaagctgaaggtttcttggggaagccaggaaagccagtatttcctatgtgtcagatctgcttggcttccaagaagggatgcatgggctttttggccagtgtttccaggaggctctgggcttcctgcttcttccccgcttcccccagagttcacagatgttgaagtttctgaaggttgacgtcactggaagtctgaccacaaacaagttggctgttactgtatttgaaacccagtacctttggcagctcacctctaaccagtaaaataagaggattccatggtttctttttttttt

SEQ ID NO: 722 - protein, 913 aa, Homo sapiens
MQRYAGRGGARGRRAGGRARWGPRGGPAAAASSSALPAAPGGSVFPAGGGPLLTGGAAVHISAAGAAKATLYCRVFLLDGTEVSVDLPKHAKGQDLFDQIVYHLDLVETDYFGLQFLDSAQVAHWLDHAKPIKKQMKIGPAYALHFRVKYYSSEPNNLREEFTRYLFVLQLRHDILSGKLKCPYETAVELAALCLQAELGECELPEHTPELVSEFRFIPNQTEAMEFDIFQRWKECRGKSPAQAELSYLNKAKWLEMYGVDMHVVRGRDGCEYSLGLTPTGILIFEGANKIGLFFWPKITKMDFKKSKLTLVVVEDDDQGREQEHTFVFRLDSARTCKHLWKCAVEHHAFFRLRTPGNSKSNRSDFIRLGSRFRFSGRTEYQATHGSRLRRTSTFERKPSKRYPSRRHSTFKASNPVIAAQLCSKTNPEVHNYQPQYHPNIHPSQPRWHPHSPNVSYPLPSPVLSSSDRLPFGIEENGGTPFLTAASGRHHHQHQHQHQHQHHSNYSLSLTLENKEGPLRSPNSSSKSLTKLSPGTPALFSEAAAHLKKLELETVKAAGPWPPLHININKAEEKKVSEKTLQTPLLPSPVADHVKCNILKAQLENASRVNIQGGKEESPFVNINKKSSLQDASVRSPIPIRVETAQPAVEKPEIKPPRVRKLTRQYSFDEDDLPPDLAEAVGVTTSTTTNTTTAATQVSVPLPSPKVQNVSSPHKSEGKGLLSPGAKSPSDRGGAFTLEPGDLLMDFTEATPLAEPASNPHCAHSRCSPPLSLPMKEETTGVCMYPPIKTRLIKTFPVDTMTPFPDTFTTGPQFTADFRDSKLQCCPGPTSPLIPAATLRPLTETVSTVQTIYTTPETCFSGSQCRDTPAGTGEREDDEKTVDDQTVKFSPCHLEDGMVPSVHLLSSGFVCSL

SEQ ID NO: 723 - DNA, 7431 bp, Homo sapiens
gttttgatgaacacctggctttattcttgcaatgaagaaaggttctcaacaaaaaatattctccaaagcaaagataccatcatcatctcactctcctatcccatcatctatgtccaatatgagatctaggtcactttcacctttgattggatcagagactctaccttttcattctggaggacagtggtgtgagcaagttgagattgcagatgaaaacaatatgcttttggactatcaagaccataaaggagctgattcacatgcaggagttagatatattacagaggccctcattaaaaaacttactaaacaggataatttggctttgataaaatctctgaacctttcactttctaaagacggtggcaagaaatttaagtatattgagaatttggaaaaatgtgttaaacttgaagtactgaatctcagctataatctaatagggaagattgaaaagttggacaagctgttaaaattacgtgaactcaacttatcatataacaaaatcagcaaaattgaaggcatagaaaatatgtgtaatctgcaaaagcttaaccttgcaggaaatgaaattgagcatattccagtatggttagggaagaagttaaaatctttgcgagtcctcaatttgaaaggcaacaagatatcatcgctccaagatataagcaagttgaaaccgcttcaagatttgatttctctgatcctagttgaaaatccagttgtgacccttcctcattacctccagtttaccattttccacctccgttcattggaaagtttggaaggtcagccagtaaccactcaggatagacaggaggcttttgagagattcagtttagaagaggtagaaagactggaaagagacctagaaaaaaagatgatagaaactgaagagcttaagagcaaacaaacaaggttccttgaggaaattaaaaatcaagataaattgaataaatcattaaaagaggaggccatgttacagaaacagagctgtgaggaactcaagagtgacttaaacacaaaaaatgaattgctaaaacagaagaccatagaattaacacgagcatgtcagaagcaatatgagctggaacaggaattggccttttataaaattgatgctaaatttgagccactaaattattatccatcagagtatgctgaaattgataaagccccagatgaaagcccttacattggcaaatccagatacaagagaaatatgtttgccacagagagttatattattgacagtgctcaggcagtacagatcaagaagatggagccagatgaacaacttagaaatgatcacatgaacttgagaggccacacaccactggacacgcaactggaagacaaagaaaaaaaaataagtgcagcacaaactcgactatcagaactgcatgatgaaatagaaaaggcagaacaacaaattttgagagctactgaagaatttaaacaactggaagaagctatacaactaaaaaagatttcagaagcagggaaagaccttctttacaagcagttgagtggtagactacaacttgtaaataaattacgccaggaagctctggatctagaactgcagatggaaaagcaaaagcaggaaattgccggaaagcagaaggagattaaggacctgcaaatagccatagatagcctggattccaaagacccaaaacattcccatatgaaggctcaaaagagcggtaaagaacaacagcttgacattatgaacaagcagtaccaacaacttgaaagtcgtttggatgagatactttctagaattgctaaggaaacggaagagattaaggaccttgaagaacagcttactgaaggccagatagcagcaaatgaagccctgaagaaggatttagaaggtgttatcagtgggttgcaagaatacctggggaccattaaaggccaggcaactcaggcccagaatgagtgcaggaagctgcgggatgagaaagagacattgttgcagagattgacagaagtcgagcaggagagagaccagctggaaatagttgccatggatgcagaaaatatgaggaaggagcttgcagagctagaaagtgccctccaagagcagcatgaggtgaatgcatctttgcagcagacccagggagatctcagtgcctatgaagctgagctagaggctcggctaaacctaagggatgctgaagccaaccagctcaaggaagagttggaaaaagtaacaagacttacccagttagaacaatcagcccttcaagcagaacttgagaaggaaaggcaagccctcaagaatgcccttggaaaagcccagttctcagaagaaaaggagcaagagaacagtgagctccatgcaaaacttaaacacttgcaggatgacaataatctgttaaaacagcaacttaaagatttccagaatcaccttaaccatgtggttgatggtttggttcgtccagaagaagtggcagctcgtgtggatgagctaagaagaaaactgaaattaggaactggggaaatgaacatccatagtccttcagatgtcttagggaaaagtcttgctgatttacagaaacaattcagtgaaattcttgcacgctccaagtgggaaagagatgaagcacaagttagagagagaaaactccaagaagaaatggctctgcagcaagagaaactggcaactggacaagaagagttcaggcaggcctgtgagagagccctggaagcaagaatgaattttgataagaggcaacatgaagcaagaatccagcaaatggagaatgaaattcactatttgcaagaaaatctaaaaagtatggaggaaatccaaggccttacagatctccaacttcaggaagctgatgaagagaaggagagaattctggcccaactccgagagttagagaaaaagaagaaacttgaagatgccaaatctcaggagcaagtttttggtttagataaagaactgaagaaactaaagaaagccgtggccacctctgataagctagccacagctgagctcaccattgccaaagaccagctgaagtcccttcatggaactgttatgaaaattaaccaggagcgagcagaggagttgcaggaagcagagaggttcagcagaaaggcagcacaagcagccagagatctcacccgagcagaagctgagatcgaactcctgcagaatctcctcaggcagaagggggagcagtttcgacttgagatggagaaaacaggtgtaggtactggagcaaactcacaggtcctagaaattgagaaactgaatgagacaatggaacgacaaaggacagagattgcaaggctgcagaatgtactagacctcactggaagtgacaacaaaggaggctttgaaaatgttttagaagaaattgctgaacttcgacgtgaagtttcttatcagaatgattacataagcagcatggcagatcctttcaaaagacgaggctattggtactttatgccaccaccaccatcatcaaaagtttccagccatagttcccaggccaccaaggactctggtgttggccttaagtactcagcctcaactcctgttagaaaaccacgccctgggcagcaggatgggaaggaaggcagtcaacctccccctgcctcaggatactgggtttattctcccatcaggagtgggttacataaactgtttccaagtagagatgcagacagtggaggagatagtcaggaagagagtgagctggatgaccaagaagaacccccatttgtgcctcctcctggatacatgatgtatactgtgcttcctgatggttctcctgtaccccagggcatggccctgtatgcaccacctcctcccttgccaaacaatagccgacctctcacccctggcactgttgtttatggcccacctcctgctggggcccccatggtgtatgggcctccaccccccaacttctccatccccttcatccctatgggtgtgctgcattgcaacgtccctgaacaccataacttagagaatgaagtttctagattagaagacataatgcagcatttaaaatcaaagaagcgggaagaaaggtggatgagagcatccaagcggcagtcggagaaagaaatggaagaactgcatcataatattgatgatcttttgcaagagaagaaaagcttagagtgtgaagtagaagaattacatagaactgtccagaaacgtcaacagcaaaaggacttcattgatggaaatgttgagagtcttatgactgaactagaaatagaaaaatcactcaaacatcatgaagatattgtagatgaaattgagtgcattgagaagactcttctgaaacgtcgctcagagctcagggaagctgaccgactcctggcagaggctgagagtgaactttcatgcactaaagaaaagacaaaaaatgctgttgaaaagttcactgatgccaagagaagtttattgcaaactgagtcagatgctgaggaattagaaaggagagctcaggaaactgctgttaacctcgtcaaagctgatcagcagctaagatcgctccaggctgatgcaaaggatttggagcagcacaaaatcaagcaagaagaaatcttgaaagaaataaacaaaattgtagcagcaaaagactcagacttccaatgtttaagcaagaagaaggaaaaactgacagaagagcttcagaaactacagaaagacatagagatggcagaacgcaatgaggatcaccacctgcaggtccttaaagaatctgaggtgcttcttcaggccaaaagagccgagctggaaaagctgaaaagccaggtgacaagtcagcagcaggagatggctgtcttggacaggcagttagggcataaaaaggaggagctgcatctactccaaggaagcatggtccaggcaaaagctgacctccaggaagctctgagactgggagagactgaagtaactgagaagtgcaatcacattagggaagtaaaatctcttctggaagaactgagttttcagaaaggagaactaaatgttcagattagtgaaagaaaaactcaacttacacttataaagcaggaaattgaaaaagaggaagaaaatcttcaggttgttttaaggcagatgtctaaacataaaaccgaactaaagaatattctggacatgttgcaacttgaaaaccatgagctacaaggtttgaagctacaacatgaccaaagggtatctgaattagagaagactcaggtggcagtgctagaggagaaactggagttagagaatttgcagcagatatcccagcagcagaaaggggaaatagagtggcagaagcagctccttgagagggataaacgagaaatagaacgaatgactgctgagtcccgagctttacaatcgtgtgttgagtgtttgagcaaagaaaaggaagatctccaagagaaatgtgacatttgggaaaaaaagttggcacaaaccaaaagggttttagcagcagcagaagaaaatagcaaaatggagcaatcaaacttagaaaagttggaattgaatgtcagaaaactgcagcaggaactagaccaactaaacagagacaagttgtcactgcataacgacatttcagcaatgcaacagcagctccaagaaaaacgagaagcagtaaactcactgcaggaggaactagctaatgtccaagaccatttgaacctagcaaaacaggacctgcttcacaccaccaagcatcaggatgtgttgctcagtgagcagacccgactccagaaggacatcagtgaatgggcaaataggtttgaagactgtcagaaagaagaggagacaaaacaacaacaacttcaagtgcttcagaatgagattgaagaaaacaagctcaaactagtccaacaagaaatgatgtttcagagactccagaaagagagagaaagtgaagaaagcaaattagaaaccagtaaagtgacactgaaggagcaacagcaccagctggaaaaggaattaacagaccagaaaagcaaactggaccaagtgctctcaaaggtgctggcagctgaagagcgtgttaggactctgcaggaagaggagaggtggtgtgagagcctggagaagacactctcccaaactaaacggcagctttcagaaagggagcagcaattggtggagaaatcaggtgagctgttggccctccagaaagaggcagattctatgagggcagacttcagccttctgcggaaccagttcttgacagaaagaaagaaagctgagaagcaggtggccagcctgaaggaagcacttaagatccagcggagccagctggagaaaaaccttcttgagcaaaaacaggagaacagctgcatacaaaaggaaatggcaacaattgaactggtagcccaggacaaccatgagcgggccaggcgcctgatgaaggagctcaaccagatgcagtatgagtacacggagctcaagaaacagatggcaaaccaaaaagatttggagagaagacaaatggaaatcagtgatgcaatgaggacacttaaatctgaggtgaaggatgaaatcagaaccagcttgaagaatcttaatcagtttcttccagaactaccagcagatctagaagctattttggaaagaaacgaaaacctagaaggagaattggaaagcttgaaagagaaccttccatttaccatgaatgagggaccttttgaagaaaaactgaacttttcccaagttcacataatggatgaacactggcgtggagaagcactccgggagaaactgcgtcaccgggaagaccgactcaaggcccaactccgacactgtatgtccaagcaagcagaagtattaattaaaggaaagcggcagacagagggcactttacacagtttgaggagacaagtagatgctttaggggaattggtcaccagcacctctgcagattcagcgtcatcacccagtctgtctcagctggagtcttccctcacagaggactctcaacttggacaaaatcaggaaaagaatgcctcagccagatgaggaatactgtcttgtgtaaatatattcaaggaaaacacctccactacctcactgacttcataattggaatgtcacatggtttttttaatcaagatgcagtgaactgagattctgaaactccactgtagtttactttgcctgtaccattaatgccaatgtttttataaatcacttgtacatagtacatatgggaatagttgcatatgggaatttaaaccaacatgtggctgagcctttttttttttaatcttcgtaacatgtttaaaaaaaaacagtgattttaactgcatatttgaacctacaaactggtaaatcttattaacaaaaagaatgtacttaaggccctctttatttatagtgtcgagttatttttgaattttgcttaaaatctatttttcatatgaaaataaaagataacaatc

SEQ ID NO: 724 - protein, 2325 aa, Homo sapiens
MKKGSQQKIFSKAKIPSSSHSPIPSSMSNMRSRSLSPLIGSETLPFHSGGQWCEQVEIADENNMLLDYQDHKGADSHAGVRYITEALIKKLTKQDNLALIKSLNLSLSKDGGKKFKYIENLEKCVKLEVLNLSYNLIGKIEKLDKLLKLRELNLSYNKISKIEGIENMCNLQKLNLAGNEIEHIPVWLGKKLKSLRVLNLKGNKISSLQDISKLKPLQDLISLILVENPVVTLPHYLQFTIFHLRSLESLEGQPVTTQDRQEAFERFSLEEVERLERDLEKKMIETEELKSKQTRFLEEIKNQDKLNKSLKEEAMLQKQSCEELKSDLNTKNELLKQKTIELTRACQKQYELEQELAFYKIDAKFEPLNYYPSEYAEIDKAPDESPYIGKSRYKRNMFATESYIIDSAQAVQIKKMEPDEQLRNDHMNLRGHTPLDTQLEDKEKKISAAQTRLSELHDEIEKAEQQILRATEEFKQLEEAIQLKKISEAGKDLLYKQLSGRLQLVNKLRQEALDLELQMEKQKQEIAGKQKEIKDLQIAIDSLDSKDPKHSHMKAQKSGKEQQLDIMNKQYQQLESRLDEILSRIAKETEEIKDLEEQLTEGQIAANEALKKDLEGVISGLQEYLGTIKGQATQAQNECRKLRDEKETLLQRLTEVEQERDQLEIVAMDAENMRKELAELESALQEQHEVNASLQQTQGDLSAYEAELEARLNLRDAEANQLKEELEKVTRLTQLEQSALQAELEKERQALKNALGKAQFSEEKEQENSELHAKLKHLQDDNNLLKQQLKDFQNHLNHVVDGLVRPEEVAARVDELRRKLKLGTGEMNIHSPSDVLGKSLADLQKQFSEILARSKWERDEAQVRERKLQEEMALQQEKLATGQEEFRQACERALEARMNFDKRQHEARIQQMENEIHYLQENLKSMEEIQGLTDLQLQEADEEKERILAQLRELEKKKKLEDAKSQEQVFGLDKELKKLKKAVATSDKLATAELTIAKDQLKSLHGTVMKINQERAEELQEAERFSRKAAQAARDLTRAEAEIELLQNLLRQKGEQFRLEMEKTGVGTGANSQVLEIEKLNETMERQRTEIARLQNVLDLTGSDNKGGFENVLEEIAELRREVSYQNDYISSMADPFKRRGYWYFMPPPPSSKVSSHSSQATKDSGVGLKYSASTPVRKPRPGQQDGKEGSQPPPASGYWVYSPIRSGLHKLFPSRDADSGGDSQEESELDDQEEPPFVPPPGYMMYTVLPDGSPVPQGMALYAPPPPLPNNSRPLTPGTVVYGPPPAGAPMVYGPPPPNFSIPFIPMGVLHCNVPEHHNLENEVSRLEDIMQHLKSKKREERWMRASKRQSEKEMEELHHNIDDLLQEKKSLECEVEELHRTVQKRQQQKDFIDGNVESLMTELEIEKSLKHHEDIVDEIECIEKTLLKRRSELREADRLLAEAESELSCTKEKTKNAVEKFTDAKRSLLQTESDAEELERRAQETAVNLVKADQQLRSLQADAKDLEQHKIKQEEILKEINKIVAAKDSDFQCLSKKKEKLTEELQKLQKDIEMAERNEDHHLQVLKESEVLLQAKRAELEKLKSQVTSQQQEMAVLDRQLGHKKEELHLLQGSMVQAKADLQEALRLGETEVTEKCNHIREVKSLLEELSFQKGELNVQISERKTQLTLIKQEIEKEEENLQVVLRQMSKHKTELKNILDMLQLENHELQGLKLQHDQRVSELEKTQVAVLEEKLELENLQQISQQQKGEIEWQKQLLERDKREIERMTAESRALQSCVECLSKEKEDLQEKCDIWEKKLAQTKRVLAAAEENSKMEQSNLEKLELNVRKLQQELDQLNRDKLSLHNDISAMQQQLQEKREAVNSLQEELANVQDHLNLAKQDLLHTTKHQDVLLSEQTRLQKDISEWANRFEDCQKEEETKQQQLQVLQNEIEENKLKLVQQEMMFQRLQKERESEESKLETSKVTLKEQQHQLEKELTDQKSKLDQVLSKVLAAEERVRTLQEEERWCESLEKTLSQTKRQLSEREQQLVEKSGELLALQKEADSMRADFSLLRNQFLTERKKAEKQVASLKEALKIQRSQLEKNLLEQKQENSCIQKEMATIELVAQDNHERARRLMKELNQMQYEYTELKKQMANQKDLERRQMEISDAMRTLKSEVKDEIRTSLKNLNQFLPELPADLEAILERNENLEGELESLKENLPFTMNEGPFEEKLNFSQVHIMDEHWRGEALREKLRHREDRLKAQLRHCMSKQAEVLIKGKRQTEGTLHSLRRQVDALGELVTSTSADSASSPSLSQLESSLTEDSQLGQNQEKNASAR

SEQ ID NO: 725 - DNA, 4106 bp, Homo sapiens
cccgggtactgccgctactgctgccggcgcgtctgcacctctcggcctgccagtgtacctgccggcgcctcggtcgaccgcccccgccccctctcccgctgcgtccgcactcctgttcctggtcctgacgcccccctcccgcccggaaagctgcccagccaccagcaaccccccagtgccaccatggcaactgcaccatacaactactcttacatctttaaatatattattattggggacatgggagtaggaaaatcttgcttgcttcatcaatttacagaaaaaaaatttatggctgattgtcctcacacaattggtgttgaatttggtacaagaataatcgaagttagtggccaaaaaataaaactgcagatttgggatacggcaggacaggagcgatttagggctgttacacggagctactacagaggagctgcgggagctcttatggtctatgatatcactagaagaagtacatataaccacttaagcagctggttgacagatgcaaggaatctcaccaatccaaatactgtaataattctcataggaaataaagcagatttggaggcacagagagatgttacatatgaagaagccaaacagtttgctgaagaaaatggcttattgttcctcgaagcgagtgcaaaaacgggagagaatgtagaagatgccttccttgaggctgccaagaaaatctatcagaacattcaggatggaagcttggatctgaatgctgctgagtctggtgtacaacacaaaccttcagccccgcagggaggccggctaaccagtgaaccccaaccccagagagaaggctgtggctgctagtgacctctttgctgtggcccctcatttgacctttcacctctgtctgttggaagcagtactttttactgcctcattgtcttctgtacatcttactgggtttaattaaaaaaaaagaaaaaactctgttgtaaaaacagtttaacacaatactaaactgctaaacaactagatgtaatcaggttatcaaaggcaagtagagtaataaatctctcctgcatggtaaatctagacttttttcccccttgtcctcgtgataagtatgtcaccaatatatgatttaaaccgagcactgatgctggacttcatgatttttaccctccctttggcaaggctttgtctcactgtacggtttaatttggtgatatcttaagcctttcttcccatccttaactgttcaagtatgtctgttgtaaccaataagtttattgctgtgaaattacttctgatggtagagaaggggttctataactgcttttgttttgttttggataaatttcctgttgtgtgggtggcatttttcttaacgagatttgcttctgtcttagcctcacacagggaaaatatccatttatcttctctctcgtgcttaattaatagctttatctttttttataccattttatccttttctctttaacagaaagtaaatatgtataaaatttgaaggaatcgaactaacaatacattctgtgtatattattttaatgaagaaaataaattgattactggcattggaacagtataaaataccagtttgtacagtatgacctatatgtgaccatgttactcccttccatttcacacaaagaaatagacacaactgcagttcacaagtagtactggctccaccccttggtgctggcagtgtttggggacattatgctggaaagagctcctagcatcagaggattaacactagcagattctgttccatctttgcactgttgcttacctgctgattttcttaactgttcttgtgcaatcgacaatgtgctaacctgcttttctctttttgtaaacgtttttgcattacaggctgcattcttgccttactgtatagaaaaagaaaaaaggctgggtttactattgcacattttaagcttttatacctttatcttcttggaatggtcagattctgaactggacagtcagaaccacaggtctgctgttaagggattttaaattgtgcatttttaaccctacagtgaaataacttaagatatccctgtgttcacagtgtgaggggctgttttatgtcatgttggcataaattgttttgtaaaagggaaagtgtttctaaaggtgtttcagcgcttgtgctgatacaaagtaagttattactttgcaccaggtggtttggccactgaattaatactgtatagcaagagaaacaatcttatttttttggacaacatgttttattaagttcttcatttctgttgattttttttattgcatttatgattcagtggctgggaattgagaatttatttgaaatagaataggtaacacctcagcgtactatagaaaatgcactcagctcaactgctgtgtttaaaatacacattttaaatccctctttacagacactaacataaaagtacatctttctgggttgtaaacatgtggtagtaccagagtattgtatagtcaatgttaaataaaagccaaaactggaatgtgcagaaagtaggctttggttaatttgtggattcatttttatttttgtctttgtttaactttttaaaaaataagatttctggagtagattggtatattctgttaaagacttacagtgatccattttgcttacactgttgcatcacaagggactcacccagggaccatgacctgctggtgtgtgtgtatatttacaaaaacaaaacaaacaaaccacccattgggatataaggtagcaatcacaaactaaagactgcggcttgttgaggtgcaataccctgactcccaaagttagttacagtgggttttattgtttttgtgactgaaggatttattcagactgctgtactcttcatttgatgtaacaaaatgctattaatctaaatatttgtaaataaagtacctgtatctagattaaattaaaattggttgcattattttctgaactataatagggtttttcttcaggtgaacaatttgacgtgtcatcagtttttattgcagcactgtccatattcattgtataaagagaggtctacgtatgtagcatataaaaccacatcactaagtaatagacccacagctttattcttgtgtttacattacccttgaaatgttttcagtcaacccttttcagtgtaagatcagcacatttggtggctgatgctgttctcctttgactgtaccgggagccagattctatcatatgcatgtgtaatcccctgtaatacactcaggtgctcacaaatagagcagattgtcatattgtaacatgcgtgtgccagacaccgggcagtacactttggaaagaatgtgaaatccttttaatttttaatccatagcttactgcttgtgcagtcacctgcctcttgaggttgctcattgcccttggacctgtgaggaggccttcagattagtaattggtgcttagtactatttatgcttaaatagatcttccagtacaatgttgaagtcttttttatggataataacgtgtttgatggagtaacttattatttttttttggttggtggtttacacgttaatagaggtagtacaatttctttggaaaggtgtcttttgaagccagctgttaagcttcatacattacctcccttctcaaattcggtaagacagtagttttggggaacttttttgcccatgtgtcttttaagtgtgattttaaaaaaatgagtggttcagttcattcccctaaacagaagaaaagaccaaataattaccttccattcctcttcatgtgggaatatagagagggttcatgtggcattttagagaaaagataatttatcctcattcaacacaggcccagaaaattgtgtcccagaaggatgtcagtaattgtgactaggccaggccttttagcattttgctaagacttgaaacaaaaaatgtaaatacaaaagaaatcaagttttgttttgaaagatgccttctagaacttactgtgtattaataaattgtcactttcattgtctttattgtaactccattgatcccgtatcttaacggttcacgtctagccaaataactgttttggaataaaaaccttggtggtgaaaaaaaaaaaaaaaaag

SEQ ID NO: 726 - protein, 215 aa, Homo sapiens
MATAPYNYSYIFKYIIIGDMGVGKSCLLHQFTEKKFMADCPHTIGVEFGTRIIEVSGQKIKLQIWDTAGQERFRAVTRSYYRGAAGALMVYDITRRSTYNHLSSWLTDARNLTNPNTVIILIGNKADLEAQRDVTYEEAKQFAEENGLLFLEASAKTGENVEDAFLEAAKKIYQNIQDGSLDLNAAESGVQHKPSAPQGGRLTSEPQPQREGCGC

SEQ ID NO: 727 - DNA, 2719 bp, Homo sapiens
acttaaggtcggcgacccgaggccgcggctgccgactgggtcccctgccgctgtcgccaccatggctccgcaccgccccgcgcccgcgctgctttgcgcgctgtccctggcgctgtgcgcgctgtcgctgcccgtccgcgcggccactgcgtcgcggggggcgtcccaggcgggggcgccccaggggcgggtgcccgaggcgcggcccaacagcatggtggtggaacaccccgagttcctcaaggcagggaaggagcctggcctgcagatctggcgtgtggagaagttcgatctggtgcccgtgcccaccaacctttatggagacttcttcacgggcgacgcctacgtcatcctgaagacagtgcagctgaggaacggaaatctgcagtatgacctccactactggctgggcaatgagtgcagccaggatgagagcggggcggccgccatctttaccgtgcagctggatgactacctgaacggccgggccgtgcagcaccgtgaggtccagggcttcgagtcggccaccttcctaggctacttcaagtctggcctgaagtacaagaaaggaggtgtggcatcaggattcaagcacgtggtacccaacgaggtggtggtgcagagactcttccaggtcaaagggcggcgtgtggtccgtgccaccgaggtacctgtgtcctgggagagcttcaacaatggcgactgcttcatcctggacctgggcaacaacatccaccagtggtgtggttccaacagcaatcggtatgaaagactgaaggccacacaggtgtccaagggcatccgggacaacgagcggagtggccgggcccgagtgcacgtgtctgaggagggcactgagcccgaggcgatgctccaggtgctgggccccaagccggctctgcctgcaggtaccgaggacaccgccaaggaggatgcggccaaccgcaagctggccaagctctacaaggtctccaatggtgcagggaccatgtccgtctccctcgtggctgatgagaaccccttcgcccagggggccctgaagtcagaggactgcttcatcctggaccacggcaaagatgggaaaatctttgtctggaaaggcaagcaggcaaacacggaggagaggaaggctgccctcaaaacagcctctgacttcatcaccaagatggactaccccaagcagactcaggtctcggtccttcctgagggcggtgagaccccactgttcaagcagttcttcaagaactggcgggacccagaccagacagatggcctgggcttgtcctacctttccagccatatcgccaacgtggagcgggtgcccttcgacgccgccaccctgcacacctccactgccatggccgcccagcacggcatggatgacgatggcacaggccagaaacagatctggagaatcgaaggttccaacaaggtgcccgtggaccctgccacatatggacagttctatggaggcgacagctacatcattctgtacaactaccgccatggtggccgccaggggcagataatctataactggcagggtgcccagtctacccaggatgaggtcgctgcatctgccatcctgactgctcagctggatgaggagctgggaggtacccctgtccagagccgtgtggtccaaggcaaggagcccgcccacctcatgagcctgtttggtgggaagcccatgatcatctacaagggcggcacctcccgcgagggcgggcagacagcccctgccagcacccgcctcttccaggtccgcgccaacagcgctggagccacccgggctgttgaggtattgcctaaggctggtgcactgaactccaacgatgcctttgttctgaaaaccccctcagccgcctacctgtgggtgggtacaggagccagcgaggcagagaagacgggggcccaggagctgctcagggtgctgcgggcccaacctgtgcaggtggcagaaggcagcgagccagatggcttctgggaggccctgggcgggaaggctgcctaccgcacatccccacggctgaaggacaagaagatggatgcccatcctcctcgcctctttgcctgctccaacaagattggacgttttgtgatcgaagaggttcctggtgagctcatgcaggaagacctggcaacggatgacgtcatgcttctggacacctgggaccaggtctttgtctgggttggaaaggattctcaagaagaagaaaagacagaagccttgacttctgctaagcggtacatcgagacggacccagccaatcgggatcggcggacgcccatcaccgtggtgaagcaaggctttgagcctccctcctttgtgggctggttccttggctgggatgatgattactggtctgtggaccccttggacagggccatggctgagctggctgcctgaggaggggcagggcccacccatgtcaccggtcagtgccttttggaactgtccttccctcaaagaggccttagagcgagcagagcagctctgctatgagtgtgtgtgtgtgtgtgtgttgtttcttttttttttttttacagtatccaaaaatagccctgcaaaaattcagagtccttgcaaaattgtctaaaatgtcagtgtttgggaaattaaatccaataaaaacattttgaagtgtgaaaaaaaaaaaaaaaaaaaaaaaaaaaaaaaaaaaaaaaaaaaaaaaaaaaaaaaaaaaaaaaaaaaaaa

SEQ ID NO: 728 - protein, 782 aa, Homo sapiens
MAPHRPAPALLCALSLALCALSLPVRAATASRGASQAGAPQGRVPEARPNSMVVEHPEFLKAGKEPGLQIWRVEKFDLVPVPTNLYGDFFTGDAYVILKTVQLRNGNLQYDLHYWLGNECSQDESGAAAIFTVQLDDYLNGRAVQHREVQGFESATFLGYFKSGLKYKKGGVASGFKHVVPNEVVVQRLFQVKGRRVVRATEVPVSWESFNNGDCFILDLGNNIHQWCGSNSNRYERLKATQVSKGIRDNERSGRARVHVSEEGTEPEAMLQVLGPKPALPAGTEDTAKEDAANRKLAKLYKVSNGAGTMSVSLVADENPFAQGALKSEDCFILDHGKDGKIFVWKGKQANTEERKAALKTASDFITKMDYPKQTQVSVLPEGGETPLFKQFFKNWRDPDQTDGLGLSYLSSHIANVERVPFDAATLHTSTAMAAQHGMDDDGTGQKQIWRIEGSNKVPVDPATYGQFYGGDSYIILYNYRHGGRQGQIIYNWQGAQSTQDEVAASAILTAQLDEELGGTPVQSRVVQGKEPAHLMSLFGGKPMIIYKGGTSREGGQTAPASTRLFQVRANSAGATRAVEVLPKAGALNSNDAFVLKTPSAAYLWVGTGASEAEKTGAQELLRVLRAQPVQVAEGSEPDGFWEALGGKAAYRTSPRLKDKKMDAHPPRLFACSNKIGRFVIEEVPGELMQEDLATDDVMLLDTWDQVFVWVGKDSQEEEKTEALTSAKRYIETDPANRDRRTPITVVKQGFEPPSFVGWFLGWDDDYWSVDPLDRAMAELAA

SEQ ID NO: 729 - DNA, 2685 bp, Homo sapiens
tcccgcccgcgccctgcccaccccggccgcgcgcaccacaacgcccccgccccgccgcccggaaccagctgagcgcagctggacccagcagccgctgtctccagtgccgcagcagcaggtagtgctcatagctctctttgtccagtgcttcggccttggtcccagcgccttcccacggagcagcactcttcaccctgcacagccttgttagcccaacagcatggtggtggaacaccccgagttcctcaaggcagggaaggagcctggcctgcagatctggcgtgtggagaagttcgatctggtgcccgtgcccaccaacctttatggagacttcttcacgggcgacgcctacgtcatcctgaagacagtgcagctgaggaacggaaatctgcagtatgacctccactactggctgggcaatgagtgcagccaggatgagagcggggcggccgccatctttaccgtgcagctggatgactacctgaacggccgggccgtgcagcaccgtgaggtccagggcttcgagtcggccaccttcctaggctacttcaagtctggcctgaagtacaagaaaggaggtgtggcatcaggattcaagcacgtggtacccaacgaggtggtggtgcagagactcttccaggtcaaagggcggcgtgtggtccgtgccaccgaggtacctgtgtcctgggagagcttcaacaatggcgactgcttcatcctggacctgggcaacaacatccaccagtggtgtggttccaacagcaatcggtatgaaagactgaaggccacacaggtgtccaagggcatccgggacaacgagcggagtggccgggcccgagtgcacgtgtctgaggagggcactgagcccgaggcgatgctccaggtgctgggccccaagccggctctgcctgcaggtaccgaggacaccgccaaggaggatgcggccaaccgcaagctggccaagctctacaaggtctccaatggtgcagggaccatgtccgtctccctcgtggctgatgagaaccccttcgcccagggggccctgaagtcagaggactgcttcatcctggaccacggcaaagatgggaaaatctttgtctggaaaggcaagcaggcaaacacggaggagaggaaggctgccctcaaaacagcctctgacttcatcaccaagatggactaccccaagcagactcaggtctcggtccttcctgagggcggtgagaccccactgttcaagcagttcttcaagaactggcgggacccagaccagacagatggcctgggcttgtcctacctttccagccatatcgccaacgtggagcgggtgcccttcgacgccgccaccctgcacacctccactgccatggccgcccagcacggcatggatgacgatggcacaggccagaaacagatctggagaatcgaaggttccaacaaggtgcccgtggaccctgccacatatggacagttctatggaggcgacagctacatcattctgtacaactaccgccatggtggccgccaggggcagataatctataactggcagggtgcccagtctacccaggatgaggtcgctgcatctgccatcctgactgctcagctggatgaggagctgggaggtacccctgtccagagccgtgtggtccaaggcaaggagcccgcccacctcatgagcctgtttggtgggaagcccatgatcatctacaagggcggcacctcccgcgagggcgggcagacagcccctgccagcacccgcctcttccaggtccgcgccaacagcgctggagccacccgggctgttgaggtattgcctaaggctggtgcactgaactccaacgatgcctttgttctgaaaaccccctcagccgcctacctgtgggtgggtacaggagccagcgaggcagagaagacgggggcccaggagctgctcagggtgctgcgggcccaacctgtgcaggtggcagaaggcagcgagccagatggcttctgggaggccctgggcgggaaggctgcctaccgcacatccccacggctgaaggacaagaagatggatgcccatcctcctcgcctctttgcctgctccaacaagattggacgttttgtgatcgaagaggttcctggtgagctcatgcaggaagacctggcaacggatgacgtcatgcttctggacacctgggaccaggtctttgtctgggttggaaaggattctcaagaagaagaaaagacagaagccttgacttctgctaagcggtacatcgagacggacccagccaatcgggatcggcggacgcccatcaccgtggtgaagcaaggctttgagcctccctcctttgtgggctggttccttggctgggatgatgattactggtctgtggaccccttggacagggccatggctgagctggctgcctgaggaggggcagggcccacccatgtcaccggtcagtgccttttggaactgtccttccctcaaagaggccttagagcgagcagagcagctctgctatgagtgtgtgtgtgtgtgtgtgttgtttcttttttttttttttacagtatccaaaaatagccctgcaaaaattcagagtccttgcaaaattgtctaaaatgtcagtgtttgggaaattaaatccaataaaaacattttgaagtgtgaaaaaaaaaaaaaaaaaaaaaaaaaaaaaa

SEQ ID NO: 730 - protein, 731 aa, Homo sapiens
MVVEHPEFLKAGKEPGLQIWRVEKFDLVPVPTNLYGDFFTGDAYVILKTVQLRNGNLQYDLHYWLGNECSQDESGAAAIFTVQLDDYLNGRAVQHREVQGFESATFLGYFKSGLKYKKGGVASGFKHVVPNEVVVQRLFQVKGRRVVRATEVPVSWESFNNGDCFILDLGNNIHQWCGSNSNRYERLKATQVSKGIRDNERSGRARVHVSEEGTEPEAMLQVLGPKPALPAGTEDTAKEDAANRKLAKLYKVSNGAGTMSVSLVADENPFAQGALKSEDCFILDHGKDGKIFVWKGKQANTEERKAALKTASDFITKMDYPKQTQVSVLPEGGETPLFKQFFKNWRDPDQTDGLGLSYLSSHIANVERVPFDAATLHTSTAMAAQHGMDDDGTGQKQIWRIEGSNKVPVDPATYGQFYGGDSYIILYNYRHGGRQGQIIYNWQGAQSTQDEVAASAILTAQLDEELGGTPVQSRVVQGKEPAHLMSLFGGKPMIIYKGGTSREGGQTAPASTRLFQVRANSAGATRAVEVLPKAGALNSNDAFVLKTPSAAYLWVGTGASEAEKTGAQELLRVLRAQPVQVAEGSEPDGFWEALGGKAAYRTSPRLKDKKMDAHPPRLFACSNKIGRFVIEEVPGELMQEDLATDDVMLLDTWDQVFVWVGKDSQEEEKTEALTSAKRYIETDPANRDRRTPITVVKQGFEPPSFVGWFLGWDDDYWSVDPLDRAMAELAA

SEQ ID NO: 731 - DNA, 3108 bp, Homo sapiens
gcctctggctcctcagggcattcccggcggctccgggtttggcaacgaggacgggggagtgcgactgcgtctcgggcagcatggccgagaagcggcacacacgggactccgaagcccagcggctccccgactccttcaaggacagccccagtaagggccttggaccttgcggatggattttggtggcgttctcattcttattcaccgttataactttcccaatctcaatatggatgtgcataaagattataaaagagtatgaaagagccatcatctttagattgggtcgcattttacaaggaggagccaaaggacctggtttgttttttattctgccatgcactgacagcttcatcaaagtggacatgagaactatttcatttgatattcctcctcaggagatcctcacaaaggattcagtgacaattagcgtggatggtgtggtctattaccgcgttcagaatgcaaccctggctgtggcaaatatcaccaacgctgactcagcaacccgtcttttggcacaaactactctgaggaatgttctgggcaccaagaatctttctcagatcctctctgacagagaagaaattgcacacaacatgcagtctactctggatgatgccactgatgcctggggaataaaggtggagcgtgtggaaattaaggatgtgaaactacctgtgcagctccagagagctatggctgcagaagcagaagcgtcccgcgaggcccgcgccaaggttattgcagccgaaggagaaatgaatgcatccagggctctgaaagaagcctccatggtcatcactgaatctcctgcagcccttcagctccgatacctgcagacactgaccaccattgctgctgagaaaaactcaacaattgtcttccctctgcccatagatatgctgcaaggaatcataggggcaaaacacagccatctaggctagtgtagagatgagcgctagccttccaagcatgaagtcggggaccaaattagcctttaactcataaagagagggtagggcttttctttttccatatgtcaattgtggtgttcccagaatgtatagcagttataaaaataggtgaaagaattgttagcttgtaaatactgagagattggtgatttatataaggtaatctgttagtcttaaaatagttaaaagtttgtatttttagattattatgtagtaggttagatccctcttgttttgacttccactgactcattctgaaccccctaagcacccaggccagaggcaagaacctgggctgtaactgccacctgacaccgctgactggctaaatgctttgcagaaagtgatgaccttacaccacaaccagcttctccaggtcatatgtgccttacctccagagagtctttttttttttttttctgagatggagtttcactcttgttgcccaggctggagtgcaatagcatgatctcggctcactgcaacctccgcctcctgggttcaagagattctcctgcctcagcctccccagtagctgggattacaggctcatgccaccatgcccagctaatttttgtattattattattgttttttagtagagacggggtttcaccatgttggccaggctagtcacgaactcctaacctcaggtgatccacccacctctgcctcccaaagtgctgggattacaggcatgagctaccacacctggtttggagagtcttaattaaggaaatttccctaatgttcatttattttctaaatccagaccgtgtttcagaataatccttacttgagagtagccattttcttgcctgtacttgtcagaactagaggaaatagccaagactaatgaaaaagattactctaacccttaaaagacttttaaattcactactagagtggtcattttaaaaatacatccatgttttaacttatttgagccttctttatgagtaaatgattcctccttgttctgtctttcaaaccagctaaatatttgtcacaaaagtgcttttttctcactgttgcctattttcatatatcaggttttaaatagttttaattttttaataaaattttctctacgttctatatgcaattgttatatatctatttgaatagctgaaggactaaaatacttttttaagagataacttcaggaaaccattatattttactatctgcatgctgttaactgtggtacactgtgaaatatgttgattacaaacccattcattacatagtataaggaattcacagtatattgactatatagtgtctaatgatcttgggcagatactgtcaaacttacaatatctatatagatgtaggtctttttaaatttacctagtcattcttctatcatgtatattgatgctgaaagaggaactggtcagctcctctggacaacaaattcttagtctataatattaggagacatcttctgttttgcaaatgtctgtgaatctgagcaacctggcattctgcttactggccagaaagctggcgggtgacatttgtaacatttcctctttgagactctgagttcacctagagaagtctaagcataacagctttctttcccagcacgagcctttatagctctctttagctcaaccactctgtccatccagccaatggatgtcccttcccctgtaccccaatttcaagcttattttaggaagccttgaactaccatgtatcctggctcctagctgagtttattagaggtatggagcagtgcaacttaaactcaagttgcacttacattttgaattttaaaatgatggttttatctgttgtgtgaagtggttcacccttgaggaccaggagcctccatatcctgactgaaaaccttttctgagacttagagtaacagtgcttttggttccttgagttctcctgtctccagataccaaatgaccttgacttttctgccttgtgaattcgtagtccaatcagctgaaattaaatcacttgggagggacgcatagaaggagctctaggaacacagtgccagtgcagaagtttctccaggtggcctccctttccaacaatgtacataataaagtgtatgcactttcactaataaaaaaaaaaaaaaaaaaaaaaaaaaaaaaaaaaa

SEQ ID NO: 732 - protein, 288 aa, Homo sapiens [sequence omitted]

SEQ ID NO: 733 - DNA, 2593 bp, Homo sapiens
gcctctggctcctcagggcattcccggcggctccgggtttggcaacgaggacgggggagtgcgactgcgtctcgggcagcatggccgagaagcggcacacacgggactccgaagcccagcggctccccgactccttcaaggacagccccagtaagggccttggaccttgcggatggattttggtggcgttctcattcttattcaccgttataactttcccaatctcaatatggatgtgcataaaggttattgcagccgaaggagaaatgaatgcatccagggctctgaaagaagcctccatggtcatcactgaatctcctgcagcccttcagctccgatacctgcagacactgaccaccattgctgctgagaaaaactcaacaattgtcttccctctgcccatagatatgctgcaaggaatcataggggcaaaacacagccatctaggctagtgtagagatgagcgctagccttccaagcatgaagtcggggaccaaattagcctttaactcataaagagagggtagggcttttctttttccatatgtcaattgtggtgttcccagaatgtatagcagttataaaaataggtgaaagaattgttagcttgtaaatactgagagattggtgatttatataaggtaatctgttagtcttaaaatagttaaaagtttgtatttttagattattatgtagtaggttagatccctcttgttttgacttccactgactcattctgaaccccctaagcacccaggccagaggcaagaacctgggctgtaactgccacctgacaccgctgactggctaaatgctttgcagaaagtgatgaccttacaccacaaccagcttctccaggtcatatgtgccttacctccagagagtctttttttttttttttctgagatggagtttcactcttgttgcccaggctggagtgcaatagcatgatctcggctcactgcaacctccgcctcctgggttcaagagattctcctgcctcagcctccccagtagctgggattacaggctcatgccaccatgcccagctaatttttgtattattattattgttttttagtagagacggggtttcaccatgttggccaggctagtcacgaactcctaacctcaggtgatccacccacctctgcctcccaaagtgctgggattacaggcatgagctaccacacctggtttggagagtcttaattaaggaaatttccctaatgttcatttattttctaaatccagaccgtgtttcagaataatccttacttgagagtagccattttcttgcctgtacttgtcagaactagaggaaatagccaagactaatgaaaaagattactctaacccttaaaagacttttaaattcactactagagtggtcattttaaaaatacatccatgttttaacttatttgagccttctttatgagtaaatgattcctccttgttctgtctttcaaaccagctaaatatttgtcacaaaagtgcttttttctcactgttgcctattttcatatatcaggttttaaatagttttaattttttaataaaattttctctacgttctatatgcaattgttatatatctatttgaatagctgaaggactaaaatacttttttaagagataacttcaggaaaccattatattttactatctgcatgctgttaactgtggtacactgtgaaatatgttgattacaaacccattcattacatagtataaggaattcacagtatattgactatatagtgtctaatgatcttgggcagatactgtcaaacttacaatatctatatagatgtaggtctttttaaatttacctagtcattcttctatcatgtatattgatgctgaaagaggaactggtcagctcctctggacaacaaattcttagtctataatattaggagacatcttctgttttgcaaatgtctgtgaatctgagcaacctggcattctgcttactggccagaaagctggcgggtgacatttgtaacatttcctctttgagactctgagttcacctagagaagtctaagcataacagctttctttcccagcacgagcctttatagctctctttagctcaaccactctgtccatccagccaatggatgtcccttcccctgtaccccaatttcaagcttattttaggaagccttgaactaccatgtatcctggctcctagctgagtttattagaggtatggagcagtgcaacttaaactcaagttgcacttacattttgaattttaaaatgatggttttatctgttgtgtgaagtggttcacccttgaggaccaggagcctccatatcctgactgaaaaccttttctgagacttagagtaacagtgcttttggttccttgagttctcctgtctccagataccaaatgaccttgacttttctgccttgtgaattcgtagtccaatcagctgaaattaaatcacttgggagggacgcatagaaggagctctaggaacacagtgccagtgcagaagtttctccaggtggcctccctttccaacaatgtacataataaagtgtatgcactttcactaaaaaaaaaaaaaaaaaa

SEQ ID NO: 734 - protein, 123 aa, Homo sapiens
MAEKRHTRDSEAQRLPDSFKDSPSKGLGPCGWILVAFSFLFTVITFPISIWMCIKVIAAEGEMNASRALKEASMVITESPAALQLRYLQTLTTIAAEKNSTIVFPLPIDMLQGIIGAKHSHLG

SEQ ID NO: 735 - DNA, 5472 bp, Homo sapiens
cccagacgctcatggagacagcctcggttcataaatcaggtggggccaggggctgggggcccacacgccatggagcccgactcccttctggaccaagacgactcctacgagtcgcctcaagaaaggccgggctctcggcgcagcctgcctggcagcctttccgagaagagccccagcatggagccctcggccgccacgccgttccgggtcacgggcttcctcagccgccgcctcaagggctccatcaagcgcaccaagagccagcccaagctggaccgcaaccacagcttccgccacatcctgccggggttccggagcgccgccgccgccgccgcggacaatgagaggtcccatctgatgccgaggctgaaggagtctcgctcccacgagtccctgctcagccccagcagtgcggtggaggcgctggacctcagcatggaggaagaggtggtcatcaagcccgtgcacagcagcatccttggccaggactactgcttcgaggtgacgacgtcatcaggaagcaagtgcttttcctgccggtctgcagctgagcgggataagtggatggagaacctccggcgagcggtgcatcccaacaaggacaacagccggcgtgtggagcacatcctgaagctgtgggtgatcgaggccaaggacctgccagccaagaagaagtacctgtgcgagctgtgcctggacgatgtgctctatgcccgcaccacgggcaagctcaagacggacaatgttttctggggcgagcacttcgagttccacaacttgccgcctctgcgcacggtcactgtccacctgtaccgggagaccgacaagaagaagaagaaggagcgcaacagttacctgggcctggtgagcctacctgctgcctcggtggccgggcggcagttcgtggagaagtggtacccggtggtgacgcccaaccccaagggcggcaagggccctggacccatgatccgcatcaaggcgcgctaccaaaccatcaccatcctgcccatggagatgtacaaagagttcgctgagcacatcaccaaccactacctggggctgtgtgcagccctcgagcccatcctcagtgccaagaccaaggaggagatggcatctgccctggtgcacatcctgcagagcacgggcaaggtgaaggacttcctgacagacctgatgatgtcagaggtggaccgctgcggggacaacgagcacctcatcttccgggagaacacactggccaccaaggccattgaggagtacctcaagctagtgggccagaagtacctgcaggacgccctaggtgagttcatcaaagcgctgtatgagtcagatgagaactgcgaagtggatcccagcaagtgctcggccgctgacctcccagagcaccagggcaacctcaagatgtgctgcgagctggccttctgcaagatcatcaactcctactgtgtcttcccacgggagttgaaagaggtgtttgcctcgtggaggcaggagtgcagcagtcgcggccgcccggacatcagtgagcggctcatcagcgcctccctcttcctgcgcttcctctgcccagccatcatgtcgccctcactcttcaacctgctgcaggagtaccctgatgaccgcactgcccgcaccctcaccctcatcgccaaggtcacccagaacctggccaactttgccaaatttggcagcaaggaggaatacatgtccttcatgaaccagttcctagagcatgagtggaccaacatgcagcgcttcctgctggagatctccaaccccgagaccctctccaatacagccggcttcgagggctacatcgacctgggccgcgagctctccagcctgcactcactgctctgggaggccgtcagccagctggagcagagcatagtatccaaactgggacccctgcctcggatcctgagggacgtccacacagcactgagcaccccaggtagcgggcagctcccagggaccaatgacctggcctccacaccgggctctggcagcagcagcatctcagctgggctgcagaagatggtgattgagaacgatctttccggtctgatagatttcacccggttaccgtctccaacccccgaaaacaaggacttgttttttgtcacaaggtcctccggggtccagccctcacctgcccgcagctcgagttactcggaagccaacgagcctgatcttcagatggccaacggtggcaagagcctctccatggtggacctccaggacgcccgcacgctggatggggaggcaggctccccggcgggccccgacgtcctccccacagatgggcaggccgctgcagctcagctggtggccgggtggccggcccgggcaaccccagtgaacctggcagggctggccacggtgcggcgggcaggccagacaccaaccacaccaggcacctccgagggcgcgccaggccggccccagctgttggcaccgctctccttccagaaccctgtgtaccagatggcggctggcctgccgctgtcaccccgtggccttggcgactcaggctctgagggccacagctccctgagctcacacagcaacagcgaggagttggcggctgctgccaagctgggaagtttcagcactgccgcggaggagctggctcggcggcccggtgagctggcacggcgacagatgtcactgactgaaaaaggcgggcagcccacggtgccacggcagaacagtgctggcccccagaggaggatcgaccagcctccgcccccacccccgccgccacctcctgccccccgcggccggacgccccccaacctgctgagcaccctgcagtacccaagaccctcaagcggaaccctggcgtcggcctcacctgattgggtgggccccagtacccgcctgaggcagcagtcctcttcctccaagggggacagcccagaactgaagccacgggcagtgcacaagcagggcccttcacctgtgagccccaatgccctggaccgcacagccgcttggctcttgaccatgaacgcgcagttgttagaagacgagggcctgggcccagaccccccccacagggataggctaaggagtaaggacgagctcagccaagcagaaaaggacctggcggtgctgcaggacaagctgcgaatctccaccaagaagctggaggagtatgagaccctgttcaagtgccaggaggagacgacgcagaagctggtgctggagtaccaggcacggctggaggagggcgaggagcggctgcggcggcagcaggaggacaaggacatccagatgaagggcatcatcagcaggttgatgtccgtggaggaagaactgaagaaggaccacgcagagatgcaagcggctgtggactccaaacagaagatcattgatgcccaggagaagcgcattgcctcgttggatgccgccaatgcccgcctcatgagtgccctgacccagctgaaagagagtatgcattagaaacaaaagcccgcttgctcgcttgctggaacacaggggccttttaagttgagcgtgcgcactgcatgggaaatagcggccctggaggatgttagacttgctccctctccaagacagcagcagcctgcacctgccccgtgtgtgtggccggcctcctcctcacccttcccggcccccggccaaggacccaggcgctgcatacaggggaggggcgcaccccacagctggggccggttttcctcagctctaggctgttctgtagcttatctgcccctcccccactttcaagacagatgagcaggagcttgggtctctctcggcccctgtctgttcccagcccctgcagattctgagcaaaggccctgggtaagaagggtgggagtggggcctttgccagcagagccagggcagggcgagctgcaggaatcacccctctgcccctgcagctggaatgtgccacagaggccccacctgaagggtggatgtgctggaggggtggcccagagccatactgcgtccaccctgagctcggggacaggtgacagtggctgctctgggaaggggcttttagatgtaacctacaattcagttaggctagagacagatgctggtggaggaagggctgggccaccagggatcacagaccacaggaagatgggaggtggaagcagaggccctgcccccaccccttcctgtctcactcttctgtcttgtccccacccatgcgccttcgtgcctgagaccagggtggccacacaggcagggcctggctccagtctcatcctcccattgcccagtgagccctgctcttctctccccagccccctcccaccgctgcctcgtagagtgacctcggacagagcccccctagcaatacagggaggctcccggggcctggacaggcgggctcggaggctacccgctgtggccggtgccagctgcccttgcagggtgggtgagctctcaggccgagagccttatttacctagtgcaaaaactgtaaaagtgtacagactcttcacagatttttatcttaattgcaagtctgccgattttgtaaatgttcttggtgtttgactgtaatgtaactatctcacctaatggttgtacatatcctttggtcctggtgctgccgagggctggccgggactgctgctctcccaagggttttattttatttctgaatctagagaacagtattgggcaggaggaaaaggcttggtgtctgcggggggtgtcttccctgcctgtggcatttgtgtgttggctttgcagctgctgtctgagtagtggccactggggtgccttcactgggccagtcaacggggggctcctgcccaggccacagagaacctgagttcccgggagctgggccctgcctgcagccagggctggggttgccagaggccctggagggaaggacagtccctgctggggaagaacagccccggggccccctggtcaccgagactcagcctctgctggagaaagccacgccctccctgctagcacagaggcctgactgacttttttgcttaacttccatgttctgggtgatggaaactgccaaacctcctgtcagtgaggactctttccgactgcccagaaagtgggggtggaggaccgaggctacagctccacacgccccggtcccccagagcatctgccccaggtacacctccccctgcgccccgcacgactgcgggagccagactgtccagggaaacagcctctctcttttctacacactcagccacaaagccccccagctcccacaccgcgtcccagctcccctcttttgtaagtatgtgaaaaggaaaaaatgcaaacgttggagtttgggctggagctcctccctccagctgcgacttttaactatgtaataatgtacagaggaagctgttggtgttctaagactctgtgtggctgtgcaatttctgtacatttgcaattagaaatattaaagatttatttagctattttaaaaaaaaaaaaaaaaaaaaa

SEQ ID NO: 736 - protein, 1132 aa, Homo sapiens
MEPDSLLDQDDSYESPQERPGSRRSLPGSLSEKSPSMEPSAATPFRVTGFLSRRLKGSIKRTKSQPKLDRNHSFRHILPGFRSAAAAAADNERSHLMPRLKESRSHESLLSPSSAVEALDLSMEEEVVIKPVHSSILGQDYCFEVTTSSGSKCFSCRSAAERDKWMENLRRAVHPNKDNSRRVEHILKLWVIEAKDLPAKKKYLCELCLDDVLYARTTGKLKTDNVFWGEHFEFHNLPPLRTVTVHLYRETDKKKKKERNSYLGLVSLPAASVAGRQFVEKWYPVVTPNPKGGKGPGPMIRIKARYQTITILPMEMYKEFAEHITNHYLGLCAALEPILSAKTKEEMASALVHILQSTGKVKDFLTDLMMSEVDRCGDNEHLIFRENTLATKAIEEYLKLVGQKYLQDALGEFIKALYESDENCEVDPSKCSAADLPEHQGNLKMCCELAFCKIINSYCVFPRELKEVFASWRQECSSRGRPDISERLISASLFLRFLCPAIMSPSLFNLLQEYPDDRTARTLTLIAKVTQNLANFAKFGSKEEYMSFMNQFLEHEWTNMQRFLLEISNPETLSNTAGFEGYIDLGRELSSLHSLLWEAVSQLEQSIVSKLGPLPRILRDVHTALSTPGSGQLPGTNDLASTPGSGSSSISAGLQKMVIENDLSGLIDFTRLPSPTPENKDLFFVTRSSGVQPSPARSSSYSEANEPDLQMANGGKSLSMVDLQDARTLDGEAGSPAGPDVLPTDGQAAAAQLVAGWPARATPVNLAGLATVRRAGQTPTTPGTSEGAPGRPQLLAPLSFQNPVYQMAAGLPLSPRGLGDSGSEGHSSLSSHSNSEELAAAAKLGSFSTAAEELARRPGELARRQMSLTEKGGQPTVPRQNSAGPQRRIDQPPPPPPPPPPAPRGRTPPNLLSTLQYPRPSSGTLASASPDWVGPSTRLRQQSSSSKGDSPELKPRAVHKQGPSPVSPNALDRTAAWLLTMNAQLLEDEGLGPDPPHRDRLRSKDELSQAEKDLAVLQDKLRISTKKLEEYETLFKCQEETTQKLVLEYQARLEEGEERLRRQQEDKDIQMKGIISRLMSVEEELKKDHAEMQAAVDSKQKIIDAQEKRIASLDAANARLMSALTQLKESMH

SEQ ID NO: 737 - DNA, 3500 bp, Homo sapiens
tgttcctcttctttcgtgttgtgtcagaagccatgatttccagtcttctcatctggaagatgaaggaaaagatagacccgaccccacagggttctgaggctcaaactgaaagcctggtggtggggcacctgtgacaggtcccatctgatgccgaggctgaaggagtctcgctcccacgagtccctgctcagccccagcagtgcggtggaggcgctggacctcagcatggaggaagaggtggtcatcaagcccgtgcacagcagcatccttggccaggactactgcttcgaggtgacgacgtcatcaggaagcaagtgcttttcctgccggtctgcagctgagcgggataagtggatggagaacctccggcgagcggtgcatcccaacaaggacaacagccggcgtgtggagcacatcctgaagctgtgggtgatcgaggccaaggacctgccagccaagaagaagtacctgtgcgagctgtgcctggacgatgtgctctatgcccgcaccacgggcaagctcaagacggacaatgttttctggggcgagcacttcgagttccacaacttgccgcctctgcgcacggtcactgtccacctgtaccgggagaccgacaagaagaagaagaaggagcgcaacagttacctgggcctggtgagcctacctgctgcctcggtggccgggcggcagttcgtggagaagtggtacccggtggtgacgcccaaccccaagggcggcaagggccctggacccatgatccgcatcaaggcgcgctaccaaaccatcaccatcctgcccatggagatgtacaaagagttcgctgagcacatcaccaaccactacctggggctgtgtgcagccctcgagcccatcctcagtgccaagaccaaggaggagatggcatctgccctggtgcacatcctgcagagcacgggcaaggtgaaggacttcctgacagacctgatgatgtcagaggtggaccgctgcggggacaacgagcacctcatcttccgggagaacacactggccaccaaggccattgaggagtacctcaagctagtgggccagaagtacctgcaggacgccctaggtgagttcatcaaagcgctgtatgagtcagatgagaactgcgaagtggatcccagcaagtgctcggccgctgacctcccagagcaccagggcaacctcaagatgtgctgcgagctggccttctgcaagatcatcaactcctactgtgtcttcccacgggagttgaaagaggtgtttgcctcgtggaggcaggagtgcagcagtcgcggccgcccggacatcagtgagcggctcatcagcgcctccctcttcctgcgcttcctctgcccagccatcatgtcgccctcactcttcaacctgctgcaggagtaccctgatgaccgcactgcccgcaccctcaccctcatcgccaaggtcacccagaacctggccaactttgccaaatttggcagcaaggaggaatacatgtccttcatgaaccagttcctagagcatgagtggaccaacatgcagcgcttcctgctggagatctccaaccccgagaccctctccaatacagccggcttcgagggctacatcgacctgggccgcgagctctccagcctgcactcactgctctgggaggccgtcagccagctggagcagagcatagtatccaaactgggacccctgcctcggatcctgagggacgtccacacagcactgagcaccccaggtagcgggcagctcccagggaccaatgacctggcctccacaccgggctctggcagcagcagcatctcagctgggctgcagaagatggtgattgagaacgatctttccggtctgatagatttcacccggttaccgtctccaacccccgaaaacaaggacttgttttttgtcacaaggtcctccggggtccagccctcacctgcccgcagctcgagttactcggaagccaacgagcctgatcttcagatggccaacggtggcaagagcctctccatggtggacctccaggacgcccgcacgctggatggggaggcaggctccccggcgggccccgacgtcctccccacagatgggcaggccgctgcagctcagctggtggccgggtggccggcccgggcaaccccagtgaacctggcagggctggccacggtgcggcgggcaggccagacaccaaccacaccaggcacctccgagggcgcgccaggccggccccagctgttggcaccgctctccttccagaaccctgtgtaccagatggcggctggcctgccgctgtcaccccgtggccttggcgactcaggctctgagggccacagctccctgagctcacacagcaacagcgaggagttggcggctgctgccaagctgggaagtttcagcactgccgcggaggagctggctcggcggcccggtgagctggcacggcgacagatgtcactgactgaaaaaggcgggcagcccacggtgccacggcagaacagtgctggcccccagaggaggatcgaccagcctccgcccccacccccgccgccacctcctgccccccgcggccggacgccccccaacctgctgagcaccctgcagtacccaagaccctcaagcggaaccctggcgtcggcctcacctgattgggtgggccccagtacccgcctgaggcagcagtcctcttcctccaagggggacagcccagaactgaagccacgggcagtgcacaagcagggcccttcacctgtgagccccaatgccctggaccgcacagccgcttggctcttgaccatgaacgcgcagttgttagaagacgagggcctgggcccagaccccccccacagggataggctaaggagtaaggacgagctcagccaagcagaaaaggacctggcggtgctgcaggacaagctgcgaatctccaccaagaagctggaggagtatgagaccctgttcaagtgccaggaggagacgacgcagaagctggtgctggagtaccaggcacggctggaggagggcgaggagcggctgcggcggcagcaggaggacaaggacatccagatgaagggcatcatcagcaggttgatgtccgtggaggaagaactgaagaaggaccacgcagagatgcaagcggctgtggactccaaacagaagatcattgatgcccaggagaagcgcattgcctcgttggatgccgccaatgcccgcctcatgagtgccctgacccagctgaaagagaggtacagcatgcaagcccgtaacggcatctcccccaccaaccccaccaaattgcagattactgagaacggcgagttcagaaacagcagcaattgttaacctgcctgaggagggaggaagctacccaaggagagggggactatggtggccaagggcagggtctcggcctggggaggcacccacggttgcagccccagcgcgggtgtcaggaggccgagcctcccctccctgccgctgtccaggaggcggccgca

SEQ ID NO: 738 - protein, 1065 aa, Homo sapiens
MPRLKESRSHESLLSPSSAVEALDLSMEEEVVIKPVHSSILGQDYCFEVTTSSGSKCFSCRSAAERDKWMENLRRAVHPNKDNSRRVEHILKLWVIEAKDLPAKKKYLCELCLDDVLYARTTGKLKTDNVFWGEHFEFHNLPPLRTVTVHLYRETDKKKKKERNSYLGLVSLPAASVAGRQFVEKWYPVVTPNPKGGKGPGPMIRIKARYQTITILPMEMYKEFAEHITNHYLGLCAALEPILSAKTKEEMASALVHILQSTGKVKDFLTDLMMSEVDRCGDNEHLIFRENTLATKAIEEYLKLVGQKYLQDALGEFIKALYESDENCEVDPSKCSAADLPEHQGNLKMCCELAFCKIINSYCVFPRELKEVFASWRQECSSRGRPDISERLISASLFLRFLCPAIMSPSLFNLLQEYPDDRTARTLTLIAKVTQNLANFAKFGSKEEYMSFMNQFLEHEWTNMQRFLLEISNPETLSNTAGFEGYIDLGRELSSLHSLLWEAVSQLEQSIVSKLGPLPRILRDVHTALSTPGSGQLPGTNDLASTPGSGSSSISAGLQKMVIENDLSGLIDFTRLPSPTPENKDLFFVTRSSGVQPSPARSSSYSEANEPDLQMANGGKSLSMVDLQDARTLDGEAGSPAGPDVLPTDGQAAAAQLVAGWPARATPVNLAGLATVRRAGQTPTTPGTSEGAPGRPQLLAPLSFQNPVYQMAAGLPLSPRGLGDSGSEGHSSLSSHSNSEELAAAAKLGSFSTAAEELARRPGELARRQMSLTEKGGQPTVPRQNSAGPQRRIDQPPPPPPPPPPAPRGRTPPNLLSTLQYPRPSSGTLASASPDWVGPSTRLRQQSSSSKGDSPELKPRAVHKQGPSPVSPNALDRTAAWLLTMNAQLLEDEGLGPDPPHRDRLRSKDELSQAEKDLAVLQDKLRISTKKLEEYETLFKCQEETTQKLVLEYQARLEEGEERLRRQQEDKDIQMKGIISRLMSVEEELKKDHAEMQAAVDSKQKIIDAQEKRIASLDAANARLMSALTQLKERYSMQARNGISPTNPTKLQITENGEFRNSSNC

SEQ ID NO: 739 - DNA, 2023 bp, Homo sapiens
cgagtgttggcggggactgagcctcctgcttgaggtagttgtttttactcccagtccccaggctcacgagccccacgcgcgctcaatctgccctcccgcttctcctcgccactccgagttctgcgccctcgagatccagcgcatccgcggggtgggcgggtcctggcggctctttgccctcttccaacatggccgccgctgcctctgtgacaggcagggtcacgtgggcagcctcgcctatgaggtcgctggggctcggccggcgattgtcccttcccggaccccgtctcgatgcggtgactgccgctgtcaacccgagcctgagcgatcatggcaacgggctcgggcggggaacgcgtggcagcggctgcagcggcggcagtttggtggcggactggggcggcggagcggcggcggcggcggcggtggcactggcactggccccggccctgagcaccatgcggcggggcagctccgagagcgagctggcggcccggtgggaggcggaggcggtggctgcggccaaagcggcggccaaagctgaggccgaggccacagcggagacggtggcggaacaggtccgcgtggacgcgggcgcggccggggaaccggagtgcaaggcaggggaggagcagcccaaggtcctggccccggccccggcgcagcccagtgcggctgaggaggggaacacccaggtccttcagcggccgccgcccacgctgcccccgtccaagccgaagccggtgcagggcctctgcccgcacgggaagccccgggacaagggccgaagctgcaagcggagctcgggccacggttccggcgagaacggctcccagcggccggtcaccgtggacagctccaaggccaggacctccctggatgccctgaagatcagcatccgccagctcaagtggaaggagttcccatttggccggcgcttgccttgtgacatctactggcatggagtttcatttcacgacaatgacatattctccggtcaagtgaacaagtttccaggcatgacggagatggtgcgtaaaattactctgagcagagcagtgagaaccatgcagaatctctttcctgaggagtacaacttctaccctcgctcatggattctgcctgacgagttccagctctttgttgctcaggttcaaatggtgaaagacgatgacccctcctggaagcccacttttatcgtgaaacctgatggtggttgtcagggtgatggaatctacctcattaaagaccccagtgacatccgcctggcagggaccctccagagcaggccagcggtggtccaggagtacatctgcaaacctctccttatcgacaagctcaagtttgatattcgtctgtatgtcttactcaagtccttagaccccttagagatttatatagccaaagacggactctctaggttttgtaccgagccatatcaggagcccacccccaaaaacctgcaccgcatctttatgcacttaaccaactattcactgaacatccacagcggcaacttcatccactcggacagtgctagcactggcagcaaaaggactttttccagcatcctttgtagactgtcttccaaaggcgttgacatcaagaaggtctggtctgacatcatctccgtggtgattaagacggtcatcgcgctgactccagagctcaaagtcttctaccagtcagacatccccacggggaggccgggccccacgtgcttccaggtaaccattgccagttcccagcctgcgtttccagccttgaccggcctcaagagggctctctggcttcgtgtaggatgagtgatcggggtgggatggccagaggaggggacagtgttggtggtgctgtgggcttgggtgttaaacctgggcccaacttccaagctttctgtttgctccctgtgtgatttggggcaagctacttcccctctgttacctgtaaaatgaaatgaagaatacctatcttaaaaggttcttgtaagaattaaatgagataacacatgtaaaaaaaaaaaaaa

SEQ ID NO: 740 - protein, 538 aa, Homo sapiens
MAAAASVTGRVTWAASPMRSLGLGRRLSLPGPRLDAVTAAVNPSLSDHGNGLGRGTRGSGCSGGSLVADWGGGAAAAAAVALALAPALSTMRRGSSESELAARWEAEAVAAAKAAAKAEAEATAETVAEQVRVDAGAAGEPECKAGEEQPKVLAPAPAQPSAAEEGNTQVLQRPPPTLPPSKPKPVQGLCPHGKPRDKGRSCKRSSGHGSGENGSQRPVTVDSSKARTSLDALKISIRQLKWKEFPFGRRLPCDIYWHGVSFHDNDIFSGQVNKFPGMTEMVRKITLSRAVRTMQNLFPEEYNFYPRSWILPDEFQLFVAQVQMVKDDDPSWKPTFIVKPDGGCQGDGIYLIKDPSDIRLAGTLQSRPAVVQEYICKPLLIDKLKFDIRLYVLLKSLDPLEIYIAKDGLSRFCTEPYQEPTPKNLHRIFMHLTNYSLNIHSGNFIHSDSASTGSKRTFSSILCRLSSKGVDIKKVWSDIISVVIKTVIALTPELKVFYQSDIPTGRPGPTCFQVTIASSQPAFPALTGLKRALWLRVG

SEQ ID NO: 741 - DNA, 1404 bp, Homo sapiens
gagctgctgtggcggcggcaacatggcggacgtgataaatgtcagtgtgaacctggaggccttttcccaggccattagtgccatccaggcgctgcgctccagcgtgagcagggtgttcgactgcctgaaggatgggatgcggaacaaggagacgctggagggccgggagaaggcctttattgcgcacttccaggacaacttacattcggtcaaccgggacctcaatgagctggaacgtctgagcaatctggtaggcaagccatctgagaaccatcctcttcataacagtgggctgttaagcctggatcctgtgcaggacaaaactcctctctatagtcaactccttcaagcatataagtggtcaaacaagttgcagtaccatgcaggactagcatctggccttttaaatcagcagtcattgaagcgttccgctaatcagatgggagtatctgccaaacgtagaccaaaggctcagcccacaactcttgtcctaccacctcaatatgttgatgatgtgatcagccgcattgacaggatgtttcctgaaatgtccatccacttatccagacccaatggaacatcagcaatgcttctggtgaccttgggaaaggtgttgaaagtgatcgtcgtcatgcggagcctgttcattgatcgaacaatagtaaagggatataacgagaatgtctacacagaagatggcaagcttgatatatggtccaaatccaactatcaagtattccagaaggtgacagaccatgccaccactgccctgctccactatcagctgccccagatgccggatgtcgtggtccgatccttcatgacctggttaagaagttacataaagctgttccaggccccgtgccagcgctgcgggaagtttctgcaggacggccttcccccgacatggagggatttccgaaccctcgaagccttccatgacacctgccggcagtagcccccacgctggccccagcctcagaccccacccagcaccttcccagacacgcaggaagcccacagaaggctcagctggttcctcactgcccagatgtgtacagctgctcctccctttcataaagcagcgccatgtgtgcagaggccactcttgaagagcagactccctctgtggctgatgggactaattattcccactagccagcggactgaaggcaaagaagacctttctagaacctggtagaaggaagctgtgcagcatgctcctcgtccatgtgtgtcggcagtgctggtgtctgtcgtctccgcgagctgttactggaatgagcccttgtgttcatgggtatcgtcatgcggggttcttgtgttttgtggggcttgggttttggtaacttatttttataagcaataaaccttttgtatcctgaaaaaaaaaaaaaaaaaaaa

SEQ ID NO: 742 - protein, 311 aa, Homo sapiens
MADVINVSVNLEAFSQAISAIQALRSSVSRVFDCLKDGMRNKETLEGREKAFIAHFQDNLHSVNRDLNELERLSNLVGKPSENHPLHNSGLLSLDPVQDKTPLYSQLLQAYKWSNKLQYHAGLASGLLNQQSLKRSANQMGVSAKRRPKAQPTTLVLPPQYVDDVISRIDRMFPEMSIHLSRPNGTSAMLLVTLGKVLKVIVVMRSLFIDRTIVKGYNENVYTEDGKLDIWSKSNYQVFQKVTDHATTALLHYQLPQMPDVVVRSFMTWLRSYIKLFQAPCQRCGKFLQDGLPPTWRDFRTLEAFHDTCRQ

SEQ ID NO: 743 - DNA, 2428 bp, Homo sapiens
ccatgctgaggccgcgagtcccgcctgaccccgtcgctgcctctccagggcttctctgggccgcgcctctgcagactgcgcagccatgctgcatctgctggcgctcttcctgcactgcctccctctggcctctggggactatgacatctgcaaatcctgggtgaccacagatgagggccccacctgggagttctacgcctgccagcccaaggtgatgcgcctgaaggactacgtcaaggtgaaggtggagccctcaggcatcacatgtggagacccccctgagaggttctgctcccatgagaatccctacctatgcagcaacgagtgtgacgcctccaacccggacctggcccacccgcccaggctcatgttcgacaaggaggaggagggcctggccacctactggcagagcatcacctggagccgctaccccagcccgctggaagccaacatcaccctttcgtggaacaagaccgtggagctgaccgacgacgtggtgatgaccttcgagtacggccggcccacggtcatggtcctggagaagtccctggacaacgggcgcacctggcagccctaccagttctacgccgaggactgcatggaggccttcggtatgtccgcccgccgggcccgcgacatgtcatcctccagcgcgcaccgcgtgctctgcaccgaggagtactcgcgctgggcaggctccaagaaggagaagcacgtgcgcttcgaggtgcgggaccgcttcgccatctttgccggccccgacctgcgcaacatggacaacctctacacgcggctggagagcgccaagggcctcaaggagttcttcaccctcaccgacctgcgcatgcggctgctgcgcccggcgctgggcggcacctatgtgcagcgggagaacctctacaagtacttctacgccatctccaacatcgaggtcatcggcaggtgcaagtgcaacctgcatgccaacctgtgctccatgcgcgagggcagcctgcagtgcgagtgcgagcacaacaccaccggccccgactgcggcaagtgcaagaagaatttccgcacccggtcctggcgggccggctcctacctgccgctgccccatggctctcccaacgcctgtgccgctgcaggttcctttggcaactgcgaatgctacggtcactccaaccgctgcagctacattgacttcctgaatgtggtgacctgcgtcagctgcaagcacaacacgcgaggtcagcactgccagcactgccggctgggctactaccgcaacggctcggcagagctggatgatgagaacgtctgcattgagtgtaactgcaaccagataggctccgtgcacgaccggtgcaacgagaccggcttctgcgagtgccgcgagggcgcggcgggccccaagtgcgacgactgcctccccacgcactactggcgccagggctgctaccccaacgtgtgcgacgacgaccagctgctgtgccagaacggaggcacctgcctgcagaaccagcgctgcgcctgcccgcgcggctacaccggcgtgcgctgcgagcagccccgctgcgaccccgccgacgatgacggcggtctggactgcgaccgcgcgcccggggccgccccgcgccccgccaccctgctcggctgcctgctgctgctggggctggccgcccgcctgggccgctgagccccgcccggaggacgctccccgcacccggaggccgggggtcccggggtcccggggcggggccggcgtccgaggccgggcggtgagaagggtgcggcccgaggtgctcccaggtgctactcagcagggccccccgcccggcccgcgctcccgcccgcactgccctccccccgcagcaggggcgccttgggactccggtccccgcgcctgcgatttggtttcgtttttcttttgtattatccgccgcccagttccttttttgtctttctctctctctcttttttttttttttttctggcggtgagccagagggtcgggagaaacgctgctcgccccacaccccgtcctgcctcccaccacacttacacacacgggactgtggccgacaccccctggcctgtgccaggctcacgggcggcggcggaccccgacctccagttgcctacaattccagtcgctgacttggtcctgttttctattctttatttttcctgcaacccaccagaccccaggcctcaccggaggcccggtgaccacggaactcaccgtctgggggaggaggagagaaggaaggggtggggggcctggaaacttcgttctgtagagaactatttttgtttgtattcactgtcccctgcaagggggacggggcgggagcactggtcaccgcgggggccgatggtggagaatccgaggagtaaagagtttgctcactgctgcaaaaaaaaaaaaaaaaaaaaaaaaaaaaaa

SEQ ID NO: 744 - protein, 530 aa, Homo sapiens
MLHLLALFLHCLPLASGDYDICKSWVTTDEGPTWEFYACQPKVMRLKDYVKVKVEPSGITCGDPPERFCSHENPYLCSNECDASNPDLAHPPRLMFDKEEEGLATYWQSITWSRYPSPLEANITLSWNKTVELTDDVVMTFEYGRPTVMVLEKSLDNGRTWQPYQFYAEDCMEAFGMSARRARDMSSSSAHRVLCTEEYSRWAGSKKEKHVRFEVRDRFAIFAGPDLRNMDNLYTRLESAKGLKEFFTLTDLRMRLLRPALGGTYVQRENLYKYFYAISNIEVIGRCKCNLHANLCSMREGSLQCECEHNTTGPDCGKCKKNFRTRSWRAGSYLPLPHGSPNACAAAGSFGNCECYGHSNRCSYIDFLNVVTCVSCKHNTRGQHCQHCRLGYYRNGSAELDDENVCIECNCNQIGSVHDRCNETGFCECREGAAGPKCDDCLPTHYWRQGCYPNVCDDDQLLCQNGGTCLQNQRCACPRGYTGVRCEQPRCDPADDDGGLDCDRAPGAAPRPATLLGCLLLLGLAARLGR

SEQ ID NO: 745 - DNA, 8192 bp, Homo sapiens
ggcttccgctggtggcctagagcggggcccggtatggaggtgggctagaggccgacgccagccagagagcgaaatgttcttttggggccagagtctgggcatatatgaatgcaaatccgtgttttgttcacaactaagcccagctgagacgatcacttttctgtaggccatttgtccaggtacagaatgagcacatgttgttggtgtacgccaggtggtgcttccaccattgacttcctaaagcgctatgcttccaacactccgtccggtgaatttcaaacagccgacgaagacctctgctactgcttggagtgtgtggctgagtaccacaaagcaagagatgaattgccattcttgcatgaggttttatgggaattagaaaccttacgtctcataaatcactttgaaaaatccatgaaggcagaaattggagatgatgatgagttatatatagtagacaataatggagagatgccactgtttgacatcactgggcaagactttgaaaataagcttcgagttcctcttcttgaaatactgaaatatccttacttgcttctacatgaacgtgttaacgagttatgtgttgaagcactttgtcggatggaacaagccaattgctcctttcaggtgtttgataaacatccagggatctatttgtttttagtccatcccaatgaaatggttcggcgttgggctatcttgactgcaagaaacttggggaaagtggacagagatgattattatgacttacaagaagttttactttgcctttttaaagtcattgagttggggcttttagagagtccagacatttatacttcttctgtcctagagaagggtaaactgattcttctgccctcacacatgtatgatactaccaactacaaaagctattggttaggtatttgcatgttgctgaccattcttgaggaacaagccatggattccctgttgttgggctcagacaaacaaaatgattttatgcaatcgatacttcacactatggagagggaagcagatgatgatagtgtggatcctttctggccagcgttacactgttttatggtgattctggatcgccttggatctaaggtctggggtcaacttatggatcctattgtggcatttcaaaccattatcaacaacgcaagctacaatagagagatccgacatatacggaacagctctgtaaggaccaagttagaaccggagtcctatctggatgatatggtgacttgcagccagatcgtatacaattacaatcctgaaaagaccaaaaaggattctggatggagaacagccatttgcccagattattgtcctaacatgtatgaagaaatggaaacattagccagtgtacttcagtcagatattggtcaagacatgcgtgttcataacagcacatttctatggttcatcccttttgtccagtccctcatggatcttaaggatttgggtgtggcttacatagcacaggttgttaatcatctgtactctgaagtcaaagaagtcctcaaccaaacagatgctgtgtgtgacaaagtcactgaattttttcttctaattttggtatcagtgattgaactgcatagaaataaaaaatgtttgcatttgctgtgggtaagttcccagcaatgggtggaagccgtcgtcaaatgtgccaagcttcctaccactgcgtttacacggagttctgagaaatcatctggaaattgctccaaaggaacagcaatgatatcttcactgtcattgcattccatgccatctaactctgtacaacttgcttatgtgcagctgattagaagtctccttaaagaaggttatcagcttgggcagcagtctctttgcaagcgattctgggataagctcaacttattccttagaggaaatttatctctaggttggcagttgactagtcaggaaacccatgagctacaaagttgcttaaagcaaattattagaaacataaaattcaaagcacctccatgtaacacttttgtggatctgacttctgcatgtaaaatctctcctgcatcttataataaagaagaaagtgaacaaatggggaagacgtctagaaaagatatgcattgtttggaagcttccagcccaacattttctaaagaaccaatgaaagtgcaagacagtgtatcgatcaaagcagataacactatagaaggtgacaataatgagcaaaattatataaaggatgtgaaactagaggaccatctcttagctgggtcatgcttaaagcagagtagtaaaaacatttttactgaaagagctgaagatcaaattaaaataagtacaaggaagcagaagtctgtaaaagagatctcttcatatacaccaaaggactgtacttcaagaaatggtccagaaaggggatgtgacagaggaataatagtatcaacacgtttgttgactgattctagcactgatgctttggaaaaagtgtccacatcgaatgaagatttctctttaaaggatgatgctcttgctaaaacctcaaaacgaaaaactaaggtacagaaagatgaaatctgtgcaaagttatcacatgtaataaagaagcaacacaggaagagtactttggtcgataatactatcaatttagatgaaaatttgactgtatctaacattgagagtttctattcaaggaaagatacaggagttcagaaaggagatggtttcatacacaatctttctttagaccctagtggtgttctggatgataagaatggagaacaaaaatctcaaaacaatgtattgccaaaagagaaacaattaaagaatgaagaattagttattttctctttccatgaaaacaattgtaaaatacaggaatttcatgttgatggtaaagaattgatcccttttacagaaatgaccaatgcttcagagaagaaatcatctccctttaaagatcttatgactgtacctgaatcaagagatgaggagatgagtaatagtaccagtgtgatttattctaacttgacaagagaacaggcccctgacatcagtcctaaatctgacaccttaacggattctcagatagacagagaccttcacaaattatctttactagctcaagccagtgttattacgttcccatccgattcacctcagaactcatcgcagctgcaaaggaaagtaaaagaagataaaagatgtttcacagctaaccaaaataatgttggagatacctcccgtggacaggttattattatttcagattctgatgatgatgatgatgaaagaatcctgagtcttgagaaactcactaaacaggacaaaatatgccttgagagggaacatccagagcagcacgtttcaacagttaatagtaaggaggaaaagaatccagtaaaggaagaaaagacagagactctttttcagtttgaggaatctgattctcagtgttttgagtttgaaagttcatctgaagtgttttcagtttggcaagatcatccagacgataataattcagttcaagatggtgagaaaaaatgtttggctcctatagccaatactacaaatggtcagggttgtacagattatgtatctgaagttgttaaaaaaggagcagagggcattgaagaacacacaagaccacggagtatttctgttgaagaattttgtgaaattgaagtaaaaaagcctaagagaaaacgatctgaaaaaccaatggctgaagatcctgtgaggccttcatcttctgtcagaaatgagggccagtctgatactaataagagagagcttgtgggaaatgattttaaaagtattgatagaaggacttcaactcccaattcacgtattcagagagccactacggtttcacaaaagaagtcttcaaagctttgtacttgtacagaacccatcaggaaagttccagtttctaagacccctaagaaaactcattcagatgccaaaaaaagacagaatagaagttcaaattacctaagttgtagaacaactcctgctatagtgccgccaaagaaatttcgtcagtgtcctgagccaacttcaacagctgagaaacttggcctgaaaaagggtcctcgtaaggcatatgagttgtcccagcggtctttggattatgtagctcaattacgtgatcatggcaaaactgttggagtagttgatacccgaaaaaagactaaattaatttctcctcagaacctgtctgtcagaaataataagaaacttctgactagtcaagaacttcagatgcaaaggcagatcagacccaaatcacaaaaaaatagacgaagactttctgattgtgaaagtacagatgttaaaagagcagggtcacatacagcacagaattctgacgtatttgtaccagaatctgataggtcagattataattgtacaggaggaactgaggtacttgccaacagtaacagaaaacagttaataaaatgcatgccttctgaaccagaaaccataaaagcaaaacatgggtctccagcaactgatgatgcttgccctttgaaccagtgtgattctgtagtgttaaatggaacagtaccaacaaatgaagtaattgtctccacttcagaagaccctctgggtggaggtgatccaacagcacgtcatatagagatggcagctttgaaagaaggagagcctgactccagcagtgatgcagaggaagataacttatttttaacccaaaatgatcctgaagatatggatttatgttcacaaatggagaatgacaattataaactcattgaactaattcatggaaaagatacagttgaggttgaagaagattctgtaagtcggcctcagttggaatctttgagtggcacaaagtgtaagtacaaagattgtcttgaaaccacaaaaaaccagggtgaatactgcccaaaacactctgaagtgaaagcagcagatgaagatgtatttcgtaaacctggcttgcctcctcctgcatctaaacctttgagacctaccactaagatttttagctcaaagagtacttcacgaattgctggtctttctaaatctttggaaacttcttcagcactttcaccgtctctaaaaaataagtcaaaggggatacagtcgattttgaaagtaccacagccagttcccctcatagctcagaagccagttggtgaaatgaagaattcgtgcaatgttcttcatcctcagtctccgaataattccaacaggcaaggttgcaaagttccatttggtgaaagcaaatattttccatcttcctctccagtaaacattcttttgtcatcacagtctgtctctgacaccttcgttaaagaggtcttaaaatggaaatatgaaatgtttttgaactttggtcagtgtgggccccctgcaagtctttgtcagtccatctcaagacctgtgcctgtcagatttcacaattatggagattattttaatgtttttttccctttgatggtattgaatacttttgaaacagtggcacaagaatggctcaactctccaaatagagagaatttctatcagttgcaagtacgaaaatttcctgccgattatataaaatactgggagtttgcagtttatctggaagaatgtgaactggctaaacagctttatccaaaggaaaacgatttggtgtttttagctcctgagagaataaatgaagagaagaaagatacaaagagaaatgacatacaagatctccacgaatatcattctggttatgttcataaatttcgccgcacgtcagtcatgcgtaatgggaaaactgagtgttacctttccatccagactcaagagaactttccggccaatttaaacgaacttgtgaattgtattgtaatcagttctctggtaactacacaaaggaagttgaaagccatgtctctgttgggtagtcggaaccaactggctagagctgttctgaatccaaaccctatggacttctgtacaaaagatttactgactacaacatctgagagaattattgcgtacttaagagatttcaatgaagatcaaaagaaagcaatagaaactgcatatgctatggtgaaacactcaccatcagttgccaaaatctgcttgattcatggaccacctggaacaggaaaatcaaaaactattgttggcctcctctatcgtctactgacagagaaccagaggaaggggcattcagacgaaaactccaatgccaaaatcaaacaaaaccgtgtcctcgtgtgtgcaccttccaatgcagctgttgatgaactcatgaaaaaaattatccttgaattcaaagaaaaatgtaaagacaagaagaatcctttaggaaactgtggagatataaatttagtacgactgggtccagaaaagtctattaatagtgaggttctaaagttcagtttggacagccaagtaaaccacagaatgaaaaaagagttaccttctcatgttcaggcgatgcataaaagaaaggaatttctagattatcagctggatgagctttcccggcagcgagctctatgccgaggtggacgggaaatacagaggcaagaattagatgaaaacatttccaaagtttctaaggaaaggcaggaacttgcttctaaaattaaagaggttcaaggacgcccacagaaaacacagagtatcatcatcttagagtcccatatcatctgctgcacgttgagcacaagtggtggtttactacttgagtctgctttccgtgggcaagggggtgtccccttcagctgtgtcattgttgatgaggctggacagtcttgtgaaattgagactcttactccactcatccatcgctgcaataagctcatcctagtaggagatcctaagcagctccctccgacagtcatctctatgaaagcacaggagtatggctacgaccagtcaatgatggctcgcttctgcagactgctggaagagaatgtagaacacaacatgatcagcaggctgcccattctacagctcactgttcagtacaggatgcatccagacatatgcctcttcccttctaattatgtttataacagaaacttaaaaacaaatagacagacagaagccattcgatgttcatcagattggccatttcagccataccttgtgtttgatgttggagatggttcagaaagacgggataatgactcatatataaatgttcaagaaataaaactggtgatggaaataattaagcttattaaagacaaaagaaaggatgttagttttcgaaacattggcataataactcattacaaggcccagaagacgatgattcagaaggatttggacaaagagttcgatagaaaaggaccagcagaagtagacactgtggatgcattccagggtcggcagaaggattgtgttattgttacgtgtgtcagagcaaatagcatccaaggttcaattggattcctggcaagtttgcagagattgaatgtcaccatcacacgagccaagtacagcctcttcatcctcggacatttgaggaccctgatggaaaaccagcattggaatcagctgattcaggatgctcagaagcgtggtgccattattaagacctgtgacaaaaactatagacatgatgcagtgaagattctgaaactcaagcctgtgctgcagagaagtctcactcaccctcctaccatagccccagaggggtccagaccccagggtggtttgcccagcagcaagctagacagtggatttgccaagacatctgttgctgcttctctataccacacaccctctgactccaaggaaattactcttactgttacttcaaaggaccctgaaagacctcctgttcatgaccaacttcaggacccacgactgctgaagaggatgggcattgaggtcaaaggaggaatattcctttgggatccacaaccctcgagcccccagcatcctggagcaacacctcctacgggcgagccgggcttccctgtcgttcaccaggacctgagccatatacagcagcccgctgctgtagtggctgctctgagcagccacaaacctcccgtgcggggcgaacctccagctgccagtcccgaggcttccacgtgtcagagcaaatgtgatgacccggaagaggagctctgtcacaggagagaggccagggctttcagtgaaggggagcaggagaagtgtggttccgagacccatcacaccaggaggaactctaggtgggacaagaggacactggagcaggaggacag

SEQ ID NO: 746 - protein, 2677 aa, Homo sapiens
MSTCCWCTPGGASTIDFLKRYASNTPSGEFQTADEDLCYCLECVAEYHKARDELPFLHEVLWELETLRLINHFEKSMKAEIGDDDELYIVDNNGEMPLFDITGQDFENKLRVPLLEILKYPYLLLHERVNELCVEALCRMEQANCSFQVFDKHPGIYLFLVHPNEMVRRWAILTARNLGKVDRDDYYDLQEVLLCLFKVIELGLLESPDIYTSSVLEKGKLILLPSHMYDTTNYKSYWLGICMLLTILEEQAMDSLLLGSDKQNDFMQSILHTMEREADDDSVDPFWPALHCFMVILDRLGSKVWGQLMDPIVAFQTIINNASYNREIRHIRNSSVRTKLEPESYLDDMVTCSQIVYNYNPEKTKKDSGWRTAICPDYCPNMYEEMETLASVLQSDIGQDMRVHNSTFLWFIPFVQSLMDLKDLGVAYIAQVVNHLYSEVKEVLNQTDAVCDKVTEFFLLILVSVIELHRNKKCLHLLWVSSQQWVEAVVKCAKLPTTAFTRSSEKSSGNCSKGTAMISSLSLHSMPSNSVQLAYVQLIRSLLKEGYQLGQQSLCKRFWDKLNLFLRGNLSLGWQLTSQETHELQSCLKQIIRNIKFKAPPCNTFVDLTSACKISPASYNKEESEQMGKTSRKDMHCLEASSPTFSKEPMKVQDSVSIKADNTIEGDNNEQNYIKDVKLEDHLLAGSCLKQSSKNIFTERAEDQIKISTRKQKSVKEISSYTPKDCTSRNGPERGCDRGIIVSTRLLTDSSTDALEKVSTSNEDFSLKDDALAKTSKRKTKVQKDEICAKLSHVIKKQHRKSTLVDNTINLDENLTVSNIESFYSRKDTGVQKGDGFIHNLSLDPSGVLDDKNGEQKSQNNVLPKEKQLKNEELVIFSFHENNCKIQEFHVDGKELIPFTEMTNASEKKSSPFKDLMTVPESRDEEMSNSTSVIYSNLTREQAPDISPKSDTLTDSQIDRDLHKLSLLAQASVITFPSDSPQNSSQLQRKVKEDKRCFTANQNNVGDTSRGQVIIISDSDDDDDERILSLEKLTKQDKICLEREHPEQHVSTVNSKEEKNPVKEEKTETLFQFEESDSQCFEFESSSEVFSVWQDHPDDNNSVQDGEKKCLAPIANTTNGQGCTDYVSEVVKKGAEGIEEHTRPRSISVEEFCEIEVKKPKRKRSEKPMAEDPVRPSSSVRNEGQSDTNKRELVGNDFKSIDRRTSTPNSRIQRATTVSQKKSSKLCTCTEPIRKVPVSKTPKKTHSDAKKRQNRSSNYLSCRTTPAIVPPKKFRQCPEPTSTAEKLGLKKGPRKAYELSQRSLDYVAQLRDHGKTVGVVDTRKKTKLISPQNLSVRNNKKLLTSQELQMQRQIRPKSQKNRRRLSDCESTDVKRAGSHTAQNSDVFVPESDRSDYNCTGGTEVLANSNRKQLIKCMPSEPETIKAKHGSPATDDACPLNQCDSVVLNGTVPTNEVIVSTSEDPLGGGDPTARHIEMAALKEGEPDSSSDAEEDNLFLTQNDPEDMDLCSQMENDNYKLIELIHGKDTVEVEEDSVSRPQLESLSGTKCKYKDCLETTKNQGEYCPKHSEVKAADEDVFRKPGLPPPASKPLRPTTKIFSSKSTSRIAGLSKSLETSSALSPSLKNKSKGIQSILKVPQPVPLIAQKPVGEMKNSCNVLHPQSPNNSNRQGCKVPFGESKYFPSSSPVNILLSSQSVSDTFVKEVLKWKYEMFLNFGQCGPPASLCQSISRPVPVRFHNYGDYFNVFFPLMVLNTFETVAQEWLNSPNRENFYQLQVRKFPADYIKYWEFAVYLEECELAKQLYPKENDLVFLAPERINEEKKDTKRNDIQDLHEYHSGYVHKFRRTSVMRNGKTECYLSIQTQENFPANLNELVNCIVISSLVTTQRKLKAMSLLGSRNQLARAVLNPNPMDFCTKDLLTTTSERIIAYLRDFNEDQKKAIETAYAMVKHSPSVAKICLIHGPPGTGKSKTIVGLLYRLLTENQRKGHSDENSNAKIKQNRVLVCAPSNAAVDELMKKIILEFKEKCKDKKNPLGNCGDINLVRLGPEKSINSEVLKFSLDSQVNHRMKKELPSHVQAMHKRKEFLDYQLDELSRQRALCRGGREIQRQELDENISKVSKERQELASKIKEVQGRPQKTQSIIILESHIICCTLSTSGGLLLESAFRGQGGVPFSCVIVDEAGQSCEIETLTPLIHRCNKLILVGDPKQLPPTVISMKAQEYGYDQSMMARFCRLLEENVEHNMISRLPILQLTVQYRMHPDICLFPSNYVYNRNLKTNRQTEAIRCSSDWPFQPYLVFDVGDGSERRDNDSYINVQEIKLVMEIIKLIKDKRKDVSFRNIGIITHYKAQKTMIQKDLDKEFDRKGPAEVDTVDAFQGRQKDCVIVTCVRANSIQGSIGFLASLQRLNVTITRAKYSLFILGHLRTLMENQHWNQLIQDAQKRGAIIKTCDKNYRHDAVKILKLKPVLQRSLTHPPTIAPEGSRPQGGLPSSKLDSGFAKTSVAASLYHTPSDSKEITLTVTSKDPERPPVHDQLQDPRLLKRMGIEVKGGIFLWDPQPSSPQHPGATPPTGEPGFPVVHQDLSHIQQPAAVVAALSSHKPPVRGEPPAASPEASTCQSKCDDPEEELCHRREARAFSEGEQEKCGSETHHTRRNSRWDKRTLEQEDSSSKKRKLL

SEQ ID NO: 747 - DNA, 2239 bp, Homo sapiens
atcctagcattatatctacagagcagaggcaggacctttggcaggagacacatcccttctcctgtgatgtgtcagttagtgtagagaagcaagctggcatggacttgagagccggggtgatgtctccagcggcagcgtgtcatcctggaggacattgtgtcagcagtgaagccctgcatccctgccagtcatcctgaaggacattgtgtcagtagtgaagccctgcgtccctgccagtccaggctttcttccttgtccttgccccgcctggtgaagctgacagacagagatgaaagcatggaaataaaaaagcaaattacagggatgagaagattgctgaacgacagcactgggcggatctatcagcgagttggcaaagaaggagagaaactaaaagaagagccccaggacctggatttagtctggcctccacgtttgaactcctctgctgaggccccgcaaagcctccacccgtcttcacgtggtgtgtggaatgagctaccgccccagagtggacagttctcagggcagtatggcacccgttctagaaccttccaaagccagccccaccctaccacgagctccaatggagaacttccagtggtgaattcatcagctggatcaaactgctgtacttgtaactgccagtcaacgttgcaggccattctacaagaactcaagaccatgaggaaattaatgcaaattcaagcagttggaactcaaaacagacaacaacctccaatttcccttatatgctcccagcgaactgctgtctcacgaaagagaaataaaaagaaaaaagtgcccccaaagactgtggaacctcttactgtgaaacagaagcccagtgggtcagagatggagaaaaagtcggtggtggcctctgagctatctgctctccaggcagccgagcacacctccccggaggagagccgcgttctaggattcggcattgttctggaatcaccttcctcagatccagaagtacaacttgctgaaggctttgacgtgtttatgcctaaatctcagctggactctatattgtcaaactacactcgctcaggaagccttctgtttagaaaactggtgtgtgcgttttttgatgacaagactttggctaactccttacccaatgggaagaggaaaagaggactcaatgacaaccggaaaggactagaccaaaatattgtgggtgcaataaaagtcttcacagaaaagtactgtacagctaaccatgtggataagcttcccggcccaagagattgggtgcagattctacaggatcaaattaaactggccagaagaaggttaaaaagaggctcagcagagatcgcggacagtgatgaaagactggacggcattgctctaccaccaacaggtgcttgtggtgggccctgcactgttctgccgggtgggagtgcagcggtgaccctagtcttgcagagctctcctcagacaatgtcacaagaaaagggacagatggcagaaccctgggaggagcagcatctcgtgctcctgaacaaccttaccagagacagagctgaaacaggagctttgtcccaaaccagccaagacttcaagcaccattcattcctcataactcaggtctcagctacacttcatcatcagagagggattcgcaactttcccgcgccaggctcagccaagtctcttacccttcacatctcttgcctctctctctgaaattatcttgcttatttatgtgtgtgtgtatcacccatctttccactggaatctgagccttgtgatgtcaggctgttaagatttcaggccctggtgaaaacatgttcaggatgccctctctcccctttgcccagcaagagtggactgattaaagttggacctgaggtttccatgaatatgcaaccgagtcattctgacgacagtgagtcctggcctcccagtgctgccagttaccagaagtgactccccttctcccatcagcccaaacccagagcctttatcacagaacccaagattgagaggagggtcaggctggttggacagtggccttatcatgggatggatggatcaggagccttttacagcgctctcctttccgctgcatcccattgtcttagatcacgtggacttgccttttcccctaataccgccccctcagtgctcttctataattggagaaattgtgtcaatagatcgaccaaagagatgcaggttgtactccatgagaatttaataaacgctagcgattcaaagc

SEQ ID NO: 748 - protein, 468 aa, Homo sapiens
MEIKKQITGMRRLLNDSTGRIYQRVGKEGEKLKEEPQDLDLVWPPRLNSSAEAPQSLHPSSRGVWNELPPQSGQFSGQYGTRSRTFQSQPHPTTSSNGELPVVNSSAGSNCCTCNCQSTLQAILQELKTMRKLMQIQAVGTQNRQQPPISLICSQRTAVSRKRNKKKKVPPKTVEPLTVKQKPSGSEMEKKSVVASELSALQAAEHTSPEESRVLGFGIVLESPSSDPEVQLAEGFDVFMPKSQLDSILSNYTRSGSLLFRKLVCAFFDDKTLANSLPNGKRKRGLNDNRKGLDQNIVGAIKVFTEKYCTANHVDKLPGPRDWVQILQDQIKLARRRLKRGSAEIADSDERLDGIALPPTGACGGPCTVLPGGSAAVTLVLQSSPQTMSQEKGQMAEPWEEQHLVLLNNLTRDRAETGALSQTSQDFKHHSFLITQVSATLHHQRGIRNFPAPGSAKSLTLHISCLSL

SEQ ID NO: 749 - DNA, 1711 bp, Homo sapiens
agcttccgccggaagcggctcctgtcagttgttctcaggtgtttgggcttgttgttccgtatactcagtgggttcgcggccgccggcccagtgaggctgggttcgaggagctggagcgggaaactggagcttaaattctggcggcgagatggacattctgaaatcagagatccttcggaagcggcagctggtggaggacaggaacctgctggtggaaaataaaaaatatttcaagcgtagtgagctcgccaaaaaagaagaggaagcatattttgaaagatgtggctacaagatacagccaaaagaggaggaccagaaaccattaacttcatcgaatccagtgttagaacttgaactggcagaggaaaaattacctatgacgctttctaggcaagaggtcatcagaagattgagagaaagaggagaaccaatcagactatttggagagactgattatgatgcttttcaacgtttaaggaaaatagagatcctcacaccagaagttaacaagggattgaggaatgatttgaaagcagccttggataagattgatcagcagtacctcaatgaaatcgtcggcggtcaggagcctggagaggaagacacacagaatgatctgaaagttcatgaggaaaacaccacaattgaagagttagaggcgcttggagagtccttagggaaaggcgatgatcataaagacatggacatcatcaccaaattcctgaagtttcttcttggcgtttgggctaaagaattgaatgccagagaagattatgtgaaacgcagtgtgcagggtaaactgaacagtgcgacccagaaacagaccgagtcctacctaagaccactttttagaaagctacggaaaaggaatcttcctgctgatattaaagaatcaataacggatattattaaattcatgttgcagagagaatacgtgaaggcaaatgatgcttatcttcagatggccattggaaatgcgccttggcccatcggtgtcactatggttggtatccatgccagaactggcagagaaaagattttttccaagcatgttgcacatgttttaaatgacgaaactcagcggaaatatattcagggattgaagaggttaatgaccatttgccagaaacactttcctacagacccatccaaatgtgtggagtacaatgcactgtgagatctgtgtatggtgtgttaataacaataagaaacttagggaagcaggctgtggacttctggaattaccaacaggaatgaggaaagaagaaaactggagtttccagtctctgagttctacctgatgtaactcttgattggttttaagaactttgttggccttcatttcatatctgactgcaagctgatttttctttcttgctttcattttaattagtccaaaattaagttttaaagatttttcctcacaatttaaatccatagacaacagaagggggtttaaaatgacctttttttcagttgacccgaaagttgtggttagatgattaaaaagaaacatttgaggatggacttaattatttcagtaaaatattataatttgcctattgtcttttatgtaatatttatataaaatatttttatatatttcaaaaacatgggaccattgaatgaaactttatagtccttaaatgttgctgaacttttgctgtcttgcaatagaatttgaatgtaaatattattactggtaaaaaaa

SEQ ID NO: 750 - protein, 342 aa, Homo sapiens
MDILKSEILRKRQLVEDRNLLVENKKYFKRSELAKKEEEAYFERCGYKIQPKEEDQKPLTSSNPVLELELAEEKLPMTLSRQEVIRRLRERGEPIRLFGETDYDAFQRLRKIEILTPEVNKGLRNDLKAALDKIDQQYLNEIVGGQEPGEEDTQNDLKVHEENTTIEELEALGESLGKGDDHKDMDIITKFLKFLLGVWAKELNAREDYVKRSVQGKLNSATQKQTESYLRPLFRKLRKRNLPADIKESITDIIKFMLQREYVKANDAYLQMAIGNAPWPIGVTMVGIHARTGREKIFSKHVAHVLNDETQRKYIQGLKRLMTICQKHFPTDPSKCVEYNAL

SEQ ID NO: 751 - DNA, 6816 bp, Homo sapiens
gaacgctcacagaacaggcagtgcaattccatgttcctcttaagtatgttagccctaccgggagctgagctggccagtctacttggagaggaaaagtagatctggggaaggtggaagggtcagttcctaagtgacttcctcctcggggatggtaagggcatttgctgatctccagtgactgcctggtgcctcatggtcagactcggctgtctcactcccagatatctgattttgcaaaaagggacacacctatctgcagcaaagaagacactgaccagattgcgagcggtgcttttggatgctctgtagccacccggggcccaggaggactgactcggcagcaggattcgtgcatgggaatcggagaccatggcagtgcagctggtgcccgactcagctctcggcctgctgatgatgacggagggccgccgatgtcaagtacatcttcttgatgacaggaagctggaactcctagtacagcccaagctgttggccaaggagcttcttgaccttgtggcttctcacttcaatctgaaggaaaaggagtactttggaatagcattcacagatgaaacgggacacttaaactggcttcagctagatcgaagagtattggaacatgacttccctaaaaagtcaggacccgtggttttatacttttgtgtcaggttctatatagaaagcatttcatacctgaaggataatgctaccattgagcttttctttctgaacgcgaagtcctgcatctacaaggagcttattgacgttgacagcgaagtggtgtttgaattagcttcctatattttacaggaggcaaagggagatttttctagcaatgaagttgtgaggagtgacttgaagaagctgccagcccttcccacccaagccctgaaggagcacccttccctggcctactgtgaagacagagtcattgagcactacaagaaactgaacggtcagacaagaggtcaagcaatcgtaaactacatgagcatcgtggagtctctcccaacctacggggttcactattatgcagtgaaggacaagcagggcataccatggtggctgggcctgagctacaaagggatcttccagtatgactaccatgataaagtgaagccaagaaagatattccaatggagacagttggaaaacctgtacttcagagaaaagaagttttccgtggaagttcatgacccacgcagggcttcagtgacaaggaggacgtttgggcacagcggcattgcagtgcacacgtggtatgcatgtccggcattgatcaagtccatctgggctatggccataagccaacaccagttctatctggacagaaagcagagtaagtccaaaatccatgcagcacgcagcctgagtgagatcgccatcgacctgaccgagacggggacgctgaagacctcgaagctggccaacatgggtagcaaggggaagatcatcagcggcagcagcggcagcctgctgtcttcaggttctcaggaatcagatagctcgcagtcggccaagaaggacatgctggctgccttgaagtccaggcaggaagctctggaggaaaccctgcgtcagaggctggaggaactgaagaagctgtgtctccgagaagctgagctcacgggcaagctgccagtagaatatcccctggatccaggggaggaaccacccattgttcggagaagaataggaacagccttcaaactggatgaacagaaaatcctgcccaaaggagaggaagctgagctggaacgcctggaacgagagtttgccattcagtcccagattacggaggccgcccgccgcctagccagtgaccccaacgtcagcaaaaaactgaagaaacaaaggaaaacctcgtatctgaatgcactgaagaaactgcaggagattgaaaatgcaatcaatgagaaccgcatcaagtctgggaagaaacccacccagagggcttcgctgatcatagacgatggaaacattgccagtgaagacagctccctctcagatgcccttgttcttgaggatgaagactctcaggttaccagcacaatatcccccctacattctcctcacaagggactccctcctcggccaccgtcgcacaacaggcctcctcctccccagtccctggagggactccgacagatgcactatcaccgcaacgactatgacaagtcacccatcaagcccaaaatgtggagtgagtcctctttagatgaaccctatgagaaggtcaagaagcgctcctctcacagccattccagcagccacaagcgcttccccagcacaggaagctgtgcggaagccggcggaggaagcaactccttgcagaacagccccatccgcggcctcccgcactggaactcccagtccagcatgccgtccacgccagacctgcgggtccggagtccccactacgtccattccacgaggtcggtggacatcagccccacccgactgcacagcctcgcactgcactttaggcaccggagctccagcctggagtcccagggcaagctcctgggctcggaaaacgacaccgggagccccgacttctacaccccgcggactcgtagcagcaacggctcagaccccatggacgactgctcgtcgtgcaccagccactcgagctcggagcactactacccggcgcagatgaacgccaactactccacgctggccgaggactcgccgtccaaggcgcgccagaggcagaggcagcggcagcgggcggcgggcgcactgggctcagccagctcgggcagcatgcccaacctggcggcgcgcgggggtgcggggggcgcggggggcgcggggggcggtgtgtacctgcacagccagagccagcccagctcgcagtaccgcatcaaggagtacccgctgtacatcgagggcggcgccacgcccgtggtggtgcgcagcctggagagcgaccaggagtgccactacagcgtcaaggctcagttcaagacgtccaactcctacacggcgggcggcctgttcaaggagagctggcgcggcggcggcggcgacgagggcgacacgggccgcctgacgccgtcgcgatcgcagatcctgcggactccgtcgctgggccgcgagggcgcccacgacaagggcgcgggccgtgccgccgtctcagacgagctgcgccagtggtaccagcgttccaccgcctcgcacaaggagcacagccgcctgtcgcacaccagctccacctcctcggacagcggctcgcagtacagcacctcctcccagagcaccttcgtggcgcacagcagggtcaccaggatgccccagatgtgcaaggccacgtcagctgccttacctcaaagccagagaagctcgacaccgtcaagtgaaattggagccacccccccaagcagcccccaccacatcctaacctggcagactggagaagcaacagaaaactcacccattctggatgggtctgagtctccacctcaccaaagtactgatgaatagaggagctacaatgatagctgtttcctggattcctccctctatccagaactagctgatgtccagtggtacgggcaggaaaaagccaagcccgggaccctcgtgtgagccagcccggcctaatctgaccgcctcaacgccattctgagatcacctcactgcctctcatttgccttacccagacgcaccgtcaccctgcaccagctttggccctcagcactttttttctcctgtctccgcattccctcccccttgaaaacctgactgaggagacattctggaaggttccggtcccactgtgtgtcccctggcgctcttgcccatagagagccagacaccaatcctcaatggcaccttggtggcttccctctgccatgacagcccctaggccaggaaccatcaggggggccagccggcatccaattcctgcggataagtagcgttgggagagaacgggaaaggggacttgggttacagggtgacccagaaagacgattcagctgtgtccagcctgccacccatacgtaggccaaccaagcacttcatgaagaggaggcctcgtggcatattcagtttacacctgaaatattccttgatgggacagcttgtggggatggctatgggggaaggggaggttgagaaaggaagttctcgacaccagaaatgcatcggaggaccacaatcagttctatgctgccaaagattaaaaataaataaaaacataaaaaattaagaggggccaagaggaagacattctttctgcaaggaaatttcttttaaattctgaactgctactacacacaagtgaaagtcaaccctatgtaaactggtgtcctctctctagccctctcccttactggcccacttctctctccgtagagagcctgaaaaactgccccaatgccacggtaaaggcgaggaagtcttggctggcgttgctgactcacagtcgccatccatctggacacaaagagagacctgtgggagtcatagagggtactgttagccccggtccatgcagggggttcagccgagcccaagactcaaagctgctttcctttcaggatttgtagtaacgtaaggtgataatggccaaaagtggttctctctcattaaaccaaccagtaaaagcgtatcctatttttttgcataaggtgtttcattttcgtttttatgggaaaccaagggaaaagcacattgcgatccattcagtgtttaactgtcgtggctcattttctgttcgttagcacttgtgtgacaaaagagctcagatccgacttctcctatgtgtcacttattccaagaacccaactatgcccttaggtagaaagatttgactcgtgtgtctactagccaacaggcagagcagggttgaaaaaaatatcagctcccaaagggcccatgtgtctacatcatcagttactgtcatgcaccacatttgtgtgcagataccaaaagaggaggaaagaagaaaaaaattaatgtgtgggagctgcacgtttacatgttttgagctatgcttcaaacacaactggaaagccatcaatcttcaaaggcctcaaaaatacttttatagtaacaagtgcacgactttagttgggttattcaagatggcacaaaaaggtttccgcagaggtggtatgctgtgcttttggcgcaagtggtggggggatgggggtgggggtggaatttttttctcactctaatgacttcctattggaaaggcattgacagccagggacaggagccagggtgggggtagttttgtgggaaagcagaactgaagttagcttaagcataaaaacaaagaaaaatcttcgcttttcatgtatgtggaatccaagaataaccataggctctaccagaccaggagggtaaggatggacactaaaatgaaacaaataccaaggtattccttctgctgcagcctggagaccaccgagagtcgagctggggcacacacacacctggccgggacccggcagggacaaggcgggccgtggcctcctccaccaagtctctctagacaattcagggcctgctttccccagctccatgcatggctggactggtgattccagggtgcagaagggattcatattcccagaacgctttaagtgtacacctgcaggataaagagataccggttacattattaaatgattctagggattcactgggggatatttttgttgcttttactttcatggttagagctacaaagaacagtgattttttttttttctcccttccccattcagaaacattatacattgggccatttttctttctcccaaagaagattcatggatagtcagactgaactgtgtgcaacaggaaaagtcaaaagggaaaaggcagctgatgaggttacatggttacatgttctacatcatgcagagtagcttgaaatctagtctggagaaaactggatcaagattctagcccactggagttgcaaggaatgagaggcaaaaattctaaagatttgggttatattttcaacttgggggacagagagaaatggagagcaggaattacagttccaacaaacatcatgatagtctggtagtcaagacagagattaagtaaaacaggttttactgtttagctgagttcagttaatacaaaatgtacataaaacgttagtcctttgagactgacatgattaatgatcagtgtggtgggaaatgatgtagttattgtacacaagcacttgcaaactctttatccctatttctttaaaacaaaataaggtgaaatacgaagtccttggtctgatataaagcccctattggattcttcggatgcgtaaaagaaattgcctgtttcagccagaagactggtgaaaacacatacatcagactatgttgtgagccaggttgattttttattttattatatgcaggtgagtgttgaaactgttaaaattccaatttgttttcattcagtattagtttagttctaaatatagcaaaccccatccaggtgctatcagatgaccagttactgcttagttaactaggtgtaaagttttacatatacattaatttcaatagtttattacaagttgtgtaaaatggactctagtttaataatgggggaaaaaagattaggttgctcctgaaactgactgtagagcatgtaaaatgattttactggattctgttcaactgtaatcaatgaaaaagatgtacgttgtagacaaagttgcagaattaaaaaaagaaatctgcttttaatttattctttttgtattaagaatttgtatagtatctttacattttgcaaaacagtgttgtcaacacttattaaagcattttcaaaatg

SEQ ID NO: 752 - protein, 1039 aa, Homo sapiens
MAVQLVPDSALGLLMMTEGRRCQVHLLDDRKLELLVQPKLLAKELLDLVASHFNLKEKEYFGIAFTDETGHLNWLQLDRRVLEHDFPKKSGPVVLYFCVRFYIESISYLKDNATIELFFLNAKSCIYKELIDVDSEVVFELASYILQEAKGDFSSNEVVRSDLKKLPALPTQALKEHPSLAYCEDRVIEHYKKLNGQTRGQAIVNYMSIVESLPTYGVHYYAVKDKQGIPWWLGLSYKGIFQYDYHDKVKPRKIFQWRQLENLYFREKKFSVEVHDPRRASVTRRTFGHSGIAVHTWYACPALIKSIWAMAISQHQFYLDRKQSKSKIHAARSLSEIAIDLTETGTLKTSKLANMGSKGKIISGSSGSLLSSGSQESDSSQSAKKDMLAALKSRQEALEETLRQRLEELKKLCLREAELTGKLPVEYPLDPGEEPPIVRRRIGTAFKLDEQKILPKGEEAELERLEREFAIQSQITEAARRLASDPNVSKKLKKQRKTSYLNALKKLQEIENAINENRIKSGKKPTQRASLIIDDGNIASEDSSLSDALVLEDEDSQVTSTISPLHSPHKGLPPRPPSHNRPPPPQSLEGLRQMHYHRNDYDKSPIKPKMWSESSLDEPYEKVKKRSSHSHSSSHKRFPSTGSCAEAGGGSNSLQNSPIRGLPHWNSQSSMPSTPDLRVRSPHYVHSTRSVDISPTRLHSLALHFRHRSSSLESQGKLLGSENDTGSPDFYTPRTRSSNGSDPMDDCSSCTSHSSSEHYYPAQMNANYSTLAEDSPSKARQRQRQRQRAAGALGSASSGSMPNLAARGGAGGAGGAGGGVYLHSQSQPSSQYRIKEYPLYIEGGATPVVVRSLESDQECHYSVKAQFKTSNSYTAGGLFKESWRGGGGDEGDTGRLTPSRSQILRTPSLGREGAHDKGAGRAAVSDELRQWYQRSTASHKEHSRLSHTSSTSSDSGSQYSTSSQSTFVAHSRVTRMPQMCKATSAALPQSQRSSTPSSEIGATPPSSPHHILTWQTGEATENSPILDGSESPPHQSTDE

SEQ ID NO: 753 - DNA, 6196 bp, Homo sapiens
atgccaagaactggagctcaggatggagcatggatccaaaagcaggttgtttttgaaggtcaaatggcttcaacgtatgaacaggatgaagtcattgctattgatgatatatctttcagttcaggctgcttgcctgccaatgatggaattttactgtgtcaagaagcattgaatgctgagcgggagctatgccatccagatacagatctctgcagatttgatgctacagatgaagagttgagattgtgtcaggcctgtgggtttgaatttgacatgtgtgagtggacgtcagaagcatctgctggccaaatttcctggatgcgcacaaaagcgagagagatccctgcattcgaatccacacctcagcaggatcaaggaggtgatgatgaaggttattatgtatgggtaggcgctaagcatggtttcactcttaaccatttagacagcagggcttacctaaatagctctgtgtgtcattgcctgggcaagagctgtcatcttcaattctattatgcaatggaaagcagtgtcctgagagtaagactgtataataataagatgcgatcaaaagtagtgaaactcaacaacattgactttggtacccttgatttcttcactggaagagaaaagcatagactggcatctctaagagatagagtgttaataaatatgttaaatatttttcttgaaagctttttcaattttactaccaagactttagatttcctagtactttatatcatacaggaagaagaaatattttggacatacaacatatcaactcacagccaatgggtgaaagcagatgtgttaataccagaagatctgaagacatttaagattatttttgaagggactcttttgagccagagaagttttattgcccttgatcacctctgggtctatgcctgtggacagacccaatccagaaagctttgctctgcagacgaattcccttgcactagtggccagtgcatcgccaaagaatctgtctgtgactctcggcaggactgctccgatgagagtgatgaagacccagcaacttgctcaaagcatctcacctgtgactttgagtcgggtttctgcggttgggagccatttctcacagaagattcacactggaagctgatgaaaggattgaataatggagagcaccactttcctgcagctgatcacacagcaaacataaatcatggatcgtttatttatttggaggcacagcgctcccccggggtggccaagcttggaagtcctgttcttacaaaattgctcactgcctctaccccatgtcaggtgcagttttggtatcatttgtctcaacattcaaatctctcagtttttacaagaacgtctctagatggaaacttgcaaaagcagggcaaaataatcagattctccgaatctcagtggagccacgcaaaaattgatctcattgcagaagcgggagaatctactctaccttttcagttaattttggaagctactgttttgtcgtcaaatgctaccgttgctctagatgacatcagtgtgtcccaggaatgtgaaatttcctataaatcactaccaaggaccagtacacaaagcaagttttccaagtgtgactttgaagcaaacagctgtgattggtttgaagcaattagtggtgaccattttgactggatacggagctctcagagtgaactttctgctgattttgagcaccaggctccacctcgggatcatagtctcaacgcatctcaagggcattttatgttcattctgaagaaaagcagcagcttgtggcaagttgctaagcttcagagcccaactttcagccagacaggacctggatgcatactttccttctggttctataactatggcctgtcagtgggagcagctgagctgcagctacatatggaaaattctcatgactcaacagtgatttggagagtattatacaatcagggcaaacaatggttggaggcaaccattcagctagggcgcctttcgcagcccttccatttgtcactagataaagtcagtctgggcatttatgatggggtctcagctattgatgacatccgatttgaaaattgtactctccctcttcctgctgagagctgtgaagggctggatcatttctggtgtcgccacaccagggcttgcatagaaaagcttcggttatgtgatctggtggatgactgtggtgatcgtactgatgaagtcaactgtgcacctgagctgcagtgtaactttgaaactggaatctgtaactgggaacaagatgcaaaagatgactttgattggaccaggagccagggtccaactccaacacttaacacagggccaatgaaagataacactctgggcacagctaaaggacactatctctacatagaatcttcagagccacaggcttttcaagacagtgctgccttactcagcccaatccttaatgccactgatacaaaaggctgcaccttccgcttctattaccacatgtttggaaagcgcatttataggttggcaatctaccaacgaatctggagtgactcaaggggacagctgctgtggcagatatttgggaatcaaggcaacagatggattaggaaacacctcaacatttccagcaggcagccctttcagatattggtggaggcttcagtgggagatggcttcactggagatattgcgattgatgatctgtcatttatggactgcaccctctaccctggtaatttgccagcagacctcccaactccaccagaaacgtcagttcctgtaacattacctccacacaactgcacagacaatgaatttatctgcaggtctgatggtcactgcattgaaaaaatgcagaaatgtgattttaaatatgactgccctgacaaatcagatgaagcatcctgtgttatggaagtttgcagctttgagaaaagaagcctgtgtaaatggtatcaaccaatcccagtacatttgcttcaagattcaaacacattcaggtgggggcttgggaacgggatcagcattcatcatggggaagaaaaccacaggccatcagtggatcatacacaaaataccactgatggctggtacctgtatgctgacagttctaatgggaaatttggtgacacggctgacattctcactcctatcatttcactcacgggaccaaaatgtaccttggtgttctggacacatatgaatggggccaccgttggttctctccaggtgctcatcaagaaagataacgttacttctaaattgtgggctcaaactggacagcaaggtgcacagtggaagagagcagaagtgtttttaggcattcgttcacatacacagattgtcttcagagccaaacgtggtatcagttacataggagatgtagcagtggatgatatttccttccaagattgctcccctttgcttagcccagagagaaagtgtactgatcatgaattcatgtgtgctaataagcactgcattgccaaagacaagctgtgtgattttgtgaatgattgtgctgataattcagatgagactactttcatttgccgtacctccagtgggcgctgtgatttcgaatttgatctttgttcctggaagcaggagaaagatgaggactttgactggaacctgaaagctagcagcatccctgcagcaggcacagagccagcagcagatcacactttgggaaattcatctggtcattacatctttataaagagtttgtttcctcagcagcccatgagagctgccagaatttcaagtccagttataagtaagagaagcaaaaactgcaagattatttttcattatcacatgtatggaaatggcattggggcactcaccttaatgcaggtgtcagtcacaaaccaaacgaaggttctacttaacctcactgtagaacaaggcaatttctggcggagagaagaactgtcactgtttggtgatgaagacttccaactcaaatttgaaggtagagttgggaaaggtcagcgtggagacattgcacttgatgacattgtgcttacagaaaattgtctatcactccatgattccgtgcaagaagaactggcagtgcctcttccaacaggtttctgcccacttggctatagggaatgtcataatggaaaatgctataggctggaacaaagctgtaacttcgtagataactgtggagataatactgatgaaaatgagtgtggtagctcctgtacttttgaaaaaggctggtgtggctggcaaaactcccaggctgacaactttgattgggttttaggggttggctctcatcaaagcttaagacctcccaaagaccacacacttggaaatgaaaatgggcacttcatgtatctggaagctactgcagtgggccttcggggtgacaaagcacacttcaggagtaccatgtggcgagaatccagtgcagcctgcaccatgagcttctggtatttcgtatctgcaaaggccacaggatccattcagattctcatcaagacagagaaaggactatcaaaagtatggcaagaaagtaagcagaaccctggtaatcattggcaaaaggctgacatcctgctaggaaagttaaggaattttgaagtcatatttcaaggtatcagaacaagggacctgggaggaggagctgcaattgatgatattgaatttaaaaactgcacaactgtgggagagatctctgagctttgtccggaaatcactgattttttgtgccgggacaagaagtgcattgcatcccaccttctttgtgactataagccagactgctctgataggtctgatgaagctcactgtgcacattatacaagcacaacaggaagctgcaattttgaaacaagttcaggaaactggaccacagcctgcagtcttactcaagactctgaggatgacttggactgggccattggcagcagaattcctgccaaagcattaattccagactctgatcacacgccaggtagtggtcagcacttcctgtacgtcaactcatctggctccaaggaaggatccgttgccagaattactacttccaaatccttcccagcaagccttggaatgtgtactgttcggttctggttctacatgattgatcccaggagtatgggaatattaaaggtgtataccattgaagaatcggggctaaacatcctggtgtggtcagtgattggaaataaaagaacgggatggacatatggctctgtgcctctctccagtaacagtccgtttaaggtggcatttgaagctgatttggatggaaatgaggacatctttattgctcttgatgacatctcttttaccccagagtgtgtgactggaggtcctgtcccagtgcagccatcaccctgtgaagctgatcagttttcttgtatctacacactccaatgtgtccctctctcagggaaatgtgatggacatgaagactgcatagatggatctgatgaaatggattgtcctctcagccccacccctccactctgtagtaacatggagttcccgtgctctacagacgagtgtataccttccctcctgctatgcgatggagtgcccgactgccactttaatgaagatgagctcatctgctccaacaaaagctgttctaatggagctctggtgtgtgcctcctccaacagctgtatcccagcccaccagcgctgtgatggttttgccgactgcatggatttccagcttgatgagtccagctgctccgatacatggactctcctgggtattggattagcattcctgatgactcacatcacagttgcagtcttgtgttttcttgcaaacagaaaggtaccaataaggaaaaccgagggaagtggtaactgtgcctttgtcaatccagtttacgggaactggagcaacccagagaaaacagagagttctgtctattccttctcaaacccattatatggcacaacatcaggaagcctggagaccctgtcacatcatctcaaatagcagcatcgagaccaagtctgatccaacatgtgtagtttctagaaaattgaagtctccacaatctgatagaaactcatcttctacaatggtaaaaagagaaaggattgtaaatgccagtgtaattataacatttatgaatgaattttcttgcagaatatagagaatgtttatatggaatcagaatcagtaccttatcttcactgaacatctgaatattttaataaaatttctattt

SEQ ID NO: 754 - protein, 1986 aa, Homo sapiens
MPRTGAQDGAWIQKQVVFEGQMASTYEQDEVIAIDDISFSSGCLPANDGILLCQEALNAERELCHPDTDLCRFDATDEELRLCQACGFEFDMCEWTSEASAGQISWMRTKAREIPAFESTPQQDQGGDDEGYYVWVGAKHGFTLNHLDSRAYLNSSVCHCLGKSCHLQFYYAMESSVLRVRLYNNKMRSKVVKLNNIDFGTLDFFTGREKHRLASLRDRVLINMLNIFLESFFNFTTKTLDFLVLYIIQEEEIFWTYNISTHSQWVKADVLIPEDLKTFKIIFEGTLLSQRSFIALDHLWVYACGQTQSRKLCSADEFPCTSGQCIAKESVCDSRQDCSDESDEDPATCSKHLTCDFESGFCGWEPFLTEDSHWKLMKGLNNGEHHFPAADHTANINHGSFIYLEAQRSPGVAKLGSPVLTKLLTASTPCQVQFWYHLSQHSNLSVFTRTSLDGNLQKQGKIIRFSESQWSHAKIDLIAEAGESTLPFQLILEATVLSSNATVALDDISVSQECEISYKSLPRTSTQSKFSKCDFEANSCDWFEAISGDHFDWIRSSQSELSADFEHQAPPRDHSLNASQGHFMFILKKSSSLWQVAKLQSPTFSQTGPGCILSFWFYNYGLSVGAAELQLHMENSHDSTVIWRVLYNQGKQWLEATIQLGRLSQPFHLSLDKVSLGIYDGVSAIDDIRFENCTLPLPAESCEGLDHFWCRHTRACIEKLRLCDLVDDCGDRTDEVNCAPELQCNFETGICNWEQDAKDDFDWTRSQGPTPTLNTGPMKDNTLGTAKGHYLYIESSEPQAFQDSAALLSPILNATDTKGCTFRFYYHMFGKRIYRLAIYQRIWSDSRGQLLWQIFGNQGNRWIRKHLNISSRQPFQILVEASVGDGFTGDIAIDDLSFMDCTLYPGNLPADLPTPPETSVPVTLPPHNCTDNEFICRSDGHCIEKMQKCDFKYDCPDKSDEASCVMEVCSFEKRSLCKWYQPIPVHLLQDSNTFRWGLGNGISIHHGEENHRPSVDHTQNTTDGWYLYADSSNGKFGDTADILTPIISLTGPKCTLVFWTHMNGATVGSLQVLIKKDNVTSKLWAQTGQQGAQWKRAEVFLGIRSHTQIVFRAKRGISYIGDVAVDDISFQDCSPLLSPERKCTDHEFMCANKHCIAKDKLCDFVNDCADNSDETTFICRTSSGRCDFEFDLCSWKQEKDEDFDWNLKASSIPAAGTEPAADHTLGNSSGHYIFIKSLFPQQPMRAARISSPVISKRSKNCKIIFHYHMYGNGIGALTLMQVSVTNQTKVLLNLTVEQGNFWRREELSLFGDEDFQLKFEGRVGKGQRGDIALDDIVLTENCLSLHDSVQEELAVPLPTGFCPLGYRECHNGKCYRLEQSCNFVDNCGDNTDENECGSSCTFEKGWCGWQNSQADNFDWVLGVGSHQSLRPPKDHTLGNENGHFMYLEATAVGLRGDKAHFRSTMWRESSAACTMSFWYFVSAKATGSIQILIKTEKGLSKVWQESKQNPGNHWQKADILLGKLRNFEVIFQGIRTRDLGGGAAIDDIEFKNCTTVGEISELCPEITDFLCRDKKCIASHLLCDYKPDCSDRSDEAHCAHYTSTTGSCNFETSSGNWTTACSLTQDSEDDLDWAIGSRIPAKALIPDSDHTPGSGQHFLYVNSSGSKEGSVARITTSKSFPASLGMCTVRFWFYMIDPRSMGILKVYTIEESGLNILVWSVIGNKRTGWTYGSVPLSSNSPFKVAFEADLDGNEDIFIALDDISFTPECVTGGPVPVQPSPCEADQFSCIYTLQCVPLSGKCDGHEDCIDGSDEMDCPLSPTPPLCSNMEFPCSTDECIPSLLLCDGVPDCHFNEDELICSNKSCSNGALVCASSNSCIPAHQRCDGFADCMDFQLDESSCSDTWTLLGIGLAFLMTHITVAVLCFLANRKVPIRKTEGSGNCAFVNPVYGNWSNPEKTESSVYSFSNPLYGTTSGSLETLSHHLK

SEQ ID NO: 755 - DNA, 2594 bp, Homo sapiens
gccctaaccttcccagggctcagctctttggagctgcccattcctccggctgcgagaaaggacgcgcgccctgcgtcgggcgaagaaaagaagcaaaacttgtcgggagggtttcgtcatcaacctccttcccgcaaacctaaacctcctgccggggccatccctagacagaggaaagttcctgcagagccgaccagccctagtggatctggggcaggcagcggcgctggctgtggaattagatctgttttgaacccagtggagcgcatcgctggggctcggaagtcaccgtccgcgggcaccgggttggcgctgcccgagtggaaccgacagtttgcgagcctcggctgcaagtggcctctcctccccgcggttgttgttcagtgtcgggtgagggctgcgagtgtggcaagttgcaaagagagcctcagaggtccgaagagcgctgcgctcctactcgcgttcgcttcttcctcttctcggttccctactgtgaaatcgcagcgacatttacaaaggcctccgggtcctaccgagaccgatccgcagcgtttggcccggtcgtgcctattgcatcgggagcccccgagcaccggcgaaggactggcgggtggggtagggaggtggcggcggcggcatggcgaggttcccgaaggccgacctggccgctgcaggagttatgttactttgccacttcttcacggaccagtttcagttcgccgatgggaaacccggagaccaaatccttgattggcagtatggagttactcaggccttccctcacacagaggaggaggtggaagttgattcacacgcgtacagccacaggtggaaaagaaacttggactttctcaaggcggtagacacgaaccgagcaagcgtcggccaagactctcctgagcccagaagcttcacagacctgctgctggatgatgggcaggacaataacactcagatcgaggaggatacagaccacaattactatatatctcgaatatatggtccatctgattctgccagccgggatttatgggtgaacatagaccaaatggaaaaagataaagtgaagattcatggaatattgtccaatactcatcggcaagctgcaagagtgaatctgtccttcgattttccattttatggccacttcctacgtgaaatcactgtggcaaccgggggtttcatatacactggagaagtcgtacatcgaatgctaacagccacacagtacatagcacctttaatggcaaatttcgatcccagtgtatccagaaattcaactgtcagatattttgataatggcacagcacttgtggtccagtgggaccatgtacatctccaggataattataacctgggaagcttcacattccaggcaaccctgctcatggatggacgaatcatctttggatacaaagaaattcctgtcttggtcacacagataagttcaaccaatcatccagtgaaagtcggactgtccgatgcatttgtcgttgtccacaggatccaacaaattcccaatgttcgaagaagaacaatttatgaataccaccgagtagagctacaaatgtcaaaaattaccaacatttcggctgtggagatgaccccattacccacatgcctccagtttaacagatgtggcccctgtgtatcttctcagattggcttcaactgcagttggtgtagtaaacttcaaagatgttccagtggatttgatcgtcatcggcaggactgggtggacagtggatgccctgaagagtcaaaagagaagatgtgtgagaatacagaaccagtggaaacttcttctcgaaccaccacaaccgtaggagcgacaaccacccagttcagggtcctaactaccaccagaagagcagtgacttctcagtttcccaccagcctccctacagaagatgataccaagatagcactacatctaaaagataatggagcttctacagatgacagtgcagctgagaagaaagggggaaccctccacgctggcctcatcattggaatcctcatcctggtcctcattgtagccacagccattcttgtgacagtctatatgtatcaccacccaacatcagcagccagcatcttctttattgagagacgcccaagcagatggcctgcgatgaagtttagaagaggctctggacatcctgcctatgctgaagttgaaccagttggagagaaagaaggctttattgtatcagagcagtgctaaaatttctaggacagaacaacaccagtactggtttacaggtgttaagactaaaattttgcctatacctttaagacaaacaaacaaacacacacacaaacaagctctaagctgctgtagcctgaagaagacaagatttctggacaagctcagcccaggaaacaaagggtaaacaaaaaactaaaacttatacaagataccatttacactgaacatagaattccctagtggaatgtcatctatagttcactcggaacatctcccgtggacttatctgaagtatgacaagattataatgcttttggcttaggtgcagggttgcaaagggatcagaaaaaaaaaatcataataaagctttagttcatgaggg

SEQ ID NO: 756 - protein, 529 aa, Homo sapiens
MARFPKADLAAAGVMLLCHFFTDQFQFADGKPGDQILDWQYGVTQAFPHTEEEVEVDSHAYSHRWKRNLDFLKAVDTNRASVGQDSPEPRSFTDLLLDDGQDNNTQIEEDTDHNYYISRIYGPSDSASRDLWVNIDQMEKDKVKIHGILSNTHRQAARVNLSFDFPFYGHFLREITVATGGFIYTGEVVHRMLTATQYIAPLMANFDPSVSRNSTVRYFDNGTALVVQWDHVHLQDNYNLGSFTFQATLLMDGRIIFGYKEIPVLVTQISSTNHPVKVGLSDAFVVVHRIQQIPNVRRRTIYEYHRVELQMSKITNISAVEMTPLPTCLQFNRCGPCVSSQIGFNCSWCSKLQRCSSGFDRHRQDWVDSGCPEESKEKMCENTEPVETSSRTTTTVGATTTQFRVLTTTRRAVTSQFPTSLPTEDDTKIALHLKDNGASTDDSAAEKKGGTLHAGLIIGILILVLIVATAILVTVYMYHHPTSAASIFFIERRPSRWPAMKFRRGSGHPAYAEVEPVGEKEGFIVSEQC

SEQ ID NO: 757 - DNA, 5597 bp, Homo sapiens
agggagcgcccgtagccagcgcccccgtaaagaaataaggaggcgcccggcttcccgcccaggcccagggccccagtgcagcctggacacagtattcaaagttttggcgtctgagcattgttatgcgttattttcaagctttgctaacggtttttaaacctttgagatgtttccattaattggaaaaacaatcatctttgataactttcctgatccttctgatacatgggaaatcactgagacaattggcaaaggaacttatgggaaagtttttaaagtattgaataagaaaaatggccaaaaagcagcagtcaaaattcttgatccaattcacgatattgacgaagagattgaagcagaatataacatcttaaaagcactttctgaccaccctaatgtggtcagattctatgggatatactttaagaaggataaagtaaatggagacaagctgtggttggttcttgagctctgcagtggaggatcagtgactgaccttgtgaaaggatttctgaagaggggtgaaagaatgagtgagcctctaattgcctatattttacatgaagcactaatgggacttcaacatttgcataacaacaaaactatccacagagatgtgaaaggcaataacattctattgaccacggaaggtggagtgaaactagtagattttggtgtgtctgcacagctcaccagtacccggcaccgtcggaacacatccgtaggaacaccgttttggatggctcctgaggtgattgcatgtgaacagcaattggataccacttatgacgccagatgtgacacttggtccctgggtatcacggccattgagctgggtgatggagatcctccactagctgaccttcatcccatgagagcactcttcaaaataccaaggaatccacccccaaaactaaggcagcctgagctatggtcagcagaattcaatgacttcataagcaagtgcttgactaaagattatgaaaagcgtccaacagtgtcagaacttttacagcataaattcattactcaaattgagggcaaagatgtgatgctacaaaaacaactaacggaattcattggcatccatcaatgcatgggaggcacagaaaaggccagacgtgaacgtattcacacgaagaaagggaacttcaaccgacctctaatatccaatctgaaggatgtagatgatttagcaaccctagaaattttggatgagaatacagtctcagagcaacttgagaagtgttattccagagatcagatctacgtctatgtgggagacatactcattgctcttaacccttttcagagtctgggtctttactccacaaagcattccaaactatatattggatcaaagagaactgccagtcctcctcacatttttgcaatggctgacttaggatatcaatctataataacatataattcagatcagtgcattgttatttctggagaaagtggtgctggaaagactgaaaatgctcatcttttagttcagcagctgacagtgcttggaaaggctaataacagaaccttgcaagagaagattttacaagtgaacaatttggtagaagcctttggcaatgcctgcactattataaatgacaattctagcagatttggaaaatacttagaaatgaaattcacctcttctggagcggtagtgggagcacagatttctgaatatctcctggaaaaatcccgagttatccaccaagctattggagaaaaaaattttcatattttttactacatttatgctggtttggctgaaaagaagaaactagcccattacaaactgcctgaaaataagcctcccaggtacctacaaaatgaccacctcagaacagtacaagacatcatgaataatagtttctataaatcccagtatgaattaattgagcaatgtttcaaagtcataggttttacaatggagcaacttggtagtatatacagcatactcgctgcaatcttgaatgttggcaacattgaattttcttctgtggcaactgaacaccagattgacaagagccacatttctaatcatacagccctggagaactgtgtttctttgctttgcattcgggcagatgagctacaagaagctctcacctcccactgtgtggtcactagaggagaaacaattatacgacccaatactgtagaaaaagctaccgatgtcagggatgccatggctaaaactttatatggacgtctctttagttggatagtcaattgcattaacagtttgttgaagcatgactcatcaccaagtgggaatggtgatgagctgagcattggcattcttgatatatttggttttgaaaatttcaaaaaaaattccttcgagcagctgtgcattaacattgcaaatgaacaaattcagtattattataatcaacatgtgtttgcatgggaacagaatgaatacctaaatgaagatgtggatgctagagttattgaatatgaggataactggcccctcttagatatgtttctgcaaaagccaatgggtttactttccctacttgatgaagaaagtagatttcccaaggccactgaccagactcttgtagaaaaatttgaaggtaacctgaaatcacaatacttctggagacccaaaagaatggaacttagttttggaattcaccattatgcaggaaaggtcctctataatgcaagtggattcttagccaaaaacagagacactcttcctactgacattgtgctacttttgaggtcatccgacaacagtgtaattaggcaactagtcaaccaccctctgaccaaaacaggtaatctgccacattctaaaactaaaaatgttataaactatcaaatgaggacttcagaaaaattaatcaacctggcaaagggcgacactggagaagccacacgtcatgccagagagacaaccaacatgaaaacacaaacggttgcatcatattttagatattccctgatggatttgttgtctaaaatggtggtgggccaacctcattttgtccgttgcatcaaaccaaatagtgagcgtcaggcaagaaaatatgacaaagagaaagttctgctacagcttcggtacacaggaattctggaaacagcaagaattcgaagactaggattctcccatcggatactttttgctaactttataaagcggtactaccttctctgctacaagtcgagcgaggagccccgcatgagccctgacacctgtgccaccattttggaaaaagctggtctcgataactgggctcttggaaaaacaaaagtgttccttaagtattatcacgtggagcagttaaatctaatgcgaaaggaagctattgacaagcttattttgattcaagcttgtgtcagagcattcttgtgttcaagaagataccaaaaaatacaggagaaaaggaaagaaagcgctataataatacagtcagctgcaagaggacaccttgtcgggaaacaaagaaaagaaattgttgacatgaaaaacacagcagtaacaaccattcaaacttctgatcaggaattcgactacaagaaaaactttgaaaatacaagggaatctttcgtgaagaaacaagcagaaaatgcaatctctgctaatgaaagattcatttcagctccaaataataaaggaagtgtatctgtagtgaagacttccactttcaaacctgaagaggaaaccaccaatgctgtggagagtaacaacagagtgtatcagactccaaaaaaaatgaataatgtgtatgaggaagaggttaagcaagaattttaccttgtagggccagaagtaagccccaaacagaagtttgtcaaagacctggaagagaacagcaatctaaggaaagtggagaaagaggaagctatgatccagagttactatcagaggtacacagaggagaggaattgtgaagagtcaaaagcagcatatctagaaaggaaggccatatcagaaaggccaagctacccagtgccttggttagctgaaaatgagacttcctttaaaaaaactttggaacctacacttagccaaaggtcaatttatcaaaatgcaaacagcatggaaaaagaaaagaagacatctgtagttacccagagtgcaccgatatgcagccaggaggaaggcagaggccgtctgaggcatgagacagtcaaagagaggcaagttgaaccagtgacacaggcccaggaggaagaagataaagcagcggtattcattcagagcaaataccggggttacaagagaaggcagcagttgaggaaggacaagatgtcttcttttaagcatcagaagattgtcacaacaccaacagaagtagcaagaaacactcataatttgtattcctatcccacaaaacatgaggaaatcaataacatcaagaagaaggataacaaagactcgaaagcaacttcagaaagagaagcatgtggtttggcaattttttcaaaacagatatcaaagttatctgaagaatatttcattctgcagaaaaaattgaatgaaatgattttgtcacagcaactgaagtcactttatctgggtgtctcgcaccataagccaattaatagacgagtttcttctcagcagtgcctctcaggtgtctgtaaaggagaggagccaaaaatattgagacccccaagacgaccccggaaacccaaaacattaaataaccctgaagactccacatactattatctacttcataagtcaatccaagaagaaaaacgaagaccaaggaaagacagtcagggaaaattattagatttggaagatttctattataaggaatttttgcccagtcgttctggaccaaaggaacatagccctagtttaagagaacgaagaccacagcaagaactccagaatcaatgtattaaggctaatgaaaggtgctgggcggcggagagccccgagaaggaggaggagagagagccagcagccaacccctacgacttcaggaggctcctgcgcaaaacctcccagcgccggcgcctcgtccagcagtcctaaccgttcaacgaggcagtcaccgccgtcggaaggcgctggagcctgcggggcagcaggggccaagcaggcactctggggctggcaccagcaggcactgaagctgcggccctgatctccgcagaggctgcctgctgcgctcggccctcaagtgcccgggccggccttcgtgctccgaaacaagagacctgggagccctcgggaaacctcccccgacgctctctctcggaactcccgcaccctcctttctcaccagcccgccagttgtggcaaccctgtccttgttcccctaatctatcactttgttctttttttttgtgactcctgtggactccactgcgcctgggatctcgccaacccctctctcatttggggtgactgaattcacagatttttttttttattggaaacggcttttcttggccaacagaacacttgctagcggttgaatcttagagaaaaaagcccgggaggggtggggagaatttcgaagatgtatttcatctcaagcttgctctttctcttcctttggttattaaggtcactaaataaaggaagtgccttggaaaaaaaaaaaaaaaaa

SEQ ID NO: 758 - protein, 1616 aa, Homo sapiens
MFPLIGKTIIFDNFPDPSDTWEITETIGKGTYGKVFKVLNKKNGQKAAVKILDPIHDIDEEIEAEYNILKALSDHPNVVRFYGIYFKKDKVNGDKLWLVLELCSGGSVTDLVKGFLKRGERMSEPLIAYILHEALMGLQHLHNNKTIHRDVKGNNILLTTEGGVKLVDFGVSAQLTSTRHRRNTSVGTPFWMAPEVIACEQQLDTTYDARCDTWSLGITAIELGDGDPPLADLHPMRALFKIPRNPPPKLRQPELWSAEFNDFISKCLTKDYEKRPTVSELLQHKFITQIEGKDVMLQKQLTEFIGIHQCMGGTEKARRERIHTKKGNFNRPLISNLKDVDDLATLEILDENTVSEQLEKCYSRDQIYVYVGDILIALNPFQSLGLYSTKHSKLYIGSKRTASPPHIFAMADLGYQSIITYNSDQCIVISGESGAGKTENAHLLVQQLTVLGKANNRTLQEKILQVNNLVEAFGNACTIINDNSSRFGKYLEMKFTSSGAVVGAQISEYLLEKSRVIHQAIGEKNFHIFYYIYAGLAEKKKLAHYKLPENKPPRYLQNDHLRTVQDIMNNSFYKSQYELIEQCFKVIGFTMEQLGSIYSILAAILNVGNIEFSSVATEHQIDKSHISNHTALENCVSLLCIRADELQEALTSHCVVTRGETIIRPNTVEKATDVRDAMAKTLYGRLFSWIVNCINSLLKHDSSPSGNGDELSIGILDIFGFENFKKNSFEQLCINIANEQIQYYYNQHVFAWEQNEYLNEDVDARVIEYEDNWPLLDMFLQKPMGLLSLLDEESRFPKATDQTLVEKFEGNLKSQYFWRPKRMELSFGIHHYAGKVLYNASGFLAKNRDTLPTDIVLLLRSSDNSVIRQLVNHPLTKTGNLPHSKTKNVINYQMRTSEKLINLAKGDTGEATRHARETTNMKTQTVASYFRYSLMDLLSKMVVGQPHFVRCIKPNSERQARKYDKEKVLLQLRYTGILETARIRRLGFSHRILFANFIKRYYLLCYKSSEEPRMSPDTCATILEKAGLDNWALGKTKVFLKYYHVEQLNLMRKEAIDKLILIQACVRAFLCSRRYQKIQEKRKESAIIIQSAARGHLVGKQRKEIVDMKNTAVTTIQTSDQEFDYKKNFENTRESFVKKQAENAISANERFISAPNNKGSVSVVKTSTFKPEEETTNAVESNNRVYQTPKKMNNVYEEEVKQEFYLVGPEVSPKQKFVKDLEENSNLRKVEKEEAMIQSYYQRYTEERNCEESKAAYLERKAISERPSYPVPWLAENETSFKKTLEPTLSQRSIYQNANSMEKEKKTSVVTQSAPICSQEEGRGRLRHETVKERQVEPVTQAQEEEDKAAVFIQSKYRGYKRRQQLRKDKMSSFKHQKIVTTPTEVARNTHNLYSYPTKHEEINNIKKKDNKDSKATSEREACGLAIFSKQISKLSEEYFILQKKLNEMILSQQLKSLYLGVSHHKPINRRVSSQQCLSGVCKGEEPKILRPPRRPRKPKTLNNPEDSTYYYLLHKSIQEEKRRPRKDSQGKLLDLEDFYYKEFLPSRSGPKEHSPSLRERRPQQELQNQCIKANERCWAAESPEKEEEREPAANPYDFRRLLRKTSQRRRLVQQS

SEQ ID NO: 759 - DNA, 1679 bp, Homo sapiens
gccagaggcggagccgccgccctgccgcgactttcagactccgaccatggcctcgcgctggtggcggtggcggcgcggctgctcctggaagccggcggcgcggagccccgggcccggctcccccggccgtgcgggaccgttggggccgagcgccgctgccgaagtccgcgcgcaggttcataggcggaagggacttgacttgtctcagataccctatattaatcttgtgaagcatttaacatctgcctgtccaaatgtatgtcgtatatcacggtttcatcacacaaccccagacagtaaaacacacagtggtgaaaaatacaccgatcctttcaaactcggttggagagacttgaaaggtctgtatgaggacattagaaaggaactgcttatatcaacatcagaacttaaggaaatgtctgagtactactttgatgggaaagggaaagcctttcgaccaattattgtggcgctaatggcccgagcatgcaatattcatcataacaactcccgacatgtgcaagccagccagcgcgccatagccttaattgcagaaatgatccacactgctagtctggttcacgatgacgttattgacgatgcaagttctcgaagaggaaaacacacagttaataagatctggggtgaaaagaaggctgttcttgctggagatttaattctttctgcagcatctatagctctggcacgaattggaaatacaactgttatatctattttaacccaagttattgaagatttggtgcgtggtgaatttcttcagctcgggtcaaaagaaaatgagaatgaaagatttgcacactaccttgagaagacattcaagaagaccgccagcctgatagccaacagttgtaaagcagtctctgttctaggatgtcccgacccagtggtgcatgagatcgcctatcagtacggaaaaaatgtaggaatagcttttcagctaatagatgatgtattggacttcacctcgtgttctgaccagatgggcaaaccaacatcagctgatctgaagctcgggttagccactggtcctgtcctgtttgcctgtcagcagttcccagaaatgaatgctatgatcatgcgacggttcagtttgcctggagatgtagacagagctcgacagtatgtactacagagtgatggtgtgcaacaaacaacctacctcgcccagcagtactgccatgaagcaataagagagatcagtaaacttcgaccatccccagaaagagatgccctcattcagctttcagaaattgtactcacaagagataaatgacaactctttctgttctttctggcagctatcttaccagactgtgcctaaagaattttgtggaatacactttgtttgcttcatgtgcagataaccaaaaatcattttaaaagatatcaaacttattgatgggcaatttatttttttttattgcaaaagttttttcagaaaactttttaaatgtaattaataaaccacctgaatctgtcattctagtcctataaattataatcaaggtatcttgatggttatatgtggtattgtttacactgttaatatccacatgtaaggccattacacaaataaataaccaatgttaaaattcaaaaaaaaaaaaaaaaaaaaaaaaaaaaaaaaaaaaaaaaaaaaaaaaaaaaaaaaaaaaaaa

SEQ ID NO: 760 - protein, 415 aa, Homo sapiens
MASRWWRWRRGCSWKPAARSPGPGSPGRAGPLGPSAAAEVRAQVHRRKGLDLSQIPYINLVKHLTSACPNVCRISRFHHTTPDSKTHSGEKYTDPFKLGWRDLKGLYEDIRKELLISTSELKEMSEYYFDGKGKAFRPIIVALMARACNIHHNNSRHVQASQRAIALIAEMIHTASLVHDDVIDDASSRRGKHTVNKIWGEKKAVLAGDLILSAASIALARIGNTTVISILTQVIEDLVRGEFLQLGSKENENERFAHYLEKTFKKTASLIANSCKAVSVLGCPDPVVHEIAYQYGKNVGIAFQLIDDVLDFTSCSDQMGKPTSADLKLGLATGPVLFACQQFPEMNAMIMRRFSLPGDVDRARQYVLQSDGVQQTTYLAQQYCHEAIREISKLRPSPERDALIQLSEIVLTRDK

SEQ ID NO: 761 - DNA, 3587 bp, Homo sapiens
gggggctggagagagtgaggaggaaggggaggaggtgccgtcccacaataccaggcgggagggcgggtaggcggtttgtatccgggctgtgaggtgctcggagcctcggcggaccttgctgcctctgtctctttaacgcgagaggaagcgatgcagaggggtggaaaatggcagagctgcagatgttactagaggaggagatcccgtctggcaagagggcgctgatcgagagttaccagaacctgactcgggtggcagactactgtgaaaacaactacatacaggctacagacaagagaaaagctttagaggagaccaaagcctatacaacccaatctctagctagtgttgcttatcaaataaatgcattggccaacaatgtactccagttgctggatatccaagcctctcagcttcggagaatggagtcttccatcaatcatatctcacagactgtggatattcataaggagaaagtggcacgaagagagattggtattttgacaacaaataagaatacatcaagaactcacaaaataatagcacctgcgaatatggagcgccctgtaaggtatattcggaaacctatcgattacacagttctggatgatgtgggccatggtgtcaagtggctaaaagccaagcatggaaataaccagcctgcaagaactggcacactgtcgagaacaaatcctcctactcagaaaccgccaagtcctcccatgtcaggccggggaacactgggacggaatactccttataaaaccctggaacctgttaaacccccaacagttcctaatgactatatgaccagtcctgctaggcttggaagtcagcatagtccaggcaggacagcatctttaaatcagagaccaaggacacacagtggaagtagtggaggaagtggaagtcgagaaaacagtggtagcagtagtattggcattcccattgctgtgcctacaccttcgccacccactattggaccagcagccccgggctcagctcctggttcccagtatggcacaatgaccaggcagatatctcgacacaactctactacttcttcgacatcttctggtggatacagacgaactccctctgtgactgctcaattttctgctcagcctcatgttaatggaggtccactttattctcaaaattcaatttctattgctccaccccctccccctatgcctcagttgactccacagatacctctcacaggcttcgtggccagggtgcaggaaaacattgctgatagtccaactccaccgccaccacctccaccagatgacattcccatgtttgatgactctccacctcccccaccaccaccaccagtggattatgaagatgaggaggctgcagtagttcagtataatgatccatatgcagatggggatcctgcttgggcccccaagaattatattgagaaagttgttgcaatatatgattatacaaaagacaaggatgatgagctgtcatttatggagggtgcaatcatttatgttataaagaagaatgatgatggctggtatgaaggagtctgcaatcgagtgactggtctgttccctgggaactatgttgaatcaatcatgcactatactgattaatttttttttttcttttgaagtagattcttattactcagtcatactgtgggactattatggttaacagaactgtcttaatatgttttaaaatgtgcccatattttcagaacatgctgttttattggtaaattgaatgtctacctgtaagcataaatctttgaggcagtttatgtattgctgaatagcaatttatacaagaagctgtccataactgattatgcttatgtacttacttacacatttttaactttatgaccagcctaaatattctgggggaagtggggtataatatttaacgaatcatgattcagattgtaccattacatgtttcagtgcagcatggttactaacgctatgtcagactaatattaaaatcagaaaatttaaatgctggtgctggtcagactttttttgttagattctctcatttaaaaaaaatactgtttgtttaaagcatgcataaaaatttatgtattgaaatatacttaaaaattcaagatgcttcccatttgtgtaatatttacctggaggactcgtacttaggtgtcttaacgtgaattgagtctccaaggtctccatgtgaaacaagcaaaaagagaattatctgtaatgttgtaatttgtacctaagttttttaatgagtgaaatttgcattataaactttttccattcataaatacataagtgaaccaaaggtttttgtcctttccttcactgatttgctttaaaaaaaataaaagataatgatttattgcagaattatgattctattttctcaatatgttaacttggaaaaaaattttagccttatcttaatctgtcccaacagcaatgtgacggatttttgcagattcaaaatctgcaatggttatttacaagtcaatctactgaattccttttttaaataatcttttgaaactaagaaaatgtgtcaaattgtgtgcattcattctgtaggtaaaattcttaaggattgccatgtcagtccttcagttgtacagtgaactgttgtacactggttcaatgaaaggaagttaaaagtaccttttacatattgtaaaagtggatacagttgatttgtgagtaggcactctttaatccattacctggcactagcaacattagaattttaaaataaaataattgggaaagaaggtgggtcatgtattaatcagtgaacagagatttacctaaccaacagacttggattgtcttttgacataatcaaaatgcaacacatgcactttgtgtgtctcctcttaattgaagggagggctgagggatgttttctcttcttgtcttgtgtataattctctattgcttaggatattaaagtagagcactcaagtgtgggtttctgtgttattgaggatttgtttggaattcaaattacagttatgtactggatgctacagacttataacagcatagtgaatggtaagactagtgcaaaacagttatttctgaaaattaaagaccattattgctaccaaatcaatgtgactatttcatatgcattttgcctttgttaattttaaacaaacaaagtatcattagtgatcagctagctaccttctactttccatttttcaagtggattgttctcttaatttgtatataacctgttgtctaaattttatgtacagtcttttataataaaccattctcctatatgaaattttggatactgttaaaatataactcatgtggacttcaatgcagacttcacatttttctgacctttactcctacggtaaatcaagacaaaccatttgaattttaacattggttatttatttgtgtaatggccttacatgtggatattaacagtgtaaacaataccacatataaccatcaagataccttgattataatttataggactagaatgacagattcaggtggtttattaattacatttaaaaagttttctgaaaaaacttttgcaataaaaaaaaataaattgcccatcaa

SEQ ID NO: 762 - protein, 481 aa, Homo sapiens
MAELQMLLEEEIPSGKRALIESYQNLTRVADYCENNYIQATDKRKALEETKAYTTQSLASVAYQINALANNVLQLLDIQASQLRRMESSINHISQTVDIHKEKVARREIGILTTNKNTSRTHKIIAPANMERPVRYIRKPIDYTVLDDVGHGVKWLKAKHGNNQPARTGTLSRTNPPTQKPPSPPMSGRGTLGRNTPYKTLEPVKPPTVPNDYMTSPARLGSQHSPGRTASLNQRPRTHSGSSGGSGSRENSGSSSIGIPIAVPTPSPPTIGPAAPGSAPGSQYGTMTRQISRHNSTTSSTSSGGYRRTPSVTAQFSAQPHVNGGPLYSQNSISIAPPPPPMPQLTPQIPLTGFVARVQENIADSPTPPPPPPPDDIPMFDDSPPPPPPPPVDYEDEEAAVVQYNDPYADGDPAWAPKNYIEKVVAIYDYTKDKDDELSFMEGAIIYVIKKNDDGWYEGVCNRVTGLFPGNYVESIMHYTD

SEQ ID NO: 763 - DNA, 3500 bp, Homo sapiens
gggggctggagagagtgaggaggaaggggaggaggtgccgtcccacaataccaggcgggagggcgggtaggcggtttgtatccgggctgtgaggtgctcggagcctcggcggaccttgctgcctctgtctctttaacgcgagaggaagcgatgcagaggggtggaaaatggcagagctgcagatgttactagaggaggagatcccgtctggcaagagggcgctgatcgagagttaccagaacctgactcgggtggcagactactgtgaaaacaactacatacaggctacagacaagagaaaagctttagaggagaccaaagcctatacaacccaatctctagctagtgttgcttatcaaataaatgcattggccaacaatgtactccagttgctggatatccaagcctctcagcttcggagaatggagtcttccatcaatcatatctcacagactgtggatattcataaggagaaagtggcacgaagagagattggtattttgacaacaaataagaatacatcaagaactcacaaaataatagcacctgcgaatatggagcgccctgtaaggtatattcggaaacctatcgattacacagttctggatgatgtgggccatggtgtcaagtggctaaaagccaagcatggaaataaccagcctgcaagaactggcacactgtcgagaacaaatcctcctactcagaaaccgccaagtcctcccatgtcaggccggggaacactgggacggaatactccttataaaaccctggaacctgttaaacccccaacagttcctaatgactatatgaccagtcctgctaggcttggaagtcagcatagtccaggcaggacagcatctttaaatcagagaccaaggacacacagtggaagtagtggaggaagtggaagtcgagaaaacagtggtagcagtagtattggcattcccattgctgtgcctacaccttcgccacccactattggaccagcagccccgggctcagctcctggttcccagtatggcacaatgaccaggcagatatctcgacacaactctactacttcttcgacatcttctggtggatacagacgaactccctctgtgactgctcaattttctgctcagcctcatgttaatggaggtccactttattctcaaaattcaattgctgatagtccaactccaccgccaccacctccaccagatgacattcccatgtttgatgactctccacctcccccaccaccaccaccagtggattatgaagatgaggaggctgcagtagttcagtataatgatccatatgcagatggggatcctgcttgggcccccaagaattatattgagaaagttgttgcaatatatgattatacaaaagacaaggatgatgagctgtcatttatggagggtgcaatcatttatgttataaagaagaatgatgatggctggtatgaaggagtctgcaatcgagtgactggtctgttccctgggaactatgttgaatcaatcatgcactatactgattaatttttttttttcttttgaagtagattcttattactcagtcatactgtgggactattatggttaacagaactgtcttaatatgttttaaaatgtgcccatattttcagaacatgctgttttattggtaaattgaatgtctacctgtaagcataaatctttgaggcagtttatgtattgctgaatagcaatttatacaagaagctgtccataactgattatgcttatgtacttacttacacatttttaactttatgaccagcctaaatattctgggggaagtggggtataatatttaacgaatcatgattcagattgtaccattacatgtttcagtgcagcatggttactaacgctatgtcagactaatattaaaatcagaaaatttaaatgctggtgctggtcagactttttttgttagattctctcatttaaaaaaaatactgtttgtttaaagcatgcataaaaatttatgtattgaaatatacttaaaaattcaagatgcttcccatttgtgtaatatttacctggaggactcgtacttaggtgtcttaacgtgaattgagtctccaaggtctccatgtgaaacaagcaaaaagagaattatctgtaatgttgtaatttgtacctaagttttttaatgagtgaaatttgcattataaactttttccattcataaatacataagtgaaccaaaggtttttgtcctttccttcactgatttgctttaaaaaaaataaaagataatgatttattgcagaattatgattctattttctcaatatgttaacttggaaaaaaattttagccttatcttaatctgtcccaacagcaatgtgacggatttttgcagattcaaaatctgcaatggttatttacaagtcaatctactgaattccttttttaaataatcttttgaaactaagaaaatgtgtcaaattgtgtgcattcattctgtaggtaaaattcttaaggattgccatgtcagtccttcagttgtacagtgaactgttgtacactggttcaatgaaaggaagttaaaagtaccttttacatattgtaaaagtggatacagttgatttgtgagtaggcactctttaatccattacctggcactagcaacattagaattttaaaataaaataattgggaaagaaggtgggtcatgtattaatcagtgaacagagatttacctaaccaacagacttggattgtcttttgacataatcaaaatgcaacacatgcactttgtgtgtctcctcttaattgaagggagggctgagggatgttttctcttcttgtcttgtgtataattctctattgcttaggatattaaagtagagcactcaagtgtgggtttctgtgttattgaggatttgtttggaattcaaattacagttatgtactggatgctacagacttataacagcatagtgaatggtaagactagtgcaaaacagttatttctgaaaattaaagaccattattgctaccaaatcaatgtgactatttcatatgcattttgcctttgttaattttaaacaaacaaagtatcattagtgatcagctagctaccttctactttccatttttcaagtggattgttctcttaatttgtatataacctgttgtctaaattttatgtacagtcttttataataaaccattctcctatatgaaattttggatactgttaaaatataactcatgtggacttcaatgcagacttcacatttttctgacctttactcctacggtaaatcaagacaaaccatttgaattttaacattggttatttatttgtgtaatggccttacatgtggatattaacagtgtaaacaataccacatataaccatcaagataccttgattataatttataggactagaatgacagattcaggtggtttattaattacatttaaaaagttttctgaaaaaacttttgcaataaaaaaaaataaattgcccatcaa

SEQ ID NO: 764 - protein, 452 aa, Homo sapiens
MAELQMLLEEEIPSGKRALIESYQNLTRVADYCENNYIQATDKRKALEETKAYTTQSLASVAYQINALANNVLQLLDIQASQLRRMESSINHISQTVDIHKEKVARREIGILTTNKNTSRTHKIIAPANMERPVRYIRKPIDYTVLDDVGHGVKWLKAKHGNNQPARTGTLSRTNPPTQKPPSPPMSGRGTLGRNTPYKTLEPVKPPTVPNDYMTSPARLGSQHSPGRTASLNQRPRTHSGSSGGSGSRENSGSSSIGIPIAVPTPSPPTIGPAAPGSAPGSQYGTMTRQISRHNSTTSSTSSGGYRRTPSVTAQFSAQPHVNGGPLYSQNSIADSPTPPPPPPPDDIPMFDDSPPPPPPPPVDYEDEEAAVVQYNDPYADGDPAWAPKNYIEKVVAIYDYTKDKDDELSFMEGAIIYVIKKNDDGWYEGVCNRVTGLFPGNYVESIMHYTD

SEQ ID NO: 765 - DNA, 3572 bp, Homo sapiens
gggggctggagagagtgaggaggaaggggaggaggtgccgtcccacaataccaggcgggagggcgggtaggcggtttgtatccgggctgtgaggtgctcggagcctcggcggaccttgctgcctctgtctctttaacgcgagaggaagcgatgcagaggggtggaaaatggcagagctgcagatgttactagaggaggagatcccgtctggcaagagggcgctgatcgagagttaccagaacctgactcgggtggcagactactgtgaaaacaactacatacaggctacagacaagagaaaagctttagaggagaccaaagcctatacaacccaatctctagctagtgttgcttatcaaataaatgcattggccaacaatgtactccagttgctggatatccaagcctctcagcttcggagaatggagtcttccatcaatcatatctcacagactgtggatattcataaggagaaagtggcacgaagagagattggtattttgacaacaaataagaatacatcaagaactcacaaaataatagcacctgcgaatatggagcgccctgtaaggtatattcggaaacctatcgattacacagttctggatgatgtgggccatggtgtcaagcatggaaataaccagcctgcaagaactggcacactgtcgagaacaaatcctcctactcagaaaccgccaagtcctcccatgtcaggccggggaacactgggacggaatactccttataaaaccctggaacctgttaaacccccaacagttcctaatgactatatgaccagtcctgctaggcttggaagtcagcatagtccaggcaggacagcatctttaaatcagagaccaaggacacacagtggaagtagtggaggaagtggaagtcgagaaaacagtggtagcagtagtattggcattcccattgctgtgcctacaccttcgccacccactattggaccagcagccccgggctcagctcctggttcccagtatggcacaatgaccaggcagatatctcgacacaactctactacttcttcgacatcttctggtggatacagacgaactccctctgtgactgctcaattttctgctcagcctcatgttaatggaggtccactttattctcaaaattcaatttctattgctccaccccctccccctatgcctcagttgactccacagatacctctcacaggcttcgtggccagggtgcaggaaaacattgctgatagtccaactccaccgccaccacctccaccagatgacattcccatgtttgatgactctccacctcccccaccaccaccaccagtggattatgaagatgaggaggctgcagtagttcagtataatgatccatatgcagatggggatcctgcttgggcccccaagaattatattgagaaagttgttgcaatatatgattatacaaaagacaaggatgatgagctgtcatttatggagggtgcaatcatttatgttataaagaagaatgatgatggctggtatgaaggagtctgcaatcgagtgactggtctgttccctgggaactatgttgaatcaatcatgcactatactgattaatttttttttttcttttgaagtagattcttattactcagtcatactgtgggactattatggttaacagaactgtcttaatatgttttaaaatgtgcccatattttcagaacatgctgttttattggtaaattgaatgtctacctgtaagcataaatctttgaggcagtttatgtattgctgaatagcaatttatacaagaagctgtccataactgattatgcttatgtacttacttacacatttttaactttatgaccagcctaaatattctgggggaagtggggtataatatttaacgaatcatgattcagattgtaccattacatgtttcagtgcagcatggttactaacgctatgtcagactaatattaaaatcagaaaatttaaatgctggtgctggtcagactttttttgttagattctctcatttaaaaaaaatactgtttgtttaaagcatgcataaaaatttatgtattgaaatatacttaaaaattcaagatgcttcccatttgtgtaatatttacctggaggactcgtacttaggtgtcttaacgtgaattgagtctccaaggtctccatgtgaaacaagcaaaaagagaattatctgtaatgttgtaatttgtacctaagttttttaatgagtgaaatttgcattataaactttttccattcataaatacataagtgaaccaaaggtttttgtcctttccttcactgatttgctttaaaaaaaataaaagataatgatttattgcagaattatgattctattttctcaatatgttaacttggaaaaaaattttagccttatcttaatctgtcccaacagcaatgtgacggatttttgcagattcaaaatctgcaatggttatttacaagtcaatctactgaattccttttttaaataatcttttgaaactaagaaaatgtgtcaaattgtgtgcattcattctgtaggtaaaattcttaaggattgccatgtcagtccttcagttgtacagtgaactgttgtacactggttcaatgaaaggaagttaaaagtaccttttacatattgtaaaagtggatacagttgatttgtgagtaggcactctttaatccattacctggcactagcaacattagaattttaaaataaaataattgggaaagaaggtgggtcatgtattaatcagtgaacagagatttacctaaccaacagacttggattgtcttttgacataatcaaaatgcaacacatgcactttgtgtgtctcctcttaattgaagggagggctgagggatgttttctcttcttgtcttgtgtataattctctattgcttaggatattaaagtagagcactcaagtgtgggtttctgtgttattgaggatttgtttggaattcaaattacagttatgtactggatgctacagacttataacagcatagtgaatggtaagactagtgcaaaacagttatttctgaaaattaaagaccattattgctaccaaatcaatgtgactatttcatatgcattttgcctttgttaattttaaacaaacaaagtatcattagtgatcagctagctaccttctactttccatttttcaagtggattgttctcttaatttgtatataacctgttgtctaaattttatgtacagtcttttataataaaccattctcctatatgaaattttggatactgttaaaatataactcatgtggacttcaatgcagacttcacatttttctgacctttactcctacggtaaatcaagacaaaccatttgaattttaacattggttatttatttgtgtaatggccttacatgtggatattaacagtgtaaacaataccacatataaccatcaagataccttgattataatttataggactagaatgacagattcaggtggtttattaattacatttaaaaagttttctgaaaaaacttttgcaataaaaaaaaataaattgcccatcaa

SEQ ID NO: 766 - protein, 476 aa, Homo sapiens
MAELQMLLEEEIPSGKRALIESYQNLTRVADYCENNYIQATDKRKALEETKAYTTQSLASVAYQINALANNVLQLLDIQASQLRRMESSINHISQTVDIHKEKVARREIGILTTNKNTSRTHKIIAPANMERPVRYIRKPIDYTVLDDVGHGVKHGNNQPARTGTLSRTNPPTQKPPSPPMSGRGTLGRNTPYKTLEPVKPPTVPNDYMTSPARLGSQHSPGRTASLNQRPRTHSGSSGGSGSRENSGSSSIGIPIAVPTPSPPTIGPAAPGSAPGSQYGTMTRQISRHNSTTSSTSSGGYRRTPSVTAQFSAQPHVNGGPLYSQNSISIAPPPPPMPQLTPQIPLTGFVARVQENIADSPTPPPPPPPDDIPMFDDSPPPPPPPPVDYEDEEAAVVQYNDPYADGDPAWAPKNYIEKVVAIYDYTKDKDDELSFMEGAIIYVIKKNDDGWYEGVCNRVTGLFPGNYVESIMHYTD

SEQ ID NO: 767 - DNA, 3668 bp, Homo sapiens
gggggctggagagagtgaggaggaaggggaggaggtgccgtcccacaataccaggcgggagggcgggtaggcggtttgtatccgggctgtgaggtgctcggagcctcggcggaccttgctgcctctgtctctttaacgcgagaggaagcgatgcagaggggtggaaaatggcagagctgcagatgttactagaggaggagatcccgtctggcaagagggcgctgatcgagagttaccagaacctgactcgggtggcagactactgtgaaaacaactacatacaggctacagacaagagaaaagctttagaggagaccaaagcctatacaacccaatctctagctagtgttgcttatcaaataaatgcattggccaacaatgtactccagttgctggatatccaagcctctcagcttcggagaatggagtcttccatcaatcatatctcacagactgtggatattcataaggagaaagtggcacgaagagagattggtattttgacaacaaataagaatacatcaagaactcacaaaataatagcacctgcgaatatggagcgccctgtaaggtatattcggaaacctatcgattacacagttctggatgatgtgggccatggtgtcaagtggctaaaagccaagcatggaaataaccagcctgcaagaactggcacactgtcgagaacaaatcctcctactcagaaaccgccaagtcctcccatgtcaggccggggaacactgggacggaatactccttataaaaccctggaacctgttaaacccccaacagttcctaatgactatatgaccagtcctgctaggcttggaagtcagcatagtccaggcaggacagcatctttaaatcagagaccaaggacacacagtggaagtagtggaggaagtggaagtcgagaaaacagtggtagcagtagtattggcattcccattgctgtgcctacaccttcgccacccactattggaccagaaaacatttctgtccctcctccttctggagctccaccagcaccacctctggcaccacttctcccagtgagcactgtgatagcagccccgggctcagctcctggttcccagtatggcacaatgaccaggcagatatctcgacacaactctactacttcttcgacatcttctggtggatacagacgaactccctctgtgactgctcaattttctgctcagcctcatgttaatggaggtccactttattctcaaaattcaatttctattgctccaccccctccccctatgcctcagttgactccacagatacctctcacaggcttcgtggccagggtgcaggaaaacattgctgatagtccaactccaccgccaccacctccaccagatgacattcccatgtttgatgactctccacctcccccaccaccaccaccagtggattatgaagatgaggaggctgcagtagttcagtataatgatccatatgcagatggggatcctgcttgggcccccaagaattatattgagaaagttgttgcaatatatgattatacaaaagacaaggatgatgagctgtcatttatggagggtgcaatcatttatgttataaagaagaatgatgatggctggtatgaaggagtctgcaatcgagtgactggtctgttccctgggaactatgttgaatcaatcatgcactatactgattaatttttttttttcttttgaagtagattcttattactcagtcatactgtgggactattatggttaacagaactgtcttaatatgttttaaaatgtgcccatattttcagaacatgctgttttattggtaaattgaatgtctacctgtaagcataaatctttgaggcagtttatgtattgctgaatagcaatttatacaagaagctgtccataactgattatgcttatgtacttacttacacatttttaactttatgaccagcctaaatattctgggggaagtggggtataatatttaacgaatcatgattcagattgtaccattacatgtttcagtgcagcatggttactaacgctatgtcagactaatattaaaatcagaaaatttaaatgctggtgctggtcagactttttttgttagattctctcatttaaaaaaaatactgtttgtttaaagcatgcataaaaatttatgtattgaaatatacttaaaaattcaagatgcttcccatttgtgtaatatttacctggaggactcgtacttaggtgtcttaacgtgaattgagtctccaaggtctccatgtgaaacaagcaaaaagagaattatctgtaatgttgtaatttgtacctaagttttttaatgagtgaaatttgcattataaactttttccattcataaatacataagtgaaccaaaggtttttgtcctttccttcactgatttgctttaaaaaaaataaaagataatgatttattgcagaattatgattctattttctcaatatgttaacttggaaaaaaattttagccttatcttaatctgtcccaacagcaatgtgacggatttttgcagattcaaaatctgcaatggttatttacaagtcaatctactgaattccttttttaaataatcttttgaaactaagaaaatgtgtcaaattgtgtgcattcattctgtaggtaaaattcttaaggattgccatgtcagtccttcagttgtacagtgaactgttgtacactggttcaatgaaaggaagttaaaagtaccttttacatattgtaaaagtggatacagttgatttgtgagtaggcactctttaatccattacctggcactagcaacattagaattttaaaataaaataattgggaaagaaggtgggtcatgtattaatcagtgaacagagatttacctaaccaacagacttggattgtcttttgacataatcaaaatgcaacacatgcactttgtgtgtctcctcttaattgaagggagggctgagggatgttttctcttcttgtcttgtgtataattctctattgcttaggatattaaagtagagcactcaagtgtgggtttctgtgttattgaggatttgtttggaattcaaattacagttatgtactggatgctacagacttataacagcatagtgaatggtaagactagtgcaaaacagttatttctgaaaattaaagaccattattgctaccaaatcaatgtgactatttcatatgcattttgcctttgttaattttaaacaaacaaagtatcattagtgatcagctagctaccttctactttccatttttcaagtggattgttctcttaatttgtatataacctgttgtctaaattttatgtacagtcttttataataaaccattctcctatatgaaattttggatactgttaaaatataactcatgtggacttcaatgcagacttcacatttttctgacctttactcctacggtaaatcaagacaaaccatttgaattttaacattggttatttatttgtgtaatggccttacatgtggatattaacagtgtaaacaataccacatataaccatcaagataccttgattataatttataggactagaatgacagattcaggtggtttattaattacatttaaaaagttttctgaaaaaacttttgcaataaaaaaaaataaattgcccatcaa

SEQ ID NO: 768 - protein, 508 aa, Homo sapiens
MAELQMLLEEEIPSGKRALIESYQNLTRVADYCENNYIQATDKRKALEETKAYTTQSLASVAYQINALANNVLQLLDIQASQLRRMESSINHISQTVDIHKEKVARREIGILTTNKNTSRTHKIIAPANMERPVRYIRKPIDYTVLDDVGHGVKWLKAKHGNNQPARTGTLSRTNPPTQKPPSPPMSGRGTLGRNTPYKTLEPVKPPTVPNDYMTSPARLGSQHSPGRTASLNQRPRTHSGSSGGSGSRENSGSSSIGIPIAVPTPSPPTIGPENISVPPPSGAPPAPPLAPLLPVSTVIAAPGSAPGSQYGTMTRQISRHNSTTSSTSSGGYRRTPSVTAQFSAQPHVNGGPLYSQNSISIAPPPPPMPQLTPQIPLTGFVARVQENIADSPTPPPPPPPDDIPMFDDSPPPPPPPPVDYEDEEAAVVQYNDPYADGDPAWAPKNYIEKVVAIYDYTKDKDDELSFMEGAIIYVIKKNDDGWYEGVCNRVTGLFPGNYVESIMHYTD

SEQ ID NO: 769 - DNA, 1546 bp, Homo sapiens
gattgtgggaaggcagctgaactcggcgcctggaaagatggaggcagcggagacagaggcggaagctgcagccctagaggtcctggctgaggtggcaggcatcttggaacctgtaggcctgcaggaggaggcagaactgccagccaagatcctggttgagtttgtggtggactctcagaagaaagacaagctgctctgcagccagcttcaggtagcggatttcctgcagaacatcctggctcaggaggacactgctaagggtctcgaccccttggcttctgaagacacgagccgacagaaggcaattgcagctaaggaacaatggaaagagctgaaggccacctacagggagcacgtagaggccatcaaaattggcctcaccaaggccctgactcagatggaggaagcccagaggaaacggacacaactccgggaagcctttgagcagctccaggccaagaaacaaatggccatggagaaacgcagagcagtccagaaccagtggcagctacaacaggagaagcatctgcagcatctggcggaggtttctgcagagggtaagctgttgttccctgaggctgaggctgaggcagagaatcttccagatgataaaccccagcagccgactcgaccccaggagcagagtacaggagacaccatggggagagaccctggtgtgtccttcaaggctgttggtctacaacctgctggagatgtaaatttgccatgacttcctggaggacagcagcatggagaaagatcctagaaaaggcctctgacttccctcacctcccaaccatcattacaggaaagactgtgaactcctgagttcagcttgatttctgactacatcccagcaagctctggcatctgtggattaaaatccctggatctctctcagttgtgtatttgttcatcttcatatgctggcaggaacaactattaatacagatactcagaagccaataacatgacaggagctgggactggtttgaacacagggtgtgcagatggggagggggtactggccttgggcctcctatgatgcagacatggtgaatttaattcaaggaggaggagaatgttttaggcaggtggttatatgtgggaagataattttattcatggatccaaatgtttgttgagtcctttctttgtgctaaggttcttgcggtgaaccagaattataacagtgagctcatctgactgttttaggatgtacagcctagtgttaacattcttggtatctttttgtgccttatctaaaacatttctcgatcactggtttcagatgttcatttattatattcttttcaaagattcagagattggcttttgtcatccactattgtatgttttgtttcattgacctctagtgataccttgatctttcccactttctgttttcggattggagaagatgtaccttttttgtcaactcttacttttatcagatgatcaactcacgtatttggatctttatttgttttctcaaataaatatttaaggttatacatttaaaaaaaaaaaaaaaaaaaaaaaaaaa

SEQ ID NO: 770 - protein, 230 aa, Homo sapiens
MEAAETEAEAAALEVLAEVAGILEPVGLQEEAELPAKILVEFVVDSQKKDKLLCSQLQVADFLQNILAQEDTAKGLDPLASEDTSRQKAIAAKEQWKELKATYREHVEAIKIGLTKALTQMEEAQRKRTQLREAFEQLQAKKQMAMEKRRAVQNQWQLQQEKHLQHLAEVSAEGKLLFPEAEAEAENLPDDKPQQPTRPQEQSTGDTMGRDPGVSFKAVGLQPAGDVNLP

SEQ ID NO: 771 - DNA, 2002 bp, Homo sapiens
gattgtgggaaggcagctgaactcggcgcctggaaagatggaggcagcggagacagaggcggaagctgcagccctagaggtcctggctgaggtggcaggcatcttggaacctgtaggcctgcaggaggaggcagaactgccagccaagatcctggttgagtttgtggtggtatgtacaagatgagagcgagcctttcagaagccagggtctggtcctggctcctcttactgagatacagggcagcattggcagagagcagacttaaggaaacctgtaaggaggtaaggatgttccctgtctctgccctccctctgagcaggactctcagaagaaagacaagctgctctgcagccagcttcaggtagcggatttcctgcagaacatcctggctcaggaggacactgctaagggtctcgaccccttggcttctgaagacacgagccgtgagtaggcaggggattgtagtagcagctgacctgagtggggaaggaaggaggatttcagttaggtctcccatttggctgatgggaaggaggcccagtgttgcagggaggcaggctagcaggccaccctcactcatgtactcattcctggtggctcatctcaggacagaaggcaattgcagctaaggaacaatggaaagagctgaaggccacctacagggagcacgtagaggccatcaaaattggcctcaccaaggccctgactcagatggaggaagcccagaggaaacggacacaactccgggaagcctttgagcagctccaggccaagaaacaaatggccatggagaaacgcagagcagtccagaaccagtggcagctacaacaggagaagcatctgcagcatctggcggaggtttctgcagaggtgagggagcgtaagacagggactcagcaggagcttgacagggtgtttcagaaacttggaaacctgaagcagcaggcagaacaggagcgggacaagctgcagaggtatcagaccttcctccagcttctgtataccctgcagggtaagctgttgttccctgaggctgaggctgaggcagagaatcttccagatgataaaccccagcagccgactcgaccccaggagcagagtacaggagacaccatggggagagaccctggtgtgtccttcaaggctgttggtctacaacctgctggagatgtaaatttgccatgacttcctggaggacagcagcatggagaaagatcctagaaaaggcctctgacttccctcacctcccaaccatcattacaggaaagactgtgaactcctgagttcagcttgatttctgactacatcccagcaagctctggcatctgtggattaaaatccctggatctctctcagttgtgtatttgttcatcttcatatgctggcaggaacaactattaatacagatactcagaagccaataacatgacaggagctgggactggtttgaacacagggtgtgcagatggggagggggtactggccttgggcctcctatgatgcagacatggtgaatttaattcaaggaggaggagaatgttttaggcaggtggttatatgtgggaagataattttattcatggatccaaatgtttgttgagtcctttctttgtgctaaggttcttgcggtgaaccagaattataacagtgagctcatctgactgttttaggatgtacagcctagtgttaacattcttggtatctttttgtgccttatctaaaacatttctcgatcactggtttcagatgttcatttattatattcttttcaaagattcagagattggcttttgtcatccactattgtatgttttgtttcattgacctctagtgataccttgatctttcccactttctgttttcggattggagaagatgtaccttttttgtcaactcttacttttatcagatgatcaactcacgtatttggatctttatttgttttctcaaataaatatttaaggttatacatttaaaaaaaaaaaaaaaaaaaaaaaaaaa

SEQ ID NO: 772 - protein, 48 aa, Homo sapiens
MEAAETEAEAAALEVLAEVAGILEPVGLQEEAELPAKILVEFVVVCTR

SEQ ID NO: 773 - DNA, 1687 bp, Homo sapiens
gattgtgggaaggcagctgaactcggcgcctggaaagatggaggcagcggagacagaggcggaagctgcagccctagaggtcctggctgaggtggcaggcatcttggaacctgtaggcctgcaggaggaggcagaactgccagccaagatcctggttgagtttgtggtggactctcagaagaaagacaagctgctctgcagccagcttcaggtagcggatttcctgcagaacatcctggctcaggaggacactgctaagggtctcgaccccttggcttctgaagacacgagccgacagaaggcaattgcagctaaggaacaatggaaagagctgaaggccacctacagggagcacgtagaggccatcaaaattggcctcaccaaggccctgactcagatggaggaagcccagaggaaacggacacaactccgggaagcctttgagcagctccaggccaagaaacaaatggccatggagaaacgcagagcagtccagaaccagtggcagctacaacaggagaagcatctgcagcatctggcggaggtttctgcagaggtgagggagcgtaagacagggactcagcaggagcttgacagggtgtttcagaaacttggaaacctgaagcagcaggcagaacaggagcgggacaagctgcagaggtatcagaccttcctccagcttctgtataccctgcagggtaagctgttgttccctgaggctgaggctgaggcagagaatcttccagatgataaaccccagcagccgactcgaccccaggagcagagtacaggagacaccatggggagagaccctggtgtgtccttcaaggctgttggtctacaacctgctggagatgtaaatttgccatgacttcctggaggacagcagcatggagaaagatcctagaaaaggcctctgacttccctcacctcccaaccatcattacaggaaagactgtgaactcctgagttcagcttgatttctgactacatcccagcaagctctggcatctgtggattaaaatccctggatctctctcagttgtgtatttgttcatcttcatatgctggcaggaacaactattaatacagatactcagaagccaataacatgacaggagctgggactggtttgaacacagggtgtgcagatggggagggggtactggccttgggcctcctatgatgcagacatggtgaatttaattcaaggaggaggagaatgttttaggcaggtggttatatgtgggaagataattttattcatggatccaaatgtttgttgagtcctttctttgtgctaaggttcttgcggtgaaccagaattataacagtgagctcatctgactgttttaggatgtacagcctagtgttaacattcttggtatctttttgtgccttatctaaaacatttctcgatcactggtttcagatgttcatttattatattcttttcaaagattcagagattggcttttgtcatccactattgtatgttttgtttcattgacctctagtgataccttgatctttcccactttctgttttcggattggagaagatgtaccttttttgtcaactcttacttttatcagatgatcaactcacgtatttggatctttatttgttttctcaaataaatatttaaggttatacatttaaaaaaaaaaaaaaaaaaaaaaaaaaa

SEQ ID NO: 774 - protein, 277 aa, Homo sapiens
MEAAETEAEAAALEVLAEVAGILEPVGLQEEAELPAKILVEFVVDSQKKDKLLCSQLQVADFLQNILAQEDTAKGLDPLASEDTSRQKAIAAKEQWKELKATYREHVEAIKIGLTKALTQMEEAQRKRTQLREAFEQLQAKKQMAMEKRRAVQNQWQLQQEKHLQHLAEVSAEVRERKTGTQQELDRVFQKLGNLKQQAEQERDKLQRYQTFLQLLYTLQGKLLFPEAEAEAENLPDDKPQQPTRPQEQSTGDTMGRDPGVSFKAVGLQPAGDVNLP

SEQ ID NO: 775 - DNA, 1878 bp, Homo sapiens
gattgtgggaaggcagctgaactcggcgcctggaaagatggaggcagcggagacagaggcggaagctgcagccctagaggtcctggctgaggtggcaggcatcttggaacctgtaggcctgcaggaggaggcagaactgccagccaagatcctggttgagtttgtggtggactctcagaagaaagacaagctgctctgcagccagcttcaggtagcggatttcctgcagaacatcctggctcaggaggacactgctaagggtctcgaccccttggcttctgaagacacgagccgacagaaggcaattgcagctaaggaacaatggaaagagctgaaggccacctacagggagcacgtagaggccatcaaaattggcctcaccaaggccctgactcagatggaggaagcccagaggaaacggacacaactccgggaagcctttgagcagctccaggccaagaaacaaatggccatggagaaacgcagagcagtccagaaccagtggcagctacaacaggagaagcatctgcagcatctggcggaggtttctgcagaggtgagggagcgtaagacagggactcagcaggagcttgacagggtgtttcagaaacttggaaacctgaagcagcaggcagaacaggagcgggacaagctgcagaggtatcagaccttcctccagcttctgtataccctgcagggtaagctgttgttccctgaggctgaggctgaggcagagaatcttccagatgataaaccccagcagccgactcgaccccaggagcagagtacaggagacaccatggggagagaccctggtgtgtccttcaaggctgttggtctacaacctgctggagatgtaaatttgccatgacttcctggaggacagcagcatggagaaagatcctagaaaaggtcagacccaactcaggccttggtgtccctggactgcaagtgtggaaggagggaaagcctggtttacctctctctgcatctgagctctgctacccatggagcagatggatggtgggaacaggaaagagcttatgttacacctcattcccatgcttagcccacccagagctaacccctgtcttcttccccaggcctctgacttccctcacctcccaaccatcattacaggaaagactgtgaactcctgagttcagcttgatttctgactacatcccagcaagctctggcatctgtggattaaaatccctggatctctctcagttgtgtatttgttcatcttcatatgctggcaggaacaactattaatacagatactcagaagccaataacatgacaggagctgggactggtttgaacacagggtgtgcagatggggagggggtactggccttgggcctcctatgatgcagacatggtgaatttaattcaaggaggaggagaatgttttaggcaggtggttatatgtgggaagataattttattcatggatccaaatgtttgttgagtcctttctttgtgctaaggttcttgcggtgaaccagaattataacagtgagctcatctgactgttttaggatgtacagcctagtgttaacattcttggtatctttttgtgccttatctaaaacatttctcgatcactggtttcagatgttcatttattatattcttttcaaagattcagagattggcttttgtcatccactattgtatgttttgtttcattgacctctagtgataccttgatctttcccactttctgttttcggattggagaagatgtaccttttttgtcaactcttacttttatcagatgatcaactcacgtatttggatctttatttgttttctcaaataaatatttaaggttatacatttaaaaaaaaaaaaaaaaaaaaaaaaaaa

SEQ ID NO: 776 - protein, 277 aa, Homo sapiens; identical to SEQ ID NO: 774

SEQ ID NO: 777 - DNA, 1866 bp, Homo sapiens
gggcgcggcgccggaggaggaagtggtgaggttgttgctccttcagcgcctatcgctggctcttggggcgcagagaggggccgcagtctccgcggctgcgtcgagctcccttgcagtcccctccatgttccccggcgccactactccccttcctaaggccgccgcttaccccggggtctatggaagtaatggaaggacccctcaacctggctcatcaacagagcagacgagcagaccgtttattagctgcaggcaaatacgaagaggctatttcttgtcacaaaaaggctgcagcatatctttctgaagccatgaagctgacacagtcagagcaggctcatctttcactggaattgcaaagggatagccatatgaaacagctcctcctcatccaagagagatggaaaagggcccagcgtgaagaaagattgaaagcccagcagaacacagacaaggatgcagctgcccatcttcagacatctcacaaaccctctgcagaggatgcagagggccagagtcccctttctcagaagtacagcccttccacagagaaatgcctgcctgagattcaggggatctttgacagggatccagacacactactttatttacttcagcaaaagagtgagccagcagagccatgtattggaagcaaagccccaaaagatgataaaacaattatagaggagcaggcaaccaaaattgcagatttgaagaggcatgtggaattccttgtggctgagaatgaaagattaaggaaagaaaataaacaactaaaggctgaaaaggccagacttctaaaaggtccaatagaaaaggagctggatgtagatgctgattttgtagaaacgtcagagttatggagcttgccaccacatgcagaaactgctacagcctcctcaacctggcagaagttcgcagcaaatactgggaaagccaaggacattccaatccccaatcttcctcccttggattttccatctccagaacttcctcttatggagctctctgaggatattctgaaaggacttatgaataattaaaatggaaggccacagaaaaggggaaaagaggaaataatacagtaatcgttaatccagcaaaaagaaatgaaaagggaaaaccacatagaagggtaatcccggaaatgcttcatctggtggactgtgggagcagaggcattgccaggacttgggaaacagtcactgtgaaatgcgctgcgtatctcattcactcacttcagctaatgactccgacttggcagacgctaaactcatggaggttcggtttctcctgatacaaaccaaatggctacctggaagaatttctttcaagcaacagttatttttcttatcttcagggttaaaatgtataaaagttatgtgtaattaatctataatgccataaatgataatgcaaaacctaaataatatggtggccggaggggctgccttatatttgaaacatgctttctatcatgcattgactgtatgcattttgttaatgcacattctgtttgtttaaggtgtgtgagatacacacctttctagatgaaactatatgtgccacactttgcactactcataatgataacctcaagactatcagaagaaatatttaaatttccattttatgaagaaaggaaccaaattattatgctttttaaaacaaattaccagtttacataattaatcagggtgcattttaagttctaacttcgtttattgtataatgcatcatttgaaaataccaaggaggaaataccctttgtttttaatgatgcaagagtggacgtaatgctagttggcagtattttattgtaagaaatcaataaagtaattgtgttttaaaaaaaaaaaaaaaaaa

SEQ ID NO: 778 - protein, 287 aa, Homo sapiens
MEVMEGPLNLAHQQSRRADRLLAAGKYEEAISCHKKAAAYLSEAMKLTQSEQAHLSLELQRDSHMKQLLLIQERWKRAQREERLKAQQNTDKDAAAHLQTSHKPSAEDAEGQSPLSQKYSPSTEKCLPEIQGIFDRDPDTLLYLLQQKSEPAEPCIGSKAPKDDKTIIEEQATKIADLKRHVEFLVAENERLRKENKQLKAEKARLLKGPIEKELDVDADFVETSELWSLPPHAETATASSTWQKFAANTGKAKDIPIPNLPPLDFPSPELPLMELSEDILKGLMNN

SEQ ID NO: 779 - DNA, 8192 bp, Homo sapiens
tcgttctcatttgggtgtctgcactgttggaagctactgcactgtgtttccacgcagacagagtacagtgggaaaggctttctccagctgatggatggctgttctctttatttggagtatcttactggttatgtaagcgacctcgagagaaattatcctgacccagatcggaggatgcagtagtgcttcagctgcaggatttcttagtcgttaacaccacagtgctgatgacaaagagcgagttgtaatcctcatcactgccagggctgagccagagcagacagaaaatcgtcatttgctcgttggagacttgttaggttacagctcctgcttcgttctgtggtcttggcttttcttcctatacaatgacgccgctgcaagtgagctcagaaatgcttggtttgagagccatttgcctgtgatttttgaagactaaagaagtatttacactagatactcttccagaacaaaatagaaatttcagcaaatacttactgacctttaaagccttgttgtggatttctgagatttaaagatactttaaaattctcaagaacaaagtccttattccttaaatggatacagagtgagagtatatagacaagactctgccacccagtggtttactggcataattactcatcatgatctcttcacccgcaccatgatcgttatgaatgatcaggtactagaaccacagaatgtcgatccttctatggttcaaatgacctttctagatgatgttgttcactctttgttaaaaggtgaaaatattggcattacatcacgacgcaggtctcgtgccaatcaaaacgtcaacgctgttcacagccattatacacgtgcccaagcaaatagtcccagaccagcaatgaactcccaagctgctgtaccaaaacagaatacacaccagcaacagcaacaaagaagtatccgtccaaataagaggaagggctcagatagcagtataccagatgaagagaagatgaaggaggaaaaatatgattatatatcacgaggagaaaatcctaaaggtaaaaacaaacacttgatgaataaaagaaggaaacctgaggaggatgaaaagaaactaaatatgaaaagacttcgaactgacaatgtttcagacttttctgagagcagtgactcagaaaattcaaataagagaataatagataattcctcagaacagaagccagagaatgaattgaaaaataaaaatacttcaaaaataaatggagaagaaggaaaaccccataataatgagaaggcaggagaagagaccctaaaaaatagccagcctccctgggatcaaatacaggaagataaaaaacatgaagaagcagagaagcggaagtctgttgacactcagcttcaagaagatatgattattcattcgtcagaacagtccacagtttctgatcataattctaatgatttacttcctcaggaatgcaatatggataaaacacataccatggaattgctaccaaaggagaagtttgtatccagaccacccacaccaaaatgtgttattgatattacaaatgacactaatttagaaaaggtggctcaggaaaactcaagtacctttggccttcagacacttcagaaaatggatcctaatgttagtgattcaaaacactctattgcaaatgcaaaattcttggaaacagcaaaaaaagattctgaccagagctgggtcagtgatgtagttaaagtggatctaacccaatcaagtgttacaaatgcttcttcaggaaatgatcacttgaacatggaaaaagagaagtatgtctcttacatttctcctttaagtgcagtttctgtcatggaagataagctgcataagcgaagtccacctccagagactataaaatctaaacttaatacttcagtagatactcacaagataaaatccagcccatcacctgaagttgttaaacccaaaataactcattctcctgattctgtaaagtctaaggccacttatgtgaacagccaagctactggtgaaagaagattggcaaataagatagaacatgagctatcaagatgcagttttcatccaattcctactcgaagcagtacattagaaactacaaagagtcctcttatcattgataaaaatgagcattttacagtttacagagatcctgcacttattgggtcagaaacaggagctaatcatatttcacctttcctaagccagcatccttttcctcttcactcctcatctcatagaacctgtttaaatccaggtacccatcatcctgccttaactcctgcaccccatttactagccggatcatctagtcaaactccattacctaccattaacactcatcctctgactagtggtccacaccatgctgttcatcaccctcatttacttcccactgtgttacctggagtgcctactgcctccttacttggtggccacccacgactagagagtgctcatgccagcagcttgagccacttagcgctagcacaccagcaacaacaacagttgttacagcaccagtcacctcatcttcttggacaagcccatccttctgcttcatataatcagcttggactttatccaattatttggcagtatccaaatggaacacatgcatactcaggacttggtttgccttcttctaagtgggttcacccagaaaatgcagttaatgctgaagcttcattaaggaggaattctcccagtccttggctacatcagcccacccctgtgacctcagcagatggtattggattacttagtcacattcctgtcagaccttccagtgcagagcctcatcggcctcttaaaattacagcccattccagtccaccattgacaaaaactttagtagatcatcataaggaagaattagaaagaaaagcttttatggaaccattacggtctgttgcatccacatcagccaaaaatgacctggatctaaataggtcacagactggaaaagattgtcacttacataggcattttgtggatccagtattaaatcagttacagaggccaccccaggagactggagagaggttaaacaaatacaaagaggaacaccgtcgaattcttcaagaaagtattgatgttgctccctttacaactaaaatcaagggacttgagggtgagagagagaattattccagagtggcatcatcatcttccagtcctaaaagccatatcatcaaacaagatatggatgtagaacgctcagtatcagatctttataaaatgaagcactcagtgcctcagagtttaccccaaagtaactatttcactacattgtctaatagtgtggtcaatgaaccaccaagatcatacccatccaaagaagtttcaaatatttacggtgataaacagagtaatgcccttgcagcggcagcagctaatcctcaaactctgacttcatttataacatctctttcaaagcctccacctttgattaaacaccaaccagaaagtgaaggtttagtaggcaagataccagaacatcttccacatcagattgcatctcactcagtaacaaccttcagaaatgattgtaggagtcctacccatttgacagtttcttctacaaatacactccgcagtatgcctgcattacatagagcaccagtatttcacccaccaatccatcacagcctggaaagaaaggaaggcagctatagtagtctttcccctccaactttaactccggtgatgccagtaaatgctggtggtaaagttcaagaatcacagaagcctccaactctaatacccgaaccaaaagactcccaggcaaattttaagagttcttcagaacagagtttgacggagatgtggagacctaataataacctcagcaaagagaaaactgaatggcatgtggagaaaagcagcggaaagttacaggctgctatggcatctgtcattgtgcgtccatcttctagtacaaaaactgatagtatgccagcaatgcagttagcttctaaagatcgagttagtgaaagatcttcagctggggcacataaaacagattgcctcaaactagcagaagccggagaaactggaagaatcattttgccaaatgtgaattcagacagtgttcacacaaaatctgaaaaaaactttcaggctgtctcacagggcagtgttcccagttcagtcatgtctgctgtaaatacgatgtgtaataccaaaacggatgtaatcacatctgctgccgatactaccagtgtttccagctggggtggttcagaagtaatttcctctttatcaaataccattttggcctctacatcatcagaatgtgtatcttcaaaaagtgtcagtcagccagtggctcaaaaacaagaatgcaaggtcagcaccacagcaccagttacattagccagtagtaagacaggaagtgttgttcaacccagttctgggttctcaggcacaactgattttatccatttaaaaaagcacaaggcagcattggctgcagctcagtataaaagtagtaatgccagtgagactgaacctaatgctataaaaaatcagacactttcagcctcccttcctctggatagcactgtaatctgtagtacaattaacaaagcaaactctgtaggaaatgggcaagcttcccagacaagtcaaccaaactaccatactaaactgaaaaaggcctggctcaccagacactcagaagaagataaaaatactaataaaatggaaaattcagggaattctgtatcagaaattattaagccatgttctgtcaacttaatagcctctacatctagtgatatacaaaatagtgtagatagtaagatcatagttgataaatatgtaaaagatgataaagtcaacaggagaaaagccaaaagaacttatgaatctggctctgaaagtggagactcagatgaaagtgaaagcaagtcagagcaaaggactaaaagacaacctaagccaacttacaaaaagaagcaaaatgatttgcaaaagagaaaaggtgaaatagaagaagatttgaaacccaatggagttctcagcaggagtgccaaagaaagaagtaaactgaagttgcaaagcaacagtaatactggcattcctcgttcagtattgaaagattggcgtaaagtcaagaagctgaagcaaactggggaatcctttttacaggatgactcctgctgtgagatagggcctaatttacaaaagtgtcgagaatgtagacttattcgcagtaaaaaaggagaagaaccagctcactcaccagtattttgtagattttactactttagacggttgtcatttagtaaaaacggagtagttagaatagatggtttctcttctcctgaccaatatgatgatgaagctatgagtttgtggacacatgaaaattttgaagatgatgaactagatatagagacttctaaatatatcttggatataataggtgataagttctgtcaattagtaacatctgaaaaaacagctttgtcctgggtgaaaaaggatgccaaaattgcctggaaaagagcagtgagaggagtccgggagatgtgtgatgcatgtgaagcaacattgtttaacattcactgggtctgccaaaaatgtggatttgtggtctgcttagattgttacaaggcaaaggaaaggaagagttctagagataaagaactatatgcttggatgaagtgtgtgaagggacagcctcatgatcacaaacatttaatgccaacccaaattatacctggttctgttttgacagatcttctagatgccatgcacactcttagggaaaaatatggtattaaatcccattgtcattgtactaacaaacagaatttacaagttggaaattttcctacaatgaatggtgtatctcaatctcagcagcaaaatactcctccgaagtctgagaaaaatggtggcagcagcccagagagtgatgtaggcacagataacaagttaactcctccagaatcccagtcaccactgcactggttagcagatcttgcagagcaaaaagccagagaggaaaaaaaagaaaacaaagaacttacccttgaaaaccaaattaaagaagaaagagaacaagacaactctgaatctccaaatggcagaacatcacctcttgtgtcccagaataatgaacaaggctcaaccttacgggatttgctgactacaacagctggaaagctacgtgtggggtctacagatgctggcattgcctttgccccagtatattcaatgggagccccaagtagcaaaagtggacggactatgcctaacattcttgatgacataattgcttcagttgttgaaaacaaaattccaccaagtaaaacctccaagataaatgtaaaaccagagcttaaagaagagcctgaagaaagcataatatctgcagtggatgaaaataataaattatacagtgatataccacattcttggatctgtgagaagcatattttatggcttaaggattataagaatagcagtaattggaagcttttcaaagaatgttggaaacaaggacagcctgcagtggtttctggtgtgcataagaaaatgaacattagcctatggaaggcggaatcaattagtcttgattttggagaccaccaagctgatctcctgaactgcaaagatagcatcatttcaaatgccaatgttaaggaattctgggatggttttgaagaagtttcaaaacggcagaaaaacaagagtggagaaacagttgttttaaaattgaaagactggccttcaggagaagacttcaagactatgatgccagcaagatacgaagatcttttaaaaagtctgccattgccagaatattgtaatccagaaggaaaattcaatttggcctctcatttgccaggattttttgtacgtcctgatctaggacccaggttgtgcagtgcctatggtgtagttgctgctaaagatcatgatataggaacaacaaatctccatattgaagtttctgatgttgtaaatatactagtttatgttggcatagcaaaaggaaatggcattctctcaaaagcaggaattctcaagaaatttgaggaagaagatttggatgacattttaaggaaaagattgaaggactcaagtgaaatacctggtgctctgtggcatatttatgctgggaaagatgttgacaagataagggaatttcttcaaaagatttcaaaagaacaaggccttgaagttctaccagaacatgatccaatacgtgaccaaagttggtatgtgaacaaaaagctccgtcaaaggctgcttgaagaatatggagtcagaacctgtactcttattcagttccttggtgatgctattgttttgccagcgggagcacttcatcaggttcagaattttcacagctgtattcaggtaactgaagattttgtgtctccagaacatcttgtagagtcatttcatttaacacaggaactgagacttttgaaggaagaaatcaattatgatgataaactacaggttaaaaatattttgtatcatgcagtcaaagaaatggtgagagccttgaagatacacgaggatgaagtagaggatatggaagaaaattaagtgtgatccagtttgatatttttaggttgttgaactgggattacttaaccttgaatgatgatatgtatgcacactgactttaagcttcataaaaccatcagtgccaagaaattctctttgtagtaattacttgttactgacaccacagcagtatagcatatgtcacagctcctgtgattcaatgttataaaacaagcagaattttaaaagcagcactatatagctgttttgtattatagtgtatatgatgtttgtgaaaatgccagatttaaaatgatgtatttatttttggtaaaaaataaaaaattctatgctatattgttgatcaagtgtaaatgtgaccttgtacagtttactaaaattactgatatttttcactacattgagacagttactgtgagaataggacacaaacaccagctattgcctgcatctgggaaattgctgaatcgcacagcagtcatgtcataatcagaaaattactgccaaataattgtaaaatttgtaaagtataaagtatataaagtagatactaaatacagacacttcaatattttgttgaagctattgactgtacaattaaacattttcaaaaggtgtaatttatttaaaattg

SEQ ID NO: 780 - protein, 2303 aa, Homo sapiens
MIVMNDQVLEPQNVDPSMVQMTFLDDVVHSLLKGENIGITSRRRSRANQNVNAVHSHYTRAQANSPRPAMNSQAAVPKQNTHQQQQQRSIRPNKRKGSDSSIPDEEKMKEEKYDYISRGENPKGKNKHLMNKRRKPEEDEKKLNMKRLRTDNVSDFSESSDSENSNKRIIDNSSEQKPENELKNKNTSKINGEEGKPHNNEKAGEETLKNSQPPWDQIQEDKKHEEAEKRKSVDTQLQEDMIIHSSEQSTVSDHNSNDLLPQECNMDKTHTMELLPKEKFVSRPPTPKCVIDITNDTNLEKVAQENSSTFGLQTLQKMDPNVSDSKHSIANAKFLETAKKDSDQSWVSDVVKVDLTQSSVTNASSGNDHLNMEKEKYVSYISPLSAVSVMEDKLHKRSPPPETIKSKLNTSVDTHKIKSSPSPEVVKPKITHSPDSVKSKATYVNSQATGERRLANKIEHELSRCSFHPIPTRSSTLETTKSPLIIDKNEHFTVYRDPALIGSETGANHISPFLSQHPFPLHSSSHRTCLNPGTHHPALTPAPHLLAGSSSQTPLPTINTHPLTSGPHHAVHHPHLLPTVLPGVPTASLLGGHPRLESAHASSLSHLALAHQQQQQLLQHQSPHLLGQAHPSASYNQLGLYPIIWQYPNGTHAYSGLGLPSSKWVHPENAVNAEASLRRNSPSPWLHQPTPVTSADGIGLLSHIPVRPSSAEPHRPLKITAHSSPPLTKTLVDHHKEELERKAFMEPLRSVASTSAKNDLDLNRSQTGKDCHLHRHFVDPVLNQLQRPPQETGERLNKYKEEHRRILQESIDVAPFTTKIKGLEGERENYSRVASSSSSPKSHIIKQDMDVERSVSDLYKMKHSVPQSLPQSNYFTTLSNSVVNEPPRSYPSKEVSNIYGDKQSNALAAAAANPQTLTSFITSLSKPPPLIKHQPESEGLVGKIPEHLPHQIASHSVTTFRNDCRSPTHLTVSSTNTLRSMPALHRAPVFHPPIHHSLERKEGSYSSLSPPTLTPVMPVNAGGKVQESQKPPTLIPEPKDSQANFKSSSEQSLTEMWRPNNNLSKEKTEWHVEKSSGKLQAAMASVIVRPSSSTKTDSMPAMQLASKDRVSERSSAGAHKTDCLKLAEAGETGRIILPNVNSDSVHTKSEKNFQAVSQGSVPSSVMSAVNTMCNTKTDVITSAADTTSVSSWGGSEVISSLSNTILASTSSECVSSKSVSQPVAQKQECKVSTTAPVTLASSKTGSVVQPSSGFSGTTDFIHLKKHKAALAAAQYKSSNASETEPNAIKNQTLSASLPLDSTVICSTINKANSVGNGQASQTSQPNYHTKLKKAWLTRHSEEDKNTNKMENSGNSVSEIIKPCSVNLIASTSSDIQNSVDSKIIVDKYVKDDKVNRRKAKRTYESGSESGDSDESESKSEQRTKRQPKPTYKKKQNDLQKRKGEIEEDLKPNGVLSRSAKERSKLKLQSNSNTGIPRSVLKDWRKVKKLKQTGESFLQDDSCCEIGPNLQKCRECRLIRSKKGEEPAHSPVFCRFYYFRRLSFSKNGVVRIDGFSSPDQYDDEAMSLWTHENFEDDELDIETSKYILDIIGDKFCQLVTSEKTALSWVKKDAKIAWKRAVRGVREMCDACEATLFNIHWVCQKCGFVVCLDCYKAKERKSSRDKELYAWMKCVKGQPHDHKHLMPTQIIPGSVLTDLLDAMHTLREKYGIKSHCHCTNKQNLQVGNFPTMNGVSQSQQQNTPPKSEKNGGSSPESDVGTDNKLTPPESQSPLHWLADLAEQKAREEKKENKELTLENQIKEEREQDNSESPNGRTSPLVSQNNEQGSTLRDLLTTTAGKLRVGSTDAGIAFAPVYSMGAPSSKSGRTMPNILDDIIASVVENKIPPSKTSKINVKPELKEEPEESIISAVDENNKLYSDIPHSWICEKHILWLKDYKNSSNWKLFKECWKQGQPAVVSGVHKKMNISLWKAESISLDFGDHQADLLNCKDSIISNANVKEFWDGFEEVSKRQKNKSGETVVLKLKDWPSGEDFKTMMPARYEDLLKSLPLPEYCNPEGKFNLASHLPGFFVRPDLGPRLCSAYGVVAAKDHDIGTTNLHIEVSDVVNILVYVGIAKGNGILSKAGILKKFEEEDLDDILRKRLKDSSEIPGALWHIYAGKDVDKIREFLQKISKEQGLEVLPEHDPIRDQSWYVNKKLRQRLLEEYGVRTCTLIQFLGDAIVLPAGALHQVQNFHSCIQVTEDFVSPEHLVESFHLTQELRLLKEEINYDDKLQVKNILYHAVKEMVRALKIHEDEVEDMEEN

SEQ ID NO: 781 - DNA, 2308 bp, Homo sapiens
gggggaccgaccgccgcgcagcccaggccgccgcgcgcacacaccgggcccggctcctgagggcgccagcgcggccccggggagcgcgaggagccggcgaagcgcgcggcctgccgttggcggcctggtccgcagcgccctgcgcccacccgccccggacgtggggcccaagcccccgtgaagatggtgtcctggatgatctccagagccgtggtgctggtgtttggaatgctttatcctgcatattattcatacaaagctgtgaaaacaaaaaacgtgaaggaatatgttcgatggatgatgtactggattgtttttgctctctatactgtgattgaaacagtagccgatcaaacagttgcttggtttcccctgtactatgagctgaagattgcttttgtcatatggctgctttctccctataccaaaggagcaagtttaatatatagaaaattccttcatccacttctttcttcaaaggaaagggagattgatgattatattgtacaagcaaaggaacgaggctatgaaaccatggtaaactttggacggcaaggtttaaaccttgcagctactgctgctgttactgcagcagtaaagagccaaggagcaataactgaacgtttaagaagcttcagtatgcatgatttaacaactatccaaggtgatgagcctgtgggacaaagaccataccaacctctaccagaagcaaaaaagaaaagtaaaccagcccccagtgaatcagcaggttatggaattccactgaaagacggagatgagaaaacagatgaagaagcagaggggccatattcagataatgagatgttaacacacaaagggcttcgaagatcgcaaagcatgaaatctgtgaaaaccaccaaaggccgcaaagaggtgcggtacgggtcactaaaatacaaagtgaagaaacgaccacaagtgtatttttagtcatctacacgtcaaatatcccaagacagattatgctaaatacatcgacttcatcttctaacatgatatattcaggatttacacattaaaatgattatttaaattgtggcagtgatggggtttactttcatgaatttaaattgtttttatttctgtaacaattgcttccaaatattgactactaaaggcagttctgcaagatgtactaaatatgtatattagaaattatagaaaatcatgttgtccgttttcaaattcatcaacagcctagagtgcctgagatataagatgaaacacaaatccacagtatacttgaaaggagcctttttacggttcaggataaatcagcctttgtgatgtactgtgtttacctccttttgtgttgtatctggtaattaaataggcctcagattcagcagtgacataacaaggacataatgtaagataataaagtaggttttatatattctttaaatttttacttatataatactttctagtttttccaccatcagctgaaagtttttgaaacaaatatttgaaaaccaggtatccacacatagcacttttattcctgactagttttgcacacttgaaaattgtttacttattttacaactgttttactgatgctatctttattgtttttgccgtattctgacatgtcaaatctatgccttgaattatatcatctcttttcctgtgggtttcatttgttaaattcattggattttaataatataaaagtatagctaattgttcagttttaactatttttaattatcttcttaacaaataagaagttgctttaaacattaaccaattttctatatttagctatacagagtaattgaacttaacatgtttttgtcaacaccaattacattttcagcttttaaaaatggtagcttttgtgaaatagaatcagtgaccagtatagcacttagatcccttctaactcatataatttttctcagccaatccattcacaagcttggcattgacatgtgctgctagtttataaactggcattgacgaaaatcatttgaatctcttctggctgagataatttgccaatgcaaaatacagttgtcattaatcctgcacattggaaattattagaaacatattactttttaactttaaatctcaaagagattttgagttattgaattcttaaggctttcttagcttgaactgataactatgcattatgaaccctaagtcaatatatttttggtggttttagtgatcagtaatcaaatttgtacttattatgcttgttcaggtaatttacttgactgttctatttgtttgtccaaaagataaaatgatgagagagaaaaaaaaaaaaaaa

SEQ ID NO: 782 - protein, 255 aa, Homo sapiens
MVSWMISRAVVLVFGMLYPAYYSYKAVKTKNVKEYVRWMMYWIVFALYTVIETVADQTVAWFPLYYELKIAFVIWLLSPYTKGASLIYRKFLHPLLSSKEREIDDYIVQAKERGYETMVNFGRQGLNLAATAAVTAAVKSQGAITERLRSFSMHDLTTIQGDEPVGQRPYQPLPEAKKKSKPAPSESAGYGIPLKDGDEKTDEEAEGPYSDNEMLTHKGLRRSQSMKSVKTTKGRKEVRYGSLKYKVKKRPQVYF

SEQ ID NO: 783 - DNA, 8192 bp, Homo sapiens
caacgacaacaacagggggacacaaaatggcggcggcttagctcctacccctggcggcggcggcagcggtggcggaggcgacggcacctcctccaggcggcagccgcagtttctcaggcagcggcagcgcccccggcaggcgcggtggcggtggcgcgcagccagatttgcctgaagacctggataatctccatttttgtcatggactgttaaaacgtttgaagttccaattctggtcttgatttcccagttaaagatgttcttcacccgaatgcagtctttcctgttggtaaaataagacaaccatcaacattgcctgtttgtctgcttttgaatctcttaaggatggatgtttgtaagatgttgcttaatacagtctggaatactctgtccatttgttgaattgtaaatgactttcaaatgtgcaagttctgttaaatacaaagagaacctctatgggtaacttttgtgttgaagaagtcatttgtcaaccatggtaaaacttgcaaacccactttatacagagtggattcttgaagctatacagaaaataaaaaagcaaaagcaaaggccctctgaagagagaatctgccatgcggtcagtacttcccatgggttggataagaagacagtctctgaacagctggaactcagtgttcaggatggctcagttctcaaagtcaccaacaaaggccttgcctcctataaggacccagacaaccctgggcgcttttcatcagttaaaccaggcacttttcctaagtcagccaaggggtctagaggatcatgtaatgatctccgcaatgtggattggaataaacttttaaggagagcaattgaaggacttgaggagccgaatggctcctccctgaagaacatagagaagtatctcagaagtcaaagtgatctcacaagcaccaccaacaacccagcctttcagcagcggctgcgactgggggccaaacgcgctgtgaataatgggaggttactgaaagacggaccgcagtacagggtcaattatgggagcttagatggcaaaggggcacctcagtatcccagtgcattcccatcctcgctcccacctgtcagccttctaccccatgagaaagaccagccccgtgctgatcccattccaatatgtagcttctgtttggggactaaagaatcaaatcgtgaaaagaaaccagaagaactcctctcttgtgcagattgtggcagtagtggacacccatcctgtttgaaattttgtcctgaattaacaacaaatgtaaaggccttaaggtggcagtgcatcgaatgcaagacatgcagtgcctgtagagtccaaggcagaaatgctgataatatgcttttttgtgattcctgtgatagaggatttcatatggaatgctgtgacccaccactttccagaatgccaaaagggatgtggatttgccaagtctgcagaccaaagaaaaagggaagaaaactacttcatgagaaagctgcacaaataaaacgacgatatgcaaaacccattggacgaccgaaaaataaattaaagcaacgattgttgtctgtaaccagtgatgaaggatccatgaatgcattcacaggaagggggtcacctggtaggggtcaaaagactaaagtctgtaccacaccttcatctggtcatgctgcatctgggaaggactcaagcagcagattggctgttacagaccccactcggcctggtgccaccaccaaaatcaccaccacctccacctacatttctgcctctacacttaaagttaacaagaaaaccaaagggctcattgatggccttactaagttttttacaccatcacctgatggtcgcagatcacgaggtgaaattatagacttttcaaagcactatcgtccaaggaaaaaggtctctcagaaacagtcatgcacttctcatgtgttggctacaggtaccacacaaaagctaaaacctccaccttcttcacttccacccccaacccccatctccggtcagagccccagttcacaaaagtccagcacggccacttcttctccctctccccagagttcttccagccagtgcagtgtgccctccctgagcagccttaccactaacagccagctgaaggcactctttgatgggctttctcatatctataccactcagggacagtctcgcaaaaagggacacccgagttatgcaccacccaaacgtatgcgtcgtaaaactgaattatcttccacggcaaaatctaaagcccacttctttggcaaaagagatattagaagtcggtttatttctcactcctcctcctctagctgggggatggctagaggaagtatttttaaagcaattgctcacttcaagcgaacaactttccttaaaaagcacaggatgctaggcagattaaaatataaagtgacccctcagatggggaccccctcaccagggaaggggagcttgacagacggaaggattaaacctgatcaggatgatgatactgaaataaaaataaacatcaaacaagaaagtgcagatgtaaatgtgattggaaacaaggatgtcgttactgaagaggatttggatgtttttaagcaggcccaggaactttcttgggagaaaatagagtgtgagagtggggtggaagactgtggccggtacccttctgtgattgaatttggtaaatatgaaatccaaacctggtactcctcgccttacccacaggaatatgcaagattaccaaagctttacctgtgtgaattctgtcttaaatatatgaaaagtaaaaatattttgctaagacactccaagaagtgtggatggtttcatcctccagcaaatgaaatttaccgaaggaaagacctttcagtatttgaggttgatgggaatatgagcaaaatttattgccaaaacctttgcttgttagccaagctcttcctggaccacaaaacgttgtattatgatgtcgagccattccttttttatgtccttacaaaaaatgatgaaaagggctgtcatctggttggatacttctctaaggaaaagctttgccagcagaagtataatgtctcctgcataatgatcatgccccagcaccaaaggcaaggatttggacggtttctcattgatttcagctatttgctttctagaagagaaggccaagcagggtctcctgaaaagcctctctccgatctgggccgtctctcctacctggcatattggaagagcgtcatcttggagtatctctaccaccaccatgagaggcacatcagcatcaaggcaattagcagagcgacgggcatgtgcccacatgacattgccaccactctgcagcacctccacatgatcgacaagagagatggcagatttgtcatcattagacgggaaaagttgatattgagccacatggaaaagctgaaaacctgttccagagccaatgaacttgatccagacagtctgaggtggaccccaattttaatttctaatgctgcagtgtctgaagaagagcgagaagctgagaaagaggctgagcggctaatggaacaagctagctgctgggagaaggaggaacaagaaatcctgtcaactagagctaacagtaggcaatcacctgcaaaagtacaatcgaaaaataaatatttgcattccccggagagccggccagtcacaggggagcgagggcagctgctggagctgtctaaagagagcagtgaagaagaagaggaggaggaggacgaggaggaggaagaagaggaggaagaagaggaagaggatgaagaggaggaagaagaggaagaagaagaagaagaagaagaaaatattcaaagctctcccccaagattgacgaaaccacagtcagttgccataaagagaaagaggccttttgtactaaagaagaaaaggggtcgtaaacgcaggaggatcaacagcagtgtaacaacagagaccatttcagagacgacagaagtactgaatgagccctttgacaactcagatgaagagaggccaatgccacagctggagcctacctgtgagattgaagtggaggaagatggcaggaagccagtcctgagaaaagcattccagcatcagcctgggaagaaaagacaaacagaggaagaggaaggaaaagacaatcattgcttcaagaatgctgacccttgtagaaacaatatgaatgatgattcaagtaacttgaaagaaggcagtaaagacaatcccgaacctctaaagtgcaaacaagtgtggccaaaaggaacaaagcgcggtctatctaagtggaggcaaaacaaagagaggaagaccggatttaaactgaatttgtacaccccgccagaaacacccatggagcctgacgagcaggtaacagtggaagaacagaaggagacttcagaaggaaaaaccagccccagtcccatcaggattgaggaggaggtcaaggaaactggggaagccctgttgcctcaagaggaaaacagaagggaagaaacatgtgcccctgtaagtccaaacacatcaccaggtgaaaaaccagaagatgatctcatcaaacctgaggaagaggaagaggaggaggaggaggaagaggaagaagaggaagaagaggaaggggaagaagaagaaggaggaggaaatgtagaaaaagatccagatggtgctaaaagccaagaaaaagaggaaccagaaatctccacggaaaaagaagactctgcacgtttggatgatcacgaagaggaggaggaagaggatgaagagccatcccacaacgaggaccatgatgccgatgacgaggatgacagccacatggagtctgccgaagtggagaaggaagagctgcccagagaaagcttcaaagaagtactggaaaaccaggagacttttttagaccttaatgtgcagcctggtcactcgaacccagaggtcttaatggactgtggcgtcgacctgacagcttcttgtaacagtgagcccaaggagcttgctggggaccctgaagctgtacccgaatctgacgaggagccacccccaggagaacaggcacagaagcaggaccaaaagaacagcaaggaagtcgatacagagttcaaagagggaaacccagcaaccatggaaatcgactctgagactgtccaggccgttcagtctttgacccaggagagcagcgaacaggacgacacctttcaggattgtgccgagactcaagaggcctgtagaagcctacagaactacacccgtgcagaccaaagtccacagattgccaccacgctcgacgattgccaacagtcggaccacagtagcccagtttcatccgtccactcccatcctggccagtccgtacgttctgtcaacagcccaagtgtccctgctctggaaaacagctacgcccaaatcagcccagatcaaagtgccatctcagtgccatctctgcagaacatggaaaccagtcccatgatggatgtcccatcagtttcagatcattcacagcaagtcgtagacagtggatttagtgacctgggcagtatcgagagcacaactgagaactacgaaaacccaagcagctacgattctactatgggaggcagcatctgtggaaacggctcttcacagaacagctgctcctatagcaacctcacctccagcagtctgacacagagcagctgtgctgtcacccagcagatgtccaacatcagcgggagctgcagcatgctgcagcaaaccagcatcagctcccctccgacctgcagcgtcaagtctcctcaaggctgtgtggtggagaggcctccgagcagcagccagcagctggctcagtgcagcatggctgctaacttcaccccacccatgcagctggctgaaatccccgagacgagcaacgccaacattggcttatacgagcgaatgggtcagagtgattttggggctgggcattacccgcagccgtcagccaccttcagccttgccaaactgcagcagttaactaatacacttattgatcattcattgccttacagccattccgctgctgtgacttcctatgcaaacagtgcctctttgtccacaccattaagtaacacagggcttgttcaactttctcagtctccacactccgtccctgggggaccccaagcacaagctaccatgaccccaccccccaacctgactcctcctccaatgaatctgccgccgcctcttttgcaacggaacatggctgcatcaaatattggcatctctcacagccaaagactgcaaacccagattgccagcaagggccacatctccatgagaaccaagtcagcgtctctgtcaccagccgctgccacccatcagtcacaaatctatgggcgctcccagactgtagccatgcagggtcctgcacggactttaacgatgcaaagaggcatgaacatgagtgtgaacctgatgccagcgccagcctacaatgtcaactctgtgaacatgaacatgaacactctcaacgccatgaatgggtacagcatgtcccagccaatgatgaacagtggctaccacagcaatcatggctatatgaatcaaacgccccaataccctatgcagatgcagatgggcatgatgggcacccagccatatgcccagcagccaatgcagaccccaccccacggtaacatgatgtacacggcccccggacatcacggctacatgaacacaggcatgtccaaacagtctctcaatggctcctacatgagaaggtagacaacgtgggcagtccacaaaacctacggggcatcactattggattgatctgcacaaatacctttgaagagtacgatttcaaaaccagcaattggtgtgaatgcaaaaacatttgttggcaccatttatttaaaaaaaaaaaaagctgtatgcagcagaaagccttatacaagttgtttttctttttttcctttttcttttttttggtaccttcatttctgttacttttatataaaattctctgcaaaggaaggcctctctttggactacaatttggaggcagccacttgttgtgcctgcttctgttaaacaatgtggatatcaagcccccccaaattatctgttttaatattgaacctagagctttttttttcccttccctgtccactccatgtaaatgcctttagcatttcagttattgtatattttgtttaaggtgacacttcagcatgccgctaatgtctttgttagtgacagtgcattttgtagtactgtacaagtgttgtgctaacagtaagccatttcttaagttttttgccttgattagggtgccctaatttgagggttttaaaaaaaactatatttttgttaattataaaactgtaaagagctataaaagctattcccatttggttagtcaaaagggttttattgctaaatgtttggtgtaaagttgagacccttttccattttggtgacagatttctttggggaaaaaaggcagctttctgttttataaatgcagacttctgtttattgaatgaagcatatctcagtgtttatctgtcaggttttgaaacatttcatatatgtccaaatacttggcaggatttaaaaaaaaatagtgaatttggtgtaaagttgctattttatggaaatgcctctaactttacattttcattccatctgtagatttttctatctttataaaatattggagttattttttaaggaaaaatagaaaagtagcttgtgaatagctcaaactaagcttacaaatcgcatgtaaaaaagcaaaaaagttatttgtgtctgtttatattgcttccttttttgtagcctttgtacctgtacagggtgacagtaagggccaagcaggagaggcgtaatccttgtataaaataggatccagcgacactcttgtatttatctgttctctttttagtcagtcacttcaaaaaaacaaaaaacaaacaaaaaaaagctgtacattttaacataaaataaattatgatgagccatttttagcctcttgtgtcctgtcatattatgattgatagagaatgaccaatggaactgtatcatgtgtcacgcctcagaacacatacacattttgggaaaataaattatttagtgtaaattggagttatgggattttctgatttgttttgactttgggggaggggttggcaataaataagagtaatatctaataaaaccatcacatataccaaatacctatttaataaattaattt

SEQ ID NO: 784 - protein, 2073 aa, Homo sapiens
MVKLANPLYTEWILEAIQKIKKQKQRPSEERICHAVSTSHGLDKKTVSEQLELSVQDGSVLKVTNKGLASYKDPDNPGRFSSVKPGTFPKSAKGSRGSCNDLRNVDWNKLLRRAIEGLEEPNGSSLKNIEKYLRSQSDLTSTTNNPAFQQRLRLGAKRAVNNGRLLKDGPQYRVNYGSLDGKGAPQYPSAFPSSLPPVSLLPHEKDQPRADPIPICSFCLGTKESNREKKPEELLSCADCGSSGHPSCLKFCPELTTNVKALRWQCIECKTCSACRVQGRNADNMLFCDSCDRGFHMECCDPPLSRMPKGMWICQVCRPKKKGRKLLHEKAAQIKRRYAKPIGRPKNKLKQRLLSVTSDEGSMNAFTGRGSPGRGQKTKVCTTPSSGHAASGKDSSSRLAVTDPTRPGATTKITTTSTYISASTLKVNKKTKGLIDGLTKFFTPSPDGRRSRGEIIDFSKHYRPRKKVSQKQSCTSHVLATGTTQKLKPPPSSLPPPTPISGQSPSSQKSSTATSSPSPQSSSSQCSVPSLSSLTTNSQLKALFDGLSHIYTTQGQSRKKGHPSYAPPKRMRRKTELSSTAKSKAHFFGKRDIRSRFISHSSSSSWGMARGSIFKAIAHFKRTTFLKKHRMLGRLKYKVTPQMGTPSPGKGSLTDGRIKPDQDDDTEIKINIKQESADVNVIGNKDVVTEEDLDVFKQAQELSWEKIECESGVEDCGRYPSVIEFGKYEIQTWYSSPYPQEYARLPKLYLCEFCLKYMKSKNILLRHSKKCGWFHPPANEIYRRKDLSVFEVDGNMSKIYCQNLCLLAKLFLDHKTLYYDVEPFLFYVLTKNDEKGCHLVGYFSKEKLCQQKYNVSCIMIMPQHQRQGFGRFLIDFSYLLSRREGQAGSPEKPLSDLGRLSYLAYWKSVILEYLYHHHERHISIKAISRATGMCPHDIATTLQHLHMIDKRDGRFVIIRREKLILSHMEKLKTCSRANELDPDSLRWTPILISNAAVSEEEREAEKEAERLMEQASCWEKEEQEILSTRANSRQSPAKVQSKNKYLHSPESRPVTGERGQLLELSKESSEEEEEEEDEEEEEEEEEEEEDEEEEEEEEEEEEEENIQSSPPRLTKPQSVAIKRKRPFVLKKKRGRKRRRINSSVTTETISETTEVLNEPFDNSDEERPMPQLEPTCEIEVEEDGRKPVLRKAFQHQPGKKRQTEEEEGKDNHCFKNADPCRNNMNDDSSNLKEGSKDNPEPLKCKQVWPKGTKRGLSKWRQNKERKTGFKLNLYTPPETPMEPDEQVTVEEQKETSEGKTSPSPIRIEEEVKETGEALLPQEENRREETCAPVSPNTSPGEKPEDDLIKPEEEEEEEEEEEEEEEEEEGEEEEGGGNVEKDPDGAKSQEKEEPEISTEKEDSARLDDHEEEEEEDEEPSHNEDHDADDEDDSHMESAEVEKEELPRESFKEVLENQETFLDLNVQPGHSNPEVLMDCGVDLTASCNSEPKELAGDPEAVPESDEEPPPGEQAQKQDQKNSKEVDTEFKEGNPATMEIDSETVQAVQSLTQESSEQDDTFQDCAETQEACRSLQNYTRADQSPQIATTLDDCQQSDHSSPVSSVHSHPGQSVRSVNSPSVPALENSYAQISPDQSAISVPSLQNMETSPMMDVPSVSDHSQQVVDSGFSDLGSIESTTENYENPSSYDSTMGGSICGNGSSQNSCSYSNLTSSSLTQSSCAVTQQMSNISGSCSMLQQTSISSPPTCSVKSPQGCVVERPPSSSQQLAQCSMAANFTPPMQLAEIPETSNANIGLYERMGQSDFGAGHYPQPSATFSLAKLQQLTNTLIDHSLPYSHSAAVTSYANSASLSTPLSNTGLVQLSQSPHSVPGGPQAQATMTPPPNLTPPPMNLPPPLLQRNMAASNIGISHSQRLQTQIASKGHISMRTKSASLSPAAATHQSQIYGRSQTVAMQGPARTLTMQRGMNMSVNLMPAPAYNVNSVNMNMNTLNAMNGYSMSQPMMNSGYHSNHGYMNQTPQYPMQMQMGMMGTQPYAQQPMQTPPHGNMMYTAPGHHGYMNTGMSKQSLNGSYMRR

SEQ ID NO: 785 - DNA, 1788 bp, Homo sapiens
actggagaggcagagaggagtgaccacagaggcagaggggtgggcgggctggcccatggctgagacctctctcccagagctggggggagaggacaaagccacgccttgccccagcatcctggagctggaggagctcctgcgggcagggaagtcttcttgcagccgtgtggacgaagtttggcccaaccttttcataggagatgcggccacggcaaacaaccgctttgagctgtggaagctgggcatcacccacgtgctgaacgccgcccacaagggcctctactgtcagggcggccctgacttctacggcagcagtgtgagctacctgggggtgccagcccacgacctccctgattttgacatcagtgcctacttctcctctgcggctgacttcatccaccgtgccctcaacacgcctggggccaaggtcctggtgcactgtgtggtgggcgtgagccgctctgccacgctggtcctggcctacctcatgctgcaccagcggctgtccctgcgccaggcggtgatcaccgtgaggcagcaccgatgggtcttccccaaccgaggcttcctgcaccagctctgcaggctggaccagcaactgcggggtgccggccagagctgaggggccagagctggtccttactccctgccatggggctctgccactttgccaccctggcactgatcctgctggtgctgctggaggctctggcccaggcggacacacagaagatggtggaagcccagcgtggggtcggccctagagcctgctactccatctggctcctcctggcgcctacaccccctctcagccactgtcttcagtctccacagaaacagcatcaagtgtgcggagacaggcggctgaaagccagcagcacgaactgcccgtcagagaagtgcacagcctgggccagatactcccacaggatggactcactgcagaagcaggacctccggaggcccaagatccatggggcagtccaggcatctccctaccagccgcccacattggcttcgctgcagcgcttgctgtgggtccgtcaggctgccacactgaaccatatcgatgaggtctggcccagcctcttcctgggagatgcgtacgcagcccgggacaagagcaagctgatccagctgggaatcacccacgttgtgaatgccgctgcaggcaagttccaggtggacacaggtgccaaattctaccgtggaatgtccctggagtactatggcatcgaggcggacgacaaccccttcttcgacctcagtgtctactttctgcctgttgctcgatacatccgagctgccctcagtgttccccaaggccgcgtgctggtacactgtgccatgggggtaagccgctctgccacacttgtcctggccttcctcatgatctgtgagaacatgacgctggtagaggccatccagacggtgcaggcccaccgcaatatctgccctaactcaggcttcctccggcagctccaggttctggacaaccgactggggcgggagacggggcggttctgatctggcaggcagccaggatccctgacccttggcccaaccccaccagcctggccctgggaacagcaggctctgctgtttctagtgaccctgagatgtaaacagcaagtgggggctgaggcagaggcagggatagctgggtggtgacctcttagcgggtggatttccctgacccaattcagagattctttatgcaaaagtgagttcagtccatctctataataaaatattcatcgtcataaagacaaaaaaaaaaaaaaaaaa

SEQ ID NO: 786 - protein, 188 aa, Homo sapiens
MAETSLPELGGEDKATPCPSILELEELLRAGKSSCSRVDEVWPNLFIGDAATANNRFELWKLGITHVLNAAHKGLYCQGGPDFYGSSVSYLGVPAHDLPDFDISAYFSSAADFIHRALNTPGAKVLVHCVVGVSRSATLVLAYLMLHQRLSLRQAVITVRQHRWVFPNRGFLHQLCRLDQQLRGAGQS

SEQ ID NO: 787 - DNA, 1063 bp, Homo sapiens
actggagaggcagagaggagtgaccacagaggcagaggggtgggcgggctggcccatggctgagacctctctcccagagctggggggagaggacaaagccacgccttgccccagcatcctggagctggaggagctcctgcgggcagggaagtcttcttgcagccgtgtggacgaagtttggcccaaccttttcataggagatgcgatggactcactgcagaagcaggacctccggaggcccaagatccatggggcagtccaggcatctccctaccagccgcccacattggcttcgctgcagcgcttgctgtgggtccgtcaggctgccacactgaaccatatcgatgaggtctggcccagcctcttcctgggagatgcgtacgcagcccgggacaagagcaagctgatccagctgggaatcacccacgttgtgaatgccgctgcaggcaagttccaggtggacacaggtgccaaattctaccgtggaatgtccctggagtactatggcatcgaggcggacgacaaccccttcttcgacctcagtgtctactttctgcctgttgctcgatacatccgagctgccctcagtgttccccaaggccgcgtgctggtacactgtgccatgggggtaagccgctctgccacacttgtcctggccttcctcatgatctgtgagaacatgacgctggtagaggccatccagacggtgcaggcccaccgcaatatctgccctaactcaggcttcctccggcagctccaggttctggacaaccgactggggcgggagacggggcggttctgatctggcaggcagccaggatccctgacccttggcccaaccccaccagcctggccctgggaacagcaggctctgctgtttctagtgaccctgagatgtaaacagcaagtgggggctgaggcagaggcagggatagctgggtggtgacctcttagcgggtggatttccctgacccaattcagagattctttatgcaaaagtgagttcagtccatctctataataaaatattcatcgtcataaagacaaaaaaaaaaaaaaaaaa

SEQ ID NO: 788 - protein, 248 aa, Homo sapiens
MAETSLPELGGEDKATPCPSILELEELLRAGKSSCSRVDEVWPNLFIGDAMDSLQKQDLRRPKIHGAVQASPYQPPTLASLQRLLWVRQAATLNHIDEVWPSLFLGDAYAARDKSKLIQLGITHVVNAAAGKFQVDTGAKFYRGMSLEYYGIEADDNPFFDLSVYFLPVARYIRAALSVPQGRVLVHCAMGVSRSATLVLAFLMICENMTLVEAIQTVQAHRNICPNSGFLRQLQVLDNRLGRETGRF

SEQ ID NO: 789 - DNA, 1362 bp, Homo sapiens
actggagaggcagagaggagtgaccacagaggcagaggggtgggcgggctggcccatggctgagacctctctcccagagctggggggagaggacaaagccacgccttgccccagcatcctggagctggaggagctcctgcgggcagggaagtcttcttgcagccgtgtggacgaagtttggcccaaccttttcataggagatgcagctggtccttactccctgccatggggctctgccactttgccaccctggcactgatcctgctggtgctgctggaggctctggcccaggcggacacacagaagatggtggaagcccagcgtggggtcggccctagagcctgctactccatctggctcctcctggcgcctacaccccctctcagccactgtcttcagtctccacagaaacagcatcaagtgtgcggagacaggcggctgaaagccagcagcacgaactgcccgtcagagaagtgcacagcctgggccagatactcccacaggatggactcactgcagaagcaggacctccggaggcccaagatccatggggcagtccaggcatctccctaccagccgcccacattggcttcgctgcagcgcttgctgtgggtccgtcaggctgccacactgaaccatatcgatgaggtctggcccagcctcttcctgggagatgcgtacgcagcccgggacaagagcaagctgatccagctgggaatcacccacgttgtgaatgccgctgcaggcaagttccaggtggacacaggtgccaaattctaccgtggaatgtccctggagtactatggcatcgaggcggacgacaaccccttcttcgacctcagtgtctactttctgcctgttgctcgatacatccgagctgccctcagtgttccccaaggccgcgtgctggtacactgtgccatgggggtaagccgctctgccacacttgtcctggccttcctcatgatctgtgagaacatgacgctggtagaggccatccagacggtgcaggcccaccgcaatatctgccctaactcaggcttcctccggcagctccaggttctggacaaccgactggggcgggagacggggcggttctgatctggcaggcagccaggatccctgacccttggcccaaccccaccagcctggccctgggaacagcaggctctgctgtttctagtgaccctgagatgtaaacagcaagtgggggctgaggcagaggcagggatagctgggtggtgacctcttagcgggtggatttccctgacccaattcagagattctttatgcaaaagtgagttcagtccatctctataataaaatattcatcgtcataaagacaaaaaaaaaaaaaaaaaa

SEQ ID NO: 790 - protein, 291 aa, Homo sapiens
MGLCHFATLALILLVLLEALAQADTQKMVEAQRGVGPRACYSIWLLLAPTPPLSHCLQSPQKQHQVCGDRRLKASSTNCPSEKCTAWARYSHRMDSLQKQDLRRPKIHGAVQASPYQPPTLASLQRLLWVRQAATLNHIDEVWPSLFLGDAYAARDKSKLIQLGITHVVNAAAGKFQVDTGAKFYRGMSLEYYGIEADDNPFFDLSVYFLPVARYIRAALSVPQGRVLVHCAMGVSRSATLVLAFLMICENMTLVEAIQTVQAHRNICPNSGFLRQLQVLDNRLGRETGRF

SEQ ID NO: 791 - DNA, 1580 bp, Homo sapiens
actggagaggcagagaggagtgaccacagaggcagaggggtgggcgggctggcccatggctgagacctctctcccagagctggggggagaggacaaagccacgccttgccccagcatcctggagctggaggagctcctgcgggcagggaagtcttcttgcagccgtgtggacgaagtttggcccaaccttttcataggagatgcggccacggcaaacaaccgctttgagctgtggaagctgggcatcacccacgtgctgaacgccgcccacaagggcctctactgtcagggcggccctgacttctacggcagcagtgtgagctacctgggggtgccagcccacgacctccctgattttgacatcagtgcctacttctcctctgcggctgacttcatccaccgtgccctcaacacgcctggggagctggtccttactccctgccatggggctctgccactttgccaccctggcactgatcctgctggtgctgctggaggctctggcccaggcggacacacagaagatggtggaagcccagcgtggggtcggccctagagcctgctactccatctggctcctcctggcgcctacaccccctctcagccactgtcttcagtctccacagaaacagcatcaagtgtgcggagacaggcggctgaaagccagcagcacgaactgcccgtcagagaagtgcacagcctgggccagatactcccacaggatggactcactgcagaagcaggacctccggaggcccaagatccatggggcagtccaggcatctccctaccagccgcccacattggcttcgctgcagcgcttgctgtgggtccgtcaggctgccacactgaaccatatcgatgaggtctggcccagcctcttcctgggagatgcgtacgcagcccgggacaagagcaagctgatccagctgggaatcacccacgttgtgaatgccgctgcaggcaagttccaggtggacacaggtgccaaattctaccgtggaatgtccctggagtactatggcatcgaggcggacgacaaccccttcttcgacctcagtgtctactttctgcctgttgctcgatacatccgagctgccctcagtgttccccaaggccgcgtgctggtacactgtgccatgggggtaagccgctctgccacacttgtcctggccttcctcatgatctgtgagaacatgacgctggtagaggccatccagacggtgcaggcccaccgcaatatctgccctaactcaggcttcctccggcagctccaggttctggacaaccgactggggcgggagacggggcggttctgatctggcaggcagccaggatccctgacccttggcccaaccccaccagcctggccctgggaacagcaggctctgctgtttctagtgaccctgagatgtaaacagcaagtgggggctgaggcagaggcagggatagctgggtggtgacctcttagcgggtggatttccctgacccaattcagagattctttatgcaaaagtgagttcagtccatctctataataaaatattcatcgtcataaagacaaaaaaaaaaaaaaaaaa

SEQ ID NO: 792 - protein, 166 aa, Homo sapiens
MAETSLPELGGEDKATPCPSILELEELLRAGKSSCSRVDEVWPNLFIGDAATANNRFELWKLGITHVLNAAHKGLYCQGGPDFYGSSVSYLGVPAHDLPDFDISAYFSSAADFIHRALNTPGELVLTPCHGALPLCHPGTDPAGAAGGSGPGGHTEDGGSPAWGRP

SEQ ID NO: 793 - DNA, 1158 bp, Homo sapiens
actggagaggcagagaggagtgaccacagaggcagaggggtgggcgggctggcccatggctgagacctctctcccagagctggggggagaggacaaagccacgccttgccccagcatcctggagctggaggagctcctgcgggcagggaagtcttcttgcagccgtgtggacgaagtttggcccaaccttttcataggagatgcaaacagcatcaagtgtgcggagacaggcggctgaaagccagcagcacgaactgcccgtcagagaagtgcacagcctgggccagatactcccacaggatggactcactgcagaagcaggacctccggaggcccaagatccatggggcagtccaggcatctccctaccagccgcccacattggcttcgctgcagcgcttgctgtgggtccgtcaggctgccacactgaaccatatcgatgaggtctggcccagcctcttcctgggagatgcgtacgcagcccgggacaagagcaagctgatccagctgggaatcacccacgttgtgaatgccgctgcaggcaagttccaggtggacacaggtgccaaattctaccgtggaatgtccctggagtactatggcatcgaggcggacgacaaccccttcttcgacctcagtgtctactttctgcctgttgctcgatacatccgagctgccctcagtgttccccaaggccgcgtgctggtacactgtgccatgggggtaagccgctctgccacacttgtcctggccttcctcatgatctgtgagaacatgacgctggtagaggccatccagacggtgcaggcccaccgcaatatctgccctaactcaggcttcctccggcagctccaggttctggacaaccgactggggcgggagacggggcggttctgatctggcaggcagccaggatccctgacccttggcccaaccccaccagcctggccctgggaacagcaggctctgctgtttctagtgaccctgagatgtaaacagcaagtgggggctgaggcagaggcagggatagctgggtggtgacctcttagcgggtggatttccctgacccaattcagagattctttatgcaaaagtgagttcagtccatctctataataaaatattcatcgtcataaagacaaaaaaaaaaaaaaaaaa

SEQ ID NO: 794 - protein, 60 aa, Homo sapiens
MAETSLPELGGEDKATPCPSILELEELLRAGKSSCSRVDEVWPNLFIGDANSIKCAETGG

SEQ ID NO: 795 - DNA, 923 bp, Homo sapiens
gctcaggcagagtcctgcccctgcacccactcccccattcccggccccaggccatgccccaggatggactcactgcagaagcaggacctccggaggcccaagatccatggggcagtccaggcatctccctaccagccgcccacattggcttcgctgcagcgcttgctgtgggtccgtcaggctgccacactgaaccatatcgatgaggtctggcccagcctcttcctgggagatgcgtacgcagcccgggacaagagcaagctgatccagctgggaatcacccacgttgtgaatgccgctgcaggcaagttccaggtggacacaggtgccaaattctaccgtggaatgtccctggagtactatggcatcgaggcggacgacaaccccttcttcgacctcagtgtctactttctgcctgttgctcgatacatccgagctgccctcagtgttccccaaggccgcgtgctggtacactgtgccatgggggtaagccgctctgccacacttgtcctggccttcctcatgatctgtgagaacatgacgctggtagaggccatccagacggtgcaggcccaccgcaatatctgccctaactcaggcttcctccggcagctccaggttctggacaaccgactggggcgggagacggggcggttctgatctggcaggcagccaggatccctgacccttggcccaaccccaccagcctggccctgggaacagcaggctctgctgtttctagtgaccctgagatgtaaacagcaagtgggggctgaggcagaggcagggatagctgggtggtgacctcttagcgggtggatttccctgacccaattcagagattctttatgcaaaagtgagttcagtccatctctataataaaatattcatcgtcataaagaaaaaaaaaaaaaaaaaaaaaa

SEQ ID NO: 796 - protein, 198 aa, Homo sapiens
MDSLQKQDLRRPKIHGAVQASPYQPPTLASLQRLLWVRQAATLNHIDEVWPSLFLGDAYAARDKSKLIQLGITHVVNAAAGKFQVDTGAKFYRGMSLEYYGIEADDNPFFDLSVYFLPVARYIRAALSVPQGRVLVHCAMGVSRSATLVLAFLMICENMTLVEAIQTVQAHRNICPNSGFLRQLQVLDNRLGRETGRF

SEQ ID NO: 797 - DNA, 1505 bp, Homo sapiens
gtctcggaccgcggaggtgagcgggagctgaggctgaggagaggggagcttggggggcgcctgctgccaagggcagcggaggaggaaatggcaggtcctaatcaactctgcattcgccgctggactaccaagcatgtagctgtgtggctgaaggatgaaggcttttttgaatatgtggacattttatgcaataagcaccgacttgatggaatcacattgctaacattgactgaatatgatctccggtctcctcctctggaaatcaaagtcttaggggacattaaaaggttaatgctctcagtccgaaaattgcagaaaatacatattgatgttttagaagagatgggctacaacagtgacagtcccatgggttccatgacccctttcatcagtgctcttcagagtacagactggctctgtaatggggagctttcccatgactgtgacggacccataactgacttgaattctgatcagtaccagtacatgaatggtaaaaacaaacattctgttcgaagattggacccagaatactggaagactatactgagttgtatatatgtttttatagtatttggatttacatctttcattatggttatagtccatgagcgagtgcctgacatgcagacctatccaccactcccagatatattcttagacagcgttcctagaatcccatgggcctttgccatgacggaagtatgtggcatgattctgtgctatatttggctcctggttcttcttcttcacaagcacaggtcaatacttctgcgaaggctctgtagtctgatgggaactgtattcttgcttcgctgctttaccatgtttgtgacctccctctccgtgccaggacaacacctgcagtgtactggaaagatatatggcagtgtatgggagaaattacatcgagcctttgccatttggagtggctttggtatgaccctgactggcgttcacacatgtggagattacatgtttagtggccacacagtcgtcctaactatgctgaatttctttgtcaccgaatgtaagtatctttttagtgcttctatgcgtattaggtaactagctgcagtgaaggctgtgggaagggtgtcagatcctgtgaagaatggcaaaacagcctgacctgagaaacgtgactgagaagcattggaaggaatgtagctttaaaatgatctttctgtccttttcctagatacaccaagaagctggaatttcttgcacactttatcctgggttctcaacctctttggaatcttcttcatcttggctgcccatgaacattattctattgatgtgtttattgctttttatataacaacaagactctttttgtactaccatactctggccaataccagagcatatcagcagagtaggagagcaaggatttggtttcccatgttctctttttttgaatgcaatgttaatggcacagtacctaatgaatattgttggccattttcaaaaccagcaataatgaaaagactaattggatg

SEQ ID NO: 798 - protein, 326 aa, Homo sapiens
MAGPNQLCIRRWTTKHVAVWLKDEGFFEYVDILCNKHRLDGITLLTLTEYDLRSPPLEIKVLGDIKRLMLSVRKLQKIHIDVLEEMGYNSDSPMGSMTPFISALQSTDWLCNGELSHDCDGPITDLNSDQYQYMNGKNKHSVRRLDPEYWKTILSCIYVFIVFGFTSFIMVIVHERVPDMQTYPPLPDIFLDSVPRIPWAFAMTEVCGMILCYIWLLVLLLHKHRSILLRRLCSLMGTVFLLRCFTMFVTSLSVPGQHLQCTGKIYGSVWEKLHRAFAIWSGFGMTLTGVHTCGDYMFSGHTVVLTMLNFFVTECKYLFSASMRIR

SEQ ID NO: 799 - DNA, 1522 bp, Homo sapiens
ggttgcggcgggcggaacggtgtctccttcacttcgccctccagctgctgcagctgcagcccgaccgcgagcgtgccaagcggcttcagcagctagcggagcggtggcggcggcccccctcaggacaccaccagattcccctcttcccgcggcctcgccatggcgacccacggacagacttgcgcgcgtccaatgtgtattcctccatcatatgctgaccttggcaaagctgccagagatattttcaacaaaggatttggttttgggttggtgaaactggatgtgaaaacaaagtcttgcagtggcgtggaattttcaacgtccggttcatctaatacagacactggtaaagttactgggaccttggagaccaaatacaagtggtgtgagtatggtctgactttcacagaaaagtggaacactgataacactctgggaacagaaatcgcaattgaagaccagatttgtcaaggtttgaaactgacatttgatactaccttctcaccaaacacaggaaagaaaagtggtaaaatcaagtcttcttacaagagggagtgtataaaccttggttgtgatgttgactttgattttgctggacctgcaatccatggttcagctgtctttggttatgagggctggcttgctggctaccagatgacctttgacagtgccaaatcaaagctgacaaggaataactttgcagtgggctacaggactggggacttccagctacacactaatgtcaacgatgggacagaatttggaggatcaatttatcagaaagtttgtgaagatcttgacacttcagtaaaccttgcttggacatcaggtaccaactgcactcgttttggcattgcagctaaatatcagttggatcccactgcttccatttctgcaaaagtcaacaactctagcttaattggagtaggctatactcagactctgaggcctggtgtgaagcttacactctctgctctggtagatgggaagagcattaatgctggaggccacaaggttgggctcgccctggagttggaggcttaatccagctgaaagaaacctttgggaatggatatcagaagatttggccttaatatatttccattgtgaccagcagcaggcttttttcccccaagaagatgatcaaaacaaaggatgatctcaacaagagctgtattttaagtatttagacagttctttgttagctggtttctagttggttatctagttaccaatgctgcagtcctgcagtcacctatacattatttaaatgtatttaactgttaaatgcgctacccaccaataatgaaatagacctttatgaaaactgtgcaattgtgtgcatgtttgtttttatgttcctttagaaaacattgactgttaccattgaatgagatggatcagtggatattaagatgaggttacaaattttgttaagttcagccattattacttttggtatcccagaacatgacaaattatgaataaaacaagtatacataaaaaaaaaaaaaaaaaaaaa

SEQ ID NO: 800 - protein, 294 aa, Homo sapiens
MATHGQTCARPMCIPPSYADLGKAARDIFNKGFGFGLVKLDVKTKSCSGVEFSTSGSSNTDTGKVTGTLETKYKWCEYGLTFTEKWNTDNTLGTEIAIEDQICQGLKLTFDTTFSPNTGKKSGKIKSSYKRECINLGCDVDFDFAGPAIHGSAVFGYEGWLAGYQMTFDSAKSKLTRNNFAVGYRTGDFQLHTNVNDGTEFGGSIYQKVCEDLDTSVNLAWTSGTNCTRFGIAAKYQLDPTASISAKVNNSSLIGVGYTQTLRPGVKLTLSALVDGKSINAGGHKVGLALELEA

SEQ ID NO: 801 - DNA, 1041 bp, Homo sapiens
ggcgggcccgcgagtccgagacctgtcccaggagctccagctcacgtgacctgtcactgcctcccgccgcctcctgcccgcgccatgacccagccggtgccccggctctccgtgcccgccgcgctggccctgggctcagccgcactgggcgccgccttcgccactggcctcttcctggggaggcggtgccccccatggcgaggccggcgagagcagtgcctgcttccccccgaggacagccgcctgtggcagtatcttctgagccgctccatgcgggagcacccggcgctgcgaagcctgaggctgctgaccctggagcagccgcagggggattctatgatgacctgcgagcaggcccagctcttggccaacctggcgcggctcatccaggccaagaaggcgctggacctgggcaccttcacgggctactccgccctggccctggccctggcgctgcccgcggacgggcgcgtggtgacctgcgaggtggacgcgcagcccccggagctgggacggcccctgtggaggcaggccgaggcggagcacaagatcgacctccggctgaagcccgccttggagaccctggacgagctgctggcggcgggcgaggccggcaccttcgacgtggccgtggtggatgcggacaaggagaactgctccgcctactacgagcgctgcctgcagctgctgcgacccggaggcatcctcgccgtcctcagagtcctgtggcgcgggaaggtgctgcaacctccgaaaggggacgtggcggccgagtgtgtgcgaaacctaaacgaacgcatccggcgggacgtcagggtctacatcagcctcctgcccctgggcgatggactcaccttggccttcaagatctagggctggcccctagtgagtgggctcgagggagggttgcctgggaaccccaggaattgaccctgagttttaaattcgaaaataaagtggggctgggacacacgaaaaaaaaaaaaaaaaaaaaaaaaaaaaaaaaaaaaaaaaaaaaaaaaaaaaaaaaaaaaaaaaaaa

SEQ ID NO: 802 - protein, 262 aa, Homo sapiens
MTQPVPRLSVPAALALGSAALGAAFATGLFLGRRCPPWRGRREQCLLPPEDSRLWQYLLSRSMREHPALRSLRLLTLEQPQGDSMMTCEQAQLLANLARLIQAKKALDLGTFTGYSALALALALPADGRVVTCEVDAQPPELGRPLWRQAEAEHKIDLRLKPALETLDELLAAGEAGTFDVAVVDADKENCSAYYERCLQLLRPGGILAVLRVLWRGKVLQPPKGDVAAECVRNLNERIRRDVRVYISLLPLGDGLTLAFKI

SEQ ID NO: 803 - DNA, 2570 bp, Homo sapiens
acccttcacttaccgcgcgcccggggtgactcggatccgtccaacacgtcggggaatcctttctgtcctcacccccgggcgccccagcgccggaacgctgctgcctctgtgtagctgctcccggaaggagtttcatcaaacttttaaggggctttggttttgggttgtgttgataaaataccaagaaggggcatgaaggcacgaacgtcccgggttcgtctccctgctggtcccaagcctgaatcccagggcgggggaatgtctaggtccttccgggccggcaaggtgtggtcgctcagggacccctgtccgaagacgctagggaaaagaggcacagcctgtgggtcgcagtggccaggagcgcgtggccgctgctggtgagagagtggtagacgcctggctttcaggtcctgagctgcgggcaccggagcgtgggaccccggctgcagcaccgccacgcgctcccgccctcccacctgcagggcgggggatgtctgtccaagaggccggggcgacaagcccgccggccaggattctcaaggaaccaggcccagctcagcctctctcggcgggaccagagtgggaccggggccgcggcgtccgaagacgctgcgggccaggggtcctcctcggcgccagctccgtttcctggggtctcgcgacgtccggacatcagggtcgggggtgtggagacggcggcggagccagagtccccaccaagtcagttccaggaggcggcccgcgcgcttcccgcagtgtccgggaggtcgctgggggtggctttgcgtgcaacccgggtaaaggccctgcagccgtgaggctggcgctgggaggagggtggaaaatctcaaagtcaccaatcccggtgcaaatggcggcaggggccgcgggctgtcggacgcaggcgagaggccaaaggctgacttcgcgcggccgtgagtccccagaggcaacaggggtacctgagcgccgaggggatcccgagactcggagaaaccggaagagcctgaccccagggagcggagagtttggggtgcgctctcagagctgtgactccacggtcccggaatccttggaaagggcgctctgggctcagagctcccaactagccggaggacctgggctagcgcccaggcctggagcgtctgggagggggcgctgggtctcggcccccctccccccaaaagggactgagacttttttctgcgtgcttccttcggcgcttcgggcagctctgtcctgcggcccaagctggggagaagacagcggcccgcgccacagggagctgcgcccggacccagactcccgccgcgcttctgcagagcggagccctaggtgcccacctggtagccccagaaaggccggacctgggcgccgggacgctcgcggggccgcacttggaggggctttccgggtcctggccgggcgggctctcctgcggcgcggaatggaatagagcgccggctgcagagccacccggacggggaaaagcagcggtggcgccggccagccccgggtcccgactctggagggaggaaggagcgggcgggtgggggtgggggtgagggcgagggttgcggggagcgtttagaaggccctgggcagccagaagaagaaaagaggacgcactctcccctagggaccagagggtccctgcgtactccccccaggcccgggacacaggttcccccagcgcccctccgcctcccagtctattcggcttgccccagcgcgctgccccacgtccccgaggccccggcccaggcccagccggcgagtcccggcctgctccactctgcacaaaacgaaacccaaatgcccaaaaagctcaggagggaaatttaacaaaaaccctgtcccccgccccacaccccctttcacttttaacaagccagctgccaagagaaaattgaaataaaaacgaaatgatagatagcggaggacactattttccaaatggtgaaatatcctctaaaaacatgttccccaaggccaacttcgcggctggtagccccttccgacgcctttgcctcccagaaaatcacaacaaagcgatcggaaattcggccacggtcccgggaagaaggagtagcagtgaggccccggaacccactgcggccgaaactgccatgctctctttaaccaaaataaaaaagataagaagaagaagtaaaaccctttaatacatcaaatatacggaattttaatctttaaagcgatacattgtctattattttagtacatgacgtaaaccttgtccccttctcagcgggtggacttaaaaattaaaaatagttaagtgttccttttaaagaacaaaataaggcaaatgaggttttggaatagaattttttctttttctttttttttttgttgttttcttccagaatacatacaaaaaaatacccattctcttcgatggtatacaccttaaaaataattgcaatttgaaatcagagctgacaaattgtgactttttttttcattttttttgtaacaaacatgcatgtaaatttgtgtttcaatcagacattaaataacgtacaatacaatcatagcaattttaaagt

SEQ ID NO: 804 - protein, 321 aa, Homo sapiens
MSVQEAGATSPPARILKEPGPAQPLSAGPEWDRGRGVRRRCGPGVLLGASSVSWGLATSGHQGRGCGDGGGARVPTKSVPGGGPRASRSVREVAGGGFACNPGKGPAAVRLALGGGWKISKSPIPVQMAAGAAGCRTQARGQRLTSRGRESPEATGVPERRGDPETRRNRKSLTPGSGEFGVRSQSCDSTVPESLERALWAQSSQLAGGPGLAPRPGASGRGRWVSAPLPPKGTETFFCVLPSALRAALSCGPSWGEDSGPRHRELRPDPDSRRASAERSPRCPPGSPRKAGPGRRDARGAALGGAFRVLAGRALLRRGME

SEQ ID NO: 805 - DNA, 2798 bp, Homo sapiens
ccgcgagccgcccggcactcccgcagtccagccggctcctctagcccggccacggctccgctgcgggccacccaggattactcgcgtctggctccaggcgccgagaaggcgcgctgggcgcccgtggccgccgcgccagctcctcctcctcccgctgctcctgctcccggggcgagcgcgcagccccgagcccgccccgcgcctcccggagccctcccccccgctgctcccatgcgcgcgggtgggtcatgagcacagcgccctcgctttctgccctaagaagcagtaagcacagcggcggcggcggcggcggaggcggaggcggcggtgcagaccctgcctggaccagcgcgctctctggaaatagctccggccccggcccaggctcgtccccggccggcagcaccaagccttttgtgcacgccgtgcccccctctgaccccctgcgccaggccaaccgcctgccaatcaaggtgctgaagatgctgacggcacgaactggccacattttgcaccccgagtacctgcagcccctgccttccacgccggtcagccccatcgagctcgatgccaagaagagcccgctggcgctgttggcgcaaacatgttcgcagatcgggaagcccgacccctcgccctcctccaaactctcctcggttgcctccaacgggggcggcgcgggcggtgccggcggcggtgctgcgggcgacaaggacaccaaatcgggccccctgaagctgagcgacatcggcgtggaggacaagtcgagtttcaagccgtactccaaacccggctcggataagaaggagccgggaggcggcggtggaggcggtggcggtggcgggggcggcggcgggggtgtttcgtcggagaagtcgggattccgggtaccgagcgccacctgccagccattcacgcccaggacaggcagcccgagctccagcgcctcggcctgctcgccgggaggtatgctgtcctcggccgggggtgccccggagggcaaggacgacaagaaagacaccgacgtgggcggcggtggcaagggcaccgggggcgcctcggccgaagggggacccacggggctggcacacggccggattagctgcggcggcgggattaatgtggatgtgaaccagcatccggatgggggcccgggaggcaaggctctgggctcggactgcggcggttcatcgggctccagctccggctccggccccagcgcgcccacctcctcctcagtgttgggctctgggctggtggctcccgtgtcaccctacaagccgggccagacagtgttccctctgcctcccgcgggtatgacctacccaggcagcctggccggggcctacgccggctacccgccccagttcctgccacacggcgtggcacttgaccccaccaagccgggcagcctggtgggggcgcagctggcggcggccgcggccgggtctctgggctgcagtaagccggccggctccagtcctttggccggagcgtctccgccgtccgtgatgacagccagtttgtgccgggacccttactgcctcagctaccactgcgctagccacctggcaggggcggcggccgccagcgcttcttgcgcacatgatccggctgctgcggctgcggcgctgaagtccggatacccgctggtgtaccccacgcacccgctgcacggtgtgcactcctcgctaacggccgccgcggctgctggcgccacaccgccctccctggccggccaccccctctacccctacggctttatgctccctaacgacccactcccccacatctgcaactgggtgtcggccaacgggccgtgcgacaagcgcttcgccacgtccgaagagctgctgagccacttgcggacccatacggcatttcccgggacagacaaactgctgtcgggctaccccagctcgtcgtctctggccagcgctgccgcggccgccatggcttgccacatgcacatccccacctcgggcgcaccgggcagccctgggacgctggcgctgcgcagcccccaccacgcgctgggactcagcagccgctaccacccctactccaagagcccgcttcccacgcctggcgcccccgtgccggtgcccgccgccaccggaccgtactactccccctacgccctctacggacagagactgaccaccgcctcggcgctggggtatcagtgagggcggccgggagggcgagcgagggagaggagggagagggggaggggaggagtccagggagaggcgggatcacggcccaggctgctgacacccgcgcgtggggaggactcgggccacgaaaggaaagaaatgtataccgtatctatctacccgacagcagcgaccgagacccggtgggacactccccttctccccactttcacctccccacccaaactttataaaagttgaaaaaatatcatttgactttttatagaaaaaaaaaggaaaaaataattgagaaagtgttcatctgaggactgcatcggtggacactggtatttatttatgttagctccaagcggaccggtggttcaaaagtgcattatttagtttgagctctgtaggtaaaaaggaggtgggaaaaattttaaaacttgagggtaaaaatgtggaaaacaaaccctcccatcccttgtagattataaataaaagcaaaaccgccacagaactagaggtcttctctttaatgttactttaaaattgctatgattgtattgtacgttatttaatgtctgattgaaacacaaatttacatgcatgtttgttacaaaaaaaaaaaaaaaaaaa

SEQ ID NO: 806 - protein, 646 aa, Homo sapiens
MSTAPSLSALRSSKHSGGGGGGGGGGGADPAWTSALSGNSSGPGPGSSPAGSTKPFVHAVPPSDPLRQANRLPIKVLKMLTARTGHILHPEYLQPLPSTPVSPIELDAKKSPLALLAQTCSQIGKPDPSPSSKLSSVASNGGGAGGAGGGAAGDKDTKSGPLKLSDIGVEDKSSFKPYSKPGSDKKEPGGGGGGGGGGGGGGGGVSSEKSGFRVPSATCQPFTPRTGSPSSSASACSPGGMLSSAGGAPEGKDDKKDTDVGGGGKGTGGASAEGGPTGLAHGRISCGGGINVDVNQHPDGGPGGKALGSDCGGSSGSSSGSGPSAPTSSSVLGSGLVAPVSPYKPGQTVFPLPPAGMTYPGSLAGAYAGYPPQFLPHGVALDPTKPGSLVGAQLAAAAAGSLGCSKPAGSSPLAGASPPSVMTASLCRDPYCLSYHCASHLAGAAAASASCAHDPAAAAAALKSGYPLVYPTHPLHGVHSSLTAAAAAGATPPSLAGHPLYPYGFMLPNDPLPHICNWVSANGPCDKRFATSEELLSHLRTHTAFPGTDKLLSGYPSSSSLASAAAAAMACHMHIPTSGAPGSPGTLALRSPHHALGLSSRYHPYSKSPLPTPGAPVPVPAATGPYYSPYALYGQRLTTASALGYQ

SEQ ID NO: 807 - DNA, 1332 bp, Homo sapiens
atgggcagtcgcagcggcggcggctcaacaccgcgaggagcgctgggctctccgcccttcccggccacggcgccgagaggggcgcgcaggcctggagtgtgcgcctgccctctcggtgtcggagagacgcccttccacctctgggagcctcggtctgttggggtcgcggagttcgggcgcggctccgggtacccgagaccagcggcggcaacttctaacacgggagatttcccgccaccccaccccgccgccgcgagtcctcgcggggcgtgttgcgtgcggagaatcgacgggatttctctggctgtcgtttgcgctgcatttatccgaatacatccagctcgcaggcatcctgcaagaaacggctcccggctcgcgtgtacgccgacacctcggcccaacgcaggactcgaggtggtttctagtgcccgggtggctgcaagtctgccctccgagggaggctggacaagcggcgcccccaggtcgagcggcctctcgctgcctggcagtgcctggcagcccccacctctgccagtgcttcggaaacccgcctggccaggttcgcccgcggtgaaaaatgaaagcaaattccccaacagaggtagccggaactttcctcgacgaaggctccctcctgcgcctgtgtctggagaacccccagagcgctgcaagttagcaagagagattcgatggcggctctggaaggcgcacgaagggtggggcgggggagcaaagaggccactgggtgacccagcctggtccggggtgaaacgctagagaaggcgcctcgccttccttatttcaatgcaactcctcggccccagacggtaaaaatagtttccaagctgccgcggacgcccaggatgtgtttgcagagatcaaactggggaggaggcagctttgtaaaagttgcagaaagattagccgagaagcgtccgcccggcggggctcaagaaagcttggggacagctccatgttccttggggcggaatggcccaagaattggcctgggtaaccccctgcccagttctctgtcctcacttcgagccagtgcttaaataacttcccgccgcctgccctgcaaacttcccggcgcggcgccgttgaggccaggacacagcaaaggctagcaaaaccccgccgcggcgcgctcggccccggccctgagaggctgcgcgggtgggaggaccagtgtggtttctgctcccactcggctgcccagaccctcaagaccgatcccccaactcctgggagcgggtgcttccctctgggagccgagatcttgcggggccagcgagggcgcaaagtgcgcgcgctggcccgcgcgggggc

SEQ ID NO: 808 - protein, 258 aa, Homo sapiens
MGSRSGGGSTPRGALGSPPFPATAPRGARRPGVCACPLGVGETPFHLWEPRSVGVAEFGRGSGYPRPAAATSNTGDFPPPHPAAASPRGACCVRRIDGISLAVVCAAFIRIHPARRHPARNGSRLACTPTPRPNAGLEVVSSARVAASLPSEGGWTSGAPRSSGLSLPGSAWQPPPLPVLRKPAWPGSPAVKNESKFPNRGSRNFPRRRLPPAPVSGEPPERCKLAREIRWRLWKAHEGWGGGAKRPLGDPAWSGVKR

SEQ ID NO: 809 - DNA, 1959 bp, Homo sapiens
tctcacggagacggaccacagcaagcagaggctgggggggggaaagacgaggaaagaggaggaaaacaaaagctgctacttatggaagatacaaaggagtctaacgtgaagacattttgctccaagaatatcctagccatccttggcttctcctctatcatagctgtgatagctttgcttgctgtggggttgacccagaacaaagcattgccagaaaacgttaagtatgggattgtgctggatgcgggttcttctcacacaagtttatacatctataagtggccagcagaaaaggagaatgacacaggcgtggtgcatcaagtagaagaatgcagggttaaaggtcctggaatctcaaaatttgttcagaaagtaaatgaaataggcatttacctgactgattgcatggaaagagctagggaagtgattccaaggtcccagcaccaagagacacccgtttacctgggagccacggcaggcatgcggttgctcaggatggaaagtgaagagttggcagacagggttctggatgtggtggagaggagcctcagcaactacccctttgacttccagggtgccaggatcattactggccaagaggaaggtgcctatggctggattactatcaactatctgctgggcaaattcagtcagaaaacaaggtggttcagcatagtcccatatgaaaccaataatcaggaaacctttggagctttggaccttgggggagcctctacacaagtcacttttgtaccccaaaaccagactatcgagtccccagataatgctctgcaatttcgcctctatggcaaggactacaatgtctacacacatagcttcttgtgctatgggaaggatcaggcactctggcagaaactggccaaggacattcaggttgcaagtaatgaaattctcagggacccatgctttcatcctggatataagaaggtagtgaacgtaagtgacctttacaagaccccctgcaccaagagatttgagatgactcttccattccagcagtttgaaatccagggtattggaaactatcaacaatgccatcaaagcatcctggagctcttcaacaccagttactgcccttactcccagtgtgccttcaatgggattttcttgccaccactccagggggattttggggcattttcagctttttactttgtgatgaagtttttaaacttgacatcagagaaagtctctcaggaaaaggtgactgagatgatgaaaaagttctgtgctcagccttgggaggagataaaaacatcttacgctggagtaaaggagaagtacctgagtgaatactgcttttctggtacctacattctctccctccttctgcaaggctatcatttcacagctgattcctgggagcacatccatttcattggcaagatccagggcagcgacgccggctggactttgggctacatgctgaacctgaccaacatgatcccagctgagcaaccattgtccacacctctctcccactccacctatgtcttcctcatggttctattctccctggtccttttcacagtggccatcataggcttgcttatctttcacaagccttcatatttctggaaagatatggtatagcaaaagcagctgaaatatgctggctggagtgaggaaaaaaatcgtccagggagcattttcctccatcgcagtgttcaaggccatccttccctgtctgccagggccagtcttgacgagtgtgaagcttccttggcttttactgaagcctttcttttggaggtattcaatatcctttgcctcaaggacttcggcagatactgtctctttcatgagtttttcccagctacacctttctcctttgtactttgtgcttgtataggttttaaagacctgacacctttcataatctttgctttataaaagaacaatattgactttgtctagaaaaaaaaaaaaaaaaaaaaa

SEQ ID NO: 810 - protein, 510 aa, Homo sapiens
MEDTKESNVKTFCSKNILAILGFSSIIAVIALLAVGLTQNKALPENVKYGIVLDAGSSHTSLYIYKWPAEKENDTGVVHQVEECRVKGPGISKFVQKVNEIGIYLTDCMERAREVIPRSQHQETPVYLGATAGMRLLRMESEELADRVLDVVERSLSNYPFDFQGARIITGQEEGAYGWITINYLLGKFSQKTRWFSIVPYETNNQETFGALDLGGASTQVTFVPQNQTIESPDNALQFRLYGKDYNVYTHSFLCYGKDQALWQKLAKDIQVASNEILRDPCFHPGYKKVVNVSDLYKTPCTKRFEMTLPFQQFEIQGIGNYQQCHQSILELFNTSYCPYSQCAFNGIFLPPLQGDFGAFSAFYFVMKFLNLTSEKVSQEKVTEMMKKFCAQPWEEIKTSYAGVKEKYLSEYCFSGTYILSLLLQGYHFTADSWEHIHFIGKIQGSDAGWTLGYMLNLTNMIPAEQPLSTPLSHSTYVFLMVLFSLVLFTVAIIGLLIFHKPSYFWKDMV

SEQ ID NO: 811 - DNA, 1890 bp, Homo sapiens
tacaatatcacctttcttatagattcgcatatacatggccaaaggaacaactccatgttttctaaaaggcctagagaacatacatcagctcaccaggacatgattatagcttctcaagcttatctaaaataaaagataacatatatatcaacatttttgatgaaatgatgactgaaaaacatgaggatcactgtctcaagagctgtagtggtcactcatatataagaaagaattggcttggatgcattgtcttccctttttctgctcttctgcaacaatctgagtttttagatcaaacagaggtcttgcagagagcacagatttttaaaaagaattgtaaggcaatgtttcccaaccgaagaatcgtaactactgtttttaatgatgaagggatacagttcttagtcacaagatatatcaaggcattaaatccacctcagcaacttctggatatatttcttcacaattctaatgcaacatttgacctcattgctcgatttgtatctttgattccttttgtgcctaatacaccagatgaaaatgatggctctgatatatggatgacatcagagcactgcatcagtttagctatcggaaataaggaggagcatgccatccttctctgtaatttctttctgtattttggaaagaaggcactggtcctcttgggaacgtcagtgttagaagggcatgtggcttatgtagtaactcaagaaactaatgaatatttgctttggaatccatcaactggccaatgttataagcagtttgacccgttttgtcccttaaaaagtgtagattgtttgtttgatgatagaaatgtctggtttaatattcaacaaaataatacaccaatggctgtattttttgactattcaaaggaaagtttctggaagcagttgcttccaaaaaacgttcaaggaacaaaaatacaaagcatacaggtcacgggatttcccatccagatgccatacattgatgtacagtcaattattgatgctgtttatcaaactggaattcactctgctgaatttccccagacagaatttgctttagctgtatacattcacccatacccaaacaacatattatctgtgtgggtctatttggcttccttagttcaacatcaatgaaaaggaagcagagcaaagtaaaagattgtactatagtcctctagtaccaacaaaaacttttctggtaccttgagattttgctgtttattctcaagtccagctaagtgctgggcccaatttttgattcacttacagagctgggcactatggagactcgcacccctgagtgagtctttgaggaggagtctagatgagcttctcaccagagacctctccaggaaggacctttggatagtctggctttcttgggtcactgtctgcagtaggtcttattctgggaaagaagcaattttggcctcttctcctaagaccaatgtttctcaaattgtagaattcacaccacctccatttgaatcatctggagagccttgttgaaaatgcagattactagatcctcctcaagacccactgaatcagcacctctgggagtgaagctacagactctgcattattttcaacaagctccccagataattctgatgcactgttatgagggagagcccagccttatagaatgttgtcactactaaactaaggctggtacgtttgatgctgggtctgatacaatttcagatggaagctgctcgagtggaaaactaaggtcattgcctctcatggataaaatgttatttcactggtaaagaaaaataaaataaaatctaccatgttgggctgaaaaaaaaaaaaaaaaaaaaaaaaaaaaaaaaaaaaaaaaaaaaaaaaaaaaaaaaaaaaaaaaaaaaaaaaaaaaaaaaaa

SEQ ID NO: 812 - protein, 322 aa, Homo sapiens
MMTEKHEDHCLKSCSGHSYIRKNWLGCIVFPFSALLQQSEFLDQTEVLQRAQIFKKNCKAMFPNRRIVTTVFNDEGIQFLVTRYIKALNPPQQLLDIFLHNSNATFDLIARFVSLIPFVPNTPDENDGSDIWMTSEHCISLAIGNKEEHAILLCNFFLYFGKKALVLLGTSVLEGHVAYVVTQETNEYLLWNPSTGQCYKQFDPFCPLKSVDCLFDDRNVWFNIQQNNTPMAVFFDYSKESFWKQLLPKNVQGTKIQSIQVTGFPIQMPYIDVQSIIDAVYQTGIHSAEFPQTEFALAVYIHPYPNNILSVWVYLASLVQHQ

SEQ ID NO: 813 - DNA, 4126 bp, Homo sapiens
agcgggcggtatgctgaccgtacccaggcgggagccgccgcgccgccgcctggcgctgcacctgggcccggcccggccgccaattggacggctcggggcgaccccgctgtatcgcgagacgagattggcagcggcggggcctcaagtgcccccgcgctggctttgtatgcggagccgcctgccggtcctttaacaatgggcggcgcgagcgtccaggcgctgggctctagctgaggccggcgcttagcggcccactgtccgcagcatgagcggggccggcgtccgccgcacgacggcggggctggggctgtgagggccgcggttccggactcgagttgccgcgtcgggctgggcgcgccgccgggtcccatggagctggaggggcagtggtggcgaggacagctggccgccgatattcaccaagcgcttcgctacaaggagctgaagttgccctcctataaaggccagtcccctcagttaagtctcagacggtattttgctgacttgattgccattgtgagcaatcgcttcacactctgcccttctgcccgccatcttgctgtctatttactggacctgtttatggaccgctatgacatctctatccagcagctgcatttagttgcgctttcctgcctgcttctagcaagtaaatttgaagaaaaagaagacagtgtgcctaagctggagcagctcaacagcctgggttgtatgactaatatgaatctagtattaacaaaacaaaatttgctacatatggaactattattattagaaacctttcagtggaacctctgccttccaacagccgcccatttcattgagtattatctctctgaagcagtacacgaaacagatcttcatgacggctggccaatgatttgcttggaaaagactaaactctacatggccaaatatgcagattacttcctggaagtatctttgcaagtagctgctgcatgtgtggcttcttcgaggattatacttcgtctttctccaacgtggcctacaagactacatcgtcttactgcctactcttgggatttcttagtgcagtgtattgaacgactgttgatcgctcatgataatgatgtgaaagaagcaaacaaacagagagggcaagcaggacctcagtcagcgcaactaagtgtattccagacagcctcccagccatcacggccagttcactttcagcaacctcagtatctccatcagacacatcagacctcactgcagtatcgccatcctacgtcagaacaaccaagctgtcagcagattgtatcgaccacacacacctcatcttacacactacagacatgtcctgctggcttccaaactagtgttcagggccttgggcacatgcagactggtgttgggatgtcactggcaataccagtagaagttaagccctgtctgagtgtttcttacaaccggagttatcagataaatgaacattacccttgtattactccatgttttgaaaggtgattatttgtgaagctgataaccaacccagactgctttgtgacatgaagctatgggtaagcgttttgtaaacttctgttcaaaaggaaagggatctaaatgacatcagaactcttcaggtaccagcaccaggaagactgaatatcctttttaatgcaccatgaatcctgggagactaagcaaattaacagtatgtcaaattctgttacaacaaatccctgtatgacaaaaatgttcaagtcctggctgatggtccaaatatttcaaaaatattcagtacaacagaaaatttggacagacttcaatttgccattttgagatttgacctgtggtagcatctgggcctaatgttggcttctaagtcaaagactaaatgtttatctcatctatggacttgccaaacagtcttttatgaaggaaagttacagtattaatttttgaaaaggttttttttattctgcaattttttatttttgttctacacatgaatttttgactaagtttaaactcatgaattgttatgctataccaatctgcagtaaaaaaaatttttttagatgattctatataacttcgtctcacaaatagtgtaggtatctgggtttatatactaaaattaagggtggagaagatcttattttttaaatcatggtcataatttttctttttttccctaagtgatcaacatcaaatttttagaattaaaatacatttaactcagggaatttgtactacttggaaacacttaactgtaatgcaacatgccttgggaatgttatagtgtgaactacctttataacataggttaaaatacgcttgctagggtgtgttttcaaatgagaacataatatagctcagaatgaagtggtagttcctgtgattcataatacatatgtaggttttgcatatctcagtgcaatccatgatttatactcagaatcgacattcttaaaaagttatttcaagggatggcataactgtaagaggtcagtgctagaataaagtcctgtaggtttattttggaagggactgtggccagggtagttctcaggttgtgctagagcagcactttgttatgtggaagacaggttttttaagcaacctttgaatccagctctagtcagtctaagcaggcaaaggtaactgatgactaaatttcagtagctactttcattggattgaccctacaactgccctgggacatttcactgtaccagtattaactgcaaacagcaataattgtcattacagcaagggcagtttgggggtaaagcattttggaggaataaccttaaaaagttaaaaagtcattgtaataactgataaactgtatacattgtgctcctttctgtgggagaagaaagatttggtggagggaagctttctggtttaaaaattagtaaggtgtgtctttttgttttttttaagatagcacttgaatagaagggaaaactgcatggcagatacgtgactgccacaatatgcatcgaagacaaacttactataaagatgttgtgggtatgcagcaggagtctcagtaatcaagccaatggcctttgtcaggaagggaaggggctcaacacagtgatggactgatccagatggctcccggggatgaatgtgggtgggtagcttctgtcagtatcaatgcttagagaaatatcctttccttaaaaagaaaataacttttatatttagagtacatagggcatgatgtggatttattagtctggtagataaaatgaaaaaccactcaggtaagaacactcactcatggcagtttttaagcatgaaaattgttttctgaaagtatcatcacttttcctttttaaagaaggctgctaattggattttggtagttcttacctcaagaaaacttgaattatttgggggaaagtaggctcaaaagagaatatatctttcacattcacattcagaacccagcaacctggagtccaattttcagtattttaactacctcaataatgctatgaatgtaagatattgggatagagatcccaacttgaaacaacagccagtgcctgtggtaacttaatgtcttgtcaaatacttttattgattggtttatatgccattcttgttatagaagaatatgcattttaaaaaagcttattaataacactttcccaatttatattttaaaaagctaaagaacactggattaataatcttttgggagggtagaataaaataattgattactattgctgcatacccggggtgggatggggtggttggagaaccagaactatttttaaaacattaggtttcaatataaatacaactcacaactgctagctttggggggtgggggaacattgtgtgggttttgttttgtttaatttattgattagtctttaaagtaggctttttttttttttttgagaatactggaccatcattaaatgtgtactgtgaagagattaatatgtatgaagggctttaccaaagtccactaaataaacactactcaagtacagactgcaaaccaaaatgtatctgtgttacgacattaattgcaaatagcaagtatggtgctaaagtctacaccaatggaattagatgagtgctatgcacttaattttaaaataaaactagttttcagcaaaaaaaaaaaaaa

SEQ ID NO: 814 - protein, 372 aa, Homo sapiens
MELEGQWWRGQLAADIHQALRYKELKLPSYKGQSPQLSLRRYFADLIAIVSNRFTLCPSARHLAVYLLDLFMDRYDISIQQLHLVALSCLLLASKFEEKEDSVPKLEQLNSLGCMTNMNLVLTKQNLLHMELLLLETFQWNLCLPTAAHFIEYYLSEAVHETDLHDGWPMICLEKTKLYMAKYADYFLEVSLQVAAACVASSRIILRLSPTWPTRLHRLTAYSWDFLVQCIERLLIAHDNDVKEANKQRGQAGPQSAQLSVFQTASQPSRPVHFQQPQYLHQTHQTSLQYRHPTSEQPSCQQIVSTTHTSSYTLQTCPAGFQTSVQGLGHMQTGVGMSLAIPVEVKPCLSVSYNRSYQINEHYPCITPCFER

SEQ ID NO: 815 - DNA, 7283 bp, Homo sapiens
agtgcatacagttcctgctcctggtgtctactctgaagagcacagagtagacgtttgtctgccatttcaccggcagtaagatcagcagctgctggtgagcaaagaggtagtagtgggtcactggactggtgggcgccggggccgcgcgctagatggagaggtcagcggcgaacccagctccatggcctagtctcgtcagaccgagcgcggaccctgccggcctccgttctcttccgcttgtctcagatatcatctcttcttttgatcactgttcctgattgtgacattgtgcaagtgttaaattgtgtgccttttgttcctgaagaaagaggtcctgggatctttgaaatgctaagattcttggataccacagtatcataaaattcctctaaatgcattggtgctagcaatcccctactctgtctggcctctggatctagcttgaagttctggattcatttccttcttccttgtacctcagcctgagccttctgtcacccaaagggctccagctggtttttcactcaggcctcactttatcttccaagatgaaggaactgagacacagaggttgagacttgtctaaagtaacatgaccagtaagtgcttgaattaatgcagatgaggaaactgaggtccagagaagttgaagttttcccaaggtcacacagcagagctggaactagagcttgcatttcctgacttccagattagtgttatttttacttcaaactattacttcttggtgagttattgtgggaaaaatcctgtatattgaagatgtctctacacagtatcgtttcctgtttaaattacagataacttcaagagttttcagaaaaaaagaaattgggacttttttggttaaatcatgccatctgaacagaaacagttattttgtgatgaaaaacaaactactttaaaaaaagattatgatgtgaaaaatgagatagttgataggtcggcacctaaaccaaaaatttcaggaagtattcattatgcactaaaaaatgtgaaaattgatttgccaaaaataaatattccaaatgaagtcctattgaaacatgaagttgacaaatacagaaaattatttcagagtaaacagcagactgcaagaaaatctatcagtataaagactgtaagctgtgtagaggagtgtacattgcttcataagtctgagagagctgaagaagagggtgtaaaaatgtctgcaaaaatactcaatttcagctgtttaaaatgccgagacaacactcgatatagcccaaatgatttgcagaaacactttcaaatgtggcaccatggcgaattaccttcatatccttgtgaaatgtgcaacttttcagcaaatgactttcaggtatttaaacaacacagacgaacccatagaagcactttagtaaaatgtgacatttgtaacaatgagagtgtatatactttactgaacttgacaaagcatttcacatccacacattgtgttaatggtaattttcaatgtgaaaagtgtaagttctccacccaggatgttggcacatttgttcagcacattcatagacataatgaaattcattataagtgtggtaaatgtcatcatgtatgttttaccaaaggagagcttcagaagcaccttcatattcattctggtacttttcccttcacttgtcaatattgtagctatggtgccaccaggagagaacaccttgtaagacatgttataactttgcacaaagaacatttatatgcaaaagaaaaactggaaaaagacaaatatgaaaaaagaatggcaaagacttctgcaggacttaagctaatactgaaaagatataaaataggtgcatcaaggaagacgttctggaaacgtaagaaaattaacagtggaagtgacagaagtatagaaaagaacactcaagtgcttaagaaaatgaacaaaacacagactaaatctgaagaccagagccatgttgttcaagagcatttaagtgaagaaaaggatgaaagactacactgtgagaataatgataaagcccctgaatcagagtcagagaagccaactcctctgtccactgggcaaggtaatagagctgaagagggaccaaacgctagttcaggtttcatgaagactgctgtactaggacctacactgaaaaatgtaatgatgaaaaataataaactagcagtttcccctaactataatgctacgtttatgggcttcaagatgatggatggaaaacagcatattgtattaaaattggtgcctatcaaacaaaatgtatgttcaccaggctcacagtcaggtgctgcaaaggacggtactgctaatttgcagccccagactttggacactaatggatttttaacaggagtaacaactgagttaaatgacacagtttatatgaaagcagctactccattttcatgttcatcttctatactttcagggaaagcaagttcagaaaaagaaatgactttgatatctcaaaggaataatatgcttcaaacaatggattatgagaaaagtgtatcttctttgtcagcaacatcagaattggttacagcatcagtgaatttgaccacaaaatttgaaacaagagataatgttgacttctggggaaatcatctcactcagagtcaccccgaggtattaggtaccaccattaaaagtccagataaagtcaactgtgttgccaaaccaaatgcatacaacagtggagatatgcataattattgcattaattatggcaactgtgagttacctgttgaatcctccaaccaaggatcattaccttttcataattactcaaaagtgaataattctaataaacgtcgtaggttttcaggaacagcagtgtatgaaaaccctcaaagagaatcttcatccagcaaaacagttgtccaacaaccaattagtgaatcatttttatcactagtgaggcaggagagctcaaaaccagatagcctattagcatctattagccttttaaatgataaagatggaactttaaaagcaaaatctgaaattgaagaacagtatgttttagaaaaaggacaaaacattgatggacaaaacctgtacagtaatgaaaatcaaaatttagagtgtgcgactgaaaaatctaaatgggaagacttttctaatgtcgattcacctatgatgcctagaatcacatctgttttctctctccagagccaacaggcatcagaatttctgccacctgaagtaaaccaattgcttcaggatgtattgaaaataaaacctgatgtaaaacaagactctagtaacactccaaataaaggcttgccacttcattgtgaccagtcatttcaaaaacacgagagagaaggcaaaattgttgaatcttcgaaagatttcaaagtgcaaggcatcttcccagttccacctggcagtgtgggtattaatgtgcctacaaatgatttgaatttgaaatttggaaaagaaaaacaagtgtcatcaataccacaagatgtgagagattcagagaagatgcctagaatttcaggttttggcacattacttaagactcagtcagatgcgataataacacagcagcttgtaaaagacaaactacgagccaccacacaaaatttaggttctttttatatgcagagtccacttttaaattcagaacaaaaaaaaactataattgttcagacttcaaaaggattcttaataccattgaacattactaacaagcctgggctaccagttattcctggaaatgcacttccattggttaattcacaaggtatccctgcttctctttttgtaaacaagaaacctgggatggttttaacacttaataatgggaaacttgaaggtgtttccgctgtcaaaaccgagggtgccccagctcgtggaactgtgactaaggagccttgcaaaacacctattttgaaggtagaaccaaacaataattgtcttacacctggactttgttccagcattggcagttgtttgagcatgaaaagtagctcagaaaatactttgccattaaaaggcccttacattttgaaaccaacgagttctgtgaaagctgttcttattcctaacatgctatctgagcaacagagcactaagttgaatatctccgattcagtaaaacagcagaatgagatttttccaaaaccacctctttataccttcttgcctgatggcaaacaagctgtttttttaaagtgtgtgatgccaaataaaactgagctgcttaagcccaaattagtccaaaatagtacttatcaaaatatacagccaaagaaacctgaaggaacaccacaaagaatattgctgaaaatttttaaccctgttttaaatgtgactgctgctaataatctgtcagtaagcaactctgcatcctcattgcaaaaagacaacgtaccatctaatcagattataggaggagagcagaaagagccagaatctagagatgccttacccttcttactagatgacttaatgccagcaaatgaaattgtgataacttctactgcaacatgcccagaatcttctgaggaaccaatatgtgtcagtgactgttcagagtccagggtattaaggtgtaaaacaaattgtagaattgagaggaacttcaatagaaaaaagacttccaaaaaaattttttcaaaaacaaaaactcatggaagtaaagactctgaaactgcctttgtatctagaaacagaaactgtaaacgaaagtgtagggatagttaccaagaacctccaagaagaaaagcaacattgcatagaaagtgtaaagaaaaggcaaaacctgaagatgtccgtgaaacatttggatttagcagacctaggctttcaaaagattccatcagaactttgcggcttttcccttttagttctaaacagcttgtgaaatgtcctaggagaaaccaaccagttgtagttttgaatcatcctgacgcagatgcaccagaagtagtaagtgtaatgaaaactattgctaaatttaatggacatgtacttaaggtttcattgtcaaaaagaactataaatgctttactgaaaccagtttgttataaccctcctaaaacaacttatgatgatttttccaagaggcacaaaacatttaaacctgttagttctgtgaaagaaagatttgtgctaaaattaacactcaaaaagacaagcaaaaacaattaccagattgtgaagactacctctgaaaatattttgaaggctaaatttaactgttggttttgtggtagagtatttgacaatcaggatacttgggctggtcatgggcagagacatttaatggaagctactcgggattggaacatgttagaatagtttaccataattaccaaggaaaagaaaagtaaaattaccttagaagaaaacaacgggttcagttaccataatgcagacattttctacttcagtatagtacctgaaatcgaacattttaaaagttgattgtatttctgtggaagagtaaaagttgtatgtatgatatttgaaaatgctatccctgcactcaaaagttttgaaagaaactaatcacagcacagaagtaccttgatttaattttttaaacgtgttctcgggaagttagggctaaagaaaattttgataaaacaattttcccactttagttctttagtgactcttagtagagggtaatggctgacacccccattccctctcttcttccaccagccttatgcatctaagtgtagctcctctggagatggagagctctttcatcgtagaactgaaggagtttctcacatttgtgaagatactttgagagaacctgggtaaagaagtcactctatatctgctaaatatagttattttgaaggatattaggctccttgaaagtacatttaactcactacagttacacctcatacaatgcttgaagagtttttggcaagtaaattttttttccagttgaactctgtcacttgttagagattgggaacactctcccaaggtgattttctttttctaagtgactgtgtcaaatgttgcagtagatgggcagcttcaagagaagaatttaaactctttgtctcattgaaagtttggttaaagaacttgaacatatttctaaatttgattatattctctgatgatccctttgcacagaactatgcttatctcatgtttgtcctccataaacaaatggccatttttttcttcttggttcccatccctttaaaaagagtggaacataggagcacttccaagggagtggcttttcttgaaaattaaaattgtttaccaaaacagtattttgaagcaagatcatatttttgtctgtattcactttattatttgaacatgtccaaattaggacaaagcatttctgttagctgcttctcagtgtgactgacaacccaaaacatatatacagattgttggcatttgcaaaaggaagcatcaatagtggacccagaggcagtgcataaaaccttaggatagattcctaagggacatgcccaacagagttttaaaatggatgttttcatgatgacaacagaatcatagatttagatttttcaccttgtaagtttggatcaaattttgctggttctttggataatggagttcttgtgttaacaaattacgtgctatatgattttttgttacattgttacaagtgttaatgacattttcattaatggatgaaaacttcagggcttcttttctgtatataacaaattaagtctgtacatatttttgtaccttttatgtaaattttgcacagaaatttttggcataagtttattttctttcagtttagttcagtgcatgcactaataaaactggttgtttaatttaaaaggaatatataagactttacccatgttattttcttggtttttatttcagatgtagattttgtttttgaggtaaattcgttcttcagggattgaacactattgttagcaagtgcctaaaaaagatgtgaaacagtttacatatgtcaactgtaacagtaggtcccaaatgggcccattcccctaatagttttatttttaaagaaagccatacatagaatgcttcaagctatcttgctatgcacattatacttgtactgttttgtgcagtttgtctactttcttagtgaagtattttttgtataaaatgttacaattgtgtttcttaaattgagcctaagaatggagttaattggaaatatacagtatatattaataatgtacatggtgtttaaagaatggtaagcattgttaatttctgtaatgaacattttcaattaaatttatcttgtttgtgttta

SEQ ID NO: 816 - protein, 1483 aa, Homo sapiens
MPSEQKQLFCDEKQTTLKKDYDVKNEIVDRSAPKPKISGSIHYALKNVKIDLPKINIPNEVLLKHEVDKYRKLFQSKQQTARKSISIKTVSCVEECTLLHKSERAEEEGVKMSAKILNFSCLKCRDNTRYSPNDLQKHFQMWHHGELPSYPCEMCNFSANDFQVFKQHRRTHRSTLVKCDICNNESVYTLLNLTKHFTSTHCVNGNFQCEKCKFSTQDVGTFVQHIHRHNEIHYKCGKCHHVCFTKGELQKHLHIHSGTFPFTCQYCSYGATRREHLVRHVITLHKEHLYAKEKLEKDKYEKRMAKTSAGLKLILKRYKIGASRKTFWKRKKINSGSDRSIEKNTQVLKKMNKTQTKSEDQSHVVQEHLSEEKDERLHCENNDKAPESESEKPTPLSTGQGNRAEEGPNASSGFMKTAVLGPTLKNVMMKNNKLAVSPNYNATFMGFKMMDGKQHIVLKLVPIKQNVCSPGSQSGAAKDGTANLQPQTLDTNGFLTGVTTELNDTVYMKAATPFSCSSSILSGKASSEKEMTLISQRNNMLQTMDYEKSVSSLSATSELVTASVNLTTKFETRDNVDFWGNHLTQSHPEVLGTTIKSPDKVNCVAKPNAYNSGDMHNYCINYGNCELPVESSNQGSLPFHNYSKVNNSNKRRRFSGTAVYENPQRESSSSKTVVQQPISESFLSLVRQESSKPDSLLASISLLNDKDGTLKAKSEIEEQYVLEKGQNIDGQNLYSNENQNLECATEKSKWEDFSNVDSPMMPRITSVFSLQSQQASEFLPPEVNQLLQDVLKIKPDVKQDSSNTPNKGLPLHCDQSFQKHEREGKIVESSKDFKVQGIFPVPPGSVGINVPTNDLNLKFGKEKQVSSIPQDVRDSEKMPRISGFGTLLKTQSDAIITQQLVKDKLRATTQNLGSFYMQSPLLNSEQKKTIIVQTSKGFLIPLNITNKPGLPVIPGNALPLVNSQGIPASLFVNKKPGMVLTLNNGKLEGVSAVKTEGAPARGTVTKEPCKTPILKVEPNNNCLTPGLCSSIGSCLSMKSSSENTLPLKGPYILKPTSSVKAVLIPNMLSEQQSTKLNISDSVKQQNEIFPKPPLYTFLPDGKQAVFLKCVMPNKTELLKPKLVQNSTYQNIQPKKPEGTPQRILLKIFNPVLNVTAANNLSVSNSASSLQKDNVPSNQIIGGEQKEPESRDALPFLLDDLMPANEIVITSTATCPESSEEPICVSDCSESRVLRCKTNCRIERNFNRKKTSKKIFSKTKTHGSKDSETAFVSRNRNCKRKCRDSYQEPPRRKATLHRKCKEKAKPEDVRETFGFSRPRLSKDSIRTLRLFPFSSKQLVKCPRRNQPVVVLNHPDADAPEVVSVMKTIAKFNGHVLKVSLSKRTINALLKPVCYNPPKTTYDDFSKRHKTFKPVSSVKERFVLKLTLKKTSKNNYQIVKTTSENILKAKFNCWFCGRVFDNQDTWAGHGQRHLMEATRDWNMLE

SEQ ID NO: 817 - DNA, 1828 bp, Homo sapiens
acttctccctagagcaggggtgtttgccagcagcctgcactctcagaaatcagacttgagtggccggaacccttgagaccagaggcttaccatgctgctccctaggagggccaggaactgctgacgtgaccactggacagttattcgtgtctcttacaattaccaaacagaatggacaagcttaataaaataaccgtccccgccagtcagaagttgaggcagcttcaaaagatggtccatgatattaaaaacaatgaaggtggaataatgaataaaatcaaaaagctaaaagtcaaagcacctccaagtgttcctcgaagggactacgcttcagagagccctgctgacgaagaggagcagtggtccgatgactttgacagcgactatgaaaatccagatgagcactcggactcagagatgtacgtgatgcccgccgaggagaacgctgatgacagctacgagccgcctccagtagagcaggaaaccaggccggttcacccagccctgcccttcgccagaggcgagtatatagacaatcgatcaagccagaggcattccccacccttcagcaagacacttcccagtaagcccagctggccttcagagaaagcaaggctcacctccaccctgccggccctgactgctttgcagaaacctcaagtcccacccaaacccaaaggcctccttgaggatgaggctgattatgtggtccccgtggaagataatgatgaaaactatattcatcccacagaaagcagttcacctccacctgaaaaagctcccatggtgaatagatcaaccaagccaaattcctcaacgcccgcctctcctccaggaacagcttcaggtcgaaacagtggggcctgggaaaccaagtcacctccaccagctgcaccatccccgttgccacgggccgggaaaaaaccaacgacaccactgaagacaactccagttgcctctcaacagaatgcttcaagtgtttgtgaagaaaaacctatacctgctgaacgccaccgagggtcaagtcacagacaagaagctgtgcagtcaccagtgtttcctcctgcccagaaacaaatccaccaaaaacccatacctctgccaagatttacagaagggggaaacccaactgtggatgggcccctacccagcttttcatctaattccactatttcagaacaggaagctggcgttctctgcaagccatggtatgctggagcctgtgatcgaaagtctgctgaagaggcattgcacagatcaaacaaggatggatcatttcttattcggaaaagctctggccatgattccaaacaaccatatacactagttgtattctttaataagcgagtatataatattcctgtgcgatttattgaagcaacaaaacaatatgccttgggcagaaagaaaaatggtgaagagtactttggaagtgttgctgaaatcatcaggaatcatcaacatagtcctttggttcttattgacagtcagaataacacaaaagattccaccagactgaagtatgcagttaaagtttcataaagggggaaaaaaaagatcaataccattgcttcagacactttcccaaagtttctccttttgagaaaaagtcccaaaacttcatattttggattatgaatcatccagtaataaaatggaagatggagtcagctattgaagtggtcatccatttctttttaagaagctcatgtggacttgttctattgcctgacctgatgaactgttaatatctggtgaggttgagttatcatgctactaatattttccaaataaatatttttatttttaaaaataaaaaaaaaaaaaa

SEQ ID NO: 818 - protein, 456 aa, Homo sapiens
MDKLNKITVPASQKLRQLQKMVHDIKNNEGGIMNKIKKLKVKAPPSVPRRDYASESPADEEEQWSDDFDSDYENPDEHSDSEMYVMPAEENADDSYEPPPVEQETRPVHPALPFARGEYIDNRSSQRHSPPFSKTLPSKPSWPSEKARLTSTLPALTALQKPQVPPKPKGLLEDEADYVVPVEDNDENYIHPTESSSPPPEKAPMVNRSTKPNSSTPASPPGTASGRNSGAWETKSPPPAAPSPLPRAGKKPTTPLKTTPVASQQNASSVCEEKPIPAERHRGSSHRQEAVQSPVFPPAQKQIHQKPIPLPRFTEGGNPTVDGPLPSFSSNSTISEQEAGVLCKPWYAGACDRKSAEEALHRSNKDGSFLIRKSSGHDSKQPYTLVVFFNKRVYNIPVRFIEATKQYALGRKKNGEEYFGSVAEIIRNHQHSPLVLIDSQNNTKDSTRLKYAVKVS

SEQ ID NO: 819 - DNA, 2068 bp, Homo sapiens
acactttggcaggaagctgttgccagggcagcacctgtgaagccctggcctggcttcagagtctgctggtgagatgacatcaaaacccttcgtgtaggagggtggcagtctccctcccttctggagacaccaccagatgggccagccagaggcagcagcagcctcttcccatggatccaccacgagcgtcccacttgagccctcggaagaagagaccccggcagacgggtgccttgatggcctcctctcctcaagacatcaaatttcaagatttggtcgtcttcattttggagaagaaaatgggaaccacccgcagagcgttcctcatggagctggcccgcaggaaagggttcagggttgaaaatgagctcagtgattctgtcacccacatcgtagcagagaacaactcgggttcggatgttctggagtggcttcaagcacagaaagtacaagtcagctcacaaccagagctcctcgatgtctcctggctgatcgaatgcataagagcagggaaaccggtggaaatgacaggaaaacaccagcttgttgtgagaagagactattcagatagcaccaacccaggccccccgaagactccaccaattgctgtacaaaagatctcccagtatgcgtgtcagagaagaaccactttaaacaactgtaaccagatattcacggatgcctttgatatactggctgaaaactgtgagtttagagaaaatgaagactcctgtgtgacatttatgagagcagcttctgtattgaaatctctgccattcacaatcatcagtatgaaggacacagaaggaattccctgcctggggtccaaggtgaagggtatcatagaggagattattgaagatggagaaagttctgaagttaaagctgtgttaaatgatgaacgatatcaatccttcaaactctttacttctgtatttggagtggggctgaagacttctgagaagtggttcaggatgggtttcagaactctgagtaaagtaaggtcggacaaaagcctgaaatttacacgaatgcagaaagcaggatttctgtattatgaagaccttgtcagctgtgtgaccagggcagaagcagaggccgtcagtgtgctggttaaagaggctgtctgggcatttcttccggatgctttcgtcaccatgacaggagggttccggaggggtaagaagatggggcatgatgtagattttttaattaccagcccaggatcaacagaggatgaagagcaacttttacagaaagtgatgaacttatgggaaaagaagggattacttttatattatgaccttgtggagtcaacatttgaaaagctcaggttgcctagcaggaaggttgatgctttggatcattttcaaaagtgctttctgattttcaaattgcctcgtcaaagagtggacagtgaccagtccagctggcaggaaggaaagacctggaaggccatccgtgtggatttagttctgtgcccctacgagcgtcgtgcctttgccctgttgggatggactggctcccggtttgagagagacctccggcgctatgccacacatgagcggaagatgattctggataaccatgctttatatgacaagaccaagaggatattcctcaaagcagaaagtgaagaagaaatttttgcgcatctgggattggattatattgaaccgtgggaaagaaatgcctaggaaagtgttgtcaacatttttttcctattcttttcaagttaaataaattatgcttcatattagtaaaagatgccataggagagtttggggttatttaggtcttattgaaatgcagattgctactagaaataaataactttggaaacatgggaaggtgccactggtaatgggtaaggttctaataggccatgtttatgactgttgcatagaattcacaatgcatttttcaagagaaatgatgttgtcactggtggctcattcagggaagctcatcaaagcccactttgttcgcagtgtagctgaaatactgtctatctctaataaaaacaggaggaaacaaaaaaaaaaaaaaaaaaaaaaaaaaaaaaaaa

SEQ ID NO: 820 - protein, 508 aa, Homo sapiens
MDPPRASHLSPRKKRPRQTGALMASSPQDIKFQDLVVFILEKKMGTTRRAFLMELARRKGFRVENELSDSVTHIVAENNSGSDVLEWLQAQKVQVSSQPELLDVSWLIECIRAGKPVEMTGKHQLVVRRDYSDSTNPGPPKTPPIAVQKISQYACQRRTTLNNCNQIFTDAFDILAENCEFRENEDSCVTFMRAASVLKSLPFTIISMKDTEGIPCLGSKVKGIIEEIIEDGESSEVKAVLNDERYQSFKLFTSVFGVGLKTSEKWFRMGFRTLSKVRSDKSLKFTRMQKAGFLYYEDLVSCVTRAEAEAVSVLVKEAVWAFLPDAFVTMTGGFRRGKKMGHDVDFLITSPGSTEDEEQLLQKVMNLWEKKGLLLYYDLVESTFEKLRLPSRKVDALDHFQKCFLIFKLPRQRVDSDQSSWQEGKTWKAIRVDLVLCPYERRAFALLGWTGSRFERDLRRYATHERKMILDNHALYDKTKRIFLKAESEEEIFAHLGLDYIEPWERNA

SEQ ID NO: 821 - DNA, 2071 bp, Homo sapiens
acactttggcaggaagctgttgccagggcagcacctgtgaagccctggcctggcttcagagtctgctggtgagatgacatcaaaacccttcgtgtaggagggtggcagtctccctcccttctggagacaccaccagatgggccagccagaggcagcagcagcctcttcccatggatccaccacgagcgtcccacttgagccctcggaagaagagaccccggcagacgggtgccttgatggcctcctctcctcaagacatcaaatttcaagatttggtcgtcttcattttggagaagaaaatgggaaccacccgcagagcgttcctcatggagctggcccgcaggaaagggttcagggttgaaaatgagctcagtgattctgtcacccacatcgtagcagagaacaactcgggttcggatgttctggagtggcttcaagcacagaaagtacaagtcagctcacaaccagagctcctcgatgtctcctggctgatcgaatgcataagagcagggaaaccggtggaaatgacaggaaaacaccagcttgttgtgagaagagactattcagatagcaccaacccaggccccccgaagactccaccaattgctgtacaaaagatctcccagtatgcgtgtcagagaagaaccactttaaacaactgtaaccagatattcacggatgcctttgatatactggctgaaaactgtgagtttagagaaaatgaagactcctgtgtgacatttatgagagcagcttctgtattgaaatctctgccattcacaatcatcagtatgaaggacacagaaggaattccctgcctggggtccaaggtgaagggtatcatagaggagattattgaagatggagaaagttctgaagttaaagctgtgttaaatgatgaacgatatcaatccttcaaactctttacttctgtatttggagtggggctgaagacttctgagaagtggttcaggatgggtttcagaactctgagtaaagtaaggtcggacaaaagcctgaaatttacacgaatgcagaaagcaggatttctgtattatgaagaccttgtcagctgtgtgaccagggcagaagcagaggccgtcagtgtgctggttaaagaggctgtctgggcatttcttccggatgctttcgtcaccatgacaggagggttccggaggggtaagaagatggggcatgatgtagattttttaattaccagcccaggatcaacagaggatgaagagcaacttttacagaaagtgatgaacttatgggaaaagaagggattacttttatattatgaccttgtggagtcaacatttgaaaagctcaggttgcctagcaggaaggttgatgctttggatcattttcaaaagtgctttctgattttcaaattgcctcgtcaaagagtggacagtgaccagtccagctggcaggaaggaaagacctggaaggccatccgtgtggatttagttctgtgcccctacgagcgtcgtgcctttgccctgttgggatggactggctcccggcagtttgagagagacctccggcgctatgccacacatgagcggaagatgattctggataaccatgctttatatgacaagaccaagaggatattcctcaaagcagaaagtgaagaagaaatttttgcgcatctgggattggattatattgaaccgtgggaaagaaatgcctaggaaagtgttgtcaacatttttttcctattcttttcaagttaaataaattatgcttcatattagtaaaagatgccataggagagtttggggttatttaggtcttattgaaatgcagattgctactagaaataaataactttggaaacatgggaaggtgccactggtaatgggtaaggttctaataggccatgtttatgactgttgcatagaattcacaatgcatttttcaagagaaatgatgttgtcactggtggctcattcagggaagctcatcaaagcccactttgttcgcagtgtagctgaaatactgtctatctctaataaaaacaggaggaaacaaaaaaaaaaaaaaaaaaaaaaaaaaaaaaaaa

SEQ ID NO: 822 - protein, 509 aa, Homo sapiens
MDPPRASHLSPRKKRPRQTGALMASSPQDIKFQDLVVFILEKKMGTTRRAFLMELARRKGFRVENELSDSVTHIVAENNSGSDVLEWLQAQKVQVSSQPELLDVSWLIECIRAGKPVEMTGKHQLVVRRDYSDSTNPGPPKTPPIAVQKISQYACQRRTTLNNCNQIFTDAFDILAENCEFRENEDSCVTFMRAASVLKSLPFTIISMKDTEGIPCLGSKVKGIIEEIIEDGESSEVKAVLNDERYQSFKLFTSVFGVGLKTSEKWFRMGFRTLSKVRSDKSLKFTRMQKAGFLYYEDLVSCVTRAEAEAVSVLVKEAVWAFLPDAFVTMTGGFRRGKKMGHDVDFLITSPGSTEDEEQLLQKVMNLWEKKGLLLYYDLVESTFEKLRLPSRKVDALDHFQKCFLIFKLPRQRVDSDQSSWQEGKTWKAIRVDLVLCPYERRAFALLGWTGSRQFERDLRRYATHERKMILDNHALYDKTKRIFLKAESEEEIFAHLGLDYIEPWERNA

SEQ ID NO: 823 - DNA, 3590 bp, Homo sapiens
aatgtggactcccgtcagctggggatggagtggccagcctcagcctcatgtaacccattgtttccaaagggctgcaggctgcagaagcccccaagctctcaggccagctgtggcttctttgctgagatggaggtatagccaagaaagcagcctgaaaagtaaggacagaaaatcaaggcaaagagggtgggtgaaccaggccatacacgtcggccatgcagcagcagcccatctttcccgagggatggactgagggcttggctactcccctgaccataaatggcttggccagggttctcttggagccacctctcagcctgcctctgcagctttgtcagttaactgttcctacaaatgaaagacacaagccaataaagccagtgagaaaggagcttaccaaaggcagtgtacgaagaaggttcctgggagactgtcagaaatgagtttttcactgaacttcaccctgccggcgaacacaacgtcctctcctgtcacaggtgggaaagaaacggactgtgggccctctcttggattagcggcgggcataccattgctggtggccacagccctgctggtggctttactatttactttgattcaccgaagaagaagcagcattgaggccatggaggaaagtgacagaccatgtgaaatttcagaaattgatgacaatcccaagatatctgagaatcctaggagatcacccacacatgagaagaatacgatgggagcacaagaggcccacatatatgtgaagactgtagcaggaagcgaggaacctgtgcatgaccgttaccgtcctactatagaaatggaaagaaggaggggattgtggtggcttgtgcccagactgagcctggaatgatgcagctcagtcaaggagcagcagacctggcactggaacagggttgaaaacccagggttttgtacttggagaggaaagatgccaagctgcttcttaatcaatccaaatttcatttacagctctggaacactttggggctgatttgtctctttaggggacatccccaacatggttaattccaactctcagatcttgtgctttagttagtacatgtgactcaccagatggggtccttagatcctattcctgctcccagtgggaatttgcttttctttgtcattttgggaaaggggcttggtttctgagtgtcttgccttctcatctttttttttcatatcctttttctcaaaaaagccatcagatctgactttcatggaagtgttgctgaggtcagcctggtgcaagttgggatacaaatgaaacttatgcaggatgtgtgagaggaagcagttaattgtttctgaatatctcagggtaggaaccatgtggagccacacattccctgaccacagggaagcacctggctcaatcatgtcacacagcagtggaaagaatacggactcttaagtcacacctaccactgagcagctgtacgactttggagaagttgtttaacattttcaagcctcagtttttgcttttttaaaggaggggaaatatttgcctcatgtcataattgaaaagattaaataagaaataaagggaagtgtctgctacttagttgccagtcaaaatgttagttctctctctctaccaccttcttcctacctcttcccatattgcttgcctgataaaacagctaatcaccagcatttgttccccatagtcacagggccacacaagggaacatttaggacaaactttctccatggcctatgatccaaattgttatctaaagatgattctaggtgttgctggtagtatgtgaatcttccaatctaggtgtgatcgtgtcctcatatgaatcaggaaaaggcagtttcttacaagttccgaattccaaatacagagactggtggtgttacatttaaccttaaagatgttaatgttgatggaaattcatgtttcatattaaaacaacactttgtctttacaatgaaacattttgcttaatttttaaagtaagacattatgatacctctgatggcagttcctcaaataactttaacttttgtgctttagggatagttgttaaagttacaacttcttttattttattttttaaaggcttcagattaaacaagagcccttaagcccacgcatagcattgccgcttcagcttgctgaggactgtctccaaggaggccaaatggaaaaggagaggctacttcaagtggtgttggcccattgagcctattgggcaaactataaccaggttgccttattttgggtggattactccaggagaggccaccctccagctttctcttatcccagtaactcctcttcccattttccaatccatccccagccttttttttttttcttctgtactcttcttttgccttcaatatgagtttcatttcctctgtgtctttgggcagacttccttctaacatgtgtcagctaccctaccacacacctggcctaggagacacatcattcattgctcctacttgtgtctgtaatcagagagtatttaaggagggcagttctgcgacggactgtgtgtgtgttgaaagtaaagatggggggccgcggggaaggcaagagtttttccaaaagattattagaaatgagggctgtatctactctgtggagtagaaccaagtctacttggagaaaagaaccaagtccttggatatctaggggaaagctgtttggcagaaagaaaaatcaagaggacccaaggggatggagacaggaccacaggaatgggccaaggagcaacgtgcctgccattcagccagcttgggacaggctttcactttcactcccatgaggaggcttccaggcagcctggttcccccatgtatagccattgccctctagcaggccaggcctcccagtgggaaggcctgggtccagggcatcttaagttcatccagcagctccatgagccacacagatatcctagaaaatattcctttctcacacagggcttctgattactcagaaacatgcccctcttccctgaataaccaagaacatgttctatgaacccaatctctgccacatgtcaatacctgctcttcaaagccccttttgaaactcagttttgtgccaagtcctctggatctaattaccttaaacaagcagatttagccatttttaaacagacattcccagtcatcctggtgcttgtacttctcctacatgtcatgaaggaccttggatttactgagaactcagccgtggccttggctttgatacttataggtgtcagcccttgggccgattgttgatcatccagagcctcagttctgtacttgtaaagtggagacagcagttctcatcctccatccttttagcccatggggtggttgtaaggctggattgaaatatgcatgtgactaagccatgtagctataaagtgagggatgacttgtgttttggatcacttattttaattctacttataatccacggcttagaatatttaaacattgtttctattaaactagaaaggttcagcatttctgtcatttacttctgctatgatacacaagaacttatgttggaatgaagtgaaaagtaaaatggccattcttatgaacctacaaaa

SEQ ID NO: 824 - protein, 141 aa, Homo sapiens
MSFSLNFTLPANTTSSPVTGGKETDCGPSLGLAAGIPLLVATALLVALLFTLIHRRRSSIEAMEESDRPCEISEIDDNPKISENPRRSPTHEKNTMGAQEAHIYVKTVAGSEEPVHDRYRPTIEMERRRGLWWLVPRLSLE

SEQ ID NO: 825 - DNA, 6753 bp, Homo sapiens
gcagcctcggccgccgggcaagtagctccgagcggctgcttcccggttgcctcgacgaagacagggggcgccgcgctccgcttgctccgcgcctgagccatgcccagcagccctgtgtaaccaccgagtcccggccggagccgaccgacccagtgtgcgccgtctttcggccgagctgagctttcgtgcacgcaactccctctgccccagccggccccgcgccaccatgccccgggcgactgcacttggggccctggtgtcactgctgctgctgctgccgctgcctcgcggcgccgggggactcggggagcgcccggacgccaccgcagactactcagagctggacggcgaggagggcacggagcagcagctggagcattaccacgacccttgcaaagccgctgtcttttggggagacattgccttagatgaagatgacttgaagctgtttcacattgacaaagccagagactggaccaagcagacagtgggggcaacaggacacagcacaggtgggcttgaagagcaggcatctgagagcagcccagacaccacagccatggacactggcaccaaggaagctggaaaggatggccgggagaataccacactcctgcacagccctgggaccttgcatgccgcagccaagaccttctctccccgggtccgaagagccacaacctcaaggacagagaggatatggcctggaggagtcatcccctacgtcattggagggaacttcactgggagccagagggccatttttaagcaggccatgagacactgggagaagcacacctgtgtgaccttcatagaaaggacggatgaggaaagctttattgtattcagttacagaacctgtggctgttgctcctatgttgggcgccgaggaggaggcccacaggccatatccattgggaagaactgtgacaagtttggcattgtggctcacgagctgggccatgtggttgggttttggcatgaacacacccggccagacagagaccaacatgtcaccatcatcagggaaaacatccagccaggtcaggagtataatttcttaaaaatggaagctggggaagtgagctctctgggagagacatacgactttgacagcatcatgcactacgcccggaacaccttctcaagaggagttttcttagacaccatccttccccgtcaagatgacaatggcgtcaggccaaccattggccagcgcgtgcggctcagtcagggagacatagctcaagcccggaagctgtacaaatgcccagcgtgtggggagaccctgcaggacacaacgggaaacttttctgcacctggtttcccaaatgggtacccatcttactcccactgcgtctggaggatctcggtcaccccaggggaaaagatcgtattaaacttcacatccatggatttgtttaaaagccgactgtgctggtatgattacgtggaggtccgggatggttactggagaaaagccccccttttgggcaggttttgtggcgataagatcccggagcccctcgtctccacggacagccggctctgggtggagttccgcagcagcagcaacatcttgggcaagggcttctttgcagcgtacgaagctacctgcgggggagacatgaacaaagatgccggtcagattcaatctcccaactatccggatgactacagaccttccaaggaatgtgtctggaggattacggtttcagaggggtttcacgtgggacttaccttccaagcttttgagattgaaaggcacgacagctgtgcatatgactacctggaagtccgggatggccccacggaagagagtgccctgatcggccacttttgtggctatgagaagccggaggatgtgaaatcgagctccaacagactgtggatgaagtttgtgtccgatggctctatcaataaagcgggctttgcagccaattttttcaaggaggtggatgagtgttcctggccagatcacggcgggtgcgagcatcgctgtgtgaacacgctgggcagctacaagtgtgcctgtgaccctggctacgagctggccgccgataagaagatgtgtgaagtggcctgtggcggtttcattaccaagctgaatggaaccatcaccagccctgggtggccgaaggagtatcccacaaacaaaaactgtgtctggcaggtggtggcccccgctcagtaccggatctcccttcagtttgaagtgtttgaactggaaggcaatgacgtctgtaagtacgactttgtagaggtgcgcagcggcctgtcccccgacgccaagctgcacggcaggttctgcggctctgagacgccggaggtcatcacctcgcagagcaacaacatgcgcgtggagttcaagtccgacaacaccgtctccaagcgcggcttcagggcccacttcttctcagataaggacgagtgtgccaaggacaacggcgggtgtcagcatgagtgcgtcaacaccttcgggagctacctgtgcaggtgcagaaacggctactggctccacgagaatgggcatgactgcaaagaggctggctgtgcacacaagatcagcagtgtggaggggaccctggcgagccccaactggcctgacaaataccccagccggagggagtgtacctggaacatctcttcgactgcaggccacagagtgaaactcacctttaatgagtttgagatcgagcagcaccaggaatgtgcctatgaccacctggaaatgtatgacgggccggacagcctggcccccattctgggccgtttctgcggcagcaagaaaccagaccccacggtggcttccggcagcagtatgtttctcaggttttattcggatgcctcagtgcagaggaaaggcttccaggcagtgcacagcacagagtgcgggggcaggctgaaggctgaagtgcagaccaaagagctctattcccacgcccagtttggggacaacaactacccgagcgaggcccgctgtgactgggtgatcgtggcagaggacggctacggcgtggagctgacattccggacctttgaggttgaggaggaggccgactgcggctacgactacatggaagcctacgacggctacgacagctcagcgcccaggctcggccgcttctgtggctctgggccattagaagaaatctactctgcaggtgattccctgatgattcgattccgcacagatgacaccatcaacaagaaaggctttcatgcccgatacaccagcaccaagttccaggatgccctgcacatgaagaaatagtgctgatgttcttgaaagacagaaactgagaattttttttgttttgttttgtttttaacaacaatagcaccttgaaaatctgccctaaaacagtgtacagtatttttctcaaacaaaaactcagaatccagccttagaggtatatatttgaatgaaagtcttgtaagtttggccaacaaggtggagagaaaaatgttcttttgcttctgtctgcaatgttatcattcatgaactgttaaagtgttaaagattaggattgaagtcactgaccattccggctatgcttcttcataccattctccttgtcccttgctcctatgtggcaaaaggtcagccttggggttggccgttcctctaatctggacttgcttgcaaaggtgccaggctgtcttctgtccatgttgggcataagggatgaaaacttggccgagactaatgtgtggcccacagctttggctggaatcattttctttctctctgccagggacatgtcaaccaagaaacctgaaaatatggatggatgtcaggactaaaaaaaggcatcacagtgagcagtgagcacagagggagtttcgagtataagaatcattgtcatgaagttaggagaccacaaagccatttctcagagtcattcactctccttgtccctttggtttccccccctccctaattgcagtgggggctaaggcatccattatgaatacagcagaacatttgctggcgagagtcctgtctgctgagaagacaatattgtggctcgtcctgatatttttttcattcattgactttgagaagactccacctgtgcttggaattccatgggcttcaaagaacatttcttcttttagctttggaggcacttgccgtggcacacctggactccttgacatccaattcaaactgcatttgcaaaatgtgcaaagacctcttatgagggaccaattcaggtcccttatggggtgaacactgttgaagactggttaattataagttatgtaagaatcatcgccttgtggaacaagtcaatcagtgactagcttcctgtagccaatcaggttaaagagtgcgttggtaactttgctctgattaactagtattcaatcaccaacttgcaaacagaattcataacacttggcacttgttctagagaagtgtagaggatgatgtttacataattttagcacctcaaggtataatttaaacagtgaggtagttttgaatggcatttcattaaggcatctatgggcattatgagctaaaagctgtggtatgttagctttaaaagagtatttatgttggaataatttttaaataatgtttacataactgtaagtcctgtttggttgttgttggacgcagggcggcacatgagtgtttttggttagagccaagatagctcccatgcaccggaattcctttgggatgaatcagcatcattttaaacaaagtatatgtaaaaggtgaaaggttatattttttacagatcagaatgtggcaccagaggactgtgtctcattaaagtgattgctgggagcaaaaactagaatgatacaaagaaaggtcagagaaatgcatgggaatattttttccttaaaacagaaaaaaattaaagtattattaataatatatgtctgtatatatgtatgtatgtaaaagatcagctgtcaaagccttaatcaatgcagtgtggaaaatgccaacccctggtcctcgctttactgtgggccctgcaggactggctctccatttcctgcctctcctttcaccaagctctgttttggcctttctcggccctggactgaggctcagcctacacgctcatattgtgcatatggcagaccctgcccagcgtgcgctttgatacagcaaatggagcagctgacctcatggctccaatcccacctgcctgttagggtagattccatttatctgatttttgtattttctgaggttttatttggtctcatcttgtctatgagagttgaaactggaactgggaaacctaagatgggtgttatggttctttctccaaggaaataaaaattctgcagttttaacctttagaagtctaagcaagattaacaaatttcatagaaaagtgggagggagtcagaaacagagttggtgctgctcagcaggacggtgaaacaatgatacttctttttatctctttagtatgaacattttcaaaaacacacagcttcaacaattgtcaccatatggccaatttgcaacaatgggactcttatgaaaaacctttatttaggccttctgtgtgacgtatccacagaaaagagaagctctgattcagctggggctagctgggccgctcctctggaagcccacacttgtggggacttaggcatgacacaggttcttgcaaagaaactagaggctggcttcactagagagagtccattcagcagaaagtcccaggcctctgccttggtgcttccaattatcagtgacctgcctgcaagcatccccagaagcaaacagcagaggtagaagatatcactgcagcctgctttgtgctttaattgggtaccaagctttggggatgacagtgagttgcaagaatagttttagttcagagaattgtcttaggacaacaggctaatgaaggatttggggtctgggtttttagcctggctccgttctggtgtaacccggtctagcaaaagctaagcctggattgcagggcaggaaaaaatctggaattaactttagccagtggaatttcttcaaacagagaaagagaggctgttcattgatccactattccctctattttcctctaaggtaaatatttagaggtatttacctgtaaggtgaagtttcctttttatttctactttacaatttctctctaaagcaagcttgtccaacccttggcccaggacggctttgaatatggcccgacacaaattcgtaaactttttaaaaaacattgtaagattctttctgtgatttttttttttctcgtcagctatcgttagtgtattttatgtgtggcccaagataattcttcttccaatgtggcccagggaagccaaaagatgggacacccctgctgtaaagtttcatatcactcatgaattgctcagctgatttaaataatttgtaaaatcctgctaactagcaaattcacattgagattttctattgattgggtccctttgatagctttcagattggtattgttagcgttccatttgtgaacaaatgttcccttggctttagcagatgtttttaaagtttcttttgtagaccgaacttctgaagagtaataccaaatgcctaaaattttatttttaaaaaggaaaattgtttaaagtattatatgtaaacatatgggtattttttattttgtgtaattttacatttcatgaaatgatgtcagtttcaaagagaaagtggagaggacctaacatatgtctctacctagaacggatggtttcattaaagaatgtggattt

SEQ ID NO: 826 - protein, 1015 aa, Homo sapiens
MPRATALGALVSLLLLLPLPRGAGGLGERPDATADYSELDGEEGTEQQLEHYHDPCKAAVFWGDIALDEDDLKLFHIDKARDWTKQTVGATGHSTGGLEEQASESSPDTTAMDTGTKEAGKDGRENTTLLHSPGTLHAAAKTFSPRVRRATTSRTERIWPGGVIPYVIGGNFTGSQRAIFKQAMRHWEKHTCVTFIERTDEESFIVFSYRTCGCCSYVGRRGGGPQAISIGKNCDKFGIVAHELGHVVGFWHEHTRPDRDQHVTIIRENIQPGQEYNFLKMEAGEVSSLGETYDFDSIMHYARNTFSRGVFLDTILPRQDDNGVRPTIGQRVRLSQGDIAQARKLYKCPACGETLQDTTGNFSAPGFPNGYPSYSHCVWRISVTPGEKIVLNFTSMDLFKSRLCWYDYVEVRDGYWRKAPLLGRFCGDKIPEPLVSTDSRLWVEFRSSSNILGKGFFAAYEATCGGDMNKDAGQIQSPNYPDDYRPSKECVWRITVSEGFHVGLTFQAFEIERHDSCAYDYLEVRDGPTEESALIGHFCGYEKPEDVKSSSNRLWMKFVSDGSINKAGFAANFFKEVDECSWPDHGGCEHRCVNTLGSYKCACDPGYELAADKKMCEVACGGFITKLNGTITSPGWPKEYPTNKNCVWQVVAPAQYRISLQFEVFELEGNDVCKYDFVEVRSGLSPDAKLHGRFCGSETPEVITSQSNNMRVEFKSDNTVSKRGFRAHFFSDKDECAKDNGGCQHECVNTFGSYLCRCRNGYWLHENGHDCKEAGCAHKISSVEGTLASPNWPDKYPSRRECTWNISSTAGHRVKLTFNEFEIEQHQECAYDHLEMYDGPDSLAPILGRFCGSKKPDPTVASGSSMFLRFYSDASVQRKGFQAVHSTECGGRLKAEVQTKELYSHAQFGDNNYPSEARCDWVIVAEDGYGVELTFRTFEVEEEADCGYDYMEAYDGYDSSAPRLGRFCGSGPLEEIYSAGDSLMIRFRTDDTINKKGFHARYTSTKFQDALHMKK

SEQ ID NO: 827 - DNA, 2293 bp, Homo sapiens
aaggacaattagtcactagcgagacccagtaggaagagaggtttaaatcagagggattgaatgagggtgctttgtgccttccctgaagccatgccctccagcaactcccgcccccccgcgtgcctagccccgggggctctctacttggctctgttgctccatctctccctttcctcccaggctggagacaggagacccttgcctgtagacagagctgcaggtttgaaggaaaagaccctgattctacttgatgtgagcaccaagaacccagtcaggacagtcaatgagaacttcctctctctgcagctggatccgtccatcattcatgatggctggctcgatttcctaagctccaagcgcttggtgaccctggcccggggactttcgcccgcctttctgcgcttcgggggcaaaaggaccgacttcctgcagttccagaacctgaggaacccggcgaaaagccgcgggggcccgggcccggattactatctcaaaaactatgaggatgacattgttcgaagtgatgttgccttagataaacagaaaggctgcaagattgcccagcaccctgatgttatgctggagctccaaagggagaaggcagctcagatgcatctggttcttctaaaggagcaattctccaatacttacagtaatctcatattaacagccaggtctctagacaaactttataactttgctgattgctctggactccacctgatatttgctctaaatgcactgcgtcgtaatcccaataactcctggaacagttctagtgccctgagtctgttgaagtacagcgccagcaaaaagtacaacatttcttgggaactgggtaatgagccaaataactatcggaccatgcatggccgggcagtaaatggcagccagttgggaaaggattacatccagctgaagagcctgttgcagcccatccggatttattccagagccagcttatatggccctaatattgggcggccgaggaagaatgtcatcgccctcctagatggattcatgaaggtggcaggaagtacagtagatgcagttacctggcaacattgctacattgatggccgggtggtcaaggtgatggacttcctgaaaactcgcctgttagacacactctctgaccagattaggaaaattcagaaagtggttaatacatacactccaggaaagaagatttggcttgaaggtgtggtgaccacctcagctggaggcacaaacaatctatccgattcctatgctgcaggattcttatggttgaacactttaggaatgctggccaatcagggcattgatgtcgtgatacggcactcattttttgaccatggatacaatcacctcgtggaccagaattttaacccattaccagactactggctctctctcctctacaagcgcctgatcggccccaaagtcttggctgtgcatgtggctgggctccagcggaagccacggcctggccgagtgatccgggacaaactaaggatttatgctcactgcacaaaccaccacaaccacaactacgttcgtgggtccattacactttttatcatcaacttgcatcgatcaagaaagaaaatcaagctggctgggactctcagagacaagctggttcaccagtacctgctgcagccctatgggcaggagggcctaaagtccaagtcagtgcaactgaatggccagcccttagtgatggtggacgacgggaccctcccagaattgaagccccgcccccttcgggccggccggacattggtcatccctccagtcaccatgggcttttttgtggtcaagaatgtcaatgctttggcctgccgctaccgataagctatcctcacactcatggctaccagtgggcctgctgggctgcttccactcctccactccagtagtatcctctgttttcagacatcctagcaaccagcccctgctgccccatcctgctggaatcaacacagacttgctctccaaagagactaaatgtcatagcgtgatcttagcctaggtaggccacatccatcccaaaggaaaatgtagacatcacctgtacctatataaggataaaggcatgtgtatagagcagaatgtttcccttcatgtgcactatgaaaacgagctgacagcacactcccaggagaaatgtttccagacaactccccatgatcctgtcacacagcattataaccacaaatccaaaccttagcctgctgctgctgctgccctcagaggaagatgaggaaggaaaaaaactgggtggacctacaaaaacccatcctctccc

SEQ ID NO: 828 - protein, 592 aa, Homo sapiens
MRVLCAFPEAMPSSNSRPPACLAPGALYLALLLHLSLSSQAGDRRPLPVDRAAGLKEKTLILLDVSTKNPVRTVNENFLSLQLDPSIIHDGWLDFLSSKRLVTLARGLSPAFLRFGGKRTDFLQFQNLRNPAKSRGGPGPDYYLKNYEDDIVRSDVALDKQKGCKIAQHPDVMLELQREKAAQMHLVLLKEQFSNTYSNLILTARSLDKLYNFADCSGLHLIFALNALRRNPNNSWNSSSALSLLKYSASKKYNISWELGNEPNNYRTMHGRAVNGSQLGKDYIQLKSLLQPIRIYSRASLYGPNIGRPRKNVIALLDGFMKVAGSTVDAVTWQHCYIDGRVVKVMDFLKTRLLDTLSDQIRKIQKVVNTYTPGKKIWLEGVVTTSAGGTNNLSDSYAAGFLWLNTLGMLANQGIDVVIRHSFFDHGYNHLVDQNFNPLPDYWLSLLYKRLIGPKVLAVHVAGLQRKPRPGRVIRDKLRIYAHCTNHHNHNYVRGSITLFIINLHRSRKKIKLAGTLRDKLVHQYLLQPYGQEGLKSKSVQLNGQPLVMVDDGTLPELKPRPLRAGRTLVIPPVTMGFFVVKNVNALACRYR

SEQ ID NO: 829 - DNA, 990 bp, Homo sapiens
atggtgacgaaggcctttgtcttgttggccatctttgcagaagcctctgcaaaatcgtgtgctccaaataaagcagatgtcattcttgtgttttgctatcccaaaaccatcatcaccaaaatccccgagtgtccctatggatgggaagttcatcagctggccctcggagggctgtgttacaatggggtccacgaaggaggttactaccaatttgtgatcccagatttatcacctaaaaacaagtcctattgtggaacccagtctgagtacaagccacctatctatcacttctacagtcacatcgtttccaatgacaccacagtgattgtaaaaaaccagcctgtcaactactccttctcctgcacctaccactccacctacttggtgaaccaggctgcctttgaccagagagtggccactgttcacgtgaagaacgggagcatgggcacatttgagagccaactgtctctcaacttctacactaatgccaagttctccatcaagaaagaagctccctttgtcctggaggcatccgaaatcggttcagatctgtttgcaggagtggaagccaaagggttaagcattaggtttaaagtggtcttgaacagctgttgggccaccccctcggctgacttcatgtatcccttgcagtggcagctgatcaacaagggctgccccacggatgaaaccgtcctcgtgcatgagaatgggagagatcacagggcaaccttccaattcaatgctttccggttccagaacatccccaaactctccaaggtgtggttacactgtgagacgttcatctgcgacagtgagaaactctcctgcccagtgacctgcgataaacggaagcgcctcctgcgagaccagaccgggggagtcctggtcgtggagctctccctgcggagcaggggattttccagtctctatagcttctcagatgttctccaccacctcatcatgatgttggggatttgtgccgtgttatag

SEQ ID NO: 830 - protein, 329 aa, Homo sapiens
MVTKAFVLLAIFAEASAKSCAPNKADVILVFCYPKTIITKIPECPYGWEVHQLALGGLCYNGVHEGGYYQFVIPDLSPKNKSYCGTQSEYKPPIYHFYSHIVSNDTTVIVKNQPVNYSFSCTYHSTYLVNQAAFDQRVATVHVKNGSMGTFESQLSLNFYTNAKFSIKKEAPFVLEASEIGSDLFAGVEAKGLSIRFKVVLNSCWATPSADFMYPLQWQLINKGCPTDETVLVHENGRDHRATFQFNAFRFQNIPKLSKVWLHCETFICDSEKLSCPVTCDKRKRLLRDQTGGVLVVELSLRSRGFSSLYSFSDVLHHLIMMLGICAVL

SEQ ID NO: 831 - DNA, 3372 bp, Homo sapiens
taaaaccaggaagtgaagtccccgagcacgttagaaagcctgacatggcctgactcgggacagctcagagcagggcagaactggggacactctgggccggccttctgcctgcatggacgctctgaagccaccctgtctctggaggaaccacgagcgagggaagaaggacagggactcgtgtggcaggaagaactcagagccgggaagcccccattcactagaagcactgagagatgcggccccctcgcagggtctgaatttcctgctgctgttcacaaagatgctttttatctttaactttttgttttccccacttccgaccccggcgttgatctgcatcctgacatttggagctgccatcttcttgtggctgatcaccagacctcaacccgtcttacctcttcttgacctgaacaatcagtctgtgggaattgagggaggagcacggaagggggtttcccagaagaacaatgacctaacaagttgctgcttctcagatgccaagactatgtatgaggttttccaaagaggactcgctgtgtctgacaatgggccctgcttgggatatagaaaaccaaaccagccctacagatggctatcttacaaacaggtgtctgatagagcagagtacctgggttcctgtctcttgcataaaggttataaatcatcaccagaccagtttgtcggcatctttgctcagaataggccagagtggatcatctccgaattggcttgttacacgtactctatggtagctgtacctctgtatgacaccttgggaccagaagccatcgtacatattgtcaacaaggctgatatcgccatggtgatctgtgacacaccccaaaaggcattggtgctgatagggaatgtagagaaaggcttcaccccgagcctgaaggtgatcatccttatggacccctttgatgatgacctgaagcaaagaggggagaagagtggaattgagatcttatccctatatgatgctgagaacctaggcaaagagcacttcagaaaacctgtgcctcctagcccagaagacctgagcgtcatctgcttcaccagtgggaccacaggtgaccccaaaggagccatgataacccatcaaaatattgtttcaaatgctgctgcctttctcaaatgtgtggagcatgcttatgagcccactcctgatgatgtggccatatcctacctccctctggctcatatgtttgagaggattgtacaggctgttgtgtacagctgtggagccagagttggattcttccaaggggatattcggttgctggctgacgacatgaagactttgaagcccacattgtttcccgcggtgcctcgactccttaacaggatctacgataaggtacaaaatgaggccaagacacccttgaagaagttcttgttgaagctggctgtttccagtaaattcaaagagcttcaaaagggtatcatcaggcatgatagtttctgggacaagctcatctttgcaaagatccaggacagcctgggcggaagggttcgtgtaattgtcactggagctgcccccatgtccacttcagtcatgacattcttccgggcagcaatgggatgtcaggtgtatgaagcttatggtcaaacagaatgcacaggtggctgtacatttacattacctggggactggacatcaggtcacgttggggtgcccctggcttgcaattacgtgaagctggaagatgtggctgacatgaactactttacagtgaataatgaaggagaggtctgcatcaagggtacaaacgtgttcaaaggatacctgaaggaccctgagaagacacaggaagccctggacagtgatggctggcttcacacaggagacattggtcgctggctcccgaatggaactctgaagatcatcgaccgtaaaaagaacattttcaagctggcccaaggagaatacattgcaccagagaagatagaaaatatctacaacaggagtcaaccagtgttacaaatttttgtacacggggagagcttacggtcatccttagtaggagtggtggttcctgacacagatgtacttccctcatttgcagccaagcttggggtgaagggctcctttgaggaactgtgccaaaaccaagttgtaagggaagccattttagaagacttgcagaaaattgggaaagaaagtggccttaaaacttttgaacaggtcaaagccatttttcttcatccagagccattttccattgaaaatgggctcttgacaccaacattgaaagcaaagcgaggagagctttccaaatactttcggacccaaattgacagcctgtatgagcacatccaggattaggataaggtacttaagtacctgccggcccactgtgcactgcttgtgagaaaatggattaaaaactattcttacatttgttttgcctttcctcctatttttttttaacctgttaaactctaaagccatagcttttgttttatattgagacatataatgtgtaaacttagttcccaaataaatcaatcctgtctttcccatcttcgatgttgctaatattaaggcttcagggctacttttatcaacatgcctgtcttcaagatcccagtttatgttctgtgtccttcctcatgatttccaaccttaatactattagtaaccacaagttcaagggtcaaagggaccctctgtgccttcttctttgttttgtgataaacataacttgccaacagtctctatgcttatttacatcttctactgttcaaactaagagatttttaaattctgaaaaactgcttacaattcatgttttctagccactccacaaaccactaaaattttagttttagcctatcactcatgtcaatcatatctatgagacaaatgtctccgatgctcttctgcgtaaattaaattgtgtactgaagggaaaagtttgatcataccaaacatttcctaaactctctagttagatatctgacttgggagtattaaaaattgggtctatgacatattgtccaaaaggaatgctgttcttaaagcattatttacagtaggaactggggagtaaatctgttccctacagtttgctgctgagctggaagctgtgggggaaggagttgacaggtgggcccagtgaacttttccagtaaatgaagcaagcactgaataaaaacctcctgaactgggaacaaagatctacaggcaagcaagatgcccacacaacaggcttattttctgtgaaggaaccaactgatctcccccacccttggattagagttcctgctctaccttacccacagataacacatgttgtttctacttgtaaatgtaaagtctttaaaataaactattacagatacttaaaaaaaaaaaaaaaaaaa

SEQ ID NO: 832 - protein, 739 aa, Homo sapiens
MDALKPPCLWRNHERGKKDRDSCGRKNSEPGSPHSLEALRDAAPSQGLNFLLLFTKMLFIFNFLFSPLPTPALICILTFGAAIFLWLITRPQPVLPLLDLNNQSVGIEGGARKGVSQKNNDLTSCCFSDAKTMYEVFQRGLAVSDNGPCLGYRKPNQPYRWLSYKQVSDRAEYLGSCLLHKGYKSSPDQFVGIFAQNRPEWIISELACYTYSMVAVPLYDTLGPEAIVHIVNKADIAMVICDTPQKALVLIGNVEKGFTPSLKVIILMDPFDDDLKQRGEKSGIEILSLYDAENLGKEHFRKPVPPSPEDLSVICFTSGTTGDPKGAMITHQNIVSNAAAFLKCVEHAYEPTPDDVAISYLPLAHMFERIVQAVVYSCGARVGFFQGDIRLLADDMKTLKPTLFPAVPRLLNRIYDKVQNEAKTPLKKFLLKLAVSSKFKELQKGIIRHDSFWDKLIFAKIQDSLGGRVRVIVTGAAPMSTSVMTFFRAAMGCQVYEAYGQTECTGGCTFTLPGDWTSGHVGVPLACNYVKLEDVADMNYFTVNNEGEVCIKGTNVFKGYLKDPEKTQEALDSDGWLHTGDIGRWLPNGTLKIIDRKKNIFKLAQGEYIAPEKIENIYNRSQPVLQIFVHGESLRSSLVGVVVPDTDVLPSFAAKLGVKGSFEELCQNQVVREAILEDLQKIGKESGLKTFEQVKAIFLHPEPFSIENGLLTPTLKAKRGELSKYFRTQIDSLYEHIQD

SEQ ID NO: 833 - DNA, 3233 bp, Homo sapiens
agtcctaggagctgtggaaagagtagaagtgcctgaatgtggtgctgaatcaatacagccagctgtgaggggagcacttcctggacccaggaagggagagtcttcttccaaggtctgaatttcctgctgctgttcacaaagatgctttttatctttaactttttgttttccccacttccgaccccggcgttgatctgcatcctgacatttggagctgccatcttcttgtggctgatcaccagacctcaacccgtcttacctcttcttgacctgaacaatcagtctgtgggaattgagggaggagcacggaagggggtttcccagaagaacaatgacctaacaagttgctgcttctcagatgccaagactatgtatgaggttttccaaagaggactcgctgtgtctgacaatgggccctgcttgggatatagaaaaccaaaccagccctacagatggctatcttacaaacaggtgtctgatagagcagagtacctgggttcctgtctcttgcataaaggttataaatcatcaccagaccagtttgtcggcatctttgctcagaataggccagagtggatcatctccgaattggcttgttacacgtactctatggtagctgtacctctgtatgacaccttgggaccagaagccatcgtacatattgtcaacaaggctgatatcgccatggtgatctgtgacacaccccaaaaggcattggtgctgatagggaatgtagagaaaggcttcaccccgagcctgaaggtgatcatccttatggacccctttgatgatgacctgaagcaaagaggggagaagagtggaattgagatcttatccctatatgatgctgagaacctaggcaaagagcacttcagaaaacctgtgcctcctagcccagaagacctgagcgtcatctgcttcaccagtgggaccacaggtgaccccaaaggagccatgataacccatcaaaatattgtttcaaatgctgctgcctttctcaaatgtgtggagcatgcttatgagcccactcctgatgatgtggccatatcctacctccctctggctcatatgtttgagaggattgtacaggctgttgtgtacagctgtggagccagagttggattcttccaaggggatattcggttgctggctgacgacatgaagactttgaagcccacattgtttcccgcggtgcctcgactccttaacaggatctacgataaggtacaaaatgaggccaagacacccttgaagaagttcttgttgaagctggctgtttccagtaaattcaaagagcttcaaaagggtatcatcaggcatgatagtttctgggacaagctcatctttgcaaagatccaggacagcctgggcggaagggttcgtgtaattgtcactggagctgcccccatgtccacttcagtcatgacattcttccgggcagcaatgggatgtcaggtgtatgaagcttatggtcaaacagaatgcacaggtggctgtacatttacattacctggggactggacatcaggtcacgttggggtgcccctggcttgcaattacgtgaagctggaagatgtggctgacatgaactactttacagtgaataatgaaggagaggtctgcatcaagggtacaaacgtgttcaaaggatacctgaaggaccctgagaagacacaggaagccctggacagtgatggctggcttcacacaggagacattggtcgctggctcccgaatggaactctgaagatcatcgaccgtaaaaagaacattttcaagctggcccaaggagaatacattgcaccagagaagatagaaaatatctacaacaggagtcaaccagtgttacaaatttttgtacacggggagagcttacggtcatccttagtaggagtggtggttcctgacacagatgtacttccctcatttgcagccaagcttggggtgaagggctcctttgaggaactgtgccaaaaccaagttgtaagggaagccattttagaagacttgcagaaaattgggaaagaaagtggccttaaaacttttgaacaggtcaaagccatttttcttcatccagagccattttccattgaaaatgggctcttgacaccaacattgaaagcaaagcgaggagagctttccaaatactttcggacccaaattgacagcctgtatgagcacatccaggattaggataaggtacttaagtacctgccggcccactgtgcactgcttgtgagaaaatggattaaaaactattcttacatttgttttgcctttcctcctatttttttttaacctgttaaactctaaagccatagcttttgttttatattgagacatataatgtgtaaacttagttcccaaataaatcaatcctgtctttcccatcttcgatgttgctaatattaaggcttcagggctacttttatcaacatgcctgtcttcaagatcccagtttatgttctgtgtccttcctcatgatttccaaccttaatactattagtaaccacaagttcaagggtcaaagggaccctctgtgccttcttctttgttttgtgataaacataacttgccaacagtctctatgcttatttacatcttctactgttcaaactaagagatttttaaattctgaaaaactgcttacaattcatgttttctagccactccacaaaccactaaaattttagttttagcctatcactcatgtcaatcatatctatgagacaaatgtctccgatgctcttctgcgtaaattaaattgtgtactgaagggaaaagtttgatcataccaaacatttcctaaactctctagttagatatctgacttgggagtattaaaaattgggtctatgacatattgtccaaaaggaatgctgttcttaaagcattatttacagtaggaactggggagtaaatctgttccctacagtttgctgctgagctggaagctgtgggggaaggagttgacaggtgggcccagtgaacttttccagtaaatgaagcaagcactgaataaaaacctcctgaactgggaacaaagatctacaggcaagcaagatgcccacacaacaggcttattttctgtgaaggaaccaactgatctcccccacccttggattagagttcctgctctaccttacccacagataacacatgttgtttctacttgtaaatgtaaagtctttaaaataaactattacagatacttaaaaaaaaaaaaaaaaaaa

SEQ ID NO: 834 - protein, 683 aa, Homo sapiens
MLFIFNFLFSPLPTPALICILTFGAAIFLWLITRPQPVLPLLDLNNQSVGIEGGARKGVSQKNNDLTSCCFSDAKTMYEVFQRGLAVSDNGPCLGYRKPNQPYRWLSYKQVSDRAEYLGSCLLHKGYKSSPDQFVGIFAQNRPEWIISELACYTYSMVAVPLYDTLGPEAIVHIVNKADIAMVICDTPQKALVLIGNVEKGFTPSLKVIILMDPFDDDLKQRGEKSGIEILSLYDAENLGKEHFRKPVPPSPEDLSVICFTSGTTGDPKGAMITHQNIVSNAAAFLKCVEHAYEPTPDDVAISYLPLAHMFERIVQAVVYSCGARVGFFQGDIRLLADDMKTLKPTLFPAVPRLLNRIYDKVQNEAKTPLKKFLLKLAVSSKFKELQKGIIRHDSFWDKLIFAKIQDSLGGRVRVIVTGAAPMSTSVMTFFRAAMGCQVYEAYGQTECTGGCTFTLPGDWTSGHVGVPLACNYVKLEDVADMNYFTVNNEGEVCIKGTNVFKGYLKDPEKTQEALDSDGWLHTGDIGRWLPNGTLKIIDRKKNIFKLAQGEYIAPEKIENIYNRSQPVLQIFVHGESLRSSLVGVVVPDTDVLPSFAAKLGVKGSFEELCQNQVVREAILEDLQKIGKESGLKTFEQVKAIFLHPEPFSIENGLLTPTLKAKRGELSKYFRTQIDSLYEHIQD

SEQ ID NO: 835 - DNA, 3399 bp, Homo sapiens
gccagaggatggaatgccacaggccccacttcgtctcccagcccttcatctttcttccatgtccaaaggcggctccccagaggccaagggctcagctcttgtgttctctgagactgtggcacagctcaccctggcttccttagtaggaagcttttaagaactgctctgtagaaagaacaaaccctaatctagctccagcaaagagccaggatcatgctgaacttcctgtgagccttcgtgggggatcgaggctggagaaagtgctgcttcattctgaggtctgaatttcctgctgctgttcacaaagatgctttttatctttaactttttgttttccccacttccgaccccggcgttgatctgcatcctgacatttggagctgccatcttcttgtggctgatcaccagacctcaacccgtcttacctcttcttgacctgaacaatcagtctgtgggaattgagggaggagcacggaagggggtttcccagaagaacaatgacctaacaagttgctgcttctcagatgccaagactatgtatgaggttttccaaagaggactcgctgtgtctgacaatgggccctgcttgggatatagaaaaccaaaccagccctacagatggctatcttacaaacaggtgtctgatagagcagagtacctgggttcctgtctcttgcataaaggttataaatcatcaccagaccagtttgtcggcatctttgctcagaataggccagagtggatcatctccgaattggcttgttacacgtactctatggtagctgtacctctgtatgacaccttgggaccagaagccatcgtacatattgtcaacaaggctgatatcgccatggtgatctgtgacacaccccaaaaggcattggtgctgatagggaatgtagagaaaggcttcaccccgagcctgaaggtgatcatccttatggacccctttgatgatgacctgaagcaaagaggggagaagagtggaattgagatcttatccctatatgatgctgagaacctaggcaaagagcacttcagaaaacctgtgcctcctagcccagaagacctgagcgtcatctgcttcaccagtgggaccacaggtgaccccaaaggagccatgataacccatcaaaatattgtttcaaatgctgctgcctttctcaaatgtgtggagcatgcttatgagcccactcctgatgatgtggccatatcctacctccctctggctcatatgtttgagaggattgtacaggctgttgtgtacagctgtggagccagagttggattcttccaaggggatattcggttgctggctgacgacatgaagactttgaagcccacattgtttcccgcggtgcctcgactccttaacaggatctacgataaggtacaaaatgaggccaagacacccttgaagaagttcttgttgaagctggctgtttccagtaaattcaaagagcttcaaaagggtatcatcaggcatgatagtttctgggacaagctcatctttgcaaagatccaggacagcctgggcggaagggttcgtgtaattgtcactggagctgcccccatgtccacttcagtcatgacattcttccgggcagcaatgggatgtcaggtgtatgaagcttatggtcaaacagaatgcacaggtggctgtacatttacattacctggggactggacatcaggtcacgttggggtgcccctggcttgcaattacgtgaagctggaagatgtggctgacatgaactactttacagtgaataatgaaggagaggtctgcatcaagggtacaaacgtgttcaaaggatacctgaaggaccctgagaagacacaggaagccctggacagtgatggctggcttcacacaggagacattggtcgctggctcccgaatggaactctgaagatcatcgaccgtaaaaagaacattttcaagctggcccaaggagaatacattgcaccagagaagatagaaaatatctacaacaggagtcaaccagtgttacaaatttttgtacacggggagagcttacggtcatccttagtaggagtggtggttcctgacacagatgtacttccctcatttgcagccaagcttggggtgaagggctcctttgaggaactgtgccaaaaccaagttgtaagggaagccattttagaagacttgcagaaaattgggaaagaaagtggccttaaaacttttgaacaggtcaaagccatttttcttcatccagagccattttccattgaaaatgggctcttgacaccaacattgaaagcaaagcgaggagagctttccaaatactttcggacccaaattgacagcctgtatgagcacatccaggattaggataaggtacttaagtacctgccggcccactgtgcactgcttgtgagaaaatggattaaaaactattcttacatttgttttgcctttcctcctatttttttttaacctgttaaactctaaagccatagcttttgttttatattgagacatataatgtgtaaacttagttcccaaataaatcaatcctgtctttcccatcttcgatgttgctaatattaaggcttcagggctacttttatcaacatgcctgtcttcaagatcccagtttatgttctgtgtccttcctcatgatttccaaccttaatactattagtaaccacaagttcaagggtcaaagggaccctctgtgccttcttctttgttttgtgataaacataacttgccaacagtctctatgcttatttacatcttctactgttcaaactaagagatttttaaattctgaaaaactgcttacaattcatgttttctagccactccacaaaccactaaaattttagttttagcctatcactcatgtcaatcatatctatgagacaaatgtctccgatgctcttctgcgtaaattaaattgtgtactgaagggaaaagtttgatcataccaaacatttcctaaactctctagttagatatctgacttgggagtattaaaaattgggtctatgacatattgtccaaaaggaatgctgttcttaaagcattatttacagtaggaactggggagtaaatctgttccctacagtttgctgctgagctggaagctgtgggggaaggagttgacaggtgggcccagtgaacttttccagtaaatgaagcaagcactgaataaaaacctcctgaactgggaacaaagatctacaggcaagcaagatgcccacacaacaggcttattttctgtgaaggaaccaactgatctcccccacccttggattagagttcctgctctaccttacccacagataacacatgttgtttctacttgtaaatgtaaagtctttaaaataaactattacagatacttaaaaaaaaaaaaaaaaaaa

SEQ ID NO: 836 - protein, 683 aa, Homo sapiens; identical to SEQ ID NO: 834

SEQ ID NO: 837 - DNA, 2444 bp, Homo sapiens
ggttttttttttttaccccccttttttatttattatttttttgcacattgagcggatccttgggaacgagagaaaaaagaaacccaaactcacgcgtgcagaagatctccccccccttcccctcccctcctccctcttttcccctccccaggagaaaaagacccccaagcagaaaaaagttcaccttggactcgtctttttcttgcaatattttttgggggggcaaaactttgagggggtgattttttttggcttttcttcctccttcatttttcttccaaaattgctgctggtgggtgaaaaaaaaatgccgcagctgaacggcggtggaggggatgacctaggcgccaacgacgaactgatttccttcaaagacgagggcgaacaggaggagaagagctccgaaaactcctcggcagagagggatttagctgatgtcaaatcgtctctagtcaatgaatcagaaacgaatcaaaacagctcctccgattccgaggcggaaagacggcctccgcctcgctccgaaagtttccgagacaaatcccgggaaagtttggaagaagcggccaagaggcaagatggagggctctttaaggggccaccgtatcccggctaccccttcatcatgatccccgacctgacgagcccctacctccccaacggatcgctctcgcccaccgcccgaacctatctccagatgaaatggccactgcttgatgtccaggcagggagcctccagagtagacaagccctcaaggatgcccggtccccatcaccggcacacattgtctctaacaaagtgccagtggtgcagcaccctcaccatgtccaccccctcacgcctcttatcacgtacagcaatgaacacttcacgccgggaaacccacctccacacttaccagccgacgtagaccccaaaacaggaatcccacggcctccgcaccctccagatatatccccgtattacccactatcgcctggcaccgtaggacaaatcccccatccgctaggatggttagtaccacagcaaggtcaaccagtgtacccaatcacgacaggaggattcagacacccctaccccacagctctgaccgtcaatgcttccgtgtccaggttccctccccatatggtcccaccacatcatacgctacacacgacgggcattccgcatccggccatagtcacaccaacagtcaaacaggaatcgtcccagagtgatgtcggctcactccatagttcaaagcatcaggactccaaaaaggaagaagaaaagaagaagccccacataaagaaacctcttaatgcattcatgttgtatatgaaggaaatgagagcaaaggtcgtagctgagtgcacgttgaaagaaagcgcggccatcaaccagatccttgggcggaggtggcatgcactgtccagagaagagcaagcgaaatactacgagctggcccggaaggagcgacagcttcatatgcaactgtaccccggctggtccgcgcgggataactatggaaagaagaagaagaggaaaagggacaagcagccgggagagaccaatgaacacagcgaatgtttcctaaatccttgcctttcacttcctccgattacagacctcagcgctcctaagaaatgccgagcgcgctttggccttgatcaacagaataactggtgcggcccttgcaggagaaaaaaaaagtgcgttcgctacatacaaggtgaaggcagctgcctcagcccaccctcttcagatggaagcttactagattcgcctcccccctccccgaacctgctaggctcccctccccgagacgccaagtcacagactgagcagacccagcctctgtcgctgtccctgaagcccgaccccctggcccacctgtccatgatgcctccgccacccgccctcctgctcgctgaggccacccacaaggcctccgccctctgtcccaacggggccctggacctgcccccagccgctttgcagcctgccgccccctcctcatcaattgcacagccgtcgacttcttggttacattcccacagctccctggccgggacccagccccagccgctgtcgctcgtcaccaagtctttagaatagctttagcgtcgtgaaccccgctgctttgtttatggttttgtttcacttttcttaatttgccccccacccccaccttgaaaggttttgttttgtactctcttaattttgtgccatgtggctacattagttgatgtttatcgagttcattggtcaatatttgacccattcttatttcaatttctccttttaaatatgtagatgagagaagaacctcatgattggtaccaaaatttttatcaacagctgtttaaagtctttgtagcgtttaaaaaatatatatatatacataactgttatgtagttcggatagcttagttttaaaagactgattaaaaaacaaaaaaaa

SEQ ID NO: 838 - protein, 596 aa, Homo sapiens
MPQLNGGGGDDLGANDELISFKDEGEQEEKSSENSSAERDLADVKSSLVNESETNQNSSSDSEAERRPPPRSESFRDKSRESLEEAAKRQDGGLFKGPPYPGYPFIMIPDLTSPYLPNGSLSPTARTYLQMKWPLLDVQAGSLQSRQALKDARSPSPAHIVSNKVPVVQHPHHVHPLTPLITYSNEHFTPGNPPPHLPADVDPKTGIPRPPHPPDISPYYPLSPGTVGQIPHPLGWLVPQQGQPVYPITTGGFRHPYPTALTVNASVSRFPPHMVPPHHTLHTTGIPHPAIVTPTVKQESSQSDVGSLHSSKHQDSKKEEEKKKPHIKKPLNAFMLYMKEMRAKVVAECTLKESAAINQILGRRWHALSREEQAKYYELARKERQLHMQLYPGWSARDNYGKKKKRKRDKQPGETNEHSECFLNPCLSLPPITDLSAPKKCRARFGLDQQNNWCGPCRRKKKCVRYIQGEGSCLSPPSSDGSLLDSPPPSPNLLGSPPRDAKSQTEQTQPLSLSLKPDPLAHLSMMPPPPALLLAEATHKASALCPNGALDLPPAALQPAAPSSSIAQPSTSWLHSHSSLAGTQPQPLSLVTKSLE

SEQ ID NO: 839 - DNA, 2013 bp, Homo sapiens
aattcctgtcctcaggcgctgtcagatctgtggtttttctacttgaaggacacaatgttttccaaactagcacatttgcagaggtttgctgtacttagtcgcggagttcattcttcagtggcttctgctacatctgttgcaactaaaaaaacagtccaaggccctccaacctctgatgacatttttgaaagggaatataagtatggtgcacacaactaccatcctttacctgtagccctggagagaggaaaaggtatttacttatgggatgtagaaggcagaaaatattttgacttcctgagttcttacagtgctgtcaaccaagggcattgtcaccccaagattgtgaatgctctgaagagtcaagtggacaaattgaccttaacatctagagctttctataataacgtacttggtgaatatgaggagtatattactaaacttttcaactaccacaaagttcttcctatgaatacaggagtggaggctggagagactgcctgtaaactagctcgtaagtggggctataccgtgaagggcattcagaaatacaaagcaaagattgtttttgcagctgggaacttctggggtaggacgttgtctgctatctccagttccacagacccaaccagttacgatggttttggaccatttatgccgggattcgacatcattccctataatgatctgcccgcactggagcgtgctcttcaggatccaaatgtggctgcgttcatggtagaaccaattcagggtgaagcaggcgttgttgttccggatccaggttacctaatgggagtgcgagagctctgcaccaggcaccaggttctctttattgctgatgaaatacagacaggattggccagaactggtagatggctggctgttgattatgaaaatgtcagacctgatatagtcctccttggaaaggccctttctgggggcttataccctgtgtctgcagtgctgtgtgatgatgacatcatgctgaccattaagccaggggagcatgggtccacatacggtggcaatccactaggctgccgagtggccatcgcagcccttgaggttttagaagaagaaaaccttgctgaaaatgcagacaaattgggcattatcttgagaaatgaactcatgaagctaccttctgatgttgtaactgccgtaagaggaaaaggattattaaacgctattgtcattaaagaaaccaaagattgggatgcttggaaggtgtgtctacgacttcgagataatggacttctggccaagccaacccatggcgacattatcaggtttgcgcctccgctggtgatcaaggaggatgagcttcgagagtccattgaaattattaacaagaccatcttgtctttctgagggtagccagctgttttcagtggtccctgggagccagctggagacaggtggtcctgtaaaagctttattcctaatgtgggcacattccactcccatgagtcttcaaaaactttttttttgaatatatttttttcagttgatacataatagaacaacgtttatgaacctgccgtttgctttgtaacgtaactaaataatgtaatggcatctatattcagttgaagtgttttgatgtgcatgtgtacttcctaaggtgaaatgcatctatatacagacagcctctaaatcaagtccttcagtataattgatatatgtttttataatttcctcactggtataagtgtttcatatttgaaaaagttatctctgggtattgcataaaaggcttcatcttataaagtgaaatcattgttattgaattttaggaaggattaatggttaagtgtatataaaatactaatattaagtaaacttcatattggccaacaccagggttgtattctatggatgtcattattttgaattaagaattagtgtttaacattcctaaattgttttgagtgcttgattataatttgtaaaaaatgtttattttcaatacttctttaaatttaaaataaagcttatatttcaaatgtc

SEQ ID NO: 840 - protein, 439 aa, Homo sapiens
MFSKLAHLQRFAVLSRGVHSSVASATSVATKKTVQGPPTSDDIFEREYKYGAHNYHPLPVALERGKGIYLWDVEGRKYFDFLSSYSAVNQGHCHPKIVNALKSQVDKLTLTSRAFYNNVLGEYEEYITKLFNYHKVLPMNTGVEAGETACKLARKWGYTVKGIQKYKAKIVFAAGNFWGRTLSAISSSTDPTSYDGFGPFMPGFDIIPYNDLPALERALQDPNVAAFMVEPIQGEAGVVVPDPGYLMGVRELCTRHQVLFIADEIQTGLARTGRWLAVDYENVRPDIVLLGKALSGGLYPVSAVLCDDDIMLTIKPGEHGSTYGGNPLGCRVAIAALEVLEEENLAENADKLGIILRNELMKLPSDVVTAVRGKGLLNAIVIKETKDWDAWKVCLRLRDNGLLAKPTHGDIIRFAPPLVIKEDELRESIEIINKTILSF

SEQ ID NO: 841 - DNA, 750 bp, Homo sapiens
atgtggggacaggagcagcacccagagttggatgctgcgggcccaggcgccggccaggcgtcccccctggagggttccgaggcggaagaggaggaggatgcggaggatccgaggaggccgcggctgcgggagcgggctgcgcgcttgctgccgggcctagcgcgctcacctgacgccccggccggggcattggcgtctggggagccctgcgaggacggcgggggcggccctgtgaggtcccccccgggatcccccggctccccgcgtcccaggcgccggcgcctggagcccaactgcgccaagccgcggcgcgcgcgcaccgccttcacctacgagcagctggtggccttggagaacaagttccgggccacgcgctacctgtcagtgtgcgagcgcctgaacctcgcgctgtctctcagcctcaccgagacgcaggtcaaaatctggttccagaatcgcaggaccaagtggaagaagcagaacccgggtgccgacggcgcggcgcaggtggggggtggcgcgccccagccaggggcggcggggggcggcggcggcggcggctcggggggcagtcctggccctcccggcaccggcgctctgcacttccagactttcccctcctactccgcggccaatgtcctcttcccgtccgccgcctccttcccgctgacggctgccgcccccgggagccctttcgcgccgttccttgggccttcctacctgacccccttctacgccccgcgtctatga

SEQ ID NO: 842 - protein, 249 aa, Homo sapiens
MWGQEQHPELDAAGPGAGQASPLEGSEAEEEEDAEDPRRPRLRERAARLLPGLARSPDAPAGALASGEPCEDGGGGPVRSPPGSPGSPRPRRRRLEPNCAKPRRARTAFTYEQLVALENKFRATRYLSVCERLNLALSLSLTETQVKIWFQNRRTKWKKQNPGADGAAQVGGGAPQPGAAGGGGGGGSGGSPGPPGTGALHFQTFPSYSAANVLFPSAASFPLTAAAPGSPFAPFLGPSYLTPFYAPRL

SEQ ID NO: 843 - DNA, 1613 bp, Homo sapiens
gaggagcagggccgggcgccatggcaccgtggggcaagcggctggctggcgtgcgcggggtgctgcttgacatctcgggcgtgctgtacgacagcggcgcgggcggcggcacggccatcgccggctcggtggaggcggtggccagactgaagcgttcccggctgaaggtgaggttctgcaccaacgagtcgcagaagtcccgggcagagctggtggggcagcttcagaggctgggatttgacatctctgagcaggaggtgaccgccccggcaccagctgcctgccagatcctgaaggagcgaggcctgcgaccatacctgctcatccatgacggagtccgctcagaatttgatcagatcgacacatccaacccaaactgtgtggtaattgcagacgcaggagaaagcttttcttatcaaaacatgaataacgccttccaggtgctcatggagctggaaaaacctgtgctcatatcactgggaagagggcgttactacaaggagacctctggcctgatgctggacgttggtccctacatgaaggcgcttgagtatgcctgtggcatcaaagccgaggtggtggggaagccttctcctgagtttttcaagtctgccctgcaagcgataggagtggaagcccaccaggccgtcatgattggggacgatatcgtgggcgacgtcggcggtgcccagcggtgtggaatgagagcgctgcaggtgcgcaccgggaagttcaggcccagtgacgagcaccatccggaagtgaaggctgatgggtacgtggacaacctcgcagaggcagtggacctgctgctgcagcacgccgacaagtgatggcctcctgggagagccccgcctcctccacccctgcctctcctccacccctgcctcccctccacccctgcctctcctccacccgcccaggagagccccacctcctccacccctgcctctcctccacccctgcctcccctccacctgccccagtgcccagaccaaccaaggccctgacagccctgccttctgccctctgccctgcatgggcaggcatttgttccctacctgggtggcctgctcccctgcctgggccctgacttcagctccctgtagtgaagtccaggagggtgggacaggcctgtcaggcctctgggaatctcccaaatcccagaactcaccactcaccatgggcctttaaatgcagtaaactccacctaaccagattcaggggcactatgcccactgcctcctcttcagactctttgcatttcagtgaagagcctggaagaaacccaggggcctcctatgcacagatcttgcagcccagaaccaagtcagcctccctgcgactgcccaggcacactgcccaccaccccacccccgaaacaatgccagcccgctgctttttctatcctcccagtcacctttgcagacaaagaccaggggcagctcccgagggcactgtgaaggctcccatgccacacagtgagaactgtagcctctgcgtccaaggcacacagggtactttctggacccactgctggacagacttgaaggtgtcatgcccggtgtgtgcaggaggaaactaacagttcagtaaactctgccttgaccagc

SEQ ID NO: 844 - protein, 270 aa, Homo sapiens
MAPWGKRLAGVRGVLLDISGVLYDSGAGGGTAIAGSVEAVARLKRSRLKVRFCTNESQKSRAELVGQLQRLGFDISEQEVTAPAPAACQILKERGLRPYLLIHDGVRSEFDQIDTSNPNCVVIADAGESFSYQNMNNAFQVLMELEKPVLISLGRGRYYKETSGLMLDVGPYMKALEYACGIKAEVVGKPSPEFFKSALQAIGVEAHQAVMIGDDIVGDVGGAQRCGMRALQVRTGKFRPSDEHHPEVKADGYVDNLAEAVDLLLQHADK

SEQ ID NO: 845 - DNA, 2863 bp, Homo sapiens
cacgccaaacacgcagccccctcccgctggagtgacaactggccagcatactctaggctgttgtccctttaaaacttgaatccaagggggtaatgatttatcaaacttgtattatcaagaaaatgtcaaaccaagggcaccttgctttgcactgacgcaaacccggcctttcccaaggagatatagaaagcgcctctcctgcctgagccaaacccagtcttgtcaatagcgggtttcaccctccaccagttcagtctgttgcctgtgtcagacatggattgcagtgctcccaaggaaatgaataaactgccagccaacagcccggaggcggcggcggcgcagggccacccggatggcccatgcgctcccaggacgagcccggagcaggagcttcccgcggctgccgccccgccgccgccacgtgtgcccaggtccgcttccaccggcgcccaaactttccagtcagcggacgcgcgagcctgcgaggctgagcggccaggagtggggtcttgcaaactcagtagcccgcgggcgcaggcggcctctgcagctctgcgggacttgagagaggcgcaaggcgcgcaggcctcgccccctcccgggagctccgggcccggcaacgcgctgcactgtaagatcccttttctgcgaggcccggagggggatgcgaacgtgagtgtgggcaagggcaccctggagcggaacaatacccctgttgtgggctgggtgaacatgagccagagcaccgtggtgctggccacggatggaatcacgtccgtgctcccgggcagcgtggccaccgttgccacccaggaggacgagcaaggggatgagaataaggcccgagggaactggtccagcaaactggacttcatcctgtccatggtggggtacgcagtggggctgggcaatgtctggaggtttccctacctggccttccagaacgggggaggtgctttcctcatcccttacctgatgatgctggctctggctggattacccatcttcttcttggaggtgtcgctgggccagtttgccagccagggaccagtgtctgtgtggaaggccatcccagctctacaaggctgtggcatcgcgatgctgatcatctctgtcctaatagccatatactacaatgtgattatttgctatacacttttctacctgtttgcctcctttgtgtctgtactaccctggggctcctgcaacaacccttggaatacgccagaatgcaaagataaaaccaaacttttattagattcctgtgttatcagtgaccatcccaaaatacagatcaagaactcgactttctgcatgaccgcttatcccaacgtgacaatggttaatttcaccagccaggccaataagacatttgtcagtggaagtgaagagtacttcaagtactttgtgctgaagatttctgcagggattgaatatcctggcgagatcaggtggccactagctctctgcctcttcctggcttgggtcattgtgtatgcatcattggctaaaggaatcaagacttcaggaaaagtggtgtacttcacggccacgttcccgtatgtcgtactcgtgatcctcctcatccgaggagtcaccctgcctggagctggagctgggatctggtacttcatcacacccaagtgggagaaactcacggatgccacggtgtggaaagatgctgccactcagattttcttctctttatctgctgcatggggaggcctgatcactctctcttcttacaacaaattccacaacaactgctacagggacactctaattgtcacctgcaccaacagtgccacaagcatctttgccggcttcgtcatcttctccgttatcggcttcatggccaatgaacgcaaagtcaacattgagaatgtggcagaccaagggccaggcattgcatttgtggtttacccggaagccttaaccaggctgcctctctctccgttctgggccatcatctttttcctgatgctcctcactcttggacttgacactatgtttgccaccatcgagaccatagtgacctccatctcagacgagtttcccaagtacctacgcacacacaagccagtgtttactctgggctgctgcatttgtttcttcatcatgggttttccaatgatcactcagggtggaatttacatgtttcagcttgtggacacctatgctgcctcctatgcccttgtcatcattgccatttttgagctcgtggggatctcttatgtgtatggcttgcaaagattctgtgaagatatagagatgatgattggattccagcctaacatcttctggaaagtctgctgggcatttgtaaccccaaccattttaacctttatcctttgcttcagcttttaccagtgggagcccatgacctatggctcttaccgctatcctaactggtccatggtgctcggatggctaatgctcgcctgttccgtcatctggatcccaattatgtttgtgataaaaatgcatctggcccctggaagatttattgagaggctgaagttggtgtgctcgccacagccggactggggcccattcttagctcaacaccgcggggagcgttacaagaacatgatcgaccccttgggaacctcttccttgggactcaaactgccagtgaaggatttggaactgggcactcagtgctagtccagtggtgtgggatggtccagacttgatcctgtttttcctctctgcctcctcctaatgttttccatagctctcctcccatttttcttcatctttcttcctacatcttggttcacatccacgcatgagagtgattatgtagaaaagtaggcatagtgtcgcatgctgcagtaaagagctacatagaccacctgaa

SEQ ID NO: 846 - protein, 797 aa, Homo sapiens
MDCSAPKEMNKLPANSPEAAAAQGHPDGPCAPRTSPEQELPAAAAPPPPRVPRSASTGAQTFQSADARACEAERPGVGSCKLSSPRAQAASAALRDLREAQGAQASPPPGSSGPGNALHCKIPFLRGPEGDANVSVGKGTLERNNTPVVGWVNMSQSTVVLATDGITSVLPGSVATVATQEDEQGDENKARGNWSSKLDFILSMVGYAVGLGNVWRFPYLAFQNGGGAFLIPYLMMLALAGLPIFFLEVSLGQFASQGPVSVWKAIPALQGCGIAMLIISVLIAIYYNVIICYTLFYLFASFVSVLPWGSCNNPWNTPECKDKTKLLLDSCVISDHPKIQIKNSTFCMTAYPNVTMVNFTSQANKTFVSGSEEYFKYFVLKISAGIEYPGEIRWPLALCLFLAWVIVYASLAKGIKTSGKVVYFTATFPYVVLVILLIRGVTLPGAGAGIWYFITPKWEKLTDATVWKDAATQIFFSLSAAWGGLITLSSYNKFHNNCYRDTLIVTCTNSATSIFAGFVIFSVIGFMANERKVNIENVADQGPGIAFVVYPEALTRLPLSPFWAIIFFLMLLTLGLDTMFATIETIVTSISDEFPKYLRTHKPVFTLGCCICFFIMGFPMITQGGIYMFQLVDTYAASYALVIIAIFELVGISYVYGLQRFCEDIEMMIGFQPNIFWKVCWAFVTPTILTFILCFSFYQWEPMTYGSYRYPNWSMVLGWLMLACSVIWIPIMFVIKMHLAPGRFIERLKLVCSPQPDWGPFLAQHRGERYKNMIDPLGTSSLGLKLPVKDLELGTQC

SEQ ID NO: 847 - DNA, 3026 bp, Homo sapiens
ggcgctgccgagccacctcccccgccgcccgctagcaagtttggcggctccaagccaggcgcgcctcaggatccaggctcatttgcttccacctagcttcggtgccccctgctaggcggggaccctcgagagcgatgccgatggatttgattttagttgtgtggttctgtgtgtgcactgccaggacagtggtgggctttgggatggaccctgaccttcagatggatatcgtcaccgagcttgaccttgtgaacaccacccttggagttgctcaggtgtctggaatgcacaatgccagcaaagcatttttatttcaagacatagaaagagagatccatgcagctcctcatgtgagtgagaaattaattcagctgttccagaacaagagtgaattcaccattttggccactgtacagcagaagccatccacttcaggagtgatactgtccattcgagaactggagcacagctattttgaactggagagcagtggcctgagggatgagattcggtatcactacatacacaatgggaagccaaggacagaggcacttccttaccgcatggcagatggacaatggcacaaggttgcactgtcagttagcgcctctcatctcctgctccatgtcgactgtaacaggatttatgagcgtgtgatagaccctccagataccaaccttcccccaggaatcaatttatggcttggccagcgcaaccaaaagcatggcttattcaaagggatcatccaagatgggaagatcatctttatgccgaatggatatataacacagtgtccaaatctaaatcacacttgcccaacctgcagtgatttcttaagcctggtgcaaggaataatggatttacaagagcttttggccaagatgactgcaaaactaaattatgcagagacaagacttagtcaattggaaaactgtcattgtgagaagacttgtcaagtgagtggactgctctatcgagatcaagactcttgggtagatggtgaccattgcaggaactgcacttgcaaaagtggtgccgtggaatgccgaaggatgtcctgtccccctctcaattgctccccagactccctcccagtgcacattgctggccagtgctgtaaggtctgccgaccaaaatgtatctatggaggaaaagttcttgcagaaggccagcggattttaaccaagagctgtcgggaatgccgaggtggagttttagtaaaaattacagaaatgtgtcctcctttgaactgctcagaaaaggatcacattcttcctgagaatcagtgctgccgtgtctgtagaggtcataacttttgtgcagaaggacctaaatgtggtgaaaactcagagtgcaaaaactggaatacaaaagctacttgtgagtgcaagagtggttacatctctgtccagggagactctgcctactgtgaagatattgatgagtgtgcagctaagatgcattactgtcatgccaatactgtgtgtgtcaaccttcctgggttatatcgctgtgactgtgtcccaggatacattcgtgtggatgacttctcttgtacagaacacgatgaatgtggcagcggccagcacaactgtgatgagaatgccatctgcaccaacactgtccagggacacagctgcacctgcaaaccgggctacgtggggaacgggaccatctgcagagctttctgtgaagagggctgcagatacggtggaacgtgtgtggctcccaacaaatgtgtctgtccatctggattcacaggaagccactgcgagaaagatattgatgaatgttcagagggaatcattgagtgccacaaccattcccgctgcgttaacctgccagggtggtaccactgtgagtgcagaagcggtttccatgacgatgggacctattcactgtccggggagtcctgtattgacattgatgaatgtgccttaagaactcacacctgttggaacgattctgcctgcatcaacctggcagggggttttgactgtctctgcccctctgggccctcctgctctggtgactgtcctcatgaaggggggctgaagcacaatggccaggtgtggaccttgaaagaagacaggtgttctgtctgctcctgcaaggatggcaagatattctgccgacggacagcttgtgattgccagaatccaagtgctgacctattctgttgcccagaatgtgacaccagagtcacaagtcaatgtttagaccaaaatggtcacaagctgtatcgaagtggagacaattggacccatagctgtcagcagtgtcggtgtctggaaggagaggtagattgctggccactcacttgccccaacttgagctgtgagtatacagctatcttagaaggggaatgttgtccccgctgtgtcagtgacccctgcctagctgataacatcacctatgacatcagaaaaacttgcctggacagctatggtgtttcacggcttagtggctcagtgtggacgatggctggatctccctgcacaacctgtaaatgcaagaatggaagagtctgttgttctgtggattttgagtgtcttcaaaataattgaagtatttacagtggactcaacgcagaagaatggacgaaatgaccatccaacgtgattaaggataggaatcggtagtttggtttttttgtttgttttgtttttttaaccacagataattgccaaagtttccacctgaggacggtgtttggaggttgccttttggacctaccactttgctcattcttgctaacctagtctaggtgacctacagtgccgtgcatttaagtcaatggttgttaaaagaagtttcccgtgttgtaaatcatgtttcccttatcagatcatttgcaaatacatttaaatgatctcatggtaaatgttgatgtattttttggtttattttgtgtactaacataatagagagagactcagctccttttatttattttgttgatttatggatcaaattctaaaataaagttgcctgttgtgaaaaaaaaaaaaaaaaaaaaaaaaaaa

SEQ ID NO: 848 - protein, 810 aa, Homo sapiens
MPMDLILVVWFCVCTARTVVGFGMDPDLQMDIVTELDLVNTTLGVAQVSGMHNASKAFLFQDIEREIHAAPHVSEKLIQLFQNKSEFTILATVQQKPSTSGVILSIRELEHSYFELESSGLRDEIRYHYIHNGKPRTEALPYRMADGQWHKVALSVSASHLLLHVDCNRIYERVIDPPDTNLPPGINLWLGQRNQKHGLFKGIIQDGKIIFMPNGYITQCPNLNHTCPTCSDFLSLVQGIMDLQELLAKMTAKLNYAETRLSQLENCHCEKTCQVSGLLYRDQDSWVDGDHCRNCTCKSGAVECRRMSCPPLNCSPDSLPVHIAGQCCKVCRPKCIYGGKVLAEGQRILTKSCRECRGGVLVKITEMCPPLNCSEKDHILPENQCCRVCRGHNFCAEGPKCGENSECKNWNTKATCECKSGYISVQGDSAYCEDIDECAAKMHYCHANTVCVNLPGLYRCDCVPGYIRVDDFSCTEHDECGSGQHNCDENAICTNTVQGHSCTCKPGYVGNGTICRAFCEEGCRYGGTCVAPNKCVCPSGFTGSHCEKDIDECSEGIIECHNHSRCVNLPGWYHCECRSGFHDDGTYSLSGESCIDIDECALRTHTCWNDSACINLAGGFDCLCPSGPSCSGDCPHEGGLKHNGQVWTLKEDRCSVCSCKDGKIFCRRTACDCQNPSADLFCCPECDTRVTSQCLDQNGHKLYRSGDNWTHSCQQCRCLEGEVDCWPLTCPNLSCEYTAILEGECCPRCVSDPCLADNITYDIRKTCLDSYGVSRLSGSVWTMAGSPCTTCKCKNGRVCCSVDFECLQNN

SEQ ID NO: 849 - DNA, 3972 bp, Homo sapiens
gctgccgccgccgcgcccgggcgcacccgcccgctcgctgtcccgcgcaccccgtagcgcctcgggctcccgggccggacagaggagccagcccggtgcgcccctccacctcctgctcggggggctttaatgagacacccaccgctgctgtggggccggcggggagcagcaccgcgacggggaccggggctgggcgctggagccagaatcggaaccacgatgtgactccgccgccggggacccgtgaggtttgtgtggaccccgagttccaccaggtgagaagagtgatgaccatccttttccttactatggttatttcatactttggttgcatgaaggctgcccccatgaaagaagcaaacatccgaggacaaggtggcttggcctacccaggtgtgcggacccatgggactctggagagcgtgaatgggcccaaggcaggttcaagaggcttgacatcattggctgacactttcgaacacgtgatagaagagctgttggatgaggaccagaaagttcggcccaatgaagaaaacaataaggacgcagacttgtacacgtccagggtgatgctcagtagtcaagtgcctttggagcctcctcttctctttctgctggaggaatacaaaaattacctagatgctgcaaacatgtccatgagggtccggcgccactctgaccctgcccgccgaggggagctgagcgtgtgtgacagtattagtgagtgggtaacggcggcagacaaaaagactgcagtggacatgtcgggcgggacggtcacagtccttgaaaaggtccctgtatcaaaaggccaactgaagcaatacttctacgagaccaagtgcaatcccatgggttacacaaaagaaggctgcaggggcatagacaaaaggcattggaactcccagtgccgaactacccagtcgtacgtgcgggcccttaccatggatagcaaaaagagaattggctggcgattcataaggatagacacttcttgtgtatgtacattgaccattaaaaggggaagatagtggatttatgttgtatagattagattatattgagacaaaaattatctatttgtatatatacataacagggtaaattattcagttaagaaaaaaataattttatgaactgcatgtataaatgaagtttatacagtacagtggttctacaatctatttattggacatgtccatgaccagaagggaaacagtcatttgcgcacaacttaaaaagtctgcattacattccttgataatgttgtggtttgttgccgttgccaagaactgaaaacataaaaagttaaaaaaaataataaattgcatgctgctttaattgtgaattgataataaactgtcctctttcagaaaacagaaaaaaaacacacacacacacaacaaaaatttgaaccaaaacattccgtttacattttagacagtaagtatcttcgttcttgttagtactatatctgttttactgcttttaacttctgatagcgttggaattaaaacaatgtcaaggtgctgttgtcattgctttactggcttaggggatgggggatggggggtatatttttgtttgttttgtgtttttttttcgtttgtttgttttgttttttagttcccacagggagtagagatggggaaagaattcctacaatatatattctggctgataaaagatacatttgtatgttgtgaagatgtttgcaatatcgatcagatgactagaaagtgaataaaaattaaggcaactgaacaaaaaaatgctcacactccacatcccgtgatgcacctcccaggccccgctcattctttgggcgttggtcagagtaagctgcttttgacggaaggacctatgtttgctcagaacacattctttccccccctccccctctggtctcctctttgttttgttttaaggaagaaaaatcagttgcgcgttctgaaatattttaccactgctgtgaacaagtgaacacattgtgtcacatcatgacactcgtataagcatggagaacagtgatttttttttagaacagaaaacaacaaaaaataaccccaaaatgaagattattttttatgaggagtgaacatttgggtaaatcatggctaagcttaaaaaaaactcatggtgaggcttaacaatgtcttgtaagcaaaaggtagagccctgtatcaacccagaaacacctagatcagaacaggaatccacattgccagtgacatgagactgaacagccaaatggaggctatgtggagttggcattgcatttaccggcagtgcgggaggaatttctgagtggccatcccaaggtctaggtggaggtggggcatggtatttgagacattccaaaacgaaggcctctgaaggacccttcagaggtggctctggaatgacatgtgtcaagctgcttggacctcgtgctttaagtgcctacattatctaactgtgctcaagaggttctcgactggaggaccacactcaagccgacttatgcccaccatcccacctctggataattttgcataaaattggattagcctggagcaggttgggagccaaatgtggcatttgtgatcatgagattgatgcaatgagatagaagatgtttgctacctgaacacttattgctttgaaactagacttgaggaaaccagggtttatcttttgagaacttttggtaagggaaaagggaacaggaaaagaaaccccaaactcaggccgaatgatcaaggggacccataggaaatcttgtccagagacaagacttcgggaaggtgtctggacattcagaacaccaagacttgaaggtgccttgctcaatggaagaggccaggacagagctgacaaaattttgctccccagtgaaggccacagcaaccttctgcccatcctgtctgttcatggagagggtccctgcctcacctctgccattttgggttaggagaagtcaagttgggagcctgaaatagtggttcttggaaaaatggatccccagtgaaaactagagctctaagcccattcagcccatttcacacctgaaaatgttagtgatcaccacttggaccagcatccttaagtatcagaaagccccaagcaattgctgcatcttagtagggtgagggataagcaaaagaggatgttcaccataacccaggaatgaagataccatcagcaaagaatttcaatttgttcagtctttcatttagagctagtctttcacagtaccatctgaatacctctttgaaagaaggaagactttacgtagtgtagatttgttttgtgttgtttgaaaatattatctttgtaattatttttaatatgtaaggaatgcttggaatatctgctatatgtcaactttatgcagcttccttttgagggacaaatttaaaacaaacaaccccccatcacaaacttaaaggattgcaagggccagatctgttaagtggtttcataggagacacatccagcaattgtgtggtcagtggctcttttacccaataagatacatcacagtcacatgcttgatggtttatgttgacctaagatttattttgttaaaatctctctctgttgtgttcgttcttgttctgttttgttttgttttttaaagtcttgctgtggtctctttgtggcagaagtgtttcatgcatggcagcaggcctgttgcttttttatggcgattcccattgaaaatgtaagtaaatgtctgtggccttgttctctctatggtaaagatattattcaccatgtaaaacaaaaaacaatatttattgtattttagtatatttatataattatgttattgaaaaaaattggcattaaaacttaaccgcatcagaacctattgtaaatacaagttctatttaagtgtactaattaacatataatatatgttttaaatatagaatttttaatgtttttaaatatattttcaaagtacataaaaaaaaaaaaaaaaaa

SEQ ID NO: 850 - protein, 247 aa, Homo sapiens
MTILFLTMVISYFGCMKAAPMKEANIRGQGGLAYPGVRTHGTLESVNGPKAGSRGLTSLADTFEHVIEELLDEDQKVRPNEENNKDADLYTSRVMLSSQVPLEPPLLFLLEEYKNYLDAANMSMRVRRHSDPARRGELSVCDSISEWVTAADKKTAVDMSGGTVTVLEKVPVSKGQLKQYFYETKCNPMGYTKEGCRGIDKRHWNSQCRTTQSYVRALTMDSKKRIGWRFIRIDTSCVCTLTIKRGR

SEQ ID NO: 851 - DNA, 4044 bp, Homo sapiens
ggcaatcattggtaacctcgctcattcattagaatcacgtaagaactcaaaaggaaacgtgtctctcggagtgagggcgtttgcgtaaatctataggtttttcgacatcgatgccagttgctttgtcttctgtagtcgccaaggtggttgagagtttaagcttgcggatattgcaaagggttattagattcataagtcacaccaagtggtgggcgatccactgagcaaagccgaacttctcacatgatgacttcaaacaagacacattaccttccagcatctgttggggagacgagattttaagacacttgagtctccaggacagcaaaggcacaatgttccaccaggtgagaagagtgatgaccatccttttccttactatggttatttcatactttggttgcatgaaggctgcccccatgaaagaagcaaacatccgaggacaaggtggcttggcctacccaggtgtgcggacccatgggactctggagagcgtgaatgggcccaaggcaggttcaagaggcttgacatcattggctgacactttcgaacacgtgatagaagagctgttggatgaggaccagaaagttcggcccaatgaagaaaacaataaggacgcagacttgtacacgtccagggtgatgctcagtagtcaagtgcctttggagcctcctcttctctttctgctggaggaatacaaaaattacctagatgctgcaaacatgtccatgagggtccggcgccactctgaccctgcccgccgaggggagctgagcgtgtgtgacagtattagtgagtgggtaacggcggcagacaaaaagactgcagtggacatgtcgggcgggacggtcacagtccttgaaaaggtccctgtatcaaaaggccaactgaagcaatacttctacgagaccaagtgcaatcccatgggttacacaaaagaaggctgcaggggcatagacaaaaggcattggaactcccagtgccgaactacccagtcgtacgtgcgggcccttaccatggatagcaaaaagagaattggctggcgattcataaggatagacacttcttgtgtatgtacattgaccattaaaaggggaagatagtggatttatgttgtatagattagattatattgagacaaaaattatctatttgtatatatacataacagggtaaattattcagttaagaaaaaaataattttatgaactgcatgtataaatgaagtttatacagtacagtggttctacaatctatttattggacatgtccatgaccagaagggaaacagtcatttgcgcacaacttaaaaagtctgcattacattccttgataatgttgtggtttgttgccgttgccaagaactgaaaacataaaaagttaaaaaaaataataaattgcatgctgctttaattgtgaattgataataaactgtcctctttcagaaaacagaaaaaaaacacacacacacacaacaaaaatttgaaccaaaacattccgtttacattttagacagtaagtatcttcgttcttgttagtactatatctgttttactgcttttaacttctgatagcgttggaattaaaacaatgtcaaggtgctgttgtcattgctttactggcttaggggatgggggatggggggtatatttttgtttgttttgtgtttttttttcgtttgtttgttttgttttttagttcccacagggagtagagatggggaaagaattcctacaatatatattctggctgataaaagatacatttgtatgttgtgaagatgtttgcaatatcgatcagatgactagaaagtgaataaaaattaaggcaactgaacaaaaaaatgctcacactccacatcccgtgatgcacctcccaggccccgctcattctttgggcgttggtcagagtaagctgcttttgacggaaggacctatgtttgctcagaacacattctttccccccctccccctctggtctcctctttgttttgttttaaggaagaaaaatcagttgcgcgttctgaaatattttaccactgctgtgaacaagtgaacacattgtgtcacatcatgacactcgtataagcatggagaacagtgatttttttttagaacagaaaacaacaaaaaataaccccaaaatgaagattattttttatgaggagtgaacatttgggtaaatcatggctaagcttaaaaaaaactcatggtgaggcttaacaatgtcttgtaagcaaaaggtagagccctgtatcaacccagaaacacctagatcagaacaggaatccacattgccagtgacatgagactgaacagccaaatggaggctatgtggagttggcattgcatttaccggcagtgcgggaggaatttctgagtggccatcccaaggtctaggtggaggtggggcatggtatttgagacattccaaaacgaaggcctctgaaggacccttcagaggtggctctggaatgacatgtgtcaagctgcttggacctcgtgctttaagtgcctacattatctaactgtgctcaagaggttctcgactggaggaccacactcaagccgacttatgcccaccatcccacctctggataattttgcataaaattggattagcctggagcaggttgggagccaaatgtggcatttgtgatcatgagattgatgcaatgagatagaagatgtttgctacctgaacacttattgctttgaaactagacttgaggaaaccagggtttatcttttgagaacttttggtaagggaaaagggaacaggaaaagaaaccccaaactcaggccgaatgatcaaggggacccataggaaatcttgtccagagacaagacttcgggaaggtgtctggacattcagaacaccaagacttgaaggtgccttgctcaatggaagaggccaggacagagctgacaaaattttgctccccagtgaaggccacagcaaccttctgcccatcctgtctgttcatggagagggtccctgcctcacctctgccattttgggttaggagaagtcaagttgggagcctgaaatagtggttcttggaaaaatggatccccagtgaaaactagagctctaagcccattcagcccatttcacacctgaaaatgttagtgatcaccacttggaccagcatccttaagtatcagaaagccccaagcaattgctgcatcttagtagggtgagggataagcaaaagaggatgttcaccataacccaggaatgaagataccatcagcaaagaatttcaatttgttcagtctttcatttagagctagtctttcacagtaccatctgaatacctctttgaaagaaggaagactttacgtagtgtagatttgttttgtgttgtttgaaaatattatctttgtaattatttttaatatgtaaggaatgcttggaatatctgctatatgtcaactttatgcagcttccttttgagggacaaatttaaaacaaacaaccccccatcacaaacttaaaggattgcaagggccagatctgttaagtggtttcataggagacacatccagcaattgtgtggtcagtggctcttttacccaataagatacatcacagtcacatgcttgatggtttatgttgacctaagatttattttgttaaaatctctctctgttgtgttcgttcttgttctgttttgttttgttttttaaagtcttgctgtggtctctttgtggcagaagtgtttcatgcatggcagcaggcctgttgcttttttatggcgattcccattgaaaatgtaagtaaatgtctgtggccttgttctctctatggtaaagatattattcaccatgtaaaacaaaaaacaatatttattgtattttagtatatttatataattatgttattgaaaaaaattggcattaaaacttaaccgcatcagaacctattgtaaatacaagttctatttaagtgtactaattaacatataatatatgttttaaatatagaatttttaatgtttttaaatatattttcaaagtacataaaaaaaaaaaaaaaaaa

SEQ ID NO: 852 - protein, 255 aa, Homo sapiens
MFHQVRRVMTILFLTMVISYFGCMKAAPMKEANIRGQGGLAYPGVRTHGTLESVNGPKAGSRGLTSLADTFEHVIEELLDEDQKVRPNEENNKDADLYTSRVMLSSQVPLEPPLLFLLEEYKNYLDAANMSMRVRRHSDPARRGELSVCDSISEWVTAADKKTAVDMSGGTVTVLEKVPVSKGQLKQYFYETKCNPMGYTKEGCRGIDKRHWNSQCRTTQSYVRALTMDSKKRIGWRFIRIDTSCVCTLTIKRGR

SEQ ID NO: 853 - DNA, 4084 bp, Homo sapiens
gtgtgtaatccgggcgataggagtccattcagcaccttggacagagccaacggatttgtccgaggtggcggtacccccaggtagtcttcttggccccgctgtaaagccaaccctgtgtcgcccttaaaaagcgtcttttctgaggttcggctcacactgagatcggggctggagagagagtcagattttggagcggagcgtttggaaagcgagccccagtttggtcccctcattgagctcgctgaagttggcttcctagcggtgtaggctggaatagactcttggcaagctccgggttggtatactgggttaactttgggaaatgcaagtgtttatctccaggatctagccaccggggtggtgtaagccgcaaagaagttccaccaggtgagaagagtgatgaccatccttttccttactatggttatttcatactttggttgcatgaaggctgcccccatgaaagaagcaaacatccgaggacaaggtggcttggcctacccaggtgtgcggacccatgggactctggagagcgtgaatgggcccaaggcaggttcaagaggcttgacatcattggctgacactttcgaacacgtgatagaagagctgttggatgaggaccagaaagttcggcccaatgaagaaaacaataaggacgcagacttgtacacgtccagggtgatgctcagtagtcaagtgcctttggagcctcctcttctctttctgctggaggaatacaaaaattacctagatgctgcaaacatgtccatgagggtccggcgccactctgaccctgcccgccgaggggagctgagcgtgtgtgacagtattagtgagtgggtaacggcggcagacaaaaagactgcagtggacatgtcgggcgggacggtcacagtccttgaaaaggtccctgtatcaaaaggccaactgaagcaatacttctacgagaccaagtgcaatcccatgggttacacaaaagaaggctgcaggggcatagacaaaaggcattggaactcccagtgccgaactacccagtcgtacgtgcgggcccttaccatggatagcaaaaagagaattggctggcgattcataaggatagacacttcttgtgtatgtacattgaccattaaaaggggaagatagtggatttatgttgtatagattagattatattgagacaaaaattatctatttgtatatatacataacagggtaaattattcagttaagaaaaaaataattttatgaactgcatgtataaatgaagtttatacagtacagtggttctacaatctatttattggacatgtccatgaccagaagggaaacagtcatttgcgcacaacttaaaaagtctgcattacattccttgataatgttgtggtttgttgccgttgccaagaactgaaaacataaaaagttaaaaaaaataataaattgcatgctgctttaattgtgaattgataataaactgtcctctttcagaaaacagaaaaaaaacacacacacacacaacaaaaatttgaaccaaaacattccgtttacattttagacagtaagtatcttcgttcttgttagtactatatctgttttactgcttttaacttctgatagcgttggaattaaaacaatgtcaaggtgctgttgtcattgctttactggcttaggggatgggggatggggggtatatttttgtttgttttgtgtttttttttcgtttgtttgttttgttttttagttcccacagggagtagagatggggaaagaattcctacaatatatattctggctgataaaagatacatttgtatgttgtgaagatgtttgcaatatcgatcagatgactagaaagtgaataaaaattaaggcaactgaacaaaaaaatgctcacactccacatcccgtgatgcacctcccaggccccgctcattctttgggcgttggtcagagtaagctgcttttgacggaaggacctatgtttgctcagaacacattctttccccccctccccctctggtctcctctttgttttgttttaaggaagaaaaatcagttgcgcgttctgaaatattttaccactgctgtgaacaagtgaacacattgtgtcacatcatgacactcgtataagcatggagaacagtgatttttttttagaacagaaaacaacaaaaaataaccccaaaatgaagattattttttatgaggagtgaacatttgggtaaatcatggctaagcttaaaaaaaactcatggtgaggcttaacaatgtcttgtaagcaaaaggtagagccctgtatcaacccagaaacacctagatcagaacaggaatccacattgccagtgacatgagactgaacagccaaatggaggctatgtggagttggcattgcatttaccggcagtgcgggaggaatttctgagtggccatcccaaggtctaggtggaggtggggcatggtatttgagacattccaaaacgaaggcctctgaaggacccttcagaggtggctctggaatgacatgtgtcaagctgcttggacctcgtgctttaagtgcctacattatctaactgtgctcaagaggttctcgactggaggaccacactcaagccgacttatgcccaccatcccacctctggataattttgcataaaattggattagcctggagcaggttgggagccaaatgtggcatttgtgatcatgagattgatgcaatgagatagaagatgtttgctacctgaacacttattgctttgaaactagacttgaggaaaccagggtttatcttttgagaacttttggtaagggaaaagggaacaggaaaagaaaccccaaactcaggccgaatgatcaaggggacccataggaaatcttgtccagagacaagacttcgggaaggtgtctggacattcagaacaccaagacttgaaggtgccttgctcaatggaagaggccaggacagagctgacaaaattttgctccccagtgaaggccacagcaaccttctgcccatcctgtctgttcatggagagggtccctgcctcacctctgccattttgggttaggagaagtcaagttgggagcctgaaatagtggttcttggaaaaatggatccccagtgaaaactagagctctaagcccattcagcccatttcacacctgaaaatgttagtgatcaccacttggaccagcatccttaagtatcagaaagccccaagcaattgctgcatcttagtagggtgagggataagcaaaagaggatgttcaccataacccaggaatgaagataccatcagcaaagaatttcaatttgttcagtctttcatttagagctagtctttcacagtaccatctgaatacctctttgaaagaaggaagactttacgtagtgtagatttgttttgtgttgtttgaaaatattatctttgtaattatttttaatatgtaaggaatgcttggaatatctgctatatgtcaactttatgcagcttccttttgagggacaaatttaaaacaaacaaccccccatcacaaacttaaaggattgcaagggccagatctgttaagtggtttcataggagacacatccagcaattgtgtggtcagtggctcttttacccaataagatacatcacagtcacatgcttgatggtttatgttgacctaagatttattttgttaaaatctctctctgttgtgttcgttcttgttctgttttgttttgttttttaaagtcttgctgtggtctctttgtggcagaagtgtttcatgcatggcagcaggcctgttgcttttttatggcgattcccattgaaaatgtaagtaaatgtctgtggccttgttctctctatggtaaagatattattcaccatgtaaaacaaaaaacaatatttattgtattttagtatatttatataattatgttattgaaaaaaattggcattaaaacttaaccgcatcagaacctattgtaaatacaagttctatttaagtgtactaattaacatataatatatgttttaaatatagaatttttaatgtttttaaatatattttcaaagtacataaaaaaaaaaaaaaaaaa

SEQ ID NO: 854 - protein, 247 aa, Homo sapiens; identical to SEQ ID NO: 850

SEQ ID NO: 855 - DNA, 4016 bp, Homo sapiens
ggctgctctcgctgccgctccccccggcgaactagcatgaaatctccctgcctctgccgagatcaaatggagcttctcgctgatggggtgcgagtattacctccgccatgcaatttccactatcaataatttaacttctttgctgcagaacagaaggagtacataccgggcaccaaagactcgcgccccctcccccctttaattaagcgaagggaacgtgaaaaaataatagagtgtgggagttttggggccgaagtctttcccggagcagctgccttgatggttactttgacaagtagtgactgaaaagttccaccaggtgagaagagtgatgaccatccttttccttactatggttatttcatactttggttgcatgaaggctgcccccatgaaagaagcaaacatccgaggacaaggtggcttggcctacccaggtgtgcggacccatgggactctggagagcgtgaatgggcccaaggcaggttcaagaggcttgacatcattggctgacactttcgaacacgtgatagaagagctgttggatgaggaccagaaagttcggcccaatgaagaaaacaataaggacgcagacttgtacacgtccagggtgatgctcagtagtcaagtgcctttggagcctcctcttctctttctgctggaggaatacaaaaattacctagatgctgcaaacatgtccatgagggtccggcgccactctgaccctgcccgccgaggggagctgagcgtgtgtgacagtattagtgagtgggtaacggcggcagacaaaaagactgcagtggacatgtcgggcgggacggtcacagtccttgaaaaggtccctgtatcaaaaggccaactgaagcaatacttctacgagaccaagtgcaatcccatgggttacacaaaagaaggctgcaggggcatagacaaaaggcattggaactcccagtgccgaactacccagtcgtacgtgcgggcccttaccatggatagcaaaaagagaattggctggcgattcataaggatagacacttcttgtgtatgtacattgaccattaaaaggggaagatagtggatttatgttgtatagattagattatattgagacaaaaattatctatttgtatatatacataacagggtaaattattcagttaagaaaaaaataattttatgaactgcatgtataaatgaagtttatacagtacagtggttctacaatctatttattggacatgtccatgaccagaagggaaacagtcatttgcgcacaacttaaaaagtctgcattacattccttgataatgttgtggtttgttgccgttgccaagaactgaaaacataaaaagttaaaaaaaataataaattgcatgctgctttaattgtgaattgataataaactgtcctctttcagaaaacagaaaaaaaacacacacacacacaacaaaaatttgaaccaaaacattccgtttacattttagacagtaagtatcttcgttcttgttagtactatatctgttttactgcttttaacttctgatagcgttggaattaaaacaatgtcaaggtgctgttgtcattgctttactggcttaggggatgggggatggggggtatatttttgtttgttttgtgtttttttttcgtttgtttgttttgttttttagttcccacagggagtagagatggggaaagaattcctacaatatatattctggctgataaaagatacatttgtatgttgtgaagatgtttgcaatatcgatcagatgactagaaagtgaataaaaattaaggcaactgaacaaaaaaatgctcacactccacatcccgtgatgcacctcccaggccccgctcattctttgggcgttggtcagagtaagctgcttttgacggaaggacctatgtttgctcagaacacattctttccccccctccccctctggtctcctctttgttttgttttaaggaagaaaaatcagttgcgcgttctgaaatattttaccactgctgtgaacaagtgaacacattgtgtcacatcatgacactcgtataagcatggagaacagtgatttttttttagaacagaaaacaacaaaaaataaccccaaaatgaagattattttttatgaggagtgaacatttgggtaaatcatggctaagcttaaaaaaaactcatggtgaggcttaacaatgtcttgtaagcaaaaggtagagccctgtatcaacccagaaacacctagatcagaacaggaatccacattgccagtgacatgagactgaacagccaaatggaggctatgtggagttggcattgcatttaccggcagtgcgggaggaatttctgagtggccatcccaaggtctaggtggaggtggggcatggtatttgagacattccaaaacgaaggcctctgaaggacccttcagaggtggctctggaatgacatgtgtcaagctgcttggacctcgtgctttaagtgcctacattatctaactgtgctcaagaggttctcgactggaggaccacactcaagccgacttatgcccaccatcccacctctggataattttgcataaaattggattagcctggagcaggttgggagccaaatgtggcatttgtgatcatgagattgatgcaatgagatagaagatgtttgctacctgaacacttattgctttgaaactagacttgaggaaaccagggtttatcttttgagaacttttggtaagggaaaagggaacaggaaaagaaaccccaaactcaggccgaatgatcaaggggacccataggaaatcttgtccagagacaagacttcgggaaggtgtctggacattcagaacaccaagacttgaaggtgccttgctcaatggaagaggccaggacagagctgacaaaattttgctccccagtgaaggccacagcaaccttctgcccatcctgtctgttcatggagagggtccctgcctcacctctgccattttgggttaggagaagtcaagttgggagcctgaaatagtggttcttggaaaaatggatccccagtgaaaactagagctctaagcccattcagcccatttcacacctgaaaatgttagtgatcaccacttggaccagcatccttaagtatcagaaagccccaagcaattgctgcatcttagtagggtgagggataagcaaaagaggatgttcaccataacccaggaatgaagataccatcagcaaagaatttcaatttgttcagtctttcatttagagctagtctttcacagtaccatctgaatacctctttgaaagaaggaagactttacgtagtgtagatttgttttgtgttgtttgaaaatattatctttgtaattatttttaatatgtaaggaatgcttggaatatctgctatatgtcaactttatgcagcttccttttgagggacaaatttaaaacaaacaaccccccatcacaaacttaaaggattgcaagggccagatctgttaagtggtttcataggagacacatccagcaattgtgtggtcagtggctcttttacccaataagatacatcacagtcacatgcttgatggtttatgttgacctaagatttattttgttaaaatctctctctgttgtgttcgttcttgttctgttttgttttgttttttaaagtcttgctgtggtctctttgtggcagaagtgtttcatgcatggcagcaggcctgttgcttttttatggcgattcccattgaaaatgtaagtaaatgtctgtggccttgttctctctatggtaaagatattattcaccatgtaaaacaaaaaacaatatttattgtattttagtatatttatataattatgttattgaaaaaaattggcattaaaacttaaccgcatcagaacctattgtaaatacaagttctatttaagtgtactaattaacatataatatatgttttaaatatagaatttttaatgtttttaaatatattttcaaagtacataaaaaaaaaaaaaaaaaa

SEQ ID NO: 856 - protein, 247 aa, Homo sapiens; identical to SEQ ID NO: 850

SEQ ID NO: 857 - DNA, 3958 bp, Homo sapiens
agtggacttacaagtccgaagccaatgtagcttggaaaacttgggaggcggaattcctaccgctgggaactgaaagggtctgcgacactctcgggcaggccgaacccacatctctacccatcctgcgcccctcttctgaagcgccctccagggaagttaagagttttgactttcggggagtggttgggatgtacgtgggggattcttgactcgggttagtctctggggatgcagagccgggaagaggaatggttccaccaggtgagaagagtgatgaccatccttttccttactatggttatttcatactttggttgcatgaaggctgcccccatgaaagaagcaaacatccgaggacaaggtggcttggcctacccaggtgtgcggacccatgggactctggagagcgtgaatgggcccaaggcaggttcaagaggcttgacatcattggctgacactttcgaacacgtgatagaagagctgttggatgaggaccagaaagttcggcccaatgaagaaaacaataaggacgcagacttgtacacgtccagggtgatgctcagtagtcaagtgcctttggagcctcctcttctctttctgctggaggaatacaaaaattacctagatgctgcaaacatgtccatgagggtccggcgccactctgaccctgcccgccgaggggagctgagcgtgtgtgacagtattagtgagtgggtaacggcggcagacaaaaagactgcagtggacatgtcgggcgggacggtcacagtccttgaaaaggtccctgtatcaaaaggccaactgaagcaatacttctacgagaccaagtgcaatcccatgggttacacaaaagaaggctgcaggggcatagacaaaaggcattggaactcccagtgccgaactacccagtcgtacgtgcgggcccttaccatggatagcaaaaagagaattggctggcgattcataaggatagacacttcttgtgtatgtacattgaccattaaaaggggaagatagtggatttatgttgtatagattagattatattgagacaaaaattatctatttgtatatatacataacagggtaaattattcagttaagaaaaaaataattttatgaactgcatgtataaatgaagtttatacagtacagtggttctacaatctatttattggacatgtccatgaccagaagggaaacagtcatttgcgcacaacttaaaaagtctgcattacattccttgataatgttgtggtttgttgccgttgccaagaactgaaaacataaaaagttaaaaaaaataataaattgcatgctgctttaattgtgaattgataataaactgtcctctttcagaaaacagaaaaaaaacacacacacacacaacaaaaatttgaaccaaaacattccgtttacattttagacagtaagtatcttcgttcttgttagtactatatctgttttactgcttttaacttctgatagcgttggaattaaaacaatgtcaaggtgctgttgtcattgctttactggcttaggggatgggggatggggggtatatttttgtttgttttgtgtttttttttcgtttgtttgttttgttttttagttcccacagggagtagagatggggaaagaattcctacaatatatattctggctgataaaagatacatttgtatgttgtgaagatgtttgcaatatcgatcagatgactagaaagtgaataaaaattaaggcaactgaacaaaaaaatgctcacactccacatcccgtgatgcacctcccaggccccgctcattctttgggcgttggtcagagtaagctgcttttgacggaaggacctatgtttgctcagaacacattctttccccccctccccctctggtctcctctttgttttgttttaaggaagaaaaatcagttgcgcgttctgaaatattttaccactgctgtgaacaagtgaacacattgtgtcacatcatgacactcgtataagcatggagaacagtgatttttttttagaacagaaaacaacaaaaaataaccccaaaatgaagattattttttatgaggagtgaacatttgggtaaatcatggctaagcttaaaaaaaactcatggtgaggcttaacaatgtcttgtaagcaaaaggtagagccctgtatcaacccagaaacacctagatcagaacaggaatccacattgccagtgacatgagactgaacagccaaatggaggctatgtggagttggcattgcatttaccggcagtgcgggaggaatttctgagtggccatcccaaggtctaggtggaggtggggcatggtatttgagacattccaaaacgaaggcctctgaaggacccttcagaggtggctctggaatgacatgtgtcaagctgcttggacctcgtgctttaagtgcctacattatctaactgtgctcaagaggttctcgactggaggaccacactcaagccgacttatgcccaccatcccacctctggataattttgcataaaattggattagcctggagcaggttgggagccaaatgtggcatttgtgatcatgagattgatgcaatgagatagaagatgtttgctacctgaacacttattgctttgaaactagacttgaggaaaccagggtttatcttttgagaacttttggtaagggaaaagggaacaggaaaagaaaccccaaactcaggccgaatgatcaaggggacccataggaaatcttgtccagagacaagacttcgggaaggtgtctggacattcagaacaccaagacttgaaggtgccttgctcaatggaagaggccaggacagagctgacaaaattttgctccccagtgaaggccacagcaaccttctgcccatcctgtctgttcatggagagggtccctgcctcacctctgccattttgggttaggagaagtcaagttgggagcctgaaatagtggttcttggaaaaatggatccccagtgaaaactagagctctaagcccattcagcccatttcacacctgaaaatgttagtgatcaccacttggaccagcatccttaagtatcagaaagccccaagcaattgctgcatcttagtagggtgagggataagcaaaagaggatgttcaccataacccaggaatgaagataccatcagcaaagaatttcaatttgttcagtctttcatttagagctagtctttcacagtaccatctgaatacctctttgaaagaaggaagactttacgtagtgtagatttgttttgtgttgtttgaaaatattatctttgtaattatttttaatatgtaaggaatgcttggaatatctgctatatgtcaactttatgcagcttccttttgagggacaaatttaaaacaaacaaccccccatcacaaacttaaaggattgcaagggccagatctgttaagtggtttcataggagacacatccagcaattgtgtggtcagtggctcttttacccaataagatacatcacagtcacatgcttgatggtttatgttgacctaagatttattttgttaaaatctctctctgttgtgttcgttcttgttctgttttgttttgttttttaaagtcttgctgtggtctctttgtggcagaagtgtttcatgcatggcagcaggcctgttgcttttttatggcgattcccattgaaaatgtaagtaaatgtctgtggccttgttctctctatggtaaagatattattcaccatgtaaaacaaaaaacaatatttattgtattttagtatatttatataattatgttattgaaaaaaattggcattaaaacttaaccgcatcagaacctattgtaaatacaagttctatttaagtgtactaattaacatataatatatgttttaaatatagaatttttaatgtttttaaatatattttcaaagtacataaaaaaaaaaaaaaaaaa

SEQ ID NO: 858 - protein, 262 aa, Homo sapiens
MQSREEEWFHQVRRVMTILFLTMVISYFGCMKAAPMKEANIRGQGGLAYPGVRTHGTLESVNGPKAGSRGLTSLADTFEHVIEELLDEDQKVRPNEENNKDADLYTSRVMLSSQVPLEPPLLFLLEEYKNYLDAANMSMRVRRHSDPARRGELSVCDSISEWVTAADKKTAVDMSGGTVTVLEKVPVSKGQLKQYFYETKCNPMGYTKEGCRGIDKRHWNSQCRTTQSYVRALTMDSKKRIGWRFIRIDTSCVCTLTIKRGR

SEQ ID NO: 859 - DNA, 4247 bp, Homo sapiens
gttccccaactgctgttttattgtgctattcatgcctagacatcacatagctagaaaggcccatcagacccctcaggccactgctgttcctgtcacacattcctgcaaaggaccatgttgctaacttgaaaaaaattactattaattacacttgcagttgttgcttagtaacatttatgattttgtgtttctcgtgacagcatgagcagagatcattaaaaattaaacttacaaagctgctaaagtgggaagaaggagaacttgaagccacaatttttgcacttgcttagaagccatctaatctcaggtttatatgctagatcttgggggaaacactgcatgtctctggtttatattaaaccacatacagcacactactgacactgatttgtgtctggtgcagctggagtttatcaccaagacataaaaaaaccttgaccctgcagaatggcctggaattacaatcagatgggccacatggcatcccggtgaaagaaagccctaaccagttttctgtcttgtttctgctttctccctacagttccaccaggtgagaagagtgatgaccatccttttccttactatggttatttcatactttggttgcatgaaggctgcccccatgaaagaagcaaacatccgaggacaaggtggcttggcctacccaggtgtgcggacccatgggactctggagagcgtgaatgggcccaaggcaggttcaagaggcttgacatcattggctgacactttcgaacacgtgatagaagagctgttggatgaggaccagaaagttcggcccaatgaagaaaacaataaggacgcagacttgtacacgtccagggtgatgctcagtagtcaagtgcctttggagcctcctcttctctttctgctggaggaatacaaaaattacctagatgctgcaaacatgtccatgagggtccggcgccactctgaccctgcccgccgaggggagctgagcgtgtgtgacagtattagtgagtgggtaacggcggcagacaaaaagactgcagtggacatgtcgggcgggacggtcacagtccttgaaaaggtccctgtatcaaaaggccaactgaagcaatacttctacgagaccaagtgcaatcccatgggttacacaaaagaaggctgcaggggcatagacaaaaggcattggaactcccagtgccgaactacccagtcgtacgtgcgggcccttaccatggatagcaaaaagagaattggctggcgattcataaggatagacacttcttgtgtatgtacattgaccattaaaaggggaagatagtggatttatgttgtatagattagattatattgagacaaaaattatctatttgtatatatacataacagggtaaattattcagttaagaaaaaaataattttatgaactgcatgtataaatgaagtttatacagtacagtggttctacaatctatttattggacatgtccatgaccagaagggaaacagtcatttgcgcacaacttaaaaagtctgcattacattccttgataatgttgtggtttgttgccgttgccaagaactgaaaacataaaaagttaaaaaaaataataaattgcatgctgctttaattgtgaattgataataaactgtcctctttcagaaaacagaaaaaaaacacacacacacacaacaaaaatttgaaccaaaacattccgtttacattttagacagtaagtatcttcgttcttgttagtactatatctgttttactgcttttaacttctgatagcgttggaattaaaacaatgtcaaggtgctgttgtcattgctttactggcttaggggatgggggatggggggtatatttttgtttgttttgtgtttttttttcgtttgtttgttttgttttttagttcccacagggagtagagatggggaaagaattcctacaatatatattctggctgataaaagatacatttgtatgttgtgaagatgtttgcaatatcgatcagatgactagaaagtgaataaaaattaaggcaactgaacaaaaaaatgctcacactccacatcccgtgatgcacctcccaggccccgctcattctttgggcgttggtcagagtaagctgcttttgacggaaggacctatgtttgctcagaacacattctttccccccctccccctctggtctcctctttgttttgttttaaggaagaaaaatcagttgcgcgttctgaaatattttaccactgctgtgaacaagtgaacacattgtgtcacatcatgacactcgtataagcatggagaacagtgatttttttttagaacagaaaacaacaaaaaataaccccaaaatgaagattattttttatgaggagtgaacatttgggtaaatcatggctaagcttaaaaaaaactcatggtgaggcttaacaatgtcttgtaagcaaaaggtagagccctgtatcaacccagaaacacctagatcagaacaggaatccacattgccagtgacatgagactgaacagccaaatggaggctatgtggagttggcattgcatttaccggcagtgcgggaggaatttctgagtggccatcccaaggtctaggtggaggtggggcatggtatttgagacattccaaaacgaaggcctctgaaggacccttcagaggtggctctggaatgacatgtgtcaagctgcttggacctcgtgctttaagtgcctacattatctaactgtgctcaagaggttctcgactggaggaccacactcaagccgacttatgcccaccatcccacctctggataattttgcataaaattggattagcctggagcaggttgggagccaaatgtggcatttgtgatcatgagattgatgcaatgagatagaagatgtttgctacctgaacacttattgctttgaaactagacttgaggaaaccagggtttatcttttgagaacttttggtaagggaaaagggaacaggaaaagaaaccccaaactcaggccgaatgatcaaggggacccataggaaatcttgtccagagacaagacttcgggaaggtgtctggacattcagaacaccaagacttgaaggtgccttgctcaatggaagaggccaggacagagctgacaaaattttgctccccagtgaaggccacagcaaccttctgcccatcctgtctgttcatggagagggtccctgcctcacctctgccattttgggttaggagaagtcaagttgggagcctgaaatagtggttcttggaaaaatggatccccagtgaaaactagagctctaagcccattcagcccatttcacacctgaaaatgttagtgatcaccacttggaccagcatccttaagtatcagaaagccccaagcaattgctgcatcttagtagggtgagggataagcaaaagaggatgttcaccataacccaggaatgaagataccatcagcaaagaatttcaatttgttcagtctttcatttagagctagtctttcacagtaccatctgaatacctctttgaaagaaggaagactttacgtagtgtagatttgttttgtgttgtttgaaaatattatctttgtaattatttttaatatgtaaggaatgcttggaatatctgctatatgtcaactttatgcagcttccttttgagggacaaatttaaaacaaacaaccccccatcacaaacttaaaggattgcaagggccagatctgttaagtggtttcataggagacacatccagcaattgtgtggtcagtggctcttttacccaataagatacatcacagtcacatgcttgatggtttatgttgacctaagatttattttgttaaaatctctctctgttgtgttcgttcttgttctgttttgttttgttttttaaagtcttgctgtggtctctttgtggcagaagtgtttcatgcatggcagcaggcctgttgcttttttatggcgattcccattgaaaatgtaagtaaatgtctgtggccttgttctctctatggtaaagatattattcaccatgtaaaacaaaaaacaatatttattgtattttagtatatttatataattatgttattgaaaaaaattggcattaaaacttaaccgcatcagaacctattgtaaatacaagttctatttaagtgtactaattaacatataatatatgttttaaatatagaatttttaatgtttttaaatatattttcaaagtacataaaaaaaaaaaaaaaaaa

SEQ ID NO: 860 - protein, 247 aa, Homo sapiens; identical to SEQ ID NO: 850

SEQ ID NO: 861 - DNA, 1719 bp, Homo sapiens
agaagcgacgctccgcccaccccgacgcggtctctatggtaaccggtcaccgcttctatggagtggcgtttactaccaattgcaaataagaaaattccagattccattccaagatggccaaataggaacagctccagcctgcagctcccagcgtgattaatgtagaagatgggtgatttctgcatttccaactaagctgaaaatggcaaaaacaggagcagaagatcacagagaagcactatctcagtcttccttatccctcttgactgaagcaatggaagtattacagcaaagtagccctgaaggcactttggatgggaatactgtaaacccaatttacaaatatattttgaatgatttaccaagagagtttatgtcatcccaggcaaaagcagttattaaaactactgatgattatttgcagtctcagtttggccccaacagactcgtgcattcagcagcagtatcagaagggtcaggacttcaagattgctccacacatcaaacagcatcagatcacagccatgatgaaatatcagacctagatagctacaaatcaaacagtaaaaacaattcttgttctatatcagcatccaagagaaacagacctgtcagtgctccagtgggtcaactgagggttgcagagttctcttctttaaaatttcagtcagcccggaattggcagaaattgtctcaaagacacaaacttcaaccaagagtgattaaagtaacagcttacaaaaatggatctagaacagtctttgccagagttactgcaccaaccatcaccttgctgctggaagagtgcacagaaaagctgaatctgaacatggccgcaagacgagtgttcttggcagacggcaaggaagccctcgaacctgaagatataccccatgaagccgatgtttatgtttcaacgggagagccctttttaaatccattcaaaaaaattaaagaccatctgttgttaattaagaaagtaacttggacaatgaatgggttgatgcttcctactgatatcaaaagacggaaaaccaagcctgttctttctattagaatgaagaaacttactgagaggacctcagtccgaattctgttctttaagaatggcatggggcaggatgggcatgagattacagtgggaaaagaaacaatgaaaaaggttttagatacttgtacaataagaatgaatctaaatttaccagccagatatttttatgatttgtatggcagaaaaattgaagatatttcaaaaggaaagcactgactctgagacgtgatacttcatggatgccagaggcattcggattcatgactcgtgcttcacgtatcccagaagtgtgctattatcacattttaatgcatgccttgccctctgtttttgcatccttataaaagcttatgccagctgagattagcctgtgcaaccactaacatgtggaagcattacaagttcactggacttaaaatatttaaagaagctaatcctgttggaggaacttccagtctgtagcaccctagtcacttaacattaggtttttgaacttcttttttctttgtttctatgatgttgtgcatcaaatgattgagatccctaaacttttgtgttggatggttttctgaacttcaacttgggaaaggtcaagttttatgtgaaagttatcttttaatttaaacaaataaatgctgatactcttttgattcgaaaaaaaaaaaaaa

SEQ ID NO: 862 - protein, 354 aa, Homo sapiens
MAKTGAEDHREALSQSSLSLLTEAMEVLQQSSPEGTLDGNTVNPIYKYILNDLPREFMSSQAKAVIKTTDDYLQSQFGPNRLVHSAAVSEGSGLQDCSTHQTASDHSHDEISDLDSYKSNSKNNSCSISASKRNRPVSAPVGQLRVAEFSSLKFQSARNWQKLSQRHKLQPRVIKVTAYKNGSRTVFARVTAPTITLLLEECTEKLNLNMAARRVFLADGKEALEPEDIPHEADVYVSTGEPFLNPFKKIKDHLLLIKKVTWTMNGLMLPTDIKRRKTKPVLSIRMKKLTERTSVRILFFKNGMGQDGHEITVGKETMKKVLDTCTIRMNLNLPARYFYDLYGRKIEDISKGKH

SEQ ID NO: 863 - DNA, 3000 bp, Homo sapiens
gacttccggcggaagaagaagccggtccggagttctggccgacagcaggcgaggagtgggtagcagcgcctatgtgaagttagctaatctgagaaggcccacttctggttccatggatgatggcggttgagcagatgccaaaaaaggattggtacagcatcctgggagcagacccatctgcaaatatatcagacctaaaacaaaaatatcaaaaactcatattaatgtatcatccagataaacaaagtacagatgtaccagcaggaacagtggaggaatgtgtacagaagttcatcgaaattgatcaagcatggaaaattctaggaaatgaagagacaaaaagagagtatgacctgcagcggtgtgaagatgatctaagaaatgtaggaccagtagatgctcaagtatatcttgaagaaatgtcttggaatgaaggtgatcactctttttatctgagttgcagatgtggtggaaaatacagtgtttccaaggatgaagcggaagaagttagcctgatttcttgtgatacatgttcactaattatagaactccttcattataactaaaattgttcacaacttgaaatgctttaactgtggtattgagacatgatgagaagccgttgagctttgtccattcaaggaaatggattatttgtcagcccgattatttgcaaagaaaatatacaattatcaagcagagaccacctcagattaatagagaatgaatataattatttatttgtatttataatttatatttacaagttgtcacaaaaatagatttgattatatttggtgaattcccatctgagaactttattatgtcatttttttccatgacacaaaataagaattttcttaatatgagcatgtctcctcttttcagtgggtaacagtatcatcatattcctttatagttactaagtttctggtctaaccgataacgtttctagttgctaaagttatggggctgttgtacacctagaatctttgtgaataatgtgaggccagttcttccataaggaaggctggttatggatattcataaggttatttcaaagttaataaagacaaagtggcaactgtagaaagtgttgcctccaatcttggtccgtatttccaaagcttgtaaacactgccatcttcaaatttaaatgtaatttaggaaatggaagcttttaattttaatttcttttttctaagacagagtctcactctgtcgcgccagctggagtgcagtgccatgatctcaggtcgctgtaacctccgtctcctgggttcaagtgattctccagcctcagcctcccgaatagctgggattacacgtgcccaccaccatgcccagctaatttttgtatttttagtagagatggggttccaccatgttggccaggctggtctcaaactcctgacctcaggtgatccacctgcctcgacctcccaaagtgctaggattacaggtttgagccaccgtgcctggcctaagttttgttaatagagatgggatttcatcatgttggctaggctggtcttgaactcctggcctcaaatgatccgcccacctcaacctcccaaagtgctgggattgcaggcgtgagccaccatgcctggccagaagcttttttaaaaataatgacttggaagttggtgcattatttccccttttattttggagtgttgatataatattggggccaggcatggtggctcacatctgtaatcccagcactttgggagactaaggcaggcggatcacctttggtcaggagttcaagaccaccctggccaacatggtgaaaccccatatctactaaaaataatttttttaaaaattagccagtcacgttggtgtctgcctgtggtcccagctactcgggaggctgaggcacaagaatcacttgaacccaggaggcagagtgagccgaggttgtgccactgcactgcagcctgggctacagagagcaagactctgtctcaaaaaaaataaaataaaataaataaaaaaagatatagtattaatgcctgtatttatgaagacagggccattgcactgctgctatgctgaaatgaacttttataaagtattattgactatagccaactacagatggcatatgccttaaagatgcatttttctatgtatttaatattttgtgtacagtaaaagtcagaactcatttaaagaactttaagggatcctttagaaacatttttacttaatttcaaatgagtgggctgagcatgtagactagcagctttttatcaaacctggcattgtcaggttgaacttataaatacgaatagttactactctgacttgtaaatgtagctgctaaagtatgaggtatatttaagaagaatagattagtttcattatacctataagaacaagaattcaaaagtgaggtagtcatccaggttccccctcccacaatatttttgtatcataaaatttagatgacttttttgggttacatttttatccatatattttgaactaacagaacttggcagaatgtgtgttgaatattctttacatttaacaattaaaaacaactaaaactgaatagcaaatagtttattggtaagtacacggtttcaacgggagtaataaattcacatgaaaaggagacaataatcaagtcaaaagaataaatgcttactaatcatcagaaaatctgtggccattagggctggcacgtaaaaatccaaaatcactcagaggccaaatctgtaaaatcaaaatgaggttgaagacaattagtgaaagtaatgttatagtatcatcatattcccttttgctatctgtcccttttctctatgccagataaacactttctccttactcatcaatcaagaataaaattttctacatcaaagtaagacttgagaaaataaacttatgtgtatatatgtttaaactccaaagtttgggacattcaaacaatgtacatgaaattatatgtgtgtggtgtgtgaataaatatgtatgaatata

SEQ ID NO: 864 - protein, 149 aa, Homo sapiens
MMAVEQMPKKDWYSILGADPSANISDLKQKYQKLILMYHPDKQSTDVPAGTVEECVQKFIEIDQAWKILGNEETKREYDLQRCEDDLRNVGPVDAQVYLEEMSWNEGDHSFYLSCRCGGKYSVSKDEAEEVSLISCDTCSLIIELLHYN

SEQ ID NO: 865 - DNA, 795 bp, Homo sapiens
gaaaagtgcgccctacgaaaggacggtcgacttcggcggggcccaggtgagaaaggcccacctgtgtcccggttgagggtctccagggttctttggggcccgaggaatttcagacctgaacaatcaggtggacaacttcttgtgactttgggtattctgaaattactgccaatggtggcagagtctacatagaactatgcttcgtggtgttctggggaaaacctttcgacttgttggctatactattcaatatggctgtatagctcattgtgcttttgaatacgttggtggtgttgtcatgtgttctggaccatcaatggagcctacaattcaaaattcagatattgtctttgcagaaaatcttagtcgacatttttatggtatccaaagaggtgacattgtgattgcaaaaagcccaagtgatccaaaatcaaatatttgtaaaagagtaattggtttggaaggagacaaaatcctcaccactagtccatcagatttctttaaaagccatagttatgtgccaatgggtcatgtttggttagaaggtgacaatctacagaattctacagattccaggtgctatggacctattccatatggactaataagaggacgaatcttctttaagatttggcctctgagtgattttggatttttacgtgccagccctaatggccacagattttctgatgattagtaagcatttattcttttgacttgattattgtctccttttcatgtgaatttattactcccgttgaaaccgtgtacttaccaataaactatttgctattc

SEQ ID NO: 866 - protein, 166 aa, Homo sapiens
MLRGVLGKTFRLVGYTIQYGCIAHCAFEYVGGVVMCSGPSMEPTIQNSDIVFAENLSRHFYGIQRGDIVIAKSPSDPKSNICKRVIGLEGDKILTTSPSDFFKSHSYVPMGHVWLEGDNLQNSTDSRCYGPIPYGLIRGRIFFKIWPLSDFGFLRASPNGHRFSDD

SEQ ID NO: 867 - DNA, 1584 bp, Homo sapiens
agagttcctattgggttaacactggaggctctaagatggcggcagtggcaacctgcggtagtgttgccgcgagtactgggtctgcagtggcgacagccagcaagagcaacgtcaccagtttccagaggaggggtcctagagccagcgtgaccaacgacagcggccctcgactggtgtccattgcgggcacgcgaccgtcggtgcggaatggacagctgctggtatcaaccgggctcccagccctagaccagctcttaggtggaggtttagccgttggaacagttcttctaattgaggaggataaatataatatttactcacctttgctcttcaagtatttcctggcagaaggaattgtcaatgggcatactttgttggttgcatctgctaaagaggatcctgccaacattttacaggaacttccagcaccattacttgatgataaatgtaaaaaggaatttgatgaagatgtatacaatcataaaacaccagaatctaatattaagatgaaaatagcttggcgttaccagttattacccaagatggagattggaccagtatcatcttcaagatttggtcactattatgatgcatcaaaaagaatgccacaagaactaattgaggcttcaaattggcatggattttttcttccagagaaaatatcttcaactctcaaagtagaaccctgttctttgacccctggctacacaaagctgcttcagtttatccagaacatcatttatgaggaaggatttgatggatccaatcctcagaaaaaacagagaaacattttaagaataggaattcagaatcttggctcacctttatggggagacgatatttgctgtgcagaaaatggtggcaacagtcacagccttaccaagttcctctatgttctccgtggtcttctgagaacctctctttcagcctgcatcatcacaatgccaacacatctgatccagaataaagccattattgcccgtgtcacaaccttgtcagatgtagtagttggtctggaatcatttattggttctgagagagaaactaacccattgtataaggattatcatggattgattcatatacggcagattcctcggcttaataacttgatctgtgatgaatcagatgtcaaagacttagcttttaaattaaaaaggaagctattcaccattgagcgactgcatttgcctccagacttgtcagacacagtgagccgctcaagcaaaatggatctggcagaatccgccaagcggctgggcccaggctgtggcatgatggccggaggcaagaagcacctggacttctagggattcctccttagtcgctgcatgcagaattctatgacactctaattatgattgctaatagcttatgtaaatatttttcttaacaatttgaccctccactccttgaaaaacacaggattataaaatggtgccgccatttctcattttttaactttttacagaactagcacagcagaaatacttttaaatttttccttcatgctctagagaaaataattttatttttaaataaacgccaaaaaatgtcaaaatctcaaaaaaaaaaaaaaaaaaa

SEQ ID NO: 868 - protein, 424 aa, Homo sapiens
MAAVATCGSVAASTGSAVATASKSNVTSFQRRGPRASVTNDSGPRLVSIAGTRPSVRNGQLLVSTGLPALDQLLGGGLAVGTVLLIEEDKYNIYSPLLFKYFLAEGIVNGHTLLVASAKEDPANILQELPAPLLDDKCKKEFDEDVYNHKTPESNIKMKIAWRYQLLPKMEIGPVSSSRFGHYYDASKRMPQELIEASNWHGFFLPEKISSTLKVEPCSLTPGYTKLLQFIQNIIYEEGFDGSNPQKKQRNILRIGIQNLGSPLWGDDICCAENGGNSHSLTKFLYVLRGLLRTSLSACIITMPTHLIQNKAIIARVTTLSDVVVGLESFIGSERETNPLYKDYHGLIHIRQIPRLNNLICDESDVKDLAFKLKRKLFTIERLHLPPDLSDTVSRSSKMDLAESAKRLGPGCGMMAGGKKHLDF

SEQ ID NO: 869 - DNA, 2816 bp, Homo sapiens
gtgattagtgggtttgaaaagggaaccgtggctcggcctcatttcccgctctggttcaggcgcaggaggaagtgttttgctggaggatgatgacagaggtcaggcttcgctaatgggccagtgaggagcggtggaggcgaggccgggcgccggcacacacacattaacacacttgagccatcaccaatcagcataggaatctgagaattgctctcacacaccaacccagcaacatccgtggagaaaactctcaccagcaactcctttaaaacaccgtcatttcaaaccattgtggtcttcaagcaacaacagcagcacaaaaaaccccaaccaaacaaaactcttgacagaagctgtgacaaccagaaaggatgcctcataaagggggaagactttaactaggggcgcgcagatgtgtgaggccttttattgtgagagtggacagacatccgagatttcagagccccatattcgagccccgtggaatcccgcggcccccagccagagccagcatgcagaacagtcacagcggagtgaatcagctcggtggtgtctttgtcaacgggcggccactgccggactccacccggcagaagattgtagagctagctcacagcggggcccggccgtgcgacatttcccgaattctgcaggtgtccaacggatgtgtgagtaaaattctgggcaggtattacgagactggctccatcagacccagggcaatcggtggtagtaaaccgagagtagcgactccagaagttgtaagcaaaatagcccagtataagcgggagtgcccgtccatctttgcttgggaaatccgagacagattactgtccgagggggtctgtaccaacgataacataccaagcgtgtcatcaataaacagagttcttcgcaacctggctagcgaaaagcaacagatgggcgcagacggcatgtatgataaactaaggatgttgaacgggcagaccggaagctggggcacccgccctggttggtatccggggacttcggtgccagggcaacctacgcaagatggctgccagcaacaggaaggagggggagagaataccaactccatcagttccaacggagaagattcagatgaggctcaaatgcgacttcagctgaagcggaagctgcaaagaaatagaacatcctttacccaagagcaaattgaggccctggagaaagagtttgagagaacccattatccagatgtgtttgcccgagaaagactagcagccaaaatagatctacctgaagcaagaatacaggtatggttttctaatcgaagggccaaatggagaagagaagaaaaactgaggaatcagagaagacaggccagcaacacacctagtcatattcctatcagcagtagtttcagcaccagtgtctaccaaccaattccacaacccaccacaccggtttcctccttcacatctggctccatgttgggccgaacagacacagccctcacaaacacctacagcgctctgccgcctatgcccagcttcaccatggcaaataacctgcctatgcaacccccagtccccagccagacctcctcatactcctgcatgctgcccaccagcccttcggtgaatgggcggagttatgatacctacacccccccacatatgcagacacacatgaacagtcagccaatgggcacctcgggcaccacttcaacaggactcatttcccctggtgtgtcagttccagttcaagttcccggaagtgaacctgatatgtctcaatactggccaagattacagtaaaaaaaaaaaaaaaaaaaaaaaggaaaggaaatattgtgttaattcagtcagtgactatggggacacaacagttgagctttcaggaaagaaagaaaaatggctgttagagccgcttcagttctacaattgtgtcctgtattgtaccactggggaaggaatggacttgaaacaaggacctttgtatacagaaggcacgatatcagttggaacaaatcttcattttggtatccaaacttttattcattttggtgtattatttgtaaatgggcatttgtatgttataatgaaaaaaagaacaatgtagactggatggatgtttgatctgtgttggtcatgaagttgttttttttttttttaaaaagaaaaccatgatcaacaagctttgccacgaatttaagagttttatcaagatatatcgaatacttctacccatctgttcatagtttatggactgatgttccaagtttgtatcattcctttgcatataattaaacctggaacaacatgcactagatttatgtcagaaatatctgttggttttccaaaggttgttaacagatgaagtttatgtgcaaaaaagggtaagatataaattcaaggaagaaaaaaagttgatagctaaaaggtagagtgtgtcttcgatataatccaatttgttttatgtcaaaatgtaagtatttgtcttccctagaaatcctcagaatgatttctataataaagttaatttcatttatatttgacaagaatatagatgttttatacacattttcatgcaatcatacgtttcttttttggccagcaaaagttaattgttcttagatatagttgtattactgttcacggtccaatcattttgtgcatctagagttcattcctaatcaattaaaagtgcttgcaagagttttaaacttaagtgttttgaagttgttcacaactacatatcaaaattaaccattgttgattgtaaaaaaccatgccaaagcctttgtatttcctttattatacagttttctttttaaccttaaaaaaaaaaaa

SEQ ID NO: 870 - protein, 422 aa, Homo sapiens [sequence omitted]

SEQ ID NO: 871 - DNA, 2781 bp, Homo sapiens
ggtgcatttgcatgttgcggagtgattagtgggtttgaaaagggaaccgtggctcggcctcatttcccgctctggttcaggcgcaggaggaagtgttttgctggaggatgatgacagaggaatctgagaattgctctcacacaccaacccagcaacatccgtggagaaaactctcaccagcaactcctttaaaacaccgtcatttcaaaccattgtggtcttcaagcaacaacagcagcacaaaaaaccccaaccaaacaaaactcttgacagaagctgtgacaaccagaaaggatgcctcataaagggggaagactttaactaggggcgcgcagatgtgtgaggccttttattgtgagagtggacagacatccgagatttcagagccccatattcgagccccgtggaatcccgcggcccccagccagagccagcatgcagaacagtcacagcggagtgaatcagctcggtggtgtctttgtcaacgggcggccactgccggactccacccggcagaagattgtagagctagctcacagcggggcccggccgtgcgacatttcccgaattctgcagacccatgcagatgcaaaagtccaagtgctggacaatcaaaacgtgtccaacggatgtgtgagtaaaattctgggcaggtattacgagactggctccatcagacccagggcaatcggtggtagtaaaccgagagtagcgactccagaagttgtaagcaaaatagcccagtataagcgggagtgcccgtccatctttgcttgggaaatccgagacagattactgtccgagggggtctgtaccaacgataacataccaagcgtgtcatcaataaacagagttcttcgcaacctggctagcgaaaagcaacagatgggcgcagacggcatgtatgataaactaaggatgttgaacgggcagaccggaagctggggcacccgccctggttggtatccggggacttcggtgccagggcaacctacgcaagatggctgccagcaacaggaaggagggggagagaataccaactccatcagttccaacggagaagattcagatgaggctcaaatgcgacttcagctgaagcggaagctgcaaagaaatagaacatcctttacccaagagcaaattgaggccctggagaaagagtttgagagaacccattatccagatgtgtttgcccgagaaagactagcagccaaaatagatctacctgaagcaagaatacaggtatggttttctaatcgaagggccaaatggagaagagaagaaaaactgaggaatcagagaagacaggccagcaacacacctagtcatattcctatcagcagtagtttcagcaccagtgtctaccaaccaattccacaacccaccacaccggtttcctccttcacatctggctccatgttgggccgaacagacacagccctcacaaacacctacagcgctctgccgcctatgcccagcttcaccatggcaaataacctgcctatgcaacccccagtccccagccagacctcctcatactcctgcatgctgcccaccagcccttcggtgaatgggcggagttatgatacctacacccccccacatatgcagacacacatgaacagtcagccaatgggcacctcgggcaccacttcaacaggactcatttcccctggtgtgtcagttccagttcaagttcccggaagtgaacctgatatgtctcaatactggccaagattacagtaaaaaaaaaaaaaaaaaaaaaaaggaaaggaaatattgtgttaattcagtcagtgactatggggacacaacagttgagctttcaggaaagaaagaaaaatggctgttagagccgcttcagttctacaattgtgtcctgtattgtaccactggggaaggaatggacttgaaacaaggacctttgtatacagaaggcacgatatcagttggaacaaatcttcattttggtatccaaacttttattcattttggtgtattatttgtaaatgggcatttgtatgttataatgaaaaaaagaacaatgtagactggatggatgtttgatctgtgttggtcatgaagttgttttttttttttttaaaaagaaaaccatgatcaacaagctttgccacgaatttaagagttttatcaagatatatcgaatacttctacccatctgttcatagtttatggactgatgttccaagtttgtatcattcctttgcatataattaaacctggaacaacatgcactagatttatgtcagaaatatctgttggttttccaaaggttgttaacagatgaagtttatgtgcaaaaaagggtaagatataaattcaaggaagaaaaaaagttgatagctaaaaggtagagtgtgtcttcgatataatccaatttgttttatgtcaaaatgtaagtatttgtcttccctagaaatcctcagaatgatttctataataaagttaatttcatttatatttgacaagaatatagatgttttatacacattttcatgcaatcatacgtttcttttttggccagcaaaagttaattgttcttagatatagttgtattactgttcacggtccaatcattttgtgcatctagagttcattcctaatcaattaaaagtgcttgcaagagttttaaacttaagtgttttgaagttgttcacaactacatatcaaaattaaccattgttgattgtaaaaaaccatgccaaagcctttgtatttcctttattatacagttttctttttaaccttaaaaaaaaaaaa

SEQ ID NO: 872 - protein, 436 aa, Homo sapiens
MQNSHSGVNQLGGVFVNGRPLPDSTRQKIVELAHSGARPCDISRILQTHADAKVQVLDNQNVSNGCVSKILGRYYETGSIRPRAIGGSKPRVATPEVVSKIAQYKRECPSIFAWEIRDRLLSEGVCTNDNIPSVSSINRVLRNLASEKQQMGADGMYDKLRMLNGQTGSWGTRPGWYPGTSVPGQPTQDGCQQQEGGGENTNSISSNGEDSDEAQMRLQLKRKLQRNRTSFTQEQIEALEKEFERTHYPDVFARERLAAKIDLPEARIQVWFSNRRAKWRREEKLRNQRRQASNTPSHIPISSSFSTSVYQPIPQPTTPVSSFTSGSMLGRTDTALTNTYSALPPMPSFTMANNLPMQPPVPSQTSSYSCMLPTSPSVNGRSYDTYTPPHMQTHMNSQPMGTSGTTSTGLISPGVSVPVQVPGSEPDMSQYWPRLQ

SEQ ID NO: 873 - DNA, 1716 bp, Homo sapiens
atgagggaggaggcccgaggatggctgggtttgatttatgactggaggagaaggtccacttcccactgcgaagcaggcgacctgctcgccgcccagctccagggagaggaacccgcggaggagaggatcccggcccaggtggggaatccagctgctgcctttctcaaaagaccctcaaattatttctgctggaggagtgtcttccaggaaggactaatggtgcagctccccacagcaccagctctccagctgcccccacacagcctgttttgtgctagggctatcgcgatttgcaaattccttctctagctcaagtgcatggacccagaaaatgcccctgcttgagggccaatgttgaccaaggccctcagcagtaatgtgacctctgtgggagcagcacctcgcagagggcagagtttggctctatgcttgtaccattggtggtaaattctgctgagctctatggatccatctggatgaaaaggtctgtataaatgcaagatcattatcatcatcagctgtcccagttggagcctactgattctcaagcccacagtcaatggggcctttccaacaattccattgtacatggcttggaaaaggtgtaattacacgaagctgaatatcttctggagagacagacacgttcatgtctgtcccaggagtgttggagaggaatctctcaggcctctcattaggcacatggagagaggtgccctccaggcctggcccaggtcagggacaagtcagaagctacatctggagcagatccaggatcttatcctggtgcacacgaggggccagcatcgtgcttgcacatttatagctcaggtgctctctggtgttaccaggaagctgctgggaagagacggaggccggagagtgtcccaggacaatgcttccttcactcatgttcatttttaactttaaaaaatggcctccatgatccccaaaatggtcttttggtgtgagggaagtggttgctgtaaggaaagtctctgctcgacacacacaaaaattctcctccatgactttggaccatgtctctgataaaaagactggctgggtgaggagtccagcctgcagacctcccatttgtcctgagtcctctgttgcagtggtcctcaatccccaggttagggatcagtaccagttcctcttaggaactgggccgcacagcaggaggtgagcagcaggccagccagcaagcattgctgccagagctccgcctcctgtcagatcagtgatggcattagtttctcgtaggagcgtaaaccccattgtgaactggccatgtgaggtatctaggttgcatgctccttatgagaatctaactaatgcctgatgatctgaggcggaacagtttcatcccaaaaccacccccgcccactgtgaactcagagagcacctcagcctatggtcaggtaccatctacagcacttgtgccttaaacacccatcagcagatatgaagatttcccaaagcatgcctcaatttagggttgtgcaaactagtgtagcctcttgcctataaatgaagactaagggctccatccaaccagctcgcttgtctgggtccagtctccagaactcttccagcttccctgtagtaaaagaacacaccttggtgggcattgttcatttatcagtgcacagggccacgttgacaaagtcttaatatttaatggcttacgagtctaataataaaaaaattaaa

SEQ ID NO: 874 - protein, 102 aa, Homo sapiens
MREEARGWLGLIYDWRRRSTSHCEAGDLLAAQLQGEEPAEERIPAQVGNPAAAFLKRPSNYFCWRSVFQEGLMVQLPTAPALQLPPHSLFCARAIAICKFLL

SEQ ID NO: 875 - DNA, 2863 bp, Homo sapiens
tggggctcaaattgggtgccctggtgaaggaggggggcacactccagaacctagtccaaccccagacgctgcctgaggcttccctccagctcccctcccttccttttctccctttcctccctccctctctttccctttctccctccccgctaaggctggcgtgccagggggtgggacatgccaatcactggctgtgcctctcccgctgccagcacagggcgcagctccccctgggagccaggtgtttgggtccctggagacgccgcaggcccccagggaggcagtggggctgaggaccctacagacccctcttcagccccgtggtgatgactttcccctgaggaagccctgtagcgtgcctggaggaaggggctctccaaccccagccccacctagccaccatgaacacttcagccccacctgctgtcagccccaacatcaccgtcctggcaccaggaaagggtccctggcaagtggccttcattgggatcaccacgggcctcctgtcgctagccacagtgacaggcaacctgctggtactcatctctttcaaggtcaacacggagctcaagacagtcaataactacttcctgctgagcctggcctgtgctgacctcatcatcggtaccttctccatgaacctctataccacgtacctgctcatgggccactgggctctgggcacgctggcttgtgacctctggctggccctggactatgtggccagcaatgcctccgtcatgaatctgctgctcatcagctttgaccgctacttctccgtgactcggcccctgagctaccgtgccaagcgcacaccccgccgggcagctctgatgatcggcctggcctggctggtttcctttgtgctctgggccccagccatcctcttctggcagtacctggtaggggagcggacagtgctagctgggcagtgctacatccagttcctctcccagcccatcatcacctttggcacagccatggctgccttctacctccctgtcacagtcatgtgcacgctctactggcgcatctaccgggagacagagaaccgagcacgggagctggcagcccttcagggctccgagacgccaggcaaagggggtggcagcagcagcagctcagagaggtctcagccaggggctgagggctcaccagagactcctccaggccgctgctgtcgctgctgccgggcccccaggctgctgcaggcctacagctggaaggaagaagaggaagaggacgaaggctccatggagtccctcacatcctcagagggagaggagcctggctccgaagtggtgatcaagatgccaatggtggaccccgaggcacaggcccccaccaagcagcccccacggagctccccaaatacagtcaagaggccgactaagaaagggcgtgatcgagctggcaagggccagaagccccgtggaaaggagcagctggccaagcggaagaccttctcgctggtcaaggagaagaaggcggctcggaccctgagtgccatcctcctggccttcatcctcacctggacaccgtacaacatcatggtgctggtgtccaccttctgcaaggactgtgttcccgagaccctgtgggagctgggctactggctgtgctacgtcaacagcaccatcaaccccatgtgctacgcactctgcaacaaagccttccgggacacctttcgcctgctgctgctttgccgctgggacaagagacgctggcgcaagatccccaagcgccctggctccgtgcaccgcactccctcccgccaatgctgatagtcccctctcctgcatccctccaccccagtccccgggaaaggccggtgggaagagggcaggggctgcatcctcagccccagggccctgctcaggcctcacctggcttcccaggaccctgggtcaccttcctgggcagcccagagagaccctgccaactttccagacttcgctattcccaggcagggagggaaacccggggaactggtttttctgttccctgctgggtgggaatgcgctcttcaccaggaagaaggcccgggaggaggatccgggctttggactccttgtttgcctttaggcaggaagtcaggagccagcagggcgggccaggagaaagaaggcttaacattaagtattccttggcccagcagcggcccagattgcggtgtgagatggtgccccctggggggcacagccagaaactgaactggccgctgggagaaaagccagatgacagggagctggggaatcccctcgcttcataggcagagcccgcccacctgggccctaggcatactctccaggattgtccacaaatgtcctcagagggtccctaggtgggtcaactccaaggcaaatgtccaagcatcagcaagacaatgacactggaagggtccggcttggctagtcacatatcaagtcccgaggcagcaacaggaccaggagccaggtgtcctgactgtcctacaatatcattttcctgggagtgggagtcaagtgtgcctgctatccagccgcaaatccataccccctgccccagagaagcctcagtccctccctcctggctcacagccaccacctggatggatctgctccatgcagatctagccaggcctcccgcatgctgcctgcctccggccctgccccacacaggcctggcccagccagcaggttctctcctgtgagctccccaatccaacccatgcatggcctcccagccacccggatctccaggcccagcctggccccaaatgttctttcctttcatcctcagcaagtgctgagtctgtgaataaagccacataaccagcgggcaaaaaaaaaaaaaaaaaaaaaaaaaaaaaaaaaaaaaaaaa

SEQ ID NO: 876 - protein, 460 aa, Homo sapiens
MNTSAPPAVSPNITVLAPGKGPWQVAFIGITTGLLSLATVTGNLLVLISFKVNTELKTVNNYFLLSLACADLIIGTFSMNLYTTYLLMGHWALGTLACDLWLALDYVASNASVMNLLLISFDRYFSVTRPLSYRAKRTPRRAALMIGLAWLVSFVLWAPAILFWQYLVGERTVLAGQCYIQFLSQPIITFGTAMAAFYLPVTVMCTLYWRIYRETENRARELAALQGSETPGKGGGSSSSSERSQPGAEGSPETPPGRCCRCCRAPRLLQAYSWKEEEEEDEGSMESLTSSEGEEPGSEVVIKMPMVDPEAQAPTKQPPRSSPNTVKRPTKKGRDRAGKGQKPRGKEQLAKRKTFSLVKEKKAARTLSAILLAFILTWTPYNIMVLVSTFCKDCVPETLWELGYWLCYVNSTINPMCYALCNKAFRDTFRLLLLCRWDKRRWRKIPKRPGSVHRTPSRQC

SEQ ID NO: 877 - DNA, 2196 bp, Homo sapiens
aaaaactgcccatgcaagggtcaggtctccagcagaccctgaaagctgagctgccctgacccccaaagtgaggagaagctgcaagggaaaagggagggacagatcagggagaccggggaagaaggaggagcagccaaggaggctgctgtccccccacagagcagctcggactcagctcccggagcaacccagctgcggaggcaacggcagtgctgctcctccagcgaaggacagcaggcaggcagacagacagaggtcctgggactggaaggcctcagcccccagccactgggctgggcctggcccaatggcctttaatgacctcctgcagcaggtggggggtgtcggccgcttccagcagatccaggtcaccctggtggtcctccccctgctcctgatggcttctcacaacaccctgcagaacttcactgctgccatccctacccaccactgccgcccgcctgccgatgccaacctcagcaagaacggggggctggaggtctggctgccccgggacaggcaggggcagcctgagtcctgcctccgcttcacctccccgcagtggggactgccctttctcaatggcacagaagccaatggcacaggggccacagagccctgcaccgatggctggatctatgacaacagcaccttcccatctaccatcgtgactgagtgggaccttgtgtgctctcacagggccctacgccagctggcccagtccttgtacatggtgggggtgctgctcggagccatggtgttcggctaccttgcagacaggctaggccgccggaaggtactcatcttgaactacctgcagacagctgtgtcagggacctgcgcagccttcgcacccaacttccccatctactgcgccttccggctcctctcgggcatggctctggctggcatctccctcaactgcatgacactgaatgtggagtggatgcccattcacacacgggcctgcgtgggcaccttgattggctatgtctacagcctgggccagttcctcctggctggtgtggcctacgctgtgccccactggcgccacctgcagctactggtctctgcgcctttttttgccttcttcatctactcctggttcttcattgagtcggcccgctggcactcctcctccgggaggctggacctcaccctgagggccctgcagagagtcgcccggatcaatgggaagcgggaagaaggagccaaattgagtatggaggtactccgggccagtctgcagaaggagctgaccatgggcaaaggccaggcatcggccatggagctgctgcgctgccccaccctccgccacctcttcctctgcctctccatgctgtggtttgccactagctttgcatactatgggctggtcatggacctgcagggctttggagtcagcatctacctaatccaggtgatctttggtgctgtggacctgcctgccaagcttgtgggcttccttgtcatcaactccctgggtcgccggcctgcccagatggctgcactgctgctggcaggcatctgcatcctgctcaatggggtgataccccaggaccagtccattgtccgaacctctcttgctgtgctggggaagggttgtctggctgcctccttcaactgcatcttcctgtatactggggaactgtatcccacaatgatccggcagacaggcatgggaatgggcagcaccatggcccgagtgggcagcatcgtgagcccactggtgagcatgactgccgagctctacccctccatgcctctcttcatctacggtgctgttcctgtggccgccagcgctgtcactgtcctcctgccagagaccctgggccagccactgccagacacggtgcaggacctggagagcaggtgggcccccactcagaaagaagcagggatatatcccaggaaagggaaacagacgcgacagcaacaagagcaccagaagtatatggtcccactgcaggcctcagcacaagagaagaatggactctgaggactgagaaggggccttacagaaccctaaagggagggaaggtcctacaggtctccggccacccacacaaggaggaggaagaggaaatggtgacccaagtgtgggggttgtggttcaggaaagcatcttcccaggggtccacctccctttataaaccccaccagaaccacatcattaaaaggtttgactgcgcacca

SEQ ID NO: 878 - protein, 563 aa, Homo sapiens
MAFNDLLQQVGGVGRFQQIQVTLVVLPLLLMASHNTLQNFTAAIPTHHCRPPADANLSKNGGLEVWLPRDRQGQPESCLRFTSPQWGLPFLNGTEANGTGATEPCTDGWIYDNSTFPSTIVTEWDLVCSHRALRQLAQSLYMVGVLLGAMVFGYLADRLGRRKVLILNYLQTAVSGTCAAFAPNFPIYCAFRLLSGMALAGISLNCMTLNVEWMPIHTRACVGTLIGYVYSLGQFLLAGVAYAVPHWRHLQLLVSAPFFAFFIYSWFFIESARWHSSSGRLDLTLRALQRVARINGKREEGAKLSMEVLRASLQKELTMGKGQASAMELLRCPTLRHLFLCLSMLWFATSFAYYGLVMDLQGFGVSIYLIQVIFGAVDLPAKLVGFLVINSLGRRPAQMAALLLAGICILLNGVIPQDQSIVRTSLAVLGKGCLAASFNCIFLYTGELYPTMIRQTGMGMGSTMARVGSIVSPLVSMTAELYPSMPLFIYGAVPVAASAVTVLLPETLGQPLPDTVQDLESRWAPTQKEAGIYPRKGKQTRQQQEHQKYMVPLQASAQEKNGL

SEQ ID NO: 879 - DNA, 2194 bp, Homo sapiens
aaaaactgcccatgcaagggtcaggtctccagcagaccctgaaagctgagctgccctgacccccaaagtgaggagaagctgcaagggaaaagggagggacagatcagggagaccggggaagaaggaggagcagccaaggaggctgctgtccccccacagagcagctcggactcagctcccggagcaacccagctgcggaggcaacggcagtgctgctcctccagcgaaggacagcaggcaggcagacagacagaggtcctgggactggaaggcctcagcccccagccactgggctgggcctggcccaatggcctttaatgacctcctgcagcaggtggggggtgtcggccgcttccagcagatccaggtcaccctggtggtcctccccctgctcctgatggcttctcacaacaccctgcagaacttcactgctgccatccctacccaccactgccgcccgcctgccgatgccaacctcagcaagaacggggggctggaggtctggctgccccgggacaggcaggggcagcctgagtcctgcctccgcttcacctccccgcagtggggactgccctttctcaatggcacagaagccaatggcacaggggccacagagccctgcaccgatggctggatctatgacaacagcaccttcccatctaccatcgtgactgagtgggaccttgtgtgctctcacagggccctacgccagctggcccagtccttgtacatggtgggggtgctgctcggagccatggtgttcggctaccttgcagacaggctaggccgccggaaggtactcatcttgaactacctgcagacagctgtgtcagggacctgcgcagccttcgcacccaacttccccatctactgcgccttccggctcctctcgggcatggctctggctggcatctccctcaactgcatgacactgaatgtggagtggatgcccattcacacacgggcctgcgtgggcaccttgattggctatgtctacagcctgggccagttcctcctggctggtgtggcctacgctgtgccccactggcgccacctgcagctactggtctctgcgcctttttttgccttcttcatctactcctggttcttcattgagtcggcccgctggcactcctcctccgggaggctggacctcaccctgagggccctgcagagagtcgcccggatcaatgggaagcgggaagaaggagccaaattgagtatggaggtactccgggccagtctgcagaaggagctgaccatgggcaaaggccaggcatcggccatggagctgctgcgctgccccaccctccgccacctcttcctctgcctctccatgctgtggtttgccactagctttgcatactatgggctggtcatggacctgcagggctttggagtcagcatctacctaatccaggtgatctttggtgctgtggacctgcctgccaagcttgtgggcttccttgtcatcaactccctgggtcgccggcctgcccagatggctgcactgctgctggcaggcatctgcatcctgctcaatggggtgataccccaggaccagtccattgtccgaacctctcttgctgtgctggggaagggttgtctggctgcctccttcaactgcatcttcctgtatactggggaactgtatcccacaatgatccggcagacaggcatgggaatgggcagcaccatggcccgagtgggcagcatcgtgagcccactggtgagcatgactgccgagctctacccctccatgcctctcttcatctacggtgctgttcctgtggccgccagcgctgtcactgtcctcctgccagagaccctgggccagccactgccagacacggtgcaggacctggagagcaggaaagggaaacagacgcgacagcaacaagagcaccagaagtatatggtcccactgcaggcctcagcacaagagaagaatggactctgaggactgagaaggggccttacagaaccctaaagggagggaaggtcctacaggtctccggccacccacacaaggaggaggaagaggaaatggtgacccaagtgtgggggttgtggttcaggaaagcatcttcccaggggtccacctccctttataaaccccaccagaaccacatcattaaaaggtttgactgcgcaccaaaaaaaaaaaaaaaaaaaaaaaaaaaaaaaaaaaaaa

SEQ ID NO: 880 - protein, 550 aa, Homo sapiens
MAFNDLLQQVGGVGRFQQIQVTLVVLPLLLMASHNTLQNFTAAIPTHHCRPPADANLSKNGGLEVWLPRDRQGQPESCLRFTSPQWGLPFLNGTEANGTGATEPCTDGWIYDNSTFPSTIVTEWDLVCSHRALRQLAQSLYMVGVLLGAMVFGYLADRLGRRKVLILNYLQTAVSGTCAAFAPNFPIYCAFRLLSGMALAGISLNCMTLNVEWMPIHTRACVGTLIGYVYSLGQFLLAGVAYAVPHWRHLQLLVSAPFFAFFIYSWFFIESARWHSSSGRLDLTLRALQRVARINGKREEGAKLSMEVLRASLQKELTMGKGQASAMELLRCPTLRHLFLCLSMLWFATSFAYYGLVMDLQGFGVSIYLIQVIFGAVDLPAKLVGFLVINSLGRRPAQMAALLLAGICILLNGVIPQDQSIVRTSLAVLGKGCLAASFNCIFLYTGELYPTMIRQTGMGMGSTMARVGSIVSPLVSMTAELYPSMPLFIYGAVPVAASAVTVLLPETLGQPLPDTVQDLESRKGKQTRQQQEHQKYMVPLQASAQEKNGL

SEQ ID NO: 881 - DNA, 2025 bp, Homo sapiens
aaaaactgcccatgcaagggtcaggtctccagcagaccctgaaagctgagctgccctgacccccaaagtgaggagaagctgcaagggaaaagggagggacagatcagggagaccggggaagaaggaggagcagccaaggaggctgctgtccccccacagagcagctcggactcagctcccggagcaacccagctgcggaggcaacggcagtgctgctcctccagcgaaggacagcaggcaggcagacagacagaggtcctgggactggaaggcctcagcccccagccactgggctgggcctggcccaatggcctttaatgacctcctgcagcaggtggggggtgtcggccgcttccagcagatccaggtcaccctggtggtcctccccctgctcctgatggcttctcacaacaccctgcagaacttcactgctgccatccctacccaccactgccgcccgcctgccgatgccaacctcagcaagaacggggggctggaggtctggctgccccgggacaggcaggggcagcctgagtcctgcctccgcttcacctccccgcagtggggactgccctttctcaatggcacagaagccaatggcacaggggccacagagccctgcaccgatggctggatctatgacaacagcaccttcccatctaccatcgtgactgagtgggaccttgtgtgctctcacagggccctacgccagctggcccagtccttgtacatggtgggggtgctgctcggagccatggtgttcggctaccttgcagacaggctaggccgccggaaggtactcatcttgaactacctgcagacagctgtgtcagggacctgcgcagccttcgcacccaacttccccatctactgcgccttccggctcctctcgggcatggctctggctggcatctccctcaactgcatgacactgaatgtggagtggatgcccattcacacacgggcctgcgtgggcaccttgattggctatgtctacagcctgggccagttcctcctggctggtgtggcctacgctgtgccccactggcgccacctgcagctactggtctctgcgcctttttttgccttcttcatctactcctggttcttcattgagtcggcccgctggcactcctcctccgggaggctggacctcaccctgagggccctgcagagagtcgcccggatcaatgggaagcgggaagaaggagccaaattgagtatggaggtactccgggccagtctgcagaaggagctgaccatgggcaaaggccaggcatcggccatggagctgctgcgctgccccaccctccgccacctcttcctctgcctctccatgctgtggtttgccactagctttgcatactatgggctggtcatggacctgcagggctttggagtcagcatctacctaatccaggtgatctttggtgctgtggacctgcctgccaagcttgtgggcttccttgtcatcaactccctgggtcgccggcctgcccagatggctgcactgctgctggcaggcatctgcatcctgctcaatggggtgataccccaggaccagtccattgtccgaacctctcttgctgtgctggggaagggttgtctggctgcctccttcaactgcatcttcctgtatactggggaactgtatcccacaatgatccgcgctgtcactgtcctcctgccagagaccctgggccagccactgccagacacggtgcaggacctggagagcaggaaagggaaacagacgcgacagcaacaagagcaccagaagtatatggtcccactgcaggcctcagcacaagagaagaatggactctgaggactgagaaggggccttacagaaccctaaagggagggaaggtcctacaggtctccggccacccacacaaggaggaggaagaggaaatggtgacccaagtgtgggggttgtggttcaggaaagcatcttcccaggggtccacctccctttataaaccccaccagaaccacatcattaaaaggtttgactgcgcacca

SEQ ID NO: 882 - protein, 506 aa, Homo sapiens
MAFNDLLQQVGGVGRFQQIQVTLVVLPLLLMASHNTLQNFTAAIPTHHCRPPADANLSKNGGLEVWLPRDRQGQPESCLRFTSPQWGLPFLNGTEANGTGATEPCTDGWIYDNSTFPSTIVTEWDLVCSHRALRQLAQSLYMVGVLLGAMVFGYLADRLGRRKVLILNYLQTAVSGTCAAFAPNFPIYCAFRLLSGMALAGISLNCMTLNVEWMPIHTRACVGTLIGYVYSLGQFLLAGVAYAVPHWRHLQLLVSAPFFAFFIYSWFFIESARWHSSSGRLDLTLRALQRVARINGKREEGAKLSMEVLRASLQKELTMGKGQASAMELLRCPTLRHLFLCLSMLWFATSFAYYGLVMDLQGFGVSIYLIQVIFGAVDLPAKLVGFLVINSLGRRPAQMAALLLAGICILLNGVIPQDQSIVRTSLAVLGKGCLAASFNCIFLYTGELYPTMIRAVTVLLPETLGQPLPDTVQDLESRKGKQTRQQQEHQKYMVPLQASAQEKNGL

SEQ ID NO: 883 - DNA, 2064 bp, Homo sapiens
aaaaactgcccatgcaagggtcaggtctccagcagaccctgaaagctgagctgccctgacccccaaagtgaggagaagctgcaagggaaaagggagggacagatcagggagaccggggaagaaggaggagcagccaaggaggctgctgtccccccacagagcagctcggactcagctcccggagcaacccagctgcggaggcaacggcagtgctgctcctccagcgaaggacagcaggcaggcagacagacagaggtcctgggactggaaggcctcagcccccagccactgggctgggcctggcccaatggcctttaatgacctcctgcagcaggtggggggtgtcggccgcttccagcagatccaggtcaccctggtggtcctccccctgctcctgatggcttctcacaacaccctgcagaacttcactgctgccatccctacccaccactgccgcccgcctgccgatgccaacctcagcaagaacggggggctggaggtctggctgccccgggacaggcaggggcagcctgagtcctgcctccgcttcacctccccgcagtggggactgccctttctcaatggcacagaagccaatggcacaggggccacagagccctgcaccgatggctggatctatgacaacagcaccttcccatctaccatcgtgactgagtgggaccttgtgtgctctcacagggccctacgccagctggcccagtccttgtacatggtgggggtgctgctcggagccatggtgttcggctaccttgcagacaggctaggccgccggaaggtactcatcttgaactacctgcagacagctgtgtcagggacctgcgcagccttcgcacccaacttccccatctactgcgccttccggctcctctcgggcatggctctggctggcatctccctcaactgcatgacactgaatgtggagtggatgcccattcacacacgggcctgcgtgggcaccttgattggctatgtctacagcctgggccagttcctcctggctggtgtggcctacgctgtgccccactggcgccacctgcagctactggtctctgcgcctttttttgccttcttcatctactcctggttcttcattgagtcggcccgctggcactcctcctccgggaggctggacctcaccctgagggccctgcagagagtcgcccggatcaatgggaagcgggaagaaggagccaaattgagtatggaggtactccgggccagtctgcagaaggagctgaccatgggcaaaggccaggcatcggccatggagctgctgcgctgccccaccctccgccacctcttcctctgcctctccatgctgtggtttgccactagctttgcatactatgggctggtcatggacctgcagggctttggagtcagcatctacctaatccaggtgatctttggtgctgtggacctgcctgccaagcttgtgggcttccttgtcatcaactccctgggtcgccggcctgcccagatggctgcactgctgctggcaggcatctgcatcctgctcaatggggtgataccccaggaccagtccattgtccgaacctctcttgctgtgctggggaagggttgtctggctgcctccttcaactgcatcttcctgtatactggggaactgtatcccacaatgatccgcgctgtcactgtcctcctgccagagaccctgggccagccactgccagacacggtgcaggacctggagagcaggtgggcccccactcagaaagaagcagggatatatcccaggaaagggaaacagacgcgacagcaacaagagcaccagaagtatatggtcccactgcaggcctcagcacaagagaagaatggactctgaggactgagaaggggccttacagaaccctaaagggagggaaggtcctacaggtctccggccacccacacaaggaggaggaagaggaaatggtgacccaagtgtgggggttgtggttcaggaaagcatcttcccaggggtccacctccctttataaaccccaccagaaccacatcattaaaaggtttgactgcgcacca

SEQ ID NO: 884 - protein, 519 aa, Homo sapiens
MAFNDLLQQVGGVGRFQQIQVTLVVLPLLLMASHNTLQNFTAAIPTHHCRPPADANLSKNGGLEVWLPRDRQGQPESCLRFTSPQWGLPFLNGTEANGTGATEPCTDGWIYDNSTFPSTIVTEWDLVCSHRALRQLAQSLYMVGVLLGAMVFGYLADRLGRRKVLILNYLQTAVSGTCAAFAPNFPIYCAFRLLSGMALAGISLNCMTLNVEWMPIHTRACVGTLIGYVYSLGQFLLAGVAYAVPHWRHLQLLVSAPFFAFFIYSWFFIESARWHSSSGRLDLTLRALQRVARINGKREEGAKLSMEVLRASLQKELTMGKGQASAMELLRCPTLRHLFLCLSMLWFATSFAYYGLVMDLQGFGVSIYLIQVIFGAVDLPAKLVGFLVINSLGRRPAQMAALLLAGICILLNGVIPQDQSIVRTSLAVLGKGCLAASFNCIFLYTGELYPTMIRAVTVLLPETLGQPLPDTVQDLESRWAPTQKEAGIYPRKGKQTRQQQEHQKYMVPLQASAQEKNGL

SEQ ID NO: 885 - DNA, 2131 bp, Homo sapiens
aaaaactgcccatgcaagggtcaggtctccagcagaccctgaaagctgagctgccctgacccccaaagtgaggagaagctgcaagggaaaagggagggacagatcagggagaccggggaagaaggaggagcagccaaggaggctgctgtccccccacagagcagctcggactcagctcccggagcaacccagctgcggaggcaacggcagtgctgctcctccagcgaaggacagcaggcaggcagacagacagaggtcctgggactggaaggcctcagcccccagccactgggctgggcctggcccaatggcctttaatgacctcctgctcctgatggcttctcacaacaccctgcagaacttcactgctgccatccctacccaccactgccgcccgcctgccgatgccaacctcagcaagaacggggggctggaggtctggctgccccgggacaggcaggggcagcctgagtcctgcctccgcttcacctccccgcagtggggactgccctttctcaatggcacagaagccaatggcacaggggccacagagccctgcaccgatggctggatctatgacaacagcaccttcccatctaccatcgtgactgagtgggaccttgtgtgctctcacagggccctacgccagctggcccagtccttgtacatggtgggggtgctgctcggagccatggtgttcggctaccttgcagacaggctaggccgccggaaggtactcatcttgaactacctgcagacagctgtgtcagggacctgcgcagccttcgcacccaacttccccatctactgcgccttccggctcctctcgggcatggctctggctggcatctccctcaactgcatgacactgaatgtggagtggatgcccattcacacacgggcctgcgtgggcaccttgattggctatgtctacagcctgggccagttcctcctggctggtgtggcctacgctgtgccccactggcgccacctgcagctactggtctctgcgcctttttttgccttcttcatctactcctggttcttcattgagtcggcccgctggcactcctcctccgggaggctggacctcaccctgagggccctgcagagagtcgcccggatcaatgggaagcgggaagaaggagccaaattgagtatggaggtactccgggccagtctgcagaaggagctgaccatgggcaaaggccaggcatcggccatggagctgctgcgctgccccaccctccgccacctcttcctctgcctctccatgctgtggtttgccactagctttgcatactatgggctggtcatggacctgcagggctttggagtcagcatctacctaatccaggtgatctttggtgctgtggacctgcctgccaagcttgtgggcttccttgtcatcaactccctgggtcgccggcctgcccagatggctgcactgctgctggcaggcatctgcatcctgctcaatggggtgataccccaggaccagtccattgtccgaacctctcttgctgtgctggggaagggttgtctggctgcctccttcaactgcatcttcctgtatactggggaactgtatcccacaatgatccggcagacaggcatgggaatgggcagcaccatggcccgagtgggcagcatcgtgagcccactggtgagcatgactgccgagctctacccctccatgcctctcttcatctacggtgctgttcctgtggccgccagcgctgtcactgtcctcctgccagagaccctgggccagccactgccagacacggtgcaggacctggagagcaggaaagggaaacagacgcgacagcaacaagagcaccagaagtatatggtcccactgcaggcctcagcacaagagaagaatggactctgaggactgagaaggggccttacagaaccctaaagggagggaaggtcctacaggtctccggccacccacacaaggaggaggaagaggaaatggtgacccaagtgtgggggttgtggttcaggaaagcatcttcccaggggtccacctccctttataaaccccaccagaaccacatcattaaaaggtttgactgcgcaccaaaaaaaaaaaaaaaaaaaaaaaaaaaaaaaaaaaaaa

SEQ ID NO: 886 - protein, 529 aa, Homo sapiens
MAFNDLLLLMASHNTLQNFTAAIPTHHCRPPADANLSKNGGLEVWLPRDRQGQPESCLRFTSPQWGLPFLNGTEANGTGATEPCTDGWIYDNSTFPSTIVTEWDLVCSHRALRQLAQSLYMVGVLLGAMVFGYLADRLGRRKVLILNYLQTAVSGTCAAFAPNFPIYCAFRLLSGMALAGISLNCMTLNVEWMPIHTRACVGTLIGYVYSLGQFLLAGVAYAVPHWRHLQLLVSAPFFAFFIYSWFFIESARWHSSSGRLDLTLRALQRVARINGKREEGAKLSMEVLRASLQKELTMGKGQASAMELLRCPTLRHLFLCLSMLWFATSFAYYGLVMDLQGFGVSIYLIQVIFGAVDLPAKLVGFLVINSLGRRPAQMAALLLAGICILLNGVIPQDQSIVRTSLAVLGKGCLAASFNCIFLYTGELYPTMIRQTGMGMGSTMARVGSIVSPLVSMTAELYPSMPLFIYGAVPVAASAVTVLLPETLGQPLPDTVQDLESRKGKQTRQQQEHQKYMVPLQASAQEKNGL

SEQ ID NO: 887 - DNA, 2207 bp, Homo sapiens
agcttgttagagctgagctgccctactacagcagctgccggcccctaggacagagcagggacctcaactacactgatcaccagccccatcggatccagacccggccaccagctctggctcgtcttgccccagtgccatgaccttctcggagatcctggaccgtgtgggaagcatgggccatttccagttcctgcatgtagccatactgggcctcccgatcctcaacatggccaaccacaacctgctgcagatcttcacagccgccacccctgtccaccactgtcgcccgccccacaatgcctccacagggccttgggtgctccccatgggcccaaatgggaagcctgagaggtgcctccgttttgtacatccgcccaatgccagcctgcccaatgacacccagagggccatggagccatgcctggatggctgggtctacaacagcaccaaggactccattgtgacagagtgggacttggtgtgcaactccaacaaactgaaggagatggcccagtctatcttcatggcaggtatactgattggagggctcgtgcttggagacctgtctgacaggtttggccgcaggcccatcctgacctgcagctacctgctgctggcagccagcggctccggtgcagccttcagccccaccttccccatctacatggtcttccgcttcctgtgtggctttggcatctcaggcattaccctgagcaccgtcatcttgaatgtggaatgggtgcctacccggatgcgggccatcatgtcgacagcactcgggtactgctacacctttggccagttcattctgcccggcctggcctacgccatcccccagtggcgttggctgcagttaactgtgtccattcccttcttcgtcttcttcctatcatcctggtggacaccagagtccatacgctggttggtcttgtctggaaagtcctcgaaggccctgaagatactccggcgggtggctgtcttcaatggcaagaaggaagagggagaaaggctcagcttggaggagctcaaactcaacctgcagaaggagatctccttggccaaggccaagtacaccgcaagtgacctgttccggatacccatgctgcgccgcatgaccttctgtctttccctggcctggtttgctaccggttttgcctactatagtttggctatgggtgtggaagaatttggagtcaacctctacatcctccagatcatctttggtggggtcgatgtcccagccaagttcatcaccatcctctccttaagctacctgggccggcataccactcaggccgctgccctgctcctggcaggaggggccatcttggctctcacctttgtgcccttggacttgcagaccgtgaggacagtattggctgtgtttgggaagggatgcctatccagctccttcagctgcctcttcctctacacaagtgaattataccccacagtcatcaggcaaacaggtatgggcgtaagtaacctgtggacccgcgtgggaagcatggtgtccccgctggtgaaaatcacgggtgaggtacagcccttcatccccaatatcatctacgggatcaccgccctcctcgggggcagtgctgccctcttcctgcctgagaccctgaatcagcccttgccagagactatcgaagacctggaaaactggtccctgcgggcaaagaagccaaagcaggagccagaggtggaaaaggcctcccagaggatccctctacagcctcacggaccaggcctgggctccagctgaggacaacggaaccccctttccctgccctccagagactgatcctagccaggcaccttaggagtatagggaggccccatataggtccatcctcctaggatgaagccttctgagagcttggtgaaggtgtctccatcaccaccaccagagcctcctgcccagccctggccagttcaaaggttcagccatccctgcccttgttctccctgcaacccaggccctgccattcttctgtctagcccttccccactggccaccttcccccactgtcccggtcctcttcccctgaggtcccctgatatcccctggctcagtcctaacaagactgagtcttaacaagatgagaagtcctccccttcttgcctcccacacttttctttgatgggaggtttcaataaacagcgataagaactctaaaaaaaaaaaaaaaaaaaaaaaaaaaaaa

SEQ ID NO: 888 - protein, 542 aa, Homo sapiens
MTFSEILDRVGSMGHFQFLHVAILGLPILNMANHNLLQIFTAATPVHHCRPPHNASTGPWVLPMGPNGKPERCLRFVHPPNASLPNDTQRAMEPCLDGWVYNSTKDSIVTEWDLVCNSNKLKEMAQSIFMAGILIGGLVLGDLSDRFGRRPILTCSYLLLAASGSGAAFSPTFPIYMVFRFLCGFGISGITLSTVILNVEWVPTRMRAIMSTALGYCYTFGQFILPGLAYAIPQWRWLQLTVSIPFFVFFLSSWWTPESIRWLVLSGKSSKALKILRRVAVFNGKKEEGERLSLEELKLNLQKEISLAKAKYTASDLFRIPMLRRMTFCLSLAWFATGFAYYSLAMGVEEFGVNLYILQIIFGGVDVPAKFITILSLSYLGRHTTQAAALLLAGGAILALTFVPLDLQTVRTVLAVFGKGCLSSSFSCLFLYTSELYPTVIRQTGMGVSNLWTRVGSMVSPLVKITGEVQPFIPNIIYGITALLGGSAALFLPETLNQPLPETIEDLENWSLRAKKPKQEPEVEKASQRIPLQPHGPGLGSS

SEQ ID NO: 889 - DNA, 1717 bp, Homo sapiens
gcaattcactttggattttctaatatcccatttctgagaagaatggcagactattgaacaggtgtattttaggtcacgtggggactgcatccacctgaaaatccaccgttgacttatcaggaaactcagagatcaggatctttcacagagtagtcttttaagaagattcagttgtcaacagctagcagtctctttgccaaataattatatctgtgacttctgaaactatttggctgcctaaagttaaaggacttggggaaagtccttccactgctcttctgcagtagtgtcacaccactcagtgcagggcccaccaagaagaaagcagtgtcaggatccacatggcactatggtaactttgtgaaaggggacattttctccctctgaacttctcttcataaagtcattgtgcttcctcttggggatcacctgttcagtctcaatgggctttgatgtgctcctggatcaagtgggtggcatggggagattccagatttgtctgatagctttcttttgcatcaccaacatcctactgttccctaatattgtgttggagaacttcactgcattcacccctagtcatcgctgctgggtccccctcctggacaatgacagtgtgtctgacaatgataccgggaccctcagcaaggatgacctcctgagaatctccatcccactggactcaaacctgaggccacagaagtgtcagcgctttatccatccccagtggcagctccttcacctgaacgggaccttccccaacacaaatgagccagacacggagccctgtgtggatggctgggtgtacgacagaagctctttcctctccaccatcgtgactgagtgggacctggtatgtgaatctcagtcactaaaatcaatggttcaatccctatttatggctgggtcactgctgggaggtctaatatatggccatctttcagacagggttggacggaagatcatatgcaaattgtgtttcctccagctggccatctctaacacctgtgcggccttcgctcccaccttccttgtttactgcatactgcgcttcttggcagggttctccaccatgactattttgggaaacacttttattctcagcttagagtggacattgccccggtcacgatctatgacaataatggtgctattatgttcctacagtgttgggcagatgctcctaggagggctggcttttgccattcaggactggcacatattgcaactgactgtgtctacacccataattgtcctcttcttgtcctcttggtatgaacaatctccacattctttgcctgtaagcgaggctatggtagacatagaaaggaaaattgtgacacctgggatctgttcggtctctggcctagtcctgagccatgatgtccatagtacctattgtgtcacctgagaagcaaacaatggaataggatgacactatatgtggggaggctggcactttgcattcattattttagacatggaattatcatgaaattatttttcttaatagaaaaaatacccacttatttttgaagcaaatgtattatttatctaacttttggaatattatgtgatggagataatttgggggcttttgtcattgtaactgagattgaatataaggaaaacacaataaatttatctacataactatttaaaaaaaaaaaaaaaaaaaaaaaaaaaaaaaaaaaaaaaaaaaaaaaaaaaaaaaaaa

SEQ ID NO: 890 - protein, 322 aa, Homo sapiens
MGFDVLLDQVGGMGRFQICLIAFFCITNILLFPNIVLENFTAFTPSHRCWVPLLDNDSVSDNDTGTLSKDDLLRISIPLDSNLRPQKCQRFIHPQWQLLHLNGTFPNTNEPDTEPCVDGWVYDRSSFLSTIVTEWDLVCESQSLKSMVQSLFMAGSLLGGLIYGHLSDRVGRKIICKLCFLQLAISNTCAAFAPTFLVYCILRFLAGFSTMTILGNTFILSLEWTLPRSRSMTIMVLLCSYSVGQMLLGGLAFAIQDWHILQLTVSTPIIVLFLSSWYEQSPHSLPVSEAMVDIERKIVTPGICSVSGLVLSHDVHSTYCVT

SEQ ID NO: 891 - DNA, 1644 bp, Homo sapiens
atggcctttcaggacctcctagatcaagttggaggcctggggagattccagatccttcagatggttttccttataatgttcaacgtcatagtataccatcaaactcagctggagaacttcgcagcattcatacttgatcatcgctgctgggttcatatactggacaatgacactatccctgacaatgaccctgggaccctcagccaggatgccctcctgagaatctccatcccattcgactcaaatctgaggccagagaagtgtcgtcgctttgtccatccccagtggaagctcattcatctgaatgggaccttccccaacacgagtgagccagatacagagccctgtgtggatggctgggtatatgaccaaagctccttcccttccaccattgtgactaagtgggatctggtatgcgaatctcaaccactgaattcagtagctaaatttctattcatggctggaatgatggtgggaggcaacctatatggccatttgtcagacaggtttgggagaaagttcgtgctcagatggtcttacctccagctcgccattgtaggcacctgtgcggcctttgctcccaccatcctcgtatactgctccctgcgcttcttggctggggctgctacatttagcatcattgtaaatactgttttgttaattgtagagtggataactcaccaattctgtgccatggcattgacattgacactttgtgctgctagtattggacatataaccctgggaagcctggcttttgtcattcgagaccagtgcatcctccagttggtgatgtctgcaccatgctttgtcttctttctgttctcaaggtggctggcagagtctgctcggtggctcattatcaacaacaaaccagaagagggcttaaaggaacttagaaaagctgcacacaggaatggaatgaagaatgctgaagacatcctaaccatggaggttttgaaatccaccatgaagcaagaactggaggcagcacagaaaaagcattctctttgtgaattgctccgcatacccaacatatgtaaaagaatctgtttcctgtcctttgtgagatttgcaagtaccatccctttttggggccttactttgcacctccagcatctgggaaacaatgttttcctgttgcagactctctttggtgcagtcaccctcctggccaattgtgttgcaccttgggcactgaatcacatgagccgtcgactaagccagatgcttctcatgttcctactggcaacctgccttctggccatcatatttgtgcctcaagaaatgcagaccctgcgtgtggttttggcaaccctgggtgtgggagctgcttctcttggcattacctgttctactgcccaagaaaatgaactaattccttccataatcaggggaagagctactggaatcactggaaactttgctaatattgggggagccctggcttccctcgtgatgatcctaagcatatattctcgacccctgccctggatcatctatggagtctttgccatcctctctggccttgttgtcctcctccttcctgaaaccaggaaccagcctcttcttgacagcatccaggatgtggaaaatgagggagtaaatagcctagctgcccctcagaggagctctgtgctatag

SEQ ID NO: 892 - protein, 547 aa, Homo sapiens
MAFQDLLDQVGGLGRFQILQMVFLIMFNVIVYHQTQLENFAAFILDHRCWVHILDNDTIPDNDPGTLSQDALLRISIPFDSNLRPEKCRRFVHPQWKLIHLNGTFPNTSEPDTEPCVDGWVYDQSSFPSTIVTKWDLVCESQPLNSVAKFLFMAGMMVGGNLYGHLSDRFGRKFVLRWSYLQLAIVGTCAAFAPTILVYCSLRFLAGAATFSIIVNTVLLIVEWITHQFCAMALTLTLCAASIGHITLGSLAFVIRDQCILQLVMSAPCFVFFLFSRWLAESARWLIINNKPEEGLKELRKAAHRNGMKNAEDILTMEVLKSTMKQELEAAQKKHSLCELLRIPNICKRICFLSFVRFASTIPFWGLTLHLQHLGNNVFLLQTLFGAVTLLANCVAPWALNHMSRRLSQMLLMFLLATCLLAIIFVPQEMQTLRVVLATLGVGAASLGITCSTAQENELIPSIIRGRATGITGNFANIGGALASLVMILSIYSRPLPWIIYGVFAILSGLVVLLLPETRNQPLLDSIQDVENEGVNSLAAPQRSSVL

SEQ ID NO: 893 - DNA, 2327 bp, Homo sapiens
acatttcattgtaaacgactgggagtatctgagcaaattatttcttacgtgactttagagaaaacggctacctatctgaccccaaaacgacttgaggaaactgtttccacggtcctgctgcagaggggaagcacagtcgtcaagaagagagtggggtcaggatcaaaacacatttagtgtgacttagggaaagaaaacattttccctctttgaacctctctggatacagtcattttgcctctacttgaggatcaactgttcaacctcaatggcctttcaggacctcctgggtcacgctggtgacctgtggagattccagatccttcagactgtttttctctcaatctttgctgttgctacataccttcattttatgctggagaacttcactgcattcatacctggccatcgctgctgggtccacatcctggacaatgacactgtctctgacaatgacactggggccctcagccaagatgcactcttgagaatctccatcccactggactcaaacatgaggccagagaagtgtcgtcgctttgttcatcctcagtggcagctccttcacctgaatgggaccttccccaacacaagtgacgcagacatggagccctgtgtggatggctgggtgtatgacagaatctccttctcatccaccatcgtgactgagtgggatctggtatgtgactctcaatcactgacttcagtggctaaatttgtattcatggctggaatgatggtgggaggcatcctaggcggtcatttatcagacaggtttgggagaaggttcgtgctcagatggtgttacctccaggttgccattgttggcacctgtgcagccttggctcccaccttcctcatttactgctcactacgcttcttgtctgggattgctgcaatgagcctcataacaaatactattatgttaatagccgagtgggcaacacacagattccaggccatgggaattacattgggaatgtgcccttctggtattgcatttatgaccctggcaggcctggcttttgccattcgagactggcatatcctccagctggtggtgtctgtaccatactttgtgatctttctgacctcaagttggctgctagagtctgctcggtggctcattatcaacaataaaccagaggaaggcttaaaggaacttagaaaagctgcacacaggagtggaatgaagaatgccagagacaccctaaccctggagattttgaaatccaccatgaaaaaagaactggaggcagcacaaaaaaaaaaaccttctctgtgtgaaatgctccacatgcccaacatatgtaaaaggatctccctcctgtcctttacgagatttgcaaactttatggcctattttggccttaatctccatgtccagcatctggggaacaatgttttcctgttgcagactctctttggtgcagtcatcctcctggccaactgtgttgcaccttgggcactgaaatacatgaaccgtcgagcaagccagatgcttctcatgttcctactggcaatctgccttctggccatcatatttgtgccacaagaaatgcagacgctgcgtgaggttttggcaacactgggcttaggagcgtctgctcttgccaatacccttgcttttgcccatggaaatgaagtaattcccaccataatcagggcaagagctatggggatcaatgcaacctttgctaatatagcaggagccctggctcccctcatgatgatcctaagtgtgtattctccacccctgccctggatcatctatggagtcttccccttcatctctggctttgctttcctcctccttcctgaaaccaggaacaagcctctgtttgacaccatccaggatgagaaaaatgagagaaaagaccccagagaaccaaagcaagaggatccgagagtggaagtgacgcagttttaaggaattccaggagctgactgccgatcaatgagccagatgaagggaacaatcaggactattcctagacactagcaaaatctagaaaataaataacaaggctgggtgcggtggctcacgcctgtaatcccagcaccttgggaggctgaggcgggcagatcatgaggtcagaagataaagaccaccctggccaacatggtgaaaccctgtctctactaaaacaaatacaaaacttcgctgggcacagtggcacaggcctttaattccagctacttgggaggctgaggcaggagaattacttgaacccaggaggtggaaattgcaatgagccaagattgggccactgcattccagcctggtgacagagcgagactgtctcaaaaaaaaaaaaaaaaaaaaa

SEQ ID NO: 894 - protein, 553 aa, Homo sapiens
MAFQDLLGHAGDLWRFQILQTVFLSIFAVATYLHFMLENFTAFIPGHRCWVHILDNDTVSDNDTGALSQDALLRISIPLDSNMRPEKCRRFVHPQWQLLHLNGTFPNTSDADMEPCVDGWVYDRISFSSTIVTEWDLVCDSQSLTSVAKFVFMAGMMVGGILGGHLSDRFGRRFVLRWCYLQVAIVGTCAALAPTFLIYCSLRFLSGIAAMSLITNTIMLIAEWATHRFQAMGITLGMCPSGIAFMTLAGLAFAIRDWHILQLVVSVPYFVIFLTSSWLLESARWLIINNKPEEGLKELRKAAHRSGMKNARDTLTLEILKSTMKKELEAAQKKKPSLCEMLHMPNICKRISLLSFTRFANFMAYFGLNLHVQHLGNNVFLLQTLFGAVILLANCVAPWALKYMNRRASQMLLMFLLAICLLAIIFVPQEMQTLREVLATLGLGASALANTLAFAHGNEVIPTIIRARAMGINATFANIAGALAPLMMILSVYSPPLPWIIYGVFPFISGFAFLLLPETRNKPLFDTIQDEKNERKDPREPKQEDPRVEVTQF

SEQ ID NO: 895 - DNA, 966 bp, Homo sapiens
atgaaccagactttgaatagcagtgggaccgtggagtcagccctaaactattccagagggagcacagtgcacacggcctacctggtgctgagctccctggccatgttcacctgcctgtgcgggatggcaggcaacagcatggtgatctggctgctgggctttcgaatgcacaggaaccccttctgcatctatatcctcaacctggcggcagccgacctcctcttcctcttcagcatggcttccacgctcagcctggaaacccagcccctggtcaataccactgacaaggtccacgagctgatgaagagactgatgtactttgcctacacagtgggcctgagcctgctgacggccatcagcacccagcgctgtctctctgtcctcttccctatctggttcaagtgtcaccggcccaggcacctgtcagcctgggtgtgtggcctgctgtggacactctgtctcctgatgaacgggttgacctcttccttctgcagcaagttcttgaaattcaatgaagatcggtgcttcagggtggacatggtccaggccgccctcatcatgggggtcttaaccccagtgatgactctgtccagcctgaccctctttgtctgggtgcggaggagctcccagcagtggcggcggcagcccacacggctgttcgtggtggtcctggcctctgtcctggtgttcctcatctgttccctgcctctgagcatctactggtttgtgctctactggttgagcctgccgcccgagatgcaggtcctgtgcttcagcttgtcacgcctctcctcgtccgtaagcagcagcgccaaccccgtcatctacttcctggtgggcagccggaggagccacaggctgcccaccaggtccctggggactgtgctccaacaggcgcttcgcgaggagcccgagctggaaggtggggagacgcccaccgtgggcaccaatgagatgggggcttga

SEQ ID NO: 896 - protein, 321 aa, Homo sapiens
MNQTLNSSGTVESALNYSRGSTVHTAYLVLSSLAMFTCLCGMAGNSMVIWLLGFRMHRNPFCIYILNLAAADLLFLFSMASTLSLETQPLVNTTDKVHELMKRLMYFAYTVGLSLLTAISTQRCLSVLFPIWFKCHRPRHLSAWVCGLLWTLCLLMNGLTSSFCSKFLKFNEDRCFRVDMVQAALIMGVLTPVMTLSSLTLFVWVRRSSQQWRRQPTRLFVVVLASVLVFLICSLPLSIYWFVLYWLSLPPEMQVLCFSLSRLSSSVSSSANPVIYFLVGSRRSHRLPTRSLGTVLQQALREEPELEGGETPTVGTNEMGA

SEQ ID NO: 897 - DNA, 2153 bp, Homo sapiens
atgcgggttctgcttccaaagccatctcttccagcaggagagggctctactctgagctcctattttccaaggctccgggccgcgctcggcgctggcctgctgccccggcgggtccgccggccggaggcgggagtcacaggaagagccctccacaaaaggaggcctcggcggatcaggacagctgcaggtgggtgtgcagactggtgagctgccagcaggggcccagacgcgccaggcctggagatggctggaaactgctcctgggaggcccatcccggcaacaggaacaggatgtgccctggcctgagcgaggccccggaactctacagccggggcttcctgaccatcgagcagatcgcgatgctgccgcctccggccgtcatgaactacatcttcctgctcctctgcctgtgtggcctggtgggcaacgggctggtcctctggtttttcggcttctccatcaagaggaaccccttctccatctacttcctgcacctggccagcgccgatgtgggctacctcttcagcaaggcggtgttctccatcctgaacacggggggcttcctgggcacgtttgccgactacatccgcagcgtgtgccgggtcctggggctctgcatgttccttaccggcgtgagcctcctgccggccgtcagcgccgagcgctgcgcctcggtcatcttccccgcctggtactggcgccggcggcccaagcgcctgtcggccgtggtgtgcgccctgctgtgggtcctgtccctcctggtcacctgcctgcacaactacttctgcgtgttcctgggccgcggggcccccggcgcggcctgcaggcacatggacatcttcctgggcatcctcctgttcctgctctgctgcccgctcatggtgctgccctgcctggccctcatcctgcacgtggagtgccgggcccgacggcgccagcgctctgccaagctcaaccacgtcatcctggccatggtctccgtcttcctggtgtcctccatctacttagggatcgactggttcctcttctgggtcttccagatcccggcccccttccccgagtacgtcactgacctgtgcatctgcatcaacagcagcgccaagcccatcgtctacttcctggccgggagggacaagtcgcagcggctgtgggagccgctcagggtggtcttccagcgggccctgcgggacggcgctgagctgggggaggccgggggcagcacgcccaacacagtcaccatggagatgcagtgtcccccggggaacgcctcctgagactccagcgcctggaggaggcaggggcaggaagcggcctccaagacccttcgccttgggacaggaatgggcacctgcttctgagtccatacaggagaagaaagatctgtttcctctcctcgggcctccttctccctgggctggggactccaggggtggctgggagactgggcagccaccagcaaacagacctgtggcccctgcccggctcccccacccattctgctcccctagagacctcttgtacagaagttgcccccaggtggtggggcccctccttgccctaggctggttggtaaaagagaggaggtcaacacccagcctagccacctctgcctcttgggtcagccctccttgactgtgtcccagccagcaccaggccagcagcctcatccctgccattcagggctgttccagagattcgatcctcttaaggcattatcagtgagcaaatgtgaaggaaatggtgtctggaagaaagttctggttcacatgccttgtagctaagtctttctgcaaacaacctcccttccccccgtcgagtcatttggtgactttgatggggggatttctggttatgtcaaggctctggagacaggaagggcctttggccgccttgggtagttgacctgccttttctgactccgggacgagccagtcctaggctgcctccgggagcacttgaggtatcccgcaggccatgaggacccactgggcagctcctggacagcctcttggctccagcccccacccgaaagtggacactggctccgccctggccacctggggactggcactgtggtgcacagtggcccaatgtggccaacggaagttttataaaagacaaaatgtatatcaataaacattttataacttgc

SEQ ID NO: 898 - protein, 343 aa, Homo sapiens
MAGNCSWEAHPGNRNRMCPGLSEAPELYSRGFLTIEQIAMLPPPAVMNYIFLLLCLCGLVGNGLVLWFFGFSIKRNPFSIYFLHLASADVGYLFSKAVFSILNTGGFLGTFADYIRSVCRVLGLCMFLTGVSLLPAVSAERCASVIFPAWYWRRRPKRLSAVVCALLWVLSLLVTCLHNYFCVFLGRGAPGAACRHMDIFLGILLFLLCCPLMVLPCLALILHVECRARRRQRSAKLNHVILAMVSVFLVSSIYLGIDWFLFWVFQIPAPFPEYVTDLCICINSSAKPIVYFLAGRDKSQRLWEPLRVVFQRALRDGAELGEAGGSTPNTVTMEMQCPPGNAS

SEQ ID NO: 899 - DNA, 2939 bp, Homo sapiens
agcaagaacgccagggacggggtctccgcgcctgcgcagtgaagctgggcgccttcggggcttgagcttctgagggtcgggtccagcgcgtgggctgctggatggcggaaccccaggcggagtcggagcccctgctgggcggggcccgcggcggtggcggcgactggccggcggggctgaccacttaccgcagcatccaagtcggccctggtgccgcggccaggtgggacctctgcattgatcaggctgtggtcttcatcgaagatgctattcagtaccgctccatcaaccaccgggtggatgccagctcgatgtggctttaccgacggtattactcgaacgtatgccaacggactttgagcttcaccatcttcttgatcctgtttttggcttttatcgagaccccatcctcactcaccagcacggcggacgtgcgctaccgcgctgccccctgggagccgccctgcggcctgaccgagagtgtcgaggtgctctgcctgctggtctttgcggccgacctctctgtgaagggttacctgttcgggtgggcccatttccagaaaaacctttggctgctgggctacctcgtggtgctggtggtgtctctggtggactggaccgtgtccctgagtctcgtgtgtcatgagcccctgcggatccgccggcttctccgtcccttcttcctgctgcagaactcctctatgatgaagaagaccttgaaatgcatccgctggtcgctgccggaaatggccagcgtcgggctgctgctggccatccacctgtgcctcttcaccatgttcggaatgctgctgttcgctggtgggaagcaggatgatgggcaggacagggagaggctgacctacttccagaacctgcctgagtctctgacttccctcctggtgctgctgaccacggccaacaaccccgatgtgatgattcctgcgtattccaagaaccgggcctatgccatcttcttcatagtcttcactgtgataggaagcctgtttctgatgaacctgctgacagccatcatctacagtcagttccggggctacctgatgaaatctctccagacctcgctgtttcggaggcggctgggaacccgggctgcctttgaagtcctatcctccatggtgggggagggaggagccttccctcaggcagttggggtgaagccccagaacttgctgcaggtgcttcagaaggtccagctggacagctcccacaaacaggccatgatggagaaggtgcgttcctacggcagtgttctgctgtcagctgaggagtttcagaagctcttcaacgagcttgacagaagtgtggttaaagagcacccgccgaggcccgagtaccagtctccgtttctgcagagcgcccagttcctcttcggccactactactttgactacctggggaacctcatcgccctggcaaacctggtgtccatttgcgtgttcctggtgctggatgcagatgtgctgcctgctgagcgtgatgacttcatcctggggattctcaactgcgtcttcattgtgtactacctgttggagatgctgctcaaggtctttgccctgggcctgcgagggtacctgtcctaccccagcaacgtgtttgacgggctcctcaccgttgtcctgctggttttggagatctcaactctggctgtgtaccgattgccacacccaggctggaggccggagatggtgggcctgctgtcgctgtgggacatgacccgcatgctgaacatgctcatcgtgttccgcttcctgcgtatcatccccagcatgaagccgatggccgtggtggccagtaccgtcctgggcctggtgcagaacatgcgtgcttttggcgggatcctggtggtggtctactacgtatttgccatcattgggatcaacttgtttagaggcgtcattgtggctcttcctggaaacagcagcctggcccctgccaatggctcggcgccctgtgggagcttcgagcagctggagtactgggccaacaacttcgatgactttgcggctgccctggtcactctgtggaacttgatggtggtgaacaactggcaggtgtttctggatgcatatcggcgctactcaggcccgtggtccaagatctattttgtattgtggtggctggtgtcgtctgtcatctgggtcaacctgtttctggccctgattctggagaacttccttcacaagtgggacccccgcagccacctgcagccccttgctgggaccccagaggccacctaccagatgactgtggagctcctgttcagggatattctggaggagcccgaggaggatgagctcacagagaggctgagccagcacccgcacctgtggctgtgcaggtgacgtccgggctgccgtcccagcaggggcggcaggagagagaggctggcctacacaggtgcccgtcatggaagaggcggccatgctgtggccagccaggcaggaagagacctttcctctgacggaccactaagctggggacaggaaccaagtcctttgcgtgtggcccaacaaccgtctacagaacagctgctggtgcttcagggaggcgccgtgccctccgctttcttttatagctgcttcagtgagaattccctcgtcgactccacagggacctttcagacaaaaatgcaagaagcagcggcctcccctgtcccctgcagcttccgtggtgcctttgctgccggcagcccttggggaccacaggcctgaccagggcctgcacaggttaaccgtcagacttccggggcattcaggtggggatgctggtggtttgacatggagagaaccttgactgtgttttattatttcatggcttgtatgagtgtgactgggtgtgtttctttagggttctgattgccagttattttcatcaataagtcttgcaaagaatgggattgtcattcttcacttcgaaaaaaa

SEQ ID NO: 900 - protein, 752 aa, Homo sapiens
MAEPQAESEPLLGGARGGGGDWPAGLTTYRSIQVGPGAAARWDLCIDQAVVFIEDAIQYRSINHRVDASSMWLYRRYYSNVCQRTLSFTIFLILFLAFIETPSSLTSTADVRYRAAPWEPPCGLTESVEVLCLLVFAADLSVKGYLFGWAHFQKNLWLLGYLVVLVVSLVDWTVSLSLVCHEPLRIRRLLRPFFLLQNSSMMKKTLKCIRWSLPEMASVGLLLAIHLCLFTMFGMLLFAGGKQDDGQDRERLTYFQNLPESLTSLLVLLTTANNPDVMIPAYSKNRAYAIFFIVFTVIGSLFLMNLLTAIIYSQFRGYLMKSLQTSLFRRRLGTRAAFEVLSSMVGEGGAFPQAVGVKPQNLLQVLQKVQLDSSHKQAMMEKVRSYGSVLLSAEEFQKLFNELDRSVVKEHPPRPEYQSPFLQSAQFLFGHYYFDYLGNLIALANLVSICVFLVLDADVLPAERDDFILGILNCVFIVYYLLEMLLKVFALGLRGYLSYPSNVFDGLLTVVLLVLEISTLAVYRLPHPGWRPEMVGLLSLWDMTRMLNMLIVFRFLRIIPSMKPMAVVASTVLGLVQNMRAFGGILVVVYYVFAIIGINLFRGVIVALPGNSSLAPANGSAPCGSFEQLEYWANNFDDFAAALVTLWNLMVVNNWQVFLDAYRRYSGPWSKIYFVLWWLVSSVIWVNLFLALILENFLHKWDPRSHLQPLAGTPEATYQMTVELLFRDILEEPEEDELTERLSQHPHLWLCR

SEQ ID NO: 901 - DNA, 2305 bp, Homo sapiens
gttactgtcccgcgaacccacatccctacaaagcaggaaagtatgcttgggagaggccaagtgagtggggaatcagcccaaagccaggcgtccagggtctccctcacctgaagctgactttttccccaccttggacagagggcgggagatgccatccccactgaacccagtgctttcaccagccatattagctcccactcaccccccgtcgtggaagcctcggccgtcacacctgcagggccggggcgtgcatggcctcagggatggcctgttcagctgctgggtgactcgggtccaggtgcctcaccacctgctgagctctgtgtgatttctggacacttctgctcgttgcctttgggctcagtgaagagtctggagtttatctggagtgaggtggccggttcttggtgggatctgagcaggacagcgtctggctccttccctcggctcatggccctcagaatctgcgtcacatacaccccagctctcccgataggtctctgcactcgctgttgcctctgcctggaacagtctccctcctggtgtcattgtctccgtggtgtgtccttcctgaccttccacctccaccagtctgtcccccttggggacagggactcgttgctcatgttcacccggcaggctggacacttcgtggagggctccaaagccggcagatcccggggccgcctctgtctctcccaggccctgcgtgttgcggtgagaggagcatttgtgtctctgtggtttgctgctggagctggtgaccgggagagaaacaagggagacaagggtgcccagacaggtgcggggctcagccaggaggcagaagacgtggacgtgtcccgggccaggagggtcacagatgcaccacaaggcactctgtgtggcactgggaacaggaattctgggagtcagtctgcaagggtggtgggcgttgctcacctgggagaagcctttagagtgggcgttgagcaggccattagctcgtgccctgaggaggtgcatgggcggcatgggctctccatggaaattatgtgggcgcgaatggatgtggctctgcgctcacctgggcgaggacttctggccggtgccggggcactctgcatgaccctggcagaatcgagctgccctgactatgaaaggggaagaagagcatgcctgaccctccaccggcaccccacccctcactgctccacctggggcctgcctctgcgggtggctgggtcctggctgactgttgtgactgttgaggccctgggggggtggcgcatgggagttaggaggactggccaggtggggcccactatgcacccacccccagtgtcaggtgcttctcctctcctcctccaccacctcctcctcctcctcctcatcatcatcctcacttgttgaggacgtcctgtgtgccaagtggtttatatgcccagcctcatttaatcctcagaatgactccatgaggtagctactaaaaccccccacttaacagatgaggaaactgaggcctagagaagctcaacaagttgcctaagttccaagtttcctctcccaactctcctaccctctcctcttccttctcctttctcccattcttccctgcctcttccctaactagacaattttttattgagtgtctcccaggtgcaggcatgagccaggtgctgggaaaatcatgataacccagctccttctggtcattttctcagctggttagaggctgggaggacacgcaagttcagctccagccgactggggcattggtggtagcccctggagacattgtgcaatggggctacgaggctgcatctggctccagggaagcgtgttgcaatccatgagtgatgtctgccatgcgtacaggcatggagagtgaggcgcctgtactgtctttctgtagaccctagactggtggggcctctgaaatgcatccagacactgtgctgggtgtgttgcatggccctcccaaccaattcagtatttttctccccattttccagggagaaatctaaggcgtcagaatgtaaggttcttattggaacccaggctccagggtccctggttttctgtgacatcatgctgcaggaccctgtttctctctttgctttggctgctggggagctcagaagggagctttaggcttgctctcagtcaccacattagctcaggggtttgggcatttttgtcgccgtctcctttgggctctgtctcctccctgctgtgcttcctgaggagcaggccggatgtaagttatcaactataaataaaaccaagacttccgttctggctctcaaaaaaaaaaaaaaaaaaa

SEQ ID NO: 902 - protein, 313 aa, Homo sapiens
MALRICVTYTPALPIGLCTRCCLCLEQSPSWCHCLRGVSFLTFHLHQSVPLGDRDSLLMFTRQAGHFVEGSKAGRSRGRLCLSQALRVAVRGAFVSLWFAAGAGDRERNKGDKGAQTGAGLSQEAEDVDVSRARRVTDAPQGTLCGTGNRNSGSQSARVVGVAHLGEAFRVGVEQAISSCPEEVHGRHGLSMEIMWARMDVALRSPGRGLLAGAGALCMTLAESSCPDYERGRRACLTLHRHPTPHCSTWGLPLRVAGSWLTVVTVEALGGWRMGVRRTGQVGPTMHPPPVSGASPLLLHHLLLLLLIIILTC

SEQ ID NO: 903 - DNA, 4304 bp, Homo sapiens
cacacggactacaggggagttttgttgaagttgcaaagtcctggagcctccagagggctgtcggcgcagtagcagcgagcagcagagtccgcacgctccggcgaggggcagaagagcgcgagggagcgcggggcagcagaagcgagagccgagcgcggacccagccaggacccacagccctccccagctgcccaggaagagccccagccatggaacaccagctcctgtgctgcgaagtggaaaccatccgccgcgcgtaccccgatgccaacctcctcaacgaccgggtgctgcgggccatgctgaaggcggaggagacctgcgcgccctcggtgtcctacttcaaatgtgtgcagaaggaggtcctgccgtccatgcggaagatcgtcgccacctggatgctggaggtctgcgaggaacagaagtgcgaggaggaggtcttcccgctggccatgaactacctggaccgcttcctgtcgctggagcccgtgaaaaagagccgcctgcagctgctgggggccacttgcatgttcgtggcctctaagatgaaggagaccatccccctgacggccgagaagctgtgcatctacaccgacaactccatccggcccgaggagctgctgcaaatggagctgctcctggtgaacaagctcaagtggaacctggccgcaatgaccccgcacgatttcattgaacacttcctctccaaaatgccagaggcggaggagaacaaacagatcatccgcaaacacgcgcagaccttcgttgccctctgtgccacagatgtgaagttcatttccaatccgccctccatggtggcagcggggagcgtggtggccgcagtgcaaggcctgaacctgaggagccccaacaacttcctgtcctactaccgcctcacacgcttcctctccagagtgatcaagtgtgacccggactgcctccgggcctgccaggagcagatcgaagccctgctggagtcaagcctgcgccaggcccagcagaacatggaccccaaggccgccgaggaggaggaagaggaggaggaggaggtggacctggcttgcacacccaccgacgtgcgggacgtggacatctgagggcgccaggcaggcgggcgccaccgccacccgcagcgagggcggagccggccccaggtgctcccctgacagtccctcctctccggagcattttgataccagaagggaaagcttcattctccttgttgttggttgttttttcctttgctctttcccccttccatctctgacttaagcaaaagaaaaagattacccaaaaactgtctttaaaagagagagagagaaaaaaaaaatagtatttgcataaccctgagcggtgggggaggagggttgtgctacagatgatagaggattttataccccaataatcaactcgtttttatattaatgtacttgtttctctgttgtaagaataggcattaacacaaaggaggcgtctcgggagaggattaggttccatcctttacgtgtttaaaaaaaagcataaaaacattttaaaaacatagaaaaattcagcaaaccatttttaaagtagaagagggttttaggtagaaaaacatattcttgtgcttttcctgataaagcacagctgtagtggggttctaggcatctctgtactttgcttgctcatatgcatgtagtcactttataagtcattgtatgttattatattccgtaggtagatgtgtaacctcttcaccttattcatggctgaagtcacctcttggttacagtagcgtagcgtgcccgtgtgcatgtcctttgcgcctgtgaccaccaccccaacaaaccatccagtgacaaaccatccagtggaggtttgtcgggcaccagccagcgtagcagggtcgggaaaggccacctgtcccactcctacgatacgctactataaagagaagacgaaatagtgacataatatattctatttttatactcttcctatttttgtagtgacctgtttatgagatgctggttttctacccaacggccctgcagccagctcacgtccaggttcaacccacagctacttggtttgtgttcttcttcatattctaaaaccattccatttccaagcactttcagtccaataggtgtaggaaatagcgctgtttttgttgtgtgtgcagggagggcagttttctaatggaatggtttgggaatatccatgtacttgtttgcaagcaggactttgaggcaagtgtgggccactgtggtggcagtggaggtggggtgtttgggaggctgcgtgccagtcaagaagaaaaaggtttgcattctcacattgccaggatgataagttcctttccttttctttaaagaagttgaagtttaggaatcctttggtgccaactggtgtttgaaagtagggacctcagaggtttacctagagaacaggtggtttttaagggttatcttagatgtttcacaccggaaggtttttaaacactaaaatatataatttatagttaaggctaaaaagtatatttattgcagaggatgttcataaggccagtatgatttataaatgcaatctccccttgatttaaacacacagatacacacacacacacacacacacacaaaccttctgcctttgatgttacagatttaatacagtttatttttaaagatagatccttttataggtgagaaaaaaacaatctggaagaaaaaaaccacacaaagacattgattcagcctgtttggcgtttcccagagtcatctgattggacaggcatgggtgcaaggaaaattagggtactcaacctaagttcggttccgatgaattcttatcccctgccccttcctttaaaaaacttagtgacaaaatagacaatttgcacatcttggctatgtaattcttgtaatttttatttaggaagtgttgaagggaggtggcaagagtgtggaggctgacgtgtgagggaggacaggcgggaggaggtgtgaggaggaggctcccgaggggaaggggcggtgcccacaccggggacaggccgcagctccattttcttattgcgctgctaccgttgacttccaggcacggtttggaaatattcacatcgcttctgtgtatctctttcacattgtttgctgctattggaggatcagttttttgttttacaatgtcatatactgccatgtactagttttagttttctcttagaacattgtattacagatgccttttttgtagttttttttttttttatgtgatcaattttgacttaatgtgattactgctctattccaaaaaggttgctgtttcacaatacctcatgcttcacttagccatggtggacccagcgggcaggttctgcctgctttggcgggcagacacgcgggcgcgatcccacacaggctggcgggggccggccccgaggccgcgtgcgtgagaaccgcgccggtgtccccagagaccaggctgtgtccctcttctcttccctgcgcctgtgatgctgggcacttcatctgatcgggggcgtagcatcatagtagtttttacagctgtgttattctttgcgtgtagctatggaagttgcataattattattattattattataacaagtgtgtcttacgtgccaccacggcgttgtacctgtaggactctcattcgggatgattggaatagcttctggaatttgttcaagttttgggtatgtttaatctgttatgtactagtgttctgtttgttattgttttgttaattacaccataatgctaatttaaagagactccaaatctcaatgaagccagctcacagtgctgtgtgccccggtcacctagcaagctgccgaaccaaaagaatttgcaccccgctgcgggcccacgtggttggggccctgccctggcagggtcatcctgtgctcggaggccatctcgggcacaggcccaccccgccccacccctccagaacacggctcacgcttacctcaaccatcctggctgcggcgtctgtctgaaccacgcgggggccttgagggacgctttgtctgtcgtgatggggcaagggcacaagtcctggatgttgtgtgtatcgagaggccaaaggctggtggcaagtgcacggggcacagcggagtctgtcctgtgacgcgcaagtctgagggtctgggcggcgggcggctgggtctgtgcatttctggttgcaccgcggcgcttcccagcaccaacatgtaaccggcatgtttccagcagaagacaaaaagacaaacatgaaagtctagaaataaaactggtaaaaccccaaaaaaaaaaaaaaaa

SEQ ID NO: 904 - protein, 295 aa, Homo sapiens
MEHQLLCCEVETIRRAYPDANLLNDRVLRAMLKAEETCAPSVSYFKCVQKEVLPSMRKIVATWMLEVCEEQKCEEEVFPLAMNYLDRFLSLEPVKKSRLQLLGATCMFVASKMKETIPLTAEKLCIYTDNSIRPEELLQMELLLVNKLKWNLAAMTPHDFIEHFLSKMPEAEENKQIIRKHAQTFVALCATDVKFISNPPSMVAAGSVVAAVQGLNLRSPNNFLSYYRLTRFLSRVIKCDPDCLRACQEQIEALLESSLRQAQQNMDPKAAEEEEEEEEEVDLACTPTDVRDVDI

SEQ ID NO: 905 - DNA, 2299 bp, Homo sapiens
ctcttccccagccctccttgtgtgccctcgtgagtggcggtgacaatgctcccggatgtgggccccaaggccagcggccccagagctgcccgcccacccgtccgcctgctattgtctgctcaggcctggcggtgtggcgctgggcttgtggggccctggcgggcaggggactgtgggaacggattagaggtcctgggcttgctttcctcgtcttgcataaactcttgatcaaagacattcctgggatgacagagccctgtgagctgcgaggctggcccagagtgcgggacgcacaccccacgctgcagcccctgcacaggcctgcccttgctggccctcgctggccctggctgcagtgctgactttggggactagccttatggtgggactggtgatagagcgggtgccagcaggcaacacagccttccccaccagattcagaggccaggcccccaatgctgggcagagcgaggctgtgactgcttcctggggtgcttcaaggagggtcacgctgcatgcagggtagccggagggattgccggatgtatgccactgccactggacctggcttctctggactcccatgggcagtgcaccaccctctgcacagccctagccactgttatcccacaagcgcggtccgaagtccacgtgcccactctgcccagcctccttcctctgtcccctcagggcctttcactccttgtgacaactctaggtgctgtctgggctcctggggaacccccgacccttccagccatggaatcagctcccggcatgcgggtcaggctggacccatggctctgcacctcagcccagcagcttggggctgccctgtaggagccgacacgacctcccttccattcggcccccttcctaggacccactgtatgccagggtggggagacggaggcagagagaaatctgggagatttccgtcctggaggggctcagccagagcaggaaggtgcccaggcatgacaatcccagactcccagaaccacctgcctgctgtggggtggggaagccctcagagagcccatccttacagtcagagcagagatgaaggttcctgtggaccgaggcggtgggccaagcgcagaacaggaagctggatgcagtctggtgtgtcaggagctcctgggcaaagacatcgagcttattggggtcaaggctggggagagatggggctgagtcccagggaccttggacggagctgaagggagataggaaggctgggggttgggggcagaggatgaagaatggatgaggactgtctggctgcagggagatgggccaggaggcagggcaggtaggggtggcgggcgtgtgaggacaggcttctgcgaaggggctgcagggagagctgactgcggaaggctttgtctctgaagttcctcaaaggtcagtttttaccatcaccctctgggtagcgcagatactccaacaagggacgaggtctccactgaatcccaggaggggttgcaggcacagaggtgatgtcagtggagtttgagagttgggaacaagggcctagagtggccagacgatgcctttgatatggtttggctgtgtccccacccaaatctcatcttgaattgtagctcccataattcccacgtgttgtgggagggacccggtgggaggtgattgaatcatggggcagtttcccctatactgttcccatggtggtgaacaagtctcagcagatctgatggttttataggggtttcccctttcacttgagtctcattctctcttgcctgctgccatggaagacgggcctttcgccttccgccgtgatggtgaggcctcccagctacgtagaactcgccgcggtgcaaccagaaatgcacagacccagccgcccgccgcccagaccctcagacttgcgcgtcacaggacagactccgctgtgccccgtgcacttgccaccagcctttggcctctcgatacacacaacatccaggacttgtgcccttgccccatcacgacagacaaagcgtccctcaaggcccccgcgtggttcagacagacgccgcagccaggatggttgagcaaacaatgtgaaagagatacacagaagcgatgtgaatatttccaaaccgtgcctggaagtcaacggtagcagcgcaataagaaaatggagctgcggcctgtccccggtgtgggcaccgccccttcccctcgggagcctcctcctcacacctcctcccgcctgtcctccctcacacgtcagcctccacactcttgccacctcccttcaacacttcctaaataaaaattacaagaattacat

SEQ ID NO: 906 - protein, 234 aa, Homo sapiens [sequence omitted]

SEQ ID NO: 907 - DNA, 2544 bp, Homo sapiens
cccgcgtgccgttcttacccggcctgccccgcgccgccgcttccggaagtgggtctcgtctcctcccaagcggagcatttgtgcctgaagctgccgggtctgctacggcaccgcggggctgcagaaacccgggggccaagggcgggctgcttgccgctatggctggcagtcaggacatattcgatgccatcgtgatggcggatgagaggtttcatggggaagggtatcgggaaggctatgaagaaggcagtagtttgggtgtgatggagggaaggcagcatggcacgctgcatggagccaaaatcgggtctgagatcgggtgctaccaaggttttgcttttgcatggaaatgtctactgcacagttgcaccactgagaaggacagcagaaagatgaaggtcttagaatcattgattggaatgatccagaaattcccttatgatgaccctacttacgataaactccatgaagacttagacaagatcagaggaaaatttaaacagttttgttcgttactcaatgttcagccagactttaaaattagtgcagaaggttccggactttcattttgaggaggatggatgaacagagaccgaacgtcgaggaacagatgtgtgtgtgacgtgtttagaaatgcggtgaagggccagacggtgctgggaaggcagttgttcattgggagggtgagggttccggttcggccgtgggagggcttccttccctggggttttctgcctgtgtcaccttggtgcccgtcttggggcctcgccacacatgccctttgttgggctgaagccgtccctggcagagccctcgtgcattgacttgacagcctctccggcagcacaggcctagctggttctgggttggagttggctctggatagggtcagtcaccaggcctggactgaaggcagttatttttattattattattatttgcaatgagagagatggttggccccgaatgaggctcatgggaggtttggacgggtgctgtgccgcatgtcgaggccgattgtgtgccaggcggtgcgggacgtgcctcccgtgtgttatttaatcccttcaggagcccacaagatgggtgttattctcattttacagaggagggaggggagacgcgaagggattgcctggtctaagggcacccagcagcagagctaggacttccgccctaaggctgtgcctcactgccaccaggcacagccgcctccggaatgcacaggcgagtccctgccctccctcccaggccgcacaggtcctgccaagcctcacggagcacgggggagtctgtggtggccagtttacctgggcatctggctgagaggaagaaaggccaacctgatcctgaggggacccagacatatcctttgcactgtccctagaggggcgatgagctttgcagcattaaaaaatggtgaaggggggaaatattttgaaccaaagaccaaatgttaggccgccgttatatttgcagaagctttgagaaccatgcgtatagcctcctgcattctcccctctcctaggagctcttttgtctctgtccttacgaggcgtcatacagaggcagtggggtgggcacagatgagcagagtggatggttcggtgggtccccacgaggcgagtggtggtcatatgtgatggcacgtgttcacacaccctcctgtgtacccccccagggtcaccgaagtccccacacgctggctctccacacccctcctgttccagaaagcatgtccgaaagcagtccaggagattattaaggggtcgccatgaatccactttggttttaaaaccattcccgaatgtcctagtggattgtgttgtgctgcctaagctgccggctgcaggagccagagaagtgacccccgcgggagcagcggcaggtggatctccacggtggctcgctttgtttttgttttgttttttcttttaagacggagtctcactctgtcgccgagtttggagtgtattggcgcgatctcggctcactgtaacctccgcctcctgaattcaagtgattctcctgcctcagcctccctagtagctgggattataggcgccccccaccacgcccaagtaacttttgtatttttagtagagatggggttttgccttgttggccaggctggtcttgaactcccagcctgaaatgatccacccacgtccacctaccaaagtgctggaattgcaggcatgagccaccactcccggcctgctttttgtttttgaagacaggacttaggtctcctcctcccgaactctaaacctgcgtgtgtggctgtgcaccgctcgtttgtagcgtcacctcaggtctggggaagtctgtgctggcatctcctcattgtgccttcatcagagctggtgccttcgggccagaaagactctcgttctttctagatggtgggatcaggggcctttgctgtgtttcccttggtggatttttgtgttttgtaagttgtctattttgataatgtattatttttataactgtaaaaaaagtaaatagcatattttaaagtgaaaaaaaaaaaaaaaaaaa

SEQ ID NO: 908 - protein, 137 aa, Homo sapiens
MAGSQDIFDAIVMADERFHGEGYREGYEEGSSLGVMEGRQHGTLHGAKIGSEIGCYQGFAFAWKCLLHSCTTEKDSRKMKVLESLIGMIQKFPYDDPTYDKLHEDLDKIRGKFKQFCSLLNVQPDFKISAEGSGLSF

SEQ ID NO: 909 - DNA, 2157 bp, Homo sapiens
gctcccagccaagaacctcggggccgctgcgcggtggggaggagttccccgaaacccggccgctaagcgaggcctcctcctcccgcagatccgaacggcctgggcggggtcaccccggctgggacaagaagccgccgcctgcctgcccgggcccggggagggggctggggctggggccggaggcggggtgtgagtgggtgtgtgcggggggcggaggcttgatgcaatcccgataagaaatgctcgggtgtcttgggcacctacccgtggggcccgtaaggcgctactatataaggctgccggcccggagccgccgcgccgtcagagcaggagcgctgcgtccaggatctagggccacgaccatcccaacccggcactcacagccccgcagcgcatcccggtcgccgcccagcctcccgcacccccatcgccggagctgcgccgagagccccagggaggtgccatgcggagcgggtgtgtggtggtccacgtatggatcctggccggcctctggctggccgtggccgggcgccccctcgccttctcggacgcggggccccacgtgcactacggctggggcgaccccatccgcctgcggcacctgtacacctccggcccccacgggctctccagctgcttcctgcgcatccgtgccgacggcgtcgtggactgcgcgcggggccagagcgcgcacagtttgctggagatcaaggcagtcgctctgcggaccgtggccatcaagggcgtgcacagcgtgcggtacctctgcatgggcgccgacggcaagatgcaggggctgcttcagtactcggaggaagactgtgctttcgaggaggagatccgcccagatggctacaatgtgtaccgatccgagaagcaccgcctcccggtctccctgagcagtgccaaacagcggcagctgtacaagaacagaggctttcttccactctctcatttcctgcccatgctgcccatggtcccagaggagcctgaggacctcaggggccacttggaatctgacatgttctcttcgcccctggagaccgacagcatggacccatttgggcttgtcaccggactggaggccgtgaggagtcccagctttgagaagtaactgagaccatgcccgggcctcttcactgctgccaggggctgtggtacctgcagcgtgggggacgtgcttctacaagaacagtcctgagtccacgttctgtttagctttaggaagaaacatctagaagttgtacatattcagagttttccattggcagtgccagtttctagccaatagacttgtctgatcataacattgtaagcctgtagcttgcccagctgctgcctgggcccccattctgctccctcgaggttgctggacaagctgctgcactgtctcagttctgcttgaatacctccatcgatggggaactcacttcctttggaaaaattcttatgtcaagctgaaattctctaattttttctcatcacttccccaggagcagccagaagacaggcagtagttttaatttcaggaacaggtgatccactctgtaaaacagcaggtaaatttcactcaaccccatgtgggaattgatctatatctctacttccagggaccatttgcccttcccaaatccctccaggccagaactgactggagcaggcatggcccaccaggcttcaggagtaggggaagcctggagccccactccagccctgggacaacttgagaattccccctgaggccagttctgtcatggatgctgtcctgagaataacttgctgtcccggtgtcacctgcttccatctcccagcccaccagccctctgcccacctcacatgcctccccatggattggggcctcccaggccccccaccttatgtcaacctgcacttcttgttcaaaaatcaggaaaagaaaagatttgaagaccccaagtcttgtcaataacttgctgtgtggaagcagcgggggaagacctagaaccctttccccagcacttggttttccaacatgatatttatgagtaatttattttgatatgtacatctcttattttcttacattatttatgcccccaaattatatttatgtatgtaagtgaggtttgttttgtatattaaaatggagtttgtttgtaaaaaaaaaaaaaaaaaaaa

SEQ ID NO: 910 - protein, 216 aa, Homo sapiens
MRSGCVVVHVWILAGLWLAVAGRPLAFSDAGPHVHYGWGDPIRLRHLYTSGPHGLSSCFLRIRADGVVDCARGQSAHSLLEIKAVALRTVAIKGVHSVRYLCMGADGKMQGLLQYSEEDCAFEEEIRPDGYNVYRSEKHRLPVSLSSAKQRQLYKNRGFLPLSHFLPMLPMVPEEPEDLRGHLESDMFSSPLETDSMDPFGLVTGLEAVRSPSFEK

SEQ ID NO: 911 - DNA, 1662 bp, Homo sapiens
acgcgagctgggcagggaagagagcgcccggctcagtactgcgcgcgccctgcggctgtccggggccgcgcggtggccaaagcacagcgcgggagagtctgcgatgtcagagaacggctccttcgccaactgctgcgaggcgggcgggtgggcagtgcgcccgggctggtcgggggctggcagcgcgcggccctccaggacccctcgacctccctgggtggctccagcgctgtccgcggtgctcatcgtcaccaccgccgtggacgtcgtgggcaacctcctggtgatcctctccgtgctcaggaaccgcaagctccggaacgcaggtaatttgttcttggtgagtctggcattggctgacctggtggtggccttctacccctacccgctaatcctcgtggccatcttctatgacggctgggccctgggggaggagcactgcaaggccagcgcctttgtgatgggcctgagcgtcatcggctctgtcttcaatatcactgccatcgccattaaccgctactgctacatctgccacagcatggcctaccaccgaatctaccggcgctggcacacccctctgcacatctgcctcatctggctcctcaccgtggtggccttgctgcccaacttctttgtggggtccctggagtacgacccacgcatctattcctgcaccttcatccagaccgccagcacccagtacacggcggcagtggtggtcatccacttcctcctccctatcgctgtcgtgtccttctgctacctgcgcatctgggtgctggtgcttcaggcccgcaggaaagccaagccagagagcaggctgtgcctgaagcccagcgacttgcggagctttctaaccatgtttgtggtgtttgtgatctttgccatctgctgggctccacttaactgcatcggcctcgctgtggccatcaacccccaagaaatggctccccagatccctgaggggctatttgtcactagctacttactggcttatttcaacagctgcctgaatgccattgtctatgggctcttgaaccaaaacttccgcagggaatacaagaggatcctcttggccctttggaacccacggcactgcattcaagatgcttccaagggcagccacgcggaggggctgcagagcccagctccacccatcattggtgtgcagcaccaggcagatgctctctagcctggatctgaggcacaccagcagcatgacaaactcatgaaatggtgggagagagtctgctgcaagggtgagaccaggcagcctgctgggccacactgtcctgttggcatcacagccccaaggctgggggaacttcatgctgggacaagcagcccatcaacgccatgggttcaggctgatccaggagatgctcacaggccacaggacctggaaaacactcttggtggtgtcttggggatttggtgcacacaagaccaaggaaaggacagaatgaggaaaggcctggggcagaagagcccaactccttctcatagctgaccctcatcctcctgccttggcctcctggctgctttctccccttccccccagcgtggcaggatctcttcctgttagcaaggatgaaagagagaggtcagtaggactggaacttggtaactgcaagggcctcaggtggggcaggtgcagagggc

SEQ ID NO: 912 - protein, 362 aa, Homo sapiens
MSENGSFANCCEAGGWAVRPGWSGAGSARPSRTPRPPWVAPALSAVLIVTTAVDVVGNLLVILSVLRNRKLRNAGNLFLVSLALADLVVAFYPYPLILVAIFYDGWALGEEHCKASAFVMGLSVIGSVFNITAIAINRYCYICHSMAYHRIYRRWHTPLHICLIWLLTVVALLPNFFVGSLEYDPRIYSCTFIQTASTQYTAAVVVIHFLLPIAVVSFCYLRIWVLVLQARRKAKPESRLCLKPSDLRSFLTMFVVFVIFAICWAPLNCIGLAVAINPQEMAPQIPEGLFVTSYLLAYFNSCLNAIVYGLLNQNFRREYKRILLALWNPRHCIQDASKGSHAEGLQSPAPPIIGVQHQADAL

SEQ ID NO: 913 - DNA, 2493 bp, Homo sapiens
ccctccgggcaggggaggtaggcctgggcctgacgccggccacgcagcggcgggagagtgagcactcgggcggcggcgtcctggagacccgcgagagatggaagcggcggcgacgccggcggctgccggggcggcgaggcgcgaggagctagatatggatgtaatgaggcccttgataaatgagcagaattttgatgggacatcagatgaagaacatgagcaagagcttctgcctgttcagaagcattaccaacttgatgatcaagagggcatttcatttgtacaaactcttatgcaccttcttaaaggaaatattggaactggccttttaggacttccattggcaataaaaaatgcaggcatagtgcttggaccaatcagccttgtgtttataggaattatttctgttcactgtatgcacatattggtacgttgcagtcactttctatgtctgaggtttaaaaagtcaacattaggttatagtgacactgtgagctttgctatggaagtgagtccttggagttgtcttcagaagcaagcagcatgggggcggagtgtggttgacttttttctggtgataacacagctgggattctgtagtgtttatattgtcttcttagctgaaaatgtgaaacaagttcatgaaggattcctggagagtaaagtgtttatttcaaatagtaccaattcatcaaacccttgtgagagaagaagtgttgacctaaggatatatatgctttgctttcttccatttataattcttttggtcttcattcgtgaactaaagaatctatttgtactttcattccttgccaacgtttccatggctgtcagtcttgtgataatttaccagtatgttgtcaggaacatgccagatccccacaaccttccaatagtggctggttggaagaaatacccactcttttttggtactgctgtatttgcttttgaaggcataggagtggtccttccactggaaaaccaaatgaaagaatcaaagcgtttccctcaagcgttgaatattggcatggggattgttacaactttgtatgtaacattagctactttaggatatatgtgtttccatgatgaaatcaaaggcagcataactttaaatcttccccaagatgtatggttatatcaatcagtgaaaattctatattcctttggcatttttgtgacatattcaattcagttctatgttccagcagagatcattatccctgggatcacatccaaatttcatactaaatggaagcaaatctgtgaatttgggataagatccttcttggttagtattacttgtgccggagcaattcttattcctcgtttagacattgtgatttccttcgttggagctgtgagcagcagcacattggccctaatcctgccacctttggttgaaattcttacattttcgaaggaacattataatatatggatggtcctgaaaaatatttctatagcattcactggagttgttggcttcttattaggtacatatataactgttgaagaaattatttatcctactcccaaagttgtagctggcactccacagagtccttttctaaatttgaattcaacatgcttaacatctggtttgaaatagtaaaagcagaatcatgagtcttctatttttgtcccatttctgaaaattatcaagataactagtaaaatacattgctatatacataaaaatggtaacaaactctgttttctttggcacgatattaatattttggaagtaatcataactctttaccagtagtggtaaacctatggaaaatccttgcttttaagtgttagcaatagttcaaaaaattaagttctgaaaattgaaaaaattaaaatgtaaaaaaattaaagaataaaaatacttctattattcttttatctcagtaagaaataccttaaccaagttatctctcttttatgctactcttttgccactcacttgagaacagaataggatttcaacaataagagaataaaataagaacatgtataacaaaaagctctctccagatcatccctgtgaatgccaaagtaaactttatgtacagtgtaaaaaaaaaaaatctcagttatgtttttattagccaaattctaatgattggctcctggaagtatagaaaactcccattaacataatataagcatcagaaaattgcaaacactagaattaattttacactctaatggtagttgatcttcatagtcaagaggcactgttcaagatcatgacttagtgtttcaatgaaatttgaaaagggactttaaaacttatccagtgcaactcccttgtttttcgtcagaggaaaaggaggcctagaaaggttaagtaacttggtcgagaccactcagccttgagatcaagaaaacctaatcttttgactcccaggccaggatgttttatttctcacatcatgtccaagaaaaagaataaattatgttcagcttaaaaaaaaaaaaaaaaaaaaaaaaaaaaaa

SEQ ID NO: 914 - protein, 504 aa, Homo sapiens
MEAAATPAAAGAARREELDMDVMRPLINEQNFDGTSDEEHEQELLPVQKHYQLDDQEGISFVQTLMHLLKGNIGTGLLGLPLAIKNAGIVLGPISLVFIGIISVHCMHILVRCSHFLCLRFKKSTLGYSDTVSFAMEVSPWSCLQKQAAWGRSVVDFFLVITQLGFCSVYIVFLAENVKQVHEGFLESKVFISNSTNSSNPCERRSVDLRIYMLCFLPFIILLVFIRELKNLFVLSFLANVSMAVSLVIIYQYVVRNMPDPHNLPIVAGWKKYPLFFGTAVFAFEGIGVVLPLENQMKESKRFPQALNIGMGIVTTLYVTLATLGYMCFHDEIKGSITLNLPQDVWLYQSVKILYSFGIFVTYSIQFYVPAEIIIPGITSKFHTKWKQICEFGIRSFLVSITCAGAILIPRLDIVISFVGAVSSSTLALILPPLVEILTFSKEHYNIWMVLKNISIAFTGVVGFLLGTYITVEEIIYPTPKVVAGTPQSPFLNLNSTCLTSGLK

SEQ ID NO: 915 - DNA, 1670 bp, Homo sapiens
agtagctattctcttctccctgaagggaggcaacactgtccgttcgcctgactggcagtgttttaaggacccatcgcgcttgacgggaaagtcaggtacaagctgatgctgttatcaccacaggaaccaggggctgagcggtgaaatccagctcctcccagctggaagacactagggtgaacggagataaaagcagttctctttacccgaagtttatttctttttcatgccacttcaaatttggattaaaaatcaagaaatataaaccagatgtagcagtttcttgacatggagaaccaagcccataatacgatgggaacttctccttgtgaggctgagcttcaggaattaatggaacaaattgacatcatggtaagcaacaagaaaatggattgggaaagaaagatgcgggctttggagacacgattagatcttcgggatcaagaattggcaaatgcacaaacttgtttggatcagaaaggtcaagaggtagggttacttcgacagaaattggacagtctggaaaaatgtaatttagcaatgactcagaattatgaaggacaactacaaagcctaaaggctcaattttccaaactaacaaataactttgaaaaactgagattacatcagatgaaacaaaacaaagttccacgaaaagaattaccacaccttaaagaagaaataccctttgaactgagcaatttgaaccagaaattagaggaatttagagcaaagtcaagagaatgggacaagcaagagatattatatcagactcatctgatttctttagatgctcaacaaaaattattatctgagaagtgtaatcagtttcagaaacaggcacaaagttaccaaactcaactaaatggtaaaaaacagtgcttagaagacagcagctctgaaattcctcgtttgatatgtgacccagatcccaattgtgaaatcaatgaaagagatgagttcattattgaaaaactgaaatcagctgtaaatgagatagcactaagcaggaataaattacaagatgaaaatcagaagctcttgcaagaactgaaaatgtaccaaagacagtgccaggccatggaagcaggtctctcagaggtaaaaagtgagttacagtcacgtgatgatctcttgagaattatagaaatggaacgattgcaattacacagagaattattaaaaataggagagtgccaaaatgctcaaggaaataaaacaagacttgaatcatcttatttgccttctattaaagaaccagaaaggaaaataaaagagctgttttcagtgatgcaagatcaaccaaatcatgaaaaagaattgaacaagataagaagccaactccaacaggtggaagagtaccataactctgagcagaaataatgaggaatgaaatctctgacctaacagaagagcttcatcagaaggagatcactatagcaactgtcacaaagaaagctgcccttctggaaaaacagttaaaaatggaattagaaataaaagaaaaaatgttagcaaaacaaaaggtctcagatatgaaatataaagctgtcagaactgaaaacacacatctaaaaggaatgatgggagatttagaccccggagaatacatggtaatatgctgacatcattcaataaattgaacaaagagattaaaaaaaaaaaaaaaa

SEQ ID NO: 916 - protein, 356 aa, Homo sapiens
MGTSPCEAELQELMEQIDIMVSNKKMDWERKMRALETRLDLRDQELANAQTCLDQKGQEVGLLRQKLDSLEKCNLAMTQNYEGQLQSLKAQFSKLTNNFEKLRLHQMKQNKVPRKELPHLKEEIPFELSNLNQKLEEFRAKSREWDKQEILYQTHLISLDAQQKLLSEKCNQFQKQAQSYQTQLNGKKQCLEDSSSEIPRLICDPDPNCEINERDEFIIEKLKSAVNEIALSRNKLQDENQKLLQELKMYQRQCQAMEAGLSEVKSELQSRDDLLRIIEMERLQLHRELLKIGECQNAQGNKTRLESSYLPSIKEPERKIKELFSVMQDQPNHEKELNKIRSQLQQVEEYHNSEQK

SEQ ID NO: 917 - DNA, 1740 bp, Homo sapiens
atgtactccttccctgggcagccctggggcccgcggctggtgggtggggtgggggttagggctcgagcaggcaggaaggtgatgccgccgcctttgcgccccagggccctgctcgggtcctggccgcgcgtggtgttcttttcagccgcggagctttgtttcccagtgtcgctgaaaggaaagagaaagaaaacgccttcggtcctggaggtcctgccccttcctgaagcgatgccatttcctccctccatctctcttttcttagattcctcctggggccccggcagaggcggggcggctgcgccccgagtccctctccggcggcagcgcgggagcggggctggaaaagagggcgccgggagccgccccgcccctcatcgctcctggcttctccgcctgagagcagggcctggggagattgccttagctttgggggaaagcaggacgctgagtccagggctcacgaaacaagggaaagataaggacggaggaggcggtctacattgccccccactcccttcccgatcccgcaaacactctgagaggtgttgccttctcctctgtaaagaggagtttgccggacaacagagactttttccttttggctttcttttaaaaacgactgggaacaaagcagcccctgcagtgacggggcagaaattgaggtcgagaaacctggtaggaacaagaaccctgcgggctctgttgttcccaggctcggccggtggtgttcagcaccgcggacagctccccgccccgccccgagcctcccgcaccctcccctctgcctctggcagcctcgtcattggctctcccggcccccctctccaagctgccaattctccaacacagagacccaacctacccaggagcttgtcttcttgcctctccagcgcccggggtagcccaggcccgggagagagcagcggagattcgagcctcggagggtggttgccggctttcgagcaggcttggagactctgcctgcgtcctccacttcgtcccggcccttgtcctgtggcaggtgctccgctcaagatgaatctcaacttcacctctcctctacacccggcgtcttctcagaggcccacatccttcttcatcgaggacatcctgctgcacaagcccaagccgctgagagaggtggccccagaccatttcgccagctctctggcctctcgggtgcctctgctagactatggctaccccctcatgcccacacccaccctcttggctcctcacgcccatcaccctctgcataagggagaccaccatcatccttatttcctcaccacctcggggatgccagtcccagcgctgttcccgcacccgcagcacgcggagctgccggggaagcactgccgccgccgcaaagcccgcacggttttctctgactcgcagctctcgggcttggagaagaggttcgagatccagcgctacctgtccacgccagaacgagtggagctggccacggccctcagcctgtccgagacgcaggtgaaaacgtggttccagaaccggcggatgaagcataaaaagcaactgcggaaaagccaagacgaacccaaagcaccagacgggccagaaagccccgagggcagcccccgcggttcagaggccgccaccgccgccgaggctcggctgagcctgcccgccggtcccttcgtgctgaccgagccagaggacgaggtggacattggagacgagggggagctgggctcagggccgcacgtgctctga

SEQ ID NO: 918 - protein, 579 aa, Homo sapiens
MYSFPGQPWGPRLVGGVGVRARAGRKVMPPPLRPRALLGSWPRVVFFSAAELCFPVSLKGKRKKTPSVLEVLPLPEAMPFPPSISLFLDSSWGPGRGGAAAPRVPLRRQRGSGAGKEGAGSRPAPHRSWLLRLRAGPGEIALALGESRTLSPGLTKQGKDKDGGGGLHCPPLPSRSRKHSERCCLLLCKEEFAGQQRLFPFGFLLKTTGNKAAPAVTGQKLRSRNLVGTRTLRALLFPGSAGGVQHRGQLPAPPRASRTLPSASGSLVIGSPGPPLQAANSPTQRPNLPRSLSSCLSSARGSPGPGESSGDSSLGGWLPAFEQAWRLCLRPPLRPGPCPVAGAPLKMNLNFTSPLHPASSQRPTSFFIEDILLHKPKPLREVAPDHFASSLASRVPLLDYGYPLMPTPTLLAPHAHHPLHKGDHHHPYFLTTSGMPVPALFPHPQHAELPGKHCRRRKARTVFSDSQLSGLEKRFEIQRYLSTPERVELATALSLSETQVKTWFQNRRMKHKKQLRKSQDEPKAPDGPESPEGSPRGSEAATAAEARLSLPAGPFVLTEPEDEVDIGDEGELGSGPHVL

SEQ ID NO: 919 - DNA, 2276 bp, Homo sapiens
ctcattgaactcgcctgcagctcttgggttttttgtggcttccttcgttattggagccaggcctacaccccagcaaccatgtccaagggacctgcagttggtattgatcttggcaccacctactcttgtgtgggtgttttccagcacggaaaagtcgagataattgccaatgatcagggaaaccgaaccactccaagctatgtcgcctttacggacactgaacggttgatcggtgatgccgcaaagaatcaagttgcaatgaaccccaccaacacagtttttgatgccaaacgtctgattggacgcagatttgatgatgctgttgtccagtctgatatgaaacattggccctttatggtggtgaatgatgctggcaggcccaaggtccaagtagaatacaagggagagaccaaaagcttctatccagaggaggtgtcttctatggttctgacaaagatgaaggaaattgcagaagcctaccttgggaagactgttaccaatgctgtggtcacagtgccagcttactttaatgactctcagcgtcaggctaccaaagatgctggaactattgctggtctcaatgtacttagaattattaatgagccaactgctgctgctattgcttacggcttagacaaaaaggttggagcagaaagaaacgtgctcatctttgacctgggaggtggcacttttgatgtgtcaatcctcactattgaggatggaatctttgaggtcaagtctacagctggagacacccacttgggtggagaagattttgacaaccgaatggtcaaccattttattgctgagtttaagcgcaagcataagaaggacatcagtgagaacaagagagctgtaagacgcctccgtactgcttgtgaacgtgctaagcgtaccctctcttccagcacccaggccagtattgagatcgattctctctatgaaggaatcgacttctatacctccattacccgtgcccgatttgaagaactgaatgctgacctgttccgtggcaccctggacccagtagagaaagcccttcgagatgccaaactagacaagtcacagattcatgatattgtcctggttggtggttctactcgtatccccaagattcagaagcttctccaagacttcttcaatggaaaagaactgaataagagcatcaaccctgatgaagctgttgcttatggtgcagctgtccaggcagccatcttgtctggagacaagtctgagaatgttcaagatttgctgctcttggatgtcactcctctttcccttggtattgaaactgctggtggagtcatgactgtcctcatcaagcgtaataccaccattcctaccaagcagacacagaccttcactacctattctgacaaccagcctggtgtgcttattcaggtttatgaaggcgagcgtgccatgacaaaggataacaacctgcttggcaagtttgaactcacaggcatacctcctgcaccccgaggtgttcctcagattgaagtcacttttgacattgatgccaatggtatactcaatgtctctgctgtggacaagagtacgggaaaagagaacaagattactatcactaatgacaagggccgtttgagcaaggaagacattgaacgtatggtccaggaagctgagaagtacaaagctgaagatgagaagcagagggacaaggtgtcatccaagaattcacttgagtcctatgccttcaacatgaaagcaactgttgaagatgagaaacttcaaggcaagattaacgatgaggacaaacagaagattctggacaagtgtaatgaaattatcaactggcttgataagaatcagactgctgagaaggaagaatttgaacatcaacagaaagagctggagaaagtttgcaaccccatcatcaccaagctgtaccagagtgcaggaggcatgccaggaggaatgcctgggggatttcctggtggtggagctcctccctctggtggtgcttcctcagggcccaccattgaagaggttgattaagccaaccaagtgtagatgtagcattgttccacacatttaaaacatttgaaggacctaaattcgtagcaaattctgtggcagttttaaaaagttaagctgctatagtaagttactgggcattctcaatacttgaatatggaacatatgcacaggggaaggaaataacattgcactttataaacactgtattgtaagtggaaaatgcaatgtcttaaataaaactatttaaaattggcaccataaaaaaaaaaaaaaaa

SEQ ID NO: 920 - protein, 646 aa, Homo sapiens
MSKGPAVGIDLGTTYSCVGVFQHGKVEIIANDQGNRTTPSYVAFTDTERLIGDAAKNQVAMNPTNTVFDAKRLIGRRFDDAVVQSDMKHWPFMVVNDAGRPKVQVEYKGETKSFYPEEVSSMVLTKMKEIAEAYLGKTVTNAVVTVPAYFNDSQRQATKDAGTIAGLNVLRIINEPTAAAIAYGLDKKVGAERNVLIFDLGGGTFDVSILTIEDGIFEVKSTAGDTHLGGEDFDNRMVNHFIAEFKRKHKKDISENKRAVRRLRTACERAKRTLSSSTQASIEIDSLYEGIDFYTSITRARFEELNADLFRGTLDPVEKALRDAKLDKSQIHDIVLVGGSTRIPKIQKLLQDFFNGKELNKSINPDEAVAYGAAVQAAILSGDKSENVQDLLLLDVTPLSLGIETAGGVMTVLIKRNTTIPTKQTQTFTTYSDNQPGVLIQVYEGERAMTKDNNLLGKFELTGIPPAPRGVPQIEVTFDIDANGILNVSAVDKSTGKENKITITNDKGRLSKEDIERMVQEAEKYKAEDEKQRDKVSSKNSLESYAFNMKATVEDEKLQGKINDEDKQKILDKCNEIINWLDKNQTAEKEEFEHQQKELEKVCNPIITKLYQSAGGMPGGMPGGFPGGGAPPSGGASSGPTIEEVD

SEQ ID NO: 921 - DNA, 1817 bp, Homo sapiens
ctcattgaactcgcctgcagctcttgggttttttgtggcttccttcgttattggagccaggcctacaccccagcaaccatgtccaagggacctgcagttggtattgatcttggcaccacctactcttgtgtgggtgttttccagcacggaaaagtcgagataattgccaatgatcagggaaaccgaaccactccaagctatgtcgcctttacggacactgaacggttgatcggtgatgccgcaaagaatcaagttgcaatgaaccccaccaacacagtttttgatgccaaacgtctgattggacgcagatttgatgatgctgttgtccagtctgatatgaaacattggccctttatggtggtgaatgatgctggcaggcccaaggtccaagtagaatacaagggagagaccaaaagcttctatccagaggaggtgtcttctatggttctgacaaagatgaaggaaattgcagaagcctaccttgggaagactgttaccaatgctgtggtcacagtgccagcttactttaatgactctcagcgtcaggctaccaaagatgctggaactattgctggtctcaatgtacttagaattattaatgagccaactgctgctgctattgcttacggcttagacaaaaaggttggagcagaaagaaacgtgctcatctttgacctgggaggtggcacttttgatgtgtcaatcctcactattgaggatggaatctttgaggtcaagtctacagctggagacacccacttgggtggagaagattttgacaaccgaatggtcaaccattttattgctgagtttaagcgcaagcataagaaggacatcagtgagaacaagagagctgtaagacgcctccgtactgcttgtgaacgtgctaagcgtaccctctcttccagcacccaggccagtattgagatcgattctctctatgaaggaatcgacttctatacctccattacccgtgcccgatttgaagaactgaatgctgacctgttccgtggcaccctggacccagtagagaaagcccttcgagatgccaaactagacaagtcacagattcatgatattgtcctggttggtggttctactcgtatccccaagattcagaagcttctccaagacttcttcaatggaaaagaactgaataagagcatcaaccctgatgaagctgttgcttatggtgcagctgtccaggcagccatcttgtctggagacaagtctgagaatgttcaagatttgctgctcttggatgtcactcctctttcccttggtattgaaactgctggtggagtcatgactgtcctcatcaagcgtaataccaccattcctaccaagcagacacagaccttcactacctattctgacaaccagcctggtgtgcttattcaggtttatgaaggcgagcgtgccatgacaaaggataacaacctgcttggcaagtttgaactcacaggcatgccaggaggaatgcctgggggatttcctggtggtggagctcctccctctggtggtgcttcctcagggcccaccattgaagaggttgattaagccaaccaagtgtagatgtagcattgttccacacatttaaaacatttgaaggacctaaattcgtagcaaattctgtggcagttttaaaaagttaagctgctatagtaagttactgggcattctcaatacttgaatatggaacatatgcacaggggaaggaaataacattgcactttataaacactgtattgtaagtggaaaatgcaatgtcttaaataaaactatttaaaattggcaccataaaaaaaaaaaaaaaa

SEQ ID NO: 922 - protein, 493 aa, Homo sapiens
MSKGPAVGIDLGTTYSCVGVFQHGKVEIIANDQGNRTTPSYVAFTDTERLIGDAAKNQVAMNPTNTVFDAKRLIGRRFDDAVVQSDMKHWPFMVVNDAGRPKVQVEYKGETKSFYPEEVSSMVLTKMKEIAEAYLGKTVTNAVVTVPAYFNDSQRQATKDAGTIAGLNVLRIINEPTAAAIAYGLDKKVGAERNVLIFDLGGGTFDVSILTIEDGIFEVKSTAGDTHLGGEDFDNRMVNHFIAEFKRKHKKDISENKRAVRRLRTACERAKRTLSSSTQASIEIDSLYEGIDFYTSITRARFEELNADLFRGTLDPVEKALRDAKLDKSQIHDIVLVGGSTRIPKIQKLLQDFFNGKELNKSINPDEAVAYGAAVQAAILSGDKSENVQDLLLLDVTPLSLGIETAGGVMTVLIKRNTTIPTKQTQTFTTYSDNQPGVLIQVYEGERAMTKDNNLLGKFELTGMPGGMPGGFPGGGAPPSGGASSGPTIEEVD

SEQ ID NO: 923 - DNA, 228 bp, Homo sapiens
gtatgtttctgtacttctcttgtttggcttactgataacagataaagggaagtcttgactgactcgctatgatgatggattccaaaaccattcgtagtttccaccagaaagtcttatgttggccagttccttccttggatgtttgagcgaccattcttccttagcaggaccctagcactgtcacagacctggagtccattgtagtaatttgttttatttcctaccaag

SEQ ID NO: 924 - DNA, 211 bp, Homo sapiens
gtaacaatggtatctcaattaaccctaaaggcaggcaggcccaaggtgactcgctgtgatgagtgattgttaaacattcgtagtttccaccaaaagcttggctaatgatggcaacaccttccttggatgtctgagcgagtgatagttaaaacaggagctatgtactgggttttcttttaacttcttttaacgttaactttttgtttgctag

SEQ ID NO: 925 - DNA, 2645 bp, Homo sapiens
aggcaaccatgtggttccagctgaattttttttttccctctctctttcttcactcctttttctttccaaacagggaaaagtgttccacgaagcggtagcgcctttccgcctcgcgttttcctccctgaccctggtcccggctcccgtccgggcgccagctggtggggcgagcgccgggagcccatctgcccccaggggcacggggcgcggggccggctcccgcccggcacatggctgcagccacctcgcgcgcaccccgaggcgccgcgcccagctcgcccgaggtccgtcggaggcgcccggccgccccggagccaagcagcagctgagcggggaagcgcccgcgtccggggatcgggatgtccctcctccttctcctcttgctagtttcctactatgttggaaccttggggactcacactgagatcaagagagtggcagaggaaaaggtcactttgccctgccaccatcaactggggcttccagaaaaagacactctggatattgaatggctgctcaccgataatgaagggaaccaaaaagtggtgatcacttactccagtcgtcatgtctacaataacttgactgaggaacagaagggccgagtggcctttgcttccaatttcctggcaggagatgcctccttgcagattgaacctctgaagcccagtgatgagggccggtacacctgtaaggttaagaattcagggcgctacgtgtggagccatgtcatcttaaaagtcttagtgagaccatccaagcccaagtgtgagttggaaggagagctgacagaaggaagtgacctgactttgcagtgtgagtcatcctctggcacagagcccattgtgtattactggcagcgaatccgagagaaagagggagaggatgaacgtctgcctcccaaatctaggattgactacaaccaccctggacgagttctgctgcagaatcttaccatgtcctactctggactgtaccagtgcacagcaggcaacgaagctgggaaggaaagctgtgtggtgcgagtaactgtacagtatgtacaaagcatcggcatggttgcaggagcagtgacaggcatagtggctggagccctgctgattttcctcttggtgtggctgctaatccgaaggaaagacaaagaaagatatgaggaagaagagagacctaatgaaattcgagaagatgctgaagctccaaaagcccgtcttgtgaaacccagctcctcttcctcaggctctcggagctcacgctctggttcttcctccactcgctccacagcaaatagtgcctcacgcagccagcggacactgtcaactgacgcagcaccccagccagggctggccacccaggcatacagcctagtggggccagaggtgagaggttctgaaccaaagaaagtccaccatgctaatctgaccaaagcagaaaccacacccagcatgatccccagccagagcagagccttccaaacggtctgaattacaatggacttgactcccacgctttcctaggagtcagggtctttggactcttctcgtcattggagctcaagtcaccagccacacaaccagatgagaggtcatctaagtagcagtgagcattgcacggaacagattcagatgagcattttccttatacaataccaaacaagcaaaaggatgtaagctgattcatctgtaaaaaggcatcttattgtgcctttagaccagagtaagggaaagcaggagtccaaatctatttgttgaccaggacctgtggtgagaaggttggggaaaggtgaggtgaatatacctaaaacttttaatgtgggatattttgtatcagtgctttgattcacaattttcaagaggaaatgggatgctgtttgtaaattttctatgcatttctgcaaacttattggattattagttattcagacagtcaagcagaacccacagccttattacacctgtctacaccatgtactgagctaaccacttctaagaaactccaaaaaaggaaacatgtgtcttctattctgacttaacttcatttgtcataaggtttggatattaatttcaaggggagttgaaatagtgggagatggagaagagtgaatgagtttctcccactctatactaatctcactatttgtattgagcccaaaataactatgaaaggagacaaaaatttgtgacaaaggattgtgaagagctttccatcttcatgatgttatgaggattgttgacaaacattagaaatatataatggagcaattgtggatttcccctcaaatcagatgcctctaaggactttcctgctagatatttctggaaggagaaaatacaacatgtcatttatcaacgtccttagaaagaattcttctagagaaaaagggatctaggaatgctgaaagattacccaacataccattatagtctcttctttctgagaaaatgtgaaaccagaattgcaagactgggtggactagaaagggagattagatcagttttctcttaatatgtcaaggaaggtagccgggcatggtgccaggcacctgtaggaaaatccagcaggtggaggttgcagtgagccaagattatgccattgcactccagcctgggtgacaaagcaagactccatctcaaaaaaaaaaaaaaaaa

SEQ ID NO: 926 - protein, 373 aa, Homo sapiens
MSLLLLLLLVSYYVGTLGTHTEIKRVAEEKVTLPCHHQLGLPEKDTLDIEWLLTDNEGNQKVVITYSSRHVYNNLTEEQKGRVAFASNFLAGDASLQIEPLKPSDEGRYTCKVKNSGRYVWSHVILKVLVRPSKPKCELEGELTEGSDLTLQCESSSGTEPIVYYWQRIREKEGEDERLPPKSRIDYNHPGRVLLQNLTMSYSGLYQCTAGNEAGKESCVVRVTVQYVQSIGMVAGAVTGIVAGALLIFLLVWLLIRRKDKERYEEEERPNEIREDAEAPKARLVKPSSSSSGSRSSRSGSSSTRSTANSASRSQRTLSTDAAPQPGLATQAYSLVGPEVRGSEPKKVHHANLTKAETTPSMIPSQSRAFQTV

SEQ ID NO: 927 - DNA, 953 bp, Homo sapiens
agtccctgcattgcgcgcgacccggcggcgggacaggcttgctgcttcctcctcctcggcctcaccattccagaccaaaattgaaaaaatggttgacctcacccaggtaatggatgatgaagtattcatggcttttgcatcctatgcaacaattattctttcaaaaatgatgcttatgagtactgcaactgcattctatagattgacaagaaaggtttttgccaatccagaagactgtgtagcatttggcaaaggagaaaatgccaagaagtatcttcgaacagatgacagagtagaacgtgtacgcagagcccacctgaatgaccttgaaaatattattccatttcttggaattggcctcctgtattccttgagtggtcccgacccctctacagccatcctgcacttcagactatttgtcggagcacggatctaccacaccattgcatatttgacaccccttccccagccaaatagagctttgagtttttttgttggatatggagttactctttccatggcttacaggttgctgaaaagtaaattgtacctgtaaagaaaatcatacaactcagcatccagttggctttttaagaattctgtacttccaatttataatgaatactttcttagattttaggtaggaggggagcagaggaattatgaactggggtaaacccattttgaatattagcattgccaatatcctgtattcttgttttacatttggattagaaatttaacatagtaattcttaagtcttttgtctgatttttaaagtactttcttataaatttggatcatgttatgatttgtaacattcacacaacacctcacttttgaatctataaaagaattgcacgtatgagaaacctatatttcaatactgctgaaacagacatgaaataaagaatttaaagaatcaaaaaaaaaaaaaaaaaaaaaaaaaaaaa

SEQ ID NO: 928 - protein, 155 aa, Homo sapiens
MVDLTQVMDDEVFMAFASYATIILSKMMLMSTATAFYRLTRKVFANPEDCVAFGKGENAKKYLRTDDRVERVRRAHLNDLENIIPFLGIGLLYSLSGPDPSTAILHFRLFVGARIYHTIAYLTPLPQPNRALSFFVGYGVTLSMAYRLLKSKLYL

SEQ ID NO: 929 - DNA, 917 bp, Homo sapiens
gaattcaagtcctaaagcctacagttttgaatactactgaaatgacaagttattccagaccaaaattgaaaaaatggttgacctcacccaggtaatggatgatgaagtattcatggcttttgcatcctatgcaacaattattctttcaaaaatgatgcttatgagtactgcaactgcattctatagattgacaagaaaggtttttgccaatccagaagactgtgtagcatttggcaaaggagaaaatgccaagaagtatcttcgaacagatgacagagtagaacgtgtacgcagagcccacctgaatgaccttgaaaatattattccatttcttggaattggcctcctgtattccttgagtggtcccgacccctctacagccatcctgcacttcagactatttgtcggagcacggatctaccacaccattgcatatttgacaccccttccccagccaaatagagctttgagtttttttgttggatatggagttactctttccatggcttacaggttgctgaaaagtaaattgtacctgtaaagaaaatcatacaactcagcatccagttggctttttaagaattctgtacttccaatttataatgaatactttcttagattttaggtaggaggggagcagaggaattatgaactggggtaaacccattttgaatattagcattgccaatatcctgtattcttgttttacatttggattagaaatttaacatagtaattcttaagtcttttgtctgatttttaaagtactttcttataaatttggatcatgttatgatttgtaacattcacacaacacctcacttttgaatctataaaagaattgcacgtatgagaaacctatatttcaatactgctgaaacagacatgaaataaagaatttaaagaatgaaaaaaaa

SEQ ID NO: 930 - protein, 155 aa, Homo sapiens; identical to SEQ ID NO: 928

SEQ ID NO: 931 - DNA, 987 bp, Homo sapiens
ggcagatggaagacttgggggggtctctgccagctggaagtgcttggctccacttagcagctaaacttagcttttcaatcgatcgcttttgaaagggaattgtatttctgtccccgtgcggattccagaccaaaattgaaaaaatggttgacctcacccaggtaatggatgatgaagtattcatggcttttgcatcctatgcaacaattattctttcaaaaatgatgcttatgagtactgcaactgcattctatagattgacaagaaaggtttttgccaatccagaagactgtgtagcatttggcaaaggagaaaatgccaagaagtatcttcgaacagatgacagagtagaacgtgtacgcagagcccacctgaatgaccttgaaaatattattccatttcttggaattggcctcctgtattccttgagtggtcccgacccctctacagccatcctgcacttcagactatttgtcggagcacggatctaccacaccattgcatatttgacaccccttccccagccaaatagagctttgagtttttttgttggatatggagttactctttccatggcttacaggttgctgaaaagtaaattgtacctgtaaagaaaatcatacaactcagcatccagttggctttttaagaattctgtacttccaatttataatgaatactttcttagattttaggtaggaggggagcagaggaattatgaactggggtaaacccattttgaatattagcattgccaatatcctgtattcttgttttacatttggattagaaatttaacatagtaattcttaagtcttttgtctgatttttaaagtactttcttataaatttggatcatgttatgatttgtaacattcacacaacacctcacttttgaatctataaaagaattgcacgtatgagaaacctatatttcaatactgctgaaacagacatgaaataaagaatttaaagaatgaaaaaaaa

SEQ ID NO: 932 - protein, 155 aa, Homo sapiens; identical to SEQ ID NO: 928

SEQ ID NO: 933 - DNA, 909 bp, Homo sapiens
tcgtgacaaagcaaattgtctggtatcatgaatttggaacaccattccagaccaaaattgaaaaaatggttgacctcacccaggtaatggatgatgaagtattcatggcttttgcatcctatgcaacaattattctttcaaaaatgatgcttatgagtactgcaactgcattctatagattgacaagaaaggtttttgccaatccagaagactgtgtagcatttggcaaaggagaaaatgccaagaagtatcttcgaacagatgacagagtagaacgtgtacgcagagcccacctgaatgaccttgaaaatattattccatttcttggaattggcctcctgtattccttgagtggtcccgacccctctacagccatcctgcacttcagactatttgtcggagcacggatctaccacaccattgcatatttgacaccccttccccagccaaatagagctttgagtttttttgttggatatggagttactctttccatggcttacaggttgctgaaaagtaaattgtacctgtaaagaaaatcatacaactcagcatccagttggctttttaagaattctgtacttccaatttataatgaatactttcttagattttaggtaggaggggagcagaggaattatgaactggggtaaacccattttgaatattagcattgccaatatcctgtattcttgttttacatttggattagaaatttaacatagtaattcttaagtcttttgtctgatttttaaagtactttcttataaatttggatcatgttatgatttgtaacattcacacaacacctcacttttgaatctataaaagaattgcacgtatgagaaacctatatttcaatactgctgaaacagacatgaaataaagaatttaaagaatgaaaaaaaa

SEQ ID NO: 934 - protein, 155 aa, Homo sapiens; identical to SEQ ID NO: 928

SEQ ID NO: 935 - DNA, 3450 bp, Homo sapiens
gtagaacagtggggagctgtgcggatgggtgaagtgcatgtatgcctgcctagacgggccagaaaagccaaacttaagaaatctgcctatgtacagaacaagtcaactaaggggttctcattaatctaccgtctgtgaatatcgttatttttcaggtatacaaatgctctcagtccagccagacaccaagccgaaaggttgtgctggctgcaaccgaaagatcaaggaccggtatcttctaaaggcactggacaaatactggcatgaagactgcctgaagtgtgcctgctgtgactgtcgcttgggagaggtgggctccaccctgtacactaaagctaatcttatcctttgtcgcagagactatctgaggctctttggtgtaacgggaaactgcgctgcctgtagtaagctcatccctgcctttgagatggtgatgcgtgccaaggacaatgtttaccacctggactgctttgcatgtcagctttgtaatcagagattttgtgttggagacaaatttttcctaaagaataacatgatcctttgccagacggactacgaggaaggtttaatgaaagaaggttatgcaccccaggttcgctgatctatcaacatcaccccattaagaatacaaagcactacattcttttatcttttttgctccacatgtacataagaattgacacaggaacctactgaatagcgtagatataggaaggcaggatggttatatggaataaaaggcggactgcatctgtatgtagtgaaattgccccagttcagagttgaatgtttattattaaagaaaaaagtaatgtacatatggctggatttttttgcttgctattcgtttttgtgtcacttggcatgagatgtttattttggactattgtatataatgtattgtaatatttgaagcacaaatgtaatacagttttattgtgttaccatttgtgttccatttgcttctttgtattgttgcatttagtacaatcagtgtttaaacttactgtatatttatgctttctgtatttaccagctattttaaatgagctgtaactttctagtaaagaattgaaaagcaaatctcactaatgatacacagatagataaagcaagtctatcaacattaaaaatactaaaaaataaagacacacacagagcattttagtgacatccactacttattgccgctatgagttagagtctatcagtgttcttgttataaccccctattttcagggggttaaaaatcagctttaaaaaaatacataaaaatttcatcttaaagcactttcattttataccaacgtgaaaagtgccatttttagaataactttaaagcttaacaggtttccttttaatatcctttttttgtgtgctctttacttacacaatggctttgttttgctttttcagccacaccccttatgtgaactagtgcctttgggtatcacgtaaaattttttccaaagggttactttaaaaatctgttaccacaattatgagatgatttttaagtgataaattaaacttcttcttgtataaattctgcccagatctctccacaagagctgagggtttcataactttatggcttaataaatgtatgacactgaaaagatttgagtgtgaatctactgaaatcactataatgcacattgaagctatgatggtatttgagtagtgaggttacttttgatcggagcaacataatgctcatagaatcttctagaagaagagaaacaaagggattgataaaatgctgagaactagtgattatatatttttctgtatttacctgacatttattttaatgttcaaaaagtaaacactttaagtttgatgtgttttactctctcattgttttaagtaattgccaactcagaatacatcattcttaggctgaaatttgtctttccattttttaaggtgaaatagtactaccttacgtgatagcatacaaagaagaaagctctagaaagagaaattatggagaatgattatttaaattacaattaaggaaatgagaatatgatcccctcttccgagttgcccacaaacttgcttctttgcttttgctccctgtaatagaactacttttcaacaaatctaattttgcacggcaccgttaaccatattttcactacagcaaacttagtgctatgggttttctttttctttgtttttttcttgatcacttgtataggaaacaatattttccagtgttatttgcatatatattttgtccttccaatatatgcattacagatgaaaattaaatgttatacctgaattcttgggttggggccaaaatattaagctgaaaataatgctggtgtggatttgttttaaaacaaagctttattatgaacatgcatgtgaatctggatattgcctcttatttttaagaaaatggttctgtgaaaagtgaatgatatgtatttttccaaatgcttcatggttaggagtcttcaagttccatgttccccagatttgagatatactaaagaaagaaattcaaaagtagctatttggggcccacaaaaataactattattttagccttagagccttacacttgtttcatgaagagaaaggacttgcataaccaaaataaacaaagcaagacaaattaaaaatatgtgggggagagatcagtgaaaagtggttttcttaatgcagccctgctggtccccattaacaattgcttgaaattcacatggatgtaaaattataattgtcaggatcttattcagatgatcttttaaggtttaactggttttgcttttgtttatctatatgtcaaaatacttgtaaattgggaacaaacttctctcagcttcttgaagttgttcaactatccttgccactggaagaccaaacaaggttttcactgctttttcttttacataatatgctgagaattatttcttatgctttttactacaaacaaaattactcacctggattaaagattaaggccttaatctgtttagattatctttaatctccatgaaatcgtgaaataagacaagaatagtgtttcagctgtaggccattttacagctaattgcccataaattgtagcatttattgacctgaagtactaagctaattgtcttgactactcaaagcccctgaattgttgtcaactttcccctttgtgttgtgtagccctaacgtcatttagcttgttgtctgatgcctccagtaggacacctccgatggagctttgatttctgagcagcgaaagctcccttcctaagatgcatctcgcataggctgcctatgatgaaggaccgtgcacctccactccaacagagtgctgagtttaaaagttgacctgtgtttgtaatttcactttcatcttgcttaataaatatctgctggattctttcattcacttttttacatttggatttatgtttttaataaaaggggtgttacact

SEQ ID NO: 936 - protein, 145 aa, Homo sapiens
MLSVQPDTKPKGCAGCNRKIKDRYLLKALDKYWHEDCLKCACCDCRLGEVGSTLYTKANLILCRRDYLRLFGVTGNCAACSKLIPAFEMVMRAKDNVYHLDCFACQLCNQRFCVGDKFFLKNNMILCQTDYEEGLMKEGYAPQVR

SEQ ID NO: 937 - DNA, 3727 bp, Homo sapiens
gcttctctgtggtcttgacaagcgctgcctgggctccgccggctcactaataactgagtgaccttttctttggctgtattatgtctggctgggaagggattgcattttgcagctgagagccggagcttccttcagctcggctcctcgcacgctgctggggtaagttgtcttgaaccaggacggagagagacagcctcggactgcagttgcctaaaaggaggacacctgtggctcagatgcggtcaacaccattgcttggcgtatccttgaggacctcattattttaaacttaaaaaaaaatagacattccctcccccgtcttttttttttttttcaaacaatgcttctttttgacctttcccaaggagaagcgctacaaagcagccactgtgcttactgaacggcctccccctgtatcgcttaattgagaaggtatacaaatgctctcagtccagccagacaccaagccgaaaggttgtgctggctgcaaccgaaagatcaaggaccggtatcttctaaaggcactggacaaatactggcatgaagactgcctgaagtgtgcctgctgtgactgtcgcttgggagaggtgggctccaccctgtacactaaagctaatcttatcctttgtcgcagagactatctgaggctctttggtgtaacgggaaactgcgctgcctgtagtaagctcatccctgcctttgagatggtgatgcgtgccaaggacaatgtttaccacctggactgctttgcatgtcagctttgtaatcagagattttgtgttggagacaaatttttcctaaagaataacatgatcctttgccagacggactacgaggaaggtttaatgaaagaaggttatgcaccccaggttcgctgatctatcaacatcaccccattaagaatacaaagcactacattcttttatcttttttgctccacatgtacataagaattgacacaggaacctactgaatagcgtagatataggaaggcaggatggttatatggaataaaaggcggactgcatctgtatgtagtgaaattgccccagttcagagttgaatgtttattattaaagaaaaaagtaatgtacatatggctggatttttttgcttgctattcgtttttgtgtcacttggcatgagatgtttattttggactattgtatataatgtattgtaatatttgaagcacaaatgtaatacagttttattgtgttaccatttgtgttccatttgcttctttgtattgttgcatttagtacaatcagtgtttaaacttactgtatatttatgctttctgtatttaccagctattttaaatgagctgtaactttctagtaaagaattgaaaagcaaatctcactaatgatacacagatagataaagcaagtctatcaacattaaaaatactaaaaaataaagacacacacagagcattttagtgacatccactacttattgccgctatgagttagagtctatcagtgttcttgttataaccccctattttcagggggttaaaaatcagctttaaaaaaatacataaaaatttcatcttaaagcactttcattttataccaacgtgaaaagtgccatttttagaataactttaaagcttaacaggtttccttttaatatcctttttttgtgtgctctttacttacacaatggctttgttttgctttttcagccacaccccttatgtgaactagtgcctttgggtatcacgtaaaattttttccaaagggttactttaaaaatctgttaccacaattatgagatgatttttaagtgataaattaaacttcttcttgtataaattctgcccagatctctccacaagagctgagggtttcataactttatggcttaataaatgtatgacactgaaaagatttgagtgtgaatctactgaaatcactataatgcacattgaagctatgatggtatttgagtagtgaggttacttttgatcggagcaacataatgctcatagaatcttctagaagaagagaaacaaagggattgataaaatgctgagaactagtgattatatatttttctgtatttacctgacatttattttaatgttcaaaaagtaaacactttaagtttgatgtgttttactctctcattgttttaagtaattgccaactcagaatacatcattcttaggctgaaatttgtctttccattttttaaggtgaaatagtactaccttacgtgatagcatacaaagaagaaagctctagaaagagaaattatggagaatgattatttaaattacaattaaggaaatgagaatatgatcccctcttccgagttgcccacaaacttgcttctttgcttttgctccctgtaatagaactacttttcaacaaatctaattttgcacggcaccgttaaccatattttcactacagcaaacttagtgctatgggttttctttttctttgtttttttcttgatcacttgtataggaaacaatattttccagtgttatttgcatatatattttgtccttccaatatatgcattacagatgaaaattaaatgttatacctgaattcttgggttggggccaaaatattaagctgaaaataatgctggtgtggatttgttttaaaacaaagctttattatgaacatgcatgtgaatctggatattgcctcttatttttaagaaaatggttctgtgaaaagtgaatgatatgtatttttccaaatgcttcatggttaggagtcttcaagttccatgttccccagatttgagatatactaaagaaagaaattcaaaagtagctatttggggcccacaaaaataactattattttagccttagagccttacacttgtttcatgaagagaaaggacttgcataaccaaaataaacaaagcaagacaaattaaaaatatgtgggggagagatcagtgaaaagtggttttcttaatgcagccctgctggtccccattaacaattgcttgaaattcacatggatgtaaaattataattgtcaggatcttattcagatgatcttttaaggtttaactggttttgcttttgtttatctatatgtcaaaatacttgtaaattgggaacaaacttctctcagcttcttgaagttgttcaactatccttgccactggaagaccaaacaaggttttcactgctttttcttttacataatatgctgagaattatttcttatgctttttactacaaacaaaattactcacctggattaaagattaaggccttaatctgtttagattatctttaatctccatgaaatcgtgaaataagacaagaatagtgtttcagctgtaggccattttacagctaattgcccataaattgtagcatttattgacctgaagtactaagctaattgtcttgactactcaaagcccctgaattgttgtcaactttcccctttgtgttgtgtagccctaacgtcatttagcttgttgtctgatgcctccagtaggacacctccgatggagctttgatttctgagcagcgaaagctcccttcctaagatgcatctcgcataggctgcctatgatgaaggaccgtgcacctccactccaacagagtgctgagtttaaaagttgacctgtgtttgtaatttcactttcatcttgcttaataaatatctgctggattctttcattcacttttttacatttggatttatgtttttaataaaaggggtgttacact

SEQ ID NO: 938 - protein, 145 aa, Homo sapiens; identical to SEQ ID NO: 936

SEQ ID NO: 939 - DNA, 4855 bp, Homo sapiens
tgagatcgtgtttcatttcaggaagatatatgcgtcaggaaaatttctatcttcttttgtattatcaaggagatatttggagcagagtcaaccctctcagttacataaaataaaaaatggcatattcttggcaaacggatccaaatcctaatgaatcacacgaaaagcagtatgaacaccaagaatttctctttgtaaatcaaccccattcttctagccaagtcagtctgggttttgatcagatagtagatgagatcagtggcaaaattccacactacgagagtgaaattgatgaaaacaccttttttgtgcccactgcaccaaaatgggactcaacagggcattcattaaatgaagcacaccaaatatccttgaatgaattcacttctaaaagccgtgaactctcctggcatcaagttagcaaagcaccagcaattggttttagtccttctgtgttaccaaaacctcaaaatacgaataaagaatgctcctggggaagccccataggaaaacatcatggtgctgatgattccagattcagtattttagctccatcattcacaagtttggataaaattaatctagagaaagaattagaaaatgaaaatcataactaccatataggatttgaaagtagcattcctccaacaaattcatccttctcaagtgacttcatgccgaaagaagagaataaaaggagtggacatgtgaacattgtggaaccatctttgatgcttttgaaaggctctcttcaacccggaatgtgggaaagtacatggcagaagaatatagagtcaataggttgttccattcagctagtggaagtacctcaaagcagcaatacgagtctggcctctttttgcaacaaagtaaaaaaaatcagagaaagatatcatgcagctgatgttaatttcaattctgggaagatctggagcactactacagcatttccgtatcagctcttttctaagaccaagtttaatatacatatttttattgataactcaacacaacctcttcattttatgccatgtgctaattatcttgtcaaagatctaattgcagaaattctgcatttttgcacaaatgaccagctactccccaaagatcatattctaagtgtatgtggctctgaagaatttttacaaaacgaccactgtttggggagccacaaaatgtttcaaaaagataaatctgttattcagctccacctgcagaaaagtagggaagctccaggaaagctatctcgaaagcatgaagaggaccacagtcagttttatctgaatcaacttctagaatttatgcatatttggaaagtatccagacaatgtctcttaacactcatcagaaaatatgacttccacctgaaatacctattgaaaacccaggaaaacgtgtataatattattgaagaagttaaaaaaatatgcagtgttctagggtgtgtggaaaccaaacaaattacagatgcagtaaatgaactaagtctaattcttcagagaaaaggagagaatttttatcaaagttcagagacttcagcaaaaggcttgatagagaaggtaacaactgaactatccacatccatctaccagctaatcaatgtctactgtaacagcttttatgcagattttcagcctgtaaatgtacctagatgcacttcctatctaaatcccgggcttccttcccacctcagcttcacagtgtatgcagcacacaacattccagaaacctgggtgcacaggatcaattttccccttgaaataaagtcacttccaagggaatccatgctcactgtaaaactgtttgggattgcctgtgcaaccaacaatgcaaatttactggcgtggacttgtcttccactgtttccaaaagaaaaatccattctcgggtctatgctgttcagcatgacattacagagtgagcctcccgtagaaatgataactccaggagtgtgggatgtaagtcagccatccccggtgaccctgcagattgattttccagctactgggtgggagtatatgaaacctgattctgaagagaatagaagtaatcttgaagagccactaaaggagtgtataaaacatattgccagactttcacagaaacagactcccctactactctctgaagaaaagaaaagatatttatggttttatcgcttctactgcaataatgaaaactgctcccttcctttagtcctgggtagtgcccctggatgggatgaaaggactgtttcagaaatgcataccattttgagaagatggacattttctcaacctttagaggctcttgggcttttgacttccagttttccagatcaagaaattcgtaaagtggcagttcaacaattagacaacctcttgaatgatgaactactggaatatctcccacagctagttcaggctgtcaagtttgaatggaaccttgagagtcctttagtgcaacttctactccaccgctccttgcagagcatccaggttgcccatcgtctttactggctgctaaaaaatgcagaaaatgaagcttattttaaaagctggtatcagaagctactagctgctctccaattctgtgcaggtaaagccttgaatgatgagttttccaaggagcagaaacttatcaaaattctgggagatattggggaaagagtcaagtctgccagtgaccatcaaagacaggaggtactgaagaaagaaattggcagactagaagagttctttcaagatgtaaatacttgtcatcttcctctgaaccctgccctatgtataaaagggattgatcacgatgcatgttcatattttacatctaatgctttgccattgaagattactttcatcaatgctaatctgatgggcaaaaacatcagcattatttttaaggctggagatgatcttcgtcaggatatgcttgttctgcagcttattcaagtgatggacaatatttggctgcaggaaggcttggatatgcaaatgatcatttatagatgtctatccacaggaaaagaccaacgattggtgcagatggtacctgatgctgtgaccctagcaaagattcatcgccattctggactgataggaccattgaaagaaaataccattaaaaagtggttcagtcagcacaaccacttaaaggcagattatgaaaaggccttgaggaactttttctactcctgtgctggctggtgtgtggtaacattcatcctgggagtatgtgaccgtcacaatgataatatcatgctgacaaagtcgggccacatgtttcatattgactttggaaaattcttaggtcatgcacaaacatttggagggataaaaagggaccgagctcctttcatttttacttcagagatggaatactttattacagagggtgggaaaaacccacagcattttcaagattttgtggaactttgctgtcgtgcttataatattatcagaaagcacagccaactgctcttgaacctgctggaaatgatgctgtatgcaggactgcctgagctaagtggaattcaagacctgaaatatgtgtataataatcttcgtccacaagacacagacctggaagcaacaagtcattttaccaagaaaataaaggaaagtctggagtgtttccctgttaaattgaataacttgatccacacacttgcacaaatgtcagccataagccctgccaaatctacttcacagacttttcctcaggaatcctgtttgctgagtacaactaggtcgattgaaagagcaattttagggttcagcaagaaatccagtaatctgtatctgatccaggtgacacacagcaacaacgaaacaagcctgacagaaaaatcatttgagcagttttcaaaacttcacagccaacttcagaagcagtttgcatcactgactctcccagagtttcctcattggtggcacctaccttttacaaattcagatcacagaagattcagagatctaaatcattacatggaacagatattaaatgtatcacatgaagttacaaacagtgattgtgtacttagctttttcctctctgaggctgtgcaacaaacagttgaatcatcacctgtgtacctaggtgagaagaagtttccagacaagaagcctaaggtgcagttagtcatatcctacgaggatgtgaagctgaccatactagtgaaacacatgaaaaacattcatctcccagatggctctgcgcccagtgcacatgttgaattttatcttttaccatatcccagtgaagttctgaggaggaaaacaaaatctgttccaaaatgtacggaccccacttacaatgaaattgtagtatatgatgaagtcacagagctccaaggacatgtcttaatgcttattgtgaagagtaaaactgtatttgtgggagcaattaacatccgactctgtagtgtcccactcgataaagaaaaatggtatccattaggaaacagtataatttcaccattgctatgaacatatgcattattcattaactacttgtattttttcacttccgggcctctgaatcacataagtaaggcatctttgttgtcaaagacagcacagggtattaaggacacagaaaaaaaatcagaattagtcttttgtgttgtttattttctacctgtgctttcattgttttttcataatcttttctccttcagtggagtactgattgcatgaaatttgatgtgtaaaataataaaagacctttaattaatcattttaatatattttaaattaaacataggtttacatttgttttaattgtgtgcctacagttaaaagcagtatttttaatgtattttataagaaagacaatcaaataaacctcatcaattaattcaaaaaaaaaaaaaaaaaaa

SEQ ID NO: 940 - protein, 1448 aa, Homo sapiens
MAYSWQTDPNPNESHEKQYEHQEFLFVNQPHSSSQVSLGFDQIVDEISGKIPHYESEIDENTFFVPTAPKWDSTGHSLNEAHQISLNEFTSKSRELSWHQVSKAPAIGFSPSVLPKPQNTNKECSWGSPIGKHHGADDSRFSILAPSFTSLDKINLEKELENENHNYHIGFESSIPPTNSSFSSDFMPKEENKRSGHVNIVEPSLMLLKGSLQPGMWESTWQKNIESIGCSIQLVEVPQSSNTSLASFCNKVKKIRERYHAADVNFNSGKIWSTTTAFPYQLFSKTKFNIHIFIDNSTQPLHFMPCANYLVKDLIAEILHFCTNDQLLPKDHILSVCGSEEFLQNDHCLGSHKMFQKDKSVIQLHLQKSREAPGKLSRKHEEDHSQFYLNQLLEFMHIWKVSRQCLLTLIRKYDFHLKYLLKTQENVYNIIEEVKKICSVLGCVETKQITDAVNELSLILQRKGENFYQSSETSAKGLIEKVTTELSTSIYQLINVYCNSFYADFQPVNVPRCTSYLNPGLPSHLSFTVYAAHNIPETWVHRINFPLEIKSLPRESMLTVKLFGIACATNNANLLAWTCLPLFPKEKSILGSMLFSMTLQSEPPVEMITPGVWDVSQPSPVTLQIDFPATGWEYMKPDSEENRSNLEEPLKECIKHIARLSQKQTPLLLSEEKKRYLWFYRFYCNNENCSLPLVLGSAPGWDERTVSEMHTILRRWTFSQPLEALGLLTSSFPDQEIRKVAVQQLDNLLNDELLEYLPQLVQAVKFEWNLESPLVQLLLHRSLQSIQVAHRLYWLLKNAENEAYFKSWYQKLLAALQFCAGKALNDEFSKEQKLIKILGDIGERVKSASDHQRQEVLKKEIGRLEEFFQDVNTCHLPLNPALCIKGIDHDACSYFTSNALPLKITFINANLMGKNISIIFKAGDDLRQDMLVLQLIQVMDNIWLQEGLDMQMIIYRCLSTGKDQRLVQMVPDAVTLAKIHRHSGLIGPLKENTIKKWFSQHNHLKADYEKALRNFFYSCAGWCVVTFILGVCDRHNDNIMLTKSGHMFHIDFGKFLGHAQTFGGIKRDRAPFIFTSEMEYFITEGGKNPQHFQDFVELCCRAYNIIRKHSQLLLNLLEMMLYAGLPELSGIQDLKYVYNNLRPQDTDLEATSHFTKKIKESLECFPVKLNNLIHTLAQMSAISPAKSTSQTFPQESCLLSTTRSIERAILGFSKKSSNLYLIQVTHSNNETSLTEKSFEQFSKLHSQLQKQFASLTLPEFPHWWHLPFTNSDHRRFRDLNHYMEQILNVSHEVTNSDCVLSFFLSEAVQQTVESSPVYLGEKKFPDKKPKVQLVISYEDVKLTILVKHMKNIHLPDGSAPSAHVEFYLLPYPSEVLRRKTKSVPKCTDPTYNEIVVYDEVTELQGHVLMLIVKSKTVFVGAINIRLCSVPLDKEKWYPLGNSIISPLL

SEQ ID NO: 941 - DNA, 4253 bp, Homo sapiens
tcagacatggcggcggatctaaacctggagtggatctccctgccccggtcctggacttacgggatcaccaggggcggccgagtcttcttcatcaacgaggaggccaagagcaccacctggctgcaccccgtcaccggcgaggcggtggtcaccggacaccggcggcagagcacagatttgcctactggctgggaagaagcatatacttttgaaggtgcaagatactatataaaccataatgaaaggaaagtgacctgcaaacatccagtcacaggacaaccatcacaggacaattgtatttttgtagtgaatgaacagactgttgcaaccatgacatctgaagaaaagaaggaacggccaataagtatgataaatgaagcttctaactataacgtgacttcagattatgcagtgcatccaatgagccctgtaggcagaacttcacgagcttcaaaaaaagttcataattttggaaagaggtcaaattcaattaaaaggaatcctaatgcaccggttgtcagacgaggttggctttataaacaggacagtactggcatgaaattgtggaagaaacgctggtttgtgctttctgacctttgcctcttttattatagagatgagaaagaagagggtatcctgggaagcatactgttacctagttttcagatagctttgcttacctctgaagatcacattaatcgcaaatatgcttttaaggcagcccatccaaacatgcggacctattatttctgcactgatacaggaaaggaaatggagttgtggatgaaagccatgttagatgctgccctagtacagacagaacctgtgaaaagagtggacaagattacatctgaaaatgcaccaactaaagaaaccaataacattcccaaccatagagtgctaattaaaccagagatccaaaacaatcaaaaaaacaaggaaatgagcaaaattgaagaaaaaaaggcattagaagctgaaaaatatggatttcagaaggatggtcaagatagacccttaacaaaaattaatagtgtaaagctgaattctctgccatctgaatatgagagtgggtcagcatgccctgctcagactgtgcactacagaccaatcaacttgagcagttcagagaacaaaatagtcaatgttagcctggcagatcttagaggtggaaatcgccccaatacagggcccttatacacagaggccgatcgagtcatacagagaacaaattcaatgcagcagttggaacagtggattaaaatccagaaggggaggggtcatgaagaagaaaccaggggagtaatttcttaccaaacattaccaagaaatatgccaagtcacagagcccagattatggcccgctaccctgaaggttatagaacactcccaagaaacagcaagacaaggcctgaaagtatctgcagtgtaaccccttccactcatgacaagacattaggacccggagcggaggagaaacggaggtccatgagagatgacacaatgtggcagctctacgaatggcagcagcgtcagttttataacaaacagagcaccctccctcgacacagtactttgagtagtcccaaaaccatggtaaatatttctgaccagacaatgcactctattcccacatcaccttcccacgggtcaatagctgcttatcagggatactcccctcaacgaacttacagatcggaagtgtcttcaccaattcagagaggagatgtgacaatagaccgcagacacagggcccatcaccctaagcatgtctatgtgcctgacagaaggtcagtgccagctggcctgactttacagtctgttagtccccagagcctccaagggaaaacgctgtcacaagatgaaggtagaggcacattatacaaatacagacctgaagaagtagatattgatgccaagttaagccgattatgtgaacaagataaagtggtgcatgctctggaagagaaacttcagcaactccacaaggagaaatacacgcttgagcaagctttgctatcagccagccaagagatagaaatgcatgcagataacccagcagccattcagacagtggtgttacaaagggatgatttacaaaatggactgcttagtacgtgtcgagaactttctcgagccactgccgaattggaacgagcatggagagaatatgataagttagaatacgatgtaactgttaccaggaaccagatgcaagagcagctggatcaccttggtgaagttcagacggaatcagcaggaattcagcgtgcacagattcagaaagaactttggcgaattcaggatgtcatggaagggctgagtaaacataagcagcaaagaggtactacagaaataggtatgataggatcaaagcctttctcaacagttaagtacaaaaatgagggtccagattatagactctacaagagtgaaccagagttaacaacagtggcagaagttgatgaatctaatggagaagaaaaatcagaacctgtttcagagatagaaacttcagttgttaaaggttcccactttcctgttggagtagtccctccaagagcaaaatcaccaacacccgaatcttcgacaatagcttcctatgtaaccttgaggaaaactaagaagatgatggatctaagaacggaaagaccaagaagtgcagtggaacagctctgtttggctgaaagtactcgaccaaggatgactgtggaagagcaaatggaaagaataagaagacatcaacaagcgtgcctgagggagaagaaaaaagggttaaatgttatcggtgcttcagaccagtcacccttacaaagcccttcaaatttaagggataatccatttaggactactcagactcgaaggagggatgataaggaactggacactgccattagagaaaatgatgtaaagccagaccatgaaactcctgcaacagaaattgttcaactaaaagaaaccgaaccccaaaatgtggacttcagcaaagagttaaaaaaaactgaaaacatttcatatgaaatgctttttgaacctgagccaaatggagtaaattctgtggaaatgatggataaagaaagaaacaaagacaaaatgcctgaggatgttacattcagccctcaagatgaaacacagaccgcaaatcataaaccagaagagcatcctgaagaaaatacaaagaacagtgttgacgaacaggaagaaactgttatttcttacgaatcaactcctgaggtttctagaggaaatcaaacaatggcagtgaaaagtctgtccccatctcctgagtcctcggcatcgccagttccatccactcagccgcagctcacagaaggatcacatttcatgtgtgtgtagtcttagaagaactatactgacttctgttgaaaccattcaaagctaaagacatggaccttcagcagtgtaagaagatattgtacagtatattttaaatctatgaaattcatagttctgatgcttttggtcacagagcatcattttatcacttctggaaaatgtttattccaaaacagctttaatggcccatatgtacacttcgtaatctcaaggttattattctgacaccagcttgctgctatgatttcagagcacataagtaaaggtgctttttaatgtgcagtctatttccagagcttacttagttgctgatttccagatttcgatgtttcttaagtctaggtgaatttatatatatatttttttgcttttcattttctaaagttagttattatttccattgaagcttgttttctttttttcttcccattttagctactgcagtgcttttgtttcacacttgatttgtaaaaattttatatatatgtatttaaaatgtgccattttattgctaagtgaagtatgtcctgttttctgctataattctttctcggtcagattgcaatgtcagcagttactgccacactcctgtcagcttaaacacaaatgttactgcttatcttttcttaaaaaaaaaaaaaacaaagtgtaggtattttgaagtactgggcttatatttcattggaatacatgtgtacagcaataagcaggtttccaaatccggtacttagtttgtgtacaaatgtaattatgttcattgtgtatatattatacaatgagcacatgtaatgtattaaaggctacttactattgtttaaatgcaaatgttcatatctcatttctttttttatcatgttaaataaatgttgatgttcttaaaaaaaaaaaaaaaaaaa

SEQ ID NO: 942 - protein, 1116 aa, Homo sapiens
MAADLNLEWISLPRSWTYGITRGGRVFFINEEAKSTTWLHPVTGEAVVTGHRRQSTDLPTGWEEAYTFEGARYYINHNERKVTCKHPVTGQPSQDNCIFVVNEQTVATMTSEEKKERPISMINEASNYNVTSDYAVHPMSPVGRTSRASKKVHNFGKRSNSIKRNPNAPVVRRGWLYKQDSTGMKLWKKRWFVLSDLCLFYYRDEKEEGILGSILLPSFQIALLTSEDHINRKYAFKAAHPNMRTYYFCTDTGKEMELWMKAMLDAALVQTEPVKRVDKITSENAPTKETNNIPNHRVLIKPEIQNNQKNKEMSKIEEKKALEAEKYGFQKDGQDRPLTKINSVKLNSLPSEYESGSACPAQTVHYRPINLSSSENKIVNVSLADLRGGNRPNTGPLYTEADRVIQRTNSMQQLEQWIKIQKGRGHEEETRGVISYQTLPRNMPSHRAQIMARYPEGYRTLPRNSKTRPESICSVTPSTHDKTLGPGAEEKRRSMRDDTMWQLYEWQQRQFYNKQSTLPRHSTLSSPKTMVNISDQTMHSIPTSPSHGSIAAYQGYSPQRTYRSEVSSPIQRGDVTIDRRHRAHHPKHVYVPDRRSVPAGLTLQSVSPQSLQGKTLSQDEGRGTLYKYRPEEVDIDAKLSRLCEQDKVVHALEEKLQQLHKEKYTLEQALLSASQEIEMHADNPAAIQTVVLQRDDLQNGLLSTCRELSRATAELERAWREYDKLEYDVTVTRNQMQEQLDHLGEVQTESAGIQRAQIQKELWRIQDVMEGLSKHKQQRGTTEIGMIGSKPFSTVKYKNEGPDYRLYKSEPELTTVAEVDESNGEEKSEPVSEIETSVVKGSHFPVGVVPPRAKSPTPESSTIASYVTLRKTKKMMDLRTERPRSAVEQLCLAESTRPRMTVEEQMERIRRHQQACLREKKKGLNVIGASDQSPLQSPSNLRDNPFRTTQTRRRDDKELDTAIRENDVKPDHETPATEIVQLKETEPQNVDFSKELKKTENISYEMLFEPEPNGVNSVEMMDKERNKDKMPEDVTFSPQDETQTANHKPEEHPEENTKNSVDEQEETVISYESTPEVSRGNQTMAVKSLSPSPESSASPVPSTQPQLTEGSHFMCV

SEQ ID NO: 943 - DNA, 4072 bp, Homo sapiens
catggccgccgctatcaccgacatggccgacctggaggagctctcccgcctgagccctctgccccccggcagcccgggttcggcggcgcggggccgggctgagccccccgaggaggaggaggaagaggaggaggaggaagaggaggcggaggccgaggcggtggcggcgctgctgctgaacggcggcagcggtgggggcggcggaggcggcggcggaggagtggggggcggcgaggcagagacgatgtcggagccgagccccgagagcgccagccaggccggggaggacgaagacgaggaggaggacgacgaggaggaggaagatgagagcagcagcagcggcgggggtgaggaggagagtagcgccgagagcctggtgggcagcagcggcgggagcagcagcgacgagacccgctcgttgagccccggcgccgccagcagcagcagcggggatggggacggcaaggagggcctggaggagcccaagggaccgcggggcagccagggcggcggcgggggcggcagcagtagcagcagcgtagtctccagcggcggcgacgagggctacgggactgggggaggcggaagcagcgcgacctccgggggccggcggggcagcttggagatgtcgtcggatggggaacccctgagccgcatggactcggaggacagcataagcagtactataatggatgtagacagcacaatttccagtgggcgttcaactccagcaatgatgaatggacaaggaagcactacttcttcaagcaaaaatattgcctataattgttgttgggaccagtgccaggcttgcttcaactctagcccagatctggcagatcacatccgttccatacatgtagatggtcagcgaggaggggtatttgtttgcttatggaaaggttgtaaagtatataacactccatctaccagtcaaagttggttacaaaggcatatgctgacacacagtggagacaaacctttcaagtgtgttgttggtggctgcaatgccagctttgcttctcagggagggctagctcgtcatgtacccacacacttcagtcagcagaactcctcaaaagtttctagccagccaaaggccaaagaagaatctccttctaaagctggaatgaacaaaaggaggaaattaaagaacaaaagacgacgctcattaccacggccacatgatttcttcgatgcacaaacactggatgcgataagacatcgagccatatgctttaacctctcagctcatatagaaagtttagggaagggacacagtgttgtttttcatagtactgtaatagctaagagaaaagaagattctgggaagatcaaacttttgcttcattggatgcctgaagacattctgcctgatgtgtgggtgaatgaaagtgaacgacatcagttaaaaactaaagtagttcatttatcaaagctacccaaagatactgccttgcttttggacccaaacatatacagaacaatgccgcagaagaggttgaagaggtaaaaaataaataaatacataaaaagcaaacaagcggggacacctgcagtcttagtcactgacaatgggtttagggaaagttgcacattagagtcaaccccttcttttttttttttttttttttaaatccagtatttaggataatatttatgcttagtgtaaacattctgtgaatgaagtagactcttcggtggaatatattaatatattactgtatatccacattttcatggaatggtactgtgggagactgagcaaacactcttttggcaacttagtagaacagcttcttaaaggctttgcatgcttgctgctttaagctgcttttttttttcttttcttccctttagtgatttcagtagtttatattggaaagaaaaacaattacaacatgtgcccttacaaataccaaaagcactgtaaggatatttgtcttgacagtgtttattgatttgaagtcatattaggaaatatttagacaatgaaaattatcaagagataatttacctttcaattatgataaatagatgtgattggttgccatttgtgttcttttgcagaactctgataagaaaagtgttcaatttgtatttaagcaaacagtgaacgacgtttgcaatcaactaaaaattcgtctatcgaattagggctgaaaattactgttaaagagtgttgcagtatgtctggtggctcccttttcaggactagggctttctcatggagtacagtatgttaatatttacctatataactaatctgttaacggtttttgaaaaacctttcaaattatttgaataatcttcatattttcatttaacctatatgactctaattttttttctgaggaaatcatttggtttttgagttgttttttcttaatgtaagaaaaattgtattttttttacaagtatcttcaaactgaatcttttatgcaccaaagttggtcttgaaaaggaaaataaaatcactttcttgcttggtaagcaagaagccatatcgattttttttaacttacagaaatggaaatatgtgtaacttgttagtattgtattaaacaaatgttgcatagagataatagaacattgcttgtaaataattcagcagatttgtaatatatttttatattttgaaatgtactgtagatgttttctagaggcatgaaagttaaatgtatatattatggtagaaataatattgaaggatattgtacttcactagtgctgccagaggaattgttaataaaagcaccttctttaacaataaatgtctttcacagacttaagggactatgtactactgttaatatctctaagaacaaaacacattgaacatccttccagaaagtctttgagggaggacctatacccataatagaattatggcactcatttctgacagtgatcaagaaatcagttatttccttactgttggaaggacattgtaaagtatgtggttatatgcagtgaaactgcagaaaatactcctggttgaggagttttcactttactacagtgatataaaaaccagcagtttttacactaaattttttaaagaaatattagacaaaaatatagaattaaaacctttggttccaaaatgggaaaggttccacgatacataaatcatttctcatttgctttaaaaaatttaaaagtgtaaaaattatgagagactttattcgttaacaatgggggtaaagagctatatacatgaaaatgagtcttataaaattaagtgaagtgcaaataaaagcactgctactataagacattctggaatggttgtttaataagggtattatccatttgatctatagcaatgtgattttatttttaaaaagaaaagcagtgtgttttctttttttgttgttttcttttgcttaagcacttcatcaattgctttattctgtatctgcgaagtaatctgcaatctcttttgttctttttaaaatttgatttgttataaaattgccaaatagaagtgtttcagatacatagtttgtacctgtatttttattttattgcctcatgttcttgtaagtcattcttaattgaccaatgattgtagaccttgcttgagtattttttctaataaaacaaagcaaatcacatttagcttcaaattgtaacaattcaattgaattttaaaatgacacctgaaaagatacatctgatattttctatatagagcacagtaaataagttttttcattgtgtagaaatacttagatgtcaaaaccagatttcgtgatccttgattaacttctgagtactcaatcaatcataatccttttgctgcttatctgatgttggtttgatactgttaacacaccaaaaagaatatggaattgaaatgagctagctttataacttgtatgtatacatatatacacataacatccaattatgactgggtaataagtgtgaaaattttaatttgtggttttcatttattaatgtctgcccatctgtattgttgctcctaccttcaaatatgacacctgaaataataagtctgttgtccagaatttaaaaaaaaaaaaaaaaaaaaaaaaaaaaaaaa

SEQ ID NO: 944 - protein, 295 aa, Homo sapiens
MSSDGEPLSRMDSEDSISSTIMDVDSTISSGRSTPAMMNGQGSTTSSSKNIAYNCCWDQCQACFNSSPDLADHIRSIHVDGQRGGVFVCLWKGCKVYNTPSTSQSWLQRHMLTHSGDKPFKCVVGGCNASFASQGGLARHVPTHFSQQNSSKVSSQPKAKEESPSKAGMNKRRKLKNKRRRSLPRPHDFFDAQTLDAIRHRAICFNLSAHIESLGKGHSVVFHSTVIAKRKEDSGKIKLLLHWMPEDILPDVWVNESERHQLKTKVVHLSKLPKDTALLLDPNIYRTMPQKRLKR

SEQ ID NO: 945 - DNA, 4333 bp, Homo sapiens
gagaaaatcaattggtttagaaggtttggactcacttgacaggttcagttggagacgatcataggtggctgctgtgacaaagggaaattgtgcttttccagcatgcttactgaccctgatttacctcaggagtttgaaaggatgtcttccaagcgaccagcctctccgtatggggaagcagatggagaggtagccatggtgacaagcagacagaaagtggaagaagaggagagtgacgggctcccagcctttcaccttcccttgcatgtgagttttcccaacaagcctcactctgaggaatttcagccagtttctctgctgacgcaagagacttgtggccataggactcccacttctcagcacaatacaatggaagttgatggcaataaagttatgtcttcatttgccccacacaactcatctacctcacctcagaaggcagaagaaggtgggcgacagagtggcgagtccttgtctagtacagccctgggaactcctgaacggcgcaagggcagtttagctgatgttgttgacaccttgaagcagaggaaaatggaagagctcatcaaaaacgagccggaagaaacccccagtattgaaaaactactctcaaaggactggaaagacaagcttcttgcaatgggatcggggaactttggcgaaataaaagggactcccgagagcttagctgagaaagaaaggcaactcatgggtatgatcaaccagctgaccagcctccgagagcagctgttggctgcccacgatgagcagaagaaactagctgcctctcagattgagaaacagcgtcagcaaatggagctggccaagcagcaacaagaacaaattgcaagacagcagcagcagcttctacagcaacaacacaaaatcaatttgctccagcaacagatccaggttcaaggtcagctgccgccattaatgattcccgtattccctcctgatcaacggacactggctgcagctgcccagcaaggattcctcctccctccaggcttcagctataaggctggatgtagtgacccttaccctgttcagctgatcccaactaccatggcagctgctgccgcagcaacaccaggcttaggcccactccaactgcagcagttatatgctgcccagctagctgcaatgcaggtatctccaggagggaagctgccaggcataccccaaggcaaccttggtgctgctgtatctcctaccagcattcacacagacaagagcacaaacagcccaccacccaaaagcaaggatgaagtggcacagccactgaacctatcagctaaacccaagacctctgatggcaaatcacccacatcacccacctctccccatatgccagctctgagaataaacagtggggcaggccccctcaaagcctctgtcccagcagcgttagctagtccttcagccagagttagcacaataggttacttaaatgaccatgatgctgtcaccaaggcaatccaagaagctcggcaaatgaaggagcaactccgacgggaacaacaggtgcttgatgggaaggtggctgttgtgaatagtctgggtctcaataactgccgaacagaaaaggaaaaaacaacactggagagtctgactcagcaactggcagttaaacagaatgaagaaggaaaatttagccatgcaatgatggatttcaatctgagtggagattctgatggaagtgctggagtctcagagtcaagaatttatagggaatcccgagggcgtggtagcaatgaaccccacataaagcgtccaatgaatgccttcatggtgtgggctaaagatgaacggagaaagatccttcaagcctttcctgacatgcacaactccaacatcagcaagatattgggatctcgctggaaagctatgacaaacctagagaaacagccatattatgaggagcaagcccgtctcagcaagcagcacctggagaagtaccctgactataagtacaagcccaggccaaagcgcacctgcctggtggatggcaaaaagctgcgcattggtgaatacaaggcaatcatgcgcaacaggcggcaggaaatgcggcagtacttcaatgttgggcaacaagcacagatccccattgccactgctggtgttgtgtaccctggagccatcgccatggctgggatgccctcccctcacctgccctcggagcactcaagcgtgtctagcagcccagagcctgggatgcctgttatccagagcacttacggtgtgaaaggagaggagccacatatcaaagaagagatacaggccgaggacatcaatggagaaatttatgatgagtacgacgaggaagaggatgatccagatgtagattatgggagtgacagtgaaaaccatattgcaggacaagccaactgataagggtcaaaagattgttgtgaccttaggacttaaagaagccctaactggttcatccttaccagtggccaagcacattaactttctcatacactgactgttactttaactgttagtcttaaatagttgggacatcagctgactaatagacctcagcctcaaaaggcttggaaagaaaaaacaaatacaacaagcaaacaacaatatcaacaacaagagattgaaataagctatgggtaaaataatgccagtaattcagctgctacatccaagcactgaagtcttacccgtcaacttttttttttttttaaataaactttatggctgtttgttctacaatgttctagaaattctcactcaggtacacagtgccaacaagtggcttgtgaatgtgttttgttgttttgtgctacaatttttaaaaagaaaaaagttttgttttgttttttggggtttctgggttttttccttttctttttctttcctttcattttttttctttgtaatgcacctgacagaaaaaaaagaaaaatgaatttctctttacttctctccaccttctccatctctctactttaaagatggaagtctgtgcatgaggggaaagagggaaaaagagcctgtttttaacttccttgctatccaccacaaaataagcaattattttctttagaggactttatctattgcacaccacactacatctttgagcaagtgccaaatttgtactgaagtgttgaccaagttcattttttctctttactttttccttttccttcttaagttaggacagtgttaaatcttagacaatcccttgaaaaacctgaaataccagcagctggtgagatttgacttttttttttaatggaaactgtaggtgctgttctcaggtgaaaagagagagagagagagagacataagaaatttagagaaaaatattttctgatcttggatttttgtgtgtatgtatgtatgtgattatggtactaataataggaataacgttggaccattgtgagttaaacccacatctggggatgaaatcccacatcctcccaagtgactggtctagaaataatcttgaccttgactttgcacttcaaatgacaacttaaccaagtatagggctcagaaattatatttttaaatgtctgattattattggatggatcaggtggccctgtgtaatagaggtgtgcatgtataacatggaagctactagcaaactgctcccagatgtcctttctccctggtcagttggttccattaacgtttgctacttagtgatttttgtttttcctgttgatattttgagcaaaacaatcattgttttcattgaatatatttggccattttttcagacaaatagaattagcttatttcttcaacattccatcctttcccgatcaggaaatgaaactgatgattttataaggtatttttcacccctccatgaagtgaggtggaggcctttagcatttcagaagtgtgggccatatgtagttcatgccataaaaagtaggatttaattaaaagtcattgcagcccaataaaatggagcctggctgcacccagggatccttgccactgctcttcccttgctgtcagattaatccactgaagtccaactttggttcaagcagagtatttgcaaagagcaacaactgaatgtgatgggactgcttatgtagattttgccagccaaatgccaaggcagttgtagggcctgtacaaataaatgcaaaatcatttcaagtcaattgccattatttgtattgaagtatcagatagatagtaaatactgcaactagtagcttgatgtgctatagttttcactccagtcatcattttcctatctcaccccccgaaacaccaccctaaagttggatttttacatataaataaaaaaagaatcccttttaaaaaaaaaaaaaaaaaa

SEQ ID NO: 946 - protein, 763 aa, Homo sapiens [sequence omitted]

SEQ ID NO: 947 - DNA, 4563 bp, Homo sapiens
gtgaaaaaggcgagccaccaaaacccatctccagtctcctcccgggggcccccagcccgcctctgtgccactttgcatcccacgccggaggaggcattaacgagaccgggtaaggctttttaaacggtccaaggtgtagagccatacttcaggaggatcctcagaagttttggacaagcctccccaaatgtggcaggtgctgtgctggccattggtgacccaaagatgatgaaaaatatgttcctgcccacaaggagttagcgacctactgggctttcctcttgctgatgacatgattcctgtttgaatctgttgacaagattctgaaagctgaacagagaattctggcactgcactgggtaggaaaaaggatgtcttccaagcgaccagcctctccgtatggggaagcagatggagaggtagccatggtgacaagcagacagaaagtggaagaagaggagagtgacgggctcccagcctttcaccttcccttgcatgtgagttttcccaacaagcctcactctgaggaatttcagccagtttctctgctgacgcaagagacttgtggccataggactcccacttctcagcacaatacaatggaagttgatggcaataaagttatgtcttcatttgccccacacaactcatctacctcacctcagaaggcagaagaaggtgggcgacagagtggcgagtccttgtctagtacagccctgggaactcctgaacggcgcaagggcagtttagctgatgttgttgacaccttgaagcagaggaaaatggaagagctcatcaaaaacgagccggaagaaacccccagtattgaaaaactactctcaaaggactggaaagacaagcttcttgcaatgggatcggggaactttggcgaaataaaagggactcccgagagcttagctgagaaagaaaggcaactcatgggtatgatcaaccagctgaccagcctccgagagcagctgttggctgcccacgatgagcagaagaaactagctgcctctcagattgagaaacagcgtcagcaaatggagctggccaagcagcaacaagaacaaattgcaagacagcagcagcagcttctacagcaacaacacaaaatcaatttgctccagcaacagatccaggttcaaggtcagctgccgccattaatgattcccgtattccctcctgatcaacggacactggctgcagctgcccagcaaggattcctcctccctccaggcttcagctataaggctggatgtagtgacccttaccctgttcagctgatcccaactaccatggcagctgctgccgcagcaacaccaggcttaggcccactccaactgcagcagttatatgctgcccagctagctgcaatgcaggtatctccaggagggaagctgccaggcataccccaaggcaaccttggtgctgctgtatctcctaccagcattcacacagacaagagcacaaacagcccaccacccaaaagcaaggatgaagtggcacagccactgaacctatcagctaaacccaagacctctgatggcaaatcacccacatcacccacctctccccatatgccagctctgagaataaacagtggggcaggccccctcaaagcctctgtcccagcagcgttagctagtccttcagccagagttagcacaataggttacttaaatgaccatgatgctgtcaccaaggcaatccaagaagctcggcaaatgaaggagcaactccgacgggaacaacaggtgcttgatgggaaggtggctgttgtgaatagtctgggtctcaataactgccgaacagaaaaggaaaaaacaacactggagagtctgactcagcaactggcagttaaacagaatgaagaaggaaaatttagccatgcaatgatggatttcaatctgagtggagattctgatggaagtgctggagtctcagagtcaagaatttatagggaatcccgagggcgtggtagcaatgaaccccacataaagcgtccaatgaatgccttcatggtgtgggctaaagatgaacggagaaagatccttcaagcctttcctgacatgcacaactccaacatcagcaagatattgggatctcgctggaaagctatgacaaacctagagaaacagccatattatgaggagcaagcccgtctcagcaagcagcacctggagaagtaccctgactataagtacaagcccaggccaaagcgcacctgcctggtggatggcaaaaagctgcgcattggtgaatacaaggcaatcatgcgcaacaggcggcaggaaatgcggcagtacttcaatgttgggcaacaagcacagatccccattgccactgctggtgttgtgtaccctggagccatcgccatggctgggatgccctcccctcacctgccctcggagcactcaagcgtgtctagcagcccagagcctgggatgcctgttatccagagcacttacggtgtgaaaggagaggagccacatatcaaagaagagatacaggccgaggacatcaatggagaaatttatgatgagtacgacgaggaagaggatgatccagatgtagattatgggagtgacagtgaaaaccatattgcaggacaagccaactgataagggtcaaaagattgttgtgaccttaggacttaaagaagccctaactggttcatccttaccagtggccaagcacattaactttctcatacactgactgttactttaactgttagtcttaaatagttgggacatcagctgactaatagacctcagcctcaaaaggcttggaaagaaaaaacaaatacaacaagcaaacaacaatatcaacaacaagagattgaaataagctatgggtaaaataatgccagtaattcagctgctacatccaagcactgaagtcttacccgtcaacttttttttttttttaaataaactttatggctgtttgttctacaatgttctagaaattctcactcaggtacacagtgccaacaagtggcttgtgaatgtgttttgttgttttgtgctacaatttttaaaaagaaaaaagttttgttttgttttttggggtttctgggttttttccttttctttttctttcctttcattttttttctttgtaatgcacctgacagaaaaaaaagaaaaatgaatttctctttacttctctccaccttctccatctctctactttaaagatggaagtctgtgcatgaggggaaagagggaaaaagagcctgtttttaacttccttgctatccaccacaaaataagcaattattttctttagaggactttatctattgcacaccacactacatctttgagcaagtgccaaatttgtactgaagtgttgaccaagttcattttttctctttactttttccttttccttcttaagttaggacagtgttaaatcttagacaatcccttgaaaaacctgaaataccagcagctggtgagatttgacttttttttttaatggaaactgtaggtgctgttctcaggtgaaaagagagagagagagagagacataagaaatttagagaaaaatattttctgatcttggatttttgtgtgtatgtatgtatgtgattatggtactaataataggaataacgttggaccattgtgagttaaacccacatctggggatgaaatcccacatcctcccaagtgactggtctagaaataatcttgaccttgactttgcacttcaaatgacaacttaaccaagtatagggctcagaaattatatttttaaatgtctgattattattggatggatcaggtggccctgtgtaatagaggtgtgcatgtataacatggaagctactagcaaactgctcccagatgtcctttctccctggtcagttggttccattaacgtttgctacttagtgatttttgtttttcctgttgatattttgagcaaaacaatcattgttttcattgaatatatttggccattttttcagacaaatagaattagcttatttcttcaacattccatcctttcccgatcaggaaatgaaactgatgattttataaggtatttttcacccctccatgaagtgaggtggaggcctttagcatttcagaagtgtgggccatatgtagttcatgccataaaaagtaggatttaattaaaagtcattgcagcccaataaaatggagcctggctgcacccagggatccttgccactgctcttcccttgctgtcagattaatccactgaagtccaactttggttcaagcagagtatttgcaaagagcaacaactgaatgtgatgggactgcttatgtagattttgccagccaaatgccaaggcagttgtagggcctgtacaaataaatgcaaaatcatttcaagtcaattgccattatttgtattgaagtatcagatagatagtaaatactgcaactagtagcttgatgtgctatagttttcactccagtcatcattttcctatctcaccccccgaaacaccaccctaaagttggatttttacatataaataaaaaaagaatcccttttaaaaaaaaaaaaaaaaaa

SEQ ID NO: 948 - protein, 750 aa, Homo sapiens
MSSKRPASPYGEADGEVAMVTSRQKVEEEESDGLPAFHLPLHVSFPNKPHSEEFQPVSLLTQETCGHRTPTSQHNTMEVDGNKVMSSFAPHNSSTSPQKAEEGGRQSGESLSSTALGTPERRKGSLADVVDTLKQRKMEELIKNEPEETPSIEKLLSKDWKDKLLAMGSGNFGEIKGTPESLAEKERQLMGMINQLTSLREQLLAAHDEQKKLAASQIEKQRQQMELAKQQQEQIARQQQQLLQQQHKINLLQQQIQVQGQLPPLMIPVFPPDQRTLAAAAQQGFLLPPGFSYKAGCSDPYPVQLIPTTMAAAAAATPGLGPLQLQQLYAAQLAAMQVSPGGKLPGIPQGNLGAAVSPTSIHTDKSTNSPPPKSKDEVAQPLNLSAKPKTSDGKSPTSPTSPHMPALRINSGAGPLKASVPAALASPSARVSTIGYLNDHDAVTKAIQEARQMKEQLRREQQVLDGKVAVVNSLGLNNCRTEKEKTTLESLTQQLAVKQNEEGKFSHAMMDFNLSGDSDGSAGVSESRIYRESRGRGSNEPHIKRPMNAFMVWAKDERRKILQAFPDMHNSNISKILGSRWKAMTNLEKQPYYEEQARLSKQHLEKYPDYKYKPRPKRTCLVDGKKLRIGEYKAIMRNRRQEMRQYFNVGQQAQIPIATAGVVYPGAIAMAGMPSPHLPSEHSSVSSSPEPGMPVIQSTYGVKGEEPHIKEEIQAEDINGEIYDEYDEEEDDPDVDYGSDSENHIAGQAN

SEQ ID NO: 949 - DNA, 3095 bp, Homo sapiens
atttgtgccataggagctgtgcatgcatgatgaagtggcacagccactgaacctatcagctaaacccaagacctctgatggcaaatcacccacatcacccacctctccccatatgccagctctgagaataaacagtggggcaggccccctcaaagcctctgtcccagcagcgttagctagtccttcagccagagttagcacaataggttacttaaatgaccatgatgctgtcaccaaggcaatccaagaagctcggcaaatgaaggagcaactccgacgggaacaacaggtgcttgatgggaaggtggctgttgtgaatagtctgggtctcaataactgccgaacagaaaaggaaaaaacaacactggagagtctgactcagcaactggcagttaaacagaatgaagaaggaaaatttagccatgcaatgatggatttcaatctgagtggagattctgatggaagtgctggagtctcagagtcaagaatttatagggaatcccgagggcgtggtagcaatgaaccccacataaagcgtccaatgaatgccttcatggtgtgggctaaagatgaacggagaaagatccttcaagcctttcctgacatgcacaactccaacatcagcaagatattgggatctcgctggaaagctatgacaaacctagagaaacagccatattatgaggagcaagcccgtctcagcaagcagcacctggagaagtaccctgactataagtacaagcccaggccaaagcgcacctgcctggtggatggcaaaaagctgcgcattggtgaatacaaggcaatcatgcgcaacaggcggcaggaaatgcggcagtacttcaatgttgggcaacaagcacagatccccattgccactgctggtgttgtgtaccctggagccatcgccatggctgggatgccctcccctcacctgccctcggagcactcaagcgtgtctagcagcccagagcctgggatgcctgttatccagagcacttacggtgtgaaaggagaggagccacatatcaaagaagagatacaggccgaggacatcaatggagaaatttatgatgagtacgacgaggaagaggatgatccagatgtagattatgggagtgacagtgaaaaccatattgcaggacaagccaactgataagggtcaaaagattgttgtgaccttaggacttaaagaagccctaactggttcatccttaccagtggccaagcacattaactttctcatacactgactgttactttaactgttagtcttaaatagttgggacatcagctgactaatagacctcagcctcaaaaggcttggaaagaaaaaacaaatacaacaagcaaacaacaatatcaacaacaagagattgaaataagctatgggtaaaataatgccagtaattcagctgctacatccaagcactgaagtcttacccgtcaacttttttttttttttaaataaactttatggctgtttgttctacaatgttctagaaattctcactcaggtacacagtgccaacaagtggcttgtgaatgtgttttgttgttttgtgctacaatttttaaaaagaaaaaagttttgttttgttttttggggtttctgggttttttccttttctttttctttcctttcattttttttctttgtaatgcacctgacagaaaaaaaagaaaaatgaatttctctttacttctctccaccttctccatctctctactttaaagatggaagtctgtgcatgaggggaaagagggaaaaagagcctgtttttaacttccttgctatccaccacaaaataagcaattattttctttagaggactttatctattgcacaccacactacatctttgagcaagtgccaaatttgtactgaagtgttgaccaagttcattttttctctttactttttccttttccttcttaagttaggacagtgttaaatcttagacaatcccttgaaaaacctgaaataccagcagctggtgagatttgacttttttttttaatggaaactgtaggtgctgttctcaggtgaaaagagagagagagagagagacataagaaatttagagaaaaatattttctgatcttggatttttgtgtgtatgtatgtatgtgattatggtactaataataggaataacgttggaccattgtgagttaaacccacatctggggatgaaatcccacatcctcccaagtgactggtctagaaataatcttgaccttgactttgcacttcaaatgacaacttaaccaagtatagggctcagaaattatatttttaaatgtctgattattattggatggatcaggtggccctgtgtaatagaggtgtgcatgtataacatggaagctactagcaaactgctcccagatgtcctttctccctggtcagttggttccattaacgtttgctacttagtgatttttgtttttcctgttgatattttgagcaaaacaatcattgttttcattgaatatatttggccattttttcagacaaatagaattagcttatttcttcaacattccatcctttcccgatcaggaaatgaaactgatgattttataaggtatttttcacccctccatgaagtgaggtggaggcctttagcatttcagaagtgtgggccatatgtagttcatgccataaaaagtaggatttaattaaaagtcattgcagcccaataaaatggagcctggctgcacccagggatccttgccactgctcttcccttgctgtcagattaatccactgaagtccaactttggttcaagcagagtatttgcaaagagcaacaactgaatgtgatgggactgcttatgtagattttgccagccaaatgccaaggcagttgtagggcctgtacaaataaatgcaaaatcatttcaagtcaattgccattatttgtattgaagtatcagatagatagtaaatactgcaactagtagcttgatgtgctatagttttcactccagtcatcattttcctatctcaccccccgaaacaccaccctaaagttggatttttacatataaataaaaaaagaatcccttttaaaaaaaaaaaaaaaaaa

SEQ ID NO: 950 - protein, 377 aa, Homo sapiens
MHDEVAQPLNLSAKPKTSDGKSPTSPTSPHMPALRINSGAGPLKASVPAALASPSARVSTIGYLNDHDAVTKAIQEARQMKEQLRREQQVLDGKVAVVNSLGLNNCRTEKEKTTLESLTQQLAVKQNEEGKFSHAMMDFNLSGDSDGSAGVSESRIYRESRGRGSNEPHIKRPMNAFMVWAKDERRKILQAFPDMHNSNISKILGSRWKAMTNLEKQPYYEEQARLSKQHLEKYPDYKYKPRPKRTCLVDGKKLRIGEYKAIMRNRRQEMRQYFNVGQQAQIPIATAGVVYPGAIAMAGMPSPHLPSEHSSVSSSPEPGMPVIQSTYGVKGEEPHIKEEIQAEDINGEIYDEYDEEEDDPDVDYGSDSENHIAGQAN

SEQ ID NO: 951 - DNA, 3287 bp, Homo sapiens
gactccatgccgggtctctagttccagcgcgcctcggctcgctcgcgcggcgggagagttggcgcaaacctcgccgcagccgcagcctcctcgcgcgcctctccttcccctacgccctccgctcccgccatggggccaacgcggggctcctaagagttgccggctctcagcggcgcaatctccagccaaagtcaccgcgggcggactatggcttagggcgccagaggggttagaggtacgggaagaggaaaagacggctaactgggaaaaaaagagaaaacgaaagaaaagccaaacgatgagtttccacaaggaggacggagtgaacagtctgtgccagaaggctctgcacatcgtcaccgagctgtgcttcgccggccaggtggagtgggagaagtgctcgggcatcttccctcgggacaggggcagccagggcggaagcagcacagatatttcagtcagcctgttagctgtcgttgtcagcttttgtggactggccttgttggttgtctcactttttgtcttctggaagctgtgttggccatgctggaaaagcaaacctgtgacttccaacatcactacgcttccacagagcatttcaagtgctcctactgaagtttttgagactgaagagaaaaaagaaattaaggaaaatgaaaagccagccgtaaaagctattgagcctgcaataaaaatcagccacacttcccctgacatcccagcagaagtccaaactgctttaaaagaacatttaattaaacatgcacgtgtgcaaagacaaattactgagcctacgtcatcaacccgccacagttccttccgaagacacctgccgaggcaaatgcaggtttccagtgttgattttagcatgggcacagaacctgttttacaacgaggagaaacaacaaccagcattgggaggataaagccagaactctacaaacagaaatcagttgactctgagggcaaccaaaacgaagatgtcaaaatctgtgggaaacttaactttaccctccagtatgattatgaaaatgaacttctagttgttaaaattatcaaagctttagatctccctgctaaagacttcacaggaacttctgacccttatgtgaagatgtatcttcttccagataggaaaaagaaatttcagacccgcgtgcacagaaagactttaaatcctctatttgatgaaacttttcaatttcctgtggcatatgatcaactaagcaaccgaaaactacatttcagtgtgtatgattttgacagattttctagacatgacatgattggggaagtgattcttgataatttgtttgaagtctctgatctctccagggaagccacagtatggaaagatattcactgtgctaccacagaaagtatagacctgggtgaaatcatgttttccctttgttacctaccgacggctgggcgtatgacattgacagtcattaagtgcagaaatctgaaggcgatggatattactggctcatcagatccttatgtcaaagtgtccctgatgtgtgaaggtcgaagattaaaaaagaggaaaacaactacaaagaaaaacactctaaaccctgtgtacaatgaggccattatttttgacatccctccagagaacgtggaccaggtcagcctctccattgcggtcatggattacgatagggtaggacacaatgaggtcataggagtgtgcagaacaggactggatgctgagggtcttgggcgagaccactggaatgaaatgctggcctatcatcgaaaaccaataacgcactggcacccattgctggagttacctggccgggcgaccagttttgatagtcaaggatcctgcccttctcctaaaccaccttccacaccataatgcctccaaaatgagaccatgatattaagcatctaggatcacgtgctcattgaatcagaaaaaaagtggaaggtttggtttcctcatttgaaatatatccgtactaatgaacaaacttgatgtgcacttttttatttgcttttattgttgattttttaactttgaacatcaatacattttacttgaatacatatagtccttagttgcataaggcattttatccttcgtatcaaatgcctgttagcacaaagagtgttttactatgttgtaattctttgcatatgaaatgtttttttaaacagttcatacttacctaaaattaaatatagtttatgctgctattgtataaagtagcacatgtcatatatgtatgggtttgattttgttatactgtgttcatttctagttgtgcaggtggttctgtataaacttaaaaggagattttgaacttaacttacacaacattaaatccttgcgcaatcaaattaatgttacttatctgataatacttttctttcattctcagaaaattactttcttggtgaggtttggctctgctaaactcaaaacttgtctctcaagcttgttcttcaaaatacacagacaaagctgtaaatttaaagaatcattttgaatataaatttaagaagtaatacttattggctgaaaaacggaggctgagccattgtggctaccattttacactgttttactgtaacattagctcaaatatctgttgcactgttcaactgatatttttaaaattctaataatcttcatctcaaatgtagcattagtatttctaagtgaacagaatcagaagttaatttttaagtgtttgtaaggttctcaagtactgtgacatgtatttttttgtgacgtgtattttttgtgacttgaagctatcatatagatcctgtatttctgatagaccatactaacagacaccaaaggaacaacaacactgtctgtgttcatcaccgtttagattgtacacagcaatggtgactcttaaacccagtcagaagctcatcattggaattcagtattttcttaaagaaaggatgatttattttcagcaacatatagaaatatactataaatattaataatacaacttcaatgcttaataataataaacaaattaattctaaaggcccaggcctccagtccttgcatgaaaggcatttgccttcataaggatcaaggttcaggccactacatgtaaaaactatgcaagtgtttttacaagacagaactttcttttaagtcaggtcaacatattttgtcccattttcaggccctgttggaaggtatctatactgaattaccccaaccttacttttaagatgtgtggtatagatagtatatatttcaagcttatttcaaaattggtggtttttttaaaaaaagaggc

SEQ ID NO: 952 - protein, 523 aa, Homo sapiens
MSFHKEDGVNSLCQKALHIVTELCFAGQVEWEKCSGIFPRDRGSQGGSSTDISVSLLAVVVSFCGLALLVVSLFVFWKLCWPCWKSKPVTSNITTLPQSISSAPTEVFETEEKKEIKENEKPAVKAIEPAIKISHTSPDIPAEVQTALKEHLIKHARVQRQITEPTSSTRHSSFRRHLPRQMQVSSVDFSMGTEPVLQRGETTTSIGRIKPELYKQKSVDSEGNQNEDVKICGKLNFTLQYDYENELLVVKIIKALDLPAKDFTGTSDPYVKMYLLPDRKKKFQTRVHRKTLNPLFDETFQFPVAYDQLSNRKLHFSVYDFDRFSRHDMIGEVILDNLFEVSDLSREATVWKDIHCATTESIDLGEIMFSLCYLPTAGRMTLTVIKCRNLKAMDITGSSDPYVKVSLMCEGRRLKKRKTTTKKNTLNPVYNEAIIFDIPPENVDQVSLSIAVMDYDRVGHNEVIGVCRTGLDAEGLGRDHWNEMLAYHRKPITHWHPLLELPGRATSFDSQGSCPSPKPPSTP

SEQ ID NO: 953 - DNA, 4268 bp, Homo sapiens
attatcctccttattgacaaacagagcggtcgcggcggcgactctcggcgtgcggtgatagccaagccatgggagacaagaagagccccaccaggccgaagcggcagccgaagccgtcctcggatgagggttactgggactgtagcgtctgcaccttccggaacagcgccgaggccttcaagtgcatgatgtgcgatgtgcggaagggcacctccacccgatccacattgtttgaagttattgtgagtgcctcgaggaccaaggaaccgttgaaatttccaatttcaggaagttccagtggatgcccatcaggaagattctcatgctgaacagaagggcaagagaggtggatctgtgagggaaaagacccaataggataactcaagttactggaaacctcgacctgtctcccagttggttgcacagcaggttactcagcagtttgtgcctcctacacagtcaaagaaagagaaaaaagataaagtagaaaaagaaaaaagtgaaaaggaaacaactagcaaaaagaatagccataagaaaaccaggccaagattgaaaaatgtggatcggagtagtgctcagcatttggaagttactgttggagatctgacagtcattattacagactttaaggagaaaacaaagtcaccgcctgcatctagtgctgcttctgcagatcaacacagtcaaagcggctctagctctgataacacagagagaggaatgtccaggtcatcttcacccagaggagaagcctcatcattgaatggagaatctcattaaagtttattttctccaatttcttagtcacttctgtcctaccatgcaaatacacagattatgccaagaggtaccacattttcatgacagatacattcatgcacaatccataatttgagttttacataaaatagaaatttgttagaatttgttagattttattgcaatgatgcctaccaaacatttccagacttaacattttggtctctgcagttaagtgccatgaaaatgtggttgaattattcattatgcagtgttattggtaagtgtattttcacttttagtttagtgaattctaacacataattcttgaattctctactattggcatgtaacgaatttaaattttttataacatagtgcaagctgcctaaatatgtattatttgagaattgtgaaacagatagttatatgtatacaagtcaaagaacaacttaactattgctgcaacaggtttttcttaatggttatcctcttaaatacacctgctggtacttggtgtggttaaataggaaaattgttattaaataaagaatttgtatgaacctttgccaatgtttttgacacgttttactaattattgttcctgaattatgtttctggttttatctattttttgaggtttttttgtttgcttatttttcaaaacattcatttattgtaatgtttactagcggactagtaaacaataaaacattgattatttagctttataattcaggtttagtgctattgtcattgaacactggtattttctgtatcatataaaacattaaaattcaaataattataagcatttggcaaaaacaagagaaaagaaacttgccatattttacaagctgcaattttagaaaagctttaacttaatgatagttttatcattgttttcttgtcccaaacttatccagggccatagaagtatgaatctaattaaaacagaaatgggaattattgcacagaaatgggaaataactaattttaaatcagtcaaattggcttcttattaaatacaataattcttatgaaaatcatagtaccctattttcagacacagctgccagtttacacatttctcagtatcctgaaaggaaaaaagtatagccccacttatactatgtaaaattaccaataaaatatttttatgactacagattttgcatttttgtttacaactatttaaagagttttatgttgtatttagaatttcaacctagaaaccacacagtacttaaattctcctggggtctcctgctttctcttaaccatttgcttaatatatatctacctaaaggagacttctgaattgtaaatgaacttaaaaatagaatgtggatgcaaaatatcacataagacatcatgataacatttgaagaaaaaataaaactgtagaccctaacagttgtgatatttggtggtttcatgtggtaatgtaattttctgtttaattacagtactttttacaggcacagtggtactgtcttttttgtaagatgctagttgtgaaatacaattaattgcatacagtaaaagtctgtgattaaaacatttatatacctcattctttagtgttgttaaatgaaaaattaaaatttgtgtttattataagatactttcaatggaataccagctaaccagatatgttcctttaaaacatgaatttttttgtcttattctgtttttaacatgtttcaaatgttttatacatttttggagatagtaaaaatttaaaaatgtaatagggaaaatatttaatttttaagtcaaaaactatgctttaaaggaattacatcttatgatcaaataactttcaggatgtattttaaatgagctgcaagagagaaaaatctgacaggagatgggattttacctgaatggagcatactcatatttctacataggtgggaagatactcatctttctacatagacgggaacacggtgtagcatggagattaagcgtgctaactgacacctcatgtttgaatcctgttgtagaatggaaatgagcttaaattacccaagcttactttccatctataaaacagggctaataatggtaatcacatctaatttatagggtttttgggaggattaagtcaatccgtgtaaaattcttaattatctgacacatactggtcactcagtaaatgtgagcttttaccattgttataggtaaaatcccattacaaaaatacaaaaatattttttgtaacagttattttcctgccctcttggatgacctaaagtaatagtgttttatagatttcactaaattttcagtgtaatatcagatgttttctctggatgcagaaagaccatctttccataattaaagaacctggtgggtgtgcactatgagattggagaaatgaattaagttgacttgaaattattttacttttattaatcacaggtatctcaacctgcctttgtttcaccctacttcaagtacacttccacaccaggaaaacagacccaaattccataaacagaactgacgttaaaatatgcgaaagattcagaacctaggtttagggtacatgtttttctctgtttcatgaacttacagtgtggtttgagcactgggttcttttagccaaattccatacaaaaagaatttggatgttttccagcatttattaccttactttgctataagtaagagtgaagataggccgggtgtgatggctcatgccagtaatcccagcactttgggctgaagcaggcagatattttgagcccaggaccagcctgggcaacatggtgaaagctcatctctatgaaaaaatttgaatatacatatatatatatatgtatatttaaaaagtgaatataatttgaggcacagaagaatattcttaaaaccttttgtattatacaatagaaataaaggttttatttttattaaatgctttcctaaaatgatagtggataatagacaaagtgaaaacatttaaaaaggaagagaaacttcagcctttctaagttgatagcatgtttattaacttttagataaagatccttatagactgaaagaatgtagcctctgcattaatggtaaatggtctagaagttttcgtttccactgaggcttccgccactcgcttttttaaacttcctgctatggtttggatatggtttgtcctcaccaaaactcatgctgaggcctgagtccccagtttgattgtgttggtaggtggtgcctttaagaggtgattaggtcattgagatggattaaaggctttctcatgaggctcagttagttctggaatggattcgctcttgcaggaatggatgaattctcacaagagtgggttgttatgaagtgaggatgcttcttgtgttctgttctctttgccctcctcagttcaccatctgctttccaccatgagttgaagcagcatgaggccctcatcagatgggctccctgatcttggactcctcagcctttggactcataagccaaaataaatctgttttctttataaa

SEQ ID NO: 954 - protein, 86 aa, Homo sapiens
MGDKKSPTRPKRQPKPSSDEGYWDCSVCTFRNSAEAFKCMMCDVRKGTSTRSTLFEVIVSASRTKEPLKFPISGSSSGCPSGRFSC

SEQ ID NO: 955 - DNA, 4096 bp, Homo sapiens
attatcctccttattgacaaacagagcggtcgcggcggcgactctcggcgtgcggtgatagccaagccatgggagacaagaagagccccaccaggccgaagcggcagccgaagccgtcctcggatgagggttactgggactgtagcgtctgcaccttccggaacagcgccgaggccttcaagtgcatgatgtgcgatgtgcggaagggcacctccacccggaaacctcgacctgtctcccagttggttgcacagcaggttactcagcagtttgtgcctcctacacagtcaaagaaagagaaaaaagataaagtagaaaaagaaaaaagtgaaaaggaaacaactagcaaaaagaatagccataagaaaaccaggccaagattgaaaaatgtggatcggagtagtgctcagcatttggaagttactgttggagatctgacagtcattattacagactttaaggagaaaacaaagtcaccgcctgcatctagtgctgcttctgcagatcaacacagtcaaagcggctctagctctgataacacagagagaggaatgtccaggtcatcttcacccagaggagaagcctcatcattgaatggagaatctcattaaagtttattttctccaatttcttagtcacttctgtcctaccatgcaaatacacagattatgccaagaggtaccacattttcatgacagatacattcatgcacaatccataatttgagttttacataaaatagaaatttgttagaatttgttagattttattgcaatgatgcctaccaaacatttccagacttaacattttggtctctgcagttaagtgccatgaaaatgtggttgaattattcattatgcagtgttattggtaagtgtattttcacttttagtttagtgaattctaacacataattcttgaattctctactattggcatgtaacgaatttaaattttttataacatagtgcaagctgcctaaatatgtattatttgagaattgtgaaacagatagttatatgtatacaagtcaaagaacaacttaactattgctgcaacaggtttttcttaatggttatcctcttaaatacacctgctggtacttggtgtggttaaataggaaaattgttattaaataaagaatttgtatgaacctttgccaatgtttttgacacgttttactaattattgttcctgaattatgtttctggttttatctattttttgaggtttttttgtttgcttatttttcaaaacattcatttattgtaatgtttactagcggactagtaaacaataaaacattgattatttagctttataattcaggtttagtgctattgtcattgaacactggtattttctgtatcatataaaacattaaaattcaaataattataagcatttggcaaaaacaagagaaaagaaacttgccatattttacaagctgcaattttagaaaagctttaacttaatgatagttttatcattgttttcttgtcccaaacttatccagggccatagaagtatgaatctaattaaaacagaaatgggaattattgcacagaaatgggaaataactaattttaaatcagtcaaattggcttcttattaaatacaataattcttatgaaaatcatagtaccctattttcagacacagctgccagtttacacatttctcagtatcctgaaaggaaaaaagtatagccccacttatactatgtaaaattaccaataaaatatttttatgactacagattttgcatttttgtttacaactatttaaagagttttatgttgtatttagaatttcaacctagaaaccacacagtacttaaattctcctggggtctcctgctttctcttaaccatttgcttaatatatatctacctaaaggagacttctgaattgtaaatgaacttaaaaatagaatgtggatgcaaaatatcacataagacatcatgataacatttgaagaaaaaataaaactgtagaccctaacagttgtgatatttggtggtttcatgtggtaatgtaattttctgtttaattacagtactttttacaggcacagtggtactgtcttttttgtaagatgctagttgtgaaatacaattaattgcatacagtaaaagtctgtgattaaaacatttatatacctcattctttagtgttgttaaatgaaaaattaaaatttgtgtttattataagatactttcaatggaataccagctaaccagatatgttcctttaaaacatgaatttttttgtcttattctgtttttaacatgtttcaaatgttttatacatttttggagatagtaaaaatttaaaaatgtaatagggaaaatatttaatttttaagtcaaaaactatgctttaaaggaattacatcttatgatcaaataactttcaggatgtattttaaatgagctgcaagagagaaaaatctgacaggagatgggattttacctgaatggagcatactcatatttctacataggtgggaagatactcatctttctacatagacgggaacacggtgtagcatggagattaagcgtgctaactgacacctcatgtttgaatcctgttgtagaatggaaatgagcttaaattacccaagcttactttccatctataaaacagggctaataatggtaatcacatctaatttatagggtttttgggaggattaagtcaatccgtgtaaaattcttaattatctgacacatactggtcactcagtaaatgtgagcttttaccattgttataggtaaaatcccattacaaaaatacaaaaatattttttgtaacagttattttcctgccctcttggatgacctaaagtaatagtgttttatagatttcactaaattttcagtgtaatatcagatgttttctctggatgcagaaagaccatctttccataattaaagaacctggtgggtgtgcactatgagattggagaaatgaattaagttgacttgaaattattttacttttattaatcacaggtatctcaacctgcctttgtttcaccctacttcaagtacacttccacaccaggaaaacagacccaaattccataaacagaactgacgttaaaatatgcgaaagattcagaacctaggtttagggtacatgtttttctctgtttcatgaacttacagtgtggtttgagcactgggttcttttagccaaattccatacaaaaagaatttggatgttttccagcatttattaccttactttgctataagtaagagtgaagataggccgggtgtgatggctcatgccagtaatcccagcactttgggctgaagcaggcagatattttgagcccaggaccagcctgggcaacatggtgaaagctcatctctatgaaaaaatttgaatatacatatatatatatatgtatatttaaaaagtgaatataatttgaggcacagaagaatattcttaaaaccttttgtattatacaatagaaataaaggttttatttttattaaatgctttcctaaaatgatagtggataatagacaaagtgaaaacatttaaaaaggaagagaaacttcagcctttctaagttgatagcatgtttattaacttttagataaagatccttatagactgaaagaatgtagcctctgcattaatggtaaatggtctagaagttttcgtttccactgaggcttccgccactcgcttttttaaacttcctgctatggtttggatatggtttgtcctcaccaaaactcatgctgaggcctgagtccccagtttgattgtgttggtaggtggtgcctttaagaggtgattaggtcattgagatggattaaaggctttctcatgaggctcagttagttctggaatggattcgctcttgcaggaatggatgaattctcacaagagtgggttgttatgaagtgaggatgcttcttgtgttctgttctctttgccctcctcagttcaccatctgctttccaccatgagttgaagcagcatgaggccctcatcagatgggctccctgatcttggactcctcagcctttggactcataagccaaaataaatctgttttctttataaa

SEQ ID NO: 956 - protein, 180 aa, Homo sapiens
MGDKKSPTRPKRQPKPSSDEGYWDCSVCTFRNSAEAFKCMMCDVRKGTSTRKPRPVSQLVAQQVTQQFVPPTQSKKEKKDKVEKEKSEKETTSKKNSHKKTRPRLKNVDRSSAQHLEVTVGDLTVIITDFKEKTKSPPASSAASADQHSQSGSSSDNTERGMSRSSSPRGEASSLNGESH

SEQ ID NO: 957 - DNA, 2565 bp, Homo sapiens
gccatccctggggaacagaatgcaacccgggatctagagagctgtcacattccaagaaatatttaaattgtgctgattttcttctggagaactgagcccagggaatgaaactctccatcaagtcatggctttgcgggcaatagatcagaggatattgccagttttctaatggattattgttatcgggcaggttttctctgaagcttctcagctgctgttacattctacttggatgggaactggagatcagccagatcacttgtatgcacaaagctgctgtggatctgtctttcaaacaagagctgcagaaaacgctatagcaaggttgaagctttatccactctgactcacccagaaagcacagccctgattctgcgtgagaaaggctatctctacagaaactaaaacggtatcaacggtttctgtacagcacagattatgacagcgtctttcttaagcagatggaatcttggaacgtctcatgcttgggaaggacatggtcagatttgttgtaagaaagactgtgcagaggagtgtggcaaagggatccagaagatgcaaggtattatttagaaaagaagagaatgtttaaatttcatcaaatgaaacatatttttgaaatacttgataaaatgagatgcctgagaaaacgttctacagtgtcattcttgggagttcttgtcatttttctcctttttatgaacttgtacattgaagatagctatgttctggaaggagacaaacaacttataagggaaacatccacacatcaactgaattcagaacgctatgttcatactttcaaggatttatctaatttctcaggagccataaatgtcacctatcgctacctagctgccacacctttacaaagaaagcggtatcttacaattggactttcttcagtaaagcgaaaaaaaggaaactatttacttgagacaattaagtcaatttttgagcaatccagctatgaagagctgaaggaaatttcagtggtggttcacctagcagactttaattcttcctggcgtgatgccatggtccaggatattacacagaaatttgcgcaccatattattgcaggaagattaatggttatacatgctccagaggagtattacccaatcctagatggccttaaaagaaattacaatgatccagaagatagagtcaaatttcgttccaagcaaaatgtagattatgcttttctgcttaatttttgtgccaatacttcagactattatgtaatgcttgaagatgatgttcgatgttcaaaaaatttcttaactgccatcaagaaagtcattgcatccctagaaggaacttactgggtaactcttgaattctctaagcttggctacattggtaaactctatcattctcatgatctcccacgtttggcccattttttattaatgttttatcaagaaatgccttgtgattggctattgactcatttccgtggtctgttggctcagaaaaatgtgatccgttttaaaccatctctctttcagcacatgggctattattcatcatacaaagggacggagaataagctgaaggatgatgattttgaagaggagtcatttgacattcctgataacccccctgcaagtctgtacaccaacatgaatgtgtttgaaaattatgaagcaagcaaggcttacagtagtgttgatgagtacttttgggggaaaccaccttcaacaggagatgtttttgtgattgtatttgaaaatccaattataataaaaaaaattaaagtaaatactggaacagaagatcggcaaaatgatattttgcatcatggagccctagatgttggggaaaacgttatgcctagcaaacaaaggagacaatgttctagttacttaagactaggagaattcaaaaatggaaactttgaaatgtcaggtgtaaatcaaaaaattccatttgatatacattgtatgaggatatatgtcaccaaaacacaaaaggaatggctaattattaggagtattagcatttggacttcttagccaattaaatcagtatgttcagtttctgaagcagttcttcctgcttcgtcttttgctacctttgtcttttggagggaaagcaatggatgggatatgttaaaagaaacattaattacattggcagttttcatttatacattgttgacataattttactcttaatacacacttgtatttattttaacgtctgaagttgaatatcagtctatagctaatgctactttcatttatatttttaaatgttcttagttttaaaatttcaactgattgtcgaaagggtaatatgaaagattttaaatgaaaaaaatttgttggatgatgatttttgaaaaatagtcaccaactgtatatacttcctcaagaactgataattcattatatcatcagatagcttttattaagcatctgtgggaatatacagttgggtggaatgataatctggtttattttttctgtaaacttaagtttccgttgacttctgtacatctacaatgaatacctcctcatagaagtggtgtctttacataattttttgtgtaggtga

SEQ ID NO: 958 - protein, 478 aa, Homo sapiens
MFKFHQMKHIFEILDKMRCLRKRSTVSFLGVLVIFLLFMNLYIEDSYVLEGDKQLIRETSTHQLNSERYVHTFKDLSNFSGAINVTYRYLAATPLQRKRYLTIGLSSVKRKKGNYLLETIKSIFEQSSYEELKEISVVVHLADFNSSWRDAMVQDITQKFAHHIIAGRLMVIHAPEEYYPILDGLKRNYNDPEDRVKFRSKQNVDYAFLLNFCANTSDYYVMLEDDVRCSKNFLTAIKKVIASLEGTYWVTLEFSKLGYIGKLYHSHDLPRLAHFLLMFYQEMPCDWLLTHFRGLLAQKNVIRFKPSLFQHMGYYSSYKGTENKLKDDDFEEESFDIPDNPPASLYTNMNVFENYEASKAYSSVDEYFWGKPPSTGDVFVIVFENPIIIKKIKVNTGTEDRQNDILHHGALDVGENVMPSKQRRQCSSYLRLGEFKNGNFEMSGVNQKIPFDIHCMRIYVTKTQKEWLIIRSISIWTS

SEQ ID NO: 959 - DNA, 3329 bp, Homo sapiens
cgctgacccagcccgccaggcgctcctgaccgtcgcttcctccggtcccaggtccccggccctcgcctcagccccggcccctggtccccagccctcgtcgcagccccggccgcccgccgccgccatgtccaaggaggagcgccccggtcgggaggagatcctggagtgccaggtgatgtgggagcctgacagtaagaagaacacgcagatggaccgcttccgggcggctgtgggcgccgcctgcggcctggcgctggagagttatgatgacttgtaccattggtccgttgagtcatattcagacttctgggcagagttctggaaattcagtggaattgtcttctcacgtgtgtatgatgaggttgtggacacatcgaaaggaatcgcagatgtccccgagtggttcaaaggcagtcggctcaactatgcagaaaacctcctgcggcacaaagagaatgacagagttgccctttacattgcaagggaaggcaaagaggaaattgtgaaggtgacttttgaagagctgaggcaagaagtggctttgtttgcagcagcaatgaggaaaatgggtgtgaagaaaggagatcgggttgttggttatttacccaacagtgagcacgctgtcgaggcgatgctggctgcggcaagcattggtgccatctggagctccacgtccccggacttcggtgtgaatggtgtgctggaccggttttctcaaattcagccaaagctcatcttctctgtggaggctgttgtctataatggcaaagagcacaaccacatggaaaagctgcagcaggtggttaaaggcctaccagacttgaagaaagtggtggtgattccttatgtgtcctccagagagaacatagacctttcaaagattccaaacagtgtgtttctggatgactttcttgccaccggcaccagtgagcaggccccgcagctggagttcgagcagctgcccttcagccacccactgttcatcatgttctcatcgggcaccacgggcgcacccaagtgcatggtgcattccgctgggggcaccctcatccagcatctgaaggagcacctgctgcacggcaacatgaccagcagtgacatcctcctgtgctacaccacggtcggctggatgatgtggaactggatggtgtcccttctggccacaggagcggccatggtcttgtacgatggctcccccctggtgcccacgcccaatgtgctctgggacctggttgacaggataggcatcactgtcctggtaactggggccaagtggctgtcagtgctggaagagaaggccatgaagccggtggaaacccacagtctccagatgctccacacgatcctgtccactggctccccactgaaagcccagagctacgagtatgtctacaggtgcatcaagagcagcatcctcctgggctccatctcaggaggcaccgacatcatctcctgcttcatgggccacaatttttctcttcctgtgtataaaggggagattcaggcccggaacctgggcatggccgtggaagcgtggaacgaggaaggaaaggcggtctggggagagagcggcgagctggtgtgtactaagccgatcccttgccagcccacacacttctggaacgatgagaacggcaacaagtacaggaaggcgtatttctccaaattcccaggtatctgggctcatggcgactactgcagaatcaaccccaagaccgggggcatcgtcatgcttggccggagtgacggcaccctcaaccccaacggggtgcggttcggcagctcggaaatctataacattgtggaatccttcgaggaggtggaggacagcctgtgtgtcccccagtataacaagtacagggaggagagggtgatcctcttcctgaagatggcctccgggcacgccttccagcctgacttggttaagaggatccgtgacgccatccgcatgggcttgtctgcgcgacacgtgcccagcctcatcctggaaaccaagggcatcccgtatacgctcaacggcaagaaagtggaagttgccgtcaaacagatcatcgctggaaaagccgtggagcaaggaggtgctttctcgaaccccgagaccctggatctgtaccgggacatccctgagctgcagggcttctgagtcagactggctggcgtgtcactcagccgcacccgtgtgcactgtaacttttgtgtgctcaagaaattatacagaaacctacagctgttgtaaaaggatgctcgcaccaagtgttctgtaggcttggggagggatcgtttctctgttttgttaaatctggtgggtacctggatcttccacacgagtgggattctggccttcagagaccaggagggagtgtctgggccgcaggtgtggcactgtggtgagagtgtgtgtctttgcacacacagtgcagtgggaacggtggggctggctggtgctgaagacagacacactcctgagccaaggtcttgtcttcaacctccccgtcccgttgtcccattttgctctgtgaaggtgcaaatccctttcttcccttcccatctcaggctctcctgttttccctcagggtccagtatgcctttgagctttagctgttagaaaggaacccccgtgacttgacacagctttcacagctggctgctaggaccggcgggctgggtgttcacgtgtgtctgtgtcatggatgcaatgcaggccctggaggactgtgcgtcacccgtcaaccagagcgtgcctccgggccagcttccctccaaggaatgagtggatttcatacaggatctctttattgcacagactgaatggctttacatgtttctaatgtgaattaggcatgtgaagcagtgggtgtccacccgtgtccctcatgggtgagccctccagctgtgagcccaggcagtgtggtcaccgagtgaggaccctcctcaccaggaaccgcatccctgtgctgcctccacctgagagttgctagggggttcttgtcgagatcatgtcatcagcacccctaagtcaagtcacgggtttccatagccaggcagttggtatgtacaattcagttcagcgtatgaacttgtatctctaatctgatgtccatttttatattttttgaaactgagcacaatgaaatcctttcttgaatcattttccttttggattataaaaatatgggggaaagtgctatgatgagttttatgcaataaatgtatacatgtgtgcacatgcacccaaaaaaaaaaaaaaaaaaaaaaaaaaaaaaaaaaaaaaaaaaaaaaaaaaaaaaaaaaaaaaaaaaaaaaaaaaaaaaaaaaaaaaaaaaaaaaaa

SEQ ID NO: 960 - protein, 672 aa, Homo sapiens
MSKEERPGREEILECQVMWEPDSKKNTQMDRFRAAVGAACGLALESYDDLYHWSVESYSDFWAEFWKFSGIVFSRVYDEVVDTSKGIADVPEWFKGSRLNYAENLLRHKENDRVALYIAREGKEEIVKVTFEELRQEVALFAAAMRKMGVKKGDRVVGYLPNSEHAVEAMLAAASIGAIWSSTSPDFGVNGVLDRFSQIQPKLIFSVEAVVYNGKEHNHMEKLQQVVKGLPDLKKVVVIPYVSSRENIDLSKIPNSVFLDDFLATGTSEQAPQLEFEQLPFSHPLFIMFSSGTTGAPKCMVHSAGGTLIQHLKEHLLHGNMTSSDILLCYTTVGWMMWNWMVSLLATGAAMVLYDGSPLVPTPNVLWDLVDRIGITVLVTGAKWLSVLEEKAMKPVETHSLQMLHTILSTGSPLKAQSYEYVYRCIKSSILLGSISGGTDIISCFMGHNFSLPVYKGEIQARNLGMAVEAWNEEGKAVWGESGELVCTKPIPCQPTHFWNDENGNKYRKAYFSKFPGIWAHGDYCRINPKTGGIVMLGRSDGTLNPNGVRFGSSEIYNIVESFEEVEDSLCVPQYNKYREERVILFLKMASGHAFQPDLVKRIRDAIRMGLSARHVPSLILETKGIPYTLNGKKVEVAVKQIIAGKAVEQGGAFSNPETLDLYRDIPELQGF

SEQ ID NO: 961 - DNA, 7248 bp, Homo sapiens
gcggccgcgggctcccgctaaccgcagcctccactcctctccccgcgcgccgcgcccccgccccgccccgcccggtctcgccggccgagcgtccgttggtccttgagcgcgtccgacagtctgtctgttcgcgatcctgccggagccccgccgccgccggcttggattctgaaaccttccttgtatccctcctgagacatctttgctgcaagatcgaggctgtcctctggtgagaaggtggtgaggcttcccgtcatattccagctctgaacagcaacatggggtgcaaagtcctgctcaacattgggcagcagatgctgcggcggaaggtggtggactgtagccgggaggagacgcggctgtctcgctgcctgaacacttttgatctggtggccctcggggtgggcagcacactgggtgctggtgtctacgtcctggctggagctgtggcccgtgagaatgcaggccctgccattgtcatctccttcctgatcgctgcgctggcctcagtgctggctggcctgtgctatggcgagtttggtgctcgggtccccaagacgggctcagcttacctctacagctatgtcaccgttggagagctctgggccttcatcaccggctggaacttaatcctctcctacatcatcggtacttcaagcgtagcgagggcctggagcgccaccttcgacgagctgataggcagacccatcggggagttctcacggacacacatgactctgaacgcccccggcgtgctggctgaaaaccccgacatattcgcagtgatcataattctcatcttgacaggacttttaactcttggtgtgaaagagtcggccatggtcaacaaaatattcacttgtattaacgtcctggtcctgggcttcataatggtgtcaggatttgtgaaaggatcggttaaaaactggcagctcacggaggaggattttgggaacacatcaggccgtctctgtttgaacaatgacacaaaagaagggaagcccggtgttggtggattcatgcccttcgggttctctggtgtcctgtcgggggcagcgacttgcttctatgccttcgtgggctttgactgcatcgccaccacaggtgaagaggtgaagaacccacagaaggccatccccgtggggatcgtggcgtccctcttgatctgcttcatcgcctactttggggtgtcggctgccctcacgctcatgatgccctacttctgcctggacaataacagccccctgcccgacgcctttaagcacgtgggctgggaaggtgccaagtacgcagtggccgtgggctccctctgcgctctttccgccagtcttctaggttccatgtttcccatgcctcgggttatctatgccatggctgaggatggactgctatttaaattcttagccaacgtcaatgataggaccaaaacaccaataatcgccacattagcctcgggtgccgttgctgctgtgatggccttcctctttgacctgaaggacttggtggacctcatgtccattggcactctcctggcttactcgttggtggctgcctgtgtgttggtcttacggtaccagccagagcagcctaacctggtataccagatggccagtacttccgacgagttagatccagcagaccaaaatgaattggcaagcaccaatgattcccagctggggtttttaccagaggcagagatgttctctttgaaaaccatactctcacccaaaaacatggagccttccaaaatctctgggctaattgtgaacatttcaaccagccttatagctgttctcatcatcaccttctgcattgtgaccgtgcttggaagggaggctctcaccaaaggggcgctgtgggcagtctttctgctcgcagggtctgccctcctctgtgccgtggtcacgggcgtcatctggaggcagcccgagagcaagaccaagctctcatttaaggttcccttcctgccagtgctccccatcctgagcatcttcgtgaacgtctatctcatgatgcagctggaccagggcacctgggtccggtttgctgtgtggatgctgataggcttcatcatctactttggctatggcctgtggcacagcgaggaggcgtccctggatgccgaccaagcaaggactcctgacggcaacttggaccagtgcaagtgacgcacagccccgccccccggaggtggcagcagccccgagggacgcccccagaggaccgggaggcaccccaccctccccaccagtgcaacagaaaccacctgcgtccacaccctcactgcagccaaaggtgcaattacttgacctgcagccccagcccaccctcggctctgcagccggttctccgggccctggtcacctccagacagctgcctggccggggccactaggctgcggctggccactgtgtctcctcacttctctgaacaaagcagttcctcccctaccagctcagccccgagctgccgcagcctcaggcagaacggaggtcaccttctctccttatcttgggaaccaggccttcctcccggggactgttctgggattgaaattgtgcatactccaaactttcgcagccatcttcccgctcagccccagacacccagcaatcaagccagatgagtaccacaaaacagtgtgtccccagcagctccccaccccagagccaaatgacagtagtgcacttaaaaaggaaaatcaggcctgttgtccttctccggttgcattcagatgggtcattagggccggaccctgcctgccccttggcttctcagggctttgctctgacaccatgacagctgcccggggctgagggcagctggctccactcaaatgaggaagaagggatcactcccattagggcctgctttgcttatgcatgtgtgtgcacatgcatgtaaaccagggaccttcagctcacggcctccaggcctgggccagttcttgctgctcctgccgtctcccccgactggctgtgtcctgagtaactggaacatgagacagtatctgcaggactggccccatggtggccgagtcagaagtctgtttcctgtgagtcgccaccgttcactcagtcttgccctcccatgctttggagccagtctggtggctcctgtaaggttctcaaggctggtggcagctcagtctggggtcaggacatgtcggggtcatgcgtttctggccctgacataagctgtctggcctctctgtgacatgatgaaattgaaatcaatccacagtccatgaaattgtgacactccaccagattaagttagggcataacattaacttggaaatggccatgtcatcacccctgcggctgtcctatagctgagatgcgtgggtcgcaggggaggtgatttctaggcatattgctgtcccttttgtgtatctgtcatccggatgcttcggaccccacgcctctgcaagtgggagagacccgagcatcctccccacccccatagctccagtgcacgccacccccgtcttgcctgggtcggggcctgcggccagcaccatttcacacacactccttgtagatgggagccagaggaaacctgaacgtgggtggagcgttccactgagtctacttcaggagacagaaggcccatgctgatgggggaggaggagggacgtgggcattttggacaccaggggaaatggaaatgctgctttcaaaacttagtttcctttccatttcttcctagtctggcctttgacacaaatctggtagaaagaagcctgataaattgagggcacttgtaccctccctgtgcccccagaaggttcttggagagaagtgcaagaatttgtgaacacggcggtggagggcgggtggatggccatgggctgggcctccgtatcaggcctgctcaccttgctgggagctttattctgatctcattttgaatgttccagagggagcatcataagagcccagagctccgatttccaaagagtgatattgacatttatggagattggtgttgtaacatattttgataaatactaacttattttgttggggttttggttgtctcttgtcttaggacctggtagttatttgcttgatttttttttccgttattttctacataggcaaagagaattcgagggatagacagtctccaagaaaagtgaagtggtgggagagaattgcttttttcttttttttcttttctctagtttttctttctggctgagatttccgtgcaagacagcacccaatagactatttagagttgacatttgacattttaatgggcgccatggctcattttgtagattgagaaggtgcgtctcccctgctccaagtctcatcatgacagcgtgctgacagctgggagtctgtggccttcctcacgcagaggccttaaagctggacacagaagcacgcctaggctgggcagggatgggacccatgccccctccttagaggacgggcttcctggttaggaaaggacacgtgggggtgccttgcataatagttcactggtcaccgtgcttttatgagtagtgtttttgtgcacttgccaggggttttctctctgtgtgagaggggagtgatttaagcaatggtgtctggagtaagccttacaattttaatagactttttcttatcatatccctcatttctttccctgaaataaaaatacacacaagcaaaaaaaaaatgatagtttcacatctcttagttcccttgcccaaacaagaatattcttagttccactggccaggattttcctacatagtcagaacttacacattactagaggcacacccaccaaggagtattgtgtctacttttatctgtgcaccagccacaaatacccacattggaaagacccatttgtgatgggtaaacatcccttcctgtctcccacaacccctgtgactgccctgcatgtgttcatgacctccgaaggcccaaattcatgaagcagcaaacccagcagatctccacccccctgcctcaggacctctgctgaagagggggatgaagtgggtctccagggaggcagtgggggccttgttggcagctggctcgggagccggcttacaggagggcagctctgcagttgggaggggcaccgtccggaggagaccaggcctctacacaccccccactctacttatcatccctgctcacacacccttgtccaaggctttatgcatcggatttatttttccaaatcaagaggacagtgatagatgcattttccccaggctgtctcagaaaggtcgctaaatgtatactgttgtcagaattgctgagatctccccccacttttggtttttgcagcagtaaaaactctttccactgtgacttattttctctctcaggcagccagccacctggtcccttgtgctgactctagcacagtggccaggatccaatacgagtccaggggtgaccgcaggatggtgggggcagcgggcttctccacctaccccagccaccaaggccctgacgcactgcctcctgcaccttcagcacatccctgtgcacagctggaagggtgcatggcccgctcacctttgttcagatgggtggaaacgctgatgataccagctcctccctgccgtgcccctgccacggagcaggcattgtgaactggctggtgtttgcagtcccacgtggcatggcctccagcccaacccacagtggagactggagacagggcaatgagtctggtcgggggcacgtggacatgccccataggggccccacccagacttaacaggcaaggtcctgggcattgcgcgacgcaggactcaatgctaaagcaagcctgcctggctctgtgccagggcccctcttctgatttacacatcccatttttacacagacccttccttcttaataaaggctgacagttctgttggcagccaagaacccacaccatgaagacagggagtgaggggcctttgtgcccaactccagcacagctgcgttctggggtgtgtgagaggcatgttcgtgtctgtgcgctggtggtctcgtgagacagttccgaggacggggaaattgcagggtggtgggggcgtgaggcttatatgtggaactgatgcagagttcgcctgcagacggatctggatatacactatgtataattgttacgtgtaatttaaaatatatctgtttgccatcgtcatgagaagattatatgtaaggctctgaagggagagggagatgtacattctgccaggctcctggggaccttatccgagtcatgaaattgatgactgttgatccagtggtgcaagaagctacactccatgtgtcatcacgcttatgactcctaatgtatttttaaggcaaaaaatgtcagccgactccatcttcacccctcgattcctcgagtccagcctttctgtgccagtgcttcactgagccacaacgctctcgccatcgggacccggctgggcctggagtctcggggcacagttgccatggagccctcctgggtcattctacaaatgtgctgagtgccagctgaaaaccccacaggagatggagtaccttggccaagcttaaagagaagattttctcagggtatttattagtgtgtccagcagggtcaggaagcaggatggaaagatgcattcagactgttaatttattaacaaggcaaatgattttgtgtttcttgatgacagactattaagtttgggacttattttcccatttgagaagttataatatatatttaagatgataagtttcctgcttaagttgtgcctttcagcttcaatgagtttaaggagcactaagggtaatgataccaatgagggttggtttattatcaaacctgaatagctgtggtttctccagtaaatattttcttctactgaacatggagccattattaagagttgtgtgttttttattatgtacatttgtatatttttttgcttgtttgatgttctatttttctaatagttttcttttagtttcttaaagttgtgatactagatttagattctgatgctaactgcaaatcaggttggtctctgctgggtctctcctgcttttattttactttaaggacaagtgtagttgtcgtccaccacctttcaaaaaatgtgaaactgccctgcctcccctttttgctgacaacactgtgtacattgaccacttcctaccatactttatgttgtaaaatcaaactcttttgtggtacattatctcatgcttctgcaaattcgaataaattctatggcttccaaaaaaaaaaaaaaa

SEQ ID NO: 962 - protein, 629 aa, Homo sapiens
MGCKVLLNIGQQMLRRKVVDCSREETRLSRCLNTFDLVALGVGSTLGAGVYVLAGAVARENAGPAIVISFLIAALASVLAGLCYGEFGARVPKTGSAYLYSYVTVGELWAFITGWNLILSYIIGTSSVARAWSATFDELIGRPIGEFSRTHMTLNAPGVLAENPDIFAVIIILILTGLLTLGVKESAMVNKIFTCINVLVLGFIMVSGFVKGSVKNWQLTEEDFGNTSGRLCLNNDTKEGKPGVGGFMPFGFSGVLSGAATCFYAFVGFDCIATTGEEVKNPQKAIPVGIVASLLICFIAYFGVSAALTLMMPYFCLDNNSPLPDAFKHVGWEGAKYAVAVGSLCALSASLLGSMFPMPRVIYAMAEDGLLFKFLANVNDRTKTPIIATLASGAVAAVMAFLFDLKDLVDLMSIGTLLAYSLVAACVLVLRYQPEQPNLVYQMASTSDELDPADQNELASTNDSQLGFLPEAEMFSLKTILSPKNMEPSKISGLIVNISTSLIAVLIITFCIVTVLGREALTKGALWAVFLLAGSALLCAVVTGVIWRQPESKTKLSFKVPFLPVLPILSIFVNVYLMMQLDQGTWVRFAVWMLIGFIIYFGYGLWHSEEASLDADQARTPDGNLDQCK

SEQ ID NO: 963 - DNA, 3707 bp, Homo sapiens
ctcacgcgtcgaggtgtagctacatagttatctgtgtacatccacgctggggcatttttctcctgcttaatgaggacttgactcgggagcaagtgtgaatcattgccggggctgggaaaggaggaaggcgcatttaaccccctcccacccctctccatgtccgtgtgtcactcggctcggtccacctggcgcggccggtcgtggggctgctgctgctgttgacgacgacgacgacgacgggggctgcctctgctgtcccgggagtttcctcctgctccggccacacagctcctggggattgttcctcttcgaaccagaacctcggcctgaccggcactttggctccaaaataactttatttttgggggagaaagcacatcacgaaccagtcaaaatcgtggtttatttctgtaacgtgaagacttctgctcttttttctttgtttgtttttttcgtaaacatctgggtgtatatcaaacggcaagatgtccagtaatgtcccggcggatatgataaatttgcgcctcattttggtaagcggaaaaacaaaagagttcctgttttctcctaacgattctgcttctgacattgcaaagcatgtatatgacaattggccaatggactgggaagaagagcaggtcagcagtccaaatattctacgacttatttatcaaggacgatttctacatggaaatgtcacattaggagcattaaaacttccttttggcaaaacaacagtgatgcatttggtggccagagagacattaccagagccaaactctcaaggtcagaggaatcgtgagaagactggagagagtaattgttgtgtaatcctgtaaacactgtctgcctagtgtgatgtgatatagtctttgtctttcatgctgctgggacagaaaagacccgacattgcttcagaaaccgttcagaacagtctgcctgtaaacacatggaactgaattaccacatgaacactgtcatcttttctcatgaaagtaaaaagaaccaagaacatttttcactctgattttttatttcttgtattttttgttgagctgttttaacacatattggtttttgaatgcagtcaatctccaggggaaaagttaacaagttatctttcgtagcagaaaccattttgctgccacaaaattttcatcatcagaactaataaatcaagtgttccaaatacaatttgcactaaaaagattggcattattttcctcatcagcagaatttataacagtgtgtggtatctagaaatacttatatatacaattccacactggaagacactcagcaattaatgaagttaattactgggccaacttgagaggaaaaaatggaaaagaaactaaaatgttgggtgaattctaccaaagtcagccgtggtggctgcactggcacagaatactaaactgagtgtgactattttcactgcaacaaatgaaaaaacaaaatgtgcctgtttaaagcactcagtagagggctgatgaaactaattttttttcctttaagacatgcactcttgagtcctacagtaactgagtgtttgtttagacagcacaagaaggggtgagagtgcgtctcctagccttaatgtgggagggtagtttcagtcactcatcggctttcattattgtgcagaaatattagaaaacctcattgatcaattttatgtatttgaatatcagcaaattgaaattttccataattatcattaatttgtaaccacatccagtgtcatgcttactccttagagttcagatgaattcttaaaattaaaaaaaaactccatagtactaattttgtttctttatatagtttgcgtttgatattagtgcttgcaattgtattaaagtcaaaagctgatttttatggcatacacaagaatgccactttttcttttatttcataccaataatttaaagattgatatgctaaaaacaatttgcacagcactaaagcatgagctactttcatctaaacctgtaaaaatatgaaagatttttatattttttcactgggaagaaattcttcctggatgaaattacaaatatgtgtagaatatatttaataaaagacttataaaatacctaactacaggacttaaaatatagattggcgcgtagtatatagaacaatattccatataaataagtttagcctttataaaaatgaagttgcaggctgacattacattcggtacttactaagtgtcaacagcccttacaaacattaaatgtaaatggtttcaaatggtcagcgttgtttaaatgtaatcatgttattttattcattgttaatgctttgatgaaaaggctttatatgcagtagatctacgaaaatattgttcatactgatcagaattaaatttgtatagagcagagttttaaaatgaatgtaaatagcactaaacgttttctttctgcaacctgtacttacagattcttcctgtaaactaaataaaaaaaaaaatgatagtgcattttggtggtaattttaaaggtcttgattaggtcaataattgtttaagcaccgtctcattcatgttttctactttcatttcttaagcttttaaaattcatttaattaatattctgttgttgttttggggagtattcccaatgtatctttgatatttaacctggttaatttgtggacagtcacaacaatggatagaattatgtagtctccgttatcactaaaatgttatcttcaagagatgttaaatatttatatgctttgttgactagctgaaatatgaattctgttagtgttgactaaagaatctggtagttgcttaattgggcaattaaacaatttatggctctattttgtaaaacaaactactggtaattatttttaatacctattttcattctgattactctttttttaagttaaagactatcagttaattaagattgagtttttatgatggttaaaaataattctctattggtttttcaatatatttttctgtgtgttctcagattatatatttccctcaatttagagtttgctaagtgaaataaactggttcactagtagagaaagaattacgtcgcttaatacctaatatcatagttgtacaatatgaaaaaaagaataaaaagtagcagtaaaattatatactgaaaacaccaaaaatttagatgccttaatagtatatacgtgaaatactcagctgtccctttaaaaataattcattggactgcctggtggttaaaatacgattcctcatatccaaggctacttttgaagatccctctgccaaaaatatagctcacttatctaaaggtgagagctgcatagatccagtaatgtacataaagcctgaatgatgagcctatgtccctgcctaacactggtgtctcactcatctcttttacctaaattgtcctgaactttgttaagtgttctggacaaggccaagcttttctttattaaaacctcagcatgtctccctgatctgaactatttgctttctcttcaagataagttgtattttaccatggaaaaatacagtatctaacattaccattcacgttaaatgaagtttcctcataacatttatctttagttttatgaagtcatcgtgaccaatgttacagtaatttctgttagctgattgtggtaaacaatgtttaatgtgaaaagaaattaaaactttcttcatctgttgtagaaaaaaaaaaaaaaaa

SEQ ID NO: 964 - protein, 117 aa, Homo sapiens
MSSNVPADMINLRLILVSGKTKEFLFSPNDSASDIAKHVYDNWPMDWEEEQVSSPNILRLIYQGRFLHGNVTLGALKLPFGKTTVMHLVARETLPEPNSQGQRNREKTGESNCCVIL

SEQ ID NO: 965 - DNA, 696 bp, Homo sapiens
tggagtgggccagctttaatgaacctgtctaaaaggaaggaagagaaagagctcagctccttaggggaacaaggtggaccttggcagctgtctcactcctcaccagctcttcacctcagatcttgtcctgacttcctggtccactaacggcctcctggatagaagagtcagttcaccagcccaggagatgttctgaaaattgacaatgatcatgatataccctggatccagaatacttctctatacaatgggcagagaacaaagattggtggcttcctcctgagcacactgggatgtggcattacatcggggctgctgagtgcccttaccttcagctgcccagatgcagaggcagttccacaaggtactggcacaagaagagtcgtggaagactgacctggccatggcttctcatgtcccagctcaggacctgccacatcaattctccctttcctctggccgtcacgtgtggagtgaaattctcagaagcggctgtccctgtgcacctctctggctgtgtccagaaaatgaacatctgtttacagcttcaattttctaatgattagaatgccacaaacaagaaaacccagaggaaagctgttgatgctgaaatgtttccttcctctacatattccatgatgcgtcctgtggggttatgcaaacagtaatatctcattaaatattctggtctcttgg

SEQ ID NO: 966 - protein, 90 aa, Homo sapiens
MWHYIGAAECPYLQLPRCRGSSTRYWHKKSRGRLTWPWLLMSQLRTCHINSPFPLAVTCGVKFSEAAVPVHLSGCVQKMNICLQLQFSND

SEQ ID NO: 967 - DNA, 8192 bp, Homo sapiens
agggggcggcgctcccggcccatcccttagccccgcggcggccgtgtgggccggaggctgcctgcaccgcgtcagggaggccggcctagaaaccctccctcccagaagaaagccgatcccagttcaggtggggtcttcctcggttgcgtacctggctggagccgagctggtgggcggccggcagccggcgtttctggtgatgacagccccgaaatgaaagcagcgcggccgccgcctccgagggctgcagggagatcagcgtccagcaaataagaagcaagtcctggacccggaggaggaggagcggccgagcatctctctctgctccgccgtgtcctttagatgagcactcccggccggagccggaggtggatccgcagagctgcctctgggcgcctgaccccgcgctgacatcacaacctgtgacaggcgcatcacgcccggtacctgctcccggccgctgcccgtcctcccagcctctttgtatgccgcagacatggccagccagcaggattcgggcttctttgagatcagtatcaaatatttactgaaatcctggagtaatacttctcccgttggcaacggttacatcaagcctccggttccacctgcttctggcacgcacagggagaaagggccgccaaccatgctacccatcaatgtggacccagacagtaaaccaggagaatatgtcctcaaaagtttatttgtcaacttcaccactcaggctgaacgcaagattcgtatcattatggcagagcccctggaaaagccattgacgaaatctctgcaacgtggagaagacccccaatttgatcaggtcatcagctcaatgagctccctttctgagtactgcctgccttccattctacgtacattatttgactggtataaaaggcaaaatggcattgaggatgaatcacatgaatacagaccaagaacaagcaataaatcaaaaagcgatgaacaacagcgagattatttaatggaaagacgggacctcgccattgattttattttttctttagtattaatagaagttttgaaacagattccacttcatcctgtaatagacagtttaatacatgatgttattaacttggctttcaagcactttaaatacaaagaagggtaccttggtcccaacactggcaatatgcatattgtggcagacctgtatgcagaagtcattggagtgttggcacaagccaaattccctgctgtaaagaagaaatttatggcggagctaaaagaattacggcacaaagagcagaacccatatgtggttcaaagcattatcagcttaataatgggcatgaaattctttcgaattaagatgtatccagtggaggattttgaggcctctcttcagtttatgcaggaatgtgcacattacttcctcgaggtcaaagacaaagatatcaagcatgccttggctgggctttttgttgaaatacttgttccagttgctgctgctgttaaaaatgaagtaaatgttccctgccttagaaattttgtggaaagcctgtatgacaccacgctggaactttcttctcgaaagaagcattccttggccttgtaccccctggtgacctgtttgctctgtgtcagtcagaagcagctgttcctgaacaggtggcacattttcctcaacaactgcttgtccaaccttaaaaacaaagatcccaagatggctcgagttgcactggaatctctctacagattactttgggtttacatgattcgaattaaatgtgaaagcaacacagctactcagagccgacttataaccatcatcacaacacttttccccaaagggtcccgcggtgtggtaccaagggacatgcctctgaacatctttgtgaaaatcatccagttcattgcccaggaacgtttagattttgcaatgaaagaaatcattttcgattttctttgtgtgggaaaaccagcaaaagcattcagtctcaacccagagagaatgaacattggtttacgggcattcttggtcatagctgatagcttgcagcagaaagatggggaacctcccatgccggttacaggagccgttcttccttcaggaaacacgttaagagtaaagaaaacatatttgagtaaaacactaactgaagaggaagccaaaatgataggcatgtccttatattactctcaagtacgaaaagctgtagacaacattttaaggcaccttgataaagaagtaggaaggtgtatgatgctgactaatgtacagatgttaaacaaagaaccggaagacatgatcacgggtgagagaaagccaaaaatagatcttttcaggacctgtgttgctgctattcctcgactgcttcctgatgggatgtcaaaacttgaacttattgacttactggctaggctctctattcatatggatgatgaattgcgacatattgcacaaaattctcttcagggtttacttgttgacttctcagattggagggaagatgtactatttggctttaccaacttcctgctccgggaagtaaatgatatgcatcacacactccttgattcgtccctgaagttgctgctgcagctgctcacccagtggaaactagtcatccagacacaaggaaaagtctatgaacaagccaacaaaatcagaaattcagagctcatcgcaaatggctccagtcacagaattcagtcggaacgaggtccccactgcagtgtactccacgctgtagaaggttttgctctggttttactctgcagtttccaggtggccacacgcaaactgtccgttttaatactcaaggaaattcgagcgttgtttattgccctggggcagcctgaggatgacgacaggccgatgattgatgtcatggatcagctaagttcttccattctagaaagttttattcatgtagcagtttcggattcagcaacattaccactcacccacaatgtggatctgcagtggttggtggaatggaacgcagtcctggtcaatagccattatgatgtgaaaagcccttcccatgtctggatatttgcacagtctgtcaaagacccctgggtcctctgcctcttcagcttcctccggcaggagaacttacccaagcactgccccacagccctcagctatgcctggccttatgccttcactcggctccagtcggtgatgcctctggtggacccaaatagcccaattaatgccaagaaaaccagcactgccggcagcggagacaactatgttactttgtggagaaattacctaattctttgttttggagttgcaaaacccagtattatgagcccaggacacttaagagcttccactccagaaataatggcgaccacacctgatggtacagtgagctacgataacaaggccataggcaccccatcggtgggagttctgttaaagcagttggtgcctttgatgagactagagagcattgagatcacagagtccttagttttaggatttggaagaacaaattcccttgttttcagagaattggtagaagaacttcatccattaatgaaagaagctctggaaagaagaccagagaacaagaaacgccgagaacggcgagacttgttaaggctacaactacttcgaatttttgaacttttggctgatgctggtgtaataagtgacagcacaaatggagccctagagcgggatactttagccctgggagctttgttcttagaatatgtggacttgacccgcatgctcctagaagctgaaaatgacaaagaagttgaaattcttaaagatatccgggcacattttagtgcaatggtggccaacttgattcagtgtgttccagttcaccaccgaagatttctcttcccccagcaaagtctgaggcaccaccttttcatcttattcagccagtgggcaggacccttcagcattatgttcactcctctggatcgttacagtgacagaaatcatcagattacaagatatcagtattgtgcattaaaagcaatgtcagcagtactgtgctgtggccctgtctttgacaatgtgggcctttccccagatggctacctatataaatggcttgacaacattctggcttgtcaagatttacgagttcatcaacttggctgcgaagttgttgtcttgctactggaacttaatcctgaccaaataaatctttttaactgggcaattgaccgatgctacacaggttcctaccaacttgcatctggctgcttcaaagccatagcaactgtgtgtggaagcaggaactatcccttcgacatagtgacattgttaaaccttgttctattcaaggcctctgacaccaacagagagatttatgaaatctccatgcagctcatgcagatccttgaagcaaagctttttgtatactcaaagaaagtcgctgagcaaagaccgggaagtattctctatggaacacacggcccgctgccacccctctacagcgtgtcactcgccctcttgtcatgtgagctggccaggatgtaccctgagctcacactccccctcttctcaggtaagccagcgattccccacaacacaccccaacgggcgccagatcatgcttacctacctgctgccctggctgcacaacatcgagctggtggacagcaggctcctcctcccgggtcgagccccagcagcccagaggacgaagtcaaggaccgggaaggtgacgtgactgcttctcacgggctgagaggaaatggctggggctctccagaagccacgtcactggtcctgaacaacctcatgtacatgacggccaagtatggagatgaagttcctgggccagaaatggaaaatgcttggaatgctttagccaacaatgagaaatggagcaacaacctgaggatcaccttgcagttcctgattagcctctgtggggtcagcagcgacacagttctcctaccctatattaaaaaagtggcaatatacttgtgccgtaacaacaccattcaaaccatggaagagcttctctttgagctgcagcagacagaacccgtgaaccccatcgtccagcattgtgacaacccgcccttctaccgcttcacggccagtagcaaggcttccgcagcagcctcaggaaccacctctagcagcaatacagtggttgctggccaggaaaatttcccagatgctgaggagaacaagatattgaaagaatctgatgaaaggtttagtaatgtcatcagagcccacactcgcctcgagtcaagatacagcaatagctctggaggatcctacgatgaagataaaaatgatccaatttctccctacacgggctggttgctgactattacagagaccaagcagccgcagcccttaccgatgccttgtactggaggatgctgggcccccctggttgactatctcccggagaccatcactccccgggggccactccacaggtgcaatattgctgtaatttttatgactgaaatggtggtggatcacagtgtacgagaagactgggcgcttcatctaccattattacttcatgctgtcttcttaggtttagaccactaccggcctgaagtctttgaacacagcaaaaaactgcttcttcacctcttgattgccctctcttgcaacagcaatttccattccattgcttccgtgctcctgcagacccgagagatgggtgaagctaagactctaaccgtgcagccagcctaccaacctgaatatctctatacaggtggctttgacttcctgagagaggaccagtcatccccggtgcctgactcagggcttagttcaagctccacctcctctagcatcagtctgggaggcagcagtggaaacctcccacagatgacccaggaggtagaagatgtggacacagctgctgaaacagatgagaaggcaaacaagctcattgagtttctcacgaccagggcatttggtccactttggtgccatgaagacatcacacctaaaaatcaaaattcaaagagtgctgaacagctcactaattttctacgtcacgttgtatctgtatttaaagattccaaatcaggcttccatctggagcaccagttgagtgaagttgcattgcagacagccctcgcaagctcttcaaggcactatgctggtcggtccttccagatattccgggccctcaagcaacctctgtcagcacatgccttatctgaccttctctcaagattggtggaggtgataggagaacatggagatgagattcagggttatgtaatggaagcgctcctaaccttggaggcggctgtggataacttgtctgactgcttgaagaacagtgacctcctaactgtattgtcccgctcttcctcaccagatttaagctccagcagtaaactaacagcaagcagaaagagcacaggacaactaaacatgaacccgggaaccaccagcggcaacaccgcaactgccgaacggagccggcatcaacgaagcttctctgtgcccaagaagtttggtgtcatcgaccgatcctctgacccacctcgaagtgccacactggacagaattcaggcttgtacccaacaaggcctctcctcaaaaaccagaagctcatcctccttgaaggacagtctcacggacccatcccacataaaccatcccaccaacctgctggccaccatattctgggtcacagtggccttgatggagtctgattttgagtttgaatacttaatggccttaaggctgttgagcagactactggcacatatgccactcgataaggctgagaaccgagaaaagcttgagaaactccaggcacagctgaagtgggccgacttctccgggctgcagcagctgctgctgaaaggattcacatccctcaccaccacagacctgaccctgcagctcttcagtctgctgacaccagtgtccaaaatatccatggtggatgcatcccacgctattgggtttccactgaatgtcttgtgtctcctgcctcagctgattcagcattttgaaaatcccaatcagttctgtaaggatatagccgaaaggattgctcaggtttgtttagaagagaagaaccccaaactttcaaatcttgcacatgtcatgactctttataaaacgcacagctacacgagggactgtgccacgtgggtcaatgtggtctgtcgataccttcatgaagcatatgctgacattaccttgaatatggttacctacctggcagagctgctggagaagggcctccctagtgtgcagcagcccctgctccaggtgatctacagtcttctcagctacatggacctttctgtcgttcctgtcaaacagttcaatgtggaagttctgaagacaattgaaaaatatgtgcaaagtgttcactggagagaagctctgaatatcttgaagctggtagtttctcggtcagccagccttgttttaccttcataccagcacagtgacctctcaaaaatagaaatacatcgagtgtggactagtgcttccaaggaattacctgggaaaaccctggacttccacttcgatatttcggagactccaatcatcgggaggcggtatgatgagctgcagaattcttctgggcgtgatgggaagcccagggccatggccgtcacccggagcacatcttccacttcctcaggctccaactccaacgtccttgttccagtgagctggaaaaggccccagtattctcagaagagaacaaaagagaagttggtacatgtcctttctctgtgtggccaagaagtaggattgagcaaaaatccatcagtgattttttcatcgtgtggggatctggatctgcttgagcaccagacaagcttggtatcttctgaggacggtgcccgagagcaggagaacatggatgacacaaacagcgagcagcagtttagagtcttcagagacttcgacttcctagatgtggagctggaggatggagagggtgagagtatggacaatttcaactggggagtgcgcagacgttctctggacagcctggataagtgtgatatgcagattctggaggagcgccaactgtcaggaagcactcctagcctgaataaaatgcaccatgaggactccgatgaatcatccgaggaggaggacctcacagccagccagatcctggagcactcagacctaatcatgactctctccccctctgaagagacgaatcccatggagctgctcaccacagcctgtgactcgacccctgcagaacctc

SEQ ID NO: 968 - protein, 3012 aa, Homo sapiens
MASQQDSGFFEISIKYLLKSWSNTSPVGNGYIKPPVPPASGTHREKGPPTMLPINVDPDSKPGEYVLKSLFVNFTTQAERKIRIIMAEPLEKPLTKSLQRGEDPQFDQVISSMSSLSEYCLPSILRTLFDWYKRQNGIEDESHEYRPRTSNKSKSDEQQRDYLMERRDLAIDFIFSLVLIEVLKQIPLHPVIDSLIHDVINLAFKHFKYKEGYLGPNTGNMHIVADLYAEVIGVLAQAKFPAVKKKFMAELKELRHKEQNPYVVQSIISLIMGMKFFRIKMYPVEDFEASLQFMQECAHYFLEVKDKDIKHALAGLFVEILVPVAAAVKNEVNVPCLRNFVESLYDTTLELSSRKKHSLALYPLVTCLLCVSQKQLFLNRWHIFLNNCLSNLKNKDPKMARVALESLYRLLWVYMIRIKCESNTATQSRLITIITTLFPKGSRGVVPRDMPLNIFVKIIQFIAQERLDFAMKEIIFDFLCVGKPAKAFSLNPERMNIGLRAFLVIADSLQQKDGEPPMPVTGAVLPSGNTLRVKKTYLSKTLTEEEAKMIGMSLYYSQVRKAVDNILRHLDKEVGRCMMLTNVQMLNKEPEDMITGERKPKIDLFRTCVAAIPRLLPDGMSKLELIDLLARLSIHMDDELRHIAQNSLQGLLVDFSDWREDVLFGFTNFLLREVNDMHHTLLDSSLKLLLQLLTQWKLVIQTQGKVYEQANKIRNSELIANGSSHRIQSERGPHCSVLHAVEGFALVLLCSFQVATRKLSVLILKEIRALFIALGQPEDDDRPMIDVMDQLSSSILESFIHVAVSDSATLPLTHNVDLQWLVEWNAVLVNSHYDVKSPSHVWIFAQSVKDPWVLCLFSFLRQENLPKHCPTALSYAWPYAFTRLQSVMPLVDPNSPINAKKTSTAGSGDNYVTLWRNYLILCFGVAKPSIMSPGHLRASTPEIMATTPDGTVSYDNKAIGTPSVGVLLKQLVPLMRLESIEITESLVLGFGRTNSLVFRELVEELHPLMKEALERRPENKKRRERRDLLRLQLLRIFELLADAGVISDSTNGALERDTLALGALFLEYVDLTRMLLEAENDKEVEILKDIRAHFSAMVANLIQCVPVHHRRFLFPQQSLRHHLFILFSQWAGPFSIMFTPLDRYSDRNHQITRYQYCALKAMSAVLCCGPVFDNVGLSPDGYLYKWLDNILACQDLRVHQLGCEVVVLLLELNPDQINLFNWAIDRCYTGSYQLASGCFKAIATVCGSRNYPFDIVTLLNLVLFKASDTNREIYEISMQLMQILEAKLFVYSKKVAEQRPGSILYGTHGPLPPLYSVSLALLSCELARMYPELTLPLFSGKPAIPHNTPQRAPDHAYLPAALAAQHRAGGQQAPPPGSSPSSPEDEVKDREGDVTASHGLRGNGWGSPEATSLVLNNLMYMTAKYGDEVPGPEMENAWNALANNEKWSNNLRITLQFLISLCGVSSDTVLLPYIKKVAIYLCRNNTIQTMEELLFELQQTEPVNPIVQHCDNPPFYRFTASSKASAAASGTTSSSNTVVAGQENFPDAEENKILKESDERFSNVIRAHTRLESRYSNSSGGSYDEDKNDPISPYTGWLLTITETKQPQPLPMPCTGGCWAPLVDYLPETITPRGPLHRCNIAVIFMTEMVVDHSVREDWALHLPLLLHAVFLGLDHYRPEVFEHSKKLLLHLLIALSCNSNFHSIASVLLQTREMGEAKTLTVQPAYQPEYLYTGGFDFLREDQSSPVPDSGLSSSSTSSSISLGGSSGNLPQMTQEVEDVDTAAETDEKANKLIEFLTTRAFGPLWCHEDITPKNQNSKSAEQLTNFLRHVVSVFKDSKSGFHLEHQLSEVALQTALASSSRHYAGRSFQIFRALKQPLSAHALSDLLSRLVEVIGEHGDEIQGYVMEALLTLEAAVDNLSDCLKNSDLLTVLSRSSSPDLSSSSKLTASRKSTGQLNMNPGTTSGNTATAERSRHQRSFSVPKKFGVIDRSSDPPRSATLDRIQACTQQGLSSKTRSSSSLKDSLTDPSHINHPTNLLATIFWVTVALMESDFEFEYLMALRLLSRLLAHMPLDKAENREKLEKLQAQLKWADFSGLQQLLLKGFTSLTTTDLTLQLFSLLTPVSKISMVDASHAIGFPLNVLCLLPQLIQHFENPNQFCKDIAERIAQVCLEEKNPKLSNLAHVMTLYKTHSYTRDCATWVNVVCRYLHEAYADITLNMVTYLAELLEKGLPSVQQPLLQVIYSLLSYMDLSVVPVKQFNVEVLKTIEKYVQSVHWREALNILKLVVSRSASLVLPSYQHSDLSKIEIHRVWTSASKELPGKTLDFHFDISETPIIGRRYDELQNSSGRDGKPRAMAVTRSTSSTSSGSNSNVLVPVSWKRPQYSQKRTKEKLVHVLSLCGQEVGLSKNPSVIFSSCGDLDLLEHQTSLVSSEDGAREQENMDDTNSEQQFRVFRDFDFLDVELEDGEGESMDNFNWGVRRRSLDSLDKCDMQILEERQLSGSTPSLNKMHHEDSDESSEEEDLTASQILEHSDLIMTLSPSEETNPMELLTTACDSTPAEPHSFNTRMSSFDASLPDMNNLQISEGSKAEAVREEEDTTVHEDDLSSSINELPAAFECSDSFSLDMTEGEEKGNRALDQFTLASFGEGDRGVSPPPSPFFSAILAAFQPAACDDAEEAWRSHINQLMCDSDGSCAVYTFHVFSSLFKNIQKRFCFLTCDAASYLGDNLRGIGSKFVSSSQMLTSCSECPTLFVDAETLLSCGLLDKLKFSVLELQEYLDTYNNRKEATLSWLANCKATFAGGSRDGVITCQPGDSEEKQLELCQRLYKLHFQLLLLFQSYCKLIGQVHEVSSMPELLNMSRELSDLKKHLKEASAVIAADPLYSDGAWSEPTFTSTEAAIQSMLECLKNNELGKALRQIRECRSLWPNDIFGSSSDDEVQTLLNIYFRHQTLGQTGTYALVGSNQSLTEICTKLMELNMEIRDMIRRAQSYRVLTTFLPDSSVSGTSL

SEQ ID NO: 969 - DNA, 8192 bp, Homo sapiens
gtggcgcgagcttctgaaactaggcggcagaggcggagccgctgtggcactgctgcgcctctgctgcgcctcgggtgtcttttgcggcggtgggtcgccgccgggagaagcgtgaggggacagatttgtgaccggcgcggtttttgtcagcttactccggccaaaaaagaactgcacctctggagcggacttatttaccaagcattggaggaatatcgtaggtaaaaatgcctattggatccaaagagaggccaacattttttgaaatttttaagacacgctgcaacaaagcagatttaggaccaataagtcttaattggtttgaagaactttcttcagaagctccaccctataattctgaacctgcagaagaatctgaacataaaaacaacaattacgaaccaaacctatttaaaactccacaaaggaaaccatcttataatcagctggcttcaactccaataatattcaaagagcaagggctgactctgccgctgtaccaatctcctgtaaaagaattagataaattcaaattagacttaggaaggaatgttcccaatagtagacataaaagtcttcgcacagtgaaaactaaaatggatcaagcagatgatgtttcctgtccacttctaaattcttgtcttagtgaaagtcctgttgttctacaatgtacacatgtaacaccacaaagagataagtcagtggtatgtgggagtttgtttcatacaccaaagtttgtgaagggtcgtcagacaccaaaacatatttctgaaagtctaggagctgaggtggatcctgatatgtcttggtcaagttctttagctacaccacccacccttagttctactgtgctcatagtcagaaatgaagaagcatctgaaactgtatttcctcatgatactactgctaatgtgaaaagctatttttccaatcatgatgaaagtctgaagaaaaatgatagatttatcgcttctgtgacagacagtgaaaacacaaatcaaagagaagctgcaagtcatggatttggaaaaacatcagggaattcatttaaagtaaatagctgcaaagaccacattggaaagtcaatgccaaatgtcctagaagatgaagtatatgaaacagttgtagatacctctgaagaagatagtttttcattatgtttttctaaatgtagaacaaaaaatctacaaaaagtaagaactagcaagactaggaaaaaaattttccatgaagcaaacgctgatgaatgtgaaaaatctaaaaaccaagtgaaagaaaaatactcatttgtatctgaagtggaaccaaatgatactgatccattagattcaaatgtagcacatcagaagccctttgagagtggaagtgacaaaatctccaaggaagttgtaccgtctttggcctgtgaatggtctcaactaaccctttcaggtctaaatggagcccagatggagaaaatacccctattgcatatttcttcatgtgaccaaaatatttcagaaaaagacctattagacacagagaacaaaagaaagaaagattttcttacttcagagaattctttgccacgtatttctagcctaccaaaatcagagaagccattaaatgaggaaacagtggtaaataagagagatgaagagcagcatcttgaatctcatacagactgcattcttgcagtaaagcaggcaatatctggaacttctccagtggcttcttcatttcagggtatcaaaaagtctatattcagaataagagaatcacctaaagagactttcaatgcaagtttttcaggtcatatgactgatccaaactttaaaaaagaaactgaagcctctgaaagtggactggaaatacatactgtttgctcacagaaggaggactccttatgtccaaatttaattgataatggaagctggccagccaccaccacacagaattctgtagctttgaagaatgcaggtttaatatccactttgaaaaagaaaacaaataagtttatttatgctatacatgatgaaacattttataaaggaaaaaaaataccgaaagaccaaaaatcagaactaattaactgttcagcccagtttgaagcaaatgcttttgaagcaccacttacatttgcaaatgctgattcaggtttattgcattcttctgtgaaaagaagctgttcacagaatgattctgaagaaccaactttgtccttaactagctcttttgggacaattctgaggaaatgttctagaaatgaaacatgttctaataatacagtaatctctcaggatcttgattataaagaagcaaaatgtaataaggaaaaactacagttatttattaccccagaagctgattctctgtcatgcctgcaggaaggacagtgtgaaaatgatccaaaaagcaaaaaagtttcagatataaaagaagaggtcttggctgcagcatgtcacccagtacaacattcaaaagtggaatacagtgatactgactttcaatcccagaaaagtcttttatatgatcatgaaaatgccagcactcttattttaactcctacttccaaggatgttctgtcaaacctagtcatgatttctagaggcaaagaatcatacaaaatgtcagacaagctcaaaggtaacaattatgaatctgatgttgaattaaccaaaaatattcccatggaaaagaatcaagatgtatgtgctttaaatgaaaattataaaaacgttgagctgttgccacctgaaaaatacatgagagtagcatcaccttcaagaaaggtacaattcaaccaaaacacaaatctaagagtaatccaaaaaaatcaagaagaaactacttcaatttcaaaaataactgtcaatccagactctgaagaacttttctcagacaatgagaataattttgtcttccaagtagctaatgaaaggaataatcttgctttaggaaatactaaggaacttcatgaaacagacttgacttgtgtaaacgaacccattttcaagaactctaccatggttttatatggagacacaggtgataaacaagcaacccaagtgtcaattaaaaaagatttggtttatgttcttgcagaggagaacaaaaatagtgtaaagcagcatataaaaatgactctaggtcaagatttaaaatcggacatctccttgaatatagataaaataccagaaaaaaataatgattacatgaacaaatgggcaggactcttaggtccaatttcaaatcacagttttggaggtagcttcagaacagcttcaaataaggaaatcaagctctctgaacataacattaagaagagcaaaatgttcttcaaagatattgaagaacaatatcctactagtttagcttgtgttgaaattgtaaataccttggcattagataatcaaaagaaactgagcaagcctcagtcaattaatactgtatctgcacatttacagagtagtgtagttgtttctgattgtaaaaatagtcatataacccctcagatgttattttccaagcaggattttaattcaaaccataatttaacacctagccaaaaggcagaaattacagaactttctactatattagaagaatcaggaagtcagtttgaatttactcagtttagaaaaccaagctacatattgcagaagagtacatttgaagtgcctgaaaaccagatgactatcttaaagaccacttctgaggaatgcagagatgctgatcttcatgtcataatgaatgccccatcgattggtcaggtagacagcagcaagcaatttgaaggtacagttgaaattaaacggaagtttgctggcctgttgaaaaatgactgtaacaaaagtgcttctggttatttaacagatgaaaatgaagtggggtttaggggcttttattctgctcatggcacaaaactgaatgtttctactgaagctctgcaaaaagctgtgaaactgtttagtgatattgagaatattagtgaggaaacttctgcagaggtacatccaataagtttatcttcaagtaaatgtcatgattctgttgtttcaatgtttaagatagaaaatcataatgataaaactgtaagtgaaaaaaataataaatgccaactgatattacaaaataatattgaaatgactactggcacttttgttgaagaaattactgaaaattacaagagaaatactgaaaatgaagataacaaatatactgctgccagtagaaattctcataacttagaatttgatggcagtgattcaagtaaaaatgatactgtttgtattcataaagatgaaacggacttgctatttactgatcagcacaacatatgtcttaaattatctggccagtttatgaaggagggaaacactcagattaaagaagatttgtcagatttaacttttttggaagttgcgaaagctcaagaagcatgtcatggtaatacttcaaataaagaacagttaactgctactaaaacggagcaaaatataaaagattttgagacttctgatacattttttcagactgcaagtgggaaaaatattagtgtcgccaaagagtcatttaataaaattgtaaatttctttgatcagaaaccagaagaattgcataacttttccttaaattctgaattacattctgacataagaaagaacaaaatggacattctaagttatgaggaaacagacatagttaaacacaaaatactgaaagaaagtgtcccagttggtactggaaatcaactagtgaccttccagggacaacccgaacgtgatgaaaagatcaaagaacctactctgttgggttttcatacagctagcgggaaaaaagttaaaattgcaaaggaatctttggacaaagtgaaaaacctttttgatgaaaaagagcaaggtactagtgaaatcaccagttttagccatcaatgggcaaagaccctaaagtacagagaggcctgtaaagaccttgaattagcatgtgagaccattgagatcacagctgccccaaagtgtaaagaaatgcagaattctctcaataatgataaaaaccttgtttctattgagactgtggtgccacctaagctcttaagtgataatttatgtagacaaactgaaaatctcaaaacatcaaaaagtatctttttgaaagttaaagtacatgaaaatgtagaaaaagaaacagcaaaaagtcctgcaacttgttacacaaatcagtccccttattcagtcattgaaaattcagccttagctttttacacaagttgtagtagaaaaacttctgtgagtcagacttcattacttgaagcaaaaaaatggcttagagaaggaatatttgatggtcaaccagaaagaataaatactgcagattatgtaggaaattatttgtatgaaaataattcaaacagtactatagctgaaaatgacaaaaatcatctctccgaaaaacaagatacttatttaagtaacagtagcatgtctaacagctattcctaccattctgatgaggtatataatgattcaggatatctctcaaaaaataaacttgattctggtattgagccagtattgaagaatgttgaagatcaaaaaaacactagtttttccaaagtaatatccaatgtaaaagatgcaaatgcatacccacaaactgtaaatgaagatatttgcgttgaggaacttgtgactagctcttcaccctgcaaaaataaaaatgcagccattaaattgtccatatctaatagtaataattttgaggtagggccacctgcatttaggatagccagtggtaaaatcgtttgtgtttcacatgaaacaattaaaaaagtgaaagacatatttacagacagtttcagtaaagtaattaaggaaaacaacgagaataaatcaaaaatttgccaaacgaaaattatggcaggttgttacgaggcattggatgattcagaggatattcttcataactctctagataatgatgaatgtagcacgcattcacataaggtttttgctgacattcagagtgaagaaattttacaacataaccaaaatatgtctggattggagaaagtttctaaaatatcaccttgtgatgttagtttggaaacttcagatatatgtaaatgtagtatagggaagcttcataagtcagtctcatctgcaaatacttgtgggatttttagcacagcaagtggaaaatctgtccaggtatcagatgcttcattacaaaacgcaagacaagtgttttctgaaatagaagatagtaccaagcaagtcttttccaaagtattgtttaaaagtaacgaacattcagaccagctcacaagagaagaaaatactgctatacgtactccagaacatttaatatcccaaaaaggcttttcatataatgtggtaaattcatctgctttctctggatttagtacagcaagtggaaagcaagtttccattttagaaagttccttacacaaagttaagggagtgttagaggaatttgatttaatcagaactgagcatagtcttcactattcacctacgtctagacaaaatgtatcaaaaatacttcctcgtgttgataagagaaacccagagcactgtgtaaactcagaaatggaaaaaacctgcagtaaagaatttaaattatcaaataacttaaatgttgaaggtggttcttcagaaaataatcactctattaaagtttctccatatctctctcaatttcaacaagacaaacaacagttggtattaggaaccaaagtctcacttgttgagaacattcatgttttgggaaaagaacaggcttcacctaaaaacgtaaaaatggaaattggtaaaactgaaactttttctgatgttcctgtgaaaacaaatatagaagtttgttctacttactccaaagattcagaaaactactttgaaacagaagcagtagaaattgctaaagcttttatggaagatgatgaactgacagattctaaactgccaagtcatgccacacattctctttttacatgtcccgaaaatgaggaaatggttttgtcaaattcaagaattggaaaaagaagaggagagccccttatcttagtgggagaaccctcaatcaaaagaaacttattaaatgaatttgacaggataatagaaaatcaagaaaaatccttaaaggcttcaaaaagcactccagatggcacaataaaagatcgaagattgtttatgcatcatgtttctttagagccgattacctgtgtaccctttcgcacaactaaggaacgtcaagagatacagaatccaaattttaccgcacctggtcaagaatttctgtctaaatctcatttgtatgaacatctgactttggaaaaatcttcaagcaatttagcagtttcaggacatccattttatcaagtttctgctacaagaaatgaaaaaatgagacacttgattactacaggcagaccaaccaaagtctttgttccaccttttaaaactaaatcacattttcacagagttgaacagtgtgttaggaatattaacttggaggaaaacagacaaaagcaaaacattgatggacatggctctgatgatagtaaaaataagattaatgacaatgagattcatcagtttaacaaaaacaactccaatcaagcagcagctgtaactttcacaaagtgtgaagaagaacctttagatttaattacaagtcttcagaatgccagagatatacaggatatgcgaattaagaagaaacaaaggcaacgcgtctttccacagccaggcagtctgtatcttgcaaaaacatccactctgcctcgaatctctctgaaagcagcagtaggaggccaagttccctctgcgtgttctcataaacagctgtatacgtatggcgtttctaaacattgcataaaaattaacagcaaaaatgcagagtcttttcagtttcacactgaagattattttggtaaggaaagtttatggactggaaaaggaatacagttggctgatggtggatggctcataccctccaatgatggaaaggctggaaaagaagaattttatagggctctgtgtgacactccaggtgtggatccaaagcttatttctagaatttgggtttataatcactatagatggatcatatggaaactggcagctatggaatgtgcctttcctaaggaatttgctaatagatgcctaagcccagaaagggtgcttcttcaa

SEQ ID NO: 970 - protein, 3418 aa, Homo sapiens
MPIGSKERPTFFEIFKTRCNKADLGPISLNWFEELSSEAPPYNSEPAEESEHKNNNYEPNLFKTPQRKPSYNQLASTPIIFKEQGLTLPLYQSPVKELDKFKLDLGRNVPNSRHKSLRTVKTKMDQADDVSCPLLNSCLSESPVVLQCTHVTPQRDKSVVCGSLFHTPKFVKGRQTPKHISESLGAEVDPDMSWSSSLATPPTLSSTVLIVRNEEASETVFPHDTTANVKSYFSNHDESLKKNDRFIASVTDSENTNQREAASHGFGKTSGNSFKVNSCKDHIGKSMPNVLEDEVYETVVDTSEEDSFSLCFSKCRTKNLQKVRTSKTRKKIFHEANADECEKSKNQVKEKYSFVSEVEPNDTDPLDSNVAHQKPFESGSDKISKEVVPSLACEWSQLTLSGLNGAQMEKIPLLHISSCDQNISEKDLLDTENKRKKDFLTSENSLPRISSLPKSEKPLNEETVVNKRDEEQHLESHTDCILAVKQAISGTSPVASSFQGIKKSIFRIRESPKETFNASFSGHMTDPNFKKETEASESGLEIHTVCSQKEDSLCPNLIDNGSWPATTTQNSVALKNAGLISTLKKKTNKFIYAIHDETFYKGKKIPKDQKSELINCSAQFEANAFEAPLTFANADSGLLHSSVKRSCSQNDSEEPTLSLTSSFGTILRKCSRNETCSNNTVISQDLDYKEAKCNKEKLQLFITPEADSLSCLQEGQCENDPKSKKVSDIKEEVLAAACHPVQHSKVEYSDTDFQSQKSLLYDHENASTLILTPTSKDVLSNLVMISRGKESYKMSDKLKGNNYESDVELTKNIPMEKNQDVCALNENYKNVELLPPEKYMRVASPSRKVQFNQNTNLRVIQKNQEETTSISKITVNPDSEELFSDNENNFVFQVANERNNLALGNTKELHETDLTCVNEPIFKNSTMVLYGDTGDKQATQVSIKKDLVYVLAEENKNSVKQHIKMTLGQDLKSDISLNIDKIPEKNNDYMNKWAGLLGPISNHSFGGSFRTASNKEIKLSEHNIKKSKMFFKDIEEQYPTSLACVEIVNTLALDNQKKLSKPQSINTVSAHLQSSVVVSDCKNSHITPQMLFSKQDFNSNHNLTPSQKAEITELSTILEESGSQFEFTQFRKPSYILQKSTFEVPENQMTILKTTSEECRDADLHVIMNAPSIGQVDSSKQFEGTVEIKRKFAGLLKNDCNKSASGYLTDENEVGFRGFYSAHGTKLNVSTEALQKAVKLFSDIENISEETSAEVHPISLSSSKCHDSVVSMFKIENHNDKTVSEKNNKCQLILQNNIEMTTGTFVEEITENYKRNTENEDNKYTAASRNSHNLEFDGSDSSKNDTVCIHKDETDLLFTDQHNICLKLSGQFMKEGNTQIKEDLSDLTFLEVAKAQEACHGNTSNKEQLTATKTEQNIKDFETSDTFFQTASGKNISVAKESFNKIVNFFDQKPEELHNFSLNSELHSDIRKNKMDILSYEETDIVKHKILKESVPVGTGNQLVTFQGQPERDEKIKEPTLLGFHTASGKKVKIAKESLDKVKNLFDEKEQGTSEITSFSHQWAKTLKYREACKDLELACETIEITAAPKCKEMQNSLNNDKNLVSIETVVPPKLLSDNLCRQTENLKTSKSIFLKVKVHENVEKETAKSPATCYTNQSPYSVIENSALAFYTSCSRKTSVSQTSLLEAKKWLREGIFDGQPERINTADYVGNYLYENNSNSTIAENDKNHLSEKQDTYLSNSSMSNSYSYHSDEVYNDSGYLSKNKLDSGIEPVLKNVEDQKNTSFSKVISNVKDANAYPQTVNEDICVEELVTSSSPCKNKNAAIKLSISNSNNFEVGPPAFRIASGKIVCVSHETIKKVKDIFTDSFSKVIKENNENKSKICQTKIMAGCYEALDDSEDILHNSLDNDECSTHSHKVFADIQSEEILQHNQNMSGLEKVSKISPCDVSLETSDICKCSIGKLHKSVSSANTCGIFSTASGKSVQVSDASLQNARQVFSEIEDSTKQVFSKVLFKSNEHSDQLTREENTAIRTPEHLISQKGFSYNVVNSSAFSGFSTASGKQVSILESSLHKVKGVLEEFDLIRTEHSLHYSPTSRQNVSKILPRVDKRNPEHCVNSEMEKTCSKEFKLSNNLNVEGGSSENNHSIKVSPYLSQFQQDKQQLVLGTKVSLVENIHVLGKEQASPKNVKMEIGKTETFSDVPVKTNIEVCSTYSKDSENYFETEAVEIAKAFMEDDELTDSKLPSHATHSLFTCPENEEMVLSNSRIGKRRGEPLILVGEPSIKRNLLNEFDRIIENQEKSLKASKSTPDGTIKDRRLFMHHVSLEPITCVPFRTTKERQEIQNPNFTAPGQEFLSKSHLYEHLTLEKSSSNLAVSGHPFYQVSATRNEKMRHLITTGRPTKVFVPPFKTKSHFHRVEQCVRNINLEENRQKQNIDGHGSDDSKNKINDNEIHQFNKNNSNQAAAVTFTKCEEEPLDLITSLQNARDIQDMRIKKKQRQRVFPQPGSLYLAKTSTLPRISLKAAVGGQVPSACSHKQLYTYGVSKHCIKINSKNAESFQFHTEDYFGKESLWTGKGIQLADGGWLIPSNDGKAGKEEFYRALCDTPGVDPKLISRIWVYNHYRWIIWKLAAMECAFPKEFANRCLSPERVLLQLKYRYDTEIDRSRRSAIKKIMERDDTAAKTLVLCVSDIISLSANISETSSNKTSSADTQKVAIIELTDGWYAVKAQLDPPLLAVLKNGRLTVGQKIILHGAELVGSPDACTPLEAPESLMLKISANSTRPARWYTKLGFFPDPRPFPLPLSSLFSDGGNVGCVDVIIQRAYPIQWMEKTSSGLYIFRNEREEEKEAAKYVEAQQKRLEALFTKIQEEFEEHEENTTKPYLPSRALTRQQVRALQDGAELYEAVKNAADPAYLEGYFSEEQLRALNNHRQMLNDKKQAQIQLEIRKAMESAEQKEQGLSRDVTTVWKLRIVSYSKKEKDSVILSIWRPSSDLYSLLTEGKRYRIYHLATSKSKSKSERANIQLAATKKTQYQQLPVSDEILFQIYQPREPLHFSKFLDPDFQPSCSEVDLIGFVVSVVKKTGLAPFVYLSDECYNLLAIKFWIDLNEDIIKPHMLIAASNLQWRPESKSGLLTLFAGDFSVFSASPKEGHFQETFNKMKNTVENIDILCNEAENKLMHILHANDPKWSTPTKDCTSGPYTAQIIPGTGNKLLMSSPNCEIYYQSPLSLCMAKRKSVSTPVSAQMTSKSCKGEKEIDDQKNCKKRRALDFLSRLPLPPPVSPICTFVSPAAQKAFQPPRSCGTKYETPIKKKELNSPQMTPFKKFNEISLLESNSIADEELALINTQALLSGSTGEKQFISVSESTRTAPTSSEDYLRLKRRCTTSLIKEQESSQASTEECEKNKQDTITTKKYI

SEQ ID NO: 971 - DNA, 2178 bp, Homo sapiens
ccgcctgtcgcctgtgcgcctgcgcgcggcgccgaggggacggggtccgactcagaaatggcggcctccatgttctacggcaggctagtggccgtggccacccttcggaaccaccggcctcggacggcccagcgggctgctgctcaggttctgggaagttctggattgtttaataaccatggactccaagtacagcagcaacagcaaaggaatctctcactacatgaatacatgagtatggaattattgcaagaagctggtgtctccgttcccaaaggatatgtggcaaagtcaccagatgaagcttatgcaattgccaaaaaattaggttcaaaagatgtcgtgataaaggcacaggttttagctggtggtagaggaaaaggaacatttgaaagtggcctcaaaggaggagtgaagatagttttctctccagaagaagcaaaagctgtttcttcacaaatgattgggaaaaaattgtttaccaagcaaacgggagaaaagggcagaatatgcaatcaagtattggtctgtgagcgaaaatatcccaggagagaatactactttgcaataacaatggaaaggtcatttcaaggtcctgtattaataggaagttcacatggtggtgtcaacattgaagatgttgctgctgagtctcctgaagcaataattaaagaacctattgatattgaagaaggcatcaaaaaggaacaagctctccagcttgcacagaagatgggatttccacctaatattgtggaatcagcagcagaaaacatggtcaagctttacagcctttttctgaaatacgatgcaaccatgatagaaataaatccaatggtggaagattcagatggagctgtattgtgtatggatgcaaagatcaattttgactctaattcagcctatcgccaaaagaaaatctttgatctacaggactggacccaggaagatgaaagggacaaagatgctgctaaggcaaatctcaactacattggcctcgatggaaatataggctgcctagtaaatggtgctggtttggctatggccacaatggatataataaaacttcatggagggactccagccaacttccttgatgttggtggtggtgctacagtccatcaagtaacagaagcatttaagcttatcacttcagataaaaaggtactggctattctggtcaacatttttggaggaatcatgcgctgtgatgttattgcacagggtatagtcatggcagtaaaagacttggaaattaaaatacctgttgtggtacggttacaaggtacacgagtcgatgatgctaaggcactgatagcggacagtggacttaaaatacttgcttgtgatgacttggatgaagctgctagaatggttgtaaagctctctgaaatagtgaccttagcgaagcaagcacatgtggatgtgaaatttcagttgccaatatgatctgaaaacccagtggatggctgaaggtgttaaatgtgctataatcattaagaatactgtgttctgtgttattgttctttttctttttagtgtgtggagattgtaattgccatctaggcacacaaacatttaaaaggatttggactgcatttaattgtaccattcagaatggactgtttgtacgaagcatgtataatgcagttatcttctttctttcgtcgcagccagtcttttttgcttctcctacaaaacgtaacttgcaatttgccagtttattattgttggatacaaagttcttcattgataagagtcctataaataagataaatacgaagataaagctttattctttagtgttaaaatacagtatatctaataactagcctcattagtagagcagtatattaaaacaatgttttatgtaaaaagtgtttatcttcagcaccaaatacatgataaatgtatcaatcactatttataaacagagctttcaaacactcctcagaatattcttctaagtattttgatgaagtaactttgtaattatttgaacattgttttaatcattaggaaacactgattaactgcaagtcttcatgattctgtcatattaagaaacacctgtaggtttgcttcaaataaaggcatatataccaaggacttacagacaaaattaagaatgtcaatttaagttaataaaaatctcccaatatgaaaaaaaaaaaaaaa

SEQ ID NO: 972 - protein, 463 aa, Homo sapiens
MAASMFYGRLVAVATLRNHRPRTAQRAAAQVLGSSGLFNNHGLQVQQQQQRNLSLHEYMSMELLQEAGVSVPKGYVAKSPDEAYAIAKKLGSKDVVIKAQVLAGGRGKGTFESGLKGGVKIVFSPEEAKAVSSQMIGKKLFTKQTGEKGRICNQVLVCERKYPRREYYFAITMERSFQGPVLIGSSHGGVNIEDVAAESPEAIIKEPIDIEEGIKKEQALQLAQKMGFPPNIVESAAENMVKLYSLFLKYDATMIEINPMVEDSDGAVLCMDAKINFDSNSAYRQKKIFDLQDWTQEDERDKDAAKANLNYIGLDGNIGCLVNGAGLAMATMDIIKLHGGTPANFLDVGGGATVHQVTEAFKLITSDKKVLAILVNIFGGIMRCDVIAQGIVMAVKDLEIKIPVVVRLQGTRVDDAKALIADSGLKILACDDLDEAARMVVKLSEIVTLAKQAHVDVKFQLPI

SEQ ID NO: 973 - DNA, 2022 bp, Homo sapiens
attccccaacctgatagccctccgcgacgcattacgcaccgcggacagctggagaggccgaggcgctctcgctttgatttcggcgcctccgccctcgcggggagagattggctgcggccgcgggacggggtagtgagcgcgtcacttcctgccgctgccaggcgcgtcctcccgcgcgctatgacggccagcgcacagccgcgcgggcggcggccaggagtcggagtcggagtcgtggtgaccagctgcaagcatccgcgttgcgtcctcctggggaagaggaaaggctcggttggagctggcagtttccaactccctggaggtcatctggagttcggtgaaacctgggaagaatgtgctcaaagggaaacctgggaagaagcagctcttcacctgaaaaatgttcactttgcctcagttgtgaattctttcattgagaaggagaattaccattatgttactatattaatgaaaggagaagtggatgtgactcatgattcagaaccaaagaatgtagagcctgaaaaaaatgaaagttgggagtgggttccttgggaagaactacctcccctggaccagcttttctggggactgcgttgtttaaaagaacaaggctatgatccatttaaagaagatctgaaccatctggtgggatacaaaggaaatcatctctaggtggccgagaagatttgattttctttaaaaagacaagaataaggtctggttagggaatgaaaaatgtatacatttcggaacaactccattttatctaaaaaagttcttgtgattgccagtttatttgcagtctcttaatgtatcccccactctttcagccagtacttgagaaaatttttctgaaatatgtcattgaattgtattccagacacagaatacatgataaatactgatattatgggtaatctgctttccatatttacctatgatatttactgtgcagtttgtcattactagcttgcatggagtaggatgcagtcaaatttgccttagtgtttctgttcaaatagagacctgaattcaaatattgtagtttaggttcaaacagagtatggctgttgcaaaatttaccaaatttgttgattacctcttttattaaagaaatgttggggagagggtaatatattgtgacaatttttgcaacttacagggaataggacaggtcattagggtgtatttcccaggtttccaattgagaatctaaaccaagagaagtgagacaaaccatctaatatctgtatcatgctattaataggctgtgatgttgagtttctcacttactctttctgaggtccagggtccttatatgaagagattcatatatatgaagagattcgtctagagcagtggttgtcaaagtgtggtctgggggggcctcaagagcctttcaagggtattctaggtcaaagctgtttttataacactaagacattatttcactatttatagcttttccttttttttatttgagaaggagtcttgctctgttgcccacattggagtgcagtggcacgatctcagctcattgcagcctccgccacctgggttcaagcaattctcctacctcagcttcccgagtagctgggattataggcacccaccaccacacctggctaatttttgtatttttagtggagacggggtttcaccatgttggccaggctggtctggaactcctgagctcaagtgatctgcccatctcagcctcccaaagtgctgggattacaggtatgagccacaacgcccagccatcatttatctttttcactcattttttcatgagtatgcagaggagttttcaagaggctatctggtgtgatattgtaataggctgaatgcaaaagcagatacaagattccagctttcgtctgtcatcagacattgaagagatttggagaaatgtaaagcagcagtactcttctcactaatttttattgtggttagttagaaaaatggttatttttagtgggttttaatatgtgaaaaaaataaaattagctatttgcc

SEQ ID NO: 974 - protein, 164 aa, Homo sapiens [sequence omitted]

SEQ ID NO: 975 - DNA, 2022 bp, Homo sapiens
gcgccggtggcgggactctggggaaaatggctgcgtcttcgagtggtgagaaggagaaggagcggctgggaggcggtttgggagtggcgggtggtaacagcacacgagagcggctgctgtctgcgcttgaggacttggaggtcctgtctagggaacttatagaaatgctggcaatttcaagaaaccaaaagttgttacaggctggagaggaaaaccaggtcctggagttgttaattcaccgagatggggaatttcaagaactaatgaaattggcacttaatcagggaaaaattcatcatgaaatgcaagttttagaaaaagaagtagagaagagagacagtgatattcagcagctacaaaaacagctaaaggaagcagaacaaatactggcaacagctgtttaccaagcgaaggagaaactcaagtcaatagaaaaagcaagaaaaggtgctatctcctctgaagaaataattaagtatgcacataggatcagtgcaagtaatgctgtatgtgctccactgacctgggttccaggggacccccggagaccctacccaactgatttagagatgagaagtgggttactgggtcagatgaacaatccttccactaatggcgtgaatggccatttaccaggagatgcacttgcagcaggaagattgccagatgtccttgctccacagtatccatggcagtcaaatgacatgtcgatgaatatgttaccaccaaatcatagtagtgactttttgttggaacctcctgggcataataaagaaaatgaagatgatgtagagattatgtcaacggactcctcaagcagtagtagtgagtctgattgaaaaaccttaaaagacaatatacagaattgaatactgtagaattctgtttctttaacagtagcagggaaatgtaaactacaggtgacaaaaaatacccaggtaaacactggctttggtagaattgtgcagtcattaaaagtcaaaattttttgactttctttttaaagccaaagaccatagttttagttttaagccactaggtagatatttaggggaatagtcaaaatttactgttgaaaaagcagttgctatgtgctttcttaccctgttctgttccagttttgctggatttgtacatagccattctagaaatagagtcgagggaaattatccatatacatatcactaataggcttcttggaattatttagaaaagcatttttaaactggcagtggatgactgaataggcatcatatttctttttgtgtgtcatttaaaagtaacaaaaactgccatttgacagtaaaggctcttggcttctgttggaggcatgggaaattgtctcaatttgtacagtttgtaattgtaatttttgtaaataaatttgtttgtacattgtatgctttttttttagtttaaatatactgtcagtgtaggtaggaaattatttctgtaaatccagttgcattttataatacttgagtgactaactgaattgaaacctattacaattaatagggttctcaaaggcctattcctattagaagaaataattttttttaataattgaaaaaatttaccacagccttgtctgattttaagaatagattgtgtgaagatttagaatggaaagcaaccatttcttcccttcaccttcctcttcttacagttccccaggagtcatttttaaccacttttaatttctgttggtaacctctgtgtttaggtaatatgcttatacaactatttcttgatgtatcagttttagacaatgtatcttctgatttcaaaggtaatacaacatttaatgtgaaacatttagtgaatacagtaaaggagaaaataaaattgttagcattctacccagagataatatcaattcatattgtagtgtagatttttttaaagttcacatacacttttttgtaaaatgagaataatgtttatttcctgagatactgctgtattttttaattgctaatctgtattcttcaaatgaactgagaattccatttttccatc

SEQ ID NO: 976 - protein, 270 aa, Homo sapiens
MAASSSGEKEKERLGGGLGVAGGNSTRERLLSALEDLEVLSRELIEMLAISRNQKLLQAGEENQVLELLIHRDGEFQELMKLALNQGKIHHEMQVLEKEVEKRDSDIQQLQKQLKEAEQILATAVYQAKEKLKSIEKARKGAISSEEIIKYAHRISASNAVCAPLTWVPGDPRRPYPTDLEMRSGLLGQMNNPSTNGVNGHLPGDALAAGRLPDVLAPQYPWQSNDMSMNMLPPNHSSDFLLEPPGHNKENEDDVEIMSTDSSSSSSESD

SEQ ID NO: 977 - DNA, 2104 bp, Homo sapiens
gagttgtttgccggctcccgggccgccagacgctcggagggagcccggccggctcggactgggcggccgggagggagggcgccccgggtcacgacggcgcccgcaagccgagcgcggccgggacgtgcaccatggacccaaaggcgggcggcggcggcgaggaggacgactgcgtggactcgggcgccgagaccggagggtccgactacagccacctgtcctccacgagcaatggattctccacctggcggatgccatgttgcctgttcctttactgtacacacggtgacaaagaaaagggaagatggagcctccaggttgaacatacctggccctcaggtgagctttccgttgaagaggcgcaggaccctttcctggtcagcatccacataatcgcagacccaggggagtcccagcccctgcaggaggccatcgacaacgtcctggcgtggatccaccccgacctcccgctgttccgggtgtccgagaggcgggcgtcccggcggcggcggaagccccccaagggcgctcagccagcgctggctgtggtgctgttcctgcaggaggagtacggcgaagagcagatcctgcagctgcaccgcacactgcagcagccgccctggcgccaccaccacaccgagcaggtgcacggccggttcctgccctacctgccctgcagccaggacttcttcacgctggcccctgggacgccgctttgggccatccggcccgtgcactacggcaaggaaatcgtgcgcttcaccgtctactgtcgctacgacaactatgctgacagcctcaggttctaccagctgattctccggaggaaccccagccagaagaaagcggacttctgcatcttccctattttttccaacctggatgtggacatccagttctccctgaaaagactgccctgtgaccagtgcccggtgcccaccgactcctccgtgctggagttccgagtgagggacataggcgagctcgtgcctctcctgcccaacccttgcagccccatcagcgaggggcgctggcagacggaggaccatgatgggaacaagatcctcctacaggcacaaagggtgcataagaagtttcctaaacctggcagagtacatcatgcctccgagaagaaacgtcattccactcctttgccgagcactgctgtaccaagccatacacctggcagcagccagcagtccccgctcaacagtcctcacccggggcccatccggacaggcctgcctcctgggcaccagcaggaatttgccggacgagccaacagcacccccaaccctccctggtctttccagagaagcaagtccttgttttgtttgcccacgggaggcccctccctggcctcctcagctgaaccacagtggttttcaaacacaggtgccccagggcacagggcatcagagtggaggcatggccacctcctctccatcgatgacctagagggggcccaggagacagacgtggacacaggcctgcggctgtcctcatcggacctgtctgtggtctctgcatattctgcacccagtaggttctgcagcacagtggagacacccctcccctccgaaagatgcagcagccactgggcagctcacaaggattccagggagggaccactgcccactgtcagcagggtgaccacagaggcctcctgggcttccctccctttcttcaccaaaaggtcttccagctcctcagcgacagctcgtgctgctcccccagctcccagcacctccaccctcacagactcctccccacagctcccatgcgatacccccaaagtcaagcagactgatggagacatgccaccacccccagggtcggctggccccggggataacgacatggaggaattctacatctgaatgccctctgctcttgttctcgaaacacacaaactcagagacacagactcaggccccactgcccctctggccactgagcacaccacattcttcatgatccatttcccaggagcccgtagcacatttgcctaccacccactcttagctggggggtggtatatctctagagacacagcagaaaaatactggcatttttatgcaaataaattctcaacaaacttgtc

SEQ ID NO: 978 - protein, 582 aa, Homo sapiens
MDPKAGGGGEEDDCVDSGAETGGSDYSHLSSTSNGFSTWRMPCCLFLYCTHGDKEKGRWSLQVEHTWPSGELSVEEAQDPFLVSIHIIADPGESQPLQEAIDNVLAWIHPDLPLFRVSERRASRRRRKPPKGAQPALAVVLFLQEEYGEEQILQLHRTLQQPPWRHHHTEQVHGRFLPYLPCSQDFFTLAPGTPLWAIRPVHYGKEIVRFTVYCRYDNYADSLRFYQLILRRNPSQKKADFCIFPIFSNLDVDIQFSLKRLPCDQCPVPTDSSVLEFRVRDIGELVPLLPNPCSPISEGRWQTEDHDGNKILLQAQRVHKKFPKPGRVHHASEKKRHSTPLPSTAVPSHTPGSSQQSPLNSPHPGPIRTGLPPGHQQEFAGRANSTPNPPWSFQRSKSLFCLPTGGPSLASSAEPQWFSNTGAPGHRASEWRHGHLLSIDDLEGAQETDVDTGLRLSSSDLSVVSAYSAPSRFCSTVETPLPSERCSSHWAAHKDSREGPLPTVSRVTTEASWASLPFFTKRSSSSSATARAAPPAPSTSTLTDSSPQLPCDTPKVKQTDGDMPPPPGSAGPGDNDMEEFYI

SEQ ID NO: 979 - DNA, 6127 bp, Homo sapiens
agagagaggagagggagaaggagagaggggcagaggggaagggagagagggagagcacgcgagacggaaaggagcgcctcagagtctctgaagcacgcaagagataaccgattaggaatttttcgggcaactgtcacccggatagctgtcagagaatcatcatcaccgcaactctgacgtttcctacaagaagttagagacttaagcagtattggcatcggatggaaatggtatgcatgctgctgtggaaaatatccctgagctgaagaagtgcaactatgtgttgtgtgtgctaaatgcccagaagaacccagacccagtgggtaagagagacgaaatgtggagagaatgactaacgacaaatccgtgaatttgttctctggagttgctaatttgccagcccgaagcaacacattttacaaggaggaaacattttgctgcttctgatttctccccaaactggtgctaccagatgcatggctttctatgtgttggaacaaatcattcctaactgcagcatactgggaaaggggaaaggttgaggcaactaaccggctgtctccaaataagtgatgagatataatgcatcctccagtccatgcacgcttcctcttgcaatttgtgcatcattcctcagtggaaacctttaaaccctaaaatccaggaaaagaaaataaatacattatcatggacctgagggatttttacctgttggctgctctgattgcctgtttaaggctggattccgcaatagctcaagaacttatttacactattagagaggaattgcctgaaaatgtgcccataggaaacataccaaaggatctgaacatttctcacatcaatgctgccacagggaccagcgccagccttgtctacagactggtttctaaagctggggatgcccctttggtgaaagtatccagcagcactggggaaattttcacaacctccaacagaatagacagagaaaaactctgtgctggcgcctcatatgctgaggagaatgagtgtttctttgaacttgaggtggtgatcctccccaatgatttcttcaggctgatcaaaataaaaataattgtcaaggataccaatgataatgcccccatgtttccatctcctgtcatcaatatttccattccagaaaacactttgatcaacagccgctttccaattccatcagcaacagatcctgacacaggcttcaatggtgtacagcattatgaattgttaaatgggcagagtgtttttggactggatatcgtggaaactccagagggagagaagtggccacaactgattgttcagcaaaacttggatagagaacagaaagatacctatgtgatgaaaatcaaagtagaggatggaggcactccacagaaatccagtacggccatactgcaggtcacagtaagtgatgtaaatgacaacaggccagtgtttaaagagggtcaagtggaggtgcatattccagagaatgctcccgtaggtacctctgtaattcagctccatgccactgatgcagatataggcagtaatgctgaaatccggtacatttttggtgcccaggtcgcccctgcaaccaaaagactctttgctttaaataatactactgggctgattacagttcagaggtccttagatagagaggagacagccattcacaaagtgacagtgctggctagtgacggcagctccactcctgctcgagcaacggttaccatcaatgtcaccgatgtaaatgataaccctcctaatatagacctcaggtacattataagtcccatcaatggcaccgtgtatttatctgagaaagatcctgtcaatacaaagattgccctaattacagtttcagataaggacacagatgtgaatggcaaagtgatctgttttattgaaagagaggtcccatttcatttgaaggcggtatatgacaaccaatatttgttagagacctcttctttgttggactatgagggcaccaaagaattcagctttaaaattgttgcctctgattctgggaagcccagtttaaatcagactgccctggtaagggttaagcttgaggatgaaaatgacaacccaccaattttcaaccagcctgtaattgagctgtcagtttctgaaaacaaccgacgtgggttatacttaacaactattagtgccacagatgaagacagtgggaaaaatgcagacattgtttatcagcttggaccgaatgcctccttctttgatctggaccgaaaaacaggagttttgacagcctccagagtatttgacagagaagaacaagaacgattcatttttacagtaactgccagggacaatgggacccctcccctccaaagccaagcggctgtgattgttactgttctggatgagaatgacaatagccccaagtttactcataatcattttcaattttttgtgtctgagaatctgccaaagtatagtactgtgggggtaatcacagtgacagatgcagatgctggagagaataaagctgtgactctttccattctaaatgacaatgataattttgtgttggatccctattctggagtcataaagtcaaatgtctcatttgatagagagcagcagagttcctacacttttgatgtcaaagccactgatggaggacaaccacctcgttcctctactgcaaaagtaactatcaacgtcatggatgtcaatgacaacagcccagttgtcatttctccaccgtctaatacttcctttaagttggtgcccctctcagccattcctggctccgtggtagcagaagtttttgcagtggatgttgacactggaatgaacgctgaactaaagtatactatagtgagtggaaacaataaaggcttattccggattgatccagtaacaggtaacattactctggaagaaaaaccagcacctactgatgtgggattgcatcgtttggtggtcaacataagtgacctggggtaccctaagtctttgcacacgcttgtgcttgtattcctttatgttaacgacactgctggaaatgcctcctatatctatgacttgatccgcaggactatggagaccccgttggacaggaacataggggatagtagccaaccctatcaaaatgaggactatctaaccatcatgattgccatcatcgccggtgccatggtggtcattgttgtgatcttcgtcaccgttctggtgcgctgtcgccatgcatcaaggttcaaagcagctcagaggagcaagcaaggtgccgaatggatgtccccaaaccaggagaacaagcaaaacaagaaaaagaaaagaaagaaaaggaagtctcccaaaagctctcttttgaactttgttactatcgaagagtccaaacccgatgatgcagttcatgaacctatcaatgggacaataagcctgccggctgaactggaggagcaaagtataggaagatttgactggggcccggcacctccaacaacattcaagcctaacagtcctgacctggccaagcactacaaatctgcttctccacagcctgcttttcatctcaaaccagacactccagtttccgtgaaaaagcaccacgtgattcaggaactccctttggacaacacctttgttgggggttgtgacaccctttctaaacgctcttccactagttcagatcacttcagtgcctcagagtgcagttcccaaggaggcttcaagacaaagggccccttacacaccagacagtcgcagcgccgtgttacgtttcatctccctgatggctcccaggaaagctgcagtgacagtggtctaggagaccatgagccggtgggtagtggaaccctgatctcacaccctcttcctctggttcagccacaggacgaattctatgaccaggcctctccggacaagaggactgaagcagatggcaactctgatcccaactctgatgggcctttgggtccccgaggattagctgaagctacagagatgtgcactcaagagtgcttggttttgggtcactctgataattgctggatgcctcctggcttgggtccatatcaacaccccaaatctcctctctcaacctttgcaccccagaaagaatgggtgaagaaggacaagcttgtgaatgggcacaccctgaccagagcctggaaagaagacagcaacaggaaccagttcaatgaccgtaagcagtatggctccaatgaaggccatttcaacaatggcagccacatgacagacattcctctggcaaatctgaagtcttataagcaagcaggaggtgctactgagagtcctaaggagcaccaactctaagaaaaggctatatgggacctaataactttaaatagacatgctaataccgtgtgcgtcagagctttatgtattcaatagatctctacaactatgccccttctagcagggatacctataactttgtgttagcaccatggagaatacaatgtttttgcaacatatgagagaagatagttctagccatgcaattttgtttactagaattgattacactctccagagatctctccattgtgcaaattttttttattattgcattttattttgaccctggactgctgctatgaacaatagaatatgcatttggaaagtaagaaagtttcatggattagagtgactgaaaaacatatccagttagaaaattgtgcttttttttttttttttttttttttttgtcattgatttgtgctgggactgctatacttgacattatactgcaaacaaaacttaaagagataagcattaaacctattgtgctgttaacaacgttagtggacacttgtaagtcaatcagtgttaaagtatttgtaaatagaagcaagctattattaacaacttttgtgtacttataatgttcacctaaaaatgttgtagcataattctgtgttttatggttgcttctgtccttctttttatttacctctttgttgttatttttgttgtttctttcagtgaggtgtttctgtgttagtagtctgtcttgacacacattgttcaaacaatctcaagcacttgtgtttaaaaaaggttctgaaatcttgcttctcatatgatagcttatgatgccggaattctgtaaacaataaagatgaaagaaaaaatgaaaactttatacaaaaaaggacttctgcaaaagcttggaaattcagaacctattttttatcatcttattttcaaagtaggcaaaagcaaaatcacttaattagtaccattaagtgagagagtaatggaaaactgttatccatcaaaagtgatataatatcctgtacttgtcactcatgtaaaactaatgtatcaaaattagcatatatggaagaaaaatcactattcaaaaatagtttcaattgggcaaatgtgtgtctacaactttgttgaaatggcagagtctgtgttgatcctcatatacaataatgttgttgtaacacaagtgttattagaccatagccacaaaatatttaatgtgttgtgccttcatgatgtaacagaacattctccaggtagggtagttgggggaaataaagggataaatctctaattattgctgtttaactgtttgttatcatagttggtcaatgcctggcaggtaccagcatattgtcacttaggtcaaaccaataaagtgacaactaatgttaataagatctcagttgcacgtgcaaacaaatccaaattcgaacattcttaggaggtttttgttaaggcatgacagatgatttaaacaaataaatagcatgcaacaaaatgtctttattgaaagaagtggaagttatcttaatgccacggttcaccatcaatttaaaagtaaaaaaaacaaaaaaaaaacaaaaaatttaaaaaaaaggtttgctaatctgatagttaatttgttcttaccaaaaaataaaattactttgtaaatagcagttcacatttttccacagtataatggaaaataatgggtaggggtgcattgcttattgaagtacatttttgtcggtttgtgaggggtgtttgatgactttgacagaataaatatctaaacaattatccttgttactgctttgccagttctacgttatttacaattattcagctcttgcaataaatgttctgaattcctgaaaaaaaa

SEQ ID NO: 980 - protein, 1203 aa, Homo sapiens
MDLRDFYLLAALIACLRLDSAIAQELIYTIREELPENVPIGNIPKDLNISHINAATGTSASLVYRLVSKAGDAPLVKVSSSTGEIFTTSNRIDREKLCAGASYAEENECFFELEVVILPNDFFRLIKIKIIVKDTNDNAPMFPSPVINISIPENTLINSRFPIPSATDPDTGFNGVQHYELLNGQSVFGLDIVETPEGEKWPQLIVQQNLDREQKDTYVMKIKVEDGGTPQKSSTAILQVTVSDVNDNRPVFKEGQVEVHIPENAPVGTSVIQLHATDADIGSNAEIRYIFGAQVAPATKRLFALNNTTGLITVQRSLDREETAIHKVTVLASDGSSTPARATVTINVTDVNDNPPNIDLRYIISPINGTVYLSEKDPVNTKIALITVSDKDTDVNGKVICFIEREVPFHLKAVYDNQYLLETSSLLDYEGTKEFSFKIVASDSGKPSLNQTALVRVKLEDENDNPPIFNQPVIELSVSENNRRGLYLTTISATDEDSGKNADIVYQLGPNASFFDLDRKTGVLTASRVFDREEQERFIFTVTARDNGTPPLQSQAAVIVTVLDENDNSPKFTHNHFQFFVSENLPKYSTVGVITVTDADAGENKAVTLSILNDNDNFVLDPYSGVIKSNVSFDREQQSSYTFDVKATDGGQPPRSSTAKVTINVMDVNDNSPVVISPPSNTSFKLVPLSAIPGSVVAEVFAVDVDTGMNAELKYTIVSGNNKGLFRIDPVTGNITLEEKPAPTDVGLHRLVVNISDLGYPKSLHTLVLVFLYVNDTAGNASYIYDLIRRTMETPLDRNIGDSSQPYQNEDYLTIMIAIIAGAMVVIVVIFVTVLVRCRHASRFKAAQRSKQGAEWMSPNQENKQNKKKKRKKRKSPKSSLLNFVTIEESKPDDAVHEPINGTISLPAELEEQSIGRFDWGPAPPTTFKPNSPDLAKHYKSASPQPAFHLKPDTPVSVKKHHVIQELPLDNTFVGGCDTLSKRSSTSSDHFSASECSSQGGFKTKGPLHTRQSQRRVTFHLPDGSQESCSDSGLGDHEPVGSGTLISHPLPLVQPQDEFYDQASPDKRTEADGNSDPNSDGPLGPRGLAEATEMCTQECLVLGHSDNCWMPPGLGPYQHPKSPLSTFAPQKEWVKKDKLVNGHTLTRAWKEDSNRNQFNDRKQYGSNEGHFNNGSHMTDIPLANLKSYKQAGGATESPKEHQL

SEQ ID NO: 981 - DNA, 6229 bp, Homo sapiens
agagagaggagagggagaaggagagaggggcagaggggaagggagagagggagagcacgcgagacggaaaggagcgcctcagagtctctgaagcacgcaagagataaccgattaggaatttttcgggcaactgtcacccggatagctgtcagagaatcatcatcaccgcaactctgacgtttcctacaagaagttagagacttaagcagtattggcatcggatggaaatggtatgcatgctgctgtggaaaatatccctgagctgaagaagtgcaactatgtgttgtgtgtgctaaatgcccagaagaacccagacccagtgggtaagagagacgaaatgtggagagaatgactaacgacaaatccgtgaatttgttctctggagttgctaatttgccagcccgaagcaacacattttacaaggaggaaacattttgctgcttctgatttctccccaaactggtgctaccagatgcatggctttctatgtgttggaacaaatcattcctaactgcagcatactgggaaaggggaaaggttgaggcaactaaccggctgtctccaaataagtgatgagatataatgcatcctccagtccatgcacgcttcctcttgcaatttgtgcatcattcctcagtggaaacctttaaaccctaaaatccaggaaaagaaaataaatacattatcatggacctgagggatttttacctgttggctgctctgattgcctgtttaaggctggattccgcaatagctcaagaacttatttacactattagagaggaattgcctgaaaatgtgcccataggaaacataccaaaggatctgaacatttctcacatcaatgctgccacagggaccagcgccagccttgtctacagactggtttctaaagctggggatgcccctttggtgaaagtatccagcagcactggggaaattttcacaacctccaacagaatagacagagaaaaactctgtgctggcgcctcatatgctgaggagaatgagtgtttctttgaacttgaggtggtgatcctccccaatgatttcttcaggctgatcaaaataaaaataattgtcaaggataccaatgataatgcccccatgtttccatctcctgtcatcaatatttccattccagaaaacactttgatcaacagccgctttccaattccatcagcaacagatcctgacacaggcttcaatggtgtacagcattatgaattgttaaatgggcagagtgtttttggactggatatcgtggaaactccagagggagagaagtggccacaactgattgttcagcaaaacttggatagagaacagaaagatacctatgtgatgaaaatcaaagtagaggatggaggcactccacagaaatccagtacggccatactgcaggtcacagtaagtgatgtaaatgacaacaggccagtgtttaaagagggtcaagtggaggtgcatattccagagaatgctcccgtaggtacctctgtaattcagctccatgccactgatgcagatataggcagtaatgctgaaatccggtacatttttggtgcccaggtcgcccctgcaaccaaaagactctttgctttaaataatactactgggctgattacagttcagaggtccttagatagagaggagacagccattcacaaagtgacagtgctggctagtgacggcagctccactcctgctcgagcaacggttaccatcaatgtcaccgatgtaaatgataaccctcctaatatagacctcaggtacattataagtcccatcaatggcaccgtgtatttatctgagaaagatcctgtcaatacaaagattgccctaattacagtttcagataaggacacagatgtgaatggcaaagtgatctgttttattgaaagagaggtcccatttcatttgaaggcggtatatgacaaccaatatttgttagagacctcttctttgttggactatgagggcaccaaagaattcagctttaaaattgttgcctctgattctgggaagcccagtttaaatcagactgccctggtaagggttaagcttgaggatgaaaatgacaacccaccaattttcaaccagcctgtaattgagctgtcagtttctgaaaacaaccgacgtgggttatacttaacaactattagtgccacagatgaagacagtgggaaaaatgcagacattgtttatcagcttggaccgaatgcctccttctttgatctggaccgaaaaacaggagttttgacagcctccagagtatttgacagagaagaacaagaacgattcatttttacagtaactgccagggacaatgggacccctcccctccaaagccaagcggctgtgattgttactgttctggatgagaatgacaatagccccaagtttactcataatcattttcaattttttgtgtctgagaatctgccaaagtatagtactgtgggggtaatcacagtgacagatgcagatgctggagagaataaagctgtgactctttccattctaaatgacaatgataattttgtgttggatccctattctggagtcataaagtcaaatgtctcatttgatagagagcagcagagttcctacacttttgatgtcaaagccactgatggaggacaaccacctcgttcctctactgcaaaagtaactatcaacgtcatggatgtcaatgacaacagcccagttgtcatttctccaccgtctaatacttcctttaagttggtgcccctctcagccattcctggctccgtggtagcagaagtttttgcagtggatgttgacactggaatgaacgctgaactaaagtatactatagtgagtggaaacaataaaggcttattccggattgatccagtaacaggtaacattactctggaagaaaaaccagcacctactgatgtgggattgcatcgtttggtggtcaacataagtgacctggggtaccctaagtctttgcacacgcttgtgcttgtattcctttatgttaacgacactgctggaaatgcctcctatatctatgacttgatccgcaggactatggagaccccgttggacaggaacataggggatagtagccaaccctatcaaaatgaggactatctaaccatcatgattgccatcatcgccggtgccatggtggtcattgttgtgatcttcgtcaccgttctggtgcgctgtcgccatgcatcaaggttcaaagcagctcagaggagcaagcaaggtgccgaatggatgtccccaaaccaggagaacaagcaaaacaagaaaaagaaaagaaagaaaaggaagtctcccaaaagctctcttttgaactttgttactatcgaagagtccaaacccgatgatgcagttcatgaacctatcaatgggacaataagcctgccggctgaactggaggagcaaagtataggaagatttgactggggcccggcacctccaacaacattcaagcctaacagtcctgacctggccaagcactacaaatctgcttctccacagcctgcttttcatctcaaaccagacactccagtttccgtgaaaaagcaccacgtgattcaggaactccctttggacaacacctttgttgggggttgtgacaccctttctaaacgctcttccactagttcagatcacttcagtgcctcagagtgcagttcccaaggaggcttcaagacaaagggccccttacacaccagacagtgtaactcacacagcaaaagtgacaatattcctgtcactcctcagaaatgtcccagctccacgggtttccacattcaggagaatgaagaaagccattacgagtcgcagcgccgtgttacgtttcatctccctgatggctcccaggaaagctgcagtgacagtggtctaggagaccatgagccggtgggtagtggaaccctgatctcacaccctcttcctctggttcagccacaggacgaattctatgaccaggcctctccggacaagaggactgaagcagatggcaactctgatcccaactctgatgggcctttgggtccccgaggattagctgaagctacagagatgtgcactcaagagtgcttggttttgggtcactctgataattgctggatgcctcctggcttgggtccatatcaacaccccaaatctcctctctcaacctttgcaccccagaaagaatgggtgaagaaggacaagcttgtgaatgggcacaccctgaccagagcctggaaagaagacagcaacaggaaccagttcaatgaccgtaagcagtatggctccaatgaaggccatttcaacaatggcagccacatgacagacattcctctggcaaatctgaagtcttataagcaagcaggaggtgctactgagagtcctaaggagcaccaactctaagaaaaggctatatgggacctaataactttaaatagacatgctaataccgtgtgcgtcagagctttatgtattcaatagatctctacaactatgccccttctagcagggatacctataactttgtgttagcaccatggagaatacaatgtttttgcaacatatgagagaagatagttctagccatgcaattttgtttactagaattgattacactctccagagatctctccattgtgcaaattttttttattattgcattttattttgaccctggactgctgctatgaacaatagaatatgcatttggaaagtaagaaagtttcatggattagagtgactgaaaaacatatccagttagaaaattgtgcttttttttttttttttttttttttttgtcattgatttgtgctgggactgctatacttgacattatactgcaaacaaaacttaaagagataagcattaaacctattgtgctgttaacaacgttagtggacacttgtaagtcaatcagtgttaaagtatttgtaaatagaagcaagctattattaacaacttttgtgtacttataatgttcacctaaaaatgttgtagcataattctgtgttttatggttgcttctgtccttctttttatttacctctttgttgttatttttgttgtttctttcagtgaggtgtttctgtgttagtagtctgtcttgacacacattgttcaaacaatctcaagcacttgtgtttaaaaaaggttctgaaatcttgcttctcatatgatagcttatgatgccggaattctgtaaacaataaagatgaaagaaaaaatgaaaactttatacaaaaaaggacttctgcaaaagcttggaaattcagaacctattttttatcatcttattttcaaagtaggcaaaagcaaaatcacttaattagtaccattaagtgagagagtaatggaaaactgttatccatcaaaagtgatataatatcctgtacttgtcactcatgtaaaactaatgtatcaaaattagcatatatggaagaaaaatcactattcaaaaatagtttcaattgggcaaatgtgtgtctacaactttgttgaaatggcagagtctgtgttgatcctcatatacaataatgttgttgtaacacaagtgttattagaccatagccacaaaatatttaatgtgttgtgccttcatgatgtaacagaacattctccaggtagggtagttgggggaaataaagggataaatctctaattattgctgtttaactgtttgttatcatagttggtcaatgcctggcaggtaccagcatattgtcacttaggtcaaaccaataaagtgacaactaatgttaataagatctcagttgcacgtgcaaacaaatccaaattcgaacattcttaggaggtttttgttaaggcatgacagatgatttaaacaaataaatagcatgcaacaaaatgtctttattgaaagaagtggaagttatcttaatgccacggttcaccatcaatttaaaagtaaaaaaaacaaaaaaaaaacaaaaaatttaaaaaaaaggtttgctaatctgatagttaatttgttcttaccaaaaaataaaattactttgtaaatagcagttcacatttttccacagtataatggaaaataatgggtaggggtgcattgcttattgaagtacatttttgtcggtttgtgaggggtgtttgatgactttgacagaataaatatctaaacaattatccttgttactgctttgccagttctacgttatttacaattattcagctcttgcaataaatgttctgaattcctgaaaaaaaa

SEQ ID NO: 982 - protein, 1237 aa, Homo sapiens
MDLRDFYLLAALIACLRLDSAIAQELIYTIREELPENVPIGNIPKDLNISHINAATGTSASLVYRLVSKAGDAPLVKVSSSTGEIFTTSNRIDREKLCAGASYAEENECFFELEVVILPNDFFRLIKIKIIVKDTNDNAPMFPSPVINISIPENTLINSRFPIPSATDPDTGFNGVQHYELLNGQSVFGLDIVETPEGEKWPQLIVQQNLDREQKDTYVMKIKVEDGGTPQKSSTAILQVTVSDVNDNRPVFKEGQVEVHIPENAPVGTSVIQLHATDADIGSNAEIRYIFGAQVAPATKRLFALNNTTGLITVQRSLDREETAIHKVTVLASDGSSTPARATVTINVTDVNDNPPNIDLRYIISPINGTVYLSEKDPVNTKIALITVSDKDTDVNGKVICFIEREVPFHLKAVYDNQYLLETSSLLDYEGTKEFSFKIVASDSGKPSLNQTALVRVKLEDENDNPPIFNQPVIELSVSENNRRGLYLTTISATDEDSGKNADIVYQLGPNASFFDLDRKTGVLTASRVFDREEQERFIFTVTARDNGTPPLQSQAAVIVTVLDENDNSPKFTHNHFQFFVSENLPKYSTVGVITVTDADAGENKAVTLSILNDNDNFVLDPYSGVIKSNVSFDREQQSSYTFDVKATDGGQPPRSSTAKVTINVMDVNDNSPVVISPPSNTSFKLVPLSAIPGSVVAEVFAVDVDTGMNAELKYTIVSGNNKGLFRIDPVTGNITLEEKPAPTDVGLHRLVVNISDLGYPKSLHTLVLVFLYVNDTAGNASYIYDLIRRTMETPLDRNIGDSSQPYQNEDYLTIMIAIIAGAMVVIVVIFVTVLVRCRHASRFKAAQRSKQGAEWMSPNQENKQNKKKKRKKRKSPKSSLLNFVTIEESKPDDAVHEPINGTISLPAELEEQSIGRFDWGPAPPTTFKPNSPDLAKHYKSASPQPAFHLKPDTPVSVKKHHVIQELPLDNTFVGGCDTLSKRSSTSSDHFSASECSSQGGFKTKGPLHTRQCNSHSKSDNIPVTPQKCPSSTGFHIQENEESHYESQRRVTFHLPDGSQESCSDSGLGDHEPVGSGTLISHPLPLVQPQDEFYDQASPDKRTEADGNSDPNSDGPLGPRGLAEATEMCTQECLVLGHSDNCWMPPGLGPYQHPKSPLSTFAPQKEWVKKDKLVNGHTLTRAWKEDSNRNQFNDRKQYGSNEGHFNNGSHMTDIPLANLKSYKQAGGATESPKEHQL

SEQ ID NO: 983 - DNA, 2328 bp, Homo sapiens
gagctttgaactttctttgttttagaaaattgcattgatatagtgttactctcttgtgatattgtgttgatatgacattactctcttaggagacagtaattttctaaaacaaagtcatattctctcaagttttcctcccctaacttggacaatccctacctaatctccagggatagactcctatcatatttccaaactattaattatagcagaaactagatgtcttttgggattagccttttaaaaatagagcattccaacccttacaggtcaaaagccctggatttcaagaatctgtctctgctatgagtctcaagagcctattttgtaactcagaagccaaggacaacaaatgctaccatacttattctgagtcttcctggtcagaaaccaagaagatagtcattgcaacaaaaatacacagctttcagacattctcttcctgctactcagattgtcacgggatacttggggtgttgcttcaccagctggaaacctctgtggctggtggtaccttctgcctgagtattgctcatgcctggtgggctcgctttgcccactcatcctggaaggctgcactcggctcatgctatcagcctggattccatacctgccaagggcaagccaggctcggatcagtgaggggtgtgtgggcaagtgagcatggggttcagccacagcgcacaggcaggcacactggctgctgcagcagggtgggcagcttcaggcactgcagctgaaccagatgtactacatgcagcttctgttgtgggcacccatgcctggacaaggggaatgcagtggtgcctggaaacttggagatgccaggaaccacagagcctcaaagacagtatcatcatagccctaacttggggagcccctaggtctgggctaccctaagggcggcaactcttttctccttcccgtcgctcacaacatggtgagtggcaggtcatgtttcagccctgtttgtgttatagccctttcagtcctgccattcagcaggtcctgagttcttgtcccacatccaggaagaatgaggtacatggacaactggagggtaaacaaggtggagagaagcttcattgagtgacaggacagctttcaatagacccaaagtgggtagctcctttccgcaggcaggttgcagccctcagcggagagaccaagcatgggtagctgccatctgcaggcaagttgtcccaacatctctgtgagtatggctgagtggtggatggggcggaatggagagagagtcctttatgggcttcagaaggaaggaagtgcattgtgcatgctgattagtccatgggcagccataggcaggcctggaaaaagcaccataagttcttactccaagccatggactccagccagaactgacagcccagaccccatactttaggtcatctctggcttgaaggtggggcttcactgtgcacccacccttttctatgcagaagtctgtcttcctcctgctgctatcatattgtccatagtgcccacgctgctcatgctgaggagtgcctgcaggcccgacaagctgccgtcaaccctgcctcagcctccctcccatgctgatcagtgcataaagtccaagggggccaagggccagggtttggcatgtcagcgtcaccccaaacatgcgcacccacaggcaggtcagaagagcacccgggcttgccctcaactttgctctgaaatcagagtgggcaccaggcacagggagaagctaggcagtgggagtaggcacttctgagcccgcgaggctgagggggctcagaggtccccaggagcacagggtgcccacgtccgcagctgtggctgggtagctgcagcagtgcctcggagggcagggctcccaccctgccaattcagaagggggcagggctccccctgttcccagccctagctgcacctccccaacttcagcccatgtcttcacagcagccactcccaacgggctgccactgccaacaagatgacctattttgccaatattcatcaactggaacatatttcacaccacagtgttgataaaggaatatgccaataagatggatgctttcatttatgatgaaaataattattacagagaagagtctgtataatggcagctataacaactggatctacttgacaaggtggatgtaacatttcaaactattgaaaaggatgctttgaattaatataaaataaagaatggggctggaaataacccatctaccattttactgaatgaaaaaatcattactattctgtatatactgtgaagctagtaaattgagacataaaatattttttgtgaattaaaaaataagtcaaatc

SEQ ID NO: 984 - protein, 144 aa, Homo sapiens
MSLKSLFCNSEAKDNKCYHTYSESSWSETKKIVIATKIHSFQTFSSCYSDCHGILGVLLHQLETSVAGGTFCLSIAHAWWARFAHSSWKAALGSCYQPGFHTCQGQARLGSVRGVWASEHGVQPQRTGRHTGCCSRVGSFRHCS

SEQ ID NO: 985 - DNA, 2126 bp, Homo sapiens
gtaaggccgttttcttttcccattcgctcatctgccaggaaaagggacttgccgttggcgcttcggcctcttgttcattgagaaaaaagaggaaatactccgcgtgcgcttgtagaaggggagtcgtctccagctccgaaccccggagtgttcatcagcggggaatctggctccgaattctctttttttctcccgccgattgctcggaagttggtctaaagcagaggttggaaagaaaggaaaaaagtttgcatcgagactggatttatttgcacatcgcagaaagaagagaatccaagggagaggggttggtgcaaagccgcgatcacggagttcagatgtgttctaagcctgctggagtgaccacacttccaagacctgatggaggccagagctcagagtggcaacgggtcgcagcccttgctgcagacgccccgtgacggtggcagacagcgtggggagcccgaccccagagacgccctcacccagcaggtacatgtcttgtctctggatcagatcagagccatccgaaacaccaatgagtacacagaggggcctactgtcgtcccaagacctgggctcaagcctgctcctcgcccctccactcagcacaaacacgagagactccacggtctgcctgagcaccgccagcctcctaggctccagcactcgcaggtccattcttctgcacgagcccctctgtccagatccataagcacggtcagctcagggtcgcggagcagtacgaggacaagtaccagcagcagctcctctgaacagagactgctaggatcatccttctcctccgggcctgttgctgatggcataatccgggtgcaacccaaatctgagctcaagccaggtgagcttaagccactgagcaaggaagatttgggcctgcacgcctacaggtgtgaggactgtggcaagtgcaaatgtaaggagtgcacctacccaaggcctctgccatcagactggatctgcgacaagcagtgcctttgctcggcccagaacgtgattgactatgggacttgtgtatgctgtgtgaaaggtctcttctatcactgttctaatgatgatgaggacaactgtgctgacaacccatgttcttgcagccagtctcactgttgtacacgatggtcagccatgggtgtcatgtccctctttttgccttgtttatggtgttaccttccagccaagggttgccttaaattgtgccaggggtgttatgaccgggttaacaggcctggttgccgctgtaaaaactcaaacacagtttgctgcaaagttcccactgtcccccctaggaactttgaaaaaccaacatagcatcattaatcaggaatattacagtaatgaggattttttctttctttttttaatacacatatgcaaccaactaaacagttataatcttggcactgttaatagaaaggtgggatagtctttgctgtttgcggtgaaatgctttttgtccatgtgccgttttaactgatatgcttgttagaactcagctaatggagctcaaagtatgagatacagaacttggtgacccatgtattgcataagctaaagcaacacagacactcctaggcaaagtttttgtttgtgaatagtacttgcaaaacttgtaaattagcagatgacttttttccattgttttctccagagagaatgtgctatatttttgtatatacaataatatttgcaactgtgaaaaacaagttgtgccatactacatggcacagacacaaaatattatactaatatgttgtacattcggaagaatgtgaatcaatcagtatgtttttagattgtattttgccttacagaaagcctttattgtaagactctgatttccctttggacttcatgtatattgtacagttacagtaaaattcaacctttattttctaattttttcaacatattgtttagtgtaaagaatatttatttgaagttttattattttataaaaaagaatatttattttaagaggcatcttacaaattttgccccttttatgaggatgtgatagttgctgcaaatgaggggttacagatgcatatgtccaatataaaatagaaaatatattaacgtttgaaattaaaaaaaaaaaaaaaaaa

SEQ ID NO: 986 - protein, 315 aa, Homo sapiens
MEARAQSGNGSQPLLQTPRDGGRQRGEPDPRDALTQQVHVLSLDQIRAIRNTNEYTEGPTVVPRPGLKPAPRPSTQHKHERLHGLPEHRQPPRLQHSQVHSSARAPLSRSISTVSSGSRSSTRTSTSSSSSEQRLLGSSFSSGPVADGIIRVQPKSELKPGELKPLSKEDLGLHAYRCEDCGKCKCKECTYPRPLPSDWICDKQCLCSAQNVIDYGTCVCCVKGLFYHCSNDDEDNCADNPCSCSQSHCCTRWSAMGVMSLFLPCLWCYLPAKGCLKLCQGCYDRVNRPGCRCKNSNTVCCKVPTVPPRNFEKPT

SEQ ID NO: 987 - DNA, 4944 bp, Homo sapiens
gggaggacgaggggcgcgtggttttcccatctcatccctggaggaggggctggagcatccccggcagccaatcagggacaggctgggggggggaccgctttgaagaagtttgggggaaaaaagtttggaaaagtttctataataacgaggggctggagggaggcggcagcgacggaggagggggcttctcagagaaagggagggagggagccacccgggtgaagatacagcagcctcctgaactcccccctcccacccaggccgggacctgggggctcctgccggatccatgggggcggccagctgcgaggatgaggagctggaatttaagctggtgttcggggaggaaaaggaggcccccccgctgggcgcggggggattgggggaagaactggactcagaggatgccccgccatgctgccgtctggccttgggagagccccctccctatggcgctgcacctatcggtattccccgacctccaccccctcggcctggcatgcattcgccaccgccgcgaccagccccctcacctggcacctgggagagccagcccgccaggtcggtgaggctgggaggaccaggagggggtgctgggggtgctgggggtggccgtgttctcgagtgtcccagcatccgcatcacctccatctctcccacgccggagccgccagcagcgctggaggacaaccctgatgcctggggggacggctctcctagagattaccccccaccagaaggctttgggggctacagagaagcagggggccagggtgggggggccttcttcagcccaagccctggcagcagcagcctgtcctcgtggagcttcttctccgatgcctctgacgaggcagccctgtatgcagcctgcgacgaggtggagtctgagctaaatgaggcggcctcccgctttggcctgggctccccgctgccctcgccccgggcctcccctcggccatggacccccgaagatccctggagcctgtatggtccaagccccggaggccgagggccagaggatagctggctactcctcagtgctcctgggcccaccccagcctccccgcggcctgcctctccatgtggcaagcggcgctattccagctcgggaaccccatcttcagcctccccagctctgtcccgccgtggcagcctgggggaagaggggtctgagccacctccaccacccccattgcctctggcccgggacccgggctcccctggtccctttgactatgtgggggccccaccagctgagagcatccctcagaagacacggcggacttccagcgagcaggcagtggctctgcctcggtctgaggagcctgcctcatgcaatgggaagctgcccttgggagcagaggagtctgtggctcctccaggaggttcccggaaggaggtggctggcatggactacctggcagtgccctccccactcgcttggtccaaggcccggattgggggacacagccctatcttcaggacctctgccctacccccactggactggcctctgcccagccaatatgagcagctggagctgaggatcgaggtacagcctagagcccaccaccgggcccactatgagacagaaggcagccgtggagctgtcaaagctgcccctggcggtcaccccgtagtcaagctcctaggctacagtgagaagccactgaccctacagatgttcatcggcactgcagatgaaaggaacctgcggcctcatgccttctatcaggtgcaccgtatcacaggcaagatggtggccacggccagctatgaagccgtagtcagtggcaccaaggtgttggagatgactctgctgcctgagaacaacatggcggccaacattgactgcgcgggaatcctgaagcttcggaattcagacattgagcttcggaagggtgagacggacatcgggcgcaaaaacacacgtgtacggctggtgttccgggtacacgtgccccagggcggcgggaaggtcgtctcagtacaggcagcatcggtgcccatcgagtgctcccagcgctcagcccaggagctgccccaggtggaggcctacagccccagtgcctgctctgtgagaggaggcgaggaactggtactgactggctccaacttcctgccagactccaaggtggtgttcattgagaggggtcctgatgggaagctgcaatgggaggaggaggccacagtgaaccgactgcagagcaacgaggtgacgctgaccctgactgtccccgagtacagcaacaagagggtttcccggccagtccaggtctacttttatgtctccaatgggcggaggaaacgcagtcctacccagagtttcaggtttctgcctgtgatctgcaaagaggagcccctaccggactcatctctgcggggtttcccttcagcatcggcaaccccctttggcactgacatggacttctcaccacccaggcccccctacccctcctatccccatgaagaccctgcttgcgaaactccttacctatcagaaggcttcggctatggcatgccccctctgtacccccagacggggcccccaccatcctacagaccgggcctgcggatgttccctgagactaggggtaccacaggttgtgcccaaccacctgcagtttccttccttccccgccccttccctagtgacccgtatggagggcggggctcctctttctccctggggctgccattctctccgccagccccctttcggccgcctcctcttcctgcatccccaccgcttgaaggccccttcccttcccagagtgatgtgcatcccctacctgctgagggatacaataaggtagggccaggctatggccctggggagggggctccggagcaggagaaatccaggggtggctacagcagcggcttccgagacagtgtccctatccagggtatcacgctggaggaagtgagtgagatcattggccgagacctgagtggcttccctgcacctcctggagaagagcctcctgcctgaaccacgtgaactgtcatcacctggcaaccccagccccagcctcagccctgccccctttccctccttcctggagtggtggctacagaagcttggggccaaccctggctcctctttccccagcttctgtctgtctcactgtcttccctcccctcccccagctgaggtgtggccctcaggcctggtgctgccttggagggctgggggaaggagtgtgtggaggagggaggagggtgaagactgaggctaggtgccagaatggactggagtgaaggcgtgtctagagtgtgggctggctgttgtgctggaaagctggggacaggttgatggtaataaactgctcaatgaccagtgcttcaggctccagagctctttggagagatgggttggggcagcttactccagccctggcccaaggaggcccagaagttggaaagagatggaatgtggctgggaacattgcatcccaaagagcttctcagtggaggaggctggggaaggcatgagggggctcagaggctccttgactgggaccaggattgggggccagggcttgagtaggcctctccactctcctccttgggggtccagattccttaggagctttgggatgaggcccaggaggctgcatttttccaggtccttagtcttgccaccacacagatgattctgattcatagccaagatgaggacacactgatgtagctgatctctcatttacagaggaggattctaaagttcagagagggaaaggggcttgcctgaggtcacgtagataatcagcagcacattgaacgctgcactcctgggctcctgtccccagcccccattcagacacgctgactcaggaggtccaggcctctaaggcttctctccctggagtgagggtggaggtgagggagagctggcacaagccctccctctggatcctccactcctggggattatgaagatattctggaaagatttgtgcttcagaggtagactgcagaaagcaaacagtctacccagcagctctgaatgtcacctgccctggggcttacagcactatatgagttcctggcctatcctgcaaatatgcccatgctggccttctaaatagctggtacatccatcaccactgacgggcctggcctggaaacctggtttgtcccctgtcttgatggcctacgagaggccaagttccactgggctgggaaaagtcactttgtctgtcttgttcacctggagcctgacacaccgtaggtactgagtacaaatagcttgatttggctaggcttggctgcagggggacgtgcctaaaagacattccgggcatttgcacttgggaaacttgcctcaccttcaggcttgtggggcctctctatgcccaatgagtccaggcagtcctagcaagtactcaggagagcaggggtgggtgtgacagaggctggctctggattgggggacaacagaaccagagtaactcctcgcctgttgctgctttgcaatgaatttcctttacctttctggaacacaagctgctgtgaaccaaactgatatcaagtgattagctcaccgggccttggttgcttttcaaagatccccttcagccccctgccagagtcactgccccataatcaccatgtcagaagggaccctagggcattcgtgtcctatttatcaatcttcagcaccacctctaagatctctgagagagggtggatcagcctctgtgtaaacaaaaagctgttaggacttgttgcctctcaaggtggactattctgttttctgccaggacactgccattcatgcattgtcagatatttattaaacagcagcaaagtgccagccaatttgtcctggaggaattcatagcctcatggggcaaaagtaaataaacagcttattacaattcaacaaaaaaaaaaaaaaaaaaaaaaaaaaaaaaaaaaaaaaaaaaaaaaaaa

SEQ ID NO: 988 - protein, 902 aa, Homo sapiens
MGAASCEDEELEFKLVFGEEKEAPPLGAGGLGEELDSEDAPPCCRLALGEPPPYGAAPIGIPRPPPPRPGMHSPPPRPAPSPGTWESQPARSVRLGGPGGGAGGAGGGRVLECPSIRITSISPTPEPPAALEDNPDAWGDGSPRDYPPPEGFGGYREAGGQGGGAFFSPSPGSSSLSSWSFFSDASDEAALYAACDEVESELNEAASRFGLGSPLPSPRASPRPWTPEDPWSLYGPSPGGRGPEDSWLLLSAPGPTPASPRPASPCGKRRYSSSGTPSSASPALSRRGSLGEEGSEPPPPPPLPLARDPGSPGPFDYVGAPPAESIPQKTRRTSSEQAVALPRSEEPASCNGKLPLGAEESVAPPGGSRKEVAGMDYLAVPSPLAWSKARIGGHSPIFRTSALPPLDWPLPSQYEQLELRIEVQPRAHHRAHYETEGSRGAVKAAPGGHPVVKLLGYSEKPLTLQMFIGTADERNLRPHAFYQVHRITGKMVATASYEAVVSGTKVLEMTLLPENNMAANIDCAGILKLRNSDIELRKGETDIGRKNTRVRLVFRVHVPQGGGKVVSVQAASVPIECSQRSAQELPQVEAYSPSACSVRGGEELVLTGSNFLPDSKVVFIERGPDGKLQWEEEATVNRLQSNEVTLTLTVPEYSNKRVSRPVQVYFYVSNGRRKRSPTQSFRFLPVICKEEPLPDSSLRGFPSASATPFGTDMDFSPPRPPYPSYPHEDPACETPYLSEGFGYGMPPLYPQTGPPPSYRPGLRMFPETRGTTGCAQPPAVSFLPRPFPSDPYGGRGSSFSLGLPFSPPAPFRPPPLPASPPLEGPFPSQSDVHPLPAEGYNKVGPGYGPGEGAPEQEKSRGGYSSGFRDSVPIQGITLEEVSEIIGRDLSGFPAPPGEEPPA

SEQ ID NO: 989 - DNA, 7845 bp, Homo sapiens
ccaaaacttgggtggaaggcagaggcctccgggaccctccccgccccctcctcccccccgccggctcccccgccctctcctccgcgcccctttaagctatccagcagacggagacagagttgatccaggaggggctggcagagtgctggagggggaaggctgggggcggagggaagggcggcaggagcccgaccggtcccacccctagctacaaccccgggcaggaagagctcgtcgcggtagcagcggtcgaaggggaccaagctccagagggcgggcgcccgagccgtgcggggagcgggcggggcagccatgctcctgtctgggggcgatcctccggcgcaggaatggttcatggtgcagacaaaatcgaagcctcgggtgcagcggcagcggctgcaagtgcagcgcatctttagggtcaagctgaacgccttccagagccgcccggacaccccctacttctggctacagctcgaggggccccgagagaacatgggcaaagccaaggaatacctgaagggcctgtgcagcccagagctgtggaaagaggttcgctacccaccgatcctgcactgtgccttccttggggcccaaggcctcttcctggactgcctctgctggagcacccttgcctacctggtgcctggcccccctggctccctgatggtgggcgggctgactgagtctttcatcatgacacagaactggctggaggagctggtggggcgactgcgctggggccctgcccctctgctgaccccccgggggatctgggaggctgaggtgacccgggcctttggggccctggtctggatccgtggtgaccagcatgcaggggacctactgcagctgcccccagcggtccaggagctgctgctgagcctggtgcgggatgctgcgggcaaggaagacatcatcgagtggctcagccgcttcggcatctctgactcccactccgatccggaggttctaatctgccctccccagcagcagaaggaagccccagccatggtgtccgtgggagagagtcctggaccctttgtggacatggggaccctccagaacaggggcccagaaaattcaaagagattatctagcctgggagccactgggtccctgatcacagcccagagcacaccgcaggaggcagcaaaccagctggtacgggtcggttccaacaaccaagatggtatggacagtgctcaagaggaagggacagtgcaagccaccagcagccaggactccacgaaccacacacaagccttgttgaagcaaaggcaggtccagaagatagaagataaactcctcttccaacctccagtatcagccctgggtgtgtgcccaccctggaaggcctggaccccggggccagcctttgggccattgtggccgggggctattgctgcaaccttctggaggatcaatgagctgcattctctacatctggcctggctcctgtcccaggcgtgcttcaatttccccttctggcagagacctctgggccccattcagttgaagctgccagggcagaatcctttgcccttaaatctggagtggaagcagaaggagctggctcctctgcctagtgcagaaagcccagctggtagaccagatggggggctgggaggagaagcagccctgcagaattgcccaaggccagagatttccccaaaagttacgagtttattggtggtccctgggagctcagatgtaaaagacaaagttagctcggatctcccacagatagggccacccttgacctctacaccccaactacaggctggaggtgagccgggggatcaagggagtatgcagttagattttaagggactggaagagggacccgctccagtgctgccaacagggcaagggaagcccgtggctcaaggggggctgacagatcagtcagtacctggagctcaaacagtgcctgaaactctcaaagtgcccatggctgcagcagtgcccaaagctgaaaatccctccagaactcaagtgccatctgcagctcccaaactgcctacatctcgaatgatgctggcagtgcacacagagcctgcagctcccgaagtgcctttggctccaacaaagccaacagctcaactgatggccacagctcaaaaaacagttgtgaatcaaccagtgttggtagctcaagtggaacccacaactccaaaaactccccaggctcagaagatgcctgtagcaaaaacatcacctgcaggtcccaaaacacccaaagctcaagccgggcctgcagctacagtttccaaagcacctgcagcttccaaagcacctgcagctcccaaagtacctgtgacccccagagtctccagagctcccaaaacacctgcagctcagaaggtgcccacggatgcagggccaaccttggatgtagccagacttctgagtgaggtccagcctacatcaagggctagtgtctccttactgaagggccaggggcaggctggaaggcagggtccccagtccagtggcaccttggccctcagcagtaagcaccagtttcagatggaggggctcctgggggcttgggagggggccccaaggcagccacctcgccacctgcaagcgaacagcacagtgaccagcttccagaggtaccacgaggccctgaatacacccttcgagctgaacctgtcaggggaacctggaaaccaggggttgcggcgagtggtcatcgatggcagcagtgtggccatggtgcatggcctgcagcacttcttctcctgccgaggaattgccatggcagtgcagtttttctggaaccggggacaccgagaggtcactgtgtttgtacccacctggcagctgaagaagaaccggagggtgagagagagccactttctgacgaagctacactcgctcaagatgctttcaatcacaccctcccagcttgagaatggcaagaagatcaccacctacgattataggttcatggtaaagctggcagaggagacagatggcatcattgtcaccaatgagcagattcacatcctgatgaatagttccaagaaactgatggtcaaagatcgcttgctgcctttcacctttgcggggaatctcttcatggtgcctgatgaccccctgggccgtgatggccccaccttggatgagtttctgaagaagccaaacaggttggacactgacattggcaacttcctgaaggtgtggaagacccttcctcccagctcagccagtgtcactgagctgagtgatgacgctgactctgggcccctggagagtctgccgaatatggaagaagtcagggaagagaaggaggagaggcaggatgaggagcagagacaggggcagggcacacagaaggcggctgaggaggacgaccttgactcttcgctggcgtcagtgttcagggtggagtgcccgtccctttcggaggagatcctgcggtgcctcagcctccatgatccccctgatggggccctggacatcgacctcctgccaggggcagcttctccctacctgggcatcccctgggatggaaaggctccctgccagcaggttcttgcccacctggcccagctcaccatccccagcaacttcaccgcactctccttcttcatgggcttcatggactcccacagggatgccatccctgactatgaagccctagtgggccccctgcacagcctcctcaagcagaagcctgactggcagtgggaccaggagcatgaggaggccttcctggccctgaagcgagccctggtgtctgccctctgcctgatggcccccaactcccagctgcccttccgcctggaggtgaccgtgagccacgtggccctgacggccatcctccatcaggagcactcagggaggaagcaccccatagcctatacctcaaaacccctcctccctgatgaggagagccagggcccccagtcagggggtgacagcccctatgctgtggcctgggccctcaagcatttttcccgctgcattggagacaccccggtggtcctggacctttcctatgcctcccggaccactgcggaccctgaggtgcgggagggccgcagggtttccaaagcttggttgatccgatggtccctcttggttcaggacaaaggcaagagggccctggaattggccctcctccagggcctgctgggggagaaccgcctgctcacccccgcggcctccatgcctcgcttcttccaggttctgccgcctttctctgacctgtccacgttcgtctgcatccacatgtcgggctactgcttctaccgtgaggatgagtggtgtgctggctttggtctctatgttctatcgcccaccagcccccctgtctccctttccttctcctgctccccttacacgccaacctatgcccacctggcagccgtggcctgcggcctggagcgctttggccagtccccactcccagtggttttcctcactcactgcaactggatcttcagcctcctgtgggagctcctgcccctctggagggctcggggcttcctctcctctgatggggctccactccctcacccaagcctgctctcctacattatatccctcacctctggcctctcatcccttccgtttatctaccgaacctcctaccggggctctctgtttgctgtgacagtggacaccctggccaagcagggtgcccaggggggtgggcagtggtggagtttgccaaaggatgtgccagcccctacagtgagtccccatgccatgggcaagaggcccaatttgctggcattacagctgagtgacagcaccctggccgacatcattgccaggctgcaggctgggcagaaactgtctggctcctcaccgtttagttctgcctttaactcactcagcctcgacaaggagagtggcctgcttatgttcaagggagataagaagcccagggtctgggtagtcccgacgcaactccggagggatctgattttctctgtgcatgacattcccttgggggcccaccagaggcccgaagagacctacaagaagttgcgtttgctggggtggtggcctgggatgcaggagcatgtgaaagattactgcaggagctgcttgttctgcatcccccgaaatctcataggcagcgagttgaaggttattgagtccccatggcccctcaggtcgaccgccccctggtcgaacctgcagatcgaggtggtgggcccggtcaccataagtgaggagggccataagcatgtacttattgtggctgacccaaacaccaggtgggtggaggcattccccctgaagccctacacacacacggctgtggcccaggtgctgcttcagcatgtgtttgcaaggtggggtgttcctgtgaggctggaggcagcccaggggccccagtttgcccggcacgtccttgtgagctgtgggctggccctgggagcccaggtggcctccctgagtcgggacctccagttcccctgcctgacgagctcaggggcctactgggaattcaagagggccctcaaggagttcatcttcctgcatgggaagaagtgggcggcctccctgcctttgctgcacctggccttcagggcctcctccactgatgccacaccgttcaaggtcctgaccgggggtgagtcaaggctcacggagcccctgtggtgggagatgagcagcgcaaacattgaagggctcaagatggacgtcttcctgctacagctggtgggggagctgctggagctccactggagggtggctgacaaggcgagtgaaaaggccgagaacaggcgtttcaagcgggagagccaggagaaggagtggaatgtgggtgaccaggtccttttgctgtccctccccaggaatggcagcagtgccaaatgggtgggtcccttctatatcggggaccggctgagcctgtcactctataggatatggggcttcccaaccccagagaagctggggtgcatctatcccagcagtctgatgaaggcctttgccaagagtggcaccccgctgtccttcaaggtcttggagcagtgagcgggagcagcgggggtgccccctgccccagggccgtgggtttctgctgctaggcctccccctgtcccagcagtgctctcagtccactgggggccctcagttgtgccttttgtagagaacttgcttcataaagctttgctgaattgccttgaactagggaccagcatccccatggaaacatccccagtttggggtacttggagaatttgccaaaggctgtcagatatgggtccctggcagttttacactgggaaatggagtgctcctctaggctataccaggctcagtgtcttctccccaagtatcctctttccccttcacatgtaggtgtgtggtggtgtgcacacacactcacgaaagaatctatcttggccatgaaactgtggctgttgaccttggaattggaaccacagtcctttcccatacagaaaccccaaatgtgggctcctccctccaacctgttcttttggggaccctttgcccttagagctgtcacagatgacataagcctgggcaggctgtggggaggccgctgcctcctagcctcacggtcagctttctcaagccaggtgtggcctgcacagctctcagggcagggctggccatcctcccaggcctcaagggcagtgtcttggagtgggaggatggccagccacaagccaccagcttgtcagcatgggaagggcaagggggaaatgggttggcctacctcatttgactccagccaatggagacaattcctgacccctgctttgatggtgttgaccccacaggaatcaaggatcttgatgccaagtgtggcatctctatctgaagagctgcttctgttagacccaggggccccggcctctgttttaagggggcagggcgtctgcaacaggagtggcacacggtgaagtgctggcatggctctacctcccaacccctcccaaccccatcccaaagcctacagtcctctgctccttctacctccactgtatcctgcatcccagaccctacagattgtgtgattgcttcatctgtatcaccccccgagtcctgtggacctgccttctgtgtagagcaaaacccaggctccctcacagccattctttgcagagatcacccttgcagtgagtgtgagttccttccaggtgtgtgcgcgtacactcaccctctgaattgctgccgctgccaaggaagtgggctccaggtgaaggccagtgccacgtcactctggctggccttcttagtagtttcatttctccggaagctgagccagtctcctggtctagcccaggttgccagaacgcttggcattgcagagtgctagagccagtggagaacttgccaacttgattgttttacagcagaggaaagaggatcacagagggaaaatgattcacccaaagtcacacagcaagttcatggctgagctgagaccaggattaagcttcctgactcccagttcaccatgaaaagggttctggcaacaggttcaagctggagaatccttcaaaatgctacacccacattctctccaactcttcatctccctgatcttccagacaaactacctggatgttgcccttaaaccatttctagctgttaaccctgtccagaaaaatgattgagtgatagctgagaagtggaaagtgtgggatttttggcaggtgctctctttcctccgccccccgcgccattctttctcttcctcctctctgtaatggtatgtccagcctcactctccctccctggtgctgtatgcgttccccctgttagctacatttgtgatcacatacccttcttttaagtgaatttttttcatttgatttgtcaataaacgaatcaaactgg

SEQ ID NO: 990 - protein, 1898 aa, Homo sapiens
MLLSGGDPPAQEWFMVQTKSKPRVQRQRLQVQRIFRVKLNAFQSRPDTPYFWLQLEGPRENMGKAKEYLKGLCSPELWKEVRYPPILHCAFLGAQGLFLDCLCWSTLAYLVPGPPGSLMVGGLTESFIMTQNWLEELVGRLRWGPAPLLTPRGIWEAEVTRAFGALVWIRGDQHAGDLLQLPPAVQELLLSLVRDAAGKEDIIEWLSRFGISDSHSDPEVLICPPQQQKEAPAMVSVGESPGPFVDMGTLQNRGPENSKRLSSLGATGSLITAQSTPQEAANQLVRVGSNNQDGMDSAQEEGTVQATSSQDSTNHTQALLKQRQVQKIEDKLLFQPPVSALGVCPPWKAWTPGPAFGPLWPGAIAATFWRINELHSLHLAWLLSQACFNFPFWQRPLGPIQLKLPGQNPLPLNLEWKQKELAPLPSAESPAGRPDGGLGGEAALQNCPRPEISPKVTSLLVVPGSSDVKDKVSSDLPQIGPPLTSTPQLQAGGEPGDQGSMQLDFKGLEEGPAPVLPTGQGKPVAQGGLTDQSVPGAQTVPETLKVPMAAAVPKAENPSRTQVPSAAPKLPTSRMMLAVHTEPAAPEVPLAPTKPTAQLMATAQKTVVNQPVLVAQVEPTTPKTPQAQKMPVAKTSPAGPKTPKAQAGPAATVSKAPAASKAPAAPKVPVTPRVSRAPKTPAAQKVPTDAGPTLDVARLLSEVQPTSRASVSLLKGQGQAGRQGPQSSGTLALSSKHQFQMEGLLGAWEGAPRQPPRHLQANSTVTSFQRYHEALNTPFELNLSGEPGNQGLRRVVIDGSSVAMVHGLQHFFSCRGIAMAVQFFWNRGHREVTVFVPTWQLKKNRRVRESHFLTKLHSLKMLSITPSQLENGKKITTYDYRFMVKLAEETDGIIVTNEQIHILMNSSKKLMVKDRLLPFTFAGNLFMVPDDPLGRDGPTLDEFLKKPNRLDTDIGNFLKVWKTLPPSSASVTELSDDADSGPLESLPNMEEVREEKEERQDEEQRQGQGTQKAAEEDDLDSSLASVFRVECPSLSEEILRCLSLHDPPDGALDIDLLPGAASPYLGIPWDGKAPCQQVLAHLAQLTIPSNFTALSFFMGFMDSHRDAIPDYEALVGPLHSLLKQKPDWQWDQEHEEAFLALKRALVSALCLMAPNSQLPFRLEVTVSHVALTAILHQEHSGRKHPIAYTSKPLLPDEESQGPQSGGDSPYAVAWALKHFSRCIGDTPVVLDLSYASRTTADPEVREGRRVSKAWLIRWSLLVQDKGKRALELALLQGLLGENRLLTPAASMPRFFQVLPPFSDLSTFVCIHMSGYCFYREDEWCAGFGLYVLSPTSPPVSLSFSCSPYTPTYAHLAAVACGLERFGQSPLPVVFLTHCNWIFSLLWELLPLWRARGFLSSDGAPLPHPSLLSYIISLTSGLSSLPFIYRTSYRGSLFAVTVDTLAKQGAQGGGQWWSLPKDVPAPTVSPHAMGKRPNLLALQLSDSTLADIIARLQAGQKLSGSSPFSSAFNSLSLDKESGLLMFKGDKKPRVWVVPTQLRRDLIFSVHDIPLGAHQRPEETYKKLRLLGWWPGMQEHVKDYCRSCLFCIPRNLIGSELKVIESPWPLRSTAPWSNLQIEVVGPVTISEEGHKHVLIVADPNTRWVEAFPLKPYTHTAVAQVLLQHVFARWGVPVRLEAAQGPQFARHVLVSCGLALGAQVASLSRDLQFPCLTSSGAYWEFKRALKEFIFLHGKKWAASLPLLHLAFRASSTDATPFKVLTGGESRLTEPLWWEMSSANIEGLKMDVFLLQLVGELLELHWRVADKASEKAENRRFKRESQEKEWNVGDQVLLLSLPRNGSSAKWVGPFYIGDRLSLSLYRIWGFPTPEKLGCIYPSSLMKAFAKSGTPLSFKVLEQ

SEQ ID NO: 991 - DNA, 6253 bp, Homo sapiens
ggacaagagaggtccccgctgggtgaggaacccgggaaggcccgcccagattcgggccccctgcccttgtcccctgggctgggggcgcgggcaaagcgggggcctggcgggcgctgagaggacctgaagccggcgcgggcggcggaggcgggctgggggcagcagccatgcctacctggggggcccgccccgcgtccccagatcgctttgcggtgtctgcggaggctgagaacaaggttcgggaacagcagccccatgtggagcgcatcttcagcgtgggggtgagcgtccttccgaaggactgtccggacaacccccacatctggctgcagctggagggccccaaggaaaacgccagcagagccaaggagtacctgaagggcctctgcagcccagaactgcaggatgaaatccactacccgcccaaactgcactgcatctttctgggagcccagggcttcttccttgactgcctggcctggagcacgtcagcccatctggtgcccagggcgccaggctcactgatgatcagtggcctgactgaagcctttgtcatggctcagagccgggtagaagagctggcagagcggctgagctgggacttcacgccaggaccatcttccggagcctctcagtgtactggagtgctgagagacttctctgccctgctgcagtccccgggggatgcccatagagaggctctgttgcagttgcccctggctgtccaggaggagctgctgagtctggtgcaggaggcgtctagtgggcaggggccaggagcactggcttcttgggaggggcggagctcagccttgctgggtgctcagtgccaaggagtgagagctccccctagtgacggcagggagtccctggacactggatctatgggacccggagattgcaggggagcaaggggagacacttacgctgtggagaaggagggagggaaacagggtggtcccagggagatggattgggggtggaaggagttgcctggggaagaggcgtgggagagagaagtggccctcaggccacagtcagtgggtggaggggcaagggagtcagcacccctgaaagggaaggccctggggaaggaggagatagctctgggaggaggagggttctgtgtccaccgtgagcctcccggtgcccatggctcctgtcacagggcagctcagtcccgaggagcctccctcctccagcggctccacaatgggaatgcctctcctccgagggtgcccagccctccacctgcaccggaacccccatggcactgtggagaccggggtgactgcggagaccggggagacgtgggggacaggggagacaagcagcagggcatggcacggggtcgggggcctcaatggaaacgaggcgcccgagggggcaacttggtgactggcacacagcgtttcaaggaggccctgcaggatcctttcaccctgtgccttgccaatgtgcctggccagccagacctccgccatattgtcattgacggcagcaacgtggccatggtgcatggcctccagcactacttctccagccggggcattgccattgctgtgcagtacttctgggaccgtggtcaccgtgacataactgtctttgtgcctcagtggcgcttcagtaaggatgccaaagtcagagagagtcacttcctgcaaaagctgtattccctcagcctgctctccctcacaccctcacgagtcatggatggcaagaggatctcctcctatgatgacaggttcatggtgaagctggctgaagagacagatgggataattgtctccaatgaccagttccgggacctggcggaggagtctgagaagtggatggcaatcatcagagaacgcctgctgccctttacctttgtgggaaacctcttcatggtacctgatgacccactggggcgaaacggccccaccctggatgaatttctgaagaagccagccaggacacaggggtcttctaaggctcagcatccttccaggggctttgcagaacatggtaaacagcagcaggggagagaagaggaaaaaggtagtggtggcattcggaagacccgggaaacagagcggctccggcggcagctgctggaggtgttttggggtcaggatcacaaagtggacttcatcctgcagcgggagccatactgccgggacatcaaccaactgtctgaggccctgctcagtcttaacttttgagcctcacctgcttgagtggctgccgccctgtcagctccagccgcctccagctcagccctttctgtgagagtccctctgctgctcactctgatccagaggcaccctgagttggtgctttggatcagggaagccactttgggacaggtccataaagtgaactgatcttaccgagtcaggacctcagccagctctcaagaggttctgctcagccttaacttctcaactttgccttagcacagggtttctgtagggagtgggggctgctagaggggattagttccggagactgagactgttggctccacctccaagctgagctagggtggagggcagggtgggcaggaagtgacaggaagttaagctgttcctctccctggctgctgctctggatggccagagaacaagatgctcccttgctgagctcctgggagcgtggaaggagatgctaggccctggcacagtgttatgtggactgggccacgatagggtggagtgagctagtgaagaaggcagagggagacttggcttctggtctcagctatgcctgttttgtgaccttgattgagttgcttgggctttacttctgcctacaaatcaggggtaaaaatacctgttgggaggagaaatgagaacatagaggaaagcctcttggaggaaaggtgcttggaccaagtctcaggtgtgtctgcctgtggctgcacaggctctctaaccgaaacctcactttcagagagatgtgggtcctttgtctccaggatccacaccctagattttaacactgcattctcactataacgtgccctataatggctgcatcccttttgagcaacctccaaaatctacatttacacagtaggtaaattagggatgactgcattatcaaaatactctcagggttcctataaatggcagctctcctgttgtattcaggtgttgtttacagactaacaaatgtgttggcaaatccctggttagatgcacttcctggtgttgagatgaacacgtcgatttttcaccaatcgatgaagccatgctctgcaatgacaatattaatgtgatccgaccctaacattttctctatggaagacgtatgttgcataaagcaaggcacacttctgctttatgtgtgtgtgtatggggatgggaggacttaacggaagttgaaccagttggttctagatgaaccaattatctggaaaatgaaagaaccagagttggaaggcacttgactggccaccagaccaactctgctgttactgacatgctttcttcaccctgattcctagaggtcattgccctggatctgcttgaagtcctcctgtgccagggaatttactatctccagggtagcacattccctgtgtagacggtattaatcagtactccttactttagtgcagcctaaagtatgcttttctgttacatccacctttgaggctggtcatacctccaggaacaatacagagccagtcaacttcctggaatccaagaccagataaagaagtaggacaggtgcccctgggttctgttctgtgtgggcctgtggggagtctctagacaagatcttttccaggccctgacttctgcctccctctgagtggcacagggagttgaatactgcatggcgagtgtaatgatgatggggagggtccttgtgtcctcaccccttcctttttggtgatttacaccactgtaccatactgacccaggctgggggcaggtgtgttggagacaggctggtcaaagaggtgacaatgattaagagataacccagcggtccctgagaagagattggttagtatggcctgaactggtggctgggggaactgtgtctggtcaagttatggcagatgtcacagctttaggtaggtaaaaagggtcctagatgaaaaccttggagtttttttttttcctgatagggttgtttatacttcttgattggtttcttgccattttcactttcagtgatggtgggtgtgcagtagaccaaaagtgtcttctgcccttttgtgctaagggccctggttgactgagtggccccagtcagatgagaggcaagtcctaagcttcttatagacagggatgttgactttgttctgctgcagcctgataaactgggaccactgtgtggttagtaatgcacttgccatttggtgacacagactgaaggctatcctacacctgggccttacctcttcctctactggcatcctaatggcactctgacagcatccagggtgactacagggcccattggaaatggatcatcattctctcttctagtgtctatctttatcataacctgatgtcccaaacttgtgacaagttcttttggcaactgaaggaccaagaagggaaacggtgatgagagagactgctcattgtaactttcaaaaccccgtctttggggaagaatcatctagggtgacattccttgaagtaaatcccaggagaatctaggccaaagagatgagccaaggttagtgagacaatttatttttattgcctaaactgcagagcattctctacacagcgtaaaggagaagtggggcagctgcaggacatgtagagaaaccaaactgggaaatcttacaaggagttgaaaagattaatgtcccaacctgatgagattacggccttgagacaataaggtggagcaacagaacaatgggaaagaggactgggagaggaatctaagaaccagatggcttcagctctctagaggagctgagcctattcacagtgcctaacctggaagcctgtgaggaacaggcctcaggcccttgccacgacctacttaggctacaatttcctttaaggcagcccctagctctgggaaggaatactggtagccagtggccagtgttcgctgtgggatcaccttctggccctccagcagcatgatggcacgctgtcgcccaaagacagcttgcaccacagcgctggggagagggatgaaggctcggcggcccagggcagcacccaaggtctgggcaaactcagcattagtggcggaggatggagccactccattcaggaccccgtgcacgtggtttgcttcaagggcatgggtcaggattcctgccaggtccccgatgtgtatccaggggaagaattggtggcctgagccgatggggccccccaggcccaggcgaaagggcagcagcatgtggcccatggcaccacccccacggcccagcacaacccctagagcaggaaagagggaaggtacaggggtcctctcagccttgaaggagcccactgctcctcctggtttctgtttccccttcctcactctccccatgctgacttggctctgtaacagaagtgagcagtatggctgtctttaagacctcacaccttctcatctgcaggttggctagaagtggtggcatcctctcactctgtaattgtaatctcagctctcctaatcccatcacttccccagcccagagaagacattccaaccctgtctgatacccaggcccgtttctcacctgagcgcaccaccacctggcgtgtagaatctccaggaagcctggctgcagcttcccatttggttacgaggttggagaaaaagtcaaagtcccctcctgggctgtcttcatcatactccgcagtcagactgggctggtagtaagctgccggtggaacacaatcatttgccctgggtgtccttggtcctgcctggctctctgtagtggaggctccccttggcctcaccttctctggcccttaggatctccccatttggagacagagccatttggatattttccccttgaacttctccatgacctgaagcgttccttccctggaggaactctggttgcagggctaaacttagaggctgctagagtgtagtggttaagaacaggaacttgggtaccaggcgcctgaattttaatcagctccctcatttattaactctctgacttgatgcaagttacttaacctctctgtatagaattttcacatctttaaaatgggaataatagtacctacctcatagggttgttgtaaggaataaatgataataagcataaaac

SEQ ID NO: 992 - protein, 678 aa, Homo sapiens
MPTWGARPASPDRFAVSAEAENKVREQQPHVERIFSVGVSVLPKDCPDNPHIWLQLEGPKENASRAKEYLKGLCSPELQDEIHYPPKLHCIFLGAQGFFLDCLAWSTSAHLVPRAPGSLMISGLTEAFVMAQSRVEELAERLSWDFTPGPSSGASQCTGVLRDFSALLQSPGDAHREALLQLPLAVQEELLSLVQEASSGQGPGALASWEGRSSALLGAQCQGVRAPPSDGRESLDTGSMGPGDCRGARGDTYAVEKEGGKQGGPREMDWGWKELPGEEAWEREVALRPQSVGGGARESAPLKGKALGKEEIALGGGGFCVHREPPGAHGSCHRAAQSRGASLLQRLHNGNASPPRVPSPPPAPEPPWHCGDRGDCGDRGDVGDRGDKQQGMARGRGPQWKRGARGGNLVTGTQRFKEALQDPFTLCLANVPGQPDLRHIVIDGSNVAMVHGLQHYFSSRGIAIAVQYFWDRGHRDITVFVPQWRFSKDAKVRESHFLQKLYSLSLLSLTPSRVMDGKRISSYDDRFMVKLAEETDGIIVSNDQFRDLAEESEKWMAIIRERLLPFTFVGNLFMVPDDPLGRNGPTLDEFLKKPARTQGSSKAQHPSRGFAEHGKQQQGREEEKGSGGIRKTRETERLRRQLLEVFWGQDHKVDFILQREPYCRDINQLSEALLSLNF

SEQ ID NO: 993 - DNA, 1522 bp, Homo sapiens
agtcgctatgcgtgtcttgtgggtgagggagggcagaaagggagagtgctgggcgggcttagtcggagattgaggactgggaatccgcttccgggagggcactgtctagtgcacaggcaacctggccttcgcctcctagcccgagaagccgaatctccctaatccctgtgacctgtgtcacctctgcatcgcgaggagggggataagtggggagaagtctggtgtcagatgggatggcgccggaagagggtgccacagcggggacggaaggcgcccccaccccaactccacgggaatataaacaatttgtattttccgatcaggtggcgggacaggcttcattgggacagccctaacccagctgctgaatgccagaggcacgaagtgacgttggtctcccgaaagcccgggcccggccggatcacgtgggatgagctcgctgcatcggggctgccgagctgcgatgccgccgtcaacctggccggagagaacatcctcaaccctctccgaagatggaatgaaaccttccaaaaagaggttctcggcagccgcctagagaccacccaattgctggctaaagccatcaccaaagccccacaaccccccaaggcctgggtcttagtcacaggtgtagcttactaccagcccagtctgactgcggagtatgatgaagacagcccaggaggggactttgactttttctccaacctcgtaaccaaatgggaagctgcagccaggcttcctggagattctacacgccaggtggtggtgcgctcaggggttgtgctgggccgtgggggtggtgccatgggccacatgctgctgccctttcgcctgggcctggggggccccatcggctcaggccaccaattcttcccctggatacacatcggggacctggcaggaatcctgacccatgcccttgaagcaaaccacgtgcacggggtcctgaatggagtggctccatcctccgccactaatgctgagtttgcccagaccttgggtgctgccctgggccgccgagccttcatccctctccccagcgctgtggtgcaagctgtctttgggcgacagcgtgccatcatgctgctggagggccagaaggtgatcccacagcgaacactggccactggctaccagtattccttcccagagctaggggctgccttaaaggaaattgtagcctaagtaggtcgtggcaagggcctgaggcctgttcctcacaggcttccaggttaggcactgtgaataggctcagctcctctagagagctgaagccatctggttcttagattcctctcccagtcctctttcccattgttctgttgctccaccttattgtctcaaggccgtaatctcatcaggttgggacattaatcttttcaactccttgtaagatttcccagtttggtttctctacatgtcctgcagctgccccacttctcctttacgctgtgtagagaatgctctgcagtttaggcaataaaaataaattgtctcactaaaaaaaaaaaaaaaaaaa

SEQ ID NO: 994 - protein, 319 aa, Homo sapiens
MGWRRKRVPQRGRKAPPPQLHGNINNLYFPIRWRDRLHWDSPNPAAECQRHEVTLVSRKPGPGRITWDELAASGLPSCDAAVNLAGENILNPLRRWNETFQKEVLGSRLETTQLLAKAITKAPQPPKAWVLVTGVAYYQPSLTAEYDEDSPGGDFDFFSNLVTKWEAAARLPGDSTRQVVVRSGVVLGRGGGAMGHMLLPFRLGLGGPIGSGHQFFPWIHIGDLAGILTHALEANHVHGVLNGVAPSSATNAEFAQTLGAALGRRAFIPLPSAVVQAVFGRQRAIMLLEGQKVIPQRTLATGYQYSFPELGAALKEIVA

SEQ ID NO: 995 - DNA, 784 bp, Homo sapiens
agcatttgctcaggcagcctctctgggaagatgctgcttcttcctctccccctgctgctctttctcttgtgctccagagctgaagctggggagatcatcgggggcacagaatgcaagccacattcccgcccctacatggcctacctggaaattgtaacttccaacggtccctcaaaattttgtggtggtttccttataagacggaactttgtgctgacggctgctcattgtgcaggaaggtctataacagtcacccttggagcccataacataacagaggaagaagacacatggcagaagcttgaggttataaagcaattccgtcatccaaaatataacacttctactcttcaccacgatatcatgttactaaagttgaaggagaaagccagcctgaccctggctgtggggacactccccttcccatcacaattcaactttgtcccacctgggagaatgtgccgggtggctggctggggaagaacaggtgtgttgaagccgggctcagacactctgcaagaggtgaagctgagactcatggatccccaggcctgcagccacttcagagactttgaccacaatcttcagctgtgtgtgggcaatcccaggaagacaaaatctgcatttaagggagactctgggggccctcttctgtgtgctggggtggcccagggcatcgtatcctatggacggtcggatgcaaagccccctgctgtcttcacccgaatctcccattaccggccctggatcaaccagatcctgcaggcaaattaatcctggatcc

SEQ ID NO: 996 - protein, 247 aa, Homo sapiens
MLLLPLPLLLFLLCSRAEAGEIIGGTECKPHSRPYMAYLEIVTSNGPSKFCGGFLIRRNFVLTAAHCAGRSITVTLGAHNITEEEDTWQKLEVIKQFRHPKYNTSTLHHDIMLLKLKEKASLTLAVGTLPFPSQFNFVPPGRMCRVAGWGRTGVLKPGSDTLQEVKLRLMDPQACSHFRDFDHNLQLCVGNPRKTKSAFKGDSGGPLLCAGVAQGIVSYGRSDAKPPAVFTRISHYRPWINQILQAN

SEQ ID NO: 997 - DNA, 924 bp, Homo sapiens
gcacagcagcaactgactgggcagcctttcaggaaagatgcagccactcctgcttctgctggcctttctcctacccactggggctgaggcaggggagatcatcggaggccgggagagcaggccccactcccgcccctacatggcgtatcttcagatccagagtccagcaggtcagagcagatgtggagggttcctggtgcgagaagactttgtgctgacagcagctcattgctggggaagcaatataaatgtcaccctgggcgcccacaatatccagagacgggaaaacacccagcaacacatcactgcgcgcagagccatccgccaccctcaatataatcagcggaccatccagaatgacatcatgttattgcagctgagcagaagagtcagacggaatcgaaacgtgaacccagtggctctgcctagagcccaggagggactgagacccgggacgctgtgcactgtggccggctggggcagggtcagcatgaggaggggaacagatacactccgagaggtgcagctgagagtgcagagggataggcagtgcctccgcatcttcggttcctacgacccccgaaggcagatttgtgtgggggaccggcgggaacggaaggctgccttcaagggggattccggaggccccctgctgtgtaacaatgtggcccacggcatcgtctcctatggaaagtcgtcaggggttcctccagaagtcttcaccagggtctcaagtttcctgccctggataaggacaacaatgagaagcttcaaactgctggatcagatggagacccccctgtgactgactcttcttctcggggacacaggccagctccacagtgttgccagagccttaataaacgtccacagagtataaataaccaattcctcatttgttcattaaacgtcattcagtactta

SEQ ID NO: 998 - protein, 255 aa, Homo sapiens
MQPLLLLLAFLLPTGAEAGEIIGGRESRPHSRPYMAYLQIQSPAGQSRCGGFLVREDFVLTAAHCWGSNINVTLGAHNIQRRENTQQHITARRAIRHPQYNQRTIQNDIMLLQLSRRVRRNRNVNPVALPRAQEGLRPGTLCTVAGWGRVSMRRGTDTLREVQLRVQRDRQCLRIFGSYDPRRQICVGDRRERKAAFKGDSGGPLLCNNVAHGIVSYGKSSGVPPEVFTRVSSFLPWIRTTMRSFKLLDQMETPL

SEQ ID NO: 999 - DNA, 1047 bp, Homo sapiens
ggagtcaacaccaacagctctgacctgggcagccttcctgagaaaatgcagccattcctcctcctgttggcctttcttctgacccctggggctgggacagaggagatcatcgggggccatgaggccaagccccactcccgcccctacatggcctttgttcagtttctgcaagagaagagtcggaagaggtgtggcggcatcctagtgagaaaggactttgtgctgacagctgctcactgccagggaagctccataaatgtcaccttgggggcccacaatatcaaggaacaggagcggacccagcagtttatccctgtgaaaagacccatcccccatccagcctataatcctaagaacttctccaacgacatcatgctactgcagctggagagaaaggccaagtggaccacagctgtgcggcctctcaggctacctagcagcaaggcccaggtgaagccagggcagctgtgcagtgtggctggctggggttatgtctcaatgagcactttagcaaccacactgcaggaagtgttgctgacagtgcagaaggactgccagtgtgaacgtctcttccatggcaattacagcagagccactgagatttgtgtgggggatccaaagaagacacagaccggtttcaagggggactccggggggcccctcgtgtgtaaggacgtagcccaaggtattctctcctatggaaacaaaaaagggacacctccaggagtctacatcaaggtctcacacttcctgccctggataaagagaacaatgaagcgcctctaacagcaggcatgagactaaccttcctctgggcctgaccatctctgggacagaggcaagaatccccaaggggtgggcagtcagggttgcaggactgtaataaatggatctctggtgtagaaaaaaaaaaaaaaaaaaaaaaaaaaaaaaaaaaaaaaaaaaaaaaaaaaaaaaaaaaaaaaaaaaaaaaaaaaaaaaaaaaaaaaaaaaaaaaaaaaaaaaaaaaaaaaaaaaaaaaaaaaaaaaaaaaaaaaaaaaaaaaaa

SEQ ID NO: 1000 - protein, 246 aa, Homo sapiens
MQPFLLLLAFLLTPGAGTEEIIGGHEAKPHSRPYMAFVQFLQEKSRKRCGGILVRKDFVLTAAHCQGSSINVTLGAHNIKEQERTQQFIPVKRPIPHPAYNPKNFSNDIMLLQLERKAKWTTAVRPLRLPSSKAQVKPGQLCSVAGWGYVSMSTLATTLQEVLLTVQKDCQCERLFHGNYSRATEICVGDPKKTQTGFKGDSGGPLVCKDVAQGILSYGNKKGTPPGVYIKVSHFLPWIKRTMKRL

SEQ ID NO: 1001 - DNA, 955 bp, Homo sapiens
ccaagagctaaaagagagtaagggggaaacaacagcagctccaaccagggcagccttcctgagaagatgcaaccaatcctgcttctgctggccttcctcctgctgcccagggcagatgcaggggagatcatcgggggacatgaggccaagccccactcccgcccctacatggcttatcttatgatctgggatcagaagtctctgaagaggtgcggtggcttcctgatacaagacgacttcgtgctgacagctgctcactgttggggaagctccataaatgtcaccttgggggcccacaatatcaaagaacaggagccgacccagcagtttatccctgtgaaaagacccatcccccatccagcctataatcctaagaacttctccaacgacatcatgctactgcagctggagagaaaggccaagcggaccagagctgtgcagcccctcaggctacctagcaacaaggcccaggtgaagccagggcagacatgcagtgtggccggctgggggcagacggcccccctgggaaaacactcacacacactacaagaggtgaagatgacagtgcaggaagatcgaaagtgcgaatctgacttacgccattattacgacagtaccattgagttgtgcgtgggggacccagagattaaaaagacttcctttaagggggactctggaggccctcttgtgtgtaacaaggtggcccagggcattgtctcctatggacgaaacaatggcatgcctccacgagcctgcaccaaagtctcaagctttgtacactggataaagaaaaccatgaaacgctactaactacaggaagcaaactaagcccccgctgtaatgaaacaccttctctggagccaagtccagatttacactgggagaggtgccagcaactgaataaatacctcttagctgagtggaaaaaaaaaaaaaaaaaaaaaaaaaaaaaaaa

SEQ ID NO: 1002 - protein, 247 aa, Homo sapiens
MQPILLLLAFLLLPRADAGEIIGGHEAKPHSRPYMAYLMIWDQKSLKRCGGFLIQDDFVLTAAHCWGSSINVTLGAHNIKEQEPTQQFIPVKRPIPHPAYNPKNFSNDIMLLQLERKAKRTRAVQPLRLPSNKAQVKPGQTCSVAGWGQTAPLGKHSHTLQEVKMTVQEDRKCESDLRHYYDSTIELCVGDPEIKKTSFKGDSGGPLVCNKVAQGIVSYGRNNGMPPRACTKVSSFVHWIKKTMKRY

SEQ ID NO: 1003 - DNA, 1970 bp, Homo sapiens
ccaggctgcacggtaggaccggggcgaggggagccaggcggtcagggcggaggccaagcccgggagatgcggttgcagccgccacggctgttggggcgcctggcgctccgtccgaggcgggtggctgtgaggccaggggagtaggcaggctcccagagagattcttccaagttggcgggtggcgggagagggggccgcgcgccccggcgcagctgctttgtgcgcgcagagagggactcgtgtccctggttctctccaaccctgggacccgttgtgcgggcagtattgggcaagccgcagaacggagcgatttcctccgagaaagttgaggatggagcctttttttccgcaccgtccccgcgatggcatgggccccgagaatgctgccccgaggctcccagtgtgggggagctcggggtcgctgcgcctctagcttgagcgcagaaatccgcgaatcactccgatcttcgcgaactctggcatcttctaggaaaatcattactgccaaaactgaggcgagcttttctggcgggcacggcaccctgcccccagggcgctggccctgggcgatgccccctttccgatctcaggcttggtcaagggcgccaggttccgaattcgcgcttgccgtgcacgccggcatcgagcctcaccaacaccgccgggcaacgtggctggagtagattcactgcgtgctgtcctcacttgttctacaatgagtgccaaatctgctatcagcaaggaaatttttgcacctcttgatgaaaggatgctgggagctgtccaagtcaagaggaggacaaagaaaaagattcctttcttggcaactggaggtcaaggcgaatatttaacttatatctgcctgtcagtgacaaacaagaaacccacacaggcgtccatcacaaaggtcaaacagtttgaaggctccacatcatttgttcggagatcacagtggatgctcgagcagcttcgccaggttaatggtatcgatcctaatggggattcggcagagtttgatttgttgtttgaaaatgcttttgaccagtgggtagccagcacagcgtcagaaaaatgcaccttcttccagatcctccaccatacctgccagaggtacctcacggacaggaagccagagtttattaactgccaatccaaaattatgggaggaaacagcatcctccattcagctgctgacagcgtgaccagcgcagtgcagaaggcaagccaggccttgaatgagcgtggagagcgattaggccgagcagaggagaagacagaagacctgaagaacagcgcccagcagtttgcagaaactgcgcacaagcttgccatgaagcacaaatgttgagaaactgcctatcctggtgactcttcttaagagaaactgaagagtttgttcagcagtttttacaagaattcgggacctccgcttgcttctttttttccaatatttggacacttagagtggtttttgttttttcttttcagatgttaatgtgaaagaaagggtgttgcatttttacatttccctaatgatcttgctaataaatgctacaatagcatcggcttcattttgggtttttgcctcctcccactgtgtgtatgtgtgtatatgtatgttttgaatatgttttctttattaaaaaatattttttgtagtttgaatatgaaatttggaccaaatgataaactgcgctgagtctaaactggcaacatgtatttttttctctgatattaagcaggaaggcattttaatgtggtgacatcagatgttatttttcctagatgaaaataaaagtcaagcagtgattagtttcactcactgtcctagctacacttaatttgaagattaaaattctacattgtggaaaacaattgaatttattgggaaaaacagcagtcttagattttgctccttgcatagtaatcttttgcatgaaccatcaccagcgttcaaaaaaaaaaaaaaa

SEQ ID NO: 1004 - protein, 210 aa, Homo sapiens
MSAKSAISKEIFAPLDERMLGAVQVKRRTKKKIPFLATGGQGEYLTYICLSVTNKKPTQASITKVKQFEGSTSFVRRSQWMLEQLRQVNGIDPNGDSAEFDLLFENAFDQWVASTASEKCTFFQILHHTCQRYLTDRKPEFINCQSKIMGGNSILHSAADSVTSAVQKASQALNERGERLGRAEEKTEDLKNSAQQFAETAHKLAMKHKC

SEQ ID NO: 1005 - DNA, 3428 bp, Homo sapiens
ccacgcgtccgacgccccccacccgggaggggggagagaggcaaaaagtaagagaggaaaaaaaatagcaggaagatggcgcccaccaagcccagctttcagcaggatccttccaggcgagaacgtttacaagcattgagaaaggagaaatcccgagatgctgctcgctcccgccggggaaaagaaaactttgagttctatgaattggccaagttgttgcctcttcctgcagccattaccagccagctcgacaaggcatccatcattcgacttacaattagctatctgaaaatgagggactttgctaaccagggggaccctccgtggaacttgcgaatggaaggccctccacctaacacatcagtaaaaggtgcacagcgaaggagaagccccagtgcactagccattgaagtatttgaagcacatttgggaagccacattttgcagtccctggatggctttgtatttgcactaaatcaggaaggaaaatttttgtacatttccgaaacagtctccatctacctaggcctctcacaagtggagctgacaggcagcagtgtctttgactatgtccaccccggagatcacgtggagatggctgagcagctgggcatgaagctcccccctgggcggggtctcctgtcacagggcactgctgaggacggagccagctcagcatcttcctcctctcagtcggagacccccgagccagtggagtcaaccagccccagtctgctaaccactgacaacactcttgagcgttcctttttcatccgaatgaaatctactctgaccaaacgcggtgtgcacatcaaatcatcaggatataaggtgattcacataacaggccggctacgcctgagagtgtcgctgtcccacgggaggaccgtccccagccaaatcatgggtctcgtggttgttgcgcatgccttgcctccccctacgatcaatgaagtcagaattgactgccatatgttcgtcactcgagtaaatatggacctcaatatcatttactgtgaaaataggattagtgattatatggatctgacccctgtagatatcgtagggaagagatgctaccacttcatccatgctgaagacgtggagggcatcaggcacagtcacttggacttgctgaataagggtcagtgtgtgacaaagtactatcgctggatgcagaagaacggaggatatatttggatacagtccagtgccaccatagctattaatgccaagaatgcaaatgaaaagaatatcatctgggtgaattaccttcttagcaatcctgagtacaaggacacacccatggacatcgcacagctcccccatctgccggagaaaacttccgaatcctcggagacatccgactctgagtcagactctaaagacacctcaggtattacagaggacaacgagaactccaagtccgacgagaaggggaaccagtccgagaacagcgaagacccggagcccgaccggaagaagtcgggcaacgcgtgtgacaacgacatgaactgcaacgacgacggccacagctccagtaacccggacagccgcgacagcgacgacagcttcgagcactcggactttgagaaccccaaggcgggcgaggacggcttcggtgctctgggcgcgatgcagatcaaggtggagcgctacgtggagagcgagtcggacctgcggctgcagaactgcgagtcactcacgtccgacagcgccaaggactcggacagcgcaggcgaggcgggcgcgcaggcctccagcaagcaccagaagcgcaagaaaaggcggaaacggcaaaagggcggcagcgccagccgccggcgcctgtccagcgcgtcgagcccaggcggcctggacgcgggcctggtggagcccccgcggctgctgtcctcccccaacagtgcctcggtgctcaagatcaagacggagatctcagaacccatcaatttcgacaatgacagcagcatctggaactacccgcccaaccgggagatctccaggaacgagtccccctacagcatgaccaagccccccagctctgagcacttcccgtccccgcagggcggcggcggtgggggtggcggtggcggggggctgcacgtggccattcccgactcggtcctcaccccgcccggcgccgacggcgcggccgcccgcaagactcagttcggcgcctcggccaccgcggccctggcccccgtcgcctccgacccgctgtcacccccgctctcggcgtccccgcgggacaagcaccccgggaacggcggcgggggcgggggcgggggcggcggcgcggggggcggcggccccagcgcgtccaactccttgctgtacactggggacctggaggcgctgcagaggttgcaggcgggcaacgtcgtgctcccgctggtgcacagggtgaccgggaccctggccgccaccagcacggccgcgcagagggtctacaccacgggcaccatccgctacgcgcccgccgaggtgaccctggccatgcagagcaacctgctgcccaacgcgcacgctgttaacttcgtggacgttaacagccccggctttggcctcgaccccaagacgcccatggagatgctctaccaccacgtgcaccggctcaacatgtcaggaccgttcggcggcgcagtgagcgcagctagcctgacgcagatgcccgccggcaacgtgttcaccacggccgagggactcttctccacgctgcccttccccgtctacagcaacggcatccacgcggcacagactctggagcgcaaggaggactgaggcgccgcccgtcctgggcccggccaggccccgcttggaggaggcatcgtcggcattttcgtttagacctttaattctagcactttgaattcgagcaggtcagcgtcttctctcgccacgacggtccccattccaccccctctttctttcacctgacttattctttcgtgtaaagatatgtttattttttgccttcagagggtcagacgaccagttgcctgccgttttgtcttcttctaaggtgtgtgttgggttgttttgctttcctttgcatctttattaagatgtctttcatgtgtatatgcctctgccatagaatactcagtcttgtggtcaagagagttctcaagtgacaaccattggggtttcttcataaagatcttgatatgatcaagatggaaagagacaagcataaacaatgtgccctgtttgactaagtcaaatgaaatagggtggtttttgtttctgttcctaattcctttaaaaaatagggggaatagtattttagaattttatgcagaatttaattctctttttacggttaagattttaagattttcttacttgcacataaaaataatttgggttcttaaacttaatttctggcctgtgactagaatgtttaaaaaaaaaaaaaaccctcgtgc

SEQ ID NO: 1006 - protein, 901 aa, Homo sapiens
MAPTKPSFQQDPSRRERLQALRKEKSRDAARSRRGKENFEFYELAKLLPLPAAITSQLDKASIIRLTISYLKMRDFANQGDPPWNLRMEGPPPNTSVKGAQRRRSPSALAIEVFEAHLGSHILQSLDGFVFALNQEGKFLYISETVSIYLGLSQVELTGSSVFDYVHPGDHVEMAEQLGMKLPPGRGLLSQGTAEDGASSASSSSQSETPEPVESTSPSLLTTDNTLERSFFIRMKSTLTKRGVHIKSSGYKVIHITGRLRLRVSLSHGRTVPSQIMGLVVVAHALPPPTINEVRIDCHMFVTRVNMDLNIIYCENRISDYMDLTPVDIVGKRCYHFIHAEDVEGIRHSHLDLLNKGQCVTKYYRWMQKNGGYIWIQSSATIAINAKNANEKNIIWVNYLLSNPEYKDTPMDIAQLPHLPEKTSESSETSDSESDSKDTSGITEDNENSKSDEKGNQSENSEDPEPDRKKSGNACDNDMNCNDDGHSSSNPDSRDSDDSFEHSDFENPKAGEDGFGALGAMQIKVERYVESESDLRLQNCESLTSDSAKDSDSAGEAGAQASSKHQKRKKRRKRQKGGSASRRRLSSASSPGGLDAGLVEPPRLLSSPNSASVLKIKTEISEPINFDNDSSIWNYPPNREISRNESPYSMTKPPSSEHFPSPQGGGGGGGGGGGLHVAIPDSVLTPPGADGAAARKTQFGASATAALAPVASDPLSPPLSASPRDKHPGNGGGGGGGGGGAGGGGPSASNSLLYTGDLEALQRLQAGNVVLPLVHRVTGTLAATSTAAQRVYTTGTIRYAPAEVTLAMQSNLLPNAHAVNFVDVNSPGFGLDPKTPMEMLYHHVHRLNMSGPFGGAVSAASLTQMPAGNVFTTAEGLFSTLPFPVYSNGIHAAQTLERKED

SEQ ID NO: 1007 - DNA, 2763 bp, Homo sapiens
atggcgcccaccaagcccagctttcagcaggatccttccaggcgagaacgtttacaagcattgagaaaggagaaatcccgagatgctgctcgctcccgccggggaaaagaaaactttgagttctatgaattggccaagttgttgcctcttcctgcagccattaccagccagctcgacaaggcatccatcattcgacttacaattagctatctgaaaatgagggactttgctaaccagggggaccctccgtggaacttgcgaatggaaggccctccacctaacacatcagtaaaagggatacaaatgtggaaatctgaactctgcatgagaaagacaccatgtgaagttataggtgcacagcgaaggagaagccccagtgcactagccattgaagtatttgaagcacatttgggaagccacattttgcagtccctggatggctttgtatttgcactaaatcaggaaggaaaatttttgtacatttccgaaacagtctccatctacctaggcctctcacaagtggagctgacaggcagcagtgtctttgactatgtccaccccggagatcacgtggagatggctgagcagctgggcatgaagctcccccctgggcggggtctcctgtcacagggcactgctgaggacggagccagctcagcatcttcctcctctcagtcggagacccccgagccagtggagtcaaccagccccagtctgctaaccactgacaacactcttgagcgttcctttttcatccgaatgaaatctactctgaccaaacgcggtgtgcacatcaaatcatcaggatataaggtgattcacataacaggccggctacgcctgagagtgtcgctgtcccacgggaggaccgtccccagccaaatcatgggtctcgtggttgttgcgcatgccttgcctccccctacgatcaatgaagtcagaattgactgccatatgttcgtcactcgagtaaatatggacctcaatatcatttactgtgaaaataggattagtgattatatggatctgacccctgtagatatcgtagggaagagatgctaccacttcatccatgctgaagacgtggagggcatcaggcacagtcacttggacttgctgaataagggtcagtgtgtgacaaagtactatcgctggatgcagaagaacggaggatatatttggatacagtccagtgccaccatagctattaatgccaagaatgcaaatgaaaagaatatcatctgggtgaattaccttcttagcaatcctgagtacaaggacacacccatggacatcgcacagctcccccatctgccggagaaaacttccgaatcctcggagacatccgactctgagtcagactctaaagacacctcaggtattacagaggacaacgagaactccaagtccgacgagaaggggaaccagtccgagaacagcgaagacccggagcccgaccggaagaagtcgggcaacgcgtgtgacaacgacatgaactgcaacgacgacggccacagctccagtaacccggacagccgcgacagcgacgacagcttcgagcactcggactttgagaaccccaaggcgggcgaggacggcttcggtgctctgggcgcgatgcagatcaaggtggagcgctacgtggagagcgagtcggacctgcggctgcagaactgcgagtcactcacgtccgacagcgccaaggactcggacagcgcaggcgaggcgggcgcgcaggcctccagcaagcaccagaagcgcaagaaaaggcggaaacggcaaaagggcggcagcgccagccgccggcgcctgtccagcgcgtcgagcccaggcggcctggacgcgggcctggtggagcccccgcggctgctgtcctcccccaacagtgcctcggtgctcaagatcaagacggagatctcagaacccatcaatttcgacaatgacagcagcatctggaactacccgcccaaccgggagatctccaggaacgagtccccctacagcatgaccaagccccccagctctgagcacttcccgtccccgcagggcggcggcggtgggggtggcggtggcggggggctgcacgtggccattcccgactcggtcctcaccccgcccggcgccgacggcgcggccgcccgcaagactcagttcggcgcctcggccaccgcggccctggcccccgtcgcctccgacccgctgtcacccccgctctcggcgtccccgcgggacaagcaccccgggaacggcggcgggggcgggggcgggggcggcggcgcggggggcggcggccccagcgcgtccaactccttgctgtacactggggacctggaggcgctgcagaggttgcaggcgggcaacgtcgtgctcccgctggtgcacagggtgaccgggaccctggccgccaccagcacggccgcgcagagggtctacaccacgggcaccatccgctacgcgcccgccgaggtgaccctggccatgcagagcaacctgctgcccaacgcgcacgctgttaacttcgtggacgttaacagccccggctttggcctcgaccccaagacgcccatggagatgctctaccaccacgtgcaccggctcaacatgtcaggaccgttcggcggcgcagtgagcgcagctagcctgacgcagatgcccgccggcaacgtgttcaccacggccgagggactcttctccacgctgcccttccccgtctacagcaacggcatccacgcggcacagactctggagcgcaaggaggactga

SEQ ID NO: 1008 - protein, 920 aa, Homo sapiens
MAPTKPSFQQDPSRRERLQALRKEKSRDAARSRRGKENFEFYELAKLLPLPAAITSQLDKASIIRLTISYLKMRDFANQGDPPWNLRMEGPPPNTSVKGIQMWKSELCMRKTPCEVIGAQRRRSPSALAIEVFEAHLGSHILQSLDGFVFALNQEGKFLYISETVSIYLGLSQVELTGSSVFDYVHPGDHVEMAEQLGMKLPPGRGLLSQGTAEDGASSASSSSQSETPEPVESTSPSLLTTDNTLERSFFIRMKSTLTKRGVHIKSSGYKVIHITGRLRLRVSLSHGRTVPSQIMGLVVVAHALPPPTINEVRIDCHMFVTRVNMDLNIIYCENRISDYMDLTPVDIVGKRCYHFIHAEDVEGIRHSHLDLLNKGQCVTKYYRWMQKNGGYIWIQSSATIAINAKNANEKNIIWVNYLLSNPEYKDTPMDIAQLPHLPEKTSESSETSDSESDSKDTSGITEDNENSKSDEKGNQSENSEDPEPDRKKSGNACDNDMNCNDDGHSSSNPDSRDSDDSFEHSDFENPKAGEDGFGALGAMQIKVERYVESESDLRLQNCESLTSDSAKDSDSAGEAGAQASSKHQKRKKRRKRQKGGSASRRRLSSASSPGGLDAGLVEPPRLLSSPNSASVLKIKTEISEPINFDNDSSIWNYPPNREISRNESPYSMTKPPSSEHFPSPQGGGGGGGGGGGLHVAIPDSVLTPPGADGAAARKTQFGASATAALAPVASDPLSPPLSASPRDKHPGNGGGGGGGGGGAGGGGPSASNSLLYTGDLEALQRLQAGNVVLPLVHRVTGTLAATSTAAQRVYTTGTIRYAPAEVTLAMQSNLLPNAHAVNFVDVNSPGFGLDPKTPMEMLYHHVHRLNMSGPFGGAVSAASLTQMPAGNVFTTAEGLFSTLPFPVYSNGIHAAQTLERKED

SEQ ID NO: 1009 - DNA, 6103 bp, Homo sapiens
ggccccgctcctccgccggatcgtctgtgggtgagtctcgagccaggaggctctgagccagtggcgattggctgacgcggtggctgcgcactcggcctgagaaactcggcaagcgcgcagtgtcgactccccggtctatgccaggcgcatctcagagtttggcttagagattaaagctccttctatcttgtgatgccaccatcgcaaggttctcaaggttgttgtgggagaagagaaggctaaaggagctcatagaatgcctttaatgctagtccaaaagtaaatgagaaacttagaaaaagattgccaattccaaatcaacatatttagagaaaattggaaaaggagaagcttactacagctttatttgaggactttttaaagaacgctgggttctatctgtgagctgcaaatcttggagcaaaaaccagagacattgccagagcaaacaagaacagaaatacaaatggagaactggtcaaaagacataacccacagttatcttgaacaagaaactacggggataaataaaagtacgcagccagatgagcaactgactatgaattctgagaaaagtatgcatcggaaatccactgaattagttaatgaaataacatgtgagaacacagaatggccagggcagagatcaacgaattttcagatcatcagttcttatccagatgatgagtctgtttactgcactactgaaaaatacaacgttatggaacatagacataatgatatgcattatgaatgtatgactccttgtcaagttacttcagactcagataaagagaagacaatagcatttcttctaaaagaattggatattctcagaacaagcaataaaaagcttcagcagaaattggctaaagaagataaagaacagagaaaactaaagtttaagctggaactccaagagaaagaaacagaagctaaaattgctgaaaagacagcagctctggttgaagaagtgtattttgcgcagaaggaacgtgatgaagctgttatgtctagactgcaattagccattgaggagagagatgaagcaattgcacgagccaagcatatggaaatgtctctaaaagtgctagaaaatattaaccctgaagagaatgacatgacattacaggaattactgaacagaataaacaatgcagacacagggatagctattcagaagaatggagctataattgtggatagaatctacaagaccaaggaatgtaaaatgagaataactgcagaagaaatgagtgcactaatagaagaacgggatgctgccttgtctaagtgcaaacggttagagcaggagcttcatcatgtgaaagagcagaaccagacttcagcaaacaacatgagacatctgactgctgaaaacaatcaagaacgtgctctgaaggcaaagttgttatctatgcaacaagccagagaaactgcagttcaacagtacaaaaaactggaagaggaaatccagacccttcgagtttactacagtttacacaaatctttatctcaagaagaaaatctgaaggatcagtttaactatacccttagtacatatgaagaagctttaaaaaacagagagaacattgtttccatcactcaacaacaaaatgaggaactggctactcaactgcaacaagctctgacagagcgagcaaatatggaattacaacttcaacatgccagagaggcctcccaagtggccaatgaaaaagttcaaaagttggaaaggctggtggatgtactgaggaagaaggttggaaccgggaccatgaggacagtgatctgattgaaaaaaaacgacagtctggggaagcgatcacatctggtgaccaggctgcttcattcaacactgtgtaaacaccaaagccttaacttagcaaacagttgttagaagtgggacactccaaccacattccaagctgagataaaatcaaatcacaaatgtttaaccactttgcagctgacttgagttatttatccaaatatattaactatagacttttaccaatgggtagctataaggttacagcttattttgtaactattttatatctcaatatctttaatataaatctttttactgagagatcattatagaaacatgttaaagttggttaggatcatatcttcacatatggccctttctgaatcaaagtgcggcaaagtaaatattgtctaagctttaatccactgtgttaggtcaaaacttcaaatacatgcatttttcaatatagggtatatttcttaactgatgagagaggcttagacatgagtgtgtagtcttccttcaatgcgtgtatgtaatctttgttagtataaaagatattaaatataggtgccaagaattaaatgtataatttgtttaataagagatggatatattaaaattacattcatcaaggcatgatttttgtttcactacaaataatgcaaactgttttcaataaaaagaggagactgttaatgtgtacttataaattcacattgtcagtattttttaatattgggtctgaataattatctgaattctacttaagctataagtctctgtcatttttgcttgaaaattagcatgcctctgtcttaaaagagaccatcaaacctattaagattcttattgtttatctttttttaattgccatttgatttttattgtggaggaggaggatctaatatataatattcaatacaattgtaatgtagaaatataagaatttagaaaaaagtaaacttgccatttggttaaggttacctgctttttattttattccagaaataagatagttacagcatagcagtcatatgaagttatgaatagaactgagatttttatgtaattagttataggcaaaatactttcatatttttagattagacagacgaaagaccaagaggaaatgactgtgcctggaacaggatgaaatagacaagtagagatttaattagcaaaaattttgtagggaagtaaaattttttctaagtctatacgtttttaattcatctttaagattgagctaaattatctaccattgcctatttacaggataagtacattcaggacaatttattgtaccattctttcatataccatagcagattatccatttcaatttttttttactccacaggaaaatgtaagctactttgtcatagatcacaaaagaatcataatgctaacaaactctatttcttccttattaaatctgtatccattaaagtaacttttttaactatgagaattagaaaataagggacaacaggggttaaaaataaactgatttaatttgctctatagtcctaaagagaattatatcctctcatagaccaatgactctataatagagaaatatgtaatgatttggtcatgcatggagtcttgtctctgggctctatttgaaacgtgtaacagctccctatgtgaagaaacattatctttaaagtcatctgggaggtgcaggtaagtaaagagaaacaatttttgtcacaaagtagtccattcctgatctcacttaaaataaatcacaagtaaatttgaattttcggtttaatgttgaaagcagatgaacttttcttgagttattttgtcttttagaatacacaaaatatagtataaagacatttcacaatttccaaacaaatctttctacgcttaaatgatcaaattagaaaaaccaattcctataattaatatgcagaacttttatagaatatgatattataaagttaaatttgcaaaataattctaacatccactattgttcagtataggtaatctcccaaaaatatcacatcctcttgaaaatgaattgtctacaaaatttcaaatgcaaagtattacagccaaatattatcttaattaatttcttacacttaaaagtgtccatcaacagtgtgtcagatggtctttatatattttttctgtatgaaggaatagccttgcctactgaagataggttctctatgtattcaacaataatgcaactttagaagtattccacactgctgagaaatgttgctttgagtttgctttacacatcatcaacactaaatcctatagtaacatgagaattcacttcttcttgtaaaaataagtaatttacaggaaaggcaaaatgctaatactaacatttgtagcacttgatgatttacaaagtccttttacatctgttttttcatttgatcctatcgacaatcataataataataaattatatatataacccatataataatgatggtgatgataattttagtattactgtcattataattattattatattcattctacagatgaggaaacagactcagtaagccttggaatttgccaaggactggctaggacctagaactaagatcttataaccacactccatgcaactatgagtctctaaatctctctgtaagaaaaaaatttcaaagtaaagattttactcttgcaatttctgttgtgatagtaccatctctttcacatactacatacaaattccctaataatcaaaagattgtacacatttttttcaatgaagtacaataatgtgaactgcatgtgtaaacagcatcacattattaccacctctctatggtattatagtggcagtatgctttgcctcagccttcactaattaggaatattgtgacaattcattgctaataaaacataacatgagtctctttgtactgtttttaatttggcctgatgctaaaacctatcagtttagttttttaacatggtagtctaaacttcaagtcttgctctatctcctagagcaatttagagctaaaaccagtaataagcaaagttattggttataagcaaggtataagcagttaaagcaaagttattaattattaatatatgagaatttaaaattttataaataagttagaaattattaatgtattttaaatatggagtaaaatattttgctaatttttttcaatgataaagttgatcctttgtatatttccttattcaaataaattcagtcatcttcttatcaggttgcttatttatataattagtttattttattaaaaatctagaatattaaagatttatacttttaatattgaatatagtttcgtagaaaaacattttatatgtactattcttaaagatcacaattatttttaaactttctattttcaaatacttgtgattaataaggcattctatgatgaaatagccatggcttatatatttttgtcttttcacatatgatgtgtttggaacccaaattttttactgattttattgtgttgttggtaactagtatttacagctaacctatctattcatattttacatatatatatatatatatacatgcacacacactgatacatttaccttttaaaaaatgatttataagtgaactgttaggctccagtgatttcagtgttttgttcatgttttattggaaatgcacgtggtttcttaggcttttaaacaaatacatggaatggttgaaagatttattttgctcgtgcttagctaaatatgtcatctctagaaaagatgtggtttgttttggcactgttttaaaaactcaaatattttaaacatttgttaagttggagcttgcacatttaaaccagcagcatacgttccagaagagcatctcaagttaccaaattttttgtaatccttttactagtaaaatcttttttgaagagtttttcttgtgcttgcttcggcagcatatatactgaaattagaaaaagaaaacttttcttttttattatatattttagtgtaagttaagttaaacttctaaaagttgaattatttaatgtaggacttcataaatagtatttgacaatgataaatgtgtatttttgagaatcattaaaatgtatacaatgatattcctttgcagaagtcttaatatgcataatttttaatctaattgtcttctaaatatagttttggtgtatgctggtattttagaagccaccaatttctggactatctgattattaacaaagatgtattttaatgcacaaactcaaatgtttaaaatatatatttactttgtactcaaataaaatcccctattgcaaatcctaaaaaaaaaaaaaaaaaaaaaaa

SEQ ID NO: 1010 - protein, 442 aa, Homo sapiens
MENWSKDITHSYLEQETTGINKSTQPDEQLTMNSEKSMHRKSTELVNEITCENTEWPGQRSTNFQIISSYPDDESVYCTTEKYNVMEHRHNDMHYECMTPCQVTSDSDKEKTIAFLLKELDILRTSNKKLQQKLAKEDKEQRKLKFKLELQEKETEAKIAEKTAALVEEVYFAQKERDEAVMSRLQLAIEERDEAIARAKHMEMSLKVLENINPEENDMTLQELLNRINNADTGIAIQKNGAIIVDRIYKTKECKMRITAEEMSALIEERDAALSKCKRLEQELHHVKEQNQTSANNMRHLTAENNQERALKAKLLSMQQARETAVQQYKKLEEEIQTLRVYYSLHKSLSQEENLKDQFNYTLSTYEEALKNRENIVSITQQQNEELATQLQQALTERANMELQLQHAREASQVANEKVQKLERLVDVLRKKVGTGTMRTVI

SEQ ID NO: 1011 - DNA, 3124 bp, Homo sapiens
taagatccacatcagctcaactgcacttgcctcgcagaggcagcccgctcacttcccgcggaggcgctccccggcgccgcgctccgcggcagccgcctgcccccggcgctgcccccgcccgccgcgccgccgccgccgccgcgcacgccgcgccccgcagctctgggcttcctcttcgcccgggtggcgttgggcccgcgcgggcgctcgggtgactgcagctgctcagctcccctcccccgccccgcgccgcgcggccgcccgtcgcttcgcacagggctggatggttgtattgggcagggtggctccaggatgttaggaactgtgaagatggaagggcatgaaaccagcgactggaacagctactacgcagacacgcaggaggcctactcctccgtcccggtcagcaacatgaactcaggcctgggctccatgaactccatgaacacctacatgaccatgaacaccatgactacgagcggcaacatgaccccggcgtccttcaacatgtcctatgccaacccgggcctaggggccggcctgagtcccggcgcagtagccggcatgccggggggctcggcgggcgccatgaacagcatgactgcggccggcgtgacggccatgggtacggcgctgagcccgagcggcatgggcgccatgggtgcgcagcaggcggcctccatgaatggcctgggcccctacgcggccgccatgaacccgtgcatgagccccatggcgtacgcgccgtccaacctgggccgcagccgcgcgggcggcggcggcgacgccaagacgttcaagcgcagctacccgcacgccaagccgccctactcgtacatctcgctcatcaccatggccatccagcaggcgcccagcaagatgctcacgctgagcgagatctaccagtggatcatggacctcttcccctattaccggcagaaccagcagcgctggcagaactccatccgccactcgctgtccttcaatgactgcttcgtcaaggtggcacgctccccggacaagccgggcaagggctcctactggacgctgcacccggactccggcaacatgttcgagaacggctgctacttgcgccgccagaagcgcttcaagtgcgagaagcagccgggggccggcggcgggggcgggagcggaagcgggggcagcggcgccaagggcggccctgagagccgcaaggacccctctggcgcctctaaccccagcgccgactcgcccctccatcggggtgtgcacgggaagaccggccagctagagggcgcgccggcccccgggcccgccgccagcccccagactctggaccacagtggggcgacggcgacagggggcgcctcggagttgaagactccagcctcctcaactgcgccccccataagctccgggcccggggcgctggcctctgtgcccgcctctcacccggcacacggcttggcaccccacgagtcccagctgcacctgaaaggggacccccactactccttcaaccacccgttctccatcaacaacctcatgtcctcctcggagcagcagcataagctggacttcaaggcatacgaacaggcactgcaatactcgccttacggctctacgttgcccgccagcctgcctctaggcagcgcctcggtgaccaccaggagccccatcgagccctcagccctggagccggcgtactaccaaggtgtgtattccagacccgtcctaaacacttcctagctcccgggactggggggtttgtctggcatagccatgctggtagcaagagagaaaaaatcaacagcaaacaaaaccacacaaaccaaaccgtcaacagcataataaaatcccaacaactatttttatttcatttttcatgcacaacctttcccccagtgcaaaagactgttactttattattgtattcaaaattcattgtgtatattactacaaagacaaccccaaaccaatttttttcctgcgaagtttaatgatccacaagtgtatatatgaaattctcctccttccttgcccccctctctttcttccctctttcccctccagacattctagtttgtggagggttatttaaaaaaacaaaaaaggaagatggtcaagtttgtaaaatatttgtttgtgctttttccccctccttacctgaccccctacgagtttacaggtctgtggcaatactcttaaccataagaattgaaatggtgaagaaacaagtatacactagaggctcttaaaagtattgaaagacaatactgctgttatatagcaagacataaacagattataaacatcagagccatttgcttctcagtttacatttctgatacatgcagatagcagatgtctttaaatgaaatacatgtatattgtgtatggacttaattatgcacatgctcagatgtgtagacatcctccgtatatttacataacatatagaggtaatagataggtgatatacatgatacattctcaagagttgcttgaccgaaagttacaaggaccccaacccctttgtcctctctacccacagatggccctgggaatcaattcctcaggaattgccctcaagaactctgcttcttgctttgcagagtgccatggtcatgtcattctgaggtcacataacacataaaattagtttctatgagtgtataccatttaaagaatttttttttcagtaaaagggaatattacaatgttggaggagagataagttatagggagctggatttcaaaacgtggtccaagattcaaaaatcctattgatagtggccattttaatcattgccatcgtgtgcttgtttcatccagtgttatgcactttccacagttggacatggtgttagtatagccagacgggtttcattattatttctctttgctttctcaatgttaatttattgcatggtttattctttttctttacagctgaaattgctttaaatgatggttaaaattacaaattaaattgttaatttttatcaatgtgattgtaattaaaaatattttgatttaaataacaaaaataataccagattttaagccgtggaaaatgttcttgatcatttgcagttaaggactttaaataaatcaaatgttaacaaaaaaaaaaaaaaaa

SEQ ID NO: 1012 - protein, 472 aa, Homo sapiens
MLGTVKMEGHETSDWNSYYADTQEAYSSVPVSNMNSGLGSMNSMNTYMTMNTMTTSGNMTPASFNMSYANPGLGAGLSPGAVAGMPGGSAGAMNSMTAAGVTAMGTALSPSGMGAMGAQQAASMNGLGPYAAAMNPCMSPMAYAPSNLGRSRAGGGGDAKTFKRSYPHAKPPYSYISLITMAIQQAPSKMLTLSEIYQWIMDLFPYYRQNQQRWQNSIRHSLSFNDCFVKVARSPDKPGKGSYWTLHPDSGNMFENGCYLRRQKRFKCEKQPGAGGGGGSGSGGSGAKGGPESRKDPSGASNPSADSPLHRGVHGKTGQLEGAPAPGPAASPQTLDHSGATATGGASELKTPASSTAPPISSGPGALASVPASHPAHGLAPHESQLHLKGDPHYSFNHPFSINNLMSSSEQQHKLDFKAYEQALQYSPYGSTLPASLPLGSASVTTRSPIEPSALEPAYYQGVYSRPVLNTS

SEQ ID NO: 1013 - DNA, 3006 bp, Homo sapiens
cgcttactgaataaggtgggatccaacaagagtgtagtatggaatgcaatagcttatgaattactttttttctgagggagctcaacagaatgacacctaagaaagggaaagtctttgacacttggtacgtttgtgatttttggtcattacttgaaaattaataagtttgaaatcactactcttagaaatggaagaaagtgatgactctaatcagcctatctcagcgtgtaggcaagaaattcgaaagagaagatgacccagcaaaccaatggtaggcaaatcccagcaaactgatgtaatagagaaaaagaaacacatggccataccaaaatcatctagccccaaagctacccatcgtattggtaatacttctggaagcaaaggcagctactctgccaaagcctatgagtctattagagtatcttctgagcttcagcaaacttggacaaagagaaagcatggacaggaaatgactagtaagtctctccagacagacaccattgtagaagagaaaaaagaagtcaagttagttgaggaaaccgtggtacctgaagaaaagtcagctgatgttagagaagctgctattgaattgccagagagtgttcaggatgtagaaattccaccaaacataccttcagttcaactaaaaatggacagatctcagcagaccagccgtacaggatactggaccatgatgaacatcccccctgtagaaaaagtggacaaggaacaacagacatactttagtgaatcagaaatagtggttatttccaggccagatagttcttctacaaagtcaaaggaagatgccctgaaacataaatcgtcgggaaagatttttgctagtgaacaacctgaatttcaaccagcaacaaacagcaatgaagaaattgggcagaaaaatatcagcagaacttcatttactcaggagactaaaaaaggtcccccggtacttttagaagatgagcttagggaagaagtaactgtacctgttgtacaagaaggttctgctgttaaaaaagtggcttctgctgaaatagagcctccatcaacagaaaaattcccagctaaaatacagcctccattagttgaagaggccactgctaaagcggagcccagacctgctgaagagacccatgtccaagtacagccatcaactgaagagactcctgatgctgaggcagccactgcagttgcggagaattctgttaaagttcagcctccacctgctgaagaggcccctttagtggagtttcctgctgaaattcagcctccatcagctgaagagtctccttctgtagagcttctggctgaaattctgcctccatcagctgaagagtccctttcagaagagcctcctgctgaaattctgcctccaccagctgaaaagtctccttcagtagagcctcttggtgaaattcggtctccctcagcacaaaaggctcccattgaagtacagcctttaccagctgagggcgcccttgaagaggcctcagctaaagtagagcctcccactgttgaagagacccttgctgatgttcagcctctattacctgaagaggctcctagagaagaggctcgagaacttcagctttcaacagctatggagacccctgcagaagaggctcctactgaatttcagtctccattacctaaagagaccactgcagaagaggcctctgctgaaattcagcttctagcagctacggagcctcctgcagatgaaactcctgccgaagctcggtctccactatctgaggagacttctgcagaagaggctcatgctgaagttcaatctccattagctgaagagaccactgcagaagaggcctctgctgaaattcagcttctagcagctatagaggctcctgcagatgaaactcctgctgaagctcagtctccactatctgaggagacttctgcagaagaggctcctgctgaagttcagtctccatcagctaagggagtttctatagaagaggcccctcttgagcttcagcctccatcaggtgaagagaccactgcagaagaggcctctgctgcaattcagcttctagcagctacagaggcttctgcagaagaggctcctgctgaagttcagcctccaccagctgaggaggcccccgctgaagttcagcctccaccagctgaggaggcccccgctgaagttcagcctccaccagctgaggagacccccgctgaagttcagcctccaccagctgaggaggcccccgctgaagttcagcctccaccagctgaggaggcccccgctgaagttcagcctccaccagctgaggaggcccctgctgaagttcagtctctaccagctgaggagactcctatagaagagacccttgctgcagtacactctcccccagctgatgatgtccctgcagaagaggcctccgttgacaaacattccccaccagctgatttgcttctgactgaggagtttcctataggagaggcctctgctgaagtttcacctccaccatctgaacaaacccctgaagatgaggctctggtagagaatgtgtctacagaatttcagtcaccgcaggtggcaggaattccagcagtaaaattaggatcggttgttttggaaggtgaagcaaaatttgaagaggtttcaaaaatcaattctgtccttaaagatttgtctaataccaatgatggacaggctcccactcttgaaatagaaagtgtttttcatatagaattaaaacaacgtcctcctgaactgtagtcaggttgtacctaagctagcaatcagaagctacatggttttggaagaacatactttagaaaagggtgggcagcgggaagtagctttgtcaataaggcaaattaaaggggaccccaagacttggaatacaggttggaaaatgaacaataaaaactgtagcagcataaaaaaaaaaaaaaaaaaaaaaaaaaaaaaaaaaaaaaaaaaaaaaaaaaaaaaaaaaaaaaaaaaaaaaaaaaaaaaaaaaaaaaaaaaaaaaa

SEQ ID NO: 1014 - protein, 825 aa, Homo sapiens
MVGKSQQTDVIEKKKHMAIPKSSSPKATHRIGNTSGSKGSYSAKAYESIRVSSELQQTWTKRKHGQEMTSKSLQTDTIVEEKKEVKLVEETVVPEEKSADVREAAIELPESVQDVEIPPNIPSVQLKMDRSQQTSRTGYWTMMNIPPVEKVDKEQQTYFSESEIVVISRPDSSSTKSKEDALKHKSSGKIFASEQPEFQPATNSNEEIGQKNISRTSFTQETKKGPPVLLEDELREEVTVPVVQEGSAVKKVASAEIEPPSTEKFPAKIQPPLVEEATAKAEPRPAEETHVQVQPSTEETPDAEAATAVAENSVKVQPPPAEEAPLVEFPAEIQPPSAEESPSVELLAEILPPSAEESLSEEPPAEILPPPAEKSPSVEPLGEIRSPSAQKAPIEVQPLPAEGALEEASAKVEPPTVEETLADVQPLLPEEAPREEARELQLSTAMETPAEEAPTEFQSPLPKETTAEEASAEIQLLAATEPPADETPAEARSPLSEETSAEEAHAEVQSPLAEETTAEEASAEIQLLAAIEAPADETPAEAQSPLSEETSAEEAPAEVQSPSAKGVSIEEAPLELQPPSGEETTAEEASAAIQLLAATEASAEEAPAEVQPPPAEEAPAEVQPPPAEEAPAEVQPPPAEETPAEVQPPPAEEAPAEVQPPPAEEAPAEVQPPPAEEAPAEVQSLPAEETPIEETLAAVHSPPADDVPAEEASVDKHSPPADLLLTEEFPIGEASAEVSPPPSEQTPEDEALVENVSTEFQSPQVAGIPAVKLGSVVLEGEAKFEEVSKINSVLKDLSNTNDGQAPTLEIESVFHIELKQRPPEL

SEQ ID NO: 1015 - DNA, 4816 bp, Homo sapiens
cgtcttcccggtctcctttcccggccgcacagggtagattttcgttccgtcacccaggctggagtgcagtggtgtgaccttggcttgctgcaaccctttgcctcctgggttcaagtgattctcattgcctcagcctcctaagtagctgggattacaggttttataggatcacattgacaaaagtaccatggagttttatgagtcagcatattttattgttcttattccttcaatagttattacagtaattttcctcttcttctggcttttcatgaaagaaacattatatgatgaagttcttgcaaaacagaaaagagaacaaaagcttattcctaccaaaacagataaaaagaaagcagaaaagaaaaagaataaaaagaaagaaatccagaatggaaacctccatgaatccgactctgagagtgtacctcgagactttaaattatcagatgctttggcagtagaagatgatcaagttgcacctgttccattgaatgtcgttgaaacttcaagtagtgttagggaaagaaaaaagaaggaaaagaaacaaaagcctgtgcttgaagagcaggtcatcaaagaaagtgacgcatcaaagattcctggcaaaaaagtagaacctgtcccagttactaaacagcccacccctccctctgaagcagctgcctcgaagaagaaaccagggcagaagaagtctaaaaatggaagcgatgaccaggataaaaaggtggaaactctcatggtaccatcaaaaaggcaagaagcattgcccctccaccaagagactaaacaagaaagtggatcagggaagaagaaagcttcatcaaagaaacaaaagacagaaaatgtcttcgtagatgaaccccttattcatgcaactacttatattcctttgatggataatgctgactcaagtcctgtggtagataagagagaggttattgatttgcttaaacctgaccaagtagaagggatccagaaatctgggactaaaaaactgaagaccgaaactgacaaagaaaatgctgaagtgaagtttaaagattttcttctgtccttgaagactatgatgttttctgaagatgaggctctttgtgttgtagacttgctaaaggagaagtctggtgtaatacaagatgctttaaagaagtcaagtaagggagaattgactacgcttatacatcagcttcaagaaaaggacaagttactcgctgctgtgaaggaagatgctgctgctacaaaggatcggtgtaagcagttaacccaggaaatgatgacagagaaagaaagaagcaatgtggttataacaaggatgaaagatcgaattggaacattagaaaaggaacataatgtatttcaaaacaaaatacatgtcagttatcaagagactcaacagatgcagatgaagtttcagcaagttcgtgagcagatggaggcagagatagctcacttgaagcaggaaaatggtatactgagagatgcagtcagcaacactacaaatcaactggaaagcaagcagtctgcagaactaaataaactacgccaggattatgctaggttggtgaatgagctgactgagaaaacaggaaagctacagcaagaggaagtccaaaagaagaatgctgagcaagcagctactcagttgaaggttcaactacaagaagctgagagaaggtgggaagaagttcagagctacatcaggaagagaacagcggaacatgaggcagcacagcaagatttacagagtaaatttgtggccaaagaaaatgaagtacagagtctgcatagtaagcttacagataccttggtatcaaaacaacagttggagcaaagactaatgcagttaatggaatcagagcagaaaagggtgaacaaagaagagtctctacaaatgcaggttcaggatattttggagcagaatgaggctttgaaagctcaaattcagcagttccattcccagatagcagcccagacctccgcttcagttctagcagaagaattacataaagtgattgcagaaaaggataagcagataaaacagactgaagattctttagcaagtgaacgtgatcgtttaacaagtaaagaagaggaacttaaggatatacagaatatgaatttcttattaaaagctgaagtgcagaaattacaggccctggcaaatgagcaggctgctgctgcacatgaattggagaagatgcaacaaagtgtttatgttaaagatgataaaataagattgctggaagagcaactacaacatgaaatttcaaacaaaatggaagaatttaagattctaaatgaccaaaacaaagcattaaaatcagaagttcagaagctacagactcttgtttctgaacagcctaataaggatgttgtggaacaaatggaaaaatgcattcaagaaaaagatgagaagttaaagactgtggaagaattacttgaaactggacttattcaggtggcaactaaagaagaggagctgaatgcaataagaacagaaaattcatctctgacaaaagaagttcaagacttaaaagctaagcaaaatgatcaggtttcttttgcctctctagttgaagaacttaagaaagtgatccatgagaaagatggaaagatcaagtctgtagaagagcttctggaggcagaacttctcaaagttgctaacaaggagaaaactgttcaggatttgaaacaggaaataaaggctctaaaagaagaaataggaaatgtccagcttgaaaaggctcaacagttatctatcacttccaaagttcaggagcttcagaacttattaaaaggaaaagaggaacagatgaataccatgaaggctgttttggaagagaaagagaaagacctagccaatacagggaagtggttacaggatcttcaagaagaaaatgaatctttaaaagcacatgttcaggaagtagcacaacataacttgaaagaggcctcttctgcatcacagtttgaagaacttgagattgtgttgaaagaaaaggaaaatgaattgaagaggttagaagccatgctaaaagagagggagagtgatctttctagcaaaacacagctgttacaggatgtacaagatgaaaacaaattgtttaagtcccaaattgagcagcttaaacaacaaaactaccaacaggcatcttcttttccccctcatgaagaattattaaaagtaatttcagaaagagagaaagaaataagtggtctctggaatgagttagattctttgaaggatgcagttgaacaccagaggaagaaaaacaatgaccttcgggagaaaaactgggaagcaatggaagcattggcatcaactgaaaaaatgctgcaggacaaagtgaacaagacttccaaggaaaggcagcaacaggtggaagctgttgagttggaggctaaagaagttctcaaaaaattatttccaaaggtgtctgtcccttctaatttgagttatggtgaatggttgcatggatttgaaaaaaaggcaaaagaatgtatggctggaacttcagggtcagaggaggttaaggttctagagcacaagttgaaagaagctgatgaaatgcacacattgttacagctagagtgtgaaaaatacaaatccgtccttgcagaaacagaaggaattttacagaagctacagagaagtgttgagcaagaagaaaataaatggaaagttaaggtcgatgaatcacacaagactattaaacagatgcagtcatcatttacatcttcagaacaagagctagagcgattaagaagcgaaaataaggatattgaaaatctgagaagagaacgagaacatttggaaatggaactagaaaaggcagagatggaacgatctacctatgttacagaagtcagagagctgaaagatctgttgactgaattgcagaaaaaacttgatgattcatattctgaagcagtaagacagaatgaagagctaaatttgttgaaggcacagttaaatgaaacactcacaaaacttagaactgaacaaaatgaaagacagaaggtagctggtgatttgcataaggctcaacagtcactggagcttatccagtcaaaaatagtaaaagctgctggagacactactgttattgaaaatagtgatgtttccccagaaacggagtcttctgagaaggagacaatgtctgtaagtctaaatcagactgtaacacagttacagcagttgcttcaggcggtaaaccaacagctcacaaaggagaaagagcactaccaggtgttagagtgatcatcctctggcctaccttgacacatgctctccttcaaaatgctaattcagagtgaagtaattgggaaactgttcatttgaggataaaaaaggcattgtattatattttgccaaattaaagccttatttatgttttcaccctttctactttgtcagaaacactgaacagagttttgtcttttctaatccttgttagactactgatttaaagaaggaaaaaaaaaagccaactctgtagacaccttcagagtttagttttataataaaaactgtttgaataattagacctttacattcctgaagataaacatgtaatcttttatcttattttgctcaataaaattgttcagaagatcaaagtggtaaagacaatgtaaaatttaacattttaatactgatgttgtacactgttttacttaacattttgggaagtaactgcctctgacttcaactcaagaaaacacttttttgttgctaatgtaatcggtttttgtaatggcgtcagcaaataaaaggatgcttattattcaaaaaaaaaaaaaaaaaaaaaaaaaa

SEQ ID NO: 1016 - protein, 1357 aa, Homo sapiens
MEFYESAYFIVLIPSIVITVIFLFFWLFMKETLYDEVLAKQKREQKLIPTKTDKKKAEKKKNKKKEIQNGNLHESDSESVPRDFKLSDALAVEDDQVAPVPLNVVETSSSVRERKKKEKKQKPVLEEQVIKESDASKIPGKKVEPVPVTKQPTPPSEAAASKKKPGQKKSKNGSDDQDKKVETLMVPSKRQEALPLHQETKQESGSGKKKASSKKQKTENVFVDEPLIHATTYIPLMDNADSSPVVDKREVIDLLKPDQVEGIQKSGTKKLKTETDKENAEVKFKDFLLSLKTMMFSEDEALCVVDLLKEKSGVIQDALKKSSKGELTTLIHQLQEKDKLLAAVKEDAAATKDRCKQLTQEMMTEKERSNVVITRMKDRIGTLEKEHNVFQNKIHVSYQETQQMQMKFQQVREQMEAEIAHLKQENGILRDAVSNTTNQLESKQSAELNKLRQDYARLVNELTEKTGKLQQEEVQKKNAEQAATQLKVQLQEAERRWEEVQSYIRKRTAEHEAAQQDLQSKFVAKENEVQSLHSKLTDTLVSKQQLEQRLMQLMESEQKRVNKEESLQMQVQDILEQNEALKAQIQQFHSQIAAQTSASVLAEELHKVIAEKDKQIKQTEDSLASERDRLTSKEEELKDIQNMNFLLKAEVQKLQALANEQAAAAHELEKMQQSVYVKDDKIRLLEEQLQHEISNKMEEFKILNDQNKALKSEVQKLQTLVSEQPNKDVVEQMEKCIQEKDEKLKTVEELLETGLIQVATKEEELNAIRTENSSLTKEVQDLKAKQNDQVSFASLVEELKKVIHEKDGKIKSVEELLEAELLKVANKEKTVQDLKQEIKALKEEIGNVQLEKAQQLSITSKVQELQNLLKGKEEQMNTMKAVLEEKEKDLANTGKWLQDLQEENESLKAHVQEVAQHNLKEASSASQFEELEIVLKEKENELKRLEAMLKERESDLSSKTQLLQDVQDENKLFKSQIEQLKQQNYQQASSFPPHEELLKVISEREKEISGLWNELDSLKDAVEHQRKKNNDLREKNWEAMEALASTEKMLQDKVNKTSKERQQQVEAVELEAKEVLKKLFPKVSVPSNLSYGEWLHGFEKKAKECMAGTSGSEEVKVLEHKLKEADEMHTLLQLECEKYKSVLAETEGILQKLQRSVEQEENKWKVKVDESHKTIKQMQSSFTSSEQELERLRSENKDIENLRREREHLEMELEKAEMERSTYVTEVRELKDLLTELQKKLDDSYSEAVRQNEELNLLKAQLNETLTKLRTEQNERQKVAGDLHKAQQSLELIQSKIVKAAGDTTVIENSDVSPETESSEKETMSVSLNQTVTQLQQLLQAVNQQLTKEKEHYQVLE

SEQ ID NO: 1017 - DNA, 4185 bp, Homo sapiens
atgacaatggaatcggtacctggtgtccaagcctggtcctcgcacgaggtagatactccctgagatgctggggaagagccatggtagggccactcatggccctcttcctttggcggaccttggaatccaccttccctgcgttaaagtgctccaccaggtgacgccggaagagaagccagcagtaagtacatgtgaaatccagtagctgaccacagacacgcgagcgataagaaaaagctcgctgcttcttttctcaacactccgccagctgcgtcagaggcccttgacccgcactcaaaatggcggcggcggcgtcagcatcagcggcctcctgcccgtatctatcgtggcggcgacgggacccgcctccctgggcgccggagtcatgtgacccacacaatggctgagtggctactctcggcttcctggcaacgccgagcgaaagctatgactgcggccgcgggttcggcgggccgcgccgcggtgcccttgctgctgtgtgcgctgctggcgcccggcggcgcgtacgtgctcgacgactccgacgggctgggccgggagttcgacggcatcggcgcggtcagcggcggcggggcaacctcccgacttctagtaaattacccagagccctatcgttctcagatattggattatctctttaagccgaattttggtgcctctttgcatattttaaaagtggaaataggtggtgatgggcagacaacagacggcactgagccctcccacatgcattatgcactagatgagaattatttccgaggatacgagtggtggttgatgaaagaagctaagaagaggaatcccaatattacactcattgggttgccatggtcattccctggatggctgggaaaaggtttcgactggccttatgtcaatcttcagctgactgcctattatgtcgtgacctggattgtgggcgccaagcgttaccatgatttggacattgattatattggaatttggaatgagaggtcatataatgccaattatattaagatattaagaaaaatgctgaattatcaaggtctccagcgagtgaaaatcatagcaagtgataatctctgggagtccatctctgcatccatgctccttgatgccgaactcttcaaggtggttgatgttataggggctcattatcctggaacccattcagcaaaagatgcaaagttgactgggaagaagctttggtcttctgaagactttagcactttaaatagtgacatgggtgcaggctgctggggtcgcattttaaatcagaattatatcaatggctatatgacttccacaatcgcatggaatttagtggctagttactatgaacagttgccttatgggagatgcgggttgatgacggcccaggagccatggagtgggcactacgtggtagaatctcctgtctgggtatcagctcataccactcagtttactcaacctggctggtattacctgaagacagttggccatttagagaaaggaggaagctacgtagctctgactgatggcttagggaacctcaccatcatcattgaaaccatgagtcataaacattctaagtgcatacggccatttcttccttatttcaatgtgtcacaacaatttgccacctttgttcttaagggatcttttagtgaaataccagagctacaggtatggtataccaaacttggaaaaacatccgaaagatttctttttaagcagctggattctctatggctccttgacagcgatggcagtttcacactgagcctgcatgaagatgagctgttcacactcaccactctcaccactggtcgcaaaggcagctacccgcttcctccaaaatcccagcccttcccaagtacctataaggatgatttcaatgttgattacccattttttagtgaagctccaaactttgctgatcaaactggtgtatttgaatattttacaaatattgaagaccctggcgagcatcacttcacgctacgccaagttctcaaccagagacccattacgtgggctgccgatgcatccaacacaatcagtattataggagactacaactggaccaatctgactataaagtgtgatgtatacatagagacccctgacacaggaggtgtgttcattgcaggaagagtaaataaaggtggtattttgattagaagtgccagaggaattttcttctggatttttgcaaatggatcttacagggttacaggtgatttagctggatggattatatatgctttaggacgtgttgaagttacagcaaaaaaatggtatacactcacgttaactattaagggtcatttcacctctggcatgctgaatgacaagtctctgtggacagacatccctgtgaattttccaaagaatggctgggctgcaattggaactcactcctttgaatttgcacagtttgacaactttcttgtggaagccacacgctaatacttaacagggcatcatagaatactctggattttcttcccttctttttggttttggttcagagccaattcttgtttcattggaacagtatatgaggcttttgagactaaaaataatgaagagtaaaaggggagagaaatttatttttaatttaccctgtggaagattttattagaattaattccaaggggaaaactggtgaatctttaacattacctggtgtgttccctaacattcaaactgtgcattggccatacccttaggagtggtttgagtagtacagacctcgaagccttgctgctaacactgaggtagctctcttcatcttatttgcaagcggtcctgtagatggcagtaacttgatcatcactgagatgtatttatgcatgctgaccgtgtgtccaagtgagccagtgtcttcatcacaagatgatgctgccataatagaaagctgaagaacactagaagtagctttttgaaaaccacttcaacctgttatgctttatgctctaaaaagtatttttttattttcctttttaagatgatacttttgaaatgcaggatatgatgagtgggatgattttaaaaatgcctctttaataaactacctctaacactatttctgcagtaatagatattagcagattaattgggttatttgcattatttaatttttttgattccaagttttggtcttgtaaccactataactctctgtgaacgtttttccaggtggctggaagaaggaagaaaacctgatatagccaatgctgttgtagtcgtttcctcagcctcatctcactgtgctgtggtctgtcctcacatgtgcactggtaacagactcacacagctgatgaatgcttttctctccttatgtgtggaaggaggggagcacttagacatttgctaactcccagaattggatcatctcctaagatgtacttactttttaaagtccaaatatgtttatatttaaatatacgtgagcgtgttcatcatgttgtatgatttatactaagcattaatgtggctctatgtagcaaatcagttattcatgtaggtaaagtaaatctagaattatttataagaattactcattgaactaattctactatttaggaatttgtaagagtctaacataggcttagctacagtgaagttttgcattgcttttgaagacaagaagataagtgctagaataaataagattacagagaaaattttttgttaaaaccaagtgatttccagctgatgtatctaatattttttaaaacgaacattatagaggtgtaatttatttacaataaaatgttcctactttaaatatacaattcagtgagttttgataaattgatatacccatgtaaccaacactccagtcaagcttcagaatatttccatcaccccagaaggttctcttgtatacctgctcagtcagttcctttcactcccaattgttggcagccattgataggaattctatcactataggttagttttctttgttccagaacatcatgaaagcggcgtcatgtactgtgtattcttatgaatggtttctttccatcagcataatgatttgagatttgtccatgttgtgtgattcagtggtttgttccttcttatttctgaagagttttccattgtatgaatataccacaatttgtttcctccccaccagtttctgatactacaattaaaactgtctacatttacaaaaaaaaaaaa

SEQ ID NO: 1018 - protein, 685 aa, Homo sapiens
MAEWLLSASWQRRAKAMTAAAGSAGRAAVPLLLCALLAPGGAYVLDDSDGLGREFDGIGAVSGGGATSRLLVNYPEPYRSQILDYLFKPNFGASLHILKVEIGGDGQTTDGTEPSHMHYALDENYFRGYEWWLMKEAKKRNPNITLIGLPWSFPGWLGKGFDWPYVNLQLTAYYVVTWIVGAKRYHDLDIDYIGIWNERSYNANYIKILRKMLNYQGLQRVKIIASDNLWESISASMLLDAELFKVVDVIGAHYPGTHSAKDAKLTGKKLWSSEDFSTLNSDMGAGCWGRILNQNYINGYMTSTIAWNLVASYYEQLPYGRCGLMTAQEPWSGHYVVESPVWVSAHTTQFTQPGWYYLKTVGHLEKGGSYVALTDGLGNLTIIIETMSHKHSKCIRPFLPYFNVSQQFATFVLKGSFSEIPELQVWYTKLGKTSERFLFKQLDSLWLLDSDGSFTLSLHEDELFTLTTLTTGRKGSYPLPPKSQPFPSTYKDDFNVDYPFFSEAPNFADQTGVFEYFTNIEDPGEHHFTLRQVLNQRPITWAADASNTISIIGDYNWTNLTIKCDVYIETPDTGGVFIAGRVNKGGILIRSARGIFFWIFANGSYRVTGDLAGWIIYALGRVEVTAKKWYTLTLTIKGHFTSGMLNDKSLWTDIPVNFPKNGWAAIGTHSFEFAQFDNFLVEATR

SEQ ID NO: 1019 - DNA, 5428 bp, Homo sapiens
gccctggccaaggaggaggctgaaagagcctgagctgtgccctctccattccactgctgtggcagggtcagaaatcttggatagagaaaaccttttgcaaacgggaatgtatctttgtaattcctagcatgaaagactctaacaggtgttgctgtggccagttcaccaaccagcatatcccccctctgccaagtgcaacacccagcaaaaatgaagaggaaagcaaacaggtggagactcagcctgagaaatggtctgttgccaagcacacccagagctacccaacagattcctatggagttcttgaattccagggtggcggatattccaataaagccatgtatatccgtgtatcctatgacaccaagccagactcactgctccatctcatggtgaaagattggcagctggaactccccaagctcttaatatctgtgcatggaggcctccagaactttgagatgcagcccaagctgaaacaagtctttgggaaaggcctgatcaaggctgctatgaccaccggggcctggatcttcaccgggggtgtcagcacaggtgttatcagccacgtaggggatgccttgaaagaccactcctccaagtccagaggccgggtttgtgctataggaattgctccatggggcatcgtggagaataaggaagacctggttggaaaggatgtaacaagagtgtaccagaccatgtccaaccctctaagtaagctctctgtgctcaacaactcccacacccacttcatcctggctgacaatggcaccctgggcaagtatggcgccgaggtgaagctgcgaaggctgctggaaaagcacatctccctgcagaagatcaacacaagactggggcagggcgtgcccctcgtgggtctcgtggtggaggggggccctaacgtggtgtccatcgtcttggaatacctgcaagaagagcctcccatccctgtggtgatttgtgatggcagcggacgtgcctcggacatcctgtcctttgcgcacaagtactgtgaagaaggcggaataataaatgagtccctcagggagcagcttctagttaccattcagaaaacatttaattataataaggcacaatcacatcagctgtttgcaattataatggagtgcatgaagaagaaagaactcgtcactgtgttcagaatgggttctgagggccagcaggacatcgagatggcaattttaactgccctgctgaaaggaacaaacgtatctgctccagatcagctgagcttggcactggcttggaaccgcgtggacatagcacgaagccagatctttgtctttgggccccactggccgcccctgggaagcctggcacccccgacggacagcaaagccacggagaaggagaagaagccacccatggccaccaccaagggaggaagaggaaaagggaaaggcaagaagaaagggaaagtgaaagaggaagtggaggaagaaactgacccccggaagatagagctgctgaactgggtgaatgctttggagcaagcgatgctagatgctttagtcttagatcgtgtcgactttgtgaagctcctgattgaaaacggagtgaacatgcaacactttctgaccattccgaggctggaggagctttataacacaagactgggtccaccaaacacacttcatctgctggtgagggatgtgaaaaagagcaaccttccgcctgattaccacatcagcctcatagacatcgggctcgtgctggagtacctcatgggaggagcctaccgctgcaactacactcggaaaaactttcggaccctttacaacaacttgtttggaccaaagaggcctaaagctcttaaacttctgggaatggaagatgatgagcctccagctaaagggaagaaaaagaaaaagaagaaaaaggaggaagagatcgacattgatgtggacgaccctgccgtgagtcggttccagtatcccttccacgagctgatggtgtgggcagtgctgatgaaacgccagaaaatggcagtgttcctctggcagcgaggggaagagagcatggccaaggccctggtggcctgcaagctctacaaggccatggcccacgagtcctccgagagtgatctggtggatgacatctcccaggacttggataacaattccaaagacttcggccagcttgctttggagttattagaccagtcctataagcatgacgagcagatcgctatgaaactcctgacctacgagctgaaaaactggagcaactcgacctgcctcaaactggccgtggcagccaaacaccgggacttcattgctcacacctgcagccagatgctgctgaccgatatgtggatgggaagactgcggatgcggaagaaccccggcctgaaggttatcatggggattcttctaccccccaccatcttgtttttggaatttcgcacatatgatgatttctcgtatcaaacatccaaggaaaatgaggatggcaaagaaaaagaagaggaaaatacggatgcaaatgcagatgctggctcaagaaagggggatgaggagaacgagcacaaaaaacagagaagtattcccatcggaacaaagatctgtgaattctataacgcgcccattgtcaagttctggttttacacaatatcatacttgggctacctgctgctgtttaactacgtcatcctggtgcggatggatggctggccgtccctccaggagtggatcgtcatctcctacatcgtgagcctggcgttagagaagatacgagagatcctcatgtcagaaccaggcaaactcagccagaaaatcaaagtttggcttcaggagtactggaacatcacagatctcgtggccatttccacattcatgattggagcaattcttcgcctacagaaccagccctacatgggctatggccgggtgatctactgtgtggatatcatcttctggtacatccgtgtcctggacatctttggtgtcaacaagtatctggggccatacgtgatgatgattggaaagatgatgatcgacatgctgtactttgtggtcatcatgctggtcgtgctcatgagtttcggagtagcccgtcaagccattctgcatccagaggagaagccctcttggaaactggcccgaaacatcttctacatgccctactggatgatctatggagaggtgtttgcagaccagatagacctctacgccatggaaattaatcctccttgtggtgagaacctatatgatgaggagggcaagcggcttcctccctgtatccccggcgcctggctcactccagcactcatggcgtgctatctactggtcgccaacatcctgctggtgaacctgctgattgctgtgttcaacaataccttctttgaagtaaaatcaatatccaaccaggtgtggaagttccagcgatatcagctgattatgacatttcatgacaggccagtcctgcccccaccgatgatcattttaagccacatctacatcatcattatgcgtctcagcggccgctgcaggaaaaagagagaaggggaccaagaggaacgggatcgtggattgaagctcttccttagcgacgaggagctaaagaggctgcatgagttcgaggagcagtgcgtgcaggagcacttccgggagaaggaggatgagcagcagtcgtccagcgacgagcgcatccgggtcacttctgaaagagttgaaaatatgtcaatgaggttggaagaaatcaatgaaagagaaacttttatgaaaacttccctgcagactgttgaccttcgacttgctcagctagaagaattatctaacagaatggtgaatgctcttgaaaatcttgcgggaatcgacaggtctgacctgatccaggcacggtcccgggcttcttctgaatgtgaggcaacgtatcttctccggcaaagcagcatcaatagcgctgatggctacagcttgtatcgatatcattttaacggagaagagttattatttgaggatacatctctctccacgtcaccagggacaggagtcaggaaaaaaacctgttccttccgtataaaggaagagaaggacgtgaaaacgcacctagtcccagaatgtcagaacagtcttcacctttcactgggcacaagcacatcagcaaccccagatggcagtcaccttgcagtagatgacttaaagaacgctgaagagtcaaaattaggtccagatattgggatttcaaaggaagatgatgaaagacagacagactctaaaaaagaagaaactatttccccaagtttaaataaaacagatgtgatacatggacaggacaaatcagatgttcaaaacactcagctaacagtggaaacgacaaatatagaaggcactatttcctatcccctggaagaaaccaaaattacacgctatttccccgatgaaacgatcaatgcttgtaaaacaatgaagtccagaagcttcgtctattcccggggaagaaagctggtcggtggggttaaccaggatgtagagtacagttcaatcacggaccagcaattgacgacggaatggcaatgccaagttcaaaagatcacgcgctctcatagcacagatattccttacattgtgtcggaagctgcagtgcaagctgagcataaagagcagtttgcagatatgcaagatgaacaccatgtcgctgaagcaattcctcgaatccctcgcttgtccctaaccattactgacagaaatgggatggaaaacttactgtctgtgaagccagatcaaactttgggattcccatctctcaggtcaaaaagtttacatggacatcctaggaatgtgaaatccattcagggaaagttagacagatctggacatgccagtagtgtaagcagcttagtaattgtgtctggaatgacagcagaagaaaaaaaggttaagaaagagaaagcttccacagaaactgaatgctagtctgttttgtttctttaatttttttttttaacagtcagaaccactaatgggtgtcatcttggccatctaaacatcatcaatttctaaaaacattttccttaaaaaattttggaaattcagacttgatttacaatttaatgcactaaaagtagtattttgttagcatatgttagtaggcttagttttttcagttgcagtagtatcaaatgaaagtgatgatactgtaacgaagataaattggctaatcagtatacaagattatacaatctctttattactgagggccaccaaatagcctaggaagtgccctcgagcactgaagtcaccattaggtcacttaagaagtaagcaactagctgggcacagtggctcatgcctgtaatcctagcactttgggaggccaaggcagaaagatagcttgagtccaggagtttgagaccagcctgggcaacatagtgataccccatctcttaaaaaaaaaaaaaaaa

SEQ ID NO: 1020 - protein, 1603 aa, Homo sapiens
MKDSNRCCCGQFTNQHIPPLPSATPSKNEEESKQVETQPEKWSVAKHTQSYPTDSYGVLEFQGGGYSNKAMYIRVSYDTKPDSLLHLMVKDWQLELPKLLISVHGGLQNFEMQPKLKQVFGKGLIKAAMTTGAWIFTGGVSTGVISHVGDALKDHSSKSRGRVCAIGIAPWGIVENKEDLVGKDVTRVYQTMSNPLSKLSVLNNSHTHFILADNGTLGKYGAEVKLRRLLEKHISLQKINTRLGQGVPLVGLVVEGGPNVVSIVLEYLQEEPPIPVVICDGSGRASDILSFAHKYCEEGGIINESLREQLLVTIQKTFNYNKAQSHQLFAIIMECMKKKELVTVFRMGSEGQQDIEMAILTALLKGTNVSAPDQLSLALAWNRVDIARSQIFVFGPHWPPLGSLAPPTDSKATEKEKKPPMATTKGGRGKGKGKKKGKVKEEVEEETDPRKIELLNWVNALEQAMLDALVLDRVDFVKLLIENGVNMQHFLTIPRLEELYNTRLGPPNTLHLLVRDVKKSNLPPDYHISLIDIGLVLEYLMGGAYRCNYTRKNFRTLYNNLFGPKRPKALKLLGMEDDEPPAKGKKKKKKKKEEEIDIDVDDPAVSRFQYPFHELMVWAVLMKRQKMAVFLWQRGEESMAKALVACKLYKAMAHESSESDLVDDISQDLDNNSKDFGQLALELLDQSYKHDEQIAMKLLTYELKNWSNSTCLKLAVAAKHRDFIAHTCSQMLLTDMWMGRLRMRKNPGLKVIMGILLPPTILFLEFRTYDDFSYQTSKENEDGKEKEEENTDANADAGSRKGDEENEHKKQRSIPIGTKICEFYNAPIVKFWFYTISYLGYLLLFNYVILVRMDGWPSLQEWIVISYIVSLALEKIREILMSEPGKLSQKIKVWLQEYWNITDLVAISTFMIGAILRLQNQPYMGYGRVIYCVDIIFWYIRVLDIFGVNKYLGPYVMMIGKMMIDMLYFVVIMLVVLMSFGVARQAILHPEEKPSWKLARNIFYMPYWMIYGEVFADQIDLYAMEINPPCGENLYDEEGKRLPPCIPGAWLTPALMACYLLVANILLVNLLIAVFNNTFFEVKSISNQVWKFQRYQLIMTFHDRPVLPPPMIILSHIYIIIMRLSGRCRKKREGDQEERDRGLKLFLSDEELKRLHEFEEQCVQEHFREKEDEQQSSSDERIRVTSERVENMSMRLEEINERETFMKTSLQTVDLRLAQLEELSNRMVNALENLAGIDRSDLIQARSRASSECEATYLLRQSSINSADGYSLYRYHFNGEELLFEDTSLSTSPGTGVRKKTCSFRIKEEKDVKTHLVPECQNSLHLSLGTSTSATPDGSHLAVDDLKNAEESKLGPDIGISKEDDERQTDSKKEETISPSLNKTDVIHGQDKSDVQNTQLTVETTNIEGTISYPLEETKITRYFPDETINACKTMKSRSFVYSRGRKLVGGVNQDVEYSSITDQQLTTEWQCQVQKITRSHSTDIPYIVSEAAVQAEHKEQFADMQDEHHVAEAIPRIPRLSLTITDRNGMENLLSVKPDQTLGFPSLRSKSLHGHPRNVKSIQGKLDRSGHASSVSSLVIVSGMTAEEKKVKKEKASTETEC

SEQ ID NO: 1021 - DNA, 1023 bp, Homo sapiens
aagaaggatgagcaggctctctgccatctgcccaccaacttttcaagttacttttacccaccttcaaaattacatctgcttttagcaagaattactgatgtgataaagatgggagtgttcaccatgcaagggcaggggatcccctgctgctccaccatcagatttgggacaccaccccccccccggccccaccagagggcatcagctatgcctagaaggggaccacaacagactcgacaggatccaccggttgggcccaaggcaggaggaagggcggcgcccccaaactcccaggacgcctgcagcaccccccacgcgccgctctccgcctctggggagcatcctgccaccccccgacacacacaccccggctacatcccgccttctcacgcttggtcaggcgctctggagatgtcggagatccaggcttttcctaaagagtcaggattggaaggcggactcccaccgtttgctgagctccacatgacaacagcagacgacaggccgcactgatcccacctggcttacaggtgctgtcacacaggtacgccttcttgtgaatcatcagtcaccatttgcccctcgcagcaaccctgtcttggaggaaggtccttgccgacacccgcctctccccacccttaggctcccttgctccttcattcaaccattgtttacatgtcgttcaggactgctgactaaacactttcaagcacagtggacccttgaacaacgcaggttcaaactgtgcaggtccacccacagggatgtttttcaatcagagttataccaagtgtccctgcctctcctgcctcccttcccacttcctccatgtcttcctctctgccaccctgaggcagcaagaccagcccctcctcctcagccactcaacatgaagacaacgaggatgaagacttctatgataatccacttccacttagtaaatgctttctcttatgatattcttaatgacattttattttcccaagcttagtttattgtaagaatacagtataaatacacata

SEQ ID NO: 1022 - protein, 134 aa, Homo sapiens
MGVFTMQGQGIPCCSTIRFGTPPPPRPHQRASAMPRRGPQQTRQDPPVGPKAGGRAAPPNSQDACSTPHAPLSASGEHPATPRHTHPGYIPPSHAWSGALEMSEIQAFPKESGLEGGLPPFAELHMTTADDRPH

SEQ ID NO: 1023 - DNA, 3414 bp, Homo sapiens
agcagtttgtgcaaccagaggagcgcaggcagggttccctgctggggcccgggctgcccagccatgctttgggcactctggccaaggtggctggcagacaagatgctgcccctcctgggggcagtgctgcttcagaagagagagaagaggggccctctgtggaggcactggcggcgggaaacctacccatactatgacctccaggtgaaggtgctgagggccacaaacatccggggcacagacctgctgtccaaagccgactgctatgtgcaactgtggctgcccacggcgtccccaagccctgcccagactaggatagtggccaactgcagtgaccccgagtggaatgagaccttccactaccagatccatggtgctgtgaagaacgtcctggagctcaccctctatgacaaggacatcctgggcagcgaccagctctctctgctcctgtttgacctgagaagcctcaagtgtggccaacctcacaaacacaccttcccactcaaccaccaggattcacaagagctgcaggtggaatttgttctggagaagagccaggtgcctgcatctgaagtcatcaccaacggggttctggtggctcacccctgtctgagaatccagggcacgctccggggagatgggacagccccacgggaagagtacggctctaggcagctccagctggcagtgcctggagcctacgagaagccacagctcttgcccctgcagcctcccacagagccaggcctcccacccacctttaccttccacgtgaacccagtgctgagctccaggctacacgtggagctgatggagctgctggcagctgtgcagagtggccccagcgcagagttggaggctcagaccagcaagctgggcgaggggggcatcctgctctcctctctgcccctaggccaggaggaacagtgttctgtggccctgggggagggccaggaggtggctctgagcatgaaggtggaaatgagctccggggacctagacctacgccttggctttgacctctctgacggggagcaggagtttctggacaggaggaagcaggtcgtgtccaaggccctgcagcaagtgctgggattgagtgaggctctggacagtggccaggtgcctgtagtggctgtgttgggttccgggggtggaacccgagccatgtcttctctgtacggcagcctggcagggttgcaggagctcggccttctagacactgtgacctacctgagtggggtctctgggtctacctggtgcatctccacactctacagggacccagcctggtcccaggtggccttgcagggccccattgagcgtgcccaggttcacgtctgcagcagtaagatgggagctttgtccacggagcggctacagtactacactcaggaactgggggtccgggagcgcagtggccacagcgtgtccctcatcgacctctggggcctccttgttgagtatctcctgtaccaggaggagaaccctgccaagctgtctgaccaacaggaggcggtccgccagggtcagaacccttaccccatttacaccagtgtcaacgtccgcaccaacttgagtggggaagattttgcagagtggtgcgagttcacgccctatgaggttggcttccccaagtacggggcttatgttcccaccgagctcttcggctcagaactcttcatgggacgattgctgcagctccagcctgaaccccggatctgttacctgcaaggtatgtggggcagcgcctttgccaccagcctggatgagatcttcctaaagaccgccggctcgggcctcagcttcctggagtggtacagaggcagtgtgaatatcacagacgactgccagaagcctcagctgcacaacccctcgaggctgcgaacgaggctcctcaccccacaggggcccttctcccaggctgtgctggacatattcacctcccgcttcacttccgcccagagctttaacttcacccggggtctctgcttgcacaaggactatgtggctggcagggagttcgtggcctggaaagacacacacccggacgccttccccaaccagctcacccccatgcgggactgcctgtacctggtggacggaggctttgccatcaactctccgttcccactggctctgctgcctcagagagcagtggacctcattctgtcctttgactattccttggaagccccttttgaggtcttgaagatgacagagaagtactgcctggaccgaggaatccccttccctagcatcgaggtgggccctgaggacgtggaggaggcccgtgagtgctatctgtttgccaaggctgaggacccccgctcccccattgtgctgcacttccccctggttaaccgtaccttccgcacacacctggccccaggtgtggagcgacaaacagctgaggagaaggcctttggggactttgtcatcaacaggccagacaccccctatggcatgatgaacttcacctatgagccccaggacttttatcggctggtggccctcagtcgatacaacgtcctgaacaacgtggagaccttgaagtgcgccctccagctggctctggaccggcaccaggctcgggagagggcaggggcctgaccaaggcaggaagcggaggactgtgacagagaggagacacactgctcatggtcagggcttgtagagggaggagcgatggggactctgtgcaggatctgcttcccttctctccaggacctgcctcgaggtgccccaggccccggaaagctcttgcagaattgcagcttggactggggcagggctctccttgtgtgtttttggagaagatgggcagtagatcgctccagggactcttggggatgtagggcagaagagaacagcactcatttcacagcggggtgtggagagaatcaggtgagccacagagcccaccccagacacagaaggacctcagagggcccaagtcctcagacccacacagaacaggggctgagggcactgagaagccagctgtcctccttacactgagatggaaagcagagatgcatccatccacacttcctgcagagcggcccaagccccaaccccacctcgagctcctggatgcactgctatcaagaacaatgaggggctgaggggatggccagcctatgttgctgactccatcatcctaaccctccttctgccttctggtctcctcgtgcctcctcccagatcacccttctcttcccagcgccctaaagcctgtggggtgatgtcccattctggctgctccaggtgggagatgtgcgcgtgtctccctgccagttacccaggcttcactcttcgaacctggaccacagtctctggtgatgtgtgtagtggccacatcatgcaaatatagtctcaccattcctaggagctaaaaaaaaaaaaaaaaaa

SEQ ID NO: 1024 - protein, 849 aa, Homo sapiens
MLWALWPRWLADKMLPLLGAVLLQKREKRGPLWRHWRRETYPYYDLQVKVLRATNIRGTDLLSKADCYVQLWLPTASPSPAQTRIVANCSDPEWNETFHYQIHGAVKNVLELTLYDKDILGSDQLSLLLFDLRSLKCGQPHKHTFPLNHQDSQELQVEFVLEKSQVPASEVITNGVLVAHPCLRIQGTLRGDGTAPREEYGSRQLQLAVPGAYEKPQLLPLQPPTEPGLPPTFTFHVNPVLSSRLHVELMELLAAVQSGPSAELEAQTSKLGEGGILLSSLPLGQEEQCSVALGEGQEVALSMKVEMSSGDLDLRLGFDLSDGEQEFLDRRKQVVSKALQQVLGLSEALDSGQVPVVAVLGSGGGTRAMSSLYGSLAGLQELGLLDTVTYLSGVSGSTWCISTLYRDPAWSQVALQGPIERAQVHVCSSKMGALSTERLQYYTQELGVRERSGHSVSLIDLWGLLVEYLLYQEENPAKLSDQQEAVRQGQNPYPIYTSVNVRTNLSGEDFAEWCEFTPYEVGFPKYGAYVPTELFGSELFMGRLLQLQPEPRICYLQGMWGSAFATSLDEIFLKTAGSGLSFLEWYRGSVNITDDCQKPQLHNPSRLRTRLLTPQGPFSQAVLDIFTSRFTSAQSFNFTRGLCLHKDYVAGREFVAWKDTHPDAFPNQLTPMRDCLYLVDGGFAINSPFPLALLPQRAVDLILSFDYSLEAPFEVLKMTEKYCLDRGIPFPSIEVGPEDVEEARECYLFAKAEDPRSPIVLHFPLVNRTFRTHLAPGVERQTAEEKAFGDFVINRPDTPYGMMNFTYEPQDFYRLVALSRYNVLNNVETLKCALQLALDRHQARERAGA

SEQ ID NO: 1025 - DNA, 4851 bp, Homo sapiens
ggggttgacgatggctgtgttgttgaagggcctgtagccggggggttcctggccggatcccggtctacccttagcccagactcgttccggaccccagcccggcccggaacactctgggcgagacggcggtggcaactctccccttgccgccatgcacgacgctttcgagccagtgccgatcctagaaaagctgcctctgcaaatcgactgtctggctgcctgggaggaatggcttcttgtgggaaccaaacaaggacatcttcttctctataggattcggaaggacgttggttgcaacagatttgaagtgacactagagaaatccaataagaacttctccaaaaagattcagcagatccatgtggtttcccagtttaagattctggtcagcttgttagaaaataacatttatgtccatgacctattgacatttcaacaaatcactacggtttcaaaggcaaagggagcatcactgtttacttgtgacctccagcacacagagaccggtgaggaggtgttacggatgtgtgtggcagtaaaaaagaagctgcagctctatttctggaaggacagggaatttcatgaattgcagggggactttagtgtgccagatgtgcccaagtccatggcgtggtgtgaaaattctatctgtgtgggtttcaagagagactactacctaataagggtggatggaaaggggtccatcaaagagctctttccaacaggaaaacagctggagcccttagttgcacctctggcagatggaaaagtggctgtgggccaggatgatctcaccgtggtactcaatgaggaagggatctgcacacagaaatgtgccctgaactggacggacataccagtggccatggagcaccagcctccctacatcattgcagtgttgcctcgatatgttgagatccgaacatttgaaccgaggcttctggtccaaagcattgaattgcaaaggccccgtttcattacctcaggaggatcaaacattatctatgtggccagcaatcattttgtttggagactcatccctgtccccatggcaacccaaatccaacaacttctccaggacaagcagtttgaattggctctgcagctcgcagaaatgaaagatgattctgacagtgaaaagcagcaacaaattcatcacatcaagaacttgtatgccttcaacctcttctgccagaagcgttttgatgagtccatgcaggtctttgctaaacttggcacagatcccacccatgtgatgggcctgtaccctgacctgctgcccacagactacagaaagcagttgcagtatcccaacccattgcctgtgctctccggggctgaattggagaaggctcacttagctctgattgactacctgacacagaaacgaagtcaattggtaaagaagctgaatgactctgatcaccagtcaagcacctcaccgctcatggaaggcactcccaccatcaaatccaagaagaagctgctacaaatcatcgacaccaccctgctcaagtgctatctccatacaaatgtggccctggtggcccccttgctacgcctggagaacaatcactgccacatcgaggagagcgagcacgtgctaaagaaggctcacaagtacagtgagcttatcatcctgtatgagaagaaggggctccacgagaaagctctgcaggtgctcgtggaccagtccaagaaagccaactcccctctgaaaggccacgagaggacagtgcagtatctgcagcatctgggcacagaaaacctgcatttgattttctcctactcagtgtgggtgctgagagacttcccagaagatggcctgaagatatttactgaagatctcccggaagtggagtctctgccacgtgatcgagtcctcggcttcttaatagagaattttaagggtctggctattccttatctggaacacatcatccatgtttgggaggagacaggctctcggttccacaactgcctgatccagctatactgtgagaaggtgcaaggtctgatgaaggagtatctcctgtccttccctgcaggcaaaaccccagtcccagctggagaggaagagggtgagctgggagaataccggcaaaagctcctcatgttcttggagatttccagctactatgatccaggccggctcatctgtgattttccctttgatggcctcttagaagaacgagctctcctgttggggcgcatggggaaacatgaacaagctcttttcatttatgtccacatcttgaaggatacaaggatggctgaggagtactgccacaaacactatgaccgaaacaaagatggcaacaaagatgtgtatctgtccctgcttcggatgtacctgtcgccccccagcattcactgcctggggccaatcaagctggaactactggagccaaaagccaacctccaggccgctctgcaggtcctcgagctacaccacagcaaactggacaccaccaaggccctcaaccttctgccagcaaacactcagatcaatgacatacgcatcttcctggaaaaggtcttggaagaaaatgcacaaaagaaacggttcaatcaagtgctcaagaaccttctccatgcagaattcctgagggtccaggaagagcggattttacaccagcaggtgaagtgcatcatcacagaggagaaggtgtgcatggtgtgtaagaagaagattgggaacagtgcatttgcaagataccccaatggagtggtcgtccattacttctgttccaaagaggtaaacccagctgacacttgagcccagcatcctggggatccagcggatggacagcttggctctcccagagaggtgaaggagcacctggccttaggaatcctggctgccaccaccacaaggctccccatttggacattactggctatcttgtgccctggaacaactctgaattaattagactcatggtctggcattgccagctttttaatgggaaaagagattagttataccttataccattatgttgtgggcaattccagagaattcagtacctgcttggtcaggaggatgtgcaccatcttgcctttgcacaccagtcacctgaacaaggaaacttgtcacaagtgtttgtaaccatggggttgttcatcaagggcttttctattaagtacatgacttcacaaggaccgctcagcatggctcactggagagttccatgagagaacagcactcaagcttctggccgcatggacccgatggctcgcattctgtgtagtgttttacgtctccatggtaactgtgccctgcacccctcggtagccgccctgttagttttcagtctccttttctttctcaccatttatcacttccctcactgccctacccaggctttctctcccacttccctgactctgggaataactaatatttaagcaaggtaagatgagaagcaaggggtctcagttctaggaatacagtgctagttgattgtcaggtatgttgtaaatagaccctctttggccatacactccatgcctagatgcctcggagagcatcattctctgcctaggcaaggccctgcatcccttgcctcaggccgggctgagtgtgactgcagctcctgaggatgggcctgccctgtctggggtatgcgtgatccctagatacatgttcccacagaggtgcctgctccgtcttcgctcaccagacactcaggcaggctggcttagtctttgtgcgtggcgattttgtgctctgggccctttctctttttccagccagtttccattcacttgccttacagcctgccctggccgtcactccccagctttgttcagcaatggtgtggttggagagttgtgctgggatagcgcaggaaggtgggtcccggcaacacgcaggggatgagtggacctggaactgacaatggcgtgctgccaagtgttcctgagaggtgtttaggcacagcagaggggacgcggggggcaagaacagcaggacgctggtttaaaaataactcaccgccaaacctgtggagcagtgtggggcatcctgccagaggtgcacaggctggagtttcaggcactgcaggctgatgacacacagggagagtggccctgcctcctgtcctccccggggtttttgcagactcgaagtctcactgcaccagtgtctttgatggtggtgagggtgggtgatggtgcccagcaccaacagttttagtggcctgtccttgacctgccgtggtcctttgtaaactatggctccatgctgtgtgacagatcaacgtgctgatggtaagtagactaggcttccccaggcatgccgtccgtgggggcctgaagagacagtgagtgccattggccccattcgcagatgtgggagactctgctcaggcctgtgaggctgggcagcccttcaccagagttcggaggagcagtgtgtggcgccacgtcccgactggccatacccacacagaagcagtgctgcccggggcctcatctgggccagcttggactctgcttcctccaggagcagcagggaagctctgggccacctccctggatagcaggaacttgacctgccatgtgtgccctgccttcctggccagctgtgcttgttatcttccattctcacaaactgtctttgaagcaatagaataaagaatgtgtgttttctttcctggtatacatacatgatcccatgctcccaagctccattcttccttccctcaactctctgccctccacagagctatggagaaggctggagatgaaagctttgtagtgaggactgataaagatctcatcactgctccttataataaacctaataaagcaagaaaccaagcctaaaaaaaaaaaaaaaaaaaa

SEQ ID NO: 1026 - protein, 875 aa, Homo sapiens
MHDAFEPVPILEKLPLQIDCLAAWEEWLLVGTKQGHLLLYRIRKDVGCNRFEVTLEKSNKNFSKKIQQIHVVSQFKILVSLLENNIYVHDLLTFQQITTVSKAKGASLFTCDLQHTETGEEVLRMCVAVKKKLQLYFWKDREFHELQGDFSVPDVPKSMAWCENSICVGFKRDYYLIRVDGKGSIKELFPTGKQLEPLVAPLADGKVAVGQDDLTVVLNEEGICTQKCALNWTDIPVAMEHQPPYIIAVLPRYVEIRTFEPRLLVQSIELQRPRFITSGGSNIIYVASNHFVWRLIPVPMATQIQQLLQDKQFELALQLAEMKDDSDSEKQQQIHHIKNLYAFNLFCQKRFDESMQVFAKLGTDPTHVMGLYPDLLPTDYRKQLQYPNPLPVLSGAELEKAHLALIDYLTQKRSQLVKKLNDSDHQSSTSPLMEGTPTIKSKKKLLQIIDTTLLKCYLHTNVALVAPLLRLENNHCHIEESEHVLKKAHKYSELIILYEKKGLHEKALQVLVDQSKKANSPLKGHERTVQYLQHLGTENLHLIFSYSVWVLRDFPEDGLKIFTEDLPEVESLPRDRVLGFLIENFKGLAIPYLEHIIHVWEETGSRFHNCLIQLYCEKVQGLMKEYLLSFPAGKTPVPAGEEEGELGEYRQKLLMFLEISSYYDPGRLICDFPFDGLLEERALLLGRMGKHEQALFIYVHILKDTRMAEEYCHKHYDRNKDGNKDVYLSLLRMYLSPPSIHCLGPIKLELLEPKANLQAALQVLELHHSKLDTTKALNLLPANTQINDIRIFLEKVLEENAQKKRFNQVLKNLLHAEFLRVQEERILHQQVKCIITEEKVCMVCKKKIGNSAFARYPNGVVVHYFCSKEVNPADT

SEQ ID NO: 1027 - DNA, 2261 bp, Homo sapiens
ggctgagggaaggaggaggataaggaggaggaacgaggccagcaggaggcaacggcagcgacggggccggggtgatggtgcaggtgcctggggtcggtgcggagctgccgggctgagggacgcctggtccagggtccgcagcgccgccgcgtcgctcccgggcgggcgggcgggaagatgctgagcaggttgatgagcggcagcagcaggagcctggagcgcgagtacagctgcaccgtgcggctgctggacgacagcgagtacacctgcaccatccagagagatgccaaaggccagtacctgtttgaccttctttgccaccatctgaacctacttgagaaagactattttggtatccgctttgtagacccagataagcagcggcattggctggaatttacaaagtctgtggtgaaacaattgagatcccagcctccattcaccatgtgcttccgtgtgaagttttatcctgcagaccctgctgctctgaaagaagaaataaccaggtatttagtcttcctgcagatcaaaagggatctctaccatggccgactcctctgtaaaacatcggatgctgccttgttagcagcttacatccttcaagcggagattggggattatgactcagggaaacaccctgaaggctacagctccaagttccagtttttccctaaacattcagagaagctggaaaggaaaattgctgagattcacaagacggaactgagtggtcaaacaccagcaacatcagagctgaacttcttaagaaaagcacagacattggaaacatatggagtggatcctcacccatgtaaggacgtgtcaggaaatgctgcatttctggccttcactccttttgggtttgttgttcttcaaggaaacaagagggtccacttcattaaatggaatgaggtgaccaagctgaaatttgaaggaaagactttctatttatacgtaagtcagaaagaggaaaagaaaattattcttacatattttgctccaactcctgaagcgtgtaagcacctctggaaatgtggaatcgagaaccaagccttctacaagctggagaagtcaagccaagtccgcacagtgtccagcagcaatttattctttaaagggagccggttccgatacagtggccgagttgcaaaggaagtcatggaatcaagtgctaagatcaaacgggagccaccggaaatacacagagcagggatggttcccagccggagctgtccctccataacccatggcccaaggctgagcagcgtccccaggacccgcagaagagctgttcacatctccatcatggaaggcctagagtccttacgggacagtgcccattccacaccagtgcgttccacttcccatggggacaccttcctgcctcacgtgagaagcagccggacagatagcaatgagcgagtagctgtgattgcagacgaggcctacagccctgcagacagcgtgctgcccacccctgtggctgagcacagcctggagctgatgttgctttcccggcagatcaatggagccacctgcagcattgaggaggagaaggaatctgaagccagcaccccaactgctacagaggtggaggcccttgggggagagctgagggccctgtgtcaggggcacagcgggcccgaggaggaacaggtgaataagtttgttctaagtgtcctccgtttgctccttgtgaccatgggactcctctttgttttgctcctcctcctgatcatccttaccgagtctgaccttgacattgcctttttccgtgatatccgccagacccccgagtttgaacaattccactatcaatacttttgtcccctcaggcgatggtttgcctgcaaaatccgctcagtggtgagcctgctcattgacacctgagaaggcatgactcctcccaaaaactagccaggtggaccaaggaacccggctacccattcccagcaatgggacccatcgcggaaccatcggcacatataccaagtcctcctctcatgactcaaagtccactgcagcctaggagggtgtttcccagaagaagaaagggataggctcatgccctgtctaaacaaactgggaaaactcattttcttcagaagttatttcaagaaaggctcagcgactctgtttctcatctttccaatttgcaggataatttttggttttgaattttgatttttcatagatgtatattattttgaagtatcaaataaaaataatttattttactattaaaaaaaaaaaaaaaaaaa

SEQ ID NO: 1028 - protein, 570 aa, Homo sapiens
MLSRLMSGSSRSLEREYSCTVRLLDDSEYTCTIQRDAKGQYLFDLLCHHLNLLEKDYFGIRFVDPDKQRHWLEFTKSVVKQLRSQPPFTMCFRVKFYPADPAALKEEITRYLVFLQIKRDLYHGRLLCKTSDAALLAAYILQAEIGDYDSGKHPEGYSSKFQFFPKHSEKLERKIAEIHKTELSGQTPATSELNFLRKAQTLETYGVDPHPCKDVSGNAAFLAFTPFGFVVLQGNKRVHFIKWNEVTKLKFEGKTFYLYVSQKEEKKIILTYFAPTPEACKHLWKCGIENQAFYKLEKSSQVRTVSSSNLFFKGSRFRYSGRVAKEVMESSAKIKREPPEIHRAGMVPSRSCPSITHGPRLSSVPRTRRRAVHISIMEGLESLRDSAHSTPVRSTSHGDTFLPHVRSSRTDSNERVAVIADEAYSPADSVLPTPVAEHSLELMLLSRQINGATCSIEEEKESEASTPTATEVEALGGELRALCQGHSGPEEEQVNKFVLSVLRLLLVTMGLLFVLLLLLIILTESDLDIAFFRDIRQTPEFEQFHYQYFCPLRRWFACKIRSVVSLLIDT

SEQ ID NO: 1029 - DNA, 4011 bp, Homo sapiens
ccgtgaggtgttgggtttgggggacgctggcagctgggttctcccggttcccttgggcaggtgcagggtcgggttcaaagcctccggaacgcgttttggcctgatttgaggaggggggcggggagggacctgcggcttgcggccccgcccccttctccggctcgcagccgaccggtaagcccgcctcctccctcggccggccctggggccgtgtccgccgggcaactccagccgaggcctgggcttctgcctgcaggtgtctgcggcgaggcccctagggtacagcccgatttggccccatggtgggtttcggggccaaccggcgggctggccgcctgccctctctcgtgctggtggtgctgctggtggtgatcgtcgtcctcgccttcaactactggagcatctcctcccgccacgtcctgcttcaggaggaggtggccgagctgcagggccaggtccagcgcaccgaagtggcccgcgggcggctggaaaagcgcaattcggacctcttgctgttggtggacacgcacaagaaacagatcgaccagaaggaggccgactacggccgcctcagcagccggctgcaggccagagagggcctcgggaagagatgcgaggatgacaaggttaaactacagaacaacatatcgtatcagatggcagacatacatcatttaaaggagcaacttgctgagcttcgtcaggaatttcttcgacaagaagaccagcttcaggactataggaagaacaatacttaccttgtgaagaggttagaatatgaaagttttcagtgtggacagcagatgaaggaattgagagcacagcatgaagaaaatattaaaaagttagcagaccagtttttagaggaacaaaagcaagagacccaaaagattcaatcaaatgatggaaaggaattggatataaacaatcaagtagtacctaaaaatattccaaaagtagctgagaatgttgcagataagaatgaagaaccctcaagcaatcatattccacatgggaaagaacaaatcaaaagaggtggtgatgcagggatgcctggaatagaagagaatgacctagcaaaagttgatgatcttccccctgctttaaggaagcctcctatttcagtttctcaacatgaaagtcatcaagcaatctcccatcttccaactggacaacctctctccccaaatatgcctccagattcacacataaaccacaatggaaaccccggtacttcaaaacagaatccttccagtcctcttcagcgtttaattccaggctcaaacttggacagtgaacccagaattcaaacagatatactaaagcaggctaccaaggacagagtcagtgatttccataaattgaagcaaagccgattctttgatgaaaatgaatcccctgttgatccgcagcatggctctaaactggcggattataatggggatgatggtaacgtaggtgagtatgaggcagacaagcaggctgagctggcttacaatgaggaagaagatggtgatggtggagaggaagacgtccaagatgatgaagaacgagagcttcaaatggatcctgcagactatggaaagcaacatttcaatgatgtcctttaagtcctaaaggaatgcttcagaaaacctaaagtgctgtaaaatgaaatcattctactttgtcctttctgacttttgttgtaaagacgaattgtatcagttgtaaagatacattgagatagaattaaggaaaaactttaatgaaggaatgtacccatgtacatatgtgaactttttcatattgtattatcaaggtatagacttttttggttatgatacagttaagccaaaaacagctaatctttgcatctaaagcaaactaatgtatatttcacattttattgagccgacttatttccacaaatagataaacaggacaaaatagttgtacaggttatatgtggcatagcataaccacagtaagaacagaacagatattcagcagaaaactttttatactctaattctttttttttttttttttgagacagagttttagtcttgtttcccaggctggagtgcaatggcacaatcttggctcactgcaacctccgcctcctgggttcaggcaattttcctgcctcagcctcccaagtagctgggattacaggcacccaccaccatgcccagctaatttttgtatttttaatagagagctaataattgtatatttaataaagacgggtttcaccatgttggccaggctggtcttgaactcctgacctcaggtgatcctcctgcattggcctcccaaagtgctggaattccaggcatgagccactgcgcccagtctacacactaattcttgttagcccaacagctgttctgttctatctacccctcatttcacgctcaaggagtcatacctagaatagttacacacaagagggaaactggaagccaaacactgtacagtattgtgtagaaagtcacctccctactccttttattttacatgagtgctgatgtgttttggcagatgagctttcagctgaggcctgatggaaattgagataacctgcaaagacataacagtatttatgagttatatcttagttcttgaaattgtggaatgcatgattgacaatatatttttaatttttattttttcaagtaataccagtactgtttaactatagccagaactggctaaaatttttatattttcagagttgaagttggtgaagacattcatgatttaaacaccagatcctgaaaggggttaaatctactttgaaatgaatctgcaatcagtatttcaaagcttttctggtaattttagtgatcttatttgattagactttttcagaagtactaaataaggaattttaacaggtttttattaatgcacagataaatagaagtacagtgaggtctatagccattttattaaaatagcttaaaagtttgtaaaaaaatgaatctttgtaattacttaatatgttagttaagaacccgtcaagcttatatttgctagacttacaaattattttaaatgcatttatcttttttgacactattcagtggaatgtgtaagctagctaattcttgttttctgatttaaagcacttttaaatcttatcctgccccctaaaaacaaaaggttttgatcacaaggggaaatttaagattgttaaccctgtttttcagaagggctactgttaattgcacataaacatgaaatgtgttttcccctgtgtactaacacattctaggcaaaattcaaacttatagtggtaaagaaacaggttgttcacttgctgaggtgcaaaaattcttaagacttctgtttgaaattgctcaatgactaggaaaagatgtagtagtttactaaaattgtttttctaccatatcaaattaaacaattcatgcctttatagggtcaggcctacaatgaataggtatggtggtttcacagaattttaaaatagagttaaagggaagtgatgtacatttcgggggcattagggtagggagatgaatcaaaaaatacccctagtaatgctttatattttaatactgcaaaagctttacaaatggaaaccatgcaattacctgccttagttcttttgtcataaaaacaatcacttggttggttgtattgtagctattacttatacagcaacatttcttcaattagcagtctagacattttataaacagaaatcttggaccaattgataatatttctgactgtattaatattttagtgctataaaatactatgtgaatctcttaaaaatctgacattttacagtctgtattagacatactgtttttataatgttttacttctgccttaagatttaggttttttaaatgtatttttgccctgaattaagtgttaatttgatggaaactctgcttttaaaatcatcatttactgggttctaataaattaaaaattaaacttgaaaaaaaaaaaaaaaaaaaaaaaaaaaaaaaaaaaaaaaaaaaaaaaaaa

SEQ ID NO: 1030 - protein, 436 aa, Homo sapiens [sequence omitted]

SEQ ID NO: 1031 - DNA, 3843 bp, Homo sapiens
ccgtgaggtgttgggtttgggggacgctggcagctgggttctcccggttcccttgggcaggtgcagggtcgggttcaaagcctccggaacgcgttttggcctgatttgaggaggggggcggggagggacctgcggcttgcggccccgcccccttctccggctcgcagccgaccggtaagcccgcctcctccctcggccggccctggggccgtgtccgccgggcaactccagccgaggcctgggcttctgcctgcaggtgtctgcggcgaggcccctagggtacagcccgatttggccccatggtgggtttcggggccaaccggcgggctggccgcctgccctctctcgtgctggtggtgctgctggtggtgatcgtcgtcctcgccttcaactactggagcatctcctcccgccacgtcctgcttcaggaggaggtggccgagctgcagggccaggtccagcgcaccgaagtggcccgcgggcggctggaaaagcgcaattcggacctcttgctgttggtggacacgcacaagaaacagatcgaccagaaggaggccgactacggccgcctcagcagccggctgcaggccagagagggcctcgggaagagatgcgaggatgacaaggttaaactacagaacaacatatcgtatcagatggcagacatacatcatttaaaggagcaacttgctgagcttcgtcaggaatttcttcgacaagaagaccagcttcaggactataggaagaacaatacttaccttgtgaagaggttagaatatgaaagttttcagtgtggacagcagatgaaggaattgagagcacagcatgaagaaaatattaaaaagttagcagaccagtttttagaggaacaaaagcaagagacccaaaagattcaatcaaatgatggaaaggaattggatataaacaatcaagtagtacctaaaaatattccaaaagtagctgagaatgttgcagataagaatgaagaaccctcaagcaatcatattccacatgggaaagaacaaatcaaaagaggtggtgatgcagggatgcctggaatagaagagaatgacctagcaaaagttgatgatcttccccctgctttaaggaagcctcctatttcagtttctcaacatgaaagtcatcaagcaatctcccatcttccaactggacaacctctctccccaaatatgcctccagattcacacataaaccacaatggaaaccccggtacttcaaaacagaatccttccagtcctcttcagcgtttaattccaggctcaaacttggacagtgaacccagaattcaaacagatatactaaagcaggctaccaaggacagagtcagtgatttccataaattgaagcaaaatgatgaagaacgagagcttcaaatggatcctgcagactatggaaagcaacatttcaatgatgtcctttaagtcctaaaggaatgcttcagaaaacctaaagtgctgtaaaatgaaatcattctactttgtcctttctgacttttgttgtaaagacgaattgtatcagttgtaaagatacattgagatagaattaaggaaaaactttaatgaaggaatgtacccatgtacatatgtgaactttttcatattgtattatcaaggtatagacttttttggttatgatacagttaagccaaaaacagctaatctttgcatctaaagcaaactaatgtatatttcacattttattgagccgacttatttccacaaatagataaacaggacaaaatagttgtacaggttatatgtggcatagcataaccacagtaagaacagaacagatattcagcagaaaactttttatactctaattctttttttttttttttttgagacagagttttagtcttgtttcccaggctggagtgcaatggcacaatcttggctcactgcaacctccgcctcctgggttcaggcaattttcctgcctcagcctcccaagtagctgggattacaggcacccaccaccatgcccagctaatttttgtatttttaatagagagctaataattgtatatttaataaagacgggtttcaccatgttggccaggctggtcttgaactcctgacctcaggtgatcctcctgcattggcctcccaaagtgctggaattccaggcatgagccactgcgcccagtctacacactaattcttgttagcccaacagctgttctgttctatctacccctcatttcacgctcaaggagtcatacctagaatagttacacacaagagggaaactggaagccaaacactgtacagtattgtgtagaaagtcacctccctactccttttattttacatgagtgctgatgtgttttggcagatgagctttcagctgaggcctgatggaaattgagataacctgcaaagacataacagtatttatgagttatatcttagttcttgaaattgtggaatgcatgattgacaatatatttttaatttttattttttcaagtaataccagtactgtttaactatagccagaactggctaaaatttttatattttcagagttgaagttggtgaagacattcatgatttaaacaccagatcctgaaaggggttaaatctactttgaaatgaatctgcaatcagtatttcaaagcttttctggtaattttagtgatcttatttgattagactttttcagaagtactaaataaggaattttaacaggtttttattaatgcacagataaatagaagtacagtgaggtctatagccattttattaaaatagcttaaaagtttgtaaaaaaatgaatctttgtaattacttaatatgttagttaagaacccgtcaagcttatatttgctagacttacaaattattttaaatgcatttatcttttttgacactattcagtggaatgtgtaagctagctaattcttgttttctgatttaaagcacttttaaatcttatcctgccccctaaaaacaaaaggttttgatcacaaggggaaatttaagattgttaaccctgtttttcagaagggctactgttaattgcacataaacatgaaatgtgttttcccctgtgtactaacacattctaggcaaaattcaaacttatagtggtaaagaaacaggttgttcacttgctgaggtgcaaaaattcttaagacttctgtttgaaattgctcaatgactaggaaaagatgtagtagtttactaaaattgtttttctaccatatcaaattaaacaattcatgcctttatagggtcaggcctacaatgaataggtatggtggtttcacagaattttaaaatagagttaaagggaagtgatgtacatttcgggggcattagggtagggagatgaatcaaaaaatacccctagtaatgctttatattttaatactgcaaaagctttacaaatggaaaccatgcaattacctgccttagttcttttgtcataaaaacaatcacttggttggttgtattgtagctattacttatacagcaacatttcttcaattagcagtctagacattttataaacagaaatcttggaccaattgataatatttctgactgtattaatattttagtgctataaaatactatgtgaatctcttaaaaatctgacattttacagtctgtattagacatactgtttttataatgttttacttctgccttaagatttaggttttttaaatgtatttttgccctgaattaagtgttaatttgatggaaactctgcttttaaaatcatcatttactgggttctaataaattaaaaattaaacttgaaaaaaaaaaaaaaaaaaaaaaaaaaaaaaaaaaaaaaaaaaaaaaaaaa

SEQ ID NO: 1032 - protein, 380 aa, Homo sapiens
MVGFGANRRAGRLPSLVLVVLLVVIVVLAFNYWSISSRHVLLQEEVAELQGQVQRTEVARGRLEKRNSDLLLLVDTHKKQIDQKEADYGRLSSRLQAREGLGKRCEDDKVKLQNNISYQMADIHHLKEQLAELRQEFLRQEDQLQDYRKNNTYLVKRLEYESFQCGQQMKELRAQHEENIKKLADQFLEEQKQETQKIQSNDGKELDINNQVVPKNIPKVAENVADKNEEPSSNHIPHGKEQIKRGGDAGMPGIEENDLAKVDDLPPALRKPPISVSQHESHQAISHLPTGQPLSPNMPPDSHINHNGNPGTSKQNPSSPLQRLIPGSNLDSEPRIQTDILKQATKDRVSDFHKLKQNDEERELQMDPADYGKQHFNDVL

SEQ ID NO: 1033 - DNA, 4875 bp, Homo sapiens
cttaatcgacccagtactaaggccttgtgttcagtttttctccaggattcagactagagagtttcttccggcgtaaggaacttcaacgctcttcacggaagtaaaagtgtttttttggttgttgttgccgttgtggctgcccgcattccttccctcccacctcgcggaattgtggcgggagggggaggaggaagtcagggcgcctgcgcggagaggccgctttccatccgggtccctgtccgtgcggtgcagcaggtcggtaggcgggaaatggcgactggctgaaggagctggttctgttgctgctgcggggtaagcgggaaagacaccacacattgcgcagtcgggaccatcgccggagcctgaggacacttctctgtcgtcacagttagttttacatgtggcacccataaaagatgaggctgagaacacggaaagcttctcagcagtcaaatcaaatccaaacacaacgcactgccagagcaaagaggaaatattcagaggttgatgatagcctgccttcaggaggagaaaaaccatcgaagaatgaaaccggcttgttgtcttcaattaaaaaatttattaaaggaagcacacctaaggaagagagagaaaatccttcaaaacggagtagaattgaacgtgatatagataacaatttgatcacgtcaacaccaagagcaggagaaaaacctaacaaacagatatctcgagtaagacggaaaagtcaagtaaatggagaagctggtagttatgaaatgacaaatcaacatgtaaaacaaaatggaaaattagaagataatccttcctctggcagtcctccaaggactactttgttggggaccatattttcacctgtcttcaactttttttcaccagcaaataaaaatggaacgtcaggatcagattctccaggacaggctgtggaagctgaagaaatagtaaaacaacttgatatggaacaggtggatgagatcactaccagtactactacatcaactaatggagcagcttactcaaatcaagcagttcaagtgagaccatcactaaacaatggtttagaagaagcagaagaaacagttaatcgtgatatcccaccccttacagcaccagtaactccagatagtggttattcatcagcccacgcggaggccacctatgaagaagactgggaagtatttgacccctattatttcatcaaacatgtcccgccactgacagaagaacaactaaataggaaacctgctcttccgttgaaaacaagaagcacaccggaattctccctagttttagacttggatgaaacactagtgcattgtagtctaaatgagctagaagatgcagcacttacttttccagtccttttccaagatgtcatttatcaggtttatgtgagattaagaccatttttcagggaattcctggaacgaatgtctcagatgtatgagatcattctttttactgcttctaagaaggtgtatgcagacaagttactgaacatactagaccctaaaaagcaactggtcaggcaccggcttttccgtgaacattgtgtttgtgtacaaggaaactatataaaggacttaaatattcttggaagagatctttcaaaaactataataattgacaactcaccacaagcctttgcatatcagctttctaatggaatccctatagaaagttggtttatggataaaaatgacaatgaactcctaaaattgattccattcctggagaagcttgtagaactgaatgaagatgttcgaccacacatcagagacagatttcgcttgcatgatttgctgcccccagattaagtacaaagacttgtcaaatcactgaagggggagagaatgcaggacccttttggactaagacaaaaacattgccattactgttgaaattttgcatttttgtaccccgtcttgcttttcttatctttggtgcccaataataattaagggttacagaaagagactttatctatctcagatcgaatacatatagtaggtaggctaaaacagaagagtctttagaactagtgcaactccagtgaaattttttatgtacaggacatctgcagtttataaagaattctgtttctgccaccagcagtttgacctgtagtcacacaggattttatgataataacagagatgaaaatggacttttattttctctctgtttggtgctctaagtgggtttgtagccacttttctgttactttatgattctcatttcaacaggaatggccagtaaaagttgttttatttttcctgttaaggtttataacctttttacatttttgacctgtattagattagaatttcattatgcattccttttagttgaggcgcttcatagttttctggagatagtcaatttttagttttttattatacatttgaatggccgttttcctgctttgtctgcctgcacattgtatatttgtttaaaaatattctctacttttagtctatgtaagtttcatttagaaagacatgcatttatattttgtttctgtaatattctactgtaggtgaaatcttttcaaaaatcaagagactgggtagataagaatatatgaatgactaatatacaaaagatttaaaccattgtgatggcgtatattctcaaatggtaatatcttgcaatggcacacagatttaatggataaaggtatacctcagacttcactgtgctcacaaatctttgaggagaaagtttggtcacctgtttggcttgatttagttactgctgcctttggttttctccaggaatgaagtattcagcacagtgactcagtatttttagttattttgcatgggctggtagtacctctgttatgctctcagttacaatcaatttaaaactgtataacagtcttggtacctaacagtagctatgcataatcctgtggcacagtacactcccaagccaccaatgcagttaatatgctctcatagtggtttttctatgctatatgaaaatagtcttcaagccttggttctctaatgcagctaccacaagaggttgatatttttatagtggcgtgtaatctccttttcgggaggctttttatggaaggtagaatttgtaaaagttcgtatgctttgcctctcaactgcattaacatgccacaggctcagactgtttttgtgtaaaggatgtcaaagaacggcactttttctaaagagaagtttgatattttgtatgcttgttaagaaagtacagtattggaaattaaaggtggacaactgataattgaggagtatgtcaattaattttttatgtatattacctgtttacttgtacaacttactgtacaaattacatgcagcttcattttcaaatgaatccttaaaataaggaaatctttttaggaaaacatttaatttttgtatttttgattttaaaggcatgagttatgtcaattttcagtgtattaatgaagattttaacttttcatcaggttgagtgttttcttactatattatctgttgtgtatgtagttagcatattgtgtcactgaactgtttaaaaatctagcatgtagagcaagcctgttttgtggaaaatccttattcattaaaaaaataatcatggcagattttctgcaaaaaaaaaacaaaagcatttgcaattcagaatactgatttttttaattttatttaaagaaaggtattttgcttgcaggaaaaaaatactacagattcattttaatgagaatctttgaaatgtatttatctttagggcatctgggcatctttatgctgtttgtcttctgtctttcttgaaataaaatgtacatacgttacctttacatatgctcttgctcaaaattgtgaacctagttacatttctccctgctcccttcctttttatgctcaaacagcgaaacccaaaacttaaaagatctgaactttcagcatgcattctgattgctgaaagatttcctgatttagtgcattctcaaaagggctttcccataatctaaagggaaatgtaagcacctatactcttgtgcctgtgggcacttcaataataaaaaccaactttttaaactaatcatcttttatcaatgataaagttgttttcagtcccacactaggagagttcctttaagtcagctgatcaagcataagatacttccgtaaagaaataaactaagaaaattttttatggcttgagaaaattccttgaggccaaattaatatatttttctttgttattttatttgagtcattttaaatttgttaatacaaaatttaagataatttacagagacaatttatccagcttccttctaccttaatacaatgttttgtcttcccattatcctctcttttctttatctgttggtagatgtaaaaaacttccatttagttaatcggaggtgtgtattttttaaattgaaatgtgcccagccccttcagctcacacaggaaacatgaactcttaaaaaactgactagtaaatgcaggagaggtggatacctgatgagacacagcgaaagtgacctgtatacacattacaactctggagtacatattaaagtcgtgctatttccagtggtaaatgtctgacttttaagacattcttttaaatatttgtatcattgttaggatgttttaatcagttgttttttaattccatgtaatatatgtagccctcatcagatttatatcaccatatttctccttgtgtcctaagagaattgatgacaattcgtaaccataaattgttttatattagctagtatgtatatttatttttacccaatggctttatctgtttcccaaaatttgtttgggatttgttgaaagcattgtgtaacttctataaacggctattttcttgtaactgtcagtgaaa

SEQ ID NO: 1034 - protein, 466 aa, Homo sapiens
MRLRTRKASQQSNQIQTQRTARAKRKYSEVDDSLPSGGEKPSKNETGLLSSIKKFIKGSTPKEERENPSKRSRIERDIDNNLITSTPRAGEKPNKQISRVRRKSQVNGEAGSYEMTNQHVKQNGKLEDNPSSGSPPRTTLLGTIFSPVFNFFSPANKNGTSGSDSPGQAVEAEEIVKQLDMEQVDEITTSTTTSTNGAAYSNQAVQVRPSLNNGLEEAEETVNRDIPPLTAPVTPDSGYSSAHAEATYEEDWEVFDPYYFIKHVPPLTEEQLNRKPALPLKTRSTPEFSLVLDLDETLVHCSLNELEDAALTFPVLFQDVIYQVYVRLRPFFREFLERMSQMYEIILFTASKKVYADKLLNILDPKKQLVRHRLFREHCVCVQGNYIKDLNILGRDLSKTIIIDNSPQAFAYQLSNGIPIESWFMDKNDNELLKLIPFLEKLVELNEDVRPHIRDRFRLHDLLPPD

SEQ ID NO: 1035 - DNA, 7049 bp, Homo sapiens
gacgtcatcacgcagggccgagtcggcgcggccacatcctttaaatatggtcttttttgggcgcgcgcgacaatgtgaggagtggggtggagcgtgtgtggtgtgtggctgcggcctgggcaagagccgccgcggaccatgagctgagtaagttctggagggatcctgcctcttggagccttcgcagccaggcagctgtgaactgtgagctagagtgaagcagaaatctaggaagatgagctccaagatggtcataagtgaaccaggactgaattgggatatttcccccaaaaatggccttaagacatttttctctcgagaaaattataaagatcattccatggctccaagtttaaaagaactacgtgttttatccaacagagagagcagaggagttatgtggacttgttggttaaatacgcaaagattcctgcaaattccaaagctgttggaataaataaaaatgactacttgcagtacttggatatgaaaaaacatgtgaacgaagaagttactgagttcctaaagtttttgcagaattctgcaaagaaatgtgcgcaggattataatatgctttctgatgatgcccgtctcttcacagagaaaattttaagagcttgcattgaacaagtgaaaaagtattcagaattctatactctccacgaggtcaccagcttaatgggattcttcccattcagagtagagatgggattaaagttagaaaaaactcttctcgcattgggcagtgtaaaatatgtgaaaacagtatttccctcaatgcctataaagttgcagctgtcaaaggacgatatagctaccattgaaacgtcagaacaaacagctgaagctatgcattatgatattagtaaagatccaaatgcagagaagcttgtttccagatatcaccctcagatagctctaactagtcagtcattatttaccttattaaataatcatggaccaacgtacaaggaacagtgggaaattccagtgtgtattcaagtaatacctgttgcaggttcaaaaccagttaaagtaatatatattaattcaccacttccccaaaagaaaatgactatgagagagagaaatcaaatctttcatgaagttccattaaaatttatgatgtccaaaaacacatctgttccagtctctgcagtctttatggacaaacctgaagagtttatatctgaaatggacatgtcctgtgaagtcaacgagtgccgaaaaattgagagtcttgaaaacttgtatttggattttgatgatgatgtcacagaacttgaaacttttggagtaaccaccaccaaagtatcaaaatcaccaagtccagcaagtacttccacagtacctaacatgacagatgctcctacagcccccaaagcaggaactacaactgtggcaccaagtgcaccagacatttctgctaattctagaagtttatctcagattctgatggaacaattgcaaaaggagaaacagctggtcactggtatggatggtggccctgaggaatgcaaaaataaagatgatcagggatttgaatcatgtgaaaaggtatcaaattctgacaagcctttgatacaagatagtgacttgaaaacatctgatgccttacagttagaaaattctcaggaaattgaaacttctaataaaaatgatatgactatagatatattacatgctgatggtgaaagacctaatgttctagaaaacctagacaactcaaaggaaaagactgttggatcagaagcagcaaaaactgaagatacagttctctgcagcagtgatacagatgaggagtgtttaatcattgatacagaatgtaaaaataatagtgatggaaagacagctgttgtgggttctaacttaagttccagaccagctagtccaaattcttcctcaggacaggcttctgtaggaaaccagactaatactgcttgtagtcctgaagagtcatgtgttttaaaaaaacctatcaaacgagtatataaaaaatttgatccagttggagagattttaaaaatgcaggatgagctcttaaagccaatttccagaaaagtaccagaattgcccttaatgaatttagaaaattctaaacagccttctgtttctgagcaattgtctggtccttcagactcctctagttggccgaaatctggatggccttctgcatttcagaagccaaaaggacgattgccatatgaacttcaggactatgttgaagatacatcggaatacctagctcctcaggaaggaaattttgtttataagttatttagcctgcaagacctgttgttactcgtacgctgcagtgtccagaggatagagacaagaccacgttctaaaaaacggaagaaaatcagaagacaatttccagtttatgtactaccaaaagtagagtatcaagcttgttatggagttgaagctctgactgaaagtgaactttgtcgcttatggactgaaagtttattgcattccaacagctcattttatgttgggcatatcgatgcatttacttcaaaactttttctactggaagaaattacctcagaagaattaaaagaaaagctttcagcactcaagatttccaatttatttaacatcctccaacacattctaaagaaactaagtagcttgcaggagggttcctacttgttatctcatgcagcagaagattcttcactcctgatttataaggcctctgatggaaaagttactaggacagcatacaatttgtataaaacacattgcggccttcctggtgtaccttccagtctctcagttccctgggtcccattagatcccagcctgttattaccatatcatatccatcatggaagaataccttgtacttttccaccgaaatcactggataccacaacacaacaaaagattggtggaacgagaatgcctacacgcagccacaggaatccagtttccatggaaaccaaaagcagttgcttgcctgctcagcaagttgaaactgaaggagtggctccacataaaagaaaaataacttgaggactgtaccatggaaaactaaatttaaaaaaacagttataacagtgtttaatttagataagtttgagggaaaataatcagtaggcaagaggaacatttttcctgtagtagctagagtgccttgaaaaaatgtgttggctatgtgaaggaatatttcaactaaaatggaatggtatgcttttcacccttgaagtttgaggaggatcttgatatgttttaacattatcatggcagggaaatatataaagaagaaaaatatttttacattaaaccttttctaaaaattgtaaatagaaaaataatttggttttttatcaagaacaacacttatcgttatgtattgtgttagttatattgccagtctgttgcgactgactcaaaaagttaaatgttgccactgctgaagatgattatgagcatcgcaaactttgtttctgacccattttgacagtttttatatactcctttaaaatgatgaatgttacaggttaataaagttaatacctttaaaaacttggtgaaattccattacagaagccaaaaataaaaactccctgcctctgaaaagtcagattactgacttcttgtttggcaaccatcagtttgtttaataaaagaaaaaatttggtggtataacatgtttgatgacagatgcctctatctctagattcaagctgagtgttgaaatacactgctgaaagcaaagagataggtatgttttccagaaaaaaagtcagtgtcattgctccagatgacaaggttaatgtggtaaagcataagcttttttttttttttgagatggagtctcgctctgttgcccaggctggagtgcagtggcatgatctcagctcaccacaacatccacctcctggattaaagcgattctcctgcctcatcctcccgagtagctgggactacaggcacctaccaccaggcttggctaatttttttttgtatttttagtagagacagggtgttaccatgttggccgggctggtctcaaactcctgaccttgtgatccgcctgccttggcctcccaaagtgctgggattacaggggtaagccaccgtgcctggccagcataagctatttttatcctcatctatactgattgatttaaattttccgggcctgcagatgaatttggaaaagggcataatcaactgatgttgctgtagcaaatttggacttaagaaactacagacagggccgggcgtggtggctcacacctgtaattccagcacttcgcaaggccgaggcgggagaatcacttgagtccaggggttggagaccagtctgggcaacacagacctcatctctacaaataaaaaagttagccgggtgtggtggggtgtgcctgtagtcccagctactcaaaaggctgaggcagaagaattgcttgagcccaagaagtcaaggctacagtgagttgtgatcgcaccacagaactcagcttgagtatcagagtgtgaccctgtctcaaagaaaaaaaaaaacaggacaggcttgtttaatctttagaacccttacactaaaattttcagaaattatgtatgtcatttgtaaaatataagttttgtaatcctagataattgcttcacattgaaattttttagctattctgtgtaaagaatagctattcttttggcctaatttctgagaaattagaccgaaaaatctcctcaagtattgtaacagttgaaaatacttatattcaactaccaagttttgtttcattttgattttttgttataaaacatttttaagttatttgagaagtaattattagtaaaattgtatcttgataaatcatttcctcatcctgccattcccttttataaaacactgagtttttttattccttaagtcacatatcccagaaatgttttggttgtgaatcatttgccagcgagccaagggagaggcagggattcccttgaaatgtactcttacacttttttattttatttttaatgtacatttgtgtgcaccagaatggaatgtgctctttttaaagagctggacagtggttgcttcagacttctgaataccagaaagacttgccttttaatttttaaatattactttttacatcataaaatgtgttatcttatccatgtatttgaataacatcatatataaaggtagttttttgcttgtgcttagtgaagcctccttttttaacatacatttgatatgctttatgttctttttcttgatttttagtactgagaatttataagccaagaagtaactgacaatatgtttagcaggatgtaatcccagctacttgggaagctgaggtgggaggatcgcttgagtctaggagtttgaggctgcagtgagctatgatggtgccactgcactccatcctgggtgagagatcaagaccctatctcaaaaaatgagcaagttttttttttttttttaaatcagacttagggctagcaaggatgtgatcaccctggcccatttatacctcagcagtgaaggtgtaatttatacacacctctttgaaaacagtttaattcagtaagtgagtgcaactatgtgccatgcactccaaagtaggtccccacagttattctctcatagccttgttttttcagatctcaccatatttatttgtttctttgattttcttttcttatagattacaagctctgcaaggacaggggcatatttgttttgttcaccattaagtaataaacacctaatacagtgcctgtcatgtagttgcttagcagatattagttagatgcatgaatgtgtaggtatcaaagattttttttttcaggagatcacattctagtggaagacactatactgctttatgtgataagtgctttgataaagtaagcaagtcatctaaccagatcttggtagttaaggttttctgagatagaacttgagctgagtcttttaaaaatagtaggatttataagggaaaattaaaggtcttccacaaagaaactaagtgaaactaagcagcctatgaaaaggtgaaagttggagagattataggctatgaacatgggagatgagagagaaaactgcaggatagggacagaaacactgtgctaagacatttgaactttgtcctgtgcaatgtgggaaccagtagtgaaggttaattaactgacatgatcagatatgtatttgaaaagggctcttgttggcattagtctagagaatgcgatggagctgggaagcgaaagaagaaatgttgggagcctgtgttgtagtaactgaaaaatggcaatggcccagaattaaagcagcaagaataggagtgggctcaagtgatgtataaggaaaaaaaaaaaaatgacaactcagttttgttgttggtaaggagagtaaagtatggcttctgggtttctcatttgagatactgagtaaatgatggtgttaacccattgagaaaatagtgtggttagagtgggaagaaagttaatttaaaatgttcatttttttttttagtcatttctacttttggattctaggtttgtgtgctatattggttataaccaatttgctgaataataaattatcccaaaacttagctacttaaaacaacaaacattatctcacagtttctgtaagtcaaaagtccaggtctctcatgaagttgcagtcaggctcttggctagggctgcagtcatctgaaggattagtaagtcgctaagcccacacttaagctccacccttgaagggagaagtttggaaagaatttgtgaacatatttttaaatcacatatgctatgaacaggtttaggggagggagaggaaagaaaactttaacttttcattagcatactgcatctgtagttcctaatgggcatgttgtaaagatgttaagacgttttctatgcattataggtatatagtagtattttgttttgttctgtttttttgtttggtatgtagtagtttttaatcaaaccttaacgtatttgatattaagatttattgagtttcttgttgagatgtagaaataaaggggatccatttcatttatcca

SEQ ID NO: 1036 - protein, 845 aa, Homo sapiens
MKKHVNEEVTEFLKFLQNSAKKCAQDYNMLSDDARLFTEKILRACIEQVKKYSEFYTLHEVTSLMGFFPFRVEMGLKLEKTLLALGSVKYVKTVFPSMPIKLQLSKDDIATIETSEQTAEAMHYDISKDPNAEKLVSRYHPQIALTSQSLFTLLNNHGPTYKEQWEIPVCIQVIPVAGSKPVKVIYINSPLPQKKMTMRERNQIFHEVPLKFMMSKNTSVPVSAVFMDKPEEFISEMDMSCEVNECRKIESLENLYLDFDDDVTELETFGVTTTKVSKSPSPASTSTVPNMTDAPTAPKAGTTTVAPSAPDISANSRSLSQILMEQLQKEKQLVTGMDGGPEECKNKDDQGFESCEKVSNSDKPLIQDSDLKTSDALQLENSQEIETSNKNDMTIDILHADGERPNVLENLDNSKEKTVGSEAAKTEDTVLCSSDTDEECLIIDTECKNNSDGKTAVVGSNLSSRPASPNSSSGQASVGNQTNTACSPEESCVLKKPIKRVYKKFDPVGEILKMQDELLKPISRKVPELPLMNLENSKQPSVSEQLSGPSDSSSWPKSGWPSAFQKPKGRLPYELQDYVEDTSEYLAPQEGNFVYKLFSLQDLLLLVRCSVQRIETRPRSKKRKKIRRQFPVYVLPKVEYQACYGVEALTESELCRLWTESLLHSNSSFYVGHIDAFTSKLFLLEEITSEELKEKLSALKISNLFNILQHILKKLSSLQEGSYLLSHAAEDSSLLIYKASDGKVTRTAYNLYKTHCGLPGVPSSLSVPWVPLDPSLLLPYHIHHGRIPCTFPPKSLDTTTQQKIGGTRMPTRSHRNPVSMETKSSCLPAQQVETEGVAPHKRKIT

SEQ ID NO: 1037 - DNA, 7209 bp, Homo sapiens
gacgtcatcacgcagggccgagtcggcgcggccacatcctttaaatatggtcttttttgggcgcgcgcgacaatgtgaggagtggggtggagcgtgtgtggtgtgtggctgcggcctgggcaagagccgccgcggaccatgagctgagtaagttctggagggatcctgcctcttggagccttcgcagccaggcagctgtgaactgtgagctagagtgaagcagaaatctaggaagatgagctccaagatggtcataagtgaaccaggactgaattgggatatttcccccaaaaatggccttaagacatttttctctcgagaaaattataaagatcattccatggctccaagtttaaaagaactacgtgttttatccaacagacgtataggagaaaatttgaatgcctcagcaagttctgtagaaaatgagccggcagttagttcagcaactcaagcaaaggaaaaagttaaaaccacaattggaatggttcttcttccaaaaccaagagttccttatcctcgtttctctcgtttctcacagagagagcagaggagttatgtggacttgttggttaaatacgcaaagattcctgcaaattccaaagctgttggaataaataaaaatgactacttgcagtacttggatatgaaaaaacatgtgaacgaagaagttactgagttcctaaagtttttgcagaattctgcaaagaaatgtgcgcaggattataatatgctttctgatgatgcccgtctcttcacagagaaaattttaagagcttgcattgaacaagtgaaaaagtattcagaattctatactctccacgaggtcaccagcttaatgggattcttcccattcagagtagagatgggattaaagttagaaaaaactcttctcgcattgggcagtgtaaaatatgtgaaaacagtatttccctcaatgcctataaagttgcagctgtcaaaggacgatatagctaccattgaaacgtcagaacaaacagctgaagctatgcattatgatattagtaaagatccaaatgcagagaagcttgtttccagatatcaccctcagatagctctaactagtcagtcattatttaccttattaaataatcatggaccaacgtacaaggaacagtgggaaattccagtgtgtattcaagtaatacctgttgcaggttcaaaaccagttaaagtaatatatattaattcaccacttccccaaaagaaaatgactatgagagagagaaatcaaatctttcatgaagttccattaaaatttatgatgtccaaaaacacatctgttccagtctctgcagtctttatggacaaacctgaagagtttatatctgaaatggacatgtcctgtgaagtcaacgagtgccgaaaaattgagagtcttgaaaacttgtatttggattttgatgatgatgtcacagaacttgaaacttttggagtaaccaccaccaaagtatcaaaatcaccaagtccagcaagtacttccacagtacctaacatgacagatgctcctacagcccccaaagcaggaactacaactgtggcaccaagtgcaccagacatttctgctaattctagaagtttatctcagattctgatggaacaattgcaaaaggagaaacagctggtcactggtatggatggtggccctgaggaatgcaaaaataaagatgatcagggatttgaatcatgtgaaaaggtatcaaattctgacaagcctttgatacaagatagtgacttgaaaacatctgatgccttacagttagaaaattctcaggaaattgaaacttctaataaaaatgatatgactatagatatattacatgctgatggtgaaagacctaatgttctagaaaacctagacaactcaaaggaaaagactgttggatcagaagcagcaaaaactgaagatacagttctctgcagcagtgatacagatgaggagtgtttaatcattgatacagaatgtaaaaataatagtgatggaaagacagctgttgtgggttctaacttaagttccagaccagctagtccaaattcttcctcaggacaggcttctgtaggaaaccagactaatactgcttgtagtcctgaagagtcatgtgttttaaaaaaacctatcaaacgagtatataaaaaatttgatccagttggagagattttaaaaatgcaggatgagctcttaaagccaatttccagaaaagtaccagaattgcccttaatgaatttagaaaattctaaacagccttctgtttctgagcaattgtctggtccttcagactcctctagttggccgaaatctggatggccttctgcatttcagaagccaaaaggacgattgccatatgaacttcaggactatgttgaagatacatcggaatacctagctcctcaggaaggaaattttgtttataagttatttagcctgcaagacctgttgttactcgtacgctgcagtgtccagaggatagagacaagaccacgttctaaaaaacggaagaaaatcagaagacaatttccagtttatgtactaccaaaagtagagtatcaagcttgttatggagttgaagctctgactgaaagtgaactttgtcgcttatggactgaaagtttattgcattccaacagctcattttatgttgggcatatcgatgcatttacttcaaaactttttctactggaagaaattacctcagaagaattaaaagaaaagctttcagcactcaagatttccaatttatttaacatcctccaacacattctaaagaaactaagtagcttgcaggagggttcctacttgttatctcatgcagcagaagattcttcactcctgatttataaggcctctgatggaaaagttactaggacagcatacaatttgtataaaacacattgcggccttcctggtgtaccttccagtctctcagttccctgggtcccattagatcccagcctgttattaccatatcatatccatcatggaagaataccttgtacttttccaccgaaatcactggataccacaacacaacaaaagattggtggaacgagaatgcctacacgcagccacaggaatccagtttccatggaaaccaaaagcagttgcttgcctgctcagcaagttgaaactgaaggagtggctccacataaaagaaaaataacttgaggactgtaccatggaaaactaaatttaaaaaaacagttataacagtgtttaatttagataagtttgagggaaaataatcagtaggcaagaggaacatttttcctgtagtagctagagtgccttgaaaaaatgtgttggctatgtgaaggaatatttcaactaaaatggaatggtatgcttttcacccttgaagtttgaggaggatcttgatatgttttaacattatcatggcagggaaatatataaagaagaaaaatatttttacattaaaccttttctaaaaattgtaaatagaaaaataatttggttttttatcaagaacaacacttatcgttatgtattgtgttagttatattgccagtctgttgcgactgactcaaaaagttaaatgttgccactgctgaagatgattatgagcatcgcaaactttgtttctgacccattttgacagtttttatatactcctttaaaatgatgaatgttacaggttaataaagttaatacctttaaaaacttggtgaaattccattacagaagccaaaaataaaaactccctgcctctgaaaagtcagattactgacttcttgtttggcaaccatcagtttgtttaataaaagaaaaaatttggtggtataacatgtttgatgacagatgcctctatctctagattcaagctgagtgttgaaatacactgctgaaagcaaagagataggtatgttttccagaaaaaaagtcagtgtcattgctccagatgacaaggttaatgtggtaaagcataagcttttttttttttttgagatggagtctcgctctgttgcccaggctggagtgcagtggcatgatctcagctcaccacaacatccacctcctggattaaagcgattctcctgcctcatcctcccgagtagctgggactacaggcacctaccaccaggcttggctaatttttttttgtatttttagtagagacagggtgttaccatgttggccgggctggtctcaaactcctgaccttgtgatccgcctgccttggcctcccaaagtgctgggattacaggggtaagccaccgtgcctggccagcataagctatttttatcctcatctatactgattgatttaaattttccgggcctgcagatgaatttggaaaagggcataatcaactgatgttgctgtagcaaatttggacttaagaaactacagacagggccgggcgtggtggctcacacctgtaattccagcacttcgcaaggccgaggcgggagaatcacttgagtccaggggttggagaccagtctgggcaacacagacctcatctctacaaataaaaaagttagccgggtgtggtggggtgtgcctgtagtcccagctactcaaaaggctgaggcagaagaattgcttgagcccaagaagtcaaggctacagtgagttgtgatcgcaccacagaactcagcttgagtatcagagtgtgaccctgtctcaaagaaaaaaaaaaacaggacaggcttgtttaatctttagaacccttacactaaaattttcagaaattatgtatgtcatttgtaaaatataagttttgtaatcctagataattgcttcacattgaaattttttagctattctgtgtaaagaatagctattcttttggcctaatttctgagaaattagaccgaaaaatctcctcaagtattgtaacagttgaaaatacttatattcaactaccaagttttgtttcattttgattttttgttataaaacatttttaagttatttgagaagtaattattagtaaaattgtatcttgataaatcatttcctcatcctgccattcccttttataaaacactgagtttttttattccttaagtcacatatcccagaaatgttttggttgtgaatcatttgccagcgagccaagggagaggcagggattcccttgaaatgtactcttacacttttttattttatttttaatgtacatttgtgtgcaccagaatggaatgtgctctttttaaagagctggacagtggttgcttcagacttctgaataccagaaagacttgccttttaatttttaaatattactttttacatcataaaatgtgttatcttatccatgtatttgaataacatcatatataaaggtagttttttgcttgtgcttagtgaagcctccttttttaacatacatttgatatgctttatgttctttttcttgatttttagtactgagaatttataagccaagaagtaactgacaatatgtttagcaggatgtaatcccagctacttgggaagctgaggtgggaggatcgcttgagtctaggagtttgaggctgcagtgagctatgatggtgccactgcactccatcctgggtgagagatcaagaccctatctcaaaaaatgagcaagttttttttttttttttaaatcagacttagggctagcaaggatgtgatcaccctggcccatttatacctcagcagtgaaggtgtaatttatacacacctctttgaaaacagtttaattcagtaagtgagtgcaactatgtgccatgcactccaaagtaggtccccacagttattctctcatagccttgttttttcagatctcaccatatttatttgtttctttgattttcttttcttatagattacaagctctgcaaggacaggggcatatttgttttgttcaccattaagtaataaacacctaatacagtgcctgtcatgtagttgcttagcagatattagttagatgcatgaatgtgtaggtatcaaagattttttttttcaggagatcacattctagtggaagacactatactgctttatgtgataagtgctttgataaagtaagcaagtcatctaaccagatcttggtagttaaggttttctgagatagaacttgagctgagtcttttaaaaatagtaggatttataagggaaaattaaaggtcttccacaaagaaactaagtgaaactaagcagcctatgaaaaggtgaaagttggagagattataggctatgaacatgggagatgagagagaaaactgcaggatagggacagaaacactgtgctaagacatttgaactttgtcctgtgcaatgtgggaaccagtagtgaaggttaattaactgacatgatcagatatgtatttgaaaagggctcttgttggcattagtctagagaatgcgatggagctgggaagcgaaagaagaaatgttgggagcctgtgttgtagtaactgaaaaatggcaatggcccagaattaaagcagcaagaataggagtgggctcaagtgatgtataaggaaaaaaaaaaaaatgacaactcagttttgttgttggtaaggagagtaaagtatggcttctgggtttctcatttgagatactgagtaaatgatggtgttaacccattgagaaaatagtgtggttagagtgggaagaaagttaatttaaaatgttcatttttttttttagtcatttctacttttggattctaggtttgtgtgctatattggttataaccaatttgctgaataataaattatcccaaaacttagctacttaaaacaacaaacattatctcacagtttctgtaagtcaaaagtccaggtctctcatgaagttgcagtcaggctcttggctagggctgcagtcatctgaaggattagtaagtcgctaagcccacacttaagctccacccttgaagggagaagtttggaaagaatttgtgaacatatttttaaatcacatatgctatgaacaggtttaggggagggagaggaaagaaaactttaacttttcattagcatactgcatctgtagttcctaatgggcatgttgtaaagatgttaagacgttttctatgcattataggtatatagtagtattttgttttgttctgtttttttgtttggtatgtagtagtttttaatcaaaccttaacgtatttgatattaagatttattgagtttcttgttgagatgtagaaataaaggggatccatttcatttatcca

SEQ ID NO: 1038 - protein, 982 aa, Homo sapiens
MSSKMVISEPGLNWDISPKNGLKTFFSRENYKDHSMAPSLKELRVLSNRRIGENLNASASSVENEPAVSSATQAKEKVKTTIGMVLLPKPRVPYPRFSRFSQREQRSYVDLLVKYAKIPANSKAVGINKNDYLQYLDMKKHVNEEVTEFLKFLQNSAKKCAQDYNMLSDDARLFTEKILRACIEQVKKYSEFYTLHEVTSLMGFFPFRVEMGLKLEKTLLALGSVKYVKTVFPSMPIKLQLSKDDIATIETSEQTAEAMHYDISKDPNAEKLVSRYHPQIALTSQSLFTLLNNHGPTYKEQWEIPVCIQVIPVAGSKPVKVIYINSPLPQKKMTMRERNQIFHEVPLKFMMSKNTSVPVSAVFMDKPEEFISEMDMSCEVNECRKIESLENLYLDFDDDVTELETFGVTTTKVSKSPSPASTSTVPNMTDAPTAPKAGTTTVAPSAPDISANSRSLSQILMEQLQKEKQLVTGMDGGPEECKNKDDQGFESCEKVSNSDKPLIQDSDLKTSDALQLENSQEIETSNKNDMTIDILHADGERPNVLENLDNSKEKTVGSEAAKTEDTVLCSSDTDEECLIIDTECKNNSDGKTAVVGSNLSSRPASPNSSSGQASVGNQTNTACSPEESCVLKKPIKRVYKKFDPVGEILKMQDELLKPISRKVPELPLMNLENSKQPSVSEQLSGPSDSSSWPKSGWPSAFQKPKGRLPYELQDYVEDTSEYLAPQEGNFVYKLFSLQDLLLLVRCSVQRIETRPRSKKRKKIRRQFPVYVLPKVEYQACYGVEALTESELCRLWTESLLHSNSSFYVGHIDAFTSKLFLLEEITSEELKEKLSALKISNLFNILQHILKKLSSLQEGSYLLSHAAEDSSLLIYKASDGKVTRTAYNLYKTHCGLPGVPSSLSVPWVPLDPSLLLPYHIHHGRIPCTFPPKSLDTTTQQKIGGTRMPTRSHRNPVSMETKSSCLPAQQVETEGVAPHKRKIT

SEQ ID NO: 1039 - DNA, 1996 bp, Homo sapiens
gcagattcacagggcctctgagcattatcccccatactcctccccatcattctccacccagctgttggagccatctgtctgatcaccttggactccatagtacactggggcaaagcacagccccagtttctggaggcagatgggtaaccaggaaaaggcatgaatgagggggccccaggagacagtgacttagagactgaggcaagagtgccgtggtcaatcatgggtcattgtcttcgaactggacaggccagaatgtctgccacacccacacctgcaggtgaaggagccagaagctcttcaacctgtagctccctgagcaggctgttctggtctcaacttgagcacataaactgggatggagccacagccaagaactttattaatttaagggagttcttctcttttctgctccctgcattgagaaaagctcaaattgaaattattccatgcaagatctgtggagacaaatcatcaggaatccattatggtgtcattacatgtgaaggctgcaagggctttttcaggagaagtcagcaaagcaatgccacctactcctgtcctcgtcagaagaactgtttgattgatcgaaccagtagaaaccgctgccaacactgtcgattacagaaatgccttgccgtagggatgtctcgagatgctgtaaaatttggccgaatgtcaaaaaagcagagagacagcttgtatgcagaagtacagaaacaccggatgcagcagcagcagcgcgaccaccagcagcagcctggagaggctgagccgctgacgcccacctacaacatctcggccaacgggctgacggaacttcacgacgacctcagtaactacattgacgggcacacccctgaggggagtaaggcagactccgccgtcagcagcttctacctggacatacagccttccccagaccagtcaggtcttgatatcaatggaatcaaaccagaaccaatatgtgactacacaccagcatcaggcttctttccctactgttcgttcaccaacggcgagacttccccaactgtgtccatggcagaattagaacaccttgcacagaatatatctaaatcgcatctggaaacctgccaatacttgagagaagagctccagcagataacgtggcagacctttttacaggaagaaattgagaactatcaaaacaagcagcgggaggtgatgtggcaattgtgtgccatcaaaattacagaagctatacagtatgtggtggagtttgccaaacgcattgatggatttatggaactgtgtcaaaatgatcaaattgtgcttctaaaagcaggttctctagaggtggtgtttatcagaatgtgccgtgcctttgactctcagaacaacaccgtgtactttgatgggaagtatgccagccccgacgtcttcaaatccttaggttgtgaagactttattagctttgtgtttgaatttggaaagagtttatgttctatgcacctgactgaagatgaaattgcattattttctgcatttgtactgatgtcagcagatcgctcatggctgcaagaaaaggtaaaaattgaaaaactgcaacagaaaattcagctagctcttcaacacgtcctacagaagaatcaccgagaagatggaatactaacaaagttaatatgcaaggtgtctacattaagagccttatgtggacgacatacagaaaagctaatggcatttaaagcaatatacccagacattgtgcgacttcattttcctccattatacaaggagttgttcacttcagaatttgagccagcaatgcaaattgatgggtaaatgttatcacctaagcacttctagaatgtctgaagtacaaacatgaaaaacaaacaaaaaaattaaccgagacactttatatggccctgcacagacctggagcgccacacactgcacatcttttggtgatcggggtcaggcaaaggaggggaaacaatgaaaacaaataaagttgaacttgtttttctca

SEQ ID NO: 1040 - protein, 548 aa, Homo sapiens
MNEGAPGDSDLETEARVPWSIMGHCLRTGQARMSATPTPAGEGARSSSTCSSLSRLFWSQLEHINWDGATAKNFINLREFFSFLLPALRKAQIEIIPCKICGDKSSGIHYGVITCEGCKGFFRRSQQSNATYSCPRQKNCLIDRTSRNRCQHCRLQKCLAVGMSRDAVKFGRMSKKQRDSLYAEVQKHRMQQQQRDHQQQPGEAEPLTPTYNISANGLTELHDDLSNYIDGHTPEGSKADSAVSSFYLDIQPSPDQSGLDINGIKPEPICDYTPASGFFPYCSFTNGETSPTVSMAELEHLAQNISKSHLETCQYLREELQQITWQTFLQEEIENYQNKQREVMWQLCAIKITEAIQYVVEFAKRIDGFMELCQNDQIVLLKAGSLEVVFIRMCRAFDSQNNTVYFDGKYASPDVFKSLGCEDFISFVFEFGKSLCSMHLTEDEIALFSAFVLMSADRSWLQEKVKIEKLQQKIQLALQHVLQKNHREDGILTKLICKVSTLRALCGRHTEKLMAFKAIYPDIVRLHFPPLYKELFTSEFEPAMQIDG

SEQ ID NO: 1041 - DNA, 2020 bp, Homo sapiens
gcagattcacagggcctctgagcattatcccccatactcctccccatcattctccacccagctgttggagccatctgtctgatcaccttggactccatagtacactggggcaaagcacagccccagtttctggaggcagatgggtaaccaggaaaaggcatgaatgagggggccccaggagacagtgacttagagactgaggcaagagtgccgtggtcaatcatgggtcattgtcttcgaactggacaggccagaatgtctgccacacccacacctgcaggtgaaggagccagaagggatgaactttttgggattctccaaatactccatcagtgtatcctgtcttcaggtgatgcttttgttcttactggcgtctgttgttcctggaggcagaatggcaagccaccatattcacaaaaggaagataaggaagtacaaactggatacatgaatgctcaaattgaaattattccatgcaagatctgtggagacaaatcatcaggaatccattatggtgtcattacatgtgaaggctgcaagggctttttcaggagaagtcagcaaagcaatgccacctactcctgtcctcgtcagaagaactgtttgattgatcgaaccagtagaaaccgctgccaacactgtcgattacagaaatgccttgccgtagggatgtctcgagatgctgtaaaatttggccgaatgtcaaaaaagcagagagacagcttgtatgcagaagtacagaaacaccggatgcagcagcagcagcgcgaccaccagcagcagcctggagaggctgagccgctgacgcccacctacaacatctcggccaacgggctgacggaacttcacgacgacctcagtaactacattgacgggcacacccctgaggggagtaaggcagactccgccgtcagcagcttctacctggacatacagccttccccagaccagtcaggtcttgatatcaatggaatcaaaccagaaccaatatgtgactacacaccagcatcaggcttctttccctactgttcgttcaccaacggcgagacttccccaactgtgtccatggcagaattagaacaccttgcacagaatatatctaaatcgcatctggaaacctgccaatacttgagagaagagctccagcagataacgtggcagacctttttacaggaagaaattgagaactatcaaaacaagcagcgggaggtgatgtggcaattgtgtgccatcaaaattacagaagctatacagtatgtggtggagtttgccaaacgcattgatggatttatggaactgtgtcaaaatgatcaaattgtgcttctaaaagcaggttctctagaggtggtgtttatcagaatgtgccgtgcctttgactctcagaacaacaccgtgtactttgatgggaagtatgccagccccgacgtcttcaaatccttaggttgtgaagactttattagctttgtgtttgaatttggaaagagtttatgttctatgcacctgactgaagatgaaattgcattattttctgcatttgtactgatgtcagcagatcgctcatggctgcaagaaaaggtaaaaattgaaaaactgcaacagaaaattcagctagctcttcaacacgtcctacagaagaatcaccgagaagatggaatactaacaaagttaatatgcaaggtgtctacattaagagccttatgtggacgacatacagaaaagctaatggcatttaaagcaatatacccagacattgtgcgacttcattttcctccattatacaaggagttgttcacttcagaatttgagccagcaatgcaaattgatgggtaaatgttatcacctaagcacttctagaatgtctgaagtacaaacatgaaaaacaaacaaaaaaattaaccgagacactttatatggccctgcacagacctggagcgccacacactgcacatcttttggtgatcggggtcaggcaaaggaggggaaacaatgaaaacaaataaagttgaacttgtttttctca

SEQ ID NO: 1042 - protein, 556 aa, Homo sapiens
MNEGAPGDSDLETEARVPWSIMGHCLRTGQARMSATPTPAGEGARRDELFGILQILHQCILSSGDAFVLTGVCCSWRQNGKPPYSQKEDKEVQTGYMNAQIEIIPCKICGDKSSGIHYGVITCEGCKGFFRRSQQSNATYSCPRQKNCLIDRTSRNRCQHCRLQKCLAVGMSRDAVKFGRMSKKQRDSLYAEVQKHRMQQQQRDHQQQPGEAEPLTPTYNISANGLTELHDDLSNYIDGHTPEGSKADSAVSSFYLDIQPSPDQSGLDINGIKPEPICDYTPASGFFPYCSFTNGETSPTVSMAELEHLAQNISKSHLETCQYLREELQQITWQTFLQEEIENYQNKQREVMWQLCAIKITEAIQYVVEFAKRIDGFMELCQNDQIVLLKAGSLEVVFIRMCRAFDSQNNTVYFDGKYASPDVFKSLGCEDFISFVFEFGKSLCSMHLTEDEIALFSAFVLMSADRSWLQEKVKIEKLQQKIQLALQHVLQKNHREDGILTKLICKVSTLRALCGRHTEKLMAFKAIYPDIVRLHFPPLYKELFTSEFEPAMQIDG

SEQ ID NO: 1043 - DNA, 1847 bp, Homo sapiens
ggtaccatagagttgctctgaaaacagaagatagagggagtctcggagctcgccatctccagcgatctctacattgggaaaaaacatggagtcagctccggcagcccccgaccccgccgccagcgagccaggcagcagcggcgcggacgcggccgccggctccagggagaccccgctgaaccaggaatccgcccgcaagagcgagccgcctgccccggtgcgcagacagagctattccagcaccagcagaggtatctcagtaacgaagaagacacatacatctcaaattgaaattattccatgcaagatctgtggagacaaatcatcaggaatccattatggtgtcattacatgtgaaggctgcaagggctttttcaggagaagtcagcaaagcaatgccacctactcctgtcctcgtcagaagaactgtttgattgatcgaaccagtagaaaccgctgccaacactgtcgattacagaaatgccttgccgtagggatgtctcgagatgctgtaaaatttggccgaatgtcaaaaaagcagagagacagcttgtatgcagaagtacagaaacaccggatgcagcagcagcagcgcgaccaccagcagcagcctggagaggctgagccgctgacgcccacctacaacatctcggccaacgggctgacggaacttcacgacgacctcagtaactacattgacgggcacacccctgaggggagtaaggcagactccgccgtcagcagcttctacctggacatacagccttccccagaccagtcaggtcttgatatcaatggaatcaaaccagaaccaatatgtgactacacaccagcatcaggcttctttccctactgttcgttcaccaacggcgagacttccccaactgtgtccatggcagaattagaacaccttgcacagaatatatctaaatcgcatctggaaacctgccaatacttgagagaagagctccagcagataacgtggcagacctttttacaggaagaaattgagaactatcaaaacaagcagcgggaggtgatgtggcaattgtgtgccatcaaaattacagaagctatacagtatgtggtggagtttgccaaacgcattgatggatttatggaactgtgtcaaaatgatcaaattgtgcttctaaaagcaggttctctagaggtggtgtttatcagaatgtgccgtgcctttgactctcagaacaacaccgtgtactttgatgggaagtatgccagccccgacgtcttcaaatccttaggttgtgaagactttattagctttgtgtttgaatttggaaagagtttatgttctatgcacctgactgaagatgaaattgcattattttctgcatttgtactgatgtcagcagatcgctcatggctgcaagaaaaggtaaaaattgaaaaactgcaacagaaaattcagctagctcttcaacacgtcctacagaagaatcaccgagaagatggaatactaacaaagttaatatgcaaggtgtctacattaagagccttatgtggacgacatacagaaaagctaatggcatttaaagcaatatacccagacattgtgcgacttcattttcctccattatacaaggagttgttcacttcagaatttgagccagcaatgcaaattgatgggtaaatgttatcacctaagcacttctagaatgtctgaagtacaaacatgaaaaacaaacaaaaaaattaaccgagacactttatatggccctgcacagacctggagcgccacacactgcacatcttttggtgatcggggtcaggcaaaggaggggaaacaatgaaaacaaataaagttgaacttgtttttctca

SEQ ID NO: 1044 - protein, 523 aa, Homo sapiens
MESAPAAPDPAASEPGSSGADAAAGSRETPLNQESARKSEPPAPVRRQSYSSTSRGISVTKKTHTSQIEIIPCKICGDKSSGIHYGVITCEGCKGFFRRSQQSNATYSCPRQKNCLIDRTSRNRCQHCRLQKCLAVGMSRDAVKFGRMSKKQRDSLYAEVQKHRMQQQQRDHQQQPGEAEPLTPTYNISANGLTELHDDLSNYIDGHTPEGSKADSAVSSFYLDIQPSPDQSGLDINGIKPEPICDYTPASGFFPYCSFTNGETSPTVSMAELEHLAQNISKSHLETCQYLREELQQITWQTFLQEEIENYQNKQREVMWQLCAIKITEAIQYVVEFAKRIDGFMELCQNDQIVLLKAGSLEVVFIRMCRAFDSQNNTVYFDGKYASPDVFKSLGCEDFISFVFEFGKSLCSMHLTEDEIALFSAFVLMSADRSWLQEKVKIEKLQQKIQLALQHVLQKNHREDGILTKLICKVSTLRALCGRHTEKLMAFKAIYPDIVRLHFPPLYKELFTSEFEPAMQIDG

SEQ ID NO: 1045 - DNA, 1687 bp, Homo sapiens
tgtggctcgggcggcggcggcgcggcggcggcagagggggctccggggtcggaccatccgctctccctgcgctctccgcaccgcgcttaaatgatgtattttgtgatcgcagcgatgaaagctcaaattgaaattattccatgcaagatctgtggagacaaatcatcaggaatccattatggtgtcattacatgtgaaggctgcaagggctttttcaggagaagtcagcaaagcaatgccacctactcctgtcctcgtcagaagaactgtttgattgatcgaaccagtagaaaccgctgccaacactgtcgattacagaaatgccttgccgtagggatgtctcgagatgctgtaaaatttggccgaatgtcaaaaaagcagagagacagcttgtatgcagaagtacagaaacaccggatgcagcagcagcagcgcgaccaccagcagcagcctggagaggctgagccgctgacgcccacctacaacatctcggccaacgggctgacggaacttcacgacgacctcagtaactacattgacgggcacacccctgaggggagtaaggcagactccgccgtcagcagcttctacctggacatacagccttccccagaccagtcaggtcttgatatcaatggaatcaaaccagaaccaatatgtgactacacaccagcatcaggcttctttccctactgttcgttcaccaacggcgagacttccccaactgtgtccatggcagaattagaacaccttgcacagaatatatctaaatcgcatctggaaacctgccaatacttgagagaagagctccagcagataacgtggcagacctttttacaggaagaaattgagaactatcaaaacaagcagcgggaggtgatgtggcaattgtgtgccatcaaaattacagaagctatacagtatgtggtggagtttgccaaacgcattgatggatttatggaactgtgtcaaaatgatcaaattgtgcttctaaaagcaggttctctagaggtggtgtttatcagaatgtgccgtgcctttgactctcagaacaacaccgtgtactttgatgggaagtatgccagccccgacgtcttcaaatccttaggttgtgaagactttattagctttgtgtttgaatttggaaagagtttatgttctatgcacctgactgaagatgaaattgcattattttctgcatttgtactgatgtcagcagatcgctcatggctgcaagaaaaggtaaaaattgaaaaactgcaacagaaaattcagctagctcttcaacacgtcctacagaagaatcaccgagaagatggaatactaacaaagttaatatgcaaggtgtctacattaagagccttatgtggacgacatacagaaaagctaatggcatttaaagcaatatacccagacattgtgcgacttcattttcctccattatacaaggagttgttcacttcagaatttgagccagcaatgcaaattgatgggtaaatgttatcacctaagcacttctagaatgtctgaagtacaaacatgaaaaacaaacaaaaaaattaaccgagacactttatatggccctgcacagacctggagcgccacacactgcacatcttttggtgatcggggtcaggcaaaggaggggaaacaatgaaaacaaataaagttgaacttgtttttctca

SEQ ID NO: 1046 - protein, 468 aa, Homo sapiens
MMYFVIAAMKAQIEIIPCKICGDKSSGIHYGVITCEGCKGFFRRSQQSNATYSCPRQKNCLIDRTSRNRCQHCRLQKCLAVGMSRDAVKFGRMSKKQRDSLYAEVQKHRMQQQQRDHQQQPGEAEPLTPTYNISANGLTELHDDLSNYIDGHTPEGSKADSAVSSFYLDIQPSPDQSGLDINGIKPEPICDYTPASGFFPYCSFTNGETSPTVSMAELEHLAQNISKSHLETCQYLREELQQITWQTFLQEEIENYQNKQREVMWQLCAIKITEAIQYVVEFAKRIDGFMELCQNDQIVLLKAGSLEVVFIRMCRAFDSQNNTVYFDGKYASPDVFKSLGCEDFISFVFEFGKSLCSMHLTEDEIALFSAFVLMSADRSWLQEKVKIEKLQQKIQLALQHVLQKNHREDGILTKLICKVSTLRALCGRHTEKLMAFKAIYPDIVRLHFPPLYKELFTSEFEPAMQIDG

SEQ ID NO: 1047 - DNA, 8163 bp, Homo sapiens
ctgcccaaagtttgtcctattaggcccgccagggtactctgcgactccgggacgagggcggggccgcgctagtggttccggttcggctccagccgcccctcggctcctcgccttccccctcccgtccgccttctcccctccctcccgctcctgggaaagagagaaaccaccgctgcgggtgggtagagaagcacttggcgcctcggggaggggaccgcgcccgcctcatttgcgccttgcagcactgctggaccaggttacaagatgttcacctaagattgagacctagtgactacatttcctacgggaacaaataaatggtttttcatctcccggagatacattacaaacaaatatggtgctaaaagaactccttacctttctctgactacaatttatttggacatacttttgtattgaagagaggtatacatactgaagctacttgctgtactataggagactctgtcctgtaggatcatggaccatcctagtagggaaaaggatgaaagacaacggacaactaaacccatggcacaaaggagtgcacactgctctcgaccatctggctcctcatcgtcctctggggttcttatggtgggacccaacttcagggttggcaagaagataggatgtgggaacttcggagagctcagattaggtaaaaatctctacaccaatgaatatgtagcaatcaaactggaaccaataaaatcacgtgctccacagcttcatttagagtacagattttataaacagcttggcagtgcaggtgaaggtctcccacaggtgtattactttggaccatgtgggaaatataatgccatggtgctggagctccttggccctagcttggaggacttgtttgacctctgtgaccgaacatttactttgaagacggtgttaatgatagccatccagctgctttctcgaatggaatacgtgcactcaaagaacctcatttaccgagatgtcaagccagagaacttcctgattggtcgacaaggcaataagaaagagcatgttatacacattatagactttggactggccaaggaatacattgaccccgaaaccaaaaaacacataccttatagggaacacaaaagtttaactggaactgcaagatatatgtctatcaacacgcatcttggcaaagagcaaagccggagagatgatttggaagccctaggccatatgttcatgtatttccttcgaggcagcctcccctggcaaggactcaaggctgacacattaaaagagagatatcaaaaaattggtgacaccaaaaggaatactcccattgaagctctctgtgagaactttccagaggagatggcaacctaccttcgatatgtcaggcgactggacttctttgaaaaacctgattatgagtatttacggaccctcttcacagacctctttgaaaagaaaggctacacctttgactatgcctatgattgggttgggagacctattcctactccagtagggtcagttcacgtagattctggtgcatctgcaataactcgagaaagccacacacatagggatcggccatcacaacagcagcctcttcgaaatcaggtggttagctcaaccaatggagagctgaatgttgatgatcccacgggagcccactccaatgcaccaatcacagctcatgccgaggtggaggtagtggaggaagctaagtgctgctgtttctttaagaggaaaaggaagaagactgctcagcgccacaagtgaccagtgcctcccaggagtcctcaggccctggggactctgactcaattgtacctgcagctcctgccatttctcattggaagggactcctctttgggggagggtggatatccaaaccaaaaagaagaaaacagatgcccccagaaggggccagtgcgggcagccagggcctagtgggtcattggccatctccgcctgcctaaggctctgagcaggtcccagagctgctgttcctccactgcttgcccatagggctgcctggttgactctccttcccattgtttacagtgaaggtgtcattcacaaaaactcaaggactgctattctccttcttccccttagtttactcctggtttttaccccaccctcaaccctctccagcataaaacctagtgagctaaaggctttgtctgcagaaggagatcaagaggctgggggtaaggccaagaaggtaggaggaaaatggcagacctgggctggagaagaaccttctccgtatcccaggtgtgcctggcagtatggtttcctcttcctctgtgcctgtgcagcattcatcccagctggccttggggttcaggttccttcttccctccctcctgtgaagttacactgtaggacacaagctgtgagcaatctgcagtctactgtccctgtgtgttggcgttcttagcttttttgacaaactcttttctccaggtagtaggacaatgaaaattgttctaagcaaaggaaagaaaactgactttgttgcacttttagtttttttaaaaaaaacaaaaacaaaaacatggcagatgcatattgtgtctggttatattgggggttttacttttacctgttttgagggggatggggccggccaagccattcagagagaacatgggtccagaggacattctcagtggaaagagtttgatctgcagcacccagaagagaagccaaactcggtgtcattctgagtgaacactcaggttggcaagaaaacatacttgaattttcattcatcttctcagcagctgaagaatgtccctaccagagcatcttgacctaatcagcttacagtttgaaaacctagctctccagaacatgagatgagccagccgagccagactgtgaccaggaaacagctcatcccagagaaggagatgcttaacaaaaaaaaattgaaattgtttcccatgctgccagggacttccaactagatagccatgtgacgtcctggtgacttgggggaaaaattagtgatgaaacagccaccaccatattgccattagtggaaaaaaagaggacagtgaacctgccttccacctgccagagggacctcagggtgtggcattatagggccaggaaaagaaaatcggtgtatcctatctgccccaatagctgagctgtagcatttgggctggcctgccttatcagaaaccaagcttatgaagatcttctcccagcaggtccatagcagtaggcttaggatgcagtatatggggccgcatttaaaaggagggaaagattgtttggtgctggaacattccagggaaaaggagactggaatgaaaggtctgaaattatcttctcaattggactccttccagaaaggtggccgtgcctctaagcatgtttttcccagtatgccctaggcctccccccatggtgttttcatatgaggtactactgtgaaggatctggttcctcattcactgtttgacaagtctttcatgtgtggagttactcttctcatgcccaattttcatttgagtttagtggcttaaccaaacaatgactcctcattccagcggtgacagaagagaaagggtcatttacatcaggaaagaggtcttgtatctgggagtagagagctaaccatggagcacagtggctggtgggtgacttagtctgatggtttgtggaccatagaagtcttcacctctggtttgaggtgcagggctgtcttttgtactggagggtgtggggatattttctgatagttgccatttcttgaaaaattcccttgatgtaccttacacagagcagaaataacattaacatggatcagaggtactgggcttcatctgttccattggaccttggctagggaatatcatttcactggcatcaaacctgcttagcttatgaaaagatggtaatatgtcatttctataaatgtttctatatatgaaacataaagtggcagggagatacaatatcacaccccttccccacaaggactgtgaatattgggatttatgtccttgccattacctagtggttacagccctatcactaaaatttacatcgtttctcagttgggatttgggcattgctaacttactgtatagaaagtttaacttttcctcacccctgtatagaaaatgccttgcctctcaagagagggcagagggggggccaggtgcagtggctcacgcctgtaatcccagcagtttgggaggccaaggcaagtggatcatgtgaggtcaagagttcgagaccagcctggccaacatggtgaaaccccgtctctacaaaaaatacaaaaattagctgggcatggtggcatgctcccgtagtcccagctactcgggaggctgaggcaggagaatcacttgagcctgggaggcagaagttgcagtgagccgagatcgcaccactgcactccagcctgggcaacagagtgagactctgtctaaaaagaaaaaaaaaaaagggcagagggaaatggtgggaatgcctggagcatcctggcactctatactctactgagtgcctctcttcagcccctcaccctgcttccacacacacacacacaaaagcaaaggcactgaccagcttggctgcagggcaagctgccttgcagctggatttgcgactttttttttgtcttaaaatttttactggatcagttgtaggggactgtacttcctaagacactgttctcaccttccaacctcacaaatctcttactagatatttggtttttataacaagggtaaagaatcccaggtccctttagcatgcagagtaatggtgatccctccagagccattggcacttcaaagtggtcccagacctgggagattctggtgggatcttccttaaaaataagcaaaaaacctgagtaccctagatgcaattggccatttgtttcaggcccatcagcgaatcagggctccctcctcaaccctactgctacagttccttagctgtatgcctcagccagatccttggggttagggcatgcactcgctgactgtccccacccatccacttgctctgtagtttctgagctttctccatttcacaagtatggtgcctaacgatctttttctttaggattgatgcagttgtttttcctgaaagctaactcagcatctattcataaaaacccttaatagtatacattaggagttttcccaagctctacagtccctcagacattgcatcctaaacagatttgaggcacacaggccaagactccaccaaggcataaatggtcccccctactcccttttgaccagggtatcacttgtgtctctgcagtaagagttggtcaagttgctctacgcaccttggtgctttccagagatctcactccagactgcccccaagggtggatagagtatcctgacagccagtgtgcactcatgactgccttaattaacattcttctgctattatggagcctgtccagcaataaacagggtctaggaaggtacaagattagcttccagttaaaatcccattttatattggaatgcatgagctacagatgacagcagagatcctgaggtttctagacatgttgattgtctcttttttctaaatgaactccaagtacttagaaaacagtccctgtccatcagccagaaaaggtgaccatcacccctaaagtaatttccaaacttagttcagtgggaagatatgctggtagtgcatattcagtgttgattttcagtgctagtaaccacttttaatgccagaaatatgtaacaatgataatgtaacgtcaaagtggttactaaagattatagccttaacttttttatgtaaaagataaaatccattcctcctcccagtgagcaagcatggcttgcatttctcaaaaatgagaacttccatggcagccaagaaaacgtcttctcagaggaactttcgtttgatgcatctcccaagcccacatgcctcctgtgttccagccacctcttccatttcacatttaaaccagctctccattcccattgagttgccctaacaacattgtctccagtgtcagaaccatattaaggttcgtttctcagattgggagcctgcaacaccatacagccaacattgcctttgccacgccactgccaccatccccaccattgccctatggtgggcagatgaattccagaaaccctcagggagccaggataattaggcaacccatctgaattggccacgtaagtgacaggcacttatctctcgggttcttgcttttgcagactccagggaagtcctgtctagaggtcgatggcagagactcctagtctttcccatgaggggttgataggaatcaaattgggattcctttggctttgggttttgtttttttgttgttgtttttggttttcagtttgttttttggtgtatggggggtgattttgtttctgaataagaaaaagaagaggcaaccatggcccttatgtgggtttatcctttttgagcaatgttttagccacaagtaaggaatcttgaaagtcttttgtccagcaagcagtcttaaaaatgtttttcctaactccttttgcaggtgactaagtacaaaaaaatagttttctcattgtattcaaaatagtgagtaggttccctggataatacacagtggtagttgacatattttctcaaaacacaaccagaaaacccacttccggtatttgtaaatcacctttcaagggaaaaagtgaacacgtattccttgtatttctagtttgattaccaaacctgatgttacaaagaaacctccgttctgtagacagaatttcttttatttttcttcttttactcctcacaatcactttcccagtgccatcaccatctataaggtctcagagcagaggattattcatggtaataagtgggggtgtggtgcagccattccagtaacacccacaagaggacagctgttctgaatgtccccacccacccctctttcagtacaggtgagacattttcagttcatgagctccagaccaaatcccaggccagcccttgcaccaaaagccttttttagaaggcttatcagtctattaggaatgtctcaggaaagatgagccatttctttggggagaaatatatttacagatggaagtgtgtgactgcgtgtctgtgtgtgtgtgtggtgtgtgtgcgcacgtgagtgcgtgtgttcatctatgtgcatttcacttccataaagacccagcccaagctgctgggaaccatgtgttcctgagtattctcagaggttaaacaagtgacaagtgagcttctgaaattagtgtctcagcaagctggctttaggaatgagccccattttatcaagcagagaaaaaaaataacagcagaaaagataaagataaaccaaaaatatataccccccaatggaaaataatgttgattcagcaattcccataggatgtattacatgctctaatttattatattattatttatctgtctttgatctttgcccattgtactcttaaaaagatgttgggatgttgattgcgatttttaaacaactagataatgtataaatcagcagtggaaatcagttttaatgtgtggatgtgtctgattattgttaaatgcctctttttttactttttttttttttagatgtataatgtttcataaaccctggcactggtcacaaagctcagctgtgaaaatgaaatttgtagtatttttaaacatgaatgtcaatttcaagtgtatttgaaatggttcctccaggagagatatttgtgcaccattaggaaaatcttctctgcagaggaagtagccttctttggagaaaatggaaaatgggttctgatatgtgatctcagagtagcccatttcctagggcaccatggaaaacacaaatgtgatctttaagtatacctcttccccagtttggggaggaaaggactcagtttgcaccctttttgtatgtaaaataaaatgtcttacctttcttggctacttctgcttgtttggttggttgattggtttgtctgtttttaatctccctcggctcatttgtaattaacaatctagctaggactaactttgatgcgattcaagactcctgtgaacaaaaataatttggcattcttgtttcattccttggattaaatattgtcttctcctgtgagtcacttcaaaaataaatactgctgtctctcttcgagtgctgaa

SEQ ID NO: 1048 - protein, 422 aa, Homo sapiens
MDHPSREKDERQRTTKPMAQRSAHCSRPSGSSSSSGVLMVGPNFRVGKKIGCGNFGELRLGKNLYTNEYVAIKLEPIKSRAPQLHLEYRFYKQLGSAGEGLPQVYYFGPCGKYNAMVLELLGPSLEDLFDLCDRTFTLKTVLMIAIQLLSRMEYVHSKNLIYRDVKPENFLIGRQGNKKEHVIHIIDFGLAKEYIDPETKKHIPYREHKSLTGTARYMSINTHLGKEQSRRDDLEALGHMFMYFLRGSLPWQGLKADTLKERYQKIGDTKRNTPIEALCENFPEEMATYLRYVRRLDFFEKPDYEYLRTLFTDLFEKKGYTFDYAYDWVGRPIPTPVGSVHVDSGASAITRESHTHRDRPSQQQPLRNQVVSSTNGELNVDDPTGAHSNAPITAHAEVEVVEEAKCCCFFKRKRKKTAQRHK

SEQ ID NO: 1049 - DNA, 1345 bp, Homo sapiens
gagagaccttggagcgcgcgggaaagagaccaatataaactgtggcgggatagttttcgggtccttgtccagtgaaacaccctcggctgggaagtcagttcgttctctcctctcctctcttcttgtttgaacatggtgcggactaaagcagacagtgttccaggcacttacagaaaagtggtggctgctcgagcccccagaaaggtgcttggttcttccacctctgccactaattcgacatcagtttcatcgaggaaagagcatgtcctttgcaacctgatcacacaaatgatgaaaaagaatagaactttctcattcatctttgaataacgtctccttgtttaccctggtattctagaatgtaaatttacataaatgtgtttgttccaattagctttgttgaacaggcatttaattaaaaaatttaggtttaaatttagatgttcaaaagtagttgtgaaatttgagaatttgtaagactaattatggtaacttagcttagtattcaatataatgcattgtttggtttcttttaccaaattaagtgtctagttcttgctaaaatcaagtcattgcattgtgttctaattacaagtatgttgtatttgagatttgcttagattgttgtactgctgccatttttattggtgtttgattattggaatggtgccatattgtcactccttctacttgctttaaaaagcagagttagatttttgcacattaaaaaattcagtattaattaaacattacttattctaccctcttttttggcaaggaggacaaatacgcaatgttggaaaaccttggatggatatcttctctttaaaaaaatgtaaagataatttggtcttgagggtttaaacggttgataatgcctctacaacaacaagaaaaaagataaaatactaggatagaatcatggtgggcacagtggcttctcaggaggctgaggagggaggtttgcttgagtccaggagttggagaccagcccaggcaacatagcgtaaaccctatctctaaaacaatttttagccaggtgcggtggctcacgcctgtaatcccagcactctgggaggccgaggcgggtggatcatgaggtcaggagatcgagaccatcctgcctaacaaggtgaaaccccgtctctactaaaaatacaaaaaattagccgggcgcggtggcgggcgcctgtagtcccagctactcgggaggctgaggcaggagaatggcgtgaacccgggaagtggagcttgcagtgagccgagattgcgccactgcagtcggcagtccggcttgggcgacagagcgagactccgtctcaaaaaaaaaaaaaaaaaaaaaaaa

SEQ ID NO: 1050 - protein, 65 aa, Homo sapiens
MVRTKADSVPGTYRKVVAARAPRKVLGSSTSATNSTSVSSRKEHVLCNLITQMMKKNRTFSFIFE

SEQ ID NO: 1051 - DNA, 1508 bp, Homo sapiens
gagagaccttggagcgcgcgggaaagagaccaatataaactgtggcgggatagttttcgggtccttgtccagtgaaacaccctcggctgggaagtcagttcgttctctcctctcctctcttcttgtttgaacatggtgcggactaaagcagacagtgttccaggcacttacagaaaagtggtggctgctcgagcccccagaaaggtgcttggttcttccacctctgccactaattcgacatcagtttcatcgaggaaagctgaaaataaatatgcaggagggaaccccgtttgcgtgcgcccaactcccaagtggcaaaaaggaattggagaattctttaggttgtcccctaaagattctgaaaaagagaatcagattcctgaagaggcaggaagcagtggcttaggaaaagcaaagagaaaagcatgtcctttgcaacctgatcacacaaatgatgaaaaagaatagaactttctcattcatctttgaataacgtctccttgtttaccctggtattctagaatgtaaatttacataaatgtgtttgttccaattagctttgttgaacaggcatttaattaaaaaatttaggtttaaatttagatgttcaaaagtagttgtgaaatttgagaatttgtaagactaattatggtaacttagcttagtattcaatataatgcattgtttggtttcttttaccaaattaagtgtctagttcttgctaaaatcaagtcattgcattgtgttctaattacaagtatgttgtatttgagatttgcttagattgttgtactgctgccatttttattggtgtttgattattggaatggtgccatattgtcactccttctacttgctttaaaaagcagagttagatttttgcacattaaaaaattcagtattaattaaacattacttattctaccctcttttttggcaaggaggacaaatacgcaatgttggaaaaccttggatggatatcttctctttaaaaaaatgtaaagataatttggtcttgagggtttaaacggttgataatgcctctacaacaacaagaaaaaagataaaatactaggatagaatcatggtgggcacagtggcttctcaggaggctgaggagggaggtttgcttgagtccaggagttggagaccagcccaggcaacatagcgtaaaccctatctctaaaacaatttttagccaggtgcggtggctcacgcctgtaatcccagcactctgggaggccgaggcgggtggatcatgaggtcaggagatcgagaccatcctgcctaacaaggtgaaaccccgtctctactaaaaatacaaaaaattagccgggcgcggtggcgggcgcctgtagtcccagctactcgggaggctgaggcaggagaatggcgtgaacccgggaagtggagcttgcagtgagccgagattgcgccactgcagtcggcagtccggcttgggcgacagagcgagactccgtctcaaaaaaaaaaaaaaaaaaaaaaaa

SEQ ID NO: 1052 - protein, 111 aa, Homo sapiens
MVRTKADSVPGTYRKVVAARAPRKVLGSSTSATNSTSVSSRKAENKYAGGNPVCVRPTPKWQKGIGEFFRLSPKDSEKENQIPEEAGSSGLGKAKRKACPLQPDHTNDEKE

SEQ ID NO: 1053 - DNA, 2044 bp, Homo sapiens
ggacgtggggcttttgcagctcagctggttccggctggggaagatggcggtggctggggcggtgtccggggagccgctggtgcactggtgcacccagcagttgcggaagactttcggcctggatgtcagcgaggagatcattcagtacgttttgtcaattgagagtgctgaagagatacgagaatatgttactgatctcctccagggaaatgaaggcaaaaaaggtcaattcatagaagaacttataaccaaatggcaaaagaatgatcaggagttgatttcggatcctttgcagcagtgcttcaaaaaagatgaaattttagatgggcagaaatcaggcgaccatctaaagcggggtaggaagaaagggagaaacagacaggaagttcctgcatttactgaacctgacacgactgcagaggttaaaacaccttttgatttggccaaggcacaagagaacagcaactccgtaaagaagaagacaaagtttgtcaatttatacacaagagagggacaggacaggcttgcagtcctgctccctggtcgtcacccttgtgattgcctgggccagaagcacaagctcatcaataactgtctgatctgtgggcgcattgtctgtgaacaagaaggctcaggcccttgcttattctgtggcactctggtgtgtactcatgaggaacaagatattttacagcgtgactcaaacaagagccagaaactgctaaagaaactcatgtcaggagtggagaattctggaaaggtggacatctctaccaaggaccttcttcctcatcaagaattgcgaattaagtctggtctggagaaggctatcaagcataaagacaaactgttagagtttgacagaactagtattcgaaggacccaagtcattgatgatgagtcagattactttgccagtgattctaaccaatggttgtccaaacttgagcgggaaaccttgcagaagcgagaggaggagctgagagaacttcgacacgcctctcgactttctaagaaggtcaccattgactttgcaggaaggaagatcctggaagaagaaaattcactagcagagtatcatagcagactagatgagacaatacaggccattgccaatggaaccttgaaccagccactgaccaaattggatagatcttctgaagagcctttgggagttctggtaaatcccaacatgtaccagtcccctccccagtgggttgaccacacaggtgcagcctcacagaagaaggctttccgttcttcaggatttggactagagttcaactcatttcagcaccagttgcgaatccaggatcaagaatttcaggaaggctttgatggtggctggtgcctctctgtacatcagccctgggcttctctgcttgtcagagggattaaaagggtggagggcagatcctggtacaccccccacagaggacgactttggatagcagccacagctaaaaaaccctcccctcaagaagtctcagaactccaggctacatatcgtcttcttcgtgggaaagatgtggaatttcctaatgactatccgtcaggttgtcttctgggctgtgtggacctaattgactgcttgtcccagaagcaatttaaggagcagtttccagacatcagtcaagagtctgattctccatttgttttcatctgcaaaaatcctcaggaaatggttgtgaagtttcctattaaaggaaatccaaaaatctggaaattggattccaagatccatcaaggagcaaagaaggggttaatgaagcagaataaagctgtctgacccaggagaaaaggaactatacagcatagtggagttttgtgtactaaaattgctatctactggtcctttggaattgaagtagtagaaacctaaaggcttggcgtcaggcttgaatatctcagaacttaaactcttaccaaaatctgtatatttttcttaaggagtgggattcctactttatgtaatggggtcgaaatctttgaacacattatttataaaaacctgtttaaaaattctaaaaaaaaaaaaaaaaaa

SEQ ID NO: 1054 - protein, 581 aa, Homo sapiens
MAVAGAVSGEPLVHWCTQQLRKTFGLDVSEEIIQYVLSIESAEEIREYVTDLLQGNEGKKGQFIEELITKWQKNDQELISDPLQQCFKKDEILDGQKSGDHLKRGRKKGRNRQEVPAFTEPDTTAEVKTPFDLAKAQENSNSVKKKTKFVNLYTREGQDRLAVLLPGRHPCDCLGQKHKLINNCLICGRIVCEQEGSGPCLFCGTLVCTHEEQDILQRDSNKSQKLLKKLMSGVENSGKVDISTKDLLPHQELRIKSGLEKAIKHKDKLLEFDRTSIRRTQVIDDESDYFASDSNQWLSKLERETLQKREEELRELRHASRLSKKVTIDFAGRKILEEENSLAEYHSRLDETIQAIANGTLNQPLTKLDRSSEEPLGVLVNPNMYQSPPQWVDHTGAASQKKAFRSSGFGLEFNSFQHQLRIQDQEFQEGFDGGWCLSVHQPWASLLVRGIKRVEGRSWYTPHRGRLWIAATAKKPSPQEVSELQATYRLLRGKDVEFPNDYPSGCLLGCVDLIDCLSQKQFKEQFPDISQESDSPFVFICKNPQEMVVKFPIKGNPKIWKLDSKIHQGAKKGLMKQNKAV

SEQ ID NO: 1055 - DNA, 8192 bp, Homo sapiens
atgtccttgagcagtggagcctccggagggaaaggagtggatgcaaacccggttgagacatacgacagtggggatgaatgggacattggagtagggaatctcatcattgacctggacgccgatctggaaaaggaccagcagaaactggaaatgtcaggctcaaaggaggtggggataccggctcccaatgctgtggccacactaccagacaacatcaagtttgtgaccccagtgccaggtcctcaagggaaggaaggcaaatcaaaatccaaaaggagtaagagtggcaaagacactagcaaacccactccagggacttccctgttcactccaagtgagggggcagctagcaagaaagaggtgcaggggcgctcaggagatggtgccaatgctggaggcctggttgctgctattgctcccaagggctcagagaaggcggctaaggcatcccgcagtgtagccggttccaaaaaggagaaggagaacagctcatctaagagcaagaaggagagaagcgaaggagtggggacttgttcagaaaaggatcctggggtcctccagccagttcccttgggaggacggggtggtcagtatgatggaagtgcaggggtggatacaggagctgtggagccacttgggagtatagctattgagcctggggcagcgctcaatcctttgggaactaaaccggagccagaggaaggggagaatgagtgtcgcctgctaaagaaagtcaagtctgaaaagatggagtcccctgtttccacaccagcagtgctgccaatacaccttttggtgccagtggtcaacaatgacatctcatctccttgtgagcagatcatggttcgtacccgatcagttggggtcaacacatgtgatgtggctctggccacagagcctgagtgcttgggcccctgtgaacctggaactagcgtcaaccttgaaggcatcgtgtggcaggaaacagaagatgggatgttggtggtaaatgtaacgtggaggaacaagacatatgtaggtacactccttgactgcacacgacatgattgggcacccccaaggttctgtgactccccgaccagtgacctggaaatgcgcaatggccggggtagaggcaaacgcatgcgtcccaacagtaatacacctgtcaatgagacagccacagcctctgacagcaaagggaccagtaacagcagcaaaacccgggcaggagccaatagcaaaggccgtcggggcagccagaattcttcagagcaccgcccacctgccagcagcacttctgaggatgtcaaggccagcccttcctcagctaataagcggaaaaacaaacccctttcagacatggagctgaattctagctcagaggactccaaagggagcaagcgtgtccgtactaattccatgggctcagccactggcccccttcctgggacaaaggtagaacccactgttctggacagaaactgcccctcccccgtcctaattgactgtccccacccaaactgcaacaagaagtacaagcacatcaatggacttaagtaccaccaagctcatgcccatacagatgatgacagcaagccggaagcggatggggacagtgagtacggagaggaacctattctccatgcagatcttgggagctgcaacggtgcatctgtctcacaaaaaggttccttgtcccctgcccgctcagctacccccaaagttcgacttgtagagccccatagcccttctccttcaagcaaattcagcacaaaaggcctctgtaagaaaaagttgagtggggaaggggacacagaccttggggccttatccaatgatggctctgatgatggaccctcagtgatggatgaaacaagcaatgatgcctttgattctttagaaaggaagtgtatggaaaaagaaaaatgtaaaaaaccctctagtttaaaacctgaaaagattccttccaagagcctaaagtcagcccgtcccattgcccctgccatccccccacagcaaatctacaccttccagacagccaccttcacagcagcgagcccaggctcttcctcaggcttgaccgccacagtggcacaagccatgcccaacagtccccaactcaagcccattcagcccaagcccactgttatgggagaacctttcacagtcaaccctgccttgactccagccaaggacaagaaaaagaaagacaaaaaaaagaaggaatcttcaaaggaacttgaaagtcctctgacccctgggaaggtgtgtcgagcagaggaaggcaaaagcccattcagggaatcttcaggagatgggatgaaaatggaggggctcctaaatggctcatcagacccccaccaaagccgactggctagcatcaaggctgaagccgacaagatctacagtttcacggacaatgcccccagcccttccattggaggcagtagccgccttgaaaacactacccctactcagcccctgactcccttacatgtggtgacccagaatggagctgaagccagctcagtcaaaaccaacagccctgcatactctgacatctctgatgctggggaggatggggagggcaaggtagacagtgtcaaatcaaaggacgccgaacagttggttaaagaaggggctaagaaaactctttttccccctcagcctcagagcaaagactcaccatattaccaaggctttgagagttactattctccaagttatgcacagtccagccctggggctctgaaccccagcagccaggcaggagtggagagccaggccctgaagacaaaaagggatgaggaacctgagagcatagaagggaaagtgaagaacgatatctgtgaagaaaagaagcccgagctgagcagttccagtcagcagccctcggtcatccagcagcgtcccaatatgtacatgcagtccctgtactacaaccagtatgcctatgtacccccctatggctacagcgaccagagttaccacacccaccttctgagcactaacacggcttaccggcagcagtacgaagaacagcagaaacgccagagcttagagcagcagcagcggggagtggacaagaaggcagagatgggcctgaaggagcgggaggcagcactcaaggaagagtggaagcaaaagccgtcaattccaccaactctcaccaaggcccccagcctgacagacctggtgaaatcaggacctggcaaggccaaggagccaggggctgacccagccaaatcagtcatcattcccaagttagatgactcttcaaaactcccgggccaggcccctgaaggccttaaagtgaagctgagtgatgccagccacctaagcaaggaggcctctgaggccaagacaggtgctgagtgtggtcgacaggcagagatggatccaatactctggtaccgacaggaggcagagccccggatgtggacatatgtttatcctgccaagtactcagacatcaagtcagaggatgagcggtggaaggaggagcgggaccgcaaattgaaggaggaaaggagtcggagtaaggactctgtccccaaggaagatgggaaggaaagcacaagtagtgactgcaagctgcccacgtcagaggagtctcgccttgggagcaaggagccccggccaagtgtccatgtgcctgtgtcctccccacttacccagcaccagtcctacatcccctacatgcacggctattcctacagtcagtcctacgaccccaaccaccccagctaccggagcatgcctgctgtgatgatgcagaactacccaggttcctacctgccttccagctactctttttccccatatggcagcaaggtctcaggtggtgaagatgctgacaaggcacgagccagccccagtgtgacttgtaaatccagctcagagtccaaagccctggacatcttgcagcagcatgccagtcactacaagagcaagtctcccacgataagtgataaaacttctcaggagagagatcgaggaggctgtggggtggttgggggtggtggcagctgtagcagcgtcgggggagcaagtgggggtgaacggagtgttgaccggccccgcacctctccttcccagcgcctgatgtccacacaccaccaccaccaccacttggggtactcattgctcccagcacagtacaacttaccctatgcagcagggctttcttctacagccattgttgccagccaacaaggctcaactccctcactctacccaccccccaggaggtgagaatgacaccaagtgcccggataaagtcagcttcacgggcccggactggcttacccaaggaggtgctgaaggtgccgtttagacatcagttaaatggtgttgatcatcctgtttgccgtttccaccatgactgaaggcagacccttggctatctcacctccaccagacctccggactacctgaccctacctcttcctcaggagctggagagctggtacttagcaaaaatatttattctctcagccacagttatgactattgtggcctctgtggagatgaaggcacgggaagcaaccaggggaacatggcctcagcccagagaagccactgctctgttccccaagcccttggtctgctgctggagcagtaccagcccccccgcccaccagggagggacccccacccccaagcactgggtaaggtctgaagacagcacagcagccatacccctcaccatcattaccaccatcaccagattctgcatctccctagtgctttgcaccctgggaattggcagcatgtggaggaactagaatctcaggaaagaaattgggggttgttttctacataattgtgaaaacaaggtcttcaaatgtggagacttctccccatttacatgagcacatataaacgctcacaacctagcctggaaaggaagaccaaggcatctgccccaacatggccttgagctgcctgtgaggcagggggcaggggttccaacaccagcacagggctccccagggacactgggagcaagctggtgctggagcatgaatgacgtctgtgaagtagaacctgcgtccccactaagtcctgctgcttcttattccccaactccttgcccttttcccttccctcctaaccccttggtgcctttcccagggggatccccacactggtcttgcctcttcttttccactgcttggctcttaagcctcaggcagataaactagtattccccccagcttggggaaccttggagtctgccaggtcaccttagggcaaggcccagaaggcagcccctgggagcacccagcagttcttggagatgtcctgtcatctagccatctgatatcttcctcatttgaggccacagatatatacagcccaattcctctgtctacaagtacatgattttatatagctcagtctataacctccatgtgggccaatataagctgtgtttcttggtaacacatattttgtttgaggggccactggccatgggaggttatttgttccttagaccctggaataacacatccaagccattacttattagagtctcagaatgtactcagtggagctgtgctttgaggcagccaacatttctctgctctccttagaaatgcagtctcccaatggaagctttatactctttgtactgggaaagtgaggatgatttggtagctttattggggtcatgtcttccccaaggtgtggggagcttagcttacttggcttttgaggtatcatccctctgttctcccctcctatctttccatgaccctctggattgagagagagagataaagactgacagacaccagtgtaggctggaaaagggagtgtgtgaccagagtgccaaaagtgactaggagcaggaacttggctccgactcagtttggaaaatgggaaataggggacagtaagcacaatgcccagtagtagttgatttccaaggaccctggaaccctacacttgagaggcttagggtcaccatctgctcaagaggatcccctctgatctacaggccttttccctaggtttctgcctcctcgtttttgttcaagttgggttctgagtcctccccaaaaaccattgttttagacctcttggcagggccccaaaacagcctccctcatacccatcattccctctgccttctgctgccctcatgggcagtgctctgagcagtgacctccctttcctccgtggaagtagctagtgcagacaccgtcatcccaccccacctgagtcaccccaaccaagagggtgactgaatttcagcctgattatgccctcctggggctcctgtgaggtggagccaaggttccctctctgttcctgtttgtttttaaatattgttgtgtgttttgtatctgtggcactggcctgcagcatactctgtatatattgtaaagaaaccgttaggagtaattttcttttgcattgggcaggcatggccctgcattcctgccctttccactcattctgtaacacagaggacgaacttctgtattagctgggcagccttgggttctccagaagagaacaggtttttcttttcctttttaatttttcttcttaaacatttggctctttgatcctcatatccaagtctcccctgaagagtaggagctgctcagaagagcaggtgaaagccaccatggcagatcctgatgcctgccgggcctagtcttccctctgaaataacatgaagcagcagctgtggagattcttgacaagtgctgagtgaaagatttgctgcccacctctacatggggaggagaaacacaggtgggagctacctgtggcatccatgacctagtcagagggatgagatgctcagcaggggtccccatcctatcccaccccacaaacaaaggctggaaaaatttgctaccaagggccaagaccaccagaccaagcctgtttatgagccacccctgcccaggccctcacagacattgctcacggggcttcccatagaggagaagctaaagagggagggggcctcatccccagatagatcaggcaaggcttggagagctgctctttaggatccacatcaactacttcctcattttaaggtatggcagttcccttcatccccttttcctgccttgtacatgtacatgtatgaaatttccttctcttaccgaactctctccacacatcacaaggtcaaagaaccacacgcttagaagggtaagagggcaccctatgaaatgaaatggtgatttcttgagtctcttttttccacgtttaaggggccatggcaggacttagagttgcgagttaagactgcagagggctagagaattatttcatacaggctttgaggccacccatgtcacttatcccgtataccctctcaccatccccttgtctactctgatgcccccaagatgcaactgggcagctagttggccccataattctgggcctttgttgtttgttttaattacttgggcatcccaggaagctttccagtgatctcctaccatgggcccccctcctgggatcaagcccctcccaggccctgtccccagcccctcctgccccagcccacccgcttgccttggtgctcagccctcccattgggagcaggttggggcgagctggaggcccgggctggaggggcagtgttgctgttcatagattttgttccattggcgttgctctgttgaatttaatttcagtcttcctgattcttcccttctgtaaagtgtacattaccaagttccttgtttttttatatatatatataaatatatatatatacaaactgtactctttttgcctttgtacattcaggcaagaagagaaaataaatctttttaagagacaatcacaaatctgtgagggctgctggttatttctcctggagtttgctgctgagctgcctcttccttcctcccaattttcctgttctccctcagctctcctgatcttcctggccctgctccatatgcatcctcagcttcactttccctggctgatggcaagctgttgaatccagtgtccagactacctgccttgtaacccttttctgcccagcattgttttctggcttggccactggcttagcccaggagctttactctgtgccctggcctcccctctcttcacctttagatttccattcaccgaagtggctttggacccctgggtactctgggacctgtttcctggaggccctggcttgggacactcacctgtgaaactatgca

SEQ ID NO: 1056 - protein, 1411 aa, Homo sapiens
MSLSSGASGGKGVDANPVETYDSGDEWDIGVGNLIIDLDADLEKDQQKLEMSGSKEVGIPAPNAVATLPDNIKFVTPVPGPQGKEGKSKSKRSKSGKDTSKPTPGTSLFTPSEGAASKKEVQGRSGDGANAGGLVAAIAPKGSEKAAKASRSVAGSKKEKENSSSKSKKERSEGVGTCSEKDPGVLQPVPLGGRGGQYDGSAGVDTGAVEPLGSIAIEPGAALNPLGTKPEPEEGENECRLLKKVKSEKMESPVSTPAVLPIHLLVPVVNNDISSPCEQIMVRTRSVGVNTCDVALATEPECLGPCEPGTSVNLEGIVWQETEDGMLVVNVTWRNKTYVGTLLDCTRHDWAPPRFCDSPTSDLEMRNGRGRGKRMRPNSNTPVNETATASDSKGTSNSSKTRAGANSKGRRGSQNSSEHRPPASSTSEDVKASPSSANKRKNKPLSDMELNSSSEDSKGSKRVRTNSMGSATGPLPGTKVEPTVLDRNCPSPVLIDCPHPNCNKKYKHINGLKYHQAHAHTDDDSKPEADGDSEYGEEPILHADLGSCNGASVSQKGSLSPARSATPKVRLVEPHSPSPSSKFSTKGLCKKKLSGEGDTDLGALSNDGSDDGPSVMDETSNDAFDSLERKCMEKEKCKKPSSLKPEKIPSKSLKSARPIAPAIPPQQIYTFQTATFTAASPGSSSGLTATVAQAMPNSPQLKPIQPKPTVMGEPFTVNPALTPAKDKKKKDKKKKESSKELESPLTPGKVCRAEEGKSPFRESSGDGMKMEGLLNGSSDPHQSRLASIKAEADKIYSFTDNAPSPSIGGSSRLENTTPTQPLTPLHVVTQNGAEASSVKTNSPAYSDISDAGEDGEGKVDSVKSKDAEQLVKEGAKKTLFPPQPQSKDSPYYQGFESYYSPSYAQSSPGALNPSSQAGVESQALKTKRDEEPESIEGKVKNDICEEKKPELSSSSQQPSVIQQRPNMYMQSLYYNQYAYVPPYGYSDQSYHTHLLSTNTAYRQQYEEQQKRQSLEQQQRGVDKKAEMGLKEREAALKEEWKQKPSIPPTLTKAPSLTDLVKSGPGKAKEPGADPAKSVIIPKLDDSSKLPGQAPEGLKVKLSDASHLSKEASEAKTGAECGRQAEMDPILWYRQEAEPRMWTYVYPAKYSDIKSEDERWKEERDRKLKEERSRSKDSVPKEDGKESTSSDCKLPTSEESRLGSKEPRPSVHVPVSSPLTQHQSYIPYMHGYSYSQSYDPNHPSYRSMPAVMMQNYPGSYLPSSYSFSPYGSKVSGGEDADKARASPSVTCKSSSESKALDILQQHASHYKSKSPTISDKTSQERDRGGCGVVGGGGSCSSVGGASGGERSVDRPRTSPSQRLMSTHHHHHHLGYSLLPAQYNLPYAAGLSSTAIVASQQGSTPSLYPPPRR

SEQ ID NO: 1057 - DNA, 1906 bp, Homo sapiens
gcggcggcggcggcggcggcggtgacggccgggaagggtcagttggaggcaggcgctcgctgaggcaaaaggaggcgctcggcccgcggcctgacagggacttagcccgcagagatcgaccccgcgcgcgtgaccccacacccacccactcatccatctatccactccctgcgccgcctcctcccaccctgagcagagccgccgaggatgataaacacccaggacagtagtattttgcctttgagtaactgtccccagctccagtgctgcaggcacattgttccagggcctctgtggtgctcctgatgcccctcacccactgtcgaagatccccggtgggcgagggggcggcagggatccttctctctcagctctaatatataaggacgagaagctcactgtgacccaggacctccctgtgaatgatggaaaacctcacatcgtccacttccagtatgaggtcaccgaggtgaaggtctcttcttgggatgcagtcctgtccagccagagcctgtttgtagaaatcccagatggattattagctgatgggagcaaagaaggattgttagcactgctagagtttgctgaagagaagatgaaagtgaactatgtcttcatctgcttcaggaagggccgagaagacagagctccactcctgaagaccttcagcttcttgggctttgagattgtacgtccaggccatccctgtgtcccctctcggccagatgtgatgttcatggtttatcccctggaccagaacttgtccgatgaggactaatagtcatagaggatgctttacccaagagccacagtgggggaagaggggaagttaggcagccctgggacagacgagagggctcctcgctgtctagggaaggacactgaggggctcagggtgagggttgcctattgtgttctcggagttgactcgttgaaattgttttccataaagaacagtataaacatattattcacatgtaatcaccaatagtaaatgaagatgtttatgaactggcattagaagctttctaaactgcgctgtgtgatgtgttctatctagcctaggggaggacattgcctagagggggagggactgtctgggttcaggggcatggcctggagggctggtgggcagcactgtcaggctcaggtttccctgctgttggctttctgttttggttattaagacttgtgtattttctttctttgcttcctgtcaccccaggggctcctgagtataggcttttcagtccctgggcagtgtccttgagttgttttttgacactcttacctgggcttctctgtgtgcatttgcgtctggcctggagtaagcaggtccgacccctcgttctttacagcttagtgttattctggcatttggttaagctggcttaatcttgtttaatgttatcagtacattttaaataggggcattgaaatttactcccaccaccagggcttttttgggggatgcctgggcctttaaaacactagccaaactctaattaattctcaaatcactgccaggagttcttgctcctggctgcaggcccaggccccaaggtctccttcttggggtcacaaacagcagtaaggaagaggaatatatagcaactcagggcctgggaattgtggggcaatccgttcttagggactggatacttctggctggctgagtatagtactagctgcctccccaccaggttccgagtagtgtctgagactctgctctgcagggcctagggtagcgctgggagtgtagaagtggcctgcccttaactgttttcactaaacagctttttctaaggggagagcaagggggagagatctagattgggtgagggggacggggatgtcagggaggcaagtgtgttgtgttactgtgtcaataaactgatttaaagtt

SEQ ID NO: 1058 - protein, 189 aa, Homo sapiens
MINTQDSSILPLSNCPQLQCCRHIVPGPLWCSDAPHPLSKIPGGRGGGRDPSLSALIYKDEKLTVTQDLPVNDGKPHIVHFQYEVTEVKVSSWDAVLSSQSLFVEIPDGLLADGSKEGLLALLEFAEEKMKVNYVFICFRKGREDRAPLLKTFSFLGFEIVRPGHPCVPSRPDVMFMVYPLDQNLSDED

SEQ ID NO: 1059 - DNA, 2019 bp, Homo sapiens
gaaaaggcggaggcggcggcccctccggctcccactgcctcccccgccgcaccccctccccaccttccgcacccgccaaacttgatgtgaccctggcccgacgcggaggctgcccctctcactgccccgtgggtcccccgccacccgctccgcacccgcgagcgcaccgctccccgcgccccttcccacttcccgcggggccggcgccgcgctcgccctcgcgttccttcccgccgccccctcccccgcaccatgagcaacctgaagccggacggcgagcacggcggcagcaccggcaccggctccggcgcgggctccggcggcgccctggaggaggaggtccggacactgtttgtcagcggcctccctgtggacattaaacccagagaactctacttgctcttccggccgttcaaggggtatgaagggtccctgatcaagctcactgcaagacagcctgttggttttgtgatctttgacagccgtgcaggagcagaagcggccaagaatgcgctgaacggtattcgctttgatcccgaaaatccacagactctgaggctagagtttgccaaagccaacaccaagatggccaagagcaagctaatggcaactccaaatcccagcaacgtgcaccccgccctaggagcacacttcatcgcacgggacccctatgacctgatgggggctgctctgatccctgcatccccagaggcctgggccccctaccctttgtacaccacagagctgaccccagccatctcccatgctgcgttcacctacccaactgccactgccgctgccgccgccctccacgctcaggtgcgctggtacccttcctctgacaccacccagcaaggatggaagtaccgtcagttctgttagtttttcagtctggtcaccggggaggtggttctggtaatctgtggtggtgccgggacaggcgccccgagttcccactgcccccgggcggcctgcacagagctgctgccctccagagactgtgaatcccaagcctgactcagtggactgcttcctgttcccctccctcctcttcctcaccttgttctgcaccctcaagcctttctccaatgcctcccaggaggatttggggactttctccctggggcgcccagatccagctcggaggcctcactgggacctggcaaggcctgacctcccgcccaaacttgcttctgtagctccccctcgaggaagtgaggtgtttaattttgcatgttttctggcatgaattaagacacttatacttgtatatatgagtgtacagtttgttctcacactgtcaccatagcgacaggtcctggctcccagtggttcatcctgcctgcccctctctcctcgccccgcccctgcacccaccccgcttcagggaggcccaagttccgtggccccacacgcttccaggctcagctcccacctccacccaacagatagatggggtttgctttttcatttcacatggggctcctccgctcctgccttctcggatgggccaacagtcgtaagaaagccctctctgcccgttctgttcacctctccacagcgcaccccgcccgccgctgctcctcattctttccaaacctcgaaaccaaccaaaacgtgagaagtatttttgtaccctgtgtaacaaaatatttatgcatcataaaggatttttcatgtgcgtaccattaattattaaagcgacctcgttcgccctgtcagataagtttaatgtttagtttgaggcatgaagaagaaaagggtttccattcttcagcagtacgcctttgtgtctggcatttgtttaagaaaatgaaatgaaggaaacactgtgcaatgttttttgttttgagcatatcagtgctttactgtcagccgcagctgtgaccgtctggccatttcagacttgggagatgaggcggctgttgtcattgctgatcctgtgagaatgtgaaactggataatatatgaaatgcaaaataaaacaaaaccaaaaaaaaaaaaaaaaaaaaaaaaaaa

SEQ ID NO: 1060 - protein, 209 aa, Homo sapiens
MSNLKPDGEHGGSTGTGSGAGSGGALEEEVRTLFVSGLPVDIKPRELYLLFRPFKGYEGSLIKLTARQPVGFVIFDSRAGAEAAKNALNGIRFDPENPQTLRLEFAKANTKMAKSKLMATPNPSNVHPALGAHFIARDPYDLMGAALIPASPEAWAPYPLYTTELTPAISHAAFTYPTATAAAAALHAQVRWYPSSDTTQQGWKYRQFC

SEQ ID NO: 1061 - DNA, 2659 bp, Homo sapiens
gccacaggccggctacgatctgcttgttcatctgagtgtcggcacaaaccagcagaggcggtgacgatgctctcgggcatagaggcggcggcaggggaatatgaggactcggagctgcggtgccgcgtggctgtggaggagctgagcccgggcgggcagccgcgaaggcgccaggccctgcgcaccgcggagctgagcctgggtcgcaacgagcgccgcgagttgatgctgcggctgcaagcgccagggcccgcggggcggccgcgctgctttcctctgcgcgccgcgcgcctcttcacgcgtttcgccgaggccgggcgcagcaccctgcggctccccgcccacgacacccccggggccggcgcagtgcagctgctgctctcggactgccccccagaccgcctgcgccgcttcctgcgcacattgcgcctcaagctggctgcggccccgggtcccgggccggcctccgcccgagcgcagctgctgggcccgcggccccgcgacttcgtcaccatcagccctgtgcagcccgaggagcggcggctcagggcggccacccgggttccggacactacgctggtgaagcggcctgtggagccccaggctggggccgagcctagcacagaagccccaaggtggcccctgcctgtgaagaggctgagcttgccctccaccaagccacagctttctgaggaacaggctgctgtgctgagggccgtcctgaaaggccagagcatcttcttcactgggagtgcaggaacagggaagtcatatctgctaaagcgaatcctgggctcactgccccccacaggcactgtggccactgccagcactggggtggcagcctgccacatcgggggcaccaccctccatgcctttgcaggcatcggctcaggccaggctcctctagcccagtgtgtggccctggcccaaaggccaggcgtgcggcagggctggctgaactgccagcggttggtcattgacgagatctcaatggtggaggcagacctgtttgacaaactggaggccgtggccagagctgtccggcagcagaacaagccattcggagggatccagctcatcatctgtggggactttctgcagctgccacctgtgaccaagggctcccagcccccacggttctgcttccagtccaagagctggaagaggtgtgtgccagtgaccctggagctgaccaaggtgtggaggcaggcagaccagaccttcatctctctactgcaggccgtgaggctaggcaggtgttcagatgaggtgacccgccagctccaggccacagcttcccacaaggtggggcgagatgggattgtggccacgaggctctgcacccaccaggatgatgtggccctcaccaacgagaggcggcttcaggagctgccaggtaaggtacacagatttgaggctatggacagcaaccctgagctggccagtaccctggatgcccagtgtcctgttagccagctccttcaactaaagctgggggcccaggtgatgctggtgaaaaacttatcggtgtctcggggcctggtgaatggtgcccgaggggtggtagttgggttcgaggcagaagggagagggctaccccaggtgcggttcctgtgtggagtcactgaggtcatccacgctgaccgctggacggtgcaggccaccgggggccagctcctcagtcggcagcagctgcccctccagctggcctgggcgatgtccatccacaagagccaaggcatgaccctggattgtgtggagatttctctgggccgtgtgtttgccagtggccaggcctatgtggccctttctcgggcccgcagcctgcagggcctacgtgtgctggactttgaccccatggcggttcgctgtgacccccgtgtgctgcacttctatgccaccctgcggcggggcaggagcctcagtctggagtccccagatgatgatgaggcagcctcagaccaggagaacatggacccaatcctctgagcctcacccacaaagagaagacaaagggtggcctgtggcctccccgtcctcctgctccctagtggcccagggccccagggaataactggagtaggcaggcagtgtccccttctgtattttttagggactctcagcctcctggcagggttaaagggagagtactttaaacccatataccagctgtgcttcagtttctctcactttgccctgggtaagctgctgtagggtcagaagtaaccctttctgtgccagttgagaatgagcctgtgtggtagctgatgtcagaggacaaagctctctgcaagggctggacacagagctgcagagtcctgaacatccctcctttcaggctgcagaagggagaggcaatgaagacaggtgctccggaagcagcatcagggctcttggaggggactggtggggactcaggctgggtgcagcctccaaacagagaacggaacttaggtgtgtctctacagctaggcccagcctagcccagcccagaacaaacacccttcagagcctaaccaaagaacataagctgcaaaatgtgcacccatattttaagctgctttttcaggggataaatagtgtttggggacattgaaatggatgttctcaggttgtatttatttcggacaaataaactagagaattgtgtaaaaaa

SEQ ID NO: 1062 - protein, 641 aa, Homo sapiens
MLSGIEAAAGEYEDSELRCRVAVEELSPGGQPRRRQALRTAELSLGRNERRELMLRLQAPGPAGRPRCFPLRAARLFTRFAEAGRSTLRLPAHDTPGAGAVQLLLSDCPPDRLRRFLRTLRLKLAAAPGPGPASARAQLLGPRPRDFVTISPVQPEERRLRAATRVPDTTLVKRPVEPQAGAEPSTEAPRWPLPVKRLSLPSTKPQLSEEQAAVLRAVLKGQSIFFTGSAGTGKSYLLKRILGSLPPTGTVATASTGVAACHIGGTTLHAFAGIGSGQAPLAQCVALAQRPGVRQGWLNCQRLVIDEISMVEADLFDKLEAVARAVRQQNKPFGGIQLIICGDFLQLPPVTKGSQPPRFCFQSKSWKRCVPVTLELTKVWRQADQTFISLLQAVRLGRCSDEVTRQLQATASHKVGRDGIVATRLCTHQDDVALTNERRLQELPGKVHRFEAMDSNPELASTLDAQCPVSQLLQLKLGAQVMLVKNLSVSRGLVNGARGVVVGFEAEGRGLPQVRFLCGVTEVIHADRWTVQATGGQLLSRQQLPLQLAWAMSIHKSQGMTLDCVEISLGRVFASGQAYVALSRARSLQGLRVLDFDPMAVRCDPRVLHFYATLRRGRSLSLESPDDDEAASDQENMDPIL

SEQ ID NO: 1063 - DNA, 3675 bp, Homo sapiens
cttggccgggcgtagacgcggtggcagagcccgcgcggcgctggaagcgagtggcggagcggcgggacctcggcggactcgccatggaggaggagggtgtgaaggaagccggtgagaagcctcggggagcacagatggtggacaaggctggctggatcaagaagagcagtgggggcctcctgggtttctggaaagaccgatatctgctcctctgccaggcccagctgctggtctatgagaatgaggatgatcagaagtgtgtggagactgtggagctgggcagctatgagaagtgccaggaccttcgtgccctcctcaagcgaaaacaccgctttatcctgctgcgatccccagggaacaaggtcagcgacatcaaattccaggcacccaccggggaggagaaggaatcctggatcaaagccctcaatgaagggattaaccgaggcaaaaacaaggctttcgatgaggtaaaggtggacaagagctgcgccctggagcatgtgacacgggaccgggtgcgagggggccagcgacgccggccaccaacgagagtccacctgaaggaggtggccagtgcagcttctgacggtcttctgcgcctggatcttgatgttccggacagtgggccaccagtgtttgcccccagcaatcatgtcagtgaagcccaacctcgggagacaccccggcccctcatgcctcctaccaagcctttcctagcacctgagaccaccagccctggtgacagggtggagacccctgtgggggagagagccccaacccctgtctcagcaagctctgaggtctcccctgagagccaagaggactcagagaccccagcagaggaggacagtggctctgagcagcctcccaacagcgtcctgcctgacaaactgaaggtgagctgggagaaccccagcccccaggaggcccctgctgcagagagtgcagaaccgtcccaggcaccctgttctgagacttctgaggctgcccccagggagggtgggaagccccctacacccccacccaagatcttatcagagaaactgaaagcctccatgggtgagatgcaggcttctgggccacctgctccaggcacagtgcaggtctcagtgaatggcatggatgacagtcctgagcctgccaagccctctcaggctgagggcaccccaggaactcctccaaaggatgcaacaacatccacagcactgcccccctgggacctgccacctcagttccatccccgctgctcctcccttggggacttgcttggggaaggcccgcggcatcccttgcagcccagggaacggctatatcgggcccagctggaggtgaaggtggcctcggaacagacggagaaactgttgaacaaggtgctgggcagtgagccggcccctgttagtgccgaaacattgctcagccaggctgtggagcagctgaggcaggccacccaggtcctgcaggaaatgagagatttgggagagctgagccaggaagcacctgggctaagggagaagcggaaggagctggtgaccctctacaggagaagtgcaccctagggccttctgggccagaggcaccatcccttctggccatccatcaagtccatcaaggcccagccctgctgagaaatgtgcttctgcttctacagcaatggctgcaggagggccattgggcatgtcagggtttggccatgacccgaagagactcctggcgtccttcctactctgctctggccagtggtgccaggtgccacccagggctactgcctggctatctggcctggcctctgggctggggctggggctgggagcacacacgctgggacctatgtgtttgtgtggtcgttccaaactgccccagggctttgggggcggcacttggggtttctgggaatgacatcatctctgttccccatccccagtagtttacattcctgacttctgaatacagcacagctgagccccctgcagctcccatctccagctattcctaggcaaagagcctcatggctaaggcagcctcaaagccagcccctcctcccacctattctgagtagctgcagaggccttgggtccaggctctaggttcatccctcagttggggggaacgtaggacccagctggagcctcttgagggagatgagaggcctctttgtgaggaggacattagctgtgtggcctctctctctttggccctgtttccttttttgcaaaacaaggacattttctgcagccccttcctctcagtgagctatgattggagggcttaggtctggaggattcaagagtggaagaggaatttaaggggtcccctagtctagtctctgcccctggatagtgtccagccttgtatatttctgaagaggtggatcccagagtggctctgatgtccacattagaaaagcttacttgtaatgatcatgtcagccttcagaagagaatccccaccaacttctgtgcctcctcagatggggatttatctggatctctgtggttccttctcagccgaaacaggtccagtatcccagtcatttcttcaaatgctgataggggtatgttggaatccgaagccacttccccgccttcaagccccagatgggctgctctcctgtaactttctaggagaagagacattttcttctttccctttcctggtccatccctgcaccctggtcctctcccagcctctcccccacattgtccctgactctaggggcacatccagtctccatcgtgctgcagcagctggactgagggcagagcctgtaggtgcagaggccctggctcccgaggtccagccactctccctggggcctctggggtgagagcagcttccgataggacctgcccagatttctgcatgtgcacttttgtttactgaaagagagaaaggggggggtcacagcaacatgccctggcctttctgccctgttccccaaccccactgaggcctgctgcacaggtcaatgccttcgttatcgttattgtactgtcactttgttcttgaggtagtagtcaaggatcaggaggggcagatgtcttctctgggctgcgtggggccggagcagaggtgagcagcaatgcactggttcgggagcccccatcagcctccttgtgcaaactgggcccccatgccacagtctggctttccctccatctgccccaggacaagagcaagaaggacatcagttgcccagtcatgtgatcccctgccatcttgccttaggaacagccttcccccaccagcagccatggctggctggggcgttagccaagccacctactgccaggaattggagcctcagttccctcctgtgtcaagtagctaactgcagcagctggactgagggcagagtctgtgggtgcagagaccctgcatgtaggtcacaggttgaggcccagccactctccctggggcctggtgggtaggcaagtagctctggggccacctcaagtgaccaaatgctattaatttccatcctttagcaggctgggccctaggcaggaagctggcttctgggagaggagtgagaacgtgcagggcctgcctagcttgcgtgcttgaggaaggtggcattccgtgcttgcctccttgaggagggtggcattctgtgtcttctgcttatgaagcgcctttcttaaagtttggcaataaaatccatttttatggaaaaaa

SEQ ID NO: 1064 - protein, 490 aa, Homo sapiens
MEEEGVKEAGEKPRGAQMVDKAGWIKKSSGGLLGFWKDRYLLLCQAQLLVYENEDDQKCVETVELGSYEKCQDLRALLKRKHRFILLRSPGNKVSDIKFQAPTGEEKESWIKALNEGINRGKNKAFDEVKVDKSCALEHVTRDRVRGGQRRRPPTRVHLKEVASAASDGLLRLDLDVPDSGPPVFAPSNHVSEAQPRETPRPLMPPTKPFLAPETTSPGDRVETPVGERAPTPVSASSEVSPESQEDSETPAEEDSGSEQPPNSVLPDKLKVSWENPSPQEAPAAESAEPSQAPCSETSEAAPREGGKPPTPPPKILSEKLKASMGEMQASGPPAPGTVQVSVNGMDDSPEPAKPSQAEGTPGTPPKDATTSTALPPWDLPPQFHPRCSSLGDLLGEGPRHPLQPRERLYRAQLEVKVASEQTEKLLNKVLGSEPAPVSAETLLSQAVEQLRQATQVLQEMRDLGELSQEAPGLREKRKELVTLYRRSAP

SEQ ID NO: 1065 - DNA, 3126 bp, Homo sapiens
agcgcgcgcaggggctgcggagcggcaggatgcaggaggagctggcgtgggagaccgacggcctgcttcctctggagaggcagctccacgaggccgcccgccagaacaatgtcggcaggatgcaggagctgattgggaggagggttaacaccagggccagaaaccacgtgggcagggtggccctgcactgggctgcaggtgcagggcacgagcaggctgtgcgtctgcttctggagcacgaggctgctgtggacgaggaggatgcggtaggggccctcacagaggcacgtctgtgttttgggatgaatgcgcttctcctgtctgcctggttcggccacttacgaatcctccagatcttggtaaactcaggggccaagatccactgtgagagcaaggatggcctgaccttactgcactgcgcagcccaaaaaggccatgtgcctgtgctggcgttcataatggaggacctggaggatgtggccctggaccacgtagacaagctggggaggacggcgtttcacagggcagctgagcacgggcagctggatgctctggacttcctcgtgggctctggctgtgaccacaatgtcaaagacaaggaggggaacactgcccttcatctggctgctggtcggggccatatggctgtgctgcagcgacttgtggacatcgggctggacctggaggagcagaatgcggaaggtctgactgccctgcattcggctgctggaggatcccaccctgactgtgtgcagctcctcctcagggctgggagcaccgtgaatgccctcacccagaaaaacctaagctgccttcactatgcagccctcagtggctcggaggatgtgtctcgggtcctcatccacgcaggaggctgcgccaacgtggttgatcatcagggtgcctctcctctgcacctcgctgtgaggcacaacttccctgccttggtccggctcctcatcaactccgacagtgacgtgaatgccgtggacaataggcagcagacgccccttcacctggctgcagagcacgcctggcaggacatagcagatatgctcctcattgctggggttgacttaaacctgagagataagcagggaaaaaccgccctggcagtggctgtccgcagcaaccatgtcagcctggtggacatgatcataaaagctgatcgtttctacagatgggagaaggaccaccccagtgatccctctgggaagagcttgtcctttaagcaggaccatcggcaggaaacacagcagctccgttctgtgctgtggcggctggcctccaggtatctgcagccccgtgagtggaagaagctggcatattcctgggagttcacggaggcacatgtcgacgccatcgagcaacagtggacaggcaccaggagctatcaggagcacggccaccgaatgctgctcatttggctgcatggcgtggccacggctggtgagaaccccagcaaagcgctgttcgagggcctcgtggccattggcaggagggacctggctggctggagtacaatggcgagatctcagctcacggcaacctccgcctcccgggttcaaatgattctcgtgcctcagcctcccgagtagctgggattacaggtgcatgccatcacagctggctaatttttgtatttttagtagagatggggtttggccatgatggccaggctggaaaattgaaacataatttcacaattattcctttttccaccttaaataataagagtagaatactttctgtgtttttatcttatacacatgaataaatgctatggcttatcacagttacaatgtgttttctgaaagtaaagattattttaccttgaaattacaaaaattattttcagttttccaaaattctatcatctttaaacctaaataattcaatttcatggatgcacaaatgtttattgagagtctcatattcatgcttttcttcacagcactataaagttggacttggaaaatttggacagccatttgccattgtaatttttattcttttttctcctgattatttgacaaaacttgtatccacattgtagctgttcatgtgtctgcttctattgcatattgtaaaattattaactacttcccaaaatagtatttctctcagcagatatttctttggtactaccatgtattgtgtaacttttgggaaagtaaggtggcttccctgctctcagtgaagcattttattaaaagaataattataattaaaaaaacacgatacagatcagtgcatatagtatattactaatagtatgctgttaattgtgtaagaaagaaaggaaattagaaaacatatttgcataaataaaagctagacaaaggctaagaaactaatcaggtggtttccctggggtagtaggataatggggaacagtggggctgggaccgggtgggagaaagagttctcagtggttcctttctatacagttttaacttttgaaatgtgtgagagtgttacttactgaaaactgaaaggatatgacatgctggaacaggcaaaactacaaagacagtaaaaagatcagtgatttccaggagctgcaagggcagtgagaggaagggagggatgaggaggtggagtgcaggggatgttagggcagtgaaaggttctgtatgacactgtgatggtgggtacatgacattgggcattggtcaaaacccatagcatgtacagcacaaagcgtttgctctaatgtgagctatggactttagttaatagtaacgtgtcaatattggttcatcagttgtatcaaatgtaccacactgatgccagatgttaataatcggggaaactgtgtgtgctgaagagtacgtgggagctctctgtgctatctgctcaatttttctctaaacctaaaactgttctaaaatagaaagtctgtgaaaaaaaacaaaagtaaagttataaaaggaaaagaaaacagaggctttaaattaaatcatctattccttgggaaaggtattttgtaccatatgggactgaaatcatttctctggatgaattttataaaatgaattttgtaatttttttctgagaaaaaaaagttcttaaatacaataaaattgaaatgttgaaatatatctctcaaaaaaaaaaaaaaaa

SEQ ID NO: 1066 - protein, 522 aa, Homo sapiens
MQEELAWETDGLLPLERQLHEAARQNNVGRMQELIGRRVNTRARNHVGRVALHWAAGAGHEQAVRLLLEHEAAVDEEDAVGALTEARLCFGMNALLLSAWFGHLRILQILVNSGAKIHCESKDGLTLLHCAAQKGHVPVLAFIMEDLEDVALDHVDKLGRTAFHRAAEHGQLDALDFLVGSGCDHNVKDKEGNTALHLAAGRGHMAVLQRLVDIGLDLEEQNAEGLTALHSAAGGSHPDCVQLLLRAGSTVNALTQKNLSCLHYAALSGSEDVSRVLIHAGGCANVVDHQGASPLHLAVRHNFPALVRLLINSDSDVNAVDNRQQTPLHLAAEHAWQDIADMLLIAGVDLNLRDKQGKTALAVAVRSNHVSLVDMIIKADRFYRWEKDHPSDPSGKSLSFKQDHRQETQQLRSVLWRLASRYLQPREWKKLAYSWEFTEAHVDAIEQQWTGTRSYQEHGHRMLLIWLHGVATAGENPSKALFEGLVAIGRRDLAGWSTMARSQLTATSASRVQMILVPQPPE

SEQ ID NO: 1067 - DNA, 3796 bp, Homo sapiens
aacgaaccggaagtgctaaagcctccgaggccaaggccgctgctactgccgccgctgcttcttagtgccgcgttcgccgcctgggttgtcaccggcgccgccgccgaggaagccactgcaaccaggaccggagtggaggcggcgcagcatgaagcggcgcaggcccgctccatagcgcacgtcgggacggtccgggcggggccggggggaaggaaaatgcaacatggcagcagcaatggaaacagaacagctgggtgttgagatatttgaaactgcggactgtgaggagaatattgaatcacaggatcggcctaaattggagcctttttatgttgagcggtattcctggagtcagcttaaaaagctgcttgccgataccagaaaatatcatggctacatgatggctaaggcaccacatgatttcatgtttgtgaagaggaatgatccagatggacctcattcagacagaatctattaccttgccatgtctggtgagaacagagaaaatacactgttttattctgaaattcccaaaactatcaatagagcagcagtcttaatgctctcttggaagcctcttttggatctttttcaggcaacactggactatggaatgtattctcgagaagaagaactattaagagaaagaaaacgcattggaacagtcggaattgcttcttacgattatcaccaaggaagtggaacatttctgtttcaagccggtagtggaatttatcacgtaaaagatggagggccacaaggatttacgcaacaacctttaaggcccaatctagtggaaactagttgtcccaacatacggatggatccaaaattatgccctgctgatccagactggattgcttttatacatagcaacgatatttggatatctaacatcgtaaccagagaagaaaggagactcacttatgtgcacaatgagctagccaacatggaagaagatgccagatcagctggagtcgctacctttgttctccaagaagaatttgatagatattctggctattggtggtgtccaaaagctgaaacaactcccagtggtggtaaaattcttagaattctatatgaagaaaatgatgaatctgaggtggaaattattcatgttacatcccctatgttggaaacaaggagggcagattcattccgttatcctaaaacaggtacagcaaatcctaaagtcacttttaagatgtcagaaataatgattgatgctgaaggaaggatcatagatgtcatagataaggaactaattcaaccttttgagattctatttgaaggagttgaatatattgccagagctggatggactcctgagggaaaatatgcttggtccatcctactagatcgctcccagactcgcctacagatagtgttgatctcacctgaattatttatcccagtagaagatgatgttatggaaaggcagagactcattgagtcagtgcctgattctgtgacgccactaattatctatgaagaaacaacagacatctggataaatatccatgacatctttcatgtttttccccaaagtcacgaagaggaaattgagtttatttttgcctctgaatgcaaaacaggtttccgtcatttatacaaaattacatctattttaaaggaaagcaaatataaacgatccagtggtgggctgcctgctccaagtgatttcaagtgtcctatcaaagaggagatagcaattaccagtggtgaatgggaagttcttggccggcatggatctaatatccaagttgatgaagtcagaaggctggtatattttgaaggcaccaaagactcccctttagagcatcacctgtacgtagtcagttacgtaaatcctggagaggtgacaaggctgactgaccgtggctactcacattcttgctgcatcagtcagcactgtgacttctttataagtaagtatagtaaccagaagaatccacactgtgtgtccctttacaagctatcaagtcctgaagatgacccaacttgcaaaacaaaggaattttgggccaccattttggattcagcaggtcctcttcctgactatactcctccagaaattttctcttttgaaagtactactggatttacattgtatgggatgctctacaagcctcatgatctacagcctggaaagaaatatcctactgtgctgttcatatatggtggtcctcaggttgctattgctggggccccagtcactctgtggatcttctatgatacaggatacacggaacgttatatgggtcaccctgaccagaatgaacagggctattacttaggatctgtggccatgcaagcagaaaagttcccctctgaaccaaatcgtttactgctcttacatggtttcctggatgagaatgtccattttgcacataccagtatattactgagttttttagtgagggctggaaagccatatgatttacagatctatcctcaggagagacacagcataagagttcctgaatcgggagaacattatgaactgcatcttttgcactaccttcaagaaaaccttggatcacgtattgctgctctaaaagtgatataattttgacctgtgtagaactctctggtatacactggctatttaaccaaatgaggaggtttaatcaacagaaaacacagaattgatcatcacattttgatacctgccatgtaacatctactcctgaaaataaatgtggtgccatgcaggggtctacggtttgtggtagtaatctaataccttaaccccacatgctcaaaatcaaatgatacatattcctgagagacccagcaataccataagaattactaaaaaaaaaaaaaaaaaaaagacattagcaccatgtattcatactaccctattttcacttttaatagtattataaacttcatgaacttaattagtgtatttttacagtatacttttgagtttgttaaaatatgatgatattagtgattggtttggttcagttccagaatctttgactagttacagatttgatagcacttaaatgtaattgaatagcttatgcttcattgcttgggcatatccagcatgttatgaactaataactattaaacttgacttaaccagtcattcattaataatttttcaaggataacttagtggcctcctaaagacacttgttttggcactgaccagtttttagccaatttaatctgtatctagtataaataattctcatttttctttgatgatattaacagagtgggcttttccttttgcataaaggctagtaactgtatatgtagcatggatttaattagtcatgatattgataattacaggcagaaaatttttaatcaaatgattagagcttaaatatttgcaggcaagtttttttttttcctttaagaaaaggaaaaagtacacattcactagaattcttcagaaaatttagtggtgccagtttccatttggtatttccttattaaaatattctagaattttaaggagattgaagggaatcacagtggggtggggagacctgggtttggggaatgacagagagaagaggtggtgagggcctgattaaaaactaagcagaagtagttttaacaaaaatactcatgaaaatgtttggaaactgaaatttaaacaactgtaatattaaggaaaccagaatcaataaatcactgtcttgccagcacagctacagagtaacatgattcaggggaggaaaagttccttagagttacttttataattctttttttttttcctcttaggtttagaaatcttacaaatttaaactttatcctttta

SEQ ID NO: 1068 - protein, 782 aa, Homo sapiens
MAAAMETEQLGVEIFETADCEENIESQDRPKLEPFYVERYSWSQLKKLLADTRKYHGYMMAKAPHDFMFVKRNDPDGPHSDRIYYLAMSGENRENTLFYSEIPKTINRAAVLMLSWKPLLDLFQATLDYGMYSREEELLRERKRIGTVGIASYDYHQGSGTFLFQAGSGIYHVKDGGPQGFTQQPLRPNLVETSCPNIRMDPKLCPADPDWIAFIHSNDIWISNIVTREERRLTYVHNELANMEEDARSAGVATFVLQEEFDRYSGYWWCPKAETTPSGGKILRILYEENDESEVEIIHVTSPMLETRRADSFRYPKTGTANPKVTFKMSEIMIDAEGRIIDVIDKELIQPFEILFEGVEYIARAGWTPEGKYAWSILLDRSQTRLQIVLISPELFIPVEDDVMERQRLIESVPDSVTPLIIYEETTDIWINIHDIFHVFPQSHEEEIEFIFASECKTGFRHLYKITSILKESKYKRSSGGLPAPSDFKCPIKEEIAITSGEWEVLGRHGSNIQVDEVRRLVYFEGTKDSPLEHHLYVVSYVNPGEVTRLTDRGYSHSCCISQHCDFFISKYSNQKNPHCVSLYKLSSPEDDPTCKTKEFWATILDSAGPLPDYTPPEIFSFESTTGFTLYGMLYKPHDLQPGKKYPTVLFIYGGPQVAIAGAPVTLWIFYDTGYTERYMGHPDQNEQGYYLGSVAMQAEKFPSEPNRLLLLHGFLDENVHFAHTSILLSFLVRAGKPYDLQIYPQERHSIRVPESGEHYELHLLHYLQENLGSRIAALKVI

SEQ ID NO: 1069 - DNA, 4096 bp, Homo sapiens
aacgaaccggaagtgctaaagcctccgaggccaaggccgctgctactgccgccgctgcttcttagtgccgcgttcgccgcctgggttgtcaccggcgccgccgccgaggaagccactgcaaccaggaccggagtggaggcggcgcagcatgaagcggcgcaggcccgctccatagcgcacgtcgggacggtccgggcggggccggggggaaggaaaatgcaacatggcagcagcaatggaaacagaacagctgggtgttgagatatttgaaactgcggactgtgaggagaatattgaatcacaggatcggcctaaattggagcctttttatgttgagcggtattcctggagtcagcttaaaaagctgcttgccgataccagaaaatatcatggctacatgatggctaaggcaccacatgatttcatgtttgtgaagaggaatgatccagatggacctcattcagacagaatctattaccttgccatgtctggtgagaacagagaaaatacactgttttattctgaaattcccaaaactatcaatagagcagcagtcttaatgctctcttggaagcctcttttggatctttttcaggcaacactggactatggaatgtattctcgagaagaagaactattaagagaaagaaaacgcattggaacagtcggaattgcttcttacgattatcaccaaggaagtggaacatttctgtttcaagccggtagtggaatttatcacgtaaaagatggagggccacaaggatttacgcaacaacctttaaggcccaatctagtggaaactagttgtcccaacatacggatggatccaaaattatgccctgctgatccagactggattgcttttatacatagcaacgatatttggatatctaacatcgtaaccagagaagaaaggagactcacttatgtgcacaatgagctagccaacatggaagaagatgccagatcagctggagtcgctacctttgttctccaagaagaatttgatagatattctggctattggtggtgtccaaaagctgaaacaactcccagtggtggtaaaattcttagaattctatatgaagaaaatgatgaatctgaggtggaaattattcatgttacatcccctatgttggaaacaaggagggcagattcattccgttatcctaaaacaggtacagcaaatcctaaagtcacttttaagatgtcagaaataatgattgatgctgaaggaaggatcatagatgtcatagataaggaactaattcaaccttttgagattctatttgaaggagttgaatatattgccagagctggatggactcctgagggaaaatatgcttggtccatcctactagatcgctcccagactcgcctacagatagtgttgatctcacctgaattatttatcccagtagaagatgatgttatggaaaggcagagactcattgagtcagtgcctgattctgtgacgccactaattatctatgaagaaacaacagacatctggataaatatccatgacatctttcatgtttttccccaaagtcacgaagaggaaattgagtttatttttgcctctgaatgcaaaacaggtttccgtcatttatacaaaattacatctattttaaaggaaagcaaatataaacgatccagtggtgggctgcctgctccaagtgatttcaagtgtcctatcaaagaggagatagcaattaccagtggtgaatgggaagttcttggccggcatggatctaatatccaagttgatgaagtcagaaggctggtatattttgaaggcaccaaagactcccctttagagcatcacctgtacgtagtcagttacgtaaatcctggagaggtgacaaggctgactgaccgtggctactcacattcttgctgcatcagtcagcactgtgacttctttataagtaagtatagtaaccagaagaatccacactgtgtgtccctttacaagctatcaagtcctgaagatgacccaacttgcaaaacaaaggaattttgggccaccattttggattcagcaggtcctcttcctgactatactcctccagaaattttctcttttgaaagtactactggatttacattgtatgggatgctctacaagcctcatgatctacagcctggaaagaaatatcctactgtgctgttcatatatggtggtcctcaggtgcagttggtgaataatcggtttaaaggagtcaagtatttccgcttgaataccctagcctctctaggttatgtggttgtagtgatagacaacaggggatcctgtcaccgagggcttaaatttgaaggcgcctttaaatataaaatgggtcaaatagaaattgacgatcaggtggaaggactccaatatctagcttctcgatatgatttcattgacttagatcgtgtgggcatccacggctggtcctatggaggatacctctccctgatggcattaatgcagaggtcagatatcttcagggttgctattgctggggccccagtcactctgtggatcttctatgatacaggatacacggaacgttatatgggtcaccctgaccagaatgaacagggctattacttaggatctgtggccatgcaagcagaaaagttcccctctgaaccaaatcgtttactgctcttacatggtttcctggatgagaatgtccattttgcacataccagtatattactgagttttttagtgagggctggaaagccatatgatttacagatctatcctcaggagagacacagcataagagttcctgaatcgggagaacattatgaactgcatcttttgcactaccttcaagaaaaccttggatcacgtattgctgctctaaaagtgatataattttgacctgtgtagaactctctggtatacactggctatttaaccaaatgaggaggtttaatcaacagaaaacacagaattgatcatcacattttgatacctgccatgtaacatctactcctgaaaataaatgtggtgccatgcaggggtctacggtttgtggtagtaatctaataccttaaccccacatgctcaaaatcaaatgatacatattcctgagagacccagcaataccataagaattactaaaaaaaaaaaaaaaaaaaagacattagcaccatgtattcatactaccctattttcacttttaatagtattataaacttcatgaacttaattagtgtatttttacagtatacttttgagtttgttaaaatatgatgatattagtgattggtttggttcagttccagaatctttgactagttacagatttgatagcacttaaatgtaattgaatagcttatgcttcattgcttgggcatatccagcatgttatgaactaataactattaaacttgacttaaccagtcattcattaataatttttcaaggataacttagtggcctcctaaagacacttgttttggcactgaccagtttttagccaatttaatctgtatctagtataaataattctcatttttctttgatgatattaacagagtgggcttttccttttgcataaaggctagtaactgtatatgtagcatggatttaattagtcatgatattgataattacaggcagaaaatttttaatcaaatgattagagcttaaatatttgcaggcaagtttttttttttcctttaagaaaaggaaaaagtacacattcactagaattcttcagaaaatttagtggtgccagtttccatttggtatttccttattaaaatattctagaattttaaggagattgaagggaatcacagtggggtggggagacctgggtttggggaatgacagagagaagaggtggtgagggcctgattaaaaactaagcagaagtagttttaacaaaaatactcatgaaaatgtttggaaactgaaatttaaacaactgtaatattaaggaaaccagaatcaataaatcactgtcttgccagcacagctacagagtaacatgattcaggggaggaaaagttccttagagttacttttataattctttttttttttcctcttaggtttagaaatcttacaaatttaaactttatcctttta

SEQ ID NO: 1070 - protein, 882 aa, Homo sapiens
MAAAMETEQLGVEIFETADCEENIESQDRPKLEPFYVERYSWSQLKKLLADTRKYHGYMMAKAPHDFMFVKRNDPDGPHSDRIYYLAMSGENRENTLFYSEIPKTINRAAVLMLSWKPLLDLFQATLDYGMYSREEELLRERKRIGTVGIASYDYHQGSGTFLFQAGSGIYHVKDGGPQGFTQQPLRPNLVETSCPNIRMDPKLCPADPDWIAFIHSNDIWISNIVTREERRLTYVHNELANMEEDARSAGVATFVLQEEFDRYSGYWWCPKAETTPSGGKILRILYEENDESEVEIIHVTSPMLETRRADSFRYPKTGTANPKVTFKMSEIMIDAEGRIIDVIDKELIQPFEILFEGVEYIARAGWTPEGKYAWSILLDRSQTRLQIVLISPELFIPVEDDVMERQRLIESVPDSVTPLIIYEETTDIWINIHDIFHVFPQSHEEEIEFIFASECKTGFRHLYKITSILKESKYKRSSGGLPAPSDFKCPIKEEIAITSGEWEVLGRHGSNIQVDEVRRLVYFEGTKDSPLEHHLYVVSYVNPGEVTRLTDRGYSHSCCISQHCDFFISKYSNQKNPHCVSLYKLSSPEDDPTCKTKEFWATILDSAGPLPDYTPPEIFSFESTTGFTLYGMLYKPHDLQPGKKYPTVLFIYGGPQVQLVNNRFKGVKYFRLNTLASLGYVVVVIDNRGSCHRGLKFEGAFKYKMGQIEIDDQVEGLQYLASRYDFIDLDRVGIHGWSYGGYLSLMALMQRSDIFRVAIAGAPVTLWIFYDTGYTERYMGHPDQNEQGYYLGSVAMQAEKFPSEPNRLLLLHGFLDENVHFAHTSILLSFLVRAGKPYDLQIYPQERHSIRVPESGEHYELHLLHYLQENLGSRIAALKVI

SEQ ID NO: 1071 - DNA, 4086 bp, Homo sapiens
attccgagtcaaccaccgttcactgggcgccccttgagctctgggcgctggcctcctggcttccacgctttgatggtgaggaaaggaaagattcctgtgagaagagcaggatgagcagagggattctatgcttgaagtcgagtcacttgaaaaagatctctttgaatgtggaagagatctgagcagatgaaaataaaatcaggaaaatgcaacatggcagcagcaatggaaacagaacagctgggtgttgagatatttgaaactgcggactgtgaggagaatattgaatcacaggatcggcctaaattggagcctttttatgttgagcggtattcctggagtcagcttaaaaagctgcttgccgataccagaaaatatcatggctacatgatggctaaggcaccacatgatttcatgtttgtgaagaggaatgatccagatggacctcattcagacagaatctattaccttgccatgtctggtgagaacagagaaaatacactgttttattctgaaattcccaaaactatcaatagagcagcagtcttaatgctctcttggaagcctcttttggatctttttcaggcaacactggactatggaatgtattctcgagaagaagaactattaagagaaagaaaacgcattggaacagtcggaattgcttcttacgattatcaccaaggaagtggaacatttctgtttcaagccggtagtggaatttatcacgtaaaagatggagggccacaaggatttacgcaacaacctttaaggcccaatctagtggaaactagttgtcccaacatacggatggatccaaaattatgccctgctgatccagactggattgcttttatacatagcaacgatatttggatatctaacatcgtaaccagagaagaaaggagactcacttatgtgcacaatgagctagccaacatggaagaagatgccagatcagctggagtcgctacctttgttctccaagaagaatttgatagatattctggctattggtggtgtccaaaagctgaaacaactcccagtggtggtaaaattcttagaattctatatgaagaaaatgatgaatctgaggtggaaattattcatgttacatcccctatgttggaaacaaggagggcagattcattccgttatcctaaaacaggtacagcaaatcctaaagtcacttttaagatgtcagaaataatgattgatgctgaaggaaggatcatagatgtcatagataaggaactaattcaaccttttgagattctatttgaaggagttgaatatattgccagagctggatggactcctgagggaaaatatgcttggtccatcctactagatcgctcccagactcgcctacagatagtgttgatctcacctgaattatttatcccagtagaagatgatgttatggaaaggcagagactcattgagtcagtgcctgattctgtgacgccactaattatctatgaagaaacaacagacatctggataaatatccatgacatctttcatgtttttccccaaagtcacgaagaggaaattgagtttatttttgcctctgaatgcaaaacaggtttccgtcatttatacaaaattacatctattttaaaggaaagcaaatataaacgatccagtggtgggctgcctgctccaagtgatttcaagtgtcctatcaaagaggagatagcaattaccagtggtgaatgggaagttcttggccggcatggatctaatatccaagttgatgaagtcagaaggctggtatattttgaaggcaccaaagactcccctttagagcatcacctgtacgtagtcagttacgtaaatcctggagaggtgacaaggctgactgaccgtggctactcacattcttgctgcatcagtcagcactgtgacttctttataagtaagtatagtaaccagaagaatccacactgtgtgtccctttacaagctatcaagtcctgaagatgacccaacttgcaaaacaaaggaattttgggccaccattttggattcagcaggtcctcttcctgactatactcctccagaaattttctcttttgaaagtactactggatttacattgtatgggatgctctacaagcctcatgatctacagcctggaaagaaatatcctactgtgctgttcatatatggtggtcctcaggtgcagttggtgaataatcggtttaaaggagtcaagtatttccgcttgaataccctagcctctctaggttatgtggttgtagtgatagacaacaggggatcctgtcaccgagggcttaaatttgaaggcgcctttaaatataaaatgggtcaaatagaaattgacgatcaggtggaaggactccaatatctagcttctcgatatgatttcattgacttagatcgtgtgggcatccacggctggtcctatggaggatacctctccctgatggcattaatgcagaggtcagatatcttcagggttgctattgctggggccccagtcactctgtggatcttctatgatacaggatacacggaacgttatatgggtcaccctgaccagaatgaacagggctattacttaggatctgtggccatgcaagcagaaaagttcccctctgaaccaaatcgtttactgctcttacatggtttcctggatgagaatgtccattttgcacataccagtatattactgagttttttagtgagggctggaaagccatatgatttacagatctatcctcaggagagacacagcataagagttcctgaatcgggagaacattatgaactgcatcttttgcactaccttcaagaaaaccttggatcacgtattgctgctctaaaagtgatataattttgacctgtgtagaactctctggtatacactggctatttaaccaaatgaggaggtttaatcaacagaaaacacagaattgatcatcacattttgatacctgccatgtaacatctactcctgaaaataaatgtggtgccatgcaggggtctacggtttgtggtagtaatctaataccttaaccccacatgctcaaaatcaaatgatacatattcctgagagacccagcaataccataagaattactaaaaaaaaaaaaaaaaaaaagacattagcaccatgtattcatactaccctattttcacttttaatagtattataaacttcatgaacttaattagtgtatttttacagtatacttttgagtttgttaaaatatgatgatattagtgattggtttggttcagttccagaatctttgactagttacagatttgatagcacttaaatgtaattgaatagcttatgcttcattgcttgggcatatccagcatgttatgaactaataactattaaacttgacttaaccagtcattcattaataatttttcaaggataacttagtggcctcctaaagacacttgttttggcactgaccagtttttagccaatttaatctgtatctagtataaataattctcatttttctttgatgatattaacagagtgggcttttccttttgcataaaggctagtaactgtatatgtagcatggatttaattagtcatgatattgataattacaggcagaaaatttttaatcaaatgattagagcttaaatatttgcaggcaagtttttttttttcctttaagaaaaggaaaaagtacacattcactagaattcttcagaaaatttagtggtgccagtttccatttggtatttccttattaaaatattctagaattttaaggagattgaagggaatcacagtggggtggggagacctgggtttggggaatgacagagagaagaggtggtgagggcctgattaaaaactaagcagaagtagttttaacaaaaatactcatgaaaatgtttggaaactgaaatttaaacaactgtaatattaaggaaaccagaatcaataaatcactgtcttgccagcacagctacagagtaacatgattcaggggaggaaaagttccttagagttacttttataattctttttttttttcctcttaggtttagaaatcttacaaatttaaactttatcctttta

SEQ ID NO: 1072 - protein, 898 aa, Homo sapiens
MWKRSEQMKIKSGKCNMAAAMETEQLGVEIFETADCEENIESQDRPKLEPFYVERYSWSQLKKLLADTRKYHGYMMAKAPHDFMFVKRNDPDGPHSDRIYYLAMSGENRENTLFYSEIPKTINRAAVLMLSWKPLLDLFQATLDYGMYSREEELLRERKRIGTVGIASYDYHQGSGTFLFQAGSGIYHVKDGGPQGFTQQPLRPNLVETSCPNIRMDPKLCPADPDWIAFIHSNDIWISNIVTREERRLTYVHNELANMEEDARSAGVATFVLQEEFDRYSGYWWCPKAETTPSGGKILRILYEENDESEVEIIHVTSPMLETRRADSFRYPKTGTANPKVTFKMSEIMIDAEGRIIDVIDKELIQPFEILFEGVEYIARAGWTPEGKYAWSILLDRSQTRLQIVLISPELFIPVEDDVMERQRLIESVPDSVTPLIIYEETTDIWINIHDIFHVFPQSHEEEIEFIFASECKTGFRHLYKITSILKESKYKRSSGGLPAPSDFKCPIKEEIAITSGEWEVLGRHGSNIQVDEVRRLVYFEGTKDSPLEHHLYVVSYVNPGEVTRLTDRGYSHSCCISQHCDFFISKYSNQKNPHCVSLYKLSSPEDDPTCKTKEFWATILDSAGPLPDYTPPEIFSFESTTGFTLYGMLYKPHDLQPGKKYPTVLFIYGGPQVQLVNNRFKGVKYFRLNTLASLGYVVVVIDNRGSCHRGLKFEGAFKYKMGQIEIDDQVEGLQYLASRYDFIDLDRVGIHGWSYGGYLSLMALMQRSDIFRVAIAGAPVTLWIFYDTGYTERYMGHPDQNEQGYYLGSVAMQAEKFPSEPNRLLLLHGFLDENVHFAHTSILLSFLVRAGKPYDLQIYPQERHSIRVPESGEHYELHLLHYLQENLGSRIAALKVI

SEQ ID NO: 1073 - DNA, 4079 bp, Homo sapiens
aacgaaccggaagtgctaaagcctccgaggccaaggccgctgctactgccgccgctgcttcttagtgccgcgttcgccgcctgggttgtcaccggcgccgccgccgaggaagccactgcaaccaggaccggagtggaggcggcgcagcatgaagcggcgcaggcccgctccatagcgcacgtcgggacggtccgggcggggccggggggaaggctttgatggtgaggaaaggaaagattcctgtgagaagagcaggatgagcagagggattctatgcttgaagtcgagtcacttgaaaaagatctctttgaatgtggaagagatctgagcagatgaaaataaaatcaggaaaatgcaacatggcagcagcaatggaaacagaacagctgggtgttgagatatttgaaactgcggactgtgaggagaatattgaatcacaggatcggcctaaattggagcctttttatgttgagcggtattcctggagtcagcttaaaaagctgcttgccgataccagaaaatatcatggctacatgatggctaaggcaccacatgatttcatgtttgtgaagaggaatgatccagatggacctcattcagacagaatctattaccttgccatgtctggtgagaacagagaaaatacactgttttattctgaaattcccaaaactatcaatagagcagcagtcttaatgctctcttggaagcctcttttggatctttttcaggcaacactggactatggaatgtattctcgagaagaagaactattaagagaaagaaaacgcattggaacagtcggaattgcttcttacgattatcaccaaggaagtggaacatttctgtttcaagccggtagtggaatttatcacgtaaaagatggagggccacaaggatttacgcaacaacctttaaggcccaatctagtggaaactagttgtcccaacatacggatggatccaaaattatgccctgctgatccagactggattgcttttatacatagcaacgatatttggatatctaacatcgtaaccagagaagaaaggagactcacttatgtgcacaatgagctagccaacatggaagaagatgccagatcagctggagtcgctacctttgttctccaagaagaatttgatagatattctggctattggtggtgtccaaaagctgaaacaactcccagtggtggtaaaattcttagaattctatatgaagaaaatgatgaatctgaggtggaaattattcatgttacatcccctatgttggaaacaaggagggcagattcattccgttatcctaaaacaggtacagcaaatcctaaagtcacttttaagatgtcagaaataatgattgatgctgaaggaaggatcatagatgtcatagataaggaactaattcaaccttttgagattctatttgaaggagttgaatatattgccagagctggatggactcctgagggaaaatatgcttggtccatcctactagatcgctcccagactcgcctacagatagtgttgatctcacctgaattatttatcccagtagaagatgatgttatggaaaggcagagactcattgagtcagtgcctgattctgtgacgccactaattatctatgaagaaacaacagacatctggataaatatccatgacatctttcatgtttttccccaaagtcacgaagaggaaattgagtttatttttgcctctgaatgcaaaacaggtttccgtcatttatacaaaattacatctattttaaaggaaagcaaatataaacgatccagtggtgggctgcctgctccaagtgatttcaagtgtcctatcaaagaggagatagcaattaccagtggtgaatgggaagttcttggccggcatggatctaatatccaagttgatgaagtcagaaggctggtatattttgaaggcaccaaagactcccctttagagcatcacctgtacgtagtcagttacgtaaatcctggagaggtgacaaggctgactgaccgtggctactcacattcttgctgcatcagtcagcactgtgacttctttataagtaagtatagtaaccagaagaatccacactgtgtgtccctttacaagctatcaagtcctgaagatgacccaacttgcaaaacaaaggaattttgggccaccattttggattcagcaggtcctcttcctgactatactcctccagaaattttctcttttgaaagtactactggatttacattgtatgggatgctctacaagcctcatgatctacagcctggaaagaaatatcctactgtgctgttcatatatggtggtcctcaggtgcagttggtgaataatcggtttaaaggagtcaagtatttccgcttgaataccctagcctctctaggttatgtggttgtagtgatagacaacaggggatcctgtcaccgagggcttaaatttgaaggcgcctttaaatataaaatggttgctattgctggggccccagtcactctgtggatcttctatgatacaggatacacggaacgttatatgggtcaccctgaccagaatgaacagggctattacttaggatctgtggccatgcaagcagaaaagttcccctctgaaccaaatcgtttactgctcttacatggtttcctggatgagaatgtccattttgcacataccagtatattactgagttttttagtgagggctggaaagccatatgatttacagatctatcctcaggagagacacagcataagagttcctgaatcgggagaacattatgaactgcatcttttgcactaccttcaagaaaaccttggatcacgtattgctgctctaaaagtgatataattttgacctgtgtagaactctctggtatacactggctatttaaccaaatgaggaggtttaatcaacagaaaacacagaattgatcatcacattttgatacctgccatgtaacatctactcctgaaaataaatgtggtgccatgcaggggtctacggtttgtggtagtaatctaataccttaaccccacatgctcaaaatcaaatgatacatattcctgagagacccagcaataccataagaattactaaaaaaaaaaaaaaaaaaaagacattagcaccatgtattcatactaccctattttcacttttaatagtattataaacttcatgaacttaattagtgtatttttacagtatacttttgagtttgttaaaatatgatgatattagtgattggtttggttcagttccagaatctttgactagttacagatttgatagcacttaaatgtaattgaatagcttatgcttcattgcttgggcatatccagcatgttatgaactaataactattaaacttgacttaaccagtcattcattaataatttttcaaggataacttagtggcctcctaaagacacttgttttggcactgaccagtttttagccaatttaatctgtatctagtataaataattctcatttttctttgatgatattaacagagtgggcttttccttttgcataaaggctagtaactgtatatgtagcatggatttaattagtcatgatattgataattacaggcagaaaatttttaatcaaatgattagagcttaaatatttgcaggcaagtttttttttttcctttaagaaaaggaaaaagtacacattcactagaattcttcagaaaatttagtggtgccagtttccatttggtatttccttattaaaatattctagaattttaaggagattgaagggaatcacagtggggtggggagacctgggtttggggaatgacagagagaagaggtggtgagggcctgattaaaaactaagcagaagtagttttaacaaaaatactcatgaaaatgtttggaaactgaaatttaaacaactgtaatattaaggaaaccagaatcaataaatcactgtcttgccagcacagctacagagtaacatgattcaggggaggaaaagttccttagagttacttttataattctttttttttttcctcttaggtttagaaatcttacaaatttaaactttatcctttta

SEQ ID NO: 1074 - protein, 847 aa, Homo sapiens
MWKRSEQMKIKSGKCNMAAAMETEQLGVEIFETADCEENIESQDRPKLEPFYVERYSWSQLKKLLADTRKYHGYMMAKAPHDFMFVKRNDPDGPHSDRIYYLAMSGENRENTLFYSEIPKTINRAAVLMLSWKPLLDLFQATLDYGMYSREEELLRERKRIGTVGIASYDYHQGSGTFLFQAGSGIYHVKDGGPQGFTQQPLRPNLVETSCPNIRMDPKLCPADPDWIAFIHSNDIWISNIVTREERRLTYVHNELANMEEDARSAGVATFVLQEEFDRYSGYWWCPKAETTPSGGKILRILYEENDESEVEIIHVTSPMLETRRADSFRYPKTGTANPKVTFKMSEIMIDAEGRIIDVIDKELIQPFEILFEGVEYIARAGWTPEGKYAWSILLDRSQTRLQIVLISPELFIPVEDDVMERQRLIESVPDSVTPLIIYEETTDIWINIHDIFHVFPQSHEEEIEFIFASECKTGFRHLYKITSILKESKYKRSSGGLPAPSDFKCPIKEEIAITSGEWEVLGRHGSNIQVDEVRRLVYFEGTKDSPLEHHLYVVSYVNPGEVTRLTDRGYSHSCCISQHCDFFISKYSNQKNPHCVSLYKLSSPEDDPTCKTKEFWATILDSAGPLPDYTPPEIFSFESTTGFTLYGMLYKPHDLQPGKKYPTVLFIYGGPQVQLVNNRFKGVKYFRLNTLASLGYVVVVIDNRGSCHRGLKFEGAFKYKMVAIAGAPVTLWIFYDTGYTERYMGHPDQNEQGYYLGSVAMQAEKFPSEPNRLLLLHGFLDENVHFAHTSILLSFLVRAGKPYDLQIYPQERHSIRVPESGEHYELHLLHYLQENLGSRIAALKVI

SEQ ID NO: 1075 - DNA, 1689 bp, Homo sapiens
cgggagcgtggggtatctcgaggtgccgggttgcaggcgctcaggggcgctagggtttgaggcctgctttctgctcgcgccagcagagcactacctgaggcagcgaggcgcagcgagcctagcctccccgcgccctgggcagtgtggccatggagaatcaggtgttgacgccgcatgtctactgggctcagcgacaccgcgagctatatctgcgcgtggagctgagtgacgtacagaaccctgccatcagcatcactgaaaacgtgctgcatttcaaagctcaaggacatggtgccaaaggagacaatgtctatgaatttcacctggagttcttagaccttgtgaaaccagagcctgtttacaaactgacccagaggcaggtaaacattacagtacagaagaaagtgagtcagtggtgggagagactcacaaagcaggaaaagcgaccactgtttttggctcctgactttgatcgttggctggatgaatctgatgcggaaatggagctcagagctaaggaagaagagcgcctaaataaactccgactggaaagcgaaggctctcctgaaactcttacaaacttaaggaaaggatacctgtttatgtataatcttgtgcaattcttgggattctcctggatctttgtcaacctgactgtgcgattctgtatcttgggaaaagagtccttttatgacacattccatactgtggctgacatgatgtatttctgccagatgctggcagttgtggaaactatcaatgcagcaattggagtcactacgtcaccggtgctgccttctctgatccagcttcttggaagaaattttattttgtttatcatctttggcaccatggaagaaatgcagaacaaagctgtggttttctttgtgttttatttgtggagtgcaattgaaattttcaggtactctttctacatgctgacgtgcattgacatggattggaaggtgctcacatggcttcgttacactctgtggattcccttatatccactgggatgtttggtggaagctgtctcagtgattcagtccattccaatattcaatgagaccggacgattcagtttcacattgccatatccagtgaaaatcaaagttagattttccttttttcttcagatttatcttataatgatatttttaggtttatacataaattttcgtcacctttataaacagcgcagacggcgctatggaaaaaaaagaaaaagatccactaaaaagaaagatttagatggcttcttgccagtttgagcctaatctgattcttacagttttaccttcttgaaccaatgtaaaagtttttttaatgttaaatgattaaattctcagtgaggctatcttccttttccccagtaacattcctgaatttactgttatcttattgtagtacttgcatgacatggattcctgatatctgatgagaggttcattcttgtgtattcagttaatgacaccaaaaggctcagcccaccccaaccctatctcatgttcagtctgtctaatacatgccagagatttttttttcaaaaagtgctttatccctacaatgtactgacagttcttacagttgaggatttggttcttttcagctaattgcttggtggattaaaaaaagcaagactaatgtcaactctaatggaaggctggttaaaagtggactcaggcaagg

SEQ ID NO: 1076 - protein, 373 aa, Homo sapiens
MENQVLTPHVYWAQRHRELYLRVELSDVQNPAISITENVLHFKAQGHGAKGDNVYEFHLEFLDLVKPEPVYKLTQRQVNITVQKKVSQWWERLTKQEKRPLFLAPDFDRWLDESDAEMELRAKEEERLNKLRLESEGSPETLTNLRKGYLFMYNLVQFLGFSWIFVNLTVRFCILGKESFYDTFHTVADMMYFCQMLAVVETINAAIGVTTSPVLPSLIQLLGRNFILFIIFGTMEEMQNKAVVFFVFYLWSAIEIFRYSFYMLTCIDMDWKVLTWLRYTLWIPLYPLGCLVEAVSVIQSIPIFNETGRFSFTLPYPVKIKVRFSFFLQIYLIMIFLGLYINFRHLYKQRRRRYGKKRKRSTKKKDLDGFLPV

SEQ ID NO: 1077 - DNA, 2538 bp, Homo sapiens
tgcctttcgctgcttgttggggttacaggtgaaggggttatgggtgaagaacaacccagggccagcgcttggccttcccgccaccgtggcggccgccccgcgctgtctgtgaggcgccagttccggggcgctgctcccggcctcccctcgctctgaggctcggggtccccagctccgcgtaaactgcacgatttcgccctctgctcagctcccctctgccccctctttccaagagagacttccagatcccacattttcttgactgatttttaagcatttcttcgtttatagctgtctgtttgcattctgattgggaacactgggatcattttcatcatgccgacagtggtggtaatggatgtatccctttccatgacccgacctgtgtctattgaggggtccgaggaataccagcgtaagcacctagcagcccatggtttaacgatgctgtttgagcacatggccacaaattacaagcttgaatttacagcacttgtggttttttcatcactttgggagttgatggtccccttcacgagagattataataccctacaggaagcactaagtaatatggatgattatgacaaaacctgcttggggtctgcattagttggtgtttgcaatatcgttcagcaagaatggggtggtgcaattccttgccaggttgtcctggtgacagacggctgtcttggcattggtagagggtcactgcgacattccctagccactcaaaatcaacgaagtgagagcaacaggtttccactaccttttcctttcccatctaagttatatatcatgtgcatggcgaatttggaggagctccagagcaccgattccttggaatgccttgaacgtctcatagatttaaacaatggtgaagggcagatttttactattgatggccccctgtgcttgaagaatgtacagtctatgtttggaaaactgataggtttggcatatacgcctttccatgctgttctcaagtgtggccacctaactgctgatgtacaagtcttccccaggccagaaccttttgttgtagatgaagaaattgatcctatccctaaagtcattaacacagatttggaaatagtgggatttattgatatagctgatatctcaagtcccccagttctgtccagacatctggtcttacctatagcacttaacaaagaaggtgatgaggtgggtactggcatcactgatgacaatgaagatgaaaattcagccaatcagattgcaggcaaaatacccaacttttgtgtcctgctccatggtagcctaaaagtggaaggaatggtagcgattgttcaattaggtcctgaatggcatggaatgctctactcccaagctgacagcaagaagaaatcaaacctcatgatgtctctctttgagcctggcccagaacctctcccatggctagggaaaatggcacagttgggtcctatttcagatgctaaagaaaacccttatggcgaggatgacaataagagtccattccccctgcagcccaaaaacaagcgcagttatgcccagaatgtgactgtctggatcaaacccagcggcctgcagacagatgtacagaagattttaagaaatgcaaggaaactacctgaaaaaacacagacattctataaggagctgaaccgtttgcgaaaggccgctctagcctttggtttcctggacctgctgaaaggggtggctgacatgctggaaagggaatgcacactgctgcctgagacagcccaccctgatgctgcattccagctgacccatgctgcccagcagctcaagctggccagtaccggcacctctgagtatgccgcttatgaccagaacatcacacctttgcacacggacttctctgggagcagcactgaaagaatttgaaactgacttttggagctttccttcttttttcatttcaactgaaaatgctttaggtaaaaacctttccagtatgttcacctctagaatagccacccaaagaccttcctgaggctgcctcagaagcaccacttgctgttttgaatgactctactagtatgagaaggatgtgaaggtggttggctggttgggctttaacttcctgggattcataatttttaagcttggaagatagctgctgttcccatgatgggcacatttcctgagaagcttgaatgactgatgagcatagagcacccctgccttcctcaggaaacctgaccggcaggggctctctggcttcctgaaagcttcacctcttccctcgtttatatctcaactgtaagggcattttcaagcttctgttcatggaatgagcaactcagactgtctggagcttgctgagtacaaacacaccaccactaagtttcagaactttccttaggacttgggcaaaatgtggtggtaactcttaagtgcttttggtatctcttgagattctaacttttaaagagcaaccattaatgtgtaaaatgattcctattattcaaggtttttttttaatgaaaataaaatatttgattttctagaaaaaaaaaaaaaaaaaaa

SEQ ID NO: 1078 - protein, 518 aa, Homo sapiens
MPTVVVMDVSLSMTRPVSIEGSEEYQRKHLAAHGLTMLFEHMATNYKLEFTALVVFSSLWELMVPFTRDYNTLQEALSNMDDYDKTCLGSALVGVCNIVQQEWGGAIPCQVVLVTDGCLGIGRGSLRHSLATQNQRSESNRFPLPFPFPSKLYIMCMANLEELQSTDSLECLERLIDLNNGEGQIFTIDGPLCLKNVQSMFGKLIGLAYTPFHAVLKCGHLTADVQVFPRPEPFVVDEEIDPIPKVINTDLEIVGFIDIADISSPPVLSRHLVLPIALNKEGDEVGTGITDDNEDENSANQIAGKIPNFCVLLHGSLKVEGMVAIVQLGPEWHGMLYSQADSKKKSNLMMSLFEPGPEPLPWLGKMAQLGPISDAKENPYGEDDNKSPFPLQPKNKRSYAQNVTVWIKPSGLQTDVQKILRNARKLPEKTQTFYKELNRLRKAALAFGFLDLLKGVADMLERECTLLPETAHPDAAFQLTHAAQQLKLASTGTSEYAAYDQNITPLHTDFSGSSTERI

SEQ ID NO: 1079 - DNA, 5374 bp, Homo sapiens
cccttcacacccgacccagccttgaattaggattccataggagagctgggggcaggagaatggggtgttccctgctgtccagcttcagacccactctttgagatattggattctgacaagtttccagagctgagaagacagccagatgtcaaggtctgaagggttgtggataccccctggctgggcttcatggagaaatcttctctgatcaccaacctgaatcccagagtagcctccatcttaggacagaatgagaggccttctgtaaccagatataactggccagcatggggaaattgatcaggatggggccgcaagagaggtggttactccggacaaagcggcttcattggagtcgcctcctcttcttactgggaatgttgatcatcggttctacttatcagcaccttaggagaccccggggcctttcctcattgtgggcagcagtctcttctcatcagcctataaaactggccagtcgggacctctccagtgaagagatgatgatgatgagcagcagcccttcaaaacctagctccgaaatggggggtaagatgctggtaccccaagcctcagtgggcagtgatgaagcaacactgagcatgacagtggagaatatccccagtatgcctaaaagaacagccaagatgatcccaacaacaaccaagaataattacagcccaacagcagcaggtacagaaagaaggaaggaagacaccccaacatccagtagaacactgacttactacacctcaacttcaagcagacaaatagtaaaaaagtataccccaacacccaggggagaaatgaagagctacagcccaactcaagtgagggaaaaggtgaagtatactccttccccacgtggtagaagagtaggcacttacgtgccgtccacattcatgacaatggaaacaagccatgcgatcacccccaggacaacagtgaaagacagtgacattacagcaacctataaaatactcgaaaccaactctcttaagagaataatggaggaaaccaccccaaccactctcaagggaatgtttgatagcaccccaacttttctgacacatgaggtagaagcaaacgtcttgacttctccaaggagcgtcatggaaaaaaacaacctgtttccccccagaagagtggaaagtaacagctcagcccatccctgggggttagtgggaaagagcaacccgaagactccccagggaacagtcctgttgcataccccagccacctctgaggggcaggtgacaataagcaccatgacaggcagcagcccagcagaaaccaaagccttcactgctgcctggagtcttaggaatccttcacccaggaccagtgtatcagccatcaaaacagccccagccatagtctggaggctggcaaagaaaccttccacagcacccagcacctcaacaacccctacggtcagggcaaagctgaccatgcaggtccatcactgtgtggttgtgaagccaaccccagccatgctcaccactccctccccaagcctcacaacagccctgctcccagaggagctcagtcctagtccctcagtgctgcctcccagcttgccagacctccaccccaagggagagtaccccccagatctgttcagtgtggaggagcggcggcagggctgggtggtcctgcacgtttttggcatgatgtatgtgtttgtggccttggccattgtttgcgacgagtacttcgttccagccctgggtgtcatcacagacaagctgcagatctccgaggatgtggcaggcgccacattcatggctgctggaggctctgctcctgagctcttcacctccctcatcggtgtcttcatttcccacagcaacgtgggcattggtaccattgtgggctctgctgtgttcaacattctctttgtcattggcacttgttccctcttctcccgagagatcctcaacctcacctggtggcccttattccgtgatgtctccttctacatccttgacctgataatgctcatcctcttcttcctggacagcctcattgcctggtgggagagcctgctgctgctgctggcctatgccttctatgtgttcaccatgaagtggaacaagcatatcgaggtctgggtgaaggagcagctcagcaggaggccagtggccaaggtcatggccttagaagacctcagcaagccgggcgatggggccattgcggtggatgagctacaggataacaagaagctgaagctcccgtccttgctgacccgagggagcagctcgacctctctgcacaacagcaccatccgcagcaccatctaccagctcatgctccacagcctggaccccctgagggaagttcgccttgccaaggagaaggaggaggagagcttgaatcaaggggccagagcccaaccccaggccaaagcagaaagcaaaccagaagaggaggagccagccaagctccctgcggtcacggtcacaccagcccctgttccagacatcaagggagatcagaaggagaatccaggcggtcaggaagatgtggctgaggccgagagcacaggtgaaatgccaggcgaagagggcgaaactgctggtgaaggtgaaactgaagagaaaagtggaggtgaaactcaaccagaaggtgaaggtgaaactgaaacacaaggaaaaggagaagaatgtgaagatgaaaatgaagcagaaggaaaaggagacaatgaaggtgaagatgagggtgaaatccacgcagaagatggtgaaatgaaaggtaatgaaggtgaaactgaaagccaggaactcagtgctgaaaatcacggtgaagccaaaaatgatgagaaaggtgtagaagatggagggggaagtgatggaggggatagcgaagaggaggaagaggaggaggaagagcaggaggaagaggaggaggaggaagagcaggaggaagaggaggaggaggaggaggaagaggaggagaagggaaatgaagagcctctgtccctggactggcctgaaaccaggcagaagcaggccatttacctcttccttctgcccatcgtgttcccactgtggctgacagtccccgacgtccgaaggcaggagtctaggaagttttttgttttcaccttcctgggatctatcatgtggatagccatgttctcatacctcatggtgtggtgggctcaccaggttggtgaaacaatagggatttctgaagagatcatgggcctgacaatccttgcagcaggcacatcaattcctgacctcatcaccagtgtgattgtcgctcgaaaaggcctgggagacatggctgtgtcaagctctgtgggcagtaacatatttgatatcactgtgggcttgcctgttccttggttgcttttctctcttatcaatggattacagccagttccagtcagcagcaatggcttgttttgtgcaattgttttgctttttctcatgcttctgtttgtgatctcttcaattgcgtcatgtaaatggagaatgaacaagatcctgggcttcacaatgttcctcctttactttgtattcctgataatcagtgtgatgttagaagatcgaatcatatcctgtcctgtatctgtctgaatcagtcactcttgctcacaatgggcatggatcagaagaccatgcagaagttactgtatctcttgtgaccctaatgaaagaatgtatatgatcctggaaagtgaactgggtgacctaggacctctgatatgaatgtgatctgagactaaagtttgtccttggaaacacctgcagctcattgtggattaagaacctcacccctggaggggtggagtttctacccctgactcatgcagacatctattacatggaggcagtagaaggacccctggagccagagggttttctaaatgagataactgggggcaaaggttgggataggcgcacgagctataagacaagctcctacgctcactgttccctgatcattccaaaggctgctggcccaaaagatgcagatgtggtctacatctcagccttcctgacctctgccccaaacacacgctgcaattttgtctcctccttttctgttcaaattgtgaggttctatcaggtttgtaatcactgtagcttcagttattggtgagtctaaggatccaaggctacagaaaaaaaagaaatataacaggaattaatgatcattccacgttttgtagcccactgcatctggatatataccagtatttttcttttttttttttttgagacagagtttggctcttgttgcccaggctggtgtgcaatggcgtgatctcggcacaccacaaccttcacctccccggttcaagcaattctcctgcctcagcctgaagtcgtgatctgcccgcctcggcctcccaaagtgctgggattacaggcgtcagccaccgcgcctggcctataccagtattttctagtttaaaggaggactacattaactcttattgttgtgtttctgaaaagtgaaatttaaaaagcagcctgaaaaataaaaatttataatttgcccttgaattggaaggaatggagattagggaaggaaaactactctagaggccatttaaaagtatgtatttattagaacatcgaaattcgtgttgtctccatcagtggtcaccttgagggattagacattctaatggaatgtcctggctccaccctccagcatgttctcacccaacaatgacagttgagtggagtgggaagggaagtcattctaaagagtccaaagtcagtagcgccacatctggtttataaagtaagagatccagtggacaatgctatttttgtatgccaacctagataggattataaagcaagactgatttcttctgtggtttatgaatgatcttaaggtaattacaaaagggaaattccaagaatgcataacacaatgacaacatggtgagaaaagtgcagtactacttccaaggtggctagtgtaaaggacacttgagtttttaaaactgtggttaaatgttttatgtggaatttgatgagtttgtatattaaataccactgcttgctgcttttactagaatcaagttaagggacacgttagaaatagaacagcttaatatcactggcttcagagcaaaatgagctcgggtgactgcagattatgatggtaaatatggctttaattacaaacatgaggaatgattcactgaagatgaaaagataggacggatgtgatatgaaaaaaacccaaacattttggcattgaatgatggctaaggtgttccaagtattccatcttttaagatgaattgcttaattaattgcctcgctaccccaggattctcattctttggaaataatttttattaaatttcaataaactgtgaatcccaatggtattttacttt

SEQ ID NO: 1080 - protein, 1099 aa, Homo sapiens
MGKLIRMGPQERWLLRTKRLHWSRLLFLLGMLIIGSTYQHLRRPRGLSSLWAAVSSHQPIKLASRDLSSEEMMMMSSSPSKPSSEMGGKMLVPQASVGSDEATLSMTVENIPSMPKRTAKMIPTTTKNNYSPTAAGTERRKEDTPTSSRTLTYYTSTSSRQIVKKYTPTPRGEMKSYSPTQVREKVKYTPSPRGRRVGTYVPSTFMTMETSHAITPRTTVKDSDITATYKILETNSLKRIMEETTPTTLKGMFDSTPTFLTHEVEANVLTSPRSVMEKNNLFPPRRVESNSSAHPWGLVGKSNPKTPQGTVLLHTPATSEGQVTISTMTGSSPAETKAFTAAWSLRNPSPRTSVSAIKTAPAIVWRLAKKPSTAPSTSTTPTVRAKLTMQVHHCVVVKPTPAMLTTPSPSLTTALLPEELSPSPSVLPPSLPDLHPKGEYPPDLFSVEERRQGWVVLHVFGMMYVFVALAIVCDEYFVPALGVITDKLQISEDVAGATFMAAGGSAPELFTSLIGVFISHSNVGIGTIVGSAVFNILFVIGTCSLFSREILNLTWWPLFRDVSFYILDLIMLILFFLDSLIAWWESLLLLLAYAFYVFTMKWNKHIEVWVKEQLSRRPVAKVMALEDLSKPGDGAIAVDELQDNKKLKLPSLLTRGSSSTSLHNSTIRSTIYQLMLHSLDPLREVRLAKEKEEESLNQGARAQPQAKAESKPEEEEPAKLPAVTVTPAPVPDIKGDQKENPGGQEDVAEAESTGEMPGEEGETAGEGETEEKSGGETQPEGEGETETQGKGEECEDENEAEGKGDNEGEDEGEIHAEDGEMKGNEGETESQELSAENHGEAKNDEKGVEDGGGSDGGDSEEEEEEEEEQEEEEEEEEQEEEEEEEEEEEEKGNEEPLSLDWPETRQKQAIYLFLLPIVFPLWLTVPDVRRQESRKFFVFTFLGSIMWIAMFSYLMVWWAHQVGETIGISEEIMGLTILAAGTSIPDLITSVIVARKGLGDMAVSSSVGSNIFDITVGLPVPWLLFSLINGLQPVPVSSNGLFCAIVLLFLMLLFVISSIASCKWRMNKILGFTMFLLYFVFLIISVMLEDRIISCPVSV

SEQ ID NO: 1081 - DNA, 6585 bp, Homo sapiens
ggagaaagaggcggaggcagtggcggccgcgaggggagggggagtcccgtctgactgagacggcaggcctgggcgggcgggcgggggtgccgcgaagggcggagcgccgggctggggatgagctaagcgggctcagagcgccgcggcattcagcccctcgtgttccgctaccgcgcgtgcgggattccggcgccgctctccgagctcgatccgctgctcgcacgggagccagctgggtgttatttctcaaactctgaggctgcggagttcacacattgaaatctgtcatctttttcagagagaaactttcggtaatgtatgtaaccttctgtaatggaagatgattgaagacaaggggcctcgtgttgctgactactttgttgtagcaggattaactgatgtttcaaagcctctagaagaagaaattcacttcaatgatgcttgtcataaagtagctaaaccaaaagaacctattacagatgtttcagttattatcaaatctcttggggaggaagtcccacaggattatatctgtattgatgttaccccaactggattgtcagctgatcttaataatggaagtcttgtggggccacagatttacctttgctatagaagaggaagagataagcctccacttacagatctgggggttttatatgactggaaagaaagattgaaacagggttgtgaaattattcagagtactccctatgggcgccccgcaaatattagtgggagtacctcatcacaaagaatttatatcacttaccgaagagcctctgaaaacatgactcagaatacgttggctgtcactgacatatgtattattatacccagtaaaggagaaagcccaccacacacgttctgcaaagtcgacaagaatctcaataacagtatgtggggatcagcagtatacttgtgttataaaaaatcggtggcaaagacgaacactgtatcttacaaagctggcctaatttgtagatatcctcaagaagattatgagtcattctcactaccggaatctgttcctctattttgtttaccaatgggtgcaaccattgaatgttggccatcaaatagcaaataccctctgcctgtattttctacttttgttttaactggagcctcagctgaaaaggtttatggtgctgctattcagttttatgaaccatactctgaggagaatctcacagaaaagcagagacttcttttgggtttaacatcagcagatgggaagtctgatagttccaaaacaattcatactaacaaatgcatctgtcttctttctcactggcctttttttgatgcattcaggaagtttctgacttttctgtatcgttattccatctctgggcctcatgtccttccaattgagaagcatatttctcattttatgcataaagttccttttccatctcctcagagaccacggattttagttcagttatcaccacatgataatctgattctcagtcagcctgtgtcttcacctcttccactaagtggtggcaagttttcaacactactgcagaatttaggccctgaaaatgctgtgacactactggtgtttgcagtaacagaacataaaattcttatccattccctacggccatccgtgcttactagtgtgacagaagcattagtgtctatgattttccctttccactggccatgcccgtatgttcctctctgcccactggctttagcagatgtcttgagtgcaccatgtccattcatagtagggattgattcaagatactttgatctctatgatcctccaccagatgtcagttgtgttgatgtagataccaacactatttctcagattggtgacaagaaaaatgtagcctggaagatacttccaaagaagccatgtaaaaatctgatgaacacactgaataatttgcatcagcaattggcaaaattgcagcagagaccgagagatgatggactcatggatttagcaataaatgactatgattttaattctggaaagaggttgcacatgatagatttggaaatccaagaggcatttttgtttttcatggcctctattttaaaaggttacagatcatacttaaggccaataacacaagccccatctgagacagccacagatgcagcctctctctttgccctacaagctttcttaagaagccgggaccggtcacatcaaaaattctataacatgatgaccaaaacacaaatgtttattcgcttcattgaagaatgttcttttgttagtgacaaagatgcaagcctggcattttttgatgattgtgtagataaagtggatatggacaagagcggtgaagtacgacttatagaactggatgaatctttcaaaagtgaacacactgtttttgtaacaccacctgagatcccccacctacccaatggtgaagaaccccctttacagtacagctataatggatttccagttcttaggaacaatttatttgaaagacctgaaggatttctacaagcaaagaagaacaaattgccttcaaaatcaagtagtcctaatagccctttgcccatgttcagaagaacaaaacaggaaattaaatcagcccataaaattgcaaagaggtactcttccatccctcagatgtggtctaggtgtctactgcgccactgttatggactgtggtttatttgtctcccagcttatgtgaaagtctgtcattcaaaagtcagggctctgaaaacagcatatgatgtgcttaaaaaaatgcagtcaaagaagatggatccacctgatgaggtatgctaccgcattcttatgcaactctgtggacaatatgatcagccagtgcttgcagttcgagtgctttttgaaatgcagaaagctggtattgaccccaatgccattacttatggttattataataaggctgttttggaaagtacctggccttcaagaagtcgtagtggctattttctttggacaaaagtaagaaatgttgttttaggagtaacacagttcaaaagagctttaaagaagcatgcacacttatcacaaacaactctctcaggtggccagtctgatcttggatataattcattatctaaagatgaagttagaagaggggatacatctactgaagacattcaagaagaaaaagataaaaaagggagtgattgtagttccttgtcagagagtgagagtacaaaaggaagtgctgattgccttcctaagctcagttatcaaaattcttccagtatcgttcgcctcactggtacaagtaacaacagtgctggtaaaatatcaggagaaagcatgggtaaggaaagcacacctgagctgctcttaatatcatctcttgaagatacaaatgaaacacgaaacattcaaagtagatgcttcaggaaaagacataaaagtgacaatgaaactaatttgcagcagcaagtggtctggggaaatagaaaccgtaatcttagtggaggggtactgatgggatttatgctcaatagaattaaccaggaagcaacccctggagatatagttgaaaaattgggagctgatgcaaaaattctttcaaatgttatctcaaaaagcacgagaccaaatactcttgatattgggaagccacctttaagatcaaaaagagacagtctagaaaaggaatctagtgatgatgatacaccttttgatggttctaactatttggcagataaagtggattctcctgttatttttgacttagaagacttagacagtgaaacagatgtatcaaaagcaggatgtgttgctacacaaaatcccaagaggattcaacgtatgaacagcagcttttcagtaaaaccttttgaaaaaactgatgtcgcaacaggatttgatcccctctctcttttggttgctgagactgaacagcagcaaaaagaagaagaggaggaggatgaagatgatagcaaaagcatttcaacaccatctgctaggcgtgatttagctgaagaaattgtgatgtatatgaataacatgagcagtcctttgacaagtcgtacaccaagcattgatttacaacgggcatgtgatgataaattaaataagaaaagtccaccattggtcaaggcatgcagaagatctagtctgcctcctaattctcctaagccagtgagacttaccaaatctaaaagttacacaaaaagtgaggagaaaccaagggatagactttggtcttctccagccttctcacctacttgcccatttagggaagaatctcaggatacattaacccactcatcaccttcatttaacttagatacactactagtacctaaactagatgttctaagaaacagtatgttcactgctggaaaaggagttgcagagaaagcaagcaaatggtattcaagattcaccatgtacaccacatcatctaaggatcaaagttctgatcgtaccagtctttcttcagtgggagcccaggattctgaatctacctctttaacagatgaagatgtctgccatgagttggaaggacctatctcctctcaagagaccagtgctacttcagggactaagagaattgatctcagccgaataagcctggaaagttctgcatccttggaaggatctctgtcgaagtttgccttacctgggaaatcagaagtgacatcttccttcaacgcgagtaatacaaatatcttccagaactatgcaatggaggttctcatctcaagttgctctcggtgtagaacttgtgattgtcttgtccatgatgaggaaatcatggctggctggacagcagatgattcaaatctcaatactacatgcccattctgtggcaatatcttcttaccctttctgaatatagaaataagagatttaagacgacctggaagatactttctaaagtcaagcccatcaacagaaaatatgcactttccatcctccatttcaagtcagacgaggcagtcttgcatttcaacatcagcctctggtcttgacacatctgctctctctgttcaagggaattttgatctaaatagcaaatctaaactgcaggaaaatttttgcacccgaagtattcagatccctgctaatagatcaaaaacagctatgtctaaatgtccaatatttccaatggccaggagtattagtacttctggccccttggataaggaagatactggaagacagaagctcatttctacaggcagcctgccagctactttacaaggagctacagattctttaggtttagaatggcaccttccaagtcccgatcctgtcactgttccgtatcttagtcctttagtggtatggaaagaacttgaaagcttattggaaaatgaaggtgatcatgcaataacagtagcagactttgtggaccatcatccaattgttttttggaacctggtatggtatttcagacgtcttgacttgcccagtaacttacctggattgattctttcttctgagcactgtaacaagtattcaaagattccccgccactgtatgtctgaagatagcaaatatgttttaatacaaatgttatgggacaatatgaagttacatcaggatccgggacagcccttgtacattctctggaatgcacacacccaaaaatatccaatggtccatttattgcaaaaaagtgataactcatttaaccaggaactgttgaaaagtatggtaaaaagcattaaaatgaatgatgtctatggaccaatgagtcagattttagagacactgaataagtgtccacattttaaaagacagaggagtttatacagagaaatactatttctctcacttgtggcactgggaagagaaaacattgatatagatgcttttgataaagagtacaagatggcatacgatcgtctcacacctagtcaagtcaagagtacacacaactgtgatagaccaccaagtacaggggtgatggaatgtcgaaaaacctttggagaaccttatctttaagatgtatttgtatgtgtaaacattcaatgtatattgtatagtcagtgtataaaataacacttttagactctaaatattttttcttcaatttttgaaaatacaatttgtaaatggttcaaaagactcagacagcttatgtacagaatgtttgaagaagagaatagtgacaagtggggagaaagccactttgtttctcatttcttttttcttcttctttaactcccctgtaataggaaataaagtatttttgtgatgaggaaatccctaaacaaaattagttgccataaaatatgacaactgctttatggtttcttttggaagagacagattgaaaaatcatgaatggaatctaaacagaaatgtcagatgaacgtatttcctgttttcatagactattcaaatgttttgaccatgaagttgtattatacatattttaaattgtttatagtaagttgatatttttttaatttttaaatttaatatagcaaacttaaaatgaatttaaacttaagcaagcaagcgtgtattttccttgtctgctgctatttgaagtaattagtacagctgcagatctctctgtgtatatctatctatatatatattttttattacttgggagaatgaattttaaaatgtcagtgctagtg

SEQ ID NO: 1082 - protein, 1865 aa, Homo sapiens
MIEDKGPRVADYFVVAGLTDVSKPLEEEIHFNDACHKVAKPKEPITDVSVIIKSLGEEVPQDYICIDVTPTGLSADLNNGSLVGPQIYLCYRRGRDKPPLTDLGVLYDWKERLKQGCEIIQSTPYGRPANISGSTSSQRIYITYRRASENMTQNTLAVTDICIIIPSKGESPPHTFCKVDKNLNNSMWGSAVYLCYKKSVAKTNTVSYKAGLICRYPQEDYESFSLPESVPLFCLPMGATIECWPSNSKYPLPVFSTFVLTGASAEKVYGAAIQFYEPYSEENLTEKQRLLLGLTSADGKSDSSKTIHTNKCICLLSHWPFFDAFRKFLTFLYRYSISGPHVLPIEKHISHFMHKVPFPSPQRPRILVQLSPHDNLILSQPVSSPLPLSGGKFSTLLQNLGPENAVTLLVFAVTEHKILIHSLRPSVLTSVTEALVSMIFPFHWPCPYVPLCPLALADVLSAPCPFIVGIDSRYFDLYDPPPDVSCVDVDTNTISQIGDKKNVAWKILPKKPCKNLMNTLNNLHQQLAKLQQRPRDDGLMDLAINDYDFNSGKRLHMIDLEIQEAFLFFMASILKGYRSYLRPITQAPSETATDAASLFALQAFLRSRDRSHQKFYNMMTKTQMFIRFIEECSFVSDKDASLAFFDDCVDKVDMDKSGEVRLIELDESFKSEHTVFVTPPEIPHLPNGEEPPLQYSYNGFPVLRNNLFERPEGFLQAKKNKLPSKSSSPNSPLPMFRRTKQEIKSAHKIAKRYSSIPQMWSRCLLRHCYGLWFICLPAYVKVCHSKVRALKTAYDVLKKMQSKKMDPPDEVCYRILMQLCGQYDQPVLAVRVLFEMQKAGIDPNAITYGYYNKAVLESTWPSRSRSGYFLWTKVRNVVLGVTQFKRALKKHAHLSQTTLSGGQSDLGYNSLSKDEVRRGDTSTEDIQEEKDKKGSDCSSLSESESTKGSADCLPKLSYQNSSSIVRLTGTSNNSAGKISGESMGKESTPELLLISSLEDTNETRNIQSRCFRKRHKSDNETNLQQQVVWGNRNRNLSGGVLMGFMLNRINQEATPGDIVEKLGADAKILSNVISKSTRPNTLDIGKPPLRSKRDSLEKESSDDDTPFDGSNYLADKVDSPVIFDLEDLDSETDVSKAGCVATQNPKRIQRMNSSFSVKPFEKTDVATGFDPLSLLVAETEQQQKEEEEEDEDDSKSISTPSARRDLAEEIVMYMNNMSSPLTSRTPSIDLQRACDDKLNKKSPPLVKACRRSSLPPNSPKPVRLTKSKSYTKSEEKPRDRLWSSPAFSPTCPFREESQDTLTHSSPSFNLDTLLVPKLDVLRNSMFTAGKGVAEKASKWYSRFTMYTTSSKDQSSDRTSLSSVGAQDSESTSLTDEDVCHELEGPISSQETSATSGTKRIDLSRISLESSASLEGSLSKFALPGKSEVTSSFNASNTNIFQNYAMEVLISSCSRCRTCDCLVHDEEIMAGWTADDSNLNTTCPFCGNIFLPFLNIEIRDLRRPGRYFLKSSPSTENMHFPSSISSQTRQSCISTSASGLDTSALSVQGNFDLNSKSKLQENFCTRSIQIPANRSKTAMSKCPIFPMARSISTSGPLDKEDTGRQKLISTGSLPATLQGATDSLGLEWHLPSPDPVTVPYLSPLVVWKELESLLENEGDHAITVADFVDHHPIVFWNLVWYFRRLDLPSNLPGLILSSEHCNKYSKIPRHCMSEDSKYVLIQMLWDNMKLHQDPGQPLYILWNAHTQKYPMVHLLQKSDNSFNQELLKSMVKSIKMNDVYGPMSQILETLNKCPHFKRQRSLYREILFLSLVALGRENIDIDAFDKEYKMAYDRLTPSQVKSTHNCDRPPSTGVMECRKTFGEPYL

SEQ ID NO: 1083 - DNA, 3843 bp, Homo sapiens
atttccggggacgccgcgccggactgaggctgtgcgcccgagactccgggtccccaggggctgcgccgggccggcctggcaagggggacgagtcagtggacactccaggaagagcggccccgcggggggcgatgaccgtgcgctgaccctgactcactccaggtccggaggcgggggcccccggggcgactcgggggcggaccgcggggcggagctgccgcccgtgagtccggccgagccacctgagcccgagccgcgggacaccgtcgctcctgctctccgaatgctgcgcaccgcgatgggcctgaggagctggctcgccgccccatggggcgcgctgccgcctcggccaccgctgctgctgctcctgctgctgctgctcctgctgcagccgccgcctccgacctgggcgctcagcccccggatcagcctgcctctgggctctgaagagcggccattcctcagattcgaagctgaacacatctccaactacacagcccttctgctgagcagggatggcaggaccctgtacgtgggtgctcgagaggccctctttgcactcagtagcaacctcagcttcctgccaggcggggagtaccaggagctgctttggggtgcagacgcagagaagaaacagcagtgcagcttcaagggcaaggacccacagcgcgactgtcaaaactacatcaagatcctcctgccgctcagcggcagtcacctgttcacctgtggcacagcagccttcagccccatgtgtacctacatcaacatggagaacttcaccctggcaagggacgagaaggggaatgtcctcctggaagatggcaagggccgttgtcccttcgacccgaatttcaagtccactgccctggtggttgatggcgagctctacactggaacagtcagcagcttccaagggaatgacccggccatctcgcggagccaaagccttcgccccaccaagaccgagagctccctcaactggctgcaagacccagcttttgtggcctcagcctacattcctgagagcctgggcagcttgcaaggcgatgatgacaagatctactttttcttcagcgagactggccaggaatttgagttctttgagaacaccattgtgtcccgcattgcccgcatctgcaagggcgatgagggtggagagcgggtgctacagcagcgctggacctccttcctcaaggcccagctgctgtgctcacggcccgacgatggcttccccttcaacgtgctgcaggatgtcttcacgctgagccccagcccccaggactggcgtgacacccttttctatggggtcttcacttcccagtggcacaggggaactacagaaggctctgccgtctgtgtcttcacaatgaaggatgtgcagagagtcttcagcggcctctacaaggaggtgaaccgtgagacacagcagtggtacaccgtgacccacccggtgcccacaccccggcctggagcgtgcatcaccaacagtgcccgggaaaggaagatcaactcatccctgcagctcccagaccgcgtgctgaacttcctcaaggaccacttcctgatggacgggcaggtccgaagccgcatgctgctgctgcagccccaggctcgctaccagcgcgtggctgtacaccgcgtccctggcctgcaccacacctacgatgtcctcttcctgggcactggtgacggccggctccacaaggcagtgagcgtgggcccccgggtgcacatcattgaggagctgcagatcttctcatcgggacagcccgtgcagaatctgctcctggacacccacagggggctgctgtatgcggcctcacactcgggcgtagtccaggtgcccatggccaactgcagcctgtacaggagctgtggggactgcctcctcgcccgggacccctactgtgcttggagcggctccagctgcaagcacgtcagcctctaccagcctcagctggccaccaggccgtggatccaggacatcgagggagccagcgccaaggacctttgcagcgcgtcttcggttgtgtccccgtcttttgtaccaacaggggagaagccatgtgagcaagtccagttccagcccaacacagtgaacactttggcctgcccgctcctctccaacctggcgacccgactctggctacgcaacggggcccccgtcaatgcctcggcctcctgccacgtgctacccactggggacctgctgctggtgggcacccaacagctgggggagttccagtgctggtcactagaggagggcttccagcagctggtagccagctactgcccagaggtggtggaggacggggtggcagaccaaacagatgagggtggcagtgtacccgtcattatcagcacatcgcgtgtgagtgcaccagctggtggcaaggccagctggggtgcagacaggtcctactggaaggagttcctggtgatgtgcacgctctttgtgctggccgtgctgctcccagttttattcttgctctaccggcaccggaacagcatgaaagtcttcctgaagcagggggaatgtgccagcgtgcaccccaagacctgccctgtggtgctgccccctgagacccgcccactcaacggcctagggccccctagcaccccgctcgatcaccgagggtaccagtccctgtcagacagccccccggggtcccgagtcttcactgagtcagagaagaggccactcagcatccaagacagcttcgtggaggtatccccagtgtgcccccggccccgggtccgccttggctcggagatccgtgactctgtggtgtgagagctgacttccagaggacgctgccctggcttcaggggctgtgaatgctcggagagggtcaactggacctcccctccgctctgctcttcgtggaacacgaccgtggtgcccggcccttgggagccttggggccagctggcctgctgctctccagtcaagtagcgaagctcctaccacccagacacccaaacagccgtggccccagaggtcctggccaaatatgggggcctgcctaggttggtggaacagtgctccttatgtaaactgagccctttgtttaaaaaacaattccaaatgtgaaactagaatgagagggaagagatagcatggcatgcagcacacacggctgctccagttcatggcctcccaggggtgctggggatgcatccaaagtggttgtctgagacagagttggaaaccctcaccaactggcctcttcaccttccacattatcccgctgccaccggctgccctgtctcactgcagattcaggaccagcttgggctgcgtgcgttctgccttgccagtcagccgaggatgtagttgttgctgccgtcgtcccaccacctcagggaccagagggctaggttggcactgcggccctcaccaggtcctgggctcggacccaactcctggacctttccagcctgtatcaggctgtggccacacgagaggacagcgcgagctcaggagagatttcgtgacaatgtacgcctttccctcagaattcagggaagagactgtcgcctgccttcctccgttgttgcgtgagaacccgtgtgccccttcccaccatatccaccctcgctccatctttgaactcaaacacgaggaactaactgcaccctggtcctctccccagtccccagttcaccctccatccctcaccttcctccactctaagggatatcaacactgcccagcacaggggccctgaatttatgtggtttttatacattttttaataagatgcactttatgtcattttttaataaagtctgaagaattactgtttaaaaaaaaaaaaaaaaaaaaaaaaaaaaaaa

SEQ ID NO: 1084 - protein, 837 aa, Homo sapiens
MLRTAMGLRSWLAAPWGALPPRPPLLLLLLLLLLLQPPPPTWALSPRISLPLGSEERPFLRFEAEHISNYTALLLSRDGRTLYVGAREALFALSSNLSFLPGGEYQELLWGADAEKKQQCSFKGKDPQRDCQNYIKILLPLSGSHLFTCGTAAFSPMCTYINMENFTLARDEKGNVLLEDGKGRCPFDPNFKSTALVVDGELYTGTVSSFQGNDPAISRSQSLRPTKTESSLNWLQDPAFVASAYIPESLGSLQGDDDKIYFFFSETGQEFEFFENTIVSRIARICKGDEGGERVLQQRWTSFLKAQLLCSRPDDGFPFNVLQDVFTLSPSPQDWRDTLFYGVFTSQWHRGTTEGSAVCVFTMKDVQRVFSGLYKEVNRETQQWYTVTHPVPTPRPGACITNSARERKINSSLQLPDRVLNFLKDHFLMDGQVRSRMLLLQPQARYQRVAVHRVPGLHHTYDVLFLGTGDGRLHKAVSVGPRVHIIEELQIFSSGQPVQNLLLDTHRGLLYAASHSGVVQVPMANCSLYRSCGDCLLARDPYCAWSGSSCKHVSLYQPQLATRPWIQDIEGASAKDLCSASSVVSPSFVPTGEKPCEQVQFQPNTVNTLACPLLSNLATRLWLRNGAPVNASASCHVLPTGDLLLVGTQQLGEFQCWSLEEGFQQLVASYCPEVVEDGVADQTDEGGSVPVIISTSRVSAPAGGKASWGADRSYWKEFLVMCTLFVLAVLLPVLFLLYRHRNSMKVFLKQGECASVHPKTCPVVLPPETRPLNGLGPPSTPLDHRGYQSLSDSPPGSRVFTESEKRPLSIQDSFVEVSPVCPRPRVRLGSEIRDSVV

SEQ ID NO: 1085 - DNA, 3809 bp, Homo sapiens
gcttgcgggtgagctctgcccaagccgaggctgcggggccggcgccggcgggaggactgcggtgccccgcggaggggctgagtttgccagggcccacttgaccctgtttcccacctcccgccccccaggtccggaggcgggggcccccggggcgactcgggggcggaccgcggggcggagctgccgcccgtgagtccggccgagccacctgagcccgagccgcgggacaccgtcgctcctgctctccgaatgctgcgcaccgcgatgggcctgaggagctggctcgccgccccatggggcgcgctgccgcctcggccaccgctgctgctgctcctgctgctgctgctcctgctgcagccgccgcctccgacctgggcgctcagcccccggatcagcctgcctctgggctctgaagagcggccattcctcagattcgaagctgaacacatctccaactacacagcccttctgctgagcagggatggcaggaccctgtacgtgggtgctcgagaggccctctttgcactcagtagcaacctcagcttcctgccaggcggggagtaccaggagctgctttggggtgcagacgcagagaagaaacagcagtgcagcttcaagggcaaggacccacagcgcgactgtcaaaactacatcaagatcctcctgccgctcagcggcagtcacctgttcacctgtggcacagcagccttcagccccatgtgtacctacatcaacatggagaacttcaccctggcaagggacgagaaggggaatgtcctcctggaagatggcaagggccgttgtcccttcgacccgaatttcaagtccactgccctggtggttgatggcgagctctacactggaacagtcagcagcttccaagggaatgacccggccatctcgcggagccaaagccttcgccccaccaagaccgagagctccctcaactggctgcaagacccagcttttgtggcctcagcctacattcctgagagcctgggcagcttgcaaggcgatgatgacaagatctactttttcttcagcgagactggccaggaatttgagttctttgagaacaccattgtgtcccgcattgcccgcatctgcaagggcgatgagggtggagagcgggtgctacagcagcgctggacctccttcctcaaggcccagctgctgtgctcacggcccgacgatggcttccccttcaacgtgctgcaggatgtcttcacgctgagccccagcccccaggactggcgtgacacccttttctatggggtcttcacttcccagtggcacaggggaactacagaaggctctgccgtctgtgtcttcacaatgaaggatgtgcagagagtcttcagcggcctctacaaggaggtgaaccgtgagacacagcagtggtacaccgtgacccacccggtgcccacaccccggcctggagcgtgcatcaccaacagtgcccgggaaaggaagatcaactcatccctgcagctcccagaccgcgtgctgaacttcctcaaggaccacttcctgatggacgggcaggtccgaagccgcatgctgctgctgcagccccaggctcgctaccagcgcgtggctgtacaccgcgtccctggcctgcaccacacctacgatgtcctcttcctgggcactggtgacggccggctccacaaggcagtgagcgtgggcccccgggtgcacatcattgaggagctgcagatcttctcatcgggacagcccgtgcagaatctgctcctggacacccacagggggctgctgtatgcggcctcacactcgggcgtagtccaggtgcccatggccaactgcagcctgtacaggagctgtggggactgcctcctcgcccgggacccctactgtgcttggagcggctccagctgcaagcacgtcagcctctaccagcctcagctggccaccaggccgtggatccaggacatcgagggagccagcgccaaggacctttgcagcgcgtcttcggttgtgtccccgtcttttgtaccaacaggggagaagccatgtgagcaagtccagttccagcccaacacagtgaacactttggcctgcccgctcctctccaacctggcgacccgactctggctacgcaacggggcccccgtcaatgcctcggcctcctgccacgtgctacccactggggacctgctgctggtgggcacccaacagctgggggagttccagtgctggtcactagaggagggcttccagcagctggtagccagctactgcccagaggtggtggaggacggggtggcagaccaaacagatgagggtggcagtgtacccgtcattatcagcacatcgcgtgtgagtgcaccagctggtggcaaggccagctggggtgcagacaggtcctactggaaggagttcctggtgatgtgcacgctctttgtgctggccgtgctgctcccagttttattcttgctctaccggcaccggaacagcatgaaagtcttcctgaagcagggggaatgtgccagcgtgcaccccaagacctgccctgtggtgctgccccctgagacccgcccactcaacggcctagggccccctagcaccccgctcgatcaccgagggtaccagtccctgtcagacagccccccggggtcccgagtcttcactgagtcagagaagaggccactcagcatccaagacagcttcgtggaggtatccccagtgtgcccccggccccgggtccgccttggctcggagatccgtgactctgtggtgtgagagctgacttccagaggacgctgccctggcttcaggggctgtgaatgctcggagagggtcaactggacctcccctccgctctgctcttcgtggaacacgaccgtggtgcccggcccttgggagccttggggccagctggcctgctgctctccagtcaagtagcgaagctcctaccacccagacacccaaacagccgtggccccagaggtcctggccaaatatgggggcctgcctaggttggtggaacagtgctccttatgtaaactgagccctttgtttaaaaaacaattccaaatgtgaaactagaatgagagggaagagatagcatggcatgcagcacacacggctgctccagttcatggcctcccaggggtgctggggatgcatccaaagtggttgtctgagacagagttggaaaccctcaccaactggcctcttcaccttccacattatcccgctgccaccggctgccctgtctcactgcagattcaggaccagcttgggctgcgtgcgttctgccttgccagtcagccgaggatgtagttgttgctgccgtcgtcccaccacctcagggaccagagggctaggttggcactgcggccctcaccaggtcctgggctcggacccaactcctggacctttccagcctgtatcaggctgtggccacacgagaggacagcgcgagctcaggagagatttcgtgacaatgtacgcctttccctcagaattcagggaagagactgtcgcctgccttcctccgttgttgcgtgagaacccgtgtgccccttcccaccatatccaccctcgctccatctttgaactcaaacacgaggaactaactgcaccctggtcctctccccagtccccagttcaccctccatccctcaccttcctccactctaagggatatcaacactgcccagcacaggggccctgaatttatgtggtttttatacattttttaataagatgcactttatgtcattttttaataaagtctgaagaattactgtttaaaaaaaaaaaaaaaaaaaaaaaaaaaaaaa

SEQ ID NO: 1086 - protein, 837 aa, Homo sapiens; identical to SEQ ID NO: 1084

SEQ ID NO: 1087 - DNA, 905 bp, Homo sapiens
tctcccgaattcggcacgaggcggcgtctcgaggcgagttggcggagctgtgcgcgcggcggggcgatggggggctcgggcagtcgcctgtccaaggagctgctggccgagtaccaggacttgacgttcctgacgaagcaggagatcctcctagcccacaggcggttttgtgagctgcttccccaggagcagcggaccgtggagtcgtcacttcgggcacaagtgcccttcgagcagattctcagccttccagagctcaaggccaaccccttcaaggagcgaatctgcagggtcttctccacatccccagccaaagacagccttagctttgaggacttcctggatctcctcagtgtgttcagtgacacagccacgccagacatcaagtcccattatgccttccgcatctttgactttgatgatgacggaaccttgaacagagaagacctgagccggctggtgaactgcctcacgggagagggcgaggacacacggcttagtgcgtctgagatgaagcagctcatcgacaacatcctggaggagtctgacattgacagggatggaaccatcaacctctctgagttccagcacgtcatctcccgttctccagactttgccagctcctttaagattgtcctgtgacagcagccccagcgtgtgtcctggcaccctgtccaagaacctttctactgctgagctgtggccaaggtcaagcctgtgttgccagtgcgggccaagctggcccagcctggagctggcgctgtgcagcctcaccccgggcaggggcggccctcgttgtcagggcctctcctcactgctgttgtcattgctccgtttgtgtttgtactaatcagtaataaaggtttagaagtttgaccctaaaaaaaaaaaaaaaaaaaaaaaaa

SEQ ID NO: 1088 - protein, 191 aa, Homo sapiens
MGGSGSRLSKELLAEYQDLTFLTKQEILLAHRRFCELLPQEQRTVESSLRAQVPFEQILSLPELKANPFKERICRVFSTSPAKDSLSFEDFLDLLSVFSDTATPDIKSHYAFRIFDFDDDGTLNREDLSRLVNCLTGEGEDTRLSASEMKQLIDNILEESDIDRDGTINLSEFQHVISRSPDFASSFKIVL

SEQ ID NO: 1089 - DNA, 1940 bp, Homo sapiens
gtgccgggaggagggcgcagcccgggctaggtctcccggcctccagctcccgctcctctgcagacctcaggccagcccccgcccctccctcgggacagcgcccccgaagctgtctctagaggatcccggggtcggaggcagggttcaaggcagcacttacaggaggatctcctgcttcgtcaggaacgtcaagtcctggaaggcaaagccagagcggggattagcggaccgctgggaggccgccgccgccccgcagccagctcccggaccctgctcccgaaagccgccgtggcgcaatgaaggtgaaggccggcgcgctcgccggccgaggtgggatcccgaggcctccccagggccaggcgtcccgcgcacctggtactcggccagcagctccttggacaggcgactgcccgagccccccatcgccccgccgcgcgcacagctccgccaactcgcctcgagacgcagacaactttctcacttccgcccttgggccgcgtcactgcccggtccccgcggcaaccgctcctggggccaccacccccgggcccgccccctcctaaaagctgccaagcgttcccagccgggtttggcaggcgagctgccggctccaagcggtcctaggctatttactgaggacccactggatgtcaagcattgtgcatagttttcttcgattgttgcaacatcccttgcgagtttctggagcagcagagctgaaggaacccaaacttggactgaagtgactctactaaggtcagctctatggctcttccacatgattcaaacgaaacttcctatttgctgcctcccaacaatgaggactggggcgggcaaaccattcctgactttgtttatgggcagaaggatctcacggcagaagggattcagtggccaaggaatgcacctggcatcccagatgctctgccacaatctccctttgatgctgcactctgctctgcctggaagcagcgggtggagctggggctgtttcgctaccgtctacgggagctacagacccaaatcctccctggtgctgtgggtttcgtggctcagctgaatgtggagcgtggtgtgcagaggaggcccccgcagaccatcaagagtgtgaggcaggcatttgaccctgtacagttcaacttcaacaagatccggcccggagaagtcctcttccgtttgcaccgggagcctgatctccctgggactctgctgcaagaagacatcctggtggtgatcaacgtcagccccctggagtggggccacgtgctgctggtgcctgagcctgcccgccagctcccccagcgcctgctgccgggtgcactgagggcagggattgaggctgtgctgctgagcttacacccgggcttccgtgtcggcttcaacagcctgggaggcttggcctcggtgaaccacctccacctgcatggctattacctggcccacagactgcccgtggagcaggcgccaagcgagcccctggaccctggaggccatttgcatctgctccaggacctcccagctcctggcttcctcttttacactcgtgggccagggactgacttggagtccttgataagcagggtatgtcgggccactgattatctgactgaccatgagattgctcataacttgtttgtcacccggggagctccgccgggaaagacatcaccttcctcagccctcataggggtccgagtaattctgtgggcccggaagtccagctttgggataaaggacggtgaagctttcaatgttgccctctgtgagctggctgggcacctccctgtcaaaacatcccaggacttcagcagcctgacagaggcagctgctgtggccctcattcaggactgtcggctgcccccatcccaggcagaagacgtacaggcagcactggtggccctgatgtcccaggaagagcaataatacttctggatgtattt

SEQ ID NO: 1090 - protein, 385 aa, Homo sapiens
MALPHDSNETSYLLPPNNEDWGGQTIPDFVYGQKDLTAEGIQWPRNAPGIPDALPQSPFDAALCSAWKQRVELGLFRYRLRELQTQILPGAVGFVAQLNVERGVQRRPPQTIKSVRQAFDPVQFNFNKIRPGEVLFRLHREPDLPGTLLQEDILVVINVSPLEWGHVLLVPEPARQLPQRLLPGALRAGIEAVLLSLHPGFRVGFNSLGGLASVNHLHLHGYYLAHRLPVEQAPSEPLDPGGHLHLLQDLPAPGFLFYTRGPGTDLESLISRVCRATDYLTDHEIAHNLFVTRGAPPGKTSPSSALIGVRVILWARKSSFGIKDGEAFNVALCELAGHLPVKTSQDFSSLTEAAAVALIQDCRLPPSQAEDVQAALVALMSQEEQ

SEQ ID NO: 1091 - DNA, 1793 bp, Homo sapiens
aacggcggcggccacgggcttgctagaggaagcgctgccccggcagccgcagccacggccaccgggagctaggagtgaacccctgcgggggagcagcttccccctcgcgatcgtggggacagccagtcctgtgaaacgaggaggcggttccggacgcccagaaacgcccagggagacctggagccgggggaagaggggacatgagcggccagctgagtccatccccaggcggctaggggcggacccagcagcccctcagctctcctcgtaaccacggaatctgagagaatggagccgagtacctgtaggaccatggaatcagaggaagactatgttgaggaaaaggaatctgagaagtgtgttaaagagggagttaccaacccctctaactcttcacagcaggctctcttaaaagctgactataaggcattaaaaaatggggttccctcacccattatggccacaaaaattccgaagaaagtcatagccccagttgacacaggcgacttagaagctgggaggaggaagagaaggcggaaacgcagatcactggccatcaacctgaccaactgcaagtatgagagtgtgcgtcgggcagcccaaatgtgtggcctgaaggaggtgggggaggatgaagagtggactctgtactggacagactgcgctgtctcactggaacgagtcatggacatgaagaggtttcagaaaatcaaccacttccctggcatgacagaaatctgccgcaaagatctgctggctcggaacctcaaccgcatgtacaaactctatccctctgagtacaacatcttcccccgcacctggtgcctccccgcagactatggggacttccagtcctacggtcgtcagcgaaaagcccgcacatatatctgcaagccagacagtggctgtcagggacgtggcatcttcattacccgaaatccccgggagatcaagccaggagagcatatgatctgccagcaatacatctccaagcccctcctcattgatggcttcaagtttgatatgcgagtctacgtcctgatcacatcctgtgaccctctccggatcttcacatatgaggagggcctagcccgttttgccaccacgccctatatggagcccagccataacaacctggacaatgtctgcatgcacctgaccaactatgctatcaacaaacacaatgagaattttgtccgggatggcgctgtgggcagtaagaggaagctgtcgacactcaacatctggctgcaagagcacagctacaaccctggagagctgtggggggacatcgaggacatcatcatcaaaaccatcatctcagcccattctgttctacgccacaactaccgaacctgttttccccagtatctgaatggaggtacatgtgcctgttttgaaatccttggttttgacatcttgctggaccacaagttgaagccctggctgctagaggtaaaccactctccaagctttaccacggactcatgccttgatcaagaagtaaaggatgcacttctctgtgatgctatgacccttgtcaacctccggggctgtgacaaaaggaaggtgatggaggaggataagcggcgagtcaaggaacggcttttccagtgctaccgacagccacgagaatctaggtgtgctaggtgtctggcatgtgtttagttcttcattattcctgagagtaaaagtcctcctttagatgaagaatgtggcctggggctgatttgctatcaaaaacaactttttgcatagataatatgttcatatttgcattaaaaaaatcacag

SEQ ID NO: 1092 - protein, 459 aa, Homo sapiens
MEPSTCRTMESEEDYVEEKESEKCVKEGVTNPSNSSQQALLKADYKALKNGVPSPIMATKIPKKVIAPVDTGDLEAGRRKRRRKRRSLAINLTNCKYESVRRAAQMCGLKEVGEDEEWTLYWTDCAVSLERVMDMKRFQKINHFPGMTEICRKDLLARNLNRMYKLYPSEYNIFPRTWCLPADYGDFQSYGRQRKARTYICKPDSGCQGRGIFITRNPREIKPGEHMICQQYISKPLLIDGFKFDMRVYVLITSCDPLRIFTYEEGLARFATTPYMEPSHNNLDNVCMHLTNYAINKHNENFVRDGAVGSKRKLSTLNIWLQEHSYNPGELWGDIEDIIIKTIISAHSVLRHNYRTCFPQYLNGGTCACFEILGFDILLDHKLKPWLLEVNHSPSFTTDSCLDQEVKDALLCDAMTLVNLRGCDKRKVMEEDKRRVKERLFQCYRQPRESRCARCLACV

SEQ ID NO: 1093 - DNA, 1367 bp, Homo sapiens
acttccgctgctgtttcgtagccgactgctgaaggctggtttgcgtcgacatggcggttaccctgagtctcttgctgggcgggcgcgtttgcgccgccgtcactcgctgtgggttcgcgacccggggggtggcgggcccaggccctattggccgggagccggaccccgattccgactgggagccggaggaacgggagctgcaggaggtggagagcaccctgaaacgacagaaacaagcaatccgattccagaaaattcggaggcaaatggaggcgcctggtgccccgcccaggaccctgacgtgggaagccatggagcagatacggtatttacatgaggaatttccagagtcctggtcagttcccaggttggctgaaggctttgatgtcagcactgatgtgatccgaagagttttaaaaagcaagtttttacccacattggagcagaagctgaagcaggatcaaaaagtccttaagaaagctgggcttgcccactcgctgcagcacctccggggctctggaaatacctcaaagctgctccctgcaggccactctgtatcaggctctttgcttatgccagggcatgaagcctcatctaaagacccaaatcacagcacagctttgaaagtgatagagtcagacactcacaggacaaatacaccaaggagaaggaagggaagaaataaagaaatccaggacctggaggagagctttgtgcctgttgctgcacccctaggtcatccaagagagctgcagaagtactccagtgattctgagagccccagaggaactggcagtggtgcgttgccaagtggtcagaagctggaggagttgaaggcagaggagccagataacttcagcagcaaagtagtgcagaggggccgagagttctttgacagcaacgggaacttcctgtacagaatttgagtcggggcttggcttatggagatgcctcgtgaaacacagctgggcaagtattaatgtatatggaacagcctggatttctgcatatggataagccaccttggaataggaagaggtgttgagcctggactgtgggaggaaagagctgcgtggatagattcaaacttcctgtggtagtgctcccagtctgacctctgtagaccttcagtactcactcttcttgcttaggctctctgtgtgttgaaagccatcccgtgttgcatgtgttgttacaattttctgtgatacttgcaatttatgtttgagaagaagtgaaaagtttgccttctgacctcatttccttcttgatcagtgaacactaacattttggggacaacttagtcaattggttttccttacaacaaaataaagtaaaatgtagcagtcaaaaaaaaaaaaaaaaaa

SEQ ID NO: 1094 - protein, 291 aa, Homo sapiens
MAVTLSLLLGGRVCAAVTRCGFATRGVAGPGPIGREPDPDSDWEPEERELQEVESTLKRQKQAIRFQKIRRQMEAPGAPPRTLTWEAMEQIRYLHEEFPESWSVPRLAEGFDVSTDVIRRVLKSKFLPTLEQKLKQDQKVLKKAGLAHSLQHLRGSGNTSKLLPAGHSVSGSLLMPGHEASSKDPNHSTALKVIESDTHRTNTPRRRKGRNKEIQDLEESFVPVAAPLGHPRELQKYSSDSESPRGTGSGALPSGQKLEELKAEEPDNFSSKVVQRGREFFDSNGNFLYRI

SEQ ID NO: 1095 - DNA, 1782 bp, Homo sapiens
acttccgctgctgtttcgtagccgactgctgaaggctggtttgcgtcgacatggcggttaccctgagtctcttgctgggcgggcgcgtttgcgccgccgtcactcgctgtgggttcgcgacccggggggtggcgggcccaggccctattggccgggagccggaccccgattccgactgggagccggaggaacgggagctgcaggaggtggagaggtaccggcttctccccgggccctcagcttgaagcagggcctcgtgccccggcgctccaggccgcgcccccttggcgccgggtgtcctgccgctgcttgcgcagcggcccttgtttcttcttacccgttgttaggggcgcagcgtcaggtgttcagctcccctgggaccactggtcccttcattagtgacgtatttcatcatcagtttagagagttcggcatgcttacaggcagttattgttctaggtgttagctttctgggtgtacggagcagctctaagccggcaacatggcccggttgcccttgcgatcaaagagaagagggctgggcgctccatgatttagcctgaggctcttcaaacatccattctgcttccacgcatggcttctgccattggttctcttcccccagcaccctgaaacgacagaaacaagcaatccgattccagaaaattcggaggcaaatggaggcgcctggtgccccgcccaggaccctgacgtgggaagccatggagcagatacggtatttacatgaggaatttccagagtcctggtcagttcccaggttggctgaaggctttgatgtcagcactgatgtgatccgaagagttttaaaaagcaagtttttacccacattggagcagaagctgaagcaggatcaaaaagtccttaagaaagctgggcttgcccactcgctgcagcacctccggggctctggaaatacctcaaagctgctccctgcaggccactctgtatcaggctctttgcttatgccagggcatgaagcctcatctaaagacccaaatcacagcacagctttgaaagtgatagagtcagacactcacaggacaaatacaccaaggagaaggaagggaagaaataaagaaatccaggacctggaggagagctttgtgcctgttgctgcacccctaggtcatccaagagagctgcagaagtactccagtgattctgagagccccagaggaactggcagtggtgcgttgccaagtggtcagaagctggaggagttgaaggcagaggagccagataacttcagcagcaaagtagtgcagaggggccgagagttctttgacagcaacgggaacttcctgtacagaatttgagtcggggcttggcttatggagatgcctcgtgaaacacagctgggcaagtattaatgtatatggaacagcctggatttctgcatatggataagccaccttggaataggaagaggtgttgagcctggactgtgggaggaaagagctgcgtggatagattcaaacttcctgtggtagtgctcccagtctgacctctgtagaccttcagtactcactcttcttgcttaggctctctgtgtgttgaaagccatcccgtgttgcatgtgttgttacaattttctgtgatacttgcaatttatgtttgagaagaagtgaaaagtttgccttctgacctcatttccttcttgatcagtgaacactaacattttggggacaacttagtcaattggttttccttacaacaaaataaagtaaaatgtagcagtcaaaaaaaaaaaaaaaaaaaaaa

SEQ ID NO: 1096 - protein, 219 aa, Homo sapiens
MEAPGAPPRTLTWEAMEQIRYLHEEFPESWSVPRLAEGFDVSTDVIRRVLKSKFLPTLEQKLKQDQKVLKKAGLAHSLQHLRGSGNTSKLLPAGHSVSGSLLMPGHEASSKDPNHSTALKVIESDTHRTNTPRRRKGRNKEIQDLEESFVPVAAPLGHPRELQKYSSDSESPRGTGSGALPSGQKLEELKAEEPDNFSSKVVQRGREFFDSNGNFLYRI

SEQ ID NO: 1097 - DNA, 1790 bp, Homo sapiens
ccggtcgggttctgggaggcaccgcctcggggttgcgggccgggtgcggctcggcggtggaggactcacttcctgctccatccccggctgggccctggggcggaactgatgacgcttgataatgtggctggggacttcagggaagagtgggttacctggacactgcttagagaatcctctccaggaatgccacccagcacagttagaagaatgggctctcaaaggaatttccaggcctagtgtaatctcccagccggagcagaaagaagagccatgggtcctaccactccaaaactttgaggcgaggaagatcccgagggaaagccacacagactgtgagcatcaggtggcaaagctcaatcaggacagttctgaaacagcagaacaatgtggaacatcctcagaaaggaccaataaagatctttctcatactcttagttggggaggaaactgggagcaaggcctagaattagaagggcaacatggaacccttccaggagagggccagctggagtccttttcacaggagagggatttaaacaagctcctggatggatatgtaggagagaagcctatgtgtgcagaatgcgggaaaagctttaaccagagttcctatctcataagacacctaagaacccacactggcgagaggccctatacgtgcattgagtgtgggaaaggcttcaaacagagctcagaccttgtcacccatcgcagaacacacacaggagagaagccctaccaatgcaaggggtgtgagaagaaattcagcgacagctcaacactcatcaaacatcagagaacccacacaggggagagaccctatgagtgcccagagtgtggaaagacttttgggcggaagccacacctcataatgcaccaaagaacccacacaggcgagaagccctacgcgtgcctggaatgtcacaaaagcttcagtcgaagctcaaatttcatcactcaccagaggacccacacaggggtgaagccttacaggtgtaatgactgtggggagagttttagccagagctcggatttgattaagcaccaacgaacccacacgggagaacggcccttcaaatgcccggagtgcgggaagggcttcagagatagttctcattttgtagctcacatgagcactcattcaggagagaggcctttcagttgtcctgactgccacaaaagcttcagtcagagctcacatttggtcacgcaccaaagaacacacacaggtgagagaccttttaagtgcgaaaactgtgggaaaggattcgccgacagctccgccctcattaagcaccaacgaatccacaccggagaaagaccctacaaatgtggagagtgtgggaagagcttcaatcagagctcccactttattacccatcagcgaatccacttaggagacaggccctatcgatgtcctgagtgtggcaagaccttcaatcagcgttcccatttcctcacacaccagagaacgcatacaggagaaaaacctttccactgtagtaaatgtaacaagagcttccgtcagaaagcgcatcttttatgccatcaaaacacccatttgatttaggaagtagtctttggtgttcagctgctcccttgcacattttcattgctactgtcttcaagcaccccaaatagagaaaacctgggcgtcagtggctcaatttgggccctgatctattctccctctttcttgtctatgttataacagagaggataaacttaaagggtccaaataacggtccgaatacaaaaggcattccttcaaaaaaaaaaaaaaaaaa

SEQ ID NO: 1098 - protein, 483 aa, Homo sapiens
MWLGTSGKSGLPGHCLENPLQECHPAQLEEWALKGISRPSVISQPEQKEEPWVLPLQNFEARKIPRESHTDCEHQVAKLNQDSSETAEQCGTSSERTNKDLSHTLSWGGNWEQGLELEGQHGTLPGEGQLESFSQERDLNKLLDGYVGEKPMCAECGKSFNQSSYLIRHLRTHTGERPYTCIECGKGFKQSSDLVTHRRTHTGEKPYQCKGCEKKFSDSSTLIKHQRTHTGERPYECPECGKTFGRKPHLIMHQRTHTGEKPYACLECHKSFSRSSNFITHQRTHTGVKPYRCNDCGESFSQSSDLIKHQRTHTGERPFKCPECGKGFRDSSHFVAHMSTHSGERPFSCPDCHKSFSQSSHLVTHQRTHTGERPFKCENCGKGFADSSALIKHQRIHTGERPYKCGECGKSFNQSSHFITHQRIHLGDRPYRCPECGKTFNQRSHFLTHQRTHTGEKPFHCSKCNKSFRQKAHLLCHQNTHLI

SEQ ID NO: 1099 - DNA, 7219 bp, Homo sapiens
ggaccccggcaagcccgcgcacttggcaggagctgtagctaccgccgtccgcgcctccaaggtttcacggcttcctcagcagagactcgggctcgtccgccatgtccgccgcagacgaggttgacgggctgggcgtggcccggccgcactatggctctgtcctggataatgaaagacttactgcagaggagatggatgaaaggagacgtcagaacgtggcttatgagtacctttgtcatttggaagaagcgaagaggtggatggaagcatgcctaggggaagatctgcctcccaccacagaactggaggaggggcttaggaatggggtctaccttgccaaactggggaacttcttctctcccaaagtagtgtccctgaaaaaaatctatgatcgagaacagaccagatacaaggcgactggcctccactttagacacactgataatgtgattcagtggttgaatgccatggatgagattggattgcctaagattttttacccagaaactacagatatctatgatcgaaagaacatgccaagatgtatctactgtatccatgcactcagtttgtacctgttcaagctaggcctggcccctcagattcaagacctatatggaaaggttgacttcacagaagaagaaatcaacaacatgaagactgagttggagaagtatggcatccagatgcctgcctttagcaagattgggggcatcttggctaatgaactgtcagtggatgaagccgcattacatgctgctgttattgctattaatgaagctattgaccgtagaattccagccgacacatttgcagctttgaaaaatccgaatgccatgcttgtaaatcttgaagagcccttggcatccacttaccaggatatactttaccaggctaagcaggacaaaatgacaaatgctaaaaacaggacagaaaactcagagagagaaagagatgtttatgaggagctgctcacgcaagctgaaattcaaggcaatataaacaaagtcaatacattttctgcattagcaaatatcgacctggctttagaacaaggagatgcactggccttgttcagggctctgcagtcaccagccctggggcttcgaggactgcagcaacagaatagcgactggtacttgaagcagctcctgagtgataaacagcagaagagacagagtggtcagactgaccccctgcagaaggaggagctgcagtctggagtggatgctgcaaacagtgctgcccagcaatatcagagaagattggcagcagtagcactgattaatgctgcaatccagaagggtgttgctgagaagactgttttggaactgatgaatcccgaagcccagctgccccaggtgtatccatttgccgccgatctctatcagaaggagctggctaccctgcagcgacaaagtcctgaacataatctcacccacccagagctctctgtcgcagtggagatgttgtcatcggtggccctgatcaacagggcattggaatcaggagatgtgaatacagtgtggaagcaattgagcagttcagttactggtcttaccaatattgaggaagaaaactgtcagaggtatctcgatgagttgatgaaactgaaggctcaggcacatgcagagaataatgaattcattacatggaatgatatccaagcttgcgtggaccatgtgaacctggtggtgcaagaggaacatgagaggattttagccattggtttaattaatgaagccctggatgaaggtgatgcccaaaagactctgcaggccctacagattcctgcagctaaacttgagggagtccttgcagaagtggcccagcattaccaagacacgctgattagagcgaagagagagaaagcccaggaaatccaggatgagtcagctgtgttatggttggatgaaattcaaggtggaatctggcagtccaacaaagacacccaagaagcacagaagtttgccttaggaatctttgccattaatgaggcagtagaaagtggtgatgttggcaaaacactgagtgcccttcgctcccctgatgttggcttgtatggagtcatccctgagtgtggtgaaacttaccacagtgatcttgctgaagccaagaagaaaaaactggcagtaggagataataacagcaagtgggtgaagcactgggtaaaaggtggatattattattaccacaatctggagacccaggaaggaggatgggatgaacctccaaattttgtgcaaaattctatgcagctttctcgggaggagatccagagttctatctctggggtgactgccgcatataaccgagaacagctgtggctggccaatgaaggcctgatcaccaggctgcaggctcgctgccgtggatacttagttcgacaggaattccgatccaggatgaatttcctgaagaaacaaatccctgccatcacctgcattcagtcacagtggagaggatacaagcagaagaaggcatatcaagatcggttagcttacctgcgctcccacaaagatgaagttgtaaagattcagtccctggcaaggatgcaccaagctcgaaagcgctatcgagatcgcctgcagtacttccgggaccatataaatgacattatcaaaatccaggcttttattcgggcaaacaaagctcgggatgactacaagactctcatcaatgctgaggatcctcctatggttgtggtccgaaaatttgtccacctgctggaccaaagtgaccaggattttcaggaggagcttgaccttatgaagatgcgggaagaggttatcaccctcattcgttctaaccagcagctggagaatgacctcaatctcatggatatcaaaattggactgctagtgaaaaataagattacgttgcaggatgtggtttcccacagtaaaaaacttaccaaaaaaaataaggaacagttgtctgatatgatgatgataaataaacagaagggaggtctcaaggctttgagcaaggagaagagagagaagttggaagcttaccagcacctgttttatttattgcaaaccaatcccacctatctggccaagctcatttttcagatgccccagaacaagtccaccaagttcatggactctgtaatcttcacactctacaactacgcgtccaaccagcgagaggagtacctgctcctgcggctctttaagacagcactccaagaggaaatcaagtcgaaggtagatcagattcaagagattgtgacaggaaatcctacggttattaaaatggttgtaagtttcaaccgtggtgcccgtggccagaatgccctgagacagatcttggccccagtcgtgaaggaaattatggatgacaaatctctcaacatcaaaactgaccctgtggatatttacaaatcttgggttaatcagatggagtctcagacaggagaggcaagcaaactgccctatgatgtgacccctgagcaggcgctagctcatgaagaagtgaagacacggctagacagctccatcaggaacatgcgggctgtgacagacaagtttctctcagccattgtcagctctgtggacaaaatcccttatgggatgcgcttcattgccaaagtgctgaaggactcgttgcatgagaagttccctgatgctggtgaggatgagctgctgaagattattggtaacttgctttattatcgatacatgaatccagccattgttgctcctgatgcctttgacatcattgacctgtcagcaggaggccagcttaccacagaccaacgccgaaatctgggctccattgcaaaaatgcttcagcatgctgcttccaataagatgtttctgggagataatgcccacttaagcatcattaatgaatatctttcccagtcctaccagaaattcagacggtttttccaaactgcttgtgatgtcccagagcttcaggataaatttaatgtggatgagtactctgatttagtaaccctcaccaaaccagtaatctacatttccattggtgaaatcatcaacacccacactctcctgttggatcaccaggatgccattgctccggagcacaatgatccaatccacgaactgctggacgacctcggcgaggtgcccaccatcgagtccctgataggggaaagctctggcaatttaaatgacccaaataaggaggcactggctaagacggaagtgtctctcaccctgaccaacaagttcgacgtgcctggagatgagaatgcagaaatggatgctcgaaccatcttactgaatacaaaacgtttaattgtggatgtcatccggttccagccaggagagaccttgactgaaatcctagaaacaccagccaccagtgaacaggaagcagaacatcagagagccatgcagagacgtgctatccgtgatgccaaaacacctgacaagatgaaaaagtcaaaatctgtaaaggaagacagcaacctcactcttcaagagaagaaagagaagatccagacaggtttaaagaagctaacagagcttggaaccgtggacccaaagaacaaataccaggaactgatcaacgacattgccagggatattcggaatcagcggaggtaccgacagaggagaaaggccgaactagtgaaactgcaacagacatacgctgctctgaactctaaggccaccttttatggggagcaggtggattactataaaagctatatcaaaacctgcttggataacttagccagcaagggcaaagtctccaaaaagcctagggaaatgaaaggaaagaaaagcaaaaagatttctctgaaatatacagcagcaagactacatgaaaaaggagttcttctggaaattgaggacctgcaagtgaatcagtttaaaaatgttatatttgaaatcagtccaacagaagaagttggagacttcgaagtgaaagccaaattcatgggagttcaaatggagacttttatgttacattatcaggacctgctgcagctacagtatgaaggagttgcagtcatgaaattatttgatagagctaaagtaaatgtcaacctcctgatcttccttctcaacaaaaagttctacgggaagtaattgatcgtttgctgccagcccagaaggatgaaggaaagaagcacctcacagctcctttctaggtccttctttcctcattggaagcaaagacctagccaacaacagcacctcaatctgatacactcccgatgccacatttttaactcctctcgctctgatgggacatttgttacccttttttcatagtgaaattgtgtttcaggcttagtctgacctttctggtttcttcattttcttccattacttaggaaagagtggaaactccactaaaatttctctgtgttgttacagtcttagaggttgcagtactatattgtaagctttggtgtttgtttaattagcaatagggatggtaggattcaaatgtgtgtcatttagaagtggaagctattagcaccaatgacataaatacatacaagacacacaactaaaatgtcatgttattaacagttattaggttgtcatttaaaaataaagttcctttatatttctgtcccatcaggaaaactgaaggatatggggaatcattggttatcttccattgtgtttttctttatggacaggagctaatggaagtgacagtcatgttcaaaggaagcatttctagaaaaaaggagataatgtttttaaatttcattatcaaacttgggcaattctgtttgtgtaactccccgactagtggatgggagagtcccattgctaaaattcagctactcagataaattcagaatgggtcaaggcacctgcctgtttttgttggtgcacagagattgacttgattcagagagacaattcactccatccctatggcagaggaatgggttagccctaatgtagaatgtcattgtttttaaaactgttttatatcttaagagtgccttattaaagtatagatgtatgtcttaaaatgtgggtgataggaattttaaagatttatataatgcatcaaaagccttagaataagaaaagctttttttaaattgctttatctgtatatctgaactcttgaaacttatagctaaaacactaggatttatctgcagtgttcagggagataattctgcctttaattgtctaaaacaaaaacaaaaccagccaacctatgttacacgtgagattaaaaccaattttttccccattttttctccttttttctcttgctgcccacattgtgcctttattttatgagccccagttttctgggcttagtttaaaaaaaaaatcaagtctaaacattgcatttagaaagcttttgttcttggataaaaagtcatacactttaaaaaaaaaaaaaactttttccaggaaaatatattgaaatcatgctgctgagcctctattttctttctttgatgttttgattcagtattcttttatcataaatttttagcatttaaaaattcactgatgtacattaagccaataaactgctttaatgaataacaaactatgtagtgtgtccctattataaatgcattggagaagtatttttatgagactctttactcaggtgcatggttacagcccacagggaggcatggagtgccatggaaggattcgccactacccagaccttgttttttgttgtattttggaagacaggttttttaaagaaacattttcctcagattaaaagatgatgctattacaactagcattgcctcaaaaactgggaccaaccaaagtgtgtcaaccctgtttccttaaaagaggctatgaatcccaaaggccacatccaagacaggcaataatgagcagagtttacagctcctttaataaaatgtgtcagtaattttaaggtttatagttccctcaacacaattgctaatgcagaatagtgtaaaatgcgcttcaagaatgttgatgatgatgatatagaattgtggctttagtagcacagaggatgccccaacaaactcatggcgttgaaaccacacagttctcattactgttatttattagctgtagcattctctgtctcctctctctcctcctttgaccttctcctcgaccagccatcatgacatttaccatgaatttacttcctcccaagagtttggactgcccgtcagattgttgctgcacatagttgcctttgtatctctgtatgaaataaaaggtcatttgttcatgttaaaaaaaaa

SEQ ID NO: 1100 - protein, 1657 aa, Homo sapiens
MSAADEVDGLGVARPHYGSVLDNERLTAEEMDERRRQNVAYEYLCHLEEAKRWMEACLGEDLPPTTELEEGLRNGVYLAKLGNFFSPKVVSLKKIYDREQTRYKATGLHFRHTDNVIQWLNAMDEIGLPKIFYPETTDIYDRKNMPRCIYCIHALSLYLFKLGLAPQIQDLYGKVDFTEEEINNMKTELEKYGIQMPAFSKIGGILANELSVDEAALHAAVIAINEAIDRRIPADTFAALKNPNAMLVNLEEPLASTYQDILYQAKQDKMTNAKNRTENSERERDVYEELLTQAEIQGNINKVNTFSALANIDLALEQGDALALFRALQSPALGLRGLQQQNSDWYLKQLLSDKQQKRQSGQTDPLQKEELQSGVDAANSAAQQYQRRLAAVALINAAIQKGVAEKTVLELMNPEAQLPQVYPFAADLYQKELATLQRQSPEHNLTHPELSVAVEMLSSVALINRALESGDVNTVWKQLSSSVTGLTNIEEENCQRYLDELMKLKAQAHAENNEFITWNDIQACVDHVNLVVQEEHERILAIGLINEALDEGDAQKTLQALQIPAAKLEGVLAEVAQHYQDTLIRAKREKAQEIQDESAVLWLDEIQGGIWQSNKDTQEAQKFALGIFAINEAVESGDVGKTLSALRSPDVGLYGVIPECGETYHSDLAEAKKKKLAVGDNNSKWVKHWVKGGYYYYHNLETQEGGWDEPPNFVQNSMQLSREEIQSSISGVTAAYNREQLWLANEGLITRLQARCRGYLVRQEFRSRMNFLKKQIPAITCIQSQWRGYKQKKAYQDRLAYLRSHKDEVVKIQSLARMHQARKRYRDRLQYFRDHINDIIKIQAFIRANKARDDYKTLINAEDPPMVVVRKFVHLLDQSDQDFQEELDLMKMREEVITLIRSNQQLENDLNLMDIKIGLLVKNKITLQDVVSHSKKLTKKNKEQLSDMMMINKQKGGLKALSKEKREKLEAYQHLFYLLQTNPTYLAKLIFQMPQNKSTKFMDSVIFTLYNYASNQREEYLLLRLFKTALQEEIKSKVDQIQEIVTGNPTVIKMVVSFNRGARGQNALRQILAPVVKEIMDDKSLNIKTDPVDIYKSWVNQMESQTGEASKLPYDVTPEQALAHEEVKTRLDSSIRNMRAVTDKFLSAIVSSVDKIPYGMRFIAKVLKDSLHEKFPDAGEDELLKIIGNLLYYRYMNPAIVAPDAFDIIDLSAGGQLTTDQRRNLGSIAKMLQHAASNKMFLGDNAHLSIINEYLSQSYQKFRRFFQTACDVPELQDKFNVDEYSDLVTLTKPVIYISIGEIINTHTLLLDHQDAIAPEHNDPIHELLDDLGEVPTIESLIGESSGNLNDPNKEALAKTEVSLTLTNKFDVPGDENAEMDARTILLNTKRLIVDVIRFQPGETLTEILETPATSEQEAEHQRAMQRRAIRDAKTPDKMKKSKSVKEDSNLTLQEKKEKIQTGLKKLTELGTVDPKNKYQELINDIARDIRNQRRYRQRRKAELVKLQQTYAALNSKATFYGEQVDYYKSYIKTCLDNLASKGKVSKKPREMKGKKSKKISLKYTAARLHEKGVLLEIEDLQVNQFKNVIFEISPTEEVGDFEVKAKFMGVQMETFMLHYQDLLQLQYEGVAVMKLFDRAKVNVNLLIFLLNKKFYGK

SEQ ID NO: 1101 - DNA, 2221 bp, Homo sapiens
attcgccatggccgcctcgccgggctcgggcagcgccaacccgcggaagttcagtgagaagatcgcgctgcacacgcagagacaggccgaggagacgcgggccttcgagcagctcatgaccgacctcaccctgtcgcgggttcaatttcagaagcttcagcaactgcgccttacacagtaccatggaggatccttaccaaatgtgagccagctgcggagcaatgcgtcagagtttcagccgtcatttcaccaagctgataatgttcggggaacccgccatcacgggctggtggagaggccatccaggaaccgcttccaccccctccaccgaaggtctggggacaagccagggcgacaatttgatggtagtgcttttggagccaattattcctcacagcctctggatgagagttggccaaggcagcagcctccttggaaagacgaaaagcatcctgggttcaggctgacatctgcacttaacaggaccaattctgattctgctcttcacacgagtgctctgagtaccaagccccaggacccctatggaggagggggccagtcggcctggcctgccccatacatggggttttgtgatggtgagaataatggacatggggaagtagcatctttccctggcccattgaaagaagagaatctgttaaatgttcctaagccactgccaaaacaactgtgggagaccaaggagattcagtccctgtcaggacgccctcgatcctgtgatgttggaggtggcaatgcttttccacataatggtcaaaacctaggcctctcacccttcttggggactttgaacactggagggtcattgccagatctaaccaacctccactactcgacacccctgccagcctccctggacaccaccgaccaccactttggcagtatgagtgtggggaatagtgtgaacaacatcccagctgctatgacccacctgggtataagaagctcctctggtctccagagttctcggagtaacccctccatccaagccacgctcaataagactgtgctttcctcttccttaaataaccacccacagacatctgttcccaacgcatctgctcttcacccttcgctccgtctgttttcccttagcaacccatctctttccaccacaaacctgagcggcccgtctcgccgtcggcagcctcccgtcagccctctcacgctttctcctggccctgaagcacatcaaggtttcagcagacagctgtcttcaaccagcccactggccccatatcctacctcccagatggtgtcctcagaccgaagccaactttcctttctgcccacagaagctcaagcccaggtgtcgccgccacccccttaccctgcaccccaggagctcacccagcccctcctgcagcagccccgcgcccctgaggcccctgcccagcagccccaggcagcctcctcactgccacagtcagactttcagcttctcccggcccagggctcatctttgaccaacttcttcccagatgtgggttttgaccagcagtccatgaggccaggccctgcctttcctcaacaggtgcctctggtgcaacaaggttcccgagaactgcaggactcttttcatttgagaccaagcccgtattccaactgcgggagtctcccgaacaccatcctgccagaagactccagcaccagcctgttcaaagacctcaacagtgcgctggcaggcctgcctgaggtcagcctgaacgtggacactccatttccactggaagaggagctgcagattgaacccctgagcctggatggactcaacatgttaagtgactccagcatgggcctgctggacccctctgttgaagagacgtttcgagctgacagactgtgaacagaaggcagtggaacagaagaatgtttttctgcaacagccaaaatagaatggaatagaatgaagccagctgataccacgggctttcgttatcttgacatagaaggaagcagtgccacggctccagggtttcagatgagatcccatctcagacactgtggcttcctccagatcacacagctttgtactgcctctcccgcctgtggccaaagtcgtgttgcagcaggcaggctgcttggagcttcccatgaactggaaagctcacctccactgcatctttttactggccatccagtcagccgatgtgtaagagtaggaaatactgtgtcactggaggccctccgtagcattggg

SEQ ID NO: 1102 - protein, 619 aa, Homo sapiens
MAASPGSGSANPRKFSEKIALHTQRQAEETRAFEQLMTDLTLSRVQFQKLQQLRLTQYHGGSLPNVSQLRSNASEFQPSFHQADNVRGTRHHGLVERPSRNRFHPLHRRSGDKPGRQFDGSAFGANYSSQPLDESWPRQQPPWKDEKHPGFRLTSALNRTNSDSALHTSALSTKPQDPYGGGGQSAWPAPYMGFCDGENNGHGEVASFPGPLKEENLLNVPKPLPKQLWETKEIQSLSGRPRSCDVGGGNAFPHNGQNLGLSPFLGTLNTGGSLPDLTNLHYSTPLPASLDTTDHHFGSMSVGNSVNNIPAAMTHLGIRSSSGLQSSRSNPSIQATLNKTVLSSSLNNHPQTSVPNASALHPSLRLFSLSNPSLSTTNLSGPSRRRQPPVSPLTLSPGPEAHQGFSRQLSSTSPLAPYPTSQMVSSDRSQLSFLPTEAQAQVSPPPPYPAPQELTQPLLQQPRAPEAPAQQPQAASSLPQSDFQLLPAQGSSLTNFFPDVGFDQQSMRPGPAFPQQVPLVQQGSRELQDSFHLRPSPYSNCGSLPNTILPEDSSTSLFKDLNSALAGLPEVSLNVDTPFPLEEELQIEPLSLDGLNMLSDSSMGLLDPSVEETFRADRL

SEQ ID NO: 1103 - DNA, 8192 bp, Homo sapiens
atgggagctacagggcgcctcgagctcacactggccgcccctccccatccgggcccagcctttcagcgttcaaaagccagggagacccaaggagaggaggaagggagtgaaatgcagatcgccaaaagtgactccatacatcacatgagccactcccaggggcagccagagctgcctcctctgcctgcttctgctaatgaggaaccgtctggactctatcagactgtcatgtcacacagcttttacccgcccttgatgcaacgcacgtcatggaccttggctgcacccttcaaagaacagcatcaccaccgtggacccagtgattccatcgccaacaactactccttgatggcccaggacctgaagctgaaagatctgctgaaggtctaccaaccggccaccatcagtgtccctagggacaggaccggtcaggggctgccatcatcaggaaatagaagctcatcagagcccatgaggaaaaaaacgaagttttcctccagaaacaaagaggattccactaggatcaagttggccttcaagacgtcaatcttctcacccatgaagaaggaggtaaagacatctttgacgttcccaggaagcagaccaatgagtccagaacagcagctcgatgtcatgttacagcaggagatggaaatggaaagtaaagaaaagaagccatctgaatcggacctggagagatactattactatctgaccaatggaattcgcaaagacatgattgcccctgaggagggtgaagtgatggttcggatttcaaagctgatttctaacacgctgctgacgagtcccttcctggagcccctgatggtggtcctcgtgcaggagaaggagaatgactattactgtagcctcatgaaaagcatcgttgattacatcctcatggacccaatggagagaaaacggctctttattgagagcatcccccgcttgtttcctcaaagagtgatccgggcccctgtgccctggcacagtgtctacaggagcgccaagaagtggaacgaggagcatctgcacacggtgaaccccatgatgctcaggctgaaagaactgtggtttgcagaattcagagacctcaggtttgttcgaacagcagaaatactagcgggaaaattgcctctgcagcctcaggaattttgggatgtgatccagaaacactgcctggaggcacaccagactcttctcaacaagtggatccccacctgcgcccagctttttacctcacggaaggagcactggattcattttgctcccaagagcaactatgactcaagtcgaaacattgaggaatattttgcttctgtggcatcattcatgtcgctgcagcttagggagctggtcattaagtcacttgaggacctcgtttcccttttcatgatacacaaagatgggaatgattttaaggagccctaccaagagatgaagtttttcatacctcagctaatcatgatcaaacttgaagtcagtgaacccattattgtcttcaatccatcttttgatggctgctgggaattaatacgtgactctttcctggaaattattaagaactctaatgggatccccaagctgaaatacataccacttaagttctccttcactgctgctgctgctgatcggcaatgtgtgaaagcagctgagccaggagagcccagcatgcacgcggctgccactgcaatggcagagctgaaaggatataatctgctccttggaactgttaacgcagaagaaaaacttgtttctgattttttgattcaaactttcaaggtatttcagaaaaatcaagttggcccctgcaaatatttaaatgtctacaaaaagtatgttgacttattggataacacggcagagcaaaacatcgctgcgttcctgaaagaaaatcatgacattgatgattttgtgacgaagatcaatgccataaagaaacggagaaatgaaattgcatccatgaacatcaccgtgcctttagccatgttctgccttgatgctacggccctaaatcatgatctctgtgagcgagctcaaaatcttaaagaccatctgattcaattccaagtggatgtaaaccgagacaccaataccagcatttgtaatcagtacagccacatcgcagacaaagtcagtgaggttcctgccaacactaaggagctggtatccctcattgaattcctaaagaaatccagtgctgtcactgtgttcaaactcaggaggcaacttagagatgcaagtgaacggctggagttcctgatggactatgcagacttgccgtaccagattgaagatatctttgacaacagccggaacttgctccttcacaagagggatcaggcagaaatggatctgattaaaagatgctcagaatttgagttgagacttgagggctaccacagagaactggaaagttttaggaagcgcgaagtgatgactacagaagaaatgaagcacaatgttgaaaagcttaatgagctttcaaagaacctaaatcgggcgtttgcagagtttgagttgatcaataaggaggaagagctattggaaaaggagaagagtacttaccctcttctgcaggccatgctgaagaacaaagtaccttatgagcagctgtggtcgacagcctatgagttcagcatcaagtcagaggaatggatgaatggacccctcttcttactgaatgctgagcaaattgcggaggagatagggaatatgtggaggacaacgtataaactgatcaagaccttgtctgatgtgcctgcacccaggcgcttagcagagaatgtgaagatcaagatcgataagttcaagcagtacattcccatcctcagtatttcctgcaacccaggaatgaaagaccgacactggcagcagatcagtgagattgttggctatgagataaagcccaccgaaacgacctgcctctcaaatatgctcgaatttggattcggcaaattcgttgaaaaattggagcccattggtgcagctgccagcaaggaatactctctggagaaaaacttggatagaatgaagttggattgggttaacgtgacgttcagcttcgtgaaatacagggacactgatacaaacatcttgtgtgcaattgatgacattcaaatgctacttgatgatcacgtgataaagacccagaccatgtgtggctccccattcatcaaaccaatagaagcagaatgccggaaatgggaagaaaagctaattcgcatacaagacaatttggatgcctggttgaaatgccaagccacctggctgtacctggaaccaatcttcagttcagaggacatcatagcccagatgccagaagaggggaggaaatttggcattgttgatagttactggaaatcacttatgtcccaagcggtgaaagataacaggattctggtggcagccgaccagccacggatggcagagaagcttcaagaagccaactttctcttggaggacatccagaaagggctgaatgattacttggagaagaagagactattcttccccagattcttcttcctatcaaacgatgagctgctggaaatcttgtccgagacaaaggaccctctccgagtgcagccgcacttgaagaagtgctttgaaggaattgccaagcttgagtttacagacaatctggaaattgtgggcatgatcagctcggaaaaagaaactgttccattcatacagaaaatctacccagctaatgccaagggcatggtggaaaagtggctccagcaggtggagcagatgatgctggccagtatgcgagaagtcattggacttgggattgaagcatatgtcaaggtccctcgaaatcactgggtcttacagtggcctggacaggtggttatctgtgtctcctccatcttttggacccaggaggtgtcccaagccctggcggaaaataccttactggattttctgaaaaagagcaatgatcagattgcgcagattgtccagctggtgcgagggaagctgagcagtggagctcgactcactctcggggccctcacggtcatcgatgtccacgcccgcgacgtggtggccaagttatctgaggacagggtctccgatctgaatgatttccaatggatctcacagctgcgctactactgggtggccaaggatgtgcaggtgcagattatcaccacagaagccttgtatggctatgagtacctgggaaactccccccggctggtgatcacacccctcaccgaccgctgctacaggacactgatgggagctttgaagctgaaccttgggggtgctccagagggtccagctgggactggcaagacagaaaccaccaaagatttggccaaagccttggctaagcagtgtgtggtcttcaactgctccgatggtttggattacaaagctatggggaagttcttcaaggggctggcacaggctggagcatgggcgtgctttgatgagttcaacaggatcgaggtagaagtgctgtctgtggtcgctcagcagatcctcagcatccaacaagccatcattcggaagctaaagacattcatctttgaagggactgagctctctctgaacccaacctgcgctgtgttcatcaccatgaaccccgggtatgctggcagggctgaactgcccgacaatctcaaggccttgttccggacagtggccatgatggtcccagattacgccctcattggagaaatctccctctactccatggggtttctggactccagaagtctcgcccagaagatcgttgcgacctaccgcctgtgctcggaacaactgtcctctcagcatcactatgactacggtatgcgcgctgtcaagtctgtgcttactgccgcaggaaacctgaagctcaagtatccagaggagaatgaaagtgtcctgctgctccgggcattgcttgatgtcaatctggccaagttcttagcgcaagatgtccctctgtttcagggaattatatctgatttatttcctggagttgttcttccaaagccagactatgaagtttttctgaaagtgctgaatgataacatcaaaaagatgaaactccagccagtaccttggtttatagggaaaattatccagatctacgaaatgatgctggtgagacatggctatatgattgtaggagaccccatgggcggcaagacctctgcttataaagtgttggctgcagctctcggcgatttacacgcagccaatcagatggaggagtttgctgtggagtacaagatcatcaaccccaaggctatcacgatggggcagctgtatgggtgctttgaccaagtgagccacgagtggatggatggtgtccttgccaatgctttccgggagcaagcgtcttcactctctgatgatcgcaagtggattatatttgatgggccagtggatgctatttggattgaaaatatgaacactgttctggatgacaataaaaagctgtgtctcatgagtggggaaattatccagatgaactccaagatgagcctgatcttcgagcccgccgacctcgagcaagcctctccagccactgtgagcaggtgtgggatgatctacatggagccccatcaactaggctggaagcccctgaaggattcctacatggacaccctgccctccagtctcaccaaggagcacaaagaattggtcaatgacatgttcatgtggcttgtccagccctgcctggaatttggtcgccttcattgtaaatttgttgtccagacatctcccatccaccttgccttctcaatgatgagactgtactcttctctgcttgatgaaatcagggcagtagaagaggaggaaatggaattaggtgaaggcctgtcaagtcaacagatctttctctggctccaaggactgtttctcttttccttggtgtggaccgtggctggcaccatcaacgcagacagcagaaagaaatttgatgtgtttttccgcaacctgatcatgggcatggatgataaccacccaaggcccaaaagcgtcaaactcaccaaaaacaacatctttccagaaagaggaagcatctatgatttttattttatcaaacaagctagtggacattgggaaacgtggacacagtatatcaccaaagaggaggaaaaagttccagctggtgcaaaggtctcagaactcatcatccccacaatggagacagcccggcagtccttcttcttgaaaacctacttagaccatgagattccaatgctgttcgtgggtcccacaggcactggcaaatcagccatcaccaacaacttccttctccaccttcccaaaaatacgtacctacccaactgcatcaatttctctgccagaacctcagccaatcagacccaggatatcatcatgtccaagctggatcgacgacggaagggccttttcgggcctcccatagggaagaaagcagtggtgtttgtggatgacctcaacatgccagccaaagaggtgtatggggcccagccacccatcgagctcctgaggcagtggattgaccatggttactggtttgacaagaaagacacaaccaggctggacatcgtggacatgctgctcgtgacagccatggggccccccgggggaggaaggaatgacattactggacgattcactcgccatctgaatatcatttccatcaatgcctttgaggatgacattttaaccaagattttcagttcgattgttgactggcacttcgggaaagggtttgatgtgatgtttttaaggtacggaaagatgctggtccaagctactaagacaatttatagagatgcagtggagaacttcttgccaactccctcgaagtcacattacgtctttaacctgcgggacttctcacgagtgattcaaggggtcctgctgtgccctcacacacacctgcaggatgtagaaaaatgtatccggctttggatccatgaggtttatcgggtcttctatgatcgtctgattgacaaggaggacagacaggtctttttcaacatggtgaaggaaaccacctccaattgcttcaagcagaccatagagaaggtgcttatccacttgtcacccactggaaagatagtcgatgataacattcgaagcctcttctttggagattatttcaagccagaaagtgaccaaaaaatctacgatgagatcactgacctgaaacagctgactgtggtcatggagcactatctggaagaattcaacaacatcagcaaggcccccatgtccctggtcatgttcaggtttgccattgagcacatctctaggatctgccgtgtcctgaagcaggacaaaggccacctgctcctggtgggcatagggggcagcgggcggcaaagtgccgccaaactgtccacattcatgaacgcatacgagctataccagattgagatcaccaagaactacgcaggcaatgactggcgagaagatcttaagaagatcatactgcaggtcggtgtggccaccaagagcaccgtgttcctcttcgccgacaaccagatcaaggatgaatcattcgtggaggacatcaacatgcttctgaacacaggtgacgtgcctaacatcttccctgctgacgagaaggctgacatcgtggagaagatgcagactgcagccaggacccaaggagagaaggttgaagtcactcctctttctatgtataacttctttattgagagggtaattaacaaaatctccttttcattagccatgagtccaataggggatgccttcaggaaccgcctgcggatgttcccttcgctgatcaattgctgtacgattgattggttccagtcctggcccacagatgccctagagttggtggctaacaaatttctagaggatgtggagcttgatgacaacattcgggtagaggtcgtgtccatgtgcaaatatttccaagagagcgtcaagaagctgtcactcgattattacaacaaacttcgaagacacaactatgttacccccacctcctaccttgaattgattctaaccttcaagacgctcctgaatagcaagaggcaagaggtggctatgatgaggaaccgctacctgacaggcttgcagaaactcgactttgcagcttctcaggtagcggttatgcaaagagaactgacagctcttcaacctcaactcatcctcacctccgaggaaactgccaagatgatggtgaaaattgaagcggagacgagagaagctgatggaaa

SEQ ID NO: 1104 - protein, 4116 aa, Homo sapiens
MGATGRLELTLAAPPHPGPAFQRSKARETQGEEEGSEMQIAKSDSIHHMSHSQGQPELPPLPASANEEPSGLYQTVMSHSFYPPLMQRTSWTLAAPFKEQHHHRGPSDSIANNYSLMAQDLKLKDLLKVYQPATISVPRDRTGQGLPSSGNRSSSEPMRKKTKFSSRNKEDSTRIKLAFKTSIFSPMKKEVKTSLTFPGSRPMSPEQQLDVMLQQEMEMESKEKKPSESDLERYYYYLTNGIRKDMIAPEEGEVMVRISKLISNTLLTSPFLEPLMVVLVQEKENDYYCSLMKSIVDYILMDPMERKRLFIESIPRLFPQRVIRAPVPWHSVYRSAKKWNEEHLHTVNPMMLRLKELWFAEFRDLRFVRTAEILAGKLPLQPQEFWDVIQKHCLEAHQTLLNKWIPTCAQLFTSRKEHWIHFAPKSNYDSSRNIEEYFASVASFMSLQLRELVIKSLEDLVSLFMIHKDGNDFKEPYQEMKFFIPQLIMIKLEVSEPIIVFNPSFDGCWELIRDSFLEIIKNSNGIPKLKYIPLKFSFTAAAADRQCVKAAEPGEPSMHAAATAMAELKGYNLLLGTVNAEEKLVSDFLIQTFKVFQKNQVGPCKYLNVYKKYVDLLDNTAEQNIAAFLKENHDIDDFVTKINAIKKRRNEIASMNITVPLAMFCLDATALNHDLCERAQNLKDHLIQFQVDVNRDTNTSICNQYSHIADKVSEVPANTKELVSLIEFLKKSSAVTVFKLRRQLRDASERLEFLMDYADLPYQIEDIFDNSRNLLLHKRDQAEMDLIKRCSEFELRLEGYHRELESFRKREVMTTEEMKHNVEKLNELSKNLNRAFAEFELINKEEELLEKEKSTYPLLQAMLKNKVPYEQLWSTAYEFSIKSEEWMNGPLFLLNAEQIAEEIGNMWRTTYKLIKTLSDVPAPRRLAENVKIKIDKFKQYIPILSISCNPGMKDRHWQQISEIVGYEIKPTETTCLSNMLEFGFGKFVEKLEPIGAAASKEYSLEKNLDRMKLDWVNVTFSFVKYRDTDTNILCAIDDIQMLLDDHVIKTQTMCGSPFIKPIEAECRKWEEKLIRIQDNLDAWLKCQATWLYLEPIFSSEDIIAQMPEEGRKFGIVDSYWKSLMSQAVKDNRILVAADQPRMAEKLQEANFLLEDIQKGLNDYLEKKRLFFPRFFFLSNDELLEILSETKDPLRVQPHLKKCFEGIAKLEFTDNLEIVGMISSEKETVPFIQKIYPANAKGMVEKWLQQVEQMMLASMREVIGLGIEAYVKVPRNHWVLQWPGQVVICVSSIFWTQEVSQALAENTLLDFLKKSNDQIAQIVQLVRGKLSSGARLTLGALTVIDVHARDVVAKLSEDRVSDLNDFQWISQLRYYWVAKDVQVQIITTEALYGYEYLGNSPRLVITPLTDRCYRTLMGALKLNLGGAPEGPAGTGKTETTKDLAKALAKQCVVFNCSDGLDYKAMGKFFKGLAQAGAWACFDEFNRIEVEVLSVVAQQILSIQQAIIRKLKTFIFEGTELSLNPTCAVFITMNPGYAGRAELPDNLKALFRTVAMMVPDYALIGEISLYSMGFLDSRSLAQKIVATYRLCSEQLSSQHHYDYGMRAVKSVLTAAGNLKLKYPEENESVLLLRALLDVNLAKFLAQDVPLFQGIISDLFPGVVLPKPDYEVFLKVLNDNIKKMKLQPVPWFIGKIIQIYEMMLVRHGYMIVGDPMGGKTSAYKVLAAALGDLHAANQMEEFAVEYKIINPKAITMGQLYGCFDQVSHEWMDGVLANAFREQASSLSDDRKWIIFDGPVDAIWIENMNTVLDDNKKLCLMSGEIIQMNSKMSLIFEPADLEQASPATVSRCGMIYMEPHQLGWKPLKDSYMDTLPSSLTKEHKELVNDMFMWLVQPCLEFGRLHCKFVVQTSPIHLAFSMMRLYSSLLDEIRAVEEEEMELGEGLSSQQIFLWLQGLFLFSLVWTVAGTINADSRKKFDVFFRNLIMGMDDNHPRPKSVKLTKNNIFPERGSIYDFYFIKQASGHWETWTQYITKEEEKVPAGAKVSELIIPTMETARQSFFLKTYLDHEIPMLFVGPTGTGKSAITNNFLLHLPKNTYLPNCINFSARTSANQTQDIIMSKLDRRRKGLFGPPIGKKAVVFVDDLNMPAKEVYGAQPPIELLRQWIDHGYWFDKKDTTRLDIVDMLLVTAMGPPGGGRNDITGRFTRHLNIISINAFEDDILTKIFSSIVDWHFGKGFDVMFLRYGKMLVQATKTIYRDAVENFLPTPSKSHYVFNLRDFSRVIQGVLLCPHTHLQDVEKCIRLWIHEVYRVFYDRLIDKEDRQVFFNMVKETTSNCFKQTIEKVLIHLSPTGKIVDDNIRSLFFGDYFKPESDQKIYDEITDLKQLTVVMEHYLEEFNNISKAPMSLVMFRFAIEHISRICRVLKQDKGHLLLVGIGGSGRQSAAKLSTFMNAYELYQIEITKNYAGNDWREDLKKIILQVGVATKSTVFLFADNQIKDESFVEDINMLLNTGDVPNIFPADEKADIVEKMQTAARTQGEKVEVTPLSMYNFFIERVINKISFSLAMSPIGDAFRNRLRMFPSLINCCTIDWFQSWPTDALELVANKFLEDVELDDNIRVEVVSMCKYFQESVKKLSLDYYNKLRRHNYVTPTSYLELILTFKTLLNSKRQEVAMMRNRYLTGLQKLDFAASQVAVMQRELTALQPQLILTSEETAKMMVKIEAETREADGKKLLVQADEKEANVAAAIAQGIKNECEGDLAEAMPALEAALAALDTLNPADISLVKSMQNPPGPVKLVMESICIMKGMKPERKPDPSGSGKMIEDYWGVSKKILGDLKFLESLKTYDKDNIPPLTMKRIRERFINHPEFQPAVIKNVSSACEGLCKWVRAMEVYDRVAKVVAPKRERLREAEGKLAAQMQKLNQKRAELKLVVDRLQALNDDFEEMNTKKKDLEENIEICSQKLVRAEKLISGLGGEKDRWTEAARQLGIRYTNLTGDVLLSSGTVAYLGAFTVDYRVQCQNQWLAECKDKVIPGFSDFSLSHTLGDPIKIRAWQIAGLPVDSFSIDNGIIVSNSRRWALMIDPHGQANKWIKNMEKANKLAVIKFSDSNYMRMLENALQLGTPVLIENIGEELDASIEPILLKATFKQQGVEYMRLGENIIEYSRDFKLYITTRLRNPHYLPEVAVKVCLLNFMITPLGLQDQLLGIVAAKEKPELEEKKNQLIVESAKNKKHLKEIEDKILEVLSMSKGNILEDETAIKVLSSSKVLSEEISEKQKVASMTETQIDETRMGYKPVAVHSATIFFCISDLANIEPMYQYSLTWFINLYMHSLTHSTKSEELNLRIKYIIDHFTLSIYNNVCRSLFEKDKLLFSLLLTIGIMKQKKEITEEVWYFLLTGGIALDNPYPNPAPQWLSEKAWAEIVRASALPKLHGLMEHLEQNLGEWKLIYDSAWPHEEQLPGSWKFSQGLEKMVILRCLRPDKMVPAVREFIAEHMGKLYIEAPTFDLQGSYNDSSCCAPLIFVLSPSADPMAGLLKFADDLGMGGTRTQTISLGQGQGPIAAKMINNAIKDGTWVVLQNCHLAASWMPTLEKICEEVIVPESTNARFRLWLTSYPSEKFPVSILQNGIKMTNEPPKGLRANLLRSYLNDPISDPVFFQSCAKAVMWQKMLFGLCFFHAVVQERRNFGPLGWNIPYEFNESDLRISMWQIQMFLNDYKEVPFDALTYLTGECNYGGRVTDDKDRRLLLSLLSMFYCKEIEEDYYSLAPGDTYYIPPHGSYQSYIDYLRNLPITAHPEVFGLHENADITKDNQETNQLFEGVLLTLPRQSGGSGKSPQEVVEELAQDILSKLPRDFDLEEVMKLYPVVYEESMNTVLRQELIRFNRLTKVVRRSLINLGRAIKGQVLMSSELEEVFNSMLVGKVPAMWAAKSYPSLKPLGGYVADLLARLTFFQEWIDKGPPVVFWISGFYFTQSFLTGVSQNYARKYTIPIDHIGFEFEVTPQETVMENNPEDGAYIKGLFLEGARWDRKTMQIGESLPKILYDPLPIIWLKPGESAMFLHQDIYVCPVYKTSARRGTLSTTGHSTNYVLSIELPTDMPQKHWINRGVASLCQLDN

SEQ ID NO: 1105 - DNA, 6618 bp, Homo sapiens
cccggaaccgccgcctctagggatggacggtcagactctgcgaaaggccgagagaagctggtcctgctcacgagagaaaaaggagggttacgctaaggacatggtgacagactttgatgagaaacatgatgagtatttaatattgcttcagcagaggaaccggatattaaagcatttgaaaagcaaggaccccgtgcaattgaggctggagcacttggagcaaggtttctctgtctatgtcaacggtgccaattcggagctgaaatcatcaccgcggaaagctattcactctgacttctccagaagtgcctcccacacggaggggacacacgattatggacgaagaactctgtttcgagaagctgaagaagccttaagacgcagttcacggacagcccccagtaaagtccagcgccgaggatggcaccagaaatctgtgcagatcagaacagaagctggcccacggctccacatcgaacctcctgtggactattctgatgattttgagctgtgtggggatgtgactctccaggcaaacaacacttctgaggatcgtccgcaggagctgagaagaagcctggaacttagtgtaaatctacaaaggaaacaaaaggattgttccagcgatgagtatgactctattgaggaagacatactctctgagcctgagccagaggacccggcactggtgggccatcccagacatgaccgccctccttccagtggcgactggactcagaaagatgttcacggggaacaggagacagaaggacgctcttctccaggcccagacaccctcgtggtgctggaatttaacccagcttccaaaagtcataaaagggaaaggaatttgtctgcaaagcggaaggacaatgctgaggttttcgttcccaccaaacctgagccaaacctgactccccaagctcctgctgtattcccagaccaggagaggatgtgctccagacctggaagccggcgagagagacccctgtctgcaacccgcaaaactctttgcgaggctgagtacccagaggaagatgcctctgctgtgctccaagccatccaggtggagaacgcagccctgcagagggcgctcctcagcagaaaggccgagcagccagccagcccactgcaggatgcagaaggaccaccagcaaaaccatggaccagtctgctggaggagaaggaagagacccttgagctgcttcccatcaccacggcgactactactcaggagccggccggggcagcaggaggagccagggccatcaaccaggccatggacagaattgggcttctgggaagcagacaacagcagaagcttctgaaagtcctccaggccgtcgaaagtgactctgcccatctcggcagggtggtttcaccaaccaaggagcaagtatcagacacagaggacaaacagagaatgagggcagacgagatcaaagatgccatctacgtgaccatggagatcctgtccaactggggcaactcgtggtgggtgggtctcacagaagtcgagttctttgacttgaatgacacaaagctttatgtgtcgccccacgatgtggatatccggaacacagccacgcctggggagctgggccgcctcgtcaacaggaacttagctggcaagaaagactcctccccgtggacctgccccttccacccaccactccagctgttttttgttattcgaaacacaagacagctgggggacttccatctggccaagatcaaggttcggaattactggacagctgatggcgatcttgacattggtgccaagaacgtgaagctttacgtcaacagaaacctcatcttcaatggcaagttagacaaaggagatagggaggccccagctgaccacagcatcctggttgaccagaagaacgagaagagcgagcaactagaggaggccatgaacgctcactcggaagaaagcaaaggcacccatgagatggctggtgccagcggggacaaggagcttggtctcggttgctcaccgccagctgaaacattagcggatgcaaagctttcttcacaaggaaatgtgtctggcaaaagaaagaattctactaattgcaggaaagacagtttgtcccagttagaggaatatttgagactgtcggcagtccccacttcgatgggtgacatgcccagtgctcctgccacttccccacctgtgaagtgccctcctgtccatgaggagccctctctcatccaacaactggaaaacctcatgggcagaaaaatctgtgagccacccgggaaaaccccatcctggttacaaccttctcccaccggcaaggacaggaagcagggaggcaggaagccaaaacccctctggcttagtcccgagaagcccctggcctggaagggcaggctcccatcagacgatgtcatcggtgagggtcctggagagaccgaggccagggataaaggcctacggcatgagccagggtgggggaccagccggagtgtcaacaccaaggagagaccccagagggcaaccaccaaagtccacagtgatgactcagacatctttaaccagccccccaacagagagcgccctgctagtgggaggaggggctcaaggaaggatgctggcagcagtagtcatggggacgaccagccagccagcagagaagacacctggtcttccaggacgccgtcacggtcaaggtggcgcagtgagcaggagcacacacttcacgagtcatggagctccctcagtgccttcgaccgctcccaccggggacgcatctccaacacggagctcccgggggacatcctggatgagctcctgcagcaaaagagcagccggcacagcgacttgcccccctccaagaagggggagcagccagggctgtcgagagggcaggatggctactctggagagacagacgctgggggtgactttaaaatccccgtcttgccttatggacagcgcttggtcattgacatcaagtctacctggggggacagacactatgtcggcctcaacggaatagaaatattcagttccaagggtgaaccggtgcagatttcaaacataaaagcagaccctcccgatatcaatattttaccagcctatgggaaagacccccgcgtggtcaccaacctcatcgacggggtgaacaggacccaggatgacatgcatgtctggctggcccccttcacgcggggcagatcccactccatcaccattgacttcacgcacccttgccacgttgccctgatcagaatttggaactacaataaatctcggatacattccttccgaggcgtgaaggacatcacaatgctgttagacacccagtgcatctttgaaggagaaatcgccaaggcctctggaaccctggcgggagccccagagcactttggagacacgatcttattcacaaccgatgatgacattctcgaggccatattctattctgatgagatgtttgacctggatgtggggagcctggacagcctgcaggatgaagaggcaatgaggaggcccagcacggccgacggcgagggggatgagcggcccttcacccaggctggcttgggggctgatgaacggatcccggagctagagctcccatccagttcccctgtcccccaagtcaccacgccagagccaggcatctaccacggaatctgccttcagctgaatttcactgcctcctggggagacttgcactacctggggctcactggcctggaagtggtgggcaaggagggccaggcgctgcccatccacctgcaccagatctctgcttcccccagagacttaaatgagctccccgagtactctgacgactcccggaccctggacaagttaattgatggcaccaacatcaccatggaggatgagcatatgtggctgatccccttctcgccggggctggaccatgtggtcacgatccgcctggacagggccgaaagcatcgcaggcctgcgcttctggaactacaataaatctcccgaggacacctatcgcggggccaagattgtccacgtctccctggatggcctgtgcgtctccccgccagagggctttctcatccggaaggggccaggcaactgccactttgattttgctcaagaaatcctcttcgtggactacctacgggctcagctgctgccccagccggccaggaggctggacatgagaagcctggagtgtgcaagcatggactacgaggcaccgctgatgccctgtggcttcattttccagtttcagcttctcaccagctggggcgacccctactacatcggcctcaccggcctggagctgtatgacgagcgaggagaaaaaatccccttgtcggaaaacaatattgcggccttccccgacagcgtgaactccctggagggtgtgggcggggacgtccgcaccccagacaagctcatcgaccaagtgaacgacaccagtgatggccggcacatgtggctggctcccatcctgccgggcctggtgaaccgggtttatgtgattttcgatctgcctaccaccgtgtcaatgatcaaactgtggaattatgcgaaaacaccccatcgaggggtgaaggagtttggcctcctggtggacgacctgcttgtgtacaatgggatcctggccatggtgagccacctggtggggggcatcctgcccacatgtgagcccaccgtgccctaccacaccatcctcttcaccgaggacagggacatccgccaccaggagaaacacaccaccatcagtaatcaggccgaggatcaagatgtccagatgatgaatgaaaaccaaatcattaccaacgcgaaacggaagcagagcgttgttgacccagccttacgtcccaaaacctgcatcagcgagaaggagacgagacgacggcgctgctgactggtgaaggagggagagctggtcctcccactatggtgggctccgtcagcagccccactcagtgcctgcgtccctcaccctcagtcccaggagctggaagcgaaccacagtgttgaggggagcccgctgggaagaggggactcgggaggacagccctggatactaccagagtgacagatggctgtggctgcagggcaaagagatcccctgcagttctgggttggccacagggagcccaggacacccgccttcatgcctctgctgtgagacccagcaaagcagggcccatgaccactagggcctgggctgaccctgactcagaacaggacaatgacggggtggggaggcatcccatccagcctcagagggcccagagaatggctgagcaggacagtgggagaccagaccctaccccgcaactccagtaagcagggcactgcccagggagactgccttcagaaacctgagcttcagcggccaacaccccccatcccctgcgcatccttgtctcatttggggactggtggagctggctgagaggttggggtagtttcctggttacaggggtccacaagaccctctctcatcccggtataggggcctctctcctctcatcgggcctgataagggattggccaaggctgtgtgcatcctgcagagggaaggaagtcagctgggccacccgccatccaccttggcaagagctgggcccactctggcaggccagggtatcatctgcgtgctgctgccgggccaggaagggtgggtgggtggccagcaggctggcagctccagaccccagagggccagaagaactcaccccagtgccctctggatgcaggtgttggggaacactgaggacaatcccccatctcccctcacccttgagcaggccctccctgcactctctgccacatgtccctcctggtctgatcacggctgtgctcactgatgtggctgctttctgtctctgcccctgtgcccttggaggcaggcagtgaggtgctcctttcccaggcccccaccccttctcccccttcagccacttcccagcgagttggaaatgtgccttgcacccccagccgagtgaagcccagaacgcatctatatgcatcgatgtaacaagctcggatcagggacctaattggtttcccagtagtgggtaatttctcgttgcaaatattaatccgttgtttttctggcgcccagcccggcccgccgcagtactgtactcgaggtacgttcctatgcaaccgagagccccggcaaatacttcatgagcttagcagcctgggctcgagcagctatgcaaacgcgcttttcatttggagcacggggctgatgtgaagataagaattgtttctcctggagaaagatccatcatttctccagcttccaagcccccggcacctctgctcagctcccagatgtgacgagcacctcccgccagggggagtcaggggttgatcaaaccagctcttgtgacccaaaccagtgccgctgcattaaagggaggcccagctactccttcccagctgagatgtgggtacaggtcagatttgtcagggagatggcactaacacgacacaagctcactcccagaaccgcagctgatgtttataataatcgtatgtactgtgcaatttaggaggggaaaaaaaggctgtacaagctttaactctaaaataaatttctatttttttcctcttgcaaaattaataaaagatgttattaagaat

SEQ ID NO: 1106 - protein, 1618 aa, Homo sapiens
MDGQTLRKAERSWSCSREKKEGYAKDMVTDFDEKHDEYLILLQQRNRILKHLKSKDPVQLRLEHLEQGFSVYVNGANSELKSSPRKAIHSDFSRSASHTEGTHDYGRRTLFREAEEALRRSSRTAPSKVQRRGWHQKSVQIRTEAGPRLHIEPPVDYSDDFELCGDVTLQANNTSEDRPQELRRSLELSVNLQRKQKDCSSDEYDSIEEDILSEPEPEDPALVGHPRHDRPPSSGDWTQKDVHGEQETEGRSSPGPDTLVVLEFNPASKSHKRERNLSAKRKDNAEVFVPTKPEPNLTPQAPAVFPDQERMCSRPGSRRERPLSATRKTLCEAEYPEEDASAVLQAIQVENAALQRALLSRKAEQPASPLQDAEGPPAKPWTSLLEEKEETLELLPITTATTTQEPAGAAGGARAINQAMDRIGLLGSRQQQKLLKVLQAVESDSAHLGRVVSPTKEQVSDTEDKQRMRADEIKDAIYVTMEILSNWGNSWWVGLTEVEFFDLNDTKLYVSPHDVDIRNTATPGELGRLVNRNLAGKKDSSPWTCPFHPPLQLFFVIRNTRQLGDFHLAKIKVRNYWTADGDLDIGAKNVKLYVNRNLIFNGKLDKGDREAPADHSILVDQKNEKSEQLEEAMNAHSEESKGTHEMAGASGDKELGLGCSPPAETLADAKLSSQGNVSGKRKNSTNCRKDSLSQLEEYLRLSAVPTSMGDMPSAPATSPPVKCPPVHEEPSLIQQLENLMGRKICEPPGKTPSWLQPSPTGKDRKQGGRKPKPLWLSPEKPLAWKGRLPSDDVIGEGPGETEARDKGLRHEPGWGTSRSVNTKERPQRATTKVHSDDSDIFNQPPNRERPASGRRGSRKDAGSSSHGDDQPASREDTWSSRTPSRSRWRSEQEHTLHESWSSLSAFDRSHRGRISNTELPGDILDELLQQKSSRHSDLPPSKKGEQPGLSRGQDGYSGETDAGGDFKIPVLPYGQRLVIDIKSTWGDRHYVGLNGIEIFSSKGEPVQISNIKADPPDINILPAYGKDPRVVTNLIDGVNRTQDDMHVWLAPFTRGRSHSITIDFTHPCHVALIRIWNYNKSRIHSFRGVKDITMLLDTQCIFEGEIAKASGTLAGAPEHFGDTILFTTDDDILEAIFYSDEMFDLDVGSLDSLQDEEAMRRPSTADGEGDERPFTQAGLGADERIPELELPSSSPVPQVTTPEPGIYHGICLQLNFTASWGDLHYLGLTGLEVVGKEGQALPIHLHQISASPRDLNELPEYSDDSRTLDKLIDGTNITMEDEHMWLIPFSPGLDHVVTIRLDRAESIAGLRFWNYNKSPEDTYRGAKIVHVSLDGLCVSPPEGFLIRKGPGNCHFDFAQEILFVDYLRAQLLPQPARRLDMRSLECASMDYEAPLMPCGFIFQFQLLTSWGDPYYIGLTGLELYDERGEKIPLSENNIAAFPDSVNSLEGVGGDVRTPDKLIDQVNDTSDGRHMWLAPILPGLVNRVYVIFDLPTTVSMIKLWNYAKTPHRGVKEFGLLVDDLLVYNGILAMVSHLVGGILPTCEPTVPYHTILFTEDRDIRHQEKHTTISNQAEDQDVQMMNENQIITNAKRKQSVVDPALRPKTCISEKETRRRRC

SEQ ID NO: 1107 - DNA, 1188 bp, Homo sapiens
ggcagctgagtcagtgagcagcgccatgatgaggggcagtccctgccagcaccaacaggggctggaaacccagcgataggagcatcagcatctccgaggggtcctgtggctgtctgtggtctccgaggtgctgtacattctgctgctggtggttggcttcagcctcatgtgtctcgagctcttccactccagcaatgtcatcgacgggctcaagctcaatgccttcgcggctgtcttcacggtgctctcaggcctcctgggaatggtcgcccacatgatgtacacgcaggtgttccaggtcaccgtgagcctcggtcctgaggactggagaccccattcctgggactacgggtggtccttctgcctggcgtggggctcctttacctgctgcatggcagcctctgtcaccacgctcaactcctacaccaagacggtcattgagttccggcacaagcgcaaggtctttgagcagggctaccgggaagagccgaccttcatagaccctgaggccatcaagtacttccgggagaggatggagaagagggacgggagcgaggaggactttcacttagactgccgccacgagagataccctgcccgacaccagccacacatggcggattcctggccccggagctccgcacaggaagcaccagagctgaaccgacagtgctgggtcttggggcactgggtgtgaccaagacctcaacctggcccgcggacctcaggccatcgctggcaccagcccctgctgcaagaccaccagagtggtgcccccagaaccctggcctgtgtgccgtgaactcagtcagcctgcgtgggagatgccaggcctgtcctgcccatcgctgcctgggtcccatggccttggaaatggggccagggcaggcccaagggaatgcacagggctgcacagagtgactttgggacagcagccccggactcttgccatcatcacatgagccctgctgggcacagctgcgatgccaggagacacatggccactggccactgaatggctggcacccacaagccagtcaggtgcccagaggggcagagccctttggggggcagagagtggcttcctgaaggagggggcagtggcgcaggcactgcaggggtgtcacacagcaggcacacagcaggggctcaataaatgcttgttgaacttgaaaaaaaaaaaaaaaa

SEQ ID NO: 1108 - protein, 176 aa, Homo sapiens
MCLELFHSSNVIDGLKLNAFAAVFTVLSGLLGMVAHMMYTQVFQVTVSLGPEDWRPHSWDYGWSFCLAWGSFTCCMAASVTTLNSYTKTVIEFRHKRKVFEQGYREEPTFIDPEAIKYFRERMEKRDGSEEDFHLDCRHERYPARHQPHMADSWPRSSAQEAPELNRQCWVLGHWV

SEQ ID NO: 1109 - DNA, 3960 bp, Homo sapiens
cctctcttctctccccggccagcatggcatctgaagaagcatctctcagggcattggaaagtctgatgacagaattttttcacgattgtacaaccaatgaaagaaaacgtgagatagaggagcttcttaataactttgcccagcaaataggagcctggagattctgcctgtactttctctccagcactaggaatgactatgtaatgatgtacagtttaacagtttttgagaatctgatcaataaaatgtggcttggggtcccatctcaggataagatggaaatccgtagctgtctgcccaaactccttttggctcaccataaaaccttaccttactttatccggaacaagctctgcaaagttattgttgatattggacgtcaggattggcccatgttctaccacgacttttttactaacattttacagttgatccagtcccctgtgacaaccccccttgggctgatcatgttgaagacaacttcagaagagctggcttgtccccgtgaggacctcagtgtggctcggaaggaggagttgcggaagctgctactggaccaggtgcagacagtgcttgggctactgacaggtatcttggagactgtctgggacaaacacagtgttactgctgccactccaccaccatccccgacctcaggagaaagtggtgacttactgagtaacctgttgcagagtcccagttcagccaaactgttgaatcagccaattcccatccttgatgtggagagtgagtatatctgttccctggctttggagtgcctggcccatctcttcagttggattcctctgtctgccagcatcaccccatccctccttaccaccatcttccactttgcacgatttggctgtgacatccgggccagaaagatggcgtcagttaacggcagcagccagaactgtgtctcgggtcaggagcgcggccggctgggggtcctggccatgtcctgcatcaatgaactcatgtccaagaactgtgtgcctatggaatttgaggagtatttactgcgtatgttccagcagactttctacctcctgcagaaaatcaccaaggataacaatgcccacacagtgaagagcaggctagaagagctcgatgagagctatatcgagaagtttactgactttcttcggctctttgtgagtgttcacctaagaagaatcgagtcttactcccagttccctgtggtggagtttttgacacttttgttcaagtacacatttcatcagcctactcatgaaggttacttctcttgtttggatatctggacgctgtttttggactatctgacaagtaaaattaaaagtcgtcttggagacaaggaagcagttctcaacaggtacgaagatgccctggtgctcctgctcacagaggtgttgaatcgaatccagttcagatacaaccaagcccagctggaggagttggatgatgagactctggatgatgatcagcagacggagtggcagcggtacttacggcagagcttggaggtggtggccaaagtgatggagctcctgcccacgcacgccttctccacactgttccctgttcttcaggacaatttagaagtttatttgggattacaacagtttatagtcacttcagggtcaggacacaggttgaacatcacggcggagaacgactgccggcggctgcactgctccctgagagacttgagctccctgctgcaggccgtgggccgcctggccgagtactttatcggggatgtgtttgctgcacggttcaatgatgccctcacagtcgtggaaaggttggtcaaagtcactctgtacggatctcagataaaattgtacaacattgaaactgctgtgccatcagtattgaaacctgacctcattgatgtgcatgctcagtccctggctgcgctgcaggcttactctcactggttagcacagtattgcagtgaagttcaccggcagaacacgcagcagttcgtgacactcatctctactaccatggatgcaatcacacctctaatcagcaccaaggtccaagacaagctgctgctatctgcgtgccacttactggtctcactggccaccaccgtgcggcccgtctttctgatcagcatccctgcagtgcagaaagtattcaacagaatcactgatgcctctgccctgcgacttgtcgataaggcccaggtgttggtgtgccgagccctctctaacatcttgctgcttccgtggccaaaccttccagagaatgagcagcagtggcccgtgcgctccatcaaccacgccagcctcatctctgcactctcccgggactatcgcaacctgaagcccagtgctgttgccccacagagaaagatgccactggatgacaccaaactgattatccaccagacactcagcgtcttagaagatattgtggagaatatctcgggggagtccaccaagtctcgacagatttgctaccagtcgctgcaggaatctgttcaggtctccctggccctctttccagcttttatccatcagtcagatgtgactgatgagatgctgagcttcttcctcactctgtttcgaggccttagagtacagatgggtgtgcctttcactgagcaaatcatacagactttcctcaacatgtttaccagagagcagttagccgagagcatcctccacgagggcagcacaggctgccgggtggtggagaagtttctgaagatcctgcaggtggtggtccaggagccaggccaggtgttcaagcccttcctccccagcatcatcgccctgtgcatggagcaagtgtatcccatcattgccgagcgtccctcccctgatgtgaaggccgagctgtttgagctccttttccggacgctccatcacaactggaggtacttcttcaagtccaccgtgctggccagtgtccagagggggatcgctgaggagcagatggagaatgagccccagttcagtgccatcatgcaggctttcggacagtcctttctccagcccgacatccacctttttaaacaaaatctcttctacttggagactctcaacaccaagcagaagctgtaccacaagaagatcttccggactgccatgctgttccagtttgtgaacgtgctgctccaggtcctggtccacaagtcccatgatcttctgcaggaggagattggcatcgccatctacaacatggcctcagtcgactttgatggcttctttgccgccttcctcccagagttcctgaccagctgtgatggtgtggatgccaaccagaaaagtgtgctggggcggaatttcaagatggatcgggacctgccctcattcacccagaatgtgcacaggctggtcaacgacctgcgctactacagactctgcaacgacagcctgccccctggcactgtgaagctctaggcctgctactgcctggggacacggacttctgctgctgccacctgcgccagccctaccttccaccacagatgtctcccagatgggccttggtcacactccttggcttctcccaccgcaagcaacgctgcctgcctctgccgctcctccacatcttgccgctgcccagcagagctggcttctgggtccacctgagcactggacggtgctcccagggcgttggagcaggcggaggggtgtgtggccaggtactaggaggcaccaggaaatcccgcggggtggcccatgcagaccaggcgcacgtggctcatggggcagaattgccaaggacagctcacgacagtgccaccttctcaccattccagccaaggagagatgtgacgttggaactgctctggcacttctgtcaagcctcccccgccccaattgccttgagatctctgctctttgtcagagatttgcaaagactcacgtttttgttgttttctcatcattccattgtgatactaagaaactaagaagcttaatgaaaagaaataaaatgcctatgttgttgttctag

SEQ ID NO: 1110 - protein, 1125 aa, Homo sapiens
MASEEASLRALESLMTEFFHDCTTNERKREIEELLNNFAQQIGAWRFCLYFLSSTRNDYVMMYSLTVFENLINKMWLGVPSQDKMEIRSCLPKLLLAHHKTLPYFIRNKLCKVIVDIGRQDWPMFYHDFFTNILQLIQSPVTTPLGLIMLKTTSEELACPREDLSVARKEELRKLLLDQVQTVLGLLTGILETVWDKHSVTAATPPPSPTSGESGDLLSNLLQSPSSAKLLNQPIPILDVESEYICSLALECLAHLFSWIPLSASITPSLLTTIFHFARFGCDIRARKMASVNGSSQNCVSGQERGRLGVLAMSCINELMSKNCVPMEFEEYLLRMFQQTFYLLQKITKDNNAHTVKSRLEELDESYIEKFTDFLRLFVSVHLRRIESYSQFPVVEFLTLLFKYTFHQPTHEGYFSCLDIWTLFLDYLTSKIKSRLGDKEAVLNRYEDALVLLLTEVLNRIQFRYNQAQLEELDDETLDDDQQTEWQRYLRQSLEVVAKVMELLPTHAFSTLFPVLQDNLEVYLGLQQFIVTSGSGHRLNITAENDCRRLHCSLRDLSSLLQAVGRLAEYFIGDVFAARFNDALTVVERLVKVTLYGSQIKLYNIETAVPSVLKPDLIDVHAQSLAALQAYSHWLAQYCSEVHRQNTQQFVTLISTTMDAITPLISTKVQDKLLLSACHLLVSLATTVRPVFLISIPAVQKVFNRITDASALRLVDKAQVLVCRALSNILLLPWPNLPENEQQWPVRSINHASLISALSRDYRNLKPSAVAPQRKMPLDDTKLIIHQTLSVLEDIVENISGESTKSRQICYQSLQESVQVSLALFPAFIHQSDVTDEMLSFFLTLFRGLRVQMGVPFTEQIIQTFLNMFTREQLAESILHEGSTGCRVVEKFLKILQVVVQEPGQVFKPFLPSIIALCMEQVYPIIAERPSPDVKAELFELLFRTLHHNWRYFFKSTVLASVQRGIAEEQMENEPQFSAIMQAFGQSFLQPDIHLFKQNLFYLETLNTKQKLYHKKIFRTAMLFQFVNVLLQVLVHKSHDLLQEEIGIAIYNMASVDFDGFFAAFLPEFLTSCDGVDANQKSVLGRNFKMDRDLPSFTQNVHRLVNDLRYYRLCNDSLPPGTVKL

SEQ ID NO: 1111 - DNA, 4352 bp, Homo sapiens
gagggccctctttgtggctgcagttggcaagatggcgccggtgggggtggagaagaagctgctgctaggtcccaacgggcccgcggtggcggccgccggcgacctgaccagtgaggaggaggaaggccagagcctatggtcctccattctgagcgaagtgtccacccgcgccaggtccaagctgccgtccggcaagaacatcctggtcttcggtgaagatggttctggtaaaacaaccctcatgactaaactacaaggagctgagcatggcaaaaaaggaagaggcctagaatatctctacctcagtgtccatgatgaggaccgagatgatcacacgcgctgcaacgtgtggattctggatggagacttgtaccacaaaggcctgctgaaatttgcagtttctgctgaatccttgccagagaccctcgtcatttttgttgcagacatgtctagaccttggactgtgatggaatctctgcagaaatgggctagtgttttacgtgagcacattgataaaatgaaaattccaccagaaaaaatgagggagctggaacggaagtttgtgaaagattttcaagactatatggaacctgaagaaggttgtcaaggttccccacagagaagaggccctctgacctcaggctccgatgaagaaaatgttgccctgcctctgggtgacaatgtgctgactcataacctggggatcccggtgttggtggtgtgcacaaagtgtgatgcggtgagtgtcctggagaaggagcacgattacagggatgagcatttggactttatccagtcacacctgcggaggttctgccttcagtatggagctgccttgatttacacatcagtgaaagaagagaaaaacctcgacttgttgtataagtatattgttcataaaacatacggtttccacttcaccacacctgccttagttgtggaaaaggatgccgtttttatacctgcaggctgggacaatgaaaagaaaatagctattttacatgaaaattttacaaccgtgaagccggaagatgcatatgaagactttattgtgaaacctcccgtgagaaagctggtccacgacaaagagttggcagcagaagatgagcaggtgttcctaatgaagcaacagtcactccttgccaagcaaccagccactcccacgagagcttctgaatctcctgcaagaggaccctctggctctccaaggacccagggtcggggagggccagccagtgtgcctagctcctccccaggcacgtcagtaaaaaagccggacccaaacatcaaaaataatgcagcaagtgaaggggtgttggccagcttcttcaacagtctgttgagtaaaaagacaggctctcctggaagtcctggtgctggtggggtgcagagcacagccaagaagtcaggacaaaagactgtgttgtcaaatgttcaggaagaactggatagaatgactcgaaagccagactctatggtaacaaactcttcaacagaaaatgaagcctgaacctccttaaaaagtgcatatgtcgaatgaccaaataactatgtatattgatctgctaagaccaggatttttctgatatggcacatgctatcagttttttggggcaggggagatgaactttaaaaaaaaaaaaaaaacttcattggcttgtccgagtgtgaaatgcacatttaggaaggttacatgtcagaccctttgttaaggataacccttggactctggggcatgtggctcttttgtgggaggcaagcacatctgggcttcttgtggaggggaaggtagagtgaaagaaagagggcccactttctaacagggtggagcaaatgagaccaagaaatcattggtaagatgatggttagtctgaccagtttcatgttagtaaattcacttgttcttgggaagcagattaagtagcagaaagtccaggaaagaaagaccagaaggagtaatgagacaagtgatggtggggaagctgaatgttgagggaggtggaggaaggaggagatgagcagtgtcagtaaatactgtgcattcagtagaagttgaagaatcattgttagaagcatttccaaacaaaacactaagcaaaatgggaattaggcttattttgaatgcatctttaacttacgaaagatgtactaattgtgggggtgcctgagtcaggcggagctgacccaggggtgggaacgatggcagctgcccaggacccatgtgcttggcccaggctatgtcctcgtgagaggtactggggtccacggatatgtgttgtggggcagacagtcactgtgggatgtcttcaaagtcagcagttacagaattagtttactttgaattttgttgtctaaatagctcctgctttattttttaaattaaattttttgtttttactatcacaggctggcctaactaatacaaaataggtgatgaacctctggttttaccataatgcaatgtgccacggaaagtttgggggaggtttttaatgtaattgcactctggttaattggctcgtaccaagccctgccttatgacttgtggaaagcttcaaggagttccactgatgcaaaagggtcttttcctagcttcctggtctgatcagtgctatgagatggacagataagtgtgaatgttttatacagaaaatggaaatgatacatttctcttgttaggtgttttcataaaatgtagcattttttttcttatggaaataagagtttcaggtgtctccccacctagggcaaattcatgcacattgtcatgttataccaccattctggaaatgatttctgtggatttgaaattgcacttttaattttatatatgacagcatttaaatgcaaacactaccatgaatttaatgtataaaatgttgtcaaaccaagggaaaaaaccacagttcaccatgtggagtttactttttttatatgaatgtttgttgtactgtgtctaagcataacttccctaatgtcattacttttacataccagatttgactgaccactaatgtagtactggggataacttaatatcctatgttgtgtcaagactctttgaagactttcttgaattgctttcgtaaaggtctgaacactgttaaggagaaagctgagtatcaacttgcctttctgatagaaatgtttcttgtgccagttttattgttgagatatactatttttttccttttttaattcagttttttaaaaaaacaaatgtattgtggcttccagttaccaggttgtctaggtaatgacagtaaactgactgtagaatgataattgtggtatagtgaccaatagatgccaaacagcttgtggcctcactaaaggtggggtcgcttagtccccgggagtaaaatgagtgacctcagaaacaagaattcctggaaaggcacatgccgaagaggaatatggtataattttaaattttaatgcaaaattttaatttgtctttattttttatcatttgaactgataagcactttttgtgtcaatataaaatatactaaaactgatgaaatgctaagacatgtcttgtgaaggaaggtttcttggagaccacttttatttactcatgagaagtggaagctcctagtatcagaagaagctgatacatagtgtcatgtgctcagtggttgccaaagtctaccaactttggggagctgcagggttctttttgggaggtgggaggaagggagatgagttttgttattttggggttttcaagcattggaaccaaaggccaaataataaacagcctttagtttttaaagtaaaattcattttatttgcagagtacacttgtatggtagactgttaaagacaattttatgactatttatgcacattataatggttacatctgctttttgtctttaaaataaaaaaaaaaatcagagaaaagcccacctttgaatacgtggctgaagataacagccaagaattggtctttcctaaaaatgcaacagataatgctgctagattgttattttgtttgcacttttttttgattggcattttaaaatcggtatttaaactgaagacattgtcatgttttattaatttaacaaagttgaaagtgactgctctgtacatcatgaccttaacaatgttaatgctgtaagtgaaagttcactgtcgtctgtatactaaatttattggtgtttctaacttaaaagtaagactgcagattatcccccaccagccttagtccaggggtgtggctctgtccgggtgcagtatgcagtcatgtggaaccttgctttctagtcctgggaaaaaaagatgtctctaattactggcttcaataaacacgaatccagactgcttaaaaaaaaaaaaaaaaa

SEQ ID NO: 1112 - protein, 492 aa, Homo sapiens
MAPVGVEKKLLLGPNGPAVAAAGDLTSEEEEGQSLWSSILSEVSTRARSKLPSGKNILVFGEDGSGKTTLMTKLQGAEHGKKGRGLEYLYLSVHDEDRDDHTRCNVWILDGDLYHKGLLKFAVSAESLPETLVIFVADMSRPWTVMESLQKWASVLREHIDKMKIPPEKMRELERKFVKDFQDYMEPEEGCQGSPQRRGPLTSGSDEENVALPLGDNVLTHNLGIPVLVVCTKCDAVSVLEKEHDYRDEHLDFIQSHLRRFCLQYGAALIYTSVKEEKNLDLLYKYIVHKTYGFHFTTPALVVEKDAVFIPAGWDNEKKIAILHENFTTVKPEDAYEDFIVKPPVRKLVHDKELAAEDEQVFLMKQQSLLAKQPATPTRASESPARGPSGSPRTQGRGGPASVPSSSPGTSVKKPDPNIKNNAASEGVLASFFNSLLSKKTGSPGSPGAGGVQSTAKKSGQKTVLSNVQEELDRMTRKPDSMVTNSSTENEA

SEQ ID NO: 1113 - DNA, 1918 bp, Homo sapiens
agtgcgcctgcgcgcttgtggagctggtggcggcgctccgcaggggctcggctgttttccgcgcggcaggcgcggccatggcgcagctgggaaagctgctcaaggagcagaagtacgaccggcagctgaggcgattcctccatacatttgacagctgtctgggcccttatggagcatacagtggagtggaaagatggatgctcagcaaacaaaaacaaatgaagccaggttgtggggtgatcatgggcaagaggctttagaatctgctcatgtttgcctaataaatgcaacagccacaggaactgaaattcttaaaaacttggtactaccaggtattggttcgtttacaattattgatggaaatcaggtcagcggagaagatgctggaaacaatttcttccttcaaagaagcagtatcggcaagaaccgagctgaagctgccatggaattcttacaagaattaaatagcgatgtctctggaagttttgtggaagagagtccagaaaaccttctagacaatgatccctcatttttctgtaggtttactgttgtagttgcaactcagcttcctgaaagcacttcactacgcttagcagatgtcctctggaattcccagattcctcttttgatctgtaggacatatggactagttggttatatgaggatcattataaaagaacatccagtaatagaatctcatccagataatgcattagaggatctacgactagataagccatttcctgaactgagagaacattttcagtcctatgatttggatcatatggaaaaaaaggaccacagtcatactccatggattgtgatcatagctaaatatttagcacagtggtatagtgaaacaaatggacgaatacctaaaacgtataaagaaaaagaggacttcagagatttgattagacaaggaattctaaaaaatgaaaatggggctccagaagatgaagagaattttgaagaagctattaaaaatgtgaacacagcactaaatacaactcagatcccaagcagtattgaagatatatttaatgatgatcgctgcataaatatcaccaaacagactccatcattttggattttagctcgtgccttaaaggaatttgtggccaaagagggtcaaggaaatttacctgttcgaggcacaattcctgatatgattgcagattcaggcaaatatataaaactgcaaaacgtttaccgtgaaaaagcaaagaaagatgctgccgctgtgggtaatcatgttgccaaattgctgcagtccattggccaggcaccagagtccatttcagagaaagaattaaaattactctgcagcaattctgcatttcttcgagtggtaagatgtcgatccttagctgaagaatatggtttggatacaattaacaaggatgaaattatttctagcatggacaatccagataatgaaatagtgttgtacttaatgttacgggctgttgatagatttcataaacaacagggtagatatccaggagtatctaactatcaagttgaagaagatataggaaagttgaagtcttgtctcactggcttccttcaggaatatggtttatctgtaatggtgaaagatgattatgtccacgaattttgccgatatggagctgctgagccacataccattgctgcattcttggggggagctgctgctcaagaggtcatcaaaataatcaccaaacaatttgtaatttttaataatacttacatttacagtggcatgtcacaaacttcagcaactttccagttgtagagtaagcaagcaccttaagtagtgtgttaatgattgaaactgtaattgccttcgggttgtgctttagtctgtaaaattctaaaggagagctgctaaattgttttcttaataaacatttttctcatttgtaaaaaaaaa

SEQ ID NO: 1114 - protein, 528 aa, Homo sapiens
MDAQQTKTNEARLWGDHGQEALESAHVCLINATATGTEILKNLVLPGIGSFTIIDGNQVSGEDAGNNFFLQRSSIGKNRAEAAMEFLQELNSDVSGSFVEESPENLLDNDPSFFCRFTVVVATQLPESTSLRLADVLWNSQIPLLICRTYGLVGYMRIIIKEHPVIESHPDNALEDLRLDKPFPELREHFQSYDLDHMEKKDHSHTPWIVIIAKYLAQWYSETNGRIPKTYKEKEDFRDLIRQGILKNENGAPEDEENFEEAIKNVNTALNTTQIPSSIEDIFNDDRCINITKQTPSFWILARALKEFVAKEGQGNLPVRGTIPDMIADSGKYIKLQNVYREKAKKDAAAVGNHVAKLLQSIGQAPESISEKELKLLCSNSAFLRVVRCRSLAEEYGLDTINKDEIISSMDNPDNEIVLYLMLRAVDRFHKQQGRYPGVSNYQVEEDIGKLKSCLTGFLQEYGLSVMVKDDYVHEFCRYGAAEPHTIAAFLGGAAAQEVIKIITKQFVIFNNTYIYSGMSQTSATFQL

SEQ ID NO: 1115 - DNA, 1716 bp, Homo sapiens
agtgcgcctgcgcgcttgtggagctggtggcggcgctccgcaggggctcggctgttttccgcgcggcaggcgcggccatggcgcagctgggaaagctgctcaaggagcagaagtacgaccggcagctgaggtattggttcgtttacaattattgatggaaatcaggtcagcggagaagatgctggaaacaatttcttccttcaaagaagcagtatcggcaagaaccgagctgaagctgccatggaattcttacaagaattaaatagcgatgtctctggaagttttgtggaagagagtccagaaaaccttctagacaatgatccctcatttttctgtaggtttactgttgtagttgcaactcagcttcctgaaagcacttcactacgcttagcagatgtcctctggaattcccagattcctcttttgatctgtaggacatatggactagttggttatatgaggatcattataaaagaacatccagtaatagaatctcatccagataatgcattagaggatctacgactagataagccatttcctgaactgagagaacattttcagtcctatgatttggatcatatggaaaaaaaggaccacagtcatactccatggattgtgatcatagctaaatatttagcacagtggtatagtgaaacaaatggacgaatacctaaaacgtataaagaaaaagaggacttcagagatttgattagacaaggaattctaaaaaatgaaaatggggctccagaagatgaagagaattttgaagaagctattaaaaatgtgaacacagcactaaatacaactcagatcccaagcagtattgaagatatatttaatgatgatcgctgcataaatatcaccaaacagactccatcattttggattttagctcgtgccttaaaggaatttgtggccaaagagggtcaaggaaatttacctgttcgaggcacaattcctgatatgattgcagattcaggcaaatatataaaactgcaaaacgtttaccgtgaaaaagcaaagaaagatgctgccgctgtgggtaatcatgttgccaaattgctgcagtccattggccaggcaccagagtccatttcagagaaagaattaaaattactctgcagcaattctgcatttcttcgagtggtaagatgtcgatccttagctgaagaatatggtttggatacaattaacaaggatgaaattatttctagcatggacaatccagataatgaaatagtgttgtacttaatgttacgggctgttgatagatttcataaacaacagggtagatatccaggagtatctaactatcaagttgaagaagatataggaaagttgaagtcttgtctcactggcttccttcaggaatatggtttatctgtaatggtgaaagatgattatgtccacgaattttgccgatatggagctgctgagccacataccattgctgcattcttggggggagctgctgctcaagaggtcatcaaaataatcaccaaacaatttgtaatttttaataatacttacatttacagtggcatgtcacaaacttcagcaactttccagttgtagagtaagcaagcaccttaagtagtgtgttaatgattgaaactgtaattgccttcgggttgtgctttagtctgtaaaattctaaaggagagctgctaaattgttttcttaataaacatttttctcatttgtaaaaaaaaa

SEQ ID NO: 1116 - protein, 445 aa, Homo sapiens
MEFLQELNSDVSGSFVEESPENLLDNDPSFFCRFTVVVATQLPESTSLRLADVLWNSQIPLLICRTYGLVGYMRIIIKEHPVIESHPDNALEDLRLDKPFPELREHFQSYDLDHMEKKDHSHTPWIVIIAKYLAQWYSETNGRIPKTYKEKEDFRDLIRQGILKNENGAPEDEENFEEAIKNVNTALNTTQIPSSIEDIFNDDRCINITKQTPSFWILARALKEFVAKEGQGNLPVRGTIPDMIADSGKYIKLQNVYREKAKKDAAAVGNHVAKLLQSIGQAPESISEKELKLLCSNSAFLRVVRCRSLAEEYGLDTINKDEIISSMDNPDNEIVLYLMLRAVDRFHKQQGRYPGVSNYQVEEDIGKLKSCLTGFLQEYGLSVMVKDDYVHEFCRYGAAEPHTIAAFLGGAAAQEVIKIITKQFVIFNNTYIYSGMSQTSATFQL

SEQ ID NO: 1117 - DNA, 1820 bp, Homo sapiens
agtgcgcctgcgcgcttgtggagctggtggcggcgctccgcaggggctcggctgttttccgcgcggcaggcgcggccatggcgcagctgggaaagctgctcaaggagcagaagtacgaccggcagctgaggttgtggggtgatcatgggcaagaggctttagaatctgctcatgtttgcctaataaatgcaacagccacaggaactgaaattcttaaaaacttggtactaccaggtattggttcgtttacaattattgatggaaatcaggtcagcggagaagatgctggaaacaatttcttccttcaaagaagcagtatcggcaagaaccgagctgaagctgccatggaattcttacaagaattaaatagcgatgtctctggaagttttgtggaagagagtccagaaaaccttctagacaatgatccctcatttttctgtaggtttactgttgtagttgcaactcagcttcctgaaagcacttcactacgcttagcagatgtcctctggaattcccagattcctcttttgatctgtaggacatatggactagttggttatatgaggatcattataaaagaacatccagtaatagaatctcatccagataatgcattagaggatctacgactagataagccatttcctgaactgagagaacattttcagtcctatgatttggatcatatggaaaaaaaggaccacagtcatactccatggattgtgatcatagctaaatatttagcacagtggtatagtgaaacaaatggacgaatacctaaaacgtataaagaaaaagaggacttcagagatttgattagacaaggaattctaaaaaatgaaaatggggctccagaagatgaagagaattttgaagaagctattaaaaatgtgaacacagcactaaatacaactcagatcccaagcagtattgaagatatatttaatgatgatcgctgcataaatatcaccaaacagactccatcattttggattttagctcgtgccttaaaggaatttgtggccaaagagggtcaaggaaatttacctgttcgaggcacaattcctgatatgattgcagattcaggcaaatatataaaactgcaaaacgtttaccgtgaaaaagcaaagaaagatgctgccgctgtgggtaatcatgttgccaaattgctgcagtccattggccaggcaccagagtccatttcagagaaagaattaaaattactctgcagcaattctgcatttcttcgagtggtaagatgtcgatccttagctgaagaatatggtttggatacaattaacaaggatgaaattatttctagcatggacaatccagataatgaaatagtgttgtacttaatgttacgggctgttgatagatttcataaacaacagggtagatatccaggagtatctaactatcaagttgaagaagatataggaaagttgaagtcttgtctcactggcttccttcaggaatatggtttatctgtaatggtgaaagatgattatgtccacgaattttgccgatatggagctgctgagccacataccattgctgcattcttggggggagctgctgctcaagaggtcatcaaaataatcaccaaacaatttgtaatttttaataatacttacatttacagtggcatgtcacaaacttcagcaactttccagttgtagagtaagcaagcaccttaagtagtgtgttaatgattgaaactgtaattgccttcgggttgtgctttagtctgtaaaattctaaaggagagctgctaaattgttttcttaataaacatttttctcatttgtaaaaaaaaa

SEQ ID NO: 1118 - protein, 534 aa, Homo sapiens
MAQLGKLLKEQKYDRQLRLWGDHGQEALESAHVCLINATATGTEILKNLVLPGIGSFTIIDGNQVSGEDAGNNFFLQRSSIGKNRAEAAMEFLQELNSDVSGSFVEESPENLLDNDPSFFCRFTVVVATQLPESTSLRLADVLWNSQIPLLICRTYGLVGYMRIIIKEHPVIESHPDNALEDLRLDKPFPELREHFQSYDLDHMEKKDHSHTPWIVIIAKYLAQWYSETNGRIPKTYKEKEDFRDLIRQGILKNENGAPEDEENFEEAIKNVNTALNTTQIPSSIEDIFNDDRCINITKQTPSFWILARALKEFVAKEGQGNLPVRGTIPDMIADSGKYIKLQNVYREKAKKDAAAVGNHVAKLLQSIGQAPESISEKELKLLCSNSAFLRVVRCRSLAEEYGLDTINKDEIISSMDNPDNEIVLYLMLRAVDRFHKQQGRYPGVSNYQVEEDIGKLKSCLTGFLQEYGLSVMVKDDYVHEFCRYGAAEPHTIAAFLGGAAAQEVIKIITKQFVIFNNTYIYSGMSQTSATFQL

SEQ ID NO: 1119 - DNA, 1715 bp, Homo sapiens
ggaggtgagcggggacctcgggggagcggggctccgcgtggcaagggcgcagtgtcccccggagagaatttccccgcagaagtggccgagctgccttctcggccggtacgtgagggaagggggcacttgggggcgcaagcatgtgtctgggtgtctacaccgagcagggtgtttgcgcacgtccgggtgtgagtcgtgggagcccgtggcccacaccagcctcctgggctgacgcggaagagagctccttcatcctgcctcagtttccttaggactcagagaaagggagaagaggcagaaggcccctcgcattggcacaagctgtatcccattgcccagggagatcgccaatcacccatcaatatcatctccagccaggctgtgtactctcccagcctgcaaccactggagctttcctatgaggcctgcatgtccctcagcatcaccaacaatggccactctgtccaggtagacttcaatgacagcgatgaccgaaccgtggtgactgggggccccctggaagggccctaccgcctcaagcagtttcacttccactggggcaagaagcacgatgtgggttctgagcacacggtggacggcaagtccttccccagcgagctgcatctggttcactggaatgccaagaagtacagcacttttggggaggcggcctcagcacctgatggcctggctgtggttggtgtttttttggagacaggagacgagcaccccagcatgaatcgtctgacagatgcgctctacatggtccggttcaagggcaccaaagcccagttcagctgcttcaaccccaagtgcctcctgcctgccagccggcactactggacctacccgggctctctgacgactcccccactcagtgagagtgtcacctggattgtgctccgggagcccatctgcatctctgaaaggcagatggggaagttccggagcctgctttttacctcggaggacgatgagaggatccacatggtgaacaacttccggccaccacagccactgaagggccgcgtggtaaaggcctccttccgggcctgagctgcccatctgcctagccggccactagggcaccatcttctcaagggcttccatgtcagcagacaccaaaccatctgaggcttcctccctggggggtgctggggaccctccttcagccagtttgctccttggtcaccctggaggcttctggatgggacccttgagtctggggcacccttcagctgccctggggacaggaaggacaggagctaagcagggtccaagcctggggctgcctctgctctccaagacccaaagaccctgggaacctcctctggtcttccccactggcagtggcagcagccccaccccgagcgcacactgtgatggaggagactgagctccctggggcgggcagctgacactaccagagagactcaagcaataattagaggtgggcagagctgccctctcggcattacctcttctgcaggctctgccatgcacgcacctcactgccaggccattaaaatcagcacccagcatgctggaggtgacgtggccttctccctccagccacctgctgccacgggcaggccctggctatagcttatacagtatctccccttgtccccacccagtcaccaaagccacctacatgacagtccatccctgttgaattaataaattaatgtatccatgcaacaaaaaaaaaaaaa

SEQ ID NO: 1120 - protein, 208 aa, Homo sapiens
MSLSITNNGHSVQVDFNDSDDRTVVTGGPLEGPYRLKQFHFHWGKKHDVGSEHTVDGKSFPSELHLVHWNAKKYSTFGEAASAPDGLAVVGVFLETGDEHPSMNRLTDALYMVRFKGTKAQFSCFNPKCLLPASRHYWTYPGSLTTPPLSESVTWIVLREPICISERQMGKFRSLLFTSEDDERIHMVNNFRPPQPLKGRVVKASFRA

SEQ ID NO: 1121 - DNA, 1563 bp, Homo sapiens
ccgctgctttaagaggctgctccgcggtagcgagcggggccggagccgcagcccgaacgagcggaccgagccgaccgggcaggtgcacggctgcggggacggcagcggcatgaccggccaccacggctggggctacggccaggacgacggcccctcgcattggcacaagctgtatcccattgcccagggagatcgccaatcacccatcaatatcatctccagccaggctgtgtactctcccagcctgcaaccactggagctttcctatgaggcctgcatgtccctcagcatcaccaacaatggccactctgtccaggtagacttcaatgacagcgatgaccgaaccgtggtgactgggggccccctggaagggccctaccgcctcaagcagtttcacttccactggggcaagaagcacgatgtgggttctgagcacacggtggacggcaagtccttccccagcgagctgcatctggttcactggaatgccaagaagtacagcacttttggggaggcggcctcagcacctgatggcctggctgtggttggtgtttttttggagacaggagacgagcaccccagcatgaatcgtctgacagatgcgctctacatggtccggttcaagggcaccaaagcccagttcagctgcttcaaccccaagtgcctcctgcctgccagccggcactactggacctacccgggctctctgacgactcccccactcagtgagagtgtcacctggattgtgctccgggagcccatctgcatctctgaaaggcagatggggaagttccggagcctgctttttacctcggaggacgatgagaggatccacatggtgaacaacttccggccaccacagccactgaagggccgcgtggtaaaggcctccttccgggcctgagctgcccatctgcctagccggccactagggcaccatcttctcaagggcttccatgtcagcagacaccaaaccatctgaggcttcctccctggggggtgctggggaccctccttcagccagtttgctccttggtcaccctggaggcttctggatgggacccttgagtctggggcacccttcagctgccctggggacaggaaggacaggagctaagcagggtccaagcctggggctgcctctgctctccaagacccaaagaccctgggaacctcctctggtcttccccactggcagtggcagcagccccaccccgagcgcacactgtgatggaggagactgagctccctggggcgggcagctgacactaccagagagactcaagcaataattagaggtgggcagagctgccctctcggcattacctcttctgcaggctctgccatgcacgcacctcactgccaggccattaaaatcagcacccagcatgctggaggtgacgtggccttctccctccagccacctgctgccacgggcaggccctggctatagcttatacagtatctccccttgtccccacccagtcaccaaagccacctacatgacagtccatccctgttgaattaataaattaatgtatccatgcaacaaaaaaaaaaaaa

SEQ ID NO: 1122 - protein, 264 aa, Homo sapiens [sequence omitted]

SEQ ID NO: 1123 - DNA, 3830 bp, Homo sapiens
gactagggaccgcctgggtgaggtgaggacctggtggccgcagttgtggcactgtgcgcaggcgctgaactgaccggacggagcgggcggctgtggcctcgccagctggtttaaaaatatccttttttgctgaaggaacacatttgctggtatagtttcagaatgtcaagtactgtgtcctactggatcttaaattctacaaggaacagcattgccacattgcaagggggtagacgcttatactccaggtatgtctcaaataggaataaattaaaatggaggctcttttcccgggtgccacccaccctaaacagttccccatgtggtggctttactctgtgcaaagcctacagacacacatcaacagaggaagatgattttcacttgcaactcagccctgagcagataaatgaagtgcttcgagctggcgagacaacccacaagattcttgaccttgaaagcagagtcccaaattcagtgttgcggtttgagagcaaccagctggctgccaattccccagtggaggaccggcgaggtgtagcctcctgcctgcaaaccaatggactgatgtttggcatcttcgatggacatggtggtcatgcatgtgcccaagcagtgagcgagaggctcttctactatgtggcagtgtccctgatgtcccaccagaccctggagcacatggagggagctatggaaagcatgaaacccttgctgcccatcctgcattggctcaagcacccaggggacagtatctacaaggatgtcacatctgtgcatcttgaccacctccgtgtctattggcaggaactgcttgatttgcacatggaaatgggactaagcattgaagaagcattaatgtactccttccagagactggattctgacatctcgctggaaatccaggcccccctggaagatgaggtgacaaggaacctgtcactccaggttgctttctctggggcaacagcttgcatggcccatgttgatggaattcacttgcacgtggcaaatgctggtgactgccgagccatccttggtgtccaagaggacaatggcatgtggtcttgtctgccccttacacgtgaccacaatgcctggaaccaggccgagctgtcccggctaaagagggagcaccctgagtcagaggacaggacgatcatcatggaggacaggctactgggcgtcctcatcccctgcagggcctttggggatgttcagctgaagtggagtaaagagttgcagcgcagcattctggagaggggcttcaataccgaggccctcaacatttaccagttcacacccccacactactacactccaccctacctgactgctgagcctgaggtcacataccacaggctgaggccccaggataagttccttgtgctggcctcagatggcctgtgggacatgctgagcaatgaggacgtggtaaggctggtggtggggcacctggctgaggcagattggcacaagacagacctggcccagagacccgccaacttggggctcatgcagagcctgctgctgcagaggaaagccagcgggctccacgaggctgaccaaaatgcagccacgcggctgatcagacatgccatcgggaacaatgagtatggggagatggaggcagagcggctggcggcgatgctgacattgccagaggacttggcgaggatgtacagggatgatatcactgtcactgtggtgtattttaactcagaatcaatcggtgcatattacaaggggggttaagaatctcccatcctattgtcaaggttaacataaatgctcttctaaaatgtttcacttactcctaaactagctatccaaaccttactattaaaagcgcaggcagatttaatttgctaaatagactaacaggaggaaaaaaacaaacagcctagctttaaaaaacagtgaaatagcagtgatttcatgtccctgtatgttctgattaagtcttatatgcagagaggacagagcataaagtctatagaattggcttgggcttgtgtagccccagtcatttgataaagatgttgttaaactgtgtcagcctgagccttcaaagggtaaatttaatcatgattctgagaataaagaacttcaggagcttcttaggtcttgccacaaaaatctgcaaatttgataattctcctgaattcacaatcatggacttgtagactatgaagagatattttatttgtttgtcttttatttaaattactaaggtctaggtttacaaagcatactacaggacccttttctatgcaatatcctaacttttttttttgtgattatgcttgtgagaaattttgtaatactacattctagttctgttttcgtttattttaaaactgaatccttaaacttgcaaacacgcctactgtaagcatgcttggaatgacttgttttggttttcagctgataggatctatgcctctggaccagctgaacttactggtgcagctttttgtgccctctactgagtcccattccagaaactttgagccatgctaggaggtaactagtctatgccttaactcctgacctttcctgcattagtaaaatttcctcctgggctgagcctttgggggttgattcacagcatttaagctttctgattatacctctcaaacattcttctgtcaattccacacaatccttctacctctgctatgctgaacccctcattcaccctgcacctgccaactgcaaaatattgtctgaaagaatctttcacatgttcctgcttcctatggctgcaggaaaggagaaaatgtgattgcatgtggtagttgtggtgatagacgtttagacaggacaggttaatttagcggattgtggacttaagattcaacctctatctggagaggtgaaaacacaaaggcttaaggacaacagtttctaaccaagtttctctgaatcctttcctgagaggtggtgggcaggagggaggagtgagacttatcagatgggacgcttgccccaagactgtgggataaaccaccattgctagtcctcaggaattagaccatatttagtataggagttggggcaaaaataaaagtgtaatttgtaatggtttctgtgggctgtagactctttgtatttacttggaaattcagttatgtggatccattttggagatgaatttcatctcatgagttgctgtggcatttaaacaacaggaaatgtgtccctaaatggaaacaaatataatcccacaaaaccaacaattttatttgcctctactacgtcaggcagaattcttcaattaagttgaactacatttgttgatcccttttctcatcttacccctttatgccacctactgaaaagaaaaacaaatagctaggtttggtttcctgttttttgtctatgtcccagctgacattcagtcaaatgttgggatacttctaatttggtggtgtttctttgtacatttttcagtgcaactgtttagtcatgtgttttcatctaagaaattatcttttgaatatttaagccttgatccttttattctgaaaccattaatattccttcttggctgggtgcagtggtttacgcctgtaatcccagcactgtgggaggccgaggcggatggatcacctgaggtcgggaattcgagaccagcctgaccaacatggagaaactccatctctactaaaaatacaaaattagccaggtgtggtggtgcatgcctgtaatcccagctactcgggaggctgaggcaggaaaatcacttgaacccgggaggcggaggttgcggtgagccaagatcgcaccattgcactccagcctgggcaacaagagtgaaactctgtctc

SEQ ID NO: 1124 - protein, 529 aa, Homo sapiens
MSSTVSYWILNSTRNSIATLQGGRRLYSRYVSNRNKLKWRLFSRVPPTLNSSPCGGFTLCKAYRHTSTEEDDFHLQLSPEQINEVLRAGETTHKILDLESRVPNSVLRFESNQLAANSPVEDRRGVASCLQTNGLMFGIFDGHGGHACAQAVSERLFYYVAVSLMSHQTLEHMEGAMESMKPLLPILHWLKHPGDSIYKDVTSVHLDHLRVYWQELLDLHMEMGLSIEEALMYSFQRLDSDISLEIQAPLEDEVTRNLSLQVAFSGATACMAHVDGIHLHVANAGDCRAILGVQEDNGMWSCLPLTRDHNAWNQAELSRLKREHPESEDRTIIMEDRLLGVLIPCRAFGDVQLKWSKELQRSILERGFNTEALNIYQFTPPHYYTPPYLTAEPEVTYHRLRPQDKFLVLASDGLWDMLSNEDVVRLVVGHLAEADWHKTDLAQRPANLGLMQSLLLQRKASGLHEADQNAATRLIRHAIGNNEYGEMEAERLAAMLTLPEDLARMYRDDITVTVVYFNSESIGAYYKGG

SEQ ID NO: 1125 - DNA, 2833 bp, Homo sapiens
gaaggagctctcttcttgcttggcagctggaccaagggagccagtcttgggcgctggagggcctgtcctgaccatggtccctgcctggctgtggctgctttgtgtctccgtcccccaggctctccccaaggcccagcctgcagagctgtctgtggaagttccagaaaactatggtggaaatttccctttatacctgaccaagttgccgctgccccgtgagggggctgaaggccagatcgtgctgtcaggggactcaggcaaggcaactgagggcccatttgctatggatccagattctggcttcctgctggtgaccagggccctggaccgagaggagcaggcagagtaccagctacaggtcaccctggagatgcaggatggacatgtcttgtggggtccacagcctgtgcttgtgcacgtgaaggatgagaatgaccaggtgccccatttctctcaagccatctacagagctcggctgagccggggtaccaggcctggcatccccttcctcttccttgaggcttcagaccgggatgagccaggcacagccaactcggatcttcgattccacatcctgagccaggctccagcccagccttccccagacatgttccagctggagcctcggctgggggctctggccctcagccccaaggggagcaccagccttgaccacgccctggagaggacctaccagctgttggtacaggtcaaggacatgggtgaccaggcctcaggccaccaggccactgccaccgtggaagtctccatcatagagagcacctgggtgtccctagagcctatccacctggcagagaatctcaaagtcctatacccgcaccacatggcccaggtacactggagtgggggtgatgtgcactatcacctggagagccatcccccgggaccctttgaagtgaatgcagagggaaacctctacgtgaccagagagctggacagagaagcccaggctgagtacctgctccaggtgcgggctcagaattcccatggcgaggactatgcggcccctctggagctgcacgtgctggtgatggatgagaatgacaacgtgcctatctgccctccccgtgaccccacagtcagcatccctgagctcagtccaccaggtactgaagtgactagactgtcagcagaggatgcagatgcccccggctcccccaattcccacgttgtgtatcagctcctgagccctgagcctgaggatggggtagaggggagagccttccaggtggaccccacttcaggcagtgtgacgctgggggtgctcccactccgagcaggccagaacatcctgcttctggtgctggccatggacctggcaggcgcagagggtggcttcagcagcacgtgtgaagtcgaagtcgcagtcacagatatcaatgatcacgcccctgagttcatcacttcccagattgggcctataagcctccctgaggatgtggagcccgggactctggtggccatgctaacagccattgatgctgacctcgagcccgccttccgcctcatggattttgccattgagaggggagacacagaagggacttttggcctggattgggagccagactctgggcatgttagactcagactctgcaagaacctcagttatgaggcagctccaagtcatgaggtggtggtggtggtgcagagtgtggcgaagctggtggggccaggcccaggccctggagccaccgccacggtgactgtgctagtggagagagtgatgccaccccccaagttggaccaggagagctacgaggccagtgtccccatcagtgccccagccggctctttcctgctgaccatccagccctccgaccccatcagccgaaccctcaggttctccctagtcaatgactcagagggctggctctgcattgagaaattctccggggaggtgcacaccgcccagtccctgcagggcgcccagcctggggacacctacacggtgcttgtggaggcccaggatacagatgagccgagactgagcgcttctgcacccctggtgatccacttcctaaaggcccctcctgccccagccctgactcttgcccctgtgccctcccaatacctctgcacaccccgccaagaccatggcttgatcgtgagtggacccagcaaggaccccgatctggccagtgggcacggtccctacagcttcacccttggtcccaaccccacggtgcaacgggattggcgcctccagactctcaatggttcccatgcctacctcaccttggccctgcattgggtggagccacgtgaacacataatccccgtggtggtcagccacaatgcccagatgtggcagctcctggttcgagtgatcgtgtgtcgctgcaacgtggaggggcagtgcatgcgcaaggtgggccgcatgaagggcatgcccacgaagctgtcggcagtgggcatccttgtaggcaccctggtagcaataggaatcttcctcatcctcattttcacccactggaccatgtcaaggaagaaggacccggatcaaccagcagacagcgtgcccctgaaggcgactgtctgaatggcccaggcagctctagctgggagcttggcctctggctccatctgagtcccctgggagagagcccagcacccaagatccagcaggggacaggacagagtagaagcccctccatctgccctggggtggaggcaccatcaccatcaccaggcatgtctgcagagcctggacaccaactttatggactgcccatgggagtgctccaaatgtcagggtgtttgcccaataataaagccccagagaactgggctgggccctatgggattggta

SEQ ID NO: 1126 - protein, 829 aa, Homo sapiens
MVPAWLWLLCVSVPQALPKAQPAELSVEVPENYGGNFPLYLTKLPLPREGAEGQIVLSGDSGKATEGPFAMDPDSGFLLVTRALDREEQAEYQLQVTLEMQDGHVLWGPQPVLVHVKDENDQVPHFSQAIYRARLSRGTRPGIPFLFLEASDRDEPGTANSDLRFHILSQAPAQPSPDMFQLEPRLGALALSPKGSTSLDHALERTYQLLVQVKDMGDQASGHQATATVEVSIIESTWVSLEPIHLAENLKVLYPHHMAQVHWSGGDVHYHLESHPPGPFEVNAEGNLYVTRELDREAQAEYLLQVRAQNSHGEDYAAPLELHVLVMDENDNVPICPPRDPTVSIPELSPPGTEVTRLSAEDADAPGSPNSHVVYQLLSPEPEDGVEGRAFQVDPTSGSVTLGVLPLRAGQNILLLVLAMDLAGAEGGFSSTCEVEVAVTDINDHAPEFITSQIGPISLPEDVEPGTLVAMLTAIDADLEPAFRLMDFAIERGDTEGTFGLDWEPDSGHVRLRLCKNLSYEAAPSHEVVVVVQSVAKLVGPGPGPGATATVTVLVERVMPPPKLDQESYEASVPISAPAGSFLLTIQPSDPISRTLRFSLVNDSEGWLCIEKFSGEVHTAQSLQGAQPGDTYTVLVEAQDTDEPRLSASAPLVIHFLKAPPAPALTLAPVPSQYLCTPRQDHGLIVSGPSKDPDLASGHGPYSFTLGPNPTVQRDWRLQTLNGSHAYLTLALHWVEPREHIIPVVVSHNAQMWQLLVRVIVCRCNVEGQCMRKVGRMKGMPTKLSAVGILVGTLVAIGIFLILIFTHWTMSRKKDPDQPADSVPLKATV

SEQ ID NO: 1127 - DNA, 1443 bp, Homo sapiens
gtggctgcagcagcagcggcggcggaaaccctaaagtccgagtccggactacgagtgcgtggcctcctaatccggatcctagtcctgagcgtgtctgtgtgcgagtggacggtcccggacgcgatgaccctgaacggcggcggcagcggagcgggcgggagccgcggtgggggccaggagcgcgagcgccgtcggggcagcacaccctggggccccgccccgccgctgcaccgccgcagcatgccggtggacgagcgcgacctgcaggcggcgctgaccccgggtgccctgacggcggccgcggccgggacggggacccagggtcccaggctggactggcccgaggactccgaggactcgctcagctcagggggcagcgactcagacgagagcgtttacaaggtgctgctgctgggggcgcccggcgtgggcaagagcgccctggcgcgcatcttcggcggtgtggaggacgggcctgaagcagaggcagcagggcacacctatgatcgctccattgtagtggacggagaagaggcatcactcatggtctacgacatttgggagcaggacgggggccgctggttgcccggccactgcatggccatgggggatgcctatgtcattgtgtactcagtgacggacaagggcagcttcgagaaggcctcagaactgcgggtccagctgcggcgtgcacggcaaacagatgatgtgcccatcatcctcgtgggcaacaagagcgacctggtgcgctctcgtgaggtctcggtggatgagggccgggcctgcgcggtggtctttgactgcaagttcattgagacatcagcggcattgcaccacaatgtccaggcgctgtttgaaggtgtcgtgcgccagatacgcctgcgcagggacagcaaagaagccaacgcacgacggcaagcaggcacccggaggcgagagagccttggcaaaaaggcgaagcgcttcttgggccgcatcgtagctcgtaacagccgcaagatggcctttcgcgccaaatccaagtcctgccacgacctctcggttctctaggtcccacccgctcccactatggtgggagacgaacggaagggttggtgggctggcccagccaactgccccgggtgcctcagagcaggctcagactctgggtccctcggagctgccagccgggcacccccaacctcatggtcatggacagatagacagtgctgccctgcgaagtggctctcaggggccagtgagggctgggcccacagagatgcatgcgcaggctcatatgcgtcccaagcagccgcagcgcagccgccgggcaggcctgcgtgccgggagaggactctgccttttttcacagcccgggtgtgcctgccctggagggaggctcttcagtgcggtagctacttgtttacatgcagatttttgtaataaaggctatttcctgataaa

SEQ ID NO: 1128 - protein, 308 aa, Homo sapiens
MTLNGGGSGAGGSRGGGQERERRRGSTPWGPAPPLHRRSMPVDERDLQAALTPGALTAAAAGTGTQGPRLDWPEDSEDSLSSGGSDSDESVYKVLLLGAPGVGKSALARIFGGVEDGPEAEAAGHTYDRSIVVDGEEASLMVYDIWEQDGGRWLPGHCMAMGDAYVIVYSVTDKGSFEKASELRVQLRRARQTDDVPIILVGNKSDLVRSREVSVDEGRACAVVFDCKFIETSAALHHNVQALFEGVVRQIRLRRDSKEANARRQAGTRRRESLGKKAKRFLGRIVARNSRKMAFRAKSKSCHDLSVL

SEQ ID NO: 1129 - DNA, 670 bp, Homo sapiens
cgcacgctgctaggatcagcggtggtggttccgcgatggtaggcggcggcggggtcggcggcggcctcctggagaatgccaaccccctcatctaccagcgctctggggagcggcctgtgacggcaggcgaggaggacgagcaggttcccgacagcatcgacgcacgcgagatcttcgatctgattcgctccatcaatgacccggagcatccactgacgctagaggagttgaacgtagtagagcaggtgcgggttcaggttagcgaccccgagagtacagtggctgtggctttcacaccaaccattccgcactgcagcatggccacccttattggtctgtccatcaaggtcaagcttctgcgctcccttcctcagcgtttcaagatggacgtgcacattactccggggacccatgcctcagagcatgcagtgaacaagcaacttgcagataaggagcgggtggcagctgccctggagaacacccacctcttggaggttgtgaatcagtgcctgtcagcccgctcctgagcctggcctttgacccctcagcctgcatactggtatcctggtcccagctcctgccagggctgttaccgttgttttcttgaatcactcacaatgagaaactaacattttgctttttgtaataaagttaatttatattcagtaaa

SEQ ID NO: 1130 - protein, 163 aa, Homo sapiens
MVGGGGVGGGLLENANPLIYQRSGERPVTAGEEDEQVPDSIDAREIFDLIRSINDPEHPLTLEELNVVEQVRVQVSDPESTVAVAFTPTIPHCSMATLIGLSIKVKLLRSLPQRFKMDVHITPGTHASEHAVNKQLADKERVAAALENTHLLEVVNQCLSARS

SEQ ID NO: 1131 - DNA, 3957 bp, Homo sapiens
gtggcgtggcgacggagtcgcgcgagggacacgccgcgttgtgggttctcggcctgaggtgcgagagaagcggtgaccgcggccctggctgctcggacccgggaacatgatggtcgctggagcagaaggcgctgagaagggaccacggcggcgctgggtcgtgcgagccagtagcgggctgaaacgtagaggccagaaccaggtctcagggggcactaaaggcggtcggaggtaatccccacaccgcttcctcctggaagtcaggctggccgggagctcccgtatccaggacggttggtcgcctctggcctggcagggatcctagtgtctcgggacctcccggtgacgcgcctgcctcccctgctgcaccataggcccgggagtacggcgtccccacagcttggaccggcaggggctcgtgaaatgtttgtcaagtggataaatgaccatggccgtggtctccgcgggaggtgaggaaactgaaagccaccgaggaaaaggggggcgctccttaagaagtgccgcggtcacgtgtacgtttcaaaagaatggcgtgactgagtagggaggggaccgcggagaccctcagaccctggactgtaaggagatgaggggccgtgaaggggaacccaggaaactgagtcctgaaagcaaggaggaacttccagaatgaagggcgccgacactccttcctgcctttgctcaagcggttccttcaccccgatcaagttccttcccatttctccatctgggggatcctgaacgtgcacatcctcagagaagccctcctggggtctccaattctagtttattgccccctcctatcgatcccccagcgcgctcatcgggcctgtggacaaggacaggtttgaagagaggattccctggatcgcggaagggctgcaggaatggcacagccccttccgaggatgccaaaggagcccgggcaaaggaaagtggccgtgcccgggcctgcctaccactagatccccacccacctatgactgctcagtcccgctctcctaccacacccacctttcccggcccaagccagcgcaccccgctgactccctgcccagtccaaactccaaggctgggcaaggcactgatccactgctggacagacccggggcagcctctgggtgaacagcagcgtgtccgccggcagcgaaccgagaccagcgagccgaccatgcggctgcacagacttcgtgcgcggctgagcgcggtggcctgtgggcttctgctgcttcttgtccggggccagggccaggactcagccagtcccatccggaccacacacacggggcaggtgctggggagtcttgtccatgtgaagggcgccaatgccggggtccaaaccttcctgggaattccatttgccaagccacctctaggtccgctgcgatttgcaccccctgagccccctgaatcttggagtggtgtgagggatggaaccacccatccggccatgtgtctacaggacctcaccgcagtggagtcagagtttcttagccagttcaacatgaccttcccttccgactccatgtctgaggactgcctgtacctcagcatctacacgccggcccatagccatgaaggctctaacctgccggtgatggtgtggatccacggtggtgcgcttgtttttggcatggcttccttgtatgatggttccatgctggctgccttggagaacgtggtggtggtcatcatccagtaccgcctgggtgtcctgggcttcttcagcactggagacaagcacgcaaccggcaactggggctacctggaccaagtggctgcactacgctgggtccagcagaatatcgcccactttggaggcaaccctgaccgtgtcaccatttttggcgagtctgcgggtggcacgagtgtgtcttcgcttgttgtgtcccccatatcccaaggactcttccacggagccatcatggagagtggcgtggccctcctgcccggcctcattgccagctcagctgatgtcatctccacggtggtggccaacctgtctgcctgtgaccaagttgactctgaggccctggtgggctgcctgcggggcaagagtaaagaggagattcttgcaattaacaagcctttcaagatgatccccggagtggtggatggggtcttcctgcccaggcacccccaggagctgctggcctctgccgactttcagcctgtccctagcattgttggtgtcaacaacaatgaattcggctggctcatccccaaggtcatgaggatctatgatacccagaaggaaatggacagagaggcctcccaggctgctctgcagaaaatgttaacgctgctgatgttgcctcctacatttggtgacctgctgagggaggagtacattggggacaatggggatccccagaccctccaagcgcagttccaggagatgatggcggactccatgtttgtgatccctgcactccaagtagcacattttcagtgttcccgggcccctgtgtacttctacgagttccagcatcagcccagctggctcaagaacatcaggccaccgcacatgaaggcagaccatggtgatgagcttccttttgttttcagaagtttctttgggggcaactacattaaattcactgaggaagaggagcagctaagcaggaagatgatgaagtactgggccaactttgcgagaaatgggaaccccaatggcgagggtctgccacactggccgctgttcgaccaggaggagcaatacctgcagctgaacctacagcctgcggtgggccgggctctgaaggcccacaggctccagttctggaagaaggcgctgccccaaaagatccaggagctcgaggagcctgaagagagacacacagagctgtagctccctgtgccggggaggagggggtgggttcgctgacaggcgagggtcagcctgctgtgcccacacacacccactaaggagaaagaagttgattccttcattcacttcgccattcattcatacttccgtccatccattcagaaagcatttattaagaatttactcaggcatgatggcccatacttgtaatcccagctattgggaaggatgagatgggaggatggcttgaggccagaggtttgagaccgaccagccagggcaacacagtgagaccccttctcaaaaaaaaaaaaaaaaaagagagagtgtgtgattagaagctaaataggaaagttttgagcttcaagtcagtgaggagtaaaaaagatttttaaaaagcaaagaaaacaaaatataagggaaaaatatgagaaaaataaaaataaaaagagaataataggccaggcactgtggctcatgcccctaatcccagcacttttgggaggtcaaggtgagcagaacacctgaggacaggagtttgagaccagcctgcccaacgtggtgaaaccccatctctatgaaaaatacaaaaatcagacgggcacagtggtggtgcccacctgtgatcccagctactcaggaggctgaggcaggagaattacttgaacctgggaggcagaggttgcagtgagctgagattgtgccactgtactccagcctgggcaacaagagcgagactccgtttccaaaaaaataagagagaatagaagaagctactgcatgatgttagttaccaagcctgccatgggtcctctcttgctagacacactccatagatccccccactgagctgtggatgggcaaaccccggtggaatcccaccctccccaacaccccactgagccctgggccccctcctcccttcctcacctccaccttctccctgccttctctcttctctcgtctgagcccccaggccttttccactttgagggaggtgcttcgaagaatgttgcccacacctaagtgttagaagcctatgtccgttcatccctgagaggtctgaaagaataaaaataaattctaaaaaaaaaaaaaaaaaaaca

SEQ ID NO: 1132 - protein, 623 aa, Homo sapiens
MTAQSRSPTTPTFPGPSQRTPLTPCPVQTPRLGKALIHCWTDPGQPLGEQQRVRRQRTETSEPTMRLHRLRARLSAVACGLLLLLVRGQGQDSASPIRTTHTGQVLGSLVHVKGANAGVQTFLGIPFAKPPLGPLRFAPPEPPESWSGVRDGTTHPAMCLQDLTAVESEFLSQFNMTFPSDSMSEDCLYLSIYTPAHSHEGSNLPVMVWIHGGALVFGMASLYDGSMLAALENVVVVIIQYRLGVLGFFSTGDKHATGNWGYLDQVAALRWVQQNIAHFGGNPDRVTIFGESAGGTSVSSLVVSPISQGLFHGAIMESGVALLPGLIASSADVISTVVANLSACDQVDSEALVGCLRGKSKEEILAINKPFKMIPGVVDGVFLPRHPQELLASADFQPVPSIVGVNNNEFGWLIPKVMRIYDTQKEMDREASQAALQKMLTLLMLPPTFGDLLREEYIGDNGDPQTLQAQFQEMMADSMFVIPALQVAHFQCSRAPVYFYEFQHQPSWLKNIRPPHMKADHGDELPFVFRSFFGGNYIKFTEEEEQLSRKMMKYWANFARNGNPNGEGLPHWPLFDQEEQYLQLNLQPAVGRALKAHRLQFWKKALPQKIQELEEPEERHTEL

SEQ ID NO: 1133 - DNA, 3909 bp, Homo sapiens
gtggcgtggcgacggagtcgcgcgagggacacgccgcgttgtgggttctcggcctgaggtgcgagagaagcggtgaccgcggccctggctgctcggacccgggaacatgatggtcgctggagcagaaggcgctgagaagggaccacggcggcgctgggtcgtgcgagccagtagcgggctgaaacgtagaggccagaaccaggtctcagggggcactaaaggcggtcggaggtaatccccacaccgcttcctcctggaagtcaggctggccgggagctcccgtatccaggacggttggtcgcctctggcctggcagggatcctagtgtctcgggacctcccggtgacgcgcctgcctcccctgctgcaccataggcccgggagtacggcgtccccacagcttggaccggcaggggctcgtgaaatgtttgtcaagtggataaatgaccatggccgtggtctccgcgggaggtgaggaaactgaaagccaccgaggaaaaggggggcgctccttaagaagtgccgcggtcacgtgtacgtttcaaaagaatggcgtgactgagtagggaggggaccgcggagaccctcagaccctggactgtaaggagatgaggggccgtgaaggggaacccaggaaactgagtcctgaaagcaaggaggaacttccagaatgaagggcgccgacactccttcctgcctttgctcaagcggttccttcaccccgatcaagttccttcccatttctccatctgggggatcctgaacgtgcacatcctcagagaagccctcctggggtctccaattctagtttattgccccctcctatcgatcccccagcgcgctcatcgggcctgtggacaaggacaggtttgaagagaggattccctggatcgcggaagggctgcaggaatggcacagccccttccgaggatgccaaaggagcccgggcaaaggaaagtggccgtgcccgggcctgcctaccactagatccccacccacctatgactgctcagtcccgctctcctaccacacccacctttcccggcccaagccagcgcaccccgctgactccctgcccagtccaaactccaaggctgggcaaggcactgatccactgctggacagacccggggcagcctctgggtgaacagcagcgtgtccgccggcagcgaaccgagaccagcgagccgaccatgcggctgcacagacttcgtgcgcggctgagcgcggtggcctgtgggcttctgctgcttcttgtccggggccagggccaggactcagccagtcccatccggaccacacacacggggcaggtgctggggagtcttgtccatgtgaagggcgccaatgccggggtccaaaccttcctgggaattccatttgccaagccacctctaggtccgctgcgatttgcaccccctgagccccctgaatcttggagtggtgtgagggatggaaccacccatccggccatgtgtctacaggacctcaccgcagtggagtcagagtttcttagccagttcaacatgaccttcccttccgactccatgtctgaggactgcctgtacctcagcatctacacgccggcccatagccatgaaggctctaacctgccggtgatggtgtggatccacggtggtgcgcttgtttttggcatggcttccttgtatgatggttccatgctggctgccttggagaacgtggtggtggtcatcatccagtaccgcctgggtgtcctgggcttcttcagcactggagacaagcacgcaaccggcaactggggctacctggaccaagtggctgcactacgctgggtccagcagaatatcgcccactttggaggcaaccctgaccgtgtcaccatttttggcgagtctgcgggtggcacgagtgtgtcttcgcttgttgtgtcccccatatcccaaggactcttccacggagccatcatggagagtggcgtggccctcctgcccggcctcattgccagctcagctgatgtcatctccacggtggtggccaacctgtctgcctgtgaccaagttgactctgaggccctggtgggctgcctgcggggcaagagtaaagaggagattcttgcaattaacaagcctttcaagatgatccccggagtggtggatggggtcttcctgcccaggcacccccaggagctgctggcctctgccgactttcagcctgtccctagcattgttggtgtcaacaacaatgaattcggctggctcatccccaaggtcatgaggatctatgatacccagaaggaaatggacagagaggcctcccaggctgctctgcagaaaatgttaacgctgctgatgttgcctcctacatttggtgacctgctgagggaggagtacattggggacaatggggatccccagaccctccaagcgcagttccaggagatgatggcggactccatgtttgtgatccctgcactccaagtagcacattttcagtgttcccgggcccctgtgtacttctacgagttccagcatcagcccagctggctcaagaacatcaggccaccgcacatgaaggcagaccatgttaaattcactgaggaagaggagcagctaagcaggaagatgatgaagtactgggccaactttgcgagaaatgggaaccccaatggcgagggtctgccacactggccgctgttcgaccaggaggagcaatacctgcagctgaacctacagcctgcggtgggccgggctctgaaggcccacaggctccagttctggaagaaggcgctgccccaaaagatccaggagctcgaggagcctgaagagagacacacagagctgtagctccctgtgccggggaggagggggtgggttcgctgacaggcgagggtcagcctgctgtgcccacacacacccactaaggagaaagaagttgattccttcattcacttcgccattcattcatacttccgtccatccattcagaaagcatttattaagaatttactcaggcatgatggcccatacttgtaatcccagctattgggaaggatgagatgggaggatggcttgaggccagaggtttgagaccgaccagccagggcaacacagtgagaccccttctcaaaaaaaaaaaaaaaaaagagagagtgtgtgattagaagctaaataggaaagttttgagcttcaagtcagtgaggagtaaaaaagatttttaaaaagcaaagaaaacaaaatataagggaaaaatatgagaaaaataaaaataaaaagagaataataggccaggcactgtggctcatgcccctaatcccagcacttttgggaggtcaaggtgagcagaacacctgaggacaggagtttgagaccagcctgcccaacgtggtgaaaccccatctctatgaaaaatacaaaaatcagacgggcacagtggtggtgcccacctgtgatcccagctactcaggaggctgaggcaggagaattacttgaacctgggaggcagaggttgcagtgagctgagattgtgccactgtactccagcctgggcaacaagagcgagactccgtttccaaaaaaataagagagaatagaagaagctactgcatgatgttagttaccaagcctgccatgggtcctctcttgctagacacactccatagatccccccactgagctgtggatgggcaaaccccggtggaatcccaccctccccaacaccccactgagccctgggccccctcctcccttcctcacctccaccttctccctgccttctctcttctctcgtctgagcccccaggccttttccactttgagggaggtgcttcgaagaatgttgcccacacctaagtgttagaagcctatgtccgttcatccctgagaggtctgaaagaataaaaataaattctaaaaaaaaaaaaaaaaaaaca

SEQ ID NO: 1134 - protein, 607 aa, Homo sapiens
MTAQSRSPTTPTFPGPSQRTPLTPCPVQTPRLGKALIHCWTDPGQPLGEQQRVRRQRTETSEPTMRLHRLRARLSAVACGLLLLLVRGQGQDSASPIRTTHTGQVLGSLVHVKGANAGVQTFLGIPFAKPPLGPLRFAPPEPPESWSGVRDGTTHPAMCLQDLTAVESEFLSQFNMTFPSDSMSEDCLYLSIYTPAHSHEGSNLPVMVWIHGGALVFGMASLYDGSMLAALENVVVVIIQYRLGVLGFFSTGDKHATGNWGYLDQVAALRWVQQNIAHFGGNPDRVTIFGESAGGTSVSSLVVSPISQGLFHGAIMESGVALLPGLIASSADVISTVVANLSACDQVDSEALVGCLRGKSKEEILAINKPFKMIPGVVDGVFLPRHPQELLASADFQPVPSIVGVNNNEFGWLIPKVMRIYDTQKEMDREASQAALQKMLTLLMLPPTFGDLLREEYIGDNGDPQTLQAQFQEMMADSMFVIPALQVAHFQCSRAPVYFYEFQHQPSWLKNIRPPHMKADHVKFTEEEEQLSRKMMKYWANFARNGNPNGEGLPHWPLFDQEEQYLQLNLQPAVGRALKAHRLQFWKKALPQKIQELEEPEERHTEL

SEQ ID NO: 1135 - DNA, 3906 bp, Homo sapiens
gagatcggtggtgctgaagggcagggatcttattccaccttctgaagcttctgtcgaaccagttgtaaggagaatggagagagcagtgagagtggagtccggggtcctggtcggggtggtctgtctgctcctggcatgccctgccacagccactgggcccgaagttgctcagcctgaagtagacaccaccctgggtcgtgtgcgaggccggcaggtgggcgtgaagggcacagaccgccttgtgaatgtctttctgggcattccatttgcccagccgccactgggccctgaccggttctcagccccacacccagcacagccctgggagggtgtgcgggatgccagcactgcgcccccaatgtgcctacaagacgtggagagcatgaacagcagcagatttgtcctcaacggaaaacagcagatcttctccgtttcagaggactgcctggtcctcaacgtctatagcccagctgaggtccccgcagggtccggtaggccggtcatggtatgggtccatggaggcgctctgataactggcgctgccacctcctacgatggatcagctctggctgcctatggggatgtggtcgtggttacagtccagtaccgccttggggtccttggcttcttcagcactggagatgagcatgcacctggcaaccagggcttcctagatgtggtagctgctttgcgctgggtgcaagaaaacatcgcccccttcgggggtgacctcaactgtgtcactgtctttggtggatctgccggtgggagcatcatctctggcctggtcctgtccccagtggctgcagggctgttccacagagccatcacacagagtggggtcatcaccaccccagggatcatcgactctcacccttggcccctagctcagaaaatcgcaaacaccttggcctgcagctccagctccccggctgagatggtgcagtgccttcagcagaaagaaggagaagagctggtccttagcaagaagctgaaaaatactatctatcctctcaccgttgatggcactgtcttccccaaaagccccaaggaactcctgaaggagaagcccttccactctgtgcccttcctcatgggtgtcaacaaccatgagttcagctggctcatccccaggggctggggtctcctggatacaatggagcagatgagccgggaggacatgctggccatctcaacacccgtcttgaccagtctggatgtgccccctgagatgatgcccaccgtcatagatgaatacctaggaagcaactcggacgcacaagccaaatgccaggcgttccaggaattcatgggtgacgtattcatcaatgttcccaccgtcagtttttcaagataccttcgagattctggaagccctgtctttttctatgagttccagcatcgacccagttcttttgcgaagatcaaacctgcctgggtgaaggctgatcatggggccgagggtgcttttgtgttcggaggtcccttcctcatggacgagagctcccgcctggcctttccagaggccacagaggaggagaagcagctaagcctcaccatgatggcccagtggacccactttgcccggacaggggaccccaatagcaaggctctgcctccttggccccaattcaaccaggcggaacaatatctggagatcaacccagtgccacgggccggacagaagttcagggaggcctggatgcagttctggtcagagacgctccccagcaagatacaacagtggcaccagaagcagaagaacaggaaggcccaggaggacctctgaggccaggcctgaaccttcttggctggggcaaaccactcttcaagtggtggcagagtcccagcacggcagcccgcctctccccctgctgagactttaatctccaccagcccttaaagtgtcggccgctctgtgactggagttatgctcttttgaaatgtcacaaggccgcctcccacctctggggcattgtacaagttcttccctctccctgaagtgcctttcctgctttcttcgtggtaggttctagcacattcctctagcttcctggaggactcactcccccaggaagccttccctgccttctctgggctgtgcggccccgagtctgcgtccattagagcacagtccacccgaggctagcaccgtgtctgtgtctgtctccccctcagaggagctctctcaaaatggggattagcctaaccccactctgtcacccacaccaggatcgggtgggacctggagctagggggtgtttgctgagtgagtgagtgaaacacagaatatgggaatggcagctgctgaacttgaacccagagccttcaggtgccaaagccatactcaggcccccaccgacattgtccaccctggccagaagggtgcatgccaatggcagagacctgggatgggagaagtcctggggcgccaggggatccagcctagagcagaccttagcccctgactaaggcctcagactagggcgggaggggtctcctcctctctgctgcccagtcctggcccctgcacaagacaacagaatccatcagggccatgagtgtcacccagacctgaccctcaccaattccagccctgaccctcaggacgctggatgccagctcccagccccagtgccgggtcctccctcccttcctggcttggggagaccagtttctggggagcttccaagagcacccaccaagacacagcaggacaggccaggggagggcatctggaccagggcatccgtcgggctattgtcacagagaaaagaagagacccacccactcgggctgcaaaaggtgaaaagcaccaagaggttttcagatggaagtgagaggtgacagtgtgctggcagccctcacagccctcgcttgctctccctgccgcctctgcctgggctcccactttggcagcacttgaggagcccttcaacccgccgctgcactgtaggagcccctttctgggctggccaaggccggagccagctccctcagcttgcggggaggtgcggagggagaggggcgggcaggaaccggggctgcgcgcagcgcttgcgggccagagtgagttccgggtgggcgtgggctcggcggggccccactcagagcagctggccggccccaggcagtgagggccttagcacctgggccagcagctgctgtgctcgatttctcgctgggccttagctgcctccccgcggggcagggctcgggacctgcagccctccatgcctgaccctccccccaccccccgtgggctcctgtgcggccggagcctccccaaggagcgccgccccctgctccacagcgcccagtcccatcgaccacccaagggctgaggagtgcgggtgcacagcgcgggactggcaggcagctccacctgctgccccagtgctggatccactgggtgaagccagctgggctcctgagtctggtggggacttggagaacctttatgtctagctaagggattgtaaatacaccgatgggcactctgtatctagctcaaggtttgtaaacacaccaatcagcaccctgtgtctagctcagtgtttgtgaatgcaccaatccacactctgtatctggctactctggtggggacttggagaacctttgtgtccacactctgtatctagctaatctagtggggatgtggagaacctttgtgtctagctcagggatcgtaaacgcaccaatcagcaccctgtcaaaacagaccacttgactctctgtaaaatggaccaatcagcaggatgtgggtggggcgagacaagagaataaaagcaggctgcctgagccagcagtgacaacccccctcgggtcccctcccacgccgtggaagctttgttctttcgctctttgcaataaatcttgctactgcccaaaaaaaaaaaaaaaaaa

SEQ ID NO: 1136 - protein, 571 aa, Homo sapiens
MERAVRVESGVLVGVVCLLLACPATATGPEVAQPEVDTTLGRVRGRQVGVKGTDRLVNVFLGIPFAQPPLGPDRFSAPHPAQPWEGVRDASTAPPMCLQDVESMNSSRFVLNGKQQIFSVSEDCLVLNVYSPAEVPAGSGRPVMVWVHGGALITGAATSYDGSALAAYGDVVVVTVQYRLGVLGFFSTGDEHAPGNQGFLDVVAALRWVQENIAPFGGDLNCVTVFGGSAGGSIISGLVLSPVAAGLFHRAITQSGVITTPGIIDSHPWPLAQKIANTLACSSSSPAEMVQCLQQKEGEELVLSKKLKNTIYPLTVDGTVFPKSPKELLKEKPFHSVPFLMGVNNHEFSWLIPRGWGLLDTMEQMSREDMLAISTPVLTSLDVPPEMMPTVIDEYLGSNSDAQAKCQAFQEFMGDVFINVPTVSFSRYLRDSGSPVFFYEFQHRPSSFAKIKPAWVKADHGAEGAFVFGGPFLMDESSRLAFPEATEEEKQLSLTMMAQWTHFARTGDPNSKALPPWPQFNQAEQYLEINPVPRAGQKFREAWMQFWSETLPSKIQQWHQKQKNRKAQEDL

SEQ ID NO: 1137 - DNA, 2456 bp, Homo sapiens
cgccgccgttggggctggaagttcccgccaggtccgtgccgggcgagagagatgctgcccggcccgcctcggctttgaggcgagagaagtgtcccagacccatttcgccttgctgacggcgtcgagccctggccagacatgtccacagggttctccttcgggtccgggactctgggctccaccaccgtggccgccggcgggaccagcacaggcggcgttttctccttcggaacgggaacgtctagcaacccttctgtggggctcaattttggaaatcttggaagtacttcaactccagcaactacatctgctccttcaagtggttttggaaccgggctctttggatctaaacctgccactgggttcactctaggaggaacaaatacaggtgccttgcacaccaagaggcctcaagtggtcaccaaatatggaaccctgcaaggaaaacagatgcatgtggggaagacacccatccaagtctttttaggagtccccttctccagacctcctctaggtatcctcaggtttgcacctccagaacccccggagccctggaaaggaatcagagatgctaccacctacccgcctggatggagtctcgctctgtcgccaggctggagtgcagtggcacgatctcggctcactgcaacctccgcctcccgggttcaagcgagtctcctgcctcagcctctgagtgtctggggctacaggtgcctgcaggagtcctggggccagctggcctcgatgtacgtcagcacgcgggaacggtacaagtggctgcgcttcagcgaggactgtctgtacctgaacgtgtacgcgccggcgcgcgcgcccggggatccccagctgccagtgatggtctggttcccgggaggcgccttcatcgtgggcgctgcttcttcgtacgagggctctgacttggccgcccgcgagaaagtggtgctggtgtttctgcagcacaggctcggcatcttcggcttcctgagcacggacgacagccacgcgcgcgggaactgggggctgctggaccagatggcggctctgcgctgggtgcaggagaacatcgcagccttcgggggagacccaggaaatgtgaccctgttcggccagtcggcgggggccatgagcatctcaggactgatgatgtcacccctagcctcgggtctcttccatcgggccatttcccagagtggcaccgcgttattcagacttttcatcactagtaacccactgaaagtggccaagaaggttgcccacctggctggatgcaaccacaacagcacacagatcctggtaaactgcctgagggcactatcagggaccaaggtgatgcgtgtgtccaacaagatgagattcctccaactgaacttccagagagacccggaagagattatctggtccatgagccctgtggtggatggtgtggtgatcccagatgaccctttggtgctcctgacccaggggaaggtttcatctgtgccctaccttctaggtgtcaacaacctggaattcaattggctcttgccttataatatcaccaaggagcaggtaccacttgtggtggaggagtacctggacaatgtcaatgagcatgactggaagatgctacgaaaccgtatgatggacatagttcaagatgccactttcgtgtatgccacactgcagactgctcactaccaccgagaaaccccaatgatgggaatctgccctgctggccacgctacaacaaggatgaaaagtacctgcagctggattttaccacaagagtgggcatgaagctcaaggagaagaagatggctttttggatgagtctgtaccagtctcaaagacctgagaagcagaggcaattctaagggtggctatgcaggaaggagccaaagaggggtttgcccccaccatccaggccctggggagactagccatggacatacctggggacaagagttctacccaccccagtttagaactgcaggagctccctgctgcctccaggccaaagctagagcttttgcctgttgtgtgggacctgcactgccctttccagcctgacatcccatgatgcccctctacttcactgttgacatccagttaggccaggccctgtcaacaccacactgtgctcagctctccagcctcaggacaacctctttttttcccttcttcaaatcctcccacccttcaatgtctccttgtgactccttcttatgggaggtcgacccagactgccactgcccctgtcactgcacccagcttggcatttaccatccatcctgctcaaccttgttcctgtctgttcacattggcctggaggcctagggcaggttgtgacatggagcaaacttttggtagtttgggatcttctctcccacccacacttatctcccccagggccactccaaagtctatacacaggggtggtctcttcaataaagaagtgttgattagaaaaaaaaaaa

SEQ ID NO: 1138 - protein, 545 aa, Homo sapiens
MSTGFSFGSGTLGSTTVAAGGTSTGGVFSFGTGTSSNPSVGLNFGNLGSTSTPATTSAPSSGFGTGLFGSKPATGFTLGGTNTGALHTKRPQVVTKYGTLQGKQMHVGKTPIQVFLGVPFSRPPLGILRFAPPEPPEPWKGIRDATTYPPGWSLALSPGWSAVARSRLTATSASRVQASLLPQPLSVWGYRCLQESWGQLASMYVSTRERYKWLRFSEDCLYLNVYAPARAPGDPQLPVMVWFPGGAFIVGAASSYEGSDLAAREKVVLVFLQHRLGIFGFLSTDDSHARGNWGLLDQMAALRWVQENIAAFGGDPGNVTLFGQSAGAMSISGLMMSPLASGLFHRAISQSGTALFRLFITSNPLKVAKKVAHLAGCNHNSTQILVNCLRALSGTKVMRVSNKMRFLQLNFQRDPEEIIWSMSPVVDGVVIPDDPLVLLTQGKVSSVPYLLGVNNLEFNWLLPYNITKEQVPLVVEEYLDNVNEHDWKMLRNRMMDIVQDATFVYATLQTAHYHRETPMMGICPAGHATTRMKSTCSWILPQEWA

SEQ ID NO: 1139 - DNA, 3181 bp, Homo sapiens
gcggtgagcgctggggctgcgcgggcggcaggcaacggctgaggcggcggcggcggcggcggcggcgtgggttgggctcgagcgggcggcggcgcctcagactccccggaacgggagcccacgcgggcgggcgcctgaaacaaagggaagcgggcgtccgggcgccgcgggtgggcggtcagtcggtcagcgcggagccagccagcgggtgcccgcgcaagccccgagcgcggccggccggcgcggcctcagggcgggaagatgccgcgcgtcgtgcccgaccagagaagcaagttcgagaacgaggagttttttaggaagctgagccgcgagtgtgagattaagtacacgggcttcagggaccggccccacgaggaacgccaggcacgcttccagaacgcctgccgcgacggccgctcggaaatcgcttttgtggccacaggaaccaatctgtctctccagttttttccggccagctggcagggagaacagcgacaaacacctagccgagagtatgtcgacttagaaagagaagcaggcaaggtatatttgaaggctcccatgattctgaatggagtctgtgttatctggaaaggctggattgatctccaaagactggatggtatgggctgtctggagtttgatgaggagcgagcccagcaggaggatgcattagcacaacaggcctttgaagaggctcggagaaggacacgcgaatttgaagatagagacaggtctcatcgggaggaaatggaggtgagagtttcacagctgctggcagtaactggcaagaagacaacaagaccctagtcctggttccaatttaggtggtggtgatgacctcaaacttcgttaattaatagcacagcagatgtgtgctgcccatctttacatacacattgcttctagttggcagaaataattgattaaaagaccagaaactgtgataactggaggtactacggtctatttctcaaccttaggcagtaatagacatcacaaactgccatggttttgcactatgattataatacctgcatttctaattttttaagcatgtagccagtaataatttgaagttttttttctatgcaagcttaccttgttggcattattttagggagttgaaactatcaactgtaaagctccttttcttccactttaatttaaaagttcatgtcatttaaaaacaagtcaagaaattaaaattgtatcagagggttttctctaatcattttttctatttttttttttgtacttctagatgttttggttatacagcttcattttagatgagcattcttattttttgttttgtttgccccatttccttttgtgtttttatagtctatagcattttaaaactgctgatgttgtttgcattatttacaggctaaaaacttagtagcatagagctgtctgccacagccttctgacaaagtttacagttattaaagttgcagtatccttttaaatgctagtaatcagcactctttcttttttttttttttaatagagacagggtctcgcagtgttgcccaggctggtctcgaactcctggcatcaagcgatcctcctgccttagcctcccagagtactgggattacaggctctttctttttaaacataaaagttttaaattggtattaactctgtactctgccctagattgttttagcttctgttctgtaatcatgagtttggttggagatattctccatagatgatcttctactgaaatgcctaaagaagtcacaggctggcttctgttttattcagggatttttttaaaaagtcaatcagaaaagggatactggagcttcttcatgtatgtaacagcatattaaactggagacagtgatgaatcagctacaaaggtaatattgtattaaaatcatgtttaagatagctgcttttatgtgtattttatattgcatgcttttgtaaaaacatgctgggtgatgaaagattagttttagagagaaaatgttcatctgtgcagaggatgcattttcttccattaattctggaaaaaacgttcacagttatatatatggtattttgcaaaaggactattaatagaaccttttgagatgaattaatgtaagaatattttttaaataggcttactgtcaaattgcaactttttttttagatacagagtggaaaacagtgctaagtcatttggcacctccttacaaatatttttcatggtcacatttattaaatgttactacatttctgaatttttgaaaaatgtattttatcattaaatggcattattttaaagggtgaaaaactgacacagtcaattcagaaaatggactgaagtctgaataaggtcattgcatttaaaaagcatataactgtacttgactgatgagggaggtgttactttcattgtatataggtcttatttcataaacagatatcctgtatcaaataaaagtatttgttatatatttgaagttatgcatggaaaggagtgtgtttaaattgttacaaacaataatgcgtcattaaaggccatgctgatcttgcataactataagtactatgaatgaatttggttggttttggtgttgtacagctcacatgtttacacactcagtgccctaatttcccctgagggaatcgctttttaagtgatccttacagtggtgttttatgttactttattacagagctccttggttttttacttctgcacttaaatttttttaaataacatgatgatggtacattttcctctattgtctagctaagggctttcggtccaccagtaaataagatcaaatgctcttaaatgttcctgttaccatcctaatgtaaatactggatttttctgtcatttagcaccatgctgcttctgtctgtcttaatgctggcattaagatcatgagccctttttctccagtagtacaggctttgaaaactacttctattaagttattgatgcaatttgatattttttcataatctatatttaaacaaaattacatcattgcatcatcttttctaaattcatctccattaaaacttgccttaagctaccagattgcttttgccaccattggccatactgtgtgtttgtttgtttaatttactttcacaataaacttctgtgtagtaaaaaaaaaaaaaaaaaaaaaaaaaaaaaaaaaaaaaaaaaaaaaaaaaa

SEQ ID NO: 1140 - protein, 182 aa, Homo sapiens
MPRVVPDQRSKFENEEFFRKLSRECEIKYTGFRDRPHEERQARFQNACRDGRSEIAFVATGTNLSLQFFPASWQGEQRQTPSREYVDLEREAGKVYLKAPMILNGVCVIWKGWIDLQRLDGMGCLEFDEERAQQEDALAQQAFEEARRRTREFEDRDRSHREEMEVRVSQLLAVTGKKTTRP

SEQ ID NO: 1141 - DNA, 3150 bp, Homo sapiens
gcggtgagcgctggggctgcgcgggcggcaggcaacggctgaggcggcggcggcggcggcggcggcgtgggttgggctcgagcgggcggcggcgcctcagactccccggaacgggagcccacgcgggcgggcgcctgaaacaaagggaagcgggcgtccgggcgccgcgggtgggcggtcagtcggtcagcgcggagccagccagcgggtgcccgcgcaagccccgagcgcggccggccggcgcggcctcagggcgggaagatgccgcgcgtcgtgcccgaccagagaagcaagttcgagaacgaggagttttttaggaagctgagccgcgagtgtgagattaagtacacgggcttcagggaccggccccacgaggaacgccaggcacgcttccagaacgcctgccgcgacggccgctcggaaatcgcttttgtggccacaggaaccaatctgtctctccagttttttccggccagctggcagggagaacagcgacaaacacctagccgagagtatgtcgacttagaaagagaagcaggcaaggtatatttgaaggctcccatgattctgaatggagtctgtgttatctggaaaggctggattgatctccaaagactggatggtatgggctgtctggagtttgatgaggagcgagcccagcaggaggatgcattagcacaacaggcctttgaagaggctcggagaaggacacgcgaatttgaagatagagacaggtctcatcgggaggaaatggaggcaagaagacaacaagaccctagtcctggttccaatttaggtggtggtgatgacctcaaacttcgttaattaatagcacagcagatgtgtgctgcccatctttacatacacattgcttctagttggcagaaataattgattaaaagaccagaaactgtgataactggaggtactacggtctatttctcaaccttaggcagtaatagacatcacaaactgccatggttttgcactatgattataatacctgcatttctaattttttaagcatgtagccagtaataatttgaagttttttttctatgcaagcttaccttgttggcattattttagggagttgaaactatcaactgtaaagctccttttcttccactttaatttaaaagttcatgtcatttaaaaacaagtcaagaaattaaaattgtatcagagggttttctctaatcattttttctatttttttttttgtacttctagatgttttggttatacagcttcattttagatgagcattcttattttttgttttgtttgccccatttccttttgtgtttttatagtctatagcattttaaaactgctgatgttgtttgcattatttacaggctaaaaacttagtagcatagagctgtctgccacagccttctgacaaagtttacagttattaaagttgcagtatccttttaaatgctagtaatcagcactctttcttttttttttttttaatagagacagggtctcgcagtgttgcccaggctggtctcgaactcctggcatcaagcgatcctcctgccttagcctcccagagtactgggattacaggctctttctttttaaacataaaagttttaaattggtattaactctgtactctgccctagattgttttagcttctgttctgtaatcatgagtttggttggagatattctccatagatgatcttctactgaaatgcctaaagaagtcacaggctggcttctgttttattcagggatttttttaaaaagtcaatcagaaaagggatactggagcttcttcatgtatgtaacagcatattaaactggagacagtgatgaatcagctacaaaggtaatattgtattaaaatcatgtttaagatagctgcttttatgtgtattttatattgcatgcttttgtaaaaacatgctgggtgatgaaagattagttttagagagaaaatgttcatctgtgcagaggatgcattttcttccattaattctggaaaaaacgttcacagttatatatatggtattttgcaaaaggactattaatagaaccttttgagatgaattaatgtaagaatattttttaaataggcttactgtcaaattgcaactttttttttagatacagagtggaaaacagtgctaagtcatttggcacctccttacaaatatttttcatggtcacatttattaaatgttactacatttctgaatttttgaaaaatgtattttatcattaaatggcattattttaaagggtgaaaaactgacacagtcaattcagaaaatggactgaagtctgaataaggtcattgcatttaaaaagcatataactgtacttgactgatgagggaggtgttactttcattgtatataggtcttatttcataaacagatatcctgtatcaaataaaagtatttgttatatatttgaagttatgcatggaaaggagtgtgtttaaattgttacaaacaataatgcgtcattaaaggccatgctgatcttgcataactataagtactatgaatgaatttggttggttttggtgttgtacagctcacatgtttacacactcagtgccctaatttcccctgagggaatcgctttttaagtgatccttacagtggtgttttatgttactttattacagagctccttggttttttacttctgcacttaaatttttttaaataacatgatgatggtacattttcctctattgtctagctaagggctttcggtccaccagtaaataagatcaaatgctcttaaatgttcctgttaccatcctaatgtaaatactggatttttctgtcatttagcaccatgctgcttctgtctgtcttaatgctggcattaagatcatgagccctttttctccagtagtacaggctttgaaaactacttctattaagttattgatgcaatttgatattttttcataatctatatttaaacaaaattacatcattgcatcatcttttctaaattcatctccattaaaacttgccttaagctaccagattgcttttgccaccattggccatactgtgtgtttgtttgtttaatttactttcacaataaacttctgtgtagtaaaaaaaaaaaaaaaaaaaaaaaaaaaaaaaaaaaaaaaaaaaaaaaaaa

SEQ ID NO: 1142 - protein, 187 aa, Homo sapiens
MPRVVPDQRSKFENEEFFRKLSRECEIKYTGFRDRPHEERQARFQNACRDGRSEIAFVATGTNLSLQFFPASWQGEQRQTPSREYVDLEREAGKVYLKAPMILNGVCVIWKGWIDLQRLDGMGCLEFDEERAQQEDALAQQAFEEARRRTREFEDRDRSHREEMEARRQQDPSPGSNLGGGDDLKLR

SEQ ID NO: 1143 - DNA, 3279 bp, Homo sapiens
actgccggcctgcgcggtactcactgccggcctccgcggtacccactgccggcctccgcgctacccggccgcagcgcgcgagtcacatggaagctcctgaggagcccgcgccagtgcgcggaggcccggaggccacccttgaggtccgtgggtcgcgctgcttgcggctgtccgccttccgagaagagctgcgggcgctcttggtcctggctggccccgcgttcttggttcagctgatggtgttcctgatcagcttcataagctccgtgttctgtggccacctgggcaagctggagctggatgcagtcacgctggcaatcgcggttatcaatgtcactggtgtctcagtgggattcggcttatcttctgcctgtgacaccctcatctcccagacgtacgggagccagaacctgaagcacgtgggcgtgatcctgcagcggagtgcgctcgtcctgctcctctgctgcttcccctgctgggcgctctttctcaacacccagcacatcctgctgctcttcaggcaggacccagatgtgtccaggcttacccagacctatgtcacgatcttcattccagctcttcctgcaacctttctttatatgttacaagttaaatatttgctcaaccagggaattgtactgccccagatcgtaactggagttgcagccaaccttgtcaatgccctcgccaactatctgtttctccatcaactgcatcttggggtgataggctctgcactggcaaacttgatttcccagtacaccctggctctactcctctttctctacatcctcgggaaaaaactgcatcaagctacatggggaggctggtccctcgagtgcctgcaggactgggcctccttcctccgcctggccatccccagcatgctcatgctgtgcatggagtggtgggcctatgaggtcgggagcttcctcagtggcatcctcggcatggtggagctgggcgctcagtccatcgtgtatgaactggccatcattgtgtacatggtccctgcaggcttcagtgtggctgccagtgtccgggtaggaaacgctctgggtgctggagacatggagcaggcacggaagtcctctaccgtttccctgctgattacagtgctctttgctgtagccttcagtgtcctgctgttaagctgtaaggatcacgtggggtacatttttactaccgaccgagacatcattaatctggtggctcaggtggttccaatttatgctgtttcccacctctttgaagctcttgcttgcacgagtggtggtgttctgagggggagtggaaatcagaaggttggagccattgtgaataccattgggtactatgtggttggcctccccatcgggatcgcgctgatgtttgcaaccacacttggagtgatgggtctgtggtcagggatcatcatctgtacagtctttcaagctgtgtgttttctaggctttattattcagctaaattggaaaaaagcctgtcagcaggctcaggtacacgccaatttgaaagtaaacaacgtgcctcggagtgggaattctgctctccctcaggatccgcttcacccagggtgccctgaaaaccttgaaggaattttaacgaacgatgttggaaagacaggcgagcctcagtcagatcagcagatgcgccaagaagaacctttgccggaacatccacaggacggcgctaaattgtccaggaaacagctggtgctgcggcgagggcttctgctcctgggggtcttcttaatcttgctggtggggattttagtgagattctatgtcagaattcagtgacgtggtaggaaagaaagtcaggtcaagtgatgcttttgagcttacacacaattcacaggcccaccagtgacaatttactgtgagttaatgtcattcaggtgtgcccatggattttgagggctggaaatgcaaagacacatttttctataaaaagaaaaagcaactaaggttaaaagctatattgtggcccaagacactgtctgaaagatgacatgagtagtaattcaccactatctgaaccaagcaaggatcaatgtgctgactgcattggccaatggctttgatacttctgctatttttttagacacaaacccataaactaactgcttaagaattcatactgcttgaattatgtaaaatatattttacagtatatctttccttgggccttagattactattcactgggcaaatggtatttgtttttgttttaattttttttttaatagacggaagtcttgctctgtcatgcaggctggagtgcggtggtgcgatcatagctcactgcagcctcgaactcttgggcttcaagcaatcctcctgtgtcagccaccagagtagctgagactacaggggtatgccaccatgcccagctggcatttgttaatcttcatttgaggtctagatctaggcactgtggacactgaaaaacagttgggaaatctttcgagctgtggaaatccaaacaaagactgataattcctggtaggggtgtgtgcgtgacgtactgcagcctcaacctcctgggctcaagtgatcctcccacctcagcctcctgagtagctgagaccacaggcgtgtgccaccacgcctagctaattttttataccagggtctaccctttgtttcccaggctggtcttgaattcctgggatcaagcaatccttccaccttgccctcccaaagtgttgggattataggcatgagccaccacgactggccagaggacaaaattttaataaaggtcttagcttaagcagtaatcctacttcattaagccttcctggggtgcggtacacaccgttaattcagcaaccctcagtacatactaagtatgctcagtgctgtgaaagtggattacaccaaattaagtcattcttatcacacccaatcaaaagtcaagaagccagggataaaagcacctcaggcacataacattaatctagtaatgtaattctctgcacatccagctggtgaaactgcgtgctgtaagctgggaccagctttgtccataactgctgagagaacttgctgaagctctaggaataattttgcctgcccggttgctcaccagttgtagcttgccagctcccaacacccttcctggtgccaataaactttctcaaagagcaatactgacatttcttttgataaaacctccagccttctctgtgttgttccgacataccgaggaccaactggtctacatggatgccctgaacatgcaattctttcttccaaaataaaacattaaatagag

SEQ ID NO: 1144 - protein, 570 aa, Homo sapiens
MEAPEEPAPVRGGPEATLEVRGSRCLRLSAFREELRALLVLAGPAFLVQLMVFLISFISSVFCGHLGKLELDAVTLAIAVINVTGVSVGFGLSSACDTLISQTYGSQNLKHVGVILQRSALVLLLCCFPCWALFLNTQHILLLFRQDPDVSRLTQTYVTIFIPALPATFLYMLQVKYLLNQGIVLPQIVTGVAANLVNALANYLFLHQLHLGVIGSALANLISQYTLALLLFLYILGKKLHQATWGGWSLECLQDWASFLRLAIPSMLMLCMEWWAYEVGSFLSGILGMVELGAQSIVYELAIIVYMVPAGFSVAASVRVGNALGAGDMEQARKSSTVSLLITVLFAVAFSVLLLSCKDHVGYIFTTDRDIINLVAQVVPIYAVSHLFEALACTSGGVLRGSGNQKVGAIVNTIGYYVVGLPIGIALMFATTLGVMGLWSGIIICTVFQAVCFLGFIIQLNWKKACQQAQVHANLKVNNVPRSGNSALPQDPLHPGCPENLEGILTNDVGKTGEPQSDQQMRQEEPLPEHPQDGAKLSRKQLVLRRGLLLLGVFLILLVGILVRFYVRIQ

SEQ ID NO: 1145 - DNA, 3702 bp, Homo sapiens
agtcctcccccggcgcctccgactggcagtgggactcagcgggcgtggaggtcgcggctgagcgagcgagccctgggcgagtgaattgtggctgtgggttgacggtggagacaccccccggagggaggcggagggaagggaggcgaggcctgcacctgcatgcttcccgcctcccactccccagcgcccccggaccgtgcagttctctgcaggaccaggccatggagctcgaagtccggcgggtccgacaggcgttcctgtccggccggtcgcgacctctgcggtttcggctgcagcagctggaggccctgcggaggatggtgcaggagcgcgagaaggatatcctgacggccatcgccgccgacctgtgcaagagtgaattcaatgtgtacagtcaggaagtcattactgtccttggggaaattgattttatgcttgagaatcttcctgaatgggttactgctaaaccagttaagaagaacgtgctcaccatgctggatgaggcctatattcagccacagcctctgggagtggtgctgataatcggagcttggaattaccccttcgttctcaccattcagccactgataggagccatcgctgcaggaaatgctgtgattataaagccttctgaactgagtgaaaatacagccaagatcttggcaaagcttctccctcagtatttagaccaggatctctatattgttattaatggtggtgttgaggaaaccacggagctcctgaagcagcgatttgaccacattttctatacgggaaacactgcggttggcaaaattgtcatggaagctgctgccaagcatctgacccctgtgactcttgaactgggagggaaaagtccatgttatattgataaagattgtgacctggacattgtttgcagacgcataacctggggaaaatacatgaattgtggccaaacctgcattgcacccgactatattctctgtgaagcatccctccaaaatcaaattgtatggaagattaaggaaacagtgaaggaattttatggagaaaatataaaagagtctcctgattatgaaaggatcatcaatcttcgtcattttaagaggatactaagtttgcttgaaggacaaaagatagcttttggtggggagactgatgaggccacacgctacatagccccaacagtacttaccgatgttgatcctaaaaccaaggtgatgcaagaagaaatttttggaccaattcttccaatagtgcctgtgaaaaatgtagatgaggccataaatttcataaatgaacgtgaaaagcctctggctctttatgtattttcgcataaccataagctcatcaaacggatgattgatgagacatccagtggaggtgtcacaggcaatgacgtcattatgcacttcacgctcaactctttcccatttggaggagtgggttccagtgggatgggagcttatcacggaaaacatagttttgatactttttctcatcagcgtccctgtttattaaaaagtttaaagagagaaggtgctaacaaactcagatatcctcccaacagccagtcaaaggtggattggggaaaattttttctcttgaaacggttcaacaaagaaaaactcggtctcctgttgctcactttcctgggtattgtagccgctgtgcttgtcaaggcagaatattactgaagaatgatcctgttcaacctcctagtgcctctactgaattattcctcttttaaatggttaatgaaccaataatttttaaatcataccaaaaatagtaagaaaatatgcaaacactctgtgatcaaacttaaaagtcattgccattcatcattaataaaagttgccatttcaactacgtcccaacattccctaatagggtattcagggaacctgtcttaaattgtgcttatctaaatcttggaactttgagctaggggaggagaatgtattagactaaatacaaactgcggggttgtaagggagtctcagaacctcactgaatccttcactccagttaatggcactgctcacttcctgcctctgctgccaccatcactgtgtgaagctttcaagagcttggtacttcccagggctaccggcagtcctctgtagtccagagaggtgagattagatcttcttggttccctgtgaggtttcaggcactaaaactctatgtggggaagggaggggttactcctcctccaatgggactcaaggacttgacctccaggagtaggcccctggtcagaagtgccatctcaccagtggtcttcattcttcctcattcattctttatcatcctgtgttctgtttagttgcaacaatctcttgtgactaatgtcactcaaagcatcttgtaaatcctagggcttcctggaagttagttgccaaagtcatgcaagcatcacctgtcattcttgtgttggagttatagaattctacatcttataaaacctaactggcatttaaaaaatactgtggccgggcgtggtggctcatgcctgtaatcccagcactttgggaggccgaggtgggaggattgcttgagtccaggaatttgagaccagcctggacaacacagtgagacctcatctctatcaaaaaataaaaattagctagatgtggtggcatgagcctgtgttcccagctgcttaggaggctgaagcaggaggattgattgagcctgcgaggccaaggctgcagcaggctgtgattgcaccactgcacttcagcttgggcaacagagcaagaccctgtctccgaaacaaataaaaaatactgtaataaaagtacttataaacatactaatcctctttcaggaccctaaagttgcaggttagtaggtcttcaaggacaaatctgtaagtttcttatttctgtagtgcaagtaaaatttcactttttgaaactatagagagatccctttctgattagcctacagaacttaaagtgagggaaccatttcctctcacagacaaagaggcctgggatattaggactttggggtttgagagcatcatggggcagacagatggtggatggtctggacaagaagcgagtaagccactgcggttggtcatactgaagggaattgatggcaagaggatcccctgagcaagtcagaagttactctcatcagtcgttcatggtcacaacctgaggtactctgctgagtgggcaaggctgaagaagaggcctgtggaatgcagcattacctgctggacagagcagggcaggcagttctatgccttggagctcctgactgcagggactctgtccccacactcaaaaagactcagctcactcaatgagagaatgtgatttactttatagaacgtataatcaactttgttgaataatttgttctattaaggctgtctaaagtatgtgatgtcttcatcatagtatgaagtgttgaaaattaataacgagcctagtttaggaaaaagctgcttaaaactgtggctctaagagagtaatcataaaataccttagataaaattgcactatggaattttcattgagtatgtttaaattattggcttgtctactaatacacatctgcttcaaaatgaacatatttcataaaattggcatcaattttaatgacgctcctggtatggaacctcagatataccctattggagacaatcctttgatcataaattctccccaactataaatcattttatgtctttatcat

SEQ ID NO: 1146 - protein, 485 aa, Homo sapiens
MELEVRRVRQAFLSGRSRPLRFRLQQLEALRRMVQEREKDILTAIAADLCKSEFNVYSQEVITVLGEIDFMLENLPEWVTAKPVKKNVLTMLDEAYIQPQPLGVVLIIGAWNYPFVLTIQPLIGAIAAGNAVIIKPSELSENTAKILAKLLPQYLDQDLYIVINGGVEETTELLKQRFDHIFYTGNTAVGKIVMEAAAKHLTPVTLELGGKSPCYIDKDCDLDIVCRRITWGKYMNCGQTCIAPDYILCEASLQNQIVWKIKETVKEFYGENIKESPDYERIINLRHFKRILSLLEGQKIAFGGETDEATRYIAPTVLTDVDPKTKVMQEEIFGPILPIVPVKNVDEAINFINEREKPLALYVFSHNHKLIKRMIDETSSGGVTGNDVIMHFTLNSFPFGGVGSSGMGAYHGKHSFDTFSHQRPCLLKSLKREGANKLRYPPNSQSKVDWGKFFLLKRFNKEKLGLLLLTFLGIVAAVLVKAEYY

SEQ ID NO: 1147 - DNA, 3823 bp, Homo sapiens
agtcctcccccggcgcctccgactggcagtgggactcagcgggcgtggaggtcgcggctgagcgagcgagccctgggcgagtgaattgtggctgtgggttgacggtggagacaccccccggagggaggcggagggaagggaggcgaggcctgcacctgcatgcttcccgcctcccactccccagcgcccccggaccgtgcagttctctgcaggaccaggccatggagctcgaagtccggcgggtccgacaggcgttcctgtccggccggtcgcgacctctgcggtttcggctgcagcagctggaggccctgcggaggatggtgcaggagcgcgagaaggatatcctgacggccatcgccgccgacctgtgcaagagtgaattcaatgtgtacagtcaggaagtcattactgtccttggggaaattgattttatgcttgagaatcttcctgaatgggttactgctaaaccagttaagaagaacgtgctcaccatgctggatgaggcctatattcagccacagcctctgggagtggtgctgataatcggagcttggaattaccccttcgttctcaccattcagccactgataggagccatcgctgcaggaaatgctgtgattataaagccttctgaactgagtgaaaatacagccaagatcttggcaaagcttctccctcagtatttagaccaggatctctatattgttattaatggtggtgttgaggaaaccacggagctcctgaagcagcgatttgaccacattttctatacgggaaacactgcggttggcaaaattgtcatggaagctgctgccaagcatctgacccctgtgactcttgaactgggagggaaaagtccatgttatattgataaagattgtgacctggacattgtttgcagacgcataacctggggaaaatacatgaattgtggccaaacctgcattgcacccgactatattctctgtgaagcatccctccaaaatcaaattgtatggaagattaaggaaacagtgaaggaattttatggagaaaatataaaagagtctcctgattatgaaaggatcatcaatcttcgtcattttaagaggatactaagtttgcttgaaggacaaaagatagcttttggtggggagactgatgaggccacacgctacatagccccaacagtacttaccgatgttgatcctaaaaccaaggtgatgcaagaagaaatttttggaccaattcttccaatagtgcctgtgaaaaatgtagatgaggccataaatttcataaatgaacgtgaaaagcctctggctctttatgtattttcgcataaccataagctcatcaaacggatgattgatgagacatccagtggaggtgtcacaggcaatgacgtcattatgcacttcacgctcaactctttcccatttggaggagtgggttccagtgggatgggagcttatcacggaaaacatagttttgatactttttctcatcagcgtccctgtttattaaaaagtttaaagagagaaggtgctaacaaactcagatatcctcccaacagccagtcaaaggtggattggggaaaattttttctcttgaaacggttcaacaaagaaaaactcggtctcctgttgctcactttcctgggtattgtagccgctgtgcttgtcaagaaataccaagctgtgctgaggagaaaggccctgttgatttttctggtagttcacagactgcgttggtccagtaagcagagatgaacaccagatttcaaaacccagccctgtctgttaagagtgaggcagaatattactgaagaatgatcctgttcaacctcctagtgcctctactgaattattcctcttttaaatggttaatgaaccaataatttttaaatcataccaaaaatagtaagaaaatatgcaaacactctgtgatcaaacttaaaagtcattgccattcatcattaataaaagttgccatttcaactacgtcccaacattccctaatagggtattcagggaacctgtcttaaattgtgcttatctaaatcttggaactttgagctaggggaggagaatgtattagactaaatacaaactgcggggttgtaagggagtctcagaacctcactgaatccttcactccagttaatggcactgctcacttcctgcctctgctgccaccatcactgtgtgaagctttcaagagcttggtacttcccagggctaccggcagtcctctgtagtccagagaggtgagattagatcttcttggttccctgtgaggtttcaggcactaaaactctatgtggggaagggaggggttactcctcctccaatgggactcaaggacttgacctccaggagtaggcccctggtcagaagtgccatctcaccagtggtcttcattcttcctcattcattctttatcatcctgtgttctgtttagttgcaacaatctcttgtgactaatgtcactcaaagcatcttgtaaatcctagggcttcctggaagttagttgccaaagtcatgcaagcatcacctgtcattcttgtgttggagttatagaattctacatcttataaaacctaactggcatttaaaaaatactgtggccgggcgtggtggctcatgcctgtaatcccagcactttgggaggccgaggtgggaggattgcttgagtccaggaatttgagaccagcctggacaacacagtgagacctcatctctatcaaaaaataaaaattagctagatgtggtggcatgagcctgtgttcccagctgcttaggaggctgaagcaggaggattgattgagcctgcgaggccaaggctgcagcaggctgtgattgcaccactgcacttcagcttgggcaacagagcaagaccctgtctccgaaacaaataaaaaatactgtaataaaagtacttataaacatactaatcctctttcaggaccctaaagttgcaggttagtaggtcttcaaggacaaatctgtaagtttcttatttctgtagtgcaagtaaaatttcactttttgaaactatagagagatccctttctgattagcctacagaacttaaagtgagggaaccatttcctctcacagacaaagaggcctgggatattaggactttggggtttgagagcatcatggggcagacagatggtggatggtctggacaagaagcgagtaagccactgcggttggtcatactgaagggaattgatggcaagaggatcccctgagcaagtcagaagttactctcatcagtcgttcatggtcacaacctgaggtactctgctgagtgggcaaggctgaagaagaggcctgtggaatgcagcattacctgctggacagagcagggcaggcagttctatgccttggagctcctgactgcagggactctgtccccacactcaaaaagactcagctcactcaatgagagaatgtgatttactttatagaacgtataatcaactttgttgaataatttgttctattaaggctgtctaaagtatgtgatgtcttcatcatagtatgaagtgttgaaaattaataacgagcctagtttaggaaaaagctgcttaaaactgtggctctaagagagtaatcataaaataccttagataaaattgcactatggaattttcattgagtatgtttaaattattggcttgtctactaatacacatctgcttcaaaatgaacatatttcataaaattggcatcaattttaatgacgctcctggtatggaacctcagatataccctattggagacaatcctttgatcataaattctccccaactataaatcattttatgtcttta

SEQ ID NO: 1148 - protein, 508 aa, Homo sapiens
MELEVRRVRQAFLSGRSRPLRFRLQQLEALRRMVQEREKDILTAIAADLCKSEFNVYSQEVITVLGEIDFMLENLPEWVTAKPVKKNVLTMLDEAYIQPQPLGVVLIIGAWNYPFVLTIQPLIGAIAAGNAVIIKPSELSENTAKILAKLLPQYLDQDLYIVINGGVEETTELLKQRFDHIFYTGNTAVGKIVMEAAAKHLTPVTLELGGKSPCYIDKDCDLDIVCRRITWGKYMNCGQTCIAPDYILCEASLQNQIVWKIKETVKEFYGENIKESPDYERIINLRHFKRILSLLEGQKIAFGGETDEATRYIAPTVLTDVDPKTKVMQEEIFGPILPIVPVKNVDEAINFINEREKPLALYVFSHNHKLIKRMIDETSSGGVTGNDVIMHFTLNSFPFGGVGSSGMGAYHGKHSFDTFSHQRPCLLKSLKREGANKLRYPPNSQSKVDWGKFFLLKRFNKEKLGLLLLTFLGIVAAVLVKKYQAVLRRKALLIFLVVHRLRWSSKQR

SEQ ID NO: 1149 - DNA, 2253 bp, Homo sapiens
aaagctggccgtgcaggcgctcaggcgtgcagggtagccagtgccccggccaggaatggacagcctccaggacacagtggccctggaccatgggggctgctgccctgccctcagcaggctggttcccagaggctttgggactgagatgtggactctctttgccctttctggacccctgttcctgttccaggtgctgacttttatgatctacatcgtgagcactgtgttctgcgggcacctgggcaaggtggagctggcatcggtgaccctcgcggtggcctttgtcaatgtctgcggagtttctgtaggagttggtttgtcttcggcatgtgacaccttgatgtctcagagcttcggcagccccaacaagaagcacgtgggcgtgatcctgcagcggggcgcgctggtcctgctcctctgctgcctcccttgctgggcgctcttcctcaacacccagcacatcctgctgctcttccggcaggacccggacgtgtccaggttgacccaggactatgtaatgattttcattccaggacttccggtgatttttctttacaatctgctggcaaaatatttgcaaaatcagggatggctgaaggggcaggaggaggagtccccattccaaaccccgggtttgtccatcctccatccatctcactcacaccttagcagggccagttttcatttatttcagaagatcacctggccccaagtcctcagtggtgtggtgggcaactgtgtcaacggtgtggccaactatgccctggtttctgtgctgaacctgggggtcaggggctccgcctatgccaacatcatctcccagtttgcacagaccgtcttcctccttctctacattgtgctgaagaagctgcacctggagacgtgggcaggttggtccagccagtgcctgcaggactggggccccttcttctccctggctgtccccagcatgctcatgatctgtgttgagtggtgggcctatgagatcgggagcttcctcatggggctgctcagtgtggtggatctctctgcccaggctgtcatctacgaggtggccactgtgacctacatgattcccttggggctcagcatcggggtctgtgtccgagtggggatggctctgggggctgcggatactgtgcaggccaagcgctcggccgtctcgggcgtgctcagcatagttggcatttccctggtcctgggcaccctgataagcatcctgaaaaatcagctggggcatatttttaccaatgatgaagatgtcattgccctggtgagccaggtcttgccggtttatagtgtctttcacgtgtttgaggccatctgttgtgtctatggcggagttctgagaggaactgggaagcaggcctttggtgccgctgtgaatgccatcacatattacatcatcggcctaccactgggcatccttctgacctttgtggtcagaatgagaatcatgggcctctggctgggcatgctggcctgtgtcttcctggcaactgctgcctttgttgcttatactgcccggctggactggaagcttgctgcagaggaggctaagaaacattcaggccggcagcagcagcagagagcagagagcactgcaaccagacctgggcctgagaaagcagtcctatcttcagtggctacaggcagttcccctggcattaccttgacaacgtattcaaggtctgagtgccacgtggacttcttcaggactccagaggaggcccacgccctttcagctcctaccagcagactatcagtgaaacagctggtcatccgccgtggggctgctctgggggcggcgtcagccacactgatggtggggctcacggtcaggatcctagccaccaggcactagcaaagaagcttggaaatagaaagccaggagtggctgtccccagtatgcaaacacaccacggtctgccctgcaaaaacaccaatggggtctagtgcaggtggacactttgaaccactcctcaaaaaaagaactttggctgattccttgtggtgacactcagaggggtctgaacagacttgacaattctgttctggtcaagctggagttttcttctgtgacttggactgctctacagaagacatcagccaactgcacgagtcagagtccagggattgtcactattattaataatgtaaatggcttcaaatgggacactgcagataaaatcacaaaaaccactgttatattaaagattacacatttcctgggcaaaaaaaaaaaaaaaaaaa

SEQ ID NO: 1150 - protein, 602 aa, Homo sapiens
MDSLQDTVALDHGGCCPALSRLVPRGFGTEMWTLFALSGPLFLFQVLTFMIYIVSTVFCGHLGKVELASVTLAVAFVNVCGVSVGVGLSSACDTLMSQSFGSPNKKHVGVILQRGALVLLLCCLPCWALFLNTQHILLLFRQDPDVSRLTQDYVMIFIPGLPVIFLYNLLAKYLQNQGWLKGQEEESPFQTPGLSILHPSHSHLSRASFHLFQKITWPQVLSGVVGNCVNGVANYALVSVLNLGVRGSAYANIISQFAQTVFLLLYIVLKKLHLETWAGWSSQCLQDWGPFFSLAVPSMLMICVEWWAYEIGSFLMGLLSVVDLSAQAVIYEVATVTYMIPLGLSIGVCVRVGMALGAADTVQAKRSAVSGVLSIVGISLVLGTLISILKNQLGHIFTNDEDVIALVSQVLPVYSVFHVFEAICCVYGGVLRGTGKQAFGAAVNAITYYIIGLPLGILLTFVVRMRIMGLWLGMLACVFLATAAFVAYTARLDWKLAAEEAKKHSGRQQQQRAESTATRPGPEKAVLSSVATGSSPGITLTTYSRSECHVDFFRTPEEAHALSAPTSRLSVKQLVIRRGAALGAASATLMVGLTVRILATRH

SEQ ID NO: 1151 - DNA, 1722 bp, Homo sapiens
ccaggagccccagttaccgggagaggctgtgtcaaaggcgccatgagcaagatcagcgaggccgtgaagcgcgcccgcgccgccttcagctcgggcaggacccgtccgctgcagttccggatccagcagctggaggcgctgcagcgcctgatccaggagcaggagcaggagctggtgggcgcgctggccgcagacctgcacaagaatgaatggaacgcctactatgaggaggtggtgtacgtcctagaggagatcgagtacatgatccagaagctccctgagtgggccgcggatgagcccgtggagaagacgccccagactcagcaggacgagctctacatccactcggagccactgggcgtggtcctcgtcattggcacctggaactaccccttcaacctcaccatccagcccatggtgggcgccatcgctgcagggaactcagtggtcctcaagccctcggagctgagtgagaacatggcgagcctgctggctaccatcatcccccagtacctggacaaggatctgtacccagtaatcaatgggggtgtccctgagaccacggagctgctcaaggagaggttcgaccatatcctgtacacgggcagcacgggggtggggaagatcatcatgacggctgctgccaagcacctgacccctgtcacgctggagctgggagggaagagtccctgctacgtggacaagaactgtgacctggacgtggcctgccgacgcatcgcctgggggaaattcatgaacagtggccagacctgcgtggcccctgactacatcctctgtgacccctcgatccagaaccaaattgtggagaagctcaagaagtcactgaaagagttctacggggaagatgctaagaaatcccgggactatggaagaatcattagtgcccggcacttccagagggtgatgggcctgattgagggccagaaggtggcttatgggggcaccggggatgccgccactcgctacatagcccccaccatcctcacggacgtggacccccagtccccggtgatgcaagaggagatcttcgggcctgtgctgcccatcgtgtgcgtgcgcagcctggaggaggccatccagttcatcaaccagcgtgagaagcccctggccctctacatgttctccagcaacgacaaggtgattaagaagatgattgcagagacatccagtggtggggtggcggccaacgatgtcatcgtccacatcaccttgcactctctgcccttcgggggcgtggggaacagcggcatgggatcctaccatggcaagaagagcttcgagactttctctcaccgccgctcttgcctggtgaggcctctgatgaatgatgaaggcctgaaggtcagataccccccgagcccggccaagatgacccagcactgaggaggggttgctccgcctggcctggccatactgtgtcccatcggagtgcggaccaccctcactggctctcctggccctgggagaatcgctcctgcagccccagcccagccccactcctctgctgacctgctgacctgtgcacaccccactcccacatgggcccaggcctcaccattccaagtctccacccctttctagaccaataaagagacgaatacaattttctaactcagcaaaaaaaaaaaaaaaaaaaaaaaaaaaaaaaaaaaaaaaaaaaaaaaaaaaaaaaaaaaaaaaaaaaaaaaaaaaaaaaaaaaa

SEQ ID NO: 1152 - protein, 453 aa, Homo sapiens
MSKISEAVKRARAAFSSGRTRPLQFRIQQLEALQRLIQEQEQELVGALAADLHKNEWNAYYEEVVYVLEEIEYMIQKLPEWAADEPVEKTPQTQQDELYIHSEPLGVVLVIGTWNYPFNLTIQPMVGAIAAGNSVVLKPSELSENMASLLATIIPQYLDKDLYPVINGGVPETTELLKERFDHILYTGSTGVGKIIMTAAAKHLTPVTLELGGKSPCYVDKNCDLDVACRRIAWGKFMNSGQTCVAPDYILCDPSIQNQIVEKLKKSLKEFYGEDAKKSRDYGRIISARHFQRVMGLIEGQKVAYGGTGDAATRYIAPTILTDVDPQSPVMQEEIFGPVLPIVCVRSLEEAIQFINQREKPLALYMFSSNDKVIKKMIAETSSGGVAANDVIVHITLHSLPFGGVGNSGMGSYHGKKSFETFSHRRSCLVRPLMNDEGLKVRYPPSPAKMTQH

SEQ ID NO: 1153 - DNA, 2747 bp, Homo sapiens
ctcttccacatcaccttggtgtctccctaaataaaaccagccctccttatcgcctggaaaaaatcaagagctagagtttgaatgggttttatataaacactcacccctgtcagcgtgcggctgggctctcaggataaactcacagcatctggcgcgatgcttgccttgcgttctctcccctgaacgtcaaggtttaagcagagcccgaggactgggagctcttctctgaaattcgatcaacctgaagccagttgcggaactgcacggggtcccgatggacctcaaggaaagccccagtgagggcagcctgcaaccttctagcatccagatctttgccaacacctccaccctccatggcatccgccacatcttcgtgtatgggccgctgaccatccggcgtgtgctgtgggcagtggccttcgtgggctctctgggcctgctgctggtggagagctctgagagggtgtcctactacttctcctaccagcatgtcactaaggtggacgaagtggtggctcaaagcctggtcttcccagctgtgaccctctgtaacctgaatggcttccggttctccaggctcaccaccaatgacctgtaccatgctggggagctgctggccctgctggatgtcaacctgcagatcccggacccccatctggctgacccctccgtgctggaggccctgcggcagaaggccaacttcaagcactacaaacccaagcagttcagcatgctggagttcctgcaccgtgtgggccatgacctgaaggatatgatgctctactgcaagttcaaagggcaggagtgcggccaccaagacttcaccacagtgtttacaaaatatgggaagtgttacatgtttaactcaggcgaggatggcaaacctctgctcaccacggtcaagggggggacaggcaacgggctggagatcatgctggacattcagcaggatgagtacctgcccatctggggagagacagaggaaacgacatttgaagcaggagtgaaagttcagatccacagtcagtctgagccacctttcatccaagagctgggctttggggtggctccagggttccagacctttgtggccacacaggagcagaggctcacatacctgcccccaccgtggggtgagtgccgatcctcagagatgggcctcgacttttttcctgtttacagcatcaccgcctgtaggattgactgtgagacccgctacattgtggaaaactgcaactgccgcatggttcacatgccaggggatgcccctttttgtacccctgagcagcacaaggagtgtgcagagcctgccctaggtctgttggcggaaaaggacagcaattactgtctctgcaggacaccctgcaacctaacccgctacaacaaagagctctccatggtgaagatccccagcaagacatcagccaagtaccttgagaagaaatttaacaaatcagaaaaatatatctcagagaacatccttgttctggatatattttttgaagctctcaattatgagacaattgaacagaagaaggcgtatgaagttgctgccttacttggtgatattggtggtcagatgggattgttcattggtgctagtatccttacaatactagagctctttgattatatttatgagctgatcaaagagaagctattagacctgcttggcaaagaggaggacgaagggagccacgatgagaatgtgagtacttgtgacacaatgccaaaccactctgaaaccatcagtcacactgtgaacgtgcccctgcagacgaccctggggaccttggaggagattgcctgctgacacccctcgagtcacccagcactccctccaaacagaccttgaggcccaagacccaggacaaggaacagcaagctcaggtgggatggccccagtgctggaaagaagcaagagccccctatgcacacattgcagactagctgcctagacctcgctccggccacgtccaacacgacgcatccttgggccccgccgtgcgtccctcttaggagagatgagtcacactctggaactgtccaagaacgaacctgccatcacatctcactgccagatgtataaagcacctgcatgctcagacttcttgtggcgccacctccacgtctgtcttgtacatgacactcctccacgcggtttccagtgtccacactgctgcccgtgcagtgggaccagattccaggtccaaagtcaccatgaggccaccctggaatcagaactgcacaatcaagagggaacccatgggactctctgctacattcagttcttgtgtcgtttgtgaaagttcttaacctgcccaaaaacccccttttccccaagctgcccatggggcttcggcgccaaaggtgacccgcgccaacctccctcccccccagtgcctatgacggcggcacagcagccagcgggtgggggacgcctgtgttcacccatggtgcccatgtcgttcttctctccctgtgacacagcttgtacagtctgattctttttatctggggtaggggggcttttatgtttgtccgatggagatttgttttgttttgcttcattttatgcttttttattttagttttgatgttctgaggtttgctttggtttttccattttctttggcatttatttattcgtgcttcaaatcacagtcatattaaaagctggtcttgtggaaaaaaaaaaaaaaaaaaaaaaaaaaaaaaaaaaaaaaaaaaaaaaaaaaaaaaaaaaa

SEQ ID NO: 1154 - protein, 512 aa, Homo sapiens
MDLKESPSEGSLQPSSIQIFANTSTLHGIRHIFVYGPLTIRRVLWAVAFVGSLGLLLVESSERVSYYFSYQHVTKVDEVVAQSLVFPAVTLCNLNGFRFSRLTTNDLYHAGELLALLDVNLQIPDPHLADPSVLEALRQKANFKHYKPKQFSMLEFLHRVGHDLKDMMLYCKFKGQECGHQDFTTVFTKYGKCYMFNSGEDGKPLLTTVKGGTGNGLEIMLDIQQDEYLPIWGETEETTFEAGVKVQIHSQSEPPFIQELGFGVAPGFQTFVATQEQRLTYLPPPWGECRSSEMGLDFFPVYSITACRIDCETRYIVENCNCRMVHMPGDAPFCTPEQHKECAEPALGLLAEKDSNYCLCRTPCNLTRYNKELSMVKIPSKTSAKYLEKKFNKSEKYISENILVLDIFFEALNYETIEQKKAYEVAALLGDIGGQMGLFIGASILTILELFDYIYELIKEKLLDLLGKEEDEGSHDENVSTCDTMPNHSETISHTVNVPLQTTLGTLEEIAC

SEQ ID NO: 1155 - DNA, 3470 bp, Homo sapiens
cacctgggagagccgaggcgagaagcgacacttccctgcggctagcatccttgaaggaccccggcggcgaacagcctcccgcaggacgccctgagaagctctcagccccaggcgagagcgggcgcctggcaggacttaggcgcaggacttggggaagcctaagcaggtctctgccgagcgcagcccagggagcagtaacaaggaagggtcctggaggggaagggaaagaaggcggcagccggcaaggcgaccactcacccccgtacacacccaccccgcccgcccagccaggagccgcggtgcgcctctgggggcgctcgttccttggcgccttctctcccgtgtcccagcaccgctgggctacgggccgggctggtggggtccctggggatgtccagatcaggcatggtggccgagtggcccttctcccaggaccagcgtaaaagctggggttaggcggggcaggggggactcggctcagggtcccccgaggtccaggacgagggaaggcgggcgcagcacccagggactggagaggcggctcccagtgggacccctccagaagtagtgccgggcgccgggcatcctccaggaagaccaggggccgggaaagcctgggaggcgctcgggagaggccactgccaggggctgcgggctgaggcggcgctcagccccgggcgggcgcccgcggaggcggcagcggcggcgccgggcgggcatgccgcgccaccggagctcctttcgggcgcacgcttccctggcgcgggctgcgcgcggctgccgctgctgctgcttccactgctgctgcggactcccatggcggctccgcccggccggggccgccgccgctgccgccagccgcgggctgaatgaatgagccggattggcggagccgggctgcccgcagccgcgctcaccggcccgggacgcttccgcatggcccgcgaggagccggcgcccgcggcgttggcggctgccgggcagcccgggggcggcagaggcggcgagcgggcgctgcaggggccaggggtcgcccgcagggggcggccatcgctgagccgcgctaaactgcacgggctgcggcacatgtgtgccgggcgcacggcggctgggggctccttccagcggcgggcgctgtgggtgctggccttctgtacatccttcggcttgctgctgtcctggtcctcgaaccgcttgctctactggctcagcttcccgtcacacacgcgggtgcaccgcgagtggagccgccagttacccttccccgccgtcactgtgtgcaacaacaacccgctgcgcttcccgcgcctctccaagggggacctctactatgccggccactggctcgggctgctgctgcccaaccgcaccgcgcgcccgcttgtcagcgagctgctgcggggcgacgagccgcgccgccagtggttccgcaagctggcggacttccgcctcttcctgcctccgcgccacttcgagggaatcagcgccgccttcatggaccgcctgggccaccagctggaggacatgctgctctcctgcaagtaccgcggcgagctctgcgggccgcacaacttctcctccgtgtttacaaaatatgggaagtgttacatgtttaactcaggcgaggatggcaaacctctgctcaccacggtcaagggggggacaggcaacgggctggagatcatgctggacattcagcaggatgagtacctgcccatctggggagagacagaggaaacgacatttgaagcaggagtgaaagttcagatccacagtcagtctgagccacctttcatccaagagctgggctttggggtggctccagggttccagacctttgtggccacacaggagcagaggctcacatacctgcccccaccgtggggtgagtgccgatcctcagagatgggcctcgacttttttcctgtttacagcatcaccgcctgtaggattgactgtgagacccgctacattgtggaaaactgcaactgccgcatggttcacatgccaggggatgcccctttttgtacccctgagcagcacaaggagtgtgcagagcctgccctaggtctgttggcggaaaaggacagcaattactgtctctgcaggacaccctgcaacctaacccgctacaacaaagagctctccatggtgaagatccccagcaagacatcagccaagtaccttgagaagaaatttaacaaatcagaaaaatatatctcagagaacatccttgttctggatatattttttgaagctctcaattatgagacaattgaacagaagaaggcgtatgaagttgctgccttacttggtgatattggtggtcagatgggattgttcattggtgctagtatccttacaatactagagctctttgattatatttatgagctgatcaaagagaagctattagacctgcttggcaaagaggaggacgaagggagccacgatgagaatgtgagtacttgtgacacaatgccaaaccactctgaaaccatcagtcacactgtgaacgtgcccctgcagacgaccctggggaccttggaggagattgcctgctgacacccctcgagtcacccagcactccctccaaacagaccttgaggcccaagacccaggacaaggaacagcaagctcaggtgggatggccccagtgctggaaagaagcaagagccccctatgcacacattgcagactagctgcctagacctcgctccggccacgtccaacacgacgcatccttgggccccgccgtgcgtccctcttaggagagatgagtcacactctggaactgtccaagaacgaacctgccatcacatctcactgccagatgtataaagcacctgcatgctcagacttcttgtggcgccacctccacgtctgtcttgtacatgacactcctccacgcggtttccagtgtccacactgctgcccgtgcagtgggaccagattccaggtccaaagtcaccatgaggccaccctggaatcagaactgcacaatcaagagggaacccatgggactctctgctacattcagttcttgtgtcgtttgtgaaagttcttaacctgcccaaaaacccccttttccccaagctgcccatggggcttcggcgccaaaggtgacccgcgccaacctccctcccccccagtgcctatgacggcggcacagcagccagcgggtgggggacgcctgtgttcacccatggtgcccatgtcgttcttctctccctgtgacacagcttgtacagtctgattctttttatctggggtaggggggcttttatgtttgtccgatggagatttgttttgttttgcttcattttatgcttttttattttagttttgatgttctgaggtttgctttggtttttccattttctttggcatttatttattcgtgcttcaaatcacagtcatattaaaagctggtcttgtggaaaaaaaaaaaaaaaaaaaaaaaaaaaaaa

SEQ ID NO: 1156 - protein, 563 aa, Homo sapiens
MSRIGGAGLPAAALTGPGRFRMAREEPAPAALAAAGQPGGGRGGERALQGPGVARRGRPSLSRAKLHGLRHMCAGRTAAGGSFQRRALWVLAFCTSFGLLLSWSSNRLLYWLSFPSHTRVHREWSRQLPFPAVTVCNNNPLRFPRLSKGDLYYAGHWLGLLLPNRTARPLVSELLRGDEPRRQWFRKLADFRLFLPPRHFEGISAAFMDRLGHQLEDMLLSCKYRGELCGPHNFSSVFTKYGKCYMFNSGEDGKPLLTTVKGGTGNGLEIMLDIQQDEYLPIWGETEETTFEAGVKVQIHSQSEPPFIQELGFGVAPGFQTFVATQEQRLTYLPPPWGECRSSEMGLDFFPVYSITACRIDCETRYIVENCNCRMVHMPGDAPFCTPEQHKECAEPALGLLAEKDSNYCLCRTPCNLTRYNKELSMVKIPSKTSAKYLEKKFNKSEKYISENILVLDIFFEALNYETIEQKKAYEVAALLGDIGGQMGLFIGASILTILELFDYIYELIKEKLLDLLGKEEDEGSHDENVSTCDTMPNHSETISHTVNVPLQTTLGTLEEIAC

SEQ ID NO: 1157 - DNA, 8192 bp, Homo sapiens
cagaactagaccattttattttgaaagattcatgttcttcaatgccttcttgttacaggtgatgctgaacaggagcttggcccccctccatctgtagatgaggcagcaaacacactcatgactcgtctgggtttcctccttggagagaaagtcacagaagttcagccaggtgaccaatacagcatggaagtacaggatgaaaatcagacctcagcaatcacccagcggataagtccttgttccactctgactagcagcactgcctctccaccagccagtagcccctgctctacactcccacccatcagtacaaatgcaactgccaaggactgcagctatggggctgttactagtccaacctctacccttgaaagcagagatagtggcatcattgctacattaacaagctattctgaaaatgtggaacgcacaaaatatgctggggaaagcagtaaagaattaggatctggaggaaacataaaaccttggcagtctcaaaaatccagcatggactcctgtttgtatcgagtagatgaaaacatgactgcttccacctatagtctgaataagatcccagagagaaatttggaaacagtgttatctcaatcagtacagtctattcctttgtatctcatgccacggccaaattcagtagcagccaccagctctgcccacttggaagaccttgcttacctggatgagcagagacatacacctttgagaacttctctacgaatgccaagacagagcatgggtggtgctcgcacacagcaggatttaagagttcgctttgcaccttataggcctccagatatctccttgaagcctctgctctttgaagtgcccagcatcactacagagtcagtgtttgttggccgagattgggttttccacgaaatagatgctcaacttcaaagttcaaatgccagcgtgaaccaaggagtagtgattgtgggaaacattggattcggcaaaactgccatcatctccagactggtggccctcagctgccatggtacaaggatgagacagatcgcctcagacagcccacatgcctcccccaaacatgtggatgccaacagagagctgccactcacacagccaccttcagcccactcatctatcaccagtggaagctgcccaggaactccggaaatgcgcaggcggcaggaggaggctatgcgaagactagcctcgcaggtggttgcctatcactattgtcaagcagataatgcctacacttgcttggtgccagaatttgtccacaatgttgctgccttgctctgccgctcacctcagctgacagcctatcgggagcagcttcttcgggaacctcacctgcagagcatgctgagccttcgttcctgtgttcaagaccccatggcctccttccggaggggagttctggagccactagaaaatctccataaagagagaaaaatcccagatgaagatttcatcattttaattgatggattaaatgaagcagaatttcacaaaccggattatggggatacaattgtatcgtttctgagtaaaatgatcggaaagtttccttcttggctcaaactaattgtaacagttaggaccagtttacaggaaattaccaagctgctgcctttccataggatttttttggatcgactagaagagaatgaagccatagaccaggacctgcaggcttacatcctgcaccggatacacagcagctcagagatccagaataacatttcacttaatggcaaaatggacaatactacatttggcaaactcagttctcatctcaagaccctcagtcaagggtcctatctatatctgaaacttacatttgacctcatagagaaaggctatctagtgttaaagagctctagctacaaagtagttcctgtttcgctctcagaggtttatttactccagtgcaatatgaagttcccaacccagtcttcctttgaccgggtgatgcctctcctgaatgtggcagtggcctctctccacccactgactgatgagcatatcttccaggccatcaatgctgggagcattgaaggcacactagaatgggaggattttcagcagagaatggagaacctctccatgttcctaatcaagcgcagagacatgactcgtatgtttgtacatccttcttttcgagaatggcttatctggagagaagaaggagagaaaaccaaatttctctgtgatccgaggagtggtcacacgttacttgccttctggttttcccgccaagagggaaaactaaaccgacagcagactattgaactgggacatcacatcctcaaagcacacatttttaagggtttgagtaaaaaagttggtgtatcatcctccatcctccaaggtctctggatctcttatagcacagaaggtctttccatggcactggcgtctttacgaaatctctacactccaaatataaaggtcagccgactgctgattttgggaggtgccaatattaattaccggacagaggttttaaataatgctccaattctatgtgttcagtcccatcttggttacacagaaatggtagccctgctgctggagttcggggccaacgtggatgcctcttctgaaagtggcctgactcccctgggatatgctgcagcagcagggtacctgagcattgtggtgctgctgtgcaagaaacgggccaaggtggatcatttggataagaacgggcagtgtgctttggttcatgctgcactccgaggtcatctggaggttgtcaagtttttgattcagtgtgactggacgatggccggccagcagcaaggagtatttaagaagagccatgccatccaacaggccctcattgctgcagccagcatgggttatactgagattgtctcctacctacttgatcttccagaaaaagatgaagaggaagtagagcgagcacagatcaacagctttgacagtctctggggagagacagccctaacagctgcagccggaaggggcaaactggaggtgtgccgtttgctcttggaacaaggggcggcagtggcccagccaaaccgccgaggagcagtgccactattcagcacagtgcgccagggccactggcagattgttgatcttttactcacccatggagctgatgtcaacatggcagacaagcagggccgcactcccctgatgatggctgcttccgaaggccatctaggaaccgtggactttctgcttgcacaaggtgcctccattgctcttatggacaaagaaggattgacagccctcagctgggcttgtttgaagggccatctctcagtagtacgttctctggtggataacggagctgccacagaccatgctgacaagaatggccgtaccccactggatctggcagctttctatggcgatgctgaggtggtccagttcctggtagatcatggggccatgatcgagcacgttgactacagtggaatgcgccctttggatagggcagtggggtgccggaacacttctgttgttgtcactcttctgaagaaaggagccaagataggtccagccacatgggcgatggccacctccaagccagacatcatgatcatcctgttgagcaagctgatggaagagggggacatgttttataagaaaggtaaagtaaaggaagctgcccagcgctaccagtacgccctgaagaagttccctagagaagggtttggtgaggacttgaaaactttccgggaactaaaggtgtctctcctcctcaacctctctcggtgtcgcaggaaaatgaacgattttggaatggcggaggaatttgctactaaggccctggagctgaaaccgaaatcttatgaagcttactatgcgagagcaagggcaaaacgcagcagcagacagttcgcagcagccttagaggacctgaacgaggccatcaagctgtgtcccaacaaccgtgagatccagagacttctgctgagagtggaagaagagtgtagacagatgcagcagccacagcagccaccgccgccaccgcagcctcagcagcagttgccggaagaagcagaacctgagccacagcatgaagacatatactctgtacaggatatattcgaggaggagtacctggaacaggatgttgaaaatgtttccattggcctccagacagaggcccggcccagccaggggctcccggtcatccagagcccaccctcctctcccccgcatcgggactcagcctacatctccagctcacctcttggctctcatcaggtttttgacttccggtccagtagttctgtaggctctcccactagacagacctatcagtccacctcacctgccctttctccaactcatcagaactcacattacaggcctagcccaccacacacttccccggctcatcagggaggatcttaccgtttcagcccccctcctgtgggaggacagggcaaagaatacccaagccctcccccttcccctctccggagaggccctcagtatcgggccagccctccagctgaaagtatgagtgtctatagatcccagtctggttcacccgtgcgctatcagcaggaaacaagcgtcagtcagcttcctggcagacccaaatctccattatccaaaatggcccagcggccctaccagatgcctcagctccctgtggcagttccccagcaagggctcaggctacagcctgccaaggcccagattgtgagaagtaaccagcccagcccagccgtccattcaagcaccgtcatccccacaggagcctatggccaagtagcccattcaatggccagtaaataccagtcttcacaaggagacataggagtcagccagagccggttggtttatcaagggtcaattgggggaatcgtaggggatggaaggccggtgcagcatgtccaagccagcctgagtgcaggcgccatctgtcagcatggaggattgaccaaagaggatcttccacagcgaccttcctcagcataccgaggtggcgtgagatacagccagacaccacagatcggacgcagccagtcagcatcctattacccagtctgtcactcaaaactagatctggagcgctcctccagccaactaggttcccctgatgtgtcgcatttaatcagaagacctatcagtgtcaaccctaacgaaatcaaaccgcacccgccaactcccaggccgttgctgcattcccaaagtgtaggccttcgcttctctccatctagcaatagtatctcctccacctccaacctaactccgaccttccggccatcttcttccatccagcaaatggagatcccactgaaacctgcatatgagaggtcatgtgacgagctgtcgccagtgtctccaactcaaggaggttaccccagtgagcccacccgatccaggaccacaccattcatggggatcatagataaaacagcacggactcagcagtacccccacctccaccagcagaatcggacctgggcagtgtcatctgtggacaccgtcctcagtcccacgtctccaggcaacctgcctcagcctgagtccttcagtccaccatcatccatcagcaacattgccttttataacaaaaccaacaatgcacagaatggccatttgctggaggacgattattacagcccccatgggatgctggctaacgggtctcgtggagacctcttggagcgagtcagccaggcctcctcctatcccgacgtgaaggtagctcggactctacctgtggctcaggcataccaggacaacctgtacaggcagctgtcccgagactctcggcaagggcagacatcccctatcaaaccaaagagaccgttcgtggagtctaatgtttaaaagacgttttgttggagtgagacccatatgttttcactgcacattttcaggcttggtttccacattcgaggtagttctctggcttaatttctcatgtagtttctgtgtggtgttcagaggtggcagcccacatgctgaaatcctttgcatgcagccgactgggaagcggcctcccgggagccaggacttcagtttctcttgtctgtgcccagccacatgctctctccctctcttcagatgccaacgaggagattttcgtgctgtgtgctttaacccagggagatcagacacactggtcagctttttccaggagacaatcgctttcactgatgttcttgttgtgtaattgtctttttccttttttaaaaaataaggtgttcttgttcgttttcttctagaaactttagaaagagtgcgatgcccctttgcctttgcatccttagccagtgtcacccacacagccagccgcagcgcattctcatgctgtggcccctccccagaccgccagcgccctgcagccaccaggtctgcagtgtgcattaggattattgctggtcttcctagggggtaaaaggatcagagagagaagaattaagtgctaaattggaagaaaaccccaatataattatgtaaaatgtcactacattgattttccaagaggcattgtaggaacatgtcaaaaacagccagccctttaaatattgcagtcagccaaggaaattagatgagaattgtggctattaagagaattcactgagagttattctctagatttttagccgacaattaaccactaaaagctgctgcttttccagggtgggggagggaatgaatacatagaaaaacaaaaaagattgttctggattctcagtgaaaggctataggaagtctgttctggagacatctactttttagatcctgatacatcactgagtgtcatactccactaaaaggaaactctaaccgaaggctggctggtgtgacaatcccgttagttggatcttcacctacagccagattttgttctagtggccctcttcctgtaaacccagatggtgtcatacagaaattgtttctttcagaagcagattggaatctcttgggaccatgagactgagtcccaatatttccacccagggtcatgcccgttgttgtctacttccattttgagatctatagtttgattatctattattacaggaactgtttcttttctttttctaggagtgtttatgagagtgtgatattttaaagtcagacgcagcaaaaactgtttcagggtgaagaaagacccctttcagccctgttttgcagccctgggtgggggcatgagatagacagcaagcttctgatcttgaagcttgtctagaagacacatcttctaggtctcgtggtcatttggtaggctgacctttgagtgagcgaggccactattgagtggatagcaagaacattggaaccaaagcctcggcacaggcctggcactggctgtacatcagctcttacaactaaacaactcaactaagcaactgaaacgaaacaaaggagcattcgttctctgttgttaggaatcattctgctctgttagggaagggctgcaggaagggcagtttcctgaataaaaatctggctgcgaccagtcccatgtgtctggtaagtaagtaagtaagtaagtgccctttgaagggatcattaagacacagggagcatgaacctgagatcagaagcatttctttactaatttagattctgcgaaatagacggacctctccacccccaaacctaaaacaggccaggacttgtctctgtgctgaaagcaaatagcaagactaactcaagccccagcctctttccacactccctgatacctaaggactgctttctcagctagaccagggtgggcatcagcgacgccttctcagctagaccagggtaggcatcagcgtcctctctccatctctatacccctctctctcacatcaggaagatgaaatgtgtagctctagcggcaacctctagccaggagcccagtggcctctcagattgctttttggccaggtctcagcactgctggcatctttacatcttactccttaaaaccgcctctcgctgaggagccactgcattttgaagaatttctcagtgtctgtcaggaaagtgctcctgctcatttggaacgccacacaccacccgcactcacctgtccaggcgaatgagcaggtcctgtagctttacaaatatgccgctgatgccgcttctccccagggtctctcagttttccaggacaaaaagatttagggcctataccctatgggcaaaacacctaaaatgtcaacagtcaaaatgccattctttttggccatcataagagg

SEQ ID NO: 1158 - protein, 1900 aa, Homo sapiens
MTRLGFLLGEKVTEVQPGDQYSMEVQDENQTSAITQRISPCSTLTSSTASPPASSPCSTLPPISTNATAKDCSYGAVTSPTSTLESRDSGIIATLTSYSENVERTKYAGESSKELGSGGNIKPWQSQKSSMDSCLYRVDENMTASTYSLNKIPERNLETVLSQSVQSIPLYLMPRPNSVAATSSAHLEDLAYLDEQRHTPLRTSLRMPRQSMGGARTQQDLRVRFAPYRPPDISLKPLLFEVPSITTESVFVGRDWVFHEIDAQLQSSNASVNQGVVIVGNIGFGKTAIISRLVALSCHGTRMRQIASDSPHASPKHVDANRELPLTQPPSAHSSITSGSCPGTPEMRRRQEEAMRRLASQVVAYHYCQADNAYTCLVPEFVHNVAALLCRSPQLTAYREQLLREPHLQSMLSLRSCVQDPMASFRRGVLEPLENLHKERKIPDEDFIILIDGLNEAEFHKPDYGDTIVSFLSKMIGKFPSWLKLIVTVRTSLQEITKLLPFHRIFLDRLEENEAIDQDLQAYILHRIHSSSEIQNNISLNGKMDNTTFGKLSSHLKTLSQGSYLYLKLTFDLIEKGYLVLKSSSYKVVPVSLSEVYLLQCNMKFPTQSSFDRVMPLLNVAVASLHPLTDEHIFQAINAGSIEGTLEWEDFQQRMENLSMFLIKRRDMTRMFVHPSFREWLIWREEGEKTKFLCDPRSGHTLLAFWFSRQEGKLNRQQTIELGHHILKAHIFKGLSKKVGVSSSILQGLWISYSTEGLSMALASLRNLYTPNIKVSRLLILGGANINYRTEVLNNAPILCVQSHLGYTEMVALLLEFGANVDASSESGLTPLGYAAAAGYLSIVVLLCKKRAKVDHLDKNGQCALVHAALRGHLEVVKFLIQCDWTMAGQQQGVFKKSHAIQQALIAAASMGYTEIVSYLLDLPEKDEEEVERAQINSFDSLWGETALTAAAGRGKLEVCRLLLEQGAAVAQPNRRGAVPLFSTVRQGHWQIVDLLLTHGADVNMADKQGRTPLMMAASEGHLGTVDFLLAQGASIALMDKEGLTALSWACLKGHLSVVRSLVDNGAATDHADKNGRTPLDLAAFYGDAEVVQFLVDHGAMIEHVDYSGMRPLDRAVGCRNTSVVVTLLKKGAKIGPATWAMATSKPDIMIILLSKLMEEGDMFYKKGKVKEAAQRYQYALKKFPREGFGEDLKTFRELKVSLLLNLSRCRRKMNDFGMAEEFATKALELKPKSYEAYYARARAKRSSRQFAAALEDLNEAIKLCPNNREIQRLLLRVEEECRQMQQPQQPPPPPQPQQQLPEEAEPEPQHEDIYSVQDIFEEEYLEQDVENVSIGLQTEARPSQGLPVIQSPPSSPPHRDSAYISSSPLGSHQVFDFRSSSSVGSPTRQTYQSTSPALSPTHQNSHYRPSPPHTSPAHQGGSYRFSPPPVGGQGKEYPSPPPSPLRRGPQYRASPPAESMSVYRSQSGSPVRYQQETSVSQLPGRPKSPLSKMAQRPYQMPQLPVAVPQQGLRLQPAKAQIVRSNQPSPAVHSSTVIPTGAYGQVAHSMASKYQSSQGDIGVSQSRLVYQGSIGGIVGDGRPVQHVQASLSAGAICQHGGLTKEDLPQRPSSAYRGGVRYSQTPQIGRSQSASYYPVCHSKLDLERSSSQLGSPDVSHLIRRPISVNPNEIKPHPPTPRPLLHSQSVGLRFSPSSNSISSTSNLTPTFRPSSSIQQMEIPLKPAYERSCDELSPVSPTQGGYPSEPTRSRTTPFMGIIDKTARTQQYPHLHQQNRTWAVSSVDTVLSPTSPGNLPQPESFSPPSSISNIAFYNKTNNAQNGHLLEDDYYSPHGMLANGSRGDLLERVSQASSYPDVKVARTLPVAQAYQDNLYRQLSRDSRQGQTSPIKPKRPFVESNV

SEQ ID NO: 1159 - DNA, 640 bp, Homo sapiens
catttggataagaacgggcagtgtgctttggttcatgctgcactccgaggtcatctggaggttgtcaagtttttgattcagtgtgactggacgatggccggccagcagcaaggagtatttaagaagagccatgccatccaacaggccctcattgctgcagccagcatgggttatactgagattgtctcctacctacttgatcttccagaaaaagatgaagaggaagtagagcgagcacagatcaacagctttgacagtctctggggagagacaggtacctctcatggacgttgccctcaagaatgtgttgtgtttgtgtggactctcgaatctcacccccttattttttccctggcatacatttggcagtcttctgtctcaggcttttgtaatgcagactgattcagccaaactaaacagtcaagcagttttcctctttcaatcctctttgcctgtggattctccatactctttgcaccagagtcttctttcaaacaaaactttttccctctcttgtttccaaatatttttaaaagactgaaagttaccttacaatgtgccaaaccagagcagaaaattattgtggcctgtctcctttttatgtgatccttgtagtagttaggaataaatatttctccca

SEQ ID NO: 1160 - protein, 102 aa, Homo sapiens
MAGQQQGVFKKSHAIQQALIAAASMGYTEIVSYLLDLPEKDEEEVERAQINSFDSLWGETGTSHGRCPQECVVFVWTLESHPLIFSLAYIWQSSVSGFCNAD

SEQ ID NO: 1161 - DNA, 3173 bp, Homo sapiens
aggtgagccctgactgcgcagggagggacagcgcggggctcccgagtagcagccggcctcgcacctgccccttgcggccgcgcactggactgcggcgccgacccgcaccctgggcccgagggctgcagggctcgcccgccctctcggagccgagcctctcccggtccaggcggcccctgccctggcctgcccgggtgccgggtctctgctgaagttagaaccgagacccccgcttgctggtgaccccgagtttggatctttgctcctgcgccgcgttctagagcaagcgtttgcctcagcatggagggcggggccgcggcagccacccccacagcactgccttactacgtggccttctcccagctgctgggcctgaccttggtggccatgaccggcgcgtggctcgggctgtaccgaggcggcattgcctgggagagcgacctgcagttcaacgcgcaccccctctgcatggtcataggcctgatcttcctgcagggaaatgccctgctggtttaccgtgtcttcaggaacgaagctaaacgcaccaccaaggtcctgcacgggctgctgcacatctttgcgctcgtcatcgccctggttggcttggtggcggtgttcgactaccacaggaagaagggctacgctgacctgtacagcctacacagctggtgcgggatccttgtctttgtcctgtactttgtgcagtggctggtgggcttcagcttcttcctgttccccggagcttcattctccctgcggagccgctaccgcccacagcacatcttctttggtgctaccatcttcctcctttccgtgggcaccgccctgctgggcctgaaggaggcactgctgttcaacctcgggggcaagtatagcgcatttgagcccgagggtgtcctggccaacgtgctgggcctgctgctggcctgcttcggtggggcggtgctctacatcttgacccgggccgactggaagcggccttcccaggcggaagagcaggccctctccatggacttcaagacgctgacggagggagatagccccggctcccagtgatgcgcccggccggccctgggggttcgcggggtgtcttcttgcctgcccctgctgaggcgtcttcaggactgcaggctccggagagtggctctggcagcaggcgggcgcgtgggtgcagctgcatctgtttgagtgctgctttctggggtcaggtctccgcctcctctgcttctcctttctccgctgctatagaccagttcattgtgtgtggctcccgtgtctctgttgcccccttcagtgcagaaggctttgggtaggacttcgggtgttcggtcctggtcgcagagcacagatctttaaagaagcgagagaggaggccccaccctcctggcagcagatgcctggggcaaggccaggggaaactgggggggcctcagggacaggcctggaaaggccacgatggctgctgaattcaaacaaggagtccctccagcctgaataacacgtggcacaaatgggcccggcctttggcagaggagcaagtgatatgatgtgtaaagtatgttggtggtgaaagcaaggttccccaggagaggggagggactggcccctgggaagctctgagatgaggctgtggcccagctgtagtcctgaccttcctcttctttaaccctttagccctaggatggctttggtgggagaggggatagaagcccatgacttcagacagactttctcttggcagatgcaggcgggcctcctcccaggctgctccagacatgggggttggggatggggggcaccttgcagccccttcctgctggggctccctccttgtagcaccccccttgcggctcagctctggtttcctctcccaggctcacccaggctctgctcaggctgggaggcagagggcacaaaccttataattttttaaatgaaaaaccgctgctgctggctgtggctagagccccctggggctgctggagctgctgcctctgttctggaggacgagccttctccttatctgctgcccatctttccaggaagtcaggatggagtcagaacaactacagtcatcccccgtggtgtctgcacatcactccagccccataaagagtgtcatgttagctgagtcaccatttggcttcggcctggaaatagtgtgattagaacactgatcgtgtgcgaggccaggagatcaagaccatcctgactaacaaacacagtgaaaccccgtctctactaaaaatacaaaaaaattagccaggcgtggtggtgggcgcctgtagtcccagctacttgggaggctgaggcaggagaatggtgtgaacccgggagatggcgcttgcagtgagctgagattgcactccagcctgggcgacaggctcaaaaaagaaaaaaaaaagaacaccgatcatgtgcttcttggatctggtgactgttctctccctgttttcctttctttttgggtgtttgaggagcatggcttagcttgagacacacacagacactgtgtacttcagtgaagggcttaatatacagtttccaaacctgacgactcttcttcttgtaatggctgcccttttcctacctgaggccgtcttagagaaaggggccagtctcctctaatgctcagatttcccatagttggcttttgctgtgtctcctgcctcaggcagtgtcatttctgggagcaggtggttgtagtccaggcccctccccagcagggtctgcccaggctccttcgagcccctttccccgcctcctctcagcctgtccggatgacagtgttcgcctcctgtttagactgtacactcttcaggggtaggggtgccgtcagttcttcaatcagctggcacacacttgtatagtgaaatgtttacatgtgggaaaactccgccttagacaaactaccaaagtacaatcgtgtctctctctagccggaatgctacagagagaaatggaaccttagatttgcaacaaaagtctgtaaactggtctgtttgccaaagtgaacactggatgactaaggagctgaagaaggcccccagaagcggatttgtggtgggttattttattttgcctgtggccaatcttctgtgaaatacaatgtgctgttggtgcaacagatgattcaataaatgtctacagcagaaaaaaaaaaaaaaaaaaaa

SEQ ID NO: 1162 - protein, 251 aa, Homo sapiens
MEGGAAAATPTALPYYVAFSQLLGLTLVAMTGAWLGLYRGGIAWESDLQFNAHPLCMVIGLIFLQGNALLVYRVFRNEAKRTTKVLHGLLHIFALVIALVGLVAVFDYHRKKGYADLYSLHSWCGILVFVLYFVQWLVGFSFFLFPGASFSLRSRYRPQHIFFGATIFLLSVGTALLGLKEALLFNLGGKYSAFEPEGVLANVLGLLLACFGGAVLYILTRADWKRPSQAEEQALSMDFKTLTEGDSPGSQ

SEQ ID NO: 1163 - DNA, 3006 bp, Homo sapiens
gggggacagcacttctttcagtacattttcctgttagactcggggtattagagacccaaagatacccaaggaggagtgagagcgtccctgccttcgaggagcagacagggcaccgcgaggcgtttgcctcagcatggagggcggggccgcggcagccacccccacagcactgccttactacgtggccttctcccagctgctgggcctgaccttggtggccatgaccggcgcgtggctcgggctgtaccgaggcggcattgcctgggagagcgacctgcagttcaacgcgcaccccctctgcatggtcataggcctgatcttcctgcagggaaatgccctgctggtttaccgtgtcttcaggaacgaagctaaacgcaccaccaaggtcctgcacgggctgctgcacatctttgcgctcgtcatcgccctggttggcttggtggcggtgttcgactaccacaggaagaagggctacgctgacctgtacagcctacacagctggtgcgggatccttgtctttgtcctgtactttgtgcagtggctggtgggcttcagcttcttcctgttccccggagcttcattctccctgcggagccgctaccgcccacagcacatcttctttggtgctaccatcttcctcctttccgtgggcaccgccctgctgggcctgaaggaggcactgctgttcaacctcgggggcaagtatagcgcatttgagcccgagggtgtcctggccaacgtgctgggcctgctgctggcctgcttcggtggggcggtgctctacatcttgacccgggccgactggaagcggccttcccaggcggaagagcaggccctctccatggacttcaagacgctgacggagggagatagccccggctcccagtgatgcgcccggccggccctgggggttcgcggggtgtcttcttgcctgcccctgctgaggcgtcttcaggactgcaggctccggagagtggctctggcagcaggcgggcgcgtgggtgcagctgcatctgtttgagtgctgctttctggggtcaggtctccgcctcctctgcttctcctttctccgctgctatagaccagttcattgtgtgtggctcccgtgtctctgttgcccccttcagtgcagaaggctttgggtaggacttcgggtgttcggtcctggtcgcagagcacagatctttaaagaagcgagagaggaggccccaccctcctggcagcagatgcctggggcaaggccaggggaaactgggggggcctcagggacaggcctggaaaggccacgatggctgctgaattcaaacaaggagtccctccagcctgaataacacgtggcacaaatgggcccggcctttggcagaggagcaagtgatatgatgtgtaaagtatgttggtggtgaaagcaaggttccccaggagaggggagggactggcccctgggaagctctgagatgaggctgtggcccagctgtagtcctgaccttcctcttctttaaccctttagccctaggatggctttggtgggagaggggatagaagcccatgacttcagacagactttctcttggcagatgcaggcgggcctcctcccaggctgctccagacatgggggttggggatggggggcaccttgcagccccttcctgctggggctccctccttgtagcaccccccttgcggctcagctctggtttcctctcccaggctcacccaggctctgctcaggctgggaggcagagggcacaaaccttataattttttaaatgaaaaaccgctgctgctggctgtggctagagccccctggggctgctggagctgctgcctctgttctggaggacgagccttctccttatctgctgcccatctttccaggaagtcaggatggagtcagaacaactacagtcatcccccgtggtgtctgcacatcactccagccccataaagagtgtcatgttagctgagtcaccatttggcttcggcctggaaatagtgtgattagaacactgatcgtgtgcgaggccaggagatcaagaccatcctgactaacaaacacagtgaaaccccgtctctactaaaaatacaaaaaaattagccaggcgtggtggtgggcgcctgtagtcccagctacttgggaggctgaggcaggagaatggtgtgaacccgggagatggcgcttgcagtgagctgagattgcactccagcctgggcgacaggctcaaaaaagaaaaaaaaaagaacaccgatcatgtgcttcttggatctggtgactgttctctccctgttttcctttctttttgggtgtttgaggagcatggcttagcttgagacacacacagacactgtgtacttcagtgaagggcttaatatacagtttccaaacctgacgactcttcttcttgtaatggctgcccttttcctacctgaggccgtcttagagaaaggggccagtctcctctaatgctcagatttcccatagttggcttttgctgtgtctcctgcctcaggcagtgtcatttctgggagcaggtggttgtagtccaggcccctccccagcagggtctgcccaggctccttcgagcccctttccccgcctcctctcagcctgtccggatgacagtgttcgcctcctgtttagactgtacactcttcaggggtaggggtgccgtcagttcttcaatcagctggcacacacttgtatagtgaaatgtttacatgtgggaaaactccgccttagacaaactaccaaagtacaatcgtgtctctctctagccggaatgctacagagagaaatggaaccttagatttgcaacaaaagtctgtaaactggtctgtttgccaaagtgaacactggatgactaaggagctgaagaaggcccccagaagcggatttgtggtgggttattttattttgcctgtggccaatcttctgtgaaatacaatgtgctgttggtgcaacagatgattcaataaatgtctacagcagaaaaaaaaaaaaaaaaaaaa

SEQ ID NO: 1164 - protein, 251 aa, Homo sapiens; identical to SEQ ID NO: 1162

SEQ ID NO: 1165 - DNA, 3034 bp, Homo sapiens
ctttccttgcaccctcaccgcatatggaactcctggcgtcgtgtcccaggtcacgcctgtccccgtggggaggctgggcccctccccccagccactcccgagacttgagacctctgcctcaggacgatgggtgggaaggggcttgcggcgtttgcctcagcatggagggcggggccgcggcagccacccccacagcactgccttactacgtggccttctcccagctgctgggcctgaccttggtggccatgaccggcgcgtggctcgggctgtaccgaggcggcattgcctgggagagcgacctgcagttcaacgcgcaccccctctgcatggtcataggcctgatcttcctgcagggaaatgccctgctggtttaccgtgtcttcaggaacgaagctaaacgcaccaccaaggtcctgcacgggctgctgcacatctttgcgctcgtcatcgccctggttggcttggtggcggtgttcgactaccacaggaagaagggctacgctgacctgtacagcctacacagctggtgcgggatccttgtctttgtcctgtactttgtgcagtggctggtgggcttcagcttcttcctgttccccggagcttcattctccctgcggagccgctaccgcccacagcacatcttctttggtgctaccatcttcctcctttccgtgggcaccgccctgctgggcctgaaggaggcactgctgttcaacctcgggggcaagtatagcgcatttgagcccgagggtgtcctggccaacgtgctgggcctgctgctggcctgcttcggtggggcggtgctctacatcttgacccgggccgactggaagcggccttcccaggcggaagagcaggccctctccatggacttcaagacgctgacggagggagatagccccggctcccagtgatgcgcccggccggccctgggggttcgcggggtgtcttcttgcctgcccctgctgaggcgtcttcaggactgcaggctccggagagtggctctggcagcaggcgggcgcgtgggtgcagctgcatctgtttgagtgctgctttctggggtcaggtctccgcctcctctgcttctcctttctccgctgctatagaccagttcattgtgtgtggctcccgtgtctctgttgcccccttcagtgcagaaggctttgggtaggacttcgggtgttcggtcctggtcgcagagcacagatctttaaagaagcgagagaggaggccccaccctcctggcagcagatgcctggggcaaggccaggggaaactgggggggcctcagggacaggcctggaaaggccacgatggctgctgaattcaaacaaggagtccctccagcctgaataacacgtggcacaaatgggcccggcctttggcagaggagcaagtgatatgatgtgtaaagtatgttggtggtgaaagcaaggttccccaggagaggggagggactggcccctgggaagctctgagatgaggctgtggcccagctgtagtcctgaccttcctcttctttaaccctttagccctaggatggctttggtgggagaggggatagaagcccatgacttcagacagactttctcttggcagatgcaggcgggcctcctcccaggctgctccagacatgggggttggggatggggggcaccttgcagccccttcctgctggggctccctccttgtagcaccccccttgcggctcagctctggtttcctctcccaggctcacccaggctctgctcaggctgggaggcagagggcacaaaccttataattttttaaatgaaaaaccgctgctgctggctgtggctagagccccctggggctgctggagctgctgcctctgttctggaggacgagccttctccttatctgctgcccatctttccaggaagtcaggatggagtcagaacaactacagtcatcccccgtggtgtctgcacatcactccagccccataaagagtgtcatgttagctgagtcaccatttggcttcggcctggaaatagtgtgattagaacactgatcgtgtgcgaggccaggagatcaagaccatcctgactaacaaacacagtgaaaccccgtctctactaaaaatacaaaaaaattagccaggcgtggtggtgggcgcctgtagtcccagctacttgggaggctgaggcaggagaatggtgtgaacccgggagatggcgcttgcagtgagctgagattgcactccagcctgggcgacaggctcaaaaaagaaaaaaaaaagaacaccgatcatgtgcttcttggatctggtgactgttctctccctgttttcctttctttttgggtgtttgaggagcatggcttagcttgagacacacacagacactgtgtacttcagtgaagggcttaatatacagtttccaaacctgacgactcttcttcttgtaatggctgcccttttcctacctgaggccgtcttagagaaaggggccagtctcctctaatgctcagatttcccatagttggcttttgctgtgtctcctgcctcaggcagtgtcatttctgggagcaggtggttgtagtccaggcccctccccagcagggtctgcccaggctccttcgagcccctttccccgcctcctctcagcctgtccggatgacagtgttcgcctcctgtttagactgtacactcttcaggggtaggggtgccgtcagttcttcaatcagctggcacacacttgtatagtgaaatgtttacatgtgggaaaactccgccttagacaaactaccaaagtacaatcgtgtctctctctagccggaatgctacagagagaaatggaaccttagatttgcaacaaaagtctgtaaactggtctgtttgccaaagtgaacactggatgactaaggagctgaagaaggcccccagaagcggatttgtggtgggttattttattttgcctgtggccaatcttctgtgaaatacaatgtgctgttggtgcaacagatgattcaataaatgtctacagcagaaaaaaaaaaaaaaaaaaaa

SEQ ID NO: 1166 - protein, 251 aa, Homo sapiens; identical to SEQ ID NO: 1162

SEQ ID NO: 1167 - DNA, 3003 bp, Homo sapiens
caccgcccagcccgccgcccggttgccatggcgacgccgtcgcgccacggcccgcagaaccggccaagcgacccgggcgcggcgcggggaggctgaagggacgctcgggtaggcaagcgtttgcctcagcatggagggcggggccgcggcagccacccccacagcactgccttactacgtggccttctcccagctgctgggcctgaccttggtggccatgaccggcgcgtggctcgggctgtaccgaggcggcattgcctgggagagcgacctgcagttcaacgcgcaccccctctgcatggtcataggcctgatcttcctgcagggaaatgccctgctggtttaccgtgtcttcaggaacgaagctaaacgcaccaccaaggtcctgcacgggctgctgcacatctttgcgctcgtcatcgccctggttggcttggtggcggtgttcgactaccacaggaagaagggctacgctgacctgtacagcctacacagctggtgcgggatccttgtctttgtcctgtactttgtgcagtggctggtgggcttcagcttcttcctgttccccggagcttcattctccctgcggagccgctaccgcccacagcacatcttctttggtgctaccatcttcctcctttccgtgggcaccgccctgctgggcctgaaggaggcactgctgttcaacctcgggggcaagtatagcgcatttgagcccgagggtgtcctggccaacgtgctgggcctgctgctggcctgcttcggtggggcggtgctctacatcttgacccgggccgactggaagcggccttcccaggcggaagagcaggccctctccatggacttcaagacgctgacggagggagatagccccggctcccagtgatgcgcccggccggccctgggggttcgcggggtgtcttcttgcctgcccctgctgaggcgtcttcaggactgcaggctccggagagtggctctggcagcaggcgggcgcgtgggtgcagctgcatctgtttgagtgctgctttctggggtcaggtctccgcctcctctgcttctcctttctccgctgctatagaccagttcattgtgtgtggctcccgtgtctctgttgcccccttcagtgcagaaggctttgggtaggacttcgggtgttcggtcctggtcgcagagcacagatctttaaagaagcgagagaggaggccccaccctcctggcagcagatgcctggggcaaggccaggggaaactgggggggcctcagggacaggcctggaaaggccacgatggctgctgaattcaaacaaggagtccctccagcctgaataacacgtggcacaaatgggcccggcctttggcagaggagcaagtgatatgatgtgtaaagtatgttggtggtgaaagcaaggttccccaggagaggggagggactggcccctgggaagctctgagatgaggctgtggcccagctgtagtcctgaccttcctcttctttaaccctttagccctaggatggctttggtgggagaggggatagaagcccatgacttcagacagactttctcttggcagatgcaggcgggcctcctcccaggctgctccagacatgggggttggggatggggggcaccttgcagccccttcctgctggggctccctccttgtagcaccccccttgcggctcagctctggtttcctctcccaggctcacccaggctctgctcaggctgggaggcagagggcacaaaccttataattttttaaatgaaaaaccgctgctgctggctgtggctagagccccctggggctgctggagctgctgcctctgttctggaggacgagccttctccttatctgctgcccatctttccaggaagtcaggatggagtcagaacaactacagtcatcccccgtggtgtctgcacatcactccagccccataaagagtgtcatgttagctgagtcaccatttggcttcggcctggaaatagtgtgattagaacactgatcgtgtgcgaggccaggagatcaagaccatcctgactaacaaacacagtgaaaccccgtctctactaaaaatacaaaaaaattagccaggcgtggtggtgggcgcctgtagtcccagctacttgggaggctgaggcaggagaatggtgtgaacccgggagatggcgcttgcagtgagctgagattgcactccagcctgggcgacaggctcaaaaaagaaaaaaaaaagaacaccgatcatgtgcttcttggatctggtgactgttctctccctgttttcctttctttttgggtgtttgaggagcatggcttagcttgagacacacacagacactgtgtacttcagtgaagggcttaatatacagtttccaaacctgacgactcttcttcttgtaatggctgcccttttcctacctgaggccgtcttagagaaaggggccagtctcctctaatgctcagatttcccatagttggcttttgctgtgtctcctgcctcaggcagtgtcatttctgggagcaggtggttgtagtccaggcccctccccagcagggtctgcccaggctccttcgagcccctttccccgcctcctctcagcctgtccggatgacagtgttcgcctcctgtttagactgtacactcttcaggggtaggggtgccgtcagttcttcaatcagctggcacacacttgtatagtgaaatgtttacatgtgggaaaactccgccttagacaaactaccaaagtacaatcgtgtctctctctagccggaatgctacagagagaaatggaaccttagatttgcaacaaaagtctgtaaactggtctgtttgccaaagtgaacactggatgactaaggagctgaagaaggcccccagaagcggatttgtggtgggttattttattttgcctgtggccaatcttctgtgaaatacaatgtgctgttggtgcaacagatgattcaataaatgtctacagcagaaaaaaaaaaaaaaaaaaaa

SEQ ID NO: 1168 - protein, 251 aa, Homo sapiens; identical to SEQ ID NO: 1162

SEQ ID NO: 1169 - DNA, 8192 bp, Homo sapiens
atgagtaactcccggaataaccgggtgatggtggaaggggttggcgctcgggtagtgcgcggcccggactggaagtgggggaagcaggacggcggcgagggccatgtgggcaccgtccggagcttcgagagccccgaggaggtggtggtagtgtgggacaacggcacagctgccaactaccgctgctccggggcttacgacctccgcatcctggacagcgcgcccaccggcatcaagcatgatggaaccatgtgtgatacctgccgccagcaaccaatcattggcattcgatggaagtgtgcagagtgtacaaattatgatttgtgcacagtgtgttatcatggagataaacatcatttaagacatcgcttttaccgaattactacaccgggaagtgagagggttctgttagagtctcgtaggaaatctaagaagattacagccagaggaatctttgcaggtgccagagtggtgcgaggagtggactggcagtgggaagatcaagatggaggaaatggacgtaggggaaaggtaacagaaatccaggactggagtgcatcaagcccacatagcgcagcatatgtcctctgggataatggtgctaagaacctttacagagttggctttgagggcatgtctgatctgaaatgtgtccaggatgccaagggaggttctttctacagagatcactgccctgtgctaggtgagcagaatggcaacaggaatcctggtggattgcagattggtgacctggtaaatatagatctcgacctcgaaattgtacagtctttgcagcatggtcatggaggatggactgatggaatgtttgagactttaactacaactggaactgtttgtggcattgatgaagatcatgacattgtagtacagtatccaagtggcaataggtggaccttcaatcctgctgttctcactaaagcgaacattgtccgaagtggagatgctgctcagggtgcagaaggaggcacctcgcagtttcaagtgggtgatcttgtacaagtttgttatgacctggaacgaattaaacttctacaaagaggacatggagaatgggctgaagcgatgcttccaactttaggtaaagttggccgagtacaacagatttattcagacagtgatttaaaggtggaagtttgtggaacatcttggacatacaatccagcagcagtttccaaggtggcatctgcaggatcagccattagcaatgcatctggtgaaagactctcacaactcctgaagaaattatttgaaacccaagaatctggtgacctcaatgaagaattagttaaggctgctgccaatggagatgttgctaaagtggaagatttgcttaaaagaccagatgtggatgtaaatgggcaatgtgctggccacacagctatgcaagctgctagtcagaatggacatgttgacattttgaagttacttttgaagcaaaacgtggatgtcgaagcagaggataaagatggtgatagagcagttcaccatgcagcttttggagatgaaggcgctgttatagaagtactacatcgaggtagtgctgatttgaatgctcgaaacaagcgccgacagacaccacttcatattgctgtcaataaaggtcatcttcaagttgtgaagactttattggactttggctgtcatcccagtctccaggattctgaaggtgatacccctcttcatgatgcaataagtaagaaacgtgatgatatcctagcagttcttttggaagctggagcagatgttaccatcacaaacaataatggatttaatgctctgcatcatgctgcactaaggggaaatcccagtgcaatgcgtgttttactatctaaattaccaagaccatggattgtggatgagaagaaagatgatggttatactgccttacatctggctgcccttaataatcacgtagaagtggctgaactgttggtacatcagggtaatgcaaacctggatatccagaatgtgaaccaacaaactgccctacaccttgctgttgaacgacagcatacccagattgttaggcttttggtccgtgcaggtgccaagcttgatattcaggataaggatggggatactcctttgcatgaagctctaaggcatcacactttgtctcagctacgtcagctccaagatatgcaagatgtggggaaggtggatgctgcctgggagccatccaaaaacacgttaataatgggacttggtacccagggggcagagaagaagagtgcagcatctattgcctgtttcttggcagccaatggtgctgacctgagcattcgaaataagaagggtcaatcgccacttgatctctgtcctgatccgaatctctgcaaagcactggcaaagtgtcataaggaaaaagtcagtggtcaagtgggttctcggagtccttctatgattagtaatgattctgaaaccttagaagagtgtatggtgtgctcagatatgaagagagatactctttttggtccatgtggacatattgctacctgttctttatgttctccacgtgtcaagaaatgcctcatctgtaaagaacaggttcaatccaggacaaagattgaagaatgtgtggtatgctctgacaagaaagcagctgttctttttcaaccctgtggccacatgtgtgcttgtgagaactgtgctaacctgatgaaaaagtgtgtgcagtgtcgagcagtagttgaacgaagagtgcctttcattatgtgctgtggagggaaaagttcagaagatgccactgatgatatctcaagtgggaatattccagtattacaaaaggacaaggataataccaatgtcaatgcagatgtgcaaaagttgcagcaacagttacaagacattaaagagcagacaatgtgccctgtgtgtctagatcgtctgaagaatatgattttcctttgtggtcacggaacctgtcaactctgtggagaccgcatgagtgaatgtcctatctgtcgcaaggctattgaacgaaggattcttttgtattaactaagacacatggtgtattttgttagctaatgtatctagtcatgagatcttaataggcttttgatctagttggaagttctgatgagttaatttctaatatcatagtttctttactagagtataattgggctgtaaatgtaccagaacaaaaaaccctacaaaatggtgttggaaattgtgttttttgtttttgttttaaatttgaaacatcaaattcatgtaactcataggataatttacctttggcttctaagaggaaagtcctttaaggatatccttttttaaaaaattgcatttttctcttataatttgtaaatttgttggatctcaaaagacataattctttgtgatcagttatccttcatttcatcgtggttttacacagtgagttgataacaggttctctgagaagtcatgcatcaaataaaagaggcaggtcaaacaattatgtcacatggtaaattataaaatgacagtacaagttccagatagttaagggaataccgaagggatgattctttttttaagataacaggaagttacccacatgtttgtttctgaattcttagagtaaatggaagcatagaatgagggaataatgactttgcatttctcttgttttctagattcaaaaggaacattgtttaacttgaatcagattaccagtttcaaggtgactgatagacaagaaaaggaaaaataagcaataatagtgggcaactgaagagaaaaaaaaaacgagtatctattaactggccactaacagttgcctttcttacattaatttatacactattttgttcagccagtgtttttaaaaaaaatctatgaaaagtgtacttccggttttctgtgattacttatctgggcttgatctgaccagtgaaatgacattgccctatttggacctctgaggttctatttagctttgcagatgtacatagtatcccagtgatctgcaaaattaatgccttttccaagaaaaaatcttttcttctctgtatcagttaattctgacagtgttagtgattctgtcttcattataggccttatttccattatctctttctttatagtattttttgttataaagaaaacagtctttctgtgtatacctacggatgagggtattatttaaactgccaacaatatccaagacatggtcaataacctaattataaatactttagaaagagtgaccaggacatgtatagaaatgtctgcttacctgtagactttaaaaacaaacaaaatttttggagcatttaatcattttttttctccttttatctcctttgtaatcttattgtctcctgagtaaatatacacataaatgtttggggattcattgctgctagattatatcaggtgtttacatagtgtctactatatgctgttgataagctttttcctaaaaatagttatcctcttttgtagtttttttccctcctttaaatctggctagcttttcttacttcagtttttatagaacaccaactaaatttgaaagtatgaagtctctagccctcttacactgtttctggctgtttaatccttgctgcctttgcaagtcctggtgaaagcaatggggagctttgctggctggttttgtagtctcaacaattccatgtctgtgtttagctgagtaactgctatcatttagaacagtaaaatttttatagatttcaaatttgaaaattcatgtacactcagttatctaataaggggccaccgacgctgtttttaaaactattttgaagttataaaaaggtagaacatctgactgatgatgttcacataaagagacagacagactatcatgttgcagacatgaaaacagcatgtcaggtttttcctttccttccatgccatgggctacccatctcttcccactagatcacctggtgaggagggagcacctggctgactcatgcagagtttggccaatcagagaattgtgtggtctccagctctactttccttaaacaaatcctttctgttttctgagctgcagtgctaaaacagatccctaaaaggtaatagcatcttccagactagtttaattatttcctttataagaatatgacataaatttttattatagaaataatgtcattataattttagtgctagtacttgtgggttttctgtatttgtatcaccttgaaatttgttccatgaatagaaaatacttctttattcatgttttcaatcacttagaattattttaaatttattttgggtttgtgagagataataagattaagaacttcatcatttcagtgactttcctccaactctctgaatctgctacctcttattatatgtcccttagcagtacttttccagttaggttcgttaccctgctcattagctaaacctctttatcttgtgcctcaaaagagcttttacttttcttagaaacatttataaaaaagaaaaaaactgacacgcattcattcaaaaaagtatttattgggctttagggattagatacacaacagtggaaaaatggcatcttagcacactcagaatttattgtgcagcagttgtgtattttaaggaatctgtagttaaaaggaagagatccaaaggtcctgataacatttcctaacgtttcagaagagttgtcattgagtagtgtttggatttcctctctgtatccctcaccctaccattttctcctttattcttctaagattgttagcgttgttactcaaaacatacacatacaacataccagatggtgctgttctaatggtatttgttcacgtaatttaacgttcttactgcttatactatatacatatttaattttgttgggagcaagaaggttttcaagaaaagataattttgtattagtgtaggaatatattagacaaatgtttagttggtcaaattatgcataagatatttgtaactttaaacattgcaaattgaccagctagctatggaagcataaaattaattgataattaatgttggaaatacatttctaaaatttatatttttatggtgttagcctgtaagagcattttagcatattgaaatgcatgctgcttaagatgtgtctggttcaaatatcaaaacttgctgggtcatttttacatagtagaaacatactgtctatgtgttgcccaattgctgtttgtccactctgaattctggaccctttttggactaagaattagttaaattcatgaactaagagaattagagatggggtagagtaggatcaggacagtggggttacaacagataggaaaggaaagtcagcatttgagtgtagagaaaaaaagaggatcatacagatgtcatcaaattataggctttaatacaggttgctttttttaatccaaaaggaaaagcacttatcctatcagaatgtctaccatgttttatagtaataatttgtgtaaaaaattgaatttttgaatagttttttgtattttttgtgatgaaaaactcataacataaaatttaccatattaactgtttctaaagaatacagttcagccatgtgaagtacatttacactgttgtgaagcagatctccagaactttttcatcttgcaaaactgaaactccatacccattaaacaactcccctttttgttttctcctcagtggaatagaattttgactccatataaatcaagaaacacctaaattctttagttgtttgtgtttgcaagatctaaggtcatggtaaacattaagttcttaaaatttttgggagggacagtgcacctctcctctgaattgttagcaattaaattgagtaggttttaaatgtctattcattggaagggtttgttatttcattttgagccagaggggagaggcacattttaaatatcagaattagattagctttgagtttgtacaattgggaacataatagattttcataaattatgtgtgccttgttggaagtgtcaactgtctttatgtctgcttgtaaaagtttcaaaatatgttttccctcaaaaaggcaacgttacttcatttgcttgaatattatgataggaatgcttactgatattacttgatagtcatatatagcctaggaaatttaacatatatataactatagcagtattaataatgatagttgtacttctttaaaacattaaatttgaggaaactttaatgctgtctcgtgtacattgctttactacagtgagggggaatatcctttagattgagcctcaatttactggttagtagtatgtgaaactctggtataaaaacgtaaactagacagtagagccgatgaattaaaattgtaaattgctacattggcattttctacctccttttctgtcagagtattactttttccagcatttattcttatttgtgagtaaagaggaaatgggaacctgaggttaaaattgacatttttgtttcattgagaatttaagcagtaggtacaggagaagtgacttgtcacattaatttggtgcctaaatctgtaactacaagttgtgatcgacatgtacaaaatgtctaagaaaggtcatatgctgaatattttacttttcctgtatagtctgcatgatttgtttcataaacccagcttatttcctccaaaaagcaaaatggtcctgtaatttttaaagtaaaataaacgtgccattttgtctgcaatctataatttcaggaagttattgaaagttctgactcagggctttttaacagttcaagcaattgtcagttatattttggaaactccatctgtgtaattctccagtgccttgaaagaattattaacttggcaacactattaaaactttataaaagatggtctttagtgcacgtgtatcattatatacacgttttaaagtcatattgcttagcttgttaataatgattctgcatgtgtgctgggtttgggtaattctttaaaggaagttttctagatttgcacttgatgtttgttttttaaaaactgattatttatggccgtgacactgttaccagaaaagtaattctaattaagttattatgcaaagtcatctataagtagcatctgggaagaggagatcgaggccacagtttgctattttagtatgaaaggaggatctgtttgggaaacatagattgtcttcccctcaaatgaggggaaaaaaaaaagaccctttgttcaaatggattctgttgtaaaa

SEQ ID NO: 1170 - protein, 1006 aa, Homo sapiens
MSNSRNNRVMVEGVGARVVRGPDWKWGKQDGGEGHVGTVRSFESPEEVVVVWDNGTAANYRCSGAYDLRILDSAPTGIKHDGTMCDTCRQQPIIGIRWKCAECTNYDLCTVCYHGDKHHLRHRFYRITTPGSERVLLESRRKSKKITARGIFAGARVVRGVDWQWEDQDGGNGRRGKVTEIQDWSASSPHSAAYVLWDNGAKNLYRVGFEGMSDLKCVQDAKGGSFYRDHCPVLGEQNGNRNPGGLQIGDLVNIDLDLEIVQSLQHGHGGWTDGMFETLTTTGTVCGIDEDHDIVVQYPSGNRWTFNPAVLTKANIVRSGDAAQGAEGGTSQFQVGDLVQVCYDLERIKLLQRGHGEWAEAMLPTLGKVGRVQQIYSDSDLKVEVCGTSWTYNPAAVSKVASAGSAISNASGERLSQLLKKLFETQESGDLNEELVKAAANGDVAKVEDLLKRPDVDVNGQCAGHTAMQAASQNGHVDILKLLLKQNVDVEAEDKDGDRAVHHAAFGDEGAVIEVLHRGSADLNARNKRRQTPLHIAVNKGHLQVVKTLLDFGCHPSLQDSEGDTPLHDAISKKRDDILAVLLEAGADVTITNNNGFNALHHAALRGNPSAMRVLLSKLPRPWIVDEKKDDGYTALHLAALNNHVEVAELLVHQGNANLDIQNVNQQTALHLAVERQHTQIVRLLVRAGAKLDIQDKDGDTPLHEALRHHTLSQLRQLQDMQDVGKVDAAWEPSKNTLIMGLGTQGAEKKSAASIACFLAANGADLSIRNKKGQSPLDLCPDPNLCKALAKCHKEKVSGQVGSRSPSMISNDSETLEECMVCSDMKRDTLFGPCGHIATCSLCSPRVKKCLICKEQVQSRTKIEECVVCSDKKAAVLFQPCGHMCACENCANLMKKCVQCRAVVERRVPFIMCCGGKSSEDATDDISSGNIPVLQKDKDNTNVNADVQKLQQQLQDIKEQTMCPVCLDRLKNMIFLCGHGTCQLCGDRMSECPICRKAIERRILLY

SEQ ID NO: 1171 - DNA, 1344 bp, Homo sapiens
ttcctttgattctagtctaccagttgccacttctggtccatttgcatataacactggagaagtgttcctttatctttgtgaagcccttaacattcaaggagccactactgcttctatgctgctgaaaaatacaagacactgcctctacctctgcatctgtcctttgctttttgcttggaaactatcacatcaaatcacactgagatcagttcctactgagctctcactggcaaactatcagtagaagaagcctggacaaaactgagttcaatgcttcacaattgctgcgctcttcttctccccagtggaaaaaaaaatgctctctgcaccacatggccgctggccgctgccagaggatggaggaaggggtgatgttggtcattcaagactgtttttcctacctcttcagtgcctctttcaactgtatgaagttaaaaccagcttggcaggctctagagagactgacctctgcagatggtttaaagggagaagctcaagggtccacagttcacagggctgccaatcaggcctgtgcagaaaactcaacagtctaaaagaatatatgaagacagaacctcaacctagaagaaatggacaaattcccagacacatcaaggaattcctagacaaactatcaaaactgaatcatgattagatagaaaatctgaacagatcaatataagtaaagagattaaagcagtaataaactctcccatcaaagaaaagctcaggacctgatggcttcactgctgaattctaccaaacgtttaaagaactaacaccaatgattctcaaactctttttaaaaattgaagatgagagaacacttccaaattcatatcacgaggccagcattaccctgataccaacgccagacaaagacactataagaaaaggcaattatggaccaatatccctgataaacatggatgtaaaaatcctcatcaaaatactagcaaatgaaattcaaccacaaatttaaaaaagcattcaccatgatcgagtgggatttatccctgggatgcaggaagtttcaacatacacaaatccataaacatgatacaccacatcaacaagatgaaggacaaaatctttataatctcaatagatgcaggaaaagcatttaacagaattcagcaccctttcatgatttaaaaaaactcaacaaaatatagaaggactgtaccccaacacaataaagaccagatatgacaaacccacagctaacattctcaacagtgaaaagttaaaagcttttcttctgagatcaggaacaagacaataatgctcactctctcgacttctgttcatcgtaacgttggaagttctagacagagcaattag

SEQ ID NO: 1172 - protein, 73 aa, Homo sapiens
MAAGRCQRMEEGVMLVIQDCFSYLFSASFNCMKLKPAWQALERLTSADGLKGEAQGSTVHRAANQACAENSTV

SEQ ID NO: 1173 - DNA, 2644 bp, Homo sapiens
acgtgaccacctggctggcgcgcgcgcctgggggtctggtccctagccgcgttctcggtcgcttccctcttctctcgccgcctcctggcctccgcaccgacgcggcccgggctggagccgagccggggccgagctgcaggccggaccggagccggatctgtacccgctgagacgtggaaacatggaggcctgagccggtgtgcgccacctgggctgcggcggcgacagcgacttctcctgacccctctgccaccctcccatccgtccgcgggtccgtggagctggagcagatcccccagccggctgagacaggttgtcttttggaaatgcaggtttaaggacaaattatctgcttaagctagaagatgggatcgaatagcagcagaatcggcgatcttcctaaaaatgagtacttgaaaaagttatcaggcacggaatctatctctgagaatgacccgttctggaatcagcttctctcattttctttccctgcaccaactagcagtagtgagttgaaactcttggaggaagcaaccatttcagtctgcaggtcattagttaaaaacaatcctcgaacaggaaatcttggtgcactaattaaggtcttcctttctagaaccaaagaactaaaactttcagcagaatgtcagaaccacatcttcatttggcagacacacaatgctttgtttattatttgctgtttgctgaaagtgttcatctgtcagatgtcagaggaggaattacaacttcattttacttatgaagaaaaatctcctggcaattacagttctgactcagaagatcttttggaagaattgctgtgctgtttgatgcagttgatcactgatattccactcttagatattacatatgaaatatcagtagaagctatatcaacaatggttgttttcctttcctgccaactcttccacaaagaagttttgcgacagagcatcagccacaagtatttgatgcgaggtccatgtcttccatacaccagcaaacttgtgaagaccttattatataactttatcagacaagaaaagccacctcctccaggggcccatgttttccctcagcagtcggatgggggaggactgctttatggacttgcatcaggagtagcaacaggactctggactgtcttcacactaggtggtgtgggcagcaaagcggctgcctctccagagctttcttcccctctggccaaccagagtctcctgcttctgctggtgttggccaatctgacagatgcctcagatgcgccaaacccctacagacaagccattatgtccttcaagaacacacaagatagcagtcctttcccctcatcaattccacatgccttccagatcaactttaatagtttgtacacagctctttgtgaacagcagacatctgatcaagcaactctcctcttgtataccttgctccatcaaaatagtaatattagaacatacatgttggctcgcacagatatggaaaatcttgttttaccaattcttgagattctgtatcatgttgaagaaaggaattcacaccatgtgtatatggcccttataatattgttgatccttacggaagatgatggcttcaacagatccattcatgaagtgatactaaaaaatattacttggtattcagaacgagttttaactgaaatctccttggggagtctcctgatcctggtggtaataagaaccattcaatacaacatgactaggacacgagacaagtaccttcacacaaattgtttggcagctttagcaaatatgtcggcacagtttcgttctctccatcagtatgctgcccagaggatcatcagtttattttctttgctgtctaaaaaacacaacaaagttctggaacaagccacacagtccttgagaggttcgctgagttctaatgatgttcctctaccagattatgcacaagacctaaatgtcattgaagaagtgattcgaatgatgttagagatcatcaactcctgcctgacaaattcccttcaccacaacccaaacttggtatacgccctgctttacaaacgcgatctctttgaacaatttcgaactcatccttcatttcaggatataatgcaaaatattgatctggtgatctccttctttagctcaaggttgctgcaagctggagctgagctgtcagtggaacgggtcctggaaatcattaagcaaggcgtcgttgcgctgcccaaagacagactgaagaaatttccagaattgaaattcaaatatgtggaagaggagcagcccgaggagttttttatcccctatgtctggtctcttgtctacaactcagcagtcggcctgtactggaatccacaggacatccagctgttcaccatggattccgactgagggcaggatgctctcccacccggacccctccagccaagcagcccttcaagttcttttatttctgggtaacagaagtagacagacaggttacttggtgtatcttctgttaaagaggattgcacgagtgtgttttcctcacacactttgatttggagaattggtgctagttggcaatagataactcagcgtagatagtattgcaaaaaggggaggaaatacacaacaataataaatgtaaaaacctgctattcaaaaaaaaaaaaaaaaaa

SEQ ID NO: 1174 - protein, 669 aa, Homo sapiens
MGSNSSRIGDLPKNEYLKKLSGTESISENDPFWNQLLSFSFPAPTSSSELKLLEEATISVCRSLVKNNPRTGNLGALIKVFLSRTKELKLSAECQNHIFIWQTHNALFIICCLLKVFICQMSEEELQLHFTYEEKSPGNYSSDSEDLLEELLCCLMQLITDIPLLDITYEISVEAISTMVVFLSCQLFHKEVLRQSISHKYLMRGPCLPYTSKLVKTLLYNFIRQEKPPPPGAHVFPQQSDGGGLLYGLASGVATGLWTVFTLGGVGSKAAASPELSSPLANQSLLLLLVLANLTDASDAPNPYRQAIMSFKNTQDSSPFPSSIPHAFQINFNSLYTALCEQQTSDQATLLLYTLLHQNSNIRTYMLARTDMENLVLPILEILYHVEERNSHHVYMALIILLILTEDDGFNRSIHEVILKNITWYSERVLTEISLGSLLILVVIRTIQYNMTRTRDKYLHTNCLAALANMSAQFRSLHQYAAQRIISLFSLLSKKHNKVLEQATQSLRGSLSSNDVPLPDYAQDLNVIEEVIRMMLEIINSCLTNSLHHNPNLVYALLYKRDLFEQFRTHPSFQDIMQNIDLVISFFSSRLLQAGAELSVERVLEIIKQGVVALPKDRLKKFPELKFKYVEEEQPEEFFIPYVWSLVYNSAVGLYWNPQDIQLFTMDSD

SEQ ID NO: 1175 - DNA, 942 bp, Homo sapiens
tacgaatctcgcgagaagtcaagttctcatgagttctcccaaaatccaccgctcttcctctttccctaagcagcctgagggttgactggattggtgaggcccgtgtggctacttctgtggaagcagtgctgtagttactggaagataaaagggaaagcaagcccttggtgggggaaagtatggctgcgatgatggcatttcttaggacacctttggattaataatgaaaacaactactctctgagcagctgttcgaatcatctgatatttatactgaatgagttactgtaagtacgtattgacagaattacactgtactttcctctaggtgatctgtgaaaatggttcgctattcacttgacccggagaaccccacgaaatcatgcaaatcaagaggttccaatcttcgtgttcactttaagaacactcgtgaaactgctcaggccatcaagggtatgcatatacgaaaagccacgaagtatctgaaagatgtcactttacagaaacagtgtgtaccattccgacgttacaatggtggagttggcaggtgtgcgcaggccaagcaatggggctggacacaaggtcggtggcccaaaaagagtgctgaatttttgctgcacatgcttaaaaacgcagagagtaatgctgaacttaagggtttagatgtagattctctggtcattgagcatatccaagtgaacaaagcacctaagatgcgccgccggacctacagagctcatggtcggattaacccatacatgagctctccctgccacattgagatgatccttacggaaaaggaacagattgttcctaaaccagaagaggaggttgcccagaagaaaaagatatcccagaagaaactgaagaaacaaaaacttatggcacgggagtaaattcagcattaaaataaatgtaattaaaaggaaaaaaaaaaaaaaa

SEQ ID NO: 1176 - protein, 184 aa, Homo sapiens [sequence omitted]

SEQ ID NO: 1177 - DNA, 4143 bp, Homo sapiens
agcagcgagtccttgcctcccggcggctcaggacgagggcagatctcgttctggggcaagccgttgacactcgctccctgccaccgcccgggctccgtgccgccaagttttcattttccaccttctctgcctccagtcccccagcccctggccgagagaagggtcttaccggccgggattgctggaaacaccaagaggtggtttttgttttttaaaacttctgtttcttgggagggggtgtggcggggcaggatgagcaactccgttcctctgctctgtttctggagcctctgctattgctttgctgcggggagccccgtaccttttggtccagagggacggctggaagataagctccacaaacccaaagctacacagactgaggtcaaaccatctgtgaggtttaacctccgcacctccaaggacccagagcatgaaggatgctacctctccgtcggccacagccagcccttagaagactgcagtttcaacatgacagctaaaacctttttcatcattcacggatggacgatgagcggtatctttgaaaactggctgcacaaactcgtgtcagccctgcacacaagagagaaagacgccaatgtagttgtggttgactggctccccctggcccaccagctttacacggatgcggtcaataataccagggtggtgggacacagcattgccaggatgctcgactggctgcaggagaaggacgatttttctctcgggaatgtccacttgatcggctacagcctcggagcgcacgtggccgggtatgcaggcaacttcgtgaaaggaacggtgggccgaatcacaggtttggatcctgccgggcccatgtttgaaggggccgacatccacaagaggctctctccggacgatgcagattttgtggatgtcctccacacctacacgcgttccttcggcttgagcattggtattcagatgcctgtgggccacattgacatctaccccaatgggggtgacttccagccaggctgtggactcaacgatgtcttgggatcaattgcatatggaacaatcacagaggtggtaaaatgtgagcatgagcgagccgtccacctctttgttgactctctggtgaatcaggacaagccgagttttgccttccagtgcactgactccaatcgcttcaaaaaggggatctgtctgagctgccgcaagaaccgttgtaatagcattggctacaatgccaagaaaatgaggaacaagaggaacagcaaaatgtacctaaaaacccgggcaggcatgcctttcagagtttaccattatcagatgaaaatccatgtcttcagttacaagaacatgggagaaattgagcccaccttttacgtcaccctttatggcactaatgcagattcccagactctgccactggaaatagtggagcggatcgagcagaatgccaccaacaccttcctggtctacaccgaggaggacttgggagacctcttgaagatccagctcacctgggagggggcctctcagtcttggtacaacctgtggaaggagtttcgcagctacctgtctcaaccccgcaaccccggacgggagctgaatatcaggcgcatccgggtgaagtctggggaaacccagcggaaactgacattttgtacagaagaccctgagaacaccagcatatccccaggccgggagctctggtttcgcaagtgtcgggatggctggaggatgaaaaacgaaaccagtcccactgtggagcttccctgagggtgcccgggcaagtcttgccagcaaggcagcaagacttcctgctatccaagcccatggaggaaagttactgctgaggacccacccaatggaaggattcttctcagccttgaccctggagcactgggaacaactggtctcctgtgatggctgggactcctcgcgggaggggactgcgctgctatagctcttgctgcctctcttgaatagctctaactccaaacctctgtccacacctccagagcaccaagtccagatttgtgtgtaagcagctgggtgcctggggcctctcgtgcacactggattggtttctcagttgctgggcgagcctgtactctgcctgacgaggaacgctggctccgaagaggccctgtgtagaaggctgtcagctgctcagcctgctttgagcctcagtgagaagtccttccgacaggagctgactcatgtcaggatggcaggcctggtatcttgctcgggccctagctgttggggttctcatgggttgcactgaccatactgcttacgtcttagccattccgtcctgctccccagctcactctctgaagcacacatcattggctttcctatttttctgttcattttttaattgagcaaatgtctattgaacacttaaaattaattagaatgtggtaatggacatattactgagcctctccatttggaacccagtggagttgggatttctagaccctctttctgtttggatggtgtatgtgtatatgcatggggaaaggcacctggggcctgggggaggctataggatataagcattagggaccctgaggctttaagtggtttctatttcttcttagttattatgtgccaccttcttagttattatgtgccacctcccctatgagtgacgtgtttgatcactagcagaatagcaagcagagtatcattcatgctggggccagaatgatggccggttgccagatataactgctttggagcaaatctcttctgtttagagagatagaagttatgacatatgtaatacacatctgtgtacacagaaaccggcacctgccagacagagctggttctaagatttaatacagtgctttttttcctctttgaaatattttactttaataccagtgccttttcttgttgaacttcttggaaaagccaccaattctagatcttgatttgaattaatacacacaatatctgagacacttacacttttcaaaagatttgtgtatgcattgcctaattagagtagggggagaagggcaactattattatccctattttacaaaactgaggcttagtgaggttcagccacatgcctagacttatatactagttagtggtgcagccagggagaggactcagatttcctggaggcaaagtctatctctgaaactccatgaagacttttgcagccagttcccaccaatatgccccagacgtgagacaaacaaggacttttttttttatatagagccatccataaaatcctaagcccttttattaatgtataaccaggagaacatctgtgccaacggttggactttttatggctgagattcgggaggaagtgtgacaccaagcaggagaggaagaatgattttctttgtacttaggttttctaaggacattgttttaatctgtatcgtgccaaagttgtatcactgttaaacttctgaagacataaccagttgagtcttatttcaagatatgttctcaagccaattgtgtgcttctcttgtttctgtgattgctttctagccaaagcgaagcttgtacaggttgagtatcccttatccaaaatgcttggaaccagaagtgtttcaaattttagattattttcagattttggaatgtttgcatatacataatgagatattttgggaataggacccgagcctaaacacaaaattcattgatgtgtcagttacaccttatccacatagcctgagggtaattttatacgatattttaaatagttgtgtacatgaagcatggtttgtggtaacttatgtgaggggttttcccattttttgtcttgttggtgctcaaaaagttttggattttggagcatttcggattttggatttttggattagggttgctcaacccatattattggctgtacatcctggtcacttctgacttctgtttttactaatggaagctttgcaaattgaattctcagtgagttgtatatttatacacctggcttgaagccttaattgtatataatgatgctttttaaaaaatgctatttggaagactatttatttctcgtgtatataatgtatataaaaaaatatggttagtgtttacctaaggttaaccaatttcaagattaaaatttttaaatagtaaaataataaaaaattataaagttcttaaaa

SEQ ID NO: 1178 - protein, 500 aa, Homo sapiens
MSNSVPLLCFWSLCYCFAAGSPVPFGPEGRLEDKLHKPKATQTEVKPSVRFNLRTSKDPEHEGCYLSVGHSQPLEDCSFNMTAKTFFIIHGWTMSGIFENWLHKLVSALHTREKDANVVVVDWLPLAHQLYTDAVNNTRVVGHSIARMLDWLQEKDDFSLGNVHLIGYSLGAHVAGYAGNFVKGTVGRITGLDPAGPMFEGADIHKRLSPDDADFVDVLHTYTRSFGLSIGIQMPVGHIDIYPNGGDFQPGCGLNDVLGSIAYGTITEVVKCEHERAVHLFVDSLVNQDKPSFAFQCTDSNRFKKGICLSCRKNRCNSIGYNAKKMRNKRNSKMYLKTRAGMPFRVYHYQMKIHVFSYKNMGEIEPTFYVTLYGTNADSQTLPLEIVERIEQNATNTFLVYTEEDLGDLLKIQLTWEGASQSWYNLWKEFRSYLSQPRNPGRELNIRRIRVKSGETQRKLTFCTEDPENTSISPGRELWFRKCRDGWRMKNETSPTVELP

SEQ ID NO: 1179 - DNA, 1584 bp, Homo sapiens
gcgtcccccacaccacagacccgcgccgccgacgacccagcagccgccatgcgtctgctccgaggtgtgtttgtagttgctgctaagcgaacgccctttggagcttacggaggccttctgaaagacttcactgctactgacttgtctgaatttgctgccaaggctgccttgtctgctggcaaagtctcacctgaaacagttgacagtgtgattatgggcaatgtcctgcagagttcttcagatgctatatatttggcaaggcatgttggtttgcgtgtgggaatcccaaaggagaccccagctctcacgattaataggctctgtggttctggttttcagtccattgtgaatggatgtcaggaaatttgtgttaaagaagctgaagttgttttatgtggaggaaccgaaagcatgagccaagctccctactgtgtcagaaatgtgcgttttggaaccaagcttggatcagatatcaagctggaagattctttatgggtatcattaacagatcagcatgtccagctccccatggcaatgactgcagagaatcttactgtaaaacacaaaataagcagagaagaatgtgacaaatatgccctgcagtcacagcagagatggaaagctgctaatgatgctggctactttaatgatgaaatggcaccaattgaagtgaagacaaagaaaggaaaacagacaatgcaggtagacgagcatgctcggccccaaaccaccctggaacagttacagaaacttcctccagtattcaagaaagatggaactgttactgcagggaatgcatcgggtgtagctgatggtgctggagctgttatcatagctagtgaagatgctgttaagaaacataacttcacaccactggcaagaattgtgggctactttgtatctggatgtgatccctctatcatgggtattggtcctgtccctgctatcagtggggcactgaagaaagcaggactgagtcttaaggacatggatttggtagaggtgaatgaagcttttgctccccagtacttggctgttgagaggagtttggatcttgacataagtaaaaccaatgtgaatggaggagccattgctttgggtcacccactgggaggatctggatcaagaattactgcacacctggttcacgaattaaggcgtcgaggtggaaaatatgccgttggatcagcttgcattggaggtggccaaggtattgctgtcatcattcagagcacagcctgaagagaccagtgagctcactgtgacccatccttactctacttggccaggccacagtaaaacaagtgaccttcagagcagctgccacaactggccatgccctgccattgaaacagtgattaagtttgatcaagccatggtgacacaaaaatgcattgatcatgaataggagcccatgctagaagtacattctctcagatttgaaccagtgaaatatgatgtatttctgagctaaaactcaactatagaagacattaaaagaaatcgtattcttgccaagtaaccaccacttctgccttagataatatgattataaggaaatcaaataaatgttgccttaacttc

SEQ ID NO: 1180 - protein, 397 aa, Homo sapiens
MRLLRGVFVVAAKRTPFGAYGGLLKDFTATDLSEFAAKAALSAGKVSPETVDSVIMGNVLQSSSDAIYLARHVGLRVGIPKETPALTINRLCGSGFQSIVNGCQEICVKEAEVVLCGGTESMSQAPYCVRNVRFGTKLGSDIKLEDSLWVSLTDQHVQLPMAMTAENLTVKHKISREECDKYALQSQQRWKAANDAGYFNDEMAPIEVKTKKGKQTMQVDEHARPQTTLEQLQKLPPVFKKDGTVTAGNASGVADGAGAVIIASEDAVKKHNFTPLARIVGYFVSGCDPSIMGIGPVPAISGALKKAGLSLKDMDLVEVNEAFAPQYLAVERSLDLDISKTNVNGGAIALGHPLGGSGSRITAHLVHELRRRGGKYAVGSACIGGGQGIAVIIQSTA

SEQ ID NO: 1181 - DNA, 8192 bp, Homo sapiens
ccgtagctgcgccgccgcggcgggagtaaaggtcgcgccgccgggagcgagccggccgcggcgcctgcgggaagccggcggggcaggtcggagaagagcgagaagatcgagaaactccaggccagcccgggaacatggcgccaggcgggccagccgcggactgagagccgcggggcagccaggagccggggcccgagccccgcccggcccgggccatgtcggtgggcgagctctacagccagtgcacaagggtctggatccctgaccctgatgaggtatggcgctcagctgagttaaccaaggactacaaagaaggagacaagagcctacagctcagactggaggatgaaacgattctggaatacccaattgatgtacaacgcaaccagctgcccttcttacggaatccagatatcttggtgggagaaaatgacctgactgcccttagctatcttcatgagcctgcagttttgcataatttgaaggtccgtttcctggagtccaaccatatctacacttactgtggtatcgtacttgttgccattaatccttatgaacagttgccaatctatggacaagatgtcatctatacctacagtggccaaaacatgggagacatggacccccacatctttgctgtggcagaagaagcctacaagcagatggccagagatgagaagaatcagtccatcatagtcagtggggagtctggagccgggaagacggtatcagccaagtatgccatgcgctatttcgccaccgttggtggctcggccagtgaaaccaacatcgaagagaaggtgctggcatccagtcccatcatggaggccattggaaatgccaagaccacccgcaatgacaacagcagccgttttggcaagtacatccagattggctttgacaaaaggtaccacatcatcggggccaacatgaggacttacctcttggagaagtccagagtggtcttccaggcagatgatgagaggaattaccacatcttttaccagctctgtgctgctgccggtcttccagaatttaaagagcttgcactaacaagtgcagaggactttttctatacatcacagggaggagacacttccatcgagggtgtggacgatgctgaggactttgagaagactcgacaagccttcacactcctcggagtgaaagagtcccatcagatgagcatttttaagataattgcttctatcttgcaccttggaagtgtggcgattcaggctgagcgtgatggtgattcctgtagtatatcaccccaggatgtatacctaagcaacttctgccgactgctaggggtggagcacagtcagatggagcactggctgtgtcatcgcaagctggtcaccacctcggagacctacgtcaagaccatgtccctgcagcaggtgatcaatgcgcgcaacgccctggcgaagcacatctatgcccagttgttcggctggattgtggagcacatcaacaaggccctgcacacctccctcaagcagcactccttcatcggggtcctggacatctatgggtttgagacatttgaggtaaacagctttgagcagttctgtatcaactatgcaaatgaaaagctccagcagcagttcaactcgcatgttttcaaactggagcaagaagaatacatgaaggaacagatcccttggaccctgattgatttttatgataaccaaccttgtatcgacctcattgaagccaagctgggtatcttggacctgttggatgaagaatgtaaggtccccaaaggaactgaccagaactgggctcagaagctctatgaccggcactccagcagccagcacttccagaagccccgcatgtccaacacggccttcatcatcgtccactttgcagacaaggtggagtacctctctgatggttttctggagaaaaacagagacacggtgtatgaagagcagatcaatatcctgaaggccagcaagttcccactagtggctgacttgtttcatgatgacaaggaccctgttcctgccaccacccctgggaaggggtcatcttcgaagatcagcgtccgttctgccagaccccccatgaaagtctccaacaaggagcacaagaaaaccgttggccaccagttccgtacctccctgcatctgctcatggagaccctgaatgccacgacacctcactatgtccgctgcatcaagcccaacgatgagaagctcccctttcactttgacccaaagagagcagtgcagcaactcagagcctgcggggtgttggagacgattcgaatcagtgcagctggctacccatccaggtgggcctaccatgactttttcaaccggtatcgggtgctggtcaagaagagagagctcgccaacacagacaaaaaggccatctgcaggtctgtcctggagaacctcatcaaggaccccgacaagttccagtttggccgcaccaagatcttctttcgagcaggccaggtggcctacctggagaagctgcgggctgacaagttccggacagccaccatcatgatccagaaaactgtccggggatggctgcagaaggtgaaatatcacaggctgaagggggctaccttaaccctgcagaggtactgccggggacacctggcccgcaggctggctgagcacctgcggaggatcagagcggctgtggtgctccagaaacattaccgcatgcagagggcccgccaggcctaccagagggtccgcagagctgccgttgttatccaggccttcacccgggccatgtttgtgcggagaacctaccgccaggtcctcatggagcacaaggccaccaccatccagaagcacgtgcggggctggatggcacgcaggcacttccagcggctgcgggatgcagccattgtcatccagtgtgccttccggatgctcaaggccaggcgggagctgaaggccctcaggattgaggcccgctcagcagagcatctgaaacgtctcaacgtgggcatggagaacaaggtggtccagctgcagcggaagatcgatgagcagaacaaagagttcaagacactttcagagcagttgtccgtgaccacctcaacatacaccatggaggtagagcggctgaagaaggagctggtgcactaccagcagagcccaggtgaggacaccagcctcaggctgcaggaggaggtggagagcctgcgcacagagctgcagagggcccactcggagcgcaagatcttggaggacgcccacagcagggagaaagatgagctgaggaagcgagttgcagacctggagcaagaaaatgctctcttgaaagatgagaaagaacagctcaacaaccaaatcctgtgccagtctaaagatgaatttgcccagaactctgtgaaggaaaatctcatgaagaaagaactggaggaggagcgatcccggtaccagaaccttgtgaaggaatattcacagttggagcagagatacgacaaccttcgggatgaaatgaccatcataaagcaaactccaggtcataggcggaacccatcaaaccaaagtagcttagaatctgactccaattacccctccatctccacatctgagatcggagacactgaggatgccctccagcaggtggaggaaattggcctggagaaggcagccatggacatgacggtcttcctgaagctgcagaagagagtacgggagctggagcaggagaggaaaaagctgcaagtgcagctggagaagagagaacagcaggacagcaagaaagtccaggcggaaccaccacagactgacatagatttggacccgaatgcagatctggcctacaatagtctgaagaggcaagagctggagtcagagaacaaaaagctgaagaatgacctgaatgagctgaggaaagccgtggccgaccaagccacgcagaataactccagccacggctccccagatagctacagcctcctgctgaaccagctcaagctggcccacgaggagctcgaggtgcgcaaggaggaggtgctcatcctcaggacccagatcgtgagcgccgaccagcggcgactcgccggcaggaacgcggagccgaacattaatgccagatcaagttggcctaacagtgaaaagcatgttgaccaggaggatgccattgaggcctatcacggggtctgccagacaaacagcaagactgaggattggggatatttaaatgaagatggagaactcggcttggcctaccaaggcctaaagcaagttgccaggctgctggaggctcagctgcaggcccagagcctggagcatgaggaggaggtggagcatctcaaggctcagctcgaggccctgaaggaggagatggacaaacagcagcagaccttctgccagacgctactgctctccccagaggcccaggtggaattcggcgttcagcaggaaatatcccggctgaccaacgagaatctggaccttaaagaactggtagaaaagctggaaaagaatgagaggaagctcaaaaagcaactgaagatttacatgaagaaagcccaggacctagaagctgcccaggcattggcccagagtgagaggaagcgccatgagctcaacaggcaggtcacggtccagcggaaagagaaggatttccagggcatgctggagtaccacaaagaggacgaggccctcctcatccggaacctggtgacagacttgaagccccagatgctgtcgggcacagtgccctgtctccccgcctacatcctctacatgtgcatccggcacgcggactacaccaacgacgatctcaaggtgcactccctgctgacctccaccatcaacggcattaagaaagtcctgaaaaagcacaatgatgactttgagatgacgtcattctggttatccaacacctgccgccttcttcactgtctgaagcagtacagcggggatgagggcttcatgactcagaacactgcaaagcagaatgaacactgtcttaagaattttgacctcaccgaataccgtcaggtgctgagtgacctttccattcagatctaccagcagctcattaaaattgccgagggcgtgttacagccgatgatagtttctgccatgttggaaaatgagagcattcagggtctatctggtgtgaagcccaccggctaccggaagcgctcctccagcatggcagatggggataactcatactgcctggaagctatcatccgccagatgaatgcctttcatacagtcatgtgtgaccagggcttggaccctgagatcatcctgcaggtattcaaacagctcttctacatgatcaacgcagtgactcttaacaacctgctcttgcggaaggacgtctgctcttggagcacaggcatgcaactcaggtacaatataagtcagcttgaggagtggcttcggggaagaaaccttcaccagagtggagcagttcagaccatggaacctctgatccaagcagcccagctcctgcaattaaagaagaaaacccaggaggacgcagaggctatctgctccctgtgtacctccctcagcacccagcagattgtcaaaattttaaacctttatactcccctgaatgaatttgaagaacgggtaacagtggcctttatacgaacaatccaggcacaactacaagagcggaatgaccctcagcaactgctattagatgccaagcacatgtttcctgttttgtttccatttaatccatcttctctaaccatggactcaatccacatcccagcgtgtctcaatctggaattcctcaatgaagtctgaagatgcatgtttccagcattagtttgattcccaatgtgagcaagaaggaagtatatacagtaaagtaaattcaaggatctgttaaatctggtaaaagtagatcaaatcagagattgacagcctgtggagggtgctgaactatacagaattagacacaactatgtcattattttttgtacctactgctcagaataaaaacacttgaaatatggaagattttaagtttgatttcagtccaacacatatacataatttatagacaccaagcagtccccatagacatataaaaggtgtcaattctataaaacgaagctgcctagttttgatctttgcatagaactagagaatgtccaaattaaaataccaaatatatataagtcacataaattgccttcaaagggctttaacaaataatggtactaataaccatgataatggcatatactgacatttcccaaagtttgcaaaccataggtgtggttgagtttgtggtgagatgttttaagaacaaaaatatggggatgagacttctgagaaatattcccaaaatattttttaatggctgattatacacagacagtggtgtaactgacctccagaccagacattttgagtactggtttctgaagcaaaattagaagtgccagtcctcagtgtgctcaaacgcttttgtgttatcttgatttaatggaagagattattaaaatgctgctatcccaaactccaagtgagaaagatggaaaaatattttgtttctgatgctagtccatacactttccaagtcccacaaaactttcacaaaaatgtatataagctaaatattagaaacggataacaaacttgttttatttatagatgtaaaaaccaaacaagtcaatatgaaagcttttaatctcttaataccattaagcttccagtaagagcatcacataatgctctactgttccagaaaccaaatagtaaaacaaactaaagttcgcacatcagatcatctgaaaaaccttcaaaaataatcagttcagggatattatacaaaagtttgggttttttttttttaagagaataaaatggcttaggtcaactttcccttttcaggttattttcaacgtttttcaaatttagcacacaaaaaattgtaaatatctctcccacaaaataaggattttaaaaaagtaattcagtaatataacaggcttagatgtttgctgctcttagaattttttttaacttgtttttggtttcttcaaaagcaagcattcaattggaaacccatattctttccacacttttttttactgtcttttctgtatttcttgatagcagtatgctgttcccataagaaaaaaatggtatttgcaaatcatggaagaacagcctctgtattacattgagaaaataagatttatccatgaattggaagtagaacagcctgccttcaccctcttttactcaaccacccaacttaaaaggctcttggaaacacagcacactccacgctaccttctgcactgtgcccttagagcacagcttcctcagttgttctctgcatctcctggggcttaggccagtcttagcctgggttaaggctgctgacattgtgttccaatcagttgtcatgggcattatcccctctacatccacattaaacatgccggcttctcttgggcatcggcagagctgtgcctttttctttcagttacagttacataatcactgacgtccatgacacttacccatggatccatgtgctgacttcatttagaaggccaatctaaaacaactgggtttgtggctacctctttaaagttgtttgtgaaggataatttgttttttaatgcactttagtttgaaagtgagtctcttatgtaaggaccatccttaaaagaccaaaaatgccttgttagagtgttaaggagttttgacatgcagtggttccacaaacacagtggcttactatccttatacactgtcttataccatcattctctccatctctcttggtcactactctctgctgtcactggttaatcactaggtgccaagagcttactgaataaaagcttggcaattagaataaatggggagggaaggaccttatgaatagtccatttagcctaagaaatggcagatttagttcttctcttccaaaagataaaggtatatcctggaattgtacttaaaacttacagatgactaacaaatatatactttatatgtagttaatatttagatctgtcttatttaatacttggaggctagaagaagcatctttaggggaactatataatcttttgttagcattttctctgcattttaaaaaatcatttcaattcaaacatttatcagtgtcatgaaatcagtaatgactctttaacaattcaggtttgaactctgcattagatgtctctttaattttttaatatttaaaat

SEQ ID NO: 1182 - protein, 1848 aa, Homo sapiens
MSVGELYSQCTRVWIPDPDEVWRSAELTKDYKEGDKSLQLRLEDETILEYPIDVQRNQLPFLRNPDILVGENDLTALSYLHEPAVLHNLKVRFLESNHIYTYCGIVLVAINPYEQLPIYGQDVIYTYSGQNMGDMDPHIFAVAEEAYKQMARDEKNQSIIVSGESGAGKTVSAKYAMRYFATVGGSASETNIEEKVLASSPIMEAIGNAKTTRNDNSSRFGKYIQIGFDKRYHIIGANMRTYLLEKSRVVFQADDERNYHIFYQLCAAAGLPEFKELALTSAEDFFYTSQGGDTSIEGVDDAEDFEKTRQAFTLLGVKESHQMSIFKIIASILHLGSVAIQAERDGDSCSISPQDVYLSNFCRLLGVEHSQMEHWLCHRKLVTTSETYVKTMSLQQVINARNALAKHIYAQLFGWIVEHINKALHTSLKQHSFIGVLDIYGFETFEVNSFEQFCINYANEKLQQQFNSHVFKLEQEEYMKEQIPWTLIDFYDNQPCIDLIEAKLGILDLLDEECKVPKGTDQNWAQKLYDRHSSSQHFQKPRMSNTAFIIVHFADKVEYLSDGFLEKNRDTVYEEQINILKASKFPLVADLFHDDKDPVPATTPGKGSSSKISVRSARPPMKVSNKEHKKTVGHQFRTSLHLLMETLNATTPHYVRCIKPNDEKLPFHFDPKRAVQQLRACGVLETIRISAAGYPSRWAYHDFFNRYRVLVKKRELANTDKKAICRSVLENLIKDPDKFQFGRTKIFFRAGQVAYLEKLRADKFRTATIMIQKTVRGWLQKVKYHRLKGATLTLQRYCRGHLARRLAEHLRRIRAAVVLQKHYRMQRARQAYQRVRRAAVVIQAFTRAMFVRRTYRQVLMEHKATTIQKHVRGWMARRHFQRLRDAAIVIQCAFRMLKARRELKALRIEARSAEHLKRLNVGMENKVVQLQRKIDEQNKEFKTLSEQLSVTTSTYTMEVERLKKELVHYQQSPGEDTSLRLQEEVESLRTELQRAHSERKILEDAHSREKDELRKRVADLEQENALLKDEKEQLNNQILCQSKDEFAQNSVKENLMKKELEEERSRYQNLVKEYSQLEQRYDNLRDEMTIIKQTPGHRRNPSNQSSLESDSNYPSISTSEIGDTEDALQQVEEIGLEKAAMDMTVFLKLQKRVRELEQERKKLQVQLEKREQQDSKKVQAEPPQTDIDLDPNADLAYNSLKRQELESENKKLKNDLNELRKAVADQATQNNSSHGSPDSYSLLLNQLKLAHEELEVRKEEVLILRTQIVSADQRRLAGRNAEPNINARSSWPNSEKHVDQEDAIEAYHGVCQTNSKTEDWGYLNEDGELGLAYQGLKQVARLLEAQLQAQSLEHEEEVEHLKAQLEALKEEMDKQQQTFCQTLLLSPEAQVEFGVQQEISRLTNENLDLKELVEKLEKNERKLKKQLKIYMKKAQDLEAAQALAQSERKRHELNRQVTVQRKEKDFQGMLEYHKEDEALLIRNLVTDLKPQMLSGTVPCLPAYILYMCIRHADYTNDDLKVHSLLTSTINGIKKVLKKHNDDFEMTSFWLSNTCRLLHCLKQYSGDEGFMTQNTAKQNEHCLKNFDLTEYRQVLSDLSIQIYQQLIKIAEGVLQPMIVSAMLENESIQGLSGVKPTGYRKRSSSMADGDNSYCLEAIIRQMNAFHTVMCDQGLDPEIILQVFKQLFYMINAVTLNNLLLRKDVCSWSTGMQLRYNISQLEEWLRGRNLHQSGAVQTMEPLIQAAQLLQLKKKTQEDAEAICSLCTSLSTQQIVKILNLYTPLNEFEERVTVAFIRTIQAQLQERNDPQQLLLDAKHMFPVLFPFNPSSLTMDSIHIPACLNLEFLNEV

SEQ ID NO: 1183 - DNA, 4082 bp, Homo sapiens
acattctgctgctgctgcagagtgatgatttttaacagaccagaacttacacatctaaatgagtgttgttgttcagtgaagtcaccttaggacaatgatttaaataacaccgcgatttctcaagaagtttggaacttctcttatggttgagttcaaagccattttatgttatatgtggcccaaacaagttttattagtacaattaaatctttattgaggacttttgatggaccacatagtgaacttggactgggaatcaaaagaatggtaaggcagggtgtctgccttcactgtgcctgcagtctggctgagatgcacatgtgagccacactagcacaagccagcatgcactggcctgtcacaagagagtgcacaagggtctggatccctgaccctgatgaggtatggcgctcagctgagttaaccaaggactacaaagaaggagacaagagcctacagctcagactggaggatgaaacgattctggaatacccaattgatgtacaacgcaaccagctgcccttcttacggaatccagatatcttggtgggagaaaatgacctgactgcccttagctatcttcatgagcctgcagttttgcataatttgaaggtccgtttcctggagtccaaccatatctacacttactgtggtatcgtacttgttgccattaatccttatgaacagttgccaatctatggacaagatgtcatctatacctacagtggccaaaacatgggagacatggacccccacatctttgctgtggcagaagaagcctacaagcagatggccagagatgagaagaatcagtccatcatagtcagtggggagtctggagccgggaagacggtatcagccaagtatgccatgcgctatttcgccaccgttggtggctcggccagtgaaaccaacatcgaagagaaggtgctggcatccagtcccatcatggaggccattggaaatgccaagaccacccgcaatgacaacagcagccgttttggcaagtacatccagattggctttgacaaaaggtaccacatcatcggggccaacatgaggacttacctcttggagaagtccagagtggtcttccaggcagatgatgagaggaattaccacatcttttaccagctctgtgctgctgccggtcttccagaatttaaagagcttgcactaacaagtgcagaggactttttctatacatcacagggaggagacacttccatcgagggtgtggacgatgctgaggactttgagaagactcgacaagccttcacactcctcggagtgaaagagtcccatcagatgagcatttttaagataattgcttctatcttgcaccttggaagtgtggcgattcaggctgagcgtgatggtgattcctgtagtatatcaccccaggatgtatacctaagcaacttctgccgactgctaggggtggagcacagtcagatggagcactggctgtgtcatcgcaagctggtcaccacctcggagacctacgtcaagaccatgtccctgcagcaggtgatcaatgcgcgcaacgccctggcgaagcacatctatgcccagttgttcggctggattgtggagcacatcaacaaggccctgcacacctccctcaagcagcactccttcatcggggtcctggacatctatgggtttgagacatttgaggtaaacagctttgagcagttctgtatcaactatgcaaatgaaaagctccagcagcagttcaactcgcatgttttcaaactggagcaagaagaatacatgaaggaacagatcccttggaccctgattgatttttatgataaccaaccttgtatcgacctcattgaagccaagctgggtatcttggacctgttggatgaagaatgtaaggtccccaaaggaactgaccagaactgggctcagaagctctatgaccggcactccagcagccagcacttccagaagccccgcatgtccaacacggccttcatcatcgtccactttgcagacaaggtggagtacctctctgatggttttctggagaaaaacagagacacggtgtatgaagagcagatcaatatcctgaaggccagcaagttcccactagtggctgacttgtttcatgatgacaaggaccctgttcctgccaccacccctgggaaggggtcatcttcgaagatcagcgtccgttctgccagaccccccatgaaagtctccaacaaggagcacaagaaaaccgttggccaccaggtctgtacctccctcagcacccagcagattgtcaaaattttaaacctttatactcccctgaatgaatttgaagaacgggtaacagtggcctttatacgaacaatccaggcacaactacaagagcggaatgaccctcagcaactgctattagatgccaagcacatgtttcctgttttgtttccatttaatccatcttctctaaccatggactcaatccacatcccagcgtgtctcaatctggaattcctcaatgaagtctgaagatgcatgtttccagcattagtttgattcccaatgtgagcaagaaggaagtatatacagtaaagtaaattcaaggatctgttaaatctggtaaaagtagatcaaatcagagattgacagcctgtggagggtgctgaactatacagaattagacacaactatgtcattattttttgtacctactgctcagaataaaaacacttgaaatatggaagattttaagtttgatttcagtccaacacatatacataatttatagacaccaagcagtccccatagacatataaaaggtgtcaattctataaaacgaagctgcctagttttgatctttgcatagaactagagaatgtccaaattaaaataccaaatatatataagtcacataaattgccttcaaagggctttaacaaataatggtactaataaccatgataatggcatatactgacatttcccaaagtttgcaaaccataggtgtggttgagtttgtggtgagatgttttaagaacaaaaatatggggatgagacttctgagaaatattcccaaaatattttttaatggctgattatacacagacagtggtgtaactgacctccagaccagacattttgagtactggtttctgaagcaaaattagaagtgccagtcctcagtgtgctcaaacgcttttgtgttatcttgatttaatggaagagattattaaaatgctgctatcccaaactccaagtgagaaagatggaaaaatattttgtttctgatgctagtccatacactttccaagtcccacaaaactttcacaaaaatgtatataagctaaatattagaaacggataacaaacttgttttatttatagatgtaaaaaccaaacaagtcaatatgaaagcttttaatctcttaataccattaagcttccagtaagagcatcacataatgctctactgttccagaaaccaaatagtaaaacaaactaaagttcgcacatcagatcatctgaaaaaccttcaaaaataatcagttcagggatattatacaaaagtttgggttttttttttttaagagaataaaatggcttaggtcaactttcccttttcaggttattttcaacgtttttcaaatttagcacacaaaaaattgtaaatatctctcccacaaaataaggattttaaaaaagtaattcagtaatataacaggcttagatgtttgctgctcttagaattttttttaacttgtttttggtttcttcaaaagcaagcattcaattggaaacccatattctttccacacttttttttactgtcttttctgtatttcttgatagcagtatgctgttcccataagaaaaaaatggtatttgcaaatcatggaagaacagcctctgtattacattgagaaaataagatttatccatgaattggaagtagaacagcctgccttcaccctcttttactcaaccacccaacttaaaaggctcttggaaacacagcacactccacgctaccttctgcactgtgcccttagagcacagcttcctcagttgttctctgcatctcctggggcttaggccagtcttag

SEQ ID NO: 1184 - protein, 720 aa, Homo sapiens
MHWPVTRECTRVWIPDPDEVWRSAELTKDYKEGDKSLQLRLEDETILEYPIDVQRNQLPFLRNPDILVGENDLTALSYLHEPAVLHNLKVRFLESNHIYTYCGIVLVAINPYEQLPIYGQDVIYTYSGQNMGDMDPHIFAVAEEAYKQMARDEKNQSIIVSGESGAGKTVSAKYAMRYFATVGGSASETNIEEKVLASSPIMEAIGNAKTTRNDNSSRFGKYIQIGFDKRYHIIGANMRTYLLEKSRVVFQADDERNYHIFYQLCAAAGLPEFKELALTSAEDFFYTSQGGDTSIEGVDDAEDFEKTRQAFTLLGVKESHQMSIFKIIASILHLGSVAIQAERDGDSCSISPQDVYLSNFCRLLGVEHSQMEHWLCHRKLVTTSETYVKTMSLQQVINARNALAKHIYAQLFGWIVEHINKALHTSLKQHSFIGVLDIYGFETFEVNSFEQFCINYANEKLQQQFNSHVFKLEQEEYMKEQIPWTLIDFYDNQPCIDLIEAKLGILDLLDEECKVPKGTDQNWAQKLYDRHSSSQHFQKPRMSNTAFIIVHFADKVEYLSDGFLEKNRDTVYEEQINILKASKFPLVADLFHDDKDPVPATTPGKGSSSKISVRSARPPMKVSNKEHKKTVGHQVCTSLSTQQIVKILNLYTPLNEFEERVTVAFIRTIQAQLQERNDPQQLLLDAKHMFPVLFPFNPSSLTMDSIHIPACLNLEFLNEV

SEQ ID NO: 1185 - DNA, 3955 bp, Homo sapiens
ccgtagctgcgccgccgcggcgggagtaaaggtcgcgccgccgggagcgagccggccgcggcgcctgcgggaagccggcggggcaggtcggagaagagcgagaagatcgagaaactccaggccagcccgggaacatggcgccaggcgggccagccgcggactgagagccgcggggcagccaggagccggggcccgagccccgcccggcccgggccatgtcggtgggcgagctctacagccagtgcacaagggtctggatccctgaccctgatgaggtatggcgctcagctgagttaaccaaggactacaaagaaggagacaagagcctacagctcagactggaggatgaaacgattctggaatacccaattgatgtacaacgcaaccagctgcccttcttacggaatccagatatcttggtgggagaaaatgacctgactgcccttagctatcttcatgagcctgcagttttgcataatttgaaggtccgtttcctggagtccaaccatatctacacttactgtggtatcgtacttgttgccattaatccttatgaacagttgccaatctatggacaagatgtcatctatacctacagtggccaaaacatgggagacatggacccccacatctttgctgtggcagaagaagcctacaagcagatggccagagatgagaagaatcagtccatcatagtcagtggggagtctggagccgggaagacggtatcagccaagtatgccatgcgctatttcgccaccgttggtggctcggccagtgaaaccaacatcgaagagaaggtgctggcatccagtcccatcatggaggccattggaaatgccaagaccacccgcaatgacaacagcagccgttttggcaagtacatccagattggctttgacaaaaggtaccacatcatcggggccaacatgaggacttacctcttggagaagtccagagtggtcttccaggcagatgatgagaggaattaccacatcttttaccagctctgtgctgctgccggtcttccagaatttaaagagcttgcactaacaagtgcagaggactttttctatacatcacagggaggagacacttccatcgagggtgtggacgatgctgaggactttgagaagactcgacaagccttcacactcctcggagtgaaagagtcccatcagatgagcatttttaagataattgcttctatcttgcaccttggaagtgtggcgattcaggctgagcgtgatggtgattcctgtagtatatcaccccaggatgtatacctaagcaacttctgccgactgctaggggtggagcacagtcagatggagcactggctgtgtcatcgcaagctggtcaccacctcggagacctacgtcaagaccatgtccctgcagcaggtgatcaatgcgcgcaacgccctggcgaagcacatctatgcccagttgttcggctggattgtggagcacatcaacaaggccctgcacacctccctcaagcagcactccttcatcggggtcctggacatctatgggtttgagacatttgaggtaaacagctttgagcagttctgtatcaactatgcaaatgaaaagctccagcagcagttcaactcgcatgttttcaaactggagcaagaagaatacatgaaggaacagatcccttggaccctgattgatttttatgataaccaaccttgtatcgacctcattgaagccaagctgggtatcttggacctgttggatgaagaatgtaaggtccccaaaggaactgaccagaactgggctcagaagctctatgaccggcactccagcagccagcacttccagaagccccgcatgtccaacacggccttcatcatcgtccactttgcagacaaggtggagtacctctctgatggttttctggagaaaaacagagacacggtgtatgaagagcagatcaatatcctgaaggccagcaagttcccactagtggctgacttgtttcatgatgacaaggaccctgttcctgccaccacccctgggaaggggtcatcttcgaagatcagcgtccgttctgccagaccccccatgaaagtctccaacaaggagcacaagaaaaccgttggccaccagttccagactagcttggccacccaacagattgtcaaaattttaaacctttatactcccctgaatgaatttgaagaacgggtaacagtggcctttatacgaacaatccaggcacaactacaagagcggaatgaccctcagcaactgctattagatgccaagcacatgtttcctgttttgtttccatttaatccatcttctctaaccatggactcaatccacatcccagcgtgtctcaatctggaattcctcaatgaagtctgaagatgcatgtttccagcattagtttgattcccaatgtgagcaagaaggaagtatatacagtaaagtaaattcaaggatctgttaaatctggtaaaagtagatcaaatcagagattgacagcctgtggagggtgctgaactatacagaattagacacaactatgtcattattttttgtacctactgctcagaataaaaacacttgaaatatggaagattttaagtttgatttcagtccaacacatatacataatttatagacaccaagcagtccccatagacatataaaaggtgtcaattctataaaacgaagctgcctagttttgatctttgcatagaactagagaatgtccaaattaaaataccaaatatatataagtcacataaattgccttcaaagggctttaacaaataatggtactaataaccatgataatggcatatactgacatttcccaaagtttgcaaaccataggtgtggttgagtttgtggtgagatgttttaagaacaaaaatatggggatgagacttctgagaaatattcccaaaatattttttaatggctgattatacacagacagtggtgtaactgacctccagaccagacattttgagtactggtttctgaagcaaaattagaagtgccagtcctcagtgtgctcaaacgcttttgtgttatcttgatttaatggaagagattattaaaatgctgctatcccaaactccaagtgagaaagatggaaaaatattttgtttctgatgctagtccatacactttccaagtcccacaaaactttcacaaaaatgtatataagctaaatattagaaacggataacaaacttgttttatttatagatgtaaaaaccaaacaagtcaatatgaaagcttttaatctcttaataccattaagcttccagtaagagcatcacataatgctctactgttccagaaaccaaatagtaaaacaaactaaagttcgcacatcagatcatctgaaaaaccttcaaaaataatcagttcagggatattatacaaaagtttgggttttttttttttaagagaataaaatggcttaggtcaactttcccttttcaggttattttcaacgtttttcaaatttagcacacaaaaaattgtaaatatctctcccacaaaataaggattttaaaaaagtaattcagtaatataacaggcttagatgtttgctgctcttagaattttttttaacttgtttttggtttcttcaaaagcaagcattcaattggaaacccatattctttccacacttttttttactgtcttttctgtatttcttgatagcagtatgctgttcccataagaaaaaaatggtatttgcaaatcatggaagaacagcctctgtattacattgagaaaataagatttatccatgaattggaagtagaacagcctgccttcaccctcttttactcaaccacccaacttaaaaggctcttggaaacacagcacactccacgctaccttctgcactgtgcccttagagcacagcttcctcagttgttctctgcatctcctggggcttaggccagtcttag

SEQ ID NO: 1186 - protein, 721 aa, Homo sapiens
MSVGELYSQCTRVWIPDPDEVWRSAELTKDYKEGDKSLQLRLEDETILEYPIDVQRNQLPFLRNPDILVGENDLTALSYLHEPAVLHNLKVRFLESNHIYTYCGIVLVAINPYEQLPIYGQDVIYTYSGQNMGDMDPHIFAVAEEAYKQMARDEKNQSIIVSGESGAGKTVSAKYAMRYFATVGGSASETNIEEKVLASSPIMEAIGNAKTTRNDNSSRFGKYIQIGFDKRYHIIGANMRTYLLEKSRVVFQADDERNYHIFYQLCAAAGLPEFKELALTSAEDFFYTSQGGDTSIEGVDDAEDFEKTRQAFTLLGVKESHQMSIFKIIASILHLGSVAIQAERDGDSCSISPQDVYLSNFCRLLGVEHSQMEHWLCHRKLVTTSETYVKTMSLQQVINARNALAKHIYAQLFGWIVEHINKALHTSLKQHSFIGVLDIYGFETFEVNSFEQFCINYANEKLQQQFNSHVFKLEQEEYMKEQIPWTLIDFYDNQPCIDLIEAKLGILDLLDEECKVPKGTDQNWAQKLYDRHSSSQHFQKPRMSNTAFIIVHFADKVEYLSDGFLEKNRDTVYEEQINILKASKFPLVADLFHDDKDPVPATTPGKGSSSKISVRSARPPMKVSNKEHKKTVGHQFQTSLATQQIVKILNLYTPLNEFEERVTVAFIRTIQAQLQERNDPQQLLLDAKHMFPVLFPFNPSSLTMDSIHIPACLNLEFLNEV

SEQ ID NO: 1187 - DNA, 3080 bp, Homo sapiens
gttccagagcaggtggcaacagcctgtgaagagcagctctcctggcagcgtccctgactggcgcatttctgacggctgcccatgggccgcactggtcacctccaactgcaagcaggattttacccccaccatcccaggccgggctgatgtctgttctcacactgcttcctctgcttccaggaccttaaagaactggtagaaaagctggaaaagaatgagaggaagctcaaaaagcaactgaagatttacatgaagaaagcccaggacctagaagctgcccaggcattggcccagagtgagaggaagcgccatgagctcaacaggcaggtcacggtccagcggaaagagaaggatttccagggcatgctggagtaccacaaagaggacgaggccctcctcatccggaacctggtgacagacttgaagccccagatgctgtcgggcacagtgccctgtctccccgcctacatcctctacatgtgcatccggcacgcggactacaccaacgacgatctcaaggtgcactccctgctgacctccaccatcaacggcattaagaaagtcctgaaaaagcacaatgatgactttgagatgacgtcattctggttatccaacacctgccgccttcttcactgtctgaagcagtacagcggggatgagggcttcatgactcagaacactgcaaagcagaatgaacactgtcttaagaattttgacctcaccgaataccgtcaggtgctgagtgacctttccattcagatctaccagcagctcattaaaattgccgagggcgtgttacagccgatgatagtttctgccatgttggaaaatgagagcattcagggtctatctggtgtgaagcccaccggctaccggaagcgctcctccagcatggcagatggggataactcatactgcctggaagctatcatccgccagatgaatgcctttcatacagtcatgtgtgaccagggcttggaccctgagatcatcctgcaggtattcaaacagctcttctacatgatcaacgcagtgactcttaacaacctgctcttgcggaaggacgtctgctcttggagcacaggcatgcaactcaggtacaatataagtcagcttgaggagtggcttcggggaagaaaccttcaccagagtggagcagttcagaccatggaacctctgatccaagcagcccagctcctgcaattaaagaagaaaacccaggaggacgcagaggctatctgctccctgtgtacctccctcagcacccagcagattgtcaaaattttaaacctttatactcccctgaatgaatttgaagaacgggtaacagtggcctttatacgaacaatccaggcacaactacaagagcggaatgaccctcagcaactgctattagatgccaagcacatgtttcctgttttgtttccatttaatccatcttctctaaccatggactcaatccacatcccagcgtgtctcaatctggaattcctcaatgaagtctgaagatgcatgtttccagcattagtttgattcccaatgtgagcaagaaggaagtatatacagtaaagtaaattcaaggatctgttaaatctggtaaaagtagatcaaatcagagattgacagcctgtggagggtgctgaactatacagaattagacacaactatgtcattattttttgtacctactgctcagaataaaaacacttgaaatatggaagattttaagtttgatttcagtccaacacatatacataatttatagacaccaagcagtccccatagacatataaaaggtgtcaattctataaaacgaagctgcctagttttgatctttgcatagaactagagaatgtccaaattaaaataccaaatatatataagtcacataaattgccttcaaagggctttaacaaataatggtactaataaccatgataatggcatatactgacatttcccaaagtttgcaaaccataggtgtggttgagtttgtggtgagatgttttaagaacaaaaatatggggatgagacttctgagaaatattcccaaaatattttttaatggctgattatacacagacagtggtgtaactgacctccagaccagacattttgagtactggtttctgaagcaaaattagaagtgccagtcctcagtgtgctcaaacgcttttgtgttatcttgatttaatggaagagattattaaaatgctgctatcccaaactccaagtgagaaagatggaaaaatattttgtttctgatgctagtccatacactttccaagtcccacaaaactttcacaaaaatgtatataagctaaatattagaaacggataacaaacttgttttatttatagatgtaaaaaccaaacaagtcaatatgaaagcttttaatctcttaataccattaagcttccagtaagagcatcacataatgctctactgttccagaaaccaaatagtaaaacaaactaaagttcgcacatcagatcatctgaaaaaccttcaaaaataatcagttcagggatattatacaaaagtttgggttttttttttttaagagaataaaatggcttaggtcaactttcccttttcaggttattttcaacgtttttcaaatttagcacacaaaaaattgtaaatatctctcccacaaaataaggattttaaaaaagtaattcagtaatataacaggcttagatgtttgctgctcttagaattttttttaacttgtttttggtttcttcaaaagcaagcattcaattggaaacccatattctttccacacttttttttactgtcttttctgtatttcttgatagcagtatgctgttcccataagaaaaaaatggtatttgcaaatcatggaagaacagcctctgtattacattgagaaaataagatttatccatgaattggaagtagaacagcctgccttcaccctcttttactcaaccacccaacttaaaaggctcttggaaacacagcacactccacgctaccttctgcactgtgcccttagagcacagcttcctcagttgttctctgcatctcctggggcttaggccagtcttag

SEQ ID NO: 1188 - protein, 418 aa, Homo sapiens
MKKAQDLEAAQALAQSERKRHELNRQVTVQRKEKDFQGMLEYHKEDEALLIRNLVTDLKPQMLSGTVPCLPAYILYMCIRHADYTNDDLKVHSLLTSTINGIKKVLKKHNDDFEMTSFWLSNTCRLLHCLKQYSGDEGFMTQNTAKQNEHCLKNFDLTEYRQVLSDLSIQIYQQLIKIAEGVLQPMIVSAMLENESIQGLSGVKPTGYRKRSSSMADGDNSYCLEAIIRQMNAFHTVMCDQGLDPEIILQVFKQLFYMINAVTLNNLLLRKDVCSWSTGMQLRYNISQLEEWLRGRNLHQSGAVQTMEPLIQAAQLLQLKKKTQEDAEAICSLCTSLSTQQIVKILNLYTPLNEFEERVTVAFIRTIQAQLQERNDPQQLLLDAKHMFPVLFPFNPSSLTMDSIHIPACLNLEFLNEV

SEQ ID NO: 1189 - DNA, 1837 bp, Homo sapiens
agacttctgcgtcgcggaagcgggtcccgcaggtcgccacggttgggggaaacgcggcggacgccgcccccgtcccgaaggggactcgaaaatgtacagccagcggtttggcaccgtacagcgggaggttaagggccccacccccaaagtggtgatcgtgagatccaagcctcctaaaggccaaggagctgagcaccatctagaaagaatccgacgcagccatcagaagcataatgctattttggcttccattaagtcaagtgagcgggatcgcttgaaagctgagtgggaccagcacaatgactgcaagattttggacagccttgtgcgagcaagaatcaaggatgctgtgcaagggtttatcattaacattgaagaaagacgaaataagctacgtgagcttttagcattagaagaaaatgagtattttacagaaatgcaattgaagaaagaaaccattgaggagaaaaaagataggatgagagagaaaactaaattactaaaagagaagaatgaaaaagagaggcaggattttgtggctgaaaagctagaccagcaattcagggaacgctgtgaggagctccgtgttgaattgttatctatccatcagaagaaggtgtgtgaggagcggaaagcacagattgcatttaatgaggagctgagcaggcaaaagctggtggaagagcagatgttctccaaactctgggaggaagaccgattagccaaggaaaagcgagaagcccaagaggcgaggagacagaaagagctgatggagaacacacgcctggggctgaatgcccagatcaccagcatcaaggcacaaaggcaggcgacacagctgctgaaggaagaggaggcacgccttgtggaaagtaacaacgcacagattaaacatgagaatgaacaggatatgctaaagaaacagaaggcaaagcaggaaactaggaccattttgcaaaaagccctacaagagaggatagaacatattcagcaggaatacagagacgaacaggacttgaacatgaagctcgtgcaaagggcccttcaagacttacaggaagaggcagataaaaagaaacaaaaaagagaagatatgataagagaacagaagatataccataaatatttggcacagagacgtgaggaagaaaaagctcaggagaaagaatttgacagaatattagaggaagacaaggcaaagaagttggctgagaaggacaaggagctgagacttgaaaaggaggcaaggagacagcttgtggatgaggtcatgtgtacaagaaaacttcaagttcaagaaaagttgcaacgagaagctaaagaacaggaagaacgtgctatggaacagaaacacataaatgaaagtcttaaagaacttaactgtgaagagaaggagaattttgcaagacgccaacgtttagcccaggagtacaggaagcaacttcagatgcaaatcgcctaccagcagcagtcccaagaagcagagaaggaagagaaacgccgagagtttgaagcaggtgtagcagcaaacaagatgtgtttggacaaggtccaggaggtcctgtccacccatcaagtgctgcctcaaaacattcatcccatgcgcaaggcatgccccagtaagcttccaccgtagttccgtgagcatcaatatatcttttcttggtcttttaatatttttaactacagtatgcttgtatgcttcttttaactcctggataaacttttcttttttccctgagtttgtgtaattaattgaacataattttcttcctttgaataaacctgtgcctattttggagttcacagacttacaaatccaaaaaaaaaaaaaaaa

SEQ ID NO: 1190 - protein, 514 aa, Homo sapiens
MYSQRFGTVQREVKGPTPKVVIVRSKPPKGQGAEHHLERIRRSHQKHNAILASIKSSERDRLKAEWDQHNDCKILDSLVRARIKDAVQGFIINIEERRNKLRELLALEENEYFTEMQLKKETIEEKKDRMREKTKLLKEKNEKERQDFVAEKLDQQFRERCEELRVELLSIHQKKVCEERKAQIAFNEELSRQKLVEEQMFSKLWEEDRLAKEKREAQEARRQKELMENTRLGLNAQITSIKAQRQATQLLKEEEARLVESNNAQIKHENEQDMLKKQKAKQETRTILQKALQERIEHIQQEYRDEQDLNMKLVQRALQDLQEEADKKKQKREDMIREQKIYHKYLAQRREEEKAQEKEFDRILEEDKAKKLAEKDKELRLEKEARRQLVDEVMCTRKLQVQEKLQREAKEQEERAMEQKHINESLKELNCEEKENFARRQRLAQEYRKQLQMQIAYQQQSQEAEKEEKRREFEAGVAANKMCLDKVQEVLSTHQVLPQNIHPMRKACPSKLPP

SEQ ID NO: 1191 - DNA, 2655 bp, Homo sapiens
gcggccgcggaggaggaggaaggggaggagggcgaggcgggaggtgcaggagggaccctcgccatgggtccacgggcctagagtggcggaagataccggcctggtgccaaactggctactgctgcttcctgtggcctccatggctgaggactggctggactgcccggccctgggccctggctggaagcgccgcgaagtctttcgcaagtcaggggccacctgtggacgctcagacacctattaccagagccccacaggagacaggatccgaagcaaagttgagctgactcgatacctgggccctgcgtgtgatctcaccctcttcgacttcaaacaaggcatcttgtgctatccagcccccaaggcccatcccgtggcggttgccagcaagaagcgaaagaagccttcaaggccagccaagactcggaaacgtcaggttggaccccagagtggtgaggtcaggaaggaggccccgagggatgagaccaaggctgacactgacacagccccagcttcattccctgctcctgggtgctgtgagaactgtggaatcagcttctcaggggatggcacccaaaggcagcggctcaaaacgttgtgcaaagactgtcgagcacagagaattgccttcaaccgggaacagagaatgtttaagcgtgtgggctgtggggagtgtgcagcctgccaggtaacagaagactgtggggcctgctccacctgcctcctgcagctgccccatgatgtggcatcggggctgttctgcaagtgtgaacggagacgctgcctccggattgtggaaaggagccgagggtgtggagtatgccggggctgtcagacccaagaggattgtggccattgccccatctgccttcgccctccccgccctggtctcaggcgccagtggaaatgtgtccagcgacgttgcctacggggtaaacatgcccgccgcaagggaggctgtgactccaagatggctgccaggcggcgccccggagcccagccactgcctccaccacccccatcacagtccccagagcccacagagccgcaccccagagccctggccccctcgccacctgccgagttcatctattactgtgtagacgaggacgagctaaagcggctgctgcccagtgtctggtcagagtctgaggatggggcaggatcgcccccaccttaccgtcgtcgaaagaggcccagctctgcccgacggcaccatcttggccctaccttgaagcccaccttggctacacgcacagcccaaccagaccatacccaggctccaacgaagcaggaagcaggtggtggctttgtgctgcccccgcctggcactgaccttgtgtttttacgggaaggcgcaagcagtcctgtgcaggtgccgggccctgttgcagcttccacagaagccctgttgcaggcagtagacccaggcctgccttctgtgaagcaagagccacctgacccagaggaggacaaggaggagaacaaggatgattctgcctccaaattggccccagaggaagaggcaggaggggctggcacacccgtgatcacggagattttcagcctgggtggaacccgcttccgagatacagcagtctggttgccaaggtccaaagaccttaaaaaacctggagctagaaagcagtagactggaggcttctacagactgtaggattcaagtctgcagggcaggcactcgggaagggaagatggatgtaaagtgtgggagaccgaggacacagtggagcccacgagcacgagctggaacccacgaggatggcctggaacccatgtcagtctctcaccacctccagcttcgatgatgtgggtgtcctgcagaagaagctggtgcccttcctcacagagttaaatatgcatctggcccaggaattagagaagctgaaaggatgatcctggggaaggtggagcagctgcaggcctggctgcaggcctgactactgcccacaccaacgaggtgatctagcagatacatggcaacgtgtgaactgcaacaacgcctggtgccccagcaccaaccttccaagtgtaaaaacaatgtgctgctgcttcacttccgccctccggttatcaagcaaaatgtctcttgtggcccatcttactggaagagagttccgggaaacatagcctcaccaaggtgacacattacaaagccaccctaccatgaatccgctcccaagggtctcactgctcacctgaggataactcaatataactatgttgctgaaaatgcaaagctgaagaccatggatttcatggtgattccagcaagtacagagattctatgaagcccacccagaaaaaacttgctggtcctggctatttttgtgtcatttattcaagtattgagaacctggcctgtggtaggcactgtacttaatactaggatacagaaatgcaaaagatacggcccatgcaattttattaaatgcatcaatatgtattacaaatggtgaatggatttccaactttatcatggaatttaatgctgaatatatagaattcagaaaattgttgggaggacagcccttttgtgaaccttgtttggggcacagtaggaattggaaataatttagtttctatctctaagctgttctattttaaaattatttttaaatttttattgtcccactt

SEQ ID NO: 1192 - protein, 503 aa, Homo sapiens
MAEDWLDCPALGPGWKRREVFRKSGATCGRSDTYYQSPTGDRIRSKVELTRYLGPACDLTLFDFKQGILCYPAPKAHPVAVASKKRKKPSRPAKTRKRQVGPQSGEVRKEAPRDETKADTDTAPASFPAPGCCENCGISFSGDGTQRQRLKTLCKDCRAQRIAFNREQRMFKRVGCGECAACQVTEDCGACSTCLLQLPHDVASGLFCKCERRRCLRIVERSRGCGVCRGCQTQEDCGHCPICLRPPRPGLRRQWKCVQRRCLRGKHARRKGGCDSKMAARRRPGAQPLPPPPPSQSPEPTEPHPRALAPSPPAEFIYYCVDEDELKRLLPSVWSESEDGAGSPPPYRRRKRPSSARRHHLGPTLKPTLATRTAQPDHTQAPTKQEAGGGFVLPPPGTDLVFLREGASSPVQVPGPVAASTEALLQAVDPGLPSVKQEPPDPEEDKEENKDDSASKLAPEEEAGGAGTPVITEIFSLGGTRFRDTAVWLPRSKDLKKPGARKQ

SEQ ID NO: 1193 - DNA, 2793 bp, Homo sapiens
gcggccgcggaggaggaggaaggggaggagggcgaggcgggaggtgcaggagggaccctcgccatgggtccacgggcctagagtggcggaagataccggcctggtgccaaactggctactgctgcttcctgtggcctccatggctgaggactggctggactgcccggccctgggccctggctggaagcgccgcgaagtctttcgcaagtcaggggccacctgtggacgctcagacacctattaccagagccccacaggagacaggatccgaagcaaagttgagctgactcgatacctgggccctgcgtgtgatctcaccctcttcgacttcaaacaaggcatcttgtgctatccagcccccaaggcccatcccgtggcggttgccagcaagaagcgaaagaagccttcaaggccagccaagactcggaaacgtcaggttggaccccagagtggtgaggtcaggaaggaggccccgagggatgagaccaaggctgacactgacacagccccagcttcattccctgctcctgggtgctgtgagaactgtggaatcagcttctcaggggatggcacccaaaggcagcggctcaaaacgttgtgcaaagactgtcgagcacagagaattgccttcaaccgggaacagagaatgtttaagcgtgtgggctgtggggagtgtgcagcctgccaggtaacagaagactgtggggcctgctccacctgcctcctgcagctgccccatgatgtggcatcggggctgttctgcaagtgtgaacggagacgctgcctccggattgtggaaaggagccgagggtgtggagtatgccggggctgtcagacccaagaggattgtggccattgccccatctgccttcgccctccccgccctggtctcaggcgccagtggaaatgtgtccagcgacgttgcctacggggtaaacatgcccgccgcaagggaggctgtgactccaagatggctgccaggcggcgccccggagcccagccactgcctccaccacccccatcacagtccccagagcccacagagccgcaccccagagccctggccccctcgccacctgccgagttcatctattactgtgtagacgaggacgagctacagcggctgctgcccagtgtctggtcagagtctgaggatggggcaggatcgcccccaccttaccgtcgtcgaaagaggcccagctctgcccgacggcaccatcttggccctaccttgaagcccaccttggctacacgcacagcccaaccagaccatacccaggctccaacgaagcaggaagcaggtggtggctttgtgctgcccccgcctggcactgaccttgtgtttttacgggaaggcgcaagcagtcctgtgcaggtgccgggccctgttgcagcttccacagaagccctgttgcaggaggcccagtgctctggcctgagttgggttgtggccttaccccaggtgaagcaagagaaggcggatacccaggacgagtggacaccaggcacagctgtcctgacttctcccgtattggtgcctggctgccctagcaaggcagtagacccaggcctgccttctgtgaagcaagagccacctgacccagaggaggacaaggaggagaacaaggatgattctgcctccaaattggccccagaggaagaggcaggaggggctggcacacccgtgatcacggagattttcagcctgggtggaacccgcttccgagatacagcagtctggttgccaaggtccaaagaccttaaaaaacctggagctagaaagcagtagactggaggcttctacagactgtaggattcaagtctgcagggcaggcactcgggaagggaagatggatgtaaagtgtgggagaccgaggacacagtggagcccacgagcacgagctggaacccacgaggatggcctggaacccatgtcagtctctcaccacctccagcttcgatgatgtgggtgtcctgcagaagaagctggtgcccttcctcacagagttaaatatgcatctggcccaggaattagagaagctgaaaggatgatcctggggaaggtggagcagctgcaggcctggctgcaggcctgactactgcccacaccaacgaggtgatctagcagatacatggcaacgtgtgaactgcaacaacgcctggtgccccagcaccaaccttccaagtgtaaaaacaatgtgctgctgcttcacttccgccctccggttatcaagcaaaatgtctcttgtggcccatcttactggaagagagttccgggaaacatagcctcaccaaggtgacacattacaaagccaccctaccatgaatccgctcccaagggtctcactgctcacctgaggataactcaatataactatgttgctgaaaatgcaaagctgaagaccatggatttcatggtgattccagcaagtacagagattctatgaagcccacccagaaaaaacttgctggtcctggctatttttgtgtcatttattcaagtattgagaacctggcctgtggtaggcactgtacttaatactaggatacagaaatgcaaaagatacggcccatgcaattttattaaatgcatcaatatgtattacaaatggtgaatggatttccaactttatcatggaatttaatgctgaatatatagaattcagaaaattgttgggaggacagcccttttgtgaaccttgtttggggcacagtaggaattggaaataatttagtttctatctctaagctgttctattttaaaattatttttaaatttttattgtcccactt

SEQ ID NO: 1194 - protein, 549 aa, Homo sapiens
MAEDWLDCPALGPGWKRREVFRKSGATCGRSDTYYQSPTGDRIRSKVELTRYLGPACDLTLFDFKQGILCYPAPKAHPVAVASKKRKKPSRPAKTRKRQVGPQSGEVRKEAPRDETKADTDTAPASFPAPGCCENCGISFSGDGTQRQRLKTLCKDCRAQRIAFNREQRMFKRVGCGECAACQVTEDCGACSTCLLQLPHDVASGLFCKCERRRCLRIVERSRGCGVCRGCQTQEDCGHCPICLRPPRPGLRRQWKCVQRRCLRGKHARRKGGCDSKMAARRRPGAQPLPPPPPSQSPEPTEPHPRALAPSPPAEFIYYCVDEDELQRLLPSVWSESEDGAGSPPPYRRRKRPSSARRHHLGPTLKPTLATRTAQPDHTQAPTKQEAGGGFVLPPPGTDLVFLREGASSPVQVPGPVAASTEALLQEAQCSGLSWVVALPQVKQEKADTQDEWTPGTAVLTSPVLVPGCPSKAVDPGLPSVKQEPPDPEEDKEENKDDSASKLAPEEEAGGAGTPVITEIFSLGGTRFRDTAVWLPRSKDLKKPGARKQ

SEQ ID NO: 1195 - DNA, 1900 bp, Homo sapiens
gcggccgcggaggaggaggaaggggaggagggcgaggcgggaggtgcaggagggaccctcgccatgggtccacgggcctagagtggcggaagataccggcctggtgccaaactggctactgctgcttcctgtggcctccatggctgaggactggctggactgcccggccctgggccctggctggaagcgccgcgaagtctttcgcaagtcaggggccacctgtggacgctcagacacctattaccagagccccacaggagacaggatccgaagcaaagttgagctgactcgatacctgggccctgcgtgtgatctcaccctcttcgacttcaaacaaggcatcttgtgctatccagcccccaaggcccatcccgtggcggttgccagcaagaagcgaaagaagccttcaaggccagccaagactcggaaacgtcaggttggaccccagagtggtgaggtcaggaaggaggccccgagggatgagaccaaggctgacactgacacagccccagcttcattccctgctcctgggtgctgtgagaactgtggaatcagcttctcaggggatggcacccaaaggcagcggctcaaaacgttgtgcaaagactgtcgagcacagagaattgccttcaaccgggaacagagaatgtttaagcgtgtgggctgtggggagtgtgcagcctgccaggtaacagaagactgtggggcctgctccacctgcctcctgcagctgccccatgatgtggcatcggggctgttctgcaagtgtgaacggagacgctgcctccggattgtggaaaggagccgagggtgtggagtatgccggggctgtcagacccaagaggattgtggccattgccccatctgccttcgccctccccgccctggtctcaggcgccagtggaaatgtgtccagcgacgttgcctacggggtaaacatgcccgccgcaagggaggctgtgactccaagatggctgccaggcggcgccccggagcccagccactgcctccaccacccccatcacagtccccagagcccacagagccgcagccctacacgaaccgccggcagaaccgcaagtgcggggcctgtgcagcctgcctacggcggatggactgtggccgctgcgacttctgctgcgacaagcccaaattcgggggcagcaaccagaagcgccagaagtgtcgttggcgccaatgcctgcagtttgccatgaagcggctgctgcccagtgtctggtcagagtctgaggatggggcaggatcgcccccaccttaccgtcgtcgaaagaggcccagctctgcccgacggcaccatcttggccctaccttgaagcccaccttggctacacgcacagcccaaccagaccatacccaggctccaacgaagcaggaagcaggtggtggctttgtgctgcccccgcctggcactgaccttgtgtttttacgggaaggcgcaagcagtcctgtgcaggtgccgggccctgttgcagcttccacagaagccctgttgcaggcagtagacccaggcctgccttctgtgaagcaagagccacctgacccagaggaggacaaggaggagaacaaggatgattctgcctccaaattggccccagaggaagaggcaggaggggctggcacacccgtgatcacggagattttcagcctgggtggaacccgcttccgagatacagcagtctggttgccaagtctgcagggcaggcactcgggaagggaagatggatgtaaagtgtgggagaccgaggacacagtggagcccacgagcacgagctggaacccacgaggatggcctggaacccatgtcagtctctcaccacctccagcttcgatgatgtgggtgtcctgcagaagaagctggtgcccttcctcacagagttaa

SEQ ID NO: 1196 - protein, 586 aa, Homo sapiens
MAEDWLDCPALGPGWKRREVFRKSGATCGRSDTYYQSPTGDRIRSKVELTRYLGPACDLTLFDFKQGILCYPAPKAHPVAVASKKRKKPSRPAKTRKRQVGPQSGEVRKEAPRDETKADTDTAPASFPAPGCCENCGISFSGDGTQRQRLKTLCKDCRAQRIAFNREQRMFKRVGCGECAACQVTEDCGACSTCLLQLPHDVASGLFCKCERRRCLRIVERSRGCGVCRGCQTQEDCGHCPICLRPPRPGLRRQWKCVQRRCLRGKHARRKGGCDSKMAARRRPGAQPLPPPPPSQSPEPTEPQPYTNRRQNRKCGACAACLRRMDCGRCDFCCDKPKFGGSNQKRQKCRWRQCLQFAMKRLLPSVWSESEDGAGSPPPYRRRKRPSSARRHHLGPTLKPTLATRTAQPDHTQAPTKQEAGGGFVLPPPGTDLVFLREGASSPVQVPGPVAASTEALLQAVDPGLPSVKQEPPDPEEDKEENKDDSASKLAPEEEAGGAGTPVITEIFSLGGTRFRDTAVWLPSLQGRHSGREDGCKVWETEDTVEPTSTSWNPRGWPGTHVSLSPPPASMMWVSCRRSWCPSSQS

SEQ ID NO: 1197 - DNA, 2961 bp, Homo sapiens
gcggccgcggaggaggaggaaggggaggagggcgaggcgggaggtgcaggagggaccctcgccatgggtccacgggcctagagtggcggaagataccggcctggtgccaaactggctactgctgcttcctgtggcctccatggctgaggactggctggactgcccggccctgggccctggctggaagcgccgcgaagtctttcgcaagtcaggggccacctgtggacgctcagacacctattaccagagccccacaggagacaggatccgaagcaaagttgagctgactcgatacctgggccctgcgtgtgatctcaccctcttcgacttcaaacaaggcatcttgtgctatccagcccccaaggcccatcccgtggcggttgccagcaagaagcgaaagaagccttcaaggccagccaagactcggaaacgtcaggttggaccccagagtggtgaggtcaggaaggaggccccgagggatgagaccaaggctgacactgacacagccccagcttcattccctgctcctgggtgctgtgagaactgtggaatcagcttctcaggggatggcacccaaaggcagcggctcaaaacgttgtgcaaagactgtcgagcacagagaattgccttcaaccgggaacagagaatgtttaagcgtgtgggctgtggggagtgtgcagcctgccaggtaacagaagactgtggggcctgctccacctgcctcctgcagctgccccatgatgtggcatcggggctgttctgcaagtgtgaacggagacgctgcctccggattgtggaaaggagccgagggtgtggagtatgccggggctgtcagacccaagaggattgtggccattgccccatctgccttcgccctccccgccctggtctcaggcgccagtggaaatgtgtccagcgacgttgcctacggggtaaacatgcccgccgcaagggaggctgtgactccaagatggctgccaggcggcgccccggagcccagccactgcctccaccacccccatcacagtccccagagcccacagagccgcaccccagagccctggccccctcgccacctgccgagttcatctattactgtgtagacgaggacgagctacagccctacacgaaccgccggcagaaccgcaagtgcggggcctgtgcagcctgcctacggcggatggactgtggccgctgcgacttctgctgcgacaagcccaaattcgggggcagcaaccagaagcgccagaagtgtcgttggcgccaatgcctgcagtttgccatgaagcggctgctgcccagtgtctggtcagagtctgaggatggggcaggatcgcccccaccttaccgtcgtcgaaagaggcccagctctgcccgacggcaccatcttggccctaccttgaagcccaccttggctacacgcacagcccaaccagaccatacccaggctccaacgaagcaggaagcaggtggtggctttgtgctgcccccgcctggcactgaccttgtgtttttacgggaaggcgcaagcagtcctgtgcaggtgccgggccctgttgcagcttccacagaagccctgttgcaggaggcccagtgctctggcctgagttgggttgtggccttaccccaggtgaagcaagagaaggcggatacccaggacgagtggacaccaggcacagctgtcctgacttctcccgtattggtgcctggctgccctagcaaggcagtagacccaggcctgccttctgtgaagcaagagccacctgacccagaggaggacaaggaggagaacaaggatgattctgcctccaaattggccccagaggaagaggcaggaggggctggcacacccgtgatcacggagattttcagcctgggtggaacccgcttccgagatacagcagtctggttgccaaggtccaaagaccttaaaaaacctggagctagaaagcagtagactggaggcttctacagactgtaggattcaagtctgcagggcaggcactcgggaagggaagatggatgtaaagtgtgggagaccgaggacacagtggagcccacgagcacgagctggaacccacgaggatggcctggaacccatgtcagtctctcaccacctccagcttcgatgatgtgggtgtcctgcagaagaagctggtgcccttcctcacagagttaaatatgcatctggcccaggaattagagaagctgaaaggatgatcctggggaaggtggagcagctgcaggcctggctgcaggcctgactactgcccacaccaacgaggtgatctagcagatacatggcaacgtgtgaactgcaacaacgcctggtgccccagcaccaaccttccaagtgtaaaaacaatgtgctgctgcttcacttccgccctccggttatcaagcaaaatgtctcttgtggcccatcttactggaagagagttccgggaaacatagcctcaccaaggtgacacattacaaagccaccctaccatgaatccgctcccaagggtctcactgctcacctgaggataactcaatataactatgttgctgaaaatgcaaagctgaagaccatggatttcatggtgattccagcaagtacagagattctatgaagcccacccagaaaaaacttgctggtcctggctatttttgtgtcatttattcaagtattgagaacctggcctgtggtaggcactgtacttaatactaggatacagaaatgcaaaagatacggcccatgcaattttattaaatgcatcaatatgtattacaaatggtgaatggatttccaactttatcatggaatttaatgctgaatatatagaattcagaaaattgttgggaggacagcccttttgtgaaccttgtttggggcacagtaggaattggaaataatttagtttctatctctaagctgttctattttaaaattatttttaaatttttattgtcccactt

SEQ ID NO: 1198 - protein, 605 aa, Homo sapiens
MAEDWLDCPALGPGWKRREVFRKSGATCGRSDTYYQSPTGDRIRSKVELTRYLGPACDLTLFDFKQGILCYPAPKAHPVAVASKKRKKPSRPAKTRKRQVGPQSGEVRKEAPRDETKADTDTAPASFPAPGCCENCGISFSGDGTQRQRLKTLCKDCRAQRIAFNREQRMFKRVGCGECAACQVTEDCGACSTCLLQLPHDVASGLFCKCERRRCLRIVERSRGCGVCRGCQTQEDCGHCPICLRPPRPGLRRQWKCVQRRCLRGKHARRKGGCDSKMAARRRPGAQPLPPPPPSQSPEPTEPHPRALAPSPPAEFIYYCVDEDELQPYTNRRQNRKCGACAACLRRMDCGRCDFCCDKPKFGGSNQKRQKCRWRQCLQFAMKRLLPSVWSESEDGAGSPPPYRRRKRPSSARRHHLGPTLKPTLATRTAQPDHTQAPTKQEAGGGFVLPPPGTDLVFLREGASSPVQVPGPVAASTEALLQEAQCSGLSWVVALPQVKQEKADTQDEWTPGTAVLTSPVLVPGCPSKAVDPGLPSVKQEPPDPEEDKEENKDDSASKLAPEEEAGGAGTPVITEIFSLGGTRFRDTAVWLPRSKDLKKPGARKQ

SEQ ID NO: 1199 - DNA, 2815 bp, Homo sapiens
gcggccgcggaggaggaggaaggggaggagggcgaggcgggaggtgcaggagggaccctcgccatgggtccacgggcctagagtggcggaagataccggcctggtgccaaactggctactgctgcttcctgtggcctccatggctgaggactggctggactgcccggccctgggccctggctggaagcgccgcgaagtctttcgcaagtcaggggccacctgtggacgctcagacacctattaccagagccccacaggagacaggatccgaagcaaagttgagctgactcgatacctgggccctgcgtgtgatctcaccctcttcgacttcaaacaaggcatcttgtgctatccagcccccaaggcccatcccgtggcggttgccagcaagaagcgaaagaagccttcaaggccagccaagactcggaaacgtcaggttggaccccagagtggtgaggtcaggaaggaggccccgagggatgagaccaaggctgacactgacacagccccagcttcattccctgctcctgggtgctgtgagaactgtggaatcagcttctcaggggatggcacccaaaggcagcggctcaaaacgttgtgcaaagactgtcgagcacagagaattgccttcaaccgggaacagagaatgtttaagagccgagggtgtggagtatgccggggctgtcagacccaagaggattgtggccattgccccatctgccttcgccctccccgccctggtctcaggcgccagtggaaatgtgtccagcgacgttgcctacggggtaaacatgcccgccgcaagggaggctgtgactccaagatggctgccaggcggcgccccggagcccagccactgcctccaccacccccatcacagtccccagagcccacagagccgcaccccagagccctggccccctcgccacctgccgagttcatctattactgtgtagacgaggacgagctacagccctacacgaaccgccggcagaaccgcaagtgcggggcctgtgcagcctgcctacggcggatggactgtggccgctgcgacttctgctgcgacaagcccaaattcgggggcagcaaccagaagcgccagaagtgtcgttggcgccaatgcctgcagtttgccatgaagcggctgctgcccagtgtctggtcagagtctgaggatggggcaggatcgcccccaccttaccgtcgtcgaaagaggcccagctctgcccgacggcaccatcttggccctaccttgaagcccaccttggctacacgcacagcccaaccagaccatacccaggctccaacgaagcaggaagcaggtggtggctttgtgctgcccccgcctggcactgaccttgtgtttttacgggaaggcgcaagcagtcctgtgcaggtgccgggccctgttgcagcttccacagaagccctgttgcaggaggcccagtgctctggcctgagttgggttgtggccttaccccaggtgaagcaagagaaggcggatacccaggacgagtggacaccaggcacagctgtcctgacttctcccgtattggtgcctggctgccctagcaaggcagtagacccaggcctgccttctgtgaagcaagagccacctgacccagaggaggacaaggaggagaacaaggatgattctgcctccaaattggccccagaggaagaggcaggaggggctggcacacccgtgatcacggagattttcagcctgggtggaacccgcttccgagatacagcagtctggttgccaaggtccaaagaccttaaaaaacctggagctagaaagcagtagactggaggcttctacagactgtaggattcaagtctgcagggcaggcactcgggaagggaagatggatgtaaagtgtgggagaccgaggacacagtggagcccacgagcacgagctggaacccacgaggatggcctggaacccatgtcagtctctcaccacctccagcttcgatgatgtgggtgtcctgcagaagaagctggtgcccttcctcacagagttaaatatgcatctggcccaggaattagagaagctgaaaggatgatcctggggaaggtggagcagctgcaggcctggctgcaggcctgactactgcccacaccaacgaggtgatctagcagatacatggcaacgtgtgaactgcaacaacgcctggtgccccagcaccaaccttccaagtgtaaaaacaatgtgctgctgcttcacttccgccctccggttatcaagcaaaatgtctcttgtggcccatcttactggaagagagttccgggaaacatagcctcaccaaggtgacacattacaaagccaccctaccatgaatccgctcccaagggtctcactgctcacctgaggataactcaatataactatgttgctgaaaatgcaaagctgaagaccatggatttcatggtgattccagcaagtacagagattctatgaagcccacccagaaaaaacttgctggtcctggctatttttgtgtcatttattcaagtattgagaacctggcctgtggtaggcactgtacttaatactaggatacagaaatgcaaaagatacggcccatgcaattttattaaatgcatcaatatgtattacaaatggtgaatggatttccaactttatcatggaatttaatgctgaatatatagaattcagaaaattgttgggaggacagcccttttgtgaaccttgtttggggcacagtaggaattggaaataatttagtttctatctctaagctgttctattttaaaattatttttaaatttttattgtcccactta

SEQ ID NO: 1200 - protein, 556 aa, Homo sapiens
MAEDWLDCPALGPGWKRREVFRKSGATCGRSDTYYQSPTGDRIRSKVELTRYLGPACDLTLFDFKQGILCYPAPKAHPVAVASKKRKKPSRPAKTRKRQVGPQSGEVRKEAPRDETKADTDTAPASFPAPGCCENCGISFSGDGTQRQRLKTLCKDCRAQRIAFNREQRMFKSRGCGVCRGCQTQEDCGHCPICLRPPRPGLRRQWKCVQRRCLRGKHARRKGGCDSKMAARRRPGAQPLPPPPPSQSPEPTEPHPRALAPSPPAEFIYYCVDEDELQPYTNRRQNRKCGACAACLRRMDCGRCDFCCDKPKFGGSNQKRQKCRWRQCLQFAMKRLLPSVWSESEDGAGSPPPYRRRKRPSSARRHHLGPTLKPTLATRTAQPDHTQAPTKQEAGGGFVLPPPGTDLVFLREGASSPVQVPGPVAASTEALLQEAQCSGLSWVVALPQVKQEKADTQDEWTPGTAVLTSPVLVPGCPSKAVDPGLPSVKQEPPDPEEDKEENKDDSASKLAPEEEAGGAGTPVITEIFSLGGTRFRDTAVWLPRSKDLKKPGARKQ

SEQ ID NO: 1201 - DNA, 2444 bp, Homo sapiens
agatggcggcgcctgaggggtcttgggggctctaggccggccacctactggtttgcagcggagacgacgcatggggcctgcgcaataggagtacgctgcctgggaggcgtgactagaagcggaagtagttgtgggcgcctttgcaaccgcctgggacgccgccgagtggtctgtgcaggttcgcgggtcgctggcgggggtcgtgagggagtgcgccgggagcggagatatggagggagatggttcagacccagagcctccagatgccggggaggacagcaagtccgagaatggggagaatgcgcccatctactgcatctgccgcaaaccggacatcaactgcttcatgatcgggtgtgacaactgcaatgagtggttccatggggactgcatccggatcactgagaagatggccaaggccatccgggagtggtactgtcgggagtgcagagagaaagaccccaagctagagattcgctatcggcacaagaagtcacgggagcgggatggcaatgagcgggacagcagtgagccccgggatgagggtggagggcgcaagaggcctgtccctgatccaaacctgcagcgccgggcagggtcagggacaggggttggggccatgcttgctcggggctctgcttcgccccacaaatcctctccgcagcccttggtggccacacccagccagcatcaccagcagcagcagcagcagatcaaacggtcagcccgcatgtgtggtgagtgtgaggcatgtcggcgcactgaggactgtggtcactgtgatttctgtcgggacatgaagaagttcgggggccccaacaagatccggcagaagtgccggctgcgccagtgccagctgcgggcccgggaatcgtacaagtacttcccttcctcgctctcaccagtgacgccctcagagtccctgccaaggccccgccggccactgcccacccaacagcagccacagccatcacagaagttagggcgcatccgtgaagatgagggggcagtggcgtcatcaacagtcaaggagcctcctgaggctacagccacacctgagccactctcagatgaggacctacctctggatcctgacctgtatcaggacttctgtgcaggggcctttgatgacaatggcctgccctggatgagcgacacagaagagtccccattcctggaccccgcgctgcggaagagggcagtgaaagtgaagcatgtgaagcgtcgggagaagaagtctgagaagaagaaggaggagcgatacaagcggcatcggcagaagcagaagcacaaggataaatggaaacacccagagagggctgatgccaaggaccctgcgtcactgccccagtgcctggggcccggctgtgtgcgccccgcccagcccagctccaagtattgctcagatgactgtggcatgaagctggcagccaaccgcatctacgagatcctcccccagcgcatccagcagtggcagcagagcccttgcattgctgaagagcacggcaagaagctgctcgaacgcattcgccgagagcagcagagtgcccgcacccgccttcaggaaatggaacgccgattccatgagcttgaggccatcattctacgtgccaagcagcaggctgtgcgcgaggatgaggagagcaacgagggtgacagtgatgacacagacctgcagatcttctgtgtttcctgtgggcaccccatcaacccacgtgttgccttgcgccacatggagcgctgctacgccaagtatgagagccagacgtcctttgggtccatgtaccccacacgcattgaaggggccacacgactcttctgtgatgtgtataatcctcagagcaaaacatactgtaagcggctccaggtgctgtgccccgagcactcacgggaccccaaagtgccagctgacgaggtatgcgggtgcccccttgtacgtgatgtctttgagctcacgggtgacttctgccgcctgcccaagcgccagtgcaatcgccattactgctgggagaagctgcggcgtgcggaagtggacttggagcgcgtgcgtgtgtggtacaagctggacgagctgtttgagcaggagcgcaatgtgcgcacagccatgacaaaccgcgcgggattgctggccctgatgctgcaccagacgatccagcacgatcccctcactaccgacctgcgctccagtgccgaccgctgagcctcctggcccggaccccttaaaccctgcattccagatgggggagccgcccggtgcccgtgtgtccgttcctccactcatctgtttctccggttctccctgtgcccatccaccggttgaccgcccatctgcctttatcagagggactgtccccgtcgacatgttcagtgcctggtggggctgcggagtccactcatccttgcctcctctccctgggttttgttaataaaattttgaagaaacc

SEQ ID NO: 1202 - protein, 656 aa, Homo sapiens
MEGDGSDPEPPDAGEDSKSENGENAPIYCICRKPDINCFMIGCDNCNEWFHGDCIRITEKMAKAIREWYCRECREKDPKLEIRYRHKKSRERDGNERDSSEPRDEGGGRKRPVPDPNLQRRAGSGTGVGAMLARGSASPHKSSPQPLVATPSQHHQQQQQQIKRSARMCGECEACRRTEDCGHCDFCRDMKKFGGPNKIRQKCRLRQCQLRARESYKYFPSSLSPVTPSESLPRPRRPLPTQQQPQPSQKLGRIREDEGAVASSTVKEPPEATATPEPLSDEDLPLDPDLYQDFCAGAFDDNGLPWMSDTEESPFLDPALRKRAVKVKHVKRREKKSEKKKEERYKRHRQKQKHKDKWKHPERADAKDPASLPQCLGPGCVRPAQPSSKYCSDDCGMKLAANRIYEILPQRIQQWQQSPCIAEEHGKKLLERIRREQQSARTRLQEMERRFHELEAIILRAKQQAVREDEESNEGDSDDTDLQIFCVSCGHPINPRVALRHMERCYAKYESQTSFGSMYPTRIEGATRLFCDVYNPQSKTYCKRLQVLCPEHSRDPKVPADEVCGCPLVRDVFELTGDFCRLPKRQCNRHYCWEKLRRAEVDLERVRVWYKLDELFEQERNVRTAMTNRAGLLALMLHQTIQHDPLTTDLRSSADR

SEQ ID NO: 1203 - DNA, 2886 bp, Homo sapiens
agcctgcgcttcggaagcatggatgtgcgcctgcgctgcgctagggcgcggcgggcggtttgaattttgcttacagagtcccgtctcaccatcctgggcttccaacggagactgcggtatccgcggctggagacccagcggcgagtagccttttgctcccggacggacttgagaggcttaaaggatggcctcgtcagatctggaacaattatgctctcatgttaatgaaaagattggcaatattaagaaaaccttatcattaagaaactgtggccaggaacctaccttgaaaactgtattaaataaaataggagatgagatcattgtaataaatgaacttctaaataaattggaattggaaattcagtatcaagaacaaaccaacaattcactcaaggaactctgtgaatctcttgaagaagattacaaagacatagaacatcttaaagaaaacgttccttcccatttgcctcaagtaacagtaacccagagctgtgttaagggatcagatcttgatcctgaagaaccaatcaaagttgaagaacctgaacccgtaaagaagcctcccaaagagcaaagaagtattaaggaaatgccatttataacttgtgatgagttcaatggtgttccttcgtacatgaaatcccgcttaacctataatcaaattaatgatgttattaaagaaatcaacaaggcagtaattagtaaatataaaatcctacatcagccaaaaaagtctatgaattctgtgaccagaaatctctatcacagatttattgatgaagaaacgaaggataccaaaggtcgttattttatagtggaagctgacataaaggagttcacaactttgaaagctgacaagaagtttcacgtgttactgaatattttacgacactgccggaggctatcagaggtccgagggggaggacttactcgttatgttataacctgagtcccttgtgaacttttgaacataccaacagggtatagagtatagaggctatttctataattttcttatatataatttttttaacttttaatcttttttgtttccttttttttttttttgagacaggatcttgctttgtcacccaggggcttgctttgtcacgcaggctagagtgcagtggcgcaaacatggctcactgcagcctcaacctcccaggctcaagtgatcctcccacctcagccccctgaatggctgggactacaagcgtgcgccaccatgcctggctaatttttgtattttttggagagatggggtttcaccatgttgcctaggctggtcttgagctcctgagctcaaacaatccaccctcctcagcctcccaaagtgctgggattacaggcttgagccaccacacctgacctattcttgtttcttataaaaataaaacttttttggataaagcttatttcttgtttttttctttttctttttttttttttttgagacagtctcgctctttcacccaggccggactgcagcggcgctatctcggctcactgcaaactctgcctcccaggttcacgccatcctcctgcctcagcctcctgagtagctgggactacaggcacctgccaccacgcccagctaattttttgtatttttagtagagatggggtttcaccgtgttagccaggatggtctcgatctcctgacctcatgatccgcccacctcggcctcccaaagtgctgggattacaggcgtgagccaccgcgcccggccaacttatatattttcaagattcacctcctctcaccaaatatttaactacctgctgaatacgcctctgtactaggcacataatggaactaaaaaatgctcatgtccagtttttgtgttgagtgaacaatgctgcagaccctaataagattgggtacagatcggcatgcgcctgtagtcccagctactcaggagaattgcttgaacctaggaggtggaggttgcagtgagccgagatcgtgccactgcactccagtctgggcaacagagcgagactccatctcagaaaaaaagaaaaaaagactgggtacagatgtgatattggaagaaaaagatcaagctgatgaggttaggatacccaggccctttggacttaaagatcactagtgtctaaattccatcgatggcatttcagtctataggtaaacttcctggaagctggatttggagacagtttatcatctgattattgggctttcgtataggtccttagggagcagcttacctgaaatgcatttagtgtacaccagtctgtaaacttcaacctgtaatgaaagtgtaataaatgtacattgagttgatgtgataatgtgatataataagaaatatatatttgatcttcctatctagttccttgttcagagctcctaaaacccttgtaatttccaaagtgatggagtacatcttttgttctagtatttggtctttgaccccagttcctgacacaaagctcctaaattcctttaaatttcccagtgataggagaattttttgttctaatgaggtcactcttgatgggcacctggataactcaggatgggggctgctcacaaagaccacatcatgattggaagtttcaaactttcagtctcccacctccagagaggggagaggggctggagatttgtgtcaataatccatcaggcctatgtcaacaagacataatccgttaactatggagttcagggagcttcagggttggcaaacattttgatgtgccaggaaggtgacgcactccagctttatgaagtcagcaagtcctgtgctcaggatgcttctggaccttgccccaggtaccccttcatgtggctgttgttcatctgtatcctttgtagtagccttaaaataaactgttaaacacaaaaaaaaaaaaaaa

SEQ ID NO: 1204 - protein, 255 aa, Homo sapiens
MASSDLEQLCSHVNEKIGNIKKTLSLRNCGQEPTLKTVLNKIGDEIIVINELLNKLELEIQYQEQTNNSLKELCESLEEDYKDIEHLKENVPSHLPQVTVTQSCVKGSDLDPEEPIKVEEPEPVKKPPKEQRSIKEMPFITCDEFNGVPSYMKSRLTYNQINDVIKEINKAVISKYKILHQPKKSMNSVTRNLYHRFIDEETKDTKGRYFIVEADIKEFTTLKADKKFHVLLNILRHCRRLSEVRGGGLTRYVIT

SEQ ID NO: 1205 - DNA, 7282 bp, Homo sapiens
ggcggcaccggcaccttgcagtatcactggggagacggcggctgtatagcgcttgccgccccacggattatcccagcaggatctacgcaccccgcatcctccgtagttccgccctatccttgtcctccttggctggggcgcccaccggcggtctgataggctacatcgcggcatgagatgaagctgtgacaggtttgaaaacacaaacacaatggcaggaaacagccttgttctacccattgttctttggggtcgaaaagcgcccacacattgcatctcagccgtacttttaacagatgatggggccacgatcgtaacaggatgtcacgacggacaaatatgtctctgggatctttcagtagaactgcaaattaatcctcgagcactgttgtttggtcatacagcatcaatcacttgtttgtctaaagcttgtgcttccagtgacaaacagtatattgtgagtgcatctgaaagtggagagatgtgcctctgggatgtgagtgatggcagatgtattgaatttacaaaattagcttgcacacatactggcatacagttctaccagttctctgttgggaatcagcgagaaggaaggcttttatgccacggacattaccctgaaatccttgttgtggatgctaccagccttgaagtattatactccttagtatcaaagatatcaccagactggattagctccatgagtattattcgatcccaccgaacacaagaggacacagtggtagcactctcggtgactggcatcctgaaggtctggattgttacctcggaaataagtgacatgcaggatactgagccaatatttgaggaggaatccaaaccaatttattgtcagaattgccaaagcatctctttttgtgcatttacacaaaggtcacttttggttgtgtgttccaaatattggagggtgttcgatgccggagactattccttgttgtgttcaggtcctagtgaaaatggacagacatggaccgggggggactttgtctcatcagataaagtcatcatttggacagaaaatgggcaaagttatatttacaaactacctgccagttgccttccagctagtgattcattccgcagtgatgtggggaaggcagttgaaaatttaattcctcctgtacaacatatcctcttggatcgaaaagataaagagttgctaatttgtcctcctgttactcggttcttctatggatgcagagaatatttccataaactgttaattcagggtgattcttctggaaggttgaatatttggaacatatcagacacagctgataaacagggaagtgaagaagggctggcaatgacaacttctattagtttgcaagaggcatttgataaactgaatccttgtcctgctggaattatagatcagctgagtgtgattcccaatagtaatgaacctcttaaagtaactgcaagtgtgtacataccagcacatggacgacttgtttgtggtcgtgaagatggaagcatagttattgtacctgccacacagacggccatagtacagctgttgcaaggggaacacatgctcagaagaggttggccacctcacagaacactccgtggtcatcggaacaaagtcacatgtttgctatatcctcatcaggtctcagctcggtatgatcaaagatacctgatatctggaggtgtggatttttcagtcataatttgggacatattttctggagaaatgaaacatatcttctgtgttcatggtggtgagattactcaacttctagttccacctgaaaactgtagtgcaagagtacagcactgcatctgctctgtagccagtgaccactcagtaggacttctaagtttgcgagagaaaaaatgcataatgttggcatctcgtcacctttttcctattcaagtaatcaaatggaggccttctgatgattacctggtggtggggtgttcagatggttctgtgtacgtctggcaaatggatactggtgcattggatcgttgtgtgatggggataacagcagttgagattctaaacgcttgtgatgaagctgttcctgctgctgttgattcacttagtcatccagcagtcaacctaaaacaagctatgacgagacgtagtcttgctgctcttaaaaatatggcccatcataagctacaaacccttgcaactaacctcttggcttctgaggcatctgacaagggaaatttacctaaatattctcataactccctgatggttcaagcaataaagacaaacctaacagacccggacatacatgtgctattctttgatgtggaagcgttgattattcaactcctgactgaagaagcctctaggccgaatactgctcttatttccccagagaatttgcaaaaagcatctggcagttcagacaaagggggctcttttttaactggaaaacgagcagcagttctcttccaacaagtgaaagaaacgatcaaagagaacatcaaggaacacctccttgatgatgaagaggaggatgaggagataatgaggcagagaagggaagaaagtgatcctgaatatcggtccagcaaatcaaagccattgaccctattagaatataatttaactatggacactgcaaagctgtttatgtcctgccttcacgcctggggtttgaatgaagtactggatgaagtttgcctggatcgccttggaatgctgaaaccccactgcaccgtatcgtttggcctcttgtcaagaggaggccatatgtcactgatgctgccgggttataatcagcctgcttgtaaactgtcacatgggaaaacagaagtaggaaggaagctgccagcgtctgagggagtaggaaagggaacttacggagtgtcccgtgccgtcaccacacagcatctcctgtctatcatttctttggcaaatactttaatgagtatgaccaatgcaacttttattggtgatcatatgaagaagggtcctaccaggccacctagaccaagcaccccagacctttctaaggcaaggggttcccctccaacttccagtaatattgtgcaaggacagattaaacaagttgctgcacctgtcgtttccgctcggtctgatgctgatcactctggctctgaccctccttctgctcctgctttacatacctgtttcttagtaaatgaaggttggagtcagttagctgctatgcactgtgttatgctgccagacctactgggattggataaatttaggcctccccttctggagatgctggcccgaagatggcaagatcgatgcttggaggtgagagaagccgcgcaggccctgcttctggcggaactgagaagaattgagcaggcaggcaggaaggaagccattgatgcctgggctccttacttacctcagtacatagaccacgtcatatcacctggagtcacatcagaagccgcgcagactatcaccacggctcctgatgcctcagggcctgaagcaaaagtccaggaggaagagcatgaccttgttgacgatgacatcaccactggttgcttatcaagtgtcccacaaatgaaaaaaatttctacatcttacgaggaaagacggaagcaagctaccgctattgttttacttggagtaataggagctgaatttggtgctgaaattgaacctcctaaactattgaccagacctcgaagctctagccaaattcctgagggattcgggttgactagtggtggatccaactactcgctggccagacatacttgcaaggcactgacgtttcttctgctacagcctccaagccccaaacttcctccacacagcactatccgaagaacagccattgatctgattggacgtgggttcactgtttgggagccttacatggatgtgtccgctgttctgatggggcttctcgaactttgtgccgatgccgagaaacaacttgccaacatcacaatggggttgcctctgagcccagcagctgactcggcccgctctgcgaggcatgccctctcgctcattgccaccgccagaccacccgccttcatcaccaccatagccaaagaggtacacagacatacggctcttgcagcaaatacccaatcacagcagaatatgcacacaacaactcttgcacgagctaaaggggaaattttgagagtcattgaaattcttattgaaaagatgcccacagatgttgtggatcttctcgtggaggttatggacatcattatgtactgccttgaaggatctttagttaaaaagaaaggtcttcaagaatgtttcccagccatctgcaggttctacatggtcagctattatgagcggaatcacagaatagcagttggagctcgccatggttcagtggccctgtacgacatccggactggaaaatgtcagacaatccatggacacaagggaccaatcactgcagtggcttttgctcctgatggaagatatcttgccacctactcaaacactgacagccacatttctttttggcagatgaacacgtcactgctgggaagcatcggcatgctgaactcggcacctcagctgcgctgcattaaaacctaccaggtgccccctgtgcagcccgcgtcccccggctcccacaatgccctcaagctggcccggctcatctggacttccaaccgcaacgtcatcctcatggcccatgacgggaaggagcaccgcttcatggtctaatgctgctgcctgccgccgtgactgcgttttagttctctaaattatccaagccgatgttgctctgtccttcctcacaccagattgttcccaggggcctgcccaccccagtgccatccagtggcacggccgggtcttgtcacttgtgcatgcttctcaggggcagaacccgctcgtgccatctgtcgattcagaggcacgcacacatgctctgcaggatgtggccatcctgtcaccaggtagtttttccctgccagagatggcaggggaaagccagtggttcctgggaacgctcttgttgcttggtgcaacagaagcacaaaaatcaataaacactgtgattgcactcccagcccagatcagcatttttagccatctcaaccgcacctctgaagtgctgcttgaatctggccgttctgacactgggtgttgaggtcatgtggcagtcctcacgattgaaattattgccctttgaattacctaaaatattgtttaccaaaaagattctgtgtttacatgttcttttcttctggtgattgctaggaaattactcaatccaatttcctagggtttagctaccaccttctttatcaacagctaaccaatttgagattcatgattaattatgtacacaaaaatattttccttgtagaaaatagttttccagacacttagccttctgaagtgctcatctcttgcttaaatgatagtctatttagtagtttaaaataaaaataatcactccctatgatctagttaatgtaattatccagtcactgtaactaatctcttgaagggacttttgtgataaagagccaagttcagaagcatagcgtgtaccgaaaatgaagactctcctatctactgctacagatcctgttgaagaaagagcttacccctttcccccggaaaacttgcaatcctgtagttcccatatgtgtggcatatgtcagttatgaaattattataattcagccttcaaactactactgatcaactaaaggaaagctaataaggtatttcttttaaacaagtattctggaaaagtaataactatggcacaaatgttcaggagtgtatataaaaatatgtgggctctcgatttatttgagcaaacattgcaatgagggtgttcattatgcttctaagtaagctttaactagaccactttcttcttatgtcagattgtgctggttctagctcataataatgaaaaaaatagaattatattttgtatgaattgtttctaacaaaccttgatctgtatatacttgtgaggggttgtttggttgcctaattgttgattggttggttagttgggcaaaatcatttattacatgcaaaaatagaaaattatttgttaaattcagagaaaatatgtgaagtttacaaaggaaccaaaatgataatgggagaatttagtcttaaaagtttaggttgtcagagtttatctgatatacaaaaaagtaggatcaaagtctaggaacaaacattggttatttcactgaaacagatttttaaagagcatattaagaaattaagaccattagatcatctctttcataatgatatgatgttatttccattgacggcaaatctatactgttccttggttttagagttgggtattctttcaaaagtgaatttaggcacatgcatgtacattgtatttataaagattatatatgtagtttccaaggaagaaacaaagacctatacagtttagactttatttgtttggtgaacgtgctgttgtgtttggcatagctagagaaatgtaaggtaaaaggctcactttgttttccagtgggtccagagtcttctctatacccaacatatgtttactttatgaacttaaatggaaattaatttattgtagactacatctctatttggaatgatgaggtaaatgtataccttagcattttctttaacaaaaatgttctgtgtgtcaggaaagaggtgtgagagtggtaggcagcctgccgcaaacacacggatggctccccccgccacgaaggttgagaacaaagccagggggcccagaggagcaatagccctgggccacaagcgtgggtaggcctttcacgtattccgtctgcacaggcaaccaaggccagtagaaagctatggctgcaaaaccctggggtggacgatgtttgatgattagacggtcatctctaactactaaactaatatctgcattcttgttaacataaatctctccttggctattttaatagccacagtcccaaacttcatcccagcttagatttctcagcactgaggtaaactctgcattgtcatcccagcgtacacctttaatgttttattgatttcactggcactgtatttggacctgtccttgtatatgtagagacatatgtggcttcattggtaatttacaagcaaaagatgacatgacgtgacacctgtatgaaaatgtgatgattgaactccctgtgtacagcgagtgaattaaaatgtctgcctctccagacatttcttaatgattccacttaatagactctatgtgtgctgaatgttcctgtgtacatatgtgtgttaaataaaacaattgtattgaagactgtttttctc

SEQ ID NO: 1206 - protein, 1490 aa, Homo sapiens
MAGNSLVLPIVLWGRKAPTHCISAVLLTDDGATIVTGCHDGQICLWDLSVELQINPRALLFGHTASITCLSKACASSDKQYIVSASESGEMCLWDVSDGRCIEFTKLACTHTGIQFYQFSVGNQREGRLLCHGHYPEILVVDATSLEVLYSLVSKISPDWISSMSIIRSHRTQEDTVVALSVTGILKVWIVTSEISDMQDTEPIFEEESKPIYCQNCQSISFCAFTQRSLLVVCSKYWRVFDAGDYSLLCSGPSENGQTWTGGDFVSSDKVIIWTENGQSYIYKLPASCLPASDSFRSDVGKAVENLIPPVQHILLDRKDKELLICPPVTRFFYGCREYFHKLLIQGDSSGRLNIWNISDTADKQGSEEGLAMTTSISLQEAFDKLNPCPAGIIDQLSVIPNSNEPLKVTASVYIPAHGRLVCGREDGSIVIVPATQTAIVQLLQGEHMLRRGWPPHRTLRGHRNKVTCLLYPHQVSARYDQRYLISGGVDFSVIIWDIFSGEMKHIFCVHGGEITQLLVPPENCSARVQHCICSVASDHSVGLLSLREKKCIMLASRHLFPIQVIKWRPSDDYLVVGCSDGSVYVWQMDTGALDRCVMGITAVEILNACDEAVPAAVDSLSHPAVNLKQAMTRRSLAALKNMAHHKLQTLATNLLASEASDKGNLPKYSHNSLMVQAIKTNLTDPDIHVLFFDVEALIIQLLTEEASRPNTALISPENLQKASGSSDKGGSFLTGKRAAVLFQQVKETIKENIKEHLLDDEEEDEEIMRQRREESDPEYRSSKSKPLTLLEYNLTMDTAKLFMSCLHAWGLNEVLDEVCLDRLGMLKPHCTVSFGLLSRGGHMSLMLPGYNQPACKLSHGKTEVGRKLPASEGVGKGTYGVSRAVTTQHLLSIISLANTLMSMTNATFIGDHMKKGPTRPPRPSTPDLSKARGSPPTSSNIVQGQIKQVAAPVVSARSDADHSGSDPPSAPALHTCFLVNEGWSQLAAMHCVMLPDLLGLDKFRPPLLEMLARRWQDRCLEVREAAQALLLAELRRIEQAGRKEAIDAWAPYLPQYIDHVISPGVTSEAAQTITTAPDASGPEAKVQEEEHDLVDDDITTGCLSSVPQMKKISTSYEERRKQATAIVLLGVIGAEFGAEIEPPKLLTRPRSSSQIPEGFGLTSGGSNYSLARHTCKALTFLLLQPPSPKLPPHSTIRRTAIDLIGRGFTVWEPYMDVSAVLMGLLELCADAEKQLANITMGLPLSPAADSARSARHALSLIATARPPAFITTIAKEVHRHTALAANTQSQQNMHTTTLARAKGEILRVIEILIEKMPTDVVDLLVEVMDIIMYCLEGSLVKKKGLQECFPAICRFYMVSYYERNHRIAVGARHGSVALYDIRTGKCQTIHGHKGPITAVAFAPDGRYLATYSNTDSHISFWQMNTSLLGSIGMLNSAPQLRCIKTYQVPPVQPASPGSHNALKLARLIWTSNRNVILMAHDGKEHRFMV

SEQ ID NO: 1207 - DNA, 7183 bp, Homo sapiens
ggcggcaccggcaccttgcagtatcactggggagacggcggctgtatagcgcttgccgccccacggattatcccagcaggatctacgcaccccgcatcctccgtagttccgccctatccttgtcctccttggctggggcgcccaccggcggtctgataggctacatcgcggcatgagatgaagctgtgacaggtttgaaaacacaaacacaatggcaggaaacagccttgttctacccattgttctttggggtcgaaaagcgcccacacattgcatctcagccgtacttttaacagatgatggggccacgatcgtaacaggatgtcacgacggacaaatatgtctctgggatctttcagtagaactgcaaattaatcctcgagcactgttgtttggtcatacagcatcaatcacttgtttgtctaaagcttgtgcttccagtgacaaacagtatattgtgagtgcatctgaaagtggagagatgtgcctctgggatgtgagtgatggcagatgtattgaatttacaaaattagcttgcacacatactggcatacagttctaccagttctctgttgggaatcagcgagaaggaaggcttttatgccacggacattaccctgaaatccttgttgtggatgctaccagccttgaagtattatactccttagtatcaaagatatcaccagactggattagctccatgagtattattcgatcccaccgaacacaagaggacacagtggtagcactctcggtgactggcatcctgaaggtctggattgttacctcggaaataagtgacatgcaggatactgagccaatatttgaggaggaatccaaaccaatttattgtcagaattgccaaagcatctctttttgtgcatttacacaaaggtcacttttggttgtgtgttccaaatattggagggtgttcgatgccggagactattccttgttgtgttcaggtcctagtgaaaatggacagacatggaccgggggggactttgtctcatcagataaagtcatcatttggacagaaaatgggcaaagttatatttacaaactacctgccagttgccttccagctagtgattcattccgcagtgatgtggggaaggcagttgaaaatttaattcctcctgtacaacatatcctcttggatcgaaaagataaagagttgctaatttgtcctcctgttactcggttcttctatggatgcagagaatatttccataaactgttaattcagggtgattcttctggaaggttgaatatttggaacatatcagacacagctgataaacagggaagtgaagaagggctggcaatgacaacttctattagtttgcaagaggcatttgataaactgaatccttgtcctgctggaattatagatcagctgagtgtgattcccaatagtaatgaacctcttaaagtaactgcaagtgtgtacataccagcacatggacgacttgtttgtggtcgtgaagatggaagcatagttattgtacctgccacacagacggccatagtacagctgttgcaaggggaacacatgctcagaagaggttggccacctcacagaacactccgtggtcatcggaacaaagtcacatgtttgctatatcctcatcaggtctcagctcggtatgatcaaagatacctgatatctggaggtgtggatttttcagtcataatttgggacatattttctggagaaatgaaacatatcttctgtgttcatggtggtgagattactcaacttctagttccacctgaaaactgtagtgcaagagtacagcactgcatctgctctgtagccagtgaccactcagtaggacttctaagtttgcgagagaaaaaatgcataatgttggcatctcgtcacctttttcctattcaagtaatcaaatggaggccttctgatgattacctggtggtggggtgttcagatggttctgtgtacgtctggcaaatggatactggtgcattggatcgttgtgtgatggggataacagcagttgagattctaaacgcttgtgatgaagctgttcctgctgctgttgattcacttagtcatccagcagtcaacctaaaacaagctatgacgagacgtagtcttgctgctcttaaaaatatggcccatcataagctacaaacccttgcaactaacctcttggcttctgaggcatctgacaagggaaatttacctaaatattctcataactccctgatggttcaagcaataaagacaaacctaacagacccggacatacatgtgctattctttgatgtggaagcgttgattattcaactcctgactgaagaagcctctaggccgaatactgctcttatttccccagagaatttgcaaaaagcatctggcagttcagacaaagggggctcttttttaactggaaaacgagcagcagttctcttccaacaagtgaaagaaacgatcaaagagaacatcaaggaacacctccttgatgatgaagaggaggatgaggagataatgaggcagagaagggaagaaagtgatcctgaatatcggtccagcaaatcaaagccattgaccctattagaatataatttaactatggacactgcaaagctgtttatgtcctgccttcacgcctggggtttgaatgaagtactggatgaagtttgcctggatcgccttggaatgctgaaaccccactgcaccgtatcgtttggcctcttgtcaagaggaggccatatgtcactgatgctgccgggttataatcagcctgcttgtaaactgtcacatgggaaaacagaagtaggaaggaagctgccagcgtctgagggagtaggaaagggaacttacggagtgtcccgtgccgtcaccacacagcatctcctgtctatcatttctttggcaaatactttaatgagtatgaccaatgcaacttttattggtgatcatatgaagaagggtcctaccaggccacctagaccaagcaccccagacctttctaaggcaaggggttcccctccaacttccagtaatattgtgcaaggacagattaaacaaggttggagtcagttagctgctatgcactgtgttatgctgccagacctactgggattggataaatttaggcctccccttctggagatgctggcccgaagatggcaagatcgatgcttggaggtgagagaagccgcgcaggccctgcttctggcggaactgagaagaattgagcaggcaggcaggaaggaagccattgatgcctgggctccttacttacctcagtacatagaccacgtcatatcacctggagtcacatcagaagccgcgcagactatcaccacggctcctgatgcctcagggcctgaagcaaaagtccaggaggaagagcatgaccttgttgacgatgacatcaccactggttgcttatcaagtgtcccacaaatgaaaaaaatttctacatcttacgaggaaagacggaagcaagctaccgctattgttttacttggagtaataggagctgaatttggtgctgaaattgaacctcctaaactattgaccagacctcgaagctctagccaaattcctgagggattcgggttgactagtggtggatccaactactcgctggccagacatacttgcaaggcactgacgtttcttctgctacagcctccaagccccaaacttcctccacacagcactatccgaagaacagccattgatctgattggacgtgggttcactgtttgggagccttacatggatgtgtccgctgttctgatggggcttctcgaactttgtgccgatgccgagaaacaacttgccaacatcacaatggggttgcctctgagcccagcagctgactcggcccgctctgcgaggcatgccctctcgctcattgccaccgccagaccacccgccttcatcaccaccatagccaaagaggtacacagacatacggctcttgcagcaaatacccaatcacagcagaatatgcacacaacaactcttgcacgagctaaaggggaaattttgagagtcattgaaattcttattgaaaagatgcccacagatgttgtggatcttctcgtggaggttatggacatcattatgtactgccttgaaggatctttagttaaaaagaaaggtcttcaagaatgtttcccagccatctgcaggttctacatggtcagctattatgagcggaatcacagaatagcagttggagctcgccatggttcagtggccctgtacgacatccggactggaaaatgtcagacaatccatggacacaagggaccaatcactgcagtggcttttgctcctgatggaagatatcttgccacctactcaaacactgacagccacatttctttttggcagatgaacacgtcactgctgggaagcatcggcatgctgaactcggcacctcagctgcgctgcattaaaacctaccaggtgccccctgtgcagcccgcgtcccccggctcccacaatgccctcaagctggcccggctcatctggacttccaaccgcaacgtcatcctcatggcccatgacgggaaggagcaccgcttcatggtctaatgctgctgcctgccgccgtgactgcgttttagttctctaaattatccaagccgatgttgctctgtccttcctcacaccagattgttcccaggggcctgcccaccccagtgccatccagtggcacggccgggtcttgtcacttgtgcatgcttctcaggggcagaacccgctcgtgccatctgtcgattcagaggcacgcacacatgctctgcaggatgtggccatcctgtcaccaggtagtttttccctgccagagatggcaggggaaagccagtggttcctgggaacgctcttgttgcttggtgcaacagaagcacaaaaatcaataaacactgtgattgcactcccagcccagatcagcatttttagccatctcaaccgcacctctgaagtgctgcttgaatctggccgttctgacactgggtgttgaggtcatgtggcagtcctcacgattgaaattattgccctttgaattacctaaaatattgtttaccaaaaagattctgtgtttacatgttcttttcttctggtgattgctaggaaattactcaatccaatttcctagggtttagctaccaccttctttatcaacagctaaccaatttgagattcatgattaattatgtacacaaaaatattttccttgtagaaaatagttttccagacacttagccttctgaagtgctcatctcttgcttaaatgatagtctatttagtagtttaaaataaaaataatcactccctatgatctagttaatgtaattatccagtcactgtaactaatctcttgaagggacttttgtgataaagagccaagttcagaagcatagcgtgtaccgaaaatgaagactctcctatctactgctacagatcctgttgaagaaagagcttacccctttcccccggaaaacttgcaatcctgtagttcccatatgtgtggcatatgtcagttatgaaattattataattcagccttcaaactactactgatcaactaaaggaaagctaataaggtatttcttttaaacaagtattctggaaaagtaataactatggcacaaatgttcaggagtgtatataaaaatatgtgggctctcgatttatttgagcaaacattgcaatgagggtgttcattatgcttctaagtaagctttaactagaccactttcttcttatgtcagattgtgctggttctagctcataataatgaaaaaaatagaattatattttgtatgaattgtttctaacaaaccttgatctgtatatacttgtgaggggttgtttggttgcctaattgttgattggttggttagttgggcaaaatcatttattacatgcaaaaatagaaaattatttgttaaattcagagaaaatatgtgaagtttacaaaggaaccaaaatgataatgggagaatttagtcttaaaagtttaggttgtcagagtttatctgatatacaaaaaagtaggatcaaagtctaggaacaaacattggttatttcactgaaacagatttttaaagagcatattaagaaattaagaccattagatcatctctttcataatgatatgatgttatttccattgacggcaaatctatactgttccttggttttagagttgggtattctttcaaaagtgaatttaggcacatgcatgtacattgtatttataaagattatatatgtagtttccaaggaagaaacaaagacctatacagtttagactttatttgtttggtgaacgtgctgttgtgtttggcatagctagagaaatgtaaggtaaaaggctcactttgttttccagtgggtccagagtcttctctatacccaacatatgtttactttatgaacttaaatggaaattaatttattgtagactacatctctatttggaatgatgaggtaaatgtataccttagcattttctttaacaaaaatgttctgtgtgtcaggaaagaggtgtgagagtggtaggcagcctgccgcaaacacacggatggctccccccgccacgaaggttgagaacaaagccagggggcccagaggagcaatagccctgggccacaagcgtgggtaggcctttcacgtattccgtctgcacaggcaaccaaggccagtagaaagctatggctgcaaaaccctggggtggacgatgtttgatgattagacggtcatctctaactactaaactaatatctgcattcttgttaacataaatctctccttggctattttaatagccacagtcccaaacttcatcccagcttagatttctcagcactgaggtaaactctgcattgtcatcccagcgtacacctttaatgttttattgatttcactggcactgtatttggacctgtccttgtatatgtagagacatatgtggcttcattggtaatttacaagcaaaagatgacatgacgtgacacctgtatgaaaatgtgatgattgaactccctgtgtacagcgagtgaattaaaatgtctgcctctccagacatttcttaatgattccacttaatagactctatgtgtgctgaatgttcctgtgtacatatgtgtgttaaataaaacaattgtattgaagactgtttttctc

SEQ ID NO: 1208 - protein, 1457 aa, Homo sapiens
MAGNSLVLPIVLWGRKAPTHCISAVLLTDDGATIVTGCHDGQICLWDLSVELQINPRALLFGHTASITCLSKACASSDKQYIVSASESGEMCLWDVSDGRCIEFTKLACTHTGIQFYQFSVGNQREGRLLCHGHYPEILVVDATSLEVLYSLVSKISPDWISSMSIIRSHRTQEDTVVALSVTGILKVWIVTSEISDMQDTEPIFEEESKPIYCQNCQSISFCAFTQRSLLVVCSKYWRVFDAGDYSLLCSGPSENGQTWTGGDFVSSDKVIIWTENGQSYIYKLPASCLPASDSFRSDVGKAVENLIPPVQHILLDRKDKELLICPPVTRFFYGCREYFHKLLIQGDSSGRLNIWNISDTADKQGSEEGLAMTTSISLQEAFDKLNPCPAGIIDQLSVIPNSNEPLKVTASVYIPAHGRLVCGREDGSIVIVPATQTAIVQLLQGEHMLRRGWPPHRTLRGHRNKVTCLLYPHQVSARYDQRYLISGGVDFSVIIWDIFSGEMKHIFCVHGGEITQLLVPPENCSARVQHCICSVASDHSVGLLSLREKKCIMLASRHLFPIQVIKWRPSDDYLVVGCSDGSVYVWQMDTGALDRCVMGITAVEILNACDEAVPAAVDSLSHPAVNLKQAMTRRSLAALKNMAHHKLQTLATNLLASEASDKGNLPKYSHNSLMVQAIKTNLTDPDIHVLFFDVEALIIQLLTEEASRPNTALISPENLQKASGSSDKGGSFLTGKRAAVLFQQVKETIKENIKEHLLDDEEEDEEIMRQRREESDPEYRSSKSKPLTLLEYNLTMDTAKLFMSCLHAWGLNEVLDEVCLDRLGMLKPHCTVSFGLLSRGGHMSLMLPGYNQPACKLSHGKTEVGRKLPASEGVGKGTYGVSRAVTTQHLLSIISLANTLMSMTNATFIGDHMKKGPTRPPRPSTPDLSKARGSPPTSSNIVQGQIKQGWSQLAAMHCVMLPDLLGLDKFRPPLLEMLARRWQDRCLEVREAAQALLLAELRRIEQAGRKEAIDAWAPYLPQYIDHVISPGVTSEAAQTITTAPDASGPEAKVQEEEHDLVDDDITTGCLSSVPQMKKISTSYEERRKQATAIVLLGVIGAEFGAEIEPPKLLTRPRSSSQIPEGFGLTSGGSNYSLARHTCKALTFLLLQPPSPKLPPHSTIRRTAIDLIGRGFTVWEPYMDVSAVLMGLLELCADAEKQLANITMGLPLSPAADSARSARHALSLIATARPPAFITTIAKEVHRHTALAANTQSQQNMHTTTLARAKGEILRVIEILIEKMPTDVVDLLVEVMDIIMYCLEGSLVKKKGLQECFPAICRFYMVSYYERNHRIAVGARHGSVALYDIRTGKCQTIHGHKGPITAVAFAPDGRYLATYSNTDSHISFWQMNTSLLGSIGMLNSAPQLRCIKTYQVPPVQPASPGSHNALKLARLIWTSNRNVILMAHDGKEHRFMV

SEQ ID NO: 1209 - DNA, 794 bp, Homo sapiens
ggcagccgtctgtgccacccagagccggcgggccgctaggtccccggagaccctgctatggtgcgtgcgggcgccgtgggggctcatctccccgcgtccggcttggatatcttcggggacctgaagaagatgaacaagcgccagctctattaccaggttttaaacttcgccatgatcgtgtcttctgcactcatgatatggaaaggcttgatcgtgctcacaggcagtgagagccccatcgtggtggtgctgagtggcagtatggagccggcctttcacagaggagacctcctgttcctcacaaatttccgggaagacccaatcagagctggtgaaatagttgtttttaaagttgaaggacgagacattccaatagttcacagagtaatcaaagttcatgaaaaagataatggagacatcaaatttctgactaaaggagataataatgaagttgatgatagaggcttgtacaaagaaggccagaactggctggaaaagaaggacgtggtgggaagagcaagagggtttttaccatatgttggtatggtcaccataataatgaatgactatccaaaattcaagtatgctcttttggctgtaatgggtgcatatgtgttactaaaacgtgaatcctaaaatgagaagcagttcctgggaccagattgaaatgaattctgttgaaaaagagaaaaactaatatatttgagatgttccattttctgtataaaagggaacagtgtggagatgtttttgtcttgtccaaataaaagattcaccagtaaaaaaaaaaaaaa

SEQ ID NO: 1210 - protein, 192 aa, Homo sapiens
MVRAGAVGAHLPASGLDIFGDLKKMNKRQLYYQVLNFAMIVSSALMIWKGLIVLTGSESPIVVVLSGSMEPAFHRGDLLFLTNFREDPIRAGEIVVFKVEGRDIPIVHRVIKVHEKDNGDIKFLTKGDNNEVDDRGLYKEGQNWLEKKDVVGRARGFLPYVGMVTIIMNDYPKFKYALLAVMGAYVLLKRES

SEQ ID NO: 1211 - DNA, 842 bp, Homo sapiens
ccagcggctgcggcggcggagctcctccgaggtccgggtcaccagtctctgctcttcccagcctctccggcgcgctccaagggcttcccgtcgggaccatgcgcggccgtgagctcccgctggtcctgctggcgctggtcctctgcctggcgccccgggggcgagcggtcccgctgcctgcgggcggagggaccgtgctgaccaagatgtacccgcgcggcaaccactgggcggtggggcacttaatggggaaaaagagcacaggggagtcttcttctgtttctgagagagggagcctgaagcagcagctgagagagtacatcaggtgggaagaagctgcaaggaatttgctgggtctcatagaagcaaaggagaacagaaaccaccagccacctcaacccaaggccctgggcaatcagcagccttcgtgggattcagaggatagcagcaacttcaaagatgtaggttcaaaaggcaaaggttctcaacgtgaaggaaggaacccccagctgaaccagcaatgataatgatggcctctctcaaaagagaaaaacaaaacccctaagagactgcgttctgcaagcatcagttctacggatcatcaacaagatttccttgtgcaaaatatttgactattctgtatctttcatccttgactaaattcgtgattttcaagcagcatcttctggtttaaacttgtttgctgtgaacaattgtcgaaaagagtcttccaattaatgcttttttatatctaggctacctgttggttagattcaaggccccgagctgttaccattcacaataaaagcttaaacacattgtccaaaaaaaaaaaaaaaaaa

SEQ ID NO: 1212 - protein, 141 aa, Homo sapiens
MRGRELPLVLLALVLCLAPRGRAVPLPAGGGTVLTKMYPRGNHWAVGHLMGKKSTGESSSVSERGSLKQQLREYIRWEEAARNLLGLIEAKENRNHQPPQPKALGNQQPSWDSEDSSNFKDVGSKGKGSQREGRNPQLNQQ

SEQ ID NO: 1213 - DNA, 844 bp, Homo sapiens
ccagcggctgcggcggcggagctcctccgaggtccgggtcaccagtctctgctcttcccagcctctccggcgcgctccaagggcttcccgtcgggaccatgcgcggccgtgagctcccgctggtcctgctggcgctggtcctctgcctggcgccccgggggcgagcggtcccgctgcctgcgggcggagggaccgtgctgaccaagatgtacccgcgcggcaaccactgggcggtggggcacttaatggggaaaaagagcacaggggagtcttcttctgtttctgagagagggagcctgaagcagcagctgagagagtacatcaggtgggaagaagctgcaaggaatttgctgggtctcatagaagcaaaggagaacagaaaccaccagccacctcaacccaaggccctgggcaatcagcagccttcgtgggattcagaggatagcagcaacttcaaagatttggtagactctctgctccaggttctcaacgtgaaggaaggaacccccagctgaaccagcaatgataatgatggcctctctcaaaagagaaaaacaaaacccctaagagactgcgttctgcaagcatcagttctacggatcatcaacaagatttccttgtgcaaaatatttgactattctgtatctttcatccttgactaaattcgtgattttcaagcagcatcttctggtttaaacttgtttgctgtgaacaattgtcgaaaagagtcttccaattaatgcttttttatatctaggctacctgttggttagattcaaggccccgagctgttaccattcacaataaaagcttaaacacattgtccaaaaaaaaaaaaaaaaaa

SEQ ID NO: 1214 - protein, 138 aa, Homo sapiens
MRGRELPLVLLALVLCLAPRGRAVPLPAGGGTVLTKMYPRGNHWAVGHLMGKKSTGESSSVSERGSLKQQLREYIRWEEAARNLLGLIEAKENRNHQPPQPKALGNQQPSWDSEDSSNFKDLVDSLLQVLNVKEGTPS

SEQ ID NO: 1215 - DNA, 863 bp, Homo sapiens
ccagcggctgcggcggcggagctcctccgaggtccgggtcaccagtctctgctcttcccagcctctccggcgcgctccaagggcttcccgtcgggaccatgcgcggccgtgagctcccgctggtcctgctggcgctggtcctctgcctggcgccccgggggcgagcggtcccgctgcctgcgggcggagggaccgtgctgaccaagatgtacccgcgcggcaaccactgggcggtggggcacttaatggggaaaaagagcacaggggagtcttcttctgtttctgagagagggagcctgaagcagcagctgagagagtacatcaggtgggaagaagctgcaaggaatttgctgggtctcatagaagcaaaggagaacagaaaccaccagccacctcaacccaaggccctgggcaatcagcagccttcgtgggattcagaggatagcagcaacttcaaagatgtaggttcaaaaggcaaagttggtagactctctgctccaggttctcaacgtgaaggaaggaacccccagctgaaccagcaatgataatgatggcctctctcaaaagagaaaaacaaaacccctaagagactgcgttctgcaagcatcagttctacggatcatcaacaagatttccttgtgcaaaatatttgactattctgtatctttcatccttgactaaattcgtgattttcaagcagcatcttctggtttaaacttgtttgctgtgaacaattgtcgaaaagagtcttccaattaatgcttttttatatctaggctacctgttggttagattcaaggccccgagctgttaccattcacaataaaagcttaaacacattgtccaaaaaaaaaaaaaaaaaa

SEQ ID NO: 1216 - protein, 148 aa, Homo sapiens
MRGRELPLVLLALVLCLAPRGRAVPLPAGGGTVLTKMYPRGNHWAVGHLMGKKSTGESSSVSERGSLKQQLREYIRWEEAARNLLGLIEAKENRNHQPPQPKALGNQQPSWDSEDSSNFKDVGSKGKVGRLSAPGSQREGRNPQLNQQ

SEQ ID NO: 1217 - DNA, 1775 bp, Homo sapiens
cggctgggactaaggcggcagcgggctgagcgctcggccacccccagcgtgcgcagcccgggcgggcttcgcccgcggagcttgacctagggtcgggacccgtcgggttgcaccgccgcactcgggaagacccggcttcgagcctctcctctccgtctccaaagcgccctcccgcctcccggcgctccccatgcacctgccgggctgcgcgccagccatggccgacgggagcttctcgcttgccggccacctgctccgcagcccgggcgggagcacctcgcgacttcacagcatcgaggccatcctggggtttaccaaggacgacgggatcctcggcaccttcccggcggagcggggcgcccggggcgcgaaggagcgggataggaggctgggcgcgcggcccgcctgccccaaggcgcccgaggaaggctccgagccctccccgccgccagccccggcgcccgcccccgagtacgaagcccctcgaccctactgccccaaggagccctgggaggcacggccgagcccagggctgcccgtcgggccagccaccggcgaagcgaaactgtcagaggaggaacagcccaagaaaaagcatcggcggaaccgcacgactttcaccacgtaccagctgcatgagctggagcgcgcgttcgagaagtcccactacccggacgtgtacagccgcgaggagctggccggcaaggtcaacctaccagaggtccgggtccaggtgtggttccagaaccgacgggctaagtggcggcggcaggagaagctggaagtgtcctccatgaagctgcaggactcgcccctcctctccttcagccgctccccgccctccgcgacgctgtcgcccctcggggcgggcccgggcagcggtggcgggccggctgggggcgcgctgccgctggagtcctggctcgggccgccgctgccgggcgggggcgccacggcgctgcagagcctgccgggcttcgggccgccggcgcagagcctgcctgccagctacacgccaccgccgccgcctccgcccttcctgaactccccgccgttgggccccggcctgcaacctctcgcgccgccgccgccctcctacccgtgcgggcccggcttcggggacaagttcccgctggacgaggcggacccgcgcaacagcagcatcgcggcgctgcgtctgaaagccaaggagcacatccaggccatcgggaagccgtggcaggccctctaggggcactggggaacgtcttgggatccgaccccgggccgaccgcaccgtacccgcatcctctctcccagggacaacccccctccccagctcggcccctctttccctgtcgcctgcagccacccgccaagcatagttcagggccacgcgcctgctcccgatgcacggggagaagggcgactttcaggcctgaggagaggccctctggccgcctcaacgcacttcgcggacctcagccctgcagctggagggcaacaggctgccgggccccgctggccacgccgctcccatcaccgcaggcgctggagcctccaggcccaaacaggctgaagctcctaaacttggccattcccaggaggcttggagacccccagataaccataacagggaagcaggggaggcggaaaaatagagtttgagaaacttttgtataagtagtttcaaactatttgagaggagaattaaagacatgcttgttttgtttcgaaaaaaaaaaaaaaaaaaaaaaaaaaaaaaaaaaaaaaaaaaaaaaaaaaaaaaaaaaaaa

SEQ ID NO: 1218 - protein, 346 aa, Homo sapiens
MHLPGCAPAMADGSFSLAGHLLRSPGGSTSRLHSIEAILGFTKDDGILGTFPAERGARGAKERDRRLGARPACPKAPEEGSEPSPPPAPAPAPEYEAPRPYCPKEPWEARPSPGLPVGPATGEAKLSEEEQPKKKHRRNRTTFTTYQLHELERAFEKSHYPDVYSREELAGKVNLPEVRVQVWFQNRRAKWRRQEKLEVSSMKLQDSPLLSFSRSPPSATLSPLGAGPGSGGGPAGGALPLESWLGPPLPGGGATALQSLPGFGPPAQSLPASYTPPPPPPPFLNSPPLGPGLQPLAPPPPSYPCGPGFGDKFPLDEADPRNSSIAALRLKAKEHIQAIGKPWQAL

SEQ ID NO: 1219 - DNA, 1945 bp, Homo sapiens
agcttacggccgacaaaccactcttctctatcagtatgcccttgaatagatgaggttgtgcaaagtcctttgctcttaaatgtattgctgtcattgagaatatttggaggttttctcttgggtttgtttggattttttttttcagcttttgtctgaattttggttttatttttctggggcagagaaaatggctttccttatgaaaagtatgataagtaaccaggtaaagaatttaggatttggtggtgggtctgaagaaaataaagaagaaggaggtgcatctgatcctgcagcagctcaagggatgactagagaggagtatgaggagtatcaaaagcaaatgattgaggagaagatggaaagagatgctgcatttacacagaaaaaggcagaaagggcatgcctcagagttcatctcagagaaaaatacaggctcccaaagagtgaaatggatgagaatcaaatccagatggctggagatgatgtggatttacctgaagatctccggaaaatggtagatgaagatcaagaagaggaagaagataaagattctattcttgggcagatacagaatctccagaacatggacttggataccataaaagaaaaagcccaggccaccttcactgaaatcaagcagacagcggagcagaagtgttccgtgatgtgaggggtgggaggggtggagggagggaaccagccatccttggaaaagaccactctcttgtgggacgtttcaagcagtacatgttttaatgtagtgaacacagttaggaaaaccacgatgatccattgacagacaataatttggttgttctaaatattcctggcagagcatttagctaacaccttgcagcgggaaccttactttccttttagttataaatgagataaactggaaaatttcagttgtaaatgatgatgcagaacacatatctgcttaaagaccttgagatgagccaggaagaaacaaaagcaaggggcatttcctctccaactttcttccttggaggccaagttctcaccctgtccaactattcgcaggacaccaggtcccttcagagagaaatgtggagagtcaaggtgtctactgggagccgggtttcccacagggagctgagtctacagactccagggcaatcaaaggtcaccacccccacccctcacctctaggatccttgaatttgtcaatgatactcatcaagtatgcttggatcctttggtccttggatgcttctcagccaagtggcggtagcacagatgtggtgaacaatgacgaattgaggcagggaatagacctcactagccctttgcaatggagatcatcgttctagtggccatgtgaagaatggaaccaagggaggcacaattagaggcagagggaaaccaggcagacggctgctctttttgagttgagcttaactctccttgtctgaacttggtgatagcaatgggaacaaagtgggtagactaacagagagcattaagaagttaaatcaatctctctctgtctcctcccaacctctctctctctttcatccccttctctccctatctctcttttttttttcttctcctgtcccttcccatcccacccctttagactaccttccagtaaatcacactgtcatttggtgccacaagctttcagggtagacactgatttttcccccctaatatctgctctctttcaaaaggaataattcaaaagacttaggacaattaccactgaaacacttcgagctatttagctaaagcccaccaaatcaaaacaaaatactgattttttttttttttttggtgactctgttcatacagtgaataaagatctatcaaaggaaaaggaaactgagaccgaaaacttagggtctaagttgttctaaacccagggttctcaaatgtgttgtacaaaaagtttcatgtaataaaattaagcaaataaaac

SEQ ID NO: 1220 - protein, 160 aa, Homo sapiens
MAFLMKSMISNQVKNLGFGGGSEENKEEGGASDPAAAQGMTREEYEEYQKQMIEEKMERDAAFTQKKAERACLRVHLREKYRLPKSEMDENQIQMAGDDVDLPEDLRKMVDEDQEEEEDKDSILGQIQNLQNMDLDTIKEKAQATFTEIKQTAEQKCSVM

SEQ ID NO: 1221 - DNA, 2764 bp, Homo sapiens
ctctaaagcttagagccaagatggcgggatccaggcaaaggggtctccgggccagagttcggccgctgttctgcgccttgctgctgtcactcggtcgcttcgtccggggcgacggcgtgggaggagaccccgcggtcgcgttgccacatcgccgtttcgagtacaaatacagcttcaaggggccgcacctggtgcagagcgacgggaccgtgcccttctgggcccacgcggggaatgctattccaagttcagatcaaattcgagtagcaccatctttaaaaagccaaagaggctcagtgtggacaaagacaaaagcggcctttgagaactgggaagttgaggtgacatttcgagtgactggaagaggtcgaattggagctgatggcctagcaatttggtatgcagaaaatcaaggcttggagggccctgtgtttggatcagctgatctgtggaatggtgttggaatattttttgattcttttgacaatgatggaaagaaaaataatcctgctatagtaattataggcaacaatggacaaatccattatgaccatcaaaatgacggggctagtcaagctttggcaagttgccagagggacttccgcaacaaaccctatcctgtccgagcaaagattacctattaccagaacacactgacagtaatgatcaataatggctttacaccagataaaaatgattatgaattttgtgccaaagtggaaaatatgattatccctgcacaagggcattttggaatatctgctgcaactggaggtcttgcagatgaccatgatgtcctttcttttctgactttccagttgactgaacctggaaaagagccgcccacaccagataaagaaatttcggaaaaggaaaaagaaaagtatcaggaggaatttgagcactttcaacaagaattggataaaaaaaaagaggaattccagaagggccaccccgacctccaagggcagcctgcggaggaaatatttgagagtgtaggagatcgagagctaagacaagtctttgaaggacagaatcgtattcatcttgaaatcaagcagctgaaccggcagttagatatgattcttgatgaacagagaagatatgtctcttccttaacagaggaaatctctaaaagaggagcaggaatgcctgggcagcatgggcagattactcaacaagaactggatactgttgtgaaaactcagcatgagattctgagacaagtaaatgaaatgaaaaattccatgagtgaaaccgtcagactggtcagtggaatgcagcaccctggctctgctggaggcgtctatgagacaacacagcacttcattgacatcaaagagcacctgcacatagtaaagagggacatagataacttagtgcagcgaaatatgccatcaaatgaaaagccgaaatgcccagaactaccaccatttccatcatgtttgtctacggtccacttcattatatttgttgtggtgcaaactgtattattcattggttatatcatgtataggtctcagcaagaagcagctgccaaaaaattcttttgactaccattttcctgtgtacttcatctatttgtgtacaaaatgatgtcgttttgagggaatttaagtatttaaattgcttcatagtctaaattattaattttcttaataaaataactgtttaaacattgatttgcagttaagaataaaccttaaagcaaagacaaccacattttaatttgttcacagtatgtaaatctgtctaaatttcagtgaatttctggtcagtatgatgcagcctctgagcagatattgaccagtaagagggtaaataaagtgggggcaacccctggatatgaatgttaccccctaagtctccaatattgcaggtttccctgtataacgtaaacacacttgccctcatgcctcccagaatatgaggtctaattaagaagtcccatcaggtttattttgtaaccaaagtcttttttagaggtcagacttcctaatcaaaggcctgggcctgcagtcctttcatcttaatgcaacttcctttgaaatcaaagaatattttgtctgagagctttaaggatctggtaatagacttcaaaatgttaagtgaaattttttttcctctatttatcaatgatatatttcacttttaaaggaaattttggaggaaaatatagctgctttttgcctaaaaaaccttgtgggtggaaatattcctctgagaatggcttttataggtattttgcctggtaatgtattcattcatgattgcccatattcttgaatgtttcttcattccaatggggtcaggtcaatattatgaaaataatttttatatttatatttgtaactaagaatttatttctccctttactacacgatgtaaattcacgtcaaattcgatgatctgaggatttaaattcacaaaacctgccactacattctggtttacattagttacttcatgctggctggggttagtgaccatttgcatactcttttaaatcaaggaggctgtagtagaggcagttttaagattcttgaaggcaaaatttgaaaaacagtgaatacttctaattgtttccttttagtgccagaactaagacattgtgaagcacttgttagtaaacttaaccttgaaatgtcagactggaaggagtttttatgtctttgtgcatacttctgggtattacagaaacagtctgtaaataacattttaagatgcaaatttaattctgttcacagctgatttatactgattt

SEQ ID NO: 1222 - protein, 510 aa, Homo sapiens
MAGSRQRGLRARVRPLFCALLLSLGRFVRGDGVGGDPAVALPHRRFEYKYSFKGPHLVQSDGTVPFWAHAGNAIPSSDQIRVAPSLKSQRGSVWTKTKAAFENWEVEVTFRVTGRGRIGADGLAIWYAENQGLEGPVFGSADLWNGVGIFFDSFDNDGKKNNPAIVIIGNNGQIHYDHQNDGASQALASCQRDFRNKPYPVRAKITYYQNTLTVMINNGFTPDKNDYEFCAKVENMIIPAQGHFGISAATGGLADDHDVLSFLTFQLTEPGKEPPTPDKEISEKEKEKYQEEFEHFQQELDKKKEEFQKGHPDLQGQPAEEIFESVGDRELRQVFEGQNRIHLEIKQLNRQLDMILDEQRRYVSSLTEEISKRGAGMPGQHGQITQQELDTVVKTQHEILRQVNEMKNSMSETVRLVSGMQHPGSAGGVYETTQHFIDIKEHLHIVKRDIDNLVQRNMPSNEKPKCPELPPFPSCLSTVHFIIFVVVQTVLFIGYIMYRSQQEAAAKKFF

SEQ ID NO: 1223 - DNA, 7084 bp, Homo sapiens
ctcgcgcggccgagaggctgcagcggcagcagctgtcgcgccagtcgcaacagaagcaggtccgaggcacagcccgatcccgccatggagcagccgaggaaggcggtggtagtgacgggatttggcccttttggggaacacaccgtgaacgccagttggattgcagttcaggagctagaaaagctaggccttggcgacagcgtggacctgcatgtgtacgagattccggttgagtaccaaacagtccagagactcatccccgccctgtgggagaagcacagtccacagctggtggtgcatgtgggggtgtcaggcatggcgaccacagtcacactggagaaatgtggacacaacaagggctacaaggggctggacaactgccgcttttgccccggctcccagtgctgcgtggaggacgggcctgaaagcattgactccatcatcgacatggatgctgtgtgcaagcgagtcaccacgttgggcctggatgtgtcggtgaccatctcgcaggatgccggcagatatctctgcgactttacctactacacctctttgtaccagagtcacggtcgatcagccttcgtccacgtgcccccactggggaagccgtacaacgcggaccagctgggcagggcactgagagccatcattgaggagatgttggacctcctggagcagtcagagggcaaaatcaactattgccacaaacactgagggacgctcaggtctcctaagacctcatcctgctggggaccccacgaggggacatccaccctctggggtgtggccaggaaaagacaagctcttcagcttggggatccgatctggaagagagattctgatctgcccacctcctcttcctccttctctacaaaagctccggttgattcgagggaagtggtgaaaatttttttttctcccattttcctccctgcatctggggacacagctgccgtgaccagggaggccagcctgggaggtccagatgcccagggagaatcttggtctggtgaatccatgagctgcgataccacggctggggccatatgttcacctgctttcctgtccgttggtgaaggaatttcagaattcattttatatccaagactggcttttaccaaatttaaaagcctctcaatgcgtcctcgaccttgaactgtgctcaacagcctggccctttctggggccaccctgggatatggctggctggctggctttctttctttctttctttctttctttcttgctttctttctttcttgctttctttcttctctctctctctttttttttttttttaaatagtgctagtttgggcacagagtaatttatattccctttggttaaaatgcaggctttttagccaacaacaaaagtgttttccccccacccccactcgcccaccagggtgatgccacttttgcctcctgccctgaaaattggacttaagatgccatgtcttggccaggcgcagtggctcatgcctgtaatcccagcactttggaaggccagggtgggcggatcacctgagatcaggagttcaagatcagcctggccaacatggtgaaaccctgcctctactaaaaatacaaaaattagccgggcatggtgatgagtgcctgtagtcccagctactcgggaggctgaggctggagaatcgcttgaacttgggaggcagaggttgcagtgagctgagattgcacagctgcactccagcctgggtgacagagcgagactctgtctcaaaacaattggacttaagatggcatgtctttgttttagggccaaaaatgaggcccccttgcttaaggcatggggtccgtggccaggcaacggggtgggactgctgccccagatgtggccatgggggtcgtggtcctttcaacaccaagctatgagctgtcgccatggagaccagggccacctgtggaaaggcggattttgtctgcttttgacttttcttttttaatatgtaaaactccacatcagcggaaacccccccctacttctggcctggagcttcagggttttggtgctgggacgagtttgttgttctccttagcggggtggcgcggggggctcaaaacgggggcgcgggggctggagttggcagagctctgcatgtcccggcatgtctgagcaggaggaattccgggcggccaaagggttttatgtagattgcttttggacactcgcccaggagtcaggagttgatttttatctcacttcctggtaaccttgaacttaccaggcagggatgagatgacgtaaacttcctcagatgatgtaagttcagccacatcttgctgcccattagggagagaggacgacccccacagtgaaagtaattgagtgaaatgcacgttctggaaatcagtttctattttggcctggaggaatgtggctatactgcttccctgagtgtgacacagttggaatctaatcttgttggtttcccaacatctaggtttttgtttgtttgtttgtttttatgatagggtcttgttctgttgaccaggctggagtacagtagtgtgatcatggatcactgcagcctctacctcctgggctcaagtgatcctcccatctcagcctcctgagtagctgggactacaggcatgcaccaccacacctggctaatttttaaattttttatacagacagggtttcaccatgttgcccaggctggtctcgaactcctggactcaaactgatcctcctttctcggcctcccaaagtgctgggattacaggcatgagccactgcacccagcccagttctttcttaaaacagctgagagttttgttttcttcagcgttcaccttccttgtctccagttccgatgctggcagtggttcctacctctgttgggtttctagatagtttgggaacggggttgatgggtttctgtgaaacacattttccaagtcttgggctttctctggaggggaaggtggatgctggcgggtgacttgcagtgggcgcctggcagtgggtgtggactgtaactgacaggtggaaatgagtagggacactattgttccctccatgccagcttttttttttgctggaaatgccccctccacacccctggtagctctgtgtcctgagaaatccagagtgtgggagacatcactgcatctgtccccccagcttctgtgaagggaagctgtggcctcttttgaatgtggggaacaactgaagactcaggggtcacccagaggtctggtggaaagcaacttcaggtttcatcttgctctattcctcaaaggtctggtctgtgggcctctgaggagaaaacaggtctagccaagacagggacaaaatggggaaggggatgtgccaggcctgaactgagctaagcacctgccccgggctccacacttccatctttcttttgtcttcatttcacctctgtgtttaaagcactgtgtgacatagctccttagagatataacctattgtctgctcattgtcacgtgtgtgtgtgtcatctttgtattcttgcagtggtttcacatttccttacccagtcaagccagtatcccatccttcctcataatgcacaacatttggctcattttatttttctcattgttattttttatttttattttttgagatggattctcacactgttactcgggctagagtgcaatggcgtgatctcggctcactgcaacctccacctcctgggtttacacaattctcctgcctcagcctcccgagtagctgggattacaggcgcccgtcaccacacctggctaatttttgtatttttagtagagatgcagcttcaccatgttggccaggctggtcttgaaatcctgacctcaggtgatctgcctgccttggcctcccaaagtgctgggattacaggtgtgagctactgcgcctggccaagttttttacaaatatttttcttttggtggaactcatctgtgcactctctggtgtgtttttccacctttgttgggtcttggcttaaaatatcctcatgtgggctaggtgtggttactcacacctgtaatcctagcactttgggaggttgaggcaggagaatcccttgagccaggagttcaagaccagcctgggcaacatagcaagagatcccatatctaccaaaacatacaagaattagccagatgtggtggtgcatgcctgtggtcccagatactcaggaggctgaggcaggaggatcacctatgcctgggaggttgaagccccagtgagccatgatcacaccactgtagtccagcccgggtgacacagcaagactctgtctcaaaaaaaaaaaaaaaaaaaatcctcatgcaagaagggaaggaccaagtcccattccctcttgcctcattttcagagcctggggtaggggctacaggtggcataggaagggtctgcaaggtgggtgggacttggcaggtgttgggaagaggaataggggtggcaagtgtcaatggtgaaaagacaggctgaggggtgtggtgggaaggctgggggagaaaggtgagaagtgattgggggggcttccctgatgagtcctcatggagggtgctgaggcagggaacaggggtgcagggacagtgatcagggcacctggtaccctgaccaacttgatgatggcatctcttttaagatgcccaagtctgcgcacttttattcctttattcggcccctagcaccccctccccaccccaaagaaggtcagttgcatgcgtgtggggatgtagctcaaaaaagaaataagatggagtggaaaggaaagaaaggaagaagcaggaattcaaggtgggtgggctgagcttggggccacctagcccacctgctccaatcaagggctggaacaaacctgaggccacttggagaggcagggctgggcagggacagggggtgggggccgaaatcacagcttccccatcagagccagatgtgtgaaggaaatgtcccagatggcagtagtttctcggcaaggaggggaatcctggagatggttcatgtctgtgatcccagtgctttgggaggctgaggtgggaggattgcttgagcccgggagttcgagaccagccctgggcaacatggcgagaccccatctctacagaaattaaaaaaaaaaattagccagttgtggtgtcaagcacctgtagtcccagctacttgggaggctgagttgggaggcttatctgagcccaggaggtgaaggctgcaatgagccatgattacactactgtaccccagcctgggcaacagagcaagaccctgcctcaaaattaagaaaaaaaaaaggggggccaggcgcagtggcttatgcctgttatcccagcactttgggaggccaaggcagactgatcgcttgaggccaggagtttgcgaccagcctggccaacatagcaaaaccccatctctactaaaaatacaaaaattagtcaagagtggatggtgcgtgcctgtaatcccagctacctgggaggctgagacaggagaattgcttgaacctgggaggcagaggttgcagtggtgtgagatcacgccactgcattccagactgggcaacatagcaagactctgtcacaaaaaaaaaaaaaaaaaagaattccctgctctgcttttctgctcgttgctggcatagaaacatctagaacagaaagtatccactctggggcagatgggagagctggaaaagtagattcaagatgccttttagtcttggaagtttcttccaggaagcaagaccagctggtatgtttacacctgcactccagtgccctggggaggtgaccaggtggagggggatggctcatggaaatctgtcccgcacagctggcccccttttggctgccactgtctagactgttggcctttgacctctctgcctcttgtggcgtctgaacctagacgtcccttttggagacagctggacaaagccctattctccgcagccccagcctctatcctgaggcctctgggagctgcgtgacggccagcatggggtgctgatcatggtcaaggaggcaggtctttgccaggttgccccatgcagccacccatcctcagcatcctaacttgagggggcaggagagggctttgtttttataatccggattaaatttcccttccctgggcacaagtgcctcatgagggcccggggctgctggttgggagggaaagcatccccgtttttgcagtgaggaggccggccgagggctggggttccacttagacccttggcagaatggctgttgaggggcaggcgctgcccagtgcccacgtctggaaagctaattcccgggtggacgctgaacatacctgctgagagactctgtcccctggtttccaggacagttgtcacaagctgagtggggggggactcccaggacttgagggacccagtcccaccccaaactgctccccctcccccaaattccctttctcctcctgctctttctccccgctgtgcctcccccagttacccacagaagtgcctgcctctccagcgctcacagaacacacaaaaagggacaggaattggtcactgggtagtggccgtggctcctgacgatccagaccagcgtctggcccaagccattcagaggtggggtctggggcctgggggttttgtgtcgtgacactttgtctcaaggagattccacatagggatttgaattaggctttctgcttgccaaggcctgtggcatctgagcctggctgagggccgggcaagcctcccctgagcctttggaagccgagttcactctctgcctgcccaggggagcaccggcttggttctgggggctcctctaacatctcaggtttttatcttgtcttaaatttctttctaggaaaaaacccttccctgccaaaggtgactgtgttttctgccgccgaaggagggcccggtccctccaggctcagtgtggcttctccctgacccccgccctagaacttttgccagtgccttttctgaaactcctgtgtcccgggccccccaggcggagaaggatatgccggattctgcctggggctgggctctaggagaccccaaatttgacaccacagaaagcaaataaaacacttgaaatacgcatac

SEQ ID NO: 1224 - protein, 209 aa, Homo sapiens
MEQPRKAVVVTGFGPFGEHTVNASWIAVQELEKLGLGDSVDLHVYEIPVEYQTVQRLIPALWEKHSPQLVVHVGVSGMATTVTLEKCGHNKGYKGLDNCRFCPGSQCCVEDGPESIDSIIDMDAVCKRVTTLGLDVSVTISQDAGRYLCDFTYYTSLYQSHGRSAFVHVPPLGKPYNADQLGRALRAIIEEMLDLLEQSEGKINYCHKH

SEQ ID NO: 1225 - DNA, 1204 bp, Homo sapiens
cggaacgagggcaacctgcacagccatgcccgggcaagaactcaggacggtgaatggctctcagatgctcctggtgttgctggtgctctcgtggctgccgcatgggggcgccctgtctctggccgaggcgagccgcgcaagtttcccgggaccctcagagttgcactccgaagactccagattccgagagttgcggaaacgctacgaggacctgctaaccaggctgcgggccaaccagagctgggaagattcgaacaccgacctcgtcccggcccctgcagtccggatactcacgccagaagtgcggctgggatccggcggccacctgcacctgcgtatctctcgggccgcccttcccgaggggctccccgaggcctcccgccttcaccgggctctgttccggctgtccccgacggcgtcaaggtcgtgggacgtgacacgaccgctgcggcgtcagctcagccttgcaagaccccaagcgcccgcgctgcacctgcgactgtcgccgccgccgtcgcagtcggaccaactgctggcagaatcttcgtccgcacggccccagctggagttgcacttgcggccgcaagccgccagggggcgccgcagagcgcgtgcgcgcaacggggacgactgtccgctcgggcccgggcgttgctgccgtctgcacacggtccgcgcgtcgctggaagacctgggctgggccgattgggtgctgtcgccacgggaggtgcaagtgaccatgtgcatcggcgcgtgcccgagccagttccgggcggcaaacatgcacgcgcagatcaagacgagcctgcaccgcctgaagcccgacacggagccagcgccctgctgcgtgcccgccagctacaatcccatggtgctcattcaaaagaccgacaccggggtgtcgctccagacctatgatgacttgttagccaaagactgccactgcatatgagcagtcctggtccttccactgtgcacctgcgcgggggaggcgacctcagttgtcctgccctgtggaatgggctcaaggttcctgagacacccgattcctgcccaaacagctgtatttatataagtctgttatttattattaatttattggggtgaccttcttggggactcgggggctggtctgatggaactgtgtatttatttaaaactctggtgataaaaataaagctgtctgaactgttaaaaaaaaaaa

SEQ ID NO: 1226 - protein, 308 aa, Homo sapiens
MPGQELRTVNGSQMLLVLLVLSWLPHGGALSLAEASRASFPGPSELHSEDSRFRELRKRYEDLLTRLRANQSWEDSNTDLVPAPAVRILTPEVRLGSGGHLHLRISRAALPEGLPEASRLHRALFRLSPTASRSWDVTRPLRRQLSLARPQAPALHLRLSPPPSQSDQLLAESSSARPQLELHLRPQAARGRRRARARNGDDCPLGPGRCCRLHTVRASLEDLGWADWVLSPREVQVTMCIGACPSQFRAANMHAQIKTSLHRLKPDTEPAPCCVPASYNPMVLIQKTDTGVSLQTYDDLLAKDCHCI

SEQ ID NO: 1227 - DNA, 2430 bp, Homo sapiens
gccagaggaacgccagcgaccccagcagcgctgcggacggtgctggccgtggccgctgcggcccccgtgtccaggtgggccaggacgcagcctctgggcgccgtcgcttttccagcatcgcagaggcaaaagcgtggcagtgggacccaaaaggtaggactgaggctctagaacttgcacctgtgcagggactgcaaaccagacctgggaggaccctttcagcagcccccactccaccctatcccaggacttcccagcgacccgccgttctgggagataccgggagcgtgatcagggggcggggccgtttccaaggcaaccgcttatttgcatagggtcccgtcctggccaacgagggcgccccaaatgttcaggacatagaagaaggggttaactggcccggatctcctcctcgccttccaagcccgctaagcactggggttatctacccattccccagaaggggagactgaggcagcccaccagccaaaggaggcgaccagactggggctgcgttttaccatttcagaagcggcttgagctggtctgagctataataataaacactggcggtggaggcgagggcgaccacagggctgaggtcagggctaggattccggtgtctctacgtaggttgcttgaatggggggcaccctggcatggacgctgctgttgccgctgctgctgcgggagtcagacagcctagaaccgtcgtgcaccgtgtcctccgcggatgtggactggaacgcggagttcagtgccacgtgcctgaatttcagtggcctcagcctgagcctgcctcacaaccagtctctgcgggccagcaacgtgattctccttgacctgtctgggaacggcctgcgagagcttccagtgaccttctttgcccacctgcagaagcttgaggtcctgaacgtgctacgcaaccccttgtctcgtgtggatggggcgctggccgcccgctgtgaccttgacctgcaggccgactgcaactgtgccctggagtcctggcacgacatccgccgagacaactgctctggccagaagcctctgctctgctgggacacaaccagctcccagcacaacctctctgccttcctggaggtcagctgcgcccctggcctggcctctgcaactatcggggcagtggtggtcagcgggtgcctgcttcttggacttgccatcgctggccctgtgctggcctggagactctggcgatgccgagtggccagaagccgggagctgaacaaaccctgggctgctcaggatgggcccaagcccggtttaggcttgcagccacggtacggcagccggagcgcccccaagccccaagtggccgtgccatcctgcccctccactcccgactatgagaacatgtttgtgggccagccagcagccgagcaccagtgggatgaacaaggggctcacccttcagaggacaatgacttttacatcaactacaaggacatcgacctggcttcccagcctgtctactgtaacctgcagtcactgggccaggccccaatggatgaagaggagtacgtgatccccgggcactgagcctaagatgtcctaacctccacccagaaccccttcagtccctgctgggtgactcagggcgtcctaacgcctccatggcctcagtttccccatctgaagaatgggtacaggaaaggattgtccttgaggccccaggaagctctgccgccccctccctgtccctcatgccgctcctcagctccctcagctcctagagggggaagaggagagacccccaacaaggggacaggacggtcactgtgccaatcctgtcatcaccctcctgtggatgtacaggcagtgctcaataaatgcttcgaggctgatgaggctgctggctcagggtgcgtgggttcctcaaggtggggatttctgagttctaagaccaagtctccatctgagactcccaaattgctccccacctcccatccctgtttttttttgttgttgttgtttgtttgtttgtttttgaaactgagtgtcactctgtcacccaggctggagtgcaatgctgcggtctcagctcactgcaacctccgcctcctgggttcaagtgattctcctgcctcagcctcctgagtagctgggattacagcacccgccaccatgccgagctaatttttgtatttataatagagatggggtttcgccatgttggccaggctggtctcgaactcctgacctcaagcgatctgcccgcctcggcctcctgaagtgctgggattacaggcgtggccactgcgcccaggcacattcctcccttctgcccctctcagggccccttcccaggtccctgatctccaggcttggcctccagagcagcccacaccaaccccaaaataaaaaaatgtatatattcctttaaaaaaaaaaaaaaaaaaaaaaaaaaaa

SEQ ID NO: 1228 - protein, 305 aa, Homo sapiens
MGGTLAWTLLLPLLLRESDSLEPSCTVSSADVDWNAEFSATCLNFSGLSLSLPHNQSLRASNVILLDLSGNGLRELPVTFFAHLQKLEVLNVLRNPLSRVDGALAARCDLDLQADCNCALESWHDIRRDNCSGQKPLLCWDTTSSQHNLSAFLEVSCAPGLASATIGAVVVSGCLLLGLAIAGPVLAWRLWRCRVARSRELNKPWAAQDGPKPGLGLQPRYGSRSAPKPQVAVPSCPSTPDYENMFVGQPAAEHQWDEQGAHPSEDNDFYINYKDIDLASQPVYCNLQSLGQAPMDEEEYVIPGH

SEQ ID NO: 1229 - DNA, 1818 bp, Homo sapiens
ttaagagctgcgcccgcgggcggcgtagaggcagcgggcgggggcgcgcgcggcgggaggaggggagcgcgcgtttcccggaacagcccgcgcggaggaaagggaggaaaaaaagccaccctgcggccggggccggagctggagccgccgctgccgccgccgccgcggccgtctggagctcccccgcgcggacgatgcctgccgtgcccgcctggggctcggggcggtgaggcccggggcgcggggtagctatggcgacggcaagcgcggcccgcggcgccgcctgacaggtgtgggccccggcggcggcggcgtggagcagcatgtacgccaaggggggcaagggttcggccgtgccctccgacagccaggcccgcgagaagttggcgctgtacgtttatgagtacctgctgcacatcggtgcccagaagtcagcccagaccttcctgtctgagatccgatgggagaagaacatcacgctgggggagccccctgggttcctgcactcctggtggtgcgtcttctgggacctgtactgcgcggcgcctgacagaagagaggcctgcgagcactccggcgaggccaaggccttccaggactatagtgctgcagccgcccccagccccgttatggggagtatggccccaggtgacacaatggccgcaggctccatggcggctggcttcttccagcccttcatgtcaccgcgcttcccagggggcccccggcccaccctgcggatgccgagtcagcctcccgcaggcctccctggctcccagcccctcctccctggcgccatggagccctccccacgagcccaggggcatccgagcatgggcggcccaatgcagagggtgacgcctcctcgtggcatggccagcgtggggccccagagctatggaggtggcatgcgacccccacccaactccctcgccggcccaggcctgcctgccatgaacatgggcccaggagttcgtggcccgtgggccagccccagtggaaactcgatcccctactcctcctcatcccccggcagctacaccggacccccaggaggaggtgggccccctggaacacccatcatgcctagccctggagattccaccaactccagcgaaaacatgtacactatcatgaaccccatcgggcagggcgccggcagggctaatttcccgctcggccctggcccggagggccccatggccgccatgagcgcgatggagcctcaccacgtgaacggatccctgggctcgggcgacatggacgggttgccgaagagttcccccggcgccgtggccggcctgagcaacgccccgggcaccccgcgggacgacggcgagatggcggccgccgggaccttcctgcacccgttcccgagcgaaagctactcgccagggatgaccatgagcgtgtgatggggcggcagccccgggcctctctgcgggcctaggcttctgcccagcgcccctgctcagggcgaggggctgaggtcacacctcgggcacctggactcctggccaatcaaggcttgcccagctgggaggccccacacgaaagactcttaccattttattaaaaacgcaaggacctcagagacgttcttttctgtatggacccttcctgccatttgtattttgtcccagagagaaaggctctttggggggcccctctccccaggacgtcagggggtggggcccataaataaatggaagctggttttggtttttggtagcttgtctcagattccctctttggccttctgccaccacactctccaccctgtggtcttgttccgtccccgcccccatctagccccac

SEQ ID NO: 1230 - protein, 363 aa, Homo sapiens
MYAKGGKGSAVPSDSQAREKLALYVYEYLLHIGAQKSAQTFLSEIRWEKNITLGEPPGFLHSWWCVFWDLYCAAPDRREACEHSGEAKAFQDYSAAAAPSPVMGSMAPGDTMAAGSMAAGFFQPFMSPRFPGGPRPTLRMPSQPPAGLPGSQPLLPGAMEPSPRAQGHPSMGGPMQRVTPPRGMASVGPQSYGGGMRPPPNSLAGPGLPAMNMGPGVRGPWASPSGNSIPYSSSSPGSYTGPPGGGGPPGTPIMPSPGDSTNSSENMYTIMNPIGQGAGRANFPLGPGPEGPMAAMSAMEPHHVNGSLGSGDMDGLPKSSPGAVAGLSNAPGTPRDDGEMAAAGTFLHPFPSESYSPGMTMSV

SEQ ID NO: 1231 - DNA, 1884 bp, Homo sapiens
ttaagagctgcgcccgcgggcggcgtagaggcagcgggcgggggcgcgcgcggcgggaggaggggagcgcgcgtttcccggaacagcccgcgcggaggaaagggaggaaaaaaagccaccctgcggccggggccggagctggagccgccgctgccgccgccgccgcggccgtctggagctcccccgcgcggacgatgcctgccgtgcccgcctggggctcggggcggtgaggcccggggcgcggggtagctatggcgacggcaagcgcggcccgcggcgccgcctgacaggtgtgggccccggcggcggcggcgtggagcagcatgtacgccaaggggggcaagggttcggccgtgccctccgacagccaggcccgcgagaagttggcgctgtacgtttatgagtacctgctgcacatcggtgcccagaagtcagcccagaccttcctgtctgagatccgatgggagaagaacatcacgctgggggagccccctgggttcctgcactcctggtggtgcgtcttctgggacctgtactgcgcggcgcctgacagaagagaggcctgcgagcactccggcgaggccaaggccttccaggactatagtgctgcagccgcccccagccccgttatggggagtatggccccaggtgacacaatggccgcaggctccatggcggctggcttcttccagggcccccccggctcccagccgtccccccacaaccccaacgcccccatgatggggcctcacggtcagcccttcatgtcaccgcgcttcccagggggcccccggcccaccctgcggatgccgagtcagcctcccgcaggcctccctggctcccagcccctcctccctggcgccatggagccctccccacgagcccaggggcatccgagcatgggcggcccaatgcagagggtgacgcctcctcgtggcatggccagcgtggggccccagagctatggaggtggcatgcgacccccacccaactccctcgccggcccaggcctgcctgccatgaacatgggcccaggagttcgtggcccgtgggccagccccagtggaaactcgatcccctactcctcctcatcccccggcagctacaccggacccccaggaggaggtgggccccctggaacacccatcatgcctagccctggagattccaccaactccagcgaaaacatgtacactatcatgaaccccatcgggcagggcgccggcagggctaatttcccgctcggccctggcccggagggccccatggccgccatgagcgcgatggagcctcaccacgtgaacggatccctgggctcgggcgacatggacgggttgccgaagagttcccccggcgccgtggccggcctgagcaacgccccgggcaccccgcgggacgacggcgagatggcggccgccgggaccttcctgcacccgttcccgagcgaaagctactcgccagggatgaccatgagcgtgtgatggggcggcagccccgggcctctctgcgggcctaggcttctgcccagcgcccctgctcagggcgaggggctgaggtcacacctcgggcacctggactcctggccaatcaaggcttgcccagctgggaggccccacacgaaagactcttaccattttattaaaaacgcaaggacctcagagacgttcttttctgtatggacccttcctgccatttgtattttgtcccagagagaaaggctctttggggggcccctctccccaggacgtcagggggtggggcccataaataaatggaagctggttttggtttttggtagcttgtctcagattccctctttggccttctgccaccacactctccaccctgtggtcttgttccgtccccgcccccatctagccccac

SEQ ID NO: 1232 - protein, 385 aa, Homo sapiens
MYAKGGKGSAVPSDSQAREKLALYVYEYLLHIGAQKSAQTFLSEIRWEKNITLGEPPGFLHSWWCVFWDLYCAAPDRREACEHSGEAKAFQDYSAAAAPSPVMGSMAPGDTMAAGSMAAGFFQGPPGSQPSPHNPNAPMMGPHGQPFMSPRFPGGPRPTLRMPSQPPAGLPGSQPLLPGAMEPSPRAQGHPSMGGPMQRVTPPRGMASVGPQSYGGGMRPPPNSLAGPGLPAMNMGPGVRGPWASPSGNSIPYSSSSPGSYTGPPGGGGPPGTPIMPSPGDSTNSSENMYTIMNPIGQGAGRANFPLGPGPEGPMAAMSAMEPHHVNGSLGSGDMDGLPKSSPGAVAGLSNAPGTPRDDGEMAAAGTFLHPFPSESYSPGMTMSV

SEQ ID NO: 1233 - DNA, 1852 bp, Homo sapiens
ccgcgctgtccgccgccgctgcctgagtcgactctgcgccgcccgccgcgatggaggccgccgcccagttcttcgtcgagagcccggacgtggtctacggccccgaggccatcgaggcgcaatacgagtaccggacgacgcgcgtcagccgcgagggtggcgttctcaaggtgcaccccacgtccacgcgcttcaccttccggaccgcccggcaggtgccccggctcggggtcatgcttgtcggctggggcgggaacaacggctccacactcaccgccgcggtgctggccaatcgactgcgtttgtcctggcccacgcgcagcggccgcaaggaggccaactactacggctcgctgactcaggcgggcaccgtgagcctgggcctggacgccgagggccaggaggtgttcgtacccttcagcgcggtgctgcccatggtggcgcccaacgacctcgtgttcgatggctgggacatctcgtcgctgaacctggccgaggcgatgcggcgcgcgaaggtgctggactgggggctgcaggagcaactgtggccgcacatggaggccctgcggccccggccttctgtttacatccccgaattcatcgcggccaaccagagcgcgcgcgcggacaacctcatcccaggctcgcgtgcgcagcagctggagcagatccgcagggacatccgagacttccggtctagcgcggggctggacaaagtcatagtgctgtggacggcgaacacggagcgcttctgtgaggtgattccaggcctcaacgacacagccgagaacctgctgcgcaccattgagctcggtctggaggtgtcgccctccacgctcttcgccgtggccagcatcctggagggctgtgccttcctcaatgggtctccgcagaacaccctggtgcccggagctcttgagctcgcgtggcagcaccgggtttttgtgggcggagatgacttcaagtcaggccagaccaaagtcaagtccgtgcttgtggacttcctcattggctccggcctcaagaccatgtccatcgtgagttacaaccacctgggcaacaacgatggggagaacctatcggcgccattgcagttccgctctaaggaggtgtccaagagcaacgtggtggacgacatggtgcagagcaacccagtgctctatacgcccggcgaagagcctgaccactgcgtggtcatcaagtatgtgccgtacgtgggtgacagcaagcgcgcgctggatgagtatacctcggagctgatgctgggcggaaccaacacactggtgctgcacaacacgtgtgaggactcgctgctggccgcacccatcatgctggacctagcgctgctgaccgagctgtgccagcgcgtgagcttctgcactgacatggaccccgagccgcagaccttccaccccgtgctgtccctgctcagcttcctcttcaaggcgccactagtgccgcccggcagcccggtggtcaatgcgcttttccgccagcgcagctgcatcgagaacatcctcagggcctgcgtggggctcccgccacagaaccacatgctcctggaacacaaaatggagcgcccagggcccagcctcaagcgagttggacccgtggctgccacctaccctatgttgaacaagaaaggaccggtacccgctgccaccaatggctgcaccggtgatgccaatgggcatctgcaagaggagcccccaatgcccaccacctgaggccccggtcacacagtttctcggctcttcctccccgctgccccccacgaccctaccttgaaggcccccacaaataaaggcgctgccactcagccctcaaaaaaaaaaaaaaaaaaaaaaaaaaa

SEQ ID NO: 1234 - protein, 558 aa, Homo sapiens
MEAAAQFFVESPDVVYGPEAIEAQYEYRTTRVSREGGVLKVHPTSTRFTFRTARQVPRLGVMLVGWGGNNGSTLTAAVLANRLRLSWPTRSGRKEANYYGSLTQAGTVSLGLDAEGQEVFVPFSAVLPMVAPNDLVFDGWDISSLNLAEAMRRAKVLDWGLQEQLWPHMEALRPRPSVYIPEFIAANQSARADNLIPGSRAQQLEQIRRDIRDFRSSAGLDKVIVLWTANTERFCEVIPGLNDTAENLLRTIELGLEVSPSTLFAVASILEGCAFLNGSPQNTLVPGALELAWQHRVFVGGDDFKSGQTKVKSVLVDFLIGSGLKTMSIVSYNHLGNNDGENLSAPLQFRSKEVSKSNVVDDMVQSNPVLYTPGEEPDHCVVIKYVPYVGDSKRALDEYTSELMLGGTNTLVLHNTCEDSLLAAPIMLDLALLTELCQRVSFCTDMDPEPQTFHPVLSLLSFLFKAPLVPPGSPVVNALFRQRSCIENILRACVGLPPQNHMLLEHKMERPGPSLKRVGPVAATYPMLNKKGPVPAATNGCTGDANGHLQEEPPMPTT

SEQ ID NO: 1235 - DNA, 4058 bp, Homo sapiens
ggcgtggcggcgctggagccgggaagggggcgcgggggagagatggtcgcaagatggcggcgctgaaggaggataggagctacgggctgtcgtgcgggcgggttagcgacggcagcaaggtgtcggtgttccacgtgaagctcaccgacagtgccctgagggccttcgagagctaccgcgccagacaggattctgtttcactgaggccatctatccgatttcaaggaagccaagggcacatctccatcccccagcctgactgccccgcagaggcgcggacgttctccttctacctctccaacatcggccgcgacaacccccagggcagcttcgactgcatccagcagtatgtctccagtcatggggaagttcacctggactgcctgggcagcatacaggacaagatcacggtgtgtgccaccgacgactcctaccagaaggcgcggcagagcatggcccaggcggaggaggagacgcggagccgaagtgccattgtcatcaaggctggaggccgctacctgggcaagaaggttcagtttcggaaaccagccccaggtgcaacagacgcggtgccctcccggaagcgggcaacccccatcaacttggcgagtgccatcaggaagagtggtgccagtgccgtgagtgggggcagcggggtgtcccagaggcccttccgtgaccgagtgctgcacctcctggcactacggccctaccgcaaggctgagctgctgctgcgactgcagaaggacggcctgacgcaggcggacaaggacgcgctggatggcctcctccagcaggtggccaacatgagtgctaaggacggcacgtgtacactgcaggactgcatgtacaaggatgtgcagaaggactggcctggctactcggagggggaccagcagctgctgaagcgggtgctcgtccggaagctgtgccagccacagagcactggcagcctccttggagaccctgctgcctccagccccccaggcgagcgtgggcgctcggcctcgcccccacagaagcggctgcagcctcctgatttcatcgaccccctagccaacaagaaaccccggatatcgcacttcactcagagagctcagcctgccgtcaacgggaagctgggcgtgcccaatggccgtgaggccttgctgcccaccccgggcccaccagccagcacggacaccctcagctccagcactcacctgcccccgcggctggagcccccgagggcccacgaccccctggccgatgtcagcaatgacctgggccacagcggccgagactgtgagcacggagaggcggctgccccagcccccactgtgcgcctcggcctgcccctgctgacggactgtgcccagcccagcaggccacacggcagcccctcgcgcagcaagcccaagaagaagtccaagaagcacaaagacaaggagagggcggctgaggacaagccccgggcccagcttccagactgtgcacctgccacccatgccacccccggagccccagcagacaccccaggtttaaacggaacctgcagcgtttccagtgttcccacgtccacgtcggagacgcctgactacttgctgaagtacgcagccatctcctcttcggagcagcgccagagctacaagaacgacttcaatgccgagtacagcgagtaccgcgacctgcacgcccgcattgagcgcatcacgcggcggttcacccagctcgacgcccagctccggcagctctcccagggctccgaggagtatgagactactcgagggcagattttgcaggaatatcgaaaaatcaaaaagaccaacaccaactacagccaggagaagcaccgctgcgagtacctgcacagcaagctggcccacatcaagaggctcatcgccgagtacgaccagcggcagctgcaggcttggccctagccgccctccccgatggcggggatctgggagggtcgggggagcaaaaggcggtgagagaggatttatttaaaaaaataaacccgaggaagatgctcatctgagccagcaccgccggctttcagggcagcccctgcagacgtctggccctggcgggtggctgcaagcccacctcggccctccctgcgcttcctgagcagtccctgcttatgatgggctccccaggaagcccactgcctcctccctggctgcagcctccggggttcagcctcctgtctcgccagaagactcctaggcccttggggtggcgcgcctgccttttctagttttatacaaagacagccacttttagctactgctaatgagacttgagtctatttttgtacaaaagagaagcaaaatcttttttctaaacctgtgcctccctctcctcggacacccagggtctagccgctgccctgggtcctgcctgcagtattacagaggtcgtcgaaaggtgcagctgcgttctgagggcgtggggaatgggcaggtggcctctgctggtctctggctctacgtttaggcacccctttccccagcctctcctccttgggcagggtctctgctccagcaagcaaacagggtggcccaggtggctattttgagaactccagctggtgcccccagacagctgctcagagccaagggggcagagggctttcagcgcccccaggcctgccctgctatttcaggccctcagctgtcgggggccactgtgtttctgtgctccaagttgagactcggccgcagcggcgtcagacttttctttgcgatgtcctcggtttcccatttgttgctgctgctgctcattccacactgttgagaccttgtggtctcgatgctgctggcctccctccgtccctctgtccacttgtgggtcctggggtcgtcttagcagagccaccgccaaggtttgcactcagggaggggctgatggagggctgggcgccatggggtcagggaggccccagggacccatgggcagagctggggagccaggaggatgggtctgcctgctctgggggtgcaggctctgcagacaccccaattgctgctctgttgctgtgcctagtctagtgtcccccaaagcatcggggggccacgcaagtgtgggtgtgtgagtgtgcgtatgtggggaccccccagggcatggtggggtctgaggcgtgtgttcccatttagggctgaatgaagccatgacttggaaaggtggtggggggtggatggcggctgtgactcagggcccagggatcacatgggggtcactgctgccatcagcagtcaggcagggagaacagaaatgcaaaaatacagatgtctatttttctaaactggggggtggaggggtgcctcctgacagcttccaaagagctgactgtggagggcccacagtgtatcccacccctgcccgagagtctctctcctttgggacccccgggttcccagagctccgaggaaactgatccttcatgtttcaatagctgttgttgtttttctctttgggccgggccgggccggggaagggccgagcaggctccaggaggcctccagagtcagctggaccttgctgtgtcgcccgcaggcagccctgcagacaccggtgaggtgggatgatttcaggaggtcccagcccgggactgcccgcccctctgccctgggaaccagtccaaggggctgtcagttgaatttgcctttttgttgttgttgttgtttttgttgtttatttgttctccttttaaggaattatgaagctaagaaaagttttgtgttttgggggttggtggacaaagttctagctgattaaatatggtctaacttattgatactatttttttttcttttaatgttgtactgtggagaaaaactattttgagccatggggttggtgtttacaagaactttccacttttgccaaaatgttacaattgaaaggcatctatctgcgtcttcagtttcctgatattttcttaaaagatctagtgtcctttttgtacactaaacaggtgaatgctgacttttttcattctccaataaatttcactgaactgaaaaaaaaaaaaaaaaaaaaaaaaaaaaaaaaaaaaaaaaaaaaaaaaaaaa

SEQ ID NO: 1236 - protein, 621 aa, Homo sapiens
MAALKEDRSYGLSCGRVSDGSKVSVFHVKLTDSALRAFESYRARQDSVSLRPSIRFQGSQGHISIPQPDCPAEARTFSFYLSNIGRDNPQGSFDCIQQYVSSHGEVHLDCLGSIQDKITVCATDDSYQKARQSMAQAEEETRSRSAIVIKAGGRYLGKKVQFRKPAPGATDAVPSRKRATPINLASAIRKSGASAVSGGSGVSQRPFRDRVLHLLALRPYRKAELLLRLQKDGLTQADKDALDGLLQQVANMSAKDGTCTLQDCMYKDVQKDWPGYSEGDQQLLKRVLVRKLCQPQSTGSLLGDPAASSPPGERGRSASPPQKRLQPPDFIDPLANKKPRISHFTQRAQPAVNGKLGVPNGREALLPTPGPPASTDTLSSSTHLPPRLEPPRAHDPLADVSNDLGHSGRDCEHGEAAAPAPTVRLGLPLLTDCAQPSRPHGSPSRSKPKKKSKKHKDKERAAEDKPRAQLPDCAPATHATPGAPADTPGLNGTCSVSSVPTSTSETPDYLLKYAAISSSEQRQSYKNDFNAEYSEYRDLHARIERITRRFTQLDAQLRQLSQGSEEYETTRGQILQEYRKIKKTNTNYSQEKHRCEYLHSKLAHIKRLIAEYDQRQLQAWP

SEQ ID NO: 1237 - DNA, 3241 bp, Homo sapiens
ggcttccccgccccgccccgtccccgggcgtctccattttggtctcaggtgtggactcggcaagaaccagcgcaagagggaagcggagttatagctaccccggccgcggagccggctcactgcactacccccgcccccttctttcctccagacgccgaagtcgcgggcgctcatggcgggcctggaggtactgttcgcatcggcagcgccggccatcacctgcaggcaggacgcgctcgtctgcttcttgcattgggaagtggtgacacacggttactgcggcttgggtgtcggtgaccagccgggtcccaatgataagaagtcagaactgctgccagctgggtggaacaacaataaagacctgtatgtcctccggtatgagtataaggatgggtccagaaagctccttgtgaaagccatcaccgtggagagcagcatgatcctcaatgtgctggaatatggctcacagcaagtggcagacttgaccctgaacttggatgattatatcgatgcagaacacctgggtgacttccacaggacctacaagaacagtgaggagcttcggtctcgtattgtgtctggaatcatcacacctatccatgagcagtgggaaaaggctaatgtaagcagtccccaccgggagttcccccctgctaccgccagagaggtggacccactccggattcctccacaccacccacacaccagtcggcagcctccctggtgtgatcccctgggcccgtttgttgtcgggggagaagacttagacccttttgggcctcggagaggtggcatgattgtggatcccctgagatctggcttcccaagagcacttattgacccttcctcaggcctcccgaaccgacttcctccaggcgctgtgcccccaggagctcgctttgacccctttggacccattgggaccagcccacccggacctaacccagaccatctccccccgccgggctacgatgacatgtacctgtgaaggcctcaagaatgtaacatcccaggcttccctccattctcctggagctgccaccgctgtccccatcagcaaccatgttcttgcaggctgggggcaagggattctgctcatgtgtttgcagaccggctgggatagcctccccaccccttatcagagccaagacacctgctgcagctctccacctagctgcagatagctcccaaagagaaatcagtgtgtctctttcaccatcagctcctcccctttcaccaccagctcctctccacttcccaagggagactccggcaaccttcagcaacatatatcctcgaccagatgcagtgctataagaacagaacgcattttggatgttattattaagaaccaaatgtcaatacagaattcatgttgccggtttcccacttttctttttacattaatgcatagctgcttccatttatgagactttagagtttgagtttctgtagggctgaatgactctttttcctgcccagggcccattcttgcttctcaggcaccttccgtttattaattgccattgctcctgacatcactaagatgggtccccttctggctgcatgaatggaaatgagtgactggaaatcccataggccacaagaatgactttcacaagggcaggaacattgtggaaagactgcatcattctgatgaggcaaaatcctccagctattcctgtctgggccagttttgtaggtccatctgtgcatgggcagcagtagtcaaaaagccaaggaaaaaacagagcagacctgaaggctaatcttatttttgccactaacttagtgaatgaccctaagcaagttccttctcctcttagggccttgtgccaagcctatgaaattggaggtggctttcctgctctaaagcattttgatgtctcattctgtgtttggtaacccctataaactggggcagaggaaaagaatgatggttcaaggccatacttcccttgaaccttgtgtggttcttgcctaactctgtggtttttggaccccatggggcccagacagagcacaggagcatgggctgcctctgagtgtggtgttgaacttcgggaggagcagggagccctgcaccttgtgtcctggcccacctgacctttggtgttctccggatccttttcagcccgaggcctgacagacgcgggcagtgatgagccctgttctggagtggaaagagcacgatagagcaccaggctaagaggcacgagatcaaggcggtagtcacttccgctctgcagctagcatttcaaccatatgtggatcctttcatttctcagctccctggattccttcccctaaattaggacctattatttacctgtaggtaagcaagctactgtagctcttctgaggtatctgccaggctgttttctgtagcctcagattgcctatctgcttagcctgagaacaggtagatgaaaactaaactgatgcctaggcccagggtcagtctcagatggaagctgggcctgggtggggaggctagcatgcgtggctccctgggtatttctgtcagtccccatggcaagcagtgatttagtaaaacaccccagagtcagggaagccaaccaccttgaaacctttagaacatctctgctttggagaaagacccagagatcaggcagaggtgcagattcaatcattactcataacctttgagagctggcaaatgggaggagtgttagtctttgttttggaattggaccattcttgcaaccaaaaggacttagagcagtttgctcataaagacatcctttattataaaaggaagtatttaaaggatgatagagaccatcagatagaagcagggaaggtagataacttttaggaccttgatgtgaggaaaagataaaatttaaacaataaatttgccacttagattttctagcagcaaagtccgaaaagatagttatatacaaaattctgttttctgaaaacaaaattgtgattcaccttcagaattggccattttttttgtgagtttccttgcatcaaggacactgagaaacacagtcattgtcttaggtgttctatgggaggaagtgaatagagcctttaggaacttcctggtcaagcttatggtgcttattttgatctgggccacttccctccttccagtcatgagtaatcatcaaggagcaagttggagtgtttcaggtgtatattttgtagaacccaaaagattggagccttaacaataaacatcagcactaagtgacctgttaaaaaa

SEQ ID NO: 1238 - protein, 271 aa, Homo sapiens
MAGLEVLFASAAPAITCRQDALVCFLHWEVVTHGYCGLGVGDQPGPNDKKSELLPAGWNNNKDLYVLRYEYKDGSRKLLVKAITVESSMILNVLEYGSQQVADLTLNLDDYIDAEHLGDFHRTYKNSEELRSRIVSGIITPIHEQWEKANVSSPHREFPPATAREVDPLRIPPHHPHTSRQPPWCDPLGPFVVGGEDLDPFGPRRGGMIVDPLRSGFPRALIDPSSGLPNRLPPGAVPPGARFDPFGPIGTSPPGPNPDHLPPPGYDDMYL

SEQ ID NO: 1239 - DNA, 3204 bp, Homo sapiens
ctctggcataggctcttggtagtgggggcccagacagggaggcacctgccacctgcttcccttctcagccacccacagccctcatagggcagaatgggactcttgctgatgtagacgccgaagtcgcgggcgctcatggcgggcctggaggtactgttcgcatcggcagcgccggccatcacctgcaggcaggacgcgctcgtctgcttcttgcattgggaagtggtgacacacggttactgcggcttgggtgtcggtgaccagccgggtcccaatgataagaagtcagaactgctgccagctgggtggaacaacaataaagacctgtatgtcctccggtatgagtataaggatgggtccagaaagctccttgtgaaagccatcaccgtggagagcagcatgatcctcaatgtgctggaatatggctcacagcaagtggcagacttgaccctgaacttggatgattatatcgatgcagaacacctgggtgacttccacaggacctacaagaacagtgaggagcttcggtctcgtattgtgtctggaatcatcacacctatccatgagcagtgggaaaaggctaatgtaagcagtccccaccgggagttcccccctgctaccgccagagaggtggacccactccggattcctccacaccacccacacaccagtcggcagcctccctggtgtgatcccctgggcccgtttgttgtcgggggagaagacttagacccttttgggcctcggagaggtggcatgattgtggatcccctgagatctggcttcccaagagcacttattgacccttcctcaggcctcccgaaccgacttcctccaggcgctgtgcccccaggagctcgctttgacccctttggacccattgggaccagcccacccggacctaacccagaccatctccccccgccgggctacgatgacatgtacctgtgaaggcctcaagaatgtaacatcccaggcttccctccattctcctggagctgccaccgctgtccccatcagcaaccatgttcttgcaggctgggggcaagggattctgctcatgtgtttgcagaccggctgggatagcctccccaccccttatcagagccaagacacctgctgcagctctccacctagctgcagatagctcccaaagagaaatcagtgtgtctctttcaccatcagctcctcccctttcaccaccagctcctctccacttcccaagggagactccggcaaccttcagcaacatatatcctcgaccagatgcagtgctataagaacagaacgcattttggatgttattattaagaaccaaatgtcaatacagaattcatgttgccggtttcccacttttctttttacattaatgcatagctgcttccatttatgagactttagagtttgagtttctgtagggctgaatgactctttttcctgcccagggcccattcttgcttctcaggcaccttccgtttattaattgccattgctcctgacatcactaagatgggtccccttctggctgcatgaatggaaatgagtgactggaaatcccataggccacaagaatgactttcacaagggcaggaacattgtggaaagactgcatcattctgatgaggcaaaatcctccagctattcctgtctgggccagttttgtaggtccatctgtgcatgggcagcagtagtcaaaaagccaaggaaaaaacagagcagacctgaaggctaatcttatttttgccactaacttagtgaatgaccctaagcaagttccttctcctcttagggccttgtgccaagcctatgaaattggaggtggctttcctgctctaaagcattttgatgtctcattctgtgtttggtaacccctataaactggggcagaggaaaagaatgatggttcaaggccatacttcccttgaaccttgtgtggttcttgcctaactctgtggtttttggaccccatggggcccagacagagcacaggagcatgggctgcctctgagtgtggtgttgaacttcgggaggagcagggagccctgcaccttgtgtcctggcccacctgacctttggtgttctccggatccttttcagcccgaggcctgacagacgcgggcagtgatgagccctgttctggagtggaaagagcacgatagagcaccaggctaagaggcacgagatcaaggcggtagtcacttccgctctgcagctagcatttcaaccatatgtggatcctttcatttctcagctccctggattccttcccctaaattaggacctattatttacctgtaggtaagcaagctactgtagctcttctgaggtatctgccaggctgttttctgtagcctcagattgcctatctgcttagcctgagaacaggtagatgaaaactaaactgatgcctaggcccagggtcagtctcagatggaagctgggcctgggtggggaggctagcatgcgtggctccctgggtatttctgtcagtccccatggcaagcagtgatttagtaaaacaccccagagtcagggaagccaaccaccttgaaacctttagaacatctctgctttggagaaagacccagagatcaggcagaggtgcagattcaatcattactcataacctttgagagctggcaaatgggaggagtgttagtctttgttttggaattggaccattcttgcaaccaaaaggacttagagcagtttgctcataaagacatcctttattataaaaggaagtatttaaaggatgatagagaccatcagatagaagcagggaaggtagataacttttaggaccttgatgtgaggaaaagataaaatttaaacaataaatttgccacttagattttctagcagcaaagtccgaaaagatagttatatacaaaattctgttttctgaaaacaaaattgtgattcaccttcagaattggccattttttttgtgagtttccttgcatcaaggacactgagaaacacagtcattgtcttaggtgttctatgggaggaagtgaatagagcctttaggaacttcctggtcaagcttatggtgcttattttgatctgggccacttccctccttccagtcatgagtaatcatcaaggagcaagttggagtgtttcaggtgtatattttgtagaacccaaaagattggagccttaacaataaacatcagcactaagtgacctgttaaaaaa

SEQ ID NO: 1240 - protein, 271 aa, Homo sapiens; identical to SEQ ID NO: 1238

SEQ ID NO: 1241 - DNA, 3158 bp, Homo sapiens
ggcttccccgccccgccccgtccccgggcgtctccattttggtctcaggtgtggactcggcaagaaccagcgcaagagggaagcggagttatagctaccccggccgcggagccggctcactgcactacccccgcccccttctttcctccagacgccgaagtcgcgggcgctcatggcgggcctggaggtactgttcgcatcggcagcgccggccatcacctgcaggcaggacgcgctcgtctgcttcttgcattgggaagtggtgacacacggttactgcggcttgggtgtcggtgaccagccgggtcccaatgataagaagtcagaactgctgccagctgggtggaacaacaataaagacctgtatgtcctccggtatgagtataaggatgggtccagaaagctccttgtgaaagccatcaccgtggagagcagcatgatcctcaatgtgctggacctacaagaacagtgaggagcttcggtctcgtattgtgtctggaatcatcacacctatccatgagcagtgggaaaaggctaatgtaagcagtccccaccgggagttcccccctgctaccgccagagaggtggacccactccggattcctccacaccacccacacaccagtcggcagcctccctggtgtgatcccctgggcccgtttgttgtcgggggagaagacttagacccttttgggcctcggagaggtggcatgattgtggatcccctgagatctggcttcccaagagcacttattgacccttcctcaggcctcccgaaccgacttcctccaggcgctgtgcccccaggagctcgctttgacccctttggacccattgggaccagcccacccggacctaacccagaccatctccccccgccgggctacgatgacatgtacctgtgaaggcctcaagaatgtaacatcccaggcttccctccattctcctggagctgccaccgctgtccccatcagcaaccatgttcttgcaggctgggggcaagggattctgctcatgtgtttgcagaccggctgggatagcctccccaccccttatcagagccaagacacctgctgcagctctccacctagctgcagatagctcccaaagagaaatcagtgtgtctctttcaccatcagctcctcccctttcaccaccagctcctctccacttcccaagggagactccggcaaccttcagcaacatatatcctcgaccagatgcagtgctataagaacagaacgcattttggatgttattattaagaaccaaatgtcaatacagaattcatgttgccggtttcccacttttctttttacattaatgcatagctgcttccatttatgagactttagagtttgagtttctgtagggctgaatgactctttttcctgcccagggcccattcttgcttctcaggcaccttccgtttattaattgccattgctcctgacatcactaagatgggtccccttctggctgcatgaatggaaatgagtgactggaaatcccataggccacaagaatgactttcacaagggcaggaacattgtggaaagactgcatcattctgatgaggcaaaatcctccagctattcctgtctgggccagttttgtaggtccatctgtgcatgggcagcagtagtcaaaaagccaaggaaaaaacagagcagacctgaaggctaatcttatttttgccactaacttagtgaatgaccctaagcaagttccttctcctcttagggccttgtgccaagcctatgaaattggaggtggctttcctgctctaaagcattttgatgtctcattctgtgtttggtaacccctataaactggggcagaggaaaagaatgatggttcaaggccatacttcccttgaaccttgtgtggttcttgcctaactctgtggtttttggaccccatggggcccagacagagcacaggagcatgggctgcctctgagtgtggtgttgaacttcgggaggagcagggagccctgcaccttgtgtcctggcccacctgacctttggtgttctccggatccttttcagcccgaggcctgacagacgcgggcagtgatgagccctgttctggagtggaaagagcacgatagagcaccaggctaagaggcacgagatcaaggcggtagtcacttccgctctgcagctagcatttcaaccatatgtggatcctttcatttctcagctccctggattccttcccctaaattaggacctattatttacctgtaggtaagcaagctactgtagctcttctgaggtatctgccaggctgttttctgtagcctcagattgcctatctgcttagcctgagaacaggtagatgaaaactaaactgatgcctaggcccagggtcagtctcagatggaagctgggcctgggtggggaggctagcatgcgtggctccctgggtatttctgtcagtccccatggcaagcagtgatttagtaaaacaccccagagtcagggaagccaaccaccttgaaacctttagaacatctctgctttggagaaagacccagagatcaggcagaggtgcagattcaatcattactcataacctttgagagctggcaaatgggaggagtgttagtctttgttttggaattggaccattcttgcaaccaaaaggacttagagcagtttgctcataaagacatcctttattataaaaggaagtatttaaaggatgatagagaccatcagatagaagcagggaaggtagataacttttaggaccttgatgtgaggaaaagataaaatttaaacaataaatttgccacttagattttctagcagcaaagtccgaaaagatagttatatacaaaattctgttttctgaaaacaaaattgtgattcaccttcagaattggccattttttttgtgagtttccttgcatcaaggacactgagaaacacagtcattgtcttaggtgttctatgggaggaagtgaatagagcctttaggaacttcctggtcaagcttatggtgcttattttgatctgggccacttccctccttccagtcatgagtaatcatcaaggagcaagttggagtgtttcaggtgtatattttgtagaacccaaaagattggagccttaacaataaacatcagcactaagtgacctgttaaaaaa

SEQ ID NO: 1242 - protein, 99 aa, Homo sapiens
MAGLEVLFASAAPAITCRQDALVCFLHWEVVTHGYCGLGVGDQPGPNDKKSELLPAGWNNNKDLYVLRYEYKDGSRKLLVKAITVESSMILNVLDLQEQ

SEQ ID NO: 1243 - DNA, 2678 bp, Homo sapiens
gggaaaacactttaggttgagtgctgagagaaaggctctctgagtaggtgacatctgaactaagagctgaagcagaagaataagccatcctctgtggaccaaaggggacaagattctctacttttctgctacgcactaggaatatagcagagaagacaagtggctgctaccttctgttatcgtgggtggcagtgactagtttttctagatcttgactccctgccgtaactaaagatggagtacactgatgctgaagtactatgagccttcggaacttgtggagagactacaaagttttggttgttatggtccctttagttgggctcatacatttggggtggtacagaatcaaaagcagccctgttttccaaatacctaaaaacgacgacattcctgagcaagatagtctgggactttcaaatcttcagaagagccaaatccaggggaagtagcaggcttgcaatcttcaggtaaagaagcagctttgaatctgagcttcatatcgaaagaagagatgaaaaataccagttggattagaaagaactggcttcttgtagctgggatatctttcataggtgtccatcttggaacatactttttgcagaggtctgcaaagcagtctgtaaaatttcagtctcaaagcaaacaaaagagtattgaagagtgaagtaaaataaatatttggaattactaatttgtcattaaatcattctatgctgattagcttcataaacattgaactttttgattttatagccacaatgctgcatattcatactttaattcctaaagaataatttttaatgttaaaacgtgataatgcaataaatagaaaaatgtggtttacaaaataaaaacggtcttcactagttaccacctgaagtaagatgtctcgtttggaagctaagaagccatcattgtgtaagagtgaaccactgacaactgagagagtcaggaccacactttctgtcttgaaaagaattgtaacatcatgctatggcccctcaggtaggctgaagcagctgcacaatggctttggaggttacgtgtgtacaacctcacagtcctcagctctgctcagtcaccttttggtcacacatcccattttaaagatcctgacagcctccatacagaatcatgtgtcaagcttcagtgattgtggcttattcacagctattctttgctgcaacctgattgaaaatgttcagagattaggcttgacacccaccactgtcattagattaaataaacatcttttgagtctttgcatcagttatctcaagtctgagacctgtggttgtcgaatcccagtggactttagtagtactcagatcctcctttgtttggtgcgtagtatattaacaagtaaacctgcctgtatgctcaccagaaaggaaacagagcatgtcagtgctttgatcctgagagcctttttgcttacaattccagaaaatgctgaaggccacatcattttaggaaagagtttaattgtacctttaaaaggtcaaagagttatagattccactgtattacctgggatactcattgaaatgtcagaagttcaattaatgaggctattacctatcaaaaaatcaactgccctcaaggtggcactcttttgtacaactttatccggagacacttctgacactggagaaggaactgtggtggtcagttatggggtttctcttgaaaatgcagtcttggaccagctgcttaacctaggaaggcagctaatcagtgaccacgtagatcttgtcctgtgccaaaaagttatacatccatctttgaagcagtttctcaatatgcatcgtattattgccatagacagaattggagtgactctgatggaacccctgactaaaatgacaggaacacagcctattggatccctaggctcaatatgtcctaatagttatggaagtgtgaaagatgtgtgcactgcaaaatttggctccaaacatttttttcatcttattcctaatgaagcaacaatctgcagcttgcttctctgcaacagaaatgacactgcctgggatgagctgaagctcacgtgtcagacggcactgcatgtcctgcagttaacactcaaggaaccatgggctttgttgggaggtggctgtactgaaactcatttggctgcatatatcagacacaagactcacaacgacccagaaagcattctcaaagatgatgaatgtactcaaacagaacttcaattaattgctgaagcattttgcagtgccctagaatctgttgttggctctttagaacatgatggaggtgaaattctcactgacatgaagtatggacacctttggtcagttcaggcagattctccctgtgttgctaactggccagatttgctttcacagtgtggctgtggattatacaatagccaggaagaactcaactggtctttcttaagaagcacacgtcgtccatttgtgccacaaagctgccttccacatgaagctgtgggctcagccagcaacctgaccttggactgtttgactgcaaagcttagtggcctacaggtggctgtagagacagccaatttgattttggatctttcatatgttattgaagataaaaactaagagaatagcatgttcgtattacaagagaaacaaataaactagtctgttggcaattgagaaaaaaaaaaaaaaaaaaaa

SEQ ID NO: 1244 - protein, 570 aa, Homo sapiens
MSRLEAKKPSLCKSEPLTTERVRTTLSVLKRIVTSCYGPSGRLKQLHNGFGGYVCTTSQSSALLSHLLVTHPILKILTASIQNHVSSFSDCGLFTAILCCNLIENVQRLGLTPTTVIRLNKHLLSLCISYLKSETCGCRIPVDFSSTQILLCLVRSILTSKPACMLTRKETEHVSALILRAFLLTIPENAEGHIILGKSLIVPLKGQRVIDSTVLPGILIEMSEVQLMRLLPIKKSTALKVALFCTTLSGDTSDTGEGTVVVSYGVSLENAVLDQLLNLGRQLISDHVDLVLCQKVIHPSLKQFLNMHRIIAIDRIGVTLMEPLTKMTGTQPIGSLGSICPNSYGSVKDVCTAKFGSKHFFHLIPNEATICSLLLCNRNDTAWDELKLTCQTALHVLQLTLKEPWALLGGGCTETHLAAYIRHKTHNDPESILKDDECTQTELQLIAEAFCSALESVVGSLEHDGGEILTDMKYGHLWSVQADSPCVANWPDLLSQCGCGLYNSQEELNWSFLRSTRRPFVPQSCLPHEAVGSASNLTLDCLTAKLSGLQVAVETANLILDLSYVIEDKN

SEQ ID NO: 1245 - DNA, 2540 bp, Homo sapiens
cctcgcgcgacgcgaaggttgtcgggatccgcggcagcagcggctgcttgagatctgtttctggggcctctggcggtggcggcctggggcggcgcgacggctggtgcgcaggtacactgatgctgaagtactatgagccttcggaacttgtggagagactacaaagttttggttgttatggtccctttagttgggctcatacatttggggtggtacagaatcaaaagcagccctgttttccaaatacctaaaaacgacgacattcctgagcaagatagtctgggactttcaaatcttcagaagagccaaatccaggggaagtagcaggcttgcaatcttcaggtaaagaagcagctttgaatctgagcttcatatcgaaagaagagatgaaaaataccagttggattagaaagaactggcttcttgtagctgggatatctttcataggtgtccatcttggaacatactttttgcagaggtctgcaaagcagtctgtaaaatttcagtctcaaagcaaacaaaagagtattgaagagtgaagtaaaataaatatttggaattactaatttgtcattaaatcattctatgctgattagcttcataaacattgaactttttgattttatagccacaatgctgcatattcatactttaattcctaaagaataatttttaatgttaaaacgtgataatgcaataaatagaaaaatgtggtttacaaaataaaaacggtcttcactagttaccacctgaagtaagatgtctcgtttggaagctaagaagccatcattgtgtaagagtgaaccactgacaactgagagagtcaggaccacactttctgtcttgaaaagaattgtaacatcatgctatggcccctcaggtaggctgaagcagctgcacaatggctttggaggttacgtgtgtacaacctcacagtcctcagctctgctcagtcaccttttggtcacacatcccattttaaagatcctgacagcctccatacagaatcatgtgtcaagcttcagtgattgtggcttattcacagctattctttgctgcaacctgattgaaaatgttcagagattaggcttgacacccaccactgtcattagattaaataaacatcttttgagtctttgcatcagttatctcaagtctgagacctgtggttgtcgaatcccagtggactttagtagtactcagatcctcctttgtttggtgcgtagtatattaacaagtaaacctgcctgtatgctcaccagaaaggaaacagagcatgtcagtgctttgatcctgagagcctttttgcttacaattccagaaaatgctgaaggccacatcattttaggaaagagtttaattgtacctttaaaaggtcaaagagttatagattccactgtattacctgggatactcattgaaatgtcagaagttcaattaatgaggctattacctatcaaaaaatcaactgccctcaaggtggcactcttttgtacaactttatccggagacacttctgacactggagaaggaactgtggtggtcagttatggggtttctcttgaaaatgcagtcttggaccagctgcttaacctaggaaggcagctaatcagtgaccacgtagatcttgtcctgtgccaaaaagttatacatccatctttgaagcagtttctcaatatgcatcgtattattgccatagacagaattggagtgactctgatggaacccctgactaaaatgacaggaacacagcctattggatccctaggctcaatatgtcctaatagttatggaagtgtgaaagatgtgtgcactgcaaaatttggctccaaacatttttttcatcttattcctaatgaagcaacaatctgcagcttgcttctctgcaacagaaatgacactgcctgggatgagctgaagctcacgtgtcagacggcactgcatgtcctgcagttaacactcaaggaaccatgggctttgttgggaggtggctgtactgaaactcatttggctgcatatatcagacacaagactcacaacgacccagaaagcattctcaaagatgatgaatgtactcaaacagaacttcaattaattgctgaagcattttgcagtgccctagaatctgttgttggctctttagaacatgatggaggtgaaattctcactgacatgaagtatggacacctttggtcagttcaggcagattctccctgtgttgctaactggccagatttgctttcacagtgtggctgtggattatacaatagccaggaagaactcaactggtctttcttaagaagcacacgtcgtccatttgtgccacaaagctgccttccacatgaagctgtgggctcagccagcaacctgaccttggactgtttgactgcaaagcttagtggcctacaggtggctgtagagacagccaatttgattttggatctttcatatgttattgaagataaaaactaagagaatagcatgttcgtattacaagagaaacaaataaactagtctgttggcaattgagaaaaaaaaaa

SEQ ID NO: 1246 - protein, 570 aa, Homo sapiens; identical to SEQ ID NO: 1244

SEQ ID NO: 1247 - DNA, 1407 bp, Homo sapiens
gcgaaagtgcttcccttaagcttctgaaggttggctgcagttccggctacctgtgtagtccgagtttccacagccaggtactactccgccagtgaccctggacagtaacaaaacatataaagcccgagcccaaaccccgccaccatcataggtctgtagttactgtggaatcaataagccatggcatctaagaaatttgctgttaaatgtgggaattttgctgtcctcgtggatcttcatatcttgccacaaggttcaaacaaagatacaagctggttttctgaacagaagaaagaggaagtctgtttactgttaaaagaaaccattgattcaagagttcaggagtacttggaagttcgcaaacagcacaggccatcaaatgcagaattcacaagatccaatcccttgtccttaaaaggttatggctttcaaatcacagcctatttcctcaagagagggatacgccttcgctgcatcaggagcacacagaatgctgaactctgtgtattccctgacagatttgtggtttgtgtcagtcagcttgcattcagtcgtgatcttttagcaagtcagaatgaagatttgacagaaagagttctccatggagtgtctgattactttgctgagtgtgcagagagttcacttcctcccagtgcaaagctccggagaaatgctctgaaagaaattgtgaaaagaactgaaacaaaaagcagtgtcacgagcaaatcgcagaccagaagagacactgtggaaacatctagtgactcagtgattgcagagatagcaaggaggaggaatgatggtcaggcttcctccagtcccccatcagaatccatgggacaagcaaaggattccataaaggcagctgagagccactgggggcttcctgttcaaaagctggaaaaagttaatcagacccagccagaagacactagtggccagcaaaaacctcatcctggggagcggttaaagacagggcttctaagcaggagccccgtctgtagctgtgagtcagcatcaccatgtccaaaacaaagtccacgagtggccaaaacccaacagaaacgcaggaactgcagctctgcggaagacttcgaccaccacgggagagtttctcttggaagtgatcgattagtcccgagagaaataatagtggaaaaaagcaaagctgtcagggttttgccagcttcagagttgtcagatccagggttacttttgaaacaagatttggcaaaaaccacgtctaaggaagagttgcatgttttggaaagtctctcctccagacatcttatgaaaaataacccagggcaggcacagcaaaccggcttagccacaaacactgaaagattatctacaattcagaacagcccaaccaagaaaagaaagaaatacgaaagaggccattaa

SEQ ID NO: 1248 - protein, 408 aa, Homo sapiens
MASKKFAVKCGNFAVLVDLHILPQGSNKDTSWFSEQKKEEVCLLLKETIDSRVQEYLEVRKQHRPSNAEFTRSNPLSLKGYGFQITAYFLKRGIRLRCIRSTQNAELCVFPDRFVVCVSQLAFSRDLLASQNEDLTERVLHGVSDYFAECAESSLPPSAKLRRNALKEIVKRTETKSSVTSKSQTRRDTVETSSDSVIAEIARRRNDGQASSSPPSESMGQAKDSIKAAESHWGLPVQKLEKVNQTQPEDTSGQQKPHPGERLKTGLLSRSPVCSCESASPCPKQSPRVAKTQQKRRNCSSAEDFDHHGRVSLGSDRLVPREIIVEKSKAVRVLPASELSDPGLLLKQDLAKTTSKEELHVLESLSSRHLMKNNPGQAQQTGLATNTERLSTIQNSPTKKRKKYERGH

SEQ ID NO: 1249 - DNA, 4001 bp, Homo sapiens
tgccgggaggagtgggggcggtgcctcacgtctggtacagtcatcacaagcctgttcggcgggactgtgatggccagagagatgacgatcttaggatcggctgttttgactctcctgttggccggctatttggcacaacagtatttaccattgcctactcctaaagtgattggtattgatcttggcaccacctattgttctgttggggtgttttttcctggcacaggaaaagtaaaggtgattccagatgaaaatgggcatatcagcatacccagcatggtgtcttttactgacaatgatgtatatgtgggatatgaaagcgtagagctggcagattcaaatcctcaaaacacaatatatgatgccaaaagattcataggcaagatttttaccgcagaagagttggaggctgaaattggcagatacccatttaaggttttaaacaaaaatggaatggttgagttttctgtgacaagtaatgagaccatcacagtgtccccagaatatgttggctctcgactattgttgaagttaaaggaaatggcagaggcatatcttggaatgccagttgccaatgctgtcatttctgtaccagcagaatttgatctaaaacagagaaattcaacaattgaagctgctaaccttgcaggactgaagattttgagggtaataaatgaacccacagcagcagctatggcctatggtctccacaaggctgacgtcttccacgtcttggtgatagacttgggcggaggaactctagatgtgtctttactgaataaacaaggagggatgtttctaacccgagcaatgtctggaaacaataaacttggaggacaggacttcaatcagagattgcttcagtacttatataaacagatctatcaaacatatggcttcgtgccctctaggaaagaggaaatccacagattgagacaagctgtggaaatggtcaaattaaatctgactcttcatcaatctgctcagttgtcagtattactaacggtggaggagcaggacaggaaggaacctcacagtagtgacactgaactgccaaaagacaaactttcctcagcagatgaccatcgcgtgaacagtgggtttggacgtggcctttctgataagaaaagtggagaaagtcaggttttatttgaaacagaaatatcacggaaactctttgatacccttaatgaagacctctttcagaaaatactggtacccattcagcaagtattgaaagaaggccacctggaaaagactgagattgatgaggtggttttagttgggggctccactcgtattcctcggatccgtcaagtcattcaagagttctttggaaaagatcccaacacatctgtagaccctgacctagcagtagtaacgggagtggctatccaagcagggattgatggaggctcttggcctctccaagtcagtgctttagaaattcccaataagcatttacaaaaaaccaacttcaactgaattctgcagaaataatggttatttgtgaacttgtctgatgatctcttcccatttatcagattaccttttccacaaaagaaagtctctaaaatatcacagatttacctagagggcaacatttagatacaggaaaattttacatagtgttttgtcttaggattagacgtgaccagattgatcctgtttgattttggagagatcctattctaacaaatactctaaaatgataaaattgaggtacaactctcttaaaagagtatggataactatattttctggattctggaggttgataaccatatgcacttaacattatattctataaacattaagtagtgccagttatgagattcccagttcttactaaattgtattagcaggagctggtaattacttgtattatcacatgtaactaataatttgaactatacttgaaggaccgtgttgatgtcaggtatttacagtggttggaagatagcagtattattagcataagctgcatacgtaatattcagtaactgccatattatataacaaatttacattcacaaattcagtatcctgttaagtgtcatattcttgtaatctgcattctccaggagttttatgtgtttaatagatgaatttattttatttctaaaggtattcaaatgtttcagcaccatataatagaaatacccaattatattctagttcctttatgtcctgtacatcattctctgcttggatttccattattctgtttggttagagaataaaattggtaattgcatttgaagaatgtgttaatgtcataataaagccatgattgctatcttatttttgttatccgagacctttgcaaacattggcaaatagcatcaattacctactgtatttgtttctttgtttatattttcagtaagccctggggaatatagcatggaattgagctactaaatggttttggttccgttttacggagatttttcctcatatttagttttgaatgaggaaaatgtgctcaattataaaagctgtgttattgttttctattattatttttaaataatcacacttggactcttttcaaacattaggttagtttgtaatgaaagcaaaaaatttgtgaatactggaagtaacgtggaaatctaatgtggaagccattgtggcaaggtttctacaaatcggcatttggagcagagttgtttgtttttgttgtttgtttcctttaagaaaaaccacagggaccaagaaagaaaatataacagtttgatttctgtcatacccattgtatttgaagatatatggatacagattatatatatatatacatattttccttaatagaggaatgcttcatattattcaaaaattatatcctgatcacctttttttgttttttattgtaaagtatctctgctttatccattgctgaattcgataggatgttgaaatgctggtcaccaaaaaaggaaactgagcaaattcatttcaacaacatcaaaacttcagcttctcatagtaaaaagctgaatgttactaatatttttcatatctaaaaaaaaattcttagcaatgaaattgctgttaaaacacaaatttcaatcaaatacttttgtgtatagaaaatatgtatagtaggtagatagaaaagtataaaatgtttgttgaagtatcttattttagaatgaatggagaaatgccaaagatgaatccttcactgcattatgaaaatatttcacatgttctcttggactttatataaatctgtaatagattttagaattgaaaaattctttgtgaaggtcttctaaaagtgttccaatttatctcaaaatctccatatataggatcagcttaaaacataaagaaaaccttgaatttctcaaatgtttgagatgttcaagacagtctcttaatccgttaatgcttttggaaacaattgacaaaatagggcaggcagctcatctcatgtcctgaagttggaatttaaataattcctatttgcaaattagaatgacagtgttggaatttggaggcagtagttgagcatattctctagtatatagctacacctttaataaaatgaaggaatgtcttcaatcatattttagtgggctatttataaatagtcttgaagtcaatttagtttatttatttaaaagataatgcatcctgaaagggatcatttatgaataacaatctgaagtcttttcataaaaaaaattaataaactttagttgtacatttagccagtgttatttgaagtatgtaacttttaaaatattaagtgtcttgtatgattagaatatgtgaatgagtaacttattttgtatcaggaatgttttggtactgtgttttcactcaaaccactgacttaacagatactgctgtgtataacatgtactaaatattacagttattgtgcataacagattgttcctcttatatttgtgtgtatacaggcaattcatgttttaatgtaaataaataccattttgcagtttgttttttaaaaaaaaaaaaaaaaa

SEQ ID NO: 1250 - protein, 471 aa, Homo sapiens
MAREMTILGSAVLTLLLAGYLAQQYLPLPTPKVIGIDLGTTYCSVGVFFPGTGKVKVIPDENGHISIPSMVSFTDNDVYVGYESVELADSNPQNTIYDAKRFIGKIFTAEELEAEIGRYPFKVLNKNGMVEFSVTSNETITVSPEYVGSRLLLKLKEMAEAYLGMPVANAVISVPAEFDLKQRNSTIEAANLAGLKILRVINEPTAAAMAYGLHKADVFHVLVIDLGGGTLDVSLLNKQGGMFLTRAMSGNNKLGGQDFNQRLLQYLYKQIYQTYGFVPSRKEEIHRLRQAVEMVKLNLTLHQSAQLSVLLTVEEQDRKEPHSSDTELPKDKLSSADDHRVNSGFGRGLSDKKSGESQVLFETEISRKLFDTLNEDLFQKILVPIQQVLKEGHLEKTEIDEVVLVGGSTRIPRIRQVIQEFFGKDPNTSVDPDLAVVTGVAIQAGIDGGSWPLQVSALEIPNKHLQKTNFN

SEQ ID NO: 1251 - DNA, 1893 bp, Homo sapiens
attagacagcacactgctgactgttttcagttgtttctgtaacagcagaaagtgcactcactaggagtagtcagaattcaaaatgctcaagagaaagccatccaatgtttcagagaaggagaaacatcaaaaaccaaagcgaagcagcagttttgggaatttcgatcgttttcggaataattctttatcaaaaccagatgattcaactgaggcacatgaaggagatcccacaaatggaagtggagaacaaagtaaaacttcaaataatggaggcggtttgggtaaaaaaatgagagctatttcatggacaatgaagaaaaaagtgggtaaaaagtacatcaaagccctttctgaggaaaaggatgaggaagatggagagaatgcccacccatatagaaacagtgaccctgtgattgggacccacacagagaaggtgtccctcaaagccagtgactccatggatagtctctacagtggacagagctcatcaagtggcataacaagctgttcagatggtacaagtaaccgggacagctttcgactggatgacgatggcccctattcaggaccattctgtggccgtgccagagtgcatacggatttcacgccaagtccctatgacactgactccctcaaaatcaagaaaggagacatcatagacattatttgcaaaacaccaatggggatgtggacaggaatgttgaacaataaagtgggaaacttcaaattcatttatgtggatgtcatctcagaagaggaagcagcccccaagaaaataaaggcaaaccgaaggagtaacagcaaaaaatccaagactctgcaggagttcctagagaggattcatctgcaggaatacacctcaacacttttgctcaatggttatgagactctagaagatttaaaagatataaaagagagtcacctcattgaattaaatattgaaaacccagatgacagaagaaggttactatcagctgctgaaaacttccttgaagaagaaattattcaagagcaagaaaatgaacctgagcccctatccttgagctcagacatctccttaaataagtcacagttagatgactgcccaagggactctggttgctatatctcatcaggaaattcagataatggcaaagaggatctggagtctgaaaatctgtctgacatggtacataagattattatcacagagccaagtgactgaacacgcattcccaactatatatctacagatgcattccattttaactcttcttgagctaaaacgtcaaataggagaggaagataagataaatatttgtaaataaaacctaaagtttaaatgttttaatctgaataattgtacataaaattttgtatctctaacattccaaattactgtcaataaaatatatatttattattttaaatgctatgtgttaatatttcacttgcttgtattagaaaggcaaaatgtaagactttggtatgtgtgacatatgctttatttggctttattttacaagtacagtatctgcaaaaaacaaagtaaccttttttcatacctgccagttttgaatttatatatgttattgaacaaatagtaatagaggattcgctgttgaaacaagttgtccaagcaatgttatattcatttttatacttattgggaaagtgtgagttaatattggacacattttatcctgatccacagtggagttttagtaattatattttgttgatttcttcattttgttttctggtataaaagtagagataatgtgtagtcacttctgatttagtgaaaccaattgtaataattgtggaaatgttttgtctttaagtgtaaatattttaaaatttgacataccctaatgttaataataaaaagaactatttgcatattgcaaaaaa

SEQ ID NO: 1252 - protein, 373 aa, Homo sapiens
MLKRKPSNVSEKEKHQKPKRSSSFGNFDRFRNNSLSKPDDSTEAHEGDPTNGSGEQSKTSNNGGGLGKKMRAISWTMKKKVGKKYIKALSEEKDEEDGENAHPYRNSDPVIGTHTEKVSLKASDSMDSLYSGQSSSSGITSCSDGTSNRDSFRLDDDGPYSGPFCGRARVHTDFTPSPYDTDSLKIKKGDIIDIICKTPMGMWTGMLNNKVGNFKFIYVDVISEEEAAPKKIKANRRSNSKKSKTLQEFLERIHLQEYTSTLLLNGYETLEDLKDIKESHLIELNIENPDDRRRLLSAAENFLEEEIIQEQENEPEPLSLSSDISLNKSQLDDCPRDSGCYISSGNSDNGKEDLESENLSDMVHKIIITEPSD

SEQ ID NO: 1253 - DNA, 3696 bp, Homo sapiens
accagacagttcttaaattagcaagccttcaaaaccaaaaatggggtcgaaaagaggcatatcttctaggcatcattctctcagctcctatgaaatcatgtttgcagctctctttgccatattggtagtgctctgtgctggattaattgcagtatcctgcctgacaatcaaggaatcccaacgaggtgcagcacttggacagagtcatgaagccagagcgacatttaaaataacatccggagttacatataatcctaatttgcaagacaaactctcagtggatttcaaagttcttgcttttgaccttcagcaaatgatagatgagatctttctatcaagcaatctgaagaatgaatataagaactcaagagttttacaatttgaaaatggcagcattatagtcgtatttgaccttttctttgcccagtgggtgtcagatcaaaatgtaaaagaagaactgattcaaggccttgaagcaaataaatccagccaactggtcactttccatattgatttgaacagcgttgatatcctagacaagctaacaaccaccagtcatctggcaactccaggaaatgtctcaatagagtgcctgcctggttcaagtccttgtactgatgctctaacgtgtataaaagctgatttattttgtgatggagaagtaaactgtccagatggttctgacgaagacaataaaatgtgtgccacagtttgtgatggaagatttttgttaactggatcatctgggtctttccaggctactcattatccaaaaccttctgaaacaagtgttgtctgccagtggatcatacgtgtaaaccaaggactttccattaaactgagcttcgatgattttaatacatattatacagatatattagatatttatgaaggtgtaggatcaagcaagattttaagagcttctatttgggaaactaatcctggcacaataagaattttttccaaccaagttactgccacctttcttatagaatctgatgaaagtgattatgttggctttaatgcaacatatactgcatttaacagcagtgagcttaataattatgagaaaattaattgtaactttgaggatggcttttgtttctgggtccaggatctaaatgatgataatgaatgggaaaggattcagggaagcaccttttctccttttactggacccaattttgaccacacttttggcaatgcttcaggattttacatttctaccccaactggaccaggagggagacaagaacgagtggggcttttaagcctccctttggaccccactttggagccagcttgccttagtttctggtatcatatgtatggtgaaaatgtccataaattaagcattaatatcagcaatgaccaaaatatggagaagacagttttccaaaaggaaggaaattatggagacaattggaattatggacaagtaaccctaaatgaaacagttaaatttaaggttgcttttaatgcttttaaaaacaagatcctgagtgatattgcgttggatgacattagcctaacatatgggatttgcaatgggagtctttatccagaaccaactttggtgccaactcctccaccagaacttcctacggactgtggaggaccttttgagctgtgggagccaaatacaacattcagttctacgaactttccaaacagctaccctaatctggctttctgtgtttggattttaaatgcacaaaaaggaaagaatatacaacttcattttcaagaatttgacttagaaaatattaacgatgtagttgaaataagagatggtgaagaagctgattccttgctcttagctgtgtacacagggcctggcccagtaaaggatgtgttctctaccaccaacagaatgactgtgcttctcatcactaacgatgtgttggcaagaggagggtttaaagcaaactttactactggctatcacttggggattccagagccatgcaaggcagaccattttcaatgtaaaaatggagagtgtgttccactggtgaatctctgtgacggtcatctgcactgtgaggatggctcagatgaagcagattgtgtgcgttttttcaatggcacaacgaacaacaatggtttagtgcggttcagaatccagagcatatggcatacagcttgtgctgagaactggaccacccagatttcaaatgatgtttgtcaactgctgggactagggagtggaaactcatcaaagccaatcttctctaccgatggtggaccatttgtcaaattaaacacagcacctgatggccacttaatactaacacccagtcaacagtgtttacaggattccttgattcggttacagtgtaaccataaatcttgtggaaaaaaactggcagctcaagacatcaccccaaagattgttggaggaagtaatgccaaagaaggggcctggccctgggttgtgggtctgtattatggcggccgactgctctgcggcgcatctctcgtcagcagtgactggctggtgtccgccgcacactgcgtgtatgggagaaacttagagccatccaagtggacagcaatcctaggcctgcatatgaaatcaaatctgacctctcctcaaacagtccctcgattaatagatgaaattgtcataaaccctcattacaataggcgaagaaaggacaacgacattgccatgatgcatctggaatttaaagtgaattacacagattacatacaacctatttgtttaccggaagaaaatcaagtttttcctccaggaagaaattgttctattgctggttgggggacggttgtatatcaaggtactactgcaaacatattgcaagaagctgatgttcctcttctatcaaatgagagatgccaacagcagatgccagaatataacattactgaaaatatgatatgtgcaggctatgaagaaggaggaatagattcttgtcagggggattcaggaggaccattaatgtgccaagaaaacaacaggtggttccttgctggtgtgacctcatttggatacaagtgtgccctgcctaatcgccccggagtgtatgccagggtctcaaggtttaccgaatggatacaaagttttctacattagcgcatttcttaaactaaacaggaaagtcgcattattttcccattctactctagaaagcatggaaattaagtgtttcgtacaaaaattttaaaaagttaccaaaggtttttattcttacctatgtcaatgaaatgctagggggccagggaaacaaaattttaaaaataataaaattcaccatagcaatacagaataactttaaaataccattaaatacatttgtatttcattgtgaacaggtatttcttcacagatctcatttttaaaattcttaatgattatttttattacttactgttgtttaaagggatgttattttaaagcatataccatacacttaagaaatttgagcagaatttaaaaaagaaagaaaataaattgtttttcccaaagtatgtcactgttggaaataaactgccataaattttctagttccagtttagtttgctgctattagcagaaactcaattgtttctctgtcttttctatcaaaattttcaacatatgcataaccttagtattttcccaaccaatagaaactatttattgtaagcttatgtcacaggcctggactaaattgattttacgttcctctt

SEQ ID NO: 1254 - protein, 1019 aa, Homo sapiens
MGSKRGISSRHHSLSSYEIMFAALFAILVVLCAGLIAVSCLTIKESQRGAALGQSHEARATFKITSGVTYNPNLQDKLSVDFKVLAFDLQQMIDEIFLSSNLKNEYKNSRVLQFENGSIIVVFDLFFAQWVSDQNVKEELIQGLEANKSSQLVTFHIDLNSVDILDKLTTTSHLATPGNVSIECLPGSSPCTDALTCIKADLFCDGEVNCPDGSDEDNKMCATVCDGRFLLTGSSGSFQATHYPKPSETSVVCQWIIRVNQGLSIKLSFDDFNTYYTDILDIYEGVGSSKILRASIWETNPGTIRIFSNQVTATFLIESDESDYVGFNATYTAFNSSELNNYEKINCNFEDGFCFWVQDLNDDNEWERIQGSTFSPFTGPNFDHTFGNASGFYISTPTGPGGRQERVGLLSLPLDPTLEPACLSFWYHMYGENVHKLSINISNDQNMEKTVFQKEGNYGDNWNYGQVTLNETVKFKVAFNAFKNKILSDIALDDISLTYGICNGSLYPEPTLVPTPPPELPTDCGGPFELWEPNTTFSSTNFPNSYPNLAFCVWILNAQKGKNIQLHFQEFDLENINDVVEIRDGEEADSLLLAVYTGPGPVKDVFSTTNRMTVLLITNDVLARGGFKANFTTGYHLGIPEPCKADHFQCKNGECVPLVNLCDGHLHCEDGSDEADCVRFFNGTTNNNGLVRFRIQSIWHTACAENWTTQISNDVCQLLGLGSGNSSKPIFSTDGGPFVKLNTAPDGHLILTPSQQCLQDSLIRLQCNHKSCGKKLAAQDITPKIVGGSNAKEGAWPWVVGLYYGGRLLCGASLVSSDWLVSAAHCVYGRNLEPSKWTAILGLHMKSNLTSPQTVPRLIDEIVINPHYNRRRKDNDIAMMHLEFKVNYTDYIQPICLPEENQVFPPGRNCSIAGWGTVVYQGTTANILQEADVPLLSNERCQQQMPEYNITENMICAGYEEGGIDSCQGDSGGPLMCQENNRWFLAGVTSFGYKCALPNRPGVYARVSRFTEWIQSFLH

SEQ ID NO: 1255 - DNA, 3627 bp, Homo sapiens
tttgggatggtgacttgacatttaaatgtattaccattaggccctatctgtcaaaaggtctttcaggacatcaaggcacgcaagtacacagcctctgtaaaccagaaccagtccattccatagtccatgatcttcttatcaggagaaagttgttgaaatcagtctcttgtctaatcaaagctgtagttatggcttttggctggattagtgtccgatgttggatgttccagttggaattggcaaagggcctcttggactcgtccccgactgtactgggcgttggcggcgagtccgcgaacactgcgcatgcgcgagccggaagctgccgcccgcggcggaaggggcggacccgggagactgaggacttggattgcttaaggacaccaggcaggcgcgacagccttcagcctctccctctgcagttttggccggttcctttaacttgccttcatctggggctgtttggtatttccacgtgccttgggcccgcccactgcagcctccatcttggaagcggccgccggcgcctagattgagcatttccacagaaattacagttttgtcctttttgaaaaaatagaactgtatttcagaaaaaagaaactacagttttagcatgcagaaaggaaaagggagaacaagccggatcagaagacgaaaactctgcggaagttctgaatcaagaggagagatggggtctttctgtgttgggcaggctgggctcaaactcctggcctcaagcagtcctcccgccttggcctcccaaatgctgggaatacagaatgaatgagagccacaagtctgaatttatagagctgaggaagtggctgaaagctaggaagtttcaagattcaaacttagcgcctgcttgttttccaggtacaggaagagggctgatgagtcaaacatccctgcaggagggacagatgattatttcgttgcctgagagttgcctgctcaccacggacacagtgattcgaagctacttaggggcatacattactaagtggaagcctcctccatctcctctgctggcgctgtgcacctttttagtttcagaaaagcatgctgggcaccgatctctttggaagccttacctggagattttacccaaggcgtatacctgccctgtttgtttggagccggaagtggtgaaccttcttcccaaatctttaaaagcaaaggctgaagagcagagagcccacgtgcaggagttctttgcttcctccagagactttttctcttctctgcagcctctgtttgcggaggctgttgacagcatcttcagctacagtgccctgctgtgggcttggtgcaccgtcaacaccagagccgtgtacctgaggcccaggcagcgggaatgcctttctgcagagccggacacctgtgcactcgctccgtacctggacctgctgaatcatagcccacatgtccaggtaaaagcagcgtttaatgaagaaactcattcttacgaaattagaacgacttcacgttggagaaagcatgaagaggtattcatctgttacggccctcacgataatcaacggctgttcctggaatacggatttgtttctgtccataatcctcatgcttgtgtttatgtctcaagagaaatacttgttaaatatcttccatcaacagataaacagatggacaaaaagatttctattttaaaggatcatggctatatagaaaatttgacatttggatgggatggaccatcttggaggctactcacagcccttaagttgttatgtctggaagctgagaaatttacatgctggaaaaaagtacttcttggggaggtaatttcagatacgaatgagaagacaagtttggacatagcccagaaaatatgctattatttcatagaagagactaatgctgtgcttcaaaaggtgtctcatatgaaggatgaaaaagaggccctgataaaccaactaactttggtggaatccttgtggacggaagagctaaagattctcagggcatctgccgagaccctgcacagtttgcaaacagcttttacctgatttcaccgaagcgcatttggtcacctcctctggtgggtgttagtcacacattttagactaaggtttgatggactaaatttatatagtttagagtcgatgagttgtgtctactcaacaattaggaacttaatccttttccttttgcttttcctacagaaacaaaagttaattttgaagagcatcatcatgggctggggtggtggctgcccccaggacatgcaggatttctgcagggggcagcacaggttctgggattgtgaggctgtgagtgaaggtggacaagctgtctggatggcaggtctaatgctcttccgaataaagtgctgaactgtgaggagagaggcggactgtgaggcagccaggagccagctgcgtccgtgtgtggtctgtcaccacggggcctgcttcttatctgacacagcagctatcagagtctagtggttgtgcttttaagatgctctgataccattgggttaaggggcagattggcggtgggtgtggggcagtgtgaggtagtcctggatccccgccagggtggcccagacgccagcccttccctgtgtggctgcactgaggtgggtgttgaagagccccctaggggacacacagcttccaggaggagggaatgtcctctaagcatgctcctggcctctcaaggtggcgcttgtctaattattcacttgggaagaatgactagctcagccagcggctctttctgctttgttctggcgactttcctgggcaggcctttccacctggggagctggctcatcctgcacagctgggccgtggtgggcctgtctgcttgattctggggttcagtgtaggtcagctgatggcgaaccatggtggtggtttggcttctgttcttattcttgagttttgataccacgcagaccttgggtggggagagcttcctgcacagctctcagcggcctgtggccttggaactgcctgcgtaagtaacggaggggctgctggtcctgttcaggcccgtgctggggacgccgcttagacaatgttgcccagagtcctgtttaccctcccagggttcattcttcccaagaactcaaattcctttctcattggagcctagtgaaaccaaatgaacgggacctgctggcctcaggaggcaggcagagtttaaaataaaactttctcatgatttcttgaacatctttccctgtttgtatatacactttgtgtttatttttcagtagctgcagtatattttttttcaatattcagtataatgcagtgtatttcatcatatgctgtatggagagtgggcagacttctgtggagggcccgatagtaaccatttgaagctttctggacctgtggtcttagtcccagcgattctgcagagcggccatcggcagcatgtcaaccatttgcatggctgggctccagggaaactactgacaacgacaggtggtgggccatagtttcctgacccctgtgctatgccagaatttctttttcctcttccctatgagtggacctaaatatgttaattccttttcacctttcaaaacggacagccccttgaacattaaaaacttcgcagaccctaaaaaaaaaaaaaaaaaaa

SEQ ID NO: 1256 - protein, 416 aa, Homo sapiens
MNESHKSEFIELRKWLKARKFQDSNLAPACFPGTGRGLMSQTSLQEGQMIISLPESCLLTTDTVIRSYLGAYITKWKPPPSPLLALCTFLVSEKHAGHRSLWKPYLEILPKAYTCPVCLEPEVVNLLPKSLKAKAEEQRAHVQEFFASSRDFFSSLQPLFAEAVDSIFSYSALLWAWCTVNTRAVYLRPRQRECLSAEPDTCALAPYLDLLNHSPHVQVKAAFNEETHSYEIRTTSRWRKHEEVFICYGPHDNQRLFLEYGFVSVHNPHACVYVSREILVKYLPSTDKQMDKKISILKDHGYIENLTFGWDGPSWRLLTALKLLCLEAEKFTCWKKVLLGEVISDTNEKTSLDIAQKICYYFIEETNAVLQKVSHMKDEKEALINQLTLVESLWTEELKILRASAETLHSLQTAFT

SEQ ID NO: 1257 - DNA, 1132 bp, Homo sapiens
gttgcccgggtaacgggagcagagtcggcgggattgagcatttccacagaaattacagttttgtcctttttgaaaaaatagaactgtatttcagaaaaaagaaactacagttttagcatgcagaaaggaaaagggagaacaagccggatcagaagacgaaaactctgcggaagttctgaatcaagaggagtgaatgagagccacaagtctgaatttatagagctgaggaagtggctgaaagctaggaagtttcaagattcaaacttagcgcctgcttgttttccaggtacaggaagagggctgatgagtcaaacatccctgcaggagggacagatgattatttcgttgcctgagagttgcctgctcaccacggacacagtgattcgaagctacttaggggcatacattactaagtggaagcctcctccatctcctctgctggcgctgtgcacctttttagtttcagaaaagcatgctgggcaccgatctctttggaagccttacctggagattttacccaaggcgtatacctgccctgtttgtttggagccggaagtggtgaaccttcttcccaaatctttaaaagcaaaggctgaagagcagagagcccacgtgcaggagttctttgcttcctccagagactttttctcttctctgcagcctctgtttgcggaggctgttgacagcatcttcagctacagtgccctgctgtgggcttggtgcaccgtcaacaccagagccgtgtacctgaggcccaggcagcgggaatgcctttctgcagagccggacacctgtgcactcgctccgtacctggacctgctgaatcatagcccacatgtccaggtaaaagcagcgtttaatgaagaaactcattcttacgaaattagaacgacttcacgttggagaaagcatgaagaggtattcatctgttacggccctcacgataatcaacggctgttcctggaatacggatttgtttctgtccataatcctcatgcttgtgtttatgtctcaagaggttggaatcaactttgttcttaacattaacactatataatttttttccccatttggagatgtgtattttcagttttaataaaaatatcaaaaccttaaaaaaaaaaaaaaaaaa

SEQ ID NO: 1258 - protein, 307 aa, Homo sapiens
MQKGKGRTSRIRRRKLCGSSESRGVNESHKSEFIELRKWLKARKFQDSNLAPACFPGTGRGLMSQTSLQEGQMIISLPESCLLTTDTVIRSYLGAYITKWKPPPSPLLALCTFLVSEKHAGHRSLWKPYLEILPKAYTCPVCLEPEVVNLLPKSLKAKAEEQRAHVQEFFASSRDFFSSLQPLFAEAVDSIFSYSALLWAWCTVNTRAVYLRPRQRECLSAEPDTCALAPYLDLLNHSPHVQVKAAFNEETHSYEIRTTSRWRKHEEVFICYGPHDNQRLFLEYGFVSVHNPHACVYVSRGWNQLCS

SEQ ID NO: 1259 - DNA, 1212 bp, Homo sapiens
gacagagggcttcaggcacgcggctgctgctgccactgctgctctgagacaaggtggatgagtctgctgccggatcaagaaaaagaactgtatttcagaaaaaagaaactacagttttagcatgcagaaaggaaaagggagaacaagccggatcagaagacgaaaactctgcggaagttctgaatcaagaggagagatggggtctttctgtgttgggcaggctgggctcaaactcctggcctcaagcagtcctcccgccttggcctcccaaatgctgggaatacagaatgaatgagagccacaagtctgaatttatagagctgaggaagtggctgaaagctaggaagtttcaagattcaaacttagcgcctgcttgttttccaggtacaggaagagggctgatgagtcaaacatccctgcaggagggacagatgattatttcgttgcctgagagttgcctgctcaccacggacacagtgattcgaagctacttaggggcatacattactaagtggaagcctcctccatctcctctgctggcgctgtgcacctttttagtttcagaaaagcatgctgggcaccgatctctttggaagccttacctggagattttacccaaggcgtatacctgccctgtttgtttggagccggaagtggtgaaccttcttcccaaatctttaaaagcaaaggctgaagagcagagagcccacgtgcaggagttctttgcttcctccagagactttttctcttctctgcagcctctgtttgcggaggctgttgacagcatcttcagctacagtgccctgctgtgggcttggtgcaccgtcaacaccagagccgtgtacctgaggcccaggcagcgggaatgcctttctgcagagccggacacctgtgcactcgctccgtacctggacctgctgaatcatagcccacatgtccaggtaaaagcagcgtttaatgaagaaactcattcttacgaaattagaacgacttcacgttggagaaagcatgaagaggtattcatctgttacggccctcacgataatcaacggctgttcctggaatacggatttgtttctgtccataatcctcatgcttgtgtttatgtctcaagaggttggaatcaactttgttcttaacattaacactatataatttttttccccatttggagatgtgtattttcagttttaataaaaatatcaaaacctt

SEQ ID NO: 1260 - protein, 283 aa, Homo sapiens
MNESHKSEFIELRKWLKARKFQDSNLAPACFPGTGRGLMSQTSLQEGQMIISLPESCLLTTDTVIRSYLGAYITKWKPPPSPLLALCTFLVSEKHAGHRSLWKPYLEILPKAYTCPVCLEPEVVNLLPKSLKAKAEEQRAHVQEFFASSRDFFSSLQPLFAEAVDSIFSYSALLWAWCTVNTRAVYLRPRQRECLSAEPDTCALAPYLDLLNHSPHVQVKAAFNEETHSYEIRTTSRWRKHEEVFICYGPHDNQRLFLEYGFVSVHNPHACVYVSRGWNQLCS

SEQ ID NO: 1261 - DNA, 1208 bp, Homo sapiens
gttgcccgggtaacgggagcagagtcggcgggattgagcatttccacagaaattacagttttgtcctttttgaaaaaatagaactgtatttcagaaaaaagaaactacagttttagcatgcagaaaggaaaagggagaacaagccggatcagaagacgaaaactctgcggaagttctgaatcaagaggagagatggggtctttctgtgttgggcaggctgggctcaaactcctggcctcaagcagtcctcccgccttggcctcccaaatgctgggaatacagaatgaatgagagccacaagtctgaatttatagagctgaggaagtggctgaaagctaggaagtttcaagattcaaacttagcgcctgcttgttttccaggtacaggaagagggctgatgagtcaaacatccctgcaggagggacagatgattatttcgttgcctgagagttgcctgctcaccacggacacagtgattcgaagctacttaggggcatacattactaagtggaagcctcctccatctcctctgctggcgctgtgcacctttttagtttcagaaaagcatgctgggcaccgatctctttggaagccttacctggagattttacccaaggcgtatacctgccctgtttgtttggagccggaagtggtgaaccttcttcccaaatctttaaaagcaaaggctgaagagcagagagcccacgtgcaggagttctttgcttcctccagagactttttctcttctctgcagcctctgtttgcggaggctgttgacagcatcttcagctacagtgccctgctgtgggcttggtgcaccgtcaacaccagagccgtgtacctgaggcccaggcagcgggaatgcctttctgcagagccggacacctgtgcactcgctccgtacctggacctgctgaatcatagcccacatgtccaggtaaaagcagcgtttaatgaagaaactcattcttacgaaattagaacgacttcacgttggagaaagcatgaagaggtattcatctgttacggccctcacgataatcaacggctgttcctggaatacggatttgtttctgtccataatcctcatgcttgtgtttatgtctcaagaggttggaatcaactttgttcttaacattaacactatataatttttttccccatttggagatgtgtattttcagttttaataaaaatatcaaaacctt

SEQ ID NO: 1262 - protein, 283 aa, Homo sapiens; identical to SEQ ID NO: 1260

SEQ ID NO: 1263 - DNA, 3271 bp, Homo sapiens
tttgggatggtgacttgacatttaaatgtattaccattaggccctatctgtcaaaaggtctttcaggacatcaaggcacgcaagtacacagcctctgtaaaccagaaccagtccattccatagtccatgatcttcttatcaggagaaagttgttgaaatcagtctcttgtctaatcaaagctgtagttatggcttttggctggattagtgtccgatgttggatgttccagttggaattggcaaagggcctcttggactcgtccccgactgtactgggcgttggcggcgagtccgcgaacactgcgcatgcgcgagccggaagctgccgcccgcggcggaaggggcggacccgggagactgaggacttggattgcttaaggacaccaggcaggcgcgacagccttcagcctctccctctgcagttttggccggttcctttaacttgccttcatctggggctgtttggtatttccacgtgccttgggcccgcccactgcagcctccatcttggaagcggccgccggcgcctagaactgtatttcagaaaaaagaaactacagttttagcatgcagaaaggaaaagggagaacaagccggatcagaagacgaaaactctgcggaagttctgaatcaagaggagtgaatgagagccacaagtctgaatttatagagctgaggaagtggctgaaagctaggaagtttcaagattcaaacttagcgcctgcttgttttccaggtacaggaagagggctgatgagtcaaacatccctgcaggtggaagcctcctccatctcctctgctggcgctgtgcacctttttagtttcagaaaagcatgctgggcaccgatctctttggaagccttacctggagattttacccaaggcgtatacctgccctgtttgtttggagccggaagtggtgaaccttcttcccaaatctttaaaagcaaaggctgaagagcagagagcccacgtgcaggagttctttgcttcctccagagactttttctcttctctgcagcctctgtttgcggaggctgttgacagcatcttcagctacagtgccctgctgtgggcttggtgcaccgtcaacaccagagccgtgtacctgaggcccaggcagcgggaatgcctttctgcagagccggacacctgtgcactcgctccgtacctggacctgctgaatcatagcccacatgtccaggtaaaagcagcgtttaatgaagaaactcattcttacgaaattagaacgacttcacgttggagaaagcatgaagaggtattcatctgttacggccctcacgataatcaacggctgttcctggaatacggatttgtttctgtccataatcctcatgcttgtgtttatgtctcaagagaaatacttgttaaatatcttccatcaacagataaacagatggacaaaaagatttctattttaaaggatcatggctatatagaaaatttgacatttggatgggatggaccatcttggaggctactcacagcccttaagttgttatgtctggaagctgagaaatttacatgctggaaaaaagtacttcttggggaggtaatttcagatacgaatgagaagacaagtttggacatagcccagaaaatatgctattatttcatagaagagactaatgctgtgcttcaaaaggtgtctcatatgaaggatgaaaaagaggccctgataaaccaactaactttggtggaatccttgtggacggaagagctaaagattctcagggcatctgccgagaccctgcacagtttgcaaacagcttttacctgatttcaccgaagcgcatttggtcacctcctctgaaacaaaagttaattttgaagagcatcatcatgggctggggtggtggctgcccccaggacatgcaggatttctgcagggggcagcacaggttctgggattgtgaggctgtgagtgaaggtggacaagctgtctggatggcaggtctaatgctcttccgaataaagtgctgaactgtgaggagagaggcggactgtgaggcagccaggagccagctgcgtccgtgtgtggtctgtcaccacggggcctgcttcttatctgacacagcagctatcagagtctagtggttgtgcttttaagatgctctgataccattgggttaaggggcagattggcggtgggtgtggggcagtgtgaggtagtcctggatccccgccagggtggcccagacgccagcccttccctgtgtggctgcactgaggtgggtgttgaagagccccctaggggacacacagcttccaggaggagggaatgtcctctaagcatgctcctggcctctcaaggtggcgcttgtctaattattcacttgggaagaatgactagctcagccagcggctctttctgctttgttctggcgactttcctgggcaggcctttccacctggggagctggctcatcctgcacagctgggccgtggtgggcctgtctgcttgattctggggttcagtgtaggtcagctgatggcgaaccatggtggtggtttggcttctgttcttattcttgagttttgataccacgcagaccttgggtggggagagcttcctgcacagctctcagcggcctgtggccttggaactgcctgcgtaagtaacggaggggctgctggtcctgttcaggcccgtgctggggacgccgcttagacaatgttgcccagagtcctgtttaccctcccagggttcattcttcccaagaactcaaattcctttctcattggagcctagtgaaaccaaatgaacgggacctgctggcctcaggaggcaggcagagtttaaaataaaactttctcatgatttcttgaacatctttccctgtttgtatatacactttgtgtttatttttcagtagctgcagtatattttttttcaatattcagtataatgcagtgtatttcatcatatgctgtatggagagtgggcagacttctgtggagggcccgatagtaaccatttgaagctttctggacctgtggtcttagtcccagcgattctgcagagcggccatcggcagcatgtcaaccatttgcatggctgggctccagggaaactactgacaacgacaggtggtgggccatagtttcctgacccctgtgctatgccagaatttctttttcctcttccctatgagtggacctaaatatgttaattccttttcacctttcaaaacggacagccccttgaacattaaaaacttcgcagaccctaaaaaaaaaaaaaaaaaaa

SEQ ID NO: 1264 - protein, 129 aa, Homo sapiens
MQKGKGRTSRIRRRKLCGSSESRGVNESHKSEFIELRKWLKARKFQDSNLAPACFPGTGRGLMSQTSLQVEASSISSAGAVHLFSFRKACWAPISLEALPGDFTQGVYLPCLFGAGSGEPSSQIFKSKG

SEQ ID NO: 1265 - DNA, 3360 bp, Homo sapiens
tttgggatggtgacttgacatttaaatgtattaccattaggccctatctgtcaaaaggtctttcaggacatcaaggcacgcaagtacacagcctctgtaaaccagaaccagtccattccatagtccatgatcttcttatcaggagaaagttgttgaaatcagtctcttgtctaatcaaagctgtagttatggcttttggctggattagtgtccgatgttggatgttccagttggaattggcaaagggcctcttggactcgtccccgactgtactgggcgttggcggcgagtccgcgaacactgcgcatgcgcgagccggaagctgccgcccgcggcggaaggggcggacccgggagactgaggacttggattgcttaaggacaccaggcaggcgcgacagccttcagcctctccctctgcagttttggccggttcctttaacttgccttcatctggggctgtttggtatttccacgtgccttgggcccgcccactgcagcctccatcttggaagcggccgccggcgcctagaactgtatttcagaaaaaagaaactacagttttagcatgcagaaaggaaaagggagaacaagccggatcagaagacgaaaactctgcggaagttctgaatcaagaggagtgaatgagagccacaagtctgaatttatagagctgaggaagtggctgaaagctaggaagtttcaagattcaaacttagcgcctgcttgttttccaggtacaggaagagggctgatgagtcaaacatccctgcaggagggacagatgattatttcgttgcctgagagttgcctgctcaccacggacacagtgattcgaagctacttaggggcatacattactaagtggaagcctcctccatctcctctgctggcgctgtgcacctttttagtttcagaaaagcatgctgggcaccgatctctttggaagccttacctggagattttacccaaggcgtatacctgccctgtttgtttggagccggaagtggtgaaccttcttcccaaatctttaaaagcaaaggctgaagagcagagagcccacgtgcaggagttctttgcttcctccagagactttttctcttctctgcagcctctgtttgcggaggctgttgacagcatcttcagctacagtgccctgctgtgggcttggtgcaccgtcaacaccagagccgtgtacctgaggcccaggcagcgggaatgcctttctgcagagccggacacctgtgcactcgctccgtacctggacctgctgaatcatagcccacatgtccaggtaaaagcagcgtttaatgaagaaactcattcttacgaaattagaacgacttcacgttggagaaagcatgaagaggtattcatctgttacggccctcacgataatcaacggctgttcctggaatacggatttgtttctgtccataatcctcatgcttgtgtttatgtctcaagagaaatacttgttaaatatcttccatcaacagataaacagatggacaaaaagatttctattttaaaggatcatggctatatagaaaatttgacatttggatgggatggaccatcttggaggctactcacagcccttaagttgttatgtctggaagctgagaaatttacatgctggaaaaaagtacttcttggggaggtaatttcagatacgaatgagaagacaagtttggacatagcccagaaaatatgctattatttcatagaagagactaatgctgtgcttcaaaaggtgtctcatatgaaggatgaaaaagaggccctgataaaccaactaactttggtggaatccttgtggacggaagagctaaagattctcagggcatctgccgagaccctgcacagtttgcaaacagcttttacctgatttcaccgaagcgcatttggtcacctcctctgaaacaaaagttaattttgaagagcatcatcatgggctggggtggtggctgcccccaggacatgcaggatttctgcagggggcagcacaggttctgggattgtgaggctgtgagtgaaggtggacaagctgtctggatggcaggtctaatgctcttccgaataaagtgctgaactgtgaggagagaggcggactgtgaggcagccaggagccagctgcgtccgtgtgtggtctgtcaccacggggcctgcttcttatctgacacagcagctatcagagtctagtggttgtgcttttaagatgctctgataccattgggttaaggggcagattggcggtgggtgtggggcagtgtgaggtagtcctggatccccgccagggtggcccagacgccagcccttccctgtgtggctgcactgaggtgggtgttgaagagccccctaggggacacacagcttccaggaggagggaatgtcctctaagcatgctcctggcctctcaaggtggcgcttgtctaattattcacttgggaagaatgactagctcagccagcggctctttctgctttgttctggcgactttcctgggcaggcctttccacctggggagctggctcatcctgcacagctgggccgtggtgggcctgtctgcttgattctggggttcagtgtaggtcagctgatggcgaaccatggtggtggtttggcttctgttcttattcttgagttttgataccacgcagaccttgggtggggagagcttcctgcacagctctcagcggcctgtggccttggaactgcctgcgtaagtaacggaggggctgctggtcctgttcaggcccgtgctggggacgccgcttagacaatgttgcccagagtcctgtttaccctcccagggttcattcttcccaagaactcaaattcctttctcattggagcctagtgaaaccaaatgaacgggacctgctggcctcaggaggcaggcagagtttaaaataaaactttctcatgatttcttgaacatctttccctgtttgtatatacactttgtgtttatttttcagtagctgcagtatattttttttcaatattcagtataatgcagtgtatttcatcatatgctgtatggagagtgggcagacttctgtggagggcccgatagtaaccatttgaagctttctggacctgtggtcttagtcccagcgattctgcagagcggccatcggcagcatgtcaaccatttgcatggctgggctccagggaaactactgacaacgacaggtggtgggccatagtttcctgacccctgtgctatgccagaatttctttttcctcttccctatgagtggacctaaatatgttaattccttttcacctttcaaaacggacagccccttgaacattaaaaacttcgcagaccctaaaaaaaaaaaaaaaaaaa

SEQ ID NO: 1266 - protein, 440 aa, Homo sapiens
MQKGKGRTSRIRRRKLCGSSESRGVNESHKSEFIELRKWLKARKFQDSNLAPACFPGTGRGLMSQTSLQEGQMIISLPESCLLTTDTVIRSYLGAYITKWKPPPSPLLALCTFLVSEKHAGHRSLWKPYLEILPKAYTCPVCLEPEVVNLLPKSLKAKAEEQRAHVQEFFASSRDFFSSLQPLFAEAVDSIFSYSALLWAWCTVNTRAVYLRPRQRECLSAEPDTCALAPYLDLLNHSPHVQVKAAFNEETHSYEIRTTSRWRKHEEVFICYGPHDNQRLFLEYGFVSVHNPHACVYVSREILVKYLPSTDKQMDKKISILKDHGYIENLTFGWDGPSWRLLTALKLLCLEAEKFTCWKKVLLGEVISDTNEKTSLDIAQKICYYFIEETNAVLQKVSHMKDEKEALINQLTLVESLWTEELKILRASAETLHSLQTAFT

SEQ ID NO: 1267 - DNA, 1245 bp, Homo sapiens
cgggcgtgtaacccacgggtgcgcgcccacgaccgccagactcgagcagtctctggaacacgctgcggggctcccgggcctgagccaggtctgttctccacgcaggtgttccgcgcgccccgttcagccatgtcgtccggcatccatgtagcgctggtgactggaggcaacaagggcatcggcttggccatcgtgcgcgacctgtgccggctgttctcgggggacgtggtgctcacggcgcgggacgtgacgcggggccaggcggccgtacagcagctgcaggcggagggcctgagcccgcgcttccaccagctggacatcgacgatctgcagagcatccgcgccctgcgcgacttcctgcgcaaggagtacgggggcctggacgtgctggtcaacaacgcgggcatcgccttcaaggttgctgatcccacaccctttcatattcaagctgaagtgacgatgaaaacaaatttctttggtacccgagatgtgtgcacagaattactccctctaataaaaccccaagggagagtggtgaacgtatctagcatcatgagcgtcagagcccttaaaagctgcagcccagagctgcagcagaagttccgcagtgagaccatcactgaggaggagctggtggggctcatgaacaagtttgtggaggatacaaagaagggagtgcaccagaaggagggctggcccagcagcgcatacggggtgacgaagattggcgtcaccgttctgtccaggatccacgccaggaaactgagtgagcagaggaaaggggacaagatcctcctgaatgcctgctgcccagggtgggtgagaactgacatggcgggacccaaggccaccaagagcccagaagaaggtgcagagacccctgtgtacttggcccttttgcccccagatgctgagggtccccatggacaatttgtttcagagaagagagttgaacagtggtgagctgggctcacagctccatccatgggccccattttgtaccttgtcctgagttggtccaaagggcatttacaatgtcataaatatccttatataagaaaaaaaatgatctcttatcaattagcactcactaatgtactactaattgagcaacctacgcactcagttgactacgtaaatctgtcaggtcttttgtgatttcctctgatgcaggagaggaaaaattgtaattgatgaaaataatgaatgaaaatcaacagatgaataaatggttctttataagtg

SEQ ID NO: 1268 - protein, 277 aa, Homo sapiens
MSSGIHVALVTGGNKGIGLAIVRDLCRLFSGDVVLTARDVTRGQAAVQQLQAEGLSPRFHQLDIDDLQSIRALRDFLRKEYGGLDVLVNNAGIAFKVADPTPFHIQAEVTMKTNFFGTRDVCTELLPLIKPQGRVVNVSSIMSVRALKSCSPELQQKFRSETITEEELVGLMNKFVEDTKKGVHQKEGWPSSAYGVTKIGVTVLSRIHARKLSEQRKGDKILLNACCPGWVRTDMAGPKATKSPEEGAETPVYLALLPPDAEGPHGQFVSEKRVEQW

SEQ ID NO: 1269 - DNA, 1128 bp, Homo sapiens
gcgtgggcagggggcgggcccgggagttggaacagagggcacagacggcccctcctcggaggggagggaccggagccggggcctttttctttaagactcgcagcactggatcccagaacttagtctgcgcggcggcattgacactagctgggctcctcggggcgcgccccaggtggtccgaagcccggtccgccctccacgcaggtgccccgcgctccccgctcagccatgtcgtcctgcagccgcgtggcgctggtgaccggggccaacaggggcatcggcttggccatcgcgcgcgaactgtgccgacagttctctggggatgtggtgctcaccgcgcgggacgtggcgcggggccaggcggccgtgcagcagctgcaggcggagggcctgagcccgcgcttccaccaactggacatcgacgacttgcagagcatccgcgccctgcgcgacttcctgcgcaaggagtacggggggctcaacgtactggtcaacaacgcggccgtcgccttcaagagtgatgatccaatgccctttgacattaaagctgagatgacactgaagacaaatttttttgccactagaaacatgtgcaacgagttactgccgataatgaaacctcatgggagagtggtgaatatcagtagtttgcagtgtttaagggcttttgaaaactgcagtgaagatctgcaggaaaggttccacagtgagacactcacagaaggagacctggtggatctcatgaaaaagtttgtggaggacacaaaaaatgaggtgcatgagagggaaggctggcccaactcaccttatggggtgtccaagttgggggtcacggtcttatcgaggatcctggccaggcgtctggatgagaagaggaaagctgacaggattctggtgaatgcgtgctgcccaggaccagtgaagacagacatggatgggaaagacagcatcaggactgtggaggagggggctgagacccctgtctacttggccctcttgcctccagatgccactgagccacaaggccagttggtccatgacaaagttgtgcaaaactggtaaacgtctgcttcggagcttgctgcttaataaatgttggtggaatgaatgaaaaaaaaaaaaaaaaaa

SEQ ID NO: 1270 - protein, 277 aa, Homo sapiens
MSSCSRVALVTGANRGIGLAIARELCRQFSGDVVLTARDVARGQAAVQQLQAEGLSPRFHQLDIDDLQSIRALRDFLRKEYGGLNVLVNNAAVAFKSDDPMPFDIKAEMTLKTNFFATRNMCNELLPIMKPHGRVVNISSLQCLRAFENCSEDLQERFHSETLTEGDLVDLMKKFVEDTKNEVHEREGWPNSPYGVSKLGVTVLSRILARRLDEKRKADRILVNACCPGPVKTDMDGKDSIRTVEEGAETPVYLALLPPDATEPQGQLVHDKVVQNW

SEQ ID NO: 1271 - DNA, 4349 bp, Homo sapiens
gcccccgcctcgcgccgcgcgcacgtgactgcgcccccggccccgcccccggcctgccccccgcccccactggccgctcggccgcgcgcgggtcggccggctctatggggaaagcggcggctccgagccgaggcggcggctgtggcggccgctcccgcgggctctcgtcgctgttcacggttgtcccctgcctgtcgtgccacacggcggcgccgggcatgagcgcttccacgtccggctccgggccggagcccaagccccagccccagcccgtgcccgaaccggagcggggaccgctgtcagaacaggtgtcggaggcagtttcggaggcagtgccaagatcggaacctgtgtccgagacgacgtctgagccggagccaggggctgggcagccatcggaactgctgcaggggtcgcggccggggtcagagtcaagctcaggtgtaggggctgggcccttcactaaggccgcatcggagccgctctcccgggcggtggggagcgcgacctttctcagacccgagtcaggatcgctgccagcgttaaagcccctgcctcttctgcgaccaggacaggcgaagactcctcttggggttccaatgtcggggactggcacgacctccagtgccccactggccttactgcctctggacagcttcgagggctggcttctcaagtggaccaactatctgaagggctaccagcgccgctggttcgtgctgggcaatggtttgctctcttactacagaaatcagggtgaaatggcccacacgtgccgtggaaccatcaacctgtccaccgcgcacattgacacggaggactcttgtggtatcttgctgaccagtggggccaggagctaccacctcaaggccagctcagaggtggaccggcagcagtggatcaccgccctggagctggccaaggccaaggctgtccgcgtgatgaacactcattcagatgactctggggacgacgacgaggctaccaccccagccgacaagagcgagctgcaccacaccctgaagaatctttccctgaagttagatgacctcagcacgtgcaatgacctcatcgccaagcacggcgctgcactccagcgctccctgacagagctggacggcctcaagatcccatctgagagtggggagaagctgaaggtggtgaatgagcgggccaccctcttccgcatcacatccaatgctatgatcaacgcctgcagggacttcttggaactagcagagatacacagtcggaaatggcagcgggcactgcagtatgagcaggagcagcgcgtgcacttggaggaaaccattgagcagctggcgaagcagcacaacagcctcgagcgggccttccacagtgcccctggccggccggccaacccctccaagagcttcattgagggaagcctcttgactcccaaaggagaggacagtgaggaagatgaagataccgagtactttgatgccatggaagactccacatccttcatcaccgtgatcaccgaggccaaggaagacagcagaaaagctgaaggtagcaccgggacaagttccgtggactggagctcagcagacaatgtactagatggtgcctcgctcgtgcccaagggttcatccaaagtcaagaggcgagtccgcattcccaacaagcccaactacagccttaacctctggagcatcatgaagaactgcatcggccgggagctctccaggatccccatgccggtgaacttcaatgagcccctgtccatgctccagcggctgacagaggacctggagtaccaccacctgctggacaaggcagtgcactgcaccagctcagtggagcagatgtgcctggtggccgccttctctgtgtcctcctactccaccacagtgcaccgcatcgccaagcccttcaaccccatgctgggggagaccttcgagctggaccgcctcgacgacatgggcctgcgctccctctgtgagcaggtgagccaccaccccccctcagctgcgcactacgtgttctccaagcatggctggagcctctggcaggagatcaccatctccagcaagttccggggaaaatacatctccatcatgccgctaggtgccatccacttagaattccaggccagtgggaatcactacgtgtggaggaagagcacctcaactgttcacaacatcatcgtgggcaagctctggatcgaccagtcaggggacatcgagattgtgaaccataagaccaatgaccggtgccagctgaagttcctgccctacagctacttctccaaagaggcagcccggaaggtgacaggagtggtgagtgacagccagggcaaggcccattacgtgctgtccggctcgtgggatgaacaaatggagtgctccaaggtcatgcatagcagtcccagcagccccagctctgacgggaagcagaagacagtgtaccagaccctgtcagccaagctgctgtggaagaagtacccgctgccggagaacgcggagaacatgtactacttctcagagctggccctgaccctcaacgagcacgaggagggcgtagcgccaaccgacagccgcctgcggcccgaccagcggctgatggagaagggccgttgggacgaggccaataccgagaagcagcggctggaggagaagcagcgcctgtcgcggcgccggcggctggaggcctgcgggccgggcagcagctgcagctcggaggaagagaaggaggcggatgcctacacgccactgtggtttgagaagaggctggatccgctgaccggggagatggcctgtgtgtacaagggcggctactgggaggccaaggagaagcaagactggcatatgtgccccaacatcttctgagcgccacccttgcaacaaatacaggcgcctgcacagcctggcccacctgttcattaatgcactcaatttagtactgaatggtctttctcccagcccattcccagcccttcctatttcctttcctattttttttttctccccacactttcttgggactcccaccttggaaggaggaagggctgacctgggttctctccagcccccaggtgcgccgggtcacccgtgccccttcattatggacctgggccctaccggaacccctgccccagttaccacaactcaggccggctggcccgggccatgggctgcgcaaatcaccagcccccaacccagggaggaactggcccctcctagggagcctcttcgacttttttagaaaaatgatctccatttctttccagccatgatgtttagtaaatatttttagtaccgcacttagcagacagctttccaagtgtgctttcttgccacaaaagtgtcctggcaagagccccttatttttaagacatcaggaagccagaccgctttgagttgggagaattttgtagctcaacatatcaagtcctcgatggtatctgagctgcccacacccccacctgccaaggccccacagagcccaaaacagaagggggctgccccagcccagcagagcacagagtttctggagctcccatccacagatgcaggagggggtactgatggtaacccccatgtggatttgagggcagcagtccctggcctcaccctagccagcctgggtggctccctagccccaagaggccaggaagggctggaaggcagggcctgcaggtgctccccgccctgagacccaggccccaaatcagcaataatgaacaaacccttggcccagcctgggctggtgacctgggcaccagagaccttgcatccctcctcatcctaggaggcccctaggggtgccccatctcagtgtcccctgaactctttatttgcctaatttatatatatatatatgagatatataaatatatataaaatagctattttgcttaaatttctacagtatgtaaaagtgaaaaaatgatgaagacgggtgcacctgtctgagtttggccctcatgtgagctgtgcccttccctctcctcatgcccccttccagcggcttctgccaaccatggggggctggaccaccatggccactgacccagcccctcagaatcccacactccaatcctttccatttcagtttagtcctaaaagttcatcacagggtctttctttctactccaggactggttttgtttttatatatataaaaaaaaaaagtgaaaacaccaatgtgtgaaatgccttacaatgcccactggagaggcggggcggggtggggcaggatggccccactggggctcctacagagctgtggaatgtacctctccccaacactgttttgttagcgagcaccttttgaccagtaataaaaaaccttggctttggagttttccactgaaaaaaaaa

SEQ ID NO: 1272 - protein, 916 aa, Homo sapiens
MGKAAAPSRGGGCGGRSRGLSSLFTVVPCLSCHTAAPGMSASTSGSGPEPKPQPQPVPEPERGPLSEQVSEAVSEAVPRSEPVSETTSEPEPGAGQPSELLQGSRPGSESSSGVGAGPFTKAASEPLSRAVGSATFLRPESGSLPALKPLPLLRPGQAKTPLGVPMSGTGTTSSAPLALLPLDSFEGWLLKWTNYLKGYQRRWFVLGNGLLSYYRNQGEMAHTCRGTINLSTAHIDTEDSCGILLTSGARSYHLKASSEVDRQQWITALELAKAKAVRVMNTHSDDSGDDDEATTPADKSELHHTLKNLSLKLDDLSTCNDLIAKHGAALQRSLTELDGLKIPSESGEKLKVVNERATLFRITSNAMINACRDFLELAEIHSRKWQRALQYEQEQRVHLEETIEQLAKQHNSLERAFHSAPGRPANPSKSFIEGSLLTPKGEDSEEDEDTEYFDAMEDSTSFITVITEAKEDSRKAEGSTGTSSVDWSSADNVLDGASLVPKGSSKVKRRVRIPNKPNYSLNLWSIMKNCIGRELSRIPMPVNFNEPLSMLQRLTEDLEYHHLLDKAVHCTSSVEQMCLVAAFSVSSYSTTVHRIAKPFNPMLGETFELDRLDDMGLRSLCEQVSHHPPSAAHYVFSKHGWSLWQEITISSKFRGKYISIMPLGAIHLEFQASGNHYVWRKSTSTVHNIIVGKLWIDQSGDIEIVNHKTNDRCQLKFLPYSYFSKEAARKVTGVVSDSQGKAHYVLSGSWDEQMECSKVMHSSPSSPSSDGKQKTVYQTLSAKLLWKKYPLPENAENMYYFSELALTLNEHEEGVAPTDSRLRPDQRLMEKGRWDEANTEKQRLEEKQRLSRRRRLEACGPGSSCSSEEEKEADAYTPLWFEKRLDPLTGEMACVYKGGYWEAKEKQDWHMCPNIF

SEQ ID NO: 1273 - DNA, 1929 bp, Homo sapiens
ataacgggcgttaataaccataccctgttagactaagcatggtccacccgcgaatcctctacagagatggccaagcgctggggtcgtggctgcgtcctctaggccagccttgtgcaaaggaccttctcaccacagatcagccagaccatcttcctccttccaagtcatcaaagagttccaagctggtcacctgtcccttgatgttcccaggaaaccaggaaagaggacccctgcattttatcttcccatccagagtggcaggatctctgcctgggaaacaggcttcattcagcacagctgtggtagcattaacaaagcaaagtgggcacatgtagaagttgaagctaaaacattcaagaactccagtctgtttctgtggatgttaagggggtgaagataaaacaatggaggtgatgaggaggaataacttgaagacagtttaaagccacagtgatacaaagaatgaagagaaggaaggtgctggattttactaagaaaacagactgagttcaggagtctcaccagtagaactttatagtattgcgtttcgattacatgtgtgtgaattttaaaaactgattaccctccagtaaaaatgtggaaccaatttgcatttggattaaaacattaggtttggggacaaaagtggaccccatgctgcctgagatgaagagagagagcaggatggcagaggaatcaccagctcaagaaaccccaagacttggacagtcttccagcagaagaggccagggtctctcagtgtactactccaaacaggcctctcctagagatgtagtctgggaaggtccaaaacccaccagacaggcacatccagtggggaaaagacttcccattccagtgtggcctgcatccctcacctctgcttcccagtcttctgctgacctcagaggagcagggtggccattgctgatctgggttagggagatgccagaaacacacccaggtttgaaccacaggttagtggtacaaagtcacagtccttgtgccttcagaaaacccagaggccccaaatacgagtgggaagagagttgggaaaaactgaaccagactcttccaatggccattaaagagaaaattcagcaacgcttgcctttgtctttgaccctgagaagttaagggacacagattgtggcgccgtgatggaacatggagggaaggcatggtgtgcttcctgcagagatgcctctggagtccctgtggccacgggatctcactggccccctcttcaggcaccttgatggggctcagtggggccaggccaaagggtggaagtagaaaagcatcaacaggctgtccagatcaattggcaccatccaaggccctgctgcacccacacatggaggtcaccagctcagccccaggggttctttcacacacaagctccttccctaaggagtcctgtggggttccacactcagtgtgctgcccaagtcagagatttaccacagatctgtctccccctcaacctggactcaagttactgtggtgagaaacctcactgtccatggttaactgaagaaatccctccttcagaaagaacttgagtagtagatgaggtggttagacaggatctttttccctcaagctgtttggacgccacagccaggaccaactctgacagctgcgagagagagagcccctccaatgtggaacctcctacacagccccccttttgggtccctggatatgagcccccagcaggaccaccactctagggggaagtctccctcccatccctcagatccccacattgttcctcctgtaggagaaaagtcagccctgcccctggagcttctccaagatggcactggactcgccgttatcttgaggagccaggagctgaaatggctccggcttagcaacccagtatggccaaagtggaaaggttctctgtcctttgcagtcacc

SEQ ID NO: 1274 - protein, 160 aa, Homo sapiens
MLPEMKRESRMAEESPAQETPRLGQSSSRRGQGLSVYYSKQASPRDVVWEGPKPTRQAHPVGKRLPIPVWPASLTSASQSSADLRGAGWPLLIWVREMPETHPGLNHRLVVQSHSPCAFRKPRGPKYEWEESWEKLNQTLPMAIKEKIQQRLPLSLTLRS

SEQ ID NO: 1275 - DNA, 4467 bp, Homo sapiens
cgagactcagattgtctgaattgagctatcgcaacttaatgctaaaagctccttaaagctacagatttatgacatagttccttccaaaatattacatcataaatcattgagaagattaaaaaaaaacacttgaagaaattgtagttttaaacatctctgcatatattttggatagctactaggttactttaactgtcattaaggagcacagacttactgaagctttactggacagaatcctgggaaatcgatatcattataaggttatatttcccagttagcgggtgaagggctggagaccttattgcagtcatggctttcacaaattacagcagtctgaatcgagctcagctaacctttgaatatctgcacacaaattcgtaagtatcctctaggtgccactgaggtaaccagtaactcgttccttgatattatatggaaatcgtttccccagaaaattttgctttttcactttttgagatgtatcccactggagtgaaatgtgtcactggatatcttgagctctgtattgaagaactgagatcagtgaaatacttgttgctaatccagaagaatctgatttttgtttattggatcaaaattttctaaatgcaaactttagttatttgaagtcaatatgttgagttgtttcattcaagtgtttataggaatccaacaaatactgctctattggatcgccaaatgttggactattttagtatcaaccgtttcccctctgtagtgacaacgtcctaaacagttaggtttataacaagtgtttactttctaacaagaaaacagaagacatttaaatgacaactttcaagaagaaaatttttattttttcagaagttggcattatcttcctggcagattgctcacatccaatattatttgtatatgctaaacaggaaacggcaacttgtttatatctctatttagatagtctttccccaaaatttccacagaaacatacagtgttcatggttcttgagttcatgaaggagtaatctaatcactccaacatggtctggaatgtttcaggtttaatccatatgcccactctcttggaggctgtccagtagcgtcaaaactttagtgttttaatacattcacctgttacttttgagatgaagttcacctttcttggatcacatgcaaaggatgtttaggtctgtgaagaaaagaatttctaggccgggtgctgtggctcacgcctgtaatcccagcactttgggaggccgagaaccactcacgaattcttgtttggtgctcttgctgaactggttgataatgcaagagatgctgatgccaccagaatagatatttatgcagaaagacgagaggaccttcgaggaggatttatgctttgctttttggatgatggagcaggaatggatccaagtgatgctgccagtgtgatccagtttgggaagtcggccaagcgaacacctgagtctactcagattgggcagtacgggaatgggttaaaatcgggctcaatgcgcattgggaaggattttatcctgttcaccaagaaggaagacaccatgacgtgcctcttcctgtctcgcacgtttcatgaggaagaaggcattgatgaagtgatagtcccactgcccacctggaatgctcggacccgggaacctgtcacagacaatgtagagaaatttgccattgagacagaactcatctataagtactctccattccgcactgaggaggaagtgatgacccagtttatgaagattcctggggacagcggaacattggtgatcatcttcaatctcaaactcatggataatggagagccagaactagacataatctcaaatccaagagatatccagatggcagagacgtccccagagggcacgaagccagagcggcgctcgttccgtgcctatgccgctgtgctctatattgatccccggatgaggatcttcatccatgggcacaaggtgcagaccaagaggctctcctgctgcctgtacaagcccaggatgtacaagtacacgtcaagccgtttcaagacccgtgcggagcaggaggtgaagaaagcagagcacgtagcaaggattgctgaagagaaggcgcgggaggcagagagcaaagctcggacattagaagtacgcctaggtggagacctcacgcgggactccagggtgatgttgcgacaggtccagaacagagccatcactctgcgcagagaagccgatgtcaagaagaggatcaaggaggccaagcagcgagcacttaaagaacctaaggaactgaattttgtttttggtgtcaacattgaacaccgggatctggatggcatgttcatctacaactgtagccgactgatcaaaatgtatgagaaagtgggcccacagctggaagggggcatggcatgtggcggggttgttggggttgttgatgtgccctacctggtcctggagcctacacacaacaaacaggactttgctgatgccaaggagtaccggcacctgctccgagcaatgggggagcacctggcgcagtattggaaggatattgccatcgcccagaggggaatcatcaagttctgggatgagtttggctacctctctgccaactggaaccagcccccgtccagtgagctgcgttacaaacgccggagagctatggaaatccccaccaccatccagtgcgatttgtgtctgaaatggagaaccctccccttccagctgagttctgtggaaaaagattaccctgacacctgggtttgctccatgaaccctgatcctgaacaggaccggtgtgaggcttctgaacaaaagcagaaggttcccctgggaacattcagaaaggacatgaagacgcaggaagagaagcagaaacaactgacagagaaaattcgccagcagcaggagaagctggaggcccttcagaaaaccacacccatccgctcccaagcagacctgaagaaattgcccttggaagtgaccaccagaccttccactgaggaacctgtgcgtagacctcagcgtcctcggtcgccccctttacctgctgtgatcaggaacgcccccagcagacccccttctttgccaactcctagaccagccagccagccccgaaaggctcctgtcatcagcagtaccccaaagctccctgctttggcagcccgggaggaggccagcacatctaggctgctccagccacctgaggcaccccgaaagcctgccaacactctcgtcaagactgcatcccgacctgcccctctggtgcagcaactgtcaccatctttactgcccaactccaagagccctcgggaggttccttctcccaaagtcatcaagactccagtggtgaagaagacagagtcacccatcaaactctccccggctacccctagtcggaagcggagtgtcgcagtttctgatgaggaagaagttgaggaggaagctgagaggaggaaggagaggtgcaagcggggcagatttgttgtgaaggaggaaaagaaggactcgaatgagctctcagacagtgctggggaagaggactcggctgacctcaagagagctcagaaagataaagggctgcacgtggaggtgcgtgtgaacagggagtggtacacgggccgtgtcacagccgtggaggtgggcaagcatgtggtgcggtggaaggtgaagtttgactacgtgcccacagacacgacaccaagagaccgctgggtggagaaaggcagtgaggatgtgcggctgatgaaacccccttctccggaacatcagagccttgatacacaacaggagggcggggaggaggaggtgggccctgtggcccagcaggccatagctgtcgcagagccctccacttccgaatgcctccgcattgagcctgacaccactgccctgagcaccaatcacgagaccatcgacctgcttgtccagatcctccggaattgtttacggtacttcctgcctccaagtttccccatctccaagaagcagctgagtgctatgaattcagatgagctaatatcttttcctctgaaggagtacttcaagcaatatgaagtagggctccaaaacctgtgcaattcctaccagagccgtgctgactcccgggccaaggcctccgaggaaagcctgcgcacctccgagaggaagctccgcgagacggaggagaagctgcagaagctgaggaccaacatcgtggcactcctgcaaaaggtgcaggaggacatagacatcaacacagatgatgagctggacgcctacattgaggacctcatcaccaagggggactgaaggcaggagagagagcagctcccctgcccacctgcccctcaaccctgtagctgcagggggaggggacttcattcatgggttggtggtcgcaccttggtttgacttacacgggacatttgtgtttttggaggaaaagataccctgattctttgaatcttccttaagtttataaatatttattttttaaaag

SEQ ID NO: 1276 - protein, 970 aa, Homo sapiens
MLCFLDDGAGMDPSDAASVIQFGKSAKRTPESTQIGQYGNGLKSGSMRIGKDFILFTKKEDTMTCLFLSRTFHEEEGIDEVIVPLPTWNARTREPVTDNVEKFAIETELIYKYSPFRTEEEVMTQFMKIPGDSGTLVIIFNLKLMDNGEPELDIISNPRDIQMAETSPEGTKPERRSFRAYAAVLYIDPRMRIFIHGHKVQTKRLSCCLYKPRMYKYTSSRFKTRAEQEVKKAEHVARIAEEKAREAESKARTLEVRLGGDLTRDSRVMLRQVQNRAITLRREADVKKRIKEAKQRALKEPKELNFVFGVNIEHRDLDGMFIYNCSRLIKMYEKVGPQLEGGMACGGVVGVVDVPYLVLEPTHNKQDFADAKEYRHLLRAMGEHLAQYWKDIAIAQRGIIKFWDEFGYLSANWNQPPSSELRYKRRRAMEIPTTIQCDLCLKWRTLPFQLSSVEKDYPDTWVCSMNPDPEQDRCEASEQKQKVPLGTFRKDMKTQEEKQKQLTEKIRQQQEKLEALQKTTPIRSQADLKKLPLEVTTRPSTEEPVRRPQRPRSPPLPAVIRNAPSRPPSLPTPRPASQPRKAPVISSTPKLPALAAREEASTSRLLQPPEAPRKPANTLVKTASRPAPLVQQLSPSLLPNSKSPREVPSPKVIKTPVVKKTESPIKLSPATPSRKRSVAVSDEEEVEEEAERRKERCKRGRFVVKEEKKDSNELSDSAGEEDSADLKRAQKDKGLHVEVRVNREWYTGRVTAVEVGKHVVRWKVKFDYVPTDTTPRDRWVEKGSEDVRLMKPPSPEHQSLDTQQEGGEEEVGPVAQQAIAVAEPSTSECLRIEPDTTALSTNHETIDLLVQILRNCLRYFLPPSFPISKKQLSAMNSDELISFPLKEYFKQYEVGLQNLCNSYQSRADSRAKASEESLRTSERKLRETEEKLQKLRTNIVALLQKVQEDIDINTDDELDAYIEDLITKGD

SEQ ID NO: 1277 - DNA, 7115 bp, Homo sapiens
gcggccgcgggatttggagcggccggggaggcgggggtggccggggccggcttggaggcctggcgccacccttcggggcctgcaaggacccagttgggggggcaggagggggccggaggatggttggttgtgggatttctactttgccttttcctccttatgccgccttagtgaggggcgggagctctggcggcagccccggggtggggagacgagctccggagtcggaagagctgggttttcttccgggcctagccaccagttggcggagtgaccttaggcgagtcactctgtaatttgtctgcgcctcagtttcctcctctgcctatcaatgtgtgtggggttgaaatcgctttgtaaactataaagcgtgggtgtacgtaaaggatggttattgtttataattttttttgagttgtaagaaaacttagcagttccccaatccttgggttttgaacctgggaaccttggattggagttggggatccccaaacttcctgaaattgtgggaatgtgcggtttgggggaatgatgggaatttgtgggaatgtgcgttttaggggaatgatgatccatcgctagcaagttttccaagggggctgtgacccagaagagttaagaatcacaatttcttcatgctacagagaggaaactgaggcctagatgtcatttgggacccttcacaaccattttgaagccctgtttgagtccctgggatatgtgagctgtttctatgcataatggatattcggggttaacaacagtcccctgcttggcttctattctgaatccttttctttcaccatggggtgcctgaagggtggctgatgcatatggtacaatggcacccagtgtaaagcagctacaattaggagtggatgtgttctgtagcatcctatttaaataagcctattttatcctttggcccgtcaactctgttatctgctgcttgtactggtgcctgtacttttctgactctcattgaccatattccacgaccatggttgtcatccattacttgatcctactttacatgtctagtctgtgtggttggtggtgaataggcttctttttacatggtgctgccagcccagctaattaatggtgcacgtggacttttagcaagcgggctcactggaagagactgaacctggcatggaattcctgaagatgtttggggtttttttctttcttaatcgaaagttaacattgtctgaaaagttttgttagaactactgcggaacctcaaaatcagtagatttggaagtgattcaaagctaaactttttccttggccctccttgtgttctaattgcttgcaagtgtaatactaggatgtccaagatgccagtttttgcttctttgttagttgtcagctgcttttatcaaatttcaggccattatccaacaaacactataaaaatgtttgaacaattggatttcaaacattttcgttttgtggagtggtgctcaccaagtggtacagccctaagcaagtgaacacaaacacatttaagtgtattttgtctgattagatgttagccagttatgctatttcattcaaatgtctgaaaaaatcaattgactattcccttttcctaaagggcagagacagataatctcacttccagagaaatgacttggagaaaaaaaagtgttggtctttttgctcttttgtaattaaatccggatgtacctcaaaagacttaagactgtggtgataagatgctttcctcagcagaaaggagggaaaaaaaacaactggaactcaaagcttgaaattctgtggcaaaacatgagatgtccaggattggaggttgaaaagatttcactacagtgttctgcaatagttggagcagataactttcagtgtagccacagccatggactccagatttccagattttcaagacctggacctggaacccgaaagagcttgtcacgatgcggcaggaacactggaggtagatttttttttatttttgaattttgggactgttgaccttgctgtgagaaaagagacaacgactgagcaagcactaccaccagcactgttactgggaattagaagacctgagtttctgtccagaccctcagtgcaaactgaggatgctccatccaaagtgaattatgtcctgtgcctcctgattgctgagtgttcacctggaccttctgactaccttccctgtgctattccatcagcctacagacctggtacctggatttttgcccgagatgattcctaccaccttactactgacgaagacacccattccagtggaccactgtgacccaggaggcattcagccatcatgatgtggcctttacctccactcctgtcttgttctacccagattcagcacagccctttatagtgaagtcagagtcctcaagccaaatagctaaagctgttttatcacaacaaaggcctagtttgttccatgagtgtgcatttcatttcttcagttaaagccttcagagacacacaataaatttggaccaggggattttttagttattaatgctctctgaagaaaggcaacatctttttgagagcagcattggaccacaccccacaatctcaaatgattgaaattcatgaacatctaggatcccgtgaaggtcactggaccctgttttttctacttcaaatcctgtagtagcctactgaatgagaaaacatattctgacccattgggatcaaatcaaaggcacagtgaactcctcatagcatcttctttggaattactcaggaaccagaactttttacacaaatgtaagaaattctaccaaggagtccccttacctaacagcatctcacaaggctgcaccagattccagaaaaggcttctcttgatacatcaaggtagaacctctatgcattttgtgaccgacttattcttagatcattggttttccaaaggctttgtggccatgaagccctttgagtgaaaactgtgcagaagcccagagtaaaagtgaagctgctctggatgaagtagtgaagcaagagtaggggcctgaatcctgctacaactatcttcctttaccaccgtggtgacacctaaggggacttccttacaacaccttgaactcttccgaacacagtttgaaaaccactgccccagacagcaatatgtttgacctgaatggcattccaatcttttctgtacctccactcagcacagttcatgttcagtagatgctgaacattcttagaaatactgtgtgtgaacttagaaaagtgcaagaagacaggcatgtctttgaccccaggaatgatcatttgctgaagatggtgtcaagtgaacctagattaacagccctccactccagatggatatccagtgattcctagaatgggatatagccagagaacaattctatgcaccctacactgacagactcccttaagcaacaccagatgctctactggtacttgaagtacatgactttgaagtcttgaccctccatgaatacctgaattatcagcaagcgggttttgaagctggtgcctcattgaggccatattagagcaacttgtacatttgacctcttgttatcagccatggtactctacttcgtgtgcaagagataactatgaaagccaaattcaaatactggcaacatttcctaaaggggctcaatatctatcattcgtcttcttttccaaactacacatcactgtatgactcaaccagtagcagttatattgccccttggtttttattcagtttaactactgtttccaagataaatgagctaataagctttaaaaaaaaaaaaaaaaaaggctgaattcttttttcttcatcactggcatatctgcctattctccagaattattatgactattcagctcactttaacagttgaacttcaagcgacaatctttgaacaccccttctcatgtgatttaaaatgaaaccatttggaaaagtttcttctagccagtaatagattttttttttaattgctctgccttgtgccgagagatgttcttttaagatgaatcttttgatgtctgataccaccaaatataggtggtagggagagttggaggctggccctttgagcaggccattagcttacttgctgggcatttccgatagcttattgcctacctttttgctggaaacaaactgatttgaaaaacaaaatctatgaagactgcagctaaggattttatcggtagacttaagagcttttgtccttgtggatattttagtggaaccacatcagtctcaatactgtcattttacactgactcagagcagctgacttcattccttgccatgatatatatttaaggcaggcattgtaacagacataaagacaacttatctgtttcagcaggaaggattcagtttatgaactctcagaccagatcatgttgaacaaggagactttgatgtgtgtcatgagaaaactcattctttacttcccagtcaatttaaaggccagctatcctgagctactcgaatgaatgcactggttaaacattggaaatagtttgtttatatccttgtctctctctaggccaattgtgattacatgactcgactctacatctcgtcaaacaaggcctaggtctggttgctgtagactgctcgccctcaacaaataaaatctggttgactagcctccttgtatatacaactattatttgttaagaagaaattatcgtcaattttctactaccttccaattgtcagctctttttttcctctctggtttttcctatactttacagaaaaagacattgatctatactgccattccctctaatcctgccatactcagtcaaaaggaatgacttaagatgaagatgatcatctgctcgagtctaaaatatacattgtatataagaattggtgattagaaaagcaaaaaacctaaaacttaaatctaggagtctgtatactgtctccatgtctccatgcctcagatctcatctaaatctttgaacagcaccattcaaccaatctgaggccttgacttgcttgtaagatgattctcagagatcggctgagttaaaaaagatgacgacttgattaccaaagaaagtagggccaactttgacaaatctggctctgctgaccctgtcactcccagatgtagcatagactcctaaacagaacctcaagtctgattgaggataaggccttctcctgagctgaaagttctttggcagatgagcaagaaactgaaagctgatgtacctgactggctctgtaagatcagaaaactgtatccagaataagccctatggattaacccctgagtacccagagtaaaaactaatttacagaacttccttattgatctgctggttcttccagatcatattctggctattggtatggctggcctttctgaaggtaccctgcttgtctattttcctgactcagctcttgcctgcctttttcacatgttgctgcaattagactcaccgtgaggactacagtcaatttcagtctatcttgtgcccaatacaacaaggatttttaatagtaacaacccacacctcacccactaggactcaatgttcacaacaggaaggaccattgctgcatactccttgaccagcaacttttttgaagatatttttaagtgcagagtaggcctctattcctgtatgtaattgttcattttcagcacctggaacctcatctatcgggtctggaaggaatacagcagttcgaaagccgcgtccatttctctccttcagtagtgcagaaatgagtccgattcaccagtacacacagaactgtaccagttcaacctagcaaaagaagaaaagtttccactgtacttaaaatttacagctgactcaaattgcctcacagaattatttgatgtagaaggctagttgtcttacttcagatcagcaggacagttgggctctcagactcatgaccactgagtttgcttgtgttgaaactgtggtttcatccaacatatgctattggacatgattattattccattcaaatggattacagacttcttgaggacaggacaaacttatctctcatggtgtttttttagaatacttttataaccaaggaagaaaccatgccagctgttaccattcaacttcttaagcagagattaagctttttcatatctgttcttatcctggacatcagtagtttttaattgcccagcatccgttccatcttgtaacaactccctgatgtttcttaaaaccacctcttcctattttcagtctgtggtttggacagtctgacccaaccttgagctttgtgggtgaacatgtaattcagacctcatcaatcagcaaatccatctgaactgtggaggagaagctctctttactgagggtgctttagctttgtaggatgaaaacctcaaactaacagggcctaccatgtagagaatgaagccagtgcaggggaaagcagagccaaaatatggagagacttgaatcctgatgacagcgtttgtgcccctggatccaaccgtgcctgaagctagaatatcccctggacttttcagttatgtgaaccaataaatacccttttttgcttaagttactttgagttgggtttctgttacttgaaattgaatccacactaatatatctaccaacattgagacttgacagatccaagtatttattaagctagaggtcatggtcactgaaattactttccaaagtggaagacaaaatgaaacaggaactgagggaatatttaagatcccacagaagcgtaaaaatgacatggtagaaagtaatagaaaacctaaatgtctgtcattaaaggataggttaaggtgtggttcagccatataggaatatctcgtatctgttaaaatgaataaagtacattcattgtgtatggaaaaatggccatgatacattaggtgaaacaagttattaatagaaaagtgtacagtgtgaactcattttaaaatgtgtgtgcttatgtttataaatgcatagaaaggtctattcacagctttctttgaacagtgtagatcacatgaaactttcaactttatacatttctgtattaatattttacactacccacattatttttaaactttattttaaataaagaatttttaaaattaaaaaaaaaaaaa

SEQ ID NO: 1278 - DNA, 3259 bp, Homo sapiens
gttccgcaccggaagcgcgcttccagtcgccccggcaacagccgcctccctcgcgtcccccactccccctctgtctctccaaggaaaactaggcccctgcgcggccaacgcccaggatccgcaagctgcgcgcccacgagctccaccagcccattggagaaaagttactgttcagtccctgaaggcttgtgccataaaagagtgggagacattcccagggaggtgaggaatgaaagatcgaattaaagaccattaaagaccaaagggcatctaaatctgcagcaaccatcagctctcttttctttgagagtttcagcacccatttggactttcacaatcagagatggcagcggtaaaggcatcaacatcgaaagctaccaggccttggtattctcatccggtatatgcaagatactggcaacattatcatcaagcaatggcttggatgcaaagccatcacaatgcctacaggaaggccgtggaatcctgtttcaatcttccatggtacttaccttctgcgcttcttccccaaagctcttacgataatgaggctgcgtatcctcagtccttctatgaccatcatgtggcctggcaggactacccctgcagttcttcacatttcagaagatctgggcagcatccacgttacagcagtaggatccaggcatccacaaaagaagaccaagctttgtccaaagaggaagagatggagactgagtcagatgcagaggtagaatgtgacctgagcaatatggaaatcactgaagagctccgccagtactttgcagagaccgagaggcatagagaagaacgacggcggcagcagcagctggatgcagagcgcctggacagctatgtgaacgctgaccacgacctgtactgcaacacccgccggtcggtagaagccccaactgagaggcctggtgagcggcgccaggccgagatgaagcgtttgtacggggacagtgctgccaagatccaagccatggaggccgcggtgcagctgagctttgacaagcactgtgaccgaaagcagcccaagtactggccggtcatccccctgaagttctgagctcagggcacagggtacccagcctctccttcttccttttgggtacacgctctttatctctccttctgtacatttcttagggaaaggggactttgtactggggtacaggcatgttcaccacagtcccagtgggcctgtcacggggtggatgtactatgccagccacttggaggtctgcaggacatgttctgttgccaacatgataaattttctcctgacataaaataattttgcatatactatactggttttttatgttgttggtaacagttcaattcattaacgttcttgcctagagatactgcctggtgttttgcttttttatcttttcttgtctttaacctgtctgaactacacaaatgcctttaaaaaaccagatatcctctctgactctagctccattagcccccactaaaaatgagccaagtgtgtagtgagacaaataccactacctgtagtggagagggatgcatgttctataaagggccagagagtgaatatctttggcactgcaagccacacggtcagtgttgtgactactcaaccctccctttgtagtgtgaaagcagctgtagacagtaagtaaacaaatgggtgtggctgtgttctaataaaactttatttataaaaacaggcggccgggcgcaatggttcatgcctgtaatcccagcactttgggaggccgaggtgggcagatcacgaggtcaggagatggagaccatcctggccaacatgatgaaacccgtcgctactaaaatacaaaaaatgagccgggcatggtggtgtgtgcctgtaatcccagctacgtgggagactgaggcaggggaattgcttgaacccaggaggcagaggttgcagtgagctgagatcgcgccactgcactccaacctagagaaagagcaagactccgtctcaaaacaaaaacaaaaacagactgcaggccagatttggtctacagatggtagtttgccaactgcacctctcatggaatgaaaatcacctgcctgacatttttattcttgttatctcattatgtctacagagcttagatgtcatacagaattgagagcaaagaacaataattccggcccggcgcggtggctcatgcctgtaatcccagcactttgggaggctgaggtgggcagatcacgagatcaggagatcgagaccatcctggctaacacggtgaaaccccatctctactaaaaatacaaaaaattagccgggcgtggtggcgggcacctgtagtcccagctacttgggaggctgaggcaggagaatggcgtgaacccaggaggcggagcttgcagtgagccgagctccagcctgggcaacagagtgagactccatctcaaaagaaaaaaaaaaaagaacaataattcccaaacctggtcactgctgcagtcacctctgttgcagaaaacgcacagttgatttcttactatatacagcaaatattgatttgataaaggaatacatttctgaaaatgaaatctaaaagctgatggagcaggtcatttataaaagccagctgccttttaaataagttattacagtacattgccagggtgagcccatgttgacctgagaagattagcacatccatcaaaggctggtgaaaagatttagtattgacatgtttctctctaagaacagttggcttcacattcagcccctgccctgagacaaatgcattattttcatcagccctgggtgcttatttttctaagctctcattttattactggagtcacaatttgtgtgtaggtgttgccgacaaaaatgataattaactttcccttgaggtgacacataactaaaatttcaaatctttagtatttctccctttcattttaaattcatatgcctaactataaaataactgtgactgagatacaagtacaaaccaaagcctggaattgcagcaggtgctgaggcatttgaaagtgaaatgtttctcttcgcaaaggactcttataccctcccctaaagaaatcaccatgccggtctcacccctactggctttgttacctaaggcttcacctctcagtgcttctggttccttccttatccttaaaatgagtgttaataattctctcgtggggtcattgtgcggaccacattgagtagtgcctgtaaaacagtgctggctacacggtaaatactcaataaatgttgacacgttta

SEQ ID NO: 1279 - protein, 242 aa, Homo sapiens
MAAVKASTSKATRPWYSHPVYARYWQHYHQAMAWMQSHHNAYRKAVESCFNLPWYLPSALLPQSSYDNEAAYPQSFYDHHVAWQDYPCSSSHFRRSGQHPRYSSRIQASTKEDQALSKEEEMETESDAEVECDLSNMEITEELRQYFAETERHREERRRQQQLDAERLDSYVNADHDLYCNTRRSVEAPTERPGERRQAEMKRLYGDSAAKIQAMEAAVQLSFDKHCDRKQPKYWPVIPLKF

SEQ ID NO: 1280 - DNA, 1599 bp, Homo sapiens
gtggtgcgccgcccgggcgaggatgcggctgttccggtggctgctgaagcagccggtgcccaagcagatcgagcgctactcgcgcttttcgccgtcgccgctctccatcaaacaattcctggacttcgggagagataatgcatgtgagaaaacttcatatatgtttctacgaaaggaacttcctgtgcggctggctaacacaatgagagaagttaatcttctgccggataatttacttaaccgcccttcagtgggattggttcagagttggtatatgcagagttttcttgaacttttagaatatgaaaataagagccctgaggatccacaggtcttggataactttctacaagttctgattaaagtcagaaatagacacaatgatgtggttcctacaatggcacaaggagtgattgaatacaaggagaagtttgggtttgatcctttcattagcactaacatccaatattttctggatcggttttataccaaccgcatctctttccgcatgcttattaatcagcacacacttctgtttgggggtgacactaatcctgttcatcctaaacacataggaagtatcgatcccacctgtaacgtggcggatgtggtgaaagatgcatatgaaacagccaagatgctgtgtgaacagtattacctggtagctccagagctggaagttgaagaattcaatgccaaagcgccagacaaacctattcaggtggtttatgtgccctcacatctgtttcatatgctatttgagttgttcaagaactcaatgagagcgacagttgaactctatgaagacagaaaagagggctaccctgctgttaaaaccctcgttactttgggtaaagaagacttatccattaagatcagtgacctaggtggtggtgtcccacttcgaaaaatagatcgtctttttaactacatgtattctactgctcctaggcccagcctggagcctaccagagctgcccctttggctggatttggttatggtttgccaatttcccgtctgtatgctagatattttcaaggagatctgaaactgtattccatggaaggagtgggtactgatgctgtcatttatttgaaggctctttcaagtgagtcatttgagagacttccagtttttaataagtccgcatggcgccattacaagaccacgcctgaagccgatgattggagcaatcccagcagtgaacccagggatgcttcaaaatacaaagcaaaacagtaatataccaccttgatttccattacaaagtatctgatttgtctgaataaaggtgtcccactcactgttccaggaattcttgcagtgtagaggtattcacaacagcaagcagggatttggcctgccatcaattttatttaaaaagcaattaagtttgcagtttgtcctcataaacgttgtaggttgaaactgaaaaataagttaaaatgatcaatcaagataaaaggtgatctatccatccaatggaatattatttggccttaaaaaggaaggacatctgatatgtgctgcaacatgggtgaatcttgaagtcattatgctaagtgaaataaaccagacataaaaggacaaatacatcg

SEQ ID NO: 1281 - protein, 406 aa, Homo sapiens
MRLFRWLLKQPVPKQIERYSRFSPSPLSIKQFLDFGRDNACEKTSYMFLRKELPVRLANTMREVNLLPDNLLNRPSVGLVQSWYMQSFLELLEYENKSPEDPQVLDNFLQVLIKVRNRHNDVVPTMAQGVIEYKEKFGFDPFISTNIQYFLDRFYTNRISFRMLINQHTLLFGGDTNPVHPKHIGSIDPTCNVADVVKDAYETAKMLCEQYYLVAPELEVEEFNAKAPDKPIQVVYVPSHLFHMLFELFKNSMRATVELYEDRKEGYPAVKTLVTLGKEDLSIKISDLGGGVPLRKIDRLFNYMYSTAPRPSLEPTRAAPLAGFGYGLPISRLYARYFQGDLKLYSMEGVGTDAVIYLKALSSESFERLPVFNKSAWRHYKTTPEADDWSNPSSEPRDASKYKAKQ

SEQ ID NO: 1282 - DNA, 5442 bp, Homo sapiens
taatagtcacatgacacgtttcccgtcaagatggcggatactctcccttcggagtttgatgtgatcgtaatagggacgggtttgcctgaatccatcattgcagctgcatgttcaagaagtggccggagagttctgcatgttgattcaagaagctactatggaggaaactgggccagttttagcttttcaggactattgtcctggctaaaggaataccaggaaaacagtgacattgtaagtgacagtccagtgtggcaagaccagatccttgaaaatgaagaagccattgctcttagcaggaaggacaaaactattcaacatgtggaagtattttgttatgccagtcaggatttgcatgaagatgtcgaagaagctggtgcactgcagaaaaatcatgctcttgtgacatctgcaaactccacagaagctgcagattctgccttcctgcctacggaggatgagtcattaagcactatgagctgtgaaatgctcacagaacaaactccaagcagcgatccagagaatgcgctagaagtaaatggtgctgaagtgacaggggaaaaagaaaaccattgtgatgataaaacttgtgtgccatcaacttcagcagaagacatgagtgaaaatgtgcctatagcagaagataccacagagcaaccaaagaaaaacagaattacttactcacaaattattaaagaaggcaggagatttaatattgatttagtatcaaagctgctgtattctcgaggattactaattgatcttctaatcaaatctaatgttagtcgatatgcagagtttaaaaatattaccaggattcttgcatttcgagaaggacgagtggaacaggttccgtgttccagagcagatgtctttaatagcaaacaacttactatggtagaaaagcgaatgctaatgaaatttcttacattttgtatggaatatgagaaatatcctgatgaatataaaggatatgaagagatcacattttatgaatatttaaagactcaaaaattaacccccaacctccaatatattgtcatgcattcaattgcaatgacatcagagacagccagcagcaccatagatggtctcaaagctaccaaaaactttcttcactgtcttgggcggtatggcaacactccatttttgtttcctttatatggccaaggagaactcccccagtgtttctgcaggatgtgtgctgtgtttggtggaatttattgtcttcgccattcagtacagtgccttgtagtggacaaagaatccagaaaatgtaaagcaattatagatcagtttggtcagagaataatctctgagcatttcctcgtggaggacagttactttcctgagaacatgtgctcacgtgtgcaatacaggcagatctccagggcagtgctgattacagatagatctgtcctaaaaacagattcagatcaacagatttccattttgacagtgccagcagaggaaccaggaacttttgctgttcgggtcattgagttatgttcttcaacgatgacatgcatgaaaggcacctatttggttcatttgacttgcacatcttctaaaacagcaagagaagatttagaatcagttgtgcagaaattgtttgttccatatactgaaatggagatagaaaatgaacaagtagaaaagccaagaattctgtgggctctttacttcaatatgagagattcgtcagacatcagcaggagctgttataatgatttaccatccaacgtttatgtctgctctggcccagattgtggtttaggaaatgataatgcagtcaaacaggctgaaacacttttccaggaaatctgccccaatgaagatttctgtccccctccaccaaatcctgaagacattatccttgatggagacagtttacagccagaggcttcagaatccagtgccataccagaggctaactcggagactttcaaggaaagcacaaaccttggaaacctagaggagtcctctgaataatggatatacaccaaactggatacccaactttggaaattctgactggtctcagagtctacttgatagaaggactgtttgagaaatgttagaaagcagcagcaattataaggcaaaataggtaatagaaatccaaaaggggattttccttatagaggacattccaagaacacacaacacttataaagcacattgacttgctcattttaaataccaaacttgtgtgactagcagatgaaaattataaatcaattgattctcaggaatgtaactgtggatatgaaagtgatcctatgcattgttaataattccatggtcttaggacaattttgcttaccactttggatctttgtttgaaagccacattttcagaaccagctcatgtattttctttggttatttgaattttattttctttatggacaagagcatcataacataatgataaaaacatatagaaaaactaaagtatcatgatctagatagaagcctgtatttggaatacaggtttgttttgctttctatgttgagaagcattgaaaatgctaatataaaggtgtttagacatttttacgaataagtcagtagtgttttttagtatcagtagtgatatttgtttgtaaattatttacatattgggaaaggtcaataatgaagaaatgaaagaatggaaggaaaggtgtggataggctcattggtatttgaatattctgtctgtcaagtaactagagtattaggctaattgtctacagacctaatttaatcctggctgtcctactgatgatatttggtaaattgtttaacttctgagcctacgtttctccatatataaagtggaaatagtattactatgcctactatatgagaatggttatgaagacaatgcaatgccatgtttagaatcggtttgccagaagaaaattgttttagaattttcccattgacttgatgaatctcaaaagtctcacgcaggaaataattgcttgctgtcagtcaacttccaaacaaaatagatcacagtgtttttattgcattaagctttttaaatgaaaatttcttttttaaagtagtattttatagtcttacagaccagtaaaaatagtaacaagtagaattgtggttttgaaatattactaaggaaaacactctataaattgttttattccttttctggtaggtaaacctgcaaccaccaaggactccaaattgtgtatgacagttggtaagccctaatatacactacataaaaacgttagggctgcctgtaatcccagcactttgggaagctgaggtgggtagatcacttgaggtcaggagttcgagaccagcctggccaacatggcgaaaccctgtctctactaaaaatacaaaattttagctgggtgttatggtgggcacctgtaatcccagctactttgaagatgaggtagcagactcacttgaaccagggaggcggaggttgcagtgagccaagattttgccactgcactccagcctgggtgacagagcaagactctgtctcacaaaaaaaaaaaaagggggctgtacataggcagcaaactaagctgcagtgatgttgcctatatttaaattttctcaaatggccaagctctgatggtctactttatttgagcaatagttgagacttataattgcctataaataaacaaacaaatgaactatttgtttttttttctcacaacatctggcctatattgtctgtcaggaagccatggctccaatgtaaagtacatagttcttacatacttcaactgcagctggtccctgacctcaccaggtttcagagatgttcttaaaggaagccagctgtggcaggtcacagattcatgggaaatggaaagaaccaaggaatatagctcttgcctcacctttctacccactgcagatatagttcaagccagagtaatggaagaacttaacttactagcctctcaggctgctcctatccctacctcccagtgtacagcccctccccatctctttagtcccctttccctcacttccccttttataatgtcacacaaatcagggacagtaggatcacattataacctactttgtcatagggattcgatttttcttatatcaaatcatgtttcctgaaacccagctggggcatatgcactcaatgtctaatacatacttattaatgtaccggatattggccttgcccctggatatcagcaatatattataaaaggttccagtagatgagacgattgagtctgaatacaattgcagtaaattgtgccaataaagatattgtactgttacggtcttagagttaaagccgcttgaatgcagcatgcacattcatgtaaacagacaatcagggtaggcctagaataaccacaaaaattctattggccttactgcagccacctatatgtagaacaatggaggagatagtttgtggtccattattgtaccctgtttcatccattagcatcagaatctctctttcaggtcatttattaaatatgattgaaatgtttaaaagttcctgaacatgattcatgatgattaaaatatcatacaactgataaaagactttaagaactttatatatttcctgttgcctcaaaatgtaacagaaattattcttagagctttgattttagctatcctaattactgcaaataaatatttgttcttatagttttaaatcaaaaagaaaagtcttgttataaaaccttaagcttgaaatcatattaataaaatatattgtacatagtggaaaattttcagtagctaatttaaaatttcagaaaatgctattaaagaattttgattcaagtatttaaactgtttagttatgcatgcttcttattaaccgaaaatgataataccatttagtttagtgatcagtatgagaagcaatacctaatcctatgttgctattgtattttttcctagttggtgtgcctgctcagaaaaacatatactgtatgtgtatacatacctgtgtatatataaaaggtcaatttatatatttttctataggaaaatggagtaacaagttccctatctcccatatttatttgtccatagtaaaatggccacattgatgataatttctagaactagtttctgagattgtcagccctttgtctaaaataatggcagtattaatgattgacttctgtcactgccatagttacctggattgtcagccttggtagcctttgtctaaagtcctaaagagttccaaaaaaaatgtgttgaaatttaattgctaaatagtggttggtgattctttacagtaggaattgtaataattttcttgcaaataagttatttactgctattgatattgaataatttgtcttttattcagatatatttcaaaaagcatgaatatatgattattcataaattgtatactttaccagtaagttttcagaggaaataaagacttttaaatccttttca

SEQ ID NO: 1283 - protein, 653 aa, Homo sapiens
MADTLPSEFDVIVIGTGLPESIIAAACSRSGRRVLHVDSRSYYGGNWASFSFSGLLSWLKEYQENSDIVSDSPVWQDQILENEEAIALSRKDKTIQHVEVFCYASQDLHEDVEEAGALQKNHALVTSANSTEAADSAFLPTEDESLSTMSCEMLTEQTPSSDPENALEVNGAEVTGEKENHCDDKTCVPSTSAEDMSENVPIAEDTTEQPKKNRITYSQIIKEGRRFNIDLVSKLLYSRGLLIDLLIKSNVSRYAEFKNITRILAFREGRVEQVPCSRADVFNSKQLTMVEKRMLMKFLTFCMEYEKYPDEYKGYEEITFYEYLKTQKLTPNLQYIVMHSIAMTSETASSTIDGLKATKNFLHCLGRYGNTPFLFPLYGQGELPQCFCRMCAVFGGIYCLRHSVQCLVVDKESRKCKAIIDQFGQRIISEHFLVEDSYFPENMCSRVQYRQISRAVLITDRSVLKTDSDQQISILTVPAEEPGTFAVRVIELCSSTMTCMKGTYLVHLTCTSSKTAREDLESVVQKLFVPYTEMEIENEQVEKPRILWALYFNMRDSSDISRSCYNDLPSNVYVCSGPDCGLGNDNAVKQAETLFQEICPNEDFCPPPPNPEDIILDGDSLQPEASESSAIPEANSETFKESTNLGNLEESSE

SEQ ID NO: 1284 - DNA, 2516 bp, Homo sapiens
gaggtagaggaaaggtcttgacggggtggctggatccgtggcagaatccagttccagattctagacttgagggttctgggctgttggtctgtagaagcgaaggagagaaggactcaaatccaggccaagtgtatggctgtctgaggtattggaacagaaggaggtccattcctgttggtgacaacaccgtggccctgttctgggatgagcaaggtgtaaaggtttcccccaagaaagagcagctgagtccttgcatcttgtggcagctggtgtgcccagcactgagtctgtaggagctgaagccagcccggacccttctcatgggcagtgcccacctgtgctgaagtcctgcagcggtggcggtgtgaggagctgtgaaattagttgtaactgaaaatgtctgacggtctggataatgaagagaaacccccggctcctccactgaggatgaatagtaacaaccgggattcttcagcactcaaccacagctccaaaccacttcccatggcccctgaagagaagaataagaaagccaggcttcgctctatcttcccaggaggaggggataaaaccaataagaagaaggagaaagagcgcccagagatctctcttccttcagactttgagcatacgattcatgtggggtttgatgcagtcaccggggaattcactggaattccagagcaatgggcacgattactccaaacttccaacataacaaaattggaacagaagaagaacccacaagctgttctagatgttctcaaattctatgattccaaagaaacagtcaacaaccagaaatacatgagctttacatcaggagataaaagtgcacatggatacatagcagcccatccttcgagtacaaaaacagcatctgagcctccattggcccctcctgtgtctgaagaagaagatgaagaggaagaagaagaagaagatgaaaatgagccaccaccagttatcgcaccaagaccagagcatacaaaatcaatctatactcgttctgtggttgaatccattgcttcaccagcagtaccaaataaagaggtcacaccaccctctgctgaaaatgccaattccagtactttgtacaggaacacagatcggcaaagaaaaaaatccaagatgacagatgaggagatcttagagaagctaagaagcattgtgagtgttggggacccaaagaaaaaatacacaagatttgaaaaaattggtcaaggggcatcaggtactgtttatacagcactagacattgcaacaggacaagaggtggccataaagcagatgaaccttcaacagcaacccaagaaggaattaattattaatgaaattctggtcatgagggaaaataagaaccctaatattgttaattatttagatagctacttggtgggtgatgaactatgggtagtcatggaatacttggctggtggctctctgactgatgtggtcacagagacctgtatggatgaaggacagatagcagctgtctgcagagagtgcctgcaagctttggatttcctgcactcaaaccaggtgatccatagagatataaagagtgacaatattcttctcgggatggatggctctgttaaattgactgactttgggttctgtgcccagatcactcctgagcaaagtaaacgaagcactatggtgggaaccccatattggatggcacctgaggtggtgactcgaaaagcttatggtccgaaagttgatatctggtctcttggaattatggcaattgaaatggtggaaggtgaacccccttaccttaatgaaaatccactcagggcattgtatctgatagccactaatggaactccagagctccagaatcctgagagactgtcagctgtattccgtgactttttaaatcgctgtcttgagatggatgtggataggcgaggatctgccaaggagcttttgcagcatccatttttaaaattagccaagcctctctccagcctgactcctctgattatcgctgcaaaggaagcaattaagaacagcagccgctaagactgcaagccttacacctcaccatctccctcatgagtaagactgaaataaaactctgctgcaggaaagatggaagaaaagacagtcaaatggggtgggggttctttacctttcaaatgaatagaaacttcttataagcctttttcctactccctcagattatgtaatttatttgtaagcctgaatcgcagcccaaacagggcagcaatgttgaagtgaccataaagtggtcacttccaccgtgaagcgaaagagccagtagtgaatcccctcattttgtgcattcactttgaagaaaaaggtttctcaaagatgcacactccctcttcatagtgttgtgtttgtttttaagttagagagtagtccctcttgcattcaaacctccttcaaaactccttacccaatgtgatgtttttcacttgcattgtcattagatgtccagaaaaaaaaaagatgtcaaaatgtttttctaaaaaaagaaagca

SEQ ID NO: 1285 - protein, 544 aa, Homo sapiens
MSDGLDNEEKPPAPPLRMNSNNRDSSALNHSSKPLPMAPEEKNKKARLRSIFPGGGDKTNKKKEKERPEISLPSDFEHTIHVGFDAVTGEFTGIPEQWARLLQTSNITKLEQKKNPQAVLDVLKFYDSKETVNNQKYMSFTSGDKSAHGYIAAHPSSTKTASEPPLAPPVSEEEDEEEEEEEDENEPPPVIAPRPEHTKSIYTRSVVESIASPAVPNKEVTPPSAENANSSTLYRNTDRQRKKSKMTDEEILEKLRSIVSVGDPKKKYTRFEKIGQGASGTVYTALDIATGQEVAIKQMNLQQQPKKELIINEILVMRENKNPNIVNYLDSYLVGDELWVVMEYLAGGSLTDVVTETCMDEGQIAAVCRECLQALDFLHSNQVIHRDIKSDNILLGMDGSVKLTDFGFCAQITPEQSKRSTMVGTPYWMAPEVVTRKAYGPKVDIWSLGIMAIEMVEGEPPYLNENPLRALYLIATNGTPELQNPERLSAVFRDFLNRCLEMDVDRRGSAKELLQHPFLKLAKPLSSLTPLIIAAKEAIKNSSR

SEQ ID NO: 1286 - DNA, 8192 bp, Homo sapiens
cgccgcctgtgcagccgctgccgccgccgccgccgccgccgccgccgccgccgccgccgccgccgctgccgccccggctgccgcgccgcgccgctgcctctgccccggccgcccccgccgccgctgccgccgccggcccgcagccagccaggcgggcggcccagcccgcctgagcccgcagcggctgccgccgcagcgtcgggtcgctgggtgcgcgggctaccgcggaccgagcggacccgagtgggcgaccaggcgcttgcccgcccagtgccactgccgccgcttcctcgccggagcacaggaccagacacctccagcgcccgctgctgctgccgatgcggcccggacacttttagctgggcgggagggctggagagccgggggccgccgagaaccgccagcgagctgtgccgagagccgcgccgacccgctgcgatcagggacaggcgcccgcccgccgccgccgcctggccgctatggatctattcgactttttcagagactgggacttggagcagcagtgtcactatgaacaagaccgtagtgcacttaaaaaaagggaatgggagcggaggaatcaagaagtccagcaagaagacgatctcttttcttcaggctttgatctttttggggagccatacaaggtagctgaatatacaaacaaaggtgatgcacttgccaaccgagtccagaacacgcttggaaactatgatgaaatgaagaatttgctaactaaccattctaatcagaatcacctagtgggaattccaaagaattctgtgccccagaatcccaacaacaaaaatgaaccaagcttttttccagaacaaaagaacagaataattccacctcaccaggataatacccatccttcagcaccaatgcctccaccttctgttgtgatactgaattcaactctaatacacagcaacagaaaatcaaaacctgagtggtcacgtgatagtcataaccctagcactgtactggcaagccaggccagtggtcagccaaacaagatgcagactttgacacaggaccagtctcaagccaaactggaagacttctttgtctacccagctgaacagccccagattggagaagttgaagagtcaaacccatctgcaaaggaagacagtaaccctaattctagtggagaagatgctttcaaagaaatctttcaatccaattcaccggaagaatctgaattcgccgtgcaagcgcctgggtctcccctagtggcttcctctttattagctcctagcagtggcctttcagttcaaaacttcccaccagggctttactgcaaaacaagcatggggcagcaaaagccaactgcatacgtcagacccatggatggccaggaccaggcaccggacatctcaccaacactgaaaccttcaattgaatttgagaacagctttgggaatctgtcatttggaacactcttggatggaaaacccagtgcagccagttcaaagactaaactgccaaagttcaccatcctccaaacaagtgaagtaagccttcccagtgatccaagctgtgttgaagaaatcttgcgggagatgacccattcctggcctactcctctcacttccatgcatactgctggacactctgagcagagcaccttttccatcccaggacaggaatcgcagcatctgaccccaggattcaccttacaaaagtggaatgacccaaccaccagagcttctacaaagtcagtgtctttcaaatcgatgcttgaggatgacctgaagctgagcagtgatgaagatgaccttgagcctgtgaagaccttgaccactcagtgcactgccactgagctctaccaggctgttgaaaaggcaaaacctaggaataatcctgtgaacccacccttggccactccccagcccccacctgcagtgcaagccagcgggggttctggcagctccagcgaatcggagagcagctctgagtcggattcagacactgaaagtagcaccactgacagcgaatctaatgaggcacctcgtgtggcaactccagagcctgagccaccctcaaccaacaagtggcaactggataaatggcttaacaaagtgacatcccagaacaagtcttttatttgtggccaaaatgaaacacccatggagactatttctctgcctcctccaatcatccaaccaatggaagtccagatgaaagtgaagacgaatgccagtcaggtcccagctgaacccaaagaaaggcctctcctcagtctcattagggagaaagcccgtccacggcccactcagaaaattccagaaacaaaggctttgaagcataagttgtcaacaactagtgagacagtgtctcaaaggacaattgggaaaaaacagcccaaaaaagttgagaagaacaccagcactgacgagtttacctggcccaaaccaaatattaccagcagcactcccaaagaaaaagaaagtgtggagcttcatgacccaccaagaggccgcaacaaagccactgcccacaaaccagcccctaggaaagaaccaagacctaacatccctttggctcccgagaagaagaagtacagagggcctggcaagattgtgccaaagtctcgggaattcattgaaacagattcatctacatctgactccaacacagatcaggaagagaccctgcaaatcaaagtcctgcctccgtgcattatttctggaggtaatactgccaaatccaaggaaatctgtggtgccagcctgaccctcagcaccttaatgagtagcagtggcagcaacaacaacttatccatcagtaatgaagagccaacattttcacctattcctgtcatgcaaactgaaatcctgtcccctctgcgagatcatgagaacctgaaaaacctctgggtgaagattgaccttgacttactctctagagtacctggccacagctcactccatgcagcacctgccaagccagaccacaaggagactgccacaaaacccaagcgtcagacagctgtcacagctgtggagaaaccagcccctaagggcaaacgtaagcacaagccaatagaagttgcagagaagatccctgagaagaagcagcgcctggaggaggccacaactatctgcttgctccctccttgcatctcaccagccccaccccacaagcctcccaacactagagaaaataattcatccaggagagcaaatagaagaaaggaagaaaaactatttcctcctccactttccccactgccagaggaccctccacgccgcagaaatgtcagtggcaataatggtccctttggtcaagacaaaaacatcgccatgactggacaaatcacatctaccaaacctaagagaactgaaggcaaattctgtgctactttcaaagggatatcggtaaatgagggagacactccaaaaaaggcatcctctgccaccatcactgtcaccaatactgctattgccactgctactgtcactgctactgccattgtcaccaccactgtcacagctactgccaccgccacggccaccaccacaactactaccactaccatttccaccatcacctctaccatcactactggcctcatggatagcagtcacctggagatgacgtcctgggcggctctgccccttctatccagcagcagcactaatgtccggagacccaagctcacttttgatgactcggttcacaatgctgattattacatgcaagaagctaagaagctgaagcacaaagctgatgcactgttcgagaaatttggcaaagctgtgaattatgctgatgccgccctctccttcactgaatgtggcaatgccatggaacgcgaccctctggaagcaaagtccccatacaccatgtactctgagactgtggagctcctcaggtatgcaatgaggctgaagaactttgcaagtcccttggcttcggatggggacaaaaagctagcagtactatgctaccgatgtttatcactcctctatttgagaatgtttaagctgaagaaggaccatgctatgaagtactccagatcactgatggaatattttaagcaaaatgcttcaaaagtcgcacagataccctctccatgggtaagcaatggaaagaacactccatccccagtgtctctcaacaacgtctcccccatcaacgcaatggggaactgtaacaatggcccagtcaccattccccagcgcattcaccacatggctgccagccacgtcaacatcactagcaatgtgttacggggctatgaacactgggatatggccgacaaactgacaagagaaaacaaagaattctttggtgatctggacacgctgatggggcctctgacccagcacagcagcatgaccaatcttgtccgctacgttcgccaaggactgtgttggctgcgcatcgatgcccacttgttgtagtgggtgttctcagatctctagcatcacgacccatcactctacctctaccagcgcactgatggtcactggtggaactccactcactggggaacgttctctttggttatgtttgtttttatgcttcttttgttatctgtaaaaaacagaagtcattgtaagttgacactacaacttaagggcagtgtacgttttattacttagtcattttttttcttttagcatttgatatgcatttctcagattccaccatctttttgtgctttatggaatgacagtccctacaatattgttttaagcccacactacccaaaacaaagaatgggaagcacttgtgataaagacaggctcctgagaaatgcaacaagtggtcttacatatacatgagaacttagacacaagggaccatcccccaaactctactcttatacccagaaaagaacatatttcagaatctgtcaaacttttgtgtatcccacagattcaatcttcaggtgagaattttcattgtcaaaacccactggttagatgttgtagcaacatcataaaatcaagagtatcaagaaaataaatgagcatagcaatgctactcttaaaaagatgctatgccacacaaccagaggactttcttgttagcatccctttcctgattccctattttgttaattttaatgataagaagaaagggtgacatttattttgacaagttttaggcatcagctggcatcagtgtttttcaactccattatttgaagtgtaaatcctcacctggggttctctgtgtgcaaagctgtccttttgaagaacagtttggttgatgcatgccttagtagccaaaatgctacactctagacttacaagtgggagttaagagaggtctggaaagtgtccaacaaggaattcacacctctgcctcctttgcaacaacaacatttacacagttggtaagtgggtccataactggcaggatttttaaattgtattttgctcaaatctatgggaacaaaagtcaaggtatcactacctagaagtaatgatatacagttttcttcctagtggcttgaaaatctggacttcctcaattattattcacattttctctcttataggttttctgttttctactttcttttttctcttatctgtgtttccctttcctttgtttggctcattaacttttgactgaattacaattactccttttattaaagtccatattattgtgaatcatttccatgaaaatttctaagaaaactccaaactctctaaatagtagctaacttttatttttttaaaatgagtcgtggggtagtgcttcaccttgagatgctttgaaagagccctaaacattgggaaccattcacctaatttggagacatttctcactggttgtgactacccccttatgatccttcacattcattttatgtccctaaacatcacaatgtaaatatcatttttgatgttccagctcaccagaagattcttacacttggggtaaacactatccatgcattacttactggtaattacctgctggtatataattccatgtagcctttaatatgctgggttatcaaattctgttcactgagttatgaccagataaataatagatatgcacatgaaagatgcaaacttgtgtgattattaaagccagccatgcaggtccatgatagaaacagcaggtgatgactctgcactctcattgtcaaggttagatatatccccagttgcaaaacagccagacttgagctgtgctctggtcatctttgagtttaaggccttttgttgtataaggctgtggaagttgtactccaatggctgaagccatgttgttaatatggctgatgggagcatccctgcagctgaacccagcactttttatgctcccactgtggttgagctttatgtttacagtctcagcaacaacacttatgcatccaaacactcacaaatgaaacctgaaagaatcttttctgagcctcttaaaagaggaaaatgatgataacattaaagactctgaacacccaaggttggtgtcacatataaaaattaagctgatgactttgcagtgactcaagttgtctctttatcatggtttaccaggtagagtgcctggctattactatataatgaagcccactggcttgacttgtaagttcaacctaaaccacaatcctagaccatcatggatttaggagtagattcttcttgaaatcccacatccagaaactagacattagaatgttgaggcagtttcccagagaaacaagcatattgcctcatggatgaaagacttgtagttctagtttcagtgacttgttatatctacttacatacaacagggaggcaagaggattctctgtcatctctggtgactgagtgtaaaatatgtgccaagtctgcagcacagtgaccaaatctgacaatcgagctctggatcaccacttgattatgtagtagactcatttataaagcagcttaggaactaattaaacatggaggatgaattaccttcctatcccttgagataagacatctttcagtttcatgattaaggattgttgctgttttatagttactctgttcatcacagtgtaaatggtgatgcgtgtcgtaggtgtgcagctatttgagggactaagggatggagatattctgtcaaatgaatctcttcagtataccagtttgtgggagggatatgagacatgtggatggcagtgagagatcgtgcctctagatcttgatggaggcttggtgagacacacttaaataagcacgtggaggttagaatagagggcagagtaaaaggaagctccatctgagcaagtacaccaaatgatctcagccctgcaacttgacccaggtagggccaccactacgccttcacttgtcacccaagctccaaccacagagagtttgacaagtttgtgttatgatgttggcttggctttgtatttttaattaactttggatttttagtggttttgtcatataactgtctgagtttggtaggtaggattactttgaaaagggtttactagtgtggtcctccgggtagaatttagctgtaagcatgttgttagccagcctgtagactgttaattacttaataatctcattgggaaaatactagtagttttatatttggatgacataattggaaaagcagattagctgctactacttttaaaagacttaaggtcgggatgcctttttttccatgtaaggaaatgaaaagaccaaaatcttcaggcaaaaagcaagttgcaaaattagaaaccattggctaaaaatgtgttttgttgagtttccaaatggatgaattttcatttggacattacatcactaaattcattagattttgtctgcattggaaagatactcttctagcatatctttcccaaagatatctaatttggattctgtttcatgcaaatttgcatcccggaggttgaagttggagtttgaggttggaaaatatctttgaaggcagaatcagttgagttgtgagggtgaagcctcacatacttctcaacagacatgataaaattcacctgcatgagttggcaggtgggagaaccaaactggatcactgggtaagactactcagtaaagcaatgaactgcttgcttagagaagcatcactatccccattgagaaaaatgtgtggcaagatgatacagctacacagtatcaaatgaatgggtcaattcagcacccccaaatttaattctgtggggaaaaattattgagccagttgtcagtgttctgtta

SEQ ID NO: 1287 - protein, 1311 aa, Homo sapiens
MDLFDFFRDWDLEQQCHYEQDRSALKKREWERRNQEVQQEDDLFSSGFDLFGEPYKVAEYTNKGDALANRVQNTLGNYDEMKNLLTNHSNQNHLVGIPKNSVPQNPNNKNEPSFFPEQKNRIIPPHQDNTHPSAPMPPPSVVILNSTLIHSNRKSKPEWSRDSHNPSTVLASQASGQPNKMQTLTQDQSQAKLEDFFVYPAEQPQIGEVEESNPSAKEDSNPNSSGEDAFKEIFQSNSPEESEFAVQAPGSPLVASSLLAPSSGLSVQNFPPGLYCKTSMGQQKPTAYVRPMDGQDQAPDISPTLKPSIEFENSFGNLSFGTLLDGKPSAASSKTKLPKFTILQTSEVSLPSDPSCVEEILREMTHSWPTPLTSMHTAGHSEQSTFSIPGQESQHLTPGFTLQKWNDPTTRASTKSVSFKSMLEDDLKLSSDEDDLEPVKTLTTQCTATELYQAVEKAKPRNNPVNPPLATPQPPPAVQASGGSGSSSESESSSESDSDTESSTTDSESNEAPRVATPEPEPPSTNKWQLDKWLNKVTSQNKSFICGQNETPMETISLPPPIIQPMEVQMKVKTNASQVPAEPKERPLLSLIREKARPRPTQKIPETKALKHKLSTTSETVSQRTIGKKQPKKVEKNTSTDEFTWPKPNITSSTPKEKESVELHDPPRGRNKATAHKPAPRKEPRPNIPLAPEKKKYRGPGKIVPKSREFIETDSSTSDSNTDQEETLQIKVLPPCIISGGNTAKSKEICGASLTLSTLMSSSGSNNNLSISNEEPTFSPIPVMQTEILSPLRDHENLKNLWVKIDLDLLSRVPGHSSLHAAPAKPDHKETATKPKRQTAVTAVEKPAPKGKRKHKPIEVAEKIPEKKQRLEEATTICLLPPCISPAPPHKPPNTRENNSSRRANRRKEEKLFPPPLSPLPEDPPRRRNVSGNNGPFGQDKNIAMTGQITSTKPKRTEGKFCATFKGISVNEGDTPKKASSATITVTNTAIATATVTATAIVTTTVTATATATATTTTTTTTISTITSTITTGLMDSSHLEMTSWAALPLLSSSSTNVRRPKLTFDDSVHNADYYMQEAKKLKHKADALFEKFGKAVNYADAALSFTECGNAMERDPLEAKSPYTMYSETVELLRYAMRLKNFASPLASDGDKKLAVLCYRCLSLLYLRMFKLKKDHAMKYSRSLMEYFKQNASKVAQIPSPWVSNGKNTPSPVSLNNVSPINAMGNCNNGPVTIPQRIHHMAASHVNITSNVLRGYEHWDMADKLTRENKEFFGDLDTLMGPLTQHSSMTNLVRYVRQGLCWLRIDAHLL

SEQ ID NO: 1288 - DNA, 3306 bp, Homo sapiens
ccaatatcaagaagctgctgacatcctggatctagggttgtaaagaagattacatgagctaatggatgtgaaaacatcttaaaaactctcaaatacttttcaactttggaggattattatgattttcattctgttcagcggctatactcagactttactctaaaagtcaaatcttctgacattctttgaagtgaagcattctatgaatgtgagctgaagaaatgaatgaaatgaaataatgcagcatctagtgctttttgcatggcccaaaggggctctgtgctgctccactacagaggaaacttcaagaaatgctggtttgctacagtgttttagcttgtgagattctctgggaccttccctgctccatcatggggtcacctctaggtcattttacctgggacaaatacctaaaagaaacatgttcagtcccagcgcctgtccattgcttcaagcagtcctacacacctccaagcaacgagttcaagatcagtatgaaattggaagcacaggaccccaggaacaccacatccacctgtattgccacagtagttggactgacaggtgcccgccttcgcctgcgccttgatgggagcgacaacaaaaatgacttctggcggctggttgactcagctgaaatccagcctattgggaactgtgaaaagaatgggggtatgctacagccacctcttggatttcggctgaatgcgtcttcttggcccatgttccttttgaagacgctaaatggagcagagatggctcccatcaggattttccacaaggagccaccatcgccttcccacaacttcttcaaaatgggaatgaagctagaagctgtggacaggaagaaccctcatttcatttgcccagccactattggggaggttcggggctcagaggtgcttgtcacttttgatgggtggcgaggggcctttgactactggtgccgcttcgactcccgagacatcttccctgtgggctggtgttccttgactggagacaacctgcagcctcctggcaccaaagttgtgattccaaagaatccctatcctgcctccgatgtgaatactgagaagcccagcatccacagcagcaccaaaactgtcttggaacatcaaccagggcagagggggcgtaaaccaggaaagaagcggggccggacacccaagaccctaatttcccatcccatctctgccccatccaagacagctgaacctttgaaattcccaaagaagagaggtcccaaacctggcagcaagaggaaacctcggactttgctgaacccaccacctgcctcaccaacaaccagcactcctgaaccggataccagcactgtaccccaggatgctgccaccatccccagctcagccatgcaggccccaacagtttgtatctacttgaacaagaatggcagcacaggcccccacttagataagaagaaggtccagcaactccctgaccattttggaccagcccgtgcctctgtggtgttgcagcaggctgtccaggcctgtatcgactgtgcttatcaccagaaaaccgtcttcagcttcctcaagcaaggccatggtggtgaggttatctcagccgtgtttgaccgggaacagcataccctcaacctcccagcagtcaacagcatcacctacgtcctccgcttcctggagaaactctgccacaaccttcgtagtgacaatctgtttggcaaccagccctttacacagactcacttgtcactcactgccatagagtacagccacagccacgacaggtacctaccaggtgaaacctttgtcctggggaatagtctggcccgctccttggaaccacactcagactcaatggactctgcctcaaatcccaccaaccttgtcagcacctcccaaaggcaccggcccttgctttcatcctgtggcctcccaccaagcactgcctcagctgtgcgcaggctatgctccaggggagtgttaaaaggatcaaatgaaagaagggatatggaatcattttggaaactaaatcgttccccagggtcggaccgatacctggagagccgcgatgcctctcgactgagtggccgggacccctcctcatggacagtcgaggatgtgatgcagtttgtccgggaagctgatcctcagcttggaccccacgctgacctgtttcgcaaacacgagatcgatggcaaggccctgctgctgctgcgcagtgacatgatgatgaagtacatgggcctgaagctggggcctgcactcaagctctcctaccacattgaccggctgaagcagggcaagttctgaaccaggagaggcagcctagacaaccaagtggcagcaggtgggggcattcttctaggaatgaggggcatcagcccaccccaggcacctcagtggggttccgggccacctcaggactctaagaggctgtgtggagccaccactcctagccacagctgccatgataagtccttccatgaaggactgaggagggagagtgggggtccagggctggtgctgctcttccctcagctctgccggggctctaaggtccctctatttatttctcaaccctggctggcctctcaccaggagtttaggctgaatgccttccacgtgatggaggaaaaggccaactctgtcctggtcttgctgtggcaccccatcgccccacagctcgtaccttctcaccagattcccctgaatccaaactcgtggtgcaaacctctaccttttttacaaaaagatcttattgttaatttattgtttctggcacttgggcaaaccctgtagttaatactcctcccacactagacactgggtttcaggaggagggagactgccctgctttggtcccagagaggccctctgcagataggcgtggcccctcttcagaggacactaccctagggcactttctctttgaggtggagagacccataaagccttgaccacatcactccatatggggaggagaaggatccctgtcaccttctcctctcttcacggggcccttttgcagccctaggcctcatctgtgggaagggagtccctggctcatactgcccccaccacagctccttgccctggccagaactgctgtcgaagaaaatcaggccggaaggccaagaaggcgctaagggggatgggagggcaggttttccaggctggagtcggttccacccactcgcctgtccacaggcttccttgtaagcaagtcagcagcacagctactcacgctgccatctggacttattttatgtcaatctgtttataaataaaaaccaatatagataaaaaaaaaaaaaaaaaaaaa

SEQ ID NO: 1289 - protein, 660 aa, Homo sapiens
MLVCYSVLACEILWDLPCSIMGSPLGHFTWDKYLKETCSVPAPVHCFKQSYTPPSNEFKISMKLEAQDPRNTTSTCIATVVGLTGARLRLRLDGSDNKNDFWRLVDSAEIQPIGNCEKNGGMLQPPLGFRLNASSWPMFLLKTLNGAEMAPIRIFHKEPPSPSHNFFKMGMKLEAVDRKNPHFICPATIGEVRGSEVLVTFDGWRGAFDYWCRFDSRDIFPVGWCSLTGDNLQPPGTKVVIPKNPYPASDVNTEKPSIHSSTKTVLEHQPGQRGRKPGKKRGRTPKTLISHPISAPSKTAEPLKFPKKRGPKPGSKRKPRTLLNPPPASPTTSTPEPDTSTVPQDAATIPSSAMQAPTVCIYLNKNGSTGPHLDKKKVQQLPDHFGPARASVVLQQAVQACIDCAYHQKTVFSFLKQGHGGEVISAVFDREQHTLNLPAVNSITYVLRFLEKLCHNLRSDNLFGNQPFTQTHLSLTAIEYSHSHDRYLPGETFVLGNSLARSLEPHSDSMDSASNPTNLVSTSQRHRPLLSSCGLPPSTASAVRRLCSRGVLKGSNERRDMESFWKLNRSPGSDRYLESRDASRLSGRDPSSWTVEDVMQFVREADPQLGPHADLFRKHEIDGKALLLLRSDMMMKYMGLKLGPALKLSYHIDRLKQGKF

SEQ ID NO: 1290 - DNA, 3250 bp, Homo sapiens
gcggaaacatggcggcgggaagggagtgagccgccccgcgcccccgccgcgccctcagatggagaaattagcatacaaagaaactgacttgtcagaagtcagagcaaggtattggtggatccagggataaatcccaaacttcttaacccctagaccggtttttagtccattgactatgcagcctaatgtgatagactggagtgatgttagaaaacacaaatatggtcacctatcagagtctgcatcccaatatcaagaagctgctgacatcctggatctagggttgtaaagaagattacatgagctaatggatgtgaaaacatcttaaaaactctcaaatacttttcaactttggaggattattatgattttcattctgttcagcggccatactcagactttactctaaaagtcaaatcttctgacattctttgaagtgaagcattctatgaatgtgagctgaagaaatgaatgaaatgaaataatgcagtcctacacacctccaagcaacgagttcaagatcagtatgaaattggaagcacaggaccccaggaacaccacatccacctgtattgccacagtagttggactgacaggtgcccgccttcgcctgcgccttgatgggagcgacaacaaaaatgacttctggcggctggttgactcagctgaaatccagcctattgggaactgtgaaaagaatgggggtatgctacagccacctcttggatttcggctgaatgcgtcttcttggcccatgttccttttgaagacgctaaatggagcagagatggctcccatcaggattttccacaaggagccaccatcgccttcccacaacttcttcaaaatgggaatgaagctagaagctgtggacaggaagaaccctcatttcatttgcccagccactattggggaggttcggggctcagaggtgcttgtcacttttgatgggtggcgaggggcctttgactactggtgccgcttcgactcccgagacatcttccctgtgggctggtgttccttgactggagacaacctgcagcctcctggcaccaaagttgtgattccaaagaatccctatcctgcctccgatgtgaatactgagaagcccagcatccacagcagcaccaaaactgtcttggaacatcaaccagggcagagggggcgtaaaccaggaaagaagcggggccggacacccaagaccctaatttcccatcccatctctgccccatccaagacagctgaacctttgaaattcccaaagaagagaggtcccaaacctggcagcaagaggaaacctcggactttgctgaacccaccacctgcctcaccaacaaccagcactcctgaaccggataccagcactgtaccccaggatgctgccaccatccccagctcagccatgcaggccccaacagtttgtatctacttgaacaagaatggcagcacaggcccccacttagataagaagaaggtccagcaactccctgaccattttggaccagcccgtgcctctgtggtgttgcagcaggctgtccaggcctgtatcgactgtgcttatcaccagaaaaccgtcttcagcttcctcaagcaaggccatggtggtgaggttatctcagccgtgtttgaccgggaacagcataccctcaacctcccagcagtcaacagcatcacctacgtcctccgcttcctggagaaactctgccacaaccttcgtagtgacaatctgtttggcaaccagccctttacacagactcacttgtcactcactgccatagagtacagccacagccacgacaggtacctaccaggtgaaacctttgtcctggggaatagtctggcccgctccttggaaccacactcagactcaatggactctgcctcaaatcccaccaaccttgtcagcacctcccaaaggcaccggcccttgctttcatcctgtggcctcccaccaagcactgcctcagctgtgcgcaggctatgctccagggggtcggaccgatacctggagagccgcgatgcctctcgactgagtggccgggacccctcctcgtggacagtcgaggatgtgatgcagtttgtccgggaagctgatcctcagcttggaccccacgctgacctgtttcgcaaacacgagatcgatggcaaggccctgctgctgctgcgcagtgacatgatgatgaagtacatgggcctgaagctggggcctgcactcaagctctcctaccacattgaccggctgaagcagggcaagttctgaaccaggagaggcagcctagacaaccaagtggcagcaggtgggggcattcttctaagaatgaggggcatcagcccaccccaggcacctcagtggggttccgggccacctcaggactccaagaggctgtgtggagccaccactcctagccacagctgccatgataagtccttccatgaaggactgaggagggagagtgggggtccagggctggtgctgctcttccctcagctctgccggggctctaaggtccctctatttatttctcaaccctggctggcctctcaccaggagtttaggctgaatgccttccacgtgatggaggaaaaggccaactctgtcctggtcttgctgtggcaccccatcgccccacagctcgtaccttctcaccagattcccctgaatccaaactcgtggtgcaaacctctaccttttttacaaaaagatcttattgttaatttattgtttctggcacttgggcaaaccctgtagttaatactcctcccacactagacactgggtttcaggaggagggagactgccctgctttggtcccagagaggccctctgcagataggcgtggcccctcttcagaggacactaccctagggcactttctctttgaggtggagagacccataaagccttgaccacatcactccatatggggaggagaaggatccctgtcaccttctcctctcttcacggggcccttttgcagccctaggcctcatctgtgggaagggagtccctggctcatactgcccccaccacagctccttgccctggccagaactgctgtcgaagaaaatcaggccggaaggccaagaaggcgctaagggggatgggagggcaggttttccaggctggagtcggttccacccactcgcctgtccacaggcttccttgtaagcaagtcagcagcacagctactcacgctgccatctggacttattttatgtcaatctgtttataaataaaaaccaatatagg

SEQ ID NO: 1291 - protein, 591 aa, Homo sapiens
MQSYTPPSNEFKISMKLEAQDPRNTTSTCIATVVGLTGARLRLRLDGSDNKNDFWRLVDSAEIQPIGNCEKNGGMLQPPLGFRLNASSWPMFLLKTLNGAEMAPIRIFHKEPPSPSHNFFKMGMKLEAVDRKNPHFICPATIGEVRGSEVLVTFDGWRGAFDYWCRFDSRDIFPVGWCSLTGDNLQPPGTKVVIPKNPYPASDVNTEKPSIHSSTKTVLEHQPGQRGRKPGKKRGRTPKTLISHPISAPSKTAEPLKFPKKRGPKPGSKRKPRTLLNPPPASPTTSTPEPDTSTVPQDAATIPSSAMQAPTVCIYLNKNGSTGPHLDKKKVQQLPDHFGPARASVVLQQAVQACIDCAYHQKTVFSFLKQGHGGEVISAVFDREQHTLNLPAVNSITYVLRFLEKLCHNLRSDNLFGNQPFTQTHLSLTAIEYSHSHDRYLPGETFVLGNSLARSLEPHSDSMDSASNPTNLVSTSQRHRPLLSSCGLPPSTASAVRRLCSRGSDRYLESRDASRLSGRDPSSWTVEDVMQFVREADPQLGPHADLFRKHEIDGKALLLLRSDMMMKYMGLKLGPALKLSYHIDRLKQGKF

SEQ ID NO: 1292 - DNA, 384 bp, Homo sapiens
atgaacaggatcctgaggagagtgagcctttggtcccccactgattccaggttggccatgtggctgcaacatgggttgtggtaccccttggtggctgttctgcttggatttgttctggtggaaacctgggcggcagtagttgggtcccccatgagcatggagaaggtgctgaagcagctggaaacacagaccaccaaggagcgagcctttgctggcagagttggatgggcatttttgactgcactacgagaagtacacacccagtccctgagggatgcaatgcagataaggaccctccagatgcaggcagcgcatctggaggcctggctacacagcccagaaaaagagttagaagctgccatgaatggggacctccaggtgtag

SEQ ID NO: 1293 - protein, 127 aa, Homo sapiens [sequence omitted]

SEQ ID NO: 1294 - DNA, 3877 bp, Homo sapiens
cgcccccttgttcccgcaagcccggaactgcccaaatcccgcccctcccctcccaaaaaaacacccctcatccagtctcttccagcctagagatcctggcctacccctccgccaaagcgcgcactgagtgcaaaccccagagtcaatccctgtcccggctccgccccccgcgtccgaatcccgcccagccgggccctcaagcccagtcgggactcgagcctagggaggcgaggttcccgcaccggataggaacattctgttgttttcctctgccatctagtggcaaaagaaagtaattttcctggttttttgaatggatagccataccttaaaaagcatccagattgcgcagtagtgctagcggcttcgcggttcagtcctcctaactgacagccgccactggtgctgagctgctaggaagcccctgtcggcgagcttgttggagcttgaacccactgtcacccctccgactcaccggcaaaaaaaaaaatggttgaagcagatcgcccaggaaagctcttcattggtgggcttaatacggaaacaaatgagaaagctcttgaaacagtatttggcaaatatggacgaatagtggaagtactcttgataaaagaccgtgaaaccaacaaatcaagaggatttgcttttgtcacctttgaaagcccagcagacgctaaggatgcagccagagacatgaatggaaagtcattagatggaaaagccatcaaggtggaacaagccaccaaaccatcatttgaaagaggtagacatggaccgcccccacctccaagaagtagaggtcctccaagaggttttggagctggaagaggaggaagtggaggaaccaggggacctccttcacgaggaggacacatggatgatggtggatattccatgaattttaacatgagttcttccaggggaccactcccagtaaaaagaggaccaccaccaagaagtgggggtccttctcctaagagatctgcaccttcaggactagttcgcagcagcagtggaatgggaggaagagctcctctatcacgtggaagagatagttatggaggtccacctcgaagggaaccgctcccctctcgtagagatgtttatttgtccccaagagatgatgggtattctactaaagacagctattcaagcagagattacccaagttctcgtgatacaagagattatgcaccaccaccacgagattatacttaccgtgattatggtcattccagttcacgtgatgactatccatcaagaggctatggcgatagagatggatatggtcgtgatcgtgactattcagatcatccaagtggaggttcctacagagattcatatgagagttatggtaactcacgtagtgctccacttacacgagggcccccgccatcttatggtggaagcagtcgctatgatgattatagcagctcacgtgatggatatggtggaagtcgagacagttactcaagcagccgaagtgatctctactcaagttgtgacagggttggcagacaagaaagagggcttcccccttctgtagaaagggggtacccttcttcacgtgattcctacagcagttcaagccgcggagcaccaagaggtgctggccctggaggaagccgatctgatagagggggaggcagaagcagatactagaaacaaacaaaactttggaccaaaatcccagttcaaagaaacaaaaaaaagagtggaaactattctatcataactacccaaggactactaaaaggaaaaattgtgttaccttttttaaattccctgttaagtcccttccgtaatttttatgttcttgtgaggaaaaaagtaaaacatgtttaattttatttgactttatgacattgcttttcaacaagcaaatgttaaatgtgttaagccttgtagtactagtgttgtaactttccaagtaaaggtgtccctaaagaccacttcctatctggtttttcccagtaaatgaggcaagcaattctaagatcttccacaaaacatctagccatctaaaatggagagatgaatcattctgcctatacaaacaagctagctattagagggtggttggagtatgctactcataagatttcagggtgttttctaactgaaatctcactgttctcagtatgcaaaacctgaaatcagatgcctatgtaaggaaagtgctattcacccagtaaacccaaaaaaagcaaatggataatgctggccattttgcctttctgacatttccttgggaatctgcaagaacctcccctttcccctcccacaataagaccatttaagtgtgtgctaaacaactacggaatactaaataaaaagtttggccaaaaccaaccatgaagctgcaaaggtgcttgctcttactctttcaaatttttgcaactctaatgtctcacttttaaaggaacagcttgattgcaaaggagaaaatagataagcaatgaatttatctccaacttcctaaaggcttatgacttctaaaaagtgaatctatcagcattccacatcagatttaaagcatcaaatgcctgtgaaacagcaaagatggttgaagattgtgctcattatgtttgtggagtgctgattgattcacagtagataacgctggcagtaagagaaatcaaatgctaagagttgttgaagcagaaggcggctgattgttggtaagtcagtgcagttgcataagcagtgctgtcagaattggtttggtgcaggcaatagattttgccttcaagggttcctgtggatctcaggaaggcatcagtgttgattaacactcataactagggagtgagtggtagttacttaagtaattgaccaaatggaaaaggggaagtaattaaggaaattggtaagtggaggtagtcaggaggttctcgtggtcctttacacagattttacagctttgggtttcattttgtttagctaaagtcatggggacaactcttcaatttagaacttaagatgaattataaaaatgatggatataagtggtagctctatctggtgaagtgtcttgtcagtaagtgaaacatttttttgtggtggcttatccacaaacagtttagttgtagaataaaacttatgagtgacatctggaaagtaacaaccatgctaagatggcaaacacactggaaacaattgggccacttggctttcttttgctgtattgttttataagcctgctttacctccccgtcttggaaacaagttttagtttattgctttggagactagagccaatagtgtaatgttctcaaaggaaacagacttgagttgttggattagaggaactaactcaacttctaattttttttgttgtaattatggcactgtcatgttttaacatttgcaactagggatagtaagtacaacatttttaactctcatttggcagactactactaatcacagaccacaagggtaatgaccaaatttatgtggttgttacacttccatagttgtcttagccgaatccttccatattcttatgattacttgggttaaagcttctgtgaggaccttttggctcttaagatatcctaaatatttaaaatatttagatatcctaaatataggatatagagtttgtaccaaatatgaatgaatattgttcaaagcaaggagtatgttaaaatgaccagacacctgtttgataaatagtttactgaactagcagacgtgtggaaaaagaatcagatcttgattcttctgggtttatactggttgtaaaacagaatgatattagaaaatgttttccttgtttaagtggtagttgaacatagaacttgggtattatagatcacttttcactttttggaatgttttgtattgaaacttaatacaactttaacatggc

SEQ ID NO: 1295 - protein, 390 aa, Homo sapiens
MVEADRPGKLFIGGLNTETNEKALETVFGKYGRIVEVLLIKDRETNKSRGFAFVTFESPADAKDAARDMNGKSLDGKAIKVEQATKPSFERGRHGPPPPPRSRGPPRGFGAGRGGSGGTRGPPSRGGHMDDGGYSMNFNMSSSRGPLPVKRGPPPRSGGPSPKRSAPSGLVRSSSGMGGRAPLSRGRDSYGGPPRREPLPSRRDVYLSPRDDGYSTKDSYSSRDYPSSRDTRDYAPPPRDYTYRDYGHSSSRDDYPSRGYGDRDGYGRDRDYSDHPSGGSYRDSYESYGNSRSAPLTRGPPPSYGGSSRYDDYSSSRDGYGGSRDSYSSSRSDLYSSCDRVGRQERGLPPSVERGYPSSRDSYSSSSRGAPRGAGPGGSRSDRGGGRSRY

SEQ ID NO: 1296 - DNA, 3914 bp, Homo sapiens
taaaaaggtccagcctatagactccatattagcagactggaatgaagatatagaagcatttgaaatgatggagaaggatgagctatgacttgctaaacaatctgttggtaggtatttaaaaagaaaaggtaaactgtgtgtggttaatagacatcctaatactaagcaggctttctaatgggaggctttaagtatggtgatgaacaaccacgttctgactggcgtagttatcgtaggaatctggagcatgctgtgttagaattgaccttgtttaaaactgtcccatcaaaaatggaaatccacagttcccccttcaaatgcagcactgcaccaccctgcaacacctcaggccagggaaagattactgagcattcctgcgaaccagatttctgttgtctctggatagacaagaaacaaaattcatttagtagtggagtggggaataggagtttggatagccttctaattaaaggaagctcgcctttcttggttttgggggttagaggctcttttgggaagatgcatccgagtattgtggcattctgattatgctgccttcacaaaacactctaagtgacctaagtggttatgaagcaaatgcatttatggtgaaaacagtctttgctcattgctttctcttgtttcatttagtgacaaatgatcaagatgacttgattttttttccttcttaacaatgtcttttttatttaaaccaaaggtgaagccagtgtactttctcagtgagttctctgcataaagactaatcagtgggaccaggtaaaaaggtcatataatacattgtggagattgcttacttaatacttctgaaaaatggagtaagggagaaactgtaatgttgcaatatgaacctcccattgggccttccatagggaaagctgtgactactctgaaatggaacctagcattatatccttgtagggtagattataaatcatttccagttcatttctcttagaggtgattacctctagccatcagccttactccatcccatgtttggtatgcaatttgagccacaaggctcgtatcgccaacagctatatacattttgttccatttttctgtcttacagagccatgatagaactgtggttagtgagttaaaattcctggagtaactactgtttttctcctttgaaacttaggtttctaaagttgcacctaaggaatctgtcacattttctgttgaatcatggtttttgtttttgtttttaacagatattccttctgatacggacttgaaaattagtgtatggtgacctgtgtttaaaaaaaaaagtacaatacaactacatatagctatatagcttaatgagacttccaccccccccctttttttttttggtttgttgttgttgtagtagtctggtgctggccacatttaagtcttaaaaatttttaaattttgttgttgatgtttgtagacagccctgttgttgaaatcatggctttattcattttatttattttttaaacttgcctgaatttgttctaaaggaatatttaagagacataattttcttctctttaccataacattacacaaaactttttcctaaaacacggttgtgaggtactgatgaggtgtaagtggagctgttaaaaacagcagtgctgtattgcagttatgtatattcgtgtacagtatgtttagatcccaggtaaacatattcttttctgagaggataaatacctgcattcagatattccaggtaaatataattgagtcagggagtagtaaatctgatggagaattcactttggggaggggaaaaagaatagtatgcaagacccttattggcttttaattatacctgaaaccaaaatggatatttttagtctctctgcatgtgagatttggtgtaacaagatagaactataatatatacagtatatggaaggatagatatagtgctttgttcattttaattgcaaagctgccaaaatagttgaagcttaattacttgacttgccttgatttataggactggggcttggagaaaatgagcagatgttcctctaagacatcgattacagaagccttatatacatggatttgattttgtatttgtagctgaaagtcactgttgtctaaaactaacttttctaagttatcaaaacaacctaatttcttttccaacaaggagaacttaatggcatgaaggattgtgtgacacattggaaaagccagcttactgccactctcttcctttggccattagagggaggtgttgcctttcattgacgcttagaagcaaattgttcacttgttaagaaaagtaaatccttaaaaaaagaaaaggaaaaaatttaaccaatttttcttaatacccagaaggaattatactcaatatttccctagttaagaaaagaggagataatgttcgtctaaaaaactccaacgttgtaattacaactctacattcatttacttacttgacatactgccacaaagtagtttttgagttcattaaaaattccaaaggcattagttgttttttttttttttagtgttttgttttttagttaacttttatagacattttagtaacttgctaaagattcaggggattctatgaaaccccgaatttagaaacatctggtctacctcagttaaatgttgactgcttagaaatatagctgaagtgatcaccacagccataaaattgtttaagaaagatttatataatgtttacaaatctggaatcaaggattttagctgaaatcctttaagagatattagagcaagtatttaattcaggtattttcaagttttaaaacttaacctgtttacctactaaaaataaaatagctagtttttttctgcatataaaagttcattgaaatgatatgcccttatttgcaatacttttcccataaagttttaagtgtgaaagaattgtaatttactagatatgtttggtatgggatattttgttaggcaagttttcttttttcttcttaaattgcaataggcttccaaaaagagtataattgtttcagaacaaattaactcttggcattatacgtctccctttttctttacagtattagtaaaaagaaaaattgtacactttctgattttaacttcactaatgtaattactctctcaagaagcttttaaaatttaaattaccatcacacaaccttttttatagtaaagccaacatttgttctctcaccaaaccccatgccaaattcatcatgaagaaagctcagcataagtaattcaaatactgcttataattttagaggggggtagaatttagtaaatattccagccggtcgttttatgcacaaggcttcagtcagaacatagaaaaaaaaaacattctgtgaatgaaatattgtatgttcagattttataaaagacatttttaaaagcccaatttacagccgtatattttcttatgatgtaatttatgaaaaagatgtctgtactaacaggtgctgtaacactactgttgttggattttattgtttggtgataaatgtatacaatatttctaagggaaactatgtactgtgatgtaaaagtctgggcaaaatgtatataatcctgtatataattatgtatttgattataattactgattgtaaagatttaataaaatatgtaaatattccagtttagttttaatttgaatttttagaatcactgtgcatatcctcatacttttatgtcttgatgtttatcactctgttttccttttttttttaaactcattttatcctccggggattgaattctggggacattttaggctgtagaaacccaagcttgtgggctaaagtaaggattttgttctaagaaatcactgaaagtttttcaacaagtcagtagcatgcacaaaggtaatgctaagtgaataaaactctagaattgtgtataaa

SEQ ID NO: 1297 - protein, 122 aa, Homo sapiens
MGGFKYGDEQPRSDWRSYRRNLEHAVLELTLFKTVPSKMEIHSSPFKCSTAPPCNTSGQGKITEHSCEPDFCCLWIDKKQNSFSSGVGNRSLDSLLIKGSSPFLVLGVRGSFGKMHPSIVAF

SEQ ID NO: 1298 - DNA, 717 bp, Homo sapiens
aaagtaaaatagttgtctcaaattatctgaatccacattttccacaaatactccaaacaataacttctaaattctgacttttgaaaatattcatttacctttcataaaatgtaattttaaaaaagaatggttagataaagcagtcttttgctctctagcctatgtggattaaaaataatcatccaaaatgtcttaggaacctccttagttaataatcgtaaaatctcgaaaagaaatctcaatacttgaaccagagtaattagatgaggaaatttttaaaaaggatcaagcaacttggccagccactcccccactggctccaagagctccatgtccaagtgctgtgctcagtctctgaatgtaccacacccctcagagggaagtgaaaatataacacaagactacttagaaaagaattggtacctacagagaaacacacaaaacactgaaatcaaaggacctggcggcaaagtcaacaacccacctcaccccagactcaccttccctggtgtggtaagtgaaccaccagagggagggagggtgccaaaggttctaaaacttgctccatcagcaaagaatttggtaaaagcaacaaaaagtctaacaataccaatgataagtattaagcacccaccaggggtcagactctggagctgggggagacgttttatcacatgactggcactaaaaggcagaaggtgtctaaactatctttgg

SEQ ID NO: 1299 - protein, 115 aa, Homo sapiens
MSKCCAQSLNVPHPSEGSENITQDYLEKNWYLQRNTQNTEIKGPGGKVNNPPHPRLTFPGVVSEPPEGGRVPKVLKLAPSAKNLVKATKSLTIPMISIKHPPGVRLWSWGRRFIT

SEQ ID NO: 1300 - DNA, 4237 bp, Homo sapiens
ttgtagaaatgtgaagggtcaggttgggacattctgcccacagctgggcagggttggacctagtgatggaccaagaaattatcttggtttaggtagttgtgaaaagcttgacagaagagaaaggaattgagctttgctttgagtgattagtagggtttaggtaaaaaggaaaaagagagacatgtcataagccacaacccattctggttgccagtgagaaaagttaaccctgctcatttgttcaggatgggggcggtgagggctgggtttattacttggcgctgtctgtggctaacttgtgacaggcctgagtcattttcagggtactcaggagtaaatactgtgataggggtctcagaggccaggccatgcagatgcataagcctggtgccaagatgtagtgtgtatctgtttctttatcaaaatttttctactttggtatttcattcaaaacaaggagagaaaagtcaaatctttttccttttcccttttctgatggctatgactgaatttttttttttcatgaacgattcttgtgttcttatttaaaagaagaatttggcatatggcagacctcctcaagctatctttagttggttgtggggtgtaagtgattaagaatgcagctgtacttgctaccagcacatgcttttaaggagattgctaagcagacaggcctggttagaagtttagaatagcctcttggaaacaaagatctaatttttcaagtgcatggtatacaagagtccctcccttcaggactgaagcactgagggctgtttgcatcagagcagggtgacttatttgtttaaaatggcaacacccttggctctggggaggcggccatgcttcacttggaggagacaggggaagctggcttcacttcactttgtatagtttggcttcactgctcctttggaataaaaaaattctttacttctctagtatgtcccaggacaaacccatctctgtcctgttgctcagttatactacagtgctggttccgtagtcttcaaagcttggaactccctcttgcctttgctccaaaaatttgttctttcactcagcaaatatttaccaagtttctgctatatgcaggaccgtgtggagaactcaaagatgaatcagacgtggggcctgtccacaaatgttgtcagtcaagtgtaggacatagggcaagcacacgggagcttttgctgttgtgtccaagaatagcatgatgcgccgtaggtatttggtgggggaaggaaattagtgggtgggtttcaagtaaacccacatggagaaggtgacatttgagttgagccttgaaggacaggtttatctgtgcagagagggaagttttaggcagagatatagcacaaaagttagaaaacaaaaccaaaacaggtggaagagaggaagagtaatcaacctttaactgcgttgccatgcccttgactgaggcctcacccacattatcccatctaatcctcctcataagaaaacttttttcctcataagaaaactaaggcctgcagcattaaaataacttgcccgagaaggctcataagtggttagagtggagatttgaacccaagacagttcaattccagatttgaactgagcaggctttagccagagcaaaagatatttgaagagaaaaaggagtaatttgaagagataaagtttaggaaaaaaaagtgacttgaggcagatggaaaaaaggaccctgagtcctgagctaattactctgtaagcagcagggagcaattgaaggtttttaatggagtgtgacgtggccacagcaggacttccagcagtaactgcaaaaatatttgatatttgagttcattactgtgtgctggacactatcccaggtgcccgatacccctaacctgttttaattctcataactgccctatgagataggtgctgttgatgcccacttctacccataaggaaaccgagtacacatttagagaccttaaatgactttttagaagtggatcgaatatgatgtgcaagatgaattgaggtcagaggcagaggtaagtcaagacactacaggaagccatgagagacaggtgatgcggggtgtggtagaaaggaatggatgagtgtgagggagttggggttcagctgaatggatgagtgtgagggaggtggggttcagttggggcagaggcttctaacttccactgcgtagggtactgccgtggtgagaaccctggagagaaggggaagggggaaagtcctcttctttttcaaccccacacacagacttgaaggtcaggttgggacactctgcccattcagctggggctgaagacaggtatcagggctggacctagtgatagacaaaatccgtggagggttaacgttggtaagggaagagtgtgtggaggccaggagccggggccacggagcgagaagtgctggagatcgtggaacacttagatccgaggcccagtggaatgacaggggtcaggcagggacacggggatgaacagtcagtgggctggatacctcgggcggagttaccttgggtgatggagaggtacacccaaggttactggggatggcaaatcctggccaccggatatctcttgtacccttgctactagaatcaaccccaacccacagcagtcttctattttcctcggtcagaaaatagataaaaatcactacaattagcatacatttgcctaagaaaaagacagaagtagcataatgtgaaaatgcagttgttgttgttttattttctcttcatataaaaatgaaaaagccttttagccagcacttgaatatctagtcctttgcattcaaccctccctgcgcctcactgtgatcggaagcggacttcagtgtcccgggaaatagaaatagtaagcaaaacccctcatggctcctagcaatcttcgtaccgtagcagaaaagcaaggaggcctgggactgaggtgcacacacaggggacaaagccctgtcctgatgggtgtttgtaagcaccagggagggggcagggcacgtgtttgttcttctctaagttccagtggtccgatgaatgttggatctagcgtctgtgaaacctgttgtcataaagtatgtgttcctcagttagatttgacccagaggcctttctcattctcagtttttgtgttcattgaggctgcttttaaatggaaggtccattaagcccttgttcctgtccattcacagctgcctctatccgagtggtctgtgcagggcgccagcagccaccctgatggagggcaggtctctaaaagcagcatcctttgccaggcacctgagaattttaaagtgaggatgcatctgtggcatcatcttcctaaaccaaatgatgtgtaattgcatagttgttgaactgtgtggttggtctatttctagcagagtagctacctgagaggaaatgagaatttaaattgtttgctggactttaaaaaatttacatatgagggagacatctcatccagagatgcactgggcacagggaaagctttttttttcaagtagcagctgctattcattgaaatgttacaattttcctgccttagtatttcacacgtccttatactcctcataacattttttgcttgtgtagttttagccccatttcagaaatgaggaacccaggttcagaaggtttagaagcttgctcaagaccccccagctattaggtgccagagctgcaactggaatgcagctttgactccattgtgggtttctgttccattatcaagagtagcctgacagttggcaataacaatgactgaatgaatgaataaatgaattctccaaagaaaatagttcatgtttccctagtatgagggaatacttgagatagttgttttgagaagggggccacagaccaggagacaccaataagtctttctcatttctggtaaatcgctttataatgaccgttattataaagtgtaaaaacaacaacaacaaaaaataataggcgcagtggttcacacctataatcctagcactttgggaggcagaggcgggcggatcatttgaggtcaggagttcgagaccagcctggccaacatgatgaaaccctgtctctactaaaaacacaaaaattagccgggcggtagtggcacgtgcctgtgtagtcacagctactcgggaggctgaggcaggagaatcacttgaacccgggaggtgaaggttgcagtgagccgagattgtgccactgcactccagcctgggagacagagccagactc

SEQ ID NO: 1301 - protein, 124 aa, Homo sapiens [sequence omitted]

SEQ ID NO: 1302 - DNA, 393 bp, Homo sapiens
atgtctggacacaaaggtggcaagaagcagcccctgaaacagcacaaggaacaggccaaggagatggacaaggaagatgtggctttcaagcagaaacaaacagaggctgaaggggccctggatacaggtggagttaagaaatctggcaaaaaaattagtacacccaccgtggaaaacaaaacaaagccctgtttcctggccacatcccgtgggctgctttcagagaggcccttcacactcagggctgctctcagggaacagaagggctcgatttgccagccgttggtgagggcagaggatggaatttcaactccccagctcacgggtcttcctgtgccgcccaatccagtcgcgggaacccgggccaatccgtggcctctagttaatacttga

SEQ ID NO: 1303 - protein, 130 aa, Homo sapiens
MSGHKGGKKQPLKQHKEQAKEMDKEDVAFKQKQTEAEGALDTGGVKKSGKKISTPTVENKTKPCFLATSRGLLSERPFTLRAALREQKGSICQPLVRAEDGISTPQLTGLPVPPNPVAGTRANPWPLVNT

SEQ ID NO: 1304 - DNA, 1898 bp, Homo sapiens
atggctgtgcctgaagacaatgaatttccacatgcagaagtttcatgtgttgctactgagaaatcagatgccattctcattctggattctttaagtgaaacttcatttcctcctaggcacttagtccccaaagaaaagtattccaaattctccatcctggcaaccttagatagccagaacacctcgactacatctggtgtccccattccagagagccactgcatgattcttcagagaacatgcttccaatcatccaccctcgtggaagagggacagtggccgctgtgcagtattggggatgctgactgcttcttgtacagacttacaagaaatcgtcctgggtttagtctcacctacacacccactttcagacgtatccagtgcaaaaaaaactctcttaccccgagaaatcctactgtcatgttgcttcttggttttccctactactggtttgaaagtcagctttctcagcaacttgccactcttcagcatcatccatcaggaaatctaggtcggaaaagtgtaccaactgaccttccaaattttctgcatttggcagatgcaaatcacacagtccatccccgccctcagcacttggacggtatcagggaaacacgagacactgtcttactgagcgttctcacagcgcctagctcagagctgaccgcagagccggctctcaataacatcgagacgcaaaagcagcttttgaggttaggggcggaagggcatcggttttacttatttcaaggctggcgctcggtgcagccggatccaactgccagcacaatgttcccgatcacttctcgcttccatttcagcccaggagacttgttggcagtttcttcacgggatgtgtttaaattgccgagtccccacatacgcgccaccccacaaatctccttcgaggccgtggaggccacacggctgccgcctcgccctctcctccaggagtatgctgggatttgtagtccagcagccggactgtgccgagctacctttcccagcttgccctgcggctcgggtgatatcaacagtcttttccagaactctgtctgcactgagaccctcttcccccagtcctcttctcgcggtcgactccttcccatccgtggcgacagaacggcggttgcaggagaggccccggtccctcgccgcgccgccccgaggggcacttccggcggcggttcacttcctggttgggtggatggagccgggcgggagcgcgcgcgggggaggggcggcgggtcagtctccgcccggcgctcccgggatcagctggcgggcgggcgggagccgagcgcggccccggctctcgctgcagcgccgcctcttctctgcgtcgcaggccggcccggcggccgtgacaatgtcgcggggctggtagcagggcgccggccgccgagccgtctcaagtgggtgctgccaggatgccgcctcgaggggcggcggggagacccgggaggagcgggaggcagtgcccgggagggtcggcgctgccggagcagctcggatccctcctttctccgagctcccggctcgggggtcccgggttctggggccggggtcgcgttttcagccccacggtttttctcgccgggaaaatacatgaagcgtttccccaggatgatggcttttgctccccctaggactcagcggttgaatttttaagcgtgttactgattcatcctctctttcttcctctgtcatcacaggtttaaacttacacgaatcgctttctggaggaggaggggacccgctgcgcgattgacacgcatattcctataggcatcctccctcagcccccacccccacggccggattcgggtggctcctctccgaggtgaaatctgagaagaaatccttggatctcttttcttaaaaaaaaaaaaaaaaaa

SEQ ID NO: 1305 - protein, 556 aa, Homo sapiens
MAVPEDNEFPHAEVSCVATEKSDAILILDSLSETSFPPRHLVPKEKYSKFSILATLDSQNTSTTSGVPIPESHCMILQRTCFQSSTLVEEGQWPLCSIGDADCFLYRLTRNRPGFSLTYTPTFRRIQCKKNSLTPRNPTVMLLLGFPYYWFESQLSQQLATLQHHPSGNLGRKSVPTDLPNFLHLADANHTVHPRPQHLDGIRETRDTVLLSVLTAPSSELTAEPALNNIETQKQLLRLGAEGHRFYLFQGWRSVQPDPTASTMFPITSRFHFSPGDLLAVSSRDVFKLPSPHIRATPQISFEAVEATRLPPRPLLQEYAGICSPAAGLCRATFPSLPCGSGDINSLFQNSVCTETLFPQSSSRGRLLPIRGDRTAVAGEAPVPRRAAPRGTSGGGSLPGWVDGAGRERARGRGGGSVSARRSRDQLAGGREPSAAPALAAAPPLLCVAGRPGGRDNVAGLVAGRRPPSRLKWVLPGCRLEGRRGDPGGAGGSAREGRRCRSSSDPSFLRAPGSGVPGSGAGVAFSAPRFFSPGKYMKRFPRMMAFAPPRTQRLNF

SEQ ID NO: 1306 - DNA, 1189 bp, Homo sapiens
catccttgtcttgttccagttcttaggggaaaggctttcatcttttccccattcagtatgatgttagctgtgggtttgtcctatatggcctttagtatgttgaggtatgttccttctatgcctagtttgttgggaattcttaccatgaaggacacacccagatccctttattccagaacacataacttaaagtcacactttcctgagatcagagcagaggatggcagagaaccaaagtcacgagtgtgtgaaacaacggagaggagcggcgctgtgcagcctggagctcaagacacttgcatgagcgcctaggggagacaaccatctcagtaatgatcctaattggatccaactggggaactccagaaagtttcagtaacaaatttgcaatggttctgggccttttaatatggattcacaaaagataatgaggttatcctgtcatttctaccctatggatgaggaaagtgacattcagacaggccatgggatctacccactccctcgtaaagaactggaggaccaacattagcaacaggacctcccatttggcattttgttttcagatgtgcctagaagaaggagattacagcttcttggactgttgaagcctgggttcttcttgagttgtgaagatatcacctaaatcctatccacattttgtgcaccaggtttgtggacgcctaccaccattcattcattgcagtggctcagagaagatgaaaacaggactctttggggccaatgaagatccccaacagagctcagatgaccagagtggactggcttctaccctaaatacatacaacaatacttcccactctgaccttgctcactttatacaacaccacacaactagagagtggcagagctgctgtgggaacccaaatgccatctgactccaaagccttactctcaaccaccaccctgctgcctcctattctttcctgaaatcttcagtatagtcattattatgaagtaaaaaaaaaaagaaaatgaaaggatggaaggaaggtagagggagcccctctatctccattctttgtttccatgaagaacctctactccattttcaggggagtgctattggtgtaacacactttctggccctctccctcccattcttgtcactcattctccccaaggaagaagcgatatgtggatgataagattggaagaagccactctt

SEQ ID NO: 1307 - protein, 55 aa, Homo sapiens
MKDTPRSLYSRTHNLKSHFPEIRAEDGREPKSRVCETTERSGAVQPGAQDTCMSA

SEQ ID NO: 1308 - DNA, 4280 bp, Homo sapiens
ttaaactcctgctccaaactcactcgatgtgtgtgtgcatgtccttgacctcaatatctggtcgtgtgaccaagaacctcagtattcaccccagacaacaaggctgcttcattttgagggctcgtctgggatttgaaggtgacttcatcagaatggaaagtctctggctgacaaacaattgcctcctcaaataccaagctttgctgctaaagggatctgcagtccagctgaaaacctgcccttgcctgagcccagccactttctcccagagaaaactggagaacctaaacatgattgtgaacagaatggcttccggtggcctgggactccttggggaaacagaaaatgcaccacaaatcccattttaggaaaaatctgttttcctcggagcccctggaattaaaggtgaataaatacctctcaaaatcgtctttgtcttctggctatgcttgcttattaggccctggaagctgtattcctagctctgttctgaaagaacctcactcagaggccaataatccaattgggacattggcaaatgcaaaatcttataactgctggatcttcttctgtttgtgtggttatatatgtgttacttgtgtaatgcctattaaaaaaaggagctctaattaattggcctaagaaaaataagcgcttaaatcaaacatttttaagggaaaagtaaaagctgtggtacctttcagttcatgtgactttaatctttaaaaataaaaagagtcttaggaattattggtaaaatacaaatgtcttcaaggtataaaaatgtggtctaaattatgcaggtcaaatactagtttgctaaatgttttaaggttgtaaactgcttttttttttttgagatggagtcttgctctgtcgccagactggagtgcagtagtgcgatcttggcccactgcaacctctgactccctggttcaagtgattctcctgtctcagcctcctgagtagctgggattacaggcacgcgccaccacatccatctaatttttgcatttttagtagagacggggtttcaccatgttggccaggatggtctcgatctcctgacctcgtgatccgcccgccttggcctcccaaagtgctgggattacaggcaggagccattgcgactggccataaaactacttctttatttagcctttaaaaactatcaacgtgcctgcttcacaattggtagcacctgggaacatacggaagcaaccaagcccctaactatgctgaaaggagtcaaacattatctgcatccagcacataattaaaacaacctaacaggttttacattaaagttaaaaattactaaaagttaccattataacatgtgattgaaactactgaacatggaattacatggaaagtgtgtaaaaacagtaaaagatgtttttatttaaagattataagagggcatggaaatgtatattttgcttagaaataaagaattgtcttaaagtagaaggtttaagcaaattgtaaaaaaaaactgtaaaaatcttgcaaaaaaaaacactgcgtgtaaacatattaactaaatgcaaaagggcattatatggtttttttctgtaaattaatcactgaaataaaagcacagcaaggttttcttaaaatgctaatctactctttagcaaaacttgtcaagggttataacaggtatgtgaaaatctcacttcatggtcaaactggttaaaattaaataggattgtctataatgtttcatttaaaattaagtttaacattaatagcaaactaatgcaagggtaaaatttaactttctctcttaacacgggattttcatggaatagaaaaggctaatgaatggtttttgctttttcaaatttctggctcaacattttggcaaaaacaaaaacttttggtaatctaaaattctatttcataatatcaagtgttttaaattttaaatatacttaacaggcttcccaaagtcaaactttagtctcaagtctgtctttcctaacccctggcttttgggtgctgcagaggacccctgaagcatctagaagagaggtaaacagtattatttaacatgttgaggtacataaaattgccaaaatgatgtctaatactcttcaggttatactttagggaataatattaacatgtgttccaaaactgtatgggatgtctatggttctagtgtctgaatatgtgctattacaattaaggttgttatgctgggtttttgaaaaacacaaaaataaccaaatttctttgtcaattgtatttctgactgtatccaaactggacattttgtcatttacagacaattgttgttttgttttaattctcttcaaaagatggttcataatcaagccatgggactttaacaagttctctccaatgcaggtttgtcatgaccaaaaaatgtatgggactcataaaaggctaaaatgtttataaatatcaaaacaaaagttaatggaatgaactgaactaatagaaaactaaagcaatattcttcacttattcttagaacacggctaatccttattttattttttagagtcaaaaaaacttgtcttaagctagctacagcctttgataactaagcaaagtgtactactataggcaaagtttggagcatgtttatgtctctctgcctaattcctgtagaatttggaaactagttataaatattcttaaattacaacaatatagttgtttgaatcagtgcagcaagaatccattttctcttgcaacaaaacacaattggaaaaactggttgttttaccaaggctttgactagaagggtatatttccctttaaggaatcaagcttaacttgctgagccaataaaagcccctggggaaaactggcctcatatctgtctacacagtctccatacagggttcctgacctgcagtgagtaaagaatgtcactttctaacaggcctaggaaccccatgcttctggaacctcaagaaggaaaaaaatttatccaactcacaggtatttaaaagtacaaacctatggctgggcttggctttaaaaagtcctatctaaaattcctcatggaacaaggttccatcaaagccaatctaagaggcttatgtaaggatgattattcttgctgtactttatgcaaataattaggccaagtataggactgaagtctgttttgcaaacaactcagtcctatcatagattatttttaacaaaaatgaggactagagaaagagaaattatgttttaagacttatcatacatctgttattaacctgtagtcccatcagttgtttttaagttcttgcctacattttaaactaaccctgcttactcctgtcaaccaaccaggaatctctggctgcagctcagagaaaacagaaaggcatcggtaatagaaaaatctggaaacatgttctagttctgggcaattatcctacaaatcctgccaggtaaactagaaccccagggtttctcccttttttgggaaagtaagaccaaggaagctaaacaaagccaagccccatatacccacttacagcagcacaacccatctgaatggctcacaggtatcaaacaaactctgttgtcatggttacggcctatagtgcccccattaataatagtaatcttaatactcatatttagaacctatattctaaacctccttgtgaagtttatctcttctcgcttagaaaccatcaagcttcagatggtgctgaaaatggagccgaaaatgaaactgccctcctacgagggacccttaaatcaaccccaggaggagccctagctgctgttccccacacaacgccactctccagcaggaagtagccagaagaaatcgtcacccagtttcccctagcagcagttatggatttcattcctgaggggggaaatatgttataggaggcagaaagaaatgatttaggcgcagtaagattgaggagctaaaaacagacttgggtggatgtctgcagctgcaagaagatgtgtgggaacagacacagaaactctccctcccagataagcaagacaaagaaacacagaataagagtccatctatgtggtcagagaatgggataagagctgatttaaaaaaactctgctctatatagaaggcacacctggtcccaaccaaaccactggaccctaggaggataagacctcctctgctcatgagccccctcctcagtagcccatttataaaaaccctgacaattttactaccacttggcaacccgctcgggacccctctctgtgatggagagctgttcttttcttttgcctattaaactcctgctcca

SEQ ID NO: 1309 - protein, 113 aa, Homo sapiens
MCVCMSLTSISGRVTKNLSIHPRQQGCFILRARLGFEGDFIRMESLWLTNNCLLKYQALLLKGSAVQLKTCPCLSPATFSQRKLENLNMIVNRMASGGLGLLGETENAPQIPF

SEQ ID NO: 1310 - DNA, 2623 bp, Homo sapiens
tggaaagtttgatcatttaatttccctgttaaatacttctcttgtgagcttcaccactgcctgcaggatcaagtccaaattccttatcatgaaacacaacctttgtggcctcgttgtctgccactcccctgtattcattgtcatcagcttgaactgctttcagttccccccaacgctgcttgctcactctctcagctccaggcctttgcacatgcagttccttgtgccctccacccttgccacgcaaatccctactgcctatctatccaactgtgaatcaccccacgtcagctgttcaggagaccttcctggcccctcccctgtagactttgtggctccctctcttgtgcttcccacctgtacacacacctggactcttgtgcccttatcacgtccttagagcttttccacttgtgtatctcccgtgcccctacttgacagtgtgggaactagacccctgtctagttcacataccctcatcccatgagcattttgggcatccccagggtgtgtgactctcctgtgctagtggacaaggttagacaattaccattaccttttcgtcttttcccctcctccagctctgtgacttccctttgcccctaccacaccccatgtagctatcagttttgctggacacggccacacccatcaggcaccccatacctgctgggagtcacggacactcctatagcagcagtgctgtggggctgctggtccctgcattgccttatagagccgtggggcttcgccctacagatacatctaaattacaaataccagtccagcccagaatcagttcttgctgttgaacgcaactgtctctgggtcagcttgttgtgcctgttttccttcttcccttagaaagagttatttccttcagaacctttctacccctcatgaaaataggcttcccaaaggtctgcccaccagccaactagacagatgtggcctgcattgtccccctggaggcaaaggatgtgtgggtatttatttatttaagatagtaagttatggccaggtgtggtggctcacgcctgtaatcccagcactttgggaggccgaggcgggtggatcacctgaagccaggagtttgagaccagcctggccaacatggtaaaccctgcctccactaaaaaatacaaaaattagctgggcatggtggtgcatgcctgtaatcccagctactcgggaggctgaggcaggagaatcgcttgaacccaggaggcggaggttgcagtgagccaagatcgtgccactgcactccagcctgggcaacagagcaagactccatctctaaaataaataaataaataaataaataaataaataagacaataaattatataagcagtgctgaatacagcttcatcatttaaaaatccaaacagtttggaaatatatagacaagtatataaatgctcttcttgcaccccttcccccatcctaaagcctaccatacaggtaggcactgttaattatttggtggaaatgtttacactttttgctttgcatttacacatgtgagtggcagggatagtatctgagaaattaatttttttctctcctgaattttctctttttctgccctcacatttatggagctcattacctccagagcagcttttcaggttagaaaactgaatttatcttcaggcatctctggcttttgtgtgctgaaagcttaagcatttagggcaactccaggatttgctgagtggctcatcaaaggatgaggattctcttgcacagactgaatgccttgactggaaacgatggaagaaggatttccttgggagtggaaaggaccccaacccttttagccctgtcctccccaggctggctgggggcaggactacaatcccagaaggaggcagtcatatggtagggctagccaggggtgtccagtcttttggcttccctgggccacattggaagaagaagcattgtctgggccacacctaaaatacactaacacaatagttgatgaacttaaaaaaaaaaaaacacacaaaaacatttcataatgttttaagaaagtttacaaatttgcattgggccacattcaaagctgtcctgggctgcatgcggcccacaggctgtgggttggacaaggttggactaggccgtgaagacacaggcaacctgatccaaggttcctggctgcctctgctgccagacctggcctctgctgacttcatcggcagcctcatgcctggcacttctgaatattctggagaattcagacatacctgaaattaagttttctattgtcaggattgaagcttaccataatcaatgagttgagttatagactaaaatttgatttcttgcacacctggatttgtgaatggagattcgttcctatggcttgtattatattactcatattctgccacttaaaaaaattaataagaaatcttgaaaaattttccacagcagcggaaatgaatgaatgagatagatttatctcattcaaaagatgaatattattattaaaaaaaaaatagaccgggcacggtggctcatgcctataatcccagtactttgggaggctgaggtgggcagatcacttgaggtcaggagttcaagaccagcctggccaacatagtgaaaccctgtc

SEQ ID NO: 1311 - protein, 126 aa, Homo sapiens
MSILGIPRVCDSPVLVDKVRQLPLPFRLFPSSSSVTSLCPYHTPCSYQFCWTRPHPSGTPYLLGVTDTPIAAVLWGCWSLHCLIEPWGFALQIHLNYKYQSSPESVLAVERNCLWVSLLCLFSFFP

SEQ ID NO: 1312 - DNA, 450 bp, Homo sapiens
agagagcggagcacgaggaggcgggggcggcagagaagtgatgctggcgccggggatcggggcagcggcagcggagcagcagcatcttcgggaccctggctgcagcgtccctgtggcccgcgcgccagcccagcggccggagaccacgcgccccgcggacccattagaaacgcttcaagagctgctcagtccaggagtggagggattttgtgaagacacagatgctccctaaaaggagtgcagaaattttcatcatagggagaatgaagacagtgtgtgacaacctgaaaaagacaagtctttggttatcagaaaaactacctttaaagctaattttgaaaacagatcatttagataaaataacatggagaagatgaaaagaaaaatcaagtttacaacagattcagagaaccttgaagttgattatgattttaagaataacagaggagc

SEQ ID NO: 1313 - protein, 63 aa, Homo sapiens
MLAPGIGAAAAEQQHLRDPGCSVPVARAPAQRPETTRPADPLETLQELLSPGVEGFCEDTDAP

SEQ ID NO: 1314 - DNA, 858 bp, Homo sapiens
atgtataatgactttagggattcttcggaaaaaaagcgcaatcttcttccaaaggcgatcccaaggctgttggaggctgaaaccgctaagtcgccccctaccgcgcgggtggcttcgtcccggacccctccagaggctgtgccactgctggaggtgctcagcggggccgggacccgcttggggcgccgtccggggcgagcaccggagcccgactgggctgaatggcaggtcctgaccaagccacccgcgcggccccgcccgcctggcgggatgagtgacggcggcaacaggtgcagagcggcgtccgcggcttctcgggagcccccgagttttgcgatcttcggaagtcgcccgtcaaccggcttcttctacctcagtaaagccttaaggtcacctcaacctctcgaaacccaccagtcccagaggccgactcttctcaagtggaggagaggggaaggcgtgcatggagctttgcctgaccgctcgctctctcctccccagccgtctgagagaaggcgagaggggtcccagaaccgagccctcgctccgcacgccccacgcccgccccgctgtgccgtgcgctctgcccctgagacgccccggctcggagtcccagggccacagccgaaactcgccctcccgcgcccctctccggcttgcagcgcccgcccgcaccgccacctgccacccgaggcgacgcagtccgcttctccccacccgccaggtggcaggttcagggccggggtccgagcctgcttccctgcagctgccacagccaccctcgccgccagggggcgagagtcccaggcaggacaagcagcgctgctgccttggcgtgaaggtggtttcaaactttag

SEQ ID NO: 1315 - protein, 285 aa, Homo sapiens [sequence omitted]

SEQ ID NO: 1316 - DNA, 282 bp, Homo sapiens
atggccgagggcgcggccggcagggaggatccggcgccgcccgacgcggcggggggcgaagacgacccccgagtgggcccggatgccgccggggactgcgtgacggcggcctctgggggccggatgagggaccgtcgcagcggggtcgcactgccaggcgccgcggggaccccagcggacagcgaggcgggcctcctggaggcagcacgggcgaccccccggcgcagcagcatcatcaaggtaagcaaagccgcgccgcaccgggagcgtggctgtgggtga

SEQ ID NO: 1317 - protein, 93 aa, Homo sapiens [sequence omitted]

SEQ ID NO: 1318 - DNA, 3936 bp, Homo sapiens
ctgctggagcgcggccagagcggacgccgaggccgaggaggcgccgagagcgagtgagagctgctagccagttgtcacctctcacagagaggtccacatttgctgaaatgtaactcttatctcatgcactgggagtgatgaacttcactaggaaatcatcgttctttctggaattagacgatataagctgcagctcagaatcagagcaggtcaagttgcttcttttcagtgatcataatcaattatccaggaaaagggacagaagaaatcaggaaaaaggagaatagactctttatgcataggagctttaatatatagttgacacttgaacaacatggatctgaactacacaagtccacttattggtggattttcttcagcctctgccacccttgagacaacaagaccaatacctcctctttttccttctcctcagcctactcaacttgaagatggtgagaatgaagacctttatgatcatccacttctacttgttgaatagtaaatatattttttccttatggttttcttaataacactttcttttctcttgattactttattgccagaatacagtacatagtacatataataagcaaagtatgtattagtttactgtttaagtgataggtaaggcttccactcaacagcaggcaacagccaggtgttgtgacacatgcctgtaatcctagcattttgggaggccgaggtggaggatcgcttgagcccaggagttcaagaccagcctaagtaacatagtgagacccccatctccacaaaaaattaaaatacctaatcatggtggtgcatgcctgcaatcccagctactcaggaacctacaataggagccaaaaaggtggaggttacaatgagccattattgcactactgcactgcactcctgcctgggagacagagtgagaccttgtctcaaaacactacaacaaacaacaacaacagcaacaaaaatcagtaggtattaatagttaggttttttgggagtcagaagttatacacagattttgactgtgcaggggatcagcgctcctaacgcctgcattcttcaagggttacctgtattcttgatacaagttctccttcagatttaagtattatagatatttttccagtctatagcttacctattcattttcttaataatgtcttttgattgatttttaatttttaactttggtgaattccagttgtatactttttttatgattagcatttttgtgtcctatgaaactgttgccttcctcaatgtcactaaattctcttaggttttcttctagcaagtttatgtttcaaattttcacccttaggtctataattcgtcccaaatttatttttgtctgtaaagcaatgtcacgattcattttttttctcaatataattacccagttgtttcaaaactggttattaaagtttttctcttaatcattgaattttcttggcaccaaattattaactcttgacaaaaataattgacccttaagtaagcagacagacaagcagtgcttctattttatagcaatgtaaataatacacaacttacacaaagactttttagaagctaactaacagtggtcctatctaagtacgtacaccagattttttataaccacttttaaaataaaagtatttagattttaacacatagattaggacagagaaagcatatggtggaataaactgtatctttttggccagatggtgctatttctaggtcatcttgataaagagaggaggcaaacatgaaaacttaatgaaaaactatttatgatgctggagagaacatcttggctttgagtcacttttaaatcatagaagaggattattccataaaattatttataatgcctaaaattattctttgcccaaatcataaattttcagcattaccaagaagccatttagtatgtatagggtgtttcagcaagtgcagagatgcccaggtggttgggattcaatacaacgagctgtcacgctgcacattcttggagtacaaccttaatgggcattttcccacctgtgcaattcctctgttttcaccccactccattcatatttcacaaactactctaattatagtatttattattgacctcaggaaaaagaagtttgaaagggtggaaaaaacatgcattttgtctccatggatagtaaatcactgagctattgttccttgggaatcccaattcatgagaaattacatagacttttgccctaacactaatcagctgcctgatctgtaaatatttcagatccttgcctgtatctatttctccttgcagaaaactgtaatttatctagatttttctaataattcactgacattttactgctatccaatgagtaaatcattgttgcttttggtatcttatgattttgttcttttgtgtcaaagtttagctagtttcatctatcaggttggaataaaaaatgcaaattatgactataccacttatatagttacatgatctactgaccaaagttaatcatcactttaatcttggtaactcattcagagccctaattgtaatagcctttgcctgagttacctagagagtggtctcaataatccccttttatttttcatgtagagaaaagggcacacaaaatgatattatctcgatcacccagcacatgtattaaactataacagactttttaaatcatgtgtgatcttttattttttgactgaaagggactaagtttgctgcccagagaagtctttagggagcaaggaaaggtaagcaaataaacttatctggagtcaaaggtctcaaggaaaatcttgctttctataaaaggcagacaacgtcaagactcatagattttcccagggctaaaaatcagagccaattgcctcccatcttgaaaagactcattcatcatgctggttgaagtatcacagatcttgtcaaaatattcatgactcacatacgacccatccaaaagacaaaagccaacaaaatattttaccaaattctaaaatagtgtttgttttattattctttgttattcttcaacaattattgttacctttactatatgaaatataatagcaattccttgtcttcatggtctttctgttacagacatgttttacactgattataccactttagtgaaattcatcatacatattcctgatccaaattccttttttattaaccatatatgagagaaagtggatattaaaataattttgatggtaaaataagcgaaaaaataaagcaagcatggttaaaatgattaaattatggaaaagtgacccatgtgtttcagataaactgacgcttgagggtttttgttgttattgtggtttaaattttattttattttaattttaagttccaggatacaagtgcaggatgtgcaggtttcttacataggtaaagatgtgccgaaatggtggtttgctgcacctctcaacctatcacctaggtattaagccctacatgcgttagctccctcccactgcccctgcagcagatcccagtgtttgttgttccctccctgtgtccatgtgttctcattgtccagctcccacttgtaaataagaacctacggtgtttggttttctgttcctgttttagtttgttgaggataatgacttccatgaagcttgagttttcattctacaatttactgaatgacatttgagcagctagctgactttttaatgccttgattttaataattcaatgagttattgggtgagataatttagaacagcatacatgatatcgttattattagtcaataaaatgctatttatcttatttattactcataacaaaaatatgtatatgacccttcgctatgtttgaatatgtgatatattgaattgaattcactgtgaggcttcagtaggtacctataatattcaaatatgttacctgaaagctgtgaaaaatatatttttaaa

SEQ ID NO: 1319 - protein, 49 aa, Homo sapiens
MNFTRKSSFFLELDDISCSSESEQVKLLLFSDHNQLSRKRDRRNQEKGE

SEQ ID NO: 1320 - DNA, 405 bp, Homo sapiens
atggagagcccgctgggggaagagcacacagacaggcaccggcaggccattgaccagcgggacaaggtggagtttggctggggcagtgggaggagagctggggccgccgagctgccctactccaggggaaaaccacctcccttctcgctcccccatcaccggagagctacttccactcaatacaactttgcactcattctccaagccacgtgtgaccaatttttccggtacaccaaggcgagaaatccggggatacagaaagccctctgtccttgcgataaggtagagggtccaattgagctaacacaagctgcctatagacggcaaactaagagagcacccagtaacacacgcctgctggggcttcaggagcacacacgtccactggggcttcgggagctgtaa

SEQ ID NO: 1321 - protein, 134 aa, Homo sapiens [sequence omitted]

SEQ ID NO: 1322 - DNA, 1761 bp, Homo sapiens
gaaaatgccagctctctatcagccatttgcaatatcaaggggatgcacaagctcctccccactttccctgcctcggccgaccgaactcttctggtgaggcacctgccagctgagctgaccgctgaggagaaagaggacttgctgaagtacttcaaggcacggttggtgcatgacctgtcagataaggggcagctgaaacatacagcttttgccacattccctaaaaagcagctataaaggcattgacaagactccatcagctgaaacttttaggtcatactttagtctttgaatttgcaaaagagcaagatcaagttcactccccatgtcccactccagtctctgaaaaaaaaaaaaaaaggtctgatgaccctgttgaagacgataaagaaaagaaagaattggttatttaacagtagaaaatgtaattacaccaaaccatgggctgacttttcttaattcatgcctcaagtatatgtacccaccaccttccagcacaatcctaacaaacagagtaaatgctttggcaagcgtgcctaagttctatgtacaggtccttcatcttatgaataaaatgaatttgcccacagcttttagatcaattactgcgcagcctcccatctatgaagaccatatgccattgcatccacctcttccacccacatctcctcagccacctgaggaacctccttggccagaagacgatgaggaattatctagtgaagaattagaagatgacagcagtgatgatgaggaccaacagaaaatgaacaaactaatggaactagcaaatcttcagccccaaagacccaaaacaataaggcagcgccatgtgagaaaaaagagaaaaataaaggatatgttgaacatactttcgtgtccttcacaaaacagtttacatctagtgctgttaccttcggatgtatttgaccaaccacaacctgtaggtaataaaagaattgaattccatatatctaccgacatgccagctgcatttaagaaagatttagagaagaaacaaaattgtgagaaaaaaataatgatctacctgttactgaagctgatgcatccagtataggatttggaaaaatctttcccaaacctaatttgaacatcacagaagagattaaaaaagactctgatgaaatgccatcggaatgtatttctagaagggaattggaaaaggacagaatttctagagaagaaatggaaacactttcagttttcagaagttatgaacctggtgaaccaaactgtagaatttatgtaaagaatttagctaaacatgttcaagaaaaggaccttaaatatatttttggaagatatgttgacttttcatcagaaacacagtagatcatgtttgatatacgtttgatgaaagaaggtcgtatgaaaggacaagcttccattggacttcctaatgaaaaagcagcagcaaaagccttaaaggaagctaatggatatgtgctttttggaaaacccatggtggttcaatttgctcgatctgctagacaaaaaccagatcctaaggaaggaaaaagaaagtgttaaaaattaataaaggtttcttttgaatcctgtatctttcaagggctttccaacttggacaggaagaaattgaccacctggactatggaactgtgcataacagctttgaaagtatatttaaaaattaaatacatatgcctttaaatcagtgtattggaactatattatatgtattttaatgaccttcctcaaatataataaattattttcttt

SEQ ID NO: 1323 - protein, 200 aa, Homo sapiens [sequence omitted]

SEQ ID NO: 1324 - DNA, 2362 bp, Homo sapiens
ggcctccccaggcatgtggagctgtcctgtttctgctgggaggacaatttgagctaactggaaaggggattgtgagaaccattactgggagtacagaaagaaaagcaagaggcagttttgcaatttggagtgagaaccagccccctacacccaaggctaagctcctaccatttcagaaattgagagatgggggtgctatcttccttgatgattgcacttcagagagatggttccaggtcattgaaaaagatattccttgaccttaaagctgtgccgaataatatttcattttctggatatacctcactttatctacttgctacagaagggcatcctgcttactttaaagttttggcaattaggaataaagctgctataagcatccagtcctgcaggttgaaaaatccaagatcatggcactggcaggttttgtgtctgctgagggcctgatcttcacttccaagatggtggctcgagtgctgccttctccaggatacaggaatactgttcctcacatggaagaagtgaaagatcaatgaatccactcttgcaagccaatttttgctctgtttgtttgtttttgagacaaggtctcactctgtcaccctagaggttggagtgcagtggcacaatctcttctccctgcgacctccacttccctgctcaagtgatcctcccacctcagcctcccaaataactggaactacaagcgatgactaccaaaaaatgtctaatttgtttgtttgtttgtttttgctagagactggcttttgctatgtcagccaggctggtctcgaactcccaggctcagcctatccacctgcctgggtctcccaaagagcttggattatagacatgacccactgcatccagccacaagcccattttataatggcattattccattcatgaggtcagagcccttgtgacctgaactcttatccttaggccacaaattctaatgctgttgcattaggaattaactttctgacacatgaattttaaggaagacaaaaacattcaaactacagcagattttattctatatgtaattgttcaagaaagtgaattactgtacatgaatataaggagttttttcactaagaactctcaaaatagtaaaaacagaggaataaaaacagaacaagggtaactgagactaaactagcaagacaccttcaaagaagccacaatagttcagagaactaaaacatggattcaagatttatggaaacttaaaaaaaagagcttgacaattttataaagactgaataggaatataattaatccaagaatttcctttatggcctgaaaggtgacataataataatacaaacaaacacttatgcagcatttattatgaacagtgcttttcaagatcatttaattctgtcaacaattctgtgtagcaaataatatgattttttttatagaagagaataggggtgacaagggaagcatggtggctgattattaacattacactggaatcttccacagagtaaaatattgtgtgtaaacaagcaaagatatttgagttacagatttaattcaatactttagtgttgcatgatatcttaatgaaggaaacccaaaattctgtaatcaagaaagataaattttaatgcttcatagatagatttattattcaaaagattaatacaacaatatgttggccaaatacagcccccattgcaaagtagtattaacaaatacgtgcagaaaactaacactttacccacatacattgatttagattttttccagaaagtttaatttcatataaatattttaccactttatattaggttgctccaaaagtaattctggtttttgctaataggtatgaattttcagtcgaatatttgcaaggaatactagattctgcaactaatgctttatagggaaaatagtcactaacatagaagaacaaaaactctattttaaagttagcccatatgtctgactcttcaaaaaaatttttactactgcactgacaggtgaaatttctttcgtgctggggggatgtaggggaaagaatcacaaagtttttacagatttatttcctttccagattctatttgcaaagcaaggcttacaaaagttttttaatatagatttaagttttccatgatagtgggaaagttttcaagatagctctataaacataatctcctaaatctgatgagtctctgctagacatgaaaaaaaatacattgtctttcacatctttctgtgctaagaatttaggctgcaaagaaaatttaaaggcgaaattcttatgtgaacttatttattctatataattattagacttcattttgtctaatcattattgatcatttaataaaatcagttgggg

SEQ ID NO: 1325 - protein, 87 aa, Homo sapiens
MGVLSSLMIALQRDGSRSLKKIFLDLKAVPNNISFSGYTSLYLLATEGHPAYFKVLAIRNKAAISIQSCRLKNPRSWHWQVLCLLRA

SEQ ID NO: 1326 - DNA, 234 bp, Homo sapiens
atgaggaaaagtttggaacttgctagaaacttgttaaatggttgtgatcaaaatgctgatagtgatatggacaatgaagttcaggatgaggaggtctcaggtggaaataaggaacttattgggaactggagcaaaggtcacttttgctatgcattagcaaagaactcggaggcattgtgcctctgccctagagatctgtggaactttgaacttgggagcgatgatttaaggtaa

SEQ ID NO: 1327 - protein, 77 aa, Homo sapiens [sequence omitted]

SEQ ID NO: 1328 - DNA, 291 bp, Homo sapiens
atgtgggaaagtttggaattttctagagacttggaaggctcagaagacaggaagatgtgggaaagtttggaacttcctagagacttgttgaatggctttgcccaaaatgctgatattgataaggacaatgaagtacaggctgatgtgagctcagatggagatgaggagcttgttgtgaactgcaataaagtttctgaagaagactgctctctttggattcctgacacagaatttaaccagaaggtaaaaagaaagaagaggaaaataaacaagattgccatgaagggttga

SEQ ID NO: 1329 - protein, 96 aa, Homo sapiens
MWESLEFSRDLEGSEDRKMWESLELPRDLLNGFAQNADIDKDNEVQADVSSDGDEELVVNCNKVSEEDCSLWIPDTEFNQKVKRKKRKINKIAMKG

SEQ ID NO: 1330 - DNA, 144 bp, Homo sapiens
atgtgggaaagtttggaacttcctagagactcattgtatgactttgaccagaagcctgataatggtatggacagtaaggtgcaggctgaggaggtctcagatggagatgaggaacttgttggaaactggagcaaagaatcctaa

SEQ ID NO: 1331 - protein, 47 aa, Homo sapiens
MWESLELPRDSLYDFDQKPDNGMDSKVQAEEVSDGDEELVGNWSKES

SEQ ID NO: 1332 - DNA, 351 bp, Homo sapiens
atgctggctgcagcagggaggcacagctgggactgcacgctccgaggagccagtgggagccccgccccttctgagttggagcaggagctatcctggtgctactgcagctgctcaaatccagctgcagatccaggcctcctgctccatggagcaggcagaagatggggacaagtgggagccctgccccttccgagttggtggggcagagctccacaggtgcagctgcagctgccgctgccctcccaggcacaggcacagaacctgggcatctctgcagcttgcaccctcaggggccaggaagccccataccctctgtgcctgcaggctgggggtgtctgctccactgcttag

SEQ ID NO: 1333 - protein, 116 aa, Homo sapiens
MLAAAGRHSWDCTLRGASGSPAPSELEQELSWCYCSCSNPAADPGLLLHGAGRRWGQVGALPLPSWWGRAPQVQLQLPLPSQAQAQNLGISAACTLRGQEAPYPLCLQAGGVCSTA

SEQ ID NO: 1334 - DNA, 258 bp, Homo sapiens
atggccagctcagtggttgcaccgagaagaagttccatagcacttctcaaagccaaacctgcaccaaaaaaaaaggtcatggtcactgttcggtggtctgctgctgatctggtccactacagctttttgaatcctagcaaaatcattacatctgagaagtatgctcagcaaatcaatgagatgcaccaaaaactctactgcctaaaaccagcattggttaacagaaaggacccaattcttctccatgacaacgtctga

SEQ ID NO: 1335 - protein, 85 aa, Homo sapiens [sequence omitted]

SEQ ID NO: 1336 - DNA, 195 bp, Homo sapiens
atgggtgaagctgaactagcagaaagtccaaaagcctatatcccagaacattgggaatactataagcatcctatatcaagacggattgcccacagtttccataatagtcctgaaaagaactatgaaagagcagtgaccgtcattcagatcgaagccaaaaaggctgaattacagttaaagcagctggaaatatga

SEQ ID NO: 1337 - protein, 64 aa, Homo sapiens
MGEAELAESPKAYIPEHWEYYKHPISRRIAHSFHNSPEKNYERAVTVIQIEAKKAELQLKQLEI

SEQ ID NO: 1338 - DNA, 420 bp, Homo sapiens
atggcagataaatgcgacaaacgctccgaccgctgcagtctgccctggcctgtttctggagtgctgagcaagcatgcctgcaggccccattacagcacacagccaactggcccaggtagggctgcctcactccccagcaagggggcccagctggagctcgaggagatgctggtccccaggaagatgtccatcagccccctggagagctggcttacagcctgctgcctcctgcccagactggatgcccagaccccagggactgcggctccagcccaattctatgagtgtctccctagccagatgggggaaggggccaagcaggaggatgagaaggcctgggatacaactcagatgcagagcaaaaacgtgctgaagacccgccggcagaagatgaaccaccacaagcaccggaagctgtga

SEQ ID NO: 1339 - protein, 139 aa, Homo sapiens
MADKCDKRSDRCSLPWPVSGVLSKHACRPHYSTQPTGPGRAASLPSKGAQLELEEMLVPRKMSISPLESWLTACCLLPRLDAQTPGTAAPAQFYECLPSQMGEGAKQEDEKAWDTTQMQSKNVLKTRRQKMNHHKHRKL

SEQ ID NO: 1340 - DNA, 480 bp, Homo sapiens
atgatgctagacaaaaagcaaattcgagtgactttcttgttcgagttcaaactgggtcttaaagcaatggagacaactcaaagcatcaacaatgcatttggcccaggaattgctaacgaacatacagtgcagtggtggttcaagaagttctgcaaaggagatgaaagccttgaagatgaggagtgtagtgattggccatcagaagttgacaatgaccaattgagagcaatcactgaaattgatcctcttacggttacaagagatagtgctgaagaaattaacattgaccattttacggtcgtttggcatttgaagcaaattggaaaggtggaaaagctccataagtcagtgcctcacgacctgagtgaaaaaaaaaaaaatgaagtgttgtcttctcttattctacacagcaacaatgaaccatttcttgatcgaattgtgatgtccaacaagaagtggattttatacaatgaccagtga

SEQ ID NO: 1341 - protein, 159 aa, Homo sapiens
MMLDKKQIRVTFLFEFKLGLKAMETTQSINNAFGPGIANEHTVQWWFKKFCKGDESLEDEECSDWPSEVDNDQLRAITEIDPLTVTRDSAEEINIDHFTVVWHLKQIGKVEKLHKSVPHDLSEKKKNEVLSSLILHSNNEPFLDRIVMSNKKWILYNDQ

SEQ ID NO: 1342 - DNA, 3222 bp, Homo sapiens
ggtccggcagagatcgcggagagacgcagaacgcagcccgggacaggccgagccctctgccctgcagacaccggaggcctctgctgtggctgcccactggctgtgctcagaccttgaagccgcagcgaacctctctttcccaccccacctcggtgactgatggcggccgtggcgtctcccagcccggcccccgccggcacccgggtctcccgacccaagcctgctgggcctcgacgaaacccccgcagagccgccaggacgcagcgcctttgggcggcgccgggcgtggtgggccgggaagtatggcggccgctcgaacgccgcgcggcggaggccattaaggcgtggacggcccggaaggcggcctagggacgcaagcaggcttggccgcctctttcggccacggagccgcgcagatccggttcccgggtgaccactctgtcgccattgggcgagacctacctagtcctgacgacaacggacaaaggccttaaggggcctgaaaggtgagcgaagtcccgaacaacgacgggtggaacggttagcggccatcgggcggttggtcttcattctaccagactttgctgtcggaagagagaaatggtagaatgacaggccacgtttggccagttggaaatgcccaccaccctctgggaagatttactggccgtttatggaaggcctgtgtatataatatgaaaaagctgctctcaactccaccccaaccttttaatagaaaacatttgtcacatctagcccttctagatggaaagaggttgtcgagttatgataaaagagttagaaagttacacatcttgtaaattctcatttgtttaaaagaaatcgtagaaaatacatgtcttctggagatgacttttggaaatggaattgttaagacggcctctggaagcgatacgttcacgtttgttaagtgggttagatgacatggagctggaagacctgagaaggaagagaagaaggttctatgctagactggtcatatttagaagacattttcatattctatccattgttttgtgtgcattttattcctcactactgtgtatatagttgacaatgctaagcttttttgaaatgtctcttctttttagatgttctgaagtgcctgatatgttaaaattagaggtagcaaaatcacattttgtaaatacctttttgttacaattcataggaaatattttttggggggaatggtcaaatcacctgttgagtaatactcattgtgtttgtgcagtggttcaggggaggagagaggagggggaggtgcagagagctctatgccatcctgtttacagcgaggcaagatgtatgtctgtgcattttgttttacttatctgtgtatataatgtacataaaggacagacgagtcctaattgacaacatctagtctttctggatgttaaagaggttgccagtgtatgacaaaagtagagttagtaaactaatatattttgtacattttgttttacaagtcctaggaaagattgtcttctgaaaatttgatgtcttctgggttgatggcgatgggaagggttctaggccagaatgttcacatttggaagactctttcaaattataactgttgttacatgtttgcagtttattcaagactgctgtatacatagtagacaaattaactccttacttgaaacatctagtctatctagatgtttagaagtgcccgatgtatgttaaatgtataggtagtaaaataccactttgtaaatatctttttgctaaaattcataggaaatgcttttggaaattgaattgtgaagccacctttgtgagcagtatagtaatgtgtatacttgttcaatggtttagaggaggtaggagggaagaaattgcaagaggtaatatactagtgtgttcatacttggacattttcagacaccatttttctatacgttttgtgcattttgttttgctctgtatatagtatatataatggacaaatagtcctaatttttcaacatctagtctctagttgttaaagaggttgccagtgtatgacaaagtagtaaaattagcatattttgtacgctttgtgttaaaattcataggaaaacttgtcttctgtaaagacttttgcataggaatttgttcgaccatctctaagcattacatgtgcctgtacttgtccactggattgaaggcagagaaggaagggaggagggaatgattcaaggccaaaatggccacatttagaagatacctcagatgataaccattgttatgtgtgtgcaattttatttaacagtgatgtgtatgtggtggacaagttatatgaaatatctagtctttctagatatttggaagtgcttgatgtatttaaaagtggtagtagaataacactttgtaagtagcttttaaaaactgatgggaaatgctgtttggaagtggaattgttgaaccacctgggaggtgggagggaagaaattgcaaatggtgttttgccattgcaattattagaaaatttcagcttaaaaaaaaatggtctggtctcaaggatagttgtttgcaacttagctcttttataataatgtaaaaaaagatttgtctgtctttattttcaaaagctgactttatatagattctagcttctgacctaaatcatttccttgatataataaacttttacatgaaataatactttcattcagtcgattaaaataattttcctgccagctagtagagtgcaacatgtgtaaaaatcttacagttaaatgggatcaaatcagacagtatagatttcctagaccataaaatctataaaaatcagaagcaatggatttaactcccaaattgttcatttaaagatctaattatttgtgtttgacattaaaataaatcttaaacataagaaagcacttttttttaggaacagtgttatacttgttatagtactaaatgtagtaatcttctactggtagttggattactcttttactcactacatatcgatatttaaatcacgtgcttaattggtcctatttagccttgtttcatcttattagttacaaggtgatatttatcaaatgacctaaaccattattcaaatttatttaaaaaaaacaattgagatgttatagttttactactgtaaagtatattaaaagagacattttctatgtgatctatttggaaattattttgttggaaaaatcatcatgtaagttccagataaagagacatttt

SEQ ID NO: 1343 - protein, 69 aa, Homo sapiens
MAAVASPSPAPAGTRVSRPKPAGPRRNPRRAARTQRLWAAPGVVGREVWRPLERRAAEAIKAWTARKAA

SEQ ID NO: 1344 - DNA, 3273 bp, Homo sapiens
ggtccggcagagatcgcggagagacgcagaacgcagcccgcgccttcagggccctctggccccgggccggcggatgaactggggggcctcgggacaggccgagccctctgccctgcagacaccggaggcctctgctgtggctgcccactggctgtgctcagaccttgaagccgcagcgaacctctctttcccaccccacctcggtgactgatggcggccgtggcgtctcccagcccggcccccgccggcacccgggtctcccgacccaagcctgctgggcctcgacgaaacccccgcagagccgccaggacgcagcgcctttgggcggcgccgggcgtggtgggccgggaagtatggcggccgctcgaacgccgcgcggcggaggccattaaggcgtggacggcccggaaggcggcctagggacgcaagcaggcttggccgcctctttcggccacggagccgcgcagatccggttcccgggtgaccactctgtcgccattgggcgagacctacctagtcctgacgacaacggacaaaggccttaaggggcctgaaaggtgagcgaagtcccgaacaacgacgggtggaacggttagcggccatcgggcggttggtcttcattctaccagactttgctgtcggaagagagaaatggtagaatgacaggccacgtttggccagttggaaatgcccaccaccctctgggaagatttactggccgtttatggaaggcctgtgtatataatatgaaaaagctgctctcaactccaccccaaccttttaatagaaaacatttgtcacatctagcccttctagatggaaagaggttgtcgagttatgataaaagagttagaaagttacacatcttgtaaattctcatttgtttaaaagaaatcgtagaaaatacatgtcttctggagatgacttttggaaatggaattgttaagacggcctctggaagcgatacgttcacgtttgttaagtgggttagatgacatggagctggaagacctgagaaggaagagaagaaggttctatgctagactggtcatatttagaagacattttcatattctatccattgttttgtgtgcattttattcctcactactgtgtatatagttgacaatgctaagcttttttgaaatgtctcttctttttagatgttctgaagtgcctgatatgttaaaattagaggtagcaaaatcacattttgtaaatacctttttgttacaattcataggaaatattttttggggggaatggtcaaatcacctgttgagtaatactcattgtgtttgtgcagtggttcaggggaggagagaggagggggaggtgcagagagctctatgccatcctgtttacagcgaggcaagatgtatgtctgtgcattttgttttacttatctgtgtatataatgtacataaaggacagacgagtcctaattgacaacatctagtctttctggatgttaaagaggttgccagtgtatgacaaaagtagagttagtaaactaatatattttgtacattttgttttacaagtcctaggaaagattgtcttctgaaaatttgatgtcttctgggttgatggcgatgggaagggttctaggccagaatgttcacatttggaagactctttcaaattataactgttgttacatgtttgcagtttattcaagactgctgtatacatagtagacaaattaactccttacttgaaacatctagtctatctagatgtttagaagtgcccgatgtatgttaaatgtataggtagtaaaataccactttgtaaatatctttttgctaaaattcataggaaatgcttttggaaattgaattgtgaagccacctttgtgagcagtatagtaatgtgtatacttgttcaatggtttagaggaggtaggagggaagaaattgcaagaggtaatatactagtgtgttcatacttggacattttcagacaccatttttctatacgttttgtgcattttgttttgctctgtatatagtatatataatggacaaatagtcctaatttttcaacatctagtctctagttgttaaagaggttgccagtgtatgacaaagtagtaaaattagcatattttgtacgctttgtgttaaaattcataggaaaacttgtcttctgtaaagacttttgcataggaatttgttcgaccatctctaagcattacatgtgcctgtacttgtccactggattgaaggcagagaaggaagggaggagggaatgattcaaggccaaaatggccacatttagaagatacctcagatgataaccattgttatgtgtgtgcaattttatttaacagtgatgtgtatgtggtggacaagttatatgaaatatctagtctttctagatatttggaagtgcttgatgtatttaaaagtggtagtagaataacactttgtaagtagcttttaaaaactgatgggaaatgctgtttggaagtggaattgttgaaccacctgggaggtgggagggaagaaattgcaaatggtgttttgccattgcaattattagaaaatttcagcttaaaaaaaaatggtctggtctcaaggatagttgtttgcaacttagctcttttataataatgtaaaaaaagatttgtctgtctttattttcaaaagctgactttatatagattctagcttctgacctaaatcatttccttgatataataaacttttacatgaaataatactttcattcagtcgattaaaataattttcctgccagctagtagagtgcaacatgtgtaaaaatcttacagttaaatgggatcaaatcagacagtatagatttcctagaccataaaatctataaaaatcagaagcaatggatttaactcccaaattgttcatttaaagatctaattatttgtgtttgacattaaaataaatcttaaacataagaaagcacttttttttaggaacagtgttatacttgttatagtactaaatgtagtaatcttctactggtagttggattactcttttactcactacatatcgatatttaaatcacgtgcttaattggtcctatttagccttgtttcatcttattagttacaaggtgatatttatcaaatgacctaaaccattattcaaatttatttaaaaaaaacaattgagatgttatagttttactactgtaaagtatattaaaagagacattttctatgtgatctatttggaaattattttgttggaaaaatcatcatgtaagttccagataaagagacatttt

SEQ ID NO: 1345 - protein, 69 aa, Homo sapiens; identical to SEQ ID NO: 1343

SEQ ID NO: 1346 - DNA, 681 bp, Homo sapiens
atgagccctctcacctatcgtggacaccgaggaaacgcagcagagatgggcacccaggctgcccagatcctctggcagcctcgggtgctcgtccacttcgctcctcctccgcctttgctgccgcagccgcaggtgcgcaccccaccgcgtccctgcttccctcctcgagctcttgtggtcgagctcagactgggcgacagagcgtgtgaggagacgattgaaaaacccaaaaagaagaaaaagcaaaagccccaggagattcatcaggagaatggaatggaagacccatctatctctttctccaaacccaagaaaaagaaatctttttccaaggaggagttgatgagtagcgatcttgaagagaccgctggcagcaccagtcttcccaagaggaagaagtcttcacccaaggaggaaacagttaatgacaccgaagagtcaggccacagaagtggctccaagaaaacgaggaaattctccaaagaggagctggtcagcagtgggcctgaagaggcggctggcaagagcagctccaagaagaagaaaaagttccataaagcatcccaggaagattagaatgcaaatggacattctctgggaggtggggcataccatagcccaaggcgacatttcccaccctgtgccgtcttccccaataagaacaaattcacaaaaaagaga

SEQ ID NO: 1347 - protein, 191 aa, Homo sapiens
MSPLTYRGHRGNAAEMGTQAAQILWQPRVLVHFAPPPPLLPQPQVRTPPRPCFPPRALVVELRLGDRACEETIEKPKKKKKQKPQEIHQENGMEDPSISFSKPKKKKSFSKEELMSSDLEETAGSTSLPKRKKSSPKEETVNDTEESGHRSGSKKTRKFSKEELVSSGPEEAAGKSSSKKKKKFHKASQED

SEQ ID NO: 1348 - DNA, 879 bp, Homo sapiens
atgatcaatgatagttactttggttggcttatgctccttgggttccctgggaagcctcagctggagatgatcatctctggggttgtctttttcttctatgcaatttctttgatgggaaatatggtccttatcctgctgccattactggataaacatctccaaacccccatatatttctttcttagaaatctggctatcttggatctttgttacaccacaaatatagtcccacagatgttggtcaatgcctggggtaaagacaagaaaatcacttttggtggctgtgcttttcaacttttcactaatgtgacgctatgcacggttgaatgtatgcttctggctgtgatgtcatatgacccattcaatgctgtctgcaagcctctggactatatgaccataatgaacccccaactctgtcaaggcctggtggccatgacctggttaattggtgtcactaattgcatgatactttccccctgtcctgtgagtcttcctcgatgcggagaccaccacctggatcactatttttgtgaaatatctgcaatggtcaaaattgcatgtggggctaccacagtcatggaggaaactaaaccttatttgcattgtgttgttgttgttgttttcattttccttgcatcacttcttctcattcttgtgtcatatggcttcattgctatggctgtactcaagatcaagtctgcagcaggaagacaaaaagcatttgggacctgtttctcccatctcattgtggtatccatcttctatgggactgttagatataggtatatagagccaggaaacagtccatctcaggatgagggcaaacttctccatatattttactccattgttactcccaccttgaacccatcccactaa

SEQ ID NO: 1349 - protein, 292 aa, Homo sapiens
MINDSYFGWLMLLGFPGKPQLEMIISGVVFFFYAISLMGNMVLILLPLLDKHLQTPIYFFLRNLAILDLCYTTNIVPQMLVNAWGKDKKITFGGCAFQLFTNVTLCTVECMLLAVMSYDPFNAVCKPLDYMTIMNPQLCQGLVAMTWLIGVTNCMILSPCPVSLPRCGDHHLDHYFCEISAMVKIACGATTVMEETKPYLHCVVVVVFIFLASLLLILVSYGFIAMAVLKIKSAAGRQKAFGTCFSHLIVVSIFYGTVRYRYIEPGNSPSQDEGKLLHIFYSIVTPTLNPSH

SEQ ID NO: 1350 - DNA, 2965 bp, Homo sapiens
cggacgcgtgggtgcgaggaaagcaaagtctgggccatggagatgagcctagtcctgctgttcctgatccgcactgccctttttgcaccccagggagctgctgctgagccccacagtctttgttacaacctcacggtgctgtcccgggatggatctgtgcagtcagggtttctcgctgagggacatctggatggtcagctcttcctgctctgtgacaggcagaaaggcagggcagggccccggggacagtgggcagaagcagtcctgggagctgagacctgggacacagagactgaagacttgacagagaatgggcaggagctcaggaggaccctggatcatatcaagggccagaaaggaggaagaggagataaatatatgaaggtgctgtttggcacagaatttaatagggaagaaagagacagtataactcaccagtgctgggtctcatcatcctgcaatttcagaacaactatgaatacaaaaagaattttaaaatcccagtcctgcctagaaaggggaagtcatctctaaatatggtggccctggggcagctggcctccctgccaggcctcttccatgggggccctttctgcagtgactgtggtttcttcccattttactctgtcctgtgtcctgactgaagcgacaaggtgtgtctgcagctgtgctcacacctggaggaaacctcaatggtgacatgatgaccctagcagcacatcctctttcctgtgtcaagaagcatcgtccggggaggtgagaagaagacagtcctccctagaattgaagaaccagggagaagcagatgggctgggcagatcaagcacaaacctgagatccaactgtccctcttatgcgcctgggtttcttcactggacaccagtatgagtcaactttcctgtaaagcagaacaagcacgagattggaccatgttagaggaggaatggtgtcatctccacttctggagagatccctgtccccgtgttcgggggaaggaccaagcctcactcccatgcagagaagaggctctgactgtaactgcacctgtggagagtggagagacaagaagtgtgagctatttataaagctgagcacctgactgccgcgggagtgaatagtgaccacacacagcaagacctgggacatggcagtgactgtgtccagaactgacagaactaatctatcatattagaaatcaagaaagtgtctgctctagggttggggagggtgatttatgaccaagtagaacccagtggtgtttcctggaggctggcaatgctattccttgatgtggctgctatttacctgagtgttcactttgtgaaaatccacggcccacttatggtttgtccacctttctccatgcatgttgtccttcattcaagtatacattactgatgttttgaaacaattctctctaagctaatatagaatctccattactgaaagtccttagaaatgctgcattggaaaaaattagtccaattattaaaaatctatgaaataaatgctgtgactcagacattaagaggagaatctacaacaagagcagtaggcttgggagctaacacaagaacagctttggaaatggctgttgagccaggaactaggaatcaaaacccaaaaaggcccatgcaaggtggagggtgtgaaatgatgccccagtagtgcatgaatgaatgagtcatgggcagtggctcatgggttgcttggtcagtcaggaacttgagcaaaataaagttggaaaactgggggatggaagagagaggtatgcacagacctcttgacatgggcagagcttcagaagatggtggttgcaggtttccccaaatagagaacatcaataaaaaggtagaaattttacaaagagaccagataaaaagtttggagctgaaaagtgcaataactgaaatgaaaaattcactagaggggctccagagcaaatttcaccatgcagaatggagaatcagcaagcttgaagataagacaattgaaattctctagttcagtagcagaaagaaaaaaaattatgaagaaaaataaacagaactttaaagatctgtgagacaacatcaagcacatgcactttgggagtcctcaaagaaaggagagagagaaaggagaagaatgactatttaaagaataactccaaaccttccaaatttgatgaaaaacattattcatccaacaaacttgacaaattttaagcagcaaaaaaatttaaatttaaagaggtccacaccaagagaacattataatcaacctgtcaaaagccaatgacaaacagagcatattgaaatgaataacagagaaggaacttttcaggttcaatggatcctcaataagattgcagcccagttttcttcagaaaccatagagttcagaaggcactggaatgttgacaaatttagaggtcagaaaaaaaaagactgtcatgcaggaattgtgtgtctggaaaaactctccttcagaaataatggattttatatatatataaatatatatatatatatatatatacacacatatatatacatatatatgactatacatagtaccacatatatataactatatatagtactactatgaaattatatatatagtactatatatagtagtcatactataaaagctagtagtaatatgtatatttttggtgtttatatgtgtgtgtgtgtgtgtgtgcatatatatatagtactatatatagtagtcctataaaagctagtagtaacatgtatatttttggtgtttaattcttcctttgtttttcctatttggtttaaaagaaaatgcccattgactaatgaatgaataaacaacatgtagtgtatttctaaaaaaaaaaaaaaaaaaaaaaaaaaaaaaaaaaaaaaaaaaaaaaaaaaaaaaaaaaaaaaaaaaaaaaaaaaaaaaaaaaaaaaaaaaaaaaaaaaaaaaaaaataaaaaaaaaaaaaaaaa

SEQ ID NO: 1351 - protein, 165 aa, Homo sapiens
MEMSLVLLFLIRTALFAPQGAAAEPHSLCYNLTVLSRDGSVQSGFLAEGHLDGQLFLLCDRQKGRAGPRGQWAEAVLGAETWDTETEDLTENGQELRRTLDHIKGQKGGRGDKYMKVLFGTEFNREERDSITHQCWVSSSCNFRTTMNTKRILKSQSCLERGSHL

SEQ ID NO: 1352 - DNA, 4556 bp, Homo sapiens
ctgaggtaggcggatcacctgaggtcggcagtttgagaccagcctgaccaacatggagagaccccatctctactaaaaatacaaaattagccaggtgtggtggctcatgcctgtaatcccagctacttgggaggccaaggcaggagaattgcttgaacccaggaggcagaggttgcagtgagccgagatcacaccattgcactctagcctggtgaaggagcaagactccatctcaaaaaaaaaaaaaaaaaagaaagaaagaaaaatacacattcagaggagacaaaaaataaaaaacaatgatgcatgcccacaggatctagaaaataacttcttaagggcaaatctaggagttattggccttaaagaagagatagagaaagagataggaatagaaagtttgttgaaagggataataacatagaacttcctaaacctacagaaagatatttatatccaagtacaagaaggttatagaacaccaggccaatttaacccaaagattacctcaaggcatttaataatcaaactcccacaggacaagggtaaagaaaggatcctaaaagcagcaagagaaaagaaacagataacatacaatggagctccaatacatctggcagtatatttttcagtggaaaccttacaagccaggagagagtgacatgacatatgttaaagtgctgaagggaaaaaaccttttaccctagaatagtatatccagcaaaaatatccttcaaacatgaagaataaacaaagacttccccagacaaacaaaagctgagggatttcatcaacactagactggtcccataagaaacgcttaagggagtactttggtcagaaagaaacagacattaatgagcaacaaagaatcatctaaaggtaaaaaactcactgttaagagtaagtacacagaaaaacccaaagtgtgataacattgtaactgtggtgtgtaagtagaaagaataaatgataaaccaatcaaaaatagtaactacaacttttcaagaccagtcagaaaaataagataaaattagaaacaacaaaaagttaaaaagtggggggatgaagttaagatgtagagtttttattagttttttgtttgttaatgcaaacagtgttaccaggttaaaataatgggttacaaaatagtatttgtaatccttatggtaacctcaaacctaaaaacatacactggatacataaaaaataaaaagcaaaaacctaaatcatatcaccagagcaaactaccttccctaaaggaagacaggaagaaaagaaagaagaagaccacaaaacaaccagaaaacaaataaataacaaggcaggagtaagtctttacttatcgataatacattgaatggaaatatggactaaactctccaatcaaaagacatagactggctgaatgaatggagaaaacaagacccattgatctgttgcctacaagaaacacacttaaactataaagacacacataggctgaaagtaaagagttggaaagagttattccatgccaatggaaaccaggaaaaagagaaggagtattgattttgatacaaaaactatgagacaaataaagtcactatacaatgataaaggggttaatatggtttccatttgtgccccacccaaatttcgtgttctattgtaatcctcaatgttggaggtggggcctggtgggacgtgattagatcatgggggtggatctttcatgactaattcagcaccatcttcttagtgctgttctcatgatagtgagttcttctgaaatctggttgcttaaaagtgtgtagcacctctccacaccacccgcttgccttggtctactcctgctatgtagatgcttgctcccactttgcattattccatgagtaaaagctccctcaggccttcccagaatcagatgccgctatgcttcctgaacagcctgtggaactatgagccaattcaacctcttttcttcataaattaacaagtcttgggtatttctttatagcagtgtgagaacagaataatacagaaaattggtaaagaggagtgaggcattgctagaaagatacctgaaaatgtggaaacagcagtggaactgggaaatagacagaggttggaagagtgtggagggctccgaagataggaagatgaggggaagtttggaatttcttagagatttgttaaattgttttgaccaaaatactgatggtgatatggacaatgaagtccaggctgaggaggtctcagatggagatgagggacttattgggacctggagtgaaggtcacttttgttaggacattgtggttggagacattgtgcccctgccctaggaatctgtggaactttgaacttgagagcgaagatttagggtatctggcagaagaaatttctaagcagcaaagcgttcaagacgtggcctggctgcttctggtagtctgtgctcatatttgtgagcaaagacatgacaagaaactggaacttatatttaaaaaggaagcagagtgtaaaagtttggagaatttgcagcctggccatgttgtagaaaagaaaaaaaccattttctggagaggaattcaagctagctgcagaaaattgcaagtaacaaggagcaaaatgttgatagccaagatagtgggaaaaacaccttgaaggcatttcagataccttgggggcagcctctcccatcacaggcccaaaggcctaggagggaaggatggtttcctgggccaggctcagggtcctgctgccctgcacaacctcaggaaactgctctccaaatcccagctgctccagctccagcttcagctcaaagggccccaggtatagctcaggctgctgctccataggatgcaagttataagccttagtggctcccgtgtggtgttaaattaagcctgtaggtgcacagagtgcaagaattgaggcttgggagcctccaactagatttcagagtatgtgtgggaaagcctggatgtccaggcagaagccagctgcagggacagagccctcatggagaacctctactagggtagtgtggaggggaaatttggggttggagttcccacacagcttcccctctggtgtactgcctagtggagctgtgagaagacagccactgtcctccagattccaggatgatagatctgccaatgacagcttgcactgtacaactggaaaagccacaggcagtcaatgccagcccgtgaaagcagtgacagtggcttaccctgcaaagtcccaggggctgagctgcccaaggccttgggagcccaccccttgcaccagtgtgccctggatgtgagatatggagtcaaaggagagtattttggagctttaagatttaatgactacctgctgggtttcagacttgcatgggtccagtagcccctttcttttggccaatttctcacttttggaatgggagtgtttacccaattcctgtacccccactgtatgttggaagtaactaactgtttttttattttgtaagctcacaggtgggagagacttgccttgtctcaggttgagactctggactttggacttttgaattaatgctggaatgagttaagactttgagggactgttgggaagatataactgtattttgcagtatgagaaggacatgagatttgggagacaccagaggtggaataatatgatttggatctgcatccccaccaaaatctcatgttcaattgtaatcctaaattttggaggttgagcctggtggaagaggattggataatgggggtggtttctcatggtttaacaccatccccctgggtgctgttctcatgacagtgagtgagttattgtgagatctgattgtttaaaagtgtgtgccacctcctcccactttcctcctgctccagccatgtaagacaggcttgcctccccttcaccttttgtcatgattgtaagtgttctgaggcctccccagccatgcttcctgtacagcctgcagaactgtgagccaattaaacctcttttctctatatattacccagtctcgggtatttctttatagcagtgcaagaatagactaatacagggttcaattcagcaagaggatataacaaatataaatatatatgcactcaacactgcagcacccagatatataaagcaaatacgattagagctaaagagagagagtgaccccaatacaataatagctggagacttcaacaccacattttcagcactggacagatcttccagacagaaaataaaaaagaaacatcagacttaatctgcactgtagatcaaatggatctaatacatacttgcagaacattttatccaatggctgcagaatacacattcttttttagcacatgtatcattctcaaggatagaccatatgttaggtcacaagtcttaaaacattaaaaaagttgaataccatcaagcatcttctctgaccacagtggaatacaactagaaactaataacaagaggaatttttgaaactacaaatacatgaaaattaaacaatatgctcctgaatgaccattgagtcaatgaagaaattaagaaggaaattgaacaatttc

SEQ ID NO: 1353 - protein, 143 aa, Homo sapiens
MKSRLRRSQMEMRDLLGPGVKVTFVRTLWLETLCPCPRNLWNFELESEDLGYLAEEISKQQSVQDVAWLLLVVCAHICEQRHDKKLELIFKKEAECKSLENLQPGHVVEKKKTIFWRGIQASCRKLQVTRSKMLIAKIVGKTP

SEQ ID NO: 1354 - DNA, 4481 bp, Homo sapiens
atgcgcgtaagttctccccgcggtagacttcaaatactctttgtcctgcccctgcttggcgaaatttaccgaaattatctacctatcccgctggagtgggagccgggggagagctggaaccgcgtctctgctgctcacctttgtgtccttagctccttcgcatggggtccgaccgcaacacgtgcgctggataaacgcttgttaactggagctccctctttgcccactagcagggcattagctggtgctgaagacagtggctgcttggcgagcctggatctccaagtgaccccctcagcaactcctgatgaacaggactgaagccaatattaaagcaagtcaaccaaaggttctctggtgtagacaagacagcaaaaggacagactaccttgtggaacctagcattgttctccttctgcagcactaagtaacatttgttctccgttaagatctttgcaaaccacacacaagaattgctggtcatcctgccaatagatgctgctcacagaaccaaatttcctgtgctgaattgtcactcatgggcttgagagtaggagactggagaccaaggtggctagaatccagttgggcctgatgtctccctgttgaaagggctccttgtggaatgaatagcacatggctcctgtggtggatctgatagtggcatagcaccaagtgatgcaggcctgccaggggccacagacacagaagatgctcccggggtcccccatgtactccagacacactgcaggccacctctcccagcaggttgccagtcatgggccccatcatcatgacttctgtccaaggtgtgctcggaaatctcttccttaactgtgactttctgacaggtggaggatgtggtcaggagtgggaaaaggattcgagacgggaagagggaggggttcaggatgaagagagataatctgtgccacagatgctggccctgcagttagctcccacctagtccgtgcacacacattctaatcccctcccattcctttacatgctgcggccagagaggcctttctcaaagtggaagtctcatcctcacttctctggttacagtgctgggccatggtaacttacaaggcttagcaggaactgtctgcgcactcccccttcctgcccactaccttgtttccctccagttgcgagagaaaacattgattgagcattaactatgtgccaggcttgtcctaagtcctttgcatgtattcactcaaacaatcctcacaacattcctatcacatctcccatttcacagtgagggttctaaagcacgtagtgggtgaggaacttgtccagggtcacacaactaagtgggggtggagaaacatcaaatctaggtggtccaggtggtggccagaacccatcagcacctcactacagctgcctccagtttctcgctctaggaaatactcttccctgtcaactcctgttgtcctctgggctcagttgacatgtcatctccttgaggaggacatcctgagatgctccccgactagggtgggcacccacttccacactccaaatgcctatttgacctgtgtatcgctgcatccccactgcctggcagatagcaggcccctaataaatatgatttgagcaaataaatatagttcttcaaaaaatagggaggacttcttgcttcaggtaatggtaggctaggacatttggaccaaccctcctgcagaaaatagccatttattttgatgcaatatatctggctatgactagagatttcaaatatttggagggctattatgtgaagaactaaacttactctttgtgacatagaggtcagaaattggtcgtttccatagagtatgagagagacagaattgtgctcatcataagtatcttttttaaaagttagacttaataaaatgggctgccttggtaggtggtgagttctctgtcacgaaagagattcagccacttgctctgagaaagcatggagaatatcaacattgtaagggtcgaccacctcatctctgaggccccctcctcacttaggttgccattgcaggtggaacactgggctgagtgtcaaagaacctgggttccacaagctgtgcgaccatggctggttgttttggatctcattcctaatatctgttagttaagctgacccgtcaatactgacccacttcacagagttatgaagggattaaattaggtattacatgtaaatctgttttgtttgctttttgttgttcttttttgttttgcttttttctttgcattatgaaatcccaagtcaactttttccattcttttatttttttaaaaattgacatcatcattataaccacaaaataatttttaaaatggaaaaaaaaaactcacctgcaaccccacaatctaatacaataatcatacttttttccctttattctcctttattgtgaccaaggatgactttgggcattgctgtgaggaactatttcgtttaacaccctactacctgaacatgatgcgtactcagcctttcaccaccccccaagtagctacacatgatgtgataatagtattggtggtggttttagagagttggagagaaaactgaagttggatttgggtaaaagaaaaaagagtgggaattattttttctccattctaaagcccataaagcaatgttaattgttcccacccctctgctattctgtctcctcaggtactgtgtgcagaaatgtgattgagattcaagtcagggcctctctgcccttttccctccagaaacaaaaccaagataatttatcctgaacacggtgaaaaaaggaagggagggaggagaaaaagtccgggtctcacctgggattctctgtctcctgcaacatgaaggatttagcctgggaggaggtggtgagaactctgggagagaaaaaagaaggaaagaatagttttacccatgctgaagttaatttaaaccttcacctagagaagcaaaaaaaaaaaacccacactttcccattttgtgcctcccttcctagagttttagccaaaggtttagctaagtaattggttttaccagcgcactcactcctcctatcccaagtctgtttgactccctccccatcatcctcctcacctcttttcaggcagggtggggatagcagcaggaggagattttgggagcctggcaactcctgcaaggaccgcaggacagcccctctgtggggatgcgtggtgccccatctgccgcccttctgaagaatgcactgccttcactttttactgtgttagagtccatccagactgttctatccaaaaaagtttctttttcccccacaggcaatcaggaaatgattcctttcccgactgcttctgtctagtgcctgggaatcttgagtcaatccctcagtaagtcagtgactagggaaatccctctctgagcctcccagttcatgttgcttagggaacctgatattttcgtgaaacctgcctacacatgggcagcccaacagcagaacaaatggtggtgaccaaagtgaacaaagaagtatagttgtgccagcttcgtagttgcccatgtggacaagtcagcaggatcaggacacgaggaagagtaaatgtgagacagtcaatgtgacttctgcgataaacagatttttaaaccccgaaattttgcaaaattttggtgaaacctgaactttcttcgttgcatatactggcactatctgtaccatcatacaactgtctcacattaaagctatttttcttgggcactgatgagtaaggttggtataagttcctcagatcaacaaaaacccattttcctgtaagtcttacatttagtatttaaggaactaaaacttaaatacattttgtgaaatggttgacacttcactgataatgatttattgcttggattaataaattttccaaaagttgtcttatgtagaatatggtttgcaaccagcagaaccattaatctatactgcaatgatatgcactatgtataattgtttaaaagcctctacttaatgatgtaaaatgctctatttaattacacatttgggtaaactgtatactaacatctgatggcatttttccactgtttgttgcttttttcaaatactttattgtacaaagctgttcttaatatttttcaagtttttttctttgaattttgctaatgttttccttgaattatgagcactgacagaatgtgcttagcacttttggctattcacacagcttttgagcatgatttgcatccaatatttacattgctagcaataataagccatctgtgagttttgtcaaaagttattggggattttttaaattttagaaatgcaaattattgtttctttgaactaactcttatgcagttgcaaaggcatttccagttgttatagtttgtgtacaatatcaggtgttccagattatgattcattattaatatcattgcttccttgttccctctgaggtccagaagattcatgtttacaatatttagaaacaatgttaaa

SEQ ID NO: 1355 - protein, 106 aa, Homo sapiens [sequence omitted]

SEQ ID NO: 1356 - DNA, 735 bp, Homo sapiens
atggcctcatgggatgaaaaagacctgactatccgccagcccaacacccgtaaagggattgatatgtatatagaaggtatggcagatttgaatgaaatgatccttcttctgcccatatgtcaacctgaggaaaaagatgtcaaacttgccttgatcgaagagagaatgaaaaattgctatttccctacctttgagaaagccctgaaaaccagaatcagcaacctccccacagtgaagaagtttctgcagcctggcagccagaggaggcctcccgtagatgtgaaagctttagaagaagcaaggaagactttcaaggctgatggaaggtttaaaattgcaaatatgggatttgagtcctttgcagaaggtacccaaaagactctagagtacctgcaatcaagaggatggactagcaacccaaagaaagtccaggggccagggggcactgtaaaattcctggatgtgatctggtcaggactctcctcactgagaagctgggttgtagttttcatggaagctgttcgtgccttgagtgtggcccccattgtgggaaaaatgtctacttatgaacatcaggaagatgtaaagaacctggtgctagccgtgcaggccctggtagatgcactggcagtgggcaggcagtgccccatactggtgggcactagtccagtggatctcacccagccctgtcactgtggagtcagtagctcctcccacactgggacagaggtctag

SEQ ID NO: 1357 - protein, 244 aa, Homo sapiens
MASWDEKDLTIRQPNTRKGIDMYIEGMADLNEMILLLPICQPEEKDVKLALIEERMKNCYFPTFEKALKTRISNLPTVKKFLQPGSQRRPPVDVKALEEARKTFKADGRFKIANMGFESFAEGTQKTLEYLQSRGWTSNPKKVQGPGGTVKFLDVIWSGLSSLRSWVVVFMEAVRALSVAPIVGKMSTYEHQEDVKNLVLAVQALVDALAVGRQCPILVGTSPVDLTQPCHCGVSSSSHTGTEV

SEQ ID NO: 1358 - DNA, 693 bp, Homo sapiens
atgtgcccacattcctcagtccttgggccgctgataggactgggcaccctggagcagggggcagcgctcgttggggaggctcaggccatgcaaaagcccacagtcagggggcgggatgagagtttcatgttccaacaagtgccaatggttgagattgacgggatgaagctggtgcagaccagagccattctcaactacattgccagcaaatacaacctgtgtgggaaagacataaaggagagagccccatatatttggttatttttgtcttacagggtcgatatgtatatagaaggtagggcaggtttgagtgaaaagcttcttcattgctcattgcatccacctgaggaaaaagatgcaaagcttgccctgatcaaagagggaacaacaagccattatttccctgtctttgaaaccgtgttgaagagccatgaacaagactacttcattggcaacaagctgagccaggctgacattcacctggtcaaacttctctaccacgtggaagagcctgactccagcctcatctccaacttccctgtgctaaaggctgtgctttgtgcattgcgggccctgaaaatcagaatcagcaaactccccacagtgaagaagtttttgcagcctggcagcctgaggaagcttcccatagatgcaaaaggtttacaagaagcaacaaagattttcaaggtttga

SEQ ID NO: 1359 - protein, 230 aa, Homo sapiens
MCPHSSVLGPLIGLGTLEQGAALVGEAQAMQKPTVRGRDESFMFQQVPMVEIDGMKLVQTRAILNYIASKYNLCGKDIKERAPYIWLFLSYRVDMYIEGRAGLSEKLLHCSLHPPEEKDAKLALIKEGTTSHYFPVFETVLKSHEQDYFIGNKLSQADIHLVKLLYHVEEPDSSLISNFPVLKAVLCALRALKIRISKLPTVKKFLQPGSLRKLPIDAKGLQEATKIFKV

SEQ ID NO: 1360 - DNA, 2078 bp, Homo sapiens
ctcttcctacccgggctctgaacacatccctgagctgcagagctgacgtctgggtgacagtgaaacggggtattcatttgtaccaaaacaaacaaacaaacaaacaaaacctggaatgacggtgtgtggatttcttgtgtgcttattcgtaggattgagaaagggtgaggctaaggtcccgagccttcgtgaagcaatggagaaagtgccgtcccaaggctcagttccacacggcgctgtgaggctgaaggggctcactggaagttcccctcacaggacgccacctcacctgaaaccctctttttctgctaccatccaagggacaagatctcctgagttgtcgaagactcactccggaagaaaaccctctcaggcagttactgagggactgtggtctggactagaacgtgtttttctcagtgacacctctagagggcagcactcaacggagtcccacagacacctccctgcatttcctcctcagacactgggtggatgatatggtaacactggggaatgcttgggtgttctcctggaagctccttattttaatcacctgtttacttgtctccattcttatagatatgtaggctacccgagggcagagactgagtctgtcttgttcactgtctacctccagaacctcacacagaatctggcacttagtaggtgcacaacaaaataatcattgaattagtatactgagtctttaacaggtgagtacgcagttccactttacattcactttctaatattatgcctttttatcctcttattgtataaatttctaacatgtataaaaataacacaaaagtataatgacctttcttgtattcctcatatagaatcaataattaccaatattagggaaaagagtgaaacgctgtaaaatatttgaagagatttattctgagccaaatgtgagtgaccaatggcctgtgatacagccctcaggagattctgggaacgtgtgcttaaggtggttgggatatagtttaattttagggagacatgagacatcaatcaaatatatagagatgtacatttgttcagtccagaaaggcaggacaactggaagtgtggacttccagattttgtgtagattataaaattttccaattggcagttgattgaaagagttatgatctaaagacctgggtgcagggaaaagaaagagagatcagactgttactgtgtctatgtagaaagggaagacataagagactccattttgaaaaagacctgtactttaaacaattgcttgctgagatgttgttaatttgtagctttgccccagacactttgacccaacctggagctcacaaaaacatgtgttgtatgaaatcaaggtttaagggatccagggctgtgcaggatgtgccttgttaacaaaatgtttacaagcagtatagttggtaaaagtcatcgccattctctagtctcaataaaccagaggcacaatgtactgtggaaagccgcagggacctctgcccttgaaagcggggtattgtccaaggtttctccccacgtgatagtctgaaatatggcctcgtgggatgagaaagacctgaccgtcccccagcccgacacccgtaaagggtctgtgctgaggtggatcagtaaaagaggaaagcctcttgcagttgagatagaggaaggccactgtctcctgcctgcccctgggaactgaatgtctccgtataaaacccgattgtacatttgttcaattctgagataggagaaaaaccgccctatggtgggaggcaagacatgtttgcagtaatgctgctttgttattctttactccactgagatgtttgggtggagagaaacataaatctggcttacgtgcacgtccagtcatagtaccttcccttgaacttaattatgacatagattcttttgctcacatgttttttgctgaccttctccttattatcaccctgctctcctgctacattccttttttgctgaaataatgaaaataataatcaataaaaactgagggaactcagaggccggtgccggtgcaggtccttggtgtgctgagtgccggtcccctgggcccactgtcgttt

SEQ ID NO: 1361 - protein, 127 aa, Homo sapiens
MTVCGFLVCLFVGLRKGEAKVPSLREAMEKVPSQGSVPHGAVRLKGLTGSSPHRTPPHLKPSFSATIQGTRSPELSKTHSGRKPSQAVTEGLWSGLERVFLSDTSRGQHSTESHRHLPAFPPQTLGG

SEQ ID NO: 1362 - DNA, 2353 bp, Homo sapiens
ggtttcatatgaactctcccgccacccgggaacagtggctgccaccgtttgtgttttcccgagtttgaattcttgcaggtgaccaagatggagttttctggaagaaagtggaggaagctgaggttggcaggtgaccagaggaatgcttcctaccctcattgccttcagttttacttgcagccaccttctgaaaacatatctttaatagaatttgaaaacttggctattgatagagttaaattgttaaaatcagttgaaaatcttggagtgagctatgtgaaaggaactgaacaataccagagtaagttggagagtgagcttcggaagctcaagttttcctacagagaaaacttagaagatgaatatgaaccacgaagaagagatcatatttctcattttattttgcggcttgcttattgccagtctgaagaacttagacgctggttcattcaacaagaaatggatctccttcgatttagatttagtattttacccaaggataaaattcaggatttcttaaaggatagccaattgcagtttgaggctataagtgatgaagagaagactcttcgagaacaggagattgttgcctcatcaccaagtttaagtggacttaagttggggttcgagtccatttataagatcccttttgctgatgctctggatttgtttcgaggaaggaaagtctatttggaagatggctttgcttacgtaccacttaaggacattgtggcaatcatcctgaatgaatttagagccaaactgtccaaggctttggcattaacagccaggtccttgcctgctgtgcagtctgatgaaagacttcagcctctgctcaatcacctcagtcattcctacactggccaagattacagtacccagggaaatgttgggaagatttctttagatcagattgatttgctttctaccaaatccttcccaccttgcatgcgtcagttacataaagccttgcgggaaaatcaccatcttcgtcatggaggccgaatgcagtatggcctatttctgaagggcattggtttaactttggaacaggcattgcagttctggaagcaagaatttatcaaaggaaagatggatccagacaagtttgataaaggttactcttacaacatccgtcacagctttggaaaggaaggcaagaggacagactatacacctttcagttgcctgaagattattctgtccaatccaccaagccaaggggattatcatgggtgcccattccgtcacagtgatccagagctgctgaagcaaaagttgcagtcatacaagatctctcctggagggataagccagattttggatttagtaaaggggacacattaccaggtagcctgtcaaaaatactttgagatgatacacaatgtggatgattgtggcttttctttgaatcatcctaatcagttcttttgtgagagccaacgtattctaaatggtggtaaagacataaagaaggaacctatccaaccagaaactcctcaacccaaaccaagtgtccagaaaaccaaggatgcatcatctgctctggcctctttaaattcctctctggaaatggatatggaaggactagaagattactttagtgaagattcttaggcagttttataaccctttttcctcaatagcctgtttcctgtttttaagattttgcctttgttgttgaaaaagggtttcactctgtcaccaaggcttagtgcagtgacacaattacagctgattgcagccttgaccttcccagctcaagtgatcctcctacctcagcctcccaagtagttaggaccacaggtgtgcacctcatatccagataatttttttcaatttttttttgtagaggtggggggtctccctatgttgcccaggcagatctcagactcctgggctcaagcgatcctcacacctcagcgtcccagagtgctgggattacggttgtgagccactgtgcctggcctttttttttttttttaacctttttgtttaacttctctcttcactgcatcccaatccatctacaggcatgcacacttattaggaaaggaggtttgaggtaacaacagagactttcactatattttgctttgacagaaggaaagaggaggagtttctattaaaatctgtcacttgagtgatgtcatttaagtcctattttaggagataaaaacagctttggggactggttaaagtcccccagaaactacaataaagaacaacttttgttttaactcttaatcactttgtaattttgactcaatccttttctggaccatttttgttaataaatatcaaagtgtaaaaaaaaaaaaaaaaaaaaaaaaaaaaaaaaaaaaaaaaaaaa

SEQ ID NO: 1363 - protein, 509 aa, Homo sapiens
MEFSGRKWRKLRLAGDQRNASYPHCLQFYLQPPSENISLIEFENLAIDRVKLLKSVENLGVSYVKGTEQYQSKLESELRKLKFSYRENLEDEYEPRRRDHISHFILRLAYCQSEELRRWFIQQEMDLLRFRFSILPKDKIQDFLKDSQLQFEAISDEEKTLREQEIVASSPSLSGLKLGFESIYKIPFADALDLFRGRKVYLEDGFAYVPLKDIVAIILNEFRAKLSKALALTARSLPAVQSDERLQPLLNHLSHSYTGQDYSTQGNVGKISLDQIDLLSTKSFPPCMRQLHKALRENHHLRHGGRMQYGLFLKGIGLTLEQALQFWKQEFIKGKMDPDKFDKGYSYNIRHSFGKEGKRTDYTPFSCLKIILSNPPSQGDYHGCPFRHSDPELLKQKLQSYKISPGGISQILDLVKGTHYQVACQKYFEMIHNVDDCGFSLNHPNQFFCESQRILNGGKDIKKEPIQPETPQPKPSVQKTKDASSALASLNSSLEMDMEGLEDYFSEDS

SEQ ID NO: 1364 - DNA, 324 bp, Homo sapiens
atgtgggtcctcagtaaggccccacctttgggccagggaggccctgaaggctgggggacaggctgccagtcccgtggaccagaatggggactcgtggtgcctgttctgggcacacccatggcagcccatggaccaattagcatgtacttcctcccctctgaggtccgtaaaagccctgggctcagtcagagcagggcaaaggacggccagaggacaaagggagacatgggacctgatgaccagctgcagaaaggagtaccctctctgctgagagttggagacaatgccatgaccagctgcagagaagagtacactctctgctaa

SEQ ID NO: 1365 - protein, 107 aa, Homo sapiens [sequence omitted]

SEQ ID NO: 1366 - DNA, 769 bp, Homo sapiens
atgaggactaatctcagtcatgactatgataatctcaacggtactatggggggcattttcaatgaattggctctcagtattttggctttaagcttctgtttccatctttatattatcaagaattgttcagttggtggtttccgcttttccgtcttcctcattctctctttgccagctgccatccacatcaaccctgaggattgggaaggaattatacataccaggaggcaaggagcactgggggccctcctgggactgcctatcacagcgtccttaaaggttttcactctcctaggatgacccaggtatagaatctgcccctatggttcagctccaccctctcacctgtctcttgagagcattgtgaagttctgagacacagcaaggacagaaacagagggcatggaagatgctttcaaagatcagatccagagcctgacaagtttatttacttggagaagcagattctaggttctagaaaagaaggctgaaaatacaactttaagggaaaggataatctgatgactaattctcatttatcaaaaagccactttgccttagatctatctctataaactccatgcttcaccataaaatccttctaactttattgaaaaaagggggccacctggcaaataacaccaagagtattatttctgggttcatttaacccaacgacaattatttatcttactaaaatccatttctaggtctacaaacctattgtgtagttcatgaatacataggctttagtcctagatagttggag

SEQ ID NO: 1367 - protein, 99 aa, Homo sapiens
MRTNLSHDYDNLNGTMGGIFNELALSILALSFCFHLYIIKNCSVGGFRFSVFLILSLPAAIHINPEDWEGIIHTRRQGALGALLGLPITASLKVFTLLG

SEQ ID NO: 1368 - DNA, 782 bp, Homo sapiens
atggtgcttgttctgagtgccggaatctcttcacactggactcaactgaagcctccaaaacagactggcattttgaggatggaagtacaggagccacagcagacagttcgcctacaggaagaaacaggacccttcttcctcctccatggtttccgcttttccgtcttcctgattctctctttgccagctgccatccaaatcaaccctgaggattgggaaggaactatacataccaggaggcaaggagcactgggggccctcctggaactgcctgtcacagcgtcctcaaaggttttcactctcctaggatgacccaggtatagaatctgcccctatggttcggctccaccctctcacctgtctcttgagagcattgtgaaattctgagacacagcaaggacagaaacagagggcatggaagatgctttcagagatcagatccagagcctgacaagtttatttacttggagaagcagattctaggttctagaaaagaaggctgaaaatacaactttaagggaaaggataatctgatgactaattctcatttatcaaaaagccactttgccttagatctatctgtataaactccatgcttcacagtaaaatccttctaactttattgaaaaaagggggccacctagcaaataacaccaagagtattatttctggggttcagttaacccaaagacaattatttatcttactaaaatccatttctaggtctataaacctattgtgtagtacataaatacataggctttagtcctagatagttggag

SEQ ID NO: 1369 - protein, 103 aa, Homo sapiens [sequence omitted]

SEQ ID NO: 1370 - DNA, 396 bp, Homo sapiens
atggctcaaagagacacaggtactgcatgggtcatcactctggagggtgcaagccatgagcatttgtggcatccatgtggtgttaagtctgcagatgcacagaatgcaagaataacggaggcttggcagcttctaccaagatttcagaggatgtattggaaagcctgggtgtgcaggcctgccacaggggtggagccactgcagagggtattcactagggcagtgcatattggagccatagcaacagggcccttacttttgagacccaagaattatagagccaccagcagtgtacctgctcagtctggaaaagtcacaggcattcaactacaatatatgcaagcagccaaatgggctgcacctagcaaagccatgttggggagcagggctgcctga

SEQ ID NO: 1371 - protein, 131 aa, Homo sapiens [sequence omitted]

SEQ ID NO: 1372 - DNA, 513 bp, Homo sapiens
atggaggtaggaggctggaaaaaggactttatggtccatactggtgtggagcactcggtagtaaatcaagcaatttggctattgtctaaaaattatgtcaatataattggagctacaggaataacagaaaagaggccttatttcaaatctaaaatatgtgtccaacatgaatttttatatttgccaaattgtctggtgcccttgttaggaagagatttgctccagaaattgcaagcacaaatctcctttacactagaaggggacatgactctaaacctaggtcaaagaaaagccatcataatgacgcttactgtcccaacaacagaggaatggagactctatgagagatgcaaaatttgtaaagatgcattttgccagtgggaaaatgaggcaatgtataaggaattatttctcaagctgccaggggtcttggtggaagacaatcccccggggctagccataaatcaggcacccgtagtggtggaactgctgtggggcacttacccagtgtga

SEQ ID NO: 1373 - protein, 170 aa, Homo sapiens [sequence omitted]

SEQ ID NO: 1374 - DNA, 384 bp, Homo sapiens
atgggaaaaagggcctcaaaagcatttcggaagtctctgaggagacagccccttccatcacaggcccagagtcctagaaggaaggaatggttttctgagtcaggcccagggctctgctgctgtgcatcaccttgggaagctactcactgcatccctgctactacagctccacctgtggctcaaaaggccccagatacagctcaggctgctgctctagagggcgcaagccataagccttggcagcttccacttggtgttaaggctgcagttgcatacaatggaagagtgaaggaggcttggcagccttcacctagatttcaaaggatgtgtaggaaagcttgggtacccagccagaagcctgctacaggggtggaacccttgtag

SEQ ID NO: 1375 - protein, 127 aa, Homo sapiens [sequence omitted]

SEQ ID NO: 1376 - DNA, 291 bp, Homo sapiens
atggtgctacccacagatccagctgcagctggtcctttaggtccatggggatccatgtcttctggaccttgggtgccaggaatgggagggcagtatcctacccctaatatgccctatccatctccagggccatatcctgttcctcctcctccccaagcctctggggcagcaccacctgttccatggggcaccgttccactaggagcctggggaccaccagcaccatatcctgcccctacaggatcgtatcccacaccaggactctatcctactcctagtaatcctttctaa

SEQ ID NO: 1377 - protein, 96 aa, Homo sapiens [sequence omitted]

SEQ ID NO: 1378 - DNA, 73 bp, Homo sapiens
gtttgaatgatgactttaattgtcggataccccttcactccttttatgagtgaaacataagagtctgacaaac

SEQ ID NO: 1379 - DNA, 76 bp, Homo sapiens
gctgtacatgatgacaactggctccctctactgaactgccatgaggaaactgccatgtcacccttctgactacagc

SEQ ID NO: 1380 - DNA, 133 bp, Homo sapiens
aagccagccaatgaatctgcttacctgattgtgtttgtgcagacatactttaaaaactggcaatagtaaagccatgttacgagccttaaggacattgaagtcgttaaggtccctgagaatggctataacaaat

SEQ ID NO: 1381 - DNA, 387 bp, Homo sapiens
atgagtgtctttacccgtgtgattgttacctgcgttagctgttgcttttggaggctggtaggcagccacaactcacctcaggcgagcttcatctccgggctgtgtgccccttgtctgcagactctctacggcgttctgtttgagaagagcaaggaagctgccttcgccaatcaccgcctgtgggaggccctgggcttcgtcattgccttcgggtacagcacgtttttgtgcgtgcacgtcaagctctacattctgctgggggtcctgagcctgaccatggtggcgtatgggcttgtggagcgcgtggagtccaagaacccgatcagaccccacgctccaggacaggcgaaccaggcagaggatgaagaaatacaaacaaaaatgtga

SEQ ID NO: 1382 - protein, 128 aa, Homo sapiens
MSVFTRVIVTCVSCCFWRLVGSHNSPQASFISGLCAPCLQTLYGVLFEKSKEAAFANHRLWEALGFVIAFGYSTFLCVHVKLYILLGVLSLTMVAYGLVERVESKNPIRPHAPGQANQAEDEEIQTKM

SEQ ID NO: 1383 - DNA, 4510 bp, Homo sapiens
tttttttcttccgactggtgtggatcccagacaatttcagggtcctgcagggtttgagaccctctgtgaacactgacccgggaccccgttttgcccatgggaagttgaagccagcgcagcccccggccaggggcactgtctcctcggccccgggatgctggacggaggggacaacgtgcaggggcagctgctgctgggctgtggacctcccggaaccggaggagcccgggaggggctggcccagcagtgagggctccgatgcgcctcaattcatatgctaaggagccctggattcggctttaattgccggagtgggaggtgaccccaggggcccaagctgggggcgtggctgggaaatgcacagaaagagacttcgacgggggtggctatggtttgtgctgtgctgtgcacacgtctggctgatagaaatctatgtctataaacagttccttccaggtctccgcggaaaactgaagattcctgtgtgctttcagaaaagaggttccaaggaaaagggcagccatttagttttcacaagtctgggcagtgagcgatttggagcttccatccttggctgacatcatgaacaccaatgttgctggcctcgatcgcaagaagggtgggacttcgtgcttagccttcctggggaagggcctgtccctgggtcacgtccccagtgaccacaggaggaagagaagggatgaggatcctggggggcctggctctgcgtccacccgtctctgtgtggatgcctcctgtgtccagggtgataaccggtcacccgactgtgtccttggggtcattcctggcttctcctgccgcttgatcacccctctggctgcagggagcccaggacggagaaggagagacctcattctccctggggaatgcaggctgagaccacccatgcttctggagcagggtttcatgtgggggaggtccctccagggagggacagtgaactgacgctgtgatattgctcaggatggaggcccagggcagacggcgtcaccagctgccgcagaagccaggttgccagaggggctgtgtcaccagccctggggacgccatgttgctgtgcgtttcgacacattcctgtggagtgtctgaggaaaaacagggcacacgcattcctgataagattgcaccaaaaggccagggtgggggaccaggctcccagcctccctctgtctcagttgggggccgaggggcagggacagccaggagaaggcccagccagatgctgctggcttcccccaggactctgcccgactggcctctcggttaaacctcctcacctgagcctctcttatggcgtggttgagtcacacatgagagggttttgtctgccgggaggggctcttcttatgggacaacaggggcgcgaggtgtgtggtgtggctctcagggatgtgtctggactctatcacgtctgagtgtccctggggccagagtgctgggggcaggagcctgtggtttatcaagcaccttctgccagctgaggccgtgactttttgtccctcactggaggaggcttcaaggtcagcctctttttcctttggtcccaagcttgccgtgtctcctcctcattccccacgtccacatgagaaggcagtgttcacaggtgggttggtctgagattgaaatcgcaaggccaggattttctgtctgggcagccccctcgagtcagcctcagaggagcccagacctcttggatggctttcggcgagcctcccagtgggcacagcactcgccaccggacactgcatggactcagcttccacactgcgatgggtatggcctggtccttgcactaccaggggcaaggaggaacgctatgcctggtgggggtgagcaccccatctcatgacaaagcagttctccagggtctgccccacttttctgtaaacctgggggtccagcccagtgcattggctggaaggagaggggacgcctcctgtcccagctcatggcgctctgccgaccccactgtcagccccaaccttggtgctccggggggccccaatgccatagatgcacttcatggggagcaactggggctgttcctgaggaccaagatgggcagagaccctaaagacgtccatggattgacccctgctctctgtggcccctgcctggctggcctcccctcctcacactctccacagttctcatgcaacacagcgcctctaaaaatgctgtcctgaaaatgtgcgctttggggaagagcagcttcctcctcttcgaccaagttcgggtcccttctacccttcagtggctgtaggcagtcggtgagggtcctggacggggtgggccgggggcagggaggggcactgtgggctttggttgctcaggggtcctggcagacacaccaacctggtgtgtttggaaatgcacctggatgtgtgctgacctctgtgtggaggaccacgggtctgttcatcccccactggctgcacccccgggaggctgcagcgtgcactattcggtccctacgctgcagttattcttgtatctgccttgtcactggccttgctgcccatgactccctcaggtcagcccacgtctctgtcaaactttcatcctccgcaattctgcgcagcctgtaaatgcttaaaaaatattgcggaacaggtgagtcacattacagaaaggacgcaacctggaaaagcacagacattccttccccttctgcacctgttagagtaagggaggggcatgagggggtgggacctgcacaaggtgcagctgatagaaatgcagtcttcaggaaaagccctggctctgaaacggcaaaggctgtgtgcctgggaaaaagacaaacgtgtcttatccggagacggcccccctgccccaaaggctgtcacgctgccgttcagttatctattctgcagcgatagaactggcttgacctaaaaattcagtgacggaaaaatgtcatctaatgctgcttagtgcagtcaggcggtcagcagatgagggcagaaggccactggtctttgacagaacacgcggatggcgaaataacaaaacaggtggcggatgagggcagaaggccactggtctttgacagaatatgcggacggcgaaataacaaaacaggcagcagatgagggcagaaggccactggtctttgacagaacacgcggacggcgaaataacaaaacaggattcaggctgcactgtcagcagcagagacaaacaattcttccaaaataaacaagcgagctcccagcagaggcctgtgaagtctcccgttctgcccaaaccacacacatgtggcccacagaggaggctgcagaggcccacggggaactcaagtggccgagtgtgagacccaggccaccggccgtcctccctgtcagaacaaaaggttcatggaaagggccaggaggacacagcaaggggaaccgaatgccactggcatttcttggatcttttgtaccatagtctaagcatttagaggaagcaccgcgagtttgctgccctggaagctgacgtgctccccaaacacaagacgcaggactggaggccttgccccgcagctcgagaggccgttttgggacatatcaaggaaggaaggcttaagcgacacaggacctggctgacttacgcacccgctgtctaaagatggggtgctggccggtgaactggagtggctcacggcagacctggagtgacagtcatgggtctgtacctgtgtggagtcctccatggctgggcttgcagagactgagctggactgcattgcacattggctggaaggagaggagccactgagagacccagcttacggcactctgcccaccccactgcccaccccaaccctggcgctccaggggggcccaatgccacagacacactccagggggacaattggggctgttcccaaggaccaggagggacaaatgccctaaagatgtccatggtttgacccctgctgtctgtgggccctgcctggctggcctccccttctcacactctccacagtcctcatgcaacacagcacatctgaaaatgctgtcctgaaaacgcgcactctggggaagagcagcttcctcctctccgagtggagcgggctggccccatgaggcgtgattttcactgtgaaatgtgcttcacgtaacactggggcctttgtcaccatttttaattgtacagtttggaggcattaagtgtgttcatcatcaccaccttccacccacagagcttcttcgtcttcccaaacggaaactctgtcgtcggtaaacactccctcccctcccacagcccctggcacctgccttctccttcctgtctccatgaacctgacaactcttcggaccccacctaagtggagttgggcaggatttgtcctctgtggctggctcgcgtcactcagcggccctgaagactcatctgcgccgcagcctgtcccagaatctccctccctctaacactgattaatatcctgctgcacaaaaaaacaaagatgatcatttgatacccgaaatccacttgaaaattggta

SEQ ID NO: 1384 - protein, 163 aa, Homo sapiens
MAFGEPPSGHSTRHRTLHGLSFHTAMGMAWSLHYQGQGGTLCLVGVSTPSHDKAVLQGLPHFSVNLGVQPSALAGRRGDASCPSSWRSADPTVSPNLGAPGGPNAIDALHGEQLGLFLRTKMGRDPKDVHGLTPALCGPCLAGLPSSHSPQFSCNTAPLKMLS

SEQ ID NO: 1385 - DNA, 3101 bp, Homo sapiens
atgggctgtgtcctccagaagcttaaaacacaagataccattttagacacaagatacagagcattaaagaagttaaatagtgaaaagagaccatttctcaggaccacaatggaagcactgctgcgtgcgggcagtctatggctaactgacaagtcaccacagagaggaggaggccatgcggggcagctgggagcaggtgtgctcaggcgatccctcccctggcaggtaagtgtccctcctctgtcttcctgggaaactgcacctggactgagcttcggggataggtttcgacagggccaaaaaacagaagagcaggaaaacattccagaaaggaatgtgccaatgatgggacttaagctggtgaaaaccacgtggaacgggatgctcatgggacctgccccttggagctccaggcctccaggcctcagtgctggttttcctaagtccttattttctcccgtgtttggctgggggctggtccgacttctccctttggtggactctcagttgtcaagtgtgaagtctttgaactgcacacaagagtggggacaacgtttctatctgcaaatcaagcaagcgcttgggcgaacatcttcccaaggcagagatgaagaatggatttcagctacagaaggcaggaatcctttggacttggccctttatcagtggaatggacagagcagctctcggtggggtctctgttgggaatgcctgctgagacgggaccaaggacggctgcaggatgtggtgtctgtgctcagcgtcacctcctcccaggctcctgggaagcacctgagcatctcctgacaaagccaccatgagcaagaccctcagagaaggtatgaagatgagaggctggtgtgaagaggctgctgtgaagcaactatatagcatcgggcaggacataaggggaaattgttgctttcatgttcctttacccccacagtttggatttctgccacaaggatcactgtggtcttcctccctggggctcactccacctaccccacacctcccacctcccccgtcctctcttgggggacttcctgagttctcgacagagcagtttcactgtcttctctccacgcttcctggactggcccgcccatttttttctatgacccagaattccttcccaaataagagcgtcatattccttgagccccttcactagaagcaaggagatgggcaggcgttgaactgcggcttttctctagactcttccctaatccctaggttcccccaactatttagtctagagcaagcccaggaacagtgattttttttttttaacctgccatttctgttattcaagctgttttagtcagttcaggctgctgtaacaaaaatgcaatggcctgggtggttttaacaacagaaatggatttctcacagttcttgtgaggctgggacgcaggaacccccacatccaagtgccaggcagttccgtggctgggagggctccagactggtgtgtggatggcaccttctgctgtgtcctcacatggctgagagatgggtcatctctgttcttatcagggcactaatcccattcacaaggccccccatgacctaatcacctcctaaatgccccgcttcctaataccagcaccttggaaaatagggcttcaagatacaaattttgggggactcaaacattccatccatagcacccgctcatgtgctgtgatgtccagtgagcaggcggagttccagggctggtcagtgccaggtgctccttctcccacccgagaacaggggccaggttgctcctcaggcaccctgggcaactgccccttcccttccagtggggcctgacctggctaccgagcttggcagctaataggcgggcccctcagcattcacgctcctgagctgctttatcaaactaggattgttcccccaggtctaagaaaaccatccattcactgcaaagttatttattactgcggatgggctaggagttagaggaagagagtgactcaaatcacaacacctcctggacgaagctggaagggattaaaatacggcctaatttctcccttgctgtgtgaagcgtgtggttctcctagaacatcagcccgactgtcgctgggtagcggcggtactgttcattctgcattagctttgtccagattgttcagtgtgggtccctgcctacagatcttgattccttgagattgccctttgtgcttctgtctggggactgcctgtttctgtaatggccaccgtctcagaacacatggttgtaggcctcagcatttgccttacacacagcccccttggagacaaaccgtgtctgtgtccctcagaaggccctgactttcagggcacactccagcctgactttggcactctgctagacacatccgaaacgctggttctcgtgttgaagtctgttatggatatgtagggtaaggcagggaaactggagcgcctgcatacccttgacttcctccatttggaaaagataaccctgagacatggtggaggagaaggggccctgacctgtcagctacatctggatgtaactcccctgatgaagaaagtgccagaggcagcaaagcagcccttatagggtattttgtgctcccccaacagaggaagaggagcttagggtctccagggagaatgtctggttgtgaagagccgccaggacctggagctgcacggttgctcagtgtgcatttcacttggtcagcccctacgctggagagtgcttgcatccgaaccttcagtgcctggatagacactgagctgagcgaacggtatgctggaaaatgaagcgtgcaagtgacaaagtgctcaacttagactctgggcaaaattctcacaaagggctttctaatcctcacttaatggaagagtggagcaatttccagcagaagttgtggcttgcttcaccaggtctgctcaggtcagcggggtgagcctacggccaggatgggtggtaattaatattggaatacttggccagtctgcagacctcagaccacaaaaaaccctccatcctcaagcagtctcttctttatgcctcgcaaggggaagataattaaagactgtggtaacgggttaatttataggaaaataatgtagcatac

SEQ ID NO: 1386 - protein, 268 aa, Homo sapiens
MGCVLQKLKTQDTILDTRYRALKKLNSEKRPFLRTTMEALLRAGSLWLTDKSPQRGGGHAGQLGAGVLRRSLPWQVSVPPLSSWETAPGLSFGDRFRQGQKTEEQENIPERNVPMMGLKLVKTTWNGMLMGPAPWSSRPPGLSAGFPKSLFSPVFGWGLVRLLPLVDSQLSSVKSLNCTQEWGQRFYLQIKQALGRTSSQGRDEEWISATEGRNPLDLALYQWNGQSSSRWGLCWECLLRRDQGRLQDVVSVLSVTSSQAPGKHLSIS

SEQ ID NO: 1387 - DNA, 1640 bp, Homo sapiens
agcaggcaggacacgtggaaacgcaaccgccaggaggaaaggcgggacacagcgggaagggaggtttgcctcccctctcttcctgtggtgacccccacctcacttacaaaaatcaccaccgacgtttgggaaccgtgcacgccgactgaaagcaaagctcagctgacctgcgaggagtccccggggagctgccgcggtggtcgccgttgagtccgtccgtgccgctggggccgaggcagctggagatgtggtcaacgggctgatgggcacggctgtgggaccccatcattcccctgccccgcatgactctgctctcccagctcgactgctcacttcagacttcccttatggaaggagttgccagatagagcaagtaaaatacagtgtgccagacacaggtttatttcaacactgggaaggctccattcctacttaaacccagcagggaacagggagcggtgtgcagaggaggtggcctgcccgggaagccggccttggtgctgggactgcagggagagggctgtgaggaagagcacaggcttcatgcacattgcacagaggaggagattcatggggacagcaggcactggttaggcacagcgggaaggttatcgaagacaaaacacatttctacccaagtttaaatgacctgctatgcccacagagcttgatccagaagtgcacagtagagacggggtttcaccatgttagccaggatggtctcgatctcctgacctcgtgatctgcccgcctcagcctcccaaagtgctgggattacaggagtgagccaccgctcccggcccagaacttttaataaatataaatacacaggtaattttaacacatattcctgatgaaatcattattatctgcaatgctttcattctgctttttctcttaacaatggcataaacatttttcaaggtcaataaatgtttttcaaaatcgcatttgtattagtggctgtatagttttctatcaaatgtggaataaactcaatttatttctcccttttgttcttgaacatttaagatcattggttcatagttactaatcatgttacaacaaatattcatgtattccaaattttgctcattcctgattatttccttagatttccaggtatggaataattaggttgaagtgtttgaaatctttttttgttggtttgtttgtttttgagatgtagcttccctctgttgccccggctggagtgcactggcatgatctcagctcactcactgcaacctctgctgcctggttcaagcgattctcctgcctcagcctcctgaatagctggggttacaggtgcgcaccaccacgcccggctaatttttgtatttttagtagagacagggtttcatcatgttggccaggtgggtctcaaactcctgacctcaggtggtccttctgccttggcctcccaaagtgctgggattacaggcgtgagccactgcgcccggccgaagtgtttgaaatctttaagcatcctggtaaatattgagttttgtcaatatttagaaaagttgcatgattgacatcgcttccacccatgtttcagagcatctgatttgtcagaccctcaccaaaaatgggcttttatcaaaatgtaataaaaaataaatacaacttttccaatg

SEQ ID NO: 1388 - protein, 57 aa, Homo sapiens
MGTAVGPHHSPAPHDSALPARLLTSDFPYGRSCQIEQVKYSVPDTGLFQHWEGSIPT

SEQ ID NO: 1389 - DNA, 2707 bp, Homo sapiens
agggagccgacagctccacaacactcagcccatggggactgcagcaggtgagtctccacccagcctccctcctttggaccaacacgaactccggagacgtctgggtgcagctgcctcaggccctgctgtcttcaacggggactgaggttgcagtttagctggctttcctgttcctgcttccccgggtccccctcaaagaagccgcctgcaccccgtgccacctcactctggcatagccctacttctccaaaccaccaggcctgccctcccttgtccacgcagatctgacaatctccacagtgctgtgcagacttcagctccaagaagttgcaagtgatggagataaaatcccttcctgagagagtcatgaaccgtggcctgtttgaggtcaaaagaagaaatgagaacaaagccaagccaaggcttcggagtgagccctgagacacctctcagctggccgggtggccagagatccaccctgcaggagccgccccgaggcaggtgggccacatctcccaacaagcggcacacaagaaggcccctcgcaagaggaggcatctgtggtcttcccagagcaaaggcagcagccccgggagcccagccagtcactggccacctgcacgcctctacacagcagacctggccaggcgggcagtgcccctggccccttgcgaatagaacgttgtggaacaggcggaacctgggcagctgtcctgcactctggccagccagtccgtggatgctcctgccaggcaggactgagccactgccagtctggccggtgccagccttttctcagatccagccacgccctctctggatacggtctggacaccggcagaccaagcaggcagttgcctccctggctggctctgacctcctgcagcacaaggagaggatgcactgcactgccaggcctctgggcaccgagggccgctgctccgccgtttctttctgctaccgctaattcaaaacagggcagggagcagctaggcagcagctgggagagctgcgggctcctccacccggttgctggtgggctccatccggccgcaccgcccgcacctgctcacctccagctgcctcggccccagcggcacggacggactcaacggcgaccaccgcggcagctccccggggactcctcgcaggtcagctgagctttgctttcagtcggcgtgcacggttcccaaacgtcggtggtgatttttgtaagtgaggtgggggtcaccacaggaagagaggggaggcaaacctcccttcccgctgtgtcccgcctttcctcctggcggttgcgtttccacgtgtcctgcctgctgcccgccccagcccacactgagcaggaaggtggggcgtggcggggaggggagtggaactgagggaagcagagagggtggtgccattgcccccggcctagcttctgtttgatcattagtttcaattcaagaaaacgttcttttgagggaattttaaaaatgaatcacgtgcacctcttaagaaaaccgagtgtcacaatcgttgttaccacgcaggtgagaggagaggagggaggacgggaaagggaaggggcatgagaaaggcggatgggactgagcttctacggctccctggccgcggcgcacgcgctggccctccccgtccacagcagcagcggcatcctccccaccctacagcgaggaggtggacgttgccccgaggggaggagcgtgtcagggtggcttccaggtgcaggttctcgcgcaggcctcagccttcataggtgcattccgctctagaacattcctgttcatgcgtggtcgtcgctcactggtggccgcttaggtgcacttctcaatggcagtgcccagcacggagcaatgcctcggagtggcagtttcttcagtacggtccccacggcctctcccaaggcggaggatgctgccgccaaggaaactggctcaccacggacgctggtgagctatggagctatcagtgaggtgtggatttctcaggcctctggcgggagccggagtaaaggccctgagtgtctagaccagccagagtgtctgcgtgtaggtcagcaaatgtgggcaaatgtctaggcggtggtgtcctgcagggagccgaaggcccgtgggggacgtgaccaactcagcattccgctggaggctacaaacagcaaactgtttatcatgaatgcaggatgtgggcaaactcacactgccctgccaccaaaaggtttgctaacagacatcactccctagctccgggctccttaaagttatctgcctaaaaaatctagtgcctattgtccaaaaaatgcaagactactgtgaaccaaacggcagactgacaatcacccccctcccccagctttctcgctatctctttttgcctaataaatacggagggctgtgtaaagctcagggcccttgtccactaaaggcaaggtgcccctaaccccttcttccaaatatactctgttgtctcttgtcttttattcccgtgttgcccgcctttgttcagtccagtaggtccccaacaatgtcctgagggtatgaatcctgaaagactactctccatgaagcaggtatttaccaggttagtgcatgtttcctgggtattaagggaaaacagtaaaatgttctgtacgggggtcccggttctgtgtcgcacgagaagagtgtgtgtctttttacttttttaatatggctcaataaaattttaa

SEQ ID NO: 1390 - protein, 188 aa, Homo sapiens
MRTKPSQGFGVSPETPLSWPGGQRSTLQEPPRGRWATSPNKRHTRRPLARGGICGLPRAKAAAPGAQPVTGHLHASTQQTWPGGQCPWPLANRTLWNRRNLGSCPALWPASPWMLLPGRTEPLPVWPVPAFSQIQPRPLWIRSGHRQTKQAVASLAGSDLLQHKERMHCTARPLGTEGRCSAVSFCYR

SEQ ID NO: 1391 - DNA, 2735 bp, Homo sapiens
ggagggcgggccccgcgcggtgctagggttccgtctggactggcggtggtgggtcccaaccggcggtaccgggttccttcccgaccagcggtgctaggttcggttcggacgcgcgctgctggatctaaatgggcagtgctgggtccgatgggtggtgctgtgttgggtccggacgcgcggtgcagagtccggacgggcggtgctggatccaaatgggcggtgctggatctggacgggcggtgatgggtccgatgggcggtgctatgttcggttcggacgggcggtgctaggtctaaatgggcgctgctgggtccgatgggcggtgctgcgttcggtccggacgggcggggacgggcggtgctgggtccaaatgggtggtgatggatctgtggacgggcggtgctggttccagacgggcggtgctgggtccagacgggcggtgggtccgatgggcggtgctaggttcggttcggatgggtggtgctaggtctaaatgggcggcgccggatccgatgggcggtgctgggttcggtccggactggcgggtccgggtctggacgggcggtgctggatccaaatgggggtgcagtgctggatctggacgggcggtgctgggtccgaacgggcgatgggtcccatgggcggtgctaggttcggttcggactggcggtgctgggtctaaatgggcggcgctgggtccgatgggtggtactgggtccggacgggcggttctgggtctggacgggcggtgcagtatccaaatgggcgctgctgggtccggacgggcggtgctaggttcggtccggacgggtggtgctgggtctaaatgggcggtgctaggctcagcaggggaccggtgggcgtggcggcacaggtacggagcgcagggccggtggagcgccctctccgaagggccctgcgctccccgcgctcgctgctcctcctgcccgcgcattgccccggggctgctgcgtgtttcttccagggtgattcctttccgctgggtcacttcaaagccgaccttttcaagctgttttcttccgcggaggacacgttgttaggctttgtgtgcatttcaagggtcatgttttctgaaccgcgctctgccgctcttggggtgttcgagcccccacactgctgtgcggtgttcctctcacagagtgaggttggagggtcccactccctttgtgtgtctccttagaaaacgcctcttctctcagacacatcgttatctgccaattcttcgcagacgtagagaacggactgcagagttaataaacgtcgaggggaagctttgatgcgccccatttggccctgagagatgccacgtgatcgtcattttaaatcctttcctgggcttcccgatggactcgagtttttactatgtgagcatcccggtgcctgcacagcaaggactctcattgggttccacacgtgctgcgcagatccctgacgcagcgttcactgaacctcaactgcaggagcttcattcctgaggacgctgttaccaagaatgacttgcctcttgaagaatgagtttgcaaagccggcagttagattgctgatgtccaaagtaagtatgtgtagcatcactaaagagaaaattcaggattcctggaaaacagttatgggctctctgcagtgttatttttgtaataaaaaacatatagcatatgtgaaatacctactgggtgatgcaggacacatagaaggctcgaaattaatgtgaatcattctcgtttttctgactgtcattaaaagtccccatttgtattatgtatgagtggtatatcaatatctaaactacactttattgtaggtcccaaccaacattagtttattgacaaatgtttaagagcagccaaaaattcatagaatacctatgattcttaaatcatgaacactcccataactggtatatgtttaggacatgaaaatttccaggctgacaaataatttcgctgtcatcggtcaagactccaggatgatattctgagccatatgttaattttgataaccacctagaacaataaaaggtaaacatgctaccatcttctattctcattgcaccactggattctggtacatctaaaaattgtacttaaatgatatccaagaaatgctgtaaaaaacaaaatagggccgggcgcagtggctcacacctgtaatcccagcattttgggaggccaaggcgggcagatcacgaggtcaggagatcaagaccatcctggctaacacggtgaaaccccgtctctactaaaaatacaaaaaaaaaaaaaattagccgggcatggttgtgggtgcctgtagttccagctactcaggaggctgaggcaggagaatgacgtgaacccgggaggcggaggttgcagtgagctgagaccgcgccactgcactccagcctgggcgacagagcaagactctgtctcaaaataaataaataaataaaagaatgggcttttctgttattaattccattttatacatggtgagactgaaatgcaagataaaggactggactgaagctaaacaaacctgcactgggcgaggttgaaaaagacctttttaatctataagtcggtttttgaaaattcaagtttctactttataattttagttttccttttaaacgtatattattgttagttgcactgttcaaaaagttttacagcttctatttcaatcagcactggtatactaatatttttaagtatctcctatctaaaaccaaaatc

SEQ ID NO: 1392 - protein, 254 aa, Homo sapiens
MGAAGSDGRCCVRSGRAGTGGAGSKWVVMDLWTGGAGSRRAVLGPDGRWVRWAVLGSVRMGGARSKWAAPDPMGGAGFGPDWRVRVWTGGAGSKWGCSAGSGRAVLGPNGRWVPWAVLGSVRTGGAGSKWAALGPMGGTGSGRAVLGLDGRCSIQMGAAGSGRAVLGSVRTGGAGSKWAVLGSAGDRWAWRHRYGAQGRWSALSEGPCAPRARCSSCPRIAPGLLRVSSRVIPFRWVTSKPTFSSCFLPRRTRC

SEQ ID NO: 1393 - DNA, 1050 bp, Homo sapiens
aggagaaactttcatgatgttggtcatggcaattattttaacttataaattgtaacaaaaggatttgggaaggactggtaggtttaaagggaatagttatgggagattatgggttataggctcctgtgcatatctcagtaacttcctcagtaaagaagacatggccttgagcccgaataccctgggaagctggaactaagactcaactccttctgaccccttctctcaattaaggattctttttttctcatttcaccaagaacagagaagcaaccaaagatagcttttctatttttccaccaccatatctcttcacatagttttatctttatccataatctaccttctcttcactgtctgattcaaggccaacccctccacttacactagattccatccccaatgactttttcaagaatttaactccagaagttaaacattatttcctgcattatgaatctctacaccacccccaagcaggataattcattttaggtagaaatatgtggtaatagttctcatttaaaattctgtacatttccagctactgcctcatttactcctctctttatagaagaaagcatcgtttgtctttattcagcatctccactttttctcttgcattcttttgctgttgttttgtttttctgggaaagttctttaatgtttttaatttgttataaaatatttcagactttaaaaataaaaagtaaatatattgtgtcatataatttgtcttctcctcttaaagccggaagcttcatttctaatgatgaatgtccttcagaatattatcattgcagactgaagtgcaatgctgatgaacatgcaattacatactgtgctgacttcagcatctgctgcaaactgaagatcattgaaattgacggacaaaagaagtggtgaaaatgctaactccatcttcttcagactccaggagcaaaaacatgtcttaaactctcttatctacgaataattaacatgatggatgaaaattattataattgcatgtttagatggtcaggtgaaaatgaatataaattttataaa

SEQ ID NO: 1394 - protein, 80 aa, Homo sapiens [sequence omitted]

SEQ ID NO: 1395 - DNA, 210 bp, Homo sapiens
atgatagttcttgattccaactcggtagtggatggaagtgatgttgagtctattgccggaagcttcatttctaatgatgaatgtccttcagaatattatcattgcagactgaagtgcaatgctgatgaacatgcaattacatactgtgctgacttcagcatctgctgcaaactgaagatcattgaaattgacggacaaaagaagtggtga

SEQ ID NO: 1396 - protein, 69 aa, Homo sapiens
MIVLDSNSVVDGSDVESIAGSFISNDECPSEYYHCRLKCNADEHAITYCADFSICCKLKIIEIDGQKKW

SEQ ID NO: 1397 - DNA, 354 bp, Homo sapiens
atgggcaggaggacacccgcccaggtgcccggcgtcgaccggcagcctccgcacagcagaccttgcctgcctactgcccaggcctgcaccatgtcccatcacccagcggccagccatgatggggcccagcctctcagagtgctcttccggagactagaaaacagacgctggagctccagcctcctggcggccccctcatttcactctcctgagaagccgggagccttcctcgctcagagccctcatgtgtcagagaagtctgagggtccctgtgttcgtgtcccaccgaacgtcctctatgaagaccttcaggtttcctcctcctcagaggacagcgattctgacctgcagtga

SEQ ID NO: 1398 - protein, 117 aa, Homo sapiens
MGRRTPAQVPGVDRQPPHSRPCLPTAQACTMSHHPAASHDGAQPLRVLFRRLENRRWSSSLLAAPSFHSPEKPGAFLAQSPHVSEKSEGPCVRVPPNVLYEDLQVSSSSEDSDSDLQ

SEQ ID NO: 1399 - DNA, 1073 bp, Homo sapiens
atgaggagtactgcagaggtcacagggaagtcacagaacagtaatacgctagcaggggcatggggcatgaagaacagaagacaggaagcatttcagagactccaaagaagaaatcagggccaaccacagcttcccgggtcattcaccaggtgacaccactgccgtcatttcagcttctggccactgggaggcgctgctcgaaaggctttgccctgagactccaagaagctgcgggaaggacagcaggggccctggggttttagcctctggcccaggagttatgtgtccataaccaaagggagcacagtctgcacccagctctcatcccatcagagctgctgagactcttgcaggttcttccagaactggcttagcttgcctgcaggatcagaaaagtttgagaaaagcatctgcaaaatgctaaagagcagagcttaactcattgcctgtccccaccccatcccaggtcaccacttggatgaccccaggtccccgacccaacaacaacccctcccaagtccctaactccctcacttggacttgagacccttcacaacccccctcacttggacttgagacccttcacaacccagcagcgctccacttccaacttgacatcatgctttctggaaacttccccgtatgtcccactttcccacacttggtgccctggagcaccttccggcctctacatgctgtacgttcccctgtgagcaccctcctctcggcctctggccaacacagtcccacccatctgtgggtaacaagggggtgtgggtgttcttttcagccttgctaaactgtctgaatcaaggatcacaaactacagcctgcaggccaaatccagcccacagcctgtgtttgtaaataaagctttgttggaacaaagccacaccccttaatctacagatgatctgtggctactttcacaccacaacagagtaccatggttctgacagagactggggtaccctgtctaaatgacttctgacctggacatttactgaaaatcctcccaatcattctgttgacaagaatgatgtattactttttgcaataagaaacaagtaacc

SEQ ID NO: 1400 - protein, 50 aa, Homo sapiens
MRSTAEVTGKSQNSNTLAGAWGMKNRRQEAFQRLQRRNQGQPQLPGSFTR

SEQ ID NO: 1401 - DNA, 330 bp, Homo sapiens
atgactcacactggagagaggccatatgcatgtcatctatgtggaaaagccttcactcagtgttctcaccttagaagacatgagaaaactcacacgggagagagaccatataagtgtcatcagtgtgggaaagcctttattcaatcctttaaccttcgaagacatgagagaactcaccttggacaaaagtgttatgaatgtgataaaagtgggaaagcctttagtcaaagctctggctttagaggaaacaaaataattcacattggagagaaacctcatgcttgtcttctatgtgggaaggccttcagtctgtcttccgaccttagatga

SEQ ID NO: 1402 - protein, 109 aa, Homo sapiens
MTHTGERPYACHLCGKAFTQCSHLRRHEKTHTGERPYKCHQCGKAFIQSFNLRRHERTHLGQKCYECDKSGKAFSQSSGFRGNKIIHIGEKPHACLLCGKAFSLSSDLR

SEQ ID NO: 1403 - DNA, 1789 bp, Homo sapiens
atgcgcggtctgcctcccgcggcgggccgggtctccagggaggacctgagttttcttcacccattgtcagggaggcgccatcgccctggctttggggctggggcctccggggaggttccggtaggggcgttggagaggccgctctttttgcaaggcccgagacggcgggccctgcgcaggccgccctattccgcgccctcagggcgtcagtatcagcctgaggctggatacccccgctgggcccggatgaccccgctgggcccggagcatcctccggcgctgccctcccagagccacgcagaggctgaggtggcgcgggggcggccccggctccgcgagaagcggcggcagcgagggctggaggacccgggctgcggggctccggggcgtctggcctgggtgggactgagcccatccagggactgggactctgggattctggttgttgtcagatttctgaagagcattccggaggacatctcctgcctttcagcacagccacagaatttcgtgggcacaggagagcacctagaatattcccctttcattgcacagcagctttgggaaatagttactgctggctctgagatgagaggaagcctgaggtgtagcaggcccaggccccagaagtatggaaaaaatgagcttgactaccacacaaatgaatccattcaaatgttggcaagtggagcagagtcccaggacaggtacagaaacacccccagttcaagaatcttcacatctgaatttagtcctacacctgcaactaccccagatggagccatctcagccatgacaacagagaatgtaccactctcacatgaggaagaggggtaggaagtgctcctgtatcaccagcccttaatgagaccctgaggaaaccacatcatggagatcagcccttctctcctgtaaggaactcatcctatgaaagagcaattagtgcctgcaagagctgtctctgggacagctgttcatgtctatatctgcagggtaaccctcatagtcatatgcagtcatatccatagtcatatcgggagtcagactccagtttgactgagtgaatggagaaactaaacatttattactgaataataacattaataaaccatcttaatgatagtaataataaacatattgatgagtattaacaggaatgatgattattatgatactaatatccataattaataattttaatattgataataatactaaccctgtggacttgggacctagagagcagtttcccctgacaattatcccatatttggccacatggggtaatattgagttccagaaggcaaagattaacattcagaaaaataggaaaaacaacctgcaggtaggcatgtgcacacatggggactctatggataaatactaaagtgactcttgttctggatctccatgctaacaaacatgcaccagctttcaggaggtaggacagctggctgatggggcaaggcttcttgaggacatggcaggagtcagaaatcacacatgctgcccagcagcagagctcatgacaagcagtaaaccccagtgaaaggacctggctgcccttctgccatctgctctcccatggcctctgttgactggtacatctaggcactggaataaccttcactggctataggaaggcataatcctcagtattctcccacctgcaagaaagacaaaaattaattgaataccatggcttctgggtatccttagtgggcttagtgtattttgcatttgttttaacaggccagttatccaggcagtgactttcagtacagctaca

SEQ ID NO: 1404 - protein, 278 aa, Homo sapiens [sequence omitted]

SEQ ID NO: 1405 - DNA, 354 bp, Homo sapiens
atgggcaggaggacacccgcccaggtgcccggcgtcgaccggcagcctccgcacagcagaccttgcctgcccactgcccaggcctgcaccatgtcccatcacccagcggccagccatgatggggcccagcctctcagagtgctcttccggagactagaaaacagacgctggagctccagcctcctggcggccccctcatttcactctcctgagaagctgggagtcttcctcgctcagagccctcatgtgtcagagaagtctgaggctccctgtgttcgtgtcccaccgaacgtcctctatgaagaccttcaggtttcctcctcctcagaggacagcgattctgacctgcagtga

SEQ ID NO: 1406 - protein, 117 aa, Homo sapiens
MGRRTPAQVPGVDRQPPHSRPCLPTAQACTMSHHPAASHDGAQPLRVLFRRLENRRWSSSLLAAPSFHSPEKLGVFLAQSPHVSEKSEAPCVRVPPNVLYEDLQVSSSSEDSDSDLQ

SEQ ID NO: 1407 - DNA, 1262 bp, Homo sapiens
atggcgcccgaggagaacgcggggaccgaactcttgctgcagggttttgagcgccgcttcctggcggtgcgcacactgcgctccttcccctggcagagcttagaggcaaagttaagagactcatcagattctgagctgctgcgggatattttgcagaagactgtgaggcatcctgtgtgtgtgaagcacccgccgtcagtcaagtatgcctggtgctttctctcagaactcatcaaaaagcacgaggctgtccacacggagcctttggacaaactgtacgaggtgctcgcggagactctgatggccaaggagtccacccagggccaccggagctatttgctgtcctcaggaggctcagtcacactctccaagagcacagccatcatctcccacggtaccacaggcctggtcacatgggatgccgccctctaccttgcagaatgggccatcgagaacccggcagccttcattaacaggactgtcctagagcttggcagtggtgccggcctcacaggccttgccatctgcaagatgtgccgcccccgggcatacatcttcagcgaccctcacagccggatcctcgagcagctccgagggaatgtccttctcaatggcctctcattagaggcagacatcactggcaacttagacagccccagggtgacagtggcccagctggactgggacgtagcaatggtccatcagctctctgccttccagccagatgttgtcattgcagcagacgtgctgtattgcccagaagccatcgtgtcgctggtcggggtcctgcagaggctggctgcctgccgggagcacaagcgggctcctgaggtctacgtggcctttaccgtccgcaacccagagacatgccagctgttcaccaccgagctaggccgggatgggatcagatgggaagcggaagctcatcatgaccagaaactgtttccctatggagagcacttggagatggcaatgctgaacctcacactgtaggactcacacatgactccaaagggattgtgagaatcaagtcactctcgtgggaagaatttttatatgggaaagtggataaaactttcattggactggaatgtttggagattattaaactccaaatcaggaatcaaaactgccctctaataagacattagctgtctaggcgtgtgggtgccccctttctgccagcagttctggttctcaagaaaatcatcataaatcagacatgaaaattctagctccaaaaatagcattttctttctgca

SEQ ID NO: 1408 - protein, 330 aa, Homo sapiens
MAPEENAGTELLLQGFERRFLAVRTLRSFPWQSLEAKLRDSSDSELLRDILQKTVRHPVCVKHPPSVKYAWCFLSELIKKHEAVHTEPLDKLYEVLAETLMAKESTQGHRSYLLSSGGSVTLSKSTAIISHGTTGLVTWDAALYLAEWAIENPAAFINRTVLELGSGAGLTGLAICKMCRPRAYIFSDPHSRILEQLRGNVLLNGLSLEADITGNLDSPRVTVAQLDWDVAMVHQLSAFQPDVVIAADVLYCPEAIVSLVGVLQRLAACREHKRAPEVYVAFTVRNPETCQLFTTELGRDGIRWEAEAHHDQKLFPYGEHLEMAMLNLTL

SEQ ID NO: 1409 - DNA, 919 bp, Homo sapiens
agaacgcggggaccgaactcttgctgcagggttttgagcgccgcttcctggcggtgcgcacactgcgctccttcccctggcaggtgggcggcggggcgagcggagaggcccgcgggggtcgcgggagtccaggggcagacgggatgggtctccgtgctgaaacccccggcgctccggccacagcttagaggcaaagttaagagactcatcagattctgagctgctgcgggatattttgcagaagtcctcaggaggctcagtcacactctccaagagcacagccatcatctcccacggtaccacaggcctggtcacatgggatgccgccctctaccttgcagaatgggccatcgagaacccggcagccttcattaacagacgtgctgtattgcccagaagccatcgtgtcgctggtcggggtcctgcagaggctggctgcctgccgggagcacaagcgggctcctgaggtctacgtggcctttaccgtccgcaacccagagacatgccagctgttcaccaccgagctaggtgaacccccacgcccacccgggcctacatggtgcccgagctgtccctgcaggactccagtggaagtgaaagaactgggcgctggggaaaagctaggatgctccacactcccacactatgcggggaactcgggcagaggccggccgggatgggatcagatgggaagcggaagctcatcatgaccagaaactgtttccctatggagagcacttggagatggcaatgctgaacctcacactgtaggactcacacatgactccaaagggattgtgagaatcaagtcactctcgtgggaagaatttttatatgggaaagtggataaaactttcattggactggaatgtttggagattattaaactccaaatcaggaatcaaaactgccctctaat

SEQ ID NO: 1410 - protein, 129 aa, Homo sapiens
MPPSTLQNGPSRTRQPSLTDVLYCPEAIVSLVGVLQRLAACREHKRAPEVYVAFTVRNPETCQLFTTELGEPPRPPGPTWCPSCPCRTPVEVKELGAGEKLGCSTLPHYAGNSGRGRPGWDQMGSGSSS

SEQ ID NO: 1411 - DNA, 845 bp, Homo sapiens
ggagaacgcggggaccgaactcttgctgcagggttttgagcgccgcttcctggcggtgcgcacactgcgctccttcccctggcagagcttagaggcaaagttaagagactcatcagattctgagctgctgcgggatattttgcagaagactgtgaggcatcctgtgtgtgtgaagcacccgccgtcagtcaagtatgcctggtgctttctctcagaactcatcaaaaagagacaagatctctgttgcccaggctgtcctcgaactcctgggctcaagcagtcctcccacgtcagcctttagagtagctggaactattcgacacacaccaccacgcccaacgaaattagaacgaaagcaaacaagctctcactctgtctgcccccagcacgaggctgtccacacggagcctttggacaaactgtacgaggtgctcgcggagactctgatggccaaggagtccacccagggccaccggagctatttgctgtcctcaggaggctcagtcacactctccaagagcacagccatcatctcccacggtaccacaggcctggtcacatgggatgccgccctctaccttgcagaatgggccatcgagaacccggcagccttcattaacagacgtgctgtattgcccagaagccatcgtgtcgctggtcggggtcctgcagaggctggctgcctgccgggagcacaagcgggctcctgaggtctacgtggcctttaccgtccgcaacccagagacatgccagctgttcaccaccgagctaggccgggatgggatcagatgggaagcggaagctcatcatgaccagaaactgtttccctatggagagcacttgga

SEQ ID NO: 1412 - protein, 171 aa, Homo sapiens [sequence omitted]

SEQ ID NO: 1413 - DNA, 1321 bp, Homo sapiens
ggggaccgaactcttgctgcagggttttgagcgccgcttcctggcggtgcgcacactgcgctccttcccctggcaggcagtaatcgttctggtcactgggacacagctgcactcgcccattctaaaaagtcagcgccctcaggcccgcggagcttagaggcaaagttaagagactcatcagattctgagctgctgcgggatattttgcagaagactgtgaggcatcctgtgtgtgtgaagcacccgccgtcagtcaagtatgcctggtgctttctctcagaactcatcaaaaagcacgaggctgtccacacggagcctttggacaaactgtacgaggtgctcgcggagactctgatggccaaggagtccacccagggccaccggagctatttgctgtcctcaggaggctcagtcacactctccaagagcacagccatcatctcccacggtaccacaggcctggtcacatgggatgccgccctctaccttgcagaatgggccatcgagaacccggcagccttcattaacaggactgtcctagagcttggcagtggtgccggcctcacaggccttgccatctgcaagatgtgccgcccccgggcatacatcttcagcgaccctcacagccggatcctcgagcagctccgagggaatgtccttctcaatggcctctcattagaggcagacatcactggcaacttagacagccccagggtgacagtggcccagctggactgggacgtagcaatggtccatcagctctctgccttccagccagatgttgtcattgcagcagacgtgctgtattgcccagaagccatcgtgtcgctggtcggggtcctgcagaggctggctgcctgccgggagcacaagcgggctcctgaggtctacgtggcctttaccgtccgcaacccagagacatgccagctgttcaccaccgagctaggccgggatgggatcagatgggaagcggaagctcatcatgaccagaaactgtttccctatggagagcacttggagatggcaatgctgaacctcacactgtaggactcacacatgactccaaagggattgtgagaatcaagtcactctcgtgggaagaatttttatatgggaaagtggataaaactttcattggactggaatgtttggagattattaaactccaaatcaggaatcaaaactgccctctaataagacattagctgtctaggcgtgtgggtgccccctttctgccagcagttctggttctcaagaaaatcatcataaatcagacatgaaaattctagctccaaaaatagcattttctttctgcaaataa

SEQ ID NO: 1414 - protein, 230 aa, Homo sapiens
MAKESTQGHRSYLLSSGGSVTLSKSTAIISHGTTGLVTWDAALYLAEWAIENPAAFINRTVLELGSGAGLTGLAICKMCRPRAYIFSDPHSRILEQLRGNVLLNGLSLEADITGNLDSPRVTVAQLDWDVAMVHQLSAFQPDVVIAADVLYCPEAIVSLVGVLQRLAACREHKRAPEVYVAFTVRNPETCQLFTTELGRDGIRWEAEAHHDQKLFPYGEHLEMAMLNLTL

SEQ ID NO: 1415 - DNA, 803 bp, Homo sapiens
catagcatattgaatcatcacaaggcagccacctcttcatagccacacctggcccctggccaccactgacctgtgctccatcgccagaattccgttgtctcaggaatgttcaatagatggaatcctgtgtggcctgagatgagtgtctttcatgccgcgtgacacccttgaggcccgtgcaactgttggtatgtcaacagttagctgcttctcattgctgagtggcgattggtcctgtcatggtttattcagccatgtggtggatggctacttgtcttctaagccacttgccttctgatcgctggactgactctctcgccctctcttggtgcagtcctcaggaggctcagtcacactctccaagagcacagccatcatctcccacggtaccacaggcctggtcacatgggatgccgccctctaccttgcagaatgggccatcgagaacccggcagccttcattaacagacgtgctgtattgcccagaagccatcgtgtcgctggtcggggtcctgcagaggctggctgcctgccgggagcacaagcgggctcctgaggtctacgtggcctttaccgtccgcaacccagagacatgccagctgttcaccaccgagctaggccgggatgggatcagatgggaagcggaagctcatcatgaccagaaactgtttccctatggagagcacttggagatggcaatgctgaacctcacactgtaggactcacacatgactccaaagggattgtgagaatcaagtcactctcgtgggaagaatttttatatgggaaagtggataaaactt

SEQ ID NO: 1416 - protein, 154 aa, Homo sapiens
MWWMATCLLSHLPSDRWTDSLALSWCSPQEAQSHSPRAQPSSPTVPQAWSHGMPPSTLQNGPSRTRQPSLTDVLYCPEAIVSLVGVLQRLAACREHKRAPEVYVAFTVRNPETCQLFTTELGRDGIRWEAEAHHDQKLFPYGEHLEMAMLNLTL

SEQ ID NO: 1417 - DNA, 674 bp, Homo sapiens
gcacactgcgctccttcccctggcaggtgggcggcggggcgagcggagaggcccgcgggggtcgcgggagtccaggggcagacgggatgggtctccgtgctgaaacccccggcgctccggccacactgtgaggcatcctgtgtgtgtgaagcacccgccgtcagtcaagtatgcctggtgctttctctcagaactcatcaaaaagtcctcaggaggctcagtcacactctccaagagcacagccatcatctcccacggtaccacaggcctggtcacatgggatgccgccctctaccttgcagaatgggccatcgagaacccggcagccttcattaacagacgtgctgtattgcccagaagccatcgtgtcgctggtcggggtcctgcagaggctggctgcctgccgggagcacaagcgggctcctgaggtctacgtggcctttaccgtccgcaacccagagacatgccagctgttcaccaccgagctaggccgggatgggatcagatgggaagcggaagctcatcatgaccagaaactgtttccctatggagagcacttggagatggcaatgctgaacctcacactgtaggactcacacatgactccaaagggattgtgagaatcaagtcactctcgtgggaagaatttttatatgggaaagtggataaaactt

SEQ ID NO: 1418 - protein, 139 aa, Homo sapiens
MPGAFSQNSSKSPQEAQSHSPRAQPSSPTVPQAWSHGMPPSTLQNGPSRTRQPSLTDVLYCPEAIVSLVGVLQRLAACREHKRAPEVYVAFTVRNPETCQLFTTELGRDGIRWEAEAHHDQKLFPYGEHLEMAMLNLTL

SEQ ID NO: 1419 - DNA, 2282 bp, Homo sapiens
ccaggtctcccggcaacggctgcggcctcgcccacgttatggcgcccgaggagaacgcggggaccgaactcttgctgcagggttttgagcgccgcttcctggcggtgcgcacactgcgctccttcccctggcaggcagtaatcgttctggtcactgggacacagctgcactcgcccattctaaaaagtcagcgccctcaggcccgcggagcttagaggcaaagttaagagactcatcagattctgagctgctgcgggatattttgcagaagactgtgaggcatcctgtgtgtgtgaagcacccgccgtcagtcaagtatgcctggtgctttctctcagaactcatcaaaaagtcctcaggaggctcagtcacactctccaagagcacagccatcatctcccacggtaccacaggcctggtcacatgggatgccgccctctaccttgcagaatgggccatcgagaacccggcagccttcattaacagacgtgctgtattgcccagaagccatcgtgtcgctggtcggggtcctgcagaggctggctgcctgccgggagcacaagcgggctcctgaggtctacgtggcctttaccgtccgcaacccagagacatgccagctgttcaccaccgagctaggccgggatgggatcagatgggaagcggaagctcatcatgaccagaaactgtttccctatggagagcacttggagatggcaatgctgaacctcacactgtaggactcacacatgactccaaagggattgtgagaatcaagtcactctcgtgggaagaatttttatatgggaaagtggataaaactttcattggactggaatgtttggagattattaaactccaaatcaggaatcaaaactgccctctaataagacattagctgtctaggcgtgtgggtgccccctttctgccagcagttctggttctcaagaaaatcatcataaatcagacatgaaaattctagctccaaaaatagcattttctttctgcaaataaaaacgtgtgtatcaaggatgacgttcccccaacgtggacacactcagttcctcagaaagccaagcccgctgcagctgccacatccctggacacactcggttcctcacaaagccaagcccgctgcagctgccacatcccagggcttatggtgcagcaggcgcttttttcaagacaggaatgaaagtgttaggaacacggcagaaaggtgacacctggagaccaaatgcaggatgaggagtactgcagaggtcacagggaagtcacagaacagtaatacgctagcaggggcatggggcatgaagaacagaagacaggaagcatttcagagactccaaagaagaaatcagggccaaccacagcttcccgggtcattcaccaggtgacaccactgccgtcatttcagcttctggccactgggaggcgctgctcgaaaggctttgccctgagaccccaagaagctgcgggaaggacagcaggggccctggggttttagcctctggcccaggagttatgtgtccataaccaaagggagcacagtctgcacccagctctcatcccatcagagctgctgagactcttgcaggttcttccagaactggtttagcttgcctgcaggatcagaaaagtttgagaaaagcatctgcaaaatgctaaagagcagagcttaactcattgcctgtccccaccccatcccaggtcaccacttggctgaccccaggtccccgacccaacaacaacccctcccaagtccctaactccctcacttggacttgagacccttcacaacccagcagcgctccacctccaacttgacatcatgctttctggaaacttccccgtatgtcccactttcccacacttggtgccctggagcaccttccggcctctacatgctgtacgttcccctgtgagcaccctcctctcggcctctggccaacacagtcccacccatctgtgggtaacaagggggtgtgggtgttcttttcagccttgctaaactgtctgaatcaaggatcacaaactacagcctgcaggccaaatccagcccacagcctgtgtttgtaaataaagctttgttggaacaaagccacaccccttaatctacagatgatctgtggctactttcacaccacaacagagtaccatggttctgacagagactggggtaccctgtctaaatgacttctgacctggacatttactgaaaatcctcccaatcattctgttgacaagaatgatgtattactttttgcaataagaaacaagtaacc

SEQ ID NO: 1420 - protein, 139 aa, Homo sapiens; identical to SEQ ID NO: 1418

SEQ ID NO: 1421 - DNA, 2188 bp, Homo sapiens
tgcggcctcgcccacgttatggcgcccgaggagaacgcggggaccgaactcttgctgcagggttttgagcgccgcttcctggcggtgcgcacactgcgctccttcccctggcagagcttagaggcaaagttaagagactcatcagattctgagctgctgcgggatattttgcagaagactgtgaggcatcctgtgtgtgtgaagcacccgccgtcagtcaagtatgcctggtgctttctctcagaactcatcaaaaagtcctcaggaggctcagtcacactctccaagagcacagccatcatctcccacggtaccacaggcctggtcacatgggatgccgccctctaccttgcagaatgggccatcgagaacccggcagccttcattaacagacgtgctgtattgcccagaagccatcgtgtcgctggtcggggtcctgcagaggctggctgcctgccgggagcacaagcgggctcctgaggtctacgtggcctttaccgtccgcaacccagagacatgccagctgttcaccaccgagctaggccgggatgggatcagatgggaagcggaagctcatcatgaccagaaactgtttccctatggagagcacttggagatggcaatgctgaacctcacactgtaggactcacacatgactccaaagggattgtgagaatcaagtcactctcgtgggaagaatttttatatgggaaagtggataaaactttcattggactggaatgtttggagattattaaactccaaatcaggaatcaaaactgccctctaataagacattagctgtctaggcgtgtgggtgccccctttctgccagcagttctggttctcaagaaaatcatcataaatcagacatgaaaattctagctccaaaaatagcattttctttctgcaaataaaaacgtgtgtatcaaggatgacgttcccccaacgtggacacactcagttcctcagaaagccaagcccgctgcagctgccacatccctggacacactcggttcctcacaaagccaagcccgctgcagctgccacatcccagggcttatggtgcagcaggcgcttttttcaagacaggaatgaaagtgttaggaacacggcagaaaggtgacacctggagaccaaatgcaggatgaggagtactgcagaggtcacagggaagtcacagaacagtaatacgctagcaggggcatggggcatgaagaacagaagacaggaagcatttcagagactccaaagaagaaatcagggccaaccacagcttcccgggtcattcaccaggtgacaccactgccgtcatttcagcttctggccactgggaggcgctgctcgaaaggctttgccctgagaccccaagaagctgcgggaaggacagcaggggccctggggttttagcctctggcccaggagttatgtgtccataaccaaagggagcacagtctgcacccagctctcatcccatcagagctgctgagactcttgcaggttcttccagaactggtttagcttgcctgcaggatcagaaaagtttgagaaaagcatctgcaaaatgctaaagagcagagcttaactcattgcctgtccccaccccatcccaggtcaccacttggctgaccccaggtccccgacccaacaacaacccctcccaagtccctaactccctcacttggacttgagacccttcacaacccagcagcgctccacctccaacttgacatcatgctttctggaaacttccccgtatgtcccactttcccacacttggtgccctggagcaccttccggcctctacatgctgtacgttcccctgtgagcaccctcctctcggcctctggccaacacagtcccacccatctgtgggtaacaagggggtgtgggtgttcttttcagccttgctaaactgtctgaatcaaggatcacaaactacagcctgcaggccaaatccagcccacagcctgtgtttgtaaataaagctttgttggaacaaagccacaccccttaatctacagatgatctgtggctactttcacaccacaacagagtaccatggttctgacagagactggggtaccctgtctaaatgacttctgacctggacatttactgaaaatcctcccaatcattctgttgacaagaatgatgtattactttttgcaataagaaacaagtaacc

SEQ ID NO: 1422 - protein, 153 aa, Homo sapiens
MAPEENAGTELLLQGFERRFLAVRTLRSFPWQSLEAKLRDSSDSELLRDILQKTVRHPVCVKHPPSVKYAWCFLSELIKKSSGGSVTLSKSTAIISHGTTGLVTWDAALYLAEWAIENPAAFINRRAVLPRSHRVAGRGPAEAGCLPGAQAGS

SEQ ID NO: 1423 - DNA, 2894 bp, Homo sapiens
tcgcccacgttatggcgcccgaggagaacgcggggaccgaactcttgctgcagggttttgagcgccgcttcctggcggtgcgcacactgcgctccttcccctggcaggtgggcggcggggcgagcggagaggcccgcgggggtcgcgggagtccaggggcagacgggatgggtctccgtgctgaaacccccggcgctccggccacgtgagttcctgggctctcctcggtcagggccgcgagacccggtccccgtccctggggcctggccagagtcgctcgcaccccttctgccccgcgagctggcggcggaagctgggggcgtctccaccgccttagggggtagacgcgcgctcggtgtggggtacggttcacgatcattttcacgactttttaaaggcagtaatcgttctggtcactgggacacagctgcactcgcccattctaaaaagtcagcgccctcaggcccgcgggtaaccacctcctcctgagcgtggtgaccagagcttagaggcaaagttaagagactcatcagattctgagctgctgcgggatattttgcagaagactgtgaggcatcctgtgtgtgtgaagcacccgccgtcagtcaagtatgcctggtgctttctctcagaactcatcaaaaagtcctcaggaggctcagtcacactctccaagagcacagccatcatctcccacggtaccacaggcctggtcacatgggatgccgccctctaccttgcagaatgggccatcgagaacccggcagccttcattaacaggactgtcctagagcttggcagtggtgccggcctcacaggccttgccatctgcaagatgtgccgcccccgggcatacatcttcagcgaccctcacagccggatcctcgagcagctccgagggaatgtccttctcaatggcctctcattagaggcagacatcactggcaacttagacagccccagggtgacagtggcccagctggactgggacgtagcaatggtccatcagctctctgccttccagccagatgttgtcattgcagcagacgtgctgtattgcccagaagccatcgtgtcgctggtcggggtcctgcagaggctggctgcctgccgggagcacaagcgggctcctgaggtctacgtggcctttaccgtccgcaacccagagacatgccagctgttcaccaccgagctaggccgggatgggatcagatgggaagcggaagctcatcatgaccagaaactgtttccctatggagagcacttggagatggcaatgctgaacctcacactgtaggactcacacatgactccaaagggattgtgagaatcaagtcactctcgtgggaagaatttttatatgggaaagtggataaaactttcattggactggaatgtttggagattattaaactccaaatcaggaatcaaaactgccctctaataagacattagctgtctaggcgtgtgggtgccccctttctgccagcagttctggttctcaagaaaatcatcataaatcagacatgaaaattctagctccaaaaatagcattttctttctgcaaataaaaacgtgtgtatcaaggatgacgttcccccaacgtggacacactcagttcctcagaaagccaagcccgctgcagctgccacatccctggacacactcggttcctcacaaagccaagcccgctgcagctgccacatccctggacacactcggttcctcacaaagccaagcccgctgcagctgccacatcccagggcttatggtgcagcaggcgcttttttcaagacaggaatgaaagtgttaggaacacggcagaaaggtgacacctggagaccaaatgcaggatgaggagtactgcagaggtcacagggaagtcacagaacagtaatacgctagcaggggcatggggcatgaagaacagaagacaggaagcatttcagagactccaaagaagaaatcagggccaaccacagcttcccgggtcattcaccaggtgacaccactgccgtcatttcagcttctggccactgggaggcgctgctcgaaaggctttgccctgagaccccaagaagctgcgggaaggacagcaggggccctggggttttagcctctggcccaggagttatgtgtccataaccaaagggagcacagtctgcacccagctctcatcccatcagagctgctgagactcttgcaggttcttccagaactggtttagcttgcctgcaggatcagaaaagtttgagaaaagcatctgcaaaatgctaaagagcagagcttaactcattgcctgtccccaccccatcccaggtcaccacttggctgaccccaggtccccgacccaacaacaacccctcccaagtccctaactccctcacttggacttgagacccttcacaacccagcagcgctccacctccaacttgacatcatgctttctggaaacttccccgtatgtcccactttcccacacttggtgccctggagcaccttccggcctctacatgctgtacgttcccctgtgagcaccctcctctcggcctctggccaacacagtcccacccatctgtgggtaacaagggggtgtgggtgttcttttcagccttgctaaactgtctgaatcaaggatcacaaactacagcctgcaggccaaatccagcccacagcctgtgtttgtaaataaagctttgttggaacaaagccacaccccttaatctacagatgatctgtggctactttcacaccacaacagagtaccatggttctgacagagactggggtaccctgtctaaatgacttctgacctggacatttactgaaaatcctcccaatcattctgttgacaagaatgatgtattactttttgcaataagaaacaagtaacc

SEQ ID NO: 1424 - protein, 153 aa, Homo sapiens
MCRPRAYIFSDPHSRILEQLRGNVLLNGLSLEADITGNLDSPRVTVAQLDWDVAMVHQLSAFQPDVVIAADVLYCPEAIVSLVGVLQRLAACREHKRAPEVYVAFTVRNPETCQLFTTELGRDGIRWEAEAHHDQKLFPYGEHLEMAMLNLTL

SEQ ID NO: 1425 - DNA, 2259 bp, Homo sapiens
gaggagaacgcggggaccgaactcttgctgcagggttttgagcgccgcttcctggcggtgcgcacactgcgctccttcccctggcaggtgggcggcggggcgagcggagaggcccgcgggggtcgcgggagtccaggggcagacgggatgggtctccgtgctgaaacccccggcgctccggccacagcttagaggcaaagttaagagactcatcagattctgagctgctgcgggatattttgcagaagactgtgaggcatcctgtgtgtgtgaagcacccgccgtcagtcaagtatgcctggtgctttctctcagaactcatcaaaaagtcctcaggaggctcagtcacactctccaagagcacagccatcatctcccacggtaccacaggcctggtcacatgggatgccgccctctaccttgcagaatgggccatcgagaacccggcagccttcattaacagacgtgctgtattgcccagaagccatcgtgtcgctggtcggggtcctgcagaggctggctgcctgccgggagcacaagcgggctcctgaggtctacgtggcctttaccgtccgcaacccagagacatgccagctgttcaccaccgagctaggccgggatgggatcagatgggaagcggaagctcatcatgaccagaaactgtttccctatggagagcacttggagatggcaatgctgaacctcacactgtaggactcacacatgactccaaagggattgtgagaatcaagtcactctcgtgggaagaatttttatatgggaaagtggataaaactttcattggactggaatgtttggagattattaaactccaaatcaggaatcaaaactgccctctaataagacattagctgtctaggcgtgtgggtgccccctttctgccagcagttctggttctcaagaaaatcatcataaatcagacatgaaaattctagctccaaaaatagcattttctttctgcaaataaaaacgtgtgtatcaaggatgacgttcccccaacgtggacacactcagttcctcagaaagccaagcccgctgcagctgccacatccctggacacactcggttcctcacaaagccaagcccgctgcagctgccacatcccagggcttatggtgcagcaggcgcttttttcaagacaggaatgaaagtgttaggaacacggcagaaaggtgacacctggagaccaaatgcaggatgaggagtactgcagaggtcacagggaagtcacagaacagtaatacgctagcaggggcatggggcatgaagaacagaagacaggaagcatttcagagactccaaagaagaaatcagggccaaccacagcttcccgggtcattcaccaggtgacaccactgccgtcatttcagcttctggccactgggaggcgctgctcgaaaggctttgccctgagaccccaagaagctgcgggaaggacagcaggggccctggggttttagcctctggcccaggagttatgtgtccataaccaaagggagcacagtctgcacccagctctcatcccatcagagctgctgagactcttgcaggttcttccagaactggtttagcttgcctgcaggatcagaaaagtttgagaaaagcatctgcaaaatgctaaagagcagagcttaactcattgcctgtccccaccccatcccaggtcaccacttggctgaccccaggtccccgacccaacaacaacccctcccaagtccctaactccctcacttggacttgagacccttcacaacccagcagcgctccacctccaacttgacatcatgctttctggaaacttccccgtatgtcccactttcccacacttggtgccctggagcaccttccggcctctacatgctgtacgttcccctgtgagcaccctcctctcggcctctggccaacacagtcccacccatctgtgggtaacaagggggtgtgggtgttcttttcagccttgctaaactgtctgaatcaaggatcacaaactacagcctgcaggccaaatccagcccacagcctgtgtttgtaaataaagctttgttggaacaaagccacaccccttaatctacagatgatctgtggctactttcacaccacaacagagtaccatggttctgacagagactggggtaccctgtctaaatgacttctgacctggacatttactgaaaatcctcccaatcattctgttgacaagaatgatgtattactttttgcaataagaaacaagtaacc

SEQ ID NO: 1426 - protein, 139 aa, Homo sapiens; identical to SEQ ID NO: 1418

SEQ ID NO: 1427 - DNA, 3947 bp, Homo sapiens
ccgcgctcagactccccagctccgccgagaggacgctcgcgctgggtccttcttcttccccaagtgcaggcagagcccccggagtcatggccagcccttccggcagctccgaagccactggcaagccctgaggtagggatggctggcccaggagggaggaggacgacgtccctcccgaagagaagaggctgcggctgttgctggaggggggaagcgcacagcccgaggactgcgaggacggggaggacgcgccgcggccgggcagggaggagaccggcacccagacaggtggcgacggcaaaggagcggaattctccacgagttttgagcagcctcggttttcccaccccctccaaatcatggaagaaacagggtaagagcaaagacaaggtggctgtggcctatgtctaccctctcggggcgtcccttgtcttctctcctccttgggcagggagaccatcggagtgcaacctggctggggcggggaggaggtgcagggcctggccagagcgggcctggccacgggcaagggacagcgacctcctgggccaggacaggtgagcgcggcgcaggcccgggcccggcgtgtccgcgctgcgcgggagaggccagcagagggcgccagagagccaggagcggcccgcggaggagcccgcgcccgccccgatgcccagctccgcgcctcgcggacccagcaagctcgcgctcagacgccccagctccgccgagaggacgctcgccccgggtgcttctttttccccaagtgcaggcagagcccctggagccatggccagcccttccggcagctccgaagccactggcaagccccgaggcagggatggccggcccaggagggaggaggacgacgtccctcctgaagagaagaggctgcggctgttgctggaggggggaagagcacagcccgaggactgcgaggacggggaggacgcgctgcggccgggcaaggaggacaccggcacccagacaggtggcgacggcagaggagcggaattctccacgagttttgagcagcctcgggtttcccaccacctccaaatcatggaagacacagggcagagcccgcggagccatggccagcccttccagcagctccgaagccactggcaagccgcgaggcagggatggcagtcccaggatgggggaggaggacgtccctcccgaagagaagaggctggggctgtagctggaggggggaagcgcacagcccgaggactgcgaggacggggaggacccgccgctaccgggcaggaaggagaccggcacccagacaggtggcgacggcaaaggagcggaattctccacgagttttgagcagcctcgggtttcccaccacctccaaatcatggaagacacacggtgcaggcagagccccccagccgtggccagcccttccggcagctccgaagccactggcaagccccgaggcagggatggccggcccaggagggaggaggacgacgtccctcccgaagagaagaggctgcggctgtagctggaggggggaagcgcagaacccgaggactgcgaggacggggaggacgcgccgcggccaggcagggaggagaccggcacccagacaggtggcgaaggcagaggagtctgttcttcccctggattgtaaactccttgatgtctgggtcatctcagctcatgagctgagctttcagtgggtgctcagtggaacaggtgctgaatggagtccggctctagggaggccagggtgtgttggaaggaaaatacatgtacagccaacttccttgagggttcgttcttttgcatcagggtgtctcaaactgatgcccttaaaacacctgtaagagaatcatccaggcggcttgcttgctctgcatgcaggccctttagaatcagactcagaatccctggggctggagccacaaaatgaaatgacatttcaacgagtttgtcatcatgtgagagagaataggcacagagaagttgcccatgactctgtgatccgttttgtccaatgaaccatgagcagcagcaacttgagtcacctccaggtggaagtgttaagaggttgctctatgatccaccacattccctttgccctgaagtggagatcaaggacacatgcagagatggggcttttgtcagcctggatccctgagtgaacacaatgaacagaccaccccagaatgccctaacacagcccagacatgcaacgtgaccaagaataagcctcactgtggccaggcatggtggctcatgcctgtcatcccagcactttgggaggccaaggtgggtggatcatttgaggtcaggagttcaagaccaacctggctaacagggtgaaatcctgtctctactaagtacaaagattagccagacagtggtggcatgggcctgtaatcccagctactcaggaggcaggagaatcacttgagtctgggaggcagaggttgcagtgagctgagattgcaccactgcactctagtctgggtgacagagtgagaccctgtctcaaaaacaaacaaacaaatacctcactgcatgaggccactgagatttggggtttgttgttactgcaccagaacccaaatcatcctgaccgctagggtgtcctaactagggtttcttaccaaaagcaaaggcatttttaaagttcgtgacatttaaacaaaagagcaaataccaatatctaccactttgtcaggctaaaaaacccaaacaaagccaacagccagaagttaaaataaacagatcattaggttgaaaatagaactgtcaaaacaggcacaattgacttcatttagtgattgcaaagaacatcaggcaagacacaggtatgctcatcataacatttatcacatgcttcattgcacatgtttgactaagaaaaacaaagtatttaagctcatctgtagctcaaagtgcctatccgtgtatttatctattcatcctgatttatttattgagcaactcttttgtgccaggcactgtgctgtgttgcgggaagtcagggaccccaaatggagggaccagctgaagccatgacagaagaacgtggattatgaagattttatggacatttattagttccccaaattaatacttttttaatttcttatgcctgtctttactgcaatctctaaacataaattgtgaagatttcatggacacttatcacttccccaatcaatacccttgtgatttcctatgcctatcattactttaatctcttaatcctgtcagtcgagaaggatgtatatcgtctcaggacctgtaataattgcgttaagtacataaattgtacatcatgtgtgtttgagcaatatgaaatgtgggcaccctgaaaaaagaacaggataacagcaattgttcagggaattagagagataaccttaaactctgaccgctggtgagccaggcagaacagaaccatatttctcttctttcaaaagcaaatgggagaaatatcgctgaattccttttctcagcatggaacgtccctgagaaagagaatgcgcacctaggggtaggtctctgaactggccccccggggcgtacctgtctcttatggtcgagattgcagaggtgaaataaactccagtctcccatagcactcccaggcttattaggaagagaaaattcccgcctaataaactttggtcagacgggttgatctcaaaaccctgtctcctcataagatgttatcaatgacaatggtgccaaaacttcattagcaattttaatttcacttccgtcctgtggtctggccctgtctccacttgccttgtgatattctattaccctgttaagtacttgatgtctgtcacccacacctattcatatactccctccccttttgaaactccctaataaaaacttgctggtttttgtggcttgtgggacatcacggatcctaccaatgtgtgatgtctcccccagatgcccagctttac

SEQ ID NO: 1428 - protein, 221 aa, Homo sapiens
MPSSAPRGPSKLALRRPSSAERTLAPGASFSPSAGRAPGAMASPSGSSEATGKPRGRDGRPRREEDDVPPEEKRLRLLLEGGRAQPEDCEDGEDALRPGKEDTGTQTGGDGRGAEFSTSFEQPRVSHHLQIMEDTGQSPRSHGQPFQQLRSHWQAARQGWQSQDGGGGRPSRREEAGAVAGGGKRTARGLRGRGGPAATGQEGDRHPDRWRRQRSGILHEF

SEQ ID NO: 1429 - DNA, 1035 bp, Homo sapiens
tggcccaggagggaggaggacgacgtccctcccgaagagaagaggctgcggctgttgctggaggggggaagcgcacagcccgaggactgcgaggacggggaggacgcgccgcggccgggcagggaggagaccggcacccagacaggtggcgacggcaaaggagcggaattctccacgagttttgagcagcctcggttttcccaccccctccaaatcatggaagaaacagggtaagagcaaagacaaggtggctgtggcctatgtctaccctctcggggcgtcccttgtcttctctcctccttgggcagggagaccatcggagtgcaacctggctggggcggggaggaggtgcagggcctggccagagcgggcctggccacgggcaagggacagcgacctcctgggccaggacaggtgagcgcggcgcaggcccgggcccggcgtgtccgcgctgcgcgggagaggccagcagagggcgccagagagccaggagcggcccgcggaggagcccgcgcccgccccgatgcccagctccgcgcctcgcggacccagcaagctcgcgctcagacgccccagctccgccgagaggacgctcgccccgggtgcttctttttccccaagtgcaggcagagcccctggagccatggccagcccttccggcagctccgaagccactggcaagccccgaggcagggatggccggcccaggagggaggaggacgacgtccctcctgaagagaagaggctgcggctgttgctggaggggggaagagcacagcccgaggactgcgaggacggggaggacgcgctgcggccgggcaaggaggacaccggcacccagacaggtggcgacggcagaggaataaccttcactcttctctgcaacgaatcccaaaagtgtgtagttgagctgactgcaaggtgcttgacacgcaagagattccacaaatgggattcggcctctggaaagtggtggtagttccagatttatgtgaatgttactttgtttttccctataaaatctattctttaaac

SEQ ID NO: 1430 - protein, 151 aa, Homo sapiens
MPSSAPRGPSKLALRRPSSAERTLAPGASFSPSAGRAPGAMASPSGSSEATGKPRGRDGRPRREEDDVPPEEKRLRLLLEGGRAQPEDCEDGEDALRPGKEDTGTQTGGDGRGITFTLLCNESQKCVVELTARCLTRKRFHKWDSASGKWW

SEQ ID NO: 1431 - DNA, 996 bp, Homo sapiens
atgcaaaccccagccgcctggctccagactcgcgttcccaaggtcccactacacttggtcactccactgcattctggtatcctggtctttggcagagtccacgacctctcccttctcatcctttccgtgatcggccctggaaaaccttccagagaactgtcctccttctcccgggatctcagagaaaattcacctgagttcagtgtccaggtgacccaagctctgaatgcagcacccccgcgcccccggcacccccggacccccgcgcccgcgtcacttactcctttgccgtcgccacctgtctgggtgccggtctcctccctgcccggccgcggcgcgtcctccccgtcctcgcagtcctcgggctgtgcgcttcccccctccagcaacagccgcagcctcttctcttcgggagggacgtcgtcctcctccctcctgggccagccatccctacctcagggcttgccagtggcttcggagctgccggaagggctggccatgactccgggggctctgcctgcacttggggaagaagaaggacccagcgcgagcgtcctctcggcggagctggggagtctgagcgcgggctcgttgggtccgcgcggcgcggagctgggcatccgggcggcgcgggctcttccgcgggccgctcctggctctctggcgccctctgctggcctctcccgcacaccgccgccacgccgggctcgggcctgcgccgctctcacctgtcctggcccaggaagtcgctgtcccttgcccgtggccaggcccgctctggccaggccctgcacctcctccccgccccagccaggttgcaccccgatagtctccctgccgaaggaggagagaagagaagggacgcccggagagggtggacatcggccacagccaccttgtctttgctcttaccctgtttcttccatgatttggaggtggtgggaaaaccgaggctgctcaaaactcgtggagaattccgcctgcaggatgacatga

SEQ ID NO: 1432 - protein, 331 aa, Homo sapiens
MQTPAAWLQTRVPKVPLHLVTPLHSGILVFGRVHDLSLLILSVIGPGKPSRELSSFSRDLRENSPEFSVQVTQALNAAPPRPRHPRTPAPASLTPLPSPPVWVPVSSLPGRGASSPSSQSSGCALPPSSNSRSLFSSGGTSSSSLLGQPSLPQGLPVASELPEGLAMTPGALPALGEEEGPSASVLSAELGSLSAGSLGPRGAELGIRAARALPRAAPGSLAPSAGLSRTPPPRRARACAALTCPGPGSRCPLPVARPALARPCTSSPPQPGCTPIVSLPKEERREGTPGEGGHRPQPPCLCSYPVSSMIWRWWENRGCSKLVENSACRMT

SEQ ID NO: 1433 - DNA, 402 bp, Homo sapiens
tctctctggtcgctatcaccggggacatgccgtccccagctcagtgacaaaaatgctgagtttcttccgtagaacactagggagtcggtctatgggtaaacatgcagagaaggaacgactccgagaagcacaatgcgctgccacacatattcctgcccctggagattccaggtccatcatcacgtgtcaggtgtcccttctggatggtactgatgttagtgtggacttgccaaaaaaagccaaagggcaagagttgtttgatcagattatgtatcacctggatcttattgaaagtggctattttgatctgagatttatggattcagcacaagtagcatcaccaaagtaattcaatggaagaagaatagtctcaataatggtgctggattagaacctgtggaa

SEQ ID NO: 1434 - protein, 98 aa, Homo sapiens
MLSFFRRTLGSRSMGKHAEKERLREAQCAATHIPAPGDSRSIITCQVSLLDGTDVSVDLPKKAKGQELFDQIMYHLDLIESGYFDLRFMDSAQVASPK

SEQ ID NO: 1435 - DNA, 1292 bp, Homo sapiens
acctaccactggccctgcgtatgtggtgcagcctctcttcaatccctaagaactggttctttcaaagcatgtattttctgaagaaactttagaaccacgtttattttaaaagaacgaattggagaaaacaaatcgattaatgctcacagcttcttgggtgctttctcacgggtaaagccatggcatccgtaccttccattggttgccttctagccagaaatcagtattatcgaaagtccagtgtttcttcagttagttctttaactagctctgattctgttaacttcatagatgacgacaaaccacagcaagggttgcctgaagtggcagaatccacctggtggtttaaatcgtttttccattctgaacctgtgctttcaaatgtgagaataaaagatctgtctgctactggcatgaacagttgattctgacaatcaagatcctctgcctgctgcagtggtccatacatgaacagctccccttcagcgccccagctattccaggactcttctccattgtaagaagacagaaatgtgtctgagatctcatttatgagacaagatcacagcagccactgatataaaaaaagtttaggcatttttctcaacacaaagactatcgctggaagtggcacttgctacctggtgcatctttgaaaagtgtgcctttagaaacaagacacccttttaaagtaatatgtcttcaaatgttgtgacttacataaagtagctctttcattttttatatcatttttattaaaaaaacttaagttagactctttttctgtctgttgagtgatttatttattatgccttaaaactgacttgtcaatgtttcgcataatggtttaaagggcattgaattcgaaattttagaaaataattgtaaaaattcaatttttttaaaagaatgaaggttggaaatagcatatgtatcattaagtatattagagctaatcaattggtcattgtatagactttaaaatttatgactttaaataatatttaataacatggaaaattatattatggcattaaaaattagcataatacaccatatatggtacaatcgtagttgtattaaaaagttacatatgcataaagatagactggaaggaactgtaccaaaatgctgacagggctatttctggagatgggattatgggcgtttttcattctctttttaatatatttttccatatctcccaatttttctaatatgacaagtattgtgcgtaattagaaaataataaatgttaatacaaaaaaaaaaaaaaaaaaaaaaaaaaaaaa

SEQ ID NO: 1436 - protein, 81 aa, Homo sapiens
MASVPSIGCLLARNQYYRKSSVSSVSSLTSSDSVNFIDDDKPQQGLPEVAESTWWFKSFFHSEPVLSNVRIKDLSATGMNS

SEQ ID NO: 1437 - DNA, 575 bp, Homo sapiens
cgctcgcagattgaatgacgaaataaaagaagaaactacagcacagtcaattttctccatgacagcctgagagatgtagctggtgctgccacttttccttcatttttccctgccttgaatatggtggtgatgcctggagcttcagcagccatcttatggccatgaaatggcaagcatgagaatgaaagaaaatgcactcatcatgaaaggaggaagagcagaagaaatctgggtcactggtgatatcaatggatagctgaagcagtgctgctctggatggaaaatgccctgggttctccgagacttaacaccccgccttgtgaacgcgagcaagattattctctctgagcagctcttttcacatgtgataagcttggcaagttgccctggattgaattctcacccactgtcttcacccaacccagcagagaagaaggcttgtgactgtgtaaggtgaaaatggatataccatttctgggaagagaaaagaagccaattaaaagtggggcatgtcattacactgaccagaaatgaacgtacctttttagaaataaagaatctgtatattcctgtgg

SEQ ID NO: 1438 - protein, 57 aa, Homo sapiens
MPWVLRDLTPRLVNASKIILSEQLFSHVISLASCPGLNSHPLSSPNPAEKKACDCVR

SEQ ID NO: 1439 - DNA, 985 bp, Homo sapiens
cgattggcttgagcgattggaaacaagatgcaggaccccaacacagacactgagtggaatgacatcttagacaagaagggcatcttacccaccaaggaaagtataaaagaatcagaagagaaggcagaagaggagcagcacatccttcagcagtcagtggtgacaacatacgaagatatgactttggaagagctggaggatcatgaagacgagtttaatgaggaggatgaacatgctattgaaatgtacagatggcagagactcgctgaggggaaagcaattaaactgaagaataaatttggagaagttttggagatttcagggaagtattatgttcaagaagttaccaaagccagtgagggcttgtgggtcatcttgcacctttgcaaacgaggaattcccctctgtgccctgataaatcagcacctcagtggacttgccaggaagtttcctgatgtcaaatttatcaaagccaattcaaccacctgcatacccaattatcctgataggaatctgcccatggtatttgtttacttggaaggagacatcaaggctcagttgatcggtcctctggtgtttggcggcatgaacctgaccagagatgagttggggtggaaactgtctgaatctagagcagttaagacggacttggaggaaaaccctaagaagccgattgaaggtgtattgctgtcttcagtgcagagctctgtccccatgaggagggacagcgattccaagggtgactgaggctgcagctgctatcacatgctgaactttcttgtgacaaattgtctggatttctttaagaaaaggaaaagcaagaatgaatccttctggtttttagttttgtataaattatgtttcaaatctttacattttagaaataataattgctggaaattctgttaaatattttggaactctttttttaaactatagtatttcctctaaaaaaattaaaaccagctattggtatggcaaaaaa

SEQ ID NO: 1440 - protein, 239 aa, Homo sapiens
MQDPNTDTEWNDILDKKGILPTKESIKESEEKAEEEQHILQQSVVTTYEDMTLEELEDHEDEFNEEDEHAIEMYRWQRLAEGKAIKLKNKFGEVLEISGKYYVQEVTKASEGLWVILHLCKRGIPLCALINQHLSGLARKFPDVKFIKANSTTCIPNYPDRNLPMVFVYLEGDIKAQLIGPLVFGGMNLTRDELGWKLSESRAVKTDLEENPKKPIEGVLLSSVQSSVPMRRDSDSKGD

SEQ ID NO: 1441 - DNA, 588 bp, Homo sapiens
tggattagggcccactctggtgacctcatcttgactacatctgaaaagaccctattttcaagtaaggtcacattcacaggactgagggttaggacttcagtataactttctttttctttttttgtgggggacacaatttagaactatgcacatcattagaggccgtcttcgaggctgactcccatacaccattagtctggaagacaatgagaggagacgatgttaaagagcctagtgaatgaggtgactgacggaagctggtccatggtaggctgtctggcaggggctagagccgccatggaaaggcttacttgctgccagaaatgctacatgagcagaaagaaaatgggagaaaaacctggtttcctccccaccttgccctacgccaaagtagacagtccaatttctcttgctggaagtcagttgacaagggagcctgtaagagtcagccctcctacaagactgagcagagtgggagaaaagcaagcaatggatttgagggcaagcagtcccccaggactggtgtatattaatatgtattgcataagatctgcagcgaggggtcccagggtgctgcagtgagctcac

SEQ ID NO: 1442 - protein, 120 aa, Homo sapiens
MLKSLVNEVTDGSWSMVGCLAGARAAMERLTCCQKCYMSRKKMGEKPGFLPTLPYAKVDSPISLAGSQLTREPVRVSPPTRLSRVGEKQAMDLRASSPPGLVYINMYCIRSAARGPRVLQ

SEQ ID NO: 1443 - DNA, 492 bp, Homo sapiens
atgtatgagcactatttctccacagcttcatacgggtatgttgtcaaacttttggattttgataatcttgaaaggtctgtgggtcagacccggcaggtggtgccccatgtgaggaacgctgccacgaattgtgagagaaccctcaaaaacgaaggtgaagaagactgcacagttagtaaatcaaacatccagcattccacaggcatcccgtataacccccaaggacaggtcatagaacaggcccactctacccttaaaaatatgctcagaaaaccaaaagggggagtatggcacgatgcatcaaaccataccatggcgtggctaggacccaacccagtaccagaaataaagaaaatgaccctacaggacccacagccctggacaatgcggcttccttggacaacacaggccccagacaggatgccgaagaaaacaactcagaaggtgaagcgcatcctgctccaaacacaaacaccattcacaaccaaataa

SEQ ID NO: 1444 - protein, 163 aa, Homo sapiens [sequence omitted]

SEQ ID NO: 1445 - DNA, 4763 bp, Homo sapiens
ttttttgtttagtatttttgagaacccagccacctggccatgctgtaccagccttgtgctgagtgctggggataaaggaacaaataaaacccagtccaggcttctgtgtgcccagccctgtgccgggtcccagtgggtaacagcatgtccaatcccctcagtgtcccactagaggcttcctttggggctgctggggacatcttgtttctagttgagaattcagatttatgtccaaagacaagaactccctgaggggcagattacaacatggactgggccattacaatcaacaaggacacaaagctaacacagccatcgttatacaccagacatgtgctaaggacttgatttccccattgtttaatcatcaccaactccattatcacccccatttcacagatgtggaaactgaggctgagaagagtaagggacttgtccaagggcacagagcaagtcagggctacggtgatgtttcaggcccagacctgtttgcctctggagcccagggtttaacacaccccagtgctgctgtgaaagggctctggacagctcaggctggccggccaattcggggataaccgaacagaggtatggaacagaaaggggcgttgaggatgttgctgtgtgtgtgcggtggggggagtgacaaggcttcagcaatggtactcattctctccaaccagctcccagtgctgctgtcctctgatccaccctccgctctgcctgccatggactaattgttctgaaatcccatggatcaagtcactcctcagctgaggacctgtccatggctccctggtacccagaggatagaaacccagcattcaaaacctctctaaccagctccccacctcaaccctcacactcctgctcactagcccccaggcgcagtgggctcttccagcggccaagcctgtgcctacggtgccttcttgcctggaatgcccaactcccccttctcagccttctttgactctcaagtaaggaaaagcactctttgtctccctgagccccttggcacttatcacagagcactctgggcgttaacttccactgtctccgtcttggattagagtggatctcagagggcccggtggtgtctgcttcacctccctctccactgcagcagcttagcaaggactggccgggtaaactaaaaaatgcaaagagctgagagaatcctgggaaagtgcacatttcccaggactgcccaatgacaagccccgtaccaaggcacagcatcaggataccctgatgtggaagaaccaaaaattgcaccctcatggcttatcaggatggtccttgtgtctgtccctttcaagggttctgataatgaaatctgggcaagtcaccctcctgctttaaaacttccaatggttcccagaggtctagcataaaatccaaactcaagggcccacataacctaggtgctgcctggcccccaggccctcctcttgccacgcccccctccctggccagcctccctcacttctttcagttcctcaaggactccccctcactaaagccttacccaggtcgcctctctgcctagggggctcctccattccctgctcactcagccacctccctctccctcttcaggtctcactttttaggggaggcttccctgatctgtccagataagacctcaccactcccacccaatcccaaacgctcccataacctgatcgtttccttcacagcaagaattaatcttcagtgtaaataatgatctactgaagacctatgaggaatgggaaagtcttgttttttgctgattcttcaacacccagctcagagcctaaatatctctcaaatgaatgaatatatgaatgaatgaatgaatgaatgaatgaatgaatgaacctatatacataaatcaagacaagaaggtgggcagaatcctagggaacactgaggcaggaaaagcagggccctgggccaggcgtcatggctcacacctgtaatcccagcactttgggaggccaaggcaggcagatcacttgaggtcaggactttgagaccagcctggccaacatggtaaaaccctgtctctactaaaaacacaaacattagccgggtatggtggcacatgcctgtagtcccagctactcaagaggctgaggcaggagaatcacttgtacctgggaggaggaggttgcagtgagctgagatcgtgccactgcactccagcctgggcaccacagcaagactccgtctaaaaaaaaaaaaaaagaaaaagaaagaaagaaagaaaaagaaaaccagggccctaactaaaaaagacaggaggaaaaacagggccctaactaaaaagagaggaggggccctaactgaaaaaaccagggccctaactaaaaaagtcaggaggaaaaacagggccctaactaaaaagagaagaggaaataaaccagacagtgcagcctcccagaagcaaaaggagggagtttctggaactgcactagagactggcacatggagtcctgaggaaagagcactggattggacatcgaggaggtcactggggcctccctgattgaaccaaggttccgtggaggtgggcacagggctggtacattgcagggggcagaggagtaaagagggatgaataagcaaagctctcaggcgacggttgctcagctgggtctatgccagcctggccctgcagggtctgcggaagacagggcccctgtgtcatagtcaccaaaagcatcaacagagcataacattctttttgttgacagattacattgaggcaacttggcttttggagttatcagggctcagtctcaaaggcagatgcatcagagccaagacccggccctcaagtcctcctattagggcagcactagggctacctctttgtcagcagaacctttggatagccgctgatggggtgagtcagctttctgggcccggcagaccttttgggaatccctggcttttggggcacaacatcctggggaccaccaaaaagccctttcacctgagctttgggaaagaggaacagctccggctgtgggtggctcatgtcaccatctggaagccagctgggccacagcagacgcgtaagtcctgtattcattcatccccttctccttttggcagaaaagggatggcgtgggttggaggggtgttttcctgggttcttgcacaattgctcattagaaattcacttctgtttgggtgttggaagctgggcgattccccctagtagtgatccttcctgtctcactggtcacaaagccctttggcatctacaagctcgttgggtccacacagcagctttgttaggtgggtagggggagaccaaggcacccatcctacaggtggagaaaccgaggctgaagctgggaggtgagccagtctcctggcttccagcccaggactctgcactcctccccccacctccccacctacttcagcaggtcacctgtgaatctgatagtcaggtgggccccaccctgccagctggccccagcgggcatgactcatccgcttccccatgactcacacacctcaggtgctcctcctctggtcaacaagtccagagacttggcaaatggacccccatttttctcacctctccaaagcctctgggaagaattcctgcacctcctctttatggggactctgctcttctacagaatagcaaccaaggccttgagagggaaagcaactctcctaaagtcacatagcaagcaaccagcacagccagggtgggagccaggcatccgggcaccgagcccagtcccggcctcctccctacaagatcactctcgcctgacctccctctcaaggacaggaaaggagcagagacgcactctgagccttattaggaagacctcagggactcccactgaatccactgtggctacagcggctgcttccaccactgaagtcccctccaggcttccctgggcagccagggcggggtttaagaggacgacaggtgtctgtattgctctacctacctaacaaggctgtgcagggtgaagagtgctgctccgtgggaaggcgctgggaccaaggccgaagcactggacaaagagagctatgagcactacctgtaaacaaagggcacagaatgtcagcctcagggggagttcaaggtcatctggtcaaatccccatttgatgtttcaacccctttcctcccctccaccaggggtcacacaatcagtacttgcacacatccagcaacaccgcactcactacctgccaaggctgcaagacctgctgctggagggtttggctgcgtaaaagaattgtcctaaggatgcactaaaatctctctcttcttatgccttgtacctgctggtattagctctgcctccttttgggtcagccagaacaggtctgtccccctctttcctgatggctctttggagatttgaagacagtgatcctgggcccctcaagtcttctacaaattgtgcaccccctttcctccagctcttcctgagaccagggtttccggttcgctcaccctgttccctgatctgctccagatgaaacctgtccctactgacagcacaagacccagaattagacaatcagtcaagctctatccaggacagggcaagcaggactctcacctccttcattagagatatcatgcttctattaattgagcctaaaatcccatttgcatttaaggcagccctattgcatggctgaattcagtttacagtcaacttcagagctgtacgttagtactctgaagttatataaactgggccctcacttaactgtgtaacttga

SEQ ID NO: 1446 - protein, 163 aa, Homo sapiens
MTHPLPHDSHTSGAPPLVNKSRDLANGPPFFSPLQSLWEEFLHLLFMGTLLFYRIATKALRGKATLLKSHSKQPAQPGWEPGIRAPSPVPASSLQDHSRLTSLSRTGKEQRRTLSLIRKTSGTPTESTVATAAASTTEVPSRLPWAARAGFKRTTGVCIALPT

SEQ ID NO: 1447 - DNA, 1167 bp, Homo sapiens
gaccactgaacattcagagggctggaggcagagaaaaacttcccctactcaagaaaaagaagctatttttgtcaagttaaatgagcctgaacctgcagagctgaattggcagatgaatattgctaattggtgcagtttcttcggtgcaggaaagagtttccaatcagaccggcaattcattggccacatgaagaacagccagttgtaaggggtaaaataaattggagaagagaacatccacatggattaagtcccaagctcaccctttgttagtgagaatgtagtcacgtggccatacctactacaaggtctatttctggcatctctttccacagcacaggcagccttgcagaatgaaaagtatttctcccacctgccctggcctctgccctggctctgaaagaggcaggctgtgaatgatggttgtcagtgtctggagttttcactgaaaaacagtcccctgaaatggaaagacacacagaggggagtgatctcatcgccactgatttttcccaactttcagttttgtatctccatggtggaactcgatacagcagcatccctcagtggttccagcccagaagtgcaaggggaagccggctgcctgttcatgaattctgtagctcaaaaagcagaggccgagaaagcaaaatttcaaacctttgtcagaaagggtgagaccttgctcagcacgatagctgagaacagcttcctccttcaatgctggtctctctatactgacagttgacagctgatgatcccacattctcagtcatgcgaatgacctcacctgagcaccagtttgtaacggatgtttaagaggaaagcaagggaattaaatgctgcacaggaatttggcacttctgtatagaaatagaaaaactaaatgaaacttatagtaccttccactcaactaagattcttgtgaagcaaagtatatctgggaaaatatagtaatatggttattttgtgttcatagtgtgtgactctacttataagcactttttaatcattataatcaatcactttaaagatcttagagggaacttattaatcaaaatttaagccttctttaaaaaaaaaaaacttcccatatactaattttgcacagaagcaaaagattagattgggattctgcctgttgtggagagacaaagacaagagtgc

SEQ ID NO: 1448 - protein, 31 aa, Homo sapiens
MNIANWCSFFGAGKSFQSDRQFIGHMKNSQL

SEQ ID NO: 1449 - DNA, 618 bp, Homo sapiens
atgcctagtgcggggccgctgagcgggcgcccacccaaaacctgtgccagcctaagagcgcccagtgcagccccggctcccacctgcgcctctccctccacacctcccagcgagcagagggagccggttctggcctccacaggccaagagaaaggcccccacagcacagcggatcctccgtccactcctcacagcctgtttactactctaatgagcagagcttcatgtgcttttagtaacggcagtgatgaagatgacctccctccagacctggccgaggcagtgggagtgaccacatctacaaccacaaacaccacaacggccgccactcaagtctccatgccactgccgtcccccaaggtccagaatgtcagctcgcctcacaagtcagaaggccaaggcctgctgtcccctggggccaagggtggagcgggaggagaagacagtgggagcatccccccaactattttctctcctcagttcctaagtcccagcactgtgttaaatattccacccaaggttgcaggcgtagccttccaagccatggaaccagatgaactaagtgattggattaactatgctttacccacagaacctcagcttatctgcctgttgtga

SEQ ID NO: 1450 - protein, 205 aa, Homo sapiens
MPSAGPLSGRPPKTCASLRAPSAAPAPTCASPSTPPSEQREPVLASTGQEKGPHSTADPPSTPHSLFTTLMSRASCAFSNGSDEDDLPPDLAEAVGVTTSTTTNTTTAATQVSMPLPSPKVQNVSSPHKSEGQGLLSPGAKGGAGGEDSGSIPPTIFSPQFLSPSTVLNIPPKVAGVAFQAMEPDELSDWINYALPTEPQLICLL

SEQ ID NO: 1451 - DNA, 195 bp, Homo sapiens
atgaaacctcactcctaccggccgctcatgctgaggagagcggaccgggacacagcagcggacccgaaagagcgcagactcgggacgaaccggccgctctgccccggacacagcgacctcgggccctccccgcaaacactcctttggactcccagattcgcagccttgtgctgcagcgccacacaagaaaactga

SEQ ID NO: 1452 - protein, 64 aa, Homo sapiens
MKPHSYRPLMLRRADRDTAADPKERRLGTNRPLCPGHSDLGPSPQTLLWTPRFAALCCSATQEN

SEQ ID NO: 1453 - DNA, 663 bp, Homo sapiens
atgacatctggagaagtgaagacaagcctcaagaatgcctactcatctgccaagaggctgtcgccgaagatggaggaggaaggggaggaggaggactactgcacccctggagcctttgagctggagcggctcttctggaagggcagtccccagtacacccacgtcaacgaggtctggcccaagctctacattggcgatgaggcgacggcgctggaccgctataggctgcagaaggcggggttcacgcacgtgctgaacgcggcccacggccgctggaacgtggacactgggcccgactactaccgcgacatggacatccagtaccacggcgtggaggccgacgacctgcccaccttcgacctcagtgtcttcttctacccggcggcagccttcatcgacagagcgctaagcgacgaccacagtaagatcctggttcactgcgtcatgggccgcagccggtcagccaccctggtcctggcctacctgatgatccacaaggacatgaccctggtggacgccatccagcaagtggccaagaaccgctgcgtcctcccgaaccggggctttttgaagcagctccgggagctggacaagcagctggtgcagcagaggcgacggtcccagcgccaggacggtgaggaggaggatggcagggagctgtag

SEQ ID NO: 1454 - protein, 220 aa, Homo sapiens
MTSGEVKTSLKNAYSSAKRLSPKMEEEGEEEDYCTPGAFELERLFWKGSPQYTHVNEVWPKLYIGDEATALDRYRLQKAGFTHVLNAAHGRWNVDTGPDYYRDMDIQYHGVEADDLPTFDLSVFFYPAAAFIDRALSDDHSKILVHCVMGRSRSATLVLAYLMIHKDMTLVDAIQQVAKNRCVLPNRGFLKQLRELDKQLVQQRRRSQRQDGEEEDGREL

SEQ ID NO: 1455 - DNA, 2091 bp, Homo sapiens
atgagtgaaggggcagccgctgcctcgccacctggtgccgcttcggcagccgccgcctcggccgaggagggcaccgcggcggctgcggcggcggcagcggcgggcgggggcccggacggcggcggcgaaggggcggccgagcccccccgggagttacgctgtagcgactgcatcgtgtggaaccggcagcagacgtggctgtgcgtggtacctctgttcatcggcttcatcggcctggggctcagcctcatgcttctcaaatggatcgtggtgggctccgtcaaggagtacgtgcccaccgacctagtggactccaaggggatgggccaggaccccttcttcctctccaagcccagctctttccccaaggccatggagaccaccaccactaccacttccaccacgtcccccgccaccccctccgccgggggtgccgcctcctccaggacgcccaaccggattagcactcgcctgaccaccatcacgcgggcgcccactcgcttccccgggcaccgggtgcccatccgggccagcccgcgctccaccacagcacggaacactgcggcccctgcgacggtcccgtccaccacggccccgttcttcagtagcagcacgctgggctcccgacccccggtgccaggaactccaagtacccaggcaatgccctcctggcctactgcggcatacgctacctcctcctaccttcacgattctactccctcctggaccctgtctccctttcaggatgctgcctcctcttcttcctcttcttcctcctccgctaccaccaccacaccagaaactagcaccagccccaaatttcatacgacgacatattccacagagcgatccgagcacttcaaaccctgccgagacaaggaccttgcatactgtctcaatgatggcgagtgctttgtgatcgaaaccctgaccggatcccataaacactgtcggtgcaaagaaggctaccaaggagtccgttgtgatcaatttctgccgaaaactgattccatcttatcggatccaacagaccacttggggattgaattcatggagagtgaagaagtttatcaaaggcaggtgctgtcaatttcatgtatcatctttggaattgtcatcgtgggcatgttctgtgcagcattctacttcaaaagcaagaaacaagctaaacaaatccaagagcagctgaaagtgccacaaaatggtaaaagctacagtctcaaagcatccagcacaatggcaaagtcagagaacttggtgaagagccatgtccagctgcaaaattattcaaaggtggaaaggcatcctgtgactgcattggagaaaatgatggagtcaagttttgtcggcccccagtcattccctgaggtcccttctcctgacagaggaagccagtctgtcaaacaccacaggagtctatcctcttgctgcagcccagggcaaagaagtggcatgctccataggaatgccttcagaaggacacccccgtcaccccgaagtaggctaggtggaattgtgggaccagcatatcagcaactcgaagaatcaaggatcccagaccaggatacgataccttgccaagggtattcatccagtggtttaaaaacccaacgaaatacatcaataaatatgcaactgccttcaagagagacaaacccctattttaatagcttggagcaaaaggacctggtgggctattcatccacaagggccagttctgtgcccatcatcccttcagtgggtttagaggaaacctgcctgcaaatgccagggatttctgaagtcaaaagcatcaaatggtgcaaaaactcctattcagctgacgttgtcaatgtgagtattccagtcagcgattgtcttatagcagaacaacaagaagtgaaaatattgctagaaactgtccaggagcagatccgaattctgactgatgccagacggtcagaagactacgaactggccagcgtagaaaccgaggacagtgcaagcgaaaacacagcctttctccccctgagtcccacagccaaatcagaacgagaggcgcaatttgtcttaagaaatgaaatacaaagagactctgcattgaccaagtga

SEQ ID NO: 1456 - protein, 696 aa, Homo sapiens
MSEGAAAASPPGAASAAAASAEEGTAAAAAAAAAGGGPDGGGEGAAEPPRELRCSDCIVWNRQQTWLCVVPLFIGFIGLGLSLMLLKWIVVGSVKEYVPTDLVDSKGMGQDPFFLSKPSSFPKAMETTTTTTSTTSPATPSAGGAASSRTPNRISTRLTTITRAPTRFPGHRVPIRASPRSTTARNTAAPATVPSTTAPFFSSSTLGSRPPVPGTPSTQAMPSWPTAAYATSSYLHDSTPSWTLSPFQDAASSSSSSSSSATTTTPETSTSPKFHTTTYSTERSEHFKPCRDKDLAYCLNDGECFVIETLTGSHKHCRCKEGYQGVRCDQFLPKTDSILSDPTDHLGIEFMESEEVYQRQVLSISCIIFGIVIVGMFCAAFYFKSKKQAKQIQEQLKVPQNGKSYSLKASSTMAKSENLVKSHVQLQNYSKVERHPVTALEKMMESSFVGPQSFPEVPSPDRGSQSVKHHRSLSSCCSPGQRSGMLHRNAFRRTPPSPRSRLGGIVGPAYQQLEESRIPDQDTIPCQGYSSSGLKTQRNTSINMQLPSRETNPYFNSLEQKDLVGYSSTRASSVPIIPSVGLEETCLQMPGISEVKSIKWCKNSYSADVVNVSIPVSDCLIAEQQEVKILLETVQEQIRILTDARRSEDYELASVETEDSASENTAFLPLSPTAKSEREAQFVLRNEIQRDSALTK

SEQ ID NO: 1457 - DNA, 837 bp, Homo sapiens
atggaactgaaactggaggcagaaggtggagagcattatgacatttttcttttgatttaccgcttttgtaagaagtggcgcatatacccagagaagtatgaagataagagccattgcagtacattgagctccatagagacagcaccggggaaagtgagagtttcagtcaacttctcagagttttctaagaagtgctcagagaggtggaagaacatgtctgctaaagagaaaggaaaatttggccgggcgcgaggaaaatttgaagatatggcaaaggcggacaaggcccattataagagagaaatgaaaacctatatccctcccaaaggggagacaaaaaagaagttcaaggatcccaatgcgcccaagaggcctccttcagccttcttcctgtacttctctgagtatggcccaaaaatcaaaggagaacgtcctggcctgtcctttggtgatgttgcgaagaagctgggagagatgtggaataacactgctgcagatgacaagcagccttatgaaaagaggtcggcgaagctgaaagaaaaatacgaaaaggatattgctgcatatcgagctaaaggaaagcatgatgctgcaaacaatggagttgtcaaggctgcaaaaaattttagagtatcctatttgtttgaagagacacctggaagtttaacttcatttttcggaggaaaattcagtagtcaagaaagaatgttgctgaaatataatactcgtgatcaaaaggtggactattaccaaaagagaattggaaagaaactactacagaatttaaatatgccagccttctaccactctttgcctgagctttgcaaggcagggtaa

SEQ ID NO: 1458 - protein, 278 aa, Homo sapiens [sequence omitted]

SEQ ID NO: 1459 - DNA, 204 bp, Homo sapiens
atgatcactatcgctgaggcctgggcctgcccgggccacaagttcaacctgatgtatgccaagagggcgtttgtgcactgggatgtgggcaaaggcatggaggagggagagttctctgaggccctggaggatatgggtgtgctggagaaggattatgagaaagtaagcatcaacttatatgaggacaaggataagggagactag

SEQ ID NO: 1460 - protein, 67 aa, Homo sapiens
MITIAEAWACPGHKFNLMYAKRAFVHWDVGKGMEEGEFSEALEDMGVLEKDYEKVSINLYEDKDKGD

SEQ ID NO: 1461 - DNA, 966 bp, Homo sapiens
atggagcgctttgtccgtgttccctatggcttgtaccagggttatgggagcacagtgcctttgggccagcctggactctcagggcacaaacagcccgactggaggcaaaatatgggtcctcccacttttctggccaggccagggctgctggtgcccgcgaacgcccctgactactgcattgacccttacaagagggcgcagcttaaggccattctctcccagatgaaccccagcctgagcccgcggctgtgcaagcccaacaccaaggaggtgggcgtgcaggtgagcccgcgggtggacaaggctgtgcagtgctctctggggcctcgcaccctcagcagctgctccccctgggacggcagagacccccaggagcccctgccagcctgtggggtcacttcgcccgccaccggccgcaggggcttgatccgcctgcggagagatggggacgaagcggagagcaaggcgctcccgggccctgcggaggccagccagccgcagccaccatcacggaggtcaggagctgacaggcaggaggagcccgggcagctggaggaatcgggggagaaagacgccccgtgccctcaggagacgaagagcaagcaggtgcctggagacgccgcctccgagccgctccggaggcccaacttccagtttttggaaccaaaatatggctatttccactgtaaagattgtaagaccaggtgggagagtgcttacgtgtggtgcatttctggaacgaacaaggtttatttcaaacaactctgttgtaaatgccaaaagagttttaacccttatcgagtagaagcaatccaatgtcagacctgctcaaagtctcattgttcctgtcctcaaaagaagagacacattgatctaaggaggcctcatcgacaggaactgtgtggtcgctgcaaagacaagagattctcctgtggcaatatttacagctttaaatatgtgatgtga

SEQ ID NO: 1462 - protein, 321 aa, Homo sapiens
MERFVRVPYGLYQGYGSTVPLGQPGLSGHKQPDWRQNMGPPTFLARPGLLVPANAPDYCIDPYKRAQLKAILSQMNPSLSPRLCKPNTKEVGVQVSPRVDKAVQCSLGPRTLSSCSPWDGRDPQEPLPACGVTSPATGRRGLIRLRRDGDEAESKALPGPAEASQPQPPSRRSGADRQEEPGQLEESGEKDAPCPQETKSKQVPGDAASEPLRRPNFQFLEPKYGYFHCKDCKTRWESAYVWCISGTNKVYFKQLCCKCQKSFNPYRVEAIQCQTCSKSHCSCPQKKRHIDLRRPHRQELCGRCKDKRFSCGNIYSFKYVM

SEQ ID NO: 1463 - DNA, 1782 bp, Homo sapiens
atgtccctgaggggtcaccttgtccccaagaagccctcaaaggagaagcagggacagcagaaactggacagcaagttttatgagagctgggccacagccttgctcacagctatattcccggtgcttggcatcttggtgcttgttgaatctttgctgatgaatgacccaatgcgtgaatgcatcctcagcacctctggcttctcagggcctcgcgccaggctcctgggggtcctggccctgggcgggttaccctcctggtgtcactttttccttcttcagggctggggaagaattgtctttgtgtgctcttttctcactaggagtggtcctcttcctttgtggattccaaactccaggatgcctaagaatcatttggggagtttgtcccacaccccgttccactgccaggctgagcagctgtgggcagtctggttcctccctcctctgacagccacaggtgcagctccagagccggccctgaaaactggctcccaagaggcctcccgagggttcaagaggttggaaagtgtctgccccacaaatgtggccacccttcagctcactgatgcttctgtgcaaaaagtcgtggtccggatatctgaatcctcctcctgcctccacaatgggctgctatccggtaacggctgtgaggtccattaccgcagggcgaggctcttccaggacgctcagatgcctgctcagagcccagcttatcggggggatctgcgagctcctgtcaacgccctgatcaagtggcggcagcacaggcagctggaaggtacccacagaaagaaatcgagcactatgttcagaaagatccactccatctttaactccagcccacagagaaagacggcggccgagagccccttctacgaaggagccagccccgcagtgaagctgattcgaagcagttccatgtatgtggtcggggaccacggggagaaattcagcgagtccttaaagaagtacaaaagcaccagtagcatggacaccagcctgtactacctgcggcaggaggaggaccgggcgtggatgtattcgcgcacccaggactgcctgcagtacctgcaggagctgctggccttgcgcaaaaaatatctcagcagcttcagtgatctgaagccccaccgcacccaggggatttcctcaacctcctccaaatcctccaagggagggaaaaagactcctgtccggtctactcccaaagaaataaagaaagcaaccccaaagaaatactcgcagttcagtgctgatgtggccgaggccattgccttctttgactccatcattgcagagctggatacagagagacgaccccgggctgctgaggccagcctgccaaatgaagatgtggactttgacgtggccaccagctccagggagcacagcttgcattctaactggatcctgcgggcaccgcgcagacactccgaggatatcgctgcccacactgtgcatactgtagacggccagtttcgaaggagcaccgagcacaggaccgtgggcactcagaggagactcgagaggcaccccatttatttgcccaaggctgtggaaggggccttcaacacctggaaatttaagcccaaagcctgcaaaaaagacctggggagctccagacagatccttttcaacttctcaggagaagatatggagtgggatgcagagctctttgcgttggagccccagttgtctcctggggaggactactatgagacagagaaccccaaaggacagtggctgcttcgagaaagactttgggagcggacggtgccctga

SEQ ID NO: 1464 - protein, 593 aa, Homo sapiens
MSLRGHLVPKKPSKEKQGQQKLDSKFYESWATALLTAIFPVLGILVLVESLLMNDPMRECILSTSGFSGPRARLLGVLALGGLPSWCHFFLLQGWGRIVFVCSFLTRSGPLPLWIPNSRMPKNHLGSLSHTPFHCQAEQLWAVWFLPPLTATGAAPEPALKTGSQEASRGFKRLESVCPTNVATLQLTDASVQKVVVRISESSSCLHNGLLSGNGCEVHYRRARLFQDAQMPAQSPAYRGDLRAPVNALIKWRQHRQLEGTHRKKSSTMFRKIHSIFNSSPQRKTAAESPFYEGASPAVKLIRSSSMYVVGDHGEKFSESLKKYKSTSSMDTSLYYLRQEEDRAWMYSRTQDCLQYLQELLALRKKYLSSFSDLKPHRTQGISSTSSKSSKGGKKTPVRSTPKEIKKATPKKYSQFSADVAEAIAFFDSIIAELDTERRPRAAEASLPNEDVDFDVATSSREHSLHSNWILRAPRRHSEDIAAHTVHTVDGQFRRSTEHRTVGTQRRLERHPIYLPKAVEGAFNTWKFKPKACKKDLGSSRQILFNFSGEDMEWDAELFALEPQLSPGEDYYETENPKGQWLLRERLWERTVP

SEQ ID NO: 1465 - DNA, 399 bp, Homo sapiens
atgctcatcagtgcccaaagtctagagggggccgaggaggcaggggtctggcatgtcagtgccacccagagtatgtacacacccagccaggtcaacatagcaaccgtgcttggcaacaatttttcttcacaccagactggctactgggagtggggagaagccagacactgggagcaggcacttccgagcctaggcggcagaggattaccaggcccccgagagcacagggatgccaggaatcggagccacaactgggcagctgcagctgcacccaggagcatggagcacacaaccctggccatgcccaccccgctgcagctggcatcttcacagcggccactccagatgggtcaccactaccatcatatgtgtgcctcagcttggatcaacaaaaattga

SEQ ID NO: 1466 - protein, 132 aa, Homo sapiens [sequence omitted]

SEQ ID NO: 1467 - DNA, 455 bp, Homo sapiens
aaagtgggagcccaggcagaggaggcgccgagagcgagtgagggctgtgaggactgccagcacgctgtcacctctcaacactgcggtgctgataatgacacttcctgataattaggaatgtggagccaagatggccgaataggaacagctccggtctacagctcccagcgtgagcgacgcagaagatgggtgatttctgcatttccatctgaggtttttcccatggtgttccctttccaatgtctttctggaagtcacacattgaccactaacaacaggagagaggacaaagaaaggcagcaaaagactatttccaatgcgaaatatgatcagttcctgcttcctggttgctgtgaggattcaatctaataatatatattagaatgttcctgaacctctaaaaggcttaaaaaatcttgacaggcttactgttattctaataaatgttccaaata

SEQ ID NO: 1468 - protein, 83 aa, Homo sapiens
MWSQDGRIGTAPVYSSQRERRRRWVISAFPSEVFPMVFPFQCLSGSHTLTTNNRREDKERQQKTISNAKYDQFLLPGCCEDSI

SEQ ID NO: 1469 - DNA, 831 bp, Homo sapiens
atgcgggggacgggggcactttggagacctgcctcgggagctggaccgcggggagcctgcaggcccagcccctgctttgtgggcttctcgcagttctcagaccgcacactccgccacctctgggtgatgcgacctgccacccgcgcgttaggacgcgcgcggcgaataaatctcctgttgagcccgggacctaaaagtcaacaaagaaggccagccgcctcgttacggctcctgcggccccggcggcccgcgttgccgcggctgctcccgctgcgtaatcccttcctcggaaacccggacacacaaacacccgggcgcccgggctggggcgccgcgcccctgggtcaggaagaaaacatctgtggttccgagggagtgcggagaccctgcctgagggcgccgccttcctgcgacccccaccccatccccttttcgtctgggtgtttccacatttcttcacctcgccagctcccgaagaccagggccggaaaggggctgctgaccgtcccgccgcggtgctcctgctcgctgtccagctatacacccgtaacccaacagcggctcaaccctgggcgccaactaccgctgcgtcctccgccgcttttcgcaggtggaggccgattcatgagctcaagccgcaatgagccaaaaggtgacctgatgctaatgctcggtcctgggcacaaactgcgcagccagacgccgcggacgccggagaaactgcccctctggcggagcgggccgcgctcctgcagcgaagtgtccgcccccactaccccaccccgggccgagagctccgccgcgctgcgctatgtgcggagtcacgggtga

SEQ ID NO: 1470 - protein, 276 aa, Homo sapiens
MRGTGALWRPASGAGPRGACRPSPCFVGFSQFSDRTLRHLWVMRPATRALGRARRINLLLSPGPKSQQRRPAASLRLLRPRRPALPRLLPLRNPFLGNPDTQTPGRPGWGAAPLGQEENICGSEGVRRPCLRAPPSCDPHPIPFSSGCFHISSPRQLPKTRAGKGLLTVPPRCSCSLSSYTPVTQQRLNPGRQLPLRPPPLFAGGGRFMSSSRNEPKGDLMLMLGPGHKLRSQTPRTPEKLPLWRSGPRSCSEVSAPTTPPRAESSAALRYVRSHG

SEQ ID NO: 1471 - DNA, 1466 bp, Homo sapiens
gctaagtagttactgctgggccggaaggtggtagtcgtacgctgcgagggcatcaacatctctggcaatttctacagaaacaagttgaagaatctggctttcctcggcaagcggatgaacaccaacccttttcgaagcgcctaccacttccgggcccccagccgcatcttctggccgacagtgcgaggcatacatgctgcgccacaagaccaagcgaggccatgcctccctggactgcctcaaggtgtttgacggcatcccaccgccctacgataagaaaaagcggatggtggttcctgctgccctcaaggtcgtgcgtctgaagcctacaagaaagtttgcccttctggggcgacaggctcaagaggttaggtggaagtaccaggcagtgacagccaccctggaggagaagaggaaggagaaagccaagatccactactggaagaagaaacagctcatgaggctacggaaacaggccgagaagaacgtgaagaaaaactgacaaatacacagaggtcctcaagacccacggactcctggtctgagcccagtaaagactgttaatttctcatgcttggcctggcctgcccttcctccgtcgtcgccctggaatgtgcgggacccaggggcagcagcagtccaggtgccacaggcagcctgggacataggaaagggtcttagttactgccttctgacgttacttgaaagcgctcggagaattgtgcaggtgtaatttatttatgaccaataggaagagaaaccagttactattagcacaagggagccggaagactaattggaggggccctcccttgtgagtggagctcctgtttaactttctacctggtcatatactatactctgcagctgttagaatgtgcaagcgcttggagacagcatgagcttgctgttgtacacagggtatttatagcagcatagactgggaagatgggcaacaaaggggatacaggcattgcctatgctcctcacctgtattttgtaatcaggatcaaattacttttaaagaaaaaaaaaacaaagtgaaggagcaactcatgtaaatgtttgggagaagagctttctaggcttcaagcaaaaagaccagtatgactagagcagaaagagtgaagggcagagcgaagttgggacaaatagctttatgaagctatggtgaagacttcaagttttactttcagtattgtgtagtcattggaagactttgagcagagaaataacaggatctgacctaagttttgaaacaatgaccctgactgctatgtggagaataaagggcactgacgatagactcagagttttatattagtccagagggtattatattagcccaggcaagaactgattgatagaggcctggactaggatgatagtggtgaattaatgataaatagttgtatttggaatatatatgctaaataaagccaataaagtgggaaagtaaattagta

SEQ ID NO: 1472 - protein, 102 aa, Homo sapiens
MLRHKTKRGHASLDCLKVFDGIPPPYDKKKRMVVPAALKVVRLKPTRKFALLGRQAQEVRWKYQAVTATLEEKRKEKAKIHYWKKKQLMRLRKQAEKNVKKN

SEQ ID NO: 1473 - DNA, 219 bp, Homo sapiens
atggtcactgtttgctggtctgctgatagtctgatccatgacagctttctgaatcccggcaaaaccactgcatctgagaagtatgctcagcaaatcgatgagatgcacctgaaactgcaacacctaaagccagcattggtcaacagaaaggacccaattcttctacaggacaatgcccgaccacagattgcacaaccaacacttcagaagttgaactaa

SEQ ID NO: 1474 - protein, 72 aa, Homo sapiens
MVTVCWSADSLIHDSFLNPGKTTASEKYAQQIDEMHLKLQHLKPALVNRKDPILLQDNARPQIAQPTLQKLN

SEQ ID NO: 1475 - DNA, 452 bp, Homo sapiens
ctctccggtccgtgcctccaagatgacaaagaaaagaaggaacaatggtcgtgccaaaaagggccgcggccacatgcagcctattcgctgcactaactgtgcccgatgcgtgcccaaagacaaggccattaagaaattcgtcattcgaaacatagtggagtccgcagcagtcagggacatttctgaagcgagcgtcttcgatgcctatgtgcttcccaagctgtatgtgaagctgcattactgtgtgagttgtgcaattcacagcaaagtagtcaggaatcgatctcgtgaagcccgcaaggaccgaacacccccaccccgatttagacctgcgggtgctgccccacgtcccccaccaaagcccatgtaaggaggtgagttcttaaagactgaagacaggctattctctggagaaaaataaaatggaaattgtacttaaataaataaataaa

SEQ ID NO: 1476 - protein, 115 aa, Homo sapiens
MTKKRRNNGRAKKGRGHMQPIRCTNCARCVPKDKAIKKFVIRNIVESAAVRDISEASVFDAYVLPKLYVKLHYCVSCAIHSKVVRNRSREARKDRTPPPRFRPAGAAPRPPPKPM

SEQ ID NO: 1477 - DNA, 420 bp, Homo sapiens
gattgcgagaacaatggtcgtgccaaaaagggccgcggccacatgcagcctattcgctgcactaactgtgcccgatgcgtgcccaaagacaaggccattaagaaattcgtcattcgaaacatagtggagtccgcagcagtcagggacatttctgaagcgagcgtcttcgatgcctatgtgcttcccaagctgtatgtgaagctgcattactgtgtgagttgtgcaattcacagcaaagtagtcaggaatcgatctcgtgaagcccgcaaggaccgaacacccccaccccgatttagacctgcgggtgctgccccacgtcccccaccaaagcccatgtaaggaggtgagttcttaaagactgaagacaggctattctctggagaaaaataaaatggaaattgtacttaaataaataaataa

SEQ ID NO: 1478 - protein, 98 aa, Homo sapiens
MQPIRCTNCARCVPKDKAIKKFVIRNIVESAAVRDISEASVFDAYVLPKLYVKLHYCVSCAIHSKVVRNRSREARKDRTPPPRFRPAGAAPRPPPKPM

SEQ ID NO: 1479 - DNA, 672 bp, Homo sapiens
atggctgccttactcaccaacagctttccagtgcctggccctcccaccccgcagaagtcggtgcgggggcggtctgtccgggagcagagggcgcctgacgctccggccctgcagtcaaggcaggcagcggtgcagggcagccaagggtcctcggcgagcccgcgggcccacgtggcgcgcgcacgtgagtggggtgaccgtggtcgtaggcccagctggtccctctccgccgcggacccgccccctcacctcagctctccctccgcccagtcacctgagccggtgccgcaggccgggagggtcaggcgccggcgaggcctggcggggaaagaggtgtccacatcccccgctcgttaccttccctacctcggaccctcgcccgcttctcaccagctggcgaggccacagccgcccgctccgtccggtcagttcagcgcctgcgcacagtgccacaactgcggccaccaggtcctcacctcacccaggcggtccctagtcaggacccagctccagaaggaagcgccctcccgccagccctggttggctcaattgcggaggcgggcccttgatggacagaggtattgcccaatggctaaagaggatgagaggcgggcagaaaggcgggacccgggagggggcaacaccgccccttaccccctgcctgggtgctga

SEQ ID NO: 1480 - protein, 223 aa, Homo sapiens
MAALLTNSFPVPGPPTPQKSVRGRSVREQRAPDAPALQSRQAAVQGSQGSSASPRAHVARAREWGDRGRRPSWSLSAADPPPHLSSPSAQSPEPVPQAGRVRRRRGLAGKEVSTSPARYLPYLGPSPASHQLARPQPPAPSGQFSACAQCHNCGHQVLTSPRRSLVRTQLQKEAPSRQPWLAQLRRRALDGQRYCPMAKEDERRAERRDPGGGNTAPYPLPGC

SEQ ID NO: 1481 - DNA, 1686 bp, Homo sapiens
atgccagaaagcgccagccctcggctccgggccctcggatggcgtgacggcttgtggggcctgcggggtgcgctgcccccggacctgcggggggaggcggctgagctggcggcgctcgcgggcccagtgtttcttgcgcagttgatgatctttataatcagcctcgtcagctccatcttctgtggacatctgggcaaggtcgagccggacgctgtcacgctcgccgtcacggtggtgaacgttactgggattgcagttggcactggcttagcctcagcttatgacaccctcatgtctcagtcctttggagtcaagaacctcaagcgcgtggggatcatacttcagagaggggtcctcatccttatgctgtgctgctttccctgctgggccgacttggtcaacaccgagcgcatcctcctgctcttaaaacaagacccgaagatagcccaaatttatgtgctgattttcattcctgcccttcctgcagcattcttgttccagctgcagacaagatatttacaaagtcagggcatcagcatgcctcaagttattaccaggattgcagctaatgtcatcaacgtgggcatgaatgccctcttgctgtatgccctggacttcagagtggtacagagtccctggctctgtatgccagagcggggcatggttctatttgttgtgataaaatatgacctatggaagacactccatgtgcacactttgggaggttggacgagggagtgcttccaggagtggggctcctacatccacctggttattcccagtatgttcatggtgtgcactgagcagtggacctttgagatcggaaacttccttgcaggactgattgatgtgatggagctcggcactcagggcatcatctgtgagctggcgtcagtggcctacatggtacccctgggccttggagttgcagccagcatccgagtgggcaatgctctgggggaagggaatgtagaggaggcttggtgctcctgcaccacagttctcctgtgtgctggtgagtcaagcattctactccctggcatctgtgctgaacttaaggatgtcctatcactaactactttcttttcctctaacagagatattacttcccttgtgagccaagtgatacctatttttgccccttttcatctatttgatgcacttgcaggcgcctgtggtggagtcctgagaggtacaggaaaacaaaacattggcgctatcttgaatgccattgggtactatgtctttggttttcccattggagtatctctgatgtttgccactaaactcaggataataggtctctggtctggattgatagtttgtgtcttctttcaagcccttttctatctggtgtacatcttgaggataaactggagcaaagttgtggagcagtcggggcgcttccggcagggcgcccactcccagccgagcgccctccgcctgctcctccaggattcctcttcgccctttctggggccgccccggggcgctctcagcaggatggccaacaccttccctccatccctacaccccgccgccccctggcccgtggccgcgctcggctcccgcactgctcactccaccccctacatcccagcccgctgccagagccggggagagggcgggggccgcgtgggcgaggccgtgaacagcggctgtcacgtgggccgcccaggccaatag

SEQ ID NO: 1482 - protein, 561 aa, Homo sapiens [sequence omitted]

SEQ ID NO: 1483 - DNA, 434 bp, Homo sapiens
taaaggaaccggccaaaactgcagagggagaggctgaaggctgtcgcgcctgcctggtgtccttaagcaatccaagtcctcagtctcccgggtccgccccttccgccgcgggcggcagcttccggctcgcgcatgcgcagtgttcgcggactcgccgccaacgcccagtacagtcggggacgagtccaagaggccctttgccaattccaactggaacatccaacatcggacactaatccagccaactgccataactacagctttgattagacaagagactgatttcaacaactttctcctgataagaagatcatggactatggaatggactggttctggtttacagaggctgtgtacttgcgtgccttgatgtcctgaaagaccttttgacagatagggcctaatggtaatacatttaaatgtcaagtcaccat

SEQ ID NO: 1484 - protein, 45 aa, Homo sapiens
MRSVRGLAANAQYSRGRVQEALCQFQLEHPTSDTNPANCHNYSFD

SEQ ID NO: 1485 - DNA, 795 bp, Homo sapiens
atgacagccttcatccacaagtggcccacttcgggttggctggagccacagctgggtggggacagggcctgtgctcaggtgaggcgcgaacgccgccccgctcacctgtacgaggcctttcccggagcagcccggctacgaagcgacacccatggcggagaagctaaggaagactcccgctccctcacaccgcggctgaggcgactgaaccgccccagccccgccttccagcctagcccggccagccgaggccccgcccctgtagggacagcccacttccaggccccgcccttgatcccgcctccttcggcgtccagccccgccttccagccccgccccaagcgccgaggcccggcttccaggctccgccccgacccgcgcggtggggaagagccgctgccgctggttctccggctcttcctcggcggttctggctcccggccgcgccgcagccctgcccagtctctctcccccagcccggagggctcctccgcgccgcacgtgagcgcgcccgccaacagggccactgccgcggtaagtcgtgcctgcgccctgtccggcgtccagtcctcagccgctgggcgaagccggaggagccgggcatctcctccccgccggcccgcgggtccttctccgggtccagagggcttgggcggcgccgtggggcggcccggggtgcaggtggcttaccggcgcgcggcccgggcctgcggcgcgctctgctgcagtgcgggggcggagagctcggggccggagaccgggagggcagcggggagactgggtggggtcccctag

SEQ ID NO: 1486 - protein, 264 aa, Homo sapiens
MTAFIHKWPTSGWLEPQLGGDRACAQVRRERRPAHLYEAFPGAARLRSDTHGGEAKEDSRSLTPRLRRLNRPSPAFQPSPASRGPAPVGTAHFQAPPLIPPPSASSPAFQPRPKRRGPASRLRPDPRGGEEPLPLVLRLFLGGSGSRPRRSPAQSLSPSPEGSSAPHVSAPANRATAAVSRACALSGVQSSAAGRSRRSRASPPRRPAGPSPGPEGLGGAVGRPGVQVAYRRAARACGALCCSAGAESSGPETGRAAGRLGGVP

SEQ ID NO: 1487 - DNA, 3110 bp, Homo sapiens
acatggcggcgggaagagagtgagccgccccgcgcccccgccgcgccctcagatggagaaattagcatacaaagaaactgacttgtcagaagtcagagcaaggtattggtggatccagggataaatcccaaacttcttaacccctagaccggtttttagtccattgactatgcagcctaatgtgatagactggagtgatgttagaaaacacaaatatggtcacctatcagagtctgcatcccaatatcaagaagctgctgacatcctggatctaggtcattttacctgggacaaatacctaaaagaaacatgttcagtcccagcgcctgtccattgcttcaagcagtcctacacacctccaagcaacgagttcaagatcagtatgaaattggaagcacaggaccccaggaacaccacatccacctgtattgccacagtagttggactgacaggtgcccgccttcgcctgcgccttgatgggagcgacaacaaaaatgacttctggcggctggttgactcagctgaaatccagcctattgggaactgtgaaaagaatgggggtatgctacagccacctcttggatttcggctgaatgcgtcttcttggcccatgttccttttgaagacgctaaatggagcagagatggctcccatcaggattttccacaaggagccaccatcgccttcccacaacttcttcaaaatgggaatgaagctagaagctgtggacaggaagaaccctcatttcatttgcccagccactattggggaggttcggggctcagaggtgcttgtcacttttgatgggtggcgaggggcctttgactactggtgccgcttcgactcccgagacatcttccctgtgggctggtgttccttgactggagacaacctgcagcctcctggcaccaaagttgtgattccaaagaatccctatcctgcctccgatgtgaatactgagaagcccagcatccacagcagcaccaaaactgtcttggaacatcaaccagggcagagggggcgtaaaccaggaaagaagcggggccggacacccaagaccctaatttcccatcccatctctgccccatccaagacagctgaacctttgaaattcccaaagaagagaggtcccaaacctggcagcaagaggaaacctcggactttgctgaacccaccacctgcctcaccaacaaccagcactcctgaaccggataccagcactgtaccccaggatgctgccaccatccccagctcagccatgcaggccccaacagtttgtatctacttgaacaagaatggcagcacaggcccccacttagataagaagaaggtccagcaactccctgaccattttggaccagcccgtgcctctgtggtgttgcagcaggctgtccaggcctgtatcgactgtgcttatcaccagaaaaccgtcttcagcttcctcaagcaaggccatggtggtgaggttatctcagccgtgtttgaccgggaacagcataccctcaacctcccagcagtcaacagcatcacctacgtcctccgcttcctggagaaactctgccacaaccttcgtagtgacaatctgtttggcaaccagccctttacacagactcacttgtcactcactgccatagagtacagccacagccacgacaggtacctaccaggtgaaacctttgtcctggggaatagtctggcccgctccttggaaccacactcagactcaatggactctgcctcaaatcccaccaaccttgtcagcacctcccaaaggcaccggcccttgctttcatcctgtggcctcccaccaagcactgcctcagctgtgcgcaggctatgctccagggggtcggaccgatacctggagagccgcgatgcctctcgactgagtggccgggacccctcctcatggacagtcgaggatgtgatgcagtttgtccgggaagctgatcctcagcttggaccccacgctgacctgtttcgcaaacacgagatcgatggcaaggccctgctgctgctgcgcagtgacatgatgatgaagtacatgggcctgaagctggggcctgcactcaagctctcctaccacattgaccggctgaagcagggcaagttctgaaccaggagaggcagcctagacaaccaagtggcagcaggtgggggcattcttctaggaatgaggggcatcagcccaccccaggcacctcagtggggttccgggccacctcaggactccaagaggctgtgtggagccaccactcctagccacagctgccatgataagtccttccatgaaggactgaggagggagagtgggggtccagggctggtgctgctcttccctcagctctgccggggctctaaggtccctctatttatttctcaaccctggctggcctctcaccaggagtttaggctgaatgccttccacgtgatggaggaaaaggccaactctgtcctggtcttgctgtggcaccccatcgccccacagctcgtaccttctcaccagattcccctgaatccaaactcgtggtgcaaacctctaccttttttacaaaaagatcttattgttaatttattgtttctggcacttgggcaaaccctgtagttaatactcctcccacactagacactgggtttcaggaggagggagactgccctgctttggtcccagagaggccctctgcagataggcgtggcccctcttcagaggacactaccctagggcactttctctttgaggtggagagacccataaagccttgaccacatcactccatatggggaggagaaggatccctgtcaccttctcctctcttcacggggcccttttgcagccctaggcctcatctgtgggaagggagtccctggcttatactgcccccaccacagctccttgccctggccagaactgctgtcgaagaaaatcaggccggaaggccaagaaggcgctaagggggatgggagggcaggttttccaggctggagtcggttccacccactcgcctgtccacaggcttccttgtaagcaagtcagcagcacagctactcacgctgccatctggacttattttatgtcaatctgtttataaataaaaaccaatatagatacc

SEQ ID NO: 1488 - protein, 648 aa, Homo sapiens
MQPNVIDWSDVRKHKYGHLSESASQYQEAADILDLGHFTWDKYLKETCSVPAPVHCFKQSYTPPSNEFKISMKLEAQDPRNTTSTCIATVVGLTGARLRLRLDGSDNKNDFWRLVDSAEIQPIGNCEKNGGMLQPPLGFRLNASSWPMFLLKTLNGAEMAPIRIFHKEPPSPSHNFFKMGMKLEAVDRKNPHFICPATIGEVRGSEVLVTFDGWRGAFDYWCRFDSRDIFPVGWCSLTGDNLQPPGTKVVIPKNPYPASDVNTEKPSIHSSTKTVLEHQPGQRGRKPGKKRGRTPKTLISHPISAPSKTAEPLKFPKKRGPKPGSKRKPRTLLNPPPASPTTSTPEPDTSTVPQDAATIPSSAMQAPTVCIYLNKNGSTGPHLDKKKVQQLPDHFGPARASVVLQQAVQACIDCAYHQKTVFSFLKQGHGGEVISAVFDREQHTLNLPAVNSITYVLRFLEKLCHNLRSDNLFGNQPFTQTHLSLTAIEYSHSHDRYLPGETFVLGNSLARSLEPHSDSMDSASNPTNLVSTSQRHRPLLSSCGLPPSTASAVRRLCSRGSDRYLESRDASRLSGRDPSSWTVEDVMQFVREADPQLGPHADLFRKHEIDGKALLLLRSDMMMKYMGLKLGPALKLSYHIDRLKQGKF

SEQ ID NO: 1489 - DNA, 3254 bp, Homo sapiens
gcggaaacatggcggcgggaagagagtgagccgccccgcgcccccgccgcgccctcagatggagaaattagcatacaaagaaactgacttgtcagaagtcagagcaaggtattggtggatccagggataaatcccaaacttcttaacccctagaccggtttttagtccattgactatgcagcctaatgtgatagactggagtgatgttagaaaacacaaatatggtcacctatcagagtctgcatcccaatatcaagaagctgctgacatcctggatctagggttgtaaagaagattacatgagctaatggatgtgaaaacatcttaaaaactctcaaatacttttcaactttggaggattattatgattttcattctgttcagcggctatactcagactttactctaaaagtcaaatcttctgacattctttgaagtgaagcattctatgaatgtgagctgaagaaatgaatgaaatgaaataatgcagtcctacacacctccaagcaacgagttcaagatcagtatgaaattggaagcacaggaccccaggaacaccacatccacctgtattgccacagtagttggactgacaggtgcccgccttcgcctgcgccttgatgggagcgacaacaaaaatgacttctggcggctggttgactcagctgaaatccagcctattgggaactgtgaaaagaatgggggtatgctacagccacctcttggatttcggctgaatgcgtcttcttggcccatgttccttttgaagacgctaaatggagcagagatggctcccatcaggattttccacaaggagccaccatcgccttcccacaacttcttcaaaatgggaatgaagctagaagctgtggacaggaagaaccctcatttcatttgcccagccactattggggaggttcggggctcagaggtgcttgtcacttttgatgggtggcgaggggcctttgactactggtgccgcttcgactcccgagacatcttccctgtgggctggtgttccttgactggagacaacctgcagcctcctggcaccaaagttgtgattccaaagaatccctatcctgcctccgatgtgaatactgagaagcccagcatccacagcagcaccaaaactgtcttggaacatcaaccagggcagagggggcgtaaaccaggaaagaagcggggccggacacccaagaccctaatttcccatcccatctctgccccatccaagacagctgaacctttgaaattcccaaagaagagaggtcccaaacctggcagcaagaggaaacctcggactttgctgaacccaccacctgcctcaccaacaaccagcactcctgaaccggataccagcactgtaccccaggatgctgccaccatccccagctcagccatgcaggccccaacagtttgtatctacttgaacaagaatggcagcacaggcccccacttagataagaagaaggtccagcaactccctgaccattttggaccagcccgtgcctctgtggtgttgcagcaggctgtccaggcctgtatcgactgtgcttatcaccagaaaaccgtcttcagcttcctcaagcaaggccatggtggtgaggttatctcagccgtgtttgaccgggaacagcataccctcaacctcccagcagtcaacagcatcacctacgtcctccgcttcctggagaaactctgccacaaccttcgtagtgacaatctgtttggcaaccagccctttacacagactcacttgtcactcactgccatagagtacagccacagccacgacaggtacctaccaggtgaaacctttgtcctggggaatagtctggcccgctccttggaaccacactcagactcaatggactctgcctcaaatcccaccaaccttgtcagcacctcccaaaggcaccggcccttgctttcatcctgtggcctcccaccaagcactgcctcagctgtgcgcaggctatgctccagggggtcggaccgatacctggagagccgcgatgcctctcgactgagtggccgggacccctcctcatggacagtcgaggatgtgatgcagtttgtccgggaagctgatcctcagcttggaccccacgctgacctgtttcgcaaacacgagatcgatggcaaggccctgctgctgctgcgcagtgacatgatgatgaagtacatgggcctgaagctggggcctgcactcaagctctcctaccacattgaccggctgaagcagggcaagttctgaaccaggagaggcagcctagacaaccaagtggcagcaggtgggggcattcttctaggaatgaggggcatcagcccaccccaggcacctcagtggggttccgggccacctcaggactccaagaggctgtgtggagccaccactcctagccacagctgccatgataagtccttccatgaaggactgaggagggagagtgggggtccagggctggtgctgctcttccctcagctctgccggggctctaaggtccctctatttatttctcaaccctggctggcctctcaccaggagtttaggctgaatgccttccacgtgatggaggaaaaggccaactctgtcctggtcttgctgtggcaccccatcgccccacagctcgtaccttctcaccagattcccctgaatccaaactcgtggtgcaaacctctaccttttttacaaaaagatcttattgttaatttattgtttctggcacttgggcaaaccctgtagttaatactcctcccacactagacactgggtttcaggaggagggagactgccctgctttggtcccagagaggccctctgcagataggcgtggcccctcttcagaggacactaccctagggcactttctctttgaggtggagagacccataaagccttgaccacatcactccatatggggaggagaaggatccctgtcaccttctcctctcttcacggggcccttttgcagccctaggcctcatctgtgggaagggagtccctggcttatactgcccccaccacagctccttgccctggccagaactgctgtcgaagaaaatcaggccggaaggccaagaaggcgctaagggggatgggagggcaggttttccaggctggagtcggttccacccactcgcctgtccacaggcttccttgtaagcaagtcagcagcacagctactcacgctgccatctggacttattttatgtcaatctgtttataaataaaaaccaatatagatacc

SEQ ID NO: 1490 - protein, 591 aa, Homo sapiens; identical to SEQ ID NO: 1291

SEQ ID NO: 1491 - DNA, 3328 bp, Homo sapiens
gcagcggaaacatggcggcgggaagagagtgagccgccccgcgcccccgccgcgccctcagatggagaaattagcatacaaagaaactgacttgtcagaagtcagagcaaggtattggtggatccagggataaatcccaaacttcttaacccctagaccggtttttagtccattgactatgcagcctaatgtgatagactggagtgatgttagaaaacacaaatatggtcacctatcagagtctgcatcccaatatcaagaagctgctgacatcctggatctagggttgtaaagaagattacatgagctaatggatgtgaaaacatcttaaaaactctcaaatacttttcaactttggaggattattatgattttcattctgttcagcggctatactcagactttactctaaaagtcaaatcttctgacattctttgaagtgaagcattctatgaatgtgagctgaagaaatgaatgaaatgaaataatgcaggtcattttacctgggacaaatacctaaaagaaacatgttcagtcccagcgcctgtccattgcttcaagcagtcctacacacctccaagcaacgagttcaagatcagtatgaaattggaagcacaggaccccaggaacaccacatccacctgtattgccacagtagttggactgacaggtgcccgccttcgcctgcgccttgatgggagcgacaacaaaaatgacttctggcggctggttgactcagctgaaatccagcctattgggaactgtgaaaagaatgggggtatgctacagccacctcttggatttcggctgaatgcgtcttcttggcccatgttccttttgaagacgctaaatggagcagagatggctcccatcaggattttccacaaggagccaccatcgccttcccacaacttcttcaaaatgggaatgaagctagaagctgtggacaggaagaaccctcatttcatttgcccagccactattggggaggttcggggctcagaggtgcttgtcacttttgatgggtggcgaggggcctttgactactggtgccgcttcgactcccgagacatcttccctgtgggctggtgttccttgactggagacaacctgcagcctcctggcaccaaagttgtgattccaaagaatccctatcctgcctccgatgtgaatactgagaagcccagcatccacagcagcaccaaaactgtcttggaacatcaaccagggcagagggggcgtaaaccaggaaagaagcggggccggacacccaagaccctaatttcccatcccatctctgccccatccaagacagctgaacctttgaaattcccaaagaagagaggtcccaaacctggcagcaagaggaaacctcggactttgctgaacccaccacctgcctcaccaacaaccagcactcctgaaccggataccagcactgtaccccaggatgctgccaccatccccagctcagccatgcaggccccaacagtttgtatctacttgaacaagaatggcagcacaggcccccacttagataagaagaaggtccagcaactccctgaccattttggaccagcccgtgcctctgtggtgttgcagcaggctgtccaggcctgtatcgactgtgcttatcaccagaaaaccgtcttcagcttcctcaagcaaggccatggtggtgaggttatctcagccgtgtttgaccgggaacagcataccctcaacctcccagcagtcaacagcatcacctacgtcctccgcttcctggagaaactctgccacaaccttcgtagtgacaatctgtttggcaaccagccctttacacagactcacttgtcactcactgccatagagtacagccacagccacgacaggtacctaccaggtgaaacctttgtcctggggaatagtctggcccgctccttggaaccacactcagactcaatggactctgcctcaaatcccaccaaccttgtcagcacctcccaaaggcaccggcccttgctttcatcctgtggcctcccaccaagcactgcctcagctgtgcgcaggctatgctccagggggtcggaccgatacctggagagccgcgatgcctctcgactgagtggccgggacccctcctcatggacagtcgaggatgtgatgcagtttgtccgggaagctgatcctcagcttggaccccacgctgacctgtttcgcaaacacgagatcgatggcaaggccctgctgctgctgcgcagtgacatgatgatgaagtacatgggcctgaagctggggcctgcactcaagctctcctaccacattgaccggctgaagcagggcaagttctgaaccaggagaggcagcctagacaaccaagtggcagcaggtgggggcattcttctaggaatgaggggcatcagcccaccccaggcacctcagtggggttccgggccacctcaggactccaagaggctgtgtggagccaccactcctagccacagctgccatgataagtccttccatgaaggactgaggagggagagtgggggtccagggctggtgctgctcttccctcagctctgccggggctctaaggtccctctatttatttctcaaccctggctggcctctcaccaggagtttaggctgaatgccttccacgtgatggaggaaaaggccaactctgtcctggtcttgctgtggcaccccatcgccccacagctcgtaccttctcaccagattcccctgaatccaaactcgtggtgcaaacctctaccttttttacaaaaagatcttattgttaatttattgtttctggcacttgggcaaaccctgtagttaatactcctcccacactagacactgggtttcaggaggagggagactgccctgctttggtcccagagaggccctctgcagataggcgtggcccctcttcagaggacactaccctagggcactttctctttgaggtggagagacccataaagccttgaccacatcactccatatggggaggagaaggatccctgtcaccttctcctctcttcacggggcccttttgcagccctaggcctcatctgtgggaagggagtccctggcttatactgcccccaccacagctccttgccctggccagaactgctgtcgaagaaaatcaggccggaaggccaagaaggcgctaagggggatgggagggcaggttttccaggctggagtcggttccacccactcgcctgtccacaggcttccttgtaagcaagtcagcagcacagctactcacgctgccatctggacttattttatgtcaatctgtttataaataaaaaccaatatagatacc

SEQ ID NO: 1492 - protein, 577 aa, Homo sapiens
MKLEAQDPRNTTSTCIATVVGLTGARLRLRLDGSDNKNDFWRLVDSAEIQPIGNCEKNGGMLQPPLGFRLNASSWPMFLLKTLNGAEMAPIRIFHKEPPSPSHNFFKMGMKLEAVDRKNPHFICPATIGEVRGSEVLVTFDGWRGAFDYWCRFDSRDIFPVGWCSLTGDNLQPPGTKVVIPKNPYPASDVNTEKPSIHSSTKTVLEHQPGQRGRKPGKKRGRTPKTLISHPISAPSKTAEPLKFPKKRGPKPGSKRKPRTLLNPPPASPTTSTPEPDTSTVPQDAATIPSSAMQAPTVCIYLNKNGSTGPHLDKKKVQQLPDHFGPARASVVLQQAVQACIDCAYHQKTVFSFLKQGHGGEVISAVFDREQHTLNLPAVNSITYVLRFLEKLCHNLRSDNLFGNQPFTQTHLSLTAIEYSHSHDRYLPGETFVLGNSLARSLEPHSDSMDSASNPTNLVSTSQRHRPLLSSCGLPPSTASAVRRLCSRGSDRYLESRDASRLSGRDPSSWTVEDVMQFVREADPQLGPHADLFRKHEIDGKALLLLRSDMMMKYMGLKLGPALKLSYHIDRLKQGKF

SEQ ID NO: 1493 - DNA, 3057 bp, Homo sapiens
cctccctgcgcagcggaaacatggcggcgggaagagagtgagccgccccgcgcccccgccgcgccctcagatggagaaattagcatacaaagaaactgacttgtcagaagtcagagcaaggtattggtggatccagggataaatcccaaacttcttaacccctagaccggtttttagtccattgactatgcagcctaatgtgatagactggagtgatgttagaaaacacaaatatggtcacctatcagagtctgcatcccaatatcaagaagctgctgacatcctggatctagtcctacacacctccaagcaacgagttcaagatcagtatgaaattggaagcacaggaccccaggaacaccacatccacctgtattgccacagtagttggactgacaggtgcccgccttcgcctgcgccttgatgggagcgacaacaaaaatgacttctggcggctggttgactcagctgaaatccagcctattgggaactgtgaaaagaatgggggtatgctacagccacctcttggatttcggctgaatgcgtcttcttggcccatgttccttttgaagacgctaaatggagcagagatggctcccatcaggattttccacaaggagccaccatcgccttcccacaacttcttcaaaatgggaatgaagctagaagctgtggacaggaagaaccctcatttcatttgcccagccactattggggaggttcggggctcagaggtgcttgtcacttttgatgggtggcgaggggcctttgactactggtgccgcttcgactcccgagacatcttccctgtgggctggtgttccttgactggagacaacctgcagcctcctggcaccaaagttgtgattccaaagaatccctatcctgcctccgatgtgaatactgagaagcccagcatccacagcagcaccaaaactgtcttggaacatcaaccagggcagagggggcgtaaaccaggaaagaagcggggccggacacccaagaccctaatttcccatcccatctctgccccatccaagacagctgaacctttgaaattcccaaagaagagaggtcccaaacctggcagcaagaggaaacctcggactttgctgaacccaccacctgcctcaccaacaaccagcactcctgaaccggataccagcactgtaccccaggatgctgccaccatccccagctcagccatgcaggccccaacagtttgtatctacttgaacaagaatggcagcacaggcccccacttagataagaagaaggtccagcaactccctgaccattttggaccagcccgtgcctctgtggtgttgcagcaggctgtccaggcctgtatcgactgtgcttatcaccagaaaaccgtcttcagcttcctcaagcaaggccatggtggtgaggttatctcagccgtgtttgaccgggaacagcataccctcaacctcccagcagtcaacagcatcacctacgtcctccgcttcctggagaaactctgccacaaccttcgtagtgacaatctgtttggcaaccagccctttacacagactcacttgtcactcactgccatagagtacagccacagccacgacaggtacctaccaggtgaaacctttgtcctggggaatagtctggcccgctccttggaaccacactcagactcaatggactctgcctcaaatcccaccaaccttgtcagcacctcccaaaggcaccggcccttgctttcatcctgtggcctcccaccaagcactgcctcagctgtgcgcaggctatgctccagggggtcggaccgatacctggagagccgcgatgcctctcgactgagtggccgggacccctcctcatggacagtcgaggatgtgatgcagtttgtccgggaagctgatcctcagcttggaccccacgctgacctgtttcgcaaacacgagatcgatggcaaggccctgctgctgctgcgcagtgacatgatgatgaagtacatgggcctgaagctggggcctgcactcaagctctcctaccacattgaccggctgaagcagggcaagttctgaaccaggagaggcagcctagacaaccaagtggcagcaggtgggggcattcttctaggaatgaggggcatcagcccaccccaggcacctcagtggggttccgggccacctcaggactccaagaggctgtgtggagccaccactcctagccacagctgccatgataagtccttccatgaaggactgaggagggagagtgggggtccagggctggtgctgctcttccctcagctctgccggggctctaaggtccctctatttatttctcaaccctggctggcctctcaccaggagtttaggctgaatgccttccacgtgatggaggaaaaggccaactctgtcctggtcttgctgtggcaccccatcgccccacagctcgtaccttctcaccagattcccctgaatccaaactcgtggtgcaaacctctaccttttttacaaaaagatcttattgttaatttattgtttctggcacttgggcaaaccctgtagttaatactcctcccacactagacactgggtttcaggaggagggagactgccctgctttggtcccagagaggccctctgcagataggcgtggcccctcttcagaggacactaccctagggcactttctctttgaggtggagagacccataaagccttgaccacatcactccatatggggaggagaaggatccctgtcaccttctcctctcttcacggggcccttttgcagccctaggcctcatctgtgggaagggagtccctggcttatactgcccccaccacagctccttgccctggccagaactgctgtcgaagaaaatcaggccggaaggccaagaaggcgctaagggggatgggagggcaggttttccaggctggagtcggttccacccactcgcctgtccacaggcttccttgtaagcaagtcagcagcacagctactcacgctgccatctggacttattttatgtcaatctgtttataaataaaaaccaatatagatacc

SEQ ID NO: 1494 - protein, 577 aa, Homo sapiens; identical to SEQ ID NO: 1492

SEQ ID NO: 1495 - DNA, 826 bp, Homo sapiens
aaacatggcggcgggaagagagtgagccgccccgcgcccccgccgcgccctcagatggagaaattagcatacaaagaaactgacttgtcagaagtcagagcaaggtattggtggatccagggataaatcccaaacttcttaacccctagaccggtttttagtccattgactatgcagcctaatgtgatagactggagtgatgttagaaaacacaaatatggtcacctatcagagtctgcatcccaatatcaagaagctgctgacatcctggatctagggttgtaaagaagattacatgagctaatggatgtgaaaacatcttaaaaactctcaaatacttttcaactttggaggattattatgattttcattctgttcagcggctatactcagactttactctaaaagtcaaatcttctgacattctttgaagtgaagcattctatgaatgtgagctgaagaaatgaatgaaatgaaataatgcagcatctagtgctttttgcatggcccaaaggggctctgtgctgctccactacagaggaaacttcaagaaatgctggtttgctacagtgttttagcttgtgagattctctgggaccttccctgctccatcatggggtcacctctaggtcattttacctgggacaaatacctaaaagaaacatgttcagtcccagcgcctgtccattgcttcaagcagacattaccctaggcctacacagactcgggatcatcagtatcactgtcttccatttctacttctgagcctactggaaggtcttcagggacagttacatgcatggatggagctgtaatctcctatggt

SEQ ID NO: 1496 - protein, 52 aa, Homo sapiens
MLVCYSVLACEILWDLPCSIMGSPLGHFTWDKYLKETCSVPAPVHCFKQTLP

SEQ ID NO: 1497 - DNA, 657 bp, Homo sapiens
atggataagccttcttcagtgcaaaacaatttttatggagcatcttctaagagatctgcaaacactgtgatcggcactaaagaaaatccaaataagtataactcctcattaaggcgccccagctctcggtgggggccacgccgccccgtcgacctctgtctctgccttccccgaaccgggacccggccagccagaatcacaggcattcccacctctggcgccggaggggaccgactgacccgcgcagacggggtcgcgccgccgcccggccctcggcccccagccagcctgccccggcccacccggccccgccggccagacacggcgacctatacggaccgcccccacgccgaccctccaaagggcccccggccttgggtttcccgtgccggggcccccgggcagtcctggcggcgtcagggccgcgaccggaccgtgggccccgcccgcccgaccgcagatgcagagccggcctccgggctcggggccgggctgacacggccgagaaagggcccagccccgcgcggaccacagactggcaggccggccagacagacggacaggctgaccccggcccgggggagcaggcgcagcggctgcgcaggtcccgccaccgccttctggccccaggcggcccctcagggcacgagctcttag

SEQ ID NO: 1498 - protein, 218 aa, Homo sapiens
MDKPSSVQNNFYGASSKRSANTVIGTKENPNKYNSSLRRPSSRWGPRRPVDLCLCLPRTGTRPARITGIPTSGAGGDRLTRADGVAPPPGPRPPASLPRPTRPRRPDTATYTDRPHADPPKGPRPWVSRAGAPGQSWRRQGRDRTVGPARPTADAEPASGLGAGLTRPRKGPAPRGPQTGRPARQTDRLTPARGSRRSGCAGPATAFWPQAAPQGTSS

SEQ ID NO: 1499 - DNA, 623 bp, Homo sapiens
gcctgccgacccgggtccgggggcccagttggcgcccggaccagctctccggtctgcgtcctgtagatgggaaaactgaggcctgagagggcgcgagggcggggacgaggccgaggactcgggttcgaatctcgaggacgccagtagcccgctctgaggccgcgtggggctggtggaggagccaccggtcgggcccccaagaccggctgacgtgggcctcgcctcgggcgactcccgccgggctagtggctggccgtgtggtgaccttgggcgagttacttcgcacagccacccaggggcctcttctccaacacgatagcactgcacccggagggccttcagacctgagctgaaatctacaccaccggctctctgactatcaggctttggactatactttgggctttcctgggtctcttacctggcagacagcagattttggaacttttcagcctccataatcatttcccagaagaaccacaaagcataaatttccccaaaaggggaattttgttgatggctttagtctattccctcctaaaagaccagctacaaccaaatgaagtgaacataacctcaagggtgtattgtcttcataataaaagatgaagcttagaactgga

SEQ ID NO: 1500 - protein, 30 aa, Homo sapiens
MALVYSLLKDQLQPNEVNITSRVYCLHNKR

SEQ ID NO: 1501 - DNA, 422 bp, Homo sapiens
ggtccgggggcccagttggcgcccggaccagctctccggtctgcgtcctgtagatgggaaaactgaggcctgagagggcgcgagggcggggacgaggccgaggactcgggttcgaatctcgaggacgccagtagcccgctctgaggccgcgtggggctggtggaggagccaccggtcgggcccccaagaccggctgacgtgggcctcgcctcgggcgactcccgccgggctagtggctggccgtgtggtgaccttgggcgagttacttcgcacagccacccaggggcctcttctccaacacgatagcactgcacccggaggctgcataatatttcattgtatggataaactacacagttcccagtgatgaagaccaagattgttcccaatctgtttgctattataaacagtgttgcaacaaa

SEQ ID NO: 1502 - protein, 53 aa, Homo sapiens
GRVGLVEEPPVGPPRPADVGLASGDSRRASGWPCGDLGRVTSHSHPGASSPTR

SEQ ID NO: 1503 - DNA, 326 bp, Homo sapiens
cgcgtggggctggtggaggagccaccggtcgggcccccaagaccggctgacgtgggcctcgcctcgggcgactcccgccgggctagtggctggccgtgtggtgaccttgggcgagttacttcgcacagccacccaggggcctcttctccaacacgatagcactgcacccggaggttcccagaagaaccacaaagcataaatttccccaaaaggggaattttgttgatggctttagtctattccctcctaaaagaccagctacaaccaaatgaagtgaacataacctcaagggtgtattgtcttcataataaaagatgaagcttaga

SEQ ID NO: 1504 - protein, 30 aa, Homo sapiens; identical to SEQ ID NO: 1500

SEQ ID NO: 1505 - DNA, 755 bp, Homo sapiens
ccggctgacgtgggcctcgcctcgggcgactcccgccgggctagtggctggccgtgtggtgaccttgggcgagttacttcgcacagccacccaggggcctcttctccaacacgatagcactgcacccggaggataaagaaccactgaggatatgagttattcttcctacagttgtacagcttgtgaacagtagagctggggtccgagccaggtctctgactctgcagcctacccttgtcctgcttgaacacactgaggaagacaggaataacaggacatgggtcagaaggcttggcttctgctccagctttgaagttgaaggattaggtgacagctaacacttgatagtattttatggtttcaaagtgataaccatgtaatattttaattgattctcagcccattttgtagatgaggaaactgaggctcacagatctgatgacttcctaattgtggcaaactaccagctacacagtagctgggctggcttcgaaccaggtcttttgaccccagagtctgtgcagctcacaaataaagctgattctttgacaagttaagcctcttctcttggattcatttttccagtctgtgaaaatgagggattggattagattagtaggcaatcactagttcccaggcccttttatttaaagaaaaaaaggagaacccatagagtctggcaacttaaacttttgctaagtatgaacacttaaaaaaaaaaagaacattttgtcttcaaaaagctagggggatat

SEQ ID NO: 1506 - protein, 44 aa, Homo sapiens
RLTWASPRATPAGLVAGRVVTLGELLRTATQGPLLQHDSTAPGG

SEQ ID NO: 1507 - DNA, 518 bp, Homo sapiens
ctgactatcaggctttggactatactttgggctttcctgggtctcttacctggcagacagcagattttggaacttttcagcctccataatcatcaactctgtgagggattgttatctccattttatggatgaggaagctgactctgagagatgactttccaaattcatccaactggaagaaaaaggaagtctctggggacttgaatccagaactgtccagctccaagtccagggctcactctattaagccactccatgaggaatgagtccctaaggaggccacagaaggccctaagccctcttttgttctctggaagagagtgccatttcttggcccttcccaaggccttgacaactgaagttcccagaagaaccacaaagcataaatttccccaaaaggggaattttgttgatggctttagtctattccctcctaaaagaccagctacaaccaaatgaagtgaacataacctcaagggtgtattgtcttcataataaaagatgaagcttagaactgg

SEQ ID NO: 1508 - protein, 67 aa, Homo sapiens
MRNESLRRPQKALSPLLFSGRECHFLALPKALTTEVPRRTTKHKFPQKGNFVDGFSLFPPKRPATTK

SEQ ID NO: 1509 - DNA, 8192 bp, Homo sapiens
gccggaataattcatgaagaaggggctggatccgtgggtcagagaacacaggaccagtttgccatcccaaggccgaaggcctccctccaacacagttctccaagctctagaaatctctgacacatcttgaccatgagaccacggctggtttttggcaggattcgaggcacaaacccagcagcctcaacctagttcatggaggagcctcgcggggtcctggccaagcaagcccgcccctctggtgggaagagcggcgcctaggtggagggtggctgccgtaggagtggacatgaatgctggctttcagagagaacagcgtttcagttttggtcatcggaagtggtgccttcagcacagaagaagagcgtgatttctcctccaaggccgttgatctccaacccagaactaaaggggagaagagccacccccagcatccagcgtggcatctcttgtgccaggaccagggatgactgggccatggacacagatgtctccaaccttcaaccgtttgcatagcacacgggggactcgtgggggccacctgccactgccagctgaaacaatacaatggcaatactgacatccttcatgacgttttcccgacagacattcaggcagaaagtgctggtgcgttttctgtctgcaaagtagagggccatgcctcaccaatagaatagcgtgggccctgatgacctgctccgagtccactcacagccagtgacacttgcaaaaaactcccaaagccgtcttgggtttggctcccacagctcttgaccaatgtggccaaagctggacacctccttgggacactgggattattcataaatgcagcccgccctgactctccctgaatagcatctgaagtctttgtgaaggtcatggatcctgaacaaagtgtcaagggcaccaagaaggctgagggaagtccccggaagcggctgaccaaaggagaggccattcagaccagtgtttcttccagcgtcccatacccaggcagcggcacagctgccacccaagagagccccgcccaagagctcttagccccgcagcccttcccgggcccctcatcagttcttagggaaggctctcaggagaaaacgggccagcagcagaagccccccaaaaggccccccatcgaagcatccgtccacatctcacagcttccgcagcaccctctgacaccagcattcatgtcgcctggcaaacctgagcatctcctggaggggtccacatggcaactggttgaccccatgagacctggaccctctggctccttcgtggcccctgggctccatcctcagagccagctccttccttcccacgcttccatcattccccccgaggaccttcctggagtccccaaagtcttcgtgcctcgtccttcccaggtctccttgaagcccacagaagaggcacacaagaaggagaggaagccccagaagccaggcaagtacatctgccagtactgcagccggccctgtgccaagcccagcgtgctccagaagcacattcgctcacacacaggtgagaggccctacccctgcggcccctgtggcttctccttcaagaccaagagtaatctctacaagcacaggaagtcccatgcccaccgcatcaaagcaggcctggcctcaggcatgggtggcgagatgtacccacatgggctggagatggagcggatccctggggaagagtttgaggagcccactgagggagaaagcacagattctgaagaggagactagtgccacctctggtcaccctgcagagctctccccaagacccaagcagccccttctctccagcgggctatacagctctgggagccacagttccagccacgaacgctgttccctgtcccagtccagcacagcccagtcactcgaagacccccctccatttgtggaaccctcatctgagcaccccctgagccataaacctgaagacacccacacgattaagcagaagctggccctccgcttaagcgagaggaagaaggtgatcgatgagcaggcgtttctgagcccaggcagcaaagggagtactgagtctgggtatttctctcgctccgagagtgcagagcagcaggtcagccccccaaacaccaacgccaagtcctacgctgagatcatctttggcaagtgtgggcgaataggacagcggaccgccatgctgacagccacctccacccagcccctcctgcccctgtccaccgaagacaagcccagcctggtgcctttgtctgtaccccggacgcaggtgatcgagcacatcacgaagctcatcaccatcaacgaggccgtggtggacaccagcgagatcgacagcgtgaagccaaggcggagctcactgtccaggcgcagcagcatggagtccccaaaatccagcctctaccgggagcccctgtcatcccacagtgagaaaaccaagcctgaacaatcactgctgagcctccagcacccgcccagtaccgccccccctgtgcctctcctgagaagccactcaatgccttctgccgcctgcactatcagcaccccccaccaccccttccgaggtagctactccttcgatgaccatatcaccgactccgaagccctgagccacagcagtcacgtgtttacctcccacccccggatgctgaagcgccagccggcaatcgaattacctttgggaggggaatacagttctgaggagcctggcccaagcagcaaagacacagcctccaagccctcggacgaagtggaacccaaggaaagcgagcttaccaaaaagaccaagaagggtttgaaaacaaaaggggtgatctacgaatgtaacatatgtggtgctcggtacaagaaaagggataactacgaagcccacaaaaaatactactgctcagagcttcagatcgcaaagcccatctctgcaggcacccacacatctccagaagctgaaaagagtcagattgagcatgagccgtggtcccaaatgatgcattacaaactgggaaccaccctggaactcactccactgaggaagaggaggaaagagaagagccttggggacgaggaagagccacctgcctttgagtccacaaaaagtcagtttggcagccccgggccatctgatgctgctcggaaccttcccctggagtccaccaagtcaccagcagaaccaagtaaatcagtgccctccttggagggacccacgggcttccagccaaggactcccaagccagggtccggttcagaatcagggaaggagaggagaacaacgtccaaagaaatttctgtcatccagcacaccagctcctttgagaaatctgattctctcgagcagccgagtggcttggaaggggaagacaaacctctggcccagttcccatcacccccacctgccccacacggacgctctgctcactccctgcagcctaagttggtccgccagcccaacattcaggttcctgagatcctagtaactgaggagcctgaccggccggacacagagccagagccgccccctaaggaacctgagaagactgaggagttccaatggccccagcgcagccagacacttgcccagctcccagctgagaagctgccacccaaaaagaagaggttgcgcctggcagagatggcccaatcatcaggggagtccagcttcgagtcctctgtgcctctgtctcgcagcccgagccaggaaagcaatgtctctttgagtgggtccagccgctcagcctcgtttgagagggatgaccatgggaaagccgaggcccccagtccctcatctgacatgcgccccaaacccctgggcacccacatgttgactgtccccagccaccacccacatgcccgagagatgcggaggtcagcctcagagcagagccccaacgtttcccattctgcccacatgaccgagacacgcagcaaatcctttgactatggcagcttgtccttgacaggcccttctgctccagccccagtggctccaccagcgcgggtggccccgccagagagaagaaaatgcttcttggtgagacaggcctctctgagcaggcctccagaatctgagttggaggttgcccccaagggaagacaggagagcgaagaaccacagccctcatccagtaaaccctctgccaaaagctcattgtcccagatttcctctgcggccacctcacatggtggacccccgggaggcaagggcccagggcaggacaggcccccattggggcccactgtgccctacacagaagcactgcaagtgttccaccaccccgttgcccagacacccctgcatgagaagccatacctgcccccaccagtctcccttttctccttccagcatctcgtgcagcatgagccaggacagtctccagaattcttctccacccaggccatgtccagcctcctgtcctcaccatactccatgcccccacttcctccctccttatttcaagccccaccgcttcctctccagcctactgttctgcacccaggccaactccatctcccccagctcatgcctcacccagccaacatccccttcaggcagcccccttccttcctccccatgccatacccgacctcctcagcactgtcttctgggtttttcctgcctctgcaatcccagtttgcacttcagctccctggtgatgtggaaagccatctgccccagatcaaaaccagcctggccccactggcaacaggaagtgctggcctctcccccagcacagagtacagcagtgacatccggctaccccctgtggctcccccagccagctcctcagcacctacatcagctcctccactggccctgcctgcctgtccagacaccatggtgtccctggttgtgcctgtccgtgttcagaccaatatgccgtcctatgggagcgcaatgtacaccaccctttcccagatcttggtcacccagtcccaaggcagctcagcaactgtggcacttcccaagtttgaggaacccccatcaaaggggacgactgtatgtggtgcagatgtgcatgaggttgggcccggcccttctgggttaagtgaagagcaaagcagagctttcccaactccatacctgagagtgcctgtgacattacctgaaagaaaaggcacttccctgtcatcagagagtatcttgagcctggaggggagttcatcaacagcagggggaagcaaacgtgtcctttcaccagctggcagccttgaacttaccatggaaacccagcagcaaaaaagagtgaaggaggaggaggcttccaaggcagatgaaaaacttgagctggtaaaaccatgcagtgtggtccttaccagcaccgaggatgggaagaggccagagaaatcccacttaggcaaccagggccaaggcaggagggagctagaaatgctgtccagcctgtcctcagatccatctgacacaaaggaaattcctcccctccctcaccctgcattgtcccatgggacagccccaggctcagaagctttgaaggaatatccccagccatctggcaaacctcaccgaagagggttgaccccactgagcgtgaagaaagaagattccaaggaacaacctgatctcccctccttggcacctccgagctctctgcctctgtcagaaacgtcctccagaccagccaagtcacaagaaggtacggactcaaagaaggtactgcagttccccagcctccacacaaccactaatgtcagttggtgctatttaaactacattaagccaaatcacatccagcatgcagataggaggtcctctgtttacgctggttggtgcataagtttgtacaaccccaaccttccgggggtttccactaaagctgctttgtccctcctgaggtctaagcagaaagtgagcaaagagacatacaccatggccacagctccgcatcctgaggcaggaaggcttgtgccatccagctcccgcaagccccgcatgacagaggttcacctcccttcactggtttccccggaaggccagaaagatctagctagagtggagaaggaagaagagaggagaggggagccggaggaggatgctcctgcctcccagagaggggagccggcgaggatcaaaatcttcgaaggagggtacaaatcaaacgaagagtatgtatatgtgcgaggccgcggccgagggaaatatgtttgtgaggagtgtggaattcgctgcaagaagcccagcatgctgaagaaacacatccgcacccacactgacgtccggccctatgtgtgcaagcactgtcactttgcttttaaaaccaaagggaatctgactaagcacatgaagtcgaaggcccacagcaaaaagtgccaagagacaggggtgctggaggagctggaagccgaagaaggaaccagtgacgacctgttccaggactcggaaggacgagagggttcagaggctgtggaggagcaccagttttcggacctggaggactcggactcagactcagacctggacgaagacgaggatgaggatgaggaggagagccaggatgagctgtccagaccatcctcagaggcgcccccgcctggcccaccacatgcactgcgggcagactcctcacccatcctgggccctcagcccccagatgcccccgcctctggcacggaggctacacgaggcagctcggtctcggaagctgagcgcctgacagccagcagctgctccatgtccagccagagcatgccgggcctcccctggctgggaccggcccctctgggctctgtggagaaagacacaggctcagccttgagctacaagcctgtgtccccaagaagaccgtggtccccaagcaaagaagcaggcagccgtccaccactagcccgcaaacactcgctaaccaaaaacgactcatctccccagcgatgctccccggcccgagaaccacaggcctcagccccaagcccacctggcctgcacgtggacccaggaaggggcatgggcgctctcccttgtgggtctccaagacttcagctgtctcctctcaccctctgccccctgggaagagaactggcccctcgagcacatgtgctctccaaactcgagggtaccaccgacccaggcctccccagatactcgcccaccaggagatggtctccaggtcaggccgagtcaccaccacggtcagcgccgccagggaagtgggccttggctgggccgggcagcccctcagcgggggagcatggcccaggcttggggctggacccacgggttctcttcccgcccgcgcctctacctcacaagctcctcagcagaagcccagagacctgcgcctccccgtggcagaaggccgagtcccgaagtccctcctgctcacccggccctgctcatcctctctcctcccgacccttctccgccctccatgacttccacggccacatcctggcccggacagaggagaacatcttcagccacctgcctctgcactcccagcacttgacccgtgccccatgtcccttgattcccatcggtgggatccagatggtgcaggcccggccaggagcccaccccaccctgctgccagggcccaccgcagcctgggtcagtggcttctccgggggtggcagcgacctgacaggggcccgggaggcccaggagcgaggccgctggagtcccactgagagctcgtcagcctccgtgtcgcctgtggctaaggtctccaaattcacactctcctcagagctggagggcggggactaccccaaggagagggagaggaccggcggaggcccgggcaggcctcctgactggacaccccatgggaccggggcacctgcagagcccacacccacgcacagcccctgcaccccacccgacaccttgccccggccgccccagggacgccgggcagcgcagtcctggagcccccgcttggagtccccgcgtgcaccgaccaaccccgagccttctgccaccccgccgctggaccgcagcagctctgtgggctgcctggcagaggcctctgcccgcttcccagcccggacgaggaacctctccggggaacccaggaccaggcaggactcccccaagccctcaggaagtggggagcccagggcacatccacatcagcctgaggacagggttccccccaacgcttagcctctctccaactgcttcagcatctggcttccagtgtccagcaacagacgtttccagccactttcctcgaatcatcccacttcctcagcccca

SEQ ID NO: 1510 - protein, 2406 aa, Homo sapiens
MDPEQSVKGTKKAEGSPRKRLTKGEAIQTSVSSSVPYPGSGTAATQESPAQELLAPQPFPGPSSVLREGSQEKTGQQQKPPKRPPIEASVHISQLPQHPLTPAFMSPGKPEHLLEGSTWQLVDPMRPGPSGSFVAPGLHPQSQLLPSHASIIPPEDLPGVPKVFVPRPSQVSLKPTEEAHKKERKPQKPGKYICQYCSRPCAKPSVLQKHIRSHTGERPYPCGPCGFSFKTKSNLYKHRKSHAHRIKAGLASGMGGEMYPHGLEMERIPGEEFEEPTEGESTDSEEETSATSGHPAELSPRPKQPLLSSGLYSSGSHSSSHERCSLSQSSTAQSLEDPPPFVEPSSEHPLSHKPEDTHTIKQKLALRLSERKKVIDEQAFLSPGSKGSTESGYFSRSESAEQQVSPPNTNAKSYAEIIFGKCGRIGQRTAMLTATSTQPLLPLSTEDKPSLVPLSVPRTQVIEHITKLITINEAVVDTSEIDSVKPRRSSLSRRSSMESPKSSLYREPLSSHSEKTKPEQSLLSLQHPPSTAPPVPLLRSHSMPSAACTISTPHHPFRGSYSFDDHITDSEALSHSSHVFTSHPRMLKRQPAIELPLGGEYSSEEPGPSSKDTASKPSDEVEPKESELTKKTKKGLKTKGVIYECNICGARYKKRDNYEAHKKYYCSELQIAKPISAGTHTSPEAEKSQIEHEPWSQMMHYKLGTTLELTPLRKRRKEKSLGDEEEPPAFESTKSQFGSPGPSDAARNLPLESTKSPAEPSKSVPSLEGPTGFQPRTPKPGSGSESGKERRTTSKEISVIQHTSSFEKSDSLEQPSGLEGEDKPLAQFPSPPPAPHGRSAHSLQPKLVRQPNIQVPEILVTEEPDRPDTEPEPPPKEPEKTEEFQWPQRSQTLAQLPAEKLPPKKKRLRLAEMAQSSGESSFESSVPLSRSPSQESNVSLSGSSRSASFERDDHGKAEAPSPSSDMRPKPLGTHMLTVPSHHPHAREMRRSASEQSPNVSHSAHMTETRSKSFDYGSLSLTGPSAPAPVAPPARVAPPERRKCFLVRQASLSRPPESELEVAPKGRQESEEPQPSSSKPSAKSSLSQISSAATSHGGPPGGKGPGQDRPPLGPTVPYTEALQVFHHPVAQTPLHEKPYLPPPVSLFSFQHLVQHEPGQSPEFFSTQAMSSLLSSPYSMPPLPPSLFQAPPLPLQPTVLHPGQLHLPQLMPHPANIPFRQPPSFLPMPYPTSSALSSGFFLPLQSQFALQLPGDVESHLPQIKTSLAPLATGSAGLSPSTEYSSDIRLPPVAPPASSSAPTSAPPLALPACPDTMVSLVVPVRVQTNMPSYGSAMYTTLSQILVTQSQGSSATVALPKFEEPPSKGTTVCGADVHEVGPGPSGLSEEQSRAFPTPYLRVPVTLPERKGTSLSSESILSLEGSSSTAGGSKRVLSPAGSLELTMETQQQKRVKEEEASKADEKLELVKPCSVVLTSTEDGKRPEKSHLGNQGQGRRELEMLSSLSSDPSDTKEIPPLPHPALSHGTAPGSEALKEYPQPSGKPHRRGLTPLSVKKEDSKEQPDLPSLAPPSSLPLSETSSRPAKSQEGTDSKKVLQFPSLHTTTNVSWCYLNYIKPNHIQHADRRSSVYAGWCISLYNPNLPGVSTKAALSLLRSKQKVSKETYTMATAPHPEAGRLVPSSSRKPRMTEVHLPSLVSPEGQKDLARVEKEEERRGEPEEDAPASQRGEPARIKIFEGGYKSNEEYVYVRGRGRGKYVCEECGIRCKKPSMLKKHIRTHTDVRPYVCKHCHFAFKTKGNLTKHMKSKAHSKKCQETGVLEELEAEEGTSDDLFQDSEGREGSEAVEEHQFSDLEDSDSDSDLDEDEDEDEEESQDELSRPSSEAPPPGPPHALRADSSPILGPQPPDAPASGTEATRGSSVSEAERLTASSCSMSSQSMPGLPWLGPAPLGSVEKDTGSALSYKPVSPRRPWSPSKEAGSRPPLARKHSLTKNDSSPQRCSPAREPQASAPSPPGLHVDPGRGMGALPCGSPRLQLSPLTLCPLGRELAPRAHVLSKLEGTTDPGLPRYSPTRRWSPGQAESPPRSAPPGKWALAGPGSPSAGEHGPGLGLDPRVLFPPAPLPHKLLSRSPETCASPWQKAESRSPSCSPGPAHPLSSRPFSALHDFHGHILARTEENIFSHLPLHSQHLTRAPCPLIPIGGIQMVQARPGAHPTLLPGPTAAWVSGFSGGGSDLTGAREAQERGRWSPTESSSASVSPVAKVSKFTLSSELEGGDYPKERERTGGGPGRPPDWTPHGTGAPAEPTPTHSPCTPPDTLPRPPQGRRAAQSWSPRLESPRAPTNPEPSATPPLDRSSSVGCLAEASARFPARTRNLSGEPRTRQDSPKPSGSGEPRAHPHQPEDRVPPNA

SEQ ID NO: 1511 - DNA, 8192 bp, Homo sapiens
ctcacaaccagccgactctcccattatccagctgcctagtttggtgcttcaatgtacatggctattccgtgtgcatatgtgtgtatacaaacacgcatgcatgcctggatggacatacgtatgcacaggttattttttaaggacaattctttcaataaggtctttaccccttacttgaaacaggtgttcatgaaaaaaatgcacaaaatcctgcctggccggaataattcatgaagaaggggctggatccgtgggtcagagaacacaggaccagtttgccatcccaaggccgaaggattcgaggcacaaacccagcagcctcaacctagttcatggaggagcctcgcggggtcctggccaagcaagcccgcccctctggtgggaagagcggcgcctaggtggagggtggctgccgtaggagtggacatgaatgctggctttcagagagaacagcgtttcagttttggtcatcggaagtggtgccttcagcacagaagaagagcgtgatttctcctccaaggccgttgatctccaacccagaactaaaggggagaagagccacccccagcatccagcgtggcatctcttgtgccaggaccagggatgactgggccatggacacagatgtctccaaccttcaaccgtttgcatagcacacgggggactcgtgggggccacctgccactgccagctgaaacaatacaatggcaatactgacatccttcatgacgttttcccgacagacattcaggcagaaagtgctggtgcgttttctgtctgcaaagtagagggccatgcctcaccaatagaatagcgtgggccctgatgacctgctccgagtccactcacagccagtgacacttgcaaaaaactcccaaagccgtcttgggtttggctcccacagctcttgaccaatgtggccaaagctggacacctccttgggacactgggattattcataaatgcagcccgccctgactctccctgaatagcatctgaagtctttgtgaaggtcatggatcctgaacaaagtgtcaagggcaccaagaaggctgagggaagtccccggaagcggctgaccaaaggagaggccattcagaccagtgtttcttccagcgtcccatacccaggcagcggcacagctgccacccaagagagccccgcccaagagctcttagccccgcagcccttcccgggcccctcatcagttcttagggaaggctctcaggagaaaacgggccagcagcagaagccccccaaaaggccccccatcgaagcatccgtccacatctcacagcttccgcagcaccctctgacaccagcattcatgtcgcctggcaaacctgagcatctcctggaggggtccacatggcaactggttgaccccatgagacctggaccctctggctccttcgtggcccctgggctccatcctcagagccagctccttccttcccacgcttccatcattccccccgaggaccttcctggagtccccaaagtcttcgtgcctcgtccttcccaggtctccttgaagcccacagaagaggcacacaagaaggagaggaagccccagaagccaggcaagtacatctgccagtactgcagccggccctgtgccaagcccagcgtgctccagaagcacattcgctcacacacaggtgagaggccctacccctgcggcccctgtggcttctccttcaagaccaagagtaatctctacaagcacaggaagtcccatgcccaccgcatcaaagcaggcctggcctcaggcatgggtggcgagatgtacccacatgggctggagatggagcggatccctggggaagagtttgaggagcccactgagggagaaagcacagattctgaagaggagactagtgccacctctggtcaccctgcagagctctccccaagacccaagcagccccttctctccagcgggctatacagctctgggagccacagttccagccacgaacgctgttccctgtcccagtccagcacagcccagtcactcgaagacccccctccatttgtggaaccctcatctgagcaccccctgagccataaacctgaagacacccacacgattaagcagaagctggccctccgcttaagcgagaggaagaaggtgatcgatgagcaggcgtttctgagcccaggcagcaaagggagtactgagtctgggtatttctctcgctccgagagtgcagagcagcaggtcagccccccaaacaccaacgccaagtcctacgctgagatcatctttggcaagtgtgggcgaataggacagcggaccgccatgctgacagccacctccacccagcccctcctgcccctgtccaccgaagacaagcccagcctggtgcctttgtctgtaccccggacgcaggtgatcgagcacatcacgaagctcatcaccatcaacgaggccgtggtggacaccagcgagatcgacagcgtgaagccaaggcggagctcactgtccaggcgcagcagcatggagtccccaaaatccagcctctaccgggagcccctgtcatcccacagtgagaaaaccaagcctgaacaatcactgctgagcctccagcacccgcccagtaccgccccccctgtgcctctcctgagaagccactcaatgccttctgccgcctgcactatcagcaccccccaccaccccttccgaggtagctactccttcgatgaccatatcaccgactccgaagccctgagccacagcagtcacgtgtttacctcccacccccggatgctgaagcgccagccggcaatcgaattacctttgggaggggaatacagttctgaggagcctggcccaagcagcaaagacacagcctccaagccctcggacgaagtggaacccaaggaaagcgagcttaccaaaaagaccaagaagggtttgaaaacaaaaggggtgatctacgaatgtaacatatgtggtgctcggtacaagaaaagggataactacgaagcccacaaaaaatactactgctcagagcttcagatcgcaaagcccatctctgcaggcacccacacatctccagaagctgaaaagagtcagattgagcatgagccgtggtcccaaatgatgcattacaaactgggaaccaccctggaactcactccactgaggaagaggaggaaagagaagagccttggggacgaggaagagccacctgcctttgagtccacaaaaagtcagtttggcagccccgggccatctgatgctgctcggaaccttcccctggagtccaccaagtcaccagcagaaccaagtaaatcagtgccctccttggagggacccacgggcttccagccaaggactcccaagccagggtccggttcagaatcagggaaggagaggagaacaacgtccaaagaaatttctgtcatccagcacaccagctcctttgagaaatctgattctctcgagcagccgagtggcttggaaggggaagacaaacctctggcccagttcccatcacccccacctgccccacacggacgctctgctcactccctgcagcctaagttggtccgccagcccaacattcaggttcctgagatcctagtaactgaggagcctgaccggccggacacagagccagagccgccccctaaggaacctgagaagactgaggagttccaatggccccagcgcagccagacacttgcccagctcccagctgagaagctgccacccaaaaagaagaggttgcgcctggcagagatggcccaatcatcaggggagtccagcttcgagtcctctgtgcctctgtctcgcagcccgagccaggaaagcaatgtctctttgagtgggtccagccgctcagcctcgtttgagagggatgaccatgggaaagccgaggcccccagtccctcatctgacatgcgccccaaacccctgggcacccacatgttgactgtccccagccaccacccacatgcccgagagatgcggaggtcagcctcagagcagagccccaacgtttcccattctgcccacatgaccgagacacgcagcaaatcctttgactatggcagcttgtccttgacaggcccttctgctccagccccagtggctccaccagcgcgggtggccccgccagagagaagaaaatgcttcttggtgagacaggcctctctgagcaggcctccagaatctgagttggaggttgcccccaagggaagacaggagagcgaagaaccacagccctcatccagtaaaccctctgccaaaagctcattgtcccagatttcctctgcggccacctcacatggtggacccccgggaggcaagggcccagggcaggacaggcccccattggggcccactgtgccctacacagaagcactgcaagtgttccaccaccccgttgcccagacacccctgcatgagaagccatacctgcccccaccagtctcccttttctccttccagcatctcgtgcagcatgagccaggacagtctccagaattcttctccacccaggccatgtccagcctcctgtcctcaccatactccatgcccccacttcctccctccttatttcaagccccaccgcttcctctccagcctactgttctgcacccaggccaactccatctcccccagctcatgcctcacccagccaacatccccttcaggcagcccccttccttcctccccatgccatacccgacctcctcagcactgtcttctgggtttttcctgcctctgcaatcccagtttgcacttcagctccctggtgatgtggaaagccatctgccccagatcaaaaccagcctggccccactggcaacaggaagtgctggcctctcccccagcacagagtacagcagtgacatccggctaccccctgtggctcccccagccagctcctcagcacctacatcagctcctccactggccctgcctgcctgtccagacaccatggtgtccctggttgtgcctgtccgtgttcagaccaatatgccgtcctatgggagcgcaatgtacaccaccctttcccagatcttggtcacccagtcccaaggcagctcagcaactgtggcacttcccaagtttgaggaacccccatcaaaggggacgactgtatgtggtgcagatgtgcatgaggttgggcccggcccttctgggttaagtgaagagcaaagcagagctttcccaactccatacctgagagtgcctgtgacattacctgaaagaaaaggcacttccctgtcatcagagagtatcttgagcctggaggggagttcatcaacagcagggggaagcaaacgtgtcctttcaccagctggcagccttgaacttaccatggaaacccagcagcaaaaaagagtgaaggaggaggaggcttccaaggcagatgaaaaacttgagctggtaaaaccatgcagtgtggtccttaccagcaccgaggatgggaagaggccagagaaatcccacttaggcaaccagggccaaggcaggagggagctagaaatgctgtccagcctgtcctcagatccatctgacacaaaggaaattcctcccctccctcaccctgcattgtcccatgggacagccccaggctcagaagctttgaaggaatatccccagccatctggcaaacctcaccgaagagggttgaccccactgagcgtgaagaaagaagattccaaggaacaacctgatctcccctccttggcacctccgagctctctgcctctgtcagaaacgtcctccagaccagccaagtcacaagaaggtacggactcaaagaaggtactgcagttccccagcctccacacaaccactaatgtcagttggtgctatttaaactacattaagccaaatcacatccagcatgcagataggaggtcctctgtttacgctggttggtgcataagtttgtacaaccccaaccttccgggggtttccactaaagctgctttgtccctcctgaggtctaagcagaaagtgagcaaagagacatacaccatggccacagctccgcatcctgaggcaggaaggcttgtgccatccagctcccgcaagccccgcatgacagaggttcacctcccttcactggtttccccggaaggccagaaagatctagctagagtggagaaggaagaagagaggagaggggagccggaggaggatgctcctgcctcccagagaggggagccggcgaggatcaaaatcttcgaaggagggtacaaatcaaacgaagagtatgtatatgtgcgaggccgcggccgagggaaatatgtttgtgaggagtgtggaattcgctgcaagaagcccagcatgctgaagaaacacatccgcacccacactgacgtccggccctatgtgtgcaagcactgtcactttgcttttaaaaccaaagggaatctgactaagcacatgaagtcgaaggcccacagcaaaaagtgccaagagacaggggtgctggaggagctggaagccgaagaaggaaccagtgacgacctgttccaggactcggaaggacgagagggttcagaggctgtggaggagcaccagttttcggacctggaggactcggactcagactcagacctggacgaagacgaggatgaggatgaggaggagagccaggatgagctgtccagaccatcctcagaggcgcccccgcctggcccaccacatgcactgcgggcagactcctcacccatcctgggccctcagcccccagatgcccccgcctctggcacggaggctacacgaggcagctcggtctcggaagctgagcgcctgacagccagcagctgctccatgtccagccagagcatgccgggcctcccctggctgggaccggcccctctgggctctgtggagaaagacacaggctcagccttgagctacaagcctgtgtccccaagaagaccgtggtccccaagcaaagaagcaggcagccgtccaccactagcccgcaaacactcgctaaccaaaaacgactcatctccccagcgatgctccccggcccgagaaccacaggcctcagccccaagcccacctggcctgcacgtggacccaggaaggggcatgggcgctctcccttgtgggtctccaagacttcagctgtctcctctcaccctctgccccctgggaagagaactggcccctcgagcacatgtgctctccaaactcgagggtaccaccgacccaggcctccccagatactcgcccaccaggagatggtctccaggtcaggccgagtcaccaccacggtcagcgccgccagggaagtgggccttggctgggccgggcagcccctcagcgggggagcatggcccaggcttggggctggacccacgggttctcttcccgcccgcgcctctacctcacaagctcctcagcagaagcccagagacctgcgcctccccgtggcagaaggccgagtcccgaagtccctcctgctcacccggccctgctcatcctctctcctcccgacccttctccgccctccatgacttccacggccacatcctggcccggacagaggagaacatcttcagccacctgcctctgcactcccagcacttgacccgtgccccatgtcccttgattcccatcggtgggatccagatggtgcaggcccggccaggagcccaccccaccctgctgccagggcccaccgcagcctgggtcagtggcttctccgggggtggcagcgacctgacaggggcccgggaggcccaggagcgaggccgctggagtcccactgagagctcgtcagcctccgtgtcgcctgtggctaaggtctccaaattcacactctcctcagagctggagggcggggactaccccaaggagagggagaggaccggcggaggcccgggcaggcctcctgactggacaccccatgggaccggggcacctgcagagcccacacccacgcacagcccctgcaccccacccgacaccttgccccggccgccccagggacgccgggcagcgcagtcctggagcccccgcttggagtccccgcgtgcaccgaccaaccccgagccttctgccaccccgccgctggaccgcagcagctctgtgggctgcctggcagaggcctctgcccgcttcccagcccggacgaggaacctctccggggaacccaggaccaggcaggactcccccaagccctcaggaagtggggagcccaggg

SEQ ID NO: 1512 - protein, 2406 aa, Homo sapiens; identical to SEQ ID NO: 1510

SEQ ID NO: 1513 - DNA, 1753 bp, Homo sapiens
tggctgcattggagtctttgtgaacctgctgtgattctgggggctgcctgatttgattatagaacacatgtgctccttaaagaaaaacactgtgcagggagataacagtcatcaaacatggaaacctttgagttgaatagctcatccagtttccccacattatttccagtggaggacccagcactcagagacgcccttctttaaagaagcagtttatccattctgcatatccagaggttctcctcatgactcagagcccctctgagaagagaaacagtctggtgtctcggatttgttcctgtgttgcccactcctgctggatcttgtccagtcgagggacaaacgtcctgaagaatgggaagaaaggaggttctgaaggcacagattccaataccatgccagaggttgaggacactggtgcttgaagggaaactggcacactctggagccccaagaagagctggagctggaggcatgcggcccacgaagggtagaagtaccagccatgaccaagagcccttcacatcatctggcaatccatccagaacccactgaatggaggacagcacagcgaggtctttctcattttgtaactgcaaaagctggaacaagagccagagaagccaaagaagcagtacaagtccaacagcttttagaataaccctgagaaaatggttgaattttgaccagttttgcaattggatactatgagaagagaccttccctcctgcactggatttcatcatcatacctggaggccattcctcatgggactttggccatctcatatccacctttaagcatgttattcccatttcagctgtggtagctctgggtatccttccctaggagaaaatattaatcttttctccctctgagttctggattaaactgtcttatctgaaactgggtcactttaggctagaagcaccactagacattcctgttctcagaagttgccaagttcatgtcatatctgtttcattgttaacgggatccacttctgcaagaggctgcctggccagatcagtgtgtctcctggtcagctccttgatgcccttctcctctcccctgcccaatcccagctgagacttgcactgtggtgactctgtcccctcctggtgctttgactggatgtgtgagagaaagtatggtctgtggcactgacatctttgtgtgtttggaggtgactggaacacggatccacccctggaggaaggtggccgtgaaggaggccagcctcagctcagcgttctactctcatcgctcttactcccgcctttttagtgcctgccctactccaggataattgtgcttttcttttttcagttaaatgttagcattgctatttttcattattgcaaagcagcacatgcttgttacaaaaactttggaagtgtagacaaataaaaagaagaaaaagctacttccaaatcctacttaccccaaagacaagatgatcatttagtcatatagtatcatacatatataatatgtacacatatattttaatgtaagtgtagtgtcacaatatcatgtatagtctttcataaaacacgttggcacttaatatcttatatgaacaactttctagagcaacaagcttagtttacagcaattgtaatgtaagagtactcatttacatagctacagcatcctttgtttacctcatctcttatggtttgatgtttaggttgtttccaacttttctccacctaaacagcattaataaatgtggttttagtttcctctt

SEQ ID NO: 1514 - protein, 66 aa, Homo sapiens
MGRKEVLKAQIPIPCQRLRTLVLEGKLAHSGAPRRAGAGGMRPTKGRSTSHDQEPFTSSGNPSRTH

SEQ ID NO: 1515 - DNA, 1733 bp, Homo sapiens
gtttggtgcttcaatgtacatggctattccgtgtgcatatgtgtgtatacaaacacgcatgcatgcctggatggacatacgtatgcacaggttattttttaaggacaattctttcaataaggtctttaccccttacttgaaacaggtgttcatgaaaaaaatgcacaaaatcctgcctggccggaataattcatgaagaaggggctggatccgtgggtcagagaacacaggaccagtttgccatcccaaggccgaagtctggtgtctcggatttgttcctgtgttgcccactcctgctggatcttgtccagtcgagggacaaacgtcctgaagaatgggaagaaaggaggttctgaaggcacagattccaataccatgccagaggttgaggacactggtgcttgaagggaaactggcacactctggagccccaagaagagctggagctggaggcatgcggcccacgaagggtagaagtaccagccatgaccaagagcccttcacatcatctggcaatccatccagaacccactgaatggaggacagcacagcgaggtctttctcattttgtaactgcaaaagctggaacaagagccagagaagccaaagaagcagtacaagtccaacagcttttagaataaccctgagaaaatggttgaattttgaccagttttgcaattggatactatgagaagagaccttccctcctgcactggatttcatcatcatacctggaggccattcctcatgggactttggccatctcatatccacctttaagcatgttattcccatttcagctgtggtagctctgggtatccttccctaggagaaaatattaatcttttctccctctgagttctggattaaactgtcttatctgaaactgggtcactttaggctagaagcaccactagacattcctgttctcagaagttgccaagttcatgtcatatctgtttcattgttaacgggatccacttctgcaagaggctgcctggccagatcagtgtgtctcctggtcagctccttgatgcccttctcctctcccctgcccaatcccagctgagacttgcactgtggtgactctgtcccctcctggtgctttgactggatgtgtgagagaaagtatggtctgtggcactgacatctttgtgtgtttggaggtgactggaacacggatccacccctggaggaaggtggccgtgaaggaggccagcctcagctcagcgttctactctcatcgctcttactcccgcctttttagtgcctgccctactccaggataattgtgcttttcttttttcagttaaatgttagcattgctatttttcattattgcaaagcagcacatgcttgttacaaaaactttggaagtgtagacaaataaaaagaagaaaaagctacttccaaatcctacttaccccaaagacaagatgatcatttagtcatatagtatcatacatatataatatgtacacatatattttaatgtaagtgtagtgtcacaatatcatgtatagtctttcataaaacacgttggcacttaatatcttatatgaacaactttctagagcaacaagcttagtttacagcaattgtaatgtaagagtactcatttacatagctacagcatcctttgtttacctcatctcttatggtttgatgtttaggttgtttccaacttttctccacctaaacagcattaataaatgtggttttagtttcctctt

SEQ ID NO: 1516 - protein, 70 aa, Homo sapiens
MKKGLDPWVREHRTSLPSQGRSLVSRICSCVAHSCWILSSRGTNVLKNGKKGGSEGTDSNTMPEVEDTGA

SEQ ID NO: 1517 - DNA, 1707 bp, Homo sapiens
cccgccgccgcgccacggctcctcgcatgccgtggcccgggtggctgccagcgctgccgcccgccgcccgccaccccggcatcccaagccgcctcccgccgccccggcccggcgcgcaggtgttcatgaaaaaaatgcacaaaatcctgcctggccggaataattcatgaagaaggggctggatccgtgggtcagagaacacaggaccagtttgccatcccaaggccgaagtctggtgtctcggatttgttcctgtgttgcccactcctgctggatcttgtccagtcgagggacaaacgtcctgaagaatgggaagaaaggaggttctgaaggcacagattccaataccatgccagaggttgaggacactggtgcttgaagggaaactggcacactctggagccccaagaagagctggagctggaggcatgcggcccacgaagggtagaagtaccagccatgaccaagagcccttcacatcatctggcaatccatccagaacccactgaatggaggacagcacagcgaggtctttctcattttgtaactgcaaaagctggaacaagagccagagaagccaaagaagcagtacaagtccaacagcttttagaataaccctgagaaaatggttgaattttgaccagttttgcaattggatactatgagaagagaccttccctcctgcactggatttcatcatcatacctggaggccattcctcatgggactttggccatctcatatccacctttaagcatgttattcccatttcagctgtggtagctctgggtatccttccctaggagaaaatattaatcttttctccctctgagttctggattaaactgtcttatctgaaactgggtcactttaggctagaagcaccactagacattcctgttctcagaagttgccaagttcatgtcatatctgtttcattgttaacgggatccacttctgcaagaggctgcctggccagatcagtgtgtctcctggtcagctccttgatgcccttctcctctcccctgcccaatcccagctgagacttgcactgtggtgactctgtcccctcctggtgctttgactggatgtgtgagagaaagtatggtctgtggcactgacatctttgtgtgtttggaggtgactggaacacggatccacccctggaggaaggtggccgtgaaggaggccagcctcagctcagcgttctactctcatcgctcttactcccgcctttttagtgcctgccctactccaggataattgtgcttttcttttttcagttaaatgttagcattgctatttttcattattgcaaagcagcacatgcttgttacaaaaactttggaagtgtagacaaataaaaagaagaaaaagctacttccaaatcctacttaccccaaagacaagatgatcatttagtcatatagtatcatacatatataatatgtacacatatattttaatgtaagtgtagtgtcacaatatcatgtatagtctttcataaaacacgttggcacttaatatcttatatgaacaactttctagagcaacaagcttagtttacagcaattgtaatgtaagagtactcatttacatagctacagcatcctttgtttacctcatctcttatggtttgatgtttaggttgtttccaacttttctccacctaaacagcattaataaatgtggttttagtttcctctt

SEQ ID NO: 1518 - protein, 70 aa, Homo sapiens; identical to SEQ ID NO: 1516

SEQ ID NO: 1519 - DNA, 1668 bp, Homo sapiens
gctgtcagtcccgcgcccgccgccgcgccacggctcctcgcatgccgtggcccgggtggctgccagcgctgccgcccgccgcccgccaccccggcatcccaagccgcctcccgccgccccggcccggcgcgcaggtgttcatgaaaaaaatgcacaaaatcctgcctggccggaataattcatgaagaaggggctggatccgtgggtcagagaacacaggaccagtttgccatcccaaggccgaagtcgagggacaaacgtcctgaagaatgggaagaaaggaggttctgaaggcacagattccaataccatgccagaggttgaggacactggtgcttgaagggaaactggcacactctggagccccaagaagagctggagctggaggcatgcggcccacgaagggtagaagtaccagccatgaccaagagcccttcacatcatctggcaatccatccagaacccactgaatggaggacagcacagcgaggtctttctcattttgtaactgcaaaagctggaacaagagccagagaagccaaagaagcagtacaagtccaacagcttttagaataaccctgagaaaatggttgaattttgaccagttttgcaattggatactatgagaagagaccttccctcctgcactggatttcatcatcatacctggaggccattcctcatgggactttggccatctcatatccacctttaagcatgttattcccatttcagctgtggtagctctgggtatccttccctaggagaaaatattaatcttttctccctctgagttctggattaaactgtcttatctgaaactgggtcactttaggctagaagcaccactagacattcctgttctcagaagttgccaagttcatgtcatatctgtttcattgttaacgggatccacttctgcaagaggctgcctggccagatcagtgtgtctcctggtcagctccttgatgcccttctcctctcccctgcccaatcccagctgagacttgcactgtggtgactctgtcccctcctggtgctttgactggatgtgtgagagaaagtatggtctgtggcactgacatctttgtgtgtttggaggtgactggaacacggatccacccctggaggaaggtggccgtgaaggaggccagcctcagctcagcgttctactctcatcgctcttactcccgcctttttagtgcctgccctactccaggataattgtgcttttcttttttcagttaaatgttagcattgctatttttcattattgcaaagcagcacatgcttgttacaaaaactttggaagtgtagacaaataaaaagaagaaaaagctacttccaaatcctacttaccccaaagacaagatgatcatttagtcatatagtatcatacatatataatatgtacacatatattttaatgtaagtgtagtgtcacaatatcatgtatagtctttcataaaacacgttggcacttaatatcttatatgaacaactttctagagcaacaagcttagtttacagcaattgtaatgtaagagtactcatttacatagctacagcatcctttgtttacctcatctcttatggtttgatgtttaggttgtttccaacttttctccacctaaacagcattaataaatgtggttttagtttcctctt

SEQ ID NO: 1520 - protein, 66 aa, Homo sapiens; identical to SEQ ID NO: 1514

SEQ ID NO: 1521 - DNA, 4728 bp, Homo sapiens
ggccgcggaggctcgggacccggctggccgcgcggcgccgcagccgccccctcccccacaccccctcccccccgcggcggcggcgcgagcgggcggcggctgtgcggtgcggtgcagagcggaggcggaggcgggcgcgcgggcagctcgcgggcacccggccgggccggcgcgggagcgggaaagggtgcgctatgcctttaacacccgcgtacagtaggcatgtatagtggagtgtagggaaactctaggcggggttaaagttcagctcatggagcggcaatagcgctggctggctggctgcagttgagccgacttggaaatgtgaacgcaagaagcaggcttgatttttttttctccccccttctctctctctctctctctctctcttcctctctccctctttctcctctctcacccacactcacgcacacctccaaaccgcacacccagacgcacacgcataccccagcgcccggcagttatgtattctccgctctgtctcacccaggatgaatttcatcctttcatcgaagcacttctgccccacgtccgagcctttgcctacacatggttcaacctgcaggcccgaaaacgaaaatacttcaaaaaacatgaaaagcgtatgtcaaaagaagaagagagagccgtgaaggatgaattgctaagtgaaaaaccagaggtcaagcagaagtgggcatctcgacttctggcaaagttgcggaaagatatccgacccgaatatcgagaggattttgttcttacagttacagggaaaaaacctccatgttgtgttctttccaacccagaccagaaaggcaagatgcgaagaattgactgcctccgccaggcagataaagtctggaggttggaccttgttatggtgattttgtttaaaggtattccgctggaaagtactgatggcgagcgccttgtaaagtccccacaatgctctaatccagggctctgtgtccaaccccatcacataggggtttctgttaaggaactcgatttatatttggcatactttgtgcatgcagcagattcaagtcaatctgaaagtcccagccagccaagtgacgctgacattaaggaccagccagaaaatggacatttgggcttccaggacagttttgtcacatcaggtgtttttagtgtcactgagctagtaagagtgtcacagacaccaatagctgcaggaactggcccaaatttttctctctcagatttggaaagttcttcatactacagcatgagtccaggagcaatgaggaggtctttacccagcacatcctctacgagctccacaaagcgcctcaagtctgtggaggatgaaatggacagtcctggtgaggagccattttatacaggccaagggcgctccccaggaagtggcagtcagtcaagtggatggcatgaagtggagccaggaatgccatctccaaccacactgaagaagtcggagaagtctggtttcagcagcccctccccttcacagacctcctccctgggaacggcgttcacacagcatcaccgacctgtcattacaggacccagagcaagtccgcatgcaacaccatcgactcttcatttcccgacatcacccattatccagcagcctgggccttacttctcacacccagccatccgctatcaccctcaggagacgctgaaagaatttgtccaacttgtctgccctgatgctggtcagcaggctggacaggtggggttcctcaatcccaatgggagcagccaaggcaaggtgcacaacccattccttcccaccccaatgttgccaccgccaccgccaccaccgatggccaggcctgtgcctctgccggtgccagacacaaagcctccaaccacgtcaacagaaggaggtgcagcctcccccacgtcaccaacctactcgacacccagcacctcccccgcaaaccgattcgtcagtgttggaccacgggatccaagctttgtaaatatccctcaacagacacagtcctggtacctgggataaaagttgcagcgtcccaccatccaccagacagaccacctgaccccttctcaactctgtaacatggacgcaacctcaacccagcgcagttacaacttcactatcagcggaaggggagaaaaaccgattcaaatcaacttgtacatggaaacagcaagcattatggtcaaacagcaaaggccataaccttttgggatttttttttttttaaaatactttagggactgttgtaatttctcatatggtgctggaaatggttgggctttgtaacatttgaagtgtttccatggtagcgtgagcattaggtgacgtggctagcggaggactacccttgctcactgacttcctgttgtaacacactttccttacggagcctggctgtttcacagtatttcatgaatttacccacacaggtgtgatcctccttgagcattgaggaggcacatggagaactaaatcttttgtagtagctgagatctgcaatatataacgggacagtcaaagggcaatgtttttctgtaacatattggaaaaagaaaatgcagttatattccttttttatttgttcctttagtttgttttggttcagcagtcagcagttaagtatataacatggcccgcaaggacaatgaatccactcacattgcagaacaattccgaaaatggcaaactactactactactgttcagttttttaaaagttttgaaatgctgcacttacatttaaaaaaacaacaacaacattttttcaacaatttcaacaatgacacaaaaattcacatggaaatggggaagatggtctgttttgacagaaactgacaggaatcaatcaaaacaatcgaattttgaattgagtaaagtgcaatttcattggatagctaaatatctttgtaagatagagattgttgaaaattctatttttgtttttctagtcctttcaccccaggactctaaattattggggtaaaaaacagccttgcaagaaaaaggggagctatttttgctttttatgttttttattgttaaacttgtatccctttaaaaactgaaggaaattaaaaaaaaaaaacaaaaaaacaaatctaatggtgcttttaccacaatatgttaactacattaaatgctaattaattattttctgttatcaaagcacatgactaaaatgaaatcatggtatctgttaattttataagctagaagtcactataatggattacgccaattctaaaaaattttacacctatctggcatcataggatttatcagttatcagacacctcattgtaccagagattgtccagaagttttaaagacctttgcatccctgaactgggctatgggaaataataatagtaataataataataataataatgatgaaaccaatactgacacaaatgctggtgcccattcagatcaagggtacttgttagggaaaaaaaaaaaagtttgcacccccaaacgtcctgtatcttatgaaaaaaaaaacaaaaaacaaaaacaaaaaaaaaacacaaaaaaccacagaaacaaaaacaaaaaaaagtgcaagtgatttttctaccagacagcgaagcacccctttgcttcccatgcgacttcaagaaggtttcctatactatacatatatatacgttctggttggcaagccctgctgatcagagaaagtctctgcatgttctagtgttagtaactaatttttatatagttaatgtaggataaagtagagtgcattaagacacaatattgtaatccctactctaggcacttgcctttaaactatgtttttcagcccttcagaagggttctactactgtcctatacaatcaagtaactgaaattcttgggaagacactttgctcctcatctttctccccgaaacaatgttgttttgttttgttttttttccttaatttgcacgaaaacaaaaattccatatcaatgtgccttgccctggatagcgattatttgtggaattgttgcacatgctcctctattgaaaggggtttttccctagtcaagcatttggagacactttttgtaaatgtgacttttatgtcagccatcgtcagtttcaacatctagaactaaatagaaagctagttgttccgcagataggagtagtctttattgtcctgtacggtcggtggcagtgctattctgagatctgtagatgcttagaatatcagtattttggatgttgctgcattttacaatttatttggagtcttcctttattttcccccagatatatgaaaatatgcaatacctgcttatatcatgtagaaaagcttagcaattattaatttttcttttatttttttttatttgaccaaagtcggtgctgcacttgacgcagtgtgttttaggtgtttgtctttgtacttttttgtgatttttgaatgcacgtgcgcaggaagggctcctcttagagaagcagtcaaactgtgaagcactaagctgaccctgcttcaagcaattttgtttttacaactgttcctttcacaagcaagccttaaaaaaaaaaaagacaacttcctttttcttcagctcccacaccccatttttcttagcagactgcagtcaatccacattcaataaaaagtatataatgcccatttttatatgcacgtttttaaacttccaagttctgaaaattgtttactggttatctctatttaaggaaaaaaaaataaaataaaacattttggattttc

SEQ ID NO: 1522 - protein, 509 aa, Homo sapiens
MYSPLCLTQDEFHPFIEALLPHVRAFAYTWFNLQARKRKYFKKHEKRMSKEEERAVKDELLSEKPEVKQKWASRLLAKLRKDIRPEYREDFVLTVTGKKPPCCVLSNPDQKGKMRRIDCLRQADKVWRLDLVMVILFKGIPLESTDGERLVKSPQCSNPGLCVQPHHIGVSVKELDLYLAYFVHAADSSQSESPSQPSDADIKDQPENGHLGFQDSFVTSGVFSVTELVRVSQTPIAAGTGPNFSLSDLESSSYYSMSPGAMRRSLPSTSSTSSTKRLKSVEDEMDSPGEEPFYTGQGRSPGSGSQSSGWHEVEPGMPSPTTLKKSEKSGFSSPSPSQTSSLGTAFTQHHRPVITGPRASPHATPSTLHFPTSPIIQQPGPYFSHPAIRYHPQETLKEFVQLVCPDAGQQAGQVGFLNPNGSSQGKVHNPFLPTPMLPPPPPPPMARPVPLPVPDTKPPTTSTEGGAASPTSPTYSTPSTSPANRFVSVGPRDPSFVNIPQQTQSWYLG

SEQ ID NO: 1523 - DNA, 4900 bp, Homo sapiens
ggccgcggaggctcgggacccggctggccgcgcggcgccgcagccgccccctcccccacaccccctcccccccgcggcggcggcgcgagcgggcggcggctgtgcggtgcggtgcagagcggaggcggaggcgggcgcgcgggcagctcgcgggcacccggccgggccggcgcgggagcgggaaagggtgcgctatgcctttaacacccgcgtacagtaggcatgtatagtggagtgtagggaaactctaggcggggttaaagttcagctcatggagcggcaatagcgctggctggctggctgcagttgagccgacttggaaatgtgaacgcaagaagcaggcttgatttttttttctccccccttctctctctctctctctctctctcttcctctctccctctttctcctctctcacccacactcacgcacacctccaaaccgcacacccagacgcacacgcataccccagcgcccggcagttatgtattctccgctctgtctcacccaggatgaatttcatcctttcatcgaagcacttctgccccacgtccgagcctttgcctacacatggttcaacctgcaggcccgaaaacgaaaatacttcaaaaaacatgaaaagcgtatgtcaaaagaagaagagagagccgtgaaggatgaattgctaagtgaaaaaccagaggtcaagcagaagtgggcatctcgacttctggcaaagttgcggaaagatatccgacccgaatatcgagaggattttgttcttacagttacagggaaaaaacctccatgttgtgttctttccaacccagaccagaaaggcaagatgcgaagaattgactgcctccgccaggcagataaagtctggaggttggaccttgttatggtgattttgtttaaaggtattccgctggaaagtactgatggcgagcgccttgtaaagtccccacaatgctctaatccagggctctgtgtccaaccccatcacataggggtttctgttaaggaactcgatttatatttggcatactttgtgcatgcagcagattcaagtcaatctgaaagtcccagccagccaagtgacgctgacattaaggaccagccagaaaatggacatttgggcttccaggacagttttgtcacatcaggtgtttttagtgtcactgagctagtaagagtgtcacagacaccaatagctgcaggaactggcccaaatttttctctctcagatttggaaagttcttcatactacagcatgagtccaggagcaatgaggaggtctttacccagcacatcctctacgagctccacaaagcgcctcaagtctgtggaggatgaaatggacagtcctggtgaggagccattttatacaggccaagggcgctccccaggaagtggcagtcagtcaagtggatggcatgaagtggagccaggaatgccatctccaaccacactgaagaagtcggagaagtctggtttcagcagcccctccccttcacagacctcctccctgggaacggcgttcacacagcatcaccgacctgtcattacaggacccagagcaagtccgcatgcaacaccatcgactcttcatttcccgacatcacccattatccagcagcctgggccttacttctcacacccagccatccgctatcaccctcaggagacgctgaaagaatttgtccaacttgtctgccctgatgctggtcagcaggctggacaggtggggttcctcaatcccaatgggagcagccaaggcaaggtgcacaacccattccttcccaccccaatgttgccaccgccaccgccaccaccgatggccaggcctgtgcctctgccggtgccagacacaaagcctccaaccacgtcaacagaaggaggtgcagcctcccccacgtcaccaacctactcgacacccagcacctcccccgcaaaccgattcgtcagtgttggaccacgggatccaagctttgtaaatatccctcaacagacacagtcctggtacctgggataaaagttgcagcgtcccaccatccaccagacagaccacctgaccccttctcaactctgtaacatggacgcaacctcaacccagcgcagttacaacttcactatcagcggaaggggagaaaaaccgattcaaatcaacttgtacatggaaacagcaagcattatggtcaaacagcaaaggccataaccttttgggatttttttttttttaaaatactttagggactgttgtaatttctcatatggtgctggaaatggttgggctttgtaacatttgaagtgtttccatggtagcgtgagcattaggtgacgtggctagcggaggactacccttgctcactgacttcctgttgtaacacactttccttacggagcctggctgtttcacagtatttcatgaatttacccacacaggtgtgatcctccttgagcattgaggaggcacatggagaactaaatcttttgtagtagctgagatctgcaatatataacgggacagtcaaagggcaatgtttttctgtaacatattggaaaaagaaaatgcagttatattccttttttatttgttcctttagtttgttttggttcagcagtcagcagttaagtatataacatggcccgcaaggacaatgaatccactcacattgcagaacaattccgaaaatggcaaactactactactactgttcagttttttaaaagttttgaaatgctgcacttacatttaaaaaaacaacaacaacattttttcaacaatttcaacaatgacacaaaaattcacatggaaatggggaagatggtctgttttgacagaaactgacaggaatcaatcaaaacaatcgaattttgaattgagtaaagtgcaatttcattggatagctaaatatctttgtaagatagagattgttgaaaattctatttttgtttttctagtcctttcaccccaggactctaaattattggggtaaaaaacagccttgcaagaaaaaggggagctatttttgctttttatgttttttattgttaaacttgtatccctttaaaaactgaaggaaattaaaaaaaaaaaacaaaaaaacaaatctaatggtgcttttaccacaatatgttaactacattaaatgctaattaattattttctgttatcaaagcacatgactaaaatgaaatcatggtatctgttaattttataagctagaagtcactataatggattacgccaattctaaaaaattttacacctatctggcatcataggatttatcagttatcagacacctcattgtaccagagattgtccagaagttttaaagacctttgcatccctgaactgggctatgggaaataataatagtaataataataataataataatgatgaaaccaatactgacacaaatgctggtgcccattcagatcaagggtacttgttagggaaaaaaaaaaaagtttgcacccccaaacgtcctgtatcttatgaaaaaaaaaacaaaaaacaaaaacaaaaaaaaaacacaaaaaaccacagaaacaaaaacaaaaaaaagtgcaagtgatttttctaccagacagcgaagcacccctttgcttcccatgcgacttcaagaaggtttcctatactatacatatatatacgttctggttggcaagccctgctgatcagagaaagtctctgcatgttctagtgttagtaactaatttttatatagttaatgtaggataaagtagagtgcattaagacacaatattgtaatccctactctaggcacttgcctttaaactatgtttttcagcccttcagaagggttctactactgtcctatacaatcaagtaactgaaattcttgggaagacactttgctcctcatctttctccccgaaacaatgttgttttgttttgttttttttccttaatttgcacgaaaacaaaaattccatatcaatgtgccttgccctggatagcgattatttgtggaattgttgcacatgctcctctattgaaaggggtttttccctagtcaagcatttggagacactttttgtaaatgtgacttttatgtcagccatcgtcagtttcaacatctagaactaaatagaaagctagttgttccgcagataggagtagtctttattgtcctgtacggtcggtggcagtgctattctgagatctgtagatgcttagaatatcagtattttggatgttgctgcattttacaatttatttggagtcttcctttattttcccccagatatatgaaaatatgcaatacctgcttatatcatgtagaaaagcttagcaattattaatttttcttttatttttttttatttgaccaaagtcggtgctgcacttgacgcagtgtgttttaggtgtttgtctttgtacttttttgtgatttttgaatgcacgtgcgcaggaagggctcctcttagagaagcagtcaaactgtgaagcactaagctgaccctgcttcaagcaattttgtttttacaactgttcctttcacaagcaagccttaaaaaaaaaaaagacaacttcctttttcttcagctcccacaccccatttttcttagcagactgcagtcaatccacattcaataaaaagtatataatgcccatttttatatgcacgtttttaaacttccaagttctgaaaattgtttactggttatctctatttaaggaaaaaaaaataaaataaaacattttggattttcatatgtgtctgataagtggttgaatagtcgtttggcgctgttgtatggtgtgattgtcagtgtatggtgtcacttcctatagccagccagcatactttgccttcccctatagcacttagctgggcattactttattatgacatatgtgcactaaaaaatgaaaaaaaggaaa

SEQ ID NO: 1524 - protein, 509 aa, Homo sapiens; identical to SEQ ID NO: 1522

SEQ ID NO: 1525 - DNA, 4493 bp, Homo sapiens
cagctcgcgggcacccggccgggccggcgcgggagcgggaaagggtgcgctatgcctttaacacccgcgtacagtaggcatgtatagtggagtgtagggaaactctaggcggggttaaagttcagctcatggagcggcaatagcgctggctggctggctgcagttgagccgacttggaaatgtgaacgcaagaagcaggcttgatttttttttctccccccttctctctctctctctctctctctcttcctctctccctctttctcctctctcacccacactcacgcacacctccaaaccgcacacccagacgcacacgcataccccagcgcccggcagttatgtattctccgctctgtctcacccaggatgaatttcatcctttcatcgaagcacttctgccccacgtccgagcctttgcctacacatggttcaacctgcaggcccgaaaacgaaaatacttcaaaaaacatgaaaagcgtatgtcaaaagaagaagagagagccgtgaaggatgaattgctaagtgaaaaaccagaggtcaagcagaagtgggcatctcgacttctggcaaagttgcggaaagatatccgacccgaatatcgagaggattttgttcttacagttacagggaaaaaacctccatgttgtgttctttccaacccagaccagaaaggcaagatgcgaagaattgactgcctccgccaggcagataaagtctggaggttggaccttgttatggtgattttgtttaaaggtattccgctggaaagtactgatggcgagcgccttgtaaagtccccacaatgctctaatccagggctctgtgtccaaccccatcacataggggtttctgttaaggaactcgatttatatttggcatactttgtgcatgcagcagattcaagtcaatctgaaagtcccagccagccaagtgacgctgacattaaggaccagccagaaaatggacatttgggcttccaggacagttttgtcacatcaggtgtttttagtgtcactgagctagtaagagtgtcacagacaccaatagctgcaggaactggcccaaatttttctctctcagatttggaaagttcttcatactacagcatgagtccaggagcaatgaggaggtctttacccagcacatcctctacgagctccacaaagcgcctcaagtctgtggaggatgaaatggacagtcctggtgaggagccattttatacaggccaagggcgctccccaggaagtggcagtcagtcaagtggatggcatgaagtggagccaggaatgccatctccaaccacactgaagaagtcggagaagtctggtttcagcagcccctccccttcacagacctcctccctgggaacggcgttcacacagcatcaccgacctgtcattacaggacccagagcaagtccgcatgcaacaccatcgactcttcatttcccgacatcacccattatccagcagcctgggccttacttctcacacccagccatccgctatcaccctcaggagacgctgaaagaatttgtccaacttgtctgccctgatgctggtcagcaggctggacaggtggggttcctcaatcccaatgggagcagccaaggcaaggtgcacaacccattccttcccaccccaatgttgccaccgccaccgccaccaccgatggccaggcctgtgcctctgccggtgccagacacaaagcctccaaccacgtcaacagaaggaggtgcagcctcccccacgtcaccaatcctggtacctgggataaaagttgcagcgtcccaccatccaccagacagaccacctgaccccttctcaactctgtaacatggacgcaacctcaacccagcgcagttacaacttcactatcagcggaaggggagaaaaaccgattcaaatcaacttgtacatggaaacagcaagcattatggtcaaacagcaaaggccataaccttttgggatttttttttttttaaaatactttagggactgttgtaatttctcatatggtgctggaaatggttgggctttgtaacatttgaagtgtttccatggtagcgtgagcattaggtgacgtggctagcggaggactacccttgctcactgacttcctgttgtaacacactttccttacggagcctggctgtttcacagtatttcatgaatttacccacacaggtgtgatcctccttgagcattgaggaggcacatggagaactaaatcttttgtagtagctgagatctgcaatatataacgggacagtcaaagggcaatgtttttctgtaacatattggaaaaagaaaatgcagttatattccttttttatttgttcctttagtttgttttggttcagcagtcagcagttaagtatataacatggcccgcaaggacaatgaatccactcacattgcagaacaattccgaaaatggcaaactactactactactgttcagttttttaaaagttttgaaatgctgcacttacatttaaaaaaacaacaacaacattttttcaacaatttcaacaatgacacaaaaattcacatggaaatggggaagatggtctgttttgacagaaactgacaggaatcaatcaaaacaatcgaattttgaattgagtaaagtgcaatttcattggatagctaaatatctttgtaagatagagattgttgaaaattctatttttgtttttctagtcctttcaccccaggactctaaattattggggtaaaaaacagccttgcaagaaaaaggggagctatttttgctttttatgttttttattgttaaacttgtatccctttaaaaactgaaggaaattaaaaaaaaaaaacaaaaaaacaaatctaatggtgcttttaccacaatatgttaactacattaaatgctaattaattattttctgttatcaaagcacatgactaaaatgaaatcatggtatctgttaattttataagctagaagtcactataatggattacgccaattctaaaaaattttacacctatctggcatcataggatttatcagttatcagacacctcattgtaccagagattgtccagaagttttaaagacctttgcatccctgaactgggctatgggaaataataatagtaataataataataataataatgatgaaaccaatactgacacaaatgctggtgcccattcagatcaagggtacttgttagggaaaaaaaaaaaagtttgcacccccaaacgtcctgtatcttatgaaaaaaaaaacaaaaaacaaaaacaaaaaaaaaacacaaaaaaccacagaaacaaaaacaaaaaaaagtgcaagtgatttttctaccagacagcgaagcacccctttgcttcccatgcgacttcaagaaggtttcctatactatacatatatatacgttctggttggcaagccctgctgatcagagaaagtctctgcatgttctagtgttagtaactaatttttatatagttaatgtaggataaagtagagtgcattaagacacaatattgtaatccctactctaggcacttgcctttaaactatgtttttcagcccttcagaagggttctactactgtcctatacaatcaagtaactgaaattcttgggaagacactttgctcctcatctttctccccgaaacaatgttgttttgttttgttttttttccttaatttgcacgaaaacaaaaattccatatcaatgtgccttgccctggatagcgattatttgtggaattgttgcacatgctcctctattgaaaggggtttttccctagtcaagcatttggagacactttttgtaaatgtgacttttatgtcagccatcgtcagtttcaacatctagaactaaatagaaagctagttgttccgcagataggagtagtctttattgtcctgtacggtcggtggcagtgctattctgagatctgtagatgcttagaatatcagtattttggatgttgctgcattttacaatttatttggagtcttcctttattttcccccagatatatgaaaatatgcaatacctgcttatatcatgtagaaaagcttagcaattattaatttttcttttatttttttttatttgaccaaagtcggtgctgcacttgacgcagtgtgttttaggtgtttgtctttgtacttttttgtgatttttgaatgcacgtgcgcaggaagggctcctcttagagaagcagtcaaactgtgaagcactaagctgaccctgcttcaagcaattttgtttttacaactgttcctttcacaagcaagccttaaaaaaaaaaaagacaacttcctttttcttcagctcccacaccccatttttcttagcagactgcagtcaatccacattcaataaaaagtatataatgcccatttttatatgcacgtttttaaacttccaagttctgaaaattgtttactggttatctctatttaaggaaaaaaaaataaaataaaacattttggattttc

SEQ ID NO: 1526 - protein, 498 aa, Homo sapiens; identical to SEQ ID NO: 4

SEQ ID NO: 1527 - DNA, 4665 bp, Homo sapiens
cagctcgcgggcacccggccgggccggcgcgggagcgggaaagggtgcgctatgcctttaacacccgcgtacagtaggcatgtatagtggagtgtagggaaactctaggcggggttaaagttcagctcatggagcggcaatagcgctggctggctggctgcagttgagccgacttggaaatgtgaacgcaagaagcaggcttgatttttttttctccccccttctctctctctctctctctctctcttcctctctccctctttctcctctctcacccacactcacgcacacctccaaaccgcacacccagacgcacacgcataccccagcgcccggcagttatgtattctccgctctgtctcacccaggatgaatttcatcctttcatcgaagcacttctgccccacgtccgagcctttgcctacacatggttcaacctgcaggcccgaaaacgaaaatacttcaaaaaacatgaaaagcgtatgtcaaaagaagaagagagagccgtgaaggatgaattgctaagtgaaaaaccagaggtcaagcagaagtgggcatctcgacttctggcaaagttgcggaaagatatccgacccgaatatcgagaggattttgttcttacagttacagggaaaaaacctccatgttgtgttctttccaacccagaccagaaaggcaagatgcgaagaattgactgcctccgccaggcagataaagtctggaggttggaccttgttatggtgattttgtttaaaggtattccgctggaaagtactgatggcgagcgccttgtaaagtccccacaatgctctaatccagggctctgtgtccaaccccatcacataggggtttctgttaaggaactcgatttatatttggcatactttgtgcatgcagcagattcaagtcaatctgaaagtcccagccagccaagtgacgctgacattaaggaccagccagaaaatggacatttgggcttccaggacagttttgtcacatcaggtgtttttagtgtcactgagctagtaagagtgtcacagacaccaatagctgcaggaactggcccaaatttttctctctcagatttggaaagttcttcatactacagcatgagtccaggagcaatgaggaggtctttacccagcacatcctctacgagctccacaaagcgcctcaagtctgtggaggatgaaatggacagtcctggtgaggagccattttatacaggccaagggcgctccccaggaagtggcagtcagtcaagtggatggcatgaagtggagccaggaatgccatctccaaccacactgaagaagtcggagaagtctggtttcagcagcccctccccttcacagacctcctccctgggaacggcgttcacacagcatcaccgacctgtcattacaggacccagagcaagtccgcatgcaacaccatcgactcttcatttcccgacatcacccattatccagcagcctgggccttacttctcacacccagccatccgctatcaccctcaggagacgctgaaagaatttgtccaacttgtctgccctgatgctggtcagcaggctggacaggtggggttcctcaatcccaatgggagcagccaaggcaaggtgcacaacccattccttcccaccccaatgttgccaccgccaccgccaccaccgatggccaggcctgtgcctctgccggtgccagacacaaagcctccaaccacgtcaacagaaggaggtgcagcctcccccacgtcaccaatcctggtacctgggataaaagttgcagcgtcccaccatccaccagacagaccacctgaccccttctcaactctgtaacatggacgcaacctcaacccagcgcagttacaacttcactatcagcggaaggggagaaaaaccgattcaaatcaacttgtacatggaaacagcaagcattatggtcaaacagcaaaggccataaccttttgggatttttttttttttaaaatactttagggactgttgtaatttctcatatggtgctggaaatggttgggctttgtaacatttgaagtgtttccatggtagcgtgagcattaggtgacgtggctagcggaggactacccttgctcactgacttcctgttgtaacacactttccttacggagcctggctgtttcacagtatttcatgaatttacccacacaggtgtgatcctccttgagcattgaggaggcacatggagaactaaatcttttgtagtagctgagatctgcaatatataacgggacagtcaaagggcaatgtttttctgtaacatattggaaaaagaaaatgcagttatattccttttttatttgttcctttagtttgttttggttcagcagtcagcagttaagtatataacatggcccgcaaggacaatgaatccactcacattgcagaacaattccgaaaatggcaaactactactactactgttcagttttttaaaagttttgaaatgctgcacttacatttaaaaaaacaacaacaacattttttcaacaatttcaacaatgacacaaaaattcacatggaaatggggaagatggtctgttttgacagaaactgacaggaatcaatcaaaacaatcgaattttgaattgagtaaagtgcaatttcattggatagctaaatatctttgtaagatagagattgttgaaaattctatttttgtttttctagtcctttcaccccaggactctaaattattggggtaaaaaacagccttgcaagaaaaaggggagctatttttgctttttatgttttttattgttaaacttgtatccctttaaaaactgaaggaaattaaaaaaaaaaaacaaaaaaacaaatctaatggtgcttttaccacaatatgttaactacattaaatgctaattaattattttctgttatcaaagcacatgactaaaatgaaatcatggtatctgttaattttataagctagaagtcactataatggattacgccaattctaaaaaattttacacctatctggcatcataggatttatcagttatcagacacctcattgtaccagagattgtccagaagttttaaagacctttgcatccctgaactgggctatgggaaataataatagtaataataataataataataatgatgaaaccaatactgacacaaatgctggtgcccattcagatcaagggtacttgttagggaaaaaaaaaaaagtttgcacccccaaacgtcctgtatcttatgaaaaaaaaaacaaaaaacaaaaacaaaaaaaaaacacaaaaaaccacagaaacaaaaacaaaaaaaagtgcaagtgatttttctaccagacagcgaagcacccctttgcttcccatgcgacttcaagaaggtttcctatactatacatatatatacgttctggttggcaagccctgctgatcagagaaagtctctgcatgttctagtgttagtaactaatttttatatagttaatgtaggataaagtagagtgcattaagacacaatattgtaatccctactctaggcacttgcctttaaactatgtttttcagcccttcagaagggttctactactgtcctatacaatcaagtaactgaaattcttgggaagacactttgctcctcatctttctccccgaaacaatgttgttttgttttgttttttttccttaatttgcacgaaaacaaaaattccatatcaatgtgccttgccctggatagcgattatttgtggaattgttgcacatgctcctctattgaaaggggtttttccctagtcaagcatttggagacactttttgtaaatgtgacttttatgtcagccatcgtcagtttcaacatctagaactaaatagaaagctagttgttccgcagataggagtagtctttattgtcctgtacggtcggtggcagtgctattctgagatctgtagatgcttagaatatcagtattttggatgttgctgcattttacaatttatttggagtcttcctttattttcccccagatatatgaaaatatgcaatacctgcttatatcatgtagaaaagcttagcaattattaatttttcttttatttttttttatttgaccaaagtcggtgctgcacttgacgcagtgtgttttaggtgtttgtctttgtacttttttgtgatttttgaatgcacgtgcgcaggaagggctcctcttagagaagcagtcaaactgtgaagcactaagctgaccctgcttcaagcaattttgtttttacaactgttcctttcacaagcaagccttaaaaaaaaaaaagacaacttcctttttcttcagctcccacaccccatttttcttagcagactgcagtcaatccacattcaataaaaagtatataatgcccatttttatatgcacgtttttaaacttccaagttctgaaaattgtttactggttatctctatttaaggaaaaaaaaataaaataaaacattttggattttcatatgtgtctgataagtggttgaatagtcgtttggcgctgttgtatggtgtgattgtcagtgtatggtgtcacttcctatagccagccagcatactttgccttcccctatagcacttagctgggcattactttattatgacatatgtgcactaaaaaatgaaaaaaaggaaa

SEQ ID NO: 1528 - protein, 498 aa, Homo sapiens; identical to SEQ ID NO: 4

SEQ ID NO: 1529 - DNA, 1518 bp, Homo sapiens
caccgccaccaccgatggccaggcctgtgcctctgccggtgccaatcaagggtacttgttagggaaaaaaaaaaaagtttgcacccccaaacgtcctgtatcttatgaaaaaaaaaacaaaaaacaaaaacaaaaaaaaaacacaaaaaaccacagaaacaaaaacaaaaaaaagtgcaagtgatttttctaccagacagcgaagcacccctttgcttcccatgcgacttcaagaaggtttcctatactatacatatatatacgttctggttggcaagccctgctgatcagagaaagtctctgcatgttctagtgttagtaactaatttttatatagttaatgtaggataaagtagagtgcattaagacacaatattgtaatccctactctaggcacttgcctttaaactatgtttttcagcccttcagaagggttctactactgtcctatacaatcaagtaactgaaattcttgggaagacactttgctcctcatctttctccccgaaacaatgttgttttgttttgttttttttccttaatttgcacgaaaacaaaaattccatatcaatgtgccttgccctggatagcgattatttgtggaattgttgcacatgctcctctattgaaaggggtttttccctagtcaagcatttggagacactttttgtaaatgtgacttttatgtcagccatcgtcagtttcaacatctagaactaaatagaaagctagttgttccgcagataggagtagtctttattgtcctgtacggtcggtggcagtgctattctgagatctgtagatgcttagaatatcagtattttggatgttgctgcattttacaatttatttggagtcttcctttattttcccccagatatatgaaaatatgcaatacctgcttatatcatgtagaaaagcttagcaattattaatttttcttttatttttttttatttgaccaaagtcggtgctgcacttgacgcagtgtgttttaggtgtttgtctttgtacttttttgtgatttttgaatgcacgtgcgcaggaagggctcctcttagagaagcagtcaaactgtgaagcactaagctgaccctgcttcaagcaattttgtttttacaactgttcctttcacaagcaagccttaaaaaaaaaaaagacaacttcctttttcttcagctcccacaccccatttttcttagcagactgcagtcaatccacattcaataaaaagtatataatgcccatttttatatgcacgtttttaaacttccaagttctgaaaattgtttactggttatctctatttaaggaaaaaaaaataaaataaaacattttggattttcatatgtgtctgataagtggttgaatagtcgtttggcgctgttgtatggtgtgattgtcagtgtatggtgtcacttcctatagccagccagcatactttgccttcccctatagcacttagctgggcattactttattatgacatatgtgcactaaaaaatgaaaaaaaggaaa

SEQ ID NO: 1530 - protein, 60 aa, Homo sapiens
MKKKTKNKNKKKTQKTTETKTKKSASDFSTRQRSTPLLPMRLQEGFLYYTYIYVLVGKPC

SEQ ID NO: 1531 - DNA, 1306 bp, Homo sapiens
ctgacacaaatgctggtgcccattcagatcaagggtacttgttagggaaaaaaaaaaaagtttgcacccccaaacgtcctgtatcttatgaaaaaaaaaacaaaaaacaaaaacaaaaaaaaaacacaaaaaaccacagaaacaaaaacaaaaaaaagtgcaagtgatttttctaccagacagcgaagcacccctttgcttcccatgcgacttcaagaaggtttcctatactatacatatatatacgttctggttggcaagccctgctgatcagagaaagtctctgcatgttctagtgttagtaactaatttttatatagttaatgtaggataaagtagagtgcattaagacacaatattgtaatccctactctaggcacttgcctttaaactatgtttttcagcccttcagaagggttctactactgtcctatacaatcaagtaactgaaattcttgggaagacactttgctcctcatctttctccccgaaacaatgttgttttgttttgttttttttccttaatttgcacgaaaacaaaaattccatatcaatgtgccttgccctggatagcgattatttgtggaattgttgcacatgctcctctattgaaaggggtttttccctagtcaagcatttggagacactttttgtaaatgtgacttttatgtcagccatcgtcagtttcaacatctagaactaaatagaaagctagttgttccgcagataggagtagtctttattgtcctgtacggtcggtggcagtgctattctgagatctgtagatgcttagaatatcagtattttggatgttgctgcattttacaatttatttggagtcttcctttattttcccccagatatatgaaaatatgcaatacctgcttatatcatgtagaaaagcttagcaattattaatttttcttttatttttttttatttgaccaaagtcggtgctgcacttgacgcagtgtgttttaggtgtttgtctttgtacttttttgtgatttttgaatgcacgtgcgcaggaagggctcctcttagagaagcagtcaaactgtgaagcactaagctgaccctgcttcaagcaattttgtttttacaactgttcctttcacaagcaagccttaaaaaaaaaaaagacaacttcctttttcttcagctcccacaccccatttttcttagcagactgcagtcaatccacattcaataaaaagtatataatgcccatttttatatgcacgtttttaaacttccaagttctgaaaattgtttactggttatctctatttaaggaaaaaaggaa

SEQ ID NO: 1532 - protein, 60 aa, Homo sapiens; identical to SEQ ID NO: 1530

SEQ ID NO: 1533 - DNA, 1283 bp, Homo sapiens
actgtgtcaccaattttgaaatcaatttaatgtttaatgcaaatccattacatggtgctattataggctgacaaaatgatttacacaaatgtgacaacttgggctcaattcactctgctttccaacagtgtaaatgcatagcagtgtttatctgcatgagaactatgcactaatctatctgaagaaaaaaactatatcaactttggtatctactttccgtttacttcaatccttgcctttttggtcattgttataatgccagctttaggacagaaagaattataagaaaaccagcataatacctgatatattaaaatgtagtgcctgtgaaatctgtattatattgctcttctgaagtaagatttttctacaccggtagccttcgctgtctgtcagtcaggaccttctggtataggtgatgtaaaataaccgtacaatattaatgcatgcgattccataatgcttagtgaactgtatgaatattactcaaagttatgttagtctttttttccgacttggttcttgtcagctaggtttaaaggtatttcactgagaacgcaaattctgtcttttcttgatttcggctgttttcagtattttggaggtatacatttacttaaattcagtattactcgtgttttgtttttgtttttgttttttgttttctttttcctaggggacaagcatgggtgtttgatttcagaaatcagtacctggcgagatttttgtctcaaaacgactatttgaatttcaagaactgtgctgcgaagacactctgagaacatttgcaagtcaggggcattttccttgacccttgactgatgctatgcggagactgatacattttcttaatggacaatgttcaagccaggtacccatgcttgatctgtcttcacaccagacctcctcatattaaaaggaaaaataagaaaaaaaatgtaagaaatcacatggctatttagtttcatgcacagttgcaatattttcttcaaaaataaaacgggccccctgtgcctctagtatacttgtattgactctcatagttacccttttagttttactgtgttctgtgaaaatttgtaattggttgagaatcactgtgggcgtccattcttattcaactaaatctccacaggttttttgagctggtgtggattagtttaactcttgtattcaaccattagtgctaccaccttctcacattacaatacaattactggaagcaagtactgcatttcctatgcaacaaaaaaggaaaaataaaaaattgctaatgctatgga

SEQ ID NO: 1534 - protein, 40 aa, Homo sapiens
MHSSVYLHENYALIYLKKKTISTLVSTFRLLQSLPFWSLL

SEQ ID NO: 1535 - DNA, 1426 bp, Homo sapiens
tgaactgtatgaatattactcaaagttatgttagtctttttttccgacttggttcttgtcagctaggtttaaaggtatttcactgagaacgcaaattctgtcttttcttgatttcggctgttttcagtattttggaggtatacatttacttaaattcagtattactcgtgttttgtttttgtttttgttttttgttttctttttcctaggggacaagcatgggtgtttgatttcagaaatcagtacctggcgagatttttgtctcaaaacgactatttgaatttcaagaactgtgctgcgaagacactctgagaacatttgcaagtcaggggcattttccttgacccttgactgatgctatgcggagactgatacattttcttaatggacaatgttcaagccaggtacccatgcttgatctgtcttcacaccagacctcctcatattaaaaggaaaaataagaaaaaaaatgtaagaaatcacatggctatttagtttcatgcacagttgcaatattttcttcaaaaataaaactctgtacaaactttgggcccgattcataagaaaaagaagtttgctattaacacgggatttttttaatatactttttttggtctaaatttgaaattacttgcttcccaaattaaataaatttcatctcatttttttccctaaaccagcacccatctgccttttattccccaaagagttacctttcccagattagggggatggtatgtggggagcagatagcggaaatgcttagaaagataagggggaccacccacagctggtctcagaccatcgtctctgcactgcgaaggcatttggtagcctcgccactgagatactaactagacctagactaggagctttatcaggttctaggaggtcctttaggaagactctcaaaggcaaatccctgatcccccgccccacccttagccctgccctctcaccagagcaaaattcactggggacttttcccaccacacatggaaatctgtccactcggaatacctctgttttccatttcaaattgtagggggaggggatggaacacttccagtgatggtaagagatctgttatgaaacgaaacaccccccgtgttaataacttggtctgaaatctgtttttatgagccgggccccctgtgcctctagtatacttgtattgactctcatagttacccttttagttttactgtgttctgtgaaaatttgtaattggttgagaatcactgtgggcgtccattcttattcaactaaatctccacaggttttttgagctggtgtggattagtttaactcttgtattcaaccattagtgctaccaccttctcacattacaatacaattactggaagcaagtactgcatttcctatgcaacaaaaaaggaaaaataaaaaattgctaatgctatgg

SEQ ID NO: 1536 - protein, 40 aa, Homo sapiens
MVCGEQIAEMLRKIRGTTHSWSQTIVSALRRHLVASPLRY

SEQ ID NO: 1537 - DNA, 308 bp, Homo sapiens
gggttttttttttttttttttggcttttttttttgtttgcctctagtatacttgtattgactctcatagttacccttttagttttactgtgttctgtgaaaatttgtaattggttgagaatcactgtgggcgtccattcttattcaactaaatctccacaggttttttgagctggtgtggattagtttaactcttgtattcaaccattagtgctaccaccttctcacattacaatacaattactggaagcaagtactgcatttcctatgcaacaaaaaaggaaaaataaaaaattgctaatgctatgg

SEQ ID NO: 1538 - protein, 55 aa, Homo sapiens
VFFFFFWLFFLFASSILVLTLIVTLLVLLCSVKICNWLRITVGVHSYSTKSPQVF

SEQ ID NO: 1539 - DNA, 3931 bp, Homo sapiens
gtggcccatcccgtctgctctctgtcccgtctcccgacccgtacgcttttccctcaactcgcgcgcacgaatggttaaaaaaagggtgtgaggctcgagcccgccagccaggccgctagcacctcgcgcgcgccctcagcgaggacccgcacgagctgcccggctctgtgcctgcgttgtttgaaactgtggaacccgttaggcttttggggaactacagtcccagctggctccggagcccgtgcgtgccaggggcgagtggccgtcgcgagacggctcctgcctttcgtgtctctgcagcgtggagactggaaccggcaatttcaaaggacgccacgttcaatcgcagcgctggcgcgggcggaggctaaaacacgggggtcctgagactgaggaaaacgcgccaagttcccctcggtggcggagtgctaaagaccctagcggttcaggcgttcggcgagcggggccgctgcttgttgcgctcctggctctcccggggcgggcgcagatgggcgccgctcccgggatgtagttggtgttggtgcaagacgggagcgagcggcggtcggggttcccgctcttgggagcggatggtcactcccccgcggggagggcgagccgaccagattttcctggggccggggacccggcgggctcggggcagggactcacctgtcgcacccacactcattcgggttggacttgccggcgtcaccgccgcggacttcgctttgggccatgaccagatataattggtgattacaactttcctctataaattaactcttgacactccttgggatttgaagaaaaaaatgcctggtgtcatacctagtgaaagtaatggactttcaagaggtagcccttcaaagaaaaacagactttccttaaagttttttcagaaaaaggaaactaagagagctttggatttcacagattctcaagaaaatgaagaaaaagcttctgaatatagagcatctgaaattgatcaagttgttcctgcagcacagtcttcacctataaactgtgagaagagagaaaacttgttaccatttgtgggactgaataatctcggcaatacttgctatcttaatagtatacttcaggtattatatttttgtcccggttttaaatctggagtaaagcacttatttaatattatttcaaggaagaaagaagctctaaaggatgaagccaatcaaaaagacaagggaaattgcaaagaagattctttggcaagttatgaattgatatgcagtttacagtccttaatcatttcggttgaacagctccaggctagttttctcttaaatccagagaaatatactgatgaacttgccactcagccaaggcgactgcttaacacactgagggaactcaaccctatgtatgaaggatatctacagcatgatgcacaggaagtattacaatgtattttgggaaacattcaagaaacatgccaactcctaaaaaaagaagaagtaaaaaatgtggcagaattacctactaaggtagaagaaatacctcatccgaaagaggaaatgaatggtattaacagcatagagatggacagtatgaggcattctgaagactttaaagagaaactcccaaaaggaaatgggaaaagaaaaagtgacactgaatttggtaacatgaagaaaaaagttaaattatccaaggaacaccagtcattggaagagaaccagagacaaactagatcaaaaagaaaagctacaagtgatacattagagagtcctcctaaaataattcccaagtatatttctgaaaatgagagtccaagaccctcacaaaagaaatcaagagttaaaataaattggttaaagtctgcaactaagcaacccagcattctttctaaattttgtagtctgggaaaaataacaacaaaccaaggagtcaaaggacaatctaaagaaaatgaatgtgatcctgaagaggacttggggaagtgtgaaagtgataacacaactaatggttgtggacttgaatctccaggaaatactgttacacctgtaaatgttaatgaagttaaacccataaacaaaggtgaagaacaaattggttttgagctagtggagaaattatttcaaggtcagctggtattaaggacgcgttgcttggaatgtgaaagtttaacagaaagaagagaagattttcaagacatcagtgtgccagtacaagaagatgagctttccaaagtagaggagagttctgaaatttctccagagccaaaaacagaaatgaagaccctgagatgggcaatttcacaatttgcttcagtagaaaggattgtaggagaagataaatatttctgtgaaaactgccatcattatactgaagctgaacgaagtcttttgtttgacaaaatgcctgaagttataactattcatttgaagtgctttgctgctagtggtttggagtttgattgttatggtggtggactttccaagatcaacactcctttattgacacctcttaaattgtcactagaagaatggagcacaaagccaactaacgacagctatggattatttgcggttgtgatgcatagtggcattacaattagtagtgggcattacactgcttctgttaaagtcactgaccttaacagtttagaactagataaaggaaattttgtggttgaccaaatgtgtgaaataggtaagccagaaccattgaatgaggaggaagcaaggggtgtggttgagaattataatgatgaagaagtgtcaattagagttggtggaaatacacagccaagtaaagttttgaacaaaaaaaatgtagaagctattggacttcttggaggacaaaagagcaaagcagattatgagctatacaacaaagcctctaatcctgataaggttgctagtacagcgtttgctgaaaatagaaattctgagactagtgatactactgggacccatgaatctgatagaaacaaggaatccagtgaccaaacaggcattaatattagtggatttgagaacaaaatttcatacgtagtgcaaagcttaaaggagtatgaggggaagtggttgctttttgatgattctgaagtcaaagttactgaagagaaggactttctgaattctctttccccttctacatctcctacttctactccttacttgctattttataagaaattatagagtgagtgtattttccttgtgtatatattaaacacacccatacaaacattggtaaagttgattacatcaaagaatctttagcttatcttttgaagctactggatattattggtctctctaggtttttatataaatagtgaaatttgaattactgaaaaccatgttaatttttagaactcattttcctcagtagagactagtgatgcattagcttctgggaacaaacttgtatcggttcttaattaaattatccaaaacggaggcatttaaacacttggatttacaccagtcttttgtgtttgctttttaaaataaagtgctcgtatttgtattctccatattttggagtaattatctacatgatgtttatagttcctgtggtttttcacccaagaagcagaatctcattcagtacatttagttttataagagtcatgaagctaaatccttgggctatgtcagaggcacaaagtctagaatgtgtgtattcacaatggtgtatgtacattttgtgccttgattcacttagaagtgtctcagaaaacctggacagttcgcttctacacaagaattttatatgtatttatgaagatgattctgtaccctagtatatctttttgggcatggactaatttgtatctgtttaactcatattctgcacgatctgtatatagtacatcaaacttagaggtgtgaccttaaatttaactttttttaaaaactgggaggtcaataaaatttaaactgcttaactatgt

SEQ ID NO: 1540 - protein, 785 aa, Homo sapiens; identical to SEQ ID NO: 6

SEQ ID NO: 1541 - DNA, 3996 bp, Homo sapiens
gtggcccatcccgtctgctctctgtcccgtctcccgacccgtacgcttttccctcaactcgcgcgcacgaatggttaaaaaaagggtgtgaggctcgagcccgccagccaggccgctagcacctcgcgcgcgccctcagcgaggacccgcacgagctgcccggctctgtgcctgcgttgtttgaaactgtggaacccgttaggcttttggggaactacagtcccagctggctccggagcccgtgcgtgccaggggcgagtggccgtcgcgagacggctcctgcctttcgtgtctctgcagcgtggagactggaaccggcaatttcaaaggacgccacgttcaatcgcagcgctggcgcgggcggaggctaaaacacgggggtcctgagactgaggaaaacgcgccaagttcccctcggtggcggagtgctaaagaccctagcggttcaggcgttcggcgagcggggccgctgcttgttgcgctcctggctctcccggggcgggcgcagatgggcgccgctcccgggatgtagttggtgttggtgcaagacgggagcgagcggcggtcggggttcccgctcttgggagcggatggtcactcccccgcggggagggcgagccgaccagattttcctggggccggggacccggcgggctcggggcagggactcacctgtcgcacccacactcattcgggttggacttgccggcgtcaccgccgcggacttcgctttgggccatgaccagatataattggtgattacaactttcctctataaattaactcttgacactccttgggatttgaagaaaaaaatgcctggtgtcatacctagtgaaagtaatggactttcaagaggtagcccttcaaagaaaaacagactttccttaaagttttttcagaaaaaggaaactaagagagctttggatttcacagattctcaagaaaatgaagaaaaagcttctgaatatagagcatctgaaattgatcaagttgttcctgcagcacagtcttcacctataaactgtgagaagagagaaaacttgttaccatttgtgggactgaataatctcggcaatacttgctatcttaatagtatacttcaggtattatatttttgtcccggttttaaatctggagtaaagcacttatttaatattatttcaaggaagaaagaagctctaaaggatgaagccaatcaaaaagacaagggaaattgcaaagaagattctttggcaagttatgaattgatatgcagtttacagtccttaatcatttcggttgaacagctccaggctagttttctcttaaatccagagaaatatactgatgaacttgccactcagccaaggcgactgcttaacacactgagggaactcaaccctatgtatgaaggatatctacagcatgatgcacaggaagtattacaatgtattttgggaaacattcaagaaacatgccaactcctaaaaaaagaagaagtaaaaaatgtggcagaattacctactaaggtagaagaaatacctcatccgaaagaggaaatgaatggtattaacagcatagagatggacagtatgaggcattctgaagactttaaagagaaactcccaaaaggaaatgggaaaagaaaaagtgacactgaatttggtaacatgaagaaaaaagttaaattatccaaggaacaccagtcattggaagagaaccagagacaaactagatcaaaaagaaaagctacaagtgatacattagagagtcctcctaaaataattcccaagtatatttctgaaaatgagagtccaagaccctcacaaaagaaatcaagagttaaaataaattggttaaagtctgcaactaagcaacccagcattctttctaaattttgtagtctgggaaaaataacaacaaaccaaggagtcaaaggacaatctaaagaaaatgaatgtgatcctgaagaggacttggggaagtgtgaaagtgataacacaactaatggttgtggacttgaatctccaggaaatactgttacacctgtaaatgttaatgaagttaaacccataaacaaaggtgaagaacaaattggttttgagctagtggagaaattatttcaaggtcagctggtattaaggacgcgttgcttggaatgtgaaagtttaacagaaagaagagaagattttcaagacatcagtgtgccagtacaagaagatgagctttccaaagtagaggagagttctgaaatttctccagagccaaaaacagaaatgaagaccctgagatgggcaatttcacaatttgcttcagtagaaaggattgtaggagaagataaatatttctgtgaaaactgccatcattatactgaagctgaacgaagtcttttgtttgacaaaatgcctgaagttataactattcatttgaagtgctttgctgctagtggtttggagtttgattgttatggtggtggactttccaagatcaacactcctttattgacacctcttaaattgtcactagaagaatggagcacaaagccaactaacgacagctatggattatttgcggttgtgatgcatagtggcattacaattagtagtgggcattacactgcttctgttaaagtcactgaccttaacagtttagaactagataaaggaaattttgtggttgaccaaatgtgtgaaataggtaagccagaaccattgaatgaggaggaagcaaggggtgtggttgagaattataatgatgaagaagtgtcaattagagttggtggaaatacacagccaagtaaagttttgaacaaaaaaaatgtagaagctattggacttcttggaggacaaaagagcaaagcagattatgagctatacaacaaagcctctaatcctgataaggttgctagtacagcgtttgctgaaaatagaaattctgagactagtgatactactgggacccatgaatctgatagaaacaaggaatccagtgaccaaacaggcattaatattagtggatttgagaacaaaatttcatacgtagtgcaaagcttaaaggagtatgaggggaagtggttgctttttgatgattctgaagtcaaagttactgaagagaaggactttctgaattctctttccccttctacatctcctacttctactccttacttgctattttataagaaattatagagtgagtgtattttccttgtgtatatattaaacacacccatacaaacattggtaaagttgattacatcaaagaatctttagcttatcttttgaagctactggatattattggtctctctaggtttttatataaatagtgaaatttgaattactgaaaaccatgttaatttttagaactcattttcctcagtagagactagtgatgcattagcttctgggaacaaacttgtatcggttcttaattaaattatccaaaacggaggcatttaaacacttggatttacaccagtcttttgtgtttgctttttaaaataaagtgctcgtatttgtattctccatattttggagtaattatctacatgatgtttatagttcctgtggtttttcacccaagaagcagaatctcattcagtacatttagttttataagagtcatgaagctaaatccttgggctatgtcagaggcacaaagtctagaatgtgtgtattcacaatggtgtatgtacattttgtgccttgattcacttagaagtgtctcagaaaacctggacagttcgcttctacacaagaattttatatgtatttatgaagatgattctgtaccctagtatatctttttgggcatggactaatttgtatctgtttaactcatattctgcacgatctgtatatagtacatcaaacttagaggtgtgaccttaaatttaactttttttaaaaactgggaggtcaataaaatttaaactgcttaactatgtatatgaatatttgaattttttacttgtatatttttataaatacagctgagttttcttaaagcgaa

SEQ ID NO: 1542 - protein, 785 aa, Homo sapiens; identical to SEQ ID NO: 6

SEQ ID NO: 1543 - DNA, 935 bp, Homo sapiens
ataattcccaagtatatttctgaaaatgagagtccaagaccctcacaaaagaaatcaagagttaaaataaattggttaaagtctgcaactaagcaacccagcattctttctaaattttgtagtctgggaaaaataacaacaaaccaaggagtcaaaggacaatctaaaaaattatagagtgagtgtattttccttgtgtatatattaaacacacccatacaaacattggtaaagttgattacatcaaagaatctttagcttatcttttgaagctactggatattattggtctctctaggtttttatataaatagtgaaatttgaattactgaaaaccatgttaatttttagaactcattttcctcagtagagactagtgatgcattagcttctgggaacaaacttgtatcggttcttaattaaattatccaaaacggaggcatttaaacacttggatttacaccagtcttttgtgtttgctttttaaaataaagtgctcgtatttgtattctccatattttggagtaattatctacatgatgtttatagttcctgtggtttttcacccaagaagcagaatctcattcagtacatttagttttataagagtcatgaagctaaatccttgggctatgtcagaggcacaaagtctagaatgtgtgtattcacaatggtgtatgtacattttgtgccttgattcacttagaagtgtctcagaaaacctggacagttcgcttctacacaagaattttatatgtatttatgaagatgattctgtaccctagtatatctttttgggcatggactaatttgtatctgtttaactcatattctgcacgatctgtatatagtacatcaaacttagaggtgtgaccttaaatttaactttttttaaaaactgggaggtcaataaaatttaaactgcttaactatgt

SEQ ID NO: 1544 - protein, 82 aa, Homo sapiens [sequence omitted]

SEQ ID NO: 1545 - DNA, 1000 bp, Homo sapiens
ataattcccaagtatatttctgaaaatgagagtccaagaccctcacaaaagaaatcaagagttaaaataaattggttaaagtctgcaactaagcaacccagcattctttctaaattttgtagtctgggaaaaataacaacaaaccaaggagtcaaaggacaatctaaaaaattatagagtgagtgtattttccttgtgtatatattaaacacacccatacaaacattggtaaagttgattacatcaaagaatctttagcttatcttttgaagctactggatattattggtctctctaggtttttatataaatagtgaaatttgaattactgaaaaccatgttaatttttagaactcattttcctcagtagagactagtgatgcattagcttctgggaacaaacttgtatcggttcttaattaaattatccaaaacggaggcatttaaacacttggatttacaccagtcttttgtgtttgctttttaaaataaagtgctcgtatttgtattctccatattttggagtaattatctacatgatgtttatagttcctgtggtttttcacccaagaagcagaatctcattcagtacatttagttttataagagtcatgaagctaaatccttgggctatgtcagaggcacaaagtctagaatgtgtgtattcacaatggtgtatgtacattttgtgccttgattcacttagaagtgtctcagaaaacctggacagttcgcttctacacaagaattttatatgtatttatgaagatgattctgtaccctagtatatctttttgggcatggactaatttgtatctgtttaactcatattctgcacgatctgtatatagtacatcaaacttagaggtgtgaccttaaatttaactttttttaaaaactgggaggtcaataaaatttaaactgcttaactatgtatatgaatatttgaattttttacttgtatatttttataaatacagctgagttttcttaaagcgaa

SEQ ID NO: 1546 - protein, 82 aa, Homo sapiens [sequence omitted]

SEQ ID NO: 1547 - DNA, 1704 bp, Homo sapiens
ttctgaaatttctccagagccaaaaacagaaatgaagaccctgagatgggcaatttcacaatttgcttcagtagaaaggattgtaggagaagataaatatttctgtgaaaactgccatcattatactgaagctgaacgaagtcttttgtttgacaaaatgcctgaagttataactattcatttgaagtgctttgctgctagtggtttggagtttgattgttatggtggtggactttccaagatcaacactcctttattgacacctcttaaattgtcactagaagaatggagcacaaagccaactaacgacagctatggattatttgcggttgtgatgcatagtggcattacaattagtagtgggcattacactgcttctgttaaagtcactgaccttaacagtttagaactagataaaggaaattttgtggttgaccaaatgtgtgaaataggtaagccagaaccattgaatgaggaggaagcaaggggtgtggttgagaattataatgatgaagaagtgtcaattagagttggtggaaatacacagccaagtaaagttttgaacaaaaaaaatgtagaagctattggacttcttggaggacaaaagagcaaagcagattatgagctatacaacaaagcctctaatcctgataaggttgctagtacagcgtttgctgaaaatagaaattctgagactagtgatactactgggacccatgaatctgatagaaacaaggaatccagtgaccaaacaggcattaatattagtggatttgagaacaaaatttcatacgtagtgcaaagcttaaaggagtatgaggggaagtggttgctttttgatgattctgaagtcaaagttactgaagagaaggactttctgaattctctttccccttctacatctcctacttctactccttacttgctattttataagaaattatagagtgagtgtattttccttgtgtatatattaaacacacccatacaaacattggtaaagttgattacatcaaagaatctttagcttatcttttgaagctactggatattattggtctctctaggtttttatataaatagtgaaatttgaattactgaaaaccatgttaatttttagaactcattttcctcagtagagactagtgatgcattagcttctgggaacaaacttgtatcggttcttaattaaattatccaaaacggaggcatttaaacacttggatttacaccagtcttttgtgtttgctttttaaaataaagtgctcgtatttgtattctccatattttggagtaattatctacatgatgtttatagttcctgtggtttttcacccaagaagcagaatctcattcagtacatttagttttataagagtcatgaagctaaatccttgggctatgtcagaggcacaaagtctagaatgtgtgtattcacaatggtgtatgtacattttgtgccttgattcacttagaagtgtctcagaaaacctggacagttcgcttctacacaagaattttatatgtatttatgaagatgattctgtaccctagtatatctttttgggcatggactaatttgtatctgtttaactcatattctgcacgatctgtatatagtacatcaaacttagaggtgtgaccttaaatttaactttttttaaaaactgggaggtcaataaaatttaaactgcttaactatgt

SEQ ID NO: 1548 - protein, 304 aa, Homo sapiens
MKTLRWAISQFASVERIVGEDKYFCENCHHYTEAERSLLFDKMPEVITIHLKCFAASGLEFDCYGGGLSKINTPLLTPLKLSLEEWSTKPTNDSYGLFAVVMHSGITISSGHYTASVKVTDLNSLELDKGNFVVDQMCEIGKPEPLNEEEARGVVENYNDEEVSIRVGGNTQPSKVLNKKNVEAIGLLGGQKSKADYELYNKASNPDKVASTAFAENRNSETSDTTGTHESDRNKESSDQTGINISGFENKISYVVQSLKEYEGKWLLFDDSEVKVTEEKDFLNSLSPSTSPTSTPYLLFYKKL

SEQ ID NO: 1549 - DNA, 1769 bp, Homo sapiens
ttctgaaatttctccagagccaaaaacagaaatgaagaccctgagatgggcaatttcacaatttgcttcagtagaaaggattgtaggagaagataaatatttctgtgaaaactgccatcattatactgaagctgaacgaagtcttttgtttgacaaaatgcctgaagttataactattcatttgaagtgctttgctgctagtggtttggagtttgattgttatggtggtggactttccaagatcaacactcctttattgacacctcttaaattgtcactagaagaatggagcacaaagccaactaacgacagctatggattatttgcggttgtgatgcatagtggcattacaattagtagtgggcattacactgcttctgttaaagtcactgaccttaacagtttagaactagataaaggaaattttgtggttgaccaaatgtgtgaaataggtaagccagaaccattgaatgaggaggaagcaaggggtgtggttgagaattataatgatgaagaagtgtcaattagagttggtggaaatacacagccaagtaaagttttgaacaaaaaaaatgtagaagctattggacttcttggaggacaaaagagcaaagcagattatgagctatacaacaaagcctctaatcctgataaggttgctagtacagcgtttgctgaaaatagaaattctgagactagtgatactactgggacccatgaatctgatagaaacaaggaatccagtgaccaaacaggcattaatattagtggatttgagaacaaaatttcatacgtagtgcaaagcttaaaggagtatgaggggaagtggttgctttttgatgattctgaagtcaaagttactgaagagaaggactttctgaattctctttccccttctacatctcctacttctactccttacttgctattttataagaaattatagagtgagtgtattttccttgtgtatatattaaacacacccatacaaacattggtaaagttgattacatcaaagaatctttagcttatcttttgaagctactggatattattggtctctctaggtttttatataaatagtgaaatttgaattactgaaaaccatgttaatttttagaactcattttcctcagtagagactagtgatgcattagcttctgggaacaaacttgtatcggttcttaattaaattatccaaaacggaggcatttaaacacttggatttacaccagtcttttgtgtttgctttttaaaataaagtgctcgtatttgtattctccatattttggagtaattatctacatgatgtttatagttcctgtggtttttcacccaagaagcagaatctcattcagtacatttagttttataagagtcatgaagctaaatccttgggctatgtcagaggcacaaagtctagaatgtgtgtattcacaatggtgtatgtacattttgtgccttgattcacttagaagtgtctcagaaaacctggacagttcgcttctacacaagaattttatatgtatttatgaagatgattctgtaccctagtatatctttttgggcatggactaatttgtatctgtttaactcatattctgcacgatctgtatatagtacatcaaacttagaggtgtgaccttaaatttaactttttttaaaaactgggaggtcaataaaatttaaactgcttaactatgtatatgaatatttgaattttttacttgtatatttttataaatacagctgagttttcttaaagcgaa

SEQ ID NO: 1550 - protein, 304 aa, Homo sapiens; identical to SEQ ID NO: 1548

SEQ ID NO: 1551 - DNA, 2035 bp, Homo sapiens
ttgaccaaatgtgtgaaataggtaagccagaaccattgaatgaggaggaagcaaggggtgtggttgagaattataatgatgaagaagtgtcaattagagttggtggaaatacacagccaagtaaagttttgaacaaaaaaaatgtagaagctattggacttcttggaggacaaaagagcaaagcagattatgagctatacaacaaagcctctaatcctgataaggttgctagtacagcgtttgctgaaaatagaaattctgagactagtgatactactgggacccatgaatctgatagaaacaaggaatccagtgaccaaacaggcattaatattagtggatttgagaacaaaatttcatacgtagtgcaaagcttaaaggagtatgaggggaagtggttgctttttgatgattctgaagtcaaagttactgaagagaaggactttctgaattctctttccccttctacatctcctacttctactccttacttgctattttataagaaattatagagtgagtgtattttccttgtgtatatattaaacacacccatacaaacattggtaaagttgattacatcaaagaatctttagcttatcttttgaagctactggatattattggtctctctaggtttttatataaatagtgaaatttgaattactgaaaaccatgttaatttttagaactcattttcctcagtagagactagtgatgcattagcttctgggaacaaacttgtatcggttcttaattaaattatccaaaacggaggcatttaaacacttggatttacaccagtcttttgtgtttgctttttaaaataaagtgctcgtatttgtattctccatattttggagtaattatctacatgatgtttatagttcctgtggtttttcacccaagaagcagaatctcattcagtacatttagttttataagagtcatgaagctaaatccttgggctatgtcagaggcacaaagtctagaatgtgtgtattcacaatggtgtatgtacattttgtgccttgattcacttagaagtgtctcagaaaacctggacagttcgcttctacacaagaattttatatgtatttatgaagatgattctgtaccctagtatatctttttgggcatggactaatttgtatctgtttaactcatattctgcacgatctgtatatagtacatcaaacttagaggtgtgaccttaaatttaactttttttaaaaactgggaggtcaataaaatttaaactgcttaactatgtatatgaatatttgaattttttacttgtatatttttataaatacagctgagttttcttaaagcgaataagtgtgtgtatatatatatgtatatatatgagagaataagcatgcataattacctttattactgaatactttctgacagtgcaggagtttttcaaagaggagaaattgtgcttagtccagccaagctgtcatacttaaaagaggtttataatgaaatctgttgcatctaattgtcctttaaagtagacatgatttaatggaatccaaaactggaaaagttaagatgatgctttgggcacacataaaaacttggttaaaatttcattttaaactagtatactgaagtggtaagtgatgaatgatttcatgacttgttaatggacattcttggtactaagtttttcctagaaatgattctaaatatgtaaatgctattggggtaacactttaataccccatttcaacaaggagtaccttctcaattaaaaaaaaatcgcagtaggccaccgcacccagatctggttagttcttaagtgattcatgtaactggtcagtagaagaaaaggattataaatgatgccattctgtaaactgcactactacccaaaaaccattgttctaaactgttctggaaatcattactatgcatcgttttggaaaaacttgccaagaattaaaatgttacttctcaaattttttttctgtatgacttgcatataattttagatgaattaaagcacctaattttacttttt

SEQ ID NO: 1552 - protein, 168 aa, Homo sapiens
MCEIGKPEPLNEEEARGVVENYNDEEVSIRVGGNTQPSKVLNKKNVEAIGLLGGQKSKADYELYNKASNPDKVASTAFAENRNSETSDTTGTHESDRNKESSDQTGINISGFENKISYVVQSLKEYEGKWLLFDDSEVKVTEEKDFLNSLSPSTSPTSTPYLLFYKKL

SEQ ID NO: 1553 - DNA, 724 bp, Homo sapiens
ttttttttttttgaaacggagtctagctctgtcacccaggctggagtgcagtggcgtgatctcagctcactgcaagctccgcctcccgggttcacgccattctcctgcctcagcctcccgagtagctgggactacaggctcctgccccctcgcctggctaattttttgtatttttagtagagacggggtttgactgttagccaggatggtctcaatctcctgacctcgtgatctgtctgcctcggcctcccaaagtgctggtttttgtttttgacttaagagtcttgctctgtcgcccaggctgaagtgcagtggcgccattttggctcgctgcaacctccactttccaggttccagtgattctcatgcctcagccacccaagtagttcggattacaggcacgggctactacacctggctgatttttgtgtttttggtagagatggggtttcaccatattgaccaggctgttcttgaactcctggcctcatgatccgcctgcccctgcctcccagatgttgggattacagatgtgagccaccgcacccagatctggttagttcttaagtgattcatgtaactggtcagtagaagaaaaggattataaatgatgccattctgtaaactgcactactacccaaaaaccattgttctaaactgttctggaaatcattactatgcatcgttttggaaaaacttgccaagaattaaaatgttacttctc

SEQ ID NO: 1554 - protein, 38 aa, Homo sapiens
MMPFCKLHYYPKTIVLNCSGNHYYASFWKNLPRIKMLL

SEQ ID NO: 1555 - DNA, 2392 bp, Homo sapiens
ctttatgttccattttaaatttctggtaggggatatttgacctctttcatttaatcttgccagagcttagtttgtttttttagttttttcaaagaaccaacttttgcaatttttgatactctattttaaaatcttatttcctttctaatactttaagttgcttaactcttcagttttagccttctaatataagcatttgatgctatgtgttttctactaagcatcactttagtggcattccacaaatatgtagagatatatatattatttgtaaatatcctttccttcattgtctgtcagggtccagatacttttctcaaatacttgaattaacttggataaaggactgtcatcaaaatctattcatttagccgggcacggtggctcacgcctgtaatcccagcacttagggaggccaaggcgggtggatcacgaggtcaggagttcgagaccagcctggctaagatggtgaaacccgtctctactaaaaataaggaaaattagctgggcgtggtggcaggcgcctgtaatcccagctacccaggaggttgaggtaggagaatcgcttgaacctgggaggcagaggttgcagtgagccgagatcgcgccactgcactccagcctgcgctacagagtgagactccatctcaaaaaaaaaaaaaaacaaaacctattaagaaatatttgaacacaggcagacactgtgccagatgacattggtgccacataaatgagcatgattacatccctgaaagagcttctagtcaagtggtgatgtgaaaaaaatgccttcagataattttcaatttaatgacactggaagtaaatagtagattttacaggaactcagttgattatctgttccctgccttaaacctaaaacaaaagatgattatttaacattcagctgaaaaactaaatgtcctcatcatggtgaatacacacacatttgtttcagatagtcccactcggttgcccaggctggagtgcagtgatgcaatctcagcgcgcgcgtacacacacacacacacacacacacacacccacgtttgagacagtcccactctgttgccctggctggattgcagtggtacaatctcagctcactgcattctccacttcctgggctgaagcatcctcccacttcagcctcatgaatagctggggctacaggagtgcaccaccatgcctggctaatttttgcatttttttgtagagacgaggttttgccatgttgtccagactggtctcagaactcctgggctcaagtggtccacctgccttgacctcccaaagtgctgggattacagccatgagccaccatgcctggcctatatttttgtgtgtatgtgtgtgtgattaggcccacatatatagtctgtgttgtgtgtcattaagcccacatatatatgtatatgtattttgcgtgtgtatggcattaaacccacaaactatgccagaagtaatatcttgataacatcctgtttttcctaggtgtgaagatgccttaagaaaaaataagagcttaattgggccggatcaaaaggagtatcaaagggaactggagagaaactatcatcgccttaaagaggccctacagccactgatcaacagaaagatccctcagttatacaaggcagtattgcctgtcacctgccacagagattccttcagtcgaatgagccttcgcaaaatggatctctaaactgaatgcacttgttttattcatctgcaaagagccatgtattcaacatcgagtgtgaaaagatctattggaaaacaacatggaatggaattctggaaattattattcattgaagaatgcagtggccaagaaaatatcaaatgtagattgttaacgcttgagaatcatggctatggtttctaatgttctggtaacaagctgttatcttttaagacattttaatgactcaaaggtacactatacatttaccattatttataccatagctaaggttaaaaatttattcactttaagttcgtattttttaatttatattaccatttatagattcattttggaaccattttaaatgtagtaatgcttattttaaaggtactattaaatatgtgaatgtttacactaattttaccgagtgggacttcaaaatttttattattgacaatggcagagaacaattaaagggttgactcaagaactagttccaaacctagcagaataaaaatcatagatagccccaaattaatgagtttggtaactgtttcaaagttattttccatttacatacccaaaacaggaatttagaattgcagaactttacttagtaaaacctttgtgtaaaataatttaaatacggggataactaataccagtgacaacaccttaacttgattaaatcttattacacca

SEQ ID NO: 1556 - protein, 73 aa, Homo sapiens
MQSQRARTHTHTHTHTPTFETVPLCCPGWIAVVQSQLTAFSTSWAEASSHFSLMNSWGYRSAPPCLANFCIFL

SEQ ID NO: 1557 - DNA, 6814 bp, Homo sapiens
tttggaagattacctcattactcatcctttggctgtggattctgggcctttacgggatttgattgaatttcctccagatgatattgaagttgtttatagtcctcgggactgcagaactcttgtttcagctgtacctgaagaaagtgaaatggatccacatgttagagactgtataagaagttatacagaagactgggcaattgtcatcagaaaatatcataaattgggaacaggatttaatcccaatacattagataaacagaaagaaaggcaaaaaggtttgccaaaacaagtttttgaatctgatgaagctccagatggcaacagctaccaggatgatcaagatgaccttaaaagacgttcaatgtcaatagatgataccccaaggggtagctgggcctgtagtatctttgacttgaaaaattcacttcctgatgctttgcttcccaatttacttgatcgaactccaaatgaagaaatagaccgtcagaatgatgaccaaaggaaatcaaaccgtcacaaagaactttttgctttgcatccatcaccagatgaggaagaaccaatagaacggcttagtgttcctgatatacccaaagaacattttggtcaaagacttcttgtaaaatgcttatcactcaagtttgaaattgaaattgaacccatttttgcaagtttggctttatatgatgtcaaggaaaagaaaaagatttcagaaaacttttattttgaccttaattctgagcagatgaaagggttgttacgtccacatgtaccacctgctgccattactaccctggcaagatcagcaattttttctatcacttatccttcccaagatgtttttcttgtaataaagctagaaaaagtcctacagcaaggagacattggagagtgtgcagaaccatatatgattttcaaagaagcagatgccaccaagaataaagaaaaactggagaaactgaagagtcaagcagatcagttttgccaaagacttgggaaatatcgcatgccttttgcttggactgcaatccatttaatgaatattgttagcagtgctgggagtttggaaagagattctacagaagtagaaatcagtactggagaacgaaaagggtcttggtcagagaggaggaattctagtattgttggcagacgatcacttgaaaggacaacaagtggagatgatgcttgtaacttgacgagctttcgaccagctactctcacagtgacaaatttttttaagcaggaaggagaccgcttaagtgatgaagatctctacaaattccttgctgatatgagaaggccatcttctgtcttacggcgactaagacctattacagctcagctcaagatagacatttctcccgcacctgaaaatccccattattgcctaactccggagctgcttcaagtgaagctttaccctgacagtagagttagacctaccagagaaatcttagagtttcccgcaagggatgtttatgttccaaacactacttacagaaatcttctctacatataccctcagagtcttaattttgccaatcgtcaaggttctgctagaaatataacagtgaaagtccagtttatgtatggagaggatccaagcaatgccatgccggtaatctttggtaaatctagctgttcagaattttcaaaggaagcctatacagccgtagtatatcataacaggtctcctgattttcatgaagaaatcaaggttaagcttcctgctactttaactgaccatcatcacttgctttttactttttatcatgttagttgtcaacaaaaacaaaatactcctcttgaaacaccagttggatatacatggataccaatgcttcagaatggacggttgaagactggccagttttgcttgccagtctcattggaaaaaccaccacaggcttattctgtactgtctcctgaggttcctctacctggcatgaaatgggtagataatcacaaaggtgtttttaatgttgaagttgttgctgtttcgtctatccatacacaagatccttatcttgacaaattttttgctctggtcaatgctctggatgaacacctgttcccagtccgaattggggacatgcgaatcatggaaaataacttagaaaatgaattgaagagcagtatttcagcactgaattcatcccagctggaaccagtggtccgatttcttcatcttctgctagataaactgatacttttagttattagacctcctgtcattgctggccaaatagttaacctaggtcaagcatcttttgaagccatggcatcaattataaatcgacttcacaaaaacttggaaggaaatcatgaccagcatggcagaaacagccttcttgcatcatatattcattatgttttccgcctaccaaatacttaccctaattcatcatcaccaggtcctgggggtttgggaggatcagtgcattatgccacaatggctagatctgcggtgagacctgcaagccttaatttaaatcgttctcgaagccttagtaatagcaatccagatatatctgggactcccacgtcaccagatgatgaagttcgatcaatcatcgggagtaaggctatggatcgaagttgtaatcgtatgtcttcgcacacagagacgtcaagtttcttacaaacattaacgggacgcttaccaactaaaaagctttttcacgaggagctggctttgcagtgggttgtttgcagtggcagcgttcgggaatcagctttgcaacaagcctggttcttttttgaattaatggtaaagagcatggtgcaccatttatactttaatgataaacttgaggctccaaggaaaagtcgttttccagaacgtttcatggatgacattgcagctcttgtcagcacgattgctagtgatatagtttcacgatttcagaaggacacagaaatggttgagagactcaatacaagccttgcattctttctcaatgatctgttgtctgttatggacagaggatttgtttttagccttataaagtcctgctataaacaggtgtcttcaaagctttactcattaccgaatcccagtgttctggtgtccttgaggctggattttctacgaatcatctgcagtcatgagcactatgttacattaaacttaccctgcagcttacttactccacctgcatctccatcaccttctgtttcttctgcaacatctcagagttctggattttctacgaatgtacaagaccaaaagattgcaaatatgtttgaattatccgtgcctttccgccaacagcattatttggcaggacttgtgttaacagagctggctgtcattttagaccctgatgctgaaggactgtttggattgcataagaaagtcatcaatatggtacacaatttactctccagtcacgactcagacccgcggtactctgaccctcagataaaggctcgagtggccatgttgtatctacctctgattggtattatcatggaaactgtacctcagctgtatgattttacagaaactcacaatcaacgaggaagaccaatttgtatagccactgatgattatgaaagtgagagcggaagtatgataagccagaccgttgccatggcaatcgcagggacatcggtccctcaactaacaaggcctggcagtttcctcctcacgtcaacgagtggcaggcaacacactaccttttcagcagaatcaagtcgaagccttttgatctgtctactttgggttctcaaaaatgcagatgaaacagttctacagaagtggtttacagatctctcagtcttgcagctaaaccggctattagatctgctttatctctgtgtgtcttgctttgagtataaagggaaaaaagtgtttgaacgaatgaatagcttgacctttaagaaatcaaaagacatgagagcaaagcttgaagaagctattcttgggagcataggtgccaggcaagaaatggtacggcgaagccgaggacagctcgagagaagcccatctggaagtgcctttggaagtcaagaaaatttgaggtggaggaaagatatgactcactggcgtcaaaacacagagaagcttgacaaatcaagagcagagattgaacacgaagcactgattgatggaaacctggctacagaagcaaacctaatcattttagatacattagagattgttgttcagaccgtttctgtaacggaatccaaagagagcattcttggtggagtgctaaaagtgctactacacagcatggcctgtaaccaaagtgcagtttatctacaacactgttttgctacacagagagccttggtttcaaagtttcctgaactcttatttgaagaagagacagagcagtgtgctgatttatgcctcaggcttctccgacactgtagcagtagcatcggtacaatacggtcacacgccagtgcctccctttacctactaatgaggcaaaactttgagattgggaataactttgccagggttaaaatgcaggtaacaatgtcactatcctccttggtgggcacatctcagaattttaatgaagaattcttaagacgttctctaaagactatattgacatatgctgaagaagatctggaattgagggaaacaacatttcctgatcaggtccaggatctggttttcaatctccatatgattctttctgatactgtgaaaatgaaggaacaccaggaggatcctgaaatgttgattgatctaatgtacagaattgccaagggttaccagacctctccagatctgcgattgacctggttgcagaacatggcaggcaagcactcagaacgaagcaatcatgctgaagctgcacagtgtctagtccactcagcagcacttgttgctgaatatttgagcatgctggaggaccggaaatatcttcctgtgggatgtgtaacatttcagaatatttcatctaatgttttagaagaatctgcggtctcagatgatgtggtatctccagatgaagaaggtatctgctctggaaaatactttactgagtcaggacttgtgggattactggaacaagcagctgcttccttctctatggctggcatgtatgaagcagttaatgaagtttacaaagtacttattcctattcatgaagctaatcgggatgcaaagaaactatccacaattcatggtaaacttcaagaagcattcagcaaaattgttcatcagagtactggctgggagcggatgtttggcacctattttcgtgttggtttttatggaaccaagttcggggatttggatgaacaagaatttgtttacaaggagcctgcaataaccaaacttgcagagatatctcacagattggagggattttacggagaaagatttggagaggatgtggttgaagtaatcaaagactctaatcctgtagacaagtgtaaattagatcctaacaaggcatatattcagattacctatgtggagccatactttgacacatatgagatgaaggacagaatcacctatttcgacaaaaattacaatcttcgtcgattcatgtactgtacaccctttactttagatggccgtgcccatggggaacttcatgaacaattcaaaaggaagaccattctgactacgtctcatgcctttccttatattaaaacaagggtcaatgtcactcataaagaagagatcatcttaacaccaattgaagttgctattgaggacatgcagaaaaagacacaggagttggcatttgcaacacatcaggatcccgcagaccccaaaatgcttcagatggtactccagggatctgtaggcaccacagtgaatcaggggcctttggaagttgcccaggtttttctgtctgaaatacctagtgacccaaagctcttcagacatcataataaactgcgactctgctttaaagattttactaaaaggtgtgaagatgccttaagaaaaaataagagcttaattgggccggatcaaaaggagtatcaaagggaactggagagaaactatcatcgccttaaagaggccctacagccactgatcaacagaaagatccctcagttatacaaggcagtattgcctgtcacctgccacagagattccttcagtcgaatgagccttcgcaaaatggatctctaaactgaatgcacttgttttattcatctgcaaagagccatgtattcaacatcgagtgtgaaaagatctattggaaaacaacatggaatggaattctggaaattattattcattgaagaatgcagtggccaagaaaatatcaaatgtagattgttaacgcttgagaatcatggctatggtttctaatgttctggtaacaagctgttatcttttaagacattttaatgactcaaaggtacactatacatttaccattatttataccatagctaaggttaaaaatttattcactttaagttcgtattttttaatttatattaccatttatagattcattttggaaccattttaaatgtagtaatgcttattttaaaggtactattaaatatgtgaatgtttacactaattttaccgagtgggacttcaaaatttttattattgacaatggcagagaacaattaaagggttgactcaagaactagttccaaacctagcagaataaaaatcatagatagccccaaattaatgagtttggtaactgtttcaaagttattttccatttacatacccaaaacaggaatttagaattgcagaactttacttagtaaaacctttgtgtaaaataatttaaatacggggataactaataccagtgacaacaccttaacttgattaaatcttattacacca

SEQ ID NO: 1558 - protein, 1992 aa, Homo sapiens
MDPHVRDCIRSYTEDWAIVIRKYHKLGTGFNPNTLDKQKERQKGLPKQVFESDEAPDGNSYQDDQDDLKRRSMSIDDTPRGSWACSIFDLKNSLPDALLPNLLDRTPNEEIDRQNDDQRKSNRHKELFALHPSPDEEEPIERLSVPDIPKEHFGQRLLVKCLSLKFEIEIEPIFASLALYDVKEKKKISENFYFDLNSEQMKGLLRPHVPPAAITTLARSAIFSITYPSQDVFLVIKLEKVLQQGDIGECAEPYMIFKEADATKNKEKLEKLKSQADQFCQRLGKYRMPFAWTAIHLMNIVSSAGSLERDSTEVEISTGERKGSWSERRNSSIVGRRSLERTTSGDDACNLTSFRPATLTVTNFFKQEGDRLSDEDLYKFLADMRRPSSVLRRLRPITAQLKIDISPAPENPHYCLTPELLQVKLYPDSRVRPTREILEFPARDVYVPNTTYRNLLYIYPQSLNFANRQGSARNITVKVQFMYGEDPSNAMPVIFGKSSCSEFSKEAYTAVVYHNRSPDFHEEIKVKLPATLTDHHHLLFTFYHVSCQQKQNTPLETPVGYTWIPMLQNGRLKTGQFCLPVSLEKPPQAYSVLSPEVPLPGMKWVDNHKGVFNVEVVAVSSIHTQDPYLDKFFALVNALDEHLFPVRIGDMRIMENNLENELKSSISALNSSQLEPVVRFLHLLLDKLILLVIRPPVIAGQIVNLGQASFEAMASIINRLHKNLEGNHDQHGRNSLLASYIHYVFRLPNTYPNSSSPGPGGLGGSVHYATMARSAVRPASLNLNRSRSLSNSNPDISGTPTSPDDEVRSIIGSKAMDRSCNRMSSHTETSSFLQTLTGRLPTKKLFHEELALQWVVCSGSVRESALQQAWFFFELMVKSMVHHLYFNDKLEAPRKSRFPERFMDDIAALVSTIASDIVSRFQKDTEMVERLNTSLAFFLNDLLSVMDRGFVFSLIKSCYKQVSSKLYSLPNPSVLVSLRLDFLRIICSHEHYVTLNLPCSLLTPPASPSPSVSSATSQSSGFSTNVQDQKIANMFELSVPFRQQHYLAGLVLTELAVILDPDAEGLFGLHKKVINMVHNLLSSHDSDPRYSDPQIKARVAMLYLPLIGIIMETVPQLYDFTETHNQRGRPICIATDDYESESGSMISQTVAMAIAGTSVPQLTRPGSFLLTSTSGRQHTTFSAESSRSLLICLLWVLKNADETVLQKWFTDLSVLQLNRLLDLLYLCVSCFEYKGKKVFERMNSLTFKKSKDMRAKLEEAILGSIGARQEMVRRSRGQLERSPSGSAFGSQENLRWRKDMTHWRQNTEKLDKSRAEIEHEALIDGNLATEANLIILDTLEIVVQTVSVTESKESILGGVLKVLLHSMACNQSAVYLQHCFATQRALVSKFPELLFEEETEQCADLCLRLLRHCSSSIGTIRSHASASLYLLMRQNFEIGNNFARVKMQVTMSLSSLVGTSQNFNEEFLRRSLKTILTYAEEDLELRETTFPDQVQDLVFNLHMILSDTVKMKEHQEDPEMLIDLMYRIAKGYQTSPDLRLTWLQNMAGKHSERSNHAEAAQCLVHSAALVAEYLSMLEDRKYLPVGCVTFQNISSNVLEESAVSDDVVSPDEEGICSGKYFTESGLVGLLEQAAASFSMAGMYEAVNEVYKVLIPIHEANRDAKKLSTIHGKLQEAFSKIVHQSTGWERMFGTYFRVGFYGTKFGDLDEQEFVYKEPAITKLAEISHRLEGFYGERFGEDVVEVIKDSNPVDKCKLDPNKAYIQITYVEPYFDTYEMKDRITYFDKNYNLRRFMYCTPFTLDGRAHGELHEQFKRKTILTTSHAFPYIKTRVNVTHKEEIILTPIEVAIEDMQKKTQELAFATHQDPADPKMLQMVLQGSVGTTVNQGPLEVAQVFLSEIPSDPKLFRHHNKLRLCFKDFTKRCEDALRKNKSLIGPDQKEYQRELERNYHRLKEALQPLINRKIPQLYKAVLPVTCHRDSFSRMSLRKMDL

SEQ ID NO: 1559 - DNA, 6528 bp, Homo sapiens
tttggaagattacctcattactcatcctttggctgtggattctgggcctttacgggatttgattgaatttcctccagatgatattgaagttgtttatagtcctcgggactgcagaactcttgtttcagctgtacctgaagaaagtgaaatggatccacatgttagagactgtataagaagttatacagaagactgggcaattgtcatcagaaaatatcataaattgggaacaggatttaatcccaatacattagataaacagaaagaaaggcaaaaaggtttgccaaaacaagtttttgaatctgatgaagctccagatggcaacagctaccaggatgatcaagatgaccttaaaagacgttcaatgtcaatagatgataccccaaggggtagctgggcctgtagtatctttgacttgaaaaattcacttcctgatgctttgcttcccaatttacttgatcgaactccaaatgaagaaatagaccgtcagaatgatgaccaaaggaaatcaaaccgtcacaaagaactttttgctttgcatccatcaccagatgaggaagaaccaatagaacggcttagtgttcctgatatacccaaagaacattttggtcaaagacttcttgtaaaatgcttatcactcaagtttgaaattgaaattgaacccatttttgcaagtttggctttatatgatgtcaaggaaaagaaaaagatttcagaaaacttttattttgaccttaattctgagcagatgaaagggttgttacgtccacatgtaccacctgctgccattactaccctggcaagatcagcaattttttctatcacttatccttcccaagatgtttttcttgtaataaagctagaaaaagtcctacagcaaggagacattggagagtgtgcagaaccatatatgattttcaaagaagcagatgccaccaagaataaagaaaaactggagaaactgaagagtcaagcagatcagttttgccaaagacttgggaaatatcgcatgccttttgcttggactgcaatccatttaatgaatattgttagcagtgctgggagtttggaaagagattctacagaagtagaaatcagtactggagaacgaaaagggtcttggtcagagaggaggaattctagtattgttggcagacgatcacttgaaaggacaacaagtggagatgatgcttgtaacttgacgagctttcgaccagctactctcacagtgacaaatttttttaagcaggaaggagaccgcttaagtgatgaagatctctacaaattccttgctgatatgagaaggccatcttctgtcttacggcgactaagacctattacagctcagctcaagatagacatttctcccgcacctgaaaatccccattattgcctaactccggagctgcttcaagtgaagctttaccctgacagtagagttagacctaccagagaaatcttagagtttcccgcaagggatgtttatgttccaaacactacttacagaaatcttctctacatataccctcagagtcttaattttgccaatcgtcaaggttctgctagaaatataacagtgaaagtccagtttatgtatggagaggatccaagcaatgccatgccggtaatctttggtaaatctagctgttcagaattttcaaaggaagcctatacagccgtagtatatcataacaggtctcctgattttcatgaagaaatcaaggttaagcttcctgctactttaactgaccatcatcacttgctttttactttttatcatgttagttgtcaacaaaaacaaaatactcctcttgaaacaccagttggatatacatggataccaatgcttcagaatggacggttgaagactggccagttttgcttgccagtctcattggaaaaaccaccacaggcttattctgtactgtctcctgaggttcctctacctggcatgaaatgggtagataatcacaaaggtgtttttaatgttgaagttgttgctgtttcgtctatccatacacaagatccttatcttgacaaattttttgctctggtcaatgctctggatgaacacctgttcccagtccgaattggggacatgcgaatcatggaaaataacttagaaaatgaattgaagagcagtatttcagcactgaattcatcccagctggaaccagtggtccgatttcttcatcttctgctagataaactgatacttttagttattagacctcctgtcattgctggccaaatagttaacctaggtcaagcatcttttgaagccatggcatcaattataaatcgacttcacaaaaacttggaaggaaatcatgaccagcatggcagaaacagccttcttgcatcatatattcattatgttttccgcctaccaaatacttaccctaattcatcatcaccaggtcctgggggtttgggaggatcagtgcattatgccacaatggctagatctgcggtgagacctgcaagccttaatttaaatcgttctcgaagccttagtaatagcaatccagatatatctgggactcccacgtcaccagatgatgaagttcgatcaatcatcgggagtaaggctatggatcgaagttgtaatcgtatgtcttcgcacacagagacgtcaagtttcttacaaacattaacgggacgcttaccaactaaaaagctttttcacgaggagctggctttgcagtgggttgtttgcagtggcagcgttcgggaatcagctttgcaacaagcctggttcttttttgaattaatggtaaagagcatggtgcaccatttatactttaatgataaacttgaggctccaaggaaaagtcgttttccagaacgtttcatggatgacattgcagctcttgtcagcacgattgctagtgatatagtttcacgatttcagaaggacacagaaatggttgagagactcaatacaagccttgcattctttctcaatgatctgttgtctgttatggacagaggatttgtttttagccttataaagtcctgctataaacaggtgtcttcaaagctttactcattaccgaatcccagtgttctggtgtccttgaggctggattttctacgaatcatctgcagtcatgagcactatgttacattaaacttaccctgcagcttacttactccacctgcatctccatcaccttctgtttcttctgcaacatctcagagttctggattttctacgaatgtacaagaccaaaagattgcaaatatgtttgaattatccgtgcctttccgccaacagcattatttggcaggacttgtgttaacagagctggctgtcattttagaccctgatgctgaaggactgtttggattgcataagaaagtcatcaatatggtacacaatttactctccagtcacgactcagacccgcggtactctgaccctcagataaaggctcgagtggccatgttgtatctacctctgattggtattatcatggaaactgtacctcagctgtatgattttacagaaactcacaatcaacgaggaagaccaatttgtatagccactgatgattatgaaagtgagagcggaagtatgataagccagaccgttgccatggcaatcgcagggacatcggtccctcaactaacaaggcctggcagtttcctcctcacgtcaacgagtggcaggcaacacactaccttttcagcagaatcaagtcgaagccttttgatctgtctactttgggttctcaaaaatgcagatgaaacagttctacagaagtggtttacagatctctcagtcttgcagctaaaccggctattagatctgctttatctctgtgtgtcttgctttgagtataaagggaaaaaagtgtttgaacgaatgaatagcttgacctttaagaaatcaaaagacatgagagcaaagcttgaagaagctattcttgggagcataggtgccaggcaagaaatggtacggcgaagccgaggacagctcgagagaagcccatctggaagtgcctttggaagtcaagaaaatttgaggtggaggaaagatatgactcactggcgtcaaaacacagagaagcttgacaaatcaagagcagagattgaacacgaagcactgattgatggaaacctggctacagaagcaaacctaatcattttagatacattagagattgttgttcagaccgtttctgtaacggaatccaaagagagcattcttggtggagtgctaaaagtgctactacacagcatggcctgtaaccaaagtgcagtttatctacaacactgttttgctacacagagagccttggtttcaaagtttcctgaactcttatttgaagaagagacagagcagtgtgctgatttatgcctcaggcttctccgacactgtagcagtagcatcggtacaatacggtcacacgccagtgcctccctttacctactaatgaggcaaaactttgagattgggaataactttgccagggttaaaatgcaggtaacaatgtcactatcctccttggtgggcacatctcagaattttaatgaagaattcttaagacgttctctaaagactatattgacatatgctgaagaagatctggaattgagggaaacaacatttcctgatcaggtccaggatctggttttcaatctccatatgattctttctgatactgtgaaaatgaaggaacaccaggaggatcctgaaatgttgattgatctaatgtacagaattgccaagggttaccagacctctccagatctgcgattgacctggttgcagaacatggcaggcaagcactcagaacgaagcaatcatgctgaagctgcacagtgtctagtccactcagcagcacttgttgctgaatatttgagcatgctggaggaccggaaatatcttcctgtgggatgtgtaacatttcagaatatttcatctaatgttttagaagaatctgcggtctcagatgatgtggtatctccagatgaagaaggtatctgctctggaaaatactttactgagtcaggacttgtgggattactggaacaagcagctgcttccttctctatggctggcatgtatgaagcagttaatgaagtttacaaagtacttattcctattcatgaagctaatcgggatgcaaagaaactatccacaattcatggtaaacttcaagaagcattcagcaaaattgttcatcagagtactggctgggagcggatgtttggcacctattttcgtgttggtttttatggaaccaagttcggggatttggatgaacaagaatttgtttacaaggagcctgcaataaccaaacttgcagagatatctcacagattggagggattttacggagaaagatttggagaggatgtggttgaagtaatcaaagactctaatcctgtagacaagtgtaaattagatcctaacaaggcatatattcagattacctatgtggagccatactttgacacatatgagatgaaggacagaatcacctatttcgacaaaaattacaatcttcgtcgattcatgtactgtacaccctttactttagatggccgtgcccatggggaacttcatgaacaattcaaaaggaagaccattctgactacgtctcatgcctttccttatattaaaacaagggtcaatgtcactcataaagaagagatcatcttaacaccaattgaagttgctattgaggacatgcagaaaaagacacaggagttggcatttgcaacacatcaggatcccgcagaccccaaaatgcttcagatggtactccagggatctgtaggcaccacagtgaatcaggggcctttggaagttgcccaggtttttctgtctgaaatacctagtgacccaaagctcttcagacatcataataaactgcgactctgctttaaagattttactaaaaggtgtgaagatgccttaagaaaaaataagagcttaattgggccggatcaaaaggagtatcaaagggaactggagagaaactatcatcgccttaaagaggccctacagccactgatcaacagaaagatccctcagttatacaaggcagtattgcctgtcacctgccacagagattccttcagtcgaatgagccttcgcaaaatggatctctaaactgaatgcacttgttttattcatctgcaaagagccatgtattcaacatcgagtgtgaaaagatctattggaaaacaacatggaatggaattctggaaattattattcattgaagaatgcagtggccaagaaaatatcaaatgtagattgttaacgcttgagaatcatggctatggtttctaatgttctggtaacaagctgttatcttttaagacattttaatgactcaaaggtacactatacatttaccattatttataccatagctaaggttaaaaatttattcactttaagttcgtattttttaatttatattaccatttatagattcattttggaaccattttaaatgtagtaatgcttattttaaaggtactattaaatatgtgaatgtttacact

SEQ ID NO: 1560 - protein, 1992 aa, Homo sapiens; identical to SEQ ID NO: 1558

SEQ ID NO: 1561 - DNA, 600 bp, Homo sapiens
ttcatataaaatgtttctttttctttattgtagggattttacggagaaagatttggagaggatgtggttgaagtaatcaaagactctaatcctgtagacaagtgtaaattagatcctaacaaggcatatattcagattacctatgtggagccatactttgacacatatgagatgaaggacagaatcacctatttcgacaaaaattacaatcttcgtcgattcatgtactgtacaccctttactttagatggccgtgcccatggggaacttcatgaacaattcaaaaggaagaccattctgactacgtctcatgcctttccttatattaaaacaagggtcaatgtcactcataaagaagaggtaagtccattaatgggcaaacagcattagtgaagcaaatacattcaagccatgtaacaacaactcagatgtaccagaagatatgtaccatcccttataccataacatattagaactttacccatttttgagtcctcaattttttacttcttttctaagaccctaattcacccccagctttttctttaaaaggttgattttttttttttcatttaggaatccaagtttggaattttattg

SEQ ID NO: 1562 - protein, 72 aa, Homo sapiens
MKDRITYFDKNYNLRRFMYCTPFTLDGRAHGELHEQFKRKTILTTSHAFPYIKTRVNVTHKEEVSPLMGKQH

SEQ ID NO: 1563 - DNA, 1049 bp, Homo sapiens
ggttgatctcaaactcctggccccaagcaatccacctgcctcagcctcccaaagtgctaggattataggaataagccaccatgcccagcctaaaagcatgttttgaactcttctttttttatgattcatatttaattatttttagcagaaagagaaatgttaaatttctgtatgaaaatttttataaccactttctatgttatgtatgtatatatacatatatatttttgtaattatgtttgtaccagcctggacaacatagtgagaccatctctacagaaaattagaaaaattggccaggtatggtgttgtgcatatgtactcccagctactcgggaggcagaggcaggaggattgcttcaccccaggcatcaaggctgcagtgagctatgatggtgccattgcactctagcctggatgacagagtgagaccctatcttagggtcagggttaaaaaagaaaagtttgttcagttatcaaatagtgacgaatttgtattcagaagtacactaatacaagtttaaatttttcagaaaaatcaatccccagtgataacatagtcatgtgatacttttttttccattcaaagatcacaacatatttctttaaagaacaccactactctacctgggcaacaaaacgagaccctgtctcaaaaaaaaaaaaaagaaatcagaacattgtaggtataaaacatccatgagcctttacctcagaaaggtaaagttagatatgaagaaagttaaggaaaacatagtaaatgggaagaatcttagtatctctaagaggagatactttctggtagttagtgactccctgatgactggtatagacccataactgagcacctgataatatatcccataccactgattttttttctgccccttatgctacttttgagaagaaaaagaaagatatgaaagcccagcatggtggctgacacctgtaatcccaacattatgggaggccaaggcgcgatcctcgcttgaggcctgaagtttgaaaccagtctgggcaacactgagatctcatctctacccaaaaaa

SEQ ID NO: 1564 - protein, 78 aa, Homo sapiens [sequence omitted]

SEQ ID NO: 1565 - DNA, 1566 bp, Homo sapiens
ttctaatggtagattgaaagtccaaatgcactttttccaggtggcatctttggatcttctgtgtctcttcttttaagaacaatgcaaatgtacttattgattatcaaaaacgaggatttttttaagtattcataacacacatttaacaccttggtgtcctgggccccagagttcctttgaaggcccataccaatattttcagtgtaaaactcagtcttttcagaagaaaatacagtatatgaatgttttacgataacattaattacctgattttcaatacagttatgactgaagaatgatatttctaagggcacattttgaaaactccataaatcgtattgtattaacaccttaatagatacaatagtaaaacttaagaatttttctctgtcatatgaccctctgttcctgcagttttggggttcattaaaagcacaaataaaacaatttaatctctttgaaataaagtaataaaagtaccttttagaagttttctttttcccttgtgtataaaacttctctatgtttctgtaatgaacacataaatttccatactttttcccttaactggttattttcttaaaagtcagaatttaatatggcgtatttcttttttgcccctcctgccccccccaccaactgatattatccattccataggccacagttatttctctaggcctgcatagcgacattttcatactactttaaaactaagtaggttgtgcacagtatcaaaaacctttctaggtaaactctgagcgagctatctaaactccctcccagcttgggaagcacatactaatggagaagaatttctgttctaattagaattgccaagggttaccagacctctccagatctgcgattgacctggttgcagaacatggcaggcaagcactcagaacgaagcaatcatgctgaagctgcacagtgtctagtccactcagcagcacttgttgctgaatatttgagcatgctggaggaccggaaatatcttcctgtgggatgtgtaacatttcagaatatttcatctaatgttttagaagaatctgcggtctcagatgatgtggtatctccagatgaagaaggtatctgctctggaaaatactttactgagtcaggacttgtgggattactggaacaagcagctgcttccttctctatggtagatgactcttgttaattcttttcccacagtttcatacctctaattatcaatgacatgtgtatttattctctctggcttatgaccctacttttctttaaagataatttattctggacccagtatggtggctcatgcctgtaatctcagcactttgagaggctaagacgggaggattgcttgaatccaggagttcaagaccagcatggggaacatagtgagataccgtctctacaaaaaattaaaaattcaccaggcatggtggctcatgcctgtggtcccagctacttgagaggctgaggtgggaggattgcttgagcccaagaggttgaggctgcagtgagccatgattatgctgctgcactccagcctggacaacagagtaaaaccctgtctcc

SEQ ID NO: 1566 - protein, 99 aa, Homo sapiens
MAGKHSERSNHAEAAQCLVHSAALVAEYLSMLEDRKYLPVGCVTFQNISSNVLEESAVSDDVVSPDEEGICSGKYFTESGLVGLLEQAAASFSMVDDSC

SEQ ID NO: 1567 - DNA, 3209 bp, Homo sapiens
gcagcttacaccgcggtccccttatttggatctgcgggaatgtgggctggagaggtcctgccgtggtaccagcctccagcctgcccccaggactgcccctgacccaggcgcgcccgctgctcggtggcaggagggccggcggagcgccatggcctgcatcctgaagagaaagtctgtgattgctgtgagcttcatagcagcgttccttttcctgctggttgtgcgtcttgtaaatgaagtgaatttcccattgctactaaactgctttggacaacctggtacaaagtggataccattctcctacacatacaggcggccccttcgaactcactatggatacataaatgtgaagacacaagagcctttgcaactggactgtgacctttgtgccatagtgtcaaactcaggtcagatggttggccagaaggtgggaaatgagatagatcgatcctcctgcatttggagaatgaacaatgcccccaccaaaggttatgaagaagatgtcggccgcatgaccatgattcgagttgtgtcccataccagcgttcctcttttgctaaaaaaccctgattattttttcaaggaagcgaatactactatttatgttatttggggacctttccgcaatatgaggaaagatggcaatggcatcgtttacaacatgttgaaaaagacagttggtatctatccgaatgcccaaatatacgtgaccacagagaagcgcatgagttactgtgatggagtttttaagaaggaaactgggaaggacagagtccagtctggctcatatctcagcacagggtggtttaccttccttctggccatggacgcctgttatggcattcacgtctacgggatgataaatgacacctactgcaagacagaagggtatagaaaagtcccctaccattattatgaacaaggaagagatgagtgtgatgaatattttcttcatgaacatgccccatatgggggtcataggtttatcactgaaaagaaagtgtttgctaaatgggccaagaagcacaggataatatttacacatccaaactggacattgtcttgataatggttttcctgatcttgccgcatcacttaatgtgatccccatactgcaactgtgatgctgatgatgctaatggagatgatggtaatgataaagacaacaacaatgattatcaagttcctgtacactctcagatgtggatggtgactctgctagtaatttaaacttggcatttcatggaggatggttgtgctcatgatgttctttctggaggttcaacactacgtaccgcactttataatttaactggaattgagatgaaggccagtgacatgacaactgtgacctaagaaatgggaagattatctttcaagatagctgcctagaattgttcaacagtgagtaacttccagaagccaaaagagtttggcttcatgaggcaaggtgattgactcaatggcttgttgaatctcagcagttccgccatcttgaagaatgattgattgtcaaacactgacccaagaactgctatcagggtgcaagtatcttactacttagcctaaggatgggaaaatatctcttcctaatataccatctttctacagtatttcctacagctaaagcctcaggccattgcctaattaacaatgaagatttcatggacatcctacacttcaggattacttgactatctcaaacacataaatcaaaatgggccaagtagcaaatcttgatgaatttccactcttaccatccattcttactaccaacagtataactgaacatgtgattagaatgatctatattaatgtttagttatttttggttgagtgctaaatatttcagaaggctacttaacatgtaagataccaacttcaacactgtaataacatatactgtgaaaacattcctaaaaagtaaccaaagggtttgctaactctgcttcaacatccaacaacacaaaactatatgatttttaaaatcatgaaatagagacagcaaagcatatttttacatcaatttgtatcctatcatacttcataatatatatttgtatattcaaatttctattttataggcccaaggtgtgtttctccaaacattacattctcattgccaagtgccagctgttacacatggagaggaaatgattccttatattaaacctgaccagagctttttgccttctagggatttatttttcccatagtgtatcagttgttatgccacaataacaacaataataatgttcttaatgtccaaagtgctttgtcatttagagtcctttaacatctgttataccatgtgatgcccttgaacaccccattgggctattgtctgtgtattctgctctctttagcagatgatctgtaatttggtcattgttctgttatattccagattgctctacttgctaatatttgtatagaatagaatttatgtaaactagtaaccagttgatctctgtgccaaatacattatatcaggattacacaaaaagtatcacaaaggatggtcttggccatatgctagggcccctgtgaaaataagtagttttgagaagtttttctatatacgtatatatacacgtgtggttctatttaggtggggaaaaaatgaaaaagcagggacaacaggaggaaatgaaggcagagaaatatagtttcctttcctaggattgagacaattctatttttcatatactcgttgctcattaaatagtaaagggttgatttgctgcaagagtagctgagaattcaaaaacatccttgcagaatgattcaaaagacaaaagccaggctcaacttatagaatgttttggaaactggaagtaatgatacatttcacttcagaagcacttgtaggtctttactagtgctaagtattatggtgagctatcattaaagtgtgccatcttggataaaggccttttgcctactctcttctgcaattttgacacctcaatattcacacccataaacattactaagccccagttctatcgttggaaggagttgttattcttttgttgttcccttatgcaatttttaattctatgaatgttaagtttttttgagctaatgatagatagaaatgcccactcaaagaaaaataaacagagacaaatgttaaaattgccatacagactgtttttccccctgttgtttcactttaaaataaaaagaaatccttgattaatcag

SEQ ID NO: 1568 - protein, 305 aa, Homo sapiens
MACILKRKSVIAVSFIAAFLFLLVVRLVNEVNFPLLLNCFGQPGTKWIPFSYTYRRPLRTHYGYINVKTQEPLQLDCDLCAIVSNSGQMVGQKVGNEIDRSSCIWRMNNAPTKGYEEDVGRMTMIRVVSHTSVPLLLKNPDYFFKEANTTIYVIWGPFRNMRKDGNGIVYNMLKKTVGIYPNAQIYVTTEKRMSYCDGVFKKETGKDRVQSGSYLSTGWFTFLLAMDACYGIHVYGMINDTYCKTEGYRKVPYHYYEQGRDECDEYFLHEHAPYGGHRFITEKKVFAKWAKKHRIIFTHPNWTLS

SEQ ID NO: 1569 - DNA, 1119 bp, Homo sapiens
ggtccccttatttggatctgcgggaatgtgggctggagaggtcctgccgtggtaccagcctccagcctgcccccaggactgcccctgacccaggcgcgcccgctgctcggtggcaggagggccggcggagcgccatggcctgcatcctgaagagaaagtctgtgattgctgtgagcttcatagcagcgttccttttcctgctggttgtgcgtcttgtaaatgaagtgaatttcccattgctactaaactgctttggacaacctggtacaaagtggataccattctcctacacatacaggcggccccttcgaactcactatggatacataaatgtgaagacacaagagcctttgcaactggactgtgacctttgtgccatagtgtcaaactcaggtcagatggttggccagaaggtgggaaatgagatagatcgatcctcctgcatttggagaatgaacaatgcccccaccaaaggttatgaagaagatgtcggccgcatgaccatgattcgagttgtgtcccataccagcgttcctcttttgctaaaaaaccctgattattttttcaaggaagcgaatactactatttatgttatttggggacctttccgcaatatgaggaaagatggcaatggcatcgtttacaacatgttgaaaaagacagttggtatctatccgaatgcccaaatatacgtgaccacagagaagcgcatgagttactgtgatggagtttttaagaaggaaactgggaaggacagtacagagtgaccatgcagtgttgattgatcgaacagcaaccaccacatacatgtcctgccccaccacaaaaggaaggaaggaataaaagaaagaaagaaagaaacaaacaaacaaacaaacaaaactaagcaagacaaaacaaatacccatgtcagtggttcaaagattaagattgtggctttgtgtaaagttctttccctttgtagacttgctgcataattattcaggtatgatggttacagtttttaaaaaggaagggaaattgtggtatgtggtatgtaaatatttttaaatgttgtctctctgttttgatcagtttttgttttattcaatttgtctttattaaatcttatcaaagcaa

SEQ ID NO: 1570 - protein, 210 aa, Homo sapiens
MACILKRKSVIAVSFIAAFLFLLVVRLVNEVNFPLLLNCFGQPGTKWIPFSYTYRRPLRTHYGYINVKTQEPLQLDCDLCAIVSNSGQMVGQKVGNEIDRSSCIWRMNNAPTKGYEEDVGRMTMIRVVSHTSVPLLLKNPDYFFKEANTTIYVIWGPFRNMRKDGNGIVYNMLKKTVGIYPNAQIYVTTEKRMSYCDGVFKKETGKDSTE

SEQ ID NO: 1571 - DNA, 3149 bp, Homo sapiens
attcatgcactcttccatctttttgccattgtgccagctcaatttaaatgtatctgctctgtatctgttcaagtggagataatccatgcaaatcaggagccgtggctctcaatgcctggttcacagagaggactcagcttgaggaggtcactcgttcacagccgctcctcccattatatttttccccttattgcagaactgctgtatgtatacagtgactgaaaggactcaatttactgcaactgctgcctggctttacttacaacttttttttttttataaaggaacttacctccatctgtcttttcaaggttacagaccacttactctaaacttcacaaatggttctgaagagtatggagcctacgtagattcataagttacaagatcactgtttggcaatacgaggggatgtgtatctaaaatgacaaactgatcctggcacttgctacttattacagagcccaatgtttccaaaggacattaattttgatttctccaatgaaggcttgtggctgtccttatgctttacaaaacattaccaaatcagagccgaaaagaaaactggtatttatggcacaatgaaaaatttcatctttcccagaatgatatgaagatcaatgatgcagactgatggttttgatgaagctgggcatttataactagattcattaaggaatacaaagaaaatacttaaagggatcaataatggtgtcttctggttgcagaatgcgaagtctgtggtttatcattgtaatcagcttcttaccaaatacagaaggtttcagcagagcagctttaccatttgggctggtgaggcgagaattatcctgtgaaggttattctatagatctgcgatgcccgggcagtgatgtcatcatgattgagagcgctaactatggtcggacggatgacaagatttgtgatgctgacccatttcagatggagaatacagactgctacctccccgatgccttcaaaattatgactcaaaggtgcaacaatcgaacacagtgtatagtagttactgggtcagatgtgtttcctgatccatgtcctggaacatacaaataccttgaagtccaatatgaatgtgtcccttacagacattcactgaacaatgccagggatacaagtgccatggatactctaccgctaaatggtaattttaacaacagctactcgctgcacaagggtgactataatgacagcgtgcaagttgtggactgtggactaagtctgaatgatactgcttttgagaaaatgatcatttcagaattagtgcacaacaacttacggggcagcagcaagactcacaacctcgagctcacgctaccagtcaaacctgtgattggaggtagcagcagtgaagatgatgctattgtggcagatgcttcatctttaatgcacagcgacaacccagggctggagctccatcacaaagaactcgaggcaccacttattcctcagcggactcactcccttctgtaccaaccccagaagaaagtgaagtccgagggaactgacagctatgtctcccaactgacagcagaggctgaagatcacctacagtcccccaacagagactctctttatacaagcatgcccaatcttagagactctccctatccggagagcagccctgacatggaagaagacctctctccctccaggaggagtgagaatgaggacatttactataaaagcatgccaaatcttggagctggccatcagcttcagatgtgctaccagatcagcaggggcaatagtgatggttatataatccccattaacaaagaagggtgtattccagaaggagatgttagagaaggacaaatgcagctggttacaagtctttaatcatacagctaaggaattccaagggccacatgcgagtattaataaataaagacaccattggcctgacgcagctccctcaaactctgcttgaagagatgactcttgacctgtggttctctggtgtaaaaaagatgactgaaccttgcagttctgtgaatttttataaaacatacaaaaactttgtatatacacagagtatactaaagtgaattatttgttacaaagaaaagagatgccagccaggtattttaagattctgctgctgtttagagaaattgtgaaacaagcaaaacaaaactttccagccattttactgcagcagtctgtgaactaaatttgtaaatatggctgcaccatttttgtaggcctgcattgtattatatacaagacgtaggctttaaaatcctgtgggacaaatttactgtaccttactattcctgacaagacttggaaaagcaggagagatattctgcatcagtttgcagttcactgcaaatcttttacattaaggcaaagattgaaaacatgcttaaccactagcaatcaagccacaggccttatttcatatgtttcctcaactgtacaatgaactattctcatgaaaaatggctaaagaaattatattttgttctattgctagggtaaaataaatacatttgtgtccaactgaaatataattgtcattaaaataattttaaagagtgaagaaaatattgtgaaaagctcttggttgcacatgttatgaaatgttttttcttacactttgtcatggtaagttctactcattttcacttcttttccactgtatacagtgttctgctttgacaaagttggtctttattacttacatttaaatttcttattgccaaaagaacgtgttttatggggagaaacaaactctttgaagccagttatgtcatgccttgcacaaaagtgatgaaatctagaaaagattgtgtgtcacccctgtttattcttgaacagagggcaaagagggcactgggcacttctcacaaactttctagtgaacaaaaggtgcctattcttttttaaaaaaataaaataaaacataaatattactcttccatattccttctgcctatatttagtaattaatttattttatgataaagttctaatgaaatgtaaattgtttcagcaaaattctgcttttttttcatccctttgtgtaaacctgttaataatgagcccatcactaatatccagtgtaaagtttaacacggtttgacagtaaataaatgtgaattttttcaagtagttaacatgtg

SEQ ID NO: 1572 - protein, 383 aa, Homo sapiens
MVSSGCRMRSLWFIIVISFLPNTEGFSRAALPFGLVRRELSCEGYSIDLRCPGSDVIMIESANYGRTDDKICDADPFQMENTDCYLPDAFKIMTQRCNNRTQCIVVTGSDVFPDPCPGTYKYLEVQYECVPYRHSLNNARDTSAMDTLPLNGNFNNSYSLHKGDYNDSVQVVDCGLSLNDTAFEKMIISELVHNNLRGSSKTHNLELTLPVKPVIGGSSSEDDAIVADASSLMHSDNPGLELHHKELEAPLIPQRTHSLLYQPQKKVKSEGTDSYVSQLTAEAEDHLQSPNRDSLYTSMPNLRDSPYPESSPDMEEDLSPSRRSENEDIYYKSMPNLGAGHQLQMCYQISRGNSDGYIIPINKEGCIPEGDVREGQMQLVTSL

SEQ ID NO: 1573 - DNA, 3453 bp, Homo sapiens
attcatgcactcttccatctttttgccattgtgccagctcaatttaaatgtatctgctctgtatctgttcaagtggagataatccatgcaaatcaggagccgtggctctcaatgcctggttcacagagaggactcagcttgaggaggtcactcgttcacagccgctcctcccattatatttttccccttattgcagaactgctgtatgtatacagtgactgaaaggactcaatttactgcaactgctgcctggctttacttacaacttttttttttttataaaggaacttacctccatctgtcttttcaaggttacagaccacttactctaaacttcacaaatggttctgaagagtatggagcctacgtagattcataagttacaagatcactgtttggcaatacgaggggatgtgtatctaaaatgacaaactgatcctggcacttgctacttattacagagcccaatgtttccaaaggacattaattttgatttctccaatgaaggcttgtggctgtccttatgctttacaaaacattaccaaatcagagccgaaaagaaaactggtatttatggcacaatgaaaaatttcatctttcccagaatgatatgaagatcaatgatgcagactgatggttttgatgaagctgggcatttataactagattcattaaggaatacaaagaaaatacttaaagggatcaataatggtgtcttctggttgcagaatgcgaagtctgtggtttatcattgtaatcagcttcttaccaaatacagaaggtttcagcagagcagctttaccatttgggctggtgaggcgagaattatcctgtgaaggttattctatagatctgcgatgcccgggcagtgatgtcatcatgattgagagcgctaactatggtcggacggatgacaagatttgtgatgctgacccatttcagatggagaatacagactgctacctccccgatgccttcaaaattatgactcaaaggtgcaacaatcgaacacagtgtatagtagttactgggtcagatgtgtttcctgatccatgtcctggaacatacaaataccttgaagtccaatatgaatgtgtcccttacagacattcactgaacaatgccagggatacaagtgccatggatactctaccgctaaatggtaattttaacaacagctactcgctgcacaagggtgactataatgacagcgtgcaagttgtggactgtggactaagtctgaatgatactgcttttgagaaaatgatcatttcagaattagtgcacaacaacttacggggcagcagcaagactcacaacctcgagctcacgctaccagtcaaacctgtgattggaggtagcagcagtgaagatgatgctattgtggcagatgcttcatctttaatgcacagcgacaacccagggctggagctccatcacaaagaactcgaggcaccacttattcctcagcggactcactcccttctgtaccaaccccagaagaaagtgaagtccgagggaactgacagctatgtctcccaactgacagcagaggctgaagatcacctacagtcccccaacagagactctctttatacaagcatgcccaatcttagagactctccctatccggagagcagccctgacatggaagaagacctctctccctccaggaggagtgagaatgaggacatttactataaaagcatgccaaatcttggagctggccatcagcttcagatgtgctaccagatcagcaggggcaatagtgatggttatataatccccattaacaaagaagggtgtattccagaaggagatgttagagaaggacaaatgcagctggttacaagtctttaatcatacagctaaggaattccaagggccacatgcgagtattaataaataaagacaccattggcctgacgcagctccctcaaactctgcttgaagagatgactcttgacctgtggttctctggtgtaaaaaagatgactgaaccttgcagttctgtgaatttttataaaacatacaaaaactttgtatatacacagagtatactaaagtgaattatttgttacaaagaaaagagatgccagccaggtattttaagattctgctgctgtttagagaaattgtgaaacaagcaaaacaaaactttccagccattttactgcagcagtctgtgaactaaatttgtaaatatggctgcaccatttttgtaggcctgcattgtattatatacaagacgtaggctttaaaatcctgtgggacaaatttactgtaccttactattcctgacaagacttggaaaagcaggagagatattctgcatcagtttgcagttcactgcaaatcttttacattaaggcaaagattgaaaacatgcttaaccactagcaatcaagccacaggccttatttcatatgtttcctcaactgtacaatgaactattctcatgaaaaatggctaaagaaattatattttgttctattgctagggtaaaataaatacatttgtgtccaactgaaatataattgtcattaaaataattttaaagagtgaagaaaatattgtgaaaagctcttggttgcacatgttatgaaatgttttttcttacactttgtcatggtaagttctactcattttcacttcttttccactgtatacagtgttctgctttgacaaagttggtctttattacttacatttaaatttcttattgccaaaagaacgtgttttatggggagaaacaaactctttgaagccagttatgtcatgccttgcacaaaagtgatgaaatctagaaaagattgtgtgtcacccctgtttattcttgaacagagggcaaagagggcactgggcacttctcacaaactttctagtgaacaaaaggtgcctattcttttttaaaaaaataaaataaaacataaatattactcttccatattccttctgcctatatttagtaattaatttattttatgataaagttctaatgaaatgtaaattgtttcagcaaaattctgcttttttttcatccctttgtgtaaacctgttaataatgagcccatcactaatatccagtgtaaagtttaacacggtttgacagtaaataaatgtgaattttttcaagtagttaacatgtgaacttttatgtatgatacataattggctttaacatgttggtccattcccaccttggtttaagtaacgtcataccaaagtccatggatatatgaaaggatacaattaagttgcctgtttgttctttatgctgaaaggaatatatgtcttccaattgcccactacatatgcacaaaatctgctggataagttttaagagggatatattctgaaagcatttttgtttgttgcattgtaccaggactaaaaaaagaaggattggaagttctgccatcaaatttgggtatcataaaaagtttttaactg

SEQ ID NO: 1574 - protein, 383 aa, Homo sapiens; identical to SEQ ID NO: 1572

SEQ ID NO: 1575 - DNA, 5062 bp, Homo sapiens
aactgtgttctatgtggatccagcattacaactgataagggtatttatggcacaatgaaaaatttcatctttcccagaatgatatgaagatcaatgatgcagactgatggttttgatgaagctgggcatttataactagattcattaaggaatacaaagaaaatacttaaagggatcaataatggtgtcttctggttgcagaatgcgaagtctgtggtttatcattgtaatcagcttcttaccaaatacagaaggtttcagcagagcagctttaccatttgggctggtgaggcgagaattatcctgtgaaggttattctatagatctgcgatgcccgggcagtgatgtcatcatgattgagagcgctaactatggtcggacggatgacaagatttgtgatgctgacccatttcagatggagaatacagactgctacctccccgatgccttcaaaattatgactcaaaggtgcaacaatcgaacacagtgtatagtagttactgggtcagatgtgtttcctgatccatgtcctggaacatacaaataccttgaagtccaatatgaatgtgtcccttacatttttgtgtgtcctgggaccttgaaagcaattgtggactcaccatgtatatatgaagctgaacaaaaggcgggtgcttggtgcaaggaccctcttcaggctgcagataaaatttatttcatgccctggactccctatcgtaccgatactttaatagaatatgcttctttagaagatttccaaaatagtcgccaaacaacaacatataaacttccaaatcgagtagatggtactggatttgtggtgtatgatggtgctgtcttctttaacaaagaaagaacgaggaatattgtgaaatttgacttgaggactagaattaagagtggcgaggccataattaactatgccaactaccatgatacctcaccatacagatggggaggaaagactgatatcgacctagcagttgatgaaaatggtttatgggtcatttacgccactgaacagaacaatggaatgatagttattagccagctgaatccatacactcttcgatttgaagcaacgtgggagactgtatacgacaaacgtgccgcatcaaatgcttttatgatatgcggagtcctctatgtggttaggtcagtttatcaagacaatgaaagtgaaacaggcaagaactcaattgattacatttataatacccgattaaaccgaggagaatatgtagatgttcccttccccaaccagtatcagtatattgctgcagtggattacaatccaagagataaccaactttacgtgtggaacaataacttcattttacgatattctctggagtttggtccacctgatcctgcccaagtgcctaccacagctgtgacaataacttcttcagctgagctgttcaaaaccataatatcaaccacaagcactacttcacagaaaggccccatgagcacaactgtagctggatcacaggaaggaagcaaagggacaaaaccacctccagcagtttctacaaccaaaattccacctataacaaatatttttcccctgccagagagattctgtgaagcattagactccaaggggataaagtggcctcagacacaaaggggaatgatggttgaacgaccatgccctaagggaacaagaggaactgcctcatatctctgcatgatttccactggaacatggaaccctaagggccccgatcttagcaactgtacctcacactgggtgaatcagctggctcagaagatcagaagcggagaaaatgctgctagtcttgccaatgaactggctaaacataccaaagggccagtgtttgctggggatgtaagttcttcagtgagattgatggagcagttggtggacatccttgatgcacagctgcaggaactgaaacctagtgaaaaagattcagctggacggagttataacaaggcaattgttgacacagtggacaaccttctgagacccgaagctttggaatcatggaaacatatgaattcttctgaacaagcacatactgcaacaatgttactcgatacattggaagaaggagcttttgtcctagctgacaatcttttagaaccaacaagggtctcaatgcccacagaaaatattgtcctggaagttgccgtactcagtacagaaggacagatccaagactttaaatttcctctgggcatcaaaggagcaggcagctcaatccaactgtccgcaaataccgtcaaacagaacagcaggaatgggcttgcaaagttggtgttcatcatttaccggagcctgggacagttccttagtacagaaaatgcaaccattaaactgggtgctgattttattggtcgtaatagcaccattgcagtgaactctcacgtcatttcagtttcaatcaataaagagtccagccgagtatacctgactgatcctgtgctttttaccctgccacacattgatcctgacaattatttcaatgcaaactgctccttctggaactactcagagagaactatgatgggatattggtctacccagggctgcaagctggttgacactaataaaactcgaacaacgtgtgcatgcagccacctaaccaattttgcaattctcatggcccacagggaaattgcatataaagatggcgttcatgaattacttcttacagtcatcacctgggtgggaattgtcatttcccttgtttgcctggctatctgcatcttcaccttctgctttttccgtggcctacagagtgaccgaaatactattcacaagaacctttgtatcaaccttttcattgctgaatttattttcctaataggcattgataagacaaaatatgcgattgcatgcccaatatttgcaggacttctacactttttctttttggcagcttttgcttggatgtgcctagaaggtgtgcagctctacctaatgttagttgaagtttttgaaagtgaatattcaaggaaaaaatattactatgttgctggttacttgtttcctgccacagtggttggagtttcagctgctattgactataagagctatggaacagaaaaagcttgctggcttcatgttgataactactttatatggagcttcattggacctgttaccttcattattctgctaaatattatcttcttggtgatcacattgtgcaaaatggtgaagcattcaaacactttgaaaccagattctagcaggttggaaaacattaagtcttgggtgcttggcgctttcgctcttctgtgtcttcttggcctcacctggtcctttgggttgctttttattaatgaggagactattgtgatggcatatctcttcactatatttaatgctttccagggagtgttcattttcatctttcactgtgctctccaaaagaaagtacgaaaagaatatggcaagtgcttcagacactcatactgctgtggaggcctcccaactgagagtccccacagttcagtgaaggcatcaaccaccagaaccagtgctcgctattcctctggcacacagagtcgtataagaagaatgtggaatgatactgtgagaaaacaatcagaatcttcttttatctcaggtgacatcaatagcacttcaacacttaatcaaggacattcactgaacaatgccagggatacaagtgccatggatactctaccgctaaatggtaattttaacaacagctactcgctgcacaagggtgactataatgacagcgtgcaagttgtggactgtggactaagtctgaatgatactgcttttgagaaaatgatcatttcagaattagtgcacaacaacttacggggcagcagcaagactcacaacctcgagctcacgctaccagtcaaacctgtgattggaggtagcagcagtgaagatgatgctattgtggcagatgcttcatctttaatgcacagcgacaacccagggctggagctccatcacaaagaactcgaggcaccacttattcctcagcggactcactcccttctgtaccaaccccagaagaaagtgaagtccgagggaactgacagctatgtctcccaactgacagcagaggctgaagatcacctacagtcccccaacagagactctctttatacaagcatgcccaatcttagagactctccctatccggagagcagccctgacatggaagaagacctctctccctccaggaggagtgagaatgaggacatttactataaaagcatgccaaatcttggagctggccatcagcttcagatgtgctaccagatcagcaggggcaatagtgatggttatataatccccattaacaaagaagggtgtattccagaaggagatgttagagaaggacaaatgcagctggttacaagtctttaatcatacagctaaggaattccaagggccacatgcgagtattaataaataaagacaccattggcctgacgcagctccctcaaactctgcttgaagagatgactcttgacctgtggttctctggtgtaaaaaagatgactgaaccttgcagttctgtgaatttttataaaacatacaaaaactttgtatatacacagagtatactaaagtgaattatttgttacaaagaaaagagatgccagccaggtattttaagattctgctgctgtttagagaaattgtgaaacaagcaaaacaaaactttccagccattttactgcagcagtctgtgaactaaatttgtaaatatggctgcaccatttttgtaggcctgcattgtattatatacaagacgtaggctttaaaatcctgtgggacaaatttactgtaccttactattcctgacaagacttggaaaagcaggagagatattctgcatcagtttgcagttcactgcaaatcttttacattaaggcaaagattgaaaacatgcttaaccactagcaatcaagccacaggccttatttcatatgtttcctcaactgtacaatgaactattctcatgaaaaatggctaaagaaattatattttgttctattgctagggtaaaataaatacatttgtgtccaactg

SEQ ID NO: 1576 - protein, 1403 aa, Homo sapiens; identical to SEQ ID NO: 16

SEQ ID NO: 1577 - DNA, 5682 bp, Homo sapiens
aactgtgttctatgtggatccagcattacaactgataagggtatttatggcacaatgaaaaatttcatctttcccagaatgatatgaagatcaatgatgcagactgatggttttgatgaagctgggcatttataactagattcattaaggaatacaaagaaaatacttaaagggatcaataatggtgtcttctggttgcagaatgcgaagtctgtggtttatcattgtaatcagcttcttaccaaatacagaaggtttcagcagagcagctttaccatttgggctggtgaggcgagaattatcctgtgaaggttattctatagatctgcgatgcccgggcagtgatgtcatcatgattgagagcgctaactatggtcggacggatgacaagatttgtgatgctgacccatttcagatggagaatacagactgctacctccccgatgccttcaaaattatgactcaaaggtgcaacaatcgaacacagtgtatagtagttactgggtcagatgtgtttcctgatccatgtcctggaacatacaaataccttgaagtccaatatgaatgtgtcccttacatttttgtgtgtcctgggaccttgaaagcaattgtggactcaccatgtatatatgaagctgaacaaaaggcgggtgcttggtgcaaggaccctcttcaggctgcagataaaatttatttcatgccctggactccctatcgtaccgatactttaatagaatatgcttctttagaagatttccaaaatagtcgccaaacaacaacatataaacttccaaatcgagtagatggtactggatttgtggtgtatgatggtgctgtcttctttaacaaagaaagaacgaggaatattgtgaaatttgacttgaggactagaattaagagtggcgaggccataattaactatgccaactaccatgatacctcaccatacagatggggaggaaagactgatatcgacctagcagttgatgaaaatggtttatgggtcatttacgccactgaacagaacaatggaatgatagttattagccagctgaatccatacactcttcgatttgaagcaacgtgggagactgtatacgacaaacgtgccgcatcaaatgcttttatgatatgcggagtcctctatgtggttaggtcagtttatcaagacaatgaaagtgaaacaggcaagaactcaattgattacatttataatacccgattaaaccgaggagaatatgtagatgttcccttccccaaccagtatcagtatattgctgcagtggattacaatccaagagataaccaactttacgtgtggaacaataacttcattttacgatattctctggagtttggtccacctgatcctgcccaagtgcctaccacagctgtgacaataacttcttcagctgagctgttcaaaaccataatatcaaccacaagcactacttcacagaaaggccccatgagcacaactgtagctggatcacaggaaggaagcaaagggacaaaaccacctccagcagtttctacaaccaaaattccacctataacaaatatttttcccctgccagagagattctgtgaagcattagactccaaggggataaagtggcctcagacacaaaggggaatgatggttgaacgaccatgccctaagggaacaagaggaactgcctcatatctctgcatgatttccactggaacatggaaccctaagggccccgatcttagcaactgtacctcacactgggtgaatcagctggctcagaagatcagaagcggagaaaatgctgctagtcttgccaatgaactggctaaacataccaaagggccagtgtttgctggggatgtaagttcttcagtgagattgatggagcagttggtggacatccttgatgcacagctgcaggaactgaaacctagtgaaaaagattcagctggacggagttataacaaggcaattgttgacacagtggacaaccttctgagacccgaagctttggaatcatggaaacatatgaattcttctgaacaagcacatactgcaacaatgttactcgatacattggaagaaggagcttttgtcctagctgacaatcttttagaaccaacaagggtctcaatgcccacagaaaatattgtcctggaagttgccgtactcagtacagaaggacagatccaagactttaaatttcctctgggcatcaaaggagcaggcagctcaatccaactgtccgcaaataccgtcaaacagaacagcaggaatgggcttgcaaagttggtgttcatcatttaccggagcctgggacagttccttagtacagaaaatgcaaccattaaactgggtgctgattttattggtcgtaatagcaccattgcagtgaactctcacgtcatttcagtttcaatcaataaagagtccagccgagtatacctgactgatcctgtgctttttaccctgccacacattgatcctgacaattatttcaatgcaaactgctccttctggaactactcagagagaactatgatgggatattggtctacccagggctgcaagctggttgacactaataaaactcgaacaacgtgtgcatgcagccacctaaccaattttgcaattctcatggcccacagggaaattgcatataaagatggcgttcatgaattacttcttacagtcatcacctgggtgggaattgtcatttcccttgtttgcctggctatctgcatcttcaccttctgctttttccgtggcctacagagtgaccgaaatactattcacaagaacctttgtatcaaccttttcattgctgaatttattttcctaataggcattgataagacaaaatatgcgattgcatgcccaatatttgcaggacttctacactttttctttttggcagcttttgcttggatgtgcctagaaggtgtgcagctctacctaatgttagttgaagtttttgaaagtgaatattcaaggaaaaaatattactatgttgctggttacttgtttcctgccacagtggttggagtttcagctgctattgactataagagctatggaacagaaaaagcttgctggcttcatgttgataactactttatatggagcttcattggacctgttaccttcattattctgctaaatattatcttcttggtgatcacattgtgcaaaatggtgaagcattcaaacactttgaaaccagattctagcaggttggaaaacattaagtcttgggtgcttggcgctttcgctcttctgtgtcttcttggcctcacctggtcctttgggttgctttttattaatgaggagactattgtgatggcatatctcttcactatatttaatgctttccagggagtgttcattttcatctttcactgtgctctccaaaagaaagtacgaaaagaatatggcaagtgcttcagacactcatactgctgtggaggcctcccaactgagagtccccacagttcagtgaaggcatcaaccaccagaaccagtgctcgctattcctctggcacacagagtcgtataagaagaatgtggaatgatactgtgagaaaacaatcagaatcttcttttatctcaggtgacatcaatagcacttcaacacttaatcaaggacattcactgaacaatgccagggatacaagtgccatggatactctaccgctaaatggtaattttaacaacagctactcgctgcacaagggtgactataatgacagcgtgcaagttgtggactgtggactaagtctgaatgatactgcttttgagaaaatgatcatttcagaattagtgcacaacaacttacggggcagcagcaagactcacaacctcgagctcacgctaccagtcaaacctgtgattggaggtagcagcagtgaagatgatgctattgtggcagatgcttcatctttaatgcacagcgacaacccagggctggagctccatcacaaagaactcgaggcaccacttattcctcagcggactcactcccttctgtaccaaccccagaagaaagtgaagtccgagggaactgacagctatgtctcccaactgacagcagaggctgaagatcacctacagtcccccaacagagactctctttatacaagcatgcccaatcttagagactctccctatccggagagcagccctgacatggaagaagacctctctccctccaggaggagtgagaatgaggacatttactataaaagcatgccaaatcttggagctggccatcagcttcagatgtgctaccagatcagcaggggcaatagtgatggttatataatccccattaacaaagaagggtgtattccagaaggagatgttagagaaggacaaatgcagctggttacaagtctttaatcatacagctaaggaattccaagggccacatgcgagtattaataaataaagacaccattggcctgacgcagctccctcaaactctgcttgaagagatgactcttgacctgtggttctctggtgtaaaaaagatgactgaaccttgcagttctgtgaatttttataaaacatacaaaaactttgtatatacacagagtatactaaagtgaattatttgttacaaagaaaagagatgccagccaggtattttaagattctgctgctgtttagagaaattgtgaaacaagcaaaacaaaactttccagccattttactgcagcagtctgtgaactaaatttgtaaatatggctgcaccatttttgtaggcctgcattgtattatatacaagacgtaggctttaaaatcctgtgggacaaatttactgtaccttactattcctgacaagacttggaaaagcaggagagatattctgcatcagtttgcagttcactgcaaatcttttacattaaggcaaagattgaaaacatgcttaaccactagcaatcaagccacaggccttatttcatatgtttcctcaactgtacaatgaactattctcatgaaaaatggctaaagaaattatattttgttctattgctagggtaaaataaatacatttgtgtccaactgaaatataattgtcattaaaataattttaaagagtgaagaaaatattgtgaaaagctcttggttgcacatgttatgaaatgttttttcttacactttgtcatggtaagttctactcattttcacttcttttccactgtatacagtgttctgctttgacaaagttggtctttattacttacatttaaatttcttattgccaaaagaacgtgttttatggggagaaacaaactctttgaagccagttatgtcatgccttgcacaaaagtgatgaaatctagaaaagattgtgtgtcacccctgtttattcttgaacagagggcaaagagggcactgggcacttctcacaaactttctagtgaacaaaaggtgcctattcttttttaaaaaaataaaataaaacataaatattactcttccatattccttctgcctatatttagtaattaatttattttatgataaagttctaatgaaatgtaaattgtttcagcaaaattctgcttttttttcatccctttgtgtaaacctgttaataatgagcccatcactaatatccagtgtaaagtttaacacggtttgacagtaaataaatgtgaattttttcaagtagttaacatgtg

SEQ ID NO: 1578 - protein, 1403 aa, Homo sapiens; identical to SEQ ID NO: 16

SEQ ID NO: 1579 - DNA, 5986 bp, Homo sapiens
aactgtgttctatgtggatccagcattacaactgataagggtatttatggcacaatgaaaaatttcatctttcccagaatgatatgaagatcaatgatgcagactgatggttttgatgaagctgggcatttataactagattcattaaggaatacaaagaaaatacttaaagggatcaataatggtgtcttctggttgcagaatgcgaagtctgtggtttatcattgtaatcagcttcttaccaaatacagaaggtttcagcagagcagctttaccatttgggctggtgaggcgagaattatcctgtgaaggttattctatagatctgcgatgcccgggcagtgatgtcatcatgattgagagcgctaactatggtcggacggatgacaagatttgtgatgctgacccatttcagatggagaatacagactgctacctccccgatgccttcaaaattatgactcaaaggtgcaacaatcgaacacagtgtatagtagttactgggtcagatgtgtttcctgatccatgtcctggaacatacaaataccttgaagtccaatatgaatgtgtcccttacatttttgtgtgtcctgggaccttgaaagcaattgtggactcaccatgtatatatgaagctgaacaaaaggcgggtgcttggtgcaaggaccctcttcaggctgcagataaaatttatttcatgccctggactccctatcgtaccgatactttaatagaatatgcttctttagaagatttccaaaatagtcgccaaacaacaacatataaacttccaaatcgagtagatggtactggatttgtggtgtatgatggtgctgtcttctttaacaaagaaagaacgaggaatattgtgaaatttgacttgaggactagaattaagagtggcgaggccataattaactatgccaactaccatgatacctcaccatacagatggggaggaaagactgatatcgacctagcagttgatgaaaatggtttatgggtcatttacgccactgaacagaacaatggaatgatagttattagccagctgaatccatacactcttcgatttgaagcaacgtgggagactgtatacgacaaacgtgccgcatcaaatgcttttatgatatgcggagtcctctatgtggttaggtcagtttatcaagacaatgaaagtgaaacaggcaagaactcaattgattacatttataatacccgattaaaccgaggagaatatgtagatgttcccttccccaaccagtatcagtatattgctgcagtggattacaatccaagagataaccaactttacgtgtggaacaataacttcattttacgatattctctggagtttggtccacctgatcctgcccaagtgcctaccacagctgtgacaataacttcttcagctgagctgttcaaaaccataatatcaaccacaagcactacttcacagaaaggccccatgagcacaactgtagctggatcacaggaaggaagcaaagggacaaaaccacctccagcagtttctacaaccaaaattccacctataacaaatatttttcccctgccagagagattctgtgaagcattagactccaaggggataaagtggcctcagacacaaaggggaatgatggttgaacgaccatgccctaagggaacaagaggaactgcctcatatctctgcatgatttccactggaacatggaaccctaagggccccgatcttagcaactgtacctcacactgggtgaatcagctggctcagaagatcagaagcggagaaaatgctgctagtcttgccaatgaactggctaaacataccaaagggccagtgtttgctggggatgtaagttcttcagtgagattgatggagcagttggtggacatccttgatgcacagctgcaggaactgaaacctagtgaaaaagattcagctggacggagttataacaaggcaattgttgacacagtggacaaccttctgagacccgaagctttggaatcatggaaacatatgaattcttctgaacaagcacatactgcaacaatgttactcgatacattggaagaaggagcttttgtcctagctgacaatcttttagaaccaacaagggtctcaatgcccacagaaaatattgtcctggaagttgccgtactcagtacagaaggacagatccaagactttaaatttcctctgggcatcaaaggagcaggcagctcaatccaactgtccgcaaataccgtcaaacagaacagcaggaatgggcttgcaaagttggtgttcatcatttaccggagcctgggacagttccttagtacagaaaatgcaaccattaaactgggtgctgattttattggtcgtaatagcaccattgcagtgaactctcacgtcatttcagtttcaatcaataaagagtccagccgagtatacctgactgatcctgtgctttttaccctgccacacattgatcctgacaattatttcaatgcaaactgctccttctggaactactcagagagaactatgatgggatattggtctacccagggctgcaagctggttgacactaataaaactcgaacaacgtgtgcatgcagccacctaaccaattttgcaattctcatggcccacagggaaattgcatataaagatggcgttcatgaattacttcttacagtcatcacctgggtgggaattgtcatttcccttgtttgcctggctatctgcatcttcaccttctgctttttccgtggcctacagagtgaccgaaatactattcacaagaacctttgtatcaaccttttcattgctgaatttattttcctaataggcattgataagacaaaatatgcgattgcatgcccaatatttgcaggacttctacactttttctttttggcagcttttgcttggatgtgcctagaaggtgtgcagctctacctaatgttagttgaagtttttgaaagtgaatattcaaggaaaaaatattactatgttgctggttacttgtttcctgccacagtggttggagtttcagctgctattgactataagagctatggaacagaaaaagcttgctggcttcatgttgataactactttatatggagcttcattggacctgttaccttcattattctgctaaatattatcttcttggtgatcacattgtgcaaaatggtgaagcattcaaacactttgaaaccagattctagcaggttggaaaacattaagtcttgggtgcttggcgctttcgctcttctgtgtcttcttggcctcacctggtcctttgggttgctttttattaatgaggagactattgtgatggcatatctcttcactatatttaatgctttccagggagtgttcattttcatctttcactgtgctctccaaaagaaagtacgaaaagaatatggcaagtgcttcagacactcatactgctgtggaggcctcccaactgagagtccccacagttcagtgaaggcatcaaccaccagaaccagtgctcgctattcctctggcacacagagtcgtataagaagaatgtggaatgatactgtgagaaaacaatcagaatcttcttttatctcaggtgacatcaatagcacttcaacacttaatcaaggacattcactgaacaatgccagggatacaagtgccatggatactctaccgctaaatggtaattttaacaacagctactcgctgcacaagggtgactataatgacagcgtgcaagttgtggactgtggactaagtctgaatgatactgcttttgagaaaatgatcatttcagaattagtgcacaacaacttacggggcagcagcaagactcacaacctcgagctcacgctaccagtcaaacctgtgattggaggtagcagcagtgaagatgatgctattgtggcagatgcttcatctttaatgcacagcgacaacccagggctggagctccatcacaaagaactcgaggcaccacttattcctcagcggactcactcccttctgtaccaaccccagaagaaagtgaagtccgagggaactgacagctatgtctcccaactgacagcagaggctgaagatcacctacagtcccccaacagagactctctttatacaagcatgcccaatcttagagactctccctatccggagagcagccctgacatggaagaagacctctctccctccaggaggagtgagaatgaggacatttactataaaagcatgccaaatcttggagctggccatcagcttcagatgtgctaccagatcagcaggggcaatagtgatggttatataatccccattaacaaagaagggtgtattccagaaggagatgttagagaaggacaaatgcagctggttacaagtctttaatcatacagctaaggaattccaagggccacatgcgagtattaataaataaagacaccattggcctgacgcagctccctcaaactctgcttgaagagatgactcttgacctgtggttctctggtgtaaaaaagatgactgaaccttgcagttctgtgaatttttataaaacatacaaaaactttgtatatacacagagtatactaaagtgaattatttgttacaaagaaaagagatgccagccaggtattttaagattctgctgctgtttagagaaattgtgaaacaagcaaaacaaaactttccagccattttactgcagcagtctgtgaactaaatttgtaaatatggctgcaccatttttgtaggcctgcattgtattatatacaagacgtaggctttaaaatcctgtgggacaaatttactgtaccttactattcctgacaagacttggaaaagcaggagagatattctgcatcagtttgcagttcactgcaaatcttttacattaaggcaaagattgaaaacatgcttaaccactagcaatcaagccacaggccttatttcatatgtttcctcaactgtacaatgaactattctcatgaaaaatggctaaagaaattatattttgttctattgctagggtaaaataaatacatttgtgtccaactgaaatataattgtcattaaaataattttaaagagtgaagaaaatattgtgaaaagctcttggttgcacatgttatgaaatgttttttcttacactttgtcatggtaagttctactcattttcacttcttttccactgtatacagtgttctgctttgacaaagttggtctttattacttacatttaaatttcttattgccaaaagaacgtgttttatggggagaaacaaactctttgaagccagttatgtcatgccttgcacaaaagtgatgaaatctagaaaagattgtgtgtcacccctgtttattcttgaacagagggcaaagagggcactgggcacttctcacaaactttctagtgaacaaaaggtgcctattcttttttaaaaaaataaaataaaacataaatattactcttccatattccttctgcctatatttagtaattaatttattttatgataaagttctaatgaaatgtaaattgtttcagcaaaattctgcttttttttcatccctttgtgtaaacctgttaataatgagcccatcactaatatccagtgtaaagtttaacacggtttgacagtaaataaatgtgaattttttcaagtagttaacatgtgaacttttatgtatgatacataattggctttaacatgttggtccattcccaccttggtttaagtaacgtcataccaaagtccatggatatatgaaaggatacaattaagttgcctgtttgttctttatgctgaaaggaatatatgtcttccaattgcccactacatatgcacaaaatctgctggataagttttaagagggatatattctgaaagcatttttgtttgttgcattgtaccaggactaaaaaaagaaggattggaagttctgccatcaaatttgggtatcataaaaagtttttaactg

SEQ ID NO: 1580 - protein, 1403 aa, Homo sapiens; identical to SEQ ID NO: 16

(The sequence listing continues in the following parts.)
